United States Patent Application Publication US 2026/0234654 A1, published August 13, 2026 (application 18/571,967).

The application's sequence listing, which the Patent Office published only in electronic form, follows.

SEQUENCE LISTING (33191 sequences)

SEQ ID NO: 1 - DNA, 742 bp, Artificial sequence
  synthetic
ttaaaacagctctggggttgtacccaccccagaggcccacgtggcggctagtactccggtattgcggtacccttgtacgcctgttttatactcccttcccgtaacttagacgcacaaaaccaagttcaatagaagggggtacaaaccagtaccaccacgaacaagcacttctgtttccccggtgatgtcgtatagactgcttgcgtggttgaaagcgacggatccgttatccgcttatgtacttcgagaagcccagtaccacctcggaatcttcgatgcgttgcgctcagcactcaaccccagagtgtagcttaggctgatgagtctggacatccctcaccggtgacggtggtccaggctgcgttggcggcctacctatggctaacgccatgggacgctagttgtgaacaaggtgtgaagagcctattgagctacataagaatcctccggcccctgaatgcggctaatcccaacctcggagcaggtggtcacaaaccagtgattggcctgtcgtaacgcgcaagtccgtggcggaaccgactactttgggtgtccgtgtttccttttattttattgtggctgcttatggtgacaatcacagattgttatcataaagcgaattggattggccatccggtgaaagtgagactcattatctatctgtttgctggatccgctccattgagtgtgtttactctaagtacaatttcaacagttatttcaatcagacaattgtatcata

SEQ ID NO: 2 - DNA, 747 bp, Artificial sequence
  synthetic
ttaaaacagctctggggttgttcccaccccagaggcccacgtggcggccagtacactggtatcgcggtacctttgtacgcctgttttatactcccttcccccgtaacttagaagcacaacgtccaagttcaatagaagggggtacaaaccagtaccaccacgaacaagcacttctgttcccccggtgaggctgtataggctgtttccacggctaaaagcggctgatccgttatccgctcatgtacttcgagaagcctagtatcaccttggaatcttcgatgcgttgcgctcaacactcaaccccagagtgtagcttaggtcgatgagtctggacgttcctcaccggcgacggtggtccaggctgcgttggcggcctacctgtggcccaaagccacaggacgctagttgtgaacaaggtgtgaagagcctattgagctacctgagagtcctccggcccctgaatgcggctaatcctaaccacggagcaggcagtggcaatccagcgaccagcctgtcgtaacgcgcaagttcgtggcggaaccgactactttgggtgtccgtgtttccttttatttttacaatggctgcttatggtgacaattattgatagttatcataaagcaaattggattggccatccggtgagaatttgattattaaattactctcttgttgggattgctcctttgaaatcctgtgcactcacacctattggaattacctcattgttgagatattattaccact

SEQ ID NO: 3 - DNA, 747 bp, Artificial sequence
  synthetic
ttaaaacagctctggggttgctcccaccccagaggcccacgtggcggccagtactctggtattgcggtacctttgtacgcctgttttatactccctccccccgtgcaactttagaagaaatccacaaagttcaatagagggggtgcaaaccagcaccaccacgaacaagcacttctgtttccccggtgatgtcgtataagctgtacccacggctgaaggcgacggatccgttatccgcttgagtacttcgagaagcctagtattaccttggaatcttcgacgcgttgcgctcagcactctaccccgagtgtagcttaggtcgatgagtctgggcacgccccaccggcgacggtggcccaggctgcgttggcggcctacccatggctatcaccatgggacgctagttgtgaacaaggtgtgaagagcctattgagctacccaagagtcctccggcccctgaatgcggctaatcctaaccacggagcaagtgtcctcaacccaggggatggcttgtcgtaacgcgaaagtctgtggcggaaccgactactttgggtgtccgtgtttccttttatttttatgtatggctgcttatggtgacaatcaaaggttgttaccataaagcaatttggattggccatccggtgagaatcaaacatattatctacctgtttgttgggttttcttcttttacttgaacaatacctctaataataactgctatattgtcaataagacattatcatcaca

SEQ ID NO: 4 - DNA, 626 bp, Artificial sequence
  synthetic
ttaaaactgggtgtgggttgttcccacccacaccacccaatgggtgttgtactctgttattccggtaactttgtacgccagtttttccctcccctccccatccttttacgtaacttagaagttttaaatacaagaccaatagtaggcaactctccaggttgtctaaggtcaagcacttctgtttccccggttgatgttgatatgctccaacagggcaaaaacaacagataccgttatccgcaaagtgcctacacagagcttagtaggattctgaaagatctttggttggtcgttcagctgcatacccagcagtagaccttgcagatgaggctggacattccccactggtaacagtggtccagcctgcgtggctgcctgcgcacctctcatgaggtgtgaagccaaagatcggacagggtgtgaagagccgcgtgtgctcactttgagtcctccggcccctgaatgcggctaaccttaaacctgcagccatggctcataagccaatgagtttatggtcgtaacgagtaattgcgggatgggaccgactactttgggtgtccgtgtttcactttttcctttattaattgcttatggtgacaatatatatattgatatatattggcatc

SEQ ID NO: 5 - DNA, 610 bp, Artificial sequence
  synthetic
ttaaaactggatccaggttgttcccacctggatttcccacagggagtggtactctgttattacggtaactttgtacgccagttttatctcccttcccccatgtaacttagaagtttttcacaaagaccaatagccggtaatcagccagattactgaaggtcaagcacttctgtttccccggtcaatgttgatatgctccaacagggcaaaaacaactgcgatcgttaaccgcaaagcgcctacgcaaagcttagtagcatctttgaaatcgtttggctggtcgatccgccatttcccctggtagacctggcagatgaggctagaaataccccactggcgacagtgttctagcctgcgtggctgcctgcacaccctatgggtgtgaagccaaacaatggacaaggtgtgaagagccccgtgtgctcgctttgagtcctccggcccctgaatgtggctaaccttaaccctgcagctagagcacgtaacccaatgtgtatctagtcgtaatgagcaattgcgggatgggaccaactactttgggtgtccgtgtttcactttttcctttatatttgcttatggtgacaatatatacaatatatatattggcacc

SEQ ID NO: 6 - DNA, 626 bp, Artificial sequence
  synthetic
ttaaaacagcggatgggtaccccaccatccgacccactgggtgtagtactctggtacttcgtacctttgtacgcctgttcttcccattgtacccttcctgaacttccaacccaagtaacgttagaagctcaacatttagtacaacaggaagcaccacatccagtggtgtttagtacaagcacttctgtttccccggagcgaggtataggctgtacccactgccaaaaacctttaaccgttatccgccaaccaactacgtaaaagctagtagtattatgtttttaactaggcgttcgatcaggtggatttcccctccactagtttggtcgatgaggctaggaattccccacgggtgaccgtgtcctagcctgcgtggcggccaacccagcttatgctgggacgcctttttatagacatggtgtgaagactcgcatgtgcttggttgtgattcctccggcccctgaatgcggctaaccttaaccctggagccttgtgtcacaaaccagtgatgataaggtcgtaatgagcaattccgggacgggaccgactactttgggtgtccgtgtttcttatttttcttattattgtcttatggtcacagcatatatataacatatactgtgatc

SEQ ID NO: 7 - DNA, 711 bp, Artificial sequence
  synthetic
ttaaaacagctctggggttgttcccaccccagaggcccacgtggcggccagtactctggtattgcggtacctttgtacgcctgttttatatcccctccccaagtaactttagaagcaattcacaaagttcaatagagggggtacaaaccagtaccaccatgaacaagcacttctgtttccccggtgaagctgtatagactgttcccacggtcgaaaatggcagatccgttatccgctcacgtacttcgagaagcctagtatcatcttggaatcttcgacgcgttgcgctcagcactctaccccgagtgtagcttaggccgatgagtctgggcataccccaccggcgacggtggcccaggctgcgttggcggcctacccatggctaatgtcatgggacgctagttgtgaacaaggtgtgaagagcctattgagctacttgagagtcctccggcccctgaatgcggctaatcctaaccatggagcaagtgcccacaagccagtgggtggcttgtcgtaatgcgcaagtctatggcggaaccgactactttgggtgtccgtgtttccttttattcttattatggctgcttatggtgacaacctaagattgttgtcatatagcttttggattggccatccggtgatctttgagattaatataccttccttattacttcatagtactcatttattcattacactactgtagttaca

SEQ ID NO: 8 - DNA, 745 bp, Artificial sequence
  synthetic
ttaaaacagcctgtgggttgttcccacccacagggcccactgggcgctagcacactgattctacgggatccttgtgcgcctgttttataatccttcccccaagtagcaacttagaagctttgtacaatcacgaccagtagtgggcgtggcgcgccagtcacgtcttggtcaagcacttctgtatccccggactgagtatcaatagactgctcacgcggttgaaggagaaaacgttcgttacccggctaactacttcgagaaacccagtagcaccgtgaaagttgcggagtgtttcgctcagcacttcccccgtgtagatcaggtcgatgagtcactgtaaaccccacgggcgaccgtgacagtggctgcgttggcggcctgcccatggggtaacccatgggacgctctaatacagacacggtgtgaagagtctattgagctagttagtagtcctccggcccctgaatgcggctaatcctaactgcggagcgcgcaccctcaacccagggggcggcgtgtcgtaatgggtaactctgcagcggaaccgactactttgggtgtccgtgtttccttttattccttattggctgcttatggtgacaattgaaaagttgttaccatatagctattggattggccatccggtgtctaatagagctattgtttacttatttattggatacgtccctcttaatctcaaagtcattcaaactcttgattatatattgctccttaactgtaagaa

SEQ ID NO: 9 - DNA, 742 bp, Artificial sequence
  synthetic
ttaaaacagcctgtgggttgatcccacccacagggcccactgggcgctagcacactggtattacggtacctttgtgcgcctgttttatctacccttgcccaatgcaacatagaagcttagtccaaaaggtcaataggcagcccagtgcaccaactgggtccagaccaagcacttctgttaccccggaccaagtatcagtaggctgctcacgcggtgaaggagaaaacgttcgttacccggccaactacttcgagaaacctagtagcaccatgaaggttgcgcagtgtttcgctccgcacagccccagtgtagatcaggtcgatgagccaccgcattccccacggggtgaccgtggcgggtggctgcgttggcggcctgcccatggggtaacccatgggacgcttcaatactgacatggtgtgaagagtctattgagctagttggtagtcctccggcccctgaatgcggctaatcctaactgcggagcgtgcgcttgcaacccagtgagtagcacgtcgtaatgggtaactctgcagcggaaccgactactttgggtgtccgtgtttcctttattccttgtctggctgcttatggtgacaattgagagattgttgccatatagctattggattggccatccggtatctaacagggcgatcatttacctgtttgttggtttcatacccttgaatcttgaggtttataataccctcactcttataataaaactcaatacatcaag

SEQ ID NO: 10 - DNA, 742 bp, Artificial sequence
  synthetic
ttaaaacagcctgtgggttgatcccacccacagggcccattgggcgctagcactctggtatcacggtacctttgtgcgcctgttttataccccctcccccaactgtaacttagaagtaacacacaccgatcaacagtcagcgtggcacaccagccacgttttgatcaagcacttctgttaccccggactgagtatcaatagactgctcacgcggttgaaggagaaagcgttcgttatccggccaactacttcgaaaaacctagtaacaccgtggaagttgcagagtgtttcgctcagcactaccccagtgtagatcaggtcgatgagtcaccgcattccccacgggcgaccgtggcggtggctgcgttggcggcctgcccatggggaaacccatgggacgctctaatacagacatggtgcgaagagtctattgagctagttggtagtcctccggcccctgaatgcggctaatcctaactgcggagcacacaccctcaagccagagggcagtgtgtcgtaacgggcaactctgcagcggaaccgactactttgggtgtccgtgtttcattttattcctatactggctgcttatggtgacaattgagagattgttaccatatagctattggattggccatccggtgaccaatagagctattatatatctctttgttgggtttataccacttagcttgaaagaggttaaaacattacaattcattgttaagttgaatacagcaaa

SEQ ID NO: 11 - DNA, 748 bp, Artificial sequence
  synthetic
ttaaaacagcctgtgggttgcacccactcacagggcccacgtggcgctagcactctggttctacggaacctttgtgcgcctgttttacgccccttcccccaatttgcaacttagaagcaatacacaacactggtcaacagtaggcatggcgcaccagccatgtcttgatcaagcacttctgtttccccggaccgagtatcaatagactgctcacgcggttgaaggagaaagcgtccgttatccggctaactacttcgagaaacttagtaacaccattgaagctgcagagtgtttcgctcggcacttcccccgtgtagatcaggtcgatgagtcactgcaatccccacgggtgaccgtggcagtggctgcgctggcggcctgcctatggggtaacccataggacgctctaatgcggacatggtgcgaagagtctattgagctagttagtggtcctccggcccctgaatgcggctaatcctaactgcggagcacatgccttcaatccagagggtagtgtgtcgtaatgggcaactctgcagcggaaccgactactttgggtgtccgtgtttccttttattcttatattggctgcttatggtgacaattacagaattgttaccatatagctattggattggccatccggtgtgcaatagagctattatatacctatttgttggctttgtgccactaaccttaaaatctataaccaccctcgactttatactaaccctcaatacagtcaaac

SEQ ID NO: 12 - DNA, 748 bp, Artificial sequence
  synthetic
ttaaaacagcctgtgggttgtacccacccacagggcccactgggcgctagcacactgatttcacggaatccttgtgcgcctgttttacaccccctccccccaactcagtaacttagaagttgtaaacacacgtggccaacagcgggcgtagcgcaccagctatgtcttggtcaagcacttctgtttccccggacagagtatcaataagctgcttgcgcggctgaaggagaaaatgttcgttacccggtcaactacttcgagaaacctagtagcatcatgaatgttgcgaggcgtttcgctcagcacttcccccgtgtagatcaggtcgatgagtcactgcactccccacgggcgaccgtggcagtggctgcgttggcggcctgcccatggggtgacccatgggacgcttcaatacggacatggtgtgaagagtctattgagctagttgataatcctccggcccctgaatgcggctaatcctaactgcggagcacataccctcaacccagggggcggtgtgtcgtaacgggcaactctgcagcggaaccgactactttgggtgtccgtgtttccttttatacttatactggctgcttatggtgacaattgaagaattgttaccatatagctattggattggccatccggtgactaacagagctattatatatttatttgttggatttgttccattaacatacacatctttcagcactttacacctcattttacaatacaatacaagaaa

SEQ ID NO: 13 - DNA, 742 bp, Artificial sequence
  synthetic
ttaaaacagcctgtgggttgcacccactcacagggcccactgggcgcaagcactctggtacctcggtacctttgtgcgcctgttttacaccccccccccagtgaaacttagaagcagcaaaccacgatcaatagcgggcataacgctccagttatgtcttgatcaagcacttctgtttccccggactgagtatcaatagactgctcgcgcggttgaaggagaaaacgttcgttatccggctagctacttcgggaaacctagtaacaccatgaaagttgcggagagcttcgttcagcactcccccagtgtagatcaggtcgatgagtcaccgcattccccacgggcgaccgtggcggtggctgcgttggcggcctgcccatggggtaacccatggggcgctctaatacggacatggtgtgaagagtctactgagctagttagtagtcctccggcccctgaatgcggctaatcccaactgcggagcacacgcccacaagccagcgggtagcgtgtcgtaacgggtaactctgcagcggaaccgactactttgggtgtccgtgtttctttttatctttatactggctgcttatggtgacaattaaagaattgttaccatatagctattggattggccatccggtgtgcaacagagcaattgtttacctattcattggtttcgtaccattaaccttgaagtctgtgaccacccttaactacatcttgacccttaacacagctaaac

SEQ ID NO: 14 - DNA, 743 bp, Artificial sequence
  synthetic
ttaaaacagcctgtgggttgttcccacccgcagggcccactgggcgctagcacactggtatcccggtacccttgtgcgcctgttttatataccctcccccttatgtaacttagaagtatgattcaaacggtcgacaggcggctcagtgcaccaactgagtcatgaccaagcacttctgttaccccggactgagtatcaataagctgttcacacggctgaaggagaaaacgttcgttacccggccaattacttcgagaaacctagtaccaccatgaaggttgcgcagtgtttcgctccacacaaccccagtgtagatcaggtcgatgagtcaccgcattccccacgggcgaccgtggcggtggctgcgttggcggcctgcccatggggcaacccatgggacgcttcaatactgacatggtgtgaagagtctattgagctaattggtagtcctccggcccctgaatgcggctaatcccaactgtggagcagatactcacaaaccagtgagcggtctgtcgtaacgggcaactccgcagcggaaccgactactttgggtgtccgtgtttctttttattcttacattggctgcttatggtgacaattgacaaattgttaccatatagctattggattggccatccggtgacaaacagagctattgtttacttgtttgttggtttcataccattaaattacaaggtcttagaaactctcaactttattttgacactcaatacagcaaa

SEQ ID NO: 15 - DNA, 611 bp, Artificial sequence
  synthetic
ttaaaactggatctgggttgttcccactcagatctcccacgtggagtagtacactattattacggtaatcttgtacgccagttttataatccccttacccaagtaacttagaagataaacacaaagaccaataggagatgatcatccagatcatcataggtcaagcacttctgtttccccggtcaaggttgatatgctctaacagggcaaaaacagctgagatcgttatccgcaaagcgcctacgcaaagcctagtaactatctggaagttgcttggttggtcgctccgccatatcccatggtagacctggcagatgaggctagaaattccccactggtgacagtgttctagcctgcgtggctgcctgcacaccctctgggtgtgaaaccaagtaatggacagggtgtgaagagccccgtgtgctcgctttgagtcctccggcccctgaatgtggctaaccttaaccctgcagctagggcacacaatccagtgtgtatctagtcgtaatgagcaattgcgggatgggaccaactactttgggtgtccgtgtttcttgtttttcttttatgtttgcttatggtgacaatatatagtaatatatrttggcatc

SEQ ID NO: 16 - DNA, 614 bp, Artificial sequence
  synthetic
ttaaaactgggtccaggttgttcccacctggatctcctattgggagttgtactctattattccggtaattttgtacgccagttttatctccccttccccaattgcaacttagaagtttatcaatatgaccaataggcggtagttagccaaactaccagaggtcaagcacttctgtttccccggtcaaagttgatatgctccaacagggcaaaaacaactgagatcgttatccgcaaagtgcctacgcaaagcctagtaacacctttgaagatttatggttggtcgttccgctatttcccatagtagacctggcagatgaggctagaaattccccactggcgacagtgttctagcctgcgtggctgcctgcgcaccccttgggtgcgaagccatacattggacaaggtgtgaagagccccgtgtgctcactttgagtcctccggcccctgaatgtggctaaccttaaccctgcagctagtgcatgtaatccaacatgttgctagtcgtaatgagcaattgcgggacgggaccaactactttgggtgtccgtgtttcactttttccttttaatattgcttatggtgacaatatatataaacatatatattgacacc

SEQ ID NO: 17 - DNA, 544 bp, Artificial sequence
  synthetic
ttgtttgatgccagttttatctccccccccaattgcaacttagaagatgtacacaaagaccaataggcagtggtcacccagaccactgaaggtcaagcacttctgtctccccggtcaaagttgatatgctccaacagggcaaaaacaacttagatcgttatccgcaaagtgcctacgcaaagcttagtaccatctttgagagcctatggttggtcgctccactgaaccccacagtagacctggcagatgaggctagaagacccccactggcgacagtgttctagcctgcgtggctgcctgcacacccttacgggtgtgaagccatatgtttgacaaggtgcgaagagccccgtgtgctcactttgagtcctccggcccctgaatgtggctaaccttaaccctgcagctagtgcacacaagccagtgtgttgctagtcgtaatgagcaattgcgggatgggaccaactactttgggtgtccgtgtttcactttttacctttattttgcttatggtgacaatatatatagtatatatattggcacc

SEQ ID NO: 18 - DNA, 618 bp, Artificial sequence
  synthetic
ttaaaactgggagtgggttgttcccactcactccacccatgcggtgttgtactctgttattacggtaactttgtacgccagtttttcccacccttccccataatgtaacttagaagtttgtacaatatgaccaataggtgacaatcatccagactgtcaaaggtcaagcacttctgtttccccggtcaatgaggatatgctttacccaaggcaaaaaccttagagatcgttatccccacactgcctacacagagcccagtaccatttttgatataattgggttggtcgctccctgcaaacccagcagtagacctggcagatgaggctggacattccccactggcgacagtggtccagcctgcgtggctgcctgctcacccttcttgggtgagaagcctaattattgacaaggtgtgaagagccgcgtgtgctcagtgtgcttcctccggcccctgaatgtggctaaccttaaccctgcagccgttgcccataatccaatgggtttgcggtcgtaatgcgtaagtgcgggatgggaccaactactttgggtgtccgtgtttcctgtttttcttttgattgcattttatggtgacaatttatagtgtatagattgtcatc

SEQ ID NO: 19 - DNA, 611 bp, Artificial sequence
  synthetic
ttaaaactgaatccagattgttcccatctggatttcctacatggagttgtactctattattccggtaattttgtacgccagttttatcaccccttcccccgtaacttagaagtttgaaacaaaagaccaataggaggtaactatccaagttactataggtcaagcacttctgtttccccggtcaaagttgatatgctccaccagggcaaaaacaattgagatcgttatccgcaaagtgcctacgcaaagcctagtagtatcttgaaaagcatgtggttggttgctccgctgtaccccacagtaaacctggcagatgaggctagaagttccccactggtgacagtgttctagcctgcgtggctgcctgcgcactctttgagtgcgaagccatatgtttgacaaggtgtgaagagccccgtgtgctcactttgagtcctccggcccctgaatgtggctaaccttaaccctgcagctagtgcatgcaatccagcatgtggctagtcgtaatgagcaattgcgggatgggaccaactactttgggtgtccgtgtttcacttttttccttttataattgcttatggtgacaatatatagtgatatatattgacacc

SEQ ID NO: 20 - DNA, 625 bp, Artificial sequence
  synthetic
ttaaaacagcggatgggtttcccaccatccgacccactgggtgtagtgctctggtattttgtacctttgcacgcctgtttcccatttgtacccttccttaatctccttcccccgtaacgttagaagttttggaattttaaagtacaataggaagcgccacatccagtggtgttgcgtacaaatacttctgtttacccggagcgaggtataggttgtacccacggccaaaagcctttaaccgttatccgccaatcaactacgtaacggctagtatcatcttgcttttgatttggtgttcgatcaggtggtatcccccactagtctggtcgatgaggctaggaattccccacgggcgaccgtgtcctagcctgcgtggcggccagcccagcttttgctgggacgccttttcaaagacatggtgtgaagacctgcatgtgcttggttgtgagtcctccggcccctgaatgcggctaaccttaaccctggagcccagcagcataatccaatgttgtttgggtcgtaatgagcaattccgggacgggaccgactactttgggtgtccgtgtttccttttattcttacattgtcttatggtcacagcatatatattatatatactgtgatc

SEQ ID NO: 21 - DNA, 618 bp, Artificial sequence
  synthetic
tttaaacagcggatgggttccccaccatccgacccactgggtgtagtactctggtattttgtacctttgtacgcctgtttctcccctacctcccaacctaaacaatcctggtaacttagaagacttaaatcatcgtacaataggtgctgtcacatccagtgacggctagtacaagcacttctgtttccccggagcggagtataaatggccaccgctgtcaaaagctcttaaccgttatccgccaattaactacgcaacggctagtaacatcttgttatttttagggcgttcgatcaggtgagtaaacccctcactagtctggtcgatgaggctgagaattccccacgggcgaccgtgtctcagcctgcgtggcggccagcccagctaatgctgggacgccttaattgtgacatggtgtgaagacccacgtgtgcttaattgtgagtcctccggcccctgaatgcggctaacctaaaccctggagccttgagacacaatccagtgttggcaaggtcgtaatgagtaattccgggacgggaccgactactttgggtgtccgtgtttccttttattttcaaattgttcttatggtcacaatataagtaatatattgtgatc

SEQ ID NO: 22 - DNA, 632 bp, Artificial sequence
  synthetic
ttaaaacagcgggtgggtatcccaccacccgacccactgggtgttgtacactggtattttgtacctttgtatgcctgtttgcacctccccaccccttccaattacccttacccgaattrtattatgcggtaacattagaagaagtgaacacagtgcaataggacgtatcacatccagtgatataaagcacaagcaattcttgttccccggagctggatatagactgctaacgtggttgaaggtccttaaccgttatccgccaaccaactacgagacggctagtaatatcatgtttgtctttgagcgttcgatcaggtgaattccccattcactagtttggtcgatgaggctgagaactccccacaggtgactgtgtctcagcctgcgtggcggccaacccagccacggctgggacgcccactgatagacatggtgtgaagacccaattgtgcttggttgtgactcctccggcccctgaatgcggctaacctcaaccccggagccttgtagtgtaagccaacacatacaaggtcgtaatgggcaactctgggacgggaccgactactttgggtgtccgtgtttcctttatttttatcttttgtgtcttatggttacaagtattgattgtaacc

SEQ ID NO: 23 - DNA, 630 bp, Artificial sequence
  synthetic
tttaaacagcggatgggtatcccaccatccgacccactgggtgtagtactctggtattttgtacctttgtacgcctgttgttcctaatgtacccaccctaaaacttcctacccaagtaacgttagaagtttcatcaacaagtacaataggaagcatcacatccagtggtgttttgtacaagcacttctgtttccccggagcgaggtataggctgtacccactgccgaaagcctttaaccgttatccgccaaccaactacgtaaaagctagtatcatcatgttttaaaataggcgttcgatcaggtggatcccccctccactagtttggtcgatgaggctaggaactccccacgggtgaccgtgtcctagcctgcgtggcggccaacccagcttctgctgggacgcctttttatggacatggtgtgaagactcgcatgtgcttggttgtgactcctccggcccctgaatgcggctaaccttaaccccggagccctgtgttgcaatccagtaacattagggtcgtaatgagcaatttcgggacgggaccgactactttgggtgtccgtgtttctcatttttcttattattgtcttatggtcacagcatatatataacgtatatactgtgatc

SEQ ID NO: 24 - DNA, 627 bp, Artificial sequence
  synthetic
ttaaaacagcggatgggtatcccaccatccggcccactgggtgtagtactctggtacattgtacctttgtacgcctgttttccccctcttgtacccgcccttcaagctccttgcccaagtaacgttagaagtttgaacattggtacaataggaagcatcacatccagtggtgtactgtacaaacacttctgttgccccggagcgaggtatagatggtccccaccgtcaaaagcctttaaccgttatccgccaatcaactacgtaatggctagtagcaccttggatttaagttggcgttcgatcaggtggtaacccccactagtttggtcgatgaggctaggaattccccacgggtgaccgtgtcctagcctgcgtggcggccaacccagcatccgctgggacgccaatttaatgacatggtgtgaagacctgcatgtgcttgattgtgagtcctccggcccctgaatgcggctaaccctaaccccggagccttgcagcacaatccagtgttgttaaggtcgtaatgagcaattctgggatgggaccgactactttgggtgtccgtgtttcttatttttcttgaatttttcttatggtcacagcatatatacattatatactgtgatc

SEQ ID NO: 25 - DNA, 612 bp, Artificial sequence
  synthetic
ttaaagctggatcatggttgttcccaccatgattacccacgcggtgcagtggtcttgtattacggtacatttccataccagttttatacaccccaccccgaaactcatagaagtttgtacacaatgaccaataggtggtggccatccaggtcgctaatggtcaagcacttctgtttccccggcacccttgtatacgcttcacccgaggcgaaaaatgaggttgtcgttatccgcaaagtgcctacgaaaagcctagtaacactttgaaaacccatggttggtcgctcagctgtttacccaacagtagacctggcagatgaggctagacattccccaccagcgatggtggtctagcctgcgtggctgcctgcacaccctgccgggtgtgaagccagaaagtggacaaggtgtgaagagcctattgtgctcactttgagtcctccggcccctgaatgtggctaaccctaaccccgtagctgttgcatgtaacccaacatgtatgcagtcgtaatgggcaactatgggatgggaccaactactttgggtgtccgtgtttcctgttttactttttcattgcttatggtgacaattgtatctgatacacttgttacc

SEQ ID NO: 26 - DNA, 618 bp, Artificial sequence
  synthetic
ttaaaactggatacaggttgttcccacctgtatcacccaagtggtgtggtgctcttgtatttcggtacgtttgcacgccagtttgctaccccttcccttttacgtaacttagaagtttacacaaagaccaataggcggtggtaaatccataccactaacggtcaaatacttctgtttccccggcatgcgaggaataggctccaaaagggctgaagccactagtgtcgttatccgcattggtactacgcaaagcctagtattaccttgaaaatttcttggctggtcgctccaccagataccccactggtagacctggcagatgaggcaggacttaccccactggcgacagtggtcctgcctgcgtggctgcctgcacaccccttacggggtgtgaagcccagaaacagacaaggtgtgaagagccccgtgtgctactagtgagtcctccggcccctgaatgcggctaatcttaccccacagctgttgcacgcaaaccagcgtgtatgcagtcgtaatgagcaattgtgggatggaaccgactactttgggtgtccgtgtttctttttattcctattatttgcttatggtgacaatattgatattatcagtgttgtcatc

SEQ ID NO: 27 - DNA, 607 bp, Artificial sequence
  synthetic
ttaaaacagctgtgtggttgttcccaccaccaggcacactgtgcgttgtacactgggattccggtcactttgtacgcctgtttgctatcccccccaacttatgtaatttagaagatgtacacaacgcccattaggatgcggccaaaccaggtccgcttagggcaagcacttctgtttccccgggtgtgtgaatagactctaacagggttgaagctgtagcactcgttatccgcgcaactactacgcgaatgttagtagcatcctgtgttgcatttgggatttcgctccgcagaaaaccccatctgtagattagggcaatgaggctacacataccccactggcgacagtggtgtagcctgcgtggtgccctacccaggccttcttggcctgggattccacttacaagacagggtgtgaaggcactagtgtgctagttgtgagtcctccggcccctgaatgcggctaatcttaaccccgtagcccccgcaagtaaaccaacttgtaggtggtcgtaatgagtaattacgggatggaaccgactactttgggtgtccgtgtttccttttattctttatatttgcatcctatggttacaacataagtaatc

SEQ ID NO: 28 - DNA, 741 bp, Artificial sequence
  synthetic
ttaaaacagcctgtgggttgttcccacccacaggcccattgggcgctagcactctggtatcacggtacctttgtgcgcctgttttacatcccctccccaaattgtaatttagaagtttcacacaccgatcattagcaagcgtggcacaccagccatgttttgatcaagcacttctgttaccccggactgagtatcaatagaccgctaacgcggttgaaggagaaaacgttcgttacccggccaactacttcgaaaaacctagtaacaccatggaagttgcggagtgtttcgctcagcactaccccagtgtagatcaggtcgatgagtcaccgcgttccccacgggcgaccgtggcggtggctgcgttggcggcctgcctacggggaaacccgtaggacgctctaatacagacatggtgcgaagagtctattgagctagttggtaatcctccggcccctgaatgcggctaatcctaactgcggagcacataccctcaaaccagggggcagtgtgtcgtaacgggcaactctgcagcggaaccgactactttgggtgtccgtgtttcattttattcctatactggctgcttatggtgacaattgacaggttgttaccatatagttattggattggccatccggtgactaacagagcaattatatatctctttgttgggtttataccacttagcttgaaagaggttaaaacactacatctcatcattaaactaaatacaacaaa

SEQ ID NO: 29 - DNA, 742 bp, Artificial sequence
  synthetic
ttaaaacagcctgtgggttgttcccacccgcagggcccactgggcgccagcactctggtatcacggtacctttgtgcgcctgttttaaaaccctctccccaatttgaaacttagaagcaatacacctcgatcaatagtaggcatgacacgccagccatgtcttgatcaagcacttctgtttccccggactgagtatcaataaactgcttgcgcggtcgaaggagaaaacgtccgttacccgactaactacttcgagaaacccagtaacaccatggaaattgcggagtgtttcactcagcacattcccagtgtagatcaggtcgatgagtcaccgcattccccacgggtgaccgtggcggtggctgcgctggcggcctgcccatggggcaacccatgggacgcttcaatatggacatggtgtgaagagtctattgagctagttagtagtcctccggcccctgaatgcggctaatcctaactgcggagcacgtgcctccattccagggggtggcgtgtcgtaacgggcaactctgcagcggaaccgactactttgggtgtccgtgtttcttttaattttatactggctgcttatggtgacaattgaaagattgttgccatatagctattggattggccatccggtatccaacagagcaattgtgtacctttttgttggatttgtaccacttaccagaacaagttttcatacactgtgttacattattagactaaacacagaaaa

SEQ ID NO: 30 - DNA, 743 bp, Artificial sequence
  synthetic
ttaaaacagcctgtgggttgttcccacccacagggcccactgggcgttagcacactggtatcacggtacctttgtgcgcctgttttatactcccccccctaaggaaactttagaagcaaagcaattgtgatcaatagtgggtatggcacaccagtcatatcttgatcaagcacttctgttcccccggacttagtaccaatagactgctcaagcggttgaaggggaaaacgttcgttatccggccaactacttcgagaaacctagtagcaccatgaaagttgcggagtgtttcgctcagcacttcccccgtgtagatcaggctgatgagtcaccgtattccccacgggcgaccgtgacggtggctgcgttggcggcctgcccatggggtaacccatgggacgctctaaaacagacacggtgcgaagagtctattgagctagttggtagtcctccggcccctgaatgcggccaatcctaactgcggagcacatactcccaatccagggagcagtgtgtcgtaatgggtaactctgcagcggaaccgactactttgggtgtccgtgtttccttttattctcacattgactgcttatggtgacaattgaaagattgttaccatatagctattggattggtcatccggtgagcaatagagctattgtttatcaatttgttggatttgtaccactcaacttttctgttttgagaacactcaactacatcttactgctaaacacatcaaa

SEQ ID NO: 31 - DNA, 751 bp, Artificial sequence
  synthetic
ttaaaacagcctgtgggttgtacccacccacagggcccactgggcgctagcacactggtatcacggtacctttgtgcgcctgttttatacccccttcccgcaaccgcaaatttagaagcaaagctaacccgatcgatagcggatgcgcatgccagccgcattttgatcaagtacttctgtttccccggaccgagtatcaatagactgctcacgcggttgaaggagaaaacgtccgttacccgaccaactacttcgagaaacctagtaacatcatgaatgttgcagggcgtttcgatcagcacgaccctggtgtagatcaggctgatgagtcaccgcattccccacgggtgaccgtggcggtggctgcgttggcggcctgcctatggggtgacccataggacgctctaatacggacatggtgcgaagagtctattgagctagttggtagtcctccggcccctgaatgcggttaatcctaactgcggacgacatacccctaatccaaggggcagtgtgtcgtaacgggcaactctgcagcggaaccgactactttgggtgtccgtgtttccttttatttttatactggctgcttatggtgacaatctcagagttgttaccatatagctattggattggccatccggtgagcaacagagctgtcatttatcagtttgttggctttatacctctaaatcacacggttttttttttttggaacgcttgtattcatcttaaccctcaataaggcaaa

SEQ ID NO: 32 - DNA, 743 bp, Artificial sequence
  synthetic
ttaaaacagcctgtgggttgtacccacccacagggcccactgggcgctagcactctggtattacggtacccttgtgcgcctgttttatataccccgccccaagcaaacgctagatgtaacgcacttatgatcaatagcaggcgtggcactccagccacgttatgatcaagcacttctgtctccccggaccgagtatcaatagactgctcacgcggtcgaaggagaaaacgttcgttacccgaccagctacttcgagaaacctagtaactccatggaggttgcagagtgtttcgttcagcacttcccccgtgtagatcaggctgatgagtcaccgcgttcctcacgggcgaccgtggcggtggctgcgttggcggcctgcctatgggtatacccataggacgctctaatactgacatggtgcgaagagtctattgagctagttggtagtcctccggcccctgaatgcggctaatcctaactgcggagcacatacccccaacccagggggcagtgtgtcgtaacgggtaactctgcagcggaaccgactactttgggtgtccgtgtttccttttattcttacattggctgcttatggtgacaattgagagattgttaccatatagctattggattggccatccagtgactaacagagctattatttacctttttgttggcttcgtatcacttggtttaaaagaggttagtactttatattgcattatattactaaacacgagaaa

SEQ ID NO: 33 - DNA, 744 bp, Artificial sequence
  synthetic
ttaaaacagctctggggttgtacccaccccagaggcccacgtggcggctagtactccggtattacggtacccttgtacgcctgttttatactccctccctcgtaacttagaagcacaaaaccaagttcaatagaagggggtgcaaaccagtaccaccacgaacaagcatttctgtttccccggtgatgttgtatagactgcccgcgcggttgaaagcaacggatccgttacccgctcaagtacttcgagaagcctagtattaccttggaatcttcgatgcgttgcgttcagcactcgaccctggagtgtagcttaggctgatgagtctggacgtccctcaccggtgacggtggtccaggctgcgttggcggcctacctatggctaacgccataggacgctagttgtgaacaaggtgtgaagagcctattgagctacttgagagtcctccggcccctgaatgcggctaatcctaaccatggagcaggcggtcacagaccagtgactagcttgtcgtaatgcgcaagtctatggcggaaccgactactttgggtgtccgtgtttccttttatttttattatggctgcttatggtgacaatcattgattgttatcataaagcgaattggattggccatccggtgaaagcgagacttactatttacttacttgttggacttaccacacttaatacatttattctaggtgtcacttgtatagcaattagaatcaaacagttgcatcata

SEQ ID NO: 34 - DNA, 714 bp, Artificial sequence
  synthetic
ttaaaacagcctgtgggttgttcccaccccagaggcccacgtggcggccagtactctggtatcacggtacctttgtacgcctgttttatatccccttcccccgcaacttagaagaaaacaaatcaagttcactaggagggggtacaaaccagtaccaccacgaacaagcacttctgtttccccggtgatgtcgtatagactgtaaccacggttgaaaacgattgatccgttatccgctcttgtacttcgaaaagcccagtatcaccttggaatcttcgatgcgttgcgctcagcactcaaccccagagtgtagcttaggtcgatgagtctggacactcctcaccggcgacggtggtccaggctgcgttggcggcctacctgtggtccaaagccacaggacgctagttgtgaacaaggtgtgaagagcctattgagctacaagagaatcctccggcccctgaatgcggctaatcctaaccacggagcaagggtacacaaaccagtgtatatcttgtcgtaacgcgcaagtctgtggcggaaccgactactttgggtgtccgtgtttccttttgtttttatcatggctgcttatggtgacaatctaagattgttatcatatagctgttggattggccatccggtaatttattgagatttgagcatttgcttgtttcttcaacaatttcacctattcattgcatttcagcagtcaaa

SEQ ID NO: 35 - DNA, 653 bp, Artificial sequence
  synthetic
gagtgttcccacccaacaggcccactgggtgttgtactctggtattacggtacctttgtacgcctattttatttcccccccctttttgaaacttagaagttaataataaacacgctcactaggtgcactacatccagtagtgtaatgagcaagcacttctgtctyccccgggagggatatatggtacgctgtgcaaacggcggaaattaatcctaccgttaaccgcccacctactccgagaagcctagtacctaattggatttatcaatggagttgcgctcagcaggtgaccctgacctgccagctccggctgatggacctgggctttccccacaggcgactgtggcccaggtcgcgtggcggccggcccacccccctgggtgggacgccttgataatgacaaggtgggaagagcctattgggctagctggtttcctccggcctcctgaatgcggctaaccttaaccccagagcatatggtagcaacccagctactagtatgtcataatgcgtaagtctgggatgggaccgactactttggagagtccgtgtttctattgtttctttaatcaatcttatggtgacaatttatagtgccctgagtattgattggttgttgcttttgacaattattgagacatcacatagacata

SEQ ID NO: 36 - DNA, 722 bp, Artificial sequence
  synthetic
ttaaaatagcctgtgggttgctcccacccacagggcccaagtggcgtagtacttggtattccggtacctttgtacacctatttacaaaccctaccccttgtaaccttagaagcaattatttaaccgctcactagggggtgtgctatccaagcacatcaagagcaagcacttctgtctccccgggaggggctaatggtacgctgtgcccacggcggaaatgagccctaccgttaaccggcagtctacttcgggaagcccagtaactacattgaaactttgaggcgttacactcagcacataaccccaatgtgtagttctggtcgatgagccttggcatcccccacaggcgactgtggccaaggctgcgttggcggccagcctgcggaccaaaagtccgtaggacgcctaattgtggacatggtgtgaagagcctactgagctagactgtagtcctccggcccctgaatgcggctaatcctaaccctggagcatccgcgtgcaacccagtacgtagggtgtcgtaatgcgtaagtctgggatggaaccgactactttgggtgtccgtgtttcttgtttttcatactgggtcgcttatggttacaactaattgttgtaatcattggcagtgcgcgctgaccacgcgattattgatatttccatttgttggatactccaatagtgtcaactcatatacacaacttttaccactgatcaagataaaa

SEQ ID NO: 37 - DNA, 666 bp, Artificial sequence
  synthetic
ttaaaatagctgctgggttgttcccatccagcaggcccactgggcgtgatactctggtattgcggtacctttgtatgcctattttacctcccttccccctgaaacttagaagaaagaaacaaacacgctcactaggtacactgcatccagcagtgtaatgagcaagcacttctgtttccccggaagggatatatggtacgctgtgcaaacggcggaaattaatcctaccgttaaccgcccatctactccgagaagcctagtacctaattgaacttatcaatggagttgcgctcagcaggtgaccctgacctgccagctccggctgatggacctgggcatcccccacaggcgactgtggcccaggtcgcgtggcggccggcccactcttttgagtgggacgccttgataatgacaaggtgggaagagcctattgggctagctggtttcctccggcctcctgaatgcggctaaccctaaccccggagcatatggtggcaacccagccactggtatgtcgtaacgcgtaagtctgggatgggaccgactactttggagagtccgtgtttccattattttctttattgaatcttatggtgacaaattgggagttactcgggtgacgattgattattacttctgaaaacgtagagatatagaatcaacaca

SEQ ID NO: 38 - DNA, 743 bp, Artificial sequence
  synthetic
ttaaaacagcctgtgggttgttcccacccacagggcccactgggcgctagcacactggtatcacggtacctttgtgcgcctgtttgacttaccctccccaaacgcaacttagaagcacaacttaaatggtcaataggcggctcagtatgccaactgagtctcgatcaagcacttctgttaccccggactgagtaccaataggctgctcacgcggctgaaggggaaaccgttcgttacccgactaactacttcgagaaacctagtaccaccatgaaagttgcgcagcgtttcgctccgcacaaccccagtgtagatcaggtcgatgagtcaccgcaaaccccacgggcgaccgtggcggtggctgcgctggcggcctgcccatggggcaactcatgggacgcttcaatactgacatggtgcgaagagtctattgagctagttggtagtcctccggcccctgaatgcggctaatcctaactgcggagcagatacccacgcaccagtgggcagtctgtcgtaatgggcaactctgcagcggaaccgactactttgggtgtccgtgtttccttttgttcttatactggctacttatggtgacaattgagagattgtaaccatattgctattggattggccacccggcgacgaatagaacagttgcttacctgtttgttagtctcgtatcactgaactacaaatccttaaacaccctttaatttcgtcataacgctcaatacgttaaa

SEQ ID NO: 39 - DNA, 626 bp, Artificial sequence
  synthetic
ttaaaacagcggatgggtatcccaccatccgacccactgggtgtagtactctggtactttgtacctttgtacgcctgttcttcccattgtacccttcctaaacttccaacccaagtaacgttagaagctcaactttcagtacaataggaagcaccacatccagtggtgtttagtacaagcacttctgtttccccggagcgaggtataggctgtacccactgccaaaagcctttaaccgttatccgccaaccaactacgtaaaagctagtaacatcatgtttgtaaatgggtgttcgatcaggtggatttcccctccactagtttggtcgatgaggctaggaattccccacgggtgaccgtgtcctagcctgcgtggcggccaacccagcgtatgctgggacgcctttttatagacatggtgcgaagactcgcatgtgcttggttgtgagtcctccggcccctgaatgcggctaaccctaaccctggagccttgagtcacaatccagtgatggcaaggtcgtaatgagcaattccgggatgggaccgactactttgggtgtccgtgtttctcatttttcttattattgtcttatggtcacagcatatatagtatatatactgtgatc

SEQ ID NO: 40 - DNA, 631 bp, Artificial sequence
  synthetic
ttaaaacagcgggtgggtatcccaccacccgacccactgggtgtggtacactggtactttgtacctttgtatgcctgtttgcttccactcccctttacctaatattcttccccaagtatattttgcggtaacgttagaagaagcaaagttagtgcaataggatgtatcacaaccagtggtataaagcacaagcaattcttgttccccggagctggatatagactgctaacgtggtcaaaagtccttaaccgttatccgccagctaactgcgagaagactagtaacaccatgtttgtttttagacgttcgatcaggtgaataccccattcactagtttggtcgatgaggctgagaataccccacaggtaactgtgtctcagcctgcgtggcggccaacccgactcatgtcgggacgcctactaatagacatggtgtgaagatcctattgcgcttagttgtgagtcctccggcccctgaatgcggctaaccctaaccccggagccttgtggtgtaaaccaacatttgcaaggtcgtaatgagtaattctgggatgggaccgactactttgggtgtccgtgtttcctttatttttattgtgtgtgtcttatggttacaaatacaatttgtaatc

SEQ ID NO: 41 - DNA, 627 bp, Artificial sequence
  synthetic
ttaatacagcggatgggtatcccaccatccgacccactgggtgtagtactctggtattatgtacctttgtacgcctgttcttcccattgtacccttcccaaatttccaacccaagtaacgttagaagtttgacattaaagtacaataggaggcaccacatccagtggtgttttgtacaagcacttctgtttccccggagcgaggtataggctgtacccactgccaaaaacctttaaccgttacccgccagccaactacgtaaaagctagtaacatcttgtttgtaacttggcgttcgatcaggtggattccccctccactagtttggtcgatgaggctaggaactccccacgggtgaccgtgtcctagcctgcgtggcggccaacccagctcttgctgggacgcccttttatagacatggtgtgaagactcgcatgtgcttggttgtgattcctccggcccctgaatgcggctaaccctaaccctggagccttgtgttacaaaccagtaatattaaggtcgtaatgagcaattccgggacgggaccgactactttgggtgtccgtgtttctcatttttcttattattgtcttatggtcacagcatatttgttaaatatactgtgatc

SEQ ID NO: 42 - DNA, 584 bp, Artificial sequence
  synthetic
tactctggtattatgtacctttgtacgcctgtttcttccctacaaccccttcctaaaactcccacccatgaaacgttagaagcttgacatttaagtacaataggtggcaccacatccagtggtgtctacgtacaagcacttctgtttccccggagcgaggtataggctgtacccactgccaaaagcctttaaccgttatccgccaaccaactacgtaacagctagtatcatcttgttcttcactggacgttcgatcaggtggattccccctccactagtttggtcgatgaggctaggagctccccacgggtgaccgtgtcctagcctgcgtggcggccaacccagctcatgctgggacgcccttttaaggacatggtgtgaagactcgcatgtgcttggttgtgagtcctccggcccctgaatgcggctaaccttaaccctggagccttatgccacgaaccagtggttgtaaggtcgtaacgagcaattccgggatgggaccgactactttgggtgtccgtgtttcctatttttctttatattgtcttatggtcacagcatatatataagtatatactgtgatc

SEQ ID NO: 43 - DNA, 627 bp, Artificial sequence
  synthetic
ttaaaacagcggatgggtatcccaccatccgacccacagggtgtagtgctctggtattttgtacctttgcacgcctgtttccccattgtacccctccttaaatttcctccccaagtaacgttagaagtttaaggaaacaaatgtacaataggaagcatcacatccagtggtgttatgtacaagcacttctgtttccccggagcgaggtataagtggtacccaccgccgaaagcctttaaccgttatccgccaatcaactacgtaatggctagtattaccatgtttgtgacttggtgttcgatcaggtggttccccccactagtttggtcgatgaggctaggaactccccacgggtgaccgtgtcctagcctgcgtggcggccaacccagcttttgctgggacgcctttttacagacatggtgtgaagacctgcatgtgcttgattgtgagtcctccggcccctgaatgcggctaaccttaaccccggagccttgcaacataatccaatgttgttgaggtcgtaatgagtaattctgggatgggaccgactactttgggtgtccgtgtttccttttattctttatattgtcttatggtcacagcatatatagcatatatactgtgatc

SEQ ID NO: 44 - DNA, 622 bp, Artificial sequence
  synthetic
ttaaaacagcggatgggttccctaccatccgacccactgggtgtagtactctggtactctgtacctttgtacgcctgtttatccactacccttttcctaaattttccacccgtgtaaccttagaagcaaacaaattgtacaatagggtgcatcacaaccagtgatgtacagtacaagcacttctgtttccccggagcggggtatagacggtcaccactgtcaaaagcccttaaccgttacccgccaaccaactacgtaacggctagtaacaccatgaatttgtcttgacgttcgatcaggtggtaaccccccactagtttggtcgatgaggctgagaactccccacgggtaaccgtgtctcagcctgcgtggcggccaacccagcttctgctgggacgccaattcattgacatggtgtgaagacctgcatgtgcttggttgtgattcctccggcccctgaatgcggctaaccctaaccccggagccacgcggcataatccaatgtcgtatgggtcgtaatgagtaattctgggatgggaccgactactttgggtgtccgtgtttcctgtttttccaaattattcttatggtcacagcatataaatagatatatactgtgatc

SEQ ID NO: 45 - DNA, 632 bp, Artificial sequence
  synthetic
ttaaaacagcgggtgggtatcccaccacccgacccactgggtgtggtacactggtactttgtacctttgtatgcctgtttgcatccccttccctttacctaacatccctccccaagttatattttgcggtaacgttagaagaagtgaacatagtgcaacaggaagtatcaccaccagtgatataacgcacaagcaattcttgttccccggagctggatatagactgctaacgtggttgaaagtccttaaccgttatccgccaatcaactgcgaaaagactagtaacatcatgcacatttctaggtgttcgatcaggtgaaaaccccattcactagtttggtcgatgaggctgagagtaccccacaggcgactgtgtctcagcctgcgtggcggccaacccgacttatgtcgggacgcctattaatagacatggtgtgaagatcctattgcgcttagctgtgagtcctccggcccctgaatgcggctaaccttaaccccggagtcttgtgatgtaagccaacatttgcaaggtcgtaatgagtaattctgggatgggaccgactactttgggtgtccgtgtttcctttattcttatcatttgtgtttcatggttacaagcattgtttgtaatc

SEQ ID NO: 46 - DNA, 622 bp, Artificial sequence
  synthetic
ttaaaacagcggatgggtatcccaccatccgacccactgggtgtagtactctggtactctgtacctttgtacgcctgtttctcctcaaccctcccctacccgttatatatctcagtaacttagaagaattcattaccgcacaatagggaccgttgtaaccagcaacggtcagtgcaagcacttctgtttccccggagcggagtatagacggccactgctgtcaaaagctcttaaccgttacccgccagtatactacacaacagctagtaacatcttgttgttcttagggcgttcgatcaggtgagtttaccccctcactagtctggtcgatgaggctgagaaatccccacgggtgaccgtgtctcagcctgcgtggcggccagcccagcttatgctgggacgccttaagtatgacatggtgtgaagactcgcgtgtgcttagctgtgagtcctccggcccctgaatgcggctaacctaaaccccggagccttgaggcacaatccagtgcccgcgaggtcgtaacgagaaattctgggacgggaccgactactttgggtgtccgtgtttccttttatctttttgatgttcttatggttacaatatataaagtatattgtaatc

SEQ ID NO: 47 - DNA, 624 bp, Artificial sequence
  synthetic
ttaaaacagcggatgggtatcccaccatccgacccactgggtgtagtactctggtattatgtacctttgtacgcctgtttctcccccccattacccctccccacatatcccagtaacttagaagaattaaattatcgcacaataggagctattacaaccagtaatagttagtgcaagtacttctgtttccccggagcggagtatagatggccaccgctgtcaaaagctcttaaccgttatccgccagtatactacgtaacggctagtaacatcttgttgtgcttaaggtgttcgatcaggtgaagagacacccccttcactagtctggtcgatgaggctgagaaatccccacgggcgaccgtgtctcagcctgcgtggcggccagcccagcttatgctgggacgccttaagtatgacatggtgtgaagacccgcatgtgcttaactgtgagtcctccggcccctgaatgcggctaaccttaaccctggagccttggggtacaatccagtgctaacaaggtcgtaacgagcaattccgggacgggaccgactactttgggtgtccgtgtttccttttatttcattattgttcttatggttacaatatatagagtatattgtaatc

SEQ ID NO: 48 - DNA, 620 bp, Artificial sequence
  synthetic
ttaaaacagcggatgggtatcccaccatccgacccactgggtgtagtactctggtactttgtacctttgtacgcctgtttctccctcccttcccaacctaaacaatccttgtaacttagaaggtttcgattatcgcacaatagggactattgcaaccagcaatagtcagtgcaagcacttctgtttccccggagcggagtgtagatggccaccgctgtcaaaagctcttaaccgttatccgccagtatactacgcaacggctagtagtgccttgttgcttttatggcgttcgatcaggcgagatttaccccctcgctagtctggtcgatgaggctgagaattccccacgggcgaccgtgtctcagcctgcgtggcggccagcccagcctttgctgggacgccttgattgcgacatggtgtgaagacccgcgtgtgcttaactgtgagtcctccggcccctgaatgcggctaacctaaaccctggagccttgaaacacaacccagtgttcgcaaggtcgtaacgagcaattccgggacgggaccgactactttgggtgtccgtgtttcctttattctttcaattgttcttatggtcacaatataagtgttatattgtgatc

SEQ ID NO: 49 - DNA, 622 bp, Artificial sequence
  synthetic
ttaaaacagctgatgggttccccaccatccgacccaatgggtgtagtactctggtattctgtacctttgtacgcctgtttctccccacccccccgtcctaaataatcccagtaacttagaagatttgaattatcgtacaataggtgctgtcacatccagtgatggctagtacaagcacttctgtttccccggagcggagtatagatggccaccgctgtcaaaagctcttaaccgttatccgccaattaactacgcaacggttagtaacatcttgtcatttttgaggcgttcgatcaggtgagtacacccctcactagtctggtcgatgaggctgagaattccccacgggcgaccgtgtctcagcctgcgtggcggccagcccagcttatgctgggacgccttaattgtgacatggtgcgaagacccacgtgtgcttaattgtgagtcctccggcccccgaatgcggctaacctaaaccccggagccttgagacacaatccagtgttagcaaggtcgtaacgagcaattctgggacgggaccgactactttgggtgtccgtgtttcctgttattctcaaattgttcttatggtcacaatataagtaatatatatattgtgatc

SEQ ID NO: 50 - DNA, 630 bp, Artificial sequence
  synthetic
ttaaaacagcggatgggttctcccaccatccgacccactgggtgtagtactctggtatgatgtacctttgtacgcctgtttattcccaaacccccacccgttattcgcccaacccctgtaacgttagaagtttggaacttaattgtacaatagggagcaccatatccaatggtgtaacgtacaagcacttctgtttccccggagcgaggtataggtggtacccactgccgaaagcctttaaccgtcatccgccaatcaactacgtaacagctagtaacatcttgttgttgattggacgttcgatcaggtggttcaccccccactagtttggtcgatgaggctgggaatcccccacgggtgaccgtgtcccagcctgcgtggcggccaacccagcttatgctgggacgccctttcaatgacatggtgtgaagactcgcatgtgcttgattgtgagtccgccggcccctgaatgcggctaaccctaaccctggagccttgcaccacaatccagtggtgtctgggtcgtaatgagtaattctgggatgggaccgactactttgggtgtccgtgtttctcatttttcttttaattgtcttatggtcacagcatatagtattatatactgtgatc

SEQ ID NO: 51 - DNA, 624 bp, Artificial sequence
  synthetic
ttaaaacagcggacgggtatcccaccatccggctcactgagcgtagtactctggtattgtgtacctttgtacgcctgttttccccaaatcccctaccctttatatctcctaccccgtaacgtaagaagttttcaaacagtacaataggaagcaccacatccagtggtgttatgtacaagcacttctgtttccccggagcgaggtataggtggtcaccaccgccaaaagcctttaaccgttacccgccaaccaactacgtaatggctagtaacatcattgatttagattggcgttcgatcaggtggtatccccccactagtttggtcgatgaggctaggaataccccacgggtgaccgtgtcctagcctgcgtggcggccaacccagcatacgctgggacgccagtttactgacatggtgcgaagacttgcatgtgcttggttgagagtcctccggcccctgaatgcggctaaccttaaccccggagcctcgcagcataatccaatgttgtagaggtcgtaacgagtaattctgggatgggaccgactactttgggtgtccgtgtttcctgtttttctttaaaatgtcttatggtcacagcatatatactgtatatactgtgatc

SEQ ID NO: 52 - DNA, 484 bp, Artificial sequence
  synthetic
gtacaataggttgcactacatccagtggtgtttcgtacaagcacttctgtttccccggagcggggtatagacggtacccactgtcaaaagcccttaaccgttatccgccaatcaactacgtaatggctagtaacatcatgaaggtgagttgacgttcgatcaggtggtaacccccactagtttggtcgatgaggctaggaatcccccacgggtaaccgtgtcctagcctgcgtggcggccaacccagcgtttgctgggacgccaattcactgacatggtgcgaatacttgcatgtgcttgattgtgattcctccggcccctgaatgcggctaaccttaaccccggagccttgcagcataaaccaatgttgtggaggtcgtaatgagcaattctgggatgggaccgactactttgggtgtccgtgtttcctgtttttctcaaattgtcttatggtcacagcatatatattgtatatactgtgatc

SEQ ID NO: 53 - DNA, 621 bp, Artificial sequence
  synthetic
ttaaaacagcggatgggtatcccaccatccggcccactgggcgtagtacactggtattctgtacctttgtacgcctgtttgccgcccctcccccttttattaccacatttgtggtcgctgcaacgttagaagattttaaagtagtgcaataggaagcatcacaaccagtggtgttatgcacaaacacttctgtttccccggagcgaggtatagacggtccccactgtcaaaagcctttaaccgttatccgccaaccaactacgagacagctagtaatgccctgttctcctgcaaggcgttcgatcagacagatttcccctctgttagtctggtcgatgaggctagaagtaccccacaggtaactgtgttctagcctgcgtggcggccagcccagcttctgctgggacgcctttcaagagacatggtgtgaagactcaattgtgcttggttgtgagtcctccggcccctgaatgcggctaaccttaaacccggtaccatgctatgcaaaccagcatagttatggtcgtaatgggcaactctgggatgggaccgactactttgggtgtccgtgtttccatttttactttttgtgtcatttatggttacaattaagttgtaacc

SEQ ID NO: 54 - DNA, 631 bp, Artificial sequence
  synthetic
ttaaaacagcggatgggtaccctaccatccgacccactgggtgtagtacactggtacattgtacctttgtacgcctgtttctccctattgtaccttccctcacaatcctaacccctgtaacgttagaagatgtgcaactcgtgcaataggagatactgcaaccagtggtatcaagcacaagaacttctgtttcctcggagcggagtatagatggtccccaccgtcaaaagctcttaaccgttatccgccaatcaactacgtgacgactggtagcatcattttgacactttgacgttcgatcaggtaggcttaccccacctactagtttggccgatgaggctgggagtccctcacaggtaactgtgtcccagcctgcgtggcggccaacccagcaattgctgggacgccaatttgttgacatggtgtgaagatcttaatgtgcttggttgtgagtcctccggcccctgaatgcggctaaccttaaccccggagccttgtgtcacaagccagtgacattaaggtcgtaatgagtaatttcgggatgggaccgactactttgggtgtccgtgtttcctgtttttctttatgattgtcttatggtcacagcatatagtaattatatactgtgatc

SEQ ID NO: 55 - DNA, 620 bp, Artificial sequence
  synthetic
ttaaaacagcggatgggtttcccaccatccgacccactgggtgtagtactctggtacattgtacctttgtacgcctgtttctcccctccctcccaacctatacaatcccggcaacttagaagatttgaactattgtacaataggcgctgtcacatccagtggcggctagtacaagcacttctgtttccccggagcggagtatagatggccaccgctgtcaaaagctcttaaccgttatccgccaattaactacgcaacggctagtaatatcatgtaacttttagggtgttcgatcaggtgagtgtacccctcactagtctggtcgatgaggctgagaattccccacgggcgaccgtgtctcagcctgcgtggcggccagcccagcttatgctgggacgccttaattgtgacatggtgtgaagacccacgtgtgcttaattgtgagtcctccggcccctgaatgcggctaacctaaaccctggagccttgaaacacaatccagtgttagcaaggtcgtaatgagtaattccgggacgggaccgactactttgggtgtccgtgtttccttttatttttaagttgttcttatggtcacaatataagtaatatatattgtgatc

SEQ ID NO: 56 - DNA, 628 bp, Artificial sequence
  synthetic
ttaaaacagtggatgggtttcctaccatccgacccactgggtgtagtgctctggtatattgtacctttgcacgcctgttttcccattgtacccttccttaaattcctccccatgtaacgttagaagtttaagaacataaatgtacaataggaagcatcacatccagtggtgtatggtacaagcacttctgtttatccggagcgaggtataagcggtacccactgctgaaagcctttaaccgtataccgccaatcaactacgtaacggctagtattaccttgtttgcaatctggcgttcgatcaggtggttccccccactagtttggtcgatgaggctaggagttccccacgggcgaccgtgtcctagcctgcgtggcggccaacccagcatttgctgggacgcctttttgtagacatggtgtgaagacctgcatgtgcttgattgtgagtcctccggcccctgaatgcggctaaccttaaccccggagccttgtgacataatccaatgtcattaaggtcgtaatgagcaattctgggacgggaccgactactttgggtgtccgtgtttctctttattctttacattgtcttatggtcacagcatatataatacatatatactgtgatc

SEQ ID NO: 57 - DNA, 625 bp, Artificial sequence
  synthetic
ttaaaacagcggatgggtttcccaccatccgacccactgggtgtagtgctctggtattttgtacctttgcacgcctgtttcccctttgtacccatcctgaatttcctccctctgcaacgttagaagtttgtgaaattaaaagtacaataggaagcatcacatccagtggtgttcagtacaagcactcctgtttccccggagcgaggtataggttgtacccacgaccgaaagcctttaaccgttatccgccaatcaactacataacggctagtatcatcatgtttttgatctggcgttcgatcaggtggtttcccccactagtctggtcgatgaggctaggatttccccacgggcgaccgtgtcctagcctgcgtggcggccagcccagcttatgctgggacgcctttttaaagacatggtgtgaagacctgcatgtgcttgattgtgagtcctccggcccctgaatgcggctaaccttaaccctggagcccgacagcataatccaatgttgtttgggtcgtaatgagcaattccgggatgggaccgactactttgggtgtccgtgtttctttttattcttatattgtcttatggtcacagcatatatagtatatatactgtgatc

SEQ ID NO: 58 - DNA, 625 bp, Artificial sequence
  synthetic
ttaaaacagcgggtgggtatcccaccacccgacccactgggtgtagtacactggtattttgtacctttgtatgcctgtttgccatccctccctctcctcttacccttacccttattttgcggtaactttagaagtttgtaaatcacgcgcaatagggtataccacatccagtggtatgaagcacaagcaattcttgttccccggagctggatataaactgctaacgtggttgaaagtccttaaccgttatccgccagttaactgcgagaagactagtaactccatgtttgtttttaagcgttcgatcaggtggataccccattcactagtttggtcgatgaggctgggaatcccccacaggtaactgtgtctcagcctgcgtggcggccaacccagcttttgctgggacgcttactgacagacatggtgtgaagatcctattgcgcttaactgtgagtcctccggcccctgaatgcggctaacctcaaccccggagccttgtggtgtaaaccaacactcgcaaggtcgtaacgagtaattctgggacgggaccgactactttgggtgtccgtgtttcctttatttcttattgattgtctcctatggttacaaatttactgtaatc

SEQ ID NO: 59 - DNA, 632 bp, Artificial sequence
  synthetic
ttaaaacagcgggtgggtatcccaccacccgacccactgggtgtggtacactggtactttgtacctttgtatgcctgtttgcatccctttcccctcgcctaacatccttccccaaagtatattttgcggtaacgttagaagaagtgaactcagtgcaacaggaagtatcaccaccagtgatataatgcacaagcaattcttgttccccggagctggatatagactgctaacgtggttgaaagtccttaaccgttatccgccagctaactgcgagaagactagtaacatcatgtacatttctagacgttcgatcaggtgaataccccattcactagtttggtcgatgaggctgagagttccccacaggtgactgtgtctcagcctgcgtggcggccaacccgacttatgtcgggacgcctattaatggacatggtgcgaagatcctattgcgcttagctgtgagtcctccggcccctgaatgcggctaaccttaaccccggagccttgtggtgcaaaccagcatttgcaaggtcgtaatgagcaattctgggatgggaccgactactttgggtgtccgtgtttcctttattcttattatttgtgtttcatggttacaagcatagtttgtaatc

SEQ ID NO: 60 - DNA, 626 bp, Artificial sequence
  synthetic
ttaaaacagcggatgggtttcccaccatccgacccactgggtgtagtgctctggtattttgtacccttgcacgcctgtttcccatttgtacccttccttaatttcctacccctgtaacattagaagttttggaattttacggtacaataggaagcgccacatccagtggtgttgtgtacaagcacttctgtttacccggagcgaggtataggttgtacccacggccaaaaaccttcaaccgttatccgccaaccaactacgtaacggctagtatcatcttgtatttgacttggcgttcgatcaggtggtatcccccactagtctggtcgatgaggctaggaattccccacgggcgaccgtgtcctagcctgcgtggcggccagcccagctttagctgggacgccttttcaaagacatggtgtgaagacctgcatgtgcttggttgtgagtcctccggcccctgaatgcggctaaccttaaccccggagcccagtgacataatccaatgttatttgggtcgtaatgagtaattccgggatgggaccgactactttgggtgtccgtgtttccttttattctttatattgtcttatggtcacagcatatatagtatatatactgtgatc

SEQ ID NO: 61 - DNA, 631 bp, Artificial sequence
  synthetic
ttaaaacagcggatgggttctcccaccatccgacccactgggtgtagtactctggtattatgtacctttgtacgcctgtttattcccaaaccccctcccgttacatttccaacccctgtaacgttagaagtttggaacttaacagtacaataggaggcaccatatccaatggtgtaatgtacgagcacttctgtttccccggagcgaggtataggtggtacccaccgctgaaagcctttaaccgttatccgccaatcaactacgtaacagctagtagcattttgttgttgactggacgttcgatcaggtggtttacccccccactagtttggtcgatgaggctggaaattccccacgggtgaccgtgttccagcctgcgtggcggccaacccagctcatgctgggacgccctttcaatgacatggtgtgaagactcgcatgtgcttgattgtgaatcctccggcccctgaatgcggctaaccctaaccccggagccttgcatcacaatccagtgatgttagggtcgtaatgagtaattctgggatgggaccgactactttgggtgtccgtgtttctcatttttctttgaattgtcttatggtcacagcatatagtaatatatactgtgatc

SEQ ID NO: 62 - DNA, 633 bp, Artificial sequence
  synthetic
ttaaaacagcgggtgggtatcccaccacccgacccactgggtgtggtacactggtactttgtacctttgtatgcctgtttgcatcccttttcccttcacctaacatcctcccccaaagtatattttgcggtaacgttagaagaagtgaactcagtgcaacaggaagtatcaccaccagtgatataacgcacaagcaattcttgttccccggagctggatatagactgctaacgtggtcaaaagtccttaaccgttatccgccagctaactgcgagaagactagtaacatcatgcacatttctagacgttcgatcaggtgaataccccattcactagtttggtcgatgaggctgagagttccccacaggtgactgtgtctcagcctgcgtggcggccaacccgacttatgtcgggacgcctattaatggacatggtgtgaagatcctattgcgcttagctgtgagtcctccggcccctgaatgcggctaaccttaaccccggagccttgtggtgcaaaccagcatttgcaaggtcgtaatgagcaattctgggatgggaccgactactttgggtgtccgtgtttcctttattcttattatttgtgtttcatggttacaagcatagtttgtaatc

SEQ ID NO: 63 - DNA, 624 bp, Artificial sequence
  synthetic
ttaaaacagcggatgggtatcccaccatccgacccactgggtgtagtactctggtattatgtacctttgtacgcctgtttctccctccctaccaccccgccccacgtatcccgtaacttagaagaattgaacaatcgcacaataggagctattacaaccagtaatagttggtgcaagcacttctgtttccccggagcggagtatagacggccaccgctgtcaaaagctcttaaccgttacccgccagctaactacgtaacggctagtaacatcttgtcgtgcttagggtgttcgatcaggtgaagaaaaacccccttcactagtctggtcgatgaggctgagaagtccccacgggtaaccgtgtctcagcctgcgtggcggccagcccagcatatgctgggacgccttaagtatgacatggtgtgaagacccgcatgtgcttagctgtgagtcctccggcccctgaatgcggctaacctaaaccctggagccttggagcacaagccagtgcttgcaaggtcgtaatgagcaattccgggacgggaccgactactttgggtgtccgtgtttccttttatctcattattgttcttatggttacaatatatagagtatattgtaatc

SEQ ID NO: 64 - DNA, 744 bp, Artificial sequence
  synthetic
ttaaaacagcctgtgggttgtacccacccacagggcccactgggcgctagcacactggtatcacggtacctttgtgcgcctgttttataccccctaccccaactttaaacttagaagcaaagcaaacccgatcaatagcagatgtagcaagccagttgcatcttgatcaagtacttctgtctccccggactgagtatcaatagactgctcacgcggttgaaggagaaaacgttcgttacccgaccaactacttcgagaaacctagtaacaccatgaaagtagcagggtgtttcgatcagcacaaccccagtgtagatcaggctgatgagtcaccgcatcccccacgggcgaccgtggcggtggctgcgctggcggcctgcccatggggcaacccatgggacgctctaatatggacatggtgtgaagagtctattgagctagttggtagtcctccggcccctgaatgcggctaatcctaactgcggagcacataccccaaagccaaggggcagtgtgtcgtaacgggcaactctgcagcggaaccgactactttgggtgtccgtgtttccttttattctcaaactggctgcttatggtgacaatctcagagttgttaccatatagctattggattggccatccggtgagcaacagagcaattgtctaccaatttgttggatttattccactcaatctagcggttttcagaacattgaattatattctaaccctcaacaagacgaa

SEQ ID NO: 65 - DNA, 744 bp, Artificial sequence; identical to SEQ ID NO: 64
  synthetic

SEQ ID NO: 66 - DNA, 742 bp, Artificial sequence
  synthetic
ttaaaacagcctgtgggttgttcccactcacagggcccactgggcgctagcacactggtatcacggtacccttgtgcgcctgttttattcaccccccccaaatgtaacttagaagcataacccaaatggtcaatagacagcccagtacaccagctgggtttcggccaagtacttctgttaccccggaccgagtatcaataggctgctcacgcggctgaaggagaaaacgttcgttatccggccaattacttcgagaaacctagtaacaccatgaaagttgcgcagtgtttcgctccgcacaaccccagtgtagatcaggtcgatgagtcaccgcgttccccacgggcgaccgtggcggtggctgcgttggcggcctgcccatggggcaacccatgggacgcttcaatactgacatggtgcgaagagtctattgagctaattggtagtcctccggcccctgaatgcggctaatcctaactgcggagcagatacccacatgccagtgggcggtctgtcgtaacgggcaactccgcagcggaaccgactactttgggtgtccgtgtttccttttattcttaatctggctgcttatggtgacaattgaaagattgttgccatatagctattggattggccatccggtgacaaacagggcgattatttatttgtttgttggttttgttccattaaactatagagttttgaatactctagaatttattataacactcaacacaacaaa

SEQ ID NO: 67 - DNA, 747 bp, Artificial sequence
  synthetic
tttaaaacagtcctgtgggttgttacccacccacagggcccactgggcgccagcacactggtatcacggtacctttgtgcgcctgttttatatacccttcccctactaagtaacttagaagcaattaaacaaagaccaacagtaagcacagcgcaccagctgtgtttcggtcaagcacttctgttaccccggactgagtatcaataggctactcacgtggctgaaggagaaaacgttcgttacccgaccaattacttcgagaagcctagtaacaccatggaggttgcgcggcgtttcgctccacacaaccccagtgcagatcaggtcgatgagccaccgcattccccacgggcgaccgtggcggtggctgcgttggcggcctgcccatggggcaacccatgggacgcttcaatactgacatggtgcgaagagtctattgagctaattggtagtcctccggcccctgaatgcggctaatcccaactgcggagcagatacccacgcgccagtgggcagtctgtcgtaatgggcaactctgcagcggaaccgactactttgggtgtccgtgtttcctttattcttatactggctgcttatggtgacaattgagagattgttaccatatagctattggattggccatccggtgacgagcagagctattatttacctatttgttggttttataccattgaactataaagttttaaaaaccttaaacttcatcttagtactcaatacagcaaa

SEQ ID NO: 68 - DNA, 742 bp, Artificial sequence
  synthetic
ttaaaacagcctgtgggttgtacccacccacagggcccattgggcgctagcacactggtattccggtacccttgtgcgcctgttttatctacccttccctactgcaacttagaagttaaacagtcacggtcgataggcggttcagtaaaccaactggatcttgaccaagcacttctgttaccccggactgagtatcaataagctgcttacgtggctgaaggagaaaacgttcgttacccggccaattacttcgagaaacctagtaccaccatgaaggttgcgcagcgtttcgctccgcacaaccccagtgtagatcaggtcgatgagtcaccgcactcctcacgggcgaccgtggcggtggctgcgctggcggcctgcccatggggcaacccatgggacgcttcaatactgacatggtgcgaagagtctattgagctaattggtaatcctccggcccctgaatgcggctaatcccaactgcggagcaggtacccacacaccagtgggcagcctgtcgtaacgggcaactctgcagcggaaccgactactttgggtgtccgtgtttccttttattcctatactggctgcttatggtgacaattgaaagattgttaccatatagctattggattggccatccagtgacaaacagagcaattgtctatctatttgtcggttttgtaccaataaatttcaaagtcctaaaaaccctcaatttcatattgttacttaacacaacaag

SEQ ID NO: 69 - DNA, 741 bp, Artificial sequence
  synthetic
ttaaaacagcctgtgggttgtacccacccacagggcccattgggcgctagcacactggtatcacggtacccttgtgcgcctgttttatccgcccctccccattgtaacttagaagataactaaacacggtcgttaggtggctcagtacgccaactgagtcttgaccaagcacttctgttaccccggactgagtatcaataggctgctcacgcggctgaaggagaaaacgttcgttatccggccaattacttcgagaaacctagtaccaccatggaggttgcgcagtgtttcgctccgcacaaccccagtgtagatcaggccgatgagtcaccgcattccccacgggcgaccgtggcggtggctgcgctggcggcccgcccatgggtaacccatgggacgcttcaatactgacatggtgtgaagagtctattgagctaattggtagtcctccggcccctgaatgcggctaatcccaactgcggagcagatacccacacaccagtgggcagtctgtcgtaacgggcaactctgcagcggaaccgactactttgggtgtccgtgtttccttttattccaatactggctgcttatggtgacaattgaaagattgttaccatatagctattggattggccatccggtgacaaacagagcgattgtttacctatttgtaggtttcataccattgaattttaaagttttaagaacccttaactttatattagcacttaacacaacaaa

SEQ ID NO: 70 - DNA, 743 bp, Artificial sequence
  synthetic
ttaaaacagcctgtgggttgatcccacccacagggcccactgggcgtcagcactctggtatcacggtacctttgtgcgcctgttttatactccctccccccaaccgtaacttagaagcagcactaactgatcaatagccagcgcggcatgccagccacgcttcgatcaagcacttctgttaccccggactgagtatcaatagactgctcacgcggttgaaggagaaaacgttcgtcatccggccaactacttcgagaaacctagtaacaccatggaagttgcggagtgtttcgctcagcactaccccagtgtagatcaggtcgatgagtcaccgcattccccacaggcgactgtggcggtggctgcgttggcggcctgcccatggggaaacccatgggacgctcttatatagacatggtgcgaagagtctattgagctagttggtagtcctccggcccctgaatgcggctaatcctaactgcggagcatacaccctcaaaccagagggcagtgtgtcgtaatgggcaactctgcagcggaaccgactactttgggtgtccgtgtttcactttatttctaaattggctgcttatggtgacaattgagagattgttaccatatagctattggattggccatccggtgaccaatagagctattatatatctctttgttgggttcataccacttagcttgaaagaggttaaaactctgcattacattatactattgaattccgcaaa

SEQ ID NO: 71 - DNA, 739 bp, Artificial sequence
  synthetic
ttaaaacagcctgtgggttgtacccacccacagggcccattgggcgcttgcacactggtattccggtacctttgtgcgcctgttttatacatcctacccccgtaacttagaagcaagatcacccgatcaccaggaaatgtggcaaaccagtcacattctgatcaagcacttctgtttccccggactgagtatcaataggctgttcacacggctgaaggagaaaacgttcgttacccggccaactacttcgaaaaacctagtatcaccgtgaacgttgcagagtgtttcgctcagcactttccccgtgtagatcaggtcgatgagtcaccgcattccccacgggcgaccgtggcggtggctgcgttggcggcctgcctgcggggcaacccgtaggacgctctaatacagacacggtgtgaagagtctattgagctagttggtagtcctccggcccctgaatgcggctaatcctaactgcggagcgagcgcttgtaatccaacaggtagctcgtcgtaacgggtaactctgcagcggaaccgactactttgggtgaccgtgtttccttttatttcattactggctgcttatggtgacaatcacagagttgttaccatatagctattggattggccatccggtgtcaaatagagcaattgtgtttctttttgttgggtttgtaccacttgacttgaccagctacaacactctgtgctacattgttagattgaacacagcaaa

SEQ ID NO: 72 - DNA, 745 bp, Artificial sequence
  synthetic
ttaaaacagcctgtgggttgcacccacccgcagggcccactgggcgctagtacactggtaccccggtacccttgtacgcctgttttatttctccctcccccaaccagtaacctagaagtaaagcaaacccgatcaatagcaggtgcgacacaccagtcgtatcttgatcaagcacttctgtaaccccgggccgagtatcaatagactgctcacgcggttgagggagaaaacgctcgttatccggctgactacttcgagaaacccagtaacaccatagaagttgcagagtgtttcgctcagcactttccccgtgtagatcaggtcgatgagtcaccgcattccccacgggtgaccgtggcggtggctgcgttggcggcctgcctatggggcaacccatgggacgctctaatacagacatggtgtgaagagtcaattgagctagtcagtattcctccggcccctgaatgcggctaatcctaactgcggagcacgtgcctccaatccagggggtggcgtgtcgtaacgggtaactctgcagcggaaccgactactttgggtgtccgtgtttccttttattcttatcttggctgcttatggtgacaattgaaggattgttaccatatagctattggattggccatccggtgactaacagagcaatcatataccaatttgttggttttataccattgaattacaaagttctaatcacccttaaattcattttaacacttaatacgtcaaa

SEQ ID NO: 73 - DNA, 742 bp, Artificial sequence
  synthetic
tttaaaacagcctgtgggttgttcccacccacagggcccactgggcgctagcactctggtatcacggtacccttgtgcgcctgttttatatccccaccccagtggaacattagaagcagcacacctatgatcaatagtgggcgtggcatccagtcacgttatgatcaagcacttctgtgaccccggactgagtatcaatagactgctcacgcggttgaaggagaaaacgttcgttacccggccagttacttcgagaaacccagtaacaccatgaatgttgcagagtgtttcgctcagcacttcccccgtgtagatcaggtcgatgagccactgcattccccacgggcgaccgtggcagtggctgcgttggcggcctgcctatggggtcacccataggacgctctaatactgacatggtgcgaagagtctattgagctaactggtagtcctccggcccctgaatgcggctaatcctaactgtggagcacattcccccaatccagggggcagtgtgtcgtaacgggcaactctgcagcggaaccgactactttgggtgtccgtgtttctttttattctcatattggctgcttatggtgacaattacagaattgttaccatatagctattggattggccatccggtgactaacagagcaattatttatcaattcgttggatttgtcccactcgatttcaaagcagtcaatacactctcatatatcgttacactcaacacaacaaa

SEQ ID NO: 74 - DNA, 744 bp, Artificial sequence
  synthetic
ttaaaacagcctgtgggttgttcccacccacagggcccaccgggcgccagcacactggtatcacggtacccttgtgcgcctgttttatccaccccttcccacagtaacttagaagcacaccatgtatacggtcaataggcggctcagtacaccaactgggccacgaccaagcacttctgttaccccggactgagtatcaataagctgctcacgcggctgaaggagaaaacgttcgttacccggccaattacttcgagaaacccagtaccaccatgaaggttgcgcagcgtttcgttccgcacaaccccagtgtagatcaggtcgatgagtcaccgcgttcctcacgggtgaccgtggcggtggctgcgttggcggcctgcccatggggcaacccatgggacgcttcaatactgacatggtgcgaagagtctattgagctaattggtagtcctccggcccctgaatgcggctaatcctaactgcggagcagatacccacaaaccagtgggcagtctgtcgtaacgggcaactctgcagcggaaccgactactttgggtgtccgtgtttccttttatccttacactggctgcttatggtgacaattgagaaattgttaccatatagctattggattggccatccggtgacaaacagagcagttgtttacctatttgttggtttcgtaccgctgaaccttaaagttctaaagaccctcaattttatcttagcacttaacacagcaaa

SEQ ID NO: 75 - DNA, 742 bp, Artificial sequence
  synthetic
ttaaaacagcctgtgggttgttcccacccacagggcccaccgggcgctagcacactggtattgcggtacctttgtgcgcctgttttatacacccctccttaatgtaactcagaagtacaacattaccggtcaacagatgactcagtaaaccaactgagcctcgaccaagcacttctgtttccccggaccgagtatcaataggctgctcacgcggctgaaggagaaagtgttcgttacccggccaattacttcgagaagcccagtaccaccatggaggttgcgcggcgtttcgctccgcacatccccagtgtagatcaggctgatgagtcaccgcgttccccacgggtgaccgtggcggtggctgcgctggcggcctgcccatggggtaacccatgggacgcttcaatactgacatggtgtgaagagcctattgagctaattggtagtcctccggcccctgaatgcggctaatcctaactgcggagcagatacccacacaccagcgggcagtctgtcgtaacgggcaactctgcagcggaaccgactactttgggtgtccgtgtttccttttatttttatgctggctgcttatggtgacaattgaggaattgttaccatatagctattggattggccatccagtgtccaacagagcgatcatttacctgttcgttgggttcgtaccactaaaccacaagtcactcagcacacttaattacattataactctcaacacaacaag

SEQ ID NO: 76 - DNA, 742 bp, Artificial sequence
  synthetic
ttaaaacagcctgtgggttgtacccacccacagggcccactgggcgctagcacactggtattacggtacccttgtgcgcctgttttatttacccctcccccacgcaacctagaagcatgacttaagcggtcaatagatggctcagtatgccaactgagttatgaccaagcacttctgttaccccggaccgagtatcaataggctgctcacgcggctgaaggagaaagtgttcgttacccggccagttacttcgagaaacctagtatcatcatgaaggttgcgaggcgtttcgctccacacgaccccggtgtagatcaggctgatgagtcaccgcattccccacgggcgaccgtggcggtggctgcgctggcggcctgcccatggggcaacccatgggacgcttcaatattgacatggtgcgaagagtctattgagctaactggtagtcctccggcccctgaatgcggctaatcctaactgcggagcagacacccacatgccagtgggcagtctgtcgtaacgggcaactctgcagcggaaccgactactttgggtgtccgtgtttccttttattcttatattggctgcttatggtgacaattgaaagattgttgccatatagctattggattggccatccagtgactaacagagcaattgtctacctgttcgttggttacgtaccactaaattataaagttttgaacacacttaattttattatagcacttaacaccttaaa

SEQ ID NO: 77 - DNA, 743 bp, Artificial sequence
  synthetic
ttaaaacagcctgtgggttgttcccacccacagggcccatagggcgccagcactctggtatcccggtacctttgtgcgcctgttttatccacccttccccaagcgtaacttagaagcccatcatacacggtcaataggtggttcagtatgccaactgagtcttgaccaagcacttctgttaccccggactgagtatcaataagctgctcacgcggctgaaggagaaaacgttcgttatccggccaattacttcgagaaacctagtaacaccatgaaggttgcgcagcgtttcgctccgcacaaccccagtgtagatcaggtcgatgagtcaccgcactccccacgggcgaccgtggcggtggctgcgttggcggcctgcccatggggcaacccatgggacgcttcaatactgacatggtgcgaagagtctattgagataattggtagtcctccggcccctgaatgcggctaatcctaactgcggagcagatacccacatgccagtgggcagtctgtcgtaacgggcaactctgcagcggaaccgactactttgggtgtccgtgtttccttttatttctatactggctgcttatggtgacaattgacagattgttaccatatagctattggattggccatccggtgacgaacagagcaattatttacttatttgttggttttataccattaaatttcaaagttttaaaaaccctcaacttagttttgtcactcaactcagcaaa

SEQ ID NO: 78 - DNA, 744 bp, Artificial sequence
  synthetic
ttaaaacagcctgtgggttgatcccacccacagggcccactgggcgctagcacactggtattccggtacttttgtgcgcctgttttatacacccttccccttcatgtaacttagaagtaaaacacaaacggtcaataggtagctcagcaaaccagctgagcctcggccaagcacttctgttaccccggactgagtatcaataagctgttaacacggctgaaggagaaaacgttcgttatccggccaattacttcgagaaacctagtaacaccatgaaggttgcgtagcgtttcgctccacacaaccccagtgtagatcaggtcgatgagtcaccgctctccccacgggtgaccgtggcggtggctgcgttggcggcctgcccatggagcactccatgggacgcttcaatactgacatggtgtgaagagtctattgagctaattggtagtcctccggcccctgaatgcggctaatcctaactgcggagcagacacccacacgccagtgggcagtctgtcgtaatgggcaactctgcagcggaaccgactactttgggtgtccgtgtttccttttattcttacattggctgcttatggtgacaatcaaggaattgttaccatatagctattggattggccatccggtatctaacagagcaattgtttacctcttcaccggttttgtaccattgaattgcaatagtctcaacaccctttgctatatcattaaattgaactcagcaaa

SEQ ID NO: 79 - DNA, 752 bp, Artificial sequence
  synthetic
aaagcaggctttaaaacagctctggggttgttcccacccacagggcccactgggcgctagcactctggtatcacggtacctttgtgcgcctgtttttccacccctccccatacgcaacttagaagagagactcaaccggtcaatagacagcctagtacaccaactaggttctgaccaagaacttctgtttccccggaccgagtatcaataggctgcttacgcggctgaaggagaaaacgttcgttacccggccaattacttcgagaaacctagtatcaccatggaagttgcgcagtgtttcgctccgcacaaccccagtgtagatcaggtcgatgagtcaccgcattccccacaggcgactgtggcggtggctgcgttggcggcctgcccgtggggcaacccacgggacgcttcaataccgacatggtgcgaagagtctattgagctaattggtagtcctccggcccctgaatgcggctaatcctaactgtggagcagatacccacgcgccagtgggcagtctgtcgtaatgggcaactccgcagcggaaccgactactttgggtgtccgtgtttccttttatcctcataatggctgcttatggtgacaattgaaagattgttaccatatagctattggattggccatccggtgactaacagagcaattatttatttgtttgttgggtttgtaccattgaactacaaggtccttaatactctaaactacattataagtcttaatacagtgca

SEQ ID NO: 80 - DNA, 742 bp, Artificial sequence
  synthetic
ttaaaacagcctgtgggttgttcccacccacagggcccactgggcgccagcacactggtatcacggtacctttgtgcgcctgttttatccacccttccccaatgtaacttagaagtaaaactagaaagatcaatagcaagcacagtatgccaactgtgttatgatcaagcacttctgttaccccggactgagtatcaataagctgctaaagcggctgaaggagaaaacgttcgttacccggccaactacttcgagaaacccagtaccaccatgaaggttgcgcagtgtttcgctccacacaatcccagtgtagatcaggtcgatgagtcaccgcgttccccacgggcgaccgtggcggtggctgcgttggcggcctgcccatgggatgacccatgggacgcttcaatactgacatggtgcgaagagtctattgagctagttggtagtcctccggcccctgaatgcggctaatcctaactgcggagcagatacccacacaccagtgggcagtctgtcgtaacgggtaactctgcagcggaaccgactactttgggtgtccgtgtttctttttatcctcaaattggctgcttatggtgacaattgataagttgttaccatatagctattggattggccatccggtgtctaacagagctattgtttatttatttgttggtttcgtgccactaaattacaaagtttttgaaactctcaacttcattttgacactcaataaagcaaa

SEQ ID NO: 81 - DNA, 742 bp, Artificial sequence
  synthetic
ttaaaacagcctgtgggttgttcccacccacagggcccaatgggcgccagcactctggtattacggtacctttgtgcgcctgttttatatcccctcccccaattgtaacttagaagcaacacgcaccgaccaacagtgggcgtggcacaccagccacgtcttggtcaagcacatctgtttccccggactgagtatcaatagactgctcacgcggtcgaaggagaaaacgttcgttatccggccaactacttcgagaagcccagtaacaccatgaatattgcgaagtgtttcgctcagcacactcccagtgtagatcaggtcgatgagtcaccgcattccccacgggcgaccgtggcggtggctgcgttggcggcctgcctatggggcaacccgtaggacgcttcaatatggacatggtgtgaagagtctattgagctagttggtagtcctccggcccctgaatgcggctaatcctaaccgcggagcaggcacccacaaaccagtgggcagcttgtcgtaacgggtaactctgcggcggaaccgactactttgggtgtccgtgtttccttttattcttatactggctgcttatggtgacaattgagagattgttgccatatagctattggattggccatccggtgacaaacagagcaattgtttatctatttgttggttttataccgttaagttttaaagtcctaaaaacccttaacttggtcatactactcaactcagcaaa

SEQ ID NO: 82 - DNA, 744 bp, Artificial sequence
  synthetic
ttaaaacagtctgtgggttgttcccacccacagggcccacgtggcgccagcacactggtatctcggtacctttgtgcgcctgttttatccaccctaaaccccgttgtaacttagaagatgagcaacactgatcaatagtgggtgcaacatgccagttgcatcacgatcaagcacttctgtatccccggactgagtatcaataggctgctcacgcggctgaaggagaaaacgttcgttatccggccagttacttcgagaaacctagtaacatcatggaggttgcgcagtgtttcgctccgcacacccccagtgtagatcaggtcgatgagtcaccgcgttccccacgggcgaccgtggcggtggctgcgttggcggcctgcccatgggataacccatgggacgcttcaatactgacatggtgtgaagagtctattgagctaactggtagtcctccggcccctgaatgcggctaatcctaactgtggagcagacacccacatgccagtgggcagtctgtcgtaacgggcaactccgcagcggaaccgactactttgggtgtccgtgtttccttttattcctatattggctgcttatggtgacaattgaaagattgttaccatatagctattggattggccatccggtgtcaaacagagcaatcatttatttgtttgttggttttatacctctgaactttaaagtgctaaagactctcaattttatattatatctcaacaaatcagg

SEQ ID NO: 83 - DNA, 742 bp, Artificial sequence
  synthetic
ttaaaacagcctgtgggttgttcccacccacagggcccactgggcgccagcactctggtattacggtacctttgtgcgcctgttttatatccccctccccacttgaaacttagaagtgaaacacactgatcaatagttgacatggcaagccagccatgtcttgatcaagcacctctgtttccccggacctagtatcaatagactgctcgcgcggttgaaagagaaagcgttcgttacccggctaactacttcgagaaacttagtaacaccatggaagttgcggagtgtttcgctcagcacatccccagtgtagatcaggccgatgagtcaccgcattccccacgggcgaccgtggcggtggctgcgttggcggcctgcctgtggggcaacccacaggacgctctaatacaaacatggtgcgaagagtctattgagctagttagtagtcctccggcccctgaatgcggctaatcctaactgcggagcacgtgcttccaatccaggaggtggcgtgtcgtaacgggtaactctgcagcggaaccgactactttgggtgtccgtgtttccttttattcttgcattggctgcttatggtgacaattgagagattgttaccatatagctattggattggccatccggtgacaaacagagcaattatatatctctttgttggatacattccattgaactacaaggagttaaaaaccctcaattatattctgttcttgaattccgcaag

SEQ ID NO: 84 - DNA, 742 bp, Artificial sequence
  synthetic
ttaaaacagcctgtgggttgttcccacccacagggcccatggggcgccagcacactggtattgcggtacctttgtgcgcctgttttattcaccctttcccaatgaaacttagaagcttaactcaaccggtcgatagacagcccagtacaccaactgggttttgaccaagtactcctgtttccccggactgagtatcaataagctgctcgcgcggctgaaggagaaaacgttcgttacccggccaattacttcgagaaacctagtaccaccatgaacgttgcgcagtgtttcgctccgcacaaccccagtgtagatcaggtcgatgagtcaccgcaatccccacgggcgaccgtggcggtggctgcgctggcggcctgcccatggggcatcccatgggacgcttcaatactgacatggtgcgaagagtctattgagctaattggtaatcctccggcccctgaatgcggctaatcctaactgcggggcagacacccacacgccagtgggcagtctgtcgtaacgggtaactccgcagcggaaccgactactttgggtgtccgtgtttccttttatctttatattggctgcttatggtgacaattgaaagattgttgccatatagctattggattggccatccggtgtctaatagagcaattatatatctctttgttggcttcatcccgttaaataaagtgagctaccagaccctgtgctatattatcaaattgaacacaataaa

SEQ ID NO: 85 - DNA, 743 bp, Artificial sequence; identical to SEQ ID NO: 14
  synthetic

SEQ ID NO: 86 - DNA, 742 bp, Artificial sequence
  synthetic
ttaaaacagcctgtgggttgttcccacccacagggcccactgggcgccagcacactggtatcacggtacccttgtgcgcctgttttataaacccttccccaatgcaacttagaagctcaactttaccggtcaatagacagtccagtacgccaactgggcttcgatcaagcacttctgttaccccggactaagtatcaataggctgctcacgcggctgaaggagaaaacgttcgttacccggccaattacttcgagaaacccagtaacactatggaggttgcgcagtgtttcgttccacacaaccccagtgtagatcaggtcgatgagtcaccgctttccccacgggcgaccgtggcggtggctgcgttggcggcctgcccatggggcaacccatgggacgcttcaatactgacatggtgtgaagagtctattgagctaattggtattcctccggcccctgaatgcggctaatcctaactgcggagcagatactcacgagccagtgggcagtctgtcgtaacgggtaactctgcagcggaaccgactactttgggtgtccgtgtttccttttattcatatattggctgcttatggtgacaattgagagattgttaccatatagctattggattggccatccggtgactaatagagcaattgtttacctatttgttggctttgtgccgttgaactacaaggttttaaaaactattaactacatcctagtacttaacacgttgaa

SEQ ID NO: 87 - DNA, 658 bp, Artificial sequence
  synthetic
actctggtattgcggtacctttgtacgcctgttttatatcccttccccatgtaactttagaagcaattcacaaggttcaatagagggggtacaaaccagtaccaccacgaacaagcacttctgtttccccggtgaagctgtatagactgtccccacggtcaaaaacggcagatccgttatccgcttatgtacttcgagaagcctagtatcatcttggaatcttcgatgcgttgcgttcagcactctatcccgagtgtagcttaggtcgatgagtctgggcattccccaccggcgacggtggcccaggctgcgttggcggcctacccatggctaacgccatgggacgctagttgtgaacaaggtgtgaagagcctattgagctacatgagagtcctccggcccctgaatgcggctaatcccaaccacggagcaagtactcacaacccagtgggcagcttgtcgtaacgcgtaagtctgtggcggaaccgactactttgggtgtccgtgtttcctttttatttttgatatggctgcttatggtgacatctaagattgttatcatatagcttttggattggccatccggtgatttttgagactaaaacgcttgtttgccttatcacacaatttagtattttgttatattcatacggtcata

SEQ ID NO: 88 - DNA, 732 bp, Artificial sequence
  synthetic
ttaaaacagctctggggttgttcccactcaagggcccacgtggcggctagtactctggtatctcggtacctttgtacgcctgttttaattccctccccaacgtaacttagaagcttttaaaccaaagctcaataggtggagcgcaaaccagcgctcttatgagcaagcacttctgtctccccggtgtggttgtatagactgtccccacggttgaaaacaacttatccgttacccgctatagtacttcgagaaacctagtattgccttcggagtgttgatgcgttgcgctcagcacactaacccgtgtgtagcttgggtcgatgagtctggacgtaccccactggcgacagtggtccaggctgcgttggcggcctactcatggtgaaaaccatgggacgctagacatgaacaaggtgtgaagagtctattgagctgctatagagtcctccggcccctgaatgcggctaatcctaaccatggagcaagtgctcacaaaccagtgagttacttgtcgtaacgcgcaagtccgtggcggaaccgactactttgggtgtccgtgtttcactttttacttttatgactgctaatggtgacaatttaatattgttaccatttggcttgtcgaattgatcacataagatctatagttttgttcactgatttgctttgaaataatctcacctcaaaacctccagtacataacatttaaagagtttaaacttatttataaca

SEQ ID NO: 89 - DNA, 726 bp, Artificial sequence
  synthetic
ttaaaacagctctggggttgttcccaccccagaggcccacgtggcggctagtactccggtaccccggtacccttgtacgcctgttttatactccctttcccaagtaactttagaagaaataaactaatgttcaacaggagggggtacaaaccagtaccaccacgaacacacacttctgtttccccggtgaagttgcatagactgtacccacggttgaaagcgatgaatccgttacccgcttaggtacttcgagaagcctagtatcatcttggaatcttcgatgcgttgcgatcagcactctaccccgagtgtagcttgggtcgatgagtctggacaccccacaccggcgacgtggtccaggctgcgttggcggcctacccatggctagcaccatgggacgctagttgtgaacaaggtgcgaagagcctattgagctacctgagagtcctccggcccctgaatgcggctaatcccaaccacggagcaaatgctcacaatccagtgagtggtttgtcgtaatgcgcaagtctgtggcggaaccgactactttgggtgtccgtgtttccttttatttttattatggctgcttatggtgacaatctgagattgttatcatatagctattggattagccatccggtgacatcttgaaattttgccataactttttcacaaatcctacaacattacactacactttctcttgaataattgagacaactcata

SEQ ID NO: 90 - DNA, 714 bp, Artificial sequence; identical to SEQ ID NO: 34
  synthetic

SEQ ID NO: 91 - DNA, 728 bp, Artificial sequence
  synthetic
ttcccaccctagaggcccacgtggcggctagtactctggtattacggtacctttgtacgcctgttttatatccctttccccattgtaacttagaagtttcaaagtacagttcaatagacagtagtacaaaccagtactgctacgaacaagcacttctgttgccccggtgtagttgcatagactgtacccacggttgaaagcaactgatccgttatccgctttagtacttcgagaagcctagtagcaccttgggatcttcgatgcgttgcgctcagcactcaaccccagagtgtagcttgggtcgatgagtctggacattcctcaccggcgacggtggtccaggctgcgttggcggcctacctgtggcccaaagccacaggacgctagttgtgaacaaggtgtgaagagcctattgagctactaaagagtcctccggcccctgaatgcggctaatcctaaccacggagcaagtgctcacagtccagtgagtagcttgtcgtaatgagcaattctgtggcggaaccgactactttgggtgtccgtgtttccttttatttttatcattggctgcttatggtgacaatctaaggttgccatcatatagcttttggattggccatcccggtgatatttcgaattattcaatttgctgtttgcagctccttttaaacagtattcactcaccagcattcatattttactcttgagttattaacaaatagtcaaaa

SEQ ID NO: 92 - DNA, 749 bp, Artificial sequence
  synthetic
ttgccagttttttgaaacgtgtggtttgacgtctaaccattatggcagtgggtggagtactgcaaagatgtcaccgtgctttacacggtttttgaaccccacaccggctgtttggcgcttgcaggacagcaggtttattttcttttaactctctctttctagccacacacgatctatgtgtgtgggcggagtgatactcccgttccttcttggacaggcggcctccacgccctttgtggatcttaaggctaccaagtcactggtgttggaaagtgaagagaaaggagttccttgggaactacatgtggcattgacagaggttgtagcgatgctgtgtgtgtgtgcggattacccccgtggcgacacggaccccacaggccaaaagccctgtccgaaaggacccacacagtggagcaaccccagctcccctcttcaatgttttgtgttagcaaccttggtattattttctctcaagcttccaatacaccgggccccaaagatgtcctgaaggtaccccgtgtatctgaggatgagcaccatcaactacccggacttgttctttcgagaacagacgcatgtggtaacccagccccgatcctaaggggtcggggcttttgctcactcagcacaggatctgatcaggagacctcccccccctgctttacagggggcgggggtttaaaaattgcccaaggcctggcaaataacctaggggactaggttttcctttttattttaaagttgtcaat

SEQ ID NO: 93 - DNA, 722 bp, Artificial sequence
  synthetic
ttcccacccacagggcccactgggcgctagcacactggtatcacggtacctttgtgcgcctgttttatccaccctcccccaatgtaacttagaagcacaccaaacgcggtcaataggcggctcagtacaccaactgagtctcgaccaagcacttctgttaccccggactgagtatcaataggctgctcacgcggctgaaggagaaaacgttcgttacccggccaattacttcgagaaacctagtaccaccatgaaggttgcgcggcgtttcgctccacacaaccccagtgtagatcaggtcgatgagccaccgcattccccacgggcgaccgtggcggtggctgcgctggcggcctgcccatggggcaacccatgggacgcttcaatactgacatggtgtgaagagtctattgagctaattggtagtcctccggcccctgaatgcggctaatcctaactgcggagcagacacccacatgccagtgggcagtctgtcgtaacgggtaactctgcagcggaaccgactactttgggtgtccgtgtttccttttattctcatactggctgcttatggtgacaattgaaagattgttgccatatagctattggattggccatccggtgacaaacagagcggttgtttacctatttgtcggttttataccattgaattacaaggttctgaaaaccctcaatttcattttagcacttaataccacaaa

SEQ ID NO: 94 - DNA, 742 bp, Artificial sequence
  synthetic
ttaaaacagcctgtgggttgttcccacccacagggcccattgggcgctagcacactggtatcacggtacccttgtgcgcctgttttatccacccctccccatcgtaacctagaagcatgactccaacggtcaatagacagctcagtaaaccaattgagccttgaccaagcacttctgttaccccggactgagtatcaataggctgctcacgcggccgaaggagaaaatgttcgttacccggccaattacttcgagaaacctagtaccaccatgaaggttgcgcggtgtttcgctcagcacaaccccagtgtagatcaggccgatgagtcaccgcattccccacgggtgaccgtggcggtggctgcgctggcggcctgcccatggggcaacccatgggacgcttcaatactgacatggtgtgaagagtctattgagctaattggtagtcctccggcccctgaatgcggctaatcctaactgcggagcagatacccacgcaccagtgggcagtctgtcgtaacgggcaactctgcagcggaaccgactactttgggtgtccgtgtttccttttattcttgtactggctgcttatggtgacaattgagagattgttaccatatagctattggattggccatccagtgtcaaacagagcgattgtctacttgttcattggttttataccattgagttacaaggttctagccactcttaacttcattttaacactcaatacatcaaa

SEQ ID NO: 95 - DNA, 748 bp, Artificial sequence
  synthetic
tggggttaaaacagctctggggttgttcccaccccagaggcccacgtggcggctagtactctggtatcatggtacctttgtacgcctgttttatacccctaccccacgtaactttagaagcaactcaacaagttcaatagggggggtacaaaccagtaccaccacgaacaagcactcctgttaccccggtgatcttgcataagctgtgcccacggctgaaggcgagagatccgttatccgcttgagtacttcgagaagcctagtatcaccttgggatcttcgacgcgttgcgctcagcactccacccgagtgtagcttaggctgatgagcctgggcattccccaccggcgacggtggcccaggctgcgttggcggcctacccatggctaacaccatgggacgctagatgtgaacaaggtgtgaagagcctattgagctactcaagagtcctccggcccctgaatgcggctaatcccaaccacggagcaggtgtcttcaacccagaaggtagcctgtcgtaacgcgtaagtctgtggcggaaccgactactttgggtgtccgtgtttccttttatcttttatatggctgcttatggtgacaatcacagattgttatcataaagcgatttggattggccatccggtgaagtacaaacacattatctacttgtttgttggatttactccactcacacaccccacccccaatataacatctattgttttgttgacaagaaattactttcgaa

SEQ ID NO: 96 - DNA, 748 bp, Artificial sequence
  synthetic
gttaaaacagctctggggttgttcccaccccagaggcccaagtggcggctagtactccggtatcacggtacccttgtacgcctgttttatactcccttcccccgtaacttagaagagttaaaccaagttcaatagaagggggtacaaaccagtaccaccacgaacaagcacttctgtttccccggtgatattgtatagactgtacccacggtcgaaaatgattgatccgttatccgctctcatacttcgagaagcctagtatcatcttggaatcttcgatgcgttgcgctcggcactcgatcccggagtgtagcttaggtcgatgagtctggacactcctcaccggtgacggtggtccagactgcgttggcggcctacctgtggtccaaagccacaggacgctagttgtgaacaaggtgtgaagagcctattgagctatgagagagtcctccggcccctgaatgcggctaatcccaaccacggagcgagagtgcgcaagccagcgtatatctcgtcgtaacgcgcaagtctgtggcggaaccgactactttgggtgtccgtgtttccttttatttttgtattggctgcttatggtgacaatcacagattgttatcataaagcgaattggattggccatccggtgaaagtgaaatacattatttgcttatttattggattcagtccacctaattgctatactcacgaacccaccacagccgttttgttgactgaaagccggtaccaata

SEQ ID NO: 97 - DNA, 746 bp, Artificial sequence
  synthetic
ttaaaacagctctggggttgttcccaccccagaggcccacgtggcggctagtactccggtatcacggtacccttgtacgcctgttttatactcccttccccgtaacttagaagtatacaaaccaagttcaatagaagggggtacaaaccagtaccaccacgaacaagcacttctgtttccccggtgaagttgcatagattgtccccacggtcgaaagcgactgatccgttatccgctcttgtacttcgggaagcctagtatcaccttcggatcttcgatgcgttgcgctcagcactcaaccccagagtgtagcttaggtcgatgagtctggacgaacctcactggtgacagtggtccaggctgcgttggcggcctacctgtggcccaaagccacaggacgctagttgtgaacaaggtgtgaagagcctactgagctacatgagagtcctccggcccctgaatgcggctaatcccaaccacggagcaggtggtcacaaaccagtggtttgcctgtcgtaacgcgaaagtctgtggcggaaccgactactttgggtgtccgtgtttccttttattcttattatggctgcttatggtgacaatcttagattgttatcataaagcgaattggattggccatccggggaaaattaagcatatcatacacttgtttgttggattcacccctctgattacacatactcttggcttgattaggattgttgcattgataagacactattgttgca

SEQ ID NO: 98 - DNA, 732 bp, Artificial sequence
  synthetic
gggttgttcccaccccagaggcccacgtggcggctagtactccggtatcacggtacccttgtacgcctgttttatactcccttccccgtaacttagaagtatacaagccaagttcaatagaagggggtacaaaccagtaccaccacgaacaagcacttctgtttccccggtgaagttgcatagattgttcccacggtcgaaagcgactgatccgttacccgctcatgtacttcgggaagcctagtatcaccttcggatcttcgatgcgttgcgctcagcactcaaccccagagtgtagcttaggtcgatgagtctggacaaacctcactggcgacagtggtccaggctgcgttggcggcctacctgtggcccaaagccacaggacgctagttgtgaacaaggtgtgaagagcctactgagctacatgagagtcctccggcccctgaatgcggctaatctcaaccacggagcaggtggtcacaaaccagtgatttgcctgtcgtaacgcgaaagtctgtggcggaaccgactactttgggtgtccgtgtttccttttactctcattatggctgcttatggtgacaatcctagattgttatcataaagcgagttggattggccatccggtgaaaatcaagcacatcatatatttgtttgttgggtttaaccctctgattgcacgcactcttggcttggttaggattattgtgtggaaaaggcaccatagttaca

SEQ ID NO: 99 - DNA, 40 bp, Artificial sequence
  synthetic
actcactatttgttttcgcgcccagttgcaaaaagtgtcg

SEQ ID NO: 100 - DNA, 780 bp, Artificial sequence
  synthetic
ttaaaacagcctgtgggttgatcccacccacaggcccattgggcgctagcactctggtatcacggtacctttgtgcgcctgttttataccccctactcactatttgttttcgcgcccagttgcaaaaagtgtcgcccccaactgtaacttagaagtaacacacaccgatcaacagtcagcgtggcacaccagccacgttttgatcaagcacttctgttaccccggactgagtatcaatagactgctcacgcggttgaaggagaaagcgttcgttatccggccaactacttcgaaaaacctagtaacaccgtggaagttgcagagtgtttcgctcagcactaccccagtgtagatcaggtcgatgagtcaccgcattccccacgggcgaccgtggcggtggctgcgttggcggcctgcccatggggaaacccatgggacgctctaatacagacatggtgcgaagagtctattgagctagttggtagtcctccggcccctgaatgcggctaatcctaactgcggagcacacaccctcaagccagagggcagtgtgtcgtaacgggcaactctgcagcggaaccgactactttgggtgtcgtgtttcattttattcctatactggctgcttatggtgacaattgagagatcgttaccatatagctattggattggccatccggtgactaatagagctattatatatccctttgttgggtttataccacttagcttgaaagaggttaaaacattacaattcattgttaagttgaatacagcaaa

SEQ ID NO: 101 - DNA, 770 bp, Artificial sequence
  synthetic
ttaaaacagcctgtgggttgatcccacccacaggcccattgggcgctagcactctggtatcacggtacctttgtgcgcctgttttataccccctcccccaactgtaacttagaagtaacacacaccgatcaacagtcagcgtgactcactatttgttttcgcgcccagttgcaaaaagtgtcgcacgttttgatcaagcacttctgttaccccggactgagtatcaatagactgctcacgcggttgaaggagaaagcgttcgttatccggccaactacttcgaaaaacctagtaacaccgtggaagttgcagagtgtttcgctcagcactaccccagtgtagatcaggtcgatgagtcaccgcattccccacgggcgaccgtggcggtggctgcgttggcggcctgcccatggggaaacccatgggacgctctaatacagacatggtgcgaagagtctattgagctagttggtagtcctccggcccctgaatgcggctaatcctaactgcggagcacacaccctcaagccagagggcagtgtgtcgtaacgggcaactctgcagcggaaccgactactttgggtgtcgtgtttcattttattcctatactggctgcttatggtgacaattgagagatcgttaccatatagctattggattggccatccggtgactaatagagctattatatatccctttgttgggtttataccacttagcttgaaagaggttaaaacattacaattcattgttaagttgaatacagcaaa

SEQ ID NO: 102 - DNA, 780 bp, Artificial sequence
  synthetic
ttaaaacagcctgtgggttgatcccacccacaggcccattgggcgctagcactctggtatcacggtacctttgtgcgcctgttttataccccctcccccaactgtaacttagaagtaacacacaccgatcaacagtcagcgtggcacaccagccacgttttgatcaagcacttctgttaccactcactatttgttttcgcgcccagttgcaaaaagtgtcgccggactgagtatcaatagactgctcacgcggttgaaggagaaagcgttcgttatccggccaactacttcgaaaaacctagtaacaccgtggaagttgcagagtgtttcgctcagcactaccccagtgtagatcaggtcgatgagtcaccgcattccccacgggcgaccgtggcggtggctgcgttggcggcctgcccatggggaaacccatgggacgctctaatacagacatggtgcgaagagtctattgagctagttggtagtcctccggcccctgaatgcggctaatcctaactgcggagcacacaccctcaagccagagggcagtgtgtcgtaacgggcaactctgcagcggaaccgactactttgggtgtcgtgtttcattttattcctatactggctgcttatggtgacaattgagagatcgttaccatatagctattggattggccatccggtgactaatagagctattatatatccctttgttgggtttataccacttagcttgaaagaggttaaaacattacaattcattgttaagttgaatacagcaaa

SEQ ID NO: 103 - DNA, 776 bp, Artificial sequence
  synthetic
ttaaaacagcctgtgggttgatcccacccacaggcccattgggcgctagcactctggtatcacggtacctttgtgcgcctgttttataccccctcccccaactgtaacttagaagtaacacacaccgatcaacagtcagcgtggcacaccagccacgttttgatcaagcacttctgttaccccggactgagtatcaatagactgcactcactatttgttttcgcgcccagttgcaaaaagtgtcggcggttgaaggagaaagcgttcgttatccggccaactacttcgaaaaacctagtaacaccgtggaagttgcagagtgtttcgctcagcactaccccagtgtagatcaggtcgatgagtcaccgcattccccacgggcgaccgtggcggtggctgcgttggcggcctgcccatggggaaacccatgggacgctctaatacagacatggtgcgaagagtctattgagctagttggtagtcctccggcccctgaatgcggctaatcctaactgcggagcacacaccctcaagccagagggcagtgtgtcgtaacgggcaactctgcagcggaaccgactactttgggtgtcgtgtttcattttattcctatactggctgcttatggtgacaattgagagatcgttaccatatagctattggattggccatccggtgactaatagagctattatatatccctttgttgggtttataccacttagcttgaaagaggttaaaacattacaattcattgttaagttgaatacagcaaa

SEQ ID NO: 104 - DNA, 780 bp, Artificial sequence
  synthetic
ttaaaacagcctgtgggttgatcccacccacaggcccattgggcgctagcactctggtatcacggtacctttgtgcgcctgttttataccccctcccccaactgtaacttagaagtaacacacaccgatcaacagtcagcgtggcacaccagccacgttttgatcaagcacttctgttaccccggactgagtatcaatagactgctcacgcggttgaaggagaaagcgttcgttatactcactatttgttttcgcgcccagttgcaaaaagtgtcgccggccaactacttcgaaaaacctagtaacaccgtggaagttgcagagtgtttcgctcagcactaccccagtgtagatcaggtcgatgagtcaccgcattccccacgggcgaccgtggcggtggctgcgttggcggcctgcccatggggaaacccatgggacgctctaatacagacatggtgcgaagagtctattgagctagttggtagtcctccggcccctgaatgcggctaatcctaactgcggagcacacaccctcaagccagagggcagtgtgtcgtaacgggcaactctgcagcggaaccgactactttgggtgtcgtgtttcattttattcctatactggctgcttatggtgacaattgagagatcgttaccatatagctattggattggccatccggtgactaatagagctattatatatccctttgttgggtttataccacttagcttgaaagaggttaaaacattacaattcattgttaagttgaatacagcaaa

SEQ ID NO: 105 - DNA, 775 bp, Artificial sequence
  synthetic
ttaaaacagcctgtgggttgatcccacccacaggcccattgggcgctagcactctggtatcacggtacctttgtgcgcctgttttataccccctcccccaactgtaacttagaagtaacacacaccgatcaacagtcagcgtggcacaccagccacgttttgatcaagcacttctgttaccccggactgagtatcaatagactgctcacgcggttgaaggagaaagcgttcgttatccggccaactacttcgaaaaacctagtaacaccgtggaagttgcagagtgtttcgctcagcactactcactatttgttttcgcgcccagttgcaaaaagtgtcgagtgtagatcaggtcgatgagtcaccgcattccccacgggcgaccgtggcggtggctgcgttggcggcctgcccatggggaaacccatgggacgctctaatacagacatggtgcgaagagtctattgagctagttggtagtcctccggcccctgaatgcggctaatcctaactgcggagcacacaccctcaagccagagggcagtgtgtcgtaacgggcaactctgcagcggaaccgactactttgggtgtcgtgtttcattttattcctatactggctgcttatggtgacaattgagagatcgttaccatatagctattggattggccatccggtgactaatagagctattatatatccctttgttgggtttataccacttagcttgaaagaggttaaaacattacaattcattgttaagttgaatacagcaaa

SEQ ID NO: 106 - DNA, 760 bp, Artificial sequence
  synthetic
ttaaaacagcctgtgggttgatcccacccacaggcccattgggcgctagcactctggtatcacggtacctttgtgcgcctgttttataccccctcccccaactgtaacttagaagtaacacacaccgatcaacagtcagcgtggcacaccagccacgttttgatcaagcacttctgttaccccggactgagtatcaatagactgctcacgcggttgaaggagaaagcgttcgttatccggccaactacttcgaaaaacctagtaacaccgtggaagttgcagagtgtttcgctcagcactaccccagtgtagatcaggtcgatgagtcaccgcactcactatttgttttcgcgcccagttgcaaaaagtgtcggcggtggctgcgttggcggcctgcccatggggaaacccatgggacgctctaatacagacatggtgcgaagagtctattgagctagttggtagtcctccggcccctgaatgcggctaatcctaactgcggagcacacaccctcaagccagagggcagtgtgtcgtaacgggcaactctgcagcggaaccgactactttgggtgtcgtgtttcattttattcctatactggctgcttatggtgacaattgagagatcgttaccatatagctattggattggccatccggtgactaatagagctattatatatccctttgttgggtttataccacttagcttgaaagaggttaaaacattacaattcattgttaagttgaatacagcaaa

SEQ ID NO: 107 - DNA, 776 bp, Artificial sequence
  synthetic
ttaaaacagcctgtgggttgatcccacccacaggcccattgggcgctagcactctggtatcacggtacctttgtgcgcctgttttataccccctcccccaactgtaacttagaagtaacacacaccgatcaacagtcagcgtggcacaccagccacgttttgatcaagcacttctgttaccccggactgagtatcaatagactgctcacgcggttgaaggagaaagcgttcgttatccggccaactacttcgaaaaacctagtaacaccgtggaagttgcagagtgtttcgctcagcactaccccagtgtagatcaggtcgatgagtcaccgcattccccacgggcgaccgtggcggtggctgcgttggcggcctgcccatgggactcactatttgttttcgcgcccagttgcaaaaagtgtcgcccatgggacgctctaatacagacatggtgcgaagagtctattgagctagttggtagtcctccggcccctgaatgcggctaatcctaactgcggagcacacaccctcaagccagagggcagtgtgtcgtaacgggcaactctgcagcggaaccgactactttgggtgtcgtgtttcattttattcctatactggctgcttatggtgacaattgagagatcgttaccatatagctattggattggccatccggtgactaatagagctattatatatccctttgttgggtttataccacttagcttgaaagaggttaaaacattacaattcattgttaagttgaatacagcaaa

SEQ ID NO: 108 - DNA, 784 bp, Artificial sequence
  synthetic
ttaaaacagcctgtgggttgatcccacccacaggcccattgggcgctagcactctggtatcacggtacctttgtgcgcctgttttataccccctcccccaactgtaacttagaagtaacacacaccgatcaacagtcagcgtggcacaccagccacgttttgatcaagcacttctgttaccccggactgagtatcaatagactgctcacgcggttgaaggagaaagcgttcgttatccggccaactacttcgaaaaacctagtaacaccgtggaagttgcagagtgtttcgctcagcactaccccagtgtagatcaggtcgatgagtcaccgcattccccacgggcgaccgtggcggtggctgcgttggcggcctgcccatggggaaacccatgggacgctctaatacagacatggtgcgaagagtctattgagctagttggtagtcactcactatttgttttcgcgcccagttgcaaaaagtgtcgccccctccggcccctgaatgcggctaatcctaactgcggagcacacaccctcaagccagagggcagtgtgtcgtaacgggcaactctgcagcggaaccgactactttgggtgtcgtgtttcattttattcctatactggctgcttatggtgacaattgagagatcgttaccatatagctattggattggccatccggtgactaatagagctattatatatccctttgttgggtttataccacttagcttgaaagaggttaaaacattacaattcattgttaagttgaatacagcaaa

SEQ ID NO: 109 - DNA, 774 bp, Artificial sequence
  synthetic
ttaaaacagcctgtgggttgatcccacccacaggcccattgggcgctagcactctggtatcacggtacctttgtgcgcctgttttataccccctcccccaactgtaacttagaagtaacacacaccgatcaacagtcagcgtggcacaccagccacgttttgatcaagcacttctgttaccccggactgagtatcaatagactgctcacgcggttgaaggagaaagcgttcgttatccggccaactacttcgaaaaacctagtaacaccgtggaagttgcagagtgtttcgctcagcactaccccagtgtagatcaggtcgatgagtcaccgcattccccacgggcgaccgtggcggtggctgcgttggcggcctgcccatggggaaacccatgggacgctctaatacagacatggtgcgaagagtctattgagctagttggtagtcctccggcccctgaatgcggctaatcctaactgcggagcacacaccctcactcactatttgttttcgcgcccagttgcaaaaagtgtcggagggcagtgtgtcgtaacgggcaactctgcagcggaaccgactactttgggtgtcgtgtttcattttattcctatactggctgcttatggtgacaattgagagatcgttaccatatagctattggattggccatccggtgactaatagagctattatatatccctttgttgggtttataccacttagcttgaaagaggttaaaacattacaattcattgttaagttgaatacagcaaa

SEQ ID NO: 110 - DNA, 780 bp, Artificial sequence
  synthetic
ttaaaacagcctgtgggttgatcccacccacaggcccattgggcgctagcactctggtatcacggtacctttgtgcgcctgttttataccccctcccccaactgtaacttagaagtaacacacaccgatcaacagtcagcgtggcacaccagccacgttttgatcaagcacttctgttaccccggactgagtatcaatagactgctcacgcggttgaaggagaaagcgttcgttatccggccaactacttcgaaaaacctagtaacaccgtggaagttgcagagtgtttcgctcagcactaccccagtgtagatcaggtcgatgagtcaccgcattccccacgggcgaccgtggcggtggctgcgttggcggcctgcccatggggaaacccatgggacgctctaatacagacatggtgcgaagagtctattgagctagttggtagtcctccggcccctgaatgcggctaatcctaactgcggagcacacaccctcaagccagagggcagtgtgtcgtaacgggcaactctgcagcggaaccgactactttgggtgtcgtgtttcattttactcactatttgttttcgcgcccagttgcaaaaagtgtcgattcctatactggctgcttatggtgacaattgagagatcgttaccatatagctattggattggccatccggtgactaatagagctattatatatccctttgttgggtttataccacttagcttgaaagaggttaaaacattacaattcattgttaagttgaatacagcaaa

SEQ ID NO: 111 - DNA, 653 bp, Artificial sequence
  synthetic
ttaaaacagcggatgggtaccccaccatccgacccactgggtgtagtactctggtacttcgtacctttgtacgcctgttcttcccattgtacccttcctgaacttccaacccaagtaacgttagaagctcaacatttagtacaacaggaagcaccacatccagtggtgtttagtacaagcacttctgtttccccggagcgaggtataggctgtacccactgccaaaaacctttaaccgttatccgccaaccaactacgtaaaagctagtagtattatgtttttaactaggcgttcgatcaggcactcactatttgttttcgcgcccagttgcaaaaagtgtcggccagtttggtcgatgaggctaggaattccccacgggtgaccgtgtcctagcctgcgtggcggccaacccagcttatgctgggacgcctttttatagacatggtgtgaagactcgcatgtgcttggttgtgattcctccggcccctgaatgcggctaaccttaaccctggagccttgtgtcacaaaccagtgatgataaggtcgtaatgagcaattccgggacgggaccgactactttgggtgtccgtgtttcttatttttcttattattgtcttatggtcacagcatatatataacatatactgtgatc

SEQ ID NO: 112 - DNA, 655 bp, Artificial sequence
  synthetic
ttaaaacagcggatgggtaccccaccatccgacccactgggtgtagtactctggtacttcgtacctttgtacgcctgttcttcccattgtacccttcctgaacttccaacccaagtaacgttagaagctcaacatttagtacaacaggaagcaccacatccagtggtgtttagtacaagcacttctgtttccccggagcgaggtataggctgtacccactgccaaaaacctttaaccgttatccgccaaccaactacgtaaaagctagtagtattatgtttttaactaggcgttcgatcaggcgactcactatttgttttcgcgcccagttgcaaaaagtgtcgcgccagtttggtcgatgaggctaggaattccccacgggtgaccgtgtcctagcctgcgtggcggccaacccagcttatgctgggacgcctttttatagacatggtgtgaagactcgcatgtgcttggttgtgattcctccggcccctgaatgcggctaaccttaaccctggagccttgtgtcacaaaccagtgatgataaggtcgtaatgagcaattccgggacgggaccgactactttgggtgtccgtgtttcttatttttcttattattgtcttatggtcacagcatatatataacatatactgtgatc

SEQ ID NO: 113 - DNA, 657 bp, Artificial sequence
  synthetic
ttaaaacagcggatgggtaccccaccatccgacccactgggtgtagtactctggtacttcgtacctttgtacgcctgttcttcccattgtacccttcctgaacttccaacccaagtaacgttagaagctcaacatttagtacaacaggaagcaccacatccagtggtgtttagtacaagcacttctgtttccccggagcgaggtataggctgtacccactgccaaaaacctttaaccgttatccgccaaccaactacgtaaaagctagtagtattatgtttttaactaggcgttcgatcaggcggactcactatttgttttcgcgcccagttgcaaaaagtgtcgccgccagtttggtcgatgaggctaggaattccccacgggtgaccgtgtcctagcctgcgtggcggccaacccagcttatgctgggacgcctttttatagacatggtgtgaagactcgcatgtgcttggttgtgattcctccggcccctgaatgcggctaaccttaaccctggagccttgtgtcacaaaccagtgatgataaggtcgtaatgagcaattccgggacgggaccgactactttgggtgtccgtgtttcttatttttcttattattgtcttatggtcacagcatatatataacatatactgtgatc

SEQ ID NO: 114 - DNA, 659 bp, Artificial sequence
  synthetic
ttaaaacagcggatgggtaccccaccatccgacccactgggtgtagtactctggtacttcgtacctttgtacgcctgttcttcccattgtacccttcctgaacttccaacccaagtaacgttagaagctcaacatttagtacaacaggaagcaccacatccagtggtgtttagtacaagcacttctgtttccccggagcgaggtataggctgtacccactgccaaaaacctttaaccgttatccgccaaccaactacgtaaaagctagtagtattatgtttttaactaggcgttcgatcaggtggaactcactatttgttttcgcgcccagttgcaaaaagtgtcgtccactagtttggtcgatgaggctaggaattccccacgggtgaccgtgtcctagcctgcgtggcggccaacccagcttatgctgggacgcctttttatagacatggtgtgaagactcgcatgtgcttggttgtgattcctccggcccctgaatgcggctaaccttaaccctggagccttgtgtcacaaaccagtgatgataaggtcgtaatgagcaattccgggacgggaccgactactttgggtgtccgtgtttcttatttttcttattattgtcttatggtcacagcatatatataacatatactgtgatc

SEQ ID NO: 115 - DNA, 661 bp, Artificial sequence
  synthetic
ttaaaacagcggatgggtaccccaccatccgacccactgggtgtagtactctggtacttcgtacctttgtacgcctgttcttcccattgtacccttcctgaacttccaacccaagtaacgttagaagctcaacatttagtacaacaggaagcaccacatccagtggtgtttagtacaagcacttctgtttccccggagcgaggtataggctgtacccactgccaaaaacctttaaccgttatccgccaaccaactacgtaaaagctagtagtattatgtttttaactaggcgttcgatcaggtggagactcactatttgttttcgcgcccagttgcaaaaagtgtcgctccactagtttggtcgatgaggctaggaattccccacgggtgaccgtgtcctagcctgcgtggcggccaacccagcttatgctgggacgcctttttatagacatggtgtgaagactcgcatgtgcttggttgtgattcctccggcccctgaatgcggctaaccttaaccctggagccttgtgtcacaaaccagtgatgataaggtcgtaatgagcaattccgggacgggaccgactactttgggtgtccgtgtttcttatttttcttattattgtcttatggtcacagcatatatataacatatactgtgatc

SEQ ID NO: 116 - DNA, 663 bp, Artificial sequence
  synthetic
ttaaaacagcggatgggtaccccaccatccgacccactgggtgtagtactctggtacttcgtacctttgtacgcctgttcttcccattgtacccttcctgaacttccaacccaagtaacgttagaagctcaacatttagtacaacaggaagcaccacatccagtggtgtttagtacaagcacttctgtttccccggagcgaggtataggctgtacccactgccaaaaacctttaaccgttatccgccaaccaactacgtaaaagctagtagtattatgtttttaactaggcgttcgatcaggtggaggactcactatttgttttcgcgcccagttgcaaaaagtgtcgcctccactagtttggtcgatgaggctaggaattccccacgggtgaccgtgtcctagcctgcgtggcggccaacccagcttatgctgggacgcctttttatagacatggtgtgaagactcgcatgtgcttggttgtgattcctccggcccctgaatgcggctaaccttaaccctggagccttgtgtcacaaaccagtgatgataaggtcgtaatgagcaattccgggacgggaccgactactttgggtgtccgtgtttcttatttttcttattattgtcttatggtcacagcatatatataacatatactgtgatc

SEQ ID NO: 117 - DNA, 646 bp, Artificial sequence
  synthetic
ttaaaacagcggatgggtaccccaccatccgacccactgggtgtagtactctggtacttcgtacctttgtacgcctgttcttcccattgtacccttcctgaacttccaacccaagtaacgttagaagctcaacatttagtacaacaggaagcaccacatccagtggtgtttagtacaagcacttctgtttccccggagcgaggtataggctgtacccactgccaaaaacctttaaccgttatccgccaaccaactacgtaaaagctagtagtattatgtttttaactaggcgttcgatcaggtggatttcccctccactagtttggtcgatgaggctaggaactcactatttgttttcgcgcccagttgcaaaaagtgtcgtcctagcctgcgtggcggccaacccagcttatgctgggacgcctttttatagacatggtgtgaagactcgcatgtgcttggttgtgattcctccggcccctgaatgcggctaaccttaaccctggagccttgtgtcacaaaccagtgatgataaggtcgtaatgagcaattccgggacgggaccgactactttgggtgtccgtgtttcttatttttcttattattgtcttatggtcacagcatatatataacatatactgtgatc

SEQ ID NO: 118 - DNA, 662 bp, Artificial sequence
  synthetic
ttaaaacagcggatgggtaccccaccatccgacccactgggtgtagtactctggtacttcgtacctttgtacgcctgttcttcccattgtacccttcctgaacttccaacccaagtaacgttagaagctcaacatttagtacaacaggaagcaccacatccagtggtgtttagtacaagcacttctgtttccccggagcgaggtataggctgtacccactgccaaaaacctttaaccgttatccgccaaccaactacgtaaaagctagtagtattatgtttttaactaggcgttcgatcaggtggatttcccctccactagtttggtcgatgaggctaggaattccccacggactcactatttgttttcgcgcccagttgcaaaaagtgtcgccgtgtcctagcctgcgtggcggccaacccagcttatgctgggacgcctttttatagacatggtgtgaagactcgcatgtgcttggttgtgattcctccggcccctgaatgcggctaaccttaaccctggagccttgtgtcacaaaccagtgatgataaggtcgtaatgagcaattccgggacgggaccgactactttgggtgtccgtgtttcttatttttcttattattgtcttatggtcacagcatatatataacatatactgtgatc

SEQ ID NO: 119 - DNA, 656 bp, Artificial sequence
  synthetic
ttaaaacagcggatgggtaccccaccatccgacccactgggtgtagtactctggtacttcgtacctttgtacgcctgttcttcccattgtacccttcctgaacttccaacccaagtaacgttagaagctcaacatttagtacaacaggaagcaccacatccagtggtgtttagtacaagcacttctgtttccccggagcgaggtataggctgtacccactgccaaaaacctttaaccgttatccgccaaccaactacgtaaaagctagtagtattatgtttttaactaggcgttcgatcaggtggatttcccctccactagtttggtcgatgaggctaggaattccccacgggtgaccgtgtcctagcctgcgtggcggccaacccactcactatttgttttcgcgcccagttgcaaaaagtgtcggggacgcctttttatagacatggtgtgaagactcgcatgtgcttggttgtgattcctccggcccctgaatgcggctaaccttaaccctggagccttgtgtcacaaaccagtgatgataaggtcgtaatgagcaattccgggacgggaccgactactttgggtgtccgtgtttcttatttttcttattattgtcttatggtcacagcatatatataacatatactgtgatc

SEQ ID NO: 120 - DNA, 658 bp, Artificial sequence
  synthetic
ttaaaacagcggatgggtaccccaccatccgacccactgggtgtagtactctggtacttcgtacctttgtacgcctgttcttcccattgtacccttcctgaacttccaacccaagtaacgttagaagctcaacatttagtacaacaggaagcaccacatccagtggtgtttagtacaagcacttctgtttccccggagcgaggtataggctgtacccactgccaaaaacctttaaccgttatccgccaaccaactacgtaaaagctagtagtattatgtttttaactaggcgttcgatcaggtggatttcccctccactagtttggtcgatgaggctaggaattccccacgggtgaccgtgtcctagcctgcgtggcggccaacccgactcactatttgttttcgcgcccagttgcaaaaagtgtcgcgggacgcctttttatagacatggtgtgaagactcgcatgtgcttggttgtgattcctccggcccctgaatgcggctaaccttaaccctggagccttgtgtcacaaaccagtgatgataaggtcgtaatgagcaattccgggacgggaccgactactttgggtgtccgtgtttcttatttttcttattattgtcttatggtcacagcatatatataacatatactgtgatc

SEQ ID NO: 121 - DNA, 660 bp, Artificial sequence
  synthetic
ttaaaacagcggatgggtaccccaccatccgacccactgggtgtagtactctggtacttcgtacctttgtacgcctgttcttcccattgtacccttcctgaacttccaacccaagtaacgttagaagctcaacatttagtacaacaggaagcaccacatccagtggtgtttagtacaagcacttctgtttccccggagcgaggtataggctgtacccactgccaaaaacctttaaccgttatccgccaaccaactacgtaaaagctagtagtattatgtttttaactaggcgttcgatcaggtggatttcccctccactagtttggtcgatgaggctaggaattccccacgggtgaccgtgtcctagcctgcgtggcggccaacccggactcactatttgttttcgcgcccagttgcaaaaagtgtcgccgggacgcctttttatagacatggtgtgaagactcgcatgtgcttggttgtgattcctccggcccctgaatgcggctaaccttaaccctggagccttgtgtcacaaaccagtgatgataaggtcgtaatgagcaattccgggacgggaccgactactttgggtgtccgtgtttcttatttttcttattattgtcttatggtcacagcatatatataacatatactgtgatc

SEQ ID NO: 122 - DNA, 662 bp, Artificial sequence
  synthetic
ttaaaacagcggatgggtaccccaccatccgacccactgggtgtagtactctggtacttcgtacctttgtacgcctgttcttcccattgtacccttcctgaacttccaacccaagtaacgttagaagctcaacatttagtacaacaggaagcaccacatccagtggtgtttagtacaagcacttctgtttccccggagcgaggtataggctgtacccactgccaaaaacctttaaccgttatccgccaaccaactacgtaaaagctagtagtattatgtttttaactaggcgttcgatcaggtggatttcccctccactagtttggtcgatgaggctaggaattccccacgggtgaccgtgtcctagcctgcgtggcggccaacccagcactcactatttgttttcgcgcccagttgcaaaaagtgtcggctgggacgcctttttatagacatggtgtgaagactcgcatgtgcttggttgtgattcctccggcccctgaatgcggctaaccttaaccctggagccttgtgtcacaaaccagtgatgataaggtcgtaatgagcaattccgggacgggaccgactactttgggtgtccgtgtttcttatttttcttattattgtcttatggtcacagcatatatataacatatactgtgatc

SEQ ID NO: 123 - DNA, 664 bp, Artificial sequence
  synthetic
ttaaaacagcggatgggtaccccaccatccgacccactgggtgtagtactctggtacttcgtacctttgtacgcctgttcttcccattgtacccttcctgaacttccaacccaagtaacgttagaagctcaacatttagtacaacaggaagcaccacatccagtggtgtttagtacaagcacttctgtttccccggagcgaggtataggctgtacccactgccaaaaacctttaaccgttatccgccaaccaactacgtaaaagctagtagtattatgtttttaactaggcgttcgatcaggtggatttcccctccactagtttggtcgatgaggctaggaattccccacgggtgaccgtgtcctagcctgcgtggcggccaacccagccactcactatttgttttcgcgcccagttgcaaaaagtgtcgggctgggacgcctttttatagacatggtgtgaagactcgcatgtgcttggttgtgattcctccggcccctgaatgcggctaaccttaaccctggagccttgtgtcacaaaccagtgatgataaggtcgtaatgagcaattccgggacgggaccgactactttgggtgtccgtgtttcttatttttcttattattgtcttatggtcacagcatatatataacatatactgtgatc

SEQ ID NO: 124 - DNA, 666 bp, Artificial sequence
  synthetic
ttaaaacagcggatgggtaccccaccatccgacccactgggtgtagtactctggtacttcgtacctttgtacgcctgttcttcccattgtacccttcctgaacttccaacccaagtaacgttagaagctcaacatttagtacaacaggaagcaccacatccagtggtgtttagtacaagcacttctgtttccccggagcgaggtataggctgtacccactgccaaaaacctttaaccgttatccgccaaccaactacgtaaaagctagtagtattatgtttttaactaggcgttcgatcaggtggatttcccctccactagtttggtcgatgaggctaggaattccccacgggtgaccgtgtcctagcctgcgtggcggccaacccagcccactcactatttgttttcgcgcccagttgcaaaaagtgtcggggctgggacgcctttttatagacatggtgtgaagactcgcatgtgcttggttgtgattcctccggcccctgaatgcggctaaccttaaccctggagccttgtgtcacaaaccagtgatgataaggtcgtaatgagcaattccgggacgggaccgactactttgggtgtccgtgtttcttatttttcttattattgtcttatggtcacagcatatatataacatatactgtgatc

SEQ ID NO: 125 - DNA, 695 bp, Artificial sequence
  synthetic
ttaaaacagcggatgggtaccccaccatccgacccactgggtgtagtactctggtacttcgtacctttgtacgcctgttcttcccattgtacccttcctgaacttccaacccaagtaacgttagaagctcaacatttagtacaacaggaagcaccacatccagtggtgtttagtacaagcacttctgtttccccggagcgaggtataggctgtacccactgccaaaaacctttaaccgttatccgccaaccaactacgtaaaagctagtagtattatgtttttaactaggcgttcgatcaggtggaactcactatttgttttcgcgcccagttgcaaaaagtgtcgtccactagtttggtcgatgaggctaggaattccccacgggtgaccgtgtcctagcctgcgtggcggccaacccagcactcactatttgttttcgcgcccagttgcaaaaagtgtcggctgggacgcctttttatagacatggtgtgaagactcgcatgtgcttggttgtgattcctccggcccctgaatgcggctaaccttaaccctggagccttgtgtcacaaaccagtgatgataaggtcgtaatgagcaattccgggacgggaccgactactttgggtgtccgtgtttcttatttttcttattattgtcttatggtcacagcatatatataacatatactgtgatc

SEQ ID NO: 126 - DNA, 76 bp, Artificial sequence
  synthetic
taatacgactcactatagggactcactatttgttttcgcgcccagttgcaaaaagtgtcgccgcatctagagggcc

SEQ ID NO: 127 - DNA, 76 bp, Artificial sequence
  synthetic
taatacgactcactatagggtccagaccccaacagactccataactaatatgtcgcaaaaccgcatctagagggcc

SEQ ID NO: 128 - DNA, 77 bp, Artificial sequence
  synthetic
taatacgactcactatagggtccgtagaaacgcgttaaggtgaaagtttgagggctcctcaccgcatctagagggcc

SEQ ID NO: 129 - DNA, 76 bp, Artificial sequence
  synthetic
taatacgactcactatagggtccgcggcgccatctcatgtttagttgtcctatgtcgagcccgcatctagagggcc

SEQ ID NO: 130 - RNA, 76 nt, Artificial sequence
  synthetic
uaauacgacucacuauagggacucacuauuuguuuucgcgcccaguugcaaaaagugucgccgcaucuagagggcc

SEQ ID NO: 131 - RNA, 76 nt, Artificial sequence
  synthetic
uaauacgacucacuauaggguccagaccccaacagacuccauaacuaauaugucgcaaaaccgcaucuagagggcc

SEQ ID NO: 132 - RNA, 77 nt, Artificial sequence
  synthetic
uaauacgacucacuauaggguccguagaaacgcguuaaggugaaaguuugagggcuccucaccgcaucuagagggcc

SEQ ID NO: 133 - RNA, 76 nt, Artificial sequence
  synthetic
uaauacgacucacuauaggguccgcggcgccaucucauguuuaguuguccuaugucgagcccgcaucuagagggcc

SEQ ID NO: 134 - RNA, 40 nt, Artificial sequence
  synthetic
acucacuauuuguuuucgcgcccaguugcaaaaagugucg

SEQ ID NO: 135 - RNA, 4 nt, Artificial sequence
  synthetic
  misc_feature (2)..(2): n is a, c, g, or u
uncg

SEQ ID NO: 136 - RNA, 4 nt, Artificial sequence
  synthetic
  misc_feature (2)..(2): n is a, c, g, or u
gnra

SEQ ID NO: 137 - RNA, 4 nt, Artificial sequence
  synthetic
cuug

SEQ ID NO: 138 - DNA, 203 bp, Artificial sequence
  synthetic
ggcgcgccagtcctccgggaacccctaccccatccccttattcagcacatgaaataaacaaggggcatccaaatcttgcggcaacgcccccgggacatgcatcgtcccctggactctctcaaaccccttatccctctggacagaatgcaggtccaaccacgctggtataccctcaaacccctcagacacgactcggaccgatg

SEQ ID NO: 139 - DNA, 203 bp, Artificial sequence
  synthetic
ggcgcgccagtccttgctccggctgccggccggcggccccgcgctcgcccgccccgcttccgcccgctgtcctgctgcacgaacccttccaactctcctttcctcccccacccttgagttacccctctgtctttcctgctgttgcgcgggtgctcccacagcggagcggagattacagagccgccgggcgactcggaccgatg

SEQ ID NO: 140 - DNA, 203 bp, Artificial sequence
  synthetic
ggcgcgccagtcctctgtctctgcctggcaggcgcacgcgcccagcaccctgcctccggcgatgccgccccagcccctctgatggccctcctctctgctgccactcattccagaacaggaggcatgagcccggaacgcgcttgcttttaggagacagccactttctgtgtggtacgctggattcaaggcgactcggaccgatg

SEQ ID NO: 141 - DNA, 203 bp, Artificial sequence
  synthetic
ggcgcgccagtccttttcgcgagtgtgagagggaagcgccgcggcctgtatttctagacctgcccttcgcctggttcgtggcgccttgtgaccccgggcccctgccgcctgcaagtcggaaattgcgctgtgctcctgtgctacggcctgtggctggactgcctgctgctgcccaactggctggcaagcgactcggaccgatg

SEQ ID NO: 142 - DNA, 203 bp, Artificial sequence
  synthetic
ggcgcgccagtcctaagtcctggagcctccagagggctgtcggcgcagtagcagcgagcagcagagtccgcacgctccggcgaggggcagaagagcgcgagggagcgcggggcagcagaagcgagagccgagcgcggacccagccaggacccacagccctccccagctgcccaggaagagccccagcccgactcggaccgatg

SEQ ID NO: 143 - DNA, 203 bp, Artificial sequence
  synthetic
ggcgcgccagtcctgggacctggaagcgccccagccccgcagcgatcgcagattcggctttcaaacaaaagaggcgccccggggggtgggaccgggacctcacccggtcctcgcagagttgcggccgcccgccccttcagccccggctctccgtatgcgcatgagcagaggcgcctccctctgttcctcgactcggaccgatg

SEQ ID NO: 144 - DNA, 203 bp, Artificial sequence
  synthetic
ggcgcgccagtcctttaaaacagcctgtgggttgatcccacccacagggcccattgggcgctagcactctggtatcacggtacctttgtgcgcctgttttataccccctcccccaactgtaacttagaagtaacacacaccgatcaacagtcagcgtggcacaccagccacgttttgatcaagcacttcgactcggaccgatg

SEQ ID NO: 145 - DNA, 203 bp, Artificial sequence
  synthetic
ggcgcgccagtcctttaaaacagctctggggttgttcccaccccagaggcccacgtggcggctagtacactggtatcacggtacctttgtacgcctgttttatactccctcccccgcaacttagaagcatacaattcaagctcaataggagggggtgcaagccagcgcctccgtgggcaagcactactcgactcggaccgatg

SEQ ID NO: 146 - DNA, 203 bp, Artificial sequence
  synthetic
ggcgcgccagtcctgataaaagaacctataatcccttcgcacaccgcgtcacaccgcgctatatgctgctcattaggaattacggctccttttttgtggatacaatctcttgtatacgatatacttattgttaatttcattgacctttacgcaatcctgcgtaaatgctggtatagggtgtacttcggcgactcggaccgatg

SEQ ID NO: 147 - DNA, 203 bp, Artificial sequence
  synthetic
ggcgcgccagtcctcaaaattgcgtgcgagaaagcacgcaaatcaaagtctagtgcgtaattcactcactaccggcgtaatttgtggttatgctattgcgttgagagtgttgtgggcgtagtacgggggcttttggtttgtgtgtgattaatatgcattcccagttttgtttagttttagattactgacgactcggaccgatg

SEQ ID NO: 148 - DNA, 203 bp, Artificial sequence
  synthetic
ggcgcgccagtcctcttctttccggggctcctagggacgccagaaggaagtcaacctctgctgcttctccttggcctgcgttggaccttcctttttttgttgtttttttttgtttttcccctttcttccttttgaattaactggcttcttggctggatgttttcaacttctttcctggctgcgaacttcgactcggaccgatg

SEQ ID NO: 149 - DNA, 203 bp, Artificial sequence
  synthetic
ggcgcgccagtcctttctccttggcctgcgttggaccttcctttttttgttgtttttttttgtttttcccctttcttccttttgaattaactggcttcttggctggatgttttcaacttctttcctggctgcgaacttttccccaattgttttccttttacaacagggggagaaagtgctctgtggtccgactcggaccgatg

SEQ ID NO: 150 - DNA, 203 bp, Artificial sequence
  synthetic
ggcgcgccagtcctaacttctttcctggctgcgaacttttccccaattgttttccttttacaacagggggagaaagtgctctgtggtccgaggcgagccgtgaagttgcgtgtgcgtggcagtgtgcgtggcaggatgtgcgtgcgtgtgtaacccgagccgcccgatctgtttcgatctgcgccgcgcgactcggaccgatg

SEQ ID NO: 151 - DNA, 203 bp, Artificial sequence
  synthetic
ggcgcgccagtcctcgtggcagtgtgcgtggcaggatgtgcgtgcgtgtgtaacccgagccgcccgatctgtttcgatctgcgccgcggagccctccctcaaggcccgctccacctgctgcggttacgcggcgctcgtgggtgttcgtgcctcggagcagctaaccggcgggtgctgggcgacggtggcgactcggaccgatg

SEQ ID NO: 152 - DNA, 203 bp, Artificial sequence
  synthetic
ggcgcgccagtcctgtcagggctgagtcacccagctgatgtagacagtggctgccttccgaagagtgcgtgtttgcatgtgtgtgactctgcggctgctcaactcccaacaaaccagaggaccagccacaaacttaaccaacatccccaaacccgagttcacagatgtgggagagctgtagaaccctgcgactcggaccgatg

SEQ ID NO: 153 - DNA, 203 bp, Artificial sequence
  synthetic
ggcgcgccagtcctatgtgggagagctgtagaaccctgagtgtcatcgactgggccttcttatgattgttgttttaagattagctgaagatctctgaaacgctgaattttctgcactgagcgttttgacagaattcattgagagaacagagaacatgacaagtacttctagctcagcactgctccaaccgactcggaccgatg

SEQ ID NO: 154 - DNA, 203 bp, Artificial sequence
  synthetic
ggcgcgccagtcctcttctagctcagcactgctccaactactgaagctgattttcaaggctacttaaaaaaatctgcagcgtacattaatggatttctgttgtgtttaaattctccacagattgtattgtaaatattttatgaagtagagcatatgtatatatttatatatacgtgcacatacattagcgactcggaccgatg

SEQ ID NO: 155 - DNA, 203 bp, Artificial sequence
  synthetic
ggcgcgccagtccttatatatacgtgcacatacattagtagcactacctttggaagtctcagctcttgcttttcgggactgaagccagttttgcatgataaaagtggccttgttacgggagataattgtgttctgttgggactttagacaaaactcacctgcaaaaaactgacaggcattaactactgcgactcggaccgatg

SEQ ID NO: 156 - DNA, 203 bp, Artificial sequence
  synthetic
ggcgcgccagtcctcttgcttttcgggactgaagccagttttgcatgataaaagtggccttgttacgggagataattgtgttctgttgggactttagacaaaactcacctgcaaaaaactgacaggcattaactactggaacttccaaataatgtgtttgctgatcgttttactcttcgcataaatatcgactcggaccgatg

SEQ ID NO: 157 - DNA, 203 bp, Artificial sequence
  synthetic
ggcgcgccagtcctaaaactgacaggcattaactactggaacttccaaataatgtgtttgctgatcgttttactcttcgcataaatattttaggaagtgtatgagaattttgccttcaggaacttttctaacagccaaagacagaacttaacctctgcaagcaagattcgtggaagatagtctccactcgactcggaccgatg

SEQ ID NO: 158 - DNA, 203 bp, Artificial sequence
  synthetic
ggcgcgccagtcctttcaggaacttttctaacagccaaagacagaacttaacctctgcaagcaagattcgtggaagatagtctccactttttaatgcactaagcaatcggttgctaggagcccatcctgggtcagaggccgatccgcagaaccagaacgttttcccctcctggactgttagtaacttacgactcggaccgatg

SEQ ID NO: 159 - DNA, 203 bp, Artificial sequence
  synthetic
ggcgcgccagtcctgggtatgtggcgagacagagccctgcacccctaattcccggtggaaaactcctgttgccgtttccctccaccggcctggagtctcccagtcttgtcccggcagtgccgccctccccactaagacctaggcgcaaaggcttggctcatggttgacagctcagagagagaaagatccgactcggaccgatg

SEQ ID NO: 160 - DNA, 203 bp, Artificial sequence
  synthetic
ggcgcgccagtcctccacacacagcgcgggcttctagcgctcggcaccggcgggccaggcgcgtcctgccttcatttatccagcagcttttcggaaaatgcatttgctgttcggagtttaatcagaagacgattcctgcctccgtccccggctccttcatcgtcccatctcccctgtctctctcctggcgactcggaccgatg

SEQ ID NO: 161 - DNA, 203 bp, Artificial sequence
  synthetic
ggcgcgccagtcctcctgccttcatttatccagcagcttttcggaaaatgcatttgctgttcggagtttaatcagaagacgattcctgcctccgtccccggctccttcatcgtcccatctcccctgtctctctcctggggaggcgtgaagcggtcccgtggatagagattcatgcctgtgtccgcgcgcgactcggaccgatg

SEQ ID NO: 162 - DNA, 203 bp, Artificial sequence
  synthetic
ggcgcgccagtccttcgatctggaaatcctcctaatttttactccctctccccccgactcctgattcattgggaagtttcaaatcagctataactggagagtgctgaagattgatgggatcgttgccttatgcatttgttttggttttacaaaaaggaaacttgacagaggatcatgctgtacttaaacgactcggaccgatg

SEQ ID NO: 163 - DNA, 203 bp, Artificial sequence
  synthetic
ggcgcgccagtcctaaacgcacctgattttttacttattagtttgttttttctttaacctttcagcatcacagaggaagtagactgatattaacaatacttactaataataacgtgcctcatgaaataaagatccgaaaggaattggaataaaaatttcctgcgtctcatgccaagagggaaacaccacgactcggaccgatg

SEQ ID NO: 164 - DNA, 203 bp, Artificial sequence
  synthetic
ggcgcgccagtccttgcctcatgaaataaagatccgaaaggaattggaataaaaatttcctgcgtctcatgccaagagggaaacaccagaatcaagtgttccgcgtgattgaagacaccccctcgtccaagaatgcaaagcacatccaataaaatagctggattataactcctcttctttctctggggcgactcggaccgatg

SEQ ID NO: 165 - DNA, 203 bp, Artificial sequence
  synthetic
ggcgcgccagtcctaaattctacataagagtctatcattgatttctttttgtggtaaaaatcttagttcatgtgaagaaatttcatgtgaatgttttagctatcaaacagtactgtcacctactcatgcacaaaactgcctcccaaagacttttcccaggtccctcgtatcaaaacattaagagtatacgactcggaccgatg

SEQ ID NO: 166 - DNA, 203 bp, Artificial sequence
  synthetic
ggcgcgccagtcctgccaggggtccgcaacccttgccgcatccacgaaactttgcccatagcagcgggcgggcactttgcactggaacttacaacacccgagcaaggacgcgactctcccgacgcggggaggctattctgcccatttggggacacttccccgccgctgccaggacccgcttctctgaacgactcggaccgatg

SEQ ID NO: 167 - DNA, 203 bp, Artificial sequence
  synthetic
ggcgcgccagtcctcgggcgggcactttgcactggaacttacaacacccgagcaaggacgcgactctcccgacgcggggaggctattctgcccatttggggacacttccccgccgctgccaggacccgcttctctgaaaggctctccttgcagctgcttagacgctggatttttttcgggtagtggaacgactcggaccgatg

SEQ ID NO: 168 - DNA, 203 bp, Artificial sequence
  synthetic
ggcgcgccagtcctggaacttacaacacccgagcaaggacgcgactctcccgacgcggggaggctattctgcccatttggggacacttccccgccgctgccaggacccgcttctctgaaaggctctccttgcagctgcttagacgctggatttttttcgggtagtggaaaaccagcagcctcccgcgacgactcggaccgatg

SEQ ID NO: 169 - DNA, 203 bp, Artificial sequence
  synthetic
ggcgcgccagtcctcctcccccttccctcccccttttttttgttttccgttcccctttcccctcccttccctatccccgacgaccggatcctgaggaggcagctgcggtggcagctgctgagttctcggtgaaggtatttcatttctcctgtcccctcccctccccaccccatctattaatattattccgactcggaccgatg

SEQ ID NO: 170 - DNA, 203 bp, Artificial sequence
  synthetic
ggcgcgccagtccttctagatgggggtcctgggccccagggtgtgcagccactgacttggggactgctggtggggtagggatgagggagggaggggcattgtgatgtacagggctgctctgtgagatcaagggtctcttaagggtgggagctggggcagggactacgagagcagccagatgggctgaacgactcggaccgatg

SEQ ID NO: 171 - DNA, 203 bp, Artificial sequence
  synthetic
ggcgcgccagtcctatgtatgcatgtgtatgtatgtatatgcatgtatgtgtatgtgtatatatgtatgtgtgtgtatgtatatgtgtgtgtatgtgtatgtgtgtgtgtatgtgtgtgtgtatgtatgtatgtatgtatatgtattatacacatatacacatattggtttttttaatcatttgagagcgactcggaccgatg

SEQ ID NO: 172 - DNA, 203 bp, Artificial sequence
  synthetic
ggcgcgccagtcctcccactcggcagccttcctctccaggatccccaaggctaggaggccaacctactaacaggtgggtgggtatggtgtgtggtttcactcagttcttctcatggggtttctctgagctccattcataccagaaagggagcaggagagagaggacaagtggatccaacagccttcgccgactcggaccgatg

SEQ ID NO: 173 - DNA, 203 bp, Artificial sequence
  synthetic
ggcgcgccagtccttactaacaggtgggtgggtatggtgtgtggtttcactcagttcttctcatggggtttctctgagctccattcataccagaaagggagcaggagagagaggacaagtggatccaacagccttcgctccaggggaatcagggcatcgcctccttttctgggaggacactcccttctcgactcggaccgatg

SEQ ID NO: 174 - DNA, 203 bp, Artificial sequence
  synthetic
ggcgcgccagtcctggggtttctctgagctccattcataccagaaagggagcaggagagagaggacaagtggatccaacagccttcgctccaggggaatcagggcatcgcctccttttctgggaggacactcccttctgatggtgaatgggaactcccttcctcctgcagcagcctgcctgcagctgtcgactcggaccgatg

SEQ ID NO: 175 - DNA, 203 bp, Artificial sequence
  synthetic
ggcgcgccagtcctacaagtggatccaacagccttcgctccaggggaatcagggcatcgcctccttttctgggaggacactcccttctgatggtgaatgggaactcccttcctcctgcagcagcctgcctgcagctgtcctggtagaacagtgtggacattgcagaagctgtcactgccccagaaagacgactcggaccgatg

SEQ ID NO: 176 - DNA, 203 bp, Artificial sequence
  synthetic
ggcgcgccagtcctggctggcgtgtgaccccgttttgagtcaggtggacagagggctggccaccttcggaaccatgggtgcaatacggagtcagacctcaatacaagcccactctttcacatatttgaacttttttcacatatcaactttttttgttcactgtgcagggattgttcattgctgctggacgactcggaccgatg

SEQ ID NO: 177 - DNA, 203 bp, Artificial sequence
  synthetic
ggcgcgccagtccttttcacatatttgaacttttttcacatatcaactttttttgttcactgtgcagggattgttcattgctgctggaggaagatcatggactgtcgcgggaaactgaagtggttgagtatccactagtcgtggatgagggcagtgacttcgcagttttttgcgaattacacatctctcgactcggaccgatg

SEQ ID NO: 178 - DNA, 203 bp, Artificial sequence
  synthetic
ggcgcgccagtcctcagggattgttcattgctgctggaggaagatcatggactgtcgcgggaaactgaagtggttgagtatccactagtcgtggatgagggcagtgacttcgcagttttttgcgaattacacatctctttgattatgttgtgactagttttgttagatagtcatttagtgtttgggatcgactcggaccgatg

SEQ ID NO: 179 - DNA, 203 bp, Artificial sequence
  synthetic
ggcgcgccagtcctggagaacttcacagttgctactcctgtgataggtttatcttagtttcattgtggtataaatggaatagcaggtgttgtcaggtacaaggtttgtagcttgccaatatgttcattaccaacactgcagattcccattgagttggtgggggttttgttacctttgttttttttctccgactcggaccgatg

SEQ ID NO: 180 - DNA, 203 bp, Artificial sequence
  synthetic
ggcgcgccagtcctacaaaagaggcgccccggggggtgggaccgggacctcacccggtcctcgcagagttgcggccgcccgccccttcagccccggctctccgtatgcgcatgagcagaggcgcctccctctgttcctcccaaggctaaactttctaattcccttctttgggctcgggggctcccggacgactcggaccgatg

SEQ ID NO: 181 - DNA, 203 bp, Artificial sequence
  synthetic
ggcgcgccagtcctgcagaggcgcctccctctgttcctcccaaggctaaactttctaattcccttctttgggctcgggggctcccggagcagggcgagagctcgcgtcgccggaaaggaagacgggaagaaagggcaggcggctcggcgggcgtcttctccactcctctgccgcgtccccgtggctgccgactcggaccgatg

SEQ ID NO: 182 - DNA, 203 bp, Artificial sequence
  synthetic
ggcgcgccagtcctgccgggcgaactcaaggggcgcagctctttgctttgacagagctggccggcggaggcgtgcagagcggcgagccggcgagccaggctgagaaactcgacccgggaacaaagaggggtcggactgagtgtgtgtgtcggctcgagctccgggagaggcatttgcccgaggccccgcgactcggaccgatg

SEQ ID NO: 183 - DNA, 203 bp, Artificial sequence
  synthetic
ggcgcgccagtcctcggaggcgtgcagagcggcgagccggcgagccaggctgagaaactcgacccgggaacaaagaggggtcggactgagtgtgtgtgtcggctcgagctccgggagaggcatttgcccgaggccccgctgtgactccccgagactccgcagtgccctccactgggagtccccgcgctcgactcggaccgatg

SEQ ID NO: 184 - DNA, 203 bp, Artificial sequence
  synthetic
ggcgcgccagtcctgagaggcatttgcccgaggccccgctgtgactccccgagactccgcagtgccctccactgggagtccccgcgcttgccggaaaaactttattcttggcaaacttctctttctcttcccctcctcctcggcccccatcttctgctcctcctccttctctagcagattaaatgagccgactcggaccgatg

SEQ ID NO: 185 - DNA, 203 bp, Artificial sequence
  synthetic
ggcgcgccagtcctccttctctagcagattaaatgagcctcgagaagaaaaaccgaagcgaaagggaagaaaataagaagatctaaaacggacatctccagcgtgggtggctcctttttctttttctttttttcccacccttcaggaagtggacgtttcgttatcttctgatccttgcaccttcttttcgactcggaccgatg

SEQ ID NO: 186 - DNA, 203 bp, Artificial sequence
  synthetic
ggcgcgccagtcctggaagaaaataagaagatctaaaacggacatctccagcgtgggtggctcctttttctttttctttttttcccacccttcaggaagtggacgtttcgttatcttctgatccttgcaccttcttttggggcaaacggggcccttctgcccagatcccctctcttttctcggaaaaccgactcggaccgatg

SEQ ID NO: 187 - DNA, 203 bp, Artificial sequence
  synthetic
ggcgcgccagtccttttttctttttctttttttcccacccttcaggaagtggacgtttcgttatcttctgatccttgcaccttcttttggggcaaacggggcccttctgcccagatcccctctcttttctcggaaaacaaactactaagtcggcatccggggtaactacagtggagagggtttccgcgcgactcggaccgatg

SEQ ID NO: 188 - DNA, 203 bp, Artificial sequence
  synthetic
ggcgcgccagtcctatcccctctcttttctcggaaaacaaactactaagtcggcatccggggtaactacagtggagagggtttccgcggagacgcgccgccggaccctcctctgcactttggggaggcgtgctccctccagaaccggcgttctccgcgcgcaaatcccggcgacgcggggtcgcggggcgactcggaccgatg

SEQ ID NO: 189 - DNA, 203 bp, Artificial sequence
  synthetic
ggcgcgccagtcctcactttggggaggcgtgctccctccagaaccggcgttctccgcgcgcaaatcccggcgacgcggggtcgcggggtggccgccggggcagcctcgtctagcgcgcgccgcgcagacgcccccggagtcgccagctaccgcagccctcgccgcccagtgcccttcggcctcggggccgactcggaccgatg

SEQ ID NO: 190 - DNA, 203 bp, Artificial sequence
  synthetic
ggcgcgccagtccttttttaaatttgcaattttatattttgcaaatattttgagagacattgatttttctccccgtgctcccccgttcttccctgcggagtgcgctgcgccgcccagccctgtcgccccccggaggtgatccctccctcctgcctgcccgccagcctgacctgtgcccggctcgcgggcgactcggaccgatg

SEQ ID NO: 191 - DNA, 203 bp, Artificial sequence
  synthetic
ggcgcgccagtcctccgtgctcccccgttcttccctgcggagtgcgctgcgccgcccagccctgtcgccccccggaggtgatccctccctcctgcctgcccgccagcctgacctgtgcccggctcgcgggccgcagcctcggcccccgcgcgcccccggcagctctcggcgcgatgagcatagagacgcgactcggaccgatg

SEQ ID NO: 192 - DNA, 203 bp, Artificial sequence
  synthetic
ggcgcgccagtcctgcaatccggagtgtcagctctccatctgtctctgcctggcaggcgcacgcgcccagcaccctgcctccggcgatgccgccccagcccctctgatggccctcctctctgctgccactcattccagaacaggaggcatgagcccggaacgcgcttgcttttaggagacagccacttcgactcggaccgatg

SEQ ID NO: 193 - DNA, 203 bp, Artificial sequence
  synthetic
ggcgcgccagtcctttgtaagtatcattatgaactaatgaattttcaacatatttgatatatttcaatccattgccatcattgttcttatcgatatttgagttggctcactttgccagtaagagtctattcaaattggcttctgagtccatttgacacaacacctttgatctttgacagtttccttggcgactcggaccgatg

SEQ ID NO: 194 - DNA, 203 bp, Artificial sequence
  synthetic
ggcgcgccagtcctcaatccattgccatcattgttcttatcgatatttgagttggctcactttgccagtaagagtctattcaaattggcttctgagtccatttgacacaacacctttgatctttgacagtttccttggttttaggtgctagatgatttctcaggctcaccttagacatttcctgccaccgactcggaccgatg

SEQ ID NO: 195 - DNA, 203 bp, Artificial sequence
  synthetic
ggcgcgccagtcctctcaccttagacatttcctgccacagacttagaatcagccatttctctaaggaccctgattccatttcatgagaaatgatagagaccacaatcaaaacaagtcatgaatttatactgatattttcaattcaaattaaagatgaggtttttgctaaatttttttgagtttatattcgactcggaccgatg

SEQ ID NO: 196 - DNA, 203 bp, Artificial sequence
  synthetic
ggcgcgccagtccttttcctaattagtaacataattattcatttgatgggtaaatattttagggccgattctttggttttatagccaagataccctgttgataaagtcttgtgggagcaattataagactggcttattttgaagctttttaaaaaagacatccttacctgttttaactgtagattatacgactcggaccgatg

SEQ ID NO: 197 - DNA, 203 bp, Artificial sequence
  synthetic
ggcgcgccagtcctgctgggagcgtgctttccacgacggtgacacgcttccctggattggcagccagactgccttccgggtcactgccatggaggagccgcagtcagatcctagcgtcgagccccctctgagtcaggaaacattttcagacctatggaaactacttcctgaaaacaacgttctgtccccgactcggaccgatg

SEQ ID NO: 198 - DNA, 203 bp, Artificial sequence
  synthetic
ggcgcgccagtcctatggaggagccgcagtcagatcctagcgtcgagccccctctgagtcaggaaacattttcagacctatggaaactacttcctgaaaacaacgttctgtcccccttgccgtcccaagcaatggatgatttgatgctgtccccggacgatattgaacaatggttcactgaagacccacgactcggaccgatg

SEQ ID NO: 199 - DNA, 203 bp, Artificial sequence
  synthetic
ggcgcgccagtccttttgcacctctccctgcccgggtgctcgagctgccgttgcaaagccaactttggaaaaagttttttgggggagacttgggccttgaggtgcccagctccgcgctttccgattttgggggcctttccagaaaatgttgcaaaaaagctaagccggcgggcagaggaaaacgcctgcgactcggaccgatg

SEQ ID NO: 200 - DNA, 203 bp, Artificial sequence
  synthetic
ggcgcgccagtcctcgctttccgattttgggggcctttccagaaaatgttgcaaaaaagctaagccggcgggcagaggaaaacgcctgtagccggcgagtgaagacgaaccatcgactgccgtgttccttttcctcttggaggttggagtcccctgggcgcccccacaccggtagacgcctcggctggcgactcggaccgatg

SEQ ID NO: 201 - DNA, 203 bp, Artificial sequence
  synthetic
ggcgcgccagtcctccggcgggcagaggaaaacgcctgtagccggcgagtgaagacgaaccatcgactgccgtgttccttttcctcttggaggttggagtcccctgggcgcccccacaccggtagacgcctcggctggttcgcgacgcagccccccggccgtggatgctcactcgggctcgggatccgcgactcggaccgatg

SEQ ID NO: 202 - DNA, 203 bp, Artificial sequence
  synthetic
ggcgcgccagtcctgactgccgtgttccttttcctcttggaggttggagtcccctgggcgcccccacaccggtagacgcctcggctggttcgcgacgcagccccccggccgtggatgctcactcgggctcgggatccgcccaggtagccggctcggacccaggtcctgcgcccaggtcctcccctgcccgactcggaccgatg

SEQ ID NO: 203 - DNA, 203 bp, Artificial sequence
  synthetic
ggcgcgccagtcctcacaccggtagacgcctcggctggttcgcgacgcagccccccggccgtggatgctcactcgggctcgggatccgcccaggtagccggctcggacccaggtcctgcgcccaggtcctcccctgccccccagcgacggagccggggccgggggcggcggcgcccgggggccatgcgcgactcggaccgatg

SEQ ID NO: 204 - DNA, 203 bp, Artificial sequence
  synthetic
ggcgcgccagtcctcagcctctgcagcggccgcggtggctgaggaggcccgagaggagtcggtggcagcggcggcggcgggaccggcagcagcagcagcagcagcagcagcaaccactagcctcctgccccgcggcgctgccgcacgagccccacgagccgctcaccccgccgttctcagcgctgccccgactcggaccgatg

SEQ ID NO: 205 - DNA, 203 bp, Artificial sequence
  synthetic
ggcgcgccagtcctcactagcctcctgccccgcggcgctgccgcacgagccccacgagccgctcaccccgccgttctcagcgctgcccgaccccgctcgcgcgccctcccgccgccagtcccggcagcgccctcagttgtcctccgactcgccctcggccttccgcgccagccgcagccacagccgcacgactcggaccgatg

SEQ ID NO: 206 - DNA, 203 bp, Artificial sequence
  synthetic
ggcgcgccagtcctccagtcccggcagcgccctcagttgtcctccgactcgccctcggccttccgcgccagccgcagccacagccgcaacgccacccgcagccacagccacagccacagccccaggcatagccttcggcacagccccggctccggctcctgcggcagctcctctgggcaccgtccctgcgactcggaccgatg

SEQ ID NO: 207 - DNA, 203 bp, Artificial sequence
  synthetic
ggcgcgccagtcctcatcaccgaacgatgagagaggactacagcgacaaagtgaaagccagccactggagtcgcagcccgcctcggccgccgcgggagcggttcgagttgggagacggccggaagccagtaaaagaagagaaaatggaagaaagggacctgctgtccgacttacaggacatcagcgaccgactcggaccgatg

SEQ ID NO: 208 - DNA, 203 bp, Artificial sequence
  synthetic
ggcgcgccagtcctacggccggaagccagtaaaagaagagaaaatggaagaaagggacctgctgtccgacttacaggacatcagcgacagcgagaggaagaccagctcggccgagtcctcgtcagcagaatcaggctcaggttctgaggaagaagaggaggaggaggaagaggaggaggaggaagggacgactcggaccgatg

SEQ ID NO: 209 - DNA, 203 bp, Artificial sequence
  synthetic
ggcgcgccagtccttcagcagaatcaggctcaggttctgaggaagaagaggaggaggaggaagaggaggaggaggaagggagcaccagtgaagaatcagaggaggaagaggaagaggaggaggaggagaccggcagcaactctgaggaggcatcagagcagtctgccgaagaagtaagtgaggaagaacgactcggaccgatg

SEQ ID NO: 210 - DNA, 203 bp, Artificial sequence
  synthetic
ggcgcgccagtcctgtttacatatttatgtaaaataagcatttaaaaattattagttttattctgcctgcttaaatattactttcctcaaaaagagaaaacaaaaatgctagattttactttatgacttgaatgatgtggtaatgtcgaactctagtatttagaattagaatgtttcttagcggtcgtcgactcggaccgatg

SEQ ID NO: 211 - DNA, 203 bp, Artificial sequence
  synthetic
ggcgcgccagtccttttactttatgacttgaatgatgtggtaatgtcgaactctagtatttagaattagaatgtttcttagcggtcgtgtagttatttttatgtcataagtggataatttgttagctcctataacaaaagtctgttgcttgtgtttcacattttggatttcctaatataatgttctctcgactcggaccgatg

SEQ ID NO: 212 - DNA, 203 bp, Artificial sequence
  synthetic
ggcgcgccagtcctatcaacctgagctttctccgcctcttccgagctgcccggctcatcaaacttctccgtcagggttacaccatccgcattcttctctggacctttgtgcagtccttcaaggccctgccttatgtctgtctgctgatcgccatgctcttcttcatctatgccatcattgggatgcagcgactcggaccgatg

SEQ ID NO: 213 - DNA, 203 bp, Artificial sequence
  synthetic
ggcgcgccagtcctacttccggaccttcttccaggccctcatgcttctcttccggagtgccaccggggaagcttggcacaacatcatgctttcctgcctcagcgggaaaccgtgtgataagaactctggcatcctgactcgagagtgtggcaatgaatttgcttatttttactttgtttccttcatctcgactcggaccgatg

SEQ ID NO: 214 - DNA, 203 bp, Artificial sequence
  synthetic
ggcgcgccagtcctggggaagcttggcacaacatcatgctttcctgcctcagcgggaaaccgtgtgataagaactctggcatcctgactcgagagtgtggcaatgaatttgcttatttttactttgtttccttcatcttcctctgctcgtttctgatgctgaatctctttgtcgccgtcatcatggaccgactcggaccgatg

SEQ ID NO: 215 - DNA, 203 bp, Artificial sequence
  synthetic
ggcgcgccagtcctatttttactttgtttccttcatcttcctctgctcgtttctgatgctgaatctctttgtcgccgtcatcatggacaactttgagtacctcacccgagactcctccatcctgggcccccaccacctggatgagtacgtgcgtgtctgggccgagtatgaccccgcagcttggggcccgactcggaccgatg

SEQ ID NO: 216 - DNA, 203 bp, Artificial sequence
  synthetic
ggcgcgccagtcctctccatcctgggcccccaccacctggatgagtacgtgcgtgtctgggccgagtatgaccccgcagcttggggccgcatgccttacctggacatgtatcagatgctgagacacatgtctccgcccctgggtctggggaagaagtgtccggccagagtggcttacaagcggcttctcgactcggaccgatg

SEQ ID NO: 217 - DNA, 203 bp, Artificial sequence
  synthetic
ggcgcgccagtcctagtatgaccccgcagcttggggccgcatgccttacctggacatgtatcagatgctgagacacatgtctccgcccctgggtctggggaagaagtgtccggccagagtggcttacaagcggcttctgcggatggacctgcccgtcgcagatgacaacaccgtccacttcaattccacgactcggaccgatg

SEQ ID NO: 218 - DNA, 203 bp, Artificial sequence
  synthetic
ggcgcgccagtcctacaacaccgtccacttcaattccaccctcatggctctgatccgcacagccctggacatcaagattgccaagggaggagccgacaaacagcagatggacgctgagctgcggaaggagatgatggcgatttggcccaatctgtcccagaagacgctagacctgctggtcacacctccgactcggaccgatg

SEQ ID NO: 219 - DNA, 203 bp, Artificial sequence
  synthetic
ggcgcgccagtcctcggcttgaggcagagaccaggaggcagctagaggagcagacgtctcactccgctcgcggaagggtgtgagaggggtgtgtgggggtcggcagcgaggggtgtgtgccatcagccaccggcgacgatctgagacagtcgcagcggctttccgagcggcgtccgcttcccgcccggcgactcggaccgatg

SEQ ID NO: 220 - DNA, 203 bp, Artificial sequence
  synthetic
ggcgcgccagtcctcgctcgcggaagggtgtgagaggggtgtgtgggggtcggcagcgaggggtgtgtgccatcagccaccggcgacgatctgagacagtcgcagcggctttccgagcggcgtccgcttcccgcccgggcagctcccgccagaggggtgaagcggcgactggagtggccgtgcttttgcgactcggaccgatg

SEQ ID NO: 221 - DNA, 203 bp, Artificial sequence
  synthetic
ggcgcgccagtcctgagcggcgtccgcttcccgcccgggcagctcccgccagaggggtgaagcggcgactggagtggccgtgcttttgtgccctgggtcccggtaccctcccctggtgcggcccgaggcaagcccaccgaggtgaccacccctcgacgccgcttggagatcccgggcatccaccctgccgactcggaccgatg

SEQ ID NO: 222 - DNA, 203 bp, Artificial sequence
  synthetic
ggcgcgccagtcctggtgcggcccgaggcaagcccaccgaggtgaccacccctcgacgccgcttggagatcccgggcatccaccctgcgccccgagcagctgatacccagggaggtgtcaggacctgcccggggcgcggggtcgccggaagccaggcgggagccccggctgctttctggcaatctagtcgactcggaccgatg

SEQ ID NO: 223 - DNA, 203 bp, Artificial sequence
  synthetic
ggcgcgccagtcctatgaaaccggctcggattccgcccgcgtgcgccatcccctcagctagcaggtgtgagcggctttctgcccgcagtctctacacagctcagcatcctgacgcctcctccccttgcaggggcgtgaagctacttcagactctgctgtgacgacttggccgccaggcaccgatcctccgactcggaccgatg

SEQ ID NO: 224 - DNA, 203 bp, Artificial sequence
  synthetic
ggcgcgccagtcctaccttggggcgtccccaatctccacctctgggctccagtaacgaggactctgcaataccccctagccccctggccaagacaaccgaacttgttccgtggatatttgggatcctccacctgccaaacctgagcgattttttttgtactgcgcccccacccccaatgattctgccccgactcggaccgatg

SEQ ID NO: 225 - DNA, 203 bp, Artificial sequence
  synthetic
ggcgcgccagtccttgcaataccccctagccccctggccaagacaaccgaacttgttccgtggatatttgggatcctccacctgccaaacctgagcgattttttttgtactgcgcccccacccccaatgattctgcccctcctccagctgttgcagcgtggaaaaggggaaacaaatcaccgggggggcgactcggaccgatg

SEQ ID NO: 226 - DNA, 203 bp, Artificial sequence
  synthetic
ggcgcgccagtcctaggggaaacaaatcaccgggggggatttttttcgtctatttttatttttcgcacttgctgggaatggtgaagtgcttcttgtgaatgattctagccaaaggatgctcttcatttcctgctttctatggagacctcagtgttgagtttgcctctgctggaactgcgtctaccacccgactcggaccgatg

SEQ ID NO: 227 - DNA, 203 bp, Artificial sequence
  synthetic
ggcgcgccagtcctgatgctcttcatttcctgctttctatggagacctcagtgttgagtttgcctctgctggaactgcgtctaccaccttctctaccttccaaggtctttgcctctatctacaacctggcattgtctgtgggtccatgaaggcttggatgaccttagagggaaggtctgggagtccaccgactcggaccgatg

SEQ ID NO: 228 - DNA, 203 bp, Artificial sequence
  synthetic
ggcgcgccagtccttagagggaaggtctgggagtccaccctcatagactaagcagcaatggctgggcatattttaagccgcattttaacatgggtcaagccatcagtagaaggcaagtgctaagactaaagacttatttgaattttatttaaattagatggactgggccttggccaatttccatgcaacgactcggaccgatg

SEQ ID NO: 229 - DNA, 203 bp, Artificial sequence
  synthetic
ggcgcgccagtcctgggccttggccaatttccatgcaagaaaaagtatatttcattttctaggcacaacttctgagtgtcagatacttgctgtctttgagtcttgtggcgtcatcaccggacagcatcccagacagacttccagatttgaacatctaccccccaacacgtaggtgtatgggagaccaccgactcggaccgatg

SEQ ID NO: 230 - DNA, 203 bp, Artificial sequence
  synthetic
ggcgcgccagtcctacaacttctgagtgtcagatacttgctgtctttgagtcttgtggcgtcatcaccggacagcatcccagacagacttccagatttgaacatctaccccccaacacgtaggtgtatgggagaccacatcatttcatgacttatgtttgaggaacactaggctgttgtctagacgagcgactcggaccgatg

SEQ ID NO: 231 - DNA, 203 bp, Artificial sequence
  synthetic
ggcgcgccagtcctacacgtaggtgtatgggagaccacatcatttcatgacttatgtttgaggaacactaggctgttgtctagacgaggcaagctctggaaagcaacgccgagtctctgagaagagggagcataggctgtgctgatttaaaaacagaaaatgcaaagttggactgaaaatatcccacgcgactcggaccgatg

SEQ ID NO: 232 - DNA, 203 bp, Artificial sequence
  synthetic
ggcgcgccagtcctacactaggctgttgtctagacgaggcaagctctggaaagcaacgccgagtctctgagaagagggagcataggctgtgctgatttaaaaacagaaaatgcaaagttggactgaaaatatcccacgtcttctaagcaatctgcttaaggcttccaaacttaccttaatttggtaagcgactcggaccgatg

SEQ ID NO: 233 - DNA, 203 bp, Artificial sequence
  synthetic
ggcgcgccagtccttgtgctgatttaaaaacagaaaatgcaaagttggactgaaaatatcccacgtcttctaagcaatctgcttaaggcttccaaacttaccttaatttggtaagaaaataagctgccctatttttctttcttcttctcttacaactggaagcagccatttccccaaaccaccaccatcgactcggaccgatg

SEQ ID NO: 234 - DNA, 203 bp, Artificial sequence
  synthetic
ggcgcgccagtcctccctggcgtcccggccgaggcagcatcccagcctttaccctgtgggcccaacgtgaggagtgtgaggagcggcatgcggcgccccctggctggttcggtgtcttttgacctgctgttgactgctcccagggggccctgacgccctggggcacttttgctctgcacaggaccacgcgactcggaccgatg

SEQ ID NO: 235 - DNA, 203 bp, Artificial sequence
  synthetic
ggcgcgccagtcctgggtgtagaggaaggaaggagcaagaccagcctgtagactgtgcccctggctgggcaaaagggccaggggcccggagccttccctccactgccctcgaacgcctcacttcctaagtctctgcatttctcagtcagtggacagcttttgggactcttgtgtgaggactttgggggcgactcggaccgatg

SEQ ID NO: 236 - DNA, 203 bp, Artificial sequence
  synthetic
ggcgcgccagtcctctggctgggcaaaagggccaggggcccggagccttccctccactgccctcgaacgcctcacttcctaagtctctgcatttctcagtcagtggacagcttttgggactcttgtgtgaggactttgggggaccaggccaggctgggcctctgctgattgagatcttgggatccagacgactcggaccgatg

SEQ ID NO: 237 - DNA, 203 bp, Artificial sequence
  synthetic
ggcgcgccagtccttgccacccggcgtggaggacggggtccaccctggtgggctgagcgcgaggccggagggctgggaggctgcggctgggctgagcactgcggagggccgtcggcttatcccaggtcccggtcacgcagcggccacgctcggggagcgcgcggacctgagcgggcaccacgagccgccgactcggaccgatg

SEQ ID NO: 238 - DNA, 203 bp, Artificial sequence
  synthetic
ggcgcgccagtcctggacgcggcagggcccggggacagcggggacgccgcccactccaccgggtatgaagctaaaatacagtggttacaacacaggaggttgacaggcctgacctttgaatcccagttcatccacaaacggagctttgtaatctcggattgtaagggccaagcttgtggactttagtgcgactcggaccgatg

SEQ ID NO: 239 - DNA, 203 bp, Artificial sequence
  synthetic
ggcgcgccagtcctgggccaagcttgtggactttagtgacttctgatctaagaacctccaccagggctgagggagctcaagtttcagcctgaggcatgggccaggaggccatggtgacctgagacccgtggattctgtccagtacaccctgttgctccttctgcctcccctctcctgtattgaaagcgcgactcggaccgatg

SEQ ID NO: 240 - DNA, 203 bp, Artificial sequence
  synthetic
ggcgcgccagtcctggctgagggagctcaagtttcagcctgaggcatgggccaggaggccatggtgacctgagacccgtggattctgtccagtacaccctgttgctccttctgcctcccctctcctgtattgaaagcgtttgtgttcatcttatcagggacctgaccctaagagaatccttcccctgccgactcggaccgatg

SEQ ID NO: 241 - DNA, 203 bp, Artificial sequence
  synthetic
ggcgcgccagtccttgacctgagacccgtggattctgtccagtacaccctgttgctccttctgcctcccctctcctgtattgaaagcgtttgtgttcatcttatcagggacctgaccctaagagaatccttcccctgccaaggcagttccagcccccagaactcatcaccccatctcctgaggtggttcgactcggaccgatg

SEQ ID NO: 242 - DNA, 203 bp, Artificial sequence
  synthetic
ggcgcgccagtcctgaaaagaccgactccagctaagcaagaggcacagcagcagtggcagaagcagacaggagcagctggtattccggtgattaaatagttctcatagcctttttgctgtacccggtctgctccctggggtaaggcctcgtgtccgagaaggaagctgcattttaacggtgtgctgaacgactcggaccgatg

SEQ ID NO: 243 - DNA, 203 bp, Artificial sequence
  synthetic
ggcgcgccagtcctgctgcattttaacggtgtgctgaacagaggtctgaatcattccagctggctgcttgttttgaaaaggacaatgtgtgtataaataaaaagactgctggaagggtccagacaccggcaccggagctgaggagtgctctcagaatcctgttgaggcagatggcacgaactgaaagccgactcggaccgatg

SEQ ID NO: 244 - DNA, 203 bp, Artificial sequence
  synthetic
ggcgcgccagtcctgccacctccggtcggcgactgcggcgggctcgacgaggcggctgacggggcggcggcgggaagacggccgggtgcgccttggggtttagtggcggcttctccatgggtccagccagccgcttccctgtgctgtgagtgtttccaccactccaggagacagcattcagagttgaccgactcggaccgatg

SEQ ID NO: 245 - DNA, 203 bp, Artificial sequence
  synthetic
ggcgcgccagtcctcggcggcgggaagacggccgggtgcgccttggggtttagtggcggcttctccatgggtccagccagccgcttccctgtgctgtgagtgtttccaccactccaggagacagcattcagagttgaccttgtgagagctggccataatttaattccatctctaggttttctgtcttacgactcggaccgatg

SEQ ID NO: 246 - DNA, 203 bp, Artificial sequence
  synthetic
ggcgcgccagtcctttgtggagtcgcccttcccccgaggaggggagcgggcagcgccgggcgcgggatttctcccgcccagggccgaggaggagccctgggctcctcaaccgatcgggccacctccgggagcggcgccccttttctttcgggtcattcctgcagagggaaaactcctgcgtgcgcctgcgactcggaccgatg

SEQ ID NO: 247 - DNA, 203 bp, Artificial sequence
  synthetic
ggcgcgccagtcctcgggccacctccgggagcggcgccccttttctttcgggtcattcctgcagagggaaaactcctgcgtgcgcctgcccccaggctagcgtttggactgttttgtttttggcggaactaccgggcaggaagattgcacaagtcagggggcgtttccaatcgggtgtcaattttggacgactcggaccgatg

SEQ ID NO: 248 - DNA, 203 bp, Artificial sequence
  synthetic
ggcgcgccagtcctttccaatcgggtgtcaattttggatctccccccccccacccccctttggatcttgtcgggctttccacgtttcacttaaaaaaaattcttgtaacgtccaaggcaagctccccacgacccgaacacgcccagaggaaccttggggcctctggggacttggctagcaggtattcacgactcggaccgatg

SEQ ID NO: 249 - DNA, 203 bp, Artificial sequence
  synthetic
ggcgcgccagtcctgtcccgcgaagaaaaagataaagacatctcgtagaaatattaaaataaattcctaaagtcgttggtttctcgttcactttcgctgcctgctcaggacgagggccacaccaagaggcaagagaaacaaaaagagggaacataggaacaggaaccagataatagtgacataagcgacgactcggaccgatg

SEQ ID NO: 250 - DNA, 203 bp, Artificial sequence
  synthetic
ggcgcgccagtccttcctaaagtcgttggtttctcgttcactttcgctgcctgctcaggacgagggccacaccaagaggcaagagaaacaaaaagagggaacataggaacaggaaccagataatagtgacataagcgaccctttcgcaaatattttggcgcaaaatgagcgggcgccaagtgccgcgtcgactcggaccgatg

SEQ ID NO: 251 - DNA, 203 bp, Artificial sequence
  synthetic
ggcgcgccagtcctatgagcgggcgccaagtgccgcgtggtggagccgcctgaaaatgacatggaaaattcgccgaaaatcgcgcgttttggcagcatcaatcccaaagcacaaaattaatttctatcataatttctgggtgcaacacggacccataattgaatcgaatatagggcttatctgatagccgactcggaccgatg

SEQ ID NO: 252 - DNA, 203 bp, Artificial sequence
  synthetic
ggcgcgccagtcctaaaattcgccgaaaatcgcgcgttttggcagcatcaatcccaaagcacaaaattaatttctatcataatttctgggtgcaacacggacccataattgaatcgaatatagggcttatctgatagcccggcagcaacattgaactttccggctgcaaaggagacgacaccgagatccgactcggaccgatg

SEQ ID NO: 253 - DNA, 203 bp, Artificial sequence
  synthetic
ggcgcgccagtcctgggctccggcgataagaaatccatgctgataaggacaggaggacggtctgcggcaaattgaattcgattctgacctgtatgaaagccagcggagatacggatacctctgggtttatgggtagaaaacgcagagcgtcgcgccaacatcgaaattatttgcgtttgcatcttctccgactcggaccgatg

SEQ ID NO: 254 - DNA, 203 bp, Artificial sequence
  synthetic
ggcgcgccagtcctcggcaaattgaattcgattctgacctgtatgaaagccagcggagatacggatacctctgggtttatgggtagaaaacgcagagcgtcgcgccaacatcgaaattatttgcgtttgcatcttctcgtcctttcgtttatcgttctgattgccatcgtggtggcgcggtttctattcgactcggaccgatg

SEQ ID NO: 255 - DNA, 203 bp, Artificial sequence
  synthetic
ggcgcgccagtcctcatcgtggtggcgcggtttctattaattttgcttctgtatcgtttgcaaaatctcaaaagattcaaaaagttcgtcatcagcagccgcaacacaaaaaccaacgagtgtaaagccgagcatacaaatatcaataaaaacataaacatttacccaatctcaatctcaaaacattccgactcggaccgatg

SEQ ID NO: 256 - DNA, 203 bp, Artificial sequence
  synthetic
ggcgcgccagtcctaactagaggataaggctacttaaggatcaaaaaacaccaaggagacgagattttctaccaaatcgagagacgaggggcaggttaatttcgtcatttttggccaagacagcaaatagaggaacagcaaagcgaaaatcattttatacctcacacaacaactacacactaactaagcgactcggaccgatg

SEQ ID NO: 257 - DNA, 203 bp, Artificial sequence
  synthetic
ggcgcgccagtcctcttaagtgttcaaagtatatttagtttactttgtatataagaaaagtagctaaaagcacgcggacagggaggcaggagcaccacagtcactagccactaagcagagtcacagtcacgatcacgttcactccaggatcaggactcggggcgggatcagcagacgctgaggaagctcgactcggaccgatg

SEQ ID NO: 258 - DNA, 203 bp, Artificial sequence
  synthetic
ggcgcgccagtccttgttcaaagtatatttagtttactttgtatataagaaaagtagctaaaagcacgcggacagggaggcaggagcaccacagtcactagccactaagcagagtcacagtcacgatcacgttcactccaggatcaggactcggggcgggatcagcagacgctgaggaagctgccacgcgactcggaccgatg

SEQ ID NO: 259 - DNA, 203 bp, Artificial sequence
  synthetic
ggcgcgccagtcctctttaccgacaacgtccagcggtccagtcgagaagtaagtagtccgcgctgcgagcataactctaccagagaaacgcgcactttattggtcaagacagacggaagccggcggttggacgcaaaggttgactcggaagctgagagattgttgagtaacacgcagaagtcttgaaacgactcggaccgatg

SEQ ID NO: 260 - DNA, 203 bp, Artificial sequence
  synthetic
ggcgcgccagtcctttgttgagtaacacgcagaagtcttgaaagtatcaagtattgaacatatttcaagggacttggtttcggtgaagtcgtcaattccttttatcgtcaacgtttccacagccctcagaatagaaatttccaacaagccaaagcctacgtaatgaagcgccccaataaccggccgaccgactcggaccgatg

SEQ ID NO: 261 - DNA, 203 bp, Artificial sequence
  synthetic
ggcgcgccagtccttcactccagcaacaacaacaacaacggcagcagcagcaataacgacaacaacagcaacgacgacgcagcaagtagcagcaacagcaaaaacaacaacaccagcaacgagagcagccacagcaacaacaatactagtagcataattgcagaggcggccgccaagtttctactgaacgactcggaccgatg

SEQ ID NO: 262 - DNA, 203 bp, Artificial sequence
  synthetic
ggcgcgccagtcctggcggccgccaagtttctactgaaaaatggcctaaacggcagtagcagcaccagctacccccctctgccaccgcctctgcccgccaacttaagcaggacgaccacgcccacgacaacgacaacgccctcatcctccagctccaccgcctcaaatggctttttgccgcatgccaacgactcggaccgatg

SEQ ID NO: 263 - DNA, 203 bp, Artificial sequence
  synthetic
ggcgcgccagtccttaaaccccagttttatatcgtatatgctatctacaggtccactttacacttaataatataaaaatactactataaaggaaccagaaaaataaaaaagggtcattatttatttgagcagatcattatcaaacgcataggaagagaaaaaacacagttttattttttttccacacacgactcggaccgatg

SEQ ID NO: 264 - DNA, 203 bp, Artificial sequence
  synthetic
ggcgcgccagtcctttttgtgactctccctctttgtactattgctctctcactctgtcacacagtaaacggcgcactgttctcgttgcttcgagagagcgcgcctcgaatgttcgcgaaaagagcgccggagtataaatagaggagcttcgtcgacggagagtcaattctattcaaacaagtaaagtgcgactcggaccgatg

SEQ ID NO: 265 - DNA, 203 bp, Artificial sequence
  synthetic
ggcgcgccagtcctacgttcgttcgatggcaacggattggataacaggcgcgcgctttgttttattatccacattatcagctgcattattgttattattggccctcagcgctttaccgctcgcccacgcgtccgcccgtgaatgccgcgcggaaaagtcgctttccactagattggcgtccagattcgcgactcggaccgatg

SEQ ID NO: 266 - DNA, 203 bp, Artificial sequence
  synthetic
ggcgcgccagtcctttatccacattatcagctgcattattgttattattggccctcagcgctttaccgctcgcccacgcgtccgcccgtgaatgccgcgcggaaaagtcgctttccactagattggcgtccagattcgaggaaatccgtcagcagacgcattcgcgcccgttcggtcagcactatggccgactcggaccgatg

SEQ ID NO: 267 - DNA, 203 bp, Artificial sequence
  synthetic
ggcgcgccagtcctaaatccaaaggaggcaaaggaacagcacagaaagcgaggaaacactcaaataaaatccgccaaaaatcgcagatccctggaaaccaattcgtgtgaaatcggtcaagcccccaacgacttttagcccgtctcagacggagcaccgccaagattcttaccgccagcagcgcaatgcgactcggaccgatg

SEQ ID NO: 268 - DNA, 203 bp, Artificial sequence
  synthetic
ggcgcgccagtcctcactctggtatcacggtacctttgtgcgcctgttttataccccctcccccaactgtaacttagaagtaacacacaccgatcaacagtcagcgtggcacaccagccacgttttgatcaagcacttctgttaccccggactgagtatcaatagactgctcacgcggttgaaggagacgactcggaccgatg

SEQ ID NO: 269 - DNA, 203 bp, Artificial sequence
  synthetic
ggcgcgccagtcctcagccacgttttgatcaagcacttctgttaccccggactgagtatcaatagactgctcacgcggttgaaggagaaagcgttcgttatccggccaactacttcgaaaaacctagtaacaccgtggaagttgcagagtgtttcgctcagcactaccccagtgtagatcaggtcgatcgactcggaccgatg

SEQ ID NO: 270 - DNA, 203 bp, Artificial sequence
  synthetic
ggcgcgccagtccttaccccagtgtagatcaggtcgatgagtcaccgcattccccacgggcgaccgtggcggtggctgcgttggcggcctgcccatggggaaacccatgggacgctctaatacagacatggtgcgaagagtctattgagctagttggtagtcctccggcccctgaatgcggctaatcccgactcggaccgatg

SEQ ID NO: 271 - DNA, 203 bp, Artificial sequence
  synthetic
ggcgcgccagtcctctctaatacagacatggtgcgaagagtctattgagctagttggtagtcctccggcccctgaatgcggctaatcctaactgcggagcacacaccctcaagccagagggcagtgtgtcgtaacgggcaactctgcagcggaaccgactactttgggtgtccgtgtttcattttattcgactcggaccgatg

SEQ ID NO: 272 - DNA, 203 bp, Artificial sequence
  synthetic
ggcgcgccagtcctaataaggccggtgtgcgtttgtctatatgttattttccaccatattgccgtcttttggcaatgtgagggcccggaaacctggccctgtcttcttgacgagcattcctaggggtctttcccctctcgccaaaggaatgcaaggtctgttgaatgtcgtgaaggaagcagttcctccgactcggaccgatg

SEQ ID NO: 273 - DNA, 203 bp, Artificial sequence
  synthetic
ggcgcgccagtccttcttttggcaatgtgagggcccggaaacctggccctgtcttcttgacgagcattcctaggggtctttcccctctcgccaaaggaatgcaaggtctgttgaatgtcgtgaaggaagcagttcctctggaagcttcttgaagacaaacaacgtctgtagcgaccctttgcaggcagcgactcggaccgatg

SEQ ID NO: 274 - DNA, 203 bp, Artificial sequence
  synthetic
ggcgcgccagtccttctgtagcgaccctttgcaggcagcggaaccccccacctggcgacaggtgcctctgcggccaaaagccacgtgtataagatacacctgcaaaggcggcacaaccccagtgccacgttgtgagttggatagttgtggaaagagtcaaatggctctcctcaagcgtattcaacaagcgactcggaccgatg

SEQ ID NO: 275 - DNA, 203 bp, Artificial sequence
  synthetic
ggcgcgccagtcctccagtcataccttgatcaagcacttctgtttccccggactgagtatcaataggctgctcgcgcggctgaaggagaaaacgttcgttacccgaccaactacttcgagaagcttagtaccaccatgaacgaggcagggtgtttcgctcagcacaaccccagtgtagatcaggctgacgactcggaccgatg

SEQ ID NO: 276 - DNA, 203 bp, Artificial sequence
  synthetic
ggcgcgccagtcctttcgagaagcttagtaccaccatgaacgaggcagggtgtttcgctcagcacaaccccagtgtagatcaggctgatgagtcactgcaacccccatgggcgaccatggcagtggctgcgttggcggcctgcccatggagaaatccatgggacgctctaattctgacatggtgtgaacgactcggaccgatg

SEQ ID NO: 277 - DNA, 203 bp, Artificial sequence
  synthetic
ggcgcgccagtccttccggcccctgaatgcggctaatcctaactgcggagcacatgctcacaaaccagtgggtggtgtgtcgtaacgggcaactctgcagcggaaccgactactttgggtgtccgtgtttccttttattcctatattggctgcttatggtgacaatcaaaaagttgttaccatatagccgactcggaccgatg

SEQ ID NO: 278 - DNA, 203 bp, Artificial sequence
  synthetic
ggcgcgccagtccttctttccaggtctagaggggtaacactttgtactgtgtttggctccacgctcgatccactggcgagtgttagtaacagcactgttgcttcgtagcggagcatgacggccgtgggaactcctccttggtaacaaggacccacggggccaaaagccacgcccacacgggcccgtcacgactcggaccgatg

SEQ ID NO: 279 - DNA, 203 bp, Artificial sequence
  synthetic
ggcgcgccagtcctgccccggacctcccaccgaggtggggggaaaggggccctggaccggccgggtggaaggcccggaaccggtccatcttcctcaaggttgaggaaggggtacgtctatgggtccggtgggtccgaaaggcgtctggatgcctagtgttagggttcgtaggtggtaaatcccagctacgactcggaccgatg

SEQ ID NO: 280 - DNA, 203 bp, Artificial sequence
  synthetic
ggcgcgccagtcctgtggaaggcccggaaccggtccatcttcctcaaggttgaggaaggggtacgtctatgggtccggtgggtccgaaaggcgtctggatgcctagtgttagggttcgtaggtggtaaatcccagctaggcgtgaaagcgctataggataggcttatcccggtgaccgctgccccggacgactcggaccgatg

SEQ ID NO: 281 - DNA, 203 bp, Artificial sequence
  synthetic
ggcgcgccagtcctgtctatgggtccggtgggtccgaaaggcgtctggatgcctagtgttagggttcgtaggtggtaaatcccagctaggcgtgaaagcgctataggataggcttatcccggtgaccgctgccccggaaccagccccgcggttctttggacacggtccacaggttgggggtaccggtgcgactcggaccgatg

SEQ ID NO: 282 - DNA, 203 bp, Artificial sequence
  synthetic
ggcgcgccagtccttatcccggtgaccgctgccccggaaccagccccgcggttctttggacacggtccacaggttgggggtaccggtgtgaataaccccccgactgaagcgtcagtcgttaaacggagacggtctcctgagatcgcaacgacgccccacgtacgggaacgccgccaaaaccttcgggacgactcggaccgatg

SEQ ID NO: 283 - DNA, 203 bp, Artificial sequence
  synthetic
ggcgcgccagtcctgtccacaggttgggggtaccggtgtgaataaccccccgactgaagcgtcagtcgttaaacggagacggtctcctgagatcgcaacgacgccccacgtacgggaacgccgccaaaaccttcgggacagctatgcgggttgacaatcccagtggggggccggggaccagctgattacgactcggaccgatg

SEQ ID NO: 284 - DNA, 203 bp, Artificial sequence
  synthetic
ggcgcgccagtcctggggggccggggaccagctgattacttgtcctgcgagttcctcttgagactggccgaaaggcagccacggggccaccaaggcggcgcagcgctgcatgcggcaaggggaaaaatccttcgggtgacccctggtggcaatcccttcccttaggagcatgagtgtggtcgacacatcgactcggaccgatg

SEQ ID NO: 285 - DNA, 203 bp, Artificial sequence
  synthetic
ggcgcgccagtccttggccgaaaggcagccacggggccaccaaggcggcgcagcgctgcatgcggcaaggggaaaaatccttcgggtgacccctggtggcaatcccttcccttaggagcatgagtgtggtcgacacattcaccatggcttggctgtggttgctggtttgcttccccctcgcgggggggcgactcggaccgatg

SEQ ID NO: 286 - DNA, 203 bp, Artificial sequence
  synthetic
ggcgcgccagtcctcactgggtgcaagccccagaaaccgacgcctactgaagtagacgtaatggccccggcccgaaccggcgaccggccaaaaggtggtggatgggtgatgacagggttggtaggtcgtaaatcccggtcatcctggtagccactataggtgggtcttaaggggaggctacggtccctcgactcggaccgatg

SEQ ID NO: 287 - DNA, 203 bp, Artificial sequence
  synthetic
ggcgcgccagtccttcttaaggggaggctacggtccctcttgcgcatatggaggaaaagcgcacggtccacaggtgttggtcctaccggtgtaataaggacccggcgctaggcacgccgttaaaccgagcccgttactcccctgggcaaacgacgcccacgtacggtccacgtcgcccttcaatgtctcgactcggaccgatg

SEQ ID NO: 288 - DNA, 203 bp, Artificial sequence
  synthetic
ggcgcgccagtcctggtccacgtcgcccttcaatgtctctcttgaccaataggcgtagccggcgagttgacaaggaccagtgggggccgggcgggagggggaaggacccccaccgctgcccttcccggggaggcgggaaatgcatggggccacccagctccgcggcggcctacagccggggtagcccacgactcggaccgatg

SEQ ID NO: 289 - DNA, 203 bp, Artificial sequence
  synthetic
ggcgcgccagtcctgctgcccttcccggggaggcgggaaatgcatggggccacccagctccgcggcggcctacagccggggtagcccaagaaccttcgggtgagggcgggtggcattttcttttcctataccgatcatggcagtccttctgctcctactcgtggtggaggccggggctattttagccccgactcggaccgatg

SEQ ID NO: 290 - DNA, 203 bp, Artificial sequence
  synthetic
ggcgcgccagtcctgcggcctacagccggggtagcccaagaaccttcgggtgagggcgggtggcattttcttttcctataccgatcatggcagtccttctgctcctactcgtggtggaggccggggctattttagccccggccacccatgcttgtagcgcgaaagggcaatatttcctcacaaactgtcgactcggaccgatg

SEQ ID NO: 291 - DNA, 203 bp, Artificial sequence
  synthetic
ggcgcgccagtcctctgtaggagtctaaattggggacacagatgtttggaacgtcaccttgcagtgttaacttggctttcatgaatctctttgatcttccacaaggggtaggctacgggtgaaacctcttaggctaatacttctatgaagagatgccttggatagggtaacagcggcggatattggtgcgactcggaccgatg

SEQ ID NO: 292 - DNA, 203 bp, Artificial sequence
  synthetic
ggcgcgccagtcctagggctgtctttaggcttaattccagacctctctgtgcttagggcaaacatcatttggccttaaatgggattctgtgagaggggatccctccattgacagctggactgttctttggggccttatgtggtgtttgcctctgaggtactcaggggcatttaggtttttcctcattccgactcggaccgatg

SEQ ID NO: 293 - DNA, 203 bp, Artificial sequence
  synthetic
ggcgcgccagtcctcggaaccggtgagtacaccggaattgccaggacgaccgggtcctttcttggataaacccgctcaatgcctggagatttgggcgtgcccccgcaagactgctagccgagtagtgttgggtcgcgaaaggccttgtggtactgcctgatagggtgcttgcgagtgccccgggaggtcgactcggaccgatg

SEQ ID NO: 294 - DNA, 203 bp, Artificial sequence
  synthetic
ggcgcgccagtcctgataaacccgctcaatgcctggagatttgggcgtgcccccgcaagactgctagccgagtagtgttgggtcgcgaaaggccttgtggtactgcctgatagggtgcttgcgagtgccccgggaggtctcgtagaccgtgcaccatgagcacgaatcctaaacctcaaagaaaaacccgactcggaccgatg

SEQ ID NO: 295 - DNA, 203 bp, Artificial sequence
  synthetic
ggcgcgccagtccttttagtcagtgtggaaaatctctagcagtggcgcccgaacagggacctgaaagcgaaagggaaaccagaggagctctctcgacgcaggactcggcttgctgaagcgcgcacggcaagaggcgaggggcggcgactggtgagtacgccaaaaattttgactagcggaggctagaacgactcggaccgatg

SEQ ID NO: 296 - DNA, 203 bp, Artificial sequence
  synthetic
ggcgcgccagtccttacggtaactttgtacgccagttttatctcccttcccccatgtaacttagaagtttttcacaaagaccaatagccggtaatcagccagattactgaaggtcaagcacttctgtttccccggtcaatgttgatatgctccaacagggcaaaaacaactgcgatcgttaaccgcaacgactcggaccgatg

SEQ ID NO: 297 - DNA, 203 bp, Artificial sequence
  synthetic
ggcgcgccagtcctaagtttttcacaaagaccaatagccggtaatcagccagattactgaaggtcaagcacttctgtttccccggtcaatgttgatatgctccaacagggcaaaaacaactgcgatcgttaaccgcaaagcgcctacgcaaagcttagtagcatctttgaaatcgtttggctggtcgacgactcggaccgatg

SEQ ID NO: 298 - DNA, 203 bp, Artificial sequence
  synthetic
ggcgcgccagtcctcaagcacttctgtttccccggtcaatgttgatatgctccaacagggcaaaaacaactgcgatcgttaaccgcaaagcgcctacgcaaagcttagtagcatctttgaaatcgtttggctggtcgatccgccatttcccctggtagacctggcagatgaggctagaaataccccaccgactcggaccgatg

SEQ ID NO: 299 - DNA, 203 bp, Artificial sequence
  synthetic
ggcgcgccagtcctaacaactgcgatcgttaaccgcaaagcgcctacgcaaagcttagtagcatctttgaaatcgtttggctggtcgatccgccatttcccctggtagacctggcagatgaggctagaaataccccactggcgacagtgttctagcctgcgtggctgcctgcacaccctatgggtgtgcgactcggaccgatg

SEQ ID NO: 300 - DNA, 203 bp, Artificial sequence
  synthetic
ggcgcgccagtcctgagccccgtgtgctcgctttgagtcctccggcccctgaatgtggctaaccttaaccctgcagctagagcacgtaacccaatgtgtatctagtcgtaatgagcaattgcgggatgggaccaactactttgggtgtccgtgtttcactttttcctttatatttgcttatggtgacacgactcggaccgatg

SEQ ID NO: 301 - DNA, 203 bp, Artificial sequence
  synthetic
ggcgcgccagtcctgagcctattgagctacataagaatcctccggcccctgaatgcggctaatcccaacctcggagcaggtggtcacaaaccagtgattggcctgtcgtaacgcgcaagtccgtggcggaaccgactactttgggtgtccgtgtttccttttattttattgtggctgcttatggtgaccgactcggaccgatg

SEQ ID NO: 302 - DNA, 203 bp, Artificial sequence
  synthetic
ggcgcgccagtcctgcgcctccgtgggcaagcactactgtttccccggtgaggccgcatagactgttcccacggttgaaagtggccgatccgttatccgctcatgtacttcgagaagcctagtatcgctctggaatcttcgacgcgttgcgctcagcactcaaccccggagtgtagcttgggccgatgcgactcggaccgatg

SEQ ID NO: 303 - DNA, 203 bp, Artificial sequence
  synthetic
ggcgcgccagtcctgttcccacggttgaaagtggccgatccgttatccgctcatgtacttcgagaagcctagtatcgctctggaatcttcgacgcgttgcgctcagcactcaaccccggagtgtagcttgggccgatgagtctggacagtccccactggcgacagtggtccaggctgcgctggcggcccgactcggaccgatg

SEQ ID NO: 304 - DNA, 203 bp, Artificial sequence
  synthetic
ggcgcgccagtcctcccggagtgtagcttgggccgatgagtctggacagtccccactggcgacagtggtccaggctgcgctggcggcccacctgtggcccaaagccacgggacgctagttgtgaacagggtgtgaagagcctattgagctacatgagagtcctccggcccctgaatgcggctaatcctcgactcggaccgatg

SEQ ID NO: 305 - DNA, 203 bp, Artificial sequence
  synthetic
ggcgcgccagtcctctagttgtgaacagggtgtgaagagcctattgagctacatgagagtcctccggcccctgaatgcggctaatcctaaccatggagcaggcagctgcaacccagcagccagcctgtcgtaacgcgcaagtccgtggcggaaccgactactttgggtgtccgtgtttccttttattccgactcggaccgatg

SEQ ID NO: 306 - DNA, 203 bp, Artificial sequence
  synthetic
ggcgcgccagtcctcggcccctgaatgcggctaatcctaaccatggagcaggcagctgcaacccagcagccagcctgtcgtaacgcgcaagtccgtggcggaaccgactactttgggtgtccgtgtttccttttattcttgaatggctgcttatggtgacaatcatagattgttatcataaagcgagtcgactcggaccgatg

SEQ ID NO: 307 - DNA, 203 bp, Artificial sequence
  synthetic
ggcgcgccagtcctggggtcgccgtcctacacattgttgtgacgtgcggcccagattcgaatctgtaataaaagctttttcttctatatcctcagattggcagtgagaggagattttgttcgtggtgttggctggcctactgggtggggtagggatccggactgaatccgtagtatttcggtacaacacgactcggaccgatg

SEQ ID NO: 308 - DNA, 203 bp, Artificial sequence
  synthetic
ggcgcgccagtcctgtaataaaagctttttcttctatatcctcagattggcagtgagaggagattttgttcgtggtgttggctggcctactgggtggggtagggatccggactgaatccgtagtatttcggtacaacatttgggggctcgtccgggattcctccccatcggcagaggtgcctactgttcgactcggaccgatg

SEQ ID NO: 309 - DNA, 203 bp, Artificial sequence
  synthetic
ggcgcgccagtccttttgttcgtggtgttggctggcctactgggtggggtagggatccggactgaatccgtagtatttcggtacaacatttgggggctcgtccgggattcctccccatcggcagaggtgcctactgtttcttcgaactccggcgccggtaagtaagtacttgattttggtacctcgcgcgactcggaccgatg

SEQ ID NO: 310 - DNA, 203 bp, Artificial sequence
  synthetic
ggcgcgccagtcctgacgctgccgggaagctccacctccgctcagcaggggacgccctggtctgagctctgtggtatctgattgttgttgaaccgtctctaagacggtgatactataagtcgtggtttgtgtgtttgtttgttaccttgtgtttgttcgtcacttgtcgacagcgccctgcgaattggcgactcggaccgatg

SEQ ID NO: 311 - DNA, 203 bp, Artificial sequence
  synthetic
ggcgcgccagtcctagctctgtggtatctgattgttgttgaaccgtctctaagacggtgatactataagtcgtggtttgtgtgtttgtttgttaccttgtgtttgttcgtcacttgtcgacagcgccctgcgaattggtgtacccacaccgcgcggcttgcgaataatactttggagagtcttttgcccgactcggaccgatg

SEQ ID NO: 312 - DNA, 203 bp, Artificial sequence
  synthetic
ggcgcgccagtcctagtcgtggtttgtgtgtttgtttgttaccttgtgtttgttcgtcacttgtcgacagcgccctgcgaattggtgtacccacaccgcgcggcttgcgaataatactttggagagtcttttgcctccagtgtcttccgtttgtactcgtcctcctctccctctccggccgggatgggcgactcggaccgatg

SEQ ID NO: 313 - DNA, 203 bp, Artificial sequence
  synthetic
ggcgcgccagtccttactggggggtgtgtgggaccgtacctggagtgcacggtatatatgcattcccgcatggcaagggcgtgctaccttgccccttgacgcatggtatgcgtcatcatttgccttggttaagccccatagaaacgaggcgtcacgtgccgaaaatccctttgcgtttcacagaaccacgactcggaccgatg

SEQ ID NO: 314 - DNA, 203 bp, Artificial sequence
  synthetic
ggcgcgccagtcctcccgcatggcaagggcgtgctaccttgccccttgacgcatggtatgcgtcatcatttgccttggttaagccccatagaaacgaggcgtcacgtgccgaaaatccctttgcgtttcacagaaccatcctaaccatgggtgtagtatgggaatcgtgtatggggatgattaggatccgactcggaccgatg

SEQ ID NO: 315 - DNA, 203 bp, Artificial sequence
  synthetic
ggcgcgccagtcctatcatttgccttggttaagccccatagaaacgaggcgtcacgtgccgaaaatccctttgcgtttcacagaaccatcctaaccatgggtgtagtatgggaatcgtgtatggggatgattaggatctctcgtagagggataggtgtgccattcaaatccagggagtactctggctccgactcggaccgatg

SEQ ID NO: 316 - DNA, 203 bp, Artificial sequence
  synthetic
ggcgcgccagtcctaaaggtctcgagatgccacgtggacgagggcatgcccaaagcacatcttaacctgagcgggggtcgcccaggtaaaagcagttttaaccgactgttacgaatacagcctgatagggtgctgcagaggcccactgtattgctactaaaaatctctgctgtacatggcacatggagcgactcggaccgatg

SEQ ID NO: 317 - DNA, 203 bp, Artificial sequence
  synthetic
ggcgcgccagtccttgcccatagtaggactagcaaaacggagggactagccatagtggcgagctccctgggtggtctaagtcctgagtacaggacagtcgtcagtagttcgacgtgagcagaagcccacctcgagatgctacgtggacgagggcatgccaagacacaccttaaccctagcgggggtcgcgactcggaccgatg

SEQ ID NO: 318 - DNA, 203 bp, Artificial sequence
  synthetic
ggcgcgccagtcctgttcgcaataagactggtcgtcacttggctgttctatcgtttcaggctttagcgcgcccttgcgcggcgggccgtcaagcccgtgcgctgtatagcgccaggtaaccggacagcggcgtgctggattttcccggtgccattgctctggatggtgtcaccaagctgacaaatgcgcgactcggaccgatg

SEQ ID NO: 319 - DNA, 203 bp, Artificial sequence
  synthetic
ggcgcgccagtcctggtaaccggacagcggcgtgctggattttcccggtgccattgctctggatggtgtcaccaagctgacaaatgcggagtgaacctcacaaagcgacacgcctgtggtagcgctgcccaaaagggagcggaactccccgccgaggcggtcctctctggccaaaagcccagcgttgacgactcggaccgatg

SEQ ID NO: 320 - DNA, 203 bp, Artificial sequence
  synthetic
ggcgcgccagtcctggtgtcaccaagctgacaaatgcggagtgaacctcacaaagcgacacgcctgtggtagcgctgcccaaaagggagcggaactccccgccgaggcggtcctctctggccaaaagcccagcgttgatagcgccttttgggatgcaggaaccccacctgccaggtgtgaagtggagtcgactcggaccgatg

SEQ ID NO: 321 - DNA, 203 bp, Artificial sequence
  synthetic
ggcgcgccagtcctctctggccaaaagcccagcgttgatagcgccttttgggatgcaggaaccccacctgccaggtgtgaagtggagtgagcggatctccaatttggtctgttctgaactacaccatttactgctgtgaagaatgccctggaggcaagctggttacagccctgaccaggccctgcccgcgactcggaccgatg

SEQ ID NO: 322 - DNA, 203 bp, Artificial sequence
  synthetic
ggcgcgccagtccttgaactacaccatttactgctgtgaagaatgccctggaggcaagctggttacagccctgaccaggccctgcccgtgactctcgaccggcgcagggtcaaaaattgtctaagcagcagcaggaacgcgggagcgtttcttttccttttgtactgacatgatggcggcgtctaaggcgactcggaccgatg

SEQ ID NO: 323 - DNA, 203 bp, Artificial sequence
  synthetic
ggcgcgccagtcctacagccctgaccaggccctgcccgtgactctcgaccggcgcagggtcaaaaattgtctaagcagcagcaggaacgcgggagcgtttcttttccttttgtactgacatgatggcggcgtctaaggtgtatagagtttgcgagcagactctgctggcaggtgccgttcgcatgatgcgactcggaccgatg

SEQ ID NO: 324 - DNA, 203 bp, Artificial sequence
  synthetic
ggcgcgccagtcctcgcagggtcaaaaattgtctaagcagcagcaggaacgcgggagcgtttcttttccttttgtactgacatgatggcggcgtctaaggtgtatagagtttgcgagcagactctgctggcaggtgccgttcgcatgatggacaaattcttgcaaaagagaactgtttttgtcccccacgactcggaccgatg

SEQ ID NO: 325 - DNA, 203 bp, Artificial sequence
  synthetic
ggcgcgccagtcctattgcttttcttccaactaaacccctattgatgtgttggtcgtttgccaatcggagggcgacaggcacaggtcgctccgagttctagtagtgtgggaacttgttactactgatgaaacgaggtagtgacactcagtacctgcgaacgaggtcggggccctcccttcttccttcacgactcggaccgatg

SEQ ID NO: 326 - DNA, 203 bp, Artificial sequence
  synthetic
ggcgcgccagtccttcggggccctcccttcttccttcacccaactttcacttttcgttccactttagcaggggtcttctttctatccccctggcggcattggaactagccgtcgcgtcttaacgcgcagccctgaaggccccacaccttgtggatcttgccgtgggtatgtttctggcatgtgtttctcgactcggaccgatg

SEQ ID NO: 327 - DNA, 203 bp, Artificial sequence
  synthetic
ggcgcgccagtccttagcaggggtcttctttctatccccctggcggcattggaactagccgtcgcgtcttaacgcgcagccctgaaggccccacaccttgtggatcttgccgtgggtatgtttctggcatgtgtttctcaagcctgcaaccgaagccgaacagccacatgaacagtttgagcgtggtacgactcggaccgatg

SEQ ID NO: 328 - DNA, 203 bp, Artificial sequence
  synthetic
ggcgcgccagtcctccctcgtggtaacacgagcccccgtggccaaaagcccagtgtttacagcacctctcacatccaggacgaccccatcctggcgctcactcttagtagtatggcttagtacgcattaggtggtaagccgagctctccctcggccttgttctgaatgcacacatgtctaggggctaacgactcggaccgatg

SEQ ID NO: 329 - DNA, 203 bp, Artificial sequence
  synthetic
ggcgcgccagtcctcctctcacatccaggacgaccccatcctggcgctcactcttagtagtatggcttagtacgcattaggtggtaagccgagctctccctcggccttgttctgaatgcacacatgtctaggggctaaggatgtcctacaggtacccgcacgtaaccttcagagagtgcggatctgagcgactcggaccgatg

SEQ ID NO: 330 - DNA, 203 bp, Artificial sequence
  synthetic
ggcgcgccagtcctgcttagtacgcattaggtggtaagccgagctctccctcggccttgttctgaatgcacacatgtctaggggctaaggatgtcctacaggtacccgcacgtaaccttcagagagtgcggatctgagtaggagaccgtggtgcactgctttacagatgcagcccggtttaaaaagcgcgactcggaccgatg

SEQ ID NO: 331 - DNA, 203 bp, Artificial sequence
  synthetic
ggcgcgccagtcctaatgcacacatgtctaggggctaaggatgtcctacaggtacccgcacgtaaccttcagagagtgcggatctgagtaggagaccgtggtgcactgctttacagatgcagcccggtttaaaaagcgtctatgcccctacagggtagcggtgggccgcgccctttccttttaaaactcgactcggaccgatg

SEQ ID NO: 332 - DNA, 203 bp, Artificial sequence
  synthetic
ggcgcgccagtcctaggtacccgcacgtaaccttcagagagtgcggatctgagtaggagaccgtggtgcactgctttacagatgcagcccggtttaaaaagcgtctatgcccctacagggtagcggtgggccgcgccctttccttttaaaactacttgttctatggtgacaatggcaggaaacatgatcgactcggaccgatg

SEQ ID NO: 333 - DNA, 203 bp, Artificial sequence
  synthetic
ggcgcgccagtcctaccagtgtttcaagaacacggatgcagcagcagctcttctggcctctcacgccatccaggggaccttgtcctaccctcttgtgtccgtcgtcagtgaatctctgactcgaaaaggtactcagcttctctatctacttgctgttgccgttgtcattatcctgtttattatcttgccgactcggaccgatg

SEQ ID NO: 334 - DNA, 203 bp, Artificial sequence
  synthetic
ggcgcgccagtcctaacacggatgcagcagcagctcttctggcctctcacgccatccaggggaccttgtcctaccctcttgtgtccgtcgtcagtgaatctctgactcgaaaaggtactcagcttctctatctacttgctgttgccgttgtcattatcctgtttattatcttgctgggagttatcatgcgactcggaccgatg

SEQ ID NO: 335 - DNA, 203 bp, Artificial sequence
  synthetic
ggcgcgccagtcctgcggacggagatcatcccccggttaccccctttcgacgcgggtactgcgatagtgccaccccagtctttcctactcccgactcccgaccctaacccaggttcctcggaacaggaacaccaatttactcatcccctggatgctgactaatcagaggaacgtcagcattttccggccgactcggaccgatg

SEQ ID NO: 336 - DNA, 203 bp, Artificial sequence
  synthetic
ggcgcgccagtccttcctcggaacaggaacaccaatttactcatcccctggatgctgactaatcagaggaacgtcagcattttccggcccaggctaagagaagtagataagttagaatccaaattgatttatcatccccttgacgaattcgcgttggaaaaacacctctcacttgccgctcttcacaccgactcggaccgatg

SEQ ID NO: 337 - DNA, 203 bp, Artificial sequence
  synthetic
ggcgcgccagtcctagaggaacgtcagcattttccggcccaggctaagagaagtagataagttagaatccaaattgatttatcatccccttgacgaattcgcgttggaaaaacacctctcacttgccgctcttcacacccattaatttaattcggcctctgtgttgagccccttgttgaagtgtttcccgactcggaccgatg

SEQ ID NO: 338 - DNA, 203 bp, Artificial sequence
  synthetic
ggcgcgccagtcctaagtcaaccgactccgacgaaactaccatcatgcctccccgattatgtgatgctttctgccctgctgggtggagcaccctcgggttgagaaaaccttcttcctttttccttggactccggtcccccggtctaagccgctcggaatatgacagggttattttcacctcttcttttcgactcggaccgatg

SEQ ID NO: 339 - DNA, 203 bp, Artificial sequence
  synthetic
ggcgcgccagtccttgctttctgccctgctgggtggagcaccctcgggttgagaaaaccttcttcctttttccttggactccggtcccccggtctaagccgctcggaatatgacagggttattttcacctcttcttttctactccacagtgttctatactgtggaagggtatgtgttgccccttccttcgactcggaccgatg

SEQ ID NO: 340 - DNA, 203 bp, Artificial sequence
  synthetic
ggcgcgccagtcctcctttttccttggactccggtcccccggtctaagccgctcggaatatgacagggttattttcacctcttcttttctactccacagtgttctatactgtggaagggtatgtgttgccccttccttcttggagaacgtgcgcggcggtctttccgtctctcgacaagcgcgcgtgccgactcggaccgatg

SEQ ID NO: 341 - DNA, 203 bp, Artificial sequence
  synthetic
ggcgcgccagtcctagggttattttcacctcttcttttctactccacagtgttctatactgtggaagggtatgtgttgccccttccttcttggagaacgtgcgcggcggtctttccgtctctcgacaagcgcgcgtgcaacatacagagtaacgcgaagaaagcagttctcggtctagctctagtgcccgactcggaccgatg

SEQ ID NO: 342 - DNA, 203 bp, Artificial sequence
  synthetic
ggcgcgccagtcctacaaaggcagcggaacccccctcctggtaacaggagcctctgcggccaaaagccacgtggataagatccacctttgtgtgcggtgcaaccccagcaccctggtttcttggtgacactctagtgaacccctgaatggcaatctcaagcgcctctgtagggaagccaagaatgtcccgactcggaccgatg

SEQ ID NO: 343 - DNA, 203 bp, Artificial sequence
  synthetic
ggcgcgccagtcctggtttcttggtgacactctagtgaacccctgaatggcaatctcaagcgcctctgtagggaagccaagaatgtccaggaggtaccccttcctctcggaagggatctgacctggagacacatcacacgtgctttacacctgtgcttgtgtttaaaaattgttacagcttccccgaacgactcggaccgatg

SEQ ID NO: 344 - DNA, 203 bp, Artificial sequence
  synthetic
ggcgcgccagtccttctagtgaacccctgaatggcaatctcaagcgcctctgtagggaagccaagaatgtccaggaggtaccccttcctctcggaagggatctgacctggagacacatcacacgtgctttacacctgtgcttgtgtttaaaaattgttacagcttccccgaaccaagtggtcttggttcgactcggaccgatg

SEQ ID NO: 345 - DNA, 203 bp, Artificial sequence
  synthetic
ggcgcgccagtcctcctaaagttgatctcgaaacttggtgctaaacacatcaaggattgggaacacttggaggagttcagaaggtctctttgtgatgttgctgtttcgttgaacaattgtgcgtattacacacagttggacgacgctgtatgggaggttcataagaccgcccctccaggttcgtttgtcgactcggaccgatg

SEQ ID NO: 346 - DNA, 203 bp, Artificial sequence
  synthetic
ggcgcgccagtcctacttggaggagttcagaaggtctctttgtgatgttgctgtttcgttgaacaattgtgcgtattacacacagttggacgacgctgtatgggaggttcataagaccgcccctccaggttcgtttgtttataaaagtctggtgaagtatttgtctgataaagttctttttagaagttcgactcggaccgatg

SEQ ID NO: 347 - DNA, 203 bp, Artificial sequence
  synthetic
ggcgcgccagtcctggagttcagaaggtctctttgtgatgttgctgtttcgttgaacaattgtgcgtattacacacagttggacgacgctgtatgggaggttcataagaccgcccctccaggttcgtttgtttataaaagtctggtgaagtatttgtctgataaagttctttttagaagtttgtttatcgactcggaccgatg

SEQ ID NO: 348 - DNA, 203 bp, Artificial sequence
  synthetic
ggcgcgccagtcctaattactaatttgatctttaggttataatgttaggactataaaaattagcttaatgcatttagtaatttaaggcttagttatttaactttacttatcaagatggccgttggcagccccacgaaatctagattagtccgaatgtcctattttgattaggtggtcagataggtcagcgactcggaccgatg

SEQ ID NO: 349 - DNA, 203 bp, Artificial sequence
  synthetic
ggcgcgccagtcctgcctcagcgccaggcatagctggatcgtcaatcccaagtttggacttagacttgctctatgttacaattgggaggagcgtgacttaccattggtcgttgatgacgttaattccaaacaaaaacaacaacaacaacttagtttaaataattccggtctttaagcatcagggtagacgactcggaccgatg

SEQ ID NO: 350 - DNA, 203 bp, Artificial sequence
  synthetic
ggcgcgccagtcctattagttagcccttgtggatacgccactgccgctcaggtacagtaggacataccccaaatattgggttccactcgtagagaagaaaattagtggcgaaacgtacggtttatgtcaaaggagaaggtgattttaattgcacctgaagcaaccctaggtcttccctttgatgtgagcgactcggaccgatg

SEQ ID NO: 351 - DNA, 203 bp, Artificial sequence
  synthetic
ggcgcgccagtcctttaaacatcattgttcttatttacaatcaaatcgctatcgccacaaggctagtgataataactaagggggcgaagtcaagccctccaacctaatctccataaacagtgtctaagacgaacctcagcgaaagaaggaagatctctagacctactggaaataacataactctggaccgactcggaccgatg

SEQ ID NO: 352 - DNA, 203 bp, Artificial sequence
  synthetic
ggcgcgccagtcctaaacagtgtctaagacgaacctcagcgaaagaaggaagatctctagacctactggaaataacataactctggacctattggaacttatataattggcgcccaaccaacaatctgaacccaccaatctaatttaacacactttgtcaggcgacaaacagggtagttaagttagaacgactcggaccgatg

SEQ ID NO: 353 - DNA, 203 bp, Artificial sequence
  synthetic
ggcgcgccagtcctgactaagtgtgaacttgcctctctcaacaaaaagccaccgacattaagagagagagtattgctgcttagttaactgcaggccctatttagggttaccgcccaggatctgcaacagcattcctgtatcatccagggcaccggtggacttggtgaggattgagttgacctcatcatcgactcggaccgatg

SEQ ID NO: 354 - DNA, 203 bp, Artificial sequence
  synthetic
ggcgcgccagtcctcattctatggttacccatcattagaggaaatttccaataaactctggtgtaaggcttagagtgatggtcgaggtgccctatttagggtgaggagcctcggtggcagccccaccaaatcctctattggataggaacagctgtactgggcagttacagcagtcgtatggtaacacacgactcggaccgatg

SEQ ID NO: 355 - DNA, 203 bp, Artificial sequence
  synthetic
ggcgcgccagtcctattcaaaataaaatcccgtgcggtcggaaacaaaaattaatttaaattttttaattccgaaacttaaaaccaagtttaaagaaaacttaaaatcaagaaaacttaaaaccaagtttaaagaaaacttaaaatcaagaaaacttaaaaccaagtttaaagaaaacttaaaatcaacgactcggaccgatg

SEQ ID NO: 356 - DNA, 203 bp, Artificial sequence
  synthetic
ggcgcgccagtcctcactgtttcatggttacccatcatttgaggaaatttccaataaacttgaatgtaaggcttgaaacagtggtctaggtgccctatttagggtgaggagcctagctggcagccccagtgaatcctctattggatagaaaccgctatatcgggtagctatagcagtcggatagtaatcgactcggaccgatg

SEQ ID NO: 357 - DNA, 203 bp, Artificial sequence
  synthetic
ggcgcgccagtcctaaattagtggcaataacatatatatgtcaaccctgctcattggtttaattgagcgcatttagtgttgtgtgatcttgcgcgataaatgctgacgtgaaaacgttgcgtattgctacaacacttggttagctatttagctttactaatcaagacgccgtcgtgcagcccacaaaacgactcggaccgatg

SEQ ID NO: 358 - DNA, 203 bp, Artificial sequence
  synthetic
ggcgcgccagtcctggaaattgtcgttgaactacatgttgtaaggctttagagaaataagggagtgtcctatttaggatgaggtgctccggtggcagccccaccaaaacctctagcgactaggaacagctatatcgggttgctatagcagtcaggatgtcattctggcgttccgaaatacccaaacctcgactcggaccgatg

SEQ ID NO: 359 - DNA, 203 bp, Artificial sequence
  synthetic
ggcgcgccagtccttgtgaaaagggtaaagtatgaaagctactctcagaaaagtacttatgtattgatgagagccttaaaatgactttatattcacaaaactgctggaagacaatgatctggggtatcacattccctcttaggttaagtttcgcactactaggaatttttgcgaaaattcttaattcccgactcggaccgatg

SEQ ID NO: 360 - DNA, 203 bp, Artificial sequence
  synthetic
ggcgcgccagtccttgatgagagccttaaaatgactttatattcacaaaactgctggaagacaatgatctggggtatcacattccctcttaggttaagtttcgcactactaggaatttttgcgaaaattcttaattccattcttatggtgtagtgtttgttcttttcaattggggcgtatctctctttcgactcggaccgatg

SEQ ID NO: 361 - DNA, 203 bp, Artificial sequence
  synthetic
ggcgcgccagtcctaaactctccgaacactaggtgcagtaaggctttcatggagtggtttgctatttagcgtacgtgtaccataggcagccccaaaaacacgtgtgaggagaaagtcccagtcactttgggcaaagtagacagccgcgcttgcgtggtgggacttaattaatgcctgctaacccagttcgactcggaccgatg

SEQ ID NO: 362 - DNA, 203 bp, Artificial sequence
  synthetic
ggcgcgccagtcctaggctttcatggagtggtttgctatttagcgtacgtgtaccataggcagccccaaaaacacgtgtgaggagaaagtcccagtcactttgggcaaagtagacagccgcgcttgcgtggtgggacttaattaatgcctgctaacccagttgaaattgataattttgatacaacaaccgactcggaccgatg

SEQ ID NO: 363 - DNA, 203 bp, Artificial sequence
  synthetic
ggcgcgccagtcctcccgagctgcctgtgggttgcacccacccacagggcccactgggcgctagcactctggtactgaggtacctttgtgcgcctgtttttactccccttcccccgaagtaacttagaagctgtaaatcaacgatcaatagcaggtgtggcacaccagtcataccttgatcaagcactcgactcggaccgatg

SEQ ID NO: 364 - DNA, 203 bp, Artificial sequence
  synthetic
ggcgcgccagtcctttcatgttggctgcgctggcggcccacctgtggcccaaagccacgggacgctagttgtgaacagggtgtgaagagcctattgagctacatgagagtcctccggcccctgaatgcggctaatcctaaccatggagcaggcagctgcaacccagcagccagcctgtcgtaacgcgccgactcggaccgatg

SEQ ID NO: 365 - DNA, 203 bp, Artificial sequence
  synthetic
ggcgcgccagtccttgttcgcaggtagtcgtcagtggttcgacgccttggaataaaggtctcgagatgccacgtggacgagggcatgcccaaagcacatcttaacctgagcgggggtcgcccaggtaaaagcagttttaaccgactgttacgaatacagcctgatagggtgctgcagaggcccactgtcgactcggaccgatg

SEQ ID NO: 366 - DNA, 203 bp, Artificial sequence
  synthetic
ggcgcgccagtcctcgcatttccggcgacgcctcggtactgacctctgcagagccgggtggagcccattgacgtccagcgaagcgaggagcagcgatggacggtcgggtgcagctgataaaggccctcctggccttgccgatccggcctgcgacgcgtcgctggaggaacccgattccctttcccgagcgactcggaccgatg

SEQ ID NO: 367 - DNA, 203 bp, Artificial sequence
  synthetic
ggcgcgccagtccttcttctgcgacggcgcggacctggagcttccgcgcggtggcttcactctcctgtaaaacgctagagcggcgagttgttacctgcgtcctctgacctgagagcgaaggggaaagcggcgagatgactgaccgctacaccatccatagccagctggagcacctgcagtccaagtaccgactcggaccgatg

SEQ ID NO: 368 - DNA, 203 bp, Artificial sequence
  synthetic
ggcgcgccagtcctcatccagctcctctccacagcccaacccacaccagcctcagacaccaccatgaccggctcctgctgcggctccaccttctcctccctgagctacgggggaggctgctgccagccctgctgctgccgcgacccctgctgctgccgccccgtgacctgccagaccaccgtgtgccgcgactcggaccgatg

SEQ ID NO: 369 - DNA, 203 bp, Artificial sequence
  synthetic
ggcgcgccagtccttggcggtgggcgggagcggtcggcggcctcagccccttcagagagcgactttcaaactcgcgcccgcgtcgcggcagcacctgggcagccccgcacgccgtgcgcgtcccgagcccgcggggcagctaccgctcgaatctccctggggtgccctccccaggcagcaatgccaggcgactcggaccgatg

SEQ ID NO: 370 - DNA, 203 bp, Artificial sequence
  synthetic
ggcgcgccagtccttgtgtcacttccggcctccctttagctgccatcttgcgtccccgcgtgtgtgcgcctaatctcaggtggtccacccgagaccccttgagcaccaaccctagtcccccgcgcggccccttattcgctccgacaagatgaaagaaacaatcatgaaccaggaaaaactcgccaaaccgactcggaccgatg

SEQ ID NO: 371 - DNA, 203 bp, Artificial sequence
  synthetic
ggcgcgccagtcctggagaaacagtagttaggatggctgaaggggatactcaccggctgaaggccgactgtgattccccctacccccacaaggcgattttgaccccctgagggctgctctagaggactcaggccccgaagctgtcccagggaggtccccgctgcatcccaccacccaagctgtgcctccgactcggaccgatg

SEQ ID NO: 372 - DNA, 203 bp, Artificial sequence
  synthetic
ggcgcgccagtcctcggggctcgcggacaaaacaagttgagcgcgagcgcgttgattggttggcggacggtgcgaggtggacgctgattggctgagggcagcgcgaggcgggcgctgattggctgcgacgcgccgacgccggtgttttgcagtcctgggcagctcggcagtccagcccggcccgggtccgactcggaccgatg

SEQ ID NO: 373 - DNA, 203 bp, Artificial sequence
  synthetic
ggcgcgccagtccttccggccccgcccgcgtcagctctgcgcggtgattcactccctccttcgccccggggcccccttcccggccagacggcgggcaagacagctgggtgtacagcgtcctcgaaaccacgagcaagtgagcagatcctccgaggcaccagggactccagcccatgccatggcggattcgactcggaccgatg

SEQ ID NO: 374 - DNA, 203 bp, Artificial sequence
  synthetic
ggcgcgccagtcctctcctagtcgcagcaagcgcggaactggggttgcggcgtctaagtgtttccggtggattcccagggactgtcggaggtgtggactctgcctgcctacctggtctgggaagatgttctaccatatctccctagagcacgaaatcctgctgcacccgcgctacttcggccccaactcgactcggaccgatg

SEQ ID NO: 375 - DNA, 203 bp, Artificial sequence
  synthetic
ggcgcgccagtcctgctgtcgtatcgacagaaggctgaggccggggtgctagagaaccttgccgtgctggaattcacgttgacgcccccacggagctctgctgcagagccctcgagtcccgcacttccggccgccaggtggcgctggttctgttgccaactcggagagactgagctgggccacgcaagcgactcggaccgatg

SEQ ID NO: 376 - DNA, 203 bp, Artificial sequence
  synthetic
ggcgcgccagtcctgactacaaggagacagaaggctgaggccggggtgctagagaaccttgccgtgctggaattcacgttgacgcccccacggagctctgctgcagagccctcgagtcccgcacttccggccgccaggtggcgctggttctgttgccaactcggagagactgagctgggccacgcaagcgactcggaccgatg

SEQ ID NO: 377 - DNA, 203 bp, Artificial sequence
  synthetic
ggcgcgccagtcctagaggagtcaaccctgaggaggaaaaagtagtatgatttgctggcgtcacccctctgctccgtgcgggcgcggcgaatggcaggtcccgaggtcgcagcttccactggcgcgggttgagttccctgttgcccttggtctcggggtcgctgtaggcgctgaggctgcagctatcacgactcggaccgatg

SEQ ID NO: 378 - DNA, 203 bp, Artificial sequence
  synthetic
ggcgcgccagtcctcgacttcacgcagggtccgtggggtccccgcggcgcgcagcggctgaaggaggccccagggccttggcgaccgcagcggcggctttagcgtcagtgactaggcagcagggggtcaggatgcggcgaagctcccgcccgggctcggcctcgtcctcgcgcaagcacacgcccaaccgactcggaccgatg

SEQ ID NO: 379 - DNA, 203 bp, Artificial sequence
  synthetic
ggcgcgccagtcctgattcacgcccccttccggcgcctagagcaccgctgccgccatgttgagggggggaccgcgaccagctgggcccctggctcagggaggggccacgtcagtgctgccagagacgtcacaatgccggcccagccgttcggcagagaagaggcgatggcggcgatggcatctctcggcgactcggaccgatg

SEQ ID NO: 380 - DNA, 203 bp, Artificial sequence
  synthetic
ggcgcgccagtcctgggaggtgaaaggtcatagtcctgtttggcggccatttctcttgaaactgcggctcgggacctgcggtacctgctgtagtcacgagggacgggcggcggcctggtcggcagagagtagcctgcaacattcggccgtggttacgatgagtttacccctcaatcccaaacctttcccgactcggaccgatg

SEQ ID NO: 381 - DNA, 203 bp, Artificial sequence
  synthetic
ggcgcgccagtcctaatcacggaatcccggcggccggcggcccgggaggcagtcgcgcgctcgcatccccaagatggcggccgttaaggacagttgtggcaaaggagaaatggccacagggaatgggcggcggctccacctggggattcctgaggccgtgtttgtggaagatgtagattccttcatgacgactcggaccgatg

SEQ ID NO: 382 - DNA, 203 bp, Artificial sequence
  synthetic
ggcgcgccagtcctcccttgcgcgccaccgtcccttctctcttcctcggcgctgcctacggaggtggcagccatctccttctcgctggcgattggaagacactctgcgacagtgttcagtccctgggcaggaaagcctccttccaggattcttcctcacctggggccgcttcttccccaaaaggcatccgactcggaccgatg

SEQ ID NO: 383 - DNA, 203 bp, Artificial sequence
  synthetic
ggcgcgccagtcctcagcaaaagaccagctggtcccagattcgctgctggagtgctggatggagcctttctctgccctctgtgacatttccaattttagataatgcctcacatctctgtccccccgggaccccctggagcccccatgatccctaagaagacagcttgaacctagatctcacccccaggcgactcggaccgatg

SEQ ID NO: 384 - DNA, 203 bp, Artificial sequence
  synthetic
ggcgcgccagtcctgtgacaacgggggcgaagcgcaggcgcaaggagcaagcgcagattgtgggcggctgtgtcagctgacccaaggggccttcgaggtgccttaggccgcttgccttgctctcagaatcgctgccgccatggctagtcagtctcaggggattcagcagctgctgcaggccgagaagccgactcggaccgatg

SEQ ID NO: 385 - DNA, 203 bp, Artificial sequence
  synthetic
ggcgcgccagtcctgctacgcagagttagagaagccagagtccaagccaagaactctgactccacatccagtcccttctctcctttataactcaagtttccttgcgccacactgccctccacgttatgctgtacatgacaacttgggtgaggcaacagggaagctgaaaagagatcatacggtgctgacgactcggaccgatg

SEQ ID NO: 386 - DNA, 203 bp, Artificial sequence
  synthetic
ggcgcgccagtcctagacacgggcgaggggaggaagaaggcgcctcgggctccggtctcctgcgctcctgctgggcgccagcggctggaccttggcagccgtctgaggcttcggggagcccaaggccaccggcagcgcttgttagaatgcagattcccggggttcgactggaatgagaccccggggagcgactcggaccgatg

SEQ ID NO: 387 - DNA, 203 bp, Artificial sequence
  synthetic
ggcgcgccagtcctttgtcctcagccaattagcggcccaacgccccttccgcgcctcatccgggttcccgggacgggaaagtggcgtggtaaccaggcaactactgatcaatcccctccccggctgatttgcgcatcaggaggaggactgagcttatctgactccagagctttcaggagggaagaaagcgactcggaccgatg

SEQ ID NO: 388 - DNA, 203 bp, Artificial sequence
  synthetic
ggcgcgccagtccttccctagcaaggcgtttctctgggcgcgctctgtggccaccctcacactcggtgcccggaaatcgagccctttgcccacggctacttcacgggaccaccctcccgggttaggcataggccctcccggatcttccgcggtgcggtaaccagcgtgagctcgcccgccagaagaatcgactcggaccgatg

SEQ ID NO: 389 - DNA, 203 bp, Artificial sequence
  synthetic
ggcgcgccagtcctgcagtctccgcctaagactttccaagtcctgtagtttcgagcccgctgccctttgcctcctgggcggagaagctgcttcctcctgggaacaaccgcctcccgctcctagcaggttgctactgccccgaacccgcgctgcagggaacagcggggcaaacaaaaccaatagagccacgactcggaccgatg

SEQ ID NO: 390 - DNA, 203 bp, Artificial sequence
  synthetic
ggcgcgccagtcctagaaacagcctatagacgccacgagtcggcggcgctaccgaggggctgtgggcgcgcagctggaacctccggctgtcagtgcgcttacagttcctaaccccgaccctgcgcgcagcccgcactatggcagccccgccgcagctaagggctctgctcgtagtcgtcaacgcactgcgactcggaccgatg

SEQ ID NO: 391 - DNA, 203 bp, Artificial sequence
  synthetic
ggcgcgccagtcctcggggcgccgctgagccaagtgggccacccgggcacggccacgctcccgggtcacgtgacacggagggggccgaattctgctggaggcagcgccatatcctggaggtgaaggtaccacctcatggagacccccgcggccgccgcccccgctgggagcttattcccctccttcctcgactcggaccgatg

SEQ ID NO: 392 - DNA, 203 bp, Artificial sequence
  synthetic
ggcgcgccagtccttatggtttgaagtggtgaacatggatttttctcggcttcacatgtacagtcctccccagtgtgtgccggagaacacgggctacacgtatgcgctcagttccagctattcttcagatgctctggattttgagacggagcacaaattggaccctgtatttgattctccacggatgtcgactcggaccgatg

SEQ ID NO: 393 - DNA, 203 bp, Artificial sequence
  synthetic
ggcgcgccagtcctagagcgtcttctcgggcctgggcggcgcagacgaggcctgaggcggcggcgcgaggcagttccagctattcttcagatgctctggattttgagacggagcacaaattggaccctgtatttgattctccacggatgtcccgccgtagtttgcgcctggccacgacagcatgcacccgactcggaccgatg

SEQ ID NO: 394 - DNA, 203 bp, Artificial sequence
  synthetic
ggcgcgccagtccttgtggtctctccatgctgcccaggtcggactcctaggctcaagcgatcccctcgccccagcctgcctggaggcgcgcgcgtggtctccgcgccctgttgcgccttcaaagtgcccagaatggtgtctggtgcaaaataagcagcggcggggaacaccttgccactgtcaccgtccgactcggaccgatg

SEQ ID NO: 395 - DNA, 203 bp, Artificial sequence
  synthetic
ggcgcgccagtcctgggcaaaggaggaagagccagaggatccagacgccttggaggacttggaacacctgtaacaggacaaggagttctgctcaggcacgtggccacagaaaactacttaggaagcctgtggtgagaacaacaacagtgcctgagaatcccacggctctggggaagtgagccccgaggcgactcggaccgatg

SEQ ID NO: 396 - DNA, 203 bp, Artificial sequence
  synthetic
ggcgcgccagtcctgccttccatccctgctcctgcaccggtctgcatctcccagcagaaggcgcagccatgaatccgttattcggccccaacctcttcctcctgcagcaggagcagcagggcctggccgggccactgggggactcactgggaggcgaccacttcgccgggggaggagacttgcccccgcgactcggaccgatg

SEQ ID NO: 397 - DNA, 203 bp, Artificial sequence
  synthetic
ggcgcgccagtccttagtcccagagccaggaatcaggggcagccgggcgagtcccagggcaggggtcctccgccgccttgcacctgccctgctgggcggcaccgggtcagtgccctgccccctcctgcgggtcccaactctctctttcccatcgtgcgtcctctggagaagtgcgcgcgtgagctgaccgactcggaccgatg

SEQ ID NO: 398 - DNA, 203 bp, Artificial sequence
  synthetic
ggcgcgccagtcctatcgtgcgtcctctggagaagtgcgcgcgtgtaagtgtggcgagtgtggccaagggtgccggaggcagggttcgggagctgacatggacccaaatcctcgggccgccctggagcgccagcagctccgccttcgggagcggcaaaaattcttcgaggacattttacagccagagacgactcggaccgatg

SEQ ID NO: 399 - DNA, 203 bp, Artificial sequence
  synthetic
ggcgcgccagtcctccttcactgctcagttaaaggttccagggattccactttgtctggacccatccagctgagtgaacccagggtggtggtgtatctggggagagtgaggagtgggttgtccaaacaccagggaaagagccctttggggcctcagacagcggagtgaagctggaaccatcagggaaccgactcggaccgatg

SEQ ID NO: 400 - DNA, 203 bp, Artificial sequence
  synthetic
ggcgcgccagtcctcccttcccaccccgcgtcgctcggcgttagccaaggcccgggcggcgccaccctccgggggcactaggtctggggccgcagtgcccagcacagagcagcgtttatcgggacgaagatgaatggaaagaattggagcaaaaagaggttgattacagcggcctcagggttcaggcacgactcggaccgatg

SEQ ID NO: 401 - DNA, 203 bp, Artificial sequence
  synthetic
ggcgcgccagtcctcgttgccgcgtccgagtccggccatcagtggctgcagatccggaggccaggagctcaaccacccttcttcggaacagggccggcctgctgctgtgccctcgacgctcggtgcctgtatctactccggggcctaggtcggctccgggggcggcttaggagaaggccgccggcgagcgactcggaccgatg

SEQ ID NO: 402 - DNA, 203 bp, Artificial sequence
  synthetic
ggcgcgccagtcctgcaggccgctgtgagcgcatcctcaccgggcacacccagtcggtcacctgtctccggtggggaggggacgggcttctctactctgcctcccaggaccgcaccatcaaagtctggagagctcatgacggtgtgctgtgccggactctgcaaggccacggccactgggtgaacacccgactcggaccgatg

SEQ ID NO: 403 - DNA, 203 bp, Artificial sequence
  synthetic
ggcgcgccagtcctgctccgcaggctgccggctccacccctcagggactggctggcttcgagcagggcatcggaaccaggcctcctggcactggcctgggtagagccagggcgagcaccagctgacccccagtggaaccctgtgacagtcctgccagggcccaggccatcccaaccgacttccatctccgactcggaccgatg

SEQ ID NO: 404 - DNA, 203 bp, Artificial sequence
  synthetic
ggcgcgccagtcctgcaggggtttcagtttctggcgcgaacttccgccgttccgaagttgcacggtgaattggcgctatgtctggggacagcagcggccgcgggccagagggccggggccggggccgcgacccgcatcgggatcgcacccgctcccgctcccgctcgcggtcccctttgtcgcccaggcgactcggaccgatg

SEQ ID NO: 405 - DNA, 203 bp, Artificial sequence
  synthetic
ggcgcgccagtcctagttccggtggctggcggaaacgggaacgtgcagccgcgggtgcaggagtcctggggcatggcgggggcggggcagggggaggcgcgcacagaacaggctggggcatccctcgccctggctctttgagcccggaccagacagagatgtgataatggatcatcatgtttctaccacgactcggaccgatg

SEQ ID NO: 406 - DNA, 203 bp, Artificial sequence
  synthetic
ggcgcgccagtccttacaccatacagctcaaacttcagaagattttgggttaagcagttatcattagtctgcaaatgatcgtgttttcacctgatcattagaaactaatgaaacaccttttaagtcttatgaattcaggttacactgttttccagatgccttggcagctggtacagggcctctgaaaacgactcggaccgatg

SEQ ID NO: 407 - DNA, 203 bp, Artificial sequence
  synthetic
ggcgcgccagtcctctcaggtgcttgcgaggtgatcagaaggcaaagatgtcggagcgaaaagtattaaacaaatactacccgccggactttgacccatcaaagatccccaaactcaagctccccaaagaccggcagtacgtggtgcggctgatggcccccttcaacatgaggtgtaagacgtgcggacgactcggaccgatg

SEQ ID NO: 408 - DNA, 203 bp, Artificial sequence
  synthetic
ggcgcgccagtcctacacaccctgacccgcatcgccctgggtctctcgagcctgctgcctgctcccccgccccaccagccatggtggtttctggagcgcccccagccctgggtgggggctgtctcggcaccttcacctccctgctgctgctggcgtcgacagccatcctcaatgcggccaggatacctcgactcggaccgatg

SEQ ID NO: 409 - DNA, 203 bp, Artificial sequence
  synthetic
ggcgcgccagtcctagccagctgctgcgggagaatgccaaggctgggcaccccccagcgctgcgtcggcagtacctgaggcttcgggggcagctgctgggccagcgctacgggcccctctccgagccaggcagtgctcgtgcctatagcaacagcatcgtccgcagtagccgcactactcttgaccgccgactcggaccgatg

SEQ ID NO: 410 - DNA, 203 bp, Artificial sequence
  synthetic
ggcgcgccagtcctcacttccctctgtggctctgctcagaactggcggtttttcccagctccttgcccagaccaatacttccatgctgtcttcaagccctgcttcctgcacatctcccagcccagatggggagaacccatgtaagaaggtccactgggcttctgggaggagaaggacatcatccacagcgactcggaccgatg

SEQ ID NO: 411 - DNA, 203 bp, Artificial sequence
  synthetic
ggcgcgccagtcctattcctatagccgttatcactgccatcaccactgccaccagcatcttcttgcagattccacccctgctccccagagacttcctgctttgaaagtgagcagaaaggaagctctcagaaaaatctctagtggtggctgccgtcgctccagacaatcggaatcctgccttcaccacccgactcggaccgatg

SEQ ID NO: 412 - DNA, 203 bp, Artificial sequence
  synthetic
ggcgcgccagtcctgaagccggaagagaccggaccctgaacagaatcgcagattgccagcccttttcccgacccctacggaaagacgagtccaggggccgtcctggcgaggtcaaaacatttagtctggtcttttcagcgtggaccctgccagcagccaggccatggagctctctgatgtcaccctcacgactcggaccgatg

SEQ ID NO: 413 - DNA, 203 bp, Artificial sequence
  synthetic
ggcgcgccagtcctcttccgcctgcgcctgcgcaggcccgctccccgagccctgccaaccatggtgaacttgggtctgtcccgggtggacgacgccgtggctgccaagcacccgggactcggggagtatgccgcatgccagtcacacgccttcatgaagggcgttttcaccttcgtcacaggcaccggcgactcggaccgatg

SEQ ID NO: 414 - DNA, 203 bp, Artificial sequence
  synthetic
ggcgcgccagtcctacaccccaagaacgctgtcatttcctgggccaagttgggacccggacggcctcaccatgatgaaacgggcagctgctgctgcagtgggaggagccctggcagtgggggctgtgcccgtggtgctcagtgccatgggcttcactggggcaggaatcgccgcgtcctccatagcagcgactcggaccgatg

SEQ ID NO: 415 - DNA, 203 bp, Artificial sequence
  synthetic
ggcgcgccagtcctgggtcacatggcggtggcgcggtagcgcgcgatgcagcacaggctagaggctgcgcaagcgcggggcccgcccctgggaccctccgggccgggcggtttggccccttagcgcccgggcgtcggggcggtaaaaggccggcagaagggaggcacttgagaaatgtctttcctccacgactcggaccgatg

SEQ ID NO: 416 - DNA, 203 bp, Artificial sequence
  synthetic
ggcgcgccagtcctttgccaagggttggctgcgcgtgcggcgggagtagaggcgccttgcgcaccaggaagtgactgtttccccgccgcagcaaaccaggccatccgctggccttttagtttgccgcctcaggtttgtaagaggatttattggttacgaaggaaggtggatttcagtgtgttctttggcgactcggaccgatg

SEQ ID NO: 417 - DNA, 203 bp, Artificial sequence
  synthetic
ggcgcgccagtcctgcggggtcaggggccgagcggagagggtagagacggggtttcaccgtgttagccaagatggtctcgatctcctgacctcgtgatccgcccgcctcggcctcccaaagtgctgggattacaggcgtgagccactgcgcccggcctgttgtacagttattaaagttatcatttaaccgactcggaccgatg

SEQ ID NO: 418 - DNA, 203 bp, Artificial sequence
  synthetic
ggcgcgccagtcctgagcccgtcttccgacgtgcagcctggcagtgcagtgagctgtctggccttttgtccttgatccttggttaaggaaatgaccaaccagtacggtattctcttcaaacaagagcaagcccatgatgatgccatttggtcagttgcttgggggacgaacaagaaggaaaactctgacgactcggaccgatg

SEQ ID NO: 419 - DNA, 203 bp, Artificial sequence
  synthetic
ggcgcgccagtccttggctggtgtctggccctcaggacatcctctccaatccaccacacaccaccttacccctctgctggcaagaggggacctgattcatcctcacgctaaacactcattctacccaactgattgagacagaacagaagataaactgaaacttctctgccttcccgctgcaagagtgacgactcggaccgatg

SEQ ID NO: 420 - DNA, 203 bp, Artificial sequence
  synthetic
ggcgcgccagtcctgtggcgcctgcgggattccgtaccggcgtctccatggcgaccgcgttggctgggtggcctccattgtcgggctgctgctctcagcggcggggctcgccagcgcttcagtgggcggggacgcggcaggtgactccagaccaaggaggatgagctgctgtccctggaagagaacggcgactcggaccgatg

SEQ ID NO: 421 - DNA, 203 bp, Artificial sequence
  synthetic
ggcgcgccagtcctatgcgccgcccgtggccatcttgtaggcggggacacgccgaggtaacttccagggtgcgccttcgttgtcttctccaagctgtagttctacgtcccgacctccctatcataccacactcttcagcgaccacgcaggcactttcccggtccccagtataccataattgaagaaaacgactcggaccgatg

SEQ ID NO: 422 - DNA, 203 bp, Artificial sequence
  synthetic
ggcgcgccagtcctcacactttcagtgccagggcattgtgggaagcagccatggtctaagccgggcgcctcacctgtcagccgcaccggctccagcgctcgcctctcgccctcgcttctccagcgctccttgctcgcaaggcgggggaggcggcggcccagccacgatgatacatttcatattgctctcgactcggaccgatg

SEQ ID NO: 423 - DNA, 203 bp, Artificial sequence
  synthetic
ggcgcgccagtcctaccgagcttggctgtgtttatctcgttggggactaaggcgtcggttggcgcgcaacgggttctaggctgcaggcagctcgaggacccgcggccccgccccggctcggcctggcagatagcagaggcagcaggccgtgccgggggggcatgttgctgtaaccagtggcccaggggcgactcggaccgatg

SEQ ID NO: 424 - DNA, 203 bp, Artificial sequence
  synthetic
ggcgcgccagtcctgtggggctggcggccggcgggagaggcggccggcctggactggcccgagagggatcccggttcccagaacagacctaggaggcggcctcgagggcggacggcagggagggccagcatgccccgactgctgcaccccgccctgccgctgctcctgggcgccacgctgaccttccgcgactcggaccgatg

SEQ ID NO: 425 - DNA, 203 bp, Artificial sequence
  synthetic
ggcgcgccagtcctacggtgggatccacaacatctccacatcgctgtccccacccagccagggcagcgccagcactagctcagacgcaaggacggaaccgctggactccaggttccttgcctgggagtaggagaaatccacctgctgggggctgagtgtggcctgagggacaggccctgggtcccgggcgactcggaccgatg

SEQ ID NO: 426 - DNA, 203 bp, Artificial sequence
  synthetic
ggcgcgccagtcctgggataaacggagctggacgactcagtctcttggtctgtggctgctgcggttacctggatgggcgagcacctctgaggctggctttgttacctgggcaataagggactagcagttcagccgttttctatgcctgctggatttgtttgtatttgttcccagccactgctcatgtacgactcggaccgatg

SEQ ID NO: 427 - DNA, 203 bp, Artificial sequence
  synthetic
ggcgcgccagtcctctccaggccccgctcctgcgccctatttggtcattcggggggcaagcggcgggaggggaaacgtgcgcggccgaaggggaagcggagccggcgccggctgcgcagaggagccgctctcgccgccgccacctcggctgggagcccacgaggctgccgcatcctgccctcggaacacgactcggaccgatg

SEQ ID NO: 428 - DNA, 203 bp, Artificial sequence
  synthetic
ggcgcgccagtcctctcgctacgcaatgccaacccgaggctgaagaactacttcaaggagaactacattcctcaggtctgcgaggcactgttatgtggtatacttgttacatgtcctgaggatccgctgaggtatttagagggaatgatcatggttataatcaaaagtggtcttcagaatcttctttgcgactcggaccgatg

SEQ ID NO: 429 - DNA, 203 bp, Artificial sequence
  synthetic
ggcgcgccagtcctgcctctgtcatttcctagagctgtggcctcggatccctccctggtgccacagcagctgagtgcgcatcaaatctgaagaaaatctacacagtacagacagtacagatattttggagtgtatacaataatatccctcctgtgactagcctgcctttgagatgtagttatcatttacgactcggaccgatg

SEQ ID NO: 430 - DNA, 203 bp, Artificial sequence
  synthetic
ggcgcgccagtcctgctcggtctctcggtgctcgctccatcgggtctggcggggctggcagcggcgaggacccgggtctggcgctgtgggccgggagccgtggggcggcatggaggggctggttgtcgccgccggcggggacgtctccctgcacaacttcagcgcgaggctgtgggagcagctggtcccgactcggaccgatg

SEQ ID NO: 431 - DNA, 203 bp, Artificial sequence
  synthetic
ggcgcgccagtcctgccgccggatggcgtaggatcggccgctggtggtggtgataccgggtacccgggctatggcgccggcgcagcgctgccctctgtgccgccagaccttcttctgtggtcgcgggcacgtttacagccgcaagcaccagcggcagctgaaggaggctttggagaggctcctgcccccgactcggaccgatg

SEQ ID NO: 432 - DNA, 203 bp, Artificial sequence
  synthetic
ggcgcgccagtcctatggtcgatgatgctggtgccgctgagtcccagcggggcaaacagactccggcccactccctggagcagctgcgtaggttaccacttccgccgccacagattcgcatccggccctggtggtttccggtgcaggaactgagagaccctttggtgttctacctagaggcatggctgcgactcggaccgatg

SEQ ID NO: 433 - DNA, 203 bp, Artificial sequence
  synthetic
ggcgcgccagtcctaccatagtctgtgtccgcgttcttttttccgggactgcagagttcggggaagctgtacgccgcctttcgctacgcggaatttgcagatcttcccctggacctcaggcctctccggctggagtagggtggacgcttcacataagcttctctggtcgaacttacccgaatctccagcgactcggaccgatg

SEQ ID NO: 434 - DNA, 203 bp, Artificial sequence
  synthetic
ggcgcgccagtcctgtcgggttaccagcgcgggggctacagttagcctcgagaacctttgctttcagccggactccggactcctccggggacagcgcagcgcccgccagagccctcggcgctccctcccgctggcggcttccgcagccttcaaggatggcgctggcggctttgatgatcgccctcggccgactcggaccgatg

SEQ ID NO: 435 - DNA, 203 bp, Artificial sequence
  synthetic
ggcgcgccagtcctgggggtccgcgggcgacactctcgggctcgcgcacctccccaagatggcggcgcccgaggcctcgcgcgcccggagttgctggttctgtgaggtagcggcggcaacgaccatggaggccacgtcccgggaggcggcgccagcgaagagctcggcctcgggccccaacgctcccccgactcggaccgatg

SEQ ID NO: 436 - DNA, 203 bp, Artificial sequence
  synthetic
ggcgcgccagtccttctggaagacggcagagctgccgccattttgcgggaagaggaggctctgtacctgcagtgctgcttttcttgcctagactctaggaactatccgagctccactccccacaacatactcaaaggaacggagagaaccgggacccccctgcggggacccggaactgatctgacaggcgactcggaccgatg

SEQ ID NO: 437 - DNA, 203 bp, Artificial sequence
  synthetic
ggcgcgccagtccttttttctcactgataaagaaaggaaaagctaccaccattacatcagtcttaccgaagccagcactagttgcatctcgggttgaggtttccaaagtccttattctaggatcaggaggtctgtccattggtcaggctggagaatttgattactcaggatctcaagctgtaaaagcccgactcggaccgatg

SEQ ID NO: 438 - DNA, 203 bp, Artificial sequence
  synthetic
ggcgcgccagtcctcccgcgcgctgcccttcgcttgaggcaaaaggactcttgtggaagatggaactcattgtccattttccagaatgtatttccaagcccatcaatgggacctgatactgctgttctgtgttgaaatgcttgaagaactcctgcatctctgcttgcatcttccatcctactgaaacccgactcggaccgatg

SEQ ID NO: 439 - DNA, 203 bp, Artificial sequence
  synthetic
ggcgcgccagtcctcacaggcagtgccactgcgcaggttgatcagcgaaacagcatccattttaatctgcggggagcccctgccttaccagggcgttctctccgcccgccggtggatgctccgcgcctgccctccgcagcctcgctcagcagtcctgcgttggggtctgcgccctaggatgcactgagcgactcggaccgatg

SEQ ID NO: 440 - DNA, 203 bp, Artificial sequence
  synthetic
ggcgcgccagtcctcgtctgccccgccagcgcgtcgagggaggggccagcgacacatggcctagtaactgtccggccgcggcgctggcttaagccatggctgagggtagccggattcctcaggcccgggcgctcctacagcagtgcctgcacgcccggctgcaaattcgcccagccgatggggacgtccgactcggaccgatg

SEQ ID NO: 441 - DNA, 203 bp, Artificial sequence
  synthetic
ggcgcgccagtcctctccgctccaatcccggaagtgcgcgcggccccgcccccgccggttcgcgtctctctgctgcggcgcggggaccgctgtgctctcggaaacggggtctctgggggatccagtgacgtgcccaaccacagagaccagacccctcctcctgtagagagtggtgctgccctctcgggcgactcggaccgatg

SEQ ID NO: 442 - DNA, 203 bp, Artificial sequence
  synthetic
ggcgcgccagtcctccaatcccggaagcgcgcgcggccccgcccccgaaagtcggctcggctccgctccaatcccggaagtgcgcgcggccccgcccccgccggttcgcgtctctctgctgcggcgcggggaccgctgtgctctcgacccctcctcctgtagagagtggtgctgccctctcgggatgtcgactcggaccgatg

SEQ ID NO: 443 - DNA, 203 bp, Artificial sequence
  synthetic
ggcgcgccagtcctgcgctgaggagagttcgccgccgtcgccgcccgtgaggatctgagagccatgtcggccagcagcctcttggagcagtacaaaatggatctgtacatcaaaaggatggattaaacgatgatgattttgaaccttacttgagtccacaggcaaggcccaataatgcatatactgcccgactcggaccgatg

SEQ ID NO: 444 - DNA, 203 bp, Artificial sequence
  synthetic
ggcgcgccagtccttgccgttatcgcccggctagtcagtcgtccaactcaccacagagaagtccggatcgtggtagagcgccgcgtcgcacccatgtgacgtcacggcggcgccactcgcttgaggctttccccgcccaccccagcccgttctctctttccggacctggccgagcaggaggcgccatccgactcggaccgatg

SEQ ID NO: 445 - DNA, 203 bp, Artificial sequence
  synthetic
ggcgcgccagtcctgctcacccctggatatacttctttgtcaagagaagcagaggtgtggacgctgtgtatgaaatgtctttcctccaggacccaagtttcttcaccatggggatgtggtccattggtgcaggagccctgggggctgctgccttggcattgctgcttgccaacacagacgtgtttctgcgactcggaccgatg

SEQ ID NO: 446 - DNA, 203 bp, Artificial sequence
  synthetic
ggcgcgccagtccttgcccagactggtcttgaactcctgggctcaagcgatcctcccaaagccctgagattacaggcgtgagccagcgcgccggacacaacctcctactttcatgaaagagtgggcacttccaacaggaggaaaatgtctttcctccaggacccaagtttcttcaccatggggatgtgcgactcggaccgatg

SEQ ID NO: 447 - DNA, 203 bp, Artificial sequence
  synthetic
ggcgcgccagtccttggtggcagcaggtgcttagcagcccttgtccagtctcgcctgtgacactgctgctcccttcccctgtcctgacctcctggttggctgtcctgccagagccttgcctggaagatgaaattccagctaccctgtgggagcagtaacgccttcttccttcttctcaatctccagaacgactcggaccgatg

SEQ ID NO: 448 - DNA, 203 bp, Artificial sequence
  synthetic
ggcgcgccagtcctaaagtctatacgcaataagtaagcccaaagaggcatgtttgcttggcgatgcccagcagataagccaggcaaacctcggtgtgatcgaagaagccaatttgagactcagcctagtccaggcaagctactggcacctgctgctctcaactaacctccacacaatggtgttcgcatcgactcggaccgatg

SEQ ID NO: 449 - DNA, 203 bp, Artificial sequence
  synthetic
ggcgcgccagtcctgtacccgggcccaaggctgagggacccggtggagcggaagtcactccctgaggcagtggcgacagcggcggcgagaggatgaacaacaagttcgacgctttgaaagatgatgacagtggggaccatgatcagaatgaagaaaacagcacacagaaagatggtgagaaggaaaaacgactcggaccgatg

SEQ ID NO: 450 - DNA, 203 bp, Artificial sequence
  synthetic
ggcgcgccagtcctaccgagtccttggctgcctgtggagctcctgtgccagcagctgcgccccggctgcgctccggatacccccatccccgccaccgccgacctcccgctccaccgactgctgctcacgcccgacgggttcacgccgcccctgccccgtgaaggaccgcgctgcggtgcggaggcaggcgactcggaccgatg

SEQ ID NO: 451 - DNA, 203 bp, Artificial sequence
  synthetic
ggcgcgccagtccttgccgggcccccgggccgcagctggtttcgggaaaccgcgcagcctgggcggggccgcagcccccacccgtgcatctgccgtctccgccctcccgtcgctcccctgctcggggtcagctagtgtccgctctgctcggccgcgggctcccggaggactgcaggaggccaggcaggcgactcggaccgatg

SEQ ID NO: 452 - DNA, 203 bp, Artificial sequence
  synthetic
ggcgcgccagtccttcactgggggtataaaagggcctgggtggcgggcgcctgggcagagcgtcctagcagtgtcactgcgtgggttggtttgtgtagagaggcgtgagcgagcccgttgtccggagtgcacctgctgcctgttctgtccctcccgggagcccccgccgctgtcgccgtcgagtcgcccgactcggaccgatg

SEQ ID NO: 453 - DNA, 203 bp, Artificial sequence
  synthetic
ggcgcgccagtcctgcgtgctgtgggcggtgccgcgcggacccccgggaagtgtctctgtgggcggccgccgggttgagctgcggcacacgtgcgacggccgtgatgaagttcgcttaccggttttcaaatttgctgggtacggtgtaccggcgtgggaacctaaattttacctgcgatggaaattcacgactcggaccgatg

SEQ ID NO: 454 - DNA, 203 bp, Artificial sequence
  synthetic
ggcgcgccagtcctaatcagagctggttccgcgccgcggccgccgcgacaggtgcagcagagccgagccggccgcgctccgaacggcgcctcccgccccaccatgggcaacagcgcgagccgcagcgacttcgagtgggtctacaccgaccagccgcacacgcagcggcgcaaggagatactggccaacgactcggaccgatg

SEQ ID NO: 455 - DNA, 203 bp, Artificial sequence
  synthetic
ggcgcgccagtcctgcgcggcgtgactgagctacggttctggctgcgtcctagaggcatccggggcagtaaaaccgctgcgatcgcggaggcggcggccaggccgagaggcaggccgggcaggggtgtcggacgcagggcgctgggccgggtttcggcttcggccacagctttttttctcaaggtgcacgactcggaccgatg

SEQ ID NO: 456 - DNA, 203 bp, Artificial sequence
  synthetic
ggcgcgccagtcctggggcggggctgggctcccggggtaggtccgcggctgctgctgcgtccgacccccggccggcgcgggtatggagcttgggggtcactgggacatgaactcggccccgaggctggtctcggagaccgcagagcggaaacaggagcagaagacaggaaccgaggcggaggctgccgcgactcggaccgatg

SEQ ID NO: 457 - DNA, 203 bp, Artificial sequence
  synthetic
ggcgcgccagtcctttttccttccctctatccatccagagccccgccaaagggcgcacctgatctttctcatccttccctgctcttcccttcctctccacctcctcctcctccttggggaaaggggcccggagaagggcatgtgggggcccctctgacagtggcccgattggggtgacaggcgcccaacgactcggaccgatg

SEQ ID NO: 458 - DNA, 203 bp, Artificial sequence
  synthetic
ggcgcgccagtcctcgcgcaagtactgtcaaggacagttttcgggacgggggacgcggctccaggcacccaacagcactgacggcgaacacttcacgggcgcgcgatgcctcgacaaggcggccgccaccaccacctcagctgccctcgcgggcagcacggcgcggcaaaagcgcacgtcgcctagcgcgactcggaccgatg

SEQ ID NO: 459 - DNA, 203 bp, Artificial sequence
  synthetic
ggcgcgccagtccttgtcctggggtcgcggagacccgcgcgcctgccctgcacgccgggcggcaacctttgcagtcgcgttggctgctgcgatcggccggcgggtccctgccgaaggctcggctgcttctgtccacctcttacacttcttcatttatcggtggatcatttcgagagtccgtcttgtaacgactcggaccgatg

SEQ ID NO: 460 - DNA, 203 bp, Artificial sequence
  synthetic
ggcgcgccagtcctggccgcctccttgaggtagtatccgcacatggaattctagggccgcaggtgtatttacggtaactgtcgccactagatttcagcgcctttggactctcctgttttcactttcttttgttgactcccgtgtggccctcgtgggagcctgttttggctgcagcggtgtctggggtgcgactcggaccgatg

SEQ ID NO: 461 - DNA, 203 bp, Artificial sequence
  synthetic
ggcgcgccagtcctcagccgcgtctgggccaggagaaaaggtacaggaagaaggaatggaatcggaaggaagaaaattcattccagagacaaaatagctcccctcctctgttgtagctgttcctctggcaatacaaactttctgctttcaggttctgcagcattccagaccttgagcactgaatcaggcgactcggaccgatg

SEQ ID NO: 462 - DNA, 203 bp, Artificial sequence
  synthetic
ggcgcgccagtcctggcatagcaagatggcctgccctcaggtacaggaagaaggaatggaatcggaaggaagaaaattcattccagagacaaaatagctcccctcctctgttgtagctgttcctctggcaatacaaactttctgctttcaggttctgcagcattccagaccttgagcactgaatcaggcgactcggaccgatg

SEQ ID NO: 463 - DNA, 203 bp, Artificial sequence
  synthetic
ggcgcgccagtcctcaacaggctccttactcaagctcgggttcttctcctaggcggaagccagaccagagagcgtgcgtgtttttcccagggtgccccgcgctgctgttatggccgcctccttgagagagtggatctttcctacaattgctgctggaagggaactatgaagccatattcttaaattcacgactcggaccgatg

SEQ ID NO: 464 - DNA, 203 bp, Artificial sequence
  synthetic
ggcgcgccagtccttcggcggggcagtcgcgggatgcgcccgggagccacagcctgaggccctcaggtctctgcaggtgtcgtggaggaacctagcacctgccatcctcttccccaatttgccacttccagcagctttagcccatgaggaggatgtgaccgggactgagtcaggagccctctggaagccgactcggaccgatg

SEQ ID NO: 465 - DNA, 203 bp, Artificial sequence
  synthetic
ggcgcgccagtccttccgcttcggtttctgttgcgggacccggggtgtctcctagcgcaaccggaactagccttctgggggccggcttcctttatctctggcggccttgtagtcgtctccgagactccccacccctccttccctcttgaccccctaggtttgattgccctttccccgaaacaactatccgactcggaccgatg

SEQ ID NO: 466 - DNA, 203 bp, Artificial sequence
  synthetic
ggcgcgccagtcctagaaggctatttccgtttccgtacggaagcaaaggagccaagaccatggcgaaagccggggataagagcagcagcagcgggaagaaaagtctaaaacggaaagccgctgccgaagaacttcaggaggctgcaggcgctggggatggggcgacggaaaacggggtccaacccccgcgactcggaccgatg

SEQ ID NO: 467 - DNA, 203 bp, Artificial sequence
  synthetic
ggcgcgccagtcctatccggaggcagcctgcaggaagccgtagcgccggtacgtgcccctctcctgtctggaggcgggtgtagaagtccgaccgcggaagccagactgctgtccagtcggcgagcgcgtaccattcagcatcggctccgcccgagtcccaccttcctcaggctctgattggctgacaccgactcggaccgatg

SEQ ID NO: 468 - DNA, 203 bp, Artificial sequence
  synthetic
ggcgcgccagtcctccccggcgcgggcagggcgcccacgagctggctggctgcttgcacccacatccttctttctctgggacctggggtcgcggttacttgggctggccggcgaacccttgagtggcctggcggggagcgggcctcgcgcgcctggagggccctgtggaacgaagagaggcacacagccgactcggaccgatg

SEQ ID NO: 469 - DNA, 203 bp, Artificial sequence
  synthetic
ggcgcgccagtcctgggaactacttccgggggagcggcgcggcggcgcgggagttggttctaaagagtggtgagtcagaagagacgtcaggcagcaagcgacttgggccatggcctctgacctagacttctcacctccggaggtgcccgagcccactttcctggagaacctgctacggtacggactctcgactcggaccgatg

SEQ ID NO: 470 - DNA, 203 bp, Artificial sequence
  synthetic
ggcgcgccagtcctgattcctgtgcaaagagagagtgtcaatgaagacctcaaagtctggagaaaaatgacctttcatggaataagaagtatacctccttctacatgtttttgtcttactgacctctgataactggaacacatgactctgggtctgtagaaagtcaactgatcaaactcatcctcacccgactcggaccgatg

SEQ ID NO: 471 - DNA, 203 bp, Artificial sequence
  synthetic
ggcgcgccagtcctattgggctgagtcggagacttcctttcctgattggccgtgttgtacggcggcttctcgcgcagctgatgacctggaagtgatgcctaaagctgtggaccgcgtgggctcgcctccctgggactaggtttcagcggccgctgcgatgaccaaaataaaggcagatcccgacgggccgactcggaccgatg

SEQ ID NO: 472 - DNA, 203 bp, Artificial sequence
  synthetic
ggcgcgccagtcctcgaaggggcgcggggggcggggaccgtgcccgaccgtgccagctcccgccccggaagcggaagtgcaagcactgcggggtcctgtccagtgtgagcccgacccgagctccagtagttccgcccgctggtcatcgcgccctttcccctgccggtgtcctgctcgccgtccccgcccgactcggaccgatg

SEQ ID NO: 473 - DNA, 203 bp, Artificial sequence
  synthetic
ggcgcgccagtcctggggcaggcccgctttctgtcaaaatggcagcgcccagcgtgcgcgggtatctctgaagttggggtttaagattcttgcccgtgagagcgaacgagcctgccgtacttctgattttgaaacacctgggtctgggcttcccgggcgagcggtggaacctgtgagaagtttctacacgactcggaccgatg

SEQ ID NO: 474 - DNA, 203 bp, Artificial sequence
  synthetic
ggcgcgccagtcctatctttaggcgtgcgaggagggggcatggcggatactgtgttgtttgagtttcttcacacggagatggtggctgagctgtgggctcacgaccccgaccccggcccgggggtgagcgccgggctccgtggggaggaagcgggggccaccaagggacagaagatgagcctgtcggtcgactcggaccgatg

SEQ ID NO: 475 - DNA, 203 bp, Artificial sequence
  synthetic
ggcgcgccagtcctccaagatgcaccggggagtaggtccggcctttcgggtggtcaggaagatggcggcctctggggcggagccgcaggtcctggtacaatacttggtgttacgaaaggatctatcacaagctccgttctcctggccggcgggcgcactggtagcgcaggcttgtcacgcggccaccgcgactcggaccgatg

SEQ ID NO: 476 - DNA, 203 bp, Artificial sequence
  synthetic
ggcgcgccagtccttccctggctcgcctcgcgcctgccggcggatccgtggtcatgccaacccagcagccggctgcgccgagtactcgtgcccccaaaccctcccggagtctctctggctcactttgtgccctgttttctgatgcagactcgggatccgggatgaaggcggagcttccccctgggcctcgactcggaccgatg

SEQ ID NO: 477 - DNA, 203 bp, Artificial sequence
  synthetic
ggcgcgccagtcctccttaactccatatattcatccacatccaaaagattgggttggtatattcaaggttggatggagtactgctcgtgattattacacgtttttatggtcccctatgcctgaacattatgtggaaggatcaacagtcaattgtgtactagcattccaagttgaaaattgagaaaacccgactcggaccgatg

SEQ ID NO: 478 - DNA, 203 bp, Artificial sequence
  synthetic
ggcgcgccagtcctacggctcagcgacgccacggccagcagcgctcgcgtcctccccagcaacagttactcaaagctaatcagatagcgaaagaagcaggagagcaagtcaagaaatacggtgaaggagtccttcccaaagttgtctaggtccttccgcgccggtgcctggtcttcgtcgtcaacacccgactcggaccgatg

SEQ ID NO: 479 - DNA, 203 bp, Artificial sequence
  synthetic
ggcgcgccagtcctttattcacttcacacttattgaaaagtgtgtatgtgagagggtggggtgtgtgtgtcaaagagagtgaggaagagaaggagagagagatcaattgattctgcagcctcagctccagcatccctcagttgggagcttccaaagccgggtgatcacttggggtgcatagctcggagcgactcggaccgatg

SEQ ID NO: 480 - DNA, 203 bp, Artificial sequence
  synthetic
ggcgcgccagtcctgcagcctcaaaccccagctgttggggccaggacacccagtgagcccatacttgctctttttgtcttcttcagactgcgccatggggctcagcgacggggaatggcagttggtgctgaacgtctgggggaaggtggaggctgacatcccaggccatgggcaggaagtcctcatcacgactcggaccgatg

SEQ ID NO: 481 - DNA, 203 bp, Artificial sequence
  synthetic
ggcgcgccagtcctgagcatgttggcctggtcctttgctaggtactgtagagcaggtgagagagtgagggggaaggactccaaattagaccagttcttagccatgaagcagagactctgaagccagactacctgggtcccaatcttgggcttggtatttcctcgctgtgtgactctggactgcgccatcgactcggaccgatg

SEQ ID NO: 482 - DNA, 203 bp, Artificial sequence
  synthetic
ggcgcgccagtcctcaggcctccatctccaggtccctctccgaggcttcctcgctgccagctgagtcgtgggcacctgagggactacctaccactgctcccggctgtgccatcgccaccagctcccagcctcctgctcagacccgggacagcccctccatggcccccgagatggaccagttttacaggcgactcggaccgatg

SEQ ID NO: 483 - DNA, 203 bp, Artificial sequence
  synthetic
ggcgcgccagtcctagactatgatgaattcgaatgggacacatttgcttctgtggagttacgattcaaactgaatgtccaatataggaaggcaacatatacaacaagcaaaagtgattttagaaataacagaacgcgggagaaaattcacacacggaaaatgatacggataacaaaagcagattcacacgactcggaccgatg

SEQ ID NO: 484 - DNA, 203 bp, Artificial sequence
  synthetic
ggcgcgccagtcctccaaggaattgaaagggctgtagggggaggcagtgcgagccagccccgactgctcctcctcttcctcctcctcctccaaactcgcgagccccagagctcgctcagccgccgggagcacccagagggacgggaggcagccgcgcagccccgagctgggcagtgtccccagccgcccgactcggaccgatg

SEQ ID NO: 485 - DNA, 203 bp, Artificial sequence
  synthetic
ggcgcgccagtcctagttgtgactttcattttacctttcgaattcctgggtatatcttgggggctggaggacgtgtctggttattatataggtgcacagctggaggtgagatccacacagctcagaccagctggatcttgctcagtctctgtcagaggaagatcccttggaggaggccccgcagcgaccgactcggaccgatg

SEQ ID NO: 486 - DNA, 203 bp, Artificial sequence
  synthetic
ggcgcgccagtcctgaggagcctgaggaagagggcggcgacggtggtggtgactgagcggagcccggtgacaggatggctgggcacagattggtgttggtattaggagatctgcacatcccacaccggtgcaacagtttgccagctaaattcaaaaaactcctggtgccaggaaaaattcagcacattcgactcggaccgatg

SEQ ID NO: 487 - DNA, 203 bp, Artificial sequence
  synthetic
ggcgcgccagtcctgacggcaaatggcggacttcgacacctacgacgatcgggcctacagcagcttcggcggcggcagagggtcccgcggcagtgctggtggccatggttcccgtagccagaaggagttgcccacagagcccccctacacagcatacgtaggaaatctacctttcaatacggttcaggcgactcggaccgatg

SEQ ID NO: 488 - DNA, 203 bp, Artificial sequence
  synthetic
ggcgcgccagtcctcggagacccgccccggcccggtccacattctccccaggaagccggactctatggggcgggaccctgggggagcctgagccgagcccggagccagccccgaacccctgaacctccagccaggggcgccccgggagcagccagcccgtgggcgagccgcccgcccgccgagcagcccgactcggaccgatg

SEQ ID NO: 489 - DNA, 203 bp, Artificial sequence
  synthetic
ggcgcgccagtcctcgaaagacaaaagcatcttttttcagaagggaaactgaaagaaagaggggaagagtattaaagaccatttctggctgggcagggcactctcagcagctcaactgcccagcgtgaccagtggccacctctgcagtgtcttccacaacctgggatgaaattgattctgcagtaaagcgactcggaccgatg

SEQ ID NO: 490 - DNA, 203 bp, Artificial sequence
  synthetic
ggcgcgccagtcctaatgcgcacgccgtgggcgggccccgagccggaattgggggtgaagcgatagcgttttgcccgcattcggggcgcgcggagctggggggtccctgtggggctcccggagttaagatggcgtcctcagcggagggggacgaggggactgtggtggcgctggcgggggttctgcagcgactcggaccgatg

SEQ ID NO: 491 - DNA, 203 bp, Artificial sequence
  synthetic
ggcgcgccagtccttcgctttgtgattcttgatccggaacttgtcacccaggaaccccggaagaggtagctcacgcgatagaaacgtgttcgctgcccagaagaagggaaggcgcgagtgaggaaaggaggtactgtagatgccctccaaatccttggttatggaatatttggctcatcccagtacaccgactcggaccgatg

SEQ ID NO: 492 - DNA, 203 bp, Artificial sequence
  synthetic
ggcgcgccagtcctcgtcacttcctgttgccttaggggaacgtggctttccctgcagagccggtgtctccgcctgcgtccctgctgcagcaaccggagctggagtcggatcccgaacgcaccctcgccatggactcggccctcagcgatccgcataacggcagtgccgaggcaggcggccccaccaaccgactcggaccgatg

SEQ ID NO: 493 - DNA, 203 bp, Artificial sequence
  synthetic
ggcgcgccagtcctccaatgaggaagcctggcaggatggagggcgaggcctggcagctgtagtgcttctgggcagtagaggcgcggggtgcggagctagggcggccgagagccatggcggcgctattggcggcggcggcagtgcgagcccggatcctgcaggtttcttccaaggtgaaatccagtccccgactcggaccgatg

SEQ ID NO: 494 - DNA, 203 bp, Artificial sequence
  synthetic
ggcgcgccagtcctagccgccacgccccgggagaggaccgaccgcccagaccgccggtcccggggccccctgggccacgccgatcacggggagcccctcgactgcctcccagaacaaagtgggaaagggaagcttagcccgccgctgccgcctccgagcagcccgccaggactctggctactggagatcgactcggaccgatg

SEQ ID NO: 495 - DNA, 203 bp, Artificial sequence
  synthetic
ggcgcgccagtcctctgctctcgcaactcaagatggcggacgagagtgagacagcagtgaagccgccggcacctccgctgccgcagatgatggaagggaacgggaacggccatgagcactgcagcgattgcgagaatgaggaggacaacagctacaaccggggtggtttgagtccagccaatgacactcgactcggaccgatg

SEQ ID NO: 496 - DNA, 203 bp, Artificial sequence
  synthetic
ggcgcgccagtcctgtgctgccctaggctgcatgagtcgaagcaagcgtgtttccttcccgccaggcaagtgcccttagaaaccgggccccgcccccttcctggcctgcattcccatcccctctcccggggcggaggtgaggacctccttggttcctttggttctgtcagtgagccccttccttggcccgactcggaccgatg

SEQ ID NO: 497 - DNA, 203 bp, Artificial sequence
  synthetic
ggcgcgccagtcctgtggccggcatgtcgggggcggggggcgcctttgcctcgccgagggaggtcttgctggagcggccgtgctggctggacgggggctgcgagccggcccgcaggggctacctctaccagcagctgtgctgcgtagatgagcgggatcgtgtgcagaagaaaaccttcaccaagtggcgactcggaccgatg

SEQ ID NO: 498 - DNA, 203 bp, Artificial sequence
  synthetic
ggcgcgccagtccttgagctgagcctgtgccgagtgagcgtctcgtggggccgccagccttcagctgcctgtgtgccacacggggctgcccagagcaccgtgcctgaggccgagggtccgggcgacgaaggtgtgggggcagcatgtctcagcaccagctccgcgtgccgcagcccgagggcctgggccgactcggaccgatg

SEQ ID NO: 499 - DNA, 203 bp, Artificial sequence
  synthetic
ggcgcgccagtcctggccagcgcagccattttggcttcctgaccttgggctacggctgaccgttttttgtggtgtactccgtgccatcatgtccgtcctgacgccgctgctgctgcggggcttgacaggctcggcccggcggctcccagtgccgcgcgccaagatccattcgttgccgccggaggggacgactcggaccgatg

SEQ ID NO: 500 - DNA, 203 bp, Artificial sequence
  synthetic
ggcgcgccagtcctccagccatgggctcggggcgcgtacccgggctctgcctgcttgtcctgctggtccacgcccgcgccgcccagtacagcaaagccgcgcaagatgtggatgagtgtgtggaggggactgacaactgccacatcgatgctatctgccagaacaccccgaggtcatacaagtgcatccgactcggaccgatg

SEQ ID NO: 501 - DNA, 203 bp, Artificial sequence
  synthetic
ggcgcgccagtcctcaggccacaggagtaaaatctctctgcccgtcttctgggaagggagaatggcggcgcccgggctgcggctgggagcgggaagactctttgaaatgcctgcggtgctagagcgactgagccgctataatagcacgtcccaagcttttgctgaggtgctgcggctgccgaagcagccgactcggaccgatg

SEQ ID NO: 502 - DNA, 203 bp, Artificial sequence
  synthetic
ggcgcgccagtcctggggctttcagtagaaacaagcaaaccgcaggtccctgtggggggactctccaggaagaagggtaatttcctgcctccttaaattggctgctactgtcagttattttgctcccaaccccagagcttcacttgctccttcacttcccagttccgcaagaaccgtgggcgacagttcgactcggaccgatg

SEQ ID NO: 503 - DNA, 203 bp, Artificial sequence
  synthetic
ggcgcgccagtcctcgccgctctgggagccgctgctggtcccggccttgcggcctgcgggggaggctgcccggaggaggcagcggcggcggcagcgcgtcctcggtccccaggaccacggcttctttcctgccagatctatccatctggccatccatccgtgggggtctgcaatggccacctttagcccgactcggaccgatg

SEQ ID NO: 504 - DNA, 203 bp, Artificial sequence
  synthetic
ggcgcgccagtcctatctatccatctggccatccatccgtgggggtctgcaatggccacctttagccgccaggaatttttccagcagctactgcaaggctgtctcctgcctactgcccagcagggccttgaccagatctggctgctccttgccatctgcctcgcctgccgcctcctctggaggctcggcgactcggaccgatg

SEQ ID NO: 505 - DNA, 203 bp, Artificial sequence
  synthetic
ggcgcgccagtcctgcttctgtactgccaggtccgggtcggcggctgcactgcggatgagaccggtgcgactcatgaaggtgttcgtcacccgcaggatacccgccgagggtagggtcgcgctcgcccgggcggcagactgtgaggtggagcagtgggactcggatgagcccatccctgccaaggagccgactcggaccgatg

SEQ ID NO: 506 - DNA, 203 bp, Artificial sequence
  synthetic
ggcgcgccagtccttgtgtggtggctgggttctgccaatccccgtgcccaccgggtgggcgcggccgggaagctcctgcccctccctgctggtcggcgtcacgcgtgacgtcccgcgtgatggctgggagggcccggcggcgacagcggaggcagagaggaaggcggttctgagagcttcagagagcgcgactcggaccgatg

SEQ ID NO: 507 - DNA, 203 bp, Artificial sequence
  synthetic
ggcgcgccagtcctacctgcagctcccgcgactagaagtgtgaggtcccagggcccttcccgcggaatcggcgctgagaagccccaacccccctcccgcctcccaggcaccttcgggtccaggactacaactcccggcagggtgcgcaaaacgaccgcccaaggcaacggaggctcacgagaatcagccgactcggaccgatg

SEQ ID NO: 508 - DNA, 203 bp, Artificial sequence
  synthetic
ggcgcgccagtcctgtgggggaaaaggccccggaacgaggccggcccgcgagggcccgcgctcccctcctccccggcggccgcactcacccactccggaatcggccctgtcgcccccgcccgcactccagagccggctgagaacggcagcggcgagggctccacgtgcagcgtctctccggaatcagccgactcggaccgatg

SEQ ID NO: 509 - DNA, 203 bp, Artificial sequence
  synthetic
ggcgcgccagtcctgctgggtctctgactcacttctgactttagggtgaagatggagggaatctgataaagacatcttataaattcaacagacacaaaagaatttgatctcccataagcaactgtgaaattacaataacagatcctgggaagttctacaattctaattcagttttttcaagggggaaccgactcggaccgatg

SEQ ID NO: 510 - DNA, 203 bp, Artificial sequence
  synthetic
ggcgcgccagtcctctcttacaacattggctgccggcgtgactttgaccgcttcccggtgcgttaccggcagctgaacccacccggcgccacgggactttgacgcgtgctctgcgcttgccatgagactcctgggagctgcagccgtcgcggctctggggcgcggaagggcccccgcctccctaggctcgactcggaccgatg

SEQ ID NO: 511 - DNA, 203 bp, Artificial sequence
  synthetic
ggcgcgccagtcctggtattctcatcgcggtcacctctaccggtgtggacaagtaaagtttgaatcagcttctccatggcctgggcaccagttcccggctgagccattttccttttggctaaaagtccccgcccagaggccaattcgtcgcggcggcggtggagatcgcaggtcgctcaggcttgcagcgactcggaccgatg

SEQ ID NO: 512 - DNA, 203 bp, Artificial sequence
  synthetic
ggcgcgccagtcctgtgtaggatgcatctgcggtggccattcttctctccagaggtccttcctaggactgactttgtggagattctgtgctggtaggtggcggggcaagacacgcctgtctctccccctggaaggagtcagtccagcaagaaacctgatgaaaccagtgactcccagctctggatgagcgactcggaccgatg

SEQ ID NO: 513 - DNA, 203 bp, Artificial sequence
  synthetic
ggcgcgccagtccttgccccaccaccgctgctcctcagcaggcgcctcaccagcctccacaccccttgcgcccgcagaaacgcgcctggccctgagctgtcaccaccgacactctccaggctccggacacgatgcaggccatcaagtgtgtggtggtgggagatggggccgtgggcaagacctgccttcgactcggaccgatg

SEQ ID NO: 514 - DNA, 203 bp, Artificial sequence
  synthetic
ggcgcgccagtcctatttctgggaagcagtcgatattatctgtacgcctagaacagtgccctctgcagctgaataacccttttaacgagtattccaaatttgatggcaagggtcatgtaggtacaacagcaaccaagaagatcgatgtctacctccctctgcactcgagccaggacagactgctgccacgactcggaccgatg

SEQ ID NO: 515 - DNA, 203 bp, Artificial sequence
  synthetic
ggcgcgccagtcctcggggcgccgagacagggcgtgttcgctgttcagtgccggtgttgcagggagtgagggcagctggagtgcgttctgccgaagcttgtggttgcacgcccatcgtcttaggggctaccttccgtgttaccttatcccatatcacacaactggtcctcagccataacaagctaacacgactcggaccgatg

SEQ ID NO: 516 - DNA, 203 bp, Artificial sequence
  synthetic
ggcgcgccagtcctgctgtgtgcgcctgcgcggggcgccgagacagggcgtgttcgctgttcagtgccggtgttgcagggagtgagggcagctggagtgcgttctgccgaagcttgtggttgcacgcccatcgtcttaggggctaccttccgtgaccatgtccaagtctctgaagaagttggtggaggcgactcggaccgatg

SEQ ID NO: 517 - DNA, 203 bp, Artificial sequence
  synthetic
ggcgcgccagtcctagtgcagagctcggggcaggggccgggaggcgtgggggagccgggccctcccctcaggaacgtgtcccggggccgacccggcccgtagtgtggaagcagcttcaggtaggtgagctcgtgaaacaatatgaagaggagaaaatagccttttaaggaaattggcccacagaaaggcgactcggaccgatg

SEQ ID NO: 518 - DNA, 203 bp, Artificial sequence
  synthetic
ggcgcgccagtcctaactactcctctcctcctcctcctcctcttcctcctcctcctccccaccaccaccatctccatcacccaccaacaacaccacaataatccacagccaaggccacttggtcattctggcattttatggtagagaatacgttgagtttggctctggaaggaatatgagagaccatccgactcggaccgatg

SEQ ID NO: 519 - DNA, 203 bp, Artificial sequence
  synthetic
ggcgcgccagtcctggtggtttgaactttgagccttttgtagtcctgatgaataatttcattttcctcaagtttatgacactcggaacgtcaagaactggaggtttgtgcaatttgagaccggtcggcactgtgcagagatcagagtactaagagacagagattaaaatggcttccagaggaaagacacgactcggaccgatg

SEQ ID NO: 520 - DNA, 203 bp, Artificial sequence
  synthetic
ggcgcgccagtcctcatccgtgcgtctgtggaaggctgcgtttccggcctgagaaaccgtcatgtttctggggagtcacctcagctggcagttaccaccgtgttagaaagcagcctcaggaccggccacctccatcactggcgtcaccatgggggctgtgctgggtgtcttctccctcgccagctgggcgactcggaccgatg

SEQ ID NO: 521 - DNA, 203 bp, Artificial sequence
  synthetic
ggcgcgccagtcctccagaagacgtcaggtgacttcagtcctgctgcagttgtgcagcagaggagactgcagacttcggttgaggaaacgggtatttcatgtctcagggagtaggtttgtgcagttacagcttttctgttggtatgcataattaataattggagctgcaaagcagatcgtgacaagagcgactcggaccgatg

SEQ ID NO: 522 - DNA, 203 bp, Artificial sequence
  synthetic
ggcgcgccagtcctgtgctcgtggggagctggccgagtggaaaacgtccacattgacccaaccgcagtgaagggagagcgcctccagtggtgtggtgcgtggagaaatgggaaggagagagttctgatgagaccctttttgctcttcctgctgcatctgagcctgtgatacgctcctctgcagaaaatcgactcggaccgatg

SEQ ID NO: 523 - DNA, 203 bp, Artificial sequence
  synthetic
ggcgcgccagtcctaccccgtgtctccatgccctgcctctgctccccacacccctcacctcaagctgtcccctcacctcacgcttggctgtctcctgatcctcagcctctcccaggtacccctggtcctgctgccctcaccccatccccagactctgtaggagagtgcccgagggcggagggccagcccgactcggaccgatg

SEQ ID NO: 524 - DNA, 203 bp, Artificial sequence
  synthetic
ggcgcgccagtcctgtcaaggcccgccccctgccaacggtcctcacccattagccgaaggccccgcccctcacagattgccgcagggcaggggcggagacagcccgggccgtcccaggctccgcccccggaagcctcacttccgggcgcgagcacgccccgcctcgccccggcggcagagaggagactcgactcggaccgatg

SEQ ID NO: 525 - DNA, 203 bp, Artificial sequence
  synthetic
ggcgcgccagtcctgtctttaaagggcaattgtcgacactctgcaaacataccgatttgttgtctgcccactttggagtcttcaatctgggcagtaactatttaccctttttcctgctagcctgtccccctctctggattgaagtcacctgctaagacaatggactaccgaccagactcccggaaatccgactcggaccgatg

SEQ ID NO: 526 - DNA, 203 bp, Artificial sequence
  synthetic
ggcgcgccagtcctttagccagccacgaagttctcgcgagagtcgtctcctcgataccaagcgcctgtgtctggcagagctggtgtgagacgagacaatcctgccccgccgccgggataatcaagagttttggccggacctttgagcatacaccgagagagtgaggagccagacgacaagcacacactcgactcggaccgatg

SEQ ID NO: 527 - DNA, 203 bp, Artificial sequence
  synthetic
ggcgcgccagtcctcagctcgtcgacacgtctcgtctcctgtcccaattcagggcttggtgaggtgactcgcggtcgcgggtgactcgccggcaggacactgcctggaacgcctggagcgcctcccactgcagacgtctgtccgcctccagccgctctcctctgacgggtcctgcctcagttggcggacgactcggaccgatg

SEQ ID NO: 528 - DNA, 203 bp, Artificial sequence
  synthetic
ggcgcgccagtcctcactcagggcaagggtgtccgacggctggagcgttctgttttgaacccaaagtggatgatgctgtcagagctgaactactgaaaggaggctgtgaaaatttcccatcttctcattggccatcagttgagataagatggaagactcttacaaggataggacttcactgatgaaggcgactcggaccgatg

SEQ ID NO: 529 - DNA, 203 bp, Artificial sequence
  synthetic
ggcgcgccagtcctgtctgacttgagtccctgctgctgcagtgcacgccccttcggcagccagggtggggcccagacccaacctggcccctcctgcccccaccccgcctttgggtcgctgacccccaggctgtggtgagggtctgagagctggtaccacggagcctgggcaacctcctccgcccaccccgactcggaccgatg

SEQ ID NO: 530 - DNA, 203 bp, Artificial sequence
  synthetic
ggcgcgccagtcctaccgcctccgtctctcgctgggctcgctagggctgcgcgttgggccagcgggggcgccgcagctgaagccgccccggagccggtgaaccgaattacctcgagggaggggcgtggggaaggcggcgggaggaggagcgcacgggccggctgccgtgcccaccacggctgaggaaccgactcggaccgatg

SEQ ID NO: 531 - DNA, 203 bp, Artificial sequence
  synthetic
ggcgcgccagtcctgaaaagcggccagggtggcccctagctttccttttccggttgcggcgccgcgcggtgaggttgtctagtccacgctcggagccatgccgtccaagggcccgctgcagtctgtgcaggtcttcggacgcaagaagacagcgacagctgtggcgcactgcaaacgcggcaatggtccgactcggaccgatg

SEQ ID NO: 532 - DNA, 203 bp, Artificial sequence
  synthetic
ggcgcgccagtcctgggggcaacggtcacctgatctgcggctgtcgaggccgctgaggcagtggaggctgaggctatgatggcggccatggcgacggctcgagtgcggatggggccgcgatgcgcccaggcgctctggcgcatgccgtggctgccggtgtttttgtcgttggcggcggcggcggcggccgactcggaccgatg

SEQ ID NO: 533 - DNA, 203 bp, Artificial sequence
  synthetic
ggcgcgccagtccttgtcgtaagattttttcttttcattttctccagggagggtaaatcaatataacctcttctctagagaggaggtggttaggttggtcttaagcagtgttagaagatctattttttttcaaaccaggtgtctgagctgggtgaattccagcctggggagaggactttgatcaccagcgactcggaccgatg

SEQ ID NO: 534 - DNA, 203 bp, Artificial sequence
  synthetic
ggcgcgccagtcctgcaactcttttaccatccctttgtatttttgcagttcctccctataccagcttccttacagctgttctgatttcctgtcgtgtctgagctgggtgaattccagcctggggagaggactttgatcaccagatgtttttttggtgtgcgtgctgtcttatggttgcgtggcgagttcgactcggaccgatg

SEQ ID NO: 535 - DNA, 203 bp, Artificial sequence
  synthetic
ggcgcgccagtcctatgagctgagggcacggtcgcgggcggtcagccctgttcgcagctacggcgaggaggggcgcgattgttccttgttgccgctccgcttagtggccgcgtccattccgcgcggtgtcccgattttaggggtagggagaagtgtcagcttcaggcatcgcgaggcgtggcggcccccgactcggaccgatg

SEQ ID NO: 536 - DNA, 203 bp, Artificial sequence
  synthetic
ggcgcgccagtcctgaggatcatagagctgtctggcgcagcgaggcctcccggcgccaccgagacgcgcagaggacggctagagcgttgctcgccgagagacttcctcttcgttaagtcggccttcccaacatggcgcagtctattaacatcacggagctgaatctgccgcagctagaaatgctcaagcgactcggaccgatg

SEQ ID NO: 537 - DNA, 203 bp, Artificial sequence
  synthetic
ggcgcgccagtcctattggccgagcgcggccgttgggggtgaggccgcgtcgggggaggacaacaaagggccgcgggcggcgggcagtggtgtcccagtctcccggtgcttccctgaggctgaggcgcccggcctcccgcccgccgcgctccagatgaagtgtgagcactgcacgcgcaaggaatgtacgactcggaccgatg

SEQ ID NO: 538 - DNA, 203 bp, Artificial sequence
  synthetic
ggcgcgccagtcctcaggaactgggccagctccggtcccttccttttggggctctcactctggaggatggggtggatgggagaaaaaaccgggaagatcctgacggagttcctccagttctatgaagaccagtatggcgtggctctcttcaacagcatgcgccatgagattgagggcacggggctgcccgactcggaccgatg

SEQ ID NO: 539 - DNA, 203 bp, Artificial sequence
  synthetic
ggcgcgccagtcctacgaggctagatggcttcacaagatggcggcgcgctgggagcgtatcatctgcgtttctaggagcttcgctatgcggctgctttaagattctagggttgtacaggcccacgccagacacgacgtctggcaggaacctcggcctcagagatggctctgagtaaatcaatgcatgccgactcggaccgatg

SEQ ID NO: 540 - DNA, 203 bp, Artificial sequence
  synthetic
ggcgcgccagtcctggcggagcggcgggcggggcgtcgccgtactaggcctgccccctgtccggccagcccctcgaagcacctactccacaggtccagccggccggtgagcgcctggggaccgcagaggtgagagtcgcgcccgggagtccgccgcctgcgccaggatggagttcgtgaaatgccttgcgactcggaccgatg

SEQ ID NO: 541 - DNA, 203 bp, Artificial sequence
  synthetic
ggcgcgccagtcctgggcttgggcgccagaggcggagtcggggaggaggtggctccagagatggcagtgagcgagaggagggggctcggccgcgggagccccgcggagtgggggcagcggctacttctggtgctgctgctgggtggctgctccgggcgcatccaccagctggcgctgacgggggagaacgactcggaccgatg

SEQ ID NO: 542 - DNA, 203 bp, Artificial sequence
  synthetic
ggcgcgccagtcctgagtaggatggagtctccctcccgagctgggggtgtgggcctaggaaaggctgcttcgccgctgtgttcggagagctctggatactgcggggcttttccgcggaggagcgcccgccggcatctgcatctgggaccgacctcctgggctggctgatcaaagaggaagcagcagcacgactcggaccgatg

SEQ ID NO: 543 - DNA, 203 bp, Artificial sequence
  synthetic
ggcgcgccagtcctacaaagcccagcccagcggaaggaacggtttcggagttgtttttctttgatacgggagttcctccttgctctcgcccctactctttctggtgttagatcgagctaccctctaaaagcagtttagagtggtaaaaaaaaaaaaaaacacaccaaacgctcgcagccacaaaagggcgactcggaccgatg

SEQ ID NO: 544 - DNA, 203 bp, Artificial sequence
  synthetic
ggcgcgccagtcctctctgggctgctcgggcgccaccactactgtccccatcccgccccgccagctgggccaaagggtgacttgactcacgacgctgccaccagcccacggcttgcccgaggcgtataaaggctgccagggccgcaggctgccaagccctgccctgcccaaggcgcatagagcatggccgactcggaccgatg

SEQ ID NO: 545 - DNA, 203 bp, Artificial sequence
  synthetic
ggcgcgccagtcctagatcgctgtgaaggaaaaagcacacctttgagttttcacctgtgaacactatagcgctgagagagacagtctgaaagcagaggaagacatcgatcagtaacaccaagagacaccaaagttgaaagttttgttttctttccctctgttttatttttcccccgtgtgtccctactcgactcggaccgatg

SEQ ID NO: 546 - DNA, 203 bp, Artificial sequence
  synthetic
ggcgcgccagtccttccagagccaagcgccccgcccctgcccgggcgcgctccctccttagccctgcccctctctgaccccacctccgacgcaagagtggggcggggcagctgccggtggcgtcccgaacccagactcgccccgccccagagactgcgcctgcgcgggcacgagacaacctctccgcgcgactcggaccgatg

SEQ ID NO: 547 - DNA, 203 bp, Artificial sequence
  synthetic
ggcgcgccagtcctgcggaagttcctaggccagcctgtcacgtgggagggaggctcggcgctcaggaagcatggcactctggcgggcataccagcgggccctggccgctcacccgtggaaagtacaggtcctgacagctgggtccctgatgggcctgggtgacattatctcacagcagctggtggagacgactcggaccgatg

SEQ ID NO: 548 - DNA, 203 bp, Artificial sequence
  synthetic
ggcgcgccagtcctgtgtgtagctgggacggtgctggtctgagctggaccttgtctgatggcttcctccaaccctcctccacagcctgccataggagatcagctggttccaggagtcccaggcccctcctctgaggcagaggacgacccaggagaggcgtttgagtttgatgacagtgatgatgaagacgactcggaccgatg

SEQ ID NO: 549 - DNA, 203 bp, Artificial sequence
  synthetic
ggcgcgccagtcctgagtcacgtgggtccccccggttccggcgcggttgaggccttcggtggtgaacgagtctccagcaccatgtctggtttgtctggcccaccagcccggcgcggcccttttccgttagcgttgctgcttttgttcctgctcggccccagattggtccttgccatctccttccatctcgactcggaccgatg

SEQ ID NO: 550 - DNA, 203 bp, Artificial sequence
  synthetic
ggcgcgccagtcctacagaacgggagcaacctcggcgcaaacactcccgccggagcctgcaccggtcaggcagtggcagtgaccacaaggaggagaaagccagcctgtcccttgagacctctgagagctcacaggaggcaaagagtccgaaggtggagctgcacagccactcagaggtccctttccagcgactcggaccgatg

SEQ ID NO: 551 - DNA, 203 bp, Artificial sequence
  synthetic
ggcgcgccagtcctcgttgcggccgctccctgccttagaggccagccttggacacttgctgcccctttccagcccggattctgggatccttccctctgagccaacatctgggtcctgccttcgacaccaccccaaggcttcctaccttgcgtgcctggagtctgccccaggggcccttgtcctgggcccgactcggaccgatg

SEQ ID NO: 552 - DNA, 203 bp, Artificial sequence
  synthetic
ggcgcgccagtcctgacatttcttaacagcagggccaccaggcagagcgggacagccaggaggaagggcagcttggcagagcctcaggatggacccccttggggacacgctgcggcgactgcgggaggccttccacgcggggcgcacgcggccagctgagttccgggctgcgcagctccaaggcctggcgactcggaccgatg

SEQ ID NO: 553 - DNA, 203 bp, Artificial sequence
  synthetic
ggcgcgccagtcctagaacccccctccctgccctatcctccgccaccccttctgttgcggggcgcgcgccagcctgggtgtctgtatgcgctcgaggcgggggcgcgggttgcggacggaggcgcgggaggcggttctgcgcggcgggggccgtacccgcggcggagcgaggaggcgagaatggatcacgactcggaccgatg

SEQ ID NO: 554 - DNA, 203 bp, Artificial sequence
  synthetic
ggcgcgccagtcctcttcctctttccctcggagcgggcggcggcgttggcggcttgtgcagcaatggccaagatcaaggctcgagatcttcgcgggaagaagaaggaggagctgctgaaacagctggacgacctgaaggtggagctgtcccagctgcgcgtcgccaaagtgacaggcggtgcggcctccgactcggaccgatg

SEQ ID NO: 555 - DNA, 203 bp, Artificial sequence
  synthetic
ggcgcgccagtcctggcctcgctgactgacttccggtgttggcggtggcgccgcgcagtcaccgcggagcagacgcggaggctggtggcccctgggcgagatgccgtacgccaaccagcctaccgtgcggatcacggagctcactgacgagaatgtcaagttcatcatcgagaacaccgacctggcggcgactcggaccgatg

SEQ ID NO: 556 - DNA, 203 bp, Artificial sequence
  synthetic
ggcgcgccagtcctcacagaaagcctggaaaaggtttccaggggtgtcaatacgccctgtcaactgagaattaagaggatccggctggtcacttgcctggagaggatcctgcatgctgatagtgctgaggcacctgccagctaagaaccaccgggaggaactgggccattctaacacccgttgctacccgactcggaccgatg

SEQ ID NO: 557 - DNA, 203 bp, Artificial sequence
  synthetic
ggcgcgccagtcctgtgactgggtggggctgcctcacttctgcctgatttgggaagcgctgcaaggacaaccggctggggtccttgcgcgccgcggctcagggaggagcaccgactgcgccgcaccctgagagatggttggtgccatgtggaaggtgattgtttcgctggtcctgttgatgcctggcccgactcggaccgatg

SEQ ID NO: 558 - DNA, 203 bp, Artificial sequence
  synthetic
ggcgcgccagtcctccgctgttatacgtcacttccacggctcagcgtcagggaggagagagaatgtcttttcgaggcggaggtcgtggaggctttaatcgaggtggtggaggtggcggcttcaaccgaggtggcagcagcaaccacttccgaggtggaggcggcggtggaggcggcggcaatttcagacgactcggaccgatg

SEQ ID NO: 559 - DNA, 203 bp, Artificial sequence
  synthetic
ggcgcgccagtcctgcttgggtaggggccaggctagcctgagtgcacccagatgcgcttctgtcagctctccctagtgcttcaaccactgctctccctgctctactttttttgctccagctcagggatgggggtgggcagggaaatcctgccaccctcacttctccccttcccatctccaggggggcccgactcggaccgatg

SEQ ID NO: 560 - DNA, 203 bp, Artificial sequence
  synthetic
ggcgcgccagtccttcgacgggcgtggcgggggaggggacgctgagggcccatgtgctgaaaatccgaagtgccgcggaaagtggaggtgagggccgcccgccctagaggtgcccgtccgagaggcagagctgacaaggaaggtttcgagcgttttgctggcaaagggatttcttacaacctccaggccgactcggaccgatg

SEQ ID NO: 561 - DNA, 203 bp, Artificial sequence
  synthetic
ggcgcgccagtcctagaaagtcgacgggcgtggcgggggaggggacgctgagggcccatgtgctgaaaatccgaagtgccgcggaaagtggagagctgacaaggaaggtttcgagcgttttgctggcaaagggatttcttacaacctccaggcatgcgtctttctgccctgctggccttggcatccaacgactcggaccgatg

SEQ ID NO: 562 - DNA, 203 bp, Artificial sequence
  synthetic
ggcgcgccagtcctagaactgagctcatctttgcggggttagctagccgttgagtccaagtctccttggcaagacagtagcttagagaaacgagatcgaatgcacccggaaggtggccaatttgtgcctcaactccttggccatctcctggctaccaaactcaagcgtttcctccttagcaaaggcggcgactcggaccgatg

SEQ ID NO: 563 - DNA, 203 bp, Artificial sequence
  synthetic
ggcgcgccagtcctcgcggaggtgattccacactgaggcgagcgcggcggccggggtggtagtggcagtgttcgtgtgctcaggtctgaatcgccgagggaggaggcggtggaggaagaggtggcggcggtggcggtggtcgtagcggtggcggaggaggcgggtacgaatcagctgcgggcggagaccgactcggaccgatg

SEQ ID NO: 564 - DNA, 203 bp, Artificial sequence
  synthetic
ggcgcgccagtcctcgccggcctgcagtctagccgtagtgcgcctgcgcgcggctaggaggggccgtcaggcggggatacagcctggaaggtaatgcatgtccatggtacacaaattcacaagtttggagaccctgacacacccaccttctcacctgggctctgcgtatcccccagccttgagggaagcgactcggaccgatg

SEQ ID NO: 565 - DNA, 203 bp, Artificial sequence
  synthetic
ggcgcgccagtccttgaaatccggttctaacgggtccggggctcccagcgctataaaaactttataaaccccccggagcccgagcagtgtgaagaagaggcgagaacgaccccgggaccgaccaaagcccgcgcgccgctgcatcccgcgtccagcacctacgtcccgctgccgtcgccgccgccacccgactcggaccgatg

SEQ ID NO: 566 - DNA, 203 bp, Artificial sequence
  synthetic
ggcgcgccagtcctgatcctgccacagctgctgcccacaccgcgctcagcgccttcactgccatccccgctgtccttgccgcccccgccatgggcctagagctgtttcttgacctggtgtcccagcccagccgcgccgtctacatcttcgccaagaagaatggcatccccttagagctgcgcaccgtgcgactcggaccgatg

SEQ ID NO: 567 - DNA, 203 bp, Artificial sequence
  synthetic
ggcgcgccagtcctcccgcagtctcatttgccgcttccgacgcgtgaccccggcgcgctagcgtccgggaccggtgacaggcgcggggtgcgccaagcagtcccatgtgtcccctccctctcgcagccgccgcagtcgctgcgccccgagcccctctccggctcctcaacagagggctcgccgccgcccgactcggaccgatg

SEQ ID NO: 568 - DNA, 203 bp, Artificial sequence
  synthetic
ggcgcgccagtcctgtgttgacagcggcggcggtggaaccgggcgggcggcgggagtcggcgcctcgggttcctacctcgcgtccctaggcggcggcggccgggcgtcccgggatggccttcatggagaagccgccagccggcaaggtgctgctggacgacacggtgccgctgacagcagccatcgagcgactcggaccgatg

SEQ ID NO: 569 - DNA, 203 bp, Artificial sequence
  synthetic
ggcgcgccagtcctcggggcggtgcgctgggctgcacctccctccccgcgccccgtcctctcccgccctacaggccctagcagggcaggcgggaggtgagcgcggccatcccgctcccggagttccgggatcctggagtccgtagttcgtggtccttcgccggtgtccccggagcccagcggctgtggcgactcggaccgatg

SEQ ID NO: 570 - DNA, 203 bp, Artificial sequence
  synthetic
ggcgcgccagtcctctggccacgccctctccgcgagtccagtcccacgcgggatgaagagggcaccctccgccaagaggctgctgcgggacccgggtttcccctttccggcgccttccagcctcccaatcctcgggtctcgcctccctccgtctcctccctttcccctgtctgtctttccattggtcccgactcggaccgatg

SEQ ID NO: 571 - DNA, 203 bp, Artificial sequence
  synthetic
ggcgcgccagtcctccgggccagcccgcgtgcctgcgcagtcccctccccgagaaccatccccttgccccgcccagcgtcaggggtgcgcggccgccgagagaccccggaggcgtagccggctgcggaggcgaagaggtggcagcgcgagctgggaccagcgtctcggaggcgccgcagaattcacagcgactcggaccgatg

SEQ ID NO: 572 - DNA, 203 bp, Artificial sequence
  synthetic
ggcgcgccagtcctagggcgatgttgacagacagacagaggggcggatgcagcctacctcctgggcagtgagctgcggtctgaggcccctgcccagctggaaaccacagggaggggaagggaggggaggagaggagaggagaggaaccgtcatggggccttggagtcgagtcagggttgccaaatgcccgactcggaccgatg

SEQ ID NO: 573 - DNA, 203 bp, Artificial sequence
  synthetic
ggcgcgccagtcctgcacgcgcaaacctcctgtgatgcctgcgcctcctggccccgccttccgctcgtgggagttccggatgtttagcgttaccatggatcctggaggtgcccgcgaacactgcttgtcgcctgggcaaccggagaggacgaagcaggacctaggtggcggcggtggtaccggctgcacgactcggaccgatg

SEQ ID NO: 574 - DNA, 203 bp, Artificial sequence
  synthetic
ggcgcgccagtcctttcgcttgggtagaggaagccgtgaggccggagcttaggtcgggaagggatggatcgctgagccgatagcgtccgctaggctgtctgcctcggtacctgttactgctgctacttcctcgtttgacaccttcctggaatctctcttgatttttgaggaaatacctagtaacaaaccgactcggaccgatg

SEQ ID NO: 575 - DNA, 203 bp, Artificial sequence
  synthetic
ggcgcgccagtcctttggtccaagcaagaaggcagtggtctactccatcggcaacatgctggtcctttatggacacagcacccaggaccttccggaaaccaatgcccgcgtagtcggagggactgaggccgggaggaattcctggccctctcagatttccctccagtaccggtctggaggttcccggtcgactcggaccgatg

SEQ ID NO: 576 - DNA, 203 bp, Artificial sequence
  synthetic
ggcgcgccagtcctcagtgcctgggccgctgggagccgttattggctgccgttaaggaccgttacgtttcccgggtccttctggcactcctctggtggaccgcccccatcggccacacttgccctgctctccagtgattctgtagctcctggctccgtagtctcgcggacagctctctttcctggaagcgactcggaccgatg

SEQ ID NO: 577 - DNA, 203 bp, Artificial sequence
  synthetic
ggcgcgccagtcctgtaagcgctgcggagattgggctagaggcggaggcctgggccacggcggaggcgctgggtccttctggcactcctctggtggaccgcccccatcggccacacttgccctgctctccagtgattctgtagctcctggctccgtagtctcgcggacagctctctttcctggaagatcgactcggaccgatg

SEQ ID NO: 578 - DNA, 203 bp, Artificial sequence
  synthetic
ggcgcgccagtcctgcaatgctaggcgatggggaatccgaagacgcacaggagtccaagggttggctgactgcagaccctcatcataagtctagagccggagaagatggggagacgccggcctgcgccctttcgtgccctcgtgaggctggcatgcaggatggcaggacagcccggccacatgccccacgactcggaccgatg

SEQ ID NO: 579 - DNA, 203 bp, Artificial sequence
  synthetic
ggcgcgccagtcctatagagtagcggaagtggtccgttctcttcctctcccggcccaagcttctgggtatttctattgcgcgaggcattgtgggttgctgggcggcccggtctcggagaagaggggagagtggcgggccgctgaataagcttccaaaatgatgcccacaccagttatcctattgaaagcgactcggaccgatg

SEQ ID NO: 580 - DNA, 203 bp, Artificial sequence
  synthetic
ggcgcgccagtcctggcgcttccgcaggaagaaggaagcggcgccgccatcgcctcccggcgctccctccccgactcctaagtccttcggccgccaccatgtccgcctcggctgtcttcattctggacgttaagggcaagccattgatcagccgcaactacaagggcgatgtggccatgagcaagattcgactcggaccgatg

SEQ ID NO: 581 - DNA, 203 bp, Artificial sequence
  synthetic
ggcgcgccagtcctagtacagcagttgagagtaaggcctctggagctacactgaatgcctagcccacaccagttatcctattgaaagaggggactgatagctcccaaggcatcccccagcttgtgagtaacatcagtgcctgccaggtgattgctgaggctgtaagaactaccctgggtccccgtggccgactcggaccgatg

SEQ ID NO: 582 - DNA, 203 bp, Artificial sequence
  synthetic
ggcgcgccagtcctggggagggccgcgcagtgggaccggctgctgagacgaacgcttcactggggcagtctctgcatatcatggggagatagacgctgctgcctttaattggccttggtcctcacagctccaaaaagaaacaggatctcgataagctctatgagctgaagtccaaagctcggcagattcgactcggaccgatg

SEQ ID NO: 583 - DNA, 203 bp, Artificial sequence
  synthetic
ggcgcgccagtccttttcctgcgcggccgagcctgtcgccgccggatccggcctgcgggggtagttacggtgtttgctaggccggccgccctcttggagcttctgccctccgctgaggaagcggcgccgcctgacgcgggacggtcgggcgggcgccatgttgtgaaccgcctcggcggagctgtaagcgactcggaccgatg

SEQ ID NO: 584 - DNA, 203 bp, Artificial sequence
  synthetic
ggcgcgccagtcctgtgtgcgtcacgccgacgacgcgcgaagggcacacatcttaggacccggaggacgtccggcctctgtgagccgcaacctttccaagggagtggttgtgtgatcgccatcttagggaaaagatgttctcgtccgtggcgcacctggcgcgggcgaaccccttcaacacgccacatcgactcggaccgatg

SEQ ID NO: 585 - DNA, 203 bp, Artificial sequence
  synthetic
ggcgcgccagtcctataaggccctctcctccaccctgccaggctcactctgccccacagccacagcccctgactgccgcagcccccacagagcccgccgcgcaccccacgtcccccacgccagcgcccagccatggaggccatcaagaagaaaatgcagatgctgaagttggacaaggagaatgccatcgactcggaccgatg

SEQ ID NO: 586 - DNA, 203 bp, Artificial sequence
  synthetic
ggcgcgccagtcctattatgcattttccacatagggaaactgaggctcaggggtgttaagtgactcacccaaggtcacacggctaggaagttgctgcacgctcctatgctccatttcctctgggagcctatcaacccagataaagcgggacctcctctctggtagaggtgcagggggcagtactcaaccgactcggaccgatg

SEQ ID NO: 587 - DNA, 203 bp, Artificial sequence
  synthetic
ggcgcgccagtcctgtcacagggacagaccaacgtgttaacacaaagggagaacacgggagcatcctgcaccgtgcatttcagccacagatcacatggcccctccgcgggcccagcccacgccctgaccgcccggcctggccaggtctccgtatctctctgccccgccgccccttcccaactggggaccgactcggaccgatg

SEQ ID NO: 588 - DNA, 203 bp, Artificial sequence
  synthetic
ggcgcgccagtccttcacacctgccaagcatcacacctgcgatgcctgcacgagctgggtggggtccgcgcagctgcagtaagggggcgacccggcgtctgttagtcggcggttcatctccttcgtgcctcgatgagctttaacgccattttcctccattctctttcttcacctcttgagtttccaagcgactcggaccgatg

SEQ ID NO: 589 - DNA, 203 bp, Artificial sequence
  synthetic
ggcgcgccagtcctagtctggctgcggcggcagagctgaagtgagcggagccaccaggaggccatgtcgggtgaggacgctgaggtccgggcagtctctgaagatgtctccaatggaagcagtggctcgcccagccctggggacacactgccctggaaccttgggaaaacgcagcggagccggcgcagcgactcggaccgatg

SEQ ID NO: 590 - DNA, 203 bp, Artificial sequence
  synthetic
ggcgcgccagtcctcgcggccgactggaggcccggagcaggggcggagtttccggcggcagcgccactcgggcgtcgggtgacgctaggcggacggaccatcatgtgacacggaagtagctccgaacaggaagaggacgaaaaaaataaccgtccgcgacgccgagacaaaccggacccgcaaccacccgactcggaccgatg

SEQ ID NO: 591 - DNA, 203 bp, Artificial sequence
  synthetic
ggcgcgccagtcctattgcggaagtttctctacccatgcggtgtctctatggtcgggtgggtggggccaggaggaagatggcggcgtccgcagctgccgctgagctccaggcttctgggggtccgcggcacccagtgtgtctgttggtgttgggaatggcgggatccgggaaaaccacttttgtacagcgactcggaccgatg

SEQ ID NO: 592 - DNA, 203 bp, Artificial sequence
  synthetic
ggcgcgccagtcctgtcctccagtggctccgctccccgttctctgtgggctcaaaatgacagaggctcacaggacacctgcatgcccaaggcactccaccgtatgtgatcaacctggatccagcagtacatgaagttccctttcctgccaatattgatattcgtgatactgtaaagtataaagaagtacgactcggaccgatg

SEQ ID NO: 593 - DNA, 203 bp, Artificial sequence
  synthetic
ggcgcgccagtcctgattatttttctcctcttccttttttaatctatcctcttttcaccacattttagtgagaaagcaattttttttttacaaatggagcttatattgatttttatttcataaataattgaaagagggtagaaaaatctgcccttcatttaaaaattgaatgtttcactatgtatttacgactcggaccgatg

SEQ ID NO: 594 - DNA, 203 bp, Artificial sequence
  synthetic
ggcgcgccagtcctgcggaacggcgggctgtctgctcgcgctccccgcgcacaacacttcaccctctcgcctcgggtctcgggggccgctctgggatcccggccaccagcaattgtccggaaataatgcaaaaggtgtcccaaggctcctgaccagtgaacaaagatttgagaaagacagccaagctccgactcggaccgatg

SEQ ID NO: 595 - DNA, 203 bp, Artificial sequence
  synthetic
ggcgcgccagtcctcgcagaagaaccacaaaccccagaagccctcgcgcccactcttctccctcccctccagaagtcggagtgctgtttttgttgttggtgaaaggtgaggggaacagctgatccgtctgttgggaggacagatatctcaaggccaggatggaagaatcaccactaagccgggcaccacgactcggaccgatg

SEQ ID NO: 596 - DNA, 203 bp, Artificial sequence
  synthetic
ggcgcgccagtccttcaggccaaatcgcaactcagacccagtgaacccaaggcctgaagagaatttggattcatttaccttgttttgtggggactggagagacaagtaaactctcagagtaactgtcccctctgactaccatttctaaggatgccccggaggcccagctagccccagacttcggcccccgactcggaccgatg

SEQ ID NO: 597 - DNA, 203 bp, Artificial sequence
  synthetic
ggcgcgccagtccttccccggcccaccggccgaggagaggcctgcgctgcacacgcgcagaccgagcatccgcgtcaagaggcgaagagagcgcgcgctccccacgtcctgcgctcctggctgccgggcattcgtctcagccgtgactctcgccaggccggggctcgcgcgcccacgtctgaagagcgcgactcggaccgatg

SEQ ID NO: 598 - DNA, 203 bp, Artificial sequence
  synthetic
ggcgcgccagtcctggattcatttaccttgttttgtggggactggagagacaagtaaactctcagagtaactgtcccctctgactaccatttctaaggcaagccccctgtttctactcttgcgccccctgctggtttcctgccctgtctgatgccccggaggcccagctagccccagacttcggcccccgactcggaccgatg

SEQ ID NO: 599 - DNA, 203 bp, Artificial sequence
  synthetic
ggcgcgccagtccttccgcagctctgagtctccacttttttggtggagaaaggctgcaaaaagaaaaagagacgcagtgagtgggaaaagtatgcatcctattcaaacctaattgaatcgaggagcccagggacacacgccttcaggtttgctcaggggttcatatttggtgcttagacaaattcaaacgactcggaccgatg

SEQ ID NO: 600 - DNA, 203 bp, Artificial sequence
  synthetic
ggcgcgccagtcctaaggtttaaagggcgcctccatggggggcgctcagctggagctaccgagcggtgccaggccaggtgtgtgcgtccgtcggtctttccgtgcccacgccggagaccagccccggaggccgcctgggcctatccctgtgccaggcaccatgaagcaggagtctgcagccccgaacacgactcggaccgatg

SEQ ID NO: 601 - DNA, 203 bp, Artificial sequence
  synthetic
ggcgcgccagtcctacagtgcattcatgcagctgggccccaccccatctccagaggcaccttccactagcaacagtctccccaggcacaacacagctaacacaaggccccgcaggcaggactctgggacagacgcaggccagctgcccagagcccagaccaagcatggacgccgtggatgccaccatgcgactcggaccgatg

SEQ ID NO: 602 - DNA, 203 bp, Artificial sequence
  synthetic
ggcgcgccagtcctcggcgaccgcgggctgacgtggcggggctggcgtgtgggtctcgcagcgttgctcacagaacagagtagaggcggcggcggcggcggccggacccagactggtagtgaggctttggaccccgagccgctgcaatgccgctggagctggagctgtgtcccgggcgctgggtgggccgactcggaccgatg

SEQ ID NO: 603 - DNA, 203 bp, Artificial sequence
  synthetic
ggcgcgccagtcctccgcggtggttacaaagggggtcaagagtgccggacccagccgcgcggagcccaccattgcggcccgagggggacccgacgggggcccgacggtgtggcgtggcgcaaggagcgcgcctgccttctctcgccgccgggaacgggctgcaccaatggccagattccagcaagattcgactcggaccgatg

SEQ ID NO: 604 - DNA, 203 bp, Artificial sequence
  synthetic
ggcgcgccagtcctgcgacgtcacgctcggctataaaaggcgcggctcggggcccttgcggcgctggaggagctcgaggctgaggctgccggggggctgtgggctaccgggccgccggcgcctcagcgatgttttactcagggctcctcactgagggcggccgcaaggagaccgacatgcgggaggcgcgactcggaccgatg

SEQ ID NO: 605 - DNA, 203 bp, Artificial sequence
  synthetic
ggcgcgccagtcctgccccctcccctgactatcaaagcagcggccggctgttggggtccaccacgccttccacctgccccactgcttcttcgcttctctcttggaaagtccagtctctcctcggcttgcaatggaccccaactgctcctgcgccgctggtgtctcctgcacctgcgctggttcctgcacgactcggaccgatg

SEQ ID NO: 606 - DNA, 203 bp, Artificial sequence
  synthetic
ggcgcgccagtcctggacccggatgcaagcgtgctatataagcgttgctcaagtcccacccctttctttttgaggaagacgcggtcgtaagggctgaggatttttggtccgcacgctcctgctcctgactcaccgctgttcgctctcgccgaggaacaagtcggtcaggaagcccgcgcgcaacagcccgactcggaccgatg

SEQ ID NO: 607 - DNA, 203 bp, Artificial sequence
  synthetic
ggcgcgccagtcctatcgtcgtgatccacctccccaggaccttggagccacgtttacaaataggaatagggtacgtgggagggatagaacgtacagccaataaaatcatgtggcgccgatgggcgtgttgaggccgctgcctggcttagggcggaaacagattctctgcataagaaggggaacgaaagcgactcggaccgatg

SEQ ID NO: 608 - DNA, 203 bp, Artificial sequence
  synthetic
ggcgcgccagtcctccacctctggacagtcccactcagccccttcttcactctctgggcctcccaaaagacagtcagccttgtcctcaggcccgcacccagttgtcagcctctgactcctctcccctcaaaggattcttaccttggctcctcctcttagccctaacctgcctcctttgcctgtgagtccgactcggaccgatg

SEQ ID NO: 609 - DNA, 203 bp, Artificial sequence
  synthetic
ggcgcgccagtcctaaagcaggatgccctcccagttcctcctgcctctaggttcctctttccctgctgattccaggagcctatcaacccagataaagcgggacctcctctctggtagaggtgcagggggcagtactcaacatgatcacagagggagcgcaggcccctcgattgttgctgccgccgctgcgactcggaccgatg

SEQ ID NO: 610 - DNA, 203 bp, Artificial sequence
  synthetic
ggcgcgccagtcctcgcatgcgctggcggcctgcgccgccttaagtgccgcgccagcccggggcggcccagtcggcctgtcagccggcttcgagataagtcccggcgcttgcgcggcggcggctatggcggcggaggaggaggaggtggactctgccgacaccggagagaggtcaggatggctaactgcgactcggaccgatg

SEQ ID NO: 611 - DNA, 203 bp, Artificial sequence
  synthetic
ggcgcgccagtcctcccggcgtccctgcccctgggcggggacaggcggcggccaagcggggagtcgaggcggcgagcgcgcagctggcctagtctgcggtccccaactcctggagtcccctgggagctgccgctgcaggcccccgagccgctaggccccgccgccaggccaccgctgctgcggcagcccgactcggaccgatg

SEQ ID NO: 612 - DNA, 203 bp, Artificial sequence
  synthetic
ggcgcgccagtcctgttaagatggcggcgcccagcagagtcaggtgcggacgactttgtctgtaggagcagcggcggcttgaggacccggggagaccctcaagaatcgacccatcaggacgccagagctgcttcagcggtgaccaccttctccctctaacacattcttcccttcttcacaaacggccccgactcggaccgatg

SEQ ID NO: 613 - DNA, 203 bp, Artificial sequence
  synthetic
ggcgcgccagtcctgagaaggaaagaacggccgctatagccctatcggctgctacaacaccaaaacgcatccacctaactggctgacgctacaccttggtctttccgggtccttgcacgcttcgctccaactcctgcagagctgagccggaggggaatccggaagggacacgctgaacaggaacagaacgactcggaccgatg

SEQ ID NO: 614 - DNA, 203 bp, Artificial sequence
  synthetic
ggcgcgccagtccttccggccacggtgatgacgagtctccgtcaacctcgtctggcacagctgggacctcctctgtgccagagctacctgggttttactttgaccctgaaaagaaacgctacttccgcttgctccctggacataacaactgcaaccccctgacgaaagagagcatccggcagaaggagcgactcggaccgatg

SEQ ID NO: 615 - DNA, 203 bp, Artificial sequence
  synthetic
ggcgcgccagtccttcgcctaacctcgcgcccgggccgcgcctcctcctcctcctgctccccgccgcttccgtttctcgagggaaaggctgctgcctcctgctctgtcctcatccccggcttagctgacggcccagagggtgggtgccaattccaccagcagctgcaactgaaaagcaaggttcagaacgactcggaccgatg

SEQ ID NO: 616 - DNA, 203 bp, Artificial sequence
  synthetic
ggcgcgccagtcctcagagccgctcccctctcctcgccccgccaccgggacggagagcgcccgccgctgcatttccggcgacacctcgcagtcattcctgcggcttgcgcgcccttgtagacagccggggccttcgtgagaccggtgcaggcctggggtagtctcctgtctggacagagaagagaaaacgactcggaccgatg

SEQ ID NO: 617 - DNA, 203 bp, Artificial sequence
  synthetic
ggcgcgccagtcctccccacgcgctgtgaccccatttgttgcacgtgcatgttcaggtcgagagagggatgcgacgtgttcggggagcagcccaccttgtgggtggccaatccgggacgggaatcttaaacttttaactcttggtgcaaagactgatccactggcggctttacgggagcgggaaaaaacgactcggaccgatg

SEQ ID NO: 618 - DNA, 203 bp, Artificial sequence
  synthetic
ggcgcgccagtcctagtcggagccgggcttgcccgggcatgtgggagctgccggctttccggacgccacgtgcagaccggaagagacacgcggggcttcaggctgctgccccattggaagattactccccaggcttcccttgccccaagcagtgagctgactggaatggtaccccgggaggcccctgacgactcggaccgatg

SEQ ID NO: 619 - DNA, 203 bp, Artificial sequence
  synthetic
ggcgcgccagtcctgtcgtcgggctcgttgccggtgcaaacagggaggaaacagccggcgttgctgtagcgcgtctgggaattacaccgggggactggccggcccgcttcgtgcctgcgggaagtcgggccgggggactcttcggaaactccgagcctcagagaaatatggcgctcccgacgctgccgcgactcggaccgatg

SEQ ID NO: 620 - DNA, 203 bp, Artificial sequence
  synthetic
ggcgcgccagtcctctgtgcccgctgtgcctgctgtgcccgcgctgtcgccgctgctaccgcgtctgctggacgcgggagacgccagcgagctggtgattggagccctgcggagagctcaagcgcccagctctgcccgaggagcccaggctgccccgtgagtcccatagttgctgcaggagtggagcccgactcggaccgatg

SEQ ID NO: 621 - DNA, 203 bp, Artificial sequence
  synthetic
ggcgcgccagtcctgagccccacctccctcctcttcgcccccgcacgccgaaaacaggggcctctcacgtgacccctgcgcgctcccgcgggggagcgtagtctcggaggcggcgccgcaggggattgaggggttgactgagcgttgcgagccttagctttctcccgaacgccagcgctgaggacacgcgactcggaccgatg

SEQ ID NO: 622 - DNA, 203 bp, Artificial sequence
  synthetic
ggcgcgccagtcctcgcgggcaatccctcaacctgattggtcccctcgcccgtcactccagtgcgcccccaacctaccacgcagtaaaagccacccccgcctcggcccggacggtttccaagctggttttgaagtcgcggcagctgttcctgggacgtccggttgaccgcgcgtctgctgcagagacccgactcggaccgatg

SEQ ID NO: 623 - DNA, 203 bp, Artificial sequence
  synthetic
ggcgcgccagtcctctgcgccgggttccgtgtgtctatgtcaatgtgtctgtccttcactcctccattgtctgccgccactgctgctgctgctgctgctgccgctgctgctgcacgaatcgccgcagcccccagccttgcgcgtcgtcgctacctcctcggacaggtgagaagcagcccagaaattttcgactcggaccgatg

SEQ ID NO: 624 - DNA, 203 bp, Artificial sequence
  synthetic
ggcgcgccagtcctggggctgcgccgggttccgtgtgtctatgtcaatgtgtctgtccttcactcctccattgtctgccgccactgctgctgctgctgctgctgccgctgctgctgcacgaatcgccgcagcccccagccttgcgcgtcgtcgctacctcctcggacagaaattttatgaataagcatcgactcggaccgatg

SEQ ID NO: 625 - DNA, 203 bp, Artificial sequence
  synthetic
ggcgcgccagtcctggcgtcgcgggggcggggctcgggaaagacccgtgccagcgggcgtgtggccgcgggtttcgcacggtccaataagggagggcggcgtggcccggcctggtagcgacgaggacgcgcctgcgcagaggcggcagcaccaccggggttgactccgggggcgcggcgaggagagaccgactcggaccgatg

SEQ ID NO: 626 - DNA, 203 bp, Artificial sequence
  synthetic
ggcgcgccagtcctgggtgagcaaaggggcgggtccctggctgctgtggcctcccctgaccccctccccccgctgctggggtcctcggccaagcccccttctcactggactgagacatgaggctgagctggttccgggtcctgacagtactgtccatctgcctgagcgccgtggccacggccacggggcgactcggaccgatg

SEQ ID NO: 627 - DNA, 203 bp, Artificial sequence
  synthetic
ggcgcgccagtcctgtcggtaggctccacgacaaaagtcaacccttctgtaaatcacctgctgtggttatgatgctctgagttcaatacgtctgaacctttgctgtctatggatctgctctaaaccttatagcctgcttatgggggaaggtgacgccttctgggccccatctgtccttcctcacagcacgactcggaccgatg

SEQ ID NO: 628 - DNA, 203 bp, Artificial sequence
  synthetic
ggcgcgccagtcctggccttgttctccagctgagaggacgatcgtccttataggagaggccgagtctccgagggcaatttcagaggtctggtgcgagggaagcagagactttcaaggaacaaggaaatgcatactatgccaagaaagattacaatgaagcttataattattatacaaaagccatagatcgactcggaccgatg

SEQ ID NO: 629 - DNA, 203 bp, Artificial sequence
  synthetic
ggcgcgccagtcctaccccgggggcggggcttccggcgcgctgccttgtgggcacggtagttccgccgggtctggcttccgcctgccgagcggcccgggaccgcaggccggactacacttcccgtcggcccgcctgctctcccgatgccgccttggcgcgagacgttggcaagcagagtgtctccaagcgactcggaccgatg

SEQ ID NO: 630 - DNA, 203 bp, Artificial sequence
  synthetic
ggcgcgccagtcctacgtgagggggcgaggggcgggatgcccctccgcgggccccgccaatgatgagctggattgcgtgggacgaagggtcgtcattggacaaccgccgcgggcgccctggtctctgctacctgtagctgagggcgctgttgatgggcagcgcggcgcgctgggaaggctcgttctcgcgactcggaccgatg

SEQ ID NO: 631 - DNA, 203 bp, Artificial sequence
  synthetic
ggcgcgccagtcctgtcattttccctctactgctggaaaagaaggctcaagaggaagaatccaggttttgaggttttgctgaagatattcctgaagaatcatcccaggtgccacactaaaaaaatgatccagttgacagctacccctgtgagtgcacttgttgatgagccagtgcatatccgagctaccgactcggaccgatg

SEQ ID NO: 632 - DNA, 203 bp, Artificial sequence
  synthetic
ggcgcgccagtccttgtcacccaggctggagtgcagtggcgcgatctcagctcactgccacctttgcctcctgggttcaagcgattcttctgcctcagcctcccgagtagctgggattacagggtgaagagggaacagaaatctttgccccctgactttggaaatctcgtttaaccttcaaactggcgcgactcggaccgatg

SEQ ID NO: 633 - DNA, 203 bp, Artificial sequence
  synthetic
ggcgcgccagtcctgggttcctgcattctctgctctaaatcccagcctgcccttggggctgcccacgcccccttcagatcctttgctccggagagagacctgtccgagcagaggcctggactacatctcccggcgtgcctggcagtgtggtggcctctgtgcgccgtctgcactcgttgcaggcgacgcgactcggaccgatg

SEQ ID NO: 634 - DNA, 203 bp, Artificial sequence
  synthetic
ggcgcgccagtcctcgcgcctgcgcagtggaggcggcccaggcccgccttccgcagggtgtcgccgctgtgccgctagcggtgccccgcctgctgcggtggcaccagccaggaggcggagtggaagtggccgtggggcgggtatgggactagctggcgtgtgcgccctgagacgctcagcgggctatacgactcggaccgatg

SEQ ID NO: 635 - DNA, 203 bp, Artificial sequence
  synthetic
ggcgcgccagtcctagggacgggaagtgggcggggccggccggcagcagcttgcgggacacggagccgcgaggagacagctgaggcccgcggagaccagggggtgaagcctggagaccctcttgccctggcctagctgcaggcccccgggatgctttgggcatgtcctctggagccccacagaagagccgactcggaccgatg

SEQ ID NO: 636 - DNA, 203 bp, Artificial sequence
  synthetic
ggcgcgccagtcctggagatctgatcctgattgcagaaccttccctgattacagaatcttgggttgtatctcccacttcacccttctagaccatcccagaagatctataagatttcatctgggaaatcactaggagttcttggaagggaaagaaggaagattgttggttggaataaaaacagggttgacgactcggaccgatg

SEQ ID NO: 637 - DNA, 203 bp, Artificial sequence
  synthetic
ggcgcgccagtcctgatttgctacctccctggagctccctgacccggacgctctctgggccaatatggcagcgcccagcaacaagacagagctggcctggagtccgcggctggccgcgtgagtaggtgattgtctgacaagcagaggcatgagctgggtccaggccaccctactggcccgaggcctctcgactcggaccgatg

SEQ ID NO: 638 - DNA, 203 bp, Artificial sequence
  synthetic
ggcgcgccagtcctttttgtctgccccttcctgcctgtgggaaggagagaaaattaggggaggccacgggcttgaaagctttccctgcatggaggccactggatgggattctagatgctcgcctgggacccaggttcgtgccctcgtgaggctggcatgcaggatggcaggacagcccggccacatgccgactcggaccgatg

SEQ ID NO: 639 - DNA, 203 bp, Artificial sequence
  synthetic
ggcgcgccagtcctggctcttgtcaccccttctcgcggctgaacctttggagccatggtgaattcgggcctctccgaagccgccgccgccgccaccgccactactgcctttaccgtctcctaagagtgaggagcgcggacgaggtaagcgaggaggcggcggctagagcggtggagacagcagccacccgactcggaccgatg

SEQ ID NO: 640 - DNA, 203 bp, Artificial sequence
  synthetic
ggcgcgccagtcctcttcagggctgggggccgcgctatgccccgccccctccccagccccagacacggaccccgcaggccaactggctccctgcccctgcccccgccccttgacatcccagactccctggctatttaaacagagatgggtgcccccatccgcacactgtcctttggccaccggacatccgactcggaccgatg

SEQ ID NO: 641 - DNA, 203 bp, Artificial sequence
  synthetic
ggcgcgccagtcctggaggcccaggcacctcatgtctgccctcaacccagagtggagcagaccttccctggagcttctcaggagccacttcaaaaggagaagaagacacatgaattagagacagcacgggggagcaggctgtggagctgggagtgacggggtgagtccaggaaggctgcctggaggagcgactcggaccgatg

SEQ ID NO: 642 - DNA, 203 bp, Artificial sequence
  synthetic
ggcgcgccagtcctcgccgggtgactgacgttgaggcccaaccagggagaggcggggccaaggccagggcctgactaaacctggagactcgggtggccgaggggcttcataccagctgaagagcgacaagccgctggcagccgcggatctcaccgccgctcagggtttttagaacttcagccataaaacgactcggaccgatg

SEQ ID NO: 643 - DNA, 203 bp, Artificial sequence
  synthetic
ggcgcgccagtccttccatttcctgttttgtatgtatatcgattccgctcctcttctttccgccagtttttgtagagacagcatcttgttgcccaggctggtctcgaactctggggctgaagtgattctccctcttcagcctcccagagttctgggattataggcacgagccaccatgcccagccttacgactcggaccgatg

SEQ ID NO: 644 - DNA, 203 bp, Artificial sequence
  synthetic
ggcgcgccagtcctacgccccgcctcttccgcttctgtggtctgatcttcctgcggctgaaccgcccggctgagccgacattgccggcgtcttggcgattcggcccgacgagctccgctttcgctacagcatggtggcctactggagacaggctggactcagctacatccgatactcccagatctgtgcgactcggaccgatg

SEQ ID NO: 645 - DNA, 203 bp, Artificial sequence
  synthetic
ggcgcgccagtcctactcggcttccgtccattcttccggtggagatggctgcggccgtggcggggatgctgcgagggggtctcctgccccaggcgggccggctgcctaccctccagactgtccgctatggctccaaggctgttacccgccaccgtcgtgtgatgcactttcagcggcagaagctgatgcgactcggaccgatg

SEQ ID NO: 646 - DNA, 203 bp, Artificial sequence
  synthetic
ggcgcgccagtcctctgactgaggggtcagtggttccgggtaggagctaggtgaccctcggctgctgcagggatctgcagcgactgcagccatgggggcccacctggtccggcgctacctgggcgatgcctcggtggagcccgaccccctgcagatgccaaccttcccgccagactacggcttccccgcgactcggaccgatg

SEQ ID NO: 647 - DNA, 203 bp, Artificial sequence
  synthetic
ggcgcgccagtcctcggaaatgcgtgttctagctttctgtgtgcttaggtgcccgagctactgagggtctaagtccgggcagccgaagagtgtggtaggtaacggtcctcagcgcaagggtcatttcgtcgctgggaagggacggccctcgcccgcggtgatggtggttagcaagatgaacaaagatgcgactcggaccgatg

SEQ ID NO: 648 - DNA, 203 bp, Artificial sequence
  synthetic
ggcgcgccagtcctagctctcgcgaggtttcgtcgggggctggcggctgcggctcggcggagagtgcggcatgcgctcggaaaaggagggggccggaggccttcgggcggccgttgccgcgcggggcccgagcgggagggagaagctgtcggccctagaagtgcagttccaccgcgactcgcagcagccgactcggaccgatg

SEQ ID NO: 649 - DNA, 203 bp, Artificial sequence
  synthetic
ggcgcgccagtcctgacttctccagacaggttatgttacctgcagaggctgccctgaagctccctgtggcctggagactatgtacaagaggaatggtctgatggctagcgtgttggtcacctctgccactccacagggcagcagcagctcggactctctggagggccagagctgcgactatgccagcacgactcggaccgatg

SEQ ID NO: 650 - DNA, 203 bp, Artificial sequence
  synthetic
ggcgcgccagtcctgagaggaagcgcacctgagggagcacagcgaaggccgggacgcagggagctggatggagagcgagcctgggcggcgaaaggttgccgaggcgggggctgggcgcctgggaacaaaggaaagcaatagaagaactgcttaaggaggcaaaacgtgggaaaactagagctgaaacacgactcggaccgatg

SEQ ID NO: 651 - DNA, 203 bp, Artificial sequence
  synthetic
ggcgcgccagtcctcccggctgacagagttagccgaggccgccatattgaataagcgacccggcctcctagggggtcgtcgtggtccagacagtttagcagaacagcctccgcggctccggggagaagcaatatgttaaggatacctgtaagaaaggccttagtaggcctttctaagtctcctaaaggcgactcggaccgatg

SEQ ID NO: 652 - DNA, 203 bp, Artificial sequence
  synthetic
ggcgcgccagtcctgccgccatattgaataagcgacccggcctcctagggggtcgtcgtggtccagacagtttagcagaacagcctccgcggctccggggagaagcaatatgttaaggatacctgtaagaaaggccttagtaggcctttctaagtctcctaaaggatgtggcttgtgagaaggttggccgactcggaccgatg

SEQ ID NO: 653 - DNA, 203 bp, Artificial sequence
  synthetic
ggcgcgccagtcctcgcgcgtccggatctcaaaagcggcagaggccaccgaagggacaggaagcactttggtccagaccacactcccggcacagtgcggaaagagccggcgggagccactctgatcccggacgcctcagcgcccccttgggcttgggcttgccctcgggccggggaaggctgaccgcgcgactcggaccgatg

SEQ ID NO: 654 - DNA, 203 bp, Artificial sequence
  synthetic
ggcgcgccagtcctgggatgtgtgtgccagccctcggtccagtgcccgctcctgagctgactcctgctgggccccgacagcttgccgtgtttcctgtgcctgtagctccctggttggatagctgccgcccgggagaggtgacccgggcgccctgctagggtgaaggcccctgccctcggcccgggatccgactcggaccgatg

SEQ ID NO: 655 - DNA, 203 bp, Artificial sequence
  synthetic
ggcgcgccagtcctgggtgccggtggagtcgtgttggtcctcagaatccccgcgtagccgctgcctcctcctaccctcgccatgtttcttacccggtctgagtacgacagcttggttctacagccattgggatccagacatcagagggtgtgtgcctagctgtggagaagagaattacttccccactgcgactcggaccgatg

SEQ ID NO: 656 - DNA, 203 bp, Artificial sequence
  synthetic
ggcgcgccagtcctctgcggccgtgtgggtgagttggctgccggggcgtgaatactttttctcccgaaggaagattatttcaagtggaatatgccattgaggctatcaagcttggttctacagccattgggatccagacatcagagggtgtgtgcctagctgtggagaagagaattacttccccactgcgactcggaccgatg

SEQ ID NO: 657 - DNA, 203 bp, Artificial sequence
  synthetic
ggcgcgccagtcctagaaaggggcgggaggggtactgacccgaggagcggtcccgcgactctgtactccctgctgcccagtcccggccaggacgctgcccggcttagctggggcgcccctcgagaccaggatggagggttcagccgactcctacaccagccgcccatctctggactcagacgtctccccgactcggaccgatg

SEQ ID NO: 658 - DNA, 203 bp, Artificial sequence
  synthetic
ggcgcgccagtcctagttggtccttagtactgcggccgtgtgggggcgtgaatactttttctcccgaaggaagattatttcaagtggaatatgccattgaggctatcaagcttggttctacagccattgggatccagacatcagagggtgtgtgcctagctgtggagaagagaattacttccccactgcgactcggaccgatg

SEQ ID NO: 659 - DNA, 203 bp, Artificial sequence
  synthetic
ggcgcgccagtcctaccagctctgagtcccaccccgaggccgcccccaaaaggaaactgtcatcgataggaatacaagttgactgcattcagccagtgccaaaagaggagcccagtcccgctaccaaattccagtccatcggggttcaggtagaggacgactggcgaagcagcgtcccctctcacagtcgactcggaccgatg

SEQ ID NO: 660 - DNA, 203 bp, Artificial sequence
  synthetic
ggcgcgccagtcctaggaagggcgggtcagcgcgccggcgcagtgcggcggtcacaggctgagtgctgcggcgcgatccttgcttccctgagcgttggcccgggaggaaagaagatggtgctggatctggatttgtttcgggtggataaaggaggggacccagccctcatccgagagacgcaggagaacgactcggaccgatg

SEQ ID NO: 661 - DNA, 203 bp, Artificial sequence
  synthetic
ggcgcgccagtcctacctttcagggagatttgagagaaagactccagaagcccgcggggagagcaggggttctggggaagataaagcccttcatccaggatccctctgtgaccataagatgagatggaccaaacgcccccggcgcgtcctgaatatctggtctcagggattcgaactccccctgtgagcgactcggaccgatg

SEQ ID NO: 662 - DNA, 203 bp, Artificial sequence
  synthetic
ggcgcgccagtcctaaaatccaccccaacaatcgctgtgtgccgctttagtgcgctcgccgtcggctctacctgcgtgctttagctccttctcgcctgatccttctgtctctcccaaccccggacacccggcttcgactggttatatcttcggtgttcttttcctctcttcttctttcgcggttcagccgactcggaccgatg

SEQ ID NO: 663 - DNA, 203 bp, Artificial sequence
  synthetic
ggcgcgccagtcctgaggtgggactgggcgggtcaggccgcagcggctgacggcaggggaggagccgggtccactgccgggtggaggggcaaggcgagtgtgtgtccttatcctagcaattggggcgcgggcctgtgagccagttggagttgcggcggcgggaacgattgggctgagcagaggacgaccgactcggaccgatg

SEQ ID NO: 664 - DNA, 203 bp, Artificial sequence
  synthetic
ggcgcgccagtcctcagcagggaggcgagcagagggcccccagagggagccgcggaggtgcaggtcgaagaggccgggctacgtcgtgccctgcgcgtgagcagctgcagaggcagaggcagcatccagcggcggcgccagcagttccagtccgttgctttactttttgcttcaccgacatagtcattcgactcggaccgatg

SEQ ID NO: 665 - DNA, 203 bp, Artificial sequence
  synthetic
ggcgcgccagtcctatagaaactacggcactctggccgtggccgacgttgctcctccgaagcatggcgccggcgggagttgtaacccgggctgtccggagcggggagctgcccctcacaagcatggcgtcagctgaaaatgaagcctgtgctgtgcggagcgtcgcctgcccctcacaagcatggcgtcgactcggaccgatg

SEQ ID NO: 666 - DNA, 203 bp, Artificial sequence
  synthetic
ggcgcgccagtcctgccttccgctccgccccttcaggcaggaagtgtcggcgccgccactgtccggccacagcctaacgctcttcgctgtcgtttgtggtctcgcgcagggcggccccggttctggtgtttggcgtcggaattaaacaaccaccatgtcgagcaaaaaggcaaagaccaagaccaccacgactcggaccgatg

SEQ ID NO: 667 - DNA, 203 bp, Artificial sequence
  synthetic
ggcgcgccagtcctggaggacggagtcccagagaactacaactcccatcaagcacttgggggatcgccgcggctgagggagagactatggcttaggaaccaccattcgcgtgaggctctgctccccgcgcctgcgcagagtgcagggccacgtcgcttttgctgtaccggggaccacgcgtctcatcccgactcggaccgatg

SEQ ID NO: 668 - DNA, 203 bp, Artificial sequence
  synthetic
ggcgcgccagtccttggatgtttccaaggattgtcttcagtcatggccttgggattaaagtgcttccgcatggtccaccctacctttcgcaattatcttgcagcctctatcagacccgtttcagaagttacactgaagacagtgcatgaaagacaacatggccataggcaatacatggcctattcagccgactcggaccgatg

SEQ ID NO: 669 - DNA, 203 bp, Artificial sequence
  synthetic
ggcgcgccagtcctagccaattctgaccgtgtcaacgaatcatccacgcacctgcagctctgctgagagagtgcaagccgtgggggttttgagctcatcttcatcattcatatgaggaaataagtggtaaaatccttggaaatacaatgagactcatcagaaacatttacatattttgtagtattgttcgactcggaccgatg

SEQ ID NO: 670 - DNA, 203 bp, Artificial sequence
  synthetic
ggcgcgccagtcctccaggtgacaatccccaattccttgggaaacctggacgcatccagctccagggacctgtccggcaagtggtgacatgcaccgtccagggagaaactctgctggccgtccgctctgactaccactgtgccgtgtggaagtttggtaaacagtggcagccaacccttctgcaggcacgactcggaccgatg

SEQ ID NO: 671 - DNA, 203 bp, Artificial sequence
  synthetic
ggcgcgccagtcctgtcacttccggtcgacggcggaaggcggaaggcggagcggtccctgcaacccggccggcgggaactgccttctagtttttagtctcagaccagaccaccgggcgcaccccgatgccgagcccgcagcttctggtgctcttcggcagccagacaggcacggctcaggatgtgtcgcgactcggaccgatg

SEQ ID NO: 672 - DNA, 203 bp, Artificial sequence
  synthetic
ggcgcgccagtcctcttcagtggcctcctcctgggagggagctgaagccgctcgcaagactcccgtagtccccacctctctcagcttccggctggtagtagttccgcttcctgtccgactgtggtgtctttgctgagggtcacattgagctgcaggttgaatccggggtgcctttaggattcagcacccgactcggaccgatg

SEQ ID NO: 673 - DNA, 203 bp, Artificial sequence
  synthetic
ggcgcgccagtcctgaactggattgcgattggtcagcacgtgcctcggtcggcggtacaattggctgaggcgctgggccttgggaagcattccccgacgggattggtcgtcgctctcgcagagcccgcctcccgcagtacaagcggcccccgggtcgggtgggaggaggggactccgggaggaggaaccgactcggaccgatg

SEQ ID NO: 674 - DNA, 203 bp, Artificial sequence
  synthetic
ggcgcgccagtccttgcgcagggggtagcagaggcgcggacaaaccgcggggtgaccagggcgcatgcgtaacagggcttgacagcgcgcggaagaaaaaccagcaagaaggcggcgggggaagatggcggtcctggggtagagtttgcaagctttctgactaggctagtcgagtaactattcgggtccgactcggaccgatg

SEQ ID NO: 675 - DNA, 203 bp, Artificial sequence
  synthetic
ggcgcgccagtcctctattgatgggcccaagcgtaaccaggctcttctgattggccggtgtacttcagtttccgtccaaggtccgcctcctacctccttctgcttcggtccttaggataagaccatggccttgagagcatgtggcttgatcatcttccgaagatgcctcattcccaaagtggacaacacgactcggaccgatg

SEQ ID NO: 676 - DNA, 203 bp, Artificial sequence
  synthetic
ggcgcgccagtcctctgggcttccgtcctccgcccgcgcccgacggagcctgttcgcgtcgactgcccagagtccgcgaatcctccgctccgagcccgtccggactcccccgatcccagctttctctcctttgaaaacactaagaataatgtcactgcatcagtttttactagagccaatcacctgtccgactcggaccgatg

SEQ ID NO: 677 - DNA, 203 bp, Artificial sequence
  synthetic
ggcgcgccagtcctacagggtataaaagctgtccgcgcgggagcccaggccagctttggggttgtccctggacttgtcttggttccagaacctgacgacccggcgacggcgacgtctcttttgactaaaagacagtgtccagtgctccagcctaggagtctacggggaccgcctcccgcgccgccacccgactcggaccgatg

SEQ ID NO: 678 - DNA, 203 bp, Artificial sequence
  synthetic
ggcgcgccagtccttggttgcgtcgggtcacgtgggcgcgcaggcgcagcgcggtgcagcccgttcgctcacacaaagcccagacgcggagaaaatggcggcaggggtcgaagcggcggcggaggtggcggcgacggagatcaaaatggaggaagagagccgcgcgcccggcgtgccgagcggcaacgcgactcggaccgatg

SEQ ID NO: 679 - DNA, 203 bp, Artificial sequence
  synthetic
ggcgcgccagtcctggttggaattttggcgggttcagctgtgaacgaagaaggcgtcccggcatcggccaagattctacattgctcatctgggcatctgagcctccttcgaagtttcctgtcacaactgtcctcttgacagcatggatgaggaggaagacaatctgtctctgctgaccgcactgctggcgactcggaccgatg

SEQ ID NO: 680 - DNA, 203 bp, Artificial sequence
  synthetic
ggcgcgccagtcctagtcccgacgagcaacgcgtttgtagaggggtgggtgcgcacgctctgtccctgcgtgaccttccgaccccgctgtcctcaccgcaatggcggctgtgagggccctggtggcctcgaggctcgctgcggcatctgcattcacgtccctgtcccccggcggtcggacgccttccccgactcggaccgatg

SEQ ID NO: 681 - DNA, 203 bp, Artificial sequence
  synthetic
ggcgcgccagtccttgtggcaaaggaaggagctgactgggggagttcgaggcggcgggcggcggtgaccccggcctggaactgccccggtacggaagtgttccggggtccgtggggagcaggagagggaggcgggggaccgtcccgcgcggggcacgatgttgaacatgtggaagcaccaatgttgttcgactcggaccgatg

SEQ ID NO: 682 - DNA, 203 bp, Artificial sequence
  synthetic
ggcgcgccagtcctcgccctcccgccgcgcgctcgggatcccgaccagtcctgaccgcacgggggccgcggccacggggcgcaggggccatggtgcgcggcaggatctcccggctctgggtccgggacgtgcgcttccccacgtcgcttgggggccacggcgcggacgccatgcacacggaccctgaccgactcggaccgatg

SEQ ID NO: 683 - DNA, 203 bp, Artificial sequence
  synthetic
ggcgcgccagtccttaaaagggttagatttcagtctatagacgatcagtgggaaggcctttcctaggaggtaaccagaacagagagctgtaaactccgtgaatgcaagaggctgcttctgttacctgagtggttctcactcatctttgccttccttacctcgtgatctcaccattccagattgaaatccgactcggaccgatg

SEQ ID NO: 684 - DNA, 203 bp, Artificial sequence
  synthetic
ggcgcgccagtcctgcgcggacgccatggtaagcgcggacgccatggtaagcgcggacgccatggtaagcgcggacgccatggtaagcgcggacgccatggtaagcgcggacgccatggtaagcgcggacgccatggtaagcgcggacgccatggtaagcgcggacgccatgcacacggaccctgactcgactcggaccgatg

SEQ ID NO: 685 - DNA, 203 bp, Artificial sequence
  synthetic
ggcgcgccagtcctgagccgaaaggaaccggcgctttgtgacgtcacgtccgccttaccggcggattaagctcgctttcttctaggcgcgtttcctgaaggtcgatggccaggtggtcttcataaactatactgccttgtgatgcctccctagaaatgagaggtctcaataccagctcagaccatgtgcgactcggaccgatg

SEQ ID NO: 686 - DNA, 203 bp, Artificial sequence
  synthetic
ggcgcgccagtcctttccgcccgcgacccccttccagacccgctcccgaaaccttgtcgaaggaccaaaggcgaccggtgcaggtgcacgacgccagctcccttctggggggccggggcctgggggttgccatggcccccagccacctgtcagtgcgggagatgagggaagatgagaagcccctggtgcgactcggaccgatg

SEQ ID NO: 687 - DNA, 203 bp, Artificial sequence
  synthetic
ggcgcgccagtcctagcgccgccgccacctttccattcagtcgcccaacatggctggagcgcggcggaggtgagccggccgcccgcccgcagacgccccagcctactgcgcccgagtcccgcggccccagtggcgcctcagctctgcggtgccgaggcccaacggctcgatcgctgcccgccgccagccgactcggaccgatg

SEQ ID NO: 688 - DNA, 203 bp, Artificial sequence
  synthetic
ggcgcgccagtccttcccctctgggggcggcgatcctccctccggagccccccttcaaccctcccggaagtgagcatttgcaggaccagggatgctgtgctgctctcccatgagccagtcaccgagtcggtctgctgcagccctttctgaacctctggccgtctggatgctccactgtgcttgccaagcgactcggaccgatg

SEQ ID NO: 689 - DNA, 203 bp, Artificial sequence
  synthetic
ggcgcgccagtcctgacattctttgaagtgaagcattctatgaatgtgagctgaagaaatgaatgaaatgaaataatgcaggtcattttacctgggacaaatacctaaaagaaacatgttcagtcccagcgcctgtccattgcttcaagcagtcctacacacctccaagcaacgagttcaagatcagtcgactcggaccgatg

SEQ ID NO: 690 - DNA, 203 bp, Artificial sequence
  synthetic
ggcgcgccagtcctcacaaatatggtcacctatcagagtctgcatcccaatatcaagaagctgctgacatcctggatctaggtcattttacctgggacaaatacctaaaagaaacatgttcagtcccagcgcctgtccattgcttcaagcagtcctacacacctccaagcaacgagttcaagatcagtcgactcggaccgatg

SEQ ID NO: 691 - DNA, 203 bp, Artificial sequence
  synthetic
ggcgcgccagtccttcgcgccctttggcaagctcggactcatcttctggggattgccgcagtgacccagtaatgggaagggattgatttccaccttgcggggtatggggcgctcttaggaggactctggagaagtagttgtcctgggagaggagcgatcttaatcctgctgcatgacgggaggacaaacgactcggaccgatg

SEQ ID NO: 692 - DNA, 203 bp, Artificial sequence
  synthetic
ggcgcgccagtcctgcgcatgagcagtgctgctcccaacccgccagtcgcggtctccggcgccagctacgccgctgccgctgtcactatggcccattacaaagccgccgactcgaagcgtgagcagttccggaggtacttggagaagtcgggggtgctggacacgctgaccaaggtgttggtagccttcgactcggaccgatg

SEQ ID NO: 693 - DNA, 203 bp, Artificial sequence
  synthetic
ggcgcgccagtcctttgcgctccccaagtctctctcgtgcgcagagcccaggctgcgcttccctggtcaggcacggcacgtctggccggccgccaggatgcaggccccgcacaaggagcacctgtacaagttgctggtgattggcgacctgggcgtggggaagaccagtatcatcaagcgctacgtgccgactcggaccgatg

SEQ ID NO: 694 - DNA, 203 bp, Artificial sequence
  synthetic
ggcgcgccagtcctgttattggttggcagttcagccaatgagcgggcctgttactagtttgcggcatcctgtggtataggggaagcgctccgggcctggaatccctacgcgtccctttgggtttagcacgatgagctcaatcggcactgggtatgacctgtcagcctctacattctctcctgacggaacgactcggaccgatg

SEQ ID NO: 695 - DNA, 203 bp, Artificial sequence
  synthetic
ggcgcgccagtcctgtcccttccctgggcaccaagagatgggctccccttgcctggcagagaaacagctggaaactggctccctgagacaagaagactggtaaacccagcgcttcctacctggtggtcttcagcaatgcccatgccttccagagacgggggcctgcatcccagacaccaccactatggcgactcggaccgatg

SEQ ID NO: 696 - DNA, 203 bp, Artificial sequence
  synthetic
ggcgcgccagtcctagccagcggacgtccaggaaccgggatgcctccagcagtgaggcggtcagcctgcagcatgggatggctgtggatctttggggcagccctggggcagtgtctgggctacagttcacagcagcaaagggtgccatttcttcagcctcccggtcaaagtcaactgcaagcgagttacgactcggaccgatg

SEQ ID NO: 697 - DNA, 203 bp, Artificial sequence
  synthetic
ggcgcgccagtcctacgagcctttccggtgctatgccccggaagcggaagtgcgatcttcgggctgtcagagttggtctgttactcggtggtggcggagtctacggaagccgttttcgcttcacttttcctggctgtagagcgctttccccctggcgggtgagagtgcagagacgaaggtgcgagatgcgactcggaccgatg

SEQ ID NO: 698 - DNA, 203 bp, Artificial sequence
  synthetic
ggcgcgccagtcctagagggcgagggcgagggcagagggcgctggcggcagcggccgcggaagatgagcagcagctgctcagggctgagcagggtcctggtggccgtggctacagccctggtgtctgcctcctccccctgcccccaggcctggggccccccaggggtccagtatgggcagccaggcagcgactcggaccgatg

SEQ ID NO: 699 - DNA, 203 bp, Artificial sequence
  synthetic
ggcgcgccagtcctgacgtcgcggtgacgtcacggagttgccatggcgtcgctgagcggcctggcgtcggcgctggagtcgtacaggggccgggaccgcctgatccgagtgctggggtactgctgccagctggttggtggagttctggttgaacagtgtcccgccaggtccgaagtggggacacgtctcgactcggaccgatg

SEQ ID NO: 700 - DNA, 203 bp, Artificial sequence
  synthetic
ggcgcgccagtcctgcggaggaaggagactagagcaggaagagcagcggcgaggcggcggtggtggctgagtccgtggtggcagaggcgaaggcgacagctctaggggttggcaccggccccgagaggaggatgcgggtccggatagggctgacgctgctgctgtgtgcggtgctgctgagcttggcccgactcggaccgatg

SEQ ID NO: 701 - DNA, 203 bp, Artificial sequence
  synthetic
ggcgcgccagtcctcggcctcgggacgccgtgacgttgcgttcctccagtcccttgccacctccctctttcttcccctctggggaagctcagtgctggacttccgaagaccttttacgacattgagtctcggagttggtctcagcgccggatccacttttcggcaaagtgacgtggacgtcaacagcacgactcggaccgatg

SEQ ID NO: 702 - DNA, 203 bp, Artificial sequence
  synthetic
ggcgcgccagtcctacgggaaagttggtccgagttcccagagtttccctctgtggtgccctaggctcggccggccggtgccccggctcctttcctcctttcggccttcgccgtccaccaggtccctctctctgtccccggccgccatggagcagccgccggcgcctaagagtaaactaaaaaagctgacgactcggaccgatg

SEQ ID NO: 703 - DNA, 203 bp, Artificial sequence
  synthetic
ggcgcgccagtcctcagacttgggtttgaaatccacgtatgaccctggcccgttggcctctctgagcccggcttcctcctctacaaaatggagatcgcaaccgtccccacccgatagcgagagggcgcacacccgcattccaggctggacgggtctctgggcagcgggctcctccccgcccagggcgccgactcggaccgatg

SEQ ID NO: 704 - DNA, 203 bp, Artificial sequence
  synthetic
ggcgcgccagtcctgaatgaatgacttccgtctgggacttggttgcaaataaagccgagctgcatcttagggaggggtggagactttgcccctgtttgtgccttgaagccagcagggccttgccctaggatacctccacccaccctcctgcccagcaagtggaggcccgcagcccgagtgtcgccgcccgactcggaccgatg

SEQ ID NO: 705 - DNA, 203 bp, Artificial sequence
  synthetic
ggcgcgccagtcctatctccccaccctctcttctccaccagccaacgtccgggaaaaacgagtttttcacgactgaaaacaacatagcaaaataagccaagatgtctgtggatccaatgacctacgaggcccagttctttggcttcacgccacaaacgtgcatgcttcggatctacattgcatttcaacgactcggaccgatg

SEQ ID NO: 706 - DNA, 203 bp, Artificial sequence
  synthetic
ggcgcgccagtcctcactgacagcgtgagcccgcggcggctgctgccatggtggctggcggccgggtaagggtctgagtggatctcctgccaggccagagcgccttcgggggccgcggcggaaggccaggagtttgcagccagggcgccgggtttgtggtctgcagtgtcgtgaggctgaggtgcagccgactcggaccgatg

SEQ ID NO: 707 - DNA, 203 bp, Artificial sequence
  synthetic
ggcgcgccagtccttttggaaaaatgactcagtaagttcagcgcgcccgctccggccggccctgcgcctcccgccgcgcccgggatgtattcgtccccgctctgcctcacccaggatgagttccacccgttcatcgaggccctgctgcctcacgtccgcgccttcgcctacacctggttcaacctgcacgactcggaccgatg

SEQ ID NO: 708 - DNA, 203 bp, Artificial sequence
  synthetic
ggcgcgccagtcctgacgaaggggaaggaggagaagcgcttaaagcggcgggagcggtgcgggagaggggttggacccagggctgaggcaggcccccccctccctcccgcctcagtggatcatgcccagggcggcagcggcggcggttgcgggggggaagtgactgggcggtgccggcgccggagacgcgactcggaccgatg

SEQ ID NO: 709 - DNA, 203 bp, Artificial sequence
  synthetic
ggcgcgccagtcctgccccgcgcggatggcgacggaaggggaggccgctcggcctggcctggagggagacctcgctctgccccgcgtcccagccatggcgacatcctcggccgcgctgccccgaatactcggcgcgggtgcccgggccccgtcgcgctggttgggctttctcgggaaggcgacccccccgactcggaccgatg

SEQ ID NO: 710 - DNA, 203 bp, Artificial sequence
  synthetic
ggcgcgccagtcctcaacatggcggcggcggtagattagggccgcgggtcggagcactcaccgccgctgggggaccctgtcggaagcaactgccgccgccgcctctttcatctcttctggggcaggggccagggccaggttttacacatccataagtagacctttttggagcctcaccagccaattcacgactcggaccgatg

SEQ ID NO: 711 - DNA, 203 bp, Artificial sequence
  synthetic
ggcgcgccagtcctctcgaccctgaaacttggagcagggtgggggttcagtatgaagccccgggaccgccccgcccctggccgcactgaccggatactgggggtcatggggggcatgctgcgcgcatgcgccctccctgggcaggaggggcccccaaggagaagccctctagggttggtgggtaccgacgactcggaccgatg

SEQ ID NO: 712 - DNA, 203 bp, Artificial sequence
  synthetic
ggcgcgccagtcctgcagtcagccggggacctcgtccgagcccacccgcctttggaggctccatctccattctgggttctgatgatgccactacttgtcacattgtggtcctgaggcacacaggtaatggggccacctgcttgacacattgtgacggaaccgacaccaaagctgaggtccccttgatccgactcggaccgatg

SEQ ID NO: 713 - DNA, 203 bp, Artificial sequence
  synthetic
ggcgcgccagtcctgacatttacatcctgcccagcgacaactctggacaagtcagtcccccagagtctccaactgtgaccacttcctggcagtctgagagcttacctgtgtcactgtcagctagccagagttggcacacagaaagcctgccagtgtcactaggccctgagtcctggcagcagattgcacgactcggaccgatg

SEQ ID NO: 714 - DNA, 203 bp, Artificial sequence
  synthetic
ggcgcgccagtcctcagaagattgtgggtgtagtggccacagccttacaggcaggcaggggtggttggtgtcaacaggggggccaacagggtaccagagccaagaccctcggcctcctcccccgccgccttcctgcagatctgcttggctttgaggaagagtggcagtactgcctcactgcataagggcgactcggaccgatg

SEQ ID NO: 715 - DNA, 203 bp, Artificial sequence
  synthetic
ggcgcgccagtcctaaaccatgggggcggaagaggtgctgggcaggaggcggaagaggtgctgtgcaggaggcgggcgggcgcggttctttccggaaggattgaatctcctttagccccgcccgcctccgtagctgcctgaagtagtgcagggtcagcccgcaagttgcaggtcatggcgctggctgccgactcggaccgatg

SEQ ID NO: 716 - DNA, 203 bp, Artificial sequence
  synthetic
ggcgcgccagtcctcctcctttccctttcggattcccgacgctgtggttgctgtaaggggtcctccctgcgccacacggccgtcgccatggtgaagctgagcaaagaggccaagcagagactacagcagctcttcaaggggagccagtttgccattcgctggggctttatccctcttgtgatttacctcgactcggaccgatg

SEQ ID NO: 717 - DNA, 203 bp, Artificial sequence
  synthetic
ggcgcgccagtcctcggccttccgtccgctgcctccgtccgattctgcgtctgcttgctgaggaggcggattaggggggcgcggagtctcttcccttgagtgcataggtcccggttggtagagggtttgagtccgcatcgccacagctgaaggctgcgagggactaagagcagaatatatctttagaacgactcggaccgatg

SEQ ID NO: 718 - DNA, 203 bp, Artificial sequence
  synthetic
ggcgcgccagtcctctcctcctcgtatttccccctcggtcctttacgccgcctttccccctcatttgcagatgctgcatcccctttttggaattgctcaaccaggtggtaaccggcgccgcttcctggccttgggaggtggttcctttcttaacccacaagaacctctcccaagagaacttggtcctgcgactcggaccgatg

SEQ ID NO: 719 - DNA, 203 bp, Artificial sequence
  synthetic
ggcgcgccagtcctgcgtcctggtgtacgggctggccctggacgtcacttccgctggcggcagtggcgtcacttcctgctcttgggggcggggcatccgtgtccttgcggtgctgggcagcagaccgtccaaaccgacacgcgtggtatcctcgcggtgtccggcaagagactaccaagacagacgctcgactcggaccgatg

SEQ ID NO: 720 - DNA, 203 bp, Artificial sequence
  synthetic
ggcgcgccagtcctccctgagttcagggaatttccccagcatcccaaagcttgagtttcctgccagtcgggagggatgaatgcagataaagggagtgcagaaggcacgaggaaaccaaagtgctctgtatcctccagtctccgcgcctccacccagctcaggaacccgcgaaccctctcttgaccactcgactcggaccgatg

SEQ ID NO: 721 - DNA, 203 bp, Artificial sequence
  synthetic
ggcgcgccagtcctagttcacccactagaggcaaagacgtaagagagctaccagcgtattgagaggagatacacaggcactacgagaatggagtttagaagaaggtcagagccctgggcagtgttgggccaggctttagggcctcaggagtgcaagtagctgatgaagtatgtcgcattttttatgaccgactcggaccgatg

SEQ ID NO: 722 - DNA, 203 bp, Artificial sequence
  synthetic
ggcgcgccagtcctcaacggggacgtcctgatagatcctctgctccaataggcaactccggccttccctgccctgacctggaacctctgggagggctgcagagtaagtgccgcctctgcgctccgacggaggcacgaggcctgtggagtaggtccctctgttccgacaggtgcgacacttggcgctcccgactcggaccgatg

SEQ ID NO: 723 - DNA, 203 bp, Artificial sequence
  synthetic
ggcgcgccagtcctaaacgcaagtgaagccgagtcacaggacccggatgttgtcagttcgacggtaaacgaccctgccagcttccaagagggcggcttcactgtgcgaataggtgagaagccaagaaggaggcgcgctggagttacttccgcccggttctccttcccgcagtctgcagccggagtaagcgactcggaccgatg

SEQ ID NO: 724 - DNA, 203 bp, Artificial sequence
  synthetic
ggcgcgccagtcctgcaaggcgggtggctccaccctgcgtcgggcctcagtcagcccccgggggaggccatgaacgccacggggaccccggtggcccccgagtcctgccaacagctggcggccggcgggcacagccggctcattgttctgcactacaaccactcgggccggctggccgggcgcgggggcgactcggaccgatg

SEQ ID NO: 725 - DNA, 203 bp, Artificial sequence
  synthetic
ggcgcgccagtccttgtgacttcacctcagttttgtgatccgtaaaatggacaaattcgaagctacttcacagtgctgttgagaggattaaatgaaacaatgcttgtaaagctctttgcaggagggagcctcggaagcagggcctggccggcagagcacacctgctgtcaccagggaccacaggcagccgactcggaccgatg

SEQ ID NO: 726 - DNA, 203 bp, Artificial sequence
  synthetic
ggcgcgccagtcctagcctcccttgccgcctccctcctctgcccggccgcagcagtgcacatggggtgttggaggtagatgggctcccggcccgggaggcggcggtggatgcggcgctgggcagaagcagccgccgattccagctgccccgcgcgccccgggcgcccctgcgagtccccggttcagcccgactcggaccgatg

SEQ ID NO: 727 - DNA, 203 bp, Artificial sequence
  synthetic
ggcgcgccagtcctccgggagcccgcgcaccctctctgggctccacccaggctgagagctggggtcgtggcggcgggggtggagagcgcgcccctagaggacctggggacacgggtgactcagacgtgactcaggaaggctcaggtcctgctggcatccgcggaggtgagacggtgatcagagctgggcgactcggaccgatg

SEQ ID NO: 728 - DNA, 203 bp, Artificial sequence
  synthetic
ggcgcgccagtccttccggttcctagcgttaactgcgaccggggttcagcgctcgggtgaggagctggtggcgtcggcaggttcgaggcgattcgaggtgagggggtcaagcggagaggctcggagtcggagaaagctgtcgcgacccagccacccagggtctggggtcggtgggagctccagctaggcgactcggaccgatg

SEQ ID NO: 729 - DNA, 203 bp, Artificial sequence
  synthetic
ggcgcgccagtccttcgcaacgtcacgggcaagggccgccattttgactgagcaaccctagtgacaggagccgaagcagcagcgcaggttgtccccgtttcccctcccccttcccttctccggttgccttcccgggccccttacactccacagtcccggtcccgccatgtcccagaaacaagaagaagcgactcggaccgatg

SEQ ID NO: 730 - DNA, 203 bp, Artificial sequence
  synthetic
ggcgcgccagtcctgattgtgggaaggcagctgaactcggcgcctggaaagatggaggcagcggagacagaggcggaagctgcagccctagaggtcctggctgaggtggcaggcatcttggaacctgtaggcctgcaggaggaggcagaactgccagccaagatcctggttgagtttgtggtggactccgactcggaccgatg

SEQ ID NO: 731 - DNA, 203 bp, Artificial sequence
  synthetic
ggcgcgccagtcctatgccgaacttctgcgctgcccccaactgcacgcggaagagcacgcagtccgacttggccttcttcaggttcccgcgggaccctgccagatgccagaagtgggtggagaactgtaggagagcagacttagaagataaaacacctgatcagctaaataaacattatcgattatgtcgactcggaccgatg

SEQ ID NO: 732 - DNA, 203 bp, Artificial sequence
  synthetic
ggcgcgccagtccttgtccctagagaacgaggactctgaaggcgggacatttgggcgacccccgggcggggccagccattaaacagtcccacttctgtgccagacactgaactgggctcttgacgggcatcatctcttaatcctcagaacatcccagggagctccacaggatccccatatcctgggcccgactcggaccgatg

SEQ ID NO: 733 - DNA, 203 bp, Artificial sequence
  synthetic
ggcgcgccagtcctaaccggaaggggggctgtgaggacgtgttccgaggaagccagagccggagccgtggcctgcggggccggcgacatggatcccctgttccagcaaacgcacaagcaggtccacgagatccagtcttgcatgggacgcctggagacggcagacaagcagtctgtgcacatagtagacgactcggaccgatg

SEQ ID NO: 734 - DNA, 203 bp, Artificial sequence
  synthetic
ggcgcgccagtcctggtcggtgcgcgcttctcccgaggtggaacgggcggcagtcaagcgccggcgttctctgccgtcaccctttccttgccggccggcacttcggctgcagagttttgcccacgcttcgagacttagggagcagtgcctttcagaatttgcccactcatctggtataactggttctgcgactcggaccgatg

SEQ ID NO: 735 - DNA, 203 bp, Artificial sequence
  synthetic
ggcgcgccagtcctgccccagccacgcctctgagtcgcgctgcgcaggcgccattgggcagagggattggcaagcttgcgtgccccagcgacacaggcctcgaggctgtctctgacaagtgttcacaggaggtggggacgcctctgcgcgaggaacgaggagctacgggcctgggcccggttattgcccgactcggaccgatg

SEQ ID NO: 736 - DNA, 203 bp, Artificial sequence
  synthetic
ggcgcgccagtcctgggcgtgcacgcgggcgcggctgcgtgagaggcgcgcggcggcgcagtaaacagtctccttccacaaaaccatggcgtcgctcaaatgtagcaccgtcgtctgcgtgatctgcttggagaagcccaaataccgctgtccagcctgccgcgtgccctactgctcggtagtctgctcgactcggaccgatg

SEQ ID NO: 737 - DNA, 203 bp, Artificial sequence
  synthetic
ggcgcgccagtcctccagcaggcatgcctccttggtctcatgttgaccttagagtttgggattctggaattcgatccttcatggataggcagctggacacagaggtcgtgggtgagctggaggagcaggcccggatgtgagctgttctccatagtggtgttcggctccatcgtgaacgagggctacctcgactcggaccgatg

SEQ ID NO: 738 - DNA, 203 bp, Artificial sequence
  synthetic
ggcgcgccagtcctaggaccctcgtgacttggccgagacaggggaagggagaagttgagtcgggcaaggaagagatgctaaagcctggggaattaagaacatgccagaatcatcccgagggagtctggaattagggagggtgaggactcgctaggatcgtcctgtggatctggctacagcaggagctgcgactcggaccgatg

SEQ ID NO: 739 - DNA, 203 bp, Artificial sequence
  synthetic
ggcgcgccagtcctaaacaatgcctgatatgtggagtaaagtcctcctccttggcctttgtcaagtcatcccctcttctcctcaggaactgctcaaacctgtgccccaaagatgagggcccaggaggacctcgagggccggacacagcatgaaaccaccagggacccctcgaccccgctacccacagacgactcggaccgatg

SEQ ID NO: 740 - DNA, 203 bp, Artificial sequence
  synthetic
ggcgcgccagtcctccgttcccctttcccctcccttccctatccccgacgaccggatcctgaggaggcagctgcggtggcagctgctgagttctcggtgaaggtatttcatttctcctgtcccctcccctccccaccccatctattaatattattcttttgaagattcttcgttgtcaagccgccaaacgactcggaccgatg

SEQ ID NO: 741 - DNA, 203 bp, Artificial sequence
  synthetic
ggcgcgccagtcctcggcggcggcggtgcttacagcctgagaagagcgtctcgcccgggagcggcggcggccatcgagacccacccaaggcgcgtccccctcggcctcccagcgctcccaagccgcagcggccgcgccccttcagctagctcgctcgctcgctctgcttccctgctgccggctgcgcccgactcggaccgatg

SEQ ID NO: 742 - DNA, 203 bp, Artificial sequence
  synthetic
ggcgcgccagtcctgcatttgtctggccttcccttttactgctggctgggaaggaggagcatcagaccacagatcctggaaggcacttctctccctgactgctgctcacactgccgtgagaacctgcttatatccaggaccaaggaggcaatgccaggaagctggtgaagggtttcctctcctccacccgactcggaccgatg

SEQ ID NO: 743 - DNA, 203 bp, Artificial sequence
  synthetic
ggcgcgccagtcctacgcagaagagtccaccaccggacagccaggtagccgccgcgtccctcgcacacgcagagtcgggcggcgcggggtctcccttgcgcccggcctccgccctctcctcctctcctttccccttcttctcgctgtcctctcctctctcgctgcccgcgtttgcgcagccccgggcccgactcggaccgatg

SEQ ID NO: 744 - DNA, 203 bp, Artificial sequence
  synthetic
ggcgcgccagtcctagtgcgctgtgctcgaggggtgccggccaggcctgagcgagcgagctagccagcaggcatcgagggggcgcggctgccgtccggacgagacaggcgaacccgacgcagaagagtccaccaccggacagccagcacatccacgatggagcgtcttgtcgcccgtgggaccttccccgactcggaccgatg

SEQ ID NO: 745 - DNA, 203 bp, Artificial sequence
  synthetic
ggcgcgccagtcctcggaggctcggccacaacgccactggattggtggtagggcggggcgggccacagtctccagcctgaagcggaagtggaggaaagatggaggaccatcagcacgtgcccatcgacatccagaccagcaagctgctcgattggctggtggacagaaggcactgcagcctgaaatggcgactcggaccgatg

SEQ ID NO: 746 - DNA, 203 bp, Artificial sequence
  synthetic
ggcgcgccagtcctgggtcggccggcagggggcggggccgggcatggtaacggctcggaagcctaggaggctgggccggagggaggcggaggaaccggtgttcgccgccgccgctgcttcagcttattccttgtggcctctgcgggtcctgcctcagccatgatgatccacggcttccagagcagccacgactcggaccgatg

SEQ ID NO: 747 - DNA, 203 bp, Artificial sequence
  synthetic
ggcgcgccagtccttggctagttcaggcggaaggagcagtcctctgaagcttgaggagcctctagaactatgagcccgaggccttcccctctcccagagcgcagaggctttgaaggctacctctgggaagccgctcaccgtcggaagctgcgggagctgaaactgcgccatcgtcactgtcggcggcccgactcggaccgatg

SEQ ID NO: 748 - DNA, 203 bp, Artificial sequence
  synthetic
ggcgcgccagtccttcccgggtccggcgcggggaaggcagcctggcgcgcgctaattgcctattggcctgtgctgccggctcgcagcccgggtggacccgagccacgccccctggagtgcgccggaaagccgggcgcgctagagctcgcgggaggccatcatgaggaagccacgagcagccgtgggaacgactcggaccgatg

SEQ ID NO: 749 - DNA, 203 bp, Artificial sequence
  synthetic
ggcgcgccagtcctatcttgtagaaaatttcagctgtagcccttggactagaagctgaaataacagaagctgtgtacgatgcattagggtattgaagaaaattaacttttgaattaaatatttggaatataaggaaataaggaaagttgactgaaaatggggcggaagaaaatacaaatcacacgcatcgactcggaccgatg

SEQ ID NO: 750 - DNA, 203 bp, Artificial sequence
  synthetic
ggcgcgccagtcctcttcccgccagtcccctaaccctgaggctgccgcgcggcggtcactgcgccggggtagtgggccccagtgttgcgctctctggccgttccttacactctgcttcaggctccagtgcaggggcgtagtgggatatggccaactcgggctgcaaggacgtcacgggtccagatgagcgactcggaccgatg

SEQ ID NO: 751 - DNA, 203 bp, Artificial sequence
  synthetic
ggcgcgccagtccttctctccacgaggctgccggcttaggacccccagctccgacgtaagtccctctcgtgcgccacctccatccgctgcccctctgcccacgggccgggctcagatgtcgccctctggtcgcctgtgtcttctcaccatcgttggcctgattctccccaccagaggacagacgttgacgactcggaccgatg

SEQ ID NO: 752 - DNA, 203 bp, Artificial sequence
  synthetic
ggcgcgccagtcctccctggccacaccctccgcctggacgcagcagccaccgccgcgtccctctctccacgaggctgccggcttaggacccccagctccgacatgtcgccctctggtcgcctgtgtcttctcaccatcgttggcctgattctccccaccagaggacagacgttgaaagataccacgtccgactcggaccgatg

SEQ ID NO: 753 - DNA, 203 bp, Artificial sequence
  synthetic
ggcgcgccagtcctttgggaaggggccagattgcatcagacagggcctgatgggctggagccagactgtggtctgaggaggagacacagccttataagctgagggagtggagaggcccggggccaggaaagcagagacagacaaagcgttaggagaagaagagaggcagggaagacaagccaggcacgcgactcggaccgatg

SEQ ID NO: 754 - DNA, 203 bp, Artificial sequence
  synthetic
ggcgcgccagtccttgggctacagtgggccgctctgcctcgctcccgcccgcctgcctcagtctccccagctctctgccacccccctcggaccagtgcctcttagatgtcgccctctggtcgcctgtgtcttctcaccatcgttggcctgattctccccaccagaggacagacgttgaaagataccaccgactcggaccgatg

SEQ ID NO: 755 - DNA, 203 bp, Artificial sequence
  synthetic
ggcgcgccagtcctagggaggggcagctctgcatggcctgattcctgcaccccacctttgccccctcacacctcctctcatctcccgtttttgaagaggaggaccctgtcacatctggacaattctgcaagaactctgtagaactgacttcactgtgaaccaggctccagaagtcaacagaaacaaaacgactcggaccgatg

SEQ ID NO: 756 - DNA, 203 bp, Artificial sequence
  synthetic
ggcgcgccagtcctcccactgcggaagagggcagcccggcaagcccgggccctgagcctggacccttagcggtgccgggcagcactgccggcgcttcgcctcgccggacgtccgctcctcctacactctcagcctccgctggagagacccccagccccaccattcagcgcgcaagataccctccagatcgactcggaccgatg

SEQ ID NO: 757 - DNA, 203 bp, Artificial sequence
  synthetic
ggcgcgccagtccttcaaatcaaatcagaaagacatccttcggaatgtgttcagaaccaattagtgacaacactgaagaccagaaaggcaagctgaagacaccagacttcgcttgaagggcaaacaagaaatccaaacatcatgtcaatggcaacagaacagtcgaacctttcccagagggaacacagcgactcggaccgatg

SEQ ID NO: 758 - DNA, 203 bp, Artificial sequence
  synthetic
ggcgcgccagtccttggagcagcgcgcgcaagcgaggccaggggaaggtgggcgcaggactttagccggttgagaaggatcaagcaggcatttggagcacaggtgtctagaaacttttaaggggccggttcaagaaggaaaagttcccttctgctgtgaaactatttggcaagaggctggagggcccacgactcggaccgatg

SEQ ID NO: 759 - DNA, 203 bp, Artificial sequence
  synthetic
ggcgcgccagtccttggactctcttgcagccaacttcccatcagatcaccctgctggacttgcagaccggaatggggctcgcctaaggagccgagcgctgcggaggctgctgcgtgttggatgggagtgggagggggctggagcgagatttccagggcgcagtcctccggggcgttacgccgggcatacgactcggaccgatg

SEQ ID NO: 760 - DNA, 203 bp, Artificial sequence
  synthetic
ggcgcgccagtccttgagtctcgctggagctcttctcgcccgcccacctcatctcaacccactttccgcggggagcggcgccaagctgggccttcctcggatcaggcgtcccctgaagtcggcacgcccctctgcgtcccccttcggtcccgctaggaccccgtccgggctgccgtcgcctcgtcgctcgactcggaccgatg

SEQ ID NO: 761 - DNA, 203 bp, Artificial sequence
  synthetic
ggcgcgccagtcctcgcactcactgctcgcgccgggcgcgctccgccagctccgtgctccccgcgccaccctcctccgggccgcgctccctaagggatggtactgaatttcgccgccacaggagaccggctggagcgcccgccccgcggcctcgcctctcctccgagcagccagcgcctcgggacgcgcgactcggaccgatg

SEQ ID NO: 762 - DNA, 203 bp, Artificial sequence
  synthetic
ggcgcgccagtcctgtgcagaactgccagtcccctgacacgctgtgccccacccactgcagcccagtgctgaatgaaccctgcccagaggtgtctgtagtgagcttctgccctagtgacttttgagccggccaggttgcagcgcggacacactcgcaggtcgctgtggccccagcctcgcctgacagacgactcggaccgatg

SEQ ID NO: 763 - DNA, 203 bp, Artificial sequence
  synthetic
ggcgcgccagtcctacctctgcggcgtcactgggagcccgacggaaaactgcgctaaaggcttgtctttcccctgcccgaccgaaggagccgaccttgcctgcgctacagcttccttattttcgtcgcctgttctcctgatcctgcgtgttctaaaaaccccttaggctttccatgggttcccagacccgactcggaccgatg

SEQ ID NO: 764 - DNA, 203 bp, Artificial sequence
  synthetic
ggcgcgccagtcctccctcggatggcacaaagggactgttttcttactcttagtctgagtgactgccaaggaaggcaaaggtagagcaactggatctctggctctccacatagcttctgatctcagaccttactaaaatgctttctgggcccaaggacaaagctcacatgaacaaatgattttgagtccgactcggaccgatg

SEQ ID NO: 765 - DNA, 203 bp, Artificial sequence
  synthetic
ggcgcgccagtcctaaggcagcctgcaaggcgctcatcccgcggaggaggcacgctctcggcgctcactgctctccacgccggggacatttccaccgaatgtagcatgaaagggctctgctctacgtgccagccttgggtgagagctgatgctgaagacaccgcggtgggattccagctgtctgattacgactcggaccgatg

SEQ ID NO: 766 - DNA, 203 bp, Artificial sequence
  synthetic
ggcgcgccagtccttggcccgacgccgacggcctctcagtggctcccggaggacccggcgggcccagtgttggagagctgaaggtcaggccaggacagtgagacctgactccttgctcctaccagcctactatggcttaagacccagggccagggtcccgttgatgtaacagagcagaggaccagcagcgactcggaccgatg

SEQ ID NO: 767 - DNA, 203 bp, Artificial sequence
  synthetic
ggcgcgccagtcctgacagcagcgcaccttcccccatcccttccccttatcccccagcccaaaagggcccggtctgcgccccacccccgcccgtccgcccgctacgccgccgccatgtcggcgcaggcccagatgcgcgcgatgctggaccagttgatgggcacctcccgggacggttcaatgtatctcgactcggaccgatg

SEQ ID NO: 768 - DNA, 203 bp, Artificial sequence
  synthetic
ggcgcgccagtcctggcttgttcgggcctgagctggcgctacgaagttccggtccaggtctctgacttcgggcttgttcgctggtggcgtcggagccgagccggactggtcaggatgatcacggacgtgcagctcgccatcttcgccaacatgctgggcgtgtcgctcttcttgcttgtcgttctctacgactcggaccgatg

SEQ ID NO: 769 - DNA, 203 bp, Artificial sequence
  synthetic
ggcgcgccagtcctaactcttttgagtccagaatctcagaatcgggcgttgggctttgccgggtgcttcagatcaatggatgagttccacccgttcatcgaggcactgctgcctcacgtccgcgctttctcctacacctggttcaacctgcaggcgcggaagcgcaagtacttcaagaagcatgaaaacgactcggaccgatg

SEQ ID NO: 770 - DNA, 203 bp, Artificial sequence
  synthetic
ggcgcgccagtcctaagccccgccccgcgccctgcgtcgggttaagagggggttcctcgccagccaggtgctcgtcatgcgcaatgtggcgctgcggcgggcggcagggcctgtgtgtgctgaggcggctgagcggcggacatgcacaccacagagcgtggcgatggaacagtaaccgggcttgtgagcgactcggaccgatg

SEQ ID NO: 771 - DNA, 203 bp, Artificial sequence
  synthetic
ggcgcgccagtcctcactgtctgaaacagtcgcgtaaggggtcgccactgggacactgtgaaccaggagtgagtcggagctgccgcgctgcccaggccatggactgtgaggtcaacaacggttccagcctcagggatgagtgcatcacaaacctactggtgtttggcttcctccaaagctgttctgaccgactcggaccgatg

SEQ ID NO: 772 - DNA, 203 bp, Artificial sequence
  synthetic
ggcgcgccagtcctgaaggaggaagcgcgcggggcgccataaggaggaagcgggtagtcgaccgtgtccgcgcgcctgggagacgctgcctcggcccggacgcgcccgcgcccccgcggctggagggtggtcgccactgggacactgtgaaccaggagtgagtcggagctgccgcgctgcccaggccacgactcggaccgatg

SEQ ID NO: 773 - DNA, 203 bp, Artificial sequence
  synthetic
ggcgcgccagtcctggggcagtacttccgggtcaggtgggccggctgtcttgaccttctttgcggctcggccattttgtcccagtcagtccggaggctgcggctgcagaagtaccgcctgcggagtaactgcaaagatgctgtccgtgcgcgttgctgcggccgtggtccgcgcccttcctcggcgggcgactcggaccgatg

SEQ ID NO: 774 - DNA, 203 bp, Artificial sequence
  synthetic
ggcgcgccagtcctaccaatcccgggctcagcaagttctcgcgataccgtgagatctccagtcctgacgacaccgccgctgaaatgttagtgagactgtagggtgggcggtgcgagcggcggttagctcccagttcggcctctgaggaaaacgggcgttcgcctgcggttggtccgactgttagcaaccgactcggaccgatg

SEQ ID NO: 775 - DNA, 203 bp, Artificial sequence
  synthetic
ggcgcgccagtcctctaaacgaaagagccacgacgctctgcgcatgtgcgctcttcgcaagctgaaaatcttgcggggagctctttagcaagttccgccttccagcctgaagcgcatgcgcagcctcggttccgttgcgtagcgtgtccctcagtgggacactgcagggtgcggggacaactacgaagcgactcggaccgatg

SEQ ID NO: 776 - DNA, 203 bp, Artificial sequence
  synthetic
ggcgcgccagtcctaacgccaagtaggggattgcgttccctccagtcgcagagtttccctcttgtcgcccaggctggagtgaagtggcacgatctcggcttactgcaagctccgcctcccgggttcacgccattctcctgcctcagcctcccgagtagctgggactacagaccctatcagatttggatcgactcggaccgatg

SEQ ID NO: 777 - DNA, 203 bp, Artificial sequence
  synthetic
ggcgcgccagtcctgtcccgtcggtctcggcgccgggaagaggcggtggcgctgcccgcggtggcgggggttggcgacggagcgcgttggtgccaggaccggggtccgaggcgcgctctccgcccacagaaatgagccgtcagactgctacagcattacctaccggtacctcgaagtgtccaccatcccgactcggaccgatg

SEQ ID NO: 778 - DNA, 203 bp, Artificial sequence
  synthetic
ggcgcgccagtcctaaaacaattaaaaagacactgaacccaaaatggaatgaagaattttatttcagggtaaacccatctaatcacagactcctatttgaagtatttgacgaaaatagactgacacgagacgacttcctgggccaggtggacgtgccccttagtcaccttccgacagaagatccaacccgactcggaccgatg

SEQ ID NO: 779 - DNA, 203 bp, Artificial sequence
  synthetic
ggcgcgccagtcctcgggcgtggcatgcatgaaaagtaaacatcagagacctgaagaagcttataaaatagcttgggagaggccagtcaccaagacaggcatctcaaatcggctgattctgcatctggaaactgccttcatcttgaaagaaaagctccaggtcccttctccagccacccagccccaagcgactcggaccgatg

SEQ ID NO: 780 - DNA, 203 bp, Artificial sequence
  synthetic
ggcgcgccagtcctgacgcactcgcgctgcggccagcgcccgggcctgcgggcccgggcggcggctgtgttgcgcagtcttcatgggttcccgacgaggaggtctctgtggctgcggcggcggctgctaactgcgccacctgctgcagcctgtccccgccgctctgaagcggccgcgtcgaagccgaacgactcggaccgatg

SEQ ID NO: 781 - DNA, 203 bp, Artificial sequence
  synthetic
ggcgcgccagtcctggaggggcaggaggaaggggtgcggtcgcgatccggacccggagccagcgcggagcacctgcgcccgcggctgacaccttcgctcgcagtttgttcgcagtttactcgcacaccagtttcccccaccgcgctttggattagtgtgatctcagctcaaggcaaaggtgggatatccgactcggaccgatg

SEQ ID NO: 782 - DNA, 203 bp, Artificial sequence
  synthetic
ggcgcgccagtcctgctgctaactgccctggtgtgtgtgagggagagagagggagggagggagagagagcgcgctagcgcgagagagcgagtgagcaagcgagcagaaaagaggtggagagggggggaataagaaagagagagaaggaaaggagagaaggcaggaagaaggcaagggacgagacaacccgactcggaccgatg

SEQ ID NO: 783 - DNA, 203 bp, Artificial sequence
  synthetic
ggcgcgccagtcctgtcacagcatcacctgggtgacgaggtcataacacctcagcccttgcttaaaaaattttatttctacttttctattgtaaagagatctcaaaacaggaagataaaattggactgacagctctacagcctagtcttttagacagtgaactaggccagcattggcagacactggcgcgactcggaccgatg

SEQ ID NO: 784 - DNA, 203 bp, Artificial sequence
  synthetic
ggcgcgccagtcctgctgcaatccctgctgggcagatggagagaggagcaagggagatggcagccccgggggactgtgcatagggagggactcatgaagtggcagctaagccctgtccagtggccacccgtcagccaagggccagagaccaggaaaggaagaaaggcagcttcacttcctctttgaggcgactcggaccgatg

SEQ ID NO: 785 - DNA, 203 bp, Artificial sequence
  synthetic
ggcgcgccagtcctctccactcgcgccggacacagggagcagcgagcacgcgtttcccgcaacccgataccatcggacaggatttctccgcctcagcccaacggggagatctctggaaacatggctacagaacatgttaatggaaatggtactgaagagcccatggatactacttctgcagttatccacgactcggaccgatg

SEQ ID NO: 786 - DNA, 203 bp, Artificial sequence
  synthetic
ggcgcgccagtccttgccagtctgtggagagtcctgctgccctccagccgggctcctccaccgggccttgcaggggccgagagagctcggtgcccgcccttccgctcgcctttttcgtcagctggctggagcagcatgggtccgggaggtctctaggctgaggcggcggccgctcctctagttccacacgactcggaccgatg

SEQ ID NO: 787 - DNA, 203 bp, Artificial sequence
  synthetic
ggcgcgccagtcctcagttggctgttaagtgacactgattctccccgccccgcctgacccccgagaaggaggcttgtcccccgctgcgtgagggggtggggaagtgggtagtgaattcggatctacctgggaggggggagtggaagttcccgccccggagagcggcgaggcggcagccacagttgattcgactcggaccgatg

SEQ ID NO: 788 - DNA, 203 bp, Artificial sequence
  synthetic
ggcgcgccagtcctacggaggaatccttgcttcagggactcgggaccctgctggaccccttcctcgggtttaggggatgtggggaccaggagaaagtcaggatccctaagagtcttccctgcctggatggatgagtggcttcttctccacctagattctttccacaggagccagcatacttcctgaaccgactcggaccgatg

SEQ ID NO: 789 - DNA, 203 bp, Artificial sequence
  synthetic
ggcgcgccagtcctagcggtcactcccgctgtatattaaggcgccggcgatcgcggcctgaggctgctcccggacaagggcaacgagcgtttcgtttggacttctcgacttgagtgcccgcctccttcgccgccgcctctgcagtcctcagcgcagtctttccacaggagccagcatacttcctgaaccgactcggaccgatg

SEQ ID NO: 790 - DNA, 203 bp, Artificial sequence
  synthetic
ggcgcgccagtcctaactccagggctagtgagctggaccggaagtaggtttctacccgaccgcattttacgtggtgctgcatttccggtagcggcggcgggaaatcggctgtgggagagaggctaggcctctgaggaggcgaatccggcgggtatcagagccatcagaaccgccaccatgacggtgggcgactcggaccgatg

SEQ ID NO: 791 - DNA, 203 bp, Artificial sequence
  synthetic
ggcgcgccagtccttgtgctttctctctgtttcagctgttttccttttaagatactcctctcagatttgtgtgcttcttcccttcccacattctatactgcccagcgcctgggattccagatctgcgtttgaatccaggaaagggaggtggacacctgcgcaggtgtgtgccctccggcccctgaagccgactcggaccgatg

SEQ ID NO: 792 - DNA, 203 bp, Artificial sequence
  synthetic
ggcgcgccagtcctgactttctggtaaggagaggaggttacggggaacgacgcgctgctttcatgccctttcttgttctaccttcatcggccgaggtggacacctgcgcaggtgtgtgccctccggcccctgaagcatggccagcagcggcatggctgacagcgccaaccacctgcccttctttttcgcgactcggaccgatg

SEQ ID NO: 793 - DNA, 203 bp, Artificial sequence
  synthetic
ggcgcgccagtcctgctgctcctctgtcgagctgatcacacccacagttgagctgcgctggccagagatgcctgcccacagcctggtgatgagcagcccggccctcccggccttcctgctctgcagcacgctgctggtcatcaagatgtacgtggtggccatcatcacgggccaagtgaggctgcggacgactcggaccgatg

SEQ ID NO: 794 - DNA, 203 bp, Artificial sequence
  synthetic
ggcgcgccagtcctatggatggaaccaatggcagcacccaaacccatttcatcctactgggattctctgaccgaccccatctggagaggatcctctttgtggtcatcctgatcgcgtacctcctgaccctcgtaggcaacaccaccatcatcctggtgtcccggctggacccccacctccacaccccccgactcggaccgatg

SEQ ID NO: 795 - DNA, 203 bp, Artificial sequence
  synthetic
ggcgcgccagtcctatccgggcaggataaaggcctgggtgaggcggctcacctaccctgctttctgcattcttctctccacatccctctctgtacttacagcccccaatggcccccaaaaagccagagcccaagaaggatgatgccaaggcagcccccaaggcagctccagctcccgcacctccccctcgactcggaccgatg

SEQ ID NO: 796 - DNA, 203 bp, Artificial sequence
  synthetic
ggcgcgccagtcctggaaccgccctgctgccgccgcctgcttcctctgctcgcggttagcccgtcagtccctgctctgtgcgcgcctccatctgggccatggatggcggggatctgatgagcttctttcttctggcatcattaacggaccttttaccatgaatagttctactccttctacaggtgtgtcgactcggaccgatg

SEQ ID NO: 797 - DNA, 203 bp, Artificial sequence
  synthetic
ggcgcgccagtcctgacgccatcccggccagaaaagccctggccagtggcgggcgcgacactatccgtgcggccaggcggagacccggaggaccgaagcttccggacgacgaggaaccgcccaacatggcctcggagagtgggaagctttggggtggccggtttgtgggtgcagtggaccccatcatgcgactcggaccgatg

SEQ ID NO: 798 - DNA, 203 bp, Artificial sequence
  synthetic
ggcgcgccagtcctcgagcggccgacggcgggtgcacgcgtcggtacacgtctgggcggcgacctggtcgcaagccatggtcccacgcggggtcccagggccgccgcgggacttggccgaggtctcccgacttgtgctgtgagatacgttaacgctttctcgacaccaggggtctggacttagtgacccgactcggaccgatg

SEQ ID NO: 799 - DNA, 203 bp, Artificial sequence
  synthetic
ggcgcgccagtcctatctgcctcagcctctttgtcactgcctggaccattgtccctgctgtttctcagacagcatagaggctgaggctggggccaggacccagacagagacacacggtcactgcagctgaagccgctgcccctgctacaggcaccaccaggaccagctgatcattccagcccacagcacgactcggaccgatg

SEQ ID NO: 800 - DNA, 203 bp, Artificial sequence
  synthetic
ggcgcgccagtcctggaggtgcggctggcccggtttcctggcgacgcggccctgcaggcggttgcgttccccgtcgttaccctctttctcttcccgacgcgtgagttaggccgtaatgccttggctgctctcagcccccaagctggttcccgctgtagcaaacgtccgcggcctctcaggatgtatgtcgactcggaccgatg

SEQ ID NO: 801 - DNA, 203 bp, Artificial sequence
  synthetic
ggcgcgccagtcctgcagaagggaagcaactccgggcgcctttcttttgcgcaggcgtcgcgccctggggccggggccgggcggcaccgcggtgcgcaagcgcaaccgtcggtgggtcggggatcggtcgcctgagaggtatcacctcttctgggctcaagatggacaacaagaagcgcctggcctaccgactcggaccgatg

SEQ ID NO: 802 - DNA, 203 bp, Artificial sequence
  synthetic
ggcgcgccagtcctgcaccggggaattcgaatgggagaggcgggcccaaggagggagtggaatggccgcgggcggctcgacgcagcagaggcgacgcgagatggcggcagcttcagcggcggcgatctcaggagctggtcgctgtcggctaagcaagattggagctactcgtcgtccacctccagctccgactcggaccgatg

SEQ ID NO: 803 - DNA, 203 bp, Artificial sequence
  synthetic
ggcgcgccagtcctgcgctgggtcaaagttcagccccgcccccgcttccccctcgctgtctccctcggcctgtgccgccgccgacgccgcttgtgggcccgactccgctctgtctgcttcgccaccttctccccgagcactgcccggccggccgccatggctaacgtggctgacacgaagctgtacgacgactcggaccgatg

SEQ ID NO: 804 - DNA, 203 bp, Artificial sequence
  synthetic
ggcgcgccagtcctcgaatgatttaaccaacgccttttccctccaaagaaacttggaggatatacctttttttccttaaatggcatctttctacccccaaaaagaaagtgtgtggttttgagggcggggacattttgggttttaaacagcgcgtttaagaacacctcagatctgccttctctatcccacgactcggaccgatg

SEQ ID NO: 805 - DNA, 203 bp, Artificial sequence
  synthetic
ggcgcgccagtcctagttccgagaccggttgccatggcgttctggacagcctcgcgagtccgaccccgcccttcaggagtgacgagcggcctgaccaatgggagcagggggcgggctctctgacgaaggactggaaggtggcggtggtgaaggtgcaggccgttggggcggctcagaggcaggtgactcgactcggaccgatg

SEQ ID NO: 806 - DNA, 203 bp, Artificial sequence
  synthetic
ggcgcgccagtcctggaggcaggcggtgccgcggcgccgggacccgactcatccggtgcttgcgtgtggtggtgagcgcagcgccgaggatgaggaggtgcaacagcggctccgggccgccgccgtcgctgctgctgctgctgctgtggctgctcgcggttcccggcgctaacgcggccccgcggtcgcgactcggaccgatg

SEQ ID NO: 807 - DNA, 203 bp, Artificial sequence
  synthetic
ggcgcgccagtcctctcatgttcagaacaaaagtgcctttttatgtggagtcatgaagacttacaggcagagagaaaaacaagggaccaaagtagcagattctagtaaaggaccagatgaggcaaaaattaaggcactcttggaaagaacaggctacacacttgatgtgaccactggacagaggaagtcgactcggaccgatg

SEQ ID NO: 808 - DNA, 203 bp, Artificial sequence
  synthetic
ggcgcgccagtcctagaggaagagaacgatttaaggagcgaatactactggtaaactaatggaagaaatctgctgcaccactggatattgggagtgtgtggcatgcatcctcatcatcaggaaactctaaaaaagaaccgagtggtgctagccaaacagctgttgttgagcgaattgttagaacatctcgactcggaccgatg

SEQ ID NO: 809 - DNA, 203 bp, Artificial sequence
  synthetic
ggcgcgccagtccttacctgcttcctgagctccccgagaagtcatccaggacctccccgagaagccgtccaggaaacatgctctcaggggacccccatctgcctcagcctctttgtcactgcctggaccattgtccctgctgtttctcaggcaccaccaggaccagctgatcattccagcccacagcacgactcggaccgatg

SEQ ID NO: 810 - DNA, 203 bp, Artificial sequence
  synthetic
ggcgcgccagtcctatggaaaggcttcctttctccacctctgtaactggtgcttctgagaagtaaatggtatttggatcctgacctcagacgcgaatttgggtcttctgtgcttaggagcagaaagagcccaggaggggcctgttcctttacttcttgggggaaacgcaatgcgtggcctgacttctccgactcggaccgatg

SEQ ID NO: 811 - DNA, 203 bp, Artificial sequence
  synthetic
ggcgcgccagtcctgctagttcctggtgcgtcacgggggagttccttaaaggggaagcgagccgggctacggggcgagcgcggggtgcggtggtcggcggggaggcccccgcgctttaaaataatgcccgcggcgcccgcgcgaccatgcaatggcgagcgctcgtcctggggctggtgctcctccggcgactcggaccgatg

SEQ ID NO: 812 - DNA, 203 bp, Artificial sequence
  synthetic
ggcgcgccagtcctcctttctccctcgcgttaggcaggtgacagcagggacatgtctcgggagatgcaggatgtagacctcgctgaggtgaagcctttggtggagaaaggggagaccatcaccggcctcctgcaagagtttgatgtccagacaaaacctgctacaaccccctcttcaactacgaggaccgactcggaccgatg

SEQ ID NO: 813 - DNA, 203 bp, Artificial sequence
  synthetic
ggcgcgccagtcctcaggccagccctggggcgccttaaaaaccggagctggcgcttggcatcgccactctgggcaggatccaacgtcgctccagctgctcttgacgactccacagataccccgaagccatggcaagcaagggcttgcaggacctgaagcaacaggtggaggggaccgcccaggaagcccgactcggaccgatg

SEQ ID NO: 814 - DNA, 203 bp, Artificial sequence
  synthetic
ggcgcgccagtcctaggagttgctgcatcgagttgtgaggattaaaagttggatgtaacggcttggtaattatgagctcttctagtgtcccttcctcttccctgtgcccaaggggttttaggaaagcattttatctccacagcaatcctatgaggttgatactactatcctcatagaaggggaaactgcgactcggaccgatg

SEQ ID NO: 815 - DNA, 203 bp, Artificial sequence
  synthetic
ggcgcgccagtccttaattatgagctcttctagtgtcccttcctcttccctgtgcccaaggggttttaggaaagcattttatctccacagcaatcctatgaggttgatactactatcctcatagaaggggaaactgatgccaggagaggttcaagcgtcttacctgaagtcacaaagcaaactgagtgcgactcggaccgatg

SEQ ID NO: 816 - DNA, 203 bp, Artificial sequence
  synthetic
ggcgcgccagtcctgcatcagggccgggggacgggtaaggggggggtgaagaaggggccggccttcaagcaagagcgacgcaagatggcagccaccacgggctcggtccctcgcaatttccgactgttggaagaactcgaagaaggccagaaaggagtaggagatggcacagttagctggggtctagacgactcggaccgatg

SEQ ID NO: 817 - DNA, 203 bp, Artificial sequence
  synthetic
ggcgcgccagtccttttcagagaaagttacgtggagcgtgggcgtttcgcagactcctaagcttctggcaagtatgaggcaaggatttcacagaagaacttggagcaaaaattcccactgtcatagctataggctgtccagtcttgagggagctgcaggaacaggaaaaagagaccttcagagaagaccgactcggaccgatg

SEQ ID NO: 818 - DNA, 203 bp, Artificial sequence
  synthetic
ggcgcgccagtcctcatgtcactgcctgccacttccggctcctgcgtcgctccggaagcctgcgagttccggaagccttggtaatccagattcggctaggaaaagacaagctttccagagaatgtttcagagaaagttacgtggagcgtgggcgtttcgcagactcctaagagaccttcagagaagaccgactcggaccgatg

SEQ ID NO: 819 - DNA, 203 bp, Artificial sequence
  synthetic
ggcgcgccagtcctgcggcagggaggggctcttcacccagtccggcagttgaagctcggcgctcgggttacccctgcagcgacgccccctggtcccacagataccactgctgctcccgccctttcgctcctcggccgcgcaatgggcacccgcgacgacgagtacgactacctctttaaagttgtcctcgactcggaccgatg

SEQ ID NO: 820 - DNA, 203 bp, Artificial sequence
  synthetic
ggcgcgccagtcctgtgggatttacttccggcagcaggtggtggggccatggctgcccttctccgagctgtgcgtaggtttcggggaaaagctgtgtgggaaaggcctctccatgggctgtggtgctgcagtgggcaggaggatcctaagaggtgggtgggcagcagttcacccatctcgaaggagaacgactcggaccgatg

SEQ ID NO: 821 - DNA, 203 bp, Artificial sequence
  synthetic
ggcgcgccagtccttttgcggctccaacatggctccgcggctgtgcagcatctctgtgacggcgcgtttctattccaaggacaatgaaggcagctggttccgctccctctttgttcacaaagtggatccccggaaggatgcccactccaccctgctgtccaagaaggaaaccagcaacctctataagacgactcggaccgatg

SEQ ID NO: 822 - DNA, 203 bp, Artificial sequence
  synthetic
ggcgcgccagtcctgcgaggaagcgcggtcacgtgactgctgcgggccagccaagatggcggcctcatgcttggtcctgctggcgctgtgtctgctgctgccgctgctgctgctgggaggatggaagcgctggcgccgggggcgggcggcccggcatgtagtagcggtggtgctgggcgacgtgggcccgactcggaccgatg

SEQ ID NO: 823 - DNA, 203 bp, Artificial sequence
  synthetic
ggcgcgccagtcctctcggccccgcccccgcgccccggatatgctgggacagcccgcgcccctagaacgctttgcgtcccgacgcccgcaggtcctcgcggtgcgcaccgtttgcgacttggtacttggaaaaatggacaaggattgtgaaatgaaacgcaccacactggacagccctttggggaagccgactcggaccgatg

SEQ ID NO: 824 - DNA, 203 bp, Artificial sequence
  synthetic
ggcgcgccagtcctcacgaaagtgactaggaggaaggatattataaagtgatgcaaacagaaattccaccagcctccatgtatcatcatgtgtcataactcagtcaagctcagtgagcattctcagcacattgcctcaacagcttcaaggtgagccagctcaagactttgctctccaccaggcagaagcgactcggaccgatg

SEQ ID NO: 825 - DNA, 203 bp, Artificial sequence
  synthetic
ggcgcgccagtcctcccaaaccaaggcccccagagaggtcccccaggcccctttgggtccctgagcctcagctggaggtggggggtgcctgcagtgcgctggctcagtctccttctgaaaagctggatccagcttgtttgaagcccttgagctgatcttagatccggcgcaggagaccaacgcctgcccgactcggaccgatg

SEQ ID NO: 826 - DNA, 203 bp, Artificial sequence
  synthetic
ggcgcgccagtcctggcggttggtgcggcctccattgttcgtgttttaaggcgccatgaggggtgacagaggccgtggtcgtggtgggcgctttggttccagaggaggcccaggaggagggttcaggccctttgtaccacatatcccatttgacttctatttgttgtttacttctggtttagtgtgaacgactcggaccgatg

SEQ ID NO: 827 - DNA, 203 bp, Artificial sequence
  synthetic
ggcgcgccagtcctgcggcggacacttccctgggcgggactgtctcgtggcacccggtggaaccgaggagaacgtggagcgccgggagcggcgaatatggacgactacagcctggatgagttccgtcggcgctggcaggaggagctggcgcaggcccaggcgccgaagaagcggcgacggcccgaggccgactcggaccgatg

SEQ ID NO: 828 - DNA, 203 bp, Artificial sequence
  synthetic
ggcgcgccagtcctgggagacccgccgcctccctccctccctagctgacttgctccctcccgggctgcggctgctgcaaaagccagcagcggcagcgggagctgtccggaggccggcgtcgagggtttgccgctgtctctgctattccatcctccccataggggctctctcccctctcccatctcaagcgactcggaccgatg

SEQ ID NO: 829 - DNA, 203 bp, Artificial sequence
  synthetic
ggcgcgccagtcctagctgacttgctccctcccgggctgcggctgctgcaaaagccagcagcggcagcgggagctgtccggaggccggcgtcgaggtgagacccgggcagactgaggctgcggggtttgccgctgtctctgctattccatcctccccataggggctctctcccctctcccatctcaagcgactcggaccgatg

SEQ ID NO: 830 - DNA, 203 bp, Artificial sequence
  synthetic
ggcgcgccagtcctgggattggttctccaggatcttgtttgtgactgttttctccccttagtgagctgtattttcaaggccctagcagcaacaagcctcgtgtgatccgggaagtgcgggctgactctgtggggaagttggtaactgtgcgtggaatcgtcactcgtgtctctgaagtcaaacccaagcgactcggaccgatg

SEQ ID NO: 831 - DNA, 203 bp, Artificial sequence
  synthetic
ggcgcgccagtccttaggaaaaagttttggatgggattatgtggaaactaccctgcgattctctgctgccagagcaggctcggcgcttccaccccagtgcagccttcccctggcggtggtgaaagagactcgggagtcgctgcttccaaagtgcccgccgtgagtgagctctcaccccagtcagccaacgactcggaccgatg

SEQ ID NO: 832 - DNA, 203 bp, Artificial sequence
  synthetic
ggcgcgccagtcctttccccggtgtcccgacggcggctcaagtcagagttgctgggttttgctcagattggtgtgggaagagcctgcctgtggggagcggccactccatactgctgaggcctcaggactgctgctcagcttgcccgttacctgaagaggcggcggagccgggcccctgaccggtcacccgactcggaccgatg

SEQ ID NO: 833 - DNA, 203 bp, Artificial sequence
  synthetic
ggcgcgccagtcctagagcggggaaggctgagtccacactgcaagtccagagagcagggaactaccttgagtattctactcaaacttatgtctcagagttccccaatttcccaagaagggagagatagaggccacaatccagggggccatctcttaaggtaccaataattttgcaggatcaaaccaaacgactcggaccgatg

SEQ ID NO: 834 - DNA, 203 bp, Artificial sequence
  synthetic
ggcgcgccagtccttcagctctctcctccgccccccttcgccctccccctttccctccctttctcctcctcctcctgccgccgcggccgctgccggacttcgccagatcagacccacggggctgccctcccctgcgcactcccctcgctgcccgggcccggagcgcagcgcggccgcacagattcacacgactcggaccgatg

SEQ ID NO: 835 - DNA, 203 bp, Artificial sequence
  synthetic
ggcgcgccagtccttttcctgctgggggtgccgaccctgtcccacgctagctgggtgacttcccccaaccgcagagacagcggcgacccggggcctcagacctgcccccgcatctcgccggcgccaggcagtgggaagtcaggttcttccgccacctcccagccaggactctgccaccctccctcaggcgactcggaccgatg

SEQ ID NO: 836 - DNA, 203 bp, Artificial sequence
  synthetic
ggcgcgccagtcctgccatataaatcagatttttgacatgttataaaatgcaagtcacagctgctgttgtctgcggtattcaaaaacttttgaaacactgcatgtccaacaaaatttattttttgtgtgaatgtactgtttttcaaccctactctcttgaccaagaatgaaactatttacaaattaagcgactcggaccgatg

SEQ ID NO: 837 - DNA, 203 bp, Artificial sequence
  synthetic
ggcgcgccagtcctgggaggcagcaggttaggcagtgagaagttagtggcgctgctgggacgggggaaaggagacgcttcttcctcttgctgctcttctcgttcccgagatcagcggcggcggtgaccgcgagtgggtcggcaccgtctccggctccgggtgcgaacaatgctgactgatagcggaggcgactcggaccgatg

SEQ ID NO: 838 - DNA, 203 bp, Artificial sequence
  synthetic
ggcgcgccagtcctcggcagctccgagggcacctccggttctcccccatcctccgggagtgtctgggcgctcagtccgctctgatcccgccgaaaccacctgcggttggcaggcaggagactaggcgtctgccggggagggcagggacccgctaagctgatctcctgtacagtagtgctacttaaaatcgactcggaccgatg

SEQ ID NO: 839 - DNA, 203 bp, Artificial sequence
  synthetic
ggcgcgccagtcctatttccggcatgagccggaagaccgtcccggatggcctcggggactgccagtgtgtggaggtgagctccgggattgccggcattcccgcttctgctggttgcttcatgctgcaggctgcggccgtcagccctcgctcgcattggtggcgctgaggtgccggggcagcaagtgaccgactcggaccgatg

SEQ ID NO: 840 - DNA, 203 bp, Artificial sequence
  synthetic
ggcgcgccagtcctcacgacggtgacacgcttccctggattggcagccagactgccttccgggtcactgccatggaggagccgcagtcagatcctagcgtcgagccccctctgagtcaggaaacattttcagacctatggaaactacttcctgaaaacaacgttctgtcccccttgccgtcccaagcacgactcggaccgatg

SEQ ID NO: 841 - DNA, 203 bp, Artificial sequence
  synthetic
ggcgcgccagtcctagatgcgagcactgcggctgggcgctgaggatcagccgcttcctgcctggattccacagcttcgcgccgtgtactgtcgccccatccctgcgcgcccagcctgccaagcagcgtgccccggttgcaggcgtcatgcagcgggcgcgacccacgctctgggccgctgcgctgactcgactcggaccgatg

SEQ ID NO: 842 - DNA, 203 bp, Artificial sequence
  synthetic
ggcgcgccagtcctgctttatctggtagcactgttacataaaattaacatttattggtgatcactaggtgccaacattatgcgaagaactttacgtggacatcccatttaattctcagaagccgatcacaaggtggccagcatcgaaatgttcagccttttagtgatgaagatgcatcaattgaaacacgactcggaccgatg

SEQ ID NO: 843 - DNA, 203 bp, Artificial sequence
  synthetic
ggcgcgccagtcctggcagccccatagccatctcagggacaaggaggctgtgatcagatctcgcgaggttcaggaaagcgccccgggaactgggccgctgggccagcccctgcgtcggggggcaagatggcagcccaggctttggcgctgctgagagaggtagcgaggctggaagcgccgctggaggacgactcggaccgatg

SEQ ID NO: 844 - DNA, 203 bp, Artificial sequence
  synthetic
ggcgcgccagtcctattctttccccaagtctctatggtagcgtcagcgtcggaggcggtagtgacggtggcgtttccttgaggaagagtgagggttccaacttttctgcttatctgggaggtgttgggcgcggacagtcgagatgtcagagaaaaagcagccggtagacttaggtctgttagaggaagcgactcggaccgatg

SEQ ID NO: 845 - DNA, 203 bp, Artificial sequence
  synthetic
ggcgcgccagtccttcctgcgccgccccttccgaggctaaatcggctgcgttcctctcggaacgcgccgcagaaggggtcctggtgacgagtcccgcgttctctccttgaatccactcgccagcccgccgccctctgccgccgcaccctgcacacccgcccctctcctgtgccaggcaaggtgacccccgactcggaccgatg

SEQ ID NO: 846 - DNA, 203 bp, Artificial sequence
  synthetic
ggcgcgccagtcctgagtctgtaccctcgtgatgtccccgccccggttcccaggcaagtttagggaagtgaaaggcgccaggtgccagtcctggcctctgatgtaacccagcgccccgcagtcccgacacagattcctggatctcagccccatagcagctatgatcccgctgctgctggcagcgctgccgactcggaccgatg

SEQ ID NO: 847 - DNA, 203 bp, Artificial sequence
  synthetic
ggcgcgccagtcctgtgcagaaggcacgaggaagccacagtgctccggatcctccaatcttcgctcctccaatctccgctcctccacccagttcaggaacccgcgaccgctcgcagcgctctcttgaccactatgagcctcctgtccagccgcgcggcccgtgtccccggtccttcgagctccttgtgcgactcggaccgatg

SEQ ID NO: 848 - DNA, 203 bp, Artificial sequence
  synthetic
ggcgcgccagtcctaaggccctcggccggaagctccgctttctcttcctgctctccatcatggcggatcaaggtgaaaaggagaaccccatgcgggaacttcgcatccgcaaactctgtctcaacatctgtgttggggagagtggagacagactgacgcgagcagccaaggtgttggagcagctcacacgactcggaccgatg

SEQ ID NO: 849 - DNA, 203 bp, Artificial sequence
  synthetic
ggcgcgccagtcctagtggaggagctgctgctggtgctggggccggaggagggacgcgccggagcgggaccgacgggaccgagcgagcgaccgacgcgccacccgccgacgcctcagccgcttggggcccgcacggaccctctacttcagtgtagaatgagccaaggagactcaaacccagcagctatcgactcggaccgatg

SEQ ID NO: 850 - DNA, 203 bp, Artificial sequence
  synthetic
ggcgcgccagtcctgggttgcgtttagcagaggaccggagcaaggaccctcacgacccacataaaatctacgagtttgtgaactcaggagttggggacttttcccagccagacacctctccggacaccaatggtggaggcagtacttctgatacccaggaagacattctggatgagttactgggtaaccgactcggaccgatg

SEQ ID NO: 851 - DNA, 203 bp, Artificial sequence
  synthetic
ggcgcgccagtcctctgcgcccgagctggcctgcgagttcagggctcctgtcgctctccaggagcaacctctactccggacgcacaggcattccccgcgcccctccagccctcgccgccctcgccaccgctcccggccgccgcgctccggtacacacaggatccctgctgggcaccaacagctccacccgactcggaccgatg

SEQ ID NO: 852 - DNA, 203 bp, Artificial sequence
  synthetic
ggcgcgccagtccttcccgcctccctgggagctccgcacgggatttgcagatttacagaatggctgcacattaatggaaagagaagcataaacctatcttctttcattatggagggaggtttggcagatggagaacctgatcgaacttcgcaaacagtgacgaatctcagcttctgacaccaggaaagcgactcggaccgatg

SEQ ID NO: 853 - DNA, 203 bp, Artificial sequence
  synthetic
ggcgcgccagtcctctcctggaccggggggcgcggaggttggagagaggagctacccgggtctcggacaggcggcactgggaccacgaggcagggagccaggcttgaagcaggtgacatgtagacgtcccctggtccagcctcggaacctgagcgcccttctgcctggaaagtttgtggctaggcgcccgactcggaccgatg

SEQ ID NO: 854 - DNA, 203 bp, Artificial sequence
  synthetic
ggcgcgccagtcctcttaggaaaactcgacaggatattgaggggaggctccagccctcgggagtaaatatcttcccttccaacctggtgtcagcagcctttcgctcatactctaccacctatgaagagaggaatatcaccggaaccagggtgaaggtgcccgtggggcaggaggtggaggggatgaaccgactcggaccgatg

SEQ ID NO: 855 - DNA, 203 bp, Artificial sequence
  synthetic
ggcgcgccagtcctggggctgaaggaggctgactccccaagtcctgcaaaggggtgcaagcctagttccaaccctgccgggctgaggcatgagtaggggctgtatttgcgtgcaggcgggcccccaaagcttccactcgctgccttaaaacgccaacccagcctctcagacaatgctgccctcccactcgactcggaccgatg

SEQ ID NO: 856 - DNA, 203 bp, Artificial sequence
  synthetic
ggcgcgccagtcctgggctggggcgctccgctgagccactcctgcgcccccctggccttgtctacctcttgccccccgaggggttagtgtcgagctcaccccagcatcctatcacctcctggtggccttgccgcccccacaaccccgaggtataaagccaggtacacgaggcaggggacgcaccaaggcgactcggaccgatg

SEQ ID NO: 857 - DNA, 203 bp, Artificial sequence
  synthetic
ggcgcgccagtcctgcggtctcgttattcgtgttttctctccgccctacgattattcccttccgcccccttctctaagctgcacagcctgaatagaagggctggtccagcggcggcggaggctggcgctgtcctgagagggagggctctgtgcggaagagatgaatcggacaaagggtgatgaggaggcgactcggaccgatg

SEQ ID NO: 858 - DNA, 203 bp, Artificial sequence
  synthetic
ggcgcgccagtcctggcggctgctgctgcctgtggcccgggcggctgggagaagcggagtgttggtgagtgacgcggcggaggtgtagtttgacgcggtgtgttacgtgggggagagaataaaactccagcgagatccgggccgtgaacgaaagcagtgacggaggagcttgtaccaccggtaactaacgactcggaccgatg

SEQ ID NO: 859 - DNA, 203 bp, Artificial sequence
  synthetic
ggcgcgccagtcctagcatgagtcagacagcctctggctttctggaagggcaaggactctatatatacagagggagcttcctagctgggatattggagcagcaagaggctgggaagccatcacttaccttgcactgagaaagaagacaaaggccagtatgcacagctttcctccactgctgctgctgccgactcggaccgatg

SEQ ID NO: 860 - DNA, 203 bp, Artificial sequence
  synthetic
ggcgcgccagtcctgcctctggctttctggaagggcaaggactctatatatacagagggagcttcctagctgggatattggagcagcaagaggctgggaagccatcacttaccttgcactgagaaagaagacaaaggcaagttgaaaagcggagaaatagtggcccagtggttgaaaaattgaagcaacgactcggaccgatg

SEQ ID NO: 861 - DNA, 203 bp, Artificial sequence
  synthetic
ggcgcgccagtcctaaatgaactccctccagcttagctttcacccggtggtgttcccgggaggagagggcggagggcggagggaacttgcaccgaagcatcactcgagaccccaaacctccaggcctgaggcccagccagcgcccaatggatgacaaaaagaagaaacggagtcccaagccctgcctgcgactcggaccgatg

SEQ ID NO: 862 - DNA, 203 bp, Artificial sequence
  synthetic
ggcgcgccagtccttgcgtgggtactggaacaagcaaacgaggcagcgagcgaaggacgggagccggaccctgggccccgtggaactccagcctgcgccaccacgtcacgcacacgctcggcgctgcgatccgcgcatataacgatatttggatttgacctgcattttggaatttatctacacttaaacgactcggaccgatg

SEQ ID NO: 863 - DNA, 203 bp, Artificial sequence
  synthetic
ggcgcgccagtcctatgtgcacacacatacactcacacgtgtgtgcaggtgcacacctcccccagaggctgcagccaagacgggcatcccacatcagagggatgaatggcaggtctgtcccgccagctgtgtgctctctcccacccgaagaaagcagcagagactcagacggcggagcctggaggagccgactcggaccgatg

SEQ ID NO: 864 - DNA, 203 bp, Artificial sequence
  synthetic
ggcgcgccagtcctggctgaaaagcatgacgtaccaaacaggcacgagataagtcccggacatgatggcacatggaatgacaatcagctacaagaaatggcccaactgaggattaagcaccaagaggaactgactgaattacacaagaaacgtggggagctcaactggtgattgacctgaataaccaacgactcggaccgatg

SEQ ID NO: 865 - DNA, 203 bp, Artificial sequence
  synthetic
ggcgcgccagtcctacttccggctccccccaggtccccaagctttacttttgtggggcacgacgagaaagtccgcagccccaaacattcccagaggtccacttgggccagtggtactttatcgcaggggcagctcccaccaaggaggagttggcaacttttgaccctgtggacaacattgtcttcaatcgactcggaccgatg

SEQ ID NO: 866 - DNA, 203 bp, Artificial sequence
  synthetic
ggcgcgccagtcctagagtggactgagcagccagtaggggagagagcagttaaggcacacagagcaccagctccctcctgcctgaagatgttccaccaaatttgggcagctctgctctacttctatggtattatccttaactccatctaccagtgccctgagcacagtcaactgacaactctgggcgtcgactcggaccgatg

SEQ ID NO: 867 - DNA, 203 bp, Artificial sequence
  synthetic
ggcgcgccagtcctgcggctggattctcttccctggccaagtctctgagatcttctcccagggcgatgcaaagctactcgctaccagcttggacctgtctgcagtatctcctctgggacctgccatgctgaggacccattctcacctctgagggactcctgtcctaggactaaggtggagcctgggcccgactcggaccgatg

SEQ ID NO: 868 - DNA, 203 bp, Artificial sequence
  synthetic
ggcgcgccagtcctggtggtgttgacgattgaactgggcagtactggggccgtgagcggagagcaaagtgggctggactgggtcaggccctccttcctcgctgccgggatctccactccgccaatcccctgtgcctggcgttgggcggtttcccgaggagcttgggccgccgcagcttacagttgaaccgactcggaccgatg

SEQ ID NO: 869 - DNA, 203 bp, Artificial sequence
  synthetic
ggcgcgccagtcctctgaaggggcgttccacatacgttgtcccgacacagcagtaccctgtgcagccaggagccccaggcttctatccaggtgcaagccctacagaatttgggacctacgctggcgcctactatccagcccaaggggtgcagcagtttcccactggcgtggcccccgccccagttttgcgactcggaccgatg

SEQ ID NO: 870 - DNA, 203 bp, Artificial sequence
  synthetic
ggcgcgccagtccttccgctgcgctgtagcctggaggctccgggcgcggggaagtcatgctcgcttcacggaggcaatagctagccggtgtctgtgggaggttatgtttatttgagacttctccatcgggatcgcctggtgtcaccaagtgtccactggtactgaggtttgctgcctgccttcttgcccgactcggaccgatg

SEQ ID NO: 871 - DNA, 203 bp, Artificial sequence
  synthetic
ggcgcgccagtcctaggccgcggcccagctgaccctcggggctcccccggcagcggacagggaagggttaaaggcccccggctccctgccccctgccctggggaacccctggccctgtggggacatgaactagggacaaattcccagctgacggggaccacaacctggattccctgcccaccctggcccgactcggaccgatg

SEQ ID NO: 872 - DNA, 203 bp, Artificial sequence
  synthetic
ggcgcgccagtcctagaataattttgctgccaagtgaatcagagagacttgcagttctcggagagcacggaacttattcctgcccagagttcagacacagccagaaattaccatttcatacttcacagaatggaggtttcagcagccaaagccccaagtgccgcagacttgtctgagattgaaataaacgactcggaccgatg

SEQ ID NO: 873 - DNA, 203 bp, Artificial sequence
  synthetic
ggcgcgccagtcctacccagatcccgaggtccgacagcgcccggcccagatccccacgcctgccaggagcaagccgagagccagccggccggcgcactccgactccgagcagtctctgtccttcgacccgagccccgcgccctttccgggacccctgccccgcgggcagcgctgccaacctgccggcccgactcggaccgatg

SEQ ID NO: 874 - DNA, 203 bp, Artificial sequence
  synthetic
ggcgcgccagtcctgagaccctctgctcttctgctcccttcctgtgtgctgcctggcaatggggaactctgagggctgcaataccaagaaggagggtgacctgatagctgctcaggctcggctgaaggacctggaggctctgctgaactccaaggaggccgcactgagcactgctctcagtgagaagccgactcggaccgatg

SEQ ID NO: 875 - DNA, 203 bp, Artificial sequence
  synthetic
ggcgcgccagtcctcacaattgacagcctcaaggttcctggctttttgaaccaccacagacatctcctttcccggctaccccaccctgagcgccagacaccatgaaccttccttccacaaaggtctcctgggccgccgtgacgctactgctgctgctgctgctgctgccgcccgcgctgttgtcgtcccgactcggaccgatg

SEQ ID NO: 876 - DNA, 203 bp, Artificial sequence
  synthetic
ggcgcgccagtcctccggaagtgacgcgaggctctgcggagaccaggagtcagactgtaggacgacctcgggtcccacgtgtccccggtactcgccggccggagcccccggcttcccggggccgggggaccttagcggcacccacacacagcctactttccaagcggagccatgtctggtaacggcaacgactcggaccgatg

SEQ ID NO: 877 - DNA, 203 bp, Artificial sequence
  synthetic
ggcgcgccagtcctacccacacacagcctactttccaagcggagccatgtctggtaacggcaatgcggctgcaacggcggtgagtgctgagccggtgaccagcacactttgggcttctggacgagccgtgcagcgattggccccaggttgccatcctcagtcgtctattggaagaaaacagcccaaagcgactcggaccgatg

SEQ ID NO: 878 - DNA, 203 bp, Artificial sequence
  synthetic
ggcgcgccagtcctactgatttttagaactccacatttgaggtggagtcgaccgccagcatcttggcctctgtgaaggaacaagaggcccagtttgagaagctgacccgggcgctggaggaggaacggcgccacgtctcggcgcagctggaacgcgtccgggtctcaccacaagatgccaacccactccgactcggaccgatg

SEQ ID NO: 879 - DNA, 203 bp, Artificial sequence
  synthetic
ggcgcgccagtcctggctgggtccagatacctgtgttttgactctgttcctgtggatagctgcttggtctgaagttccagaaaggatcctgttcccagacaggtccctgagtactgacggtcacaggctgccgcgtctttcctgttgactcatgtttggttcctccagtgaaaattttacttagagaacgactcggaccgatg

SEQ ID NO: 880 - DNA, 203 bp, Artificial sequence
  synthetic
ggcgcgccagtcctcaatcagttgcgaccttctcttaacaggtggagtcgaccgccagcatcttggcctctgtgaaggaacaagaggcccagtttgagaagctgacccgggcgctggaggaggaacggcgccacgtctcggcgcagctggaacgcgtccgggtctcaccacaagatgccaacccactccgactcggaccgatg

SEQ ID NO: 881 - DNA, 203 bp, Artificial sequence
  synthetic
ggcgcgccagtcctcaaacgctaggtggctgggtccagccggagacccgcaccaaggaggagatcatcgagctcttggtccttgagcagtacctgaccatcatccctgaaaagctcaagccttgggtgcgagcaaaaaagccggagaactgtgagaagctcgtcactctgctggagaattacaaggagcgactcggaccgatg

SEQ ID NO: 882 - DNA, 203 bp, Artificial sequence
  synthetic
ggcgcgccagtccttcccttctgaggaaacgaaaccaacagcagtccaagctcagtcagcagaagagataaaagcaaacaggtctgggaggcagttctgttgccactctctctcctgtcaatgatggatctcagaaataccccagccaaatctctggacaagttcattgaagactatctcttgccagacgactcggaccgatg

SEQ ID NO: 883 - DNA, 203 bp, Artificial sequence
  synthetic
ggcgcgccagtccttcatttggtcccaagtatgactcagggttaggctgggtcctcaggctccgtgctgttggaaggaagtgggaggattccaggggagttctgggaccttttcaaactgaagagaggaggctggctgcatcatgggagaagagactattgggaagaagttacctgcaactacagcaacgactcggaccgatg

SEQ ID NO: 884 - DNA, 203 bp, Artificial sequence
  synthetic
ggcgcgccagtcctaaaagctccagaaacgttgactgggaccactggagacactgaagaaggcaggggcccttagagtcttggttgccaaacagatttgcagatcaaggagaacccaggagtttcaaagaagcgctagtaaggtctctgagatccttgcactagctacatcctcagggtaggaggaagcgactcggaccgatg

SEQ ID NO: 885 - DNA, 203 bp, Artificial sequence
  synthetic
ggcgcgccagtcctctggttttccagtcaggcggccggagggcagccctcaagaacggccctgaccgcccgcggggtgaggggccctttctgggcaggacccgccccttggtcccgcagagccttggtacttggacctgaaccttgctccgagagggagtcctcgcggacgtcagccaagattccagacgactcggaccgatg

SEQ ID NO: 886 - DNA, 203 bp, Artificial sequence
  synthetic
ggcgcgccagtcctaacggctccgaatctgccccagcggccgctgcgagacctcggcgccgacatcgcgacagcgaagcgctttgcacgccaggaaggtcccctctatgtgctgctgagccggtcctggacgcgacgagcccgccctcggtcttcggagcagaaatcgcaaaaacggaaggactggaacgactcggaccgatg

SEQ ID NO: 887 - DNA, 203 bp, Artificial sequence
  synthetic
ggcgcgccagtcctgggcagctccaccctgggagggactgtggcccaggtactgcccgggtgctactttatgggcagcagctcagttgagttagagtctggaagacctcagaagacctcctgtcctatgaggccctccccatggctttagagacgatctgccgaccctctgggagaaaatccagcaagcgactcggaccgatg

SEQ ID NO: 888 - DNA, 203 bp, Artificial sequence
  synthetic
ggcgcgccagtcctcaagagcaagcatgtaccgctgaaaacacaagataactgcataagtaatgactttcagtgcagattcatagctaacccataaactgctggggcaaaaatcatcttggaaggctctgaacctcagaaaggattcacaagacgatctgccgaccctctgggagaaaatccagcaagcgactcggaccgatg

SEQ ID NO: 889 - DNA, 203 bp, Artificial sequence
  synthetic
ggcgcgccagtcctggagctgccgggggaggggagttgtaagcagagcgctgagcctcgcagctcgcattcggagggaagctgacatccacaccaagtcgagacttccagggatgtggccggggagcagtcacatgctgtagctttcatgagcacaggcatcagtcaggcagatgtttgtcgactggacgactcggaccgatg

SEQ ID NO: 890 - DNA, 203 bp, Artificial sequence
  synthetic
ggcgcgccagtccttgtgacatttcctctggtggtttccacgaacccaggcgtcacccctcggtggagataaagtggagccacccagctccaccgtgtctcagcctggggtcggcctctgctgcttctggactcagtgaccctgggctgtcagggagcttctgagccttggttttcctgtctagtaagcgactcggaccgatg

SEQ ID NO: 891 - DNA, 203 bp, Artificial sequence
  synthetic
ggcgcgccagtcctggcggccaagatgtccgtgccttgccgctctcctaccccatgtcgctgaagcagatgagttggagcaggactcaggagggtactaggcccaggttttaggctgaacctaggaatgagtaatgagaggaggcagatcagctggaggaccagcccgagtccccagatgtcggcacacgactcggaccgatg

SEQ ID NO: 892 - DNA, 203 bp, Artificial sequence
  synthetic
ggcgcgccagtcctggggcgcggggagtcgaggcatttgcgcctgggcttcggagcgtagcgccagggcctgagcctttgaagcaggaggaggggaggagagagtggggctcctctatcgggaccccctccccatgtggatctgcccaggcggcggcggcggcggcggaggaggaggcgaccgagaagcgactcggaccgatg

SEQ ID NO: 893 - DNA, 203 bp, Artificial sequence
  synthetic
ggcgcgccagtcctccccggactctgcctgctcctgccatggtgccgtggccctgctgggcggatggagcaggatcccaagccgccccgtctgcggctctgggccctgatcccctggcttcccaggaagcagcggcccaggatcagccagacctctctgcctgtccctggccctggctctggcccccacgactcggaccgatg

SEQ ID NO: 894 - DNA, 203 bp, Artificial sequence
  synthetic
ggcgcgccagtcctaaattaacgtactatcctccttacttttgggtcgggccctccgggaagatggcggccgtgcaggcggccgaggtgaaagtggatggcagcgagccgaaactgagcaagaagtggtggtaatcattagttccagggtgctctgccatgttgacgcaagctgctgtaaggcttgttcgactcggaccgatg

SEQ ID NO: 895 - DNA, 203 bp, Artificial sequence
  synthetic
ggcgcgccagtcctgagctcacaatcttaaaatgtatctcctgtaatgctgggagtggggtacgagcttcctgctgtgggagggagggggacaggaagcctcgtaaggtctcaccaggtggcaagcacactggattagaagatgcaggaaagcaccttccagtctgaagatcatttaaagactcagtccgactcggaccgatg

SEQ ID NO: 896 - DNA, 203 bp, Artificial sequence
  synthetic
ggcgcgccagtcctgggactaacccctgcctggcgttccgggcggcagtgcctggtccagagtccagggactcggctgcctgcacgccccgaggcggaccccggctctgactgctcccctggccgcgggcttctcgactgggacgcggcgcgaggagggagcgcggcggccccgagtctccctgagcccgactcggaccgatg

SEQ ID NO: 897 - DNA, 203 bp, Artificial sequence
  synthetic
ggcgcgccagtcctgtcggccctggggctgttcaggcactcagggcaggggagaggagagactaccgtcctggagataacggttccacggaggcccaaggcgaaacggaaggatcctcatgtacaaaactgagcggaatggagctgtgagcacgcatcaggtcctcagccagcagagccacgttccttcgactcggaccgatg

SEQ ID NO: 898 - DNA, 203 bp, Artificial sequence
  synthetic
ggcgcgccagtcctaatcactgctgtgcagggcaggaaagctccatgcacatagcccagcaaagagcaacacagagctgaaaggaagactcagaggagagagataagtaaggaaagtagtgatggctctcatcccagacttggccatggaaacctggcttctcctggctgtcagcctggtgctcctctcgactcggaccgatg

SEQ ID NO: 899 - DNA, 203 bp, Artificial sequence
  synthetic
ggcgcgccagtccttcagcaccttggcgaagccttgggtttctttcttaaaggactgatttttagaactccacatttgagaacggccggtttgtgggcgatgctgaccttgaaagacagaaattttcagatttgaaactcaacggaccccaggatcacagtcaccttctatatagcaccatccccaggcgactcggaccgatg

SEQ ID NO: 900 - DNA, 203 bp, Artificial sequence
  synthetic
ggcgcgccagtcctagaagagcaggaaagatcccgaaaggaggaagaggtggcgaaaaatcaactgccctgctggatttgtctttctcagcaccttggcgaagccttgggtttctttcttaaaggactgatttttagaactccacatttgaggatcacagtcaccttctatatagcaccatccccaggcgactcggaccgatg

SEQ ID NO: 901 - DNA, 203 bp, Artificial sequence
  synthetic
ggcgcgccagtcctagtgtcctggttactgcagcggcagcaacagcaggtcctactatcgcctccctctagtctctgcttctctggatccctgaggagggcagaaggaagaaaacagcccaaagatgagagtgattcgcgtgggtacccgcaagagccagcttgctcgcatacagacggacagtgtggcgactcggaccgatg

SEQ ID NO: 902 - DNA, 203 bp, Artificial sequence
  synthetic
ggcgcgccagtcctgggcacttggagttgtcttaggactgatgtctgaattaactaaatgaacttgtctggtttgcagagtgctgatggcagagattggtgaggatttggataaatctgatgtgtcctcattaattttcctcatgaaggattacatgggccgaggcaagataagcaaggagaagagttcgactcggaccgatg

SEQ ID NO: 903 - DNA, 203 bp, Artificial sequence
  synthetic
ggcgcgccagtcctagccagtggacttagcccctgtttgctcctccgataactggggtgaccttggttaatattcaccagcagcctcccccgttgcccctctggatccactgcttaaatacggacgaggacagggccctgtctcctcagcttcaggcaccaccactgacctgggacagtgaatcgacacgactcggaccgatg

SEQ ID NO: 904 - DNA, 203 bp, Artificial sequence
  synthetic
ggcgcgccagtcctagcgcgcaggcgcggccggattccgggcagtgacgcgacggcgggccgcgcggcgcatttccgcctctggcgaatggctcgtctgtagtgcacgccgcgggcccagctgcgaccccggccccgcccccgggaccccggccatggacgaactgttccccctcatcttcccggcagcgactcggaccgatg

SEQ ID NO: 905 - DNA, 203 bp, Artificial sequence
  synthetic
ggcgcgccagtcctggaaggcctagccgctgctgctgccaggaattccaggttggaggggcggcaacctcctgccagccttcaggccactctcctgtgcctgccagaagagacagagcttgaggagagcttgaggagagcaggaaaggtgggacattgctgctgctgctcactcagttccacaggacacgactcggaccgatg

SEQ ID NO: 906 - DNA, 203 bp, Artificial sequence
  synthetic
ggcgcgccagtcctttgaggagagcttgaggagagcaggaaaggtgggacattgctgctgctgctcactcagttccacagcagcctcccccgttgcccctctggatccactgcttaaatacggacgaggacagggccctgtctcctcagcttcaggcaccaccactgacctgggacagtgaatcgacacgactcggaccgatg

SEQ ID NO: 907 - DNA, 203 bp, Artificial sequence
  synthetic
ggcgcgccagtccttcacgccaccccctccaccttggacacaggacgctgtggtttctgagccaggtacaatgactcctttcgcctcccccgttgcccctctggatccactgcttaaatacggacgaggacagggccctgtctcctcagcttcaggcaccaccactgacctgggacagtgaatcgacacgactcggaccgatg

SEQ ID NO: 908 - DNA, 203 bp, Artificial sequence
  synthetic
ggcgcgccagtcctcttcaggccactctcctgtgcctgccagaagagacagagcttgaggagagcttgaggagagcaggaaagcctcccccgttgcccctctggatccactgcttaaatacggacgaggacagggccctgtctcctcagcttcaggcaccaccactgacctgggacagtgaatcgacacgactcggaccgatg

SEQ ID NO: 909 - DNA, 203 bp, Artificial sequence
  synthetic
ggcgcgccagtcctccccccccaaaaaaaagccatccccccgctctgccccgtcgcacattcggcccccgcgactcggccagagcggcgctggcagaggagtgtccggcaggagggccaacgcccgctgttcggtttgcgacacgcagcagggaggtgggcggcagcgtcgccggcttccagacaccacgactcggaccgatg

SEQ ID NO: 910 - DNA, 203 bp, Artificial sequence
  synthetic
ggcgcgccagtcctagagcccgacctggttttcagccccagccccgccactgagtggctttgtgagtgcgggcaagtcactcagcctccctaggcctcagtgacttccctgaaagcaagaattccactttcttgctgttgtgatggtggtaagggaacgggcctggctctggcccctgacgcaggaaccgactcggaccgatg

SEQ ID NO: 911 - DNA, 203 bp, Artificial sequence
  synthetic
ggcgcgccagtcctacagtggacctaggaaaccctcagctcagagaacaaccctgcattccccacacaacacccacaatcagccactgcgggcgaggagggcacgaggccaggttcccaagagctcaggaacatggagctgatccaggacacctcccgcccgccactggagtacgtgaagggggtccccgactcggaccgatg

SEQ ID NO: 912 - DNA, 203 bp, Artificial sequence
  synthetic
ggcgcgccagtcctcttgtcgcctaggtccacccgagccccctcccccgggccgcccccgagcacgaagttggcgggagcctataaaagctggtgccggcgcgacccgcggacacacagtgcaggcgcccaagccgccgccgccagatcggtgccgattcctgccctgccccgaccgccagcgcgacccgactcggaccgatg

SEQ ID NO: 913 - DNA, 203 bp, Artificial sequence
  synthetic
ggcgcgccagtccttacatccagatgccgggaatgcactgacgcccattcctggaaactgggctcccactcagcccctgggagcagcagccgccagcccctcgggacctccatctccaccctgctgagccacccgggttgggccaggatcccggcaggctgatcccgtcctccactgagacctgaaaacgactcggaccgatg

SEQ ID NO: 914 - DNA, 203 bp, Artificial sequence
  synthetic
ggcgcgccagtcctatccacgaccaagctcttccacctgcggagctcgcttagtctgcacctcaaccgtgcggaaagtgactgccctgtttactgaggaaaaactggggctcagaaagataccatggagtagtttgaaacaggaacaaaatcttctgaaagctcggagcagaagcctttttggtcaaccgactcggaccgatg

SEQ ID NO: 915 - DNA, 203 bp, Artificial sequence
  synthetic
ggcgcgccagtcctcgcatctcccaggttagctgcgtgtccgggtgctaggctgcagacccgccgccatgacgctgcgcgcggccgtcttcgaccttgacggggtgctggcgctgccagcggtgttcggcgtcctcggccgcacggaggaggccctggcgctgcccagagggtgccactacccggcttcgactcggaccgatg

SEQ ID NO: 916 - DNA, 203 bp, Artificial sequence
  synthetic
ggcgcgccagtcctgagtaggcgcgagctaagcaggaggcggaggcggaggcggagggcgaggggcggggagcgccgcctggagcgcggcaggtcatattgaacattccagatacctatcattactcgatgctgttgataacagcaagatggctttgaactcagggtcaccaccagctattggaccttcgactcggaccgatg

SEQ ID NO: 917 - DNA, 203 bp, Artificial sequence
  synthetic
ggcgcgccagtcctagagagtgttcaagaaggaagtgtatcttcatacatcaccacacctgaaagcagcaccaaagcagccataaacaatatgtaaataaacagatgtggctgtattccagtacaactttacctacaaaaacaggcatcagaccagcttgccaacttgtggcatagactgtttgctaccgactcggaccgatg

SEQ ID NO: 918 - DNA, 203 bp, Artificial sequence
  synthetic
ggcgcgccagtcctctaaggcactgagcgtatcatgttaaagatgagcgggtggcagcgacagagccaaaatcagagctggaacctgaggagagagtgttcaagaaggaagtgtatcttcatacatcaccacacctgaaagcaggcatcagaccagcttgccaacttgtggcatagactgtttgctaccgactcggaccgatg

SEQ ID NO: 919 - DNA, 203 bp, Artificial sequence
  synthetic
ggcgcgccagtcctgggggaacgcgggagtcgggcccgacctgagccacgcgggcttggtgcccacctgtgcgcgccgcctgcgaagaaggaacggtctggggagaaggcgccgccggccgcccccgtccccaccgcggccgtcgctggagagttcgagccgcctagcgcccctggagctccccaacccgactcggaccgatg

SEQ ID NO: 920 - DNA, 203 bp, Artificial sequence
  synthetic
ggcgcgccagtcctactgccgcggccctgctgctcagggcacatgcctcccctccccaggccgcggcccagctgaccctcggggctcccccggcagcggacagggaagggttaaaggcccccggctccctgccccctgccctggggaacccctggccctgtggggacatgaactgtgtttgccgcctgcgactcggaccgatg

SEQ ID NO: 921 - DNA, 203 bp, Artificial sequence
  synthetic
ggcgcgccagtcctgaccggaggagcggggccgggagctgcgaggagccctccagacgtcgccgagcgcgagggcgggcgtgctcggagtggtcgctcgtcagccgccgcccctcagtctccgcacttgcaggtcccctccctctccgccgggacgcgggagagcccggctcgcggcgggggcggccacgactcggaccgatg

SEQ ID NO: 922 - DNA, 203 bp, Artificial sequence
  synthetic
ggcgcgccagtcctagggctggtgctggccctgcccacgcctagggctccggcgcgtcacgggcctcagctgggattcccgcgcccctcggacggccacgagactcggacatctttccaggaacagcgtgaggaggacagaagcacccaacaggactgctcaagccacctgcgaacactgctgctacccgactcggaccgatg

SEQ ID NO: 923 - DNA, 203 bp, Artificial sequence
  synthetic
ggcgcgccagtcctgtttctggacccggccaccccccgcgtccgcaccgccgcccccgagggacgagtgacagcggccgccgcgctcggtccagtcttcccggctggaaggtattgttgcagcatctggcagtgagactgaggatgaggacagcatggacattcccttggacctttcttcatccgctgcgactcggaccgatg

SEQ ID NO: 924 - DNA, 203 bp, Artificial sequence
  synthetic
ggcgcgccagtcctacatctcccggcaggctgcggaagggggtcgagtagaaggaccgccgctccggcctcccgcgacttctcgaaggtgggcaggtcccaccttgtggaggatggaggtgaccggggacgccggggtaccagaatctggcgagatccggactctaaagccgtgtctgctgcgccgcacgactcggaccgatg

SEQ ID NO: 925 - DNA, 203 bp, Artificial sequence
  synthetic
ggcgcgccagtcctggctgtttcctggccgaggtgggtcggtagtagcgatggcgggtctgactgacttgcagcggctacaggcccgagtggaagagctggagcgctgggtgtacgggccgggcggggcgcgcggctcacggaaggtggctgacggcctggtcaaggtgcaggtggctttggggaacacgactcggaccgatg

SEQ ID NO: 926 - DNA, 203 bp, Artificial sequence
  synthetic
ggcgcgccagtccttcgtttacctcttcattctactctaaaggcatcgttattaggaaaatcctgttgtgaataagaaggattccacagatcacataccagagcggttttgcctcagctgctctcaactttgtaatcttgtgaagaagctgacaagcttggctgattgcagtgcactatgaggactgacgactcggaccgatg

SEQ ID NO: 927 - DNA, 203 bp, Artificial sequence
  synthetic
ggcgcgccagtcctaggtactctgtgtcatttttgatactgtaggtatcttatttcatttatctttattcttaatgtacgaattcataatatttgattcagaacagatttatcactaattaacagagtgtcaattatgctaacatctcatttactgattttaatttaaaacagtttttgttaacatgccgactcggaccgatg

SEQ ID NO: 928 - DNA, 203 bp, Artificial sequence
  synthetic
ggcgcgccagtcctacaatcctttgcggtggttcaagatggcggcgcccagtggcactgtgagcgattcggaaagtagtaacagcagtagcgatgcggaggagctggagcggtgccgcgaggcggcaatgccggcttggggcttggagcaacgcccgcacgtggcagggaagccaagagccggtgctgcgactcggaccgatg

SEQ ID NO: 929 - DNA, 203 bp, Artificial sequence
  synthetic
ggcgcgccagtcctggctgctatagagccgggtgagagagcgagcgcccgtcggcgggtgtcgagggcgggttgcctcgcgctgacccttcccgccctccttctcgtcacacaccaggtccccgcggaagccgcggtgtcggcgccatggcggagctgacggctcttgagagtctcatcgagatgggccgactcggaccgatg

SEQ ID NO: 930 - DNA, 203 bp, Artificial sequence
  synthetic
ggcgcgccagtcctatttataagcaatagtagcttatttggctcacagttctggaggctgagaagatcgtgaggctgcatctggcaagggccttcttgctgcttcataacatggcagaagacatcatgcgggtgtgtgtctggggaagagacttacagaagtggagttgctgagtcaaagatctaacccgactcggaccgatg

SEQ ID NO: 931 - DNA, 203 bp, Artificial sequence
  synthetic
ggcgcgccagtcctatgtctggccgtggtaaaggtggaaaaggtttgggtaagggaggagctaagcgtcatcgcaaggttttgcgcgataacatccagggcatcactaagccagctatccggcgccttgctcgtcgcggcggtgtcaagcgaatttctggccttatctatgaggagactcgtggtgttcgactcggaccgatg

SEQ ID NO: 932 - DNA, 203 bp, Artificial sequence
  synthetic
ggcgcgccagtcctgtttatgaccgccgcagccaactcctggccggagctggagacgcagcgagcgatcggccggcctcgaacccccacagctggagggcgaggccagctgtacccggccccagtgccctttcgcggccacaagcggccgtcctcctggtccggtgctccggcgcctgatctaggttccgactcggaccgatg

SEQ ID NO: 933 - DNA, 203 bp, Artificial sequence
  synthetic
ggcgcgccagtcctggagaggccgaggcgtagcctaagcgtgggattccgcgcgtgcgctcggctccgcctggtgcggccgcggccgggagggactggattatgtcggccccgtttgaggagcggagtggggtggtaccgtgcgggaccccgtggggccagtggtaccagaccttggaggaggtgttccgactcggaccgatg

SEQ ID NO: 934 - DNA, 203 bp, Artificial sequence
  synthetic
ggcgcgccagtcctctcatctttgtcagtgcacaaaatggcgccctacagcctactggtgactcggctgcagaaagctctgggtgtgcggcagtaccatgtggcctcagtcctgtgccaacgggccaaggtggcgatgagccactttgagcccaacgagtacatccattatgacctgctagagaagaacgactcggaccgatg

SEQ ID NO: 935 - DNA, 203 bp, Artificial sequence
  synthetic
ggcgcgccagtcctgagcggtgccgcaccggccgcgggcgcagggagtattatgggctgtgggtgccgctgagcaagatggagctgtctgcagtgggcgagcgggtcttcgcggccgaatccatcatcaaacggcggatccgaaagggacgcatcgagtacctggtgaaatggaaggggtgggcgatccgactcggaccgatg

SEQ ID NO: 936 - DNA, 203 bp, Artificial sequence
  synthetic
ggcgcgccagtcctcctcttttccgtggcgcctcggaggcgttcagctgcttcaagatgaagctgaacatctccttcccagccactggctgccagaaactcattgaagtggacgatgaacgcaaacttcgtactttctatgagaagcgtatggccacagaagttgctgctgacgctctgggtgaagaacgactcggaccgatg

SEQ ID NO: 937 - DNA, 203 bp, Artificial sequence
  synthetic
ggcgcgccagtcctgctccgctgaatccgcccgcgcgtcgccgccgtcgtcgccgccccccgtcccggcccccctgggttccctcagcccagccctgtccagcccggttcccgggaggatgaagttcgtgtacaaagaagagcatccgttcgagaagcgccgctctgagggcgagaagatccgaaagacgactcggaccgatg

SEQ ID NO: 938 - DNA, 203 bp, Artificial sequence
  synthetic
ggcgcgccagtcctgagcgcagagcggtttggtcgttcgttgggcggtgctggtttttcgctcgtcgactgcggctcttcctcgggcagcggaagcggcgcggcggtcggagaagtggcctaaaacttcggcgttgggtgaaagaaaatggcccgaaccaagcagactgctcgtaagtccaccggtggcgactcggaccgatg

SEQ ID NO: 939 - DNA, 203 bp, Artificial sequence
  synthetic
ggcgcgccagtccttccggttccggcctggcgagagtttgtgcggcgacatgaaactgcttacccacaatctgctgagctcgcatgtgcggggggtggggtcccgtggcttccccctgcgcctccaggccaccgaggtccgtatctgccctgtggaattcaaccccaacttcgtggcgcgtatgataccgactcggaccgatg

SEQ ID NO: 940 - DNA, 203 bp, Artificial sequence
  synthetic
ggcgcgccagtcctataagctgggtcccgatgccgcgagcggaatctcggcgctcccggaagtggcctgaaggccgcgcgccagtcccgagcagtgctcgctcctgctcggggcgctgcggccccgggcgtcgccatgaccagtgagctggacatcttcgtggggaacacgacccttatcgacgaggacgactcggaccgatg

SEQ ID NO: 941 - DNA, 203 bp, Artificial sequence
  synthetic
ggcgcgccagtcctagtgaaacagaaggggaggtgcagtttcagaacccagccagcctctctcttgctgcctagcctcctgccggcctcatcttcgcccagccaaccccgcctggagccctatggccaactgcgagttcagcccggtgtccggggacaaaccctgctgccggctctctaggagagccccgactcggaccgatg

SEQ ID NO: 942 - DNA, 203 bp, Artificial sequence
  synthetic
ggcgcgccagtcctgggcacgagggcagagccagttcctagcgcagagccgcgcccgccatgagggagatcgtgcacatccaggcgggccagtgcgggaaccagatcggcaccaagttttgggaagtgatcagcgatgagcacggcatcgacccggccggaggctacgtgggagactcggcgctgcagcgactcggaccgatg

SEQ ID NO: 943 - DNA, 203 bp, Artificial sequence
  synthetic
ggcgcgccagtcctggtggcgggaagaggaggcgcgagaatggaggtggaggccgtctgtggtggcgcgggcgaggtggaggcccaggactctgaccctgcccctgccttcagcaaggcccccggcagcgccggccactacgaactgccgtgggttgaaaaatataggccagtaaagctgaatgaaatcgactcggaccgatg

SEQ ID NO: 944 - DNA, 203 bp, Artificial sequence
  synthetic
ggcgcgccagtcctgggcgcagagctggcgctctagcccacggagttggttaactcctctcaccggcccctggaaagggttccaagtcctttagtacccgacgctgtctgggaattccgggcgtttcggctccttggtcgcagaggcaggaggcacccgaccgcatgtctgtcatggacctcgccaatcgactcggaccgatg

SEQ ID NO: 945 - DNA, 203 bp, Artificial sequence
  synthetic
ggcgcgccagtcctgccacttctcttcccttcattcttcgccaggctctctgctgactcaagttcttcagttcacgatcttctagttgcagcgatgagtgcacgagtgagatcaagatccagaggaagaggagatggtcaggaggctcccgatgtggttgcattcgtggctcccggtgaatctcagcacgactcggaccgatg

SEQ ID NO: 946 - DNA, 203 bp, Artificial sequence
  synthetic
ggcgcgccagtcctctgctccttccgcgggtttccgactccctgccctagattttctgcttagcgacttggggtcccctctcgtttgcttctggtaggagtcgcaatcccagcagcaatagcccagaagaggacacggttcccgtaccgaagggttcagtaccagcagcccgaccatcacgcggcgggcgactcggaccgatg

SEQ ID NO: 947 - DNA, 203 bp, Artificial sequence
  synthetic
ggcgcgccagtcctgcctggcgggagtcttgtctgagctggcaccaccacacggcccacgacatcttcgcagggaagcctgtggaccctctgccaggctccacaagaggtcaggacagtgcagtgtgttcacaaggccagtttctgatcgtccgccccgaggctgaggaccagtaggcagctcccaagcgactcggaccgatg

SEQ ID NO: 948 - DNA, 203 bp, Artificial sequence
  synthetic
ggcgcgccagtcctcgttgctgcccggaggctcctacgccacggcccgtcgggcccggcgccggaagtgagctgttccgaggcgccgccgggagctgccacgtccgagacctggagcagccaccgccgcaatcatggtgtcagtaattaacactgtggatacctcccatgaggacatgattcacgacgcgactcggaccgatg

SEQ ID NO: 949 - DNA, 203 bp, Artificial sequence
  synthetic
ggcgcgccagtccttgagccggccgcacgcggaggatcctaaggagcagctctgttgcgacataggccgagcagcgaggcccagctccctgaaacaacagtaacctacccctgtgggtcatcatcatgccctccgacctggccaagaagaaggcagccaaaaagaaggaggctgccaaagctcgacagcgactcggaccgatg

SEQ ID NO: 950 - DNA, 203 bp, Artificial sequence
  synthetic
ggcgcgccagtcctcacgaagcgccgctgggtctgggtgcccggaggcagcagcgttcgcggagttcgcccgctggcccccgatcaccatgtcggctttcgacaccaaccccttcgcggacccagtggatgtaaaccccttccaggatccctctgtgacccagctgaccaacgccccgcagggcggcccgactcggaccgatg

SEQ ID NO: 951 - DNA, 203 bp, Artificial sequence
  synthetic
ggcgcgccagtcctgcatttggggctgaagttccctgtgggaggctgttttctgagggagctgagtgtttacagccactcagccctgctctgctcagctgaagcagaaaacagagaccttttgcattactttggttcaagagcaagacaggaggcgactgcatgagaccatggctgagacacctagtccgactcggaccgatg

SEQ ID NO: 952 - DNA, 203 bp, Artificial sequence
  synthetic
ggcgcgccagtcctcgcggagggagggccctgtcccctgtccctttaaggaggagggccaaacgccggcctagagtgcggcgtagcccccacccgccgtgccctcaccccagagcagctgcagcctcagccggccgcccctccgccagccaagtccgccgctctgacccccggcagcaagtcgccacccgactcggaccgatg

SEQ ID NO: 953 - DNA, 203 bp, Artificial sequence
  synthetic
ggcgcgccagtcctggacgctgaggcccgggagaggcagctggagaagggcctggtctttctcaacggcaaattggggaggatcatttaggatcctccaagggaaagaggacaaaggtgccttctgtagacactcctgctctcttccatccccatcttacagatgtattaagaagcctcagatgagcacgactcggaccgatg

SEQ ID NO: 954 - DNA, 203 bp, Artificial sequence
  synthetic
ggcgcgccagtcctgcggcatgggcagtatccgccgccatcctcttccgtgaggcgcgctgagaccgggaccggccctcctgagaggatgccggtgcgggcgcccgcggagagggacccgtcgccatgggccgtgtgatccgtggacagaggaagggcgccgggtctgtgttccgcgcgcacgtgaagcgactcggaccgatg

SEQ ID NO: 955 - DNA, 203 bp, Artificial sequence
  synthetic
ggcgcgccagtcctcctttcctcagctgccgccaaggtgctcggtccttccgaggaagctaaggctgcgttggggtgaggccctcacttcatccggcgactagcaccgcgtccggcagcgccagccctacactcgcccgcgccatggcctctgtctccgagctcgcctgcatctactcggccctcattcgactcggaccgatg

SEQ ID NO: 956 - DNA, 203 bp, Artificial sequence
  synthetic
ggcgcgccagtcctccggccccaggcggtgcttctccccaccaccgcccagctcagctcagcccagcccagcccactctgcccttagaggcccttctccccaaagacgcactccagaagtctcgccctcgtgcggctgaggagcctgggatcccagacctgaacaagtgaaacccccgcccctgaagacgactcggaccgatg

SEQ ID NO: 957 - DNA, 203 bp, Artificial sequence
  synthetic
ggcgcgccagtcctcgaaaaagaagcagtcctgggctgtacccggcgcagctgggagcggctgcttcctccggggtcgtatctccgcccggcatggggctgctggacctttgcgaggaagtgttcggcaccgccgacctttaccgggtgctgggcgtgcgacgcgaggcctccgacggcgaggtccgacgactcggaccgatg

SEQ ID NO: 958 - DNA, 203 bp, Artificial sequence
  synthetic
ggcgcgccagtcctgatccctgagcgtgtggcagcagtgcggtcgtggtccctccctatgcagcctggtttctagcgtgacacgcccttgacttgaggaccatgaaccgcagccgccaggtgacgtgcgtggcctgggtccgctgcggcgtggccaaagagacaccagacaaggtagagctgagtaaacgactcggaccgatg

SEQ ID NO: 959 - DNA, 203 bp, Artificial sequence
  synthetic
ggcgcgccagtcctcgccgccgtggtagcagcctcagccgtttctggagtctcgggcccacagtcaccgccgcttacctgcgcctcctcgagcctccggagtccccgtccgcccgcacaggccggttcgccgtctgcgtctcccccacgccgcctcgcctgccgccgcgctcgtccctccgggccgaccgactcggaccgatg

SEQ ID NO: 960 - DNA, 203 bp, Artificial sequence
  synthetic
ggcgcgccagtccttccaggttcacacaactggaacccatctccaggaacaaacagctggaacccatctcccgttgaagggaaactgccagatttttgtaagattcttcctcctgggcacctctaagatactgatggctctgcagaggacccattcattgcttctgcttttgctgctgaccctgctggcgactcggaccgatg

SEQ ID NO: 961 - DNA, 203 bp, Artificial sequence
  synthetic
ggcgcgccagtcctacagagctccctcccaggcccgcgaacttggccattcagccgccgctgtccccgctgcgcgccctcgcgcctctgcctgagaagccaggcgctgttcccccaccccagaagaggatggcaaaggtggctaaggacctcaacccaggagttaaaaagatgtccctgggccagctgcgactcggaccgatg

SEQ ID NO: 962 - DNA, 203 bp, Artificial sequence
  synthetic
ggcgcgccagtcctcgacgctgagatgggggcggcggcggcggaagcggatcgcactctctttgtgggcaaccttgaaacgaaagtgaccgaggagctccttttcgagcttttccaccaggctgggccagtaataaaggtgaaaattccaaaagataaggatggtaaaccaaagcagtttgcgtttgtcgactcggaccgatg

SEQ ID NO: 963 - DNA, 203 bp, Artificial sequence
  synthetic
ggcgcgccagtccttcgcgaggtggcgatcgctgagaggcaggagggccgaggcgggcctgggaggcggcccggaggtggggcgccgctggggccggcccgcacgggcttcatctgagggcgcacggcccgcgaccgagcgtgcggactggcctcccaagcgtggggcgacaagctgccggagctgcacgactcggaccgatg

SEQ ID NO: 964 - DNA, 203 bp, Artificial sequence
  synthetic
ggcgcgccagtcctccctctaggcagcggaagtgcagcttgctttacatccgtcctccccgcctcgcagagttgggagaaggcagggtggggggtgtggaaaaataaaaggaaaagtccttgcaccatgtagatcagcgtcccccactttggcatcccggccggccggggacctcccagtctgcggcccgactcggaccgatg

SEQ ID NO: 965 - DNA, 203 bp, Artificial sequence
  synthetic
ggcgcgccagtcctgggcaaggctgggccgggaagggcgtgggttgaggagaggctccagacccgcacgccgcgcgcacagagctctcagcgccgctcccagccacagcctcccgcgcctcgctcagctccaacatggcaaaaatctccagccctacagagactgagcggtgcatcgagtccctgattcgactcggaccgatg

SEQ ID NO: 966 - DNA, 203 bp, Artificial sequence
  synthetic
ggcgcgccagtcctggagcgaaggtaggaggcagggcttgcctcactggccaccctcccaaccccaagagcccagccccatggtccccgccgccggcgcgctgctgtgggtcctgctgctgaatctgggtccccgggcggcgggggcccaaggcctgacccagactccgaccgaaatgcagcgggtcacgactcggaccgatg

SEQ ID NO: 967 - DNA, 203 bp, Artificial sequence
  synthetic
ggcgcgccagtcctaggagctgagtgggccccggccctcagcccgtcccgccggacccgctttcctcaactctccatcttctcctgccgaccgagatcgccgaggcggcctcaggctccctagccccttccccgtcccttccccgcccccgtccccgccccgggggccgccgccacccgcctcccacccgactcggaccgatg

SEQ ID NO: 968 - DNA, 203 bp, Artificial sequence
  synthetic
ggcgcgccagtcctgcgccgagacccgctcctgcagtattagttcttgcagctggtggtggcggctgaggcggcatggatctcagcgagctggagagagacaatacaggccgctgtcgcctgagttcgcctgtgcccgcggtgtgccgcaaggagccttgcgtcctgggcgtcgatgaggcgggcaggcgactcggaccgatg

SEQ ID NO: 969 - DNA, 203 bp, Artificial sequence
  synthetic
ggcgcgccagtcctgtgatgcgtagttccggctgccggttgacatgaagaagcagcagcggctagggcggcggtagctgcaggggtcggggattgcagcgggcctcggggctaagagcgcgacgcggcctagagcggcagacggcgcagtgggccgagaaggaggcgcagcagccgccctggcccgtccgactcggaccgatg

SEQ ID NO: 970 - DNA, 203 bp, Artificial sequence
  synthetic
ggcgcgccagtccttcccacccccagcctggggcctctgggagccttggtcctgagcagccaacacaccagcccagacagctgcaagtcaccatggacgctgaaggcctggcgctgctgctgccgcccgtcaccctggcagccctggtggacagctggctccgagaggactgcccagggctcaactaccgactcggaccgatg

SEQ ID NO: 971 - DNA, 203 bp, Artificial sequence
  synthetic
ggcgcgccagtcctcgcgtcgggctgcaggagaagatggcggtctccacaggagttaaagttcctcgtaattttcgcttgttggaagaacttgaagaaggacaaaaaggagtaggcgacggtacagttagctggggccttgaagatgatgaagatatgacacttacaaggtggacaggcatgattattcgactcggaccgatg

SEQ ID NO: 972 - DNA, 203 bp, Artificial sequence
  synthetic
ggcgcgccagtcctgatccacaagtatatcctgagttcacttacctcttgggtggcagcacacatcggtccaccctgcttgtccagaaactgttaagagttggaagttcagaagaaaaaaaaaaggaattgaatgatctggcacgggaccctccagcacagtgttcagcaggtcctgttggagatgatcgactcggaccgatg

SEQ ID NO: 973 - DNA, 203 bp, Artificial sequence
  synthetic
ggcgcgccagtcctgactgtctacattagtaattcccaacttgggtccgaaagtgaacttttgctgaagcgaagtagctaaccgcttccatgtgcaaggcaggttccagacttcggggtgaggaggattaactgaaggaccccaggggaaccggtgtgctcactgatccgcctccagggccaccgccacgactcggaccgatg

SEQ ID NO: 974 - DNA, 203 bp, Artificial sequence
  synthetic
ggcgcgccagtcctacgcggtgccgcggggcgggagtagaggcggagggaggggacacgggctcattgcggtgtgcgccctgcactctgtccctcactcgccgccgacgacctgtctcgccgagcgcacgccttgccgccgccccgcagaaatgcttcggttacccacagtctttcgccagatgagaccgactcggaccgatg

SEQ ID NO: 975 - DNA, 203 bp, Artificial sequence
  synthetic
ggcgcgccagtcctcatgcctgaaccagctaagtcagctcctgctccgaagaagggttccaagaaggctgtgaccaaggcgcagaagaaggatggcaagaagcgcaagcgcagtcgtaaggagagctactccgtgtatgtgtacaaggtgctaaaacaggttcaccccgatactggcatctcatccaacgactcggaccgatg

SEQ ID NO: 976 - DNA, 203 bp, Artificial sequence
  synthetic
ggcgcgccagtcctgacgtgtctttcaggaagaggagctggtgagaagacagcgaaatggcgcctccggcccccggcccggcctccggcggctccggggaggtagacgagctgttcgacgtaaagaacgccttctacatcggcagctaccagcagtgcataaacgaggcgcagcgggtgaagctatcacgactcggaccgatg

SEQ ID NO: 977 - DNA, 203 bp, Artificial sequence
  synthetic
ggcgcgccagtcctggggcggtgcagaggcggcaggaagatggagttggggagttgcctggagggcgggagggaggcggcggaggaagagggcgagcctgaggtgaaaaagcggcgacttctgtgtgtggagtttgcctcggtcgcaagctgcgatgccgcagtggctcagtgcttcctggccgagaacgactcggaccgatg

SEQ ID NO: 978 - DNA, 203 bp, Artificial sequence
  synthetic
ggcgcgccagtcctgccctggatccggcgtcagggcgaccgggcggacgaggtggagccagagtctgtcaggcgggttggtgaagggcgcggggccgggcacggcgttgggagtgcgcggcagggaccggccaggcgggctgcaggcacctcagagcccgggacaccccctcaacgtccgcaggcgcgcgactcggaccgatg

SEQ ID NO: 979 - DNA, 203 bp, Artificial sequence
  synthetic
ggcgcgccagtcctaggcggagctgggtgcgagcgccctaccgctttcgctttcccttcgcggtgcccactccactccttgtgcggcgctaggccccccgtcccggtcatggccatgctcagggtccagcccgaggcccaagccaaggtggatgtgtttcgtgaagacctctgtaccaagacagagaacgactcggaccgatg

SEQ ID NO: 980 - DNA, 203 bp, Artificial sequence
  synthetic
ggcgcgccagtcctagcaacggggtgcggcagggtggggaacgcgggagcggggccagctcccaggaaagctggtctgcgagcggcccctgcccggctcccaggtccctgcgcgaccccgcccttcccgagaccccagccgggctgccgcccgcgtcccggaagctccagcctgaaccatgtttttcacgactcggaccgatg

SEQ ID NO: 981 - DNA, 203 bp, Artificial sequence
  synthetic
ggcgcgccagtcctctctttccagccagcgccgagcgatgggcatctctcgggacaactggcacaagcgccgcaaaaccgggggcaagagaaagccctaccacaagaagcggaagtatgagttggggcgcccagctgccaacaccaagattggcccccgccgcatccacacagtccgtgtgcggggagcgactcggaccgatg

SEQ ID NO: 982 - DNA, 203 bp, Artificial sequence
  synthetic
ggcgcgccagtcctcgggcgggtgtggccaggggtgtgggtctgtgagggaccggtcggaagggcgtcgcgcggcctcgggtgacatgcggggggcggcgagcgcgagtgtccgcgagccgacgccgctcccgggtagaggcgccccccgcacaaagccccgggcgggccgaggcccgactgtagggacgactcggaccgatg

SEQ ID NO: 983 - DNA, 203 bp, Artificial sequence
  synthetic
ggcgcgccagtccttccgcttccgtccacttggcgagtgagacgctgatgggaggatggacgtactggtgtctgagtgctccgcgcggctgctgcagcaggaagaagagattaaatctctgactgctgaaattgaccggttgaaaaactgtggctgtttaggagcttctccaaatttggagcagttaccgactcggaccgatg

SEQ ID NO: 984 - DNA, 203 bp, Artificial sequence
  synthetic
ggcgcgccagtcctgggtagccgactggggtctcctggcgacgaccatggcgggggatgtgggcggtcgcagctgcacggactcggaactgctgctgcacccggagctgctgtcccaggagttccttctcctcactctggagcagaagaacatagctgttgaaactgatgtaagagtaaacaaagacacgactcggaccgatg

SEQ ID NO: 985 - DNA, 203 bp, Artificial sequence
  synthetic
ggcgcgccagtcctgcagaggccgagtccgtcactggaagccgagaggagaggacagctggttgtgggagagttcccccgcctcagactcctggttttttccaggagacacactgagctgagactcacttttctcttcctgaatttgaaccaccgtttccatcgtctcgtagtccgacgcctggggcgcgactcggaccgatg

SEQ ID NO: 986 - DNA, 203 bp, Artificial sequence
  synthetic
ggcgcgccagtcctgcagaagcgttccgtgcgtgcaagtgctgcgaaccacgtgggtcccgggcgcgtttcgggtgctggcggctgcagccggagttcaaacctaagcagctggaaggaaccatggccaactgtgagcgtaccttcattgcgatcaaaccagatggggtccagcggggtcttgtgggacgactcggaccgatg

SEQ ID NO: 987 - DNA, 203 bp, Artificial sequence
  synthetic
ggcgcgccagtcctgcggaggcaggaggagcagtctcattgttccgggagccgtcaccacagtaggtccctcggctcagtcggcccagcccctctcagtcctccccaacccccacaaccgcccgcggctctgagacgcggccccggcggcggcggcagcagctgcagcatcatctccaccctccagcccgactcggaccgatg

SEQ ID NO: 988 - DNA, 203 bp, Artificial sequence
  synthetic
ggcgcgccagtcctcgctctcctttcgttgcctgatcgccgccatcatgggtcgcatgcatgctcccgggaagggcctgtcccagtcggctttaccctatcgacgcagcgtccccacttggttgaagttgacatctgacgacgtgaaggagcagatttacaaactggccaagaagggccttactccttcgactcggaccgatg

SEQ ID NO: 989 - DNA, 203 bp, Artificial sequence
  synthetic
ggcgcgccagtcctgagaggcgcccaggcggcggcggcggcggcccagcttcttctttcctcgcacagccaggcggcccctgctcgagtcccgcgtcgccatggccgcggttcccgagttgctgcagcagcaggaggaggaccgcagcaagctgagatctgtatctgtggacctgaatgttgatccctcgactcggaccgatg

SEQ ID NO: 990 - DNA, 203 bp, Artificial sequence
  synthetic
ggcgcgccagtcctgacggagggaggactcgggacagggaattggccctgggagaaaacgcgcggggggcgtccgagacgccccgtgaaagccgtgccgacccttgggaggactgacaggtctagagacacgcgctgtctgttgtggtgggcctcccgggaataagtgaggggctctgtgtttcgaggcgactcggaccgatg

SEQ ID NO: 991 - DNA, 203 bp, Artificial sequence
  synthetic
ggcgcgccagtcctccgtgagtctgaccttaggtgtctcgtgtctggggttgatccgagctgtcgccgccgccgccgcaatgggcaaaacggccaactctccgggttcgggagcccgacccgacccggtgcggagcttcaatcgctggaagaaaaaacacagccataggcagaacaaaaagaagcagtcgactcggaccgatg

SEQ ID NO: 992 - DNA, 203 bp, Artificial sequence
  synthetic
ggcgcgccagtcctagctgaacagaggccatgccggggcactccgaggcctgagacgaccacgcctgtgccgctgaggaccttcatcagggctccgtccacttggcccgcttggctgtccaatcacactccagtgtcaaccactggcacccagcagccaagagaggtgtggcgtggccctggggacgccgactcggaccgatg

SEQ ID NO: 993 - DNA, 203 bp, Artificial sequence
  synthetic
ggcgcgccagtcctcagaggtcagacggtctagcgctgcgtgggccatggtgcagctccgaccgcgagcgtctcgcgccccggcgtcggcggaggcgatggtggacgagggccagctggcctcggaggaggaggaggcggagcacgggctgttgctcgggcagcccagcagcggcgcggccgccgagccgactcggaccgatg

SEQ ID NO: 994 - DNA, 203 bp, Artificial sequence
  synthetic
ggcgcgccagtcctgggctgcttggcagccaccggcctgcaactcaggaacccctccagaggccatggacaggctgccccgctgacggccagggtgaagcatgtgaggagccgccccggagccaagcaggagggaagaggctttcatagattctattcacaaagaataaccaccattttgcaaggacccgactcggaccgatg

SEQ ID NO: 995 - DNA, 203 bp, Artificial sequence
  synthetic
ggcgcgccagtcctggagcctggaggactagcgaggaggagttgagagaacggagcggacgccatggcgaccaacatcgagcagatttttaggtctttcgtggtcagtaaattccgggaaattcaacaggagctttccagtggaaggaatgaaggccagctgaatggtgaaacaaatacacccattgacgactcggaccgatg

SEQ ID NO: 996 - DNA, 203 bp, Artificial sequence
  synthetic
ggcgcgccagtcctaaacgacgctagctgcccacccctcttagttttccgcctccgacttccctaagggcatttccggttccggctgcgggccggtgaagatatggcggcgtctgcgtctgcagctgcaggggaggaggactgggtccttccctctgaagttgaagtattggagtccatctatctagacgactcggaccgatg

SEQ ID NO: 997 - DNA, 203 bp, Artificial sequence
  synthetic
ggcgcgccagtcctgcgcactcagggtctgaggcagctagtagccggagggtcaccatgaagttcaatcccttcgttacctgggaccgcagtaaaaaccgcaaacgtcacttcaatgccccctcacacgtgcgcaggaagatcatgtcatccccgctctccaaggagctgcggcagaagtacaatgtccgactcggaccgatg

SEQ ID NO: 998 - DNA, 203 bp, Artificial sequence
  synthetic
ggcgcgccagtcctctctcttccacaggaggcctacacgccgccgcttgtgctgcagccatgtctctagtgatccctgaaaagttccagcatattttgcgagtactcaacaccaacatcgatgggcggcggaaaatagcctttgccatcactgccattaagggtgtgggccgaagatatgctcatgtgcgactcggaccgatg

SEQ ID NO: 999 - DNA, 203 bp, Artificial sequence
  synthetic
ggcgcgccagtcctggactttagattcctggaacgggacgtcaggccgtattccggatccctagatcccgtgggagattctccgattccgaacggattccagatcccaagattcctgatctgccggcccaggctcctgccccgcccccggttcccagtgcgcggcgccccgcgcctgagcgcccccgccgactcggaccgatg

SEQ ID NO: 1000 - DNA, 203 bp, Artificial sequence
  synthetic
ggcgcgccagtcctaatccagaggcaggggagggacggtgcaggcgcagagtattgggtttggctggcctcgatttaaagagacagaagctgtcggggtcctggaagacggtccccaataccctccccccaagtccttgggaccacttgggtccccagagctggggagatggtttgtggcggctttgccgactcggaccgatg

SEQ ID NO: 1001 - DNA, 203 bp, Artificial sequence
  synthetic
ggcgcgccagtcctcccctcccttagcgggggcgcgcggcgctgaggaccgcacggaaacggggaagtcaggtggccgctgccgccgccgccgccgcggtttgtcgccagaaggaagatggcggatctggaggagcagttgtctgatgaagagaaggtgcgtatagcagcaaaattcatcattcatgccgactcggaccgatg

SEQ ID NO: 1002 - DNA, 203 bp, Artificial sequence
  synthetic
ggcgcgccagtcctatgtctggtcgtggcaaacaaggaggcaaggcccgcgccaaggccaagtcgcgctcgtcccgcgctggcctccagttcccggtagggcgagtgcaccgcttgctgcgcaaaggcaactacgcggagcgggtgggggcccgcgcgcccgtctacatggcggcggtcctcgagtaccgactcggaccgatg

SEQ ID NO: 1003 - DNA, 203 bp, Artificial sequence
  synthetic
ggcgcgccagtccttctcttgcttcaacagtgtttggacggaacagatccggggactctcttccagcctccgaccgccctccgatttcctctccgcttgcaacctccgggaccatcttctcggccatctcctgcttctgggacctgccagcaccgtttttgtggttagctccttcttgccaaccaacccgactcggaccgatg

SEQ ID NO: 1004 - DNA, 203 bp, Artificial sequence
  synthetic
ggcgcgccagtccttcagcggaagtgagggcggttgaggctgggcggcccaaggtggaaggaggggccgtgaggtgagagagtccgggagcccgagcttgagatggcctgatatgaaggagtcacgcctcccgcctcccggagctgcccagtggctgccttgtccttcaagtgcaggagctggttcaacgactcggaccgatg

SEQ ID NO: 1005 - DNA, 203 bp, Artificial sequence
  synthetic
ggcgcgccagtcctgcccggaaacggaagtctcgttctttttcgtccttttccccggttgctgcttgctgtgagtgtctctagggtgatacgtgggtgagaaaggtcctggtccgcgccagagcccagcgcgcctcgtcgccatgcctcggaaaattgaggaaatcaaggacttcctgctcacagccccgactcggaccgatg

SEQ ID NO: 1006 - DNA, 203 bp, Artificial sequence
  synthetic
ggcgcgccagtcctcagaggcagcggttggaggcgcggtgggtgtctgcgggggtctcgcggggcggctgcggtgtttcaccgggaaaggctcgaggagagcgcggctcacgagagataacccagctgtgctccctggaaccttcaatttcaaggcctccctgcctctactaggcgccttagctcactcgactcggaccgatg

SEQ ID NO: 1007 - DNA, 203 bp, Artificial sequence
  synthetic
ggcgcgccagtcctgcggaaaccggaagcggcggctgtccgcggtgccggctgggggcggagaggcggcggtgggctccctggggtgtgtgagcccggtgatggagccgggcccgacagccgcgcagcggaggtgttcgttgccgccgtggctgccgctggggctgctgctgtggtcggggctggccccgactcggaccgatg

SEQ ID NO: 1008 - DNA, 203 bp, Artificial sequence
  synthetic
ggcgcgccagtccttacatcttttagtgcgtatgttctgtccacccagctactggttcatttgagtagatcggagtcagatgagtacatgtttacgggaggcgcttggttacgggatccagataggaatctttatctgagctgcttgtcagtttgttcgtctgtccctaggtctgtctgctatcagctcgactcggaccgatg

SEQ ID NO: 1009 - DNA, 203 bp, Artificial sequence
  synthetic
ggcgcgccagtcctaagaatcgcgggcctgtctgcaagacttgagttcaggactcccaatccttcgccatccgaacctggagggcatccagtcgacacctacaggggtcggacatgtccaaggctaactgagaggccttccagacgcttcatttttgttgtttgggtttgcggcagggcacaaagaggcgactcggaccgatg

SEQ ID NO: 1010 - DNA, 203 bp, Artificial sequence
  synthetic
ggcgcgccagtcctagaggaacagggccctggagcacctggtttcggggacagtagggttggtgggagttgcgatgatattgccacctacctcttacatcttttagtctgtctgctatcagctatgccgctgcccgttgcgctgcagacccgcttggccaagagaggcatcctcaaacatctggagcccgactcggaccgatg

SEQ ID NO: 1011 - DNA, 203 bp, Artificial sequence
  synthetic
ggcgcgccagtcctctcattgacttccttcctgttctaactgccagtactcagaagtcagagttgagagacagaggcaccccggacagagacgtgaagcactgaataaatagatcagaatgactgaaaaagccccagagccacatgtggaggaggatgatgatgatgagctggacagcaagctcaattcgactcggaccgatg

SEQ ID NO: 1012 - DNA, 203 bp, Artificial sequence
  synthetic
ggcgcgccagtccttctgattggcaccggctcccattccggctccagcctccaatccgacccccatttcggctgcagcctcggacctagctccggccctcggtctatccggttgcatcctccctccctgttccggatcttatcttgcgccagcgcctactccaggatcccgtagccagacctcaagcccgactcggaccgatg

SEQ ID NO: 1013 - DNA, 203 bp, Artificial sequence
  synthetic
ggcgcgccagtcctggtttaaccccgcctcttgcgtcggcgccttccttttcctccctgtcgccaccgaggtcgcacgcgtgagacttctccgccgcctccgccgcagacgccgccgcgatgcgctacgtcgcctcctacctgctggctgccctagggggcaactcctcccccagcgccaaggacatccgactcggaccgatg

SEQ ID NO: 1014 - DNA, 203 bp, Artificial sequence
  synthetic
ggcgcgccagtcctactaagaccgcaaggcattcatttcctcctacggtggatgcggacgccgggaggaggagagccccagagagaggagctgggagcggaggcgcagagaacacgtagcgactccgaagatcagccccaatgaacatgtcagtgttgactttacaagaatatgaattcgaaaagcagcgactcggaccgatg

SEQ ID NO: 1015 - DNA, 203 bp, Artificial sequence
  synthetic
ggcgcgccagtcctaagggggctgctacgtcagcgcgtctcagcgtaagacggcgctattccgctgtaacagcttccggcgggtcctggatgttgatgtcctgcatctaacgcggtgtaacccccgaagccgagcgagctccggaggaatttcagtatctgctacggtaacttcatcagcccgccaagcgactcggaccgatg

SEQ ID NO: 1016 - DNA, 203 bp, Artificial sequence
  synthetic
ggcgcgccagtcctccttaatggcgcccgcccagactcctggaagtgagcggcctagcgagcgagctcccaggcgcaaagcacgccggaagctgtagttccgccatcggacggaagccgaccggggcgtgcggagggatgtggcccggaatattggtagggggggcccgggtggcgtcatgcaggtaccgactcggaccgatg

SEQ ID NO: 1017 - DNA, 203 bp, Artificial sequence
  synthetic
ggcgcgccagtcctgcgctcgcagcggcctcgggagggcccaggtagcgagcagcgacctcgcgagccttccgcactcccgcccggttccccggccgtccgcctatccttggccccctccgctttctccgcgccggcccgcctcgcttatgcctcggcgctgagccgctctcccgattgcccgccgaccgactcggaccgatg

SEQ ID NO: 1018 - DNA, 203 bp, Artificial sequence
  synthetic
ggcgcgccagtcctagctgtcgcgtctggtcgtggtctggcggagctgcggttggcttgtggcgtctccgccgccgccgccctcccttcctcttccccatcttcttctctcggtcccgggagcccccgcccggagagagtcgcggttgctgatcgtggtgcttgagtagagccgtggttggtgacagccgactcggaccgatg

SEQ ID NO: 1019 - DNA, 203 bp, Artificial sequence
  synthetic
ggcgcgccagtcctgtttcctcggcggcctcggagcgcgggtgcagcagttgtgtcccgacccctgggagcgccatggcagagctgtgccccctggccgaggagctgtcgtgctccatctgcctggagcccttcaaggagccggtcaccactccgtgcggccacaacttctgcgggtcgtgcctgaatcgactcggaccgatg

SEQ ID NO: 1020 - DNA, 203 bp, Artificial sequence
  synthetic
ggcgcgccagtcctaacgagacatctagtacggggctcacaggtaacagaactctgatcagatccgccccggctcccacacagctataaggttgcctgcctgcctgcacagaaatgacgaaggacaaaaacagcccagggctgaagaaaaagtcccagtcggtggatattaatgctccagggttcaaccgactcggaccgatg

SEQ ID NO: 1021 - DNA, 203 bp, Artificial sequence
  synthetic
ggcgcgccagtcctcgccgctcaccgcagccccctcctggcgacccgcaagtcctctcaaactgtgagtaactaagtggtttgtgcatcattccagaagcaaagctaaaatttttagcggtgttgtcgacttgacctgctaatttcctgttctggaatcgagagaagactcctcaacaagttgctgcacgactcggaccgatg

SEQ ID NO: 1022 - DNA, 203 bp, Artificial sequence
  synthetic
ggcgcgccagtcctgtggcattgggaggcccggcctgggggaggagacggcgttccgttagcggcgttggggtttggctgcagtggcagtgctttctcttctgctcacggggacccgctcaggctggaggccagccagctcttgccgccacctcggtcgcgatgggggcgcaggaccggccgcagtgccgactcggaccgatg

SEQ ID NO: 1023 - DNA, 203 bp, Artificial sequence
  synthetic
ggcgcgccagtcctttccggtgcgtcgtttacgccagtttgaaccaaagacgcccaaggttgaggccgagttccagagcatggggtctcggttgtcccagccttttgagtcctatatcactgcgcctcccggtaccgccgccgcgcccgccaaacctgcgcccccagctacacccggagcgccgacctcgactcggaccgatg

SEQ ID NO: 1024 - DNA, 203 bp, Artificial sequence
  synthetic
ggcgcgccagtcctgaggcggccccacgctgctttcccagaaggctgtgcgtgctcctcgcttcctccgcggtcttccgagcggtcgcgtgaactgcttcctgcaggctggccatggcgcttcacgttcccaaggctccgggctttgcccagatgctcaaggagggagcgaaacacttttcaggattacgactcggaccgatg

SEQ ID NO: 1025 - DNA, 203 bp, Artificial sequence
  synthetic
ggcgcgccagtcctgcagggagctgggacagtcctgggtcaggcaaggactctgtgatgcttccctgctccctcgcctttctctgcatctgatcctgggatgtcctagccaccatggctttccagctgagcaggatcatgcggccagatgatgccaacgtggccggcaatgtccacggggggaccatccgactcggaccgatg

SEQ ID NO: 1026 - DNA, 203 bp, Artificial sequence
  synthetic
ggcgcgccagtcctgggaacaaacttcagaaggaggagagacaccgggcccagggcaccctcgcgggcggacccaagcagtgagggcctgcagccggccggccagggcagcggcaggcgcggcccggacctacgggaggaagccccgagccctcggcgggctgcgagcgactccccggcgatgcctcacgactcggaccgatg

SEQ ID NO: 1027 - DNA, 203 bp, Artificial sequence
  synthetic
ggcgcgccagtccttctgcgccgccatgtcgcggaggctgctgccccgggcggagaagcggcgtcggcggctggagcagaggcagcagccggacgagcagcggaggcggtcgggagcgatggtgaagatggcggcggcgggcggcggaggcggcggtggccgctactacggcggcggcagtgagggcgcgactcggaccgatg

SEQ ID NO: 1028 - DNA, 203 bp, Artificial sequence
  synthetic
ggcgcgccagtcctctcacgtgacaaagctcccggaggtgggagccctgggccaaaatggcggcctacctgcagtggcggcgcttcgttttcttcgacaaggagctggtgaaggagccgctgagcaatgatggggccgctcccggggccacacctgcttctggatccgctgcttccaagttcctttgccgactcggaccgatg

SEQ ID NO: 1029 - DNA, 203 bp, Artificial sequence
  synthetic
ggcgcgccagtcctagtccgacgccgactgaggcacgagcgggtgacgctgggcctgcagcgcggagcagaaagcagaacccgcagagtcctccctgctgctgtgtggacgacacgtgggcacaggcagaagtgggccctgtgaccagctgcactggtttcgtggaaggaagctccaggactggcgggcgactcggaccgatg

SEQ ID NO: 1030 - DNA, 203 bp, Artificial sequence
  synthetic
ggcgcgccagtcctccgtcgcgtgcgggaggcgggccgcgatcttgcgcagggtcggtgtgggcgcaggctgcagcgccgcgactcgtgcgggtaggcgtctgcgctcggtttgagggctcggcgcggggtttcctgttcctccttctgcgcggctgcagctcgggacttcggcctgacccagccccccgactcggaccgatg

SEQ ID NO: 1031 - DNA, 203 bp, Artificial sequence
  synthetic
ggcgcgccagtcctccgcctcctccacggccactccgcctcttccctcccttcgtcccttcttcctctcccttttttccttcttccttcccctcctcgccgccaccgcccaggaccgccggccgggggacgagctcggagcagcagccagaaagcataacccctactgtagaactaaatgcactgtgccgactcggaccgatg

SEQ ID NO: 1032 - DNA, 203 bp, Artificial sequence
  synthetic
ggcgcgccagtcctgcctgtgctgtgcctgcctcctagagctcattccctacgccccgactctgtcctggacagcgtgcccaccagccatggcggggccccggggcctcctcccactctgcctcctggccttctgcctggcaggcttcagcttcgtcagggggcaggtgctgttcaaaggctgtgatgcgactcggaccgatg

SEQ ID NO: 1033 - DNA, 203 bp, Artificial sequence
  synthetic
ggcgcgccagtcctaagggaggaggcgccgagctgaccgggcgacgccgcgggaggttctggaaacgccgggagctgcgagtgtccagacacttccctctgtgaccatgaaactctgggtgtctgcattgctgatggcctggtttggtgtcctgagctgtgtgcaggccgaattcttcacctctattgcgactcggaccgatg

SEQ ID NO: 1034 - DNA, 203 bp, Artificial sequence
  synthetic
ggcgcgccagtcctatatgatccgctcggcttcctgggtctggctgctgccgcccgccggtgtccgcccgtgtcgcgccggggcaccaaggagccgttggagggtccgggcggaggcccgctcgtgtggaagtcgtcgacgccgccgctcgtccgtcctcccgtccgttctcgctcccggccgccatccgactcggaccgatg

SEQ ID NO: 1035 - DNA, 203 bp, Artificial sequence
  synthetic
ggcgcgccagtcctgacgagacaccgaagcagaggatacaggaggattaaaggattcaggaaagcaagcagccctccggagaagctgtcgaaattcaagactggcaagagaagcaaattcaacctctcacaccgatcatttctcattccctgaaaagaagagattgtttccccagggaagtgaaaatacgactcggaccgatg

SEQ ID NO: 1036 - DNA, 203 bp, Artificial sequence
  synthetic
ggcgcgccagtcctgttttgcctgcacgatgtccagcaaagctgagaagaagcagcgattgagtggccgaggaagctcccaggcaagctggtcagggcgggccactcgggctgctgtggccacacaggagcaggggaatgccccggctgtcagtgagccagagctgcaggctgagctccccaaggaggcgactcggaccgatg

SEQ ID NO: 1037 - DNA, 203 bp, Artificial sequence
  synthetic
ggcgcgccagtccttttcctttcggccggaaccgccatcttccagtaattcgccaaaatgacgaacacaaagggaaagaggagaggcacccgatatatgttctctaggccttttagaaaacatggagttgttcctttggccacatatatgcgaatctataagaaaggtgatattgtagacatcaagggcgactcggaccgatg

SEQ ID NO: 1038 - DNA, 203 bp, Artificial sequence
  synthetic
ggcgcgccagtcctgttcgctgcagcatcctcaggcttcacgttggagcctcttgattgtggtgttcagcattatttaagatcacctatgcatcatctgaagccacagtcccaggtcatcttcatcaccttccccagtggaatgcctcctgtgttaaagcccacaacaacccctgtggaggaacaacccgactcggaccgatg

SEQ ID NO: 1039 - DNA, 203 bp, Artificial sequence
  synthetic
ggcgcgccagtcctgagaactcacaccatatgtgtcctgttccagtgcgcgggtctgtggagagccgggtgcgagcggcggcagcacgaggggaaaagagctgagcggagaccaaagtcagccgggagacagtgggtctgtgagagaccgaatagaggggctggggccacgagcgccattgacaagcacgactcggaccgatg

SEQ ID NO: 1040 - DNA, 203 bp, Artificial sequence
  synthetic
ggcgcgccagtcctgggcgcggagccccagccgagcctagccctgcccggccccggaggacttgcaacactccgaggccaggaacgctccgtctggaacggcgcaggtcccagcagctggggttccccctcagcccgtgagcagccatgtccaaccccagcgccccaccaccatatgaagaccgcaaccgactcggaccgatg

SEQ ID NO: 1041 - DNA, 203 bp, Artificial sequence
  synthetic
ggcgcgccagtcctctccccccgctaccctaactttgccaggcaccttttcccttccatccatcttaaaggaaggaagggacgggctgagttccccgacgagagacacacccagattttcctgcagcttggggagaggtcctcccaggagccttggtccctcctggcctgccggagtccttagccaggcgactcggaccgatg

SEQ ID NO: 1042 - DNA, 203 bp, Artificial sequence
  synthetic
ggcgcgccagtccttgcgcctccagacatgcgcagtagcctcccccgcggtggcggcggcggcggcggtggctgccgtggcggctgagagtccagagccggacgttccggccgcttcgggctggcggctggagagcgctcgggtcatgtctgcccagggggactgcgagttcctggtgcagcgagccccgactcggaccgatg

SEQ ID NO: 1043 - DNA, 203 bp, Artificial sequence
  synthetic
ggcgcgccagtcctgcgctcgccacgcccatgcctccgtcgctgcgcggcccaccccggatgtcagccccccgcgccgaccagaatccgtgaacatggcgaacgaggttatcaagtgcaaggctgcagttgcttgggaggctggaaagcctctctccatagaggagatagaggtggcacccccaaaggcgactcggaccgatg

SEQ ID NO: 1044 - DNA, 203 bp, Artificial sequence
  synthetic
ggcgcgccagtcctgcggcagtatagagagtacctcacgaaggggacgtgggaaagtgttagcggggaacgctgggaaactcccggcctccgccaccatcttgctttcctttaatccggcagtgaccgtgtgtcagaacaatcttgaatcatgaagctactaaccagagccggctctttctcgagattcgactcggaccgatg

SEQ ID NO: 1045 - DNA, 203 bp, Artificial sequence
  synthetic
ggcgcgccagtcctccccacccgcttccggccgcggctcggttctcccgcctccgcctccgccgcggctcgtggttgtcccgccatggcactgtcgcgggggctgccccgggagctggctgaggcggtggccgggggccgggtgctggtggtgggggcgggcggcatcggctgcgagctcctcaagaacgactcggaccgatg

SEQ ID NO: 1046 - DNA, 203 bp, Artificial sequence
  synthetic
ggcgcgccagtcctcaagagttggtaagctcgctgcagtgggtggagagaggcctctagacttcagtttcagtttcctggctctgggcagcagcaagaattcctctgcctcccatcctaccattcactgtcttgccggcagccagctgagagcaatgggaaatggggagtcccagctgtcctcggtgccgactcggaccgatg

SEQ ID NO: 1047 - DNA, 203 bp, Artificial sequence
  synthetic
ggcgcgccagtcctgccggcctttggtctccaggacttgtcccagcagcccctcgaactgagaattacaccatcggacccctggctctgaggccttcagacttggactgtgtcacactgccaggcttccagggctccaacttgcagacggcctgttgtgggacagtctctgtaatcgcgaaagcaacccgactcggaccgatg

SEQ ID NO: 1048 - DNA, 203 bp, Artificial sequence
  synthetic
ggcgcgccagtcctctggggcccgctgtcggtctcccgtcctccgacatcttgtctggaacttccgcctggcagtctccagtaggagtggagctctgtgcggcgtagtttggtggaaaaacgggccttgcgtcggcctcacccccagtgtttgtgtttcagaatgaagactattctcagcaatcagaccgactcggaccgatg

SEQ ID NO: 1049 - DNA, 203 bp, Artificial sequence
  synthetic
ggcgcgccagtcctccgtccccgggcagagagagggacgccccctcctcctccccgcctcttgtgaggcgcgcggagccgcctcccctgggtcaggtctgatgggccggtgggcgcgctagtggtggccgccaccgccgaaaccgtcgacctcctgggccccagttccgcgtccagccccgcggcagccgactcggaccgatg

SEQ ID NO: 1050 - DNA, 203 bp, Artificial sequence
  synthetic
ggcgcgccagtcctgccgcggccgacggtagttcgcttccccgagagtgcgcggaggcccgggtgcgaggagggcctgtttctcttcagccctggttcattcacctcggggaccgagggccccgccgtcaggagccggcgaccgtgccctggtgcgagctgtgatggtcattgtcctccagagcagtgcgactcggaccgatg

SEQ ID NO: 1051 - DNA, 203 bp, Artificial sequence
  synthetic
ggcgcgccagtcctcgcttgacttgcttccagacaaaggttgtctcaagtttgttgctcaaaccgagttctggagaacgccatcagctcgctgcttaaaattaaaccacaggttccattatgggtcgacttgatgggaaagtcatcatcctgacggccgctgctcaggggattggccaagcagctgcccgactcggaccgatg

SEQ ID NO: 1052 - DNA, 203 bp, Artificial sequence
  synthetic
ggcgcgccagtcctctcctgggcccctcctcccttcaaggattgcgaagaactggtcgcaaatcctcctaagccaccagcatctcggtcttcagctcacaccagccttgagcccagcctgcggccaggggaccacgcacgtcccacccacccagcgactccccagccgctgcccactcttcctcactccgactcggaccgatg

SEQ ID NO: 1053 - DNA, 203 bp, Artificial sequence
  synthetic
ggcgcgccagtcctctgaactgggttaggtgccgctgttgctgctcgtgttgaatctagaaccgtagccagacatgggactggaggacgagcaaaagatgcttaccgaatccggagatcctgaggaggaggaagaggaagaggaggaattagtggatcccctaacaacagtgagagagcaatgcgagccgactcggaccgatg

SEQ ID NO: 1054 - DNA, 203 bp, Artificial sequence
  synthetic
ggcgcgccagtcctggggtccttggctgggcggggcttgctcgcggtggcttgtggctccttcctgcggtgcttctctctttcgctcaggcccgtggcgccgacaggatgggcaagtgtcgtggacttcgtactgctaggaagctccgtagtcaccgacgagaccagaagtggcatgataaacagtatcgactcggaccgatg

SEQ ID NO: 1055 - DNA, 203 bp, Artificial sequence
  synthetic
ggcgcgccagtcctgtttcctcttttaccaaggacccgccaacatgggccgcgttcgcaccaaaaccgtgaagaaggcggcccgggtcatcatagaaaagtactacacgcgcctgggcaacgacttccacacgaacaagcgcgtgtgcgaggagatcgccattatccccagcaaaaagctccgcaacacgactcggaccgatg

SEQ ID NO: 1056 - DNA, 203 bp, Artificial sequence
  synthetic
ggcgcgccagtccttcccggctcggggacctccacgcaccgcggctagcgccgacaaccagctagcgtgcaaggcgccgcggctcagcgcgtaccggcgggcttcgaaaccgcagtcctccggcgaccccgaactccgctccggagcctcagccccctggaaagtgatcccggcatccgagagccaagcgactcggaccgatg

SEQ ID NO: 1057 - DNA, 203 bp, Artificial sequence
  synthetic
ggcgcgccagtcctcaaacagtcgggaagaagcaccgtggctgctattatctgctctccgcgcctgacccctcccaggactcgtgatgccaaggccgctgcgagcggctacgaagagtcggggttgagccccagctgagccgagggctcgcactcttctggtctcccaggcccaacccacctgaagaacgactcggaccgatg

SEQ ID NO: 1058 - DNA, 203 bp, Artificial sequence
  synthetic
ggcgcgccagtcctgcgctgtttccgcctcttgccttcggacgccggattttgacgtgctctcgcgagatttgggtctcttcctaagccggcgctcggcaagttctcccaggagaaagccatgttcagttcgagcgccaagatcgtgaagcccaatggcgagaagccggacgagttcgagtccggcatcgactcggaccgatg

SEQ ID NO: 1059 - DNA, 203 bp, Artificial sequence
  synthetic
ggcgcgccagtccttcctgcgctggctgtggcacacccaccggtggcacacccctccctcgggtccagttcagcccacagactcctgggaggagagccagggccccagcctctcctttgaggagtgttgcagcctttctgtgtgccagatgcctagtgaagaaaagctgaaaccctggagctttgtgccgactcggaccgatg

SEQ ID NO: 1060 - DNA, 203 bp, Artificial sequence
  synthetic
ggcgcgccagtcctgccggggcagccgggaagcgggtggggtggtgtgttacccagtagctcctgggacatcgctcgggtacgctccacgccgtcgcagccactgctgtggtcgccggtcggccgaggggccgcgatactggttgcccgcggtgtaagcagaattcgacgtgtatcgctgccgtcaagcgactcggaccgatg

SEQ ID NO: 1061 - DNA, 203 bp, Artificial sequence
  synthetic
ggcgcgccagtcctttctttttctcacccggtgctttgcatttgggaagaggtgatttcaagagtggccaggtgggacgcctctctcctccttattcggtttactatttattgttcggggtgttttttaattcctgtattgctcggcccggggagtttcgccccctgcccggctccgcggcgcggaggcgactcggaccgatg

SEQ ID NO: 1062 - DNA, 203 bp, Artificial sequence
  synthetic
ggcgcgccagtcctgacgtcatcgccgcggggcggaggcgacagtgtctagcgggagctccgcgtgtagctacgccggccgcctggctttgagacaacgtgattctccgcagctggtcgcctacccgtgatgttctgcccacgtcgagacctgagctgaaatggcagacgatctcggagacgagtggtcgactcggaccgatg

SEQ ID NO: 1063 - DNA, 203 bp, Artificial sequence
  synthetic
ggcgcgccagtcctgattccagaagatactgtctggcgtgaaattagtctcagtagaaacataagtcccgcgcgtcttgtgctgcgcgtgcgcaagcttttgggccctcccgagaaagggaagtgcattctcgcttccgtagcggtctccgccggttggggggaagtaattccggttgttgcaccatgcgactcggaccgatg

SEQ ID NO: 1064 - DNA, 203 bp, Artificial sequence
  synthetic
ggcgcgccagtcctttgccagggccggctaacagcggctcccggaagtcctttgatgctttgttaacagtgaagctactggaccaatgaggtgcttcttccggttttgtccgcgctcgcctaattcttctttatcaaggttgcctttgaccccggaaaagagatcttccgggttcctctctccccaagcgactcggaccgatg

SEQ ID NO: 1065 - DNA, 203 bp, Artificial sequence
  synthetic
ggcgcgccagtcctcccagcttccgggttggtcgcgcgccttcctgcggctaagatggcgacggagcatcccgagcctcccaaagcagaattgcagctgccgccgccgccacctccaggccactatggcgcctgggctgcccaggagcttcaggccaagttggcagagatcggagctccgatccagggcgactcggaccgatg

SEQ ID NO: 1066 - DNA, 203 bp, Artificial sequence
  synthetic
ggcgcgccagtcctagagccggcgccgtcaccgcccgcattgccgctcccagtcccgcgctcggcacgacatgaaatcccccgacgaggtgctacgcgagggcgagttggagaagcgcagcgacagcctcttccagctatggaagaagaagcgcggggtgctcacctccgaccgcctgagcctgttcccgactcggaccgatg

SEQ ID NO: 1067 - DNA, 203 bp, Artificial sequence
  synthetic
ggcgcgccagtcctggggaagcaactcggcagcggaccaagatggcggcgccctgtgagggacaagcgtttgccgtaggggttgaaaagaattggggtgcagtagttcgctccccagaagggaccccccagaaaatccggcagctgatagatgaggggattgccccggaagagggaggcgtggacgcgcgactcggaccgatg

SEQ ID NO: 1068 - DNA, 203 bp, Artificial sequence
  synthetic
ggcgcgccagtccttccttcctttccgtctctggccggctgggcgcgggcgactgctggcgaggcgcgtgggaccttacgctggttccccttcgtctcctctcccggcccgggccactagagagttcgctgacgccgggtgagctgagcctgccgccaagatgccggcctattttcagaggccggaaacgactcggaccgatg

SEQ ID NO: 1069 - DNA, 203 bp, Artificial sequence
  synthetic
ggcgcgccagtccttgaagggcggatctcagtccctggctgctttggcatttggggaactgggactccctgtggggaggagaggaaagctggaagtcctggagggacagggtcccagaaggaggggacagaggagctgagagaggggggcagggcgttgggcaggggtccctcggaggcctcctggggcgactcggaccgatg

SEQ ID NO: 1070 - DNA, 203 bp, Artificial sequence
  synthetic
ggcgcgccagtcctttgttcgcattataaaaggcacgcgcgggcgcgaggcccttctctcgccaggcgtcctcgtggaaggcccgggaccgcgggatgggtgtcggcgtgaccaggcctgagctccctgtctctcctcagtgacatcgtctttaaaccctgcgtggcaatccctgacgcaccgccgtgcgactcggaccgatg

SEQ ID NO: 1071 - DNA, 203 bp, Artificial sequence
  synthetic
ggcgcgccagtcctggcggggccgaggctggcgggcgcggggaaaatggcggcggcggcggcggcggctgcagctacgaacgggaccggaggaagcagcgggatggaggtggatgcagcagtagtccccagcgtgatggcctgcggagtgactgggagtgtttccgtcgctctccatccccttgtcatcgactcggaccgatg

SEQ ID NO: 1072 - DNA, 203 bp, Artificial sequence
  synthetic
ggcgcgccagtcctaccacagggtcttgcctccgcgcgccccgccctcgtcctcttgtgtagcctgaggcggcggtagcatggagggggagagtacgtcggcggtgctctcgggctttgtgctcggcgcactcgctttccagcacctcaacacggactcggacacggaaggttttcttcttggggaagcgactcggaccgatg

SEQ ID NO: 1073 - DNA, 203 bp, Artificial sequence
  synthetic
ggcgcgccagtcctaggaaagtggagggggaggcggtggcgacgtccagcctgagaacctcaagagagggaggtgacgggacgctgagaggaagagacctgggaaattaagtttcttgcggagtacggtggggattgcagctgctgagcagggattctggaaagcattgcgtacctgagcccccagcacgactcggaccgatg

SEQ ID NO: 1074 - DNA, 203 bp, Artificial sequence
  synthetic
ggcgcgccagtcctggtggcgctgttacatagcccgtagtcagaggcctttcagcccaggggccggcgcacgaaacctgtttggaggttatggatgataaacccaatcctgaagccctaagtgacagttcagagcgtcttttctcctttggcgtcatcgcagatgttcaatttgcagacttagaagatcgactcggaccgatg

SEQ ID NO: 1075 - DNA, 203 bp, Artificial sequence
  synthetic
ggcgcgccagtcctgtccagttactttcaggctcggggagtgaaggcctcgttgagagaaggtctcattcggtgttttgggaagagagtcgtgtgggcccaggtatcgtagcggcgacacgagagagacgggcggtgtgacagccttccactacctgcacgagtgtattggtctgtctgctatcagctcgactcggaccgatg

SEQ ID NO: 1076 - DNA, 203 bp, Artificial sequence
  synthetic
ggcgcgccagtcctggactcggcctaggcggaggacggggcggagcgcggccggcaccatcgagccgggaagatggcaccgcccacggagctgctggccaggccggagcgaggcagcgcgcccggctcccgcgccatggggcggctggtggctgtgggcttgctggggatcgcgctggcgctcctgggcgactcggaccgatg

SEQ ID NO: 1077 - DNA, 203 bp, Artificial sequence
  synthetic
ggcgcgccagtcctcccagccctcgtcgccgccgccattttagctgttggttccggccgcaccgtgtgggctgtagtagcgggaggggtgggggtcctccagagttaagtggctgtcctcgactgtgcccatacagcagccagctttcttccttaataactgcccgttcgaagagtgcgaggatgtcccgactcggaccgatg

SEQ ID NO: 1078 - DNA, 203 bp, Artificial sequence
  synthetic
ggcgcgccagtcctcggccactcggcatctgggttttagtcaggcagtgctccaggcgcctggctgccaggctacgggagaaaagtcctccgctcggccgcacccgttagaggcgctctccactgctgtcctcttcagctcaagatggtggcctgccgggcgattggcatcctcagccgcttttctgccgactcggaccgatg

SEQ ID NO: 1079 - DNA, 203 bp, Artificial sequence
  synthetic
ggcgcgccagtcctcggcggtggcgggagctgctgtctgagcagcggttggggaccgagcgaacttggcccaggagcccgggcctagggagaggcgcggcggcggcgggagcgcgaacggctggagctggccttcttcgccttctcctcggctgtggagccctggtggggggtctgcgcccggtcacccgactcggaccgatg

SEQ ID NO: 1080 - DNA, 203 bp, Artificial sequence
  synthetic
ggcgcgccagtcctctagaagaactcgaccagtgagcaggcgaggaaggggcgggagccggggtcccggtagcttctagtaggttccagaaggcggcgcgtgcggttgggaacgcggagcggacggattcgattcaacggggttcgggaccgcgctgcgctatggagcaggtcaatgagctgaaggagcgactcggaccgatg

SEQ ID NO: 1081 - DNA, 203 bp, Artificial sequence
  synthetic
ggcgcgccagtcctgagcgtggacctgggacgggtctgggcggctctcggtggttggcacgggttcgcacacccattcaagcggcaggacgcacttgtcttagcagttctcgctgaccgcgctagctgcggcttctacgctccggcactctgagttcatcagcaaacgccctggcgtctgtcctcacccgactcggaccgatg

SEQ ID NO: 1082 - DNA, 203 bp, Artificial sequence
  synthetic
ggcgcgccagtccttcactcaccctggcacattcagcccccctaacccaccttgaacattgaccaccacacactccctggcacgctcttctcaccctcaacttctgccacctctccctgggcaatactgccagcctttccctaatctcagagctgcagccctgccctgtcactcacctcaaacctgcccgactcggaccgatg

SEQ ID NO: 1083 - DNA, 203 bp, Artificial sequence
  synthetic
ggcgcgccagtcctggggaggaggagccgccgaggagaccccgggcgaggagctgcgagccggaggaggccgcgcggactccgggctttccgccgtcgcggggatctcggggggcaaagggatcgccggggagggggaccagagagccgcgcccgccgcgcggagcgccccttcgcgtcccctgcacccgactcggaccgatg

SEQ ID NO: 1084 - DNA, 203 bp, Artificial sequence
  synthetic
ggcgcgccagtcctcgtttgtcgaggcctccggaacccccgccgcctcccggagcccctcgcccttggcagcctgtcaccgccccctgggcgggctcgaatgcgcgtccggtgaaggtgcaggcccggcgccgccactgccgcagccaggagatggttcgggcctagcggagccgggactggagcaaccgactcggaccgatg

SEQ ID NO: 1085 - DNA, 203 bp, Artificial sequence
  synthetic
ggcgcgccagtcctcccgagccggggaggaaaagcagcgactcctcgctcgcatccccgggagccgcactccagactggcccggtagtcaggggctcaggagcagatcccgaggcaggctttgctcagcctccgacgagggctggccctttggaaggcgccttcaacagccggaccagacaggccacccgactcggaccgatg

SEQ ID NO: 1086 - DNA, 203 bp, Artificial sequence
  synthetic
ggcgcgccagtcctccatctgtaagagctccttggtcactgccatggttccggcctgacggattcgtactacaactcccaagagtctaagcgcgcgtgaggactgcaggctccgagcggcgcctagccctctgggaattgtgttctgggtcaggcttgactgactctgagggaggccggcagtcgtgacgactcggaccgatg

SEQ ID NO: 1087 - DNA, 203 bp, Artificial sequence
  synthetic
ggcgcgccagtcctgcgcactctcggaagcgcagccgaacccgccctccgaatccagagaggcgctgctgacaccgccgccacaccgccgccacaccgccgctgcctcagtcatgccgaagcacgagttctctgtggacatgacctgtggaggctgtgctgaagctgtctctcgggtcctcaataagccgactcggaccgatg

SEQ ID NO: 1088 - DNA, 203 bp, Artificial sequence
  synthetic
ggcgcgccagtcctgcagaagggaaacgtgaagaaggtgaagatggcggtggccagggccggggtcttgggagtccagtggctgcaaagggcatcccggaacgtgatgccgctgggcgcacggacagcctcccacatgaccaaggacatgttcccggggccctatcctaggaccccagaagaacgggccgactcggaccgatg

SEQ ID NO: 1089 - DNA, 203 bp, Artificial sequence
  synthetic
ggcgcgccagtcctagcacacacacatctgcacctcaaccacagactacacttgctgaactggctcctggggccatgaggctgtcactgccactgctgctgctgctgctgggagcctgggccatcccagggggcctcggggacagggcgccactcacagccacagccccacaactggatgatgaggagcgactcggaccgatg

SEQ ID NO: 1090 - DNA, 203 bp, Artificial sequence
  synthetic
ggcgcgccagtcctaagagtcccggacagtgcaaagcaaatgcaagaagaccccctccctagccgatgggaaatgccccagccgttgaaggcggaaataacggcctgtaggcaacggaactcccagcgttcgcaaaggagggaggagccggaaactcagggcgcgaggcctgtgggcccagcgggaagcgactcggaccgatg

SEQ ID NO: 1091 - DNA, 203 bp, Artificial sequence
  synthetic
ggcgcgccagtcctcaccctacagcagttcaggctgtgtggttcgcaggaagcatacactggctttttgattcttgctagttcccagctcacagtttgggaggatccaacaccaacctttacgtgaagtggaggcccaaggacagtgaggagctgggtggtcccagcctggagctgtgccagcctgaccgactcggaccgatg

SEQ ID NO: 1092 - DNA, 203 bp, Artificial sequence
  synthetic
ggcgcgccagtcctgagagggaggagggaagaagaaaagacggagggaggtgaggaggaagggagggggagagacagagacctagaggggctgaagacccagacagagctggcagagctactgagaagaggactggagcgctctgagagcctctcaagatcttttgggggagcccaataaatgtgaaccgactcggaccgatg

SEQ ID NO: 1093 - DNA, 203 bp, Artificial sequence
  synthetic
ggcgcgccagtcctgcgcgctcgcagcttctcgctctcgcctgcctgcccgctcccttgcttgctcgcgctttcgctcgccctctcctcgaggatcgaggggactctgaccacagcctgtggctgggaagggagacagaggcggcggcggctcaggggaaacgaggctgcagtggtggtagtaggaagcgactcggaccgatg

SEQ ID NO: 1094 - DNA, 203 bp, Artificial sequence
  synthetic
ggcgcgccagtcctatccatttgttctcaagaggtagcaagaaacagtatccacagtggactccggggctcctacagacttggcacagcttcctacagtcttgaaacagccctgttgttctgtcatggccagtgggcagtttgtgaacaaactgcaagaggaagtgatctgccccatctgcctggacacgactcggaccgatg

SEQ ID NO: 1095 - DNA, 203 bp, Artificial sequence
  synthetic
ggcgcgccagtcctcagaggtgaggctgttgtttaaaaacctggagccgggaggggagacccccacattcaagaggagctttcaggcgatctggagaaagaacggcagaacacacagcaaggaaaggtcctttctggggatcaccccattggctgaagatgagaccattcttcctcttgtgttttgcccgactcggaccgatg

SEQ ID NO: 1096 - DNA, 203 bp, Artificial sequence
  synthetic
ggcgcgccagtcctcctccggcagtggcttactcccggtgccaggttcttggagctgtgaggtgttcagcattatttaagatcacctatgcatcatctgaagccacagtcccaggtcatcttcatcaccttccccagtggaatgcctcctgtgttaaagcccacaacaacccctgtggaggaacaacccgactcggaccgatg

SEQ ID NO: 1097 - DNA, 203 bp, Artificial sequence
  synthetic
ggcgcgccagtcctcgaccacggaaatttgacacctccgggcttggaagcagctctctcctccttccccgctgcttataaacctcagccctgaggctccagctcactctaccccatctccttgccgggtcagccctgacaaaggtcagctagccccttgaggacatcagctttggcctcagggtcctacgactcggaccgatg

SEQ ID NO: 1098 - DNA, 203 bp, Artificial sequence
  synthetic
ggcgcgccagtcctacgccagggagctgtgaggcagtgctgtgtggttcctgccgtccggactctttttcctctactgagattcatctgtgtgaaatatgagttggcgaggaagatcgacctatcggcctagaccaagacgctacgtagagcctcctgaaatgattgggcctatgcggcccgagcagtcgactcggaccgatg

SEQ ID NO: 1099 - DNA, 203 bp, Artificial sequence
  synthetic
ggcgcgccagtcctctctggtggagagagtgttgtctaaaacaagttccggaagggaggctgcccttcggggtccgagaaccaccggcctccccagtttgagggctgttaccccgtgcgcgcttcgacgttgctgctgttggctctcctcgcccctcgttcccttgggaaccgcctgggaactccgcccgactcggaccgatg

SEQ ID NO: 1100 - DNA, 203 bp, Artificial sequence
  synthetic
ggcgcgccagtcctttccaccctagatttcagcagaaatgctgaatgtaaaggaatatttgagtaaagtgagttgccgttcttgaagcccgtctcctaaggattctcccggtgtccgcgtagggatctcatgctatataggagggccctgccaggcaccgtctcctctctcgggtccgtgcctccaagcgactcggaccgatg

SEQ ID NO: 1101 - DNA, 203 bp, Artificial sequence
  synthetic
ggcgcgccagtcctacccaaagaaaggcaaagagtcctgcccggcaccggcgccgcgtgggccaaacctgcgcccgtggaggggcgcgcagagggcaccgggcgccgggagcaggcggcgcagcaccagcattgtgttagtgccgggaggccactgtgtcagcaagctgagagggaaactgaagcaagcgactcggaccgatg

SEQ ID NO: 1102 - DNA, 203 bp, Artificial sequence
  synthetic
ggcgcgccagtcctatcggatggctgttacctcctcctaaaatgtctgcatttacccagataatcttccaatggaaatccatggttcaagtgccacctcttcaggaaagccatctgacttcaatcaggtcagccctgacaaaggtcagctagccccttgaggacatcagctttggcctcagggtcctacgactcggaccgatg

SEQ ID NO: 1103 - DNA, 203 bp, Artificial sequence
  synthetic
ggcgcgccagtcctgagcagggagtcagagacgccccgttccaggacccttgtcaccgggagacaggagcggggaggatctgtggggtcctgggttcagcactctgccctgctgccgctgaggagaggtcagccctgacaaaggtcagctagccccttgaggacatcagctttggcctcagggtcctacgactcggaccgatg

SEQ ID NO: 1104 - DNA, 203 bp, Artificial sequence
  synthetic
ggcgcgccagtcctcactgttggtaaagcccagcccttcccaacctgcaagctcaccttccaggactgggcccagcccatgctctccatatataagctgctgccccgagcctgattcctagtcctgcttctcttccctctctcctccagcctctcacactctcctcagctctctcatctcctggaacccgactcggaccgatg

SEQ ID NO: 1105 - DNA, 203 bp, Artificial sequence
  synthetic
ggcgcgccagtcctgggcggggcgtgtgcggactgagcgctctgcttccggggcgcgggtgacgcgacgacggcgacactttgctacggagtgcatcggacgtcgaagcctagagtctctgcgtctttccctcttccgctgcctcattcctttccttcctagccttggtcgtcgccgccaccatgaaccgactcggaccgatg

SEQ ID NO: 1106 - DNA, 203 bp, Artificial sequence
  synthetic
ggcgcgccagtcctgtgagcgggcggccggccggacagactgacgtgtgagctgcatcgcgggaggcgcatggcggggatggcgctggcgcgggcctggaagcagatgtcctggttctactaccagtacctgctggtcacggcgctctacatgctggagccctgggagcggacggtgttcaattccatcgactcggaccgatg

SEQ ID NO: 1107 - DNA, 203 bp, Artificial sequence
  synthetic
ggcgcgccagtcctaaagccgaccgagacggagccgctgtcaactctccaactcagctcagctgatcggttgccgccgccgccgccgccagattctggaggcgaagaacgcaaagctgagaacatggacgttaatatcgccccactccgcgcctgggacgatttcttcccgggttccgatcgctttgccgactcggaccgatg

SEQ ID NO: 1108 - DNA, 203 bp, Artificial sequence
  synthetic
ggcgcgccagtcctttacaggaacagtgtggcctctctggaactctgcagaccaactgccgtgatgctgaagttccgaacagtccatgggggcctgaggctcctgggaatccgccgaacctccaccgcccccgctgcctccccaaatgtccggcgcctggagtataagcccatcaagaaagtcatggtcgactcggaccgatg

SEQ ID NO: 1109 - DNA, 203 bp, Artificial sequence
  synthetic
ggcgcgccagtcctgtcagtggaggcagcagcggtagaggcggcggcgaggactggcgacggcgaggagatagtgtctgccttctggagagctgaccaaacactaaggatgctgaagttccgaacagtccatgggggcctgaggctcctgggaatccgccgaacctccaccgcccccgctgcctcccccgactcggaccgatg

SEQ ID NO: 1110 - DNA, 203 bp, Artificial sequence
  synthetic
ggcgcgccagtcctggcttgggctcgcgccgctgaagtcggcttacccgctggccgcctcctgacaagcgggagggatccgcggtggacccagggaagcggaggagcctggcggccaccccctcttcctcacttccctgtactctcatcgctctcggcctccgacacgaaaaggaagcaaatgagctgcgactcggaccgatg

SEQ ID NO: 1111 - DNA, 203 bp, Artificial sequence
  synthetic
ggcgcgccagtcctgttcgcgttcgccccgcctcaaaggaagaagagtccaccttgcgaccgtatccgctagcgcggcctgggatgcgcttgggctccctgttcgttcccacatgcagggcagcacaaggagaatgggcgtcatgactgatgtccaccggcgcttcctccagttgctgatgacccatgcgactcggaccgatg

SEQ ID NO: 1112 - DNA, 203 bp, Artificial sequence
  synthetic
ggcgcgccagtcctgggggctggaatactgtaccttgatcttagggcctggaaaaatcaggtaggtaactctctggtcctaggtggaggtgtaggggaggttgggccagggatgccttcactgtgtctctctggtcttgccaccccagaccgagggacacacaggcactgctgtctgcaacacaagcacgactcggaccgatg

SEQ ID NO: 1113 - DNA, 203 bp, Artificial sequence
  synthetic
ggcgcgccagtcctctggcggcgccggcgccattttgctggagcctgcgaccgagtgggagtggagtggagcggctgtggttgccgactctttcctcttccccacggtccagtcagcgggttaattaggccatcggccctcgagccgagacttgtctcttatttagttctggggagcgcctcgtcgaccgactcggaccgatg

SEQ ID NO: 1114 - DNA, 203 bp, Artificial sequence
  synthetic
ggcgcgccagtcctccctcgctcgttccctccctccggcgagggccgcctttataacaactgctcagagtgcgagggcgggatagctgtccaaggtctcccccagcactgaggagctcgcctgctgccctcttgcgcgcgggaagcagcaccaagttcacggccaacgccttggcactagggtccagacgactcggaccgatg

SEQ ID NO: 1115 - DNA, 203 bp, Artificial sequence
  synthetic
ggcgcgccagtcctaaagtggctgaatgagaaatgtagattgcagagggcaactggtgtgtttatatgcctgacattatttgggttttcccccctcaggcagaagctgaggaagattgtcattctgatactgtcagagcagatgatgatgaagaaaatgaaagtcctgctgaaacagatctgcaggcacgactcggaccgatg

SEQ ID NO: 1116 - DNA, 203 bp, Artificial sequence
  synthetic
ggcgcgccagtccttggcgggactggcttcacttcctccgcggttcctcggagccgcctcgctcctcttcagggactttgctgagaagggctctcgggcgtccagaccccaccgcaaaggtgtttggcgatccgccgagaagttgttggccccaggagcatccctcggggccgaatgcgcagtggacgcgactcggaccgatg

SEQ ID NO: 1117 - DNA, 203 bp, Artificial sequence
  synthetic
ggcgcgccagtcctcgctcgccggccgggcgccccaagcaactacaacttccatcacgctctgcgaggccttgatctgcaggcttttgcaggggaaggagtggggcgaacatggctgaaggaagccgaggtggccctacgtgtagcggggtgggtggcaggcaggacccagtctccggcagtggcggccgactcggaccgatg

SEQ ID NO: 1118 - DNA, 203 bp, Artificial sequence
  synthetic
ggcgcgccagtcctctggtaggagagcgccgcgggcggatggaggcgactcttcgccccgcctgagctcaggaggggctagcgcggagcgcgggtcccgcctccagccgcgggagcggccgcgcgagccaccactggaggaggaggaggaggagcggacgtcggcttctccccgcgggagcccccagccgactcggaccgatg

SEQ ID NO: 1119 - DNA, 203 bp, Artificial sequence
  synthetic
ggcgcgccagtcctcgggcgtgtaacccacgggtgcgcgcccacgaccgccagactcgagcagtctctggaacacgctgcggggctcccgggcctgagccaggtctgttctccacgcaggtgttccgcgcgccccgttcagccatgtcgtccggcatccatgtagcgctggtgactggaggcaacaagcgactcggaccgatg

SEQ ID NO: 1120 - DNA, 203 bp, Artificial sequence
  synthetic
ggcgcgccagtcctggggaggaggaagagggggagcaggaagaggggcagaaggaagaagaagagggggaggagaaagagatagaagagtaagaggagggggaagaaagacaaggggaaggggaggaggaggaggacggggaggagcttcgccgcggcctgctccgcccagccggggtcggtggccgccgactcggaccgatg

SEQ ID NO: 1121 - DNA, 203 bp, Artificial sequence
  synthetic
ggcgcgccagtcctttccgggttttgtgtcgaatctgcggcggcgacccggcgccgcgtcacgcggtggtgaatgtgcggcagcacgcgcgccgcgtcgtttacgcggcgatttcatcatgctccgagccgggcggcgcgcgccgcttccgtcgccaccctctctggacagcccagggccgcaggctccgactcggaccgatg

SEQ ID NO: 1122 - DNA, 203 bp, Artificial sequence
  synthetic
ggcgcgccagtccttggagggaagggggcgggcagacggcataggaaggcgccggaagtggtcccgcagaggcggggtgggagtggggctcccgaggcagtgcagttggctgtagctgggcgcctcggttaggtgcgctgtcagtcctttccgagtgcctggcccagtctctcccgcctcggcccaaccgactcggaccgatg

SEQ ID NO: 1123 - DNA, 203 bp, Artificial sequence
  synthetic
ggcgcgccagtcctggcccaccgccgcccaggcaaggccgccctgccttgggcgcagcgctgccatggctgggggccgtggggcccccgggcgcggccgggacgagcctccggagagctacccgcaacgacaggaccacgagctacaggccctggaggccatctacggcgcggacttccaagacctgccgactcggaccgatg

SEQ ID NO: 1124 - DNA, 203 bp, Artificial sequence
  synthetic
ggcgcgccagtcctctgcgactcgaccccgccatcctcaggtcccctccgcctgccagatcttttctcggatccccgctctcccaccacctgctcacgagatcccgcggatctagaacccagggtcccccggggccccccggccgggtcccgggtgggctccaggcggccggtccccggcctcccccccgactcggaccgatg

SEQ ID NO: 1125 - DNA, 203 bp, Artificial sequence
  synthetic
ggcgcgccagtcctcccacgtcggccaacctcctgcagctggtgcgctcgtccggagacatccaggagggcgacctggtggaggtggtgctgtcggcctcggccaccttcgaggacttccagatccgcccgcacgccctcacggtgcactcctatcgggcgcctgccttctgtgatcactgcggggagcgactcggaccgatg

SEQ ID NO: 1126 - DNA, 203 bp, Artificial sequence
  synthetic
ggcgcgccagtcctgcggcagctcttttccttcttcctccacttcccctaccctccaccgtccgggagccgccgccaccgccgccgaggagtcaggaagttcaagatggccgccgcggagacccagtcgctacgggagcagccagagatggaagatgctaattctgaaaagagtataaatgaagaaaacgactcggaccgatg

SEQ ID NO: 1127 - DNA, 203 bp, Artificial sequence
  synthetic
ggcgcgccagtcctctggagccgctggagttcggacttctgcaactgttggcactttgggggcttggcttagcgctctgctgtttacccgtctctcctcgctgcctcggaaccaaagctcccggccccctccgccctcgcgcgcccacccaccgccgccggggagcggcccggcccgcactcagcacccgactcggaccgatg

SEQ ID NO: 1128 - DNA, 203 bp, Artificial sequence
  synthetic
ggcgcgccagtcctccggcttccccgccccgccccgtccccgggcgtctccattttggtctcaggtgtggactcggcaagaaccagcgcaagagggaagcagagttatagctaccccggccgcggagccggctcactgcactacccccgcccccttctttcctccagacgccgaagtcgcgggcgctccgactcggaccgatg

SEQ ID NO: 1129 - DNA, 203 bp, Artificial sequence
  synthetic
ggcgcgccagtcctgccgccccgccccgccccgcgcgctccagacccccggggcggctgccgggagagatgctggaagaaacttcttaaatgaccgcgtctggctggccgtggagcctttctgggttggggagaggaaaggaaagtggaaaaaacctgagaacttcctgatctctctcgctgtgagaccgactcggaccgatg

SEQ ID NO: 1130 - DNA, 203 bp, Artificial sequence
  synthetic
ggcgcgccagtcctatgcaggccttcccacaagggcccggcagcatgacaaggtgaaggcagagtatgtgcatctcaaccatccgctcaccctcgtgaccagagagcgcgatttggccgtgaaggagaaacaccagctccaagccaagctggagaacctagaacaggtcctgaagcatatgcgagaggcgactcggaccgatg

SEQ ID NO: 1131 - DNA, 203 bp, Artificial sequence
  synthetic
ggcgcgccagtcctaggcccagtggccgagcggcgtcgtggggttaccccgcccgcgccagcgctgcatccctggccgctacccggggagagccggaggatgaattgaacctcgcagccgctgctatctccagtgctcatcacagggtgtggtgtctatctgaagaatattttactttcaaaggaaagcgactcggaccgatg

SEQ ID NO: 1132 - DNA, 203 bp, Artificial sequence
  synthetic
ggcgcgccagtcctactacttctcccccggactccttggtagtctgttagtgggagatccttgttgccgtcccttcgcctccttcaccgccgcagaccccttcaagttctagtcatgcgtgagtgcatctccatccacgttggccaggctggtgtccagattggcaatgcctgctgggagctctactgcgactcggaccgatg

SEQ ID NO: 1133 - DNA, 203 bp, Artificial sequence
  synthetic
ggcgcgccagtcctagtggagccagcgccacgcgtctccagggtctccatacccagccttcgtccctgcggtgcccagaggccttgcgcgcattttgcatttgggaagacaggtcctgagtgcgaccgtcacccagcggaagtgtgagggttcggcccagcggcagggctagccctgggcctcctgttcgactcggaccgatg

SEQ ID NO: 1134 - DNA, 203 bp, Artificial sequence
  synthetic
ggcgcgccagtcctcggagcccacggagcccacggaggagcccacggaggagccccagcgtccgaacgggcagaccccctcgagccgcgaaggagcccgagaagcagccacgatgtgcggaatctttgcctacatgaactacagagtcccccggacgaggaaggagatcttcgaaaccctcatcaaggcgactcggaccgatg

SEQ ID NO: 1135 - DNA, 203 bp, Artificial sequence
  synthetic
ggcgcgccagtcctatatggaggtgaagggtgagatcgggaaacaaagggtatggccccctagttcccaaagggagcagggagatgggaatagaattgaaggtaggttttaggctacttgggaggaggaatatttaggtaattgtggagactttctcctgtgtgatgaaggcggcagacactgtgatccgactcggaccgatg

SEQ ID NO: 1136 - DNA, 203 bp, Artificial sequence
  synthetic
ggcgcgccagtcctattttctttttttttttctttctttcattcattccttcctctgtttctttctttcttcctttcatttttttttcttttttaagagcgagcggctctgcggtggcggtttggggtgggcgccgccgaggtgaggtcgtctcgcctcccgcgcgccggtagattggttgtttcattcgactcggaccgatg

SEQ ID NO: 1137 - DNA, 203 bp, Artificial sequence
  synthetic
ggcgcgccagtcctgcccgtccccgtcccctgcggccgccaacgccgcccggactggagccctgacattgctgcgctcggggggctccaggcagcccgtatcggggcctttatttctcgtcggcggcgccctgcaccgcgcctcgcaaagccaaacaccagagcaccctagaaggtttaactaaaagacgactcggaccgatg

SEQ ID NO: 1138 - DNA, 203 bp, Artificial sequence
  synthetic
ggcgcgccagtcctgagtattgcctttggcccccacccccacgggtccccgcgctccgtcttccttctgactgggggactccgcgggacggcgttcccggcgcgcactgtaccccttgccgccccttccccttcatgttggacctgacctcccgcggacaagtggggacgtcccggaggatggccgagcgactcggaccgatg

SEQ ID NO: 1139 - DNA, 203 bp, Artificial sequence
  synthetic
ggcgcgccagtcctggaccggtgtgctaggagatgatcggggaaagcatagtcccctgtctgtggcaccagacactcccgactgtgcgctgactctccccgcccagccagcagccttttccagagaggctgtggtccatagcctctgttcgttttcactgcaggaccaggcacgaaagttaaaacaaacgactcggaccgatg

SEQ ID NO: 1140 - DNA, 203 bp, Artificial sequence
  synthetic
ggcgcgccagtcctgggcatacctcggaactggtcctcaggcagagggttgtcctcccgggcagaaaggcgacagcggcgtctgcggggtccttcctggcggcgggcgcaggcgtttcctcggcgtggggcggaagcacgatctccggcagcggcctgggaactcttagctgagcaggcgagagcatccgactcggaccgatg

SEQ ID NO: 1141 - DNA, 203 bp, Artificial sequence
  synthetic
ggcgcgccagtcctcagccctaggccctgcgcgagctgccccgccctaccccctccagcgtcctgtcgcctcctcgcccgacttcggcctgtccctctctcacgcgctcagtcctcgctcttcgccccccgcagctatcggcactcggtctcccgcgcctggcgggctccgcccgagcctctgggccccgactcggaccgatg

SEQ ID NO: 1142 - DNA, 203 bp, Artificial sequence
  synthetic
ggcgcgccagtcctacctgttgtctctcacctctacattggatcacatggtcacctgcctcatggaaatgccttttttaaaacttcgatttgcagaactccactatttttatacctagctacagttttgagaaagaagaatcagaaccctgacccacttacggttgctgggacaattccccctcccgccgactcggaccgatg

SEQ ID NO: 1143 - DNA, 203 bp, Artificial sequence
  synthetic
ggcgcgccagtcctagatatccgcccctgacaccattcctcccttcccccctccaccggccgcgggcataaaaggcgccaggtgagggcctcgccgctcctcccgcgaatcgcagcttctgagaccagggttgctccgtccgtgctccgcctcgccatgacttcctacagctatcgccagtcgtcggccgactcggaccgatg

SEQ ID NO: 1144 - DNA, 203 bp, Artificial sequence
  synthetic
ggcgcgccagtcctccgcctcctggcctcctggctgaggggaagctgagtgggccacggcccatgtgtcgcactcgcctcggctcccacacagccgcctctgctccagcaaggatgtggctcttccacactctgctctgcatagccagcctggccctgctggccgctttcaatgtggatgtggcccggcgactcggaccgatg

SEQ ID NO: 1145 - DNA, 203 bp, Artificial sequence
  synthetic
ggcgcgccagtcctctccgactctcggcacctggcctccagctttcggaactatggaggccgcgcccgggacccccccgccgccgccatcagagtcgccgccgccgccatcgccgccgccgccatcaacgccttcgcctcctccgtgttcccccgacgcccgcccggccaccccgcacctcctccacccgactcggaccgatg

SEQ ID NO: 1146 - DNA, 203 bp, Artificial sequence
  synthetic
ggcgcgccagtcctcttacttcgaaggctgtgctccgctcaccatccagagcggaggtgcggaccttaaactcactcctggagaaagatctgcaagtgcgcagagagaagactggcagtggagcatgcatctggagggcagagacggcaggcggtacccccgcgcgccggcggtggagctcctgcagacgactcggaccgatg

SEQ ID NO: 1147 - DNA, 203 bp, Artificial sequence
  synthetic
ggcgcgccagtcctcggcctggccggcccgaacgcctgcgtctcagtagctgggagccacgggcccacgcccgcccaccggccgcagtgatgttctagccacagaggagccaagacctcaggtttccagagacttgggatttgcacggcagcagagtcaccgtggagaggccagggtatcacaaacttcgactcggaccgatg

SEQ ID NO: 1148 - DNA, 203 bp, Artificial sequence
  synthetic
ggcgcgccagtcctcagccctcggcagacggccaatggcggcggtgctcggggcgctcggggcgacgcggcgcttgttggcggcgctgcgaggccagagcctagggctagcggccatgtcatcaggtactcacaggttgactgcagaggagaggaaccaagctatacttgaccttaaagcagcaggatcgactcggaccgatg

SEQ ID NO: 1149 - DNA, 203 bp, Artificial sequence
  synthetic
ggcgcgccagtccttggatttgtctttctcagcaccttggcgaagccttgggtttctttcttaaaggactgatttttagaactccacatttgagtgtgaagtgagggggtctctctccctccttctccttcctctgtgattcaccttcctttttaccctgccctgcggcggctccgccccttaccttccgactcggaccgatg

SEQ ID NO: 1150 - DNA, 203 bp, Artificial sequence
  synthetic
ggcgcgccagtcctcacctctcgtaaccaatggaaccgcggcgctcggccgattctcgcaggcgccctcagatctacgctctctgatgcaacgccggaatcgcggaaaccgccggtgcacgttggagtcataagacggcgtcggtgttgcagtctgtgtccttggaggtgaccagggccactgcaggccgactcggaccgatg

SEQ ID NO: 1151 - DNA, 203 bp, Artificial sequence
  synthetic
ggcgcgccagtccttggattgttgcgcctctgctctgaagaaagtgctgtctggctccaactccagttctttcccctgagcagcgcctggaacctaacccttcccactctgtcaccttctcgatcccgccggcgctttagagccgcagtccagtcttggatccttcagagcctcagccactagctgcgcgactcggaccgatg

SEQ ID NO: 1152 - DNA, 203 bp, Artificial sequence
  synthetic
ggcgcgccagtcctcccacacccaagtgagcggcctgctcactcctcagctgcaggagccagacgtgtggagtcccagcagaggccaacctgtgtctcttcatctccctgggaaaggtgcccccgaggtgaaagagatggcctggtggaaatcctggattgaacaggagggtgtcacagtgaagagcacgactcggaccgatg

SEQ ID NO: 1153 - DNA, 203 bp, Artificial sequence
  synthetic
ggcgcgccagtccttgcccgagtgagcggggggcctgggcctctgcccttaggaggcaactcccacgcaggccgcaaaggcgctctcgcggccgagaggcttcgtttcggtttcgcggcggcggcggcgttgttggctgaggggacccgggacacctgaatgcccccggccccggctcctccgacgcgcgactcggaccgatg

SEQ ID NO: 1154 - DNA, 203 bp, Artificial sequence
  synthetic
ggcgcgccagtcctggcgtgccacctcgccgcgcagctttacgaacctagagcagcgccgccccgcctcctgtctccgtcctcacctccccgccccctcccagcttcgcgtctcctagctcgacgcgcccgctataatcacgtgattgcctcatccgggtcttttgcgttctctttccctctcccaaccgactcggaccgatg

SEQ ID NO: 1155 - DNA, 203 bp, Artificial sequence
  synthetic
ggcgcgccagtcctgcgtgctgactgagctagtcttggggtcctggagaagggggctggaggcatgcccacagcctcccccccatgagcttggggctggcgagggcacaggaggtggagctgacactagagacggttatccagacactggagagcagcgtcctgtgccaggagaaaggcttgggcgcgcgactcggaccgatg

SEQ ID NO: 1156 - DNA, 203 bp, Artificial sequence
  synthetic
ggcgcgccagtcctgagccgctggcgccactagagaagggcgagcggcgcggcagagtgcggcgcagcgcagctcctgaggttttggttatgaacaggattcggattcacgtcttgccaaccaatcgggggaggatcactccagtgcccaggtctcaggaacctctgtcttgtgcattcactcatcgtcgactcggaccgatg

SEQ ID NO: 1157 - DNA, 203 bp, Artificial sequence
  synthetic
ggcgcgccagtcctggccccttggcctagcttcgatcgttcgaattcagagcacgtccttccgaggtgaaggaacgcgaaactccacccatccgattgctgttcggctgcgggcgggtcctttggtcgggctgaccctgggtgagcggcccggagccaagactcgaggtagggcctggcgggcgggtgcgactcggaccgatg

SEQ ID NO: 1158 - DNA, 203 bp, Artificial sequence
  synthetic
ggcgcgccagtcctcgattcaggggagggagcaactggagcctcaggccctccagagtagtctgcctgaccaccctggagcccacagaagcccaggacgtctcccgcgaagcctccccgtgtgtggctgaggatggctgagcagcagggccgggagcttgaggctgagtgccccgtctgctggaaccccgactcggaccgatg

SEQ ID NO: 1159 - DNA, 203 bp, Artificial sequence
  synthetic
ggcgcgccagtcctttgctgttagaggctctttcccagaagttggacgaagaggctcaggcgttgctgtttcttgtcttccaagtcaagtggttactctggtaatggattgcctctctccgagctttcaccctggtgagactgtccagatctagtctgtaaacccagcttagaagcactgttgtaaaacgactcggaccgatg

SEQ ID NO: 1160 - DNA, 203 bp, Artificial sequence
  synthetic
ggcgcgccagtcctgcggcagtagcagcagcgccgggtcccgtgcggaggtgctcctcgcagagttgtttctcgagcagcggcagttctcactacagcgccaggacgagtccggttcgtgttcgtccgcggagatctctctcatctcgctcggctgcgggaaatcgggctgaagcgactgagtccgcgcgactcggaccgatg

SEQ ID NO: 1161 - DNA, 203 bp, Artificial sequence
  synthetic
ggcgcgccagtcctctgggcgtgagggaccaaggcctgccctgcactcgggcctcctccagccagtgctgaccagggacttctgacctgctggccagccaggacctgtgtggggaggccctcctgctgccttggggtgacaatctcagctccaggctacagggagaccgggaggatcacagagccagccgactcggaccgatg

SEQ ID NO: 1162 - DNA, 203 bp, Artificial sequence
  synthetic
ggcgcgccagtcctcggcgccggaggaggaagtggtgaggttgttgctccttcagcgcctatcgctggctcttggggcgcagagaggggccgcagtctccgcggctgcgtcgagctcccttgcagtcccctccatgttccccggcgccactactccccttcctaaggccgccgcttaccccggggtctcgactcggaccgatg

SEQ ID NO: 1163 - DNA, 203 bp, Artificial sequence
  synthetic
ggcgcgccagtcctaagcagttccgggaaaccccgcgtgctgccgggatcgcgtctcagtccatcaggggggggagggggtggcgcgcgcgccatttctagtcgttttcaaagcgcctcgcgctgattctcacgggcccggctgccggcccccgctctgccctgcataataaaatggctaatcaggtgcgactcggaccgatg

SEQ ID NO: 1164 - DNA, 203 bp, Artificial sequence
  synthetic
ggcgcgccagtcctgcgcctacgcattttcctgggcgggaacagcaaaatggcgccagaactagtggcgggctgaggacgccgtacccctcggaaggcagccctgcggtccctttgccgcccgttccctcccggacatggaggacgtggaggcgcgcttcgcccacctcttgcagcccatccgcgacccgactcggaccgatg

SEQ ID NO: 1165 - DNA, 203 bp, Artificial sequence
  synthetic
ggcgcgccagtcctcgaaggaacctgacccaggctctgtgaggaggcaaggttttcaggggacaggccaacccagaggacaggattccctggaggccacagaggagcaccaaggagaagatctgcctgtgggtcttcattgcccagctcctgcccacactcctgcctgctgccctgacgagagtcatccgactcggaccgatg

SEQ ID NO: 1166 - DNA, 203 bp, Artificial sequence
  synthetic
ggcgcgccagtcctgttggtgacgtcaccgcgttcaccagcccggaagtgcgcgtggcggcggtggcggctgcggcaacagcggggccgatgtgtagttggtgactgcctctccagatgctgaggtgcctgtatcattggcacaggccagtgctgaaccgtaggtggagtaggctgtgccttctgaagcgactcggaccgatg

SEQ ID NO: 1167 - DNA, 203 bp, Artificial sequence
  synthetic
ggcgcgccagtcctcggcgggcatacctcggaactggtcctcaggcagagggttgtcctcccgggcagaaaggcgacagcggcgtctgcggggtccttcctggcggcgggcgcaggcgtttcctcggcgtggggcggaagcacgatctccggcagcggcctgggaactcttagctgagcaggcgagagcgactcggaccgatg

SEQ ID NO: 1168 - DNA, 203 bp, Artificial sequence
  synthetic
ggcgcgccagtcctgcttttgctgcttcctcattttctcttgcagccgccatgattctgaggccttcccagctatgtggaactatgactgtgatgatcctcttgtgtctgccttgcctcaggcatccttcagcagttcttccgagctctccagcagtcatggtcctggatttgcaaggctgaatagaacgactcggaccgatg

SEQ ID NO: 1169 - DNA, 203 bp, Artificial sequence
  synthetic
ggcgcgccagtcctgtccaccttgccgacgtcgctagccgtggggctgtcctgggaaggcggacggcgagcgcccggtgtccgcactcggccgcctgccgtgcccgtctgcgcccgtgtcatcctcactcgggacgcagggaccgtttttaaatcacaggggcgtgtgtcagcctgccctaggacttccgactcggaccgatg

SEQ ID NO: 1170 - DNA, 203 bp, Artificial sequence
  synthetic
ggcgcgccagtcctcggccccagaaaacccgagcgagtagggggcggcgcgcaggagggaggagaactgggggcgcgggaggctggtgggtgtggggggtggagatgtagaagatgtgacgccgcggcccggcgggtgccagattagcggacgcggtgcccgcggttgcaacgggatcccgggcgctgcgactcggaccgatg

SEQ ID NO: 1171 - DNA, 203 bp, Artificial sequence
  synthetic
ggcgcgccagtcctgtggtgggactcgcgtcgcggccgcggagacgtgaagctctcgaggctcctcccgctgcgggtcggcgctcgccctcgctctcctcgccctccgccccggccccggccccgcgcccgccatggagaagactgagctgatccagaaggccaagctggccgagcaggccgagcgctcgactcggaccgatg

SEQ ID NO: 1172 - DNA, 203 bp, Artificial sequence
  synthetic
ggcgcgccagtcctgagtgctcgcagctcatacctgtggctgtgtatccgtggccacagctggttggcgtcgccttgaaatcccaggccgtgaggagttagcgagccctgctcacactcggcgctctggttttcggtgggtgtgccctgcacctgcctcttcccccattctcattaataaaggtatcccgactcggaccgatg

SEQ ID NO: 1173 - DNA, 203 bp, Artificial sequence
  synthetic
ggcgcgccagtcctctgccggctgagcgggcctggaggaagtgagcagcggggctcctgcctcccggcctggtccccgaagaccccagaagaacccggaacttgcttccattcggaatccagggaccaccctttgcactcagtaggcctttgttttcctgcgtggaaagcggttgggcttgggaggcgcgactcggaccgatg

SEQ ID NO: 1174 - DNA, 203 bp, Artificial sequence
  synthetic
ggcgcgccagtcctgctgtcagcctccctggctgttagtaccttctttcccggagtcctggtccacgagttggatttactgctgtcgcgggtgggcctcacgccattccctgtccctcggccccctgagtgagtccggtctcccggcgaaagtgagcgaggtttgcccggagcgcgcacgaggggaaacgactcggaccgatg

SEQ ID NO: 1175 - DNA, 203 bp, Artificial sequence
  synthetic
ggcgcgccagtccttccttgcgggccctcctccccttccctcccctccgcccccttccccgtaggcagcccgcccgccagtccgcccgcaccgcctccttcccagcccctagcgctccggctgggtctctcccccgccccccaggctcccccggtcgctctcctccggcggtcgcccgcgctcggtggcgactcggaccgatg

SEQ ID NO: 1176 - DNA, 203 bp, Artificial sequence
  synthetic
ggcgcgccagtcctgcgcaactcattggcgccaagatggcgatggagatgaggcttccagtggctcgcaagcctcttagcgagagactgggccgcgacactaagaaacatctagtggtgccgggggatacaatcactacggacacaggattcatgcggggccatggaacgtatatgggagaagagaagcgactcggaccgatg

SEQ ID NO: 1177 - DNA, 203 bp, Artificial sequence
  synthetic
ggcgcgccagtcctggcggggcctgcttctcctcagcttcaggcggctgcgacgagccctcaggcgaacctctcggctttcccgcgcggcgccgcctcttgctgcgcctccgcctcctcctctgctccgccaccggcttcctcctcctgagcagtcagcccgcgcgccggccggctccgttatggcgacgactcggaccgatg

SEQ ID NO: 1178 - DNA, 203 bp, Artificial sequence
  synthetic
ggcgcgccagtcctgggctcgggtaaccggagtgctggtatctaatcgtcgctcaaaagctcctaggtgcgcgggtggatataattcccggcttctcgagaagacactacagcctcaaggaggtatatcccgtgccttacctgactgggggctctgagtccagttgtgttgtcttcaacttagacacccgactcggaccgatg

SEQ ID NO: 1179 - DNA, 203 bp, Artificial sequence
  synthetic
ggcgcgccagtcctaagtttgaaactggtaacttcgggagttgagccacgagctgttgtgcatccagaggtggaattggggcccggcattccctcctcgtcccgggctggcccttgcccccaccctgcaactcctggttgagatgggctcagccaagagcgtcccagtcacaccagcgcggcctccgccgactcggaccgatg

SEQ ID NO: 1180 - DNA, 203 bp, Artificial sequence
  synthetic
ggcgcgccagtccttggcgtggagagtttggggatctacagcagccaaaggcttgtccctgactttatatggctgctcctggcgagcgactgagtcgtccgtgaggaaaaagaggcgaggcttttccgagatcgtctcagcgatggcgcttcggtcgcggttttgggggttgttctcggtttgcaggacgactcggaccgatg

SEQ ID NO: 1181 - DNA, 203 bp, Artificial sequence
  synthetic
ggcgcgccagtcctcccgttagtcttttcttcacttccgttgagttccgcctcgccgtttgtcccttgcggtacccgtccgcatacgaatctagcccgggaaccgagttgcgggagtgcggtctgtgccgttccggccaggagtttgccgactgcagacgtcctgcgaaccggcaagatgtgctctctcgactcggaccgatg

SEQ ID NO: 1182 - DNA, 203 bp, Artificial sequence
  synthetic
ggcgcgccagtcctaagcagagcacctcagaactcaggcgtactgcccgccgcccgagccctgcgagggccgatagcgagggtgtggcccttatctgcacccagcagagcgccggcggggtacggtcttaggacctcgatctccttctccctcattttctctcatccctacctattgtgggtttccgccgactcggaccgatg

SEQ ID NO: 1183 - DNA, 203 bp, Artificial sequence
  synthetic
ggcgcgccagtccttcctggaagtcctgaagctctcgcagtgcagtgagttcatgcaccttcttgccaagcctcagtctttgggatctggggaggccgcctggttttcctccctccttctgcacgtctgctggggtctcttcctctccaggccttgccgtccccctggcctctcttcccagctcacaccgactcggaccgatg

SEQ ID NO: 1184 - DNA, 203 bp, Artificial sequence
  synthetic
ggcgcgccagtcctgcatacctgcctgggtgtccaaatgtaactagatgctttcacaaaccccacccacaaagcagcacatgtttttaagacttcagttttctattcacatcggcctcataatacccaccctgacctgctgtaaaagacctggaacaaacaaaaatgattacacctacagtgaagatgcgactcggaccgatg

SEQ ID NO: 1185 - DNA, 203 bp, Artificial sequence
  synthetic
ggcgcgccagtcctaatttgaattggggcgtgtctagaaagagaagccatagtcggcgagcaacgctggagcatcccgctctggtgccgctgcagccggcagagatggttgagctcatgttcccgctgttgctcctccttctgcccttccttctgtatatggctgcgccccaaatcaggaaaatgctgcgactcggaccgatg

SEQ ID NO: 1186 - DNA, 203 bp, Artificial sequence
  synthetic
ggcgcgccagtcctcgtgggaacggcctgacagtcactcgtcaaaggaagtggctgccggcagctcttgacccggaatcggatcctagtcccaccccctccgctccaggcttccttctgcaacaggcgtgggtcacgctctcgctcggtctttctgccgccatcttggttccgcgttccctgcacaaacgactcggaccgatg

SEQ ID NO: 1187 - DNA, 203 bp, Artificial sequence
  synthetic
ggcgcgccagtcctgcctccgcgcgccaaagtcaaaccccgacacccgccggcgggccggtgagctcactagctgacccggcaggtcaggatctggcttagcggcgccgcgagctccagtgcgcgcacccgtggccgcctcccagccctctttgccggacgagctctgggccgccacaagactaaggacgactcggaccgatg

SEQ ID NO: 1188 - DNA, 203 bp, Artificial sequence
  synthetic
ggcgcgccagtcctcttcctcactggggaattgccggaaagagcaaacaaaaaaggcgctggtgtaggctccaaaataaacacatctgaattcatgatggcatcgacagaggctcttattggattaaaagtttcaaaacaaacaataacgctttggaaaaagggttgaatgcaccctcaggcacgacccgactcggaccgatg

SEQ ID NO: 1189 - DNA, 203 bp, Artificial sequence
  synthetic
ggcgcgccagtcctccacgctcgtgccgctccccccccgcgctcccagttgacgctctgggccgccacctccgcggaccctgagcgcaagagccaagccgccagcgctgcgatgtgggccacgctgccgctgctctgcgccggggcctggctcctgggagtccccgtctgcggtgccgccgaactgtgcgactcggaccgatg

SEQ ID NO: 1190 - DNA, 203 bp, Artificial sequence
  synthetic
ggcgcgccagtcctgaaaacctgaatacggaactgaagcagcagctcagtttctcactccgaagtggcagcagccagagagggagtcggtgtggacgcgaggagccgggcgcttagaacagaggcttgcacaggtggagatgtggaagtctgtagtgggccatgatgtgtctgtttccgtggagaccccgactcggaccgatg

SEQ ID NO: 1191 - DNA, 203 bp, Artificial sequence
  synthetic
ggcgcgccagtcctaacgctcagcgaaattgactgccccactgtcatctgcctctcaatttggtactctgtaactctgtgaccaccaagaagcctttttccgtcccccacaaagctctttttggaaaattccctacgggagctgaattttaagcccatttactttataggaagaaacagaaaggcagccgactcggaccgatg

SEQ ID NO: 1192 - DNA, 203 bp, Artificial sequence
  synthetic
ggcgcgccagtcctgcgcgcgcgcgaggcttcccctcgtttggcggcggcggcggcttctttgtttcgtgaagagaagcgagacgcccattctgcccccggccccgcgcggaggggcgggggaggcgccgggaagtcgacggcgccggcggctcctgcaggaggccactgtctgcagctcccgtgaagcgactcggaccgatg

SEQ ID NO: 1193 - DNA, 203 bp, Artificial sequence
  synthetic
ggcgcgccagtcctgtgttcctcttttcctcggttcccagtgttctggcaggtaaggaacgccggctcttcgcctctcagcgcggcttgtcctttgttccggacgcccgctcctcagccctgcggctcctggggtcgctgctgcatcccgcacgcctccaccggctgcagacccatggccgagcgcggcgactcggaccgatg

SEQ ID NO: 1194 - DNA, 203 bp, Artificial sequence
  synthetic
ggcgcgccagtcctggaagaagaaagaaaaaggaccagaaccgtgaactgaagggacagggaacagccagacgagagcttcagccatcacgaggatgatttcggaacctggagaaaatgtaagttaaatatatctacactctgatcctatctcaagagagagatattttactcatttcctggttgtgacgactcggaccgatg

SEQ ID NO: 1195 - DNA, 203 bp, Artificial sequence
  synthetic
ggcgcgccagtcctcagttcctgcgcgtgcgcgcttggcctccctagtgcgggctggcagtgcgggcagagcccggctgagaggggcggccctggaggagacggaggccgcgggtgggcccgaggcgcaagaggaagatgaggacgaagaagaggcgctgccgcactccgaggccatggacgtgttcccgactcggaccgatg

SEQ ID NO: 1196 - DNA, 203 bp, Artificial sequence
  synthetic
ggcgcgccagtccttcaaaggaagaggccccttaatatcctggaataatgggacccatccccgtaatcagtgaatctcatccacccgcttgccagcttctacccgcagcaagtagaagctaagtcctggctcaaatctcttccctccctccctctcccagctgtcagtgcttttggacttgtgctcagcgactcggaccgatg

SEQ ID NO: 1197 - DNA, 203 bp, Artificial sequence
  synthetic
ggcgcgccagtcctaaccgagattgcgacgaacaaccaggaagcggctgggttgagagctgtccccggttctccgttctgctctcgggggcaccttccggggttcctaagccgcggggcccctcgctgcccctcgaggccctttccctgacctaggctttggcctgggctactcgttccggagccgcccgactcggaccgatg

SEQ ID NO: 1198 - DNA, 203 bp, Artificial sequence
  synthetic
ggcgcgccagtcctagggactgttctcttcagtgagtggcaggtgtccggaggctgcactgcagcgtagccgcttgggcgggcggccagtggcgactacagcagggactggctgccaacccctccggctacgggccccttaccgagctcccagactggtcatatgcggatggccgccctgctcccccacgactcggaccgatg

SEQ ID NO: 1199 - DNA, 203 bp, Artificial sequence
  synthetic
ggcgcgccagtcctggagggccctgagggaggggtcagacgctttaggaaagagttaatgcgaagagggggaggggataggacgaagaaaccgaagggaaagctcagggccgccaacttccagctgcagcggcgactttcagtttcatttccacggaccctcctgcctgggccgcagccgccgccgcgcgactcggaccgatg

SEQ ID NO: 1200 - DNA, 203 bp, Artificial sequence
  synthetic
ggcgcgccagtccttttacttctccctagagcaggggtgtttgccagcagcctgcactctcagaaatcagacttgagtggccggaacccttgagaccagaggcttaccatgctgctccctaggagggccaggaactgctgacgtgaccactggacagttattcgtgtctcttacaattaccaaacagacgactcggaccgatg

SEQ ID NO: 1201 - DNA, 203 bp, Artificial sequence
  synthetic
ggcgcgccagtccttgtggagtcgggactggagctgctgccgcggcgacgccggggatctttgtcgctagctcccggcccttctgccccgccgccttccctcagtcagcgttgcccactcctctccggccgggcgcccctgcctccatttcccgctctctgtccaccacacacacggcccccccgatccgactcggaccgatg

SEQ ID NO: 1202 - DNA, 203 bp, Artificial sequence
  synthetic
ggcgcgccagtcctggaaaaccgcagcggggtagcgcgggcgctgccggaacttgtagttccacctcccgccgcgctaaatagccggaaacgggggcggccagaacagagaactaccgaggcgaagcacctgtggaatcctctcaagaggaacagtcattgtgtgaaggttcaaattcagctgttagccgactcggaccgatg

SEQ ID NO: 1203 - DNA, 203 bp, Artificial sequence
  synthetic
ggcgcgccagtcctggcaccctgtcagtccggaaataactgcagcatttgttccggaggggaaggcgcgaggtttccgggaaagcagcaccgccccttggcccccaggtggctagcgctataaaggatcacgcgccccagtcgacgctgagctcctctgctactcagagttgcaacctcagcctcgctcgactcggaccgatg

SEQ ID NO: 1204 - DNA, 203 bp, Artificial sequence
  synthetic
ggcgcgccagtcctcttgacctctggcccaagatggtggcgcccagagcttcgctcttgctgctcccctgaggtgaactgaagccagcagccccgcatcatgtcaaagctcggccgggccgcccggggcctcaggaagcccgaggtcggcggtgtgatccgggcgatcgtgcgggcaggcctggccatcgactcggaccgatg

SEQ ID NO: 1205 - DNA, 203 bp, Artificial sequence
  synthetic
ggcgcgccagtcctcgccgtcatttcggagcgactcagcgcctgcccgccctctcgccgcgtcgccggtgcctgcgcctcccgctccacctcgcttcttctctcccggccgaggcccgggggaccagagcgagaagcggggaccatgttccgacgcaagttgacggctctcgactaccacaaccccgccgactcggaccgatg

SEQ ID NO: 1206 - DNA, 203 bp, Artificial sequence
  synthetic
ggcgcgccagtcctgcagcccagctgacgacagaccacagcggcatccggcagcccccagtcgtcgtcacacacggtgccccacaggccactgtgcaggatctccactcggccctgacacagggtggagccagccatcctgagacgtccgtacagcccgtactggtggagtgtcaggaggccactctgcgactcggaccgatg

SEQ ID NO: 1207 - DNA, 203 bp, Artificial sequence
  synthetic
ggcgcgccagtccttgcaggtaccatggagctgagctataggctcttcatctgcctcctgctctggggtagtactgagctgtgctacccccaacccctctggctcttgcagggtggagccagccatcctgagacgtccgtacagcccgtactggtggagtgtcaggaggccactctgatggtcatggtcgactcggaccgatg

SEQ ID NO: 1208 - DNA, 203 bp, Artificial sequence
  synthetic
ggcgcgccagtcctagttggacccagtcgcccaggcaccgcccgcgccccgcggccgtctcctgcgcctcccagaggagggagttcgagcatcccccgcggcggccactcctcggggccaggagcggggaagcgaagtgcgagagaccccggaccccagcgctgtctcttcccgccgcccgaaccacccgactcggaccgatg

SEQ ID NO: 1209 - DNA, 203 bp, Artificial sequence
  synthetic
ggcgcgccagtcctgtcctcagttccttagtgactctaaataaagtaacagcagacatcgggctggggagtgactccgtgtgtgcccggccctcgtctcaccgcataaagtcttttgactcccttggatcacagtctttgcacactcggacttcaaaactgttccagggccagtatcggagtttggaccgactcggaccgatg

SEQ ID NO: 1210 - DNA, 203 bp, Artificial sequence
  synthetic
ggcgcgccagtcctagcttctcccccatgccttccctttcacgcttccgtcctgacgcaaacgtggggccgccttccgcactgcgggcttgtccttggccctgccctactcagtttcctgaagcatgcgcagttgcctttccgtcaattcctgtcctgggcgtacgtcaagatggcggcgtctgtattcgactcggaccgatg

SEQ ID NO: 1211 - DNA, 203 bp, Artificial sequence
  synthetic
ggcgcgccagtcctccagctcgggccttagaacttctgaacgggcagtgcgggtaggccctgcttagcccttcccggaggacacctgaccaaaagaggaagatagtcttgggacccttgcatggtgtttcaaagggtggtgaagaactaaggtagaagaatacatgttcacttccagtgaacaagagccgactcggaccgatg

SEQ ID NO: 1212 - DNA, 203 bp, Artificial sequence
  synthetic
ggcgcgccagtcctaggtttccgcttccgctcttccctggtccagtccaccctggcggggtcgcagggttgggatggcggctggaggcgatcatggttcgcccgacagctaccgctcacctcttgcctcccgctatgccagcccggagatgtgcttcgtgtttagcgacaggtataaattccggacatcgactcggaccgatg

SEQ ID NO: 1213 - DNA, 203 bp, Artificial sequence
  synthetic
ggcgcgccagtcctgattgccacccaggacgatgagcggctgagatggagacgtctgcctcagccactgcctccgagaagcaagaagccaaaagtgggatcctggaggccgctggcttccccgacccgggtaaaaaggcctctcctttggtggtggctgcagcggcagcagcagcggtagctgcccaacgactcggaccgatg

SEQ ID NO: 1214 - DNA, 203 bp, Artificial sequence
  synthetic
ggcgcgccagtcctccgaacggtcgccgcggccaactgcctcgcccgcctggcagcctaaccctccttctcttcttctcctctccggcttcgcgcggccctgcctccctctcgcccggcggcatccgcttgctgctgccaccgcctcctcatcttctgcccggccaaccggcctgccccgctgcagtgcgactcggaccgatg

SEQ ID NO: 1215 - DNA, 203 bp, Artificial sequence
  synthetic
ggcgcgccagtcctgacaccccctgggatcacactgagcttgccacatccccaaggcggccgaaccctccgcaaccaccagcccaggttaatccccagaggctccatggagttccctggcctggggtccctggggacctcagagcccctcccccagtttgtggatcctgctctggtgtcctccacacccgactcggaccgatg

SEQ ID NO: 1216 - DNA, 203 bp, Artificial sequence
  synthetic
ggcgcgccagtcctgggtgcgagctggagactccgcgggagcgcggccgggaggcttcgccccggagctggcccgacgcctcccgagctggcagggctctcggcggaggtcggagcgtgggcttcctcctcccgccagggaaaacagagaggatgaaggcctatctaaagagcgcagaaggcttttttcgactcggaccgatg

SEQ ID NO: 1217 - DNA, 203 bp, Artificial sequence
  synthetic
ggcgcgccagtcctgccccgcacgcactggcgagctgggagcgccaccacggctttcaaaaaacccgcacacaccaagataataatgtgtcgttcgctcgtttcgcgcaagcggagtcgcgtccgccttcccgagctccggcacacagacctcaggccgctctcgcgctctccggggccccgagaacacgactcggaccgatg

SEQ ID NO: 1218 - DNA, 203 bp, Artificial sequence
  synthetic
ggcgcgccagtcctggcaggtggtagccttcccgcccttctggcctctccatcccctgctgcgggggaccgcgcaagcgcagtgagtactgcacgttgtcgcgggccagtaacgtcatcagacgtgtgtgtgtccctgcggcgctaagaaggggagactgaggctgaggctggggaacatcgggcagccgactcggaccgatg

SEQ ID NO: 1219 - DNA, 203 bp, Artificial sequence
  synthetic
ggcgcgccagtcctaggatgtgtagggggcggggcccggcggaagcgtatataaggccgggctcggggacgcccccccctcactcgcgcgttaggaggctcgggtcgttgtggtgcgctgtcttcccgcttgcgtcagggacctgcccgactcagtggccgccatggcatcagatgaaggcaaactttcgactcggaccgatg

SEQ ID NO: 1220 - DNA, 203 bp, Artificial sequence
  synthetic
ggcgcgccagtccttcccagacccggggctctccaaggccccgcgcttccgagctccgcgcaaactctggcttctcttgtacgacagaggtggtttgctcttccgttgccccgtggcttcagctcatctttggcaggaaggcgaggcttccgcccggcacaggggatgtccagctcgccgctgtccaacgactcggaccgatg

SEQ ID NO: 1221 - DNA, 203 bp, Artificial sequence
  synthetic
ggcgcgccagtccttgcggctcacagagctagcgcctctctgggtgtccgtgccagtgctgcgcgggaaggcaccaccaccacagccgccgccgctggccagggtgctggacaagacgggcccgtcggccacctcgccagctcaggcacccgctgcagccgtcgctgtctcctcccagaccggtcccccgactcggaccgatg

SEQ ID NO: 1222 - DNA, 203 bp, Artificial sequence
  synthetic
ggcgcgccagtcctagtttcgtccgagctcagtagagttttgctgttaagactgcgcgaggagctagagagagcggagagcgctgagccgggccgcacccgccgagccgtcttgatactgatggacattgtgtgggccagaggcagggatggttggctatgaccccaaaccagatggcaggaataacacgactcggaccgatg

SEQ ID NO: 1223 - DNA, 203 bp, Artificial sequence
  synthetic
ggcgcgccagtcctggtctgagctggggagcggaagccacttgtccctctccctccccaggacttctgtgactcctgggccacagaggtccaaccaggctaagggcctggggataccccctgcctggcccccttgcccaaactggcaggggggccaggctgggcagcagcccctctttcacctcaactcgactcggaccgatg

SEQ ID NO: 1224 - DNA, 203 bp, Artificial sequence
  synthetic
ggcgcgccagtcctgacagcggcgtggcggcggcggtggcggtagcgacggcacgccgtagggcggtcagaaggtttccggttccggtgtaacgttcgggctccgtctcaggggctgaagtttgtgaggtgtagtattgagtcctgtttgagctattgttctctttttcctgaaaaatggcactgtcacgactcggaccgatg

SEQ ID NO: 1225 - DNA, 203 bp, Artificial sequence
  synthetic
ggcgcgccagtcctaagggttctggattggaggggagagcaagggagggaggaaggcggtgagagaggcgggggcctcgggagggtgaaaggagggaggagaagggcggggcacggaggcccgagcgagggacaagactccgactccagctctgacttttttcgcggctctcggcttccactgcagcccgactcggaccgatg

SEQ ID NO: 1226 - DNA, 203 bp, Artificial sequence
  synthetic
ggcgcgccagtcctaacgcaggggcggaaccgcatgactggcagtggcatcagcgatggcggctgcgtcggggtcggttctgcagcgctgtatcgtgtcgccggcagggaggcatagcgcctctctgatcttcctgcatggctcaggtgattctggacaaggattaagaatgtggatcaagcaggtttcgactcggaccgatg

SEQ ID NO: 1227 - DNA, 203 bp, Artificial sequence
  synthetic
ggcgcgccagtcctcctcccgccggcccgcgccgctgcactcgccctctcctctcgccccccggcaaactttcggcccctccccgcccctcgcccgttattcgtcgtggctcaagcccggccacgccgccccaagggctcctcccgacctcccggcctgccgctccggccactgcgggatccagaaaccgactcggaccgatg

SEQ ID NO: 1228 - DNA, 203 bp, Artificial sequence
  synthetic
ggcgcgccagtcctctcaacctccgtggctagtcttgacgtggcgggttgctttccaaaatggcgcgggtgctgaaggctgcagccgcgaatgccgtagggcttttttccagacttcaagctcccattccaacagtaagagcttcttccacatcacagcccttggatcaagtgacaggttctgtgtggcgactcggaccgatg

SEQ ID NO: 1229 - DNA, 203 bp, Artificial sequence
  synthetic
ggcgcgccagtcctaaaggaaccgggttgtcttgggccgggcagggcgggtggtgactctcaaaaggaaataggatcatggcagcagatgatgacaatggtgatggaacaagtttatttgatgtcttttctgcttctcctcttaagaacaatgatgaaggctcactggacatatacgctgggttggaccgactcggaccgatg

SEQ ID NO: 1230 - DNA, 203 bp, Artificial sequence
  synthetic
ggcgcgccagtcctgcttttcaccctctaccctcccctcagcctggccttttcttccgccctcacagccaccgcgacccaacgctgaggaaagaccccgacttgtggtgtccttccccttgcccaaactggccacgaaaggacatatagcgagagagaaagaggattttctgccgtctcttggcaaaacgactcggaccgatg

SEQ ID NO: 1231 - DNA, 203 bp, Artificial sequence
  synthetic
ggcgcgccagtcctcggaagacaacggaggggccgagcgtccgagccactccgcggggaccgaacgagcagcccgaagcggcggcggccgaggacggggacagcgacgacgcggaggcagagaagggaacgcccggcccagccccgtagcacaggcggagtgcagcggaggcccctgccgctgccgtccgactcggaccgatg

SEQ ID NO: 1232 - DNA, 203 bp, Artificial sequence
  synthetic
ggcgcgccagtcctagttacctctcccctttcacgtagttttcatttgtggtgagattctctcccaggccacaagacatttcctgctcggaaccttgtttactaatttccactgcttttaaggccctgcactgaaaatgcaagctcaggcgccggtggtcgttgtgacccaacctggagtcggtcccgcgactcggaccgatg

SEQ ID NO: 1233 - DNA, 203 bp, Artificial sequence
  synthetic
ggcgcgccagtcctctgtctctgcagccagatccaggctcctggaagaaccatgtccggcagctactggtcatgccaggcacacactgctgcccaagaggagctgctgtttgaattatctgtgaatgttgggaagaggaatgccagagctgccggctgaaaattacccaaccaagagaaatctgcaggcgactcggaccgatg

SEQ ID NO: 1234 - DNA, 203 bp, Artificial sequence
  synthetic
ggcgcgccagtcctgactgggaggtgctggtcctagggaagctcaagtgggacctggctgctgtgattgcacatgatttcctggccttcattctgcaccggctctctctgccccgtgaccgacaggccttggtcaaaaagcatgcccagacctttttggccctctgtgctacagattatacctttgcccgactcggaccgatg

SEQ ID NO: 1235 - DNA, 203 bp, Artificial sequence
  synthetic
ggcgcgccagtcctataacacccggccccgccgggcggccgcgggtgggtagaggtgcgcgcctgggacctgaacatggacttcccgtgcctctggctagggctgttgctgcctttggtagctgcgctggatttcaactaccaccgccaggaagggatggaagcgtttttgaagactgttgcccaaaacgactcggaccgatg

SEQ ID NO: 1236 - DNA, 203 bp, Artificial sequence
  synthetic
ggcgcgccagtcctgatgatgtcagcactgcttccggtcggtggcgcttctctctggcccgagccagcatgatccgctgggcccccagcgcatctcctggaagagcccactcaccctggacgagctcttcggtagcctcagaccgtccttgaagaggatgactgagacattatgggccacgcgctgtgcgactcggaccgatg

SEQ ID NO: 1237 - DNA, 203 bp, Artificial sequence
  synthetic
ggcgcgccagtcctgcgtcacgcagcgcacgtcgccgcgcgcctgcgctcttttccacgtgcgaaagccccggactcgtggagttgtgaacgccgcggactccggagccgcacaaaccagggctcgccatgaagccaggattcagtccccgtgggggtggctttggcggccgagggggctttggtgaccgactcggaccgatg

SEQ ID NO: 1238 - DNA, 203 bp, Artificial sequence
  synthetic
ggcgcgccagtcctaggaaggaagtggggccctgcggcgcccagccaccccctgacggcttccccacgggaggacgcgaggccccggcccagccatggccccctggcgcaaagctgacaaggagcggcacggcgtggccatatacaacttccaaggcagcggagccccccagctctccctgcagatcgcgactcggaccgatg

SEQ ID NO: 1239 - DNA, 203 bp, Artificial sequence
  synthetic
ggcgcgccagtcctacagcatggagtggggttacctgttggaagtgacctcgctgctggccgccttggcgctgctgcagcgctctagcggcgctgcggccgcctcggccaaggagctggcatgccaagagatcaccgtgccgctgtgtaagggcatcggctacaactacacctacatgcccaatcagtcgactcggaccgatg

SEQ ID NO: 1240 - DNA, 203 bp, Artificial sequence
  synthetic
ggcgcgccagtcctcagtgctgtccgggctggtttgcccggtccctgactaacggctttctgccccttctctcgccacccctgcccaaggtcgcccctctgccttcgcccctgtcccgggagggtgggaagctttgaccccgccctgcccactcgcgtctccgcagccgtagccgcgcctgtcccaatcgactcggaccgatg

SEQ ID NO: 1241 - DNA, 203 bp, Artificial sequence
  synthetic
ggcgcgccagtcctcgaagtcgctgcgctcagtgcgcaggcgcgaagaagctggcaggggcacgagccgggggcgggtttgaagacgcgtcgttgggttttggaggccgtgaaacagccgtttgagtttggctgcgggtggagaacgtttgtcaggggcccggccaagaaggaggcccgcctgttacgcgactcggaccgatg

SEQ ID NO: 1242 - DNA, 203 bp, Artificial sequence
  synthetic
ggcgcgccagtcctgatccgggatgcggcggcccaatcggaaggtggaccgaaatcccgcgacagcaagaggcccgtagcgacccgcggtgctaaggaacacagtgctttcaaaagaattggcgtccgctgttcgcctctcctcccgggagtcttctgcctactcccagaagaggagggaagcacagtcgactcggaccgatg

SEQ ID NO: 1243 - DNA, 203 bp, Artificial sequence
  synthetic
ggcgcgccagtcctgccaggttactggccactgctcacctaggcgctagcaaacttctgccaagatcggaactgagtactaaacagcctccacagttctccctggtgccgtctccggcttggcgccgcatcctcctctgggctcgcgatggccgcgtcccctcccgctgcggacgggtcctttggtaccgactcggaccgatg

SEQ ID NO: 1244 - DNA, 203 bp, Artificial sequence
  synthetic
ggcgcgccagtcctagtgctaagcaaatacaggaaccaaaaaggtttatagaggctgccttatgctgtctcatccagttcctttgcggtcctcttcttcagcacatgccaaagctgttcctcacggcctgtgagacaagagcatcttggatgtaggacaatggaagagttagatgccttattggaggacgactcggaccgatg

SEQ ID NO: 1245 - DNA, 203 bp, Artificial sequence
  synthetic
ggcgcgccagtcctcggcgcctataaagtcgccctccgcccggacgtaaacaaacctcgcctggctcccagctggtgctgaagctcgtcagttcaccatccgccctcggcttccgcggggcgctgggccgccagcctcggcaccgtcctttcctttctccctcgcgttaggcaggtgacagcagggaccgactcggaccgatg

SEQ ID NO: 1246 - DNA, 203 bp, Artificial sequence
  synthetic
ggcgcgccagtcctgagtcctgctagatccccgcaagctaggccagctcctcccactgcctcccttcctctttctcctcctcttactcctttccagccagaccttggctgtctacaggatgggggacaccctgagccccggacatggcaaccacagagagagcagcccttttctttcccccttggaggcgactcggaccgatg

SEQ ID NO: 1247 - DNA, 203 bp, Artificial sequence
  synthetic
ggcgcgccagtcctagcacccgtaggtcggattatctggtaaggcaccggaagtgaccgcctcgcggctgcttcctctcctggagtccagagtcccgttgctccgccgcgatattcagtaaaccactgggagtccggcagcatggaggcagcgcgccctcccccgacggcagggaagttcgtggtggtcgactcggaccgatg

SEQ ID NO: 1248 - DNA, 203 bp, Artificial sequence
  synthetic
ggcgcgccagtcctcgaaggggcgtggccaagcgcaccgcctcggggcggggccggcgttctagcgcatcgcggccgggtgcgtcactcgcgaagtggaatttgcccagacaagcaacatggctcggaaacgcgcggccggcggggagccgcggggacgcgaactgcgcagccagaaatccaaggccacgactcggaccgatg

SEQ ID NO: 1249 - DNA, 203 bp, Artificial sequence
  synthetic
ggcgcgccagtcctaagtgtgcagcagatcttcttccgggcggacgtggagccggaagcggaggttccgggctccgggatgaaaggagggaacgcagacagctggcagagagagaagttggctagcatggaatcaccagaggagcctggagcatccatggatgagaactactttgtgaactacactttcgactcggaccgatg

SEQ ID NO: 1250 - DNA, 203 bp, Artificial sequence
  synthetic
ggcgcgccagtcctccgccgcggtcgaggatcctggaggtttgtccccgccgccccgacgcttccgccgggtccgtcggcacgtcggccctgcctcccggaccaccctgcggggcgcaccagcgatctggggtgcggggctcggcctccctgcgctcctggctgacggtgtgaccttgggtcttaacccgactcggaccgatg

SEQ ID NO: 1251 - DNA, 203 bp, Artificial sequence
  synthetic
ggcgcgccagtcctaggcatcggcgcggtcagcctcgtcgcgcgcccacgcccccacgccggctcttcccggggtccttccgtgcgcgttgatatgattggccggcgaatcgtggttctcttttcctccttggctgtctgaagatagatcgccatcatgaacgacaccgtaactatccgcactagaaacgactcggaccgatg

SEQ ID NO: 1252 - DNA, 203 bp, Artificial sequence
  synthetic
ggcgcgccagtcctcaacagaagccaagaaggaagccgtctatcttgtggcgatcatgtataagctggcctcctgctgtttgcttttcataggattcttaaatcctctcttatctcttcctctccttgactccagggaaatatcctttcaactctcagcacctcatgaagacgcgcgcttaactccggcgactcggaccgatg

SEQ ID NO: 1253 - DNA, 203 bp, Artificial sequence
  synthetic
ggcgcgccagtccttgcattttgctccggagcgtccagagtcctggccctgagcgggaatcgcagtggccgaggctgagcggcaggcggatcgccccgaccctcactcctggcgtctgagtctctggcgtagcccatgctgagtgggcggctggtcctgggtctggtctccatggctggccgcgtttgcgactcggaccgatg

SEQ ID NO: 1254 - DNA, 203 bp, Artificial sequence
  synthetic
ggcgcgccagtcctgtcttaaccatgaacttctctggaggagggaggcaggaagcagcagggtccaggggtagaagggctcccagaccccgagaacaggaccgagacgtgcagctgtccaaggctctgtcctatgccctgcgccatggggccttgaagctggggcttcccatgggagctgatggcttccgactcggaccgatg

SEQ ID NO: 1255 - DNA, 203 bp, Artificial sequence
  synthetic
ggcgcgccagtcctagtcatccccaaaacgaggggatatcagcttaccgaggccgcaggttttcctagtccctacctcatagatatgtaggacatccccgggcccggaatgcggctctctgaccctctctgtgccctcccccgccccccgaaccaggcttggcgggcggaggcgccagcggatgtctccgactcggaccgatg

SEQ ID NO: 1256 - DNA, 203 bp, Artificial sequence
  synthetic
ggcgcgccagtcctcttgccgcgctgcactccaccacgcctcctccaagtcccagcgaacccgcgtgcaacctgtcccgactctagccgcctcttcagctcgccatggatcccaactgctcctgcgccgccggtgactcctgcacctgcgccggctcctgcaaatgcaaagagtgcaaatgcacctcccgactcggaccgatg

SEQ ID NO: 1257 - DNA, 203 bp, Artificial sequence
  synthetic
ggcgcgccagtcctcccccacacaccccagccgaggcccggaaggggccaggcgcgcttccgtctccgccggggatgcacggagggcggagctgcggcccgaggacgcgacgcgagcccagttccggcgaggaggccgcgccagtgacagcgatggcggcggagtcggcgctccaagttgtggagaagcgactcggaccgatg

SEQ ID NO: 1258 - DNA, 203 bp, Artificial sequence
  synthetic
ggcgcgccagtcctatgcgcagaagcactccgggcgtgctgccggcggcggtaggtggcgcgcgggtccggcgggcggttggcttgagcgggaccggagctgaggcaggaagagccggcgccatggtggagaaggaggaggctggcggcggcattagcgaggaggaggcggcacagtatgaccggcagcgactcggaccgatg

SEQ ID NO: 1259 - DNA, 203 bp, Artificial sequence
  synthetic
ggcgcgccagtcctactggtgggaactggattttgcggctgcagaggacttccccaaattttgccacattaacagctgactgcacatctgagccccgaggtgaagcagggcctcaggtagccagggaactggttgagcagaggaaatcggagagacctttttttttgtcatgaacaggctcagtgtgacgactcggaccgatg

SEQ ID NO: 1260 - DNA, 203 bp, Artificial sequence
  synthetic
ggcgcgccagtcctggccgcccactgaggatctgctggctgcagcgagtggaaggacctgctcggctggaacgttttttttttttttccctcccaggcgacgtccgatgggtgtgtcgggcaggaggtgatatttgacaggctgcgcgcgggcgagctgccgcggagcacccggcaggggctgacagccgactcggaccgatg

SEQ ID NO: 1261 - DNA, 203 bp, Artificial sequence
  synthetic
ggcgcgccagtcctgcttctgccctcaaccaaaatggcgctagctcggaagctgccgaggtgctaggagttgccgaagcaagtccggaagctaccgagcgagtccggaagttgccgaaagggagcagcggggaaggaggatggcggatatcatcgcaagactccgggaggacgggatccaaaaacgtgcgactcggaccgatg

SEQ ID NO: 1262 - DNA, 203 bp, Artificial sequence
  synthetic
ggcgcgccagtcctagtctgggacgcgccgccgccatgatcatccctgtacgctgcttcacttgtggcaagatcgtcggcaacaagtgggaggcttacctggggctgctgcaggccgagtacaccgagggggatgcgctggatgccctgggcctgaagcgctactgctgccgccggatgctgctggcccgactcggaccgatg

SEQ ID NO: 1263 - DNA, 203 bp, Artificial sequence
  synthetic
ggcgcgccagtcctctcgtttgcgatgttccgttatctggatgcggcggagggatctggcggagggaggtgtttatgaggcgctgggggcggaggaggcgaattagtccgagtggagagagcgagctgagtggttgtgtggtcgcgtctcggaaaccggtagcgcttgcagcatggctgaccaactgacgactcggaccgatg

SEQ ID NO: 1264 - DNA, 203 bp, Artificial sequence
  synthetic
ggcgcgccagtcctgattcgcccacccactgtgccaacatggcggcgcccaggtcctaattcgggaaacgtgcaccttgactaattcggttttctgtggctacgagagcaggcttggcgggcggaggcgccagcggatgtctcatgcaaggatcgtctctgtggctaagcctcactttccgctccgcccgactcggaccgatg

SEQ ID NO: 1265 - DNA, 203 bp, Artificial sequence
  synthetic
ggcgcgccagtccttgacaggcatgagccaccgcgcctggccccttcttttgaatgggcctccttgcgtttccgtttcaatgccccgtgctacttttttgggagccccaaggctgtactgtttgattgactcctttttttcccctttctttttaacctaaattaaagctgccactgcagagccccgcccgactcggaccgatg

SEQ ID NO: 1266 - DNA, 203 bp, Artificial sequence
  synthetic
ggcgcgccagtcctacttccgggcgcggcgccggcttgctgccactgcagagccccgccatggaagacacgccgttggtgatatcgaagcagaagacggaggtggtgtgcggggtccccacccaggtggtgtgtacggccttcagcagtcacatcctggtggtggtgacccagtttgggaagatgggccgactcggaccgatg

SEQ ID NO: 1267 - DNA, 203 bp, Artificial sequence
  synthetic
ggcgcgccagtccttccccgcgcgggttcgcgtcgcgtctgcagtggccgaggctgctgcctgccgggcagatgggtccgccttgttccggctgcagctttcgccgccggggcttgctggctgtcgggaactagtcaactggagtttttgttgacttcccacggaaacatgccctgaactgtcacagacgactcggaccgatg

SEQ ID NO: 1268 - DNA, 203 bp, Artificial sequence
  synthetic
ggcgcgccagtcctaaatcagcatgtttattatttttaaaaaattagggcctggattttgacaatgtcaagatttaccgtatatccctgtttgtttggatacaccagtgacgtccacttctagaagacaaagttatattacttaaacaaccaaagatggagtctcgctcttcgcccaggctggagtgccgactcggaccgatg

SEQ ID NO: 1269 - DNA, 203 bp, Artificial sequence
  synthetic
ggcgcgccagtcctacgcgcgcttggccgcccgacgacgcgggagccgcacgcgccggacgaggctcgctgcgctccctgttgcccagcgcgggcccgttgaggcggagccctcagttcccggccaggacacggtctgggccgccgaatctccggccgaagagcggcggcggcagcggcgggaaaaaacgactcggaccgatg

SEQ ID NO: 1270 - DNA, 203 bp, Artificial sequence
  synthetic
ggcgcgccagtcctttcctcgcgttaccctccttccggacagcaccccctcccttctccggtagctcctacccctgcctgtgcgggcctcgtccccgcgcccagccctcggtgctgcctccgacagcgccgcgctctctcagccgcccccctgcccctcgggcccccctctctgctgcccctggcgcccgactcggaccgatg

SEQ ID NO: 1271 - DNA, 203 bp, Artificial sequence
  synthetic
ggcgcgccagtcctagagcgcgcgtcgtggaacgtcttggttgccacggcaagcgcgcgcgcgaggccttgggaacctcgggaccggcccccggcgagcgcagcggcgcccagtagtcatcttagtgggatttggggaagcaacagggctgtgtggggtaacctgccacctttaagtggaaatcagaacgactcggaccgatg

SEQ ID NO: 1272 - DNA, 203 bp, Artificial sequence
  synthetic
ggcgcgccagtccttggctgagttcttcctttgacaagatggcggcaggaggcagtggcgttggtgggaagcgcagctcgaaaagcgatgccgattctggtttcctggggctgcggcccacttcggtggacccagcgctgaggcggcggcggcgaggcccaagaaataagaagcggggctggcggcggcgactcggaccgatg

SEQ ID NO: 1273 - DNA, 203 bp, Artificial sequence
  synthetic
ggcgcgccagtccttgtcccctcgcgcagtcaccgagcgcagatcccgcgctctcgattggaacgcctccccatcactcagccacactcaggggctggacgcctcactcccgtttccgagccataaaaggtctaggaccgcttcccccgagccagcagaacatccagtcatggataaaaatgagctggcgactcggaccgatg

SEQ ID NO: 1274 - DNA, 203 bp, Artificial sequence
  synthetic
ggcgcgccagtcctggcggggaggggccgggggcctcggggacccaagcgcgagggaaaggcctggccgagagcgggccggagcccaggcctggcgcggcggcgcccgccagaacatccagtcatggataaaaatgagctggttcagaaggccaaactggccgagcaggctgagcgatatgatgacatcgactcggaccgatg

SEQ ID NO: 1275 - DNA, 203 bp, Artificial sequence
  synthetic
ggcgcgccagtcctacagatccgccatgacaaaggaggagagtcggggacttgagccgtggctccgacttgggcggagcctggaggggggtggttgcgatacggggaccggagaatttgcactttaaagtccgggtctgcccgttttcgtttcacagtaaccgacgtctcaagtcagaacatccagtccgactcggaccgatg

SEQ ID NO: 1276 - DNA, 203 bp, Artificial sequence
  synthetic
ggcgcgccagtccttgtgtgtgagtgcaggcaggctgacaatgatttcctcagtgattacgtacagagcgagtccctgcgggttaggggccccctctggagccatcctgatggctttgggggccttgcttccattttccattattatgtggactaccggagcgacagcgcagtccaagaccttgcaggcgactcggaccgatg

SEQ ID NO: 1277 - DNA, 203 bp, Artificial sequence
  synthetic
ggcgcgccagtcctcggcggcggcggcaccccgggcgcggcaatactgaacactgcgcagcttgcagaggtctcctggcagccctcattaggaattctgtctggccccgatcagaatactggagacgagaccacgagattgatgagtttgccttgggagtcggtaagaaggtgaagccaggggcgaaccgactcggaccgatg

SEQ ID NO: 1278 - DNA, 203 bp, Artificial sequence
  synthetic
ggcgcgccagtcctagtaagccagcgtggctacgccatcacgaccggcggtggcacatgcgcaatagcgagacgctggagcgcggcgtaggtggctgccgagtcttttcctgtttagggtcttatcctggcattgagggcgccggactggcgcttttggccgacttggcattgggtgggcggcttcttcgactcggaccgatg

SEQ ID NO: 1279 - DNA, 203 bp, Artificial sequence
  synthetic
ggcgcgccagtccttaagtgcactttttgctgatacttcatttctaatcttgtagaaaatttcagctgtagcccttggactagaagctgaaataacagaagctgtgtacgatgcattagggtattgaagaaaattaacttttgaattaaatatttggaatataaggaaataaggaaagttgactgaaacgactcggaccgatg

SEQ ID NO: 1280 - DNA, 203 bp, Artificial sequence
  synthetic
ggcgcgccagtccttcaagaggcgacgaggaagcggccgcctccctgcgccccgcccctccggctagctcgctggctcccggctcctcccgacgtctcctacctcctcacggctcttcccggcgctctcctggctcccttctgccccagctccgtctcggcggcggcgggcagttgcagtggtgcagacgactcggaccgatg

SEQ ID NO: 1281 - DNA, 203 bp, Artificial sequence
  synthetic
ggcgcgccagtcctgatatctctggaatagactgcgctaccctgcgccgccgccgtcaaactcccgcagacttctctgtagatcgctgagcgatactttcggcagcacctccttgattctcagttttgctggaggccgcaaccaggcccgcgccgccaccatgtttcgaaatcagtatgacaatgatgcgactcggaccgatg

SEQ ID NO: 1282 - DNA, 203 bp, Artificial sequence
  synthetic
ggcgcgccagtcctaccttcccggccagcggtagcaactgcagaactgcaggagactatctttctagacaaggcagttgaggaggagggagcgcttgagggggactggcctggcgtgcactccgcacctcggggacattattgcgcgtggaacggctgcttttggaagactattgcccagaagaaaagcgactcggaccgatg

SEQ ID NO: 1283 - DNA, 203 bp, Artificial sequence
  synthetic
ggcgcgccagtcctcctcccacctcccgggaaccctggctgagtgtgcgtgtgtgggagcgcgagagccccccgacagccaccccttggggcgcgcggctgcagttagggccttggcccctccaccagaggaaggtgctgccacgtgtctgctccttctgaacctccaggtttctgctacgttgcccccgactcggaccgatg

SEQ ID NO: 1284 - DNA, 203 bp, Artificial sequence
  synthetic
ggcgcgccagtccttcagctccctgccaggccagacccggcagacagatgagggcccaggaggcctggcgggcctgggggcgctacggtgggagaggaagccaggggtacctgcctctgccttccagggccaccgttggccccagctgtgccttgactacgtaacatcttgtcctcacagcccagagccgactcggaccgatg

SEQ ID NO: 1285 - DNA, 203 bp, Artificial sequence
  synthetic
ggcgcgccagtcctccgctccctggcgtgactcggcactgagagtcccgggagaagactcggcggtcgccacctcttctgtccaggcctcggccttcctgagcatctctccttcctctcccagatcgtcttctccttcagtttcaaagccagtggcgtcgcggccaccctgccgggctctctgtgaggcgactcggaccgatg

SEQ ID NO: 1286 - DNA, 203 bp, Artificial sequence
  synthetic
ggcgcgccagtcctccaactgaagctgcatctcaaagccgaagattccagcagcccaggggatttcaaagagctcagactcagaggaacatctgcggagagacccccgaagccctctccagggcagtcctcatccagacgctccgctagtgcagacaggagcgcgcagtggccccggctcgccgcgcccgactcggaccgatg

SEQ ID NO: 1287 - DNA, 203 bp, Artificial sequence
  synthetic
ggcgcgccagtccttcataaaaggaaaaaaaagcgtgtgcggttctcgacgtgccgccaatcttcgaacgcaggtctgtgatcatccgcagactccgaaaaagggttcgaggaacgcgcctgctcccctcgtcgcagtttccagcccgacgagcttgttttgtcccggactcggtgcccctgtagacacgactcggaccgatg

SEQ ID NO: 1288 - DNA, 203 bp, Artificial sequence
  synthetic
ggcgcgccagtcctatggagactgaaagtgagagtagcactttaggggatgacagtgtcttctggttggagtctgaagttataatccaggtgactgactgtgaagaggaagaaagggaagagaagttcaggaagatgaagtcctcagtacattctgaagaagatgattttgttccagagctacatagacgactcggaccgatg

SEQ ID NO: 1289 - DNA, 203 bp, Artificial sequence
  synthetic
ggcgcgccagtcctttgagtatttccgtccaatcaaaaggagactgtaagaggaggaggaggaggagatgactggggagcgggagctggagaatactgcccagttactctagcgcgccaggccgaaccgcagcttcttggcttaggtacttctactcacagcggccgattccgaggccaactccagcacgactcggaccgatg

SEQ ID NO: 1290 - DNA, 203 bp, Artificial sequence
  synthetic
ggcgcgccagtcctgcgcgcgcttgggcgcgcgccagggactccagggtcccttgccccgcgccgcttctccctcctccctctttcttcgggcagcctccccaccaccccacttcagcctcccccactcttgccgcctccatatcatcaagctctggtggcgcctggggggcttttcggatcggcaggcgactcggaccgatg

SEQ ID NO: 1291 - DNA, 203 bp, Artificial sequence
  synthetic
ggcgcgccagtcctagggctgaggcataaaactgccagagggtctcaaggcaggcaaagaagaaccatgaggctcatcctgcctgtgggtttgattgctaccactcttgcaattgctcctgtccgctttgacagggagaaggtgttccgcgtgaagccccaggatgaaaaacaagcagacatcataaacgactcggaccgatg

SEQ ID NO: 1292 - DNA, 203 bp, Artificial sequence
  synthetic
ggcgcgccagtcctcgggagctgcgagtgtccagctgcggagacccgtgataattcgttaactaattcaacaaacgggacccttctgtgtgccagaaaccgcaagcagttgctaacccagtgggacaggcggattggaagagcgggaaggtcctggcccagagcagtgtgacacttccctctgtgacccgactcggaccgatg

SEQ ID NO: 1293 - DNA, 203 bp, Artificial sequence
  synthetic
ggcgcgccagtccttgccgcgagcgcgtctccttcattcgcaggctgggcgcgttcgcagtcggctggcggcgaaggaaggcgctctcgggacctcgcgggcgcgcgtcttttggctcttgcccctgtccctgcggcttggggaaggcgtaacccggcggctaggcgcgggagaagtgcggaggagcccgactcggaccgatg

SEQ ID NO: 1294 - DNA, 203 bp, Artificial sequence
  synthetic
ggcgcgccagtccttgagggactgctaaggaagaggctgcatggcgcggtagtcccccgagtggaggtcggctgcccctgggaaaccagagagtcggagggagtccatctggagcggccaagtaggtcggggaagggccgcgcctgacgtctggccgcaggtggtgactctcaaaaggaaataggatccgactcggaccgatg

SEQ ID NO: 1295 - DNA, 203 bp, Artificial sequence
  synthetic
ggcgcgccagtcctgctccgcccccgcgccgccggccctagtctgcctgttttcgactcgcgctccggctgctgtcacttggctctctggctggagcttgaggacgcaaggagggtttgtcactggcagactcgagactgtaggcactgccatggcccctgtgctcagtaaggactcggcggacatcgcgactcggaccgatg

SEQ ID NO: 1296 - DNA, 203 bp, Artificial sequence
  synthetic
ggcgcgccagtcctgagcaacgtctccgagcaggcgctgggctagaggcgggtctcaaccagctactcattggaggcgggcttgagagcggcggccagggaggtgcggagcagcctcggcggcggcggccgaaccaaccgagtcggatcctgaccctaaaacctagtattttccacttgttcatcaatcgactcggaccgatg

SEQ ID NO: 1297 - DNA, 203 bp, Artificial sequence
  synthetic
ggcgcgccagtcctgccgacttggaaatgtgaacgcaagaagcaggcttgatttttttttctccccccttctctctctctctctctctctctcttcctctctccctctttctcctctctcacccacactcacgcacacctccaaaccgcacacccagacgcacacgcataccccagcgcccggcagttcgactcggaccgatg

SEQ ID NO: 1298 - DNA, 203 bp, Artificial sequence
  synthetic
ggcgcgccagtcctgggacggtagaagcctggaggaggagcttgagtccagccactgtctgggtactgccagccatcgggcccaggtctctggggttgtcttaccgcagtgagtaccacgcggtactacagagaccggctgcccgtgtgcccggcaggtggagccgcccgcatcagcggcctcggggacgactcggaccgatg

SEQ ID NO: 1299 - DNA, 203 bp, Artificial sequence
  synthetic
ggcgcgccagtcctgctgcctgagaaggattggcacgggcacagaccactgcccccacctgccctgcgccatctacccaagaaggctcggcacgggcaccaaccactgcctccaactgccccatgctgcctgagaaggcactgcacggccacccccaactgccccgcactgtccctacccgggcagcccgactcggaccgatg

SEQ ID NO: 1300 - DNA, 203 bp, Artificial sequence
  synthetic
ggcgcgccagtcctaagtccgtcctccccgttaggtggcgagcgcccgaggggaggggacagccgggcaagcaggaagctgcggcttaaaagggcaacccgcgcgggacccttcctccctagtcgcggggagtctgagaaagcgcgcctgtttcgcgaccatcacgcacctcccctccgcttgtggcccgactcggaccgatg

SEQ ID NO: 1301 - DNA, 203 bp, Artificial sequence
  synthetic
ggcgcgccagtcctcaccctcgcgatctgtcaagtctgtccccaggggaggtccccctttcgggaggaagtttttaaggggatttctcaaaatcacccccgcgcttccttcactccttccttagagccggaggtcggtgagggcccgcggaatcatctatctcgcccccgtcgcagcgcgcagggacccgactcggaccgatg

SEQ ID NO: 1302 - DNA, 203 bp, Artificial sequence
  synthetic
ggcgcgccagtcctctgcgtcagccagcccagctatttaagcaggctggcatcagcaaacacagcttccaaacccagggcttgcgcttgcctttgcctcttccacactaatgacagactgccccactgagaagggtctagcggagcacaggtcaccagctgggcaacattcagaaagttagtcttcctcgactcggaccgatg

SEQ ID NO: 1303 - DNA, 203 bp, Artificial sequence
  synthetic
ggcgcgccagtcctaaaaactgcgggaagcaggaaagagcacaacaggtttctctctatttccggtgtattgtatcctcacgtttccggagattgacgttgctcttgtgttctcgcgagaggcgggaaagggcgcagggtttgaaacatggcggacgacgtagaccagcaacaaactaccaacactgtcgactcggaccgatg

SEQ ID NO: 1304 - DNA, 203 bp, Artificial sequence
  synthetic
ggcgcgccagtcctaattgtatatgagcgcgagcggcgggctcttgggtcttttttagcgccatctgctcgcggcgccgcctcctgctcctcccgctgctgctgccgctgccgccctgagtcactgcctgcgcagctccggccgcctggctccccatactagtcgccgatatttggagttcttacaaccgactcggaccgatg

SEQ ID NO: 1305 - DNA, 203 bp, Artificial sequence
  synthetic
ggcgcgccagtcctgcggcgcagcttcagggcagcgcgggctgcagcggcggcggcggttagggctgtgtagggcgaggcctcccccttcctcctcgccatcctactcctccctcctcgtcatcctcccccttcgtcctcctcgccttcctcctcctcgtcaggctcgacccagctgtgagcggcaagcgactcggaccgatg

SEQ ID NO: 1306 - DNA, 203 bp, Artificial sequence
  synthetic
ggcgcgccagtcctcttgatgagcttgacaaagacgatagtacccatgagtctctgtctcaagaatcagagtcggaagaagatgggattcatgtagattcacaaaaggctcttgttttaaaagaaaagggcaataaatacttcaaacaaggaaaatatgatgaagcaattgactgctacacaaaaggccgactcggaccgatg

SEQ ID NO: 1307 - DNA, 203 bp, Artificial sequence
  synthetic
ggcgcgccagtcctatcgctacgcccacttggtggcctataaaggaagcgggcgaaccccggcagccctacacaacttggggcccctctcctctccagcccttctcctgtgtgcctgcctcctgccgccgccaccatgaccacctccatccgccagttcacctcctccagctccatcaagggctcctccgactcggaccgatg

SEQ ID NO: 1308 - DNA, 203 bp, Artificial sequence
  synthetic
ggcgcgccagtcctcgtctcggtgccagtgtcgaggttctttctgcttagctacccggagccgactacggaggaggacacctgagtttacgtctcttccatctgctgctcacctcagctgcctgggtccccgacgagagccaggtgacacttaactccgccatctgcgttttgagcactgttctcatacgactcggaccgatg

SEQ ID NO: 1309 - DNA, 203 bp, Artificial sequence
  synthetic
ggcgcgccagtcctggagaataaaataatcaggaggctgggtttgtgcttggctccaagcatgccctgctctctgacctggagactaccacctcgcacatgccaaggtcaggggctcccaaagagcgccctgcggagcctctcacccctcccccatcctatggccaccagccacagacagggtctgggcgactcggaccgatg

SEQ ID NO: 1310 - DNA, 203 bp, Artificial sequence
  synthetic
ggcgcgccagtcctctgttcgccccgcgccaccggcccgcgccccgccatggaggacctggatgccctgctctctgacctggagactaccacctcgcacatgccaaggtcaggggctcccaaagagcgccctgcggagcctctcacccctcccccatcctatggccaccagccacagacagggtctggcgactcggaccgatg

SEQ ID NO: 1311 - DNA, 203 bp, Artificial sequence
  synthetic
ggcgcgccagtcctgcggagcagtggaaccgagactgccccgcggagccgccgctagacttcgggctccttgaggatattcagttttgtatgtttgaatatcctctcaccatgttcagcataaagtaccattcttaatgattatcctcaacaagacaggtgtgagagggttgctgttgtattgcaatccgactcggaccgatg

SEQ ID NO: 1312 - DNA, 203 bp, Artificial sequence
  synthetic
ggcgcgccagtcctggggccggatccccggatgccctgctctctgacctggagactaccacctcgcacatgccaaggtcaggggctcccaaagagcgccctgcggagcctctcacccctcccccatcctatggccaccagccacagacagggtctggggagtcttcaggagcctcgggggacaaggaccgactcggaccgatg

SEQ ID NO: 1313 - DNA, 203 bp, Artificial sequence
  synthetic
ggcgcgccagtcctcttcctctccaggatccccaaggctaggaggccaacctactaacagcagcctgcctgcagctgtcctggtagaacagtgtggacattgcagaagctgtcactgccccagaaagaaagcaccccagagccaaggcaaagagtcttgaaagcgccacaagcagcagctgctgagcccgactcggaccgatg

SEQ ID NO: 1314 - DNA, 203 bp, Artificial sequence
  synthetic
ggcgcgccagtcctagctccgcgggcccggctgggcgagtgtctggccctttaagggccgcccccgaggaggtgccaggcccgggtggcgccgtccgtccttcctggtcctgcgggtccaggactgtccgcggggttgagggaaggggccgtgcccggtgccagcccaggtgctcgcggcctggctcccgactcggaccgatg

SEQ ID NO: 1315 - DNA, 203 bp, Artificial sequence
  synthetic
ggcgcgccagtcctggggcaagacagctccaccaggagtcaggagtgaatcccctctgggaacgaggcactaggaagaagaacttccagcccaggagaaataacatctgctttgctgccgagctcagaggagaccccagacccctcccgcagccagagggctggagcctgctcagaggtgctttgaagcgactcggaccgatg

SEQ ID NO: 1316 - DNA, 203 bp, Artificial sequence
  synthetic
ggcgcgccagtcctgctgttggcagctgtgttgctgggcctggtgctgctggtggtgctgctgctgcttctgaggcactggggctggggcctgtgccttatcggctggaacgagttcatcctgcagcccatccacaacctgctcatgggtgacaccaaggagcagcgcatcctgaaccacgtgctgcacgactcggaccgatg

SEQ ID NO: 1317 - DNA, 203 bp, Artificial sequence
  synthetic
ggcgcgccagtcctgggagtgaacggagagcgtagtgaccatcatgttttagcacaaccccctcagaccactctgtggagaacagactgtcagggaacgtgggtggaggcagagagaccagaaagattccaggacagagatgacagaggcttaggccatggagcctcctcaacaagcccaagagtgagcgactcggaccgatg

SEQ ID NO: 1318 - DNA, 203 bp, Artificial sequence
  synthetic
ggcgcgccagtcctttccttacaccaatcggaacgtgcaggggtggggagctggccaatcaggcgcggagggcggggccgggcggggttccacctggcggctggctctcagtcccctcgctgtagtcgcggagctgtgtctgttcccaggagtccttcggcggctgttgtgtcgggagcctgatcgcgcgactcggaccgatg

SEQ ID NO: 1319 - DNA, 203 bp, Artificial sequence
  synthetic
ggcgcgccagtcctctgtgcggtcacttccggcccgggagcgcgcgggttgattcgtccttcctcagccgcgggtgatcgtagctcggaaatggcgggatttggtgctatggagaaatttttggtagaatataagagtgcagtggagaagaaactggcagagtacaaatgtaacaccaacacagcaatcgactcggaccgatg

SEQ ID NO: 1320 - DNA, 203 bp, Artificial sequence
  synthetic
ggcgcgccagtcctgtttggggccagagtgggcgaggcgcggaggtctggcctataaagtagtcgcggagacggggtgctggtttgcgtcgtagtctcctgcagcgtctggggtttccgttgcagtcctcggaaccaggacctcggcgtggcctagcgagttatggcgacgaaggccgtgtgcgtgctcgactcggaccgatg

SEQ ID NO: 1321 - DNA, 203 bp, Artificial sequence
  synthetic
ggcgcgccagtcctaagtcgagaggcggtgcacacccgtcgcgcatgcgcaaacacagctgtcggaaggtggcgagcctgaggcgaacaatggcggagctgggcgaagccgatgaagcggagttgcagcgcctggtggccgccgagcagcagaaggcgcagtttactgcacaggtgcatcacttcatgcgactcggaccgatg

SEQ ID NO: 1322 - DNA, 203 bp, Artificial sequence
  synthetic
ggcgcgccagtcctacggaaacagaaattgctttgcggcccgcacggaaattgctttccttcggcttccgttcttggtccatgtgagagaagctggctgctgaaatgactgcgaaccggcttgcagagagccttctggctttgagccaacaggaagaactagcggatttgccaaaagactacctcttgcgactcggaccgatg

SEQ ID NO: 1323 - DNA, 203 bp, Artificial sequence
  synthetic
ggcgcgccagtccttggtggtccggttatgggaaaagaagcctcgtgggagagcagagcctgaaaaaggactgcgcggactgacttcttggctactgaaagcaaagctccactgttccaggcacgattctgccttctctcaaatggcataactcaggactctgcaaattcccagaaacaggaggaaaacgactcggaccgatg

SEQ ID NO: 1324 - DNA, 203 bp, Artificial sequence
  synthetic
ggcgcgccagtcctccgccgcccctctccccgcccagaggcgccccgggggcaccatgcaggcgcagcagctgccctacgagtttttcagcgaagagaacgcgcccaagtggcggggactactggtgcctgcgctgaaaaaggtccaggggcaagttcatcctactctcgagtctaatgatgatgctccgactcggaccgatg

SEQ ID NO: 1325 - DNA, 203 bp, Artificial sequence
  synthetic
ggcgcgccagtcctgtctctttcttagtttgatttgctagctggtttaatctgttttgtgtagtgccttggagcttacgcatttttttttttttccctccattcgaattcactaagagcaagcatgagggatatgagagtgaacatggctgcagtttttcctgcttaagcttgctttgatccttttaacgactcggaccgatg

SEQ ID NO: 1326 - DNA, 203 bp, Artificial sequence
  synthetic
ggcgcgccagtcctatgagagaagaggagcggcgctcaggttattccaggatctttggagacccgaggaaagccgtgttgaccaaaagcaagacaaatgactcacagagaaaaaagatggcagaaccaagggcaactaaagccgtcaggttctgaacagctggtagatgggctggcttactgaaggaccgactcggaccgatg

SEQ ID NO: 1327 - DNA, 203 bp, Artificial sequence
  synthetic
ggcgcgccagtcctttgaaacccgagccatctcaccgctcgcccccaaccctgggctctggctgtttaaaagctggagaggaagtgaaagcgtcaagtacagttgatagaagtccagatcctgaggaaatctccagctaaatgctcaaaatataaaatactgagctgagatttgcgaagagcagcagccgactcggaccgatg

SEQ ID NO: 1328 - DNA, 203 bp, Artificial sequence
  synthetic
ggcgcgccagtcctgtcttacctcgttgtggcgtcagaaccgccgtcgctcgctcccttctcggcagtggtacctgttcccggtgtccctgaggacgtgcgggccaggtttgcggggccaagtgttgcggcgacgcacctcacgtcgagaatcgggaggaggagactgcaaggataggcccaggagtacgactcggaccgatg

SEQ ID NO: 1329 - DNA, 203 bp, Artificial sequence
  synthetic
ggcgcgccagtcctcagattttaattgcaattgatcaggtttatattattgtacctccagagacctcctagagccagaacccggctggcttgctgtttcctttagagcagcgcatatcattatttggtgttctggtggaggacttttctgatggcagaaattagtttctctgggttcatcaggacgggcgactcggaccgatg

SEQ ID NO: 1330 - DNA, 203 bp, Artificial sequence
  synthetic
ggcgcgccagtcctgaagtcggcgtcttgagtcataggagtgagccacgcccgggctgtgggaataagatggcggggaagaagaatgttctgtcgtctctcgcagtttacgcggaagattcagagcccgagtctgatggcgaggctggaatcgaggcggtgggcagcgcggctgaggagaaaggcggacgactcggaccgatg

SEQ ID NO: 1331 - DNA, 203 bp, Artificial sequence
  synthetic
ggcgcgccagtcctcggcacctcattcatttctaccggtctctagtagtgcagcttcggctggtgtcatcggtgtccttcctccgctgccgcccccgcaaggcttcgccgtcatcgaggccatttccagcgacttgtcgcacgcttttctatatacttcgttccccgccaaccgcaaccattgacgcccgactcggaccgatg

SEQ ID NO: 1332 - DNA, 203 bp, Artificial sequence
  synthetic
ggcgcgccagtcctcggttcttaagcggcagcgcgctgcgggcgccgagtgtcgggcgcggcaggaggacgaggcagggcgggcgggcgctctaagggttctgctctgactccaggttgggacagcgtcttcgctgctgctggatagtcgtgttttcggggatcgaggatactcaccagaaaccgaaacgactcggaccgatg

SEQ ID NO: 1333 - DNA, 203 bp, Artificial sequence
  synthetic
ggcgcgccagtcctggagcagccgacgtggccgcaggggaccgtgcctgggggggtctgcgcggggccgctgactcgcgaggttctctgtcgcctgccgccctcgctccttttctccccttctagagtgttacggtgactcttgggtccgaaggggacggacgtcctcccacgtaccatttagaagaacgactcggaccgatg

SEQ ID NO: 1334 - DNA, 203 bp, Artificial sequence
  synthetic
ggcgcgccagtcctgcctggtgatatgcagctgtacctgtgacatcataattgcaccctccgacatgatatctcttccaaatgcttgatgaaaaaggtgggaggatcacttgagccagggagttgaaggctgcagtgagccctgtttttgccaccacactccagcttgggattgattcctaaagactccgactcggaccgatg

SEQ ID NO: 1335 - DNA, 203 bp, Artificial sequence
  synthetic
ggcgcgccagtcctagctccggctccccctatataaatcggccatttgcttcgctccgccccgcagcgccggagtcaaagccggttcccggcccagtcccgtcctgcagcagtctgcctcctctttcaacatgacagatgccgctgtgtccttcgccaaggacttcctggcaggtggagtggccgcagcgactcggaccgatg

SEQ ID NO: 1336 - DNA, 203 bp, Artificial sequence
  synthetic
ggcgcgccagtcctggccgcagctccccggcggaggcaagaggtggttgggggggaccatggctgacgttttcccgggcaacgactccacggcgtctcaggacgtggccaaccgcttcgcccgcaaaggggcgctgaggcagaagaacgtgcacgaggtgaaggaccacaaattcatcgcgcgcttctcgactcggaccgatg

SEQ ID NO: 1337 - DNA, 203 bp, Artificial sequence
  synthetic
ggcgcgccagtcctatttgcacaatatttgtgcggggtatgggggtgggtttttaaatctcgtttctcttggacaagcacagggatctcgttctcctcattttttgggggtgtgtggggacttctcaggtcgtgtccccagccttctctgcagtcccttctgccctgccgggcccgtcgggaggcgcccgactcggaccgatg

SEQ ID NO: 1338 - DNA, 203 bp, Artificial sequence
  synthetic
ggcgcgccagtcctgcggcggcatcggcccgagccgccggccgccctcccaccctcccgccccgcggcagccctagctccctccacttggctcccctggtcccgctcgctcggccgggagctgctctgtgcttttctctctgattctccagcgacaggacccggcgccgggcactgagcaccgccacccgactcggaccgatg

SEQ ID NO: 1339 - DNA, 203 bp, Artificial sequence
  synthetic
ggcgcgccagtcctctccgaggccgtgagcgcaaagcctcaggccccggctccctcctgagctgcgccgtgccaggccgcccgccgggatgcagtgggccgtgggccggcggtgggcgtgggccgcgctgctcctggctgtcgcagcggtgctgacccaggtcgtctggctctggctgggtacgcagacgactcggaccgatg

SEQ ID NO: 1340 - DNA, 203 bp, Artificial sequence
  synthetic
ggcgcgccagtccttcgagaaaggggctcagcggcggcggaagcggagggggaccaccgtggagagcgcggtcccagcccggccactgcggatccctgaaaccaaaaagctcctgctgcttctgtaccccgcctgtccctcccagctgcgcagggccccttcgtgggatcatcagcccgaagacagggcgactcggaccgatg

SEQ ID NO: 1341 - DNA, 203 bp, Artificial sequence
  synthetic
ggcgcgccagtcctatgagtcttctagctaaacctatgagctttgaaaccacagcaatcactttcttcatcatccttctaatttgcctcatttgcatcctcctcttattggtggtttttttatataaatgtttccaaggcaggaaaggtaaagagacaaagaaagtgccttgtacagatgcaaacggacgactcggaccgatg

SEQ ID NO: 1342 - DNA, 203 bp, Artificial sequence
  synthetic
ggcgcgccagtcctagagtcttaaaatcctgctctggccggattccagactcgtgggggaaaggctgtttccaaggcaggaaaggtaaagagacaaagaaagtgccttgtacagatgcaaacggaggtgtagactgtgcagctgccaaagtggtgacaagcaatccagaggaccatgaaaggatcttacgactcggaccgatg

SEQ ID NO: 1343 - DNA, 203 bp, Artificial sequence
  synthetic
ggcgcgccagtcctcttgcccggcgcgacctgatgatgccgagcccaggccggttccggcgaagttaaaccctcggagctggcctcggactgctggggcgttaccccttcggccacccccgctgaccatggcagtgtttcatgacgaggtggaaatcgaggacttccaatatgacgaggactcggagacgactcggaccgatg

SEQ ID NO: 1344 - DNA, 203 bp, Artificial sequence
  synthetic
ggcgcgccagtcctaattcccaaaaggccacaaaggggccaccactacgcatgcgtagatccctcccgttagctttggcgcctcagcgagctcttctcgcgcatgcgttctccgaacggtcttcttccgacagcttgctgccctagaccagagttggtggctggacctcctgcgacttccgagttgcgcgactcggaccgatg

SEQ ID NO: 1345 - DNA, 203 bp, Artificial sequence
  synthetic
ggcgcgccagtcctggccgcggcgtcgcgtcggaacgtgactggatggtagtgtgctggccggtctgcctccgggagaaccgagcgcttccggtggtttggctttgaatgacagcaagaactctgtctttaatggcttcattggtagcgtatgatgattcggactcggaggctgagacagagcatgcacgactcggaccgatg

SEQ ID NO: 1346 - DNA, 203 bp, Artificial sequence
  synthetic
ggcgcgccagtcctgcgcctaaagcgccccgtgccgcttaacgcggtctctcatagccgctcgccttcctttcacttcctgttccttcagaaagcgctgtgccttggaccaaccttacttcttactattgacagctcagctaactcctattcatccttcaaaacccatctctggtggtttggctttgacgactcggaccgatg

SEQ ID NO: 1347 - DNA, 203 bp, Artificial sequence
  synthetic
ggcgcgccagtcctcgggaccggaagtgtgggatactgcgagtatggcggcgtcaaaggtgaagcaggacatgcctccgccggggggctatgggcccatcgactacaaacggaacttgccgcgtcgaggactgtcgggctacagcatgctggccatagggattggaaccctgatctacgggcactggacgactcggaccgatg

SEQ ID NO: 1348 - DNA, 203 bp, Artificial sequence
  synthetic
ggcgcgccagtcctcagttactttcaggctcggggagtgaaggcctcgttgagagaaggtctcattcggtgttttgggaagagagtcgtgtgggcccaggtctgtctgctatcagctatgccgctgcccgttgcgctgcagacccgcttggccaagagaggcatcctcaaacatctggagcctgaacccgactcggaccgatg

SEQ ID NO: 1349 - DNA, 203 bp, Artificial sequence
  synthetic
ggcgcgccagtccttgagccccggggctgcgtttcctgagacctggccgcagcctccgcgggtggcaagcgggctggggagagccgagggccaaaggaagagaaaatcgcggggagtctctggccgggagagtccaggtagcgctcggcgggcagcagtgcgcaggcccctcggcttcaaccgccacacgactcggaccgatg

SEQ ID NO: 1350 - DNA, 203 bp, Artificial sequence
  synthetic
ggcgcgccagtcctctctctttcactgcaaggcggcggcaggagaggttgtggtgctagtttctctaagccatccagtgccatcctcgtcgctgcagcgacacacgctctcgccgccgccatgactgagcagatgacccttcgtggcaccctcaagggccacaacggctgggtaacccagatcgctaccgactcggaccgatg

SEQ ID NO: 1351 - DNA, 203 bp, Artificial sequence
  synthetic
ggcgcgccagtcctgaaaggccccaggggctattttttgcaggaacggtcactccctaaatccaggcagggaaagggaggagtctgagccgagtcacgccccttctcctgtaaacttgggtcgcctctagcttagcgagcgctggagtttgaagagcgggcagtggctgcacacgccaaactttccctcgactcggaccgatg

SEQ ID NO: 1352 - DNA, 203 bp, Artificial sequence
  synthetic
ggcgcgccagtcctcgggcaggctcacgtgatgcgggccccgcggcccgccatataaacccgcgcgcccgccaggcgctgcggccgtcccgggccgtgactcctcctttcccccgccccgcctccgttcggagagccggcgggcgggcgcctctcggccaggaagcgcctcttggacgcgtgtgaccgcgactcggaccgatg

SEQ ID NO: 1353 - DNA, 203 bp, Artificial sequence
  synthetic
ggcgcgccagtcctcctcaatcggcgggacagcagggcgcgtcctctgccactctcgctccgaggtccccgcgccagagacgcagccgcgctcccaccacccacacccaccgcgccctcgttcgcctcttctccgggagccagtccgcgccaccgccgccgcccaggccatcgccaccctccgcagcccgactcggaccgatg

SEQ ID NO: 1354 - DNA, 203 bp, Artificial sequence
  synthetic
ggcgcgccagtcctagcggtctcccgcccgcggcgccatcgcgccattcctagttaaggcggcacagggccgaggcgtagtgtgggtgactcctccgttccttgggtcccgtcgtctgtgatactgcagcgcagccatggcagaaccgcagcccccgtccggcggcctcacggacgaggccgccctcacgactcggaccgatg

SEQ ID NO: 1355 - DNA, 203 bp, Artificial sequence
  synthetic
ggcgcgccagtccttcgtgcgcctgcagcccttggttcttggaaacgccggcgccttgttcagggctggtggggctggggcgcaaggtgcagctgacaatgcccgagaggagccgcagcctctggtggagttcggtcgggtgtgggggtagtcaaggaaagaagcaaagggaatacctcctctgaaaacgactcggaccgatg

SEQ ID NO: 1356 - DNA, 203 bp, Artificial sequence
  synthetic
ggcgcgccagtccttttctcccaggccccgcccctccgtccctcaccgcaccacccctaaagacgctagcgctgcgatggcggaggccgtggagcgcactgacgagctggtccgggagtacctgctcttccgcgggttcacgcacacactgcggcagctggacgccgagatcaaggcggacaaggagacgactcggaccgatg

SEQ ID NO: 1357 - DNA, 203 bp, Artificial sequence
  synthetic
ggcgcgccagtcctttgtgggagtcgtagtccgcggtgaggcccagtgcgcaggcgcagtttgccggccgccatcgcgcactggggctccgggcggctgggaccggcctggggtagctgcgcagcaggtgggtcggtcccggggatgcagcgcgggggtcagagagcgaccccaacagggtagacgggcgactcggaccgatg

SEQ ID NO: 1358 - DNA, 203 bp, Artificial sequence
  synthetic
ggcgcgccagtcctgccttctgcccggccccttcgcccacgtgaagaacgccagggagctgtgaggcagtgctgtgtggttcctgccgtccggactctttttcctctactgagattcatctgtgtgaaatatgagttggcgaggaagatcgacctatcggcctagaccaagacgctacgtagagcctccgactcggaccgatg

SEQ ID NO: 1359 - DNA, 203 bp, Artificial sequence
  synthetic
ggcgcgccagtccttagagctgagcagttgtccgcgtgcgcaggcggaagtcccggattgaggcgccgccatttttgctgcccggacgcggagcgagaggctgagagagtcggagacactatccgcttccatccgtcgcgcagaccctgccggagccgctgccgctatggatgatcgagaggatctggcgactcggaccgatg

SEQ ID NO: 1360 - DNA, 203 bp, Artificial sequence
  synthetic
ggcgcgccagtccttattttaagcccagtcttccctgggccacctttagcagatcctcgtgcgcccccgccccctggccgtgaaactcagcctctatccagcagcgacgacaagtaaagtggcccgccggtttctgagccttctgccctgcggggacacggtctgcaccctgcccgcggccacggacccgactcggaccgatg

SEQ ID NO: 1361 - DNA, 203 bp, Artificial sequence
  synthetic
ggcgcgccagtcctactcgcacatgcgagcacattccttccttccttctcactctctcggcccttgacttctacaagcccatggaacatttctggaaagacgttcttgatccagcagggtggcccgccggtttctgagccttctgccctgcggggacacggtctgcaccctgcccgcggccacggacccgactcggaccgatg

SEQ ID NO: 1362 - DNA, 203 bp, Artificial sequence
  synthetic
ggcgcgccagtcctacaaagatctcttcacattctccgggactgcggtaccaaatatcagcacagcacttcttgaaaaaggatgtagattttaatctgaactttgaaccatcactgaggtggcccgccggtttctgagccttctgccctgcggggacacggtctgcaccctgcccgcggccacggacccgactcggaccgatg

SEQ ID NO: 1363 - DNA, 203 bp, Artificial sequence
  synthetic
ggcgcgccagtcctacggactgctaaaggtctcccctcccacctgcattgctctacaatctgtggcctcagcccttgccaactctgcctcttcccccgctgactgggcctctgcagagatgtgggcagctggtcaggatggccattcgggctcagcacagcaacgcagcccagactcagactggggaacgactcggaccgatg

SEQ ID NO: 1364 - DNA, 203 bp, Artificial sequence
  synthetic
ggcgcgccagtcctaagaaaggtaagggccctgggcgaggaaagcgcggccctttccgagtttggtgttttgcagcgaaaggaaatctcgctcttccgaaagtcctccagggcgagagaggaaagggcctagaatacctcctctgaaaaatggcagaagcagttttccatgccccaaagaggaaaagacgactcggaccgatg

SEQ ID NO: 1365 - DNA, 203 bp, Artificial sequence
  synthetic
ggcgcgccagtcctatctgaaactgagcagagcagggcgccgggcagggccggcgggccacgtgataagcccggaaacagctccgccccctcgcttcctgagccgccacatcccggcagccctcctacctgcgcacgtggtgccgccgctgctgcctcccgctcgccctgaacccagtgcctgcagcccgactcggaccgatg

SEQ ID NO: 1366 - DNA, 203 bp, Artificial sequence
  synthetic
ggcgcgccagtcctagacgcgacggtgctgggatcccgggagggagcggagcggacctgggcttggtcgcctccaagccggcgggaccgagtgctttaggccgcttgaaagaaagttgctccgacccgggaaaaggagaagatgaaggaagccaaggatgcccgctataccaatgggcacctcttcaccgactcggaccgatg

SEQ ID NO: 1367 - DNA, 203 bp, Artificial sequence
  synthetic
ggcgcgccagtcctgtcagacttcctgtccccgagaccaacgcgtgcgggccgaacccctccccccgccttcccccaacaatacaggacgccggggtccgcgccgcgtcctccctggtccccccgtccgattatgtctcggatcgaatccctcacgcgggcgcggatcgaccggagcagagagctggccgactcggaccgatg

SEQ ID NO: 1368 - DNA, 203 bp, Artificial sequence
  synthetic
ggcgcgccagtcctaaacctggggcgtctcgcgcaaacgtccataactgaaagtagctaaggcaccccagccggaggaagtgagctctcctggggcgtggttgttcgtgatccttgcatctgttacttagggtcaaggcttgggtcttgccccgcagacccttgggacgacccggccccagcgcagctcgactcggaccgatg

SEQ ID NO: 1369 - DNA, 203 bp, Artificial sequence
  synthetic
ggcgcgccagtcctgtaaggaggaaaactgaggcctgggagcaggaacctgtaggcagcgcttgagggtagcgggatagcagctgcaagcgcgcgtgggaggcgggggctctgggcggaacaaaaatcacaggatgtcagaggatgtttcccgggaagaactgggataaaggaagggtcccagcaccacgactcggaccgatg

SEQ ID NO: 1370 - DNA, 203 bp, Artificial sequence
  synthetic
ggcgcgccagtcctgcttggctttggcgcgacccgggagcggctcccacgagcgccgcgcgcgtcgcaacggagcggggccctgagaagcgcgcgccgcggctcccaccgctctggagctccgggcaggggacacggcaacctggatggctggggcagggatcctctcccagaacttcgtgcccagcacgactcggaccgatg

SEQ ID NO: 1371 - DNA, 203 bp, Artificial sequence
  synthetic
ggcgcgccagtcctgccggctgccccaggccagtggagtggcagccccagaactgggaccaccgggggtggtgaggcggcccggcactgggagctgcatctgaggcttagtccctgagctctctgcctgcccagactagctgcacctcctcattccctgcgcccccttcctctccggaagcccccaggcgactcggaccgatg

SEQ ID NO: 1372 - DNA, 203 bp, Artificial sequence
  synthetic
ggcgcgccagtccttctgggaattccgggcgtttcggctccttggtcgcagaggcaggaggcgtgcgtggcaggagggttcgggttatatactcctaggtcctgggacagaatagttacgacctctgggacaggaactcttctctcttttgttaataaacttccaactccctcctcagacccgaccgccgactcggaccgatg

SEQ ID NO: 1373 - DNA, 203 bp, Artificial sequence
  synthetic
ggcgcgccagtcctgcttcatttccgggtgaaactggcattgagggtactggggcgtgcgtgaggcgtttactgatgcttcctggtccggtggcctcggtcccggtaagccaggcatgaagatcacaaggcagaaacatgccaagaagcatcttggcttcttccgcaacaacttcggagtccgcgagccgactcggaccgatg

SEQ ID NO: 1374 - DNA, 203 bp, Artificial sequence
  synthetic
ggcgcgccagtcctagcccaagatttctagggcattggccgcgctgctgggtgatccctccgggctcaagttgcaagggggcgggccgggccggaggtggagtctcccgccaattgaagcctccgctataaattgaactccctgcactgctgaagcccagatgcctcgccaggccacgtcgcggttggcgactcggaccgatg

SEQ ID NO: 1375 - DNA, 203 bp, Artificial sequence
  synthetic
ggcgcgccagtcctgctctccacaccagccaagggggcccccacactcccgcgctgctctgcggctcagggagcagcccacctgctggatgaggaacttgaggcaagtcaccagcccctgatcatttcgcctaaaagagcaaggactagagttcctgacctccaggccagtccctgatccctgacctacgactcggaccgatg

SEQ ID NO: 1376 - DNA, 203 bp, Artificial sequence
  synthetic
ggcgcgccagtcctatgaatatgcaagtgcgaggaagatatttaaaggcgtcggcgccacgcgcatatccctgctcggcgctgcccgcccagttcctgttcccagactgaggcccagcccccttcgcccgtttccatcacgagtgccgccagcatgtctgacaaactgccctacaaagtcgccgacatcgactcggaccgatg

SEQ ID NO: 1377 - DNA, 203 bp, Artificial sequence
  synthetic
ggcgcgccagtcctcctgcctcctcagatctcgtttcttcggctacgaatctcgcgagaagtcaagttctcatgagttctcccaaaatccaccgctcttcctctttccctaagcagcctgaggtgatctgtgaaaatggttcgctattcacttgacccggagaaccccacgaaatcatgcaaatcaagcgactcggaccgatg

SEQ ID NO: 1378 - DNA, 203 bp, Artificial sequence
  synthetic
ggcgcgccagtcctagtcaagttctcatgagttctcccaaaatccaccgctcttcctctttccctaagcagcctgagggttgactggattggtgaggcccgtgtggctacttctgtggaagcagtgctgtagttactggaagataaaagggaaagcaagcccttggtgggggaaagtgatctgtgaaacgactcggaccgatg

SEQ ID NO: 1379 - DNA, 203 bp, Artificial sequence
  synthetic
ggcgcgccagtcctcgctggaggcggtggcttcttatgcgggaggacgtggcggagggcctgactttgggagccgggggttgactggattggtgaggcccgtgtggctacttctgtggaagcagtgctgtagttactggaagataaaagggaaagcaagcccttggtgggggaaagtgatctgtgaaacgactcggaccgatg

SEQ ID NO: 1380 - DNA, 203 bp, Artificial sequence
  synthetic
ggcgcgccagtcctgagaagcccaggcagttgaggacaggagagagaaggctgcagacccagagggagggaggacagggagtcggaaggaggaggacagaggagggcacagagacgcagagcaagggcggcaaggaggagaccctggtgggaggaagacactctggagagagagggggctgggcagagcgactcggaccgatg

SEQ ID NO: 1381 - DNA, 203 bp, Artificial sequence
  synthetic
ggcgcgccagtcctttcttcggctacgaatctcgcgagaagtcaagttctcatgagttctcccaaaatccaccgctcttcctctttccctaagcagcctgaggtgatctgtgaaaatggttcgctattcacttgacccggagaaccccacgaaataacactcgtgaaactgctcaggccatcaagggtcgactcggaccgatg

SEQ ID NO: 1382 - DNA, 203 bp, Artificial sequence
  synthetic
ggcgcgccagtccttttttctcccagcaagctgtgcgacgcgccgggcctcctcgcctttgtgccatccgggtctctcgcgcgagcgatttagtctgaggcgaagcttcggagcggccggtactgttgaaagcgacaagtggaggcgccgctctagcggccgggactctgaactatggcggctagtgacgactcggaccgatg

SEQ ID NO: 1383 - DNA, 203 bp, Artificial sequence
  synthetic
ggcgcgccagtcctgacaaccggcgtggaggcgtggccacagccgcccagaaattctacccaagctccctcagcaccatgtaccgagcacttcggctcctcgcgcgctcgcgtcccctcgtgcgggctccagccgcagccttagcttcggctcccggcttgggtggcgcggccgtgccctcgttttggcgactcggaccgatg

SEQ ID NO: 1384 - DNA, 203 bp, Artificial sequence
  synthetic
ggcgcgccagtcctgtctcaggacgggcgctttggagccggccccaggcagcgtgtgtcggtcgcctagtctggagaactagtcctcgactcacgtgcaaggatgatgctgaaaggaataacaaggcttatctctaggatccataagttggaccctgggcgttttttacacatggggacccaggctcgcgactcggaccgatg

SEQ ID NO: 1385 - DNA, 203 bp, Artificial sequence
  synthetic
ggcgcgccagtcctgacgggcgctttggagccggccccaggcagcgtgtgtcggtcgcctagtctggagaactagtcctcgactcacgagatgaagttttaccatgttggccaggctggtctcgaattcctgacctcaagtgatctgcccaccttgacctcccaaagtgctgggattacagtgcaaggcgactcggaccgatg

SEQ ID NO: 1386 - DNA, 203 bp, Artificial sequence
  synthetic
ggcgcgccagtcctgcccgcggtgcggtgcggagactccatgaggccctggacatgaacaagctgagtggaggcggcgggcgcaggactcgggtggaagggggccagcttgggggcgaggagtggacccgccacgggagctttgtcaataagcccacgcggggctggctgcatcccaacgacaaagtccgactcggaccgatg

SEQ ID NO: 1387 - DNA, 203 bp, Artificial sequence
  synthetic
ggcgcgccagtcctctgagtcgctgtcgcggaggctggagcgctgccccggaagtcctcccccctgttccccgcccgcggcaaacatggcggtggactcggcgatggagctgttatttttagatacttttaaacacccgagcgctgagcaaagttctcatatagatgtggttcgttttccatgtgtggcgactcggaccgatg

SEQ ID NO: 1388 - DNA, 203 bp, Artificial sequence
  synthetic
ggcgcgccagtcctgtcatttattattattgctattagtgttacctattattttctttttgaacccacttattgcctaattagtcatagtttgacaattgcccttgtattccaccatgtcaaatataaatttacatagatgaagctcctgaaattattcttgggttaccattttgtgaagctattgatcgactcggaccgatg

SEQ ID NO: 1389 - DNA, 203 bp, Artificial sequence
  synthetic
ggcgcgccagtcctagattgtttcacatcaccagtgtatcctcagctcctaacactgtgtctggtacacattgtttgatggttttgatgtttcagattcgttatatttcacaaacacaaggcttgccagctgaatatcttctcagtgccggaacaaaaacaaccaggtttttcaacagagatcctaatcgactcggaccgatg

SEQ ID NO: 1390 - DNA, 203 bp, Artificial sequence
  synthetic
ggcgcgccagtcctcggggatttctgctgccgccaccgcccactcttacccccgccgcttctcgactctgttgttagccgaagactcgcctctcagccgcccgccgcacagacgcacgagtaaaaagtgcagctccatcggctgatcctcgctaagctccgactctgggcggcaccgggcgtcccacgcgactcggaccgatg

SEQ ID NO: 1391 - DNA, 203 bp, Artificial sequence
  synthetic
ggcgcgccagtcctgcgcggtcgctcagcagtgacgtgacacgcagcccacggtctgtactgacgcgccctcgcttcttcctctttctcgactccatcttcgcggtagctgggaccgccgttcagtcgccaatatgcagctctttgtccgcgcccaggagctacacaccttcgaggtgaccggccaggcgactcggaccgatg

SEQ ID NO: 1392 - DNA, 203 bp, Artificial sequence
  synthetic
ggcgcgccagtcctgcgaagggaccgtctctgccaagcgcctgttggtaggaacctgcttggtcgcgtctgagggggcttgtaggtggctctggctgaaacaggcgcctgcgagagtctgtaggagggaaaccgccatggacgatcagggttgccctcggtgtaagaccaccaaatatcggaacccctcgactcggaccgatg

SEQ ID NO: 1393 - DNA, 203 bp, Artificial sequence
  synthetic
ggcgcgccagtccttttttcaaaagattcgttctgagccgtttaaaatgctcttgtgttctacgaagtctctttgcatccttgaacaccggggaatttccaggtatttcatttctcctgtcccctcccctccccaccccatctattaatattattcttttgaagattcttcgttgtcaagccgccaaacgactcggaccgatg

SEQ ID NO: 1394 - DNA, 203 bp, Artificial sequence
  synthetic
ggcgcgccagtccttcgccccgcgggccggccgagacgacgggaagttttatttgcagctcggagcctgtggcggatggtgggactctccggccctgtgcagtaaaagattgatctctgggctggtgaacataatctctgtcccagtcagaaaaggagagaggaaattagcagagcgattggtggagacgactcggaccgatg

SEQ ID NO: 1395 - DNA, 203 bp, Artificial sequence
  synthetic
ggcgcgccagtcctctcttagctggcggagagaatttacatttaaagattagcagagtgagaaagagaaatctgccttttgttgtgtggggtgaggaggaggcatctacccctggccttgacgctatctcccatcacctctgctatccagacaggactcaccgagatcgtactgagaagcactccacacgactcggaccgatg

SEQ ID NO: 1396 - DNA, 203 bp, Artificial sequence
  synthetic
ggcgcgccagtcctgcgcgggaatggccggcccacgggtcgcaggagacgggacgccagtcctttggctccgttccgctggctccttcgtcagtactgacacctcgggcttgtagagcacttcacgcagtgcaaagcgccccccgtctatatcatatcgcctctcggtcctcctaaaagtcgtatgagcgactcggaccgatg

SEQ ID NO: 1397 - DNA, 203 bp, Artificial sequence
  synthetic
ggcgcgccagtcctccctttctgtcttctctctctctctcccacttttcctccctctcccgctccgtctcacacgcaccctctgtttattttcctgcctccatctgggccctgctgatattgtaatcaccctgatgcacgttggcttctctcctctccctcctgcgctcacacactcactcacacacacgactcggaccgatg

SEQ ID NO: 1398 - DNA, 203 bp, Artificial sequence
  synthetic
ggcgcgccagtcctttctggggtggctctagtctcatggccacaaagctctagcccaggcgccgcgaggcactggcattgagagcccaatgcatctcagcctcacgctgcagaagccagtggggctggggagccgcagcagcgtcgattttcttcacaagaagatgggaactgtgggctacaagtaggcgactcggaccgatg

SEQ ID NO: 1399 - DNA, 203 bp, Artificial sequence
  synthetic
ggcgcgccagtcctcccagaactttggtctcgtcccacccacccccgcccgcgccatggtctcgccctagggagccatcgataactctacgctcggcctcgatcgactcgctccggctcccctcgccgtcctggacacggcggagtgcggagccgcccgtaagctctagggcccgtgcaggccacacccgactcggaccgatg

SEQ ID NO: 1400 - DNA, 203 bp, Artificial sequence
  synthetic
ggcgcgccagtcctccgcccgcgccatggtctcgccctagggagccatcgataactctacgctcggcctcgatcgactcgctccggctcccctcgccgtcctggacacggcggagtgcggagccgcccgtaagatgctctgacctttgacccctgccgttcagctctagggcccgtgcaggccacacccgactcggaccgatg

SEQ ID NO: 1401 - DNA, 203 bp, Artificial sequence
  synthetic
ggcgcgccagtcctaggcggcgcgggcggcgcctcagcggaagagcgggcctctgggccgcagtgaccaacccccgcccctcaccccacgtggttggaggtttccagaagcgctgccgccaccgcatcgcgcagctctttgccgtcggagcgcttgtttgctgcctcgtactcctccatttatccgcccgactcggaccgatg

SEQ ID NO: 1402 - DNA, 203 bp, Artificial sequence
  synthetic
ggcgcgccagtcctatggcccataacgcgggcgccgcggccgccgccggcacccacagcgccaagagcggcggctccgaggcggctctcaaggagggtggaagcgccgccgcgctgtcctcctcctcctcctcctccgcggcggcagcggcggcatcctcttcctcctcgtcgggcccgggctcggcccgactcggaccgatg

SEQ ID NO: 1403 - DNA, 203 bp, Artificial sequence
  synthetic
ggcgcgccagtcctgcggctaggcgcggacgccggaggaggtgtccccgggtttaggggtgttcggccaggggcggggctgccgggcccgggcgactgccggagctgcggaagtcgtggaagcgtcggcgacgcatcgcgcgatggcgcgggcgggacagtgcttgtgaaactgaacacaacaaaagtcgactcggaccgatg

SEQ ID NO: 1404 - DNA, 203 bp, Artificial sequence
  synthetic
ggcgcgccagtcctgtgcagcggctgccacggagctcgcagctgcggcttctgaggagtaagcggcgcggtagcgaaggccgccgaacctgcctggctagccggcgacttgagtgacgactcttttgaaacagatggtcaccatgtttagatattagcagtcccatatatgcatgtctgcatttgaaacgactcggaccgatg

SEQ ID NO: 1405 - DNA, 203 bp, Artificial sequence
  synthetic
ggcgcgccagtccttgccccgctcagacctagtcgggaggggtgcgaggcatgcagctgggggcccagctccggtgccgcaccccgtaaagggctgatcttccacctcgccacctcagccacgggacgccaagaccgcatccaattcagacttcttttggtgcttgtgaaactgaacacaacaaaagtcgactcggaccgatg

SEQ ID NO: 1406 - DNA, 203 bp, Artificial sequence
  synthetic
ggcgcgccagtccttctgaagagaggcgggacgcggggtgataacagctggctctggtgggcgggcgggagctggggaggaggagcaggagaggcccacaggcttcatttggagtcaggcctggctgttgctcaggtgaccagcttgtgtctctgggagggcgctgctttccccggccacccggcgcgcgactcggaccgatg

SEQ ID NO: 1407 - DNA, 203 bp, Artificial sequence
  synthetic
ggcgcgccagtcctgtccaggttccgccccggagccgacttcctcctggtcggcggctgcagcggggtgagcggcggcagcggccggggatcctggagccatggggcgcgcgcgcgacgccatcctggatgcgctggagaacctgaccgccgaggagctcaagaagttcaagctgaagctgctgtcggcgactcggaccgatg

SEQ ID NO: 1408 - DNA, 203 bp, Artificial sequence
  synthetic
ggcgcgccagtcctaactcccaagccccacccctgggcttggcctgccttgccctgccgggaagtgatccccaaggcagggtgagagttccccatctgaggcgtttgttgcagctacctgcacttctagattcatcttcttgtgagccctgggcttaggagtcaccatggcaactgaagagttcatcacgactcggaccgatg

SEQ ID NO: 1409 - DNA, 203 bp, Artificial sequence
  synthetic
ggcgcgccagtccttgggcttggcctgccttgccctgccgggaagtgatccccaaggcagggtgagagttccccatctgaggcgtttgttgcagctacctgcacttctagatgctccccaggttcatcctgtgtcgtctcccccacctaccagtcatcttcttgtgagccctgggcttaggagtcacccgactcggaccgatg

SEQ ID NO: 1410 - DNA, 203 bp, Artificial sequence
  synthetic
ggcgcgccagtcctgtgcgctgctgcgcaggcgcggtggtcggacgacagaccgtgtgtttccaaaatggcggcagcgatggatgtggataccccgagcggcaccaacagcggcgcgggcaagaagcgctttgaagtgaaaaagtggaatgcagtagccctctgggcctgggatattgtggttgataacgactcggaccgatg

SEQ ID NO: 1411 - DNA, 203 bp, Artificial sequence
  synthetic
ggcgcgccagtccttagcaccacccgagccaatggcggcggccgaggggcggagggggctggcaggaggggagggagcgctggctttagagccacagctgcaaagattccgaggtgcagaagttgtctgagtgcgttggtcggcggcagtcgggccagacccaggactctgcgactttacatctttaacgactcggaccgatg

SEQ ID NO: 1412 - DNA, 203 bp, Artificial sequence
  synthetic
ggcgcgccagtccttagataatctgagttgttgaaaatacgaagcctgttactcgtgaacagtggctgacaacagtgttgttgtgagcctggctgtctgcttggacccagaggtttcgtctgccagggtttttggttgtatttaggatttcagggaaaagtgtccaagctttcagtgttggagcaggtcgactcggaccgatg

SEQ ID NO: 1413 - DNA, 203 bp, Artificial sequence
  synthetic
ggcgcgccagtcctcgccacgcactcctctttctgcctggccggccactcccgtctgctgtgacgcgcggacagagagctaccggtggacccacggtgcctccctccctgggatctacacagaccatggccttgccaacggctcgacccctgttggggtcctgtgggacccccgccctcggcagcctccgactcggaccgatg

SEQ ID NO: 1414 - DNA, 203 bp, Artificial sequence
  synthetic
ggcgcgccagtcctgcgcatggtgagtaggttggtccgaagtttgaaccggacagaagcgctggtcggcgtctggcggttattgttcaaaactacaactccattttgacactttctcacttgtaccgatcttcagacgccctccttcttcatgagaatgatgccatccataagatctgtgcaaaactgcgactcggaccgatg

SEQ ID NO: 1415 - DNA, 203 bp, Artificial sequence
  synthetic
ggcgcgccagtcctagagcgcagggagcagccggtggctcggcggcggcggcggcggcggcggcggcgtcggcgtcgtctacctccagcttctcctccctcctcctccgtctcctcctctctctctccatctgctgtggttatggcctgtcgctggagcacaaaagagtctccgcggtggaggtctgccgactcggaccgatg

SEQ ID NO: 1416 - DNA, 203 bp, Artificial sequence
  synthetic
ggcgcgccagtccttggagccggcttgacagggtctgagggggagtggagaactgggcgaggaggttcccgtgggtgagcgcgtacgggatggctggctcgcaggacggccgaaggtggtggttggtgggagcagccagcgacgagcccgtagacactcgtacgcgtgcgggctgacgtgcgcgctaccgactcggaccgatg

SEQ ID NO: 1417 - DNA, 203 bp, Artificial sequence
  synthetic
ggcgcgccagtcctgtgatttggcgggagtcttgaccgccgccgggctcttggtacctcagcgcgagcgccaggcgtccggccgccgtggctatgttcgtgtccgatttccgcaaagagttctacgaggtggtccagagccagagggtccttctcttcgtggcctcggacgtggatgctctgtgtgcgcgactcggaccgatg

SEQ ID NO: 1418 - DNA, 203 bp, Artificial sequence
  synthetic
ggcgcgccagtcctcggcttcagcactccgggctgcagtaagaagtgcccttatcgctctgagccctgccaccatcccgtgaaccaccgaaaccctggtccagcgcgacagccttggacctgggactggacggatccaaaacgctcagcctcggccccccacagacggggctctgcatcgtctctgatcgactcggaccgatg

SEQ ID NO: 1419 - DNA, 203 bp, Artificial sequence
  synthetic
ggcgcgccagtcctcagcggcgaacctctcccttcgagtatttctcctcttgctgagatgaaatgcgaccgggtctctttaagggccaggcgccgggatccaggcggcgcccaacggctggactagcagtcgtccgcgccgactcgcacaagaaggaaccccgggcctctggatccgctcgcccggctcgactcggaccgatg

SEQ ID NO: 1420 - DNA, 203 bp, Artificial sequence
  synthetic
ggcgcgccagtcctacgccgtggcgtgccgcaggacgcgacggctgcagaacatccgccgcaccgctgggggccaacgttgtgggaccgaggagtccgaggtggcgactgagtgagatacccagctgtgcggagctaggacgcggaacatcccagaggccagcatcaacatgtttccatccttggggacgactcggaccgatg

SEQ ID NO: 1421 - DNA, 203 bp, Artificial sequence
  synthetic
ggcgcgccagtcctgcctgcgcacgcaccgggccggggactgggtggcctggtgtgtgggcgcggcagggcgcaggcgcaggcgcagtgtgcgtccgcgtctgaggggagggatgtgggggaagcgacggcccccggtttgtttgggctgtgggcggtgcgcagcggagagcccgggaaaagcgggaacgactcggaccgatg

SEQ ID NO: 1422 - DNA, 203 bp, Artificial sequence
  synthetic
ggcgcgccagtcctccacccctacccgtgtaggccaccgagtgaggcccatggactggggagggctgtgcctgacgactcctgtgtccctctatgagggcccagcgccctgaccctcctgcctaggtttctaccttttctctctgtctttggccagctgggggagggggtagaggccgggtgagcaaccgactcggaccgatg

SEQ ID NO: 1423 - DNA, 203 bp, Artificial sequence
  synthetic
ggcgcgccagtcctatagaggcggggctgcggcggctgcggtgttcctccgacttccggacatctccctgggagtcgcgcagagtggagtcaaaggcaaccagtgctcgctgcggtctctggggatcgggaccgcggcggcggcccgcgagcgggatgttccggggcttgagcagttggttgggcttgcgactcggaccgatg

SEQ ID NO: 1424 - DNA, 203 bp, Artificial sequence
  synthetic
ggcgcgccagtcctagtgcccgccgggaaaatgcgaccgtccacaaagtgaaatggccgcccgggacgagctcggcctcggcggggattctcttgaggccatgcccgtgccggccgccagaggtcgcccgaggatcacgaatgggcccgaggagctggctgccccttcccccgcggccttggctgattcgactcggaccgatg

SEQ ID NO: 1425 - DNA, 203 bp, Artificial sequence
  synthetic
ggcgcgccagtcctctggagggccgcactcccgttccagccaggctgagccttctgtcccctgcctctggggcctgggaaccccccttcttctttctcctgaatggcacccccgccctagaatccagacaccgagtttcccactgtggctggttcaaggagctccctggtgacagtctgtggctgagccgactcggaccgatg

SEQ ID NO: 1426 - DNA, 203 bp, Artificial sequence
  synthetic
ggcgcgccagtcctggagccgtccgcctacgggggccgggacgtcgcctgcgcgtctctcgttttcggacggctgcagcatcgcggtggggatcgaaagcgggggcttctgggacgcagctctggagacgcggcctcggaccagccatttcggtgtagaagtggcagcacggcagactggtcaaacaacgactcggaccgatg

SEQ ID NO: 1427 - DNA, 203 bp, Artificial sequence
  synthetic
ggcgcgccagtcctggtgctgggaggccttagaacgccgtggcgtgccgcaggacgcgacggctgcagaacatccgccgcaccgctgggggccaacgttgtgggaccgaggagtccgaggtggcgactgagtgagatacccagctgtgcggagctaggacgcggaacatcccagaggccagcatcaaccgactcggaccgatg

SEQ ID NO: 1428 - DNA, 203 bp, Artificial sequence
  synthetic
ggcgcgccagtcctccgggaggctgagactgcattgttgggatttgatgcactaatctcctgtctccgccgcctttccctctgttcggtctcttgccctccctcccttcgtctgtccttcctccgtgtgtttgtctatcctcctctgtccctcctctttcctctccttgctttctttggttttctgcacgactcggaccgatg

SEQ ID NO: 1429 - DNA, 203 bp, Artificial sequence
  synthetic
ggcgcgccagtcctcccagttgttactcaggtgcgctagcctgcggagcccgtccgtgctgttctgcggcaaggcctttcccagtgtccccacgcggaaggcaactgcctgagaggcgcggcgtcgcaccgcccagagctgaggaagccggcgccagttcgcggggctccgggccgccactcagagctcgactcggaccgatg

SEQ ID NO: 1430 - DNA, 203 bp, Artificial sequence
  synthetic
ggcgcgccagtcctaggggcagcgggagccggccgggtagggtgcagcctgaggcttgttcagcagaacaggtgcaagccacattgttgccaagacctgcctgaagccggattctccccactgcctccttcaaccccgcctcttcctcctcctgtgggactgctcccccctcctgtgaggctagatagcgactcggaccgatg

SEQ ID NO: 1431 - DNA, 203 bp, Artificial sequence
  synthetic
ggcgcgccagtcctcttggggcgcagggcatggtgtgaaaggccaagtgctgaggcgggtatcatgggtgctgtgccctagggcctgggtggcagggggtgggtggcctgtgggtgtgccgggggggccagtgtgcccaccccagtctcttggcgtgctggagggcatcctggatggaattgaagtgacgactcggaccgatg

SEQ ID NO: 1432 - DNA, 203 bp, Artificial sequence
  synthetic
ggcgcgccagtcctccggattcccctgcggcttcgatccctttccactgggtattgagattggcgaggggagaggcgcagaaacggcgtactctagtgcagtggttcaatctcggctcactgcaacctccgcctccccgattcaagcgattctcctgcgtcagcctccccagtagctgagactacaggcgactcggaccgatg

SEQ ID NO: 1433 - DNA, 203 bp, Artificial sequence
  synthetic
ggcgcgccagtcctggaccaaagaaacgcgagcttagccctgggtagcgcggccaatggccgtggagcagcccctgtaaactggctcgggcgcccccacgcccgcccttccttcttctcccagcattgccccccccacgtttcagcacagcgctggccgcagtctgacaggaaagggacggagccaagcgactcggaccgatg

SEQ ID NO: 1434 - DNA, 203 bp, Artificial sequence
  synthetic
ggcgcgccagtccttctctcccgctgttggctggcaggatcttttggcagtcctgtggcctcgctccccgcccggatcctcctgaccctgagattcgcgggtctcacgtcccgtgcacgccttgcttcggcctcagttaagcctttgtggactccaggtccctggtgagattagaaacgtttgcaaaccgactcggaccgatg

SEQ ID NO: 1435 - DNA, 203 bp, Artificial sequence
  synthetic
ggcgcgccagtcctggaggcctgcgtccggaaagtcagtagaattcatcacaagagagctacaagagcctggaagaagctgaagactgctaccctccatccttactcaccctggacctgagagacctcttcaatcaggtggagcaaggccctctcctgtcctgccccaaggctggcacagacttgagccgactcggaccgatg

SEQ ID NO: 1436 - DNA, 203 bp, Artificial sequence
  synthetic
ggcgcgccagtcctagtgggtgggaagagcccccaagagctctgtgcgggattctaggctcccctgtgacagccgcggcaggaagcaggcgggcgctccccggccacaggcctgttgttctcggaagggagaaagctggacatttccccacgtaactcccagctctgggcctagagtgcgtgcatggccgactcggaccgatg

SEQ ID NO: 1437 - DNA, 203 bp, Artificial sequence
  synthetic
ggcgcgccagtcctctgccatccctccccggactccggctccggctccgattgcaatttgcaacctccgctgccgtcgccgcagcagccaccaattcgccagcggttcaggtggctcttgcctcgatgtcctagcctaggggcccccgggccggacttggctgggctcccttcaccctctgcggagtccgactcggaccgatg

SEQ ID NO: 1438 - DNA, 203 bp, Artificial sequence
  synthetic
ggcgcgccagtcctatttaactctgccagggatccgctgggctctgacgactgcggtagatccatggcttcctggacgttcacccgtagagtcatcctagcttaactcttgttccctggtctcagttcacaagcctcacctgtatcttcctggctcggaagataattgaaaccaagtctgacttctcacgactcggaccgatg

SEQ ID NO: 1439 - DNA, 203 bp, Artificial sequence
  synthetic
ggcgcgccagtcctttgcgccacaaccagggcagcgtaaactacagttcccagagagcgccgcgtcgggagcggagccttttctcgctaacaccgctcgccctctccgagtcagttccgcggtagaggtgacctgactctctgaggctcattttgcagttgttgaaattgtccccgcagttttcaatccgactcggaccgatg

SEQ ID NO: 1440 - DNA, 203 bp, Artificial sequence
  synthetic
ggcgcgccagtcctacttctgctttctgacttgattacaggcatctttcctttttcatgctgtgcaaaaacttgagctcagcctctcaccccaacacaattcaagacgcagccttgtcccagcatgagcgcagataacagcagcaccatctgtgtttgtagaagcgtgagacaggagcttggaattgccgactcggaccgatg

SEQ ID NO: 1441 - DNA, 203 bp, Artificial sequence
  synthetic
ggcgcgccagtcctcggtcacgtgggggcgccggctgcgcctgcggagaagcggtggccgccgagcgggatctgtgcggggagccggaaatggttgtggactacgtctgtgcggctgcgtggggctcggccgcgcggactgaaggagactgaaggtgctggggggaccctgatgtggcaccaaatgaacgactcggaccgatg

SEQ ID NO: 1442 - DNA, 203 bp, Artificial sequence
  synthetic
ggcgcgccagtcctccatccctgctgtgactcagctgtgacgttgaaccacacaagccagagagaagaagataaagtcatcagagctcctactcaccagagagtgaggcccaggccaggactccacaaggctggtcccctgccctggagcaacttaaacaggccctctggccagcctggaaccctgagcgactcggaccgatg

SEQ ID NO: 1443 - DNA, 203 bp, Artificial sequence
  synthetic
ggcgcgccagtcctttcaacctcgaataaaaactgcagccaacttccgaggcagcctcattgcccagcggaccccagcctctgccaggttgggtccgccatcctcgtcccgtcctccgccggcccctgccccgcgcccagggatcctccagctcctttcgcccgcgccctccgttcgctccggacacccgactcggaccgatg

SEQ ID NO: 1444 - DNA, 203 bp, Artificial sequence
  synthetic
ggcgcgccagtcctctgacaggagaaatagcagtgctgcccaggatcacagctcaccccgaggtggctgaggctggaattgggtgcccctttgcaggtgtcggctgctccttcaagggaagcccacagtctgtgcaagagcatgaggtcacctcccagacctcccacctaaacctgctgttggggttccgactcggaccgatg

SEQ ID NO: 1445 - DNA, 203 bp, Artificial sequence
  synthetic
ggcgcgccagtcctgtgcgaggggtggggctgcgggaggccctggagcgcggcggtgatggcggggccggtgaaggaccgcgaggccttccagaggctcaacttcctgtaccaggccgcccattgtgtccttgcccaggaccccgagaaccaggcgctggcgaggttttactgctacactgagaggaccgactcggaccgatg

SEQ ID NO: 1446 - DNA, 203 bp, Artificial sequence
  synthetic
ggcgcgccagtccttacgacccctcctttcgaggccccatcaagaacagaagctgcacagatgtcatctgctgcgtcctcttcctgctcttcattctaggttacatcgtggtggggattgtggcctggttgtatggagacccccggcaagtcctctaccccaggaactctactggggcctactgtggccgactcggaccgatg

SEQ ID NO: 1447 - DNA, 203 bp, Artificial sequence
  synthetic
ggcgcgccagtcctgtggggttgacccgcacgtcccgccccgcctctcccttcgcgctccggacgggcgacggtagctcgagacccgggactccgcccgcctccccgcgagtatttgaggtccggggcggctccggcgcctctgcccgccgttctgctcgctcgctccccgctctggagtctgccatccgactcggaccgatg

SEQ ID NO: 1448 - DNA, 203 bp, Artificial sequence
  synthetic
ggcgcgccagtcctactctcattccacgttcttaactgttccattttccgtatctgcttcgggcttccacctcatttttttcgctttgcccattctgtttcagccagtcgccaagaatcatgaaagtcgccagtggcagcaccgccaccgccgccgcgggccccagctgcgcgctgaaggccggcaagcgactcggaccgatg

SEQ ID NO: 1449 - DNA, 203 bp, Artificial sequence
  synthetic
ggcgcgccagtcctttcatccaccagcagcctcagtcctcatcacctgtgtacggctccagtgccaaaacttccagtgtctccaaccctcaggacagtgttggctctccgtgctcccgagtgggtgaggaggagcacgtctacagcttccccaacaagcagaaatcagctgagccttcacccaccgtacgactcggaccgatg

SEQ ID NO: 1450 - DNA, 203 bp, Artificial sequence
  synthetic
ggcgcgccagtcctgaccagattgggtgcttggccgtccctgccattagcgcgtaacgagagactgcttgctgcggcagagacgccagaggtgcagctccagcagcaatggcagtgacggcgttggcggcgcggacgtggcttggcgtgtggggcgtgaggaccatgcaagcccgaggcttcggctcgcgactcggaccgatg

SEQ ID NO: 1451 - DNA, 203 bp, Artificial sequence
  synthetic
ggcgcgccagtccttggtgtgacttagtttttgattgctggatttcactggagtgaagtggtcgtttattggctggccctctgatatgaggtggtggtgaattggtgggcgtcagtgcagtaagtgagcgagccggacgtcgattgactggtcttcagaagcagaaggactccatgaaagatgacagacgactcggaccgatg

SEQ ID NO: 1452 - DNA, 203 bp, Artificial sequence
  synthetic
ggcgcgccagtcctacttaagcttcgacgcaggaggcggggctgctcagtcctccaggcgtcggtactcagcggtgttggaacttcgttgcttgcttgcctgtgcgcgcgtgcgcggacatggcctcaaacgattatacccaacaagcaacccaaagctatggggcctaccccacccagcccgggcagcgactcggaccgatg

SEQ ID NO: 1453 - DNA, 203 bp, Artificial sequence
  synthetic
ggcgcgccagtcctccttctggaaggttctaagatagggtataagaggcagggtggcgggcggaaaccggtctcattgaactcgcctgcagctcttgggttttttgtggcttccttcgttattggagccaggcctacaccccagcaaccatgtccaagggacctgcagttggtattgatcttggcacccgactcggaccgatg

SEQ ID NO: 1454 - DNA, 203 bp, Artificial sequence
  synthetic
ggcgcgccagtcctatttccggctcgaatgcccggcagccgtggcggctagagcgttcctccccagctcgaatgcccggcggccgaggcggctagagcgtcgcctcctcccggggaaccgcgtgtgaccttccagcccggggaccgatgctgccggcggccgctcgccccctgtgggggccttgccttcgactcggaccgatg

SEQ ID NO: 1455 - DNA, 203 bp, Artificial sequence
  synthetic
ggcgcgccagtcctctgtatgttccctgggttcctgagagaggacattgaggagtaggagtcggcgattaaggagatcggtacaattgggaagcctcctgtcagagcttccagcaatttcctcatcagaggtggacaagccctatgggctaagacagagggtcctcagaaaggagtgcggacgccgtccgactcggaccgatg

SEQ ID NO: 1456 - DNA, 203 bp, Artificial sequence
  synthetic
ggcgcgccagtcctgcggcaggtctctgcgcagcccagcccgccggtccacgccgcgcaccgctccgagggccagcgccacccgctccgcagccggcaccatgcgcgagatcgtgcacatccaggcgggccagtgcggcaaccagatcggcgccaagttttgggaggtcatcagcgatgagcatgggacgactcggaccgatg

SEQ ID NO: 1457 - DNA, 203 bp, Artificial sequence
  synthetic
ggcgcgccagtcctccagctcagagggagcaggggcccagccagggacggaccctcattcctcccagggaccccagacctctgtctctctcggctgagtatttgtgccaggaagactgcgtgcagaaggtgactgtctcagtggagctgggtcatctcaggccttggctccttgaacttttggccgcccgactcggaccgatg

SEQ ID NO: 1458 - DNA, 203 bp, Artificial sequence
  synthetic
ggcgcgccagtcctggctccacccagaggccagtcctgtgtgtctggggacaaggcgaaagagcagcagaagtgccccttctccaggatcaaggaactggggcggggggtgtttcctggaccccagtcctccgaatcagctcctagagtggaaccaggaaggattctggagccacagaagatagacagcgactcggaccgatg

SEQ ID NO: 1459 - DNA, 203 bp, Artificial sequence
  synthetic
ggcgcgccagtcctgctgctgccttaagacgtgcagcctgggccgtggctgtcactgcgttcggacccagacccgctgcaggcagcagcagcccccgcccgcgcagcagcatggagctctggggggcctacctcctcctctgcctcttctccctcctgacccaggtcaccaccgagccaccaacccagcgactcggaccgatg

SEQ ID NO: 1460 - DNA, 203 bp, Artificial sequence
  synthetic
ggcgcgccagtcctaagccgtccggaaaatggccgccgccgccgccgccgcgccgagcggaggaggaggaggaggcgaggaggagagactgctccataaaaatacagactcaccagttcctgctttgatgtgacatgtgactccccagaatacaccttgcttctgtagaccagctccaacaggattcccgactcggaccgatg

SEQ ID NO: 1461 - DNA, 203 bp, Artificial sequence
  synthetic
ggcgcgccagtcctcaggtcacgtgacgggagcgcgggctttggaaggcggctgaacgtcaggccacccgccgctaagctgagaagggagagcgagcttaggaccgcctgcccggggcaaccccgaaccaagctttagccgccgaggccgcgtgtcccaaaggccagtcatccctcctctgtgttgcccgactcggaccgatg

SEQ ID NO: 1462 - DNA, 203 bp, Artificial sequence
  synthetic
ggcgcgccagtcctagaacaaatcattgtgggaagctgggaggagagagagagagaggaagtcggacgtgggcgaggggcggggtgtctggactggaacctctgggcccacatgccatggacaatattaccaggcagaaccaattctacgatacccaagtcatcaaacaagaaaacgagtcaggctaccgactcggaccgatg

SEQ ID NO: 1463 - DNA, 203 bp, Artificial sequence
  synthetic
ggcgcgccagtcctccggccggcttcccggaactggaaggttacattgattacccacctagtacaacatcttacgggaagagcatagtatttcctagaggaatatgaacataacaggaaggtatcattggctctgaattaaatttgaacttgtcccctgaatagctacaggttttggaagctgaatcacgactcggaccgatg

SEQ ID NO: 1464 - DNA, 203 bp, Artificial sequence
  synthetic
ggcgcgccagtcctcaggtctgggctcttcagctgagcacttagtgtttgtacaggatgaggcagaagattcagggaatgatttcctctccagtgagagcacagacagtagcattccatggttcctccgggttcaggagttggcccatgacagtttgattgctgctactcgtgcacaactggcaaagacgactcggaccgatg

SEQ ID NO: 1465 - DNA, 203 bp, Artificial sequence
  synthetic
ggcgcgccagtcctagagcagggctgcatttccagcaggagctgcgagcacagtgctggctcacaacaagatgctcaaggtgtcagccgtactgtgtgtgtgtgcagccgcttggtgcagtcagtctctcgcagctgccgcggcggtggctgcagccggggggcggtcggacggcggtaattttctggcgactcggaccgatg

SEQ ID NO: 1466 - DNA, 203 bp, Artificial sequence
  synthetic
ggcgcgccagtcctgatcccccgcccagcagttctggccgctgtcccggtgcgcacggacgtggctcgagtttcctctgctctccgctctcgcccgctagctctcctcccttccgctcctgcttctctccgggtctcccgctccagctccagccccacccggccggtcccgcacggctccgggtagcccgactcggaccgatg

SEQ ID NO: 1467 - DNA, 203 bp, Artificial sequence
  synthetic
ggcgcgccagtcctaaagcctcggctacttccgagggggtgagtggcttcaccgccggtcccttgcagcgctgcctttcgatctctccacatctcggtggcgcgggatctcaagatgcgcctccacctgctcctgctgctcgcgctgtgcggtgcaggcaccaccgccgcggagctcagttacagcttcgactcggaccgatg

SEQ ID NO: 1468 - DNA, 203 bp, Artificial sequence
  synthetic
ggcgcgccagtcctaagcaccgataggctctgcctcccgaagaaaagggagccgcgcagcgcctacgggagtccggcggcagcagccggtaccggcaaccacgggcagctctcagggaatctccgtcgtgaggccagaggctccagtccccgcgagtccagatgcctgtccagcctccaagcaaagaccgactcggaccgatg

SEQ ID NO: 1469 - DNA, 203 bp, Artificial sequence
  synthetic
ggcgcgccagtcctttgaagcaaggttgtggagaaaagcaaaggagacaaaaagtaaccttcctgaagaggacatgtgattggaagttgtcaattgttgaagcattggtaactccagtctctaacgttttagaaaatcataacaagcggttctctaccctgtaaaggtgaactactgagttcttcattcgactcggaccgatg

SEQ ID NO: 1470 - DNA, 203 bp, Artificial sequence
  synthetic
ggcgcgccagtcctttgttcccagggtggcgcctgctctccatccaggccccattccggctcccacccgacgctgcttttgttcccacgtttcggggggcagctggcactgtgattcctgccccatgagtgcctagaggcacggagccaccagggatcaccccacgtgggacacagggcttggggaggcgactcggaccgatg

SEQ ID NO: 1471 - DNA, 203 bp, Artificial sequence
  synthetic
ggcgcgccagtcctgactttaacatttctctttgtcttaacattagacaaaaagtaaccttcctgaagaggacatgtgattggaagttgtcaattgttgaagcattggtaactccagtctctaacgttttagaaaatcataacaagcggttctctaccctgtaaaggtgaactactgagttcttcattcgactcggaccgatg

SEQ ID NO: 1472 - DNA, 203 bp, Artificial sequence
  synthetic
ggcgcgccagtcctcaattgataatcaaaggctaaatctcttctgggatccactgaatgccactagagggtctgctcgagagaattcctgattgaatgacaacggcgctaagaacaatccctgcccaagacgggtctggagcctgacttccgggtgtccatgaccctggcggctgcttcgggtccgcccgactcggaccgatg

SEQ ID NO: 1473 - DNA, 203 bp, Artificial sequence
  synthetic
ggcgcgccagtcctgctgtttagaactattgtaccgctgccagtgactgtctgtattagggttgggagcaggaacatggatttgaagacattaaaactgtttaattctcagttgagatgtggttggctcttatacatttggaataaagcatttatggcacatctcagggttccacaagatgaatggaccgactcggaccgatg

SEQ ID NO: 1474 - DNA, 203 bp, Artificial sequence
  synthetic
ggcgcgccagtcctctgtgcggggagccggaaatggttgtggactacgtctgtgcggctgcgtggggctcggccgcgcggactgaaggagactgaaggccctcggatgcccagaacctgtaggccgcaccgtggacttgttcttaatcgagggggtgctggggggaccctgatgtggcaccaaatgaacgactcggaccgatg

SEQ ID NO: 1475 - DNA, 203 bp, Artificial sequence
  synthetic
ggcgcgccagtcctataaaaccagctgagtatttgtgccaggaagactgcgtgcagaaggccttggctccttgaacttttggccgccatgtgcttcccgaaggtcctctctgatgacatgaagaagctgaaggcccgaatggtgatgtcgagcctggcagagctggaggacgacttcaaagagggctacgactcggaccgatg

SEQ ID NO: 1476 - DNA, 203 bp, Artificial sequence
  synthetic
ggcgcgccagtcctacctgggaaaaggaagcacaaaaaggagaagcagcaacggctgctctgcttccttcccatctcgctcttgggtcatgcctggccagcagaaagcagctccataggggaggagagccacgcaggatctcacagctgcagtctaatagtaacacagaggattcagcagtggccacccgactcggaccgatg

SEQ ID NO: 1477 - DNA, 203 bp, Artificial sequence
  synthetic
ggcgcgccagtcctgccttggctccttgaacttttggccgccatgtgcttcccgaaggtcctctctgatgacatgaagaagctgaaggcccgaatgcaccaggccatagaaagattttatgataaaatgcaaaatgcagaatcaggacgtggacaggacgacttcaaagagggctacctggagacagtcgactcggaccgatg

SEQ ID NO: 1478 - DNA, 203 bp, Artificial sequence
  synthetic
ggcgcgccagtcctaacttgcgcctggccgccaagccggcctccaggctgaagaaggacccgccccggccttgacccgggccccgcccctccagccggggcaccgagccccggccctagctgctcgcccctactcgccggcactcgcccggctcgcccgctttcgcacccagttcacgcgccacagctcgactcggaccgatg

SEQ ID NO: 1479 - DNA, 203 bp, Artificial sequence
  synthetic
ggcgcgccagtcctggggtcgttgtgtcgtgacaaccgctgcggtagccgtttccgaggcagcagttgcggccgctttagccctgagcgggatctgcggctgcctgcgagtctctgctgtgccgacccttctcttcgcggaccccacgccaagcagcgaccctgagccgacagccggagcgcccggcacgactcggaccgatg

SEQ ID NO: 1480 - DNA, 203 bp, Artificial sequence
  synthetic
ggcgcgccagtcctgtcttcaggtcccaatcctccgcttccgcgcttgcgcgccaagacggctcggatgccggcggtctctgctgaagagagaagatggcgcttgacggaccagagcagatggagctggaggaggggaaggcaggcagcggactccgccaatattatctgtccaagattgaagaactccgactcggaccgatg

SEQ ID NO: 1481 - DNA, 203 bp, Artificial sequence
  synthetic
ggcgcgccagtcctacaacgctgccgccgcgctccgtgggcaactcctactactgctgggctgggctgggctgggctgggctgcgccggagctcgcctgcacagatcagctccggagaggggaaaaccacgctcctcggaccaagcctcgggagctaagtgtttctgaaagatctatccagcactccgcgactcggaccgatg

SEQ ID NO: 1482 - DNA, 203 bp, Artificial sequence
  synthetic
ggcgcgccagtcctcgggagcgtgcccggtccccgcccctgttcccactctccttccacctgggaccggccggggctccgcagagccaaagctcgcttgtccccggaaccgccctgctgccgccgcctgcttcctctgctcgcggttagcccgtcagtccctgctctgtgcgcgcctccatctgggcccgactcggaccgatg

SEQ ID NO: 1483 - DNA, 203 bp, Artificial sequence
  synthetic
ggcgcgccagtcctttgatgtaacagagcagaggaccagcagatgaatggacaccttgaagcagaggagcagcaggaccagagatcacccctgacctgctacctcggccgccccggttgcttctattggtcaatccctttgggggtcggggcctggcctggcagtggtgtaagaaccacgtgcttccccgactcggaccgatg

SEQ ID NO: 1484 - DNA, 203 bp, Artificial sequence
  synthetic
ggcgcgccagtcctagctaggcgcgaggctcggagtgcggccagcgggcggaggcggtctcgcatcggcggcgacggagggctcaggcgtcgtcgtttgggtggggggccgctgaactgacaagcgacatttcagctcctttcacccgccggaaccccggagccggggcccgctcagccggcgttacccgactcggaccgatg

SEQ ID NO: 1485 - DNA, 203 bp, Artificial sequence
  synthetic
ggcgcgccagtcctcctagacggcggtgttgctccggcagcgttcctgggagccgagggccagagactaagttaaaaggcccctccccatcttcagaacagtcctgggttctgagcctgccatccaaggaactcaggaggaggagttgacagtctcttcgttcctaaccagtgtgggacgacttcagccgactcggaccgatg

SEQ ID NO: 1486 - DNA, 203 bp, Artificial sequence
  synthetic
ggcgcgccagtcctggacgatcctctctcagcgtccagcctagacggcggtgttgctccggcagcgttcctgggagccgagggccagagactaagtaacagtcctgggttctgagcctgccatccaaggaactcaggaggaggagttgacagtctcttcgttcctaaccagtgtgggacgacttcagccgactcggaccgatg

SEQ ID NO: 1487 - DNA, 203 bp, Artificial sequence
  synthetic
ggcgcgccagtcctgtcgtggacgatcctctctcagcgtccagcctagacggcggtgttgctccggcagcgttcctgggagccgagggccagagactaagttcctgggttctgagcctgccatccaaggaactcaggaggaggagttgacagtctcttcgttcctaaccagtgtgggacgacttcagccgactcggaccgatg

SEQ ID NO: 1488 - DNA, 203 bp, Artificial sequence
  synthetic
ggcgcgccagtcctggaacaggcgaggaaaagtagtcccttctcggcgattctgcggagggatctccgtggggcggtgaacgccgatgattatataaggacgcgccgggtgtggcacagctagttccgtcgcagccgggatttgggtcgcagttcttgtttgtggatcgctgtgatcgtcacttgacacgactcggaccgatg

SEQ ID NO: 1489 - DNA, 203 bp, Artificial sequence
  synthetic
ggcgcgccagtccttaactgacgctaccgtcgcggccgccggcaagttcctttactgtgttttcttggttcagccttgaagtgagtcgtggacgatcctctctcagcgtccagcctagacggcggtgttgctccggcagcgttcctgggagccgagggccagagactaagttgtgggacgacttcagccgactcggaccgatg

SEQ ID NO: 1490 - DNA, 203 bp, Artificial sequence
  synthetic
ggcgcgccagtcctaacatgttgagctctggcatagaagaggctggtggctattttgtccttgggctgcctgttttcaggcgccatgtcagaaccggctggggatgtccgtcagaacccatgcggcagcaaggcctgccgccgcctcttcggcccagtggacagcgagcagctgagccgcgactgtgacgactcggaccgatg

SEQ ID NO: 1491 - DNA, 203 bp, Artificial sequence
  synthetic
ggcgcgccagtccttgggaactgggaacactggagacctgatttctaactgacgctaccgtcgcggccgccgtaaaaggcccctccccatcttcagaacagtcctgggttctgagcctgccatccaaggaactcaggaggaggagttgacagtctcttcgttcctaaccagtgtgggacgacttcagccgactcggaccgatg

SEQ ID NO: 1492 - DNA, 203 bp, Artificial sequence
  synthetic
ggcgcgccagtcctcgccgaggcaccgaggcactcagaggaggtgagagagcggcggcagacaacaggggaccccgggccggcggcccagagccgagccaagcgtgcccgcgtgtgtccctgcgtgtccgcgaggatgcgtgttcgcgggtgtgtgctgcgttcacaggtgtttctgcggcaggcgcccgactcggaccgatg

SEQ ID NO: 1493 - DNA, 203 bp, Artificial sequence
  synthetic
ggcgcgccagtccttcgcactcctcgcagttggactggtgggaactgggaacactggagacctgatttctaactgacgctaccgtcgcggccgccgaacagtcctgggttctgagcctgccatccaaggaactcaggaggaggagttgacagtctcttcgttcctaaccagtgtgggacgacttcagccgactcggaccgatg

SEQ ID NO: 1494 - DNA, 203 bp, Artificial sequence
  synthetic
ggcgcgccagtcctagcgccggaagtacggttttcggagggatcagactcagactcacgtcgcactcctcgcagttggactggtgggaactgggaacactggagacctgatttctaactgacgctaccgtcgcggccgccgtgtgggacgacttcagcatgtctcaggccaccaagaggaagcatgtgcgactcggaccgatg

SEQ ID NO: 1495 - DNA, 203 bp, Artificial sequence
  synthetic
ggcgcgccagtcctgaagcggctccgcgctctgcccgtttgggcctcccccgactcggactcgcgcccgtgggctcccgccgcgcccgcccggccccgcgccggccccgcgccccctcccccgtctcggcgccccctcctcaggagccgcgggtccccgccactttcgcacggccccggcccccgccgcgactcggaccgatg

SEQ ID NO: 1496 - DNA, 203 bp, Artificial sequence
  synthetic
ggcgcgccagtcctccggctgccgcctaggatgaatatcatggacttcaacgtgaagaagctggcggccgacgcaggcaccttcctcagtcgcgccgtgcagatgccaggatagaagaatttgtttatgagaaactggatagaaaagctccaagtcgtataaacaacccagaacttttgggacaatatcgactcggaccgatg

SEQ ID NO: 1497 - DNA, 203 bp, Artificial sequence
  synthetic
ggcgcgccagtcctcctccgcgaggtctccctgagtctttgaggacacagcctcgctggaggcagtttctggtgccagtgacggggtggcccgtgagctgatgacgaggactggcttttaatccttggtggtgattaagagaaagcttattggggcctgggagcagctccccgccgacccccaccacccgactcggaccgatg

SEQ ID NO: 1498 - DNA, 203 bp, Artificial sequence
  synthetic
ggcgcgccagtcctgaaacacagagcaccagctctgaggaactcgtcccaagccccccatctccacttcctccccctcgagtgtacaaaccctgcttcgtctgccaggacaaatcatcagggtaccactatggggtcagcgcctgtgagggatgtaagggctttttccgcagaagtattcagaagaatcgactcggaccgatg

SEQ ID NO: 1499 - DNA, 203 bp, Artificial sequence
  synthetic
ggcgcgccagtcctgaacacgtggctgcagcggggccagagcagcaatggcggcgggcggcggcggtagctgcgaccccctggcccctgctggggtcccttgcgccttctccccgcacagccaggcctacttcgctttggcctctaccgacggtcacttacgagtatgggagacggccaacaaccggccgactcggaccgatg

SEQ ID NO: 1500 - DNA, 203 bp, Artificial sequence
  synthetic
ggcgcgccagtccttaacctcggtgcccccttcaacctcccgccccaagcacctccagggtcgtcaggggtgtagttttgagtcgcgctcctaagcatccagacaggcaggacaccgtaacgacatctctgccgggagtcccttcagactgcggtctccagacaaaaatctacgtaccatcagaaactcgactcggaccgatg

SEQ ID NO: 1501 - DNA, 203 bp, Artificial sequence
  synthetic
ggcgcgccagtcctggcttttagctggcttgtctgtcataattcatgattcggggctgggaaaaagaccaacagcctacgtgccaaaaaaggggcagagtttgatggagttgggtggacttttctatgccatttgcctccacacctagaggataagcacttttgcagacattcagtgcaagggagatccgactcggaccgatg

SEQ ID NO: 1502 - DNA, 203 bp, Artificial sequence
  synthetic
ggcgcgccagtcctttgtcttgcgcctgccttcctaacagccttcagttccccttctcccgtcagaccttcctgacctcccacctggttctctaggggcagggtggacaggaagcagctcagcccagcctgggagaggccaagggctgcctcctatcagagagcgcctgctcgctgtgcccccgggttcgactcggaccgatg

SEQ ID NO: 1503 - DNA, 203 bp, Artificial sequence
  synthetic
ggcgcgccagtcctaaaaagcttttccaaaaaagtattggctgtcttgaggaatgcggtcgcccccttgggaaagtacatatctgggagaagcaggcggctccgcgctcgcactcccgctcctccgcccgaccgcgcgctcgccccgccgctcctgctgcagccccagggcccctcgccgccgccacccgactcggaccgatg

SEQ ID NO: 1504 - DNA, 203 bp, Artificial sequence
  synthetic
ggcgcgccagtcctgaaagggcgggaaaggcagttggagaagaggtaagcggttactcactccatggctgcagcaaggagaggcggcggcggcctcggctgaagaaagaagaaatcttcccaaggctgcagacaccgacggatttgctttgggagccagagtagctgccgccaccagagtccggagcccgactcggaccgatg

SEQ ID NO: 1505 - DNA, 203 bp, Artificial sequence
  synthetic
ggcgcgccagtcctccccgacggcggcgctaacctctcggttattccaggatctttggagacccgaggaaagccgtgttgaccaaaagcaagacaaatgactcacagagaaaaaagatggcagaaccaagggcaactaaagccgtcaggttctgaacagctggtagatgggctggcttactgaaggaccgactcggaccgatg

SEQ ID NO: 1506 - DNA, 203 bp, Artificial sequence
  synthetic
ggcgcgccagtcctcggttctctctggactggtggcagcgcgcggccccgaaccgcgccccaggccggcaggcggggaaggagccggtgggggtagggggtgcggtggggggtggggaccctccggctcttgggggtcccagtccccgccggctgctgagcgggtggggtggtggaggagctgcagagcgactcggaccgatg

SEQ ID NO: 1507 - DNA, 203 bp, Artificial sequence
  synthetic
ggcgcgccagtcctatttcctctgggttacggcgcaggcgcaagataagctaggagccgcgcgagtcgtagtgtcgctgtttgcgggtctccgcgcgggaccggggcgcagcggggtcgctgaggcgagggtgtcatgtcagacaacgaggacaattttgatggcgacgactttgatgatgtggaggacgactcggaccgatg

SEQ ID NO: 1508 - DNA, 203 bp, Artificial sequence
  synthetic
ggcgcgccagtcctgcccttcccgcctctggggaagggaacttccgcttgggaccgagggcagtaggctctcggctcctggtcccactgctgctcagcccagtggcctcacaggacaccagcttcccaggaggcgtctgacacagtatgatgatgaagatcccatggggcagcatcccagtactgatgcgactcggaccgatg

SEQ ID NO: 1509 - DNA, 203 bp, Artificial sequence
  synthetic
ggcgcgccagtcctgcactgggccacgagctgccagtgctggctccccagtgggagggctacgatgagctgcagactgatggcaaccgcagcagccactcccgcttgggaagaatagaggcagattctgaaagtcaagaagacatcatccggaatattgccaggcacctcgcccaggtcggggacagccgactcggaccgatg

SEQ ID NO: 1510 - DNA, 203 bp, Artificial sequence
  synthetic
ggcgcgccagtcctggcggggagaagccgagctgagcggatcctcacacgactgtgatccgattctttccagcggcttctgcaaccaagcgggtcttacccccggtcctccgcgtctccagtcctcgcacctggaaccccaacgtccccgagagtccccgaatccccgctcccaggctacctaagaggcgactcggaccgatg

SEQ ID NO: 1511 - DNA, 203 bp, Artificial sequence
  synthetic
ggcgcgccagtccttggcgcgggcgggcccgtcccccctgcccctgggtcgctctttttaagctcccctgagccggtgctgcgctcctctaattgggactccgagccggggctatttctggcgctggcgcggctccaagaaggccatcccagccatcactcttccacctgctccttagagaagggaagcgactcggaccgatg

SEQ ID NO: 1512 - DNA, 203 bp, Artificial sequence
  synthetic
ggcgcgccagtcctacgtcaccggctgcgcccttcagtatcgcggacggaagatggcgtccgccacccgtctcatccagcggctgcggaactgggcgtccgggcatgacctgcaggggaagctgcagctacgctaccaggagatctccaagcgaactcagcctcctcccaagctccctgtgggtcctacgactcggaccgatg

SEQ ID NO: 1513 - DNA, 203 bp, Artificial sequence
  synthetic
ggcgcgccagtcctctcctacggcaagtcggaggtagcaagatggccgccgctgaggaaggctgtagtgtcggggccgaagcggacagggaattggaggagcttctggaaagtgctcttgatgatttcgataaagccaaaccctccccagcacccccttctaccaccacggcccctgatgcttcggggcgactcggaccgatg

SEQ ID NO: 1514 - DNA, 203 bp, Artificial sequence
  synthetic
ggcgcgccagtcctctggggctcgcccgctccttagagcactggcaatgatgtgcggatcctcgctgctgctgctgggaaactgttgagtggctgaatgaccccaggggaccctgggagagctctgaagccctcagccaccaagtggctgggctggcaagggttcattcattcattcaacaaatacgacgactcggaccgatg

SEQ ID NO: 1515 - DNA, 203 bp, Artificial sequence
  synthetic
ggcgcgccagtcctgaaattgtagtccgattggggctgcgcgcttcgcttctgcggctcagcctccagcccaggtggcgctgtggaccctgcagccgcggagcgaggcagcggggcggctccgtgaccacggcgggcggagcctaggactgagggcgatggctgctgtggccgtggctgttcgcgaggcgactcggaccgatg

SEQ ID NO: 1516 - DNA, 203 bp, Artificial sequence
  synthetic
ggcgcgccagtccttgccaggctctccacccccacttcccaattgaggaaaccgaggcagaggaggctcagcgccacgcactcctctttctgcctggccggccactcccgtctgctgtgacgcgcggacagagagctaccggtggacccacggtgcctccctccctgggatctacacagaccatggcccgactcggaccgatg

SEQ ID NO: 1517 - DNA, 203 bp, Artificial sequence
  synthetic
ggcgcgccagtcctcggcttctgctgctagcgccggagctgagttagttctgagaaggtttccctgggcgttccttgtccggcggcctctgctgccgcctccggagacgcttcccgatagatggctacaggccgcggaggaggaggaggtggagttgctgcccttccggagtccgccccgtgaggagacgactcggaccgatg

SEQ ID NO: 1518 - DNA, 203 bp, Artificial sequence
  synthetic
ggcgcgccagtcctgattattttctcaggtgtttgcaacagtgttctaactattaacgctacgatgcctgaacctaccaagtctgctcctgccccaaagaagggctccaagaaggcggtgactaaggctcagaagaaggacgggaagaagcgcaagcgcagccgcaaggagagctattcagtgtatgtcgactcggaccgatg

SEQ ID NO: 1519 - DNA, 203 bp, Artificial sequence
  synthetic
ggcgcgccagtccttcacttccctgtactctcatcgctctcggcctccgacacgaaaaggaagcaaatgagctgatggaagatctgtttgaaactagacagggtcttgccatgttctggaactcataggctcaagtaatcttcctgcctcaacctcccaaagtgctggaattacagttccaagatgagcgactcggaccgatg

SEQ ID NO: 1520 - DNA, 203 bp, Artificial sequence
  synthetic
ggcgcgccagtcctcaccctgacccaagccgagacaggttccaaacctcaacctgcagccggaagggggaagtgaaactcggctgggggtgggggctcagaagccgccccagaaagcactgaaagccacagcacgtacacccactccagggatctgccagcaccctgtggggcccagactacaggctgcgactcggaccgatg

SEQ ID NO: 1521 - DNA, 203 bp, Artificial sequence
  synthetic
ggcgcgccagtcctgtggagaaggcttgggctcgcgccgctgaagtcggcttacccgctggccgcctcctgacaagcgggagggatccgcggtggacccagggaagcggaggagcctggcggccaccccctcttcctcacttccctgtactctcatcgctctcggcctccgacacgttccaagatgagcgactcggaccgatg

SEQ ID NO: 1522 - DNA, 203 bp, Artificial sequence
  synthetic
ggcgcgccagtcctagtcagttaggtaacaggccacgggccccgggctcaggccactgcacggacccagggaacgggctgacagtccagcagaggcctcagcgaggcggcggcgctgcgcacaaacctgaggacctaggcgggtgaggcggaaccaaccctcctggccatgggaggggccgtggtggacgactcggaccgatg

SEQ ID NO: 1523 - DNA, 203 bp, Artificial sequence
  synthetic
ggcgcgccagtcctctgctgctgcctcccagggcgctggttcacagcacggtcccagcagggagaggctgagccggttggactagaccacccaaggtctcaggttgcagctccctggtgaggcggaaccaaccctcctggccatgggaggggccgtggtggacgagggccccacaggcgtcaaggccccgactcggaccgatg

SEQ ID NO: 1524 - DNA, 203 bp, Artificial sequence
  synthetic
ggcgcgccagtcctagtgcagagggagtgggacccacagctgctagcctccctccaaaccctcctgcctccaccagacaccaggtgaggcggaaccaaccctcctggccatgggaggggccgtggtggacgagggccccacaggcgtcaaggcccctgacggcggctggggctgggccgtgctcttcgcgactcggaccgatg

SEQ ID NO: 1525 - DNA, 203 bp, Artificial sequence
  synthetic
ggcgcgccagtcctccagggcagcgaggcgctggccggcagggggcgctgcggtgccagcctgaggctgggctgctccgcgaggatacagcggcccctgccctgtcctgtcctgccctgccctgtcctgtcctgccctgccctgccctgtcctgtcctgccctgccctgccctgtgtcctcagacaatcgactcggaccgatg

SEQ ID NO: 1526 - DNA, 203 bp, Artificial sequence
  synthetic
ggcgcgccagtcctccccggggactgagcatccggctcagagcggcttggcagaggcccactgctcagtggagcgtggaggacgaggaggaggccgtccacgagcaatgccagcatgagagagacaggcagcttcaggcccaggacgaggagggaggcggccatgtccccgagcggccgaagcaggagcgactcggaccgatg

SEQ ID NO: 1527 - DNA, 203 bp, Artificial sequence
  synthetic
ggcgcgccagtcctagctgggctttgtggagcgctgcggagggtgcgtgcgggccgcggcagccgaacaaaggagcaggggcgccgccgcagggacccgccacccacctcccggggccgcgcagcggcctctcgtctactgccaccatgaccgccaacggcacagccgaggcggtgcagatccagttccgactcggaccgatg

SEQ ID NO: 1528 - DNA, 203 bp, Artificial sequence
  synthetic
ggcgcgccagtcctgaactgagctcgcatactaccgcttacgcatctaaccaaccgcccatctagctaacccgagcccctccaccgtcaactcaggttcggccggtccccggcccgcctgccggagccgtggtggcagccccgggaggagcactggcgtctgtttccttcgattctcgggattcgaagcgactcggaccgatg

SEQ ID NO: 1529 - DNA, 203 bp, Artificial sequence
  synthetic
ggcgcgccagtcctcggagggactttctgttagcagcatgagggcctgtggttagacctatagaggtatttcctttgatttaagccagaaagtcctgagagcggatcggggagcatttgcggatcggtcactttttcctcctttctgagtctcttatcccctaccacagggacggcccaggtggcaggcgactcggaccgatg

SEQ ID NO: 1530 - DNA, 203 bp, Artificial sequence
  synthetic
ggcgcgccagtcctggcagagtggcgcccgcgcgtgactcccccctgccggctgcggaggtgggggggggacggcgcccccgccgtgtgcgtggggcggggatggagcacgcgccctggagccccggagccagatgctctgacctttgacccctgccgttcagctctagggcccgtgcaggccacacccgactcggaccgatg

SEQ ID NO: 1531 - DNA, 203 bp, Artificial sequence
  synthetic
ggcgcgccagtccttctctcccggtttcagatccgcatttgctaccagcggcggccgcggcggagccaggccggtcctcagcgcccagcaccgccgctcccggcaacccggagcgcgcaccgcaggccggcggccgagctcgcgcatcccagccatcactcttccacctgctccttagagaagggaagcgactcggaccgatg

SEQ ID NO: 1532 - DNA, 203 bp, Artificial sequence
  synthetic
ggcgcgccagtcctccagcggaagtaattctttcgactgccccggaacccaccggagcaggcagctgggggtgggggggcggccctgggataggggctgtggcagtacgcggggacccggctgcggtggctgcgggactgacgaatggagaggagaaaacctatggtggctgtgaaggacctgatgcccgactcggaccgatg

SEQ ID NO: 1533 - DNA, 203 bp, Artificial sequence
  synthetic
ggcgcgccagtcctagcgagagccacaagccacagcgctgagctgcaggcgcggcgaaacttccctctacccgcccggcccgcggcgcgcaccgttggcgctggacgcttcctccttggaagcgcctctccctcagttatggagaaaacttgtatagatgcacttcctcttactatgaattcttcagacgactcggaccgatg

SEQ ID NO: 1534 - DNA, 203 bp, Artificial sequence
  synthetic
ggcgcgccagtcctccagagtgcattgcggggccgcttcctttccgctcggctgttttcctgcgcaggagccgcagggccgtaggcagccatggcgcccagccggaatggcatggtcttgaagccccacttccacaaggactggcagcggcgcgtggccacgtggttcaaccagccggcccgtaagatcgactcggaccgatg

SEQ ID NO: 1535 - DNA, 203 bp, Artificial sequence
  synthetic
ggcgcgccagtcctcaggaaagaaggacgcggcgtctggggagcacccaggcagcaagacggggcccgggctttcgacagtggggagtgtgacgcgcttgggaaaggcaggagcgccagcggtcgggctgctcttggctaacgagaggagtccgaggcggcggcgaggggcgaacgacccgacgcaagcgactcggaccgatg

SEQ ID NO: 1536 - DNA, 203 bp, Artificial sequence
  synthetic
ggcgcgccagtcctgcgcactctggggaaagcggagctgcaccccgccccgtattgctgctcagctcctcagctgtgcgtgcgagggacgtcgggggtggcgccgcagcagttgcccctggtaacgggggaggcagcaggaggaggaggaggaggagggactcggcgggaggatgggcttgctctcaacgactcggaccgatg

SEQ ID NO: 1537 - DNA, 203 bp, Artificial sequence
  synthetic
ggcgcgccagtcctgggagcggccagccttggccaatcaggaagcgggggagagcggcgcgagaagcggcggccgcgtcctcaagccggcacctgagcggcggagacggctgtagcacaaggatctgcatctccaatggatactgaggggtttggtgagctccttcagcaagctgaacagcttgctgccgactcggaccgatg

SEQ ID NO: 1538 - DNA, 203 bp, Artificial sequence
  synthetic
ggcgcgccagtcctgtttcccggcaggcctcgcgtcaagacggccggcgggacgggagctgcggcgctggctacgagagtgacccagtcagcgttggttcccgtcttggccatggcctcgttcgtgacagaagttttggcacactccgggaggctggaaaaggaggatctggggacccggatcagccgcgactcggaccgatg

SEQ ID NO: 1539 - DNA, 203 bp, Artificial sequence
  synthetic
ggcgcgccagtcctggtatgagagcttccagggagacccgccaagatctccaggcaggccgggccaggctctctgggattccggactggcttcgcccaactggaaccccctcgatgagggggccccaggcagaccttatatgagcatcccagccatcactcttccacctgctccttagagaagggaagcgactcggaccgatg

SEQ ID NO: 1540 - DNA, 203 bp, Artificial sequence
  synthetic
ggcgcgccagtcctgctcccaggcagctcctggtccacctctcatgtgtccactgggctgtgtggccaaatctggaggcaggagggagcctgcaggtagacacatggaaccttctcctctctagtgctgccagtctggtgagaacagctaacgctggtcctccccgcccctcctcctctggctacaagcgactcggaccgatg

SEQ ID NO: 1541 - DNA, 203 bp, Artificial sequence
  synthetic
ggcgcgccagtcctttttaaaagcttcagcttctccagcatctttgcattgtgaatatcttcctgcttctagtcaaagctttctctctagtgattggaatgctgctgtaagcctgattagaggtgcctgaggatatcaccttttacaaggaagccgtgtgtgcttgagaggatctttttaaatgcattcgactcggaccgatg

SEQ ID NO: 1542 - DNA, 203 bp, Artificial sequence
  synthetic
ggcgcgccagtcctcagctgtctctcccctgtccccacatgtcttctaagctgttggagccggccggcgctcacttgtcttcaggaagctcggagcctttggtggagccggggagaggaagggtgggtgcaagagtgaaaggcgagaggggactgcaagcatccgggtcggctcctggccggagcaagcgactcggaccgatg

SEQ ID NO: 1543 - DNA, 203 bp, Artificial sequence
  synthetic
ggcgcgccagtcctccgccatctccccgtaggtgaataccgcaagcctccgaatttggcgtggtgggcgactctcgtggaatgggcagctagacatcacaaccctacatttttaccctccatctctagattgaagtgttggggtgttgttttatcaaggaagctgattcatctgaaaactacattaagcgactcggaccgatg

SEQ ID NO: 1544 - DNA, 203 bp, Artificial sequence
  synthetic
ggcgcgccagtccttgcgccgcgccggccgctctagcaacccctggctgtcacgctttggtttccgggtcggttctggcaggtctgagcgctccgacttccagaggagcgctgtgcacgtggagaagagcggggactcggcgaccctgccctcccgaccctcatgttcgaagagcctgagtgggccgacgactcggaccgatg

SEQ ID NO: 1545 - DNA, 203 bp, Artificial sequence
  synthetic
ggcgcgccagtcctcgggaagtgggtggggctcgccttagctaggcaggaagtcggcgcgggcggcgcggacagtatctgtgggtacccggagcacggagatctcgccggctttacgttcacctcggtgtctgcagcaccctccgcttcctctcctaggcgacgagacccagtggctagaagttcacccgactcggaccgatg

SEQ ID NO: 1546 - DNA, 203 bp, Artificial sequence
  synthetic
ggcgcgccagtcctcgcctctacgcgcgcccgccgttcccgcgaggcccacctagagccgggcggcgcaggcgcagagtccccgggccaagatggctgcgcggtgctccacacgctggttgctggtggttgtggggaccccgcggctgccggctatatcgggtagaggggcccggccgcccagggaggcgactcggaccgatg

SEQ ID NO: 1547 - DNA, 203 bp, Artificial sequence
  synthetic
ggcgcgccagtcctggaggcggtgcggcgcggcgggtgcggttcagtcggtcggcggcggcagcggaggaggaggaggaggaggaggaggaggaggatgaggaggatgtgggccacgcaggggctggcggtggcgctggctctgagcgtgctgccgggcagccgggcgctgcggccgggcgactgcgacgactcggaccgatg

SEQ ID NO: 1548 - DNA, 203 bp, Artificial sequence
  synthetic
ggcgcgccagtcctctccttatttccccgcctccttccctcccccaccttcccctcctccggctttttcctcccaactcggggaggtccttcccggtggccgccctgacgaggtctgagcacctaggcggaggcggcgcaggctttttgtagtgaggtttgcgcctgcgcagcgcgcctgcctccgcccgactcggaccgatg

SEQ ID NO: 1549 - DNA, 203 bp, Artificial sequence
  synthetic
ggcgcgccagtcctgctccctcgccgccctgaaccggcggctagactgcgcatgcgtgtcagtggcgctagcggcggacccggctgggcagttccttccccagaaggagagattcctctgccatggagtcctacgatgtgatcgccaaccagcctgtcgtgatcgacaacggatccggtgtgattaaacgactcggaccgatg

SEQ ID NO: 1550 - DNA, 203 bp, Artificial sequence
  synthetic
ggcgcgccagtcctcgcaggcgccgccgccgccgcacttccgggtgccattgcaggatgcagaaagcctcagtgttgctcttcctggcctgggtctgcttcctcttctacgctggcattgccctcttcaccagtggcttcctgctcacccgtttggagctcaccaaccatagcagctgccaagagccccgactcggaccgatg

SEQ ID NO: 1551 - DNA, 203 bp, Artificial sequence
  synthetic
ggcgcgccagtcctctcccagcgttcgcaaaggagggaggagccggaaactcagggcgcgaggcctgtgggcccagcggtgaggcagcagctgggggcggggggagggcggacctagcttcccagggcaggtgattcgtcggccccggtggcggcggcgcgtgcgacggtcacctcggtttggggaagcgactcggaccgatg

SEQ ID NO: 1552 - DNA, 203 bp, Artificial sequence
  synthetic
ggcgcgccagtcctaaggaacaaagcaccctccccactgggctcctggttgcagagctccaagtcctcacacagatacgcctgtttgagaagcagcgggcaagaaagacgcaagcccagaggccctgccatttctgtgggctcaggtccctactggctcaggcccctgcctccctcggcaaggccacacgactcggaccgatg

SEQ ID NO: 1553 - DNA, 203 bp, Artificial sequence
  synthetic
ggcgcgccagtcctaaaggcgaaagcgaaagcaggaagtacagacgtgaagcctagcagaggactttttagctgctcactggccccgcttgtctggccgactcatccgcccgcgacccctaatcccctctgcctgccccaagatgctgaagccagccctggagccccgagggggcttctccttcgagacgactcggaccgatg

SEQ ID NO: 1554 - DNA, 203 bp, Artificial sequence
  synthetic
ggcgcgccagtcctggatttgggcgggaagcggagccccgccagcgcccgccctggcagctgcgggctccgcgccgaccctccggcttcccctctcccccctcggccccgtcaggtggacgcggatctgtcaacatgggtaaaggagaccccaacaagccgcggggcaaaatgtcctcgtacgccttccgactcggaccgatg

SEQ ID NO: 1555 - DNA, 203 bp, Artificial sequence
  synthetic
ggcgcgccagtccttctgcaactggacttctgctgtgagcacagactatattctggcctatgtcttgactccgtattcctgggaaagtgctcgactgagaccttgggagtcttgggaagtccaatgggtagggtagccgaatctgagggctgatccctgagggcactgggcagtaattggggcatgggcgactcggaccgatg

SEQ ID NO: 1556 - DNA, 203 bp, Artificial sequence
  synthetic
ggcgcgccagtccttcccttgacgaccctcctctctgggccccgcccctcccgcttcggggtcaagccccagagagcgccgcgaaaaccacatttcccagagtgcaccgcgacggcaggggtcctcagaccggcgctcgctcgccggcgccatccctatagagaagaacggaggtacggcctgtggtccgactcggaccgatg

SEQ ID NO: 1557 - DNA, 203 bp, Artificial sequence
  synthetic
ggcgcgccagtcctggctgggctgctctgtgatggcttccgggaggagggaggtggcctgctgtaggaaaatgctgggtggaagaagggagagaaggctggagaggtaggaaggaactgaagtatctgaagtgacaaggtgggtgtctggactcgtcgggtccccttccatctccctgctgcctccaccgactcggaccgatg

SEQ ID NO: 1558 - DNA, 203 bp, Artificial sequence
  synthetic
ggcgcgccagtcctgggaggctcaggagggcgagagtcatgacacggaggaactggaggggcaaaagctgaggggccccgaggagggactgagttgaatggccttaggggagagattcttcagaggaggcccctccagccactcagaacttcatcattccaaaaaaggagatccacacagttccagaccgactcggaccgatg

SEQ ID NO: 1559 - DNA, 203 bp, Artificial sequence
  synthetic
ggcgcgccagtcctcacagccatcttgggatctgggcaagtgagcgagctccttcctcaccgggctgactagcctctcctttccctgtccccctccatcgctgctctgcaggaagccagcccccagggccagtcccggaggggctgatccgcatctacagcatgaggttctgcccctattctcacaggcgactcggaccgatg

SEQ ID NO: 1560 - DNA, 203 bp, Artificial sequence
  synthetic
ggcgcgccagtcctgttccggcgccggctttggcggaggggtgggacttgcaccggcgtctcttcttctaactgcagtttgtggcagcgccattttgaatgtgcagctgcagcgggcgcctgtatccggtgtccgaggcgaactcagtaagatgatgttaagaggaaacctgaagcaagtgcgcattgcgactcggaccgatg

SEQ ID NO: 1561 - DNA, 203 bp, Artificial sequence
  synthetic
ggcgcgccagtcctcagcatgttcgagctcattcctctccagcttctctgcagttgggagctgtttctcctgggacactgacccccactggagtagtctctggcccagcagctacacccacagctcagcatcttcgacagtcttcttttgagatacctgatgatgtacctctgccagcaggttgggagcgactcggaccgatg

SEQ ID NO: 1562 - DNA, 203 bp, Artificial sequence
  synthetic
ggcgcgccagtcctatgtaaatccttgtttttcctggtgaggcaggggaggccatagccacaatgcttaactgcatgcatctaacatggggctggttttaaccccagcgctctgacctaaactgctcagctcccggaaattccaagggacctggtggccttagtctttcaggtggaacggtgtgcgaccgactcggaccgatg

SEQ ID NO: 1563 - DNA, 203 bp, Artificial sequence
  synthetic
ggcgcgccagtcctaaacgtcaggtatcttttaaatcgcgatagttttcgctgtgtcaggctttcttcggtggagctccgagggtagctaggttctaggtttgaaacagatgcagaatccaaaggcagcgcaaaaaacagccaccgattttgctatgtctctgagctgcgagataatcagacagctaacgactcggaccgatg

SEQ ID NO: 1564 - DNA, 203 bp, Artificial sequence
  synthetic
ggcgcgccagtcctcctttccagtcacccttggtgccctgtacttcactgtggtcctgaactgaagagctgtgtttttcaggaagacttggccaggccgtgttccgtgtctctggattcaagtcccaggagtcctgaccagagagcaggcatcagtgtttttctgaccgaagttctcatttcctgacacgactcggaccgatg

SEQ ID NO: 1565 - DNA, 203 bp, Artificial sequence
  synthetic
ggcgcgccagtccttttggctacgctgcagccgcggtgtcggcgagtcctcccgggttgcccccgcgggcgtcagagggagggcgggcgcccgcgtggtgacggcgacgcctgcagcccaaggagcgctccactcgctgccgccggaggggccggtgacctcttggctaccccgcgtcggaggcttagcgactcggaccgatg

SEQ ID NO: 1566 - DNA, 203 bp, Artificial sequence
  synthetic
ggcgcgccagtcctacatacacatacacatgcacacacacactcatatacacatgcagaagctgtgacacgtgcggaagctgtggtaagtgcatcctccttcagtctcagttctgaaaatagatcatcatggtggcaccaaagagtcacacagatgactgggctcctgggcctttctccagtaagccacgactcggaccgatg

SEQ ID NO: 1567 - DNA, 203 bp, Artificial sequence
  synthetic
ggcgcgccagtcctctgcgtggaacgattctgtggcgagtgccggccgaaagctaggtccggattgcacgtggagggccgcccgaagggcactctcggacattaacccgcattctggtgggtctagaggaaattgggggacgaagagtggcagcactgacctggtctgggacgtggggagaaggtacccgactcggaccgatg

SEQ ID NO: 1568 - DNA, 203 bp, Artificial sequence
  synthetic
ggcgcgccagtcctctccggacgggcgacggtagctcgagacccgggactccgcccgcctccccgcgagtatttgaggtccggggcggctccggcgcctctgcccgccgttctgctcgctcgctccccgctctggagtacgtgtctggcttgggagccgctcggacacgctggcttgggtctgccatccgactcggaccgatg

SEQ ID NO: 1569 - DNA, 203 bp, Artificial sequence
  synthetic
ggcgcgccagtcctggagctggagtccggctgggccgcagccgctgggagaccggcggttgccgtggggaccggtcgggcccctccctcctccggtcccccgccccaggtccttccccaccgagacgcgccgggggaccgcgggcgagtgcagccggtgacccggcgagaggcggcgccgctcccaagcgactcggaccgatg

SEQ ID NO: 1570 - DNA, 203 bp, Artificial sequence
  synthetic
ggcgcgccagtcctccattggctgctcgttccgccgcaagttgggggcggggttagggcgcctttcgattgcatcagctggtccagccgaggccaagtcccgggcgctagcccacctcccacccgcctcttggctcctctcctctaggccgtcgctttcgggttctctcatcgcttcgtcgttcgccacgactcggaccgatg

SEQ ID NO: 1571 - DNA, 203 bp, Artificial sequence
  synthetic
ggcgcgccagtcctaggtggacatttccatttgaattaaaagtcctttaggctgggcgtggtgcatggctgtaatctcagcaccttgggaggctgaggcaggaagatcacttgaggccaggcgttggagagcagcctgggcaaggtggcaagaaccttgtctctacaaaaaaaaaagcgtctgccatccgactcggaccgatg

SEQ ID NO: 1572 - DNA, 203 bp, Artificial sequence
  synthetic
ggcgcgccagtcctggagttcggggaggcacagggtagatggaacgcagctgagaggtctgacaagatgtaccaggtcccactaccactggatcgggatgggaccctggtacggctccgcttcaccatggtggccctggtcacggtctgctgtccacttgtcgccttcctcttctgcatcctctggtccgactcggaccgatg

SEQ ID NO: 1573 - DNA, 203 bp, Artificial sequence
  synthetic
ggcgcgccagtccttgccagagggcggggccgcaggagggcggggcgcgagcgagagctgggagaaggcagtgagcgagcaggcggcaggcagggtccgtgcggagcaggcgagcgagcgggaagacgcagccaccttcctcaccagccagcccacagcggtttgttccccttctcgggagtgcgccacgactcggaccgatg

SEQ ID NO: 1574 - DNA, 203 bp, Artificial sequence
  synthetic
ggcgcgccagtcctatgattgttccacataaagtcagaagggaggaaaggcgcacgcgcattggggacttgactctggaaagcgtccagaccaaggtcagcggagagtaggccgtcgctttcgggttctctcatcgcttcgtcgttcgccaatgtttgaggagaaggccagcagtccttcagggaagacgactcggaccgatg

SEQ ID NO: 1575 - DNA, 203 bp, Artificial sequence
  synthetic
ggcgcgccagtcctgcttggccccccccacagctggcgtccctcggccatgccccaggggacccagccagggggtgggctctagagcgagtggggtggagaggagaaaggacggggccttgggcgcctctgagatgctcccaagtgccagggagggccgagcgaggcgcaggcaaccgggcagcaggccgactcggaccgatg

SEQ ID NO: 1576 - DNA, 203 bp, Artificial sequence
  synthetic
ggcgcgccagtcctcggaagaacttccttgattagcatagtatcgaccctggggccgcgctgcgaggcggaggttcggtcccagctggggtgaagtgtgcagaccggttgcgattgtggtcagacgcagcacctacttctaatctgaggacccgcgatttacacttttgctgaataggacactgtggacgactcggaccgatg

SEQ ID NO: 1577 - DNA, 203 bp, Artificial sequence
  synthetic
ggcgcgccagtcctctctcctgaacaaaggcgggaacagctctaggccagagtttctgggatgtgcctcaccgggtctcactgcctgcaaaggtagatggaacgcagctgagaggtctgacaagatgtaccaggtcccactaccactggatcgggatgggaccctggtacggctccgcttcaccatggcgactcggaccgatg

SEQ ID NO: 1578 - DNA, 203 bp, Artificial sequence
  synthetic
ggcgcgccagtcctccctgctaacaaagggagccacttccttcctctctgcacataccccatgtctcaccacgatgatggagctacagtgggacttggaatccagatgtgtgaaggatggagggttgaagccgcactcagcttcctgccccaccagaggaagtggggagagacggcaggtgcagtgatcgactcggaccgatg

SEQ ID NO: 1579 - DNA, 203 bp, Artificial sequence
  synthetic
ggcgcgccagtcctttgagcgtctccacccagtaagtgggcaagaggcggcaggaagtgggtacgcaggggcgcaaggcgcacagcctctagacgactcgctttccctccggccaacctctgaagccgcgtcctactttgacagctgcagggccgcggcctggtcttctgtgcttcaccatctacatacgactcggaccgatg

SEQ ID NO: 1580 - DNA, 203 bp, Artificial sequence
  synthetic
ggcgcgccagtcctggagatatccgccgggggagaatagggttgcaccatcccagaagctgctgttagctcgccggtcctcggcacgccgcccgttcgcccctgcgctgtccgcccttcccctagcgttacttccggtccctcgctgagggggttcgtgcggctcccaggaggcgtgaaccgcggacccgactcggaccgatg

SEQ ID NO: 1581 - DNA, 203 bp, Artificial sequence
  synthetic
ggcgcgccagtcctcgggcgagcggagttagcagggctttactgcagagcgcgccgggcactccagcgaccgtggggatcagcgtaggtgagctgtggccttttgcgaggtgctgcagccatagctacgtgcgttcgctacgaggattgagcgtctccacccatcttctgtgcttcaccatctacatacgactcggaccgatg

SEQ ID NO: 1582 - DNA, 203 bp, Artificial sequence
  synthetic
ggcgcgccagtcctccgtctaccaggccccgtcccctcccccggctcctgtcggtcagcactgaaaccccgtccctgctccaggcctccttctctggggtccaaggtcccatacaggcctctgcctcggccgcaggcccttcagtcaccgtcgcctcgtctccctgactgtccgcaggcctgggcagccgactcggaccgatg

SEQ ID NO: 1583 - DNA, 203 bp, Artificial sequence
  synthetic
ggcgcgccagtcctgacgcgcggggccacactgcccgccccctagcctggcgctgggcctccgggacaagttggctgggtccgggcttggggactgcaacgcggtcttctgtgcttcaccatctacataatgaatcccagtatgaagcagaaacaagaagaaatcaaagagaatataaagaatagttccgactcggaccgatg

SEQ ID NO: 1584 - DNA, 203 bp, Artificial sequence
  synthetic
ggcgcgccagtcctggtttcattgtgttggccaggctggtctcgaactcctgacctcgtgatccgcccgccttggcctcccaaagtgctaggattacaagtgtgagccaccgcgtccggcctttcaaatggtatttttgattttcctcttccagtccttaaagcagctgatttagaagaatacaaatccgactcggaccgatg

SEQ ID NO: 1585 - DNA, 203 bp, Artificial sequence
  synthetic
ggcgcgccagtcctcgctgacgtcatcgtgcgtcagagtgagcccggatggggcggcgggcttcgggagcgcccgggctgatccgagccgagcgggccgtatctccttgtcggcgccgctgattcccggctctgcggaggcctctaggcagccgcgcagcttccgtgtttgctgcgcccgcactgcgacgactcggaccgatg

SEQ ID NO: 1586 - DNA, 203 bp, Artificial sequence
  synthetic
ggcgcgccagtcctcggcgcccccgccttctccggtcccctcctcggagtcattttttcctgttccccctctgccgccctttcctcacgccccgggtgaggcaattctcttggaagcgaaggtgtcggctatgagccggagcctccttccttgaatttctccgtggaggacccgccgcgccccccggccgactcggaccgatg

SEQ ID NO: 1587 - DNA, 203 bp, Artificial sequence
  synthetic
ggcgcgccagtcctagagggaccgagggccggaagtgacgccagctggcccgcttgaggcgtagggggtggcgctctccgttcggcggcgctcccatggcgcacattaccattaaccagtacctgcagcaggtgtacgaagccatcgacagcagagatggagcatcttgtgcagagttggtgtcttttcgactcggaccgatg

SEQ ID NO: 1588 - DNA, 203 bp, Artificial sequence
  synthetic
ggcgcgccagtcctcacttctgccgcccctgtttcaagggataagaaaccctgcgacaaaacctcctccttttccaagcggctgccgaagatggcggaggtgcaggtcctggtgcttgatggtcgaggccatctcctgggccgcctggcggccatcgtggctaaacaggtactgctgggccggaaggtcgactcggaccgatg

SEQ ID NO: 1589 - DNA, 203 bp, Artificial sequence
  synthetic
ggcgcgccagtcctgtgtgaggggaacctgggagggcctcatgggggtccgagcttcgttcgagaacaactgtgagatcggctgctttgccaagctcaccaacacctactgtctggtagcgatcggaggctcagagaacttctacagtgtgttcgagggcgagctctccgataccatccccgtggtgccgactcggaccgatg

SEQ ID NO: 1590 - DNA, 203 bp, Artificial sequence
  synthetic
ggcgcgccagtcctcgcccctgtttcaagggataagaaaccctgcgacaaaacctcctccttttccaagcggctgccgaagatggcggaggtgcaggtcctggtgcttgatggtcgaggccatctcctgggccgcctggcggccatcgtggctaaacagtgaagtacctggctttcctccgcaagcggcgactcggaccgatg

SEQ ID NO: 1591 - DNA, 203 bp, Artificial sequence
  synthetic
ggcgcgccagtcctagcagcagcacccgcatccgctgcgggagtccgagccggaaccacacccaagtagctgccctttcctcttctgtcatctcaccgccccaccacagaccgcgttccccgaggaaaccggccgcccacgcccggagcatcctcccctgttgagcgggcgctgacggacccggcggccgactcggaccgatg

SEQ ID NO: 1592 - DNA, 203 bp, Artificial sequence
  synthetic
ggcgcgccagtcctagtagagtccagagcggggaagcgggcgcctgcgcagagacatagtgaccgtccgctcgccgccccgcctctgccaagccgcgccagcgcagtgaataacgagccagcagagacagcgtctgcgcagccgtggctgaggagcctgtggcggcagcggcgatggaaccagcggagcgactcggaccgatg

SEQ ID NO: 1593 - DNA, 203 bp, Artificial sequence
  synthetic
ggcgcgccagtcctccactcagagctgcagtagcctggaggttcagagagccgggctactctgagaagaagacaccaagtggattctgcttcccctgggacagcactgagcgagtgtggagagaggtacagccctcggcctacaagctctttagtcttgaaagcgccacaagcagcagctgctgagcccgactcggaccgatg

SEQ ID NO: 1594 - DNA, 203 bp, Artificial sequence
  synthetic
ggcgcgccagtcctgcgggaggccgcgcaggcgcagtgagtcagtgccggtcggtcttgtgggctgaggggcagcggcttaggctccggcgtctgcaggggtcgccgagctaacccgtggctaggcgagtggggcggggcggccggcaccatgtcgaggcaggcgaaccgtggcaccgagagcaagaacgactcggaccgatg

SEQ ID NO: 1595 - DNA, 203 bp, Artificial sequence
  synthetic
ggcgcgccagtcctcaaatccaggcctgcgggctcctcccccaggacccccactcgcagtccctcaagcctgtgctcccggaaaggcactgggcgaccgcacccgtggctttctctgggcgaccgggtcccagactccccccagcacagcagagcgcttccctgcccacccgcggaaaccgccccaggcgactcggaccgatg

SEQ ID NO: 1596 - DNA, 203 bp, Artificial sequence
  synthetic
ggcgcgccagtcctcctctgaggaggcgttgtaagtccgcccagctccccacttgctgtgctctcactcaatgcgaagggaaccaaggtaccagggccaagtgggtccagacatccacacggattctgaaagggcaggtcaagcagactttgtccagccatcagccacggcctctcgacagcaccaagcgactcggaccgatg

SEQ ID NO: 1597 - DNA, 203 bp, Artificial sequence
  synthetic
ggcgcgccagtcctgagggctggcggcttttctggcgcgggccagggggaggaggagaaaggagctcccgggatcccctcgccccctcccccaactgcccggtgcggctggtgatcgccgagaagggcctggtgtgcgaggagcgggacgtgagcctgccacagagcgagcacaaggagccctggttccgactcggaccgatg

SEQ ID NO: 1598 - DNA, 203 bp, Artificial sequence
  synthetic
ggcgcgccagtcctcaccatgccgccacattatctccattcctccagtgcccgcctgacactggccctgaatcagggctggagggggcaggcatttctcatttactaaagtgctggatgcagcccttgaggttcggcagaagcagaaagctgcgtcttgaaagcgccacaagcagcagctgctgagcccgactcggaccgatg

SEQ ID NO: 1599 - DNA, 203 bp, Artificial sequence
  synthetic
ggcgcgccagtcctttatctccattcctccagtgcccgcctgacactggccctgaatcagggctggagggggcaggcatttctcatttactaaagtgctggatgcagcccttgaggttcggcagaagcagaaagctgcggtgagtctggctgtgtcttgaaagcgccacaagcagcagctgctgagcccgactcggaccgatg

SEQ ID NO: 1600 - DNA, 203 bp, Artificial sequence
  synthetic
ggcgcgccagtcctgctgactgccactaccagccggagccagggcctggtcgagacaactatttttgaggtatctgaggctaccccacagcactctctggcattggcaagactcgtggctgtgacccatgggcctctgaggaggcgttgtaagtccgcccagctccccacttgctgtgctctcactcacgactcggaccgatg

SEQ ID NO: 1601 - DNA, 203 bp, Artificial sequence
  synthetic
ggcgcgccagtccttctttttgtttgcacccgcctccgacccggaactgctttcttgggaagatggcggctgtgtcggtgtatgctccaccagttggaggcttctcttttgataactgccgcaggaatgccgtcttggaagccgattttgcaaagaggggatacaagcttccaaaggtccggaaaactcgactcggaccgatg

SEQ ID NO: 1602 - DNA, 203 bp, Artificial sequence
  synthetic
ggcgcgccagtcctagcacctaccagggtcgagctcacacacgtgcctacgacccgccgcggcgcctgcgcggtagcatcgcggagtcggtgctttagtacgccgctggcacctttactctcgccggccgcgcgaacccgtttgagctcggtatcctagtgcacacgccttgcaagcgacggcgccatcgactcggaccgatg

SEQ ID NO: 1603 - DNA, 203 bp, Artificial sequence
  synthetic
ggcgcgccagtcctgagcccggcctcaggccccgggccgcggagggtgcagcgccgggcctggcctcccgataaagaacaggaaaaagagaaaaaatcagtgagacggcgtcttgctgtgttgcccaggctggcctccaactcctgggctcaagtgatcctctggcatcagcctcctgagtagctgtgcgactcggaccgatg

SEQ ID NO: 1604 - DNA, 203 bp, Artificial sequence
  synthetic
ggcgcgccagtcctatcggcttccgtaggaaggcgccggccgtggaggcgccacgtcccttgcggcggcgggagagaaatcgcttggacttcggggcggcctcggacggccatggcctttaccctgtactcactgctgcaggcagccctgctctgcgtcaacgccatcgcagtgctgcacgaggagcgcgactcggaccgatg

SEQ ID NO: 1605 - DNA, 203 bp, Artificial sequence
  synthetic
ggcgcgccagtcctggcagagctggagctggagtaatgtgggtgggggcggcttgggaagaggctgagcccggccaagggagcagagggctgggactggctgggggttgggaggggaggaacgaagcaggaaggctgtcggatcgggggcccagggtgtccgagtgaactgggtgattcagagacacgcgactcggaccgatg

SEQ ID NO: 1606 - DNA, 203 bp, Artificial sequence
  synthetic
ggcgcgccagtcctacgcagagagaaagttacgaggttcgtggccgcggtttccccaggcagctggcgctggaggcttcggcgtcacgtgctgaaactcgttttcatcttcttggtttcatcttaataccaacgtcatgtctggttctaatggttccaaagaaaattctcacaataaggctcggacgtcgactcggaccgatg

SEQ ID NO: 1607 - DNA, 203 bp, Artificial sequence
  synthetic
ggcgcgccagtcctgagttcagtgcggctgcgcagtagcgggggtgggcgggagcgcccttccaggagatgggttggctgcagtagtgagaggctgggggtgcggctctttccctgcagtcctgccgaggaagcgtgcgtccctggcgcttccttcttctcttccggcggagagcttgggatgtggtacgactcggaccgatg

SEQ ID NO: 1608 - DNA, 203 bp, Artificial sequence
  synthetic
ggcgcgccagtcctcctacggtaggatggggaaacctcacagaccacattgtcacccggcctcagctctccgccccggcgctcagagggtaactctcacccacctcgtccgcttctctgaaccagagtgacccaggctgcgctccgccccgctctcctaccccgagttggcacggaggcccggcagcccgactcggaccgatg

SEQ ID NO: 1609 - DNA, 203 bp, Artificial sequence
  synthetic
ggcgcgccagtcctagcggaagtcacttctcacacgcctttcttattggataccggcttttcatggggccgagcgccgctgggtaggcggaagtagccgcaggcatggcggcggctatgccgcttgctctgctcgtcctgttgctcctggggcccggcggctggtgccttgcagaacccccacgcgaccgactcggaccgatg

SEQ ID NO: 1610 - DNA, 203 bp, Artificial sequence
  synthetic
ggcgcgccagtcctggaccagagttcagtgcggctgcgcagtagcgggggtgggcgggagcgcccttccaggagatgggttggctgcagtagtgagaggctgggggtgcggctctttccctgcagtcctgccgaggaagcgtgcgtccctggcgcttccttcttctcttccggcggagaggacctaatcgactcggaccgatg

SEQ ID NO: 1611 - DNA, 203 bp, Artificial sequence
  synthetic
ggcgcgccagtcctgcgggtttccgggtgggaggggccgggaatcggggccgtgaagggaagccctcgagggccggccgggagcccggaaaccgaggtcccccttcggccagttttaatccccccgccctcccctctgccccaggcccggcagccatggcggtggaaggaggaatgaaatgtgtgaagcgactcggaccgatg

SEQ ID NO: 1612 - DNA, 203 bp, Artificial sequence
  synthetic
ggcgcgccagtcctcgccgaccgagcctgctgctttcttgctactgcttcggcttcccggctaccccccggacggtgaaggcggcccagctgtggatggtcagatagcccttgtctcccgccgccaatctctggcccctagcagcacggagcagacggcggcagcagcagcagcaggcgaggaggaagcgactcggaccgatg

SEQ ID NO: 1613 - DNA, 203 bp, Artificial sequence
  synthetic
ggcgcgccagtcctgccggtggctggctgcgcacgcgcgccgcctcatttccggtgctctctctcgctgggtcgctcgggtcggcttcggtcgctaccgctcccgctctgccacccccgccaaccgccgctcgggcctccgtcgctgccgcgtcgctttctcgctccttggatcgcacatcctcccagcgactcggaccgatg

SEQ ID NO: 1614 - DNA, 203 bp, Artificial sequence
  synthetic
ggcgcgccagtcctgccgtcgcggagccgcgcagccctcggagcacgaatatatacagccctgctctgggacacacctccattggatttaaaagacagtcctcgtcagcactgactttcagctatggaatcgacggttgatgatgaagcgccggccgtgtaaatgaagatcgggtgaggagcaggacgcgactcggaccgatg

SEQ ID NO: 1615 - DNA, 203 bp, Artificial sequence
  synthetic
ggcgcgccagtcctgcagtgggactgattgccgtgggtgtcggggcacagcttgtcctgagtcagaccataatccagggggctacccctggctctctgttgccagtggtcatcatcgcagtgggtgtcttcctcttcctggtggcttttgtgggctgctgcggggcctgcaaggagaactattgtcttcgactcggaccgatg

SEQ ID NO: 1616 - DNA, 203 bp, Artificial sequence
  synthetic
ggcgcgccagtcctctgcaccaatagctgaggcgttcagggttgtccagggacgctaccctcacgtgtctggttccgagtgctgcgttcggctgtgctgggaagttgcgtagacagtggcctcgagaccctgcctgcctgaggaggcctcggttggatgcgaaggagctgcagcatccaggggacaagcgactcggaccgatg

SEQ ID NO: 1617 - DNA, 203 bp, Artificial sequence
  synthetic
ggcgcgccagtcctcaggcgggacgggctctcccttgggtgcttagccccgcccccgtcccactctgccctgttgctgtcgcgccgctgctggttgctgtccctggacccctaccatggaggagaccatcaaagatccccccacatcagctgtcttgctggatcactgtcatttctctcaggtcatctcgactcggaccgatg

SEQ ID NO: 1618 - DNA, 203 bp, Artificial sequence
  synthetic
ggcgcgccagtccttgccagtcccactgcctgcgcgcccacctgggccagtctccgcttgccgcgtcctcccatcccctagtctgcaggcctggtgcccttgaattcacccgcttctgttgcgttggggaccgcgagctgcactgcttcctgcccaagcccaagctcctcgcagcagtaggggacaagcgactcggaccgatg

SEQ ID NO: 1619 - DNA, 203 bp, Artificial sequence
  synthetic
ggcgcgccagtcctgctcagaggagcagggctgggagcgaggtgctgctggggcagtgtctgggcgggaagccgggccccagggcctgatgtgcctgtgggggcactccacagcccctgcccacaccctctcctccccgcctctgctgttctgctccctgccctgtgccctccacttgcagccagggacgactcggaccgatg

SEQ ID NO: 1620 - DNA, 203 bp, Artificial sequence
  synthetic
ggcgcgccagtcctactccactagggcacgcaggcgacgagcacactggcagagggcctcccgcagggcccactccccacctggctctcgccccaccatggcccgggaagcaggccaggtttgtgccaggcctgccgtgcccagggggaggaagggctctgtgttctttgcctgtgtctctgtggtgacgactcggaccgatg

SEQ ID NO: 1621 - DNA, 203 bp, Artificial sequence
  synthetic
ggcgcgccagtcctcccgggtccgcaaagccggtggcgcccggaggctgcacggagagcggtgcccgcgtcagagcctcgccctgtcaccaggctggagtacagtggcgcgatctcggctcactgcaacttccacctgctgggttcaagcaattcttctgacctcagtgaccgaaggaagagaccaagcgactcggaccgatg

SEQ ID NO: 1622 - DNA, 203 bp, Artificial sequence
  synthetic
ggcgcgccagtcctaaaaatacaaggaaccttgacccgctggtgtacctgttgtcaaagctcacggaagacaaagagactctgcagtacttacaacagaatgcaaaagaaagagctgagcttgcagccgctgctgtgggcagcagtaccaccagcatcaacgtccctgccgcggcctccaagatctcccgactcggaccgatg

SEQ ID NO: 1623 - DNA, 203 bp, Artificial sequence
  synthetic
ggcgcgccagtcctctggctcgcagtgcctgccgggagccacgtctccgaagaccgatagctgcttcgggattggcgtccgggcggctatctaggggctgctgggaagatggcggactcggtggctagccgatgaggaggccgcggggggaacccggcccccgggccccgagaccgactgagggagcgcgactcggaccgatg

SEQ ID NO: 1624 - DNA, 203 bp, Artificial sequence
  synthetic
ggcgcgccagtcctgagaggcgcatctgcgcaggcgcccggctcctaagtctacccaggaactgaccctgctctctcctttccctgttagacatgggcactccacagaaggatgttattatcaagtcagatgcaccggacactttgttattggagaaacatgcagattatatcgcatcctatggctcacgactcggaccgatg

SEQ ID NO: 1625 - DNA, 203 bp, Artificial sequence
  synthetic
ggcgcgccagtcctagatggcgtgcttgttggagaccccaatccgcatgagcgtcctttcgtttttttaaagaaaaagacgactttcacctttcactatgttgctcttgaaccaggaccaggaatgaaagttactgggagataacttcgaaggattttgcaacaaattcgagctgtccgactctgagacgactcggaccgatg

SEQ ID NO: 1626 - DNA, 203 bp, Artificial sequence
  synthetic
ggcgcgccagtcctcctttgccccggacccgccaccccagagtcaagctgagggcatcggcatgccgcagggaagacgatcaggactgtttttaatcgggcagtcgcgcggatggccttttccctctcgcctccttccgccccgcccccactctcagcccggccgcgctgattgtcctgggtcacatacgactcggaccgatg

SEQ ID NO: 1627 - DNA, 203 bp, Artificial sequence
  synthetic
ggcgcgccagtcctaagacgggagaaaaggaggggcgtacgcgggcaagatggaggcgactacggctggtgtgggccggctagaggaagaggcgttgcggcgaaaggaacggctgaaggccctacgggagaaaaccgggcgcaaggacaaggaagatggggagccaaagaccaagcatctcagagaagcgactcggaccgatg

SEQ ID NO: 1628 - DNA, 203 bp, Artificial sequence
  synthetic
ggcgcgccagtcctcccaggccgggtgaggcgttcccggaggtgtccagcagaggacgctgccggcggagacgggaccggaagccgggccgcaggcggccgggcgtattcgccgactcctcccgcttccgctgccgcagccggtcgtaaccaagttgtgtcctgtcagccgctgtccccttcgccgcgcgactcggaccgatg

SEQ ID NO: 1629 - DNA, 203 bp, Artificial sequence
  synthetic
ggcgcgccagtcctatcacaacttggttcaatgggtagcctcaccatgaaatcacagcttcagatcactgtatcgttacccctgtgagtaaattacattttcgtgtgtggagtcaccagacactgaaatctgatgttttgttgggaactgctgcattagatatttatgaaacattaaagtcaaacaatcgactcggaccgatg

SEQ ID NO: 1630 - DNA, 203 bp, Artificial sequence
  synthetic
ggcgcgccagtcctatggtaacgaggaggccagtcacaaatagctgggactggcttcctgccggggcggccccagaggctgtcccttgcagacacatgcccctttcacggctccctctcagggttggccagaaggaatttttttttccgctccccctcctggtccctcccatttcctggctcctcctgcgactcggaccgatg

SEQ ID NO: 1631 - DNA, 203 bp, Artificial sequence
  synthetic
ggcgcgccagtccttgacacctctcctactccttctctttaatgtacagctgagactgggatacccttagactgaaaggaaggacacggctatgtagaaaagaattgactgaaggggaggagtactcgtgaaccccttgcttcagcctcccaatgttctgagagaggaggagccaggcgcagtggctccgactcggaccgatg

SEQ ID NO: 1632 - DNA, 203 bp, Artificial sequence
  synthetic
ggcgcgccagtcctgcgtgtgtggctgcagcctgcaccgttgctgcccgctgcccaggacgcggggtgggggacaggagccagagtggtgcctcctacagaccaatctgcggccccaaggtggggggccctacagagatgctccgagagccaaggacatgaagaacaagctggggatcttcagacggccgactcggaccgatg

SEQ ID NO: 1633 - DNA, 203 bp, Artificial sequence
  synthetic
ggcgcgccagtccttctggaggcccttcctgagaagccgtcgccagagttacgtcgcggttttcttaactttagagcctgggggccggagaccctgattgcactcgacctggctctgccctactctctgcgtgacttccactgttcatcaaagaaaaagggttcttttggtcacccaccactggcccccgactcggaccgatg

SEQ ID NO: 1634 - DNA, 203 bp, Artificial sequence
  synthetic
ggcgcgccagtcctggccccgcggcccgcgcgctcctgggcgggggatgttgtgatggagaagccgcggcggagcccgaaccccgcagcctgagccacctccgtcatctgggcccggggcctcaccgcgcaggagctgccaaggccatgtctgttccatcatcactgagccagtcggccattaatgcccgactcggaccgatg

SEQ ID NO: 1635 - DNA, 203 bp, Artificial sequence
  synthetic
ggcgcgccagtcctagacgctctgccctggtgagaagggggcgggatgagcttttctctgcagcccagcaccaggctgtgagcccagctggctgggctggaggggctgtgaggagggagggtggaggcaggaggggccgggaatgagcgccatgttctcccaggactttttcctggccattatcctgccgactcggaccgatg

SEQ ID NO: 1636 - DNA, 203 bp, Artificial sequence
  synthetic
ggcgcgccagtcctggccccaggcagctggggtattccttaggggctgagtctcctggtatccctaagactgggcttggcttaggcactgaggactttttcctggccattatcctgcaggacagcagcgcagattccttctggaaccccaacgccttcgagacggattccgacctgccggctggatggcgactcggaccgatg

SEQ ID NO: 1637 - DNA, 203 bp, Artificial sequence
  synthetic
ggcgcgccagtcctggtctcagaatatctgggagacctcgggctcttgatctccgagacaccccgtttcgtagtggagaacagtccagatcggggaagtttattttgcccaaagccggttagaggccccctggccctcgattcccagtgcggggctcagagctcccctgaacagcagctgcagcagcccgactcggaccgatg

SEQ ID NO: 1638 - DNA, 203 bp, Artificial sequence
  synthetic
ggcgcgccagtcctacgctgaactttaggagccagtctaaggcctaggcgcagacgcactgagcctaagcagccggtgatggcggcagcggctgtggtggctgcggcgggtccgggcccatgaggcgacgaaggaggcgggacggcttttacccagccccggacttccgagacagggaagctgaggaccgactcggaccgatg

SEQ ID NO: 1639 - DNA, 203 bp, Artificial sequence
  synthetic
ggcgcgccagtcctccacgcgcctgccaagccaatcggctaggagcagcgagcggcgcggctgaggcgcggcggccccgtggagcagcgcagtatggcgggcggggcccgggaggtgctcacactgcagttgggacattttgccggtttcgtgggcgcgcactggtggaaccagcaggatgctgcgctcgactcggaccgatg

SEQ ID NO: 1640 - DNA, 203 bp, Artificial sequence
  synthetic
ggcgcgccagtcctagcacccaaacttaccctgtccaggtggcccacgaagctacccaagacatctctgcacagccctagcctttttggcttcacccactccgttcgggagttggggacccggcctctacattccttaggggaactccagctccaggtctgagagtcactggagctaccagaagcatccgactcggaccgatg

SEQ ID NO: 1641 - DNA, 203 bp, Artificial sequence
  synthetic
ggcgcgccagtcctaactacagctcccagcatgccccggggcccgcaaccgtccgccgcccggtgcactgtggacgatgagtcagggttaggggcgccaggacgtgggcgtgcaggacgccagagctgggtcagagctcgagccagcggcgcccggagagattcggagatgcaggcggctcggatggccgactcggaccgatg

SEQ ID NO: 1642 - DNA, 203 bp, Artificial sequence
  synthetic
ggcgcgccagtcctgcatggtaagcaacaggacatatcccagcctcggacatgtctgtatgatccaaggtacccaaagtcagacagagtaaactcaagcctggcactggctttctgccgcttcatgtgctttggaaaaagcaggagaagcaatagcagcaggagtccccagcagctggagccgcaagacgactcggaccgatg

SEQ ID NO: 1643 - DNA, 203 bp, Artificial sequence
  synthetic
ggcgcgccagtcctgtcactatacagagacagtccatgttggggggcctggccgcggcggcgggaacccggataatgggaaaggagatagaagcagaagcacagaggcccctgaggcaaacatggagacctggccagccaccagcgatgacagcaaagacgatgagctcgcggctcacggcgctcctgcgactcggaccgatg

SEQ ID NO: 1644 - DNA, 203 bp, Artificial sequence
  synthetic
ggcgcgccagtcctcagccgccgccggcgccgaacttgggctcgggaagccgggggaccgcgtcctgcgccggagcaggggcatggtctagtggcccagtcaggacgcggaaacactccctggaggttctgacccactccctctcagcctccgcctggtctctggtgtagtcgccgccgccagccgcccgactcggaccgatg

SEQ ID NO: 1645 - DNA, 203 bp, Artificial sequence
  synthetic
ggcgcgccagtcctagaaggaggaaccttttccttctgcagcccctccccaccagcctcattccttagctggggtcagacctggggtcctcactgcagctggcctctggcagcgttctcaggctagccctccctgctgaaaagagaaccgtgtgggactcacaggtgtagtcgccgccgccagccgcccgactcggaccgatg

SEQ ID NO: 1646 - DNA, 203 bp, Artificial sequence
  synthetic
ggcgcgccagtcctgacataaaaaccgggtgccggcaggcgccagtcgcaggtgtgctgctgaggcgtgagaatggcgtcccgcggccggcgtccggagcatggcggacccccagagctgttttatgacgagacagaagcccggaaatacgttcgcaactcacggatgattgatatccagaccaggatcgactcggaccgatg

SEQ ID NO: 1647 - DNA, 203 bp, Artificial sequence
  synthetic
ggcgcgccagtccttatgctgtgttcggggctgtctgtcggcgccacagggaatgggggctggggcatggtctagtggcccagtcaggacgcggaaacactccctggaggttctgacccactccctctcagcctccgcctggtctctggtgtagtcgccgccgccagccgccatgggcaaacagaacacgactcggaccgatg

SEQ ID NO: 1648 - DNA, 203 bp, Artificial sequence
  synthetic
ggcgcgccagtcctggggtcccccccgcaggtactccactctcagtctgcaaaagtgtacgcccgcagagccgccccaggtgcctgggtgttgtgtgattgacgcggggaaggaggggtcagccgatccctccccaaccctccatcccatccctgaggattgggctggtacccgcgtctctcggacagcgactcggaccgatg

SEQ ID NO: 1649 - DNA, 203 bp, Artificial sequence
  synthetic
ggcgcgccagtcctccactgcgccagcgctgagcctgccagggctggggctggggatcaccttgggatgatggtgtcagtcccagggggcaggagatcgagtgtcctctgagctggcgactgggcctgtagaagggaaccggcatttgtggagtgtctactgagtgccaagcacgtggtgaggtgtgtcgactcggaccgatg

SEQ ID NO: 1650 - DNA, 203 bp, Artificial sequence
  synthetic
ggcgcgccagtcctgtcaactacagctgttctccttcttttcccagtatcctttgggtgcagtgagacaccaggagagctgctgctttgggggatggacaggggcagcaggaatgcctttgtgttttcgcagtgaacctccttggcctgggcgaagctgtgtggaccaagcaagtcaggagtgtggcccgactcggaccgatg

SEQ ID NO: 1651 - DNA, 203 bp, Artificial sequence
  synthetic
ggcgcgccagtcctagcggcctttctctgttcgcgatgtgacgtaacgcgcctgcggactgggcccagcttgtcctctatgacttacccagaaggcaacgcttctctttctggtcaaaatggctggtaagcaggccgtttcagcatcaggcaagtggctggatggtattcgaaaatggtattacaatgcgactcggaccgatg

SEQ ID NO: 1652 - DNA, 203 bp, Artificial sequence
  synthetic
ggcgcgccagtcctcaactcgggaatccccggtgactttgtcgcagcctccgttaccctgtgatctgcaagtcctgggagacgcacagctaagatgcccggacatcctggaagctgggaaatggtattgctgtctctaagccagacctgatcacctgtctggagcaagaaaaagagccttgggagcctcgactcggaccgatg

SEQ ID NO: 1653 - DNA, 203 bp, Artificial sequence
  synthetic
ggcgcgccagtcctggcttccgggatgtggcggggcctttgtctctggctgcagttggagctctgcgtctcgtcttcgttcttctgtgtcctctgctgctagaggtccagcctctgtggctctgtgacctgcgggtattgggggatccacagctaagacgccaggaccccccggaagcctagaaatggcgactcggaccgatg

SEQ ID NO: 1654 - DNA, 203 bp, Artificial sequence
  synthetic
ggcgcgccagtccttttgtctccagctcccgctagaccttgggacccgcctctgcttttccgcgttctccaactcgggaatccccggtgactttgtcgcagcctccgttaccctgtgatctgcaagtcctgggagacgcacagctaagatgcccggacatcctggaagctgggaaatgggaccattgacgactcggaccgatg

SEQ ID NO: 1655 - DNA, 203 bp, Artificial sequence
  synthetic
ggcgcgccagtcctcgagccaggggcggtgcaagccccgcccggccctacccagggcggctcctccctccgcagcgccgagacttttagtttcgctttcgctaaaggggccccagacccttgctgcggagcgacggagagagactgtgccagtcccagccgccctaccgccgtgggaacgatgctgtacgactcggaccgatg

SEQ ID NO: 1656 - DNA, 203 bp, Artificial sequence
  synthetic
ggcgcgccagtcctttcttctgtgtcctctgctgctagaggtccagcctctgtggctctgtgacctgcgggtattgggggatccacagctaagacgccaggaccccccggaagcctagaaatggtattgctgtctctaagccagacctgatcacctgtctggagcaagaaaaagagccttgggagcctcgactcggaccgatg

SEQ ID NO: 1657 - DNA, 203 bp, Artificial sequence
  synthetic
ggcgcgccagtcctacccagcctccctccacccccagaaaattgcttccatggaaatgcctctctaaaacatgaacttttcctagagactacgccagtctctcttcccacttgctgaccctttgctacctatgtgcccggttttactctcatttgggtaaggtcgaggctggctctggaagcagcacccgactcggaccgatg

SEQ ID NO: 1658 - DNA, 203 bp, Artificial sequence
  synthetic
ggcgcgccagtccttcccccgccccaggtccttccccaccgagacgcgccgggggaccgcgggcgagtgcagccggtgacccggcgagaggcggcgccgctcccaagatgtcgcagacggccatgtccgaaacctagggtccgtgacgagaagttattaccgaggcgcggccggggctctcctcgtctcgactcggaccgatg

SEQ ID NO: 1659 - DNA, 203 bp, Artificial sequence
  synthetic
ggcgcgccagtcctcgtcccgggaccgcagactcttagggcccctctctttggccatctgcctctaggtcccatcctggggcctgaagcgcttgttctctgcgctgggaaaaggggaacgatggagcgatccagcacccaaacttaccctgtccaggtctgagagtcactggagctaccagaagcatccgactcggaccgatg

SEQ ID NO: 1660 - DNA, 203 bp, Artificial sequence
  synthetic
ggcgcgccagtccttcccttgcttgttctcactctgtgcccccggcaacgaccccgcgcgcctacactcccgtgccgcctcagctactagtccgcaacttctagccccaaaacgctggagctcagaacccagctcaggcaagactaactcggtgttgctcctcccggcgctgacttcgaggcccggctcgactcggaccgatg

SEQ ID NO: 1661 - DNA, 203 bp, Artificial sequence
  synthetic
ggcgcgccagtcctgagtttttattattacagagaagaaggaaactcacttcctgtcgtcgcagagcacagcctagttctgatgcagaggggactgttttcagatggagacactagtaagaagaagaaaaatgtcaccatgcgatccatcaagaccacccgggaccgagtgcctacatatcagtacaacgactcggaccgatg

SEQ ID NO: 1662 - DNA, 203 bp, Artificial sequence
  synthetic
ggcgcgccagtcctcctcgcggctcgcggcggccgacggttcctgggacacctgcttgcttggcccgtccggcggctcagggcttctctgctgcgctcccggttcgctggacgggaagaagggctgggccgtcccgtcccgtccccatcggaaccccaagtcgcgccgctgacccgtcgcagggcgagcgactcggaccgatg

SEQ ID NO: 1663 - DNA, 203 bp, Artificial sequence
  synthetic
ggcgcgccagtcctcatttggggagaatgagggagaaaagaacgggcattccgagccaagagcactgcatgagcaaggagttgggaggttgcttacttgttgaacatatttgttgcgtatttgcatatttgctaaacaggttttcgtaacaccccagggcctgtaaggtttggtgtttccctttcaagcgactcggaccgatg

SEQ ID NO: 1664 - DNA, 203 bp, Artificial sequence
  synthetic
ggcgcgccagtcctcgcgacttttgctttacccttctgctgtgctactgctgtcgcgagacttcctgctcatctgccgctccctttgccgccgccttagcccgggacccgaacccagcctctcccctacccgaacaccggccccggctccaccgaggcccgggtcccccagcccgtctcgccgccgcccgactcggaccgatg

SEQ ID NO: 1665 - DNA, 203 bp, Artificial sequence
  synthetic
ggcgcgccagtcctcgaacgcagcttccccaaggtgcaggcgcggtgaaaccatcgagacggagggccagagagtcacggcggtgagagggctgagtgacgggttaccccaaaccatgtggctggaggcgcgagctggggttttcgtaacaccccagggcctgtaaggtttggtgtttccctttcaagcgactcggaccgatg

SEQ ID NO: 1666 - DNA, 203 bp, Artificial sequence
  synthetic
ggcgcgccagtcctagttctcaggctcacattcccaccacccacctctgagcccagccctccctagcatcaccacttccatcccattcctcagccaagagccaggaatcctgattccagatcccacgcttccctgcctccctcaggtcccagctcttgctcctgcctgtttgcctggaaatggccacgcgactcggaccgatg

SEQ ID NO: 1667 - DNA, 203 bp, Artificial sequence
  synthetic
ggcgcgccagtcctcctttccccttggggccctgtccttcccagtcttgccccagcctcgggaggtggtggagtgacctggccccagtgctgcgtccttatcagccgagccggtcccagctcttgctcctgcctgtttgcctggaaatggccacgcttctccttctccttggggtgctggtggtaagccgactcggaccgatg

SEQ ID NO: 1668 - DNA, 203 bp, Artificial sequence
  synthetic
ggcgcgccagtcctacctaggcaagaagctgcttctctgccaacagctcctcttcggcctccgtcacagccacctggaccctaccctttcgcgactgctgctgctgctgcccggacgtggaagcagcaagaggcgcttggtcaagacacactgacggtgcatatcttttaccatatttaatactacttcgactcggaccgatg

SEQ ID NO: 1669 - DNA, 203 bp, Artificial sequence
  synthetic
ggcgcgccagtcctattttttgataattggcctcgaccctcctcacctactccttccttagccaaatctactgagaaaagacttggagggggactctccctccacccctccgtgggcaaactcctgacggactgtaagaccttggccgccctctcgcctggcctgggtccctcgaatgaatgtacatccgactcggaccgatg

SEQ ID NO: 1670 - DNA, 203 bp, Artificial sequence
  synthetic
ggcgcgccagtcctccggcatgccctgggcttccggtgacctctggcccttttctgtcgtccgctctctctgcctagcgtgctcgctcgctcattgctttccttccctccctcggtcttccttcgcacgctgtttggtgattgtggcgctcgcgacagacagggaggcggtggcagaggacacttgtccgactcggaccgatg

SEQ ID NO: 1671 - DNA, 203 bp, Artificial sequence
  synthetic
ggcgcgccagtcctgcggggccggcagctgaactatgtgctcttcagggcgggcaccgtgttgcattcatctttgtacccccagcatctagcagtgttggcatgtagtaggcactcaagaaatgtgtgttgaatgaacgatgcctgtgacaagcaagcggactttattctttcctgacccttgctcctcgactcggaccgatg

SEQ ID NO: 1672 - DNA, 203 bp, Artificial sequence
  synthetic
ggcgcgccagtcctgctccacctcgtccgtggccctgcccacccaggccgcaagagctgccgggacggtccccatcttcttggagcgctttaggctggccggcggcgctgggaggtggagtcgttgctgttgctgtttgtgagcctgtggcgcggcttctgtgggccggaaccttaaagatagccgcacgactcggaccgatg

SEQ ID NO: 1673 - DNA, 203 bp, Artificial sequence
  synthetic
ggcgcgccagtcctaggaaggtagtgacgtcataggtaaacaggctctgtatccgtggcagcggccgtggcaggctggctgggtaccggctgtcgctgacccaggagaagctgcctgtctacatcagcctgggctgcagcgcgctgccgccgcggggccggcagccatggccaaggacatcctgggtgcgactcggaccgatg

SEQ ID NO: 1674 - DNA, 203 bp, Artificial sequence
  synthetic
ggcgcgccagtccttaatatggaggagcttccggcagcccccggcggctgaaagccggggcagaagtgctggtctcggtcgggattccgggcttggtcccaccgaggcggcgactgcggtaggagggaagaggttttggacgcgctggcctcccgccgctgtgcattgcagcattatttcagttcaaacgactcggaccgatg

SEQ ID NO: 1675 - DNA, 203 bp, Artificial sequence
  synthetic
ggcgcgccagtcctggctgggactggctgagcctggcgggaggcggggtccgagtcaccgcctgccgccgcgcccccggtttctataaattgagcccgcagcctcccgcttcgctctctgctcctcctgttcgacagtcagccgcatcttcttttgcgtcgccagccgagccacatcgctcagacacccgactcggaccgatg

SEQ ID NO: 1676 - DNA, 203 bp, Artificial sequence
  synthetic
ggcgcgccagtcctagcctcgccccgttcgcctcagctacaacaaatcatcgtcaacctgttccaccttctccagtctggtagcaaaaaggggtgtctcagaatctccggcctgtgaaactgtgaggggattcggccaagacgtcctcttccctctgcctcccacccaggccactcttcacctccacccgactcggaccgatg

SEQ ID NO: 1677 - DNA, 203 bp, Artificial sequence
  synthetic
ggcgcgccagtccttgacagaaacggagggtgtgtccaaagttttgaggacggccgagcggcgctccaaaacccgtcctcacagcctcgccccgttcgcctcagctacaacaaatcatcgtcaacctgttccaccttctccagtctggtagcaaaaaggggtgtctcaggccactcttcacctccacccgactcggaccgatg

SEQ ID NO: 1678 - DNA, 203 bp, Artificial sequence
  synthetic
ggcgcgccagtcctccagcgagctacgcaagcaatcctggcccagccgagcttgcttccccaaatcccgtaatccttgaccttattcccccaaagaagcggcctcccgggaaggagcgccctggcggagaagactcgaacggctcccacagccgggcgttgggggaaaggccactcttcacctccacccgactcggaccgatg

SEQ ID NO: 1679 - DNA, 203 bp, Artificial sequence
  synthetic
ggcgcgccagtcctgagttgcggcgatgggcggggcaggcgcgcggggattggcgggatgccgcgcgccgcgcgtgaacctccttggcctgggcgaagctgtgtggaccaagcaagtcaggagtgtggccatgttttctgagcaggctgcccagagggcccacactctactgtccccaccatcagccacgactcggaccgatg

SEQ ID NO: 1680 - DNA, 203 bp, Artificial sequence
  synthetic
ggcgcgccagtcctttccttttctctttttggatgaccgctacaggtatcctttgggtgcagtgagacaccaggagagctgctgctttgggggatggacaggggcagcaggaatgcctttgtgttttcgcagtgaacctccttggcctgggcgaagctgtgtggaccaagcaagtcaggagtgtggcccgactcggaccgatg

SEQ ID NO: 1681 - DNA, 203 bp, Artificial sequence
  synthetic
ggcgcgccagtccttattcccccaaagaagcggcctcccgggaaggagcgccctggcggagaagactcgaacggctcccacagccgggcgttgggggaaagaatctccggcctgtgaaactgtgaggggattcggccaagacgtcctcttccctctgcctcccacccaggccactcttcacctccacccgactcggaccgatg

SEQ ID NO: 1682 - DNA, 203 bp, Artificial sequence
  synthetic
ggcgcgccagtcctcaggacccgggctttctgctgtacagacttctcgtgggcagcctcccctcggaactcgggcatcatggcctcaggcccagccaccatcagtcacgtcactcctgggactgaggaggcaggggagggataaggggcagagatggaggccccactccccgaggttgcctagacaaccgactcggaccgatg

SEQ ID NO: 1683 - DNA, 203 bp, Artificial sequence
  synthetic
ggcgcgccagtcctcctgaccacgcccacgagccggctcgaacacgcccgcgccgctgactggcgggtggggttgtcgacacgttcaacccgttctgctggctcgagaacgaagtaggccgtctcgctctgggtctccaggcccgcgaccgtccgccagtcgtcccgaggccactcttcacctccacccgactcggaccgatg

SEQ ID NO: 1684 - DNA, 203 bp, Artificial sequence
  synthetic
ggcgcgccagtcctccaccccgaccccagtagcgctgggcctaggagcactcgggagttgctcagtggctctgcaccgctggcgcgggaaggggagaaaggggctgccagaggcgggaatttggtccccacgcgctgctccagggacgagaagccagggaccggcggttctgggagcagctgtgctggcgactcggaccgatg

SEQ ID NO: 1685 - DNA, 203 bp, Artificial sequence
  synthetic
ggcgcgccagtcctccgtcctcttccgcttggccccagaaagtttcggttctgcccggcggtggacccacgagcgcgtgccaccatggagtctgaccactgctgagcagacagccaccgagggccgaaattctgagccttcctctggacccaggcaggagacatacagacaagaaaggcaaactcacccgactcggaccgatg

SEQ ID NO: 1686 - DNA, 203 bp, Artificial sequence
  synthetic
ggcgcgccagtcctgattccgtagagacactcctccgctgcctgagtcctcggcgaacatggcggcccccgagtcagggccggctttgagtccaggcactgcagagggtgaggaggagacgattctctatgacttgttggtcaacaccgagtggccaccggagactgaagtacagcctagaggcaacccgactcggaccgatg

SEQ ID NO: 1687 - DNA, 203 bp, Artificial sequence
  synthetic
ggcgcgccagtcctgaacggaatgacgtcatcgcttgggagctgctgcaggatggagtggaaagctgctgctgatggcattgtttttgtggcagcaagctgaatgacagatcctcactacaaagatacccctttggcccccgtgtaggcctccttggttcgggtgtttcaccatgccagcacagcgcccgactcggaccgatg

SEQ ID NO: 1688 - DNA, 203 bp, Artificial sequence
  synthetic
ggcgcgccagtcctagtatgcaggtcgctgcagggacccgaggcgacacgcgcctgcaggaggtggcactcctgccgcagctcttcgatctgcttgtccttggccagcggcgcgctcgcctgctccgacaggtcccgagcgcgctggcgggcaaagacttggcacagctccaggccggcgcaactctccgactcggaccgatg

SEQ ID NO: 1689 - DNA, 203 bp, Artificial sequence
  synthetic
ggcgcgccagtcctcggtgatcaggttcccctctgctgattctgggccccgaaccccggtaaaggcctccgtgttccgtttcctgccgccctcctccgtagccttgcctagtgtaggagccccgaggcctccgtcctcttcccagaggtgtcggggcttggccccagcctccatcttcgtctctcaggcgactcggaccgatg

SEQ ID NO: 1690 - DNA, 203 bp, Artificial sequence
  synthetic
ggcgcgccagtccttttgtccgccctgtgttgtttaaaggggatagacgaccttggagcgccccgccccctcccgccaaggaaggaccccattggctctccccggaggcttcactctcattggtcagcgagtgaatgccgacctgcagactggggcctaagtttcttttagtttccggtgtctctgcacgactcggaccgatg

SEQ ID NO: 1691 - DNA, 203 bp, Artificial sequence
  synthetic
ggcgcgccagtcctctgcctcgctggtccgaattcggtggcgccacgtccgcccgtctccgccttctgcatcgcggcttcggcggcttccacctagacacctaacagtcgcggagccggccgcgtcgtgagggggtcggcacggggagtcgggcggtcttgtgcatcttggctacctgtgggtcgaagcgactcggaccgatg

SEQ ID NO: 1692 - DNA, 203 bp, Artificial sequence
  synthetic
ggcgcgccagtcctcatcctactaaagccctgggaaaagagacaaatggtgaagaggagaatgaaaggttgcaggagggagctcctgttttagccctgccacctacctgggggccctctggctaccagtgtccttggaggggcttccttgctgcttctcccactaaggagctctggagccttaggacccgactcggaccgatg

SEQ ID NO: 1693 - DNA, 203 bp, Artificial sequence
  synthetic
ggcgcgccagtccttgatgccatcatcccctctttcccctgcaggaagtggcagtgaagctagaatctcagaaggccaggcatccccagttgctgtacgagagcaagctctataagattcttcaaggtggggttggcatcccccacatacggtggtatggtcaggaaaaagactacaatgtactagtccgactcggaccgatg

SEQ ID NO: 1694 - DNA, 203 bp, Artificial sequence
  synthetic
ggcgcgccagtcctggtgacagtggggtccaggagagtctcaaaatcctaagctttcagtatttgttattgtgaaagaagttaattcacctgaaacagaggaggggcaacctgagttatcagaaagtgacttcctggccttcccttctttactgatcagaggcacacaaagcgtagtttctaagctgacgactcggaccgatg

SEQ ID NO: 1695 - DNA, 203 bp, Artificial sequence
  synthetic
ggcgcgccagtcctacacccagtgcgcatgcgcagcaccccggcccggaaacagcgcggggtccgctatggcggcggcagccgagggcgtactggcgacccggagtgatgagcccgcccgagacgatgccgccgtggagacagctgaggaagcaaaggagcctgctgaagctgacatcactgagctctcgactcggaccgatg

SEQ ID NO: 1696 - DNA, 203 bp, Artificial sequence
  synthetic
ggcgcgccagtccttttcacgacaacttccggaagaggtcgccatggcttcccgggaggaggtactcgccttacaagctgaagttgcccaacgtgaggaggaattgaattcgctgaagcagaagctggcgtcggctcttttggctgagcaggaaccgcagccagaacggctggttccggtgtcgccgccgactcggaccgatg

SEQ ID NO: 1697 - DNA, 203 bp, Artificial sequence
  synthetic
ggcgcgccagtcctctctgacttgacataacttcccatccagccaggagtctgcactcttcagtctttgcaggcagtagcagaatcccatggtagccaggtgggtgaaggggagcgaggacgttctacctgccttgaagaagacacctgacctgcggagtgagtgaccagtgtttccagagcctggcacgactcggaccgatg

SEQ ID NO: 1698 - DNA, 203 bp, Artificial sequence
  synthetic
ggcgcgccagtcctgcggagtgagtgaccaggaatgtgggggaaatttatgtcagtcatcaggcaggtactagaagatgctaggggcctcacagacagcttgttcccggctgttaacatggagcagagcgttccctggggctgagcatgggagcccagcacttcttatagtgtttccagagcctggcacgactcggaccgatg

SEQ ID NO: 1699 - DNA, 203 bp, Artificial sequence
  synthetic
ggcgcgccagtcctagaaaacccggcgtccggaagcccgtgctttctttgacgcaagggctcgagacgcagccgccgtcggccgagcgcccggctagaagcgacaccagacggagcctccggagttcctccgcccccacctcgccgggtcctggagccgcagtcctcccagctgccctcctcgtggcccgactcggaccgatg

SEQ ID NO: 1700 - DNA, 203 bp, Artificial sequence
  synthetic
ggcgcgccagtcctttttggctgttctgaagagtgttactgtgaacattcatgcacaaatttttatgtggaggcagtagcagaatcccatggtagccaggtgggtgaaggggagcgaggacgttctacctgccttgaagaagacacctgacctgcggagtgagtgaccagtgtttccagagcctggcacgactcggaccgatg

SEQ ID NO: 1701 - DNA, 203 bp, Artificial sequence
  synthetic
ggcgcgccagtcctgaggccgtcccgtgatgccccgcgccccggccgctctggcctgcaacgtgtctctggggcggaggcagcggcagtggagttcgctgcgcgctgttgggggccacctgtcttttcgcttgtgtccctctttctagtgtcgcgctcgagtcccgacgggccgctccaagcctcgaccgactcggaccgatg

SEQ ID NO: 1702 - DNA, 203 bp, Artificial sequence
  synthetic
ggcgcgccagtccttcggggccgcagagggggcggggcgggacgtccggggagtgcgcacgcatcctgcccgcggcgcgcgcgcaggtcggtgcgtctgtcgggggcgcgctcgggtacctgtaccccacgtagtcgccggttaccgatcggactaagttccagtggtgatttacaagtcaagttaaacgactcggaccgatg

SEQ ID NO: 1703 - DNA, 203 bp, Artificial sequence
  synthetic
ggcgcgccagtccttctaggagacaggggccacggggagagcacagccacccggcgcgaagagccctctgtaccccgcttcctcttgaggccctgggaccgtccaggaaatgtctgggagcccgcctgcggagggcatagcgccgaccctcgctccccgcccaggacccgaatgaacctggagagcggcgactcggaccgatg

SEQ ID NO: 1704 - DNA, 203 bp, Artificial sequence
  synthetic
ggcgcgccagtcctatcttccgtcccaactgctagtggctgagtccctggcggggcgcggcggtggaaggtgtcgcgtacgggcttcccgagctgacgtggcttgaattgggaggggggcagctggagcctcaggcggcagcgcttctagaaatgctgagccgattatcaggattagcaaatgttgttcgactcggaccgatg

SEQ ID NO: 1705 - DNA, 203 bp, Artificial sequence
  synthetic
ggcgcgccagtccttacgagttggcccggagcaaggcggcccaggacaggcaggggctgcacgcggtgaagaaaccaagacgcagagaggccaagccccttgccttgggtcacacagccaaaggaggcagagccagaactcacaaccaggcagtcacccgcagggccaaggtggctcccgctgagaggcgactcggaccgatg

SEQ ID NO: 1706 - DNA, 203 bp, Artificial sequence
  synthetic
ggcgcgccagtcctgtctcctccgcgctccgccacagccggccgacaccacaccagccggggagccgccgccgccgccgccacctctgagcagccggctgggagcgagagccgacagctagtctgcaagccaccgctgtcgccatggggagccgcgtctcgcgggaagacttcgagtgggtctacacccgactcggaccgatg

SEQ ID NO: 1707 - DNA, 203 bp, Artificial sequence
  synthetic
ggcgcgccagtcctgtcattcacccgcgccacccggaagccgcggttcctaccaaccgttcttattgctggcggcctgaggagcccatcatggcgacgccccctaagcggcgggcggtggaggccacgggggagaaagtgctgcgctacgagaccttcatcagtgacgtgctgcagcgggacttgcgacgactcggaccgatg

SEQ ID NO: 1708 - DNA, 203 bp, Artificial sequence
  synthetic
ggcgcgccagtcctcgcggggcggggctccagagccgcaggtctgggctgcagtaggtcccggcaaccgcaggctcgcggcgggcgctgggcgcgggatccgactctagtcgtaatggaggcgggcggctttctggactcgctcatttacggagcatgcgtggtcttcacccttggcatgttctccgccgactcggaccgatg

SEQ ID NO: 1709 - DNA, 203 bp, Artificial sequence
  synthetic
ggcgcgccagtcctggaggcgtcggggctgcgccgtacaacttccggctgtaaagatggcggcttcctagtgagtcggcggctgatttagaaggaggttcaggctacggtgagccgaagccacacaggagccatggaagtggcagagcccagcagccccactgaagaggaggaggaggaagaggagcacgactcggaccgatg

SEQ ID NO: 1710 - DNA, 203 bp, Artificial sequence
  synthetic
ggcgcgccagtccttcccgcagcttccctagattaggcttgggaggcaagaggaggcctcctgacctttcacactgcctttttaatattaagatgaagtcacactccacaactttcttccagccaggcccagacatgtccgtccttgtaagttaaaagcttccatgggagccttccttcctaatcaagcgactcggaccgatg

SEQ ID NO: 1711 - DNA, 203 bp, Artificial sequence
  synthetic
ggcgcgccagtcctaacgcagctgagattactcccagccactaaggacgaagaggtggggcggtggcgtcccacgcctcgtgcgacagtgggcggggctttgttgcctgagtaaccgtatgatggtggtggtggtggtgtcttcctgtctcaacgatacctattttctagtgctgagatcctgagacacgactcggaccgatg

SEQ ID NO: 1712 - DNA, 203 bp, Artificial sequence
  synthetic
ggcgcgccagtcctgagccaaccgagggcgttcctgtcggggctgcagcggcgggagggagcccagtggaggcgccctcccgaagcgccactgcccatgctgaccacccagccctccggctgctgatgtcatgagtaacaccactgtgcccaatgccccccaggccaacagcgactccatggtaatgtcgactcggaccgatg

SEQ ID NO: 1713 - DNA, 203 bp, Artificial sequence
  synthetic
ggcgcgccagtcctgtgaccccaggccctggtcactccatgctttggagggtgcttttgtcaaagaggcctcctttccctcacccagagctggatttccaagaggctcccatacctagctgccctggcagactcccagggaggaaaaacagcgtggccttggcagctgccccgaggaaggagcccacacgactcggaccgatg

SEQ ID NO: 1714 - DNA, 203 bp, Artificial sequence
  synthetic
ggcgcgccagtcctcctctcggcgccgccgcagtgcgcagaacagctctggtcctcacagccagtgcaccggaggggcgcgctcccgagctggcgcagtttcccagcgcggtgcccgcccctcatcctcctccagtctccctcccctcgccgactgccgccccaggctccgccatggggaatgtgccacgactcggaccgatg

SEQ ID NO: 1715 - DNA, 203 bp, Artificial sequence
  synthetic
ggcgcgccagtcctcggctagcggccccacagcccctgctgactcaaaacaactgagttgtaagacgttcatcgccgtgttatccttgagtaaagaatgaactctggaagcccagccagggacaatgcaccttcacagagattctgcactaatctgagtgaaggtctaaggtttggaatctccccctccgactcggaccgatg

SEQ ID NO: 1716 - DNA, 203 bp, Artificial sequence
  synthetic
ggcgcgccagtcctagtgtgctctacgtggggcggggctcaggtgcggacgccgccggttgtcctcttcgctgctccgtagtgacggggattgttgtgttgcagaaatccggcaatcgacctgaggacttgcgagccgctcagctcccgggacgtttggagctgctgctaaataatttctgctcagcccgactcggaccgatg

SEQ ID NO: 1717 - DNA, 203 bp, Artificial sequence
  synthetic
ggcgcgccagtcctcccgggacgtttggtgcgtcttctaagggcgtgggcgagtttacgcgggccagttgttgctggtcgcatgggagctgctgctaaataatttctgctcagccatgtcgccggctccagatgcagccccggctcctgcgtcgatctccctgtttgacctcagcgcggatgctccggcgactcggaccgatg

SEQ ID NO: 1718 - DNA, 203 bp, Artificial sequence
  synthetic
ggcgcgccagtcctagttaagcaagccgggtctggctttgggccctgggccttccagccggggactctgcgcctgcgcccgcctggccgccgcccgctctcccggcgcggcagctgtctgggctgctgcgcgccgcctaggtgtctgggcgatctatgggcaagagcaagggccacgatgacagattacgactcggaccgatg

SEQ ID NO: 1719 - DNA, 203 bp, Artificial sequence
  synthetic
ggcgcgccagtcctccctcccctcccgctctgtgccccgccgggcggggaccgtgggagccgcggacaagcccaaggccggagcggttccaggaggaccctggtctgcacctgtggttgccaggtaggtggatgtgagagaccctacccttctggttctctagaagccatcccatcgccgctagcatccgactcggaccgatg

SEQ ID NO: 1720 - DNA, 203 bp, Artificial sequence
  synthetic
ggcgcgccagtcctcgagtgccggggagttcctggggagccgggcttctcttttggcccccagcgtgttgaccgagcccgcttcgcacagcccttcctagggtgtggagagcgggccccgccctgaaggggcaccgtgggctggggggcctgttttggagcaggcaccggtggccgagctccgtgacccgactcggaccgatg

SEQ ID NO: 1721 - DNA, 203 bp, Artificial sequence
  synthetic
ggcgcgccagtcctcgcagcaggcggctggggcggcggctggggcagcggctgcagcagcggcggacgctctgcattacccagtcttgcgtcctcggcaggcgcccgaagctgagtgcgcatcctctaccgcacccaagcttcgtctgtctcgtcaagctcttcatgctgcccaactaaaaggaaaaccgactcggaccgatg

SEQ ID NO: 1722 - DNA, 203 bp, Artificial sequence
  synthetic
ggcgcgccagtcctggggcgtgctcgcggctataaggggcggaggctgggcggcgttgctctgcgctctgcggctgacggcgcttttgtctccgggtccagaggcctttcagaaggagaaggcagctctgtttctctgcagaggagtagggtcctttcagccatgaagcatgtgttgaacctctacctcgactcggaccgatg

SEQ ID NO: 1723 - DNA, 203 bp, Artificial sequence
  synthetic
ggcgcgccagtcctcagatttgactgagagccgtaaagcgcggctggctctcgttttccggataacgactacagctccgactgtcagtgccggccttcctcgtgtgaggggatctgccggacccctgcaaattcaatttctttcccattccgggcccttccctatcgtcgcccccttcaccttggatccgactcggaccgatg

SEQ ID NO: 1724 - DNA, 203 bp, Artificial sequence
  synthetic
ggcgcgccagtcctcgttgggaacggttgtaggacgtggctctttattcgtgagttttccatttacctccgctgaacctagagcttcagacgccctatggcgtccgcctcgacccaaccggcggccttgagcgctgagcaagcaaaggtggtcctcgcggaggtgatccaggcgttctccgccccggacgactcggaccgatg

SEQ ID NO: 1725 - DNA, 203 bp, Artificial sequence
  synthetic
ggcgcgccagtcctctcacaatggcttgggtccagactgcgccacagcctctcgggagacgtgggccctcggaacctttttagtgccggactccgggccgcaggcagtcccgcggcagcaggatcacaggtggcagggactcagctcggaattctgtatagaaaaagcacctggatcccagtctttcacgactcggaccgatg

SEQ ID NO: 1726 - DNA, 203 bp, Artificial sequence
  synthetic
ggcgcgccagtcctctgctgggtgactcgggtccaggtgcctcaccacctgctgagctctgtgtgatttctggacacttctgctcgttgcctttgggctcagtgaagagtctggagtttatctggagtgaggtggccggttcttggtgggatctgagcaggacagcgtctggctccttccctcggctccgactcggaccgatg

SEQ ID NO: 1727 - DNA, 203 bp, Artificial sequence
  synthetic
ggcgcgccagtcctatggagaacgttgataattctctggatggcagtgatgtgtcagaaccagcaaaaccagaagccggacttgaagtggctcagtcgatcctgagtaagttctctatgaaatccctatttgggtttacgagtaaattagaatctgtgaatccagaagaggaagatgctgtgctgaaacgactcggaccgatg

SEQ ID NO: 1728 - DNA, 203 bp, Artificial sequence
  synthetic
ggcgcgccagtcctcgctggcggtggcgcggtttgtgtgggcttggtgagggcggggaggcctggctgtgtggatgtctgacaggtgaggcgggggacgcagaagtgcagccgccctctcccacagcggagtccaaaacaggcctaccagtcagttcttatttctattgggtgtttccatgctccacccgactcggaccgatg

SEQ ID NO: 1729 - DNA, 203 bp, Artificial sequence
  synthetic
ggcgcgccagtcctcccagactccagccctggaccgcgcatcccgagcccagcgcccagacagagtgtccccacaccctcctctgagacgccatgttcaactcgatgaccccaccaccaatcagtagctatggcgagccctgctgtctccggcccctccccagtcagggggcccccagtgtggggacacgactcggaccgatg

SEQ ID NO: 1730 - DNA, 203 bp, Artificial sequence
  synthetic
ggcgcgccagtcctcccacttcccccggctccagccggcgcaggcagcggcggcagcagcaggcgagcctcggccccgcaaggccatgaaggtgaagaagggcggcggtggggccgggacggcgacggagtccgctccggggccctcgggccagagcgtggcccccataccacagccgcctgcggaatcgactcggaccgatg

SEQ ID NO: 1731 - DNA, 203 bp, Artificial sequence
  synthetic
ggcgcgccagtcctccacaactggagcagccgggaacagctctgaccacagtggttccggggagaagcctttccaggacccatgtgtaggcacaactgttttccctgatcaggatacttgcggcactcaacagaggaaagaaattcctaagggaacactgctcagaaagtactgcagcatgtcttcaacgactcggaccgatg

SEQ ID NO: 1732 - DNA, 203 bp, Artificial sequence
  synthetic
ggcgcgccagtcctgggtacaaatgtattttggatcaaagaaactccagtattcaaagataggaactgacaggattttaggtcactttgtaggtcaccacctagaggggaggaagacctcgctttggagagtgggaataaaacgctcgtggaaaagggtacacgcttttctgggaaagtgaggccacccgactcggaccgatg

SEQ ID NO: 1733 - DNA, 203 bp, Artificial sequence
  synthetic
ggcgcgccagtcctccccgcgctgcgtgcccacgttgcgccggcctcgcgccagtccgctgggctgcagggactgcggcgcctgagggagtcgctgacgggcacgctgactggaggctggcggacaggcgacagcgacctgcggcaggaccagaggagcgagagcagcaagaaccacacccagcagcacgactcggaccgatg

SEQ ID NO: 1734 - DNA, 203 bp, Artificial sequence
  synthetic
ggcgcgccagtcctagcgacctgcggcagagtcttgctgcgacacccaggctggagtgcaatggcgctatctcggctcactgcaacctccgcttcccggattcaagcgattctcctgcctcagcctcccgagtaggtgggactacaggaccagaggagcgagagcagcaagaaccacacccagcagcacgactcggaccgatg

SEQ ID NO: 1735 - DNA, 203 bp, Artificial sequence
  synthetic
ggcgcgccagtcctaggcgcgggcggagggcgggctgaagcagctgaagcggcggtagcggcggcggctcgggcagaggggcgggagctgaggcgggagcggacaggctggtgggcgagcgagaggcggcggaatggtggactaccacgcggcgaaccagtcgtaccagtacggccccagcagcgcggcgactcggaccgatg

SEQ ID NO: 1736 - DNA, 203 bp, Artificial sequence
  synthetic
ggcgcgccagtcctcttctcagatcctttgcgggtagccctggcgtcccgcggagaccccaccccctggctacctgagtgaagatggagaaaccagtgaccaccagatgaaccacagcatggacgcaggttctccaaacctatccccgaatccgatgtccccagcacataataacttggacctgcagccgactcggaccgatg

SEQ ID NO: 1737 - DNA, 203 bp, Artificial sequence
  synthetic
ggcgcgccagtcctacaaacatgtcttgcctgcaccctaggcaaacgtggaaaggcgcagctctggtacaccggaaagcatggtggatggggaggtccctggatggccggttgcaggtgtcccatcggaaggggctccctcatgtcatctactgccgcctgtggcgatggccagacctgcacagccaccgactcggaccgatg

SEQ ID NO: 1738 - DNA, 203 bp, Artificial sequence
  synthetic
ggcgcgccagtccttaagagccgcggagtcggggacggtagaaggggccgcgcgtgcgcagtggcgtccgctgtgcttccggtgcgccgggcgcggacgcgggcacgcacacacgcaagcacgcctccacttaactcgcgccgccgcggcagctcgagtccaccagcagcgccgtccgcttgaccgagcgactcggaccgatg

SEQ ID NO: 1739 - DNA, 203 bp, Artificial sequence
  synthetic
ggcgcgccagtcctggcgaggcgcctgttgattggccactggggcccgggttcctccggcggagcgcgcctccccccagatttcccgccagcaggagccgcgcggtagatgcggtgcttttaggagctccgtccgacagaacggttgggccttgccggctgtcggtatgtcgcgacagagcaccctgtcgactcggaccgatg

SEQ ID NO: 1740 - DNA, 203 bp, Artificial sequence
  synthetic
ggcgcgccagtcctaacgccagcaggcgtcagaggcggacgccgcagcagcaaccttccgggcaaacgaccatcagcatatccgctacaacccgctgcaggatgagtgggtgctggtgtcagctcaccgcatgaagcggccctggcagggtcaagtggagccccagcttctgaagacagtgccccgcccgactcggaccgatg

SEQ ID NO: 1741 - DNA, 203 bp, Artificial sequence
  synthetic
ggcgcgccagtccttagcgtagggttgcgcggcccggaaacgcagagccggccaaagagcggcgcgacgtgagccggggccgtgcgcgaagagacctcgcgggcgcggagcgaaaggccggcgtgagtgagcgcggagacagtggccgccggcggcccaacccgtctatcccttcggccgccgccggccgactcggaccgatg

SEQ ID NO: 1742 - DNA, 203 bp, Artificial sequence
  synthetic
ggcgcgccagtcctgggccactgctctccaggaagataaggcttttaaagcagcctagcactagaaggtgaggctctgtgtgctccgggatggagcaggtgtgcagagggtgagaacccagctctgggaccaagtcacttgcttccttacttagcaagactatcgacttgagcaaacttggacctgggcgactcggaccgatg

SEQ ID NO: 1743 - DNA, 203 bp, Artificial sequence
  synthetic
ggcgcgccagtcctcctgctgctgctcgctgttcggcccggggcggggacacggccgcggacgtccttgtgggctctgtgtgctccgggatggagcaggtgtgcagagggtgagaacccagctctgggaccaagtcacttgcttccttacttagcaagactatcgacttgagcaaacttggacctgggcgactcggaccgatg

SEQ ID NO: 1744 - DNA, 203 bp, Artificial sequence
  synthetic
ggcgcgccagtcctgcggcgtcctggggccaggaggagcgaacacctgccgcggtcctcccgccggcgctgggctctgtgtgctccgggatggagcaggtgtgcagagggtgagaacccagctctgggaccaagtcacttgcttccttacttagcaagactatcgacttgagcaaacttggacctgggcgactcggaccgatg

SEQ ID NO: 1745 - DNA, 203 bp, Artificial sequence
  synthetic
ggcgcgccagtcctataggccccgcccctgtatcccaagaccctgcctcctcttgcggtggggggaaagcggcctcttactctaggcctttcggtttgcgcgagcgggcaggaaagcgtgcgtgcggctaagagagtgggcgctctcgcggccgctgacgatggaagaactggagcaaggcctgttgacgactcggaccgatg

SEQ ID NO: 1746 - DNA, 203 bp, Artificial sequence
  synthetic
ggcgcgccagtcctaaaggaagaccaggttcctgaaagggttattctgacttaatctggctataaaaatgctattggctgttatttggcatggccaaagtgcacccagaatgtcttctctctccattcagtgcacgcgttactttggctaaaaggaggtgagcggcactctgcccttccagagcaagccgactcggaccgatg

SEQ ID NO: 1747 - DNA, 203 bp, Artificial sequence
  synthetic
ggcgcgccagtccttcgggagctcggactcctacgcagtcaccgggaagggccgccgccccgcccgcggctgctggcccgggtgacgcttccgcctgctataagagcagcggccctcggtgcctccttcctgacctcgcacccagctcggagcccggagcgtgcctcggcggcctgtcggttttcacccgactcggaccgatg

SEQ ID NO: 1748 - DNA, 203 bp, Artificial sequence
  synthetic
ggcgcgccagtcctgctggagctctgcccgggtgtggaaacctcgtcttccaacacgtagctgcccttcagccacccgcccgcagcctgggagtgccctgagggtgggtcgggggagctgcgcagggacatctctacaccgttcccatccgggaacagggcaacatctacaagcccaacaacaaggcccgactcggaccgatg

SEQ ID NO: 1749 - DNA, 203 bp, Artificial sequence
  synthetic
ggcgcgccagtcctttcccccgccgccaggctgacttctcatcgcttgtttttctttttgcatttttcctcccaccgccgttgccgccctccccgtcctggccgtccgccctccgccctctgcagggacatctctacaccgttcccatccgggaacagggcaacatctacaagcccaacaacaaggcccgactcggaccgatg

SEQ ID NO: 1750 - DNA, 203 bp, Artificial sequence
  synthetic
ggcgcgccagtcctttagcctcccgcccgccgcctctgtctccctctctccacaaactgcccaggagtgagtagctgctttgggtccgccggacacaccggacagatagacgtgcggacggcccaccaccccagcccgccaactagtcagcctgcgcctggcgcctcccctctccaggtccatccgcccgactcggaccgatg

SEQ ID NO: 1751 - DNA, 203 bp, Artificial sequence
  synthetic
ggcgcgccagtcctactttactgcaagccttagtcagagtacaaagggttcctgcttggtggttttgctgcagcttcagagtttagcctgaactgtggcaggattttgtaacttgcacattttttgagaagtctgatggaggtataatgtccacggtcgattatttgaacagtgtttctggagatcatcgactcggaccgatg

SEQ ID NO: 1752 - DNA, 203 bp, Artificial sequence
  synthetic
ggcgcgccagtcctgtataaggtccacaccccgggagctgagtgattgcagaaactggccttccatctctctcagacaccaagctgcagatccaggcttttctgggaaagtgaggccaccatggctctggagaagtctcttgtccggctccttctgcttgtcctgatactgctggtgctgggctgggtcgactcggaccgatg

SEQ ID NO: 1753 - DNA, 203 bp, Artificial sequence
  synthetic
ggcgcgccagtcctaccctaagaggaggagctactgtgaaggtttctgcgtcttcaccctcactggctgtcgcttctcaatcagactccaagcagcgaagacttttggttgattttccaaaaggctcagtaagcaatgcgcagcagccagatctgtccaaagcagtttcactctcaatgggactgtatcgactcggaccgatg

SEQ ID NO: 1754 - DNA, 203 bp, Artificial sequence
  synthetic
ggcgcgccagtccttaaggtccacaccccgggagctgagtgattgcagaaactggccttccatctctctcagacaccaagctgcagatccaggtcaccacctagaggggaggaagacctcgctttggagagtgggaataaaacgctcgtggaaaagggtacacgcttttctgggaaagtgaggccacccgactcggaccgatg

SEQ ID NO: 1755 - DNA, 203 bp, Artificial sequence
  synthetic
ggcgcgccagtcctaaggtttctgcgtcttcaccctcactggctgtcgcttctcaatcagactccaagcagcgaagacttttggttgattttccaaaaggctcagtaagcaatgcgcagcagccagatctgtccaaagcagtttcactctcaatgggactgtatatgggagagacagaaacaaaagtgcgactcggaccgatg

SEQ ID NO: 1756 - DNA, 203 bp, Artificial sequence
  synthetic
ggcgcgccagtcctcccgggagctgagtgattgcagaaactggccttccatctctctcagacaccaagctgcagatccaggtcactttgtaggtcaccacctagaggggaggaagacctcgctttggagagtgggaataaaacgctcgtggaaaagggtacacgcttttctgggaaagtgaggccacccgactcggaccgatg

SEQ ID NO: 1757 - DNA, 203 bp, Artificial sequence
  synthetic
ggcgcgccagtcctaaggataatggagatctggttttgtcaagccccagtaatgtaacactgccccaagtgaaaacagaaaaagaagatttcatcgaactctgcacccctggggtaattaagcaagagaaactgggcacagtttactgtcaggcaagctttcctggagcaaatataattggtaataaacgactcggaccgatg

SEQ ID NO: 1758 - DNA, 203 bp, Artificial sequence
  synthetic
ggcgcgccagtcctacagaaaaagaagatttcatcgaactctgcacccctggggtaattaagcaagagaaactgggcacagtttactgtcaggcaagctttcctggagcaaatataattggtaataaaatgtctgccatttctgttcatggtgtgagtacctctggaggacagatgtaccactatgaccgactcggaccgatg

SEQ ID NO: 1759 - DNA, 203 bp, Artificial sequence
  synthetic
ggcgcgccagtcctttcaagtctttttcttttaacggattgatcttttgctagatagagacaaaatatcagtgtgaattacagcaaacccctattccatgctgttatgggtgaaactctgggagattctcctattgacccagaaagcgattccttcactgatacactgtctgcaaacatatcacaagacgactcggaccgatg

SEQ ID NO: 1760 - DNA, 203 bp, Artificial sequence
  synthetic
ggcgcgccagtcctatatatttcgagactaaagaacccaggaacccaagaagactccttgaccacaacaaagatggcgaaatctgcctgttgctcgtgctagattgaggttacgtagattggcgtgctgcaaaccagctctaggcggctctggccccaaaaggagcataaaccagggactttgatatccgactcggaccgatg

SEQ ID NO: 1761 - DNA, 203 bp, Artificial sequence
  synthetic
ggcgcgccagtcctgatctcagctcactgcagcctccgcctcccgggttcaagcgattcttctgcctcagcctcccgagtagcagattatgagcttacagaaagcctggcctacattttactctttttggatttcttcctcatcaagagactgctgcagtgcctgtcatgtgacagcggcatggacatcgactcggaccgatg

SEQ ID NO: 1762 - DNA, 203 bp, Artificial sequence
  synthetic
ggcgcgccagtcctgattcacagggcctctgagcattatcccccatactcctccccatcattctccacccagctgttggagccatctgtctgatcaccttggactccatagtacactggggcaaagcacagccccagtttctggaggcagatgggtaaccaggaaaaggcatgaatgagggggccccacgactcggaccgatg

SEQ ID NO: 1763 - DNA, 203 bp, Artificial sequence
  synthetic
ggcgcgccagtcctgaggtgtttcccttagctatggaaactctataagagagatccagcttgcctcctcttgagcagtcagcaacagggtcccgtccttgacacctcagcctctacaggactgagaagaagtaaaaccgtttgctggggctggcctgactcaccagctgccatgcagcagcccttcaacgactcggaccgatg

SEQ ID NO: 1764 - DNA, 203 bp, Artificial sequence
  synthetic
ggcgcgccagtccttaggtgcgtgcgacgacctgggacgctggaaacccggagctgcgcgctgggcggaaaggactcctagtgggcccggctgagaaggcggaggtggcgcgcgaggggcgggctcgtgccaacgctggtgggtggggctagaacgggaggggcggggctagccggatccgctgactgcgactcggaccgatg

SEQ ID NO: 1765 - DNA, 203 bp, Artificial sequence
  synthetic
ggcgcgccagtcctcaccgcaggctcctgtgccttgggcttgagctttgtggcagttaatggcttttctgcacgtatctctggtgtttacttgagaagcctggctgtgtccttgctgtaggagccggagtagctcagagtgatcttgtctgaggaaaggccagccccacttggggttaataaaccgcgcgactcggaccgatg

SEQ ID NO: 1766 - DNA, 203 bp, Artificial sequence
  synthetic
ggcgcgccagtccttttaaatggcagagagaaggagaaaacttagatcttctgataccaaatcactggaccttagaaggtcagaaatctttcaagccctgcaggaccgtaaaatgcgcatgtgtccaacggaagcactggggcatgagtggggaaggaatagaaacagaaagaggttgatattcactgcgactcggaccgatg

SEQ ID NO: 1767 - DNA, 203 bp, Artificial sequence
  synthetic
ggcgcgccagtcctgtctcccgcggcccagcgctcgcaccaccgcttctccctccctgtcgcagccgcgccgccgcgcagcgccccagccacacgccggcgggcagaagccgcccgctctccggaaagtgataacagaattcattgaagtggagaatttttaaagaaggtaacaaaaagagaaagaaacgactcggaccgatg

SEQ ID NO: 1768 - DNA, 203 bp, Artificial sequence
  synthetic
ggcgcgccagtcctcaggacgcacgtttcaagctcatcagtaaaggttccttaaattcccgaagggcaagaagttaaccaagtaaaacagcatcggaacaccaggatcccatgacagattctgttgtcacgtctccttacagagtttgagcggtgctgaactgtcagcaccatctgtccggtcccagccgactcggaccgatg

SEQ ID NO: 1769 - DNA, 203 bp, Artificial sequence
  synthetic
ggcgcgccagtcctattcagcaaatgtttgcggaatgaatggggtgagctggagccaggacctgcaggaagggatctccgcctggttcggcccgcctgcctccactcctgcctctaccatgtccatcagggtgacccagaagtcctacaaggtgtccacctctggcccccgggccttcagcagccgctcgactcggaccgatg

SEQ ID NO: 1770 - DNA, 203 bp, Artificial sequence
  synthetic
ggcgcgccagtcctggtggcagcggcaggagagtccggccgcgacaggacgaactcccccactggaaaggattctgaaagaaatgaagtcagccctcagaaatgaagttgactgcctgctggctttctgttgactggcccggagctgtactgcaagacccttgtgagcttccctagtctaagagtaggcgactcggaccgatg

SEQ ID NO: 1771 - DNA, 203 bp, Artificial sequence
  synthetic
ggcgcgccagtcctttctccagaacaagcctcctggtctttctgggagagctctggcagcatcactgtgcctgtgcagggagagcgggaacccacttcctgcaccggctttctctgagttcttcaggatgaattcgctctggtctagcggagctggagtttgttcagatcatcatcatcgtggtggtgcgactcggaccgatg

SEQ ID NO: 1772 - DNA, 203 bp, Artificial sequence
  synthetic
ggcgcgccagtcctaaatgatcaagtgttgggtataagccaaggagctgagagagggggagaccagcgcaggtctgaggagctgagaagggaggcttacgtgaagggaatttagataatgggctgtgtgcaatgtaaggataaagaagcaacaaaactgacggaggagagggacggcagcctgaaccacgactcggaccgatg

SEQ ID NO: 1773 - DNA, 203 bp, Artificial sequence
  synthetic
ggcgcgccagtcctgggcgtgtctacgcgagttcccgtctttcctggtcgtcctccttgggttcgggtgaaagcgcttgggggttcagtgggccatgatccccgagctgctggagaactgaaggcggacagtctcctgcgaaaccagcggagctggagtttgttcagatcatcatcatcgtggtggtgcgactcggaccgatg

SEQ ID NO: 1774 - DNA, 203 bp, Artificial sequence
  synthetic
ggcgcgccagtcctgcagcaatccaaaagagtctcaaggatccttcaaataacttcaggctccataatgggagaagtaaagaacaaagacttaaggaacagcttggcgctcaacaagaaccagtgaagaaatccattcaggaatcagaagcttttttgcctcagagcatacctgaagagagatacaagcgactcggaccgatg

SEQ ID NO: 1775 - DNA, 203 bp, Artificial sequence
  synthetic
ggcgcgccagtcctgaatttagataatgggctgtgtgcaatgtaaggataaagaagcaacaaaactgacggaggagagggacggcagcctgaaccagagctctgggtaccgctatggcacagaccccacccctcagcactaccccagcttcggtgtgacctccatccccaactacaacaacttccacgcgactcggaccgatg

SEQ ID NO: 1776 - DNA, 203 bp, Artificial sequence
  synthetic
ggcgcgccagtcctaccctctacacccgccatagcaatggagaccccgcctcctgctacagttaattaatccttcttttttgcttcacaataaaaatagcatggctcttctgattgtaaaaagtgatatacactccttatttaacgaaaaattcaaagaatttgataaatgacaggcgaaaagtcaaacgactcggaccgatg

SEQ ID NO: 1777 - DNA, 203 bp, Artificial sequence
  synthetic
ggcgcgccagtcctccccggagtgcagtcaagttgaccaagaagcgggcactgtccatctcacctctgtcggatgccagcctggacctgcagacggttatccgcacctcacccagctccctcgtagctttcatcaactcgcgatgcacatctccaggaggctcctacggtcatctctccattggcacccgactcggaccgatg

SEQ ID NO: 1778 - DNA, 203 bp, Artificial sequence
  synthetic
ggcgcgccagtcctaagatactcctcacctgctccttgaatgacagcgccacagaggtcacagggcaccgctggctgaaggggggcgtggtgctgaaggaggacgcgctgcccggccagaaaacggagttcaaggtggactccgacgaccagtggggagagtactcctgcgtcttcctccccgagccccgactcggaccgatg

SEQ ID NO: 1779 - DNA, 203 bp, Artificial sequence
  synthetic
ggcgcgccagtccttccggggcgggggcggggcctcactctgcgatataactcgggtcgcgcggctcgcgcaggccgccaccgtcgtccgcaaagcctgagtcctgtcctttctctctccccggacagcatgagcttcaccactcgctccaccttctccaccaactaccggtccctgggctctgtccacgactcggaccgatg

SEQ ID NO: 1780 - DNA, 203 bp, Artificial sequence
  synthetic
ggcgcgccagtcctcaatctccgcctctgattggctgagcccccggctccccgctccccctctcctccatccccggtgaaaactgcgggctccgagctgggtgcagcaaccggaggcggcggcgcgtctggaggaggctgcagcagcggaagaccccagtccagatccaggactgagatcccagaacccgactcggaccgatg

SEQ ID NO: 1781 - DNA, 203 bp, Artificial sequence
  synthetic
ggcgcgccagtcctatgctgtccacttcctctgtaaagctctcaaccctgtccccttccccctctctcctgggaaagagccctcccatgcctagctgctgctcttagggaccctgtggctaggtgcgcggatggaaatccaggatctccgcctggttcggcccgcctgcctccactcctgcctctacccgactcggaccgatg

SEQ ID NO: 1782 - DNA, 203 bp, Artificial sequence
  synthetic
ggcgcgccagtcctgcagcctcgagggccaacaacacctgctgtccgtgtccatgcccggttggccaccccgtttctgggggcatgagcttcaccactcgctccaccttctccaccaactaccggtccctgggctctgtccaggcgcccagctacggcgcccggccggtcagcagcgcggccagcgtccgactcggaccgatg

SEQ ID NO: 1783 - DNA, 203 bp, Artificial sequence
  synthetic
ggcgcgccagtcctagtgcttctgcggcaggagcccgtggacaaggcccactgcctgagcctgaactaggagcacctcctagggactgcccaggcttgctctgctctgacccttctgctggccagtctgggcacctggcccctgagggagggagctgtcagccagggaaaaccgagaacaccatcacccgactcggaccgatg

SEQ ID NO: 1784 - DNA, 203 bp, Artificial sequence
  synthetic
ggcgcgccagtcctctggttcctaggcctcctctccctgctggcagatgggaacaggttcttcttgaggaaactgaggcaaagaggagggcaggtctgagggaccccgcttgggctggcctcacccgcacactgggagggcagccaggtggggactctgacctgggggcttctggaggagaggatgagcgactcggaccgatg

SEQ ID NO: 1785 - DNA, 203 bp, Artificial sequence
  synthetic
ggcgcgccagtcctgtggcagtgggcgcagggcggggcgagctcagcggagggcgggtttgaatgtgccccggcgggagagggaagctgcagcgagagcgcgcggatctcagcgcgggagcagtgcttctgcggcaggcccctgagggagggagctgtcagccagggaaaaccgagaacaccatcacccgactcggaccgatg

SEQ ID NO: 1786 - DNA, 203 bp, Artificial sequence
  synthetic
ggcgcgccagtcctcactcctgtgtttgacctgaagtcctctcgagctgcagaagcctgaagaccaaggagtggaaagttctccggcagccctgagatctcaagagtgacatttgtgagaccagctaatttgattaaaattctcttggaatcagctttgctagtatcatacctgtgccagatttcatccgactcggaccgatg

SEQ ID NO: 1787 - DNA, 203 bp, Artificial sequence
  synthetic
ggcgcgccagtcctgttccatccttctgcacagggtatcgcctctctccgtttggtacatcccctcctcccccacgcccggactggggtggtagacgccgcctccgctcatcgcccctccccatcggtttccgcgcgaaaagccggggcgcctgcgctgccgccgccgcgtctgctgaagcctccgagcgactcggaccgatg

SEQ ID NO: 1788 - DNA, 203 bp, Artificial sequence
  synthetic
ggcgcgccagtcctagggtttgaaccggaagcgggagtaggtagctgcgtggctaacggagaaaagaagccgtggccgcgggaggaggcgagaggagtcgggatctgcgctgcagccaccgccgcggttgatactactttgaccttccgagtgcagtgacagtgatgtgtgttctgaaattgtgaacccgactcggaccgatg

SEQ ID NO: 1789 - DNA, 203 bp, Artificial sequence
  synthetic
ggcgcgccagtcctcgaggccagggggcgggagggccgcagctccggcgccgccgcgtcccgccagaacgatcgccgcggccggaagagttggcgctcggggcggactccttggaactggcttagcgcacccatcccaccttcccgcaccctgggaccggtccaacgagcgctcctccaagcggagcccgactcggaccgatg

SEQ ID NO: 1790 - DNA, 203 bp, Artificial sequence
  synthetic
ggcgcgccagtcctacggggacgagcaggagcgctctcgacttttctagagcctcagcgtcctaggactcacctttccctgatcctgcaccgtccctctcctggccccagactctccctcccactgttcacgaagcccaggtacccactgatggtaatgctggcctgctggctgaaccccagattgcccgactcggaccgatg

SEQ ID NO: 1791 - DNA, 203 bp, Artificial sequence
  synthetic
ggcgcgccagtcctcctgcttcctggccgagggcgggcgagcggagcctgctttcgcagcgatcgcgagcgtgtggcgattgcttctgtctgttatttagatatggaagctgaggggatgcacagaggcagccagaacctaggtcagggtctcgctcggtgctgaccgcccccggggtcgagtaggcgcgactcggaccgatg

SEQ ID NO: 1792 - DNA, 203 bp, Artificial sequence
  synthetic
ggcgcgccagtcctgacaactcggtggtggccactgcgcagaccagacttcgctcgtactcgtgcgcctcgcttcgcttttcctccgcaaccatgtctgacaaacccgatatggctgagatcgagaaattcgataagtcgaaactgaagaagacagagacgcaagagaaaaatccactgccttccaaacgactcggaccgatg

SEQ ID NO: 1793 - DNA, 203 bp, Artificial sequence
  synthetic
ggcgcgccagtccttcaccacggcggcagccctttaaacccctcacccagccagcgccccatcctgtctgtccgaacccagacacaagtcttcactccttcctgcgagccctgaggaagccttctttccccagacatggccaacaagggtccttcctatggcatgagccgcgaagtgcagtccaaaatcgactcggaccgatg

SEQ ID NO: 1794 - DNA, 203 bp, Artificial sequence
  synthetic
ggcgcgccagtcctgcccgcggtgggccgacttcccctcctcttccctctctccttcctttagcccgctggcgccggacacgctgcgcctcatctcttggggcgttcttccccgttggccaaccgtcgcatcccgtgcaactttggggtagtggccgtttagtgttgaatgttccccaccgagagcgccgactcggaccgatg

SEQ ID NO: 1795 - DNA, 203 bp, Artificial sequence
  synthetic
ggcgcgccagtccttgacttggctagtgcagaggaattgatggaaaccaccggggtgagagggaggctccccatctcagccagccacatccacaaggtgtgtgtaagggtgcaggcgccggccggttaggccaaggctctactgtctgttgcccctccaggagaacttccaaggagctttccccagaccgactcggaccgatg

SEQ ID NO: 1796 - DNA, 203 bp, Artificial sequence
  synthetic
ggcgcgccagtcctcaccctgggaccggtcggaacgagctgattgcccgctacatcaagctccggacagggaagacccgcaccaggaagcaggtctccagccacatccaggtgctggctcgtcgcaaagctcgcgagatccaggccaagctaaaggaccaggcagctaaggacaaggccctgcagagccgactcggaccgatg

SEQ ID NO: 1797 - DNA, 203 bp, Artificial sequence
  synthetic
ggcgcgccagtcctcatcctcctgctgaagtgacaagccacgctgcttctggagccaaagctgaccaagaagaacaaatccaccccagatctagactcaggtcacctcctgaagccctcgttcagggtcgatatccccacatcaaggacggtgaggatcttaaagaccactcaacagaaagtaaaaaacgactcggaccgatg

SEQ ID NO: 1798 - DNA, 203 bp, Artificial sequence
  synthetic
ggcgcgccagtcctcacgcgggggacggcctgccggcggggacgacagcattgcgcctgggtgcagcagtgtgcgtctcggggaagggaagatattttaaggcgtgtctgagcagacggggaggcttttccaaacccaggcagcttcgtggcgtgtgcggtttcgacccggtcacacaaagcttcagccgactcggaccgatg

SEQ ID NO: 1799 - DNA, 203 bp, Artificial sequence
  synthetic
ggcgcgccagtcctgtctgagcagacggggaggcttttccaaacccaggcagcttcgtggcgtgtgcggtttcgacccggtcacacaaagcttcagcatgtcatgtggtaggtgaggccggcgcctgtaggctggcggtttccttcctcttggtctttgtagagacagtttgcagaacagcggagaaacgactcggaccgatg

SEQ ID NO: 1800 - DNA, 203 bp, Artificial sequence
  synthetic
ggcgcgccagtcctgagtatttgaggctcggagccaccgccccgccggcgcccgcagcacctcctcgccagcagccgtccggagccagccaacgagcggaaaatggcagacaatttttcgctccatgatgcgttatctgggtctggaaacccaaaccctcaaggatggcctggcgcatgggggaaccacgactcggaccgatg

SEQ ID NO: 1801 - DNA, 203 bp, Artificial sequence
  synthetic
ggcgcgccagtcctgactgagagcagggagcagcaggcatggggcatgccgggtgccagttcaaagccctgctgtggaagaattggctctgcagactcaggaacccggtccttttccttgctgaattcttctggccttgtatcctgtttgtaattctgacagttcttcgttttcaagaacctcccagacgactcggaccgatg

SEQ ID NO: 1802 - DNA, 203 bp, Artificial sequence
  synthetic
ggcgcgccagtcctctatttgagtttgtggcgcgcgaggccctgcagtccgggttggcgcttgggtactggctgggtccgatgctgggtacgctgcgcgccatggagggcgaggacgtggaagacgaccagctgctgcagaagctcagggccagtcgccgccgcttccagaggcgcatgcagcggctgcgactcggaccgatg

SEQ ID NO: 1803 - DNA, 203 bp, Artificial sequence
  synthetic
ggcgcgccagtcctggagtctcactgtgttgcccaggctggagtgcagtggcgccatcttggctcactgcagtgcgcctctgccccccgagttcaagcgattctcctgcctcaggctcctgagtagctgggactacaggtcatcatcagatttgaaatatttaaagtggatacaaaactatttcagcacgactcggaccgatg

SEQ ID NO: 1804 - DNA, 203 bp, Artificial sequence
  synthetic
ggcgcgccagtcctgccagaaccggtggagcagcgacccctgagcagtgttctctgtgctgagcggcgggactgagctgttgagttagagccaacatgagtgagcgacaaggtgctggggcaaccaatggaaaagacaagacatctggtgaaaatgatggacagaagaaagttcaagaagaatttgaccgactcggaccgatg

SEQ ID NO: 1805 - DNA, 203 bp, Artificial sequence
  synthetic
ggcgcgccagtcctccgctgagctgctctgttcccggcttagaggaccaggagaagggggagctggaggctggagcctgtaacaccgtggctcgtctcactctggatggtggtggcaacagagatggcagcgcagctggagtgttaggagggcggcctgagcggtaggagtggggctggagcagtaagcgactcggaccgatg

SEQ ID NO: 1806 - DNA, 203 bp, Artificial sequence
  synthetic
ggcgcgccagtcctaaagcggccatgttttacatatttcttgattttgtttgttttctcgtgagcttaggccgctggttttggtgatttttgtctgattgcaatgtctggacgtggtaagcaaggaggcaaagctcgcgccaaagcgaaatcccgctcttctcgcgctggtctccagttcccggtgggcgactcggaccgatg

SEQ ID NO: 1807 - DNA, 203 bp, Artificial sequence
  synthetic
ggcgcgccagtcctctcactctcctggaaacccaccgagaacctccaccctctgacaccatggtcaactcctgttgtggctctgtgtgctctgaccagggctgtggcctggagaactgctgccgccccagctgctgccagaccacctgctgcaggaccacctgctgccgccccagctgctgtgtgtcccgactcggaccgatg

SEQ ID NO: 1808 - DNA, 203 bp, Artificial sequence
  synthetic
ggcgcgccagtcctggtgcagtccctggagggttctcacgctttggctgtctggacttttaagtttttccgctttttcaggaaggcgaccggcagcctcgggcaggggagacaggactgtatgtcagagaagagacggcgcttggacgccaggaatcctctgaagcaggagactgccctatccagaagcgactcggaccgatg

SEQ ID NO: 1809 - DNA, 203 bp, Artificial sequence
  synthetic
ggcgcgccagtcctgccaggctccacgtcaaatccagtttgaaacacagaccctaggaccacgcaggaggtggtgggctcgcaggaaggttcctctcccagtggccatgggtagcaacagtgggcaggctggccgccacatctataaatccctagctgatgatggcccctttgactctgtggagccgccgactcggaccgatg

SEQ ID NO: 1810 - DNA, 203 bp, Artificial sequence
  synthetic
ggcgcgccagtcctgcctgcaacgcgccctggcactcaccggtgggcgaaatttccccgcctccacgtgagagccagctccgccgtgacccggaagtccacttcgagtcgccggcccaccctctcgggttccggcttcttccgggtcgcggccttccggcgaacgcggttaccgtggaaaccgcggcccgactcggaccgatg

SEQ ID NO: 1811 - DNA, 203 bp, Artificial sequence
  synthetic
ggcgcgccagtcctgaagagtggaacccatacttgctggtctgatccatgcacaaggcggggctgctaggcctctgtgcccgggcttggaattcggtgcggatggccagctccgggatgacccgccgggacccgctcgcaaataaggtggccctggtaacggcctccaccgacgggatcggcttcgcccgactcggaccgatg

SEQ ID NO: 1812 - DNA, 203 bp, Artificial sequence
  synthetic
ggcgcgccagtcctctttttcgcaacgggtttgccgccagaacacaggtgtcgtgaaaactacccctaaaagccaaaatgggaaaggaaaagactcatatcaacattgtcgtcattggacacgtagattcgggcaagtccaccactactggccatctgatctataaatgcggtggcatcgacaaaagacgactcggaccgatg

SEQ ID NO: 1813 - DNA, 203 bp, Artificial sequence
  synthetic
ggcgcgccagtcctcaaccctgccgactcagccggaaccggctcccggcccgaggggcgtggtgtcctggtgctccgactccttccgcaggctccttgggacccgcggttccgggagtcccttgctcagggtccctttcctgcagtgaggcgccgtccgccttccctgtgtccccgcagacccccatccgactcggaccgatg

SEQ ID NO: 1814 - DNA, 203 bp, Artificial sequence
  synthetic
ggcgcgccagtccttgcagaggatccagtccagatcccaggagagcccctctgccccttcggacctcgtctcccatctacaaaacgtgaagattggcccagttagcgtgtctctacaaaaaggtgcatataccactgccccgctgcaggctgatctgagaaagcctctggcccagggcagataccgcccgactcggaccgatg

SEQ ID NO: 1815 - DNA, 203 bp, Artificial sequence
  synthetic
ggcgcgccagtcctaagtgctggctacctgctgagcgcccccgtaactctgacacagtagtaatttgagcctctgcaattgccgtctgcttcctgtgaaagtcctttccgtgcccactgacccttgagtgggcctttgagctgctgactttcagctggaacttgaagggaccccaaccctgagacactcgactcggaccgatg

SEQ ID NO: 1816 - DNA, 203 bp, Artificial sequence
  synthetic
ggcgcgccagtcctagcttcatgcctgctgacatcacgaaccagccagttccctccagctgcagagagcttcagtttgtctttttttttttaaactaaaatggaggctggtttcttgccttaaggagcccattgcctttcccgctgaagtctagatgttgacatgtaataaagcgggcagcaggatggcgactcggaccgatg

SEQ ID NO: 1817 - DNA, 203 bp, Artificial sequence
  synthetic
ggcgcgccagtcctgcactccgctcctttcctgcgtcaccgctacacatgcgccttgcaaggaagggcgagatttcgggggcagggcggggggcgggcctaggccggggtctcacagcgactgcgcggacgggttcctgagtggaacatggcgacttgcgccgaaatcctgcggagcgagttccccgacgactcggaccgatg

SEQ ID NO: 1818 - DNA, 203 bp, Artificial sequence
  synthetic
ggcgcgccagtcctcaccaggctgagctaagcagggccgccttgggcaggcctacgtggtggtgcaggcgagacccaggctgggcaaggcgcagtttcagtttccatcttgggtctctgagctgagcagagtggcaccaggctgagttaagtgggactgccctgggcagacctacctactagagcagacgactcggaccgatg

SEQ ID NO: 1819 - DNA, 203 bp, Artificial sequence
  synthetic
ggcgcgccagtcctggagccaaaatgctattgccctgtcttcatcaacatttaatcaagtgttgcggagataggaacatgggagagaaacaatctgggtaacatgaaagtgatgctggttgctaagggaaggcaacttgattctgtgggaagggctgtagctgatccatccgttgtctagatttgagtcgactcggaccgatg

SEQ ID NO: 1820 - DNA, 203 bp, Artificial sequence
  synthetic
ggcgcgccagtcctccctgcgtctctgcccgccccgtggcgcccgagtgcactgaagatggcggctgctgtaggacggttgctccgagcgtcggttgcccgacatgtgagtgccattccttggggcatttctgccactgcagccctcaggcctgctgcatgtggaagaacgagcttgacaaatttattcgactcggaccgatg

SEQ ID NO: 1821 - DNA, 203 bp, Artificial sequence
  synthetic
ggcgcgccagtcctgctgcagaggattcctgcagaggatcaagacagcacgtggacctcgcacagcctctcccacaggtaccatgaaggtctccgcggcagccctcgctgtcatcctcattgctactgccctctgcgctcctgcatctgcctccccatattcctcggacaccacaccctgctgctttgcgactcggaccgatg

SEQ ID NO: 1822 - DNA, 203 bp, Artificial sequence
  synthetic
ggcgcgccagtcctggttgggatctgaggggtcctctctgtgcccatcacagtttgagcttcagggaaaagaagaagaggtctttgcccttcgtttttccacgggaggagaatcaagagtgagccatggagctacgtgtggggaacaagtaccgcctgggacggaagatcgggagcgggtccttcggacgactcggaccgatg

SEQ ID NO: 1823 - DNA, 203 bp, Artificial sequence
  synthetic
ggcgcgccagtcctccagggctggaatggggccgcccggctccccatggcagtgggtgacgctgctgctggggctgctgctccctcctgccgcccccttctggctcctcaatgtgctcttccccccgcacaccacgcccaaggctgagctcagtaaccacacacggcccgtcatcctcgtgcccggctcgactcggaccgatg

SEQ ID NO: 1824 - DNA, 203 bp, Artificial sequence
  synthetic
ggcgcgccagtcctgaagtcccgcctcataagtggaaggatgaaattctcagaacagctaacctctaatgggagttggcttctgattctcattcaggcttctcacggcattcagcagcagcgttgctgtaaccgacaaagacaccttcgaattaagcacattcctcgattccagcaaagcaccgcaaccgactcggaccgatg

SEQ ID NO: 1825 - DNA, 203 bp, Artificial sequence
  synthetic
ggcgcgccagtcctccagcgaccgcggcaccgcctgtgcccgcccgcccctccgcagccgctacttaagaggctccagcgccggccccgccctagtgcgttacttacctcgactcttagcttgtcggggacggtaaccgggacccggtgtctgctcctgtcgccttcgcctcctaatccctagccactcgactcggaccgatg

SEQ ID NO: 1826 - DNA, 203 bp, Artificial sequence
  synthetic
ggcgcgccagtcctctccgcactgcaccccgacccaccccgcaccctccctttctgcaccctcgcacccacacccctcgcggttccagggggcggcggccccgggcggagcgctttcgcgtgcagccaccactccagaagacttaatgaagtagccagctgcagaagaatctggatcattagataaaacgactcggaccgatg

SEQ ID NO: 1827 - DNA, 203 bp, Artificial sequence
  synthetic
ggcgcgccagtcctccgccgcccgccctcgctctctcgcgctaccctcccgccgcccgcggtcctccgtcggttctctcgttagtccacggtctggtcttcagctacccgccttcgtctccgagtttgcgactcggggaccggcgtccccggcgcgaagaggctggactcggattcgttgcctgagcacgactcggaccgatg

SEQ ID NO: 1828 - DNA, 203 bp, Artificial sequence
  synthetic
ggcgcgccagtcctctccccgcctccttttcgggcgtcccgaggccgctccccaaccgacaaccaagaccccgcaggccacgcagccctggagccgaggccccccgacggcggaggcgcccgcgggtcccctacagccaaggtccctgagtgccagaggtggtggtgttgcttatcttctggaacccccgactcggaccgatg

SEQ ID NO: 1829 - DNA, 203 bp, Artificial sequence
  synthetic
ggcgcgccagtcctgcggcctcagatgaatgcggctgttaagacctgcaataatccagaatggctactctgatctatgttgataaggaaaatggagaaccaggcacccgtgtggttgctaaggatgggctgaagctggggtctggaccttcaatcaaagccttagatgggagatctcaagtttcaacacgactcggaccgatg

SEQ ID NO: 1830 - DNA, 203 bp, Artificial sequence
  synthetic
ggcgcgccagtcctacgttcctgccgggcaggacaggtgcatagggaactcctcagaggtctgtacctcgagggctcccatggatagccttgacagatcctgccaggactggtgcgacaggaagcaacactggttggagatcggaccaccggacttggtggagcgcaagggctccctgaccctccgctcgactcggaccgatg

SEQ ID NO: 1831 - DNA, 203 bp, Artificial sequence
  synthetic
ggcgcgccagtccttggggtttgtgaagtcgtggcccgttagcaggaagcctaacagtcgccccgacgctagtgagggacccaatctgagtccccggccagccgaatccaagccgtgtgtactgcgtgctcagcactgcccgacagtcctagctaaacttcgccaactccgctgcctttgccgccacccgactcggaccgatg

SEQ ID NO: 1832 - DNA, 203 bp, Artificial sequence
  synthetic
ggcgcgccagtcctccggcggcgcctcaggtcgcggggcgcctaggcctgggttgtcctttgcatctgcacgtgttcgcagtcgtttccgcgatgctgcctctgctgcgctgcgtgccccgtgtgctgggctcctccgtcgccggcctccgcgctgccgcgcccgcctcgcctttccggcagctcctgcgactcggaccgatg

SEQ ID NO: 1833 - DNA, 203 bp, Artificial sequence
  synthetic
ggcgcgccagtcctgcgcacgcagggtggggggagggagcgcacgacgtgcgcgcaccctctcccctcgtccaccgctgccgcctccttcttctgccgctcctggtgctgcttgtgtgctcgtttggtgcggacctggtacctcttttgtgaagcggcagctgaggagactccggcgctcgccatggccgactcggaccgatg

SEQ ID NO: 1834 - DNA, 203 bp, Artificial sequence
  synthetic
ggcgcgccagtcctggaagttcttgggagcgccagttccgtctgtgtgttcgagtggacaaaatggcgaagatcgccaagactcacgaagatattgaagcacagattcgagaaattcaaggcaagaaggcagctcttgatgaagctcaaggagtgggcctcgattctacaggttattatgaccaggaacgactcggaccgatg

SEQ ID NO: 1835 - DNA, 203 bp, Artificial sequence
  synthetic
ggcgcgccagtcctctggtctgctcacacttgctggcttgcgcatcaggactggctttatctcctgactcacggtgcaaaggtgcactctgcgaacgttaagtccgtccccagcgcttggaatcctacggcccccacagccggatcccctcagccttccaggtcctcaactcccgtggacgctgaacacgactcggaccgatg

SEQ ID NO: 1836 - DNA, 203 bp, Artificial sequence
  synthetic
ggcgcgccagtcctgcagggcggggcctgagcactaggcggcggcggctggcgtggggctgcttagatgcgccacggtttcggtagcgacggtatctctagccgggcctgagctgtgctagcacctcccccaggagaccgttgcagtcggccagcccccttctccacggccttgcccactaggtaacccgactcggaccgatg

SEQ ID NO: 1837 - DNA, 203 bp, Artificial sequence
  synthetic
ggcgcgccagtcctgagcggtcacgtgtgaggggcggcccgaggtcacgtgacggagcgccggagcggagggagccggggctgggagttctcctgagggaagaggagtggagtaggggggacgcggcggcggcgttgacaatgagttttcttggaggcttttttggtccaatttgtgagatcgatattcgactcggaccgatg

SEQ ID NO: 1838 - DNA, 203 bp, Artificial sequence
  synthetic
ggcgcgccagtcctcgccgcggcgcggagtcccggctgcgggatagaccgagggccatggccgcctctcccggacccgccggcgttggcggcgccggagcagtctacggctccggctcttcgggcttcgccctcgactcgggactggagatcaaaactcgctcggtggagcagacgctactcccgctgcgactcggaccgatg

SEQ ID NO: 1839 - DNA, 203 bp, Artificial sequence
  synthetic
ggcgcgccagtcctgcgcgctcccaggccgccccgaggcttggggtcttcgaaggataatcggcgcccggggccgaacagcgggggcacacggggcgctgccgaagtgcaaggccacggccagagctcgagcccgacgcgctgtctggagtcgtaggaccctgacgtggctgaagcggccccgggagccgactcggaccgatg

SEQ ID NO: 1840 - DNA, 203 bp, Artificial sequence
  synthetic
ggcgcgccagtcctctgggtcctctcagtggccagagaacagaaagaaaatctgactgtgcacgagcgaagggtgacaccgggcgtgcagcaccgacctgaaggcacctcttcgggggagcccgaaatttgaagattctctttcctgtcggagactacaaaccaaataaatagaaaaaactatccaagcgactcggaccgatg

SEQ ID NO: 1841 - DNA, 203 bp, Artificial sequence
  synthetic
ggcgcgccagtcctacggaaacgggcgtgccatttccgcgcacgtctgcagatgcggtagtcgattggtcaagtctcccatggctcctccttcatcaggaggtgggcaaaccgcgccatgatagggtcgggattggctggctctggaggcgcaggtggtccttcttctactgtcacatggtgcgcgctcgactcggaccgatg

SEQ ID NO: 1842 - DNA, 203 bp, Artificial sequence
  synthetic
ggcgcgccagtcctaccagcgtaggccgcatgagtggggggcgggctcccgcggtcctgctcggcggagtggtgagtgaccggccccgccccgccccttccggtcctcgaagcctcgaccgctacccgcaccctaaatcccagaggttggccccctgaggtgcctctctgctcctgtcttttgtttggcgactcggaccgatg

SEQ ID NO: 1843 - DNA, 203 bp, Artificial sequence
  synthetic
ggcgcgccagtcctgggattggctggctctggaggcgcaggtggtccttcttctactgtcacatggtgcgcgctgttttctaatcacgtggctgccacccaggtaagaagaggccgctcttcctggggttgtttctccgtgtgacgtgtggcctttgagatcaactctcctgtaccagcgtaggccgccgactcggaccgatg

SEQ ID NO: 1844 - DNA, 203 bp, Artificial sequence
  synthetic
ggcgcgccagtccttgggctcgcgcttccactccgccgcgccttcctcccagtttccgtccgctcgccgcaccggcttcgttcccccaaatctgggaccgtcccttcgcgccccctccccgtccgcccccagtgctgcgttctccccctcttggctctcctgcggctgggggaggggcgggggtcacccgactcggaccgatg

SEQ ID NO: 1845 - DNA, 203 bp, Artificial sequence
  synthetic
ggcgcgccagtcctcagccggccctcggcgggacgtgacgcagcgcccggggcgcgggtttgatatttgacaaattgatctaaaatggctgggtttttatctgaataactcactgatgccatcccagaaagtcggcaccaggtgtatttgatatagtgtttgcaacaaattcgacccaggtgatcaaacgactcggaccgatg

SEQ ID NO: 1846 - DNA, 203 bp, Artificial sequence
  synthetic
ggcgcgccagtcctccgagcgcccgccaggctcctcccgctcccgcgccgcctccctctacccacccgccgcacgtactaaggaaggcgcacagcccgccgcgctcgcctctccgccccgcgtccagctcgcccagctcgcccagcgtccgccgcgcctcggccaaggcttcaacggaccacaccaaacgactcggaccgatg

SEQ ID NO: 1847 - DNA, 203 bp, Artificial sequence
  synthetic
ggcgcgccagtcctgcgcgttgtgcgctgtcccaggttggaaaccagtgccccaggcggcgaggagagcggtgccttgcagggatgctgcgggcgggagcaccaaccggggacttaccccgggcgggagaagtccacaccgggaccaccatcatggcagtggagtttgacgggggcgttgtgatgggtcgactcggaccgatg

SEQ ID NO: 1848 - DNA, 203 bp, Artificial sequence
  synthetic
ggcgcgccagtcctcgggaggcagtggtagagggaggtggcggcagcggctagcggactcgagtctcaaccgggctgaggcggacacttctgtggagcgaagcagtgggagcatcgagcactagaggcggcaccgggatccccggctccggggaggggggcgcgggaccgggaggaggggagggggcgcgactcggaccgatg

SEQ ID NO: 1849 - DNA, 203 bp, Artificial sequence
  synthetic
ggcgcgccagtcctgggggtcacgtggtgcagagcacgcagagtccttctgtcggttggtcctggagcggcgcagccggagtggggccgtgaggagaataaaggcagccccgttgatgactgaaaatgacaaagcatccacctaacagacgaggaatcagctttgaagtgggagcccagttggaagcccgactcggaccgatg

SEQ ID NO: 1850 - DNA, 203 bp, Artificial sequence
  synthetic
ggcgcgccagtcctaatggactctagcctcctctgatagcctcatgccaggccccgtgcacattgctttgcttgcctccctcaatcctcatagcttctctttgggaagcctttgggtctgaagtgtctgtgagacctcacagaagagcacccctgggctccacttacctgccccctgctccttcagggcgactcggaccgatg

SEQ ID NO: 1851 - DNA, 203 bp, Artificial sequence
  synthetic
ggcgcgccagtcctgggcttatcccgcctgtcccgccattctcgctagttcgatcggtagcgggagcggagagcggaccccagagagccctgagcagccccaccgccgccgccggcctagttaccatcacaccccgggaggagccgcagctgccgcagccggccccagtcaccatcaccgcaaccatgcgactcggaccgatg

SEQ ID NO: 1852 - DNA, 203 bp, Artificial sequence
  synthetic
ggcgcgccagtcctctcccgggctggcagcagggccccagcggcaccatgtctgccctcggagtcaccgtggccctgctggtgtgggcggccttcctcctgctggtgtccatgtggaggcaggtgcacagcagctggaatctgcccccaggccctttcccgcttcccatcatcgggaacctcttccagcgactcggaccgatg

SEQ ID NO: 1853 - DNA, 203 bp, Artificial sequence
  synthetic
ggcgcgccagtcctattggctgagcccggctgtcagtcctttcgcgcctcggcggcgcggcatagcccggctcggcctgtaaagcagtctcaagcctgccgcagggagaagatggcggtcgccgtgagaactttgcaggaacagctggaaaaggccaaagagagtcttaagaacgtggatgagaacatcgactcggaccgatg

SEQ ID NO: 1854 - DNA, 203 bp, Artificial sequence
  synthetic
ggcgcgccagtcctctcttccgccgtcgtcgccgccatcctcggcgcgactcgcttctttcggttctacctgggagaatccaccgccatccgccaccatggtgaacttcacggtagaccagatccgcgccatcatggacaagaaggccaacatccgcaacatgtctgtcatcgcccacgtggaccatgcgactcggaccgatg

SEQ ID NO: 1855 - DNA, 203 bp, Artificial sequence
  synthetic
ggcgcgccagtcctgaactcgggttgcgcacttcccggcgctgggaacgcggagcggacgcagtctggccgccattgcgctgcggggaaagcggcctcttgtgtgagggcctgtgggattctccggatatggccggagtgtttccttatcgagggccgggtaacccggtgcctggccctctagccccgcgactcggaccgatg

SEQ ID NO: 1856 - DNA, 203 bp, Artificial sequence
  synthetic
ggcgcgccagtcctggcaacgccaaccgctccgctgcgcgcaggctgggctgcaggctctcggctgcagcgctgggctggtgtgcagtggtgcgaccacggctcacggcagcctcagccacccagatgtaagcgatctggttcccacctcagcctcccgagtagtggatctaggatccggcttccaaccgactcggaccgatg

SEQ ID NO: 1857 - DNA, 203 bp, Artificial sequence
  synthetic
ggcgcgccagtcctcgatgtcgcaccgcggcgtgcgcggtgtcggcagtagctgcggcgcaggggcggagcgaaggctgcggcggcgtcgggtacgcgcacacgttgcatcttcttcctttcgcggggtcctccgtagttctggcacgagccaggcgtactgacaggtggaccagcggactggtggagcgactcggaccgatg

SEQ ID NO: 1858 - DNA, 203 bp, Artificial sequence
  synthetic
ggcgcgccagtcctcagcaggggggaaaaaagagacaaaaacaaaacaaaaaacaacaaaaagcaacaccccccccttttattttcaaaagtagctagaggaaaaaaaaataaaacaacagccaaccaagtgaatcccaacccaaccccctgaagggctgaaaattctcgccttcttcagagcggggccgactcggaccgatg

SEQ ID NO: 1859 - DNA, 203 bp, Artificial sequence
  synthetic
ggcgcgccagtcctggctgaggcaacctgaaggaggagctctcattaccttctgcccatcacttaataaatagccagccaattcatcaacattctggtacactgttggagagatgagacagtcacaccagctgcccctagtggggctcttactgttttcttttattccaagccaactatgcgagatttcgactcggaccgatg

SEQ ID NO: 1860 - DNA, 203 bp, Artificial sequence
  synthetic
ggcgcgccagtcctcaccctcaggaccctcaccacccatcagagaagcctgtcattcactgccataaatgtggggagccttgcaagggtgaagtgcttcgggtccagaccaaacatttccacatcaagtgtttcacctgcaaagtgtgtggctgtgacctggcacaagggggcttcttcataaagaaccgactcggaccgatg

SEQ ID NO: 1861 - DNA, 203 bp, Artificial sequence
  synthetic
ggcgcgccagtcctgcaaaagtagacaatgagatcctggattacaaggatttagcagccattccgaaggtcaaggcaatttatgacattgaacgtccagatcttattacctatgagcctttctacacttcgggctatgatgacaaacaggagagacagagccttggagagtctccgaggactttgtctcgactcggaccgatg

SEQ ID NO: 1862 - DNA, 203 bp, Artificial sequence
  synthetic
ggcgcgccagtcctcctactccatcagcagaagggtaccaggatgttcgggatcggatgatccatcggtccacgagccagggctccatcaactcccctgtgtacagccgccacagctacactccaaccacgtcccgctctccccagcatttccacagacctggcaatgagccgtccagcggccggaaccgactcggaccgatg

SEQ ID NO: 1863 - DNA, 203 bp, Artificial sequence
  synthetic
ggcgcgccagtccttccaagttcccagcagcccaggcaccagaccccagcgagacaccaaagattgagacggaccactggcctggtcccccctcatttgctgtcgtaggacctgacatgaaacgcagatctagtggcagagaggaagatgatgaggaacttctgagacgtcggcagcttcaagaagagcgactcggaccgatg

SEQ ID NO: 1864 - DNA, 203 bp, Artificial sequence
  synthetic
ggcgcgccagtcctcaattaatgaagcttaactcaggcctgggacagttgatcttgaaagaagagatggagaaagagagccgggaaaggtcatctctgttagccagtcgctacgattctcccatcaactcagcttcacatattccatcatctaaaactgcatctctccctggctatggaagaaatgggcgactcggaccgatg

SEQ ID NO: 1865 - DNA, 203 bp, Artificial sequence
  synthetic
ggcgcgccagtcctgtcccactcgtgaatggcaattagagaaaggactgacagtggcggtgccccataggatgtcatattgaggcccaaacttgattggagaatttgcaaactaccgtcgctcagcaacaccaaaaagagaaagtctggttaaaacaccatgagtcaaatgtcgggccagccaacagtcgactcggaccgatg

SEQ ID NO: 1866 - DNA, 203 bp, Artificial sequence
  synthetic
ggcgcgccagtcctaacacttgccaagaagcatggcgtagaaatttctatgttccgaaacacagagtagtgtccacatgtgagcttttcacattaccttatgtatacaacaggagctgcgttgttttcttctttttcttttcctttatctgttgtccaacaacagtgctgactgtccggataagagctcgactcggaccgatg

SEQ ID NO: 1867 - DNA, 203 bp, Artificial sequence
  synthetic
ggcgcgccagtcctccatatcattcatggccaaaaaaaaccaaaaagcaaaaaacaaaaacaagtcccatgtcctactgactctagttcttccagtcgttatcctctgctgtctctctggcatcctatgaatcagatcaagcccatgctgttgttggtttttaaggtttctttcaataataggctaagcgactcggaccgatg

SEQ ID NO: 1868 - DNA, 203 bp, Artificial sequence
  synthetic
ggcgcgccagtcctgaaagacatgtttttctcttttaaatctctgcaactccaaagtagactccttcgaacgtatttaatttggccttttcagctttcttcttgcccagctctgtcgaattcatgggtgtgtgtgcacatgttggtttcactcacccagagtaattttgtgagcatgcatgtgcttttcgactcggaccgatg

SEQ ID NO: 1869 - DNA, 203 bp, Artificial sequence
  synthetic
ggcgcgccagtccttaatttctgcttgaatgtttgtcctgctgtgttgcagcttctaaagacattgtcaccgagtgtgtgtgactcaaagatcaagagtgaggctaaactgcgaccccaacatcacttccttcatggaaaggtgttggcgctgatgtagctcatggaaggatcagactgggaaccacacgactcggaccgatg

SEQ ID NO: 1870 - DNA, 203 bp, Artificial sequence
  synthetic
ggcgcgccagtcctcaggagggtaagccactttattatcatgctttggggctgtgcttaagaatttaagctctgttttaaagccgaagaagaaaacatttgaatttaccttcatatgccactaagaacaaaagctctgaagttcttcctgctggcaccaaatattaggattacaagctgtctctctgacgactcggaccgatg

SEQ ID NO: 1871 - DNA, 203 bp, Artificial sequence
  synthetic
ggcgcgccagtcctatgaggactactctcgtgtgtgtgtgtgtgtgtgtgtgtgtgtgtgtgtgtgtgtgtgtgtgtgttggatctactaacatgtttagcaaatggctctgacagggtggccatgagcagatgagaccagctcttgcttggttggaagccacactgcagtttgcagtttagcctttgcgactcggaccgatg

SEQ ID NO: 1872 - DNA, 203 bp, Artificial sequence
  synthetic
ggcgcgccagtcctgtgtctcagtggcttcttgcttattccatgctttttctatcccatcctctctctgtgccctcctgcaatggcagccttggcacaatgcctgggtgtcctcatccttgctttactctggaaagtgtggggatggagaggatggtgcatttccagtgcttccttacctgtcaataacgactcggaccgatg

SEQ ID NO: 1873 - DNA, 203 bp, Artificial sequence
  synthetic
ggcgcgccagtcctgcatgcttgtcctcaaaatgtccatcctggtcacagcacacaagatggctattggtctgcttttaccctaccctgtactatacatgaaaattccagttattaacacactcaaactggtggagcttgttcaccctaggaaggggattgtatatatggcaggcttccctggtgccgcgactcggaccgatg

SEQ ID NO: 1874 - DNA, 203 bp, Artificial sequence
  synthetic
ggcgcgccagtcctatgtaaagggctacatttgggaacatttgacttccttgggactcttaagtgcataatgatggcatgaagtaaaaggggcctcaatgatgataggaaaatcagttcttttaaaatttcttcaagaaaatccaggctatcacatagtctttctgtgtgacttattaggagataggacgactcggaccgatg

SEQ ID NO: 1875 - DNA, 203 bp, Artificial sequence
  synthetic
ggcgcgccagtcctcctcctgtgtatggaagagacaggtgaccgctccaggttgggtgctcacagaacccttttcctgactctcatggaagatggtggaaggaaaatagactgtctcatcaaccctcctgtgtcctctgaagcaatctcagtttttattaaccacctcttctgtgtttctggtagctacgactcggaccgatg

SEQ ID NO: 1876 - DNA, 203 bp, Artificial sequence
  synthetic
ggcgcgccagtccttgcagtgataccaacttatagcaatgatgtactttaagggaactacccaactatgttgtgatagaagaaagagaaaccttcactttggcatttttttttaatcactgtttatttttctgtttgcggcccaggaagcagtgggaggtggtggcagatatgctttgcatatggattcgactcggaccgatg

SEQ ID NO: 1877 - DNA, 203 bp, Artificial sequence
  synthetic
ggcgcgccagtcctttttggaaatatgaaagcaaatgtttagaagaattccttttgaaaagctgtgtcgtgttccctgtgaaactgagcaggtgtgtgttggcgcgctaagtgccacatgcttgtgtgtagaggaggaggtggccctgccggctccgcgctgctgtgcctgtgatccctacctgctcccgactcggaccgatg

SEQ ID NO: 1878 - DNA, 203 bp, Artificial sequence
  synthetic
ggcgcgccagtcctagaggaggaggtggccctgccggctccgcgctgctgtgcctgtgatccctacctgctccccgctcctgttgccagcagcactcactgcactcctttgtcatatactctgcatcactgtcatactcacaacttcgtgaataaagttgtgtgctttattcgtagaaaaaaaaaaaacgactcggaccgatg

SEQ ID NO: 1879 - DNA, 203 bp, Artificial sequence
  synthetic
ggcgcgccagtcctaagggggcttcttcataaagaacggagagtatctctgcaccctggactaccagcggatgtacgggacacgctgccatggctgtggggagttcgtggagggcgaagtggtgactgctctgggcaagacctaccatcccaattgctttgcttgtactatctgcaagcgcccgtttccgactcggaccgatg

SEQ ID NO: 1880 - DNA, 203 bp, Artificial sequence
  synthetic
ggcgcgccagtcctgctcaccaggtcatactatctatgcaaaagtagacaatgagatcctggattacaaggatttagcagccattccgaaggtcaaggcaatttatgacattgaacgtccagatcttattacctatgagcctttctacacttcgggctatgatgacaaacaggagagacagagccttgcgactcggaccgatg

SEQ ID NO: 1881 - DNA, 203 bp, Artificial sequence
  synthetic
ggcgcgccagtcctgagagtctccgaggactttgtctcctactccatcagcagaagggtaccaggatgttcgggatcggatgatccatcggtccacgagccagggctccatcaactcccctgtgtacagccgccacagctacactccaaccacgtcccgctctccccagcatttccacagacctggcacgactcggaccgatg

SEQ ID NO: 1882 - DNA, 203 bp, Artificial sequence
  synthetic
ggcgcgccagtcctcctcagaagatatcatcaagttttccaagttcccagcagcccaggcaccagaccccagcgagacaccaaagattgagacggaccactggcctggtcccccctcatttgctgtcgtaggacctgacatgaaacgcagatctagtggcagagaggaagatgatgaggaacttctgacgactcggaccgatg

SEQ ID NO: 1883 - DNA, 203 bp, Artificial sequence
  synthetic
ggcgcgccagtcctcaaatgtcgggccagccaacagtaacacttgccaagaagcatggcgtagaaatttctatgttccgaaacacagagtagtgtccacatgtgagcttttcacattaccttatgtatacaacaggagctgcgttgttttcttctttttcttttcctttatctgttgtccaacaacagcgactcggaccgatg

SEQ ID NO: 1884 - DNA, 203 bp, Artificial sequence
  synthetic
ggcgcgccagtccttttgtgagcatgcatgtgctttttaatttctgcttgaatgtttgtcctgctgtgttgcagcttctaaagacattgtcaccgagtgtgtgtgactcaaagatcaagagtgaggctaaactgcgaccccaacatcacttccttcatggaaaggtgttggcgctgatgtagctcatgcgactcggaccgatg

SEQ ID NO: 1885 - DNA, 203 bp, Artificial sequence
  synthetic
ggcgcgccagtcctaggattacaagctgtctctctgacaccagtggtaaaaaagcaagtagaatagtttctgagtctgtgttgcagcctctgacacgtggctcaccgctgtcatttgggggatggaatgaacagtcactgttctatagcatcctcctgtgctcttacctaaggaatctaaattgtcctcgactcggaccgatg

SEQ ID NO: 1886 - DNA, 203 bp, Artificial sequence
  synthetic
ggcgcgccagtcctagccttccattgctatgcactgaatgaggactactctcgtgtgtgtgtgtgtgtgtgtgtgtgtgtgtgtgtgtgtgtgtgtgtgtgttggatctactaacatgtttagcaaatggctctgacagggtggccatgagcagatgagaccagctcttgcttggttggaagccacaccgactcggaccgatg

SEQ ID NO: 1887 - DNA, 203 bp, Artificial sequence
  synthetic
ggcgcgccagtcctttgggaaacatgggcataatcaggtagttttgctaaaattcctcttccttggtctacataaagaagacatgggtctgtcatagaatggggacattagactgaaaactgggacaacccccttccttattttatagagactaggagttaaggggcctgcctaagattgcagtgatacgactcggaccgatg

SEQ ID NO: 1888 - DNA, 203 bp, Artificial sequence
  synthetic
ggcgcgccagtcctcacatttagttaaactgggctcagcatgcttgtcctcaaaatgtccatcctggtcacagcacacaagatggctattggtctgcttttaccctaccctgtactatacatgaaaattccagttattaacacactcaaactggtggagcttgttcaccctaggaaggggattgtatacgactcggaccgatg

SEQ ID NO: 1889 - DNA, 203 bp, Artificial sequence
  synthetic
ggcgcgccagtccttatggcaggcttccctggtgccgatgtaaagggctacatttgggaacatttgacttccttgggactcttaagtgcataatgatggcatgaagtaaaaggggcctcaatgatgataggaaaatcagttcttttaaaatttcttcaagaaaatccaggctatcacatagtctttctcgactcggaccgatg

SEQ ID NO: 1890 - DNA, 203 bp, Artificial sequence
  synthetic
ggcgcgccagtcctgtgtgacttattaggagataggaagagcattgggaaacttgcacagctagctatgcatctacattttggtttggggttagttatgaaatgttcttaatatgacgtgttcaataacttcacataaacttcctgttctccaaaacctcaaagagatagagttaatgagttgttgttcgactcggaccgatg

SEQ ID NO: 1891 - DNA, 203 bp, Artificial sequence
  synthetic
ggcgcgccagtccttaaagctaactgggtcttagcatcctcctgtgtatggaagagacaggtgaccgctccaggttgggtgctcacagaacccttttcctgactctcatggaagatggtggaaggaaaatagactgtctcatcaaccctcctgtgtcctctgaagcaatctcagtttttattaaccaccgactcggaccgatg

SEQ ID NO: 1892 - DNA, 203 bp, Artificial sequence
  synthetic
ggcgcgccagtcctctcttctgtgtttctggtagctatttaacctgtatttaatctgtacttcctatgccagcctcaattttatttgatttttacaattattctcttctaaccaatgaagtgtttgtcagtatgccccaaagcttgctcttttgtgctcccttttgaataactttctatccagaaaaacgactcggaccgatg

SEQ ID NO: 1893 - DNA, 203 bp, Artificial sequence
  synthetic
ggcgcgccagtcctagtctgaagagaggcgggacgcggggtgataacagctggctctggtgggcgggcgggagctggggaggaggagcaggagaggcccacaggcttcatttggagtcaggcctggctgttgctcaggtgaccagcttgtgtctctgggagggcgctgctttccccggccacccggcgcgactcggaccgatg

SEQ ID NO: 1894 - DNA, 203 bp, Artificial sequence
  synthetic
ggcgcgccagtcctccaaccaacgtggtgagctgagcgtcgggcagctgctcaagtggattgacaccacggcttgcctgtccgcggagaggcacgctggctgcccctgtgtcacagcttccatggatgacatctattttgagcacaccattagtgttggacaagtggtgaatatcaaggccaaggtgacgactcggaccgatg

SEQ ID NO: 1895 - DNA, 203 bp, Artificial sequence
  synthetic
ggcgcgccagtcctacagtgtggcggctgagcgccggcgcatgcgccttgtctatgcagacaccatcaaggacctcctggccaactgcgccattcagggcgatctggagagcagagactgtagccgcatggtgccggctgagaagacccgtgtggagagtgtggagctggtcctgcctccccacgccacgactcggaccgatg

SEQ ID NO: 1896 - DNA, 203 bp, Artificial sequence
  synthetic
ggcgcgccagtcctacagacgcggagagaccctctgctcaggcttctgcctctggcgcgagggggaccagctgaccaaggtatcctactacaaccaggccaccccaggtgttctcaactatgtgaccaccaacgtggccggcctctcctctgagttctacaccaccttcaaggcttgtgagcagtttccgactcggaccgatg

SEQ ID NO: 1897 - DNA, 203 bp, Artificial sequence
  synthetic
ggcgcgccagtcctggagggctgcgggctccgctatttgcaaatggatgccccagtgtccgggatgtgtggccagctgctgcaggcaggactccagcgtcaggatgttgccacttggagtatgaacaatgggcacggggttttcagccacagttccctcgaggccagtgttcagcaggatcatgccttcgactcggaccgatg

SEQ ID NO: 1898 - DNA, 203 bp, Artificial sequence
  synthetic
ggcgcgccagtccttgcctggtgcatgagaaactcttgtttcagctcttggcctttacccatgactcagcctgggggctggtgccggccttgcctgcagcaatgtagctgaggactggtctgaaggccaggagccctgtgctcttgacatcactgtactccctctccctccccgcaaccctgccccaccgactcggaccgatg

SEQ ID NO: 1899 - DNA, 203 bp, Artificial sequence
  synthetic
ggcgcgccagtcctactcagcctgggggctggtgccggccttgcctgcagcaatgtagctgaggactggtctgaaggccaggagccctgtgctcttgacatcactgtactccctctccctccccgcaaccctgccccaccttgcatccagggtatggtgtaaataaacctgtgttgccatggcaacagcgactcggaccgatg

SEQ ID NO: 1900 - DNA, 203 bp, Artificial sequence
  synthetic
ggcgcgccagtccttgacttatgctttttactgactttgccactatgggctgtctacacagctatggaataccgctggccctttggcaattacctatgtaagattgcttcagccagcgtcagtttcaacctgtacgctagtgtgtttctactcacgtgtctcagcattgatcgatacctggctattgtcgactcggaccgatg

SEQ ID NO: 1901 - DNA, 203 bp, Artificial sequence
  synthetic
ggcgcgccagtccttttctttttcttttcctggattccccaccaaatattcacttttctggatgtattgattcaactaggcatcatacgtgactgtagaattgcagatattgtggacacggccatgcctatcaccatttgtatagcttattttaacaattgcctgaatcctcttttttatggctttctcgactcggaccgatg

SEQ ID NO: 1902 - DNA, 203 bp, Artificial sequence
  synthetic
ggcgcgccagtcctggggaaaaaatttaaaagatattttctccagcttctaaaatatattcccccaaaagccaaatcccactcaaacctttcaacaaaaatgagcacgctttcctaccgcccctcagataatgtaagctcatccaccaagaagcctgcaccatgttttgaggttgagtgacatgttcgcgactcggaccgatg

SEQ ID NO: 1903 - DNA, 203 bp, Artificial sequence
  synthetic
ggcgcgccagtcctggtagcgccagtgccgattccgttttatccagaattaaccagcgcttagatatggtgccgcatttggagacagacatgatgcaaggaggcgtgtacggctcaggtggagaaaggtatgactcttatgagtcctgcgactcgagggccgtcctgagtgagcgcgacctgtaccggcgactcggaccgatg

SEQ ID NO: 1904 - DNA, 203 bp, Artificial sequence
  synthetic
ggcgcgccagtcctatgtgggaagaccccatgggggcccggggccagtgcatgtctggtgcctctcggctgccctccctcttctcccagaacatcatccccgagtacggcatgttccagggcatgcgaggtgggggcgccttcccgggcggctcccgctttggtttcgggtttggcaatggcatgaagcgactcggaccgatg

SEQ ID NO: 1905 - DNA, 203 bp, Artificial sequence
  synthetic
ggcgcgccagtcctttcattcccatgcagtttgggatcatccagaagcatctgaagaccatggatcacaaccggaaccgcaggctcatgatggagcagtccaagaagtcctccctcatggtggcccgcagtattctcaacaacaagctcatcagcaagaagctggagcgctacctgaagggcgagaaccgactcggaccgatg

SEQ ID NO: 1906 - DNA, 203 bp, Artificial sequence
  synthetic
ggcgcgccagtcctgatccaggggaggcgcctgtgaggcccggacctgccccggggcgaagggtatgtggcgagacagagccctgcacccctaattcccggtggaaaactcctgttgccgtttccctccaccggcctggagtctcccagtcttgtcccggcagtgccgccctccccactaagacctagcgactcggaccgatg

SEQ ID NO: 1907 - DNA, 203 bp, Artificial sequence
  synthetic
ggcgcgccagtcctaggctgtgggaagtctgtattagctgcagaagctgttagagatcattcccttttagaaggttgtttcccagggggagtgcattgggtttcagttgggaaacaagacaaatctgggcttctgatgaaactgcagaatctttgcacacggttggatcaggatgagagtttttcccacgactcggaccgatg

SEQ ID NO: 1908 - DNA, 203 bp, Artificial sequence
  synthetic
ggcgcgccagtcctgaaaccctgatatcaactttttataaagctcttaattgttgtgcagtattgcattcattacaaaagtgtttgtggttggatgaataatattaatgtagctttttcccaaatgaacatacctttaatcttgtttttcatgatcatcattaacagtttgtccttaggatgcaaatgcgactcggaccgatg

SEQ ID NO: 1909 - DNA, 203 bp, Artificial sequence
  synthetic
ggcgcgccagtccttcatacctcattgcagcctcagactcctgggttcaagcaatcctcctgcctcagcctcccaagtagctgagactacaggcacgagccaccacacccagctaatttttaagttttcttgtagagacagggtctcactatgttgtctaggctggtcttgaactcttggcctcaagtcgactcggaccgatg

SEQ ID NO: 1910 - DNA, 203 bp, Artificial sequence
  synthetic
ggcgcgccagtcctaatcctcctgcctcagcctcccaaagtgttgggattgcagatatgagccactggcctggccttcagcagttctttttgtgaagtaaaacttgtatgttggaaagagtagattttattggtctacccttttctcactgtagctgctggcagccctgtgccatatctggactctagcgactcggaccgatg

SEQ ID NO: 1911 - DNA, 203 bp, Artificial sequence
  synthetic
ggcgcgccagtcctgactgttataaagtataacaacacacatcaggttttaaaaagccttgaatggcccttgtcttaaaaagaaattaggagccaggtgcggtggcacgtgcctgtaatcccagctccttgggaggctaagacaggaggattccttgagccctggagtttgagtccagcctgggtgaccgactcggaccgatg

SEQ ID NO: 1912 - DNA, 203 bp, Artificial sequence
  synthetic
ggcgcgccagtcctgtctcgactggtccattcccggcccacccccattaaccggctcgagccactcccaggacgaagtcaaggcctcggaaggcgactacaactcccagcaggtcgagcagctccgcccgcgctgattctccattggccttccgggggtggggattagatgggaggtggccgtggggccgactcggaccgatg

SEQ ID NO: 1913 - DNA, 203 bp, Artificial sequence
  synthetic
ggcgcgccagtccttgcggccgggatttgtcccctcttcggcttccgtagaggaagtggcgcggaccttcatttggggtttcggttcccccccttccccttccccggggtctgggggtgacattgcaccgcgcccctcgtggggtcgcgttgccaccccacgcggactccccagctcgcgcgcccctccgactcggaccgatg

SEQ ID NO: 1914 - DNA, 203 bp, Artificial sequence
  synthetic
ggcgcgccagtcctccatttgcctgtcctggtcaggcccccaccccccttcccacctgaccagccatgggggctgcggtgtttttcggctgcactttcgtcgcgttcggcccggccttcgcgcttttcttgatcactgtggctggggacccgcttcgcgttatcatcctggtcgcaggggcatttttccgactcggaccgatg

SEQ ID NO: 1915 - DNA, 203 bp, Artificial sequence
  synthetic
ggcgcgccagtccttggctggtctccctgctcctggcctctgtggtctggttcatcttggtccatgtgaccgaccggtcagatgcccggctccagtacggcctcctgatttttggtgctgctgtctctgtccttctacaggaggtgttccgctttgcctactacaagctgcttaagaaggcagatgagcgactcggaccgatg

SEQ ID NO: 1916 - DNA, 203 bp, Artificial sequence
  synthetic
ggcgcgccagtcctctgacttcagcctttctgacagcagccattatcctgctccataccttttggggagttgtgttctttgatgcctgtgagaggagacggtactgggctttgggcctggtggttgggagtcacctactgacatcgggactgacattcctgaacccctggtatgaggccagcctgctgcgactcggaccgatg

SEQ ID NO: 1917 - DNA, 203 bp, Artificial sequence
  synthetic
ggcgcgccagtccttttctcaggcctgagggggaaccatttttggtgtgataaataccctaaactgcctttttttcttttttgaggtggggggagggaggaggtatattggaactcttctaacctccttgggctatattttctctcctcgagttgctcctcatggctgggctcatttcggtccctttccgactcggaccgatg

SEQ ID NO: 1918 - DNA, 203 bp, Artificial sequence
  synthetic
ggcgcgccagtccttccttggtcccagaccttgggggaaaggaaggaagtgcatgtttgggaactggcattactggaactaatggttttaacctccttaaccaccagcatccctcctctccccaaggtgaagtggagggtgctgtggtgagctggccactccagagctgcagtgccactggaggagtccgactcggaccgatg

SEQ ID NO: 1919 - DNA, 203 bp, Artificial sequence
  synthetic
ggcgcgccagtcctgcctttaccggtcgacatggttctcatctccctttgctttggactcagcattgcaaccatggtgcagtgctttggccatatcagcggtggccacatcaaccctgcagtgactgtggccatggtgtgcaccaggaagatcagcatcgccaagtctgtcttctacatcgcagcccacgactcggaccgatg

SEQ ID NO: 1920 - DNA, 203 bp, Artificial sequence
  synthetic
ggcgcgccagtcctcataggagctgtcctcgctggtggcctttatgagtatgtcttctgtccagatgttgaattcaaacgtcgttttaaagaagccttcagcaaagctgcccagcaaacaaaaggaagctacatggaggtggaggacaacaggagtcaggtagagacggatgacctgattctaaaacccgactcggaccgatg

SEQ ID NO: 1921 - DNA, 203 bp, Artificial sequence
  synthetic
ggcgcgccagtccttggagtggtgcatgtgattgacgttgaccggggagaggagaagaaggggaaagaccaatctggagaggtattgtcttcagtatgactagaagatcgcactgaaagcagacaagactccttagaactgtcctcagatttccttccacccattaaggaaacagatttgttataaatcgactcggaccgatg

SEQ ID NO: 1922 - DNA, 203 bp, Artificial sequence
  synthetic
ggcgcgccagtcctaggggcatgaaatgaatgaaagctttagcacttttttgcccctacatatgagacaacatattttgtatttcactcaaggctctgccagtaaaaagtaatgaaattgtacctttctaatgacatctatgcagcaggggtctatcgccttgtggatggcaccaaattatccaagtgcgactcggaccgatg

SEQ ID NO: 1923 - DNA, 203 bp, Artificial sequence
  synthetic
ggcgcgccagtcctgctgctcagtattgaagactttacaaggagattagaaatctttggaaaacatatgtgatgaaattgagctatatgatttatcagagatctgattccaaagagcacagaatactgttctcagaccatgaaaccagacaacacatgtattggtttaaactcgataatgacaggaaacgactcggaccgatg

SEQ ID NO: 1924 - DNA, 203 bp, Artificial sequence
  synthetic
ggcgcgccagtccttaacttagacaaagaagtgcaaatgtcaatttcactaaacaaaagctattagaagtaaagcagaaacctatcactgcaaggagtgacttgtaaataactgatgatcaagggctgtcttctctcaagcatggttccaactctgtgtcactttttagcgttaatggcagttgtgtgcgactcggaccgatg

SEQ ID NO: 1925 - DNA, 203 bp, Artificial sequence
  synthetic
ggcgcgccagtccttctgtggcagtgagataatggaccactattaaacctgattctcttcggtgctaggaaagagtgatgtgtgagattcccagagagtcgtcacaccagtgttatgcctgggagtgccactggcataccgcaggtgcctaaatcccaggcccctttctcagggggcgtggccacacccgactcggaccgatg

SEQ ID NO: 1926 - DNA, 203 bp, Artificial sequence
  synthetic
ggcgcgccagtcctaagagatcagagaggaaaaactgggaagacataaatgaattatacccagccatgaaacaatgccaactgtctcttccctaaggaagagtacaagtaccctaaaattgaaaggtggtccctacactgaaaacgcacatagtttgtcaaaagtgtacaaaagggaaagagtcttatcgactcggaccgatg

SEQ ID NO: 1927 - DNA, 203 bp, Artificial sequence
  synthetic
ggcgcgccagtccttttaagctttcaggctttcttaaaaacttggggaccagaatttcaatgtatgtttccattgttgaagataacattttcttcaaagagccttaaccttttgtactggaaggaaatattttctggacttaagtagttgcctaaatttaagattcctacactttatttctgccattgcgactcggaccgatg

SEQ ID NO: 1928 - DNA, 203 bp, Artificial sequence
  synthetic
ggcgcgccagtcctatgcttttcctaaacccttatactatctttttattatctgagccttttcctaatgcagctcataggtgctagctagagctgctgctcagtattgaagactttacaaggagattagaaatctttggaaaacatatgtgatgaaattgagctatatgatttatcagagatctgattcgactcggaccgatg

SEQ ID NO: 1929 - DNA, 203 bp, Artificial sequence
  synthetic
ggcgcgccagtcctatccttgcaccctggcaggaagctggtagctcacactttaacgggaggccttcacatattccagaaaagaaaccactttgcagtgccagactggaagaagtaacggtcactctgaaaacagggtgggagagctgcctctctttgaacctctcccaggaccaactctaacccaggcgactcggaccgatg

SEQ ID NO: 1930 - DNA, 203 bp, Artificial sequence
  synthetic
ggcgcgccagtcctaaatggttcacggctgacacatttggcatagatacctcatcctgtctacctttcatgaccaactacagttttcattgcaacgtctgccatcacagtgggaatacctatttcctccggaagcaagcaaacttgaaggaaatgtgccttagtgctttggccaacctgacatggcagcgactcggaccgatg

SEQ ID NO: 1931 - DNA, 203 bp, Artificial sequence
  synthetic
ggcgcgccagtcctgaacacccagatccaggcagtaaagatccagaagaagattaccccaaatttggacttttggatcaggaccttagtaacattggtcctgcttatgacaaccaaaaacagagcagtgctgtgtctactagtgggaatttaaatgggggaattgcagcaggaagcagcggaaaaggacgactcggaccgatg

SEQ ID NO: 1932 - DNA, 203 bp, Artificial sequence
  synthetic
ggcgcgccagtcctcgaggagccaagcgcaaacagcaggatggagggaccacagggaccaccaagaaggcccggagtgaccctttgttttctgctcagcgccttccccctcatggctacccattggaacacccgtttaacaaagatggctatcggtatattctagctgagcctgatccgcacgcccctcgactcggaccgatg

SEQ ID NO: 1933 - DNA, 203 bp, Artificial sequence
  synthetic
ggcgcgccagtccttgttttccaaggaaatggtaacctgtttctgagaacacctgaaatcaatggctatacattccaaaccaatctaaacgctatttccttttggtgtgggtttggttttgttcattttgaaatacacttttgaacactgagatccgtaaaactactagatctctggaagtgtaattgcgactcggaccgatg

SEQ ID NO: 1934 - DNA, 203 bp, Artificial sequence
  synthetic
ggcgcgccagtccttgagttgtgttttggctgctttcctattgctcccattcttgccaatcagccaccccctttcctgtgaaaatctgccaccttgaggagaggaacaagagtttaaaagggctaatgatctccctcccggtcttcccttggaacatggatgttgatatatgtgcgggtggtttcctgcgactcggaccgatg

SEQ ID NO: 1935 - DNA, 203 bp, Artificial sequence
  synthetic
ggcgcgccagtcctgtttaaaagggctaatgatctccctcccggtcttcccttggaacatggatgttgatatatgtgcgggtggtttcctgtcttgcttatcttcctttgccctgagctgatggctaaagggcagttttcggactattaaagactgaaatgtaagaatgagccttctaggctgggcgccgactcggaccgatg

SEQ ID NO: 1936 - DNA, 203 bp, Artificial sequence
  synthetic
ggcgcgccagtccttcaggcgggctccgtggatgaagagaatggccgacagttgggtgaggtagagctgcaatgtgggatttgtacaaaatggttcacggctgacacatttggcatagatacctcatcctgtctacctttcatgaccaactacagttttcattgcaacgtctgccatcacagtgggaacgactcggaccgatg

SEQ ID NO: 1937 - DNA, 203 bp, Artificial sequence
  synthetic
ggcgcgccagtcctacctgggaaaatgacttggccaaataacattgttaaaacaatgagtaaagaaagagatgtattcttggtaaaggaacacccagatccaggcagtaaagatccagaagaagattaccccaaatttggacttttggatcaggaccttagtaacattggtcctgcttatgacaaccacgactcggaccgatg

SEQ ID NO: 1938 - DNA, 203 bp, Artificial sequence
  synthetic
ggcgcgccagtcctttacttcccagccatctcactgtacaagagctgcacggtttccattaactttggaccatgcttcaagtatcctccgaaggatctcacttaccgccctatgagtgacatgggctggggcgccgtggtagagcacaccctggctgacgtcttgtatcacgtggagacagaagtggacgactcggaccgatg

SEQ ID NO: 1939 - DNA, 203 bp, Artificial sequence
  synthetic
ggcgcgccagtcctgtgaataatattgtccgagtaactaacttatttaaaagacatttccttctgtgggcattgactgtatcccacctgttttccaaggaaatggtaacctgtttctgagaacacctgaaatcaatggctatacattccaaaccaatctaaacgctatttccttttggtgtgggtttgcgactcggaccgatg

SEQ ID NO: 1940 - DNA, 203 bp, Artificial sequence
  synthetic
ggcgcgccagtccttttcctccgaagctctgtggtccgatctggggtccgcttgctttccctgcccggtcccgagcgctcagcctgaagcgccgctttcgagggcaccctgcatacactggccgcgcctcagggatctcattgcccgcgctttctcattgcctctttccgtgttcgattcggctgatccgactcggaccgatg

SEQ ID NO: 1941 - DNA, 203 bp, Artificial sequence
  synthetic
ggcgcgccagtccttgaaatggaaaatagtttatctgatcctgagaatgaacagacagttcagaaaagaaaatctaatgttgttatacaggaggaagaattagaattggctgttttggaagctggaagttctgaagctgtgaaaccaaaatgcactctagaagaaagacagcaatttatgaaagcattcgactcggaccgatg

SEQ ID NO: 1942 - DNA, 203 bp, Artificial sequence
  synthetic
ggcgcgccagtccttgatgaaagcagtcaagatacatctgaaaaatctcaggattgtgatgttcaatgtaaagcaaagcgtgacttcctaatgagtggtttgccagatttgttgaaacggcaaattgcaaagaaagctgctgcgctggatgtgtacaatgcagtgagtaccagtttccagagagtcgtcgactcggaccgatg

SEQ ID NO: 1943 - DNA, 203 bp, Artificial sequence
  synthetic
ggcgcgccagtcctggaggctgatgtcagccataaagaaaccaaaaggaaactcgtagaagcagaaaattctaagtcaaaaagaaagaaaccaaatgagtattcaaaaaatctggagaagaccaataggaagtcagaagaacttagcaaaagaaacaactcttctgggataaagctagattcttccaacgactcggaccgatg

SEQ ID NO: 1944 - DNA, 203 bp, Artificial sequence
  synthetic
ggcgcgccagtccttacaagtgacccaacatttagtttaatgtttgatggctgctttgaagaaatcaagttcagtactccttccctgctaaatgttgccagctacctacaaatgatttgcttaactgagaattttagaactgatgtaaaagactttgtaaccttgttaactgcaaatacttgtgatatcgactcggaccgatg

SEQ ID NO: 1945 - DNA, 203 bp, Artificial sequence
  synthetic
ggcgcgccagtcctgaaaacattggtaatattagatgatagtgatctatttgacactgacttggactttcctgatcaatctattagcctgtcctctgtatcatcttcctcaaatgcagaagaaagcaaaaccggagacgaagaaagcaaagccagagacaaaggaaacaatccagagacaaagaaatccgactcggaccgatg

SEQ ID NO: 1946 - DNA, 203 bp, Artificial sequence
  synthetic
ggcgcgccagtcctaacccttcgaaacatctgtaagactgagaagctaaaagaacaaggaaaaagtaaaagaagattcctgcactattttgaaggaattcatcttgacattccaaaagagactgtgaatactttggcagctgacttcccttaatgttccatactaacaatgctttgtatagattatcacgactcggaccgatg

SEQ ID NO: 1947 - DNA, 203 bp, Artificial sequence
  synthetic
ggcgcgccagtccttctcgccgccgcccgagcgcacccttcagcccgcgcgccggccgtgagtcctcggtgctcgcccgccggccagacaaacagcccgcccgaccccgtcccgaccctggccgccccgagcggagcctggagcaaaatgatgcttcaacacccaggccaggtctctgcctcggaagtcgactcggaccgatg

SEQ ID NO: 1948 - DNA, 203 bp, Artificial sequence
  synthetic
ggcgcgccagtccttgttgactcatgcaaatgaggtatctgaactgcagcttcagtattagcagagccacaggccgcctctgtggcatcaccagggtttctctgaagaagagggtctgcattttcctaaacccagtgctgctctcccatctcccatcttcctctcgcagcttgatgagccccggtgtgcgactcggaccgatg

SEQ ID NO: 1949 - DNA, 203 bp, Artificial sequence
  synthetic
ggcgcgccagtccttcccaggtacacccctgcatccaggcagcagcccaggccaccccctcctcactggcccttggctcctttcttgatgcctctgttgcttgtcccccaggagtcggagaagctggaaagtgtgaatgctgaactgaaggctcagattgaggagctcaagaacgagaagcagcatttcgactcggaccgatg

SEQ ID NO: 1950 - DNA, 203 bp, Artificial sequence
  synthetic
ggcgcgccagtcctcccaaaaccctgaagccattggagagctgtcttcctgtgtacctctagaatcccagcagcagagaaccatcaaggcgggagggcctgcagtgattcagcaggcccttcccattctgccccagagtgggtcttggaccagggcaagtgcatctttgcctcaactccaggatttagcgactcggaccgatg

SEQ ID NO: 1951 - DNA, 203 bp, Artificial sequence
  synthetic
ggcgcgccagtccttctcagatctggtttctaagagttttggggggcggggctgtcaccacgtgcagtatctcaagatattcaggtggccagaagagcttgtcagcaagaggaggacagaattctcccagcgttaacacaaaatccatgggcagtatgatggcaggtcctctgttgcaaactcagttccgactcggaccgatg

SEQ ID NO: 1952 - DNA, 203 bp, Artificial sequence
  synthetic
ggcgcgccagtcctcaaagtcacaggaagaaagcagaaagttcaacttccaaagggttaggactctccactcaatgtcttaggtcaggagttgtgtctaggctggaagagccaaagaatattccattttcctttccttgtggttgaaaaccacagtcagtggagagatgtttggaaaccacagtcagtcgactcggaccgatg

SEQ ID NO: 1953 - DNA, 203 bp, Artificial sequence
  synthetic
ggcgcgccagtccttgaaaggaaaaagaggcgacgagaaagaaataagattgcagctgcaaagtgccgaaacaagaagaaggagaagacggagtgcctgcagaaactcccaaggcccttttgggtccagaagacctgcatatgggctgttgactcatgcaaatgaggtatctgaactgcagcttcagtcgactcggaccgatg

SEQ ID NO: 1954 - DNA, 203 bp, Artificial sequence
  synthetic
ggcgcgccagtcctattagcagagccacaggccgcctctgtggcatcaccagggtttctctgaagaagagggtctgcattttcctaaacccagtgctgctctcccatctcccatcttcctctcgcagcttgatgagccccggtgtgtcccaggtacacccctgcatccaggcagcagcccaggccacccgactcggaccgatg

SEQ ID NO: 1955 - DNA, 203 bp, Artificial sequence
  synthetic
ggcgcgccagtcctccctcctcactggcccttggctcctttcttgatgcctctgttgcttgtcccccaggagtcggagaagctggaaagtgtgaatgctgaactgaaggctcagattgaggagctcaagaacgagaagcagcatttgatatacatgctcaaccttcatcggcccacgtgtattgtccgcgactcggaccgatg

SEQ ID NO: 1956 - DNA, 203 bp, Artificial sequence
  synthetic
ggcgcgccagtcctctctagaatcccagcagcagagaaccatcaaggcgggagggcctgcagtgattcagcaggcccttcccattctgccccagagtgggtcttggaccagggcaagtgcatctttgcctcaactccaggatttaggccttaacacactggccattcttatgttccagatggcccccacgactcggaccgatg

SEQ ID NO: 1957 - DNA, 203 bp, Artificial sequence
  synthetic
ggcgcgccagtcctaccacgtgcagtatctcaagatattcaggtggccagaagagcttgtcagcaagaggaggacagaattctcccagcgttaacacaaaatccatgggcagtatgatggcaggtcctctgttgcaaactcagttccaaagtcacaggaagaaagcagaaagttcaacttccaaagggcgactcggaccgatg

SEQ ID NO: 1958 - DNA, 203 bp, Artificial sequence
  synthetic
ggcgcgccagtcctttaggactctccactcaatgtcttaggtcaggagttgtgtctaggctggaagagccaaagaatattccattttcctttccttgtggttgaaaaccacagtcagtggagagatgtttggaaaccacagtcagtggagcctgggtggtacccaggctttagcattattggatgtcacgactcggaccgatg

SEQ ID NO: 1959 - DNA, 203 bp, Artificial sequence
  synthetic
ggcgcgccagtcctgctcagccagtccttgctgttgctgggggagtcacacagctccctaatcacgtggtgaatgtggtaccagccccttcagcgaatagcccagtgaatggaaaactttccgtgactaaacctgtcctacaaagtaccatgagaaatgtcggttcagatattgctgtgctaaggagacgactcggaccgatg

SEQ ID NO: 1960 - DNA, 203 bp, Artificial sequence
  synthetic
ggcgcgccagtcctctacaagtgtattatgcttcacccagaagttatcaagacttttttgaagccatccgcagaaggggagacacattttatgttgtgtcatttcgaagggatcacctgctgttaccagctaccacccataacaagaccacaagaccaaaaatgtcaattgtgttaccagcaataaaccgactcggaccgatg

SEQ ID NO: 1961 - DNA, 203 bp, Artificial sequence
  synthetic
ggcgcgccagtcctgatggttttgtgtttaaacagtcatcttcttttaaataatatccacctctcctttttgccatttcacttattgattcataaagtgaattttatttaaagctatgccacacatgcatgttcaaatggtttccactgattcgatttttcattcatttaatgcaaacccattctggacgactcggaccgatg

SEQ ID NO: 1962 - DNA, 203 bp, Artificial sequence
  synthetic
ggcgcgccagtcctcctgggtgattttcagacaagaaccattttctctggggaccattcttctgctgggtgccaaggaatataaggcaaatgcccagaagaccttcaggtgactgggcagtcttatcatgggatatttcttctggccctgccccttcccattctgtaatgtgaattagccacaccagacgactcggaccgatg

SEQ ID NO: 1963 - DNA, 203 bp, Artificial sequence
  synthetic
ggcgcgccagtcctagagcaggaaggtggtagcagggccggcagctctgccacagagctaggggtgcctgtaaggtgccgcctagagcagcctgggagctttgccttcttttgtctctcactagcccttctactctttgtcattgcctgttcttgagtggatctttgaaatgaggggacaggattctccgactcggaccgatg

SEQ ID NO: 1964 - DNA, 203 bp, Artificial sequence
  synthetic
ggcgcgccagtcctgaaaaggaacttgggattcaaattgatttttcaaatcatttttaaagagacatcatcctgactaaatcttagcctgaaccttcctcccctgtgtgtattccccggtagtcaccgcagcgagatgctggtgagactgccgtggtggcatttagcatcgttaaaactggaaaactccgactcggaccgatg

SEQ ID NO: 1965 - DNA, 203 bp, Artificial sequence
  synthetic
ggcgcgccagtcctgaataaagcctaaaagagaatgaaatataagaaatgttcgttcccacccctaataacatttggaagtgaatattcccattttcttccacccacagggattgggattgatttttaatttcctaggaaacaatactagactacccaaaaagatgttgccagaatccaaaaggaactcgactcggaccgatg

SEQ ID NO: 1966 - DNA, 203 bp, Artificial sequence
  synthetic
ggcgcgccagtccttaaataaatcataatttatcatttgccaaggccaacaaacaacactattgtgctgtttgctctcaatgaagttgaataaaccaggaggcttggcatatcccctttatgttaatcccagctagagattagtaggttgactttcacagcaattgtatattgatccattttaactcacgactcggaccgatg

SEQ ID NO: 1967 - DNA, 203 bp, Artificial sequence
  synthetic
ggcgcgccagtcctctgaggggggagtgttagagatgccatttcaccaggatctttttgctcaggttgtacccatgccaattgaagaacgtgttaaagatgaggaggagagatgtaccattctctcccttaataatgatgttggtttgcaaaacctaaagaaataataacaacagactatttcatactcgactcggaccgatg

SEQ ID NO: 1968 - DNA, 203 bp, Artificial sequence
  synthetic
ggcgcgccagtcctacctgcgcactaagctttgtgaccttgaaagagccaaccagaccctgaaggatgaatatgatgccctgcagatcacttttactgccttggagggaaaactgaggaaaactacggaagagaaccaggagctggtcaccagatggatggctgagaaagcccaggaagccaatcggccgactcggaccgatg

SEQ ID NO: 1969 - DNA, 203 bp, Artificial sequence
  synthetic
ggcgcgccagtcctcagccacgagacgctctgtctcttccttcccagtcccccaggacaatgtggatactcatcctggttctggtaaagaagtgagggtaccagctactgccttgtgtgtcttcgatgcacatgatggggaagtcaacgctgtgcagttcagtccaggttcccggttactggccactgcgactcggaccgatg

SEQ ID NO: 1970 - DNA, 203 bp, Artificial sequence
  synthetic
ggcgcgccagtcctatcgattacggcacacactcacgggacacagtgggaaagtgctgtctgctaagttcctgctggacaatgcgcggattgtctcaggaagtcacgaccggactctcaaactctgggatctacgcagcaaagtctgcataaagacagtgtttgcaggatccagttgcaatgatattgcgactcggaccgatg

SEQ ID NO: 1971 - DNA, 203 bp, Artificial sequence
  synthetic
ggcgcgccagtccttttcaaagcagcacagctcatccatcaatgcggtggcgtggtcgccctctggctcgcacgttgtcagtgtggacaaaggatgcaaagctgtgctgtgggcacagtactgacggggctctcagggctgggaggaccccagtgccctcctcagaagaagcacatgggctcctgcagcgactcggaccgatg

SEQ ID NO: 1972 - DNA, 203 bp, Artificial sequence
  synthetic
ggcgcgccagtcctcaggttcttgccttgggaaacactactagctctgaccttccatacctcacttgggggagcacagggccccgctgggcctcctcaccaacggcagtgccaaaatcagcccccacatcaaggtggtgttctctgtgctttctctcgtccttccaaagtcggttctggcctaacgcacgactcggaccgatg

SEQ ID NO: 1973 - DNA, 203 bp, Artificial sequence
  synthetic
ggcgcgccagtccttgtcccaacaccttgggttcatttgcccggtgaactcactttaagcattggattaacggaaactcccgaactacagacccctccctggtgggttgcatgaatgtgtctcattactgctgaaatgtcctcacatctctttcactgttcttcagagctttctggctctctttcccccgactcggaccgatg

SEQ ID NO: 1974 - DNA, 203 bp, Artificial sequence
  synthetic
ggcgcgccagtccttgcagagaatgaaaaagactccaggaggcggcaagcccggctgcagaaagagcttgcagaagcagcaaaggaacctctaccagtcgaacaggatgatgacattgaggtcattgtggatgaaacttctgatcacacagaagagacctctcctgtgcgagccatcagcagagcagccgactcggaccgatg

SEQ ID NO: 1975 - DNA, 203 bp, Artificial sequence
  synthetic
ggcgcgccagtcctcactaagcgactctcgcagcctgctggaggccttctggattctatcactaatatctttgggagacgctctgtctcttccttcccagtcccccaggacaatgtggatactcatcctggttctggtaaagaagtgagggtaccagctactgccttgtgtgtcttcgatgcacatgacgactcggaccgatg

SEQ ID NO: 1976 - DNA, 203 bp, Artificial sequence
  synthetic
ggcgcgccagtccttggggaagtcaacgctgtgcagttcagtccaggttcccggttactggccactggaggcatggaccgcagggttaagctttgggaagtatttggagaaaaatgtgagttcaagggttccctatctggcagtaatgcaggaattacaagcattgaatttgatagtgctggatcttacgactcggaccgatg

SEQ ID NO: 1977 - DNA, 203 bp, Artificial sequence
  synthetic
ggcgcgccagtcctgggctgggaggaccccagtgccctcctcagaagaagcacatgggctcctgcagccctgtcctggcaggtgatgtgctgggtatagcatggacctcccagagaagctcaagctatgtggcactgtagctttgccgtgaatgggatttctgaagatttgactgaggtctctcttggcgactcggaccgatg

SEQ ID NO: 1978 - DNA, 203 bp, Artificial sequence
  synthetic
ggcgcgccagtcctcctggaagaataacactgaaaaaacctgacgctgcggtcacttagcagaggctcaggttcttgccttgggaaacactactagctctgaccttccatacctcacttgggggagcacagggccccgctgggcctcctcaccaacggcagtgccaaaatcagcccccacatcaaggtcgactcggaccgatg

SEQ ID NO: 1979 - DNA, 203 bp, Artificial sequence
  synthetic
ggcgcgccagtcctatgtcctcacatctctttcactgttcttcagagctttctggctctctttcccccacaaaattcgacatatttaaaaatctccgtgtggctttaaaaaatggttttttgtttttttgtttttttgaggtgggagaggatgtgtgaaaatcttttccagggaaatgggttcgctgccgactcggaccgatg

SEQ ID NO: 1980 - DNA, 203 bp, Artificial sequence
  synthetic
ggcgcgccagtcctcggagcgaggagttgaccctgagtgaggaagcgacctggagtgaagaggcgacccagagtgaggaggcgacccagggcgaagagatgaatcggagccaggaggtgacccgggacgaggagtcgacccggagcgaggaggtgaccagggaggaaatggcggcagctgggctcacccgactcggaccgatg

SEQ ID NO: 1981 - DNA, 203 bp, Artificial sequence
  synthetic
ggcgcgccagtcctgtgactgtcacccacagcaatgagaagcacgaccttcatgttacctcccagcagggcagcagtgaaccagttgtccaagacctggcccaggttgttgaagaggtcataggggttccacagtcttttcagaaactcatatttaagggaaaatctctgaaggaaatggaaacaccgcgactcggaccgatg

SEQ ID NO: 1982 - DNA, 203 bp, Artificial sequence
  synthetic
ggcgcgccagtcctagctgtttggacctctgggtgctttctttgggctggtgagagctctaatttgccttgggccagtttcaggtttataggccccctcagtcttcagatacatgagggcttctttgctcttgtgatcgtgtagtcccatagctgtaaaaccagaatcaccaggaggttgcacctagtcgactcggaccgatg

SEQ ID NO: 1983 - DNA, 203 bp, Artificial sequence
  synthetic
ggcgcgccagtcctcaggaatattgggaatggcctagaacaaggtgtttggcacataagtagaccacttatccctcattgtgacctaattccagagcatctggctgggttgttgggttctagactttgtcctcacctcccagtgaccctgactagccacaggccatgagataccagggggccgttcctcgactcggaccgatg

SEQ ID NO: 1984 - DNA, 203 bp, Artificial sequence
  synthetic
ggcgcgccagtcctcatttgaacctgggaggtagaggttgctgtgagccgagattacgcccctgcactccagcctgggtcacagagtgagactccatctcagaaaaaaaaaaaattgagtcaggtgcagtagctccttcctgtagtcccagctacttgggaggctgaggctagaggatcacttgagcccgactcggaccgatg

SEQ ID NO: 1985 - DNA, 203 bp, Artificial sequence
  synthetic
ggcgcgccagtccttagtcataatttatgcttaataacattgatagtagccctttgcgctataactctacctaaagactcacatcatttggcagagagagagtcgttgaagtcccaggaattcaggactgggcaggttaagacctcagacaaggtagtagaggtagacttgtggacaaggctcgggtccgactcggaccgatg

SEQ ID NO: 1986 - DNA, 203 bp, Artificial sequence
  synthetic
ggcgcgccagtcctcccattctctgatttttttcctcttgtcctctgcctctccctctagctcccacttcctctctgctctagttcattttctttagagcagcccgagtgatcatgaagtgcaaatcttgccatgtcagtcccctgcttagaaccctccaatggctcactttctctttaggcaaaagtcgactcggaccgatg

SEQ ID NO: 1987 - DNA, 203 bp, Artificial sequence
  synthetic
ggcgcgccagtcctctttaccccatgccttctcccatctcatctcaaccccctcatttgttggctgtctgctgtcagccactcttctttcaggtcctcagatgcactgcaccctctcctgcctgggggtctttgctcctgctactacctctgcttgaacagctcctcaccttccttcctccaaccctacgactcggaccgatg

SEQ ID NO: 1988 - DNA, 203 bp, Artificial sequence
  synthetic
ggcgcgccagtccttttctgtgaagcagaagtctgggaatcgatctggaaatcctcctaatttttactccctctccccgcgactcctgattcattgggaagtttcaaatcagctataactggagagtgctgaagattgatgggatcgttgccttatgcatttgttttggttttacaaaaaggaaacttcgactcggaccgatg

SEQ ID NO: 1989 - DNA, 203 bp, Artificial sequence
  synthetic
ggcgcgccagtcctgacctcgccgctgcagaccccggctgcccccggcgccgccgcggggcctgcgctcagcccggtgccacctgtggtccacctgaccctccgccaggccggcgacgacttctcccgccgctaccgccgcgacttcgccgagatgtccagccagctgcacctgacgcccttcaccgccgactcggaccgatg

SEQ ID NO: 1990 - DNA, 203 bp, Artificial sequence
  synthetic
ggcgcgccagtcctctgaaccggcacctgcacacctggatccaggataacggaggctgggtaggtgcacttggtgatgtgagtctgggctgaggccacaggtccgagatgcgggggttggagtgcgggtgggctcctggggcaatgggaggctgtggagccggcgaaataaaatcagagttgttgctacgactcggaccgatg

SEQ ID NO: 1991 - DNA, 203 bp, Artificial sequence
  synthetic
ggcgcgccagtcctaacgctggtcctcggccgggcgcgctgacgtcatcgtgcgtcagagtgagcccggatggggcggcgggcttcgggagcgcccgggctgatccgagccgagcgggccgtatctccttgtcggcgccgctgattcccggctctgcggaggcctctaggcagccgcgcagcttccgtcgactcggaccgatg

SEQ ID NO: 1992 - DNA, 203 bp, Artificial sequence
  synthetic
ggcgcgccagtcctgacagtcctattcaaaagcataaacagctatatcctagctgtagctttattcagaatctggtttcagctagtctgggatccacctctaagaatacgtctccaatgagaaacagttttgcacattcattatctcccaccttggaacatagtagcttgttcagtggttcttactcccgactcggaccgatg

SEQ ID NO: 1993 - DNA, 203 bp, Artificial sequence
  synthetic
ggcgcgccagtcctaaaccctcttaattctagagcagttgaagacatctcttcatcgaggactaacccctacagttatgcaatgagtactgaagaagccagatttcttacctaccatatgtggccattaacttttttgtcaccatcagaattggcaagagctggtttttattatataggacctggagacgactcggaccgatg

SEQ ID NO: 1994 - DNA, 203 bp, Artificial sequence
  synthetic
ggcgcgccagtccttagggtagcctgctttgcctgtggtgggaagctcagtaactgggaaccaaaggatgatgctatgtcagaacaccggaggcattttcccaactgtccatttttggaaaattctctagaaactctgaggtttagcatttcaaatctgagcatgcagacacatgcagctcgaatgagcgactcggaccgatg

SEQ ID NO: 1995 - DNA, 203 bp, Artificial sequence
  synthetic
ggcgcgccagtcctagtctatattttaacctgcataaaaaggtctttaaaatattgttgaacacttgaagccatctaaagtaaaaagggaattatgagtttttcaattagtaacattcatgttctagtctgctttggtactaataatcttgtttctgaaaagatggtatcatatatttaatcttaatccgactcggaccgatg

SEQ ID NO: 1996 - DNA, 203 bp, Artificial sequence
  synthetic
ggcgcgccagtcctcatctctacattcaagaactggcccttcttggagggctgcgcctgcaccccggagcggatggccgaggctggcttcatccactgccccactgagaacgagccagacttggcccagtgtttcttctgcttcaaggagctggaaggctgggagccagatgacgaccccatagaggacgactcggaccgatg

SEQ ID NO: 1997 - DNA, 203 bp, Artificial sequence
  synthetic
ggcgcgccagtcctctagagctgacagctttgttcgcgtgggcagagccttccacagtgaatgtgtctggacctcatgttgttgaggctgtcacagtcctgagtgtggacttggcaggtgcctgttgaatctgagctgcaggttccttatctgtcacacctgtgcctcctcagaggacagtttttttgcgactcggaccgatg

SEQ ID NO: 1998 - DNA, 203 bp, Artificial sequence
  synthetic
ggcgcgccagtcctgtaagatgatggatttgattcgccctcctccctgtcatagagctgcagggtggattgttacagcttcgctggaaacctctggaggtcatctcggctgttcctgagaaataaaaagcctgtcatttcaaacactgctgtggaccctactgggtttttaaaatattgtcagtttttcgactcggaccgatg

SEQ ID NO: 1999 - DNA, 203 bp, Artificial sequence
  synthetic
ggcgcgccagtcctaccaacgacaccactgaagacaactccagttgcctctcaacagaatgcttcaagtgtttgtgaagaaaaacctatacctgctgaacgccaccgagggtcaagtcacagacaagaagctgtgcagtcaccagtgtttcctcctgcccagaaacaaatccaccaaaaacccatacccgactcggaccgatg

SEQ ID NO: 2000 - DNA, 203 bp, Artificial sequence
  synthetic
ggcgcgccagtcctgagaaaaagtcccaaaacttcatattttggattatgaatcatccagtaataaaatggaagatggagtcagctattgaagtggtcatccatttctttttaagaagctcatgtggacttgttctattgcctgacctgatgaactgttaatatctggtgaggttgagttatcatgctcgactcggaccgatg

SEQ ID NO: 2001 - DNA, 203 bp, Artificial sequence
  synthetic
ggcgcgccagtcctaagttttacttctccctagagcaggggtgtttgccagcagcctgcactctcagaaatcagacttgagtggccggaacccttgagaccagaggcttaccatgctgctccctaggagggccaggaactgctgacgtgaccactggacagttattcgtgtctcttacaattaccaaacgactcggaccgatg

SEQ ID NO: 2002 - DNA, 203 bp, Artificial sequence
  synthetic
ggcgcgccagtccttgctgacgaagaggagcagtggtccgatgactttgacagcgactatgaaaatccagatgagcactcggactcagagatgtacgtgatgcccgccgaggagaacgctgatgacagctacgagccgcctccagtagagcaggaaaccaggccggttcacccagccctgcccttcgccgactcggaccgatg

SEQ ID NO: 2003 - DNA, 203 bp, Artificial sequence
  synthetic
ggcgcgccagtcctcagaggcgagtatatagacaatcgatcaagccagaggcattccccacccttcagcaagacacttcccagtaagcccagctggccttcagagaaagcaaggctcacctccaccctgccggccctgactgctttgcagaaacctcaagtcccacccaaacccaaaggcctccttgacgactcggaccgatg

SEQ ID NO: 2004 - DNA, 203 bp, Artificial sequence
  synthetic
ggcgcgccagtcctggatgaggctgattatgtggtccccgtggaagataatgatgaaaactatattcatcccacagaaagcagttcacctccacctgaaaaagctcccatggtgaatagatcaaccaagccaaattcctcaacgcccgcctctcctccaggaacagcttcaggtcgaaacagtggggccgactcggaccgatg

SEQ ID NO: 2005 - DNA, 203 bp, Artificial sequence
  synthetic
ggcgcgccagtcctctgggaaaccaagtcacctccaccagctgcaccatccccgttgccacgggccgggaaaaaaccaacgacaccactgaagacaactccagttgcctctcaacagaatgcttcaagtgtttgtgaagaaaaacctatacctgctgaacgccaccgagggtcaagtcacagacaagacgactcggaccgatg

SEQ ID NO: 2006 - DNA, 203 bp, Artificial sequence
  synthetic
ggcgcgccagtcctaagatgaatgcagagcccgagaggaagtttggcgtggtggtggttggtgttggccgagccggctccgtgcggatgagggacttgcggaatccacacccttcctcagcgttcctgaacctgattggcttcgtgtcgagaagggagctcgggagcattgatggagtccagcagattcgactcggaccgatg

SEQ ID NO: 2007 - DNA, 203 bp, Artificial sequence
  synthetic
ggcgcgccagtcctcagaaaggaaaagtcttgcacgaggagcatgttgaactcttgatggaggaattcgctttcctgaaaaaagaagtggtggggaaagacctgctgaaagggtcgctcctcttcacagctggcccgttggaagaagagcggtttggcttccctgcattcagcggcatctctcgcctgcgactcggaccgatg

SEQ ID NO: 2008 - DNA, 203 bp, Artificial sequence
  synthetic
ggcgcgccagtcctacccttcctcagcgttcctgaacctgattggcttcgtgtcgagaagggagctcgggagcattgatggagtccagcagatttctttggaggatgctctttccagccaagaggtggaggtcgcctatatctgcagtgagagctccagccatgaggactacatcaggcagttccttacgactcggaccgatg

SEQ ID NO: 2009 - DNA, 203 bp, Artificial sequence
  synthetic
ggcgcgccagtcctatgctggcaagcacgtccttgtggaataccccatgacactgtcattggcggccgctcaggaactgtgggagctggctgagcagaaaggaaaagtcttgcacgaggagcatgttgaactcttgatggaggaattcgctttcctgaaaaaagaagtggtggggaaagacctgctgacgactcggaccgatg

SEQ ID NO: 2010 - DNA, 203 bp, Artificial sequence
  synthetic
ggcgcgccagtccttggagacagagaagaaaagtccactgtcatggattgaagaaaaaggacctggtctaaaacgaaacagatatttaagcttccatttcaagtctgggtccttggagaatgtgccaaatgtaggagtgaataagaacatatttctgaaagatcaaaatatatttgtccagaaactctcgactcggaccgatg

SEQ ID NO: 2011 - DNA, 203 bp, Artificial sequence
  synthetic
ggcgcgccagtcctaatggcctccctttgaatatatgattttagccaccatcatagcgaattgcatcgtcctcgcactggagcagcatctgcctgatgatgacaagaccccgatgtctgaacggctggatgacacagaaccatacttcattggaattttttgtttcgaggctggaattaaaatcattgcgactcggaccgatg

SEQ ID NO: 2012 - DNA, 203 bp, Artificial sequence
  synthetic
ggcgcgccagtcctcccttgggtttgccttccacaaaggctcctacttgaggaatggctggaatgtcatggactttgtggtggtgctaacgggcatcttggcgacagttgggacggagtttgacctacggacgctgagggcagttcgagtgctgcggccgctcaagctggtgtctggaatcccaagttcgactcggaccgatg

SEQ ID NO: 2013 - DNA, 203 bp, Artificial sequence
  synthetic
ggcgcgccagtcctctccatgtgggacagaagagcccgcccgcacctgccccaatgggaccaaatgtcagccctactgggaagggcccaacaacgggatcactcagttcgacaacatcctgtttgcagtgctgactgttttccagtgcataaccatggaagggtggactgatctcctctacaatagcacgactcggaccgatg

SEQ ID NO: 2014 - DNA, 203 bp, Artificial sequence
  synthetic
ggcgcgccagtcctacgatgcctcagggaacacttggaactggttgtacttcatccccctcatcatcatcggctccttttttatgctgaaccttgtgctgggtgtgctgtcaggggagtttgccaaagaaagggaacgggtggagaaccggcgggcttttctgaagctgaggcggcaacaacagattgcgactcggaccgatg

SEQ ID NO: 2015 - DNA, 203 bp, Artificial sequence
  synthetic
ggcgcgccagtcctaagaagcagcgaaccagaaacttgccctacagaaagccaaggaggtggcagaagtgagtcctctgtccgcggccaacatgtctatagctgtgaaagagcaacagaagaatcaaaagccagccaagtccgtgtgggagcagcggaccagtgagatgcgaaagcagaacttgctggcgactcggaccgatg

SEQ ID NO: 2016 - DNA, 203 bp, Artificial sequence
  synthetic
ggcgcgccagtcctacgcccgggagggcagcctggagcaacccgggttctgggagggcgaggccgagcgaggcaaggccggggacccccaccggaggcacgtgcaccggcaggggggcagcagggagagccgcagcgggtccccgcgcacgggcgcggacggggagcatcgacgtcatcgcgcgcacccgactcggaccgatg

SEQ ID NO: 2017 - DNA, 203 bp, Artificial sequence
  synthetic
ggcgcgccagtcctcggccgctccccacggcagccttggccacgccggcctgccccagagcccagccaagatgggaaacagcaccgaccccggccccatgctggccatccctgccatggccaccaacccccagaacgccgccagccgccggacgcccaacaacccggggaacccatccaatcccggcccgactcggaccgatg

SEQ ID NO: 2018 - DNA, 203 bp, Artificial sequence
  synthetic
ggcgcgccagtccttgccaaaaaaagaggaagagaagaaggaggaggaggaagacgaccgtggggaagacggccctaagccaatgcctccctatagctccatgttcatcctgtccacgaccaacccccttcgccgcctgtgccattacatcctgaacctgcgctactttgagatgtgcatcctcatggcgactcggaccgatg

SEQ ID NO: 2019 - DNA, 203 bp, Artificial sequence
  synthetic
ggcgcgccagtccttcattgccatgagcagcatcgccctggccgccgaggaccctgtgcagcccaacgcacctcggaacaacgtgctgcgatactttgactacgtttttacaggcgtctttacctttgagatggtgatcaagatgattgacctggggctcgtcctgcatcagggtgcctacttccgtgcgactcggaccgatg

SEQ ID NO: 2020 - DNA, 203 bp, Artificial sequence
  synthetic
ggcgcgccagtccttggagatgtccattttctacgtcgtctactttgtggtgttccccttcttctttgtcaatatctttgtggccttgatcatcatcaccttccaggagcaaggggacaagatgatggaggaatacagcctggagaaaaatgagagggcctgcattgatttcgccatcagcgccaagccgactcggaccgatg

SEQ ID NO: 2021 - DNA, 203 bp, Artificial sequence
  synthetic
ggcgcgccagtcctcgctgacccgacacatgccgcagaacaagcagagcttccagtaccgcatgtggcagttcgtggtgtctccgcctttcgagtacacgatcatggccatgatcgccctcaacaccatcgtgcttatgatgaagttctatggggcttctgttgcttatgaaaatgccctgcgggtgtcgactcggaccgatg

SEQ ID NO: 2022 - DNA, 203 bp, Artificial sequence
  synthetic
ggcgcgccagtccttcaacatcgtcttcacctccctcttctctctggaatgtgtgctgaaagtcatggcttttgggattctgaattatttccgcgatgcctggaacatcttcgactttgtgactgttctgggcagcatcaccgatatcctcgtgactgagtttgggaatccgaataacttcatcaacccgactcggaccgatg

SEQ ID NO: 2023 - DNA, 203 bp, Artificial sequence
  synthetic
ggcgcgccagtcctgtaacattggcatcgacgtggaggacgaggacagtgatgaagatgagttccaaatcactgagcacaataacttccggaccttcttccaggccctcatgcttctcttccggagtgccaccggggaagcttggcacaacatcatgctttcctgcctcagcgggaaaccgtgtgatacgactcggaccgatg

SEQ ID NO: 2024 - DNA, 203 bp, Artificial sequence
  synthetic
ggcgcgccagtcctagtccacggacctcaccgtggggaagatctacgcagccatgatgatcatggagtactaccggcagagcaaggccaagaagctgcaggccatgcgcgaggagcaggaccggacacccctcatgttccagcgcatggagcccccgtccccaacgcaggaagggggacctggccagacgactcggaccgatg

SEQ ID NO: 2025 - DNA, 203 bp, Artificial sequence
  synthetic
ggcgcgccagtcctctcagtccgtggagatgcgagagatgggcagagatggctactccgacagcgagcactacctccccatggaaggccagggccgggctgcctccatgccccgcctccctgcagagaaccagaggagaaggggccggccacgtgggaataacctcagtaccatctcagacaccagcccgactcggaccgatg

SEQ ID NO: 2026 - DNA, 203 bp, Artificial sequence
  synthetic
ggcgcgccagtcctgccgggcacgggctcgggaccagcgctggtcccgctcgcccagcgagggccgagagcacatggcgcaccggcagggcagtagttccgtaagtggaagcccagccccctcaacatctggtaccagcactccgcggcggggccgccgccagctcccccagaccccctccacccccccgactcggaccgatg

SEQ ID NO: 2027 - DNA, 203 bp, Artificial sequence
  synthetic
ggcgcgccagtcctatcggccgcccacggggggccacagcagcggccgctcgcccaggatggagaggcgggtcccaggcccggcccggagcgagtcccccagggcctgtcgacacggcggggcccggtggccggcatctggcccgcacgtgtccgaggggcccccgggtccccggcaccatggctactcgactcggaccgatg

SEQ ID NO: 2028 - DNA, 203 bp, Artificial sequence
  synthetic
ggcgcgccagtcctcagccctccccagctgcccaggaagagccccagccatggaacaccagctcctgtgctgcgaagtggaaaccatccgccgcgcgtaccccgatgccaacctcctcaacgaccgggtgctgcgggccatgctgaaggcggaggagacctgcgcgccctcggtgtcctacttcaaatcgactcggaccgatg

SEQ ID NO: 2029 - DNA, 203 bp, Artificial sequence
  synthetic
ggcgcgccagtcctgtgtgcagaaggaggtcctgccgtccatgcggaagatcgtcgccacctggatgctggaggtctgcgaggaacagaagtgcgaggaggaggtcttcccgctggccatgaactacctggaccgcttcctgtcgctggagcccgtgaaaaagagccgcctgcagctgctgggggccacgactcggaccgatg

SEQ ID NO: 2030 - DNA, 203 bp, Artificial sequence
  synthetic
ggcgcgccagtcctaggaggtggacctggcttgcacacccaccgacgtgcgggacgtggacatctgagggcgccaggcaggcgggcgccaccgccacccgcagcgagggcggagccggccccaggtgctcccctgacagtccctcctctccggagcattttgataccagaagggaaagcttcattctccgactcggaccgatg

SEQ ID NO: 2031 - DNA, 203 bp, Artificial sequence
  synthetic
ggcgcgccagtccttgagggaggacaggcgggaggaggtgtgaggaggaggctcccgaggggaaggggcggtgcccacaccggggacaggccgcagctccattttcttattgcgctgctaccgttgacttccaggcacggtttggaaatattcacatcgcttctgtgtatctctttcacattgtttgccgactcggaccgatg

SEQ ID NO: 2032 - DNA, 203 bp, Artificial sequence
  synthetic
ggcgcgccagtcctaaccacgcgggggccttgagggacgctttgtctgtcgtgatggggcaagggcacaagtcctggatgttgtgtgtatcgagaggccaaaggctggtggcaagtgcacggggcacagcggagtctgtcctgtgacgcgcaagtctgagggtctgggcggcgggcggctgggtctgtcgactcggaccgatg

SEQ ID NO: 2033 - DNA, 203 bp, Artificial sequence
  synthetic
ggcgcgccagtcctcagaagagaagggaaatggcaagggagcattccaggagagaaagggaccgcttggagcagttagaaaggaagcgggagcgggagcgcaagatgcgggagcagcagaaggagcagcgggagcagaaggagcgcgagcggcgggcggaggagcggcgcaaggagcgggaggcccgccgactcggaccgatg

SEQ ID NO: 2034 - DNA, 203 bp, Artificial sequence
  synthetic
ggcgcgccagtcctagggaagtgtctgcacatcaccgaacgatgagagaggactacagcgacaaagtgaaagccagccactggagtcgcagcccgcctcggccgccgcgggagcggttcgagttgggagacggccggaagccagtaaaagaagagaaaatggaagaaagggacctgctgtccgacttacgactcggaccgatg

SEQ ID NO: 2035 - DNA, 203 bp, Artificial sequence
  synthetic
ggcgcgccagtcctctgagccacgccggcatcctcaaggtgggtgattttgggctggcgcgggagtacggatcccctctgaaggcctacaccccggtcgtggtgacccagtggtaccgcgccccagagctgctgcttggtgccaaggaatactccacggccgtggacatgtggtcagtgggctgcatccgactcggaccgatg

SEQ ID NO: 2036 - DNA, 203 bp, Artificial sequence
  synthetic
ggcgcgccagtcctttcggggagctgctgactcagaagcctctgttccccgggaattcggaaatcgatcagatcaacaaagtgttcaaggagctggggacccccagtgagaaaatctggcccggctacagtgagctcccagtagtcaaaaagatgaccttcagcgagcacccctacaacaacctccgccgactcggaccgatg

SEQ ID NO: 2037 - DNA, 203 bp, Artificial sequence
  synthetic
ggcgcgccagtcctaagcgcttcggggctctgctctcagaccagggcttcgacctcatgaacaagttcctgacctacttccccgggaggaggatcagcgctgaggacggcctcaagcatgagtatttccgcgagacccccctccccatcgacccctccatgttccccacgtggcccgccaagagcgagcgactcggaccgatg

SEQ ID NO: 2038 - DNA, 203 bp, Artificial sequence
  synthetic
ggcgcgccagtcctgcccagactcggacgggctttgccaccctctccgcttgcctggtcccctctcctctccgccctcccgctcgccagtccatttgatcagcggagactcggcggccgggccggggcttccccgcagcccctgcgcgctcctagagctcgggccgtggctcgtcggggtctgtgtctcgactcggaccgatg

SEQ ID NO: 2039 - DNA, 203 bp, Artificial sequence
  synthetic
ggcgcgccagtccttttggctccgagggcagtcgctgggcttccgagaggggttcgggctgcgtaggggcgctttgttttgttcggttttgtttttttgagagtgcgagagaggcggtcgtgcagacccgggagaaagatgtcaaacgtgcgagtgtctaacgggagccctagcctggagcggatggacgactcggaccgatg

SEQ ID NO: 2040 - DNA, 203 bp, Artificial sequence
  synthetic
ggcgcgccagtcctaaagactgatccgtcggacagccagacggggttagcggagcaatgcgcaggaataaggaagcgacctgcaaccgacgattcttctactcaaaacaaaagagccaacagaacagaagaaaatgtttcagacggttccccaaatgccggttctgtggagcagacgcccaagaagcccgactcggaccgatg

SEQ ID NO: 2041 - DNA, 203 bp, Artificial sequence
  synthetic
ggcgcgccagtcctcccggggcccgcttgcctcagcttcttgctgccgccagcacgctaagctccagtcggcgccgaaggagagcttcccgaccctcgtgtccagtagccgcaatcccaggctgggagggtgaggcgccgcgctctgccgcccccccgcccctcgctccctgtgtcctggcggatttgcgactcggaccgatg

SEQ ID NO: 2042 - DNA, 203 bp, Artificial sequence
  synthetic
ggcgcgccagtcctcacgtaatctatccgaaagcccagtcccacccgccacccgactctggagctcccattcttcaggaccctgctgaagtatcgcttctcagccgccttctccaggcgcagctgcattcgcttctcggtttttgcactcgctgtgcaccgagttactttcccggcccctcgttgacacgactcggaccgatg

SEQ ID NO: 2043 - DNA, 203 bp, Artificial sequence
  synthetic
ggcgcgccagtcctccgttcacaggtggctgttggtctttagtaagggtgctgtcttccctgtctgatccttagcaaaagtaggaaggtagagttgttggcagaaatcctgggataagagaatagtttcctggaagatctgtgcctccaaccagcagagagggattgagcttcattgaactcaacagacgactcggaccgatg

SEQ ID NO: 2044 - DNA, 203 bp, Artificial sequence
  synthetic
ggcgcgccagtcctgccaacatttcatagcaccatgttcaagaggaggttgaagtggcatggcaatggttagagaccctgctgggcgtgaacaccctctggctacctagggacctgtgggcctaccacctggtgccctcatggagacaagaagccctgggttgaacaacatgaagccccagtcactgccgactcggaccgatg

SEQ ID NO: 2045 - DNA, 203 bp, Artificial sequence
  synthetic
ggcgcgccagtccttactagccaagacccaggagctggagaaggaagcccatgaaaggagccaggagttaatacagctgaagagtcaaggggatctggagaaggctgaacttcaggaccgggtgaccgagctctctgctctgttgacccagtctcagaagcaaaatgaagattatgaaaagatgataacgactcggaccgatg

SEQ ID NO: 2046 - DNA, 203 bp, Artificial sequence
  synthetic
ggcgcgccagtccttcagtgaactgatcactcttcgggaagccctggagtcaagtcacctggaaggggagttactgaggcaagagcaaacggaagtgaccgcagcgctggctagggcagagcagtcaattgcagagctgtcgagttctgaaaacaccctgaagacagaagtagctgatcttcgggctgcgactcggaccgatg

SEQ ID NO: 2047 - DNA, 203 bp, Artificial sequence
  synthetic
ggcgcgccagtcctaagccctgtgggaaaagaacactcacctggaggctcagctgcagaaagctgaggaggctggggctgagctgcaggcagatctcagggacatccaagaagagaaggaagaaattcaaaagaaactaagtgagtcacgtcaccagcaggaggcagccacgactcagctggagcagccgactcggaccgatg

SEQ ID NO: 2048 - DNA, 203 bp, Artificial sequence
  synthetic
ggcgcgccagtcctgcagtctgtttgaagcccaacaacaaaattctgtgatagaggtcaccaaggggcagctggaggtccagattcaaactgtcactcaagccaaggaagtaatccaaggggaagtgaggtgcctgaagctggaactggacactgaacggagtcaggcagagcaggagcgggatgctgcgactcggaccgatg

SEQ ID NO: 2049 - DNA, 203 bp, Artificial sequence
  synthetic
ggcgcgccagtcctctctctccgctgaggcagtagcatctgccctccacaagcttcatcaagacctgtggaagactcaacagacccgggatgttctgagggatcaggtccagaaactggaagagcgtctaactgatactgaggctgagaagagccaggtccacacagagttgcaggatctgcagagaccgactcggaccgatg

SEQ ID NO: 2050 - DNA, 203 bp, Artificial sequence
  synthetic
ggcgcgccagtcctgcgaactgaaggtggcccaagggaaggctctgcaagagaatttggccctcctgacccagaccctagctgaaagagaagaggaggtggagactctgcggggacaaatccaggaactggagaagcaacgggaaatgcagaaggctgctttggaattgctgtctctggacctgaagacgactcggaccgatg

SEQ ID NO: 2051 - DNA, 203 bp, Artificial sequence
  synthetic
ggcgcgccagtcctagaggaaccaagaggtagatctgcagcaagaacagattcaggagctagagaagtgtaggtctgttttagagcatctgcccatggccgtccaggagcgagagcagaagctgactgtgcagagggagcagatcagagagctcgagaaggatcgggagactcagaggaacgtcttggcgactcggaccgatg

SEQ ID NO: 2052 - DNA, 203 bp, Artificial sequence
  synthetic
ggcgcgccagtcctagctgcagaggcagaaagagcatctgactcaggatctcgagaggagagaccaggagctgatgctgcagaaggagaggattcaggttctcgaggatcagaggacccggcagaccaagatcctggaggaggacctggaacagatcaagctgtccttgagagagcgaggccgggagccgactcggaccgatg

SEQ ID NO: 2053 - DNA, 203 bp, Artificial sequence
  synthetic
ggcgcgccagtcctagcagctccagggcctgcacaggaaggtaggtgagaccagcctcctcctgtcccagcgagagcaggaaatagtggtcctgcagcagcaactgcaggaagccagggaacaaggggagctgaaggagcagtcacttcagagtcaactggatgaggcccagagagccctagcccagacgactcggaccgatg

SEQ ID NO: 2054 - DNA, 203 bp, Artificial sequence
  synthetic
ggcgcgccagtcctgggaccaggaactggaggctctgcagcaagaacagcagcaggcccagggacaggaggagagggtgaaggaaaaggcagacgccctccagggagctctggagcaagcccatatgacactgaaggagcgtcatggagagcttcaggaccacaaggaacaggcacgaaggctggaggcgactcggaccgatg

SEQ ID NO: 2055 - DNA, 203 bp, Artificial sequence
  synthetic
ggcgcgccagtcctaagagctggcagtggagggacggcgggtccaggccctggaggaggtgctgggagacctaagggctgagtctcgggaacaggagaaagctctgttggccctccagcagcagtgtgctgagcaggcacaggagcatgaggtggagaccagggccctgcaggacagctggctgcaggcgactcggaccgatg

SEQ ID NO: 2056 - DNA, 203 bp, Artificial sequence
  synthetic
ggcgcgccagtcctaagccagggagattgagtggagggagaaggcccaggacttggcactctccctagcgcagaccaaggccagtgtcagcagtctgcaggaggtagccatgttcctacaagcctctgtcctggagcgggactcagaacagcaaaggctgcaggatgaactggagctcaccagacgggcgactcggaccgatg

SEQ ID NO: 2057 - DNA, 203 bp, Artificial sequence
  synthetic
ggcgcgccagtcctctctggagaaggagcggctacacagcccaggtgcaaccagcacagcagaactggggtccagaggggagcagggtgtgcagctgggagaggtctcaggagtggaggctgagcctagtcctgatggaatggagaagcagtcatggagacaaaggcttgaacacctgcagcaagcagcgactcggaccgatg

SEQ ID NO: 2058 - DNA, 203 bp, Artificial sequence
  synthetic
ggcgcgccagtcctttcttgccgtggcccaggcccctgaggccactgtcctggaggcagagacccgcaggctggatgagtccctgactcaaagtctgacatccccagggccagtcctgctacaccccagccccagcactacccaagccgcctccaggtagcagccacagccaggagcacacagacagacgactcggaccgatg

SEQ ID NO: 2059 - DNA, 203 bp, Artificial sequence
  synthetic
ggcgcgccagtcctagactgtgtcatgggtcatggcccctccgcacacctacaggtttgccaaaggaaaagcctggctctgttaggcacccaggagccccaggtcggcgggtgttcccaggaagaggaagtaaatctgcaaccctggggaggaccccaactcacctgggaatgaggcaaattgcatttcgactcggaccgatg

SEQ ID NO: 2060 - DNA, 203 bp, Artificial sequence
  synthetic
ggcgcgccagtcctctcagagctgggaaggaggctctagatggcggctgtgccttagagagagcgcgctctgctccctgcctttgcctcactttacgcaactttccctaactttcgggcagcctcagggggcccccgtagccccctgcctttcctagggacttactggggtcgattcgaaccttttttcgactcggaccgatg

SEQ ID NO: 2061 - DNA, 203 bp, Artificial sequence
  synthetic
ggcgcgccagtccttgctttatttttttgaccagttaacatatttgagggttattttatttatttttcgttttttaacggaggattttgcctttatttttaattatttgggatctgatatttttctactagtagataggactcttggtttggacatactacatggatcagtaaatacctgggcacaggcgactcggaccgatg

SEQ ID NO: 2062 - DNA, 203 bp, Artificial sequence
  synthetic
ggcgcgccagtcctagggaagtgatccaggaagtggacatggcagcgagtcgaacagcagctctgaatcttctgagagtcagtcggaatctgagagcgaatcagcaggttccaaatcccagccagtcctcccagaagccaaagagaagccagcctctaagaaggaacggatagctgatgtgaagaagacgactcggaccgatg

SEQ ID NO: 2063 - DNA, 203 bp, Artificial sequence
  synthetic
ggcgcgccagtcctgtaaatctacattgggtcaaacagattttccagctcatagtcggaagccggcaccctcaaatgagcccgaatatctatgtaaatggatgggactcccctattcagagtgtagctgggaagatgaagccctcattggaaagaaattccagaattgcattgacagcttccacagtacgactcggaccgatg

SEQ ID NO: 2064 - DNA, 203 bp, Artificial sequence
  synthetic
ggcgcgccagtcctggttgaagaatgatgactctttattgtataaaactctgattgatttcaagtccaaccataggctcctgattacggggacccctcttcagaattccctcaaagagctctggtccttgctgcactttattatgccggagaagtttgaattttgggaagattttgaagaagaccatgcgactcggaccgatg

SEQ ID NO: 2065 - DNA, 203 bp, Artificial sequence
  synthetic
ggcgcgccagtcctggaaggggagagaaaatggctaccagagtcttcataaggtgctagagcctttccttctccggagagtcaaaaaagatgtggagaaatcccttcctgctaaagtggaacagattctcagggtggagatgtcagcccttcagaaacagtattacaagtggattctgaccaggaattcgactcggaccgatg

SEQ ID NO: 2066 - DNA, 203 bp, Artificial sequence
  synthetic
ggcgcgccagtcctgtgactctgacactgagtctaagaggcaggcccagagatcctctgcttctgagagtgaaacggaagactctgatgatgacaagaagccaaagcgcagagggcgtccgaggagtgtgcggaaggacctcgtggagggatttactgatgcagagatccgaaggttcatcaaggcttcgactcggaccgatg

SEQ ID NO: 2067 - DNA, 203 bp, Artificial sequence
  synthetic
ggcgcgccagtcctataagaagtttggtctccctcttgaacggctggagtgcatagcacgtgatgctgagctggtagataagtcggtggcagatctgaagcgcctgggtgaactgatccacaacagctgtgtgtcagcaatgcaggaatacgaagagcagctgaaagaaaatgccagcgagggaaaagcgactcggaccgatg

SEQ ID NO: 2068 - DNA, 203 bp, Artificial sequence
  synthetic
ggcgcgccagtccttagagtggggggtggaagatgattctcgcctgttgctggggatttatgaacatggctatggaaactgggagttaattaaaacagacccagagcttaaattaactgacaaaattctgccggtggagacagataaaaagcctcaggggaagcagctacagacccgagcggattactcgactcggaccgatg

SEQ ID NO: 2069 - DNA, 203 bp, Artificial sequence
  synthetic
ggcgcgccagtcctaatcttcgagtaaatcaaagcgatctcagggtcctgtccatattacagcaggaagtgaacctgtccccattggagaggatgaggatgatgatctggaccaggagacattcagcatatgtaaggagaggatgaggcccgtgaaaaaggcactgaaacagctcgacaaacctgacacgactcggaccgatg

SEQ ID NO: 2070 - DNA, 203 bp, Artificial sequence
  synthetic
ggcgcgccagtcctataagttatacaagatggctcataagaaaaggtctcaagaagaagaggagcaaaagaagaaagacgacgtgactgggggtaagaaaccatttcgtccagaggcctcaggctccagccgggactctctgatatctcagtcccatacctcacacaaccttcaccctcagaagcctccgactcggaccgatg

SEQ ID NO: 2071 - DNA, 203 bp, Artificial sequence
  synthetic
ggcgcgccagtcctatgagcagcactggtacaaggaccaccattatggggaccggcgacatatggatgcccaccgttccggaagctatcgacccaacaacatgtccagaaagaggccttatgaccagtacagcagtgaccgagaccaccggggacacagagattattatgacaggcaccatcatgactcgactcggaccgatg

SEQ ID NO: 2072 - DNA, 203 bp, Artificial sequence
  synthetic
ggcgcgccagtcctccaagcggaggagatccgatgaatttaggcctcaaaattaccaccagcaggatttccgacgaatgtctgatcaccgccccgctatgggctaccatggccagggaccctcagaccattaccgctctttccacacagataaactgggggaatataaacagcctctacccccattgccgactcggaccgatg

SEQ ID NO: 2073 - DNA, 203 bp, Artificial sequence
  synthetic
ggcgcgccagtccttggcaccccatcccattccagcctagttctggcctcccactttgacgggcacttggaggaggagctgactgtgtgtgtaccagcttcactgggatgtgtttccccagtcaaggaacaggggatcttcagagtcatgaatgttttcttgccagggtcagtgttcccaggaccttacgactcggaccgatg

SEQ ID NO: 2074 - DNA, 203 bp, Artificial sequence
  synthetic
ggcgcgccagtcctgtgcatggtcggggcaggaactggtgcatggaggctgctgggacctggtgaacagtgtgtgatttggttgatttggttcactctgacatgatggatgctgctgatggggagtggcgagttggggcaagcgggtggggacaagcataggacttgaaggggagcaggtacacccctcgactcggaccgatg

SEQ ID NO: 2075 - DNA, 203 bp, Artificial sequence
  synthetic
ggcgcgccagtcctcaaatgtgttcttgggagaagtgatacactcggcctcattatgtgaaacctgtgggtggggttggggtggagaagtagagagagggcaacagcttccacaactgcttcatctctgccaacactaatttttcccacactgtctttgtacatttcagagctttggtctcctgagtgcgactcggaccgatg

SEQ ID NO: 2076 - DNA, 203 bp, Artificial sequence
  synthetic
ggcgcgccagtcctggcctccttttcccactgtgccagggaaggtaggtttctctggctgactgagtactgtgagtgaggcaacactgatgccagcatgggtcttacttgactggggagtaggctgagtgaggggtagggtggggtaggtggggagtagtgtggccagggaactggaatccctggtggcgactcggaccgatg

SEQ ID NO: 2077 - DNA, 203 bp, Artificial sequence
  synthetic
ggcgcgccagtcctatttctgattcctgtggtgagaaggaaagctacaggacctggagaaggggatgcagaggcaggcctgctgaccaacttgttgcaatcacaaaggtgggggtcctggtgcaggcagtgaacaggcttctaatgtggggttcagtagtgccagcaagtgggggaaactttcagtatcgactcggaccgatg

SEQ ID NO: 2078 - DNA, 203 bp, Artificial sequence
  synthetic
ggcgcgccagtcctcacctaaaacctgcacgtgaacaagggttgacatgatacactatggccttagaaaagggccaggtgaaaccccaagctaatcactgcggtctttcagagccggacagacaggtgccagcagagcccggggctcactctcctttcagtcattcctcagcccttcgaagggaagcccgactcggaccgatg

SEQ ID NO: 2079 - DNA, 203 bp, Artificial sequence
  synthetic
ggcgcgccagtcctagcccagtcgccgccgcccgcccacaaagccacaggcaggtgcaggcgcagccgcggcgagagcgtatggagccgagccgttagcgcgcgccgtcggtgagtcagtccgtccgtccgtccgtccgtcggggcgccgcagctcccgccaggcccagcggccccggcccctcgtctcgactcggaccgatg

SEQ ID NO: 2080 - DNA, 203 bp, Artificial sequence
  synthetic
ggcgcgccagtcctccccgcacccggagccacccggtggagcgggccttgccgcggcagccatgtccatgggcctggagatcacgggcaccgcgctggccgtgctgggctggctgggcaccatcgtgtgctgcgcgttgcccatgtggcgcgtgtcggccttcatcggcagcaacatcatcacgtcgccgactcggaccgatg

SEQ ID NO: 2081 - DNA, 203 bp, Artificial sequence
  synthetic
ggcgcgccagtcctagaacatctgggagggcctgtggatgaactgcgtggtgcagagcaccggccagatgcagtgcaaggtgtacgactcgctgctggcactgccacaggaccttcaggcggcccgcgccctcatcgtggtggccatcctgctggccgccttcgggctgctagtggcgctggtgggcgcgactcggaccgatg

SEQ ID NO: 2082 - DNA, 203 bp, Artificial sequence
  synthetic
ggcgcgccagtcctcccagtgcaccaactgcgtgcaggacgacacggccaaggccaagatcaccatcgtggcaggcgtgctgttccttctcgccgccctgctcaccctcgtgccggtgtcctggtcggccaacaccattatccgggacttctacaaccccgtggtgcccgaggcgcagaagcgcgagacgactcggaccgatg

SEQ ID NO: 2083 - DNA, 203 bp, Artificial sequence
  synthetic
ggcgcgccagtccttgggcgcgggcctgtacgtgggctgggcggccgcggcgctgcagctgctggggggcgcgctgctctgctgctcgtgtcccccacgcgagaagaagtacacggccaccaaggtcgtctactccgcgccgcgctccaccggcccgggagccagcctgggcacaggctacgaccgcacgactcggaccgatg

SEQ ID NO: 2084 - DNA, 203 bp, Artificial sequence
  synthetic
ggcgcgccagtcctccccagcagccacggctttgcgggccgggcagtcgacttcggggcccagggaccaacctgcatggactgtgaaacctcacccttctggagcacggggcctgggtgaccgccaatacttgaccaccccgtcgagccccatcgggccgctgcccccatgctcgcgctgggcagggacgactcggaccgatg

SEQ ID NO: 2085 - DNA, 203 bp, Artificial sequence
  synthetic
ggcgcgccagtcctctgaagactggttttggctttaccaatgtgactgcacaccaaaaatggaaattttcaagacctggcatcaggctcctttctgtcaaggcacagacagcacacattgtcctggaagatggaactaagatgaaaggttactcctttggccatccatcctctgttgctggtgaagtgcgactcggaccgatg

SEQ ID NO: 2086 - DNA, 203 bp, Artificial sequence
  synthetic
ggcgcgccagtcctggtttgctggtgctggattatagtaaagactacaaccactggctggctaccaagagtttagggcaatggctacaggaagaaaaggttcctgcaatttatggagtggacacaagaatgctgactaaaataattcgggataagggtaccatgcttgggaagattgaatttgaaggtcgactcggaccgatg

SEQ ID NO: 2087 - DNA, 203 bp, Artificial sequence
  synthetic
ggcgcgccagtcctccctggaaccatgatttcaccaagatggagtatgatgggattttgatcgcgggaggaccggggaacccagctcttgcagaaccactaattcagaatgtcagaaagattttggagagtgatcgcaaggagccattgtttggaatcagtacaggaaacttaataacaggattggctcgactcggaccgatg

SEQ ID NO: 2088 - DNA, 203 bp, Artificial sequence
  synthetic
ggcgcgccagtcctgctggtgccaaaacctacaagatgtccatggccaacagagggcagaatcagcctgttttgaatatcacaaacaaacaggctttcattactgctcagaatcatggctatgccttggacaacaccctccctgctggctggaaaccactttttgtgaatgtcaacgatcaaacaaatcgactcggaccgatg

SEQ ID NO: 2089 - DNA, 203 bp, Artificial sequence
  synthetic
ggcgcgccagtcctgaggggattatgcatgagagcaaacccttcttcgctgtgcagttccacccagaggtcaccccggggccaatagacactgagtacctgtttgattcctttttctcactgataaagaaaggaaaagctaccaccattacatcagtcttaccgaagccagcactagttgcatctcggcgactcggaccgatg

SEQ ID NO: 2090 - DNA, 203 bp, Artificial sequence
  synthetic
ggcgcgccagtcctacttcagttgagtccattatggctacggaagacaggcagctgttttcagataaactaaatgagatcaatgaaaagattgctccaagttttgcagtggaatcgattgaggatgcactgaaggcagcagacaccattggctacccagtgatgatccgttccgcctatgcactgggtcgactcggaccgatg

SEQ ID NO: 2091 - DNA, 203 bp, Artificial sequence
  synthetic
ggcgcgccagtcctaatgttgatgccatgggtgttcacacaggtgactcagttgttgtggctcctgcccagacactctccaatgccgagtttcagatgttgagacgtacttcaatcaatgttgttcgccacttgggcattgtgggtgaatgcaacattcagtttgcccttcatcctacctcaatggaacgactcggaccgatg

SEQ ID NO: 2092 - DNA, 203 bp, Artificial sequence
  synthetic
ggcgcgccagtcctaaacagattgatacactggctgcagaatacccatcagtaacaaactatctctatgttacctacaatggtcaggagcatgatgtcaattttgatgaccatggaatgatggtgctaggctgtggtccatatcacattggcagcagtgtggaatttgattggtgtgctgtctctagtcgactcggaccgatg

SEQ ID NO: 2093 - DNA, 203 bp, Artificial sequence
  synthetic
ggcgcgccagtcctctggaatttgcaaagtctgtggactacccctgcttgttgaggccttcctatgttttgagtgggtctgctatgaatgtggtattctctgaggatgagatgaaaaaattcctagaagaggcgactagagtttctcaggagcacccagtggtgctgacaaaatttgttgaaggggcccgactcggaccgatg

SEQ ID NO: 2094 - DNA, 203 bp, Artificial sequence
  synthetic
ggcgcgccagtcctctcactaattttcaggtgaccaaactttttgctgaagctgtgcagaaatctcgcaaggtggactccaagagtcttttccactacaggcagtacagtgctggaaaagcagcatagagatgcagacaccccagccccattattaaatcaacctgagccacatgttatctaaaggaacgactcggaccgatg

SEQ ID NO: 2095 - DNA, 203 bp, Artificial sequence
  synthetic
ggcgcgccagtcctttagagtatggacttttcttttctttttctttttctttttttctttttgagatggagtcacactctccaggctggagtgcagtggcacaatctcggctcactgcaatttccgtctcccaagttcaagcgattctcctgctttagactatggatttctttaaggaatactggtttcgactcggaccgatg

SEQ ID NO: 2096 - DNA, 203 bp, Artificial sequence
  synthetic
ggcgcgccagtccttgctaggctgtggtccatatcacattggcagcagtgtggaatttgattggtgtgctgtctctagtatccgcacactgcgtcaacttggcaagaagacggtggtggtgaattgcaatcctgagactgtgagcacagactttgatgagtgtgacaaactgtactttgaagagttgtcgactcggaccgatg

SEQ ID NO: 2097 - DNA, 203 bp, Artificial sequence
  synthetic
ggcgcgccagtccttagaagaggcgactagagtttctcaggagcacccagtggtgctgacaaaatttgttgaaggggcccgagaagtagaaatggacgctgttggcaaagatggaagggttatctctcatgccatctctgaacatgttgaagatgcaggtgtccactcgggagatgccactctgatgccgactcggaccgatg

SEQ ID NO: 2098 - DNA, 203 bp, Artificial sequence
  synthetic
ggcgcgccagtccttgcccacacaaaccatcagccaaggggccattgaaaaggtgaaggatgctacccggaagattgcaaaggcttttgccatctctggtccattcaacgtccaatttcttgtcaaaggaaatgatgtcttggtgattgagtgtaacttgagagcttctcgatccttcccctttgtttcgactcggaccgatg

SEQ ID NO: 2099 - DNA, 203 bp, Artificial sequence
  synthetic
ggcgcgccagtcctaaggtttcaagctgtttgccacggaagccacatcagactggctcaacgccaacaatgtccctgccaccccagtggcatggccgtctcaagaaggacagaatcccagcctctcttccatcagaaaattgattagagatggcagcattgacctagtgattaaccttcccaacaacacgactcggaccgatg

SEQ ID NO: 2100 - DNA, 203 bp, Artificial sequence
  synthetic
ggcgcgccagtcctacactaaatttgtccatgataattatgtgattcggaggacagctgttgatagtggaatccctctcctcactaattttcaggtgaccaaactttttgctgaagctgtgcagaaatctcgcaaggtggactccaagagtcttttccactacaggcagtacagtgctggaaaagcagcgactcggaccgatg

SEQ ID NO: 2101 - DNA, 203 bp, Artificial sequence
  synthetic
ggcgcgccagtcctggctaatccaggaatattgttatcccttcccattatattgaagttgagaaatgtgacagaggcatttagagtatggacttttcttttctttttctttttctttttttctttttgagatggagtcacactctccaggctggagtgcagtggcacaatctcggctcactgcaatttcgactcggaccgatg

SEQ ID NO: 2102 - DNA, 203 bp, Artificial sequence
  synthetic
ggcgcgccagtccttttgtcattcacactctcccccagttttggaataacttggaagtaaggttcattcccttaagacgatggattctgttgaactatggggtcccacactgcactattaattccacccactgtaagggcaaggacaccattccttctacatataagaaaaaagtctctccccaagggcgactcggaccgatg

SEQ ID NO: 2103 - DNA, 203 bp, Artificial sequence
  synthetic
ggcgcgccagtcctgattcaagtgctggctttgcgtccgcttccccatccacttactagcgcaggagaaggctatctcggtccccagagaagcctggacccacacgcgggctagatccagagaacctgacgacccggcgacggcgacgtctcttttgactaaaagacagtgtccagtgctccagcctacgactcggaccgatg

SEQ ID NO: 2104 - DNA, 203 bp, Artificial sequence
  synthetic
ggcgcgccagtcctgggagacactttctacatcaaaacctccaccaccgtgcgcaccacagagattaacttcaaggttggggaggagtttgaggagcagactgtggatgggaggccctgtaagagcctggtgaaatgggagagtgagaataaaatggtctgtgagcagaagctcctgaagggagagggcgactcggaccgatg

SEQ ID NO: 2105 - DNA, 203 bp, Artificial sequence
  synthetic
ggcgcgccagtcctccccaagacctcgtggaccagagaactgaccaacgatggggaactgatcctgaccatgacggcggatgacgttgtgtgcaccagggtctacgtccgagagtgagtggccacaggtagaaccgcggccgaagcccaccactggccatgctcaccgccctgcttcactgccccctccgactcggaccgatg

SEQ ID NO: 2106 - DNA, 203 bp, Artificial sequence
  synthetic
ggcgcgccagtcctcgtcccaccccctccttctaggatagcgctccccttaccccagtcacttctgggggtcactgggatgcctcttgcagggtcttgctttctttgacctcttctctcctcccctacaccaacaaagaggaatggctgcaagagcccagatcacccattccgggttcactccccgcccgactcggaccgatg

SEQ ID NO: 2107 - DNA, 203 bp, Artificial sequence
  synthetic
ggcgcgccagtcctggagcgggaggcggggccacttcaatcctgggcaggggcggttccgtacagggtataaaagctgtccgcgcgggagcccaggccagctttggggttgtccctggacttgtcttggttccagaacctgacgacccggcgacggcgacgtctcttttgactaaaagacagtgtccacgactcggaccgatg

SEQ ID NO: 2108 - DNA, 203 bp, Artificial sequence
  synthetic
ggcgcgccagtccttgaagggagagggccccaagacctcgtggaccagagaactgaccaacgatggggaactgatcctgaccatgacggcggatgacgttgtgtgcaccagggtctacgtccgagagtgagtggccacaggtagaaccgcggccgaagcccaccactggccatgctcaccgccctgctcgactcggaccgatg

SEQ ID NO: 2109 - DNA, 203 bp, Artificial sequence
  synthetic
ggcgcgccagtccttcactgccccctccgtcccaccccctccttctaggatagcgctccccttaccccagtcacttctgggggtcactgggatgcctcttgcagggtcttgctttctttgacctcttctctcctcccctacaccaacaaagaggaatggctgcaagagcccagatcacccattccgggcgactcggaccgatg

SEQ ID NO: 2110 - DNA, 203 bp, Artificial sequence
  synthetic
ggcgcgccagtcctcgaatctcctggggccgtccgtgccggctcgggccgtcgtggcggctcgagctcctggaacttgctcaggctccggaggtccgaggccctcgaagttatgcgtcgcctccaggcggttgcggcgggcgcgggctcctaaagggcgtcacacccggactccgccgactaggcaaccgactcggaccgatg

SEQ ID NO: 2111 - DNA, 203 bp, Artificial sequence
  synthetic
ggcgcgccagtcctctccattcatctttccactgcgcctccggcgcccccgccttctccggtcccctcctcggagtcattttttcctgttccccctctgccgccctttcctcacgccccgggtgaggcaattctcttggaagcgaaggtgtcggctatgagccggagcctccttccttgaatttctcccgactcggaccgatg

SEQ ID NO: 2112 - DNA, 203 bp, Artificial sequence
  synthetic
ggcgcgccagtcctctcccctttccctttatgggcaactgttatggcgtgaatttttctatacagcagcaacaaataatccacgctttgataaaatggaaggaaaccctatctgtgttcagattccttgggataaaaatcctgaggctttagccaaatgggcggaaggccggacaggctttccatggacgactcggaccgatg

SEQ ID NO: 2113 - DNA, 203 bp, Artificial sequence
  synthetic
ggcgcgccagtcctttgatgccatcatgacacagcttcgtcaggagggttggattcatcatctagccaggcatgcagttgcttgcttcctgacacgaggggacctgtggattagttgggaagaaggaatgaaggtatttgaagaattattgcttgatgcagattggagcataaatgctggaagttggacgactcggaccgatg

SEQ ID NO: 2114 - DNA, 203 bp, Artificial sequence
  synthetic
ggcgcgccagtccttgggatattctgcagaaaatatcccaggttgtagcagcagtggaagttgctctcaagggagtggtattttacactatgctcatggcgacagtcagcaaactcacctgttgaagcaaggaagaagctccatgggcactggtctcagtggtgggaaacgtcctagtcaggaagaggcgactcggaccgatg

SEQ ID NO: 2115 - DNA, 203 bp, Artificial sequence
  synthetic
ggcgcgccagtccttctcttcttctttcgcggttcagcatgcaggaaaaagacgcctcctcacaaggtttcctgccacacttccaacatttcgccacgcaggcgatccatgtgggccaggatccagagcaatggacctccagggctgtagtgccccccatctcactgtccaccacgttcaagcaagggcgactcggaccgatg

SEQ ID NO: 2116 - DNA, 203 bp, Artificial sequence
  synthetic
ggcgcgccagtccttgtatggatgatgtgtatggaggtacaaacaggtacttcaggcaagtggcatctgaatttggattaaagatttcttttgttgattgttccaaaatcaaattactagaggcagcaattacaccagaaaccaagcgccctttggctctgggagctgatatttctatgtattctgcacgactcggaccgatg

SEQ ID NO: 2117 - DNA, 203 bp, Artificial sequence
  synthetic
ggcgcgccagtcctgttggcgtcttcgtcgccgcgctcgccccgggctactcctgcgcgccacaatgagctcccgcatcgccagggcgctcgccttagtcgtcacccttctccacttgaccaggctggcgctctccacctgccccgctgcctgccactgccccctggaggcgcccaagtgcgcgccggcgactcggaccgatg

SEQ ID NO: 2118 - DNA, 203 bp, Artificial sequence
  synthetic
ggcgcgccagtcctgcgaggagtgggtctgtgacgaggatagtatcaaggaccccatggaggaccaggacggcctccttggcaaggagctgggattcgatgcctccgaggtggagttgacgagaaacaatgaattgattgcagttggaaaaggcagctcactgaagcggctccctgtttttggaatggcgactcggaccgatg

SEQ ID NO: 2119 - DNA, 203 bp, Artificial sequence
  synthetic
ggcgcgccagtcctagcctcgcatcctatacaaccctttacaaggccagaaatgtattgttcaaacaacttcatggtcccagtgctcaaagacctgtggaactggtatctccacacgagttaccaatgacaaccctgagtgccgccttgtgaaagaaacccggatttgtgaggtgcggccttgtggaccgactcggaccgatg

SEQ ID NO: 2120 - DNA, 203 bp, Artificial sequence
  synthetic
ggcgcgccagtcctagatgcggttccgctgcgaagatggggagacattttccaagaacgtcatgatgatccagtcctgcaaatgcaactacaactgcccgcatgccaatgaagcagcgtttcccttctacaggctgttcaatgacattcacaaatttagggactaaatgctacctgggtttccagggccgactcggaccgatg

SEQ ID NO: 2121 - DNA, 203 bp, Artificial sequence
  synthetic
ggcgcgccagtcctaggcagaagccggcggcgcgcggacagccagtcggcgccgcgcggagctggccgctggattggctgcaacactcgcgtgtcaggcggttgctaggctccggccgcgcgccccgcccttgcgctcagcgccctctcaccgcccggctctgtgtgctccgggatggagcaggtgtgcgactcggaccgatg

SEQ ID NO: 2122 - DNA, 203 bp, Artificial sequence
  synthetic
ggcgcgccagtcctcagagggtgagaacccagctctgggaccaagtcacttgcttccttacttagcaagactatcgacttgagcaaacttggacctgggatgaggatgtctgtgggcctctcgctgctgctgcccctctgggggaggacctttctcctcctgctctctgtggttatggctcagtcccacgactcggaccgatg

SEQ ID NO: 2123 - DNA, 203 bp, Artificial sequence
  synthetic
ggcgcgccagtcctgggctgctccctgaaccagaacagtgtgcctgacattcatggtgtagaggcccctgccagggagggcgcaatgtctgctcagcttggctaccctgtggtgggttggcacatcgccaataagaagccccctcttcccaaacgcgtccggaggcagatccatgctacacccacacccgactcggaccgatg

SEQ ID NO: 2124 - DNA, 203 bp, Artificial sequence
  synthetic
ggcgcgccagtcctaaccccaaccctaggccccatccagcctactcgggtgtcagaagctggcaccacagttcctggccagattcgcccaacgatgaccattcctggctatgtggagcctactgcagttgctacccctcccacaaccaccaccaagaagccacgagtatccacaccaaaaccagcaaccgactcggaccgatg

SEQ ID NO: 2125 - DNA, 203 bp, Artificial sequence
  synthetic
ggcgcgccagtcctccagcgcccagagctcaagaaccatattgacagggtagatgcctgggttggcacctactttgaggtgaagatcccgtcagacactttctatgaccatgaggacaccaccactgacaagctgaagctgaccctgaaactgcgggagcagcagctggtgggcgagaagtcctgggtcgactcggaccgatg

SEQ ID NO: 2126 - DNA, 203 bp, Artificial sequence
  synthetic
ggcgcgccagtcctgaaccaggacaccatgggagagtacacgcccctgcgggatgaggatcccaatgcgcctccctaccagcccccaccgcccttcacagcacccatggagggcaagggctcccgtcccaagaacatgaccccataccggtcacctcctccctatgtcccaccttaacccgcaagcgccgactcggaccgatg

SEQ ID NO: 2127 - DNA, 203 bp, Artificial sequence
  synthetic
ggcgcgccagtcctctgggtggaggcagggtagggcaggggcctggagacgacatggtgttgtctgtggagaccggtggcctgcagaccattgcccaccgggagccgacacctgacctagcacacactgacacaggggcctggacaagcccgccctctctggtcctcccaaaccccaaagcagctggacgactcggaccgatg

SEQ ID NO: 2128 - DNA, 203 bp, Artificial sequence
  synthetic
ggcgcgccagtcctttgggtgggtatggggaattgctttgctaaaaataagctcccagggtgtttcaaacttagagaagaccaagggacagtattttttatcaaaggaatactattttttcacactacgtcaacttggttgctctgataccccagagcctgattgggggcctcccggccctggctcaccgactcggaccgatg

SEQ ID NO: 2129 - DNA, 203 bp, Artificial sequence
  synthetic
ggcgcgccagtcctgccaagtccctggtgctgggtttgctctcccgctgttgccaggggctggaagctggaggggtctcttgggccatggacatccccacttccagcccatgtacactagtggcccacgaccaaggggtcttcatttccatgaaaaagggactccaagaggcagtggtggctgtggcccgactcggaccgatg

SEQ ID NO: 2130 - DNA, 203 bp, Artificial sequence
  synthetic
ggcgcgccagtcctaggggagggctggtaggagggggggagaggtctctgtcctactgctctccagagggcatttccccttgcgccttctcccacagggcccagcccctctcccctgccccagtccccagggggtactctggagtgagcagtgcccctgtgggggagcctgtaaatgcgggctcagtgcgactcggaccgatg

SEQ ID NO: 2131 - DNA, 203 bp, Artificial sequence
  synthetic
ggcgcgccagtcctgctcgcgcctcttaggcttggcggtggcggcggcggcagcttcgcgccgaatccccggggagcggcggtggcggcgtcctggggccaggaggagcgaacacctgccgcggtcctcccgccggcgctggggattctcattctgtctcccatgctggagtgcagtggcgcggtcttcgactcggaccgatg

SEQ ID NO: 2132 - DNA, 203 bp, Artificial sequence
  synthetic
ggcgcgccagtcctcaaacttggacctgggatgaggatgtctgtgggcctctcgctgctgctgcccctctgggggaggacctttctcctcctgctctctgtggttatggctcagtcccactggcccagtgaaccctcagaggctgtcagggactgggaaaaccagcttgaggcatccatgcactcagtcgactcggaccgatg

SEQ ID NO: 2133 - DNA, 203 bp, Artificial sequence
  synthetic
ggcgcgccagtcctgctctcagacctccacgaggctgttcccacagtggttggcattcctgatggcacggctgtcgtcgggcgctcatttcgagtgaccattccaacagatttgattgcctccagtggagatatcatcaaggtatcagcggcagggaaggaggctttgccatcttggctgcactgggacgactcggaccgatg

SEQ ID NO: 2134 - DNA, 203 bp, Artificial sequence
  synthetic
ggcgcgccagtcctagcctccccagaccctggtgaggtggtatcatctgcctgtgctgcggatgaacctgtgactgttttgacggtgattttggatgccgacctcaccaagatgaccccaaagcaaaggattgacctcctgcacaggatgcggagcttctcagaagtagagcttcacaacatgaaattcgactcggaccgatg

SEQ ID NO: 2135 - DNA, 203 bp, Artificial sequence
  synthetic
ggcgcgccagtcctaatgtctgctcagcttggctaccctgtggtgggttggcacatcgccaataagaagccccctcttcccaaacgcgtccggaggcagatccatgctacacccacacctgtcactgccattgggcccccaaccacggctatccaggagcccccatccaggatcgtgccaacccccaccgactcggaccgatg

SEQ ID NO: 2136 - DNA, 203 bp, Artificial sequence
  synthetic
ggcgcgccagtcctatctccagccattgctcctccaacagagaccatggctcctccagtcagggatcctgttcctgggaaacccacggtcaccatccggactcgaggcgccattattcaaaccccaaccctaggccccatccagcctactcgggtgtcagaagctggcaccacagttcctggccagatcgactcggaccgatg

SEQ ID NO: 2137 - DNA, 203 bp, Artificial sequence
  synthetic
ggcgcgccagtccttcgcccaacgatgaccattcctggctatgtggagcctactgcagttgctacccctcccacaaccaccaccaagaagccacgagtatccacaccaaaaccagcaacgccttcaactgactccaccaccaccacgactcgcaggccaaccaagaaaccacggacaccccggccagtcgactcggaccgatg

SEQ ID NO: 2138 - DNA, 203 bp, Artificial sequence
  synthetic
ggcgcgccagtcctgatcccgtcagacactttctatgaccatgaggacaccaccactgacaagctgaagctgaccctgaaactgcgggagcagcagctggtgggcgagaagtcctgggtacagttcaacagcaacagccagctcatgtatggccttcccgacagcagccacgtgggcaaacacgagtacgactcggaccgatg

SEQ ID NO: 2139 - DNA, 203 bp, Artificial sequence
  synthetic
ggcgcgccagtcctcttctccaacgccctagagcctgactttaaggccacaagcatcactgtgacgggctctggcagttgtcggcacctacagtttatccctgtggtaccacccaggagagtgccctcagaggcgccgcccacagaagtgcctgacagggaccctgagaagagcagtgaggatgatgtcgactcggaccgatg

SEQ ID NO: 2140 - DNA, 203 bp, Artificial sequence
  synthetic
ggcgcgccagtcctcaagcccccaccctcctccagcatgccactcattctgcaggaggagaaggctcccctaccccctcctgagtaccccaaccagagtgtgcccgagaccactcctctgaaccaggacaccatgggagagtacacgcccctgcgggatgaggatcccaatgcgcctccctaccagcccgactcggaccgatg

SEQ ID NO: 2141 - DNA, 203 bp, Artificial sequence
  synthetic
ggcgcgccagtcctcccaccgcccttcacagcacccatggagggcaagggctcccgtcccaagaacatgaccccataccggtcacctcctccctatgtcccaccttaacccgcaagcgcctgggtggaggcagggtagggcaggggcctggagacgacatggtgttgtctgtggagaccggtggcctgcgactcggaccgatg

SEQ ID NO: 2142 - DNA, 203 bp, Artificial sequence
  synthetic
ggcgcgccagtcctcgcttcatttttgatggctggctctgaaagcaccatgtggagtggaggtggagggagcgaggaaccatgaatgaactcgcaggcagtgccgggcggccccctggctctctgcgttttgcctttaacactaactgtactgttttttctattcacgtgtgtctagctgcaggatgtcgactcggaccgatg

SEQ ID NO: 2143 - DNA, 203 bp, Artificial sequence
  synthetic
ggcgcgccagtcctgccatggacatccccacttccagcccatgtacactagtggcccacgaccaaggggtcttcatttccatgaaaaagggactccaagaggcagtggtggctgtggcccccaactttggtgctccagggtgggccagctgcttgtgggggcacctgggaggtcaaaggtctccaccacgactcggaccgatg

SEQ ID NO: 2144 - DNA, 203 bp, Artificial sequence
  synthetic
ggcgcgccagtcctaaattgttttattaaaaaaaagatttaaaatggtgatgcttacagcagtttgtacgagctcttaagtgttgattccatggaactgacggctttgcttgttttgattcttttccccctacttttcctaatggtttaaattctggaattacactggggttcttttgccttttttagcgactcggaccgatg

SEQ ID NO: 2145 - DNA, 203 bp, Artificial sequence
  synthetic
ggcgcgccagtcctgccttctcccacagggcccagcccctctcccctgccccagtccccagggggtactctggagtgagcagtgcccctgtgggggagcctgtaaatgcgggctcagtggaccactggtgactgggctcatgcctccaagtcagagtttccctggtgccccagagacaggagcacaagcgactcggaccgatg

SEQ ID NO: 2146 - DNA, 203 bp, Artificial sequence
  synthetic
ggcgcgccagtcctagatgggggtgccgggaggagcggatgcagctggagcggctcccttggggtgccgagtggcaggtggggggcggtgagggtccttgagggcgggccttagagtcttcagaagggcaggactctgagggctttttggagctcgctatgcttaacctggagatgattaaggccccgcgactcggaccgatg

SEQ ID NO: 2147 - DNA, 203 bp, Artificial sequence
  synthetic
ggcgcgccagtcctctttttttgttcactgtgcagggattgttcattgctgctggaggaagatcatggactgtcgcgggaaactgaagtggttgagtatccactagtcgtggatgagggcagtgacttcgcagttttttgcgaattacacatctctttgattatgttgtgactagttttgttagatagcgactcggaccgatg

SEQ ID NO: 2148 - DNA, 203 bp, Artificial sequence
  synthetic
ggcgcgccagtccttcatttagtgtttgggatacctgttaagccctttgtccagggactgtggttggatttatgaattatttggacggttgtccacttgaaagaactgacagtagcttcataacaatgttacaaatctcgttctaagattaagctgttgaacctatatttgccattagcgcttaatttcgactcggaccgatg

SEQ ID NO: 2149 - DNA, 203 bp, Artificial sequence
  synthetic
ggcgcgccagtcctttgaagtattatttttatgaatcaagccctggaaaaggacaagatatttgaatgaaatagcacccataatggagaacttcacagttgctactcctgtgataggtttatcttagtttcattgtggtataaatggaatagcaggtgttgtcaggtacaaggtttgtagcttgccaacgactcggaccgatg

SEQ ID NO: 2150 - DNA, 203 bp, Artificial sequence
  synthetic
ggcgcgccagtcctctcaaagcagggctggtgatcatccttttagcagcccatcacctgcgtcaggtggcagtttcagtgagactaagtcaggcgtcctttgtagccttgaggaaagatggtcttcgtatcagaaccaaactgataactcggtttcaaatgatcccttattgatgacacagtattttacgactcggaccgatg

SEQ ID NO: 2151 - DNA, 203 bp, Artificial sequence
  synthetic
ggcgcgccagtccttgtctagtacacctgctccgaagtatttgaaaatattgccttctggtcttaagtataatgcaagacatccttctaccaaggtaatgaagcaaatggatataggtgtgtattttggactacctcccaaaagaaaggaagagaaattgctaggggaaagtgcattagaagggataacgactcggaccgatg

SEQ ID NO: 2152 - DNA, 203 bp, Artificial sequence
  synthetic
ggcgcgccagtccttcagagcagatcccagcatggaacgttctcttcttgcggaccagaaagtccatatgctgtacttagataccacatattgtagcccagaatacacctttccatctcagcaagaggttatccggtttgccatcaacactgcctttgaggctgtaactctaaacccacatgctcttgcgactcggaccgatg

SEQ ID NO: 2153 - DNA, 203 bp, Artificial sequence
  synthetic
ggcgcgccagtcctttgtctgtggcacttactctattggaaaagagaaagtcttcctagccattgctgatgttttaggttcaaaagtgggcatgtcccaggaaaaatataaaactctacagtgcctcaatataccagaaattaattcactcatcactaccgacatgtgcagttcattggttcaccttccgactcggaccgatg

SEQ ID NO: 2154 - DNA, 203 bp, Artificial sequence
  synthetic
ggcgcgccagtcctcttacagtgaacacagcagctacctagaaatgaagcgctttgtccagtggctgaagccccagaaaatcatacctactgtaaatgtgggcacctggaaatctaggagcacaatggagaaatattttagagagtggaaattggaagctggatattgatgatacctccgaggattcacgactcggaccgatg

SEQ ID NO: 2155 - DNA, 203 bp, Artificial sequence
  synthetic
ggcgcgccagtcctgattcgacacggcactggcagcgggaacttgttcccgccaagaccctaaagggattgttcattgctgctggaggaagatcatggactgtcgcgggaaactgaagtggttgagtatccactagtcgtggatgagggcagtgacttcgcagttttttgcgaattacacatctctttcgactcggaccgatg

SEQ ID NO: 2156 - DNA, 203 bp, Artificial sequence
  synthetic
ggcgcgccagtcctaatgataaaatcattttgccatgttagaagacatttccgaagaagacatttgggaatacaaatctaaaagaaaaccaaaacgagttgatccaaataatggctctaaaaatattctaaaatctgttgaaaaagcaacagatggaaaataccagtcaaaacggagtagaaacagaacgactcggaccgatg

SEQ ID NO: 2157 - DNA, 203 bp, Artificial sequence
  synthetic
ggcgcgccagtcctattacaagagatacactcacttcctgctagctcaaagcagggctggtgatcatccttttagcagcccatcacctgcgtcaggtggcagtttcagtgagactaagtcaggcgtcctttgtagccttgaggaaagatggtcttcgtatcagaaccaaactgataactcggtttcaacgactcggaccgatg

SEQ ID NO: 2158 - DNA, 203 bp, Artificial sequence
  synthetic
ggcgcgccagtcctcagtttattgtagtgagataactggcaatttgttgaagaacaagcttcatgtgcaagaacaatatattcacccattgccactggacactgaatgtattgtgaatggtgtcaaagttgttttgcttgatgccaatcactgtccaggtgctgtcatgatcctcttttatcttcctacgactcggaccgatg

SEQ ID NO: 2159 - DNA, 203 bp, Artificial sequence
  synthetic
ggcgcgccagtcctaatgcctctcagcatcatcaaggataactgaaactgggtctccctgggacccttaatttcttgtcccctgccctccatgggcagttatattctgcatcaagccttagaagaggaagcaaaggcagattcagggaccaaaaggattaatgataattaataaagtagtttgaagcacgactcggaccgatg

SEQ ID NO: 2160 - DNA, 203 bp, Artificial sequence
  synthetic
ggcgcgccagtcctatagagcggctcccagcgttccctgcggcgtaggaggcggtccagactataaaagcggctgccggaaagcggccggcacctcattcatttctaccggtctctagtagtgcagcttcggctggtgtcatcggtgtccttcctccgctgccgcccccgcaaggcttcgccgtcatccgactcggaccgatg

SEQ ID NO: 2161 - DNA, 203 bp, Artificial sequence
  synthetic
ggcgcgccagtccttggaaaccctggggagaaattagttaaaaagaagtggaatcttgatgagctgcctaaatttgagaagaatttttatcaagagcaccctgatttggctaggcgcacagcacaagaggtggaaacatacagaagaagcaaggaaattacagttagaggtcacaactgcccgaagcccgactcggaccgatg

SEQ ID NO: 2162 - DNA, 203 bp, Artificial sequence
  synthetic
ggcgcgccagtccttcctgccattgtccacatcaatcatcagccattcctagagagaggcgatgggcctatttgtttggtgctggcaccaactcgggaactggcccaacaggtgcagcaagtagctgctgaatattgtagagcatgtcgcttgaagtctacttgtatctacggtggtgctcctaagggcgactcggaccgatg

SEQ ID NO: 2163 - DNA, 203 bp, Artificial sequence
  synthetic
ggcgcgccagtcctaccacaaatacgtgatttggagagaggtgtggaaatctgtattgcaacacctggaagactgattgactttttagagtgtggaaaaaccaatctgagaagaacaacctaccttgtccttgatgaagcagatagaatgcttgatatgggctttgaaccccaaataaggaagattgtcgactcggaccgatg

SEQ ID NO: 2164 - DNA, 203 bp, Artificial sequence
  synthetic
ggcgcgccagtcctggatcaaataagacctgataggcaaactctaatgtggagtgcgacttggccaaaagaagtaagacagcttgctgaagatttcctgaaagactatattcatataaacattggtgcacttgaactgagtgcaaaccacaacattcttcagattgtggatgtgtgtcatgacgtagacgactcggaccgatg

SEQ ID NO: 2165 - DNA, 203 bp, Artificial sequence
  synthetic
ggcgcgccagtcctaaaggatgaaaaacttattcgtctaatggaagagatcatgagtgagaaggagaataaaaccattgtttttgtggaaaccaaaagaagatgtgatgagcttaccagaaaaatgaggagagatgggtggcctgccatgggtatccatggtgacaagagtcaacaagagcgtgactgcgactcggaccgatg

SEQ ID NO: 2166 - DNA, 203 bp, Artificial sequence
  synthetic
ggcgcgccagtcctggttctaaatgaattcaaacatggaaaagctcctattctgattgctacagatgtggcctccagagggctagatgtggaagatgtgaaatttgtcatcaattatgactaccctaactcctcagaggattatattcatcgaattggaagaactgctcgcagtaccaaaacaggcaccgactcggaccgatg

SEQ ID NO: 2167 - DNA, 203 bp, Artificial sequence
  synthetic
ggcgcgccagtccttttttttttgccagaagagaggtcttcaggagacttcatttaaattctgattattaaactgaggctttaattgatgttaatgccttatgtcaaatgtaaagttagaatttgctagggctgggatagggagtgatatttctaggacttagacattgaaaactaattcagcctgtacgactcggaccgatg

SEQ ID NO: 2168 - DNA, 203 bp, Artificial sequence
  synthetic
ggcgcgccagtccttgcccaaagtcttggaaacttgctggatatgatgtaccgggagccagcacgatggtcctacacattccagacattttcctttttgagccgcctgaaagtacagctggagcccttccctgagaaactcttacaggccaggaagccagtacagatctttgagaggtctgtgtacagcgactcggaccgatg

SEQ ID NO: 2169 - DNA, 203 bp, Artificial sequence
  synthetic
ggcgcgccagtccttcccaaccacctttccatccccagcccctctcatccctggagcactctgccgctcaagagctggtttgttaattattgttagactttgccattgttttcttttgtacctgaagcattttgaaaataaagtttacttaagttatgcttgtttttctaaaaaaaaaaaaaaaaaaacgactcggaccgatg

SEQ ID NO: 2170 - DNA, 203 bp, Artificial sequence
  synthetic
ggcgcgccagtcctgtactagcgtccctgacagcgcggaatctgggtgcagttcctgcagtaccccactctacgatcagggtggcccggtggaaatcctgccctttctgtacctgggcagtgcgtatcacgcttcccgcaaggacatgctggatgccttgggcatcactgccttgatcaacgtctcagcgactcggaccgatg

SEQ ID NO: 2171 - DNA, 203 bp, Artificial sequence
  synthetic
ggcgcgccagtcctccgccatggctgtgctcgaccgaggcacctccaccaccaccgtgttcaacttccccgtctccatccctgtccactccacgaacagtgcgctgagctaccttcagagccccattacgacctctcccagctgctgaaaggccacgggaggtgaggctcttcacatcccattgggaccgactcggaccgatg

SEQ ID NO: 2172 - DNA, 203 bp, Artificial sequence
  synthetic
ggcgcgccagtccttacctggaagatgaagcccggggcaagaactgtggtgtcttggtacattgcttggctggcattagccgctcagtcactgtgactgtggcttaccttatgcagaagctcaatctgtcgatgaacgatgcctatgacattgtcaaaatgaaaaaatccaacatatcccctaacttccgactcggaccgatg

SEQ ID NO: 2173 - DNA, 203 bp, Artificial sequence
  synthetic
ggcgcgccagtccttgtatagatacaggcagtaggtttgctctgtacccatgtgtacagcctacccatgcagggactgggattcgaggacttccaggcgcatagggtagaaccaaatgatagggtaggagcatgtgttctttagggccttgtaaggctgtttccttttgcatctggaactgactatatcgactcggaccgatg

SEQ ID NO: 2174 - DNA, 203 bp, Artificial sequence
  synthetic
ggcgcgccagtcctagaccttgttatggcgaagtctttagtctttttcatgtattttcctcatgattttttctctttatgtagtttgactatgccttacctttgtaaatatttttgcttgtgttgtcgcaaaggggataatctgggaaagacaccaaatcatgggctcactttaaaaaaagaaagaatcgactcggaccgatg

SEQ ID NO: 2175 - DNA, 203 bp, Artificial sequence
  synthetic
ggcgcgccagtcctctgaagcacttctaccctagccgggcccagcccccgagcagtgcagcctcccgagtgcagagtgcagcccctgcccgccctggcccagctgcccatgtctaccctgctggatcccaagtaatgatgatcccttcccagatctcctacccagcctcccagggggcctactacatccgactcggaccgatg

SEQ ID NO: 2176 - DNA, 203 bp, Artificial sequence
  synthetic
ggcgcgccagtcctcctggacaggggcgttccacatacgttgtcccgacacagcagtaccctgtgcagccaggagccccaggcttctatccaggtgcaagccctacagaatttgggacctacgctggcgcctactatccagcccaaggggtgcagcagtttcccactggcgtggcccccgccccagttcgactcggaccgatg

SEQ ID NO: 2177 - DNA, 203 bp, Artificial sequence
  synthetic
ggcgcgccagtcctgagacgccccaggttgctgtcattgtccggccagatgaccggtcacagggagcaatcattgctgaccggccagggctgcctggcccagagcatagcccttcagaatcccagccttcgtcgccttctccgaccccatcaccatccccagtcttggaaccggggtctgagcctaatcgactcggaccgatg

SEQ ID NO: 2178 - DNA, 203 bp, Artificial sequence
  synthetic
ggcgcgccagtccttctgagttttcttccagtcctctccaggctcccacccctttggcatctcacacagtggaaattcatgagcctaatggcatggtcccatctgaagatctggaaccagaggtggagtcaagcccagagcttgctcctcccccagcttgcccctccgaatcccctgtgcccattgctcgactcggaccgatg

SEQ ID NO: 2179 - DNA, 203 bp, Artificial sequence
  synthetic
ggcgcgccagtcctcagaagccagagggattgccacatatcagtgacgtggtgctggacaaggccaataaaacaccactgcggccactggatcccactagactacaaggcataaattgtggcccagacttcactccatcctttgccaaccttggccggacaacccttagcacccgtgggcccccaaggcgactcggaccgatg

SEQ ID NO: 2180 - DNA, 203 bp, Artificial sequence
  synthetic
ggcgcgccagtcctgataaggatcgaggggaagaagatgctgatggcagcaaaacccaggacctattccgcagggtgcgctccatcctgaataaactgacaccccagatgttccagcagctgatgaagcaagtgacgcagctggccatcgacaccgaggaacgcctcaaaggggtcattgacctcattcgactcggaccgatg

SEQ ID NO: 2181 - DNA, 203 bp, Artificial sequence
  synthetic
ggcgcgccagtcctgtttttgagaagaagcaaaaagagatggatgaagctgctacggcagaggaacgaggacgcctgaaggaagagctggaagaggctcgggacatagcccggcggcgctctttagggaatatcaagtttattggagagttgttcaaactgaagatgttaacagaggcaataatgcatcgactcggaccgatg

SEQ ID NO: 2182 - DNA, 203 bp, Artificial sequence
  synthetic
ggcgcgccagtcctggtcctccaggccctcccatcagccgtggacttccccttgtggatgatggtggctggaacacagttcccatcagcaaaggtagccgccccattgacacctcacgactcaccaagatcaccaagcctggctccatcgattctaacaaccagctctttgcacctggagggcgactgcgactcggaccgatg

SEQ ID NO: 2183 - DNA, 203 bp, Artificial sequence
  synthetic
ggcgcgccagtcctgctagcctcacggaggatcgggaccgtgggcgggatgccgtgaagcgagaagctgccctacccccagtgagccccctgaaggcggctctctctgaggaggagttagagaagaaatccaaggctatcattgaggaatatctccatctcaatgacatgaaagaggcagtccagtgccgactcggaccgatg

SEQ ID NO: 2184 - DNA, 203 bp, Artificial sequence
  synthetic
ggcgcgccagtcctgtgcaggagctggcctcaccctccttgctcttcatctttgtacggcatggtgtcgagtctacgctggagcgcagtgccattgctcgtgagcatatggggcagctgctgcaccagctgctctgtgctgggcatctgtctactgctcagtactaccaagggttgtatgaaatcttgcgactcggaccgatg

SEQ ID NO: 2185 - DNA, 203 bp, Artificial sequence
  synthetic
ggcgcgccagtcctctcctgtgcaaaagcatgggtcctaaaaaggtggggacgctgtggcgagaagccgggcttagctggaaggaatttctacctgaaggccaggacattggtgcattcgtcgctgaacagaaggtggagtataccctgggagaggagtcggaagcccctggccagagggcactcccccgactcggaccgatg

SEQ ID NO: 2186 - DNA, 203 bp, Artificial sequence
  synthetic
ggcgcgccagtccttccgaggagctgaacaggcagctggagaagctgctgaaggagggcagcagtaaccagcgggtgttcgactggatagaggccaacctgagtgagcagcagatagtatccaacacgttagttcgagccctcatgacggctgtctgctattctgcaattatttttgagactcccctccgactcggaccgatg

SEQ ID NO: 2187 - DNA, 203 bp, Artificial sequence
  synthetic
ggcgcgccagtcctcgagtggacgttgcagtgctgaaagcgcgagcgaagctgctgcagaaatacctgtgtgacgagcagaaggagctacaggcgctctacgccctccaggcccttgtagtgaccttagaacagcctcccaacctgctgcggatgttctttgacgcactgtatgacgaggacgtggtgcgactcggaccgatg

SEQ ID NO: 2188 - DNA, 203 bp, Artificial sequence
  synthetic
ggcgcgccagtcctcagatggcccggctagccgcctggactgcaggggggcggcagcagcggcggtggcagtgggtgcctgtagtgtgatgtgtctgaactaataaagtggctgaagaggcaggatggcttggggctgcctgggcccccctccaggatgccgccaggtgtccctctcctccccctgggcgactcggaccgatg

SEQ ID NO: 2189 - DNA, 203 bp, Artificial sequence
  synthetic
ggcgcgccagtccttcacttgcctgaaaccggctcctcgacggccgccgcccgcctggccttttagggcctgactcccgcccttcctggcctacactcctgggcggcggcaggcctagcttctggcccagtgcgggttccccggcggcaggcgtatcctgtgtgcccctgggccaggcccgaacccggcgactcggaccgatg

SEQ ID NO: 2190 - DNA, 203 bp, Artificial sequence
  synthetic
ggcgcgccagtccttctcctacccagcctcccagggggcctactacatccctggacaggggcgttccacatacgttgtcccgacacagcagtaccctgtgcagccaggagccccaggcttctatccaggtgcaagccctacagaatttgggacctacgctggcgcctactatccagcccaaggggtgccgactcggaccgatg

SEQ ID NO: 2191 - DNA, 203 bp, Artificial sequence
  synthetic
ggcgcgccagtcctagcagtttcccactggcgtggcccccgccccagttttgatgaaccagccaccccagattgctcccaagagggagcgtaagacgatccgaattcgagatccaaaccaaggaggaaaggatatcacagaggagatcatgtctggggcccgcactgcctccacacccacccctcccccgactcggaccgatg

SEQ ID NO: 2192 - DNA, 203 bp, Artificial sequence
  synthetic
ggcgcgccagtcctagacgggaggcggtctggagcctcaagctaatggggagacgccccaggttgctgtcattgtccggccagatgaccggtcacagggagcaatcattgctgaccggccagggctgcctggcccagagcatagcccttcagaatcccagccttcgtcgccttctccgaccccatcaccgactcggaccgatg

SEQ ID NO: 2193 - DNA, 203 bp, Artificial sequence
  synthetic
ggcgcgccagtcctcatccccagtcttggaaccggggtctgagcctaatctcgcagtcctctctattcctggggacactatgacaactatacaaatgtctgtagaagaatcaacccccatctcccgtgaaactggggagccatatcgcctctctccagaacccactcctctcgccgaacccatactggcgactcggaccgatg

SEQ ID NO: 2194 - DNA, 203 bp, Artificial sequence
  synthetic
ggcgcgccagtcctaagtagaagtgacacttagcaaaccggttccagaatctgagttttcttccagtcctctccaggctcccacccctttggcatctcacacagtggaaattcatgagcctaatggcatggtcccatctgaagatctggaaccagaggtggagtcaagcccagagcttgctcctcccccgactcggaccgatg

SEQ ID NO: 2195 - DNA, 203 bp, Artificial sequence
  synthetic
ggcgcgccagtcctcagcttgcccctccgaatcccctgtgcccattgctccaactgcccaacctgaggaactgctcaacggagccccctcgccaccagctgtggacttaagcccagtcagtgagccagaggagcaggccaaggaggtgacagcatcaatggcgccccccaccatcccctctgctactccgactcggaccgatg

SEQ ID NO: 2196 - DNA, 203 bp, Artificial sequence
  synthetic
ggcgcgccagtcctaggcagcagcagccactcaagtggcagtatctgtgccaaagaggagacggaaaattaaggagctaaataagaaggaggctgttggagaccttctggatgccttcaaggaggcgaacccggcagtaccagaggtggaaaatcagcctcctgcaggcagcaatccaggcccagagtcgactcggaccgatg

SEQ ID NO: 2197 - DNA, 203 bp, Artificial sequence
  synthetic
ggcgcgccagtccttcctgcttggttttcagttcatctttgccagtatgcagaagccagagggattgccacatatcagtgacgtggtgctggacaaggccaataaaacaccactgcggccactggatcccactagactacaaggcataaattgtggcccagacttcactccatcctttgccaaccttgcgactcggaccgatg

SEQ ID NO: 2198 - DNA, 203 bp, Artificial sequence
  synthetic
ggcgcgccagtcctacaccgaggaacgcctcaaaggggtcattgacctcatttttgagaaggccatttcagagcccaacttctctgtggcctatgccaacatgtgccgctgcctcatggcgctgaaagtgcccactacggaaaagccaacagtgactgtgaacttccgaaagctgttgttgaatcgatcgactcggaccgatg

SEQ ID NO: 2199 - DNA, 203 bp, Artificial sequence
  synthetic
ggcgcgccagtcctagcagctcatggccaagggcagtgacaagcgtcggggcggtcctccaggccctcccatcagccgtggacttccccttgtggatgatggtggctggaacacagttcccatcagcaaaggtagccgccccattgacacctcacgactcaccaagatcaccaagcctggctccatcgcgactcggaccgatg

SEQ ID NO: 2200 - DNA, 203 bp, Artificial sequence
  synthetic
ggcgcgccagtcctgagaacggccctcccagcctgaggggctgcgcaaggcagctagcctcacggaggatcgggaccgtgggcgggatgccgtgaagcgagaagctgccctacccccagtgagccccctgaaggcggctctctctgaggaggagttagagaagaaatccaaggctatcattgaggaatcgactcggaccgatg

SEQ ID NO: 2201 - DNA, 203 bp, Artificial sequence
  synthetic
ggcgcgccagtcctctactgctcagtactaccaagggttgtatgaaatcttggaattggctgaggacatggaaattgacatcccccacgtgtggctctacctagcggaactggtaacacccattctgcaggaaggtggggtgcccatgggggagctgttcagggagattacaaagcctctgagaccgtcgactcggaccgatg

SEQ ID NO: 2202 - DNA, 203 bp, Artificial sequence
  synthetic
ggcgcgccagtccttgggcaaagctgcttccctgttgctggagatcctgggcctcctgtgcaaaagcatgggtcctaaaaaggtggggacgctgtggcgagaagccgggcttagctggaaggaatttctacctgaaggccaggacattggtgcattcgtcgctgaacagaaggtggagtataccctggcgactcggaccgatg

SEQ ID NO: 2203 - DNA, 203 bp, Artificial sequence
  synthetic
ggcgcgccagtccttccaggatgccgccaggtgtccctctcctccccctggggcacagagatatattatatataaagtcttgaaatttggtgtgtcttggggtggggaggggcaccaacgcctgcccctggggtccttttttttattttctgaaaatcactctcgggactgccgtcctcgctgctgggcgactcggaccgatg

SEQ ID NO: 2204 - DNA, 203 bp, Artificial sequence
  synthetic
ggcgcgccagtcctgcagacggcaaccgggccgctgattgggcggcgaaggagccattcggggagactctggtgggttcggctgccccaagagtgataagttcggcttcagacacgccttagcgccagcagtgagtcggagctctatggaggtggcagcgggtaccgagtggcggctgcagcagcgaccgactcggaccgatg

SEQ ID NO: 2205 - DNA, 203 bp, Artificial sequence
  synthetic
ggcgcgccagtcctgaacgagccaagtccttaatggatcagtactttgcccgaatgtgctccttgatgttaagtaaggaattgccagcaaggattcgtttcctgctgcaggataccgtagagttgcgagaacaccattgggttcctcgcaaggcttttcttgacaatggaccaaagacgatcaatcaacgactcggaccgatg

SEQ ID NO: 2206 - DNA, 203 bp, Artificial sequence
  synthetic
ggcgcgccagtcctattcgtcaagatgcagtaaaagatctaggggtgtttattcctgctcctatggctcaagggatgagaagtgacttctttctggagggaccgttcatgccacccaggatgaaaatggatagggacccacttggaggacttgctgatatgtttggacaaatgccaggtagcggaattcgactcggaccgatg

SEQ ID NO: 2207 - DNA, 203 bp, Artificial sequence
  synthetic
ggcgcgccagtcctccaccgtcaaaggaagaactccttaaactaactgaaactgttgtgactgaatatctaaatagtggaaatgcaaatgaggctgtcaatggtgtaagagaaatgagggctcctaaacactttcttcctgagatgttaagcaaagtaatcatcctgtcactagatagaagcgatgaacgactcggaccgatg

SEQ ID NO: 2208 - DNA, 203 bp, Artificial sequence
  synthetic
ggcgcgccagtcctacttccctaacttgcgcctgggtgggaggaatgctccgctcttttgttcccaggaagggaaaaacggggcggaggttcctgctgccatgttgtggccctggtcttccgcctgcaagtgctagtcctgtacacccggccccctctcgcgcgtctttccacgagctctccacggggcgactcggaccgatg

SEQ ID NO: 2209 - DNA, 203 bp, Artificial sequence
  synthetic
ggcgcgccagtcctaggaggcgaaagggtggacaggggaaaactgctgaagagctttcggagagacctcatctagtcgctggcctcgtcaaggcagtaaaaattcctagggcagacattttccacgtgatgttgctcgtgtctgtagttagacttttctattgatctcagtgctcagttttaaagatacgactcggaccgatg

SEQ ID NO: 2210 - DNA, 203 bp, Artificial sequence
  synthetic
ggcgcgccagtcctagcactagacgagatgacaactccgcagcaaacaactccgcaaacgaaaaagaacgacatgatgcaatcttcaggaaagtaagaggcatactaaataagcttactcctgaaaagtttgacaagctatgccttgagctcctcaatgtgggtgtagagtctaaactcatccttaaacgactcggaccgatg

SEQ ID NO: 2211 - DNA, 203 bp, Artificial sequence
  synthetic
ggcgcgccagtcctttacaagatgaatttgaaaaccgaactagaaatgttgatgtctatgataagcgtgaaaatcccctcctccccgaggaggaggaacagagagccattgctaagatcaagatgttgggaaacatcaaattcattggagagcttggcaagcttgatcttattcacgaatctatccttcgactcggaccgatg

SEQ ID NO: 2212 - DNA, 203 bp, Artificial sequence
  synthetic
ggcgcgccagtccttcaaatcaactcttcaatggccatgggggacacatcatgcctcccacacaatcgcagtttggagagatgggaggcaagtttatgaaaagccaggggctaagccagctctaccataaccagagtcagggactcttatcccagctgcaaggacagtcgaaggatatgccacctcggcgactcggaccgatg

SEQ ID NO: 2213 - DNA, 203 bp, Artificial sequence
  synthetic
ggcgcgccagtcctgacatccctttggtgaaatcctatttagcacagtttgcagctcgtgccatcatttcagagctggtgagcatttcagaactagctcaaccactagaaagtggcacccattttcctctcttcctactttgtcttcagcagttagctaaattacaagatcgagaatggttaacagaacgactcggaccgatg

SEQ ID NO: 2214 - DNA, 203 bp, Artificial sequence
  synthetic
ggcgcgccagtcctctactatctttcaagccagtaatgcagaaatttcttcatgatcacgttgatctacaagtcagtgccctgtatgctctccaggtgcactgctataacagcaacttcccaaaaggcatgttacttcgcttttttgtgcacttctatgacatggaaattattgaagaagaagctttccgactcggaccgatg

SEQ ID NO: 2215 - DNA, 203 bp, Artificial sequence
  synthetic
ggcgcgccagtcctccctggactctctcaaaccccttatccctctggacagaatgcaggtccaaccacgctggtataccctcaaacccctcagacaatgaattcacaacctcaaacccgttctccgtttttccagaggcctcaaatacagcctcctagagctaccatcccgaacagcagtccttccatcgactcggaccgatg

SEQ ID NO: 2216 - DNA, 203 bp, Artificial sequence
  synthetic
ggcgcgccagtccttcgtcctggtgcacagacacccactgcagtgtaccaggctaatcagcacatcatgatggttaaccatctgcccatgccgtacccagtgccccaggggcctcagtactgtataccacagtaccgtcatagtggccctccttatgttgggcccccccaacaatatccagttcaacccgactcggaccgatg

SEQ ID NO: 2217 - DNA, 203 bp, Artificial sequence
  synthetic
ggcgcgccagtcctaaaccagggaggtaaagacataacagaggagattatgtctggaggtggcagcagaaatcctactccacccataggaagacccacgtccacacctactcctcctcagcagctgcccagccaggtccccgagcacagccctgtggtttatgggactgtggagagcgctcatcttgccgactcggaccgatg

SEQ ID NO: 2218 - DNA, 203 bp, Artificial sequence
  synthetic
ggcgcgccagtcctatcctggaagcctactgatactgaaggtaagaagcagtatgacagggagtttctgctggacttccagttcatgcctgcctgtatacaaaaaccagagggcctgcctcctatcagtgatgtggttcttgacaagatcaaccaacccaaattgccaatgcgaactctggatcctcgcgactcggaccgatg

SEQ ID NO: 2219 - DNA, 203 bp, Artificial sequence
  synthetic
ggcgcgccagtcctaattttgcctcgaggaccagactttacaccagcctttgctgattttggaaggcagacacctggtggaagaggcgtacctttgttgaatgttgggtcacgaagatctcaacctggccaaagaagagaacccagaaagatcatcacagtttctgtaaaagaagatgtacacctgaacgactcggaccgatg

SEQ ID NO: 2220 - DNA, 203 bp, Artificial sequence
  synthetic
ggcgcgccagtcctggagcggctgaaaggagttattgacctggtctttgagaaggctattgatgaacccagtttctctgtggcttacgcaaacatgtgtcgatgtctagtaacgctgaaagtacccatggcagacaagcctggtaacacagtgaatttccggaagctgctactgaaccgttgccagaacgactcggaccgatg

SEQ ID NO: 2221 - DNA, 203 bp, Artificial sequence
  synthetic
ggcgcgccagtcctactcaaaatgctgactgaagccatcatgcatgactgtgtggtgaagctgctaaagaaccatgatgaagaatccctggagtgcctgtgtcgcctgctcaccaccattggcaaagacttggactttgaaaaagcaaagccacgtatggaccagtactttaatcagatggagaaaatcgactcggaccgatg

SEQ ID NO: 2222 - DNA, 203 bp, Artificial sequence
  synthetic
ggcgcgccagtcctgggaaaaggcagcagtggtggagcaaaggcaagtgagactgatgccttacggtcaagtgcttccagtttaaacagattctctgccctgcaacctccagcaccctcagggtccacgccatccacgcctgtagagtttgattcccgaaggaccttaactagtcgtggaagtatgggcgactcggaccgatg

SEQ ID NO: 2223 - DNA, 203 bp, Artificial sequence
  synthetic
ggcgcgccagtcctcagggagaagaatgacaagccccttccatctgcaacagctcggccaaatactttcatgaggggtggcagcagtaaagacctgctagacaatcagtctcaagaagagcagcggagagagatgctggagaccgtgaagcagctcacaggaggtgtggatgtggagaggaacagcaccgactcggaccgatg

SEQ ID NO: 2224 - DNA, 203 bp, Artificial sequence
  synthetic
ggcgcgccagtcctgaatgcccagggcctactacatgtttttgtgagagtgggagtggagtccaccctggaaaggagccagatcaccagggatcacatgggccaattactctatcagctggtacagtcagaaaaactcagcaaacaggactttttcaaaggtttttcagaaactttggaattggcagacgactcggaccgatg

SEQ ID NO: 2225 - DNA, 203 bp, Artificial sequence
  synthetic
ggcgcgccagtccttgacatggccattgatattccccatatttggttgtaccttgctgaactggtgacccccatgttaaaagaaggtggaatctccatgagagaacttaccatagaatttagcaaacctttacttcctgttggaagagctggggtcttgctatctgaaatattgcacctactatgcaacgactcggaccgatg

SEQ ID NO: 2226 - DNA, 203 bp, Artificial sequence
  synthetic
ggcgcgccagtcctcaatttaagtatttttttaaaaagtttcacgtcttcgccaatcacagtgcagcaaggccaattctcgcagaaacccccacgtgtgcacgagtgggagaggggaaagagaaaaaaaggtgatcatggaggaaaaaggtactggataaaagtaaacttcaaaccttagggcgggagcgactcggaccgatg

SEQ ID NO: 2227 - DNA, 203 bp, Artificial sequence
  synthetic
ggcgcgccagtcctacaaattcctagaggacctgtgcaacaacctcttgaggatcgaatcttcactcccgctgtctcagcagtctacagcacggtaacacaagtggcaagacagccgggaacccctaccccatccccttattcagcacatgaaataaacaaggggcatccaaatcttgcggcaacgcccgactcggaccgatg

SEQ ID NO: 2228 - DNA, 203 bp, Artificial sequence
  synthetic
ggcgcgccagtcctgaacagcagtccttccattcgtcctggtgcacagacacccactgcagtgtaccaggctaatcagcacatcatgatggttaaccatctgcccatgccgtacccagtgccccaggggcctcagtactgtataccacagtaccgtcatagtggccctccttatgttgggcccccccacgactcggaccgatg

SEQ ID NO: 2229 - DNA, 203 bp, Artificial sequence
  synthetic
ggcgcgccagtcctacaatatccagttcaaccaccggggccaggtcctttttatcctggaccaggacctggggacttccccaatgcttatggaacgcctttttacccaagtcagccggtgtatcagtcagcacctatcatagtgcctacgcagcaacagccgcctccagccaagagagagaaaaaaaccgactcggaccgatg

SEQ ID NO: 2230 - DNA, 203 bp, Artificial sequence
  synthetic
ggcgcgccagtcctgagcgctcatcttgctgccagcacccctgtcactgcagctagcgaccagaagcaagaggagaagccaaaaccagatccagtgttaaagtctccttccccagtccttaggctagtcctcagtggagagaagaaagaacaagaaggccagacatctgaaactactgcaatagtatccgactcggaccgatg

SEQ ID NO: 2231 - DNA, 203 bp, Artificial sequence
  synthetic
ggcgcgccagtcctcatagcagagcttcctctgcctccatcacctaccactgtttcttctgttgctcgaagtacaattgcagcccccacctcttctgctcttagtagccaaccaatattcaccactgctatagatgacagatgtgaactctcatccccaagagaagacacaattcctatacccagcctcgactcggaccgatg

SEQ ID NO: 2232 - DNA, 203 bp, Artificial sequence
  synthetic
ggcgcgccagtcctaactctggatcctcgaattttgcctcgaggaccagactttacaccagcctttgctgattttggaaggcagacacctggtggaagaggcgtacctatttgcaaagtgcagagcaggcatggattgccaattctggaacagagcaaagccccaacttgccctccactggtgatgtccgactcggaccgatg

SEQ ID NO: 2233 - DNA, 203 bp, Artificial sequence
  synthetic
ggcgcgccagtcctacacccacccatgaagagcctgcctctagggttgttgaatgttgggtcacgaagatctcaacctggccaaagaagagaacccagaaagatcatcacagtttctgtaaaagaagatgtacacctgaaaaaggcagaaaatgcctggaagccaagccaaaaacgagacagccaagccgactcggaccgatg

SEQ ID NO: 2234 - DNA, 203 bp, Artificial sequence
  synthetic
ggcgcgccagtcctgaaagaacttgaggctgccagtgctccagaggagaggacaaggcttcatgatgaactggaagaagccaaggacaaagcccggcggagatccattggcaacatcaagtttattggagaactctttaaactcaaaatgctgactgaagccatcatgcatgactgtgtggtgaagctcgactcggaccgatg

SEQ ID NO: 2235 - DNA, 203 bp, Artificial sequence
  synthetic
ggcgcgccagtccttgttatagacctaaggctgtgcaattgggtatctcgaagagcagatcaagggcctaaaactatcgaacagattcacaaagaggctaaaatagaagaacaagaagagcaaaggaaggtccagcaactcatgaccaaagagaagagaagaccaggtgtccagagagtggacgaaggcgactcggaccgatg

SEQ ID NO: 2236 - DNA, 203 bp, Artificial sequence
  synthetic
ggcgcgccagtcctacggtcaagtgcttccagtttaaacagattctctgccctgcaacctccagcaccctcagggtccacgccatccacgcctgtagagtttgattcccgaaggaccttaactagtcgtggaagtatgggcagggagaagaatgacaagccccttccatctgcaacagctcggccaaacgactcggaccgatg

SEQ ID NO: 2237 - DNA, 203 bp, Artificial sequence
  synthetic
ggcgcgccagtccttactttcatgaggggtggcagcagtaaagacctgctagacaatcagtctcaagaagagcagcggagagagatgctggagaccgtgaagcagctcacaggaggtgtggatgtggagaggaacagcactgaggctgagcgaaataaaacaagggagtcagcaaaaccagaaatttccgactcggaccgatg

SEQ ID NO: 2238 - DNA, 203 bp, Artificial sequence
  synthetic
ggcgcgccagtcctcaagtacctagactcagatacagagaaggaactgcaagcactttatgcactacaagcatcgatagtaaaacttgatcaacctgccaatttgctgcggatgttttttgattgtctatatgacgaggaggtgatctccgaggatgccttctacaaatgggagagcagcaaggaccccgactcggaccgatg

SEQ ID NO: 2239 - DNA, 203 bp, Artificial sequence
  synthetic
ggcgcgccagtcctgcagcaaggccaattctcgcagaaacccccacgtgtgcacgagtgggagaggggaaagagaaaaaaaggtgatcatggaggaaaaaggtactggataaaagtaaacttcaaaccttagggcgggagcactaaaaccaaaatacatgtattatttatagaaaatattttctgtttcgactcggaccgatg

SEQ ID NO: 2240 - DNA, 203 bp, Artificial sequence
  synthetic
ggcgcgccagtcctttctggtcgaagacgcaggttctggactggatcagctaccaagtggagaagaacaagtacgacgcaagcgccattgacttctcacgatgtgacatggatggcgccaccctctgcaattgtgcccttgaggagctgcgtctggtctttgggcctctgggggaccaactccatgcccgactcggaccgatg

SEQ ID NO: 2241 - DNA, 203 bp, Artificial sequence
  synthetic
ggcgcgccagtcctagctgatgttttggtgtattgtcagccatcgtcctgggactcggagactatggcctcgcctccccaccctcctcttggaattacaagccctggggtttgaagctgactttatagctgcaagtgtatctccttttatctggtgcctcctcaaacccagtctcagacactaaatgccgactcggaccgatg

SEQ ID NO: 2242 - DNA, 203 bp, Artificial sequence
  synthetic
ggcgcgccagtccttaatttatgtgctatataaatatgtcagatgtacatagagatctattttttctaaaacattcccctccccactcctctcccacagagtgctggactgttccaggccctccagtgggctgatgctgggacccttaggatggggctcccagctcctttctcctgtgaatggaggcacgactcggaccgatg

SEQ ID NO: 2243 - DNA, 203 bp, Artificial sequence
  synthetic
ggcgcgccagtcctgagacctccaataaagtgccttctgggctttttctaacctttgtcttagctacctgtgtactgaaatttgggcctttggatcgaatatggtcaagaggttggaggggaggaaaatgaaggtctaccaggctgagggtgagggcaaaggctgacgaagaggggagttacagatttcgactcggaccgatg

SEQ ID NO: 2244 - DNA, 203 bp, Artificial sequence
  synthetic
ggcgcgccagtcctaggtttgttacatgggtatattgtgtgatgctgagcttgggatgcgaatgatcctgtcacccaggtagtgagtatagcacccagtgaaactgtagtctcatgccaggcactgtgctagcccactctggctcatttaatcctctcctaagaagagaggagacacagcgtccccatcgactcggaccgatg

SEQ ID NO: 2245 - DNA, 203 bp, Artificial sequence
  synthetic
ggcgcgccagtccttctgttccccctgctgccacctttggggccgatgacttggtactgaccctgagcaacccccagatgtcattggagggtacagagaaggccagctggttgggggaacagccccagttctggtcgaagacgcaggttctggactggatcagctaccaagtggagaagaacaagtaccgactcggaccgatg

SEQ ID NO: 2246 - DNA, 203 bp, Artificial sequence
  synthetic
ggcgcgccagtcctgagaaggatggcatggccttccaggaggccctagacccagggccctttgaccagggcagcccctttgcccaggagctgctggacgacggtcagcaagccagcccctaccaccccggcagctgtggcgcaggagccccctcccctggcagctctgacgtctccaccgcagggactcgactcggaccgatg

SEQ ID NO: 2247 - DNA, 203 bp, Artificial sequence
  synthetic
ggcgcgccagtcctggtgcttctcggagctcccactcctcagactccggtggaagtgacgtggacctggatcccactgatggcaagctcttccccagcgatggttttcgtgactgcaagaagggggatcccaagcacgggaagcggaaacgaggccggccccgaaagctgagcaaagagtactgggaccgactcggaccgatg

SEQ ID NO: 2248 - DNA, 203 bp, Artificial sequence
  synthetic
ggcgcgccagtccttgtctcgagggcaagaagagcaagcacgcgcccagaggcacccacctgtgggagttcatccgggacatcctcatccacccggagctcaacgagggcctcatgaagtgggagaatcggcatgaaggcgtcttcaagttcctgcgctccgaggctgtggcccaactatggggccaacgactcggaccgatg

SEQ ID NO: 2249 - DNA, 203 bp, Artificial sequence
  synthetic
ggcgcgccagtcctctatacccgggaccaaactcacggaccactcgaggcctgcaaaccttcctgggaggacaggcaggccagatggcccctccactggggaatgctcccagctgtgctgtggagagaagctgatgttttggtgtattgtcagccatcgtcctgggactcggagactatggcctcgcccgactcggaccgatg

SEQ ID NO: 2250 - DNA, 203 bp, Artificial sequence
  synthetic
ggcgcgccagtccttcccctccccactcctctcccacagagtgctggactgttccaggccctccagtgggctgatgctgggacccttaggatggggctcccagctcctttctcctgtgaatggaggcagagacctccaataaagtgccttctgggctttttctaacctttgtcttagctacctgtgtacgactcggaccgatg

SEQ ID NO: 2251 - DNA, 203 bp, Artificial sequence
  synthetic
ggcgcgccagtcctcggaagcttttcctggtgtgggcgcttctaacctaatcctcaatcgattccagaactattactctgtttccacagtgatactgtgtctaggttttagggaggacagttcattgatgttacttaagaatgctttccaggtggaaagttccttaagtttgaggcttcaaattccatcgactcggaccgatg

SEQ ID NO: 2252 - DNA, 203 bp, Artificial sequence
  synthetic
ggcgcgccagtccttgccccagccctcagggccgccagcaaggaagaaatttgtgatacccctcgacgaggatgaggtccctcctggagtggccaagcccttattccgatctacacagagccttcccactgtggacacctcggcccaggcggcccctcagacctacgccgaatatgccatctcacagccgactcggaccgatg

SEQ ID NO: 2253 - DNA, 203 bp, Artificial sequence
  synthetic
ggcgcgccagtccttaattcccgactatgtgctgggccagagcacctgtgccctgttcctcagcctccgctaccacaacctgcacccagactacatccatgggcggctgcagagcctggggaagaacttcgccttgcgggtcctgcttgtccaggtggatgtgaaagatccccagcaggccctcaaggcgactcggaccgatg

SEQ ID NO: 2254 - DNA, 203 bp, Artificial sequence
  synthetic
ggcgcgccagtcctagctggctaagatgtgtatcctggccgactgcacattgatcctcgcctggagccccgaggaagctgggcggtacctggagacctacaaggcctatgagcagaaaccagcggacctcctgatggagaagctagagcaggacttcgtctcccggtctctggaacagctcatcgccgcgactcggaccgatg

SEQ ID NO: 2255 - DNA, 203 bp, Artificial sequence
  synthetic
ggcgcgccagtcctcatcaagagaagatctggccttatgcccaggcctgggccctcagaaagcccggaggctgtttgatgtcctgcacgagcccttcttgaaagtaccctgatgaccccagctgccaaggaaacccccagtgtaataataaatcgtcctcccaggccaggctcctgctggctgcgctgcgactcggaccgatg

SEQ ID NO: 2256 - DNA, 203 bp, Artificial sequence
  synthetic
ggcgcgccagtcctgtggcggccctggcatctcctcttggggcactgtctctggcatccggctttcctgactctgcttcttcctcttcttggtggatcccggagttgccctggcttcaggctgtccctcccctggcagttcaggctctagtggctgaattggctcagtcactgtgtgacctctctcttcgactcggaccgatg

SEQ ID NO: 2257 - DNA, 203 bp, Artificial sequence
  synthetic
ggcgcgccagtcctctggctgttgaggcgccatggtcccccctggggactccagaggcttcatctccggctccactggctccatcgcctccgtccctggctccatcattgccatctgtcccttttcttttttcctcttcttcgtagggggcagagggatggcttcctccagtggctccaccttcacctcgactcggaccgatg

SEQ ID NO: 2258 - DNA, 203 bp, Artificial sequence
  synthetic
ggcgcgccagtcctgtggctgagactcaactgtcaccccctcctctggctccatcccttccgtccccttttgcctctttctctttttggtcggggacaggactgtgtcttctagaggctcagtgttaatctgttcctgcttcactgtcttgtcttctggctcgaaggtttctttccctttgggcttctcgactcggaccgatg

SEQ ID NO: 2259 - DNA, 203 bp, Artificial sequence
  synthetic
ggcgcgccagtccttcctcttcttggtggtggacgggaacagcactcccagaggctccagtgtctccactgtgggctctgtccccacaggccctgctgcctctggttctttcagctgctgattttttttcttcttcttcttccgcacatccatttctggcgaccccaaagccatgtccacctccagggcgactcggaccgatg

SEQ ID NO: 2260 - DNA, 203 bp, Artificial sequence
  synthetic
ggcgcgccagtcctccccgtgcccattcactgcctcctgagtgactggggcctctgtcacctgcatctcctttttcttcttccctgaggtgagcaggttgggggccaaggctgacctaggccctgtgactggtgggttgcccccaaaggcacagaaccgaggcctcaggccaggagggatctgtggtgcgactcggaccgatg

SEQ ID NO: 2261 - DNA, 203 bp, Artificial sequence
  synthetic
ggcgcgccagtcctggggacttgctgggatgggctgcagagggctccctgacagggattgctggggaccctcaaggatccttagggtgccctggggggctgaggcacaggtgagtccacctcctgcctccgttgagggggccagcagggtcgcttctccagcttggggacagctgctgaggactcgatcgactcggaccgatg

SEQ ID NO: 2262 - DNA, 203 bp, Artificial sequence
  synthetic
ggcgcgccagtcctgcctaggctggagtgcagtggcatgatctcggctcactgcaatgtccacctcctgggttcaagcgattctcctgcctcagcctctcaagtagctgggattacaggcacctgccaccacgcccagccaatttttgtatttttagtagagacaatttcactatgttggccaggctgcgactcggaccgatg

SEQ ID NO: 2263 - DNA, 203 bp, Artificial sequence
  synthetic
ggcgcgccagtcctgagccgaaggtggaggtcaaaggggcgtggcgttacagagcctctagcgctgggtgttggggacctgacgctatggagctctcggagttttgtgggggacggctgtgagtggggggttcctgctgcgggatgagaacgtagacgccagtggctcactcgctcctggcaccttcccgactcggaccgatg

SEQ ID NO: 2264 - DNA, 203 bp, Artificial sequence
  synthetic
ggcgcgccagtcctaggcggcccctcagacctacgccgaatatgccatctcacagcctctggaaggggctggggccacgtgccccacagggtcagagcccctggcaggagagacgcccaaccaggccctgaaacccggggcaaaatccaacagcatcattgtgagccctcggcagaggggcaatcccgcgactcggaccgatg

SEQ ID NO: 2265 - DNA, 203 bp, Artificial sequence
  synthetic
ggcgcgccagtcctagcaggacttcgtctcccgggtgactgaatgtctgaccaccgtgaagtcagtcaacaaaacggacagtcagaccctcctgaccacatttggatctctggaacagctcatcgccgcatcaagagaagatctggccttatgcccaggcctgggccctcagaaagtaagagctctggcgactcggaccgatg

SEQ ID NO: 2266 - DNA, 203 bp, Artificial sequence
  synthetic
ggcgcgccagtcctgcaggtgctgacaatactgctgccttacccgccatacattaaggagcagggtcctggtcctaaagagttattcaaatgaaggtggttcgacgccccgaacctcacctgacctcaactaacccttaaaaatgcacacctcatgagtctacctgagcattcaggcagcactgacaacgactcggaccgatg

SEQ ID NO: 2267 - DNA, 203 bp, Artificial sequence
  synthetic
ggcgcgccagtcctaacttgacccaggtggctagcaaattagaaacaccattcatctctaacatatgatactgatgccatgtaaaggcctttaataagtcattgaaatttactgtgagactgtatgttttaattgcatttaaaaatatatagcttgaaagcagttaaactgattagtattcaggcactcgactcggaccgatg

SEQ ID NO: 2268 - DNA, 203 bp, Artificial sequence
  synthetic
ggcgcgccagtcctcttagaaggaagaggttggtagttccctgctctgttttgaacatgctctagtttattaacctggggacattcccattgctgtcttaagtaagtctcatagccagctcctgtcacgtgactctcatatggattcattttcgggccagctctgaacaaagcatcatgaacatatgtcgactcggaccgatg

SEQ ID NO: 2269 - DNA, 203 bp, Artificial sequence
  synthetic
ggcgcgccagtcctccatgcaaaagtggggctaaatgaagtgtgttaaggggtcggctaagtgggacattagtaactgcacactatttccctctactgagtaaaccctatctgtgattcccccaaacatctggcatggctcccttttgtccttcctgtgccctgcaaatattagcaaagaagcttcatcgactcggaccgatg

SEQ ID NO: 2270 - DNA, 203 bp, Artificial sequence
  synthetic
ggcgcgccagtcctgccaggttaggaaggcagcattccatgaccagaaacagggacaaagaaatccccccttcagaacagaggcatttaaaatggaaaagagagattggattttggtgggtaacttagaaggatggcatctccatgtagaataaatgaagaaagggaggcccagccgcaggaaggcagcgactcggaccgatg

SEQ ID NO: 2271 - DNA, 203 bp, Artificial sequence
  synthetic
ggcgcgccagtcctttgaatggagattctgattcagtgggttgggggcagagtttctgcagttccatcaggtcccccccaggtgcaggtgctgacaatactgctgccttacccgccatacattaaggagcagggtcctggtcctaaagagttattcaaatgaaggtggttcgacgccccgaacctcaccgactcggaccgatg

SEQ ID NO: 2272 - DNA, 203 bp, Artificial sequence
  synthetic
ggcgcgccagtcctctgacctcaactaacccttaaaaatgcacacctcatgagtctacctgagcattcaggcagcactgacaatagttatgcctgtactaaggagcatgattttaagaggctttggcccaatgcctataaaatgcccatttcgaagatatacaaaaacatacttcaaaaatgttaaaccgactcggaccgatg

SEQ ID NO: 2273 - DNA, 203 bp, Artificial sequence
  synthetic
ggcgcgccagtcctagtgcaattgaagaattgacctaagtaagctgacattatggttaataatagtattttagatttgtgcagcaaaataatttcataacttttttgtttttgttacttggataagatcaatctgttttattttagtaaatctttgcaggcaagttagagaaaatgcagtgtggcttacgactcggaccgatg

SEQ ID NO: 2274 - DNA, 203 bp, Artificial sequence
  synthetic
ggcgcgccagtccttgatgaaagatgctgtggattcaattctttcagtcaagaataaacacagactttgtaggttcctgctgaataaagcaaatcccagaaacccagattttggaagaatcagcaaccccagcataaaataaacccctatcaaaatgtcagaggacatggcaaggtaaacttagcattcgactcggaccgatg

SEQ ID NO: 2275 - DNA, 203 bp, Artificial sequence
  synthetic
ggcgcgccagtccttgtccaagagcacgcagtttgagtacgcctggtgcctggtgcggagcaagtacaatgatgacatccgtaaaggcatcgtgctgctcgaggagctgctgcccaaagggagcaaggaggaacagcgggattacgtcttctacctggccgtggggaactaccggctcaaggaatacgcgactcggaccgatg

SEQ ID NO: 2276 - DNA, 203 bp, Artificial sequence
  synthetic
ggcgcgccagtcctctgtgtccaagtccaaatcctgaaggagacgcgggagcccacggagaacgctccaggagggcctgtccatcctcgctgtcctttccctgttctccccctgccccccgtctctatcctctgtggccttcagctaatttctgctcccctgagattcgtccttcagccccatcatgtcgactcggaccgatg

SEQ ID NO: 2277 - DNA, 203 bp, Artificial sequence
  synthetic
ggcgcgccagtcctgcagattccatttcatgatgtcagattcccacctcctgtaggttataataaagatataaatgaaagtgatgaagttgaggtgtattccagagcaaatgaaaaagagccttgctgttggtggttagctaaagtgaggatgataaagggtgagttttatgtgatagaatatgcagccgactcggaccgatg

SEQ ID NO: 2278 - DNA, 203 bp, Artificial sequence
  synthetic
ggcgcgccagtcctggaaattatgccaccaaattcccttccttccaataattcaagggttggacctaatgccccagaagaaaaaaaacatttagatataaaggaaaacagcacccatttttctcaacctaacagtacaaaagtccagagggtgttagtggcttcatcagttgtagcaggggaatcccacgactcggaccgatg

SEQ ID NO: 2279 - DNA, 203 bp, Artificial sequence
  synthetic
ggcgcgccagtcctcgtggatggtcagcaaccactcgtgaatggagtaccctaaactgcataattctgaagttatatttcctataccatttccgtaattcttattccatattagaaaactttgttaggccaaagacaaatagtaggcaagatggcacagggcatgaaatgaacacaaattatgctaagcgactcggaccgatg

SEQ ID NO: 2280 - DNA, 203 bp, Artificial sequence
  synthetic
ggcgcgccagtcctaattttttattttttggtattggccataagcaacaattttcagatttgcacaaaaagataccttaaaatttgaaacattgcttttaaaactacttagcacttcagggcagattttagttttattttctaaagtactgagcagtgatattctttgttaatttggaccattttcctcgactcggaccgatg

SEQ ID NO: 2281 - DNA, 203 bp, Artificial sequence
  synthetic
ggcgcgccagtcctgcattgggtgatcattcaccagtacattctcagtttttcttaatatatagcatttatggtaatcatattagacttctgttttcaatctcgtatagaagtcttcatgaaatgctatgtcatttcatgtcctgtgtcagtttatgttttggtccacttttccagtattttagtggacgactcggaccgatg

SEQ ID NO: 2282 - DNA, 203 bp, Artificial sequence
  synthetic
ggcgcgccagtccttttttttctttttttcttttgttttttgaagtgttggggtttggttttgttttttgagtcttttttttttaagtgaaatttattgaggaaaaatatgtgaaggaccttcactctaagatgttatatttttcttaaaaagtaactcctagtaggggtaccactgaatctgtacagcgactcggaccgatg

SEQ ID NO: 2283 - DNA, 203 bp, Artificial sequence
  synthetic
ggcgcgccagtccttgatttctagttatttattctgggaatgtatagtatttgaaaacagaaattggtaccttgcacacatcatctgtaagctgtttggttttaaaatactgtagataattaaccaaggtagaatgaccttgtaatgtaactgctcttgggcaatattctctgtacatattagcgacacgactcggaccgatg

SEQ ID NO: 2284 - DNA, 203 bp, Artificial sequence
  synthetic
ggcgcgccagtcctagagcaagaggcaggctcagcaaatggttcagccccagtccccggtggctgtcagtcaaagcaagcccggttgttatgacaatggaaaacactatcagataaatcaacagtgggagcggacctacctaggcaatgcgttggtttgtacttgttatggaggaagccgaggttttacgactcggaccgatg

SEQ ID NO: 2285 - DNA, 203 bp, Artificial sequence
  synthetic
ggcgcgccagtcctactgcgagagtaaacctgaagctgaagagacttgctttgacaagtacactgggaacacttaccgagtgggtgacacttatgagcgtcctaaagactccatgatctgggactgtacctgcatcggggctgggcgagggagaataagctgtaccatcgcaaaccgctgccatgaagcgactcggaccgatg

SEQ ID NO: 2286 - DNA, 203 bp, Artificial sequence
  synthetic
ggcgcgccagtccttggggatgcagtggctgaagacacaaggaaataagcaaatgctttgcacgtgcctgggcaacggagtcagctgccaagagacagctgtaacccagacttacggtggcaactcaaatggagagccatgtgtcttaccattcacctacaatggcaggacgttctactcctgcaccacgactcggaccgatg

SEQ ID NO: 2287 - DNA, 203 bp, Artificial sequence
  synthetic
ggcgcgccagtcctgcacttctgagggcagaagagacaacatgaagtggtgtgggaccacacagaactatgatgccgaccagaagtttgggttctgccccatggctgcccacgaggaaatctgcacaaccaatgaaggggtcatgtaccgcattggagatcagtgggataagcagcatgacatgggtccgactcggaccgatg

SEQ ID NO: 2288 - DNA, 203 bp, Artificial sequence
  synthetic
ggcgcgccagtcctacatgatgaggtgcacgtgtgttgggaatggtcgtggggaatggacatgcattgcctactcgcagcttcgagatcagtgcattgttgatgacatcacttacaatgtgaacgacacattccacaagcgtcatgaagaggggcacatgctgaactgtacatgcttcggtcagggtccgactcggaccgatg

SEQ ID NO: 2289 - DNA, 203 bp, Artificial sequence
  synthetic
ggcgcgccagtcctggggcaggtggaagtgtgatcccgtcgaccaatgccaggattcagagactgggacgttttatcaaattggagattcatgggagaagtatgtgcatggtgtcagataccagtgctactgctatggccgtggcattggggagtggcattgccaacctttacagacctatccaagctcgactcggaccgatg

SEQ ID NO: 2290 - DNA, 203 bp, Artificial sequence
  synthetic
ggcgcgccagtcctcaagtggtcctgtcgaagtatttatcactgagactccgagtcagcccaactcccaccccatccagtggaatgcaccacagccatctcacatttccaagtacattctcaggtggagacctaaaaattctgtaggccgttggaaggaagctaccataccaggccacttaaactcctcgactcggaccgatg

SEQ ID NO: 2291 - DNA, 203 bp, Artificial sequence
  synthetic
ggcgcgccagtcctacaccatcaaaggcctgaagcctggtgtggtatacgagggccagctcatcagcatccagcagtacggccaccaagaagtgactcgctttgacttcaccaccaccagcaccagcacacctgtgaccagcaacaccgtgacaggagagacgactcccttttctcctcttgtggccacgactcggaccgatg

SEQ ID NO: 2292 - DNA, 203 bp, Artificial sequence
  synthetic
ggcgcgccagtcctcttctgaatctgtgaccgaaatcacagccagtagctttgtggtctcctgggtctcagcttccgacaccgtgtcgggattccgggtggaatatgagctgagtgaggagggagatgagccacagtacctggatcttccaagcacagccacttctgtgaacatccctgacctgcttccgactcggaccgatg

SEQ ID NO: 2293 - DNA, 203 bp, Artificial sequence
  synthetic
ggcgcgccagtcctctggccgaaaatacattgtaaatgtctatcagatatctgaggatggggagcagagtttgatcctgtctacttcacaaacaacagcgcctgatgcccctcctgacccgactgtggaccaagttgatgacacctcaattgttgttcgctggagcagaccccaggctcccatcacagcgactcggaccgatg

SEQ ID NO: 2294 - DNA, 203 bp, Artificial sequence
  synthetic
ggcgcgccagtcctggtacagaatagtctattcgccatcagtagaaggtagcagcacagaactcaaccttcctgaaactgcaaactccgtcaccctcagtgacttgcaacctggtgttcagtataacatcactatctatgctgtggaagaaaatcaagaaagtacacctgttgtcattcaacaagaaacgactcggaccgatg

SEQ ID NO: 2295 - DNA, 203 bp, Artificial sequence
  synthetic
ggcgcgccagtcctaccaagagagccccaaagccactggagtctttaccacactgcagcctgggagctctattccaccttacaacaccgaggtgactgagaccaccattgtgatcacatggacgcctgctccaagaattggttttaagctgggtgtacgaccaagccagggaggagaggcaccacgagcgactcggaccgatg

SEQ ID NO: 2296 - DNA, 203 bp, Artificial sequence
  synthetic
ggcgcgccagtcctgtgtttacactgtcaaggatgacaaggaaagtgtccctatctctgataccatcatcccagaggtgccccaactcactgacctaagctttgttgatataaccgattcaagcatcggcctgaggtggaccccgctaaactcttccaccattattgggtaccgcatcacagtagttgcgactcggaccgatg

SEQ ID NO: 2297 - DNA, 203 bp, Artificial sequence
  synthetic
ggcgcgccagtccttgcctggtacagaatatgtagtgagtgtctccagtgtctacgaacaacatgagagcacacctcttagaggaagacagaaaacaggtcttgattccccaactggcattgacttttctgatattactgccaactcttttactgtgcactggattgctcctcgagccaccatcactgcgactcggaccgatg

SEQ ID NO: 2298 - DNA, 203 bp, Artificial sequence
  synthetic
ggcgcgccagtcctgctacaggatccgccatcatcccgagcacttcagtgggagacctcgagaagatcgggtgccccactctcggaattccatcaccctcaccaacctcactccaggcacagagtatgtggtcagcatcgttgctcttaatggcagagaggaaagtcccttattgattggccaacaatcgactcggaccgatg

SEQ ID NO: 2299 - DNA, 203 bp, Artificial sequence
  synthetic
ggcgcgccagtcctctaccatcagcggccttaaacctggagttgattataccatcactgtgtatgctgtcactggccgtggagacagccccgcaagcagcaagccaatttccattaattaccgaacagaaattgacaaaccatcccagatgcaagtgaccgatgttcaggacaacagcattagtgtcacgactcggaccgatg

SEQ ID NO: 2300 - DNA, 203 bp, Artificial sequence
  synthetic
ggcgcgccagtcctatgctcttaaggacactttgacaagcagaccagctcagggagttgtcaccactctggagaatgtcagcccaccaagaagggctcgtgtgacagatgctactgagaccaccatcaccattagctggagaaccaagactgagacgatcactggcttccaagttgatgccgttccagcgactcggaccgatg

SEQ ID NO: 2301 - DNA, 203 bp, Artificial sequence
  synthetic
ggcgcgccagtcctccaatggccagactccaatccagagaaccatcaagccagatgtcagaagctacaccatcacaggtttacaaccaggcactgactacaagatctacctgtacaccttgaatgacaatgctcggagctcccctgtggtcatcgacgcctccactgccattgatgcaccatccaacccgactcggaccgatg

SEQ ID NO: 2302 - DNA, 203 bp, Artificial sequence
  synthetic
ggcgcgccagtccttgcgtttcctggccaccacacccaattccttgctggtatcatggcagccgccacgtgccaggattaccggctacatcatcaagtatgagaagcctgggtctcctcccagagaagtggtccctcggccccgccctggtgtcacagaggctactattactggcctggaaccgggaacgactcggaccgatg

SEQ ID NO: 2303 - DNA, 203 bp, Artificial sequence
  synthetic
ggcgcgccagtcctaccctgggtatgacactggaaatggtattcagcttcctggcacttctggtcagcaacccagtgttgggcaacaaatgatctttgaggaacatggttttaggcggaccacaccgcccacaacggccacccccataaggcataggccaagaccatacccgccgaatgtaggtgaggcgactcggaccgatg

SEQ ID NO: 2304 - DNA, 203 bp, Artificial sequence
  synthetic
ggcgcgccagtcctaaatccaaattggtcacatccccagggaagatgtagactatcacctgtacccacagggtccgggactcaatccaaatgcctctacaggacaagaagctctctctcagacaaccatctcatgggccccattccaggacacttctgagtacatcatttcatgtcatcctgttggcacgactcggaccgatg

SEQ ID NO: 2305 - DNA, 203 bp, Artificial sequence
  synthetic
ggcgcgccagtcctctgatgaagaacccttacagttcagggttcctggaacttctaccagtgccactctgacaggcctcaccagaggtgccacctacaacatcatagtggaggcactgaaagaccagcagaggcataaggttcgggaagaggttgttaccgtgggcaactctgtcaacgaaggcttgacgactcggaccgatg

SEQ ID NO: 2306 - DNA, 203 bp, Artificial sequence
  synthetic
ggcgcgccagtcctagcttcagctcaactcacagcttctccaagcatcaccctgggagtttcctgagggttttctcataaatgagggctgcacattgcctgttctgcttcgaagtattcaataccgctcagtattttaaatgaagtgattctaagatttggtttgggatcaataggaaagcatatgcacgactcggaccgatg

SEQ ID NO: 2307 - DNA, 203 bp, Artificial sequence
  synthetic
ggcgcgccagtcctaaatcagttgctacaaaaactgattggtttttgtcacttcatctcttcactaatggagatagctttacactttctgctttaatagatttaagtggaccccaatatttattaaaattgctagtttaccgttcagaagtataatagaaataatctttagttgctcttttctaaccacgactcggaccgatg

SEQ ID NO: 2308 - DNA, 203 bp, Artificial sequence
  synthetic
ggcgcgccagtcctataagagaccacaagcgacccgcagggccagacgttcttcgccgagagtcgtcggggtttcctgcttcaacagtgcttggacggaacccggcgctcgttccccaccccggccggccgcccatagccagccctccgtcacctcttcaccgcaccctcggactgccccaaggcccccgactcggaccgatg

SEQ ID NO: 2309 - DNA, 203 bp, Artificial sequence
  synthetic
ggcgcgccagtcctcgccgccgctccagcgccgcgcagccaccgccgccgccgccgcctctccttagtcgccgccatgacgaccgcgtccacctcgcaggtgcgccagaactaccaccaggactcagaggccgccatcaaccgccagatcaacctggagctctacgcctcctacgtttacctgtccatcgactcggaccgatg

SEQ ID NO: 2310 - DNA, 203 bp, Artificial sequence
  synthetic
ggcgcgccagtcctcgggctgaatgcaatggagtgtgcattacatttggaaaaaaatgtgaatcagtcactactggaactgcacaaactggccactgacaaaaatgacccccatttgtgtgacttcattgagacacattacctgaatgagcaggtgaaagccatcaaagaattgggtgaccacgtgaccgactcggaccgatg

SEQ ID NO: 2311 - DNA, 203 bp, Artificial sequence
  synthetic
ggcgcgccagtcctcaacttgcgcaagatgggagcgcccgaatctggcttggcggaatatctctttgacaagcacaccctgggagacagtgataatgaaagctaagcctcgggctaatttccccatagccgtggggtgacttccctggtcaccaaggcagtgcatgcatgttggggtttcctttacctcgactcggaccgatg

SEQ ID NO: 2312 - DNA, 203 bp, Artificial sequence
  synthetic
ggcgcgccagtcctcaaaaagaaacgagtatttgtatttattaaactcattagtttgggcagtatactaaggtgtggctgtcttggattcagatagaactaagggttcccgactctgaatccagagtctgagttaaatgtttccaatggttcagtctagctttcacagtttttatgaataaaaggcatcgactcggaccgatg

SEQ ID NO: 2313 - DNA, 203 bp, Artificial sequence
  synthetic
ggcgcgccagtcctggctattcccagcagagcagtcagccctacggacagcagagttacagtggttatagccagtccacggacacttcaggctatggccagagcagctattcttcttatggccagagccagaacacaggctatggaactcagtcaactccccagggatatggctcgactggcggctatcgactcggaccgatg

SEQ ID NO: 2314 - DNA, 203 bp, Artificial sequence
  synthetic
ggcgcgccagtcctcgggcagactttaatcggggtggtggcaatggtcgtggaggccgagggcgaggaggacccatgggccgtggaggctatggaggtggtggcagtggtggtggtggccgaggaggatttcccagtggaggtggtggcggtggaggacagcagcgagctggtgactggaagtgtcctcgactcggaccgatg

SEQ ID NO: 2315 - DNA, 203 bp, Artificial sequence
  synthetic
ggcgcgccagtcctttcaagtgttccacaagtatgttctctactgaagagttgctgcatccttgaatcttgggtgatttgaggcacagaaactatgactttattttttgagatggagttttgctcttgttgcccaggctggagtgcaatggcacgtttttcggcttaccgcaactgccgcctcctgggcgactcggaccgatg

SEQ ID NO: 2316 - DNA, 203 bp, Artificial sequence
  synthetic
ggcgcgccagtcctgttagccctttcagcttttttccccatcttgtgccgggccttcctgggtttcagtacttggatgtagggctgcagttatgtcagtggtgggtagattgaccaggaattaaggtctagggtccagcccatgtgagacttgactcactgatctacctttaggcatgtcttccttcccgactcggaccgatg

SEQ ID NO: 2317 - DNA, 203 bp, Artificial sequence
  synthetic
ggcgcgccagtcctagtctcatcctttttaaattttttttttttttttgagacggtctcactctcacccaggctggattgcagtggtgtgatctcgaccaactgcaacctctgcctcccacccgcaagctatctgcccacctcagcctctggagtagctgggacgggactacaggcacctgccaccatcgactcggaccgatg

SEQ ID NO: 2318 - DNA, 203 bp, Artificial sequence
  synthetic
ggcgcgccagtcctcgaggggcggccggagagcgccagggcctgagctgccggagcggcgcctgtgagtgagtgcagaaagcaggcgcccgcgcgctagccgtggcaggagcagcccgcacgccgcgctctctccctgggcgacctgcagtttgcaatatgactttggaggaattctcggctggagagcgactcggaccgatg

SEQ ID NO: 2319 - DNA, 203 bp, Artificial sequence
  synthetic
ggcgcgccagtcctgtgacgaatccacattcatctcaatggaaggatcctgccttaagtcaacttatttgtttttgccgggaaagtcgctacatggatcaatgggttccagtgattaatctccctgaacggtgatggcatctgaatgaaaataactgaaccaaattgcactgaagtttttgaaatacccgactcggaccgatg

SEQ ID NO: 2320 - DNA, 203 bp, Artificial sequence
  synthetic
ggcgcgccagtcctaccgtcaaggctgagaacgggaagcttgtcatcaatggaaatcccatcaccatcttccaggagcgagatccctccaaaatcaagtggggcgatgctggcgctgagtacgtcgtggagtccactggcgtcttcaccaccatggagaaggctggggctcatttgcaggggggagcccgactcggaccgatg

SEQ ID NO: 2321 - DNA, 203 bp, Artificial sequence
  synthetic
ggcgcgccagtcctatgaccacagtccatgccatcactgccacccagaagactgtggatggcccctccgggaaactgtggcgtgatggccgcggggctctccagaacatcatccctgcctctactggcgctgccaaggctgtgggcaaggtcatccctgagctgaacgggaagctcactggcatggcccgactcggaccgatg

SEQ ID NO: 2322 - DNA, 203 bp, Artificial sequence
  synthetic
ggcgcgccagtcctcactcctccacctttgacgctggggctggcattgccctcaacgaccactttgtcaagctcatttcctggtatgacaacgaatttggctacagcaacagggtggtggacctcatggcccacatggcctccaaggagtaagacccctggaccaccagccccagcaagagcacaagacgactcggaccgatg

SEQ ID NO: 2323 - DNA, 203 bp, Artificial sequence
  synthetic
ggcgcgccagtcctggaagagagagaccctcactgctggggagtccctgccacactcagtcccccaccacactgaatctcccctcctcacagttgccatgtagaccccttgaagaggggaggggcctagggagccgcaccttgtcatgtaccatcaataaagtaccctgtgctcaaccaaaaaaaaaacgactcggaccgatg

SEQ ID NO: 2324 - DNA, 203 bp, Artificial sequence
  synthetic
ggcgcgccagtcctgtgcgcagcgggtgcatccctgtccggatgctgcgcctgcggtagagcggccgccatgttgcaaccgggaaggaaatgaatgggcagccgttaggaaagcctgccggtgactaaccctgcgctcctgcctcgatgggtggagtcgcgtgtggcggggaagtcaggtggagcgagcgactcggaccgatg

SEQ ID NO: 2325 - DNA, 203 bp, Artificial sequence
  synthetic
ggcgcgccagtcctgctagctggcccgatttctcctccgggtgatgcttttcctagattattctctgatttggtcgtattgggcgcctggtcaccagggctgcttttaactctggtaaagtggatattgttgccatcaatgaccccttcattgacctcaactacatggtttacatgttccaatatgatcgactcggaccgatg

SEQ ID NO: 2326 - DNA, 203 bp, Artificial sequence
  synthetic
ggcgcgccagtccttccacccatggcaaattccatggcaccgtcaaggctgagaacgggaagcttgtcatcaatggaaatcccatcaccatcttccaggagcgagatccctccaaaatcaagtggggcgatgctggcgctgagtacgtcgtggagtccactggcgtcttcaccaccatggagaaggctcgactcggaccgatg

SEQ ID NO: 2327 - DNA, 203 bp, Artificial sequence
  synthetic
ggcgcgccagtcctaactttggtatcgtggaaggactcatgaccacagtccatgccatcactgccacccagaagactgtggatggcccctccgggaaactgtggcgtgatggccgcggggctctccagaacatcatccctgcctctactggcgctgccaaggctgtgggcaaggtcatccctgagctgcgactcggaccgatg

SEQ ID NO: 2328 - DNA, 203 bp, Artificial sequence
  synthetic
ggcgcgccagtcctaccagccccagcaagagcacaagaggaagagagagaccctcactgctggggagtccctgccacactcagtcccccaccacactgaatctcccctcctcacagttgccatgtagaccccttgaagaggggaggggcctagggagccgcaccttgtcatgtaccatcaataaagtacgactcggaccgatg

SEQ ID NO: 2329 - DNA, 203 bp, Artificial sequence
  synthetic
ggcgcgccagtcctgcttcccatacggcagtggctgggggagagtgatggagagaaaggctaagctaaggtcaaagaaagtggaggaaggctggcttgtcccgctggacttgacggcggagctgctgcaatctcgcgggctgggcccttgccccgggtggacccgagtgcctgcggggaggcgggtgtcgactcggaccgatg

SEQ ID NO: 2330 - DNA, 203 bp, Artificial sequence
  synthetic
ggcgcgccagtcctgacgtcagacggtttttgggtcattccctggcacggggactttattttcataacagcatgaagtgccgtggaactggaataggcgtgtcctctccctcgaccctccccctccttgtccctctgctcacccctcgctcgttccctccctccggcgagggccgcctttataacaaccgactcggaccgatg

SEQ ID NO: 2331 - DNA, 203 bp, Artificial sequence
  synthetic
ggcgcgccagtccttggtgattctgggtctggccgtgggcttcagcctagtccaggatgttatcgctattgaatatattgtcctgaccatgaataggaccaacgtcaatgtcttttctgagctttccgctcctcgtcgcaatgaagactttgtcctcctgctcacctacgtcctcttcttgatggcgccgactcggaccgatg

SEQ ID NO: 2332 - DNA, 203 bp, Artificial sequence
  synthetic
ggcgcgccagtccttgaccttcctcatgtcctccttcaccttctgtggttccttcacgggctggaagagacatggggcccacatctacctcacgatgctcctctccattgccatctgggtggcctggatcaccctgctcatgcttcctgactttgaccgcaggtgggatgacaccatcctcagctccgcgactcggaccgatg

SEQ ID NO: 2333 - DNA, 203 bp, Artificial sequence
  synthetic
ggcgcgccagtcctctcaaggttttgaagagacaggggacacgctctatgccccctattccacacattttcagctgcagaaccagcctccccaaaaggaattctccatcccacgggcccacgcttggccgagcccttacaaagactatgaagtaaagaaagagggcagctaactctgtcctgaagagtcgactcggaccgatg

SEQ ID NO: 2334 - DNA, 203 bp, Artificial sequence
  synthetic
ggcgcgccagtcctctcgaccacctgtgctcaagcaatcctcccatctccatctcccaaagtgctgggatgacaggcgtgagccacagctcccagcctaggcccttaatcttgctgttattttccatggactaaaggtctggtcatctgagctcacgctggctcacacagctctaggggcctgctcctcgactcggaccgatg

SEQ ID NO: 2335 - DNA, 203 bp, Artificial sequence
  synthetic
ggcgcgccagtcctctaaatttactcatctctctagtgctgcctcacattgggcctcagcagctccccagcaccaattcacaggtcacccctctcttcttgcactgtccccaaacttgctgtcaattccgagatctaatctccccctacgctctgccaggaattctttcagacctcactagcacaagccgactcggaccgatg

SEQ ID NO: 2336 - DNA, 203 bp, Artificial sequence
  synthetic
ggcgcgccagtcctccggttgctccttgtcaggagaatttgtagatcattctcacttcaaattcctggggctgatacttctctcatcttgcaccccaacctctgtaaatagatttaccgcatttacggctgcattctgtaagtgggcatggtctcctaatggaggagtgttcattgtataataagttacgactcggaccgatg

SEQ ID NO: 2337 - DNA, 203 bp, Artificial sequence
  synthetic
ggcgcgccagtcctccttccgttgagcctgtggaagaatatgattatgaagatctgaaagaatcttccaattctgtttcaaaccatcagctcagtggatttgatcaagctcgtctttattcatgccttgatcacatgagagaggtacttggagatgctgtgccagatgaaatattaattgaagcagttcgactcggaccgatg

SEQ ID NO: 2338 - DNA, 203 bp, Artificial sequence
  synthetic
ggcgcgccagtcctctgaagaacaagtttgatgtgcagaaggctttgtcaggggttctggaacaagatagagtgcagagtttgaaggacaagaatgaggcaacagtatctacaggaaagatagcaaaaggaaaaccagtagattcccagacatcgcgaagtgaatctgaaattgtgccaaaagttgctcgactcggaccgatg

SEQ ID NO: 2339 - DNA, 203 bp, Artificial sequence
  synthetic
ggcgcgccagtcctaaaatgactgtatctggaaagaagcaaactatgggatttgaagtgcctggagtatcttctgaagaaaatggtcatagtttccacacacctcaaaaaggaccgcccattgaagatgccattgcttcttccgatgttcttgagactgcttctaaatctgctaatccaccccacacgcgactcggaccgatg

SEQ ID NO: 2340 - DNA, 203 bp, Artificial sequence
  synthetic
ggcgcgccagtcctattcaagcatcagaagagcagagttcaaccccagcaccggtgaaaaagtctggcaagctgaggcagcaaatagatgtgaaggcggaactggagaagcggcaaggagggaagcagctactcaacttagtggtcattggtcatgttgatgctgggaaaagtactctgatgggccatcgactcggaccgatg

SEQ ID NO: 2341 - DNA, 203 bp, Artificial sequence
  synthetic
ggcgcgccagtcctggttatatccaaactggtgaccgactactggcaatgcctcctaatgaaacttgtaccgtgaaaggaatcactctgcatgatgaacctgtcgactgggcggcagcaggcgatcatgttagtcttactttggttgggatggatatcatcaaaatcaatgttggctgcatattttgtcgactcggaccgatg

SEQ ID NO: 2342 - DNA, 203 bp, Artificial sequence
  synthetic
ggcgcgccagtcctgaggctggggtgggaagatcacttgagcccaggaggtcgaggctgcagtgagccatgatcacatcactgcagtccagcctgggtgacagagcaagacctgtcaccctgccacccataaaaaacctcttctgtaatgccaggttcttgacaagatgtgataattccacacttacacgactcggaccgatg

SEQ ID NO: 2343 - DNA, 203 bp, Artificial sequence
  synthetic
ggcgcgccagtccttcctcagatctcccatccagggcaaggacagactaaaagagcatatcttctccagaagtcctagaaacatctcatcattgactatgattgaattttatttattaatacttccctaggatatcctgtgtttgagtgtgaagttaatatcacacaaagcatgtagctaacagttgtcgactcggaccgatg

SEQ ID NO: 2344 - DNA, 203 bp, Artificial sequence
  synthetic
ggcgcgccagtcctattcattccttccttctccaatagtgtttaagtacaatctttttatttgcattttattgatgattgattgtggttgaaaggagtggtgatattatttcgaggatccactgtgtaagaagactgttggcagtggaaggctcgagttgattaagtgacaaagaggtaaagcagacacgactcggaccgatg

SEQ ID NO: 2345 - DNA, 203 bp, Artificial sequence
  synthetic
ggcgcgccagtcctaaaaaaaaaaaagcaaagaaactaagtctgtacagcaaaagatggaaaggaaacaagaaaattaaatgaagacaaaggttgtgattattacagtaaatgaaaataggtttttatctttaaaatgtagactcaaactgcaaagctaatgatatgctatctgcaaaatattcctatcgactcggaccgatg

SEQ ID NO: 2346 - DNA, 203 bp, Artificial sequence
  synthetic
ggcgcgccagtcctccttccatactggccatattttggaacactgacctagacatgtccagatgggagtcccattcctagcagacaagctgagcaccgttgtaaccagagaactattactaggccttgaagaacctgtctaactggatgctcattgcctgggcaaggcctgtttaggccggttgcggtcgactcggaccgatg

SEQ ID NO: 2347 - DNA, 203 bp, Artificial sequence
  synthetic
ggcgcgccagtcctggctcatgcctgtaatcctagcactttgggaggctgaggtgggtggatcacctgaggtcaggagttcgagaccagcctcgccaacatggcgaaaccccatctctactaaaaatacaaaagttagctgggtgtggtggcagaggcctgtaatcccagctccttgggaggctgaggcgactcggaccgatg

SEQ ID NO: 2348 - DNA, 203 bp, Artificial sequence
  synthetic
ggcgcgccagtcctccttaccccggggtctggtgtatgctgtgctttcctcagcagtatggctctgacatctcttagatgtcccaacttcagctgttgggagatggtgatattttcaaccctacttcctaaacatctgtctggggttcctttagtcttgaatgtcttatgctcaattatttggtgttgcgactcggaccgatg

SEQ ID NO: 2349 - DNA, 203 bp, Artificial sequence
  synthetic
ggcgcgccagtcctcttactagagagcccatcgcctgggacctcctggaccaccagaagccaactagccaacacagagcccaccaagggccttccagaccatccatccagaagcatgtgataagacctccttccatactggccatattttggaacactgacctagacatgtccagatgggagtcccatcgactcggaccgatg

SEQ ID NO: 2350 - DNA, 203 bp, Artificial sequence
  synthetic
ggcgcgccagtcctgggctgttgggagtgaggatggagtgttcagtgcccatttctcattttacattttaaagtcgttcctccaacatagtgtgtattggtctgaagggggtggtgggatgccaaagcctgctcaagttatggacattgtggccaccatgtggcttaaatgattttttctaactaatacgactcggaccgatg

SEQ ID NO: 2351 - DNA, 203 bp, Artificial sequence
  synthetic
ggcgcgccagtccttgcaagtgttttcgcccccatcagtgtcgtcgagtgccttctgcagtgcgaagaaactgaaaatagagccctctggctgggatgtttcaggacagagtagcaacgacaaatattatacccacagcaaaaccctcccagccacacaagggcaagccaactcctctcaccaggtagcgactcggaccgatg

SEQ ID NO: 2352 - DNA, 203 bp, Artificial sequence
  synthetic
ggcgcgccagtccttcttgcagcaggtggccacagccttgatgaagctcaagagtcttggtctgatccacgctgaccttaagcctgaaaacatcatgctggttgatccagttcgccagccctaccgagtgaaggtcattgactttggttctgctagtcacgtttccaaagctgtgtgctcaacctactcgactcggaccgatg

SEQ ID NO: 2353 - DNA, 203 bp, Artificial sequence
  synthetic
ggcgcgccagtcctcttcaacttggcaacagttgcctggggtagctctacacaactctgtccagcccacagcaatgattccagaggccatggggagtggacagcagctagctgactggaggaatgcccactctcatggcaaccagtacagcactatcatgcagcagccatccttgctgactaaccatgcgactcggaccgatg

SEQ ID NO: 2354 - DNA, 203 bp, Artificial sequence
  synthetic
ggcgcgccagtcctgcaccacatcttcttataattccttggtccctgtccaagatcagcatcagcccatcatcattccagatactcccagccctcctgtgagtgtcatcactatccgaagtgacactgatgaggaagaggacaacaaatacaagcccagtagctctggactgaagccaaggtctaatgcgactcggaccgatg

SEQ ID NO: 2355 - DNA, 203 bp, Artificial sequence
  synthetic
ggcgcgccagtccttcatcagttatgtcactgtcaatgattctccagactctgactcttctttgagcagcccttattccactgataccctgagtgctctccgaggcaatagtggatccgttttggaggggcctggcagagttgtggcagatggcactggcacccgcactatcattgtgcctccactgacgactcggaccgatg

SEQ ID NO: 2356 - DNA, 203 bp, Artificial sequence
  synthetic
ggcgcgccagtcctaaactcagcttggtgactgcactgtagcaacccaggcctcaggtctcctgagcaataagactaagccagtcgcttcagtgagtgggcagtcatctggatgctgtatcacccccacagggtatcgagctcaacgcggggggaccagtgcagcacaaccactcaatcttagccaggcgactcggaccgatg

SEQ ID NO: 2357 - DNA, 203 bp, Artificial sequence
  synthetic
ggcgcgccagtcctgatgtctcactactaaactaccagtcagctttgtacccatcatctgctgcaccagttcctggagttgcccagcagggtgtttccttgcagcctggaaccacccagatttgcactcagacagatccattccaacagacatttatagtatgtccacctgcgtttcaaactggactacgactcggaccgatg

SEQ ID NO: 2358 - DNA, 203 bp, Artificial sequence
  synthetic
ggcgcgccagtcctcaagcaacaacaaagcattctggattccctgtgaggatggataatgctgtaccgattgtaccccaggcaccagctgctcagccactacagattcagtcaggagttctcacgcagggaagctgtacaccactaatggtagcaactctccaccctcaagtagccaccatcacaccgcgactcggaccgatg

SEQ ID NO: 2359 - DNA, 203 bp, Artificial sequence
  synthetic
ggcgcgccagtcctcagtatgcggtgccctttactctgagctgcgcagccggccggccggcgctggttgaacagactgccgctgtactgcaggcgtggcctggagggactcagcaaattctcctgccttcaacttggcaacagttgcctggggtagctctacacaactctgtccagcccacagcaatgcgactcggaccgatg

SEQ ID NO: 2360 - DNA, 203 bp, Artificial sequence
  synthetic
ggcgcgccagtcctagtgagcttgccttaggatggaccagcaagcccccgtggaccctaagttgttcaccgggatttatcagaacaggattagtagctgtattgtgtaatgcattgttctcagtttccctgccaacattgaaaaataaaaacagcagcttttctcctttaccaccacctctaccccttcgactcggaccgatg

SEQ ID NO: 2361 - DNA, 203 bp, Artificial sequence
  synthetic
ggcgcgccagtcctccttgtcttttttctgtaagggacaagatttgttgtttttgtaagaaatgagatgcaggaaagaaaaccaaatcccattcctgcaccccagtccaataagcagataccacttaagataggagtctaaactccacagaaaaggataataccaagagcttgtattgttaccttagtcgactcggaccgatg

SEQ ID NO: 2362 - DNA, 203 bp, Artificial sequence
  synthetic
ggcgcgccagtcctgaagggaggaagcctggtgaatttagtgagcagctggcctgggtcacagtgacctgacctcaaaccagcttaaggctttaagtcctctctcagaacttggcatttccaacttcttcctttccgggtgagagaagaagcggagaagggttcagtgtagccactctgggctcatagcgactcggaccgatg

SEQ ID NO: 2363 - DNA, 203 bp, Artificial sequence
  synthetic
ggcgcgccagtcctggacacttggtcactccagagtttttaatagctcccaggaggtgatattattttcagtgctcagctgaaataccaaccccaggaataagaactccatttcaaacagttctggccattctgagcctgcttttgtgattgctcatccattgtcctccactagaggggctaagcttgcgactcggaccgatg

SEQ ID NO: 2364 - DNA, 203 bp, Artificial sequence
  synthetic
ggcgcgccagtcctctttggttttacaaagtagcttgtattttcagtattttctacataatatggtaaaatgtagagcaattgcaatgcatcaataaaatgggtaaattttctgacttatgtggctgtttttgacttctgttataggatataaaggggatcaataaatgacatctttgaaagtgaaaacgactcggaccgatg

SEQ ID NO: 2365 - DNA, 203 bp, Artificial sequence
  synthetic
ggcgcgccagtcctcgcaccacccccagctacgtggccttcacggacaccgagcggctcatcggggatgcggccaagaaccaggtggcgctgaacccgcagaacaccgtgtttgacgcgaagcggctgattggccgcaagttcggcgacccggtggtgcagtcggacatgaagcactggcctttccagcgactcggaccgatg

SEQ ID NO: 2366 - DNA, 203 bp, Artificial sequence
  synthetic
ggcgcgccagtcctgtgatcaacgacggagacaagcccaaggtgcaggtgagctacaagggggagaccaaggcattctaccccgaggagatctcgtccatggtgctgaccaagatgaaggagatcgccgaggcgtacctgggctacccggtgaccaacgcggtgatcaccgtgccggcctacttcaaccgactcggaccgatg

SEQ ID NO: 2367 - DNA, 203 bp, Artificial sequence
  synthetic
ggcgcgccagtcctgtgtacgagggcgagagggccatgacgaaagacaacaatctgttggggcgcttcgagctgagcggcatccctccggcccccaggggcgtgccccagatcgaggtgaccttcgacatcgatgccaacggcatcctgaacgtcacggccacggacaagagcaccggcaaggccaaccgactcggaccgatg

SEQ ID NO: 2368 - DNA, 203 bp, Artificial sequence
  synthetic
ggcgcgccagtcctggtcccgggcctgggggcttcggggctcagggtcccaagggagggtctgggtcaggccccaccattgaggaggtagattaggggcctttccaagattgctgtttttgttttggagcttcaagactttgcatttcctagtatttctgtttgtcagttctcaatttcctgtgtttgcgactcggaccgatg

SEQ ID NO: 2369 - DNA, 203 bp, Artificial sequence
  synthetic
ggcgcgccagtcctcaatgttgaaattttttggtgaagtactgaacttgctttttttccggtttctacatgcagagatgaatttatactgccatcttacgactatttcttctttttaatacacttaactcaggccattttttaagttggttacttcaaagtaaataaactttaaaattcaaaaaaaaacgactcggaccgatg

SEQ ID NO: 2370 - DNA, 203 bp, Artificial sequence
  synthetic
ggcgcgccagtcctaattttttggtgaagtactgaacttgctttttttccggtttctacatgcagagatgaatttatactgccatcttacgactatttcttctttttaatacacttaactcaggccattttttaagttggttacttcaaagtaaataaactttaaaattcaaaaaaaaaaaaaaaaaacgactcggaccgatg

SEQ ID NO: 2371 - DNA, 203 bp, Artificial sequence
  synthetic
ggcgcgccagtcctctgccgcctgcaagtcggaaattgcgctgtgctcctgtgctacggcctgtggctggactgcctgctgctgcccaactggctggcaagatgaagctctccctggtggccgcgatgctgctgctgctcagcgcggcgcgggccgaggaggaggacaagaaggaggacgtgggcacgcgactcggaccgatg

SEQ ID NO: 2372 - DNA, 203 bp, Artificial sequence
  synthetic
ggcgcgccagtcctgtcccacagattgaagtcacctttgagatagatgtgaatggtattcttcgagtgacagctgaagacaagggtacagggaacaaaaataagatcacaatcaccaatgaccagaatcgcctgacacctgaagaaatcgaaaggatggttaatgatgctgagaagtttgctgaggaacgactcggaccgatg

SEQ ID NO: 2373 - DNA, 203 bp, Artificial sequence
  synthetic
ggcgcgccagtcctgacaaaaagctcaaggagcgcattgatactagaaatgagttggaaagctatgcctattctctaaagaatcagattggagataaagaaaagctgggaggtaaactttcctctgaagataaggagaccatggaaaaagctgtagaagaaaagattgaatggctggaaagccaccaacgactcggaccgatg

SEQ ID NO: 2374 - DNA, 203 bp, Artificial sequence
  synthetic
ggcgcgccagtcctgagaccacaggcttgttaccaccatgctcggcttttgcattaatctaagaaaaggggagagaagttaatccacatctttactcaggcaaggggcatttcacagtgcccaagagtggggttttcttgaacatacttggtttcctatttccccttatctttctaaaactgcctttccgactcggaccgatg

SEQ ID NO: 2375 - DNA, 203 bp, Artificial sequence
  synthetic
ggcgcgccagtccttggtggctttttttaaaattattactaatgatgcttttatagctgcttggattctctgagaaatgatggggagtgagtgatcactggtattaactttatacacttggatttcatttgtaactttaggatgtaaaggtatattgtgaaccctagctgtgtcagaatctccatccccgactcggaccgatg

SEQ ID NO: 2376 - DNA, 203 bp, Artificial sequence
  synthetic
ggcgcgccagtccttgaaatttctcattagtggtactggggtgggatcttggatggtgacattgaaactacactaaatcccctcactatgaatgggttgttaaaggcaatggtttgtgtcaaaactggtttaggattacttagattgtgttcctgaagaaaagagtccaggtaaatggtatgatcaatcgactcggaccgatg

SEQ ID NO: 2377 - DNA, 203 bp, Artificial sequence
  synthetic
ggcgcgccagtcctttaaagatgacctacagtgctgtgtaccctggggcaatagggttaaatggtagttagcaactagggctagtcttcccttacctcaaaggctctcactaccgtggaccacctagtctgtaactctttctgaggagctgttactgaatattaaaaagatagacttcaactatgaaacgactcggaccgatg

SEQ ID NO: 2378 - DNA, 203 bp, Artificial sequence
  synthetic
ggcgcgccagtcctattatccagatattttgggtgggccgcaaaggcgagctacttagacgcaccccggtgagctcggccatgcagacaccaatgggaatcccaatggggaagtcgatgctggtgcttctcaccttcttggccttcgcctcgtgctgcattgctgcttaccgccccagtgagaccctgcgactcggaccgatg

SEQ ID NO: 2379 - DNA, 203 bp, Artificial sequence
  synthetic
ggcgcgccagtccttgcggcggggagctggtggacaccctccagttcgtctgtggggaccgcggcttctacttcagcaggcccgcaagccgtgtgagccgtcgcagccgtggcatcgttgaggagtgctgtttccgcagctgtgacctggccctcctggagacgtactgtgctacccccgccaagtcccgactcggaccgatg

SEQ ID NO: 2380 - DNA, 203 bp, Artificial sequence
  synthetic
ggcgcgccagtcctttcagggaggccaaacgtcaccgtcccctgattgctctacccacccaagaccccgcccacgggggcgcccccccagagatggccagcaatcggaagtgagcaaaactgccgcaagtctgcagcccggcgccaccatcctgcagcctcctcctgaccacggacgtttccatcaggcgactcggaccgatg

SEQ ID NO: 2381 - DNA, 203 bp, Artificial sequence
  synthetic
ggcgcgccagtcctttccatcccgaaaatctctcggttccacgtccccctggggcttctcctgacccagtccccgtgccccgcctccccgaaacaggctactctcctcggccccctccatcgggctgaggaagcacagcagcatcttcaaacatgtacaaaatcgattggctttaaacacccttcacacgactcggaccgatg

SEQ ID NO: 2382 - DNA, 203 bp, Artificial sequence
  synthetic
ggcgcgccagtcctggtgggcacgtcgctgctaccgccatctcccttctcacgggaattttcagggtaaactggccatccgaaaatagcaacaacccagactggctcctcactcccttttccatcactaaaaatcacagagcagtcagagggacccagtaagaccaaaggaggggaggacagagcatgcgactcggaccgatg

SEQ ID NO: 2383 - DNA, 203 bp, Artificial sequence
  synthetic
ggcgcgccagtcctacgcacagcacacacagcacacagatgagcacacagcacacacacaaacgcacagcacacacacgcacacacatgcacacacagcacacaaacgcacggcacacacacgcacacacatgcacacacagcacacacacaaacgcacagcacacacaaacgcacagcacacacgcacgactcggaccgatg

SEQ ID NO: 2384 - DNA, 203 bp, Artificial sequence
  synthetic
ggcgcgccagtcctctaattccatctttccaccatgacagagatgcccttgtgaggctggcctccttggcgcctgtccccacggcccccgcagcgtgagccacgatgctccccataccccacccattcccgatacaccttacttactgtgtgttggcccagccagagtgaggaaggagtttggccacacgactcggaccgatg

SEQ ID NO: 2385 - DNA, 203 bp, Artificial sequence
  synthetic
ggcgcgccagtcctttggagatggcggtagctgagcagacatgcccccacgagtagcctgactccctggtgtgctcctggaaggaagatcttggggacccccccaccggagcacacctagggatcatctttgcccgtctcctggggaccccccaagaaatgtggagtcctcgggggccgtgcactgatcgactcggaccgatg

SEQ ID NO: 2386 - DNA, 203 bp, Artificial sequence
  synthetic
ggcgcgccagtcctgggtggccgccttccgcacacttgaggaaccctcccctctccctcggtgacatcttgcccgcccctcagcaccctgccttgtctccaggaggtccgaagctctgtgggacctcttgggggcaaggtggggtgaggccggggagtagggaggtcaggcgggtctgagcccacagacgactcggaccgatg

SEQ ID NO: 2387 - DNA, 203 bp, Artificial sequence
  synthetic
ggcgcgccagtcctggccactaaccatcctggcccgggctgcctgtctgacctccgtgcctagtcgtggctctccatcttgtctcctccccgtgtccccaatgtcttcagtggggggccccctcttgggtcccctcctctgccatcacctgaagacccccacgccaaacactgaatgtcacctgtgcccgactcggaccgatg

SEQ ID NO: 2388 - DNA, 203 bp, Artificial sequence
  synthetic
ggcgcgccagtcctccgctaatgtaccatgccctggtgctggaaagtgcctgagccagctgccccagcggcctcagcactaccaagttggcacaaagctccccaaattcggaggggctcagggaaacgagtggaggggatgaggaggtgaggggtaaacccatcatttcagttggcatttgagcaggtcgactcggaccgatg

SEQ ID NO: 2389 - DNA, 203 bp, Artificial sequence
  synthetic
ggcgcgccagtcctccagcccccagccccagggctctgaatcgctgccagctcagccccctgcccagcctgccccacagcctgagccccagcaggccagagagcccagtcctgaggtgagctgctgtggcctgtggcccaggcgaccccagcgctcccagaactgaggctggcagccagccccagcctcgactcggaccgatg

SEQ ID NO: 2390 - DNA, 203 bp, Artificial sequence
  synthetic
ggcgcgccagtcctcagccccaactgcgaggcagagagacaccaatgggaatcccaatggggaagtcgatgctggtgcttctcaccttcttggccttcgcctcgtgctgcattgctgcttaccgccccagtgagaccctgtgcggcggggagctggtggacaccctccagttcgtctgtggggaccgccgactcggaccgatg

SEQ ID NO: 2391 - DNA, 203 bp, Artificial sequence
  synthetic
ggcgcgccagtcctggcttctacttcagcaggcccgcaagccgtgtgagccgtcgcagccgtggcatcgttgaggagtgctgtttccgcagctgtgacctggccctcctggagacgtactgtgctacccccgccaagtccgagagggacgtgtcgacccctccgaccgtgcttccggacaacttcccccgactcggaccgatg

SEQ ID NO: 2392 - DNA, 203 bp, Artificial sequence
  synthetic
ggcgcgccagtcctagataccccgtgggcaagttcttccaatatgacacctggaagcagtccacccagcgcctgcgcaggggcctgcctgccctcctgcgtgcccgccggggtcacgtgctcgccaaggagctcgaggcgttcagggaggccaaacgtcaccgtcccctgattgctctacccacccaacgactcggaccgatg

SEQ ID NO: 2393 - DNA, 203 bp, Artificial sequence
  synthetic
ggcgcgccagtcctgaccccgcccacgggggcgcccccccagagatggccagcaatcggaagtgagcaaaactgccgcaagtctgcagcccggcgccaccatcctgcagcctcctcctgaccacggacgtttccatcaggttccatcccgaaaatctctcggttccacgtccccctggggcttctcctcgactcggaccgatg

SEQ ID NO: 2394 - DNA, 203 bp, Artificial sequence
  synthetic
ggcgcgccagtcctgacccagtccccgtgccccgcctccccgaaacaggctactctcctcggccccctccatcgggctgaggaagcacagcagcatcttcaaacatgtacaaaatcgattggctttaaacacccttcacataccctccccccaaattatccccaattatccccacacataaaaaatcacgactcggaccgatg

SEQ ID NO: 2395 - DNA, 203 bp, Artificial sequence
  synthetic
ggcgcgccagtcctagggtaaactggccatccgaaaatagcaacaacccagactggctcctcactcccttttccatcactaaaaatcacagagcagtcagagggacccagtaagaccaaaggaggggaggacagagcatgaaaaccaaaatccatgcaaatgaaatgtaattggcacgaccctcaccccgactcggaccgatg

SEQ ID NO: 2396 - DNA, 203 bp, Artificial sequence
  synthetic
ggcgcgccagtcctacacacatgcacacacagcacacacactagcacacagcacacacacaaagacacagcacacacatgcacacacagcacacacacgcgaacacagcacacacgaacacagcacacacagcacacacacaaacacagcacacacatgcacacagcacacgcacacacagcacacaccgactcggaccgatg

SEQ ID NO: 2397 - DNA, 203 bp, Artificial sequence
  synthetic
ggcgcgccagtccttccttggcgcctgtccccacggcccccgcagcgtgagccacgatgctccccataccccacccattcccgatacaccttacttactgtgtgttggcccagccagagtgaggaaggagtttggccacattggagatggcggtagctgagcagacatgcccccacgagtagcctgaccgactcggaccgatg

SEQ ID NO: 2398 - DNA, 203 bp, Artificial sequence
  synthetic
ggcgcgccagtcctagggtctcctcaggtgtcaggagggtgctcggaggccacaggagggggctcctggctggcctgaggctggccggaggggaaggggctagcaggtgtgtaaacagagggttccatcaggctggggcagggtggccgccttccgcacacttgaggaaccctcccctctccctcggtcgactcggaccgatg

SEQ ID NO: 2399 - DNA, 203 bp, Artificial sequence
  synthetic
ggcgcgccagtcctgagcccacgggtctggtgatgccatagcagccaccaccgcggcgcctagggctgcggcagggactcggcctctgggaggtttacctcgcccccacttgtgcccccagctcagcccccctgcacgcagcccgactagcagtctagaggcctgaggcttctgggtcctggtgacggcgactcggaccgatg

SEQ ID NO: 2400 - DNA, 203 bp, Artificial sequence
  synthetic
ggcgcgccagtcctggctggcatgaccccgggggtcgtccatgccagtccgcctcagtcgcagagggtccctcggcaagcgccctgtgagtgggccattcggaacattggacagaagcccaaagagccaaattgtcacaattgtggaacccacattggcctgagatccaaaacgcttcgaggcacccccgactcggaccgatg

SEQ ID NO: 2401 - DNA, 203 bp, Artificial sequence
  synthetic
ggcgcgccagtcctaaattacctgcccattcgtcaggacacccacccacccagtgttatattctgcctcgccggagtgggtgttcccgggggcacttgccgaccagccccttgcgtccccaggtttgcagctctcccctgggccactaaccatcctggcccgggctgcctgtctgacctccgtgcctacgactcggaccgatg

SEQ ID NO: 2402 - DNA, 203 bp, Artificial sequence
  synthetic
ggcgcgccagtcctgtcgtggctctccatcttgtctcctccccgtgtccccaatgtcttcagtggggggccccctcttgggtcccctcctctgccatcacctgaagacccccacgccaaacactgaatgtcacctgtgcctgccgcctcggtccaccttgcggcccgtgtttgactcaactcaactcccgactcggaccgatg

SEQ ID NO: 2403 - DNA, 203 bp, Artificial sequence
  synthetic
ggcgcgccagtcctccacctggggcccgcgcccgcccgccgcccgcagcgctctctgctcctgctgcagctgctgctgctcgtcgctgccccggggtccacgcaggcccaggccgccccgttccccgagctgtgcagttatacatgggaagctgttgataccaaaaataatgtactttataaaatcaacgactcggaccgatg

SEQ ID NO: 2404 - DNA, 203 bp, Artificial sequence
  synthetic
ggcgcgccagtcctagtccagagcagcattgccttcctgtgtgggaaaaccctgggaactcctgaatttgtaactgcaacagaatgtgtgcactactttgagtggaggaccactgcagcctgcaagaaagacatatttaaagcaaataaggaggtgccatgctatgtgtttgatgaagagttgaggaacgactcggaccgatg

SEQ ID NO: 2405 - DNA, 203 bp, Artificial sequence
  synthetic
ggcgcgccagtcctgcatgatctcaatcctctgatcaagcttagtggtgcctacttggtggatgactccgatccggacacttctctattcatcaatgtttgtagagacatagacacactacgagacccaggttcacagctgcgggcctgtccccccggcactgccgcctgcctggtaagaggacaccacgactcggaccgatg

SEQ ID NO: 2406 - DNA, 203 bp, Artificial sequence
  synthetic
ggcgcgccagtcctcctctgcggtgccaccgacgggaagaagcgctatgacctgtccgcgctggtccgccatgcagaaccagagcagaattgggaagctgtggatggcagtcagacggaaacagagaagaagcattttttcattaatatttgtcacagagtgctgcaggaaggcaaggcacgagggtgcgactcggaccgatg

SEQ ID NO: 2407 - DNA, 203 bp, Artificial sequence
  synthetic
ggcgcgccagtcctccaactgaactacagaggcggcacaccctataacaatgaaagacacacaccgagagctacgctcatcacctttctctgtgatcgagacgcgggagtgggcttccctgaatatcaggaagaggataactccacctacaacttccggtggtacaccagctatgcctgcccggaggacgactcggaccgatg

SEQ ID NO: 2408 - DNA, 203 bp, Artificial sequence
  synthetic
ggcgcgccagtcctgctcaagaattggaagccagcaaggccagtcggaattgagaaaagcctccagctgtccacagagggcttcatcactctgacctacaaagggcctctctctgccaaaggtaccgctgatgcttttatcgtccgctttgtttgcaatgatgatgtttactcagggcccctcaaattcgactcggaccgatg

SEQ ID NO: 2409 - DNA, 203 bp, Artificial sequence
  synthetic
ggcgcgccagtcctcctgcatcaagatatcgactctgggcaagggatccgaaacacttactttgagtttgaaaccgcgttggcctgtgttccttctccagtggactgccaagtcaccgacctggctggaaatgagtacgacctgactggcctaagcacagtcaggaaaccttggacggctgttgacaccgactcggaccgatg

SEQ ID NO: 2410 - DNA, 203 bp, Artificial sequence
  synthetic
ggcgcgccagtcctctctgtcgatgggagaaagaggactttctatttgagcgtttgcaatcctctcccttacattcctggatgccagggcagcgcagtggggtcttgcttagtgtcagaaggcaatagctggaatctgggtgtggtgcagatgagtccccaagccgcggcgaatggatctttgagcatcgactcggaccgatg

SEQ ID NO: 2411 - DNA, 203 bp, Artificial sequence
  synthetic
ggcgcgccagtcctcatgtatgtcaacggtgacaagtgtgggaaccagcgcttctccaccaggatcacgtttgagtgtgctcagatatcgggctcaccagcatttcagcttcaggatggttgtgagtacgtgtttatctggagaactgtggaagcctgtcccgttgtcagagtggaaggggacaactgcgactcggaccgatg

SEQ ID NO: 2412 - DNA, 203 bp, Artificial sequence
  synthetic
ggcgcgccagtcctaaaggagacttcagattgttcctacttgtttgagtggcgaacgcagtatgcctgcccacctttcgatctgactgaatgttcattcaaagatggggctggcaactccttcgacctctcgtccctgtcaaggtacagtgacaactgggaagccatcactgggacgggggacccggacgactcggaccgatg

SEQ ID NO: 2413 - DNA, 203 bp, Artificial sequence
  synthetic
ggcgcgccagtcctgcactacctcatcaatgtctgcaagtctctggccccgcaggctggcactgagccgtgccctccagaagcagccgcgtgtctgctgggtggctccaagcccgtgaacctcggcagggtaagggacggacctcagtggagagatggcataattgtcctgaaatacgttgatggcgacgactcggaccgatg

SEQ ID NO: 2414 - DNA, 203 bp, Artificial sequence
  synthetic
ggcgcgccagtcctcttatgtccagatgggattcggaaaaagtcaaccaccatccgattcacctgcagcgagagccaagtgaactccaggcccatgttcatcagcgccgtggaggactgtgagtacacctttgcctggcccacagccacagcctgtcccatgaagagcaacgagcatgatgactgccacgactcggaccgatg

SEQ ID NO: 2415 - DNA, 203 bp, Artificial sequence
  synthetic
ggcgcgccagtcctggtcaccaacccaagcacaggacacctgtttgatctgagctccttaagtggcagggcgggattcacagctgcttacagcgagaaggggttggtttacatgagcatctgtggggagaatgaaaactgccctcctggcgtgggggcctgctttggacagaccaggattagcgtgggcgactcggaccgatg

SEQ ID NO: 2416 - DNA, 203 bp, Artificial sequence
  synthetic
ggcgcgccagtcctcaaggccaacaagaggctgagatacgtggaccaggtcctgcagctggtgtacaaggatgggtccccttgtccctccaaatccggcctgagctataagagtgtgatcagtttcgtgtgcaggcctgaggccgggccaaccaataggcccatgctcatctccctggacaagcagaccgactcggaccgatg

SEQ ID NO: 2417 - DNA, 203 bp, Artificial sequence
  synthetic
ggcgcgccagtcctagatgagcagctcctctacagcttcaacttgtccagcctttccacgagcacctttaaggtgactcgcgactcgcgcacctacagcgttggggtgtgcacctttgcagtcgggccagaacaaggaggctgtaaggacggaggagtctgtctgctctcaggcaccaagggggcatccgactcggaccgatg

SEQ ID NO: 2418 - DNA, 203 bp, Artificial sequence
  synthetic
ggcgcgccagtcctctttggacggctgcaatcaatgaaactggattacaggcaccaggatgaagcggtcgttttaagttacgtgaatggtgatcgttgccctccagaaaccgatgacggcgtcccctgtgtcttccccttcatattcaatgggaagagctacgaggagtgcatcatagagagcagggccgactcggaccgatg

SEQ ID NO: 2419 - DNA, 203 bp, Artificial sequence
  synthetic
ggcgcgccagtcctaaagacggtgggcagacctgcattcaagaggtttgatatcgacagctgcacttactacttcagctgggactcccgggctgcctgcgccgtgaagcctcaggaggtgcagatggtgaatgggaccatcaccaaccctataaatggcaagagcttcagcctcggagatatttatttcgactcggaccgatg

SEQ ID NO: 2420 - DNA, 203 bp, Artificial sequence
  synthetic
ggcgcgccagtccttaagctgttcagagcctctggggacatgaggaccaatggggacaactacctgtatgagatccaactttcctccatcacaagctccagaaacccggcgtgctctggagccaacatatgccaggtgaagcccaacgatcagcacttcagtcggaaagttggaacctctgacaagaccgactcggaccgatg

SEQ ID NO: 2421 - DNA, 203 bp, Artificial sequence
  synthetic
ggcgcgccagtcctcaagtactaccttcaagacggcgatctcgatgtcgtgtttgcctcttcctctaagtgcggaaaggataagaccaagtctgtttcttccaccatcttcttccactgtgaccctctggtggaggacgggatccccgagttcagtcacgagactgccgactgccagtacctcttctccgactcggaccgatg

SEQ ID NO: 2422 - DNA, 203 bp, Artificial sequence
  synthetic
ggcgcgccagtcctttggtacacctcagccgtgtgtcctctgggggtgggctttgacagcgagaatcccggggacgacgggcagatgcacaaggggctgtcagaacggagccaggcagtcggcgcggtgctcagcctgctgctggtggcgctcacctgctgcctgctggccctgttgctctacaagaacgactcggaccgatg

SEQ ID NO: 2423 - DNA, 203 bp, Artificial sequence
  synthetic
ggcgcgccagtcctgaacggccatattaccaccaagtcagtgaaagccctcagctccctgcatggggatgaccaggacagtgaggatgaggttctgaccatcccagaggtgaaagttcactcgggcaggggagctggggcagagagctcccacccagtgagaaacgcacagagcaatgcccttcaggacgactcggaccgatg

SEQ ID NO: 2424 - DNA, 203 bp, Artificial sequence
  synthetic
ggcgcgccagtcctgcgtgaggacgatagggtggggctggtcaggggtgagaaggcgaggaaagggaagtccagctctgcacagcagaagacagtgagctccaccaagctggtgtccttccatgacgacagcgacgaggacctcttacacatctgactccgcagtgcctgcaggggagcacggagccgcgactcggaccgatg

SEQ ID NO: 2425 - DNA, 203 bp, Artificial sequence
  synthetic
ggcgcgccagtccttataggtctcatctcttcaggttctcatgataccacctttactgtgcttatttttttaagaaaaaagtgttgatcaaccattcgacctataagaagccttaatttgcacagtgtgtgacttacagaaactgcatgaaaaatcatgggccagagcctcggccctagcattgcactcgactcggaccgatg

SEQ ID NO: 2426 - DNA, 203 bp, Artificial sequence
  synthetic
ggcgcgccagtccttggcctcatgctggagggaggctgggcgggtacagcgcggaggaggagggaggccaggcgggcatggcgtggaggaggagggaggccgggcggtcacagcatggaggaggagggaggcgctgctggtgttcttattctggcggcagcgcctttcctgccatgtttagtgaatgacgactcggaccgatg

SEQ ID NO: 2427 - DNA, 203 bp, Artificial sequence
  synthetic
ggcgcgccagtcctgctgagaagcaaaccgccctgcagcatccctcagcctgtaccggtttggctggcttgtttgatttcaacatgagtgtattttttaaaattgatttttctcttcatttttttttcaatcaactttactgtaatataaagtattcaacaatttcaataaaagataaattattaaaacgactcggaccgatg

SEQ ID NO: 2428 - DNA, 203 bp, Artificial sequence
  synthetic
ggcgcgccagtcctcatttgtatctagtgtgtgtcttaacatctttctaaatcggcagtgtaactgcatagtttaacttcctgtctgtctccctcattttactcttccctccttgtcttatgttttggcttttgtgtatcagagcatctttctttgcagcatcctagtcttgcttcagtttctgtggtcgactcggaccgatg

SEQ ID NO: 2429 - DNA, 203 bp, Artificial sequence
  synthetic
ggcgcgccagtcctctcttttcatcctgcttgaagattcggagtgtggaaggaggctaggaagtctggtgcagtaggtgagcagacctcttgctgcccagcccagggtgggtggggcgcacacctgtctttgtgcatgcaaatctgatacacctggcgcatcctctggagagcacaacgcatggaaagcgactcggaccgatg

SEQ ID NO: 2430 - DNA, 203 bp, Artificial sequence
  synthetic
ggcgcgccagtcctgtctggaagctctgtgtagccattccttctgcagtcatcctacccaagtaaaagtaaccttggctatgttaccaccgttttggtcacccaggaggacatcttagcaagggtgcctgcgagggagtgtgggactgggcctcatcctcgccggcgttggaaaccaaggccttgtatcgactcggaccgatg

SEQ ID NO: 2431 - DNA, 203 bp, Artificial sequence
  synthetic
ggcgcgccagtcctcccaaggctaaactttctaattcccttctttgggctcgggggctcccggagcagggcgagagctcgcgtcgccggaaaggaagacgggaagaaagggcaggcggctcggcgggcgtcttctccactcctctgccgcgtccccgtggctgcagggagccggcatggggcttctcccgactcggaccgatg

SEQ ID NO: 2432 - DNA, 203 bp, Artificial sequence
  synthetic
ggcgcgccagtcctcctactgtatcgtcagccacttgcaggaggacaaaaaatgcttcatatgcaattcccaagatccttatcatgagaccctgaatcctgacagccatctcattgaaaatgtggtcactacatttgctccaaaccgccttaagatttggtggcaatctgaaaatggtgtggaaaatgcgactcggaccgatg

SEQ ID NO: 2433 - DNA, 203 bp, Artificial sequence
  synthetic
ggcgcgccagtcctgccagtgctcatgccggcctcacatgattggacgtcagtgcaacgaagtggaacctggttactactttgccaccctggatcactacctctatgaagcggaggaagccaacttggggcctggggttagcatagtggagcggcaatatatccaggaccggattccctcctggactgcgactcggaccgatg

SEQ ID NO: 2434 - DNA, 203 bp, Artificial sequence
  synthetic
ggcgcgccagtcctgagccggcttcgtccgagtgcctgaaggggcttatttggagtttttcattgacaacataccatattccatggagtacgacatcctaattcgctacgagccacagctacccgaccactgggaaaaagctgtcatcacagtgcagcgacctggaaggattccaaccagcagccgatcgactcggaccgatg

SEQ ID NO: 2435 - DNA, 203 bp, Artificial sequence
  synthetic
ggcgcgccagtcctgatgcaaaccttgtgagtgccatctgcaaggatctgtcaatgccttctgcaatcccgtcactggccagtgccactgtttccagggagtgtatgctcggcagtgtgatcggtgcttacctgggcactggggctttccaagttgccagccctgccagtgcaatggccacgccgatgcgactcggaccgatg

SEQ ID NO: 2436 - DNA, 203 bp, Artificial sequence
  synthetic
ggcgcgccagtcctactgcgacccagtgactggggagtgcttgaactgccaggactacaccatgggtcataactgtgaaaggtgcttggctggttactatggcgaccccatcattgggtcaggagatcactgccgcccttgcccttgcccagatggtcccgacagtggacgccagtttgccaggagctcgactcggaccgatg

SEQ ID NO: 2437 - DNA, 203 bp, Artificial sequence
  synthetic
ggcgcgccagtcctacaaggagactgggaggtgtctcaagtgcctgtaccacacggaaggggaacactgtcagttctgccggtttggatactatggtgatgccctccagcaggactgtcgaaagtgtgtctgtaattacctgggcaccgtgcaagagcactgtaacggctctgactgccagtgcgacacgactcggaccgatg

SEQ ID NO: 2438 - DNA, 203 bp, Artificial sequence
  synthetic
ggcgcgccagtcctctgggtttggaggccgcacctgcagcgagtgccaggaactcttctggggagaccccgacgtggagtgccgagcctgtgactgtgaccccaggggcattgagacgccacagtgtgaccagtccacgggccagtgtgtctgcgttgagggtgttgagggtccacgctgtgacaagtcgactcggaccgatg

SEQ ID NO: 2439 - DNA, 203 bp, Artificial sequence
  synthetic
ggcgcgccagtcctgcacgcgagggtactcgggggtcttccctgactgcacaccctgccaccagtgctttgctctctgggatgtgatcattgccgagctgaccaacaggacacacagattcctggagaaagccaaggccttgaagatcagtggtgtgatcgggccttaccgtgagactgtggactcggcgactcggaccgatg

SEQ ID NO: 2440 - DNA, 203 bp, Artificial sequence
  synthetic
ggcgcgccagtccttggagaggaaagtcagcgagataaaagacatcctggcgcagagccccgcagcagagccactgaaaaacattgggaatctctttgaggaagcagagaaactgattaaagatgttacagaaatgatggctcaagtagaagtgaaattatctgacacaacttcccaaagcaacagcacgactcggaccgatg

SEQ ID NO: 2441 - DNA, 203 bp, Artificial sequence
  synthetic
ggcgcgccagtcctcagccaaagaactggattctctacagacagaagccgaaagcctagacaacactgtgaaagaacttgctgaacaactggaatttatcaaaaactcagatattcggggtgccttggatagcattaccaagtatttccagatgtctcttgaggcagaggagagggtgaatgcctccacgactcggaccgatg

SEQ ID NO: 2442 - DNA, 203 bp, Artificial sequence
  synthetic
ggcgcgccagtcctcctgtggaacacccccaggggcctcctgttccgagactgaatgtggcgggccaaactgcagaactgacgaaggagagaggaagtgtggggggcctggctgtggtggtctggttactgttgcacacaacgcctggcagaaagccatggacttggaccaagatgtcctgagtgccccgactcggaccgatg

SEQ ID NO: 2443 - DNA, 203 bp, Artificial sequence
  synthetic
ggcgcgccagtcctaggatagtgctgatttggacagcattgaagcagttgctaatgaagtattgaaaatggagatgcctagcaccccacagcagttacagaacttgacagaagatatacgtgaacgagttgaaagcctttctcaagtagaggttattcttcagcatagtgctgctgacattgccagagcgactcggaccgatg

SEQ ID NO: 2444 - DNA, 203 bp, Artificial sequence
  synthetic
ggcgcgccagtcctctgagatgttgttagaagaagctaaaagagcaagcaaaagtgcaacagatgttaaagtcactgcagatatggtaaaggaagctctggaagaagcagaaaaggcccaggtcgcagcagagaaggcaattaaacaagcagatgaagacattcaaggaacccagaacctgttaacttcgactcggaccgatg

SEQ ID NO: 2445 - DNA, 203 bp, Artificial sequence
  synthetic
ggcgcgccagtcctcgattgagtctgaaacagcagcttctgaggaaaccttgttcaacgcgtcccagcgcatcagcgagttagagaggaatgtggaagaacttaagcggaaagctgcccaaaactccggggaggcagaatatattgaaaaagtagtatatactgtgaagcaaagtgcagaagatgttacgactcggaccgatg

SEQ ID NO: 2446 - DNA, 203 bp, Artificial sequence
  synthetic
ggcgcgccagtcctctcgcccgccccgcttccgcccgctgtcctgctgcacgaacccttccaactctcctttcctcccccacccttgagttacccctctgtctttcctgctgttgcgcgggtgctcccacagcggagcggagattacagagccgccgggatgccccaactctccggaggaggtggcggcgactcggaccgatg

SEQ ID NO: 2447 - DNA, 203 bp, Artificial sequence
  synthetic
ggcgcgccagtcctgtccagacatcctccagctcctgatatccctactttttatcccttgtctccgggtggtgttggacagatcaccccacctcttggctggttttcccatcatatgattcccggtcctcctggtccccacacaactggcatccctcatccagctattgtaacacctcaggtcaaacacgactcggaccgatg

SEQ ID NO: 2448 - DNA, 203 bp, Artificial sequence
  synthetic
ggcgcgccagtcctggaacatccccacactgacagtgacctaatgcacgtgaagcctcagcatgaacagagaaaggagcaggagccaaaaagacctcacattaagaagcctctgaatgcttttatgttatacatgaaagaaatgagagcgaatgtcgttgctgagtgtactctaaaagaaagtgcagccgactcggaccgatg

SEQ ID NO: 2449 - DNA, 203 bp, Artificial sequence
  synthetic
ggcgcgccagtccttgagcagcttttctcccctcatatctgcgtgcacttcccagagcatcttgcatccaaacctgtaacctttcggcaaggacggtaacttggctgcatttgcctgtcatgcgcaactggagccagcaaccagcacatccatcagcaccccagtggaggagttcatggaagagttcccgactcggaccgatg

SEQ ID NO: 2450 - DNA, 203 bp, Artificial sequence
  synthetic
ggcgcgccagtcctctctttgtttctgcttcatttttctttcttttcttttctcctaaagcttttatttaacagtgcaaaaggatcgtttttttttgcttttttaaacttgaatttttttaatttacactttttagttttaattttcttgtatattttgctagctatgagcttttaaataaaattgaacgactcggaccgatg

SEQ ID NO: 2451 - DNA, 203 bp, Artificial sequence
  synthetic
ggcgcgccagtcctcaattggcagccctatttcagtttattttttcttctgttttcttcttttctttttttaaacagtaaaccttaacagatgcgttcagcagactggtttgcagtgaattttcatttctttccttatcacccccttgttgtaaaaagcccagcacttgaattgttattactttaaatcgactcggaccgatg

SEQ ID NO: 2452 - DNA, 203 bp, Artificial sequence
  synthetic
ggcgcgccagtcctttttatttggggtttgggaccggatcaggccttaaatctacgcagaagaaaggcggagaagcagcggaagccgggcactagtcctgcagggtggaaggcgctttatcgggtcttctggcccgctgcgggcgatagagctggtaacctgagtagagtaaatagagacacgtgggtcgactcggaccgatg

SEQ ID NO: 2453 - DNA, 203 bp, Artificial sequence
  synthetic
ggcgcgccagtccttggatctctttctccacccatcccgagaacatcaaataaagtgcccgtggtgcagccatcccatgcggtccatcctctcacccccctcatcacttacagtgacgagcacttttctccaggatcacacccgtcacacatcccatcagatgtcaactccaaacaaggcatgtccagcgactcggaccgatg

SEQ ID NO: 2454 - DNA, 203 bp, Artificial sequence
  synthetic
ggcgcgccagtcctacatcctccagctcctgatatccctactttttatcccttgtctccgggtggtgttggacagatcaccccacctcttggctggttttcccatcatatgattcccggtcctcctggtccccacacaactggcatccctcatccagctattgtaacacctcaggtcaaacaggaacacgactcggaccgatg

SEQ ID NO: 2455 - DNA, 203 bp, Artificial sequence
  synthetic
ggcgcgccagtcctaggtacaggtccaagaatgacagctgcctacatctgaaacatggtggaaaacgaagctcattcccaacgtgcaaagccaaggcagcgaccccaggacctcttctggagatggaagcttgttgaaaacccagactgtctccacggcctgcccagtcgaccccaaaggaacactgacgactcggaccgatg

SEQ ID NO: 2456 - DNA, 203 bp, Artificial sequence
  synthetic
ggcgcgccagtcctccgccctgttcgagctgtgcgggcgggcggtgagcgcccatatgggggttctggagagcggggtgtgggccctcccaggcccaatacttcaaagcatcctacctctgctcaatatatattacttggagaggattgaggaaactgccctcaagaaaggcctctcaactcaggccacgactcggaccgatg

SEQ ID NO: 2457 - DNA, 203 bp, Artificial sequence
  synthetic
ggcgcgccagtcctgctcccgccatgtccgacagctcaccatctgtaacatgctgcagggtgcaaccgagctggtggctgagcccaaccgcagggttctggagaccctggccagctccctgcacactctcaagttccgccacctgctgttctctgatgtggctgctcagcagtcacttcggcagctgtcgactcggaccgatg

SEQ ID NO: 2458 - DNA, 203 bp, Artificial sequence
  synthetic
ggcgcgccagtccttgcatcagctcattcaccatggggctgtcagtcaagtgtcgctatactcctggcctgtgcctgagtcagcccttttcatccttattctcaccatgagtgctggcttctggcaaccagggcctggtggcccaccctgccgcctctgtggagaggcctcccgaggccgggccccatcgactcggaccgatg

SEQ ID NO: 2459 - DNA, 203 bp, Artificial sequence
  synthetic
ggcgcgccagtcctcccgagatgaagggtccctcttattgggctcacgtcggccccgccgggatgctgctgagcgatgtgctgcagccctgatggccagccggcgtaagagtgaagccaagcagatgcccagagctgcacctgccactcgggtaacacgccggagcacacaggagagcctgacagcagcgactcggaccgatg

SEQ ID NO: 2460 - DNA, 203 bp, Artificial sequence
  synthetic
ggcgcgccagtcctgcggaacagaccttaagagggagctgcaccccccagccacctcccatgaggctcctggcaccaagcggtcaccttctgctccagcagccacctcctctgcctcttcttctacatcctcatacaaacgggcaccagctagctcagccccacagcctaagcccctaaagcgtttcacgactcggaccgatg

SEQ ID NO: 2461 - DNA, 203 bp, Artificial sequence
  synthetic
ggcgcgccagtcctttccagcactggaagcttcacaaagattccgcagcatctccaccttggagctattcacagttccactctccacagaggcagccctgacactatgccacctgctgagctcctgggtgtcactggagagcctcacactctcctacaatggcctgggctctaacatcttccgcctgccgactcggaccgatg

SEQ ID NO: 2462 - DNA, 203 bp, Artificial sequence
  synthetic
ggcgcgccagtccttagacagcctgcgggccctgtcaggccaggctggatgtcgcctccgtgccctgcatctcagtgacctgttctcaccactgcccatcctggagctgacacgtgctatcgtgcgagcactgcccctgctacgggtcctctctattcgtgttgaccacccaagccagcgggacaacccgactcggaccgatg

SEQ ID NO: 2463 - DNA, 203 bp, Artificial sequence
  synthetic
ggcgcgccagtccttgtttgagaagcgcccagcccaatttctgcctgagatggttgctgctatgaagggcaactccacactgaagggcctccggctgccagggaaccgcctggggaatgctggcctgctggccttggcagatgttttctcagaggattcatcctcctctctctgtcagctggacatcacgactcggaccgatg

SEQ ID NO: 2464 - DNA, 203 bp, Artificial sequence
  synthetic
ggcgcgccagtccttcttcccttgcactgaggtcctggaggccttgatgaggcccagcaaacaggcattctcacagctgggtttatagtctttgggccccttactcagtatcctgggaaccctgggccaggaggttacagtggtcatcataattgctgaagagatcccctcccctgcccctgggttcccgactcggaccgatg

SEQ ID NO: 2465 - DNA, 203 bp, Artificial sequence
  synthetic
ggcgcgccagtcctcatgggactgtctctggtagagatggcggttgggaggtatcccatccctcctccagatgccaaggagctggagctgatgtttgggtgccaggtggaaggagatgcggctgagaccccacccaggccaaggacccccgggaggccccttagctcatacggaatggacagccgacccgactcggaccgatg

SEQ ID NO: 2466 - DNA, 203 bp, Artificial sequence
  synthetic
ggcgcgccagtccttcccatggcaatttttgagttgttggattacatagtcaacgagcctcctccaaaactgcccagtggagtgttcagtctggaatttcaagattttgtgaataaatgcttaataaaaaaccccgcagagagagcagatttgaagcaactcatggttcatgcttttatcaagagatccgactcggaccgatg

SEQ ID NO: 2467 - DNA, 203 bp, Artificial sequence
  synthetic
ggcgcgccagtcctgttcagatgtgcatttcacctgtgacaaaggatgaagaacacagcatgtgccaagattctactcttgtcatttttaatattactgtctttattcttattactattattgttcccctaagtggattggctttgtgcttggggctatttgtgtgtatgctgatgatcaaaacctgtcgactcggaccgatg

SEQ ID NO: 2468 - DNA, 203 bp, Artificial sequence
  synthetic
ggcgcgccagtcctactgccatcctggcccagggcatctgggaggaaccgagggggctgctcccacctggctctgtggcgagccatttgtcccaagtgccaaagaagcagaccattggggctcccagccaggcccttgtcggccccaccagtgcctctccctgctgctcctaggacccgtctccagctcgactcggaccgatg

SEQ ID NO: 2469 - DNA, 203 bp, Artificial sequence
  synthetic
ggcgcgccagtcctggtggccacacctctatcccggctttggtgcggggtacacaagaggggatgagttgtgtgaataccccaagactcccatgagggagatgccatgagccgcccaaggccttcccctggcactggcaaacagggcctctgcggagcacactggctcacccagtcctgcccgccacccgactcggaccgatg

SEQ ID NO: 2470 - DNA, 203 bp, Artificial sequence
  synthetic
ggcgcgccagtcctctttgaggtggaggctgatgacttggtgaccatctcagaactgggccgtggagcctatggggtggtagagaaggtgcggcacgcccagagcggcaccatcatggccgtgaagcggatccgggccaccgtgaactcacaggagcagaagcggctgctcatggacctggacatcaacgactcggaccgatg

SEQ ID NO: 2471 - DNA, 203 bp, Artificial sequence
  synthetic
ggcgcgccagtccttatcgtgcgggccctggagcatctgcacagcaagctgtcggtgatccacagagatgtgaagccctccaatgtccttatcaacaaggagggccatgtgaagatgtgtgactttggcatcagtggctacttggtggactctgtggccaagacgatggatgccggctgcaagccctacgactcggaccgatg

SEQ ID NO: 2472 - DNA, 203 bp, Artificial sequence
  synthetic
ggcgcgccagtcctcatggcccctgagaggatcaacccagagctgaaccagaagggctacaatgtcaagtccgacgtctggagcctgggcatcaccatgattgagatggccatcctgcggttcccttacgagtcctgggggaccccgttccagcagctgaagcaggtggtggaggagccgtccccccacgactcggaccgatg

SEQ ID NO: 2473 - DNA, 203 bp, Artificial sequence
  synthetic
ggcgcgccagtcctgctcccagccgaccgtttctcccccgagtttgtggacttcactgctcagtgcctgaggaagaaccccgcagagcgtatgagctacctggagctgatggagcaccccttcttcaccttgcacaaaaccaagaagacggacattgctgccttcgtgaaggagatcctgggagaagacgactcggaccgatg

SEQ ID NO: 2474 - DNA, 203 bp, Artificial sequence
  synthetic
ggcgcgccagtcctctcataggggctgggcctcggaccccactccggccctccagagccccacagccccatctgcgggggcagtgctcacccacaccataagctactgccatcctggcccagggcatctgggaggaaccgagggggctgctcccacctggctctgtggcgagccatttgtcccaagtgcgactcggaccgatg

SEQ ID NO: 2475 - DNA, 203 bp, Artificial sequence
  synthetic
ggcgcgccagtcctccaaagaagcagaccattggggctcccagccaggcccttgtcggccccaccagtgcctctccctgctgctcctaggacccgtctccagctgctgagatcctggactgagggggcctggatgccccctgtggatgctgctgcccctgcacagcaggctgccagtgcctgggtggacgactcggaccgatg

SEQ ID NO: 2476 - DNA, 203 bp, Artificial sequence
  synthetic
ggcgcgccagtcctagatgccatgagccgcccaaggccttcccctggcactggcaaacagggcctctgcggagcacactggctcacccagtcctgcccgccaccgttatcggtgtcattcacctttcgtgttttttttaatttatcctctgttgattttttcttttgctttatgggtttggcttgtttcgactcggaccgatg

SEQ ID NO: 2477 - DNA, 203 bp, Artificial sequence
  synthetic
ggcgcgccagtcctttcttgcatggtttggagctgatcgcttctcccccaccccctagggtaccagcaggcagagccttgccctctgctcaggctggggtccagtgggaggggcccaagatctctgctcagagaagtgcagggggagccttccagctcactctccctgaggactggcttgacaggggccgactcggaccgatg

SEQ ID NO: 2478 - DNA, 203 bp, Artificial sequence
  synthetic
ggcgcgccagtcctttgccggtgctggccgccgccgggagagcccggggcagagcagaggtgctcatcagcactgtaggcccggaagattgtgtggtcccgttcctgacccggcctaaggtccctgtcttgcagctggatagcggcaactacctcttctccactagtgcaatctgccgatatttttttcgactcggaccgatg

SEQ ID NO: 2479 - DNA, 203 bp, Artificial sequence
  synthetic
ggcgcgccagtcctagtcgtcagaactgtcctttcctggctggggagacagaatctctagccgacattgttttgtggggagccctatacccattactgcaagatcccgcctacctccctgaggagctgagtgccctgcacagctggttccagacactgagtacccaggaaccatgtcagcgagctgcacgactcggaccgatg

SEQ ID NO: 2480 - DNA, 203 bp, Artificial sequence
  synthetic
ggcgcgccagtcctgaaagtttgcccccgctgcggccccagcagaatccagtgttgcctgtggctggagaaaggaatgtgctcatcaccagtgccctcccttacgtcaacaatgtcccccaccttgggaacatcattggttgtgtgctcagtgccgatgtctttgccaggtactctcgcctccgccagcgactcggaccgatg

SEQ ID NO: 2481 - DNA, 203 bp, Artificial sequence
  synthetic
ggcgcgccagtccttggaacaccctctatctgtgtgggacagatgagtatggtacagcaacagagaccaaggctctggaggagggactaaccccccaggagatctgcgacaagtaccacatcatccatgctgacatctaccgctggtttaacatttcgtttgatatttttggtcgcaccaccactccacgactcggaccgatg

SEQ ID NO: 2482 - DNA, 203 bp, Artificial sequence
  synthetic
ggcgcgccagtcctcagcagaccaaaatcacccaggacattttccagcagttgctgaaacgaggttttgtgctgcaagatactgtggagcaactgcgatgtgagcactgtgctcgcttcctggctgaccgcttcgtggagggcgtgtgtcccttctgtggctatgaggaggctcggggtgaccagtgtcgactcggaccgatg

SEQ ID NO: 2483 - DNA, 203 bp, Artificial sequence
  synthetic
ggcgcgccagtcctgacaagtgtggcaagctcatcaatgctgtcgagcttaagaagcctcagtgtaaagtctgccgatcatgccctgtggtgcagtcgagccagcacctgtttctggacctgcctaagctggagaagcgactggaggagtggttggggaggacattgcctggcagtgactggacaccccgactcggaccgatg

SEQ ID NO: 2484 - DNA, 203 bp, Artificial sequence
  synthetic
ggcgcgccagtcctggcaacttcatcaacagagctgggatgtttgtgtctaagttctttgggggctatgtgcctgagatggtgctcacccctgatgatcagcgcctgctggcccatgtcaccctggagctccagcactatcaccagctacttgagaaggttcggatccgggatgccttgcgcagtatccgactcggaccgatg

SEQ ID NO: 2485 - DNA, 203 bp, Artificial sequence
  synthetic
ggcgcgccagtccttccccgaagccagcagttgtagagactgttacaacagccaagccacagcagatacaagcgctgatggatgaagtgacaaaacaaggaaacattgtccgagaactgaaagcacaaaaggcagacaagaacgaggttgctgcggaggtggcgaaactcttggatctaaagaaacagcgactcggaccgatg

SEQ ID NO: 2486 - DNA, 203 bp, Artificial sequence
  synthetic
ggcgcgccagtccttaaggactcgactacctccgaagaaagccgaaacatgtggctccgcccacactggcctcagctctccgttctcgactattgccgaagtgagccgaagtttgtggccccgcttccggagaactcaagctcccgattgtgcccgaaggaacccgaagggagaccccgcctcattcccgactcggaccgatg

SEQ ID NO: 2487 - DNA, 203 bp, Artificial sequence
  synthetic
ggcgcgccagtccttcacggcgagctccagaccccgcctcctttccggagcccgtctgttccccttcgggtccaaagcttttggctcctccttgttccgagcccgaaggcccgccccttcacgtactcggagctcggatcccagtgtggacctggactcgaatcccgttgccgactcgcgctctcggccgactcggaccgatg

SEQ ID NO: 2488 - DNA, 203 bp, Artificial sequence
  synthetic
ggcgcgccagtcctctcctgcccggcgagcagctcaggtcctgggctgaagagatggggagcagccgctgtgggcctggggctcaccctgttcacctgtggcccccacactttgcattctctggtcaccatcctcgggacctgggccctcattcaggcccagccctgctggtgagcctggccagtgaacgactcggaccgatg

SEQ ID NO: 2489 - DNA, 203 bp, Artificial sequence
  synthetic
ggcgcgccagtcctctggagcagcccttccccggggcagtgcccagcctgcggcccctgctgcgccgcgcctggccggccccgctcttcggcctgctgttcctgctctcctctcacctcttcccgctggaggccgtgcgcgaggacgccttctacgcccgcccgctgcccgcccgcctcttctacatgcgactcggaccgatg

SEQ ID NO: 2490 - DNA, 203 bp, Artificial sequence
  synthetic
ggcgcgccagtcctctgagcgcctactggcacggcctccacccgggctactacctgagcttcctgaccatcccgctgtgcctggctgccgagggccggctggagtcagccctgcgggggcggctgagcccagggggccagaaggcctgggactgggtgcactggttcctgaagatgcgcgcctatgaccgactcggaccgatg

SEQ ID NO: 2491 - DNA, 203 bp, Artificial sequence
  synthetic
ggcgcgccagtccttacatgtgcatgggcttcgtgctgctctccttggccgacacccttcggtactgggcctccatctacttctgtatccacttcctggccctggcagccctggggctggggctggctttaggtgggggcagccccagccggcggaaggcagcatcccagcccaccagccttgccccacgactcggaccgatg

SEQ ID NO: 2492 - DNA, 203 bp, Artificial sequence
  synthetic
ggcgcgccagtcctgagaagctccgggaggagtaagctgtcacgacgctccctctgccagctggtcccgggaattctgtgaaccaggctgctgtctcctccccagaaagagtccttaccttggagagggtcctggagagaatttcctcttccccagctaaataccctgcctgcaactgaagcagaccccgactcggaccgatg

SEQ ID NO: 2493 - DNA, 203 bp, Artificial sequence
  synthetic
ggcgcgccagtccttttgcatccacaatgtggggtcggagcttgggggcaggtcctgggagtgggaagcctcttccttgtgtctttcgctccacttttagctcatcgcaccaatattgcagacttggaaggaagcataagcttcccatttcacaaaggggaaactgaggtgcgggtgcgcgggcctggcgactcggaccgatg

SEQ ID NO: 2494 - DNA, 203 bp, Artificial sequence
  synthetic
ggcgcgccagtcctggagacactcagctacagctactgctacgtgggaatcatgacaggcccgttcttccgctaccgcacctacctggactggctggagcagcccttccccggggcagtgcccagcctgcggcccctgctgcgccgcgcctggccggccccgctcttcggcctgctgttcctgctctccgactcggaccgatg

SEQ ID NO: 2495 - DNA, 203 bp, Artificial sequence
  synthetic
ggcgcgccagtcctctctcacctcttcccgctggaggccgtgcgcgaggacgccttctacgcccgcccgctgcccgcccgcctcttctacatgatccccgtcttcttcgccttccgcatgcgcttctacgtggcctggattgccgccgagtgcggctgcattgccgccggctttggggcctaccccgtcgactcggaccgatg

SEQ ID NO: 2496 - DNA, 203 bp, Artificial sequence
  synthetic
ggcgcgccagtcctcctgcgggggcggctgagcccagggggccagaaggcctgggactgggtgcactggttcctgaagatgcgcgcctatgactacatgtgcatgggcttcgtgctgctctccttggccgacacccttcggtactgggcctccatctacttctgtatccacttcctggccctggcagccgactcggaccgatg

SEQ ID NO: 2497 - DNA, 203 bp, Artificial sequence
  synthetic
ggcgcgccagtcctagtccttaccttggagagggtcctggagagaatttcctcttccccagctaaataccctgcctgcaactgaagcagacccgggggtgtcctccctgccctctgcccagaggccacctccactcctacaaaatcaaagtattgtccagacaagagtcactggcccctgctccagctcgactcggaccgatg

SEQ ID NO: 2498 - DNA, 203 bp, Artificial sequence
  synthetic
ggcgcgccagtccttctgggtatccagagagcactgcacttccccaaaacggaaggggcccctgggcagtgggttttgggcaaattccctttctttgcatccacaatgtggggtcggagcttgggggcaggtcctgggagtgggaagcctcttccttgtgtctttcgctccacttttagctcatcgcacgactcggaccgatg

SEQ ID NO: 2499 - DNA, 203 bp, Artificial sequence
  synthetic
ggcgcgccagtcctcgactacttgtacaagcagccagccgagcacctgcagctgctggaggaagctgccaaggaggtagctgatgaggtgacccggccccggccttctggggaggaggtgctccaggacatccaggtcatgctcaagtcggacgccagcccttccagcattcgtagcctgaagtcggacgactcggaccgatg

SEQ ID NO: 2500 - DNA, 203 bp, Artificial sequence
  synthetic
ggcgcgccagtcctcatgatgtcacacctggtgaagatccctggcatcatcatcgcggcctctggggtccgtgccaaggccacccgcatctctatccagtgccgcagctgccgcaacaccctcaccaacattgccatgcgccctggcctcgagggctatgccctgcccaggaagtgcaacacagatcacgactcggaccgatg

SEQ ID NO: 2501 - DNA, 203 bp, Artificial sequence
  synthetic
ggcgcgccagtcctggctgggcgccccaaatgcccattggacccgtacttcatcatgcccgacaaatgcaaatgcgtggacttccagaccctgaagctgcaggagctgcctgatgcagtcccccacggggagatgcccagacacatgcagctctactgcgacaggtacctgtgtgacaaggtcgtccccgactcggaccgatg

SEQ ID NO: 2502 - DNA, 203 bp, Artificial sequence
  synthetic
ggcgcgccagtcctggaggaggaggagttccgtcgcctggctgccctcccaaatgtctatgaggtcatctccaagagcatcgccccctccatctttgggggcacagacatgaagaaggccattgcctgcctgctctttgggggctcccgaaagaggctccctgatggacttactcgccgaggagacatcgactcggaccgatg

SEQ ID NO: 2503 - DNA, 203 bp, Artificial sequence
  synthetic
ggcgcgccagtcctcaacctgctgatgctaggggaccctgggacagccaagtcccagcttctgaagtttgtggagaagtgttctcccattggggtatacacgtctgggaaaggcagcagcgcagctggactgacagcctcggtgatgagggacccttcgtcccggaatttcatcatggagggcggagccgactcggaccgatg

SEQ ID NO: 2504 - DNA, 203 bp, Artificial sequence
  synthetic
ggcgcgccagtcctgttcggccgctgggatgagacgaagggggaggacaacattgacttcatgcccaccatcttgtcgcgcttcgacatgatcttcatcgtcaaggatgagcacaatgaggagagggatgtgatgctggccaagcatgtcatcactctgcacgtgagcgcactgacacagacacaggccgactcggaccgatg

SEQ ID NO: 2505 - DNA, 203 bp, Artificial sequence
  synthetic
ggcgcgccagtcctcatcactgtgcggcagctggaggccattgtgcgcatcgcggaagccctcagcaagatgaagctgcagcccttcgccacagaggcagatgtggaggaggccctgcggctcttccaagtgtccacgttggatgctgccttgtccggtaccctgtcaggggtggagggcttcaccagcgactcggaccgatg

SEQ ID NO: 2506 - DNA, 203 bp, Artificial sequence
  synthetic
ggcgcgccagtcctccaggaggaccaggagatgctgagccgcatcgagaagcagctcaagcgccgctttgccattggctcccaggtgtctgagcacagcatcatcaaggacttcaccaagcagaaatacccggagcacgccatccacaaggtgctgcagctcatgctgcggcgcggcgagatccagcacgactcggaccgatg

SEQ ID NO: 2507 - DNA, 203 bp, Artificial sequence
  synthetic
ggcgcgccagtcctgagcaggagcgagagcaggaacagaagaaggccaatagcctggccaggctggcacatacccttcctgtggaggaaccccgcatggaggcgccacccctgcctctgtctccaccggctcccccgccggcacccccaccaccacttgccacccctgccccactgactgtcatccctcgactcggaccgatg

SEQ ID NO: 2508 - DNA, 203 bp, Artificial sequence
  synthetic
ggcgcgccagtcctatccctgtggtgaccaactcccctcagcctctacccccacccccacccttgcccgcggcagcccagcctctgcccctggcgcctcgtcagccggccctggttggcgcccccggactcagcattaaggagcctgcccccctgcccagcaggccgcaggtgcccacccctgctccccgactcggaccgatg

SEQ ID NO: 2509 - DNA, 203 bp, Artificial sequence
  synthetic
ggcgcgccagtcctctactgccggactcgaaggccaccattccacccaatggcagccccaagcctttgcagcccctccccacgcctgtcctgaccatagcgccacaccctggagtccagcctcagctggccccccagcagccgcccccacccacgctggggaccctgaagttggcaccagctgaagaacgactcggaccgatg

SEQ ID NO: 2510 - DNA, 203 bp, Artificial sequence
  synthetic
ggcgcgccagtcctgaggatgaccaggcctccacctccaccgcctctgagggtgaggacaacatagacgaggatatggaggaggaccgggcgggcctgggcccacctaagctgagccatcgtccccagccggagctgctgaagtccaccctgccaccccccagcaccacccctgcgcctctgcctccacgactcggaccgatg

SEQ ID NO: 2511 - DNA, 203 bp, Artificial sequence
  synthetic
ggcgcgccagtcctcacccacaccctcacccccactccgtggccctacctcctgcccacctccccgtgcagcagcagcagccacagcagaagacccctctgccagcccctcctcccccaccggctgcccctgcccagacactggtgccagctccagcccatctggtggcgacggctgggggtggctcccgactcggaccgatg

SEQ ID NO: 2512 - DNA, 203 bp, Artificial sequence
  synthetic
ggcgcgccagtcctacggtcatcgcccacacagccaccactcacgcttcagtcatccagactgtgaaccacgttctgcaggggccaggcggcaagcacatcgcccacatcgccccctcggcccccagccctgcggtgcaactggcgcctgccacaccccccattgggcacatcactgtgcaccctgcccgactcggaccgatg

SEQ ID NO: 2513 - DNA, 203 bp, Artificial sequence
  synthetic
ggcgcgccagtcctccccagctggtgggccagaccgtgctcaaccctgtgaccatggtcaccatgccctccttcccagtcagcacactcaagctggcttgaggacgaggccactcagaggcccccagtggggacagggagggggacctgtcccccactctctcacccaccagctccacacattccagccgactcggaccgatg

SEQ ID NO: 2514 - DNA, 203 bp, Artificial sequence
  synthetic
ggcgcgccagtcctcagtgccgctcctgcttcccctccctaccctcggaaatcagtgcgatgtggacgtcacgctccctgacttctcccccgccctgccccgccttcgtgtgctgctgctgctattgctgtctggtgaggtggcccaggcccccggctttcctccggagcctcatgttctcttcccagcgactcggaccgatg

SEQ ID NO: 2515 - DNA, 203 bp, Artificial sequence
  synthetic
ggcgcgccagtcctttccccgtcccctgcagcctgggtctggatgggaggagagccactgggcccctgtccccagtccccagtccccagccctgggcttggctcttggcttccagaaggcagcaaagaggggcgctgtcctgcgttcagcccctgatctctgacctctgctgagtgctgggcactgctcgactcggaccgatg

SEQ ID NO: 2516 - DNA, 203 bp, Artificial sequence
  synthetic
ggcgcgccagtcctccaagggacaggtgggcctggcggcctgtgggtttgggtgcctcctgcagtttgggagacatggaccagcatctggtcttgtttccaggagcatagaagccacatcgttgagacatcaggaaggtaaaaacccagcggcttagccaagccctaagcctgtccccagaccaaccccgactcggaccgatg

SEQ ID NO: 2517 - DNA, 203 bp, Artificial sequence
  synthetic
ggcgcgccagtccttgggacctatacagaacagagggccagagctagggctgctgcttctgctccagcccctttgcctctgtcctcccatcccctcaacaccctgcttctcccggggacgcttttgagtgggccctgcccggggagctgcagagcagcagcacctttctctgagaagaggtccttggtcgactcggaccgatg

SEQ ID NO: 2518 - DNA, 203 bp, Artificial sequence
  synthetic
ggcgcgccagtccttctctggaaataaagaatccttagatgcctaaaaattcccttcctgttccctcctggtcctggacacctcccaggggactgttccttatttctctctcctggtgtgggtaaagggacagttacaaaccaggtcaccatcctcagaggctgagccctgtacccaccccagcacagcgactcggaccgatg

SEQ ID NO: 2519 - DNA, 203 bp, Artificial sequence
  synthetic
ggcgcgccagtcctccacctccgccagaccccgtggctctgggagagccagctttgctattcccattgtgacagcgatggcaggcctgacccacggggcagttagagcagcctcgtggagctcgcccctcccctcagcctgcccacctctccctgcatcctgaggccagtggcccccgggcctgcacacgactcggaccgatg

SEQ ID NO: 2520 - DNA, 203 bp, Artificial sequence
  synthetic
ggcgcgccagtcctgatacctcatcatccacccgctgcccctccccgtccctgtcccccagcatcgggggcctgcaaatctagtgccgaatgactatgtccagattggtgacgatgggtgttgctgtttttcttgtcgtttgtgaacgctgtgatgctgtgtgcccaagtgggcagtcaccacccagccgactcggaccgatg

SEQ ID NO: 2521 - DNA, 203 bp, Artificial sequence
  synthetic
ggcgcgccagtccttcaggctccgcctacagctcaactccctgccactggccagcccactgttaacaacgactattcctattaccacatttctgaagcacaaaatgtctccagtcatgttccataccctgtagcgttacatgtaaatatagtcaatgtccctcagccagctgccgcagccattcagagcgactcggaccgatg

SEQ ID NO: 2522 - DNA, 203 bp, Artificial sequence
  synthetic
ggcgcgccagtcctaaggtcaatcttagaaagctctccaagaactcctacaccattcaaacatgcacttgcagctcaagaaattaaatacggtcccctgaagatgctacctcagacaccctctcatctagtagaagatctgcaggatgtgatcaaacaggaatctgatgaatctggaattgttgctgacgactcggaccgatg

SEQ ID NO: 2523 - DNA, 203 bp, Artificial sequence
  synthetic
ggcgcgccagtcctgtttcaagaaaatggaccacccttactgaagaaaatcaaacaagaggtggaatctccaactgataaatcaggaaacttcttctgctcacaccactgggaaggggacagtctgaatacccaactgttcacgcagacctcgcctgtggcagatgcaccgaatattcttacaagctccgactcggaccgatg

SEQ ID NO: 2524 - DNA, 203 bp, Artificial sequence
  synthetic
ggcgcgccagtcctcgttttaatggcaccagcatcagaagatgaagacaatgttctcaaagcatttacagtacctaaaaacaggtccctggcgagccccttgcagccttgtagcagtacctgggaacctgcatcctgtggaaagatggaggagcagatgacatcttccagtcaagctcgtaaatacgtcgactcggaccgatg

SEQ ID NO: 2525 - DNA, 203 bp, Artificial sequence
  synthetic
ggcgcgccagtcctgaatgcattctcagcccggacgctggtcatgtgagacatttccagaaaagcattatggttttcagaacacttcaagttgacttgggatatatcattcctcaacatgaaacttttcatgaatgggagaagaacctatttttgttgtggtacaacagttgagagcagcaccaagtgcgactcggaccgatg

SEQ ID NO: 2526 - DNA, 203 bp, Artificial sequence
  synthetic
ggcgcgccagtcctctctgcattttttattgtggtttttttgttattgttggtttatacaagcatgcgttgcacttcttttttgggagatgtgtgttgttgatgttctatgttttgttttgagtgtagcctgactgttttataatttgggagttctgcatttgatccgcatcccctgtggtttctaagcgactcggaccgatg

SEQ ID NO: 2527 - DNA, 203 bp, Artificial sequence
  synthetic
ggcgcgccagtccttgtatggtctcagaactgttgcatggatcctgtgtttgcaactggggagacagaaactgtggttgatagccagtcactgccttaagaacatttgatgcaagatggccagcactgaacttttgagatatgacggtgtacttactgccttgtagcaaaataaagatgtgcccttatcgactcggaccgatg

SEQ ID NO: 2528 - DNA, 203 bp, Artificial sequence
  synthetic
ggcgcgccagtccttaattccagcgagaggcagagggagcgagcgggcggccggctagggtggaagagccgggcgagcagagctgcgctgcgggcgtcctgggaagggagatccggagcgaatagggggcttcgcctctggcccagccctcccgctgatcccccagccaggggtccgcaacccttgcccgactcggaccgatg

SEQ ID NO: 2529 - DNA, 203 bp, Artificial sequence
  synthetic
ggcgcgccagtcctgcatccacgaaactttgcccatagcagcgggcgggcactttgcactggaacttacaacacccgagcaaggacgcgactctcccgacgcggggaggctattctgcccatttggggacacttccccgccgctgccaggacccgcttctctgaaaggctctccttgcagctgcttagcgactcggaccgatg

SEQ ID NO: 2530 - DNA, 203 bp, Artificial sequence
  synthetic
ggcgcgccagtcctatggtgaccgagctgctgggaggagacatggtgaaccagagtttcatctgcgacccggacgacgagaccttcatcaaaaacatcatcatccaggactgtatgtggagcggcttctcggccgccgccaagctcgtctcagagaagctggcctcctaccaggctgcgcgcaaagaccgactcggaccgatg

SEQ ID NO: 2531 - DNA, 203 bp, Artificial sequence
  synthetic
ggcgcgccagtcctagcggcagcccgaaccccgcccgcggccacagcgtctgctccacctccagcttgtacctgcaggatctgagcgccgccgcctcagagtgcatcgacccctcggtggtcttcccctaccctctcaacgacagcagctcgcccaagtcctgcgcctcgcaagactccagcgccttccgactcggaccgatg

SEQ ID NO: 2532 - DNA, 203 bp, Artificial sequence
  synthetic
ggcgcgccagtccttctccgtcctcggattctctgctctcctcgacggagtcctccccgcagggcagccccgagcccctggtgctccatgaggagacaccgcccaccaccagcagcgactctgaggaggaacaagaagatgaggaagaaatcgatgttgtttctgtggaaaagaggcaggctcctggccgactcggaccgatg

SEQ ID NO: 2533 - DNA, 203 bp, Artificial sequence
  synthetic
ggcgcgccagtcctaaaaggtcagagtctggatcaccttctgctggaggccacagcaaacctcctcacagcccactggtcctcaagaggtgccacgtctccacacatcagcacaactacgcagcgcctccctccactcggaaggactatcctgctgccaagagggtcaagttggacagtgtcagagtccgactcggaccgatg

SEQ ID NO: 2534 - DNA, 203 bp, Artificial sequence
  synthetic
ggcgcgccagtcctctgagacagatcagcaacaaccgaaaatgcaccagccccaggtcctcggacaccgaggagaatgtcaagaggcgaacacacaacgtcttggagcgccagaggaggaacgagctaaaacggagcttttttgccctgcgtgaccagatcccggagttggaaaacaatgaaaaggcccgactcggaccgatg

SEQ ID NO: 2535 - DNA, 203 bp, Artificial sequence
  synthetic
ggcgcgccagtcctacacagaatttcaatcctagtatatagtacctagtattataggtactataaaccctaattttttttatttaagtacattttgctttttaaagttgatttttttctattgtttttagaaaaaataaaataactggcaaatatatcattgagccaaatcttaaaaaaaaaaaaaaacgactcggaccgatg

SEQ ID NO: 2536 - DNA, 203 bp, Artificial sequence
  synthetic
ggcgcgccagtccttgcctgcgcagctccggccgcctggctccccatactagtcgccgatatttggagttcttacaacatggcagacattgacaacaaagaacagtctgaacttgatcaagatttggatgatgttgaagaagtagaagaagaggaaactggtgaagaaacaaaactcaaagcacgtcacgactcggaccgatg

SEQ ID NO: 2537 - DNA, 203 bp, Artificial sequence
  synthetic
ggcgcgccagtcctagatgagaaaaaagatgaagaaaaagaagaccccaaaggaattcctgaattttggttaactgtttttaagaatgttgacttgctcagtgatatggttcaggaacacgatgaacctattctgaagcacttgaaagatattaaagtgaagttctcagatgctggccagcctatgagcgactcggaccgatg

SEQ ID NO: 2538 - DNA, 203 bp, Artificial sequence
  synthetic
ggcgcgccagtcctttttgtcttagaatttcactttgaacccaatgaatattttacaaatgaagtgctgacaaagacatacaggatgaggtcagaaccagatgattctgatcccttttcttttgatggaccagaaattatgggttgtacagggtgccagatagattggaaaaaaggaaagaatgtcaccgactcggaccgatg

SEQ ID NO: 2539 - DNA, 203 bp, Artificial sequence
  synthetic
ggcgcgccagtccttttgaaaactattaagaagaagcagaaacacaagggacgtgggacagttcgtactgtgactaaaacagtttccaatgactctttctttaacttttttgcccctcctgaagttcctgagagtggagatctggatgatgatgctgaagctatccttgctgcagacttcgaaattggcgactcggaccgatg

SEQ ID NO: 2540 - DNA, 203 bp, Artificial sequence
  synthetic
ggcgcgccagtcctgctattgccaaagtgaaggtgtagataatacctagtcttgttacataaaggggatgtggtttgcagaagaattttctttataaaattgaagttttaagggacgtcagtgtttatgccatttttccagttccaaaatgattccattccattctagaaatttgaagtatgtaacctcgactcggaccgatg

SEQ ID NO: 2541 - DNA, 203 bp, Artificial sequence
  synthetic
ggcgcgccagtcctgtctcattttttcctgttagaaatggtgaaatatcatataatcacttataaagaaaactgatatgaaaaaattttagagttgtttgctttatggtcactcaagtagggtaagtgttccacaaattccacaagttgatagtttaacatggatgtctgaaagccacatatataattcgactcggaccgatg

SEQ ID NO: 2542 - DNA, 203 bp, Artificial sequence
  synthetic
ggcgcgccagtcctactttcataaaaatatttttgttgtgtgaataggttaatgatatggtaaggcccctaaaataactgaattaattgtttattgtaattgtaggccattcccattattaaaaataaagacaaaacttgaagtaactgaaaatcttatcgtgctatgtagaaatattgaactaatatcgactcggaccgatg

SEQ ID NO: 2543 - DNA, 203 bp, Artificial sequence
  synthetic
ggcgcgccagtcctggaggaggagcctctgccagactggagagaagcaggcctgagcctccccaaaggcagctcctggggactcccaggaccacaggctgagacgagacgcagggtggctggaggaagtgagaggtgaactcagcctgggactggctgggcgagactctccacctgctccctgggacccgactcggaccgatg

SEQ ID NO: 2544 - DNA, 203 bp, Artificial sequence
  synthetic
ggcgcgccagtcctatcgcccaccatggctgtggcccagcagctgcgggccgagagtgactttgaacagcttccggatgatgttgccatctcggccaacattgctgacatcgaggagaagagaggcttcaccagccactttgttttcgtcatcgaggtgaagacaaaaggaggatccaagtacctcatcgactcggaccgatg

SEQ ID NO: 2545 - DNA, 203 bp, Artificial sequence
  synthetic
ggcgcgccagtccttggaagctgcacatcacgcagaaggacaactacagggtctacaacacgatgccatgagctgacggtgtccctggagcagtgaggggacaccagcaaaaaccttcagctctcagaggagattgggaccaggaaaacctgggaggatgggcagacttcctgtctttgaggctaatgcgactcggaccgatg

SEQ ID NO: 2546 - DNA, 203 bp, Artificial sequence
  synthetic
ggcgcgccagtcctactacaccctgcatgcttcgaaactctgacagcatactggaggccattcagaaaaagcttggaataaaggttggggagactacacctgacaaacttttcactcttatagaagtggaatgtttaggggcctgtgtgaacgcaccaatggttcaaataaatgacaattactatgagcgactcggaccgatg

SEQ ID NO: 2547 - DNA, 203 bp, Artificial sequence
  synthetic
ggcgcgccagtcctggccaaggagtggacgcttctcttgtgagccagctggaggtcttacctctttgactgaaccacccaagggacctggatttggtgtacaagcaggcctttaatttatattgaactgtaaatatgtcactagagaaataaaatatggacttccaatctacgtaaacttaaaaaaaacgactcggaccgatg

SEQ ID NO: 2548 - DNA, 203 bp, Artificial sequence
  synthetic
ggcgcgccagtcctgcaagcatcagaggccacccaggcggtggcatcgttggcagaggccgcagtggcagcttctcaggagatgcagcagggagctacagtcactatggcgcttaacagcgaagctgccgcccatgctgtcgccaccctggctgaggccaccttacaaggtgggggacagatcgtcttcgactcggaccgatg

SEQ ID NO: 2549 - DNA, 203 bp, Artificial sequence
  synthetic
ggcgcgccagtcctgtctggggaaaccgcagcagccgtcggagcacttactggagtccaagatgctaatggcctggtccagatccctgtgagcatgtaccagactgtggtgaccagcctcgcccagggcaacggaccagtgcaggtggccatggcccctgtgaccaccaggatatcagacagcgcagtcgactcggaccgatg

SEQ ID NO: 2550 - DNA, 203 bp, Artificial sequence
  synthetic
ggcgcgccagtcctgttaactctgtctttctcagctgcaagccctgagtctccagtagctgaattcacctgacttttcaacaggccaaatctctgaaccttgagtacagggacagctcctcctccctcctcccagctctccccatgtgtgtgatggtgtatttaatgtgtttttttaatgcgacattacgactcggaccgatg

SEQ ID NO: 2551 - DNA, 203 bp, Artificial sequence
  synthetic
ggcgcgccagtcctgtggcccagcaagtgcagcaggtccatgtggctacttacaccgagcatagtatgctgagtgctgatgaagactcgccttcttctcccgaggacacctcttacgatgactcagatatactcaactccacagcagctgatgaggtgacagctcatctggcagctgcaggtcctgtgcgactcggaccgatg

SEQ ID NO: 2552 - DNA, 203 bp, Artificial sequence
  synthetic
ggcgcgccagtccttggtagggtacgtggccagacacagtcacccagtttttgttcataccagggtcatgcgttgagctactgacaaactcaggcggaggtgaccatgcccttcaccaaagctgcctcccagtggccacacagaactctccctgctggactcacctgaggaaagaggctccagcatggcgactcggaccgatg

SEQ ID NO: 2553 - DNA, 203 bp, Artificial sequence
  synthetic
ggcgcgccagtcctggtgggtcagagatgtgcttgcaaggtccagggactgcgtggtctgccagctgagatgctcctcgggctggcccaggtgctgaccttgccacaggcagatgaatgtcttgaaagctcccgggcctcagcctcccatctcctctccttcccaggaatccttgatctcatgactatcgactcggaccgatg

SEQ ID NO: 2554 - DNA, 203 bp, Artificial sequence
  synthetic
ggcgcgccagtcctaaagaaaaatcgtcctagaccaggatacacccgtgggagcaattttctctactgtctgtagcttcacagaggaggcgctggaatgaacaagaagagacatctggtctgtggccacagcaccctgaacgcccctgatcttgtgtgatcttggaagctaagcttggttgggcccggcgactcggaccgatg

SEQ ID NO: 2555 - DNA, 203 bp, Artificial sequence
  synthetic
ggcgcgccagtccttcagtacgcggaagggaagaagggacacctggccatagaaaacagctgagggtgtttgctgtgttcctggatcaggccctgcttcagaagggactcctggaggcccatgttccttgatgcaacctcgtggcccaggccgggagcagcttgcctcctcagaggtgttgactatctcgactcggaccgatg

SEQ ID NO: 2556 - DNA, 203 bp, Artificial sequence
  synthetic
ggcgcgccagtcctggggccatggccagtacagagtcctccctgttgagatccctaggcctcagcccaggtcctggcagcagtgaggtggagctggactgttggtttgatgaggatttcaagttcatcctgctgcctgtgagctatgcagttgtctttgtgctgggcttgggccttaacgccccaacccgactcggaccgatg

SEQ ID NO: 2557 - DNA, 203 bp, Artificial sequence
  synthetic
ggcgcgccagtcctctatggctcttcatcttccgcctccgaccctgggatgcaacggccacctacatgttccacctggcattgtcagacaccttgtatgtgctgtcgctgcccaccctcatctactattatgcagcccacaaccactggccctttggcactgagatctgcaagttcgtccgctttcttcgactcggaccgatg

SEQ ID NO: 2558 - DNA, 203 bp, Artificial sequence
  synthetic
ggcgcgccagtcctttctattggaacctctactgcagtgtccttttcctcacctgcatcagcgtgcaccgctacctgggcatctgccacccacttcgggcactacgctggggccgccctcgcctcgcaggccttctctgcctggcagtttggttggtcgtagccggctgcctcgtgcccaacctgttccgactcggaccgatg

SEQ ID NO: 2559 - DNA, 203 bp, Artificial sequence
  synthetic
ggcgcgccagtccttttgtcacaaccagcaacaaagggaccaccgtcctgtgccatgacaccactcggcctgaagagtttgaccactatgtgcacttcagctcggcggtcatggggctgctctttggcgtgccctgcctggtcactcttgtttgctatggactcatggctcgtcgcctgtatcagccccgactcggaccgatg

SEQ ID NO: 2560 - DNA, 203 bp, Artificial sequence
  synthetic
ggcgcgccagtcctttgccaggctctgcacagtcgtcttctcgcctccgctctctccgcaccatagctgtggtgctgactgtctttgctgtctgcttcgtgcctttccacatcacccgcaccatttactacctggccaggctgttggaagctgactgccgagtactgaacattgtcaacgtggtctatcgactcggaccgatg

SEQ ID NO: 2561 - DNA, 203 bp, Artificial sequence
  synthetic
ggcgcgccagtcctaaagtgactcggcccctggccagtgccaacagctgcctggatcctgtgctctacttgctcactggggacaaatatcgacgtcagctccgtcagctctgtggtggtggcaagccccagccccgcacggctgcctcttccctggcactagtgtccctgcctgaggatagcagctgccgactcggaccgatg

SEQ ID NO: 2562 - DNA, 203 bp, Artificial sequence
  synthetic
ggcgcgccagtcctccctcaccctgagggttgcagggaggcagggatatcatgggtgacctcatctctcataaccccttcagttgccgactctttttagccaatgccaatcttctactcctttctcgttgtttctgttccttcctggggccattggtcctacaatcttcctgaaaatcttccccagtccgactcggaccgatg

SEQ ID NO: 2563 - DNA, 203 bp, Artificial sequence
  synthetic
ggcgcgccagtcctgactctttttagccaatgccaatcttctactcctttctcgttgtttctgttccttcctggggccattggtcctacaatcttcctgaaaatcttccccagtcctctttccctgtcccatttcccccacagcctcctatagcatgtgtttctctacccagaccagagcattcagctcgactcggaccgatg

SEQ ID NO: 2564 - DNA, 203 bp, Artificial sequence
  synthetic
ggcgcgccagtcctcctgaacatgacccgctcccactctggaggcgagctggagagcttggctcgtggaagaaggagcctgggttccctgaccattgctgagccggccatgatcgccgagtgcaagacgcgcaccgaggtgttcgagatctcccggcgcctcatagaccgcaccaacgccaacttcctcgactcggaccgatg

SEQ ID NO: 2565 - DNA, 203 bp, Artificial sequence
  synthetic
ggcgcgccagtcctggtgtggccgccctgtgtggaggtgcagcgctgctccggctgctgcaacaaccgcaacgtgcagtgccgccccacccaggtgcagctgcgacctgtccaggtgagaaagatcgagattgtgcggaagaagccaatctttaagaaggccacggtgacgctggaagaccacctggccgactcggaccgatg

SEQ ID NO: 2566 - DNA, 203 bp, Artificial sequence
  synthetic
ggcgcgccagtcctcgggctccttcccctgcacctggcctgggccacacctgagcgctgtggactgtcctgaggagccctgaggacctctcagcatagcctgcctgatccctgaacccctggccagctctgaggggaggcacctccaggcaggccaggctgcctcggactccatggctaagaccacagcgactcggaccgatg

SEQ ID NO: 2567 - DNA, 203 bp, Artificial sequence
  synthetic
ggcgcgccagtcctacgggcacacagactggagaaaacccctcccacggtgcccaaacaccagtcacctcgtctccctggtgcctctgtgcacagtggcttcttttcgttttcgttttgaagacgtggactcctcttggtgggtgtggccagcacaccaagtggctgggtgccctctcaggtgggttacgactcggaccgatg

SEQ ID NO: 2568 - DNA, 203 bp, Artificial sequence
  synthetic
ggcgcgccagtcctcactgttcacatcatagataaagctgatttgtatatttattatgacaatttctggcagatgtaggtaaagaggaaaaggatccttttcctaattcacacaaagactccttgtggactggctgtgcccctgatgcagcctgtggcttggagtggccaaataggagggagactgtgcgactcggaccgatg

SEQ ID NO: 2569 - DNA, 203 bp, Artificial sequence
  synthetic
ggcgcgccagtcctttctgagctccacctctggtggctcctcctaggaaaccagctcgtgggctgggaatgggggagagaagggaaaagatccccaagaccccctggggtgggatctgagctcccacctcccttcccacctactgcactttcccccttcccgccttccaaaacctgcttccttcagttcgactcggaccgatg

SEQ ID NO: 2570 - DNA, 203 bp, Artificial sequence
  synthetic
ggcgcgccagtcctcgtgcccgccgcccgggccccgcgccagggcgcacacgctcccgcccccctacccggcccgggcgggagtttgcacctctccctgcccgggtgctcgagctgccgttgcaaagccaactttggaaaaagttttttgggggagacttgggccttgaggtgcccagctccgcgcttcgactcggaccgatg

SEQ ID NO: 2571 - DNA, 203 bp, Artificial sequence
  synthetic
ggcgcgccagtcctctcgtggaagaaggagcctgggttccctgaccattgctgagccggccatgatcgccgagtgcaagacgcgcaccgaggtgttcgagatctcccggcgcctcatagaccgcaccaacgccaacttcctggtgtggccgccctgtgtggaggtgcagcgctgctccggctgctgcacgactcggaccgatg

SEQ ID NO: 2572 - DNA, 203 bp, Artificial sequence
  synthetic
ggcgcgccagtcctacaaccgcaacgtgcagtgccgccccacccaggtgcagctgcgacctgtccaggtgagaaagatcgagattgtgcggaagaagccaatctttaagaaggccacggtgacgctggaagaccacctggcatgcaagtgtgagacagtggcagctgcacggcctgtgacccgaagcccgactcggaccgatg

SEQ ID NO: 2573 - DNA, 203 bp, Artificial sequence
  synthetic
ggcgcgccagtcctcggggggttcccaggagcagcgagccaaaacgccccaaactcgggtgaccattcggacggtgcgagtccgccggccccccaagggcaagcaccggaaattcaagcacacgcatgacaagacggcactgaaggagacccttggagcctaggggcatcggcaggagagtgtgtgggcgactcggaccgatg

SEQ ID NO: 2574 - DNA, 203 bp, Artificial sequence
  synthetic
ggcgcgccagtcctcagggttatttaatatggtatttgctgtattgcccccatggggtccttggagtgataatattgtttccctcgtccgtctgtctcgatgcctgattcggacggccaatggtgcttcccccacccctccacgtgtccgtccacccttccatcagcgggtctcctcccagcggcctccgactcggaccgatg

SEQ ID NO: 2575 - DNA, 203 bp, Artificial sequence
  synthetic
ggcgcgccagtcctcggcgtcttgcccagcagctcaagaagaaaaagaaggactgaactccatcgccatcttcttcccttaactccaagaacttgggataagagtgtgagagagactgatggggtcgctctttgggggaaacgggctccttcccctgcacctggcctgggccacacctgagcgctgtgcgactcggaccgatg

SEQ ID NO: 2576 - DNA, 203 bp, Artificial sequence
  synthetic
ggcgcgccagtcctgactgtcctgaggagccctgaggacctctcagcatagcctgcctgatccctgaacccctggccagctctgaggggaggcacctccaggcaggccaggctgcctcggactccatggctaagaccacagacgggcacacagactggagaaaacccctcccacggtgcccaaacacccgactcggaccgatg

SEQ ID NO: 2577 - DNA, 203 bp, Artificial sequence
  synthetic
ggcgcgccagtcctcccctgcctcctgccaccccttcctccccacactccactctgattcacctcttcctctggttcctttcatctctctacctccaccctgcattttcctcttgtcctggcccttcagtctgctccaccaaggggctcttgaaccccttattaaggccccagatgatcccagtcactcgactcggaccgatg

SEQ ID NO: 2578 - DNA, 203 bp, Artificial sequence
  synthetic
ggcgcgccagtcctaaagtcctctgctccagcaactgcccttccaggtgggtgtgggacacctgggagaaggtctccaagggagggtgcagccctcttgcccgcacccctccctgcttgcacacttccccatctttgatccttctgagctccacctctggtggctcctcctaggaaaccagctcgtggcgactcggaccgatg

SEQ ID NO: 2579 - DNA, 203 bp, Artificial sequence
  synthetic
ggcgcgccagtcctgctgggaatgggggagagaagggaaaagatccccaagaccccctggggtgggatctgagctcccacctcccttcccacctactgcactttcccccttcccgccttccaaaacctgcttccttcagtttgtaaagtcggtgattatatttttgggggctttccttttattttttacgactcggaccgatg

SEQ ID NO: 2580 - DNA, 203 bp, Artificial sequence
  synthetic
ggcgcgccagtcctggaggtaagaactaagacgttcttaaaccctactacgtgctggaatcctgaagtgcctgccatcattcaaacttaagcactaactctctagagagacactgccattcataccacagaacgagaaggcagtggcgatcctcaacggctacatgtcactgcctgccacttccggctcgactcggaccgatg

SEQ ID NO: 2581 - DNA, 203 bp, Artificial sequence
  synthetic
ggcgcgccagtcctacgtgaagttggctttgaatacatgaatagggaacttctctggcatggttttgctgaatttctgatttttctcttaccacttatcaatgtccagaagttgaaagccaagctgtcttcatggtgtattcctcttactggtgcacctaatagtgacaatacattagccaccagtggcgactcggaccgatg

SEQ ID NO: 2582 - DNA, 203 bp, Artificial sequence
  synthetic
ggcgcgccagtcctcaaagaatgcgctctatgtggagagtggcccaccatgcctcacaccataggatgtgagcatattttctgttatttctgtgctaagagtagtttcttatttgacgtgtactttacttgtcctaagtgtggcacagaagtacacagtctgcagccactgaaatcaggaatcgagatcgactcggaccgatg

SEQ ID NO: 2583 - DNA, 203 bp, Artificial sequence
  synthetic
ggcgcgccagtccttttggagactctgggatgagtgtgcatttattttcagagttgacataatatgataatgtgacaattatgagactgttttaaaccttaagacctgatgcctcagttgtaacttttttttttttttctgagacggtgtcctgctctgtcacccaggctggagtgcagtggcgcgatcgactcggaccgatg

SEQ ID NO: 2584 - DNA, 203 bp, Artificial sequence
  synthetic
ggcgcgccagtccttaattctgtatccttcactctttttctctgcctttttttacttaaaagtaaattcagactcttaaaatggtatagaattattagcttgaacattgaattatctcgtcttaactagaatgttttttaaaaaacagtttttaaatgtttttaaataaacatcttgctagtatgatgcgactcggaccgatg

SEQ ID NO: 2585 - DNA, 203 bp, Artificial sequence
  synthetic
ggcgcgccagtcctcatctgagcctcccaagttgctgggaccacaggcccataccaccatgcctggctaatttttgtagagatgaggtctcactttgttgcccaggctggtcttgaacttctgggctcaagcagtcctcctaccctggcctcccaaagttgtgggattacaggcatgagccactgcaccgactcggaccgatg

SEQ ID NO: 2586 - DNA, 203 bp, Artificial sequence
  synthetic
ggcgcgccagtcctcctaaaggagtcctggaggaggccgttcaccacaggaaactgaggtgttcttagaagggtggatgctggcagatctctactagttagagtctacatttgccttactcatttcaaaagtccacattgcagtctcattttaccagtgatctagcttgataaggacattcataagtacgactcggaccgatg

SEQ ID NO: 2587 - DNA, 203 bp, Artificial sequence
  synthetic
ggcgcgccagtccttcgctccggaagcctgcgagttccggaagccttggtaatccagattcggctaggaaaagacaagctttccagagaatgtttcagagaaagttacgtggagcgtgggcgtttcgcagactcctaagtggtctggaacctaacctgcagtgtctctgagcttctggcaagtatgagcgactcggaccgatg

SEQ ID NO: 2588 - DNA, 203 bp, Artificial sequence
  synthetic
ggcgcgccagtcctgtgtgaattttgtgattggacttttgaaattaggtgggctgattaattttttgattttccttcagaggggaaagtttgcaactttgacagaacgtctcctaggtattcattctgtattttgcaagcctcaaaacatacgtgaagttggctttgaatacatgaatagggaacttccgactcggaccgatg

SEQ ID NO: 2589 - DNA, 203 bp, Artificial sequence
  synthetic
ggcgcgccagtcctctttgaggaaaaaaatgcaccgtgtttaaattcttaatattagtcatcctaagtataccatttatgtatcctttataaggaatgtgctcctagccactgtcttctcctttccaggcatgactgaaatctaatcactggaaaccatgtgattctaaatatattatgtaaatgttacgactcggaccgatg

SEQ ID NO: 2590 - DNA, 203 bp, Artificial sequence
  synthetic
ggcgcgccagtcctgtatgaacagcactatttacaggtctctttctcttgcctttgattcagagctgtcattctcagtaaatattgatagttttattgaaacaaaaggggtctttagcatgggaatagtaacagcagtgcataatcaagataattctgtatccttcactctttttctctgccttttttcgactcggaccgatg

SEQ ID NO: 2591 - DNA, 203 bp, Artificial sequence
  synthetic
ggcgcgccagtccttaagagtattttacatcttaagaatttgccttcttttgccttctgtaattttaaaacattattgtagaaaacaccaacaattcaggaaaaaatataaaatcaactttcccacaattttttgagagagatcatcactatattttactatatttgtagatttgttgcacgtacattcgactcggaccgatg

SEQ ID NO: 2592 - DNA, 203 bp, Artificial sequence
  synthetic
ggcgcgccagtcctatacaaacgtctttgttttttgtttgtttgtttgtttttggtgagaaagggcctcacccagtcacccaggttggagtgcagtggtgtgatcatggctaaccgcagcctttccctcccagggctcaagcgatcctcccatctgagcctcccaagttgctgggaccacaggcccatcgactcggaccgatg

SEQ ID NO: 2593 - DNA, 203 bp, Artificial sequence
  synthetic
ggcgcgccagtccttgacacatagtaaatagaatataatagtagtgctttcctttgctgttgtcagtattactctgagtcggtttcattctcacacagaatgatggccgctagaagctcaaggcttataatctgctagctttctgatcccactggcatgagatactcttgcctaatagttacagctaacgactcggaccgatg

SEQ ID NO: 2594 - DNA, 203 bp, Artificial sequence
  synthetic
ggcgcgccagtcctagtccaggagctcactgttactggtctgccttggattatgtgcacattcctgaaccagccactatagctaggggatggaaaatactgttcctggttacttaaatgtaggtgatgctcctcccatataccacatgaacctaaaggagtcctggaggaggccgttcaccacaggaacgactcggaccgatg

SEQ ID NO: 2595 - DNA, 203 bp, Artificial sequence
  synthetic
ggcgcgccagtcctactgaggtgttcttagaagggtggatgctggcagatctctactagttagagtctacatttgccttactcatttcaaaagtccacattgcagtctcattttaccagtgatctagcttgataaggacattcataagtaactggatgattctttaacattgcagatttgaaaggattcgactcggaccgatg

SEQ ID NO: 2596 - DNA, 203 bp, Artificial sequence
  synthetic
ggcgcgccagtcctcgagccgctcaccccgccgttctcagcgctgcccgaccccgctcgcgcgccctcccgccgccagtcccggcagcgccctcagttgtcctccgactcgccctcggccttccgcgccagccgcagccacagccgcaacgccacccgcagccacagccacagccacagccccaggcacgactcggaccgatg

SEQ ID NO: 2597 - DNA, 203 bp, Artificial sequence
  synthetic
ggcgcgccagtccttagccttcggcacagccccggctccggctcctgcggcagctcctctgggcaccgtccctgcgccgacatcctggaggttgggatgctcttgtccaaaatcaactcgcttgcccacctgcgcgccgcgccctgcaacgacctgcacgccaccaagctggcgcccggcaaggagaacgactcggaccgatg

SEQ ID NO: 2598 - DNA, 203 bp, Artificial sequence
  synthetic
ggcgcgccagtcctggagcccctggagtcgcagtaccaggtgggcccgctactgggcagcggcggcttcggctcggtctactcaggcatccgcgtctccgacaacttgccggtggccatcaaacacgtggagaaggaccggatttccgactggggagagctgcctaatggcactcgagtgcccatggacgactcggaccgatg

SEQ ID NO: 2599 - DNA, 203 bp, Artificial sequence
  synthetic
ggcgcgccagtcctagtggtcctgctgaagaaggtgagctcgggtttctccggcgtcattaggctcctggactggttcgagaggcccgacagtttcgtcctgatcctggagaggcccgagccggtgcaagatctcttcgacttcatcacggaaaggggagccctgcaagaggagctggcccgcagcttcgactcggaccgatg

SEQ ID NO: 2600 - DNA, 203 bp, Artificial sequence
  synthetic
ggcgcgccagtccttcagcatctcattagatggtgcttggccctgagaccatcagataggccaaccttcgaagaaatccagaaccatccatggatgcaagatgttctcctgccccaggaaactgctgagatccacctccacagcctgtcgccggggcccagcaaatagcagcctttctggcaggtcctcgactcggaccgatg

SEQ ID NO: 2601 - DNA, 203 bp, Artificial sequence
  synthetic
ggcgcgccagtcctcccctctcttgtcagatgcccgagggaggggaagcttctgtctccagcttcccgagtaccagtgacacgtctcgccaagcaggacagtgcttgatacaggaacaacatttacaactcattccagatcccaggcccctggaggctgcctcccaacagtggggaagagtgactctccgactcggaccgatg

SEQ ID NO: 2602 - DNA, 203 bp, Artificial sequence
  synthetic
ggcgcgccagtcctcaggggtcctaggcctcaactcctcccatagatactctcttcttctcataggtgtccagcattgctggactctgaaatatcccgggggtggggggtgggggtgggtcagaaccctgccatggaactgtttccttcatcatgagttctgctgaatgccgcgatgggtcaggtaggcgactcggaccgatg

SEQ ID NO: 2603 - DNA, 203 bp, Artificial sequence
  synthetic
ggcgcgccagtcctcccaggcctttccgtgcttcctgtggctgggcttgtgtccccaccacatctacggactgcccacaggagagtacccagggctgatgaaggtcagctatcaccacggcaaccacgcagaccctgaggagcgggactgccccacagcacgcacagacatcggagacgtccagatcccgactcggaccgatg

SEQ ID NO: 2604 - DNA, 203 bp, Artificial sequence
  synthetic
ggcgcgccagtccttgagcagctttgtcagagatcacttacctgatctgaagcccgagcctgctgtcattgagagctgcatgtacacgaatacccctgatgagcagttcattctcgatcgccacccaaagtatgacaacattgtcattggtgctggattctctgggcacgggttcaagctggcccctgcgactcggaccgatg

SEQ ID NO: 2605 - DNA, 203 bp, Artificial sequence
  synthetic
ggcgcgccagtcctcacctgtaatctcggcactttggggggctgagacaggcggatcacctgaggccaggaattcaagaccagcctggccaacatggtgaaaccctatctccactaaaaatacaaaattagctgggtgtggtggcgcatgcctgtaatcccagctacttgggagactgaggcaagagacgactcggaccgatg

SEQ ID NO: 2606 - DNA, 203 bp, Artificial sequence
  synthetic
ggcgcgccagtcctgaggctgaggcagtggctccttgcacagcagctgcacgcgccgtggctccggatctcttcgtctttgcagcgtagcccgagtcggtcagcgccggaggacctcagcagccatgtcgaagccccatagtgaagccgggactgccttcattcagacccagcagctgcacgcagccacgactcggaccgatg

SEQ ID NO: 2607 - DNA, 203 bp, Artificial sequence
  synthetic
ggcgcgccagtcctctcagatgctggagagcatgatcaagaagccccgccccactcgggctgaaggcagtgatgtggccaatgcagtcctggatggagccgactgcatcatgctgtctggagaaacagccaaaggggactatcctctggaggctgtgcgcatgcagcacctgattgcccgtgaggcagcgactcggaccgatg

SEQ ID NO: 2608 - DNA, 203 bp, Artificial sequence
  synthetic
ggcgcgccagtcctaccgcccacgtgcccccatcattgctgtgacccggaatccccagacagctcgtcaggcccacctgtaccgtggcatcttccctgtgctgtgcaaggacccagtccaggaggcctgggctgaggacgtggacctccgggtgaactttgccatgaatgttggcaaggcccgaggctcgactcggaccgatg

SEQ ID NO: 2609 - DNA, 203 bp, Artificial sequence
  synthetic
ggcgcgccagtcctcactctgggctgtaacgtggcactggtaggttgggacaccagggaagaagatcaacgcctcactgaaacatggctgtgtttgcagcctgctctagtgggacagcccagagcctggctgcccatcatgtggccccacccaatcaagggaagaaggaggaatgctggactggaggccgactcggaccgatg

SEQ ID NO: 2610 - DNA, 203 bp, Artificial sequence
  synthetic
ggcgcgccagtcctccctggagccagatggcaagagggtgacagcttcctttcctgtgtgtactctgtccagttcctttagaaaaaatggatgcccagaggactcccaaccctggcttggggtcaagaaacagccagcaagagttaggggccttagggcactgggctgttgttccattgaagccgactcgactcggaccgatg

SEQ ID NO: 2611 - DNA, 203 bp, Artificial sequence
  synthetic
ggcgcgccagtccttctaggcctctccagtttgcacctgtccccaccctccactcagctgtcctgcagcaaacactccaccctccaccttccattttcccccactactgcagcacctccaggcctgttgctatagagcctacctgtatgtcaataaacaacagctgaagcaccaaaaaaaaaaaaaaacgactcggaccgatg

SEQ ID NO: 2612 - DNA, 203 bp, Artificial sequence
  synthetic
ggcgcgccagtcctggccggccccgggcacgcaggcagggcggcgcaggatccagggcgtctgggatgcagtggagctcagagagaggagaacggctcctcacgcctggggcctgctcttcagaagtccccagcgccgttccttccagatcaggacctcagcagccatgtcgaagccccatagtgaagcgactcggaccgatg

SEQ ID NO: 2613 - DNA, 203 bp, Artificial sequence
  synthetic
ggcgcgccagtcctccgggactgccttcattcagacccagcagctgcacgcagccatggctgacacattcctggagcacatgtgccgcctggacattgattcaccacccatcacagcccggaacactggcatcatctgtaccattggcccagcttcccgatcagtggagacgttgaaggagatgattacgactcggaccgatg

SEQ ID NO: 2614 - DNA, 203 bp, Artificial sequence
  synthetic
ggcgcgccagtcctagtctggaatgaatgtggctcgtctgaacttctctcatggaactcatgagtaccatgcggagaccatcaagaatgtgcgcacagccacggaaagctttgcttctgaccccatcctctaccggcccgttgctgtggctctagacactaaaggacctgagatccgaactgggctcacgactcggaccgatg

SEQ ID NO: 2615 - DNA, 203 bp, Artificial sequence
  synthetic
ggcgcgccagtccttgctgtgcaaggacccagtccaggaggcctgggctgaggacgtggacctccgggtgaactttgccatgaatgttggcaaggcccgaggcttcttcaagaagggagatgtggtcattgtgctgaccggatggcgccctggctccggcttcaccaacaccatgcgtgttgttcctgcgactcggaccgatg

SEQ ID NO: 2616 - DNA, 203 bp, Artificial sequence
  synthetic
ggcgcgccagtcctaggactcccaaccctggcttggggtcaagaaacagccagcaagagttaggggccttagggcactgggctgttgttccattgaagccgactctggccctggcccttacttgcttctctagctctctaggcctctccagtttgcacctgtccccaccctccactcagctgtcctgccgactcggaccgatg

SEQ ID NO: 2617 - DNA, 203 bp, Artificial sequence
  synthetic
ggcgcgccagtccttccgcccccttcccgcctccccgtatataagacttcgccgagcgctctcactcgcacaagtggaccggggtgttgggtgctagtcggcaccagaggcaagggtgcgaggaccacggccggctcggacgtgtgaccgcgcctagggggtggcagcgggcagtgcggggcggcaagcgactcggaccgatg

SEQ ID NO: 2618 - DNA, 203 bp, Artificial sequence
  synthetic
ggcgcgccagtcctgcaagaaaggtgttgacagagccagaagttcgatactacctcaggcagattgtgtctggactgaaataccttcatgaacaagaaatcttgcacagagatctcaaactagggaacttttttattaatgaagccatggaactaaaagttggggacttcggtctggcagccaggctacgactcggaccgatg

SEQ ID NO: 2619 - DNA, 203 bp, Artificial sequence
  synthetic
ggcgcgccagtcctcttgaagacagtaccatgggaagtgttgcagacacagtggcaagggttcttcggggatgtctggaaaacatgccggaagctgattgcattcccaaagagcagctgagcacatcatttcagtgggtcaccaaatgggttgattactctaacaaatatggctttgggtaccagctccgactcggaccgatg

SEQ ID NO: 2620 - DNA, 203 bp, Artificial sequence
  synthetic
ggcgcgccagtccttcagaccacaccgtcggtgtccttttcaacaatggtgctcacatgagcctccttccagacaaaaaaacagttcactattacgcagagcttggccaatgctcagttttcccagcaacagatgctcctgagcaatttattagtcaagtgacggtgctgaaatacttttctcattaccgactcggaccgatg

SEQ ID NO: 2621 - DNA, 203 bp, Artificial sequence
  synthetic
ggcgcgccagtcctcaaaatgaagaataccttctcacctacatcaatgaggataggatatctacaactttcaggctgacaactctgctgatgtctggctgttcatcagaattaaaaaatcgaatggaatatgccctgaacatgctcttacaaagatgtaactgaaagacttttcgaatggaccctatgcgactcggaccgatg

SEQ ID NO: 2622 - DNA, 203 bp, Artificial sequence
  synthetic
ggcgcgccagtcctggactcctcttttccactgtgagatctacagggaagccaaaagaatgatctagagtatgttgaagaagatggacatgtggtggtacgaaaacaattcccctgtggcctgctggactggttggaaccagaacaggctaaggcatacagttcttgactttggacaatccaagagtgcgactcggaccgatg

SEQ ID NO: 2623 - DNA, 203 bp, Artificial sequence
  synthetic
ggcgcgccagtcctgcgccgcctccttcggcgttcgccccagggaccggcaggcgggggaccgcggcccaggctgaagctcagggccctgtctgctctgtggactcaacagtttgtggcaagacaagctcagaactgagaagctgtcaccacagtagcttggagctcggcggcacaaccagcaccatccgactcggaccgatg

SEQ ID NO: 2624 - DNA, 203 bp, Artificial sequence
  synthetic
ggcgcgccagtccttggtcgcgatggtggacacggaaagcccactctgccccctctccccactcgaggccggcgatctagagagcccgttatctgaagagttcctgcaagaaatgggaaacatccaagagatttcgcaatccatcggcgaggatagttctggaagctttggctttacggaataccagtcgactcggaccgatg

SEQ ID NO: 2625 - DNA, 203 bp, Artificial sequence
  synthetic
ggcgcgccagtcctatttaggaagctgtcctggctcagatggctcggtcatcacggacacgctttcaccagcttcgagcccctcctcggtgacttatcctgtggtccccggcagcgtggacgagtctcccagtggagcattgaacatcgaatgtagaatctgcggggacaaggcctcaggctatcattcgactcggaccgatg

SEQ ID NO: 2626 - DNA, 203 bp, Artificial sequence
  synthetic
ggcgcgccagtcctcaggaaaggccagtaacaatccaccttttgtcatacatgatatggagacactgtgtatggctgagaagacgctggtggccaagctggtggccaatggcatccagaacaaggaggcggaggtccgcatctttcactgctgccagtgcacgtcagtggagaccgtcacggagctcacgactcggaccgatg

SEQ ID NO: 2627 - DNA, 203 bp, Artificial sequence
  synthetic
ggcgcgccagtcctgcctaaggaaaccgttctgtgatatcatggaacccaagtttgattttgccatgaagttcaatgcactggaactggatgacagtgatatctccctttttgtggctgctatcatttgctgtggagatcgtcctggccttctaaacgtaggacacattgaaaaaatgcaggagggtacgactcggaccgatg

SEQ ID NO: 2628 - DNA, 203 bp, Artificial sequence
  synthetic
ggcgcgccagtcctaaagacttcacttctgtttcctgaatctaaagaaagacaacatgctgctttttaatcataggatggagaattttaaagaactgtttgggccaggcacagtcgctcatacttgtaatcccagcactttgggaggccgaggcgggtggatcacaaggtcagcagatcgagaccatccgactcggaccgatg

SEQ ID NO: 2629 - DNA, 203 bp, Artificial sequence
  synthetic
ggcgcgccagtcctctggccaacatggtgaaaccctgtctctactaaaaatacaaaaattagccgggtgtggtggcacatgcctgtaatcccagctactcgggaagctgaggcaggagaattgcttgaaccagggagttggaggttgcagtgagctaagactgcaccactgcactccagcctggtgaccgactcggaccgatg

SEQ ID NO: 2630 - DNA, 203 bp, Artificial sequence
  synthetic
ggcgcgccagtcctgtgttcctccgggccccatttggcagctcccgtatcttttgttatgttgcttttaaagatatgatgttttattgttttaactcttggtgacagtagatgctctctggagcgcagacgaggcacatgtgtcttcatagcctgggctgggtgggagccagtcaccctgcggatcgacgactcggaccgatg

SEQ ID NO: 2631 - DNA, 203 bp, Artificial sequence
  synthetic
ggcgcgccagtcctaaattagttcatcggggtggcacacatcagtagtcccagctactctgcaggctgaggtgggaggattgcttgaacccaggaggtcgaggctgcagtgagctgtgatctcaccactgcattccagcctgggtgacagagttagattccaccctctcccaccccggcaaaaaaaaacgactcggaccgatg

SEQ ID NO: 2632 - DNA, 203 bp, Artificial sequence
  synthetic
ggcgcgccagtcctatccgtttcagtattatttcctaaaatgagaagcccctgtgtcaacaagatccaggggctggagcccaatgccaagcctgtgttgtccccagcgaccctgcagctgctcgctctgatgtaccctgtgccattcaaggagatgtggtccaggaaagtgagcctcatggttttcagcgactcggaccgatg

SEQ ID NO: 2633 - DNA, 203 bp, Artificial sequence
  synthetic
ggcgcgccagtccttctctggtgaagccagaatggagacacccgtgacctcaggctgaaagtcactcgacattggtctcttgtgttgatagggaaggaaatcaggcattcctatttctttaaataacaaaaccactaattgccactcaatgctggaatattttgggtcacctaatcatagatttctcacgactcggaccgatg

SEQ ID NO: 2634 - DNA, 203 bp, Artificial sequence
  synthetic
ggcgcgccagtcctcctaaggccgtttggatgaattgtcaaaacaagatgcttccagttacagcggcaggagcgggactgggagcacgggctgacggctgctggtgcctttcttcccacctcgcttgcctgtttccgcttgacccttcctccagctccgatgagaagagtataaagcatcttcctaaccgactcggaccgatg

SEQ ID NO: 2635 - DNA, 203 bp, Artificial sequence
  synthetic
ggcgcgccagtcctgggccattttagacccccagggaaacagccttcctggagcgttgtctggaggttccagggacagggcagcctcccagagccgagcaagagctcaaggtacaaatgagagatttgctataccgtgagaagtcaacaacttagccaccacttccccgcaatggaccatgtaacaaacgactcggaccgatg

SEQ ID NO: 2636 - DNA, 203 bp, Artificial sequence
  synthetic
ggcgcgccagtccttggcctttggtggggggcttcctggggcctggggaaagctggccaccttcaacagctggtacctcttcaacagtgtggcctttcaaaatgcagatgccaccaggagaacatgcccacagctcaccacctatggatgccatggctctgggcagctttcaaagcaggttcctgtggcgactcggaccgatg

SEQ ID NO: 2637 - DNA, 203 bp, Artificial sequence
  synthetic
ggcgcgccagtcctaaattatgctgtccatagaagtcacccatgaagactgatgccaccacctgaaggctcatgattgttaaaaatgtccacgggaacctctcgtccacaggaggtttgtctcaacacttcccatttttacggcattggcattgccaagcatggggaagtatctgctcttctcatgttcgactcggaccgatg

SEQ ID NO: 2638 - DNA, 203 bp, Artificial sequence
  synthetic
ggcgcgccagtcctccctattggaaacacaaaggaagctgaaatcaaacatctaaaatacactgcgtacacgtgtgcgtgcacacacacacacacacacacacacacacagctcttcatttctcctgagccatgcagaatttactttcaatgtggaaatctgttccctttaccacactgtatatgcaccgactcggaccgatg

SEQ ID NO: 2639 - DNA, 203 bp, Artificial sequence
  synthetic
ggcgcgccagtcctagcagattcagtgtcatgtgaggacgtgcttcctgcttcatagataagagtagcttggagctcggcggcacaaccagcaccatctggtcgcgatggtggacacggaaagcccactctgccccctctccccactcgaggccggcgatctagagagcccgttatctgaagagttcccgactcggaccgatg

SEQ ID NO: 2640 - DNA, 203 bp, Artificial sequence
  synthetic
ggcgcgccagtcctagatccagaaaaagaacagaaacaaatgccagtattgtcgatttcacaagtgcctttctgtcgggatgtcacacaacgcgattcgttttggacgaatgccaagatctgagaaagcaaaactgaaagcagaaattcttacctgtgaacatgacatagaagattctgaaactgcagcgactcggaccgatg

SEQ ID NO: 2641 - DNA, 203 bp, Artificial sequence
  synthetic
ggcgcgccagtcctccaatggcatccagaacaaggaggcggaggtccgcatctttcactgctgccagtgcacgtcagtggagaccgtcacggagctcacggaattcgccaaggccatcccaggcttcgcaaacttggacctgaacgatcaagtgacattgctaaaatacggagtttatgaggccatatcgactcggaccgatg

SEQ ID NO: 2642 - DNA, 203 bp, Artificial sequence
  synthetic
ggcgcgccagtcctggcagctggtgacggagcatgcgcagctggtgcagatcatcaagaagacggagtcggatgctgcgctgcacccgctactgcaggagatctacagggacatgtactgagttccttcagatcagccacaccttttccaggagttctgaagctgacagcactacaaaggagacggggcgactcggaccgatg

SEQ ID NO: 2643 - DNA, 203 bp, Artificial sequence
  synthetic
ggcgcgccagtcctgagcagcacgattttgcacaaatatccaccactttaaccttagagcttggacagtctgagctgtaggtaaccggcatattattccatatctttgttttaaccagtacttctaagagcatagaactcaaatgctgggggtaggtggctaatctcaggactgggaagattacggcgcgactcggaccgatg

SEQ ID NO: 2644 - DNA, 203 bp, Artificial sequence
  synthetic
ggcgcgccagtcctcgtccagtcaacctgaacccacccagtccagctgtctgtgggaatggtggtgttcttagggacagactgacaccttacttgtcagtgttcctccgggccccatttggcagctcccgtatcttttgttatgttgcttttaaagatatgatgttttattgttttaactcttggtgacgactcggaccgatg

SEQ ID NO: 2645 - DNA, 203 bp, Artificial sequence
  synthetic
ggcgcgccagtcctcagtagatgctctctggagcgcagacgaggcacatgtgtcttcatagcctgggctgggtgggagccagtcaccctgcggatcgagagagggggtagagtcttcttcaaatggcagttttacttcaaatggcagatttcacaagagttggttattttttacaatggtttaggttgcgactcggaccgatg

SEQ ID NO: 2646 - DNA, 203 bp, Artificial sequence
  synthetic
ggcgcgccagtcctttgtcctgttgagaatttttagatctggactggaactgccaggaccaccgcctccagggagtcgctgggcacctggaggtatcgtcgatgcctctcccccatctttagaaaatttggctcttctgaggtcattattattttaagaatgattaggattgataagggtcccatgaccgactcggaccgatg

SEQ ID NO: 2647 - DNA, 203 bp, Artificial sequence
  synthetic
ggcgcgccagtccttgcagtgagctgtgatctcaccactgcattccagcctgggtgacagagttagattccaccctctcccaccccggcaaaaaaaaaaaaaaaagatgcaatcaaaggggctgttggccagcaatggcagcagcagcggcgggcagtctgcccaagtgtcttaggaaccaaaagcaacgactcggaccgatg

SEQ ID NO: 2648 - DNA, 203 bp, Artificial sequence
  synthetic
ggcgcgccagtcctgacatcagccaaaagaacaaaagagatgtcaggacagattccaggagtgtcggagcacatgtgtggcacccgctccctctggcagcgaatgtaggaagtcgccaaatttacccactcttcaacaagtcattgtttaaacacggtttttcattttctcaacttttaatagcaaaacgactcggaccgatg

SEQ ID NO: 2649 - DNA, 203 bp, Artificial sequence
  synthetic
ggcgcgccagtcctttttaaagagctgtgttttgttttgtttcgcatttagagagcagacaaggcacccttctgctgcgctgatacgtttcttacactgggccattttagacccccagggaaacagccttcctggagcgttgtctggaggttccagggacagggcagcctcccagagccgagcaagagcgactcggaccgatg

SEQ ID NO: 2650 - DNA, 203 bp, Artificial sequence
  synthetic
ggcgcgccagtcctactgaactccagttttaaaatagattcattgcttcaacacagcaagcccaatgcacccagctaagactggcttgaccgacagcctggcctttggtggggggcttcctggggcctggggaaagctggccaccttcaacagctggtacctcttcaacagtgtggcctttcaaaatgcgactcggaccgatg

SEQ ID NO: 2651 - DNA, 203 bp, Artificial sequence
  synthetic
ggcgcgccagtcctcagatgccaccaggagaacatgcccacagctcaccacctatggatgccatggctctgggcagctttcaaagcaggttcctgtggtctcctcagctgtttgagggggtaacagcaaatcagcctccattttaaaatgaaaacaccagcctccagatgtagggcctgctgggtgttcgactcggaccgatg

SEQ ID NO: 2652 - DNA, 203 bp, Artificial sequence
  synthetic
ggcgcgccagtcctaaatgattaacctgcctcgactgtgctgagggcaacaaaggccatctcaccaaaggattattcgatgccattaaatcatcccgtgaccttcctgcttccgagtccatggcctttgcccagggcatgtactcccctgagaggccttctgcctagaaagatctatgactgggttcccgactcggaccgatg

SEQ ID NO: 2653 - DNA, 203 bp, Artificial sequence
  synthetic
ggcgcgccagtcctgctccagtcctgaaggcggagaagattctgacagagaagatggaaattactgccctcctgtcaagcgagaaagaacatcctctttaacccagttcccaccctcacagtcagaggaaaggagcagtggcttccggttgaagccaccaacgctgatccacggccaagcccccagcgcgactcggaccgatg

SEQ ID NO: 2654 - DNA, 203 bp, Artificial sequence
  synthetic
ggcgcgccagtcctcaggtctgccaagccagaagcccaaggagcagcagcggagcgtgcttcgcccggcagtgttacaagctccgcagccaaaggcgctgtcccagactgtccccagcagtggcaccaacggggtcagcctcccagcagactgcacgggggcagtgcccgcagcatcccctgacactgcgactcggaccgatg

SEQ ID NO: 2655 - DNA, 203 bp, Artificial sequence
  synthetic
ggcgcgccagtccttaaatgagagcgtggacgaagccgacatggagaatgctggacaccccagcgcagacacgccaaccgcaacgaactatttcctccagtatatcagttccagtttagagaactcaaccaatagtgccgacgcctccagcaacaaatttgtatttggccagaacatgagcgagcgagcgactcggaccgatg

SEQ ID NO: 2656 - DNA, 203 bp, Artificial sequence
  synthetic
ggcgcgccagtccttggaagtcatcaccggggaggaggcggagagcaatgtgttacagatgcagtgcaagctgtttgtctttgacaagacctcacagtcctgggtggagagaggccgggggctgctcagactcaatgacatggcgtccaccgatgacggcacactacagtcccgactagtgatgcggacgactcggaccgatg

SEQ ID NO: 2657 - DNA, 203 bp, Artificial sequence
  synthetic
ggcgcgccagtcctcccaggggagcctgcgactgatcctcaacaccaagctgtgggcccagatgcagatcgacaaggccagcgagaagagcattcgcatcacagccatggacaccgaggaccagggcgtgaaggtcttcctgatctcggccagctccaaggacacaggtcagttgtatgcagccctgccgactcggaccgatg

SEQ ID NO: 2658 - DNA, 203 bp, Artificial sequence
  synthetic
ggcgcgccagtcctagactcgggaactgcctgaatgtggtttgggacacgagacctcatcatattgatgagcgaacaaacaagaacatttcctccctcccctcctttgaattgaaatggcacattaagacttgtcacggcttctcactgggactggagacctcgttccttcaccccgcgtgtcgccagcgactcggaccgatg

SEQ ID NO: 2659 - DNA, 203 bp, Artificial sequence
  synthetic
ggcgcgccagtcctcctctgggtccagccagagcccctggcttctccgccacccacacccttcccaccctgctgtggggccctgcctttgtggggagcagccagccctctgcccctgcccagggctccccaactataggcctgggacccccgcccagcttggggggctgctcgtacgagtgtagacaccgactcggaccgatg

SEQ ID NO: 2660 - DNA, 203 bp, Artificial sequence
  synthetic
ggcgcgccagtcctcaggggctggtcccagaacaggcagtctcacaagcacgcagcacactggagtggacgcctgtgcccacccgagcctggagcatggccaagagccagcttgcaccacccacctgggaggccgaggaggaggtcccctgggcacagggcctctttgggacttcagaggaaatctcccgactcggaccgatg

SEQ ID NO: 2661 - DNA, 203 bp, Artificial sequence
  synthetic
ggcgcgccagtcctcagtcccactctcggagggttaagagaaggcctcctgcagctgtgccgtccacacctctaggtcgccagagccctggcccccagcccccagcaagcctgagcccgggaagaaccagaggccctcccgagagacccagtcacacgtctctgctttaagccttagccagctagtgacgactcggaccgatg

SEQ ID NO: 2662 - DNA, 203 bp, Artificial sequence
  synthetic
ggcgcgccagtcctgaaccagaggccctcccgagagacccagtcacacgtctctgctttaagccttagccagctagtgacgagtacaacgagataacgcccatgtgttttggaacatttatgtaagattgtcatatgaaatgtatttgggaactacattaaacttttaactaaaaaaaaaaaaaaaaacgactcggaccgatg

SEQ ID NO: 2663 - DNA, 203 bp, Artificial sequence
  synthetic
ggcgcgccagtcctggacagtgcgcatctccctggtcaccaaggaccctcctcaccggcctcacccccacgagcttgtaggaaaggactgccgggatggcttctatgaggctgagctctgccgggaccgctgcatccacagtttccagaacctgggaatccagtgtgtgaagaagcgggacctggagccgactcggaccgatg

SEQ ID NO: 2664 - DNA, 203 bp, Artificial sequence
  synthetic
ggcgcgccagtcctaggctatcagtcagcgcatccagaccaacaacaaccccttccaagttcctatagaagagcagcgtggggactacgacctgaatgctgtgcggctctgcttccaggtgacagtgcgggacccatcaggcaggcccctccgcctgccgcctgtcctttctcatcccatctttgacacgactcggaccgatg

SEQ ID NO: 2665 - DNA, 203 bp, Artificial sequence
  synthetic
ggcgcgccagtcctatcgtgcccccaacactgccgagctcaagatctgccgagtgaaccgaaactctggcagctgcctcggtggggatgagatcttcctactgtgtgacaaggtgcagaaagaggacattgaggtgtatttcacgggaccaggctgggaggcccgaggctccttttcgcaagctgatgcgactcggaccgatg

SEQ ID NO: 2666 - DNA, 203 bp, Artificial sequence
  synthetic
ggcgcgccagtcctctcaggctgtggccccacctgcccccaagcccacccaggctggggaaggaacgctgtcagaggccctgctgcagctgcagtttgatgatgaagacctgggggccttgcttggcaacagcacagacccagctgtgttcacagacctggcatccgtcgacaactccgagtttcagccgactcggaccgatg

SEQ ID NO: 2667 - DNA, 203 bp, Artificial sequence
  synthetic
ggcgcgccagtcctagctgctgaaccagggcatacctgtggccccccacacaactgagcccatgctgatggagtaccctgaggctataactcgcctagtgacaggggcccagaggccccccgacccagctcctgctccactgggggccccggggctccccaatggcctcctttcaggagatgaagactcgactcggaccgatg

SEQ ID NO: 2668 - DNA, 203 bp, Artificial sequence
  synthetic
ggcgcgccagtcctccccatccccatcctccagcttctggtactctcctagagacagaagcaggctggaggtaaggcctttgagcccacaaagccttatcaagtgtcttccatcatggattcattacagcttaatcaaaataacgccccagataccagcccctgtatggcactggcattgtccctgtgcgactcggaccgatg

SEQ ID NO: 2669 - DNA, 203 bp, Artificial sequence
  synthetic
ggcgcgccagtcctaggtgaagcacttctgtcccaatgtgcccatcatcctggtggccaacaaaaaagacctgcgcagcgacgagcatgtccgcacagagctggcccgcatgaagcaggaacccgtgcgcacggatgacggccgcgccatggccgtgcgcatccaagcctacgactacctcgagtgctcgactcggaccgatg

SEQ ID NO: 2670 - DNA, 203 bp, Artificial sequence
  synthetic
ggcgcgccagtcctcaagggtcccctgagcatgcttttctgaagagccgggcctcagagtgtgtggctgtgtgtctgttcgactcccctcgccccattttcaccccacccccgcctctgatccccgggggcgagattggcgcgggagtgtggccgcgccccatcagatgttctcccttcaccagcgggcgactcggaccgatg

SEQ ID NO: 2671 - DNA, 203 bp, Artificial sequence
  synthetic
ggcgcgccagtcctactgcggccgtgtctgtggcagctggagacagagctgagggagcaagaggtgtcggaggtctcatctttgaactactgccggagcttctgccagaccttattgcaatatgcaagcaacaagaatgcatcagaacatattgtgtatcttctggaggtatatcgacttgccatccacgactcggaccgatg

SEQ ID NO: 2672 - DNA, 203 bp, Artificial sequence
  synthetic
ggcgcgccagtcctaagctttgccagtgcacgtccatacttaactactgaatgtgaagatgtcctcttagtgcttggcagattagtactgagttgtttcgaattactgctttcagtgtctgaaagtgaactgccatgtgaagtctggctaccattccttcagtctctacaggagtcacatgatgcattcgactcggaccgatg

SEQ ID NO: 2673 - DNA, 203 bp, Artificial sequence
  synthetic
ggcgcgccagtcctgttgaaatctaactgcatcccccaggctactgctttatcaaaactatgtgcagaatctaaagaaatttcaaatgtgtcatcttttcagcaagcctatatcacatgtttatgttctatgctccctaatgaagatgctattaaggagattgcaaaggtcgactgcaaggaagtactcgactcggaccgatg

SEQ ID NO: 2674 - DNA, 203 bp, Artificial sequence
  synthetic
ggcgcgccagtccttcatcattctaagatgcatatggaagatggaatttacacctgtccagtttgtattaaaaaatttaagagaaaagaaatgtttgttcctcatgtgatggagcatgttaaaatgccaccaagcagaagggaccgctctaaaaagaaattactgttaaaaggctctcaaaagggtatcgactcggaccgatg

SEQ ID NO: 2675 - DNA, 203 bp, Artificial sequence
  synthetic
ggcgcgccagtcctctctgaaactatgcaggatgtattgttatctaatgagaaagtctttgggccctccagtttaaaagaaaaatgttccagtatggcagtttgttttgacgggactaagtttacctgtggttttgatggctgtggttccacatacaaaaatgcaagaggaatgcagaaacatttacgcgactcggaccgatg

SEQ ID NO: 2676 - DNA, 203 bp, Artificial sequence
  synthetic
ggcgcgccagtccttgggcctgaagatagaggatttcttagagagacgcctgcagacccaggtcttcaagctgggcttggccaagtccatccaccacgctcgcgtgctgatccgccagcgccatatcagggtccgcaagcaggtggtgaacatcccgtccttcattgtccgcctggattcccagaagccgactcggaccgatg

SEQ ID NO: 2677 - DNA, 203 bp, Artificial sequence
  synthetic
ggcgcgccagtccttctcgctgctgcccgagtcagggctgagtcacccagctgatgtagacagtggctgccttccgaagagtgcgtgtttgcatgtgtgtgactctgcggctgctcaactcccaacaaaccagaggaccagccacaaacttaaccaacatccccaaacccgagttcacagatgtgggacgactcggaccgatg

SEQ ID NO: 2678 - DNA, 203 bp, Artificial sequence
  synthetic
ggcgcgccagtcctctgattttcaaggctacttaaaaaaatctgcagcgtacattaatggatttctgttgtgtttaaattctccacagattgtattgtaaatattttatgaagtagagcatatgtatatatttatatatacgtgcacatacattagtagcactacctttggaagtctcagctcttgctcgactcggaccgatg

SEQ ID NO: 2679 - DNA, 203 bp, Artificial sequence
  synthetic
ggcgcgccagtccttttcgggactgaagccagttttgcatgataaaagtggccttgttacgggagataattgtgttctgttgggactttagacaaaactcacctgcaaaaaactgacaggcattaactactggaacttccaaataatgtgtttgctgatcgttttactcttcgcataaatattttaggcgactcggaccgatg

SEQ ID NO: 2680 - DNA, 203 bp, Artificial sequence
  synthetic
ggcgcgccagtccttccactgcctttaaccctcagcctcagagtcagatgcaggatacaaggcagatccaaccatccccaccgtggtcctacgatcagtcctaccaatacctgggatccattgcctctccttctgtgcacccagcaacgcccatttcacctggacgtgccagcggcatgacaaccctccgactcggaccgatg

SEQ ID NO: 2681 - DNA, 203 bp, Artificial sequence
  synthetic
ggcgcgccagtccttctgcagaactttccagtcgactctcaacggcacccgacctgacagcgttcagcgacccgcgccagttccccgcgctgccctccatctccgacccccgcatgcactatccaggcgccttcacctactccccgacgccggtcacctcgggcatcggcatcggcatgtcggccatgcgactcggaccgatg

SEQ ID NO: 2682 - DNA, 203 bp, Artificial sequence
  synthetic
ggcgcgccagtcctggctcggccacgcgctaccacacctacctgccgccgccctaccccggctcgtcgcaagcgcagggaggcccgttccaagccagctcgccctcctaccacctgtactacggcgcctcggccggctcctaccagttctccatggtgggcggcgagcgctcgccgccgcgcatcctgcgactcggaccgatg

SEQ ID NO: 2683 - DNA, 203 bp, Artificial sequence
  synthetic
ggcgcgccagtcctccgccctgcaccaacgcctccaccggctccgcgctgctcaaccccagcctcccgaaccagagcgacgtggtggaggccgagggcagccacagcaactcccccaccaacatggcgccctccgcgcgcctggaggaggccgtgtggaggccctactgaggcgccaggcctggcccgcgactcggaccgatg

SEQ ID NO: 2684 - DNA, 203 bp, Artificial sequence
  synthetic
ggcgcgccagtcctgtatcacattgaagaaggctagaaaaaaagaatgagtaatgtgatcgcttggttatccagaagtattgtttacattaaactccctttcatgttaatcaaacaagtgagtagctcacgcagcaacgtttttaataggatttttagacactgagggtcactccaaggatcagaagtcgactcggaccgatg

SEQ ID NO: 2685 - DNA, 203 bp, Artificial sequence
  synthetic
ggcgcgccagtcctatggaattttctgccaggctcaacaagggtctcatatctaacttcctccttaaaacagagaaggtcaatctagttccagagggttgaggcaggtgccaataattacatctttggagaggatttgatttctgcccagggatttgctcaccccaaggtcatctgataatttcacagcgactcggaccgatg

SEQ ID NO: 2686 - DNA, 203 bp, Artificial sequence
  synthetic
ggcgcgccagtccttggtcccacctgtgcgagaccccctgtcctgtgctgctcactcaacaacatctttgtgttgctttcaccaggctgagaccctaccctatggggtatatgggcttttacctgtgcaccagtgtgacaggaaagattcatgtcactactgtccgtggctacaattcaaaggtatcccgactcggaccgatg

SEQ ID NO: 2687 - DNA, 203 bp, Artificial sequence
  synthetic
ggcgcgccagtcctaatatctccctttttttctctcttcctctatcttccaaaccccactttctccctcctccttttcctgtgttctcttaagcagatagcacatacccccacccagtaccaaatttcagaacacaagaaggtccagttcttcccccttcacataaaggaacatggtttgtcagccttcgactcggaccgatg

SEQ ID NO: 2688 - DNA, 203 bp, Artificial sequence
  synthetic
ggcgcgccagtccttctcctgtttatgggtttcttccagcagaacagagacattgccaaccatattggatctgcttgctgtccaaaccagcaaactttcctgggcaaatcacaatcagtgagtaaatagacagcctttctgctgccttgggtttctgtgcagataaacagaaatgctctgattagaaacgactcggaccgatg

SEQ ID NO: 2689 - DNA, 203 bp, Artificial sequence
  synthetic
ggcgcgccagtccttctcacaaaacatattttacatctgaacaaaatgcctttttgtttaccgtagcgtatacatttgttttgggatttttgtgtgtttgttgggaattttgtttttagccaggtcagtattgatgaggctgatcatttggctctttttttccttccagaagagttgcatcaacaaagcgactcggaccgatg

SEQ ID NO: 2690 - DNA, 203 bp, Artificial sequence
  synthetic
ggcgcgccagtcctttaattgtatttatgtatgtaaatagattttaagcttcattataaaatattgttaatgcctataactttttttcaatttttttgtgtgtgtttctaaggactttttcttaggtttgctaaatactgtagggaaaaaaatgcttctttctactttgtttattttagactttaaaacgactcggaccgatg

SEQ ID NO: 2691 - DNA, 203 bp, Artificial sequence
  synthetic
ggcgcgccagtcctaaggggaactgtcaagctggtgtcttcagccagatgacatgagagaatatcccagaaccctctctccaaggtgtttctagatagcacaggagagcaggcactgcactgtccacagtccacggtacacagtcgggtgggccgcctcccctctcctgggagcattcgtcgtgcccacgactcggaccgatg

SEQ ID NO: 2692 - DNA, 203 bp, Artificial sequence
  synthetic
ggcgcgccagtcctcctgcccatcgctttcaaggtggtggccctaggggatgttccagatggcactctggtcactgtgatggctggcaatgatgaaaactactcggctgagctgagaaatgctaccgcagccatgaagaaccaggttgcaagatttaatgacctcaggtttgtcggtcgaagtggaagcgactcggaccgatg

SEQ ID NO: 2693 - DNA, 203 bp, Artificial sequence
  synthetic
ggcgcgccagtccttgttaatcaaacaagtgagtagctcacgcagcaacgtttttaataggatttttagacactgagggtcactccaaggatcagaagtatggaattttctgccaggctcaacaagggtctcatatctaacttcctccttaaaacagagaaggtcaatctagttccagagggttgaggcgactcggaccgatg

SEQ ID NO: 2694 - DNA, 203 bp, Artificial sequence
  synthetic
ggcgcgccagtccttatagcaatttaagggcccaccagaagcaggcctcgaggagtcaatttgcctctgtgtgcctcagtggagacaagtgggaaaacatggtcccacctgtgcgagaccccctgtcctgtgctgctcactcaacaacatctttgtgttgctttcaccaggctgagaccctaccctatcgactcggaccgatg

SEQ ID NO: 2695 - DNA, 203 bp, Artificial sequence
  synthetic
ggcgcgccagtcctttttgacacatgtgtgctccaaatgatctggtggttatttaacgtacctcttaaaattcgttgaaacgatttcaggtcaactctgaagagtatttgaaagcaggacttcagaacagtgtttgatttttattttataaatttaagcattcaaattaggcaaatctttggctgcagcgactcggaccgatg

SEQ ID NO: 2696 - DNA, 203 bp, Artificial sequence
  synthetic
ggcgcgccagtcctttttttcagcacatgttaccatgtctgacctgcaaaaatgctggagaaaaatgaaggaaaaaattatgtttttcagtttaattctgttaactgaagatattccaactcaaaaccagcctcatgctctgattagataatcttttacattgaacctttactctcaaagccatgtgtcgactcggaccgatg

SEQ ID NO: 2697 - DNA, 203 bp, Artificial sequence
  synthetic
ggcgcgccagtcctgtgtgtgaaaaattgcattcattgacttcaggtagattaaggtatctttttattcattgccctcaggaaagttaaggtatcaatgagacccttaagccaatcatgtaataactgcatgtgtctggtccaggagaagtattgaataagccatttctactgcttactcatgtccctcgactcggaccgatg

SEQ ID NO: 2698 - DNA, 203 bp, Artificial sequence
  synthetic
ggcgcgccagtcctatacccccacccagtaccaaatttcagaacacaagaaggtccagttcttcccccttcacataaaggaacatggtttgtcagcctttctcctgtttatgggtttcttccagcagaacagagacattgccaaccatattggatctgcttgctgtccaaaccagcaaactttcctggcgactcggaccgatg

SEQ ID NO: 2699 - DNA, 203 bp, Artificial sequence
  synthetic
ggcgcgccagtcctgagagcaggcactgcactgtccacagtccacggtacacagtcgggtgggccgcctcccctctcctgggagcattcgtcgtgcccagcctgagcagggcagctggactgctgctgttcaggagccaccagagccttcctctctttgtaccacagtttcttctgtaaatccagtgtcgactcggaccgatg

SEQ ID NO: 2700 - DNA, 203 bp, Artificial sequence
  synthetic
ggcgcgccagtcctagagaggaaattagcagagcgattggtggagaatgatatctgtcaaaagaaacacttggagagcactgagtttagtaataggtgactgccggaaaaaagggaactttgaatattgtcaagatcgtactgagaagcactccacaatgccagactcacctgtggatgtgaagacgccgactcggaccgatg

SEQ ID NO: 2701 - DNA, 203 bp, Artificial sequence
  synthetic
ggcgcgccagtcctaatctaggctgactcctccaacaatgccacctcccccaactactcaaggagctccaagaaccagttcatttacaccgacaacgttaactaatggcacgagccattctcctacagccttgaatggcgccccctcaccacccaatggcttcagcaatgggccttcctcttcttcctcgactcggaccgatg

SEQ ID NO: 2702 - DNA, 203 bp, Artificial sequence
  synthetic
ggcgcgccagtcctcctcctctctggctaatcaacagctgcccccagcctgtggtgccaggcaactcagcaagctgaaaaggttccttactaccctgcagcagtttggcaatgacatttcacccgagataggagaaagagttcgcaccctcgttctgggactagtgaactccactttgacaattgaagcgactcggaccgatg

SEQ ID NO: 2703 - DNA, 203 bp, Artificial sequence
  synthetic
ggcgcgccagtcctaatttcattccaaactgcaagaagctactaacttcccactgagaccttttgtcatcccatttttgaaggccaacttgcccctgctgcagcgtgagctcctccactgcgcaagactggccaaacagaaccctgcccagtacctcgcccagcatgaacagctgcttctggatgccacgactcggaccgatg

SEQ ID NO: 2704 - DNA, 203 bp, Artificial sequence
  synthetic
ggcgcgccagtcctacggcttatcctaccagcccaatggcctgcctcaccctaccccacctccacctcagcattaccgtttggatgatatggccattgcccaccactacagggactcctatcgacaccccagccacagggacctcagggacagaaacagacctatggggttgcatggcacacgtcaagcgactcggaccgatg

SEQ ID NO: 2705 - DNA, 203 bp, Artificial sequence
  synthetic
ggcgcgccagtcctaagaaatgattgatcacagactaacagacagagaatgggcagaagagtggaaacatcttgaccatctgttaaactgcataatggacatggtagaaaaaacaaggcgatctctcaccgtactaaggcggtgtcaagaagcagaccgggaagaattgaattactggatccggcggtcgactcggaccgatg

SEQ ID NO: 2706 - DNA, 203 bp, Artificial sequence
  synthetic
ggcgcgccagtcctacagtgacgccgaggacttaaaaaaaggtggcggcagtagcagcagccactctaggcagcagagtcccgtcaacccagacccagttgcactagacgcgcatcgggaattccttcacaggcctgcgtctggatacgtgccagaggagatctggaagaaagctgaggaggccgtcacgactcggaccgatg

SEQ ID NO: 2707 - DNA, 203 bp, Artificial sequence
  synthetic
ggcgcgccagtccttgctcaaagttgttttttttgtttgtttgtttattagatgaattatcctatttcagtacttcagcaagagagaacctaactgtatcttgaggtggtagtaaaacacagagggccagtaacgggtcgtaatgacttattgtggataacaaagatatcttttctttagagaactgacgactcggaccgatg

SEQ ID NO: 2708 - DNA, 203 bp, Artificial sequence
  synthetic
ggcgcgccagtcctaaagggaagtcagccaaagactgatctgatggaccaaaatcggaattttgaaaagcaccagtactactttccaaatgatcagcaggttaaacatgttcagcaaggtatagtatgaatccattaacccttcgttgtccagggtccagaccagaactacttgttagttttgaaaaccgactcggaccgatg

SEQ ID NO: 2709 - DNA, 203 bp, Artificial sequence
  synthetic
ggcgcgccagtcctaatgtaggccttggaaacagttttaagtggcttttaagtatctgcatagaggcaatcctaaggtttgctttaagtctcttaaatctaacatttttaaaagcatttcttccctgtattttcatatacaagttggttttaattttgtttgggtggtgttattttttttaaatgactcgactcggaccgatg

SEQ ID NO: 2710 - DNA, 203 bp, Artificial sequence
  synthetic
ggcgcgccagtccttacagtacgtctcattactttttaattcagggcaccctgagtgaaaacaaatacaaaaaaaaatccctaactctgagctctatctctgattcctcttcctccttcccctcttcctcctcttcctctcctcctgttttgctacattctcctcagtggcaaaaagtttcactctaccgactcggaccgatg

SEQ ID NO: 2711 - DNA, 203 bp, Artificial sequence
  synthetic
ggcgcgccagtccttgttactttccttttttgcttgtcacttatatacaggctatgtgagaatataatttgtaggtataacacattaagaaaaagttatcttcattggatagaattgaatggtggtcgctgataggaatagggcgtcctctagctcttatctctgtctcttactcttttctctttctccgactcggaccgatg

SEQ ID NO: 2712 - DNA, 203 bp, Artificial sequence
  synthetic
ggcgcgccagtcctgttgtccgaattcctcaagggacagaaaaaaaattggagactgttgaaatgcagatttgaagtaatttttttaaaatattattttgggttctgcgacattgtgaaaaattaaagttgttgtgcaatacttaattcagacatgtaccacaagttaatggtagactaacactggggcgactcggaccgatg

SEQ ID NO: 2713 - DNA, 203 bp, Artificial sequence
  synthetic
ggcgcgccagtcctaataaaaaagttgaaaaaaatctggatcctctgtctccctcgtccccggtgtgccatggttgcccaccagtgaccccagcctgaggagtccatcctccatggtgctgaatcaaatctgtagagtttattcagctacaaagcgtggctctgtaacaggagttggcttatccatgccgactcggaccgatg

SEQ ID NO: 2714 - DNA, 203 bp, Artificial sequence
  synthetic
ggcgcgccagtcctgtgttgagtagggaatgatgtcagaactttgcaaaagtcgagctcattcataaggggatgtttctcaggcaggaggagtaggaagagtgggaggagaattactaccttccataggaaaggagagcttggcttgcctagattagctgctgcatagatagcagaggcccttttggccgactcggaccgatg

SEQ ID NO: 2715 - DNA, 203 bp, Artificial sequence
  synthetic
ggcgcgccagtcctaaggtgaatgctggttacatgggagggtgacttggagccctctagtttccttcttgtgccagctgggttcctgtttcaaggccaggcttctctaacttgtcttcctgggaaatgtagcttttccaagaatttggtagtgcacaccaggaaaaactaggtatcagaacagattttcgactcggaccgatg

SEQ ID NO: 2716 - DNA, 203 bp, Artificial sequence
  synthetic
ggcgcgccagtcctccctcctgcctgtccctttctgtcttctctctctctctcccacttttcctccctctcccgctccgtctcacacgcaccctctgtttattttcctgcctccatctgggccctgctgatattgtaatcaccctgatgcacgttggcttctctcctctccctcctgcgctcacacaccgactcggaccgatg

SEQ ID NO: 2717 - DNA, 203 bp, Artificial sequence
  synthetic
ggcgcgccagtcctactcagcaagctgaaaaggttccttactaccctgcagcagtttggcaatgacatttcacccgagataggagaaagagttcgcaccctcgttctgggactagtgaactccactttgacaattgaagaatttcattccaaactgcaagaagctactaacttcccactgagacctttcgactcggaccgatg

SEQ ID NO: 2718 - DNA, 203 bp, Artificial sequence
  synthetic
ggcgcgccagtccttgtcatcccatttttgaaggccaacttgcccctgctgcagcgtgagctcctccactgcgcaagactggccaaacagaaccctgcccagtacctcgcccagcatgaacagctgcttctggatgccagcaccacctcacctgttgactcctcagagctgcttctcgatgtgaacgacgactcggaccgatg

SEQ ID NO: 2719 - DNA, 203 bp, Artificial sequence
  synthetic
ggcgcgccagtcctaaacgggaagaggcgaactccagacagaaccaaagaaaatggctttgacagagagcctttgcactcagaacatccaagcaagcgaccatgcactattagcccaggccagcggtacagtccaaataacggcttatcctaccagcccaatggcctgcctcaccctaccccacctcccgactcggaccgatg

SEQ ID NO: 2720 - DNA, 203 bp, Artificial sequence
  synthetic
ggcgcgccagtcctggcggagcggaaagcccacgacatgatcacaacagagagggccaagatggagcgcacggtcgccgaggccaaacggcaggcggcggaggacgcactggcagttatcaatcagcaggaggattcaagcgagagttgctggaattgtggccgtaaagcgagtgaaacctgcagtggcgactcggaccgatg

SEQ ID NO: 2721 - DNA, 203 bp, Artificial sequence
  synthetic
ggcgcgccagtcctctgtaacacagcccgatactgtggctcattttgccagcacaaagactgggagaagcaccatcacatctgtggacagaccctgcaggcccagcagcagggagacacacctgcagtcagctcctctgtcacgcccaacagcggggctgggagcccgatggacacaccaccagcagccgactcggaccgatg

SEQ ID NO: 2722 - DNA, 203 bp, Artificial sequence
  synthetic
ggcgcgccagtcctggctgtgtagacaaccaaagtttacaaggctgggaagacacttctccaaatacatatacaccaggcatttctttaaaatcaaaaacaatccattagctttggggcggggggtggggggagggttaaatgtaggccttggaaacagttttaagtggcttttaagtatctgcatagcgactcggaccgatg

SEQ ID NO: 2723 - DNA, 203 bp, Artificial sequence
  synthetic
ggcgcgccagtcctttggaagtccatctgccagcacacctgcttaaagtgaaatgaaagcacataaccaggctctgaatgggttatattttatcatggtgctcccagaatcctttgacctcactctgctttctagtctgcttgtgacactggacagtcctttcttacagagctattatatgttctaggcgactcggaccgatg

SEQ ID NO: 2724 - DNA, 203 bp, Artificial sequence
  synthetic
ggcgcgccagtcctctacgaagggttaaataatcccaaaaatgaggtatgtcatacccacacgtctttatctctagaagctgtgatgtatgtgaaacagcactgttattcttaacactagtgtgtaaaataaggattagtacagtacgtctcattactttttaattcagggcaccctgagtgaaaacacgactcggaccgatg

SEQ ID NO: 2725 - DNA, 203 bp, Artificial sequence
  synthetic
ggcgcgccagtcctaatacaaaaaaaaatccctaactctgagctctatctctgattcctcttcctccttcccctcttcctcctcttcctctcctcctgttttgctacattctcctcagtggcaaaaagtttcactctacctctgacagcatgtatattgcaccagtagctaacaaaaactggtctagtcgactcggaccgatg

SEQ ID NO: 2726 - DNA, 203 bp, Artificial sequence
  synthetic
ggcgcgccagtcctataatttgtaggtataacacattaagaaaaagttatcttcattggatagaattgaatggtggtcgctgataggaatagggcgtcctctagctcttatctctgtctcttactcttttctctttctctttttctctgtcatgagactgtgtgtgacagggccacctgtctttttttcgactcggaccgatg

SEQ ID NO: 2727 - DNA, 203 bp, Artificial sequence
  synthetic
ggcgcgccagtccttgtgccatggttgcccaccagtgaccccagcctgaggagtccatcctccatggtgctgaatcaaatctgtagagtttattcagctacaaagcgtggctctgtaacaggagttggcttatccatgcgtgttgagtagggaatgatgtcagaactttgcaaaagtcgagctcattccgactcggaccgatg

SEQ ID NO: 2728 - DNA, 203 bp, Artificial sequence
  synthetic
ggcgcgccagtcctataaggggatgtttctcaggcaggaggagtaggaagagtgggaggagaattactaccttccataggaaaggagagcttggcttgcctagattagctgctgcatagatagcagaggcccttttggctgtgttttgataaaattagaaatgagtacctaaatctggatcactctgccgactcggaccgatg

SEQ ID NO: 2729 - DNA, 203 bp, Artificial sequence
  synthetic
ggcgcgccagtccttcagagaggttcgtgccaacctcatgaggctctgactcttgtcaggttgcttggctgccttgtgcatacccgaatggcagatcagctgacatgacatggaactgctctatctgccttgtcccctctcctctaattaaaagtcgctaccattgtcactcttggttatgtagttaacgactcggaccgatg

SEQ ID NO: 2730 - DNA, 203 bp, Artificial sequence
  synthetic
ggcgcgccagtccttatccactgtggctatctccaacttgctgggacatccagttatctcctctgacacatattttttcattctctagttacaaagtttgttagagtttgaaaaacaaacccttctcccctaccctgtgaatgctgttagtttttatgtgtagttttcaaaacacagattatcttatacgactcggaccgatg

SEQ ID NO: 2731 - DNA, 203 bp, Artificial sequence
  synthetic
ggcgcgccagtcctttatgattttcattctgttcagcggctatactcagactttactctaaaagtcaaatcttctgacattctttgaagtgaagcattctatgaatgtgagctgaagaaatgaatgaaatgaaataatgcagcatctagtgctttttgcatggcccaaaggggctctgtgctgctccacgactcggaccgatg

SEQ ID NO: 2732 - DNA, 203 bp, Artificial sequence
  synthetic
ggcgcgccagtcctacacctccaagcaacgagttcaagatcagtatgaaattggaagcacaggaccccaggaacaccacatccacctgtattgccacagtagttggactgacaggtgcccgccttcgcctgcgccttgatgggagcgacaacaaaaatgacttctggcggctggttgactcagctgaacgactcggaccgatg

SEQ ID NO: 2733 - DNA, 203 bp, Artificial sequence
  synthetic
ggcgcgccagtcctaaaatgggaatgaagctagaagctgtggacaggaagaaccctcatttcatttgcccagccactattggggaggttcggggctcagaggtgcttgtcacttttgatgggtggcgaggggcctttgactactggtgccgcttcgactcccgagacatcttccctgtgggctggtgtcgactcggaccgatg

SEQ ID NO: 2734 - DNA, 203 bp, Artificial sequence
  synthetic
ggcgcgccagtccttccttgactggagacaacctgcagcctcctggcaccaaagttgtgattccaaagaatccctatcctgcctccgatgtgaatactgagaagcccagcatccacagcagcaccaaaactgtcttggaacatcaaccagggcagagggggcgtaaaccaggaaagaagcggggccggcgactcggaccgatg

SEQ ID NO: 2735 - DNA, 203 bp, Artificial sequence
  synthetic
ggcgcgccagtcctgcctgtatcgactgtgcttatcaccagaaaaccgtcttcagcttcctcaagcaaggccatggtggtgaggttatctcagccgtgtttgaccgggaacagcataccctcaacctcccagcagtcaacagcatcacctacgtcctccgcttcctggagaaactctgccacaaccttcgactcggaccgatg

SEQ ID NO: 2736 - DNA, 203 bp, Artificial sequence
  synthetic
ggcgcgccagtcctcccaccaaccttgtcagcacctcccaaaggcaccggcccttgctttcatcctgtggcctcccaccaagcactgcctcagctgtgcgcaggctatgctccaggggagtgttaaaaggatcaaatgaaagaagggatatggaatcattttggaaactaaatcgttccccagggtcgcgactcggaccgatg

SEQ ID NO: 2737 - DNA, 203 bp, Artificial sequence
  synthetic
ggcgcgccagtcctatttctcaaccctggctggcctctcaccaggagtttaggctgaatgccttccacgtgatggaggaaaaggccaactctgtcctggtcttgctgtggcaccccatcgccccacagctcgtaccttctcaccagattcccctgaatccaaactcgtggtgcaaacctctaccttttcgactcggaccgatg

SEQ ID NO: 2738 - DNA, 203 bp, Artificial sequence
  synthetic
ggcgcgccagtccttttacctgggacaaatacctaaaagaaacatgttcagtcccagcgcctgtccattgcttcaagcagtcctacacacctccaagcaacgagttcaagatcagtatgaaattggaagcacaggaccccaggaacaccacatccacctgtattgccacagtagttggactgacaggtcgactcggaccgatg

SEQ ID NO: 2739 - DNA, 203 bp, Artificial sequence
  synthetic
ggcgcgccagtcctgcccgccttcgcctgcgccttgatgggagcgacaacaaaaatgacttctggcggctggttgactcagctgaaatccagcctattgggaactgtgaaaagaatgggggtatgctacagccacctcttggatttcggctgaatgcgtcttcttggcccatgttccttttgaagacgcgactcggaccgatg

SEQ ID NO: 2740 - DNA, 203 bp, Artificial sequence
  synthetic
ggcgcgccagtcctagcagcaccaaaactgtcttggaacatcaaccagggcagagggggcgtaaaccaggaaagaagcggggccggacacccaagaccctaatttcccatcccatctctgccccatccaagacagctgaacctttgaaattcccaaagaagagaggtcccaaacctggcagcaagaggcgactcggaccgatg

SEQ ID NO: 2741 - DNA, 203 bp, Artificial sequence
  synthetic
ggcgcgccagtcctaagaaggtccagcaactccctgaccattttggaccagcccgtgcctctgtggtgttgcagcaggctgtccaggcctgtatcgactgtgcttatcaccagaaaaccgtcttcagcttcctcaagcaaggccatggtggtgaggttatctcagccgtgtttgaccgggaacagcatcgactcggaccgatg

SEQ ID NO: 2742 - DNA, 203 bp, Artificial sequence
  synthetic
ggcgcgccagtcctaccctcaacctcccagcagtcaacagcatcacctacgtcctccgcttcctggagaaactctgccacaaccttcgtagtgacaatctgtttggcaaccagccctttacacagactcacttgtcactcactgccatagagtacagccacagccacgacaggtacctaccaggtgaacgactcggaccgatg

SEQ ID NO: 2743 - DNA, 203 bp, Artificial sequence
  synthetic
ggcgcgccagtcctacctttgtcctggggaatagtctggcccgctccttggaaccacactcagactcaatggactctgcctcaaatcccaccaaccttgtcagcacctcccaaaggcaccggcccttgctttcatcctgtggcctcccaccaagcactgcctcagctgtgcgcaggctatgctccaggcgactcggaccgatg

SEQ ID NO: 2744 - DNA, 203 bp, Artificial sequence
  synthetic
ggcgcgccagtcctccctagggcactttctctttgaggtggagagacccataaagccttgaccacatcactccatatggggaggagaaggatccctgtcaccttctcctctcttcacggggcccttttgcagccctaggcctcatctgtgggaagggagtccctggcttatactgcccccaccacagccgactcggaccgatg

SEQ ID NO: 2745 - DNA, 203 bp, Artificial sequence
  synthetic
ggcgcgccagtccttccttgccctggccagaactgctgtcgaagaaaatcaggccggaaggccaagaaggcgctaagggggatgggagggcaggttttccaggctggagtcggttccacccactcgcctgtccacaggcttccttgtaagcaagtcagcagcacagctactcacgctgccatctggaccgactcggaccgatg

SEQ ID NO: 2746 - DNA, 203 bp, Artificial sequence
  synthetic
ggcgcgccagtccttgaccctacttatataggaaatattggaagattccttaatcattcttgtgagccaaaccttttgatgattcctgtccgaattgactcaatggtacctaagttggcactttttgcagccaaagatattgtgccagaagaagaactctcttatgattattcaggaagatatcttaacgactcggaccgatg

SEQ ID NO: 2747 - DNA, 203 bp, Artificial sequence
  synthetic
ggcgcgccagtccttttatatgacaaccggcgacgatcagctcagtggttggatcaagaagaagctccaaagcacttcccaaagccaatcttgcacccaaaaaaggtcatggtcactatttggtggtctgctgctggtctgatccactacagctttctgaatcccggtgaaaccattacatctgagaacgactcggaccgatg

SEQ ID NO: 2748 - DNA, 203 bp, Artificial sequence
  synthetic
ggcgcgccagtcctgtatgctcaggaaatcgatgagatgaaccaaaaactgcaacgcctgcagctggcattggtcaacagaaagggcccaattcttctccacgacaatgcccgaccgcatgttgcacaacccacacttcaaaagttgaatgaattgggctatgaagttttgcctcatccaccgtattccgactcggaccgatg

SEQ ID NO: 2749 - DNA, 203 bp, Artificial sequence
  synthetic
ggcgcgccagtcctacctgacctcttgccaaccaactaccacgtctttaagcatctcaacaactttttgcagggaaaacgcttccacaaccagcaggatgcagaaaatgctttccaagagttcgtcgaatcccaaagcacggatttttacgctacaggaataaaccaacttatttctcgttggcaaaacgactcggaccgatg

SEQ ID NO: 2750 - DNA, 203 bp, Artificial sequence
  synthetic
ggcgcgccagtccttgaggcatgagtaggggctgtatttgcgtgcaggcgggcccccaaagcttccactcgctgccttaaaacgccaacccagcctctcagacaatgctgccctcccactatgtactctaccacctatgaagagaggaatatcaccggaaccagggtgaaggtgcccgtggggcaggacgactcggaccgatg

SEQ ID NO: 2751 - DNA, 203 bp, Artificial sequence
  synthetic
ggcgcgccagtcctggtggaggggatgaacatcctgggcttggtagtgtttgccatcgtctttggtgtggcgctgcggaagctggggcctgaaggggagctgcttatccgcttcttcaactccttcaatgaggccaccatggttctggtctcctggatcatgtggtacgcccctgtgggcatcatgttcgactcggaccgatg

SEQ ID NO: 2752 - DNA, 203 bp, Artificial sequence
  synthetic
ggcgcgccagtcctcctggtggctggcaagatcgtggagatggaggatgtgggtttactctttgcccgccttggcaagtacattctgtgctgcctgctgggtcacgccatccatgggctcctggtactgcccctcatctacttcctcttcacccgcaaaaacccctaccgcttcctgtggggcatcgtcgactcggaccgatg

SEQ ID NO: 2753 - DNA, 203 bp, Artificial sequence
  synthetic
ggcgcgccagtcctggctgtggactggctagtcgaccggtcctgtaccgtcctcaatgtagaaggtgacgctctgggggcaggactcctccaaaattacgtggaccgtacggagtcgagaagcacagagcctgagttgatacaagtgaagagtgagctgcccctggatccgctgccagtccccactgacgactcggaccgatg

SEQ ID NO: 2754 - DNA, 203 bp, Artificial sequence
  synthetic
ggcgcgccagtcctgtctgcctgcacactctggggagccaggggccccagcaccctccaggacaggagatctgggatgcctggctgctggagtacatgtgttcacaagggttactcctcaaaacccccagttctcactcatgtccccaactcaaggctagaaaacagcaagatggagaaataatgttccgactcggaccgatg

SEQ ID NO: 2755 - DNA, 203 bp, Artificial sequence
  synthetic
ggcgcgccagtccttgtgtgtgtgtgtgtgttctgtgacctcctgtccccatggtacgtcccaccctgtccccagatcccctattccctccacaataacagaaacactcccagggactctggggagaggctgaggacaaatacctgctgtcactccagaggacattttttttagcaataaaattgagtcgactcggaccgatg

SEQ ID NO: 2756 - DNA, 203 bp, Artificial sequence
  synthetic
ggcgcgccagtcctcggcacgcccgggaggctttctctggctggtaaccgctactcccggacaccagaccaccgccttccgtacacaggggcccgcatcccaccctcccggacctaagagcctgggtcccctgtttccggaggtccgcttcccggcccccagattctggcatcccagccctcagtgtccgactcggaccgatg

SEQ ID NO: 2757 - DNA, 203 bp, Artificial sequence
  synthetic
ggcgcgccagtcctcaagacccaggcagcccgggtccccgcctcccggatccaggcgtccgggatctgcgccaccagaacctagcctcctgcagacctccgccatctgggggcactcaacctcctggagccaagggccccacgtcccacccagagaaactctcgtattcccagctcctagggccaaggcgactcggaccgatg

SEQ ID NO: 2758 - DNA, 203 bp, Artificial sequence
  synthetic
ggcgcgccagtcctcctccatcgaggaccaaggcgcggcagcaggcggctactgcggttcccgggaccaggtgcgccgctgccttcgagccaacctgcttgtgctgctgacagtggtggccgtggtggccggcgtggcgctgggactgggggtgtcgggggccgggggtgcgctggcgttgggcccggcgactcggaccgatg

SEQ ID NO: 2759 - DNA, 203 bp, Artificial sequence
  synthetic
ggcgcgccagtcctagcgcttgagcgccttcgtcttcccgggcgagctgctgctgcgtctgctgcggatgatcatcttgccgctggtggtgtgcagcttgatcggcggcgccgccagcctggaccccggcgcgctcggccgtctgggcgcctgggcgctgctctttttcctggtcaccacgctgctggcgactcggaccgatg

SEQ ID NO: 2760 - DNA, 203 bp, Artificial sequence
  synthetic
ggcgcgccagtccttcagccgtttcatcctgcccatcggcgccaccgtcaacatggacggtgccgcgctcttccagtgcgtggccgcagtgttcattgcacagctcagccagcagtccttggacttcgtaaagatcatcaccatcctggtcacggccacagcgtccagcgtgggggcagcgggcatcccgactcggaccgatg

SEQ ID NO: 2761 - DNA, 203 bp, Artificial sequence
  synthetic
ggcgcgccagtcctctgctggaggtgtcctcactctggccatcatcctcgaagcagtcaacctcccggtcgaccatatctccttgatcctggctgtggactggctagtcgaccggtcctgtaccgtcctcaatgtagaaggtgacgctctgggggcaggactcctccaaaattacgtggaccgtacggcgactcggaccgatg

SEQ ID NO: 2762 - DNA, 203 bp, Artificial sequence
  synthetic
ggcgcgccagtccttccctgccctgctgggggtgctctttggacactggattatgaggaatggataaatggatgagctagggctctgggggtctgcctgcacactctggggagccaggggccccagcaccctccaggacaggagatctgggatgcctggctgctggagtacatgtgttcacaagggttcgactcggaccgatg

SEQ ID NO: 2763 - DNA, 203 bp, Artificial sequence
  synthetic
ggcgcgccagtcctaacaccatgctggttattttggcggctgtagttgtggggggatgtgtgtgtgcacgtgtgtgtgtgtgtgtgtgtgtgtgtgtgtgtgtgtgttctgtgacctcctgtccccatggtacgtcccaccctgtccccagatcccctattccctccacaataacagaaacactcccacgactcggaccgatg

SEQ ID NO: 2764 - DNA, 203 bp, Artificial sequence
  synthetic
ggcgcgccagtcctaccgcatcggcgaccttcaggccttccagggccacggcgcgggcaacctggcgggtctgaaggggcgtctcgattacctgagctctctgaaggtgaagggccttgtgctgggtccaattcacaagaaccagaaggatgatgtcgctcagactgacttgctgcagatcgaccccacgactcggaccgatg

SEQ ID NO: 2765 - DNA, 203 bp, Artificial sequence
  synthetic
ggcgcgccagtcctattttggctccaaggaagattttgacagtctcttgcaatcggctaaaaaaaagagcatccgtgtcattctggaccttactcccaactaccggggtgagaactcgtggttctccactcaggttgacactgtggccaccaaggtgaaggatgctctggagttttggctgcaagctgcgactcggaccgatg

SEQ ID NO: 2766 - DNA, 203 bp, Artificial sequence
  synthetic
ggcgcgccagtccttcttcaccctgccagggacccctgttttcagctacggggatgagattggcctggatgcagctgcccttcctggacagcctatggaggctccagtcatgctgtgggatgagtccagcttccctgacatcccaggggctgtaagtgccaacatgactgtgaagggccagagtgaagcgactcggaccgatg

SEQ ID NO: 2767 - DNA, 203 bp, Artificial sequence
  synthetic
ggcgcgccagtcctgacttcagcctgacatggacccactacccttctcctttccttcccaggccctttggcttctgatttttctcttttttaaaaacaaacaaacaaactgttgcagattatgagtgaacccccaaatagggtgttttctgccttcaaataaaagtcacccctgcatggtgaagtcttcgactcggaccgatg

SEQ ID NO: 2768 - DNA, 203 bp, Artificial sequence
  synthetic
ggcgcgccagtcctagttccagggaaggagggcgtagacaaagcgccacctgaacttgcggcgcgaaaaaggcgcgcatgcgtcctacgggagcgtgctggctcaccgaccgcattgcggcttggttttctcacccagtgcatgtggcaggagcggtgagatcactgcctcacggcgatcctggactgcgactcggaccgatg

SEQ ID NO: 2769 - DNA, 203 bp, Artificial sequence
  synthetic
ggcgcgccagtcctacggtcacgactgcctaccctctaaccctgttctgagctgccccttgcccacacaccccaaacctgtgtgcaggatccgcctccatggagctacagcctcctgaagcctcgatcgccgtcgtgtcgattccgcgccagttgcctggctcacattcggaggctggtgtccagggtcgactcggaccgatg

SEQ ID NO: 2770 - DNA, 203 bp, Artificial sequence
  synthetic
ggcgcgccagtcctctcagcgcgggggacgactcagagacggggtctgactgtgttacccaggctggtcttcaactcttggcctcaagtgatcctcctgccttagcttccaagaatgctgaggttacagtagaaacggggtttcaccatgttagccaggctgatattgaattcctgacctcaattgatcgactcggaccgatg

SEQ ID NO: 2771 - DNA, 203 bp, Artificial sequence
  synthetic
ggcgcgccagtcctatcaaggtggcggaagacgaggcggaggcggcagccgcggctaagttcacgggcctgtccaaggaggagctgctgaaggtggcaggcagccccggctgggtacgcacccgctgggcactgctgctgctcttctggctcggctggctcggcatgcttgctggtgccgtggtcatacgactcggaccgatg

SEQ ID NO: 2772 - DNA, 203 bp, Artificial sequence
  synthetic
ggcgcgccagtcctatcgtgcgagcgccgcgttgtcgcgagctaccggcgcagaagtggtggcacacgggcgccctctaccgcatcggcgaccttcaggccttccagggccacggcgcgggcaacctggcgggtctgaaggggcgtctcgattacctgagctctctgaaggtgaagggccttgtgctgcgactcggaccgatg

SEQ ID NO: 2773 - DNA, 203 bp, Artificial sequence
  synthetic
ggcgcgccagtcctaatgctgctgcccccacgagcacccctcagaagctgattcccccgcagccaacgggccgcccttcccccgcgccccctgccgtcccacccgccgcctcgcccgtgatgccaccgcagacccagtcccccgggcagccggcccagcccgcgcccatggtgccactgcaccagaagcgactcggaccgatg

SEQ ID NO: 2774 - DNA, 203 bp, Artificial sequence
  synthetic
ggcgcgccagtcctcagagccgcatcacccccatccagaagccgcggggcctcgaccctgtggagatcctgcaggagcgcgagtacaggctgcaggctcgcatcgcacaccgaattcaggaacttgaaaaccttcccgggtccctggccggggatttgcgaaccaaagcgaccattgagctcaaggcccgactcggaccgatg

SEQ ID NO: 2775 - DNA, 203 bp, Artificial sequence
  synthetic
ggcgcgccagtcctgagcgcaagcgccggcagaagcaccaggaatacctcaatagcattctccagcatgccaaggatttcaaggaatatcacagatccgtcacaggcaaaatccagaagctgaccaaggcagtggccacgtaccatgccaacacggagcgggagcagaagaaagagaacgagcggatccgactcggaccgatg

SEQ ID NO: 2776 - DNA, 203 bp, Artificial sequence
  synthetic
ggcgcgccagtcctgagaaggagcgcatgcggaggctcatggctgaagatgaggaggggtaccgcaagctcatcgaccagaagaaggacaagcgcctggcctacctcttgcagcagacagacgagtacgtggctaacctcacggagctggtgcggcagcacaaggctgcccaggtcgccaaggagaaacgactcggaccgatg

SEQ ID NO: 2777 - DNA, 203 bp, Artificial sequence
  synthetic
ggcgcgccagtcctaaacagtaccagatcaaaggtttggagtggctggtgtccctgtacaacaacaacctgaacggcatcctggccgacgagatgggcctggggaagaccatccagaccatcgcgctcatcacgtacctcatggagcacaaacgcatcaatgggcccttcctcatcatcgtgcctctccgactcggaccgatg

SEQ ID NO: 2778 - DNA, 203 bp, Artificial sequence
  synthetic
ggcgcgccagtcctatcaagcttggccggaaggagaaggcacaggaccggctgaagggcggccggcggcggccgagccgagggtcccgagccaagccggtcgtgagtgacgatgacagtgaggaggaacaagaggaggaccgctcaggaagtggcagcgaagaagactgagccccgacattccagtctcgactcggaccgatg

SEQ ID NO: 2779 - DNA, 203 bp, Artificial sequence
  synthetic
ggcgcgccagtcctgcatctgtaacagcattaactgtcttaaagagagagagagagaattccgaattggggaacacacgatacctgtttttcttttccgttgctggcagtactgttgcgccgcagtttggagtcactgtagttaagtgtggatgcatgtgcgtcaccgtccactcctcctactgtattcgactcggaccgatg

SEQ ID NO: 2780 - DNA, 203 bp, Artificial sequence
  synthetic
ggcgcgccagtcctcgagacgcccattctgcccccggccccgcgcggaggggcgggggaggcgccgggaagtcgacggcgccggcggctcctgcgtctcgcccttttgcccaggctagagtgcagtggtgcggtcatggttcactgcagcctcaacctcctggactcagcaggaggccactgtctgcacgactcggaccgatg

SEQ ID NO: 2781 - DNA, 203 bp, Artificial sequence
  synthetic
ggcgcgccagtcctggacccatggcgaatgctgctgcccccacgagcacccctcagaagctgattcccccgcagccaacgggccgcccttcccccgcgccccctgccgtcccacccgccgcctcgcccgtgatgccaccgcagacccagtcccccgggcagccggcccagcccgcgcccatggtgccacgactcggaccgatg

SEQ ID NO: 2782 - DNA, 203 bp, Artificial sequence
  synthetic
ggcgcgccagtcctaatggtgtcctcaaacagtaccagatcaaaggtttggagtggctggtgtccctgtacaacaacaacctgaacggcatcctggccgacgagatgggcctggggaagaccatccagaccatcgcgctcatcacgtacctcatggagcacaaacgcatcaatgggcccttcctcatccgactcggaccgatg

SEQ ID NO: 2783 - DNA, 203 bp, Artificial sequence
  synthetic
ggcgcgccagtcctatcgtgcctctctcaacgctgtccaactgggcgtacgagtttgacaagtgggccccctccgtggtgaaggtgtcttacaagggatccccagcagcaagacgggcctttgtcccccagctccggagtgggaagttcaacgtcttgctgacgacgtacgagtacatcatcaaagaccgactcggaccgatg

SEQ ID NO: 2784 - DNA, 203 bp, Artificial sequence
  synthetic
ggcgcgccagtcctcagctgcggaagatctgcaaccacccctacatgttccagcacatcgaggagtccttttccgagcacttggggttcactggcggcattgtccaagggctggacctgtaccgagcctcgggtaaatttgagcttcttgatagaattcttcccaaactccgagcaaccaaccacaaacgactcggaccgatg

SEQ ID NO: 2785 - DNA, 203 bp, Artificial sequence
  synthetic
ggcgcgccagtcctcacactgcccctccgccagcgggcgtcaaccccgacttggaggagccacctctaaaggaggaagacgaggtgcccgacgacgagaccgtcaaccagatgatcgcccggcacgaggaggagtttgatctgttcatgcgcatggacctggaccgcaggcgcgaggaggcccgcaaccgactcggaccgatg

SEQ ID NO: 2786 - DNA, 203 bp, Artificial sequence
  synthetic
ggcgcgccagtcctcgagccaagccggtcgtgagtgacgatgacagtgaggaggaacaagaggaggaccgctcaggaagtggcagcgaagaagactgagccccgacattccagtctcgaccccgagcccctcgttccagagctgagatggcataggccttagcagtaacgggtagcagcagatgtagtcgactcggaccgatg

SEQ ID NO: 2787 - DNA, 203 bp, Artificial sequence
  synthetic
ggcgcgccagtccttttttcttttccgttgctggcagtactgttgcgccgcagtttggagtcactgtagttaagtgtggatgcatgtgcgtcaccgtccactcctcctactgtattttattggacaggtcagactcgccgggggcccggcgagggtatgtcagtgtcactggatgtcaaacagtaatacgactcggaccgatg

SEQ ID NO: 2788 - DNA, 203 bp, Artificial sequence
  synthetic
ggcgcgccagtcctcccccggcccccgggggacaagggctccgagagccgtatccggcggcccatgaacgccttcatggtttgggccaaggacgagaggaaacggctggcagtgcagaacccggacctgcacaacgccgagctcagcaagatgctgggaaagtcgtggaaggcgctgacgctgtcccacgactcggaccgatg

SEQ ID NO: 2789 - DNA, 203 bp, Artificial sequence
  synthetic
ggcgcgccagtcctgaagaggccgtacgtggacgaggcggagcggctgcgcctgcagcacatgcaggactaccccaactacaagtaccggccgcgcaggaagaagcaggccaagcggctgtgcaagcgcgtggacccgggcttccttctgagctccctctcccgggaccagaacgccctgccggagaacgactcggaccgatg

SEQ ID NO: 2790 - DNA, 203 bp, Artificial sequence
  synthetic
ggcgcgccagtcctaatgtctcccctggacgtgctggagccggagcagaccttcttctcctccccctgccaggaggagcatggccatccccgccgcatcccccacctgccagggcacccgtactcaccggagtacgccccaagccctctccactgtagccaccccctgggctccctggcccttggccacgactcggaccgatg

SEQ ID NO: 2791 - DNA, 203 bp, Artificial sequence
  synthetic
ggcgcgccagtcctctggactctccttatccgagtgccgcctctatccccttccccacgttccagcccctgcagcccacattttaagtatattccttcaagtgagttttcctccagcccctgagagttgctgtctcccagtggaatgttcactgacgtcttttcttggtagccatcatcgaaactaatcgactcggaccgatg

SEQ ID NO: 2792 - DNA, 203 bp, Artificial sequence
  synthetic
ggcgcgccagtcctgcaaagtcactgtcttcaaatctggatacacactttcccctctgtagattcaaaaggtgcttccttcccggctgtctccagcttccttactctcttttctgggatttctttttctcttctttctgctcttcctccactgctgaactggtccctaactgaaacagcccctgacttcgactcggaccgatg

SEQ ID NO: 2793 - DNA, 203 bp, Artificial sequence
  synthetic
ggcgcgccagtcctatcccaagcatgcttcctttagctgctgtgagaatttgtcttcctcaccagccaggtcctcaggcaaagtcctcagccagtgctttagagcaacttcccgcaaatcagaaactcactgtgattccaaaaatgtttctgagccctggacccctgcccccaaaatattttcatcttcgactcggaccgatg

SEQ ID NO: 2794 - DNA, 203 bp, Artificial sequence
  synthetic
ggcgcgccagtcctaacagctctgcgcggctttttgagcggtcccgcatcaaggctctggcagatgagcgtgaagccgtgcagaagaagaccttcaccaagtgggtcaattcccaccttgcccgtgtgtcctgccggatcacagacctgtacactgaccttcgagatggacggatgctcatcaagctgcgactcggaccgatg

SEQ ID NO: 2795 - DNA, 203 bp, Artificial sequence
  synthetic
ggcgcgccagtcctttcaatgcactgatacacaaacaccggcctgacctgatagattttgacaaactaaagaaatctaacgcacactacaacctgcagaatgcatttaatctggcagaacagcacctcggcctcactaaactgttggaccccgaagacatcagcgtggaccatcctgatgagaagtcccgactcggaccgatg

SEQ ID NO: 2796 - DNA, 203 bp, Artificial sequence
  synthetic
ggcgcgccagtcctatgccccgggaggggaagctcatctctgacatcaacaaggcctgggaaagactggaaaaagcggaacacgaaagagaactggctttgcggaatgagctcataagacaggagaaactggaacagctcgcccgcagatttgatcgcaaggcagctatgagggagacttggctgagccgactcggaccgatg

SEQ ID NO: 2797 - DNA, 203 bp, Artificial sequence
  synthetic
ggcgcgccagtcctgaaaaccagcgtctggtgtctcaggacaactttgggtttgaccttcctgcagttgaggccgccacaaaaaagcacgaggccattgagacagacattgccgcatacgaggagcgtgtgcaggctgtggtagccgtggccagggagctcgaggccgagaattaccacgacatcaagcgactcggaccgatg

SEQ ID NO: 2798 - DNA, 203 bp, Artificial sequence
  synthetic
ggcgcgccagtcctcgcatcacagcgaggaaggacaatgtcatccggctctgggaatacctactggaactgctcagggcccggagacagcggctcgagatgaacctggggctgcagaagatattccaggaaatgctctacattatggactggatggatgaaatgaaggtgctagtattgtctcaagaccgactcggaccgatg

SEQ ID NO: 2799 - DNA, 203 bp, Artificial sequence
  synthetic
ggcgcgccagtcctgcccacatggagttctgttatcaagagctttgccagctggcggctgagcgcagggcccgtctggaagagtcccgccgcctctggaagttcttctgggagatggcagaagaggaaggctggatacgggagaaggagaagatcctgtcctcggacgattacgggaaagacctgacccgactcggaccgatg

SEQ ID NO: 2800 - DNA, 203 bp, Artificial sequence
  synthetic
ggcgcgccagtcctagcgtcatgcgcctgctcagcaagcaccgggcgttcgaggacgagatgagcggccgcagtggccactttgagcaggccatcaaggaaggcgaagacatgatcgcggaggagcacttcgggtcggagaagatccgtgagaggatcatttacatccgggagcagtgggccaacctacgactcggaccgatg

SEQ ID NO: 2801 - DNA, 203 bp, Artificial sequence
  synthetic
ggcgcgccagtcctgagcagctctcggccattcggaagaagcgcctggaggaggcctccctgctgcaccagttccaggcagatgctgatgacattgatgcctggatgctggacatcctcaagattgtctccagcagcgacgtgggccacgatgagtattccacacagtctctggtcaagaaacacaagcgactcggaccgatg

SEQ ID NO: 2802 - DNA, 203 bp, Artificial sequence
  synthetic
ggcgcgccagtcctgacgtggcggaagagatcgccaattacaggcccacccttgacacgctgcacgaacaagccagcgccctcccccaggagcatgccgagtctccagacgtgaggggcaggctgtcgggcatcgaggagcggtataaggaggtggcagagctgacgcggctgcggaagcaggcactccgactcggaccgatg

SEQ ID NO: 2803 - DNA, 203 bp, Artificial sequence
  synthetic
ggcgcgccagtcctcaggacactctggccctgtacaagatgttcagcgaggctgatgcctgtgagctctggatcgacgagaaggagcagtggctcaacaacatgcagatcccagagaagctggaggatctggaggtcatccagcacagatttgagagcctagaaccagaaatgaacaaccaggcttcccgactcggaccgatg

SEQ ID NO: 2804 - DNA, 203 bp, Artificial sequence
  synthetic
ggcgcgccagtcctcgggttgcagtggtgaaccagattgcacgccagctgatgcacagcggccacccaagtgagaaggaaatcaaagcccagcaggacaaactcaacacaaggtggagccagttcagagaactggttgacaggaagaaggatgccctcctgtctgccctgagcatccagaactaccaccgactcggaccgatg

SEQ ID NO: 2805 - DNA, 203 bp, Artificial sequence
  synthetic
ggcgcgccagtcctctcgagtgcaatgaaaccaaatcctggattcgggaaaagaccaaggtcatcgagtccacccaggacctgggcaatgacctggctggcgtcatggccctgcagcgcaagctgaccggcatggagcgggacttggtggccattgaggcaaagctgagtgacctgcagaaggaggcgcgactcggaccgatg

SEQ ID NO: 2806 - DNA, 203 bp, Artificial sequence
  synthetic
ggcgcgccagtcctgagaagctggagtccgagcaccccgaccaggcccaggccatcctgtctcggctggccgagatcagcgacgtgtgggaggagatgaagaccaccctgaaaaaccgagaggcctccctgggagaggccagcaagctgcagcagttcctacgggacttggacgacttccagtcctggcgactcggaccgatg

SEQ ID NO: 2807 - DNA, 203 bp, Artificial sequence
  synthetic
ggcgcgccagtcctctctctaggacccagacagcgatcgcctcggaggacatgccaaacaccctgaccgaggctgagaagctgctcacgcagcacgagaacatcaagaacgagatcgacaactacgaggaggactaccagaagatgagggacatgggcgagatggtcacccaggggcagaccgatgcccgactcggaccgatg

SEQ ID NO: 2808 - DNA, 203 bp, Artificial sequence
  synthetic
ggcgcgccagtcctcagtacatgtttctgcggcagcggctgcaggccctggacactggatggaacgagctccacaagatgtgggagaacagacaaaatctcctatcccagtcacatgcctaccagcagttcctcagagacacgaagcaagccgaagcctttcttaacaaccaggagtatgttctggctcgactcggaccgatg

SEQ ID NO: 2809 - DNA, 203 bp, Artificial sequence
  synthetic
ggcgcgccagtcctgagaatcagatggaagtgcggaagaaggagatcgaagagctccaaagccaagcccaggccctgagtcaggaagggaagagcaccgacgaggtagacagcaagcgcctcaccgtgcagaccaagttcatggagttgctggagcccttgaacgagaggaagcataacctgctggcccgactcggaccgatg

SEQ ID NO: 2810 - DNA, 203 bp, Artificial sequence
  synthetic
ggcgcgccagtcctgacgacatctttgagaggagccaaaacatcgtcactgacagcagcagcctcagcgctgaggccatcagacagaggcttgccgacctgaagcagctgtggggtctcctcattgaggagacagagaaacgccacaggcggctggaggaggcgcacagggcccagcagtactactttcgactcggaccgatg

SEQ ID NO: 2811 - DNA, 203 bp, Artificial sequence
  synthetic
ggcgcgccagtcctctggtggccgacagccatcctgaaagtgagcgcattagcatgcggcagtccaaagtggataaactgtacgctggtctgaaagaccttgctgaagagagaagaggcaagctggatgagagacacaggttattccagctcaaccgggaggtggacgacctggagcagtggatcgctcgactcggaccgatg

SEQ ID NO: 2812 - DNA, 203 bp, Artificial sequence
  synthetic
ggcgcgccagtcctgagagggaggtggtcgcagggtcccatgaactgggacaggactatgagcatgtcacgatgttacaagaacgattccgggagtttgcccgagacaccgggaacattgggcaggagcgcgtggacacggtcaatcacctggcagatgagctcatcaactctggacattcagatgcccgactcggaccgatg

SEQ ID NO: 2813 - DNA, 203 bp, Artificial sequence
  synthetic
ggcgcgccagtcctcttgggagagatcagaacacagtggagaccttacagagaatgcacactacatttgagcatgacatccaggctctgggcacacaggtgaggcagctgcaggaggatgcagcccgcctccaggcggcctatgcgggtgacaaggccgacgatatccagaagcgcgagaacgaggtccgactcggaccgatg

SEQ ID NO: 2814 - DNA, 203 bp, Artificial sequence
  synthetic
ggcgcgccagtccttgggaagaccgatgggaatggttaagactgattctggaggtccatcagttctcaagagacgccagtgtggccgaggcctggctgcttggacaggagccgtacctatccagccgagagataggccagagcgtggacgaggtggagaagctcatcaagcgccacgaggcatttgaacgactcggaccgatg

SEQ ID NO: 2815 - DNA, 203 bp, Artificial sequence
  synthetic
ggcgcgccagtccttcaaaaggagaacaagtttcccaaaacggtttgccagctgaacagggatctccacggatggcagaaacggtggacacaagcgaaatggtcaacggcgctacagaacaaaggacgagctctaaagagtccagccccatcccctccccgacctctgatcgtaaagccaagactgcccgactcggaccgatg

SEQ ID NO: 2816 - DNA, 203 bp, Artificial sequence
  synthetic
ggcgcgccagtccttatgatcttgctgcagccacagtgcagctccacattaactctacagaccaaaccatttgtatctggcatcacttactaacacacgacatgcggcttttctgcatcaactgctatgacggttaagaatgtcagtatacaagaaggaatagaaaactgatactgttttaaataatccgactcggaccgatg

SEQ ID NO: 2817 - DNA, 203 bp, Artificial sequence
  synthetic
ggcgcgccagtcctatcaaagctttctcttaactctcttacctctaggcaaactgagacctcaccatcctctcccctgcttcccacgacagtcctttgcccttgccatgctcagggttggaatcaagttgttctattctcaacagaccaaaatgtttagttaaggcaaagtatcttggaaacaattgtcgactcggaccgatg

SEQ ID NO: 2818 - DNA, 203 bp, Artificial sequence
  synthetic
ggcgcgccagtcctgattaattacagtcttgtactcttgacaaagctgtgcagatggcaataagttcataccagcaatcctggagtcccataataaatacgtacatgtggaacatcgtgcacataatttcaacagttcgcagatctgtagttatgaagccagggtttggtggtatttgctctctcttgcgactcggaccgatg

SEQ ID NO: 2819 - DNA, 203 bp, Artificial sequence
  synthetic
ggcgcgccagtcctttcttccactatcatgttttttgaggattttgcatatttcttgttgccataatgctgtgctattttaccctgattttcagtgatacaatatgggtgacaatactggcccctccataaatctgaagagtaagaagtagtgaaaataaggcttaggatatgaaatggcgttgtcaccgactcggaccgatg

SEQ ID NO: 2820 - DNA, 203 bp, Artificial sequence
  synthetic
ggcgcgccagtcctttgaatcaaggccactttttgtcctacttgagcatctcaagttgggatgcatcttctgatggcacttccggaactggctgtggtttttttgggtgtaccgagagtgccagtgactgtgcttcttacaattcctggcatcttgagtaggtgaaacactgtatcagactgggtgatcgactcggaccgatg

SEQ ID NO: 2821 - DNA, 203 bp, Artificial sequence
  synthetic
ggcgcgccagtcctggtgtgcgcgctgcgcccgcgagctcccgggctcggcaaccgtggcatgcttaggattggccatatttaaaagttctgaagtagaacctgcgcctcctctctgcttctccctcctcctcagtaatttatttcgagcttccaggcaagggccacggaagaagggaaagcaagaaacgactcggaccgatg

SEQ ID NO: 2822 - DNA, 203 bp, Artificial sequence
  synthetic
ggcgcgccagtcctttagatgcctgtgtggtaactcctcgcggagctaaggtggactctcttgcagccaacttcccatcagatcaccctgctggacttgcagaccggaatggggctcgcctaaggagccgagcgctgcggaggctgctgcgtgttggatgggagtgggagggggctggagcgagatttcgactcggaccgatg

SEQ ID NO: 2823 - DNA, 203 bp, Artificial sequence
  synthetic
ggcgcgccagtcctccagggcgcagtcctccggggcgttacgccgggcataatggaattgcagaggacgtctagtatctccgggccgctgtcgccggcgtacacggggcaggtgccttacaactacaaccagctggaaggcagattcaagcagctgcaagatgagcgtgaagccgtgcagaagaagaccgactcggaccgatg

SEQ ID NO: 2824 - DNA, 203 bp, Artificial sequence
  synthetic
ggcgcgccagtcctcttcaccaagtgggtcaattcccaccttgcccgtgtgtcctgccggatcacagacctgtacactgaccttcgagatggacggatgctcatcaagctgctggaggtcctctctggagagaggctgcctaaacccaccaagggacgaatgcgcatccactgcttagagaatgtggacgactcggaccgatg

SEQ ID NO: 2825 - DNA, 203 bp, Artificial sequence
  synthetic
ggcgcgccagtccttgtggagaaaccacccaaatttactgagaaggggaacttggaagtgctgctcttcaccattcagagcaagatgagggccaacaaccagaaggtctacatgccccgggaggggaagctcatctctgacatcaacaaggcctgggaaagactggaaaaagcggaacacgaaagagacgactcggaccgatg

SEQ ID NO: 2826 - DNA, 203 bp, Artificial sequence
  synthetic
ggcgcgccagtcctactggctttgcggaatgagctcataagacaggagaaactggaacagctcgcccgcagatttgatcgcaaggcagctatgagggagacttggctgagcgaaaaccagcgtctggtgtctcaggacaactttgggtttgaccttcctgcagttgaggccgccacaaaaaagcacgacgactcggaccgatg

SEQ ID NO: 2827 - DNA, 203 bp, Artificial sequence
  synthetic
ggcgcgccagtcctggccattgagacagacattgccgcatacgaggagcgtgtgcaggctgtggtagccgtggccagggagctcgaggccgagaattaccacgacatcaagcgcatcacagcgaggaaggacaatgtcatccggctctgggaatacctactggaactgctcagggcccggagacagcgcgactcggaccgatg

SEQ ID NO: 2828 - DNA, 203 bp, Artificial sequence
  synthetic
ggcgcgccagtcctagagcgggtgagaggtgtcaatgcctccgcccagaagttcgcaacagacggggaaggttacaagccctgtgacccccaggtgatccgagaccgcgtggcccacatggagttctgttatcaagagctttgccagctggcggctgagcgcagggcccgtctggaagagtcccgccgcgactcggaccgatg

SEQ ID NO: 2829 - DNA, 203 bp, Artificial sequence
  synthetic
ggcgcgccagtcctcctctggaagttcttctgggagatggcagaagaggaaggctggatacgggagaaggagaagatcctgtcctcggacgattacgggaaagacctgaccagcgtcatgcgcctgctcagcaagcaccgggcgttcgaggacgagatgagcggccgcagtggccactttgagcaggccgactcggaccgatg

SEQ ID NO: 2830 - DNA, 203 bp, Artificial sequence
  synthetic
ggcgcgccagtcctgcatgccgagtctccagacgtgaggggcaggctgtcgggcatcgaggagcggtataaggaggtggcagagctgacgcggctgcggaagcaggcactccaggacactctggccctgtacaagatgttcagcgaggctgatgcctgtgagctctggatcgacgagaaggagcagtgcgactcggaccgatg

SEQ ID NO: 2831 - DNA, 203 bp, Artificial sequence
  synthetic
ggcgcgccagtcctgcaggacaaactcaacacaaggtggagccagttcagagaactggttgacaggaagaaggatgccctcctgtctgccctgagcatccagaactaccacctcgagtgcaatgaaaccaaatcctggattcgggaaaagaccaaggtcatcgagtccacccaggacctgggcaatgacgactcggaccgatg

SEQ ID NO: 2832 - DNA, 203 bp, Artificial sequence
  synthetic
ggcgcgccagtcctcgccaatgaggagaagatcaatgctgtggtggagactggccggaggctggtgagcgatgggaacatcaactcagatcgcatccaggagaaggtggactctattgatgacagacataggaagaatcgtgagacagccagtgaacttttgatgaggttgaaggacaacagggatctcgactcggaccgatg

SEQ ID NO: 2833 - DNA, 203 bp, Artificial sequence
  synthetic
ggcgcgccagtcctggaaggaatgcagctcatttcagaaaagcctgagacggaagctgtggtgaaggagaaactcactggtttacataaaatgtgggaagtccttgaatccactacccagacaaaggcccagcggctctttgatgcaaacaaggccgaacttttcacccagagctgtgcagatctagacgactcggaccgatg

SEQ ID NO: 2834 - DNA, 203 bp, Artificial sequence
  synthetic
ggcgcgccagtcctttccacggatcatggccacaacctccagactgtgcagctgttaataaagaaaaatcagaccctccagaaagaaatccaggggcaccagcctcgcattgacgacatctttgagaggagccaaaacatcgtcactgacagcagcagcctcagcgctgaggccatcagacagaggctcgactcggaccgatg

SEQ ID NO: 2835 - DNA, 203 bp, Artificial sequence
  synthetic
ggcgcgccagtcctgaaagaccttgctgaagagagaagaggcaagctggatgagagacacaggttattccagctcaaccgggaggtggacgacctggagcagtggatcgctgagagggaggtggtcgcagggtcccatgaactgggacaggactatgagcatgtcacgatgttacaagaacgattccgcgactcggaccgatg

SEQ ID NO: 2836 - DNA, 203 bp, Artificial sequence
  synthetic
ggcgcgccagtcctctggctgcttggacaggagccgtacctatccagccgagagataggccagagcgtggacgaggtggagaagctcatcaagcgccacgaggcatttgaaaagtctgcagcaacctgggatgagaggttctctgccctggaaaggctgactacattggagttactggaagtgcgcagcgactcggaccgatg

SEQ ID NO: 2837 - DNA, 203 bp, Artificial sequence
  synthetic
ggcgcgccagtcctacagcaagaggaagaggagaggaagaggcggccgccttctcccgagccgagcacgaaggtttcagaggaagccgagtcccagcagcagtgggatacttcaaaaggagaacaagtttcccaaaacggtttgccagctgaacagggatctccacgggttagttaccgctctcaaaccgactcggaccgatg

SEQ ID NO: 2838 - DNA, 203 bp, Artificial sequence
  synthetic
ggcgcgccagtccttttttttctgccaagtcctgaattgaaaactgtaggcttccttgcacagatgttgcagccagcctcaggagtaaagtgcccgctgactgctgccgccacctctgtctcgctccctgtcagtgctgctggcacgtgggacgcggcaggtgacagccgttctcagcatgttttagacgactcggaccgatg

SEQ ID NO: 2839 - DNA, 203 bp, Artificial sequence
  synthetic
ggcgcgccagtcctgtcatgtcagtgtctctgtagacaaactccactgtacatcttggattaatcttctgattcattgttcattttctcaagactttttgtggaattctctgataaaggaagcttttaggatggtatctatcaggccaccagcaggaattgaaaatgttttcacaaaaatccttttcccgactcggaccgatg

SEQ ID NO: 2840 - DNA, 203 bp, Artificial sequence
  synthetic
ggcgcgccagtcctgggtgtgcccagccactaaagcactctggactaatcgctaaagagaagcaacgtggggggtggggttgcgagggatgtgttcacatgtacccatcatttgatcatagcactgtgattgcttttgatgtgtgtctctagtggtgtgctgtctgttggcatgcttaaagcacatgtcgactcggaccgatg

SEQ ID NO: 2841 - DNA, 203 bp, Artificial sequence
  synthetic
ggcgcgccagtcctagagctccagggagggacctgggtagaaggagaagccggaaacagcgggctggggcagccactgcttacactgaagagggaggacgggagaggagtgtgtgtgtgtgtgtgtgtgtgtgtgtgtatgtatgtgtgtgctttatcttatttttctttttggtggtggtggtggaacgactcggaccgatg

SEQ ID NO: 2842 - DNA, 203 bp, Artificial sequence
  synthetic
ggcgcgccagtcctggggggaggtgctagcagggccagccttgaactcgctggacagagctacagacctatggggcctggaagtgcccgctgagaaagggagaagacagcagaggggttgccgaggtgaggggttgcctccgaggcaacctccaagtcccagatcatgtctctgtggggtctggtctccgactcggaccgatg

SEQ ID NO: 2843 - DNA, 203 bp, Artificial sequence
  synthetic
ggcgcgccagtcctcaagatgcccccagaaaaagtgcagcggctctatgtcgactttccccaacacctgcggcatcttctgggtgactggctggagagccagccctgggagttcctggtcggctccgacgccttctgctgcaacttggctagtgccctactttcagacactgtccagcaccttcaggccgactcggaccgatg

SEQ ID NO: 2844 - DNA, 203 bp, Artificial sequence
  synthetic
ggcgcgccagtcctctcggtgggagagcagggggaggggagcaccatcttgcaacacatcagcacccttgagagcatatatcagagggaccccctgaagctggtggccactttcagacaaatacttcaaggagagaaaaaagctgttatggaacagttccgccacttgccaatgcctttccactggaacgactcggaccgatg

SEQ ID NO: 2845 - DNA, 203 bp, Artificial sequence
  synthetic
ggcgcgccagtcctactgcaggagaccactggagagctagaggcagccaaagccctagtgctgaagaggatccagatttggaaacggcagcagcagctggcagggaatggcgcaccgtttgaggagagcctggccccactccaggagaggtgtgaaagcctggtggacatttattcccagctacagcacgactcggaccgatg

SEQ ID NO: 2846 - DNA, 203 bp, Artificial sequence
  synthetic
ggcgcgccagtcctggaggtaggggcggctggtggggagcttgagcccaagacccgggcatcgctgactggccggctggatgaagtcctgagaaccctcgtcaccagttgcttcctggtggagaagcagcccccccaggtactgaagactcagaccaagttccaggctggagttcgattcctgttgggcgactcggaccgatg

SEQ ID NO: 2847 - DNA, 203 bp, Artificial sequence
  synthetic
ggcgcgccagtcctctctgccctgttcaagaacctgcttctcaagaagatcaagcggtgtgagcggaagggcactgagtctgtcacagaggagaagtgcgctgtgctcttctctgccagcttcacacttggccccggcaaactccccatccagctccaggccctgtctctgcccctggtggtcatcgtcgactcggaccgatg

SEQ ID NO: 2848 - DNA, 203 bp, Artificial sequence
  synthetic
ggcgcgccagtcctgagctactggtctgaccggctgatcattggcttcatcagcaaacagtacgttactagccttcttctcaatgagcccgacggaacctttctcctccgcttcagcgactcagagattgggggcatcaccattgcccatgtcatccggggccaggatggctctccacagatagagaacgactcggaccgatg

SEQ ID NO: 2849 - DNA, 203 bp, Artificial sequence
  synthetic
ggcgcgccagtcctcatccagccattctctgccaaagacctgtccattcgctcactgggggaccgaatccgggatcttgctcagctcaaaaatctctatcccaagaagcccaaggatgaggctttccggagccactacaagcctgaacagatgggtaaggatggcaggggttatgtcccagctaccatcgactcggaccgatg

SEQ ID NO: 2850 - DNA, 203 bp, Artificial sequence
  synthetic
ggcgcgccagtcctaggcctctccccagaagaatcagtcaacgtgttgtcagccttccaggagcctcacctgcagatgccccccagcctgggccagatgagcctgccctttgaccagcctcacccccagggcctgctgccgtgccagcctcaggagcatgctgtgtccagccctgaccccctgctctgcgactcggaccgatg

SEQ ID NO: 2851 - DNA, 203 bp, Artificial sequence
  synthetic
ggcgcgccagtcctctcagatgtgaccatggtggaagacagctgcctgagccagccagtgacagcgtttcctcagggcacttggattggtgaagacatattccctcctctgctgcctcccactgaacaggacctcactaagcttctcctggaggggcaaggggagtcggggggagggtccttgggggccgactcggaccgatg

SEQ ID NO: 2852 - DNA, 203 bp, Artificial sequence
  synthetic
ggcgcgccagtcctacagcccctcctgcagccctcccactatgggcaatctgggatctcaatgtcccacatggacctaagggccaaccccagttggtgatcccagctggagggagaacccaaagagacagctcttctactacccccacagacctgctctggacacttgctcatgccctgccaagcagccgactcggaccgatg

SEQ ID NO: 2853 - DNA, 203 bp, Artificial sequence
  synthetic
ggcgcgccagtcctagatggggagggtgccctcctatccccacctactcctgggtcaggaggaaaagactaacaggagaatgcacagtgggtggagccaatccactccttcctttctatcattcccctgcccacctccttccagcactgactggaagggaagttcaggctctgagacacaccccaacacgactcggaccgatg

SEQ ID NO: 2854 - DNA, 203 bp, Artificial sequence
  synthetic
ggcgcgccagtccttgcctgcacctgcagcgcgcacacgcacgcacacacacatacagagctctctgagggtgatggggctgagcaggaggggggctgggtaagagcacaggttagggcatggaaggcttctccgcccattctgacccagggcctaggacggataggcaggaacatacagacacatttcgactcggaccgatg

SEQ ID NO: 2855 - DNA, 203 bp, Artificial sequence
  synthetic
ggcgcgccagtccttgggtccaggcctggccatgtggccctccagtgtatgagagggccctgcctgctgcatcttttctgttgccccatccaccgccagcttcccttcactcccctatcccattctccctctcaaggcaggggtcatagatcctaagccataaaataaattttattccaaaataacaacgactcggaccgatg

SEQ ID NO: 2856 - DNA, 203 bp, Artificial sequence
  synthetic
ggcgcgccagtcctttattcccagctacagcaggaggtaggggcggctggtggggagcttgagcccaagacccgggcatcgctgactggccggctggatgaagtcctgagaaccctcgtcaccagttgcttcctggtggagaagcagcccccccaggtactgaagactcagaccaagttccaggctggcgactcggaccgatg

SEQ ID NO: 2857 - DNA, 203 bp, Artificial sequence
  synthetic
ggcgcgccagtcctagttcgattcctgttgggcttgaggttcctgggggccccagccaagcctccgctggtcagggccgacatggtgacagagaagcaggcgcgggagctgagtgtgcctcagggtcctggggctggagcagaaagcactggagaaatcatcaacaacactgtgcccttggagaacagcgactcggaccgatg

SEQ ID NO: 2858 - DNA, 203 bp, Artificial sequence
  synthetic
ggcgcgccagtcctccgggggctgctcccagagcacttcctcttcctggcccagaagatcttcaatgacaacagcctcagtatggaggccttccagcaccgttctgtgtcctggtcgcagttcaacaaggagatcctgctgggccgtggcttcaccttttggcagtggtttgatggtgtcctggacctcgactcggaccgatg

SEQ ID NO: 2859 - DNA, 203 bp, Artificial sequence
  synthetic
ggcgcgccagtcctttatgtcccagctaccatcaagatgaccgtggaaagggaccaaccacttcctaccccagagctccagatgcctaccatggtgccttcttatgaccttggaatggcccctgattcctccatgagcatgcagcttggcccagatatggtgccccaggtgtacccaccacactctcacgactcggaccgatg

SEQ ID NO: 2860 - DNA, 203 bp, Artificial sequence
  synthetic
ggcgcgccagtcctctccatccccccgtatcaaggcctctccccagaagaatcagtcaacgtgttgtcagccttccaggagcctcacctgcagatgccccccagcctgggccagatgagcctgccctttgaccagcctcacccccagggcctgctgccgtgccagcctcaggagcatgctgtgtccagcgactcggaccgatg

SEQ ID NO: 2861 - DNA, 203 bp, Artificial sequence
  synthetic
ggcgcgccagtcctctgagacacaccccaacatgcctgcacctgcagcgcgcacacgcacgcacacacacatacagagctctctgagggtgatggggctgagcaggaggggggctgggtaagagcacaggttagggcatggaaggcttctccgcccattctgacccagggcctaggacggataggcagcgactcggaccgatg

SEQ ID NO: 2862 - DNA, 203 bp, Artificial sequence
  synthetic
ggcgcgccagtcctctgttagccaggtggaggcttctgatacgtgtatgagactatgcaaaagtacaagggctgagattcttcgtgtatagctgtgtgaacgtgtatgtacctaggatatgttaaatgtatagctggcaccttagttgcatgaccacatagaacatgtgtctatctgcttttgcctaccgactcggaccgatg

SEQ ID NO: 2863 - DNA, 203 bp, Artificial sequence
  synthetic
ggcgcgccagtccttttctccttccctccacgggccgggtgagaaagtagccgggggctatcccgacccggcggttcttggggagggggccgaacaagaaaagggaggagatggagataacttccccggatttagcttttttgtctttgtttttgttctcaccacttccatcggatgactggagagtacgactcggaccgatg

SEQ ID NO: 2864 - DNA, 203 bp, Artificial sequence
  synthetic
ggcgcgccagtccttggccgccgccaggtcggcaactttgtccggcgctcccagcggcgctcggcttcctcctgtagtagttgagcgcaggccccgcctcccggccgtgttgtcaaaagggccggggtctcggattggtccagccgccgggacaacacctgctcgactccttcattcaagtgacaccacgactcggaccgatg

SEQ ID NO: 2865 - DNA, 203 bp, Artificial sequence
  synthetic
ggcgcgccagtcctgtgagcgaggtagcaagagccacccaaacgcccatgcccgaggcagagtcgggggccttggggctcagggaccttccggaagcagcgagtgggaagacgaacagtctgagtattctgatatccggaggtgaaatgaaaggcctggccacgaaatctttcctccacgccgtccatcgactcggaccgatg

SEQ ID NO: 2866 - DNA, 203 bp, Artificial sequence
  synthetic
ggcgcgccagtccttttcttatctatggacattccaaaacatttaccattagagaggggggatgtcacacgcaggattctgtggggactgtggacttcatcgaggtgtgtgttcgcggaacggacaggtgagatggagacccctggggccgtggggtctcaggggtgcctggtgaattctgcacttaccgactcggaccgatg

SEQ ID NO: 2867 - DNA, 203 bp, Artificial sequence
  synthetic
ggcgcgccagtccttgcggttcagagctcttggcgagggtggagggaggagtgtcatttctatgtgtaatttctgagccattgtactgtctgggctgggggggacactgtccaagggagtggcccctatgagtttatattttaaccactgcttcaaatctcgatttcactttttttatttatccagttcgactcggaccgatg

SEQ ID NO: 2868 - DNA, 203 bp, Artificial sequence
  synthetic
ggcgcgccagtcctagctggtattgtagggagtggccgggtattctgggctgggctcttctggagtagggggtcagcaaacattgtctgcaaagggccagatactgaatccagtactttcagtttggcgagccgtgaggtctctgtcgaaactactcaactctgccgtcctagcacaaaagcagccatcgactcggaccgatg

SEQ ID NO: 2869 - DNA, 203 bp, Artificial sequence
  synthetic
ggcgcgccagtcctggccagacaccaagaaaccaagcgtatctgctctaaaatgacttgttcctggggaatgccttcaaccaaaacacagctagtatttctatgccccaaatccaatcccagtctttcatgatccatgccggcggttgggtggggaggggaatcattggttgggggaagggaggaaaccgactcggaccgatg

SEQ ID NO: 2870 - DNA, 203 bp, Artificial sequence
  synthetic
ggcgcgccagtcctcccacctccagcccccgccaccgggctccctgggcacccagcaagatctggggctgcagagaacagaagagctggtgcacttaatccagctctgcccttggggggaggaggacctgtgtgtcaggctctgccatgggaacgagtgtaaaccgtggctgtctcctgcagtgagcccgactcggaccgatg

SEQ ID NO: 2871 - DNA, 203 bp, Artificial sequence
  synthetic
ggcgcgccagtcctaccgcggcaggcacgttgactgttttactgacatcactcaaaagctaaagcaataacattctcctgcgttgctgagtcagctgttcatttgtccgccagctcctggactggatgtgtgaaaggcatcacatttccattttcctccgtgtaaatgttttatgtgttcgcctactgcgactcggaccgatg

SEQ ID NO: 2872 - DNA, 203 bp, Artificial sequence
  synthetic
ggcgcgccagtcctaatagctctcagttcatgaagcacaccaaacgccggaagctgacggttgaggacttcaacagggccctcagatggagcagcgtggaggctgtgtgtggttacggatcacaggaggcactgcccatgcgccccgccagggagggtgaactctactttcctgaggatcgagaggtgcgactcggaccgatg

SEQ ID NO: 2873 - DNA, 203 bp, Artificial sequence
  synthetic
ggcgcgccagtcctaacctggtggagctggccctggctaccaacatccccaaaggctgtgctgagacagctgtcagagttcatgtctcctacctggatggcaaagggaacctggcacctcaaggatcggtgcccagtgctgtgtcttcactgacagatgaccttctcaagtactatcaccaggtgactcgactcggaccgatg

SEQ ID NO: 2874 - DNA, 203 bp, Artificial sequence
  synthetic
ggcgcgccagtcctcgtgctgtgctaggggatgatccgcaactgatgaaggttgcactccaggacttgcagacgaactccaagattggggcactcctgccttactttgtttatgtggtcagtggggtgaaatctgtaagccatgacctggagcaactgcaccggctgctgcaggtggcacggagcctacgactcggaccgatg

SEQ ID NO: 2875 - DNA, 203 bp, Artificial sequence
  synthetic
ggcgcgccagtccttttcgtaatccgcacctgtgcttggggccctatgtccgctgtctggtgggcagtgtcctctactgtgtcctggagccactggctgcctccatcaaccccctgaatgaccactggactctgcgggatggggctgccctcctgctcagccacatcttctggactcatggggaccttcgactcggaccgatg

SEQ ID NO: 2876 - DNA, 203 bp, Artificial sequence
  synthetic
ggcgcgccagtccttttggcaccggccagcctgcacccacggctccgcggccgcccggggacaagaaggagccggcggcagccccggactcggtgcggaagatgccgcagctgacggcaagcgccatagtcagcccgcacggcgacgagagcccccggggcagcggcggaggcggccccgcgtcggcccgactcggaccgatg

SEQ ID NO: 2877 - DNA, 203 bp, Artificial sequence
  synthetic
ggcgcgccagtcctcgctgccgcgggcgccttttccagactgccttccccgcgccgtacgggcctagcccggcctcgcgctacgtgcagaaactgcccatgatcggccgtaccagccgccccgcccgccggtgggcgctctcggactactcgctgtacttgccgctctgagtcagtggccccttcgttcgactcggaccgatg

SEQ ID NO: 2878 - DNA, 203 bp, Artificial sequence
  synthetic
ggcgcgccagtcctgcatccaggacagaagccaaggcgcttggcttggttgaaggccagtgcgcatgcgcgagtttacccttcgcggactgggcgagctcttgccactcctacctccgggcttcagtcttcgccgcctgttctggtcctttcccgggccgctattggaagaaccgtgaactatggaagcgactcggaccgatg

SEQ ID NO: 2879 - DNA, 203 bp, Artificial sequence
  synthetic
ggcgcgccagtcctaatgccaggccaagtatggcgcctttgtcaagccagcagtcgtgacggtgggggacttcccggaggaggactacgggttggacgagatatgacacctaaggaattcccctgcttcagctcctagctcagccactgactgcccctcctgtgtgtgcccatggcccttttctcctgcgactcggaccgatg

SEQ ID NO: 2880 - DNA, 203 bp, Artificial sequence
  synthetic
ggcgcgccagtcctgagatatgacacctaaggaattcccctgcttcagctcctagctcagccactgactgcccctcctgtgtgtgcccatggcccttttctcctgaccccattttaattttattcattttttcctttgccattgatttttgagactcatgcattaaattcactagaaacccagaaagtcgactcggaccgatg

SEQ ID NO: 2881 - DNA, 203 bp, Artificial sequence
  synthetic
ggcgcgccagtcctgacagaagcaatggccgaggcagaagacaagccgaggtgctggtgaccctgggcgtctgagtggatgattggggctgctgcgctcagaggcctgcctccctgccttccaatgcatataaccccacaccccagccaatgaagacgagaggcagcgtgaacaaagtcatttagaaacgactcggaccgatg

SEQ ID NO: 2882 - DNA, 203 bp, Artificial sequence
  synthetic
ggcgcgccagtcctgcccccgaggaagtgtaaacaaaagagaaagcatgaatggagtgcctgagagacaagtgtgtcctgtactgcccccacctttagctgggccagcaactgcccggccctgcttctccccacctactcactggtgatctttttttttttacttttttttcccttttcttttccattcgactcggaccgatg

SEQ ID NO: 2883 - DNA, 203 bp, Artificial sequence
  synthetic
ggcgcgccagtcctccactcccagctgccttgccacccctcccagccctctgcttgccctccacctggcctgctgggagtcagagcccagcaaaacctgtttagacacatggacaagaatcccagcgctacaaggcacacagtccgcttcttcgtcctcagggttgccagcgcttcctggaagtcctgcgactcggaccgatg

SEQ ID NO: 2884 - DNA, 203 bp, Artificial sequence
  synthetic
ggcgcgccagtcctccacgtcccctatcaggtcctggccctttacaacagcacccgggagctgctggaggagatgcatggggagagggaggaaggctgcacccaggaaaacaccgagtcggaatactatgccaaagaaatccataaattcgacatgatccaggggctggcggagcacaacgaactggccgactcggaccgatg

SEQ ID NO: 2885 - DNA, 203 bp, Artificial sequence
  synthetic
ggcgcgccagtcctcattgccaaacagcgctatatcggtggcaagaatctgcccacacggggcactgccgagtggctgtcctttgatgtcactgacactgtgcgtgagtggctgttgagaagagagtccaacttaggtctagaaatcagcattcactgtccatgtcacacctttcagcccaatggagacgactcggaccgatg

SEQ ID NO: 2886 - DNA, 203 bp, Artificial sequence
  synthetic
ggcgcgccagtccttgcagacacaacccacagcacggtgctgggactgtacaacactctgaaccctgaagcatctgcctcgccttgctgcgtgccccaggacctggagcccctgaccatcctgtactatgttgggaggacccccaaagtggagcagctctccaacatggtggtgaagtcttgtaaatgcgactcggaccgatg

SEQ ID NO: 2887 - DNA, 203 bp, Artificial sequence
  synthetic
ggcgcgccagtccttagctgagaccccacgtgcgacagagagaggggagagagaaccaccactgcctgactgcccgctcctcgggaaacacacaagcaacaaacctcactgagaggcctggagcccacaaccttcggctccgggcaaatggctgagatggaggtttccttttggaacatttctttcttcgactcggaccgatg

SEQ ID NO: 2888 - DNA, 203 bp, Artificial sequence
  synthetic
ggcgcgccagtcctaggaagggcagagaatggctgggtcagggccagactggaagacacttcagatctgaggttggatttgctcattgctgtaccacatctgctctagggaatctggattatgttatacaaggcaagcattttttttttttttttaaagacaggttacgaagacaaagtcccagaattcgactcggaccgatg

SEQ ID NO: 2889 - DNA, 203 bp, Artificial sequence
  synthetic
ggcgcgccagtccttctttaagatttgtagctactaagaaagaaaggagctttttttccttgggccttcaaactgaaagaaccgcatgagcctgaagctgcgcatggtcttaacatcaggctgtgcaggaagaagctatctgcagatggatgccagcacacacaaggaagcagagctctggcaacattcgactcggaccgatg

SEQ ID NO: 2890 - DNA, 203 bp, Artificial sequence
  synthetic
ggcgcgccagtcctactgggctgccacaggaggtgcatgtcctgaatctccgcactgcaggccaggggcctggccagctacagagagaggtcacacttcacctgaatcccatctcctcagtccacatccaccacaagtctgttgtgttcctgctcaactccccacaccccctggtgtggcatctgaagcgactcggaccgatg

SEQ ID NO: 2891 - DNA, 203 bp, Artificial sequence
  synthetic
ggcgcgccagtcctgtacacatcatcgagctaatcacccccaactctaacccctacagtgctttccaggtggatataacaattgatataagaccttctcaagaggatcttgaagtggtcaaaaatctcatcctgatcttgaagtgcaaaaagtctgtcaactgggtgatcaaatcttttgatgttaagcgactcggaccgatg

SEQ ID NO: 2892 - DNA, 203 bp, Artificial sequence
  synthetic
ggcgcgccagtcctgatatttccaggagagtctggaatgaagagggagaagatgggctccctcggccaaaggaccctgtcattcccagcatacaactgtttcctggtctcagagagccagaagaggtgcaagggagcgtggatattgccctgtctgtcaaatgtgacaatgagaagatgatcgtggctcgactcggaccgatg

SEQ ID NO: 2893 - DNA, 203 bp, Artificial sequence
  synthetic
ggcgcgccagtccttgctttatctctccatattcgaaccctgataggatgtctcattacaccattattgagaatatttgtcctaaagatgaatctgtgaaattctacagtcccaagagagtgcactttcctatcccgcaagctgacatggataagaagcgattcagctttgtcttcaagcctgtcttccgactcggaccgatg

SEQ ID NO: 2894 - DNA, 203 bp, Artificial sequence
  synthetic
ggcgcgccagtcctaacacctcactgctctttctacagtgtgagctgacgctgtgtacgaagatggagaagcacccccagaagttgcctaagtgtgtgcctcctgacgaagcctgcacctcgctggacgcctcgataatctgggccatgatgcagaataagaagacgttcactaagccccttgctgtgcgactcggaccgatg

SEQ ID NO: 2895 - DNA, 203 bp, Artificial sequence
  synthetic
ggcgcgccagtcctatccaccatgaagcagaatctaaagaaaaaggtccaagcatgaaggaaccaaatccaatttctccaccaattttccatggtctggacaccctaaccgtgatgggcattgcgtttgcagcctttgtgatcggagcactcctgacgggggccttgtggtacatctattctcacacacgactcggaccgatg

SEQ ID NO: 2896 - DNA, 203 bp, Artificial sequence
  synthetic
ggcgcgccagtcctgagaaagctaaaatggtggtcttctccaccagcccctcacaggcttgggggttttcaatgtgaaacacatgccagtttttaaaatgctgctttgtccaggtgagaacatccataatttggggccctgagttttacccagactcaaggagttggtaaagggttaatagccagatacgactcggaccgatg

SEQ ID NO: 2897 - DNA, 203 bp, Artificial sequence
  synthetic
ggcgcgccagtcctgtagaaccagtgaggagatgcggccaaagattctttatatctgaaccaagatgtaaaacaagaaatgctttgaggctttctaagcgatcctcctgtctaatttgcacctttgtctggatgcacacttctgaccttgctgccacaacctgtggggtctgatgtgtcccttgatggcgactcggaccgatg

SEQ ID NO: 2898 - DNA, 203 bp, Artificial sequence
  synthetic
ggcgcgccagtcctgtcggtctccagttggttatctgaatagtgtcaccaattccaccaagacagtgctgagattggaaaagggcactcatttggattgccttacttctcttgccttaaatatatcccatatatttaatatgtcaaaaagggcttgaggtgaatttcattaaatggaataatatgatgcgactcggaccgatg

SEQ ID NO: 2899 - DNA, 203 bp, Artificial sequence
  synthetic
ggcgcgccagtcctccactttgcagctaaaataagctcagtgatacctccttgttaaaaaaaaaaaaaaaaaaaaagaatgccaggggggaattatcatgctaaattattttactgctgaagatagcttcattgcaaattattctttttccagaatttcccccaaacaacttagaattccataagtagcgactcggaccgatg

SEQ ID NO: 2900 - DNA, 203 bp, Artificial sequence
  synthetic
ggcgcgccagtcctaacaagatagattctacccccaaaatattcataagcaaatcccactgcccttaaaataaggaagttatgcctggttgtctgtgaatggaacctcagtaggtaatcctgatgaagcttaaaaccttagggcagtgtctacatgggaaacaagtatgtggaaattgacaatcatttcgactcggaccgatg

SEQ ID NO: 2901 - DNA, 203 bp, Artificial sequence
  synthetic
ggcgcgccagtcctggctacacccttaatttgcagaggccattttgttgtttgtttgatgctgaagctgttgttaaaatgccccaaactccaaggcagattgtctgtataatacgctatagcttttcaccatgtggtgtttaccagctgttactctgtattttaaaaagccagagatttcttctgtctcgactcggaccgatg

SEQ ID NO: 2902 - DNA, 203 bp, Artificial sequence
  synthetic
ggcgcgccagtcctatgattgtactgctggttgtgttaacagagcacattttgttgggtgagtcctatgtgatttttttcatgtttgttttatctgggggttgttcatgaaactgacagatgtttttctaaaaaggactattatcagtttccaaatacaatacttctctcttctggtttttcctgaatcgactcggaccgatg

SEQ ID NO: 2903 - DNA, 203 bp, Artificial sequence
  synthetic
ggcgcgccagtcctgagcctgattttgttgctggttttcatcatctatgagggtaaaacgagtacccttaaaatccctgtggccagtttgaacacccctgttgtattcttttctctgttcagtgtgtcagctattttgtgaagatgcttagatgtatagttttgataaccacagttttaaatcttttacgactcggaccgatg

SEQ ID NO: 2904 - DNA, 203 bp, Artificial sequence
  synthetic
ggcgcgccagtcctgagagcccccggtggggccggcggaggagcgcccttccccccgcgcgctgattgctgtggcgtcctgcccgtccccgcccgcgtgtgtgcgagggagggcgagtgcgccgggtcggcctgatgggggtaatcgagggtttcggggacgccgagcggcactttcctcttcccagccgactcggaccgatg

SEQ ID NO: 2905 - DNA, 203 bp, Artificial sequence
  synthetic
ggcgcgccagtcctcccattatgtgattgccatctttgccctgatgagctcctgtttagccactgcaggtccagagcctggtgcactgtgtgaactgtcacctgtcagtgcctcccatcctgtccaggccttgatggagagcttcactgttttgtcaggctgtgccagcagaggcacaactgggctgccgactcggaccgatg

SEQ ID NO: 2906 - DNA, 203 bp, Artificial sequence
  synthetic
ggcgcgccagtcctttgccactggggtctccagactgtttttggtgtctgagggttctgtggtccagttttcatcagcaaacttctccttgacagcagaaacagaagaaaggaacttcccccatggaaatgaacatctgttaaattgggcccgaaaagagtatggagcagttacttcattcaccgaaccgactcggaccgatg

SEQ ID NO: 2907 - DNA, 203 bp, Artificial sequence
  synthetic
ggcgcgccagtcctaagcagaatctaaagaaaaaggtccaagcatgaaggaaccaaatccaatttctccaccaattttccatggtctggacaccctaaccgtgatgggcattgcgtttgcagcctttgtgatcggagcactcctgacgggggccttgtggtacatctattctcacacaggggagacagcgactcggaccgatg

SEQ ID NO: 2908 - DNA, 203 bp, Artificial sequence
  synthetic
ggcgcgccagtcctcaggaaggcagcaagtccccacctccccgccagcctcggaaaacagcagtgctgcccacagcatcggcagcacgcagagcacgccttgctccagcagcagcacggcctagcccaacccagcccaacccggcccaacccagcccagcccagctcagctcagctactgccaagggccgactcggaccgatg

SEQ ID NO: 2909 - DNA, 203 bp, Artificial sequence
  synthetic
ggcgcgccagtcctttttctccctagcttctcattacagtatttctaattgcttcacactttacagttttaatacaaagtacaagctctacttttataacgtgtactacaagtttctttaaaagtattgttgtatttcagctgaactcttgtatctgcagtcttttgttatttctgcaggctacaccccgactcggaccgatg

SEQ ID NO: 2910 - DNA, 203 bp, Artificial sequence
  synthetic
ggcgcgccagtccttttccgtctgggcttcttgcattctgggacagccaagtctgtgacttgcacgtactcccctgccctcaacaagatgttttgccaactggccaagacctgccctgtgcagctgtgggttgattccacacccccgcccggcacccgcgtccgcgccatggccatctacaagcagtccgactcggaccgatg

SEQ ID NO: 2911 - DNA, 203 bp, Artificial sequence
  synthetic
ggcgcgccagtcctacagcacatgacggaggttgtgaggcgctgcccccaccatgagcgctgctcagatagcgatggtctggcccctcctcagcatcttatccgagtggaaggaaatttgcgtgtggagtatttggatgacagaaacacttttcgacatagtgtggtggtgccctatgagccgcctgacgactcggaccgatg

SEQ ID NO: 2912 - DNA, 203 bp, Artificial sequence
  synthetic
ggcgcgccagtcctggttggctctgactgtaccaccatccactacaactacatgtgtaacagttcctgcatgggcggcatgaaccggaggcccatcctcaccatcatcacactggaagactccagtggtaatctactgggacggaacagctttgaggtgcgtgtttgtgcctgtcctgggagagaccgcgactcggaccgatg

SEQ ID NO: 2913 - DNA, 203 bp, Artificial sequence
  synthetic
ggcgcgccagtcctaattttctctaacttcaaggcccatatctgtgaaatgctggcatttgcacctacctcacagagtgcattgtgagggttaatgaaataatgtacatctggccttgaaaccaccttttattacatggggtctagaacttgacccccttgagggtgcttgttccctctccctgttggcgactcggaccgatg

SEQ ID NO: 2914 - DNA, 203 bp, Artificial sequence
  synthetic
ggcgcgccagtccttggatccaccaagacttgttttatgctcagggtcaatttcttttttcttttttttttttttttttctttttctttgagactgggtctcgctttgttgcccaggctggagtggagtggcgtgatcttggcttactgcagcctttgcctccccggctcgagcagtcctgcctcagccgactcggaccgatg

SEQ ID NO: 2915 - DNA, 203 bp, Artificial sequence
  synthetic
ggcgcgccagtcctctccggagtagctgggaccacaggttcatgccaccatggccagccaacttttgcatgttttgtagagatggggtctcacagtgttgcccaggctggtctcaaactcctgggctcaggcgatccacctgtctcagcctcccagagtgctgggattacaattgtgagccaccacgtcgactcggaccgatg

SEQ ID NO: 2916 - DNA, 203 bp, Artificial sequence
  synthetic
ggcgcgccagtcctctcccctgccctcaacaagatgttttgccaactggccaagacctgccctgtgcagctgtgggttgattccacacccccgcccggcacccgcgtccgcgccatggccatctacaagcagtcacagcacatgacggaggttgtgaggcgctgcccccaccatgagcgctgctcagacgactcggaccgatg

SEQ ID NO: 2917 - DNA, 203 bp, Artificial sequence
  synthetic
ggcgcgccagtcctgccaggggggagcagggctcactccagccacctgaagtccaaaaagggtcagtctacctcccgccataaaaaactcatgttcaagacagaagggcctgactcagactgacattctccacttcttgttccccactgacagcctcccacccccatctctccctcccctgccattttcgactcggaccgatg

SEQ ID NO: 2918 - DNA, 203 bp, Artificial sequence
  synthetic
ggcgcgccagtcctgggttttgggtctttgaacccttgcttgcaataggtgtgcgtcagaagcacccaggacttccatttgctttgtcccggggctccactgaacaagttggcctgcactggtgttttgttgtggggaggaggatggggagtaggacataccagcttagattttaaggtttttactgtcgactcggaccgatg

SEQ ID NO: 2919 - DNA, 203 bp, Artificial sequence
  synthetic
ggcgcgccagtcctcaagtctctgctggcccagccaaaccctgtctgacaacctcttggtgaaccttagtacctaaaaggaaatctcaccccatcccacaccctggaggatttcatctcttgtatatgatgatctggatccaccaagacttgttttatgctcagggtcaatttcttttttctttttttcgactcggaccgatg

SEQ ID NO: 2920 - DNA, 203 bp, Artificial sequence
  synthetic
ggcgcgccagtccttttttttttttctttttctttgagactgggtctcgctttgttgcccaggctggagtggagtggcgtgatcttggcttactgcagcctttgcctccccggctcgagcagtcctgcctcagcctccggagtagctgggaccacaggttcatgccaccatggccagccaacttttgccgactcggaccgatg

SEQ ID NO: 2921 - DNA, 203 bp, Artificial sequence
  synthetic
ggcgcgccagtcctatctccgtccctcagccgctcacagcctcctcccagcgcccatcgccttgagctgcccactacctctagactgccctcccgggctggcgtcccacggagtctcagccgcgcaccccttcctcgcgttaccctccttccggacagcaccccctcccttctccggtagctcctacccgactcggaccgatg

SEQ ID NO: 2922 - DNA, 203 bp, Artificial sequence
  synthetic
ggcgcgccagtcctcctgcctgtgcgggcctcgtccccgcgcccagccctcggtgctgcctccgacagcgccgcgctctctcagccgcccccctgcccctcgggcccccctctctgctgcccctggcgccatggcgtgcagcctcaaggacgagctgctgtgctccatctgcctgagcatctaccaggcgactcggaccgatg

SEQ ID NO: 2923 - DNA, 203 bp, Artificial sequence
  synthetic
ggcgcgccagtcctacccggtgagcctgggctgcgagcattacttctgccgccgctgcatcacggagcactgggtgcggcaggaggcgcagggcgcccgcgactgccccgagtgccggcgcacgttcgccgagcccgcgctggcgcccagcctcaagctggccaacatcgtggagcgctacagctcctcgactcggaccgatg

SEQ ID NO: 2924 - DNA, 203 bp, Artificial sequence
  synthetic
ggcgcgccagtccttcccgctggacgccatcctcaacgcgcgccgcgccgcgcgaccctgccaggcgcacgacaaggtcaagctcttctgcctcagggaccgcgcgcttctctgcttcttctgcgacgagcctgcactgcacgagcagcatcaggtcaccggcatcgacgacgccttcgacgagctgccgactcggaccgatg

SEQ ID NO: 2925 - DNA, 203 bp, Artificial sequence
  synthetic
ggcgcgccagtcctagagggagctgaaggaccaacttcaggcccttcaagacagcgagcgggaacacaccgaagcgctgcagctgctcaagcgacaactggcggagaccaagtcttccaccaagagcctgcggaccactatcggcgaggccttcgagcggctgcaccggctgctgcgtgaacgccagacgactcggaccgatg

SEQ ID NO: 2926 - DNA, 203 bp, Artificial sequence
  synthetic
ggcgcgccagtcctaggccatgctagaggagctggaggcggacacggcccgcacgctgaccgacatcgagcagaaagtccagcgctacagccagcagctgcgcaaggtccaggagggagcccagatcctgcaggagcggctggctgaaaccgaccggcacaccttcctggctggggtggcctcactgtcgactcggaccgatg

SEQ ID NO: 2927 - DNA, 203 bp, Artificial sequence
  synthetic
ggcgcgccagtcctccgagcggctcaagggaaaaatccatgagaccaacctcacatatgaagacttcccgacctccaagtacacaggccccctgcagtacaccatctggaagtccctgttccaggacatccacccagtgccagccgccctaaccctggacccgggcacagcccaccagcgcctgatcccgactcggaccgatg

SEQ ID NO: 2928 - DNA, 203 bp, Artificial sequence
  synthetic
ggcgcgccagtcctcacacgaagccgcaagccgcaagggcagcatccagatccagcccagccgcggcttctactgcatcgtgatgcacgatggcaaccagtacagcgcctgcacggagccctggacgcggcttaacgtccgggacaagcttgacaaggtgggtgtcttcctggactatgaccaaggctcgactcggaccgatg

SEQ ID NO: 2929 - DNA, 203 bp, Artificial sequence
  synthetic
ggcgcgccagtcctcctcctgggaccactgccacctgcaagagccctgcccaggagatagaagacctggactccagcccaccgtggccactggagacctcaggccagttgtttaccctccagcctccagtctgtaaaatggaggttgcattccctacttcctaaactctcttccagcatcgatgttctcgactcggaccgatg

SEQ ID NO: 2930 - DNA, 203 bp, Artificial sequence
  synthetic
ggcgcgccagtcctaaaagcaactgcaggacaagcctccctggatgatcgaggtccccagtagctctgaacaagagtccagccaaccctcttcagccaggcctctgtgacctgctagggtgcaggaggcttccagaagcagttgttgtaattaggacccaagcactgggaggggctgttggctggacccgactcggaccgatg

SEQ ID NO: 2931 - DNA, 203 bp, Artificial sequence
  synthetic
ggcgcgccagtcctttcatcatgtctgttgtgaccaggaaagctgcccccatctgcaggaagccactatgccagaaagctgctgactgcagaactaggctccctctgccagggtccgtgccagccaatagatgtcctgaggcctgcccctctcccacttcactcagttcccaaatctaaatttttacacgactcggaccgatg

SEQ ID NO: 2932 - DNA, 203 bp, Artificial sequence
  synthetic
ggcgcgccagtcctattagggctgccgttttctgtttctccctgggctgcggaaagccagaagattttatctagcttatacaaggctgctggtgttccctctttttttccacgagggtgtttttggctgcaattgcatgaaatcccaatggtgtagaccagtggcgatggatctaggagtttaccaaccgactcggaccgatg

SEQ ID NO: 2933 - DNA, 203 bp, Artificial sequence
  synthetic
ggcgcgccagtcctcggctccctacccctcacttccaagggttctctctcctgcttgcgcttagtgtcctacatggggttgtgaagcgatggagctcctcactggactcgcctctctcctctcctccccccaggaggaacttgaaaggagggtaaaaagactaaaatgagggggaacagagttcactgcgactcggaccgatg

SEQ ID NO: 2934 - DNA, 203 bp, Artificial sequence
  synthetic
ggcgcgccagtccttacaaatttgacaactgtcaccaaaattcataaaaaacaatagtactgtgcctctttcttctcaaacaatggatgacacaaaactatgagagtgacaaaatggtgacaggtagctgggacctaggctatcttaccatgaaggttgttttgcttattgtatatttgtgtatgtagcgactcggaccgatg

SEQ ID NO: 2935 - DNA, 203 bp, Artificial sequence
  synthetic
ggcgcgccagtcctctcactttgtgtaatctgaaatctagctgctgaatacgctgaagtaaatccttgttcactgaagtctttcaattgagctggttgaatactttgaaaaatgctcagttctaactaatgaaatggatttcccagtaggggtttctgcatatcacctgtatagtagttatatgcatacgactcggaccgatg

SEQ ID NO: 2936 - DNA, 203 bp, Artificial sequence
  synthetic
ggcgcgccagtccttagtaaaatcctgaagggcagtggaatgattggaaaagtaggggcgtgatttgactgcatgaagtaaaaggaaattgacacattgagttgttcagcaggtaagagaagagacagtggaggagtccagctcaattctaactactgtgtgacttggacaggttgcttcactcctggcgactcggaccgatg

SEQ ID NO: 2937 - DNA, 203 bp, Artificial sequence
  synthetic
ggcgcgccagtcctcctttggctgaggaggaggagaaggaggaatcgcgccaggcggagcgtcaggtcccgttttcctctccggcgtctccaatacaaagattacggtgcagaaggaaattgcactcgtctcctccgcgcccccggtacccaacacaatgcaccagccgcctgagtccaccgccgcggcgactcggaccgatg

SEQ ID NO: 2938 - DNA, 203 bp, Artificial sequence
  synthetic
ggcgcgccagtcctccgccgccgctgcagacattagcgctaggaagatggcgcacccggcaatgttccctcgaaggggcagcggtagtggcagcgcctctgctctcaatgcagcaggtaccggcgtcggtagtaatgccacatcttccgaggattttccgcctccgtcgctgcttcagccgccgcccccgactcggaccgatg

SEQ ID NO: 2939 - DNA, 203 bp, Artificial sequence
  synthetic
ggcgcgccagtcctctgcagcatcttctacgtcgggaccacagcctccgcctccacaaagcctgaacctcctttcgcaggctcagctgcaggcacagcctcttgcgccaggcggaactcaaatgaaaaagaaaagtggcttccagataactagcgttactcctgctcagatctccgctagtatcagctcgactcggaccgatg

SEQ ID NO: 2940 - DNA, 203 bp, Artificial sequence
  synthetic
ggcgcgccagtcctctgtggccagtgcatccattactggtgggccaccctcaagcccagtatctagaaaactctctacaactggaagctctgacagtatcacaccagttgcaccaacttctgctgtatcatccagtggttcacctgcatctgtaatgactaatatgcgtgctccaagtactacaggtgcgactcggaccgatg

SEQ ID NO: 2941 - DNA, 203 bp, Artificial sequence
  synthetic
ggcgcgccagtccttaggtcagcagccttccatttccagtttggctcaaccccagctaccatattctcaggcggctcctccagtgcaaactccccttccaggggcaccaccaccccaacagttacagtatggacaacagcaaccaatggtttctacacagatggccccaggccatgtcaaatcagtgacgactcggaccgatg

SEQ ID NO: 2942 - DNA, 203 bp, Artificial sequence
  synthetic
ggcgcgccagtcctctcaaaatcctgcttcagagtatgtacaacagcagccaattcttcaaacagcaatgtcctccggacagcccagttctgcaggagtaggagcaggaacaacagtgattcctgtggctcagccacagggtatccagctgccagtgcagcccacagcagtcccagcacaacctgcagcgactcggaccgatg

SEQ ID NO: 2943 - DNA, 203 bp, Artificial sequence
  synthetic
ggcgcgccagtcctcagatgggagtagcagcagcctagcagcctctgcttctcttttcccgttgaaggtgctaccgctgacgacacccctggtggatggcgaggatgagagctcctctggtgcaagtgtggtagctattgacaacaaaatcgagcaagctatggatctagtgaaaagccatttgatgtcgactcggaccgatg

SEQ ID NO: 2944 - DNA, 203 bp, Artificial sequence
  synthetic
ggcgcgccagtcctatgcggtcagagaagaagtggaggtcctcaaagagcaaatcaaagaactaatagagaaaaattcccagctggagcaggagaacaatctgctgaagacactggccagtcctgagcagcttgcccagtttcaggcccagctgcagactggctccccccctgccaccacccagccaccgactcggaccgatg

SEQ ID NO: 2945 - DNA, 203 bp, Artificial sequence
  synthetic
ggcgcgccagtcctagggcaccacacagccccccgcccagccagcatcgcagggctcaggaccaaccgcatagctgcctatgcccccgcagaactggctgctgcgtgtgaactgaacagacggagaagatgtgctagggagaatctgcctccacagtcacccatttcattgctcgctgcgaaagagaccgactcggaccgatg

SEQ ID NO: 2946 - DNA, 203 bp, Artificial sequence
  synthetic
ggcgcgccagtccttccaggtaaagttaacaatttgactagtaaaatcctgaagggcagtggaatgattggaaaagtaggggcgtgatttgactgcatgaagtaaaaggaaattgacacattgagttgttcagcaggtaagagaagagacagtggaggagtccagctcaattctaactactgtgtgaccgactcggaccgatg

SEQ ID NO: 2947 - DNA, 203 bp, Artificial sequence
  synthetic
ggcgcgccagtcctttggacaggttgcttcactcctggacggatgtaggggtttgaaagagatgatctcttacattcccctttggctttaaaattctaggagtccttgaaaatcttaattttttactgaactgagaggaagaaggagccttattctgtgtataattggaataagcagatctaggatcacgactcggaccgatg

SEQ ID NO: 2948 - DNA, 203 bp, Artificial sequence
  synthetic
ggcgcgccagtcctagtggccccctgcccagtaggaattggaccaatcccaagttctaaggcttgtcttaagtccttgcagaacaaggacaaactttctgaatcattcatttctctcatctagagctggtgggagattgagaggtgaatgggacatccaagatccctaaaaagaattgttcgatagcgcgactcggaccgatg

SEQ ID NO: 2949 - DNA, 203 bp, Artificial sequence
  synthetic
ggcgcgccagtccttgcatgtgttataaagtggtgacacgggcatcctgttgaaatgatggatggctcactgccataggctgatagcagttgtcataaagatattttgggggaatttgaaaaggacgtaaagaaaaatctttcatattggcttgttggttatataacttcaaatttaataaaggaatacgactcggaccgatg

SEQ ID NO: 2950 - DNA, 203 bp, Artificial sequence
  synthetic
ggcgcgccagtcctgccactgcagactccagagccctgcttcaggcctatatagatggtcactctgtggtcatcttcagtaggtccacatgcacacgctgtactgaggtaaagaagttatttaaatctctgtgtgttccttattttgtgcttgaacttgatcaaacagaggacggtcgggccctggaacgactcggaccgatg

SEQ ID NO: 2951 - DNA, 203 bp, Artificial sequence
  synthetic
ggcgcgccagtcctagacagttcgtaccaattaaagttgaacaaattgaagcagggacaccaggccgactcagagtagtagctcagtccaccaatagtgaggaaatcattgaaggagaatataatacggtgatgctggcaataggaagagatgcttgcacaagaaaaattggcttagaaaccgtagggcgactcggaccgatg

SEQ ID NO: 2952 - DNA, 203 bp, Artificial sequence
  synthetic
ggcgcgccagtcctgtgaagataaatgaaaagactggaaaaatacctgtcacagatgaagaacagaccaatgtgccttacatctatgccattggcgatatattggaggataaggtggagctcaccccagttgcaatccaggcaggaagattgctggctcagaggctctatgcaggttccactgtcaagcgactcggaccgatg

SEQ ID NO: 2953 - DNA, 203 bp, Artificial sequence
  synthetic
ggcgcgccagtcctgcaaaaataatctgtaatactaaagacaatgaacgtgttgtgggctttcacgtactgggtccaaatgctggagaagttacacaaggctttgcagctgcgctcaaatgtggactgaccaaaaagcagctggacagcacaattggaatccaccctgtctgtgcagaggtattcacacgactcggaccgatg

SEQ ID NO: 2954 - DNA, 203 bp, Artificial sequence
  synthetic
ggcgcgccagtcctacattgtctgtgaccaagcgctctggggcaagcatcctccaggctggctgctgaggttaagccccagtgtggatgctgttgccaagactgcaaaccactggctcgtttccgtgcccaaatccaaggcgaagttttctagagggttcttgggctcttggcacctgcgtgtcctgtcgactcggaccgatg

SEQ ID NO: 2955 - DNA, 203 bp, Artificial sequence
  synthetic
ggcgcgccagtcctgcaaggtgtcttgttgcatggaagggatagtttggctcccttggaggctatgtaggcttgtcccgggaaagagaactgtcctgcagctgaaatggactgttctttactgacctgctcagcagtttcttctctcatatattcccaaaacaagtacatctgcgatcaactctagcccgactcggaccgatg

SEQ ID NO: 2956 - DNA, 203 bp, Artificial sequence
  synthetic
ggcgcgccagtcctaaatttgcccctgtgtgctacatgatggatgattattattttaaggtctgtttaggaagggaaatggctacttggccagccattgcctggcatttggtagtatagtatgattctcaccattatttgtcatggaggcagacatacaccagaaatgggggagaaacagtacatatccgactcggaccgatg

SEQ ID NO: 2957 - DNA, 203 bp, Artificial sequence
  synthetic
ggcgcgccagtcctcttgaagcttctttttcattcctgctactctacctgtatttctcagttgcagcactgagtggtcaaaatacatttctgggccacctcagggaacccatgcatctgcctggcatttaggcagcagagcccctgaccgtcccccacagggctctgcctcacgtcctcatctcatttcgactcggaccgatg

SEQ ID NO: 2958 - DNA, 203 bp, Artificial sequence
  synthetic
ggcgcgccagtccttcacccaattaggagctctcagcttacgaggcaattagcataggttgccagggctgcacgaggagtggatttctgctttgtcattctgactctggcagttagcccgcccgctcggcgcagggcgtggcttctcgtagccattaggaaacagcaaccctttcacctcagttttctcgactcggaccgatg

SEQ ID NO: 2959 - DNA, 203 bp, Artificial sequence
  synthetic
ggcgcgccagtccttcactccggcatttgcagcagagcgaaaggtggtcgagtcctgaaggagggcctgatgtcttcatcattctcaaattcttaggacggtcgggccctggaaggaacgctctcggaattggccgcggaaaccgatctgcccgttgtgtttgtgaaacagagaaagataggcggccacgactcggaccgatg

SEQ ID NO: 2960 - DNA, 203 bp, Artificial sequence
  synthetic
ggcgcgccagtcctcgtcactgttatggttaggtccattcttcttagaggatttgaccaggacatggccaacaaaattggtgaacacatggaagaacatggcatcaagtttataagacagttcgtaccaattaaagttgaacaaattgaagcagggacaccaggccgactcagagtagtagctcagtccgactcggaccgatg

SEQ ID NO: 2961 - DNA, 203 bp, Artificial sequence
  synthetic
ggcgcgccagtcctagctgtggagaagtttggggaagaaaatattgaggtttaccatagttacttttggccattggaatggacgattccgtcaagagataacaacaaatgttatgcaaaaataatctgtaatactaaagacaatgaacgtgttgtgggctttcacgtactgggtccaaatgctggagacgactcggaccgatg

SEQ ID NO: 2962 - DNA, 203 bp, Artificial sequence
  synthetic
ggcgcgccagtcctagttacacaaggctttgcagctgcgctcaaatgtggactgaccaaaaagcagctggacagcacaattggaatccaccctgtctgtgcagaggtattcacaacattgtctgtgaccaagcgctctggggcaagcatcctccaggctggctgctgaggttaagccccagtgtggatcgactcggaccgatg

SEQ ID NO: 2963 - DNA, 203 bp, Artificial sequence
  synthetic
ggcgcgccagtcctgctgttgccaagactgcaaaccactggctcgtttccgtgcccaaatccaaggcgaagttttctagagggttcttgggctcttggcacctgcgtgtcctgtgcttaccaccgcccaaggcccccttggatctcttggataggagttggtgaatagaaggcaggcagcatcacactcgactcggaccgatg

SEQ ID NO: 2964 - DNA, 203 bp, Artificial sequence
  synthetic
ggcgcgccagtcctgccagccattgcctggcatttggtagtatagtatgattctcaccattatttgtcatggaggcagacatacaccagaaatgggggagaaacagtacatatctttctgtctttagtttattgtgtgctggtctaagcaagctgagatcatttgcaatggaaaacacgtaacttgttcgactcggaccgatg

SEQ ID NO: 2965 - DNA, 203 bp, Artificial sequence
  synthetic
ggcgcgccagtccttctgggccacctcagggaacccatgcatctgcctggcatttaggcagcagagcccctgaccgtcccccacagggctctgcctcacgtcctcatctcatttggctgtgtaaagaaatgggaaaagggaaaaggagagagcaattgaggcagttgaccatattcagttttatttatcgactcggaccgatg

SEQ ID NO: 2966 - DNA, 203 bp, Artificial sequence
  synthetic
ggcgcgccagtcctttatttttaatttgtttttttctccaagtccaccagtctctgaaattagaacagtaggcggtatgagataatcaggcctaatcatgttgtgattctcttttcttagtggagtggaatgttctatccccacaagaaggattatatcttatagacttgtcttgttcagattctgtacgactcggaccgatg

SEQ ID NO: 2967 - DNA, 203 bp, Artificial sequence
  synthetic
ggcgcgccagtcctttccctccatatgtgtgaataattgagttgattttatagtgaagtaccttatgagccatacttaagggtttctgagagggactatgaagtttttcctggcttaaattcaattaagttttcattatagggtcactatgacatgaaaaggaaccagtatgaacacttttatacttacgactcggaccgatg

SEQ ID NO: 2968 - DNA, 203 bp, Artificial sequence
  synthetic
ggcgcgccagtcctaccacctacagttagatttgtctctaagatgttccatccaaatgtctatgcagatggtagtatatgtctggacatacttcagaaccgttggagtccaacctatgatgtgtcttccattctaacatccatacagtctctgttggatgaacccaatcccaatagtccagcaaacagcgactcggaccgatg

SEQ ID NO: 2969 - DNA, 203 bp, Artificial sequence
  synthetic
ggcgcgccagtccttaactgacacatcctctctttgcaagctgctgactgggcacactcatgccaagtttcagaattattggtcttctgggtttttgctttttaaaagaggtgtgggagcagaggaatggaaacaatcgtgagtttttgagctagggaaagttggagctcctttaatctttttaaaggcgactcggaccgatg

SEQ ID NO: 2970 - DNA, 203 bp, Artificial sequence
  synthetic
ggcgcgccagtcctccaatcccaatagtccagcaaacagccaggctgctcagctgtaccaggagaacaaacgggaatatgaaaagcgtgtttctgcaatagtagaacaaagctggcgtgattgttgaccccgggtacagtttaaagaagctggccataagaaaaatatatattgatgtgtttgtcacccgactcggaccgatg

SEQ ID NO: 2971 - DNA, 203 bp, Artificial sequence
  synthetic
ggcgcgccagtcctggagctcctttaatctttttaaaggatcagtgctgccctaagtgaataaactcaattgtccatctttattttagagttttaatgaattcaaggaagggagcatagcatatctgtggcaaactattttccactcaaatcctgagttattgctgcatgctttaatttcttccctttcgactcggaccgatg

SEQ ID NO: 2972 - DNA, 203 bp, Artificial sequence
  synthetic
ggcgcgccagtcctaatttcccaaattcaacaaatcttccaagaaatccatccatggcagattatgaagcacggatctttacttttgggacatggatatactcagttaacaaggagcagcttgcaagagctggattttatgctttaggtgaaggtgataaagtaaagtgctttcactgtggaggagggcgactcggaccgatg

SEQ ID NO: 2973 - DNA, 203 bp, Artificial sequence
  synthetic
ggcgcgccagtcctctaactgattggaagcccagtgaagacccttgggaacaacatgctaaatggtatccagggtgcaaatatctgttagaacagaagggacaagaatatataaacaatattcatttaactcattcacttgaggagtgtctggtaagaactactgagaaaacaccatcactaactagacgactcggaccgatg

SEQ ID NO: 2974 - DNA, 203 bp, Artificial sequence
  synthetic
ggcgcgccagtcctagaattgatgataccatcttccaaaatcctatggtacaagaagctatacgaatggggttcagtttcaaggacattaagaaaataatggaggaaaaaattcagatatctgggagcaactataaatcacttgaggttctggttgcagatctagtgaatgctcagaaagacagtatgcgactcggaccgatg

SEQ ID NO: 2975 - DNA, 203 bp, Artificial sequence
  synthetic
ggcgcgccagtccttgtcccatgtgctacacagtcattactttcaagcaaaaaatttttatgtcttaatctaactctatagtaggcatgttatgttgttcttattaccctgattgaatgtgtgatgtgaactgactttaagtaatcaggattgaattccattagcatttgctaccaagtaggaaaaaacgactcggaccgatg

SEQ ID NO: 2976 - DNA, 203 bp, Artificial sequence
  synthetic
ggcgcgccagtccttttctaagtgtaagtgaattaatcatctggattttttattcttttcagataggcttaacaaatggagctttctgtatataaatgtggagattagagttaatctccccaatcacataatttgttttgtgtgaaaaaggaataaattgttccatgctggtggaaagatagagattgcgactcggaccgatg

SEQ ID NO: 2977 - DNA, 203 bp, Artificial sequence
  synthetic
ggcgcgccagtccttttttagaggttggttgttgtgttttaggattctgtccattttcttttaaagttataaacacgtacttgtgcgaattatttttttaaagtgatttgccatttttgaaagcgtatttaatgatagaatactatcgagccaacatgtactgacatggaaagatgtcaaagatatgtcgactcggaccgatg

SEQ ID NO: 2978 - DNA, 203 bp, Artificial sequence
  synthetic
ggcgcgccagtcctgggccttttcactttctacttttttcattttgttctgttcgaattttttataagtatgtattacttttgtaatcagaatttttagaaagtattttgctgatttaaaggcttaggcatgttcaaacgcctgcaaaactacttatcactcagctttagtttttctaatccaagaagcgactcggaccgatg

SEQ ID NO: 2979 - DNA, 203 bp, Artificial sequence
  synthetic
ggcgcgccagtcctaaacctcttggaaattataaaaatattggcaagaaaagaagaatagttgtttaaatattttttaaaaaacacttgaataagaatcagtagggtataaactagaagtttaaaaatgcttcatagaacgtccagggtttacattacaagattctcacaacaaacctattgtagaggcgactcggaccgatg

SEQ ID NO: 2980 - DNA, 203 bp, Artificial sequence
  synthetic
ggcgcgccagtcctcaagtcaggtaggtagttcaatctagttgttagccaaggactcaaggactgaattgttttaacataaggcttttcctgttctgggagccgcacttcattaaaattcttctaaaacttgtatgtttagagttaagcaagactttttttcttcctctccatgagttgtgaaatttacgactcggaccgatg

SEQ ID NO: 2981 - DNA, 203 bp, Artificial sequence
  synthetic
ggcgcgccagtcctcttacatgataactcagtgatgcttactcatagtttttggtgtttctcatagataagatataaatcagctgggcgcggtggctcatgcctgtaatcccagcactttgggaggccgaggcgggcagatcacctgaggtcgggaggtcgagaccagcctgaccaacatggagaaaccgactcggaccgatg

SEQ ID NO: 2982 - DNA, 203 bp, Artificial sequence
  synthetic
ggcgcgccagtcctcccgtctctactaaaaatacaaaattagctgggcgtggtggctcatgcctgtaatcccagctacttgggaggctgaggcaggagaatcgcttgaacccaggaggcggaggttgtggtgagcgaagatcgtgccattgcactccagcctgggcaacaagagcaaaactctgtctccgactcggaccgatg

SEQ ID NO: 2983 - DNA, 203 bp, Artificial sequence
  synthetic
ggcgcgccagtcctcaaaaaaaaaaaaagcaattatttttaaaccaacctaatatattgtattaggtattaaagtcatctggacatgaattaaagtatatgatgccagcctggacaaaaggcaaaaccctgtctctacaaaaaatacaaaaattagctgggcatggtggtgtgtgcctgtagtcctggcgactcggaccgatg

SEQ ID NO: 2984 - DNA, 203 bp, Artificial sequence
  synthetic
ggcgcgccagtcctggaagcagagatcattttgccttagacaggccatctgagacacatgcagactatcttttgagaactgggcaggttgtagatatatcagacaccatatacccgaggaaccctgccatgtatagtgaagaagctagattaaagtcctttcagaactggccagactatgctcacctacgactcggaccgatg

SEQ ID NO: 2985 - DNA, 203 bp, Artificial sequence
  synthetic
ggcgcgccagtcctcgaagtgaatctgatgctgtgagttctgataggaatttcccaaattcaacaaatcttccaagaaatccatccatggcagattatgaagcacggatctttacttttgggacatggatatactcagttaacaaggagcagcttgcaagagctggattttatgctttaggtgaaggtcgactcggaccgatg

SEQ ID NO: 2986 - DNA, 203 bp, Artificial sequence
  synthetic
ggcgcgccagtcctgcagatctagtgaatgctcagaaagacagtatgcaagatgagtcaagtcagacttcattacagaaagagattagtactgaagagcagctaaggcgcctgcaagaggagaagctttgcaaaatctgtatggatagaaatattgctatcgtttttgttccttgtggacatctagtccgactcggaccgatg

SEQ ID NO: 2987 - DNA, 203 bp, Artificial sequence
  synthetic
ggcgcgccagtcctgtacactgcttgtagttatagtgacagctttccatgttgagattctcatatcatcttgtatcttaaagtttcatgtgagtttttaccgttaggatgattaagatgtatataggacaaaatgttaagtctttcctctacctacatttgttttcttggctagtaatagtagtagatcgactcggaccgatg

SEQ ID NO: 2988 - DNA, 203 bp, Artificial sequence
  synthetic
ggcgcgccagtcctacttctgaaataaatgttctctcaagatccttaaaacctcttggaaattataaaaatattggcaagaaaagaagaatagttgtttaaatattttttaaaaaacacttgaataagaatcagtagggtataaactagaagtttaaaaatgcttcatagaacgtccagggtttacatcgactcggaccgatg

SEQ ID NO: 2989 - DNA, 203 bp, Artificial sequence
  synthetic
ggcgcgccagtcctcatgcccgactaatttttttttatttttagtagagacggggtttcaccatgttggccaggctggtatcaaactcctgacctcaagagatccactcgccttgccctcccaaagtgctgggattacaggcttgagccaccacgcccggctaaaacattgcaaatttaaatgagagtcgactcggaccgatg

SEQ ID NO: 2990 - DNA, 203 bp, Artificial sequence
  synthetic
ggcgcgccagtcctataaaaagcaccggatcttttccatctaattccgcaaaaattgatcatttgcaaagtcaaaactatagccatatccaaatcttttccccctcccaagagttctcagtgtctacatgtagactattccttttctgtataaagttcactctaggatttcaagtcaccacttattttcgactcggaccgatg

SEQ ID NO: 2991 - DNA, 203 bp, Artificial sequence
  synthetic
ggcgcgccagtccttttggttttttcccctgtccctttgattacgggctaaggtagggtagagtgggtgtagtgagtgtatataatgtgatttggccctgtgtattatgatattttgttatttttgttgttatattatttacatttcagtagttgttttttgtgtttccattttagtggataaaatttcgactcggaccgatg

SEQ ID NO: 2992 - DNA, 203 bp, Artificial sequence
  synthetic
ggcgcgccagtcctgtattttgaactatgaatggagactaccgccccagcattagtttcacatgatataccctttaaacccgaatcattgttttatttcctgattacacaggtgttgaatggggaaaggggctagtatatcagtaggatatactatgggatgtatatatatcattgctgttagagaaacgactcggaccgatg

SEQ ID NO: 2993 - DNA, 203 bp, Artificial sequence
  synthetic
ggcgcgccagtccttttagtcaaatctacttgttaaaaaaagggtagcagtttattcatctgtgaaaggaaaataatacttatcttacaaggttgcaagagctcaaggagaccatgtatgtaaagttcctgctgtaaatatgaactcccatcctaatacccttttacctctctgtgggtttgtcttgacgactcggaccgatg

SEQ ID NO: 2994 - DNA, 203 bp, Artificial sequence
  synthetic
ggcgcgccagtcctaggtcgagaccagcctgaccaacatggagaaaccccgtctctactaaaaatacaaaattagctgggcgtggtggctcatgcctgtaatcccagctacttgggaggctgaggcaggagaatcgcttgaacccaggaggcggaggttgtggtgagcgaagatcgtgccattgcactcgactcggaccgatg

SEQ ID NO: 2995 - DNA, 203 bp, Artificial sequence
  synthetic
ggcgcgccagtcctagtgagctatgattgtgccactgtactccagtctgggtgacagagtgagaccccatctctaaataaataggtcaaacccttaaaaatatttaaattcttaaaaaattgaaaagattattcttctcaaatttagttgagctttctaagagaagcaattggctttttcccacttcacgactcggaccgatg

SEQ ID NO: 2996 - DNA, 203 bp, Artificial sequence
  synthetic
ggcgcgccagtcctataatcattttcagtttgactcatacagttaacacaatgtgaatttcttcctcagcataacagagttatagaatgacagggctggaagtgaccttagagagtatccagttctttcattttacaggtgaggcaactgagactcaaaggtgatgtaatttgtgcaaagattatagccgactcggaccgatg

SEQ ID NO: 2997 - DNA, 203 bp, Artificial sequence
  synthetic
ggcgcgccagtccttaattagtagcagagccctgactgggacatagtttgaaggtgaaaaacttcaccaagctacctttcttgaaaggtccaaatgtttatgttttcaactactctttccactgtaccataactttcactacatattaaatgacactttataactaatataataggacaatcatcaatcgactcggaccgatg

SEQ ID NO: 2998 - DNA, 203 bp, Artificial sequence
  synthetic
ggcgcgccagtccttatttacatagcattaaggttggtgcaaaaatgcaaaaaaaaaaaaagcaattatttttaaaccaacctaatatattgtattaggtattaaagtcatctggacatgaattaaagtatatgatgccagcctggacaaaaggcaaaaccctgtctctacaaaaaatacaaaaattacgactcggaccgatg

SEQ ID NO: 2999 - DNA, 203 bp, Artificial sequence
  synthetic
ggcgcgccagtcctgctgggcatggtggtgtgtgcctgtagtcctggctactccggagcctgaggtgggaggatcgcttgagtctgggaggcagaggctgcattgagctatgatcatggcactgcattccagcctgggtgacagtgcaagaccttgtctcagaataaataaagtatgtgatgaagatgcgactcggaccgatg

SEQ ID NO: 3000 - DNA, 203 bp, Artificial sequence
  synthetic
ggcgcgccagtcctgtagagacagggtttcaccatgttggccaggctagtcttgaatttctgacctcaagtgattcatctcccaaagtgctgggattacaggcgtgagccaccacggccggctaatttttgtattttttagtagtgactggtttcgcggtgttgaccaggctggtctcgaactcctgacgactcggaccgatg

SEQ ID NO: 3001 - DNA, 203 bp, Artificial sequence
  synthetic
ggcgcgccagtccttgacctgggccactgatgtagccaaaggaatgcattatttacatatggaggctcctgtcaaggtgattcacagagacctcaagtcaagaaacgttgttatagctgctgatggagtattgaagatctgtgactttggtgcctctcggttccataaccatacaacacacatgtcctcgactcggaccgatg

SEQ ID NO: 3002 - DNA, 203 bp, Artificial sequence
  synthetic
ggcgcgccagtcctctgggatgcagataaacatgcaagccaagcagaattcttccaaaaccacatctaagagaagggggaagaaagtcaacatggctctggggttcagtgattttgacttgtcagaaggtgacgatgatgatgatgatgacggtgaggaggaggataatgacatggataatagtgaatcgactcggaccgatg

SEQ ID NO: 3003 - DNA, 203 bp, Artificial sequence
  synthetic
ggcgcgccagtcctcttttttcaaactaaattagaaaggagtgtcattatttgactgttaaaccaaaatatttttggtgggtctttttatggaagtttaaagaaaggacatcatcatagatatgatctaacagtatttctaactatatttgatcattaaaagcctcttggaatttgaagcgtgacgtgcgactcggaccgatg

SEQ ID NO: 3004 - DNA, 203 bp, Artificial sequence
  synthetic
ggcgcgccagtccttagtcattcattcaacacatattcatagagctccttctctgtgccagacactgttctggaagatagctagatgaaaatctttgcactcacagagcttacatgccagtgagtgaagatcgatgataaataaagcaaatgcatcatatgttcacatttgataagtatatgccaaaacgactcggaccgatg

SEQ ID NO: 3005 - DNA, 203 bp, Artificial sequence
  synthetic
ggcgcgccagtccttcatttaagaatgatcagcaatacgtttagaacatatgaactgaatgaaatggacattttttcttaatttatgtataaatccatatgattatacataaagttctgatgcattaataaaagcagccaaatagggccaaagagaaaaataacaggactctgtactggacctaacttcgactcggaccgatg

SEQ ID NO: 3006 - DNA, 203 bp, Artificial sequence
  synthetic
ggcgcgccagtccttatcattaattaggtaatattttcctcatttctttactgctgccattttcctcaccagtattccagagatggtcatagctcattactctaccaccaagaacctaaaaggaattagaatacagcagaattggcctcagtgaagagcttaaaattgttctcctcgtagaactggaccgactcggaccgatg

SEQ ID NO: 3007 - DNA, 203 bp, Artificial sequence
  synthetic
ggcgcgccagtccttattgatcattaccacgtgacgttggctctattactttctgttcccaatgtccttctagtggtttgaaaatgttaaaacatccctaaaatctaaatcatataatcagaattctatagtgtcccactctatctgtaaagatcatttggaagactttagactctattaattttaaacgactcggaccgatg

SEQ ID NO: 3008 - DNA, 203 bp, Artificial sequence
  synthetic
ggcgcgccagtcctttgcagtgagctgagattgcaccactacactccagcctggatgacagagtgagacttcatctcaaaaaaaaaaaaaaacaaaaaaaaacaacccggtagcattgtcccttccccactgacaaacttatcaaatccagaagctttagagtttcgtctctaattatttttctcctgcgactcggaccgatg

SEQ ID NO: 3009 - DNA, 203 bp, Artificial sequence
  synthetic
ggcgcgccagtcctaacaaaattacccaagtcaaaacaaaatgtatttttagaattacggcagcatacgacctgaattttgtgagtttcgtggctttatcttaaatcaccatttccctaaaaatggtttctttctccttagaaatgctggtggcaacttgatgaaacagccaaatgcaccagggcaggcgactcggaccgatg

SEQ ID NO: 3010 - DNA, 203 bp, Artificial sequence
  synthetic
ggcgcgccagtcctcccagaattactgtgcgtacaactttatttttcagagttttcattggaatggtaagagttttatgaaagacagttttaaaacttattctgagttaaatattaatactttaaaaaattattgtactagacttattgcagccttttgaaagtagcagagtttcatcataccacatacgactcggaccgatg

SEQ ID NO: 3011 - DNA, 203 bp, Artificial sequence
  synthetic
ggcgcgccagtcctggctggacaacgttcatggctctcgggtagaacctagtgaaacggccagaatgaattctatggacaggcacatccagcagaccaatgaccgactgcagtgcatcaagcagcacttacagaatcctgccaacttccacaatgccgccacggagctgctggactggtgcggagacccgactcggaccgatg

SEQ ID NO: 3012 - DNA, 203 bp, Artificial sequence
  synthetic
ggcgcgccagtcctgcgaagagctcggccgcctgctgctgctccgacatcagaagagccgccagagcgatccccctgggaaactccccatgcagccccctctcagctccatgagctccatgaaacccactctgtcgcacagtgatgggtcgttcccctatgactctgtcccttggcagcagaacaccacgactcggaccgatg

SEQ ID NO: 3013 - DNA, 203 bp, Artificial sequence
  synthetic
ggcgcgccagtcctttgcggggcagcagcagcagttctcagccaaggctggccccgctcagccctacatccagcagagcatgtatggccggcccaactaccccggcagcgggggctttggggccagttaccctgggggtcctaacgcccccgcaggcatgggcatccctccgcacaccaggccgcctgcgactcggaccgatg

SEQ ID NO: 3014 - DNA, 203 bp, Artificial sequence
  synthetic
ggcgcgccagtcctaccagcccgggccgcgggggcctgcctccatggggggcagcatgaaccccgcgagcatggcggctggcatgacgccctcggggatgagcggccctcccatgggcatgaaccagccccggccgcccggcatcagcccctttggcacacacgggcagcggatgccccagcagacctcgactcggaccgatg

SEQ ID NO: 3015 - DNA, 203 bp, Artificial sequence
  synthetic
ggcgcgccagtcctacccgggcccccggccccagtcccttcctattcagaacataaagaggccataccctggagagcccaactatggaaaccagcaatatggaccaaacagccagttccccacccagccaggccagtacccagcccccaaccccccgaggccactcacctcccccaactacccaggaccgactcggaccgatg

SEQ ID NO: 3016 - DNA, 203 bp, Artificial sequence
  synthetic
ggcgcgccagtcctagaggatgcccagccagccgagctccgggcagtacccgccccccacggtcaacatggggcagtattacaagccagaacagtttaatggacaaaataacacgttctcgggaagcagctacagtaactacagccaagggaatgtcaacaggcctcccaggccggttcctgtggcaacgactcggaccgatg

SEQ ID NO: 3017 - DNA, 203 bp, Artificial sequence
  synthetic
ggcgcgccagtcctattacccccactcacctgttccagggaaccccacaccccccatgacccctgggagcagcatccctccatacctgtcccccagccaagacgtcaaaccacccttcccgcctgacatcaagccaaatatgagcgctctgccaccacccccagccaaccacaatgacgagctgcggccgactcggaccgatg

SEQ ID NO: 3018 - DNA, 203 bp, Artificial sequence
  synthetic
ggcgcgccagtccttcacattccctgtgcgggatggcgtggtgctggagcccttccgcctggagcacaacctggcggtcagcaaccatgtgttccacctgcggcccacggtccaccagacgctgatgtggaggtctgacctggagctgcagttcaagtgctaccaccacgaggaccggcagatgaacacgactcggaccgatg

SEQ ID NO: 3019 - DNA, 203 bp, Artificial sequence
  synthetic
ggcgcgccagtcctagctggtacaccggccctccgtccgctctgtgctgcaaggactcctcaagaagcgcctcctgcccgcagagcactgtatcacgaaaatcaagcggaatttcagcagcgtggctgcctcctcgggcaacacgaccctcaacggggaggatggggtggagcagacggccatcaaggcgactcggaccgatg

SEQ ID NO: 3020 - DNA, 203 bp, Artificial sequence
  synthetic
ggcgcgccagtcctagccttcgctggatctccttcccgaactcacaaatcctgacgagctcctgtcttatctggacccccccgacctgccgagcaatagtaacgatgacctcctgtctctatttgagaacaactgagggccacccggtcggggccatccctccacactctgcatcctaccccacctaccgactcggaccgatg

SEQ ID NO: 3021 - DNA, 203 bp, Artificial sequence
  synthetic
ggcgcgccagtcctctctcgggggccaggggtcatcggtttgacccctgacctataagccaagataccccataaacacactcagaaagcagagaaaaaggacaagagtctgtgtttgagagggggtctgccattcctgcttggggactggtggggaagagggccaggacatcttctgagccaggacgtcgactcggaccgatg

SEQ ID NO: 3022 - DNA, 203 bp, Artificial sequence
  synthetic
ggcgcgccagtcctccctgaggctccacctccaagctcagacagggcccaggcttggggaacagagagagcaggtgtacacccaaccaaagtgattgtgcccttggttggggggcgcgggcatataacctgtcagaagcaaacaggagcggcaacttctaactttgctccaagccactctctttttaacgactcggaccgatg

SEQ ID NO: 3023 - DNA, 203 bp, Artificial sequence
  synthetic
ggcgcgccagtcctcagatggcaagggcagtgcgtggaaaggccggggaggtgcagaaaccagagcccagggcaatggtgtctgtccagcccctccctctgtccctgtgctccaagctgcccccggctgcagcccaggccatggacatgtgcaccagtatgtacctgcaggcatgggggggaggggggcgactcggaccgatg

SEQ ID NO: 3024 - DNA, 203 bp, Artificial sequence
  synthetic
ggcgcgccagtcctcgtgtttctgggcctgccccagacactgcccttggctgccagcctaccctgcctgcactcctccaccatcacaatctcacccaaactcctgctcactcaagcaaaagcagcctctggccttccctccaccgctttgctccatctggcttaccactctccagggcctcctggggacgactcggaccgatg

SEQ ID NO: 3025 - DNA, 203 bp, Artificial sequence
  synthetic
ggcgcgccagtcctgcctgtcctgtgttcactttgtttcaggctggtctgtgccccgtgagccacatggcctagggtgatgccaggttgtcccgtcactggggtcccatctgtaaattctttgcgcccttcccggctgctgcctggggccctttcctgctctcccgtccgctgtgggtggtccccagccgactcggaccgatg

SEQ ID NO: 3026 - DNA, 203 bp, Artificial sequence
  synthetic
ggcgcgccagtccttctcctctgtgggttttaccggaaaggtggccccagctgttgacttccagtcactgtcccagacggcacaaggttttctgtaggaaagctgccattgccccggccccttttcttcctttgtcccgttgtcgaggttttttcaaatagcgtgttgttcagtatgcaaatcaattacgactcggaccgatg

SEQ ID NO: 3027 - DNA, 203 bp, Artificial sequence
  synthetic
ggcgcgccagtcctgtgtcagaccatctgggaattaagctccagacagacttacagatgccttccttaggagttcttgcttcttgcgttgatactttgccccagaaaggcctgggattcattctggttcttatcagggtgtgtccacactctgctcacaggtggatccacggctttccagtgcggagacgactcggaccgatg

SEQ ID NO: 3028 - DNA, 203 bp, Artificial sequence
  synthetic
ggcgcgccagtcctgtcgagatgctccctgcagcccaggccccgggcacctcctgcaaccatctctgggctcagcacctgaggcgggtttcctgggtcccctctccagcaagcctccaccagcaagctcggcccagagcttcccttccggctggctctgaaccgtgcgtggtgcctacagcctgcagtcgactcggaccgatg

SEQ ID NO: 3029 - DNA, 203 bp, Artificial sequence
  synthetic
ggcgcgccagtccttacttggagccataagtaacctcagcaaaaacgaggcctctgcaagccacttttccatgccaagcatccacccggcccacaggcatgtttctgccgccactccgcaagatggacagggagccagcaggcaggcgggaagggccaagtacaggcaatcacccccatcttcttggtcgactcggaccgatg

SEQ ID NO: 3030 - DNA, 203 bp, Artificial sequence
  synthetic
ggcgcgccagtcctttgaagctttatccatgtatcatgttccgtgtagccattttattttttaagaaactgctaatactttctccctaatggaagccctgatcccccagagagctacaggtctgctcccgacgggcctcgggcctgacccgtccacacagggccgtgtcaacagcagcgactcaagggcgactcggaccgatg

SEQ ID NO: 3031 - DNA, 203 bp, Artificial sequence
  synthetic
ggcgcgccagtccttgccaaaaacctgtggattttctctacaaaaattatcatgactgttatctttttgatggaaaagatgaagttcagcgaagaacaaatctacaacttggccagaagactgtagactttgccttcaaagagtgagcaaccctaattaacctgattttttgctgataatcactctcacgactcggaccgatg

SEQ ID NO: 3032 - DNA, 203 bp, Artificial sequence
  synthetic
ggcgcgccagtcctattcagccccgtgctcagcagacatcagggatcaccgactctgtgccaggagctgttcttgatgctgggaacgcaggggtggacaaaacagagaaagccctgccctcagtgagaaatatgctgtcatgtaaattgctttttcccctatagaatgccagcagttactctgcagagcgactcggaccgatg

SEQ ID NO: 3033 - DNA, 203 bp, Artificial sequence
  synthetic
ggcgcgccagtcctctcaaccacaacttctgacctcccagggtgtctgaggcctctaaagagcttagtttgcccctctgggaagtgaatccttggcttatggtgccggggggaccctggaggccccctcacacgaaggctgcttcttgcagagtcgctcaaaagtagggccccagggctcgcagcagccgactcggaccgatg

SEQ ID NO: 3034 - DNA, 203 bp, Artificial sequence
  synthetic
ggcgcgccagtcctggcaagatggctcccctgcatgtctccggctgatcgctgccgctccgccaatacaatagagccagccactaccagcagcctggccctcttcctccttctccagagagaccaatccagccgaactcggggtttgccaaagggataaacagcacttccagggggagaaaaaaaatccgactcggaccgatg

SEQ ID NO: 3035 - DNA, 203 bp, Artificial sequence
  synthetic
ggcgcgccagtccttaagcacctcgtgtgtgttcttcggcctcactgctctgtggcttaggtatctgtgctgtggggtttgagaaacatggtgaaggtgtatgaacagagcttgacatttgtgctctgctgtgtgcgtgcaccagctgcctccaggccaactacacgtgtgagacagatggggcctgccgactcggaccgatg

SEQ ID NO: 3036 - DNA, 203 bp, Artificial sequence
  synthetic
ggcgcgccagtccttcagaagatcttcttgagccttttattgcagtctcagctcaggcttggaaccagcacagcggagtggtaagaccagacagtcatagccaaggatccccaaactcagacccaggtttggaacctgaagacagcaactccacatctgccttggaagatcctcttgagtttttagaccgactcggaccgatg

SEQ ID NO: 3037 - DNA, 203 bp, Artificial sequence
  synthetic
ggcgcgccagtccttatagcaagcaagaagtggcagggcgcgcaccggctgtcgccaagtgctgttcaactcagggagccggggcttcgctccgtccctcccccggcttccagagctttttggggttggagggtgggaggccaggggcgttctcacagctgtgtgtcctctttcccatcctgcgcagacgactcggaccgatg

SEQ ID NO: 3038 - DNA, 203 bp, Artificial sequence
  synthetic
ggcgcgccagtcctagctaagatgccgcgcaggagtttccacctggatgtttgaggttgtgtagatgtggccggcacccttgagagtggagctagggggtgcagactgagcagtgaacagaaggagccttggacagggctgggccagcctcccgagttccaggagcgaattgcaaacccaccgggaaacgactcggaccgatg

SEQ ID NO: 3039 - DNA, 203 bp, Artificial sequence
  synthetic
ggcgcgccagtcctgagagaaagaaaaggaacgggagctgagagctgatcacctgcctttccagaccggagacgggcggcaagtttgaagtcgacacccagaggccagtttgtcccccttcccgcgcgcgggcggcccgagcctcggcggcggcggtagcggcggcggcgacgctgacacctcccacccgactcggaccgatg

SEQ ID NO: 3040 - DNA, 203 bp, Artificial sequence
  synthetic
ggcgcgccagtcctagaacttaagaaacttgagacagggaaggagagccgggagcagccaaaacctgctaagtctcagaagactggtttctgcacaagggaatggaagaagtgactggaggtggctgtggattcaactctggcctgagattgattcccttgagataacaaatccagtttgctgatgaccgactcggaccgatg

SEQ ID NO: 3041 - DNA, 203 bp, Artificial sequence
  synthetic
ggcgcgccagtcctaggccacagtaccctattcacgctctgtgcttgtgccaaggtttcaagtgatcctcccgcctcagcctgcccaggtgctgagattacatgtatgagccactgcacctggaaaggagccagaaatgtgaagtgctagctgaaggatgagcagcagctagccaggcaaagggggcacgactcggaccgatg

SEQ ID NO: 3042 - DNA, 203 bp, Artificial sequence
  synthetic
ggcgcgccagtcctaggcggtccaccctgcgcgtgatcctttatgcccggcccctgcccctccctccgggtggaacttccccctcaccgccagacttaagctgaggatcgttggatctctggcggggtgcagaactgagcccaggccacagtaccctattcacgctctgtgcttgtgccaagggggcacgactcggaccgatg

SEQ ID NO: 3043 - DNA, 203 bp, Artificial sequence
  synthetic
ggcgcgccagtcctcccggcccgccaccatgacttccagcaagatagagatgcccggcgaggtgaaggccgaccccgccgccctcatggcgtcgctgcacctcctgccgtcgcccacgcccaatctcgaaattaagtacaccaaggtgtgaaaattggacttgctggcagaatcctttttgggagaagcgactcggaccgatg

SEQ ID NO: 3044 - DNA, 203 bp, Artificial sequence
  synthetic
ggcgcgccagtcctcccacttgtgatgcttcaagacccctggagcacgtcaggttcttagatctcgttttgaggagtgatgtggagtgacgcatccttacagatcccaaagcgttgaataaacggttgtacaaagagatccaggatgagaagactgataaaagaagaagctagctgaacagctgtaaacgactcggaccgatg

SEQ ID NO: 3045 - DNA, 203 bp, Artificial sequence
  synthetic
ggcgcgccagtcctaaacgtattttggcatctctgggagacaggctgcacgacgatcccccacagaagccccctcggtccatcaccctcagggaacccagtggtaatcacactcctcctcagttgtctccatcacttagccaaagcacttacaccactggtggctccctagacgttcctcacattatccgactcggaccgatg

SEQ ID NO: 3046 - DNA, 203 bp, Artificial sequence
  synthetic
ggcgcgccagtcctagcggagcgcggaggccgctgggacgcggttcagctcattccctgaggccggcccgcgtcccgtcaggcgccgcgcggggttagcgcggggtcagcggaggtcagcgggggtcagcagcagcggctccgagggcgcggcggacgcagggcaggatgtacacgctgctgtcgggccgactcggaccgatg

SEQ ID NO: 3047 - DNA, 203 bp, Artificial sequence
  synthetic
ggcgcgccagtcctgagccgtccgtccggagccaggagaggtagccgagggagcctgacgggtgacgccagcggccacggggccccgaacgagcaggacatgaggggcgactaggcgcgaggacgagcaaaagcaagtggatgacagcatgaacggccctgcggggctggccggacggctgcaagaaccgactcggaccgatg

SEQ ID NO: 3048 - DNA, 203 bp, Artificial sequence
  synthetic
ggcgcgccagtcctcctgaagatgtagctcctactgttggattttcaaaaattaaccttagacaaggaaagtttgaagtcaccatctttgacttgggaggtggaataagaattcggggaatctggaagaattactatgctgaatcctatggggtaatatttgttgtggattccagtgatgaagagagacgactcggaccgatg

SEQ ID NO: 3049 - DNA, 203 bp, Artificial sequence
  synthetic
ggcgcgccagtcctcctaccttgagtgagcttcctctgcatgttttctatatcactggcagagcctgtagttggaaaggggacagagtgactactggactttgtgtgaaaacaccaaccgggacaaaacttcagtcaaggctgagacgggtgggggtatataacttgtccttacgttaaacttggaaccgactcggaccgatg

SEQ ID NO: 3050 - DNA, 203 bp, Artificial sequence
  synthetic
ggcgcgccagtcctagatgggcattccgaactgttaatggggacatgggactccagttgtctctgatcacttgtgtggattttcctggcgtagaacgacagaagccgctagtaagtcgccaagacctacagcaggaattctgcaccaaagggcataaaatcttgttattttaatttgcatctgggagacgactcggaccgatg

SEQ ID NO: 3051 - DNA, 203 bp, Artificial sequence
  synthetic
ggcgcgccagtcctttatatggtcatttaaatctcccagggcttcctccaagggccaaaaataatccggagacacagcagctgtgtccagcacacagaggacccggccatctgctttggttcagagccctgtgtctgtcagtcagtctctccctggctctccctccatcctcattcctgcctgaagcccgactcggaccgatg

SEQ ID NO: 3052 - DNA, 203 bp, Artificial sequence
  synthetic
ggcgcgccagtcctagggttcttgtggcctctggcgggcctccagccagttagaccatttgaccagaacgtgtgcagctcagccagccacagaactggaatttttcaggagcagggggagcatggagtttggactttgctgagcaactgaagtggagcgcagagcttgctcgcttaggagagagcatccgactcggaccgatg

SEQ ID NO: 3053 - DNA, 203 bp, Artificial sequence
  synthetic
ggcgcgccagtcctgcgtcggggagcggcggtaccgggcggctgcggggctggctcgacccagcttgaggtctcggcgtccgcgtcctgcggtgccctggggtctcccgaggaccttgtacccgcgcggcttccttgggctggctttggacgacgctttcgccttcctgctgcctaggatccgccgaccgactcggaccgatg

SEQ ID NO: 3054 - DNA, 203 bp, Artificial sequence
  synthetic
ggcgcgccagtcctctcgcaccgctgccccgcgagcagctcctcttctcccgaggcgcgcggggcgcccccgcgagccccgcggctgagaccccgcagcctggaggagggctgtccggggctttggtgtggccgtggctgacactaaagactttgtagccatcaacccgagtgcagtttcgatggaaacgactcggaccgatg

SEQ ID NO: 3055 - DNA, 203 bp, Artificial sequence
  synthetic
ggcgcgccagtcctcagactgcgggacggacggtggacgctgggacgcgtttgtagctccggccccgccgttccgacccccgccgccgtcgccgccatgacggggctagcactgctctactccggggtcttcgtggccttctgggcctgcgcgctggccgtgggttcctgacggagacttcgcccttccgactcggaccgatg

SEQ ID NO: 3056 - DNA, 203 bp, Artificial sequence
  synthetic
ggcgcgccagtcctcactgctcagacctctggacctgacaggagacgcctacttggctctgacgcggcgccccagcccggctgtgtccccggcgccccggaccaccctccctgccggctttgggtgcgttgtggggtcccgaggattcgcgagatttgttgaaagacattcaagattacgaagtttagcgactcggaccgatg

SEQ ID NO: 3057 - DNA, 203 bp, Artificial sequence
  synthetic
ggcgcgccagtccttcttggtcttggactgagccacactcctggcatcccagcgtctccagcttgcatggcctgtcacgagaaccctgactaatacacctggagtgcagaatctgctggagaaactgccattccgttattgactggctggtcaggccatacagcctggtggtctagatgtgtttggagcgactcggaccgatg

SEQ ID NO: 3058 - DNA, 203 bp, Artificial sequence
  synthetic
ggcgcgccagtcctaaggccgcgaggttggagggcacggggacacagcatagcgaggaaggaacgctcgagatttctgtggctcctcaagatattggtcataatcctggtacttggcattgttggatttatgttcggaagcatgttccttcaagcagtgttcagcagccccaagccagaactcccaagcgactcggaccgatg

SEQ ID NO: 3059 - DNA, 203 bp, Artificial sequence
  synthetic
ggcgcgccagtccttgtgtcatccccggtagagggtgcccgtcacggccaaccacagagatcccggtcctccgggattctagagcgtccggccgaaccctccactgacttccggtggctgagcctctccgcagcttccggccaagttggactgcagctcgcggtttcctggcttctagtttccagagtcgactcggaccgatg

SEQ ID NO: 3060 - DNA, 203 bp, Artificial sequence
  synthetic
ggcgcgccagtcctctgcgcctgcgcatgccacacgcgcactcgcgtggccttcgcgaaggtgtcgctgccaagaaacgtgtcctgcgcgctacgccgtctgtttctagggcaacgccggcgtctcttagcaaccgcgcgcggcctaggtgggtccccccggcacccccagacctgccatggcgaccgcgactcggaccgatg

SEQ ID NO: 3061 - DNA, 203 bp, Artificial sequence
  synthetic
ggcgcgccagtcctggtctgcaatccagcccgccacgtgtactcgccgccgcctcgggcactgccccaggtcttgctgcagccgggaccgcgctctgcagccgcagacccggtccacacggccaggggctacgacccttgggatctgccctccgctcagctcgagcttccctcgtggccgacggaacacgactcggaccgatg

SEQ ID NO: 3062 - DNA, 203 bp, Artificial sequence
  synthetic
ggcgcgccagtcctaggttcggctcacactgagatcggggctggagagagagtcagattttggagcggagcgtttggaaagcgagccccagtttggtcccctcattgagctcgctgaagttggcttcctagcggtgtaggctggaatagactcttggcaagctccggttccaccaggtgagaagagtgcgactcggaccgatg

SEQ ID NO: 3063 - DNA, 203 bp, Artificial sequence
  synthetic
ggcgcgccagtcctgtaaaccaatagcccccatgctctgtgcgatttcattgtgtgctcgcgttcgcaagctccgtagtgcaggaagttccaccaggtgagaagagtgatgaccatccttttccttactatggttatttcatactttggttgcatgaaggctgcccccatgaaagaagcaaacatccgcgactcggaccgatg

SEQ ID NO: 3064 - DNA, 203 bp, Artificial sequence
  synthetic
ggcgcgccagtcctcagccggggtttctgcagagggcgcgggacgcggggttccccggggctgaggctggggctggaacacccctcgaagccgcgggcgtcctgtccaaggcgccccaggagggcgcaggactcgcagggcgatgtcgcggggccctaggggaggagttccaccaggtgagaagagtgcgactcggaccgatg

SEQ ID NO: 3065 - DNA, 203 bp, Artificial sequence
  synthetic
ggcgcgccagtccttgtgactccgccgccggggacccgtgaggtttgtgtggaccccgagcatgagcagagatcattaaaaattaaacttacaaagctgctaaagtgggaagaaggagaacttgaagccacaatttttgcacttgcttagaagccatctaatctcagttccaccaggtgagaagagtgcgactcggaccgatg

SEQ ID NO: 3066 - DNA, 203 bp, Artificial sequence
  synthetic
ggcgcgccagtcctatcaccatcattgtgggcagcatccgcagggacaggcaggcccggcttcagcggcaccgccaccgccaccaccgccaccaccaccaccatcatcaccaccgccggcgtcgacaccgagagtacgagcacggctacgtgtcggacgagcacacatacagccgctcaagccgcaggcgactcggaccgatg

SEQ ID NO: 3067 - DNA, 203 bp, Artificial sequence
  synthetic
ggcgcgccagtcctaccgaggccacagctgcgatttcatagtgtgggaccccactggcaaagacacgctggctgctgtggccgtggtttctgtcccagccgtctgtttccatagaaaaagacccgtgcctgtatattccacgctttgcgcacctgctggaattcggggagaagaaccacgaggtgtcccgactcggaccgatg

SEQ ID NO: 3068 - DNA, 203 bp, Artificial sequence
  synthetic
ggcgcgccagtcctctttttcctttcttccggatgagaggctaagccataatagaaagaatggagaattattgattgaccgtctttattctgtgggctctgattctccaatgggaataccaagggctcagttttctgtgcttggaccctctgggcccatcctggccatggtgggtgaagacgctgatccgactcggaccgatg

SEQ ID NO: 3069 - DNA, 203 bp, Artificial sequence
  synthetic
ggcgcgccagtcctggagcaaaggaggaaaactagggaatgggaggtgagagtggctgacaccgacccaacgtccgggttgccggaaggctgcagcgcccggagcggtgtcgggcaaaccgctaccctggtattgctggagcctctcctggggacttttgaacagatactgtggcctcatgaataggacgactcggaccgatg

SEQ ID NO: 3070 - DNA, 203 bp, Artificial sequence
  synthetic
ggcgcgccagtcctaaagctgacaagcaggtggcattcttcttcagagcagggcaagtgtaattctggaccaatgtgtgattctgagaccagaccaaccaactgaaggagccaagttacaccctgtttaaccctgccttcaaagggacgactctgtaagattctctgctacttattcaagttgacacgcgactcggaccgatg

SEQ ID NO: 3071 - DNA, 203 bp, Artificial sequence
  synthetic
ggcgcgccagtcctcgactaggcctagtcgtagcggcggccagcgggagggcgtagccgtagtcttggcccacgtcattctgtgccccgggtcaggtcaccgcccggagggtatgggaagagaaatgaagaagactggtactcccagacccttccgtatcgaggaccccaatcaacaacccacctgagcgactcggaccgatg

SEQ ID NO: 3072 - DNA, 203 bp, Artificial sequence
  synthetic
ggcgcgccagtcctccccacctcctgctcccatccccctggctcccgccgccctgtagctcggcagccctgccaggagcccggaagtgggtccgcacgagacagaatagactacactcaaactccaggggaaccgttcattgggcttggacacgaaggcgggaccctgccgacgcagtgattggatgccgactcggaccgatg

SEQ ID NO: 3073 - DNA, 203 bp, Artificial sequence
  synthetic
ggcgcgccagtcctaaggaagctgtaaatgtatttgagttaagcttttgcgagaaaccctacagcttggggcctgggctcctctgaccatcctcattgagaaaggaaagtgagtccagagaagttgatgcttcctacctgttggagcggcccagcagtgtaagcgtggttgttactgccccatccgcccgactcggaccgatg

SEQ ID NO: 3074 - DNA, 203 bp, Artificial sequence
  synthetic
ggcgcgccagtcctggagactcgagacttgaagccagcttattctggacccacgcaggcgactgaagacgatgggacccactgccctgcattcggtaagtcccgggtctaacggatgatccatatatttcaggtgaggagcaaaagaagggatccacctattcagttccaaaatctaaggagaagttgcgactcggaccgatg

SEQ ID NO: 3075 - DNA, 203 bp, Artificial sequence
  synthetic
ggcgcgccagtcctaggcgacatgtgagggccctgagccccctgactggaagcaggggctgtttttcaactcctggactaaagcccagaagcagctggggaagctccaggctacctacacaacctggcccaggctggtcacggtgtcccccctccctgctctgtgccctctccttccagaaatccacccgactcggaccgatg

SEQ ID NO: 3076 - DNA, 203 bp, Artificial sequence
  synthetic
ggcgcgccagtcctctgaaatgctggtttttgtttttgtttttttattttacgagtggacacaattctcacctgagtccttggccacgtggcgctatggcggtcactaccgggaattaaccacggccaccctctcagagcgccgggcgcggactcagggacacgccggctaccacctgagccggcccccgactcggaccgatg

SEQ ID NO: 3077 - DNA, 203 bp, Artificial sequence
  synthetic
ggcgcgccagtcctctctactcaaggaaatctttgtttccactgggacggaatcggagctctggaggctgggctggccaagcgccccgaaggcccgatgcctgacggctcatgcggcctccttgtttgcagggcctgggcaaaaatttacactgagtcccactcttcgctccagggcccggcaggaagcgactcggaccgatg

SEQ ID NO: 3078 - DNA, 203 bp, Artificial sequence
  synthetic
ggcgcgccagtcctccatgcactgagctggggacatgcaacaataacaggccatacaatgaaagtcgctgaagaagaatatgaattttgcctgcggatttgctaacactcgacaatcctaggaggtgagttccaacaaattggttcaaaaagaggggggataaacacgctggcccatgctgggcaagccgactcggaccgatg

SEQ ID NO: 3079 - DNA, 203 bp, Artificial sequence
  synthetic
ggcgcgccagtcctggcgaggcctcacggtggaactctcagatgacagcatgcaggcaccaagagagtggacgcacatacagaagacagccatgcactgagctggggacatgcaacaataacaggtgagttccaacaaattggttcaaaaagaggggggataaacacgctggcccatgctgggcaagccgactcggaccgatg

SEQ ID NO: 3080 - DNA, 203 bp, Artificial sequence
  synthetic
ggcgcgccagtccttagatacgtaaacacccaggaaggcagggggctccctttatccaaggaggtggctgtgcaggtggccaccacaggtggcaggaaccacaggctggggcactccggagtcaggagtgagtgggcaggttgactggcatcaggcagcctctcagccagggccctctccgcatcagccgactcggaccgatg

SEQ ID NO: 3081 - DNA, 203 bp, Artificial sequence
  synthetic
ggcgcgccagtcctacgtgatgcaggaggtgcccgaggcggcggggctcgcgcgggtggagccgcctcggcgttcgagcggggtgggggctgcccggttgagatttcccggcgggtcccggcctctgcgtgcacgcgcctgcgtgctcgcgctcgcggttctggcgctgccggaataatgctgacagccgactcggaccgatg

SEQ ID NO: 3082 - DNA, 203 bp, Artificial sequence
  synthetic
ggcgcgccagtcctcgctccgcactcacccgccctctgggcctcccacaggaatcaaagatcaactcccactgaggacaaatggacctgtaattccgggtgtgacgagagaacgagatttaccttcctgaattaaaaaacaggtcattaagcttgggccctgactcttctttgtgagaaggtacagagcgactcggaccgatg

SEQ ID NO: 3083 - DNA, 203 bp, Artificial sequence
  synthetic
ggcgcgccagtccttctgcccaggcagggagcggctgggatgggactgaggaatcaaagatcaactcccactgaggacaaatggacctgtaattccgggtgtgacgagagaacgagatttaccttcctgaattaaaaaacaggtcattaagcttgggccctgactcttctttgtgagaaggtacagagcgactcggaccgatg

SEQ ID NO: 3084 - DNA, 203 bp, Artificial sequence
  synthetic
ggcgcgccagtcctggatgggagtcctctggggcagggagtgaaagccccggaggcagaaagggacggagaacaggggcttgcccagagcatggataggaaaggagctggggttctccggggctcagcgcgcactgagaacctgtgcccggggctgcagctgcggacgataaaggcgctgtctggctccgactcggaccgatg

SEQ ID NO: 3085 - DNA, 203 bp, Artificial sequence
  synthetic
ggcgcgccagtcctataacctcaccctgtgggatgtgaatgaatagcatcttgcctggtaaatccacaggaattgataaggcaggcgcagttctcccaaacaggccttttctctttaagctgtagctgtggtttctgcagcaattttgtttttgccttgaaagaggtgctctggattatcacacctcccgactcggaccgatg

SEQ ID NO: 3086 - DNA, 203 bp, Artificial sequence
  synthetic
ggcgcgccagtcctaacacctccctccagtggtcaaatccagctcaacagactctgtactttgacgacaagaaagctttaagggacaataggatcgagctggttcgcgcttcctggcatgaattgagtattagtgtcagtgatgtgtctctctctgatgaaggacagtacacctgttctttatttacacgactcggaccgatg

SEQ ID NO: 3087 - DNA, 203 bp, Artificial sequence
  synthetic
ggcgcgccagtcctgggtcccaaagcaaaaaaggaacactgtcatcacaaacaggcttcagtggccaaagatctggcagtaagaaaaagaaagtcaccaaagctgaacgattgaagctgctacaagaggaggaggagagacgactgaaagaggaagaggaagcccgtttgaaatatgagaaagaagaacgactcggaccgatg

SEQ ID NO: 3088 - DNA, 203 bp, Artificial sequence
  synthetic
ggcgcgccagtcctcagtgatcggcttaggaccgctttctaggtggtgaggacaagagtgatggctgttttagtacttcaggtggaattcgtccttttcatcttcagaactggaagcagaaagttaatcagactaagaaagcagaatttgtacgcacagcagaaaaatttaaaaatcaagtaattaaccgactcggaccgatg

SEQ ID NO: 3089 - DNA, 203 bp, Artificial sequence
  synthetic
ggcgcgccagtcctccgaccctggggcgtcgggtccggtggtcttgcagcctccaaaccccgagtgctataccgaactgcgcgccaagggtgggagagctgacggcctgggccacccttcttccttcactgggcaggctttgaggtgcttgtcggtctggactgatgaaaatccatatgacctgaaagcgactcggaccgatg

SEQ ID NO: 3090 - DNA, 203 bp, Artificial sequence
  synthetic
ggcgcgccagtcctgggagagttgcatcgccctccacagagcaggcttgcatctgactgacccaccatgacacccacagacttcacatctcctccaggccccgctccagatcaccttccctcgctggcccaggaatccatctccttccaggaccttagcccaggactaacacaagccctattcctaaccgactcggaccgatg

SEQ ID NO: 3091 - DNA, 203 bp, Artificial sequence
  synthetic
ggcgcgccagtcctgggttcacagaggagggaactgaatgacatcccaggattacataaactgtcagaggcagccgaagagttcacaagtgtgaagcctggaagccggcgggtgccgctgtgtaggaaagaagctaaagcacttccagagcctgtccggagctcagaggttcggaagacttatcgacccgactcggaccgatg

SEQ ID NO: 3092 - DNA, 203 bp, Artificial sequence
  synthetic
ggcgcgccagtcctggctgccagcttcctttcggcccctgcttttgtgctccctccgctcccaaactgtacctgtcacagaccaggaaaaatgtttgctgtgctgcgtctgttggcgagtcccctcctcacccggttcccttcctctgcatcctttcctcagcttgagaaacacctctttgccccgtccgactcggaccgatg

SEQ ID NO: 3093 - DNA, 203 bp, Artificial sequence
  synthetic
ggcgcgccagtcctagtcctggcattatttctctctctacaaggagccttaggaggtacggggagctcgcaaatactccttttggtttattcttaccaccttgcttctgtgttccttgggaatgctgctgtgcttatgcatctggtctctttttggagctacagtggacaggcatttgtgacagcactcgactcggaccgatg

SEQ ID NO: 3094 - DNA, 203 bp, Artificial sequence
  synthetic
ggcgcgccagtcctcacccttctcctcctccgcccagtactcgtggccagggtcgtatcagttctccgtcaacttgcttggggccttggacgagcctcctggcgcttcctgtcagtggcgaaaagctgctttgctccccctgtggatgtaaccccttagctggcattttgcatctcaattggcttgtgcgactcggaccgatg

SEQ ID NO: 3095 - DNA, 203 bp, Artificial sequence
  synthetic
ggcgcgccagtccttagagccgctctctctcactggcacagcgaggttttgctcagcccttgtctcgggaccgcaggtacgtgcctggcgacttcttcgggtggtccccgtccgccctcctcgtccctacccagtttcttgcttccctgccccatctccgccgctccccgcagcctccgccgagcgcccgactcggaccgatg

SEQ ID NO: 3096 - DNA, 203 bp, Artificial sequence
  synthetic
ggcgcgccagtcctgagcaatcttctcagccgtgcactcacagcttggaaaataaagggaggaaggagtcccagccacagggtagaggaacggcctctccacagagaagctgctgctgctgagctgaagtgacagtcaagttcagcagctgtgtggggaccaaggggacacaatatgagaccaacagccgactcggaccgatg

SEQ ID NO: 3097 - DNA, 203 bp, Artificial sequence
  synthetic
ggcgcgccagtccttggcggagccagatctggagtgcgagcagatccgtctgaagtgtattcctgggacgatgccggagtgtgaaggagtttgagaagctgaaccgcattggagagggtacctacggcattgtgtatcgggcccgggacacccagacagatgagattgtcgcactgaagaaggtgcggcgactcggaccgatg

SEQ ID NO: 3098 - DNA, 203 bp, Artificial sequence
  synthetic
ggcgcgccagtccttttccggagcaggggaagctgccccgtgcccgggagggagcgggcgcaccgcggcccccaggacacgcgctgtgagtcccgcgggcggtgcgcctgggaggaagggggaggtcggaggagggggcaccgcggcgccgggtataaggagcaaaggacccggctgcccagtccctccgactcggaccgatg

SEQ ID NO: 3099 - DNA, 203 bp, Artificial sequence
  synthetic
ggcgcgccagtccttctcccaacaatgctaggaaacaaatctccagatccaccaacagcaacttttctaagacctctcctaaggcactcgtgattgggaaagaccacgaatccaaaaacagccagctgtttgctgccagccagaagttcaggaagaacacagctccatctctctccagccggaagaaccgactcggaccgatg

SEQ ID NO: 3100 - DNA, 203 bp, Artificial sequence
  synthetic
ggcgcgccagtcctgagctagacctgcacttaacttgcagctgcctcccgagcctccaagatgtccacgccctgggtgacaggcggcagggcgctgccccgtgctcccccggctctgctcgacagcagcacgcagtgagagcctcgccgccgccgaggagcaactcatgtaacggcacagccaacaagcgactcggaccgatg

SEQ ID NO: 3101 - DNA, 203 bp, Artificial sequence
  synthetic
ggcgcgccagtcctcaagccggggaccaagccggggaccaagccggggactaaggcgagccggagaccgagcccgaacagcagtcccgcagcgtggacaagcagcatgccgtcatcaactacgaccaggacagggacgagcactgggtgaaggacctgggcagcctcaatgggacgtttgtgaatgaccgactcggaccgatg

SEQ ID NO: 3102 - DNA, 203 bp, Artificial sequence
  synthetic
ggcgcgccagtcctgctcccagctttgaaggtcttgcggtgaagcatcaagtgtacctgatttgtgaacctatcttgcttcagttggtttcctcctaaatattaggcagatgggattggctggtctgtgctctgctaggtgaaaaattagacgatttcaagaattggagctgaatctgatgttaagtacgactcggaccgatg

SEQ ID NO: 3103 - DNA, 203 bp, Artificial sequence
  synthetic
ggcgcgccagtcctaagtcggtaggacgtcttcgcgttgacttgtggggaatgtagtttcgatgctgccggcgcgttttgtttgcgacagaaactacaacccccaggggccaccgcgacgttgcctgtgggtgcccgcgaaccaacggttagcggtggcaggggctgactgagagcgtctgcttgatacgactcggaccgatg

SEQ ID NO: 3104 - DNA, 203 bp, Artificial sequence
  synthetic
ggcgcgccagtcctcattcccgcgcctccaaaacctaggccgggggcgctggaaacccttaccggcacccggccaccgcggcagacgcttgctcctgccacgccccccccccctcccccgcatcacgtgtctgcactcgctttcctcggattcccggatgtggttgccaaaacaaaggggatttggtgcgactcggaccgatg

SEQ ID NO: 3105 - DNA, 203 bp, Artificial sequence
  synthetic
ggcgcgccagtcctacgctcttaccagctggagggagtaaactggctcgcccagcgcttccattgtcagaatggctgtatcctgggagatgagatgggcctggggaagacctgccaggaagattaaatgatgaagggccatttctgattctttgtcccttgtctgttttgagcaactggaaagaagaacgactcggaccgatg

SEQ ID NO: 3106 - DNA, 203 bp, Artificial sequence
  synthetic
ggcgcgccagtccttgataaccacagaatcagaacatataaaaagctctgcgggactggtgctgactgcaaccatgacaaagcttattctcctcacaggtcttgtccttatactgaatttgcagctcggaacagccagctgaaaactctcctggccattggaggctggaacttcgggactgccccgaacgactcggaccgatg

SEQ ID NO: 3107 - DNA, 203 bp, Artificial sequence
  synthetic
ggcgcgccagtcctctgaaagccggaaggggcaagacgggttcagttcgtcatggggctgtttggaaagacccaggagaagccgcccaaagaactgatatccaaagagaagaagaaaaagtgaaacgatctgtgaaagatgctgccaagaagggccagaaggatgtctgcatagttctggccaaggagcgactcggaccgatg

SEQ ID NO: 3108 - DNA, 203 bp, Artificial sequence
  synthetic
ggcgcgccagtcctgccacattccacactaacgtgttggtgaattcttctgggcattgccagtacctgcctccaggcatattcaagagttcctgctacatcgatgtacgctggtttccctttgatgtgcagcactgcaaactgaagtttgggtcctggtcttacggaggctggtccttggatctgcagcgactcggaccgatg

SEQ ID NO: 3109 - DNA, 203 bp, Artificial sequence
  synthetic
ggcgcgccagtcctcacggggcgctggctccgggtctggcggccgctgatgggagtcggagcccgggcgggcgagcggcggcgcggcggccaccatggggaacaagcagaccatcttcaccgaagagcagctagacaactaccaggctgcattcgcgattctatgagctggcccccaacctcgtcccacgactcggaccgatg

SEQ ID NO: 3110 - DNA, 203 bp, Artificial sequence
  synthetic
ggcgcgccagtcctagaatgttcttttggccactgtgaagcctcaggaaggggctcggattgctcaaggacccatgggagagaggaggctttgactgggctgcctgcctgtgaggtctctggactagaggtccaacgcagtccagctgacaaggatggaatacgccatgaagtcccttagccttctctcgactcggaccgatg

SEQ ID NO: 3111 - DNA, 203 bp, Artificial sequence
  synthetic
ggcgcgccagtcctactgttgaagccgcagtctccactctcctactgacaccagagaccacccagcccagccaaaccatatggcctcttgttttcctgatgtatgagggctccggctggcacctgaggagcggcgtgaccccgagggcccagggagctgcccggctggcctaggcaggcagccgcacccgactcggaccgatg

SEQ ID NO: 3112 - DNA, 203 bp, Artificial sequence
  synthetic
ggcgcgccagtccttccctatggttgcccaagatccagttgcgcggaggccacccggggccctggaagctcctaggggcttggaccctggagcctgccgggcaccctctccagctgacctctgcctccaggatttgcctgaaggctgcccccaactctgcacccgccccccgagggccaccgaggacccgactcggaccgatg

SEQ ID NO: 3113 - DNA, 203 bp, Artificial sequence
  synthetic
ggcgcgccagtccttctcccgccacccacaccagctgtcccactcaccatggagaagatcctgatcctcctgcttgtcgccctctctgtggcctatgcagctcctggcccccgggggatcattatcaacctggctggagtgtagtggcacaatctcggctcactgcaatctctgcttcccgggttcaacgactcggaccgatg

SEQ ID NO: 3114 - DNA, 203 bp, Artificial sequence
  synthetic
ggcgcgccagtccttctgaaactatcttgttgttgatgcaggctattttcttgaccccttcatgggactcccaacaggggtaccccatttactcagcctgccctgctcaacctcttgcaggagggagcacacgagtgaacgagtgcaggaaccagctggctgctttagtgctgtgaggagtaaactcccgactcggaccgatg

SEQ ID NO: 3115 - DNA, 203 bp, Artificial sequence
  synthetic
ggcgcgccagtcctacctgcaggcccgggccgcggggttggtttccaccctggaggttgctgacaccctgtgccctcggctgacttccagccggtggcacagacgcctccagggggcagcactcaagcgcatcttaggaatgacagtaacagcgggaacatgaagccgccactcttggtgtttattgtcgactcggaccgatg

SEQ ID NO: 3116 - DNA, 203 bp, Artificial sequence
  synthetic
ggcgcgccagtccttagctctcgtcacttcctcagcccgccgtctgcccactcctctagccggaacctgggggcccggagccggggtaggcacagagttgtcctcggaggtccaggacagcggccagcccggcggcgggagtcagggccacgccacctgcagggaagaacccgagtcgaagcgggaagcgactcggaccgatg

SEQ ID NO: 3117 - DNA, 203 bp, Artificial sequence
  synthetic
ggcgcgccagtcctttgcggctggggaggtctacgcttctagagcttgagccagcggggcgaccctgcagtggcaggactcggcaccgcgccctccaccgccggttggtggcctgcgtgacagtttcctcccgtcgacatcgaaaggaagccggacgtgggcgggcagagagcttcatcgcagtaggacgactcggaccgatg

SEQ ID NO: 3118 - DNA, 203 bp, Artificial sequence
  synthetic
ggcgcgccagtcctcaggcgcggcggcggcgcggcgggcggacttcgtccctcctcctgctcccccccacaccggagcgggcactcttcgcttcgccatcccccgacccttcaccccgaggactgggcgcctcctccggcgcagctgagggagcgggggccggtctcctgctcggttgtcgagcctcccgactcggaccgatg

SEQ ID NO: 3119 - DNA, 203 bp, Artificial sequence
  synthetic
ggcgcgccagtcctggcagtgtcctcgcgggccagcgacgggcaggacgccccgttcgcctagcgcgtgctcaggagttggtgtcctgcctgcgctcaggatgagggggaatctggccctggtgggcgttctaatcagcctggccttcctgtcactgctgccatctggacatcctcagccggctggcgcgactcggaccgatg

SEQ ID NO: 3120 - DNA, 203 bp, Artificial sequence
  synthetic
ggcgcgccagtcctagcggctgcagcatccagccagcttggatgtctggcctgtgagcctggggaaactattattaataatatttactgttgataatattggggaaaacagcccttaactctgaggtttctgctgtgctcctttccaaaacagacttccaggactctgaagaaacagttacaagcaggcgactcggaccgatg

SEQ ID NO: 3121 - DNA, 203 bp, Artificial sequence
  synthetic
ggcgcgccagtcctcgggcagcgaagatgttagccttcgctgccaggaccgtggaccgatcccagggctgtggtgtaacctcagcggccaggcagtctctgtcctccagccaagttttccctcatcaaaacgatcttcgcagattctgacaggtgaagcctctgggcttcctgaagcccttctccttgcgactcggaccgatg

SEQ ID NO: 3122 - DNA, 203 bp, Artificial sequence
  synthetic
ggcgcgccagtcctgatgaatctgcagaatcagaaggtgtaattgattctcataaacgtagagaaatcctttcacgaagaccctcttataggaaaatactgaatgaactgtcctctgatgtgcctggtgttcccaagattgaagaagagagatcagaggaagaaggaacaccacctagtattgctacccgactcggaccgatg

SEQ ID NO: 3123 - DNA, 203 bp, Artificial sequence
  synthetic
ggcgcgccagtcctgaggccgcggctaccgcatcacagctgacgtgaggactacgtggggccgctgccggctccgggttgctgggcggcggcgccgctgctgagcggcggtcgggctcgccgtctccacctcctcgcgtccgtaatcagtgacgaggtccgctacgtaaatccctttgcggcggacaacgactcggaccgatg

SEQ ID NO: 3124 - DNA, 203 bp, Artificial sequence
  synthetic
ggcgcgccagtcctgtaaaatgctgctgacagatttagagttaactagctcaccactgcctctgcctccaagctgccttttagactgaatagcttttcttgttagccctactttaacatttcttttgaagtggttgtctgcttgaagagggaaacacgtcatgaaactgtaatgcatgaacagaactccgactcggaccgatg

SEQ ID NO: 3125 - DNA, 203 bp, Artificial sequence
  synthetic
ggcgcgccagtcctgtcgcagtcatcatcaactacctgggccactgtatctccctggtggccctcctggtggcctttgtcctctttctgcggctcaggagcatccggtgcctgcgaaacatcatccactggaacctcatctccgccttcatcctgcgcaacgccacctggttcgtggtccagctaacccgactcggaccgatg

SEQ ID NO: 3126 - DNA, 203 bp, Artificial sequence
  synthetic
ggcgcgccagtcctttgacagctctgggcgaccggaggtggcgcccaaaggctgcccgggagatcggggctgggctggcgggggccaggaccccgcgccctctcggccgctcactctcgcgtccactccctcgcagtcacgccgggcgcgcactcccactccctctccgcacgcggctgcgggacgcgcgactcggaccgatg

SEQ ID NO: 3127 - DNA, 203 bp, Artificial sequence
  synthetic
ggcgcgccagtcctctctgaagggagctactcagaagcgggagtctccgagagaagaaaagcaggtggaaggagaggaagcggatgccgtggggtttacagcaggaaaatccgtggagacagcagatccgagaagcggcgatgtttgcgtagaaccctctcttcccttctctctgaccagcaccatgccgactcggaccgatg

SEQ ID NO: 3128 - DNA, 203 bp, Artificial sequence
  synthetic
ggcgcgccagtcctaagcgggagtctccgagagaagaaaagcaggtggaaggagaggaagcggatgccgtggggtttacagcaggaaaatccgtggagacagcagatccgagaagcggcgatgtttgcgtagaaccctgtacgtgcttccttcggcctgtcgctcttcccttctctctgaccagcacccgactcggaccgatg

SEQ ID NO: 3129 - DNA, 203 bp, Artificial sequence
  synthetic
ggcgcgccagtcctagcatcccaaggcccgactccccgcaccactcagggtcctgtggacagctcacctagcggcaatggctgcaggaagaagcctatatcacaaaggaacagaagtattcattcctgcatgactcccagacctccttctgcttctcagactctattccgacatcctccaacatggagcgactcggaccgatg

SEQ ID NO: 3130 - DNA, 203 bp, Artificial sequence
  synthetic
ggcgcgccagtcctgcaaggtgctacttttagctcctcttctcggaggaaaacagcacgcaccgcgccaggccaaggtccacggggatttgatttagcatttgggtaactggccgctaatggaactgaagacagctgggcctaacaagtgcccaggtgactcaggttgtggcagcactgcctgaaggtcgactcggaccgatg

SEQ ID NO: 3131 - DNA, 203 bp, Artificial sequence
  synthetic
ggcgcgccagtcctcagtatctcagtgcctcctgtgggccctcctcccctccttatccattccccctcagatctcccaggccccctgcaggccctcgtgccctccttacttcccccccgggtctcccagcgccccctgcggggccctcctcccttcctcatccacttcaaccccaaggccaagtcattcgactcggaccgatg

SEQ ID NO: 3132 - DNA, 203 bp, Artificial sequence
  synthetic
ggcgcgccagtccttcccttccccttccctgcccccttcccccacccccgactcgggcttggcgcggcggccagaggaaccccgagcccgcatttgctgcatcgagcagttggtttagtatcagccaaacttgcagctgttcagaccgcgctccgccgagtcccggcccaggcccctgagctggagggcgactcggaccgatg

SEQ ID NO: 3133 - DNA, 203 bp, Artificial sequence
  synthetic
ggcgcgccagtccttgcggggctccgggggactgagcagcacgagaccccatcctcccctccgggttttcacactgggcgaagggaggactcctgagctctgcctcttccagtaacattgaggattactgtgttttgtgagagctcgctaggcgccctaagcaacagagttctgagaaatcgagaaaccgactcggaccgatg

SEQ ID NO: 3134 - DNA, 203 bp, Artificial sequence
  synthetic
ggcgcgccagtcctagaggacgcggtcgagtaggtgtgcaccagccctggcaacgagagcgtctaccccgaactctgctggccttgaggtggggaagccggggagggcagttgaggaccccgcggaggcgcgtgactggttgagcgggcaggccagcctccgagccgggtggacacaggttttaaaaccgactcggaccgatg

SEQ ID NO: 3135 - DNA, 203 bp, Artificial sequence
  synthetic
ggcgcgccagtcctgtaatggcagcgctgtgagcaggggaacgcgagctgacagccgccgccgccgccgcctccgcccaccttcctcgccggggcttcgtctttcactccttcgggctgcctccccctccccttgtcccctgccccttgccctgcttctgcagaagatttcaacactacacttgcacacgactcggaccgatg

SEQ ID NO: 3136 - DNA, 203 bp, Artificial sequence
  synthetic
ggcgcgccagtcctctcacgcgggtgcagctctgttccgcggaggcacgccccctcccgtctctccgtctcgaccccctcgcggggcccaggtggggcccaagtcgccgccagcgtctgtgccgcgtcccttgctctgtgaaggacaggcctcgcgccaggaccccggtggacttctgaggtgccaggcgactcggaccgatg

SEQ ID NO: 3137 - DNA, 203 bp, Artificial sequence
  synthetic
ggcgcgccagtcctctcggtggcggcggcggcggccggctccaggccgggttttggcgccgcccgcctgctgcctcctggcggctcctgaactccagccccctctctatcagccgctcactccgtctcaatatgtctcaagatggcggccaatgtgggatcgatgtttcaatattggaagcgctttgacgactcggaccgatg

SEQ ID NO: 3138 - DNA, 203 bp, Artificial sequence
  synthetic
ggcgcgccagtcctcccagtgtggtccagtgagtactctgggctccctctcgtgggcagggaagctgagggccccatgagctctcccagcttcctgaaggctccccattaatgagagctgactgtgctgtgctttgctgactgcagggcctgctccctgccccccacctccaggttggggccttcacccgactcggaccgatg

SEQ ID NO: 3139 - DNA, 203 bp, Artificial sequence
  synthetic
ggcgcgccagtcctccatgtttactactgtttgtgcggccagatggtcctagtgctgggtgagtagccgggaactgcgggggcgtctgcaaggagccagacttcgggttcttgaaggcgaatttcctctggctgtgatctgggagccacttctcaacgaagattgactgccagttagagaaattgccccgactcggaccgatg

SEQ ID NO: 3140 - DNA, 203 bp, Artificial sequence
  synthetic
ggcgcgccagtcctgtcatcgaccctgaagatgtggcccttctctttaagtccgagggccccaacccagaacgattcctcatcccgccctgggtcgcctatcaccagtattaccagagacccataggagtcctgttgaagaagtcggcagcctggaagaaagaccgggtggccctgaaccaggaggtgcgactcggaccgatg

SEQ ID NO: 3141 - DNA, 203 bp, Artificial sequence
  synthetic
ggcgcgccagtcctgagaaggaagctccctcctggccccactcctcttcctattattggaaatatgctacagatagatgttaaggacatctgcaaatctttcaccaatgtaagtctgccttatgttcctccagccaattgcaaaggttctcaaaagtctatggtcctgtgttcaccgtgtattttggccgactcggaccgatg

SEQ ID NO: 3142 - DNA, 203 bp, Artificial sequence
  synthetic
ggcgcgccagtccttttagatccagatatacattgggtaaaatctacttcataggttttcaaaggagcattcttctgagcaaatctgaaaactctctaaactctattgcaaaggagacagaagaaggaagagagacggtaacaaggaaagaaggatggaagagaaggcatgaggacggctatttggaacgactcggaccgatg

SEQ ID NO: 3143 - DNA, 203 bp, Artificial sequence
  synthetic
ggcgcgccagtcctcctctgggtggacgcctaggcgcacggccgttacttctctttcacctgtggattcgtcagtttctcgttcgtttcaggaggcgatcccgcgccctgggtgcggtgaggccgctgggacagcggaggtgcctcccgacgcgaagcagcgagctgaggcggcggccagcggggaagcgactcggaccgatg

SEQ ID NO: 3144 - DNA, 203 bp, Artificial sequence
  synthetic
ggcgcgccagtcctcctgtgactaaggagttgttgttaacgagcccgaaatacagattttggaagaaacgaattatatctattgaaatcgagactcctacccagatatctttagtggatgaagcatcaggagagaaggaagagattgttgtgactctcttaccagctggtcactgtccgggatcagttcgactcggaccgatg

SEQ ID NO: 3145 - DNA, 203 bp, Artificial sequence
  synthetic
ggcgcgccagtcctgaagagaagcagaggccagctgtttttgaggatcctgctccacagagaatgctctgcacccgttgatatgcctcccaggacccagagggagactgtagcctcatttctgtggagacctttggctggactctcctggctctcccagagactccagttccaacaccatcttctgagcgactcggaccgatg

SEQ ID NO: 3146 - DNA, 203 bp, Artificial sequence
  synthetic
ggcgcgccagtcctgattcccggggcctggctttcagcgtagcaattctgccggcgaagaaggtgagcgcagtgctgtgtggcagcagagctccttaggacgaggagcagcgggacgaggaagggcagactggtgaaatcgcaaactgggcgtctgttccggcgccggacccctatttgcaaaggtcccgactcggaccgatg

SEQ ID NO: 3147 - DNA, 203 bp, Artificial sequence
  synthetic
ggcgcgccagtcctaacagcgcgggccgcgcgggcgtaggcggggtatctggaggaggcgcagggaacctggagagggtccagccctcagtgccccggccagaggcgggaaggggctctagagcttcgggaggcaagatgacttctctgccccaagcttggaacagctaaagggaaaaacagtgcaagcgactcggaccgatg

SEQ ID NO: 3148 - DNA, 203 bp, Artificial sequence
  synthetic
ggcgcgccagtcctgagctcatctgagagttgtaagactctaaggcagcccctgcatctcagtcctgacatcgctgtccctggagcatcctccgctggagctggagcttgacagagtctccatctgtcgctcaggttggagtgcagtggcgtgatcttggctcactgcaagctccgcatcccgtgttccgactcggaccgatg

SEQ ID NO: 3149 - DNA, 203 bp, Artificial sequence
  synthetic
ggcgcgccagtcctctcagtgccttcaagacatgtcgttttgtagtcagagaaaacagagatcaatgcattttcaaactgacagagggaacggatgctctttagtagcacatgcccaggatcgtgtgtgtggggcttgcgctgtgctgagaagctgaataccggtccatatgctccttatttactgcacgactcggaccgatg

SEQ ID NO: 3150 - DNA, 203 bp, Artificial sequence
  synthetic
ggcgcgccagtcctaaaggatccacaagagttcatgccctgaacaatgtcaacaaggcactgcgggttttgcagaacaataatgttgatttagtgaatattggaagtactgacatcgtagatggaaatcataaactgactcttggtttgatttggaatataatcctccactggcaggtcaaaaatgtacgactcggaccgatg

SEQ ID NO: 3151 - DNA, 203 bp, Artificial sequence
  synthetic
ggcgcgccagtcctcgctcactctcattggtcagttgctcgctgtggtcccatcccacatgcttccattgcttgattcctcgaaaagggcggggactctgggcagcggttgtggagtgccgcgggtccacagtgctgcactgagcagagaggaaggggcgtcccgggatatttggaggataaagggtgcgactcggaccgatg

SEQ ID NO: 3152 - DNA, 203 bp, Artificial sequence
  synthetic
ggcgcgccagtcctcgctggacctgcaggctgaaagtcctcctgtggacccagactcccaggccgatacagtgcacagcaaccccgagctagatgtgctgcttctgggctctgtggatggacggcacctgctgcggaccctgtcccgagcgaagttctggcctcgcaggaggttcaacgtgagctgggcgactcggaccgatg

SEQ ID NO: 3153 - DNA, 203 bp, Artificial sequence
  synthetic
ggcgcgccagtcctctctcttgggggtttgtgtttttacatcgtctttctgcacggttctccagcttcttgtccgcacgggctctgcaggtgttgcttgcctggaactcctgtaaggccagtacagtggtagcagttggactgaccattgctgctgcaggatttgcaggccgttacgttttgcaagcccgactcggaccgatg

SEQ ID NO: 3154 - DNA, 203 bp, Artificial sequence
  synthetic
ggcgcgccagtcctccgagcgggccatggccaccgccattcagaacccgctcaagtcgcgaggacttctaccgcgaggccatcgagcactgccgcagttacaacgcgcgcctgtgcgccgagcgcagcctgcgactgcccttcctcgactcgcagaccggcgtggcccagaacaactgctacatctggcgactcggaccgatg

SEQ ID NO: 3155 - DNA, 203 bp, Artificial sequence
  synthetic
ggcgcgccagtcctggcggcgcagcatgaagcggcgcaggcccgctccatagcgcacgtcgggagggtccgggcggggccggggggaaggctttgatggtgaggaaaggaaagattcctgtgagaagagcaggatgagcagagggattctatgcttgaagtcgagtcacttgaaaaagatctctttgacgactcggaccgatg

SEQ ID NO: 3156 - DNA, 203 bp, Artificial sequence
  synthetic
ggcgcgccagtcctctcgacccgccgcagccccggccccgaccgtggacactgggggtccccgagggcgctgcgacctcctcccgggtgaaatgaaacccgagggcagtcccccttaccgaccccattagagacgtatctgccgtgccaggggtctaggctccagaaacagggagtttaccacctaggcgactcggaccgatg

SEQ ID NO: 3157 - DNA, 203 bp, Artificial sequence
  synthetic
ggcgcgccagtcctttctaagagtttggcgagtcagtgactgaagcgcccgtccattccaagataaataggatttaccaatccttggatgaagtgcttgggaagtctttaagtgccataatcaactgccatttcaaagaatatagatggttttgaaaagttcatgctgtcccttcattgaattttagacgactcggaccgatg

SEQ ID NO: 3158 - DNA, 203 bp, Artificial sequence
  synthetic
ggcgcgccagtcctggcgcttcgtgtgaggttccacgggggaaggcgagaggcgcaggctgccacacacgcactgtttggaagaggggaagggctgcacttcctgctttcatccagaccaagttcggatcaagtgggagttcttcaaagagagagtttgcattgccccccctgcaccacctcaccaagcgactcggaccgatg

SEQ ID NO: 3159 - DNA, 203 bp, Artificial sequence
  synthetic
ggcgcgccagtcctggtggcccgttcccctttaagagcaactgctctaagccaggagccagagattcgagccggcctcgcccagccagccctctccagcgaggggacccacaagcggcgcctcggccctcccgacctttccgagccctctttgcgccctgggcgcacggggccctacacgcgccaagccgactcggaccgatg

SEQ ID NO: 3160 - DNA, 203 bp, Artificial sequence
  synthetic
ggcgcgccagtcctggtaagcttaccgtgaaaggagggtttgggctgttgttgctacacgtggatgtgaaatgagtcaagcggaactttgattacaaggaatttcatatactccttcccaccatggattgccaagaaaatgagtactgggaccaatggggacggtgtgtcacctgccaacggtgtggtcgactcggaccgatg

SEQ ID NO: 3161 - DNA, 203 bp, Artificial sequence
  synthetic
ggcgcgccagtcctgtcctctggtgttgagtggtcggcttggtgtggtgtgcggaggagctccaggcccgtcggcgcggagggtcttgctgtgttgcccagcctggtcttgaattcctggactcaagtgatgctcctgccttggcttcccaaactcctggaattacaacttggtctcacgtgtgaaaccgactcggaccgatg

SEQ ID NO: 3162 - DNA, 203 bp, Artificial sequence
  synthetic
ggcgcgccagtcctcttgagcctggcttaggccaccacctactccagctctctccaccccctattttactgcagctcagggggtaggctctaggctccaaagtacctgggtattgtcccttcatcaagaaagccccacagctctggagggctctgataatcccgttgtcagctctctgaaaagacagccgactcggaccgatg

SEQ ID NO: 3163 - DNA, 203 bp, Artificial sequence
  synthetic
ggcgcgccagtcctggggggcttgtgggtcctcctccccctcccactgacaactgccccaactgctcttcccgccccggtcacagtgaaaatgtagacggggtcgttgtccactatgttaggtcttaatggtgggaggacgcccgagtgctcggcccgtttcaccccgaggaggaaggacactgggtccgactcggaccgatg

SEQ ID NO: 3164 - DNA, 203 bp, Artificial sequence
  synthetic
ggcgcgccagtcctagggtttgaggttccttccgaaacggggccggctaatttagcccctcccacgagcccaagggtctgttatatctctgtttccttgaggacctctctcacggagacggaccacagcaagcagaggctgggggggggaaagacgaggaaagaggaggaaaacaaaagctgctacttcgactcggaccgatg

SEQ ID NO: 3165 - DNA, 203 bp, Artificial sequence
  synthetic
ggcgcgccagtcctctcgctcgctccctccctccgctggtgcgtttagtcagtcagccagcagcagccggcgggcccgcgagccgcagagggcccgagcctcggacgccggcgcctcctcctgccattgttcgtcgggctgcagcagtggcgggcgcaggagcccggccccggagccaccgcaacatccgactcggaccgatg

SEQ ID NO: 3166 - DNA, 203 bp, Artificial sequence
  synthetic
ggcgcgccagtcctagggaataaggggtgcgtcttgacagagtacgtggaggtcggcagaagtacaagcgcaggatagatgcggagaacagcccatacctgaaccctcagctggttcagccagccaaaaagccatataacaagattgtctcacatttgttggtggctgaaccggagaagatctatgcccgactcggaccgatg

SEQ ID NO: 3167 - DNA, 203 bp, Artificial sequence
  synthetic
ggcgcgccagtcctttctgttcttggagtctagacagcatcaggagttgggctcagtgaacaaaactttaatgtctagagcatttatgagggttttaatgattggaaaatctatcctgagaatgtggtcaccatatgtgacagccttgctttctatcttgtcttcagtttctggggcttctctgcagacgactcggaccgatg

SEQ ID NO: 3168 - DNA, 203 bp, Artificial sequence
  synthetic
ggcgcgccagtcctcggcttcggcttctttaaaatccccgacgactcacctgattaacctgctgcagttctgaccctgccaagagctgacaatttactggttcatcaatgaaacaatattaaattatgaagatgtaaggaaaaaatcctacgctaacactgtcgcagtttgaaaggcttctctgcagacgactcggaccgatg

SEQ ID NO: 3169 - DNA, 203 bp, Artificial sequence
  synthetic
ggcgcgccagtcctccccagcagccacagccaggggagcgctcaagacagaaagccggtggcttcctcacctccacctgtaatgcaggcatccagcccgcactgtggagcagggaggacgtgctgcactggctgcgctgggcagagcaggagtactctctgccatgcaccgcggagcacgggttcgagcgactcggaccgatg

SEQ ID NO: 3170 - DNA, 203 bp, Artificial sequence
  synthetic
ggcgcgccagtcctggcttcctcacctccacctgtaatgcaggtgacgtcctgtatgagctgctccagtacatcaagacccagcggcgagccctggtgtgtgggcccttttttggagggatcttcaggctgaagacgcccacccagcactctccagtccccccggaagaggtgactggcccctctcagcgactcggaccgatg

SEQ ID NO: 3171 - DNA, 203 bp, Artificial sequence
  synthetic
ggcgcgccagtcctgatctcggggctcagggcggaaacgcagcggatatgtattttcttccggggttggtggcgctcggctctcatgacctgcaggtgacagtgttggccggtggcgcggccctgcttgcctcgtgccccgcccttcgtgcttgaaaaaaaatcccgcgaagccttctccgaaagaaccgactcggaccgatg

SEQ ID NO: 3172 - DNA, 203 bp, Artificial sequence
  synthetic
ggcgcgccagtcctggacttcccggtggagtgaggaacccagcaacacgctcctgacttcccttcccaaggactcgacctgagaaggacacagcagtctctgaatttcatgctctcctctttgatgtgaagaaaatgaaaagctgaacagttgtggaactgtggatagagttagacaataaggccgcccgactcggaccgatg

SEQ ID NO: 3173 - DNA, 203 bp, Artificial sequence
  synthetic
ggcgcgccagtcctagcaagcatgttctgcctggatgacctagggccccacattgaactggggcctgggggatgcataagtttgtcacgtaaggggcatgtgcaagaatggaagatgtgcaaaaaagggaggaggaggcatttcacggagaaggaaacggagtggaagcagcctgaggccctcatccacgactcggaccgatg

SEQ ID NO: 3174 - DNA, 203 bp, Artificial sequence
  synthetic
ggcgcgccagtcctcctgtacgtagtcacggtcttgtgctctaaggtgagtggaggacgagcttgggcttagcggcagcccgtatcacatcctagactttttacttcgaggagaagagtctcacgagttgtcctggaagaaaacgacagcacgtgttctttttcactagtagaagtgacgttggtttccgactcggaccgatg

SEQ ID NO: 3175 - DNA, 203 bp, Artificial sequence
  synthetic
ggcgcgccagtcctttggctcggagtcacttggctgtgacccagcccttcggtcaaagatggacaaacagagatccgaaccatggtctctatcctaaaccgagaacaaaaagagggagtaggggtcagggaagtcaaagatgcatccctgagttcttcctagcaggcaagcagccgtgcaccaatgaccgactcggaccgatg

SEQ ID NO: 3176 - DNA, 203 bp, Artificial sequence
  synthetic
ggcgcgccagtcctgtggcagagctacgccttgcaccccgaccttccgttgctagctccagctgctttccaaaataccaccttgacttctcagtctccaggtttaaaggagagcaactagaagtcgtccaaacacctgcatctcataaggagaagaaaagtccacctggatcttgtttctggactgagcgactcggaccgatg

SEQ ID NO: 3177 - DNA, 203 bp, Artificial sequence
  synthetic
ggcgcgccagtcctactgaggcacggagctggacagtgactcagacaccaggagctgcctggagtggagctgagagctcaggtctgggctcagccagtccagagtgcaaatctactgtcccttcctagctgtgtgatcttgacaggcactggacggggcctgcaggggtctccacagagaccatcaggcgactcggaccgatg

SEQ ID NO: 3178 - DNA, 203 bp, Artificial sequence
  synthetic
ggcgcgccagtcctttagcggggagcagctagagggacaggagggagggaaggaaggaaggaggaaacctggaagatgaggtcagccacgagagataaggggtaagaatatccggcagacttagcgttccggaggtggccctggagaggacatcgtgacccagagtgaaggatctgtcgcaggaaagacgactcggaccgatg

SEQ ID NO: 3179 - DNA, 203 bp, Artificial sequence
  synthetic
ggcgcgccagtccttttgaaaaggaggatcgagctcactgtggagtatccatggagatgtggagccttgtcaccaacctctaactgcagaactgggatgtggagctggaagtgcctcctcttctgggctgtgctggtcacagccacactctgcaccgctaggccgtccccgaccttgcctgaacaaggcgactcggaccgatg

SEQ ID NO: 3180 - DNA, 203 bp, Artificial sequence
  synthetic
ggcgcgccagtcctcgccgcgcctcggcctcggtgcaggcagcggccgccgccgccgagacagctgcgcgggcgagcatccccacgcagcaccttggaagttgttttcaaccatatccagcctttgccgaatacatcctatctgccacacatccagcgtgaggtccctccagctacaaggtgggcacccgactcggaccgatg

SEQ ID NO: 3181 - DNA, 203 bp, Artificial sequence
  synthetic
ggcgcgccagtcctctcggctgcagacttggccaaatggacgggactattaaggaattctttctctgggtcatccactgctgagccccctccccaggaagtggaattgaggctctgtcggtggtgagcgacgaccagtccctctttgactcagcgtacggagcggcagcccatctccccaaggccgaccgactcggaccgatg

SEQ ID NO: 3182 - DNA, 203 bp, Artificial sequence
  synthetic
ggcgcgccagtcctagacatgagtctagcacctgggactcatgaagttctgaaaagaggggtgtcctgaaggtccaaggcgcctttgttgggggtcccggaatccgcggtgtgccaggtcggaaaaggcgtccgctttcctggagaggaggctaaggtgccgggcgcttcgattctctttgtggccagcgactcggaccgatg

SEQ ID NO: 3183 - DNA, 203 bp, Artificial sequence
  synthetic
ggcgcgccagtcctgtgaggcagacgaactcgcggctctccggcttccgaggcttccgagttgtcggaggaagggggcggcgagcaataagaacccgccgcacccggtcctcagcgactcttctgacctccgcgcgacgtacccgccgccgccgttggctggagcatttgacattgtgcagcaaagaacgactcggaccgatg

SEQ ID NO: 3184 - DNA, 203 bp, Artificial sequence
  synthetic
ggcgcgccagtcctctgcgcgcccccgggcacgaccccggagtctccgcgggcggccagggcgcgcgtgcgcggaggttctcctcgtccgcccgttgttcagcgagggaggctctgcgcgtgccgcagctgacggggaaactgaggcacggagcgggcctgtaggagctgtccaggccatctccaacccgactcggaccgatg

SEQ ID NO: 3185 - DNA, 203 bp, Artificial sequence
  synthetic
ggcgcgccagtcctcgcgggggccgtaggaagccaaccttccctgcttctccggggccctcgccccctcctccccacaaaatcagggatggaggcgcctccccggcaccctcttagcagccctccccaggaaaagtgtcccccctgagctcctaacgctccccaacagctacccctgccccccacgcccgactcggaccgatg

SEQ ID NO: 3186 - DNA, 203 bp, Artificial sequence
  synthetic
ggcgcgccagtcctggtgctgcaggtctcagccgaagggcgtcggaaactgcgctcgcatcgagcagtttccagcctcctgggtaaaggagcagtctcctcccttgcttgggactctggacgcatctcattccggtgaaagtaagggacagcttaggaccagaagcctttcgcggagaaaaggctgaccgactcggaccgatg

SEQ ID NO: 3187 - DNA, 203 bp, Artificial sequence
  synthetic
ggcgcgccagtcctttggggctgctgtttctcttcgccgacggtgcccgcccctgcatccctaaaagcttcggctacagctcggtggtgtgtgtctgcaatgccacatactgtgactcctttgaccccccgacctttcctgcccttggtaccttcagccgctatgagagtacacgcagtgggcgacggcgactcggaccgatg

SEQ ID NO: 3188 - DNA, 203 bp, Artificial sequence
  synthetic
ggcgcgccagtcctcttctcttacactgcatacctgtgtctgagtactcttttcatcagtcactcagccagggtctgcagcatgaacccagcagctggtgtcccctatgaggaactcagcaacagattgcgacagaacccttgagaacaaaggagagaggaggtgctgcaagactctctggtagaaaacgactcggaccgatg

SEQ ID NO: 3189 - DNA, 203 bp, Artificial sequence
  synthetic
ggcgcgccagtcctaggaaaactaggcccctgcgcggccaacgcccaggatccgcaagctgcgcgcccacgagctccaccagcccattggagaaaagttactgttcagtccctgaaggcttgtgccataaaagagtgggagacattcccagggagtttcagcacccatttggactttcacaatcagagcgactcggaccgatg

SEQ ID NO: 3190 - DNA, 203 bp, Artificial sequence
  synthetic
ggcgcgccagtcctgcctgcagctcggtgcgctctgggcacccgggcgccttgcccggtgcacggcggctggcgcaccgcggctagattggctacaggagcggggtgcaggactggctagaggtgggtgtgtgcgcgcgttggactggagatccgagcagaagcagaaccaggcggctctgagcagcccgactcggaccgatg

SEQ ID NO: 3191 - DNA, 203 bp, Artificial sequence
  synthetic
ggcgcgccagtcctggcggtggctgctgccagacccggagtttcctctttcactggatggagctgaactttgggcggccagagcagcacagctgtccggggatcgctgcacgctgagctccctcggcaagacccagcggcggctcgggatttttttgggggggcggggaccagccccgcgccggcacccgactcggaccgatg

SEQ ID NO: 3192 - DNA, 203 bp, Artificial sequence
  synthetic
ggcgcgccagtcctagtaggacaatatgagactctggggcagtgaaagacttaccaggattccttctggaactgactcgtcagctcattcatgtcttacccagtctttaaacagtatttcatgataatggtctgcttttaattgctgggctttaccttaccctttttgtgattgcaggtcctacaggtcgactcggaccgatg

SEQ ID NO: 3193 - DNA, 203 bp, Artificial sequence
  synthetic
ggcgcgccagtcctaacctcagtgcgtgaactctgttatccagaaggcctcgccctgccgccgccgaagctggaattcgtcggctagtagttctcgccggcaactagaggaacctgttggcgtggcccagaaggcttagcgggattgcacgagccctcagattcatcgctaccccgaggctaagcgcccgactcggaccgatg

SEQ ID NO: 3194 - DNA, 203 bp, Artificial sequence
  synthetic
ggcgcgccagtcctagtcgtctacccgcgcgcccgagcgcggaaaccgaggggcaggctcgcgctctgcctgcttcgtggcgcttggttcgtccctcgcccgaggagcgcggtggcggcgtgggagggagcctctgacggcgtctggaactctattttaagaacctctcaaaacgaaacaagcaaatccgactcggaccgatg

SEQ ID NO: 3195 - DNA, 203 bp, Artificial sequence
  synthetic
ggcgcgccagtcctggaggcaggttgatgtgtttgtgcttccttctacagccaatatgaaaaggcctagtaagtggggtcgggaggcgggcgtggagggacccacgtctggaagttgctgcagccaccacgacgctcttctacggctacggctttgtctctgctgagttaaagaaagcaagtaaacgccgactcggaccgatg

SEQ ID NO: 3196 - DNA, 203 bp, Artificial sequence
  synthetic
ggcgcgccagtcctggggacacctcccgcgccatctcgggggcactggagataaggaaaggaacctcctccctggctgggatggctgcccgggcgcgggaggagggccggggacccggtgagggaggaccgtagggcccgtgggggcttcacgcctggcaggcggccggccaggcctccctccctgaccgactcggaccgatg

SEQ ID NO: 3197 - DNA, 203 bp, Artificial sequence
  synthetic
ggcgcgccagtcctggaaggaggctgagtgactactggactggatattgactctaactcttgtttccaagcttatatcctcaatcacctaaagatcagagtgtgaagaaacaaacctgtgacagatctgtggttgaggtttagactgggggaggagtatagtactggactttctttgtaacttgtacccgactcggaccgatg

SEQ ID NO: 3198 - DNA, 203 bp, Artificial sequence
  synthetic
ggcgcgccagtcctaaaaaaggtctttgccaatcctgattcccggaagagagtcggcagaattccttcctttaggcccctctggagccttggccgaccagccacttctgtggtctggggacagtcaccgagggtatcaaaaagccattcacagaggtcatccgagccaacatcggggacgcccaggctcgactcggaccgatg

SEQ ID NO: 3199 - DNA, 203 bp, Artificial sequence
  synthetic
ggcgcgccagtcctagacacaaagcctgcgaaagtgctcgggaagagggagagcaaacttggctcagcccactcagaggctgagaatggtgtggaggagaaaaagaaagcctgcaggtcgccaacagcccaatcccctaccccatctgtggaggcggactccccagaccagaagaaaatcattagcctcgactcggaccgatg

SEQ ID NO: 3200 - DNA, 203 bp, Artificial sequence
  synthetic
ggcgcgccagtcctgccctcccgaattctctgctcctctccccaccccactgttggtctgtgatttcgaggcaggcgtggccccctgcagcctggaatgaagtcactggggctgtttggagaccggggctgtttggaggacaagggcacacaactggttccgttaagcccctctctcgctcagacgcccgactcggaccgatg

SEQ ID NO: 3201 - DNA, 203 bp, Artificial sequence
  synthetic
ggcgcgccagtccttcggattccaagggaaacagacaaacctcacgaaaggaaggaagcaagcaagcaaggaaggaactgcaggaggaaaagaacaggcagaacagcgagaagaataaagggaaagggggggaaacaccaaatctatgattggacctgggcttctttttcgccaatgcaaaaaggaatcgactcggaccgatg

SEQ ID NO: 3202 - DNA, 203 bp, Artificial sequence
  synthetic
ggcgcgccagtcctgctccctcctttgtgctcccagggcccacaactgcttgaatgactattggtgttcctgtttgtgtgccctctgggccgggaagtcagagaaagaaaggagacaatttgtgattgaacagccactgtggccatcattctccttacctgtctgatgagagctgatcttcatgccaccgactcggaccgatg

SEQ ID NO: 3203 - DNA, 203 bp, Artificial sequence
  synthetic
ggcgcgccagtcctccgccccgccgcccggaaccagctgagcgcagctggacccagcagccgctgtctccagtgccgcagcagcaggtagtgctcatagctctctttgtccagtgcttcggccttggtcccagcgccttcccacggagcagcactcttcaccctgcacagccttgttagcccaacagccgactcggaccgatg

SEQ ID NO: 3204 - DNA, 203 bp, Artificial sequence
  synthetic
ggcgcgccagtcctagtgttgcctgactcagtttccaagcttgactcttccctttggcatagtgagtttggagtcaagagatttttattttcccttcacaagctgaacaggagcctttggagagaacgctctggaccggaagcgcgcccccggggccggtcccggagggctcgatccgcatctacagccgactcggaccgatg

SEQ ID NO: 3205 - DNA, 203 bp, Artificial sequence
  synthetic
ggcgcgccagtcctccatctttactttctccacaaaagcccatcctctattcctatttccgaagctcctgctcatggagagttcgaattgctctggccttgaaaggcatcgactacgagacggtgcccatcaatctcataaaggatgggggccaacagttttctaaggacttccaggcactgaatcctcgactcggaccgatg

SEQ ID NO: 3206 - DNA, 203 bp, Artificial sequence
  synthetic
ggcgcgccagtcctactttactagtcaagccgcggagtgggcggggccccctgcccagacttgaagccacacaggcaggtcgggcaggcgggtcgcaggttgtaaatccatgtggcgggggctttggaccctggcggcccaagcggcacgtgggcctcgcagattgtgcacgcgccggagcagcggcgcgactcggaccgatg

SEQ ID NO: 3207 - DNA, 203 bp, Artificial sequence
  synthetic
ggcgcgccagtcctggccaccgcggtctccgcgcctgtctgcaccctgtcgcctgagctgcctgacagtgacaatgacatcccagttaccagtgtccttgaattgatagtggcttctgtttgtcagtctcatataagaactacagctcatcaggaggagatcgcagcagggtaagagacaccaacacccgactcggaccgatg

SEQ ID NO: 3208 - DNA, 203 bp, Artificial sequence
  synthetic
ggcgcgccagtcctgaagcaggaaaaaggggcaggcttgaggacgcctccattctatgcctggataaggaggatgattttctacatgtttactacttcttccctaagagaaccacctccctgattcttcccggcatcataaaggcagctgctcacgtattatatgaaacggaagtggaagtgtcgttacgactcggaccgatg

SEQ ID NO: 3209 - DNA, 203 bp, Artificial sequence
  synthetic
ggcgcgccagtcctcttgggaaagggacgctacaaaataaagctcaccccaacagctgagaagagggtgcagaaatccagggaggtcatagatagcatcataaaagagaaaacagggagcttcaggtcaacttagtacgctcacattcttcaggtgttgggaaaccactaagtcctgagaggtgtcggcgactcggaccgatg

SEQ ID NO: 3210 - DNA, 203 bp, Artificial sequence
  synthetic
ggcgcgccagtcctaagactgtcagctacgattttctctagcctcaagaagactgagaccgagccaaactcctggccaacgtgctttgtggattcacagtgtagcttgagaaaaatgtggatgtgaagtcagaagttcctgtgggcctggagcccatctcacctttagacctaaggacagacctcaggcgactcggaccgatg

SEQ ID NO: 3211 - DNA, 203 bp, Artificial sequence
  synthetic
ggcgcgccagtcctgttccgctgattcctttcgtaaccgcaccacacccgagctacaatctctggacaaaattttaagagaaactccctcagaactcctaaaggtaaacaaaagcaggcagattgaggatggcagtcagaatatgaagtgaccatatatggacgtgggttggcaataagagaagaaagcgactcggaccgatg

SEQ ID NO: 3212 - DNA, 203 bp, Artificial sequence
  synthetic
ggcgcgccagtcctcttggctcaggcttggaggcctccgagcagcaacatcgtcccaattataccccgttggagcatcttcagatcttccactcttttcacaacgcaatcaaaatcttcgtacccattttgcagtagtgatctctaaactctcagcgtaggcatcgggaaccttcgtgccaaggagcccgactcggaccgatg

SEQ ID NO: 3213 - DNA, 203 bp, Artificial sequence
  synthetic
ggcgcgccagtcctgagggtggcgtcccggggaagcccgcagccgccgccgatgtcgctgggactcggaagtgccgaaagaggggtgttgggaactcgcggcgcgcgtgaacgttgccgtcgccgccgcccgggacagcccggagaaactctcagcgtaggcatcgggaaccttcgtgccaaggagcccgactcggaccgatg

SEQ ID NO: 3214 - DNA, 203 bp, Artificial sequence
  synthetic
ggcgcgccagtcctacccaaggccggccctttcctgtggagtcatctcaccgccgtgcgcacccactcgtaactcgcacccgggtcctggctgcaccgcatcccctcctgcaccccctggatggcccttcagccaacgggggcctgggcgatggtcgaccacggagctgcgcaaggaaaagtcccgggcgactcggaccgatg

SEQ ID NO: 3215 - DNA, 203 bp, Artificial sequence
  synthetic
ggcgcgccagtcctgagggacatcttttcaagtagaggctgtgttggggcatggtgagagagggtcttagcaggtaaccttcctttcctctccagactgaggaatcagagttctgattgtggagtgcctctctctaggacggggctgcagcataggagtctcagctgcttacatccaggtccaggattcgactcggaccgatg

SEQ ID NO: 3216 - DNA, 203 bp, Artificial sequence
  synthetic
ggcgcgccagtcctccactcacagccagtgacacttgcaaaaaactcccaaagccgtcttgggtttggctcccacagctcttgaccaatgtggccaaagctggacacctccttgggacactgggattattcataaatgcagcccgccctgactctccctgaatagcatctgaagtctttgtgaaggtccgactcggaccgatg

SEQ ID NO: 3217 - DNA, 203 bp, Artificial sequence
  synthetic
ggcgcgccagtcctccggttgtagatgtatctctccaggaagcgctgtgtcccattaaacgcgtagcattcctgccgtccctggaaaagtgctagaggcccacagtttcagtctcatctgcctccactcggcctcagttcctcatcactgttcctgtgctcacagtcatcaattatagaccccacaaccgactcggaccgatg

SEQ ID NO: 3218 - DNA, 203 bp, Artificial sequence
  synthetic
ggcgcgccagtcctgcacccttgtggcccaggcactttatggatgatcccttttagtgctcccagtaaccttccaagattgtcaagtggtcagactgttgtttgccattagcttgcagacctggggatccttatcggctaattgctgaagcaagtgtggacaacttcagcaagctgggggtggcgttccgactcggaccgatg

SEQ ID NO: 3219 - DNA, 203 bp, Artificial sequence
  synthetic
ggcgcgccagtcctcgggggccttcggggtgggcgcccagggtagggcaggtggccgcggcgtggaggcagggagaatgcgactctccaaaaccctcgtcgacatggacatggccgactacagtgctgcactggacccagcctacaccaccctggaatttgagaatgtgcaggtgttgacgatgggcacgactcggaccgatg

SEQ ID NO: 3220 - DNA, 203 bp, Artificial sequence
  synthetic
ggcgcgccagtcctggtttgaaaggaaggcagagagggcactgggaggaggcagtgggagggcggagggcgggggccttcggggtgggcgcccagggtagggcaggtggccgcggcgtggaggcagggagaatgcgactctccaaaaccctcgtcgacatggacatggccgactacagtgctgcactgcgactcggaccgatg

SEQ ID NO: 3221 - DNA, 203 bp, Artificial sequence
  synthetic
ggcgcgccagtcctgcgcgagtgctgctgacaggggccaacgctggtgttggtgaggagctggcctatcactacgcgcgtctgggctcccacctggtgctcactgcccacactgaggctctcctgcagaaggtggtagggaactgccggaagctgggcgcccccaaggtcttctacatcgcgggggaccgactcggaccgatg

SEQ ID NO: 3222 - DNA, 203 bp, Artificial sequence
  synthetic
ggcgcgccagtcctcctagaacgagctggtgcacgtggcttcccaaagatctctcagataatgagaggaaatgcagtcatcagtttgcagaaggctagggattctgggccatagctcagacctgcgcccaccatctccctccaggcagcccttggctggtccctgcgagcccgtggagactgccagagcgactcggaccgatg

SEQ ID NO: 3223 - DNA, 203 bp, Artificial sequence
  synthetic
ggcgcgccagtcctacagtaaacacaaacaaaagggtgatgggattattttactgcatgcactgctgagcccgacattgtcacctcctctttgaggggttagaagaagctgagatctcccgacagagctggaaatggtgatgaatcttttttaatcaaaggacaatttcttttcattgcactttgactcgactcggaccgatg

SEQ ID NO: 3224 - DNA, 203 bp, Artificial sequence
  synthetic
ggcgcgccagtcctcaagtggatccgagccgcagagagggctggagagagtctgctctccgatgactttgcccactctcttcgcagtggggacacgggaccgagtgcacactggaggtcccagagcacgacgagcgcggaggaccgggaggctcccgggcttgcgtgggcatcacgtgccctcccccccgactcggaccgatg

SEQ ID NO: 3225 - DNA, 203 bp, Artificial sequence
  synthetic
ggcgcgccagtcctcgagggctcctgctggtactgtgttcgctgctgcacagcaaggccctgccacccaccttcaggccatgcagccatgttccgggagccctaattgcacagaagcccatggggagctccagactggcagccctgctcctgcctctcctcctcatagtcatcgacctctctgactctcgactcggaccgatg

SEQ ID NO: 3226 - DNA, 203 bp, Artificial sequence
  synthetic
ggcgcgccagtcctgccagaggcgcggaaggaagcagtgcccggcgacactgcacccatcccggctgcttttgctgcgccctctcagcttcccaagaaaggcatcgtcatgtgatcatcacctaagaactagaacatcagcaggccctagaagcctcactcttgcccctccctttaatatctcaaaggcgactcggaccgatg

SEQ ID NO: 3227 - DNA, 203 bp, Artificial sequence
  synthetic
ggcgcgccagtccttggacctgtgggctgggcagcagctgctgtggaagggctccttcaagcccagcgagcatgtgaaacccagggccccaggaaacctgacagttcacaccaatgtctccgacactctgctgctgacctggagcaacccgtatccccctgacaattacctgtataatcatctcacctcgactcggaccgatg

SEQ ID NO: 3228 - DNA, 203 bp, Artificial sequence
  synthetic
ggcgcgccagtcctcccggaggcggcggacgggctcggcagatgtagccgccgggccgaagcaggagccggcgggggggcgccgggagagcgagggctttgcattttgcagtgctattttttgaggggggcggggggtggaggaagcggaaagccgcgccgagtcgccggggacctccggggtgaacccgactcggaccgatg

SEQ ID NO: 3229 - DNA, 203 bp, Artificial sequence
  synthetic
ggcgcgccagtcctctaggtgacagacaggtacactgtatgctagccctgtatctgtctgagcagtggaatgtgccaggaaagaaggagcaaccactgactgatgaacctttgccagtctcccttccaagagggatgccagagccttctgtaagctcctgagatgtcactggtatctaggcaacagggcgactcggaccgatg

SEQ ID NO: 3230 - DNA, 203 bp, Artificial sequence
  synthetic
ggcgcgccagtccttaattaggaagctgtcagattttattgatcctcaagaaggatggaagaagttagctgtagctattaaaaaaccatctggtgatgatagatacaatcagtttcacataagatgctgttcccaaaactgctaatacactaccttctaaagaagctataacagttcagcaaaaacagcgactcggaccgatg

SEQ ID NO: 3231 - DNA, 203 bp, Artificial sequence
  synthetic
ggcgcgccagtcctgcccggcaggttgggggaccggcgggaggcgcagcctgggcagagctcagcttggtcccgccgcccggccggtgctccctggcgcagccacgcaggcgcaccgcagacagacccctctgccatgaaccagtccatcccagtggctcccaccccaccccgccgcgtgcggctgaacgactcggaccgatg

SEQ ID NO: 3232 - DNA, 203 bp, Artificial sequence
  synthetic
ggcgcgccagtcctggcggctctgggccgccgagtcccctcctcccgcccctgaggaggaggagccgccgccacccgccgcgcccgacacccgggaggccccgccagcccgcgggagaggcccagcgggagtcgcggaacagcaggcccgagcccaccgcgccgggccccggacgccgcgcggaaaagcgactcggaccgatg

SEQ ID NO: 3233 - DNA, 203 bp, Artificial sequence
  synthetic
ggcgcgccagtccttgctggcgtcctcccttctctttgctgggttgtcagctgttcctcaaagcttctcgccatctctgaggccatggtaagtgtgactgtggcaagtgcaagtgtgaccagggatggtatggggatgcttgccagtacccaactaactgtgacttgacaaagaagaaaagtaaccaacgactcggaccgatg

SEQ ID NO: 3234 - DNA, 203 bp, Artificial sequence
  synthetic
ggcgcgccagtcctcagcctgaggcttccttttggttcccgccccgggacgggaggctccgtccgctccctggacagccggggtgctccctccttctccctcccgcgctctcctcccccgtccgtttgcagggaggtgctctcctcgggcggcggggaaggcggggctggcctgccactcctcctgctcgactcggaccgatg

SEQ ID NO: 3235 - DNA, 203 bp, Artificial sequence
  synthetic
ggcgcgccagtcctgagggaattactaagacttcttgctcatttctgagtattgtctttatatcctgacactatgaatgctacttggatgcctcttaagtctgttctctggggaggcagtaaggggccgtggagctggcctcggcctcggcatcgggagaggctggacttcctgtctctctgtgctgacgactcggaccgatg

SEQ ID NO: 3236 - DNA, 203 bp, Artificial sequence
  synthetic
ggcgcgccagtcctcaccaacttcctgttgggtgctgtggtcccaaggcgcgtgctttgcagcagatgtgtgacctggcgttcccctgagtgctcggaaaatggccttgtctccggtcgttcccgttcaggagcagaattttcccactgtaaaaaaccgagcaagtctggataagtgaggctggctcccgactcggaccgatg

SEQ ID NO: 3237 - DNA, 203 bp, Artificial sequence
  synthetic
ggcgcgccagtcctgctcccagcgccacggacgcccccgggccgagcggcggtgcgctcccgtgcagacccgtggacagacgcccctggccggtggactctcgagtctcgcttctgcaccctgcgtccctagacatgaatgtgaggagggtggaaagcatttcggctcagctggaggaggccagctctcgactcggaccgatg

SEQ ID NO: 3238 - DNA, 203 bp, Artificial sequence
  synthetic
ggcgcgccagtcctgcatttcggctcagctggaggaggccagctctacaggcgaagcggttattgagcattcgctgtgtaccaagtgctgtccttgacaagaagacttacacccagtggtcccagagggagacttcggaagtgggagcacctgtcagatcatcatacagcgtggaagatgaactggagcgactcggaccgatg

SEQ ID NO: 3239 - DNA, 203 bp, Artificial sequence
  synthetic
ggcgcgccagtcctccttcatccccatcctgggccctgacaaagacagtgtgacaagttctgagccccacaggtggaatcccaaaccaagcagctcttgctggtcaccccaagatctacttatacatgaagttttgaaaatcatctcctgaacctcttctgacagagatcagggtgttgacagaaagtcgactcggaccgatg

SEQ ID NO: 3240 - DNA, 203 bp, Artificial sequence
  synthetic
ggcgcgccagtcctgtctggagccggtgctctgcggcggggcgggagggctcgcatccccatagtgctgggttacagtgaaggtacgccccgcgctctgctctggagaggcagggtgggatagggaacgtctcgagtggcgcccgcagtcatggtggtgttcgttggccgccgcctcccggcgctcctcgactcggaccgatg

SEQ ID NO: 3241 - DNA, 203 bp, Artificial sequence
  synthetic
ggcgcgccagtcctacccttcaaggacctgctacaccctgaccaccccctgccgcccccacaggcagagctgacctgtccggtaatcaaggcaatgcagccggccgcctagctacagttcacgagccagttgtcacccagtgggcggtgcatcctccagcccccgctcaccccagtctcctggacaaacgactcggaccgatg

SEQ ID NO: 3242 - DNA, 203 bp, Artificial sequence
  synthetic
ggcgcgccagtcctgcgcctgggaagccttcttggcaccgggacccggagaatccccacggaagccagttccaaaagggatgaaaagggggcgtttcgggcactgggagaagcctgtattccagggcccctcccagagcaggaatctgggacccaggagtgccagcctcacccacgcagatcctggcccgactcggaccgatg

SEQ ID NO: 3243 - DNA, 203 bp, Artificial sequence
  synthetic
ggcgcgccagtcctccacctggccgtggacacctgtgtcagcatgtgggacctggttctctccatcgccttgtctgtggggtgcactggaatagccaggtctggctgggtcggcacaacctgtttgagcctgaagacacaggccagagggtccctgtcagccacagcttcccacacccgctctacaatcgactcggaccgatg

SEQ ID NO: 3244 - DNA, 203 bp, Artificial sequence
  synthetic
ggcgcgccagtcctgtccttatccatccactgtgggtcctcacagctgcccactgcaaaaaaccgaatcttcaggtcttcctggggaagcataaccttcggcaaagggagagttcccaggagcagagttctgttgtccgggctgtgatccaccctgactatgatgccgccagccatgaccaggacatccgactcggaccgatg

SEQ ID NO: 3245 - DNA, 203 bp, Artificial sequence
  synthetic
ggcgcgccagtcctcggaacttggatcacatcagatcctctcgagcccagggtgacaagattattgatggcgccccatgtgcaagaggctcccacccatggcaggtggccctgctcagtggcaatcagctccactgcggaggcgtcctggtcaatgagcgctgggtgctcactgccgcccactgcaagcgactcggaccgatg

SEQ ID NO: 3246 - DNA, 203 bp, Artificial sequence
  synthetic
ggcgcgccagtccttcctttcccggccgcacagggtagattttcgttccgtcacccaggctggagtgcagtggtgtgaccttggcttgctgcaaccctttgcctcctgggttcaagtgattctcattgcctcagcctcctaagtagctgggattacaggttttataggatcacattgacaaaagtacccgactcggaccgatg

SEQ ID NO: 3247 - DNA, 203 bp, Artificial sequence
  synthetic
ggcgcgccagtcctaactgggcggtaaaatagcccttctgttactgtccggggctgcggggtgagaggccagggccgagaagggcttcaggacgcgggaggcgcacttgcttcaagtcgcgggcgtgggaacggggttgcaaaacggggcctctttgtccgggcttgcttccggcgtcatggctcaaacgactcggaccgatg

SEQ ID NO: 3248 - DNA, 203 bp, Artificial sequence
  synthetic
ggcgcgccagtcctagactaagctgcaacactggcagagcctcccaaggaagggaggagggaggacagaggccaaggcggctcctggccaccctcgcagcttcctccctccctggccacaaggacccaaagctcagagggatggatgaacagacaggaaggctcaggctggacacgtattgtatgagtcgactcggaccgatg

SEQ ID NO: 3249 - DNA, 203 bp, Artificial sequence
  synthetic
ggcgcgccagtcctggccagaaaagccaaacttaagaaatctgcctatgtacagaacaagtcaactaaggggttctcattaatctaccgtctgtgaatatcgttatttttcaggagaagcgctacaaagcagccactgtgcttactgaacggcctccccctgtatcgcttaattgagaaggtatacaacgactcggaccgatg

SEQ ID NO: 3250 - DNA, 203 bp, Artificial sequence
  synthetic
ggcgcgccagtccttgggagcgatctggaaagctgcacttgtgctcccttcctcgtaggtttgctgtggaacgttgtggcttctgtggctcctcaggcccgggggcgccccttgaaccctccactcttggctccaagcaccttccctgggaagctgtatctgctgggttcgcagacaggaacagaaaccgactcggaccgatg

SEQ ID NO: 3251 - DNA, 203 bp, Artificial sequence
  synthetic
ggcgcgccagtcctcggggccagccatgcctgtcctaacagcagccacccagcagtggcccagcctgctgagaactagaaaatcagaagaaaaaggagaatccaccaggagacccaggtaactctgaagcgtgagctgccagaattcaaggccacctgcttaacagaagacaactagaaacctcatcccgactcggaccgatg

SEQ ID NO: 3252 - DNA, 203 bp, Artificial sequence
  synthetic
ggcgcgccagtcctaagcagtccttccacctcggcctcccaaagagctgggattacaggtgaaaattctggatctgttatctgtgaggaggccactccgttgacagttgtgtaaaactctgctgctttccccagctccaacctctctggtcttcaacaacactatcatcagggaaaacgtgggggaagcgactcggaccgatg

SEQ ID NO: 3253 - DNA, 203 bp, Artificial sequence
  synthetic
ggcgcgccagtcctaagcagctgaaagaagtctttaaggagcgaagcaccattcttcgtcagctgacaaagacatcaagagaacttgatggaattaaagtcaatcttcagtccttaaaaaacgatgagcagtctgccaaaactgatgttcagaaacttctggaattaggacagaaacaaagagaagaacgactcggaccgatg

SEQ ID NO: 3254 - DNA, 203 bp, Artificial sequence
  synthetic
ggcgcgccagtcctttgcgcatcccagtgattcttgggttccgcgtgtagtttcggaaggagacatcgaagcagggcgaggcgcagagggcgttgcggactcatgccccagtcggcagtgcggggtcccaagccctgcagtgctacagctttgagcacacctactttggcccctttgacctcagggcccgactcggaccgatg

SEQ ID NO: 3255 - DNA, 203 bp, Artificial sequence
  synthetic
ggcgcgccagtcctgagcagaaagggcccagacagtgccaggagtcaaggttctcaggggacagggagagcaagaggtcaagagctgtgggacaccacagagcagcactgaaggagaagacctgcctgtgggtccccatcgcccaagtcctgcccacactcccacctgctaccctgatcagagtcatccgactcggaccgatg

SEQ ID NO: 3256 - DNA, 203 bp, Artificial sequence
  synthetic
ggcgcgccagtcctggagttgaggaccttttcttcagagggtgactcaggtcaacacaggggcccccatgtagtcgacagacacagtggtcctaagatctaccaagcatccaggttctgaggagacaggccccggagcagcactagctcctgcccacactcctacctgctgccctgaccagagtcatccgactcggaccgatg

SEQ ID NO: 3257 - DNA, 203 bp, Artificial sequence
  synthetic
ggcgcgccagtcctaagtctgaggttgcaaaaggactgtgatcatatgaagatcatccaggagtacaactcgaaattctcagaaaacaggaccttgatgtgagaggagcaggttcaggtaaacaaagggtgccacatctcctgcctttctgctcactttcctgcctgttttgcctgaccacagccatccgactcggaccgatg

SEQ ID NO: 3258 - DNA, 203 bp, Artificial sequence
  synthetic
ggcgcgccagtcctttagaaagagaagagcgagccaggcagcactacgagaagcacctggaagagcggaagaagaggttggaggagcagaggcagaaggaggagcggaggagggctgctgtggaggagaagcggaggcagagacttgaggaggacaaagaacgccacgaagctgttgtacggcgcacacgactcggaccgatg

SEQ ID NO: 3259 - DNA, 203 bp, Artificial sequence
  synthetic
ggcgcgccagtccttagagatggggtcttgctgtgttgcccagactggtctcaaactcctggcctcaagtgatccttctgcctcagcttcccaaagtactgggattacagcttgaaatccatggcccaaaatgactctaccagtggagactctcttctgtgaagaagacgaccagataagaggttgggcgactcggaccgatg

SEQ ID NO: 3260 - DNA, 203 bp, Artificial sequence
  synthetic
ggcgcgccagtccttacaatgtgaagttctgcatagatgccagtcaaccagatgttggaagctggctcaagtacattagattcgctggctgttatgatcagcacaaccttgttgcatgccagataaatgatcagatattctatagagtagttgcagacattgcgccgggagaggagcttctgctgttccgactcggaccgatg

SEQ ID NO: 3261 - DNA, 203 bp, Artificial sequence
  synthetic
ggcgcgccagtccttgtacggagaccctcacgcgccgcggccgatccccccggttcaccacctgaaccacgggccgccgctccacgccacacagcactacggcgcgcacgccccgcaccccaatgtcatgccggccagtatgggatccgctgtcaacgacgccttgaagcgggacaaggacgcgatctcgactcggaccgatg

SEQ ID NO: 3262 - DNA, 203 bp, Artificial sequence
  synthetic
ggcgcgccagtcctcctggaggtccacgtcccgcaggtgcgtgcagcagcacccgccaggaggcgcctgagattggagctggagtgagccttccaggaattttggctgccaaatgtggtgcagaagtaatactgtcagacagctcagaactgcctcactgtctggaagtctgtcggcaaagctgccaacgactcggaccgatg

SEQ ID NO: 3263 - DNA, 203 bp, Artificial sequence
  synthetic
ggcgcgccagtcctggaccctcctgtgggcccagggggacaaaagtggctctcaatccagcacatgcacattgaagcaagttaaaggatttaatatgaagcacagaagcagatagtgccaaatagcaagcagtagttgttacacatttggtgagcagggcagcatttccttctcccactgctgctgagcgactcggaccgatg

SEQ ID NO: 3264 - DNA, 203 bp, Artificial sequence
  synthetic
ggcgcgccagtcctctgcgggccgctccgccggtgctgtccctgggcgcctccgtgctctcagccaaccgcctctgagagcgcccactcgagcgccccgggagccagagggcgggggtcctcgccgggaccctcctgtgggcccagggggtgagcagggcagcatttccttctcccactgctgctgagcgactcggaccgatg

SEQ ID NO: 3265 - DNA, 203 bp, Artificial sequence
  synthetic
ggcgcgccagtcctcgtcctggcggtggggactccccgcggagcgcttgcgcgtgccaggccacccgggactacgtttcccagcgggccgagcggccggcgccgcggctgcggtcaggattgtcagtggcttcgccccgaggagagctgactgccctgggctgctgcctccggcagagctgagccaaacgactcggaccgatg

SEQ ID NO: 3266 - DNA, 203 bp, Artificial sequence
  synthetic
ggcgcgccagtccttggggatttgatgatctcctggagagcaactgagacaagagaagaaaggtgcatggctgcctcctaatcccatagtccagaggaggcatccctaggactgcgggcaagggagccgggcaagcccagggcagccttgaaccgtcccctggcctgccctccccggtgggggccaggcgactcggaccgatg

SEQ ID NO: 3267 - DNA, 203 bp, Artificial sequence
  synthetic
ggcgcgccagtcctgtgttgagagaaggtgcacgtaagcgtgtggcagaacgtctgcaatcgcatctttgtaataatctcctttctgagacggttcagtggactcaatgttccgccaaagggccaaggcagccctgcagttccgccgagcatcctggggcctccaagcctccgataagctcctccagtcgactcggaccgatg

SEQ ID NO: 3268 - DNA, 203 bp, Artificial sequence
  synthetic
ggcgcgccagtcctagcagttttgaggatgaccccttcttctcgtgagttacgggagccaggagtccggggtcgcgcgggaattaagacatacaggtggtcttactctgcagcagctgaaactgaagcacaagaagcccttggaactatcatcaggacattgagtccattcttgcacaccgagaaaatcgactcggaccgatg

SEQ ID NO: 3269 - DNA, 203 bp, Artificial sequence
  synthetic
ggcgcgccagtcctgacgtcctagccaatgacagaggccgtacggcggaagtatagaaaaggactctctggaacatggcaacattaatctgaccacaagctgactggcaggtgctttaaccacaagctctgactccaggccctgtcccctgagctctgccctcggatgtccgaccgcccagagcctgccgactcggaccgatg

SEQ ID NO: 3270 - DNA, 203 bp, Artificial sequence
  synthetic
ggcgcgccagtcctggcctgggtctgcgggagccccatctagcggggttccaaggcggcggcggcatcagtcgaggccctgctccgggagctcatcttgtcccctttcgcccctcacgccccccagctctgactccaggccctgtcccctgagctctgccctcggatgtccgaccgcccagagcctgccgactcggaccgatg

SEQ ID NO: 3271 - DNA, 203 bp, Artificial sequence
  synthetic
ggcgcgccagtcctgcctttcctcatctccgctggcggggatccccgttcgcctcaggaggcttccgaccccacagcatcccgccgctctgggcgcccgtcctctgtgaggtctctccggtgacaccagcccctcttcccgccctcactttgtgtgtttacgccgagcagctgccaagtcgtctctcccgactcggaccgatg

SEQ ID NO: 3272 - DNA, 203 bp, Artificial sequence
  synthetic
ggcgcgccagtcctaggagaataactcagttttagacagggtctcgcactgtcacccaggctggagtgcagtggtgcaaccccacctcccgggttcaagcaattctcatgcctcagcctcccaagtagctgggattacagggtcctcctgccgcaggagtatcttgcagtccaactcccacgattgtccgactcggaccgatg

SEQ ID NO: 3273 - DNA, 203 bp, Artificial sequence
  synthetic
ggcgcgccagtcctctacacatctcattatagtttagggagtctcgctctatcccctaggctggagtgcattggcgccatctcggctcatttgcaacctctgtctcccgggttcaagcgattctcctgcctcagcttcccgaggagctgggattacaggtcctgagggagtctaacaagttagcagaacgactcggaccgatg

SEQ ID NO: 3274 - DNA, 203 bp, Artificial sequence
  synthetic
ggcgcgccagtcctggagctttctattggtcctgggtaccgagcatgggcgctgcgtcagtgcgcgctggcgcaaggttggtggaagtcgcgttgtgcaggttcgtgcccggctggcgcggcgtggtttcactgttacatgccttgaagtgatgaggaggtttctgttactatatgctacacagcaggcgactcggaccgatg

SEQ ID NO: 3275 - DNA, 203 bp, Artificial sequence
  synthetic
ggcgcgccagtcctggagctggtggcggcgctccgcaggggctcggctgttttccgcgcggcaggcgcggccatggcgcagctgggaaagctgctcaaggagcagaagtacgaccggcagctgaggcgattcctccatacatttgacagctgtctgggcccttatggagcatacagtggagtggaaagcgactcggaccgatg

SEQ ID NO: 3276 - DNA, 203 bp, Artificial sequence
  synthetic
ggcgcgccagtcctgagtctagggtacaggtccgaaagtagaagaacacagaaggcaggccaggggcactgtgagatggtaaaagagatctgaagggatccagaattcaagccaggaagaagcagcaatctgtcttctggattaaaactgaagatcaacctactttcaacttactaagaaaggggatccgactcggaccgatg

SEQ ID NO: 3277 - DNA, 203 bp, Artificial sequence
  synthetic
ggcgcgccagtccttggcctgggaagtgggaagccagattggaccctactgactggggaccctcagccttggggctcctctggagaagtgatcagttgccctgctggaaactcacatccagggggcagtggctggagagcaagagcgaacggtcaggaagaggaggcctcctgctccacgacgtgacccgactcggaccgatg

SEQ ID NO: 3278 - DNA, 203 bp, Artificial sequence
  synthetic
ggcgcgccagtcctccgacgctgagcgccggcctcgccctcggcggcccctccctcctccttaccccgcctcccccggcccgcccctccctccccggaggagcagtctctccgcgcgtctcccggagctttctccattgtctctgcctttacaacagagggagacgatggactgagctgatccgcacccgactcggaccgatg

SEQ ID NO: 3279 - DNA, 203 bp, Artificial sequence
  synthetic
ggcgcgccagtccttgctgcctgcggctctcagaagcctctgctccaccgcggcgagaggcatgggcacgtggctgccgagggtggccgagctctgggaagaaaagcccgtgtgcctctgcatagcgtcgctacagcgctgactcggtgtggattgattggaaaggtttgagggagtacttgggaagccgactcggaccgatg

SEQ ID NO: 3280 - DNA, 203 bp, Artificial sequence
  synthetic
ggcgcgccagtcctatctagagaaacatctgtagcatcaatgagtcagacaagcggtggtgaggcaggctcgcctcctccagctgttgttgctgctggatttgcctctgaagcagggagtgtctgcattaaaaatgacctgtagttctctgcttcatagatgcttcttcagctccctcctcttcctcccgactcggaccgatg

SEQ ID NO: 3281 - DNA, 203 bp, Artificial sequence
  synthetic
ggcgcgccagtcctccggccccgcagccttcccgccctgcgcgccatgaacgcccccgagcggcagccccaacccgacggcggggacgccccaggccacgagcctgggggcagcccccaagacgagcttgacttctccatcctcttcgactatgagtatttgaatccgaacgaagaacctcgccaatacgactcggaccgatg

SEQ ID NO: 3282 - DNA, 203 bp, Artificial sequence
  synthetic
ggcgcgccagtccttggttttggctatatcttcatgtaggacctactccctatcccgtcggccgcggtgaatcccacctgcggctgggcttcatcaccaggcctcctcacagattcctgtcccttctgtgtcctggactccggatacctcaactctcagtactttgtgctcagcccaggcccagagcccgactcggaccgatg

SEQ ID NO: 3283 - DNA, 203 bp, Artificial sequence
  synthetic
ggcgcgccagtcctggcaggcggcgggggcggggcctggaggagcctacaccgactctggaggaagactggagcctttgcggcggcgctgcccctcccctggtccccgcgagctcggagggcccggctggtgctgcgggggccccgggaggttgaaaactaagcatggggaagagctgcaaggtggtccgactcggaccgatg

SEQ ID NO: 3284 - DNA, 203 bp, Artificial sequence
  synthetic
ggcgcgccagtcctaggacaaaagccagacacatttcaacatgagggacccactgacagattgtccgggcaaacctggaaattagctatgccaaaggacttcagaaactggcaagcaagctgagcaaagcattacagaacacgagaaaaagttgtgttagcagtgcctgggcctgggcctcagagggacgactcggaccgatg

SEQ ID NO: 3285 - DNA, 203 bp, Artificial sequence
  synthetic
ggcgcgccagtcctagagggaaagggagagagagagactcttagagaaagagagagacacacacactcttggagagagagcgcgaggtgtagagaggagagagagtgaacagggagcggggcttttgtctgttggtctccctggactgaagagagggagaatagaagcccaagactaagattctcaaacgactcggaccgatg

SEQ ID NO: 3286 - DNA, 203 bp, Artificial sequence
  synthetic
ggcgcgccagtcctgatccactcacttcccatcaggcctcacttccaacattgggaatcacatttcagcatgagatttggaggggagaaacatccacaccataccacaaataaaaagtcccagagttgtctactttcagactttttaaaaaagtagattggggtcaactggactacttagttgtagaccgactcggaccgatg

SEQ ID NO: 3287 - DNA, 203 bp, Artificial sequence
  synthetic
ggcgcgccagtcctggagcctgagggacccggcggctggtgagcgcccgctggaggctggagcttccgggccctggaaaggggtccccgcgcgccccgggtcggaggcagacccctgggtttgggggacatgggcatttggggcgcctgaacccaagacctctggatgagctgccccgttcagaccatcgactcggaccgatg

SEQ ID NO: 3288 - DNA, 203 bp, Artificial sequence
  synthetic
ggcgcgccagtccttaaggcggcgtttctgggcgcagccgtgtcgctcctggtttccatcgtgtgggaagaacggagtaacgagtctcacgcagaaaaaggtcttgagagcaccttgtggcgcacccagtgtaactgtgacgatcaaccatttttgtgttgtcctcccccacctgccagaagccaacccgactcggaccgatg

SEQ ID NO: 3289 - DNA, 203 bp, Artificial sequence
  synthetic
ggcgcgccagtcctgcctcccaagttttcatccaactgccaaccccaaagcttccacccttctcccctcagagaggacgtttgatgccgggccccttgagaggctcattgacaagcctgcccctctgggtccccctgagcagagcctgctgacccaattgcccacctttgcggctttgatgcctagcccgactcggaccgatg

SEQ ID NO: 3290 - DNA, 203 bp, Artificial sequence
  synthetic
ggcgcgccagtcctaggtaactgtgatgcgggggtcagcgggagaggcacccggaagctcccggcgtctgcaccccggcagcgcgaggaaatgcccaaagaaactatagtgacactgaaactgaaggagagatttttaattccttagtgcaatactttggtgacaacttggggcgaaaagttaaagcgcgactcggaccgatg

SEQ ID NO: 3291 - DNA, 203 bp, Artificial sequence
  synthetic
ggcgcgccagtcctatgggccgcggagcccgagcggcggctgcgcagtcccgctgggggagggcgtcgcgggcatcggtctcacctggacggacgatccgctcagcgcccgcagtcggtggttagcccacggcgatgcctctcccggcctcagcccctgctgaggctacacccatgccttcttcagaacgactcggaccgatg

SEQ ID NO: 3292 - DNA, 203 bp, Artificial sequence
  synthetic
ggcgcgccagtcctcgctctctgccaagccggcttgcttcctgatctgttgctagggccgctggaccccgttgctaaggacccttgagatcgtgagcgcttggagtgtacccctcctttcctggggtagagggtcagtcgagagtagccttcgttaaccttaattgaaactggagtgaaagggaagcacgactcggaccgatg

SEQ ID NO: 3293 - DNA, 203 bp, Artificial sequence
  synthetic
ggcgcgccagtcctgcttaggagcacccaccaagctctggcagggtctccagcacccatctcgggcagaggctgggggagtgactgctggtgcaagccccaaagtgcatgcggcaaaaacatggatgcagagctggtggcaagaagaggggctaagttatagagtcaacgtggaggtaccaggccacccgactcggaccgatg

SEQ ID NO: 3294 - DNA, 203 bp, Artificial sequence
  synthetic
ggcgcgccagtcctctcagcctctacagtctggtttcctggagctggaaagccctgggctcagtaaggtcctccgcacaggagccttcgcctatccattcctgttcgacaacctcccactcttttatcggctcgggctgtgctggggcaggggccacggctgtgggcaggaggccctgagcaccagcccgactcggaccgatg

SEQ ID NO: 3295 - DNA, 203 bp, Artificial sequence
  synthetic
ggcgcgccagtcctgctgaatagaacgggcgtggaggcaggaggaggagcaggacgccgggcactgctgatgctgctttcgctggggtgagtgacctgcaggaagaaggcaagaatgccatcaactcaccgatgtcccccgccctggtggatgttcaccctgaagacacccagcttgaggagaacgagcgactcggaccgatg

SEQ ID NO: 3296 - DNA, 203 bp, Artificial sequence
  synthetic
ggcgcgccagtcctaactcttgacagaagctgtgacaaccagaaaggatgcctcataaagggggaagactttaactaggggcgcgcagatgtgtgaggccttttattgtgagagtggacagacatccgagatttcagagccccatattcgagccccgtggaatcccgcggcccccagccagagccagccgactcggaccgatg

SEQ ID NO: 3297 - DNA, 203 bp, Artificial sequence
  synthetic
ggcgcgccagtcctagagtgtcaattatgctaacatctcatttactgattttaatttaaaacagtttttgttaacatgcatgtttagggttggcttcttaataatttcttcttcctcttctctctctcctcttcttttggtcagtgttgtgcgggttaatacaacaaactgtaacaagtgtacctggtcgactcggaccgatg

SEQ ID NO: 3298 - DNA, 203 bp, Artificial sequence
  synthetic
ggcgcgccagtcctacactggccctcggccgggagctccgagtctcaggcggtcccggttgtcttcctgtcggtgccgcttccgcctgcccttcttgaaaacccacccccagctttgacctggaaaatgggctctcgtgtgggaggagggccctggaccctcagtccagccctggcctgggccggattcgactcggaccgatg

SEQ ID NO: 3299 - DNA, 203 bp, Artificial sequence
  synthetic
ggcgcgccagtcctcccgttgcactgccgggctgggcaatatgaaggagcagccctcatgtgccggcaccgggcatccgagcatggcgggaggaggcctaccagaaactggccagcgagaccctggaggagctggactggtgtctggaccagctagagaccctacagaccaggcactccgtcagtgagcgactcggaccgatg

SEQ ID NO: 3300 - DNA, 203 bp, Artificial sequence
  synthetic
ggcgcgccagtcctagtcgcatagtggtttttccgctcgcgtcgctgtgtgaaagttggctcgccgctctttgcacgccctccctggaggccgacccgagacgccaagctggagagaccgtgcctccccgaggccggccgccccgcgagcacagcctccgcccccgttgcactgccgggctgggcaatcgactcggaccgatg

SEQ ID NO: 3301 - DNA, 203 bp, Artificial sequence
  synthetic
ggcgcgccagtcctcggctcctccagctaccggcccaaggccatctacctggacatcgatggacgcattcagaagcactccgtacaaagtgagacctgtggccatcaagcaactctccgagcattcaaaatcaatgaactgaaagctgaagttgcaaatcacttggctgtcctagagaaacgcgtggacgactcggaccgatg

SEQ ID NO: 3302 - DNA, 203 bp, Artificial sequence
  synthetic
ggcgcgccagtcctgcccagagagccccagggctgctaccaggaaggccagcgcatccctccagagcattcaaaatcaatgaactgaaagctgaagttgcaaatcacttggctgtcctagagaaacgcgtggaattggaaggactaaaagtggtggagattgagaaatgcaagagtgacattaagaagcgactcggaccgatg

SEQ ID NO: 3303 - DNA, 203 bp, Artificial sequence
  synthetic
ggcgcgccagtccttggagaggacatggcactgcttcagagacacgaaccaccttgagtggatgtgattggcgatccccgtagagcaggaaagctcgtctgctgtgcagccggcgcagaggattctgtggcaggaaattagacactaggaaattcagtagcgatttgaaggaaacctcgaccttgaagcgactcggaccgatg

SEQ ID NO: 3304 - DNA, 203 bp, Artificial sequence
  synthetic
ggcgcgccagtcctttccggcctggcagcctctccccagctgggcaggggccccaggcaccgtgatgtggagtcaagccgcctatacctcccttggctgccccagggctgctaggatccagcaatgcctgtgagaaaacctccttcaccttcctcaggcaggagctgcctgtgcgcctggccaacatccgactcggaccgatg

SEQ ID NO: 3305 - DNA, 203 bp, Artificial sequence
  synthetic
ggcgcgccagtcctgtgggcaggccgggggtgagggctcgcgctccgggagctgcacggggctgcgtggaaagagcgccgagcggtggcgtcgttgtcgccccctcctcgtcgggaagaatcgtttggtctcctgccgtgcccggaatcccagtcagaagttccagcctgccactgttctctgatgcccgactcggaccgatg

SEQ ID NO: 3306 - DNA, 203 bp, Artificial sequence
  synthetic
ggcgcgccagtcctcaggatccaggcctccatccccacagaagtgaagctacagctgggaggtctcctcccaccccaaccgtcaccctgggtcccgactgcccacctcctcctcctccccctccccccaacaacaacaacaacaacaactccaagcacaccggccataagagtgcgtgtgtccccaaccgactcggaccgatg

SEQ ID NO: 3307 - DNA, 203 bp, Artificial sequence
  synthetic
ggcgcgccagtcctggctcaggtgtgggaccccatccttcctgtcttcgcagaggagtcctcgcgtgaaataagcgggttttgaaaacaaaaaaaagaaggagtggaagagggggccaggatccaggcctccatccccacagaagtgaagctacagctgggaggtctcctcccaccccaaccgtcacccgactcggaccgatg

SEQ ID NO: 3308 - DNA, 203 bp, Artificial sequence
  synthetic
ggcgcgccagtcctacagagcgctgctcccgagaaccctgcacccctcaatggagtaaattaccataaagcctcttccttacccatgctttggggtgttaacagctgaggctattcgtcggtgacctgtgggactcgagctattcctgcagctcagcagacctcctggccgtggcagacttctgcgttcgactcggaccgatg

SEQ ID NO: 3309 - DNA, 203 bp, Artificial sequence
  synthetic
ggcgcgccagtcctttagccaacctgaaccgtgtgatttatttcatctgtgacaccatcctctgggtgaggagcgtaggtctcacctctggcatcaacaaagagaaatggcgaacgagggctgctcaccactactactattctcttctgctgagcctggtcagggatctgtatgaaatctccctgcagcgactcggaccgatg

SEQ ID NO: 3310 - DNA, 203 bp, Artificial sequence
  synthetic
ggcgcgccagtccttcatccctcaagaaaaaggccgatggatctgacctcatcagcacggatgctgagcagagaggccagcctctcagagtcccggagacttcatccttagatctagacattcaaacacaactggaaaaatgggacgatgttaagtttcatggagatcgaaataccaagggacatccacgactcggaccgatg

SEQ ID NO: 3311 - DNA, 203 bp, Artificial sequence
  synthetic
ggcgcgccagtcctgtggggcaaccctctggaggcagcgcgcccgcgggcagcctcgttgtggctccttgggctctgttggcggcggcgctagcttcggagtctcccgcgcgcacctcagccgcctcctagcggcgcggcgctcgctcctacgcctaaaatgaccaatgtgtgatttcagtggaataacgactcggaccgatg

SEQ ID NO: 3312 - DNA, 203 bp, Artificial sequence
  synthetic
ggcgcgccagtccttgtgggaccaacgcttccggtgagcgacagaggcagctccccagggcctggagacccgtggggcggactctgggatctgagcctatcgccctggcctggagcccccctttgtacctattccccattcccctaccgagctgggcagttagccagcccactccaactctcggaacccgactcggaccgatg

SEQ ID NO: 3313 - DNA, 203 bp, Artificial sequence
  synthetic
ggcgcgccagtcctgaggtggaggaggacttggaaactgacgggcactgtgccgagagagattccctgctctccaccagctctttggcgtcccatgactccaccttgtcccttgcatcctcccaggcctcggggccggccctctcgcgccatctgctgacttcctttgtctcaggcctctctgatggccgactcggaccgatg

SEQ ID NO: 3314 - DNA, 203 bp, Artificial sequence
  synthetic
ggcgcgccagtcctcctcattccccatgaatgctgtgggaagtcctgaggggcaggagctgcaaaagctggggagtggagcctgggacaaccccgcctacagtggtcccccttccccacacgggacgctgagagtctgcaccatctccagcacggggcctctccagccccaacccaagaagcctgaagcgactcggaccgatg

SEQ ID NO: 3315 - DNA, 203 bp, Artificial sequence
  synthetic
ggcgcgccagtcctactttaaccagtctgcagaactgatccccagcccagctgggcctcatgcctctgacaacccaacagtgtggagcagacccacagagagggagacccagagaggtgtgcagtggcatggaagggccagcggggtatctgcggcgggccagtgtggcccaactgacccaggagctgcgactcggaccgatg

SEQ ID NO: 3316 - DNA, 203 bp, Artificial sequence
  synthetic
ggcgcgccagtcctagatgtgtcgggcctggtgagagggtgaggcgagacggcccgatcgcccagggccccggaagctgcggaggtcacccccgcctggccttagctcagggacaccctggattcacgtgggagcccctgctcctgcctcccccgtcccaccactgaggctgttgggccaggccagtccgactcggaccgatg

SEQ ID NO: 3317 - DNA, 203 bp, Artificial sequence
  synthetic
ggcgcgccagtcctcagggggacagcggctggtcggaggctcgcagtgctgtcggcgagaagcagtcgggtttggagcgcttgggtcgcgttggtgcgcggtggaacgcgcccagggaccccagttcccgcgagcagctccgcgccgcgcctgagagactaagctgaaactgctgctcagctcccaagcgactcggaccgatg

SEQ ID NO: 3318 - DNA, 203 bp, Artificial sequence
  synthetic
ggcgcgccagtcctagctgagaggtccatgtctgggtagaaccaggcccacgatgctgcctctcccgtggtctggagttcagctgcagggactctgctgatgtgcccagcaccatcgttctgtttgtgcttaaatggcacagcatttggtcagcacatctgaaaaggaaggtgtgagaagcaaagccccgactcggaccgatg

SEQ ID NO: 3319 - DNA, 203 bp, Artificial sequence
  synthetic
ggcgcgccagtcctccgaggccgcctggcccttgtttactaaccctccctcaaacgtttcctgggtggctccccagggacggcagggctgggggcttctctccagggagctgctgctgaggcctgtgtctcccgtggctcctctgacaggtcccgcctgactccgctctggaaagtccttttgaagaacgactcggaccgatg

SEQ ID NO: 3320 - DNA, 203 bp, Artificial sequence
  synthetic
ggcgcgccagtcctagacacaaaatcagccagggggagcccacattggagggcagtccacaatggaaggcttcttggaggaggagatgattgagctgcttctactaagatgagtatctcagagtcctcaacgtgggtgtggccgaggtgaagaaatccttcctggggcccttgtccccgtcctgtaagcgactcggaccgatg

SEQ ID NO: 3321 - DNA, 203 bp, Artificial sequence
  synthetic
ggcgcgccagtcctggtaccaacccctgccgcaggactttcctgggccggctcgcggagagcgtagcgcggccttggtggcggaatggcgttgagtgacggcccggccccgccatctggttaaagggactcgttcaacacggaagtgtcccggggctgcattgtgctacagctagaatgaagcacatccgactcggaccgatg

SEQ ID NO: 3322 - DNA, 203 bp, Artificial sequence
  synthetic
ggcgcgccagtcctcacatcagtctacaaagaggttttcatacaaacataataagatgtaaatggaccaaaagtgaagcacattcttgcagtaagcactgttactctccaagcaaccatggtttacatattgggattttgaaacttagcacttctgctcccaagggacttacaaaagtgaacatttgtcgactcggaccgatg

SEQ ID NO: 3323 - DNA, 203 bp, Artificial sequence
  synthetic
ggcgcgccagtcctctgcgcggaagagtgctggccctggggaagccccttcctcacccaggcttcacacatttgaccctggctctctctcaggaggacccctcgctggaaaggcattttaagggccaccgagatgcagttacctgtgtggacttcagtatcaacacaaagcagctggccagtggctcccgactcggaccgatg

SEQ ID NO: 3324 - DNA, 203 bp, Artificial sequence
  synthetic
ggcgcgccagtcctatcccagccgccagaattcgaggtctgcggcggctttcaaaacttgacaactttcctttccaggaggaccccgttctggagcgttatttcaaaggccacaaagctgcgatcacctccttggacctcagccccaacggcaagcaacttgctactgcttcttgggatacctttctccgactcggaccgatg

SEQ ID NO: 3325 - DNA, 203 bp, Artificial sequence
  synthetic
ggcgcgccagtcctggacgcgacgggacgcgctgggaccggcgtcgggggtcgcggggaccatgcagcggagcctccctgcccttcgctatcctgacgctggtgaacgccccgtacaagcgaggattttactgcggggatgactccatccggtacccctaccgtccagataccatcacccacgggctccgactcggaccgatg

SEQ ID NO: 3326 - DNA, 203 bp, Artificial sequence
  synthetic
ggcgcgccagtcctgttttgggcatgcacgtgatactcacacagtggcttctgctcaccaacagatgaagacagatgcaccaacgaggctgatgggaaccaccctgtagaggtccatctgcgttcagacccagacgatgccagagctatgactgggcctgcaggtgtggcgccgaggggagatcagcccgactcggaccgatg

SEQ ID NO: 3327 - DNA, 203 bp, Artificial sequence
  synthetic
ggcgcgccagtcctgcacgttccgggagggcgccggggcacgcgtgtgtctgagctgcctttctcctcccgttgctagggaaatggtccaggagtgctgggtgtgagcctcccttctcctcaagccggagactgcggttgtcattgatcaattgaagaagcaaggacccgaaatcacagacattagcacgactcggaccgatg

SEQ ID NO: 3328 - DNA, 203 bp, Artificial sequence
  synthetic
ggcgcgccagtccttttcaaatgtagaagaacaattcaaaatgctatcactgtgtatgtaagaaggatggggcagatttcattttaccctctagtctccctcaatgcatgcacggatttatctgtacgctaagctctctgctctgcatctgtagctccttgtggattatattgtctcagtgatcagaacgactcggaccgatg

SEQ ID NO: 3329 - DNA, 203 bp, Artificial sequence
  synthetic
ggcgcgccagtcctaaaatagagtggctagtgtgagcctcgaaggcctgaatttggcaagggtccacccagccaagtgatctgaggaaacatcggagaaagattgcagttgtggaagaagatggtcgagaggacaaagcaacaattaaatgtgaaacttctcctcctcctacccctagagccctcagacgactcggaccgatg

SEQ ID NO: 3330 - DNA, 203 bp, Artificial sequence
  synthetic
ggcgcgccagtcctgtaaccactccaggacgctgccagggcctgagaagggacaaactccaattgctccagttcaaactggtcctggcctggtcaaacggaggagacagagcagtgattcacagcaggacgtggtacttgcagactgaccgtcctctcaggactcactagggtctcttctctgacgagcgactcggaccgatg

SEQ ID NO: 3331 - DNA, 203 bp, Artificial sequence
  synthetic
ggcgcgccagtcctgtgccagctcaatggggccgccgacctcgaagtttccgaagaagtaaaatagaaagaagaccttttttgaaatgacctgtgttagtcacctctctcaggatgcgtgaggcggacacgttgaggccacctcagctgatggaagtttccgctgacatcatctctaccgttgagttccgactcggaccgatg

SEQ ID NO: 3332 - DNA, 203 bp, Artificial sequence
  synthetic
ggcgcgccagtccttcaggcacatcgaggagaaccagctgcccaagctcttggctgctgcccttctgaggcctgcctgatttgggccacatagatctggttttggccattgactggcaacatggcagtagccaactgcagagccaccagggagcagcctcattctgattgagtataacgaagacgctgcgactcggaccgatg

SEQ ID NO: 3333 - DNA, 203 bp, Artificial sequence
  synthetic
ggcgcgccagtcctctcgctcaccccgcctgctcctgcggagtgactgccgcagcggggccggaagacaggtgcgccccagcctcgccagctctggccctggcctccggggaactcggcgcctccctcgtcaccgtcggtggcggttaaaactggcctctacgcttctgcttcaatctccaatttggccgactcggaccgatg

SEQ ID NO: 3334 - DNA, 203 bp, Artificial sequence
  synthetic
ggcgcgccagtcctgtcggcggccgctgcgcgcgctcgttgcccaacccggtccccgcccccagacacgccgggctctcggggcaccacagccatgtgctcgttagcgtcaggcgctaccggttattcacatctgctgaagaaacattttcacactgtaagtctgagcatcagtttaatattgacagccgactcggaccgatg

SEQ ID NO: 3335 - DNA, 203 bp, Artificial sequence
  synthetic
ggcgcgccagtccttatcaaggaatcccggcgtggacagcgcgaggagaaagatggcggcgatggcggtcgggggtgctggtgggagccgcgtgtccagcgggagggacctgaattgcgtccccgaaatagctgacacactaggggctgtggccaagcaggggtgagggccggacctccacgagcggacgactcggaccgatg

SEQ ID NO: 3336 - DNA, 203 bp, Artificial sequence
  synthetic
ggcgcgccagtcctgagtcctctcggcacccagcaagcatccacaacggggtgatcgccgtcttccagcgcaaggggctgcccgaccaggagctcttcagcctcaacgagggcgtccggcagctgttgaagacagagctggggtccttcttcacggagtacctgcagaaccagctgctgacaaaaggccgactcggaccgatg

SEQ ID NO: 3337 - DNA, 203 bp, Artificial sequence
  synthetic
ggcgcgccagtcctgctcccaggatgtgttcgggaacctacagcgggaacacggactgggcaaggcggtggtggtgaagacgctggagcagctggcgcaacaaggcaagatcaaagagaagatgtacggcaagcagaagatctattttgcggatcagaccctctggagactttggggaccagtttgaccgactcggaccgatg

SEQ ID NO: 3338 - DNA, 203 bp, Artificial sequence
  synthetic
ggcgcgccagtccttggcctgccggaagttcccagggagaaggcagcgcgttgtacccgagttacctgtagtcaaccacagtctgaaaatattaaggtattttaagacagaaagagagagaggagagaaaccgcattcacaaaaaagaaatcctctttttagaacatctcttggtggtaccatcagaacgactcggaccgatg

SEQ ID NO: 3339 - DNA, 203 bp, Artificial sequence
  synthetic
ggcgcgccagtcctgttttcctcctgtgaccctttcggggccgggctctcaccctaaagaagcagccccgccctggggtggccccaccctctcttgggacctgtcataagtcggaccccgggcgcccggctgcgcagtcccagccgccttccccaggcagtggaaccttcgggctcctgagcttcaggcgactcggaccgatg

SEQ ID NO: 3340 - DNA, 203 bp, Artificial sequence
  synthetic
ggcgcgccagtcctgaccgctaccagtgtgactgcacccgcacgggctattccggccccaactgcaccatccctggcctgtggacctggctccggaattcactgcggcccagcccctctttcacccacttcctgctcactcacgggcgctggttctgggagtttgtcaatgccaccttcatccgagagcgactcggaccgatg

SEQ ID NO: 3341 - DNA, 203 bp, Artificial sequence
  synthetic
ggcgcgccagtcctcaccaattcggctggcgtctccgagaccgcggactcccgtagggtccccgtggccccgagttgtagtcgggacaccccggccgcgggtgatcgtcgggtctccacgcgcccgggtcgctgacgcggatccggcctcggcgccttctcagggcgccctgcaaggccgcaggcaggcgactcggaccgatg

SEQ ID NO: 3342 - DNA, 203 bp, Artificial sequence
  synthetic
ggcgcgccagtcctgcactccagcctgggcgacagagtgagaccctatctctaaacaaaagaaagaacgtcttcaagcatggagccatgaagctggatttggctttctgtcgctctctctacagggtacagacagtgacaataccctcccctcccttgggctggacccctctctacagctaggagccacgactcggaccgatg

SEQ ID NO: 3343 - DNA, 203 bp, Artificial sequence
  synthetic
ggcgcgccagtcctctgctgacaccttgatcttggacttcccatcttccaggaaggcctgacctcagttgttccagggtaaagaatttgggcagtgcccacacccacgctgttggataacatttcttcaccataccagtgagggtgaatgtgtacacgcccagcttcctgcctgttactctccacagtcgactcggaccgatg

SEQ ID NO: 3344 - DNA, 203 bp, Artificial sequence
  synthetic
ggcgcgccagtcctggaggaggaggtggaggaggtggaggaggtggaggaggcgcgggaccgggggggatagattcccagaagtgggataactggatcagagggtgattaccctgtgtataagagtatgtgtctcactgcaccttcaatggcattgagtagatcgtcagtatttaaacagatcacatccgactcggaccgatg

SEQ ID NO: 3345 - DNA, 203 bp, Artificial sequence
  synthetic
ggcgcgccagtcctaggacgcccccggcccaggcccttggggtggacaagtccttcacttctcgccggagtgtgtggaggagcgatgggcagaaccagcacttccctcaggcactagacctgtcacgagtgaacttagttccctcctatactccttcactctaccctaagaacacagatctatttgagcgactcggaccgatg

SEQ ID NO: 3346 - DNA, 203 bp, Artificial sequence
  synthetic
ggcgcgccagtcctctttcccctccccctcctgtaacttcctcttcttccccggttgggccctctgctcctctgcactctcctccccagttcgcagatttccgcccaccttccgcctcgtctagccgcgccacagctagcggggtgatctttccccccctctggtaggagttggtgaaggtgagactccgactcggaccgatg

SEQ ID NO: 3347 - DNA, 203 bp, Artificial sequence
  synthetic
ggcgcgccagtcctcggacttagacgcggggacttcagggcagggggcgccccctgcccgggtcaccagtcggggcgaggggacgtctcctctcccccagctgctctgctcggatggcgccgccggctgagtgacgggggcggcgcgcaggacttcccagctcggacctcttgccttcgaggggaaagcgactcggaccgatg

SEQ ID NO: 3348 - DNA, 203 bp, Artificial sequence
  synthetic
ggcgcgccagtcctcgcgcgctcgtctgcctggactgttgcgggccccgggacctgggctgggaacccgcggtggagcgggacacgaacgtggacgagcctgtggagtgggagacacctgacctttctcaagctgagattgagcagaagatcaaggagtacaatgcccagatcaacagcaacctcttccgactcggaccgatg

SEQ ID NO: 3349 - DNA, 203 bp, Artificial sequence
  synthetic
ggcgcgccagtccttgtgtggtgctgtccttcctcaagactacctcattctcactggctcggagactcctgcctgctgagctgactacacagacttagtcttctccactccgtgttcctgcagctagagacatgacctaacaccctgatgaccactctcagggaccttgagtgactggccggtgcacccgactcggaccgatg

SEQ ID NO: 3350 - DNA, 203 bp, Artificial sequence
  synthetic
ggcgcgccagtccttgttctttatgctggagccgagatggtcataaactcgtgagtgcttccactgataacatagtgtcacagtgggatgttctttcaggcgactgtgaccagaggtttcgattcccttcacccatcttaaaagtccaatatcatccacgagatcagaacaaggttctcgtgtgtccccgactcggaccgatg

SEQ ID NO: 3351 - DNA, 203 bp, Artificial sequence
  synthetic
ggcgcgccagtcctcacctgcagtgtagtggtttatactaaggaatacacacaaattacaggcctttgagcccagaatgcaacttgggaggtatttgacctgtccaaagacgacttgatacctctataatgtaacagaaaaggtcagaaaatattaagcaagtagaagtgtggagcatattaagcaagcgactcggaccgatg

SEQ ID NO: 3352 - DNA, 203 bp, Artificial sequence
  synthetic
ggcgcgccagtcctacaattgcattcccgggctggatgccggttgttaagcgcgctgttgctttgtaaaaatgcgtgtgttctggtgttttggctggggcagggaggggacaccccacgaggtctggggctgttgcccttgtgtcatccccccgccttttaactgcaaaggtcaccatggctgaccggcgactcggaccgatg

SEQ ID NO: 3353 - DNA, 203 bp, Artificial sequence
  synthetic
ggcgcgccagtcctcgcctgctcctacgtgggcagcctctacgtctggaagagcgaactgcccagggaccatcccgcggtcatcaagcgacgcttcaccagcgtcctggtggtgtccagtctctcacccctgtgcgtgctgctctggagggaactcacaggcatccaggcacatccctgctcaccctgcgactcggaccgatg

SEQ ID NO: 3354 - DNA, 203 bp, Artificial sequence
  synthetic
ggcgcgccagtcctgcggacaatgaattttactttcgctacccaaatggagtttcgctcttgttgcccaggctggagtgcaatggcacaatctcggctcaccacaacctctgcctcccgggttcaagcgattctcctgcctcagtctcctgagtagctgggattacaggcttccaggacgtgcatgcccgactcggaccgatg

SEQ ID NO: 3355 - DNA, 203 bp, Artificial sequence
  synthetic
ggcgcgccagtcctcagcccaacccatggccgggtctcctagccgcgccgcgggccggcgactgcagcttcccctgctgtgcctcttcctccagggcgccactgccgtcctctttgctgtctttgtccgctacaaccacaaaaccgacgctgccctctggcaccggagcaaccacagtaacgcggacacgactcggaccgatg

SEQ ID NO: 3356 - DNA, 203 bp, Artificial sequence
  synthetic
ggcgcgccagtcctacccaggatgcggaggcccttgtggggctgtggccactagggagtttcttggtcacaggacgtgaccccagccaggccctggtgttgaggtcaggacctttaccaggagaagtcaatacctaccagatccagaagattcccagaggtgtgtccctggaatcctccaacctctgccgactcggaccgatg

SEQ ID NO: 3357 - DNA, 203 bp, Artificial sequence
  synthetic
ggcgcgccagtcctgtatttacgatggagatgaatttagaaaagcagagtctgtccaaggtggagaaaccaggatctatttggatttgccacagaatttcaagatatttgtgagcgctatctgctctatgcaagcacttagacaacctatgggaagaacaccgtggcagcgtggtcctgtttgcctggcgactcggaccgatg

SEQ ID NO: 3358 - DNA, 203 bp, Artificial sequence
  synthetic
ggcgcgccagtcctcgggaactggcgaggtagttccttcgcggtggagagacctggaatggccaaatatcaagaaatgtacatcaaaacattcacccagaaaaccaggagctagtaagggtacttcgagaacagcttcaaacagaacaggatgcacctgctgccactcgacagcagttctacactgaccgactcggaccgatg

SEQ ID NO: 3359 - DNA, 203 bp, Artificial sequence
  synthetic
ggcgcgccagtcctagagttatatgcagaagttgaaaatgcctggaagatttctggtttctttcactacttatcctgcctttttgcatcgctgccagatttggatgatatgatattcagaggggcaccttaatcaaagccattcttcaacaagacccacctggcataagattgcacacataattcaagcgactcggaccgatg

SEQ ID NO: 3360 - DNA, 203 bp, Artificial sequence
  synthetic
ggcgcgccagtcctcacactctcccggcgcctcggccggccgggcgcggtgtgcaggggtgaggcggtgtctccaggctgaggagggacgcggaggagggtccggcgcggccccgggactggagggtgagtccctcacaaagggcggagcggggctgtcacctggagatcacggagggaagttcatcccgactcggaccgatg

SEQ ID NO: 3361 - DNA, 203 bp, Artificial sequence
  synthetic
ggcgcgccagtcctgtgagacttcagagcctgttccctctcctcccaagtgatcagaacactaccgttcaagaggatgctcacttcaaagctttcttccagagtgaagatagtccaagtcctaagagacagcgcctctctcattcagtctttgattatacatcagcatcaccagctccctcaccaccacgactcggaccgatg

SEQ ID NO: 3362 - DNA, 203 bp, Artificial sequence
  synthetic
ggcgcgccagtccttcggcagaactccgccaccaggcgcgatgccggaactacatgtcccatgacgctctgggaggccgcagctttccaccggaaagagggtggctgaggtgggggaggagcccaaaaggcattgtgggagtacagctctttcctttccgtctggcggcagccatcaggtaagccaagcgactcggaccgatg

SEQ ID NO: 3363 - DNA, 203 bp, Artificial sequence
  synthetic
ggcgcgccagtcctgtctgcaggtatggatgttgttctcttttccctgtctttatttccttaccaatcggctgccatccgaggagctgaggaagcctagagctctcagaagcagtcctttgagctggtgtaggggcactcagaatggtccagcgtttgacataccgacgtaggctttcctacaatacacgactcggaccgatg

SEQ ID NO: 3364 - DNA, 203 bp, Artificial sequence
  synthetic
ggcgcgccagtcctgactacttacctgcgaatcccggttgcccgcccgccagcacgtccgttccctaagcagaccgcctggcctcctgcctgacccgtcttctcaccgttgcccggagtctgacctccccacgctcagtccactaacgaagctatccctgctcctgccccacagcttctaagtgccagcgactcggaccgatg

SEQ ID NO: 3365 - DNA, 203 bp, Artificial sequence
  synthetic
ggcgcgccagtcctctcaggtgagaacttctcaggtggaaagcaggaagagggtggctagtgcaaggatcagatagcacctgcttggaagttcactgattaatgatttaacaagggcggtcacatgggacaactgctgcttttctctgccctcatttttcttactaacaggtctgaaaattgaacaagcgactcggaccgatg

SEQ ID NO: 3366 - DNA, 203 bp, Artificial sequence
  synthetic
ggcgcgccagtcctgaagtggagcctgggagccttgacgttaggaacgaagtctaacctggatctggagccgggagataatctgaatgctggctggggcagaaaattactaagatcctgtggaagtgtgaggattattaaactgatcactgtctgataaggtgagatcaaattgggaatgctttcatacgactcggaccgatg

SEQ ID NO: 3367 - DNA, 203 bp, Artificial sequence
  synthetic
ggcgcgccagtcctcagcagtacttctgtgccccagcccctctcagcccatctgccaggccccgcagcccatggggcaagcttgatccctatgattcctctgaggatgacaaggagtatgtgggctttgcaaccctccccaaccaagtccaccgaaagtccgtgaagaaaggctttgactttaccctccgactcggaccgatg

SEQ ID NO: 3368 - DNA, 203 bp, Artificial sequence
  synthetic
ggcgcgccagtcctctcccgcagcttgtccacactctgaatgcagagccagagccccggagcctctccctgggcggccatgtgggtttcgacagcctccccgaccagctggtcagcaagtcggtcactcagggcttcagcttcaacatcctctgtgtgggggagaccggcattggcaaatccacactgcgactcggaccgatg

SEQ ID NO: 3369 - DNA, 203 bp, Artificial sequence
  synthetic
ggcgcgccagtcctgacttggaggcagagacccaagcagctggaggctctgtgtgtgggtcgctgatttcttggagcctgaaaagaaagtaacacagcagggatgaggacagatggtgtgagtcagtgagagcagcgactggacccagagccatgtggctgtgccctctggccctcaacctcatcttgcgactcggaccgatg

SEQ ID NO: 3370 - DNA, 203 bp, Artificial sequence
  synthetic
ggcgcgccagtccttggaccaccgggcccggagggtccgagccgagagcggagcctgcaccctccacctcccgcccttcgggaaatatcagaactgagccaggagctgctgccgcccacccctcgtcttctggctgcctccctctttgtgccccacaggctccccctctccacctcctggggcccatccgactcggaccgatg

SEQ ID NO: 3371 - DNA, 203 bp, Artificial sequence
  synthetic
ggcgcgccagtcctatgttgagtgacagctgtccaatggaggccctccgtgctagtacggcttgcggcttaagcgccgccgcggtctgcggaatgtcaactattcaacatggaggcggaggtcgataagctggaactgatggtgagtgcaaagtgaaggagatctactgggtagtttatttttccccccgactcggaccgatg

SEQ ID NO: 3372 - DNA, 203 bp, Artificial sequence
  synthetic
ggcgcgccagtcctagtcaagttgacctacatagaagagaaggaactggaagtgcatgtctgtgttctggctccgattgggaaaagctgcttaaccactgttacacttccaggggctccccactcagtccccagtcatctatcgacagtgagctgagtacttcagaattggaggatgattctatctcccgactcggaccgatg

SEQ ID NO: 3373 - DNA, 203 bp, Artificial sequence
  synthetic
ggcgcgccagtcctcacccccaccgacctctcggagacaggaatccgctctgcccctgcatcctcctctgctcacccttctctcagtagtgtttgtcagacaccagtccggacctcagctctcgatctagttcccgagtaagatttagctcccgggaaagcgtgcctgaaacaagccggagtgagcctcgactcggaccgatg

SEQ ID NO: 3374 - DNA, 203 bp, Artificial sequence
  synthetic
ggcgcgccagtcctgcagtcccgggccggcccgtaccgccaggcgatcgcgctgatggcggcgctggcagcagcggccaagaaggtgtggagcgcgcggcggctgctggtgctgctgttcacgccgctcgcgctgctgccggtggtcttcgccctcccgcccaagtgggctgatcatggccagcgccacgactcggaccgatg

SEQ ID NO: 3375 - DNA, 203 bp, Artificial sequence
  synthetic
ggcgcgccagtcctcctccttcttcattagcggtctcccatgtggggccacatcttccctcaccaggaacccagtgggcgcgctccagcccccctcagcttgccttttgcgtggtcattagagctagggcacacgtcatgctgattcacatatttttgccctttgtcatgtattgagaaaaagtaaggcgactcggaccgatg

SEQ ID NO: 3376 - DNA, 203 bp, Artificial sequence
  synthetic
ggcgcgccagtcctaacaaatctcctaaccttcagaggctcggatttcttgtctatgagatgaagtgagtttccttcgtctgggcagactccctcccctcttccataaaggctgcaggagacctgtagctgtcacaggaccttccctaagagcccgcaggggaagactgccccagtccggccatcacccgactcggaccgatg

SEQ ID NO: 3377 - DNA, 203 bp, Artificial sequence
  synthetic
ggcgcgccagtcctacacggagccgtgtgtggatggctgggtctatgaccgcagcatcttcacctccacaatcgtggccaagtggaacctcgtgtgtgactctcatgctctgaagcccatggcccagtccatctacctggctgggattctggtgggagctgctgcgtgcggccctgcctcagacagtgcgactcggaccgatg

SEQ ID NO: 3378 - DNA, 203 bp, Artificial sequence
  synthetic
ggcgcgccagtcctaggaagccgaggaaggctgtgtttctgactcacacgggggagtcgggggagtcgtaaacaaccctgaagagaacagccaggcctggcgctctgggcttggtcctgggacacccgtttgacactgtaaaggtgaggctgcagacccagaccacctaccggggcatcgttgattgccgactcggaccgatg

SEQ ID NO: 3379 - DNA, 203 bp, Artificial sequence
  synthetic
ggcgcgccagtcctgatgcagcacggggtcgcggggcgggcgcccagtgcaccggaggaggtgagcgccaggtcgccttcgcggcccggggacacaggcagggacgcgggagctgatgcggctggaccggccggggaaacagtattttctggaagggggcccctctgaagcggtccaggatcctgcaccgactcggaccgatg

SEQ ID NO: 3380 - DNA, 203 bp, Artificial sequence
  synthetic
ggcgcgccagtcctttggctgcaaagagagaggatcccgggtatctccctccttacaaccaccgccacctcctagtgccttagaagccactgacagcccccagggcaggtgagccctgcatctggaataagtccacagtgaagaccaaaagagacacagtgaaaggctacttcctggctggaggggaccgactcggaccgatg

SEQ ID NO: 3381 - DNA, 203 bp, Artificial sequence
  synthetic
ggcgcgccagtcctgctgaccacaggagccggtgctggggactgagggaaacttagagttcagagagggggtgtgatttgcctgaggtcacacagcaagttagagacccagctccacgactcattgtcttggctttggccctcgtcatcctgcccacccagcggggcttcccaacccaccacacagcccgactcggaccgatg

SEQ ID NO: 3382 - DNA, 203 bp, Artificial sequence
  synthetic
ggcgcgccagtcctcctcagtttcctctttcagtctgtggtgtgtggtccatcctcttgctgagcacattgaaaggaactggctatctttgatctcttcctccagggaatctcttagttataacatttgttagctactttggagccaaacttcacaggccaaaaataattggagcagggtgtgtaatccgactcggaccgatg

SEQ ID NO: 3383 - DNA, 203 bp, Artificial sequence
  synthetic
ggcgcgccagtccttgcactgggcgcctcgcagctggtgaggatgccctgctgcgcggccctgcgcccccagccccagtcccaggtgggcaagactgactgggcccggcttcggcccctcgtgccggtggatgaaacgtgccggagtgcttgggtgccatcagctatcaaatctgaattctaagcgcccgactcggaccgatg

SEQ ID NO: 3384 - DNA, 203 bp, Artificial sequence
  synthetic
ggcgcgccagtcctagagatagcaggtggtgctaattcactgtgttggtgggaactctggctacactgaaaggctggagtgcagtggcacgatcttggttcaccacaatctcgtctcgaaggctcaggtgattctctcacctcagccgcctgagtagctgggaccacagtttcagctgtgagttcaaccgactcggaccgatg

SEQ ID NO: 3385 - DNA, 203 bp, Artificial sequence
  synthetic
ggcgcgccagtccttacaggacttgacccaatgaaagaagcatatggcacttgtgaagataaatgttactcctccctttttaattggaacttctgcttaggacctgtgtatgacgtttcacctgtgatctgttctttcggtagccactgactttgagttacaggaaggtctccgaagatttgtgtcaacgactcggaccgatg

SEQ ID NO: 3386 - DNA, 203 bp, Artificial sequence
  synthetic
ggcgcgccagtcctaatcagagaatggagggatataatgagtggaactgagggccgcgatgggcctcttggaacattggtgtgttcatctgcattcgatgtgctggaatccacaggaatctgggggtgcacatatccagggtaaagtcagttaacctcgaccagtggactcaagaacagattcagtgccgactcggaccgatg

SEQ ID NO: 3387 - DNA, 203 bp, Artificial sequence
  synthetic
ggcgcgccagtcctcccgcagggtggccttagcggccggtcgtaccacggcagccccgccgatcaggttcctttgggagacttcgacttgttggcgaaatgaaccggagaagaatcccaattgggaattgcggaaaacaggactctagggtagagaaaggttgtagaaccaatagggtttgagacctgcgactcggaccgatg

SEQ ID NO: 3388 - DNA, 203 bp, Artificial sequence
  synthetic
ggcgcgccagtcctcgcggtgccgcggggccgctccgaggagcctgagagacccacggaggcttcgcgggaagacgcggcggcggcggcggaggatgagcctgcagagcgcgcagtacctccgattctaagctgggtccagctgaagtctggacatccaggcaggctctgcaggacctgtaccagaaacgactcggaccgatg

SEQ ID NO: 3389 - DNA, 203 bp, Artificial sequence
  synthetic
ggcgcgccagtccttccgtcctccaggatctggggagaaagagccccatcccttctctctctgccaccatttcggacaccccgcagggactcgttttgggattcgcactgacttcaaggaaggacgcgaacccttctctgaccccagctcgggcggccacctgtctttgccgcggtgacccttctctccgactcggaccgatg

SEQ ID NO: 3390 - DNA, 203 bp, Artificial sequence
  synthetic
ggcgcgccagtcctagaggaggagggcacttttgtgtgatggcaacttcacttctagggcgtggtgcttgctcccgaatcagacgccggcagccaaacttgtcccctcctgtagagtaggaagcggccgggcgccggggctgttgggggtgccaggaagaaccgaggttgggatcgactcctctggcccgactcggaccgatg

SEQ ID NO: 3391 - DNA, 203 bp, Artificial sequence
  synthetic
ggcgcgccagtcctaaacatgaaacaagaataataatatttaaatgtaacttaatcattatacctctttatccatcaaagtgaattcattccattccctttcatctgtgctcatactttgcatcagatattgggtaaaccaaagtgtgtaggaagaaataaatgttttcatagtcattactctttacacgactcggaccgatg

SEQ ID NO: 3392 - DNA, 203 bp, Artificial sequence
  synthetic
ggcgcgccagtccttcgccgcgagccgcaggtctgcctgcagtcccacttccaggctgaactccctgaggtctctgattccctaggtgtcctggagtctggcccaggacctggccccacaggagtcccagcaggggtagctcctcccgggacaaggaccgaagtgcgacggtcagtagttcagtgccccgactcggaccgatg

SEQ ID NO: 3393 - DNA, 203 bp, Artificial sequence
  synthetic
ggcgcgccagtcctaagagtcggagttttggcgttagacctaggttcagagctcagatccacttcttcctagccttacgacttaggagcactccgctggtccaggcggcaacatgtccatgcttttagtgatgtccctgcctctaatccagaagccatggaggagataaggtagcccccctcgatcggcgactcggaccgatg

SEQ ID NO: 3394 - DNA, 203 bp, Artificial sequence
  synthetic
ggcgcgccagtcctaccgtctgaggccaggagcgctgcgacggagccttgaccgccgttgcccggccctctcccgcgcagccccgggcttccgcagtccttccttcagaagggaaatttctgagggtcaggaaggggaatctgtacctcactccttgaacaccaaggaaggaatattgggaaaccaaacgactcggaccgatg

SEQ ID NO: 3395 - DNA, 203 bp, Artificial sequence
  synthetic
ggcgcgccagtcctacgcaccgcgcagcctgctgtgcccgtgggtcccgagtgctccgccgcccgccccgacccgggcccagccgcctccacggcccgcgctcgtactggagcgaagagcggcctcctgaaggaggggaagggacgtgggggcggccacggcaggattaacctccatttcagctaatccgactcggaccgatg

SEQ ID NO: 3396 - DNA, 203 bp, Artificial sequence
  synthetic
ggcgcgccagtccttgacagggcccgggtcccttctcagtggtgctctgtgcttcagggcaagctccccgtctccgggcgcacttccctcgcctgtgttcggtccatcctcctttctccagcctcctcccctcgcaggtgggatcgtcggtgggaccggagcgcgggcgggcgcggccccccgggacccgactcggaccgatg

SEQ ID NO: 3397 - DNA, 203 bp, Artificial sequence
  synthetic
ggcgcgccagtcctcgtgcgagtcggcctcagtgtctgcgagattaatctctcatggccgctgcacaagaacctggcttttagctgaactaaggagaaagtcctacaacagtttggcgtgcaacatggggcttgagaaaggatgaggacggggacttggttgccttttccagtgacgaggaattgacacgactcggaccgatg

SEQ ID NO: 3398 - DNA, 203 bp, Artificial sequence
  synthetic
ggcgcgccagtcctcctctctgctgagtcagagctctgcatatattttaagaaaaggcattgaggaactcaatcaaaccagtattcttttcacacaggtttcatcagtttcacccttttctgtgtgcggctgattttagaaagattgcttccttgtatggtagcgataagtttgatttgccctatgggcgactcggaccgatg

SEQ ID NO: 3399 - DNA, 203 bp, Artificial sequence
  synthetic
ggcgcgccagtcctaacaaaccagggcgggatgggagtgtcttcttggctgtggaaatcgatcctcctaccttgtcctgaagccacccgccgcctttcctcgtccctcccttcgcggtgattttccggtcccggcgcccggcgagggcgcgcggctggtgtccgccccgcccgaaaggtgagccagcccgactcggaccgatg

SEQ ID NO: 3400 - DNA, 203 bp, Artificial sequence
  synthetic
ggcgcgccagtcctctccccacgcgccaccatgcctctgctggacgttttctggtcttgcttcaggaaggtgaagtgcttcccattgctgcaggtgaagaagaacgctgaagccgaggccaaaagagcatgtgagtggcttcaagcaacaggattccctcagtatgtgcagctttttgaaggaggctgcgactcggaccgatg

SEQ ID NO: 3401 - DNA, 203 bp, Artificial sequence
  synthetic
ggcgcgccagtcctagaggcagttctagtctcagatcgtggggcagagaaagctccttgggaacatgggagaggaacgagttggtgcattgtagaaactgcccgaaggccagcagggctggtgcttaggagaacatgcagtagaacttttcatcaaacaaatggaacacgtcacagaattttgctaaccgactcggaccgatg

SEQ ID NO: 3402 - DNA, 203 bp, Artificial sequence
  synthetic
ggcgcgccagtcctattccttttaaatctcaagcttcagtaatcccagaatcagaaaaaaaaggattcaatagtcaagccaagagatttcctcataagaagaatgatatcccaggacctgggttctacaatgttattcaccagtcaccggtgtccaacagtgtctcattgtccaagaaaggaacttgccgactcggaccgatg

SEQ ID NO: 3403 - DNA, 203 bp, Artificial sequence
  synthetic
ggcgcgccagtcctactgaagtaggcctacacagtaggaactcatgtcatttcttgtaagtaaaccagagcgaatcaggcggtgggtctcggaaaagttcattgttgagggcttaagagatttggaactatttggagaccaatgatgcgagctcagagtcaatagcatccttctctaaacaggaggtccgactcggaccgatg

SEQ ID NO: 3404 - DNA, 203 bp, Artificial sequence
  synthetic
ggcgcgccagtcctaggtgggcggtggcggtaggtgggtggccagcgactggcaacgcggtggcttagacgcgcgagatccggccagggtcagagtactgtaagattgatgttaaaggcatggtgttcaccccacttcatcagcgtacataagttatctcttcttttggacccttattttatgccatacgactcggaccgatg

SEQ ID NO: 3405 - DNA, 203 bp, Artificial sequence
  synthetic
ggcgcgccagtcctgcaagctgctgaagtttctcagctgcggggagcaagggtaatcactcctgaagatcttctgtttttgatgcgcaaagataagacaaattgagtggcagcaataatgcgaacaaaagacaaaagattgctcaggacttcctcaactctattgaccagacaggagaacttttagcacgactcggaccgatg

SEQ ID NO: 3406 - DNA, 203 bp, Artificial sequence
  synthetic
ggcgcgccagtccttggctgctgaagatcatctgcggggtggtcaccatccgcaccgtgtatgcctcccacaagcaggccaaggcctgcctcgtctctcgcgttagctgtgagcgcacaggcactcgcttccacacccgtggcgtgaacgacgacggccatgtgtccaacttcgtggagacagagcagcgactcggaccgatg

SEQ ID NO: 3407 - DNA, 203 bp, Artificial sequence
  synthetic
ggcgcgccagtcctgagagccacggccagaggggacagaagcccagccaggagtccctcagagtgctcccttcaagcctcccaggccatgcaccggggctcagcctgagttccacctcgctgccggagccaggccctccacggcaccccagtccccagagccccgacagaggggtccctggccacagccgactcggaccgatg

SEQ ID NO: 3408 - DNA, 203 bp, Artificial sequence
  synthetic
ggcgcgccagtcctcgaatctccatccctaatccatctgcccctaatctctgtcccctttgcccatccttccttttctcggtgtctctttccacccttatctccacacctgcccaccctgcactcccattctgtttcccatctgcacccttgccccatccctcccacacacaggaccagacggccacccgactcggaccgatg

SEQ ID NO: 3409 - DNA, 203 bp, Artificial sequence
  synthetic
ggcgcgccagtcctgaacctgaacatgattttagcaaaatttccatcgtgaggccattttcaatagaaacgaaggattccacggatatctcggcagtcctcggaacaaaagcagctcatggctgtgtaactgcagtctcaggcaaggctctgccttccagcccgccagacgccctccaggacgaggcgcgactcggaccgatg

SEQ ID NO: 3410 - DNA, 203 bp, Artificial sequence
  synthetic
ggcgcgccagtcctccttctgcgccacagagatggggtctcactctgtcatccaggctggaatatagtggcacaatcatagcccattgtagcctccatctcaaggactcaggggatcctcccttctaggcctcccaagtagctgggattacaggtagttacttttggtgacgctgtccagttcccacacgactcggaccgatg

SEQ ID NO: 3411 - DNA, 203 bp, Artificial sequence
  synthetic
ggcgcgccagtcctggcctcttttgtaggagcacctgaaatgcagcgtctggtgcactaagccgtagcggcagcagcagccacagcgacagcgctggggccctgtgtagaagctccatcccccttgtctttgtgcttgcctgcgtccccagactcagagattatcttagaagacctaggactccaaaacgactcggaccgatg

SEQ ID NO: 3412 - DNA, 203 bp, Artificial sequence
  synthetic
ggcgcgccagtccttgcttagaacagagcttggtgagcatccggtcaacagctggtccctgcagacggcttcccatttttatgaccggatgctgggaagcctgctggtccacaggtccatacatgaagtcaccataagagggtggttcccacttcatcaacacctcatcgccgcgaggtgaggctaagcgactcggaccgatg

SEQ ID NO: 3413 - DNA, 203 bp, Artificial sequence
  synthetic
ggcgcgccagtcctctgatgtgagctagtttgtctggttgagttggatgtttaaatagaaggcagaacaacaacaggtactccacatcagcattctcaagactggagaagttaggcctcagacatcccaagccttctcctttcattggaaacttgacatttttccgccagggtttttgggaaagccaacgactcggaccgatg

SEQ ID NO: 3414 - DNA, 203 bp, Artificial sequence
  synthetic
ggcgcgccagtcctccgaggacccccctccctagaacgtaactagtcatcaaactgaggagctgtccgtgtgcaacaactcaagataaaattcttgactattgaaatgcgaaaaattagattgaggctttgcggctgaattagattggtttttcttgtggccacatgaggtcgctgctggttaactgacgactcggaccgatg

SEQ ID NO: 3415 - DNA, 203 bp, Artificial sequence
  synthetic
ggcgcgccagtcctggacgggcgggctgggactggtgctggccattggctgcctcaaggctcccaccccgcctgcctccctagcctgcggctggcggcccctgcctctccagctgcctctgaactccctggagcaagcacctcctgctgggctgtgtgagctgcgactggttctcagtggcccctgcccgactcggaccgatg

SEQ ID NO: 3416 - DNA, 203 bp, Artificial sequence
  synthetic
ggcgcgccagtcctccctggaaagcggcctacagttccttggacacctccaagttcaagaaccagggtctgtcatccccacagcccctgcccctgggagccagcgctcaaggcagctccctagggcagtgccacttgaaggagattccccctccacccccgactgctgccagcagggattctctgggccgactcggaccgatg

SEQ ID NO: 3417 - DNA, 203 bp, Artificial sequence
  synthetic
ggcgcgccagtcctggttcttcagctttggaacttgactggctctccttgctcctcagcctgcagacagcctattgtgggaccttttgatcgtgaccaccaaggatccagatataattctttcctcagtaatagaaaaaagaatctgggatctaagaagatacctactcattttctaagtgactggcccgactcggaccgatg

SEQ ID NO: 3418 - DNA, 203 bp, Artificial sequence
  synthetic
ggcgcgccagtcctgcgggggtcgcgctgcacagcctgcggcgcagcggagggggaccgcagtcgagtctgcagagtgttgggtctgtagccagcaaattacttcatcatctagattatccattcagttgatcctaattagcaaggataacaagaatcgtccgcactaaagtcccctgcagcgtgacccgactcggaccgatg

SEQ ID NO: 3419 - DNA, 203 bp, Artificial sequence
  synthetic
ggcgcgccagtcctcaggatgtggcagaacatcacaagcagataggaaacgtcttacagattgtggagagctgcagccaactccagggtttccagtctgaggaggtctcacctgctgaaccagccagccctgggacgccccagcaggtgaaggacaagaccctgcaggagtcgagctttgaggacatccgactcggaccgatg

SEQ ID NO: 3420 - DNA, 203 bp, Artificial sequence
  synthetic
ggcgcgccagtccttgtgcactttctccctccacctggagcatgggctaacaccggaggaaaggaaaagacagagtcagacaggggcctgccccatcacctgaattccagagatgccagtgtgcactgaagccccaggcagggcgtgcccaggaccggatcctggatggtggagcctggggaggggcccgactcggaccgatg

SEQ ID NO: 3421 - DNA, 203 bp, Artificial sequence
  synthetic
ggcgcgccagtcctcccctacttcatcacctacaagtgcagcggcctgtgagtgcgggaagggcgcggggcggagagggcgcggggcccgggccgaccctcacctcccgcttctccaggtccgagtacaacgccttctggaaatgcgtccaggctggagtcacctacctctttgtccaactctgcaagcgactcggaccgatg

SEQ ID NO: 3422 - DNA, 203 bp, Artificial sequence
  synthetic
ggcgcgccagtcctgacaactgccgctcaggccatctctggcttcttcgtgtggacggccctgctcatcacatgccaccagcccagggctcggctgggccaagtgtgatgtcatgagagctgggacgagacacccaggggctgcctggactgaggactgtggtagagcagctcttggcatttatctaccgactcggaccgatg

SEQ ID NO: 3423 - DNA, 203 bp, Artificial sequence
  synthetic
ggcgcgccagtcctcgtctaaattcgcgtcggttcttatttctctccctggcaaggtctgaagacggatggagtctagttctgtcgcccaggctggagcccagtggtgtgatctcagctcactgcaatctccacctcctggcttcaagcgattcttctgcttcagcctcccgactgtgtcagcgtgttcgactcggaccgatg

SEQ ID NO: 3424 - DNA, 203 bp, Artificial sequence
  synthetic
ggcgcgccagtcctcacttcgactgctcagggaagtacagatgtcgctcatcctttaagtgtatcgagctgatagctcgatgtgacggagtctcggattgcaaagacggggaggacgagtaccgctgtgtccgggtgggtggtcagaatgccgtgctccaggtgttcacagctgcttcgtggaagacccgactcggaccgatg

SEQ ID NO: 3425 - DNA, 203 bp, Artificial sequence
  synthetic
ggcgcgccagtcctgagagaaagcccgggcaggagagcacagagccggcgactggacgcgagcgcggggcgggtggagagcgtctctccgggcgccgctgctgttgtcccgggtgctgaaaagccgggaacttcccgggaagcagcggcacttttctccctggaaggctaaacatatttttgactggtcgactcggaccgatg

SEQ ID NO: 3426 - DNA, 203 bp, Artificial sequence
  synthetic
ggcgcgccagtcctcctcgtcctcggcccgggtgccctgcccccgtccaggagccctaggagtgctacggggggccggagccttgcccgggccgctgccccgtccctggattcggggctggacgcagcaagcggggcgctgtgtccccaagctccccgtcctcgggggagcttttggaagagtcccagcgactcggaccgatg

SEQ ID NO: 3427 - DNA, 203 bp, Artificial sequence
  synthetic
ggcgcgccagtcctcggcagcgggttcggttgcgcgtggcgcacggggtgggagcggagcccaggccgggagcaggcgccgccgccagtgagaaccggggccggagccgggtgcggatttgctggggctgagtcgggggcgcgcgggccctgacctctgccctctgacctctcccctagcaggcgacccgactcggaccgatg

SEQ ID NO: 3428 - DNA, 203 bp, Artificial sequence
  synthetic
ggcgcgccagtcctggctgctcgggctggtctcggccgcggccgccgcctgggacctggcttccctgcgctgcaccttgggcgccttttgcgaatgcgacttccggcccgacttgccggaaggatctgaagagctgggtccaagggaacctcactgcctgtggccgctccctcttcctcttcgatgagcgactcggaccgatg

SEQ ID NO: 3429 - DNA, 203 bp, Artificial sequence
  synthetic
ggcgcgccagtcctatacacacagtgacttggaggaatctcaaaggcattctgctcaatgacaggagccagcctcaaaagatttggctgactgaggacgcgacaggtactcagcttctttctgcatctcagttgcccagcacaggggctggcacgcacccttctgcagaggccgggctggaggagaagcgactcggaccgatg

SEQ ID NO: 3430 - DNA, 203 bp, Artificial sequence
  synthetic
ggcgcgccagtcctccgcatgttccccagcatcctcggctcctgcctcactagctgcggagcctctcccgctcggtccacgctgccgggcggccacgaccgtgacccttcccctcgggccgcccagatccatgcctcgtcccacgggacaccagttccctggcgtgtgcagaccccccggcgcctacccgactcggaccgatg

SEQ ID NO: 3431 - DNA, 203 bp, Artificial sequence
  synthetic
ggcgcgccagtcctcctggtctcccgcgtccatcggtccattcctgcgtcgttctgtccttccgaacgcacacttcaggagcagccgcgaggagtgagcactgcacgcaggatccgcccagtgcttgggccaagcaccctgtggcatccaagctcccctggacgttacccttggtgaaccaaggtggccgactcggaccgatg

SEQ ID NO: 3432 - DNA, 203 bp, Artificial sequence
  synthetic
ggcgcgccagtcctgtcactctaagttggtggtatccaatcccttaggaacgaacctctgaggttttccatttatgagactctcctactactagagtgggccaaagggagagagaatcctatttggagcaatgaggaggtaacagtccacccacaaatgaattatcaggagtgaacccagaggcacgtcgactcggaccgatg

SEQ ID NO: 3433 - DNA, 203 bp, Artificial sequence
  synthetic
ggcgcgccagtcctgaggggctttcagctggtcgcctgcttgtcacctctcgctgcctgaaaggcagctctcagagccctttcctgtccttctaattacagcggcgggggcagtgcgcgcttcgggacgcaattggaaaccagcgtgcagggtcaaagacagccggccccccatgtcagtggtctaggcgactcggaccgatg

SEQ ID NO: 3434 - DNA, 203 bp, Artificial sequence
  synthetic
ggcgcgccagtcctcgagaccttcagagtcacctcgcagtgtaacctgtagcctgtagagatgacttctacccggcctccccctcagagctcttggagtccaggctgagggtcttgaagaaggaactggaggactgtgaggtgttccggtccacggaaaagaaggagagcaaggagctgctgaaacagcgactcggaccgatg

SEQ ID NO: 3435 - DNA, 203 bp, Artificial sequence
  synthetic
ggcgcgccagtcctagtgtgatggagagtctctgccgtgccatctgggatgcaaaccgtccctgtgttccccacgtccaggccgtagatgctccccgccggtcagtcacttagtcgtcagatcgcccgtcctggtatcacagtgcttctgttcaggttgcacactgggccacagaggatccagcaaggcgactcggaccgatg

SEQ ID NO: 3436 - DNA, 203 bp, Artificial sequence
  synthetic
ggcgcgccagtcctagggaccctgagcaccgcctggtctctttcctgtggccagcccagctgggaggctgtggcgtgctgggtgtcggcatctggctggccgccacacaggggagcttcgccacgctgtcctcttccttcccgtccctgtcggctgccaacttgctcatcatcaccggcgcctttgtccgactcggaccgatg

SEQ ID NO: 3437 - DNA, 203 bp, Artificial sequence
  synthetic
ggcgcgccagtccttttgaaagcgtgggctgaatgctgacctcccggacatcatgagtgttgttctacctgcgccccctggacatcctggcggaagtggtcccttctgatggcgccacaagcgggatcaggatagttcaggttcacggtgcacggggactccagctctcagtagccgccccccgcacccgactcggaccgatg

SEQ ID NO: 3438 - DNA, 203 bp, Artificial sequence
  synthetic
ggcgcgccagtcctattggcagttgtgattcagagacctagaaagctgaacccacggctggcaagaagaggatggtttgtgggacctgggctgatgtctgatgaaattttaagccccagctatagctactacaaagaaaagtggctgatgataagcatgtaactcaaaaagacaatgtatataaaaatcgactcggaccgatg

SEQ ID NO: 3439 - DNA, 203 bp, Artificial sequence
  synthetic
ggcgcgccagtcctgtgggccaagcgggagttcagattggcaatgcctgctgggagctcttctgcctggaacacggcatccaggcagacggcacttttgatgctcaagctagcaagatcaacgatgatgactccttcaccacctttttcagcgagactggcaatgggaagcatgtgccccgggccgtccgactcggaccgatg

SEQ ID NO: 3440 - DNA, 203 bp, Artificial sequence
  synthetic
ggcgcgccagtcctcacaggcgtccacagttctgggaagtcatcagtgatgagcatggcatcgaccccagcggcaactacgtgggcgactcggacttgcagctggagcggatcagcgtctactacaacgaggcctcttctcacaagtacgtgcctcgagccattctggtggacctggaacccggaacccgactcggaccgatg

SEQ ID NO: 3441 - DNA, 203 bp, Artificial sequence
  synthetic
ggcgcgccagtcctcactggcggtggctacggtgacggcctggcccggagcgggcagagttggaggtggtggcgttcgctctccctaggggctgtcgggagctcagcggggaccgagcctgggaggccggccggtgccagcacctttcggcttctgagacggcggcagcagcggcattcaggttctaacgactcggaccgatg

SEQ ID NO: 3442 - DNA, 203 bp, Artificial sequence
  synthetic
ggcgcgccagtcctcctgtaccataaccaggaggctgatggttgctcaggcctccctcaaactagccaatgagaagtgcacgggtcctggtcgcctaggaaaccgcgtgacaacaagatggcggcgctgcgggacggctagcggccctgcgtgggagttcctgacagctggattctagaagtagaactcgactcggaccgatg

SEQ ID NO: 3443 - DNA, 203 bp, Artificial sequence
  synthetic
ggcgcgccagtcctgcgggggcggggcacctctgtgcagggttcccagtcaccgcgacgctcctcgggaagccatagggcgcctcccagcccgtctccccgctccagtttagaacctaattcccaattccgggaccgggcccagccctgggctcttactgtccgcttttgctgggacctgttccacaacgactcggaccgatg

SEQ ID NO: 3444 - DNA, 203 bp, Artificial sequence
  synthetic
ggcgcgccagtcctttcctcggatgtgccccctcacagagagatgaaggggcagcagaaaacagctgaaacggaagaggggacagtgcagattcaggaaggtgcagtggctactggggaagacccaaccagtgtggctattgccagcatccagtcagctgccaccttccctgaccccaacgtcaagtgcgactcggaccgatg

SEQ ID NO: 3445 - DNA, 203 bp, Artificial sequence
  synthetic
ggcgcgccagtcctagtgggaatccttaaccccgccccctgctcaggtcaatcccccacccaccgcccccactgtccctcccagtcttccttcccagaggagaaggctgggtatgaggaaactgctgtcttttcactggatcagacgtaaatattaactggacctctctttagattctttgctcaatacgactcggaccgatg

SEQ ID NO: 3446 - DNA, 203 bp, Artificial sequence
  synthetic
ggcgcgccagtcctgactggaggagcacaggccttggaaaggaaagcagctgagatccagaggagtggaaggctcccccttgactaaagctaaacaccagtttctcaggaggatgccttgaatctcatgaacgagaatatagacattctggagacagcgatcaagcaggcagctgagcagggtgctcgcgactcggaccgatg

SEQ ID NO: 3447 - DNA, 203 bp, Artificial sequence
  synthetic
ggcgcgccagtcctaggagtcaaacttgcgggaattttgcagtttatctgcagggctgttgtttccagcaagacccaaagctagaaaaggaggaggaagaaactgacccgatcagtgccagtcattgtattcaaagaagaataagcaagaaagaaaagaaggaaggaagagaggtagacagatacaagcgactcggaccgatg

SEQ ID NO: 3448 - DNA, 203 bp, Artificial sequence
  synthetic
ggcgcgccagtcctaaactggtcactgcagtttctaataatactattcaagtccacacatttcctgaaggagttccagatggtatattgactcgcttcactacaaatgcaaaccatgtggtctttaatggggatggtactaaaattgctgctggatctagtgattttctagtcaaaattgtggatgtgcgactcggaccgatg

SEQ ID NO: 3449 - DNA, 203 bp, Artificial sequence
  synthetic
ggcgcgccagtccttcctctttcctctgcccagtcctggggtcccgcggccgcctaggagggagcccgccggggcggggcggggccgggtgcccatgaacagcggggtcccggccacgctggccgtgcggagagtgaaattcttcggccagcacggcggggaggtcaactcttctgccttctcccctgcgactcggaccgatg

SEQ ID NO: 3450 - DNA, 203 bp, Artificial sequence
  synthetic
ggcgcgccagtccttgggcttaggaaggaagaggtcatctcgctcggagcttcgctcggaagggtctttgttccctgcagccctcccacggcagagtctccagagatttgggccgctacaaaaagtgcattttgcccattcggctgtggatagagaagcaggaagagcactggacttggagtcagggacgactcggaccgatg

SEQ ID NO: 3451 - DNA, 203 bp, Artificial sequence
  synthetic
ggcgcgccagtcctttcttcttgttgggggactcccagccttccgcgcgtccggaggaggagaagcggcggcgccgggaagcagtgtctgttgacttcacttggcactgtttaacattccacctctggaaattgtaaagatggagagatgaggggaagggacaaggggatgaagaaagaggaaagggccgactcggaccgatg

SEQ ID NO: 3452 - DNA, 203 bp, Artificial sequence
  synthetic
ggcgcgccagtcctcgaacaaccaaacagaaaagtttaataaacagcggacggaggggccggcggtggcggagccggagcaagcaggggttcggcggcattacctgtacccattcaccggcggctaccggcggcggcgcgcagcgtgtcaggcggagagacccgccgccaggtgtgcaactgaggaaccgactcggaccgatg

SEQ ID NO: 3453 - DNA, 203 bp, Artificial sequence
  synthetic
ggcgcgccagtcctatctgaagtctgctgcagtaaaacacagaaggctttaaaatgttttcttgcataaaattcaaaacttttaagtagctgcttatgagaatagggaaggcagaaagctaatgtctgtctcaagatacaggacagctgtttgctcatcaacctcaactgtgtgtgcaactgaggaaccgactcggaccgatg

SEQ ID NO: 3454 - DNA, 203 bp, Artificial sequence
  synthetic
ggcgcgccagtcctccagttgccttcttcctcatctctgcagtaactgtcttcatggtttcatagccttctccctgatacccctccccagtgtcacatttgaagacgagcactgaggatgaggaaccaactgaagaatatgaaaatgttggaaatgcagcatctaagtggccaaaagtggaggatcctcgactcggaccgatg

SEQ ID NO: 3455 - DNA, 203 bp, Artificial sequence
  synthetic
ggcgcgccagtccttggaggtcggatccgcagctgcttgcccggttctactatgccgacgaggagctgaaccaggtggccgcggagctggacagcctggatgggcggaaggacccccagcggtgcacgctgctggtcagccagttccgctcctgtcaggacaatgtgttgaacatcattaaccagatccgactcggaccgatg

SEQ ID NO: 3456 - DNA, 203 bp, Artificial sequence
  synthetic
ggcgcgccagtcctgccaacaataagctctttacttgattgcaccatgagaaagctgctaatgagacttgttgagcacaaaaatggacttgaagaaccaaaagccattgttttcaaatgaagaacactgaacagttttaagcctcgatgctttttaatcaccactgagcttttcctcataacatcagacgactcggaccgatg

SEQ ID NO: 3457 - DNA, 203 bp, Artificial sequence
  synthetic
ggcgcgccagtcctaacctctgcctcgattggttgcagccggagacccgcaccaaggaggagatcatcgagctcttggtccttgagcagtacctgaccatcatccctgaaaagctcaagccttgggtgcgagcaaaaaagccggagaactgtgagaagctcgtcactctgctggagaattacaaggagcgactcggaccgatg

SEQ ID NO: 3458 - DNA, 203 bp, Artificial sequence
  synthetic
ggcgcgccagtcctgcggcgggaaggaggcggcaccggaggggagggccgggcgcggcggcggcggcggtggaggagccggagcataatgctaaagaagtaaacaggtcatggcacgtttaacaaaaagacgacaggcggatacaaaagctatccagcatctttgggcagccattgagattatacggacgactcggaccgatg

SEQ ID NO: 3459 - DNA, 203 bp, Artificial sequence
  synthetic
ggcgcgccagtcctcctcgcgccccggcctcggcgcccgctcccggctccagcgcgcctgcacgtacgtagccttcacgtgtgtgtggatacggagtgcatgtgtggagacagaggaatatgctccaacaaatttcggatagaggcgccgaagacaggacgtggggaagctaaagaagtaaacaggtccgactcggaccgatg

SEQ ID NO: 3460 - DNA, 203 bp, Artificial sequence
  synthetic
ggcgcgccagtcctggtttgagccaagtatgtgtcttgcgggtctttgcgaaagtgaaccagttattaggggcgcctaacgacctggggggtcaactaaggggactgtggcacgtttcaggcaggattcctccttcattcaaactgcatcacccaggagtctgcaaattccccaaagtaggaggaaaacgactcggaccgatg

SEQ ID NO: 3461 - DNA, 203 bp, Artificial sequence
  synthetic
ggcgcgccagtcctctgtgtcccctgctagccgtaggtcgtgtgacccgcaggcaccgggagatccagaagtgaaacgccaggctctctggaggccaggagatggcatattctcacgatgcaggtgtgatttgtccagagaatctttcctaagaggaaatcccagagaagcaggagaaagagaaagaacgactcggaccgatg

SEQ ID NO: 3462 - DNA, 203 bp, Artificial sequence
  synthetic
ggcgcgccagtcctagaaagctccaaggtcaggaatccatcttgggccaagggactcctggtctgcaacctctccctggaacacccaggcagaagcagaagagtcgcagaatagagaaagtcctagagtggctgtttatttcccaagagcagccaaaaatcaccaagtcctggggacctttgtcattccgactcggaccgatg

SEQ ID NO: 3463 - DNA, 203 bp, Artificial sequence
  synthetic
ggcgcgccagtcctatggctgttgaacatccacaaggcacctgcaagggaggaaatttggacacacagagagatgccaaggatacacacagaggaaagaccatgtgagtgcatagcaagaaagtgaccatctgcaagccaagactatgaatcaaagttgagaccaagaaattatttctgaaaaaggatcgactcggaccgatg

SEQ ID NO: 3464 - DNA, 203 bp, Artificial sequence
  synthetic
ggcgcgccagtcctatgtgcactgagggtgacacttctgagtgtgggggccctggctagggagtgggactggcaggcttgggtggggttcccaagctttaatcttcctaccccacagaatgttttctctgcccttcaggcagcctgagccgggcagggcccctgcctctgctacggcagcccccgatccgactcggaccgatg

SEQ ID NO: 3465 - DNA, 203 bp, Artificial sequence
  synthetic
ggcgcgccagtccttctctcaaacctgaaggcatccagaactgggatgacttatgggtccagagagagggtctaggaaagcctcagcctcgggacagaggcccccggctcctgggtgaaccacgctggggccaggctagtagtgatcgggccgctgtgtgtggtgagtgtggcaaaagcttcaggcagcgactcggaccgatg

SEQ ID NO: 3466 - DNA, 203 bp, Artificial sequence
  synthetic
ggcgcgccagtcctagtccgtggatctcacaaaaatgtttgctgacccttgacattgacaaactgctgacagctcagatgatccatgattggaaggatgtggtcatcaccaagatgtctttctttctccggttcccagttttccagacctgaagtgttttccaatcaaagcgaagagacgatctgtggcgactcggaccgatg

SEQ ID NO: 3467 - DNA, 203 bp, Artificial sequence
  synthetic
ggcgcgccagtcctgagtgatgtcttccagactcggtgctgtacccgcccaggacccagtgctccataaaggataatagtttccagtacactatccctcatgatgactccttaagtggttcatcgtctgcatcttcgtgtgaaccagtgagtgattttccagcatctttccgaaaatctacctactggcgactcggaccgatg

SEQ ID NO: 3468 - DNA, 203 bp, Artificial sequence
  synthetic
ggcgcgccagtcctggaccccggctcccttttccgttgacctggtgttcgttttccatgtgttgctgagagatggatgttaaaaatcaacaccaggactacagtaaggctgaaatcattgaagtgcttggagtgcagaactgaaagagtttcattggggatcatgtccatggagctcctcatgctgtccgactcggaccgatg

SEQ ID NO: 3469 - DNA, 203 bp, Artificial sequence
  synthetic
ggcgcgccagtcctctcactgcaagctctgcctcccggttgctgaacctgtttgcatgagttgctcctgacggccctttaggatacttccatgtctgtagggtctagagtgacatctcctcccctcccctgacgagatctgccctccttggcactgtgcttccccagaggggtggcctcgctgttccccgactcggaccgatg

SEQ ID NO: 3470 - DNA, 203 bp, Artificial sequence
  synthetic
ggcgcgccagtccttacatttcccagagggcctggtggcctgccacttttctcgcaggaattcgaacgtttcgtcactcctggcgggacccttagatctgggaggaaacctctctgaggtctggtcagattccaaccctggacagcagtgaacacaacctttcccctgagccactggaattggacagacgactcggaccgatg

SEQ ID NO: 3471 - DNA, 203 bp, Artificial sequence
  synthetic
ggcgcgccagtcctgaaatattccagacagtaatgttggaaagacatgaaagccacgacatacaagatttttgcttcagagaaacccagaaaaatgtacatgactctcagtgtctgtggaaacatgattgaagacattataagcgagtgcgtgtgacctataaggaaagtctcattggtagaagagaccgactcggaccgatg

SEQ ID NO: 3472 - DNA, 203 bp, Artificial sequence
  synthetic
ggcgcgccagtcctgatacaagccatctctaaactgtgggccattcagtggacaagagaaaatttatgacattgtgtcagaaacgattgagaaagactttcctgtgtggtttggctccgtggttggacacatcagtagccccgtggtcatcctgcccgcagtactcctgcttttcatgctcatctattcgactcggaccgatg

SEQ ID NO: 3473 - DNA, 203 bp, Artificial sequence
  synthetic
ggcgcgccagtcctcagccgcctctgcagcccgagatgcctgacctcagccacctcacggaggaggagaggaaaatcatcctggccgtcatggataggcagaagaaagaagaggagaaggagcagtccgtgctcaaaaaactgcatcagcagtttgaaatgtataaagagcaggtaaagaagatgggacgactcggaccgatg

SEQ ID NO: 3474 - DNA, 203 bp, Artificial sequence
  synthetic
ggcgcgccagtcctgcctgcacctgcagcacagagactttcctctggagacccttctacaagtccatctttgtcccagactacaccaagtaaagatactgatgatcagtccaggaaaaacatgactagcaagaaccggggcaagaggaaagctgatgccacttcttcccaagacagtgaattagaacgcgactcggaccgatg

SEQ ID NO: 3475 - DNA, 203 bp, Artificial sequence
  synthetic
ggcgcgccagtcctcagattttcctcagtgtcatagtaggagctttaaatcttggcaatgcctctccttgtttggaagcctttgcaactggacgtgcagcagccaccagcatttttgagacaatagacaggaaacccatcattgactgcatgtcagaagatggttacaagttggatcgaatcaagggtcgactcggaccgatg

SEQ ID NO: 3476 - DNA, 203 bp, Artificial sequence
  synthetic
ggcgcgccagtcctaacgaagactgagtgaatctgcatgtcggttttatagtcagcaaatgaaggggaaacaactagcaatcaagaagatgaacgagattcagaagaatattgatggttgggagggaaaagacattggacagtgttgtaatgaatttataatggaaggaactcttacacgtgtaggagcgactcggaccgatg

SEQ ID NO: 3477 - DNA, 203 bp, Artificial sequence
  synthetic
ggcgcgccagtcctagaacagggcagttatccattatagggatgatgagaccatgtatgttgagtctaaaaaggacagagtcacagtagtcttcagcacagtgtttaaggatgacgacgatgtggtcattggaaaggtgttcatgcaggagttcaaagaaggacgcagagccagccacacagccccaccgactcggaccgatg

SEQ ID NO: 3478 - DNA, 203 bp, Artificial sequence
  synthetic
ggcgcgccagtcctaagacagaactcaactcatcagctgaaagtgaacaacctttggacaaaacaggacatgttaaggatacaaatcaagaagatggagttatcatcagtgaacatggtgaagatgaaatggatatggaaagtgaaaaagaggaagaaaagccaaagactggtggagctttttcaaatcgactcggaccgatg

SEQ ID NO: 3479 - DNA, 203 bp, Artificial sequence
  synthetic
ggcgcgccagtcctccgcagacttgagcgatgcatcaaagagctgacctatcaggcagaggaagacaagaagaatctgagcaggatgcaaactcagatggataaacttcagctaaaagtgcaaaattacaagcagcaagtcgaggtggcggaaacacaagccaatcaatacctttccaagtataagaacgactcggaccgatg

SEQ ID NO: 3480 - DNA, 203 bp, Artificial sequence
  synthetic
ggcgcgccagtccttcagccttctgaagtgaatcagaacacagcagagaatattgagaaagaaagatctatgcttccttcagaaaataacattgaaaacagcttactagcagatagaagtgatgcttgggataaaagcaaagcagaatcagctgtgaccaaacaagaccagatttctgcctctgagctcgactcggaccgatg

SEQ ID NO: 3481 - DNA, 203 bp, Artificial sequence
  synthetic
ggcgcgccagtcctgtgtgctcttctacacagcttgtctcgatcccaattttccagccacgctattcaaagacaagatgaaatgcactgtgaataaccagcaatcaaagaaaatcatggtggcagcagatattgtgacgatattcaacctgatccaaatgaatggcggggctgccaaggagaagctgccgactcggaccgatg

SEQ ID NO: 3482 - DNA, 203 bp, Artificial sequence
  synthetic
ggcgcgccagtcctacaccagtgacaatctcgttgggaacggccccatccttgcagaacaatcaacctgtggagtttaatcatgccatcaactatgttaataagatcaagaacagatttcagggccaaccagacatctacaaagcattcctggagattttgcacacatatcagaaagagcagagaaatcgactcggaccgatg

SEQ ID NO: 3483 - DNA, 203 bp, Artificial sequence
  synthetic
ggcgcgccagtcctagcagacagagctaaatccgagatggccaccatgaaagtgagatctggacgatatgattgtaagacaactatgaccaaggttaaatttaaagctgcgaagaaaaattgctctgtgggtcgtcaccacactgttctcaatcattccatcaaggttatgagcaatgtgtttgagaacgactcggaccgatg

SEQ ID NO: 3484 - DNA, 203 bp, Artificial sequence
  synthetic
ggcgcgccagtcctgcaggagcaaacccccagaagaggaagaacgaaagaaacgaggaagaaagagggaagacaaagaggacaagtcagagaaagcagtgaaagattatgaacaggaaaagtcttggcaagactcagagagattaaaaggaatcttagagcgtggaaaagaagaattggctgaagctgcgactcggaccgatg

SEQ ID NO: 3485 - DNA, 203 bp, Artificial sequence
  synthetic
ggcgcgccagtcctgtaaaacagaagataatggcccaaaggaggatagcagcctgcctacatttaaaactgcaaaagaacaattatgggtagatcagcaaaaaaagtaccaccaacctcagcgtgcatcagggtcttcatatggtggtgtaaaaaagtctctaggagctagtagatcccgagggataccgactcggaccgatg

SEQ ID NO: 3486 - DNA, 203 bp, Artificial sequence
  synthetic
ggcgcgccagtccttcatccaggagtatggagcccagagtgggggcctggagaaattgctggaaatcatcaccacgacaattgaagaaacagagacgcaaaaccaaggcatcaaagtggcggccatcagaggggaggtgacagctgcagacctgttcaactccagggtcatcgatcagaagaccctgccgactcggaccgatg

SEQ ID NO: 3487 - DNA, 203 bp, Artificial sequence
  synthetic
ggcgcgccagtcctgattacactactagacgttgtgtttgtgctggatcattcaggtagcataaaaaaacaatatcaagatcacatgattaacctaactatccatttggtgaagaaagcagatgttggcagggaccgagttcagtttggagccctcaaatactctgaccaacctaacatccttttctacgactcggaccgatg

SEQ ID NO: 3488 - DNA, 203 bp, Artificial sequence
  synthetic
ggcgcgccagtccttgaagatgatgtagatcaggaacttgcgaacatagaccctacgtggatagaatcacctaaaaccaatggccatattgagaatggcccattctcactggagcagcaactggacgatgaagatgatgatgaagaagactgcccaaatcctgaggaatataatcttgatgagccaaacgactcggaccgatg

SEQ ID NO: 3489 - DNA, 203 bp, Artificial sequence
  synthetic
ggcgcgccagtcctgaacgggggtttgcctccccgtcatgcaagaccccgcttgcaaattcctccggaaacagggacgagccccttttttgcttttcccagatgcatccggtgctgcggcagatgcgcccccctcctcagcagcggcaagagcaagagcagcggcagacatgcagggcaccctcccctcgactcggaccgatg

SEQ ID NO: 3490 - DNA, 203 bp, Artificial sequence
  synthetic
ggcgcgccagtcctcgctgacctgcgctgggccccaagccgacgcgccctggaggcagctggggccggacctgggctggcggtggcacccgcgcgcgctggcaacgtcggcggcgtggaggaatatgacgaggacgatgagtacgagccagaggacggcgagtactaagcggtgatgtttctgatcagcgactcggaccgatg

SEQ ID NO: 3491 - DNA, 203 bp, Artificial sequence
  synthetic
ggcgcgccagtcctagtgaaaacgttcctgctctcacagatcacgggacgctaccgctgcgcaacagcatcggaggagtccagcgagtgaccattactgacgccagacgccgcacctgcccctacgtttacaaggccctgggcatagtctcgccgcgcgtcctatcgagccgcactttttgagcaaaccgactcggaccgatg

SEQ ID NO: 3492 - DNA, 203 bp, Artificial sequence
  synthetic
ggcgcgccagtcctgccattagtgctatgactcagggtcgcaggggcaacgtgtactgggtgcgcgactcggttagcggcctgcgcgtgcccgtgcgcacccgccccccgcgcaactagattgcaagaaaaaactacttagactcgtactgttgtatgtatccagcggcggcggcgcgcaacgaagctcgactcggaccgatg

SEQ ID NO: 3493 - DNA, 203 bp, Artificial sequence
  synthetic
ggcgcgccagtccttaaatagctaacgtgtcgtatgtgtcatgtatgcgtccatgtcgccgccagaggagctgctgagccgccgtgcgcccgctttccaagatggctaccccttcgatgatgccgcagtggtcttacatgcacatctcgggccaggacgcctcggagtacctgagccccgggctggtgcgactcggaccgatg

SEQ ID NO: 3494 - DNA, 203 bp, Artificial sequence
  synthetic
ggcgcgccagtcctggaggattacaagtgggaatttgaagagcttttgaaatcctgtggtgagctgtttgattctttgaatctgggtcaccaggcgcttttccaagagaaggtcatcaagactttggatttttccacaccggggcgcgctgcggctgctgttgcttttttgagttttataaaggataacgactcggaccgatg

SEQ ID NO: 3495 - DNA, 203 bp, Artificial sequence
  synthetic
ggcgcgccagtcctcgcctcagccgcttttttgggggcgcgcggggaggcggcggcgacggcgacggggacgacacgtcctccatggttggtggacgtcgcgccgcaccgcgtccgcgctcgggggtggtttcgcgctgctcctcttcccgactggccatttccttctcctataggcagaaaaagatccgactcggaccgatg

SEQ ID NO: 3496 - DNA, 203 bp, Artificial sequence
  synthetic
ggcgcgccagtcctgccgcaccgcgtccgcgctcgggggtggtttcgcgctgctcctcttcccgactggccatttccttctcctataggcagaaaaagatcatggagtcagtcgagaaggaggacagcctaaccgccccctttgagttcgccaccaccgcctccaccgatgccgccaacgcgcctacccgactcggaccgatg

SEQ ID NO: 3497 - DNA, 203 bp, Artificial sequence
  synthetic
ggcgcgccagtccttcattacccagggccacatccttggccaattgcaagccatcaacaaagcccgccaagagtttctgctacgaaagggacggggggtttacctggacccccagtccggcgaggagctcaacccaatccccccgccgccgcagccctatcagcagccgcgggcccttgcttcccaggcgactcggaccgatg

SEQ ID NO: 3498 - DNA, 203 bp, Artificial sequence
  synthetic
ggcgcgccagtcctcccttttctggacctcccggccactacccggaccagtttattcccaactttgacgcggtgaaagactcggcggacggctacgactgaatgaccagtggagaggcagagcgactgcgcctgacacacctcgaccactgccgccgccacaagtgctttgcccgcggctccggtgagcgactcggaccgatg

SEQ ID NO: 3499 - DNA, 203 bp, Artificial sequence
  synthetic
ggcgcgccagtcctagcacttctgtgccttagggttgccgcctgctgcacgcacgtttgtacctattgtcagctttttaaacgctgggggcaacatccaagatgaggtacatgattttaggcttgctcgcccttgcggcagtctgcagcgctgccaaaaaggttgagtttaaggaaccagcttgcaatcgactcggaccgatg

SEQ ID NO: 3500 - DNA, 203 bp, Artificial sequence
  synthetic
ggcgcgccagtcctttccgcttgcttgtattcccctggacaatttactctatgtgggatatgctccaggcgggcaagattatacccacaaccttcaaatcaaactttcctggacgttagcgcctgatttctgccagcgcctgcactgcaaatttgatcaaacccagcttcagcttgcctgctccagagcgactcggaccgatg

SEQ ID NO: 3501 - DNA, 203 bp, Artificial sequence
  synthetic
ggcgcgccagtcctcacagtttacctgctttacggatttgtcacccttatcctcatctgcagcctcgtcactgtagtcatcgccttcattcagttcattgactgggtttgtgtgcgcattgcgtacctcaggcaccatccgcaatacagagacaggactatagctgatcttctcagaattctttaattcgactcggaccgatg

SEQ ID NO: 3502 - DNA, 203 bp, Artificial sequence
  synthetic
ggcgcgccagtccttagccatatatccataccttgacattggctggaatgccatagatgccatgaaccaccctactttcccagtgcccgctgtcataccactgcaacaggttattgccccaatcaatcagcctcgccccccttctcccacccccactgagattagctactttaatttgacaggtggagcgactcggaccgatg

SEQ ID NO: 3503 - DNA, 203 bp, Artificial sequence
  synthetic
ggcgcgccagtccttgtgggttcttttgtcatggttcctggcggggaagtggccgcgctggtccgtgcagacctgcacgattatgttcagctggccctgcgaagggacctacgggatcgcggtatttttgttaatgttccgcttttgaatcttatacaggtctgtgaggaacctgaatttttgcaatccgactcggaccgatg

SEQ ID NO: 3504 - DNA, 203 bp, Artificial sequence
  synthetic
ggcgcgccagtcctactgtcggtggtgctttttaatcacggtgaccagtttttttacggtcacgccggcatggccgtagtccgtcttatgcttataagggttgtttttcctgttgtaagacaggcttctaatgtttaaatgtttttttttgttattttattttgtgtttaatgcaggaacccgcagaccgactcggaccgatg

SEQ ID NO: 3505 - DNA, 203 bp, Artificial sequence
  synthetic
ggcgcgccagtcctggccctttttacactgtgactgattgagctggtgccgtgtcgagtggtgttttttaataggtttttttactggtaaggctgactgttatggctgccgctgtggaagcgctgtatgttgttctggagcgggagggtgctattttgcctaggcaggagggtttttcaggtgtttatcgactcggaccgatg

SEQ ID NO: 3506 - DNA, 203 bp, Artificial sequence
  synthetic
ggcgcgccagtcctcgctacccctcccacttagcctccttcgtgctggcctggacgcgagccttcgtctcagagtggtccgagtttctatacgaggaggaccgcggaacaccgctcgaggacaggcctctcaagtctgtatacggggacacggacagccttttcgtcaccgagcgtggacaccggctccgactcggaccgatg

SEQ ID NO: 3507 - DNA, 203 bp, Artificial sequence
  synthetic
ggcgcgccagtcctcgcggaacaccgctcgaggacaggcctctcaagtctgtatacggggacacggacagccttttcgtcaccgagcgtggacaccggctcatggaaaccagaggtaagaaacgcatcaaaaagcatgggggaaacctggtttttgaccccgaacggccagagctcacctggctcgtgcgactcggaccgatg

SEQ ID NO: 3508 - DNA, 203 bp, Artificial sequence
  synthetic
ggcgcgccagtcctatacccggtgagttcctcaagaggccactcttgagtgccagcgagtagagttttctcctccgagccgctccgacaccgggactgaaaatgagacatattatctgccacggaggtgttattaccgaagaaatggccgccagtcttttggaccagctgatcgaagaggtactggctcgactcggaccgatg

SEQ ID NO: 3509 - DNA, 203 bp, Artificial sequence
  synthetic
ggcgcgccagtcctaatagctaacgtgtcgtatgtgtgtcatgtatgcgtccatgtcgccgccagaggagctgctgagccgccgcgcgcccgctttccaagatggctaccccttcgatgatgccgcagtggtcttacatgcacatctcgggccaggacgcctcggagtacctgagccccgggctggtgcgactcggaccgatg

SEQ ID NO: 3510 - DNA, 203 bp, Artificial sequence
  synthetic
ggcgcgccagtcctcatcgaaaccgtgtacctgcgcacgcccttctcggccggcaacgccacaacataaagaagcaagcaacatcaacaacagctgccgccatgggctccagtgagcaggaactgaaagccattgtcaaagatcttggttgtgggccatattttttgggcacctatgacaagcgctttcgactcggaccgatg

SEQ ID NO: 3511 - DNA, 203 bp, Artificial sequence
  synthetic
ggcgcgccagtcctcaactctacgggctattctaattcaggtttctctagaatcggggttggggttattctctgtcttgtgattctctttattcttatactaacgcttctctgcctaaggctcgccgcctgctgtgtgcacatttgcatttattgtcagctttttaaacgctggggtcgccacccaagcgactcggaccgatg

SEQ ID NO: 3512 - DNA, 203 bp, Artificial sequence
  synthetic
ggcgcgccagtcctaacgcttctctgcctaaggctcgccgcctgctgtgtgcacatttgcatttattgtcagctttttaaacgctggggtcgccacccaagatgattaggtacataatcctaggtttactcacccttgcgtcagcccacggtaccacccaaaaggtggattttaaggagccagcctgtcgactcggaccgatg

SEQ ID NO: 3513 - DNA, 203 bp, Artificial sequence
  synthetic
ggcgcgccagtcctcctaccttgacattggctggaaacgaatagatgccatgaaccacccaactttccccgcgcccgctatgcttccactgcaacaagttgttgccggcggctttgtcccagccaatcagcctcgccccacttctcccacccccactgaaatcagctactttaatctaacaggaggagcgactcggaccgatg

SEQ ID NO: 3514 - DNA, 203 bp, Artificial sequence
  synthetic
ggcgcgccagtcctgctgcaaactttctccacaatctaaatggaatgtcagtttcctcctgttcctgtccatccgcacccactatcttcatgttgttgcagatgaagcgcgcaagaccgtctgaagataccttcaaccccgtgtatccatatgacacggaaaccggtcctccaactgtgccttttcttcgactcggaccgatg

SEQ ID NO: 3515 - DNA, 203 bp, Artificial sequence
  synthetic
ggcgcgccagtccttccacttggacgtgagggccgtttgccttttggaagccattgtgcaacatcttacaaatgccattatctgttctttggctgtagagtttgaccacgccaccggaggggagcgcgttcacttaatagatcttcattttgaggttttggataatcttttggaataaaaaaaaaaaccgactcggaccgatg

SEQ ID NO: 3516 - DNA, 203 bp, Artificial sequence
  synthetic
ggcgcgccagtcctttgaccacgccaccggaggggagcgcgttcacttaatagatcttcattttgaggttttggataatcttttggaataaaaaaaaaaacatggttcttccagctcttcccgctcctcccgtgtgtgactcgcagaacgaatgtgtaggttggctgggtgtggcttattctgcggtgcgactcggaccgatg

SEQ ID NO: 3517 - DNA, 203 bp, Artificial sequence
  synthetic
ggcgcgccagtcctcgcgtgcggttttctgggtgttttttgtggactttaaccgttacgtcattttttagtcctatatatactcgctctgcacttggcccttttttacactgtgactgattgagctggtgccgtgtcgagtggtgtttttttaataggttttcttttttactggtaaggctgactgttcgactcggaccgatg

SEQ ID NO: 3518 - DNA, 203 bp, Artificial sequence
  synthetic
ggcgcgccagtccttgtgggcgtggcttaagggtgggaaagaatatataaggtgggggtcttatgtagttttgtatctgttttgcagcagccgccgccgccatgagcaccaactcgtttgatggaagcattgtgagctcatatttgacaacgcgcatgcccccatgggccggggtgcgtcagaatgtgcgactcggaccgatg

SEQ ID NO: 3519 - DNA, 203 bp, Artificial sequence
  synthetic
ggcgcgccagtccttactgcggctgcagccgtcagcggcgcgggacagcccgcctatgatctggaattggaagagggcgagggactcgcgcgcctgggcgcaccatcgcccgagcggcacccgcccagccgacttctccagtttacgggagcgagccctcttttttttttttgttttttgttgcccagcgactcggaccgatg

SEQ ID NO: 3520 - DNA, 203 bp, Artificial sequence
  synthetic
ggcgcgccagtcctgatgatagcagcgtgttggacttgggtggaagaggagggggcaacccgttcgctcatctgcgtcccagattcgggcgcatgttgtaaaagtgaaagtaaaataaaaatgcaactcaccaaggccatggcgaccgagcgtgcgttcgttcttttttgttatctgtgtctagtacgcgactcggaccgatg

SEQ ID NO: 3521 - DNA, 203 bp, Artificial sequence
  synthetic
ggcgcgccagtcctaagtgaaagtaaaataaaaatgcaactcaccaaggccatggcgaccgagcgtgcgttcgttcttttttgttatctgtgtctagtacgatgaggagacgagccgtgctaggcggagcggtggtgtatccggagggtcctcctccttcttacgagagcgtgatgcagcaacaggcgcgactcggaccgatg

SEQ ID NO: 3522 - DNA, 203 bp, Artificial sequence
  synthetic
ggcgcgccagtcctagacgccgcacctgtccctacgtttacaaggccctgggcatagtcgcgccgcgcgttctttcaagccgcactttctaaaaaaaaaaaatgtccattctcatctcgcccagtaataataccggttggggactgtatgcgcccaccaagatgtatggaggcgcccgcaaacgctctcgactcggaccgatg

SEQ ID NO: 3523 - DNA, 203 bp, Artificial sequence
  synthetic
ggcgcgccagtcctagtacccggaaactgccaaggcaataagtgccctgcagctgtgtttatttaatgtgacgtcatgtaataaaattatgtcagctgctgagtgttttattacttcttgggtggggacttggatatataagtaggagcagatctgtgtggttagctcacagcaacctgctgccatcccgactcggaccgatg

SEQ ID NO: 3524 - DNA, 203 bp, Artificial sequence
  synthetic
ggcgcgccagtcctctgcaagtcgcactcgccgtcgccgccgccgcaacactgccagcaaattgactcccgccgccctggtgcggagagtgtaccgcgatggtcgcgctgaacctctgacgctgccgcgcgcgcgctaccatccaagcatcaccacttaatgactgttgacgctgcctccttgcagatcgactcggaccgatg

SEQ ID NO: 3525 - DNA, 203 bp, Artificial sequence
  synthetic
ggcgcgccagtcctgcagcgccactaacattggaaaaacttataaataaaaaatagaatggactctgacgctcctggtcctgtgactatgtttttgtagagatggaagacatcaatttttcatccctggctccgcgacacggcacgaggccgtacatgggcacctggagcgacatcggcacgagccaacgactcggaccgatg

SEQ ID NO: 3526 - DNA, 203 bp, Artificial sequence
  synthetic
ggcgcgccagtcctgcttgtctgtgtgtatgtatcatcaccacgccgccgcagcagaggagaaaggaagaggtcgcgcgccgaggctgagttgctttcaagatggccaccccatcgatgatgccccaatgggcatacatgcacatcgccggacaggatgcttcggagtacctgagtccgggtctggtgcgactcggaccgatg

SEQ ID NO: 3527 - DNA, 203 bp, Artificial sequence
  synthetic
ggcgcgccagtcctgttcctcttcgggggcagaggtggaggcgactgagatgggctgcggtctggccttggaagcggatggctggcagagcccattccgcgttcgggggtgtgctcccgttggcggtcgcttgactgatttcctccgcggctggccattgtgttctcctaggcagagaaacaacagaccgactcggaccgatg

SEQ ID NO: 3528 - DNA, 203 bp, Artificial sequence
  synthetic
ggcgcgccagtccttttggagagttcgtcctcgcagccccgctcgggcggcatcggaactctccagttcgtggaggagtttactccctctgtctacttcaaccccttctccggctctcctggccagtacccagacgagttcataccgaacttcgacgcaatcagcgagtcagtggatggctatgattgcgactcggaccgatg

SEQ ID NO: 3529 - DNA, 203 bp, Artificial sequence
  synthetic
ggcgcgccagtccttcgaactccccgaggagcaccctcagggtccggcccacggagtgcggattaccatcgaagggggaatagactctcgcctgcatcgaatcttctcccagcgacccgtgctgattgagcgcgaccagggaaatacaaccatctccatttactgcatctgtaaccaccccggattgccgactcggaccgatg

SEQ ID NO: 3530 - DNA, 203 bp, Artificial sequence
  synthetic
ggcgcgccagtcctcttgcttatagttattcgccctagacaaagcaataaggaaaaagagaaaatgccttaacctttttactcataccttttctttacagcatggcttttgttacagctctaattattgccaacattgtcactgtcgctcacgggcaaacaattatccatattaccttaggacataatcgactcggaccgatg

SEQ ID NO: 3531 - DNA, 203 bp, Artificial sequence
  synthetic
ggcgcgccagtccttctcctatgattagtcgtccccatatggctttgaatgaaatctaagatcttttttttttttctcttacagtatggtgaacaccaatcatgatccctagaaatttcttcttcaccatactcatctgtgctttcaatgtctgtgctactttcacagcagtagccactgcaagcccacgactcggaccgatg

SEQ ID NO: 3532 - DNA, 203 bp, Artificial sequence
  synthetic
ggcgcgccagtcctcttcctatgcactttttgccttcgttacttgcatctgcgtgtgtagcatagtctgcctggttattaattttttccaactggtagactggatctttgtacgaattgcctacctacgtcaccatcccgaataccgcaatcaaaatgttgcggcacttcttaggcttatttaaaacccgactcggaccgatg

SEQ ID NO: 3533 - DNA, 203 bp, Artificial sequence
  synthetic
ggcgcgccagtcctggatctttgtacgaattgcctacctacgtcaccatcccgaataccgcaatcaaaatgttgcggcacttcttaggcttatttaaaaccatgcaggctatgctaccagtcattttaattctgctactaccctgcattgccctagcttccaccgccactcgcgctacacctgaacaacgactcggaccgatg

SEQ ID NO: 3534 - DNA, 203 bp, Artificial sequence
  synthetic
ggcgcgccagtccttgaaatcagcaataaggtctctgttgaaattttctcccagcagcacctcacttccctcttcccaactctggtattctaaaccccgttcagcggcatactttctccatactttaaaggggatgtcaaattttaactcctgtcctgtacccacaatcttcatgtctttcttcccagcgactcggaccgatg

SEQ ID NO: 3535 - DNA, 203 bp, Artificial sequence
  synthetic
ggcgcgccagtccttgtagcgtcccctgctattgttcccggggggcttctggctaagcagtttggtgataatatgaaagagtatttacaactagaacttagagaagaacttagagccaagggcatgtcaattgatgatgccattcttaatttgctacaggtgacacaggagcaagatattttgacattcgactcggaccgatg

SEQ ID NO: 3536 - DNA, 203 bp, Artificial sequence
  synthetic
ggcgcgccagtcctccgcgaggaactttcggtgctgttgtttaatcacgatgacaggttttacgagggtcgagctggagaccctgtggcttgtcttgtaatggaaagactgatttatccacctgttcgacaggctactatgatatgacgcttgtttcttttattttacagactaattcaaaactaatacgactcggaccgatg

SEQ ID NO: 3537 - DNA, 203 bp, Artificial sequence
  synthetic
ggcgcgccagtcctctgaagacctgagacccgatcatttggtgcttgcctgcactggagcggagttcggttccagtggtgaagaaactgactaaagtgagtagtgggggcaagatgtggatggggactttcaggttggtaaggtggacagattgggtaaattttgttaatttctgtcttgcagctgcccgactcggaccgatg

SEQ ID NO: 3538 - DNA, 203 bp, Artificial sequence
  synthetic
ggcgcgccagtcctgggtacgaagggaacctccagtgggggctgtatcatcgccgcctgttgctgcatcacgctctcgtaagaaggaggaggaccctccggatacaccaccgctccgcctagcacggctcgtctcctcatcgtactagacacagataacaaaaaagaacgaacgcacgctcggtcgcccgactcggaccgatg

SEQ ID NO: 3539 - DNA, 203 bp, Artificial sequence
  synthetic
ggcgcgccagtcctatacaccaccgctccgcctagcacggctcgtctcctcatcgtactagacacagataacaaaaaagaacgaacgcacgctcggtcgccatggccttggtgagttgcatttttattttactttcacttttacaacatgcgcccgaatctgggacgcagatgagcgaacgggttgcccgactcggaccgatg

SEQ ID NO: 3540 - DNA, 203 bp, Artificial sequence
  synthetic
ggcgcgccagtcctaccgtgtttttcacctaaatttccgcgtacggtgtcaaagtcctgtgtttttacgtaggtgtcagctgatcgctagggtatttaaacctgacgagttccgtcaagaggccactcttgagtgccagcgagaagagttttctccttcgcgccgcaagtcagttctgcgctttgaaacgactcggaccgatg

SEQ ID NO: 3541 - DNA, 203 bp, Artificial sequence
  synthetic
ggcgcgccagtcctctgacgagttccgtcaagaggccactcttgagtgccagcgagaagagttttctccttcgcgccgcaagtcagttctgcgctttgaaaatgagacacctgcgtttcctgccacaggagattatcttcagtgagaccgggatcgaaatactggagtttgtggtaaataccctaatgcgactcggaccgatg

SEQ ID NO: 3542 - DNA, 203 bp, Artificial sequence
  synthetic
ggcgcgccagtcctcttctataaaagcgctcggtttaaaaagcttctatgcctgaataggtgaccggaggtcggcacctttcctttacaattaatgaccctatgaatacaactgactgttttatcgctgtggtaaacgccatcaaagaggtaagagcacttttcctaccacggactgcaggaaaaatgcgactcggaccgatg

SEQ ID NO: 3543 - DNA, 203 bp, Artificial sequence
  synthetic
ggcgcgccagtcctgttgggatggttggggttagccatccataccgtactgcctgatagggtccttgcgaggggatctgggagtctcgtagaccgtagcacatgcctgttatttctactcaaacaagtcctgtacctgcgcccagaacgcgcaagaacaagcagacgcaggcttcatatcctgtgtcccgactcggaccgatg

SEQ ID NO: 3544 - DNA, 203 bp, Artificial sequence
  synthetic
ggcgcgccagtccttattatatatctctttgttgggtttataccacttagcttgaaagaggttaaaacattacaattcattgttaagttgaatacagcaaaatgggagctcaagtatcaacgcaaaagactggggcacatgagaccaggctgaatgctagcggcaattccatcattcactacacaaatcgactcggaccgatg

SEQ ID NO: 3545 - DNA, 203 bp, Artificial sequence
  synthetic
ggcgcgccagtcctctcgcccaggagagtagagcggagagaggaagtaagaagacgcctccgggtaagggacgcccgcctttggggaaaaaccaatgcgcgtactgtaaggaggagggacattggaagaagaactgtccaaaactcgtaagcggggcaaccccagtgttggtagaagaattacaatagcgactcggaccgatg

SEQ ID NO: 3546 - DNA, 203 bp, Artificial sequence
  synthetic
ggcgcgccagtccttactgtaaggaggagggacattggaagaagaactgtccaaaactcgtaagcggggcaaccccagtgttggtagaagaattacaatagggccgtcagggttcttccgccctccgtgaacccaggctaaaagttaaagtaggggggcaaataatagattttctagtagatacgggacgactcggaccgatg

SEQ ID NO: 3547 - DNA, 203 bp, Artificial sequence
  synthetic
ggcgcgccagtcctcagcacccccaccgcggtaaaggtcgctgggaagaccccgtggatccaccactctcgactcaagaaagctcctgacaaccaagaagaatggactgtctcaccaacctccgatccgctgagggtaaagttgaccaggcgggcaaaaccctaattcttcttgtggtttggtgggggcgactcggaccgatg

SEQ ID NO: 3548 - DNA, 203 bp, Artificial sequence
  synthetic
ggcgcgccagtcctcgcgcggcttgcgaataatactttggagagtcttttgcctccagtgtcttccgtttgtactcgtcctcctctccctctccggccgggatgggacaggcaggatcgaaggggcttttaacccctctagagtgcattctgaagaacttctctgactttaagaagagggcgggagaccgactcggaccgatg

SEQ ID NO: 3549 - DNA, 203 bp, Artificial sequence
  synthetic
ggcgcgccagtccttaataataataatcttagtataaaaaagtagggagtgaccgaaagtggtgaaccgaaaacggttggtatataaagcacatagtattttgtgcaaacctacagacgccatgttcaaaaatcctgcagaaagacctcggaaattgcatgaactaagctcggcattggaaataccctcgactcggaccgatg

SEQ ID NO: 3550 - DNA, 203 bp, Artificial sequence
  synthetic
ggcgcgccagtcctaatttatatacctatgtatagatggccaatgtactgttgtggaagggcaagttaattgtaagggcatttattatgtacatgaaggacatataacatattttgtaaattttacagaagaggcaaaaaaatatgggactggtaaaaaatgggaagtgcatgcgggtggtcaggtaacgactcggaccgatg

SEQ ID NO: 3551 - DNA, 203 bp, Artificial sequence
  synthetic
ggcgcgccagtccttattttctgggcctgatgtacctatagagcatgcacctacacaggttttcccatttcctttggcccctacaacgccacaagtgtctatttttgttgatgggggtgatttttatttgcaccctagttattatatgttaaaacgtcgacgtaaacgtgtatcatatttttttacagcgactcggaccgatg

SEQ ID NO: 3552 - DNA, 203 bp, Artificial sequence
  synthetic
ggcgcgccagtcctacaagcagaaccggacacatccaattacaatatcgttaccttttgttgtcagtgtaagtctacacttcgtttgtgtgtacagagcacacaagtagatattcgcatattgcaagagctgttaatgggctcatttggaatcgtgtgccccaactgttctactagactgtaactacacgactcggaccgatg

SEQ ID NO: 3553 - DNA, 203 bp, Artificial sequence
  synthetic
ggcgcgccagtcctttactcccttgtttgttggatccactcccgaaacgttttactccttaacttattgaaattgtttgaagacaggatttcagtgtcacaatgggagctcaagtatcatcccaaaaagtaggcgctcacgagaattctaaccgagcctacggtggttctacgatcaactacaccacacgactcggaccgatg

SEQ ID NO: 3554 - DNA, 203 bp, Artificial sequence
  synthetic
ggcgcgccagtcctccaatttggtctgttctgaactacaccatttactgctgtgaagaatgccctggaggcaagctggttacagccctgaccaggccctgcccgtgactctcgaccggcgcagggtcaaaaattgtctaagcagcagcaggaacgcgggagcgtttcttttccttttgtactgacatgcgactcggaccgatg

SEQ ID NO: 3555 - DNA, 203 bp, Artificial sequence
  synthetic
ggcgcgccagtcctccgtgactctcgaccggcgcagggtcaaaaattgtctaagcagcagcaggaacgcgggagcgtttcttttccttttgtactgacatgatggcggcgtctaaggtgtatagagtttgcgagcagactctgctggcaggtgccgttcgcatgatggacaaattcttgcaaaagagacgactcggaccgatg

SEQ ID NO: 3556 - DNA, 203 bp, Artificial sequence
  synthetic
ggcgcgccagtcctaagaggagaaatacaaatatttacatagtagagttaccacatttacatttccaaatccattcccctttgacagaaatgggaatgcagtatatgaactatcagatgcaaactggaaatgtttctttgaaagactgtcgtccagcctagacattgaggattcagaggacgaggaagcgactcggaccgatg

SEQ ID NO: 3557 - DNA, 203 bp, Artificial sequence
  synthetic
ggcgcgccagtcctccctttgcaattctttttactaacactgtgtgtgtgctattttcctgccttttatatacacatatacattgtgcaaacgcaacaataatggtgatgttaacctgtcacttaaatgatggtgatacatggttgtttctgtggttgtttactgcatttgttgtagctgtacttggacgactcggaccgatg

SEQ ID NO: 3558 - DNA, 203 bp, Artificial sequence
  synthetic
ggcgcgccagtccttgcagtctgggcctgacataacttttcctactgcatctatgggaacaccctttagtcctgtaactcctgctttacctacaggccctgtttttattacaggttctgacttctatttgcatcctacatggtactttgcacgcagacgccgtaaacgtattcccttattttttacagcgactcggaccgatg

SEQ ID NO: 3559 - DNA, 203 bp, Artificial sequence
  synthetic
ggcgcgccagtcctagacgcacaacctttaacacaacattaccaaatactgacctgttgctgtggatgtgacagcaacgtccgactggttgtggagtgcacagacggagacatcagacaactacaagaccttttgctgggcacactaaatattgtgtgtcccatctgcgcaccaaaaccataacaaggcgactcggaccgatg

SEQ ID NO: 3560 - DNA, 203 bp, Artificial sequence
  synthetic
ggcgcgccagtcctcagctggactgttctttggggccttatgtggtgtttgcctctgaggtactcaggggcatttaggtttttcctcattcttaaataataatgaacatgtctagacaaggtattttccagactgttgggagtggtcttgaccacatcctgtctttggcagacattgaggaagagcaacgactcggaccgatg

SEQ ID NO: 3561 - DNA, 203 bp, Artificial sequence
  synthetic
ggcgcgccagtcctgactgttctttggggccttatgtggtgtttgcctctgaggtactcaggggcatttaggtttttcctcattcttaaataataatgaacatgtctagacaaggtattttccagactgttgggagtggtcttgaccacatcctgtctttggcagacattgaggaagagcaaatgattcgactcggaccgatg

SEQ ID NO: 3562 - DNA, 203 bp, Artificial sequence
  synthetic
ggcgcgccagtcctcggcaggaacaaaccacgacggagtgctcctagaaaggcgcgggccgaggtaccaaaggcagcgtgtggagcgggaggagaagaggcctccgggtgaaggtaagtacctacaccaaaaactgtagccgaaagggcttgctatcctacctttagacaggtagaagattgtgggagcgactcggaccgatg

SEQ ID NO: 3563 - DNA, 203 bp, Artificial sequence
  synthetic
ggcgcgccagtcctccttttcacgcacttcagagcaggatgtggccactcaagaattggccagacaaggggaggaaatcctctctcagctataccgacccctagaaacatgcaataactcatgctattgtaagcgatgctgctaccattgtcagatgtgttttctaaacaaggggctcgggatatgttcgactcggaccgatg

SEQ ID NO: 3564 - DNA, 203 bp, Artificial sequence
  synthetic
ggcgcgccagtcctgatactggccctggccgatagcatatatacatttcctgatccgccagctgattcgcctcttgaccagactatacagcatctgcagggacttactatccaggagcttcctgaccctccaactcatctaccagaatctcagagactggctgagacttagaacagccttcttgcaatcgactcggaccgatg

SEQ ID NO: 3565 - DNA, 203 bp, Artificial sequence
  synthetic
ggcgcgccagtcctccacaacagtgtaattacggccccggcactagatacgcctggaaagtactaccccaagggtttaaaaacagtcccaccctgttcgagatgcagctggcccatatcctgcagcccattcggcaagctttttcccaatgcactattcttcagtacatggatgacatcctcctagcacgactcggaccgatg

SEQ ID NO: 3566 - DNA, 203 bp, Artificial sequence
  synthetic
ggcgcgccagtcctacccagagaacctctaagaccctcaaggtccttaccccgccgaccactcatacaacccccaacattccaccctccttcctccaggccatgcgcaagtactcccccttccgaaacggatacatggaacccacccttgggcaacacctcccaaccctgtcttttccagaccccggccgactcggaccgatg

SEQ ID NO: 3567 - DNA, 203 bp, Artificial sequence
  synthetic
ggcgcgccagtcctccacccctttccctttcattcacgactgactgccggcttggcccacggcaagtaccgcggactctactggctcggagccagcagcagcctattctataacactctccaggagagaaatttagtacacaggtgggggctcgtccgggatacgagcgcccctttattccctaggcacgactcggaccgatg

SEQ ID NO: 3568 - DNA, 203 bp, Artificial sequence
  synthetic
ggcgcgccagtcctaacagtggcttacatggtgtaatgcacaaagctgggaccactatgaaaactgggcaataaactacacttttgatttccctggaattaatgcagatgccctccacccagacctccaaaccaccccaattgtcacagacaccagtatcagcagcagtggtggtgaaagctctgaagcgactcggaccgatg

SEQ ID NO: 3569 - DNA, 203 bp, Artificial sequence
  synthetic
ggcgcgccagtccttgggactttgtccccattgcattaatgtaggggcttggtataatggatggaaatttcgagaatttaccccagatttggtgcgatgtagctgccatgtgggagcttctaatcccttttctgtgctaacctgcaaaaaatgtgcttacctgtctggattgcaaagctttgtagattcgactcggaccgatg

SEQ ID NO: 3570 - DNA, 203 bp, Artificial sequence
  synthetic
ggcgcgccagtcctacccatcctctctgtttgacttagttgctcgcattaaaaataaccttaaaaattctccagacttatatagtcatcattttcaaagtcatggacagttatctgaccacccccatgccttatcatccagtagcagtcatgcagaacctagaggagaagatgcagtattatctagtgcgactcggaccgatg

SEQ ID NO: 3571 - DNA, 203 bp, Artificial sequence
  synthetic
ggcgcgccagtcctaatcaatgggaattactaccttagttcagtatgccgtgggaattatgacagtaaccatgacatttaaattggggccccgtaaagctacgggacggtggaatcctcaacctggagtatatcccccgcacgcagcaggtcatttaccatatgtactatatgaccctacagctacagcgactcggaccgatg

SEQ ID NO: 3572 - DNA, 203 bp, Artificial sequence
  synthetic
ggcgcgccagtcctatgcggtttttacgaactcaactttcaataagattcctttgacgacgataagtcggctttttgttcagttgattataggaggacacgctaaaggaacgatttatgacagcaatgtaattcgcgtcagtcgtcggaaacgagaagacagtttactaaaaaagatgagattggagtcgactcggaccgatg

SEQ ID NO: 3573 - DNA, 203 bp, Artificial sequence
  synthetic
ggcgcgccagtccttcacagaatgtatatagaggttttacctgttggttatatgaatgggcaaacccgagttctggcgtgagcattataaaacgcttcttatagaagatggcactgttggggtatttggtagatatcgtagagcagtttctttcgcctttccatatgatcgcttcatagttgttttttcgactcggaccgatg

SEQ ID NO: 3574 - DNA, 203 bp, Artificial sequence
  synthetic
ggcgcgccagtccttagaagatggcactgttggggtatttggtagatatcgtagagcagtttctttcgcctttccatatgatcgcttcatagttgttttttatgtgggttatgtcgcaggtacgtagcatggagcccgaccttacgttggcggcggtctatcaggcggcggcgaatctcacagagcagcgactcggaccgatg

SEQ ID NO: 3575 - DNA, 203 bp, Artificial sequence
  synthetic
ggcgcgccagtcctgagctcagcgatatttccggtatatgaccttcgtaagctgctcagtgcacttgtcatttcggaaggtagcgtcagattcgatatataatgtctttgaaggactatctgagacagtcaatttctaaagatttggaggtgagacatcgagattctttaaagattagattaggggagcgactcggaccgatg

SEQ ID NO: 3576 - DNA, 203 bp, Artificial sequence
  synthetic
ggcgcgccagtcctggaagaaaggagtttgcatttggtgattgatgagacggaatatatagaagaagaaatacctttggccttgattgtgactccggtggcaccgaatccggaatttacttgtcgtgttataacagacatatgcaatctgtgggaaaataatatttgcaagcagaccagtttacaagtcgactcggaccgatg

SEQ ID NO: 3577 - DNA, 203 bp, Artificial sequence
  synthetic
ggcgcgccagtcctcatcgctgcgcgaaccagttttatcggctgcctgacgttttcaaaactcaccgccgagtcggcttgagaataaacggtgacattgtccggaaatcttacatcggacaaactctggccgaaccactctgagaacagagtatcgttctgaaacctgttctccatcacagagctggtcgactcggaccgatg

SEQ ID NO: 3578 - DNA, 203 bp, Artificial sequence
  synthetic
ggcgcgccagtcctaaaaaaaacgatattattgttgccgttgtcgtgtgatcatccatatcgttctttttgggtgtacattgtgacaagtttcttttgtgactatattatctttcattttttttttgcgagttgcaacttttgcttactaagttttgagtgctatttctctgtcgctgtgagcccgtacgactcggaccgatg

SEQ ID NO: 3579 - DNA, 203 bp, Artificial sequence
  synthetic
ggcgcgccagtcctgcgttgtggattgtttgacctttgaaaaaatttttgtgtccgtgtagcatttcaataaaagtcattatctgctcagagggataaatcatgtctatctcttcgttgttcggaggtagatacgataataagtttttgcttaacatgtcttcggctcccaaaatagagttgattgtacgactcggaccgatg

SEQ ID NO: 3580 - DNA, 203 bp, Artificial sequence
  synthetic
ggcgcgccagtcctaagctacaacaggtcaacgttcgagtagacgtaaattccatatgtcgaatgcgctgtaaactttttcacggaacatcaaaaacaccgaatttattcacgtttacataagcatgaatctgcaattttaatagtcccataaagctttcatttcgatctaactacattttagtatttcgactcggaccgatg

SEQ ID NO: 3581 - DNA, 203 bp, Artificial sequence
  synthetic
ggcgcgccagtcctccgtctcctgcaatttgaattctgctcgtttgtttttttctgcgacaaaaaaataaacgctgtctcagatatatacttacttgagtgatggagttattggaccacgacatttataagggacccgttcgagaacgggtcacgtataccattcccaaccatccctatctctcgctgcgactcggaccgatg

SEQ ID NO: 3582 - DNA, 203 bp, Artificial sequence
  synthetic
ggcgcgccagtcctatctattaagcttgaattttataaacatgttttccagaacaaaaatccaaacaagcaaatgctcataacgacgttgtccaccaagccatgaaattatccggactataccatgatgcggacgtcacacatagacaaccattgagtgagaatacgcatcaagatcccatatcttctcgactcggaccgatg

SEQ ID NO: 3583 - DNA, 203 bp, Artificial sequence
  synthetic
ggcgcgccagtcctgtgctggtgaagctgggcgattgtctactgacttttttgcgtgtgggatttgccagactttttgcggactgcggttatgagaagattggaaaaatatccatgcgcttcggacggatgtcgacgttgggcatgtcggagacttatcaatcgtgcatgagcctcagtaagtagttccgactcggaccgatg

SEQ ID NO: 3584 - DNA, 203 bp, Artificial sequence
  synthetic
ggcgcgccagtccttcgttattcgtaagtgggtacaatgaaaaaaaatcaacactgccttaatgtatgcaccctcaagagtgctgattggatagagatataatgatatataaaaaagtgcatgatgaacaaaaaagtttgtttttccataaatttaaatgtcagtgggtgccgcggttagggtctttccgactcggaccgatg

SEQ ID NO: 3585 - DNA, 203 bp, Artificial sequence
  synthetic
ggcgcgccagtcctagacggtgaaatgtaagtgtcgttctatctactcggggaaaatgtcaccacgggtaaacttgaatgattaatacaccattttctcgtgtgtgcgtgtatgtggatgtatacgcgtatagtatgcgtaataacacaggacatcgccggttaatctataacttgatatttgttcagcgactcggaccgatg

SEQ ID NO: 3586 - DNA, 203 bp, Artificial sequence
  synthetic
ggcgcgccagtcctgtgtgcgtgtatgtggatgtatacgcgtatagtatgcgtaataacacaggacatcgccggttaatctataacttgatatttgttcagtctgtttcaaaatgcaggccagaaattttgtcgacctttcacggacaatagaacaattgtatatactatgcaagaccaagttcaaagcgactcggaccgatg

SEQ ID NO: 3587 - DNA, 203 bp, Artificial sequence
  synthetic
ggcgcgccagtccttggccctaccgctacccctctttcaacccctcaccatcacccaacccgctgccccacccacatcccccccaccgccaccgctaccgtcacctctgaacttcacctttttcctccatctcgccccacttctctctacatttctccgcccctctattcttactcctgttttctaggcgactcggaccgatg

SEQ ID NO: 3588 - DNA, 203 bp, Artificial sequence
  synthetic
ggcgcgccagtcctcacctctgaacttcacctttttcctccatctcgccccacttctctctacatttctccgcccctctattcttactcctgttttctaggatgccgctgacggcgcgtgccggccacaccctgcatcgtcttccgctctcccactattggtggcttctgttgggtcgacactcccttcgactcggaccgatg

SEQ ID NO: 3589 - DNA, 203 bp, Artificial sequence
  synthetic
ggcgcgccagtcctagtttagtgatgcactgccacttctcatcaaaattgtccataaatttcaagtttttcaccatgtcagcaatctgatcggctctgacgtaggtggaaggatacttgtaagtttcatactcataatctatcagtctgttccacactacgcagtccgaagagggatgtagtcctttacgactcggaccgatg

SEQ ID NO: 3590 - DNA, 203 bp, Artificial sequence
  synthetic
ggcgcgccagtccttaggtggaaggatacttgtaagtttcatactcataatctatcagtctgttccacactacgcagtccgaagagggatgtagtcctttaatgccaaatctagctgctgcggttccctgcagaccgttcgtcaacctagcgcaggagacgggaacgacaaacctgctggtagcgggccgactcggaccgatg

SEQ ID NO: 3591 - DNA, 203 bp, Artificial sequence
  synthetic
ggcgcgccagtcctcggatagcaggagtcggtcgatcgtctcgctccgcttggttttccgtgtcacggcgcgcgcatagactccgttaatctcggcggccgatgtctcgcgtgttctcgtgcgtgctccgcgcgtgtgtatgtgccggcctctgctgctgggtgtgtatgggggtgatatgcggtgaccgactcggaccgatg

SEQ ID NO: 3592 - DNA, 203 bp, Artificial sequence
  synthetic
ggcgcgccagtccttcatgacaaggatctcgaaatataaaaccaaaaaaaaagtgaggagtgcgtaatcgcaagaaaagaaaaaacagagccgcggtggaaatgtctatccgcctgcgtgtatgtgtggggtgtgtatatgtgcgcgtgaccgtatccctccctgcctttaacccgatgagaaataaacgactcggaccgatg

SEQ ID NO: 3593 - DNA, 203 bp, Artificial sequence
  synthetic
ggcgcgccagtcctaggaagattttcataattccgaggaaatgaaggtgtttgttgtccaacattcgcaggaaatcgttggtggaacggatttttctgtacatgcggaggaaagcgtgtgagtcaaaacgggggttgaaatttaataaagtttgtcacaccactctcttttttccaatttcctgtcatcgactcggaccgatg

SEQ ID NO: 3594 - DNA, 203 bp, Artificial sequence
  synthetic
ggcgcgccagtcctgatctcgctgaagccgtcttgtatgtgactatttccatctgtttttagtggcgcttcgagttcgttttttctgaagtggatctgccgatggctgttagaaagttatggaagacagtcgtacagctgttttctaaatcgaaatccgaggagtgcaatacagaagccggaacgatgcgactcggaccgatg

SEQ ID NO: 3595 - DNA, 203 bp, Artificial sequence
  synthetic
ggcgcgccagtcctgaaaatttgtaagacgctgaactttgtctcgatctagccacgcaaacgggatcgactgcgctttcaaatccatcttttagaaaacaaactcaaaaacaaaactgctcgtcttcgccaagactcaatgtttaatagtcctttttttacccacacagaaagctgacaagcgacgagcgactcggaccgatg

SEQ ID NO: 3596 - DNA, 203 bp, Artificial sequence
  synthetic
ggcgcgccagtcctactcaaaaacaaaactgctcgtcttcgccaagactcaatgtttaatagtcctttttttacccacacagaaagctgacaagcgacgagatggacactgtcattgagctgtccaaactcctggtaagtctccagagatcattgttaccgaatattttattgtagcgtaccatgacacgactcggaccgatg

SEQ ID NO: 3597 - DNA, 203 bp, Artificial sequence
  synthetic
ggcgcgccagtcctaattcttaaagcgtgtgattcagtatctgtttttataatacggagagctgccgagctgagcggaacagagctttggctgtgacgaggatggatgtgtggaagcgtcaacggcttcaagaatgccgtgaactgtgtcctttgcctgcattaatgtcactgtcgaatatcttgtcacgactcggaccgatg

SEQ ID NO: 3598 - DNA, 203 bp, Artificial sequence
  synthetic
ggcgcgccagtcctagtttcaaatttgtttctattgtattccacagagatgcggcagattttttggaagaaattgcaaacgatctgtgaattctaaatatcatgaagaagttaactatggagtccttgttagtttatacctttgtaatgggagtctgctttacatcgaatctcacatgcgagcaaaaacgactcggaccgatg

SEQ ID NO: 3599 - DNA, 203 bp, Artificial sequence
  synthetic
ggcgcgccagtcctgtaatgtttcctttccgagcggtgtgcagttacaattactaaatcaatcggtgatggagtcaattagaactaaaacgtatgtagtggattacgctaggaaaactacagagagaggtgattgcttcatttctgtagcattctgccgaaaagaaagaagacgctttttaccccgctcgactcggaccgatg

SEQ ID NO: 3600 - DNA, 203 bp, Artificial sequence
  synthetic
ggcgcgccagtccttgggatgaagagaataaaccggatgtgcaaatcaggagggatgcaaagacttgcagatgaggctcccatagattgttactagtgattatggtgcctcagggttggagtttagcatgggtgagtgtattatacgtgtcggtgataccgtctttgcatattattaacaatgaaaatcgactcggaccgatg

SEQ ID NO: 3601 - DNA, 203 bp, Artificial sequence
  synthetic
ggcgcgccagtcctactctattccccattcctagaagtgccgaggaactctgggaaggaacatacactctcgtagtcgcatttgtgctcgcatttctcgtctactccgattatcttagtaatttaagtccgtttggagaaattttgtcctcgccgtgtatttcaacgtgaatcttcgtcgggaagaggcgactcggaccgatg

SEQ ID NO: 3602 - DNA, 203 bp, Artificial sequence
  synthetic
ggcgcgccagtcctgaacgaagacggaagtgcgttggcatcaaaacaggaaacgcaatataaaataaccaactacatggttcccactaaaaacgggactgcgggctctagcttatttaatgagaaagaagatagcgagagcgacgattccatgcattttgaatacagctccaatcctaagagacagagcgactcggaccgatg

SEQ ID NO: 3603 - DNA, 203 bp, Artificial sequence
  synthetic
ggcgcgccagtcctctatcggctgccagggataaaatctcgatttttgccgtagcggctagtaatgattctggggacgtgctgtttttgagtgaactaagaatgaactctaaatcgagtgcacgagctgccattgtggatactgtggaagctgtgaagaagagaaaatatatatctatcgaggcgggacgactcggaccgatg

SEQ ID NO: 3604 - DNA, 203 bp, Artificial sequence
  synthetic
ggcgcgccagtcctggttcccagtctggctctaggaaaatctcttttaataccgtaagcccgtgaatgttttctttgttagcgtcatagacatttccttgcatgacgcatgacaacagacaactgctgccgcaagaaactaagctcgtcacaccaaacaaagacactttgtcttccaggtacttacaccgactcggaccgatg

SEQ ID NO: 3605 - DNA, 203 bp, Artificial sequence
  synthetic
ggcgcgccagtcctctgtgcatctctacaacgtgaccgtcaagaagttgttacggcttgtttcacacggttctgattttcagtgtcagcattgtcagcattcgtttagagagacttgcttagatctggaagactgtgttaatatctgtcaaggttgtcagatttcccaaaacgtgaggtgtatttgaacgactcggaccgatg

SEQ ID NO: 3606 - DNA, 203 bp, Artificial sequence
  synthetic
ggcgcgccagtcctcgtttagagagacttgcttagatctggaagactgtgttaatatctgtcaaggttgtcagatttcccaaaacgtgaggtgtatttgaaatgacgaccatacgtggtgatgatttgtcgaatcagatcactcagatttcaggaagttcttcaaaaaaagaggaggaaaagaagaagcgactcggaccgatg

SEQ ID NO: 3607 - DNA, 203 bp, Artificial sequence
  synthetic
ggcgcgccagtcctccggtgtgaagttttcgagactaagtgaaaggcattgtcgggttgcgattgtcagcatctgctttcttttagccttgtatttttgttatgttctacttaaaaaaactcctacgccagcttctggccccgttgtgtaaacatgggccgtacactcatttgcaattgtttgtgatgcgactcggaccgatg

SEQ ID NO: 3608 - DNA, 203 bp, Artificial sequence
  synthetic
ggcgcgccagtccttaaaacacgacctcaaactcccttccctgctcacagacttgctcatacaaaagttcaagattcgtcttttcaggtgaggagtccatcatgtacaaaggatgggactcagaagcgttgtctatacaatctgagatagtaaacgagattctgttatattgctacctcactccccaacgactcggaccgatg

SEQ ID NO: 3609 - DNA, 203 bp, Artificial sequence
  synthetic
ggcgcgccagtcctgtcttctgagtctcatgcctcaaaacctagtttgatagacaggatcaggtatagaggttataagagtgtaaatgtagaagaagcgtgatggattcggtgtcattttttaatccatatttggaagcgaatcgcttaaagaaaaaaagcagatcgagttacattcgtatacttcctcgactcggaccgatg

SEQ ID NO: 3610 - DNA, 203 bp, Artificial sequence
  synthetic
ggcgcgccagtcctatcaagcaagcggtgtattaaaatgtgatgaaacggaaaccgaaacggatgagccgatgactaagaaaaaccgattataatcagagtatgaattcgttacaatctctgtgtgtgttgtgcgctaggcttaatgaatgtgctttggaccttgaatgtttaaagttttgtgatcctcgactcggaccgatg

SEQ ID NO: 3611 - DNA, 203 bp, Artificial sequence
  synthetic
ggcgcgccagtcctaatcgtcgaaaacaatttcccataacaccccaataccctaagggcatttaaagccaaattcatctgtaatcaacagagctctacacaatgaccatcgtagtgtttgcgactgaatacgatgccgcaaacgtcatttttagtatcctatgtagaagtcccagtgaacatttaatccgactcggaccgatg

SEQ ID NO: 3612 - DNA, 203 bp, Artificial sequence
  synthetic
ggcgcgccagtcctgatgtccacgtttcgaaagacgaaaaattcaatgtatcttgagctcgtttgtctctgtagggtaatcgtttcagagatcttttctgaaattacgctgtacatttttccaggtgacagagggctgtctgctgttaatcacgtcgacgcgaagactagttcaaaataacacttaagcgactcggaccgatg

SEQ ID NO: 3613 - DNA, 203 bp, Artificial sequence
  synthetic
ggcgcgccagtcctccgattagcgcccgataaattactagtaagaacattaagatagccagggcattcacaatcgcagtccagcacagcatgcatttggaggtcatcgtccaaccctataaaaaaagcaaatactattttagttacacattctccttgtaaaaattcactgtggtcaactcacccgaccgactcggaccgatg

SEQ ID NO: 3614 - DNA, 203 bp, Artificial sequence
  synthetic
ggcgcgccagtccttaatctatttaatatggaaagatcaaaaagtgttcaactttcaaagaatagcagaaccctttcacatttcatcgatgaagaacaactatgctcttccgactctgggtctttgttctgttgactccctgttacagttggagaccgtggaccatatcggacgagagccattgtaaacgactcggaccgatg

SEQ ID NO: 3615 - DNA, 203 bp, Artificial sequence
  synthetic
ggcgcgccagtcctctatttcgttcttggatcaatatttaattgcagacgaggttttgtggaacgttgttcccgtaatttgttttttcaggcagtggggactcaagttagatttttttaaaaagttttcggggaagaccaagcggttgtcattttcgtttatatgtgatttgttcgctaggtctcaggcgactcggaccgatg

SEQ ID NO: 3616 - DNA, 203 bp, Artificial sequence
  synthetic
ggcgcgccagtcctggacacgttgcgcgacggagatgcgggagttgacacttcgtgatcccgccctcgtctgttgctgtagttgatgctgttgctgttgttgtagtggtcgttttcgtggttgtctttgtcctatgttaacattgtgagaacagcgcataaataaaatggtttttttgtgtgtattttcgactcggaccgatg

SEQ ID NO: 3617 - DNA, 203 bp, Artificial sequence
  synthetic
ggcgcgccagtcctgtagtggtcgttttcgtggttgtctttgtcctatgttaacattgtgagaacagcgcataaataaaatggtttttttgtgtgtattttatgtgtgtatttttttgtgtgtgtatttttttgtgtgtgtatttttttgtgtgtatttttttgtgtgtatttttttgtgtgtgtattcgactcggaccgatg

SEQ ID NO: 3618 - DNA, 203 bp, Artificial sequence
  synthetic
ggcgcgccagtcctatgttttaatgtcattgaaaatatttagaggtgcttcgattttaggtaaaatttcggtcgcctgccaattttccatgtttcggcgttatgcagcacaccggtaattgtgaaactttaatagttaattcatgttttggttccacttgtgcacggtcgattccagtttttatagatcgactcggaccgatg

SEQ ID NO: 3619 - DNA, 203 bp, Artificial sequence
  synthetic
ggcgcgccagtcctaaatacacacaaaaaaatacacacacaaaaaaatacacacacaaaaaaatacacacataaaatacacacaaaaaaaccattttatttatgcgctgttctcacaatgttaacataggacaaagacaaccacgaaaacgaccactacaacaacagcaacagcatcaactacagcaacgactcggaccgatg

SEQ ID NO: 3620 - DNA, 203 bp, Artificial sequence
  synthetic
ggcgcgccagtccttatacccacgttttagtgggtgggacttaaaagaaatgggtggagggatataggggtgtgtcttcgttggtaccaattataaaaatgtactcgccacaactcacaatttagaacgcatggcagttctgctacgtgtttggatgcccggacattagaatacagccagttgttacccgactcggaccgatg

SEQ ID NO: 3621 - DNA, 203 bp, Artificial sequence
  synthetic
ggcgcgccagtcctttatcattaagaatatttacacggtgacgacacggggaggaaatatgcggtcgaggggggggcacaacacgttttaagtactgttggaactccctcaccaaccgcaatcgcaatcctttgaaggctgcgagagcgtttggaaaactcgggtacgtctaaattcaccccagtgcgcgactcggaccgatg

SEQ ID NO: 3622 - DNA, 203 bp, Artificial sequence
  synthetic
ggcgcgccagtcctaactccctcaccaaccgcaatcgcaatcctttgaaggctgcgagagcgtttggaaaactcgggtacgtctaaattcaccccagtgcgatggatacgccgccgatgcagcgctctacaccccaacgcgcggggtcgcctgatactttggagttaatggacctgttggacgcggcccgactcggaccgatg

SEQ ID NO: 3623 - DNA, 203 bp, Artificial sequence
  synthetic
ggcgcgccagtcctaaggggcaggcgtgtataagagggcccctgtttaatacgcggtctgccgtgtttggatatttcacgaccctatcgtttatttacgtaatggcatcttccgacggtgacagactttgtcgctctaatgcagtgcgtcgtaaaacaacgcctagttattccggacaatatcgaacccgactcggaccgatg

SEQ ID NO: 3624 - DNA, 203 bp, Artificial sequence
  synthetic
ggcgcgccagtcctcaacccaatcgaaggtctcccgccccggaatcccccattgccattttacccaagtagccttattcatagatgtaaacgtttgggtgtgtgttttgttgtgcagggttcgtccgattcataacgcgacagcgtcgagtcggttttaagggaaaaggttactacggccccaaggaccgactcggaccgatg

SEQ ID NO: 3625 - DNA, 203 bp, Artificial sequence
  synthetic
ggcgcgccagtcctgtgttttgttgtgcagggttcgtccgattcataacgcgacagcgtcgagtcggttttaagggaaaaggttactacggccccaaggacatgttttgcacctcaccggctacgcggggcgactcgtccgagtcaaaacccggggcatcggttgatgttaacggaaagatggaatatcgactcggaccgatg

SEQ ID NO: 3626 - DNA, 203 bp, Artificial sequence
  synthetic
ggcgcgccagtcctgatataccgcccccccatggcgtgtagtctttataaataaatacaatggtttggctcgtgtctttttttgatgtctgtctgtgggggagtggggtgttgtggatattagagggtagagggtgctggtttgaacgtctccattaacccacggggtccccacacgggccgtgtggtcgactcggaccgatg

SEQ ID NO: 3627 - DNA, 203 bp, Artificial sequence
  synthetic
ggcgcgccagtcctataaataacataaccaatagaaacttaatacagagtcacgccccattacaacaaggataaaacacgggatcattttcttaacattgtagtagcgctgaaaagcgtcccctcccccggctcacagagctgctcttcggtgtagttgggtatactggtgcgcctcatttaatcgcgcgactcggaccgatg

SEQ ID NO: 3628 - DNA, 203 bp, Artificial sequence
  synthetic
ggcgcgccagtcctctggtatacacgagagcagtccatggttttagacctcgggcgaattgcgtggttttaagtgactatattccgagggtcgcctgtaatatggggacagttaataaacctgtggtgggggtattgatggggttcggaattatcacgggaacgttgcgtataacgaatccggtcagacgactcggaccgatg

SEQ ID NO: 3629 - DNA, 203 bp, Artificial sequence
  synthetic
ggcgcgccagtcctaaaatattaagggttgtgatttttttcattaggatgaaaagaacgtttcctagccacacccacaaaggagtttgtaaaataaaatctctgtttagaccttaaaatttgttgtgtgtgttgtgtggggggtccgtgaggatcgacctttacaagatataatttgtccatatcgcacgactcggaccgatg

SEQ ID NO: 3630 - DNA, 203 bp, Artificial sequence
  synthetic
ggcgcgccagtcctggatgggattttttgccgggaaacccccccccgccagcctttaacaaaacccgcgccttttgcgtccacccctcgtttactgctcggatggcgaccgtgcactactcccgccgacctgggaccccgccggtcaccctcacgtcgtcccccagcatggatgacgttgcgaccccccgactcggaccgatg

SEQ ID NO: 3631 - DNA, 203 bp, Artificial sequence
  synthetic
ggcgcgccagtcctcggatcgggttaaacaaacatattaacgaaactcgtgtgtttacatatgattactttttctatagtaaacattttaagtagtaaattatggatttgaggtcgcgtacagacgatgctttggacatggaattgcatgcgggttttgacgccccagaaatcgccagagctgttttacgactcggaccgatg

SEQ ID NO: 3632 - DNA, 203 bp, Artificial sequence
  synthetic
ggcgcgccagtccttgtaattaacacaagatcacatcgaagaattactgaagccgctgtgaaacctttcacaagacgatataaacttggttaagtgtattgatggggctctttggactgacacgctttatccatgaacataaactggttaaacccagcatcatttcaacgccacccggagttttaacccgactcggaccgatg

SEQ ID NO: 3633 - DNA, 203 bp, Artificial sequence
  synthetic
ggcgcgccagtcctgcggggttgggtgagcctataaattctacaacattggcggaagatacaggcaactgcaaacacgcaattgtcagatattttgcagccatggcctctgcttcaattccaaccgacccagacgtgtctactatttgtgaagactttatgaatttgctaccagacgaaccttcggatcgactcggaccgatg

SEQ ID NO: 3634 - DNA, 203 bp, Artificial sequence
  synthetic
ggcgcgccagtccttttgtggtttttattgactgggcgtttcgtttgtataacgctgttgttgctagtattttcataacctcctaggtttttggagctacacgtgcttattcaacgctctttgggatttgaatcatcgtaaacgtagcgtccctaccagttgagcgcgtaattttcgtaagcaataaacgactcggaccgatg

SEQ ID NO: 3635 - DNA, 203 bp, Artificial sequence
  synthetic
ggcgcgccagtcctgaagtacctaattatccaaatttaacttcgagttaacaccaaccgtgtgatactacatcgtgcttgaattgccatcttccacgggtcatgcaggctttaggaatcaagacagaacattttataattatgtgtctacttagcggacatgctgtttttaccctatggtataccgctcgactcggaccgatg

SEQ ID NO: 3636 - DNA, 203 bp, Artificial sequence
  synthetic
ggcgcgccagtcctgtcatggccaaatttctagatttgcatgaaatattgaaggatgcttaatacatggggaaaataaacgcattaataagtcgtcagggggtggatcactccaaactcctcctatatcccacgataaatggtctaaatacttcacgcgtgtgccttggtttgcaaccttagatcaatcgactcggaccgatg

SEQ ID NO: 3637 - DNA, 203 bp, Artificial sequence
  synthetic
ggcgcgccagtcctataatccattcacagcggttaaagcctcttggaggcggagcagggcggctccttgggggtgcgtgtttacacgcacctcttcataagatggctcttcagttggtattcgagcatatccacataagctggcacacaccgtctgcatgattgactggctttccaacgtattgaactcgactcggaccgatg

SEQ ID NO: 3638 - DNA, 203 bp, Artificial sequence
  synthetic
ggcgcgccagtcctccgagaatgtaacgggggtgtaaatagccagggggtttgttttaatttattaataaaaatgtgtattacgttactcatgtgtctccattacgcatcacagggggtatttatacccgataatatacaaaacgcgttttgtacctctaccgcacccgatatcttaacggggttattcgactcggaccgatg

SEQ ID NO: 3639 - DNA, 203 bp, Artificial sequence
  synthetic
ggcgcgccagtcctgcgttgggtgttggggaatcaaatgaagattgtgaaaagactgttccgcatttaaaggttacgcagttgtgtaggaacgacagcgatatggcttctgtagcaggtaacgctagtaatatctcaccacagcccccgtcgggcgttccaaccggaggggaatttgtactgatacctcgactcggaccgatg

SEQ ID NO: 3640 - DNA, 203 bp, Artificial sequence
  synthetic
ggcgcgccagtccttcttctatattttgtctgtttgggtgtcattcctcagtttgcctccacaccgtgagtattcactatcgggtccgtggggtgtttataatggctgctgaagctgacgaagagaactgtgaagcgttatacgtggctgggtatttagccttatattcaaaggacgaaggggaattacgactcggaccgatg

SEQ ID NO: 3641 - DNA, 203 bp, Artificial sequence
  synthetic
ggcgcgccagtcctgggatgttttcccatgggtaagaaaacagcttttaaagcagtaccggtttatattcacgccagttgactttgtttgctgcagacaccatgacggcgagatatgggttcggatctatctcgtttccgaataaatgtgggatatttttgtctaccactaagaactttatagccccccgactcggaccgatg

SEQ ID NO: 3642 - DNA, 203 bp, Artificial sequence
  synthetic
ggcgcgccagtcctttggtgttattgcaaagtggtgtaaaaattcttcggcggcggttgtttttccaattccatacgccccgtccaaataaatacgcaaaacgcccatttttacatcggttttatccgttgacatgtttattgtagacaaacgcgtcttaggttatcttctgggacggaacttcaaatcgactcggaccgatg

SEQ ID NO: 3643 - DNA, 203 bp, Artificial sequence
  synthetic
ggcgcgccagtccttgaacgcgtccgcgaaacctcgacgtacgttatcaatatcctttttgagtacatcgtaaaaacgagtgtggcaacgttgtcccaaacgaaaacacttggcccgaattcgactagcggacatatttgaagttccgtcccagaagataacctaagacgcgtttgtctacaataaaccgactcggaccgatg

SEQ ID NO: 3644 - DNA, 203 bp, Artificial sequence
  synthetic
ggcgcgccagtcctgaaaacacttggcccgaattcgactagcggacatatttgaagttccgtcccagaagataacctaagacgcgtttgtctacaataaacatgtcaacggataaaaccgatgtaaaaatgggcgttttgcgtatttatttggacggggcgtatggaattggaaaaacaaccgccgcccgactcggaccgatg

SEQ ID NO: 3645 - DNA, 203 bp, Artificial sequence
  synthetic
ggcgcgccagtccttctcatattcggtgtggacctaaggttggcgatcacacgatcacgggacggcaagttcgaggttaatgttccgataaacgctttaatatggaatttccatatcattcaaccgtatcttataacggcgtaacgttttattttaacgagcgtgctaccagggcgtattttatatgccgactcggaccgatg

SEQ ID NO: 3646 - DNA, 203 bp, Artificial sequence
  synthetic
ggcgcgccagtccttttactttggactataaactgcgactgaacgttatgaacccaccccaagcccgcgtctcggaacagacaaaggacttgcttagcgttatggttaaccagcaccccgaagaggacgcaaaagtgtgtaaatccagtgataattcaccgctttataacaccatggttatgttatcgcgactcggaccgatg

SEQ ID NO: 3647 - DNA, 203 bp, Artificial sequence
  synthetic
ggcgcgccagtccttaaatgtactataattgttcagtctaaaaataatgttgggtatttataattaccgcccccgtgttacttggaaacacccatacatatgttccactctacatcaaacttctcgcagttttcttgttcccgcacacgtttacacgtccggattcaagtcgcaacgctgctgacaaacgactcggaccgatg

SEQ ID NO: 3648 - DNA, 203 bp, Artificial sequence
  synthetic
ggcgcgccagtcctccaatatctgattcgagacgcgtcgccccttaggggatgtcttcctcttccgcgataatttcaccacgcccacatacccactcccaataaaagccctgtagagcgcattggcatcttacttgagatttggatacgctcggccgacttggtctgtttcacgcttccttaaacaaccgactcggaccgatg

SEQ ID NO: 3649 - DNA, 203 bp, Artificial sequence
  synthetic
ggcgcgccagtccttgacacggttacgcctatgagaagcgtaggttggagtgtggcctgacatgaccaaagtgaatgaatgcggccctgaaaatgtttatgatatatacgtaacgagtacgtaagatgacgcggcttcctgttttactgcttacaagagatgaggcggattccgtgaattgatgttaacgactcggaccgatg

SEQ ID NO: 3650 - DNA, 203 bp, Artificial sequence
  synthetic
ggcgcgccagtccttgtatccttaaataccacgtacgtaaaaaatgtttgaatacgtacatatttcttttttttttccagtacaaccatatccggtgtataatggaagcccatttggcaaatgaaaccaaacatgcactttggcataatgatcacacaaaaggattactacacgttgtgatacctaaccgactcggaccgatg

SEQ ID NO: 3651 - DNA, 203 bp, Artificial sequence
  synthetic
ggcgcgccagtcctaacccccataaataaattagtgtcactataaaaacataacaccagaatctcttcatatgtaattttacgtcatttctcccgtttccaccccctcttaaaatataaaataaccgggtgggtggcattaaacccacaagtacccgggcggcaatccgctagactgtttttctgctccgactcggaccgatg

SEQ ID NO: 3652 - DNA, 203 bp, Artificial sequence
  synthetic
ggcgcgccagtcctatcttacagattcttcaccaagcgtacgaccaaacattatcaatgacatttaacatcaattcacggaatccgcctcatctcttgtaagcagtaaaacaggaagccgcgtcatcttacgtactcgttacgtatatatcataaacattttcagggccgcattcattcactttggtccgactcggaccgatg

SEQ ID NO: 3653 - DNA, 203 bp, Artificial sequence
  synthetic
ggcgcgccagtcctgcctatcgaagttgatgtgcctagagtgacacaaatacttaaagacacaggaaacaacgcgattacatcagcattgcggtcattgcgatgggacaatcttcatccagcggtcgaggaggaatctgtggattgtgcaaacggtacaacgagcttgttacgtgcaacggagaaacccgactcggaccgatg

SEQ ID NO: 3654 - DNA, 203 bp, Artificial sequence
  synthetic
ggcgcgccagtcctgtttgtgacataccaggttttattagttttactggaacatccaattgcagttccaggctaattcccgggtgggtgtgtttaatccacgaaaccagatcccctccatataacgcccgcgcgagctgtgtactggacgcatagacggcggcgttgctctccccggtgttgggagaccgactcggaccgatg

SEQ ID NO: 3655 - DNA, 203 bp, Artificial sequence
  synthetic
ggcgcgccagtcctgaaaccagatcccctccatataacgcccgcgcgagctgtgtactggacgcatagacggcggcgttgctctccccggtgttgggagacatgggaactcaaaagaaggggccgcgttctgaaaaagtctcgccgtacgacaccacgacacccgaggtggaagcgttagatcatcaacgactcggaccgatg

SEQ ID NO: 3656 - DNA, 203 bp, Artificial sequence
  synthetic
ggcgcgccagtcctatttgatgatctaacgcttccacctcgggtgtcgtggtgtcgtacggcgagactttttcagaacgcggccccttcttttgagttcccatgtctcccaacaccggggagagcaacgccgccgtctatgcgtccagtacacagctcgcgcgggcgttatatggaggggatctggttcgactcggaccgatg

SEQ ID NO: 3657 - DNA, 203 bp, Artificial sequence
  synthetic
ggcgcgccagtcctagcgctatcggaactgtccccgggatcgtggccgcggataaacggggcggtaaattttgaaagtttataacccgttaataccatatatggacatccatagggggggttacataaatactaagcctctgtacaacacaaagggcctctaacaatgcactgaaccacaaccaagctcgactcggaccgatg

SEQ ID NO: 3658 - DNA, 203 bp, Artificial sequence
  synthetic
ggcgcgccagtcctaaatgaatctaaaccctctacgggaacgatatgaaaaatccgcagaaattagcgatcacattcttgccgctctacgtgatcccaacgtacacgttgtgtattaaagcattgtataaaaacacgcatgcgggcttgctgttctcatttctaggttttgtcttaaatacacccgcccgactcggaccgatg

SEQ ID NO: 3659 - DNA, 203 bp, Artificial sequence
  synthetic
ggcgcgccagtcctgaattcaagatgtcatctggtgctaacacacgcgcatccgtcgccattgtcccgtgttccatttcggaattgtcgacatttcgttcaagccaatgagtattttacgcgtaaaggcgaacccgagatcgattggagtgttatataacactccaatcgaccctcttgcgtaccatacgactcggaccgatg

SEQ ID NO: 3660 - DNA, 203 bp, Artificial sequence
  synthetic
ggcgcgccagtcctcagggcaggtggacgaactgggattatattatgtgcacgatggtgtacgtgttaactatgtggactttggaacagagtccttgacctatggggtcaccgggacgtgggaggtgcacgtggctgggactgttattcaccatacatccgcatctgtgtctagcacccaggccagcgcgactcggaccgatg

SEQ ID NO: 3661 - DNA, 203 bp, Artificial sequence
  synthetic
ggcgcgccagtcctataaccatcaactgacagaaccagatgtgcaggcctacggggtggtaactacctgctgtaagtgtggcagaaccgtccggctggtggttgagtgcggacaagcagacctaagagagctggaacagctgttcttgaagacgctgactctagtgtgccctcactgcgcctagcgttcgactcggaccgatg

SEQ ID NO: 3662 - DNA, 203 bp, Artificial sequence
  synthetic
ggcgcgccagtcctcgccctttcgtgttatttcttgtaacgaattcgttacaaaacacacacacagtatataagatagaggaacggattggtacaccacagatggcatcaacaagcggtgtgggatccgtcgggcctgcaagctgttgcgagacgcagaagccacataccatacgggagttgtgtttgcgactcggaccgatg

SEQ ID NO: 3663 - DNA, 203 bp, Artificial sequence
  synthetic
ggcgcgccagtcctattgatggttatacatggaactctttttttaggaaattttggcgtcacctaaatctaaaagaccctgaggatgagtcagatggagagactcctggaacgattagactatatacaagagcagatactgacactatatgagaaagatagtgttgacctagaggatcatataaggctcgactcggaccgatg

SEQ ID NO: 3664 - DNA, 203 bp, Artificial sequence
  synthetic
ggcgcgccagtcctactttcacatggacggagtctgacgggacagaacggtgtgggtcggggcgctttttttgtgctttctctaatgaaacaaaaagagaaaagttcctcaaatctgtcaagattcctaaaaacattgggctgtttcgcgcacacgcagaaaagctgtgacctgtgtatcattaaacacgactcggaccgatg

SEQ ID NO: 3665 - DNA, 203 bp, Artificial sequence
  synthetic
ggcgcgccagtcctaagttcctcaaatctgtcaagattcctaaaaacattgggctgtttcgcgcacacgcagaaaagctgtgacctgtgtatcattaaacaatgcttgctaggcaaagggttaaacgcgctaatcctgaacaactgtataagacatgcaaagcaacggggggcgattgtccacccgatcgactcggaccgatg

SEQ ID NO: 3666 - DNA, 203 bp, Artificial sequence
  synthetic
ggcgcgccagtcctaagacataggactaaccgctttgggggacaacattgaaaatgaattgcaggaaatagatttattaactgcggatggtgaagaagaccaggagggcagagacctgcagttggtattttccactggcaatgatgaggtggttgatattatgactatacctatacgtgcaggcggggcgactcggaccgatg

SEQ ID NO: 3667 - DNA, 203 bp, Artificial sequence
  synthetic
ggcgcgccagtcctggattatgatatacatcctagcctgttgcgcaggaaacgtaaaaaacgcaaacgtgtttatttttcagatggccgtgtggcttccaggcccaaatagattttacttaccccctcaacctatacaacggacattgaacacagaggaatacgtgagacgcaccagtactttcctcccgactcggaccgatg

SEQ ID NO: 3668 - DNA, 203 bp, Artificial sequence
  synthetic
ggcgcgccagtcctatctgtggaaaaggattacatattgcgggaagacttgtctgtgcatagaattggcgggatctggaggggaacttgtgttcgatgtatggtaggactgtattagctgtgagactaatatactgtttgctgtattgtattgctgtaatcgtgcgtaaattgctataccctgtaatacgactcggaccgatg

SEQ ID NO: 3669 - DNA, 203 bp, Artificial sequence
  synthetic
ggcgcgccagtccttgcagcaagtccccacacccaggagaacattatacctggtagagagtcagtgtccattttgccaggctatcatacgatttgtatgcgtagcaagcaacactgggatacggaatctacaggcactcctggtcaacagtcaccttgacctcgcttgtcacgcctgtgtcgagcagacgactcggaccgatg

SEQ ID NO: 3670 - DNA, 203 bp, Artificial sequence
  synthetic
ggcgcgccagtccttagcaagcaacactgggatacggaatctacaggcactcctggtcaacagtcaccttgacctcgcttgtcacgcctgtgtcgagcagaatggcgtccagggtctcagacaccggcaatggcaatgaaaacaaagagaatgaaggtacagtggcatctgatcattctgaggcgcgtcgactcggaccgatg

SEQ ID NO: 3671 - DNA, 203 bp, Artificial sequence
  synthetic
ggcgcgccagtcctattatacctggtagagagtcagtgtccattttgccaggctatcatacgatttgtatgcgtagcaagcaacactgggatacggaatctacaggcactcctggtcaacagtcaccttgacctcgcttgtcacgcctgtgtcgagcagaatggcgtccagggtctcagacaccggcacgactcggaccgatg

SEQ ID NO: 3672 - DNA, 203 bp, Artificial sequence
  synthetic
ggcgcgccagtcctacaggcactcctggtcaacagtcaccttgacctcgcttgtcacgcctgtgtcgagcagaatggcgtccagggtctcagacaccggcaatggcaatgaaaacaaagagaatgaaggtacagtggcatctgatcattctgaggcgcgttgtagctatatattatttgaggctgaatcgactcggaccgatg

SEQ ID NO: 3673 - DNA, 203 bp, Artificial sequence
  synthetic
ggcgcgccagtcctgttaataacaatcttggtttaaaaaataggagggaccgaaaacggttcaaccgaaaacggttgtatataaaccagccctaaaatttagcaaacgaggcattatggaaagtgcaaatgcctccacgtctgcaacgaccatagaccagttgtgcaagacgtttaatctatctatgccgactcggaccgatg

SEQ ID NO: 3674 - DNA, 203 bp, Artificial sequence
  synthetic
ggcgcgccagtcctgccattgtaactgtaacatatgatagtgaggaacaaaggcaacagtttttagatgttgtaaaaataccccctaccattagccacaaactgggatttatgtcactgcacctattgtaatttgtatatatgtaaatgtgtaaatatatggtattggtgtaatacaactgtacatgtcgactcggaccgatg

SEQ ID NO: 3675 - DNA, 203 bp, Artificial sequence
  synthetic
ggcgcgccagtcctaacccccttgcaatttttcctactaactctacttgtgtgttactgtcccgcattgtatatacactactatattgttaccacacagcaatgatgctaacatgtcaatttaatgatggagatacctggctgggtttgtggttgttatgtgcctttattgtagggatgttggggttacgactcggaccgatg

SEQ ID NO: 3676 - DNA, 203 bp, Artificial sequence
  synthetic
ggcgcgccagtcctatgcattatactactgatggtgattatatatatatgaattagagtaaaccgttttttatatttgtaacagtgtatgctttgtataccatggcacatagtagggcccgacgacgcaagcgtgcgtcagctacacagctatatcaaacatgtaaactcactggaacatgccccccacgactcggaccgatg

SEQ ID NO: 3677 - DNA, 203 bp, Artificial sequence
  synthetic
ggcgcgccagtcctagaaaaggtaaaacatatactaaccaaggcgcggttcataaagctaaattgtacgtggaagggtcgctgcctacactgctggacaacatgcatggaagacatgttaccctaaaggatattgtattagacctgcaacctccagaccctgtagggttacattgctatgagcaattacgactcggaccgatg

SEQ ID NO: 3678 - DNA, 203 bp, Artificial sequence
  synthetic
ggcgcgccagtcctttttcattacaggttctggattttatttgcatcctgcatggtattttgcacgtaaacgccgtaaacgtattcccttatttttttcagatgtggcggcctagcgacagcacagtatatgtgcctcctcctaaccctgtatccaaagttgttgccacggatgcttatgttactcgccgactcggaccgatg

SEQ ID NO: 3679 - DNA, 203 bp, Artificial sequence
  synthetic
ggcgcgccagtcctagaaacagacatcagagaagtgcaacagcttctgttgggaacactaaacatagtgtgtcccatctgcgcaccgaagacctaacaacgatggcggacgattcaggtacagaaaatgaggggtctgggtgtacaggatggtttatggtagaagctatagtgcaacacccaacaggtcgactcggaccgatg

SEQ ID NO: 3680 - DNA, 203 bp, Artificial sequence
  synthetic
ggcgcgccagtcctcattattctagttacaacaagaacctaggagttatatgccagaagtaagcctataaaatacacaggtaagactctgcacaggaccagatggcgacaccaatcgggaccgtcagacagctttccgaaagcctctgtatcccatatattgatgttttattgccttgtaatttttgtcgactcggaccgatg

SEQ ID NO: 3681 - DNA, 203 bp, Artificial sequence
  synthetic
ggcgcgccagtcctttgattttgcttggacgtgtgtacatagtccctgtatatattcccctcctacccccacataccttgaagcttgcaacattgtaacaaatgtatcgcctacgtagaaaacgcgctgcccccaaagatatatacccctcatgcaaaatatcaaacacctgcccacctgacattcaacgactcggaccgatg

SEQ ID NO: 3682 - DNA, 203 bp, Artificial sequence
  synthetic
ggcgcgccagtcctttacacctttggttattatagctcttaacaactcaacaggggattttgagttacatcctagtcttagaaagcgtcgtaaaagagcttatgtataatgtttttcagatggctgtctggttaccagcgcagaataagttctatcttcctccccagcccatcactagaatcctgtcccgactcggaccgatg

SEQ ID NO: 3683 - DNA, 203 bp, Artificial sequence
  synthetic
ggcgcgccagtcctaggagttagtgtcgcctcagcaaccttatgctgtcgttgcttcctgtgcctattgcgagaaactggttcgattgaccgtcctcgcggatcacagcgccattagacagctggaggaactccttctgcgatctttgaacatcgtgtgcccactgtgcaccctacagcgacagtaaacgactcggaccgatg

SEQ ID NO: 3684 - DNA, 203 bp, Artificial sequence
  synthetic
ggcgcgccagtcctatcacagcgccattagacagctggaggaactccttctgcgatctttgaacatcgtgtgcccactgtgcaccctacagcgacagtaaaatggcagataataaaggtactgaaaacgattggtttttggtggaggcgacagattgtgaggaaacgttagaggaaacctcacttggtcgactcggaccgatg

SEQ ID NO: 3685 - DNA, 203 bp, Artificial sequence
  synthetic
ggcgcgccagtcctttgctggctactgtcgttagcgggcagagacaggatagacagggaggagagcgaaggaggccccaactcgaccacgaccagtgtgcctactgcaaagaaaagggacattgggctagagattgccccaagaagccaagaggaccccggggaccacgaccccaggcctccctcctgcgactcggaccgatg

SEQ ID NO: 3686 - DNA, 203 bp, Artificial sequence
  synthetic
ggcgcgccagtcctaaaccccaagaccaattcaggcaggttctggagtgcgtggcaatcagtcacaaacttacaagccagctgctggtcgcggaggaagaggcaatcaaaaccgaaaccaacgatcatccggtgctggtgactcacgcgcagttaatactgtaacacaaagtgccacgtcctccacagcgactcggaccgatg

SEQ ID NO: 3687 - DNA, 203 bp, Artificial sequence
  synthetic
ggcgcgccagtcctgcttgtgtttaaaaattgtcgcagcttccccaaaccaagtggtcttggttttctctttttattatattgtcaatatggcttgcaaacacggatacccagacgtgtgccctatttgcacagccgttgacgctactcccgactttgaatatttgctcatggcagacggagaatggtcgactcggaccgatg

SEQ ID NO: 3688 - DNA, 203 bp, Artificial sequence
  synthetic
ggcgcgccagtcctgaccggcagctcgacagcggagacaacccgtacctcaagtacaaccacgccgacgcggagtttcaggagcgccttaaagaagatacgtcttttgggggcaacctcggacgagcagtcttccaggcgaaaaagagggttcttgaacctctgggcctggttgaggaacctgttaagcgactcggaccgatg

SEQ ID NO: 3689 - DNA, 203 bp, Artificial sequence
  synthetic
ggcgcgccagtccttcttccaggcgaaaaagagggttcttgaacctctgggcctggttgaggaacctgttaagacggctccgggaaaaaagaggccggtagagcactctcctgtggagccagactcctcctcgggaaccggaaaggcgggccagcagcctgcaagaaaaagattgaattttggtcagacgactcggaccgatg

SEQ ID NO: 3690 - DNA, 203 bp, Artificial sequence
  synthetic
ggcgcgccagtcctccggtagagcactctcctgtggagccagactcctcctcgggaaccggaaaggcgggccagcagcctgcaagaaaaagattgaattttggtcagactggagacgcagactcagtacctgacccccagcctctcggacagccaccagcagccccctctggtctgggaactaatacgcgactcggaccgatg

SEQ ID NO: 3691 - DNA, 203 bp, Artificial sequence
  synthetic
ggcgcgccagtcctacaccatgtggtcacgctgggtatttaagcccgagtgagcacgcagggtctccattttgaagcgggaggtttgaacgcgcagccgccatgccggggttttacgagattgtgattaaggtccccagcgaccttgacgagcatctgcccggcatttctgacagctttgtgaactggcgactcggaccgatg

SEQ ID NO: 3692 - DNA, 203 bp, Artificial sequence
  synthetic
ggcgcgccagtcctgtgtcgcagacgcaggagcagaacaaagagaatcagaatcccaattctgatgcgccggtgatcagatcaaaaacttcagccaggtacatggagctggtcgggtggctcgtggacaaggggattacctcggagaagcagtggatccaggaggaccaggcctcatacatctccttccgactcggaccgatg

SEQ ID NO: 3693 - DNA, 203 bp, Artificial sequence
  synthetic
ggcgcgccagtcctctcagagagtcgttggaagacgggaaggaagcccaacgactgagcagtccaccccaggcgtgattctggtcgcccggtggatcaagcatggaagccgtcataaaggtgatttcgtccgcgtgtaaaacctattgcgggaaaacctctccttctaagaaggaaataggggccatgcgactcggaccgatg

SEQ ID NO: 3694 - DNA, 203 bp, Artificial sequence
  synthetic
ggcgcgccagtcctcatgaagggcacgagctgcttcccaaaggcccccatccaagtataggtctctacatcgtaggtgacaaagagacgctcggtgcgaggatgcgagccgatcgggaagaactggatctcccgccaccagttggaggagtggctgttgatgtggtgaaagtagaagtccctgcgacgcgactcggaccgatg

SEQ ID NO: 3695 - DNA, 203 bp, Artificial sequence
  synthetic
ggcgcgccagtcctctcggttgtaacgcgcttaggaagtcccctcgaggtatggcagatatgctcttgcatagggggaaaaaatgtagtcttaatattgtctgtgtgctgcaggagctaagctgactctgctggtggcctcgcgtaccactgtggccaggcggtagctgggacgtgcagccgaccacccgactcggaccgatg

SEQ ID NO: 3696 - DNA, 203 bp, Artificial sequence
  synthetic
ggcgcgccagtccttgtgtgctgcaggagctaagctgactctgctggtggcctcgcgtaccactgtggccaggcggtagctgggacgtgcagccgaccaccatggggagcagcaagagcaagcctaaggaccccagccagcgccggcacagcctggagccacccgacagcacccaccacgggggattccgactcggaccgatg

SEQ ID NO: 3697 - DNA, 203 bp, Artificial sequence
  synthetic
ggcgcgccagtcctgcgaaaatcccgggatatgatagaggtgggggttattaaccgagacgggtctttggagcgacccctgctcctcttccccgcagtagctatggttagagggagtatcctaggaagagattgtctgcagggcctagggctccgcttgacaaatttatagggagggccactgttcttcgactcggaccgatg

SEQ ID NO: 3698 - DNA, 203 bp, Artificial sequence
  synthetic
ggcgcgccagtccttgccgagaactcagagggtcgtcggaagacggagagtgagcccgacgaccaccccaggcacgtctttggtcggcctgcggatcaagcatggaagccgtcattaaggtgatttcgtccgcgtgtaaaacctattgcgggaaaatctctccttctaagaaggaaataggggccatgcgactcggaccgatg

SEQ ID NO: 3699 - DNA, 203 bp, Artificial sequence
  synthetic
ggcgcgccagtcctacataccaaataccaagaccaactagaacaacaattttcaaaacaaaaaattgaaaagtggtgttacgtaaggaacagaagaaaggaatggaaaggaccctacaaagtgttgtgggacggagacggggcagcagtaatagaggaagagggaaaaacagccttatatccacaccgcgactcggaccgatg

SEQ ID NO: 3700 - DNA, 203 bp, Artificial sequence
  synthetic
ggcgcgccagtcctcaacgcttagctgcacttcagctgtgcactaacgcatgtctctgttggtacccgttaggacgcatcaacgacaccaccccgttgtggttgaacttttcgtctgggaaggaaccaacgatccaacaactgagtggccacccctaactcgtcgtaacattcatagattgtggcaatcgactcggaccgatg

SEQ ID NO: 3701 - DNA, 203 bp, Artificial sequence
  synthetic
ggcgcgccagtcctgggtggcgatgataatgttgccacagcccaaagaaagctttggaggaaagccaattggctggcttttctggaacacgtgcaaaggacctaggcgggactgtccacattgttgttgtcccatatgtagttggcattgtcagctttgctttttgcagaaaaatctaggaatcaactcgactcggaccgatg

SEQ ID NO: 3702 - DNA, 203 bp, Artificial sequence
  synthetic
ggcgcgccagtcctctgtcttactttctgtttctcgcggcccgcgctctctccctcggcgccctctagcggccaggagagaccggcaaacaattgggggctcgtccgggattgatcaccccggaaccctaacgatcctctggacccaccccctcggcggcgttttgggtctttcctttaaattatatccgactcggaccgatg

SEQ ID NO: 3703 - DNA, 203 bp, Artificial sequence
  synthetic
ggcgcgccagtcctcgtccgggattgatcaccccggaaccctaacgatcctctggacccaccccctcggcggcgttttgggtctttcctttaaattatatcatgggaaattccccctcctataacccccccgctggtatctccccctcagactggctcaaccttcgtcaaagcgcgcaaaggctcaatcgactcggaccgatg

SEQ ID NO: 3704 - DNA, 203 bp, Artificial sequence
  synthetic
ggcgcgccagtcctagctccccgggcaaaacaatcgtcggtggctaggacctctcccggccctagtcgaagcctcgggaggcgccctcctggctactaacccccccgtgtgggttccctggcgtttgctaaaagccttcaaatgcccaaagaacgacggtcccgaagacgcccacaaccgatcatcagcgactcggaccgatg

SEQ ID NO: 3705 - DNA, 203 bp, Artificial sequence
  synthetic
ggcgcgccagtcctcccccgtgtgggttccctggcgtttgctaaaagccttcaaatgcccaaagaacgacggtcccgaagacgcccacaaccgatcatcagatgggtaagtctcactcttactctcctcgctctctgtcagcccatccagacttggagatgctccctgtccctaggaaatcaacaatgcgactcggaccgatg

SEQ ID NO: 3706 - DNA, 203 bp, Artificial sequence
  synthetic
ggcgcgccagtcctgccatggaggcccatcagtttattaaggctcctggcatcactactgctattgagcaggctgctctagcagcggccaactctgcccttgcgaatgctgtggtagttaggccttttctctctcaccagcagattgagatccttattaacctaatgcaacctcgccagcttgttttccgactcggaccgatg

SEQ ID NO: 3707 - DNA, 203 bp, Artificial sequence
  synthetic
ggcgcgccagtccttttcactgagtcagtgaagccagtgctcgacctgacaaattcaatcctgtgtcgggtggaatgaataacatgtcttctgctgcgcccatgggttcgcgaccatgcgccctcggcctattttgctgttgctcctcatgtttctgcctatgctgcccgcgccaccgcccggtcagccgactcggaccgatg

SEQ ID NO: 3708 - DNA, 203 bp, Artificial sequence
  synthetic
ggcgcgccagtccttgaagccagtgctcgacctgacaaattcaatcctgtgtcgggtggaatgaataacatgtcttctgctgcgcccatgggttcgcgaccatgcgccctcggcctattttgctgttgctcctcatgtttctgcctatgctgcccgcgccaccgcccggtcagccgtctggccgccgccgactcggaccgatg

SEQ ID NO: 3709 - DNA, 203 bp, Artificial sequence
  synthetic
ggcgcgccagtccttgtctctagtttgtctgttcgagatcctacagttggcgcccgaacagggacctgagaggggcgcagaccctacctgttgaacctggctgatcgtaggatccccgggacagcagaggagaacttacagaagtcttctggaggtgttcctggccagaacacaggaggacaggtaagcgactcggaccgatg

SEQ ID NO: 3710 - DNA, 203 bp, Artificial sequence
  synthetic
ggcgcgccagtccttgatcgtaggatccccgggacagcagaggagaacttacagaagtcttctggaggtgttcctggccagaacacaggaggacaggtaagatgggagaccctttgacatggagcaaggcgctcaagaagttagagaaggtgacggtacaagggtctcagaaattaactactggtaaccgactcggaccgatg

SEQ ID NO: 3711 - DNA, 203 bp, Artificial sequence
  synthetic
ggcgcgccagtcctatggctagctatgcttactaataatcagcttagaagacaagtaattagggaagcacagatctggatgtggaaacataagggagctgcagttagaagaaattgtggttgcaggctatgtaaccccggctggggaagccaagtaagaaatgttgaactgtgataagcctgtctaggcgactcggaccgatg

SEQ ID NO: 3712 - DNA, 203 bp, Artificial sequence
  synthetic
ggcgcgccagtcctgcgtccacgacggaaaccccgccgagacctagccgcggtccctggatctccagatacggaggggagtctttttgttgttttttgtagatgcatccggtgttgcgacagatgcgtccgacggcgcctccaacacagccgccgctcccgccccccactagcgcccctgcagccgttcgactcggaccgatg

SEQ ID NO: 3713 - DNA, 203 bp, Artificial sequence
  synthetic
ggcgcgccagtcctaagccgtccccctcggagttagaagacgcgttcacaaaatggacgaagactgagtttccctgtcgttgccagccggtccccgtcagcatgagcaagcgcaagttcaaagaagagctgctggaggcccttgtgcctgaaatctatggccctgccgcggacgtcaagcccgacattcgactcggaccgatg

SEQ ID NO: 3714 - DNA, 203 bp, Artificial sequence
  synthetic
ggcgcgccagtcctcaaacccagccgcactcgctccacccgccgtcgtcgctctgtccgccgccgctcaaggcgcacggcccccatctctgtgcgtcgcgtaacccgccgtggacgcacgctgacccttcccaacgcgcgttaccaccctagcattctcgtttaatccgtgcgctgccgttttttcagcgactcggaccgatg

SEQ ID NO: 3715 - DNA, 203 bp, Artificial sequence
  synthetic
ggcgcgccagtcctaacccgccgtggacgcacgctgacccttcccaacgcgcgttaccaccctagcattctcgtttaatccgtgcgctgccgttttttcagatggctttgacttgccggtttcgcattcccgttccgtcctaccgaggaagatctcgccgtaggagaggcatggcgggcagtggccgccgactcggaccgatg

SEQ ID NO: 3716 - DNA, 203 bp, Artificial sequence
  synthetic
ggcgcgccagtcctgcgctttgcgcaggcgaataaaaggcggatttttgcccgcgttgattcccatcatcgccgccgccataggcgcaatcccaggcgtggcctccgtggccttgcaagcagctcgcaaacaataaaagaaggcttaacactgacttcctggtcctgactattttatgcagacaagaccgactcggaccgatg

SEQ ID NO: 3717 - DNA, 203 bp, Artificial sequence
  synthetic
ggcgcgccagtcctccaccagccgcaccgcggcgtcatcgaggccgtctacctgcgtacgccgttctcggccggtaacgccaccacataagaagccagccaatgggctccagcgagcaggagttggtcgccatcgtgcgcgaactgggctgcggaccttactttctgggcacgtttgacaaacgctttcgactcggaccgatg

SEQ ID NO: 3718 - DNA, 203 bp, Artificial sequence
  synthetic
ggcgcgccagtcctccttgccgtcctcggggggcgttacatagcccggatcttgctccacttgctcattttcctcctcatgtttcactagctcgacggcgccgacctcagagttgggggtggttaaggtttcggagtctggctgcagcttaagatcctcctccatattttctcgcctaggagtaaagccgactcggaccgatg

SEQ ID NO: 3719 - DNA, 203 bp, Artificial sequence
  synthetic
ggcgcgccagtcctaggcactgttcaataaatattgctcggtgtctcttaaggactaaacacccgcgctttttttaggcgccaaattacgtcattgacattatgagcaaagacattcccacgccttacatgtggagctatcagccgcaaatgggcctggcagctggagcttctcaggattactccagtcgactcggaccgatg

SEQ ID NO: 3720 - DNA, 203 bp, Artificial sequence
  synthetic
ggcgcgccagtcctcagacgacttcatcccgaactacgacgcggtgagcgaatctgtggacggctacgactgaagaccgatagtacggccgtgactgcgcggctgtaacatctgcatcggtgccgtaaccttcgctgctttacttaaaaagcctgtgatttcatttaccaccccagcacttggattaccgactcggaccgatg

SEQ ID NO: 3721 - DNA, 203 bp, Artificial sequence
  synthetic
ggcgcgccagtccttcgctggactttacaaaaagagaatctaaccactaccaccctccttccccttactacttatactttttcccaaaaaaagaattactttttgcccattattgcacttttggcctttgtctgtgttattaccgctaattatattttaattttcaatcttgataatttttactaatccgactcggaccgatg

SEQ ID NO: 3722 - DNA, 203 bp, Artificial sequence
  synthetic
ggcgcgccagtcctcgccttgctgacttatctcatcttcacctctgtttgctgcactgccatctgcagcattgccactttttttgtggccattttccaaactgcggactacctatacgttagagtggcatactatcgtcatcatccccaatataggaaccacgaggtggctacccttctgtgcctgtccgactcggaccgatg

SEQ ID NO: 3723 - DNA, 203 bp, Artificial sequence
  synthetic
ggcgcgccagtcctgtttcctattacagcccccaccgcccccaccggctcctgtgcagcgcgctccatcagttattagctactttcatcttaactctgaagatgtctgaccaactagaaatcgacgggcagtgcactgagcagcttatccttgctcggcgaaaactcaaacaacaaaatcaggaactgcgactcggaccgatg

SEQ ID NO: 3724 - DNA, 203 bp, Artificial sequence
  synthetic
ggcgcgccagtcctacatagggaatgctgggagttgaggaggtgtcataggggtagacggggttgaagtcgtcttcaattctggttcttttcatctgcaagatgaagattgtgggtcagggtaaaaaggtgaacaccgatataccctttaggacgtggagaaagtttgccgcccgttggcacatcccgcgactcggaccgatg

SEQ ID NO: 3725 - DNA, 203 bp, Artificial sequence
  synthetic
ggcgcgccagtccttcgcctaacatcaccttcagtgtcgtctacaacgagataaacagtgggtatgcttttacgtttaaatggtcagccgaaccgggaaaaccttttcacccacccaccgctgtattttgctacataactgaacaataaaatcattgcaggcgcaatcttcgcatttcttttttccagcgactcggaccgatg

SEQ ID NO: 3726 - DNA, 203 bp, Artificial sequence
  synthetic
ggcgcgccagtccttgtaatttttcaccaacgcagcggtggggagaggtgtgatcttcgtgacttgcactttggctcgctttacaaccgtctggaataattatgcctcttccgtctctccctccacctccagtgagtcgggatcaaggcctttgtatttcttggttggagttggctttaacctgctgtcgactcggaccgatg

SEQ ID NO: 3727 - DNA, 203 bp, Artificial sequence
  synthetic
ggcgcgccagtcctggagggacgtggagcgcctgcagcgttgccggcaaatccgctgtttccatcacgctttcgtaagaaggaggaggaccctcggcgtacgccatcaccggcggcactcccaccgcacgtctcattttgactaccgggaagagggaaaaaacagacaaagggacggacgctgttgctcgactcggaccgatg

SEQ ID NO: 3728 - DNA, 203 bp, Artificial sequence
  synthetic
ggcgcgccagtcctggcgattctctagttctaacacgaacgtttacggtcgttgccagctttttccttataaaactctggtgggaatttctcttgggacagatggacctgacatctgtacattcggttcgggatctgagttctgctctccgtatcccatttattgatttggttgttccttgcaattttcgactcggaccgatg

SEQ ID NO: 3729 - DNA, 203 bp, Artificial sequence
  synthetic
ggcgcgccagtcctcaccaccagatcatacattcaaaaagggagggcaaacaattgaggtaatctatgatgaggatcccaataatagcaccagacatactgtatggcgccatatatattatcaaaacggtgataacagatggagaaaagcagctagtgatgtagatgttcatggtgtgttttatttagcgactcggaccgatg

SEQ ID NO: 3730 - DNA, 203 bp, Artificial sequence
  synthetic
ggcgcgccagtcctgtaagcgactcccttccgtggtttggtggaaaagtcacaagggtaccatagcgaggaaccccggttcgaaaccggcaggatccgctatgagcacaagtgaggcgcttgcgcgttgaacccggccaaggacccccagacacggagaggagtctttttttatttattttttcttagcgactcggaccgatg

SEQ ID NO: 3731 - DNA, 203 bp, Artificial sequence
  synthetic
ggcgcgccagtccttgagcacaagtgaggcgcttgcgcgttgaacccggccaaggacccccagacacggagaggagtctttttttatttattttttcttagatgcatcctgtcctgcgacaaatgcgacctcagcccagggcaaccacggcctcagcagcggtggcgctttcgggctctggcgaacagcgactcggaccgatg

SEQ ID NO: 3732 - DNA, 203 bp, Artificial sequence
  synthetic
ggcgcgccagtcctggcagctggagtggcgtctgctgacgtcactggcgatgacgatgacgaagaccagtacgaggactgatcggccgtaccttttgttagatgcagcgaccggcgatcatcgcggagagggctcctaacctggatcccgcggttttggcggccatgcaaagccagccttctggcgttcgactcggaccgatg

SEQ ID NO: 3733 - DNA, 203 bp, Artificial sequence
  synthetic
ggcgcgccagtccttatgcgcagacgcatgaagggtggggtgctgcccttcctaattccacttattgctgcggccattggagccgttcccggaattgcctcagtagccttgcaggcttctcgaaaaaattaaaataaaataaaacttccaacttattactggtactatgactgttttatgcagactaacgactcggaccgatg

SEQ ID NO: 3734 - DNA, 203 bp, Artificial sequence
  synthetic
ggcgcgccagtcctgcggcgtcattgaagcggtctacctgcgcacgcccttctcggcgggtaacgctaccacctaagaaggcaccctcccagactgctgtaatgggttcaagcgaacaggagctgacggccattgttcgagatctaggctgtggaccctattttttgggaacctttgacaaacgttttcgactcggaccgatg

SEQ ID NO: 3735 - DNA, 203 bp, Artificial sequence
  synthetic
ggcgcgccagtccttcctcggggggagtctcgtagcccaagttctgctcaaccggtgcgtcttggggtatgagtagacttttgtccttctccatgacagccgtagcgccaatggcgggagcggtgggggcggttaagctttcctgtggctccagatccatcatgtgtttctttgcctaggattaaatacgactcggaccgatg

SEQ ID NO: 3736 - DNA, 203 bp, Artificial sequence
  synthetic
ggcgcgccagtcctgtagcgccaatggcgggagcggtgggggcggttaagctttcctgtggctccagatccatcatgtgtttctttgcctaggattaaataatggccagcaatcagcactcacagagggagcgcaccccagaccgcagcgctcagccgccgccgccaaaaatgggcagatactttctgcgactcggaccgatg

SEQ ID NO: 3737 - DNA, 203 bp, Artificial sequence
  synthetic
ggcgcgccagtcctttcttgacttttttctttggaggtaaaggcacagcttccagttcttcttcgctttcggaatccagaaagtatctgcccatttttggcggcggcggctgagcgctgcggtctggggtgcgctccctctgtgagtgctgattgctggccattatttaatcctaggcaaagaaacaccgactcggaccgatg

SEQ ID NO: 3738 - DNA, 203 bp, Artificial sequence
  synthetic
ggcgcgccagtccttcctttttcgggctcgcctggacactatcctgacgccttcatacccaactttgacgcagtgagtgaatctgtggatggctatgattaatgtctaatggagcggctgacagagcgcggctgcgacatttagaccactgtcgccaacctcactgctttgctcgagacatctgtgtccgactcggaccgatg

SEQ ID NO: 3739 - DNA, 203 bp, Artificial sequence
  synthetic
ggcgcgccagtcctttgagcttccagaggagcacccccaggggccagctcacggtgtcagaataacagttgaaaaaggaattgatacacacctcattaaatttttcaccaaacgcccgctattggtggaaaaagatcaaggaaatactatattaactttatattgcatttgtcctgttcccggattaccgactcggaccgatg

SEQ ID NO: 3740 - DNA, 203 bp, Artificial sequence
  synthetic
ggcgcgccagtcctaacacagtttaacacatacagtaagcacagtaatctttttaggaataattggcttcagcattttgattattatagcagcctttatttatctgtgctggcatagaaaatctttgtgtgtttctaaaacagaacctcttatgccgattccttactagttttcttttttcttacagtcgactcggaccgatg

SEQ ID NO: 3741 - DNA, 203 bp, Artificial sequence
  synthetic
ggcgcgccagtcctaagtgctaatacacctggtggtttttcttgaagaccattggaagaagtaaaagggggtgtaacaaagggtacgtctgatgtgtcaaatgggtcaaaagggtaaacggggttgaagtcatcattttcttctgtttcttcagcatactgggttctgctgcgcttcatctagaaaagcgactcggaccgatg

SEQ ID NO: 3742 - DNA, 203 bp, Artificial sequence
  synthetic
ggcgcgccagtccttgggtcaaaagggtaaacggggttgaagtcatcattttcttctgtttcttcagcatactgggttctgctgcgcttcatctagaaaagatgaagatggtgggtagggattgggaagaagaatctgaccttccatttaagatttggagaaagtttgctgtttgcaagtctgtcaggcgactcggaccgatg

SEQ ID NO: 3743 - DNA, 203 bp, Artificial sequence
  synthetic
ggcgcgccagtccttgaagataacacctgaagctgaatacattttagcaagcctgcgagagtggttgtactttgcttttttgacggaacgccaacgctgcaaacaaaaaggacgaggtgcgataaccagtggtcgtacgtggttttgtttttttaagtacgaagacgctcgcaagtctgttgtttacgcgactcggaccgatg

SEQ ID NO: 3744 - DNA, 203 bp, Artificial sequence
  synthetic
ggcgcgccagtcctcttttgtttatcgaaatcagagctgtggctcttttagaagctgttgttgaacatttggaaaatcgcttacaatttgatctggctgtgatctttcaccagcacagcggaggcgatcgctgccacctgcgagatttacgcattcaaatccttgctgaccgtcttgattaagtttttcgactcggaccgatg

SEQ ID NO: 3745 - DNA, 203 bp, Artificial sequence
  synthetic
ggcgcgccagtcctatccaggctcaagaatggagctcagtgttttgttgtttaatcattccgacgtgttttgcgatgttcgcgcaaagcagccagtcgcgcgcttgcttttaagtagagttgtttttccacccgtttgccaggcatctttaatttaacatatttttatttttcaggctaacctaaagccgactcggaccgatg

SEQ ID NO: 3746 - DNA, 203 bp, Artificial sequence
  synthetic
ggcgcgccagtcctattgtgctaaatgtaactgaggagctgagaagtgaccaccttaccctgtcttgcctgcggactgactatgagtcaagtgatgaagacgacaactgaggtaagtgggtggagctaggtgggattataaaaggctggaagtcaactaaaaattgtttttgttcttttaacagcacgcgactcggaccgatg

SEQ ID NO: 3747 - DNA, 203 bp, Artificial sequence
  synthetic
ggcgcgccagtcctgtgtcctcactgcgggagcacctccaaaggaaaaatacgggctaaaggccacgctacagaggctttgtcttatgatcttatgttaaaatgctaccttgccgaagcacagggagaagacacgcgcttcagcaccagccgcctcagtttaaagcgcacactggccagcgctcaacccgactcggaccgatg

SEQ ID NO: 3748 - DNA, 203 bp, Artificial sequence
  synthetic
ggcgcgccagtcctgtttcttccctccgtaggacccaaatagcggggaggcacgtagggtggcgccgctgccatcacggtttcgtaagagggaggtggtgtctcaggaaaagccactgtctgcagttccaccgcgcgcctcatttcacagctaacggaagaaggaaaataagacgaacactggtcgcccgactcggaccgatg

SEQ ID NO: 3749 - DNA, 203 bp, Artificial sequence
  synthetic
ggcgcgccagtcctttttaaccgactgttacgaatacagcctgatagggtgctgcagaggcccactgtattgctactaaaaatctctgctgtacatggcacatggagttgatcacaaatgaacttttatacaaaacatacaaacaaaaacccgtcggggtggaggaacctgtttatgatcaggcaggtcgactcggaccgatg

SEQ ID NO: 3750 - DNA, 203 bp, Artificial sequence
  synthetic
ggcgcgccagtcctgtctggaaagactagtactgctacagatggtagaacagcatgtgtttcaagtattgccattgtggagagccaggagaagtagtacaacagatttcccatggtgcagggacacaacgggatacacgcatgcgtggtctgtccaggagtgctggttgatggaatatctcttagaggcgactcggaccgatg

SEQ ID NO: 3751 - DNA, 203 bp, Artificial sequence
  synthetic
ggcgcgccagtccttattaaaggatgaagagaagggatattttcttatacctaggagacacataaggagagttccagaaccctgcgctcttcctgaaggggatgagtgaagaagattggcaggtaagtagaagactctttgcagtgctccaaggaggagtaaatagcgctatgctatacatatctaggcgactcggaccgatg

SEQ ID NO: 3752 - DNA, 203 bp, Artificial sequence
  synthetic
ggcgcgccagtcctatccctccaggaagcggccggggcagccttgctctccatagacggctccccccggtggatcccgtggcgattcctgaaaaaagctgcatgcccaagaccagacgccagcgaactcgccgagcacgccgcaacagaccaccaacaccatgggtaatgttttcttcctacttttatcgactcggaccgatg

SEQ ID NO: 3753 - DNA, 203 bp, Artificial sequence
  synthetic
ggcgcgccagtcctctccggcccctgaatgcggctaaccttaaccctagagccttatgccacgatccagtggttgtaaggtcgtaatgagcaattccgggacgggaccgactactttgggtgtccgtgtttctcatttttcttcatattgtcttatggtcacagcatatatatacatatactgtgatccgactcggaccgatg

SEQ ID NO: 3754 - DNA, 203 bp, Artificial sequence
  synthetic
ggcgcgccagtccttgcagtatgccctcaaaaacatcaaacctctgttaatacccctaatttgtgcccacgctgtaaaaaaggaaagcattgggcacgagactgccgttccaagacagatgttcaaggcaatcctttgcccccggtttcgggaaactgggtgaggggccagcccctggccccgaaacacgactcggaccgatg

SEQ ID NO: 3755 - DNA, 203 bp, Artificial sequence
  synthetic
ggcgcgccagtcctctgccgttccaagacagatgttcaaggcaatcctttgcccccggtttcgggaaactgggtgaggggccagcccctggccccgaaacaatgttatggggcaacactgcaggttccaaaagaaccattgcagacctctgtcgagccacaagaggcagcgcgggattggacctctgtcgactcggaccgatg

SEQ ID NO: 3756 - DNA, 203 bp, Artificial sequence
  synthetic
ggcgcgccagtcctgtgcaggtgcgactcttgtttgtgctggtcgcggcaggtggcgcccaacgtggggctcgagctcgacagttttcttccgccactactctcattaattgaactaagtaagtatatggataaacaagtagcctaaattaaggaggagtagtaaggtatatagttgagagtataaatcgactcggaccgatg

SEQ ID NO: 3757 - DNA, 203 bp, Artificial sequence
  synthetic
ggcgcgccagtccttaaattttttaactttagacacagaaggcaattcagcagcccagcgtttttggggagaacgatcctcatgcaaaaaaccacttgtgcgatggaaggatccacttaccaatctgtggtatgggccagaccctgtattaatatggggacgagggcatgtttgtgtttttccacaggcgactcggaccgatg

SEQ ID NO: 3758 - DNA, 203 bp, Artificial sequence
  synthetic
ggcgcgccagtccttaccctccatcattgttataaaaaacttaggaaccaggtccacacagccgccagccaaccaaccatccactcccacgactggagccgatggcagaagagcaggcacgccatgtcaaaaacggactggaatgcatccgggctctcaaggccgagcccatcggctcactggccgtccgactcggaccgatg

SEQ ID NO: 3759 - DNA, 203 bp, Artificial sequence
  synthetic
ggcgcgccagtcctggtatacaatgacagagatcttctagactaggtgcgagaggccgaggaccagaacaacatccgcctaccctccatcattgttataaaaaacttaggaaccaggtccacacagccgccagccaaccaaccatccactcccacgactggagccgatggcagaagagcaggcacgcccgactcggaccgatg

SEQ ID NO: 3760 - DNA, 203 bp, Artificial sequence
  synthetic
ggcgcgccagtccttcaagcccacctgaaattgtctccggcttccctctggccgaacgatatcggtagttaattaaaacttagggtgcaagatcatccacaatgtcaccacaacgagaccgaataaatgccttctacaaagacaacccacatcctaagggaagtaggatagttattaacagagaacatcgactcggaccgatg

SEQ ID NO: 3761 - DNA, 203 bp, Artificial sequence
  synthetic
ggcgcgccagtccttgatgtcacccagacatcaggcatacccactagtgtgaaatagacatcagaattaagaaaaacgtagggtccaagtggtttcccgttatggactcgctatctgtcaaccagatcttataccctgaagttcacctagatagcccgatagttaccaataagatagtagctatcctgcgactcggaccgatg

SEQ ID NO: 3762 - DNA, 203 bp, Artificial sequence
  synthetic
ggcgcgccagtccttaggcctccaagggctccccaaaatctgaatttctgagtagtcttcatcccctctcctgctctaaggtcaggtccatcctctctggtccttaccttgatgacaaggatccagccttctggtgtttttgagcatttcaaaggtctgcatagaaaggaacagccactaggtccattcgactcggaccgatg

SEQ ID NO: 3763 - DNA, 203 bp, Artificial sequence
  synthetic
ggcgcgccagtcctccttaccttgatgacaaggatccagccttctggtgtttttgagcatttcaaaggtctgcatagaaaggaacagccactaggtccattatgggacccctcattgtactcctaatgattttgctcttcggaccctgcattcttaatcgattagtccaatttgttaaagacaggatacgactcggaccgatg

SEQ ID NO: 3764 - DNA, 203 bp, Artificial sequence
  synthetic
ggcgcgccagtccttcagcctttttagagagactcaaggaggcctatcgcagatacactccttatgaccctgaggacccagggcaagaaaccaatgtgtccatgtcattcatctggcagtccgccccggatatcgggcgaaagttagagcggttagaagatttaaagagcaagaccttaggagacttacgactcggaccgatg

SEQ ID NO: 3765 - DNA, 203 bp, Artificial sequence
  synthetic
ggcgcgccagtcctcaaagtagacggcatctctgcggggatacacgccgctcacgtaaaagcggcgacaacccctccggccggaacggcatcaggaccgacatgaaaggtccagcattctcaaaaccccttaaagataagattaacccgtggggccccctgatagtcctggggatcttaataagggcacgactcggaccgatg

SEQ ID NO: 3766 - DNA, 203 bp, Artificial sequence
  synthetic
ggcgcgccagtcctgaccgaagccgcgccgcgcgtcttgtctgctgcagcatcgttctgtgttgtctctgtctgactgtgtttctgtatttgtctgagaatatgggccagactgttaccactcccttaagtttgaccttaggtcactggaaagatgtcgagcggatcgctcacaaccagtcggtagatcgactcggaccgatg

SEQ ID NO: 3767 - DNA, 203 bp, Artificial sequence
  synthetic
ggcgcgccagtcctcctcaaagtagacggcatcgcagcttggatacacgccgcccacgtgaaggctgccgaccccgggggtggaccatcctctagactgacatggcgcgttcaacgctctcaaaaccccttaaaaataaggttaacccgcgaggccccctaatccccttaattcttctgatgctcagacgactcggaccgatg

SEQ ID NO: 3768 - DNA, 203 bp, Artificial sequence
  synthetic
ggcgcgccagtccttacaggctctctacttagtccagcacgaagtctggagacctctggcggcagcctaccaagaacaactggaccatcctctagactgacatggcgcattcaacgccatgctcccaaacttccctggctgttcctaatcatttctccctagtgtctcatgtgactgtcccatctgagcgactcggaccgatg

SEQ ID NO: 3769 - DNA, 203 bp, Artificial sequence
  synthetic
ggcgcgccagtcctcaaagggacctcaaggctttccgagggacactaggctgactccatcgagccagtgtagagataagcttttgtttctgtttattttttatgggaccccttattgtactcctaatgattttgctcttcggaccctgcattcttaatcgattagtccaatttgttaaagacaggatacgactcggaccgatg

SEQ ID NO: 3770 - DNA, 203 bp, Artificial sequence
  synthetic
ggcgcgccagtcctcgcccgaacagggaccctcggataagtgacccttgtctctatttctactattttgtgttcgtcttgttttgtctctatcttatctggctattatcacaagagcggaacggactcaccacagggaactgcagtctcgcctacagagaagaggtaggttacggtgagccattggaacgactcggaccgatg

SEQ ID NO: 3771 - DNA, 203 bp, Artificial sequence
  synthetic
ggcgcgccagtcctctattatcacaagagcggaacggactcaccacagggaactgcagtctcgcctacagagaagaggtaggttacggtgagccattggaaatgggggtctcgggatcaaaagggcagaaactctttgtttctgttctacaaagactcctctcagagaggggtcttcatgtgaaagagcgactcggaccgatg

SEQ ID NO: 3772 - DNA, 203 bp, Artificial sequence
  synthetic
ggcgcgccagtcctaggctttaaatccattagattggacacaatatttcatttttataggtgttggagccctgcttttagtcattgtacttatgattttccccattgttttccagtgccttgcgaagagccttgaccaagtgcagtcagatcttaacgtgcttcttttaaaaaagaaaaaagggggaacgactcggaccgatg

SEQ ID NO: 3773 - DNA, 203 bp, Artificial sequence
  synthetic
ggcgcgccagtcctttgtttttctgagaacatcagctctggtattttcccatgccttgcaaaatggcgttactgcagttagctggctaagccttatgaaggggtctttcattcccccctctttctgtaaactgaataaaatcttttattcacgtgatttttaatcttttactgtcttaagtagccaaccgactcggaccgatg

SEQ ID NO: 3774 - DNA, 203 bp, Artificial sequence
  synthetic
ggcgcgccagtcctgccgaaaccgcgccgcgcgtcttatctgtctcagtgttattttgtcatttgtctggttcgttattgttttggaccgtttctaaaaatatgggacagaccgtaaccactcctttgagtctgaccctagaacactggggagacgtccagcgcattgcgtccaaccagtccgtggaccgactcggaccgatg

SEQ ID NO: 3775 - DNA, 203 bp, Artificial sequence
  synthetic
ggcgcgccagtcctcctactgggaaaagtagggaaatacccttcacaggacgaaaaggcgctgctgggggacaggaggagggttcgcagccctgagacttaaagaaggggacgagccctccgcctgaacctgaggagtgcaaaggcagcgctagtaagaaaaccgccgtggtgaatctagatagagaccgactcggaccgatg

SEQ ID NO: 3776 - DNA, 203 bp, Artificial sequence
  synthetic
ggcgcgccagtcctaagaaggggacgagccctccgcctgaacctgaggagtgcaaaggcagcgctagtaagaaaaccgccgtggtgaatctagatagagacatggcgacgcaaggctcaaaggagaagaagggataccctgagctcaaagaggtcattaagacaacatgtaaaataaaggtggggccccgactcggaccgatg

SEQ ID NO: 3777 - DNA, 203 bp, Artificial sequence
  synthetic
ggcgcgccagtcctcaaaggttcccatggtccgggaccgaagggttatacgataccttggtctatacaggattgctgggacatggaatcaatatataattaatggaggaagcaccaagaagaaggccaggaggcagcagagaagctgaagggatatttcggtattatgaggattgggaatgctgggaccgactcggaccgatg

SEQ ID NO: 3778 - DNA, 203 bp, Artificial sequence
  synthetic
ggcgcgccagtccttctccatggaatactcctatattcatcattaagaaaaaatcaggtagctggcgtcttttacaggatctaagagccgttaataaggtaatggtccccatgggagcccttcagcctggtcttccctctcctgtagccatccccctaaactatcacaaaattgttattgaccttaagcgactcggaccgatg

SEQ ID NO: 3779 - DNA, 203 bp, Artificial sequence
  synthetic
ggcgcgccagtcctctcagcctgcatatacgatcaaaaggaggatggcccccgctggctccctgagcgactaattagacacatcaataatcagacagcccccttgtgtgacaggccaagtaacccaaatacagccccagggccaaaaggctcgccctgaggagctccttttctcttcttccaggaagacgactcggaccgatg

SEQ ID NO: 3780 - DNA, 203 bp, Artificial sequence
  synthetic
ggcgcgccagtcctcttgtgtgacaggccaagtaacccaaatacagccccagggccaaaaggctcgccctgaggagctccttttctcttcttccaggaagaatgctctgcatcctcatcctcctactgcacccacgcctctgcccagtcacaaagggaggacttggaaagccatccggagacatttaccgactcggaccgatg

SEQ ID NO: 3781 - DNA, 203 bp, Artificial sequence
  synthetic
ggcgcgccagtcctcgtggggctcgatgccggcctccgtggaccgccgtcccctgtaaccggttccctgcacggccgtcccgattaaccgattccccgcacggagcaccgcggaccacccgaccgcgagccgactcctggagttcgttcctcatttcgacggcggcattactcaagtaagacccaatccgactcggaccgatg

SEQ ID NO: 3782 - DNA, 203 bp, Artificial sequence
  synthetic
ggcgcgccagtcctggagcaccgcggaccacccgaccgcgagccgactcctggagttcgttcctcatttcgacggcggcattactcaagtaagacccaatcatgggacaagcatcttcacacagtgaaaatgatctctttataagtcacttaaaggaatctctcaaggtgcgtagaattcgggttcgccgactcggaccgatg

SEQ ID NO: 3783 - DNA, 203 bp, Artificial sequence
  synthetic
ggcgcgccagtcctatgagcttaatgataagaactggaaatcctttttctcaaggacgtggtccagattaagtttgcacgaggacgaggacaaggaaaacgatggagactctttgccaacgtttaaatgtgtgtcaggacaaaatactaacacattatgaaaatgatagtacagacctacgtgaccatcgactcggaccgatg

SEQ ID NO: 3784 - DNA, 203 bp, Artificial sequence
  synthetic
ggcgcgccagtccttacgaacatattttgtgcagtttaaagatgatgcagaaaaatatagtaaaaataaagtatgggaagttcatgcgggtggtcaggtaatattatgtcctacatctgtgtttagcagcaacgaagtatcctctcctgaaattattaggcagcacttggccaaccaccccgccgcgacgactcggaccgatg

SEQ ID NO: 3785 - DNA, 203 bp, Artificial sequence
  synthetic
ggcgcgccagtcctcaagcagaaccggacagagcccattacaatattgtaaccttttgttgcaagtgtgactctacgcttcggttgtgcgtacaaagcacacacgtagacattcgtactttggaagacctgttaatgggcacactaggaattgtgtgccccatctgttctcagaaaccataatctacccgactcggaccgatg

SEQ ID NO: 3786 - DNA, 203 bp, Artificial sequence
  synthetic
ggcgcgccagtcctattatttacaaggaacttttaaaaactattatgtactgtttgctgacgatgcgaaaagatatggtacaactggagaatgggaagtaaaagttaataaggaaactgtgtttgctcctgtcaccagctccacgcctccagggtcgccaggaggacaagcagacacaaacaccaccccgactcggaccgatg

SEQ ID NO: 3787 - DNA, 203 bp, Artificial sequence
  synthetic
ggcgcgccagtcctcagctccacgcctccagggtcgccaggaggacaagcagacacaaacaccacccccgcgacccccaccacctccacaaccgccgttgactccacgtccagacagctcaccacatcaaaacagccacaacaaaccgaaaccagaggaagaaggtacggacggaggccctccagcaacgactcggaccgatg

SEQ ID NO: 3788 - DNA, 203 bp, Artificial sequence
  synthetic
ggcgcgccagtcctagttagattgctgtggcagaggccttccctttcataaggtgaggaacgcctggaagggaatctgtaggcagtgtaagcatttttatcatgattggtaaagaggtcaccgtgcaagatattattctggagctcagtgaggtgcagcccgaagtgctaccagttgacctgttttgtcgactcggaccgatg

SEQ ID NO: 3789 - DNA, 203 bp, Artificial sequence
  synthetic
ggcgcgccagtcctccacagaatttggtattagagctttccaacagctactgaccggagatctgcagctcctgtgccctgactgtcgcggaaactgcaaacatgacggatcctaattctaaaggtagtacatctaaagaagggtttggtgattggtgtttattggaagctgactgtagtgatgtagaacgactcggaccgatg

SEQ ID NO: 3790 - DNA, 203 bp, Artificial sequence
  synthetic
ggcgcgccagtcctaggggaatgcagccaaaccatgacctcaggaaggaaagtgcatgactcacagggaggagctgcttacccatggaatgcagccaaaccatgacctcaggaaggaaagtgcatgacagacatgttttgcgagcctaggaatcttggccttgtccccagttaaactggacaaaggcccgactcggaccgatg

SEQ ID NO: 3791 - DNA, 203 bp, Artificial sequence
  synthetic
ggcgcgccagtcctcaaaagtaccactgctttacctgctgtaaaagactctgtaaaagactcctaggtaagtaatccctttttttttgtatttccaggttcatgggtgctgctctagcacttttgggggacctagttgccagtgtatctgaggctgctgctgccacaggattttcagtggctgaaattcgactcggaccgatg

SEQ ID NO: 3792 - DNA, 203 bp, Artificial sequence
  synthetic
ggcgcgccagtcctggcctaactcctcaaacatatgctgtaattgctggtgctcctggggctattgctgggtttgctgctttaattcaaactgttagtggtattagttccttagctcaagtagggtataagttctttgatgattgggatcacaaagtttccactgtaggcctctatcagcaatcaggccgactcggaccgatg

SEQ ID NO: 3793 - DNA, 203 bp, Artificial sequence
  synthetic
ggcgcgccagtcctcgaacctctccactcagtccctctagacaataaagtccgagatgtcctaaagtcaacatgaaaaaaacaggcaacaccactgataaaatgaactttctacgtaagatagtgaaaaattgcagggacgaggacactcaaaaaccctctcccgtgtcagcccctctggatgacgatcgactcggaccgatg

SEQ ID NO: 3794 - DNA, 203 bp, Artificial sequence
  synthetic
ggcgcgccagtcctgagaggcaatcttcctcccgtgaaggacacaagcagtagctcacaatcatctcgtgtttcagcaaagtgtgcataattataaagtgctgggtcatctaagcttttcagtcgagaaaaaaacagtagatcagaagaacaactggcaacacttctcatcctgagacctacttcaagcgactcggaccgatg

SEQ ID NO: 3795 - DNA, 203 bp, Artificial sequence
  synthetic
ggcgcgccagtccttgggtcatctaagcttttcagtcgagaaaaaaacagtagatcagaagaacaactggcaacacttctcatcctgagacctacttcaagatgctcgatcctggagaggtctatgatgaccctattgacccaatcgagttagaggctgaacccagaggaacccccactgtccccaaccgactcggaccgatg

SEQ ID NO: 3796 - DNA, 203 bp, Artificial sequence
  synthetic
ggcgcgccagtcctggacttgcataggccattacaaccatgtactaataaatgctattgcaaaaaatgctgttatcactgtgagctttgcttcctgcagaagggcttaggagtgcgttatcatgtctctaggaaaagaagaaaaacaagcactcaagataatcaagaccctatacggcagcagtaagtcgactcggaccgatg

SEQ ID NO: 3797 - DNA, 203 bp, Artificial sequence
  synthetic
ggcgcgccagtcctgctgcagcttgagaataaggacttggtgttacaacatctgcctgaccctcctcatattcatcaggacagcagtgggatacctgcagtatgggctccagcaactccaagaggcagcaacagggcttgctcaagctctggcgagggctgcgagggaagcctggggcagactgggtgcgactcggaccgatg

SEQ ID NO: 3798 - DNA, 203 bp, Artificial sequence
  synthetic
ggcgcgccagtcctgcaccgaccgctgagttgctgagcgtcggagagggacgactcaggtagggtgagagcctacgagttttttgctacctagtcagcgagaaaggctaggccgcgacaggggcgcgggtcccattagtggcaaccaacccagttggacgaagggttggtaggggacgggtcggagcacgactcggaccgatg

SEQ ID NO: 3799 - DNA, 203 bp, Artificial sequence
  synthetic
ggcgcgccagtccttgtttgtgttatatagacatcttggtgtattgtaacataatatgtggtagcctgtacggatcccacatagggggttgtatatcatatgttgttgttgtgtgtaccctagtgtgctattgtggcaccattctttttctatttttgtttttttttttacagttaaataaagcaacccgactcggaccgatg

SEQ ID NO: 3800 - DNA, 203 bp, Artificial sequence
  synthetic
ggcgcgccagtcctgttgttgttgtgtgtaccctagtgtgctattgtggcaccattctttttctatttttgtttttttttttacagttaaataaagcaaccatggtggcacaacgtgcaaggcgtcgcaagcgtgcatccgccacacagctttataggacctgcaaggcctcaggcacatgccccccacgactcggaccgatg

SEQ ID NO: 3801 - DNA, 203 bp, Artificial sequence
  synthetic
ggcgcgccagtcctagaaaaagacagacatcgtaacgaacggcgacgactgcacaaaatatcagggtactggagaggtagttgtgagtattgctggtcacgatgcagggtccgcatcccacagtaaaagatatcgaattgagtcttgcaccagaggatatccctgtatgcaatgtgcaattagatgaacgactcggaccgatg

SEQ ID NO: 3802 - DNA, 203 bp, Artificial sequence
  synthetic
ggcgcgccagtcctccacttcccctttgtcttctacactttccactaagtatggaaatgtaacaattccctttgtgtctcctgttgatgtaactttacatactgggcctgatattgtactacctacttcagcacagtggccatatgtgcccctgtcacctgctgacaccacccattatgtgtacatagcgactcggaccgatg

SEQ ID NO: 3803 - DNA, 203 bp, Artificial sequence
  synthetic
ggcgcgccagtcctctgggcctgatattgtactacctacttcagcacagtggccatatgtgcccctgtcacctgctgacaccacccattatgtgtacatagatggcggggatttctatctttggcctgttacctttcacttctcccgacatcgtcgccgtaaacgtgtctcatatttttttgcagatgcgactcggaccgatg

SEQ ID NO: 3804 - DNA, 203 bp, Artificial sequence
  synthetic
ggcgcgccagtccttagatggcggggatttctatctttggcctgttacctttcacttctcccgacatcgtcgccgtaaacgtgtctcatatttttttgcagatggcactctggcgctctagtgacaacttggtgtacctgcctcccactcccgtgtctaaagttctcagcacggacgactatgtgacacgactcggaccgatg

SEQ ID NO: 3805 - DNA, 203 bp, Artificial sequence
  synthetic
ggcgcgccagtcctgagtgcagccacgcagatataagggcactggaacagctgctactaggcacattgaagctcgtgtgtcctcgctgcgtgtaacaggacatggacgataatacaggtacagaggggggcgcatgttccgaatcggaacgggcgggtggatggtttatagtggaagccattgtagatcgactcggaccgatg

SEQ ID NO: 3806 - DNA, 203 bp, Artificial sequence
  synthetic
ggcgcgccagtccttttgcttattttttatacctgcttgttttttacatttttatactgtaatggtaattgctacttagtccctttaataaacgtgttacaatggtagctgtccgtgcccctcgacgcaaacgagcatcagctacagacttatacaaaacatgtaaggccgctggtacgtgccctcctcgactcggaccgatg

SEQ ID NO: 3807 - DNA, 203 bp, Artificial sequence
  synthetic
ggcgcgccagtcctccagacaagctggacaagaagtgtgttacagaattgaagcacaatgttgtatgtgtaatagtatagtgcagctagctgtgcagagcagtcgacagaacgttcgagtgctggagcagatgttaatggaagacgtgtccttggtgtgccatcagtgtgctgcacagtaaacctgcacgactcggaccgatg

SEQ ID NO: 3808 - DNA, 203 bp, Artificial sequence
  synthetic
ggcgcgccagtcctctacaaatattaatgtaggccctgacctttcacctcctgagtctccgccctttattagtacacgtcctgtatcaccttcttttgactctgttatggtattaggatgggattttatattgcatcccagttatatgtggcgtaagcgccgtaaacctgtaccatatttttttgcagcgactcggaccgatg

SEQ ID NO: 3809 - DNA, 203 bp, Artificial sequence
  synthetic
ggcgcgccagtcctacctataaaacaggacatacaacgttacagaatagtgtgtggttgtacacagtgtggacggtcagttaaacttgttgtcagtagtacaggcgcggacatacaacagctgcatcagatgcttctggacacactgggcattgtgtgtccattgtgtgcctgcgtggagtgactgcacgactcggaccgatg

SEQ ID NO: 3810 - DNA, 203 bp, Artificial sequence
  synthetic
ggcgcgccagtcctaggcgcggacatacaacagctgcatcagatgcttctggacacactgggcattgtgtgtccattgtgtgcctgcgtggagtgactgcaatggcggatgatacaggtacagaggaggggctagggtgttctggttggttttctgtagaagcaatagtagaaaggactacagaaaatcgactcggaccgatg

SEQ ID NO: 3811 - DNA, 203 bp, Artificial sequence
  synthetic
ggcgcgccagtcctgccctgatattgctttacctgtacctactgcagaaaccatttttaccccaactgtacctgtacagccttctggtcctatatatatatatgggtccgattttatattgcatcctagcttgtatgtcattccacgcaaacgtaaacgtttgtcatatttttttgcagatgtggcgacgactcggaccgatg

SEQ ID NO: 3812 - DNA, 203 bp, Artificial sequence
  synthetic
ggcgcgccagtcctgaaagtaacaatcctacttttatagacagggagtaaccgaaataggtttaggaccgaaaacggtacatataaaagcactgtgtacaacacccaggacatccatggatcgtcagttatttgaaaatacagaagagcgaccacgtacattgcaccagctatgtgaagttgtgaatacgactcggaccgatg

SEQ ID NO: 3813 - DNA, 203 bp, Artificial sequence
  synthetic
ggcgcgccagtccttacttttatagacagggagtaaccgaaataggtttaggaccgaaaacggtacatataaaagcactgtgtacaacacccaggacatccatggatcgtcagttatttgaaaatacagaagagcgaccacgtacattgcaccagctatgtgaagttgtgaataaaccattgctggagcgactcggaccgatg

SEQ ID NO: 3814 - DNA, 203 bp, Artificial sequence
  synthetic
ggcgcgccagtcctagggaggcaagtggcgggaaagagcaaaatggaggctcacaacatagtgtgtgtagcagagatgggagcatagggtcaggaagtgatatggatgtggatagacaggatataatgccactgcaacaaatacaagatatattaaaatgtagtaatgtgcaggccaagctatattgtcgactcggaccgatg

SEQ ID NO: 3815 - DNA, 203 bp, Artificial sequence
  synthetic
ggcgcgccagtcctaccaattaaataatgcaaactggaaatgtttttttgaaaggacatggtccagattagatttggataacgacgaagacaaggaaaacgatggagacgctatgccaacgtttagatgcgtgccaggagaaaattctagactgttttgaaagagatagcaaaaatattacagaccatcgactcggaccgatg

SEQ ID NO: 3816 - DNA, 203 bp, Artificial sequence
  synthetic
ggcgcgccagtccttacttatacttttattttggtttgttgtggcatcatcctacataaccacatttacactatatatactttttttttacttccctttattatgtttctatagccatgctgtgtggttaattaacacacaataaatcacagtttttttgtattgtatgtatttgtgtgttatatatacgactcggaccgatg

SEQ ID NO: 3817 - DNA, 203 bp, Artificial sequence
  synthetic
ggcgcgccagtccttatgtttctatagccatgctgtgtggttaattaacacacaataaatcacagtttttttgtattgtatgtatttgtgtgttatatataatggttgcccaccgggcacgcagacgtaagcgggcatcagcaacgcagctatatcaaacatgtaaacaatctggcacatgtcctgagcgactcggaccgatg

SEQ ID NO: 3818 - DNA, 203 bp, Artificial sequence
  synthetic
ggcgcgccagtccttagttatacagggctccacatttgcgttatggcctgtttattttttgaaacgtaggcgtcgtaaacgtattccctattttcttgcagatggcggtgtggcggcctagtgacagcaaggtttatctgcctcctacccctgtatcaaaggtcattacaacggatgcctatgtaaaacgactcggaccgatg

SEQ ID NO: 3819 - DNA, 203 bp, Artificial sequence
  synthetic
ggcgcgccagtcctacggtttcacaaaatttcacatatgtggaccgggtcgtgcctgacatgctggagacacacaacagcaactgaatcagcagtataatcatgcacggtaacgtaccaacacttccacaatatattatagaacttataccacaaactgagattgacctgcaatgccatgagcaattgcgactcggaccgatg

SEQ ID NO: 3820 - DNA, 203 bp, Artificial sequence
  synthetic
ggcgcgccagtccttagacgggacgaacaacatccttgttacctaattgaaacacagtgttgtaggtgtgagtcgttggtgcagttggctgttcagagttcaacaaaagagctgcgtattttacaacaaatgcttatgggcacagtggagcttgtgtgccccctctgcgcaacaaggcgataactgcacgactcggaccgatg

SEQ ID NO: 3821 - DNA, 203 bp, Artificial sequence
  synthetic
ggcgcgccagtccttgtttaataattgtacagttactaaagggcgtaaccgaaaagggtccgaccgaaaacggtacatataaaaaccaacccaaaaaacctgatctggggccactatgtctgcacgttgcggctccacagctagaactttatttgaattatgtgaccagtgcaatataacattgcctacgactcggaccgatg

SEQ ID NO: 3822 - DNA, 203 bp, Artificial sequence
  synthetic
ggcgcgccagtcctcattcttaacatctggtcctgacatagtgtttccttctgttcctgcaggtacaccatatttgcctgtgtcaccttctatacctgccatatctgtactgattcgcggtactgattattatttgaatcctgcatactatttcagaaaacgccgaaagcgcatattagcatattaggcgactcggaccgatg

SEQ ID NO: 3823 - DNA, 203 bp, Artificial sequence
  synthetic
ggcgcgccagtccttatctgtactgattcgcggtactgattattatttgaatcctgcatactatttcagaaaacgccgaaagcgcatattagcatattaggatgtggcaacttaatgaaaaccaagtgtatttaccaccgcccacgcctgttgctacaattgttagcacagatgagtacgtgcaacgccgactcggaccgatg

SEQ ID NO: 3824 - DNA, 203 bp, Artificial sequence
  synthetic
ggcgcgccagtcctggacttgcaagtaaatttgcaatcatttaaaatagtaacacattgtgtattttgtcactgtttagttcgcctagtagtccattgtactgctactgatataaggcaggttcatcagttgctgatgggcacactaaatatagtgtgccccaactgtgcagctacagcgtgacaacacgactcggaccgatg

SEQ ID NO: 3825 - DNA, 203 bp, Artificial sequence
  synthetic
ggcgcgccagtcctgaaatgttgatgatctgtaagctttactaacgctaacgctggcattgctactaacccatactaactaacaaacccatactaactaacatggttcgtgcaaaacgtactaaacgtgcctctgttacagatatatacagaggctgcaaagctgctggtacatgtccaccagatgtacgactcggaccgatg

SEQ ID NO: 3826 - DNA, 203 bp, Artificial sequence
  synthetic
ggcgcgccagtcctaacctgcagaggaggagcagtgtctcactccctacaagatcgtagctggctgtggttgcggtgcaagacttcgtttatacgtgcttgctacaaatttaggaattcgagcgcaacaggaacttttgctgggtgatatacaactggtgtgtccggagtgccgaggcagacttcgcccgactcggaccgatg

SEQ ID NO: 3827 - DNA, 203 bp, Artificial sequence
  synthetic
ggcgcgccagtcctcctaaattttcaatcatacacataataaccattttagtagcgttgcctttcagtacagtctaggtgattgttgaaagacttccaagcatggcagaattatcaacgcgttacaacttgcctgcaaatgttacggaaaatagtataaatcttgaccttaattccacagcacgatggcgactcggaccgatg

SEQ ID NO: 3828 - DNA, 203 bp, Artificial sequence
  synthetic
ggcgcgccagtcctttaatttctttaaatttgaccagaataatattttgtcagtgaatatattctcatatcacttgattaaaaacagaaaattaccctaacatgaagaccacatgtttccttatcagtcttatcttaattcaagggacaaaaaatctccccattttagagatagctagtaataatcaacgactcggaccgatg

SEQ ID NO: 3829 - DNA, 203 bp, Artificial sequence
  synthetic
ggcgcgccagtccttccggcccctgaatgtggctaaccttaaccctgcagccgttgcccataatccaatgggtttgcggtcgtaatgcgtaagtgcgggatgggaccaactactttgggtgtccgtgtttcctgtttttcttttgattgcattttatggtgacaatttatagtgtatagattgtcatccgactcggaccgatg

SEQ ID NO: 3830 - DNA, 203 bp, Artificial sequence
  synthetic
ggcgcgccagtcctggaacacccacctgctagccccgctgctctctttgctttcctcctcgcttcggtctcccccaactcctagcatcccctcctatcgctatggtctactccctctcgcgatgcgctctctgttcgctgaaggggtcctctggaggtgatttctctgttctactccgtgtggcttcccgactcggaccgatg

SEQ ID NO: 3831 - DNA, 203 bp, Artificial sequence
  synthetic
ggcgcgccagtcctttctgtgactatattatctttcatttttttgcaacttttgcttagtctgtaagttttgggtgctatttctgttactgcgagcccgtaatggaaacgacaaagaaccggcgtgtgcgatttactggaggccttcatgagccagcgcaagattctacgatgtgtgggaatgctgagcgactcggaccgatg

SEQ ID NO: 3832 - DNA, 203 bp, Artificial sequence
  synthetic
ggcgcgccagtcctgaatgacaaggctgcacagattatagagaccagccagatccgtaaattaatggtgtctacacgactggaggccataccagctctgtgatggagaacaggtttcagaacgatactctgttctcagagtggttcggtcagagtttgtccgatgtaagatttccggacaatgtcacccgactcggaccgatg

SEQ ID NO: 3833 - DNA, 203 bp, Artificial sequence
  synthetic
ggcgcgccagtccttatcagaagtgtttaatttaacccaaacgcaccccgaaaacagcgaaccgattttcgattcgaacattttctccccaaacccggagaatgaaatccttgaaaaaattaaaagaattagaaacctcagacgtattcaacatcttacacgtccgaactatcctaaaggtgatcaagcgactcggaccgatg

SEQ ID NO: 3834 - DNA, 203 bp, Artificial sequence
  synthetic
ggcgcgccagtcctggcaaaaaaggcagaggttgagcgaattcatcaatacctatgcacagagcatcagcaaattcgctgttgaactcggtttcgggatccatgatgtggcgaaaccaatcttccggcagacgcccctccaagcgtctttctgataacgaagccaccttatctacaatcaactctattcgactcggaccgatg

SEQ ID NO: 3835 - DNA, 203 bp, Artificial sequence
  synthetic
ggcgcgccagtccttcatttgtgttagatgagcggcaaatgactcatctttctgggatttatatgggaatattctggtaaaagtgcatgtatcaattttagtcgtttttggatttctgtaatgttacgatttgctatgtgtattttcatgatgtcgagcatgtttattttattttttacacagataagcgactcggaccgatg

SEQ ID NO: 3836 - DNA, 203 bp, Artificial sequence
  synthetic
ggcgcgccagtcctcgaatggacatttcgacaagtctttttccctactatatataagatgttgttcccgtcgtgttaacttttccaaataaaaaaataaccatggaacttttactatttgtaatgtcactcatattactaaccttctcaaaagcaatacctcttttcaaccataattctttctattttcgactcggaccgatg

SEQ ID NO: 3837 - DNA, 203 bp, Artificial sequence
  synthetic
ggcgcgccagtcctactgtctattaagcttcaattttataaacatgttttccagaacaaaaatgcaaacaaggaaatgataacgacgtcattcaaagcgccatgaaattatccggactatactgtgatgcggacatcacacacacacaaccgttgagtgataatacgcatcaagatcctatatattctcgactcggaccgatg

SEQ ID NO: 3838 - DNA, 203 bp, Artificial sequence
  synthetic
ggcgcgccagtcctgatgtgcagacatctagaggtgacaagccaggggaattaccttattttccgtatacaactataaaaaacttgggaggcgcaaacggtatgttttccataataaatccgagtgatgatttctggactaaggacaaatatatcatgttgactatcaaaggccccatggagtgggagcgactcggaccgatg

SEQ ID NO: 3839 - DNA, 203 bp, Artificial sequence
  synthetic
ggcgcgccagtcctaaccctagccataaccgcataactctgttcacaaccctaacactaatcctcgcatccgcacctaacgctgcccctctttcacaccatcaccccctgccgcttcaacttcaccttcttcctccatctcgccccgcttgtttctacacttgtccgcccctctattcttactctaggcgactcggaccgatg

SEQ ID NO: 3840 - DNA, 203 bp, Artificial sequence
  synthetic
ggcgcgccagtcctcaccccctgccgcttcaacttcaccttcttcctccatctcgccccgcttgtttctacacttgtccgcccctctattcttactctaggatgccgctaacggtgcgtgccgggcacgcgccatatcgtcttccgctctccaattattggtggctactcttgggtcgacattcccttcgactcggaccgatg

SEQ ID NO: 3841 - DNA, 203 bp, Artificial sequence
  synthetic
ggcgcgccagtcctccacccctccccgtcacagaccagcaaacaccttgccacatcgacatcgcgggcggcaaattaaaaaaaaaaataacataaatatagtgaaagagaggcccccgtcccacataaggacagaagaacaggcaaaaaaaaaaacccgtccgttattcacacagcattcggaaagcccgactcggaccgatg

SEQ ID NO: 3842 - DNA, 203 bp, Artificial sequence
  synthetic
ggcgcgccagtcctcaaacctcgcactccgtactttaagaaggaaacctccatcgttccggcttctgtattgcactcctcggatttcgatttagaaaacagctgtacgactgtcttccataactttctaacagccatatcggcagatccacttcagagaaaacgaactcgaaacaccactaaaaacagcgactcggaccgatg

SEQ ID NO: 3843 - DNA, 203 bp, Artificial sequence
  synthetic
ggcgcgccagtcctcggtttacctttttgctgttgtggttctttgttcttgctggtttgctttggatccgttgtttaatatgtgggcgtaacccttcgacgttgtggtatgacggcgatcttatattaaagatcgcctcgctggacttagtggacgctagtgatcacaaaagagaaggaaaacccagccgactcggaccgatg

SEQ ID NO: 3844 - DNA, 203 bp, Artificial sequence
  synthetic
ggcgcgccagtcctggcgggattagttttatcggggcgttcgtaattctgatagtcattttgtgtaattggtataagaaagacaagcagaggtctttgttttgggatgaagagaaaaaaccggatgtacaaatgaggagggatgtaaagacttgcagatgaggttctcatagattgttattagtgattcgactcggaccgatg

SEQ ID NO: 3845 - DNA, 203 bp, Artificial sequence
  synthetic
ggcgcgccagtcctcgacggaagtgcgttggcatcaaaacaggaaatgcaatataaaataaccaactacatggtccccgctaaaaacggaactgcgggctctagcttatttaacgagaaggaagatagcgaaagtgacgattccatgcattttgactacagctctaatcccaatcccaagaggcagagcgactcggaccgatg

SEQ ID NO: 3846 - DNA, 203 bp, Artificial sequence
  synthetic
ggcgcgccagtcctaataccgcatactgtctgatgaggtcaaagtgatattttttcggggttagtcgattaataaaagctattactctgttgtgtgttacgctatcggctgccagggataaaagttcgatttttgccgtagcggctagtaatgattctggagacgtgctgtttttgagtgaactaaggcgactcggaccgatg

SEQ ID NO: 3847 - DNA, 203 bp, Artificial sequence
  synthetic
ggcgcgccagtcctttcctttctttttctacaacattatttaaggttccctcatcgatagatatatattttctcttcttcacagcttccacagtatccacaatggcagctcgtgcactcgatttagagttcatccttagttcactcaaaaacagcacgtctccagaatcattactagccgctacggcacgactcggaccgatg

SEQ ID NO: 3848 - DNA, 203 bp, Artificial sequence
  synthetic
ggcgcgccagtcctgcgggaaagttgtaaataaagcttctgcggttgtgacatcacaggagagtataaagcagttctatgaaaaagagaagtcattactgtccggtgtgaagttttggagactaagtgaaagacattgtcggtttgcgcttgtcggcatctgttttcttttagccttgtatttttgttcgactcggaccgatg

SEQ ID NO: 3849 - DNA, 203 bp, Artificial sequence
  synthetic
ggcgcgccagtccttaactaatctgcagtcggtattcgagacggtgtcttcaaacgatgctccggtctatgacttttctgaaattctagcggaggaggacgatcaaggaaacggtgtattaaaatgtgatgaaacggaaaccgaaacagatgagccgatgactaagaaaaaccgattataatcggagtcgactcggaccgatg

SEQ ID NO: 3850 - DNA, 203 bp, Artificial sequence
  synthetic
ggcgcgccagtcctttatatttaacaataatcggaaagattaaatgttcactgggacttctacataggatactaaaaattacgttggcggcatcgtattcagtcgcaaacactacgatggtcattgtgtagagctctgttgattacagatgaatttagctttaaatgtccttggggtattggggtgttcgactcggaccgatg

SEQ ID NO: 3851 - DNA, 203 bp, Artificial sequence
  synthetic
ggcgcgccagtccttggagaataaaagtccacttccgtagcggccgcaaaaacaagaatgtaaaagaggcagagactgacatataagctttgccttgcgcttttcttacaactcatcttaagcgttattttcaactagtcttcgcgtcgacgtgattaacagcagacagctctctgtcacctggaaaacgactcggaccgatg

SEQ ID NO: 3852 - DNA, 203 bp, Artificial sequence
  synthetic
ggcgcgccagtcctagcatgtcgggtgagttgaccacaatgaatttgtacaagtagaatgtgtgactaaaatagtatttgctttttttataggattggacgatgacctccaaatgcatgctgtgttggaccgcgattacgaatgccctggctattttaatgttattactagtaatttaccgggcgatacgactcggaccgatg

SEQ ID NO: 3853 - DNA, 203 bp, Artificial sequence
  synthetic
ggcgcgccagtcctataacgtcgggaatgtgtcagttcaacgctgtcttttttccctaacagtcgtagtatccttaacgcgatcgtagacgtttatgcgagactgccggtaacgctgtcgttatcgttatattttttatttttgttttccatttttaattttatctcggattccgcacagaaaataaacgactcggaccgatg

SEQ ID NO: 3854 - DNA, 203 bp, Artificial sequence
  synthetic
ggcgcgccagtcctactgccggtaacgctgtcgttatcgttatattttttatttttgttttccatttttaattttatctcggattccgcacagaaaataaaatgttttgtggctctccgtttctcggcatatcttcttggagtctggcatctgcggctctgtgtcctccttcgtgctctttctctgcgcgactcggaccgatg

SEQ ID NO: 3855 - DNA, 203 bp, Artificial sequence
  synthetic
ggcgcgccagtcctccatccgtcatacaaaatgacctcatcccttaaaaaaacacagtatttaaaaagggagatgaaacataaaatgttttttgtaccagcatgttttctcctcaactaaaccatgtcttgcaactcgtttttgattgcaatcacatagtttcgaattcttaccaagaaatcattttgcgactcggaccgatg

SEQ ID NO: 3856 - DNA, 203 bp, Artificial sequence
  synthetic
ggcgcgccagtcctttcagcaagtaactgagaggtgggaagctcaaagccaaagtcctaatgtgcagtcaggtgaatttattgaaaaatttgaggctcctggtggtgcaaatcaaagaactgctcctcagtggatgttgcctttacttctaggcctgtacggaagtgttacttctgctctaaaagcttcgactcggaccgatg

SEQ ID NO: 3857 - DNA, 203 bp, Artificial sequence
  synthetic
ggcgcgccagtcctaccctaactgacacacattccacagctggttctttccgcctcagaaggtacctaaccaagttcctctttcagaggttatttcaggccatggtgctgcgccggctgtcacgccaggcctccgttaaggttcgtaggtcatggactgaaagtaaaaaaacagctcaacgcctttttcgactcggaccgatg

SEQ ID NO: 3858 - DNA, 203 bp, Artificial sequence
  synthetic
ggcgcgccagtcctcgggaaacgcaaaaaaccagaaaggttaactgaaaaaccagaaagttaactggtaagtttagtctttttgtcttttatttcaggtccatgggtgctgctttaacactgttgggggacctaattgctactgtgtctgaagctgctgctgctactggattttcagtagctgaaattcgactcggaccgatg

SEQ ID NO: 3859 - DNA, 203 bp, Artificial sequence
  synthetic
ggcgcgccagtcctagattttcttgcacgtgcatgcgtttgcttcggacagcattagcagcggttggtttgaaagagatattcttttgtttctaccagtcgtgaacgtgttgagaaaaagacagcttaggagaacaagagctggggatggtcaagaaggccatcctgaaaggtaaggggggcggtccccgactcggaccgatg

SEQ ID NO: 3860 - DNA, 203 bp, Artificial sequence
  synthetic
ggcgcgccagtcctctgaatttggaatacgttgttttgagcaactgttactgaaagagctttgtttattttgtcctgcgtgctccagacaacttccccgcaatggcagatcataaaggtactgataatattgatcataatgatgttttagatgggtcttggtgtttaataactgaagctgaatgtgagcgactcggaccgatg

SEQ ID NO: 3861 - DNA, 203 bp, Artificial sequence
  synthetic
ggcgcgccagtcctaagcttacttgctatctgatttgattggtagacctttgagtgaaatcgcaattcgctgtgaaaattgtatgtgtttgttggattatattgaaaagtacgattgtatttgtcacggtggttattttcatttagttagaggtaattggaggggctgttgtagaaattgttacgaaccgactcggaccgatg

SEQ ID NO: 3862 - DNA, 203 bp, Artificial sequence
  synthetic
ggcgcgccagtcctacatagcagaatctgaaaggtcaccattcaagattgattctacgtgtaagcattgtcattgtcgcgttagactgtgttgtgtcgccaccgacgcagctatccgtgtgtttgagtgccttcttcaatcagaattttcttttctgtgtcttaagtgctccaaagaattgctacgaacgactcggaccgatg

SEQ ID NO: 3863 - DNA, 203 bp, Artificial sequence
  synthetic
ggcgcgccagtcctcagctttgcaagtatcagagtacaaagccaagcaggcaatcgaaatgggattgttattaaccagtttaagcaaatcccaatatgcttcagaactatggggtttaacagatacaagtgcagaattgttattaacccctccaagaaatacatttaaaaagaagggatatactgtaacgactcggaccgatg

SEQ ID NO: 3864 - DNA, 203 bp, Artificial sequence
  synthetic
ggcgcgccagtcctttttatgaaattagtaactttgccaagaggttgtacatatacatttggaacattaaactctttgtaatatttgtaaaacaaaacaaaatgtatgctagagtaaagcgtgttaaaagagactctgttgaaaacttatataaacaatgtcaacttggtgctgactgccctcctgatcgactcggaccgatg

SEQ ID NO: 3865 - DNA, 203 bp, Artificial sequence
  synthetic
ggcgcgccagtcctaggagaagtattagaagttctaactcgtattcctttgagttctctttctgtacgctgttttgattgccttacattgttatcttttgcagaaaaaatagattgtataattagtggtcaaaacttttatcttgtaaggggtcgctggagatcatattgtagaaattgcattgagaacgactcggaccgatg

SEQ ID NO: 3866 - DNA, 203 bp, Artificial sequence
  synthetic
ggcgcgccagtccttagatgtttatgatgacttttatttacatcctcatcttcttaggcgacgcaaacgaaaacggttggattttttttaatgttttacagatggctctttggttgcagacagctggacaattgtatcttccaccaagcaagcctgttgctcgtgtactcagtacggatgaatatgtacgactcggaccgatg

SEQ ID NO: 3867 - DNA, 203 bp, Artificial sequence
  synthetic
ggcgcgccagtcctctccttctgctgtaataactcttcgtcaactattgcttcaagaagtgttcctgacctgtttgaggtgctccagatccctttttcgacatggcagatcctaataaaggtattaattctcttgaattaaatgaggggcatagcgaatggtatgttgtgacagaagctgagtgtattcgactcggaccgatg

SEQ ID NO: 3868 - DNA, 203 bp, Artificial sequence
  synthetic
ggcgcgccagtcctttcaagaagttacccaaaggctagatttaaaaaccccaaatgtgcaatctggtgaatttatagaaagaagtattgcaccaggaggtgcaaatcaaagatctgctcctcaatggatgttgcctttacttttagggttgtacgggactgtaacacctgctcttgaagcatatgaagcgactcggaccgatg

SEQ ID NO: 3869 - DNA, 203 bp, Artificial sequence
  synthetic
ggcgcgccagtcctcacaaggctgtatatataaaaaaaagggaagggatggctgccagccaagcatgagctcatacctagggagccaaccagctaacagccagtaaacaaagcacaaggggaagtggaaagcagccaagggaacatgttttgcgagccagagctgttttggcttgtcaccagctggcccgactcggaccgatg

SEQ ID NO: 3870 - DNA, 203 bp, Artificial sequence
  synthetic
ggcgcgccagtcctggtagtgctattgctcagttgggatatagattttttgctgactgggatcataaagtttcaacagttgggctttttcagcagccagctatggctttacaattatttaatccagaagactactatgatattttatttcctggagtgaatgcctttgttaacaatattcactatttacgactcggaccgatg

SEQ ID NO: 3871 - DNA, 203 bp, Artificial sequence
  synthetic
ggcgcgccagtcctccccaccgctctcaaagttgacggcatctctgcgtggatacacgccgctcacgtaaaggcggcgacaactcctccggccggagcagcatggaaggtccagcgttctcaaaaccccttaaagataagattaacccgtggggccccctaatagttatagggatcttggtgagggcacgactcggaccgatg

SEQ ID NO: 3872 - DNA, 203 bp, Artificial sequence
  synthetic
ggcgcgccagtccttagccggcgagttgacaaggaccagtgggggccgggggcttggagagggactccaagtcccgcccttcccggtgggccgggaaatgcatggggccacccagctccgcggcggcctgcagccggggtagcccaagaatccttcgggtgagggcgggtggcatttcctttttctatcgactcggaccgatg

SEQ ID NO: 3873 - DNA, 203 bp, Artificial sequence
  synthetic
ggcgcgccagtcctttctttgacaaaaatgttaaaggatcaaaagctgcagctgaaagcgcaaaggaaaaatgctgctcagctagaatgtgtagatttggatgacattttggatacggcagcggaagtgaaatccgtcaccgacaatataaaagaaactttactggccggattagaatcagactaaatcgactcggaccgatg

SEQ ID NO: 3874 - DNA, 203 bp, Artificial sequence
  synthetic
ggcgcgccagtcctaagtggcaatccaacaaattttgtccaaaccattccaaaaataattgatcattttgaagctgagtttccatttgacagatccccacaatggcattgagcagagtagatgtgattaatatgagaatttgggtcttaagtataatctgtgcttgtttaacgtatgtcaacgtcacacgactcggaccgatg

SEQ ID NO: 3875 - DNA, 203 bp, Artificial sequence
  synthetic
ggcgcgccagtcctaaatagaaactttacttgacatgtggcacgtatcaagaaccaatctgaaaacctacaaagagttacgtaaggctctgacagaagcttcaaaaaaaagacaaagaaaaaaaatttataaattactaggtcacaatataagttcttatatcagtgaaactggttgtctcttccagccgactcggaccgatg

SEQ ID NO: 3876 - DNA, 203 bp, Artificial sequence
  synthetic
ggcgcgccagtcctcccgttaattcaagaaatggaaaaatataatgaagtgcttccattccgaagcgagttttcgaatttgctcattagaacttactgacgcatgctttatagatcgctcaacttatgtgtcacgtgttcaggcaacattaataaaaagcccatgaacactgcttctcccattcaatacgactcggaccgatg

SEQ ID NO: 3877 - DNA, 203 bp, Artificial sequence
  synthetic
ggcgcgccagtcctcatgctttatagatcgctcaacttatgtgtcacgtgttcaggcaacattaataaaaagcccatgaacactgcttctcccattcaataatggcattactacagtggatgctggaaaacatttcagatgacaactcaataaaaatgtctcttgaagaacaacatgaaacgtttcaacgactcggaccgatg

SEQ ID NO: 3878 - DNA, 203 bp, Artificial sequence
  synthetic
ggcgcgccagtcctctgcttttcgttataatagcttcaacccttctgtgtaaactaggaactcatcaacattgaaaattttgaaagcttcagtacttgaatatgaggggcaaaaaacgtaaaactgtttgtaaggccaaaggtaaactcacttctaaaagctgcatgtgtactaaagccaatgctcgacgactcggaccgatg

SEQ ID NO: 3879 - DNA, 203 bp, Artificial sequence
  synthetic
ggcgcgccagtccttgacgacggaaacatgtgagtttttactgtatgggacaatacttttcgtcttagaaacaaactcatttcttaatttctcgttcgcagcatatatcaggccggaggtattacatactgcactcctatatatacgagtacaacaatcatacatgaaattaaacctacgcctaacaacgactcggaccgatg

SEQ ID NO: 3880 - DNA, 203 bp, Artificial sequence
  synthetic
ggcgcgccagtccttgacctactgggagcgccgccaaatctgttttgccccgcccctgcgcgcgcgggaactgtcggcgccgcgctgctgctagcccgccttccagagctccctccctccgtctgcctcctcacccttgccactcacccttccatctcttctatcacagactctgtgttacaccacctcgactcggaccgatg

SEQ ID NO: 3881 - DNA, 203 bp, Artificial sequence
  synthetic
ggcgcgccagtccttccagagctccctccctccgtctgcctcctcacccttgccactcacccttccatctcttctatcacagactctgtgttacaccacctatgactgctgcaaccacagaacattttgctctccgcgcggcactcaatcgttactggtggctgcttctgggacgacacaagctcagtcgactcggaccgatg

SEQ ID NO: 3882 - DNA, 203 bp, Artificial sequence
  synthetic
ggcgcgccagtcctctgtagagacacttcctttaagtagaccttagagacacaccaaatacaaccacaaccaaaaaaaaaacagaaaacaacacaaagccaatgagtgcagaaatgctccgcgctgttcagctccagccaagacgccggggacattcctcatctcccacttcccctccactcgaaggacgactcggaccgatg

SEQ ID NO: 3883 - DNA, 203 bp, Artificial sequence
  synthetic
ggcgcgccagtcctcatttttagcaaagctgtagcaaatcataacattagattatcataccaggattttttggaaatcaattagagtgtccatgtcggcagcgcatgtatctaatcaaagagaaaatagagactattaaactaattttttaagaagtgttcaataatgctcaacagaaaaaacgagtccgactcggaccgatg

SEQ ID NO: 3884 - DNA, 203 bp, Artificial sequence
  synthetic
ggcgcgccagtcctcttaagcataaagcgacgtcatgcttcagtaatatataaaaacctagtcacaactgctgttttcataagcttagagtgtgcttcaacatggccgaaagtgaacaaaaagttcgatttaggcatgcactcgcaaatttaagccttgttaaacaagccttttatcgcgattctcttcgactcggaccgatg

SEQ ID NO: 3885 - DNA, 203 bp, Artificial sequence
  synthetic
ggcgcgccagtcctcaacacaattttcacatctagagtatcttttcaaaggaaaaatttcttcggggtatgtatggcaatgcattggaaaaatgctgcaatgttcatcaatagttaattgtgttttttttgttttatagaagtaccgtggactttcttgaagaaattgtgaagtctttataaaggacccgactcggaccgatg

SEQ ID NO: 3886 - DNA, 203 bp, Artificial sequence
  synthetic
ggcgcgccagtccttcggttatcttatgtctgattcttattctacacatcttcaatgttcgatatgggggtacgaagccctgaattttacaccgattccagcacttttttgcgttgcttaaaaacagtaatttagtcggcacacgtacaatattaaactaggcttcttctaattgcgcagtgtttaaacgactcggaccgatg

SEQ ID NO: 3887 - DNA, 203 bp, Artificial sequence
  synthetic
ggcgcgccagtcctatgttttataagtacaaccattttttcccagagacctatgaagattgttggaaagggatttattatttgtttgttctgtttattttggcttgcattgcatatcatgattatataagtccttcaatagcagagaatatgttatcatttatcaggtgctctaaatatccctagaagcgactcggaccgatg

SEQ ID NO: 3888 - DNA, 203 bp, Artificial sequence
  synthetic
ggcgcgccagtcctttgatttgctgagtggtttttctgatggtgtggtgatgagtactatgcatgtatttcagtgatgtaataaaaatttggcgccaaaaaaacacagtatataatggtttgaatatctctgtgattttttagtattctcatacaactcttcctgttaatatctatttttggtgcagccgactcggaccgatg

SEQ ID NO: 3889 - DNA, 203 bp, Artificial sequence
  synthetic
ggcgcgccagtcctcagtattcccagttactgttcctatttttgcacggagaaataatattctttgtggttttttggttgccgccttactaattgtatgctatgtcatctttaaggaatttgctttgtcggctgatttctccgctgtgtaaacatggttcgtacagtcatttgcagttatttcttattcgactcggaccgatg

SEQ ID NO: 3890 - DNA, 203 bp, Artificial sequence
  synthetic
ggcgcgccagtcctcttgaatctaagtgtgcatataaaagaatttcattaaaaagttctgagttcatagaaaaggaatcggagttccatcccttataagccatgtctaacgacaatgccaaaacagatatagaaattctttatgaacaattatcttcccgagttgaaattgaaatagcttttctccctcgactcggaccgatg

SEQ ID NO: 3891 - DNA, 203 bp, Artificial sequence
  synthetic
ggcgcgccagtcctttgaaaaacatgtttggttagccattcatttttttaaagcatttcaggtttcaaaattaaaccacaaaaataaaacgcttatatctgatttcttaaaggatttcacacagctcttagcagatcaaaactttgaaattgtcgatcctacatttaccattcattattacgtttagccgactcggaccgatg

SEQ ID NO: 3892 - DNA, 203 bp, Artificial sequence
  synthetic
ggcgcgccagtccttaaaaaccacagaggcgtcaccgctacacgagacaaaaataatataaaaggccgtttatgaacaaggttctcattttcgacagaaacatgtatccacgcggggttaaaaagaatgtattagggcggcaacgatatggtttgaaaaccattaaacgaactcttgttcataaacctcgactcggaccgatg

SEQ ID NO: 3893 - DNA, 203 bp, Artificial sequence
  synthetic
ggcgcgccagtcctttgatggtttatatttaacgattattggaaaaattaaatgttcactagggttcttacataagatatttactatcacgtgcgcggggtcatattccgttgcaaacacagtaatagtcattgtgaatgtctttcagtttatcttccaacagcttttaatataagacaataggaatccgactcggaccgatg

SEQ ID NO: 3894 - DNA, 203 bp, Artificial sequence
  synthetic
ggcgcgccagtcctactgtgcctataacggcattttcattgtggtttatattcaatggaatattcaaaccatttccggaattgatttcttcttgtatcgtcctccttggcagataaaagttatcatttatatcattatcatcatacacacataggaagcctgccactagcacagtttccattattacgcgactcggaccgatg

SEQ ID NO: 3895 - DNA, 203 bp, Artificial sequence
  synthetic
ggcgcgccagtccttcacaagatgattgcgcagtccatgcaccagatttgataagtacgatttgctcgacaacgcacacaacgcatcacgacctagtcagaatgaatggctcagctactggcaactcagctagtcttcccgctcctcagttttccgaatgtgtttttttaccgaaagatacattttgccgactcggaccgatg

SEQ ID NO: 3896 - DNA, 203 bp, Artificial sequence
  synthetic
ggcgcgccagtcctagactctctcccaattttgacagttcatcccatgacagactttccctacgaacaaatacaagagacagaaaacattagacataactctatgaacataacaccccgcttcaaacgtatgcaattgtaatatcaactatttaagtattttacaacaataaaagatttaaagtaagacgactcggaccgatg

SEQ ID NO: 3897 - DNA, 203 bp, Artificial sequence
  synthetic
ggcgcgccagtcctaaattaaaacggttttcaccatgattaaccaaatcaattcccttacacaagaaaaaacgtttttcattgtggctgatgtttctgctgacaataggctggcaacttgtatatttaaagagtgaataaaaagttctttgaaatagtgtctgttgtaacagattttatttcagctcccgactcggaccgatg

SEQ ID NO: 3898 - DNA, 203 bp, Artificial sequence
  synthetic
ggcgcgccagtcctaactggatcatttgggtcgaaacgcaaacgctttaaccgttttacgttttattgtagaaaatggttattataaaaggaagacaatttttcgcaaacttttgaagtatttagctactacatcttttaatgctcatgttcaaactgaaagtaatcgtttactcaacttgatgcacacgactcggaccgatg

SEQ ID NO: 3899 - DNA, 203 bp, Artificial sequence
  synthetic
ggcgcgccagtcctaaactctgagggaaataaaggaagaagccttaagacattttgatccccgcttgctaattgctcttggctactatatccataatagacatggagacacccttgaaggcgccagagagctcattaaaaccctacaacgagccctcttcgtgcacttcagagcgggatgtaaccgctcgactcggaccgatg

SEQ ID NO: 3900 - DNA, 203 bp, Artificial sequence
  synthetic
ggcgcgccagtcctcttggccaataaactatgtgcagttcctgatccacctactgactcgcctcttgatcgggctatacaacatctgcagagacttactatccaagaactccccgacccgccgactgatctcccagagtctaacagcaatcagggactggctgagacttaaggcggcccaactgcaatcgactcggaccgatg

SEQ ID NO: 3901 - DNA, 203 bp, Artificial sequence
  synthetic
ggcgcgccagtcctcagccaggagccttttcttcataaagagattcgagaaacgaagcgtcaaccccggggagaaacgacaggaggaagcgcgcctggaacatgaagctggttcttctgttcagcctcagcgttctacttgggtgagttcgttctaatctatttatcggaaagaatacaaggctacaacgactcggaccgatg

SEQ ID NO: 3902 - DNA, 203 bp, Artificial sequence
  synthetic
ggcgcgccagtcctgtgcaaaatataaagttctcagagcaggaccaccaatgggcgtaggacgatcggctgaagggccctgccaaaaactacaggtagaccatgtgggacctttgggacctggtacccatggatacaggtacctcacaaccatggttgatgtgtacacaggttggttctgggccaaaccgactcggaccgatg

SEQ ID NO: 3903 - DNA, 203 bp, Artificial sequence
  synthetic
ggcgcgccagtcctatggggtaaatagacattagttagagttcaatcaatctcaacaaccatttataccgccaattcaatacatatactataaatcttaaaatgggaaatacatccatcacaatagaattcacaagcaaattttggccctattttacactaatacatatgatcttaactctaatctctcgactcggaccgatg

SEQ ID NO: 3904 - DNA, 203 bp, Artificial sequence
  synthetic
ggcgcgccagtcctttaactcatagttacataaaaacctcaagtatcacaatcaaacactaaatcaacacatcattcacaaaattaacagctggggcaaatatgtcgcgaagaaatccttgtaaatttgagattagaggtcattgcttgaatggtagaagatgtcactacagtcataattactttgaacgactcggaccgatg

SEQ ID NO: 3905 - DNA, 203 bp, Artificial sequence
  synthetic
ggcgcgccagtccttaatacaagtatatgataagtaatcagcaatcagacaatggacaaaaggaaaatataaaaaacttaggagcaaagcgtgctcggaaaatggacactgaatctaacaatggcactgtatctgacatactctatcctgagtgtcaccttaactctcctatcgttaaaggtaaaatacgactcggaccgatg

SEQ ID NO: 3906 - DNA, 203 bp, Artificial sequence
  synthetic
ggcgcgccagtcctcccttgttggagcggtcgcgttttctctgttcccgtcgtgccggttcctaccccccgctccctgggaccgccccctaccccccacctccccgtttgggcctcccccctcgcaccacccctttcctcgtccgtctgcggggagggcgtgtgtaaaaaatcgggcctccggccacccgactcggaccgatg

SEQ ID NO: 3907 - DNA, 203 bp, Artificial sequence
  synthetic
ggcgcgccagtcctccccgtttgggcctcccccctcgcaccacccctttcctcgtccgtctgcggggagggcgtgtgtaaaaaatcgggcctccggccaccatgtccgtgcgcgggcatgccgtacgccggacgcgcgcctccacccggtcccatgccccgtccgcgcatcgcgccgactcgcccgtgcgactcggaccgatg

SEQ ID NO: 3908 - DNA, 203 bp, Artificial sequence
  synthetic
ggcgcgccagtcctggacgcgagatgtcagtcctcggggacgcacggcacccccggcgattcccttcgcgagggccccggcctttttctgtcgcgggtcccggatccctccccccctctccgccgccgggcgctcgggcacgtctcattcgcctctcgagatcgttattcccggacccaaccgccccccgactcggaccgatg

SEQ ID NO: 3909 - DNA, 203 bp, Artificial sequence
  synthetic
ggcgcgccagtcctaacccgcagggagccactcccgcggcccccgtgggttacgcaggccctcgctgctctcccgtaccccgccggtctccctctttccctccctcgccgccttccgacgctctctgcctccttcgccgacgccttccctgtgatccgcacgggcgtccccggtgtctccgatagacccgactcggaccgatg

SEQ ID NO: 3910 - DNA, 203 bp, Artificial sequence
  synthetic
ggcgcgccagtcctggctccccgggcacgcccgcgacgagcgcgacgaacaacagcaccacccagcggcccagtcttgcgggtttccccgtcatcgcggcgatgagtcagtgggggcccagggcgatccttgtccagacggacagcaccaaccggaatgccgatggggactggcaagcggccgtagctcgactcggaccgatg

SEQ ID NO: 3911 - DNA, 203 bp, Artificial sequence
  synthetic
ggcgcgccagtccttcgcagtcttccgtccccatcgcccctgcgaacccggagggggtggggtgggggaaagccggcgcagagccgcgcgcgtgttccgggatggcgtccctgctcggggtgctgtgcggttggggaacgcgccccgaggaacaacaatatgagatgattcgggccgcggctccgccccgactcggaccgatg

SEQ ID NO: 3912 - DNA, 203 bp, Artificial sequence
  synthetic
ggcgcgccagtcctaccccgagcagggacgccatcccggaacacgcgcgcggctctgcgccggctttcccccaccccaccccctccgggttcgcaggggcgatggggacggaagactgcgatcacgaagggcggtcggttgcggctcccgtggaggttacggcgctgtatgcgaccgacgggtgcgttcgactcggaccgatg

SEQ ID NO: 3913 - DNA, 203 bp, Artificial sequence
  synthetic
ggcgcgccagtcctctcaagttttctcacccgtcgcccctctccaaggtcccgtttgggacgtgccagcatttcctcgccgcgaatcgctacctcgaaacccgggacattatgccgatcgactggtcggtataagatgccgacatccggggtcttgatttacgagggggcaattaataaagactgttgcgactcggaccgatg

SEQ ID NO: 3914 - DNA, 203 bp, Artificial sequence
  synthetic
ggcgcgccagtcctataaatgtggggccccggcccggcccgcttcatagcgcgtccaggaactcacggcagacgcgtattcaccgacccccccctcgcaacatgacaacgacgcccctctcgaacctgtttttacgggccccggacatcacccacgtcgcccccccgtactgtctgaatgccacgtggcgactcggaccgatg

SEQ ID NO: 3915 - DNA, 203 bp, Artificial sequence
  synthetic
ggcgcgccagtccttaattagcaacccctggggctataaaaggcgcggtctgtgcacggggacctcggttgggcgacgtctgcggtctagtggtcggcgtggggaccggctgtgtggtgggtgggggaggcacgttggactacgaccgaccacacgacatgcaggcttctgagccgcgaatccccacccgactcggaccgatg

SEQ ID NO: 3916 - DNA, 203 bp, Artificial sequence
  synthetic
ggcgcgccagtcctctgcacatgaatctaaacccgctccgggagcgccacgaacgcgatgacgtcattagcgagcacatactatctgctctacgcgatccgaatgtggtcattgtctattaaccctccattccctcgcgttcccaccgcacccgggccgggtgacattcacccccacccccccgagaccgactcggaccgatg

SEQ ID NO: 3917 - DNA, 203 bp, Artificial sequence
  synthetic
ggcgcgccagtccttgccgccgccccttaagagggcccgcaacacggcccgggctgcgcacgccagccgggacgggtgagttcgctaggcaagcacggactggcggttacacgtgcatgcgtgccgagtgaactctcccgccccgacgcgctccggctccgggcctacgccgagcccagccgcccgcccgactcggaccgatg

SEQ ID NO: 3918 - DNA, 203 bp, Artificial sequence
  synthetic
ggcgcgccagtccttcccaacatccgcgctttctcgcaggccgggcgccgccttcgtggacgggacaccggtgtggtaactggcgacaaggcgttgccactatggcagacatccccccggacccgcccgcgctcaacacgacgcctgcgaatcatgctcccccatccccacccccgggttcacggaagcgactcggaccgatg

SEQ ID NO: 3919 - DNA, 203 bp, Artificial sequence
  synthetic
ggcgcgccagtcctggggggtgtgtcgacaaactgccgcttcttaaaacaccggggcccgtcgctcggggtgctcgttggttggcacgcgcgacgcggcaaatggcctgtcgtaagttctgtggggtctaccgtagacccgacaagagacaggaggcgtccgtcccgccggagacaaacacggccccgcgactcggaccgatg

SEQ ID NO: 3920 - DNA, 203 bp, Artificial sequence
  synthetic
ggcgcgccagtccttaaaacccggggtcggtgtggtgttcggtcataagctgcattgcgaacgactagtcgccgtttttcgtgtgcatcgcgtatcacggcatggggcgtttgacctccggcgtcgggacggcggccctgctagttgtcgcggtgggactccgcgtcgtctgcgccaaatacgccttacgactcggaccgatg

SEQ ID NO: 3921 - DNA, 203 bp, Artificial sequence
  synthetic
ggcgcgccagtcctctggccccttgatacgatctcgtcgaccggggactcccctctacccccacccaaccagcgcgccggcgcttagggtgtgacccccccatggcatccggggtttccccggcccacccccaaaccccggttggggcgggcagccgagacctttccttaaaaggcaccccatccgaccgactcggaccgatg

SEQ ID NO: 3922 - DNA, 203 bp, Artificial sequence
  synthetic
ggcgcgccagtcctagctgctgctgcgagagctctcggatgcgtgcgatgattggttggaccccgtgcatggacgtaaaatttaaaaacgcctcgtccctgaaccgcacggcgggtctggccccgggctgctgtgggggcggacctggtgcccggacgtcccgcgagccctccccgccggacgccgcccgactcggaccgatg

SEQ ID NO: 3923 - DNA, 203 bp, Artificial sequence
  synthetic
ggcgcgccagtcctgcttgcgcacgcacgcctccggcgcccagcccaacactgacatcattctcgaggcggctctgtcggagcttcccaccgaggcctggcccatgatgcagggggcggtgaactttagcaccctataagtctggggccgcgctcgttcgatacacggcaacccccgggcgtcgtggccgactcggaccgatg

SEQ ID NO: 3924 - DNA, 203 bp, Artificial sequence
  synthetic
ggcgcgccagtcctccatgatgcagggggcggtgaactttagcaccctataagtctggggccgcgctcgttcgatacacggcaacccccgggcgtcgtggcatggaagcccccggcatcgtttgggtggaggagagcgtcagcgccattaccctatacgcggtatggctgcccccgcgcacgcgcgaccgactcggaccgatg

SEQ ID NO: 3925 - DNA, 203 bp, Artificial sequence
  synthetic
ggcgcgccagtccttacgtggccagcaggctctgcgtgtccaaccggagggggacggctacacccccgcgcacctcgaccgtggcgttcgccttcgcataagaggtcgcgggggcgtaaaggcagggaaacctgtcccggaacacagaggccagcaccaggagccccacgacgcagatggccgagacgcgactcggaccgatg

SEQ ID NO: 3926 - DNA, 203 bp, Artificial sequence
  synthetic
ggcgcgccagtcctgaggtcgcgggggcgtaaaggcagggaaacctgtcccggaacacagaggccagcaccaggagccccacgacgcagatggccgagacgatgaacgtcgccacctgcacacaccagacccaccacgccgcccgcgccccgggcgcgacgtcggcgcccggcgcggcctcgggggatcgactcggaccgatg

SEQ ID NO: 3927 - DNA, 203 bp, Artificial sequence
  synthetic
ggcgcgccagtcctataggcgccgggtataaggcagccccgtgtgacggtcgggccgcattcgcaccccggcactgcgagcgacggagcggcggcccggcgggaggaggagacccggagagacagagactaaaacccggcaagagagagaccgcgggccgccgtctcgagtctaccctaccccggctccgactcggaccgatg

SEQ ID NO: 3928 - DNA, 203 bp, Artificial sequence
  synthetic
ggcgcgccagtcctagtgtataaattaccagcgcacgcacaaggccgtcctgtcgtcggtgtcgctgccgcccgagctgaggccgctgctggtgctggtctcccgcctctgtcacgccaacccggccgcgcgccactctctgtcgtgaggatcccttccgccctcgagctcttcggctgctcgtaaaacgactcggaccgatg

SEQ ID NO: 3929 - DNA, 203 bp, Artificial sequence
  synthetic
ggcgcgccagtcctgcgcccgcgggccccgaggacgcgcacacgcaccccccacccacgccccttccggcaccgggaagggctcgcaccgccggccgggccatgaacgcgcactttgccaacgaggtccaatacgatctcacccgggacccgagcagccccgcctcgctgattcacgtcatcatctcccgactcggaccgatg

SEQ ID NO: 3930 - DNA, 203 bp, Artificial sequence
  synthetic
ggcgcgccagtcctctcacctggggctcctgcgcacgacagacctccccgtgcgtgctgctgagccctgccccgccccctctcccacacggtcggtgccccccatctctgtttcatcatcgtcccggttgcgttgcgctttccggccctcccgcacccccgcgttccggtgtctcgcggcccggcgcccgactcggaccgatg

SEQ ID NO: 3931 - DNA, 203 bp, Artificial sequence
  synthetic
ggcgcgccagtcctaacgccccctttacgcctttcctcccctcgcctgttgttggtcgggttgccccttggggttttggcggcccgtgggttgttagtcgcgtccgccggcggtgaggcgttgtgcgggaggggcttggccttcccgagctcggcttgatggagcctgcgaatcccccaaggaacccacgactcggaccgatg

SEQ ID NO: 3932 - DNA, 203 bp, Artificial sequence
  synthetic
ggcgcgccagtcctgtccgccggcggtgaggcgttgtgcgggaggggcttggccttcccgagctcggcttgatggagcctgcgaatcccccaaggaacccaatggccgctcctgcccgcgaccccccgggttaccggtacgccgcggccatcctgcccaccggctccatcctgagtacgatcgaggtgcgactcggaccgatg

SEQ ID NO: 3933 - DNA, 203 bp, Artificial sequence
  synthetic
ggcgcgccagtcctgccaggcactcgcatccgcggatactacccgggtgggggttgtgtgtagaacccgcgcggtgcttgtttgattttggcctccgccccccatccctgaagcttgggtccggacccgggcccgcgccgccagcactactttcggttttgctgcctcgccggctccccgcaccgacccgactcggaccgatg

SEQ ID NO: 3934 - DNA, 203 bp, Artificial sequence
  synthetic
ggcgcgccagtcctccatccctgaagcttgggtccggacccgggcccgcgccgccagcactactttcggttttgctgcctcgccggctccccgcaccgaccatgacaatgcgggatgatgttcctttgttggatcgcgagctggtagacgaggccgcgtgtggcggggaggacggagaactgccgctccgactcggaccgatg

SEQ ID NO: 3935 - DNA, 203 bp, Artificial sequence
  synthetic
ggcgcgccagtcctcgcgccaccgccagcccttgctcccaccaccctcctcccaccaccccactattcccccccccaagtccgccccgtggctcgccggccatggagctcagctatgccaccaccctgcaccaccgggacgttgtgttttacgtcacggcagacagaaaccgcgcctactttgtgtgccgactcggaccgatg

SEQ ID NO: 3936 - DNA, 203 bp, Artificial sequence
  synthetic
ggcgcgccagtccttccttgttttcggtctggtactccctttgtgcttttaccctcaccccaccccatcctttggcccgcgcttacggcaacaaagggcctccgatagcctccgaggtgcggagcctctttgggccgtgggtacggacacccccccccatctgcggactggcagccgggacgacgacccgactcggaccgatg

SEQ ID NO: 3937 - DNA, 203 bp, Artificial sequence
  synthetic
ggcgcgccagtcctcttccccaccccgtggggtccgtctatataaacccgcagcagcgtgggcagctccggatccccgcgggctccggaggccccctggcgatggctaggacgggacgccgcgcggccgtcggtaggcccgctcgcacgagcagcctgaccgaacgcaggcgcgtgctgttggccggccgactcggaccgatg

SEQ ID NO: 3938 - DNA, 203 bp, Artificial sequence
  synthetic
ggcgcgccagtcctgcgcggggactcatttgtcgccggcgacacccacccgacaacagcccctgggtgtcgaccgctgtcgcccccgtctgtcgcctctcccttttttccccccctcaaagaacgtggtgttgggcgccggccaattcttcccggagcgccgtcgtcgcccgcccgccgccctcgaaccgactcggaccgatg

SEQ ID NO: 3939 - DNA, 203 bp, Artificial sequence
  synthetic
ggcgcgccagtcctgccgccgcatcagtccgcgcggcgcgcgcctctgacccacccccccccaaaccttaactaaaccacagcacggccgggtgactcgccatggcggccgcgcccccggccgcggtttccgagcccactgcggcccgacagaaactgttggccctgctcgggcaggtacagacgtaccgactcggaccgatg

SEQ ID NO: 3940 - DNA, 203 bp, Artificial sequence
  synthetic
ggcgcgccagtcctacgagttcgaggggcgggtctgtatagccctgcgggccctcatctacaccttcaagacgtaccaggtatttgtgccgaagcccaccgcgctggccacatttgtccgcgaggccggcgcgctgctcagacgacactcgatctctctcctgtccctggagcacaccctctgtacctcgactcggaccgatg

SEQ ID NO: 3941 - DNA, 203 bp, Artificial sequence
  synthetic
ggcgcgccagtcctcgcgcttcggcggggcaccggcaccgggaccgacttgttttacataacagtagggggtgggggaacgcgcacccttgcccggtcgcgatggcggggatggggaagccctacggcggccgcccgggggacgcgttcgagggtctcgttcagcgcatcaggctcattgttcccgcccgactcggaccgatg

SEQ ID NO: 3942 - DNA, 203 bp, Artificial sequence
  synthetic
ggcgcgccagtcctcttcatggggtgggatgtgtcttcccgggaaaccacacacacgcgataccgggtgtgtggttagggggacgaacaggcggttgatgggcgggggggttcgggcggcggaaacaacagtactcatcgggacgcccggcccataaacaggccccgctcgtggcgggcgcggcacaccgactcggaccgatg

SEQ ID NO: 3943 - DNA, 203 bp, Artificial sequence
  synthetic
ggcgcgccagtcctaccgattcctgttgcgttcctgtcggccggtgctgtcctgtcgacagattgttggcgactgcccgggtgattcgtcggccggtgcgtcctttcggtcgtaccgcccaccccgcctcccacgggcccgccgctgtttccgttcatcgcgtccgagccaccgtcaccttggttccacgactcggaccgatg

SEQ ID NO: 3944 - DNA, 203 bp, Artificial sequence
  synthetic
ggcgcgccagtcctcctttcggtcgtaccgcccaccccgcctcccacgggcccgccgctgtttccgttcatcgcgtccgagccaccgtcaccttggttccaatggccaaccgccctgccgcatccgccctcgccggagcgcggtctccgtccgaacgacaggaaccccgggagcccgaggtcgccccccgactcggaccgatg

SEQ ID NO: 3945 - DNA, 203 bp, Artificial sequence
  synthetic
ggcgcgccagtcctacgacaacatcgtctgcacaagctgcgcgctgtaagcaacagcgctccgatcggggtcaggcgtcgctctcggtcccgcatatcgccatggatcccgccgtctcccccgcgagcaccgaccccctagatacccacgcgtcgggggccggggcggccccgattccggtgtgcccccgactcggaccgatg

SEQ ID NO: 3946 - DNA, 203 bp, Artificial sequence
  synthetic
ggcgcgccagtcctcacaggggcggcgggcttgggtgtccgggaccgtcacacctatacagctctgtagagagacctatccgcacctacaatcgtgccggaatgggtctgtttggcatgatgaagtttgcccagactcaccatctggtgaagcgccggggcctccgggccccggagggctactttacccgactcggaccgatg

SEQ ID NO: 3947 - DNA, 203 bp, Artificial sequence
  synthetic
ggcgcgccagtcctccgtagtccttggctcgggtagccactgctctgtggctcgggtcccccggcccccctaacccccatcgggtccgcgtcatccgccccctccgcctgcgacacaaacggccgcgcctccgggcccggtgacacgacgcgcctcgtctctgcggattgtcccgggagcgtcgcggccgactcggaccgatg

SEQ ID NO: 3948 - DNA, 203 bp, Artificial sequence
  synthetic
ggcgcgccagtcctcgcgtgattcggttgctcgcggttgtcttgtttggacgttttttatgcgggaacaagggggcttaccggttacactgtccgctcgctatggggttcgtctgtctgtttgggcttgtcgttatgggagcctggggggcgtggggtgggtcacaggcaaccgaatatgttcttcgtcgactcggaccgatg

SEQ ID NO: 3949 - DNA, 203 bp, Artificial sequence
  synthetic
ggcgcgccagtcctaaggccaggggggcaggcgggcccatcactgttagggtgttaggttgggaggtggcacaaaaagcgacactcccgtgttgtagttgtccgcgggaggcggtggtttccggcaaccctcctcgctgcgccgcgcgcgcccaccggtccttcgcgggggccggggctcttctggtccgactcggaccgatg

SEQ ID NO: 3950 - DNA, 203 bp, Artificial sequence
  synthetic
ggcgcgccagtcctcccgatccgaacggcgcacgccgcgtgggctccaaacgcctccggaagagagcgccccgccccgatattcaagcccgcggtggtgctatggctttccgtgcttcgggacccgcctaccagcccctcgcccccgcggcctccccggcgcgggctcgtgttccggccgtggcctggcgactcggaccgatg

SEQ ID NO: 3951 - DNA, 203 bp, Artificial sequence
  synthetic
ggcgcgccagtcctactcacgcactcgccgctgcgtcgggcgacgcgatttacggcctgccaacaccacgtcaacgtgggaaccgcctgtgtcgtcggacgatgaagcgagctcgcagtcgaagcccctcgccacccagccgcccgtcctcgccctttcgaacgcccccccacggcgggtctccccgacgactcggaccgatg

SEQ ID NO: 3952 - DNA, 203 bp, Artificial sequence
  synthetic
ggcgcgccagtcctttgctgaagcgcgcacggcaagaggcgaggggcggcgactggtgagtacgccaaaaattttgactagcggaggctagaaggagagagatgggtgcgagagcgtcagtattaagcgggggagaattagatcgatgggaaaaaattcggttaaggccagggggaaagaaaaaatatcgactcggaccgatg

SEQ ID NO: 3953 - DNA, 203 bp, Artificial sequence
  synthetic
ggcgcgccagtccttctggaaaggtgaaggggcagtagtaatacaagataatagtgacataaaagtagtgccaagaagaaaagcaaagatcattagggattatggaaaacagatggcaggtgatgattgtgtggcaagtagacaggatgaggattagaacatggaaaagtttagtaaaacaccatatgcgactcggaccgatg

SEQ ID NO: 3954 - DNA, 203 bp, Artificial sequence
  synthetic
ggcgcgccagtcctttcagactctgctataagaaaggccttattaggacacatagttagccctaggtgtgaatatcaagcaggacataacaaggtaggatctctacaatacttggcactagcagcattaataacaccaaaaaagataaagccacctttgcctagtgttacgaaactgacagaggatagcgactcggaccgatg

SEQ ID NO: 3955 - DNA, 203 bp, Artificial sequence
  synthetic
ggcgcgccagtccttctacaatacttggcactagcagcattaataacaccaaaaaagataaagccacctttgcctagtgttacgaaactgacagaggatagatggaacaagccccagaagaccaagggccacagagggagccacacaatgaatggacactagagcttttagaggagcttaagaatgaacgactcggaccgatg

SEQ ID NO: 3956 - DNA, 203 bp, Artificial sequence
  synthetic
ggcgcgccagtcctcagaataggcgttactcgacagaggagagcaagaaatggagccagtagatcctagactagagccctggaagcatccaggaagtcagcctaaaactgcttgtaccaattgctattgtaaaaagtgttgctttcattgccaagtttgtttcataacaaaagccttaggcatctcctcgactcggaccgatg

SEQ ID NO: 3957 - DNA, 203 bp, Artificial sequence
  synthetic
ggcgcgccagtcctttatagaagtagtacaaggagcttgtagagctattcgccacatacctagaagaataagacagggcttggaaaggattttgctataagatgggtggcaagtggtcaaaaagtagtgtgattggatggcctactgtaagggaaagaatgagacgagctgagccagcagcagataggcgactcggaccgatg

SEQ ID NO: 3958 - DNA, 203 bp, Artificial sequence
  synthetic
ggcgcgccagtcctatcaaacaaaacccatctggagcctcagatcatcccaagtcattgttcatcagatctagtactcaaataagttaataaaaatatccacatggggcaaataatcattggaggaaatccaactaatcacaatatctgtcaacatagacaagtcaacacgccaggcaaaatcaaccacgactcggaccgatg

SEQ ID NO: 3959 - DNA, 203 bp, Artificial sequence
  synthetic
ggcgcgccagtcctaatgaaatccattggacctctcaagacttgattgatgcaattcaaaattttctacaacatctaggtattactgatgatatatacacaatatatatattagtgtcataacactcaatcctaatgcttaccacatcatcaaactattaactcaaacaattcaagccatgggacaaacgactcggaccgatg

SEQ ID NO: 3960 - DNA, 203 bp, Artificial sequence
  synthetic
ggcgcgccagtcctcggcgggtagccttcgcgggagatactgcgtttttttgcgccggccccgtcgctcccgtccattcccatcgcgagggggtccggcggcacctaccccggcctccatccgcgctgtggggtctttttcttttttggggggtagcggacatccgataacccgcgtctatcgccacccgactcggaccgatg

SEQ ID NO: 3961 - DNA, 203 bp, Artificial sequence
  synthetic
ggcgcgccagtcctctcgacctctccacacctgcaccacccccgccgtccgaacccaggcctaattgtccgcgcatccgaccctagcgtgttcgtggaaccatgacctctcgccgctccgtgaagtcgggtccgcgggaggttccgcgcgatgagtacgaggatctgtactacaccccgtcttcaggtcgactcggaccgatg

SEQ ID NO: 3962 - DNA, 203 bp, Artificial sequence
  synthetic
ggcgcgccagtcctctaaccttcggcataaaagccaccgcgcgcctgttgaccaggttcagttgcacgactccgcccccgcgagtagcgacggccgtgtgccagtcgccatcgtacccccgacccaagctgtccggctggacaaggatcgccccggatccccactgactcatcttcctgttagggacgcgactcggaccgatg

SEQ ID NO: 3963 - DNA, 203 bp, Artificial sequence
  synthetic
ggcgcgccagtccttggccagtgttttgggtctcgcaccgcgcgcccccgatcccatcgcgcccgccctcctcgccgggcggctccccgcgcgggcccgcgtctcccgccgctaaggcgacgagcaagacaaacaacaggcccgcccgacagacccttctgggggggcccatcgtccctaacaggaagcgactcggaccgatg

SEQ ID NO: 3964 - DNA, 203 bp, Artificial sequence
  synthetic
ggcgcgccagtcctgggagtcccggccgcccgcctctccccgcggttcccgtcttcctgccccattgcgtccgcgcgcccaagggccagtacccgcccgcgatggcttctcttctcggggctatatgtggctggggagcgcgccccgaggaacaatatgagatgatccgcgcggccgttccgccctcgcgactcggaccgatg

SEQ ID NO: 3965 - DNA, 203 bp, Artificial sequence
  synthetic
ggcgcgccagtcctttcctcggggcgcgctccccagccacatatagccccgagaagagaagccatcgcgggcgggtactggcccttgggcgcgcggacgcaatggggcaggaagacgggaaccgcggggagaggcgggcggccgggactcccgtggaggtgaccgcgctttatgcgaccgacgggtgccgactcggaccgatg

SEQ ID NO: 3966 - DNA, 203 bp, Artificial sequence
  synthetic
ggcgcgccagtcctcccgtcgcccctctccaaggttccgttcggaacctgccagcatttcctcgtggcgaaccgatacctcgagacccggtcgatttcacccatcgactggtcggtttgaaaggcatcgacgtccggggtttttgtcggtgggggcttttgggtatttccgatgaataaagacggttacgactcggaccgatg

SEQ ID NO: 3967 - DNA, 203 bp, Artificial sequence
  synthetic
ggcgcgccagtcctgtgcgtgtccttgtgtcagcagtgctttgccgccaaatgcgacagcaaccgcctgcacacgctgtttaccattgacgccggcacgccatgctcgccgtccgttccctgcagcacctctcaaccgtcgtcttgataacggcgtacggcctcgtgctcgtgtggtacaccgtcttccgactcggaccgatg

SEQ ID NO: 3968 - DNA, 203 bp, Artificial sequence
  synthetic
ggcgcgccagtcctaccacgggtataaggacatccaccacccggccggtggtggtgtgcagccgtgttccaaccacggtcacgcttcggtgcctctccccgattcgggcccggtcgctcgctaccggtgcgccaccaccagaggccatatccgacaccccagccccgacggcagccgacagccgggtccgactcggaccgatg

SEQ ID NO: 3969 - DNA, 203 bp, Artificial sequence
  synthetic
ggcgcgccagtcctcgtggacgcggccctcggttgggcgacgcatgccagcccaacaaaatccgccggggtgccagtcccattcccgaaggcgtagcccgttaacttggctggcttggatggggagtagggccttttccattaccccaaggacctagcgcgcgggagtcgtggctttggggcgcatcccgactcggaccgatg

SEQ ID NO: 3970 - DNA, 203 bp, Artificial sequence
  synthetic
ggcgcgccagtcctccccccccaaaacacaccccccgggggtcgcgcgcggccctttaaagcggtggcggcgggcagcccgggccccccgcggccgagactagcgagttagacaggcaagcactactcgcctctgcacgcacatgcttgcctgtcaaactctaccaccccggcacgctctctgtctcccgactcggaccgatg

SEQ ID NO: 3971 - DNA, 203 bp, Artificial sequence
  synthetic
ggcgcgccagtcctcctgtcctttttcccacccaagcatcgacgggtccgcgctagttccgcgtcgacggcgggggtcgtcggggtccgtgggtctcgccccctccccccatcgagagtccgtaggtgacctaccgtgctacgtccgccgtcgcagccgtatccccggaggatcgccccgcatcggcgcgactcggaccgatg

SEQ ID NO: 3972 - DNA, 203 bp, Artificial sequence
  synthetic
ggcgcgccagtcctcccccgcgtcggcctgtctccccgccgtgcgtggccttacaaatctgcaagtgccccaaatcggacacgggcctgtaatataccaacatgggcgttgttgtcgtcaacgtaatgaccctccttgaccagaacaacgccctgccccggacttccgtcgacgcaagcccggccctgcgactcggaccgatg

SEQ ID NO: 3973 - DNA, 203 bp, Artificial sequence
  synthetic
ggcgcgccagtcctacgtcgaatatctggtttgcaaagccctcaccttcgacggcgcgcttcgccccagcgccgcagagctgctttgtttgccgctgtttcaacagaaatgaccgccccctgggggcggtgctgtttgcgggttggcacaaaaagaccccgatccgcgtctgtggtgtttttggcatccgactcggaccgatg

SEQ ID NO: 3974 - DNA, 203 bp, Artificial sequence
  synthetic
ggcgcgccagtcctaacagaaatgaccgccccctgggggcggtgctgtttgcgggttggcacaaaaagaccccgatccgcgtctgtggtgtttttggcatcatgtcgcagggcgccatgcgtgccgttgttcccattatcccattccttttggttcttgtcggtgtatcgggggttcccaccaacgtccgactcggaccgatg

SEQ ID NO: 3975 - DNA, 203 bp, Artificial sequence
  synthetic
ggcgcgccagtcctgtgtggcggacgcggggcggtcattggacggggtgcagttaaatacatgcccgggacccatgaagcatgcgcgacttccgggcctcagaacccacccgaaacggccaacggacgtctgagccaggcctggctatccggagaaacagcacacgacttggcgttctgtgtgtcgcgcgactcggaccgatg

SEQ ID NO: 3976 - DNA, 203 bp, Artificial sequence
  synthetic
ggcgcgccagtcctgaacccacccgaaacggccaacggacgtctgagccaggcctggctatccggagaaacagcacacgacttggcgttctgtgtgtcgcgatgtctctgcgcgcagtctggcatctggggcttttgggaagcctcgtgggggctgttcttgccgccacccatcggggacctgcggcccgactcggaccgatg

SEQ ID NO: 3977 - DNA, 203 bp, Artificial sequence
  synthetic
ggcgcgccagtcctttgttcggtcataagcttcagcgcgaacgaccaactaccccgatcatcagttatccttaaggtctcttttgtgtggtgcgttccggtatggggggggctgccgccaggttgggggccgtgattttgtttgtcgtcatagtgggcctccatggggtccgcagcaaatatgccttgcgactcggaccgatg

SEQ ID NO: 3978 - DNA, 203 bp, Artificial sequence
  synthetic
ggcgcgccagtcctccggaaaccaaagaaggaagcaaagaatggatgggaggagttcaggaagccggggagagggcccgcggcgcatttaaggcgttgttgtgttgactttgcctcttctggcgggttggtgcggtgctgtttgttgggctcccattttacccgaagatcggctgctatccccgggaccgactcggaccgatg

SEQ ID NO: 3979 - DNA, 203 bp, Artificial sequence
  synthetic
ggcgcgccagtccttgttgactttgcctcttctggcgggttggtgcggtgctgtttgttgggctcccattttacccgaagatcggctgctatccccgggacatggatcgcggggcggtggtggggtttcttctcggtgtttgtgttgtatcgtgcttggcgggaacgcccaaaacgtcctggagacggcgactcggaccgatg

SEQ ID NO: 3980 - DNA, 203 bp, Artificial sequence
  synthetic
ggcgcgccagtccttcggtggctccggggggcttccggcctgggggccgtcctgtgtgggattgcgtggtatgtgacgtcaattgcccgaggcgcataaagggccggtggtccgcctagccgcagcaaattaaaaatcgtgagtcacagcgaccgcaacttcccacccggagctttcttccggcctcgcgactcggaccgatg

SEQ ID NO: 3981 - DNA, 203 bp, Artificial sequence
  synthetic
ggcgcgccagtcctgctctcccgggctgctgcccgaaatcgcccccaacgcatccttgggtgtggcacatcgaagaaccggcgggaccgtgaccgacagtccccgtaatccggtaacccgttgagtcccgggtacgaccatcacccgagtctctgggcggagggtggttcccccccgtggctctcgagcgactcggaccgatg

SEQ ID NO: 3982 - DNA, 203 bp, Artificial sequence
  synthetic
ggcgcgccagtcctcccgtaatccggtaacccgttgagtcccgggtacgaccatcacccgagtctctgggcggagggtggttcccccccgtggctctcgagatgagccagacccaacccccggccccagttgggccgggcgacccagatgtttacttaaaaggcgtgccgtccgccggcatgcacccccgactcggaccgatg

SEQ ID NO: 3983 - DNA, 203 bp, Artificial sequence
  synthetic
ggcgcgccagtccttcgtgccttcccgcaggaggaacgtcctcgtcgaggcgaccggcggcgaccgttgcgtggaccgcttcctgctcgtcgggggggagcatgtcgtgggccctggaaatggcggacaccttcctggacaccatgcgggttgggcccaggacgtacgccgacgtacgcgatgagatccgactcggaccgatg

SEQ ID NO: 3984 - DNA, 203 bp, Artificial sequence
  synthetic
ggcgcgccagtcctcgtcaccggtttccgcgacccaccgggcccggccaggcacggcagcatgggacccacagaccgcccgtgatccttaggggccgtgcgatggacaccgcagatatcgtgtgggtggaggagagcgtcagcgccattaccctttacgcggtatggctgcccccccgcgctcgcgagcgactcggaccgatg

SEQ ID NO: 3985 - DNA, 203 bp, Artificial sequence
  synthetic
ggcgcgccagtcctataagttagccctggcccgacagtctggtcgcatttgcacctcggcactcggagcgagacgcagcagccaggcagactcgggccgccccctctccgcatcaccacagaagccccgcctacgttgcgacccccagggaccctccgtccgcgaccctccagccgcatacgaccccccgactcggaccgatg

SEQ ID NO: 3986 - DNA, 203 bp, Artificial sequence
  synthetic
ggcgcgccagtcctcctggaggacggcgccggggctctcggggccgcaggacccagcaaggcgtccattctcccgaaccaggccgttccgatcgccctgatcattacccccgtccgcatcgatccggagatctataaggccatccagcgaagcagccgcctggcattcgacgacacgctcgccgagctcgactcggaccgatg

SEQ ID NO: 3987 - DNA, 203 bp, Artificial sequence
  synthetic
ggcgcgccagtcctcattacccccgtccgcatcgatccggagatctataaggccatccagcgaagcagccgcctggcattcgacgacacgctcgccgagctatgggcctctcgttctccggggcccggccctgctgctgccgaaacaacgtcctcatcaccgacgacggggaggtcgtctcgctgacccgactcggaccgatg

SEQ ID NO: 3988 - DNA, 203 bp, Artificial sequence
  synthetic
ggcgcgccagtcctacacacacaaggcgatactgtcgtcggtggcgctgcctcccgagcttaagcctctcctggtgctggtgtcccgcctgtgtcacaccaacccgtgcgcgcggcacgcgctgtcgtgagaatcagcgttcacccggcggcgcgctcaaccaccgctccccccacgtcgtctcggaacgactcggaccgatg

SEQ ID NO: 3989 - DNA, 203 bp, Artificial sequence
  synthetic
ggcgcgccagtcctacccgtgcgcgcggcacgcgctgtcgtgagaatcagcgttcacccggcggcgcgctcaaccaccgctccccccacgtcgtctcggaaatggagtccacggtaggcccagcatgtccgccgggacgcaccgtgactaagcgtccctgggccctggccgaggacacccctcgtggccgactcggaccgatg

SEQ ID NO: 3990 - DNA, 203 bp, Artificial sequence
  synthetic
ggcgcgccagtcctgggtcgcggcggcgaagtaccccgatcacgggccttgggcacgcgagactatcagagcaccccccgggtcgcccgcagggtggcggaatggaccgagatgccgcccacgcggccctgcgccgacgcctggccgagacgcacctccgagccgagatttacaaggaccagaccctgcgactcggaccgatg

SEQ ID NO: 3991 - DNA, 203 bp, Artificial sequence
  synthetic
ggcgcgccagtcctgacccggggggtgctctgatagtctcgcgtgcccaaggcccgtgatcggggtacttcgccgccgcgacccgccacccggtgtgcgcgatgtttggtcagcagctggcgtccgacgtccagcagtacctggagcgcctcgagaaacagaggcaacttaaggtgggcgcggacgagcgactcggaccgatg

SEQ ID NO: 3992 - DNA, 203 bp, Artificial sequence
  synthetic
ggcgcgccagtcctcttagcctctcggaccccgtcgcgcgggccgctgtccttaggttttgtcgcaaggtgtcgtccgggaacggccggtctcgctagcgggcgccttcccccggccacctcgcccacccactcctccccgcgccgttggcccccgcctctggggtttgccctccccccgcccccggccgactcggaccgatg

SEQ ID NO: 3993 - DNA, 203 bp, Artificial sequence
  synthetic
ggcgcgccagtcctgaatacgcatacgcgcgccaaacccacgcccttcccgcggactcgggggacccgcatcgcctacacacccacacccacccccgaaccatgaacgcgcacttggccaacgaggtccagacgatctcggccacggcccgggtcggccctcggtctttggttcacgtcatcatatcccgactcggaccgatg

SEQ ID NO: 3994 - DNA, 203 bp, Artificial sequence
  synthetic
ggcgcgccagtcctccgaccggcacccggcctctcacacagcatcccccgcctttttgggtccgggcccgtcgtgtctttcggtggaccttgggccgtcgggcacgtacacgggtggccgggcgttggggtggatcttagcctccccgggccaatatcgctagagacagccgatctccacgcgacccccgactcggaccgatg

SEQ ID NO: 3995 - DNA, 203 bp, Artificial sequence
  synthetic
ggcgcgccagtcctgcacgtacacgggtggccgggcgttggggtggatcttagcctccccgggccaatatcgctagagacagccgatctccacgcgaccccatggccgctcccaaccgcgaccctccgggataccggtatgccgcggccatggtgccgaccgggtccctccttagcacgatcgaggtgcgactcggaccgatg

SEQ ID NO: 3996 - DNA, 203 bp, Artificial sequence
  synthetic
ggcgcgccagtccttggtcaacatcaaaggttatatcaaggcgcggaacggccttatcaaaacactcgcctccgcggatgcaacccgggtggtgtttgtgcaagaacccgggtgtctttgatctcgggatcctgctgacgtaagcgaccctttgcggtttcggtctccccacctccaccgcacacccccgactcggaccgatg

SEQ ID NO: 3997 - DNA, 203 bp, Artificial sequence
  synthetic
ggcgcgccagtcctaagaacccgggtgtctttgatctcgggatcctgctgacgtaagcgaccctttgcggtttcggtctccccacctccaccgcacaccccatgaccatgcgggatgaccttcctctggtggatcgagatctggtcgacgaggccgccttcgggggggaggagggagaactgccgctgcgactcggaccgatg

SEQ ID NO: 3998 - DNA, 203 bp, Artificial sequence
  synthetic
ggcgcgccagtcctgggttgcctgtgtccggttcggcccccaccgcgtgcggcacgcacgaggacgagtccgcgtgctttattggcgttccaagcgttgccctccagtttctgttgtcggtgttcccccatacccacgcccacatccaccgtagggggcctctgggccgtgttacgtcgccgcccgcgcgactcggaccgatg

SEQ ID NO: 3999 - DNA, 203 bp, Artificial sequence
  synthetic
ggcgcgccagtcctctccagtttctgttgtcggtgttcccccatacccacgcccacatccaccgtagggggcctctgggccgtgttacgtcgccgcccgcgatggagcttagctacgccaccaccatgcactaccgggacgttgtgttttacgtcacaagggaccgaaaccgggcctactttgtgtgccgactcggaccgatg

SEQ ID NO: 4000 - DNA, 203 bp, Artificial sequence
  synthetic
ggcgcgccagtcctctggcactctgtcgataccccaccgagaccccattgggaccaatacgcccgcgtttcttccttttccccaccccaacccccaagttcgggtgaaggcccagggctcgcagccaacgtcggggcggcaagccctgccatagccacgggccccgtgggttagggacggggtccccccgactcggaccgatg

SEQ ID NO: 4001 - DNA, 203 bp, Artificial sequence
  synthetic
ggcgcgccagtcctgggtgaaggcccagggctcgcagccaacgtcggggcggcaagccctgccatagccacgggccccgtgggttagggacggggtcccccatggggaatggtttatggttcgtgggggttattattttgggcgttgcgtggggtcaggtccacgactggactgagcagacagacccacgactcggaccgatg

SEQ ID NO: 4002 - DNA, 203 bp, Artificial sequence
  synthetic
ggcgcgccagtcctcccgcttaacagcgtcaacagcgtgccgcagatcttggtggcgtgaaactcccgcacctcttcggccagcgccttgtagaagcgcgtatggcttcgtacccctgccatcaacacgcgtctgcgttcgaccaggctgcgcgttctcgcggccataacaaccgacgtacggcgttgcgactcggaccgatg

SEQ ID NO: 4003 - DNA, 203 bp, Artificial sequence
  synthetic
ggcgcgccagtcctcggcgggagccacccgacaacagcccccgggttttcccacgccagacgcgggtccgctgtgccatcgcgccccctcatcccaccccccatcttgtccccaaataaaacaaggtctggtagttaggacaacgaccgcagttctcgtgtgttattttcgctctccgcctctcgcagcgactcggaccgatg

SEQ ID NO: 4004 - DNA, 203 bp, Artificial sequence
  synthetic
ggcgcgccagtcctaaaaggtcataccccgtaaacggcgggctccagtcccggcccggcggttggcgtgaacgcaacggcgggagctgggttagcgtttagtttagcattcgctctcgcctttccgcccgccccccgaccgttgcgcctttttttttttcgtccaccaaagtctctgtgggtgcgcgccgactcggaccgatg

SEQ ID NO: 4005 - DNA, 203 bp, Artificial sequence
  synthetic
ggcgcgccagtccttacccggggggttgtcggtgaaggggagggattcattccccaaccccggtctccaaccctccccttgaccgtcgccgcccccccccggattttgacgctcgggagacataccttgtcgggcgtccgtcgtcgtgccgggattacctccgttcggggaccgattgacaaaaggaccgactcggaccgatg

SEQ ID NO: 4006 - DNA, 203 bp, Artificial sequence
  synthetic
ggcgcgccagtcctgattttgacgctcgggagacataccttgtcgggcgtccgtcgtcgtgccgggattacctccgttcggggaccgattgacaaaaggacatggagacaaagcccaagacggcaaccaccatcaaggtcccccccgggcccctgggatacgtgtacgctcgcgcgtgtccgtccgaacgactcggaccgatg

SEQ ID NO: 4007 - DNA, 203 bp, Artificial sequence
  synthetic
ggcgcgccagtcctacacctatcacgtgactggccgtcaggagctcggcgcagagagcctcgttaagagccaggaggctgggatcgaaggccacatacgcgcgctcgaacgcccccgccttccagctgctgccgggggactcttcgcacaccgcgacgctcgccaggaccccggggggcgaagttgcccgactcggaccgatg

SEQ ID NO: 4008 - DNA, 203 bp, Artificial sequence
  synthetic
ggcgcgccagtcctggggctgacgcgcgtgctgttgggcgggacggttcgcgaaccctttggtgggtttacgcgggcacgcacgctcccatcgcgggcgccatggcgggactgggcaagccctacaccggccacccaggtgacgccttcgagggtctcgttcagcgaattcggcttatcgtcccatctcgactcggaccgatg

SEQ ID NO: 4009 - DNA, 203 bp, Artificial sequence
  synthetic
ggcgcgccagtcctcctaatcgccagtgcgttccggacgccttcgccccacacagccctcccgaccgacacccccatatcgcttcccgacctccggtcccgatggccgtcccgcaatttcaccgccccagcaccgttaccaccgatagcgtccgggcgcttggcatgcgcgggctcgtcttggccacccgactcggaccgatg

SEQ ID NO: 4010 - DNA, 203 bp, Artificial sequence
  synthetic
ggcgcgccagtcctacttaagtggccgtataacaccccgcgaagacgcggggtactcgcaacgcctgcgggggtcctggagggccgcgggggatcgataattcgccgctccctacagcgcacgacagtcattcccgcccggtctcgtcgttggtctacgctgtcccccacccacgcgagccgggcgtccgactcggaccgatg

SEQ ID NO: 4011 - DNA, 203 bp, Artificial sequence
  synthetic
ggcgcgccagtccttcgccgctccctacagcgcacgacagtcattcccgcccggtctcgtcgttggtctacgctgtcccccacccacgcgagccgggcgtcatggcagaccgcggtctcccgtccgaggcccccgtcgtcacgacctcacccgcgggtccgccctcggacggacctatgcagcgcctacgactcggaccgatg

SEQ ID NO: 4012 - DNA, 203 bp, Artificial sequence
  synthetic
ggcgcgccagtcctcgtccctccccggtttcctttgcgctcccgccttccggacctgctctcgcctactcttctttggctctcggtgcgattcgtcaggcagcggccttgtcgaatctcgaccccaccactcgccggacccgccgacgtcccctctcgagcccgccgaaacccgccgcgtctgttgaacgactcggaccgatg

SEQ ID NO: 4013 - DNA, 203 bp, Artificial sequence
  synthetic
ggcgcgccagtcctgcggccttgtcgaatctcgaccccaccactcgccggacccgccgacgtcccctctcgagcccgccgaaacccgccgcgtctgttgaaatggccagccgcccagccgcatcctctcccgtcgaagcgcgggccccggttgggggacaggaggccggcggccccagcgcagccacccgactcggaccgatg

SEQ ID NO: 4014 - DNA, 203 bp, Artificial sequence
  synthetic
ggcgcgccagtcctcatgagctgcgcgctgtgaccgacaaaccccctccgcgccaggcccgccgccactgtcgtcgccgtcccacgctctcccctgctgccatggattccgcggccccagccctctcccccgctctgacggcccttacggaccagagcgcgacggcggacctggcgatccagattccacgactcggaccgatg

SEQ ID NO: 4015 - DNA, 203 bp, Artificial sequence
  synthetic
ggcgcgccagtcctccgcgtggagttgggccatcgaaattataaagagcgtcccctaacggattattgtcctcttgtgtcggtgttgttgtctgggtcaccatacacagagagacaggctcgggtgtccgggaccgtcgcaccaaccacgccttagttaggccgatccgcagttacaattgacctgaccgactcggaccgatg

SEQ ID NO: 4016 - DNA, 203 bp, Artificial sequence
  synthetic
ggcgcgccagtcctatacacagagagacaggctcgggtgtccgggaccgtcgcaccaaccacgccttagttaggccgatccgcagttacaattgacctgacatgggtttgttcgggatgatgaagtttgcccacacacaccatctggtcaagcgccggggccttggggccccggccgggtacttcacccgactcggaccgatg

SEQ ID NO: 4017 - DNA, 203 bp, Artificial sequence
  synthetic
ggcgcgccagtcctgtttctggctcggtgagcgagggtccggttgcttgggtcccctggctgccatcaaaaccccaccctcgcagcggcatacgccccctccgcgtcccgcacccgagaccccggcccggctgccctcaccaccgaagcccacctcgtcactgtggggtgttcccagcccgcgttgggcgactcggaccgatg

SEQ ID NO: 4018 - DNA, 203 bp, Artificial sequence
  synthetic
ggcgcgccagtcctcgcgtcccgcacccgagaccccggcccggctgccctcaccaccgaagcccacctcgtcactgtggggtgttcccagcccgcgttgggatgacggattcccctggcggtgtggcccccgcctcccccgtggaggacgcgtcggacgcgtccctcgggcagccggaggagggggcgcgactcggaccgatg

SEQ ID NO: 4019 - DNA, 203 bp, Artificial sequence
  synthetic
ggcgcgccagtcctcccgttacctttttaatatctatatagtttggtcccccctctatcccgcccaccgctgggcgctataaagccgccaccctctcttccctcaggtcatccttggtcgatcccgaacgacacacggcgtggagcaaaacgcctccccctgagccgctttcctaccaacacaacggccgactcggaccgatg

SEQ ID NO: 4020 - DNA, 203 bp, Artificial sequence
  synthetic
ggcgcgccagtcctctcaggtcatccttggtcgatcccgaacgacacacggcgtggagcaaaacgcctccccctgagccgctttcctaccaacacaacggcatgcctctgcgggcatcggaacacgcctaccggcccctgggccccgggacaccccccatgcgggctcggctccccgccgcggcctggcgactcggaccgatg

SEQ ID NO: 4021 - DNA, 203 bp, Artificial sequence
  synthetic
ggcgcgccagtcctattcgcgcacccgccgctgtgtagggcgacaggatttgggacctaccaacggaacgtctggacggaccccggttctgccgccggacgatgaagcgggcctgcagccgaagcccctcaccacgccgccgcccatcatcgccacgtcggaccccaccccgcgacgggacgccgccacgactcggaccgatg

SEQ ID NO: 4022 - DNA, 203 bp, Artificial sequence
  synthetic
ggcgcgccagtcctaacacctcggccttctagggcacccacgaattggtactattacaaactccctggtcttaccaatcagcggtggaaaggacctttgcaatctctccaggaagctgcaggagcagccttactctcgatagacggctcccctcagtggatcccgtggcggctcctgaaaaagactgtcgactcggaccgatg

SEQ ID NO: 4023 - DNA, 203 bp, Artificial sequence
  synthetic
ggcgcgccagtcctacccagccacttcgggtccttgttctctccgggagagacaaacaagtgggggctcgtccgggatacctacccctgccctctcgcattatgggacaaacctacggcctctcgtccagcccaatccccaaggcccccagggggttatcaacccaccattggttaaacttcctccaacgactcggaccgatg

SEQ ID NO: 4024 - DNA, 203 bp, Artificial sequence
  synthetic
ggcgcgccagtcctagccgaagccgcgccgcgtgtcttgtctgctgcagcatcgttctgtgttgtctctgtttgactgtttttctgtatttgtctgaaagcatgggccagactgttaccacccccttaagtttgactttagaccactggaaagatgtcgaacggacagcccacaaccagttggtggagcgactcggaccgatg

SEQ ID NO: 4025 - DNA, 203 bp, Artificial sequence
  synthetic
ggcgcgccagtcctctaggacaaaaccttttcaatccagttctagcctccaccccaacctcgtcacggagaatccaagaggcactggaggaggaacacccggacagcatacactcggtggagaccaggacatgcgggtcgatacttccggtattaagcccttatcctctttgtgccaatgtgccagggcgactcggaccgatg

SEQ ID NO: 4026 - DNA, 203 bp, Artificial sequence
  synthetic
ggcgcgccagtcctgacagcatacactcggtggagaccaggacatgcgggtcgatacttccggtattaagcccttatcctctttgtgccaatgtgccagggatgaccctggacgcagtgataacccactggaaatggcagaaccagtacagccctggtggaccgacagttctctggagccagagatcacgactcggaccgatg

SEQ ID NO: 4027 - DNA, 203 bp, Artificial sequence
  synthetic
ggcgcgccagtcctggtggtatctactggaaccttatagagttatctggaatccactaaagattggagaaggtcacaacaattggcgcccaacgtggggctcgagttttcttctgaccaagataactaagaggggagtgagaaggctcttgcttactatccctagggaactgaggcaccgtctcaggacgactcggaccgatg

SEQ ID NO: 4028 - DNA, 203 bp, Artificial sequence
  synthetic
ggcgcgccagtcctcgagttttcttctgaccaagataactaagaggggagtgagaaggctcttgcttactatccctagggaactgaggcaccgtctcaggaatggctcttaatgacttcgaccctatagctctccaggggtatttacccgcaccacgagttttgcaacataatgatattataatatgtcgactcggaccgatg

SEQ ID NO: 4029 - DNA, 203 bp, Artificial sequence
  synthetic
ggcgcgccagtcctgacagccaacccctggaaacgggaaccaaaacaggaatttcagccggggtcccgcccccgtcaacgagcaaagtcgcggacgtgggagaagcagccaaggaacaaacaacacaggaagttctgcggtccacagtgtgagattaacatctgctgctccacccatacccccacaagcgactcggaccgatg

SEQ ID NO: 4030 - DNA, 203 bp, Artificial sequence
  synthetic
ggcgcgccagtcctgaagcagccaaggaacaaacaacacaggaagttctgcggtccacagtgtgagattaacatctgctgctccacccatacccccacaagatgccggcactccgcccacttcaagtggaaatcaagggcaatcatcttaaaggctactgggactctggggctgaaatcacttgtgtccgactcggaccgatg

SEQ ID NO: 4031 - DNA, 203 bp, Artificial sequence
  synthetic
ggcgcgccagtcctacaaatatcatcaaccgcagtgtacatggtcctgtgaagatcgttgtgggcatcgttggaaggagtgcgggaattgtattccacaggatggctcctccgatgacgcttcagcagtggctgcagtggagatataacctagagacgaccaacctcttacagatgaaccctaaaatgcgactcggaccgatg

SEQ ID NO: 4032 - DNA, 203 bp, Artificial sequence
  synthetic
ggcgcgccagtccttgttttcagcatactagcctatgctaaaccggtcattattgggataatacttatcattttacttttgttagtcatcagaatattgagatggctagcggtggaacgccggagaaagcaagagtagcctgcagacgagtggatctctcctccttcttggcccagcccgatgactaccgactcggaccgatg

SEQ ID NO: 4033 - DNA, 203 bp, Artificial sequence
  synthetic
ggcgcgccagtcctcgcacatttagttcccagagggcgttgtcgtctccccctaagcaagggagaaacacgtggcacatgatcttgcgcttaacgataaaaatggaatctgataaaagtatggcctgtttaaatagaattttgatgaataagatgatgtttgtggaagataagatctctacccttaagcgactcggaccgatg

SEQ ID NO: 4034 - DNA, 203 bp, Artificial sequence
  synthetic
ggcgcgccagtcctgggggccgggcccactattgttgtgggctccgagttcctctagggatggccgaaaggcagccatggggccacccaggcggcgccgtgctacaggcggcaaggggaaaaatccttcgggtgaccccgggtggcattccctcccttagcagcatgagtgtggtggtagctgcaacccgactcggaccgatg

SEQ ID NO: 4035 - DNA, 203 bp, Artificial sequence
  synthetic
ggcgcgccagtcctcttattattttatacaacaatttatggtgacattgactgatactattgagttcgcccgcttgccattgaatattgccttgtattaccttatagcatttcaaaaagccacagatctcaccctcgagctcattcactttgcagtttgtttgaatcgcatacacaagacatttgaaccgactcggaccgatg

SEQ ID NO: 4036 - DNA, 203 bp, Artificial sequence
  synthetic
ggcgcgccagtcctttatagcatttcaaaaagccacagatctcaccctcgagctcattcactttgcagtttgtttgaatcgcatacacaagacatttgaacatgggagcccagttgagcagaaatactgccgggagccacactactggaacctacgctaccggaggctcaaccattaattataacaaccgactcggaccgatg

SEQ ID NO: 4037 - DNA, 203 bp, Artificial sequence
  synthetic
ggcgcgccagtcctcacgataaccacagccactgaaggcacggacgctgaagacacgagtgaggtcgacgtcatcaacgtcgtcgatccaataggataactatgttttcagactcagattcctcggacgaggaactaagcagaataattactgacattgacgagagcccccaggatatccagcaaagtcgactcggaccgatg

SEQ ID NO: 4038 - DNA, 203 bp, Artificial sequence
  synthetic
ggcgcgccagtcctgtcagcatatcatcaacaggttgtggaccagtggccttctacaagcctccccccaggcccagagcccggatcctggtgtatgcttagaaacccaaagaaatcatctaattgggaaggaccttttctgatcctcctctctacaccaacggcggtaaaagttgaaggacgaccaaccgactcggaccgatg

SEQ ID NO: 4039 - DNA, 203 bp, Artificial sequence
  synthetic
ggcgcgccagtcctaaacccaaagaaatcatctaattgggaaggaccttttctgatcctcctctctacaccaacggcggtaaaagttgaaggacgaccaacatggatacacctggatcattgcaagttattgcgatcatctctctcctcctcgttgggggggccagtcaaccagctactttcttagagcgactcggaccgatg

SEQ ID NO: 4040 - DNA, 203 bp, Artificial sequence
  synthetic
ggcgcgccagtcctttggccagctggtccaggagagggtgtacaggccgtcacaattaaggcctaagtggaggaagcctacaaaggtcttggaaatattgaatcctagaactgtgattatagtggaccatctaggccaacggaaatctgtgagtattgacaatttaaaacctacagcacaccagcatacgactcggaccgatg

SEQ ID NO: 4041 - DNA, 203 bp, Artificial sequence
  synthetic
ggcgcgccagtcctatcctagaactgtgattatagtggaccatctaggccaacggaaatctgtgagtattgacaatttaaaacctacagcacaccagcataatggaacaagaacatgtgatgaccctgaaggaatggatggaatggaatgctcacaaacaactacagaaacttcagtcgactcatcctcgactcggaccgatg

SEQ ID NO: 4042 - DNA, 203 bp, Artificial sequence
  synthetic
ggcgcgccagtcctactaatcaagacgccgtcgtgcagcccacaaaagtctagatacgtcacaggagagcatacgctaggtcgcgttgactatccttatatatgacctgcaaatataaacgaaaacactacaacaaaaatacaacagcaaatcctttcttttagttcggaaggtgaatccccgtcgtccgactcggaccgatg

SEQ ID NO: 4043 - DNA, 203 bp, Artificial sequence
  synthetic
ggcgcgccagtcctacaggtaggcagacagggaacctgagcaaccaggcaaagaagacacctagggatggaagacctccactagacaaagaccagtgcgcatactgtaaagagaagggccattgggcaagagaatgtccccgaaaaaaacacgtcagagaagccaaggttctagccctagataactagcgactcggaccgatg

SEQ ID NO: 4044 - DNA, 203 bp, Artificial sequence
  synthetic
ggcgcgccagtcctcccaaatctgggaccagatcaaagaggtgtataagcctggtaccgtaacaatccctcacccgttccaggtcggggatcaagtgcttgtcagacgccatcgacccagcagccttgagcctcggtggaaaggcccatacctggtgttgctgactaccccgaccgcggtaaaagtcgcgactcggaccgatg

SEQ ID NO: 4045 - DNA, 203 bp, Artificial sequence
  synthetic
ggcgcgccagtcctcggtcgcctcgccgccgtctctggtttctttttgtttcgtttctggaaagcctctgtgtcacagtctttctctcccaaatcatcaatatgggacaagataattctacccctatctccctcactctaaatcactggagagatgtgagaacaagggctcacaatctatccgtggaacgactcggaccgatg

SEQ ID NO: 4046 - DNA, 203 bp, Artificial sequence
  synthetic
ggcgcgccagtcctgtgttaaaaaactgcgtatgtttaaaacttaggaaccaagacagtgacaattggtcttggtattggacaattgttcaaggttccaaaatgagtgatatatttgacgaggcggctagtttcagaagctatcaatcgaaactcggtcgagatgggcgggcaagtgcggcaacagctcgactcggaccgatg

SEQ ID NO: 4047 - DNA, 203 bp, Artificial sequence
  synthetic
ggcgcgccagtcctgaccctggtgcaaggttatatatagagcccaattctcctaattaaacagtgtctcaggttgacaaatggacaagttggatctagtcaatgatggcctcgatattattgactttattcagaagaaccaaaaagaaatacaaaagacatacggacgatcaagcatccaacaaccaacgactcggaccgatg

SEQ ID NO: 4048 - DNA, 203 bp, Artificial sequence
  synthetic
ggcgcgccagtcctaatattctcatacctgtccattcaccttggacttaaagagagacaatcattcagccccgtccaagacacacctgagtggccagaaccatggattttagtgtgagtgataaccttgatgatccaatagaaggtgtttcagattttagtcccacctcatgggagaatggagggtatcgactcggaccgatg

SEQ ID NO: 4049 - DNA, 203 bp, Artificial sequence
  synthetic
ggcgcgccagtcctaatatcttggcaaacactacactaacctcgtctgtactgtctgaaagtggtcaggattgattgacagttattatttatctttaagcaatggctacacaagaggtcaggctaaagtgtttgctctgtgggatcatagttctggttttgtcattagaagggctagggatactacatcgactcggaccgatg

SEQ ID NO: 4050 - DNA, 203 bp, Artificial sequence
  synthetic
ggcgcgccagtcctaggcaggtaccccacctccgggtgggatctgagcctgggctaattgtctacgggtagtttcatttccaatccttttatgtcggagtcatggctgcaacacgggtttcacgatctgtgctcgctgctgtggctcactctgccgctcaccgcacctaccacactgtccttgactgccgactcggaccgatg

SEQ ID NO: 4051 - DNA, 203 bp, Artificial sequence
  synthetic
ggcgcgccagtcctaaccaagaacctcgagccacggtggaaaggaccacatatcgtcctcctgaccacccccacagccttaaaggtagacggagttgctgcctggattcacgcctctcacgtgaaagctgcaggaccaaccaccaatcaagacctctcggacagccccagctcagacgatccatcaagcgactcggaccgatg

SEQ ID NO: 4052 - DNA, 203 bp, Artificial sequence
  synthetic
ggcgcgccagtcctctggattcacgcctctcacgtgaaagctgcaggaccaaccaccaatcaagacctctcggacagccccagctcagacgatccatcaagatggaaagtccaacgcacccaaaaccctctaaagataagactctctcgtggaacttagcgtttctggtggggatcttattcacaatacgactcggaccgatg

SEQ ID NO: 4053 - DNA, 203 bp, Artificial sequence
  synthetic
ggcgcgccagtcctcccgacccccgggaccaccgacccaccatcaggaggtaagctggccggcgaccatacctgttgtccttgtataagtgtctctgtcaattgatctgattttggcggtgggatcgaaggagctgacgagctcgtacttcgcccccgcaaccctggaagacgttccacgggtgtctgcgactcggaccgatg

SEQ ID NO: 4054 - DNA, 203 bp, Artificial sequence
  synthetic
ggcgcgccagtcctcaggatggcaggccatgttccgctggatgcgcttccatgacctcggattgtggacaggagatcgcgatcttctgcccgaattcgtaaatgatgatggcgtctaaggacgctacatcaagcgtggatggcgctagtggcgctggtcagttggtaccggaggttaatgcttctgaccgactcggaccgatg

SEQ ID NO: 4055 - DNA, 203 bp, Artificial sequence
  synthetic
ggcgcgccagtcctgtgaatgatgatggcgtcaaaagacgtcgttcctactgctgctagcagtgaaaatgctaacaacaatagtagtattaagtctcgtctattggcgagactcaagggttcaggtggggctacgtccccacccaactcgataaagataaccaaccaagatatggctctggggctgatcgactcggaccgatg

SEQ ID NO: 4056 - DNA, 203 bp, Artificial sequence
  synthetic
ggcgcgccagtcctcaaagcataccctgatggtttcctcacttgtgtccccaatggggctagctcgggtccacaacagctgccgatcaatggggtctttgtctttgtttcatgggtgtccagattttatcaattaaagcctgtgggaactgccagctcggcaagaggtaggcttggtctgcgccgatacgactcggaccgatg

SEQ ID NO: 4057 - DNA, 203 bp, Artificial sequence
  synthetic
ggcgcgccagtcctagcaaaagcaggggaaaataaaaacaaccaaaatgaaggcaaacctactggtcctgttatgtgcacttgcagctgcagatgcagacacaatatgtataggctaccatgcgaacaattcaaccgacactgttgacacagtgctcgagaagaatgtgacagtgacacactctgttacgactcggaccgatg

SEQ ID NO: 4058 - DNA, 203 bp, Artificial sequence
  synthetic
ggcgcgccagtccttcaatccgaccttacttttcttaaaagtgccagcacaaaatgctataagcacaactttcccttataccggagaccctccttacagccatgggacaggaacaggatacaccatggatactgtcaacaggacacatcagtactcagaaaaggcaagatggacaacaaacaccgaaacgactcggaccgatg

SEQ ID NO: 4059 - DNA, 203 bp, Artificial sequence
  synthetic
ggcgcgccagtcctagtaaatcctgtgtgctaattgaggtgcattggtctgcaaatcgagttgctaggcaataaacacatttggattaattttaatcgttcgttgagcgattagcagagaactgaccagaacatgtctggtcgtaaagctcagggaaaaaccctgggcgtcaatatggtacgacgaggcgactcggaccgatg

SEQ ID NO: 4060 - DNA, 203 bp, Artificial sequence
  synthetic
ggcgcgccagtcctcattagtcgaggagtctcgagatgccatgtggacgagggcatgcccacggcacatcttaacccacgcgggggttgcatgggtgaaagcgctattcgtggcgttatggacacagcctgatagggtgtagcagagacctgctattccgctagtaaaaactctgctgtacatggcaccgactcggaccgatg

SEQ ID NO: 4061 - DNA, 203 bp, Artificial sequence
  synthetic
ggcgcgccagtcctgcttccccggcgtgtcagaatctcaaccggtcgtcagaaagaggacgtatcggaaactctgtgccattcatcatctgctggggcgggctcccgagattgcttgctcggcctgcgatctggtcaacgtggacctggatgactgtgtttctgagcaataaatgacttaaaccaggtcgactcggaccgatg

SEQ ID NO: 4062 - DNA, 203 bp, Artificial sequence
  synthetic
ggcgcgccagtcctgacaccacgtggccatttagggtatatatggccgagtgagcgagcaggatctccattttgaccgcgaaatttgaacgagcagcagccatgccgggcttctacgagatcgtgatcaaggtgccgagcgacctggacgagcacctgccgggcatttctgactcgtttgtgagctggcgactcggaccgatg

SEQ ID NO: 4063 - DNA, 203 bp, Artificial sequence
  synthetic
ggcgcgccagtcctcccggaagtggtgttttgcgatttcgaggccgggctcgatcctcacctttcattgtcgataggggacattttgacactacctggaaaatgtcgtctgtgctcaaagcatttgagcgattcacaatagaacaggaacttcaagacaggggtgaggagggttcaattccgccggagcgactcggaccgatg

SEQ ID NO: 4064 - DNA, 203 bp, Artificial sequence
  synthetic
ggcgcgccagtcctaaggccagcaccgaggatgctctgaatgatatcaagcgagacatcataagaagcgccatatgaactcaccaggaacaccagactcacgggaaaatccacaaactgaaagccacaatgattccctgtttaataaaaaataagcacgaacacaagtccaatccaaccatagcagcacgactcggaccgatg

SEQ ID NO: 4065 - DNA, 203 bp, Artificial sequence
  synthetic
ggcgcgccagtcctgaaaaaatcaagccagaacaagcttaggatcacaatacaacacagaaccccagctgctatcataactgttctctggccgctcgaaagatggagccctccaaactcttcacaatgtcagacaatgccacctttgcacctgggcctgttatcaatgcggctgacaagaagacattccgactcggaccgatg

SEQ ID NO: 4066 - DNA, 203 bp, Artificial sequence
  synthetic
ggcgcgccagtcctttgctagttaccagatgcaaggatctggtgggaagcgaagagcgaccgaacggaccatatctcccggtcatcagcctattcccaatcaacagccggagccccagagcagcttgtcaacagattctacacttctacaggacccaggagaaggacaatcatccagagatcatttggcgactcggaccgatg

SEQ ID NO: 4067 - DNA, 203 bp, Artificial sequence
  synthetic
ggcgcgccagtccttaccttcagcttattaacctatgccaaaccagtaattattggcatagttgttatcgttctccttatccttattattaggatattatcatggctagcagctcttggaccccgtcgccgtcgccgagaggacaaaggagaataaccagaaaagaactctgggaagtggacttatcccgactcggaccgatg

SEQ ID NO: 4068 - DNA, 203 bp, Artificial sequence
  synthetic
ggcgcgccagtcctagcagaagcacgcactttcttaaaatgtcgctgtttggagacacaattgcctacctgctttcactaatagaagatggagaaggcaaagcagaactagctgaaaaattacactgttggttcggtgggaaagaatttgacctagattctgctttggaatggataaaaaacaaaaggcgactcggaccgatg

SEQ ID NO: 4069 - DNA, 203 bp, Artificial sequence
  synthetic
ggcgcgccagtcctaaaaccttcatcatccttacgtcaattgaattctctagcactcgaagcttattgtcttcaatgtaaaagaaaagctggtctaacaagatgacaactagaacaaagggcaggggccatactgcggccacgactcaaaacgacagaatgccaggccctgagctttcgggctggatccgactcggaccgatg

SEQ ID NO: 4070 - DNA, 203 bp, Artificial sequence
  synthetic
ggcgcgccagtcctacagacattgcccttctaattaagaaaaaatcggcgatgaagattaagccgacagtgagcgtaatcttcatctctcttagattatttgttttccagagtaggggtcgtcaggtccttttcaatcgtgtaaccaaaataaactccactagaaggatattgtggggcaacaacacacgactcggaccgatg

SEQ ID NO: 4071 - DNA, 203 bp, Artificial sequence
  synthetic
ggcgcgccagtcctgttttccagagtaggggtcgtcaggtccttttcaatcgtgtaaccaaaataaactccactagaaggatattgtggggcaacaacacaatgggcgttacaggaatattgcagttacctcgtgatcgattcaagaggacatcattctttctttgggtaattatccttttccaaagacgactcggaccgatg

SEQ ID NO: 4072 - DNA, 203 bp, Artificial sequence
  synthetic
ggcgcgccagtccttccttgattctacaatcatgacagttgtctttagtgacaagggaaagaagcctttttattaagttgtaataatcagatctgcgaaccggtagagtttagttgcaacctaacacacataaagcattggtcaaaaagtcaatagaaatttaaacagtgagtggagacaacttttaacgactcggaccgatg

SEQ ID NO: 4073 - DNA, 203 bp, Artificial sequence
  synthetic
ggcgcgccagtcctcattctacaaacgccttactcgaggttccgtctcgtgtttgtgtggaagcaaagttctgtctttgtggaaaccagtaactgttcctaatggcctgcaaccgtgtgacacttgccgtagcaagtgattctgaaatttctgcaaatggctgttctactattgcgcaagccgtccgccgactcggaccgatg

SEQ ID NO: 4074 - DNA, 203 bp, Artificial sequence
  synthetic
ggcgcgccagtcctgttaaaatatataacgtatttttaaaacttaggaaccaagacaaacacttttggtcttggtattggatcctcaagaaatatatcatcatgagtgatatctttgaagaggcggctagttttaggagttatcaatctaagttagggagagatgggagggctagtgcagcaactgctcgactcggaccgatg

SEQ ID NO: 4075 - DNA, 203 bp, Artificial sequence
  synthetic
ggcgcgccagtcctcaaaggagagattgaatgcttttttggagatctagatcattactatatgtgtctcctataatcacatcataggagtgaaccataatacacatctttgggtaggggaaggaaagtattgttgacgtactgattgatctgcttgagtcaaataatcagtcataacaattcaagaaacgactcggaccgatg

SEQ ID NO: 4076 - DNA, 203 bp, Artificial sequence
  synthetic
ggcgcgccagtcctggctgccccgtcgtttccaagaccccataagccagccgacttctccagttacggagcgagcccctcttttgttttgttttttgccagatgcatcccgtactgcggcagatgcgcccccaccctccaccgcaacagcagccccctcctacgcaacagccggcgcttctgcctccgcgactcggaccgatg

SEQ ID NO: 4077 - DNA, 203 bp, Artificial sequence
  synthetic
ggcgcgccagtcctcctgaccggggccgggaccgagggggagagctactttgacatgggcgcggacctgcactggcagcccagccgccgggtcttggaagccgcggcggtcccttacgtagaagaggtggacgatgaggatgagggcgagtacctggaagactgatggcgcgaccgtatttttgctagcgactcggaccgatg

SEQ ID NO: 4078 - DNA, 203 bp, Artificial sequence
  synthetic
ggcgcgccagtcctcgcggcggtcccttacgtagaagaggtggacgatgaggatgagggcgagtacctggaagactgatggcgcgaccgtatttttgctagatgcagcaacagccacctcctgatcccgcaatgcgggcggcgctgcagagccagccgtccggcattaactcctcggacgattggacccgactcggaccgatg

SEQ ID NO: 4079 - DNA, 203 bp, Artificial sequence
  synthetic
ggcgcgccagtcctgattccgccgacgacagcagcgtgttggacttgggcgggagtggtggtggtaacccgttcgctcacctgcgcccccgcgtcgggcgcctgatgtaaaaagaaaccaaaaataaatggtactcaccaaggccatggcgaccagcgtgcgttcgtttcttctctgttgtatctagtcgactcggaccgatg

SEQ ID NO: 4080 - DNA, 203 bp, Artificial sequence
  synthetic
ggcgcgccagtcctctgatgtaaaaagaaaccaaaaataaatggtactcaccaaggccatggcgaccagcgtgcgttcgtttcttctctgttgtatctagtatgatgaggcgtgcgtacccggagggtcctcctccctcgtacgagagcgtgatgcagcaggcaatggcggcggcggcggcgatgcagcgactcggaccgatg

SEQ ID NO: 4081 - DNA, 203 bp, Artificial sequence
  synthetic
ggcgcgccagtcctacgccccaggcattaagtgccacacatgtgtgtttacttgaggtgatgtcagtatttatagggtgtggagtgcaataaaatatgtgttgactttaagtgcgtggtttatgactcaggggaggggactttgggtatataagcaggtgcagacctgtgtggttagctcagagcggtcgactcggaccgatg

SEQ ID NO: 4082 - DNA, 203 bp, Artificial sequence
  synthetic
ggcgcgccagtccttgtgcgcgtgcccgtgcgcacccgcccccctcgcacttgaagatgttcacttcgcgatgttgatgtgtcccagcggcgaggagaaggatgtccaagcgcaaattcaaggaagagatgctccaggtcatcgcgcctgagatctacggccccgcggcggcggtgaaggatgaaagacgactcggaccgatg

SEQ ID NO: 4083 - DNA, 203 bp, Artificial sequence
  synthetic
ggcgcgccagtcctaccgccgcggccgcgcgcctctgaccctgccgcgggcgcgctaccacccgagcattaccatttaactttgccgtcgcctttgcagatatggctctcacatgccgcattcgcgtccccattacgggctaccgaggaagaaaaccgcgccgtagaaggctggcgggaagcgggatgcgactcggaccgatg

SEQ ID NO: 4084 - DNA, 203 bp, Artificial sequence
  synthetic
ggcgcgccagtcctagcgccactgagacacacacttggaaattgtaataaacccgaatggactctgacgctcctggtcctgtgatgtgtttttgtagacagatggaagacatcaatttttcgtccctggctccgcgacacggcacgcggccgtttatgggcacctggagcgacatcggcaccagccaacgactcggaccgatg

SEQ ID NO: 4085 - DNA, 203 bp, Artificial sequence
  synthetic
ggcgcgccagtcctggcagagcactctgaacagcatcgtgggtctgggagtgcagagtgtgaagcgccgccgctgttattaaaaaacactgtagcgcttaacttgcttgtctgtgtatatgtgtatgtccgccgccgctgctgtccagaaggaggagtgaagagaaaggcgcgtcgtcgagttgcaagcgactcggaccgatg

SEQ ID NO: 4086 - DNA, 203 bp, Artificial sequence
  synthetic
ggcgcgccagtcctcttgcttgtctgtgtatatgtgtatgtccgccgccgctgctgtccagaaggaggagtgaagagaaaggcgcgtcgtcgagttgcaagatggccaccccatcgatgctgccccagtgggcgtacatgcacatcgccggacaggacgcttcggagtacctgagtccgggtctggtgcgactcggaccgatg

SEQ ID NO: 4087 - DNA, 203 bp, Artificial sequence
  synthetic
ggcgcgccagtcctccgcggcgtcattgaggccgtctacctgcgcacccccttctcagccggtaacgccaccacataaattcttgcttcttgcaagaagccatggccgcgggctccggcgagcaggagctcagggccatcatccgcgacctggggtgcgggccctacttcctgggcaccttcgataagcgactcggaccgatg

SEQ ID NO: 4088 - DNA, 203 bp, Artificial sequence
  synthetic
ggcgcgccagtcctccgcgatcgggggtgcgctcccggcggcgctctaactgacttcctccgcggccggccattgtgttctcctagggaacaacaacaagcatggagactcagccatcgtcgccaacctcgccatctgcccccaccgccgacaagaagcagcagcagaatgagagcttaaccgccccgcgactcggaccgatg

SEQ ID NO: 4089 - DNA, 203 bp, Artificial sequence
  synthetic
ggcgcgccagtcctcacccgcagttgtctgtatcacaagagcgaagaccaacttcagcgcacgcttgaggacgccgaggctctcttcaacaagtactgcgcactcactcttaaagagtagcccgcgcccgcccacacacggaaaaaggcgggaattacgtcacctgtgcacccccacccagcaccgctcgactcggaccgatg

SEQ ID NO: 4090 - DNA, 203 bp, Artificial sequence
  synthetic
ggcgcgccagtcctcccttctccggctcccccggccactatccggacgagttcatcccgaacttcgatgccatcagcgaatcggtagacggctacgattgaatgtcccatggtggcgcggctgacctagctcggcttcgacacctggaccactgccgccgctttcgctgcttcgctcgggacctcgcccgactcggaccgatg

SEQ ID NO: 4091 - DNA, 203 bp, Artificial sequence
  synthetic
ggcgcgccagtcctttgagctgtccgaggagcaccctcagggcccggcccacggagtgcggatcgtcgtcgaagggggcctagactcccacctgcttcgtatcttcagccagcgcccgatcctggtccagcgccaacagggcaacaccctcctgaccctttactgcatctgcaaccaccccggcctgccgactcggaccgatg

SEQ ID NO: 4092 - DNA, 203 bp, Artificial sequence
  synthetic
ggcgcgccagtcctacctgggaccgcaatgtccagggttagtagtcagcggcatcgtcggtgtgctttgtgggttagcagttataatcatctgcatgttcatttttgcttgctgctacagaaggcttcaccgacagaaatcagacccactgctgaacctctatgtttaatttttgattttccagagcccgactcggaccgatg

SEQ ID NO: 4093 - DNA, 203 bp, Artificial sequence
  synthetic
ggcgcgccagtcctcattgtgatcggggtggtcatcctagcgatgctgctctacttcatcttctgccgccgcatccccaacgcgaaaccggtctacaagcccatcgttatcgggcagccggagccgcttcaggtggagggaggtctaaggaatcttctcttctcttttacagtatggtgatttgaactcgactcggaccgatg

SEQ ID NO: 4094 - DNA, 203 bp, Artificial sequence
  synthetic
ggcgcgccagtcctcatcgttatcgggcagccggagccgcttcaggtggagggaggtctaaggaatcttctcttctcttttacagtatggtgatttgaactatgattcctagacagttctttatcattggtcttctctgcgcgctccaagtctgtgccaccctcgctctggtggctaatgcgagtccacgactcggaccgatg

SEQ ID NO: 4095 - DNA, 203 bp, Artificial sequence
  synthetic
ggcgcgccagtcctggtctttgtgcgcatcgcctacctgcgccaccacccccagtaccgcgaccaaagagtggcgcagctgctcaggctcatctgataagcatgcgggctttgctacttctcatgcttctactattgctagctcccctggtcgccccctttcccctcaaatcccccacccagtccccccgactcggaccgatg

SEQ ID NO: 4096 - DNA, 203 bp, Artificial sequence
  synthetic
ggcgcgccagtccttcggccagcctaagggacaacacccccaggggcttttcttggaatccatctgaagagacgaagggagggttgatgaagggcacggtcggtgcgttgtctgcatcgtagggatacacggggtcgaagccatcatccacccgcgcgcgctttttggacatctaatagaaataaaaacgactcggaccgatg

SEQ ID NO: 4097 - DNA, 203 bp, Artificial sequence
  synthetic
ggcgcgccagtcctggtgcgttgtctgcatcgtagggatacacggggtcgaagccatcatccacccgcgcgcgctttttggacatctaatagaaataaaaaatgaagattgagggacaggaggaatttgacatccccttcagagtgtggaggaagtttgcagcccgccggggcctgcagtaccagagccgactcggaccgatg

SEQ ID NO: 4098 - DNA, 203 bp, Artificial sequence
  synthetic
ggcgcgccagtcctccccggcgggctgcaaacttcctccacactctgaaggggatgtcaaattcctcctgtccctcaatcttcattttttatttctattagatgtccaaaaagcgcgcgcgggtggatgatggcttcgaccccgtgtatccctacgatgcagacaacgcaccgaccgtgcccttcatccgactcggaccgatg

SEQ ID NO: 4099 - DNA, 203 bp, Artificial sequence
  synthetic
ggcgcgccagtccttttccaccaacacagtgggggcgagaggtgccacctccgggacctgcattttgaagtgttccgagaccgtttggaataaagttaatcatggttcttcctgttcttccctcccccgccgtcaccgaaacccaacaaaattgcatcatctggctgggtttggcccattccaccgtgcgactcggaccgatg

SEQ ID NO: 4100 - DNA, 203 bp, Artificial sequence
  synthetic
ggcgcgccagtccttagagtgagtagtgttttggggagggagaggacctgcataaggggcagaatgattaaaatctgtgcttttctgtgtgttgcagcagcatgagcggaaacggctcctttgagggaggggtattcagcccttatctgacggggcgtctcccctcctgggcgggagtgcgtcaaaatcgactcggaccgatg

SEQ ID NO: 4101 - DNA, 203 bp, Artificial sequence
  synthetic
ggcgcgccagtccttgtggcttgcccttctcttgttcctggtggtcctatggctaaaaatttcggagaagatatgaatgagtacatacagttactgctaagggaggagcttagggattgcggcagagcaattgatattccacttgttaatctactacaggtgaaccaggagcagaatctgttggaattcgactcggaccgatg

SEQ ID NO: 4102 - DNA, 203 bp, Artificial sequence
  synthetic
ggcgcgccagtcctgaagtgcacgtatttttttagtgtgtcaccggtttctgggcgtgttggcgggtatttttagaccttggcctttacgtcagtgaggttagggctatatattgagtacagaagcgggcagttaggttagagctcagctttttctctgactcttgcgcctgccgtgctcggtaagctcgactcggaccgatg

SEQ ID NO: 4103 - DNA, 203 bp, Artificial sequence
  synthetic
ggcgcgccagtcctagggctatatattgagtacagaagcgggcagttaggttagagctcagctttttctctgactcttgcgcctgccgtgctcggtaagctatggacgctcaggttttgtatgtgtttctggagggagcgggggctttgctgcctgtgcagaaggggagtaattacattttttacgcacgactcggaccgatg

SEQ ID NO: 4104 - DNA, 203 bp, Artificial sequence
  synthetic
ggcgcgccagtcctcgcggcgtcccactcgaggaccgacccataaagtcggtttacggggacacggacagcctctttgtcacccagcggggacacgagctcatggagaccagaggtaagaaacgcatcaaaaagaacggcggaaaactggtttttgatcccaatcagcccgacctcacctggctcgtgcgactcggaccgatg

SEQ ID NO: 4105 - DNA, 203 bp, Artificial sequence
  synthetic
ggcgcgccagtcctgccgtgccaacggtcccattttagctggagggcgagatcaagggcgagctcaacgagccggtcgtccccggagagtttcatgaccagcatgaaggggacgagctgcttgccgaaggaccccatccaggtgtaggtttccacatcgtaggtgaggaagagcctttcggtgcgaggcgactcggaccgatg

SEQ ID NO: 4106 - DNA, 203 bp, Artificial sequence
  synthetic
ggcgcgccagtcctcatgaaggggacgagctgcttgccgaaggaccccatccaggtgtaggtttccacatcgtaggtgaggaagagcctttcggtgcgaggatgcgagccgatggggaagaactggatctcctgccaccagttggaggaatggctgttgatgtgatggaagtagaaatgccgacggcgcgactcggaccgatg

SEQ ID NO: 4107 - DNA, 203 bp, Artificial sequence
  synthetic
ggcgcgccagtcctatccctcaaggaagcagctggagcggctctcatcccagtaggtggaagccatctctggatcccgtggcgtctcctaaagaggggtatatgcccaagacccgaaagcaacgcagtcgccgacccagaaaccaaagaccatcaactccatgggtaagtccggtctttatttcagtccgactcggaccgatg

SEQ ID NO: 4108 - DNA, 203 bp, Artificial sequence
  synthetic
ggcgcgccagtccttgctgcctgcagcgaggcttggcccggggccaacgcctgtgagattacccagctcggagttgggcctcaagaaagtaagggctaaagctgctagccctaggggagaaagcaaacaggtgggggctcgtccgggatcgatcacctctctgtatctgcccttccccaatcagaacccgactcggaccgatg

SEQ ID NO: 4109 - DNA, 203 bp, Artificial sequence
  synthetic
ggcgcgccagtcctctgctagccctaggggagaaagcaaacaggtgggggctcgtccgggatcgatcacctctctgtatctgcccttccccaatcagaaccatgggaaagacttatagctctccggtaaaccctatccccaaagccccaaaagggctagcaattcaccactggctaaactttctccaacgactcggaccgatg

SEQ ID NO: 4110 - DNA, 203 bp, Artificial sequence
  synthetic
ggcgcgccagtccttagattcggtgccggtaacgattccagttttatactatctgatcattctctatctctattaaggatatttctagtctaaagttcaaaatgtcaagtgttttaaagacatttgaaagatttactatacaacaggagcttcaggagcaatctgatgacactccagtacctcttgagcgactcggaccgatg

SEQ ID NO: 4111 - DNA, 203 bp, Artificial sequence
  synthetic
ggcgcgccagtcctgacacaatagagaaaatctaggtccgaaagcttgcctctcagacagatcccaaaatcatagtccaaaccccaaacacagcagcagacatgcctataatatcattaccagcagatccaacttcacccagtcaatcccttactccgtttccaatacaacttgacaccaaagatggccgactcggaccgatg

SEQ ID NO: 4112 - DNA, 203 bp, Artificial sequence
  synthetic
ggcgcgccagtcctgatgttatcataggtccgaactgatcaatctaacaaaaaaactaaacgttccacaataaatcaacgttcaggccaaaatattcagccatgcatcacctgcatccaatgatagtatgcatctttgttatgtacactggaattgtaggttcagatgccattgctggagatcaactacgactcggaccgatg

SEQ ID NO: 4113 - DNA, 203 bp, Artificial sequence
  synthetic
ggcgcgccagtcctctcaaccagacaccaccagcatacacgaaaccaaccttcacagtggatacctcagcatccaaaactctccttcccgaatggatcaggatgccttcttttttgagagggatcctgaagccgaaggagaggcaccacgaaaacaagaatcactctcagatgtcatcggactccttgcgactcggaccgatg

SEQ ID NO: 4114 - DNA, 203 bp, Artificial sequence
  synthetic
ggcgcgccagtcctcttcccgaatggatcaggatgccttcttttttgagagggatcctgaagccgaaggagaggcaccacgaaaacaagaatcactctcagatgtcatcggactccttgacgtcgtcttatcctacaagcccacagaaattggagaagacagaagctggctccatggtatcatcgacacgactcggaccgatg

SEQ ID NO: 4115 - DNA, 203 bp, Artificial sequence
  synthetic
ggcgcgccagtcctccctacatgggtaacaactccaattaaaaaatcagatcaagtacattgtagcatacatacaacaatcaaatctatccacaacttcaccaatcaggtgtacaacaagtaagaaaaacttagggttaaagacaatccagtcaacctataaggcaacagcatccgattatacaaacgcgactcggaccgatg

SEQ ID NO: 4116 - DNA, 203 bp, Artificial sequence
  synthetic
ggcgcgccagtcctagttgatcctgccagcggtgggtcgctactgtttcgcgaaccagtcgttttgacagttggttgggatcaaatttgttctgtgcgcgtcacgccactttttgtggcgggaatgtgcgaaaataacaggaaaaagaaccctggaaagggttcaaagaagaaaaagaatgctggaagcgactcggaccgatg

SEQ ID NO: 4117 - DNA, 203 bp, Artificial sequence
  synthetic
ggcgcgccagtcctatggcggggaatttgaagaagaaatctgccaaacccaaggcccaaaggagaccacctcagggccgaggagggcaggtcaaacaaaaacccggtgctgctattgtgggagtcatgcattacgtgacccaccaggcgctgggcatgaagttaagtgggagacttaagaagttctggcgactcggaccgatg

SEQ ID NO: 4118 - DNA, 203 bp, Artificial sequence
  synthetic
ggcgcgccagtcctacctaacggtgttggggttacagcctgatagggtgctgcagaggcccacgaataggctagtataaaaatctctgctgtacatggcacatggagttgaacaagtttgaacttttatacaaaacaagtaaacaaaaaccagtgggggtgactgaacctatctacgactcagcgggtcgactcggaccgatg

SEQ ID NO: 4119 - DNA, 203 bp, Artificial sequence
  synthetic
ggcgcgccagtcctgtgctttagtcagtgtccgcagcgttctgttgaacgtgagtgtgttgagaaaaagacagcttaggagaacaagagctgggagtggttatgatgaccacttctaaaggaaaggggggcggtccccctaggcgcaagcttaaagtgaccgcaaataagtcgcgaccagcaacgagccgactcggaccgatg

SEQ ID NO: 4120 - DNA, 203 bp, Artificial sequence
  synthetic
ggcgcgccagtcctcagcgactgtgattgtggatattctttctgcaagttttgtcgtgaacgtgttgagaaaaagacagcttaggagaacaagagctgggaatggccgggaaggccgttctaaaaggaaagggggggggtccccctcgacgagcgtcgaaagtggccccaaagaagacgcgtcagttgcgactcggaccgatg

SEQ ID NO: 4121 - DNA, 203 bp, Artificial sequence
  synthetic
ggcgcgccagtcctcatccgtaatacaacccggaataacctccaaaccgagaagaactagtctatgaccagacgaaaaggaactagtccctgttcttttcttagggcctttttcacctgggtaaagtgtagttattgcgtataactctggtatcaataccacccggaagaaattatttatctgccatccgactcggaccgatg

SEQ ID NO: 4122 - DNA, 203 bp, Artificial sequence
  synthetic
ggcgcgccagtcctatagtctgtgtgacctgcaggcattttgtgaaaagggtaaagtatgaaagctactctcagaaaagtacttatgtattgatgagagccttaaaatgactttatattcacaaaactgctggaagacaatgatctggggtatcacattccctcttaggttaagtttcgcactactagcgactcggaccgatg

SEQ ID NO: 4123 - DNA, 203 bp, Artificial sequence
  synthetic
ggcgcgccagtcctttaaaatgactttatattcacaaaactgctggaagacaatgatctggggtatcacattccctcttaggttaagtttcgcactactaggaatttttgcgaaaattcttaattccattcttatggtgtagtgtttgttcttttcaattggggcgtatctctctttcgcagagaccccgactcggaccgatg

SEQ ID NO: 4124 - DNA, 203 bp, Artificial sequence
  synthetic
ggcgcgccagtcctacgggctgaaggatgccctgaaggtacccataggtaaccttaagcgactatggatctgatcaggggcccaccatgtaacacatgggtagaagtcttcggaccttgggttaaaaaacgtctaggcccgccccccacagggatgtggggtttcccttataaccccaatattgtatacgactcggaccgatg

SEQ ID NO: 4125 - DNA, 203 bp, Artificial sequence
  synthetic
ggcgcgccagtcctagaagtcttcggaccttgggttaaaaaacgtctaggcccgccccccacagggatgtggggtttcccttataaccccaatattgtataatggctgcatccaaaatgaatcccgttggcaacctgctctccacagtctcctcaaccgttggatctcttctacaaaacccctctgttcgactcggaccgatg

SEQ ID NO: 4126 - DNA, 203 bp, Artificial sequence
  synthetic
ggcgcgccagtcctcacgggttggggcttggccataggccatcggcgcatgcgtggaacctttgtggctcctctgccgatccatactgcggaactcctagcagcttgttttgctcgcagccggtctggagcgaaacttatcggaaccgacaactcagttgtcctctctcggaaatacacctcctttcccgactcggaccgatg

SEQ ID NO: 4127 - DNA, 203 bp, Artificial sequence
  synthetic
ggcgcgccagtcctctccacaacattccaccaagctctgctagatcccagagtgaggggcctatattttcctgctggtggctccagttccggaacagtaaaccctgttccgactactgcctcacccatatcgtcaatcttctcgaggactggggaccctgcaccgaacatggagagcacaacatcaggcgactcggaccgatg

SEQ ID NO: 4128 - DNA, 203 bp, Artificial sequence
  synthetic
ggcgcgccagtcctagactgggaggagttgggggaggagattaggttaaaggtctttgtactaggaggctgtaggcataaattggtctgttcaccagcaccatgcaactttttcccctctgcctaatcatctcatgttcatgtcctactgttcaagcctccaagctgtgccttgggtggctttggggccgactcggaccgatg

SEQ ID NO: 4129 - DNA, 203 bp, Artificial sequence
  synthetic
ggcgcgccagtccttgcccttggacaaaggcattaaaccgtattatcctgaatatgcagttaatcattacttcaaaactaggcattatttacatactctgtggaaggctggcattctatataagagagaaactacacgcagcgcctcattttgtgggtcaccatattcttgggaacaagagctacagccgactcggaccgatg

SEQ ID NO: 4130 - DNA, 203 bp, Artificial sequence
  synthetic
ggcgcgccagtcctgcatttggtccagggttcaccccaccacacggaggccttttggggtggagccctcaggctcagggcatattgacaacactgccagcagcacctcctcctgcctccaccaatcggcagtcaggaagacagcctactcccatctctccacctctaagagacagtcatcctcaggcccgactcggaccgatg

SEQ ID NO: 4131 - DNA, 203 bp, Artificial sequence
  synthetic
ggcgcgccagtccttccaatttggcctgttctgaactacaccatctactgctgtgaagaatgtcctgaaggcaagctggttacagccctgatcaggagccccgctcgtgactctcgatcgacgcggggtcaaaaactgtctaagcagcagcagaaacgcgggagcgtttctttttccttatttgtttccgactcggaccgatg

SEQ ID NO: 4132 - DNA, 203 bp, Artificial sequence
  synthetic
ggcgcgccagtcctcgctcgtgactctcgatcgacgcggggtcaaaaactgtctaagcagcagcagaaacgcgggagcgtttctttttccttatttgtttcatgatggcggcgtctaaggtatacagagtgtgcgagcagactctactagcaggcgctgttcggatgatggacaaattcttgcaaaagcgactcggaccgatg

SEQ ID NO: 4133 - DNA, 203 bp, Artificial sequence
  synthetic
ggcgcgccagtcctggttacagccctgatcaggagccccgctcgtgactctcgatcgacgcggggtcaaaaactgtctaagcagcagcagaaacgcgggagcgtttctttttccttatttgtttcatgatggcggcgtctaaggtatacagagtgtgcgagcagactctactagcaggcgctgttcggcgactcggaccgatg

SEQ ID NO: 4134 - DNA, 203 bp, Artificial sequence
  synthetic
ggcgcgccagtcctacagaagagcaagtactcctgactgggcaatgggactgcattgcatatccctaggcacctattgagatttctctggggcccaccagcatggagttcctgtatgggaatgcaggactggacttgtgctgcctgacagggtcgcggctggccgtctgtactttgtatagtcagttgcgactcggaccgatg

SEQ ID NO: 4135 - DNA, 203 bp, Artificial sequence
  synthetic
ggcgcgccagtcctaggttgggaaacctggactgggtctatactgcctgatagggtcgcggctggccgcctgtaactagtatagtcagttgaaaaccccccatggaatctactactactctttcattttgcaactggatccccaagaaacagagagcccgtgtgtaccttaccaccagtgtcacacaccgactcggaccgatg

SEQ ID NO: 4136 - DNA, 203 bp, Artificial sequence
  synthetic
ggcgcgccagtcctaagacaggtggaaatttttacgtagtagactgcagctgtttacctttcctaatgcatttcctgtaaatcagaaaggggatcccttgtatacactaaatgatgcaaactggaaatgcttcttccaaaggttgtgggctcggttagacttacacgagcaggacgaccaggaggacacgactcggaccgatg

SEQ ID NO: 4137 - DNA, 203 bp, Artificial sequence
  synthetic
ggcgcgccagtcctatgtacaaagcggtgatgatgatacatggaccaaggtgtctggccatgtggaccatgcaggactatactttacacacgaagggacacgtgtaacctatgttaggtttgcacaggaagcacagacatatgggaacactggcacctgggaggtgcatgtgggaggacagctaatttcgactcggaccgatg

SEQ ID NO: 4138 - DNA, 203 bp, Artificial sequence
  synthetic
ggcgcgccagtcctgtgtaacctatgttaggtttgcacaggaagcacagacatatgggaacactggcacctgggaggtgcatgtgggaggacagctaatttatgatgcattcgactcctctgtgtctagcacccaggacaccgaccaagaaccgctatcctctactagacctactgaccccccatacacgactcggaccgatg

SEQ ID NO: 4139 - DNA, 203 bp, Artificial sequence
  synthetic
ggcgcgccagtccttatatgtattgtatacacagtgtatgtagacacatgtagtgggtttgtgggtgtcatacatttattgggtgtggggtattcattatagtggtgtggtttggtgttttgtttttggctttttgtatggtttgtatttttcatttttttacattatattgctaaataaattttagtcgactcggaccgatg

SEQ ID NO: 4140 - DNA, 203 bp, Artificial sequence
  synthetic
ggcgcgccagtcctgtggtgtggtttggtgttttgtttttggctttttgtatggtttgtatttttcatttttttacattatattgctaaataaattttagtatgcatcgctctaaacgtcgcaagcgtgcctccgctacccaattatatcaaacctgcaaattggcaggtacctgtccctccgatgtgcgactcggaccgatg

SEQ ID NO: 4141 - DNA, 203 bp, Artificial sequence
  synthetic
ggcgcgccagtcctttcttgtaaatgggtccacatattatttgttgcccccattaggtttgctacctaaaaaacgtaaacgttttccatatttttttgcagatggcaatgtggaagcctagtgacaacaaggtatacctgcctcctgcccctgtgtccaaggtcctcagcaccgacgcctatgtatcccgactcggaccgatg

SEQ ID NO: 4142 - DNA, 203 bp, Artificial sequence
  synthetic
ggcgcgccagtcctacctacacaacctacagaaccagcacagcaagcatatagggtggtaacaagttgttgtaggtgttgctgtacagtaaggctggtggtggagagtggacacgcagaaataagacaactccaggagcttctgttgggcgcactgcatatagtgtgtccgctctgcgcataactgctcgactcggaccgatg

SEQ ID NO: 4143 - DNA, 203 bp, Artificial sequence
  synthetic
ggcgcgccagtcctcgatcctccgtaggaagcgttggtgtcttggacattgccgagttgaaaccttggtttccggctggaaaccacgtcgctcttcgtcaaatgacgaaaggcaaaatgaaaaacgcgaataaaaagaaagcaaaaaactctaagaccaatcctggtcgaagtggcagaagtaatggacgactcggaccgatg

SEQ ID NO: 4144 - DNA, 203 bp, Artificial sequence
  synthetic
ggcgcgccagtcctagaaaaagaggctgcagaacactttctaaatgtgagtgacgacagtcaaaatgattatgagtaattaaaaaagtgggacaagtcaaaatgtcattccctgaaggaaaagatattcttttcatgggtaatgaagcggcaaaattggcagaagctttccaaaaatcattaagaaaacgactcggaccgatg

SEQ ID NO: 4145 - DNA, 203 bp, Artificial sequence
  synthetic
ggcgcgccagtcctggagaaacttttgcccacatactaacaacatcacaaccatctcaagaaaagaaactgggcaaaacagcatccaagagacaaatagcaatggatcctcttaatgaatccactgttaatgtctatctccctgattcgtaccttaaaggagtaatttcttttagtgaaactaatgcacgactcggaccgatg

SEQ ID NO: 4146 - DNA, 203 bp, Artificial sequence
  synthetic
ggcgcgccagtcctgtgtcatcattgattgggaagatcaaggaaacaatttgttccaataatatcgtacatcttgactaagtcgaacaaggggaagtcgatatggatcgtgggaccagaagaatctgggtgtcgcaaaatcaaggtgatactgatttagattatcataaaattttgacagctggccttcgactcggaccgatg

SEQ ID NO: 4147 - DNA, 203 bp, Artificial sequence
  synthetic
ggcgcgccagtcctaattttaatctccagattaagaaaaagatatacgatgaagattaaggcgacaacgagccgaaacttcatctcttttaaagatctaacattatctgttccaaagtcatacaaggacacattcaaatcagggattgtaagctgctatttcttacctccccaaattacctatacaaccgactcggaccgatg

SEQ ID NO: 4148 - DNA, 203 bp, Artificial sequence
  synthetic
ggcgcgccagtcctgaagccacgttggtggtgcttgcagctgagaacaactccagagattgtaggtagaaaggaccaacatttataggtaggggtcagaaagcaacaataaccataaaaggagagcctgacattgctatttaatatcctagaacctgatttctaggttctagctttaaaatccggatgcgactcggaccgatg

SEQ ID NO: 4149 - DNA, 203 bp, Artificial sequence
  synthetic
ggcgcgccagtcctgtattaaaaattgatagcgcttgcgtaagagtaagatctcaagatggatcctgtatctgtagtacatagcttcgctaggagtcaaggcctgccacttaactttgaaactgtgggttgtgagggtccaagtcacgacccacgctttgtaattgaatgtaaatttcttgatttccacgactcggaccgatg

SEQ ID NO: 4150 - DNA, 203 bp, Artificial sequence
  synthetic
ggcgcgccagtcctgtattaaaattcagcaattgtccaatttaggaaacattctgtttaagagttgacaaggtctcaatgaataatggacaagcaacaattacaagaaatggaggaaggttcgaaatcaggtgtcgtcacttggaccgtgactacaccatgccactaccaaatgctactagtaatgatcgactcggaccgatg

SEQ ID NO: 4151 - DNA, 203 bp, Artificial sequence
  synthetic
ggcgcgccagtcctgtatttaaaattcatgtttttgcatcatggcgtgggttacgcaagcgtatagttcgggattgtcacagaacagtatcattagtctaacagggaatgacaggactgttgctgatggcacttttaattccatgattatgccaagagctgtaattgctaatgagcgtgaacattttacgactcggaccgatg

SEQ ID NO: 4152 - DNA, 203 bp, Artificial sequence
  synthetic
ggcgcgccagtcctaacaatggctaacttggtgtaatgcacaaagctggagccactatgaaaactgggcaataaactacacatttgatttccctggaataaatgcagatgccctccacccagatctccaaaccacccccattgtcccagacaccagtatcagcagcagtggtggtgaaagctctgaagcgactcggaccgatg

SEQ ID NO: 4153 - DNA, 203 bp, Artificial sequence
  synthetic
ggcgcgccagtcctgttgtcatgtaggagcctctaacccattttctgtgttaacttgtaaaaaatgtgcttacctgtctggattacaaagttttgtagattatgagtaaaaccactaacaaatggtgggaaagcagtgacaaatttgcccaggacgtgtataagcagtttgtgcaattttatgaaaaacgactcggaccgatg

SEQ ID NO: 4154 - DNA, 203 bp, Artificial sequence
  synthetic
ggcgcgccagtcctcattggacggtagcagatgaagaattgttaaaaaatataaaaaatgaaacagggtttcaagcacaagcagtaaaagattactttactttaaaaggtgcagctgcccctgtggcccattttcaaggaagtttaccggaagtgcccgcgtacaacgcctcagaaaaataccccagccgactcggaccgatg

SEQ ID NO: 4155 - DNA, 203 bp, Artificial sequence
  synthetic
ggcgcgccagtcctcacaaagtgggccaattggaggtattaaatccatgggaattactactttagttcaatatgctgtgggaataatgacagttaccatgacctttaaattgggacctcgaaaggctactggaaggtggaatccccagcctggcgtttatcctcctcatgcagctggtcatttaccatcgactcggaccgatg

SEQ ID NO: 4156 - DNA, 203 bp, Artificial sequence
  synthetic
ggcgcgccagtcctcgcaccgaggatcctaggcattaaggctatcttatttaattgtctttaattgcctcttgtgtcttctgtgcccctacgggaccctatcccatagcgaactgttgctctagcagaccacatgttctgagggttctgaacatcatacctgcagctaaacatggaggaagacatagccgactcggaccgatg

SEQ ID NO: 4157 - DNA, 203 bp, Artificial sequence
  synthetic
ggcgcgccagtcctatcaagatggccgttggcagccccacgaaatctagattagtccgaatgtcctattttgattaggtggtcagataggtcagaaactcacctgctaattttcaagaaacacaaatgacacatgaacaacaacaaattttaactttctcttctgaaggtatgaccccatccactagtcgactcggaccgatg

SEQ ID NO: 4158 - DNA, 203 bp, Artificial sequence
  synthetic
ggcgcgccagtccttctctgctctcactgccattctcaagtgttcacactgtccaagctcctttggttgttcgcttccacttgccactgtcaactcttgtcatggacccctcaaacttcaagctcttctccatctcccaccgcactgctaagcgctggtcgtggcgcagattccgtgtggagacacgtcgactcggaccgatg

SEQ ID NO: 4159 - DNA, 203 bp, Artificial sequence
  synthetic
ggcgcgccagtcctacaagccctatatttacttgttgcattttactcgtcagaagaaatcacagagtatcatttggatttgttactcacattaaggacaagatgggtatgcaaatgagtaagaacaccgctgggtctcacaccactgtgacccaagccagtggaggctcccacataaattacaccaaccgactcggaccgatg

SEQ ID NO: 4160 - DNA, 203 bp, Artificial sequence
  synthetic
ggcgcgccagtcctgagggactgtataagccctcgaaaaaagggatgcttcaagtgtggagatctaggacacataatgagaaattgcccaaagatggtgaattttttagggaataccccctggggcagtggcaaacccaggaacttcccggcgatgccattgaccccaacggcccctccaatgccaggcgactcggaccgatg

SEQ ID NO: 4161 - DNA, 203 bp, Artificial sequence
  synthetic
ggcgcgccagtcctatgcatagaacactggcatgacagacatcagagaagcttaagctatgcaaagtatagatacctgctgttgatgaataaagcaatgtttactcacatgcaacaagaatgtccttgtagaagtgggcatccgagaggacctcctcctccagggatggtctaacctctgtgttacagcgactcggaccgatg

SEQ ID NO: 4162 - DNA, 203 bp, Artificial sequence
  synthetic
ggcgcgccagtcctatccaaagtataaatatctgcatagtagaattaaagcatttgagtttgtaaataagtttccatttaaggacgatggcagtcccttgtttgaacttactgaccaaagctggaaatctttttttcaaaggctttggaggcaattagatctaagtgaccaagaagacgagggtgaggcgactcggaccgatg

SEQ ID NO: 4163 - DNA, 203 bp, Artificial sequence
  synthetic
ggcgcgccagtcctatatatattttgaagatgacgaaggcaactggcaaaagactgagggacatttggactatcatggtgcctattttatggatggattaaataaacaatactatatcagatttgctcaagacgcacgcagatttagtgaaactggagaatgggaagttaagtttaacaacgaaatttcgactcggaccgatg

SEQ ID NO: 4164 - DNA, 203 bp, Artificial sequence
  synthetic
ggcgcgccagtcctagagaaattggcagtttgtgcatcaggcattccttttgatagagttagaggagcttggaaggcagtgtgtaggttttgtacagagatatgattgggaaacaggctactataccagatattgtgctggatctgcaagaccttgtccagcccattgacctgcattgtgacgaagaccgactcggaccgatg

SEQ ID NO: 4165 - DNA, 203 bp, Artificial sequence
  synthetic
ggcgcgccagtcctcagaaaatcaggaggaggagcctgcacctcaaagaatagactacaagatagtttcctcgtgtggtggctgcggaattaagcttcgaatttttgcatcgtgtacccaatttggaattagaactctgcaagacctacttcttgaagaaatagcgttgctgtgtcctgactgcaaaacgactcggaccgatg

SEQ ID NO: 4166 - DNA, 203 bp, Artificial sequence
  synthetic
ggcgcgccagtcctaatttaaatatgttaataatgctgaagacaagtatttcgattattaacctctatatttctatataaagtatctgtgagtctcagtggacatcacagtaaggtcgcagttaacttgtaatcttttcattcctgtgtcggagcagtggtaatggagccggacgatttcgccaaaaccgactcggaccgatg

SEQ ID NO: 4167 - DNA, 203 bp, Artificial sequence
  synthetic
ggcgcgccagtcctagcagggttaataatcactcactgagtgacatcaacatcatggcgtcgcaaggcaccaaacgatcctatgaacagatggaaactggtggagaacgccagaatgccactgagatcagggcatctgttggaagaatggttggtggaattgggaggttttacgtacagatgtgcactcgactcggaccgatg

SEQ ID NO: 4168 - DNA, 203 bp, Artificial sequence
  synthetic
ggcgcgccagtcctggggaattccaaaagcaggtagatattgaaagatgagtcttctaaccgaggtcgaaacgtacgttctctctatcatcccatcaggccccctcaaagccgagatcgcgcagagacttgaggatgtttttgcagggaagaacacagatcttgaggctctcatggaatggctaaagacgactcggaccgatg

SEQ ID NO: 4169 - DNA, 203 bp, Artificial sequence
  synthetic
ggcgcgccagtcctaccacaaagatcaggtaattcgggttgttttgtttgtggacaacctggccatcgggctgcagtgtgccctcaaaaacaacaaaaccctgttaacactcctaatttgtgcccacgatgtaaaaaaggaaagcattgggcacgggattgccgttctaaaacggatgttcaaggtaacgactcggaccgatg

SEQ ID NO: 4170 - DNA, 203 bp, Artificial sequence
  synthetic
ggcgcgccagtccttttccttatacaggtgcattccttgtcagtgctggtcgcggcaggtggcgcccaacgtggggctcgacagttttcctcgccactactcttgtaaattggatagagtgagtatatgcgtgagtacgtaaattatattatagtggagtagtaaggtatattgttgagagtataaatcgactcggaccgatg

SEQ ID NO: 4171 - DNA, 203 bp, Artificial sequence
  synthetic
ggcgcgccagtcctgccccatctcccagttaatctatggggacgcgatatcttaagtaaaatgggtgtctatttatataatccttcacccaccgtaacagatttaatgttagatcaagggttactttcaaatcagggcttaggtaaacagcatcaaggtatcgtcttgccccttgatttaaaacctaacgactcggaccgatg

SEQ ID NO: 4172 - DNA, 203 bp, Artificial sequence
  synthetic
ggcgcgccagtccttttaatgttagatcaagggttactttcaaatcagggcttaggtaaacagcatcaaggtatcgtcttgccccttgatttaaaacctaatcaagaacgaagaggtttggggtgttttccctagggacctctgattctcctgtgacacatgccgaccccattgattggaaatctgggcgactcggaccgatg

SEQ ID NO: 4173 - DNA, 203 bp, Artificial sequence
  synthetic
ggcgcgccagtcctcatgtaaaaaaccacttgtacgatggaaggatccacttaccaatctgtggtatggaccagaccctgtattgatatggggacgagggcatgtttgtgtttttccacaggatgccgaagcaccgcgttggataccggaaaggctggtacgcgcggcagaggaattccctgacacatcgactcggaccgatg

SEQ ID NO: 4174 - DNA, 203 bp, Artificial sequence
  synthetic
ggcgcgccagtcctgcggcagggttggtggaaggaattgcccgcatcagccagtcgtgaacgtgttgagaaaaagacagcttaggagaacaagagctggggatggccgggaaggccattctgaaaggaaaggggggcggtccccctcgacgagtgtcgaaagagaccgctaagaagacgcgtcaacgccgactcggaccgatg

SEQ ID NO: 4175 - DNA, 203 bp, Artificial sequence
  synthetic
ggcgcgccagtcctcgcacatgtgatcctaggcgattcttgatcgcgcttattagctaaccaatttaatttggtgttgaagtgttgacacgctctctaacacatggggcagcttatcagcttctttcaggagattcctgtttttctacaggaagctctgaacatcgctttagtggctgttagtctcatcgactcggaccgatg

SEQ ID NO: 4176 - DNA, 203 bp, Artificial sequence
  synthetic
ggcgcgccagtcctgcacatgtgatcctaggcgattcttgatcgcgcttattagctaaccaatttaatttggtgttgaagtgttgacacgctctctaacacatggggcagcttatcagcttctttcaggagattcctgtttttctacaggaagctctgaacatcgctttagtggctgttagtctcatacgactcggaccgatg

SEQ ID NO: 4177 - DNA, 203 bp, Artificial sequence
  synthetic
ggcgcgccagtcctgcgcacagtggatcctaggcgtaactagatcaagttttgctgagtaaaattttaaacacattgagtatccgtgcaagacagcgcagagctccccacaatgggcaactgcaataagcctcccaagaggcctcccaacacacaaacatcatccaaccaaccctcagcagagttcagcgactcggaccgatg

SEQ ID NO: 4178 - DNA, 203 bp, Artificial sequence
  synthetic
ggcgcgccagtcctcgcacagtggatcctaggcggcacttgagcatggaggaatcagtaaatgaaataaaaagccttattagaaagcattttccagaaagacaggagctagcataccaaagggacatctttttatctcaacatcaccccagctctctgttgttggaagggttcaaacttctgtcaagtcgactcggaccgatg

SEQ ID NO: 4179 - DNA, 203 bp, Artificial sequence
  synthetic
ggcgcgccagtccttctacgtttctgctacacagtttggaattcgttctttagaagacttgctgctagaagaaccttctttgctgtgtcctgcttgcagaaatggcagataatagaggtattgatcctaaagaagggtgtagtaattggttttctcttgaagcagactgtagtgatttagatgatgatcgactcggaccgatg

SEQ ID NO: 4180 - DNA, 203 bp, Artificial sequence
  synthetic
ggcgcgccagtccttagaggttatttttgatgcagatcctgaaaatattatgttatacacatcctggcagttcatttactttgaagacactgatggacattggcaaaaaactgaagggcgtattgattatgctggtttatattatttggaagggcaattaagacattattacgtggaatttaaagtagcgactcggaccgatg

SEQ ID NO: 4181 - DNA, 203 bp, Artificial sequence
  synthetic
ggcgcgccagtccttggatattacatatcatatccagaaacaaggaatattccagaagttatatacactgagccagacacgactccaacaataataattcatacagaggatttcagtggtgattattatttacatccaagtttgagacgaagaaaaagaaaacgagcctatttgtaatttttttgcagcgactcggaccgatg

SEQ ID NO: 4182 - DNA, 203 bp, Artificial sequence
  synthetic
ggcgcgccagtccttgcgattgtaattattgtagttttgttgttatattttatggtggataatgttactaggctgcatgatgcttagaccataatctaaacatgtttttgatacttttaatttccttaccaacggcttttgctgttataggagatttaaagtgtacttcagatactagttatattaatcgactcggaccgatg

SEQ ID NO: 4183 - DNA, 203 bp, Artificial sequence
  synthetic
ggcgcgccagtccttaatagaggtaggcagttttatgagttttacaatgatgtaaaaccaccagtccttgatgtggatgacgtttaggtaatccaaacattatgagtagtaaaactacaccagcaccagtttatatctggactgctgatgaagctattaaattcctaaaggaatggaatttttctttgcgactcggaccgatg

SEQ ID NO: 4184 - DNA, 203 bp, Artificial sequence
  synthetic
ggcgcgccagtcctgctaaggttacacacctgtgcacatataagcgtggttttcttgacaggataagcgatactagtggttttgctgtttatgttaagtccaaagtcggtaattaccgactgccatcaacccaaaagggttctggcatggacaccgcattgttgagaaataatatctaaattttaaggcgactcggaccgatg

SEQ ID NO: 4185 - DNA, 203 bp, Artificial sequence
  synthetic
ggcgcgccagtcctggttttgagtttgattaagagtggtaggttgttgttacgcaataatggtcgttttggtggttttagtaatcatttagtctcaactaaatgaaacttttcttgattttgcttgttttgcccctggcctcttgctttttcacatgtaatagtaatgctaatctctctatgttacaacgactcggaccgatg

SEQ ID NO: 4186 - DNA, 203 bp, Artificial sequence
  synthetic
ggcgcgccagtcctgtgtaattgaaatttcgtcaagtttgtaaactggttaggcaagtgttgtattttctgtgtctaagcactggtgattctgttcactagtgcatacattgatatttaagtggtgttccgtcactgcttattgtggaagcaacgttctgtcgttgtggaaaccaataactgctaacccgactcggaccgatg

SEQ ID NO: 4187 - DNA, 203 bp, Artificial sequence
  synthetic
ggcgcgccagtcctgcgaacggagactacatgcaacaagtggtgaccccgacgtgatctgtctgctgagggtagctgcccggcatgcccgtgacgtggagaagagcctgtgaggtggcggcaggtcgcgcacggaagacgtattgcggttaagagcctgcgaggtggcggcaggtcgcatacgtaacacgactcggaccgatg

SEQ ID NO: 4188 - DNA, 203 bp, Artificial sequence
  synthetic
ggcgcgccagtcctgtccgagcacttttgcgtctgtaggcagaaataaacacgtcgcgagacctggtgtttgaccagcagggggaagacgcagtggtccgtcggtgtctgcgagagtacgttggcgactatatgagcagaatcatactctgttgcgaacagaacgagcgtcatcgtcgcgccggcacgcgactcggaccgatg

SEQ ID NO: 4189 - DNA, 203 bp, Artificial sequence
  synthetic
ggcgcgccagtcctctgaaaacgggagcgcggcagccgcgacagtaccagttgagagtcgattcggtcggttaacatcgtaagcatcgtggcggtggtgtgatggagtggaacacactagtattaggtcttttggttttatcggtagtggcaagttccaacaatacgtcgactgctagcacaccgcgtcgactcggaccgatg

SEQ ID NO: 4190 - DNA, 203 bp, Artificial sequence
  synthetic
ggcgcgccagtccttatcgggccctgtatacaagctcggtacacagccaaggtgcgggagactaggtcgtcttggaagccgatgcaacaacggtagatgagcagcaaaacgaccagaatcagcagtgagtacacgcaggcaaaccaaaccacaaggcagacggacggtgcggggtctcctcctctgtacgactcggaccgatg

SEQ ID NO: 4191 - DNA, 203 bp, Artificial sequence
  synthetic
ggcgcgccagtcctcagcaaaacgaccagaatcagcagtgagtacacgcaggcaaaccaaaccacaaggcagacggacggtgcggggtctcctcctctgtaatggggaaaaaagagatgataatggtgaaaggcattcctaaaattatgctcctgatctctataacgttcttgctcctttccctcatacgactcggaccgatg

SEQ ID NO: 4192 - DNA, 203 bp, Artificial sequence
  synthetic
ggcgcgccagtcctttcctgggatcctttctctccttctctcgggtgtaacgccaaccaccacctggatcacgccgctgaacccagcggcgcggccgcgctatgcggccaggcctcccctcctacctcatcatcctcgccgtctgtctcttcagccacctactttcgtcacgatatggcgcagaagcccgactcggaccgatg

SEQ ID NO: 4193 - DNA, 203 bp, Artificial sequence
  synthetic
ggcgcgccagtccttggactttgattttctgcgtctgccgcgcggtggcggtcaagtctggagcgtagtgcctagtttggttttttttcagcaaaaggccgatcgcccatctttttaccgggcttttcgctcgggccgtttcgacttgtgtaccgattctgttctggactatctgggacggcgtcaggcgactcggaccgatg

SEQ ID NO: 4194 - DNA, 203 bp, Artificial sequence
  synthetic
ggcgcgccagtcctatcgcccatctttttaccgggcttttcgctcgggccgtttcgacttgtgtaccgattctgttctggactatctgggacggcgtcaggatgagtctgttgcacaccttttggcggctacccgtcgccgtcttcttcgagccgcacgaggaaaacgtgctgcgctgccccgagcgccgactcggaccgatg

SEQ ID NO: 4195 - DNA, 203 bp, Artificial sequence
  synthetic
ggcgcgccagtcctttccaccacgtgtcgctcgctgcataaagggcgaacgtcctcggagagggtatattcgttcggcgagagcgggcggcggtggtgggtatgtccccttctgtggaggagactacctcagtcaccgagtccatcatgttcgctatcgtgagtttcaaacacatgggcccgttcgaacgactcggaccgatg

SEQ ID NO: 4196 - DNA, 203 bp, Artificial sequence
  synthetic
ggcgcgccagtcctcgcagtcaggccgccacgccggcggctggggcgcgcgttccctcttcgtccccgtcgcctccagtcgaaccgccatctcctgtacagccgcctgcgcttccagcgtcgccgtccgttcttcccgcggaatcaccgccgtcgctttctccctcggagccggcagaggcggcgtcccgactcggaccgatg

SEQ ID NO: 4197 - DNA, 203 bp, Artificial sequence
  synthetic
ggcgcgccagtcctacgcgcttaggacgactctataaaaacccacgtccactcagacacgcaacttttggccgccacacctgtcaccgctgctatatttgcgacagttgccggaacccttcccgacctcccacgaagacccgttcacctttgcgcatcccctgaccctccccccatcccgccttcgcacgactcggaccgatg

SEQ ID NO: 4198 - DNA, 203 bp, Artificial sequence
  synthetic
ggcgcgccagtcctgacagttgccggaacccttcccgacctcccacgaagacccgttcacctttgcgcatcccctgaccctccccccatcccgccttcgcaatgtctcaggcatcgtcctcgcccggtgagggaccctcgtcggaagcggccgcgatcagcgaggccgaagccgccagcggaagctttcgactcggaccgatg

SEQ ID NO: 4199 - DNA, 203 bp, Artificial sequence
  synthetic
ggcgcgccagtcctacggtggggctttgcctctttttttttgtaataaaaaaagacactcaataatccgcggttgtctctgtgtataacgtttttatttcgggttccgcgtttggtcgcctgcctatgtaaggcggcggccgcagagcgcgcgccgctcagtcgcctacacccgtacgcgcaggcagccgactcggaccgatg

SEQ ID NO: 4200 - DNA, 203 bp, Artificial sequence
  synthetic
ggcgcgccagtcctatttaactcgtgaggccgtccggtgaggaggacggcgacgaccgcaggttagcggcgagtcacctagacgcaaacgcgggcccggacgcgccacgctcgctctgacgccgcgcccggtgcagacgttgttcgtctccgcttctcctccgtcgcggccaggatttcaccgccgctcgactcggaccgatg

SEQ ID NO: 4201 - DNA, 203 bp, Artificial sequence
  synthetic
ggcgcgccagtcctgcgccacgctcgctctgacgccgcgcccggtgcagacgttgttcgtctccgcttctcctccgtcgcggccaggatttcaccgccgctatggcggccatggaggccaacatcttctgcactttcgaccacaagctcagcatcgccgacgtaggcaaactgaccaaactagtagcgcgactcggaccgatg

SEQ ID NO: 4202 - DNA, 203 bp, Artificial sequence
  synthetic
ggcgcgccagtcctcgaggcggcgcggcgcagcgccggccattctccgggtcgcgctgctttccccgagctccgacgcctcgcgctcacgccgccgccgcgatggagaactggtcggcgctcgagctcctgcctaaagtaggcattcccactgactttctgacgcacgtcaagaccagcgccggcgagcgactcggaccgatg

SEQ ID NO: 4203 - DNA, 203 bp, Artificial sequence
  synthetic
ggcgcgccagtcctgatccaccagacgttgtttcgattgtgctcggcggccgcagccacatcgggcctgtgttcatcccctcccccattgtgtgtgtcctcatcttcctccgtcccttctgtcccaacctccgtcagcgttgacggcagttctgaacccacgtcgccgcgagtgcggtttgcatcacgcgactcggaccgatg

SEQ ID NO: 4204 - DNA, 203 bp, Artificial sequence
  synthetic
ggcgcgccagtcctatcttcctccgtcccttctgtcccaacctccgtcagcgttgacggcagttctgaacccacgtcgccgcgagtgcggtttgcatcacgatgatggaagccgcggccgctgccgccgcggcgtttcgtccggaggagcgtccgacgccgggttggcacgacgcggcgttgttaatgcgactcggaccgatg

SEQ ID NO: 4205 - DNA, 203 bp, Artificial sequence
  synthetic
ggcgcgccagtcctgacgacaccactagggacgacgaagacgaacgagtgacggcgcccgtcccacaagccacgtccgcgacaacgtggttttcaggtggatcctccgtcgtcctcgcggacgccatctttttcctctcctctcgccgctgccgcctaacctccgctcgcaccaccgccgccgccatccgactcggaccgatg

SEQ ID NO: 4206 - DNA, 203 bp, Artificial sequence
  synthetic
ggcgcgccagtcctccgcttggaactggtcgcgtccgtgttcgagcacctgacggtggagtgcgtcaacgacatcctggacgcctgcagccacccggacgtgaacgtcgtggagacaagcaacacctgtcgtccctgcccttctcctgttccctccgcccccaaaactgtcagcgacgctcagacgtccgactcggaccgatg

SEQ ID NO: 4207 - DNA, 203 bp, Artificial sequence
  synthetic
ggcgcgccagtcctatagcacgttcctttttttttgtttttgcatcacttatcgccactatcagtgcaatattttgattgtgagactgaaagagtatcgttatgatgcttagaacgtggatatcattaccgatggtactgcttgacgcgtactgtttttgtatttttgtgagttgttcaatcagcacgcgactcggaccgatg

SEQ ID NO: 4208 - DNA, 203 bp, Artificial sequence
  synthetic
ggcgcgccagtcctgcctcgttgcacgagtgggccagcccgagttcggggtgcatcatctggtagcgcttgcggcacagcgccgccacattggtgaaggccgtggagatgcaggaggtggggtggctcttgcgcttctgcagctccgcgtagcgctcctggatcttggcggccgaatctccgcgcaaccgactcggaccgatg

SEQ ID NO: 4209 - DNA, 203 bp, Artificial sequence
  synthetic
ggcgcgccagtccttataacgcctttcggcgcaccaccagcataatctgcgaggaggaccttgacggtgactgccgtcaactgttccccgagtaacctggacgcggaacgtgacggttgccgaggggaaaggcgacagagaaggtacaaacccaccggcggggaaaatactgaggcgccgccatcatccgactcggaccgatg

SEQ ID NO: 4210 - DNA, 203 bp, Artificial sequence
  synthetic
ggcgcgccagtcctaagcgaactgggctgcgagttgctggccggcggtcgcgttttccactgcgaccacatcccgctcctgctcatcgtcacgcccgtggtctttgaccctcagtttacgcgccatgccgtctctaccgtgttagaccgttggagtcgcgacctgtcccgcaagacgaacctaccgatcgactcggaccgatg

SEQ ID NO: 4211 - DNA, 203 bp, Artificial sequence
  synthetic
ggcgcgccagtcctctttgaccctcagtttacgcgccatgccgtctctaccgtgttagaccgttggagtcgcgacctgtcccgcaagacgaacctaccgatatgggtgccgaactctgcaaacgaatatgttgtgagttcggtaccacgtccggtgagcccctgaaagatgctctgggtcgccaggtgcgactcggaccgatg

SEQ ID NO: 4212 - DNA, 203 bp, Artificial sequence
  synthetic
ggcgcgccagtccttcccatcgtagtatttaacgacccgcgagcctgtcgtcatccgcgcgcccccatcgcctcccgagcgagcgggccgccgctatcgccatggccccctcgcacgtggataaggtgaatacacggacatggagcgcttctatcgttttcatggtgctgacttttgtcaacgtcagccgactcggaccgatg

SEQ ID NO: 4213 - DNA, 203 bp, Artificial sequence
  synthetic
ggcgcgccagtcctgatagcggcggcccgctcgctcgggaggcgatgggcgcgcgccgatgacgacaggctcgcgggtcgttaaatactacgatgggagccgccgcggctcacgacgcggtttgagcacgtccgggcggtcggtgaaaaaagaccccgcgggccttcgcgactctcttctgtccgaggcgactcggaccgatg

SEQ ID NO: 4214 - DNA, 203 bp, Artificial sequence
  synthetic
ggcgcgccagtccttagaccgtctccgggacatcgcccgtcctctgaaataccgctatcaacgtcttgtcgctaccgtgtagctagttagccagctgtgtgtagttgtattttgcttttgcatatttgttttcagtcagagagtctgaaacggggtgggagggacttttgcgggtagtgcatgctaagcgactcggaccgatg

SEQ ID NO: 4215 - DNA, 203 bp, Artificial sequence
  synthetic
ggcgcgccagtccttagttgtattttgcttttgcatatttgttttcagtcagagagtctgaaacggggtgggagggacttttgcgggtagtgcatgctaagatgaacggatgggctggggtgtgcttgataactcactgtttgaatacgcgctcacgcacatatgtagcactcaacatgttagcttttcgactcggaccgatg

SEQ ID NO: 4216 - DNA, 203 bp, Artificial sequence
  synthetic
ggcgcgccagtcctcaggaacgcttgaaaggtccgcgccgcgccgcttgatcacggcagacgaggagcggcgcggcccagagcgtgtcggccgatttcgaaatggaggccctgatgatccgcggcgtgctggaggtccatacggatttcactagacagaatgtgatgatcatggagccgcaagtgctccgactcggaccgatg

SEQ ID NO: 4217 - DNA, 203 bp, Artificial sequence
  synthetic
ggcgcgccagtcctagcgcgcggaagggaaagaagggccaacggtcgacgcagggcacgcgcgtgccgccggcctcggacgaagcggcagcggcggcagaagaggagacggaggagtgaacggtcgccgttgccgcggcggtagttgcggcagaggggttgttatctgtcgttcgttcaacgcgactgcgactcggaccgatg

SEQ ID NO: 4218 - DNA, 203 bp, Artificial sequence
  synthetic
ggcgcgccagtccttcggccacgcgccgcaccgtgatggtgtcaaagagcgtcttgcacactccgtagagcagctgcttgcgcagcacgcacgggtcgcgcagcacctggtgcatgctctggccgcgacacgtccccagaaagccgtgcagcaaccgcaggaagctcatcgtctggcccgtggggaaacgactcggaccgatg

SEQ ID NO: 4219 - DNA, 203 bp, Artificial sequence
  synthetic
ggcgcgccagtcctaaaaaattgacaaaaacatcataacataaaggaccacctacctgggacgcgcagttgggcggcggattggggcggcatgctgcggcgatgctgtcggtgatggtctcttcctctctggtcctgatcgtcttttttctaggcgcttccgaggaggcgaagccggcaacgacgacgcgactcggaccgatg

SEQ ID NO: 4220 - DNA, 203 bp, Artificial sequence
  synthetic
ggcgcgccagtcctaacgtactgtttaaccacgttgcgtcgtgacgttgtttgtgggtgttgctaggcgggctggaaagatgatgtataaatagagtctgcgacggggttcggcgctctgccggctgcggcggcactcgctccacggcctccgacgagcgttgcgctcgcgctttgcgccgccgcgtccgactcggaccgatg

SEQ ID NO: 4221 - DNA, 203 bp, Artificial sequence
  synthetic
ggcgcgccagtcctcgctgctacgccacctagataaatactacgccggactgccgcccgagctgaagcagacgcgcgtcaacctgccggctcactcgcgctatggccctcaagcagtggatgctcgctaacattgctgataataaaggctctctgttaacccccgacgagcaggctcgcgtgttttgtcgactcggaccgatg

SEQ ID NO: 4222 - DNA, 203 bp, Artificial sequence
  synthetic
ggcgcgccagtccttaacgttttagggatcgaagacctgagtgccaacttttggcgccaactggctccttaccgtcacactctcatcgtgccgcagacttgatgtgccgccgcccggattgcggcttctctttctcacctggaccggtgatactgctgtggtgttgccttctgctgcccattgtttcccgactcggaccgatg

SEQ ID NO: 4223 - DNA, 203 bp, Artificial sequence
  synthetic
ggcgcgccagtcctggtctcgggcgccaccaagaaagacctgttcgacgccgtaaccctgtgcgcttccatcgtagaaaagcagccagacgtatttaatatcaacgtcagcttgttgacgtacccttcgatcgcggcgccccacttgccgctgtacaacgaattcaccagctttcgcctgcccacctccgactcggaccgatg

SEQ ID NO: 4224 - DNA, 203 bp, Artificial sequence
  synthetic
ggcgcgccagtcctcaacgtcagcttgttgacgtacccttcgatcgcggcgccccacttgccgctgtacaacgaattcaccagctttcgcctgcccacctcatgaagcggcggcggcgatggcggggctggttgcttttcctggccctgtgcttttgcttactgtgtgaagcggtggaaaccaacgcgcgactcggaccgatg

SEQ ID NO: 4225 - DNA, 203 bp, Artificial sequence
  synthetic
ggcgcgccagtccttgtgttgtttttatttcgctgacttctacggggtttcccctcagcctctgtgttcccaacccgtccccccgctgagcgttggcggcgatggtcatgttctcccaggaccacgtccagatcgtctacggctccacacgcatctgcaagtccctggccccggccaacaagagaaagcgactcggaccgatg

SEQ ID NO: 4226 - DNA, 203 bp, Artificial sequence
  synthetic
ggcgcgccagtccttggagctggacgtttaggcgtcacaagaggtgacgcgacctcctgccacatatagctcgtccacacgccgtctcgtcacacggcaacatgtgttccgtgctggcgatcgcgctcgtagttgcgctcttgggcgacatgcacccgggagtgaaaagtagcaccacaagcgccgtccgactcggaccgatg

SEQ ID NO: 4227 - DNA, 203 bp, Artificial sequence
  synthetic
ggcgcgccagtcctgtgatttcccgtgacagtattaacgtgtggtgagaatgctgtttaataaaagtagcttttttatacatctccgtctctggtctcctgatgtgggggtgcgggtggtcccggatacttgtccttctcctcctcatgtgtatggccctgatggcgagaggcacatacggggcttaccgactcggaccgatg

SEQ ID NO: 4228 - DNA, 203 bp, Artificial sequence
  synthetic
ggcgcgccagtcctaatcaacgtgaccgaggtgtcgttgctcatcagcgactttagacgtcagaaccgtcgcggcggcaccaacaaaaggaccacgttcaacgccgccggttcgctggcgccacacgcccggagcctcgagttcagcgtgcggctctttgccaactagcctgcgtcacgggaaataatcgactcggaccgatg

SEQ ID NO: 4229 - DNA, 203 bp, Artificial sequence
  synthetic
ggcgcgccagtcctgattcatcgtgcagtacctcaacacattgctgattacaatgatggcggcgatatgggctcgcgttttgataacctacctggtgtcgcggcgtcggtagaggcttgcggaaaccacgtcctcgtcacacgtcgttcgcggacatagcaagaaatccacgtcgccacgtctcgagacgactcggaccgatg

SEQ ID NO: 4230 - DNA, 203 bp, Artificial sequence
  synthetic
ggcgcgccagtcctggcgtcggtagaggcttgcggaaaccacgtcctcgtcacacgtcgttcgcggacatagcaagaaatccacgtcgccacgtctcgagaatgccggccccgcggggtccccttcgcgcaacattcctggccctggtcgcgttcgggttgctgcttcagatagacctcagcgacgttcgactcggaccgatg

SEQ ID NO: 4231 - DNA, 203 bp, Artificial sequence
  synthetic
ggcgcgccagtcctcgtcacttgtgtgatctgagacgtcatgctggtagcgtttatgagtcgggcggtggccggcacgccgcatttcctaacccgcgcagcatgttgcgcttgctgttcacgctcgtactgctggccctctagggaccgtctgtcgacgctagccgcgactatgtgcatgttcgactacgactcggaccgatg

SEQ ID NO: 4232 - DNA, 203 bp, Artificial sequence
  synthetic
ggcgcgccagtccttcacatcaaccggctattttttcggttagtcttagacgaggaacaacgcatttacgacgtagtgtctacaaatattgagttcggtgcctggccagtccctacggcctacaaagcctttctctggaaatacgccaagaaactgaattaccactactttagactgcgctggtgatccgactcggaccgatg

SEQ ID NO: 4233 - DNA, 203 bp, Artificial sequence
  synthetic
ggcgcgccagtccttcaaaatggctagacaaacgcaacgataacaggtggtataatgttaatgtaacaagacaaccggaacgagggccgggaaaaataactgtaaccctagtaggtctgaaggaataatatttagtatatattttaaacagacaagtttgttagagcagaaaatatcatgttttcaatcgactcggaccgatg

SEQ ID NO: 4234 - DNA, 203 bp, Artificial sequence
  synthetic
ggcgcgccagtccttactttttgccgacgtcaggaaaaataagctgtcgcctacataagagcccggtgctatcgtgctgtcactctttcttgttgccttcgatgtacggcgtcctggctcattactactccttcatcagtagtcccagcgttatggttaattttaagcatcataacgctgtgcagctgcgactcggaccgatg

SEQ ID NO: 4235 - DNA, 203 bp, Artificial sequence
  synthetic
ggcgcgccagtcctggctgactatcctgttctgtcctggaaaaactttcagcgtcgtaggtggactttgtagtatgcgggttagtgaagttatgtcatttatttacgtttacgatctcgtattacaaaccgcggagaggatgacaccgttcggccccatgagttatttttattcttccggtaggaggccgactcggaccgatg

SEQ ID NO: 4236 - DNA, 203 bp, Artificial sequence
  synthetic
ggcgcgccagtccttttacgtttacgatctcgtattacaaaccgcggagaggatgacaccgttcggccccatgagttatttttattcttccggtaggaggcatgaagcctctggtgatgctcatctgcttcggtgtgatattattgcagcttggggtgactaaagtgtgtcagcataatgaagtgcaacgactcggaccgatg

SEQ ID NO: 4237 - DNA, 203 bp, Artificial sequence
  synthetic
ggcgcgccagtcctagaggcagcaaaaaagacctgtaaaaaaaccggacgctcagttgcgggcatcccgggcgagaagctgcgtcgcacggtggtcaccaccacgccggcccgacgtttgagcggccgacacacggagcaggaacaggcgggcagcgtctctgcgaaaaagggaagaaaagaatcatccgactcggaccgatg

SEQ ID NO: 4238 - DNA, 203 bp, Artificial sequence
  synthetic
ggcgcgccagtcctcacgccggcccgacgtttgagcggccgacacacggagcaggaacaggcgggcagcgtctctgcgaaaaagggaagaaaagaatcatcatgtgccgccgggagtcgctccgaactctgccgtggctgttctgggtgctgttgagctgcccgcgactcctcgaatattcttcctctcgactcggaccgatg

SEQ ID NO: 4239 - DNA, 203 bp, Artificial sequence
  synthetic
ggcgcgccagtcctcggatatgttcggtttcaaactcactgtttgaatatagggacagtccctacggaacctgagaacatgtggaaatcacctgtggtagaatgctgttcaggtacattacctttcatcgcgaaaaggtactttacctaacggctgcatgcatctttggtgtctacatcagcctccaccgactcggaccgatg

SEQ ID NO: 4240 - DNA, 203 bp, Artificial sequence
  synthetic
ggcgcgccagtcctcctcgatggtcggacatcgaggaactcttggaaaaggcggtgcagagcgtcatgaaggacgccgagtcaatgcagatgacctgagaccgaaacagcgagcgcgtccgttgtacagttgtatagcagcacacgccttccctctttttcaccgcagctaagagagagaaagagagtcgactcggaccgatg

SEQ ID NO: 4241 - DNA, 203 bp, Artificial sequence
  synthetic
ggcgcgccagtcctcgaaacagcgagcgcgtccgttgtacagttgtatagcagcacacgccttccctctttttcaccgcagctaagagagagaaagagagtatgtcagtcaagggcgtggagatgccagaaatgacgtgggacttggacgttggaaataaatggcggcgtcgaaaggtcctgagtcgccgactcggaccgatg

SEQ ID NO: 4242 - DNA, 203 bp, Artificial sequence
  synthetic
ggcgcgccagtcctcgcccccggtgtgataaggaattttccgacttggctcacatctccttcctcagtgtttggacaataaacacattccttgccaaaaaatgacgtttccagaaatccaaggcataaatgtccgtacaccggcccttcccgacacggagtttgagattccaagcaggagagaagatccgactcggaccgatg

SEQ ID NO: 4243 - DNA, 203 bp, Artificial sequence
  synthetic
ggcgcgccagtcctgacggttcgtccacggagcaggagatctaccacacgcgactttaagtcacggaggaagttacgtgggtaggagggcaccgtgccccgaggcggcgacgggctagcgtataacaagccgcgcgacaacgggcgagcggcggtgagacacacgcgcgcacgtcggcggcgatagcccgactcggaccgatg

SEQ ID NO: 4244 - DNA, 203 bp, Artificial sequence
  synthetic
ggcgcgccagtcctccagcagcgcgcacgacgcgatcacggtaacccccatgactagacccacgcagatagccagccccgctagcgtatccagcgccatcccgttcgctcccgtcgtcgtctcctgaacaaagcaacaactccgcagtccccgttttcaaccgtttttgtttccttctccgcgagcaacgactcggaccgatg

SEQ ID NO: 4245 - DNA, 203 bp, Artificial sequence
  synthetic
ggcgcgccagtcctggggacgggggactcttgcggcggggacggggacgggggcctttcgcggcggacacggggaacacagacggcacgcacacgcagctcgcctcagcggtcgccctatcacaaccgccgctactctttattaacgtcttcatccccccgcttctacacgcaacgctgcatacagctcgactcggaccgatg

SEQ ID NO: 4246 - DNA, 203 bp, Artificial sequence
  synthetic
ggcgcgccagtcctgcctcagcggtcgccctatcacaaccgccgctactctttattaacgtcttcatccccccgcttctacacgcaacgctgcatacagctatgctcacactctatctcttcacagcgacatgttgcttcgtctgtgcactgccgcgacaagcacaagtggacaccgccatctgccaccgactcggaccgatg

SEQ ID NO: 4247 - DNA, 203 bp, Artificial sequence
  synthetic
ggcgcgccagtcctcgcgtgttattgtaggttcgttgccagatggcaagtgctgtcaacagcagacgttgtgggcggtcggtgtatttttgtgggttgcggtgagagtcggcactcggtgttttgtgagtgatctcaacagtttgtgttgcttttagcagcgtccaaaacagcgacgcgactttggggcgactcggaccgatg

SEQ ID NO: 4248 - DNA, 203 bp, Artificial sequence
  synthetic
ggcgcgccagtccttgagagtcggcactcggtgttttgtgagtgatctcaacagtttgtgttgcttttagcagcgtccaaaacagcgacgcgactttggggatggcctcgtgctcaccgccgcggagagtgtcgccggacctgctcgtcagcagcgagctacgcagacggaatatctggaggagagttcgactcggaccgatg

SEQ ID NO: 4249 - DNA, 203 bp, Artificial sequence
  synthetic
ggcgcgccagtcctcgacggagccgtccgcgtgtgtaaacggcgtggtcgctgacgcgggtttgcttcctatatagtggacgtcggaggtgtccggcggccatggcccagcgcaacggcatgtcgccgcgccccccgcccctcggtcgcggccgcggggccggagggccttcgggggttggttcctctcgactcggaccgatg

SEQ ID NO: 4250 - DNA, 203 bp, Artificial sequence
  synthetic
ggcgcgccagtcctaccgaaaggatccaagggggctttccaaagccgacgtccctgattcccttcataaagctgttgaccggccctagaaagaccaagagcatgctgtgggcccactgcggtcgcttcttgcgttatcatctgctcccgctgctactgtgtagactgccattcttactcttttttcagcgactcggaccgatg

SEQ ID NO: 4251 - DNA, 203 bp, Artificial sequence
  synthetic
ggcgcgccagtcctgttgagcggggtatgcgtgttcagttgggcggcaggggcatgcggccttagcggctcgggctggcgtgctgttttccgtgttgccgacggcggcggggtccgtcgagaccgggggaccgcggagcggaggaggtgacctggctgcttaatgacagcgacggagaggaagaagagcgactcggaccgatg

SEQ ID NO: 4252 - DNA, 203 bp, Artificial sequence
  synthetic
ggcgcgccagtcctcggcggcggggtccgtcgagaccgggggaccgcggagcggaggaggtgacctggctgcttaatgacagcgacggagaggaagaagagatggcgtccgggctcggtgacctctcggtcggcgtgtccagccttcccatgcgggaactggcctggcggcgggtagccgacgactcacgactcggaccgatg

SEQ ID NO: 4253 - DNA, 203 bp, Artificial sequence
  synthetic
ggcgcgccagtcctagtaccgtaacgcctcttttggcacgtagttgcctactacgtaggggaaacaacgtcaccaagaaacgctatatattcaaaaacaccgtgcagtccacacgctacttctcagcgaagcactgctgcagccagaccggagcggtgagcggagccgagcagcggaccttcggagcccgactcggaccgatg

SEQ ID NO: 4254 - DNA, 203 bp, Artificial sequence
  synthetic
ggcgcgccagtcctacgctctcgtcaggcttgtcatggtccgtaaaagctgcatgaaaaacacgacgaaagcgttcagtgttggatcagactcacgtcacacgttacatcatacaacgtagggcggtattgttgagaacatatataatcgccgtttcgtaagtacgtcgatatcgctccttcttcactcgactcggaccgatg

SEQ ID NO: 4255 - DNA, 203 bp, Artificial sequence
  synthetic
ggcgcgccagtcctcgttacatcatacaacgtagggcggtattgttgagaacatatataatcgccgtttcgtaagtacgtcgatatcgctccttcttcactatggacctcttgatccgtctcggttttctgttgatgtgtgcgttgccgacccccggtgagcggtcttcgcgtgacccgaaaacccttcgactcggaccgatg

SEQ ID NO: 4256 - DNA, 203 bp, Artificial sequence
  synthetic
ggcgcgccagtcctacgctgatgatggtggcagtgattcaagtgttttgggggctgtatgtgaaaggttggctgcaccgacattttccctggatgttttcggaccagtggtgatatatagactgaagcggagtgcatctcgagtcgctcggaaacgactcaccagactttttgctttaacccaaaacccgactcggaccgatg

SEQ ID NO: 4257 - DNA, 203 bp, Artificial sequence
  synthetic
ggcgcgccagtcctgaccagtggtgatatatagactgaagcggagtgcatctcgagtcgctcggaaacgactcaccagactttttgctttaacccaaaaccatgctacgccggggaagcctccggaaccctctggcgatctgcctgttgtggtggctgggagtggtggcggcagccacggaggagacgcgactcggaccgatg

SEQ ID NO: 4258 - DNA, 203 bp, Artificial sequence
  synthetic
ggcgcgccagtcctccccgtgacgtgcaagactacatgctataagatagccttacagcttttgagtctagacaggggaacagccttcccttgtaagacagaatgaatcttgtaatgcttattctagccctctgggccccggtcgcgggtagtatgcctgaattatccttgactcttttcgatgaacctcgactcggaccgatg

SEQ ID NO: 4259 - DNA, 203 bp, Artificial sequence
  synthetic
ggcgcgccagtccttgatcgtgctcagtcccaacctctggcgcctgccctggacgaccgtctttgccgccttcagatcctcgtattgcgaaggtggcggtggctcgtagccaccacccatcgtccccctttctctataaaacttgccgggtacctgaagccccgacgactgttcgtcgagcacccgtccgactcggaccgatg

SEQ ID NO: 4260 - DNA, 203 bp, Artificial sequence
  synthetic
ggcgcgccagtcctctacctggccaagctgggcacctatcatcattaccgggttgacaacggcacgctcagcgtcatcctcaacagcaccaccgcgacgttccagagcagggttgcttgagacccgctggtttataagaagactccaccgagacgctcacccgttcactcgggcgcatcacccgcctccgactcggaccgatg

SEQ ID NO: 4261 - DNA, 203 bp, Artificial sequence
  synthetic
ggcgcgccagtcctccagagcagggttgcttgagacccgctggtttataagaagactccaccgagacgctcacccgttcactcgggcgcatcacccgcctcatggacccgccgctgccgtcgctacattcgccgcaatgggcttccctcctgcagctgcaccacggccttatgtggctgcgccgttttcgactcggaccgatg

SEQ ID NO: 4262 - DNA, 203 bp, Artificial sequence
  synthetic
ggcgcgccagtcctgccgctggaacgcgcgcttttggcggccgtcaaggtgtttctcagcctggttttcactctgctgatggtgctgagaatcatgaccctgcgcacctttttgcaaacctacttttcctctgacaagctgtagcttcgagaccttgcggatacgccgccgggcgctgcggtcccgaccgactcggaccgatg

SEQ ID NO: 4263 - DNA, 203 bp, Artificial sequence
  synthetic
ggcgcgccagtcctgcgcacctttttgcaaacctacttttcctctgacaagctgtagcttcgagaccttgcggatacgccgccgggcgctgcggtcccgacatggagacagtttccacgcagcgggaaaccgcgtcgtcggaaacggagcgtaccagggaagccgcgtccgcggaaacgacggacgctcgactcggaccgatg

SEQ ID NO: 4264 - DNA, 203 bp, Artificial sequence
  synthetic
ggcgcgccagtcctaacgccgttgtccaccctctcgccctagattttcgttcggaactggttttcggacagagcagccgtttccagagaacgcagcgcaccatgagaagagaaaaagggtttcaagtacccaccgatggcacggtcatctacgtgccccccgggatccaagagacccggctggcgacccgactcggaccgatg

SEQ ID NO: 4265 - DNA, 203 bp, Artificial sequence
  synthetic
ggcgcgccagtcctacagaacaccgcaactcggtgttgtactcgtgttttttattcaacaataaagctttttcacgcttactcgagtgtgacgtgactttatgggggaacgccgtgtgggaatgacggtgattatattacactctataaacggtttctcatacgcgccttttgatagccaccgccgtccgactcggaccgatg

SEQ ID NO: 4266 - DNA, 203 bp, Artificial sequence
  synthetic
ggcgcgccagtcctgtaccatcttctgaggctctggttgtggagcccatgacgacgggtcggatacagggtgccgccacggtttgaccacactcgtgacgtcaatcaaatccgcggtaaccgggtgctgataagacggactgtttcatcgacgcctaccttagaccgacagcggtcgtaagcggcagccgactcggaccgatg

SEQ ID NO: 4267 - DNA, 203 bp, Artificial sequence
  synthetic
ggcgcgccagtcctacgggactttgacagccgccagtacgacggggaagtcctaatgcctataaaaccgcgcccgttttcacagcagccgcgcttgtcgccatgcttcatgtcgtcccgctagaatggaccgtcgaggaggtagtcccctacctagagaggctggcggtatggctgcgcgcctccgtccgactcggaccgatg

SEQ ID NO: 4268 - DNA, 203 bp, Artificial sequence
  synthetic
ggcgcgccagtcctctgctcagacgacggtcgctgcgacggtcgctgccacagcagcggcgtcgccccagttcgtctcctaatcgacgtgtccgcggcgtgaccacgtcaccgtgccccactcgctcgcttgtgtataagagaagggtaggtgcgccgcagcggctttgtgccgagaccgtcgccacccgactcggaccgatg

SEQ ID NO: 4269 - DNA, 203 bp, Artificial sequence
  synthetic
ggcgcgccagtcctcagccgcgattcgtctgacgctgctcctatattaagctttcgcgcagcgcgctttatccgactcgctgtcgagacggctttgccggcatgtccctactcaccaaagccgccgccgaagcctggggcacctatctccgacagcgcgacgagcgctgcgaagatgctatccgctgccgactcggaccgatg

SEQ ID NO: 4270 - DNA, 203 bp, Artificial sequence
  synthetic
ggcgcgccagtcctcggaggacgcggaataaaacgtgtcgcacaaagaactctctttctctgcttcttttctggggtgtctagctggcggcctcttttgacatgtggcgtacacgctgggaagacggagctcccacgtttacgcgaaacgatgaattcctctattgccacacgcgctacgaaacttttcgactcggaccgatg

SEQ ID NO: 4271 - DNA, 203 bp, Artificial sequence
  synthetic
ggcgcgccagtcctctttgcggtcgcacatgttccaaattacgtgagtctttgacgtcgatgtcagtcttttcgggtggtttacagaccggagctgccaaccgcagcccacgaacgacgtgaacaagccacgtcactgaagaaactccataaaataggctgccaagtgccgctccacgccgcggcacccgactcggaccgatg

SEQ ID NO: 4272 - DNA, 203 bp, Artificial sequence
  synthetic
ggcgcgccagtcctgccctgacctccctctgccacctgctgtgctactggtgttccgaatcgtaccggcgtctgaacaccgaagaggaaaacgaggcggcggaggaaactgccgcgggagaagcctctgcggtagcggcggcggccgtctctgaggaagagcagcagcgggagtaaacgaggagagcccgactcggaccgatg

SEQ ID NO: 4273 - DNA, 203 bp, Artificial sequence
  synthetic
ggcgcgccagtcctattataccgtaataaaaaagcgctacctcggccttttcatacaaaccccgtgtccgcccctcttttccccgtgcccgatatacacgatattaaacccacgaccatttccgtgcgattagcgaaccggaaaagtttatggggaaaaagacgtaggaaaggatcatgtagaaaaaccgactcggaccgatg

SEQ ID NO: 4274 - DNA, 203 bp, Artificial sequence
  synthetic
ggcgcgccagtcctggggcttcatgctgacgtaggtaccgactggggtcaaaagcctgggtacttatggggagcgcgcacaaaggaccgtcaggcgccggcatggagcgtcgccgaggtacggtaccgctgggatgggtgttttttgttctttgcttatctgcctcttccccgtgtgctgttgatctgcgactcggaccgatg

SEQ ID NO: 4275 - DNA, 203 bp, Artificial sequence
  synthetic
ggcgcgccagtccttagtgacggtacccacgctgctgttatatacgtcatccgacatcggtgacacagcttcagaaacaacgtgtgtggcgcacgctacttatggggaacccccggagcccgctcgatcgacggctacggttcaggaatgtaccgttcttaccgccccgaattgcggcatcgtcaacacgactcggaccgatg

SEQ ID NO: 4276 - DNA, 203 bp, Artificial sequence
  synthetic
ggcgcgccagtcctgctcctcctgcggttccctcgcagccccccgagtattcgtctgtgtttccgcctgtataaaaataaagagacgggaggctgatcgcggccttcagcgtctcatttgtctttactctcgagtgcggtcggtgtctcatcggtgagacgaggccgccgcccgacaagttcgatctccgactcggaccgatg

SEQ ID NO: 4277 - DNA, 203 bp, Artificial sequence
  synthetic
ggcgcgccagtcctgagagtaactgcagtctacgcacccacggcgtgtacacacggggtgaacaacactaatcgataagtcgcgtgtaggcgactggctacatcaaccggatatctgcggggatttaaaaagacgacccgttgtcatccggcttagagcaaaccgtccttttatcatcttccgtcgcccgactcggaccgatg

SEQ ID NO: 4278 - DNA, 203 bp, Artificial sequence
  synthetic
ggcgcgccagtcctccgtgacttggctgaacgttgaaacataaagccaaagcgccgtcggcacttggcttcagagcagcgcctcggggcgatgcgacggcgatgaacttagagcaactcatcaacgtccttggtctgctcgtctggattgccgctcgtgctgtcagccgcgttggtccgcatggctcccgactcggaccgatg

SEQ ID NO: 4279 - DNA, 203 bp, Artificial sequence
  synthetic
ggcgcgccagtcctgcgactgtgtcagcggctgcgcattcgcctgccgcatcgataccagcggttacgcaccgaggactgaacggataaccgcaaaggccacgtgcaacgttcacgctgctataagaaggccatgtcccccgtggacgggtctctttgacacgagcgcggcacgccgttgccacgagccgactcggaccgatg

SEQ ID NO: 4280 - DNA, 203 bp, Artificial sequence
  synthetic
ggcgcgccagtcctggtccctgatcacccgacagctaacaaacgctataacaccatgaccatcagcagtgtcctcctagccctgcttttatgcgctttgctattcgcgttcctgcactactttaccaccttgaaacaatacctacgtaacctggcctttgcgtggcgctatcgcaaggtccggtcgtccgactcggaccgatg

SEQ ID NO: 4281 - DNA, 203 bp, Artificial sequence
  synthetic
ggcgcgccagtcctattcgcgttcctgcactactttaccaccttgaaacaatacctacgtaacctggcctttgcgtggcgctatcgcaaggtccggtcgtcatgaccagcaacgccctgtatgagctgtttcgacgtcggttaccgcgtgcccccgtcaacacggtcatgtttctcacgcgacgcactcgactcggaccgatg

SEQ ID NO: 4282 - DNA, 203 bp, Artificial sequence
  synthetic
ggcgcgccagtcctcgggacgaaagacgacgtcaggggattcacggtatttagccatgcagcgtgcggcgcctctctcatggatccactgtcaccgtcgcgatgggaggtagccctgttccccagctcaccaccgtcactcaaggactcatgccatctgtgcgcatggactttcgggctcgccggccccgactcggaccgatg

SEQ ID NO: 4283 - DNA, 203 bp, Artificial sequence
  synthetic
ggcgcgccagtcctacatgacctcgagatgtcgtcacccaaggtatttaacggcacacagccagacgcgttcgtcagcagcgacgccgacaagacctcagcatggctcggaggctatggatcttgagcttactagccgtgaccttgacggtggctttggcggcaccttctcagaaatcgaagcgcaggcgactcggaccgatg

SEQ ID NO: 4284 - DNA, 203 bp, Artificial sequence
  synthetic
ggcgcgccagtcctgcgtgctcgtgaaaacgctgtcctccgcctcctcatccgccggcgtgtcctcgttgctcgaggggatataaatcaccgtcgagggttcgccagagcgacgtgacgagctgcgacgccgcgacgacatcctctcgtctgctgaggtgcgttcggctcagttgcttacctgcataccgactcggaccgatg

SEQ ID NO: 4285 - DNA, 203 bp, Artificial sequence
  synthetic
ggcgcgccagtcctcggccctcactatataacgtcccgcccgggtctcctccatgtatgcaggtaagcaactgagccgaacgcacctcagcagacgagaggatgtcgtcgcggcgtcgcagctcgtcacgtcgctctggcgaaccctcgacggtgatttatatcccctcgagcaacgaggacacgccgcgactcggaccgatg

SEQ ID NO: 4286 - DNA, 203 bp, Artificial sequence
  synthetic
ggcgcgccagtcctggcctcacgaggtcggaggtcacgccacatgaagccgcggcggcgcgttataagcaccgtggggtcatcgaccgacgaggcgcggcgatgacgagcaggcgcgcacccgacggcggtttgaatttagacgattttatgcgccgccagcgcggtcgccacctggatctgccctatcgactcggaccgatg

SEQ ID NO: 4287 - DNA, 203 bp, Artificial sequence
  synthetic
ggcgcgccagtcctctgtgatgactagctatatagccgctgtctggctttaccgccgtcgctccgcgtcgcttcgccgccaccttcttcttcctctcagtcatgaaccccgtggatcagccgccacctccaccgctaacccagcagccggaggagcaggctaaagaagaccatgacgacggtgacgagcgactcggaccgatg

SEQ ID NO: 4288 - DNA, 203 bp, Artificial sequence
  synthetic
ggcgcgccagtcctgtccgagacggtgtatataaaccgcgtcggcctcgccggcccgagcgcgccggggagaagaatctcttcccgggccctgcgttcaagacggcgtgccgtgacgctcgatgggtccgcttcatcagactgcgtacgctttggagcgtcagacccagggcgcatgtagccgacttgcgactcggaccgatg

SEQ ID NO: 4289 - DNA, 203 bp, Artificial sequence
  synthetic
ggcgcgccagtcctaagagattcttctccccggcgcgctcgggccggcgaggccgacgcggtttatatacaccgtctcggacggcgggacgccgagcccgcgccgcggccgctcatccggagacggcggaaaccgcggcgccggaggaaacggggaccggcaacgacggcggtggcggcgaccagattcgactcggaccgatg

SEQ ID NO: 4290 - DNA, 203 bp, Artificial sequence
  synthetic
ggcgcgccagtcctcagcggcgcccgggtgaaaaccgcgtatccgcctccgctattaaactaccccccctccctctaggtggggcgctcaccgtggtgttgtggatgatggtgtccatcgtggacgaatagcagaccgcgggcgcagtccggggcgacgacgcttccgggttctggagaaaagccagccgactcggaccgatg

SEQ ID NO: 4291 - DNA, 203 bp, Artificial sequence
  synthetic
ggcgcgccagtccttggatgatggtgtccatcgtggacgaatagcagaccgcgggcgcagtccggggcgacgacgcttccgggttctggagaaaagccagcatgagtttgcagtttatcggtctacagcggcgcgatgtggtagccctggtcaactttctgcgccatctcacgcaaaagcccgacgtgcgactcggaccgatg

SEQ ID NO: 4292 - DNA, 203 bp, Artificial sequence
  synthetic
ggcgcgccagtcctataaactgcaaactcatgctggcttttctccagaacccggaagcgtcgtcgccccggactgcgcccgcggtctgctattcgtccacgatggacaccatcatccacaacaccacggtgagcgccccacctagagggagggggggtagtttaatagcggaggcggatacgcggtttcgactcggaccgatg

SEQ ID NO: 4293 - DNA, 203 bp, Artificial sequence
  synthetic
ggcgcgccagtcctacgccgtccggcgcaacttctgtctcggcacggtacgataaaaacgacgtcccccgtcgacgttgttttctccgagcggtgatcgttcccgtccctctcctccctccgcggcccccacggcggcggcctgctcgcacggacctatactattaccgccccaccgccgtcgtcgtccgactcggaccgatg

SEQ ID NO: 4294 - DNA, 203 bp, Artificial sequence
  synthetic
ggcgcgccagtcctcccgtccctctcctccctccgcggcccccacggcggcggcctgctcgcacggacctatactattaccgccccaccgccgtcgtcgtcatgaacttcatcatcaccacccgagacttctccaacgacgattcagtcctgcgagccgccgagatgcgtgacaacgtggcaggctcgcgactcggaccgatg

SEQ ID NO: 4295 - DNA, 203 bp, Artificial sequence
  synthetic
ggcgcgccagtcctgaagttccagcacaaaaaacgacgttcattggatcgtctgacgtcaacgctgatagtgtctataaaggccgtgccgccgcgccgtagttctccgaaggcggacggaggagtctgtcgaccgcagcggtggctggagaagcgcagcgtcggcgagcgaaggtagaggagtccgtccgactcggaccgatg

SEQ ID NO: 4296 - DNA, 203 bp, Artificial sequence
  synthetic
ggcgcgccagtccttgcggaggcaccggttcctgtggcaacggcggcgacgagctcggctgctgcagcacaacggcccccagcagtctcaccagtaagcaggggtaaacaaaaaaaccacagactccgggatagtataagaagggactttaccgctattgctgctattcatagagaaggatagaaaggcgactcggaccgatg

SEQ ID NO: 4297 - DNA, 203 bp, Artificial sequence
  synthetic
ggcgcgccagtcctcatacgcaggggctggacgtggttaccggtcactggactcggtttcgctgtagctgtggttcaacctgaacatggctcccagagctgctaggaaccggtccagtcacattttttggtgggtggggggtactaaaaaagtatttaatattggggtttaatgataaaatccaggttcgactcggaccgatg

SEQ ID NO: 4298 - DNA, 203 bp, Artificial sequence
  synthetic
ggcgcgccagtcctcttgactgtaccatcattgctgctacggaataataactacgctacgacctggcctgtggtgtgtgttgttttttgtgcacgcacgacatgacactcttttgccgcaccgccaacagcaccgccggctacgtcgacatgaacgtctgcatcggcatgatcggcgtggtttgtttccgactcggaccgatg

SEQ ID NO: 4299 - DNA, 203 bp, Artificial sequence
  synthetic
ggcgcgccagtcctaaggggctctttgctcgaaggtgagccgcggacgccgtcggtaccgtctccaccacagttaccaccgtcgccgtcactgccaccgacatggagcccacgccgatgctccgcgaccgggatcacgacgacgcgccccccacctacgagcaggccatgggtctgtgcccgacgacgcgactcggaccgatg

SEQ ID NO: 4300 - DNA, 203 bp, Artificial sequence
  synthetic
ggcgcgccagtcctgaggaggaggcggcggtttggatcgcaactccggcaattacttcaacgacgcgaaagaggagagcgacagcgaggattctgtaacgttcgagttcgtccctaacaccaagaagcaaaagtgcggctagagcgtgggccgcgtgcctgggaacgtgcgcacggcgcggtcccgcgcgactcggaccgatg

SEQ ID NO: 4301 - DNA, 203 bp, Artificial sequence
  synthetic
ggcgcgccagtcctcagcgttcccggtcgtcgtgtgtgctctctataaaactttcgctcgctcgcgcccgctccttagtcgagacttgcacgctgtccgggatggatcgcaagacgcgcctctcggagccgccgacgctggcgctgcggctgaagccgtacaagacggctatccagcagctgcgatctcgactcggaccgatg

SEQ ID NO: 4302 - DNA, 203 bp, Artificial sequence
  synthetic
ggcgcgccagtccttcgaattgggagactttcgagaattcgtctgagcggcgctgacagcatacggggaggagacacagaagaaaaaaacacatcgcacacagactttataaaccgtagttgtcggcgccatctagactcactttattgaaatctacctgatttctttgttattttcctcgtaaacttcgactcggaccgatg

SEQ ID NO: 4303 - DNA, 203 bp, Artificial sequence
  synthetic
ggcgcgccagtcctagactttataaaccgtagttgtcggcgccatctagactcactttattgaaatctacctgatttctttgttattttcctcgtaaacttatgaatccggctgacgcggacgaggaacagcgggtgtcctcggtgcccgcacatcggtgccggccaggtaggattccaagccgcagccgactcggaccgatg

SEQ ID NO: 4304 - DNA, 203 bp, Artificial sequence
  synthetic
ggcgcgccagtccttgcctgggaacgctatggctataacgggaaagaaccggtttggcaacattccattgtggggggggggtacttatagcgtgcctagctatgacgttgatatatgtggatgcggataatactcgtaatgagctaaaagcgacgactgggagtaattttaccattacgcataggaaacgactcggaccgatg

SEQ ID NO: 4305 - DNA, 203 bp, Artificial sequence
  synthetic
ggcgcgccagtcctaactctaccaggccctcgggcacgaagaaacgcgccgtgagcgcctggtgatcggcgtggtagagatagcgaaccgatatagtatttacctcgcgtttggctttgagcgccgtcactagttcattgtcctcgtcggccgggtcgcgcggccgtttggccaccgcgcgcgcgtcccgactcggaccgatg

SEQ ID NO: 4306 - DNA, 203 bp, Artificial sequence
  synthetic
ggcgcgccagtcctccccgtaagccaggcgcagcaggacatcttgtcttcgatcgacccgcccgccggctcgacatcggtgtccctgccgccggcctcgccatgaaagtcacacaggccagctgccaccagggcgacatcgctcgctttggagcgcgagcgggcaatcaatgcgtctgcaacggcatccgactcggaccgatg

SEQ ID NO: 4307 - DNA, 203 bp, Artificial sequence
  synthetic
ggcgcgccagtcctgtcagacgggcgagtaccgcgacagctgtttggaaagcgaagacggcgccccgctgtgtcgaggctgcgcgctggttaaacagaccgcctgccacgtcggcggccacattgtgcagcaggcgcgcggcggtttagcagcgacgtcctcctcgtcctccccccacggcctgcccccgactcggaccgatg

SEQ ID NO: 4308 - DNA, 203 bp, Artificial sequence
  synthetic
ggcgcgccagtcctcgtgcacgccgtccttggagcggactggttatcgttgggcaccgtcatcgtggtggcgagcgcgctccgggccatcgcgaccgcagtctgggccgtggctgcccgcgcgctttgcgactctgggcccgctggtgctggctcttctgctggtgctggctctgctgtggcggggtccgactcggaccgatg

SEQ ID NO: 4309 - DNA, 203 bp, Artificial sequence
  synthetic
ggcgcgccagtcctctgggccgtggctgcccgcgcgctttgcgactctgggcccgctggtgctggctcttctgctggtgctggctctgctgtggcgcggtcatggccaatcgtcgtctccgacacgctccgcacaccgcgactgatgagttccaccaggctctgcgccgtctcttcgcgcccctctgccgactcggaccgatg

SEQ ID NO: 4310 - DNA, 203 bp, Artificial sequence
  synthetic
ggcgcgccagtcctgccttcctcaagtacgtgcacggcgactgcgcgacctgcagtcacggagagatcctccgtgagaagacgcaactattaacggcgatcgtcagcaagctcatggacattaacggaatcctggagggaaaagacgagccggcgccgggtaaataaatcggcggtggcgtcggtgcgcgactcggaccgatg

SEQ ID NO: 4311 - DNA, 203 bp, Artificial sequence
  synthetic
ggcgcgccagtcctgtcagcaagctcatggacattaacggaatcctggagggaaaagacgagccggcgccgggtaaataaatcggcggtggcgtcggtgcgatggagatgaacaaggttctccatcaggatctggtgcaggccacgcggcgtatcctcaagttgggtcctagcgagctgcgcgtcacccgactcggaccgatg

SEQ ID NO: 4312 - DNA, 203 bp, Artificial sequence
  synthetic
ggcgcgccagtccttgagggggagtcgttgggccgttactgctcacgtgggtactcggattcatggcgatcggcgccgctgattgaggacgcggaaaaagaatgtcctgggctaagcagcgggtgccgtttctggacgatgacgacggagaggaggaaaacgacgtgcaggatgacgtggattctccgcgactcggaccgatg

SEQ ID NO: 4313 - DNA, 203 bp, Artificial sequence
  synthetic
ggcgcgccagtcctccagccgcgggctccgcgtcctcgtcgatcaccagcggtcgcgtcggcaccggagaatccacgtcatcctgcacgtcgttttcctcctctccgtcgtcatcgtccagaaacggcacccgctgcttagcccaggacattctttttccgcgtcctcaatcagcggcgccgatcgcccgactcggaccgatg

SEQ ID NO: 4314 - DNA, 203 bp, Artificial sequence
  synthetic
ggcgcgccagtccttaagtcgacttccgcgacgtgtgtggctctgcatcacactcttcaaggcctttcagattacaaaacgcacctacaaaggcaaagtgcacctggcggactttatgcgcgatttcacgcagctgttggagaattgcgacatcaagctggtggaccccacgtacgtgatagacaagtcgactcggaccgatg

SEQ ID NO: 4315 - DNA, 203 bp, Artificial sequence
  synthetic
ggcgcgccagtcctacggcggctcttggattcggcattggtgcgccgcgtcttggcctgcatgatcatcgtcatcatgatcgccattagcatctggatcctgacctacgtgctgtttctctaataagaaccccggcccctgacggtaattttcctttcttctccgtttctcctcagctgccgtacgtgcgactcggaccgatg

SEQ ID NO: 4316 - DNA, 203 bp, Artificial sequence
  synthetic
ggcgcgccagtcctgacctacgtgctgtttctctaataagaaccccggcccctgacggtaattttcctttcttctccgtttctcctcagctgccgtacgtgatgcctcacggccatctccgacaggccctctccccgacctcctggacatgtgagggcttgttgctcctcctgggattgctggtgctccgactcggaccgatg

SEQ ID NO: 4317 - DNA, 203 bp, Artificial sequence
  synthetic
ggcgcgccagtcctcctccaccctgacggccgccgcggccgtctcgggtgccttcagggagcgggaccgaccttggctgccaagtccgtacccctcctcctcgaccgcgggcgtttcccggagggtccgcgcaacacgcaagagaccacgacgcgcctcatcgctgctggatttggcccgcgacgaaccgactcggaccgatg

SEQ ID NO: 4318 - DNA, 203 bp, Artificial sequence
  synthetic
ggcgcgccagtcctcttccggttcccatgtcctaatcataacaaaacaccgtgtcactgtccatctccctgtcttttcgcgccgccggtcccccccaaaccatgtctctagatgccgccagccaccaaccggcggcacggcggctcttggattcggcattggtgcgccgcgtcttggcctgcatgatccgactcggaccgatg

SEQ ID NO: 4319 - DNA, 203 bp, Artificial sequence
  synthetic
ggcgcgccagtcctacgtgagggagatcatgtcatgggcgggctgaagaccgtgcgggaaggattgacgtgtgcggtgcttgtggaacacggtgttttaatatgtatccgcgtgtaatgcacgcggtgtgctttttagcactcggtttgataagctacgtggccgtttgcgccgaaaacacggttacccgactcggaccgatg

SEQ ID NO: 4320 - DNA, 203 bp, Artificial sequence
  synthetic
ggcgcgccagtcctgaattgctgggatcgttgcggttgtcgcctttggtggtccgcaaccgcagccagaccgcagtggtggccacggtggtgtctcagacgtcgtgcgtcaaacatgacgtgctgaacttttccttggtataaaattcactcagtggcggcgtagccattgtcttccgttcatccacccgactcggaccgatg

SEQ ID NO: 4321 - DNA, 203 bp, Artificial sequence
  synthetic
ggcgcgccagtccttcgtgcgtcaaacatgacgtgctgaacttttccttggtataaaattcactcagtggcggcgtagccattgtcttccgttcatccaccatgagccacgaggaactaaccgcgctagcgccggtggggcccgcggcttttctctacttcagcaggttgaacgcagaaacgcaggagcgactcggaccgatg

SEQ ID NO: 4322 - DNA, 203 bp, Artificial sequence
  synthetic
ggcgcgccagtcctcacgcaaaaagctggaacaacacgcggctaaaaagcagaacatctacgaacggattccataccggccctccagacagaacgacaactccccgttgatcgaaccgacgggcacagacgacgaagaggacgaggacgacgacgtctgataaggaaggcgagaacgtcttttgcacccgactcggaccgatg

SEQ ID NO: 4323 - DNA, 203 bp, Artificial sequence
  synthetic
ggcgcgccagtcctccccgttgatcgaaccgacgggcacagacgacgaagaggacgaggacgacgacgtctgataaggaaggcgagaacgtcttttgcaccatgcagacctacagcacccccctcacgcttatcatagtcacgtcgctgtttttgttcacaactcagggaagttcatcgaacgccgtccgactcggaccgatg

SEQ ID NO: 4324 - DNA, 203 bp, Artificial sequence
  synthetic
ggcgcgccagtccttccggcctctcactccattgcgcctgggtttcgggactgatgatctttgttggtgcactggtcatctgctttctgcggtcgcaacgaatcggggaacaggacgctgaacagctgcggacggacctggatacggaacctctgttgttgacggtggacggagatttggaataaaagcgactcggaccgatg

SEQ ID NO: 4325 - DNA, 203 bp, Artificial sequence
  synthetic
ggcgcgccagtcctaacgccaaaaacgtccacatttccatcaaaatcagaccgcccgacgcgcccatgccgccggcgaccgccgtctgagcctcactttccacggcgccggtgacccgccccccggcagcggtctcatctatatatacatcagcgtgccagaacgtgaccttcctagcgacggcggcccgactcggaccgatg

SEQ ID NO: 4326 - DNA, 203 bp, Artificial sequence
  synthetic
ggcgcgccagtcctatgtcttttctattgacaatagcaaaggaatacaaaagactatgccaagatgctaaggcagctcaaatgatgacagtaggaactgtatcaaactacactacgttcaagaaatggactacatcaaggaaggaaaagaatccttcactaagaatgagatgggcaatgagcagcaaacgactcggaccgatg

SEQ ID NO: 4327 - DNA, 203 bp, Artificial sequence
  synthetic
ggcgcgccagtcctatattatgtaatcacacttttggaagtaatataatgagaccccacttggaaaaagcaataaaaggagttgaaggcagagttggagagatgggacgaatggcaatgaaatggttagttgttataatatgtttctctataacaagtcaacctgcttctgcttgcaatctaaagacccgactcggaccgatg

SEQ ID NO: 4328 - DNA, 203 bp, Artificial sequence
  synthetic
ggcgcgccagtcctcgcacagtggatcctaggcagaaccgtaacttaaacttctggcagtcatgcaagaccccctcttaggaaccctgtctgaattaaaggatttggttagaaaaaccataccagatgtaattgagcttgcatatcaaaaggacgcattactttcacaagtgcatccaagatcagtgtcgactcggaccgatg

SEQ ID NO: 4329 - DNA, 203 bp, Artificial sequence
  synthetic
ggcgcgccagtcctgcgcacagtggatcctaggcattgctttcacgctttgaggtgaaccacctcactggagcaccagatttcatctaatgggtaactccaagtcaaaatcaaagctgtctgctaaccagtatgaacagcaaacagtcaatagcaccaaacaggtagccattttaaagagacaggctgcgactcggaccgatg

SEQ ID NO: 4330 - DNA, 203 bp, Artificial sequence
  synthetic
ggcgcgccagtcctaccttcatctttttaccataatcttgttctcagtaccatttgataagggtacacttgccaatacgcccccatcctaagggtctcgcaatggggggtcttagcctactccaattgcccagggacaaatttcggaaaagctctttctttgtttgggtcatcatcttattccaaaagcgactcggaccgatg

SEQ ID NO: 4331 - DNA, 203 bp, Artificial sequence
  synthetic
ggcgcgccagtcctcgaggcggcaattcagttaatttcatatcaagataacatccatttccaagaccacagataactatattattaatctttaccacaaatatggagaggggtcgtgagcgcgggagatcaaggaattcacgtgccgaccagcaaaattcaacaggtcctcaatttaggacaagatcccgactcggaccgatg

SEQ ID NO: 4332 - DNA, 203 bp, Artificial sequence
  synthetic
ggcgcgccagtcctgtatggtggtcatcatgattttgttatcaaaacatctcatgatgattagaatctcttgtcagatctcattaaatctaaactttatttatggacgtttggagacctagctacacacattctcttgttattagagaatttggtgttacaaaccttgaagatttgtgtctaaagtatcgactcggaccgatg

SEQ ID NO: 4333 - DNA, 203 bp, Artificial sequence
  synthetic
ggcgcgccagtcctttggcaaatttgcttctcactttacattacgtagtcacgatatttcccatagtaataattttggtgttgtaactagttttactacttatggtaatactgtttctgaggctgtgtctagattagttgaatcagcttctgaatttattgtttggcgtgcagaggcacttaataagtcgactcggaccgatg

SEQ ID NO: 4334 - DNA, 203 bp, Artificial sequence
  synthetic
ggcgcgccagtcctatggtaatactgtttctgaggctgtgtctagattagttgaatcagcttctgaatttattgtttggcgtgcagaggcacttaataagtatggttgatttatttttcaatgatactgcttggtacataggacagattttagttttagttttattttgtcttatttctttaatctttcgactcggaccgatg

SEQ ID NO: 4335 - DNA, 203 bp, Artificial sequence
  synthetic
ggcgcgccagtcctgtacctataaacgtgcctttttagataagttagatgttaatagtggttttgctgtttttgttaagtctaaagttggtaactatcgtttaccgtctagtaaacctagtggtatggatactgccttgttaagagcttaaatctaaactattaggatgtcttatactcccggtcattcgactcggaccgatg

SEQ ID NO: 4336 - DNA, 203 bp, Artificial sequence
  synthetic
ggcgcgccagtcctaggaaaaagcataaaagaggtactcttccaacaacaagcccgaaacaagaggggacgtcaaaggtcaggaaattcgggttgttttgtttgtggccagcctggacatcgggctgcagtatgccctcaaaaacaacaaagtcctgttaacactcctaatttgtgcccgcgctgtaacgactcggaccgatg

SEQ ID NO: 4337 - DNA, 203 bp, Artificial sequence
  synthetic
ggcgcgccagtccttctccttatacaggtgtaacttttgtccgtgctggctgcggcaagtggcgcccaacgtggggctcgacagctttcctcgtcactactcttattatttgaacaaagtgagtatttgaatgaataagtgatttacattaaagaggagtagtaaggtatatagttgagagtataaatcgactcggaccgatg

SEQ ID NO: 4338 - DNA, 203 bp, Artificial sequence
  synthetic
ggcgcgccagtcctgtaaaattttcgaattttataataattaagaaaggagtttaatagtttatcacaacttaaaagtgaaatttatttaagaaaggaggactacttatgcaagtagcccctaatgtatggagtaaatattttaatattccaaatccaggattacgtgcttactttagcaatgtagtgcgactcggaccgatg

SEQ ID NO: 4339 - DNA, 203 bp, Artificial sequence
  synthetic
ggcgcgccagtcctttttcgaattttataataattaagaaaggagtttaatagtttatcacaacttaaaagtgaaatttatttaagaaaggaggactacttatgcaagtagcccctaatgtatggagtaaatattttaatattccaaatccaggattacgtgcttactttagcaatgtagtgtctggacgactcggaccgatg

SEQ ID NO: 4340 - DNA, 203 bp, Artificial sequence
  synthetic
ggcgcgccagtcctagcaaaagcaggagtaaagatgaatccaaatcaaaagataataacgattggctctgtttctctcaccatttccacaatatgcttcttcatgcaaattgccatcctgataaccactgtaacattgcatttcaagcaatatgaattcaactcccccccaaacaaccaagtgatgctcgactcggaccgatg

SEQ ID NO: 4341 - DNA, 203 bp, Artificial sequence
  synthetic
ggcgcgccagtccttcaatccgactctactgttcctaaaggttccagcgcaaaatgccataagcaccacattcccttatactggagatcctccatacagccatggaacaggaacaggatacaccatggacacagtcaacagaacacaccaatattcagagaaggggaagtggacgacaaatacagaaacgactcggaccgatg

SEQ ID NO: 4342 - DNA, 203 bp, Artificial sequence
  synthetic
ggcgcgccagtcctatggcgtcccaaggcaccaaacggtcttatgaacagatggaaactgatggggaacgccagaatgcaactgagatcagagcatccgtcgggaagatgattgatggaattggacgattctacatccaaatgtgcaccgaacttaaactcagtgattatgaggggcgactgatccagcgactcggaccgatg

SEQ ID NO: 4343 - DNA, 203 bp, Artificial sequence
  synthetic
ggcgcgccagtcctctccagcaagtcctccaaactcacctgcgagctctgtaagtactattactttctttaacacttggcacgcacagccacgtgacgaagatgagctcagggaatatgaaagacaagcatcgctcctacaaaagaaaagggagtccagaaagaggggagaggaagagacactggcagcgactcggaccgatg

SEQ ID NO: 4344 - DNA, 203 bp, Artificial sequence
  synthetic
ggcgcgccagtcctgacacttagctaatgtttcctcacagacagaagcagacgagataactgacgaggaaatgctttctgctgctgaaagcatggaagcagatgcctccaattaagagacagcctagagggtgggtgctgcctggatacagatatcttgggccatttaatccacttgataacggtgaacgactcggaccgatg

SEQ ID NO: 4345 - DNA, 203 bp, Artificial sequence
  synthetic
ggcgcgccagtcctggcttttaaattgcacgtcggtcccagctgatcactggtgccatggccgagctagcctgtttcgtttccttctcactgactgaagataaagtagtatggtatccaattaataaaaaagcagtacaaaccatgttgtgtgctaaagtggaaaaagatcagaggagtaattattatcgactcggaccgatg

SEQ ID NO: 4346 - DNA, 203 bp, Artificial sequence
  synthetic
ggcgcgccagtcctggctttaaaaattgcgacaatgtctgattttggaattaatcttgatgccatttgcgacaatgtaaaaaaaggccaaacagaatcaagaactggttctcaattatcaaatcggagttcacgaagaatggattttgttgatgatgaagagttaagtacttactttaactcaaaagccgactcggaccgatg

SEQ ID NO: 4347 - DNA, 203 bp, Artificial sequence
  synthetic
ggcgcgccagtcctgtctccatatccgggagttgttggacgcggcgcctagccagggtccctatcctcctgactatacgcctcacggaggcgtctgaggtcatgttcaacatgaacgtggacgagagcgcctctggcgccctcggctcctcggccattcctgttcaccccacgccggcctgggtccgacgactcggaccgatg

SEQ ID NO: 4348 - DNA, 203 bp, Artificial sequence
  synthetic
ggcgcgccagtcctacgagctctaccggagcagtcgcctggccatctacatcgaggacctcggtcgaaaatactgccccgcgagcgcgaccgggggagatcatggcatccggcaagcaccatcagcccggggggacacggagcctgaccatgcaaaaagtaagcctgcgcgtgaccccccgcctggtgcgactcggaccgatg

SEQ ID NO: 4349 - DNA, 203 bp, Artificial sequence
  synthetic
ggcgcgccagtccttaaacgctcagtataaaaggccggtggacacgtatgatccttgcctaattctaacgggagaggcagaaagatatatggtggacgctgtgggaaattaccgggaagcctccactggaactaccgtactctaccccacgtatgatctgggctccatagttgcggacatggtgacttcgactcggaccgatg

SEQ ID NO: 4350 - DNA, 203 bp, Artificial sequence
  synthetic
ggcgcgccagtccttgggaaattaccgggaagcctccactggaactaccgtactctaccccacgtatgatctgggctccatagttgcggacatggtgacttatgaagatgagtagttctaagcgagatctggtggcccagcaactaagagcctcggtagaaaagagagcggctgtgagcgcacgtgaccgactcggaccgatg

SEQ ID NO: 4351 - DNA, 203 bp, Artificial sequence
  synthetic
ggcgcgccagtccttataaattactggcgtgaattgtgcccaccagagggtgagcccacctgtctgacttggcccctgtgtacataatactcggggtctcggcacccaggcagccttgcgtggtgctgtcctgctgaagggcgtttcttaggttctcggtcagacggccgcgctgcgaggcatacagccgactcggaccgatg

SEQ ID NO: 4352 - DNA, 203 bp, Artificial sequence
  synthetic
ggcgcgccagtcctcgggtgggctggttggggctgcttcccagctagtagcccttggaactgacgggcactgcgtccacctggccaccacatcggacgggcaggcatttttggtgctgcctgggggctttgttattaaaggccaattggcactcacccccgaggagaggggatatattctggcacgtccgactcggaccgatg

SEQ ID NO: 4353 - DNA, 203 bp, Artificial sequence
  synthetic
ggcgcgccagtcctaactggtcaggggcagctggaggcatgaaacggaagcaatgtcgtgttgaccggctcagggaccgctcattccctgcatacctcgaggaggtcatgtatgtgatggttcagtagagtattgggtgtggagactagctataaaagaggccgggaggccttctgcgtccagacgcgcgactcggaccgatg

SEQ ID NO: 4354 - DNA, 203 bp, Artificial sequence
  synthetic
ggcgcgccagtcctgaggtcatgtatgtgatggttcagtagagtattgggtgtggagactagctataaaagaggccgggaggccttctgcgtccagacgcgatggcacacgccagagacaaggcaggcgctgttatggccatgatactcatctgtgagacaagccttatttggacatctagtggcagtcgactcggaccgatg

SEQ ID NO: 4355 - DNA, 203 bp, Artificial sequence
  synthetic
ggcgcgccagtcctcccggatagacctggatgacctgtcagtggcggatgatttatcacgcatgcgtgtgatgatgacctacctacagtctttggcatcactatttaatttggggcctcgcttggccacagcggcatactctcaagagaccctgacggccacttgctggttaagataaagggggtacccgactcggaccgatg

SEQ ID NO: 4356 - DNA, 203 bp, Artificial sequence
  synthetic
ggcgcgccagtcctgaggcattccccgcactctcagcctcctcccgggcactcatcgatgagtttatgtctgtcaaacagacccacgcccccatccattacggacactatataattgaagaggtggcgccggtacgaagaatattaaagtttggaaataaggtggttttttgataattgtcaataaagcgactcggaccgatg

SEQ ID NO: 4357 - DNA, 203 bp, Artificial sequence
  synthetic
ggcgcgccagtcctggacactatataattgaagaggtggcgccggtacgaagaatattaaagtttggaaataaggtggttttttgataattgtcaataaagatggatttgaaagtggtagtgtctctctcctctcgtctgtataccgatgagattgccaagatgcaacagaggattggctgcatcttacgactcggaccgatg

SEQ ID NO: 4358 - DNA, 203 bp, Artificial sequence
  synthetic
ggcgcgccagtcctcgacacgcgtaaaaggtggcctccctgcccagggccgtgtccaaccatttgattagaagggtagcatcctcgggaagtgtgggtgggctgcggttgcaggccagggcgtaaaagagacccagctgtgaagagaagccctcgagacctccccccatctccctcttaccttgtgtccgactcggaccgatg

SEQ ID NO: 4359 - DNA, 203 bp, Artificial sequence
  synthetic
ggcgcgccagtcctctgcggttgcaggccagggcgtaaaagagacccagctgtgaagagaagccctcgagacctccccccatctccctcttaccttgtgtcatggcctcaaatgagggtgtggaaaacagacccttcccctatctgacggtggatgccgacctgctctcgaacctgcggcagtcagcgcgactcggaccgatg

SEQ ID NO: 4360 - DNA, 203 bp, Artificial sequence
  synthetic
ggcgcgccagtccttagaccccgagtagcacctcaaacttgatgcccgcctctctggcatccttgcccaccagcaggtcaaagctatgaaacaacccctcagccgctgactgccgcaggttcgagagcaggtcggcatccaccgtcagataggggaagggtctgttttccacaccctcatttgaggcccgactcggaccgatg

SEQ ID NO: 4361 - DNA, 203 bp, Artificial sequence
  synthetic
ggcgcgccagtcctgccgctgactgccgcaggttcgagagcaggtcggcatccaccgtcagataggggaagggtctgttttccacaccctcatttgaggccatgacacaaggtaagagggagatggggggaggtctcgagggcttctcttcacagctgggtctcttttacgccctggcctgcaaccgccgactcggaccgatg

SEQ ID NO: 4362 - DNA, 203 bp, Artificial sequence
  synthetic
ggcgcgccagtcctgctggccgagcccgggtctgggaggtctggggtggcgagcctgctgtctcaggaggggcctggctccgccgggtggccctggggtaagtctgggaggcagagggtcggcctaggcccggggaagtggagggggatcgcccgggtctctgttggcagagtccgggcgatcctctgcgactcggaccgatg

SEQ ID NO: 4363 - DNA, 203 bp, Artificial sequence
  synthetic
ggcgcgccagtcctcctaccttcagtttgtgcttgtggacctctcagagtttcaggacgatttacctggatgctggacggagatttacatgcaggcattgaagaatccggcaatacgatctcagtttttcgattgggctggtctgagcaaggtgatctctgattttgagaggggaaatcgggactaggcgactcggaccgatg

SEQ ID NO: 4364 - DNA, 203 bp, Artificial sequence
  synthetic
ggcgcgccagtcctggtcccgggggcagagacaaaaaagaggccagttgctcccagctcttaagagagagcagcttggagtaacaccgaaggtgcgctcgcttacctgccgcctttctagccgggggaagactgtgaaattttgccaggtcgtgtgtggagagggcacacagaccccgggtgggatcccgactcggaccgatg

SEQ ID NO: 4365 - DNA, 203 bp, Artificial sequence
  synthetic
ggcgcgccagtccttcgtgtctttcgttttcaggggactcatcctcctgacattttcgccagccgccgggcgggccggcctcctttcctggaaatccagccatggatcccacccggggtctgtgtgccctctccacacacgacctggcaaaatttcacagtcttcccccggctagaaaggcggcaggtcgactcggaccgatg

SEQ ID NO: 4366 - DNA, 203 bp, Artificial sequence
  synthetic
ggcgcgccagtcctttcgcacgtcctgcccccccgtgctgggcagtcagggcctggaagtcttggcggcgttggtatttaaaaaccagcgatccctgagaacgctccaggtagagtttccagccctgggccaaaagaccctccccacctccaccaccggcctgctaaacctcctctcccgctggcaggcgactcggaccgatg

SEQ ID NO: 4367 - DNA, 203 bp, Artificial sequence
  synthetic
ggcgcgccagtcctcgctccaggtagagtttccagccctgggccaaaagaccctccccacctccaccaccggcctgctaaacctcctctcccgctggcaggatggcgctctccgggcacgtcttgatagaccccgcccgactgcccagggacacaggccccgaactcatgtgggccccaagccttcgccgactcggaccgatg

SEQ ID NO: 4368 - DNA, 203 bp, Artificial sequence
  synthetic
ggcgcgccagtcctccgaccggagcatccggcaggtgttccaccgtgagtggcaagggcttcttcagagggagctggctcttgacggtgaggggatccaggtgaaggcaggcgtccttgggtggggcgtccgggcgctccacgaagccgcagacgtatacagacggtgcctgcaccattgtgcccgctcgactcggaccgatg

SEQ ID NO: 4369 - DNA, 203 bp, Artificial sequence
  synthetic
ggcgcgccagtcctttaacacttagggtcagcagcttggtcagggataggtgcaaaaacctgagctcgtcctcgcgcagagcgcaaagcggccagttctttagcatcttcaggaggagcccgtgaatcccaggtgtcattcgcgcgtcatccccgcgcacccccagtcccattaacatagcgggcacacgactcggaccgatg

SEQ ID NO: 4370 - DNA, 203 bp, Artificial sequence
  synthetic
ggcgcgccagtcctagcatcttcaggaggagcccgtgaatcccaggtgtcattcgcgcgtcatccccgcgcacccccagtcccattaacatagcgggcacaatggtgcaggcaccgtctgtatacgtctgcggcttcgtggagcgcccggacgccccacccaaggacgcctgccttcacctggatccccgactcggaccgatg

SEQ ID NO: 4371 - DNA, 203 bp, Artificial sequence
  synthetic
ggcgcgccagtccttatttaaaggccagcgacgccccggacctacaaaagccggacaaggcacttcagagcccaccaccggcctccacagacccagccaccatgctatcaggtaacgcaggagaaggagcaacagcctgcggaggttcggccgccgcgggccaggacctcatcagcgtcccccgcaaccgactcggaccgatg

SEQ ID NO: 4372 - DNA, 203 bp, Artificial sequence
  synthetic
ggcgcgccagtccttgaattaaccaatgagaagccccccactcctgagcaaaccttaaggtattgcacagagaccccaaaaagaggataaaagaaggcgagctggcccggctcgccagcgtcgtccagacgctcggggggtgcacacctcccagccggcccggcgtccttgcggcggcctcccccccccgactcggaccgatg

SEQ ID NO: 4373 - DNA, 203 bp, Artificial sequence
  synthetic
ggcgcgccagtcctgctgcacatcggccccagcaccagacttggacttgcgctcttctggccggccgagcgaagtgacaacctagacgccgggcggatattctaccagctaacgagcggagagttgtattggggccgcaccgtcgcccgccccccgactctcaccttgcccgtcgacgagctccggcccgactcggaccgatg

SEQ ID NO: 4374 - DNA, 203 bp, Artificial sequence
  synthetic
ggcgcgccagtcctctaccagctaacgagcggagagttgtattggggccgcaccgtcgcccgccccccgactctcaccttgcccgtcgacgagctccggccatggccgaagcttaccccggaggagcccatgcagcactagcgtcccggcgctcgtcgttcaggaacagcctccgccgcctgcggccccgactcggaccgatg

SEQ ID NO: 4375 - DNA, 203 bp, Artificial sequence
  synthetic
ggcgcgccagtcctccattttatggactctctcaagaaccaggtgacagtcaccgccagatacttcagaagggtgcctagccagtccacctgagtgcgaggatggccctgcaaactgacacacaggcctggcgggtggagatagggaccagaggactaatgttctctaactgtgtcccactccacctgcgactcggaccgatg

SEQ ID NO: 4376 - DNA, 203 bp, Artificial sequence
  synthetic
ggcgcgccagtcctgtgggccgcaggcggcggaggctgttcctgaacgacgagcgccgggacgctagtgctgcatgggctcctccggggtaagcttcggccatggccggagctcgtcgacgggcaaggtgagagtcggggggcgggcgacggtgcggccccaatacaactctccgctcgttagctggtcgactcggaccgatg

SEQ ID NO: 4377 - DNA, 203 bp, Artificial sequence
  synthetic
ggcgcgccagtcctaactcacagtttattttctccaaatcgctccttgcaacaatggacacgcaagggcgaatgcagaaaatagtctggaagtccaccaggcagggaggtggcatgcaaaataactgactgcctgggcaagttcctcttttgctgcagacaccacccagtctggctctgaccagcaagcgactcggaccgatg

SEQ ID NO: 4378 - DNA, 203 bp, Artificial sequence
  synthetic
ggcgcgccagtcctcagggaggtggcatgcaaaataactgactgcctgggcaagttcctcttttgctgcagacaccacccagtctggctctgaccagcaagatgctctccaccatggcccccgggtccaccgtggggaccctggtggccaacatgacttccgtcaatgcaacggaagatgcgtgcactcgactcggaccgatg

SEQ ID NO: 4379 - DNA, 203 bp, Artificial sequence
  synthetic
ggcgcgccagtcctccgttttccaggcctacgcagaagacgctatcacgatccagagaccgccgccgcactgcttggggaggcagagactgagttttaaccatgtctgggggactcttctataaccctttcctaagacctaataaaggccttctgaaaaagcctgacaaggagtacctgcgtctcattcgactcggaccgatg

SEQ ID NO: 4380 - DNA, 203 bp, Artificial sequence
  synthetic
ggcgcgccagtcctggcggtccttgatcctgcgccgggcggacgcggtcagccccggccaggccctgcccccggatgggctttacctcacgtacgactctgaccgccccctaattcttctgtataagggcagggggtgggtatttaaggatctatatgcccttctctacctgcacctccaaatgagagcgactcggaccgatg

SEQ ID NO: 4381 - DNA, 203 bp, Artificial sequence
  synthetic
ggcgcgccagtcctaccgccccctaattcttctgtataagggcagggggtgggtatttaaggatctatatgcccttctctacctgcacctccaaatgagagatgactcggcgtagggtgctaagcgtggtcgtgctgctagccgccctggcgtgccgtctcggtgcgcagaccccagagcagcccgcacgactcggaccgatg

SEQ ID NO: 4382 - DNA, 203 bp, Artificial sequence
  synthetic
ggcgcgccagtcctaggagggcagggctccgggggcagacgcaagcgccgtctggccaccgttctccccggactcgaggtctagagacccctggggcggcgatgtcggggctgctggcggcggcgtacagccaggtgtacgccctggcggttgagctgagcgtgtgcacccggctggacccccggagtcgactcggaccgatg

SEQ ID NO: 4383 - DNA, 203 bp, Artificial sequence
  synthetic
ggcgcgccagtcctgcggtcagagtcgtacgtgaggtaaagcccatccgggggcagggcctggccggggctgaccgcgtccgcccggcgcaggatcaaggaccgcccccaggtcttgttgtagagggacacggttaggacggcctcgcgcagcgcccggcacagaatttgctggctagatgccagtgacgactcggaccgatg

SEQ ID NO: 4384 - DNA, 203 bp, Artificial sequence
  synthetic
ggcgcgccagtcctccgcccccaggtcttgttgtagagggacacggttaggacggcctcgcgcagcgcccggcacagaatttgctggctagatgccagtgagcccccgggtacgctgtagaagctgttgaaggaggtctctatccagtcgctcggctcgatgcctggccatatcagggaagtcaggaacgactcggaccgatg

SEQ ID NO: 4385 - DNA, 203 bp, Artificial sequence
  synthetic
ggcgcgccagtcctaggctgggcggcatgccaagatcgctgagacgtcagttccccgtgacgtgggccctggccagcctgactgacttcctgaaatctttgtaaatgaataaacagtgggtgttgcgtgatgagtaaagtgtaacatttaatgtgggactgggaggccggggcgataccttgggcatccgactcggaccgatg

SEQ ID NO: 4386 - DNA, 203 bp, Artificial sequence
  synthetic
ggcgcgccagtccttaaatgaataaacagtgggtgttgcgtgatgagtaaagtgtaacatttaatgtgggactgggaggccggggcgataccttgggcatcatgcagggtgcacagactagcgaggataatctgggcagccagagccagccgggtccgtgcggctacatctacttttaccccctggcccgactcggaccgatg

SEQ ID NO: 4387 - DNA, 203 bp, Artificial sequence
  synthetic
ggcgcgccagtcctaagaaagcggtgacagcctggccggcggccacacaggaggccaacaggaggagctgagcgatgaacctggccattgctctggactctcctcacccaggcctcgcgtcttatactattctgccacgcccattttatcatataagcctgaagcccgtgagctggcctgacgagacccgactcggaccgatg

SEQ ID NO: 4388 - DNA, 203 bp, Artificial sequence
  synthetic
ggcgcgccagtcctggcggcgagggcgcgacccacgcctcgaccggggtcctcacaaacacagaatctgtagacttggctggcctcatggtctcgtcaggccagctcacgggcttcaggcttatatgataaaatgggcgtggcagaatagtataagacgcgaggcctgggtgaggagagtccagagcacgactcggaccgatg

SEQ ID NO: 4389 - DNA, 203 bp, Artificial sequence
  synthetic
ggcgcgccagtcctgagacccctgggctctcaggaactccgcccaggtcttgccaattggggtgatcctgtagcgccgcggtttcagcatcacaggttattttgcctgaagcttgctggggcgtaaatccctctcgccttgtttctcagagagcatttcaggccggttttgcagtcgctgctgcagctcgactcggaccgatg

SEQ ID NO: 4390 - DNA, 203 bp, Artificial sequence
  synthetic
ggcgcgccagtcctccagacgtcagcagactaagactactcctggtggtactctgtgtcctgtttggacttttatgcctgctcctcatctaagaagccaccatgcgaccgggtagaccactggctggattctacgctactctccgccgttccttcagaagaatgtccaaaaggtcaaagaacaaggcccgactcggaccgatg

SEQ ID NO: 4391 - DNA, 203 bp, Artificial sequence
  synthetic
ggcgcgccagtcctttgctctcatgcttataattataattttgatcatctttatcttcagaagagaccttctctgtccacttggagccctttgtatactcctactgatgagtaagtattacaccctttgccccacaccccctttcccttactcttccttctctaacgcactttctcctctttccccagcgactcggaccgatg

SEQ ID NO: 4392 - DNA, 203 bp, Artificial sequence
  synthetic
ggcgcgccagtccttactgatgagtaagtattacaccctttgccccacaccccctttcccttactcttccttctctaacgcactttctcctctttccccagtcaccctcctgctcatcgctctctggaatttgcacggacaggcattgttccttggaattgtgctgttcatcttcgggtgcttacttgcgactcggaccgatg

SEQ ID NO: 4393 - DNA, 203 bp, Artificial sequence
  synthetic
ggcgcgccagtccttggcttttgtaggctttgccctctttggggtcattagatgctgccgctactgctgctactactgccttacactggaaagtgaggagcgcccaccgaccccatatcgcaacactgtataaaggtaagtattattaaattttagagacactatcacgtgtaacttgacgtgcaaggcgactcggaccgatg

SEQ ID NO: 4394 - DNA, 203 bp, Artificial sequence
  synthetic
ggcgcgccagtcctagttttgcctgaacctgtggttgggcaggtacatgccaacaaccttctaagcacccgcgcttgtgttttgctttatctgccgccatcatgcctacattctatcttgcgttacatgggggacaaacatatcatctaattgttgacacggatagtcttggaaacccgtcactctcacgactcggaccgatg

SEQ ID NO: 4395 - DNA, 203 bp, Artificial sequence
  synthetic
ggcgcgccagtcctcgggcccctggtggctcggccgcggtcctcccccgtgaacggggcgcgctgggccgcggctgccccctggacccctaggcctgtgccatggggaccccctgccagtcggcgcggggtcccaggaccacgcccctccctcactgcccccccccctgccttccaggtgcacgggaccgactcggaccgatg

SEQ ID NO: 4396 - DNA, 203 bp, Artificial sequence
  synthetic
ggcgcgccagtcctaattgctcccaccctcaattttcgcttgccttcttcccttgttaacctgatagcatagcctctaggtttccttgtaggtctgtttgggtttgttggttcacgtggtgctaacttgaattttttggttttctagttccctcttaattacatttgtgccagatcttgtagagcaagcgactcggaccgatg

SEQ ID NO: 4397 - DNA, 203 bp, Artificial sequence
  synthetic
ggcgcgccagtcctgtttgttggttcacgtggtgctaacttgaattttttggttttctagttccctcttaattacatttgtgccagatcttgtagagcaagatggcctattcaacaagggagatactgttagccctgtgtatacgggacagtcgtgtgcatggaaatggtaccctgcatcctgtgttgcgactcggaccgatg

SEQ ID NO: 4398 - DNA, 203 bp, Artificial sequence
  synthetic
ggcgcgccagtcctgaactggacgtggtcctgcgcatccacggccttgacctggtacagtcctatcaaacttcccaggtctacgtgtgaaaagtaaacccgatggccccggtcaccccagatgccgtgaatgcacgccaacagcgaccggcagatcccgcattgcgccgcctaatgcatccgcaccaccgactcggaccgatg

SEQ ID NO: 4399 - DNA, 203 bp, Artificial sequence
  synthetic
ggcgcgccagtcctccttgtccttgtggcggtgtcccagaaactggtgccgaccccggtattaaaaacccagaagacctcaccttgccacccagatgtgtcatggctcacaaagtcacgagcgcaaacgagccaaaccccctgaccggaaaaagactgtccagctgccccctcacgaggagtggcgtacgactcggaccgatg

SEQ ID NO: 4400 - DNA, 203 bp, Artificial sequence
  synthetic
ggcgcgccagtcctgttacgccactcctcgtgagggggcagctggacagtctttttccggtcagggggtttggctcgtttgcgctcgtgactttgtgagccatgacacatctgggtggcaaggtgaggtcttctgggtttttaataccggggtcggcaccagtttctgggacaccgccacaaggacaacgactcggaccgatg

SEQ ID NO: 4401 - DNA, 203 bp, Artificial sequence
  synthetic
ggcgcgccagtccttccttggagggacaaagactcgtggtcggaatccgaggcggcgccgtggaagaaggaactcgtgaggcaccccatccgcaggcaccggacacgcgagactcgccgtatgcgcgggagccattcacgggtggaacacgtgccccccgagacccgggagacggtggtggggggagccgactcggaccgatg

SEQ ID NO: 4402 - DNA, 203 bp, Artificial sequence
  synthetic
ggcgcgccagtcctgacacgcgagactcgccgtatgcgcgggagccattcacgggtggaacacgtgccccccgagacccgggagacggtggtggggggagcatggcgttattcttcgcgcgccacaccttatctggcacgggtgctggctgtcacggccgtggccctgctcctgatgtttctgaggtgcgactcggaccgatg

SEQ ID NO: 4403 - DNA, 203 bp, Artificial sequence
  synthetic
ggcgcgccagtcctggcagctcctgtatttaactttgcggacagaggccagagccgtttgctccatctgtcagcaacgccaagctccagaggacgcccgcgacgagcctcacctgttctcctcctgtttagaggtagaattgccacctggtgagcggtgtgcgggctgccgtctctatcagacgcgttcgactcggaccgatg

SEQ ID NO: 4404 - DNA, 203 bp, Artificial sequence
  synthetic
ggcgcgccagtcctatctctcggcggctgccgccgccagccgcgtaagaccccggaccagaaggggggcgacaaggcgtcctccccgccccaccgccgaagatgagtaacggcgactgggggcaaagccagcgcacccggggaaccggccccgtgcgcggaatcaggaccatggatgtgaatgccccccgactcggaccgatg

SEQ ID NO: 4405 - DNA, 203 bp, Artificial sequence
  synthetic
ggcgcgccagtcctagaattcgtcttgctctattcacccttacttttcttcttgcccgttctctttcttagtatgaatccagtatgcctgcctgtaattgttgcgccctacctcttttggctggcggctattgccgcctcgtgtttcacggcctcagttagtaccgttgtgaccgccaccggcttggccgactcggaccgatg

SEQ ID NO: 4406 - DNA, 203 bp, Artificial sequence
  synthetic
ggcgcgccagtcctcgccagacggccgccgcactcagcgaggaggcctgcgcgtgttcctcaaccagcccacgaacgtcccgcgtgaattcggacccccgggaaatatttagacgccgggccggagggggcagcagccccgcgattcggcgttgcagacggcggcgatcgacggacccctggaccttccgactcggaccgatg

SEQ ID NO: 4407 - DNA, 203 bp, Artificial sequence
  synthetic
ggcgcgccagtcctccaaagatccccagctccagaggcatcagcgcgcgcaggcgggcagcggggtcgtccccagacagcagcaactgacgcgtcacgcgggcgagccccccgtccacctctgccaggggtggctgggcgtctgcccctccgctaccgccgctgctgtcactctccatagcggacgcccgactcggaccgatg

SEQ ID NO: 4408 - DNA, 203 bp, Artificial sequence
  synthetic
ggcgcgccagtcctttggaggaggtctgccttcaattaccgtggctctagcctccccgtggtggagattgacagcttttattccaacgtctctgactgggaggtgattctctagacttaacgggaggaaacaggaggaggagggggacaagagcacaaaagtggttcagtggacacccaccacacagccgactcggaccgatg

SEQ ID NO: 4409 - DNA, 203 bp, Artificial sequence
  synthetic
ggcgcgccagtcctggtgattctctagacttaacgggaggaaacaggaggaggagggggacaagagcacaaaagtggttcagtggacacccaccacacagcatggcaacgaccagtcatgtcgagcatgagctcctctccaaattgattgatgagttaaaggtcaaggccaactcagaccccgaggctcgactcggaccgatg

SEQ ID NO: 4410 - DNA, 203 bp, Artificial sequence
  synthetic
ggcgcgccagtcctcgtcagctcttctcagaggatgatctgttggagactgacggttttactgaacgagcctgtgaatcttgccaataaacgtttattgccatgtccaagttgttgtacgtgcgtgatcatgagggctttgcctgcctaacggtcgaaacccaccgcaaccgctggttcgcggctcaccgactcggaccgatg

SEQ ID NO: 4411 - DNA, 203 bp, Artificial sequence
  synthetic
ggcgcgccagtcctacctacatgactagcatcaagcaaactaatttctttgagcaagagagttccgattacaccatgctggtggtagatgacctttgagtcagggtggctacttgctcaggtttctgggcataaattctcctgcctgcctctgctctggtacgttggcttctgctgctgcttgtgatccgactcggaccgatg

SEQ ID NO: 4412 - DNA, 203 bp, Artificial sequence
  synthetic
ggcgcgccagtcctgtccggcaaggccagagacaccctcgcctgccattcccagccactccagcaacaccgcactggagaggcctctggctgttcagctcgcgaggaaaaggacatcgtcggaggccaggcagaagcagaagcaccccaagaaagtgaagcaggcctttaaccccctcatttaacacccgactcggaccgatg

SEQ ID NO: 4413 - DNA, 203 bp, Artificial sequence
  synthetic
ggcgcgccagtcctcgaggaaaaggacatcgtcggaggccaggcagaagcagaagcaccccaagaaagtgaagcaggcctttaaccccctcatttaacaccatgttctcgtgcaagcagcacctgtccctgggggcctgtgtcttctgtctcggcctcctggccagcacccccttcatttggtgctttcgactcggaccgatg

SEQ ID NO: 4414 - DNA, 203 bp, Artificial sequence
  synthetic
ggcgcgccagtcctcatcacaggccatcacggtcaccttcatgagtcagtgcttcgccggtcgctgtggggccaatcaaccgaccgcccatttctccatcagcgtgcccgcctccagaatcataaatagggctgaggccagtcaagacagcactacatcccagctagcccgtcgtagagacagacaagcgactcggaccgatg

SEQ ID NO: 4415 - DNA, 203 bp, Artificial sequence
  synthetic
ggcgcgccagtcctgagccagagcccgcagcacgaccagtctgggagatagaaggccatcgttctgtttagcccgccgttggggcctcccggtcttaaataatgtccgcccccgtcgtcatcaaggcccttgtggcctcaaacactgacattgcggaggccatcctcgatgccatcctctcgcggcctcgactcggaccgatg

SEQ ID NO: 4416 - DNA, 203 bp, Artificial sequence
  synthetic
ggcgcgccagtcctgggcgaggcgttgtggcacaaacaaaacaggcggaagccctcgtcaggccgcgagaggatggcatcgaggatggcctccgcaatgtcagtgtttgaggccacaagggccttgatgacgacgggggcggacattatttaagaccgggaggccccaacggcgggctaaacagaacgcgactcggaccgatg

SEQ ID NO: 4417 - DNA, 203 bp, Artificial sequence
  synthetic
ggcgcgccagtcctagtgtttgaggccacaagggccttgatgacgacgggggcggacattatttaagaccgggaggccccaacggcgggctaaacagaacgatggccttctatctcccagactggtcgtgctgcgggctctggctctttggccggcccaggaatagatacagccagctccctgaggagcgactcggaccgatg

SEQ ID NO: 4418 - DNA, 203 bp, Artificial sequence
  synthetic
ggcgcgccagtcctacataacttcaagttcaacctcttccatgtcactgagacccagttcaaacccagagacactcagcccctccaccagtgacaattcaacgtcacatatgcctttactaacctccgctcacccaacaggtggtgaaaatataacacaggtgacaccagcctctatcagcacacatccgactcggaccgatg

SEQ ID NO: 4419 - DNA, 203 bp, Artificial sequence
  synthetic
ggcgcgccagtcctgacattgcagtttcttccccttcctcttctgaaacatcgaacgatgagtgatttcgcccatgtaacaagaactgggatgaaccctggggcaacagactgcggggaggaggggggcagtgataagtcatgacaattttagatgaggtagaaattttgcatattttcagacccacccgactcggaccgatg

SEQ ID NO: 4420 - DNA, 203 bp, Artificial sequence
  synthetic
ggcgcgccagtcctggcaacagactgcggggaggaggggggcagtgataagtcatgacaattttagatgaggtagaaattttgcatattttcagacccaccatggaatcatttgaaggacagggggactctagacagtcacccgacaatgagcggggagataatgtacagactaccggcgagcatgatcgactcggaccgatg

SEQ ID NO: 4421 - DNA, 203 bp, Artificial sequence
  synthetic
ggcgcgccagtccttatgcatgagccacaggcattgctaatgtacctcatagacacacctaaatttagcacgtcccaaaccatgacatcacagaggaggctggtgccttggctttaaaggggagatgttagacaggtaactcactaaacattgcaccttgccggccacctttgctatctttgctgaagcgactcggaccgatg

SEQ ID NO: 4422 - DNA, 203 bp, Artificial sequence
  synthetic
ggcgcgccagtcctggtgccttggctttaaaggggagatgttagacaggtaactcactaaacattgcaccttgccggccacctttgctatctttgctgaagatgatggacccaaactcgacttctgaagatgtaaaatttacacctgacccataccaggtgccttttgtacaagcttttgaccaagctcgactcggaccgatg

SEQ ID NO: 4423 - DNA, 203 bp, Artificial sequence
  synthetic
ggcgcgccagtcctgcctcatttataaatgccttgcatattttgtaggatctcagagtaatctccacactcccggctgtaaattccttgttgaggacgttgcagtagtcagagaccagagagcccagctgctttttgatttcaggagttagcctcagaaagtcttccaagccatcctttttaggcctccgactcggaccgatg

SEQ ID NO: 4424 - DNA, 203 bp, Artificial sequence
  synthetic
ggcgcgccagtcctgcgtctgtttgtgtagtgaggtgttgtgtcctgtatggtattctactttaaaaaggccggctgacatggattactggtcttttatgagccattggcatgggcgggacaatcgcaatataaaaccctgaccatcacatggggcattaggcgactctgcatcagcatcgcttaagtcgactcggaccgatg

SEQ ID NO: 4425 - DNA, 203 bp, Artificial sequence
  synthetic
ggcgcgccagtcctattacatgcactgccccgcgggaaatacgtcctacccaggaacccgaaacagtgtttcccagaagctgtaaaaatagaacgccctggaactgccccactgtgcaatgcagcttttagccatgccatgctctataaatcacttccctatctcaggtaggcctgcacaccttaggtcgactcggaccgatg

SEQ ID NO: 4426 - DNA, 203 bp, Artificial sequence
  synthetic
ggcgcgccagtcctggtcatcagccgctgcgcaaacggactcaacgtggtctccttctttatctccatcctgaagcgaagcagctccgccctcacgggccatctccgtgagttgttaaccaccctggagactctttacggttcattctcagtggaagacctgtttggtgccaacttaaacagatacgccgactcggaccgatg

SEQ ID NO: 4427 - DNA, 203 bp, Artificial sequence
  synthetic
ggcgcgccagtcctccaagaagcatctggttctgacctctcagcatccctctcccctggcccagaacagcacccgaaagagtgcccagcagaagttcctgggcaacaaccactttgtcctcgctaacaactttttgcgtgagaaggggctcggtgagatagattggaggctgtagaggggtcatcactcgactcggaccgatg

SEQ ID NO: 4428 - DNA, 203 bp, Artificial sequence
  synthetic
ggcgcgccagtcctgagtgagtatgggttttgtgtaaatttattgctaaaatttcattaagcagtgaagtaaaggaattgtgggaattctattgactgtgaatgcaatgtaatgtaacaaattgtatgattatttgggatactattcatagatgtcggcagcgtccgaatgaggaatagatccagtatcgactcggaccgatg

SEQ ID NO: 4429 - DNA, 203 bp, Artificial sequence
  synthetic
ggcgcgccagtcctgtgaaggaagttacttcacactcagtccaggtcaaaggtaaatcaggcgcaccttggcaccacctgacacattgtacaccagcaccagcacctgacagaacgctgacagaagtcagaagcgacttgatcgcctccaatttggctataaattctgagagccccgacaactgaagacgactcggaccgatg

SEQ ID NO: 4430 - DNA, 203 bp, Artificial sequence
  synthetic
ggcgcgccagtcctgcacctgacagaacgctgacagaagtcagaagcgacttgatcgcctccaatttggctataaattctgagagccccgacaactgaagaatgtggagacgactccattcctcagatgtccgggagggtcacccatggtccaggcgatgcagaacgccatggggtcgactgggatgtcgactcggaccgatg

SEQ ID NO: 4431 - DNA, 203 bp, Artificial sequence
  synthetic
ggcgcgccagtcctgccgtcataaaggagctgagctgactctgctggtggcctcgcgtaccactgtggccaggcggtagctgggacgtgcagcccaccaccatggggagcagcaagagcaagcccaaggaccccagccagcgccggcgcagcctggagccacccgacagcacccaccacgggggattccgactcggaccgatg

SEQ ID NO: 4432 - DNA, 203 bp, Artificial sequence
  synthetic
ggcgcgccagtccttaaagcaaaaacactattatgtgcattttaccaaggaagcagtaaaatatggacaaaaagggatgtggcaagtgaggactggaactgatgtattatttggtccttcttctatcgctagcacttcgacgggggccgagcaaggtgacaccaccgcacaagtcacccgaagcgccacgactcggaccgatg

SEQ ID NO: 4433 - DNA, 203 bp, Artificial sequence
  synthetic
ggcgcgccagtcctatatagactgggaaggaaataaacatttctatgtgcggtttgcagatgaggcaacacaatttgatgcagcaaatgaatggcaagtacgaactgaaagtgaaataatatctaattctgttaccagcacccccccacggagcgacccgaggcctactggatcttctgccatcacctcgactcggaccgatg

SEQ ID NO: 4434 - DNA, 203 bp, Artificial sequence
  synthetic
ggcgcgccagtcctgaactgaaagtgaaataatatctaattctgttaccagcacccccccacggagcgacccgaggcctactggatcttctgccatcacctatgaaacttccagacacgacacgaggaggactaggagatctactaaaagaccccgaccgtcccccagcccatccgcgacatcggcgacgactcggaccgatg

SEQ ID NO: 4435 - DNA, 203 bp, Artificial sequence
  synthetic
ggcgcgccagtcctctcgattgttacttacacctcaggcagttcctgctgttcaggtccctcctttggttcgtgtcctgacacttcctccaggcacagccctacaaatcttactctcagatgtagggggtcttgtacctttttctgtgccttctgtacatcctgttattcctggcactgtgtttccagcgactcggaccgatg

SEQ ID NO: 4436 - DNA, 203 bp, Artificial sequence
  synthetic
ggcgcgccagtccttacaaatcttactctcagatgtagggggtcttgtacctttttctgtgccttctgtacatcctgttattcctggcactgtgtttccagatgtgtctgaacctcctattgttgtggatggttttgatgcatttgatacattttatttgcatccaagtcacagacgcaaacgcaagccgactcggaccgatg

SEQ ID NO: 4437 - DNA, 203 bp, Artificial sequence
  synthetic
ggcgcgccagtcctagtatattctgcgtgctaatcgttcaacgttagtccgtggagtgagcttctgttaagttgttaacacgtttgaataatttctactgaaagggtagagaaaaggagttttgcttctcatggcaacaagaggagcaagcaagtctcgggtcacgacccggggcgtcaatatggtgacgactcggaccgatg

SEQ ID NO: 4438 - DNA, 203 bp, Artificial sequence
  synthetic
ggcgcgccagtcctttagtccgtggagtgagcttctgttaagttgttaacacgtttgaataatttctactgaaagggtagagaaaaggagttttgcttctcatggcaacaagaggagcaagcaagtctcgggtcacgacccggggcgtcaatatggtgacggccaaggccaagagtctggccgtcaaacgactcggaccgatg

SEQ ID NO: 4439 - DNA, 203 bp, Artificial sequence
  synthetic
ggcgcgccagtcctgaaatttccaataaactctggtgtaaggcttagagtgatggtcgaggtgccctatttagggtgaggagcctcggtggcagccccaccaaatcctctattggataggaacagctgtactgggcagttacagcagtcgtatggtaacacatgcggcgttccgaaataccatgcctgcgactcggaccgatg

SEQ ID NO: 4440 - DNA, 203 bp, Artificial sequence
  synthetic
ggcgcgccagtcctgcaacagtatttaaaaactgctctgttgtgctgctgtttaagagggcaggcaccggcagtcctcggagttgaaattccatcaacagctttgtctggtgaaggctcccgcctcccccactcaggcctttggtaagcttttcaagagcgtctgtgccgtccattgccggcgtggatcgactcggaccgatg

SEQ ID NO: 4441 - DNA, 203 bp, Artificial sequence
  synthetic
ggcgcgccagtccttttgtctggtgaaggctcccgcctcccccactcaggcctttggtaagcttttcaagagcgtctgtgccgtccattgccggcgtggatatgaaggtgcaggctgaaaatgcggctcgcctgggtaggcaagtgttgggtcttttacctccaccaactcaccgggtatccctcactcgactcggaccgatg

SEQ ID NO: 4442 - DNA, 203 bp, Artificial sequence
  synthetic
ggcgcgccagtcctccaaccgtgggtcgtgtggacgccgcatatttagagagtaaatcccgcacccccctggcaaactccggtcctctagtgagggatacccggtgagttggtggaggtaaaagacccaacacttgcctacccaggcgagccgcattttcagcctgcaccttcatatccacgccggcacgactcggaccgatg

SEQ ID NO: 4443 - DNA, 203 bp, Artificial sequence
  synthetic
ggcgcgccagtcctgtctgccttcgaggcaccggacgacgaactccgttttgtcccactgacgctggcaggcctccggaaactgtttgtcgaatagaggccatggcagcccagcctctgtacatggagggaatggcctccacccaccaagctaactgtatattcggagaacatgctggatcccagtgccgactcggaccgatg

SEQ ID NO: 4444 - DNA, 203 bp, Artificial sequence
  synthetic
ggcgcgccagtccttactaattttgaaaggcggggttctgccaggcatagtctttttttgtggcggcccttgtgtaaacctgtctttcagaccttgttggacatcccgtacaatcaagatgttcctgtatgttgtttgcagtctggcggtttgctttcgaggactattaagcctttctctgcaatcgtcgactcggaccgatg

SEQ ID NO: 4445 - DNA, 203 bp, Artificial sequence
  synthetic
ggcgcgccagtcctttgggcgggccaggggggtaggactgtgcggattctgggcgcctttcagtggagcttaggccgtgcggtcgcgctggtgagaaggtcatggccctggatcagcgctgggatcgctttcttgtgtcttggtttggtttggatgaggcccagctgacggcccaccgcgtgttcgagcgactcggaccgatg

SEQ ID NO: 4446 - DNA, 203 bp, Artificial sequence
  synthetic
ggcgcgccagtcctgccgtattctccgaggcgcgggcacggccctgattgactgcgggtgtcgcgctttgggggccttgccagccccaccccgctgtcgccatgagtgtcgttggtaagcgtgtagtggacgaactgtgtcgggtggtatcctcatacttgggacagtctggtcagtccctggatttgcgactcggaccgatg

SEQ ID NO: 4447 - DNA, 203 bp, Artificial sequence
  synthetic
ggcgcgccagtcctggtctttctctttaagggtctccaaaacgccagggtggggaaaaccacctcactagacattattcgggagctaaccgcacaactaaaaagacaccgcctagacctggcccacccctcacagacgtcacacttgtacgcttgagctggtcccgggccttcgcaccccatccaccgcgactcggaccgatg

SEQ ID NO: 4448 - DNA, 203 bp, Artificial sequence
  synthetic
ggcgcgccagtccttggtgccctcctccccgggaacctggtgccctcctccccgggaacctggtgccctcctccccgggaacctggtgccctcctccccgggaacctggtgccctcctccccgggaacctggtgccctcctccccgggaacctggtgccctcctccctcctcactccaatcccaatgccgactcggaccgatg

SEQ ID NO: 4449 - DNA, 203 bp, Artificial sequence
  synthetic
ggcgcgccagtccttgggatgcgatgtttccgttctacaggcggcagtggaacagatcctaacatctgtttcggactttgatctgcgcattctggacagctattaagcttgtgattttgtttagggcggaaaaataaattttcctttgtttttccacatcggtgccttcacatatacaagccggcacccgactcggaccgatg

SEQ ID NO: 4450 - DNA, 203 bp, Artificial sequence
  synthetic
ggcgcgccagtcctattaagcttgtgattttgtttagggcggaaaaataaattttcctttgtttttccacatcggtgccttcacatatacaagccggcaccatggccacttacgaggttctctgtgaggtggcgcggaaactgggcacggatgacagggaagtggtattgttcctcctaaacgtgttccgactcggaccgatg

SEQ ID NO: 4451 - DNA, 203 bp, Artificial sequence
  synthetic
ggcgcgccagtcctagtgtctgcgatctccatcctgtggccatgggcggtactgcagcctgctactgtgtgtaaccgcttaattgtctgagagctcccccttgtggtcactacgggtattgcataatgtgaatatactgccaccgcctccataattttactttggttgtcagaccagatttcccgaggcgactcggaccgatg

SEQ ID NO: 4452 - DNA, 203 bp, Artificial sequence
  synthetic
ggcgcgccagtccttcaagctactttctgattggtgccccaggcaggactgccataaaaactgaagaaggcgtgtctgctttgcagaatttaccccccactgtgctcccggttgctggcaccggttcagtggtccgacctgtcgtctgtgctcccccgtggacgacgccgagtgcctctcgggggtcccgactcggaccgatg

SEQ ID NO: 4453 - DNA, 203 bp, Artificial sequence
  synthetic
ggcgcgccagtcctctggcccaaacggaggatcctaggtgggtgtgcatttattagacgttggtgtgttgaaggacggatcaggcggggaggaggggtgggggagacttactgcagcactaggttaggttgaaagccggggtaaaaggcgtggctaaacaacacctatactacttgttattgtaggcccgactcggaccgatg

SEQ ID NO: 4454 - DNA, 203 bp, Artificial sequence
  synthetic
ggcgcgccagtcctgtttcctcttgcgctatgtgggacaactagagtccaacctggcaagcagtggagcaagacgccagacagccgatctcgaaaaaaataatgcagacagaggcaacgttcatcctaggtgactgggagataacggtgtctaactgccggtttacttgcagcagcctaacatgtggccgactcggaccgatg

SEQ ID NO: 4455 - DNA, 203 bp, Artificial sequence
  synthetic
ggcgcgccagtccttaaggcagccagccaggcaccatacagcttctacgactgcaaagaagagagctggcacgtggggctcttccagatcaaacacggacctggaggggtctgtacaccaccttgccacgtagcgattagggccgaccgccacgaggaacccatgcaatcgtgactgtccgagcacatcgactcggaccgatg

SEQ ID NO: 4456 - DNA, 203 bp, Artificial sequence
  synthetic
ggcgcgccagtcctaaggctggaccctcctctctagttgatatccttccacagggtttgcttgggggtggctatggttccatgggcgtgattaggaaacgttcggctgtttcgtctgcccttatgtttcattaaaagtatataagagcacactgtgtggttggtggtgtttacctataccctcgctgccgactcggaccgatg

SEQ ID NO: 4457 - DNA, 203 bp, Artificial sequence
  synthetic
ggcgcgccagtccttcggctgtttcgtctgcccttatgtttcattaaaagtatataagagcacactgtgtggttggtggtgtttacctataccctcgctgcatggatcctacactttactgtgtagttgcggttgataccaaactcgggatcggaaaaaacagatgtctcccgtggcctgcattgcggcgactcggaccgatg

SEQ ID NO: 4458 - DNA, 203 bp, Artificial sequence
  synthetic
ggcgcgccagtcctgaccccggttgcctggacgcgtgccctggtacggtcacttgttgcaggggttaatgccatgttttattgtgggttctctctcaggatatggaagatgaggatgttcctgtctgctggatttgcaacgaggagctcggaaatgagagatttagagcctgtggatgcacaggagagcgactcggaccgatg

SEQ ID NO: 4459 - DNA, 203 bp, Artificial sequence
  synthetic
ggcgcgccagtcctggattttttggggtgttggccttcgtaataaaagcccaggatcctggagtttacaggtaggcgtcgtagaaccagcactacatcacgtacgtgttttgaaccgagttgagctgtttaccgcgcctgacctaacatcgccgtttcgcatttacacgaggacacacgaggggagttcgactcggaccgatg

SEQ ID NO: 4460 - DNA, 203 bp, Artificial sequence
  synthetic
ggcgcgccagtcctcgcaatattttgggttatacataagttacatttggcaacgctggtctttatcgtcgcgtttggggaggaaaagcgcggcgacccctggtcgcctgggcttcaataatttataactaggctgggatttagggtaatgcacccctttgcgcatcatcgttgtggcgccagaactgtcgactcggaccgatg

SEQ ID NO: 4461 - DNA, 203 bp, Artificial sequence
  synthetic
ggcgcgccagtccttttccagggaaagcctggatgtaggaaaatagacacacatgtggcgtccgtgaatacgttagacatctgtcaaggcgggatagcgacagtagggcggacggcgggtcggagactaactgggcactctgctcacctcccctttccctttttcagacttccaccccagctgcagagcgactcggaccgatg

SEQ ID NO: 4462 - DNA, 203 bp, Artificial sequence
  synthetic
ggcgcgccagtcctagtagggcggacggcgggtcggagactaactgggcactctgctcacctcccctttccctttttcagacttccaccccagctgcagagatggcgtccaaggacgtagaagagggtgtagagggacccatctgctggatatgtagggaagaggtggggaacgagggcatacacccccgactcggaccgatg

SEQ ID NO: 4463 - DNA, 203 bp, Artificial sequence
  synthetic
ggcgcgccagtccttggattattaagggtcagcttgaaggatgatgttaatgacataaaggggcgtggcttccaaaaatgggtggctaacctgtccaaaatatgggaacactggagataaaaggggccagcttgagtcagtttagcactgggactgcccagtcaccttggctgccgcttcacctatggcgactcggaccgatg

SEQ ID NO: 4464 - DNA, 203 bp, Artificial sequence
  synthetic
ggcgcgccagtcctaagcagttgaggcgcattagatatataaaacttgggtacacacccttggtgctgtgcgcgtgctatgtgccctggtgaccgtccacaatggacgaggacgttttgcctggagaggtgttggccattgaagggatattcatggcctgtggattaaacgaacctgagtacctgtaccgactcggaccgatg

SEQ ID NO: 4465 - DNA, 203 bp, Artificial sequence
  synthetic
ggcgcgccagtcctttcgtcagtcccctggagaccttaatggcaaaagctatagatgccagcttcatacgggaccgcctcgacctattgaaaactgacagaggtgtggccagcatattgagcccggcgtatttaaaggccagccaattcccggtcggcatccaagccgtcacaccacccagaccagcccgactcggaccgatg

SEQ ID NO: 4466 - DNA, 203 bp, Artificial sequence
  synthetic
ggcgcgccagtcctggtgtggccagcatattgagcccggcgtatttaaaggccagccaattcccggtcggcatccaagccgtcacaccacccagaccagccatgaacagctctggtcaagaggatatcatatccatccccaaatccgccttcctgagcatgctacaaagcagcatcgatggaatgaagcgactcggaccgatg

SEQ ID NO: 4467 - DNA, 203 bp, Artificial sequence
  synthetic
ggcgcgccagtccttttccatatgaggccaagtgcattggctattttaggggcggtgaccacgcactatagtgcgcggtgtggcagaaaattcacaccgtatataaacaaggaaaggggactctgcgcgcttaagcgccaagccattatacacacgggttttttgttgtcttggccaatcgtgtctcccgactcggaccgatg

SEQ ID NO: 4468 - DNA, 203 bp, Artificial sequence
  synthetic
ggcgcgccagtccttataaacaaggaaaggggactctgcgcgcttaagcgccaagccattatacacacgggttttttgttgtcttggccaatcgtgtctccatggcgctaaagggaccacaaaccctcgaggaaaatattgggtctgcggcccccactggtccctgcgggtacctctatgcctatgtgcgactcggaccgatg

SEQ ID NO: 4469 - DNA, 203 bp, Artificial sequence
  synthetic
ggcgcgccagtcctacctgatccggatcgagatagagctcttgctccagcttggggcaggacacaacatctacaaaccctccgacgtacaggccctgtgccatgctcggaaaatacgtgtgtgagaccgagccgctgagcccggggcttaggaggctcatgtggcgctttttgcaaaataagaatttacgactcggaccgatg

SEQ ID NO: 4470 - DNA, 203 bp, Artificial sequence
  synthetic
ggcgcgccagtcctacagactttcccgttagtggtttcctctcctcagggaggtcgtccatatccgtgctggttgtggaggtgcttgattcgtcgtccgagctccccaagtcccacctgcctcccctagtcacagaggccttttctccgccgcgccccaccgagtccgctccaaaaccgccttctgcccgactcggaccgatg

SEQ ID NO: 4471 - DNA, 203 bp, Artificial sequence
  synthetic
ggcgcgccagtcctctccccaagtcccacctgcctcccctagtcacagaggccttttctccgccgcgccccaccgagtccgctccaaaaccgccttctgccatggtacgtccaaccgaggccgaggttaagaaatccctgagcaggcttccagcagcacgcaaaagagcaggtaaccgggcccacctgcgactcggaccgatg

SEQ ID NO: 4472 - DNA, 203 bp, Artificial sequence
  synthetic
ggcgcgccagtcctcactggcgccaccgaacggccgcgtccaacgagcagacaccgccagccgatccccgcgtacgttgcgtccgtccgctggtctaagctatgttacgagttccggacgtgaaggctagtctagtagagggcgccgcgcgcctgtcgacaggcgagcgcgtgtttcacgtcttgacccgactcggaccgatg

SEQ ID NO: 4473 - DNA, 203 bp, Artificial sequence
  synthetic
ggcgcgccagtcctttggtatatacgcccagtagcgcttcgaaacggacactgccttctctggcgtccttgccgagcaatagctgaaagctcttgaagagtccgtcggcagccgactccttaatctgcgttaggaggttggcctccgtggcgaggtacgggaaaggtcgttgctccaaggtcgcctcccgactcggaccgatg

SEQ ID NO: 4474 - DNA, 203 bp, Artificial sequence
  synthetic
ggcgcgccagtcctccgtcggcagccgactccttaatctgcgttaggaggttggcctccgtggcgaggtacgggaaaggtcgttgctccaaggtcgcctccatggcagcgctcgagggccccctactactgccaccgagcgcctccctgacgacgagtccgcagaccacgtgttatcaagcgacttggcgactcggaccgatg

SEQ ID NO: 4475 - DNA, 203 bp, Artificial sequence
  synthetic
ggcgcgccagtccttcattgaagaggtggcgccgatgaagagactattaaagctcggaaacaaggtggtgtattagctaacccttctagcgttggctagtcatggcactcgacaagagtatagtggttaacttcacctccagactcttcgctgatgaactggccgcccttcagtcaaaaatagggagccgactcggaccgatg

SEQ ID NO: 4476 - DNA, 203 bp, Artificial sequence
  synthetic
ggcgcgccagtcctgttgagcgtcccagatgacatcaccaggatgcgcgtcatgttctcctatcttcagagtctcagttctatatttaatcttggccccagactgcacgtgtatgcctactcggcagagactttggcggcctcctgttggtattccccacgctaacgatttgaagcgggggggggggtcgactcggaccgatg

SEQ ID NO: 4477 - DNA, 203 bp, Artificial sequence
  synthetic
ggcgcgccagtcctactgcacgtgtatgcctactcggcagagactttggcggcctcctgttggtattccccacgctaacgatttgaagcgggggggggggtatggcgtcatctgatattctgtcggttgcaaggacggatgacggctccgtctgtgaagtctccctgcgtggaggtaggaaaaaaactcgactcggaccgatg

SEQ ID NO: 4478 - DNA, 203 bp, Artificial sequence
  synthetic
ggcgcgccagtccttgaacaatttttcagtcaaccccttagggagcaagtggtcgcgggggtcagggcactcgacggcctcggtctcgctgactctctatgtcacaaaacagaaagactctgcctgctgatggacctggtgggcacggagtgctttgcgagggtgtgccgcctagacaccggtgcgaacgactcggaccgatg

SEQ ID NO: 4479 - DNA, 203 bp, Artificial sequence
  synthetic
ggcgcgccagtcctcggtgagtgtcttcccgtactgggggaggcccaaggcgggtacgccctggtctgtagcatgtatctgcacgttatcgtctccatctattcgacaaaaacggtgtacaacagtatgctatttaaatgcacaaagaataaaaagtacgactgcattgccaagcgggtgcggacaaacgactcggaccgatg

SEQ ID NO: 4480 - DNA, 203 bp, Artificial sequence
  synthetic
ggcgcgccagtcctactggttagagattttaaaacagcccgatgtgcaaaagacagtcagcgggagtcttgtggcatgcgtgatcgtcacacccgcattggaagcctggcttgtgttacctgggggttttgctattaaaggccgctatagggcgtcgaaggaggatctggtgttcattcgaggccgctcgactcggaccgatg

SEQ ID NO: 4481 - DNA, 203 bp, Artificial sequence
  synthetic
ggcgcgccagtcctaccgaactgtatgagtttattctgtgcaccacgccaataaaagggtgcgccatccgtgccgttttgggacagtgtcgcgtgaatgtcggggcactcagttcccacctctctccggcgtctttggcggtctcctgcaggttggcggcaaggcgctccctgtgacggctgagcagccgactcggaccgatg

SEQ ID NO: 4482 - DNA, 203 bp, Artificial sequence
  synthetic
ggcgcgccagtcctggggcactcagttcccacctctctccggcgtctttggcggtctcctgcaggttggcggcaaggcgctccctgtgacggctgagcagcatgtttgctttgagctcgctcgtgtccgagggtgacccggaggtgaccagtaggtacgtcaagggcgtacaacttgccctggaccttcgactcggaccgatg

SEQ ID NO: 4483 - DNA, 203 bp, Artificial sequence
  synthetic
ggcgcgccagtccttgaagcgcgaagccgagctcgggactctggtacgcaaggcgggccagaggtttgaggcgctgaaaagggaacggtcaattttgcgccagccgcgcgacctcccacgggtcgccgacattgacgccctggtcgacgccgtcgcggacctcaaagaagaggtggccgtgcgcctagcgactcggaccgatg

SEQ ID NO: 4484 - DNA, 203 bp, Artificial sequence
  synthetic
ggcgcgccagtcctagccgcgcgacctcccacgggtcgccgacattgacgccctggtcgacgccgtcgcggacctcaaagaagaggtggccgtgcgcctagatgcgctggaagagaatggagaggagacccccactcactcctcttcggagatcaaggacacaatcgtcaggtggaggcttgacgattcgactcggaccgatg

SEQ ID NO: 4485 - DNA, 203 bp, Artificial sequence
  synthetic
ggcgcgccagtccttcaggatcctgtcaactgtaccatcggtggcgatgctttagacccgcacgtggagattcctacgctgctaatcgtaacccccgtctactttccccgaggcgcaaagcatcgtctgcttcaccaagctgccaacttttggtcaagaagtgcgaaggacacctttccatatatcaacgactcggaccgatg

SEQ ID NO: 4486 - DNA, 203 bp, Artificial sequence
  synthetic
ggcgcgccagtccttttaaaagtcaaccgcgataggcagtggcatcagattggctctcccgccgcagcgccgcctggcgaaagttaaaaagaccgagaaacatgcgcgcttcaaagagcgaccgttttctcatgtcctcctgggtcaagctgttgtttgtggctgtaattatgtacatttgctctgcacgactcggaccgatg

SEQ ID NO: 4487 - DNA, 203 bp, Artificial sequence
  synthetic
ggcgcgccagtcctcggcctatttatatcagactagcagactctttgtgtatataaccgacgtgggacagaaatactgtctagttacaccacccttcgagaatgtccctggaaagggccctggcgagactgactggagtgccaatgagtactcatgccccgaagactcgcgagtcagaagaggcctgtcgactcggaccgatg

SEQ ID NO: 4488 - DNA, 203 bp, Artificial sequence
  synthetic
ggcgcgccagtcctttccccgctcctgcagtccccgttattacgtatgccgaaaacggcagaaaggggccttcgtcttccagtggatcgaactctaggtcataccagcccatctccgggggcgaggtagtgatatttgacaacctgtcaatctgttccactacgctcctgactttggcatccgatgtccgactcggaccgatg

SEQ ID NO: 4489 - DNA, 203 bp, Artificial sequence
  synthetic
ggcgcgccagtccttaccagcccatctccgggggcgaggtagtgatatttgacaacctgtcaatctgttccactacgctcctgactttggcatccgatgtcatgttgaggatgaacccggggctgggctcgtccatatcagtgcacccttccgagctgtccatctccctctttgagatcctgcaaggccgactcggaccgatg

SEQ ID NO: 4490 - DNA, 203 bp, Artificial sequence
  synthetic
ggcgcgccagtcctgactcgtatgtcctccagtcggacaagacgtggtcgtagctacagttggccaatgcattcttgtacaggtggataaatagctgtctgaaaaaaacacccgggtttcgcaggctgcagtgtagagtctgacctctgacataagaatacttgccttgcaggatctcaaagagggagcgactcggaccgatg

SEQ ID NO: 4491 - DNA, 203 bp, Artificial sequence
  synthetic
ggcgcgccagtcctaaaaaaacacccgggtttcgcaggctgcagtgtagagtctgacctctgacataagaatacttgccttgcaggatctcaaagagggagatggacagctcggaagggtgcactgatatggacgagcccagccccgggttcatcctcaacatgacatcggatgccaaagtcaggagccgactcggaccgatg

SEQ ID NO: 4492 - DNA, 203 bp, Artificial sequence
  synthetic
ggcgcgccagtccttagatgattgcgagttacagtttgtgggcccagaagagccttgccttatccaaggacagtcggtagtggaggagctttttccgtccccgggcgtcccaagcctgacagtgggtaaaaaacgaaaaatcgcatccctgctctctgacctggatttgtagttgtgtacccgtaacgcgactcggaccgatg

SEQ ID NO: 4493 - DNA, 203 bp, Artificial sequence
  synthetic
ggcgcgccagtcctgtggactggggcctgttggagcagtaaaggcaataactcgtgtgctttgtaaatttccgcccctagcggtcaaccccgtacaaggccatggcgatgtttgtgaggacctcgtctagcacacacgatgaagagagaatgcttccaattgaaggagcgcctcgcagacgacccccccgactcggaccgatg

SEQ ID NO: 4494 - DNA, 203 bp, Artificial sequence
  synthetic
ggcgcgccagtcctcgtgggaaatagacctcacccccgtgtcgcgaaaaggtcaatttcagtaattgtcctcattagtcgggactcgcgcatgcgtgaaccctcactatataaaacagatattacggaagggggctccctggggagcaccgaaccaggcaacacaagggtgaaacccggatttgcccccgactcggaccgatg

SEQ ID NO: 4495 - DNA, 203 bp, Artificial sequence
  synthetic
ggcgcgccagtcctccttgcggagtaaggttgactttttaaaggggacgtgtcattgccacccagctactggtttctgggcggggcttaatgagtcgccggtagctgcctggtatttagtggaggataagctgtagctgggtcctatgggggttgggtggggagaccctagcgtacatgtgactgaaccgactcggaccgatg

SEQ ID NO: 4496 - DNA, 203 bp, Artificial sequence
  synthetic
ggcgcgccagtccttagctgcctggtatttagtggaggataagctgtagctgggtcctatgggggttgggtggggagaccctagcgtacatgtgactgaacatggaggtgtgtatcccaattccgggtattggagatgaaaattgtgagagctggagggcacagattgtggcattcggtaccacatcgcgactcggaccgatg

SEQ ID NO: 4497 - DNA, 203 bp, Artificial sequence
  synthetic
ggcgcgccagtcctctatttgtgaaacaataatgattaaagggggtggtatttcctccgttgtcgactataacctggcgtgtaaacgtgtaaccctgccaaatgcccagaatgaaggacatacctactaagagttccccgggaacggacaattctgagaaagatgaagctgtcattgaggaagatctacgactcggaccgatg

SEQ ID NO: 4498 - DNA, 203 bp, Artificial sequence
  synthetic
ggcgcgccagtccttttgtcagtctgagtctggcttcatttgctctcgacgtcattctaaatttgcttgtttcgaacacatattccaccctgggtagaggggcagagtcggactgcattgcagagtgtatataagaggcgaacgcggaacgttggatagacggcttggagcctcggcggttgttcatacgactcggaccgatg

SEQ ID NO: 4499 - DNA, 203 bp, Artificial sequence
  synthetic
ggcgcgccagtcctgcagagtcggactgcattgcagagtgtatataagaggcgaacgcggaacgttggatagacggcttggagcctcggcggttgttcataatgacagcgtccacggtggccctggctttatttgtggcctcgatactaggtcactgctgggttacggccaactcgacaggtgtcgcacgactcggaccgatg

SEQ ID NO: 4500 - DNA, 203 bp, Artificial sequence
  synthetic
ggcgcgccagtcctgacagccttccagagggtcaccgaggcgcttgtaagcgtggttgccgcgtccaaaaaggtttataccgcaacacgtccaggtgtaccatggagacgacataccgccgcgaggcgctgacagtaagggttattttttgtacgagtggcgacagcgccgagacgatcgccgacgtccgactcggaccgatg

SEQ ID NO: 4501 - DNA, 203 bp, Artificial sequence
  synthetic
ggcgcgccagtcctcgctggtttttgactacccaggcaattctgcggctaggcccactaatatgtcagccacctagccgtgatatatagagagcctgtcgcctctctatatctgatggccggtggctccccggcatagctgtgcttaccactggacattgcggcgcgagctagtctggttgcgggacacgactcggaccgatg

SEQ ID NO: 4502 - DNA, 203 bp, Artificial sequence
  synthetic
ggcgcgccagtcctctctctatatctgatggccggtggctccccggcatagctgtgcttaccactggacattgcggcgcgagctagtctggttgcgggacaatggacccaggccaaagaccgaacccttttggggcgcctggggcgatacccaaaaaaccttgtttgtcacaagggtcaccgggaacacgactcggaccgatg

SEQ ID NO: 4503 - DNA, 203 bp, Artificial sequence
  synthetic
ggcgcgccagtcctttttttcatagcaagaaggggggcactataaggctcagtcgggactgtgcctcaaagacgaacgccgatcggtttctgtgtcggaccatgcctaaagccggtggctcagaatgggccacgttatggattattgatgcccttgaaaacaataagtttccctatttttcctggtttcgactcggaccgatg

SEQ ID NO: 4504 - DNA, 203 bp, Artificial sequence
  synthetic
ggcgcgccagtcctccttggtgttggtggataaaaaatatggctggatatttaaagacctgtacgcccttctgtaccaccacctgcaattgagcaaccacaatgactcccaggtctagattggccaccctggggactgtcatcctgttggtctgcttttgcgcaggcgcggcgcactcgaggggtgaccgactcggaccgatg

SEQ ID NO: 4505 - DNA, 203 bp, Artificial sequence
  synthetic
ggcgcgccagtcctgccagcgctggagaacacgattcatagtgagaaacacatgtgtctaatacaggcaatgctttttgacccgtgactgaaggttaaagctgcaggaagcatgttgtggtttgcgtagtagattacttctgttgaggtggggtaatgctcggaggcagaccattctgacaggtcaaccgactcggaccgatg

SEQ ID NO: 4506 - DNA, 203 bp, Artificial sequence
  synthetic
ggcgcgccagtccttgcaggaagcatgttgtggtttgcgtagtagattacttctgttgaggtggggtaatgctcggaggcagaccattctgacaggtcaacatggcgggacgcaggcttacctggatttctgagtttattgtaggtgctttggactctgataaatatcctttggtcaagtggctagatcgactcggaccgatg

SEQ ID NO: 4507 - DNA, 203 bp, Artificial sequence
  synthetic
ggcgcgccagtcctgtgccagtggggttggggtccagctagttgtggcgagaaagtcgcccacggaaaaggtgttttgtgtcgtggcttttgcctaaaaagatgcctcgctacacggagtcggaatggctcacggactttattatagatgctttagacagtggacgcttctggggggtagggtggttgcgactcggaccgatg

SEQ ID NO: 4508 - DNA, 203 bp, Artificial sequence
  synthetic
ggcgcgccagtcctggcctcacaagaggcgctcagactcgagccagtccagggatcgtgggaaggtgcccaaaaccacatttaaccccctgatttgacaccatgtgccgcctggacagtgagcgcgctctgtcgctcttcagttatctgagcgggacgttggcggcgaccccctttctgtggtgttttcgactcggaccgatg

SEQ ID NO: 4509 - DNA, 203 bp, Artificial sequence
  synthetic
ggcgcgccagtcctacgagctgtatataaatcggcttgtttttggggcggtttgtacgctgggcacagttccctttgattctcatccggtgcaccaaagtctgaacgtgaagggcacgtccttgcctgtactggtgtttgcgaactttgaggccgcgtgtggcccctggactgtgtttctgtaaggtccgactcggaccgatg

SEQ ID NO: 4510 - DNA, 203 bp, Artificial sequence
  synthetic
ggcgcgccagtccttctcagcaccgatttctaggcagcaccctctttaataggtgcaaggggggtgcggtgttggtgagtcacactttcgttgcagacaaaatggacaaggacaggccgggtctcccggccccggatgacaacatagaagaagtaccatctacctcgggtgttcaggaacgggcgtctcgactcggaccgatg

SEQ ID NO: 4511 - DNA, 203 bp, Artificial sequence
  synthetic
ggcgcgccagtcctgggacattgcagtttcttccccttcctcttctgaaacatcgaatgatgagtgatttcaaccacgtaacaagaactgggatgaaccctcgggcagtatcagactgcggggaggggcagtgataagtcatgacaattttagatgaggtagacattttgcatattttcagacccacccgactcggaccgatg

SEQ ID NO: 4512 - DNA, 203 bp, Artificial sequence
  synthetic
ggcgcgccagtcctcgggcagtatcagactgcggggaggggcagtgataagtcatgacaattttagatgaggtagacattttgcatattttcagacccaccatggaatcatttgaaggagagggggactctatacagtcacctgacaatgcgcggggagatgatgtacagaatactggtgagcatattcgactcggaccgatg

SEQ ID NO: 4513 - DNA, 203 bp, Artificial sequence
  synthetic
ggcgcgccagtcctaggaggtgtacaagcccggtaccgtggcaatcccccacccgttccaggtcggggaccaagtgcttgtcagacgccatcgacccggcagccttgagcctcggtggaaaggcccgtacctggtgttgctgaccaccccgaccgcggtaaaagtcgacggtatcgctgcctgggtcccgactcggaccgatg

SEQ ID NO: 4514 - DNA, 203 bp, Artificial sequence
  synthetic
ggcgcgccagtcctgggagctggaaaaagctgatcatcctcttaagctgcgtattcggcggcggcggaacgagtctgcaaaataaaaacccccaccagcctatgaccctcacctggcagggggaccccattcctgaggagctctataagatgctgagtggccactcgattcgctccttcgatgacctccgactcggaccgatg

SEQ ID NO: 4515 - DNA, 203 bp, Artificial sequence
  synthetic
ggcgcgccagtcctgggatcggagacccccacccagggaccaccgacccaccaacgggaggtaagctggccagcgatcgctctgtgtctcgcttctgtgtctaactccgtaactctgactgtccctctgagtgcgcgcattttggtttcagtttgttccgggctgatcgctctgtgagcgacgtgtgacgactcggaccgatg

SEQ ID NO: 4516 - DNA, 203 bp, Artificial sequence
  synthetic
ggcgcgccagtccttcggcagaggatcattgtgttctgatcccaccgccgcgtctagagaggcgcgctctgccatctgactctttctcttgcctctacgctactcgatctcgccgccgtttctggtttctttttgttttgtttctgataagcctctgtgtcggagtttctctcttcgaaatcttcgaacgactcggaccgatg

SEQ ID NO: 4517 - DNA, 203 bp, Artificial sequence
  synthetic
ggcgcgccagtcctctagagtggacacagcttggatacagacacctttagtattactgggtgttccagactagttcctgaggtaccaagttgtgaggggctatgggaaaacccctttgatccacactgcctgatagggtcgcggctggtcgagtcccatacactataataccagttgactttcatgcacgactcggaccgatg

SEQ ID NO: 4518 - DNA, 203 bp, Artificial sequence
  synthetic
ggcgcgccagtcctatgggaaaacccctttgatccacactgcctgatagggtcgcggctggtcgagtcccatacactataataccagttgactttcatgcaatggacactctaactaaaaacattgaagatgaaactgtcaagattattggatcctgtgccgagaaggcacaagaagcaatttctggtcgactcggaccgatg

SEQ ID NO: 4519 - DNA, 203 bp, Artificial sequence
  synthetic
ggcgcgccagtcctccggaattgccgggaagactgggtcctttcttggataaacccactctatgcccggccatttgggcgtgcccccgcaagactgctagccgagtagcgttgggttgcgaaaggccttgtggtactgcctgatagggtgcttgcgagtgccccgggaggtctcgtagaccgtgcacccgactcggaccgatg

SEQ ID NO: 4520 - DNA, 203 bp, Artificial sequence
  synthetic
ggcgcgccagtcctaatcatttatttgtttgttggttttatacctctgaactttaaagtgctaaagactctcaattttatattatatctcaacaaatcaggatgggcgcacaggtatccacgcagaagactggggcacacgagaccggtttgaacgccagtaataattcggttatacactatacaaatcgactcggaccgatg

SEQ ID NO: 4521 - DNA, 203 bp, Artificial sequence
  synthetic
ggcgcgccagtccttccccaaatccgtaggcaggcctcccctgccatctgaatctgaatactggccgcggctccttggttattgtctagtctgtgttgtctggtctgtgtcgacattgtagtcatctttgtgtatgtgtgtgtaagtgtgctggtgtggacgcgtggacaggacaggacgacacagcccgactcggaccgatg

SEQ ID NO: 4522 - DNA, 203 bp, Artificial sequence
  synthetic
ggcgcgccagtcctggtctgtgtcgacattgtagtcatctttgtgtatgtgtgtgtaagtgtgctggtgtggacgcgtggacaggacaggacgacacagccatgggacagacattgactactcctctaactttgactctgactcatttctcggacgtccaagcaagagctcacaatctttcccttgagcgactcggaccgatg

SEQ ID NO: 4523 - DNA, 203 bp, Artificial sequence
  synthetic
ggcgcgccagtcctgagtagcatggactcgaatcagaagagctggagctcgcttggtacggcacgtagcattgctttgcctaaagaccaagggggtatggctataggtgggggcctatagcttgtccagtgctggttgacagactcgtgctacgcgtctggttcgagtataagtagctgcaactcactcgactcggaccgatg

SEQ ID NO: 4524 - DNA, 203 bp, Artificial sequence
  synthetic
ggcgcgccagtcctgggacaagtcaccctcaccgttacggtaacagcggcaacactccttttttgccactatgcctacatggttcccggttggcaagctgaggcaatgcgctcagcccagcggcggacagcggccggaatcatgaagaacgctgtagtggatggcatcgtggccacggacgtcccagacgactcggaccgatg

SEQ ID NO: 4525 - DNA, 203 bp, Artificial sequence
  synthetic
ggcgcgccagtccttactgctgaaagaactcgatttctaaattcagtgactttgccaaagggtacaacctacgcatttggttaccttgattcattgtaactatgtataaaaccagaagtaaacgtgacactgctgagaatttgtatagacactgtaaagctactggcaactgtcctccagatgtagaacgactcggaccgatg

SEQ ID NO: 4526 - DNA, 203 bp, Artificial sequence
  synthetic
ggcgcgccagtccttgaaaaattagattgtatctttaggggtgagtgtttccatcttgtgagaaacacttggaggggaacgtgcagaaattgttgtagaaaatgattgggaaggagccctcaattaatgatctagaaataaagctggaagaacatgtattgcctgctaaccttttaagcaacgaggttcgactcggaccgatg

SEQ ID NO: 4527 - DNA, 203 bp, Artificial sequence
  synthetic
ggcgcgccagtcctctactttgggtgtccgtgtttcttgtttttcatactgggtcgcttatggttacaactaattgttgtaatcattggcagtgcgcgctgaccacgcgattattgatatttccatttgttggatactccaatagtgtcaactcatatacacaacttttaccactgatcaagataaaacgactcggaccgatg

SEQ ID NO: 4528 - DNA, 203 bp, Artificial sequence
  synthetic
ggcgcgccagtccttcatcatatagctattggattggccatccggatattattcttgtgtttatttgtgtaatttgatataatttagaaccctgtataagaatgggagctcaagtttcaactcagaggactggctcgcatgaaaacgccaatatggcaatggatggttctaccattaattacaccacccgactcggaccgatg

SEQ ID NO: 4529 - DNA, 203 bp, Artificial sequence
  synthetic
ggcgcgccagtccttgccatatagcgattggattggccatccggatattgttttagacacttgtgtttgtgagtagatctcttctgacataggatataacaatgggtgcacaggtttcaacacagaaaactggatcacatgaaaacgccaacatggcagtaggaggctccaccatcaactacaccactcgactcggaccgatg

SEQ ID NO: 4530 - DNA, 203 bp, Artificial sequence
  synthetic
ggcgcgccagtcctacacttatcataagaggtgttagttcctaaggataatcaatacacaatattccacgacaattggcgcccaacgtggggctcgaatataagtcgggatatttataaaaatattaattttaatccctagggaccttcgtgcactgcggaaggtataattctactgccttaatagaacgactcggaccgatg

SEQ ID NO: 4531 - DNA, 203 bp, Artificial sequence
  synthetic
ggcgcgccagtcctatcctcggacagtgataattttggaccatcttggcaacagacgtactgtaagtgttgacaaccttaagttaacagcttatcaggataatggcacctccaatgactctggaacaatggctcttatggaagaagatgagtcaagcacatcaagcacttgaaaatgtaaccaccttgcgactcggaccgatg

SEQ ID NO: 4532 - DNA, 203 bp, Artificial sequence
  synthetic
ggcgcgccagtcctagcggtaagcctcctattctatgcaaaacctattttgataggaataggagttatactgcttattgcccttctttttaagataatatcatggcttcctgggaagcccaagaagaattgagagaacttctacatcatctaccagaggacgatccaccagcagatctaactcatctacgactcggaccgatg

SEQ ID NO: 4533 - DNA, 203 bp, Artificial sequence
  synthetic
ggcgcgccagtccttgatagtttgattgatataagagcgagagtggcctccaccggtcaataccccgaggtgtgtgacattcatccagctactggattagacgaatgcgaagctgaggaaatagtcagggttgggaaccttttgtcatacctttaggtcctcttttatcctcctttatagggaacctccgactcggaccgatg

SEQ ID NO: 4534 - DNA, 203 bp, Artificial sequence
  synthetic
ggcgcgccagtcctggggcgctgccggcggcgaggagtcctacttcgacatgggggcggacctgcattggcagccgagcccgcgcgccttggaggccgcctacggtccagaggacttggatgaggaagaggaagaggaggaggatgcacccgctgcggggtactgacgcctccgtgatgtgtttttagcgactcggaccgatg

SEQ ID NO: 4535 - DNA, 203 bp, Artificial sequence
  synthetic
ggcgcgccagtcctacggtccagaggacttggatgaggaagaggaagaggaggaggatgcacccgctgcggggtactgacgcctccgtgatgtgtttttagatgcagcaagccccggaccccgccataagggcggcgctgcaaagccagccgtccggtctagcatcggacgactgggaggccgcgatgcgactcggaccgatg

SEQ ID NO: 4536 - DNA, 203 bp, Artificial sequence
  synthetic
ggcgcgccagtccttcagtgaaaacgtgcctgctctcacagatcacgggacgctaccgctgcgcagcagtatccgcggagtccagcgagtgaccgtcactgacgcccgtcgccgcacctgtccctacgtctacaaggccctgggcatagtcgcgccgcgcgtgctttccagtcgcaccttctaaaaaacgactcggaccgatg

SEQ ID NO: 4537 - DNA, 203 bp, Artificial sequence
  synthetic
ggcgcgccagtcctcgactccgtcacgggcgtgcgcgtgcccgtgcgcacccgtcctcctcgtccctgatctaatgcttgtgtcctcccccgcaagcgacgatgtcaaagcgcaaaatcaaggaggagatgctccaggtcgtcgccccggagatttacggaccaccccaggcggaccagaaaccccgccgactcggaccgatg

SEQ ID NO: 4538 - DNA, 203 bp, Artificial sequence
  synthetic
ggcgcgccagtcctcttgaaacgccccaggaactagacgcagctgcgcttagtcatgtgtaaataaagttgtacaataaaagtctatgtgacgcatgcaaggtgtggtttatgactcatgggcggggcttagtcctatataagtggcaacacctgggcacttgggcacagaccttcagggagttcctgcgactcggaccgatg

SEQ ID NO: 4539 - DNA, 203 bp, Artificial sequence
  synthetic
ggcgcgccagtcctgcgccggggccgctcgctcgttctgcccaccgtgcgctaccaccccagcatcctttaattcgtgtgctgtgatactgttgcagagagatggctctcacttgccgcctgcgcatccccgtcccgaattaccgaggaagatcccgccgcaggagaggcatggcaggcagcggcctgcgactcggaccgatg

SEQ ID NO: 4540 - DNA, 203 bp, Artificial sequence
  synthetic
ggcgcgccagtcctgccgccgatgctattgaaagagaggaaagaggacactaaagggagagcttaacttgtatgtgccttaccgccagagaacgcgcgaagatggccaccccctcgatgatgccgcagtgggcgtacatgcacatcgccgggcaggacgcctcggagtacctgagcccgggtctggtgcgactcggaccgatg

SEQ ID NO: 4541 - DNA, 203 bp, Artificial sequence
  synthetic
ggcgcgccagtcctctcggcccacgcgctcgacatgaccttcgaggtggaccccatggatgagcccaccctcctctatcttctcttcgaagttttcgacgtggtcagagtgcaccagccgcaccgcggcgtcatcgaggccgtctacctgcgcacgcccttctccgccggcaacgccaccacctaagccgactcggaccgatg

SEQ ID NO: 4542 - DNA, 203 bp, Artificial sequence
  synthetic
ggcgcgccagtcctggtcagagtgcaccagccgcaccgcggcgtcatcgaggccgtctacctgcgcacgcccttctccgccggcaacgccaccacctaagcatgagcggctccagcgaacgagagctcgcggccatcgtgcgcgacctgggctgcgggccctactttttgggcacccacgacaagcgccgactcggaccgatg

SEQ ID NO: 4543 - DNA, 203 bp, Artificial sequence
  synthetic
ggcgcgccagtcctgacccgtggccccggggcggagtggcctctcgctccatgaaccggcgcacgtcctgactgccgccggccattgtttcctaggggaagatggaggagcagccgcgtaagcaggagcaggaggaggacttaaccacccacgagcaacccaaaatcgagcaggacctgggcttcgaacgactcggaccgatg

SEQ ID NO: 4544 - DNA, 203 bp, Artificial sequence
  synthetic
ggcgcgccagtcctaccaatcgcggccgcagcacgcggatctcacggcctgcgtcatcacccagggcgcgatcctcgcccaattgcacgccatccaaaaatcccgccaagagtttcttctgaaaaagggtagaggggtctacctggacccccagacgggcgaggtgctcaacacgggtctcccccagccgactcggaccgatg

SEQ ID NO: 4545 - DNA, 203 bp, Artificial sequence
  synthetic
ggcgcgccagtcctgctctgttccacaagtactgcgcgctcactcttaaagactaacgcgcgcccacccggaaaaaaggcgggaattacctcatcgccaccatgagcaaggagattcccaccccttacatgtggagctatcagccccagatgggcctggccgcgggcgcctcccaagactactccacacgactcggaccgatg

SEQ ID NO: 4546 - DNA, 203 bp, Artificial sequence
  synthetic
ggcgcgccagtcctgtggccccctaccaaggaaaacatggttgggttttctttggcttttgtgatcatggcctgctttatgtcaggtctgctggtaggagctctagtgtggttcctgaaacgcaagcccaggtatggaaatgaggagaaggaaaaattgctataaattctttttcttttcacagcacccgactcggaccgatg

SEQ ID NO: 4547 - DNA, 203 bp, Artificial sequence
  synthetic
ggcgcgccagtccttctagtgtggttcctgaaacgcaagcccaggtatggaaatgaggagaaggaaaaattgctataaattctttttcttttcacagcaccatgaatactttgaccagtgtcgtgctgctctctcttcttgtagcttttagtcaggcaggaattattaacttaaatgtatcatggggacgactcggaccgatg

SEQ ID NO: 4548 - DNA, 203 bp, Artificial sequence
  synthetic
ggcgcgccagtcctaattccctcagctactgtggcaatcgtggtgggagtgattgcgggctttgtaactctgatcattgtcttcatatgctacatctgctgccgcaagcgtcccaggtcatacaatcatatggtagacccactactcagcttctcttactgaaactcagtcactctcatttcagaacccgactcggaccgatg

SEQ ID NO: 4549 - DNA, 203 bp, Artificial sequence
  synthetic
ggcgcgccagtcctccgcaagcgtcccaggtcatacaatcatatggtagacccactactcagcttctcttactgaaactcagtcactctcatttcagaaccatgaaggctttcacagcttgcgttctgattagcatagtcacacttagttcagctgcaatgattaatgttaatgtcactagaggtggtcgactcggaccgatg

SEQ ID NO: 4550 - DNA, 203 bp, Artificial sequence
  synthetic
ggcgcgccagtcctccccacctacctcctctttgccctgctcacctgcacctgcgtctgcagcattgtctgcgtggtcatcaccttcctgcagctcatcgactggtgctgcgcgcgctataattatctccaccacagtcccgaatacagggacgagaacgtagccagaatcttaaggctcatctgacccgactcggaccgatg

SEQ ID NO: 4551 - DNA, 203 bp, Artificial sequence
  synthetic
ggcgcgccagtcctctggtgctgcgcgcgctataattatctccaccacagtcccgaatacagggacgagaacgtagccagaatcttaaggctcatctgaccatgcagactctgctcatgctgctatccctcctatcccctgccctcgccacttctgctgactctaaatgcaaattcgcggagatatggcgactcggaccgatg

SEQ ID NO: 4552 - DNA, 203 bp, Artificial sequence
  synthetic
ggcgcgccagtcctgaaatcagttcccactgattcagtacttagaagagccccctccccggcccccttccactgttagctactttcacataaccggcggcgatgactgaccaccacctggacctcgagatggacggccaggcctccgagcagcgcatcctgcaactgcgcgtccgtcagcagcaggagcgactcggaccgatg

SEQ ID NO: 4553 - DNA, 203 bp, Artificial sequence
  synthetic
ggcgcgccagtcctattctgattccgcgcgtagccataggggtagacggggttgaagtcatcttccacccggagcctctttgacatctgagagggaagacaatgaaaattgtggaccaggaatttgacatccctttcaaggtgtggaggaagttcgccgcccgccggggactggaataccagagctggcgactcggaccgatg

SEQ ID NO: 4554 - DNA, 203 bp, Artificial sequence
  synthetic
ggcgcgccagtcctaaaaatcacttacttgaaatctgaaagtatgtctctggtgtagttgttcagcagcacctcgttaccctcctcccagctctggtattccagtccccggcgggcggcgaacttcctccacaccttgaaagggatgtcaaattcctggtccacaattttcattgtcttccctctcagcgactcggaccgatg

SEQ ID NO: 4555 - DNA, 203 bp, Artificial sequence
  synthetic
ggcgcgccagtcctcgagctcagggcggagggcagaaccttattgaatcttgttgttttgaacacgctgcaggtggtggagcagcaggatctgtttctattatgaaggtctgcctgattatgaaagtggagggggcactgtgggagcttttccacatgtgcggagtggacttacaccaacaatttgtacgactcggaccgatg

SEQ ID NO: 4556 - DNA, 203 bp, Artificial sequence
  synthetic
ggcgcgccagtcctgcggagccagctccgagtaacgaatgctgtttctgccctccgtaggagccatataccgcggaggcacaaacggaacctccagggtcgcctgcgccatcacgctctcgtacgagggaggaggagaggaagacaccaccgcacgcctcatctctaacaaggaagagaacgcacgctcgactcggaccgatg

SEQ ID NO: 4557 - DNA, 203 bp, Artificial sequence
  synthetic
ggcgcgccagtccttttcgattgcggtgtttttttcgcgaatttccgcgtccgtgtcaaagtccggtgtttatgtcacagatcagctgatccgcagggtatttaaaccagtcgagtccgtcaagaggccactcttgagtgccagcgagtagagatttctctgagctccgctcccagagaccgagaaaacgactcggaccgatg

SEQ ID NO: 4558 - DNA, 203 bp, Artificial sequence
  synthetic
ggcgcgccagtcctcgcggtgtaccccggttcgagacttgtactcgagccggccggagccgcggctaacgtggtattggcactcccgtctcgacccagcctacaaaaatccaggatacggaatcgagtcgttttgctggtttccgaatggcagggaagtgagtcctattttttttttttgccgctcagcgactcggaccgatg

SEQ ID NO: 4559 - DNA, 203 bp, Artificial sequence
  synthetic
ggcgcgccagtcctacgccgcacctgtccctacgtgtacaaggcactgggcatagtcgcaccgcgcgtcctttcaagccgcactttctaaaaaaaaaaaaaatgtccattcttatctcgcccagtaataacaccggttggggtctgcgcgctccaagcaagatgtacggaggcgcacgcaaacgttctcgactcggaccgatg

SEQ ID NO: 4560 - DNA, 203 bp, Artificial sequence
  synthetic
ggcgcgccagtcctaggcaagcagccgctgtcgcagcggcgactattgccgacatggcccaatcgcgaagaggcaatgtatactgggtgcgtgacgctgccaccggtcaacgtgtacccgtgcgcacccgtccccctcgcacttagaagatactgagcagtctccgatgttgtgtcccagcggcgaggcgactcggaccgatg

SEQ ID NO: 4561 - DNA, 203 bp, Artificial sequence
  synthetic
ggcgcgccagtcctaataagtgttccatatccgtgtttacttaaggtgacgtcaatatttgtgtgacagtgcaatgtaataaaaatatgttaactgttcactggtttttattgctttttgggcggggactcaggtatataagtagaagcagacctgtgtggttagctcataggagctggctttcatcccgactcggaccgatg

SEQ ID NO: 4562 - DNA, 203 bp, Artificial sequence
  synthetic
ggcgcgccagtccttggtttttattgctttttgggcggggactcaggtatataagtagaagcagacctgtgtggttagctcataggagctggctttcatccatggaggtttgggccattttggaagaccttaggaagactaggcaactgttagagaacgcttcggacggagtctccggtttttggagacgactcggaccgatg

SEQ ID NO: 4563 - DNA, 203 bp, Artificial sequence
  synthetic
ggcgcgccagtcctgcaagacacctgcaaatcgcagtcgtcgccgtagacgcacaagcaaaccgactcccggcgccctggtgcggcaagtgtaccgcaatggtagtgcggaacctttgacactgccgcgtgcgcgttaccatccgagtatcatcacttaatcaatgttgccgctgcctccttgcagatcgactcggaccgatg

SEQ ID NO: 4564 - DNA, 203 bp, Artificial sequence
  synthetic
ggcgcgccagtccttatctgtgtatatgtgtcattacacgccgtcacagcagcagaggaaaaaaggaagaggtcgtgcgtcgacgctgagttactttcaagatggccaccccatcgatgctgccccaatgggcatacatgcacatcgccggacaggatgcttcggagtacctgagtccgggtctggtgcgactcggaccgatg

SEQ ID NO: 4565 - DNA, 203 bp, Artificial sequence
  synthetic
ggcgcgccagtccttaaagaaaaagttttatcagttttagacttttcaaccccaggtagaactgctgctgctgtggcttttcttacttttatattagataaatggatcccgcagactcatttcagcaggggatacgttttggatttcatagccacagcattgtggagaacatggaaggttcgcaagatcgactcggaccgatg

SEQ ID NO: 4566 - DNA, 203 bp, Artificial sequence
  synthetic
ggcgcgccagtccttgcgtcgacctccttatcttctagggtagaggtggtggcaggactgggcggtggaatgcttaagctctgctccttttcctcgtcgctgaggacgagatgtgatggcactcgtggcgatgttgacagcaatggctgagtttccatgtctgttgtttctctgcctaggagaacacacgactcggaccgatg

SEQ ID NO: 4567 - DNA, 203 bp, Artificial sequence
  synthetic
ggcgcgccagtcctgaggacgagatgtgatggcactcgtggcgatgttgacagcaatggctgagtttccatgtctgttgtttctctgcctaggagaacacaatggccagccgcgaaggaaatcagttaagcgaccgccacagggagcacacccccgaacgcggaaggggttctgccagtcatccgcctcgactcggaccgatg

SEQ ID NO: 4568 - DNA, 203 bp, Artificial sequence
  synthetic
ggcgcgccagtcctaccccctatttgattttggctggaatgctcccaatgcacatgatcatccacaagacccagaggaacacattcccctacaaaacatgcaacatccaatagcgctaatagattacgaaagtgaaccacaacccccactactccctgctattagttacttcaacctaaccggcggagcgactcggaccgatg

SEQ ID NO: 4569 - DNA, 203 bp, Artificial sequence
  synthetic
ggcgcgccagtccttcagaacgattagatgcgatggagttttgattacaactgaagccagcattcttttgaccaacttaagagtgtggttgtacttgaactatcacacggaacacgctaagcggcaggatagaaggcgaagaagagtgtgttctgccagggccgcgttttgctatacaaaatacgagacgactcggaccgatg

SEQ ID NO: 4570 - DNA, 203 bp, Artificial sequence
  synthetic
ggcgcgccagtccttgtacttttccctggtgacgcagtttcggggtgtgtgttgggtttggcgggattttttacactttactcccattacgtcagtttagggcttgtgtatatatatattgtggagaggttggagagtcactttagagcttgtgctttgtgtgcccgctgtactttgtctggtaagcccgactcggaccgatg

SEQ ID NO: 4571 - DNA, 203 bp, Artificial sequence
  synthetic
ggcgcgccagtccttgtagatgtgactgaagatctcagaccggatcatttggttattgcccgcactggagcagagttcggatccagtggagaagaaactgactaaggtgagtattgggaaaactttggggtgggattttcagatggacagattgagtaaaaatttgttttttctgtcttgcagctgtccgactcggaccgatg

SEQ ID NO: 4572 - DNA, 203 bp, Artificial sequence
  synthetic
ggcgcgccagtcctctaaggtgagtattgggaaaactttggggtgggattttcagatggacagattgagtaaaaatttgttttttctgtcttgcagctgtcatgagtggaaacgcttcttttaaggggggagtcttcagcccttatctgacagggcgtctcccatcctgggcaggagttcgtcagaatcgactcggaccgatg

SEQ ID NO: 4573 - DNA, 203 bp, Artificial sequence
  synthetic
ggcgcgccagtccttgactcttaaagagtagcccttgcccgcgctcattttgaaaacggcgggaatcacgtcacccttggcacctgtcctttgcccttgtcatgagtaaagagattcccacgccttacatgtggagctatcagccccaaatggggttggcagcaggcgcttcccaggactactccacccgactcggaccgatg

SEQ ID NO: 4574 - DNA, 203 bp, Artificial sequence
  synthetic
ggcgcgccagtcctttctcctatgattagtcgtccccatatggctctgaatgaaatctaagatctttttttttttctcttacagtatggtgaacatcaatcatgatccctagaaatttcttcttcaccatactcatctgtgcttttaatgtctgtgctactttcacagcagtagccactgcaagcccacgactcggaccgatg

SEQ ID NO: 4575 - DNA, 203 bp, Artificial sequence
  synthetic
ggcgcgccagtccttcctgctgacgcagtttcggggtgtgtgttgggcttggcggtatttttttttcactttactcccattacgtcagtttagggcttgtgtatatattgtggagaggttggagagtgtttttagagcttctttagagcttgtgctttgtgcgcccgctgtactttgcctggtaagcccgactcggaccgatg

SEQ ID NO: 4576 - DNA, 203 bp, Artificial sequence
  synthetic
ggcgcgccagtcctctgccgccagcgatcccacttgagttttatggcgaggtcataggcgatgttgacgagccgctggtctccagagagtttcatgaccagcatgaaggggattagctgcttgccaaaggaccccatccaggtgtaggtttccacatcgtaggtgagaaagagcctttctgtgcgaggcgactcggaccgatg

SEQ ID NO: 4577 - DNA, 203 bp, Artificial sequence
  synthetic
ggcgcgccagtcctactgtagctaggccttagcgtgccttggatactgcctgatagggcgacggcctagtcgtgtcggttctataggtagcacatacaaatatgcagaactctcatttttctttcgatacagcctctggcacctttgaagatgtaaccggaacaaaagtcaagatcgttgaatacccccgactcggaccgatg

SEQ ID NO: 4578 - DNA, 203 bp, Artificial sequence
  synthetic
ggcgcgccagtcctggcttttaaagcgctacagtgatgtctctcagtattgacgtgacgagtcttccttctattccttcaactatatataagaatgaatcgtcttcaacaacgtcaactctttctggaaaatctattggtaggagtgaacagtacatttcaccagatgcagaagcattcaataaataccgactcggaccgatg

SEQ ID NO: 4579 - DNA, 203 bp, Artificial sequence
  synthetic
ggcgcgccagtcctggctattaaagctgtacaatggggaagtacaatctaatcttgtcagaatatctatcatttatatataattcacaatctgcagttcaaattccaatatattactcttccaacagtgaattagaaaatagatgtattgaatttcattccaagtgtttagagaactcaaagaatgggcgactcggaccgatg

SEQ ID NO: 4580 - DNA, 203 bp, Artificial sequence
  synthetic
ggcgcgccagtcctggcttttaaagcagtaccagtagtgtgttttacctctgatggtgtaaacatgaaagtactagctttaagacacagtgtggctcaagtgtatgcagacactcaagtctacgttcatgatgatacaaaagatagttatgaaaacgcttttttaatctctaatcttacgacccataacgactcggaccgatg

SEQ ID NO: 4581 - DNA, 203 bp, Artificial sequence
  synthetic
ggcgcgccagtcctctgttttacgtatgtccatctgcccttccgaggacgaccagtaaccttaccatcatgcttaattgatattaataatcaatgggccattctaggccgagatgtcctccagcaatgccaaagttccctttaccttgcagaccaaccctctcgcgttctaccaatccagacacctagcgactcggaccgatg

SEQ ID NO: 4582 - DNA, 203 bp, Artificial sequence
  synthetic
ggcgcgccagtcctttccgtggcgtctcctgaaacgaggtgcatgcccaagacccggagacagcgtaaccaccgaatcaaaacacaaagaccttcaactccatgggtaagtctagtctctttatttgcctcttttgctcatacatggctagtctctttgtccctggcgaccccagtcggtgcacacttcgactcggaccgatg

SEQ ID NO: 4583 - DNA, 203 bp, Artificial sequence
  synthetic
ggcgcgccagtcctccttggcgaaatgctccgagcctgtcaggcttggacaccaaaggataagaccaaagttctagtagttcagccccgtaaaacccctccaacacaaccgtgcttccggtgtggaaaggtgggacactggagccgagactgcactcagcctcgcccccctccggggccctgccccctcgactcggaccgatg

SEQ ID NO: 4584 - DNA, 203 bp, Artificial sequence
  synthetic
ggcgcgccagtcctcttccgtagggctcccgtgtcccttccctcatgtctaattgacaccaagaatgagtggaccatcatcggccgggacgtcctgcagcaatgccagggggccctttacttaccggaggacctcccggccccgacccagttatccccggtgaccacccctgcagtcatcggcttagacgactcggaccgatg

SEQ ID NO: 4585 - DNA, 203 bp, Artificial sequence
  synthetic
ggcgcgccagtcctaccagcgatggaaagggcccgtacaatctctccaggaagcagcaggagcagctctccttcaagtcagtgacggctcgccccagtggatcccttggcggctcctgaagaagactgtatgcccaaaacccgacgaccccgaacccgcagggcacgtcgaaacagaccaccaacacccgactcggaccgatg

SEQ ID NO: 4586 - DNA, 203 bp, Artificial sequence
  synthetic
ggcgcgccagtccttcccttggcggctcctgaagaagactgtatgcccaaaacccgacgaccccgaacccgcagggcacgtcgaaacagaccaccaacaccatgggtaacgtactcttcttaactttattggccaccctgggcatcccagtacttcaggccagccggtgtacaatcacggtaggtatccgactcggaccgatg

SEQ ID NO: 4587 - DNA, 203 bp, Artificial sequence
  synthetic
ggcgcgccagtcctcagtaggcgcccgtccccccgggggaaacatacaagtgggggctcgtccgggatctgttccgctctcgccgttccccccctcccactatgggtcagacccacacatccagtcccgtccctaaggcccccagggggctctccacccaccactggcttaatttcctgcaggcggctcgactcggaccgatg

SEQ ID NO: 4588 - DNA, 203 bp, Artificial sequence
  synthetic
ggcgcgccagtccttaaccacatgccaataatgctgcctaactgtcccctgtaaatgtgtcccttccccaaaatattgttgtatatagttggaatagtaaaatggatgcacagccttctgcaaagcggcgcaaaagggacactgtagaaaatatatatagacattgtgtggggtcaggtacatgtccacgactcggaccgatg

SEQ ID NO: 4589 - DNA, 203 bp, Artificial sequence
  synthetic
ggcgcgccagtcctttgaaaaggaggagcaggaagagcaggataagtgtccttaccgggtggtgacagaatgtggggtttgtcataagggattgtgtatgtatgtgttggccacggacgaaggaatcagagggtttgagcaacagctgtgtggagaccttgacattgtgtgtcctgcctgtgccaagccgactcggaccgatg

SEQ ID NO: 4590 - DNA, 203 bp, Artificial sequence
  synthetic
ggcgcgccagtccttggctacgtatggggtgatcataaacacgcccaggaagtgacgtatgtcagccaatcagcatcgagcatataacctatataaaccgatgcacttccgcatttcgtcagactgcatccggtctccggcgagtgaacatctctgggaagagctccacacttgtggtgagtcaaattcgactcggaccgatg

SEQ ID NO: 4591 - DNA, 203 bp, Artificial sequence
  synthetic
ggcgcgccagtccttgcacttccgcatttcgtcagactgcatccggtctccggcgagtgaacatctctgggaagagctccacacttgtggtgagtcaaattatggctttcaatccacctgttattagagcattctcttcacctgcttttacttatgtcttcaaatttccatatccatcatggaaagaacgactcggaccgatg

SEQ ID NO: 4592 - DNA, 203 bp, Artificial sequence
  synthetic
ggcgcgccagtcctttcctgcaactccaccaaattctcctggcagctctgtgagtacttctgccttctttgataattggtgcgcacaaccgcgagacgaagatgagctcagggaatacgaaagacaagcatcgcgcctacaaaagaaaagggagtccagggagagacgagaggaaacgcccatggcaacgactcggaccgatg

SEQ ID NO: 4593 - DNA, 203 bp, Artificial sequence
  synthetic
ggcgcgccagtcctcaggtaacctgggggatacggacggagaggactccaagtcagaagcatcggaagtggattattgtccacccaagaaaaggcgtgtgatttcagcaactccaccaaacagtccagtaagtggtccaagcctttctacctttttagatacttggcaatcacaacctagagacgacgcgactcggaccgatg

SEQ ID NO: 4594 - DNA, 203 bp, Artificial sequence
  synthetic
ggcgcgccagtcctagtccgtggagtgagcttctattagagtcgttaacacgtttgaataatttctactgaaaggagtagaagaaaggagattcattcccaatggcaacaaaggggatgaataagtctcgggctcgatcccgaggcgtcaatatggtagcggctagagtgaagaacctagccgttaaacgactcggaccgatg

SEQ ID NO: 4595 - DNA, 203 bp, Artificial sequence
  synthetic
ggcgcgccagtcctctttgctcactcagcacaggatctgatcaggagatttgtctccggtgctttacaccggagcacaaatttaaaaattgcccaaggcctggcaaataacctaggggactaggttttcttttaatttacacgtctgtcaatatgggtgcaaacaatagcaaggagtctgtgtcaagccgactcggaccgatg

SEQ ID NO: 4596 - DNA, 203 bp, Artificial sequence
  synthetic
ggcgcgccagtcctgtggtgacccagcccctctgcttcggcaggggggctttcgctcgctcagcacgagatctgatcaggagcccctcccagtgtgctttacacctggcgaggggttaaaaattgcccaaggcctggcaaaacaacctaggggactaggttttccttttattaataatatctgtcattcgactcggaccgatg

SEQ ID NO: 4597 - DNA, 203 bp, Artificial sequence
  synthetic
ggcgcgccagtcctaggaatgcctcgagatgccatgtggacgagggcgtgcccacggtgtatcttaacccaggcgggggccgcttgggtgaaatagggttgttatacaagcctttgggagtacagcctgatagggtgttgcagagacctgctacaccactagtataaaaactctgctgtacatggcaccgactcggaccgatg

SEQ ID NO: 4598 - DNA, 203 bp, Artificial sequence
  synthetic
ggcgcgccagtcctctggagaagcattgccagggttacgtcgcggcagaacccggttcgcagacggccgcggcgagcgagcccccttttttcttttgccagatgcatcccgtcctgcgccaaatgcgtcccacccccccggcgaccaccgcaaccgcggccgtagcaggcgccggcgctgtacaacagcgactcggaccgatg

SEQ ID NO: 4599 - DNA, 203 bp, Artificial sequence
  synthetic
ggcgcgccagtcctggggcgccgccagcggcgaagagtcccactttgacatgggggcggacctgcattggcagccgagcccgcgcgccttggaggccgcctacggtccagaggacttggatgaggatgaggaagaggaggaggatgcacccgctgcggggtactgacgcctccgtgatgtgtttttagcgactcggaccgatg

SEQ ID NO: 4600 - DNA, 203 bp, Artificial sequence
  synthetic
ggcgcgccagtccttgcagcccagactggggcaacggatgttttgaatgcataaaataaaactcaccaaggccatagcgtgcgttctcttccttgttagagatgaggcgcgcggtggtgtcctctcctcctccctcgtacgagagcgtgatggcgcaggcaaccctggaggttccgtttgtgcctccgcgactcggaccgatg

SEQ ID NO: 4601 - DNA, 203 bp, Artificial sequence
  synthetic
ggcgcgccagtcctgacgcccgtcgccgcacctgtccctacgtctacaaggccctgggcatagtcgcgccgcgcgtgctctccagtcgcaccttctagaaaatgtccattctcatctcgcccagcaataacaccggctggggtcttactaggcccagcaccatgtacggaggagccaagaagcgctcccgactcggaccgatg

SEQ ID NO: 4602 - DNA, 203 bp, Artificial sequence
  synthetic
ggcgcgccagtcctgcgccagggccgctcgtttgttctgcccaccgtgcgctaccaccccagcatcctttaatccgtgtgctgtaatactgttgcagagagatggctctcacttgccgcctgcgcattcccgtcccgaattaccgaggaagatcccgccgcaggagaggcatggcaggcagcggcctacgactcggaccgatg

SEQ ID NO: 4603 - DNA, 203 bp, Artificial sequence
  synthetic
ggcgcgccagtccttatcgtgggcctgggagtgaaaagtctgaagcgccgccgatgctattaagagaggaaagaggacactaaagggagagcttaacttgtatgtgccttaccgccagagaacgcgcgaagatggccaccccctcgatgatgccgcagtgggcgtacatgcacatcgccgggcaggaccgactcggaccgatg

SEQ ID NO: 4604 - DNA, 203 bp, Artificial sequence
  synthetic
ggcgcgccagtccttagccatgctccagcccagcgttggtttccttctgttcatcctgtgggggttctagacgagccggctcttccaagcccaggtcctgcttgattttgggttgctcgtgggtggttaagttctcctcctcctgctcctgcttacgcggctgctcctccatcttcccctaggaaacacgactcggaccgatg

SEQ ID NO: 4605 - DNA, 203 bp, Artificial sequence
  synthetic
ggcgcgccagtcctaatcggtctctgcgctcgctcacccgcagttgcttgtaccacaaaaacgaagatcagctgcagcgcactcttgaagacgccgaggctttgttccacaagtactgcgcgcttactcttaaagactaacgcgcgcccacccggaaaaaaggcgggaattacctcatcgccagcacccgactcggaccgatg

SEQ ID NO: 4606 - DNA, 203 bp, Artificial sequence
  synthetic
ggcgcgccagtcctttgttccacaagtactgcgcgcttactcttaaagactaacgcgcgcccacccggaaaaaaggcgggaattacctcatcgccagcaccatgagcaaggagattcccacaccttacatgtggagctatcagccccagatgggcctagccgcgggcgcctcccaggactactccacccgactcggaccgatg

SEQ ID NO: 4607 - DNA, 203 bp, Artificial sequence
  synthetic
ggcgcgccagtcctcccttttcaggctccccaggcctctaccccgacgagttcataccgaacttcgacgcagttagagaagcggtcgacggctacgactgaatgtcctatggtgactcggctgagcttgctcggttaaggcatctggaccactgccgccgcctgcgctgctttgcccgggagagctgccgactcggaccgatg

SEQ ID NO: 4608 - DNA, 203 bp, Artificial sequence
  synthetic
ggcgcgccagtcctttcggaggtgagctaaggcttcccccttgtaaggagggggttagcccatacaaggtggtcgggtatttaattttaggggcggtcctgggtgggtgcatagcggtgctagcccaactgccttgctgggtggaaatcaatctttatctgctgggttagatattgcggggaggaacccgactcggaccgatg

SEQ ID NO: 4609 - DNA, 203 bp, Artificial sequence
  synthetic
ggcgcgccagtcctaggccagtaatcgggaatcctcagcctttccaagtggaagggggtctaaggaatcttcttttttctttttcagtatggtgatcagccatgattcctaggttcttcctatttaacatcctcttctgtctttttaacgtgtgcgctgcctttgcggccgtttcgcacacctcaccccgactcggaccgatg

SEQ ID NO: 4610 - DNA, 203 bp, Artificial sequence
  synthetic
ggcgcgccagtcctgccattccccacctaccttctctttgccctgctcacctgcacctgcgtctgcagcattgtctgcctggtcattaccttcctgcagcttatcgactggtgctgcgcgcgctacaattatcttcaccacagtcccgaatacagggacaagaacgtagccaaactcttaaggcttatcgactcggaccgatg

SEQ ID NO: 4611 - DNA, 203 bp, Artificial sequence
  synthetic
ggcgcgccagtcctcctgttttgatctcggctggaactctgttggggcatttacatacacactacaaaacagttcaccagccttcacaccgcctccccgcagaaatcagttccccctgattcagtacttagaagagccccctccccggcccccttccactgttagttactttcacataaccgccggcgcgactcggaccgatg

SEQ ID NO: 4612 - DNA, 203 bp, Artificial sequence
  synthetic
ggcgcgccagtcctctggatgtgaccgaggagctgcgaccagaccacctggtgatggcctgtaccgggaccgagttcagctccagtggggaggacacagattagaggtaggtttaagtagtgggcgtggctaaggtaagtataaaggcgggtgtcttacaagggtctttttgcttttctgcagacatccgactcggaccgatg

SEQ ID NO: 4613 - DNA, 203 bp, Artificial sequence
  synthetic
ggcgcgccagtcctaccgccgctgccgccaggagcgcgtccgcgacaccgcttctaaaagcgcaccgcggcacggtcgtggccccgcgcagctacgggctcatgcaatgcgtggacacggccaccaactcacccgtggagatcaagtaccatctgcatcttaagcacgccctctcccgcctctacgagcgactcggaccgatg

SEQ ID NO: 4614 - DNA, 203 bp, Artificial sequence
  synthetic
ggcgcgccagtccttattgtttacttgtttgttggtttcataccattaaattacaaggtcttagaaactctcaactttattttgacactcaatacagcaaaatgggagctcaagtatcaacgcagaagactggggcacatgagactagcttgaacgccaacgggagttcggtcattcactacaccaaccgactcggaccgatg

SEQ ID NO: 4615 - DNA, 203 bp, Artificial sequence
  synthetic
ggcgcgccagtccttgttataaaaccatttcctcgtgccttgacctttaacacatttgtgaacttctttaaatcccttttattagtccttaaatactaagaatgggtgcacaagtatccacacaaaaatccggatctcatgaaactggcacttatgccacaggtggatcaacaattaattacacaaatcgactcggaccgatg

SEQ ID NO: 4616 - DNA, 203 bp, Artificial sequence
  synthetic
ggcgcgccagtcctgtttacatccagatccaagatcaagagtggcttggaaataaggggcacttgttctttgtctcaaaggacttacaaaaacaagggtgatgaagattaagaaaaagcctccttcagttgcaaggagctaattcttaaaacttcatctagactaaggataaatcgattccaatcacgcgactcggaccgatg

SEQ ID NO: 4617 - DNA, 203 bp, Artificial sequence
  synthetic
ggcgcgccagtccttcttatgccacagcttatattaagaaaaagaacttgatgaagattaaggcaaccagtggtgctatcttcatctctttgatttgagtcttaagtgaatacacaggttctaatactgttcttctgtccaacggtataattcagccaggcctaagacagtagctaatcacagtcatccgactcggaccgatg

SEQ ID NO: 4618 - DNA, 203 bp, Artificial sequence
  synthetic
ggcgcgccagtcctcatgtaagtattgtctcaccccaagatgatccctggacaccaacaaccccctaacctccccaagttgtcattaagaaaaaatatatgatgaagattaaaaccttcatcagagctatttcttctacgcttggttaggaccagtattcacaaactattttacaatccctacccaatcgactcggaccgatg

SEQ ID NO: 4619 - DNA, 203 bp, Artificial sequence
  synthetic
ggcgcgccagtcctcccacatcccattacctcttccaccccctcccgtccaacgcccgcaccatcgtcgagcgtgaggctgactgggatggctgtgatctagaaaagaaatggctcgacctcgtcatagaggacgatgccaagttccttctggagaacggctctctcccgtttggctccacccttgcccgactcggaccgatg

SEQ ID NO: 4620 - DNA, 203 bp, Artificial sequence
  synthetic
ggcgcgccagtcctagtccctggaggttggctgactttcttcctatttctcttttcactgcgaattgtgtggattggtattctttagagcttgggagttgtctcatattgaattcatatattttactctatactacactcaaacacggctctctggtcagttaagaaaatcatttatagaataataaacgactcggaccgatg

SEQ ID NO: 4621 - DNA, 203 bp, Artificial sequence
  synthetic
ggcgcgccagtccttaacaacaaacataaagataaggggggatgttttaagtgtggaaaacggggtcattttgcaaaagactgtcgtgaacatataaataagcccgtagaagcaaaaactccaggactctgccctaggtgtaaaagaggaaagcattgggctaatgaatgtaaatctaaaactgacagcgactcggaccgatg

SEQ ID NO: 4622 - DNA, 203 bp, Artificial sequence
  synthetic
ggcgcgccagtcctacctgttaatctctggggccgcgacttactttctcaaatgaaactcatgatgtgtagtccaaatgatatagtcacggcacaaatgttagcacaaggttattgtcccggaaaaggactaggaaaaaaggaaaatggtattctgcagccccttcaaaatcaaggacaatgtgataacgactcggaccgatg

SEQ ID NO: 4623 - DNA, 203 bp, Artificial sequence
  synthetic
ggcgcgccagtcctgttgttgatcccgcgggacgggacatctggcgcccaacgtggggcttggatacgagggaatttgtgaggaagacggcgcagggaccggccggcgattaaaaagcgaaagtacattgtcttagccgccgcgggagcctgccgcgtcggactcagaggtaagtggtgcgctcggaacgactcggaccgatg

SEQ ID NO: 4624 - DNA, 203 bp, Artificial sequence
  synthetic
ggcgcgccagtcctggtggtgaaccaaccacttggtggtcgtaatgagcaattctgggacggaaccgactactttggggtgtccgtgtttcttttgttcatattaaactgttttatggtcacaacacaacttggtacgatttgtgattattcactgctcacttgtcacagtaaatatacacaatcatccgactcggaccgatg

SEQ ID NO: 4625 - DNA, 203 bp, Artificial sequence
  synthetic
ggcgcgccagtccttacctagccaggggcaatgggactgcattgcatatccctaatgaaccattgagatttctctggtcattacccggtgatggttactagaggggggcctctagtactagatctatactgcctgatagggtcgcggctggccgaccatgacctgtatagtcagttgatttgagcaatcgactcggaccgatg

SEQ ID NO: 4626 - DNA, 203 bp, Artificial sequence
  synthetic
ggcgcgccagtcctaggggggcctctagtactagatctatactgcctgatagggtcgcggctggccgaccatgacctgtatagtcagttgatttgagcaatatggttttctttttcgcttctaccaagactaatgagactgctgaatccaaagacaaggtgcccaagcctcgcctcatgtcccaaggccgactcggaccgatg

SEQ ID NO: 4627 - DNA, 203 bp, Artificial sequence
  synthetic
ggcgcgccagtcctacctagccaggggcaatgggactgctttgcatatccctaatgaagtattgagatttctctgctcattacccggtgatggttgtgtggggggggccccatacactagatccatactgcctgatagggtcgcggctggccgaccataacctgtatagtcagttgaattcagccaagcgactcggaccgatg

SEQ ID NO: 4628 - DNA, 203 bp, Artificial sequence
  synthetic
ggcgcgccagtcctggggggccccatacactagatccatactgcctgatagggtcgcggctggccgaccataacctgtatagtcagttgaattcagccaagatgtgtttctttttccacacaaagaccaacgatattagcccaatgacaagaaagacttctgttgaacgcctcatgtccccagggcctcgactcggaccgatg

SEQ ID NO: 4629 - DNA, 203 bp, Artificial sequence
  synthetic
ggcgcgccagtccttcccacccagtgattgttgttgtgacaagaaaattacatagatcatgttttacaacagtattctcatggaatgtgtcggtctggaggatgttgtaccttcctgacggtcgggccatggtgggtcagccttttgtgtgggattttgtctgggtttgtcccgtgggtctcctgatgcgactcggaccgatg

SEQ ID NO: 4630 - DNA, 203 bp, Artificial sequence
  synthetic
ggcgcgccagtcctaacatcgatccgctcagatcggcacaaccgaacacggcccccgaagtcgggcatcccaaaaccagacaccaccgcaaagaggacctagacaaagggccaccacagttcaaggcctgcatcaggagacccacgggacaaacccagacaaaatcccacacaaaaggctgacccacccgactcggaccgatg

SEQ ID NO: 4631 - DNA, 203 bp, Artificial sequence
  synthetic
ggcgcgccagtccttcaactctcaagatccttcctcttcttactttgttccgctcctcgcctagtcccaacacagcaatcaccaaccagatcgaagaaaccgcggcaggtcgacccaactgagcaacatcgactgcaacttcacacaagcctccaactggcctccaacagataccgcaaagaacccaacgactcggaccgatg

SEQ ID NO: 4632 - DNA, 203 bp, Artificial sequence
  synthetic
ggcgcgccagtcctacggcatatcagccaatcaacacagcccaacacaaaggagacacccgacgggacacaaatccaagggtcaggtgatcccgccccaaacacaggactcaaagcccaccagaagggcacaccccagagactccacaggccatccctctccaaaagacccgagacgaactacacggccgactcggaccgatg

SEQ ID NO: 4633 - DNA, 203 bp, Artificial sequence
  synthetic
ggcgcgccagtcctcacaggactcaaagcccaccagaagggcacaccccagagactccacaggccatccctctccaaaagacccgagacgaactacacggcatggacaaagtgacggatgccatcatgactgggcgattatcactcgacacaatccctggctttcaatgctctgcgccgacctccaggcgactcggaccgatg

SEQ ID NO: 4634 - DNA, 203 bp, Artificial sequence
  synthetic
ggcgcgccagtcctttgctttaccaataacatcgagcttacatactcctcttgaaaatcaagagaggctgagttttgccacgggtgcagaaccgggacaagatggtgcccacctacccgtacagcagcctattagattggagaccaccaccaaacaccctaccatggatcctcaaccttgtggtctttcgactcggaccgatg

SEQ ID NO: 4635 - DNA, 203 bp, Artificial sequence
  synthetic
ggcgcgccagtccttaagcatcaatataacttatctgcatctaatccaatctgcttcccagtacttcttatatacttgaaataaagcaatgatgaatattaagaaaaaactaggctagtattgtatagtcttgaccttcttgaaacaaggtagcctagcttgcttaaccggctcttaaagggatcgagcgactcggaccgatg

SEQ ID NO: 4636 - DNA, 203 bp, Artificial sequence
  synthetic
ggcgcgccagtcctagaaaaaactaggctagtattgtatagtcttgaccttcttgaaacaaggtagcctagcttgcttaaccggctcttaaagggatcgagatggctgctggtccactaagagccaaagaatgggcaaggagacaattggacaatacaatcagtcatccagttggtccacggccttcgcgactcggaccgatg

SEQ ID NO: 4637 - DNA, 203 bp, Artificial sequence
  synthetic
ggcgcgccagtccttagacaatcctgaccgggcaataggactgcattgcatatccttaggtggtattgagaaacctctgccacccaccggcgtggatctctatggggggggccccatagactgggtctatactgcctgatagggtcgcggctggtcgaccactgactgtataaccagttgtactcaaccgactcggaccgatg

SEQ ID NO: 4638 - DNA, 203 bp, Artificial sequence
  synthetic
ggcgcgccagtcctgagggaatgggaaaccctccatggccgaatgcagggtgacagcctgccggcggatgcctgttgttagtataatccgttgtttgccacatggattccacagtctcttttccagcatacaccacctactttcctcaccgtatggcaagaatgcacagaatcgccactagtgtacagcgactcggaccgatg

SEQ ID NO: 4639 - DNA, 203 bp, Artificial sequence
  synthetic
ggcgcgccagtcctacatgtgtatccgtggaggatcgcccgggactggattccatatcccattgccatcccaacaaacggagggtatacccaccacgtgcgcgtttgcagtgggaatctgcaaatttagtcatactgcctgatagggtgtgggcctgcactttggggtactcaggctgttcatataatcgactcggaccgatg

SEQ ID NO: 4640 - DNA, 203 bp, Artificial sequence
  synthetic
ggcgcgccagtcctctactggattggtgattaccaatctgtactagtgttgtattaagacttgttgtgtggagaaaatggactctttcaagaagatttttgatgaagctgcaattgaatctggattttctggcattctcgacccccggctccgcgaaccctattccacttgcttttggcgtttctggtcgactcggaccgatg

SEQ ID NO: 4641 - DNA, 203 bp, Artificial sequence
  synthetic
ggcgcgccagtcctagagtagcttaaaacgtatatagacggcctacatattatagaatgcgtatccggaacgccaagcccggacaagtccctgatatatagatgcactgctacataagcctgcaggaggttccatatactatggagataataaaaacagtgtgtgcaagtgttcttaggaaaactccacgactcggaccgatg

SEQ ID NO: 4642 - DNA, 203 bp, Artificial sequence
  synthetic
ggcgcgccagtcctaaaccccagccttgagatgctacgtggacgagggcatgcccaagacacaccttaacctggacgggggtcgtccaggtgaaagtacccatctttgggtgctgggagtacagcctgatagggcgctgcagaggcccactgacaggctagtataaaaatctctgctgtacatggaaccgactcggaccgatg

SEQ ID NO: 4643 - DNA, 203 bp, Artificial sequence
  synthetic
ggcgcgccagtcctaggaccacgctccgtaatcgagcccaagtactcaaaccccagcacccctgggtcacgccctacgccgcccttttaacgcttcggctaatagggtctatccggcgggttgacaaagggcgcagggttacctggtactacgagcttgggtgtccctgggagtaatcccagggtgcccgactcggaccgatg

SEQ ID NO: 4644 - DNA, 203 bp, Artificial sequence
  synthetic
ggcgcgccagtcctatagggtctatccggcgggttgacaaagggcgcagggttacctggtactacgagcttgggtgtccctgggagtaatcccagggtgccatgctgcagcgcaggcgggcgagggtggtgcctcggcctaggggaagagcgcaagtgaccccgtgctgcataaatccccccccttttcgactcggaccgatg

SEQ ID NO: 4645 - DNA, 203 bp, Artificial sequence
  synthetic
ggcgcgccagtcctgccggggaccagctgattacttgtcctgcgagttcctcttgagactggccgaaaggcagccacggggccaccaaggcggcgcagcgctgcatgcggcaaggggaaaaatccttcgggtgacccctggtggcaatcccttcccttaggagcatgagtgtggtcgacacattcacccgactcggaccgatg

SEQ ID NO: 4646 - DNA, 203 bp, Artificial sequence
  synthetic
ggcgcgccagtcctttgatccagcaaaagataataaatggccatatttagaaagtagggtgacggtatttacatttccacatgcatttccatttgataaaaatggtaatccagtatatgaaataaatgataaaaattggaaatgtttttttgaaaggacatggtccagattagatttgcacgaggacgcgactcggaccgatg

SEQ ID NO: 4647 - DNA, 203 bp, Artificial sequence
  synthetic
ggcgcgccagtcctccttgaccatgccttctactgctgcatcctcttacagtaatgttacagtaccattaacatctgcatgggatgtacctatatatactggcccggacattatattgccatcccatactcctatgtggcctagtacatctcctaccaatgcttccaccaccacctatataggtattccgactcggaccgatg

SEQ ID NO: 4648 - DNA, 203 bp, Artificial sequence
  synthetic
ggcgcgccagtcctgcccggacattatattgccatcccatactcctatgtggcctagtacatctcctaccaatgcttccaccaccacctatataggtattcatggcacacaatattatttatggccatggtattattattttcctaaaaaacgtaaacgtattccctatttttttgcagatggctttgcgactcggaccgatg

SEQ ID NO: 4649 - DNA, 203 bp, Artificial sequence
  synthetic
ggcgcgccagtcctgtaaccacaaccgaaaccaacgatcatccggtgctggtgactcacgcgctgtcaataccgtgacacagagtgccacgtcctccacagatgaatcctcttcagctgttacagccgcttccggcggagatcaaagggactaaattgttagcccactgggattcaggggcaacaatacgactcggaccgatg

SEQ ID NO: 4650 - DNA, 203 bp, Artificial sequence
  synthetic
ggcgcgccagtcctttgttggccaattggtccaggagagggtggctaggcctgcttctttgagacctcgttggcataaaccgtctactgtacttaaggtgttgaatccaaggactgttgttattttggaccatcttggcaacaacagaactgtaagtatagataatttaaaacctacttctcatcagacgactcggaccgatg

SEQ ID NO: 4651 - DNA, 203 bp, Artificial sequence
  synthetic
ggcgcgccagtcctttgaaagggggcgctagggtctcacccctaacatgccaacgacagtccctgcattgcactccacacttacgttgtgcgtacgcggggcccgatggaccatcgttcacccacctacagctggactcacgacaccgcgtggccattttagctggattgtgcggacgaacaccgcttcgactcggaccgatg

SEQ ID NO: 4652 - DNA, 203 bp, Artificial sequence
  synthetic
ggcgcgccagtcctacccgaaacccgcctttcataagttttaccgtctgtcccgacgttaaagggaggtaaccacaagcatactgccgccttccccggcgttaacgggatgcaaccgtaagacacaccttcatccggaagtgaaacggctgcgtcacatagttttgcccgttttcacgagaaatgggacgactcggaccgatg

SEQ ID NO: 4653 - DNA, 203 bp, Artificial sequence
  synthetic
ggcgcgccagtcctcacactggtgacaggctaaggatgcccttcaggtaccccgaggtaacacgcgacactcgggatctgagaaggggactggggcttctataaaagcgctcggtttaaaaagcttctatgcctgaataggtgaccggaggtcggcacctttcctttacaattaatgaccctatgaatcgactcggaccgatg

SEQ ID NO: 4654 - DNA, 203 bp, Artificial sequence
  synthetic
ggcgcgccagtcctgtcctggtatttgttccatacgaccaagagccactcaatgaagggtggaaggccagcgttcagcgaaagctcaagggagctgggcaatccagcccagcgaccggttcacagaaccaatctggcaacactggcagcataattaacaactactatatgcagcagtaccaaaactcccgactcggaccgatg

SEQ ID NO: 4655 - DNA, 203 bp, Artificial sequence
  synthetic
ggcgcgccagtcctgcactttttgattgggttccttcacaaaattttggacacatgcacaaggttgttctgccccacgaaccaaaaggtgtttacgggggtctcgtcaagtcatacgcgtacatgcgcaatggctgggacgtcgaggtgaccgctgttggaaaccagttcaacggcggttgcctcctgcgactcggaccgatg

SEQ ID NO: 4656 - DNA, 203 bp, Artificial sequence
  synthetic
ggcgcgccagtcctgtcatggttgtcgcgccactcaccacaaacacagcaggtgcccaacagatcaaagtgtatgccaacatagccccaaccaacgtgcacgtggcgggtgagctcccctccaaggaggggatcttccccgttgcgtgttctgacggttacggcaacatggtgacaactgacccgaaacgactcggaccgatg

SEQ ID NO: 4657 - DNA, 203 bp, Artificial sequence
  synthetic
ggcgcgccagtcctgaggctgcccactgcatacacgcagaatgggacactggtctgaactccaagttcacgttttcaatcccgtacatctcggccgctgactacgcgtacaccgcgtcccacgaggctgaaacaacatgtgtacaggggtgggtctgtgtgtaccaaatcactcacggcaaggcagaccgactcggaccgatg

SEQ ID NO: 4658 - DNA, 203 bp, Artificial sequence
  synthetic
ggcgcgccagtcctgccgacgcgctcgtcgtctccgcatcagcggggaaagactttgagctccggctacctgtggacgctagacaacaaactacgaccactggtgaatctgctgaccccgtcaccactaccgttgagaactacggaggagagactcaggtccaacgtcgccaccacaccgacgttgcccgactcggaccgatg

SEQ ID NO: 4659 - DNA, 203 bp, Artificial sequence
  synthetic
ggcgcgccagtcctggtgcaccagtttctgcacttaacaacacaaccaatcccactgcctaccacaagggcccggtgactcgactggctctcccatacaccgcgccacaccgtgtgttggctacggcgtacactggcactacgacctacaccgccagtgcacgcggggatttggctcacctaacgacgcgactcggaccgatg

SEQ ID NO: 4660 - DNA, 203 bp, Artificial sequence
  synthetic
ggcgcgccagtcctacgcatgctcggcatttgccgacatcgttcaactttggtgcagttaaagcagaaacaatcactgagttgctcgtgcgcatgaagcgtgctgaactctattgtcctaggccgattcttccgattcagccaacgggcgatagacacaagcaaccgctcgtcgcacctgcaaaacaacgactcggaccgatg

SEQ ID NO: 4661 - DNA, 203 bp, Artificial sequence
  synthetic
ggcgcgccagtcctgaggaactggccagtggagtgaaagccatcaggaccggtctcgatgaggccaaaccctggtacaagcttattaagctcctgagccgcttgtcgtgcatggccgctgtagcagcgcggtcaaaggacccagtccttgtggccatcatgctggctgacaccggtctcgagattctgcgactcggaccgatg

SEQ ID NO: 4662 - DNA, 203 bp, Artificial sequence
  synthetic
ggcgcgccagtcctgacagcacgtttgtcgtgaagaagatctccgactcgctctccagtctctttcacgtgccggcccccgccttcagcttcggagccccgattctgttggccgggttggtcaaggtcgcctcgagtttcttccggtccacacccgaagaccttgagagagcagagaaacaactcaaacgactcggaccgatg

SEQ ID NO: 4663 - DNA, 203 bp, Artificial sequence
  synthetic
ggcgcgccagtcctgcacgtgacatcaacgacatcttcgccattctcaagaacggcgagtggctggtcaagctgatccttgccatccgcgactggattaaggcatggatcgcctcagaagagaagtttgtcaccatgacagacctggtgcctggtatccttgaaaaacagcgggacctcaacgacccacgactcggaccgatg

SEQ ID NO: 4664 - DNA, 203 bp, Artificial sequence
  synthetic
ggcgcgccagtcctcttgcgaacgtgcttgcacaagcaatctccacccacctcaccggcaggaccgattctgtttggtactgcccgcctgaccctgaccacttcgacggttacaaccagcagaccgttgttgtgatggacgatttgggccagaaccctgacggcaaggacttcaagtacttcgcccaacgactcggaccgatg

SEQ ID NO: 4665 - DNA, 203 bp, Artificial sequence
  synthetic
ggcgcgccagtcctgccaaggacgggtacaaaatcaacaacaaattggacatcatcaaagcacttgaagacacccacaccaatccagtggcaatgtttcagtacgactgtgcccttctcaacggcatggctgttgaaatgaagagattgcaacaggatatgttcaagcctcaaccacccctccagaaccgactcggaccgatg

SEQ ID NO: 4666 - DNA, 203 bp, Artificial sequence
  synthetic
ggcgcgccagtccttccattaaggaggaactccggcccctcatccaacaaacttcatttgtgaaacgtgcttttaagcgcctgaaggagaactttgaaattgttgcactgtgcctaacacttttggccaacattgtcatcatgatccgcgagactcacaagagacagaagatggtggatgatgcggtgcgactcggaccgatg

SEQ ID NO: 4667 - DNA, 203 bp, Artificial sequence
  synthetic
ggcgcgccagtcctcaaccgcaagctgaaggaccctacgccgggccactcgagcgtcagagacctctgaaagtgagagccaagctcccgcgacaagagggaccttacgcgggtccgatggagagacagaagccgctgaaagtgaaagcaagagccccggtcgtcaaggaaggaccttatgaaggaccgcgactcggaccgatg

SEQ ID NO: 4668 - DNA, 203 bp, Artificial sequence
  synthetic
ggcgcgccagtcctgtgaagaagcctgtcgctttgaaagtgaaagctaagaatttgattgtcactgagagtggtgcccccccgactgacctgcaaaagatggtcatgggcaacacgaagcctgttgagctcatcctcgacgggaagacagtagccatctgctgtgctactggagtgttcggcactgcccgactcggaccgatg

SEQ ID NO: 4669 - DNA, 203 bp, Artificial sequence
  synthetic
ggcgcgccagtcctgctaccaaggctggctactgtggaggagccgttcttgctaaggacggagctgacaccttcatcgttggcactcactctgctggaggcaatggagttgggtactgctcatgcgtgtccaggtccatgcttctcaaaatgaaggcacacatcgaccctgaaccgcaccacgaggggcgactcggaccgatg

SEQ ID NO: 4670 - DNA, 203 bp, Artificial sequence
  synthetic
ggcgcgccagtcctttgatcgttgataccagagatgtggaagagcgcgtccatgtaatgcgcaaaaccaagcttgcacccaccgtcgcgcacggtgtgttcaatcctgagttcgggcctgccgccttgtctaacaaggacccacgtctgaacgaaggtgttgtcctcgatgaagtcattttctccaagcgactcggaccgatg

SEQ ID NO: 4671 - DNA, 203 bp, Artificial sequence
  synthetic
ggcgcgccagtcctcataaaggagacacaaagatgtctgcggaggacaaagcgctgttccgccgctgcgctgctgactacgcgtcacgcctgcacagtgtgctgggtacggcaaatgccccactgagcatttacgaggcaatcaagggcgttgacggactcgacgccatggagccagacaccgcacctcgactcggaccgatg

SEQ ID NO: 4672 - DNA, 203 bp, Artificial sequence
  synthetic
ggcgcgccagtcctcccttccagggcctctttgagattccaagctacagatcactttacctgcgttgggtgaacgccgtgtgcggcgacgcataatcccccaaacatcacaattggcacaatgattttggggcgcgcgacgccgtgggagtgaaaagcccgaaagggctttcccggcttccttaatcccgactcggaccgatg

SEQ ID NO: 4673 - DNA, 203 bp, Artificial sequence
  synthetic
ggcgcgccagtcctaccacaaacactccagtttgttacactccgctaggaatgctcctggagcaccccccctagcagggcgtgggggatttcccctgcccgtctgcagaagggtggagccaaccaccttagtatgtaggcggcgggactcatgacgctcgcgtgatgacaagcgccaagcttgacttgcgactcggaccgatg

SEQ ID NO: 4674 - DNA, 203 bp, Artificial sequence
  synthetic
ggcgcgccagtccttcctgtgtccattaaaacatctgttgaaaggggacaacgagcaaagcgcaaagtccagcgcgatgctcggcctcgtaattacaaaattgctggtatccatgatggcttgcagacattggctcaggctgctttgccagctcatggttggggacgccaagaccctcgccataagtccgactcggaccgatg

SEQ ID NO: 4675 - DNA, 203 bp, Artificial sequence
  synthetic
ggcgcgccagtccttcgcaatcttggaatccttctggattaccctttggggtggattggtgatgttacaactcacacacctctagtaggcccgctggtggcaggagcggtcgttcgaccagtctgccagatagtacgcttgctggaggatggagtcaactgggctactggttggttcggtgtccacctcgactcggaccgatg

SEQ ID NO: 4676 - DNA, 203 bp, Artificial sequence
  synthetic
ggcgcgccagtcctttgttttgggcgcgcttctggttaccctttgcgtcctgtgctcccatcccagtcgtatctccaagctggctgggatgttttgtctaaagctcaagtagctccttttgctttgattttcttcatctgttgctatctccgctgcaggctacgttatgctgcccttttagggtttgtcgactcggaccgatg

SEQ ID NO: 4677 - DNA, 203 bp, Artificial sequence
  synthetic
ggcgcgccagtcctgcccatggctgcgggcttgcccctaactttctttgttgcagcagctgctgcccaaccagattatgactggtgggtgcgactgctagtggcagggttagttttgtgggccggccgtgaccgtggtcaccgcatagctctgcttgtaggtccttggcctctggtagcgcttttaaccgactcggaccgatg

SEQ ID NO: 4678 - DNA, 203 bp, Artificial sequence
  synthetic
ggcgcgccagtcctcctcttgcatttggttacgcctgcttcagcttttgacaccgagataattggagggctgacaataccacctgtagtagcattagttgtcatgtctcgttttggcttctttgctcacttgttacctcgctgtgctttagttaactcctatctttggcaacgttgggagaattggttcgactcggaccgatg

SEQ ID NO: 4679 - DNA, 203 bp, Artificial sequence
  synthetic
ggcgcgccagtcctggtgcgtctcggaaagtgccatgcttggtattctcattatgttcttaagtttttcctcttagtgtttggtgagaatggtgtgtttttctataagcacttgcatggtgatgtcttgcctaatgattttgcctcgaaactaccattgcaagagccatttttcccttttgaaggcaacgactcggaccgatg

SEQ ID NO: 4680 - DNA, 203 bp, Artificial sequence
  synthetic
ggcgcgccagtcctggcaagggtctataggaatgaaggaagacgcttggcgtgtggggacacggttgatggtttgcccgttgttgcgcgtctcggcgaccttgttttcgcagggttagctatgccgccagatgggtgggccattaccgcaccttttacgctgcagtgtctctctgaacgtggcacgctcgactcggaccgatg

SEQ ID NO: 4681 - DNA, 203 bp, Artificial sequence
  synthetic
ggcgcgccagtcctcccaataaccgttgacgcggctaatgaccaggacatctatcaaccaccatgtggagctgggtcccttactcggtgctcttgcggggagaccaaggggtatctggtaacacgactggggtcattggttgaggtcaataaatccgatgacccttattggtgtgtgtgcggggccctcgactcggaccgatg

SEQ ID NO: 4682 - DNA, 203 bp, Artificial sequence
  synthetic
ggcgcgccagtccttcccatggctgttgccaagggttcttcaggtgccccgattctgtgctcctccgggcatgttattgggatgttcaccgctgctagaaattctggcggttcagtcagccagattagggttaggccgttggtgtgtgctggataccatccccagtacacagcacatgccactcttgacgactcggaccgatg

SEQ ID NO: 4683 - DNA, 203 bp, Artificial sequence
  synthetic
ggcgcgccagtcctggacggcgctgacgcctgtcctggcccagagcccagcgaggtgaccagataccaaatgtgcttcactgaagtcaatacttctgggacagccgcactcgctgttggcgttggagtggctatggcttatctagccattgacacttttggcgccacttgtgtgcggcgttgctggtccgactcggaccgatg

SEQ ID NO: 4684 - DNA, 203 bp, Artificial sequence
  synthetic
ggcgcgccagtccttattacatcagtccctaccggtgctactgtcgccccagtggttgacgaagaagaaatcgtggaggagtgtgcatcattcattcccttggaggccatggttgctgcaattgacaagctgaagagtacaatcaccacaactagtcctttcacattggaaaccgcccttgaaaaactcgactcggaccgatg

SEQ ID NO: 4685 - DNA, 203 bp, Artificial sequence
  synthetic
ggcgcgccagtcctctttattgccactcgtgacatccgcaggaagatactgggcattctggaggcatctaccccctggagtgtcatatcagcttgcatccgttggctccacaccccgacggaggatgattgcggcctcattgcttggggtctagagatttggcagtacgtgtgcaatttctttgtgatcgactcggaccgatg

SEQ ID NO: 4686 - DNA, 203 bp, Artificial sequence
  synthetic
ggcgcgccagtcctttgctttaatgtccttaaagctggagttcagagcatggttaacattcctggttgtcctttctacagctgccagaaggggtacaagggcccctggattggatcaggtatgctccaagcacgctgtccatgcggtgctgaactcatcttttctgttgagaatggttttgcaaaactcgactcggaccgatg

SEQ ID NO: 4687 - DNA, 203 bp, Artificial sequence
  synthetic
ggcgcgccagtcctagtatcctctccaaatgtctgtttcacccaggtgcccccaaccttgagagctgcagtggccgtggacggcgtacaggttcagtgttatctaggtgagcccaaaactccttggacgacatctgcttgctgttacggtcctgacggtaagggtaaaactgttaagcttcccttccgcgactcggaccgatg

SEQ ID NO: 4688 - DNA, 203 bp, Artificial sequence
  synthetic
ggcgcgccagtcctcgttgacggtcacacacctggtgtgcgcatgcaacttaatttgcgtgatgcacttgagacaaatgactgtaattccacaaacaacactcctagtgatgaagccgcagtgtccgctcttgttttcaaacaggagttgcggcgtacaaaccaattgcttgaggcaatttcagctggcgactcggaccgatg

SEQ ID NO: 4689 - DNA, 203 bp, Artificial sequence
  synthetic
ggcgcgccagtccttgcttctaaagttctgtctgcaactcgggccatcactagtggtttcctcaaacaaagatcattggtgtatgtgactgagccgcgggatgcggagcttagaaaacaaaaagtcactattaatagacaacctctgttccccccatcataccacaagcaagtgagattggctaaggacgactcggaccgatg

SEQ ID NO: 4690 - DNA, 203 bp, Artificial sequence
  synthetic
ggcgcgccagtcctagatgcgtacgggtttgtagatccacgtacccgtgtcaagcgtctgttgtcgatgtggtcacccgatgcagtcggagccacatgcgatacagtgtgttttgacagtaccatcacacccgaggatatcatggtggagacagacatctactcagcagctaaactcagtgaccaacacgactcggaccgatg

SEQ ID NO: 4691 - DNA, 203 bp, Artificial sequence
  synthetic
ggcgcgccagtcctccgagctggcattcacaccattgcgaggcagttatacgctggaggaccgatgatcgcttatgatggccgagagatcggatatcgtaggtgtaggtcttccggcgtctatactacctcaagttccaacagtttgacctgctggctgaaggtaaatgctgcagccgaacaggctggcgactcggaccgatg

SEQ ID NO: 4692 - DNA, 203 bp, Artificial sequence
  synthetic
ggcgcgccagtcctcatgaagaaccctcgcttccttatttgcggcgatgattgcaccgtaatttggaaaagcgccggagcagatgcagacaaacaagcaatgcgtgtctttgctagctggatgaaggtgatgggtgcaccacaagattgtgtgcctcaacccaaatacagtttggaagaattaacatccgactcggaccgatg

SEQ ID NO: 4693 - DNA, 203 bp, Artificial sequence
  synthetic
ggcgcgccagtcctatgctcatcaaatgttacctctggaattaccaaaagtggcaagccttactactttcttacaagagatcctcgtatcccccttggcaggtgctctgccgagggtctgggatacaaccccagtgctgcgtggattgggtatctaatacatcactacccatgtttgtgggttagccgcgactcggaccgatg

SEQ ID NO: 4694 - DNA, 203 bp, Artificial sequence
  synthetic
ggcgcgccagtccttgtgttggctgtccatttcatggagcagatgctctttgaggacaaacttcccgagactgtgacctttgactggtatgggaaaaattatacggtgcctgtagaagatctgcccagcatcattgctggtgtgcacggtattgaggctttctcggtggtgcgctacaccaacgctgacgactcggaccgatg

SEQ ID NO: 4695 - DNA, 203 bp, Artificial sequence
  synthetic
ggcgcgccagtcctgcaggatttcactcaagacccgggcaagttcacagaaccagtaaaagatatcatgattaaatcactaccagctctcaactcccccacagtagaggagtgcggatacagtgacagggtgagatcaatcacattaggtaactccaccataacgactcaggaatgcgccaacgtggtcgactcggaccgatg

SEQ ID NO: 4696 - DNA, 203 bp, Artificial sequence
  synthetic
ggcgcgccagtcctagagaaggtcaactctatggaagcataccagatacctgtgagatccaatgaaggatctggaacgcaagtattcggctttccactgcaaccagggtactcgagtgtttttagtcggacgctcctaggagagatcttgaactattatacacattggtcaggcagcataaagcttaccgactcggaccgatg

SEQ ID NO: 4697 - DNA, 203 bp, Artificial sequence
  synthetic
ggcgcgccagtcctgcaaaactttttccagggcccagtggaagacgcgataacagccgctatagggagagttgcggataccgtgggtacagggccaaccaactcagaagctataccagcactcactgctgctgagacaggtcacacgtcacaagtagtgccgggtgacaccatgcagacacgccacgtcgactcggaccgatg

SEQ ID NO: 4698 - DNA, 203 bp, Artificial sequence
  synthetic
ggcgcgccagtcctgttcgacctggagctgacgtttgtcataacaagtactcaacagccctcaaccacacagaaccaagacgcacagatcctaacacaccaaattatgtacgtaccaccaggtggacctgtaccagataaagttgattcatacgtgtggcaaacatctacgaatcccagtgtgttttgcgactcggaccgatg

SEQ ID NO: 4699 - DNA, 203 bp, Artificial sequence
  synthetic
ggcgcgccagtcctgaccgagggaaacgccccgccgcgcatgtccataccgtttttgagcattggcaacgcctattcaaatttctatgacggatggtctgaattttccaggaacggagtttacggcatcaacacgctaaacaacatgggcacgctatatgcaagacatgtcaacgctggaagcacgggcgactcggaccgatg

SEQ ID NO: 4700 - DNA, 203 bp, Artificial sequence
  synthetic
ggcgcgccagtcctggtgtcacaatattacggaatccctatggctgaacgccaaaacaatagctggcttaagaaatttactgaaatgacgaatgcttgcaagggtatggaatggatagctgtcaaaattcagaaattcattgaatggctcaaagtaaaaattttgccagaggtcagggaaaaacacgacgactcggaccgatg

SEQ ID NO: 4701 - DNA, 203 bp, Artificial sequence
  synthetic
ggcgcgccagtcctattcctgaacagacttaaacaactccccttattagaaagtcagatcgccacaatcgagcagagcgcgccatcccaaagtgaccaggaacaattattttccaatgtccaatactttgcccactattgcagaaagtacgctcccctctacgcagctgaagcaaagagggtgttctccgactcggaccgatg

SEQ ID NO: 4702 - DNA, 203 bp, Artificial sequence
  synthetic
ggcgcgccagtcctcttagaactgacactactcaaattgaaccggaatgagaagttcagagacatcagaggcttcttagccaaggaggaagtggaggttaatgaggcagtgctagcaattaacaccagcaagtttcccaacatgtacattccagtaggacaggtcacagaatacggcttcttaaacctcgactcggaccgatg

SEQ ID NO: 4703 - DNA, 203 bp, Artificial sequence
  synthetic
ggcgcgccagtcctaggtggcacacccaccaagagaatgcttatgtacaacttccccacaagagcaggccagtgtggtggagtgctcatgtccaccggcaaggtactgggtatccatgttggtggaaatggccatcagggcttctcagcagcactcctcaaacactacttcaatgatgagcaaggtgacgactcggaccgatg

SEQ ID NO: 4704 - DNA, 203 bp, Artificial sequence
  synthetic
ggcgcgccagtccttggtaccagtattttcaactcaatgattaacaatatcataattaggacactaatgctaaaagtgtacaaagggattgacttggaccaattcaggatgatcgcatatggtgatgatgtgatcgcatcgtacccatggcctatagatgcatctttactcgctgaagctggtaagggcgactcggaccgatg

SEQ ID NO: 4705 - DNA, 203 bp, Artificial sequence
  synthetic
ggcgcgccagtcctaaagaacacccaagatcacgtgcgctcactgtgtctattagcttggcataacggggagcacgaatatgaggagttcatccgtaaaattagaagcgtcccagtcggacgttgtttgaccctccccgcgttttcaactctacgcaggaagtggttggactccttttagattagagacgactcggaccgatg

SEQ ID NO: 4706 - DNA, 203 bp, Artificial sequence
  synthetic
ggcgcgccagtcctagcgtcccagtcggacgttgtttgaccctccccgcgttttcaactctacgcaggaagtggttggactccttttagattagagacaatttgaaataatttagattggcttaaccctactgtgctaaccgaaccagataacggtacagtaggggtaaattctccgcattcggtgcgcgactcggaccgatg

SEQ ID NO: 4707 - DNA, 203 bp, Artificial sequence
  synthetic
ggcgcgccagtccttaagcagagccttaagcaggacccagacaagtttgcaaatcctgtcaaagacatcttcactgaaatggcagcgccattaaaatctccatctgccgaggcatgtggttacagcgatcgggtggcacaattaactattggcaattctaccatcactacgcaagaagcagcaaacatcgactcggaccgatg

SEQ ID NO: 4708 - DNA, 203 bp, Artificial sequence
  synthetic
ggcgcgccagtcctcatagttggctatggtgagtggccttcctactgttcggactctgatgctactgcagtggacaaaccaacgcgcccagatgtttcggtgaataggttttacacattggacacaaaattgtgggagaaatcatccaaggggtggtactggaaattcccggatgtgttaactgaaaccgactcggaccgatg

SEQ ID NO: 4709 - DNA, 203 bp, Artificial sequence
  synthetic
ggcgcgccagtccttatggctaccggcaagatgctcatagcatacacaccaccaggaggccccttacccaaggaccgggcgaccgccatgttgggcacggacgtcatctgggactttgggctgcaatcgtctgtcactcttgtaataccatggatcagcaacactcattacagagcgcacgctcgagacgactcggaccgatg

SEQ ID NO: 4710 - DNA, 203 bp, Artificial sequence
  synthetic
ggcgcgccagtccttggtgtgtttgactactacactacaggtttggttagcatatggtaccagacgaattatgtggttccaattggagcacccaatacagcctatataatagcattggcggcagcccagaagaacttcaccatgaagttgtgtaaggatgctagtgatatcctacagacaggcactatcgactcggaccgatg

SEQ ID NO: 4711 - DNA, 203 bp, Artificial sequence
  synthetic
ggcgcgccagtcctccagggagatagggtggcagatgtgattgagagttctataggggacagcgtgagcagagccctcacccgagctctaccggcacctaccggccaagacacacaggtaagcagccatcgattagatactggtaaaggtccagcactccaagccgctgaaattggagcatcatcaaacgactcggaccgatg

SEQ ID NO: 4712 - DNA, 203 bp, Artificial sequence
  synthetic
ggcgcgccagtccttgctagtgatgagagtatgattgagacacggtgtgttcttaattcacatagcacagctgagaccactcttgatagcttcttcagcagagcaggattagttggagagatagacctccctcttgaaggcacaaccaacccgaatgggtacgcaaactgggacatagacataacaggcgactcggaccgatg

SEQ ID NO: 4713 - DNA, 203 bp, Artificial sequence
  synthetic
ggcgcgccagtccttacgttctcagtgcggactgtaggcacctcgaagtccaagtgcccattggtgatcaggatttacatgaggatgaagcacgtcagggcgtggatacctcgcccaatgcgtaaccagaactatctattcaaagccaacccaaattatgctggtaattctattaaaccaactggtgccgactcggaccgatg

SEQ ID NO: 4714 - DNA, 203 bp, Artificial sequence
  synthetic
ggcgcgccagtcctcagtcgcacagcaattaccactctcgggaaatttggacagcagtccggagctatctacgtgggcaactttagagtggttaaccgccatcttgctactcataatgactgggcaaaccttgtttgggaagacagctcccgcgacttgctcgtatcatctaccactgctcaaggttgcgactcggaccgatg

SEQ ID NO: 4715 - DNA, 203 bp, Artificial sequence
  synthetic
ggcgcgccagtcctggattgcggtggcattcttagatgccaacatggcgtcgtagggatagtttccaccgggggaaatggcctggtggggttcgccgatgtgagggatcttctgtggttggatgatgaagccatggagcagggcgtgtctgattacattaaagggcttggagatgcttttggcatgggcgactcggaccgatg

SEQ ID NO: 4716 - DNA, 203 bp, Artificial sequence
  synthetic
ggcgcgccagtcctgtgccacgggagcccttgggcctgggttaagtcgaagacagcatcaattttgggcataccgatggctcagaagcagaatgcctcttggttaaagaaattcaacgatgcggcgaatgccgcgaaggggcttgagtggatctccaacaaaatcagtaaatttatcgattgggtcaacgactcggaccgatg

SEQ ID NO: 4717 - DNA, 203 bp, Artificial sequence
  synthetic
ggcgcgccagtccttatagatcttcacacaagtgcaggatatccatacagtgcactaggcatcaagaaaaaggacattttggatccaacaactcgcgatgtcagcaagatgaaattctacatggacaagtatgggttggatctaccgtactctacttatgttaaagatgaacttagggccatcgacaacgactcggaccgatg

SEQ ID NO: 4718 - DNA, 203 bp, Artificial sequence
  synthetic
ggcgcgccagtccttctggagttggcaagaacaggcaaggagtatggtctaactatgacccctgccgacaagtcaccctgctttaatgaggttacgtgggagaatgccactttcttgaagagaggattcttgcctgattatcaattcccgtttctcatccaccctacgatgccaatgagggagattcacgactcggaccgatg

SEQ ID NO: 4719 - DNA, 203 bp, Artificial sequence
  synthetic
ggcgcgccagtcctgtttccccggtgaggccgcatagactgttcccacggttgaaagtggccgatccgttatccgctcatgtacttcgagaagcctagtatcgctctggaatcttcgacgcgttgcgctcagcactcaaccccggagtgtagcttgggccgatgagtctggacagtccccactggcgacgactcggaccgatg

SEQ ID NO: 4720 - DNA, 203 bp, Artificial sequence
  synthetic
ggcgcgccagtcctgcaagattactcacaggatccatcaaaattcaccgagccactaaaggacgtgctcataaaaacagctccagcactcaattcaccaaatgtggaagcgtgtgggtatagtgatagagtgttgcaactcactttaggcaattccactattactacacaggaggcagcaaattcagtcgactcggaccgatg

SEQ ID NO: 4721 - DNA, 203 bp, Artificial sequence
  synthetic
ggcgcgccagtcctagtggcttacggacgttggcctgagtttattagagatgacgaagcaaacccggtggaccaaccaactgaaccagatgtggctacatgcagattctacacactagacactgtaatgtggggtaaggagtcgaaaggctggtggtggaagttacctgacgcactgagagacatgggcgactcggaccgatg

SEQ ID NO: 4722 - DNA, 203 bp, Artificial sequence
  synthetic
ggcgcgccagtcctcatgattcctctcaatttggagagcaccaagagaaacacaatggacatgtacagagttactctgagcgacagtgccgatctatcgcaaccaattttgtgcttgtcactatccccagcatctgatccgcgcttgtcacacaccatgcttggggaagtactgaactattatactcacgactcggaccgatg

SEQ ID NO: 4723 - DNA, 203 bp, Artificial sequence
  synthetic
ggcgcgccagtcctgcgagacaccactcacatttcacaatctgcgcttccacagggtattgaagatttgatttctgaagttgcacagggcgccctaactttgtcactcccgaagcaacaggatagcttacctgatactaaggccagtggcccggcgcattccaaggaggtacctgcactcactgcagtcgactcggaccgatg

SEQ ID NO: 4724 - DNA, 203 bp, Artificial sequence
  synthetic
ggcgcgccagtcctgaatagagacctcttggttgttgaatcaaaagctcaaggtaccgactcaatagcaaggtgcaattgcaatgcaggggtgtactattgtgagtccagaaggaaatactaccctgtgtcgtttgtgggacccaccttccaatacatggaggctaatgactactacccagctagatacgactcggaccgatg

SEQ ID NO: 4725 - DNA, 203 bp, Artificial sequence
  synthetic
ggcgcgccagtccttgtacgctggttgtccattcaatccaagagattcgctccattgtacgcacttgaggccaagagaatacaaaagttggaacacaccattaataattacatacagttcaagagcaaacaccgtattgagccagtatgtttgttagtgcatgggagcccaggtacaggaaaatcagtcgactcggaccgatg

SEQ ID NO: 4726 - DNA, 203 bp, Artificial sequence
  synthetic
ggcgcgccagtccttgcgactaacctaattgctagagccatagctgagaaagagaacacctccacctactcgctaccaccggacccgtctcactttgatggatacaaacaacaaggtgtggttatcatggacgacctaaaccaaaacccggatggggcagatatgaagctcttttgtcaaatggtgtccgactcggaccgatg

SEQ ID NO: 4727 - DNA, 203 bp, Artificial sequence
  synthetic
ggcgcgccagtcctcaatgtgcccaccattagagcagcaaaagtgcaagggcctgggtttgactatgcagtggctatggctaaaagaaacattgttacagcaactactagcaaaggggagttcacaatgctaggagtccacgacaacgtggccattttaccaactcatgcctcacctggtgagagtatcgactcggaccgatg

SEQ ID NO: 4728 - DNA, 203 bp, Artificial sequence
  synthetic
ggcgcgccagtccttgtaattgatggcaaagaggttgaaatcctagacgctaaagccctcgaagatcaggcaggcactaatctggaaatcaccataataaccctcaaaagaaatgaaaagttcagagatatcagacaacacatacccactcaaatcaccgagacgaatgatggagttctgattgtgaacgactcggaccgatg

SEQ ID NO: 4729 - DNA, 203 bp, Artificial sequence
  synthetic
ggcgcgccagtccttgggaatggttcacatgggtttgcagcggccctgaagcggtcatacttcactcagagccaaggtgaaatccagtggatgagaccatcaaaggaggcagggtatccaattataaacgccccaaccaagaccaagctcgagcccagcgctttccactatgtgtttgaaggagtaaacgactcggaccgatg

SEQ ID NO: 4730 - DNA, 203 bp, Artificial sequence
  synthetic
ggcgcgccagtcctggaaccagcagtcctcacaaagaatgatcccagacttaaaacagactttgaagaagcaatcttctctaagtatgtagggaacaagatcactgaggtggatgagtacatgaaagaggcagtggaccattatgctggacaacttatgtcgctggatatcagcacagagcaaatgtgcgactcggaccgatg

SEQ ID NO: 4731 - DNA, 203 bp, Artificial sequence
  synthetic
ggcgcgccagtcctagtgacatatgtcaaggacgagctgaggtccaaaacaaaagtggaacagggaaaatccagactgattgaagcttccagtctaaatgactcagtggccatgagaatggcatttggaaacctttatgcagcattccacaggaatccaggggtcgtcactggtagtgcagttggatgcgactcggaccgatg

SEQ ID NO: 4732 - DNA, 203 bp, Artificial sequence
  synthetic
ggcgcgccagtcctcgatccagacctattctggagcaagatcccagtgttgatggaagaaaagctatttgcctttgattacacaggatacgacgcatcacttagcccagcttggtttgaggcactcaagatggtgttagagaaaattggttttggagatagagtggattacatagactaccttaaccacgactcggaccgatg

SEQ ID NO: 4733 - DNA, 203 bp, Artificial sequence
  synthetic
ggcgcgccagtcctttcacaccacttgtacaaaaacaagatatattgtgttaagggcggcatgccatctggctgctccggcacttcaatttttaattcaatgattaacaatttgatcattaggacgcttttactgaaaacctacaagggcatagatttggaccacttaaaaatgattgcctatggtgacgactcggaccgatg

SEQ ID NO: 4734 - DNA, 203 bp, Artificial sequence
  synthetic
ggcgcgccagtcctgcggcgggccgtcaagcccgtgcgctgtatagcgccaggtaaccggacagcggcgtgctggattttcccggtgccattgctctggatggtgtcaccaagctgacaaatgcggagtgaacctcacaaagcgacacgcctgtggtagcgctgcccaaaagggagcggaactccccgcgactcggaccgatg

SEQ ID NO: 4735 - DNA, 203 bp, Artificial sequence
  synthetic
ggcgcgccagtcctccgaggcggtcctctctggccaaaagcccagcgttgatagcgccttttgggatgcaggaaccccacctgccaggtgtgaagtggagtgagcggatctccaatttggtctgttctgaactacaccatttactgctgtgaagaatgccctggaggcaagctggttacagccctgaccgactcggaccgatg

SEQ ID NO: 4736 - DNA, 203 bp, Artificial sequence
  synthetic
ggcgcgccagtcctcaggccctgcccgtgactctcgaccggcgcagggtcaaaaattgtctaagcagcagcaggaacgcgggagcgtttcttttccttttgtactgacatgatggcggcgtctaaggtgtatagagtttgcgagcagactctgctggcaggtgccgttcgcatgatggacaaattcttcgactcggaccgatg

SEQ ID NO: 4737 - DNA, 203 bp, Artificial sequence
  synthetic
ggcgcgccagtccttgtttcggcaaaaccgggacatgcagtattctaccttctcacaagcgagggttggatctgtgttgatgacaagaaaatatacccagaaacacccaaaacagaggatgtacttgtttttgcgccctatgactttgagtcactgggcaaggacccaccaaagctacaccagagatacgactcggaccgatg

SEQ ID NO: 4738 - DNA, 203 bp, Artificial sequence
  synthetic
ggcgcgccagtcctactcaagaagatgggcagttttcatgaggttgtcaaagcccaccacctggtcaagaacggctgggatgtggttgtgcaggtgaatccctcatttgctcactccgggccgctgtgtgtagcagcagtgccggagtacgaacacacacatgagaaagcactcaagtggtctgagctcgactcggaccgatg

SEQ ID NO: 4739 - DNA, 203 bp, Artificial sequence
  synthetic
ggcgcgccagtccttgaggaaccagcttacacataccaacaactttcagtttttccccaccagttgctaaatttgaggacaaattcatcagtgcatttggtgatgccctacattgggccaggccaaccaacaaatctgactttgcacaacccgtggaccattgttattttaattttgtctgaattgaccgactcggaccgatg

SEQ ID NO: 4740 - DNA, 203 bp, Artificial sequence
  synthetic
ggcgcgccagtcctcccaccgcgccaagttcctggccggtttacaaatttcattgatgtggcaaaacagacatattcattttgttccatttctggaaaaccttattttgaggttaccaacacctctggggacgagccactgtttcagatggatgtgtcgctcagtgcggcagagctacatggcacttacgactcggaccgatg

SEQ ID NO: 4741 - DNA, 203 bp, Artificial sequence
  synthetic
ggcgcgccagtccttgttggcttgaactcagctttttcttttaatgtaccttatccctcccctgctgacttcatggccgtttattctgcggaacggacggttgtgaatgtctctggatggcttcaagtttatgcactaacagctctaacttcaactgacattgccgtgaacagtaaaggccgtgtgctcgactcggaccgatg

SEQ ID NO: 4742 - DNA, 203 bp, Artificial sequence
  synthetic
ggcgcgccagtcctggttgctgtttccgccggcccagacttctcccttcgtcacccggcggacctgcccgacaagcaggttaccaatgtgggagaggatggtgaacccggtgagacagagcctcgtcatgctttgtcacccgtggacatgcacgtgcacacagatgtcagtttcttgcttgaccggttcgactcggaccgatg

SEQ ID NO: 4743 - DNA, 203 bp, Artificial sequence
  synthetic
ggcgcgccagtcctctttgatgttgagacacttgagctttcaaatttgacaggttctcctgccacacatgttctggatccgtttggctcgactgcccaactggcttgggcacgtctgctaaacacttgcacctacttcttttctgatttggaattgtcaatccagtttaaatttaccaccactccgtccgactcggaccgatg

SEQ ID NO: 4744 - DNA, 203 bp, Artificial sequence
  synthetic
ggcgcgccagtcctctctgttggagagggctttgtgtgggtgaagtggctccctgttggagcaccaaccaagaccacagatgcttggcagttagaaggaggtggaaattcagttagaattcaaaaattggccgttgcagggatgtgccccactgttgtgttcaagattgcaggctcccgttcacaagccgactcggaccgatg

SEQ ID NO: 4745 - DNA, 203 bp, Artificial sequence
  synthetic
ggcgcgccagtcctggtggttatgttgattgctgatttcggattggaggtctttgacactgggtttttcttttcctactttcaagagaagttgcagccttatatgaaaactattcctggtaagatttctgatttggtcactgatgcggctacggctgccgcccaaattccaaagggagtgtattctttcgactcggaccgatg

SEQ ID NO: 4746 - DNA, 203 bp, Artificial sequence
  synthetic
ggcgcgccagtcctgctctattcagaattggaaaaatatcccttgtacaagttaaaattgaaggaacctgatactcaagaggaagcgcgccagtggtttaaagacatgcagcagcgtgctctcgctgtgaaggacaaaggtctcttttccctcctgcaaattccattagttaacttgccccagagccgcgactcggaccgatg

SEQ ID NO: 4747 - DNA, 203 bp, Artificial sequence
  synthetic
ggcgcgccagtccttgttcagccaattgagctttaccttgacaatgaattggttactgactgctctgccttgggtgtttatgacaattcatatttggtgccccttcatttgtttgaatttgattttgataccattgtgcttggtggacgtcattacaagaaagctgagtgtgagaaggtagagtttgacgactcggaccgatg

SEQ ID NO: 4748 - DNA, 203 bp, Artificial sequence
  synthetic
ggcgcgccagtccttcaatcatttttgaaagatgagatccgcccacttgagaaagttagggctggaaagacccgcctgattgacgtgccgccgatgccccatgtggtggttggtaggcagctcttgggccggtttgtggcaaaatttcatgaagcaaatggatttgacattggctcagccattggatgcgactcggaccgatg

SEQ ID NO: 4749 - DNA, 203 bp, Artificial sequence
  synthetic
ggcgcgccagtcctcatttgctatggggacgactgcctcattgcttctgattttgaaattgatttccaacaactggtgcctgtcttttctagttttggacaggtaataactacagctgacaagactgatttttttaaactgacaacgctttcggaggtgaccttccttaagcgcgcttttgttctgaccgactcggaccgatg

SEQ ID NO: 4750 - DNA, 203 bp, Artificial sequence
  synthetic
ggcgcgccagtcctggccttttacaagccagtgatggatgtgaagacccttgaagcaatcttaagctttgttcgcccaggcacacaggctgaaaagctcctgtccgtggcgcagttggcaggccactgcgaaccggagcagtatgagcgcctgtttgagccctttgctgggatgtatttcgtccctaccgactcggaccgatg

SEQ ID NO: 4751 - DNA, 203 bp, Artificial sequence
  synthetic
ggcgcgccagtcctagtggatgcattgagtggattgactgtcagggctgtctttaggcttaattccagacctctctgtgcttagggcaaacatcatttggccttaaatgggattctgtgagaggggatccctccattgacagctggactgttctttggggccttatgtggtgtttgcctctgaggtaccgactcggaccgatg

SEQ ID NO: 4752 - DNA, 203 bp, Artificial sequence
  synthetic
ggcgcgccagtccttcaggggcatttaggtttttcctcattcttaaataataatgaacatgtctagacaaggtattttccagactgttgggagtggtcttgaccacatcctgtctttggcagacattgaggaagagcaaatgattcaatcagttgataggactgcagtgactggtgcttcttattttacgactcggaccgatg

SEQ ID NO: 4753 - DNA, 203 bp, Artificial sequence
  synthetic
ggcgcgccagtcctagttgtatagagggcctttagatctgacaattattattacaggagcaactgatgtagatggcatggcctggttcactccagtaggtcttgccgttgatactccttgggtagagaaggagtcagctttgtctattgactacaaaactgctcttggagctgtcagatttaacacaacgactcggaccgatg

SEQ ID NO: 4754 - DNA, 203 bp, Artificial sequence
  synthetic
ggcgcgccagtccttcacagaacaatcagagttttattttcccagagctccattgaactcaaatgccatgttatccactgaatcaatgatgagcagaattgcagctggagacttggagtcatcagtggatgatcctagatcagaggaagataaaagatttgagagtcatatagaatgcaggaagccatcgactcggaccgatg

SEQ ID NO: 4755 - DNA, 203 bp, Artificial sequence
  synthetic
ggcgcgccagtcctccaactggttaagagatatttgttctgggatcaccatttttaaaaacttcaaggatgcaatttattggctttatacaaaattaaaggacttttatgaagtgaattatggcaagaagaaggacattttaaatattcttaaagataaccaacaaaaaatagagaaagccattgaggcgactcggaccgatg

SEQ ID NO: 4756 - DNA, 203 bp, Artificial sequence
  synthetic
ggcgcgccagtcctttcctaagtttagagatattactcagcattttattaagaaaggggatgtgcctagagctttgaatcgcctggcaacattagtgacaactgtaaatggaacccctatgttaatttctgagggcccactaaagatggaagagaaagctacttatgttcataagaaaaatgatggtacgactcggaccgatg

SEQ ID NO: 4757 - DNA, 203 bp, Artificial sequence
  synthetic
ggcgcgccagtcctcaacagttgatttaactgtggatcaggcatggagaggaaaaggcgaaggtcttcctggaatgtgtggtggggccttggtttcatcgaatcaatctatacagaatgcaatcttgggcatccatgttgctggaggaaattcaattcttgttgcaaaattggttactcaagaaatgtcgactcggaccgatg

SEQ ID NO: 4758 - DNA, 203 bp, Artificial sequence
  synthetic
ggcgcgccagtccttccaaaatattgataagaaaattgaaagtcagagaattatgaaagtggagtttactcagtgttcaatgaatgtggtctccaaaacgctttttagaaagagtcccatttatcatcacattgataaaaccatgattaattttcctgcagctatgcccttttctaaagctgaaattgcgactcggaccgatg

SEQ ID NO: 4759 - DNA, 203 bp, Artificial sequence
  synthetic
ggcgcgccagtcctatccaatggctgtgatgttatctaagtattcattacctattgtagaagaaccagaggattataaagaggcttcaattttttatcaaaataaaatagtgggtaagactcagttagttgatgattttttagatcttgatatggccattacaggggccccaggaattgatgctatcacgactcggaccgatg

SEQ ID NO: 4760 - DNA, 203 bp, Artificial sequence
  synthetic
ggcgcgccagtcctctgatagacagtgggatgaattatttaaaacaatgataagattcggagatgttggtcttgatttagatttctctgcttttgatgctagtcttagtccatttatgattagagaagcaggtagaatcatgagtgaactatctggaactccatcccattttggcacagctcttatcacgactcggaccgatg

SEQ ID NO: 4761 - DNA, 203 bp, Artificial sequence
  synthetic
ggcgcgccagtcctatactatcatttattccaagcatttgctgtataactgttgttaccatgtctgtggttcaatgccctctgggtctccttgtacagctttgctaaattcaattattaataatgtcaatttgtattatgtgttttccaagatatttggaaagtctccagttttcttttgtcaggcttcgactcggaccgatg

SEQ ID NO: 4762 - DNA, 203 bp, Artificial sequence
  synthetic
ggcgcgccagtcctgttgagccccttgttgaagtgtttccctccatcgcgacgtggttggagatctaagtcaaccgactccgacgaaactaccatcatgcctccccgattatgtgatgctttctgccctgctgggtggagcaccctcgggttgagaaaaccttcttcctttttccttggactcgggtccgactcggaccgatg

SEQ ID NO: 4763 - DNA, 203 bp, Artificial sequence
  synthetic
ggcgcgccagtcctccccggtctaagccgctcggaatatgacagggttattttcacctcttcttttctactccacagtgttctatactgtggaagggtatgtgttgccccttccttcttggagaacgtgcgcggcggtctttccgtctctcgacaagcgcgcgtgcaacatacagagtaacgcgaagacgactcggaccgatg

SEQ ID NO: 4764 - DNA, 203 bp, Artificial sequence
  synthetic
ggcgcgccagtcctaagcagttctcggtctagctctagtgcccacaagaaaacagctgtagcgaccacacaaaggcagcggaacccccctcctggtaacaggagcctctgcggccaaaagccacgtggataagatccacctttgtgtgcggtgcaaccccagcaccctggtttcttggtgacactctacgactcggaccgatg

SEQ ID NO: 4765 - DNA, 203 bp, Artificial sequence
  synthetic
ggcgcgccagtcctacacgagcaatcaatctcaaacaatggactggactgacgtaccgctcatacgcgatattgtcatggaaccccagggaaactcctcgtcatctgacaagagtaactcccagtcctcaggaaatgaaggggttattattaacaacttctattccaatcaataccaaaactcaattgcgactcggaccgatg

SEQ ID NO: 4766 - DNA, 203 bp, Artificial sequence
  synthetic
ggcgcgccagtccttccttgaattgtgcaagctccccactttccttggtaaccccaacaccaacaacaagcgttacccctatttctctgccaccaattctgtaccagccacttccatggttgattaccaagttgctctctcatgctcttgtatggctaattcaatgcttgctgctgttgctcgtaattcgactcggaccgatg

SEQ ID NO: 4767 - DNA, 203 bp, Artificial sequence
  synthetic
ggcgcgccagtccttcacgctcaggatgccgatttcacccaccaagtgggttccacaaggagttgacaatgctgagaaaggtaaagtctccaacgatgatgcttcggttgactttgtcgccgaaccagtcaagctgcccgagaaccaaacccgggtggccttcttctatgacagagctgtccctatagcgactcggaccgatg

SEQ ID NO: 4768 - DNA, 203 bp, Artificial sequence
  synthetic
ggcgcgccagtcctgtatgttgaggcccggccaaaatatggaaaccacttttaactaccaagaaaatgattaccgcctcaattgtcttttgctaacccctctcccttccttttgtcctgacagttcttccgggccccaaaaaacaaaggctcccgttcaatggcgatgggtgcgatctggcggcgtcacgactcggaccgatg

SEQ ID NO: 4769 - DNA, 203 bp, Artificial sequence
  synthetic
ggcgcgccagtcctcccctaacgcagacttcgggcgtctctggatccagggcaatacctctgcctccgtccggatcaggtacaagaaaatgaaggtcttctgcccccgcccgaccctcttcttcccctggcctacgcccaccaccaccaagatcaatgctgacaacccagtccccattcttgaactcgcgactcggaccgatg

SEQ ID NO: 4770 - DNA, 203 bp, Artificial sequence
  synthetic
ggcgcgccagtcctagaatcccgctgctctctaccgcattgatctcttcatcaccttcactgatgagttcatcacctttgattacaaggttcacggacgtcctgtgcttaccttccggatcccaggcttcggcctgaccccggcaggtaggatgctcgtgtgcatgggcgaacaacccgcacatggtccgactcggaccgatg

SEQ ID NO: 4771 - DNA, 203 bp, Artificial sequence
  synthetic
ggcgcgccagtcctcgttcacctcctctagatccctctatcatgtcatttttactgctacttgctcttcctttagctttagtatctacaaggggcggtaccgctcctggaaaaagcccatccatgacgagcttgtggatcgtggttacaccactttcggcgagttcttcaaggctgtgcgcggatacccgactcggaccgatg

SEQ ID NO: 4772 - DNA, 203 bp, Artificial sequence
  synthetic
ggcgcgccagtcctatgctgactattacagacagagactcatacacgatgtggaaacaaatccaggccctgtgcagtcggtttttcagccacaaggtgcggtgctaactaaatccctagcaccccaggcaggaattcaaaacctccttctacgcctcctcggcatagacggtgactgttcagaagttacgactcggaccgatg

SEQ ID NO: 4773 - DNA, 203 bp, Artificial sequence
  synthetic
ggcgcgccagtccttgactggtgtggacctcctcaccaacgattctgtttttgattggctcaaacaaaaattgtcttccttctttcgcacccctcccccagcttgccccaatgttatgcagcctcagggacctctacgcgaggccaatgaaggcttcacctttgctaagaacattgagtgggctatgacgactcggaccgatg

SEQ ID NO: 4774 - DNA, 203 bp, Artificial sequence
  synthetic
ggcgcgccagtcctcgaatatggctcacctggaaagaaaaggcactccttttacctctagcttcattgttgctacaacaaatttgcccaaattccgccctgttacggttgcccactaccccgctgttgataggcgaatcacctttgattttactgttactgctggaccccactgcaaaacgcctgctgcgactcggaccgatg

SEQ ID NO: 4775 - DNA, 203 bp, Artificial sequence
  synthetic
ggcgcgccagtcctcccgcaagactgaaaatgtgaagaaaatgaatagcctggttgctcagtctccaccagactgggagcactttgagaacatcctcacctgtctccgtcagaacaacgccgctctccaggaccaactcgatgagttacaggaagcgtttgctcaagcgcgcgagcgctctgactttccgactcggaccgatg

SEQ ID NO: 4776 - DNA, 203 bp, Artificial sequence
  synthetic
ggcgcgccagtccttggttaaccgccacgttgcagagacagattggaccgctttcaaactcaaggatgtgagacacgagcgccacactgtcgcccttcgctccgtcaatagatcaggagccaagactgacctcacattcataaaagtcacaaagggacctctcttcaaagacaacgttaacaaattttcgactcggaccgatg

SEQ ID NO: 4777 - DNA, 203 bp, Artificial sequence
  synthetic
ggcgcgccagtcctgctccaacaaggacgacttcccagcaaggaacgacaccgtcactggaatcatgaacaccggcctggctttcgtgtactctggcaacttcttgattggcaaccaacctgttaacaccacaactggagcctgtttcaaccactgcctccactaccgggctcaaacccgacgtggttcgactcggaccgatg

SEQ ID NO: 4778 - DNA, 203 bp, Artificial sequence
  synthetic
ggcgcgccagtcctcaggatctgttgtacatgtccctagaaaaactaaattgaggaggacagtcgcccacgacgtcttccaacccaaattcgaacctgcagttctgtcccgttatgaccctgggaccgataaagatgtggatgttgtagccttctccaaacacactaccaacatggaaagcttgcccccgactcggaccgatg

SEQ ID NO: 4779 - DNA, 203 bp, Artificial sequence
  synthetic
ggcgcgccagtcctatcttctgaatttcatcactgctaaaatgacccctcaattggactacgctcattccaaattggtgatcggtgtttatgatgatgttgtttaccaatcatttttgaaagatgaaattcggcctatagaaaagatccatgaagcgaaaacccggatcgttgacgtacccccgtttgcgactcggaccgatg

SEQ ID NO: 4780 - DNA, 203 bp, Artificial sequence
  synthetic
ggcgcgccagtcctatgcttcccactccactgcgatgtttgaatgcttaattaacaatttctttacagagcaaaatggatttgacagacgcatcgccgagtatcttagatctctggctgtgtcacgacatgcctatgaggaccgccgtgtccttatacgtgggggcctgccctcgggctgtgctgccacgactcggaccgatg

SEQ ID NO: 4781 - DNA, 203 bp, Artificial sequence
  synthetic
ggcgcgccagtcctgacgtcagcctatccccaaggcacgtcggcccgagggcaggacctgggctcagcccgggtacccttggcccctctatggcaatgagggttgcgggtgggcgggatggctcctgtctccccgtggctctcggcctagctggggccccacagacccccggcgtaggtcgcgcaattcgactcggaccgatg

SEQ ID NO: 4782 - DNA, 203 bp, Artificial sequence
  synthetic
ggcgcgccagtccttccttctggccctgctctcttgcctgactgtgcccgcttcagcctaccaagtgcgcaattcctcggggctttaccatgtcaccaatgattgccctaactcgagtgttgtgtacgaggcggccgatgccatcctgcacactccggggtgtgtcccttgcgttcgcgagggtaacgcgactcggaccgatg

SEQ ID NO: 4783 - DNA, 203 bp, Artificial sequence
  synthetic
ggcgcgccagtcctcctcgaggtgttgggtggcggtgacccccacggtggccaccagggacggcaaactccccacaacgcagcttcgacgtcatatcgatctgcttgtcgggagcgccaccctctgctcggccctctacgtgggggacctgtgcgggtctgtctttcttgttggtcaactgtttacctcgactcggaccgatg

SEQ ID NO: 4784 - DNA, 203 bp, Artificial sequence
  synthetic
ggcgcgccagtcctcccactggggagtcctggcgggcataaagtatttctccatggtggggaactgggcgaaggtcctggtagtgctgctgctatttgccggcgtcgacgcggaaacccacgtcaccgggggaaatgccggccgcaccacggctgggcttgttggtctccttacaccaggcgccaagccgactcggaccgatg

SEQ ID NO: 4785 - DNA, 203 bp, Artificial sequence
  synthetic
ggcgcgccagtcctagaacatccaactgatcaacaccaacggcagttggcacatcaatagcacggccttgaactgcaatgaaagccttaacaccggctggttagcagggctcttctatcagcacaaattcaactcttcaggctgtcctgagaggttggccagctgccgacgccttaccgattttgccccgactcggaccgatg

SEQ ID NO: 4786 - DNA, 203 bp, Artificial sequence
  synthetic
ggcgcgccagtcctctacctacagctggggtgcaaatgatacggatgtcttcgtccttaacaacaccaggccaccgctgggcaattggttcggttgtacctggatgaactcaactggattcaccaaagtgtgcggagcgcccccttgtgtcatcggaggggtgggcaacaacaccttgctctgccccacgactcggaccgatg

SEQ ID NO: 4787 - DNA, 203 bp, Artificial sequence
  synthetic
ggcgcgccagtcctaagcggcctgcaactggacgcggggcgaacgctgtgatctggaagacagggacaggtccgagctcagcccgttgctgctgtccaccacacagtggcaggtccttccgtgttctttcacgaccctgccagccttgtccaccggcctcatccacctccaccagaacattgtggacgcgactcggaccgatg

SEQ ID NO: 4788 - DNA, 203 bp, Artificial sequence
  synthetic
ggcgcgccagtccttgcagtacttgtacggggtagggtcaagcatcgcgtcctgggccattaagtgggagtacgtcgttctcctgttccttctgcttgcagacgcgcgcgtctgttcctgcttgtggatgatgttactcatatcccaagcggaggcggctttggagaacctcgtaatactcaatgcagcgactcggaccgatg

SEQ ID NO: 4789 - DNA, 203 bp, Artificial sequence
  synthetic
ggcgcgccagtcctcatccctggccgggacgcatggtcttgtgtccttcctcgtgttcttctgctttgcgtggtatctgaagggtaggtgggtgcccggagcggtctacgccctctacgggatgtggcctctcctcctgctcctgctggcgttgcctcagcgggcatacgcactggacacggaggtggcgactcggaccgatg

SEQ ID NO: 4790 - DNA, 203 bp, Artificial sequence
  synthetic
ggcgcgccagtccttcatcttactcacgtgtgtagtacacccggccctggtatttgacatcaccaaactactcctggccatcttcggacccctttggattcttcaagccagtttgcttaaagtcccctacttcgtgcgcgttcaaggccttctccggatctgcgcgctagcgcggaagatagccggagcgactcggaccgatg

SEQ ID NO: 4791 - DNA, 203 bp, Artificial sequence
  synthetic
ggcgcgccagtcctgtcattacgtgcaaatggccatcatcaagttaggggcgcttactggcacctgtgtgtataaccatctcgctcctcttcgagactgggcgcacaacggcctgcgagatctggccgtggctgtggaaccagtcgtcttctcccgaatggagaccaagctcatcacgtggggggcagcgactcggaccgatg

SEQ ID NO: 4792 - DNA, 203 bp, Artificial sequence
  synthetic
ggcgcgccagtcctagagcttccaggtggcccacctgcatgctcccaccggcagcggtaagagcaccaaggtcccggctgcgtacgcagccaagggctacaaggtgttggtgctcaacccctctgttgctgcaacactgggctttggtgcttacatgtccaaggcccatggggttgatcctaatatcacgactcggaccgatg

SEQ ID NO: 4793 - DNA, 203 bp, Artificial sequence
  synthetic
ggcgcgccagtcctggaccggggtgagaacaattaccactggcagccccatcacgtactccacctacggcaagttccttgccgacgccgggtgctcaggaggtgcttatgacataataatttgtgacgagtgccactccacggatgccacatccatctcgggcatcggcactgtccttgaccaagcagcgactcggaccgatg

SEQ ID NO: 4794 - DNA, 203 bp, Artificial sequence
  synthetic
ggcgcgccagtcctagactgcgggggcgagactggttgtgctcgccactgctacccctccgggctccgtcactgtgtcccatcctaacatcgaggaggttgctctgtccaccaccggagagatccccttttacggcaaggctatccccctcgaggtgatcaaggggggaagacatctcatcttctgcccgactcggaccgatg

SEQ ID NO: 4795 - DNA, 203 bp, Artificial sequence
  synthetic
ggcgcgccagtcctactcaaagaagaagtgcgacgagctcgccgcgaagctggtcgcattgggcatcaatgccgtggcctactaccgcggtcttgacgtgtctgtcatcccgaccagcggcgatgttgtcgtcgtgtcgaccgatgctctcatgactggctttaccggcgacttcgactctgtgatagcgactcggaccgatg

SEQ ID NO: 4796 - DNA, 203 bp, Artificial sequence
  synthetic
ggcgcgccagtcctactgcaacacgtgtgtcactcagacagtcgattttagccttgaccctacctttaccattgagacaaccacgctcccccaggatgctgtctccaggactcaacgccggggcaggactggcagggggaagccaggcatctatagatttgtggcaccgggggagcgcccctccggcacgactcggaccgatg

SEQ ID NO: 4797 - DNA, 203 bp, Artificial sequence
  synthetic
ggcgcgccagtcctgactgggcgctgttcagaatgaagtcaccctgacgcacccaatcaccaaatacatcatgacatgcatgtcggccgacctggaggtcgtcacgagcacctgggtgctcgttggcggcgtcctggctgctctggccgcgtattgcctgtcaacaggctgcgtggtcatagtgggcacgactcggaccgatg

SEQ ID NO: 4798 - DNA, 203 bp, Artificial sequence
  synthetic
ggcgcgccagtcctaccggctaatagccttcgcctcccgggggaaccatgtttcccccacacactacgtgccggagagcgatgcagccgcccgcgtcactgccatactcagcagcctcactgtaacccagctcctgaggcgactgcatcagtggataagctcggagtgtaccactccatgctccggttcgactcggaccgatg

SEQ ID NO: 4799 - DNA, 203 bp, Artificial sequence
  synthetic
ggcgcgccagtcctcctggctaagggacatctgggactggatatgcgaggtgctgagcgactttaagacctggctgaaagccaagctcatgccacaactgcctgggattccctttgtgtcctgccagcgcgggtataggggggtctggcgaggagacggcattatgcacactcgctgccactgtggagcgactcggaccgatg

SEQ ID NO: 4800 - DNA, 203 bp, Artificial sequence
  synthetic
ggcgcgccagtcctctgagatcactggacatgtcaaaaacgggacgatgaggatcgtcggtcctaggacctgcaagaacatgtggagtgggacgttcttcattaatgcctacaccacgggcccctgtactccccttcctgcgccgaactataagttcgcgctgtggagggtgtctgcagaggaatacgcgactcggaccgatg

SEQ ID NO: 4801 - DNA, 203 bp, Artificial sequence
  synthetic
ggcgcgccagtccttggagataaggcgggtgggggacttccactacgtatcgggcatgactactgacaatctcaaatgcccgtgccagatcccatcgcccgaatttttcacagaattggacggggtgcgcctacataggtttgcgcccccttgcaagcccttgctgcgggaggaggtatcattcagagcgactcggaccgatg

SEQ ID NO: 4802 - DNA, 203 bp, Artificial sequence
  synthetic
ggcgcgccagtccttaggactccacgagtacccggtggggtcgcaattaccttgcgagcccgaaccggacgtagccgtgttgacgtccatgctcactgatccctcccatataacagcagaggcggccgggagaaggttggcgagagggtcacccccttctatggccagctcctcggctagccagctgtcgactcggaccgatg

SEQ ID NO: 4803 - DNA, 203 bp, Artificial sequence
  synthetic
ggcgcgccagtcctccgctccatctctcaaggcaacttgcaccgccaaccatgactcccctgacgccgagctcatagaggctaacctcctgtggaggcaggagatgggcggcaacatcaccagggttgagtcagagaacaaagtggtgattctggactccttcgatccgcttgtggcagaggaggatgcgactcggaccgatg

SEQ ID NO: 4804 - DNA, 203 bp, Artificial sequence
  synthetic
ggcgcgccagtcctagcgggaggtctccgtacccgcagaaattctgcggaagtctcggagattcgccccagccctgcccgtctgggcgcggccggactacaaccccctgctagtagagacgtggaaaaagcctgactacgaaccacctgtggtccatggctgcccgctaccacctccacggtcccctccgactcggaccgatg

SEQ ID NO: 4805 - DNA, 203 bp, Artificial sequence
  synthetic
ggcgcgccagtcctaagtgaaggctaacttgctatccgtagaggaagcttgcagcctggcgcccccacattcagccaaatccaagtttggctatggggcaaaagacgtccgttgccatgccagaaaggccgtagcccacatcaactccgtgtggaaagaccttctggaagacagtgtaacaccaatagcgactcggaccgatg

SEQ ID NO: 4806 - DNA, 203 bp, Artificial sequence
  synthetic
ggcgcgccagtcctacactaccatcatggccaagaacgaggttttctgcgttcagcctgagaaggggggtcgtaagccagctcgtctcatcgtgttccccgacctgggcgtgcgcgtgtgcgagaagatggccctgtacgacgtggttagcaagctccccttggccgtgatgggaagctcctacggatcgactcggaccgatg

SEQ ID NO: 4807 - DNA, 203 bp, Artificial sequence
  synthetic
ggcgcgccagtcctcctccaacgtgtcagtcgcccacgacggcgctggaaagagggtctactaccttacccgtgaccctacaacccccctcgcgagagccgcgtgggagacagcaagacacactccagtcaattcctggctaggcaacataatcatgtttgcccccacactgtgggcgaggatgataccgactcggaccgatg

SEQ ID NO: 4808 - DNA, 203 bp, Artificial sequence
  synthetic
ggcgcgccagtccttgatgacccacttctttagcgtcctcatagccagggatcagcttgaacaggctctcaactgcgagatctacggagcctgctactccatagaaccactggatctacctccaatcattcaaagactccatggcctcagcgcattttcactccacagttactctccaggtgaaattacgactcggaccgatg

SEQ ID NO: 4809 - DNA, 203 bp, Artificial sequence
  synthetic
ggcgcgccagtccttccggctggttcacggctggctacagcgggggagacatttatcacagcgtgtctcatgcccggccccgctggttctggttttgcctactcctgcttgctgcaggggtaggcatctacctcctccccaaccgatgaagattgggctaaccactccaggccaataggccattccctcgactcggaccgatg

SEQ ID NO: 4810 - DNA, 203 bp, Artificial sequence
  synthetic
ggcgcgccagtccttagtgggagtgaagagggtagtaatgaacttgctagatggcagagggccaatacggtttgtgttggctctcttagctttcttcaggtttacagcacttgccccgaccaaggccttgatgaggcgctggaagagcgtgaacaagacaacggccatgaaacatctgaccagttttacgactcggaccgatg

SEQ ID NO: 4811 - DNA, 203 bp, Artificial sequence
  synthetic
ggcgcgccagtcctagaaagaattaggaacactgattgatgtggtgaacaaaaggggcaaaaaacaaaagaaaagaggtggcagtgaaacatccgtgcttatgctcattttcatgctgattggatttgccgctgccttaaagctttccaccttccagggcaagataatgatgactgtgaacgctacggcgactcggaccgatg

SEQ ID NO: 4812 - DNA, 203 bp, Artificial sequence
  synthetic
ggcgcgccagtcctacattgctgatgtgatcgccattccaaccccgaagggacccaatcaatgctggattcgagccattgacattggatttatgtgtgatgacaccatcacttatgaatgcccgaaattggaaagtggaaatgaccctgaagacattgactgctggtgtgacaaacaagctgtgtacgcgactcggaccgatg

SEQ ID NO: 4813 - DNA, 203 bp, Artificial sequence
  synthetic
ggcgcgccagtccttggagggcgacagttgcatcaccatcatggccgctgacaaacccacccttgacataagaatgatgaacattgaagccaccaatcttgcactggttagaaattactgctatgcagctactgtgtcagacgtttctacggtgtcaaactgtcccactacaggggagtcacacaacacgactcggaccgatg

SEQ ID NO: 4814 - DNA, 203 bp, Artificial sequence
  synthetic
ggcgcgccagtcctcgaagcgggcagatcacaattacttgtgcaaacgaggtgtgaccgacagaggctggggtaatggatgtggcttgtttggtaaggggagcattgacacatgcgcaaagttcacctgctctaactcagctgcggggagacttatcttacctgaggacatcaaatatgaagttggggcgactcggaccgatg

SEQ ID NO: 4815 - DNA, 203 bp, Artificial sequence
  synthetic
ggcgcgccagtcctaggcctactacgtcatgaccattggaacgaaacactttctagtgcatcgtgagtggttcaatgatttgctcttgccatggacatcacctgcaagcacggaatggaggaatagagaaattctcgtggagtttgaagagccacatgccaccaaacaatcagtggttgccttgggttcgactcggaccgatg

SEQ ID NO: 4816 - DNA, 203 bp, Artificial sequence
  synthetic
ggcgcgccagtccttaacatccaccaggggttggcttaaactcagagaggaaaatacctcggagtgtgacagcaccattattgggaccgcagttaagggcaaccatgcagtacacagtgacctttcctactggattgagagtggactcaatgggacatggaaacttgagagagccatttttggagaggcgactcggaccgatg

SEQ ID NO: 4817 - DNA, 203 bp, Artificial sequence
  synthetic
ggcgcgccagtcctcaggccttatgatatgcaaccctaacaagaagagaggatggcccgccacagaggtgttaacagcagtgggactgatgttcgccattgttggaggactcgctgagctagacattgattctatgtcagtcccttttaccatagctggcctcatgttagtgtcctatgttatctcggcgactcggaccgatg

SEQ ID NO: 4818 - DNA, 203 bp, Artificial sequence
  synthetic
ggcgcgccagtccttaagcgtagctgccatcactccaagggccattttgccatccgcgtttgggtattggctgactctgaagtacacaaaacgagggggtgttttttgggatacgccttccccaaaagtgtatcccaagggggatacgacgccaggagtctaccgaataatggccagaggtatcctggcgactcggaccgatg

SEQ ID NO: 4819 - DNA, 203 bp, Artificial sequence
  synthetic
ggcgcgccagtcctgagagggaagagtcattctcagtgtgccgtcagccatcactagtgccagtgctgcccaacggagaggtagagtgggcaggaatccaagtcaaataggagatgagtaccactatggaggcggaaccagtgaggatgacaccatgctggcgcactggactgaagcaaaaattctttcgactcggaccgatg

SEQ ID NO: 4820 - DNA, 203 bp, Artificial sequence
  synthetic
ggcgcgccagtccttggacaacatccacctcccaaatggcctagtagctcagctgtacggtcccgaaagagataaaacttacaccatggatggagagtaccgactcagaggcgaagaacgcaagacattcctcgagctcataaaaacagccgatttgccggtgtggcttgcttacaaggtagcgtcaacgactcggaccgatg

SEQ ID NO: 4821 - DNA, 203 bp, Artificial sequence
  synthetic
ggcgcgccagtcctggaagtcactaattgaggaaaacgaggtccatatccctccctttgattttttcaccctggatttgaagcctgctactgcttgggctttgtacggaggaagcacagttgtgttgactccactgataaaacatctggtgacatcacagtatgttaccacctcattggcatcaataacgactcggaccgatg

SEQ ID NO: 4822 - DNA, 203 bp, Artificial sequence
  synthetic
ggcgcgccagtcctgagcctcggggaacatcgtgcacgcggtgaacatgaccagtcaggtgctcattggaagaatggacaagaagatttggaaaggcccaaaatatgaggaagatgtcaacctgggcagcggcacgagagcagtaggaaaaggtgtgcagcacacggattacaagaggatcaaatccacgactcggaccgatg

SEQ ID NO: 4823 - DNA, 203 bp, Artificial sequence
  synthetic
ggcgcgccagtcctctcggaagaggagtccctgccaacaatggagatgaagcccgtgtcagatcgcgaaagcgccacttcgccgaggagtgcaatctgtgaggccccaggaggactgggtaaacaaagccgtaaggcccccgcagcccgggccgggaggaggtgatgcaaaccccggcgaaggactagcgactcggaccgatg

SEQ ID NO: 4824 - DNA, 203 bp, Artificial sequence
  synthetic
ggcgcgccagtcctaggttagaggagaccctgcggaagaaatgagtggcccaagctcgccgaagctgtaaggcgggtggacggactagaggttagaggagaccccactctcaaaagcatcaaacaacagcatattgacacctgggaaaagactaggagatcttctgctctattccaacatcagtcacacgactcggaccgatg

SEQ ID NO: 4825 - DNA, 203 bp, Artificial sequence
  synthetic
ggcgcgccagtcctgtaaggcgggtggacggactagaggttagaggagaccccactctcaaaagcatcaaacaacagcatattgacacctgggaaaagactaggagatcttctgctctattccaacatcagtcacaaggcaccgagcgccgaacactgtgactgatgggggagaagaccacaggatctcgactcggaccgatg

SEQ ID NO: 4826 - DNA, 203 bp, Artificial sequence
  synthetic
ggcgcgccagtcctgcgccagtcctccgatagactgagtcgcccgggtacccgtgtatccaataaatcctcttgctgttgcatccgactcgtggtctcgctgttccttgggagggtctcctcagagtgattgactacccgtctcgggggtctttcatttgggggctcgtccgggatctggagacccctcgactcggaccgatg

SEQ ID NO: 4827 - DNA, 203 bp, Artificial sequence
  synthetic
ggcgcgccagtcctacctgggaagctatagcagtagacccccctccctgggtcagacccttcgtgcaccctaaacctcccctctctcttcccccttcagccccctctctcccacctgaacccccactctcgaccccgccccagtcctccctctatccggctctcacttctcctttaaacaccaaacctcgactcggaccgatg

SEQ ID NO: 4828 - DNA, 203 bp, Artificial sequence
  synthetic
ggcgcgccagtcctaggcctcaagtccttcctgatagcggaggaccactcattgatctactcacggaggaccctccgccttaccgggacccagggccaccctctcctgacgggaacggcgatagcggagaagtggcccctacagaaggagcccctgacccttccccaatggtatcccgcctgcggggacgactcggaccgatg

SEQ ID NO: 4829 - DNA, 203 bp, Artificial sequence
  synthetic
ggcgcgccagtcctagaaaagaaccccccgtggcggattctactacctctcaggcgttcccccttcgcctgggagggaatggacagtatcaatactggccattttcctcctctgacctctataactggaaaaataacaacccctctttctccgaggacccagctaaattgacagctttgatcgagtcccgactcggaccgatg

SEQ ID NO: 4830 - DNA, 203 bp, Artificial sequence
  synthetic
ggcgcgccagtcctcccgactgggactacaacacccaacgaggtaggaaccacctagtccactatcgccagttgctcctagcgggtctccaaaacgcgggcagaagccccaccaatttggccaaggtaaaagggataacccagggacctaatgagtctccctcagcctttttagagagactcaaggagcgactcggaccgatg

SEQ ID NO: 4831 - DNA, 203 bp, Artificial sequence
  synthetic
ggcgcgccagtcctaaacgagaaaccccggaagaaagagaggaacgtattaggagagaaacagaggaaaaggaagaacgccgtagggcagaggatgtgcagagagagaaggagagggaccgcagaagacatagagaaatgagtaagttgctggctactgtcgttagcgggcagagacaggatagacagcgactcggaccgatg

SEQ ID NO: 4832 - DNA, 203 bp, Artificial sequence
  synthetic
ggcgcgccagtccttcaggacaattaacctggaccagactcccgcagggtttcaaaaacagtcccaccctgtttgatgaagccctgcacagggacctcgcagacttccggatccagcacccagacctgattctgctccagtatgtagatgacttactgctggccgccacttctgagcttgactgtcaacgactcggaccgatg

SEQ ID NO: 4833 - DNA, 203 bp, Artificial sequence
  synthetic
ggcgcgccagtcctacccctcgacaactaagggagttcctagggacggcaggcttctgtcgcctctggatccctgggtttgcagaaatggcagcccccttgtaccctctcaccaaaacggggactctgtttgagtggggcccagaccagcaaaaggcctaccaagagatcaagcaggctctcttaactcgactcggaccgatg

SEQ ID NO: 4834 - DNA, 203 bp, Artificial sequence
  synthetic
ggcgcgccagtcctgcggaggcaaggggcaacaggatggccgaccaagcggcccgagaagtagccactagagaaactccagagacttccacacttctgatagaaaattcagccccctatactcatgaacattttcactatacggtgactgacataaaagatctgactaaactaggggccacttatgaccgactcggaccgatg

SEQ ID NO: 4835 - DNA, 203 bp, Artificial sequence
  synthetic
ggcgcgccagtcctgacatcactgagacttgccaagcctgtgcacaggtcaatgccagcaagtctgccgtcaaacaagggactagagttcgagggcaccgacccggcacccactgggaaattgatttcactgaggtaaaacctggcctgtatgggtataaatatcttttagttttcatagacactttccgactcggaccgatg

SEQ ID NO: 4836 - DNA, 203 bp, Artificial sequence
  synthetic
ggcgcgccagtccttctggatgggtagaagctttcccaaccaagaaagaaactgccaaagttgtaaccaagaagctactagaagaaatcttccccagattcggcatgccacaggtattgggaaccgacaatgggcctgccttcgtctccaaggtaagtcagacagtagccgatttactgggggttgatcgactcggaccgatg

SEQ ID NO: 4837 - DNA, 203 bp, Artificial sequence
  synthetic
ggcgcgccagtcctccggtagtgcctcaccctttccgagtcggtgacacagtgtgggtccgcagacaccaaactaaaaatctagaaccccgctggaaaggaccttataccgtcctactgactacccccaccgctctcaaagtggacggcattgcagcgtggatccacgctgcccacgtaaaggctgcccgactcggaccgatg

SEQ ID NO: 4838 - DNA, 203 bp, Artificial sequence
  synthetic
ggcgcgccagtcctgacaccaggattgagccaccatcggaatcgacatggcgtgttcaacgctctcaaaatcccctaaagataagattgacccgcgggacctcctaatccccttaattctcttcctgtctctcaaaggggccagatccgcagcacccggctccagccctcaccaggtctacaacattacgactcggaccgatg

SEQ ID NO: 4839 - DNA, 203 bp, Artificial sequence
  synthetic
ggcgcgccagtcctcctgggaagtgaccaatggggatcgggagacagtatgggcaatatcaggcaaccaccctctgtggacttggtggccagtcctcaccccagatttgtgtatgttagctctcagtgggccgccccactgggggctagagtatcaggccccctattcctcgcccccggggcccccttcgactcggaccgatg

SEQ ID NO: 4840 - DNA, 203 bp, Artificial sequence
  synthetic
ggcgcgccagtccttaggaacagtcccaaaaactcaccaggccctgtgcaacactacccttaaggcaggcaaagggtcttactatctagttgcccccacaggaactatgtgggcatgtaacactggactcactccatgcctatctgccaccgtgcttaatcgcaccactgactattgcgttctcgtggcgactcggaccgatg

SEQ ID NO: 4841 - DNA, 203 bp, Artificial sequence
  synthetic
ggcgcgccagtcctcccagcagtttcagcagctccatgctgccgtacaagatgatctcaaagaagtcgaaaagtcaattactaacctagaaaagtctcttacttcgttgtctgaggttgtactgcagaatcgacgaggcctagacctgttgttcctaaaagagggaggactgtgtgctgccctaaaagcgactcggaccgatg

SEQ ID NO: 4842 - DNA, 203 bp, Artificial sequence
  synthetic
ggcgcgccagtcctcattcaggaagtgcttccttctgctcggggtgatacatgagtatacagtagtttgaatcctgtgtgctggtgttgtcttctcggctttttgtgacatcataaataacacctagaagtaatatttttaagaggcttacacctcaggaaggagtgtggctaatgctggtaaggcaccgactcggaccgatg

SEQ ID NO: 4843 - DNA, 203 bp, Artificial sequence
  synthetic
ggcgcgccagtcctgactatctctaactcccggagattgtattacatgggactcagcagtcgctactctgttcattagaacatatggacaatatccattacatcagcttggaaatgtgttaaaaggaatagctgatcaagaaggagtagcaacagcatatactctagggatgatgctttctggacaaacgactcggaccgatg

SEQ ID NO: 4844 - DNA, 203 bp, Artificial sequence
  synthetic
ggcgcgccagtcctccccaaaatagcacaatgaatacacctgtttatcctgttcctaaaccagatggaaggtggagaatggttttagattatagagaagtaaataaaactatacctttaacagcggcccaaaaccaacattctgctggtatattggccactattgtaagacaaaaatataaaactactcgactcggaccgatg

SEQ ID NO: 4845 - DNA, 203 bp, Artificial sequence
  synthetic
ggcgcgccagtcctggtcgtggcctaacggatacttttaaaacaaaattattaaatgttacaccacccaaagatttaaaacaattacagagcatactgggattgttaaattttgctagaaattttatacctaattttgcagaattggtacaaacgttgtataatttaatagcttcatctaagggaaaacgactcggaccgatg

SEQ ID NO: 4846 - DNA, 203 bp, Artificial sequence
  synthetic
ggcgcgccagtcctaaaggatatcctaaacaatatacatattatttagaagatggcaaagtaaaagtttccagacctgaaggggttaaaataatacccccacagtcggatcgacaaaaaattgtacttcaagcccacaatttggctcataccggacgtgaagccactcttttaaaaattgccaatcttcgactcggaccgatg

SEQ ID NO: 4847 - DNA, 203 bp, Artificial sequence
  synthetic
ggcgcgccagtcctggatatctatatgttttagtaattgttgatggaatgacaggttttacatggttatacccaactaaggctccttctacaagcgcaactgttaaatctctcaatgtactcactagtattgcaattccaaaggtgattcactctgatcaaggtgcagcattcacttcttcaacctttcgactcggaccgatg

SEQ ID NO: 4848 - DNA, 203 bp, Artificial sequence
  synthetic
ggcgcgccagtcctaataatacttatagccctgtattaaaatatactccacatcaactcttatttggtatagattcaaatactccatttgcaaaccaagatacacttgatttgacgagagaagaagaactttctcttttacaggaaattcgtgcctctttataccaaccatccacccctcctgcctcccgactcggaccgatg

SEQ ID NO: 4849 - DNA, 203 bp, Artificial sequence
  synthetic
ggcgcgccagtccttcacgttcctggtctcctgttgtaggccaattggtccaggagagggtggctaggcctgcatccttgcgaccacgttggcataaaccttccactgttcttgaagtattgaatcctaggactgttgttattttggaccatcttggcaacaacagaactgtaagtattgacaatttacgactcggaccgatg

SEQ ID NO: 4850 - DNA, 203 bp, Artificial sequence
  synthetic
ggcgcgccagtcctcactcagagggctgtttatcaacccttgcaaaccagaaggattgcacgttctcttagaatgcaacacccagttccaaaatatatagaggtaaacatgaccagtatcccacaaggtgtatattatgaacctcatccagaacctatagtggtcacggagagggtcttaggtctttccgactcggaccgatg

SEQ ID NO: 4851 - DNA, 203 bp, Artificial sequence
  synthetic
ggcgcgccagtcctaaaatgctaccaagaattcgcgcattgctatctggtaaaatataaaactccaaagtcctggccaactgaaggtctcattgcagatcaatgtcccttgccaggatatcatgcaggacttagttataagccacaatcaatatgggattattatataaaagtagaaattacaaggcccgactcggaccgatg

SEQ ID NO: 4852 - DNA, 203 bp, Artificial sequence
  synthetic
ggcgcgccagtccttaaattagataaccttacaactgggtcatctctattaaaaaagagagccctgcctaaggaatggagctcacaaggtaaaaatgccttgtttaaggaaattaatgtattggatgtttgcagtaaacctgaattagtaatattgttaaatacttcatattattcattctctttatgcgactcggaccgatg

SEQ ID NO: 4853 - DNA, 203 bp, Artificial sequence
  synthetic
ggcgcgccagtccttactgttttattctccctaaaaaattttcttaatcacacaggtaggcctgtaaatgaaatgcctaatgctagagcctttgtgggcctagtagatcctaagtttcccccttcctatcccaatgtaacccgagaacattatacttcttgtaacaataggaaaagaagaagtactgacgactcggaccgatg

SEQ ID NO: 4854 - DNA, 203 bp, Artificial sequence
  synthetic
ggcgcgccagtcctaaaacaaacctacaattcacccactgctacggcttgggaaattgggttatattatgaattgactatacctaaacatgtttacttaaacaattggaatgttgtcaatataggtcatttggttcaatcagctggacaattgactcatgtaactatagctcatccatatgaaataatcgactcggaccgatg

SEQ ID NO: 4855 - DNA, 203 bp, Artificial sequence
  synthetic
ggcgcgccagtcctaagattaccacatttggttggaattattgcaaaaatcaaggggctaaaaatagaagtcacatcctctggagagagtataaaagaccaaattgaaagagcaaaggctgagcttcttcgactggatatccacgaaggagacactccagcctggatacagcaactagctgcagcaaccgactcggaccgatg

SEQ ID NO: 4856 - DNA, 203 bp, Artificial sequence
  synthetic
ggcgcgccagtcctgattcctaccaagaagaagagccagtagcctctacctctggacttcaggacctgcagactcttagtgagcttgttggccctgaaaatgccggagagggagatctggtcattgcagaagaacctgaagaaaacccccgacgccccagaagatacaccaagagagatgttaaatgtcgactcggaccgatg

SEQ ID NO: 4857 - DNA, 203 bp, Artificial sequence
  synthetic
ggcgcgccagtcctgtttcttaccatgcttataaagagcttgaggacaaacatcctcaccacattaagctccaagactggattcctaaacctgaagaaatgagtaagtcaatttgtaaaagacttattttatgtggattatatagtggagaaaaggctagagaaatcttaaaaaagccttttacagtacgactcggaccgatg

SEQ ID NO: 4858 - DNA, 203 bp, Artificial sequence
  synthetic
ggcgcgccagtcctaaacatcaaaagaactgttctcttgttaaaccttctactagttgcccagaaggtccaaaaccaagacgtaggcacgatcctgtccttcgatgtgacatgtttgaaaagcatcacaagcctcggccgaaacgatccaggaaacgatccatcgatcatgagtcatgtgcttccagtcgactcggaccgatg

SEQ ID NO: 4859 - DNA, 203 bp, Artificial sequence
  synthetic
ggcgcgccagtcctggtgacaccgtggccaatgagtcaggaccactatgcaccaacactttttggactcctggaccggtattacaagggctacttggagaatccagcaaccttccagacctggaagttcacatgtcaggaggacccttctggaaagaggtatatggggactcaattctgggtcccccccgactcggaccgatg

SEQ ID NO: 4860 - DNA, 203 bp, Artificial sequence
  synthetic
ggcgcgccagtccttctgggtcaggtgaacattcagttttataaaaattaccagattgtaacttgctgccaggccctagatccttttgctaatattttccatggcaccgaggaagaaatgtatgatattgattctgggcctgatgtttggtgcaccccctctttgtgtttcaaagtaatctatgagggcgactcggaccgatg

SEQ ID NO: 4861 - DNA, 203 bp, Artificial sequence
  synthetic
ggcgcgccagtcctgggctgtaaggcaggctgtttggcttcgccagtgcttaatttcaaagctctgcagttccatagaactttaatggcagaccttaccaaccctaaaattggacaaggctaccttgcccatggttatcacgctgctatggaagcttatggacctcagagaggaagtagcgaggagagcgactcggaccgatg

SEQ ID NO: 4862 - DNA, 203 bp, Artificial sequence
  synthetic
ggcgcgccagtcctttcaaaaccacagacagtaaaagtgtggtaacactttaagcaatattatctttgtcagaatattagaagctttcacatgctcagcagctgtttcgcaactaccaaaataagaatgatgtaataataggaagtagcttacaataggttaagtatgtttactgaagtagataatcccgactcggaccgatg

SEQ ID NO: 4863 - DNA, 203 bp, Artificial sequence
  synthetic
ggcgcgccagtcctacctttctatcagtacaatcaagcccattcctccccatgttctcagggtgtgtgcggcgtaagatcgaatccccacacacctgggaacttgattattgcataatattttgttagtcatatagaaaagtaatataggataagttatagggattaaactatgaggtgtgtggctcacgactcggaccgatg

SEQ ID NO: 4864 - DNA, 203 bp, Artificial sequence
  synthetic
ggcgcgccagtcctctagtgaacccctgaatggcgatcttaagcgcctctgtagggaagccaggaatgtccaggaggtaccccttccgctcggaagggatctgacctggagacacatcacatgtgctttacacctgtgcttgtgtttaaaaattgtcgcagcttccccaaaccaagtggtcttggtttcgactcggaccgatg

SEQ ID NO: 4865 - DNA, 203 bp, Artificial sequence
  synthetic
ggcgcgccagtcctactttaatcagtaccgtggttcactgaattttcttttcgttttcactggtgctgcaatggttaagggcaagtttctcatagcctacaccccgcctggtgcgggaaagcccaccacccgggaccaagctatgcaggctacctacgccatttgggacttgggcttgaattccagctcgactcggaccgatg

SEQ ID NO: 4866 - DNA, 203 bp, Artificial sequence
  synthetic
ggcgcgccagtcctccaatggtgccaacttcccactcatgaccaaacaggactacgccttcctctgcttttcccctttcacctactacaagtgtgaccttgaagttaccgttagtgctatgggagcaggcaccgtttcttctgttctgcgctgggcacccaccggggcgcccgcggatgtcactgacccgactcggaccgatg

SEQ ID NO: 4867 - DNA, 203 bp, Artificial sequence
  synthetic
ggcgcgccagtcctagctgatcggctatactcctagtcttggtgaaacacgtaacccccacatgtggatcgttggctctggaaattctcaaatttcttttgtcgtaccttacaattcccctctgtccgtcttacccgctgcttggttcaatggatggtccgactttggaaacaccaaggattttggagcgactcggaccgatg

SEQ ID NO: 4868 - DNA, 203 bp, Artificial sequence
  synthetic
ggcgcgccagtcctttgagaatcccgcttctctctaccgcattgatcttttcatcacctttactgatgagctcataacttttgactacaaggtccacggacgtcctgtgctcaccttccggattccaggcttcggtctgacaccggcaggcagaatgctcgtgtgcatgggcgagaagcccgcacacacgactcggaccgatg

SEQ ID NO: 4869 - DNA, 203 bp, Artificial sequence
  synthetic
ggcgcgccagtcctgtccgttcacctcgtctaaatctctataccatgttatcttcacttccacttgcaattccttcagctttaccatctataaaggacgctaccgctcctggaagaagcccatccacgatgagcttgtggatcgtggttacaccactttccgcgagttcttcaaggctgtgcgcggatcgactcggaccgatg

SEQ ID NO: 4870 - DNA, 203 bp, Artificial sequence
  synthetic
ggcgcgccagtcctttagtaaagcaatcacagttgtcactgacttggttgctgcatgggaaaaagcaaaaaccactctggtctctcctgaattttggtcagaacttatattaaaaactaccaagttcattgctgcttccgtgctctaccttcacaaccctgacttcactaccactgtttgtctctcatcgactcggaccgatg

SEQ ID NO: 4871 - DNA, 203 bp, Artificial sequence
  synthetic
ggcgcgccagtccttgatgactggtgtagacctcctcaccaatgattctgtttttgattggcttaagagcaaattgtcctccttctttcgtactcctcccccagcttgccccaatgtcatgcaacctcaggggcctctacgcgaggccaatgagggttttacctttgccaagaatattgaatgggccacgactcggaccgatg

SEQ ID NO: 4872 - DNA, 203 bp, Artificial sequence
  synthetic
ggcgcgccagtcctaatctgtttctaagatggcctttggccgtcagtctgtttattctatgccccccgattcggaatattttgatggctatgaaaatcaattttctgtgattatggatgatctaggacaaaatcccgatggtgaagatttcaccgtcttttgtcaaatggtttctagcacaaattttccgactcggaccgatg

SEQ ID NO: 4873 - DNA, 203 bp, Artificial sequence
  synthetic
ggcgcgccagtcctccacaggatctgtcgtacatgtccccagaaagaccaaactgaggagaacagtcgctcatgacgttttccaacccaaattcgaacctgcagttctgtcccgttatgaccctgggaccgacaaggatgtagatgttgtagccttctccaaacacactactaacatggaaagcttgccgactcggaccgatg

SEQ ID NO: 4874 - DNA, 203 bp, Artificial sequence
  synthetic
ggcgcgccagtcctctccaatctttgacattgtctgcggtgaatacgctaaccgtgttttcaccatccttggtaaagacaacggtctcttaaccgttgaacaggctgtgcttggcttgtcgggcatggaccccatggagaaggacacctcccctggattgccctacactcaacaaggactcagacgaacgactcggaccgatg

SEQ ID NO: 4875 - DNA, 203 bp, Artificial sequence
  synthetic
ggcgcgccagtcctaatgtagtcttatgcaatactcttgtagtcttgcaacatgcttatgtaacgatgagttagcaacatgccttataaggaaagaaaaagcaccgtgcatgccgattggtggaagtaaggtggtatgatcgtggtatgatcgtggtatgatcgtgccttattaggaaggcaacagaccgactcggaccgatg

SEQ ID NO: 4876 - DNA, 203 bp, Artificial sequence
  synthetic
ggcgcgccagtcctgggtctaacacggattggacgaaccactgaattccgcattgcagagatattgtatttaagtgcctagctcgatacaataaacgccatttgaccattcaccacattggtgtgcacctgggttgatggcgggaccgttgattccctgacgactacgagcacatgcatgaagcagaacgactcggaccgatg

SEQ ID NO: 4877 - DNA, 203 bp, Artificial sequence
  synthetic
ggcgcgccagtcctggcttcatttggtgaccccgacgtgatcgttagggaatagtggtcggccacaggcggcgtggcgatcctgtcctcatccgtctcgcttattcggggagcggacgatgaccctagtagagggggctgcggcttaggagggcagaagctgagtgacgtcggagggagctccacggccgactcggaccgatg

SEQ ID NO: 4878 - DNA, 203 bp, Artificial sequence
  synthetic
ggcgcgccagtcctccgcccctctcgcccagctgccgctccaacctggccgccgcctcctgcttcccttccaccgccgaccagctggagatggtgacggagctgctcgggggggacatggtcaaccagagctccatctgcgacccggacgacgaatccttcgtcaaatccatcatcatccgggactgccgactcggaccgatg

SEQ ID NO: 4879 - DNA, 203 bp, Artificial sequence
  synthetic
ggcgcgccagtcctaggcaacagacgggtctaacacggattggacgaaccactgaattccgcattgcagagatattgtatttaagtgcctagctcgatacaataaacgccatttgaccattcaccacattggtgtgcacctgggttgatggcgggaccgttgattccctgacgactacgagcacatgccgactcggaccgatg

SEQ ID NO: 4880 - DNA, 203 bp, Artificial sequence
  synthetic
ggcgcgccagtccttcgcttaatcggggagcggacgatgaccctagcagagggggctgcggcttaggagggcagaagctgagtgacgtcggagggagctccacggccgggggccaagataacctaccgagaactcagagagtcgttggaagacgggaaggaagcccaacgactgagcagtccaccccacgactcggaccgatg

SEQ ID NO: 4881 - DNA, 203 bp, Artificial sequence
  synthetic
ggcgcgccagtccttcccccaggtccggagtgcatcgagaaaccagcaacggagcggcgaatcgacaagggagaaacaactgtgcagcgagatacgaagatggcgccggaggaaacggccacacctaaaaccgttggcacatcctgctatcattgcggaacagctattggctgtaattgcgccacagccgactcggaccgatg

SEQ ID NO: 4882 - DNA, 203 bp, Artificial sequence
  synthetic
ggcgcgccagtcctctccccgctgctgccgcatgacgtcacgaatccaatgagagttattttaggacccgccccacatgccttatggatggacgcttgggctgcgtcaggtcagttgcaccggccccaaccccaggaacacaccagcaccagcgctgcagcggggacctggcggctcactcaggcttccgactcggaccgatg

SEQ ID NO: 4883 - DNA, 203 bp, Artificial sequence
  synthetic
ggcgcgccagtcctggagtcgcggcacaggctgccccactgctctgcagccccatcccaccaggatcacagtgccatgggctttgggccggagctgtggtgcccgaaggggcacactgagctgctgcggctgcaggacagcgagttgcgcctcctggagctgatgaagaagtggatgtcacagcgtgccgactcggaccgatg

SEQ ID NO: 4884 - DNA, 203 bp, Artificial sequence
  synthetic
ggcgcgccagtccttaagagcgaccgggagtacgcggggatgctgcaccacatgttctctcagctggagaaacaggagggcctgggacatctccgtgccaccgaccacagcagccagatcggggagtcgtggtgggttctggcaagccagactgagacactgagccagacgctgcggcggcacgcggacgactcggaccgatg

SEQ ID NO: 4885 - DNA, 203 bp, Artificial sequence
  synthetic
ggcgcgccagtcctgagcagcaaggagcagcgggtgtgggagctgcaggttgagctgcggggcgaggagctggcactcagccctggggagcgggtgcacttgctgggcaagcggcaggggctgcgggaggcccagcagcagctgcagggcttggtctgtgctcaggccaagctgcaggcacagcgggacgactcggaccgatg

SEQ ID NO: 4886 - DNA, 203 bp, Artificial sequence
  synthetic
ggcgcgccagtcctacctcccgtgcccctcatcccggaggtgcagaagccgctgtgccagcaggcctggtaccacggggccatcccgcgctcggaggtgcaggagctgctgaaatacagcggagacttcctggtgcgggagagccaggggaagcaggagtatgtgctcagcgtgctgtgggatgggcacgactcggaccgatg

SEQ ID NO: 4887 - DNA, 203 bp, Artificial sequence
  synthetic
ggcgcgccagtccttcccaacatcgtccggctcatcggcgtctgcacccagaagcagcccatttacatcgtcatggagctggtgcagggaggggacttcctgagcttcctgcgcagcaaggggccccgcctgaagatgaagaagctgatcaagatgatggagaatgccgcggcgggcatggagtacctcgactcggaccgatg

SEQ ID NO: 4888 - DNA, 203 bp, Artificial sequence
  synthetic
ggcgcgccagtcctggaaagcaagcactgcatccacagggacctggctgcccgcaactgcctggtgacagaaaagaacaccctgaaaatcagcgactttgggatgtcgcggcaggaggaggatggtgtctatgcctccacggggggcatgaagcagatccccgtgaaatggactgcccccgaggctctcgactcggaccgatg

SEQ ID NO: 4889 - DNA, 203 bp, Artificial sequence
  synthetic
ggcgcgccagtcctgaattacggctggtacagctcggagagcgacgtgtggagctttgggatcctgctgtgggaagccttcagcctgggcgccgtgccctacgccaacctcagcaaccagcagacgcgcgaggccatcgagcagggcgtgcggctggagcccccggagcagtgccccgaggacgtgtacgactcggaccgatg

SEQ ID NO: 4890 - DNA, 203 bp, Artificial sequence
  synthetic
ggcgcgccagtcctgaagcggaaggcttcattgatgttgccagttagtcatcattgccacttagtcatcattacataagacagtctaaagtcctaaaaaggaaaaacaagacatctcggatgtcattggctgcaaccagtaaggaagtagtggcgtgaggatcacccgatgggtgtaacccagaaggccgactcggaccgatg

SEQ ID NO: 4891 - DNA, 203 bp, Artificial sequence
  synthetic
ggcgcgccagtcctggcaagggtcagggaggagcttgcgagtactggtccgcccgtggtggccatgcctgtagtgattaagacagagggacccgcttggacccctctggagccaaaattgatcacaagactggctgatacggtcaggaccaagggcttacgatccccgattactatggcagaagtggacgactcggaccgatg

SEQ ID NO: 4892 - DNA, 203 bp, Artificial sequence
  synthetic
ggcgcgccagtcctaggagagataattaaatatgtgctagacaggcagaagactgcccctcttacggatcaaggcatagccgcggccatgtcgtctgctatccagcccttaattatggcagtagtcaatagagagagggatggacaaactgggtcgggtggtcgtgcccgagggctctgctacacttgcgactcggaccgatg

SEQ ID NO: 4893 - DNA, 203 bp, Artificial sequence
  synthetic
ggcgcgccagtccttggatccccgggacattatcaggcgcagtgcccgaaaaaacggaagtcaggaaacagccgtgagcgatgtcagttgtgtaacgggatgggacacaacgctaaacagtgtaggaagcgggatggcaaccagggccaacgcccaggaaaaggtctctcttcggggccgtggcccggcgactcggaccgatg

SEQ ID NO: 4894 - DNA, 203 bp, Artificial sequence
  synthetic
ggcgcgccagtcctccctgagccacctgccgtctcgttagcgatgacaatggaacataaagatcgccccttggttagggtcattctgactaacactgggagtcatccggtcaaacagcgttcggtgtatatcaccgcgctgttggactctggagcggacatcactattatttcagaggaggattggcccgactcggaccgatg

SEQ ID NO: 4895 - DNA, 203 bp, Artificial sequence
  synthetic
ggcgcgccagtcctttagtggaaaaagaattacagttaggacatatagaaccttcacttagttgttggaacacacctgtcttcgtgatccggaaggcttccgggtcttaccgcttactgcatgatttgcgcgctgttaacgccaagcttgttccttttggggccgtccaacagggggcgccagttctccgactcggaccgatg

SEQ ID NO: 4896 - DNA, 203 bp, Artificial sequence
  synthetic
ggcgcgccagtcctactatttcgcctgataaggtccagagggagcccggagtacaatatcttgggtacaagttaggcagtacgtatgtagcacccgtaggcctggtagcagaacccaggatagccaccttgtgggatgttcaaaagctggtggggtcacttcagtggcttcgcccagcgttaggaatccgactcggaccgatg

SEQ ID NO: 4897 - DNA, 203 bp, Artificial sequence
  synthetic
ggcgcgccagtcctccgccacgactgatgggccccttctatgagcagttacgagggtcagatcctaacgaggcgagggaatggaatctagacatgaaaatggcctggagagagatcgtacggcttagcaccactgctgccttggaacgatgggaccctgccctgcctctggaaggagcggtcgctagacgactcggaccgatg

SEQ ID NO: 4898 - DNA, 203 bp, Artificial sequence
  synthetic
ggcgcgccagtccttgtgaacagggggcaataggggttttgggacagggactgtccacacacccaaggccatgcttgtggttattctccacccaacccaccaaggcgtttactgcttggttagaagtgctcacccttttgattactaagctacgtgcttcggcagtgcgaacctttggcaaggaggtccgactcggaccgatg

SEQ ID NO: 4899 - DNA, 203 bp, Artificial sequence
  synthetic
ggcgcgccagtcctgatatcctcctgttgcctgcatgctttcgggaggaccttccgctcccagaggggatcctgttagcccttaaggggtttgcaggaaaaatcaggagtagtgacacgccatctatttttgacattgcgcgtccactgcatgtttctctgaaagtgagggttaccgaccaccctgtgcgactcggaccgatg

SEQ ID NO: 4900 - DNA, 203 bp, Artificial sequence
  synthetic
ggcgcgccagtcctacagaaggacccccggttaaaatacgaatagagacaggggagtgggaaaaaggatggaacgtgctggtctggggacgaggttatgccgctgtgaaaaacagggacactgataaggttatttgggtaccctctcgaaaagttaaaccggacatcacccaaaaggatgaggtgactcgactcggaccgatg

SEQ ID NO: 4901 - DNA, 203 bp, Artificial sequence
  synthetic
ggcgcgccagtcctgtgtgaggttacgggggtaagagctgatgttcacttactcgagcagccagggaacctttggattacatgggccaaccgtacaggccaaacggatttctgcctctctacacagtcagccacctccccttttcaaacatgtttgataggtatcccgtctcctatttccgaaggtgacgactcggaccgatg

SEQ ID NO: 4902 - DNA, 203 bp, Artificial sequence
  synthetic
ggcgcgccagtcctttttaagggatatgtttctgatacaaattgctccactgtgggaactgaccggttagtcttgtcagccagcattaccggcggccctgacaacagcaccaccctcacttatcgaaaggtttcatgcctgctgttaaagctgaacgtctccatgtgggatgagccacctgaactgcacgactcggaccgatg

SEQ ID NO: 4903 - DNA, 203 bp, Artificial sequence
  synthetic
ggcgcgccagtcctgctgctaggttcccagtctctccctaacgttactaacattactcaggtctctggcgtggccgggggatgtgtatatttcgccccaagggccactggcctgtttttaggttggtctaaacaaggtctctcgcggttcctcctccgtcacccctttacctccacctctaactccaccgactcggaccgatg

SEQ ID NO: 4904 - DNA, 203 bp, Artificial sequence
  synthetic
ggcgcgccagtcctggaaccgttcacggtggtgacagcggatagacacaatctttttatggggagtgagtactgtggtgcatatggctacagattttgggaaatatataactgctcacagactaggaatacttaccgctgtggagacgtgggaggtactggcctccctgaaacctggtgcagaggaaacgactcggaccgatg

SEQ ID NO: 4905 - DNA, 203 bp, Artificial sequence
  synthetic
ggcgcgccagtcctcctcggggacttattggatgatgtcacgagtattcgacacgcggtcctgcagaaccgagcggctattgacttcttgcttctagctcacggccatggctgtgaggacgttgccggaatgtgttgtttcaatctgagtgatcacagtgaatctatacagaagaagttccagctaatcgactcggaccgatg

SEQ ID NO: 4906 - DNA, 203 bp, Artificial sequence
  synthetic
ggcgcgccagtcctgaagaaacatgtcaataagatcggcgtggacagcgacccaatcggaagttggctgcgagggatattcgggggaataggggaatgggccgttcatctgctaaaaggactgcttttggggcttgtagttattttattgctactggtgtgcctgccttgccttttacaatttgtgtccgactcggaccgatg

SEQ ID NO: 4907 - DNA, 203 bp, Artificial sequence
  synthetic
ggcgcgccagtccttgtaacgcgcttaggaagtcccctcgaggtatggcagatatgctcttgcatagggggaaaaaatgtagtcttaatattgtctgtgtgctgcaggagctaagctgactctgctggtggcctcgcgtaccactgtggccaggcggtagctgggacgtgcagccgaccaccatggggcgactcggaccgatg

SEQ ID NO: 4908 - DNA, 203 bp, Artificial sequence
  synthetic
ggcgcgccagtcctttctggggcttcaacacttctgacaccgtcacgtcgccgcagcgtgccggggcactggctggcggcgtcaccactttcgtggctctctacgactacgagtcctggactgaaacggacttgtccttcaagaaaggagaacgcctgcagattgtcaacaacacggaaggtgactggcgactcggaccgatg

SEQ ID NO: 4909 - DNA, 203 bp, Artificial sequence
  synthetic
ggcgcgccagtccttggctggctcattccctcactacaggacagacgggctacatccccagtaactatgtcgcgccctcagactccatccaggctgaagagtggtactttgggaagatcactcgtcgggagtccgagcggctgctgcttaaccccgaaaacccccggggaaccttcttggtccggaagcgactcggaccgatg

SEQ ID NO: 4910 - DNA, 203 bp, Artificial sequence
  synthetic
ggcgcgccagtcctaagggagagatgggcaagtacctgcggctgccacagctcgtcgatatggctgctcagattgcatccggcatggcctatgtggagagaatgaactacgtgcaccgagacctgcgggcggccaacatcctggtgggggagaacctggtgtgcaaggtggctgacttcgggctggcacgactcggaccgatg

SEQ ID NO: 4911 - DNA, 203 bp, Artificial sequence
  synthetic
ggcgcgccagtcctcgcctcatcgaggacaacgagtacacagcacggcaaggtgccaagttccccatcaagtggacagcccccgaggcagccctctatggccggttcaccatcaagtcggatgtctggtccttcggcatcctgctgactgagctgaccaccaagggccgggtgccatacccagggatgcgactcggaccgatg

SEQ ID NO: 4912 - DNA, 203 bp, Artificial sequence
  synthetic
ggcgcgccagtcctgtcaacagggaggtgctggaccaggtggagaggggctaccgcatgccctgcccgcccgagtgccccgagtcgctgcatgacctcatgtgccagtgctggcggaaggaccctgaggagcggcccacctttaagtacctgcaggcccagctgctccctgcttgtgtgttggaggtccgactcggaccgatg

SEQ ID NO: 4913 - DNA, 203 bp, Artificial sequence
  synthetic
ggcgcgccagtccttaggaatcccctcaggacaattctgcttggaatatgatggcgtcttccctgttttgcccttagactattcgagttgcctctgtggattagggctggaggcagcacggatagtctgatggccaaataaggcaggcaagacagctatttgtaactgcgaaatacgcttttgcatagcgactcggaccgatg

SEQ ID NO: 4914 - DNA, 203 bp, Artificial sequence
  synthetic
ggcgcgccagtcctgggatcccatcactgcggcgctctcccagcgggcaatggtacttgggaaatcgggagagttaaaaacctggggattggttttgggggcattgaaggcggctcgagaggaacaggttacatctgagcaagcaaagttttggttgggattagggggagggagggtctctcccccagcgactcggaccgatg

SEQ ID NO: 4915 - DNA, 203 bp, Artificial sequence
  synthetic
ggcgcgccagtcctgtccggagtgcatcgagaaaccagcaacggagcggcgaatcgacaaaggggaggaagtgggagaaacaactgcgcagcgagatgcgaagatggcgccggagaaaatggccacacctaaaaccgttggcacatcctgctatcagtgcggaacagctactggctgtaattgcgccacgactcggaccgatg

SEQ ID NO: 4916 - DNA, 203 bp, Artificial sequence
  synthetic
ggcgcgccagtcctcatctgagtcctttgttgattttgccaatcggcttataaaggcggttgaggggtcagatctcccgccttccgcgcgggctccggtgatcattgactgctttaggcagaagtcacagccagatattcagcagcttatacgggcagcaccctccacgctgaccaccccaggagagacgactcggaccgatg

SEQ ID NO: 4917 - DNA, 203 bp, Artificial sequence
  synthetic
ggcgcgccagtccttaatcaaatatgtgctagacaggcagaagattgcccctcttacggatcaaggcatagccgcggccatgtcgtctgctatccagcccttagttatggcagtagtcaatagagagagggatggacaaactgggtcgggtggtcgtgcccgagggctctgctacacttgtggatccccgactcggaccgatg

SEQ ID NO: 4918 - DNA, 203 bp, Artificial sequence
  synthetic
ggcgcgccagtcctaaaagaattacagttaggacatatagaaccttcacttagttgttggaacacacctgtctttgtgatccggaaggcttccgggtcttatcgcttattgcatgacttgcgcgctgttaacgccaagcttgttccttttggggccgtccaacagggggcgccagttctctccgcgctcgactcggaccgatg

SEQ ID NO: 4919 - DNA, 203 bp, Artificial sequence
  synthetic
ggcgcgccagtcctgcctgataagatccagagggaacccggagtacaatatcttgggtacaagttaggcagtacgtatgtagcacccgtaggcctggtagcagaacccaggatagccaccttgtgggatgttcaaaagctggtggggtcacttcagtggcttcgcccagcgttaggaatcccgccacgcgactcggaccgatg

SEQ ID NO: 4920 - DNA, 203 bp, Artificial sequence
  synthetic
ggcgcgccagtcctgggggcaataggggtcctgggacagggactgtccacacacccaaggccatgtttgtggttattctccacccaacccaccaaggcgtttactgcttggttagaagtgctcacccttttgattactaagctacgcgcttcggcagtgcgaacctttggcaaggaggttgatatcctcgactcggaccgatg

SEQ ID NO: 4921 - DNA, 203 bp, Artificial sequence
  synthetic
ggcgcgccagtcctcgtggcagatagccaagccacctttcaagcgtatcccttgagagaggctaaagatcttcatactgctctccatattggaccccgcgcgctatccaaagcgtgtaatatatctatgcagcaggctagggaggttgttcagacctgcccgcattgtaattcagcccctgcgttggacgactcggaccgatg

SEQ ID NO: 4922 - DNA, 203 bp, Artificial sequence
  synthetic
ggcgcgccagtcctttacgggggtaagagctgatgtccacttactcgagcagccagggaacctttggattacatgggccaaccgtacaggccaaacggatttttgcctctctacacagtcagccacctccccttttcaaacatgtttgataggtatcccgtcccctatttccgaaggtgattttaaggcgactcggaccgatg

SEQ ID NO: 4923 - DNA, 203 bp, Artificial sequence
  synthetic
ggcgcgccagtcctcccagtctctccctaacattactaatattgctcagatttccggtataaccgggggatgcgtaggtttcagaccacaaggggttccttggtatctaggttggtctagacaggaggccacgcggtttctccttagacacccctctttctctaaatccacggaaccgtttacggtggcgactcggaccgatg

SEQ ID NO: 4924 - DNA, 203 bp, Artificial sequence
  synthetic
ggcgcgccagtccttggatgatgtcacgagtattcgacacgcggtcctgcagaaccgagcggctattgacttcttgcttctggctcacggccatggctgtgaggacgttgccggaatgtgttgtttcaatctgagtgatcacagtgagtctatacagaagaagttccagctaatgaaggaacatgtcacgactcggaccgatg

SEQ ID NO: 4925 - DNA, 203 bp, Artificial sequence
  synthetic
ggcgcgccagtcctttcagctcgtgtagctcattagctccgagctccccaacctacagcctgagaggcactggctcggttgggtagccagcctttcgggtaataaaggcttgttggcattcggcatctacccgtgcctcctgtcttgtcttactcgagcgaacccacaactccgtcctgctgagctcacgactcggaccgatg

SEQ ID NO: 4926 - DNA, 203 bp, Artificial sequence
  synthetic
ggcgcgccagtcctaatatattaggggtcattacagcaaacctagtacaggaagaaattaaactcctcttgaatagtacacccaagtggagattagatgtacaacttatagaatcaaaagtaagagagaaagaaaatgcccacagaacgtggaaacagcatcatccagaagccccaaaaacagatgaacgactcggaccgatg

SEQ ID NO: 4927 - DNA, 203 bp, Artificial sequence
  synthetic
ggcgcgccagtcctataaatagattagtggcagcccttgaaggtatggcggctccagaaaccacaaaagaatacttactccaacatctatctattgatcatgccaatgaagactgccagtctattctaagacctttgggacccaacaccccaatggagaaaaaattagaagcatgtagggtagtgggacgactcggaccgatg

SEQ ID NO: 4928 - DNA, 203 bp, Artificial sequence
  synthetic
ggcgcgccagtcctggaagacccacgtagagtggagatttaaggataagactgggataattgatgtcttgttctcagatactcctgtaaacctttttgggagatctcttctacgtagcatagtgacttgcttcaccctacttgttcacacagaaaaaatcgaacccctacccgtcaaggtaaggggaccgactcggaccgatg

SEQ ID NO: 4929 - DNA, 203 bp, Artificial sequence
  synthetic
ggcgcgccagtcctaagaaacagcactacaagtagctctctgcattttacagctaatccagagatatacagttcttcacttacatagtgacaacgggccgtgctttactgcacacaggatagaaaatctatgtaagtatctggggatcacaaaaactacgggaataccctacaacccacaatcccaggcgactcggaccgatg

SEQ ID NO: 4930 - DNA, 203 bp, Artificial sequence
  synthetic
ggcgcgccagtcctgagttgtagaaagagcccacagagatctaaaagacagattggcagcttatcagggagattgtgaaaccgtagaagcagcccttagcctcgcattagtttctttaaataaaaaaagagggggaatagggggccatacaccatatgaaatatacctagaatcagaacataccaaatcgactcggaccgatg

SEQ ID NO: 4931 - DNA, 203 bp, Artificial sequence
  synthetic
ggcgcgccagtcctagctggaacacacaccactgaagaaataggtcacttagatctcttttggcttaggtactgttcatgtccgcatgagatgcccccgtggctagacttccttagaggcaccctcaatctacgcatttcctgtcgacgcgctcttcaagcgtcagtgttgactagcacccctagacacgactcggaccgatg

SEQ ID NO: 4932 - DNA, 203 bp, Artificial sequence
  synthetic
ggcgcgccagtcctctccctccaacgcttagctgcacttcagctgtgcactaacgcatgtctctgttggtacccgttaggacgcatcaacgacaccaccccgttgtggttgaacttttcgtctgggaaggaaccaacgatccaacaactgagtggccacccctaactcgtcgtaacattcatagattgcgactcggaccgatg

SEQ ID NO: 4933 - DNA, 203 bp, Artificial sequence
  synthetic
ggcgcgccagtccttggcaatatgcccggaccttgggtggcgatgataatgttgccacagcccaaagaaagctttggaggaaagccaattggctggcttttctggaacacgtgcaaaggacctaggcgggactgtccacattgttgttgtcccatatgtagttggcattgtcagctttgctttttgcacgactcggaccgatg

SEQ ID NO: 4934 - DNA, 203 bp, Artificial sequence
  synthetic
ggcgcgccagtcctgaaaaatctaggaatcaactatggatcaggacctagacggcgcggaacgcggggaaaggggaggaggatccgaagaactgcttcaggaggagatcaacgaagggaggctgacagccagagaagctttacaaacatggatcaataacggtgagatccacccttgggtcctggcagcgactcggaccgatg

SEQ ID NO: 4935 - DNA, 203 bp, Artificial sequence
  synthetic
ggcgcgccagtcctgtcattccttctcaaaacaggcctctgcccggtggattcttgtaaaggtccccagctatgggtttgtggtagtaaatgacacagatacaccaccatccctccgcatccgaaagcctcgagcagtcggactagcaatattcctgcttgtgctggctatcatggccatcacatcctcgactcggaccgatg

SEQ ID NO: 4936 - DNA, 203 bp, Artificial sequence
  synthetic
ggcgcgccagtcctttatcttctcagctgattgtggttaggccgattactggaaactagacaacctgattcattagtggttaagattatgcataagtgctcgcaatgatgtagctgcttacgcttgcttactccgccctgaaacgcctaccttaacacgcaacacgcccacctgtaagaatatataaacgactcggaccgatg

SEQ ID NO: 4937 - DNA, 203 bp, Artificial sequence
  synthetic
ggcgcgccagtcctgaagcgttctcctcctgagaccctagtgctcagctctcggtcctgagctctcttgctcccgagaccttctggtcggctatccggcagcggtcaggtaaggcaaaccacggtttggagggtggttctcggctgagaccgccgcgagctctatctccggtcctctgaccgtctccacgactcggaccgatg

SEQ ID NO: 4938 - DNA, 203 bp, Artificial sequence
  synthetic
ggcgcgccagtcctcgtggactctctctcttgcctcctgaccccgcgctccaagggcgtctggcttgcacccgcgtttgtttcctgtcttactttctgtttctcgcggcccgcgctctctccctcggcgccctctagcggccaggagagaccggcaaacaattgggggctcgtccgggattgatcacccgactcggaccgatg

SEQ ID NO: 4939 - DNA, 203 bp, Artificial sequence
  synthetic
ggcgcgccagtcctccggaaccctaacgatcctctggacccaccccctcggcggcgttttgggtctttcctttaaattatatcatgggaaattccccctcctataacccccccgctggtatctccccctcagactggctcaaccttcgtcaaagcgcgcaaaggctcaatccgcgaccctctcctagccgactcggaccgatg

SEQ ID NO: 4940 - DNA, 203 bp, Artificial sequence
  synthetic
ggcgcgccagtcctgcaatcttacaggccgaccctactcctgctgacctagaacaactttgccaatatattgcttccccggtcgatcaaacggcccacatgaccagcctaacggcagcaatagccgccgctgaagcggccaataccctccagggttttaatccccaaaatgggaccctgacccaacaacgactcggaccgatg

SEQ ID NO: 4941 - DNA, 203 bp, Artificial sequence
  synthetic
ggcgcgccagtcctcacaccccagggcccaagatgcccgggcctcggcaaccggcccccaaaaggccccccccgggaccatgctatcgatgcctcaaagaaggccattgggcccgggactgtcccaccaagaccaccggcccccctccgggaccttgtcccatatgtaaagatccttcccattggaaacgactcggaccgatg

SEQ ID NO: 4942 - DNA, 203 bp, Artificial sequence
  synthetic
ggcgcgccagtcctcgagactgtccaaccctcaaatcaaaaaactaatagaggggggacttagcgccccccaaaccgtaacccctataacagatcctcttagtgaggccgaattagaatgcctactttctattcctctggctcgcagccgtccctccgtggctgtatacctgtctggcccctggctgccgactcggaccgatg

SEQ ID NO: 4943 - DNA, 203 bp, Artificial sequence
  synthetic
ggcgcgccagtcctagccctctcagaatcaagcccttatgctcgtggacaccggggctgaaaatacggtcctcccacaaaattggctggttcgagattacccacggatccccgccgcggtgctcggagcagggggagtctcccggaacagatacaattggctacaaggccctctgaccctggctctaacgactcggaccgatg

SEQ ID NO: 4944 - DNA, 203 bp, Artificial sequence
  synthetic
ggcgcgccagtcctcctccctacccccgggggactccaacctcacagacgctttgcctggcgggtcctacctcaaggcttcattaacagcccagctcttttcgaacgggcactacaggaaccccttcgccaagtttccgccgccttctcccagtctcttctggtgtcctatatggacgatatccttatcgactcggaccgatg

SEQ ID NO: 4945 - DNA, 203 bp, Artificial sequence
  synthetic
ggcgcgccagtcctcgcttcgcctacagaagaacaacggtcacaatgttatcaagccctggctgcccgcctccgggacctagggtttcaggtggcgtctgaaaagactcgccagacgccttcgcccgtccccttcttgggacaaatggtccataaccagattgtcacctatcagtccctacctaccttcgactcggaccgatg

SEQ ID NO: 4946 - DNA, 203 bp, Artificial sequence
  synthetic
ggcgcgccagtcctgcagatctcatccccaatttctcttcaccaattacaggcggtcttgggagacctccagtgggtctctaggggcacacccactacccgccggcccctgcaacttctctactcttcccttaaaggcatcgatgaccctagggccatcatccagctttccccggaacagctacaaggcgactcggaccgatg

SEQ ID NO: 4947 - DNA, 203 bp, Artificial sequence
  synthetic
ggcgcgccagtcctcattgcagagcttcgacaagccctgtcccataacgcaagatctagatataacgagcaagaacccctgctggcctacgtacacctaacccgggcagggtccaccctggtactcttccaaaagggcgctcaatttcccctggcctactttcagacccccttgactgacaaccaagccgactcggaccgatg

SEQ ID NO: 4948 - DNA, 203 bp, Artificial sequence
  synthetic
ggcgcgccagtcctctcaccttggggcctccttctcctgctgggatgccaatacctgcagactcaggccttaagctcttatgccaagcccatactcaaatactatcacaatcttcctaaaacctctctcgacaattggattcaatcatctgaggaccctcgagttcaggagttgttgcaattgtggcccgactcggaccgatg

SEQ ID NO: 4949 - DNA, 203 bp, Artificial sequence
  synthetic
ggcgcgccagtcctctccaaaacctttgtcaggttttgccagcagttcggaatttccctttctcatcacgttccctacaaccccacaagttcagggttggtagagcggacaaatggactgctcaaacttcttttgtctaaatatcacctagacgaaccccaccttcccatgactcaggccctttctcgcgactcggaccgatg

SEQ ID NO: 4950 - DNA, 203 bp, Artificial sequence
  synthetic
ggcgcgccagtcctcagcccatccagacttggagatgctccctgtccctaggaaatcaacaatggatgacaacatataaccaagaggcaaaattttccatctccattgaccaaatattagaggctcacaatcaatcacctttctgtcccaggtctcccagatacaccttggacttcgtaaatggttatcgactcggaccgatg

SEQ ID NO: 4951 - DNA, 203 bp, Artificial sequence
  synthetic
ggcgcgccagtcctttattcctgcatctcaaacaatgtcatggaattttcactctaacctgggaaatatggggatatgatcccctgatcaccttttctttacataaaattcctgatccccctcaacccgacttccctcagctgaacagtgactgggttccctctgtcagatcatgggccctgcttttacgactcggaccgatg

SEQ ID NO: 4952 - DNA, 203 bp, Artificial sequence
  synthetic
ggcgcgccagtcctaatcaaacggcacgggccttcccagactgtgctatatgttgggaaccttcccctccctgggctcccgaaatattagtatataacaaaaccatctccggctctggacccggtctcgccctcccggacgcccaaatcttctgggtcaacacgtccttgtttaacaccacccaaggacgactcggaccgatg

SEQ ID NO: 4953 - DNA, 203 bp, Artificial sequence
  synthetic
ggcgcgccagtccttggcaccacccttcccagaggttgttgttcaatgtttctcaaggcaacgccttattattaccccctatctccctggttaatctctctacggtttcctccgcccctcctacccgggtcagacgcagtcccgtcgcagccctgaccttaggcctagccctgtcagtggggctcactcgactcggaccgatg

SEQ ID NO: 4954 - DNA, 203 bp, Artificial sequence
  synthetic
ggcgcgccagtcctcggctgggttttcaaagcctatgtcccacaatcaatgaaccttgctgtttcctacgcattcaaaatgactccattatccgcctcggtgatctccagcctctctcgcaaagagtctctacagactggcagtggccctggaattgggatctggggctcaccgcctgggtgcgagaacgactcggaccgatg

SEQ ID NO: 4955 - DNA, 203 bp, Artificial sequence
  synthetic
ggcgcgccagtccttcagcaccagagatctactctcacctctcccccaccaaacccgattacatcaaccttcgaccctgcccttgacacccccgtgtttcacgcaccctcaggctgtggtggggcactggcttagtggaatagtcagtgtaccatcacaagcctcttcttgctgccagcaccgagttccgactcggaccgatg

SEQ ID NO: 4956 - DNA, 203 bp, Artificial sequence
  synthetic
ggcgcgccagtcctgaacacagccctaccctgagcctctctgagtacatgactgagtgtagcgcagagaggttgtcgcttctgcgtgtcactcagtcattttttatagccgattggggttcgcgccctcccattgcctgtgacacggttaagacctctctcacttctgcttcaccatccccctgccagcgactcggaccgatg

SEQ ID NO: 4957 - DNA, 203 bp, Artificial sequence
  synthetic
ggcgcgccagtcctcgttggtctagtggaaagaactaacgctgacgggggcgatttcttgcagctgtgctaagcgagaggctctggtgctggggataagatgcggcccctagcaccacagtctctgcgccttttgggttcgaatcttccccatgcagcttccgctttttacgccctgttgcacaccctcgactcggaccgatg

SEQ ID NO: 4958 - DNA, 203 bp, Artificial sequence
  synthetic
ggcgcgccagtcctagtgtgcacaatatctcttccaaaaggtcctgatgaacatcttcccatgtaacaagccccagcagagacattccagccacatccagcagcatttgggccgccttctctaacagtgcccataaagtcccttccgtttccacaacggctgcctctgcatcttctatttccacctcgcgactcggaccgatg

SEQ ID NO: 4959 - DNA, 203 bp, Artificial sequence
  synthetic
ggcgcgccagtcctgcccccttccggccgttcgcgctcagcccggcccggtttcactttcccccttcgagcagtcccccttccagccctaccaatgccaattgccctcggcctctagcgacggttgccccatcatcgggcacggccttcttccctggaacaacttagtaacgcatcctgtcctcggaacgactcggaccgatg

SEQ ID NO: 4960 - DNA, 203 bp, Artificial sequence
  synthetic
ggcgcgccagtcctaagtccttatattaaatcaaatggccaatttttccttactcccccccttcgataccctccttgtagaccccctccggctgtccgtctttgccccggacactaggggagccatacgttatctctccacccttttgacgctatgcccagttacttgtattctacccctaggcgagccgactcggaccgatg

SEQ ID NO: 4961 - DNA, 203 bp, Artificial sequence
  synthetic
ggcgcgccagtcctgtcctcaggccttacaacgcttcctccatgaccctacgctcacctggtcagaattggttgctagcgggaaactaagacttgattcacccttaaaattacagctgttagaaaatgaatggctctcccgccttttttgagggggagtcatttgtatgaaagatcatgcaggcctagcgactcggaccgatg

SEQ ID NO: 4962 - DNA, 203 bp, Artificial sequence
  synthetic
ggcgcgccagtcctttagcggcaccagaagcgttctcctcctgagaccctagtgctcagctctcggtcctgagctctcttgctcccgagaccttctggtcggctatccggcagcggtcaggtaaggcaaaccacggtttggagggtggttctcggctgagaccgccgcgagctctatctccggtcctccgactcggaccgatg

SEQ ID NO: 4963 - DNA, 203 bp, Artificial sequence
  synthetic
ggcgcgccagtcctctcccgagaccttctggtcggctatccggcagcggtcaggtaaggcaaaccacggtttggagggtggttctcggctgagaccgccgcgagctctatctccggtcctctgaccgtctccacgtggactctctctcttgcctcctgaccccgcgctccaagggcgtctggcttgcacgactcggaccgatg

SEQ ID NO: 4964 - DNA, 203 bp, Artificial sequence
  synthetic
ggcgcgccagtccttctgtttccccggtgaagttgcatagactgtacccacggttgaaagcgatgaatccgttacccgcttaggtacttcgagaagcctagtatcatcttggaatcttcgatgcgttgcgatcagcactctaccccgagtgtagcttgggtcgatgagtctggacaccccacaccggccgactcggaccgatg

SEQ ID NO: 4965 - DNA, 203 bp, Artificial sequence
  synthetic
ggcgcgccagtcctgtccaataccactacctgtataggagtgggttcctgtgccacgtacaatgcaatgctacaaaatttcaccaaggtactcttctaatagtggctatcccagaacaccaaattggaaagaaaggaacaggtacgtcagcaagctttgctgaagtcatgaaaggggctgaaggtggacgactcggaccgatg

SEQ ID NO: 4966 - DNA, 203 bp, Artificial sequence
  synthetic
ggcgcgccagtcctattccggtatgtccattggcaggaggtactggcaacacaaacacctatgtgccaattaccatctccattgctcccatgtgtgctgaatacaatgggcttagaaatgccattacacaaggagtgcccacttgcctgttgccaggctccaaccaatttttgactactgatgaccaccgactcggaccgatg

SEQ ID NO: 4967 - DNA, 203 bp, Artificial sequence
  synthetic
ggcgcgccagtcctttaggcagatctgcacttgtgtgtatgcgatcatttgagtacaagaatcactcaacaagtacctcatccattcaaaagaatttcttcatctggactttgaacaccagagaacttgtccaaattaggaggaagatggaattgtttacttacctaaggtttgacactgaaataactcgactcggaccgatg

SEQ ID NO: 4968 - DNA, 203 bp, Artificial sequence
  synthetic
ggcgcgccagtcctctaacagttagggtatatatgaagcctaagcatattaaggcctgggcacctagggcgcctcgcaccatgccctataccaacatcctcaacaacaattatgcaggtcggtcagctgcacccaatgctcccacagccatagtgtcccataggagtaccataaagacaatgcccaaccgactcggaccgatg

SEQ ID NO: 4969 - DNA, 203 bp, Artificial sequence
  synthetic
ggcgcgccagtcctctcttagtctgctcacatggagtgataggactcgtcaccgcaggcggtgagggaatagttgctttcacagacattagaaatctcctgtggttagaggatgatgccatggaacaaggtataacagattacatccagaaccttggtagcgcctttgggactggatttactgagacccgactcggaccgatg

SEQ ID NO: 4970 - DNA, 203 bp, Artificial sequence
  synthetic
ggcgcgccagtcctatcagtgaaaaggctaaagagattcagaacatgctagttggagaggacagtttattggaaaagcttcttaaagcattaatcaaaatagtatctgcaatggtgattgtgattaggaattcagaagatctagttacagtcactgcaacacttgccctcctagggtgcaatgactcacgactcggaccgatg

SEQ ID NO: 4971 - DNA, 203 bp, Artificial sequence
  synthetic
ggcgcgccagtcctccatgggcgtttcttaaacagaaagtttgctcatatcttggcatcccatacacaataagacagagtgattcttggctcaagaagttcacagaggcatgcaatgcattgagaggcctggattggctagcacaaaagattgacaagtttatcaactggcttaaaacaaagattctccgactcggaccgatg

SEQ ID NO: 4972 - DNA, 203 bp, Artificial sequence
  synthetic
ggcgcgccagtccttcttactcactcccacctgatccaaaatattttgatgggtataaacaacagacagtggtcctgatggatgacttaatgcaaaatccagatggtaatgatattgctatgttttgtcagatggtatctactgtagactttataccaccaatggccagtcttgaggaaaagggaacccgactcggaccgatg

SEQ ID NO: 4973 - DNA, 203 bp, Artificial sequence
  synthetic
ggcgcgccagtcctaacccagaaaagtgcagaccaaccaactataaaaagtgttgtccactgatttgtggaaaggccattcagtttagagacaagagaacgaacgtcaggtactcagtagatatgttagtaactgaaatgatcaaggaatataggatcagaaacagcacacaagataaattggaggctcgactcggaccgatg

SEQ ID NO: 4974 - DNA, 203 bp, Artificial sequence
  synthetic
ggcgcgccagtcctcagcgttggtatactgcccctacccgcgggccggctgctaattgccggcgttccgcactgcgcgggctccccgctgctgaccgcacttactgcttcgacgggttttctggctgtaactttcccgccgagactggcgtcgccctctattctctccatgatatgtcaccatctgatcgactcggaccgatg

SEQ ID NO: 4975 - DNA, 203 bp, Artificial sequence
  synthetic
ggcgcgccagtcctcgatcgatcttcggcccgggtggtaccccctccctatttccaacctcatgctccactaagtcgaccttccatgctgtccctgcccatatctgggaccgtctcatgttgttcggggccaccctagatgaccaagccttttgctgctcccgcctaatgacttacctccgtggcattcgactcggaccgatg

SEQ ID NO: 4976 - DNA, 203 bp, Artificial sequence
  synthetic
ggcgcgccagtcctagctacaaggttactgtgggcacccttgttgccaatgaaggctggaacgcctctgaggtcgctcttacagctgtcatcactgccgcctaccttaccatctgccaccagcggtacctccgcactcaggctatatctaaggggatgcgccgtctggagcgggagcatgctcagaagcgactcggaccgatg

SEQ ID NO: 4977 - DNA, 203 bp, Artificial sequence
  synthetic
ggcgcgccagtccttttataacacgcctctacagttggctctttgagaagtccggccgtgattatatccccggccgtcagttggagttctacgctcagtgtaggcgctggctctcggccggctttcatcttgacccacgggtgttggtttttgatgagtcggccccctgccactgtaggactgcgattcgactcggaccgatg

SEQ ID NO: 4978 - DNA, 203 bp, Artificial sequence
  synthetic
ggcgcgccagtcctccccggtcagcccctggcgaggtcaccgccttttgttctgccctatacaggtttaatcgcgaggcccagcgcctttcgctcaccggtaatttttggttccatcctgaggggctccttggcccctttgccccgttttcccccgggcatgtttgggagtcggctaatccattctgtcgactcggaccgatg

SEQ ID NO: 4979 - DNA, 203 bp, Artificial sequence
  synthetic
ggcgcgccagtcctccggcgcgtggtgagccggctcctggcgctaccgcccgggccccggccataacccaccaggcggcccggcatcgccgcctgctctttacctacccggatggctctaaggtattcgccggctcgctgtttgagtcgacatgtacctggctcgttaacgcgtctaatgttgaccaccgactcggaccgatg

SEQ ID NO: 4980 - DNA, 203 bp, Artificial sequence
  synthetic
ggcgcgccagtcctcgccctggcggtgggctctgtcatgcattttaccaaaggtaccccgcatcctttgatgctgcctcttttgtgatgcgcgacggcgcggccgcctatacattaaccccccggccaataattcacgccgtcgctcctgattataggttggaacataacccaaagatgcttgaggctcgactcggaccgatg

SEQ ID NO: 4981 - DNA, 203 bp, Artificial sequence
  synthetic
ggcgcgccagtcctgcctaccgggagacttgctcccgcctcggtaccgctgcatacccactcctcgggaccggcatataccaggtgccgatcggtcccagttttgacgcctgggagcggaatcaccgccccggggatgagttgtaccttcctgagcttgctgccagatggttcgaggccaataggccgcgactcggaccgatg

SEQ ID NO: 4982 - DNA, 203 bp, Artificial sequence
  synthetic
ggcgcgccagtcctacctgcccaactctcactataactgaggatgttgcacggacagcaaatctggctatcgaacttgactcagccacagacgtcggccgggcctgtgccggctgtcgagtcacccccggcgttgtgcagtaccagtttaccgcaggtgtgcctggatccggcaagtcccgctctattcgactcggaccgatg

SEQ ID NO: 4983 - DNA, 203 bp, Artificial sequence
  synthetic
ggcgcgccagtcctcagcgggccgccaccgtccaccttcttggtgacccgaatcagatcccagccatcgactttgagcacgccgggctcgttcccgccatcaggcccgatttggcccccacctcctggtggcatgtgacccatcgctgccctgcggatgtatgtgagctgatccgtggcgcataccctcgactcggaccgatg

SEQ ID NO: 4984 - DNA, 203 bp, Artificial sequence
  synthetic
ggcgcgccagtcctcgaggcctcattcagtcgtcccgagctcatgccattgttgccttgacgcgccacactgagaagtgcgtcatcattgacgcaccaggcctgcttcgcgaggtgggcatctccgatgcaatcgttaataactttttccttgctggtggcgaaattggccaccagcgcccatctgttcgactcggaccgatg

SEQ ID NO: 4985 - DNA, 203 bp, Artificial sequence
  synthetic
ggcgcgccagtcctgaactcaccacctgtgatagtgtcgtaacatttgaattaacagatattgtgcactgtcgtatggccgccccgagccagcgcaaggccgtgctgtccacgcttgtgggccattacggccgccgcacaaagctctacaatgcctcccactctgatgttcgcgactctctcgcccgtcgactcggaccgatg

SEQ ID NO: 4986 - DNA, 203 bp, Artificial sequence
  synthetic
ggcgcgccagtccttttatcccggccattggccacgtacaggttacaacctgtgaattgtacgagctagtggaggccatggtcgagaagggccaggacggctccgccgtccttgagctcgacctttgtaaccgcgacgtgtccaggatcaccttcttccagaaagattgtaataaattcaccacggggcgactcggaccgatg

SEQ ID NO: 4987 - DNA, 203 bp, Artificial sequence
  synthetic
ggcgcgccagtcctgcagcaagggcatccatggtgtttgagaatgacttttctgagtttgattccacccagaataatttttccttgggcctagagtgtgctattatggtggagtgtgggatgccgcagtggctcatccgcttgtaccaccttataaggtctgcgtggattctgcaggccccgaaggagcgactcggaccgatg

SEQ ID NO: 4988 - DNA, 203 bp, Artificial sequence
  synthetic
ggcgcgccagtccttccctgcgagggttttggaagaaacactccggtgagcccggcacccttctatggaatacagtctggaacatggccgttatcacccactgttatgatttccgcgatctgcaggtggccgcctttaaaggtgatgattcgatagtgctttgcagtgagtaccgtcagagcccagggcgactcggaccgatg

SEQ ID NO: 4989 - DNA, 203 bp, Artificial sequence
  synthetic
ggcgcgccagtcctctccgcctcgctgtgagtgattttctccgcaagctcacgaatgtagctcagatgtgtgtggatgttgtctctcgtgtttatggggtttcccctggactcgttcataacctgattggcatgctacaggctgttgctgacggcaaggctcatttcactgagtcagtgaagccagtgcgactcggaccgatg

SEQ ID NO: 4990 - DNA, 203 bp, Artificial sequence
  synthetic
ggcgcgccagtcctcagcggcggttccggcggtggtttctggggtgaccgggctgattctcagcccttcgcaatcccctatattcatccaaccaaccccttcgcccccgatgtcaccgctgcggccggggctggacctcgtgttcgccaacccgcccgaccactcggctccgcttggcgtgaccaggccgactcggaccgatg

SEQ ID NO: 4991 - DNA, 203 bp, Artificial sequence
  synthetic
ggcgcgccagtcctccagcgccccgccgctgcctcacgtcgtagacctaccacagctggggccgcgccgctaaccgcggtcgctccggcccatgacaccccgccagtgcctgatgttgactcccgcggcgccatcctgcgccggcagtataacctatcaacatctccccttacctcttccgtggccaccgactcggaccgatg

SEQ ID NO: 4992 - DNA, 203 bp, Artificial sequence
  synthetic
ggcgcgccagtcctctccatctcgttctggccacagaccaccaccaccccgacgtccgttgacatgaattcaataacctcgactgatgttcgtattttagtccagcccggcatagcctccgagcatgttatcccaagtgagcgcctacactatcgtaaccaaggttggcgctctgttgagacctccggcgactcggaccgatg

SEQ ID NO: 4993 - DNA, 203 bp, Artificial sequence
  synthetic
ggcgcgccagtcctctccagcactgcccgtcaccgccttcgtcgcggtgcagatgggactgccgagctcaccaccacggctgctacccgcttcatgaaggacctctattttactagtactaatggtgtcggtgagatcggccgcgggatagcgcttaccctgtttaaccttgctgacaccctgcttggcgactcggaccgatg

SEQ ID NO: 4994 - DNA, 203 bp, Artificial sequence
  synthetic
ggcgcgccagtccttattcaggattatgataaccaacatgagcaggaccgaccgacaccttccccagccccatcgcgccccttttctgtcctccgagctaatgatgtgctttggctttctctcaccgctgccgagtatgaccagtccacttacggctcttcgaccggcccagtctatgtctctgactccgactcggaccgatg

SEQ ID NO: 4995 - DNA, 203 bp, Artificial sequence
  synthetic
ggcgcgccagtcctcgggtacccttataattataacaccactgctagtgaccaactgctcgttgagaatgccgctgggcatcgggttgctatttccacttacaccactagcctgggtgctggccccgtctctatttccgcggttgctgttttagccccccactctgcgctagcattgcttgaggataccgactcggaccgatg

SEQ ID NO: 4996 - DNA, 203 bp, Artificial sequence
  synthetic
ggcgcgccagtcctcccggagtgccgcccccttggcctccagggctgtgcttttcagtctactgtcgctgagcttcagcgccttaagatgaaggtgggtaaaactcgggagttatagtttatttgcttgtgccccccttctttctgttgcttatttctcatttctgcgttccgcgctccctgaaaaaacgactcggaccgatg

SEQ ID NO: 4997 - DNA, 203 bp, Artificial sequence
  synthetic
ggcgcgccagtcctaacgagaacttggaacactcattgacgccgtgaacaagcggggcagaaaacaaaacaaaagaggaggaaatgaaggctcaatcatgtggctcgcaagcttggcagttgtcatagcttacgcaggagcaatgaagttgtcgaatttccaggggaagcttttgatgaccatcaacacgactcggaccgatg

SEQ ID NO: 4998 - DNA, 203 bp, Artificial sequence
  synthetic
ggcgcgccagtcctctggctatgctttcctggcggcgacacttggctggatgcttggcagtaacaacggtcaacgcgtggtatttaccatcctcctgctgttggtcgctccggcttacagttttaattgtctgggaatgggcaatcgtgacttcatagaaggagccagtggagccacttgggtggactcgactcggaccgatg

SEQ ID NO: 4999 - DNA, 203 bp, Artificial sequence
  synthetic
ggcgcgccagtcctacaacgagaagcgagctgatagtagctatgtgtgcaaacaaggcttcactgatcgtgggtggggcaacggatgtggacttttcgggaagggaagcattgacacatgtgcaaaattctcctgcaccagcaaagcgattggaagaacaatccagccagaaaacatcaaatacgaagcgactcggaccgatg

SEQ ID NO: 5000 - DNA, 203 bp, Artificial sequence
  synthetic
ggcgcgccagtcctttgggtcacaggaaggaggcctccatcaggcgttggcaggagccatcgtggtggagtactcaagctcagtgaagttaacatcaggccacctgaaatgtaggctgaaaatggacaaactggctctgaaaggcacaacctatggcatgtgtacagaaaaattctcgttcgcgaaaacgactcggaccgatg

SEQ ID NO: 5001 - DNA, 203 bp, Artificial sequence
  synthetic
ggcgcgccagtcctatccggcggacactggccacggaacagttgtcattgaactatcctactctgggagtgatggcccctgcaaaattccgattgtctccgttgcgagcctcaatgacatgacccccgttgggcggctggtgacagtgaaccctttcgtcgcgacttccagtgccaactcaaaggtgccgactcggaccgatg

SEQ ID NO: 5002 - DNA, 203 bp, Artificial sequence
  synthetic
ggcgcgccagtccttggtcgagatggaaccccccttcggagactcctacatcgtggttgggaggggagacaagcagatcaaccaccattggcacaaagctggaagcacgctaggcaaggccttttcaacaactttgaagggagctcaaagactggcagcgttgggcgacacagcctgggactttggctcgactcggaccgatg

SEQ ID NO: 5003 - DNA, 203 bp, Artificial sequence
  synthetic
ggcgcgccagtcctcaggaggtgtgctcgtgttcttagcgaccaatgtgcatgctgacactggatgtgccattgacatcacaagaaaagagatgagatgtggaagtggcatctttgtgcacaacgacgtggaagcctgggtggacaggtataaatacttgccagaaacgcccagatccctagcgaagacgactcggaccgatg

SEQ ID NO: 5004 - DNA, 203 bp, Artificial sequence
  synthetic
ggcgcgccagtccttcagacctgtcaggcatgatgaaacaacactcgttagatcacaggttgatgctttcaatggtgaaatggttgacccttttcagctgggccttctggtgatgtttctggccacccaggaggtccttcgcaagaggtggacggccagattgaccattcctgcggttttgggggccccgactcggaccgatg

SEQ ID NO: 5005 - DNA, 203 bp, Artificial sequence
  synthetic
ggcgcgccagtccttacttgtgctgatgcttgggggcatcacttacactgatttggcgaggtatgtggtgctagtcgctgccgctttcgcagaggccaacagtggaggagacgtcctgcatcttgctttgattgccgtttttaagatccaaccagcgtttctagtgatgaacatgcttagcacgagatcgactcggaccgatg

SEQ ID NO: 5006 - DNA, 203 bp, Artificial sequence
  synthetic
ggcgcgccagtcctctgccggactaatggtctgcaacccaaacaagaagagagggtggccagccactgagtttttgtcggcagttggattgatgtttgccatcgtaggtggcttggccgagttggatattgaatccatgtcaatacccttcatgctggcaggtctcatggcagtgtcctacgtggtgtcgactcggaccgatg

SEQ ID NO: 5007 - DNA, 203 bp, Artificial sequence
  synthetic
ggcgcgccagtcctttggcacttaccaggccggcgtcggagtcatgtacgagaatgttttccacacactatggcacacaactagaggagcagccattatgagtggagaaggaaaattgacgccatactggggtagtgtgaaagaagaccgcatagcttacggaggcccatggaggtttgaccgaaaatcgactcggaccgatg

SEQ ID NO: 5008 - DNA, 203 bp, Artificial sequence
  synthetic
ggcgcgccagtcctgaaccacggatccttttcctgactcaaatgccccaatccatgatttgcaagatgagataccagacagggcatggagcagtggatacgaatggatcacagaatatgcgggcaaaaccgtgtggtttgtggcgagcgtaaaaatggggaatgagattgcaatgtgcctccaaagagcgactcggaccgatg

SEQ ID NO: 5009 - DNA, 203 bp, Artificial sequence
  synthetic
ggcgcgccagtcctccaatggcattcagtacaccgacagaaggtggtgttttgatgggccgcgcacgaatgccatactggaggacaacaccgaggtagagatagtcacccggatgggtgagaggaaaatcctcaagccgagatggcttgatgcaagagtttatgcagatcaccaagccctcaagtggtcgactcggaccgatg

SEQ ID NO: 5010 - DNA, 203 bp, Artificial sequence
  synthetic
ggcgcgccagtccttgctgatcgccctgctgctgatggtggtgctcatcccagaaccggaaaaacagaggtcacagacagataaccaactggcggtgtttctcatctgcgtcttgaccgtggttggagtggtggcagcaaacgagtacgggatgctagagaaaaccaaagcagatctcaagagcatgtcgactcggaccgatg

SEQ ID NO: 5011 - DNA, 203 bp, Artificial sequence
  synthetic
ggcgcgccagtcctttgtcggaaagacgcaggcatcagggctgactggattgccaagcatggcactggacctgcgtccagccacagcctgggcactgtatggggggagcacagtcgtgctaacccctcttctgaaacacctgatcacgtcggaatacgtcaccacatcgctagcctcaattaactcaccgactcggaccgatg

SEQ ID NO: 5012 - DNA, 203 bp, Artificial sequence
  synthetic
ggcgcgccagtcctatgtcaccactgtgagagaagcaggggtattggtgacggcggctacgctcactttgtgggacaatggagccagtgccgtctggaattccaccacagccacgggactctgccatgttatgcgaggtagctacctggctggaggttccattgcttggactctcatcaagaacgcggcgactcggaccgatg

SEQ ID NO: 5013 - DNA, 203 bp, Artificial sequence
  synthetic
ggcgcgccagtcctcatctgactggttgcaccgaggacctagagagttctgcataaaagttctctgcccttacatgcccaaggttatagaaaaaatggaagttctgcagcgccgcttcggaggtgggctagtgcgtctccccctgtcccggaactccaatcacgagatgtattgggttagtggagccgcgactcggaccgatg

SEQ ID NO: 5014 - DNA, 203 bp, Artificial sequence
  synthetic
ggcgcgccagtcctctggcaatgtggtgcacgctgtgaacatgaccagccaggtactactggggcgaatggatcgcacagtgtggagagggccaaagtatgaggaagatgtcaacctagggagcggaacaagagccgtgggaaagggagaagtccatagcaatcaggagaaaatcaagaagagaatcccgactcggaccgatg

SEQ ID NO: 5015 - DNA, 203 bp, Artificial sequence
  synthetic
ggcgcgccagtcctaatttataaagaaagtcaacagcaacgcggctcttggagcagtgttcgctgaacagaatcaatggagcacggctcgtgaggctgtggatgacccgcggttctgggagatggttgatgaagagagggaaaaccatctgcgaggagagtgtcatacatgtatctacaacatgatggcgactcggaccgatg

SEQ ID NO: 5016 - DNA, 203 bp, Artificial sequence
  synthetic
ggcgcgccagtcctagctgggatacatcctccgtgacatagcaggaaagcaaggagggaaaatgtacgctgatgacaccgccggatgggacactagaattaccagaactgatttagaaaatgaagccaaggtgctggagctcctagacggtgaacaccgcatgctcgctcgagccataattgaactgacgactcggaccgatg

SEQ ID NO: 5017 - DNA, 203 bp, Artificial sequence
  synthetic
ggcgcgccagtcctcttacaggcacaaagtggtcaaggtcatgagacctgcagcagaaggaaagaccgtaatggacgtgatatcaagagaagatcaaagggggagtggacaggtggtcacttatgcccttaacactttcacgaacattgctgtccagctcgtcaggctgatggaggctgagggggtcacgactcggaccgatg

SEQ ID NO: 5018 - DNA, 203 bp, Artificial sequence
  synthetic
ggcgcgccagtcctttggaccacaacacttggaacagctacctagaaaaaccaagatagctgtcaggacctggctctttgagaatggagaggagagagtgaccaggatggcgatcagcggagatgactgtgtcgtcaagccgctggatgacagattcgccacagccctccacttcctcaacgcaatgtcgactcggaccgatg

SEQ ID NO: 5019 - DNA, 203 bp, Artificial sequence
  synthetic
ggcgcgccagtcctgagctggatggaatgtgaaggacacagcttgtctggccaaagcatatgcacagatgtggctactcctatacttccatcgtagggacttgcgtctcatggcaaatgcgatttgctcagcagtgccagtggattgggtgcccacaggcaggacgtcctggtcaatacactcgaaagcgactcggaccgatg

SEQ ID NO: 5020 - DNA, 203 bp, Artificial sequence
  synthetic
ggcgcgccagtcctaaaatgcatgcatatggagtcaggccagcaaaagctgccaccggatactgggtagacggtgctgtctgcgtctcagtcccaggaggactgggttaacaaatctgacaacagaaagtgagaaagccctcagaaccgtctcggaagtaggtccctgctcactggaagttgaaagaccgactcggaccgatg

SEQ ID NO: 5021 - DNA, 203 bp, Artificial sequence
  synthetic
ggcgcgccagtcctggcccaagccccctcgaagctgtagaggaggtggaaggactagaggttagaggagaccccgcatttgcatcaaacagcatattgacacctgggaatagactgggagatcttctgctctatctcaacatcagctactaggcacagagcgccgaagtatgtagctggtggtgaggacgactcggaccgatg

SEQ ID NO: 5022 - DNA, 203 bp, Artificial sequence
  synthetic
ggcgcgccagtcctcgaagctgtagaggaggtggaaggactagaggttagaggagaccccgcatttgcatcaaacagcatattgacacctgggaatagactgggagatcttctgctctatctcaacatcagctactaggcacagagcgccgaagtatgtagctggtggtgaggaagaacacaggatctcgactcggaccgatg

SEQ ID NO: 5023 - DNA, 203 bp, Artificial sequence
  synthetic
ggcgcgccagtcctcctgtctctagtttgtctgttcgagatcctacagttggcgcccgaacagggacctgagaggggcgcagaccctacctgttgaacctggctgatcgtaggatccccgggacagcagaggagaacttacagaagtcttctggaggtgttcctggccagaacacaggaggacaggtacgactcggaccgatg

SEQ ID NO: 5024 - DNA, 203 bp, Artificial sequence
  synthetic
ggcgcgccagtcctagatgggagaccctttgacatggagcaaggcgctcaagaagttagagaaggtgacggtacaagggtctcagaaattaactactggtaactgtaattgggcgctaagtctagtagacttatttcatgataccaactttgtaaaagaaaaggactggcagctgagggatgtcattccgactcggaccgatg

SEQ ID NO: 5025 - DNA, 203 bp, Artificial sequence
  synthetic
ggcgcgccagtcctgggaatcccagggggaatctcaacccctattacccaacagtcagaaaaatctaagtgtgaggagaacacaatgtttcaaccttattgttataataatgacagtaagaacagcatggcagaatcgaaggaagcaagagaccaagaaatgaacctgaaagaagaatctaaagaagacgactcggaccgatg

SEQ ID NO: 5026 - DNA, 203 bp, Artificial sequence
  synthetic
ggcgcgccagtcctagttaatcttaattcctctgactcctctaactctgtacgtgttgaggatgtaatgaacacagcggaatattggggatttaaatggctagaatgtaatcaaacagaaaattttaagactatattagtacctgaaaatgaaatggtaaatatcaatgatactgatacctggatacccgactcggaccgatg

SEQ ID NO: 5027 - DNA, 203 bp, Artificial sequence
  synthetic
ggcgcgccagtccttaaggggtgtaatgagacgtgggcaagagtgaaacgttgtcctatagatattttatatgggatacatccaatcaggctgtgtgtacagccaccattttttctggtacaggagaaagggattgctgatacttctagaattggcaattgtgggccaacaatatttcttggggttttcgactcggaccgatg

SEQ ID NO: 5028 - DNA, 203 bp, Artificial sequence
  synthetic
ggcgcgccagtcctaactgaggttaacaaaataatggaagtacaaaatcatacttttgaggtagaaaatagtactctaaatggtatggatttaatagaacgacaaataaagatattatatgctatgattcttcaaacacatgcagatgttcaactgttaaaggaaagacaacaggtagaggagacattcgactcggaccgatg

SEQ ID NO: 5029 - DNA, 203 bp, Artificial sequence
  synthetic
ggcgcgccagtccttaatttaattggatgtatagaaagaacacatgtattttgtcatactggtcatccctggaatatgtcatggggacatttaaatgagtcaacacaatgggatgactgggtaagcaaaatggaagatttaaatcaagagatactaactacacttcatggagccaggaacaatttggccgactcggaccgatg

SEQ ID NO: 5030 - DNA, 203 bp, Artificial sequence
  synthetic
ggcgcgccagtcctcgactggaatggagaatcagaggagtacaacaggcggccaaagagctgggtgaagtcaatcgaggcatttggagagagctatatttccgagaagaccaaaggggagatttctcagcctggggcggctatcaacgagcacaagaacggctctggggggaacaatcctcaccaaggcgactcggaccgatg

SEQ ID NO: 5031 - DNA, 203 bp, Artificial sequence
  synthetic
ggcgcgccagtcctgtccttagacctggagattcgaagcgaaggaggaaacatttatgactgttgcattaaagcccaagaaggaactctcgctatcccttgctgtggatttcccttatggctattttggggactagtaattatagtaggacgcatagcaggctatggattacgtggactcgctgttatcgactcggaccgatg

SEQ ID NO: 5032 - DNA, 203 bp, Artificial sequence
  synthetic
ggcgcgccagtcctttctgcggtctgagtcccttctctgctgggctgaaaaggcctttgtaataaatataattctctactcagtccctgtctctagtttgtctgttcgagatcctacagttggcgcccgaacagggacctgagaggggcgcagaccctacctgttgaacctggctgatcgtaggatcccgactcggaccgatg

SEQ ID NO: 5033 - DNA, 203 bp, Artificial sequence
  synthetic
ggcgcgccagtcctgggaaaagcagagtgctttggagagctcgaaggaaagagtctccgggcctctcctgcctgcctgaaaagctcaataaaggagttggctgatatctgagcttgcctggttattatcgggattcgttactaattccgtgcaacaccggagcggatctcgcagctggcgcccaacgtcgactcggaccgatg

SEQ ID NO: 5034 - DNA, 203 bp, Artificial sequence
  synthetic
ggcgcgccagtcctgaaagagaaagtgttgcttgggcacaggaggagggttcgcgaccccttaaaagacggaggggcacgggcgtcctcctgggccgaggggacacaagagcaacactggtaaggaagccgccgtggtgaggctagctagagacatggcgaagcaaggctcaaaggagaaaaagggatcgactcggaccgatg

SEQ ID NO: 5035 - DNA, 203 bp, Artificial sequence
  synthetic
ggcgcgccagtcctgacaaaccaatcagcaggcatctcaagccaatatggatcaggcaagacagatatgcctgcagtgggtaataacagcgttaagatcagtgaggcatatgtcacatagaccaggaaaccctatgttagtgaagcagaagaatactgagagttatgaagacttcatagctcgcctaccgactcggaccgatg

SEQ ID NO: 5036 - DNA, 203 bp, Artificial sequence
  synthetic
ggcgcgccagtcctactgccggcagaagaaacagcagggaaacaacaggagggggccacgtgtggtgccgtccgcgccccctatgttgtaacagaagcaccacccaaaatagaaataaaagtaggaacaaggtggaaaaaattattagtagatacaggggcagataaaactatagtaacatcccatgacgactcggaccgatg

SEQ ID NO: 5037 - DNA, 203 bp, Artificial sequence
  synthetic
ggcgcgccagtcctagcgcccccacactggacttgtaatacccctatattttgtattaagaagaaatcaggaaaatggaggatgttaatagattttagagaattaaataagcaaacagaagatttagcagaagcacagttagggttaccgcatccaggaggattacagagaaagaaacatgtaacaatcgactcggaccgatg

SEQ ID NO: 5038 - DNA, 203 bp, Artificial sequence
  synthetic
ggcgcgccagtccttcccctagcagaagaagagcataacaaatggcatcaagatgctgtgtccttgcatttagaatttgggattcccaggacagctgcagaagatatagttcaacaatgtgatgtgtgtcaagaaaataaaatgcctagtacattaagaggcagtaataaaaggggcatagaccattgcgactcggaccgatg

SEQ ID NO: 5039 - DNA, 203 bp, Artificial sequence
  synthetic
ggcgcgccagtcctagcatttgtagcagaatctactcagctcttaatgaaatatttgggcatagaacatactacagggatcccctggaacccacaatctcaagcattagtagagagaacacatcagacgttaaagaatacattagaaaaacttatacctatgtttaacgcgtttgaatcagccctcgccgactcggaccgatg

SEQ ID NO: 5040 - DNA, 203 bp, Artificial sequence
  synthetic
ggcgcgccagtcctcgggtatattgggaaaaagaggatgaagaaagcatgaagtttttgaatataaaagcctgtaatatatcattgaggtgtcaagatgaaggaaagagtccgggaggatgtgtacaaggataccccattccaaagggagcagaaataataccagaagctatgaaatacctcaggggacgactcggaccgatg

SEQ ID NO: 5041 - DNA, 203 bp, Artificial sequence
  synthetic
ggcgcgccagtcctaagaaaagtcgatatggagggatcaaggataaaaatggggaattaaaattacctctctctgtaagggtgtgggtgaggatggcgaatttgtcaggatgggtgaatggaacgcctccttactggagtgcaaggattaatgggagtacagggataaatggaacaaggtggtatggacgactcggaccgatg

SEQ ID NO: 5042 - DNA, 203 bp, Artificial sequence
  synthetic
ggcgcgccagtcctataggaacattacatcacttagggtgtaacattagcagtaacccagagagagggatatgtaactttacaggagaactttggatagggggcgacaaattcccatattattatacgccctcatggaattgttcacaaaattggacaggtcacccagtatggcacgtatttagataccgactcggaccgatg

SEQ ID NO: 5043 - DNA, 203 bp, Artificial sequence
  synthetic
ggcgcgccagtccttacacatatggtgttgtagaaatgccacaatcatatatggaggcgcaaggggaaaacaagaggtcaagaaggaacctccaaaggaagaaaagagggataggcttggttattgtgctagccatcatggcaataatcgctgctgcaggagctggtctcggtgtcgcaaacgccgtgcgactcggaccgatg

SEQ ID NO: 5044 - DNA, 203 bp, Artificial sequence
  synthetic
ggcgcgccagtcctcagcaatcctataccaggacggctgtccagtctcttgctaacgcaactgctgcccagcaggaagtgttagaagcatcgtatgccatggtacagcatatagccaaaggaataagaatcctagaggcaagagtggctagggtggaagccctggtagatcgaatgatggtataccaacgactcggaccgatg

SEQ ID NO: 5045 - DNA, 203 bp, Artificial sequence
  synthetic
ggcgcgccagtccttgagtcatgtagcagctgatggttaagtcataaccgcagatgtaaacaagttgcctatataagccgcttgctagctggggaaaagcagagtgctttggagagctcgaaggaaagagtctccgggcctctcctgcctgcctgaaaagctcaataaaggagttggctgatatctgacgactcggaccgatg

SEQ ID NO: 5046 - DNA, 203 bp, Artificial sequence
  synthetic
ggcgcgccagtcctctgtattgctactaaaaatctctgctgtacatggcacatggagttgatcacaaatgaacttttatacaaaacatacaaacaaaaacccgtcggggtggaggaacctgtttatgatcaggcaggtgatcccttatttggtgaaaggggagcagtccaccctcaatcgacgctaaacgactcggaccgatg

SEQ ID NO: 5047 - DNA, 203 bp, Artificial sequence
  synthetic
ggcgcgccagtcctgctctttgaggagggatccatgtgtgaaacgactaaacggatagggagagtaactggaagtgacggaaagctgtaccacatttatgtgtgtatagatggatgtataataataaaaagtgccacgagaagttaccaaagggtgttcaggtgggtccataataggcttgactgccccgactcggaccgatg

SEQ ID NO: 5048 - DNA, 203 bp, Artificial sequence
  synthetic
ggcgcgccagtcctggtaacacaagctagagatagccccacacccttaacaggttgcaagaaaggaaagaacttctcctttgcaggcatattgatgcggggcccctgcaactttgaaatagctgcaagtgatgtattattcaaagaacatgaacgcattagtatgttccaggataccactctttacctcgactcggaccgatg

SEQ ID NO: 5049 - DNA, 203 bp, Artificial sequence
  synthetic
ggcgcgccagtcctcatatggtatacaaaaaattgcacccctgcctgcttacccaagaacacaaaaattgtcggccctgggaaatttggcaccaatgcagaggacggcaagatattacatgagatggggggtcacttgtcggaggtactactactttctttagtggtgctgtccgacttcgcaccggacgactcggaccgatg

SEQ ID NO: 5050 - DNA, 203 bp, Artificial sequence
  synthetic
ggcgcgccagtcctaacagctagtgtaatgtacctaatcctacatttttccatcccacaaagtcacgttgatgtaatggattgtgataagacccagttgaacctcacagtggagctgacaacagctgaagtaataccagggtcggtctggaatctaggcaaatatgtatgtataagaccaaattggtgcgactcggaccgatg

SEQ ID NO: 5051 - DNA, 203 bp, Artificial sequence
  synthetic
ggcgcgccagtcctgccttatgagacaactgtagtgttggcatttgaagaggtgagccaggtggtgaagttagtgttgagggcactcagagatttaacacgcatttggaacgctgcaacaactactgcttttttagtatgccttgttaagatagtcaggggccagatggtacagggcattctgtggctcgactcggaccgatg

SEQ ID NO: 5052 - DNA, 203 bp, Artificial sequence
  synthetic
ggcgcgccagtcctcaagtgtaaattggagaacgagactggttacaggctagtagacagtacctcttgcaatagagaaggtgtggccatagtaccacaagggacattaaagtgcaagataggaaaaacaactgtacaggtcatagctatggataccaaactcggacctatgccttgcagaccatatgacgactcggaccgatg

SEQ ID NO: 5053 - DNA, 203 bp, Artificial sequence
  synthetic
ggcgcgccagtcctaattgtaacgaggtggaaggttgacgtggctggcctattgttgcaatgtgtgcctatcttattgctggtcacaaccttgtgggccgacttcttaaccctaatactgatcctgcctacctatgaattggttaaattatactatctgaaaactgttaggactgatacagaaagaagcgactcggaccgatg

SEQ ID NO: 5054 - DNA, 203 bp, Artificial sequence
  synthetic
ggcgcgccagtcctatacatgagttacttaactttggactttatgtactacatgcacaggaaagttatagaagagatctcaggaggtaccaacataatatccaggttagtggcagcactcatagagctgaactggtccatggaagaagaggagagcaaaggcttaaagaagttttatctattgtctggcgactcggaccgatg

SEQ ID NO: 5055 - DNA, 203 bp, Artificial sequence
  synthetic
ggcgcgccagtcctaggtggcacctgcccaaaatgtggacgccatgggaagccgataacgtgtgggatgtcgctagcagattttgaagaaagacactataaaagaatctttataagggaaggcaactttgagggtatgtgcagccgatgccagggaaagcataggaggtttgaaatggaccgggaacccgactcggaccgatg

SEQ ID NO: 5056 - DNA, 203 bp, Artificial sequence
  synthetic
ggcgcgccagtccttaagagtgccagatactgtgctgagtgtaataggctgcatcctgctgaggaaggtgacttttgggcagagtcgagcatgttgggcctcaaaatcacctactttgcgctgatggatggaaaggtgtatgatatcacagagtgggctggatgccagcgtgtgggaatctccccagacgactcggaccgatg

SEQ ID NO: 5057 - DNA, 203 bp, Artificial sequence
  synthetic
ggcgcgccagtcctgattactttggcaacaggggcaggcaaaaccacagaactcccaaaagcagttatagaggagataggaagacacaagagagtattagttcttataccattaagggcagcggcagagtcagtctaccagtatatgagattgaaacacccaagcatctcttttaacctaaggataggcgactcggaccgatg

SEQ ID NO: 5058 - DNA, 203 bp, Artificial sequence
  synthetic
ggcgcgccagtcctaatactaaataatctactcatctcagaagacttgccagccgctgttaagaacataatggccaggactgatcacccagagccaatccaacttgcatacaacagctatgaagtccaggtcccggtcctattcccaaaaataaggaatggagaagtcacagacacctacgaaaattacgactcggaccgatg

SEQ ID NO: 5059 - DNA, 203 bp, Artificial sequence
  synthetic
ggcgcgccagtcctaaatgccctactagtggctttatttgggtatgtgggttaccaggctctctcaaagaggcatgtcccaatgataacagacatatataccatcgaggaccagagactagaagacaccacccacctccagtatgcacccaacgccataaaaaccgatgggacagagactgaactgaacgactcggaccgatg

SEQ ID NO: 5060 - DNA, 203 bp, Artificial sequence
  synthetic
ggcgcgccagtcctaaataaagaagaaataatcagatatggtttgtggggaacacacacagcactatacaaaagcatagctgcaagactggggcatgaaacagcgtttgccacactagtgttaaagtggctagcttttggaggggaatcagtgtcagaccacgtcaagcaggcggcagttgatttagtcgactcggaccgatg

SEQ ID NO: 5061 - DNA, 203 bp, Artificial sequence
  synthetic
ggcgcgccagtcctggtctattatgtgatgaataagccttccttcccaggtgactccgagacacagcaagaagggaggcgattcgtcgcaagcctgttcatctccgcactggcaacctacacatacaaaacttggaattaccacaatctctctaaagtggtggaaccagccctggcttacctcccctacgactcggaccgatg

SEQ ID NO: 5062 - DNA, 203 bp, Artificial sequence
  synthetic
ggcgcgccagtcctcccatgtggctatgagatgaaagctttcaaaaatgtaggtggcaaacttaccaaagtggaggagagcgggcctttcctatgtagaaacagacctggtaggggaccagtcaactacagagtcaccaagtattacgatgacaacctcagagagataaaaccagtagcaaagttggacgactcggaccgatg

SEQ ID NO: 5063 - DNA, 203 bp, Artificial sequence
  synthetic
ggcgcgccagtcctcaccacatggctagcttacaccttcgtgaatgaagacgtagggactataaaaccagtactaggagagagagtaatccccgaccctgtagttgatatcaatttacaaccagaggtgcaagtggacacgtcagaggttgggatcacaataattggaagggaaaccctgatgacaaccgactcggaccgatg

SEQ ID NO: 5064 - DNA, 203 bp, Artificial sequence
  synthetic
ggcgcgccagtcctcccacctgcaactaagagcaataaggggcacatggcatcagcttaccaattggcacagggtaactgggagcccctcggttgcggggtgcacctaggtacaataccagccagaagggtgaagatacacccatatgaagcttacctgaagttgaaagatttcatagaagaagaagacgactcggaccgatg

SEQ ID NO: 5065 - DNA, 203 bp, Artificial sequence
  synthetic
ggcgcgccagtccttataaatatagttgggaccgtccacctcaagaagacgacacgcccaacacgcacagctaaacagtagtcaagattatctacctcaagataacactacatttaatgcacacagcactttagctgtatgaggatacgcccgacgtctatagttggactagggaagacctctaacagcgactcggaccgatg

SEQ ID NO: 5066 - DNA, 203 bp, Artificial sequence
  synthetic
ggcgcgccagtcctgagttctaggagagtccctcctagtctctcctctccgaggaggtaccgagacctcaaaataaaggagtgattgccttactgccgagtggagagtgattactgagcggccggtgtatcgggagtcgtcccttaatctgtgcaataccagagcggctctcgcagctggcgcccaaccgactcggaccgatg

SEQ ID NO: 5067 - DNA, 203 bp, Artificial sequence
  synthetic
ggcgcgccagtcctattaacagtggatcaaattatgggggtaggacaaacaaatcaagcagcagcacaagctaacatggatcaggcaaggcaaatatgcctgcaatgggtaataaatgcattaagagcagtaagacatatggcgcacaggccagggaatccaatgctagtaaagcaaaaaacgaatgacgactcggaccgatg

SEQ ID NO: 5068 - DNA, 203 bp, Artificial sequence
  synthetic
ggcgcgccagtcctaaaaatgcaagcatgtagagatgtgggatcagaagggttcaaaatgcaattgttagcacaagcattaaggccaggaaaaggaaaagggaatggacagccacaaaggtgttacaactgtggaaaaccgggacatcaagcaaggcaatgtagacaaggaatcatatgtcacaactgcgactcggaccgatg

SEQ ID NO: 5069 - DNA, 203 bp, Artificial sequence
  synthetic
ggcgcgccagtccttggaaagagaggacatatgcaaaaagaatgcagaggaaagagagacataaggggaaaacagcagggaaacgggaggagggggatacgtgtggtgccgtccgctcctcctatggaataacttcagcaccacctatggttcaggtccgcataggttcccagcagaggaacttgttacgactcggaccgatg

SEQ ID NO: 5070 - DNA, 203 bp, Artificial sequence
  synthetic
ggcgcgccagtcctgaaatcatagataaattagtggaagaaggaaaactaggaaaggcacccccacattggacatgtaatactccaatcttttgcataaaaaagaaatcagggaagtggagaatgttaatagatttcagagaattgaacaaacagacagaagatttaacagaagcgcagttaggactccgactcggaccgatg

SEQ ID NO: 5071 - DNA, 203 bp, Artificial sequence
  synthetic
ggcgcgccagtcctggacaattggcttggggagacaaagctatagaatatatagtgtatcaggagaaagggaaaccattatgggtaaatgtggttcacaatataaagaacctaagcatcccgcaacaggttattaaagcagcgcaaaaattaacccaagaagtcatcattaggacaggaaaaataccacgactcggaccgatg

SEQ ID NO: 5072 - DNA, 203 bp, Artificial sequence
  synthetic
ggcgcgccagtcctaattgggatgaagaagtaataaagaatccaattcaagcaagaattatggaaattgcccacaagaaagataggataggagtgcattgggtgccaggacataaagggattccccaaaatgaagaaatagacaaatatatttcggaaatatttcttgcaaaagaaggagaaggaattcgactcggaccgatg

SEQ ID NO: 5073 - DNA, 203 bp, Artificial sequence
  synthetic
ggcgcgccagtcctaaaacctggaccagaattacccttagcactatggatacatatagcagaaagcattaatggggatagctcatggtacataacaatgagactgcaacagatgatgtggggaaaaagaggaaataagttacaatataagaatgaagacagggaatatgaaaattgggaaattacatccgactcggaccgatg

SEQ ID NO: 5074 - DNA, 203 bp, Artificial sequence
  synthetic
ggcgcgccagtcctatggggatggaaaatgcacctaaggagagtgaaacaatggatacaagacaacaggagaggaagcccatggcagtacaaagtaggaggaacatggaaaagtataggagtgtggttcctgcaagcaggagattacagaaaggtagacaggcacttctggtgggcatggaggatactcgactcggaccgatg

SEQ ID NO: 5075 - DNA, 203 bp, Artificial sequence
  synthetic
ggcgcgccagtccttatatcaagagaattggccatggaatacatatcattggcctctctggcaaatggagaatgttaggtactggttaaaagaaaatatgcaagaaaatcaacagagaaaaaataatacaaaagagggtatagaggaattattagcaggaactataaggggaagattctgtgtaccatcgactcggaccgatg

SEQ ID NO: 5076 - DNA, 203 bp, Artificial sequence
  synthetic
ggcgcgccagtcctgagagagcatggcctttatgaatatcaaagcatgtgatagcaacctaaggtgtcagaaaagacctggagggtgtatggaaggataccctatcccagtaggagcagaaataatccctgaaagtatgaaatacctaaggggagcaaagagtcagtatgggggaataaaagataagacgactcggaccgatg

SEQ ID NO: 5077 - DNA, 203 bp, Artificial sequence
  synthetic
ggcgcgccagtcctgccagaacggcaaatggtgtaactacaccggggaaataaaattagggcaagaaacattccaatatcattacaagccaaactggaactgtaccgggaattggacgcaatatccggtgtggcaagtgattagaaacctggatatggtggaacatatgacaggagaatgtgtgcagacgactcggaccgatg

SEQ ID NO: 5078 - DNA, 203 bp, Artificial sequence
  synthetic
ggcgcgccagtcctaaatgccagaaaactatgcaaaaacaagaatcataaacaggaaaaaaagagaactcagccacaagaggaagaagagaggcgttggcttggtcattatgctagttatcatggcaatagtagctgccgcaggggcttctctgggagtcgcaaacgcgattcagcagtcttacactacgactcggaccgatg

SEQ ID NO: 5079 - DNA, 203 bp, Artificial sequence
  synthetic
ggcgcgccagtcctaggcagctgtccagacccttgctaatgcaactgctgcacagcaggatgtgttagaggcaacctatgccatggtacagcatgtggctaaaggcgtacgaatcttggaagctcgagtggctcgagtggaagctatcacagatagaataatgctataccaagaattggattgttggccgactcggaccgatg

SEQ ID NO: 5080 - DNA, 203 bp, Artificial sequence
  synthetic
ggcgcgccagtcctactatcatcaatactgtataacctctacaaaaacagaagtagcaaaatatatcaattggacgaggtttaaggataattgcacatggcagcagtgggagagaggattacaggggtatgatacaaacttaacaatactgttaaaggaatcagcagcaatgacacaactagcagaagcgactcggaccgatg

SEQ ID NO: 5081 - DNA, 203 bp, Artificial sequence
  synthetic
ggcgcgccagtcctagcaagcaaggaggataccagaagtatgggaaagtttaaaagacgtctttgattggtcaggatggttctcatggctaaagtatattcctattatagtagtaggattattaggatgcattctgataagagctgtgatatgtgtatgtcaacctcttgtgcagatatacagaactccgactcggaccgatg

SEQ ID NO: 5082 - DNA, 203 bp, Artificial sequence
  synthetic
ggcgcgccagtcctgtaacagctgacatatcagctgatgcttgctcatgctgacactgtagctctgagctgtatataaggagaagcttgctgcttgcacttcagagttctaggagagtccctcctagtctctcctctccgaggaggtaccgagacctcaaaataaaggagtgattgccttactgccgacgactcggaccgatg

SEQ ID NO: 5083 - DNA, 203 bp, Artificial sequence
  synthetic
ggcgcgccagtcctccgtggcggtggctgcgttggcggcctgcctacggggaaacccgtaggacgctctaatacagacatggtgcgaagagtctattgagctagttggtaatcctccggcccctgaatgcggctaatcctaactgcggagcacataccctcaaaccagggggcagtgtgtcgtaacggcgactcggaccgatg

SEQ ID NO: 5084 - DNA, 203 bp, Artificial sequence
  synthetic
ggcgcgccagtcctagaggttaaaacactacatctcatcattaaactaaatacaacaaaatgggggctcaagtatcaacacaaaagactggagcacatgagaccgggctgaatgcaagcgggaattccatcatccattacacaaacataaactactataaagatgctgcatccaactcagccaacagacgactcggaccgatg

SEQ ID NO: 5085 - DNA, 203 bp, Artificial sequence
  synthetic
ggcgcgccagtcctttgcccgtcatgacgacaccgggtagcacgcaatttctgacttctgatgatttccaatcgccatcagcaatgccacaattcgacgtcacaccagagatgcagatcccgggtcgtgtcaacaatctgatggaaatagctgaggtggactctgtggtcccagtgaacaacactgaccgactcggaccgatg

SEQ ID NO: 5086 - DNA, 203 bp, Artificial sequence
  synthetic
ggcgcgccagtcctaagaattaccactcaaggtcggaatcttccattgaaaatttcttgtgccgatctgcttgtgtgtattacgccacctacaataataattctgagaagggctacgcagagtgggttatcaacaccaggcaggttgcgcagttgctgaggaggaaactagagttcacttacttaaggcgactcggaccgatg

SEQ ID NO: 5087 - DNA, 203 bp, Artificial sequence
  synthetic
ggcgcgccagtcctacagaggggaatgccccaccgaggatgtctattcccttcatcagtattggaaatgcttatagctgcttttatgatggatggacacagttctctaggaatggggtttacggcattaataccctgaacaacatgggtacgctgtacatgcggcacgtaaatgaggcaggccaaggccgactcggaccgatg

SEQ ID NO: 5088 - DNA, 203 bp, Artificial sequence
  synthetic
ggcgcgccagtcctgtaactatgggaggggagggtgttgttggctttgccgacgtacgcgacctgctgtggttagaagatgatgcaatggagcagggggtcaaagattacgtagagcaacttggaaacgcctttgggtcaggattcactaaccaagtctgtgaacaggttaaccttttgaaagagtcccgactcggaccgatg

SEQ ID NO: 5089 - DNA, 203 bp, Artificial sequence
  synthetic
ggcgcgccagtcctctagtgggccaagactccatcttagaaaaatctctgaaagccctagtaaaaattgtgtcagccttggtgatagtcgtgaggaaccacgacgatttaataacagtgactgcaacacttgccctcattggctgcacctcctcaccatggagatggcttaagcaaaaggtgtcccagcgactcggaccgatg

SEQ ID NO: 5090 - DNA, 203 bp, Artificial sequence
  synthetic
ggcgcgccagtcctagacttaaacaacttccgttactggagagtcagattgccaccattgagcaaagtgcaccttctcagagtgatcaagagcaattgttttctaatgttcagtactttgcacattactgcaggaaatacgcacccctgtatgcggccgaagcaaaaagggtgttctcccttgagaagcgactcggaccgatg

SEQ ID NO: 5091 - DNA, 203 bp, Artificial sequence
  synthetic
ggcgcgccagtcctaaaatgagtaactacatacagttcaagtccaaatgccgtattgaacctgtatgcttgctcttgcacgggagtcctggtgcagggaagtcagttgccactaacctgattgggcgctcactcgcggagaagcttaatagctctgtgtactctctaccaccagacccagaccattttcgactcggaccgatg

SEQ ID NO: 5092 - DNA, 203 bp, Artificial sequence
  synthetic
ggcgcgccagtcctgacggttacaaacaacaggccgttgtgatcatggatgatttatgccagaacccagatggtaaggatgtttctttgttttgtcaaatggtctccagtgtggactttgtaccgccaatggcagcgctagaagagaaaggcattttgttcacctctccctttgtcctggcttcaacccgactcggaccgatg

SEQ ID NO: 5093 - DNA, 203 bp, Artificial sequence
  synthetic
ggcgcgccagtcctaacgccggctctattaatgctccaacagtttcagacagtagggcactggctaggaggtttcactttgatatgaacatcgaggtcatttccatgtacagccagaatgggaagataaacatgcctatgtcggtgaagacgtgtgatgaagagtgttgcccagtcaactttaagaaacgactcggaccgatg

SEQ ID NO: 5094 - DNA, 203 bp, Artificial sequence
  synthetic
ggcgcgccagtccttgctgccccttagtgtgtggaaaggctatccagtttatagatagaaggacacaagtcagatactcccttgacatgctggtaactgagatgttcagagaatataaccatagacatagtgttggggccacccttgaggcgctatttcagggcccgccaatatatagagagattaagcgactcggaccgatg

SEQ ID NO: 5095 - DNA, 203 bp, Artificial sequence
  synthetic
ggcgcgccagtcctatcagtattgcgccagagacgccaccaccacctgccattgcagatctactcaaatcagtagacagtgaggctgtgagggagtactgcaaagaaaaaggatggctggttccagagatcaactccaccctgcagattgaaaagcacgtcagtagggcctttatctgtttgcaagcacgactcggaccgatg

SEQ ID NO: 5096 - DNA, 203 bp, Artificial sequence
  synthetic
ggcgcgccagtcctcccaccaagagaatgcttatgtacaacttccccacgagggcaggtcagtgtggcggagtgctcatgtccactggcaaagttttggggatccatgttggcgggaatggtcatcaaggcttctcagcggcacttcttaaacactacttcaatgatgaacaaggagaaatcgagttccgactcggaccgatg

SEQ ID NO: 5097 - DNA, 203 bp, Artificial sequence
  synthetic
ggcgcgccagtcctattgaaagctcaaaggaagcagggttcccagtcatcaacacgcctagcaaaactaaattggagccaagtgtcttccaccaggtttttgaaggcaataaagagccagcagtcctcaggaatggcgatccacgcctcagagccaactttgaggaggccatattttccaaatacatccgactcggaccgatg

SEQ ID NO: 5098 - DNA, 203 bp, Artificial sequence
  synthetic
ggcgcgccagtcctatcatgacaccagcagacaaaggggattgcttcaatgaagtcacctgggctaatgtcacatttctaaagaggtattttagagcagatgaacagtacccctttttagtgcaccccgtcatgcctatgaaagacatacatgaatcaatcagatggaccaaggacccaaagaacacccgactcggaccgatg

SEQ ID NO: 5099 - DNA, 203 bp, Artificial sequence
  synthetic
ggcgcgccagtcctagcgtcccagttggagcttgcttgactctacctgcgttttcaactctacgcaggaagtggttggactctttttaaattagagacaatttgaactaattttaattggcttaaccctaccgcactaaccgaactagataacggtgcagtgggggtaaattctccgcattcggtgcgcgactcggaccgatg

SEQ ID NO: 5100 - DNA, 203 bp, Artificial sequence
  synthetic
ggcgcgccagtcctgatggcgtgaacatgtgtaccctcatggccatggaccttggtgaattgtgtgaagacacaatcacgtacaagtgtccccttctcaggcagaatgagccagaagacatagactgttggtgcaactctacgtccacgtgggtaacttatgggacgtgtaccaccatgggagaacatcgactcggaccgatg

SEQ ID NO: 5101 - DNA, 203 bp, Artificial sequence
  synthetic
ggcgcgccagtcctcaatggttcctagacctgccgttaccatggttgcccggagcggacacacaagggtcaaattggatacagaaagagacattggtcactttcaaaaatccccatgcgaagaaacaggatgttgttgttttaggatcccaagaaggggccatgcacacagcacttacaggggccacacgactcggaccgatg

SEQ ID NO: 5102 - DNA, 203 bp, Artificial sequence
  synthetic
ggcgcgccagtcctgaaatccaaatgtcatcaggaaacttactcttcacaggacatctcaagtgcaggctgagaatggacaagctacagctcaaaggaatgtcatactctatgtgcacaggaaagtttaaagttgtgaaggaaatagcagaaacacaacatggaacaatagttatcagagtgcaatatcgactcggaccgatg

SEQ ID NO: 5103 - DNA, 203 bp, Artificial sequence
  synthetic
ggcgcgccagtcctaaaatgctctctacagagtctcataaccagacctttctcattgatggccccgaaacagcagaatgccccaacacaaatagagcttggaattcgttggaagttgaagactatggctttggagtattcaccaccaatatatggctaaaattgaaagaaaaacaggatgtattctgccgactcggaccgatg

SEQ ID NO: 5104 - DNA, 203 bp, Artificial sequence
  synthetic
ggcgcgccagtcctgactcaaaactcatgtcagcggccataaaagacaacagagccgtccatgccgatatgggttattggatagaaagtgcactcaatgacacatggaagatagagaaagcctctttcattgaagttaaaaactgccactggccaaaatcacacaccctctggagcaatggagtgctacgactcggaccgatg

SEQ ID NO: 5105 - DNA, 203 bp, Artificial sequence
  synthetic
ggcgcgccagtcctgtaggcgccactatgacggatgacataggtatgggcgtgacttatcttgccctactagcagccttcaaagtcagaccaacttttgcagctggactactcttgagaaagctgacctccaaggaattgatgatgactactataggaattgtactcctctcccagagcaccataccacgactcggaccgatg

SEQ ID NO: 5106 - DNA, 203 bp, Artificial sequence
  synthetic
ggcgcgccagtccttccgtttccccactgctcttaacatcctcacagcaaaaaacagattggataccattagcattgacgatcaaaggtctcaatccaacagctatttttctaacaaccctctcaagaaccagcaagaaaaggagctggccattaaatgaggctatcatggcagtcgggatggtgagccgactcggaccgatg

SEQ ID NO: 5107 - DNA, 203 bp, Artificial sequence
  synthetic
ggcgcgccagtcctattttagccagttctctcctaaaaaatgatattcccatgacaggaccattagtggctggagggctcctcactgtgtgctacgtgctcactggacgatcggccgatttggaactggagagagcagccgatgtcaaatgggaagaccaggcagagatatcaggaagcagtccaatccgactcggaccgatg

SEQ ID NO: 5108 - DNA, 203 bp, Artificial sequence
  synthetic
ggcgcgccagtcctctgtcaataacaatatcagaagatggtagcatgtcgataaaaaatgaagaggaagaacaaacactgaccatactcattagaacaggattgctggtgatctcaggactttttcctgtatcaataccaatcacggcagcagcatggtacctgtgggaagtgaagaaacaacgggcccgactcggaccgatg

SEQ ID NO: 5109 - DNA, 203 bp, Artificial sequence
  synthetic
ggcgcgccagtcctcataaaggaaagaggattgaaccatcatgggcggacgtcaagaaagacctaatatcatatggaggaggctggaagttagaaggagaatggaaggaaggagaagaagtccaggtattggcactggagcctggaaaaaatccaagagccgtccaaacgaaacctggtcttttcaaacgactcggaccgatg

SEQ ID NO: 5110 - DNA, 203 bp, Artificial sequence
  synthetic
ggcgcgccagtcctaccaacgccggaacaataggtgctgtatctctggacttttctcctggaacgtcaggatctccaattatcgacaaaaaaggaaaagttgtgggtctttatggtaatggtgttgttacaaggagtggagcatatgtgagtgctatagcccagactgaaaaaagcattgaagacaaccgactcggaccgatg

SEQ ID NO: 5111 - DNA, 203 bp, Artificial sequence
  synthetic
ggcgcgccagtcctactgacatttcagaaatgggtgccaatttcaaggctgagagggttatagaccccagacgctgcatgaaaccagtcatactaacagatggtgaagagcgggtgattctggcaggacctatgccagtgacccactctagtgcagcacaaagaagagggagaataggaagaaatccacgactcggaccgatg

SEQ ID NO: 5112 - DNA, 203 bp, Artificial sequence
  synthetic
ggcgcgccagtcctcgcttgagaggagaagcaaggaaaacctttgtagacttaatgagaagaggagacctaccagtctggttggcctacagagtggcagctgaaggcatcaactacgcagacagaaggtggtgttttgatggagtcaagaacaaccaaatcctagaagaaaacgtggaagttgaaatccgactcggaccgatg

SEQ ID NO: 5113 - DNA, 203 bp, Artificial sequence
  synthetic
ggcgcgccagtcctacatttgttacaccaatgttgagacatagcattgaaaattcctcagtgaatgtgtccctaacagctatagccaaccaagccacagtgttaatgggtctcgggaaaggatggccattgtcaaagatggacatcggagttccccttctcgccattggatgctactcacaagtcaaccgactcggaccgatg

SEQ ID NO: 5114 - DNA, 203 bp, Artificial sequence
  synthetic
ggcgcgccagtccttcatactattgtggaggactaaagaatgtaagagaagtcaaaggcctaacaaaaggaggaccaggacacgaagaacccatccccatgtcaacatatgggtggaatctagtgcgtcttcaaagtggagttgacgttttcttcatcccgccagaaaagtgtgacacattattgtgtcgactcggaccgatg

SEQ ID NO: 5115 - DNA, 203 bp, Artificial sequence
  synthetic
ggcgcgccagtcctgcagagtggctttggaaagaattagggaagaaaaagacacccaggatgtgcaccagagaagaattcacaagaaaggtgagaagcaatgcagccttgggggccatattcactgatgagaacaagtggaagtcggcacgtgaggctgttgaagatagtaggttttgggagctggttcgactcggaccgatg

SEQ ID NO: 5116 - DNA, 203 bp, Artificial sequence
  synthetic
ggcgcgccagtcctgaagatcactggttctccagagagaactccctgagtggagtggaaggagaagggctgcacaagctaggttacattctaagagacgtgagcaagaaagagggaggagcaatgtatgccgatgacaccgcaggatgggatacaagaatcacactagaagacctaaaaaatgaagaacgactcggaccgatg

SEQ ID NO: 5117 - DNA, 203 bp, Artificial sequence
  synthetic
ggcgcgccagtcctatggtaacaaaccacatggaaggagaacacaagaaactagccgaggccattttcaaactaacgtaccaaaacaaggtggtgcgtgtgcaaagaccaacaccaagaggcacagtaatggacatcatatcgagaagagaccaaagaggtagtggacaagttggcacctatggactccgactcggaccgatg

SEQ ID NO: 5118 - DNA, 203 bp, Artificial sequence
  synthetic
ggcgcgccagtcctaaacctttagatgacaggttcgcaagcgctttaacagctctaaatgacatgggaaagattaggaaagacatacaacaatgggaaccttcaagaggatggaatgattggacacaagtgcccttctgttcacaccatttccatgagttaatcatgaaagacggtcgcgtactcgttcgactcggaccgatg

SEQ ID NO: 5119 - DNA, 203 bp, Artificial sequence
  synthetic
ggcgcgccagtccttggtagaaagcaaaactaacatgaaacaaggctagaagtcaggtcggattaagccatagtacggaaaaaactatgctacctgtgagccccgtccaaggacgttaaaagaagtcaggccatcataaatgccatagcttgagtaaactatgcagcctgtagctccacctgagaaggcgactcggaccgatg

SEQ ID NO: 5120 - DNA, 203 bp, Artificial sequence
  synthetic
ggcgcgccagtccttgtaaaaaatccgggaggccacaaaccatggaagctgtacgcatggcgtagtggactagcggttagaggagacccctcccttacaaatcgcagcaacaatgggggcccaaggcgagatgaagctgtagtctcgctggaaggactagaggttagaggagacccccccgaaacaaacgactcggaccgatg

SEQ ID NO: 5121 - DNA, 203 bp, Artificial sequence
  synthetic
ggcgcgccagtcctacagttggcgaagagattctcaaaaggactgctgaacggccagggaccaatgaaattggttatggcgttcatagctttcctcagatttctagccattccaccaacagcaggagtcttggctagatggggaaccttcaagaagtcgggggccattaaggtcctgaaaggcttcaacgactcggaccgatg

SEQ ID NO: 5122 - DNA, 203 bp, Artificial sequence
  synthetic
ggcgcgccagtcctgaaggagatctcaaacatgctgagcataatcaaccaacggaaaaagacatcgctctgtctcatgatgatattgccagcagcacttgctttccacttgacttcacgagatggagagccgcgcatgattgtggggaagaatgaaagaggtaaatccctactttttaagacagcctccgactcggaccgatg

SEQ ID NO: 5123 - DNA, 203 bp, Artificial sequence
  synthetic
ggcgcgccagtcctacgcgacaagagatcagtggcgttagctccccatgtcggcatgggactggacacacgcacccaaacctggatgtcggctgaaggagcttggagacaagtcgagaaggtagagacatgggcccttaggcacccagggttcaccatactagccctatttctcgcccattacataggcgactcggaccgatg

SEQ ID NO: 5124 - DNA, 203 bp, Artificial sequence
  synthetic
ggcgcgccagtcctcacttccctgacccagaaggtggttattttcatattattaatgctggtcaccccatccatgacaatgagatgtgtgggagtaggaaacagagattttgtggaagggctatcaggagctacgtgggttgacgtggtgctcgagcacggggggtgtgtgactaccatggctaagaacgactcggaccgatg

SEQ ID NO: 5125 - DNA, 203 bp, Artificial sequence
  synthetic
ggcgcgccagtcctatacgtagacagaggttgggggaacggttgtggtttgtttggcaaaggaagcttggtaacatgtgcgaaatttcaatgcctggaaccaatagagggaaaagtggtgcaatatgagaacctcaaatacaccgtcatcattacagtgcacacaggagaccaacaccaggtgggaaacgactcggaccgatg

SEQ ID NO: 5126 - DNA, 203 bp, Artificial sequence
  synthetic
ggcgcgccagtcctgaaaatcaactggtacaagaaggggagctcgattgggaagatgttcgaggccactgaaaggggtgcaaggcgcatggccatcttgggagacacagcttgggactttggatcagtgggtggtgttctgaactcattaggcaaaatggtgcaccaaatatttggaagtgcttataccgactcggaccgatg

SEQ ID NO: 5127 - DNA, 203 bp, Artificial sequence
  synthetic
ggcgcgccagtcctgacagctgaaacacaaaattcctctttcataatagacgggccaaacacaccggagtgtccaagtgcctcaagagcatggaatgtgtgggaggtggaagattacgggttcggagtcttcacaaccaacatatggctgaaactccgagaggtctacacccaactatgtgaccatagcgactcggaccgatg

SEQ ID NO: 5128 - DNA, 203 bp, Artificial sequence
  synthetic
ggcgcgccagtcctgctaatgtcggcagctgtcaaggatgagagggccgtgcatgccgacatgggctactggatagaaagccaaaagaatggaagttggaagctagaaaaagcatccctcatagaggtaaaaacctgcacatggccaaaatcacacactctctggactaatggtgtgctagagagtgacgactcggaccgatg

SEQ ID NO: 5129 - DNA, 203 bp, Artificial sequence
  synthetic
ggcgcgccagtcctgagaacaacaacagtgtcagggaagttgatacacgaatggtgttgccgctcgtgcacacttccccccctgcgatacatgggagaagacggctgctggtatggcatggaaatcagacccatcagtgagaaagaagagaacatggtaaagtctttagtctcagcgggaagtggaaacgactcggaccgatg

SEQ ID NO: 5130 - DNA, 203 bp, Artificial sequence
  synthetic
ggcgcgccagtcctcagttctctccttagaaatgatgtgcccatggctggaccattagtggccgggggcttgctgatagcgtgctacgtcataactggcacgtcagcggacctcactgtagaaaaagccccagatgtaacatgggaggaagaggctgagcagacaggagtgtcccacaacttaatgatcgactcggaccgatg

SEQ ID NO: 5131 - DNA, 203 bp, Artificial sequence
  synthetic
ggcgcgccagtcctgaaaagactggaaccaaactgggctagtgtgaaaaaagatctgatttcatatggaggaggatggagactgagcgcacaatggcaaaagggggaggaggtgcaggttattgccgtagagccagggaagaacccaaagaactttcaaaccacgccaggcactttccagactactaccgactcggaccgatg

SEQ ID NO: 5132 - DNA, 203 bp, Artificial sequence
  synthetic
ggcgcgccagtcctgttggaagaagagatgttcaaaaagcgaaacctgaccataatggatcttcatcctgggtcaggaaagacacggaaataccttccagctattgtcagagaggcaatcaagagacgtttaagaaccttaattttggcaccgacaagggtggttgcagctgagatggaagaagcattcgactcggaccgatg

SEQ ID NO: 5133 - DNA, 203 bp, Artificial sequence
  synthetic
ggcgcgccagtcctgaaagggctcccaataaggtaccaaacaacagcaacaaaatctgaacacacaggaagagagattgttgatctaatgtgccacgcaacgttcacaatgcgtttgctgtcaccagttagggttccaaattacaacttgataataatggatgaggcccatttcacagacccagccagcgactcggaccgatg

SEQ ID NO: 5134 - DNA, 203 bp, Artificial sequence
  synthetic
ggcgcgccagtccttatagcggctagagggtacatatcaactcgtgttggaatgggagaggcagccgcaatcttcatgacagcaacaccccctggaacagctgatgcctttcctcagagcaacgctccaattcaagatgaagaaagggacataccagaacgctcatggaattcaggcaatgaatggatcgactcggaccgatg

SEQ ID NO: 5135 - DNA, 203 bp, Artificial sequence
  synthetic
ggcgcgccagtccttaccgacttcgctgggaaaacggtgtggtttgtccctagcattaaagccggaaatgacatagcaaactgcttgcgaaaaaacgggaaaaaagtcattcaacttagtaggaagacttttgacacagaatatcagaagactaaactgaatgattgggactttgtggtgacaactgacgactcggaccgatg

SEQ ID NO: 5136 - DNA, 203 bp, Artificial sequence
  synthetic
ggcgcgccagtcctgaagggtgagtccaggaagactttcgtggaactcatgaggaggggtgaccttccagtttggttagcccataaagtagcatcagaaggaatcaaatacacagatagaaaatggtgctttgatgggcaacgcaataatcaaattttagaggagaacatggatgtggaaatttggaccgactcggaccgatg

SEQ ID NO: 5137 - DNA, 203 bp, Artificial sequence
  synthetic
ggcgcgccagtcctaaaggaaggagaaaagaaaaaattgagacctaggtggcttgatgcccgcacttattcagatccattggcactcaaggaattcaaggactttgcggctggcagaaagtcaatcgcccttgatcttgtgacagaaataggaagagtgccttcacatctagcccacagaacaagaaacgactcggaccgatg

SEQ ID NO: 5138 - DNA, 203 bp, Artificial sequence
  synthetic
ggcgcgccagtcctcgctctggacaatctggtgatgctgcatacgtcagaagatggcggtagggcttacaggcatgcggtggaggaactaccagaaacaatggaaacactcctactcttgggactaatgatcttgttgacaggtggagcaatgcttttcttgatatcaggtaaagggattggaaagaccgactcggaccgatg

SEQ ID NO: 5139 - DNA, 203 bp, Artificial sequence
  synthetic
ggcgcgccagtcctatttgaaaaacaactgggacaggttatgctcctggttttgtgcgcagtccaactcttgctaatgagaacatcatgggccttgtgtgaagctttaactctagctacaggaccaataacaacactctgggaaggatcacctggtaagttctggaacaccacgatagctgtttccatcgactcggaccgatg

SEQ ID NO: 5140 - DNA, 203 bp, Artificial sequence
  synthetic
ggcgcgccagtcctggcgaacatttttagagggagctatttagcaggagctgggcttgctttttctattatgaaatcagttggaacaggaaaaagaggaacaggctcacaaggtgaaactttaggagaaaaatggaaaaagaaattaaatcaattatcccggaaagagtttgacctttacaagaaatccgactcggaccgatg

SEQ ID NO: 5141 - DNA, 203 bp, Artificial sequence
  synthetic
ggcgcgccagtccttggaatcactgaagtggatagaacagaagccaaagaagggttgaaaagaggagagacaacacatcatgccgtgtcccgaggtagcgcaaaacttcaatggtttgtggaaagaaacatggtcgttcccgaaggaagagtcatagacttgggctgtggaagaggaggctggtcatacgactcggaccgatg

SEQ ID NO: 5142 - DNA, 203 bp, Artificial sequence
  synthetic
ggcgcgccagtcctttactgtgcaggactgaaaaaagtcacagaagtgcgaggatacacaaaaggcggtccaggacacgaagaaccagtacctatgtctacatatggatggaacatagttaagttaatgagcggaaaggatgtgttctatctcccacctgaaaagtgtgataccctgttgtgtgacatcgactcggaccgatg

SEQ ID NO: 5143 - DNA, 203 bp, Artificial sequence
  synthetic
ggcgcgccagtcctgagaaatccactttcacgaaactccacgcacgaaatgtactggatatctaatggcacaggtaacattgtctcttcagtcaacatggtgtctagattgctactgaacaggttcacgatgacacacaggagacccaccatagagaaagatgtggatttaggagcaggaactcgacacgactcggaccgatg

SEQ ID NO: 5144 - DNA, 203 bp, Artificial sequence
  synthetic
ggcgcgccagtcctacagcaaatggaccctgaacacaggcagttagcgaacgctatattcaagctcacataccaaaacaaagtggtcaaagttcaacgaccgactccaacgggcacggtaatggatattatatctaggaaagaccaaaggggcagtggacaactgggaacttatggcctgaatacattcgactcggaccgatg

SEQ ID NO: 5145 - DNA, 203 bp, Artificial sequence
  synthetic
ggcgcgccagtcctccactgggttcccacaagtagaacgacatggtctattcatgctcaccatcagtggatgactacagaagacatgcttactgtttggaacagggtgtggatagaggaaaatccatggatggaagacaaaactccagttacaacttgggaaaatgttccatatctaggaaagagagacgactcggaccgatg

SEQ ID NO: 5146 - DNA, 203 bp, Artificial sequence
  synthetic
ggcgcgccagtcctagaccaatggtgtggatcacttattggtctcacttccagagcaacctgggcccagaacatacccacagcaattcaacaggtgagaagccttataggcaatgaagagttcctggactacatgccttcaatgaagagattcaggaaggaagaggagtcggagggagccatttggtacgactcggaccgatg

SEQ ID NO: 5147 - DNA, 203 bp, Artificial sequence
  synthetic
ggcgcgccagtcctaacgtaggaagtggaaaagaggctaactgtcaggccaccttaagccacagtacggaagaagctgtgctgcctgtgagccccgtccaaggacgttaaaagaagaagtcaggccccaaagccacggtttgagcaaaccgtgctgcctgtagctccgtcgtggggacgtaaaacctgcgactcggaccgatg

SEQ ID NO: 5148 - DNA, 203 bp, Artificial sequence
  synthetic
ggcgcgccagtcctagcactgagggaagctgtacctccttgcaaaggactagaggttagaggagaccccccgcaaataaaaacagcatattgacgctgggagagaccagagatcctgctgtctcctcagcatcattccaggcacagaacgccagaaaatggaatggtgctgttgaatcaacaggttctcgactcggaccgatg

SEQ ID NO: 5149 - DNA, 203 bp, Artificial sequence
  synthetic
ggcgcgccagtcctaacatccatcacccagaaagggatcatttttattttgctgatgctggtaactccatccatggccatgcggtgcgtgggaataggcaacagagacttcgtggaaggactgtcaggagctacgtgggtggatgtggtactggagcatggaagttgcgtcactaccatggcaaaagacgactcggaccgatg

SEQ ID NO: 5150 - DNA, 203 bp, Artificial sequence
  synthetic
ggcgcgccagtccttgagaccacagaacatggaacaactgcaaccataacacctcaagctcccacgtcggaaatacagctgacagactacggagctctaacattggattgttcacctagaacagggctagactttaatgagatggtgttgttgacaatgaaaaaaaaatcatggctcgtccacaaacacgactcggaccgatg

SEQ ID NO: 5151 - DNA, 203 bp, Artificial sequence
  synthetic
ggcgcgccagtcctatctcttagaaccacaacagtcacaggaaagacaatccatgaatggtgctgtagatcttgcacgttaccccccctacgtttcaaaggagaagacgggtgctggtacggcatggaaatcagaccagtcaaggagaaggaagagaacctagttaagtcaatggtctctgcagggtccgactcggaccgatg

SEQ ID NO: 5152 - DNA, 203 bp, Artificial sequence
  synthetic
ggcgcgccagtccttcttctaagttcacttctcaagaatgatgtgccactagctggcccactaatagctggaggcatgctaatagcatgttatgtcatatctggaagctcggccgatttatcactggagaaagcggctgaggtctcctgggaagaagaagcagaacactctggtgcctcacacaacatcgactcggaccgatg

SEQ ID NO: 5153 - DNA, 203 bp, Artificial sequence
  synthetic
ggcgcgccagtcctccctgaaggcgaagttggagccatagctctagactttaaacccggcacatctggatctcctatcgtgaacagagagggaaaaatagtaggtctttatggaaatggagtggtgacaacaagtggtacctacgtcagtgccatagctcaagctaaagcatcacaagaagggcctctcgactcggaccgatg

SEQ ID NO: 5154 - DNA, 203 bp, Artificial sequence
  synthetic
ggcgcgccagtcctaccagagattgaggacgaggtgtttaggaaaagaaacttaacaataatggacctacatccaggatcgggaaaaacaagaagataccttccagccatagtccgtgaggccataaaaagaaagctgcgcacgctagtcttagctcccacaagagttgtcgcttctgaaatggcagacgactcggaccgatg

SEQ ID NO: 5155 - DNA, 203 bp, Artificial sequence
  synthetic
ggcgcgccagtcctaacagacatatccgaaatgggagcaaacttccgagccgacagggtaatagacccgaggcggtgcctgaaaccggtaatactaaaagatggcccagagcgtgtcattctagcgggaccgatgccagtgactgtggctagcgccgcccagaggagaggaagaattggaaggaaccacgactcggaccgatg

SEQ ID NO: 5156 - DNA, 203 bp, Artificial sequence
  synthetic
ggcgcgccagtcctggtgataggtctgttattcatgatattgacagtggcagccaatgagatgggattactggaaaccacaaagaaggacctggggattggtcatgcagctgctgaaaaccaccatcatgctgcaatgctggacgtagacctacatccagcttcagcctggactctctatgcagtggccgactcggaccgatg

SEQ ID NO: 5157 - DNA, 203 bp, Artificial sequence
  synthetic
ggcgcgccagtcctcatggtcaatggtgtggtgagactgctaaccaaaccatgggatgtcattcccatggtcacacaaatagccatgactgacaccacaccctttggacaacagagggtgtttaaagagaaagttgacacgcgtacaccaaaagcgaaacgaggcacagcacaaattatggaggtgaccgactcggaccgatg

SEQ ID NO: 5158 - DNA, 203 bp, Artificial sequence
  synthetic
ggcgcgccagtccttccagttgattgggtcccaaccagccgcaccacctggtcgatccatgcccaccatcaatggatgacaacagaagacatgttgtcagtgtggaatagggtttggatagaggaaaacccatggatggaggacaagactcatgtgtccagttgggaagacgttccatacctaggaaacgactcggaccgatg

SEQ ID NO: 5159 - DNA, 203 bp, Artificial sequence
  synthetic
ggcgcgccagtcctgcaggcagcggaaccccccacctggcgacaggtgcctctgcggccaaaagccacgtgtataagatacacctgcaaaggcggcacaaccccagtgccacgttgtgagttggatagttgtggaaagagtcaaatggctctcctcaagcgtattcaacaaggggctgaaggatgccccgactcggaccgatg

SEQ ID NO: 5160 - DNA, 203 bp, Artificial sequence
  synthetic
ggcgcgccagtcctacactgcttcagaaaagatcctggcggtggaaaggtactacaccttcaaggttaatgattggacatcaacacaaaagccctttgagtacatccgcattccccttcctcacgtcctgtccggtgaagatggtggtgtctttggtgcggccctccgccggcactacctggtgaaaacgactcggaccgatg

SEQ ID NO: 5161 - DNA, 203 bp, Artificial sequence
  synthetic
ggcgcgccagtcctctggatggcgggtgcaagttcagtgcaacgcctctcaattccacgctggaggtttgctggtgttcatggcaccagagtatccaaccttagatgcttttgccatggacaaccgttggtccaaggataacctgcctaatggaaccagaactcagacaaacaaaaagggaccatttgcgactcggaccgatg

SEQ ID NO: 5162 - DNA, 203 bp, Artificial sequence
  synthetic
ggcgcgccagtcctatggcaagactcctgttgctccatccaattacatggtaggcgaatacaaggacttcctggagatagctcagattccaacctttattgggaataagatccctaatgctgtcccctacattgaggcatccaacacagccgtcaagacccaaccgctggccacctatcaagtgacctcgactcggaccgatg

SEQ ID NO: 5163 - DNA, 203 bp, Artificial sequence
  synthetic
ggcgcgccagtccttgtcctgctcctgtctggccaatacattcttggccgctttgtctagaaactttgctcagtaccggggatcattggtttatacctttgtgttcactgggaccgcgatgatgaagggcaagttcctcattgcctacaccccacctggagcgggcaagcccactagtcgagaccaagcgactcggaccgatg

SEQ ID NO: 5164 - DNA, 203 bp, Artificial sequence
  synthetic
ggcgcgccagtcctgatgcccgacctctgctaagatactaacaatggtgagcgcagggaaggatttctcactcaagatgcctatctcacctgccccctggagccctcagggagtagaaaacgctgaaaaaggggtcactgaaaacacaaacgcaactgctgactttgtggctcaaccagtttacttgccgactcggaccgatg

SEQ ID NO: 5165 - DNA, 203 bp, Artificial sequence
  synthetic
ggcgcgccagtcctcttttagactgcccctggttcagaaggaatggcccgtgcgagaggagaacgttttcggtttgtaccggatcttcaatgcccactacgctggttactttgcggacctactgattcatgacattgagacaaatccagggcccttcatgtttagaccaaggaaacaggttttccagacgactcggaccgatg

SEQ ID NO: 5166 - DNA, 203 bp, Artificial sequence
  synthetic
ggcgcgccagtcctaaacactaaacaacccagagttctggaagcagctcttgagcagatgtgtgcagctgattgcagggatgacaatagcagtgatgcatccggaccctttgactctgctctgcttaggaacattgacggccgccgagattacaagccagacaagtctgtgcgaagaaatagcagctacgactcggaccgatg

SEQ ID NO: 5167 - DNA, 203 bp, Artificial sequence
  synthetic
ggcgcgccagtcctaggaaaaggaacagaccctagatcagctcttgcagcgtttccccgaacatgcgaagcgcatttctgatctccggaatggaatggccgcctatgtagagtgcaaggagagttttgatttctttgaaaagctgtacaatcaggcagtgaaagagaagagaacgggtatcgccgccgcgactcggaccgatg

SEQ ID NO: 5168 - DNA, 203 bp, Artificial sequence
  synthetic
ggcgcgccagtcctctcttccatgcttccagaataactgccttttccttgagaaagctgggctccagttcagagataaccgaactaaagagatcatttccctggtagatgtgattgagagagccgtggctaggattgaaaggaagaagaaagttctcacaaccgtgcagacccttgtggcacaaggtccgactcggaccgatg

SEQ ID NO: 5169 - DNA, 203 bp, Artificial sequence
  synthetic
ggcgcgccagtcctcagtagacgaggtcagtttccattccgtagtccagcagcttaaagcaagacagcaagcgacagatgaacagcttgaggaattgcaagaggctttcgcgaaagtacaggagcgtaactctgtgttttctgattggttgaagatttctgcaatgttgtgtgctgcgactctggcaccgactcggaccgatg

SEQ ID NO: 5170 - DNA, 203 bp, Artificial sequence
  synthetic
ggcgcgccagtcctaatatgtagccaaacatgtaaccgcccccattggttttgtctaccccactggggtgagcacccagacttgcctccttgtgagaggccgcaccttggtagtaaatagacacatggccgagtctgactggacttccatagtagtgcgtggagtcacacacgcccgctctactgttacgactcggaccgatg

SEQ ID NO: 5171 - DNA, 203 bp, Artificial sequence
  synthetic
ggcgcgccagtcctaaattttggccatagctaaagcaggcaaagagactgacgtatctttcatccgcctctcttctggtcctctattcagagacaatacatccaaatttgtcaaggctggtgatgtacttcctactggtgccgctccagtcacggggataatgaacacggacatacccatgatgtacacgactcggaccgatg

SEQ ID NO: 5172 - DNA, 203 bp, Artificial sequence
  synthetic
ggcgcgccagtcctctttggaaggactggaggggatggaccccatggacaggaacacctccccggggcttccatatactgcgctaggaatgcgcagaacagatgtcgtagattgggaatcagccaccctgatcccgtttgcggcagaaagattaagaaaaatgaatgaaggagacttttccgaagttgcgactcggaccgatg

SEQ ID NO: 5173 - DNA, 203 bp, Artificial sequence
  synthetic
ggcgcgccagtcctccattgtaagagtatataaccagtgctttgtgaaacttcgaggagtctctttgttgaggacttttgagttctcccttgaggctcccacagatacaataaatatttgagattgaaccctgtcgagtatctgtgtaatcttttttacctgtgaggtctcggaatccgggccgagaacgactcggaccgatg

SEQ ID NO: 5174 - DNA, 203 bp, Artificial sequence
  synthetic
ggcgcgccagtcctggatcaggaccagtgtgttttaattgtaaaaaaccaggacatctagcaagacaatgtagagaagtgaaaaaatgtaataaatgtggaaaacctggtcatgtagctgccaaatgttggcaaggaaatagaaagaattcgggaaactggaaggcggggcgagctgcagccccagtgcgactcggaccgatg

SEQ ID NO: 5175 - DNA, 203 bp, Artificial sequence
  synthetic
ggcgcgccagtccttaacagaaatagtagaaagactagaaagagaagggaaagtaaaaagagcagatccaaataatccatggaatacaccagtatttgctataaaaaagaaaagtggaaaatggagaatgctcatagattttagagaattaaacaaactaactgagaaaggagcagaggtccagttggcgactcggaccgatg

SEQ ID NO: 5176 - DNA, 203 bp, Artificial sequence
  synthetic
ggcgcgccagtccttatatgctaaattaagtttggtgggaccacatcaaataagttatcaagtatatcagaaggatccagaaaagatactatggtatggaaaaatgagtagacaaaagaaaaaggcagaaaatacatgtgatatagccttaagagcatgctataagataagagaagagtctattataacgactcggaccgatg

SEQ ID NO: 5177 - DNA, 203 bp, Artificial sequence
  synthetic
ggcgcgccagtcctgaataggaaaagaaccaagatatgaaatacctacttctagagaagcctgggaatcaaatttaattaattcaccatatcttaaggccccacctcctgaggtagaatatatccatgctgctttgaatataaagagagcgttaagtatgataaaagatgctccaataccaggagcagcgactcggaccgatg

SEQ ID NO: 5178 - DNA, 203 bp, Artificial sequence
  synthetic
ggcgcgccagtcctaaacatggtatatagatggaggtagaaagctaggaaaagcagcaaaagcagcctattggacagatacaggaaagtggcaagtgatggaattagaaggcagtaatcagaaggcagaaatacaagcattattattggcattaaaagcaggatcagaggagatgaatattataacagcgactcggaccgatg

SEQ ID NO: 5179 - DNA, 203 bp, Artificial sequence
  synthetic
ggcgcgccagtcctaagctgtcttacaattgttgagtgctcataatgttactgaattacaaacagataatggaccaaattttaaaaatcaaaagatggaaggagtactcaattacatgggtgtgaaacataagtttggtatcccagggaacccacagtcacaagcattagttgaaaatgtaaatcatacgactcggaccgatg

SEQ ID NO: 5180 - DNA, 203 bp, Artificial sequence
  synthetic
ggcgcgccagtccttcaggtagtatggagacttccaccattagtagtcccagtagaagaatcagaaataattttttgggattgttgggcaccagaagaacccgcctgtcaggactttcttggggcaatgatacatctaaaagctaagacaaatataagtatacgagagggacctaccttggggaattgcgactcggaccgatg

SEQ ID NO: 5181 - DNA, 203 bp, Artificial sequence
  synthetic
ggcgcgccagtccttgaaagtaaaaaggtgaaaatatctctacagtgcaatagcacaaaaaacctaacctttgcaatgagaagttcaggagattatggagaagtaacgggagcttggatagagtttggatgtcatagaaataaatcaaaacttcatgctgaagcaaggtttagaattagatgtagatgcgactcggaccgatg

SEQ ID NO: 5182 - DNA, 203 bp, Artificial sequence
  synthetic
ggcgcgccagtccttaaagcgctagcagctgcctaaccgcaaaaccacatcctatggaaagcttgctaatgacgtataagttgttccattgtaagagtatataaccagtgctttgtgaaacttcgaggagtctctttgttgaggacttttgagttctcccttgaggctcccacagatacaataaatatcgactcggaccgatg

SEQ ID NO: 5183 - DNA, 203 bp, Artificial sequence
  synthetic
ggcgcgccagtcctagaaaaaaatagacctcacccttacccacttcccctagcgctgaaaaacaaggctctgacgattaccccctgcccataaaatttgcctagtcaaaataaaagatgccgagtctataaaagcgcaaggacagttcaggaggtggctcgctccctcaccgaccctctggtcacggacgactcggaccgatg

SEQ ID NO: 5184 - DNA, 203 bp, Artificial sequence
  synthetic
ggcgcgccagtcctgtttccgcctgcgctcggctagactctgccttaaacttcacttccgcgttcttgtctcgttctttcctcttcgccgtcactgaaaacgaaacctcaacgccgccctcttggcaggcgtcccggggccaacatacgccgtggagcgcagcaagggctagggcttcctgaacctctcgactcggaccgatg

SEQ ID NO: 5185 - DNA, 203 bp, Artificial sequence
  synthetic
ggcgcgccagtcctccgggagaggtctattgctataggcaggcccgccctaggagcattgtcttcccggggaagacaaacaattgggggctcgtccgggatttgaattcctccattctcacattatgggacaaatccacgggctttccccaactccaatacccaaagcccccagggggctatcaaccccgactcggaccgatg

SEQ ID NO: 5186 - DNA, 203 bp, Artificial sequence
  synthetic
ggcgcgccagtccttggctgctttctccaccctgccaggcaatacccgtgacccctcttgggcagctatcctacaggggctggaggaaccctattgcgcgttcgtagagcgccttaacgtggcccttgacaacggcctccccgagggtacccccaaagagcccatcttacgttccctagcgtactcaacgactcggaccgatg

SEQ ID NO: 5187 - DNA, 203 bp, Artificial sequence
  synthetic
ggcgcgccagtcctacgccaacaaagaatgccaaaaaatcttacaagcccgcggacacactaacagcccccttggggagatgctccggacatgtcaggcgtggacacccaaggacaaaaccaaggtccttgtggtccaaccacggaggcccccccccacacagccctgctttcgttgtggcaaggtagcgactcggaccgatg

SEQ ID NO: 5188 - DNA, 203 bp, Artificial sequence
  synthetic
ggcgcgccagtcctccttaaggggggagatctaatctccccccatcccgatcaagacatctcgatactcccactcatccccctgcggcagcaacagcaaccaattctaggggtccggatctccgttatgggacaaacacctcagcctacccaagcgctacttgacacaggagccgaccttacggttatcgactcggaccgatg

SEQ ID NO: 5189 - DNA, 203 bp, Artificial sequence
  synthetic
ggcgcgccagtcctaccccagacactcgtgcccgggccggtaaagctccacgacaccctgatcctaggcgccagtgggcaaaccaacacccagttcaaactcctccaaacccccctacacatattcttgcccttccgaaggtcccccgttatcctttcctcctgcctcttagacacccacaacaaatgcgactcggaccgatg

SEQ ID NO: 5190 - DNA, 203 bp, Artificial sequence
  synthetic
ggcgcgccagtcctgaccatcattggaagggacgccctacaacaatgccaggggcttctatacctcccagacgaccccagcccccaccaattgctgccaatagccactccaaacaccataggcctcgaacaccttcccccacctccccaagtggaccaatttcctttaaacctgagcgcctccaggcccgactcggaccgatg

SEQ ID NO: 5191 - DNA, 203 bp, Artificial sequence
  synthetic
ggcgcgccagtcctttaaatgacctggtctccaaggccctggaggctggtcacattgaaccatactcaggaccaggcaataaccccgtcttccccgttaaaaaaccaaatggtaaatggaggttcattcatgacctaagagccaccaatgccattactaccaccctcacctctccttccccagggccccgactcggaccgatg

SEQ ID NO: 5192 - DNA, 203 bp, Artificial sequence
  synthetic
ggcgcgccagtcctcccgatctcactagcctaccgacagccttaccccacctacagaccatagatcttactgacgcctttttccaaatccccctccccaagcagtaccagccatacttcgccttcaccattccccagccatgtaactatggccccgggaccagatatgcatggactgtccttccacagcgactcggaccgatg

SEQ ID NO: 5193 - DNA, 203 bp, Artificial sequence
  synthetic
ggcgcgccagtcctgtctctaaaggaacacccatccttcgcaaacacctacaatccctatattctgcccttcacgggtaccgggacccaagagcttgtatcaccctcaccccacaacaactccatgcgttacatgccattcaacaagctctacaacataactgccgtggccgcctcaaccccgccctacgactcggaccgatg

SEQ ID NO: 5194 - DNA, 203 bp, Artificial sequence
  synthetic
ggcgcgccagtcctcctctccttggcctcatctcgttaagtacatctggtacaacatctgtcatctttcaacccaagcaaaattggcccctggcttggctccacaccccccaccctccgaccagtttatgtccttggggtcacctactggcctgcaccatcttaactctagacaaatataccctacaacgactcggaccgatg

SEQ ID NO: 5195 - DNA, 203 bp, Artificial sequence
  synthetic
ggcgcgccagtcctcattatggccagctctgccaatctttccaccacaacatgtcaaagcaagccctttgcgacttcctgaggaactcccctcatccaagtgtcggcatcctcattcaccacatgggtcgattccataaccttggcagccaaccgtctggtccgtggaagactctcttacacctcccacgactcggaccgatg

SEQ ID NO: 5196 - DNA, 203 bp, Artificial sequence
  synthetic
ggcgcgccagtcctcccctactgcagggcaagaccatctacctccaccatgtccgcagccacaccaacctccccgacccaatttccaccttcaatgaatacacagactcccttatcttagctccccttgttcccctgacgccccaaggcctccacggcctcacccattgcaatcaaagggctctagtccgactcggaccgatg

SEQ ID NO: 5197 - DNA, 203 bp, Artificial sequence
  synthetic
ggcgcgccagtcctctaaatgtcatgaaccccagtggtaaaacccgatggcaaatccaccacagtcctccactaccacccattcctgaagcctctacccctcccaaaccacctcccaaatggttctattataaactccccggccttaccaatcagcggtggaaaggtccattgcaatccctccaggaacgactcggaccgatg

SEQ ID NO: 5198 - DNA, 203 bp, Artificial sequence
  synthetic
ggcgcgccagtcctgcggccggggcagccttgctctccatagacggctccccccggtggatcccgtggcgattcctgaaaaaagctgcatgcccaagaccagacgccagcgaactcgccgagcacgccgcaacagaccaccaacaccatgggtaatgttttcttcctacttttattcagtctcacacacgactcggaccgatg

SEQ ID NO: 5199 - DNA, 203 bp, Artificial sequence
  synthetic
ggcgcgccagtcctgtttcattcagatgtaaatttcacccaggaagtcagccaagtgtcccttcgactacacttctctaagtgcggctcctccatgaccctcctagtagatgcccctggatatgatcctttatggttcatcacctcagaacccactcagcctccaccaacttctcccccattggtccacgactcggaccgatg

SEQ ID NO: 5200 - DNA, 203 bp, Artificial sequence
  synthetic
ggcgcgccagtcctaacctcctcccgaaccatcctctttccttcccttgccctgcccgctcctccatcccaacccttcccttggacccattgctaccaacctcgcctacaggcgataacaacagataactgcaacaactccattatcctcccccctttttccctcgctcccgtacctcctccggcgaccgactcggaccgatg

SEQ ID NO: 5201 - DNA, 203 bp, Artificial sequence
  synthetic
ggcgcgccagtcctaagacgccgccgtgccgttccaatagcagtgtggcttgtctccgccctagcggccggaacaggtatcgctggtggagtaacaggctccctatctctggcttccagtaaaagccttctcctcgaggttgacaaagacatctcccaccttacccaggccatagtcaaaaatcatcacgactcggaccgatg

SEQ ID NO: 5202 - DNA, 203 bp, Artificial sequence
  synthetic
ggcgcgccagtcctaaacatcctccgggttgcacagtatgcagcccaaaatagacgaggattagacctcctattctgggaacaagggggtttgtgcaaggccatacaggagcaatgttgcttcctcaacatcagtaacactcatgtatccgtcctccaggaacggccccctcttgaaaaacgtgtcatcgactcggaccgatg

SEQ ID NO: 5203 - DNA, 203 bp, Artificial sequence
  synthetic
ggcgcgccagtcctcgctcacattcctcccataggaccttcttttccccttcaggaaatccacataaccctgaagcaagtcacaaaacccatcaaaacccaggagtcctatacactccaactgctgatgcctttcttccctctcccggcgcttttgatccttttcccgcaggcgctcctttctgcgcccgactcggaccgatg

SEQ ID NO: 5204 - DNA, 203 bp, Artificial sequence
  synthetic
ggcgcgccagtcctggtctatgttccacccgcctacatcgacatgccctcctggccacctgtccagagcaccaactcacctgggaccccatcgatggacgcgttgtcagctctcctctccaataccttatccctcgcctcccctccttccccacccagagaacctcaaggaccctcaaggtccttacccgactcggaccgatg

SEQ ID NO: 5205 - DNA, 203 bp, Artificial sequence
  synthetic
ggcgcgccagtcctcctcccaccactcctgtctcccccaaggttccacctgccttctttcaatcaatgcgaaagcacaccccctaccgaaatggatgcctggaaccaaccctcggggatcagctcccctccctcgccttccccgaacctggcctccgtccccaaaacatctacaccacctggggaaaacgactcggaccgatg

SEQ ID NO: 5206 - DNA, 203 bp, Artificial sequence
  synthetic
ggcgcgccagtcctcagccatctttagtagttcagtcctccctattaatcttcgaaaaattcgaaaccaaagccttccatccctcctatctactctctcatcagcttatacaatactcctccttccataaccttcaccttctattcgatgaatacaccaacatccctgtctctattttatttaataaacgactcggaccgatg

SEQ ID NO: 5207 - DNA, 203 bp, Artificial sequence
  synthetic
ggcgcgccagtcctaacagctctccagaaaaaaatagacctcacccttacccacttcccctagcgctgaaaaacaaggctctgacgattaccccctgcccataaaatttgcctagtcaaaataaaagatgccgagtctataaaagcgcaaggacagttcaggaggtggctcgctccctcaccgaccctcgactcggaccgatg

SEQ ID NO: 5208 - DNA, 203 bp, Artificial sequence
  synthetic
ggcgcgccagtcctctggtcacggagactcaccttggggatccatcctctccaagcggcctcggttgagacgccttccgtgggaccgtctcccggcctcggcacctcctgaactgctcctcccaaggtaagtctcctctcaggtcgagctcggctgccccttaggtagtcgctccccgagggtctttacgactcggaccgatg

SEQ ID NO: 5209 - DNA, 203 bp, Artificial sequence
  synthetic
ggcgcgccagtccttgtacaagcacttctgtttcccaggagcgaggtataggctgtacccactgccaaaagcctttaaccgttatccgccaaccaactacgtaacagttagtaccatcttgttcttgactggacgttcgatcaggtggattttccctccactagtttggtcgatgaggctaggaattccgactcggaccgatg

SEQ ID NO: 5210 - DNA, 203 bp, Artificial sequence
  synthetic
ggcgcgccagtcctcccacgggtgaccgtgtcctagcctgcgtggcggccaacccagcttatgctgggacgcccttttaaggacatggtgtgaagactcgcatgtgcttggttgtgagtcctccggcccctgaatgcggctaaccttaaccctagagccttatgccacgatccagtggttgtaaggtccgactcggaccgatg

SEQ ID NO: 5211 - DNA, 203 bp, Artificial sequence
  synthetic
ggcgcgccagtcctagaacaccaactggcttcacatgagggtggcaatgtttcagttaaatacacattcacgcatccaggtgaacgtggtatagatttatcatctgcaaatgaagtgggagggcctgtcaaggatgtcatatacaatatgaatggtactttattaggaaatctgctcattttccctcacgactcggaccgatg

SEQ ID NO: 5212 - DNA, 203 bp, Artificial sequence
  synthetic
ggcgcgccagtccttgaaattgttcagtactatacacattggtctggatcacttagattctcttcgatgtatactggtcctgccttgtccagtgctaaactcactctagcatacaccccgcctggtgctcgtggtccacaggacaggagagaagcaatgctaggtactcatgttgtctgggatattggcgactcggaccgatg

SEQ ID NO: 5213 - DNA, 203 bp, Artificial sequence
  synthetic
ggcgcgccagtccttgttccacatggtgccccgaaatccaaaagagtgggcgattacacatggcaaagtgcttcaaaccccagtgtattcttcaaggtgggggatacatcaaggtttagtgtgccttatgtaggattggcatcagcatataattgtttttatgatggttactcacatgatgatgcagacgactcggaccgatg

SEQ ID NO: 5214 - DNA, 203 bp, Artificial sequence
  synthetic
ggcgcgccagtcctaactcagtatggcataactgttctaaaccatatgggtagtatggcattcagaatagtaaatgaacatgatgaacacaaaactcttgtcaagatcagagtttatcacagggcaaagctcgttgaagcatggattccaagagcacccagagcactaccctacacatcaatagggcgcgactcggaccgatg

SEQ ID NO: 5215 - DNA, 203 bp, Artificial sequence
  synthetic
ggcgcgccagtcctcttgcctccaatggctagtttagataacaagggcatgttattcaccagtaattttgttctagcctccacaaattctaacacactaagccccccaacaatcttgaatcctgaagctttagtcaggagatttggttttgacctagatatatgtttgcatactacctacacaaagaacgactcggaccgatg

SEQ ID NO: 5216 - DNA, 203 bp, Artificial sequence
  synthetic
ggcgcgccagtccttggaaaactcaatgcaggcatgtcaaccaagacatgcaaagattgccatcaaccatctaatttcaagaaatgttgccccctagtctgtggaaaagctattagcttggtagacagaactaccaacgttaggtatagtgtggatcaactggtcacggctattataagtgatttcaacgactcggaccgatg

SEQ ID NO: 5217 - DNA, 203 bp, Artificial sequence
  synthetic
ggcgcgccagtcctacgcccagttgttgtgcaaggaccaaacacagaatttgcactatccctgttaaggaaaaacataatgactataacaacctcaaagggagagttcacagggttaggcatacatgatcgtgtctgtgtgatacccacacacgcacagcctggtgatgatgtactagtgaatggtcacgactcggaccgatg

SEQ ID NO: 5218 - DNA, 203 bp, Artificial sequence
  synthetic
ggcgcgccagtcctcactatcttagaagttggccctgtaacaatggcaggacttattaatttgagtagcacccccactaacagaatgattcgttatgattatgcaacaaaaactgggcagtgtggaggtgtgctgtgtgctactggtaagatctttggtattcatgttggcggtaatggaagacaaggcgactcggaccgatg

SEQ ID NO: 5219 - DNA, 203 bp, Artificial sequence
  synthetic
ggcgcgccagtccttgacaatgatcccagactggaagttaaattgactgaatcattattctctaagtacaaggggaatgtaaatacggaacccactgaaaatatgcttgtggctgtagaccattatgcagggcaactattatcactagatatccccacttctgaacttacactaaaagaagcattatacgactcggaccgatg

SEQ ID NO: 5220 - DNA, 203 bp, Artificial sequence
  synthetic
ggcgcgccagtcctgtctgtcatcccttgcttaatggatgggcacctgatggcatttgattactctaattttgatgcctctttgtcaccagtttggtttgtctgtctagagaaggttttgaccaagttaggctttgcaggctcttcattaattcaatcaatttgtaatacccatcatatctttagggacgactcggaccgatg

SEQ ID NO: 5221 - DNA, 203 bp, Artificial sequence
  synthetic
ggcgcgccagtcctgcaaggtatcagccgttctggtctgatcctctcaaccccatcttttgtctttctcagtttcttagcggggaccgtccgttctctccctgtgcaggtgcgactcttgtttgtgctggtcgcggcaggtggcgcccaacgtggggctcgagctcgacagttttcttccgccactaccgactcggaccgatg

SEQ ID NO: 5222 - DNA, 203 bp, Artificial sequence
  synthetic
ggcgcgccagtcctattaattaattttctttcatttattgaggaagtttgcccttggtttcctagggaaggcacagtgaatttggagacatggaagaaggtgggagagcaaattcggacgcattataccttacacggccctgaaaaggtccctgtcgagacattatctttttggacattgattcgtgacgactcggaccgatg

SEQ ID NO: 5223 - DNA, 203 bp, Artificial sequence
  synthetic
ggcgcgccagtcctctgcctggattttgataatgatgaattgaaacgtttaggaaatttgttaaaacaggaagaagatcctctccatacccctgattcggtacctagttatgatcctcctcctcctcctccgccatctctgaaaatgcacccttctgataatgatgattcactttcatctacagatgacgactcggaccgatg

SEQ ID NO: 5224 - DNA, 203 bp, Artificial sequence
  synthetic
ggcgcgccagtccttaacaaccagcgttactatgaatcactgccgtttaaacaactaaaagagttaaagattgcttgttcgcaatatggtcctaccgctccatttactattgctatgatagaaagtttgggtactcaagctttgcccccgaatgactggaaacagaccgctagggcatgtctctcaggcgactcggaccgatg

SEQ ID NO: 5225 - DNA, 203 bp, Artificial sequence
  synthetic
ggcgcgccagtccttgcggctcgacaggcatggaaaaaacttcctagctccagtactaagacagaggacctttcaaaggtccggcagggacctgatgagccttaccaggacttcgtggcacgacttttagatactataggtaagataatgtcagatgaaaaggctgggatggtgctggcaaaacaattcgactcggaccgatg

SEQ ID NO: 5226 - DNA, 203 bp, Artificial sequence
  synthetic
ggcgcgccagtcctagcttttgaaaacgctaactctgcttgtcaagctgctttgagaccttatcgaaaaaagggagatctatctgattttattcgcatttgtgctgatattggaccctcctacatgcaaggcattgctatggcagcagcattacaaggaaaaagcataaaagaagtacttttccagcacgactcggaccgatg

SEQ ID NO: 5227 - DNA, 203 bp, Artificial sequence
  synthetic
ggcgcgccagtcctgcaagcccggaacaagaaaggacttcaaaagtcaggtaattcgggttgctttgtttgtggtcagcctggccatcgggctgcagtatgccctcaaaaacatcaaacctctgttaatacccctaatttgtgcccacgctgtaaaaaaggaaagcattgggcacgagactgccgttccgactcggaccgatg

SEQ ID NO: 5228 - DNA, 203 bp, Artificial sequence
  synthetic
ggcgcgccagtccttacgtccttatttaaaattacccacttataccttgcagccattatttgacatccttaaaggtgactctgatcctgcgtcaccccgaacgctttctttagaaggacgaactgctttacaatcaatagaagaagctattagacaacaacagattacttattgtgattaccaacgatcgactcggaccgatg

SEQ ID NO: 5229 - DNA, 203 bp, Artificial sequence
  synthetic
ggcgcgccagtcctttaaatcttgctctacttgtcctcaattctttgttctccctcaatatggtgtcaaccctcgaggtttacgccctaatcacctctggcaaacagatgttactcacattcctcaatttgggcgtcttaaatatgttcatgtttctattgacactttttccaattttctcatggcttcgactcggaccgatg

SEQ ID NO: 5230 - DNA, 203 bp, Artificial sequence
  synthetic
ggcgcgccagtcctcagaggaactccctgacgcatcagatgcaacgcatgaccctgagtgagcccacgagtgagctgcccacccagaggcaaattgaagcgctaatgccgtacgcctggaatgaggcacatgtacaaccccccgtgacacctactaatatactgattatgttgttgttactattacagcgactcggaccgatg

SEQ ID NO: 5231 - DNA, 203 bp, Artificial sequence
  synthetic
ggcgcgccagtcctggccttactactcaataccccatgtgcttttcttatcaatcgcagcatccccattgtatacaggtgtcagccgacatatcatatcctcgagtgactatttcaggcattgatgaaaaaacagggaaaaaatcgtatgggaacggaactggacccctcgatattccgttttgtgaccgactcggaccgatg

SEQ ID NO: 5232 - DNA, 203 bp, Artificial sequence
  synthetic
ggcgcgccagtcctaagcatttaagcatcggcataggcatagacactccgtggactttatgtcgagcccgggttgcatcggtgtataatatcaataatgccaatgccacctttttatgggactgggcacctggaggaacacctgattttcctgagtatcgaggacagcatccacctattttttcggtgcgactcggaccgatg

SEQ ID NO: 5233 - DNA, 203 bp, Artificial sequence
  synthetic
ggcgcgccagtcctcaccgacatctaatggagcttttaaagaataaagagaggggagctgcgggggacgacccgtgaagggttaagtcctgggagctctttggcaaaagccaaagcctaggacaaatacctaagctccctgtcccgccaccctctaggattcttgaaagctcttaaggttcggatgttcgactcggaccgatg

SEQ ID NO: 5234 - DNA, 203 bp, Artificial sequence
  synthetic
ggcgcgccagtcctgatccggtggagccatcagaggaatcaaacacattattatagtaccaattcctggagattcctcaattaccactcgatccagactactggaccggttggtcaggttaattggaaacccggatgtgagcgggcccaaactaacaggggcactaataggtatattatccttatttgcgactcggaccgatg

SEQ ID NO: 5235 - DNA, 203 bp, Artificial sequence
  synthetic
ggcgcgccagtcctgtgatcaatccaggtccggatggttcgagaacaaggaaatctcagatattgaagtgcaagaccctgagggattcaacatgattctgggtaccattctagcccagatctgggtcttgctcgcaaaggcggttacggccccagacacggcagctgattcggagctaagaaggtggacgactcggaccgatg

SEQ ID NO: 5236 - DNA, 203 bp, Artificial sequence
  synthetic
ggcgcgccagtccttggtaatcctagagaactcaattcagaacaagttcagtgcaggatcataccctctgctctggagctatgccatgggagtaggagtggaacttgaaaactccatgggaggtttgaactttggtcgatcttactttgatccagcatattttagattagggcaagagatggtgaggacgactcggaccgatg

SEQ ID NO: 5237 - DNA, 203 bp, Artificial sequence
  synthetic
ggcgcgccagtcctaaaacttaggaaccaggtccacacagccgccagccaaccaaccatccactcccacgactggagccgatggcagaagagcaggcacgccatgtcaaaaacggactggaatgcatccgggctctcaaggccgagcccatcggctcactggccgtcgaggaagccatggcagcatggcgactcggaccgatg

SEQ ID NO: 5238 - DNA, 203 bp, Artificial sequence
  synthetic
ggcgcgccagtccttcagaaatatcagacaacccaggacaggaccgagccacctgcaaggaagaggaggcaggcagttcgggtctcagcaaaccatgcctctcagcaattggatcaactgaaggcggtgcacctcgcatccgcggtcagggatctggagaaagcgatgacgacgctgaaactttgggacgactcggaccgatg

SEQ ID NO: 5239 - DNA, 203 bp, Artificial sequence
  synthetic
ggcgcgccagtcctaatgttcctccgcccccgaaccccagtagggccagcacttccgagacacccattaaaaagggcacagacgcgagattggcctcatttggaacggagatcgcgtctttattgacaggtggtgcaacccaatgtgctcgaaagtcaccctcggaaccatcagggccaggtgcacctcgactcggaccgatg

SEQ ID NO: 5240 - DNA, 203 bp, Artificial sequence
  synthetic
ggcgcgccagtcctgggaaaaaggtgagctcagccgtcgggtttgttcctgacaccggccctgcatcacgcagtgtaatccgctccattataaaatccagccggctagaggaggatcggaagcgttacctgatgactctccttgatgatatcaaaggagccaacgatcttgccaagttccaccagatgcgactcggaccgatg

SEQ ID NO: 5241 - DNA, 203 bp, Artificial sequence
  synthetic
ggcgcgccagtccttcgggtccctgcccttaggtgttggtagatccacagcaaaacccgaggaactcctcaaagaggccactgagcttgacatagttgttagacgtacagcagggctcaatgaaaaactggtgttctacaacaacaccccactaaccctcctcacaccttggagaaaggtcctaacaacgactcggaccgatg

SEQ ID NO: 5242 - DNA, 203 bp, Artificial sequence
  synthetic
ggcgcgccagtcctcagggagtgtcttcaatgcaaaccaagtgtgcaatgcggttaatctaataccgctggacaccccgcagaggttccgtgttgtttatatgagcatcacccgtctttcggataacgggtattacaccgttcccagaagaatgctggaattcagatcggtcaatgcagtggccttcacgactcggaccgatg

SEQ ID NO: 5243 - DNA, 203 bp, Artificial sequence
  synthetic
ggcgcgccagtcctagacggggggccccccccaaaaaaaggcccccaggggccgacagccagcatcgcgaggaagcacacccaccccacacacgaccacggcaaccgaaccagagtccagaccaccctgggccaccagctcccagactcggccatcaccccgcaaaaaggaaaggccacaacccgcgccgactcggaccgatg

SEQ ID NO: 5244 - DNA, 203 bp, Artificial sequence
  synthetic
ggcgcgccagtcctaccccagccccgatccggcgggcagccactcaacccgaaccagcacccaagagcgatccctgggggacccccaaaccgcaaaagacatcagtatcccacagcctctccaagtcccccggtctcctcctcttctcgaagggaccaaaagatcaatccaccacatccgacgacactcgactcggaccgatg

SEQ ID NO: 5245 - DNA, 203 bp, Artificial sequence
  synthetic
ggcgcgccagtcctcaattccccacccccaaaggagacaccgggaatcccagaatcaagactcatccagtgtccatcatgggtctcaaggtgaacgtctctgccatattcatggcagtactgttaactctccaaacacccaccggtcaaatccattggggcaatctctctaagataggggtggtagggcgactcggaccgatg

SEQ ID NO: 5246 - DNA, 203 bp, Artificial sequence
  synthetic
ggcgcgccagtcctcagaatataagaccggttcagagtgtagcttcaagtaggagacacaagagatttgcgggagttgtcctggcaggtgcggccctaggcgttgccacagctgctcagataacagccggcattgcacttcaccagtccatgctgaactctcaagccatcgacaatctgagagcaagccgactcggaccgatg

SEQ ID NO: 5247 - DNA, 203 bp, Artificial sequence
  synthetic
ggcgcgccagtcctctggaaactactaatcaggcaattgaggcaatcagacaagcagggcaggagatgatattggctgttcagggtgtccaagactacatcaataatgagctgataccgtctatgaaccaactatcttgtgatttaatcggccagaagctagggctcaaattgctcagatactatacacgactcggaccgatg

SEQ ID NO: 5248 - DNA, 203 bp, Artificial sequence
  synthetic
ggcgcgccagtcctactcacgtcgacacagagtcctacttcattgtactcagtatagcctatccgacgctgtccgagattaagggggtgattgtccaccggctagagggggtctcgtacaatataggctctcaagagtggtataccactgtgcccaagtatgttgcaacccaagggtaccttatctcgcgactcggaccgatg

SEQ ID NO: 5249 - DNA, 203 bp, Artificial sequence
  synthetic
ggcgcgccagtcctggagtacgacttcagagatctcacttggtgtatcaacccgccagagagaatcaaattggattatgatcaatactgtgcagatgtggctgctgaagaactcatgaatgcattggtgaactcaactctactggaggccagggcaaccaatcagttcctagctgtctcaaagggaaacgactcggaccgatg

SEQ ID NO: 5250 - DNA, 203 bp, Artificial sequence
  synthetic
ggcgcgccagtcctgacagttgagcttaaaatcaaaattgcttcaggattcgggccattgatcacacacggttcagggatggacctatacaaaaccaaccacaacaatgtgtattggctgactatcccgccaatgaagaacctagccttaggtgtaatcaacacattggagtggataccgagattcaacgactcggaccgatg

SEQ ID NO: 5251 - DNA, 203 bp, Artificial sequence
  synthetic
ggcgcgccagtcctacatgctgtggtttattatgtttacagcccaagccgctcattttcttacttttatccttttaggttgcctataaagggggtcccaatcgaattacaagtggaatgcttcacatgggacaaaaaactctggtgccgtcacttctgtgtgcttgcggactcagaatctggtggacacgactcggaccgatg

SEQ ID NO: 5252 - DNA, 203 bp, Artificial sequence
  synthetic
ggcgcgccagtccttatcactcactctgggatggtgggcatgggagtcagctgcacagtcactcgggaagatggaaccaatcgcagatagggctgccagtgaaccgatcacatgatgtcacccagacatcaggcatacccactagtgtgaaatagacatcagaattaagaaaaacgtagggtccaagtcgactcggaccgatg

SEQ ID NO: 5253 - DNA, 203 bp, Artificial sequence
  synthetic
ggcgcgccagtcctggtttcccgttatggactcgctatctgtcaaccagatcttataccctgaagttcacctagatagcccgatagttaccaataagatagtagctatcctggagtatgctcgagtccctcacgcttacagcctggaggaccctacactgtgtcagaacatcaagcaccgcctaaaaacgactcggaccgatg

SEQ ID NO: 5254 - DNA, 203 bp, Artificial sequence
  synthetic
ggcgcgccagtccttcaagactgagatgaggtcagtgattaaatcacaaacccatacttgccataggaggagacacacacctgtattcttcactggtagttcagttgagctgttaatctctcgtgaccttgttgctataatcagtaaggagtctcaacatgtatattacctgacgtttgaactggtttcgactcggaccgatg

SEQ ID NO: 5255 - DNA, 203 bp, Artificial sequence
  synthetic
ggcgcgccagtccttgatgtattgtgatgtcatagaggggaggttaatgacagagaccgctatgaccattgatgctaggtatgcagaacttctaggaagagtcagatacatgtggaaactgatagatggtttcttccctgcactcgggaatccaacttatcaaattgtagccatgctggagccactttcgactcggaccgatg

SEQ ID NO: 5256 - DNA, 203 bp, Artificial sequence
  synthetic
ggcgcgccagtcctggcacggaggcagttggccacccctgaccctccccctgcatgctgcagacacaatccggaatgctcaagcttcaggtgaagggttaacacatgagcagtgcgttgataactggaaatcatttgctggagtgagatttggctgttttatgcctcttagcctggacagtgatctgacgactcggaccgatg

SEQ ID NO: 5257 - DNA, 203 bp, Artificial sequence
  synthetic
ggcgcgccagtcctttcagtggctgcataagaggcttgaaacctctgtcctctatgtaagtgaccctcattgcccccccgaccttgacgcccatgtcccgttatgcaaagtccccaatgaccaaatcttcatcaagtaccctatgggaggtatagaagggtattgtcagaagctgtggaccatcagcacgactcggaccgatg

SEQ ID NO: 5258 - DNA, 203 bp, Artificial sequence
  synthetic
ggcgcgccagtcctccattccctacttatacctggctgcttatgagagcggggtaaggattgcttcgttagtgcaaggggacaatcagaccatagccgtaacaaaaagggtacccagcacatggccttacaaccttaagaaacgggaagctgctagagtaactagagattactttgtaattcttaggccgactcggaccgatg

SEQ ID NO: 5259 - DNA, 203 bp, Artificial sequence
  synthetic
ggcgcgccagtcctcatgcagtaatattgctacaacaatggctaaaagcatcgagagaggttatgaccgttatcttgcatattccctgaacgtcctaaaagtgatacagcaaattttgatctctcttggcttcacaatcaattcaaccatgacccgagatgtagtcatacccctcctcacaaacaacgcgactcggaccgatg

SEQ ID NO: 5260 - DNA, 203 bp, Artificial sequence
  synthetic
ggcgcgccagtcctatctcttaataaggatggcactgttgcccgctcctattggggggatgaattatctgaatatgagcaggctgtttgtcagaaacatcggtgatccagtaacatcatcaattgctgatctcaagagaatgattctcgcatcactaatgcctgaagagaccctccatcaagtaatgacgactcggaccgatg

SEQ ID NO: 5261 - DNA, 203 bp, Artificial sequence
  synthetic
ggcgcgccagtcctcacaacaaccgggggactcttcattcctagactgggctagcgacccttactcagcaaatcttgtatgcgtccagagcatcactagactcctcaagaacataactgcaaggtttgtcctaatccatagtccaaacccaatgttaaaagggttattccatgatgacagtaaagaagcgactcggaccgatg

SEQ ID NO: 5262 - DNA, 203 bp, Artificial sequence
  synthetic
ggcgcgccagtcctaggacgagagactggcggcattcctcatggacaggcatattatagtacctagggcagctcatgaaatcctggatcatagtgtcacaggggcaagagagtctattgcaggcatgctagataccacaaaaggcctgattcgagccagcatgaggaagggggggttaacctctcgagcgactcggaccgatg

SEQ ID NO: 5263 - DNA, 203 bp, Artificial sequence
  synthetic
ggcgcgccagtccttgataaccagattgtccaattatgactatgaacaatttagagcagggatggtgctattgacaggaagaaagagaaatgtcctcattgacaaagagtcatgttcagtgcagctggctagagccctaagaagccatatgtgggcaagactagctcgaggacggcctatttacggcccgactcggaccgatg

SEQ ID NO: 5264 - DNA, 203 bp, Artificial sequence
  synthetic
ggcgcgccagtcctctaccactgatgagagaacagacatgaagctcgccttcgtaagagccccaagtagatccttgcgatctgccgttagaatagcaacagtgtactcatgggcttacggtgatgatgatagctcttggaacgaagcctggttgttggcaaggcaaagggccaatgtgagcctggaggcgactcggaccgatg

SEQ ID NO: 5265 - DNA, 203 bp, Artificial sequence
  synthetic
ggcgcgccagtcctagctaagggtgatcactcccatctcgacttcgactaatttagcgcataggttgagggatcgtagcactcaagtgaaatactcaggtacatcccttgtccgagtggcaaggtataccacaatctccaacgacaatctctcatttgtcatatcagataagaaggttgatactaactcgactcggaccgatg

SEQ ID NO: 5266 - DNA, 203 bp, Artificial sequence
  synthetic
ggcgcgccagtcctttatataccaacaaggaatgcttctagggttgggtgttttagaaacattgtttcgactcgagaaagatactggatcatctaacacggtattacatcttcacgtcgaaacagattgttgcgtgatcccgatgatagatcatcccaggatacccagctcccgcaagctagagctgacgactcggaccgatg

SEQ ID NO: 5267 - DNA, 203 bp, Artificial sequence
  synthetic
ggcgcgccagtccttcaaacagataagattgagagttgatccaggattcatttttgacgccctcgctgaggtaaatgtcagtcagccaaaggtcggcagcaacaacatctcaaatatgagcatcaaggatttcagacctccacacgatgatgttgcaaaattgctcaaagatatcaacacaagcaagccgactcggaccgatg

SEQ ID NO: 5268 - DNA, 203 bp, Artificial sequence
  synthetic
ggcgcgccagtcctatcctgaaaagatcaagcagcagataattgaatcatctgtgcggacttcacctggacttataggtcacatcctatccattaagcaactaagctgcatacaagcaattgtgggaggcgcagttagtagaggtgatatcaaccctattctgaaaaaacttacacctatagagcaggcgactcggaccgatg

SEQ ID NO: 5269 - DNA, 203 bp, Artificial sequence
  synthetic
ggcgcgccagtcctccgtattggtaagtagtaggcaacgagaacttgtatctaggatcactcgcaaattttgggggcatattcttctttactccgggaacagaaagttgataaatcggtttatccagaatctcaagtccggttatctagtactagacttacaccagaatatcttcgttaagaatctatcgactcggaccgatg

SEQ ID NO: 5270 - DNA, 203 bp, Artificial sequence
  synthetic
ggcgcgccagtcctagtcggttgatgtcaagaagagacgttgggttaccttctgctctgcagaatggccaacctttaacgtcggatggccgcgagacggcacctttaaccgagacctcatcacccaggttaagatcaaggtcttttcacctggcccgcatggacacccagaccaggtcccctacatcgcgactcggaccgatg

SEQ ID NO: 5271 - DNA, 203 bp, Artificial sequence
  synthetic
ggcgcgccagtccttgacctgggaagccttggcttttgacccccctccctgggtcaagccctttgtacaccctaagcctccgcctcctcttcctccatccgccccgtctctcccccttgaacctcctctttcgaccccgcctcgatcctccctttatccagccctcactccttctctaggcgccaaaccgactcggaccgatg

SEQ ID NO: 5272 - DNA, 203 bp, Artificial sequence
  synthetic
ggcgcgccagtcctggagacgggagcccccagtggccgactccactacctcgcaggcattccccctccgcacaggaggaaacggacagcttcaatactggccgttctcctcttctgacctttacatcacccccgtcaacagcctggagaaacattcctggtatcatggccctgtatctcggaatgctgcgactcggaccgatg

SEQ ID NO: 5273 - DNA, 203 bp, Artificial sequence
  synthetic
ggcgcgccagtccttggctgagttagttcaccatcactccacggtggctgatggcctcatcaccacactccactacccagctcccaagcgcaacaagcccactatctacggtgtgtcccccaactacgacaagtgggaaatggagcgcaccgacatcaccatgaagcacaagttgggtggaggccagtcgactcggaccgatg

SEQ ID NO: 5274 - DNA, 203 bp, Artificial sequence
  synthetic
ggcgcgccagtcctacggggaggtgtacgagggcgtttggaagaagtacagcctcactgtggccgtgaagaccttgaaggaggacaccatggaggtggaggagttcctgaaggaagcggcggtgatgaaggagatcaaacaccctaacctggtgcagctgctaggggtgtgtacccgggaaccaccatcgactcggaccgatg

SEQ ID NO: 5275 - DNA, 203 bp, Artificial sequence
  synthetic
ggcgcgccagtccttctacataatcactgagttcatgacctatgggaacctgctggactacctgagggagtgtaaccggcaggaggtgagcgccgtggtactgctctacatggccacacagatctcatcagccatggagtacttggagaagaagaacttcatccacagagaccttgctgcccggaactcgactcggaccgatg

SEQ ID NO: 5276 - DNA, 203 bp, Artificial sequence
  synthetic
ggcgcgccagtcctcctttgctgaaatccaccaagcctttgaaaccatgttccaggaatccagtatctcagatgaggtggagaaggagctggggaaacgaggcacgagaggaggtgctgggagtatgctgcaggccccagagctgcccaccaagaccagaacctgcaggagagcagctgagcagaaagcgactcggaccgatg

SEQ ID NO: 5277 - DNA, 203 bp, Artificial sequence
  synthetic
ggcgcgccagtcctccagccctcccagcttgactcccaaactcctccgcaggcaggtcactgcctctccttcctctggcctctctcacaagaaagaggccaccaagggcagtgcctcaggcatggggactccggccactgcagagccagcaccccccagcaacaaagtgggcctcagcaaggcctcctcgactcggaccgatg

SEQ ID NO: 5278 - DNA, 203 bp, Artificial sequence
  synthetic
ggcgcgccagtcctctgaggagatgcgcgtaaggaggcacaagcacagctcggagtccccagggagagacaaggggcgactggctaagctcaagcctgccccgccgcctcctcctgcctgcacaggaaaagcaggcaagcccgcacagagccccagccaagaggccggggaggcaggggggcccacaacgactcggaccgatg

SEQ ID NO: 5279 - DNA, 203 bp, Artificial sequence
  synthetic
ggcgcgccagtcctagacaaaatgcacgagtctggctatggatgctgtgaacactgaccccaccaaggccggcccacctggagaaggactgagaaagcctgtgcccccatctgtgccaaagccccagtcgacggctaagcctccagggactcccaccagcccggtctccaccccctccacagcaccagcgactcggaccgatg

SEQ ID NO: 5280 - DNA, 203 bp, Artificial sequence
  synthetic
ggcgcgccagtcctctccttcacccctggctggggaccagcagccatcttctgccgccttcatccccctcatatcaacccgtgtgtctcttaggaagacccgccagccgccagagcgcattgccagtggcaccatcaccaagggtgtggttctggacagtactgaggccctgtgccttgccatctccccgactcggaccgatg

SEQ ID NO: 5281 - DNA, 203 bp, Artificial sequence
  synthetic
ggcgcgccagtcctggaactcagagcagatggccagccacagtgctgtactggaggctggcaagaacctgtacactttctgtgtgagctatgtggactctatccagcagatgaggaacaagtttgccttccgtgaggctatcaacaagctggagagcaacctccgagagctgcagatctgccctgccacgactcggaccgatg

SEQ ID NO: 5282 - DNA, 203 bp, Artificial sequence
  synthetic
ggcgcgccagtcctgtctttccccaggagctttaaagagagacaagcagagcctgagggagacctggatggagcctggtggagttggctcttcctcctgtgttgtgcaccagctgccctgcacctttcctgcccagcccaggcgtcagccacctctcctcactgcctgtggatgggtctcctgctctgcgactcggaccgatg

SEQ ID NO: 5283 - DNA, 203 bp, Artificial sequence
  synthetic
ggcgcgccagtcctaagactacatctggcctgcctggccaccaggcttctcactccccggtgcctcagacccagctcccaggtcagcctggagtgctcttccctgtccttgcagaacgacctcctctgatggaccttcttgtcaccaaggcatgggagcccctgtgcttactgtacctgcacctttgacgactcggaccgatg

SEQ ID NO: 5284 - DNA, 203 bp, Artificial sequence
  synthetic
ggcgcgccagtccttgcttacaaactgtccccgagagcctgtgctcactgtgttttcattggaaggaagctgtcgctttaagggtcatgaggtgctaaagccaggggcccagatgggtgggcactggaaacaggagctgggcagtgtggtctgtcacctgctctcagtatcttcagcagtgtgcccggcgactcggaccgatg

SEQ ID NO: 5285 - DNA, 203 bp, Artificial sequence
  synthetic
ggcgcgccagtcctcagatcttggacagcaagcttgagttttatgggtggcagtcactggctggctaggcacatagccaggccaaacctaggcctccaagggctccccaaaatctgaatttctgagtagtcttcatcccctctcctgctctaaggtcaggtccatcctctctggtccttaccttgatgcgactcggaccgatg

SEQ ID NO: 5286 - DNA, 203 bp, Artificial sequence
  synthetic
ggcgcgccagtcctctctagttttgactcaacaatatcaccagctgaagcctatagagtacgagccatagataaaataaaagattttatttagtctccagaaaaagggggaatgaaagaccccacctgtaggtttggcaagctagcttaagtaacgccattttgcaaggcatggaaaaatacataactcgactcggaccgatg

SEQ ID NO: 5287 - DNA, 203 bp, Artificial sequence
  synthetic
ggcgcgccagtcctgagaatagagaagttcagatcaaggtcaggaacagagaaacagctgaatatgggccaaacaggatatgctgtggtaagcagttcctgccccggctcagggccaagaacagttggaacagctgaatatgggccaaacaggatatctgtggtaagcagttcctgccccggctcaggcgactcggaccgatg

SEQ ID NO: 5288 - DNA, 203 bp, Artificial sequence
  synthetic
ggcgcgccagtcctgccaagaacagatggtccccagatgcggtccagccctcagcagtttctagagaaccatcagatgtttccagggtgccccaaggacctgaaatgaccctgtgccttatttgaactaaccaatcagttcgcttctcgcttctgttcgcgcgcttctgctccccgagctcaataaaacgactcggaccgatg

SEQ ID NO: 5289 - DNA, 203 bp, Artificial sequence
  synthetic
ggcgcgccagtcctagtaaggagcaccctgcagtcttgaaaactgtatatctttgcacgattctgggtgaaagaccccacctgtaggtttggcaagctagcttaagtaacgccattttgcaaggcatggaaaaatacataactgagaatagagaagttcagatcaaggtcaggaacagagaaacagctcgactcggaccgatg

SEQ ID NO: 5290 - DNA, 203 bp, Artificial sequence
  synthetic
ggcgcgccagtcctgaatatgggccaaacaggatatgctgtggtaagcagttcctgccccggctcagggccaagaacagttggaacagctgaatatgggccaaacaggatatctgtggtaagcagttcctgccccggctcagggccaagaacagatggtccccagatgcggtccagccctcagcagttcgactcggaccgatg

SEQ ID NO: 5291 - DNA, 203 bp, Artificial sequence
  synthetic
ggcgcgccagtccttgaaagaccccaccaagttgcttagcctgatagccgcagtaacgccattttgcaaggcatggaaaaataccaaaccaagaatagggaagttcagatcaagggcgggtacacgaaaacagctaacgttgggccaaacaagatatctgcggtaagcagtttcggccccggcccgggcgactcggaccgatg

SEQ ID NO: 5292 - DNA, 203 bp, Artificial sequence
  synthetic
ggcgcgccagtcctctcgtccgggatttggagacccccgcccagggaccaccgacccaccgtcgggaggtaagctggccagcgatcgttttgtctccgtctctgtctttgtgtgtgtgtgtgtgtaccggtatttactttttgcgcctgcgtctggttctgtactagttagctaactagatctgtatccgactcggaccgatg

SEQ ID NO: 5293 - DNA, 203 bp, Artificial sequence
  synthetic
ggcgcgccagtcctgggaggtccaagccctcgccgcctccatctgaatttttgctttcggtttttcgccgaaaccgcgccgcgcgtcttgtctgtctcagtattgttttgttatttgtctgttcgttattgttttggaccgcttctaaaaacatgggacagaccgtaaccacccctctgagtctgacccgactcggaccgatg

SEQ ID NO: 5294 - DNA, 203 bp, Artificial sequence
  synthetic
ggcgcgccagtcctctagaacactgggaggatgtccagcgcaccgcgtccaatcagtccgtagatgtcaagaagagacgctgggtcaccttctgctctgccgagtggccaactttcggtgtagggtggccacaagatggtacttttaacttggacattattctacaggttaaatctaaggtgttctctcgactcggaccgatg

SEQ ID NO: 5295 - DNA, 203 bp, Artificial sequence
  synthetic
ggcgcgccagtcctcctggtccccacggacacccggatcaggtcccatatattgtcacctgggaggctattgcctatgaaccccctccgtgggtaaaaccttttgtctctcccaaactctccccctctccaaccgctcccatcctcccatccggtccttcgactcaacctccgccccgatctgcccttcgactcggaccgatg

SEQ ID NO: 5296 - DNA, 203 bp, Artificial sequence
  synthetic
ggcgcgccagtccttaccctgctcttaccccctctataaaacccggaccttctccgataatggcggacctctcactgaccttctctcagaagaccctccgccgtacggaggacagggaccgtcctcctctgacggagatggcgacagagaagaggccacctccacttctgagattcctgccccctctccgactcggaccgatg

SEQ ID NO: 5297 - DNA, 203 bp, Artificial sequence
  synthetic
ggcgcgccagtcctaaactgactacattgattgaatctgtcctcaccacccaccagcccacctgggatgattgccagcaattattagggactctgcttaccggggaggagaagcagcgggtgctcctggaagcccgaaaagctgtccggggcaacgatgggcgccccacccaactgcccaacgaggttcgactcggaccgatg

SEQ ID NO: 5298 - DNA, 203 bp, Artificial sequence
  synthetic
ggcgcgccagtcctagggaagctgaagagatctttaataaatgagaaaccccggaagaaagagagagaaggagagggaccgcagaagacatagagaaatgagtaagttgctggctgctgtcgttagcgggcagagacaggatagacagggaggagagcgaaggaggccccaactcgaccacgaccagtcgactcggaccgatg

SEQ ID NO: 5299 - DNA, 203 bp, Artificial sequence
  synthetic
ggcgcgccagtcctaccttcctagtggatactggggcccaacactccgtgctgacccaaaatcctggacccctaagtgacaagtctgcctgggtccaaggggctactggaagaaagcggtatcgctggaccacggatcgccaggtgcacctagccaccgggtttcaaaaacagtcccaccctgtttgacgactcggaccgatg

SEQ ID NO: 5300 - DNA, 203 bp, Artificial sequence
  synthetic
ggcgcgccagtcctagcccaaaattgccagaaacaggtcaagtatctggggtatcttctaaaagagggtcagggatggctgactgaggccagaaaagagactgtgatggggcagcctactccaaagacccctcgacaactaagggagttcctagggacggcaggcttctgtcgcctctggatccccggcgactcggaccgatg

SEQ ID NO: 5301 - DNA, 203 bp, Artificial sequence
  synthetic
ggcgcgccagtcctgtttgcagaaatggcagcccccttgtaccctctcaccaaaacggggactctgtttaaatggggcccagaccagcaaaaggcctaccaagagatcaagcaggctctcttaactgcccctgccctgggattaccagacttgactaagcccttcgaactttttgttgaccaaagacacgactcggaccgatg

SEQ ID NO: 5302 - DNA, 203 bp, Artificial sequence
  synthetic
ggcgcgccagtcctggaatactccgggcccccatggacttactccgtatgaaattctgtatggggcacccccgccccttgtcaattttcatgatcctgaaatgtcaaagttaactaatagtccctctctccaagctcacttacaggccctccaagcagtacaacgagaggtctggaagccactggccgcgactcggaccgatg

SEQ ID NO: 5303 - DNA, 203 bp, Artificial sequence
  synthetic
ggcgcgccagtcctctgcttatcaggaccagctggatcagccagtgataccacaccccctccgtgtcggtgacgccgtgtgggtacgccggcaccagactaagaacttagaaccccgctggaaaggaccctacaccgtcctgctgaccacccccaccgctctcaaagtagacggcatctctgcggggacgactcggaccgatg

SEQ ID NO: 5304 - DNA, 203 bp, Artificial sequence
  synthetic
ggcgcgccagtcctcgacccggtgacccggttctctttgacccgccaggtcctcaatatagggccccgcatccccattgggcctaatcccgtgatcattggccaactacccccctcccgacccgtgcaggtcaggctccccaggcctcctcagcctcctcctacaggcgcagcctctatggtccctggcgactcggaccgatg

SEQ ID NO: 5305 - DNA, 203 bp, Artificial sequence
  synthetic
ggcgcgccagtcctgactgccccaccttctcaacaaccggggacgggagacaggttactaaatctagtacagggagcttaccaggcactcaaccttaccaaccctgataaaacccaagagtgctggttatgcctagtgtctggacccccctattacgagggggttgcggtcctaggcactaattctaacgactcggaccgatg

SEQ ID NO: 5306 - DNA, 203 bp, Artificial sequence
  synthetic
ggcgcgccagtccttcatacctctgccctaaaagaaaaatgttgtttctatgctgaccatacaggcctagtaagagatagtatggccaaattaagaaagagactcactcagagacaaaaactatttgagtcgagccaaggatggttcgaaggatcgtttaacagatccccctggtttaccacgttgatcgactcggaccgatg

SEQ ID NO: 5307 - DNA, 203 bp, Artificial sequence
  synthetic
ggcgcgccagtcctacaagatatctgcggtaagcagtttcggccccggcccggggccaagaacagatggtccccagatatggcccaaccctcagcagtttcttaagacccatcagatgtttccaggctcccccaaggacctgaaatgaccctgtgccttatttgaattaaccaatcagcccgcttctccgactcggaccgatg

SEQ ID NO: 5308 - DNA, 203 bp, Artificial sequence
  synthetic
ggcgcgccagtccttatgcgcctgcgtcggtactagttagctaactagctctgtatctggcggacccgtggtggaactgacgagttcggaacacccggccgcaaccctgggagacgtcccagggacttcgggggccgtttttgtggcccgacctgagtccaaaaatcccgatcgttttggactctttgcgactcggaccgatg

SEQ ID NO: 5309 - DNA, 203 bp, Artificial sequence
  synthetic
ggcgcgccagtcctgtgcaccccccttagaggagggatatgtggttctggtaggagacgagaacctaaaacagttcccgcctccgtctgaatttttgctttcggtttgggaccgaagccgcgccgcgcgtcttgtctgctgcagcatcgttctgtgttgtctctgtctgactgtgtttctgtatttgtcgactcggaccgatg

SEQ ID NO: 5310 - DNA, 203 bp, Artificial sequence
  synthetic
ggcgcgccagtcctctgagaatatgggccagactgttaccactcccttaagtttgaccttaggtcactggaaagatgtcgagcggatcgctcacaaccagtcggtagatgtcaagaagagacgttgggttaccttctgctctgcagaatggccaacctttaacgtcggatggccgcgagacggcacctcgactcggaccgatg

SEQ ID NO: 5311 - DNA, 203 bp, Artificial sequence
  synthetic
ggcgcgccagtcctgaagccccaccaatttggccaaggtaaaaggaataacacaagggcccaatgagtctccctcggccttcctagagagacttaaggaagcctatcgcaggtacactccttatgaccctgaggacccagggcaagaaactaatgtgtctatgtctttcatttggcagtctgccccagcgactcggaccgatg

SEQ ID NO: 5312 - DNA, 203 bp, Artificial sequence
  synthetic
ggcgcgccagtcctaaccacgaggacctcggggaccaagaccccagacctccctcctgaccctagatgactagggaggtcagggtcaggagcccccccctgaacccaggataaccctcaaagtcggggggcaacccgtcaccttcctggtagatactggggcccaacactccgtgctgacccaaaatccgactcggaccgatg

SEQ ID NO: 5313 - DNA, 203 bp, Artificial sequence
  synthetic
ggcgcgccagtcctaaaccgggggcatgggactggcagttcgccaagctcctctgatcatacctctgaaagcaacctctacccccgtgtccataaaacaataccccatgtcacaagaagccagactggggatcaagccccacatacagagactgttggaccagggaatactggtaccctgccagtccccgactcggaccgatg

SEQ ID NO: 5314 - DNA, 203 bp, Artificial sequence
  synthetic
ggcgcgccagtcctacttccggatccagcacccagacttgatcctgctacagtacgtggatgacttactgctggccgccacttctgagctagactgccaacaaggtactcgggccctgttacaaaccctagggaacctcgggtatcgggcctcggccaagaaagcccaaatttgccagaaacaggtcacgactcggaccgatg

SEQ ID NO: 5315 - DNA, 203 bp, Artificial sequence
  synthetic
ggcgcgccagtcctagtatctggggtatcttctaaaagagggtcagagatggctgactgaggccagaaaagagactgtgatggggcagcctactccgaagacccctcgacaactaagggagttcctagggacggcaggcttctgtcgcctctggatccctgggtttgcagaaatggcagcccccttgtcgactcggaccgatg

SEQ ID NO: 5316 - DNA, 203 bp, Artificial sequence
  synthetic
ggcgcgccagtccttggccgaagcccacggaacccgacccgacctaacggaccagccgctcccagacgccgaccacacctggtacacggatggaagcagtctcttacaagagggacagcgtaaggcgggagctgcggtgaccaccgagaccgaggtaatctgggctaaagccctgccagccgggacatcgactcggaccgatg

SEQ ID NO: 5317 - DNA, 203 bp, Artificial sequence
  synthetic
ggcgcgccagtcctaaaattcatcaccctacacctcagaacattttcattacacagtgactgatataaaggacctaaccaagttgggggccatttatgataaaacaaagaagtattgggtctaccaaggaaaacctgtgatgcctgaccagtttacttttgaattattagactttcttcatcagctgacgactcggaccgatg

SEQ ID NO: 5318 - DNA, 203 bp, Artificial sequence
  synthetic
ggcgcgccagtcctcgcttgcaactggctctagagactgggtgctcctactccccttagccctgtaccgagcccgcaacacgccgggcccccatggcctcaccccatatgagatcttatatggggcacccccgccccttgtaaacttccctgaccctgacatgacaagagttactaacagcccctctccgactcggaccgatg

SEQ ID NO: 5319 - DNA, 203 bp, Artificial sequence
  synthetic
ggcgcgccagtccttccaagctcacttacaggctctctacttagtccagcacgaagtctggagacctctggcggcagcctaccaagaacaactggaccgaccggtggtacctcacccttaccgagtcggcgacacagtgtgggtccgccgacaccagactaagaacctagaacctcgctggaaaggaccgactcggaccgatg

SEQ ID NO: 5320 - DNA, 203 bp, Artificial sequence
  synthetic
ggcgcgccagtccttacatttgggatccgactcagataccaaaatctaggaccccgcgtcccaatagggccaaaccccgttctggcagaccaacagccactctccaagcccaaacctgttaagtcgccttcagtcaccaaaccacccagtgggactcctctctcccctacccaacttccaccggcgggcgactcggaccgatg

SEQ ID NO: 5321 - DNA, 203 bp, Artificial sequence
  synthetic
ggcgcgccagtcctaacggaaaataggctgctaaacttagtagacggagcctaccaagccctcaacctcaccagtcctgacaaaacccaagagtgctggttgtgtctagtagcgggacccccctactacgaaggggttgccgtcctgggtacctactccaaccatacctctgctccagccaactgctccgactcggaccgatg

SEQ ID NO: 5322 - DNA, 203 bp, Artificial sequence
  synthetic
ggcgcgccagtcctactgtttaacagatccccttggtttaccaccttgatatctaccattatgggacccctcattgtactcctaatgattttgctcttcggaccctgcattcttaatcgattagtccaatttgttaaagacaggatatcagtggtccaggctctagttttgactcaacaatatcaccacgactcggaccgatg

SEQ ID NO: 5323 - DNA, 203 bp, Artificial sequence
  synthetic
ggcgcgccagtcctgtccagccctcagcagtttctagagaaccatcagatgtttccagggtgccccaaggacctgaaatgaccctgtgccttatttgaactaaccaatcagttcgcttctcgcttctgttcgcgcgcttctgctccccgagctcaataaaagagcccacaacccctcactcggggcgccgactcggaccgatg

SEQ ID NO: 5324 - DNA, 203 bp, Artificial sequence
  synthetic
ggcgcgccagtcctcagtcctccgattgactgagtcgcccgggtacccgtgtatccaataaaccctcttgcagttgcagcgccagtcctccgattgactgagtcgcccgggtacccgtgtatccaataaaccctcttgcagttgcatccgacttgtggtctcgctgttccttgggagggtctcctctgcgactcggaccgatg

SEQ ID NO: 5325 - DNA, 203 bp, Artificial sequence
  synthetic
ggcgcgccagtcctccttgggagggtctcctctgagtgattgactacccgtcagcgggggtctttcatttgggggctcgtccgggatcgggagacccctgcccagggaccaccgacccaccaccgggaggtaagctggccagcaacttatctgtgtctgtccgattgtctagtgtctatgactgatttcgactcggaccgatg

SEQ ID NO: 5326 - DNA, 203 bp, Artificial sequence
  synthetic
ggcgcgccagtcctattcccaataaagcctcttgctgtttgcatccgaatcgtggtctcgctgttccttgggagggtctcctctgagtgattgactacccacgacgggggtctttcatttgggggctcgtccgggatttggagacccctgcccagggaccaccgacccaccaccgggaggtaagctggcgactcggaccgatg

SEQ ID NO: 5327 - DNA, 203 bp, Artificial sequence
  synthetic
ggcgcgccagtcctccagcaacttatctgtgtctgtccgattgtctagtgtctatgtttgatgttatgcgcctgcgtctgtactagttagctaactagctctgtatctggcggacccgtggtggaactgacgagttctgaacacccggccgcaaccctgggagacgtcccagggactttgggggccgtcgactcggaccgatg

SEQ ID NO: 5328 - DNA, 203 bp, Artificial sequence
  synthetic
ggcgcgccagtcctttttgtggcccgacctgaggaagggagtcgatgtggaatccgaccccgtcaggatatgtggttctggtaggagacgagaacctaaaacagttcccgcctccgtctgaatttttgctttcggtttggaaccgaagccgcgcgtcttgtctgctgcagcatcgttctgtgttgtctcgactcggaccgatg

SEQ ID NO: 5329 - DNA, 203 bp, Artificial sequence
  synthetic
ggcgcgccagtcctcgtcggatggccgcgagacggcacctttaaccgagacctcatcacccaggttaagatcaaggtcttttcacctggcccgcatggacacccagaccaggtcccctacatcgtgacctgggaagccttggcttttgacccccctccctgggtcaagccctttgtacaccctaagcccgactcggaccgatg

SEQ ID NO: 5330 - DNA, 203 bp, Artificial sequence
  synthetic
ggcgcgccagtccttccgcctcctcttcttccatccgcgccgtctctcccccttgaacctcctctttcgaccccgcctcaatcctccctttatccagccctcactccttctttgggcgccaaacctaaacctcaagttctttctgacagtggggggccgctcatcgacctacttacagaagacccccccgactcggaccgatg

SEQ ID NO: 5331 - DNA, 203 bp, Artificial sequence
  synthetic
ggcgcgccagtcctgccttatagggacccaagaccacccccttccgacagggacggagatagtggagaagcgacccctgcgggagaggcaccggacccctccccaatggcatctcgcctgcgtgggagacgggagccccctgtggccgactccactacctcgcaggcattccccctccgcacaggaggcgactcggaccgatg

SEQ ID NO: 5332 - DNA, 203 bp, Artificial sequence
  synthetic
ggcgcgccagtcctcggggaagaaaaacaacgggtgctcttagaggctagaaaggcggtgcggggcgatgatgggcgccccactcaactgcccaatgaagtcgatgccgcttttcccctcgagcgcccagactgggagtacaccacccaggcaggtaggaaccacctagtccactatcgccagttgctcgactcggaccgatg

SEQ ID NO: 5333 - DNA, 203 bp, Artificial sequence
  synthetic
ggcgcgccagtcctacgccgtaggacagaggatgagcagaaagagaaagaaagagatcgtaggagacatagagagatgagcaggctattggccactgtcgttagtggacagagacaggatagacaggaaggagaacgaaggaggtcccaactcgactgcgaccagtgtacctactgcgaagaacaaggcgactcggaccgatg

SEQ ID NO: 5334 - DNA, 203 bp, Artificial sequence
  synthetic
ggcgcgccagtcctgcactgggctaaagattgtcccaagagaccacgaggacctcggggaccaagaccccagacctccctcctgaccctagatgactagggaggtcagggtcaggagcccccccctgaacccaggataaccctcaaagtcggggggcaacccgtcaccttcctggtagatactggggccgactcggaccgatg

SEQ ID NO: 5335 - DNA, 203 bp, Artificial sequence
  synthetic
ggcgcgccagtccttccaaacagctagacccagtagcagctgggtgacccccttgcctacggatggtagcagccattgccgtactgacaaaggatgcaggcaagctaaccatgggacagccactagtcattctggccccccatgcagtagaggcactagtcaaacaaccccccgaccgctggctttcccgactcggaccgatg

SEQ ID NO: 5336 - DNA, 203 bp, Artificial sequence
  synthetic
ggcgcgccagtcctaacgcccggatgactcactatcaggccttgcttttggacagggaccgggtccagttcagaccggtggtagccctgaacccggctacgctgctcccactgcctgagaaagggctgcaacacaactgccttgatatcctggccgaagctcatggaacccgacccgacctaagggaccgactcggaccgatg

SEQ ID NO: 5337 - DNA, 203 bp, Artificial sequence
  synthetic
ggcgcgccagtcctcagccgctcccagacgccgaccacacctggtacacggatggaagcagtcttttacaagagggacagcgtaaggcgggagctgcggtgaccaccgagaccgagaagccttcccaaccaagaaaaaaaaccgccaaggtcgtaaatcttccccaggttcggcatgcttcaggtattcgactcggaccgatg

SEQ ID NO: 5338 - DNA, 203 bp, Artificial sequence
  synthetic
ggcgcgccagtccttagggactgggtgctcctactccccttagccctgtatcgagcccgcaacacgccgggcccccatggcctcaccccatatgagatcttatgtggggcacccccgccccttgtaaacttccctgaccctgacatgacaagagttactaacagcccctctctccaagctcacatacacgactcggaccgatg

SEQ ID NO: 5339 - DNA, 203 bp, Artificial sequence
  synthetic
ggcgcgccagtccttaatgccttcgcctctaagcctgtgtcgctacctccctcgtgagctgtcgccatcggtagactcgcggtcctgcagcattcctttggtggccccgaggaaggcagggaagctcttcctggggaccactcctcctcgggctcccggactgccacgccggctggcctggttctccacgactcggaccgatg

SEQ ID NO: 5340 - DNA, 203 bp, Artificial sequence
  synthetic
ggcgcgccagtcctgccacgacaacatagttcgggttgtggctgccagcacgcgcacgcccgaagactccaacagcctaggtaccataatcatggagtttgggggcaacgtgactctacaccaagtcatctacgatgccacccgctcaccggagcctctcagctgcagaaaacaactaagtttggggacgactcggaccgatg

SEQ ID NO: 5341 - DNA, 203 bp, Artificial sequence
  synthetic
ggcgcgccagtcctcccctccccacatagggggcacgtacacgcaccaagctccggagatcctaaaaggagagattgccacgcccaaagctgacatctactcttttggaatcaccctgtggcagatgactaccagagaggtgccttactccggcgaacctcagtacgtgcagtatgcagtggtagcctcgactcggaccgatg

SEQ ID NO: 5342 - DNA, 203 bp, Artificial sequence
  synthetic
ggcgcgccagtcctacaatctgcgtccctcactggcaggagcggtgttcaccgcctccctgactggaaaggcactgcagaacatcatccagagctgctgggaggcccgcggcctgcagaggccgagtgcagaactgctccaaagggacctcaaggctttccgagggacactaggctgactccatcgagcgactcggaccgatg

SEQ ID NO: 5343 - DNA, 203 bp, Artificial sequence
  synthetic
ggcgcgccagtcctagtttctagtgaatcatcagatgtttccagggtgccccaaggacctgaaaatgaccctgtaccttatttgaactaaccaatcagttcgcttctcgcttctgttcgcgcgcttccgctctccgagctcaataaaagagcccacaacccctcactccgcgcgccagtcttccgatacgactcggaccgatg

SEQ ID NO: 5344 - DNA, 203 bp, Artificial sequence
  synthetic
ggcgcgccagtcctcactttgcaaggcatggaaaaatacataactgagaatagaaaagttcagatcaaggtcaggaacaaagaaacagctgaataccaaacaggatatctgtggtaagcggttcctgccccggctcagggccaagaacagatgagacagctgagtgatgggccaaacaggatatctgtcgactcggaccgatg

SEQ ID NO: 5345 - DNA, 203 bp, Artificial sequence
  synthetic
ggcgcgccagtccttttccagggtgccccaaggacctgaaaatgaccctgtaccttatttgaactaaccaatcagttcgcttctcgcttctgttcgcgcgcttccgctctccgagctcaataaaagagcccacaacccctcactccgcgcgccagtcttccgatagactgcgtcgcccgggtacccgtcgactcggaccgatg

SEQ ID NO: 5346 - DNA, 203 bp, Artificial sequence
  synthetic
ggcgcgccagtcctggagagatcagagcactcttgggagtggaagctcccgggtctctcctgcctgactgtggagacaataaaggagttactttacaactgcgctagcctggttattatcgggattcgtcactaattctgtgcaacaccagagcggatctcgcagctggcgcccaacgtggggctcgacgactcggaccgatg

SEQ ID NO: 5347 - DNA, 203 bp, Artificial sequence
  synthetic
ggcgcgccagtcctgaaaagaagacagcagtccgcagaaatcaggagaagaagagtcatggaaggagttatgggacctcggactttgctgttgtaaagagaaaccagcgcgcagcggaagagcggagacacggacaaaagggaaacaaaaacttcggggacgcctgaagtaaggtaagagagacacctcgactcggaccgatg

SEQ ID NO: 5348 - DNA, 203 bp, Artificial sequence
  synthetic
ggcgcgccagtcctgaaaaaatgcaagcatgtcgggacgtaggatcagaaggatttaaaatgcagctgttagcacaggcattgagaccgccacggaaggaaggaaaacagggagtacaaaaatgctattactgcgggaaaccaggacatctcgcaaggcaatgcagacaaggaataatatgtcatcatcgactcggaccgatg

SEQ ID NO: 5349 - DNA, 203 bp, Artificial sequence
  synthetic
ggcgcgccagtcctgatggaagttgagtccctcagtgtatcaatttacaatgcaagaaatattaagggattggatagcgaaacatcctatgatacaatttggaatatacatggatgatatttatatagggagtgatttggatataatgaaacacagagagatagtagaagaactagctagctatattgcgactcggaccgatg

SEQ ID NO: 5350 - DNA, 203 bp, Artificial sequence
  synthetic
ggcgcgccagtcctcccagtatggatttatgttaccagaagaaaagagacaagaagggtatccagcaaagtggcttggatttgaattgcacccagagaaatggagatttcagaaacatacacttccagaaataaaggaagggaccataacattaaataaattacaaaaattagtaggagatttagtctcgactcggaccgatg

SEQ ID NO: 5351 - DNA, 203 bp, Artificial sequence
  synthetic
ggcgcgccagtcctggagacaatcattaataggaaaaagcatacctaatatactaaagttaatggaaggggatagggcgctccaaagtgaaagaaggatagagctcagacatgtaaaggaatgggaggaatgtagaagaaaattagcagaaatggaaggaaattactatgatgaagagaaggatgtatcgactcggaccgatg

SEQ ID NO: 5352 - DNA, 203 bp, Artificial sequence
  synthetic
ggcgcgccagtcctagaatggaaaaggaagtctaggattcattgcctctacaggcgttaaatttagaaaacacgaagagggaacaaatcaacaattagaattaagagcaatagaagaggcgtgcaaacagggaccagagaaaatgaatatagtaacagatagcagatatgcatatgaatttatgagaacgactcggaccgatg

SEQ ID NO: 5353 - DNA, 203 bp, Artificial sequence
  synthetic
ggcgcgccagtcctaagggggaataatagattcaggatatcaaggcattatacaggtagtagtatataacagcaatgacaaggaagtcattatcccacaagggagaaaatttgcacaattaattctcatgcctttaatacatgaagacctagaagcttggggggaaactagaaggacagaaagaggaacgactcggaccgatg

SEQ ID NO: 5354 - DNA, 203 bp, Artificial sequence
  synthetic
ggcgcgccagtcctaccaaggatttggatcaacgggagcatattggattgaaaatattcccctagcagaggaagatcacagtaaatggcatcaagatgctgggtcattacacttagactttgggataccccgaactgcagctgaggatattgtacaacaatgtgaagtatgtcaagaaaataaaatgccgactcggaccgatg

SEQ ID NO: 5355 - DNA, 203 bp, Artificial sequence
  synthetic
ggcgcgccagtccttttgttattacagagtcaggaaaagaggacacccaggcgagtggctgggaccaacacaggtactctgggaaggggaaggagcaatcgtaataaaagataaaaatctagaaaagtatttagtcatagcaaaaaaggatgttaagttcataccgcaaccaaaagaaatacaaacagcgactcggaccgatg

SEQ ID NO: 5356 - DNA, 203 bp, Artificial sequence
  synthetic
ggcgcgccagtcctaatgaggaaacagagagacgaagaagaaaaacaaaatttggtaacaggtaaggaaaaatcttgggtaagtattgacctcctggggaccaaacaagaagggaaaaggcagaaggtaaacatatggggaccatgggaaaaatggggaattaaaatagtatgggtaatgctatgggtcgactcggaccgatg

SEQ ID NO: 5357 - DNA, 203 bp, Artificial sequence
  synthetic
ggcgcgccagtccttgctatcatggctataatagctgctgcaggagctggactcggcgttgctaatgccgtgcagcaatcctacaccaggacggctgttcagtctcttgctaacgcaactgctgctcagcagaatgtgttagaagcaacttatgccatggttcagcatgtggcaaaaggggtaagaatcgactcggaccgatg

SEQ ID NO: 5358 - DNA, 203 bp, Artificial sequence
  synthetic
ggcgcgccagtcctggccaccaataaaggacctgatcacgcacagaacatgcatggctgcaccaatggggtagctgatcatgagctaaacactcgtctcccagcctatcagaactacttcccctttcccctctctacccgctcccctccctatataaggaacccattttgaaataaactttgcagcttcgactcggaccgatg

SEQ ID NO: 5359 - DNA, 203 bp, Artificial sequence
  synthetic
ggcgcgccagtcctttcactgggcttcagaatgccgttctcgattagacattaatggacaacccattattaagcagggaaacttgaacaggggccagccccagggccccactaccgggatgaactccggggcttcacagttcaccccccaataccgccagccaacccctgccctcccagtaatcaacccgactcggaccgatg

SEQ ID NO: 5360 - DNA, 203 bp, Artificial sequence
  synthetic
ggcgcgccagtcctacgccgctacgtcacagacctctggcgagcaacagcgggcagtgcaggactggacctctgtaccaccaccgacacaatactaaccacccaaaatagccctctgacacttccagttggaatatatggacccttaccaccccagacattcggcctcatattagcagagccagctctcgactcggaccgatg

SEQ ID NO: 5361 - DNA, 203 bp, Artificial sequence
  synthetic
ggcgcgccagtcctaaccgttgctactcacctgcgcggtattggccaggccaccaacccccaacaaagtgctcaaatgcttaagtgggaggactctgaaggcaataatggtcacattaccccttatgtcctccccaatctgccagtcaatctctggggaagggacatcctctctcaaatgaaacttgtcgactcggaccgatg

SEQ ID NO: 5362 - DNA, 203 bp, Artificial sequence
  synthetic
ggcgcgccagtcctttaagaaaaaatcaggtagctggcgtcttttacaggatctaagagccgttaataaggtaatggtccccatgggagcccttcagcctggtcttccctctcctgtagccatccccctaaactatcacaaaattgttattgaccttaaggattgtttctttaccatccccttacacccgactcggaccgatg

SEQ ID NO: 5363 - DNA, 203 bp, Artificial sequence
  synthetic
ggcgcgccagtcctctgaagacagaccttactttgcctttagcgtccctcaaatcaacttccaaagtcctatgcctcgttatcagtggaaggttctgccacagggcatggccaacagtcccacactgtgccaaaaatttgttgctgccgccattgccccagtaagatcccagtggccagaggcctatacgactcggaccgatg

SEQ ID NO: 5364 - DNA, 203 bp, Artificial sequence
  synthetic
ggcgcgccagtcctccctcctttggctccatctacctgcctccccatcaaaagtcttactcacctacccctcgctcctcgccatgttaattattaagggtcggtacactggccgccaactgtttggcagggacccccactctataatcattccatacacccaggaccaattaacctggctcctgcaaacgactcggaccgatg

SEQ ID NO: 5365 - DNA, 203 bp, Artificial sequence
  synthetic
ggcgcgccagtcctgaattgctgcatatgttattgataatcaacccatctcaataaaatccccctacctgtcagctcaacttgttgagctctatgctattctccaggtgttcacagttctagctcaccaaccgtttaacttgtacactgacagtgcgtatattgctcaatcagtccctcttttggagacgactcggaccgatg

SEQ ID NO: 5366 - DNA, 203 bp, Artificial sequence
  synthetic
ggcgcgccagtccttcaccagtgtttggaagggccctgaccctgtcctcatatgggggcgaggctcagcctgcatatacgatcaaaaggaggatggcccccgctggctccctgagcgactaattagacacatcaataatcagacagcccccttgtgtgacaggccaagtaacccaaatacagccccagcgactcggaccgatg

SEQ ID NO: 5367 - DNA, 203 bp, Artificial sequence
  synthetic
ggcgcgccagtcctcggatgcgatggcacggttggaaaatcggtttgttggaatcagcaagcccctattcacgtctccgacggtggcggaccccaagatgctgtgagagagctttatgtacaaaaacaaatagagcttgttattcaaagccaattccctaagttatcctaccaccccctagctcgctccgactcggaccgatg

SEQ ID NO: 5368 - DNA, 203 bp, Artificial sequence
  synthetic
ggcgcgccagtcctaaaaccaagaggacctgacattgatgcacaaatgcttgatattctgtcagccacccaccaggccctcaatatctccaaccccagcctagcccaaaattgctggttatgcttaaatcaaggtacctccatgcccctagccttccctgtcaatatatctagttttaatgcctcacacgactcggaccgatg

SEQ ID NO: 5369 - DNA, 203 bp, Artificial sequence
  synthetic
ggcgcgccagtcctccaagcttttgtttgcggcaacaacctcgcctttactgctctgcctgcaaactggacagggtcatgtgtgttagccgccctcctgccagatatagacattatttctggtgatgaccctgtccctatccctacctttgactatattgcagggcggcagaaacgagccgttacactcgactcggaccgatg

SEQ ID NO: 5370 - DNA, 203 bp, Artificial sequence
  synthetic
ggcgcgccagtcctgattcccctgctagtaggattgggtgtctctacagcagtcgctaccggtacagcaggactcggggtggctgttcaatcttacacaaaactttcccatcaacttattaacgacgtccaagccttgtctagcaccattaatgacttacaggaccaactagattccctagccgaagtcgactcggaccgatg

SEQ ID NO: 5371 - DNA, 203 bp, Artificial sequence
  synthetic
ggcgcgccagtcctcttcctcaccggcctcaatggacttctcccttacctcctccccttccttggacccttattcgctatcatcctgttcttctcttttgccccttggatcctaagacgagtaacagcgttaatcagggatcagctcaattccctactgggaaagcccatacaaatccactatcaccacgactcggaccgatg

SEQ ID NO: 5372 - DNA, 203 bp, Artificial sequence
  synthetic
ggcgcgccagtccttggcttgcatagaggttggtactcgaaaaatcctctcctcccaaaaaggtacctgtaagcctgaaaattaaggctcaggaggagcacagcctctacctcccctagctggttaaggtccgcctcctctttttttaaagaaaaagggaggagatgttgggaacccaggctaagctgcgactcggaccgatg

SEQ ID NO: 5373 - DNA, 203 bp, Artificial sequence
  synthetic
ggcgcgccagtccttttgaaaaagccctgtataactctaggaaaggctcccgatttaaataaagcatacaagtcagttttatcatgcatgagcgccgccaaacttgatcctgacgatgtatgttcctatttggcggcggcaatgcagttttttgaggggacatgtccggaagactggaccagctatggcgactcggaccgatg

SEQ ID NO: 5374 - DNA, 203 bp, Artificial sequence
  synthetic
ggcgcgccagtcctaaatgcaacggttattgctgcatgtgctcctcatgaaatgtctgttctagggggctatctgggagaggaattcttcgggaaagggacatttgaaagaagattcttcagagatgagaaagaacttcaagaatacgaggcggctgaactgacaaagactgacgtagcactggcagacgactcggaccgatg

SEQ ID NO: 5375 - DNA, 203 bp, Artificial sequence
  synthetic
ggcgcgccagtcctcaaccctccaggaaagtcttcagaggataaatcaacccagactaccggccgagagctcaagaaggagacaacacccactccttctcagagagaaagccaatcctcgaaagccaggatggcggctcaaactgcttctggccctccagcccttgaatggtcggccaccaatgaagacgactcggaccgatg

SEQ ID NO: 5376 - DNA, 203 bp, Artificial sequence
  synthetic
ggcgcgccagtcctgggtcttccctggcgggaattgctcaggagtagcggtgtcttctacctactgctccactaaccacgattacaccatttggatgcccgagaatccgagactagggatgtcttgtgacatttttaccaatagtagagggaagagagcatccaaagggagtgagacttgcggctttgcgactcggaccgatg

SEQ ID NO: 5377 - DNA, 203 bp, Artificial sequence
  synthetic
ggcgcgccagtcctatgctcactacaagtcagtcagaacttggaatgagatcatcccttcaaaagggtgtttaagagttggggggaggtgtcatcctcatgtaaacggggtatttttcaatggtataatattaggacctgacggcaatgtcttaatcccagagatgcaatcatccctcctccagcaaccgactcggaccgatg

SEQ ID NO: 5378 - DNA, 203 bp, Artificial sequence
  synthetic
ggcgcgccagtccttactgagtgcaggggccctgactgccttgatgttgataattttcctgatgacatgctggagaagagtcaatcgatcggaacctacacaacacaatctcagagggacagggagggaggtgtcagtcactccccaaagcgggaagatcatatcttcatgggaatcatacaagagcgcgactcggaccgatg

SEQ ID NO: 5379 - DNA, 203 bp, Artificial sequence
  synthetic
ggcgcgccagtcctttgccaacacgtattcctcttacttgttcttccatgtaatcaccttatacatgaacgccctagactgggatgaagaaaagaccatcctagcattatggaaagatttaacctcagtggacatcgggaaggacttggtaaagttcaaagaccaaatatggggactgctgatcgtgacgactcggaccgatg

SEQ ID NO: 5380 - DNA, 203 bp, Artificial sequence
  synthetic
ggcgcgccagtcctcaaaggactttgtttactcccaaagttccaattgtctttttgacagaaactacacacttatgctaaaagatcttttcttgtctcgcttcaactccttaatggtcttactttctcccccagagccccgatactcagatgacttgatatctcagctatgccagctgtacattgctgcgactcggaccgatg

SEQ ID NO: 5381 - DNA, 203 bp, Artificial sequence
  synthetic
ggcgcgccagtcctggcacaagctcccgatcacgcaaatctttgagattcctgaatcaatggatccatcagaaatattggatgacaaatcacattctttcaccagaacgagactagcttcttggctgtcagaaaaccgaggggggcctgttcctagcgaaaaagttattatcacggccctgtctaagccgactcggaccgatg

SEQ ID NO: 5382 - DNA, 203 bp, Artificial sequence
  synthetic
ggcgcgccagtcctatggccaggatggcgggctagaaggcttacggcagaagggctggagtctagtcagcttattgatgatagatagagaatctcaaatcaggaacacaagaaccaaagtactagctcaaggagacaaccaggttttatgtccgacatatatgttgtcgccagggctatctcaagaggcgactcggaccgatg

SEQ ID NO: 5383 - DNA, 203 bp, Artificial sequence
  synthetic
ggcgcgccagtcctagtccaaaagatgggccagagtctcttgcgtctctaatgaccaaatagtcaacctcgccaatataatgtcgacagtgtccaccaacgcgctaacagtggcacaacactctcaatctttgatcaaaccgatgagggattttctgctcatgtcagtacaggcagtctttcactacccgactcggaccgatg

SEQ ID NO: 5384 - DNA, 203 bp, Artificial sequence
  synthetic
ggcgcgccagtcctggttatccttctggagagagatctggttaagctcccacgagtcctggattcacgcgttgtgtcaagaggctggaaacccagatcttggagagagaacactcgagagcttcactcgccttctagaagatcctaccaccttaaatatcagaggaggggccagtcctaccattctaccgactcggaccgatg

SEQ ID NO: 5385 - DNA, 203 bp, Artificial sequence
  synthetic
ggcgcgccagtccttgggaatccccgagtcaatcattggactgatacaaaactcccgaacgataagaaggcagtttagaaagagtctctcaaaaactttagaagaatccttctacaactcagagatccacgggattagtcggatgacccagacacctcagagggttgggggggtgtggccttgctcttcgactcggaccgatg

SEQ ID NO: 5386 - DNA, 203 bp, Artificial sequence
  synthetic
ggcgcgccagtcctatcagtcatttttttgcacggggcccctaaaggggtacttgggctcgtccacctctatgtcgacccagctattccatgcatgggaaaaagtcactaatgttcatgtggtgaagagagctctatcgttaaaagaatctataaactggttcattactagagattccaacttggctccgactcggaccgatg

SEQ ID NO: 5387 - DNA, 203 bp, Artificial sequence
  synthetic
ggcgcgccagtcctttaatagacctcttgaattgatctcaggggtaatctcatatattctcctgaggctagataaccatccctccttgtacataatgctcagagaaccgtcttttagagaagagatattttctatccctcagaaaatccccgccgcttatccaaccactatgaaagaaggcaacagatcgactcggaccgatg

SEQ ID NO: 5388 - DNA, 203 bp, Artificial sequence
  synthetic
ggcgcgccagtcctctggagattacagccccaacaagaaggtgtcccgtaaggtaggatgttcagaatgggtctgctctgctcaacaggttgcagtctctacctcagcaaacccggcccctgtctcggagcttgacataagggccctctctaagaggttccagaaccctttgatctcgggcttgagagcgactcggaccgatg

SEQ ID NO: 5389 - DNA, 203 bp, Artificial sequence
  synthetic
ggcgcgccagtccttggttcagtgggcaaccggtgctcattataagcttaagcctattctagatgatctcaatgttttcccatctctctgccttgtagttggggacgggtcaggggggatatcaagggcagtcctcaacatgtttccagatgccaagcttgtgttcaacagtcttttagaggtgaatgcgactcggaccgatg

SEQ ID NO: 5390 - DNA, 203 bp, Artificial sequence
  synthetic
ggcgcgccagtcctaaagcgggccatcgtagccgtgatacccagacctgtgttcacgcagatgcaggtcagtgatcacccagcactccacgcaatttcgcggtatacccgccgccattggatcgagtggggccctaaagaagccctacacgtcctcatcgacccaagcccgggcctgctccgcgaggtcgactcggaccgatg

SEQ ID NO: 5391 - DNA, 203 bp, Artificial sequence
  synthetic
ggcgcgccagtcctcggcggttgccccgccgattgccgcggagccggcgctgggcccacgcccggctacacccgcccctgcaccacacgcatctaccaagtcctgccggacaccgcccaccccgggcgcctctaccggtgcgggccccgcctgtggacgcgcgattgcgccgtggccgaactctcatgcgactcggaccgatg

SEQ ID NO: 5392 - DNA, 203 bp, Artificial sequence
  synthetic
ggcgcgccagtcctcgccgccttcgaccgcggccccctcgaggacggcgggcgccacttggacaccgtgcaacccccaaaatcgccgccccgccctgagatcgccgcgacctggatcgtccacgcagccagcgaagaccgccattgcgcgtgcgctccccgctgcgacgtcccgcgcgaacgtccttccgactcggaccgatg

SEQ ID NO: 5393 - DNA, 203 bp, Artificial sequence
  synthetic
ggcgcgccagtcctaaccagggcagacccagacagcgacatcgttgaaagttacgcccgcgccgccggacccgtgcacctccgagtccgcgacatcatggacccaccgcccggctgcaaggtcgtggtcaacgccgccaacgaggggctactggccggctctggcgtgtgcggtgccatctttgccaacgactcggaccgatg

SEQ ID NO: 5394 - DNA, 203 bp, Artificial sequence
  synthetic
ggcgcgccagtcctcgccacgctgacgcacgcctccgtgctcgtcggcgcggggctcgctgccaggcgcgtcagtcctcctccgaccgagcccctcgcatcttgccccgccggtgacccgggccgaccggctcagcgcagcgcgtcgcccccagcgaccccccttggggatgccaccgcgcccgagcccgactcggaccgatg

SEQ ID NO: 5395 - DNA, 203 bp, Artificial sequence
  synthetic
ggcgcgccagtcctccgcggatgccaggggtgcgaactctgccggtacacgcgcgtcaccaatgaccgcgcctatgtcaacctgtggctcgagcgcgaccgcggcgccaccagctgggccatgcgcattcccgaggtggttgtctacgggccggagcacctcgccacgcattttccattaaaccactacgactcggaccgatg

SEQ ID NO: 5396 - DNA, 203 bp, Artificial sequence
  synthetic
ggcgcgccagtcctagacccaaacacctgctggctccgcgccgccgccaacgttgcgcaggctgcgcgcgcctgcggcgcctacacgagtgccgggtgccccaagtgcgcctacggccgcgccctgagcgaagcccgcactcatgaggacttcgccgcgctgagccagcggtggagcgcgagccacgccgactcggaccgatg

SEQ ID NO: 5397 - DNA, 203 bp, Artificial sequence
  synthetic
ggcgcgccagtcctgcgccccgaggggggcaaccccaccggccacttcgtctgcgcggtcggcggcggcccacgccgcgtctgggaccgcccccacctctggcttgcggtccccctgtctcggggcggtggcacctgtgccgcgaccgacgaggggctggcccaggcgtactacgacgacctcgaggtcgactcggaccgatg

SEQ ID NO: 5398 - DNA, 203 bp, Artificial sequence
  synthetic
ggcgcgccagtcctgcgccgcctcggggatgacgccatggcccgggcggccctcgcatcagtccaacgccctcgcaaaggcccttacaatatcagggtatggaacatggccgcaggcgctggcaagactacccgcatcctcgctgccttcacgcgcgaagacctttacgtctgccccaccaatgcgctcgactcggaccgatg

SEQ ID NO: 5399 - DNA, 203 bp, Artificial sequence
  synthetic
ggcgcgccagtcctcggcaccttcgcctgcaacctttgggacggccgccaggtcgaccttcacctcgccttctcgcgcgaaaccgtgcgccgccttcacgaggctggcatacgcgcatacaccgtgcgcgaggcccagggtatgagcgtcggcaccgcctgcatccatgtaggcagagacggcacggacgactcggaccgatg

SEQ ID NO: 5400 - DNA, 203 bp, Artificial sequence
  synthetic
ggcgcgccagtcctcatgcgcatctcgcgtcacctgctcaacaagaatcacaccgagatgcccggaacggaacgcgttctcagtgccgtttgcgccgtgcggcgctaccgcgcgggcgaggatgggtcgaccctccgcactgctgtggcccgccagcacccgcgcccttttcgccagatcccaccccccgactcggaccgatg

SEQ ID NO: 5401 - DNA, 203 bp, Artificial sequence
  synthetic
ggcgcgccagtcctcgccttgcgcccgcaattccttgtggccgctggccatacggagcccgaggtcgatgcgtggtggcaggcccattacaccaccaacgccatcgaggtcgacttcactgagttcgacatgaaccagaccctcgctactcgggacgtcgagctcgagattagcgccgctctcttgggcgactcggaccgatg

SEQ ID NO: 5402 - DNA, 203 bp, Artificial sequence
  synthetic
ggcgcgccagtcctcctcttccatgatgtcatgcaccaggcgatcaaggtgctttgccgccgtttcgacccagacgtgcttgaagaacagcaggtggccctcctcgaccgcctccggggggtctacgcggctctgcctgacaccgttgccgccaatgctgcgtactacgactacagcgcggagcgcgtcgactcggaccgatg

SEQ ID NO: 5403 - DNA, 203 bp, Artificial sequence
  synthetic
ggcgcgccagtcctcgaggcctgcgtgacctcgtggctttggagcgagggcgaaggcgcggtcttttaccgcgtcgacctgcatttcaccaacctgggcacccccccactcgacgaggacggccgctgggaccctgcgctcatgtacaacccttgcgggcccgagccgcccgctcacgtcgtccgcgccgactcggaccgatg

SEQ ID NO: 5404 - DNA, 203 bp, Artificial sequence
  synthetic
ggcgcgccagtcctgacccgctccgcgcgccatccttggcgcatccgcttcggtgccccccaggccttccttgccgggctcttgctcgccacggtcgccgttggcaccgcgcgcgccgggctccagccccgcgctgatatggcggcacctcctacgctgccgcagcccccctgtgcgcacgggcagcacgactcggaccgatg

SEQ ID NO: 5405 - DNA, 203 bp, Artificial sequence
  synthetic
ggcgcgccagtccttcataccaagcacatggacttctggtgtgtggagcacgaccgaccgccgcccgcgaccccgacgcctctcaccaccgcggcgaactccacgaccgccgccacccccgccactgcgccggccccctgccacgccggcctcaatgacagctgcggcggcttcttgtctgggtgcggcgactcggaccgatg

SEQ ID NO: 5406 - DNA, 203 bp, Artificial sequence
  synthetic
ggcgcgccagtcctcgtgcccgcccatccaggcgcccgctgccccgaactggtgagccccatgggacgcgcgacttgctccccagcctcggccctctggctcgccacagcgaacgcgctgtctcttgatcacgccctcgcggccttcgtcctgctggtcccgtgggtcctgatatttatggtgtgccgcgactcggaccgatg

SEQ ID NO: 5407 - DNA, 203 bp, Artificial sequence
  synthetic
ggcgcgccagtcctctcctctggcgggtacgcgcagctggcctcttacttcaaccctggcggcagctactacaagcagtaccaccctaccgcgtgcgaggttgaacctgccttcggacacagcgacgcggcctgctggggcttccccaccgacaccgtgatgagcgtgttcgcccttgctagctacgtcgactcggaccgatg

SEQ ID NO: 5408 - DNA, 203 bp, Artificial sequence
  synthetic
ggcgcgccagtcctgctgcgcactgcccctggacccggcgaggtgtgggtcacgcctgtcataggctctcaggcgcgcaagtgcggactccacatacgcgctggaccgtacggccatgctaccgtcgaaatgcccgagtggatccacgcccacaccaccagcgacccctggcatccaccgggccccttcgactcggaccgatg

SEQ ID NO: 5409 - DNA, 203 bp, Artificial sequence
  synthetic
ggcgcgccagtcctggggctgaagttcaagacagttcgcccggtggccctgccacgcacgttagcgccaccccgcaatgtgcgtgtgaccgggtgctaccagtgcggtacccccgcgctggtggaaggccttgcccccgggggaggcaattgccatctcaccgtcaatggcgaggacctcggcgccgtcgactcggaccgatg

SEQ ID NO: 5410 - DNA, 203 bp, Artificial sequence
  synthetic
ggcgcgccagtcctcccccctgggaagttcgtcaccgccgccctcctcaacacccccccgccctaccaagtcagctgcgggggcgagagcgatcgcgcgaccgcgcgggtcatcgaccccgccgcgcaatcgtttaccggcgtggtgtatggcacacacaccactgctgtgtcggagacccggcagaccgactcggaccgatg

SEQ ID NO: 5411 - DNA, 203 bp, Artificial sequence
  synthetic
ggcgcgccagtcctctgggcggagtgggctgctgcccattggtggcagctcactctgggcgccatttgcgccctcccactcgctggcttactcgcttgctgtgccaaatgcttgtactacttgcgcggcgctatagcgcctcgctagtgggcccccgcgcgaaacccgcactaggccactagatcccccgactcggaccgatg

SEQ ID NO: 5412 - DNA, 203 bp, Artificial sequence
  synthetic
ggcgcgccagtcctgaacagggacttgagaagaggcatcggcaccgaccgctgagttgctgagcgtcggagagggacgactcaggtagggtgagagcctacgagttttttgctacctagtcagcgagaaaggctaggccgcgacaggggcgcgggtcccattagtggcaaccaacccagttggacgaacgactcggaccgatg

SEQ ID NO: 5413 - DNA, 203 bp, Artificial sequence
  synthetic
ggcgcgccagtcctgggttggtaggggacgggtcggagcaatgggcgggggtcactcagcactgtcagggagaagcctcgacacgttcgagaagattaggctacgtccgaacgggaaaaagaagtaccaaattaaacatttaatatgggcaggaaaagaaatggaacgatttgggttacatgagaaaccgactcggaccgatg

SEQ ID NO: 5414 - DNA, 203 bp, Artificial sequence
  synthetic
ggcgcgccagtcctttggacatatgcaaagggaatgcaaggcaccaagacagatcaaatgctttaagtgcggcaaaattggccatatggcaaaagactgcaagaatggacaggcaaattttttagggtatggccattggggaggagcgaaaccaagaaattttgtgcaatacagaggagacacagttgcgactcggaccgatg

SEQ ID NO: 5415 - DNA, 203 bp, Artificial sequence
  synthetic
ggcgcgccagtcctgtctggaaccaacagcccccccaatggaaacagcttacgatccagcaaagaagctcctccagcagtatgcagagaagggacagcgcctgagagaggagagagaacagacaaggaaacagaaggagaaagaagtggaggatgtttccttgagctccctctttggaggagaccaatcgactcggaccgatg

SEQ ID NO: 5416 - DNA, 203 bp, Artificial sequence
  synthetic
ggcgcgccagtcctattggaggacagtggagaaaatgtaaatatagtcacagattctcaatatgtaatgaacatcttgacagcatgtccacaggaaagtaactcacccttagtggaacagataatacaagccctaatgaaaaagaggcaggtctacttacaatgggtaccagctcataaggggataggcgactcggaccgatg

SEQ ID NO: 5417 - DNA, 203 bp, Artificial sequence
  synthetic
ggcgcgccagtcctcaaaagatgattacatagaagtgaatatttatcacaacctcaccccagaaagaggatggctctcaagtcatggagtagggttatcctattaccatcaaaagggatataagacagaagtagatccaggaacagcagacagaatgatacacctatattattttaactgttttacagcgactcggaccgatg

SEQ ID NO: 5418 - DNA, 203 bp, Artificial sequence
  synthetic
ggcgcgccagtcctatagagccatccaacaggctatcagaggggagaagtatacgtggtgcacattcaaggaaggacataaaggtcaggtacaatcactgcaacttttggcactagttgcatatacaaatggcatcaggaagagatccaagagaacctttaccaggatggctggaaatctgggatctacgactcggaccgatg

SEQ ID NO: 5419 - DNA, 203 bp, Artificial sequence
  synthetic
ggcgcgccagtcctcaaaagtctatgtttgtacatttcagatgtggttgtagaaggagaggacctttttccccttacgaagagaggagaaatggacaaggaggaggagccccaccccctcctccaggacttgcataggccattacaaccatgtactaataaatgctattgcaaaaaatgctgttatcacgactcggaccgatg

SEQ ID NO: 5420 - DNA, 203 bp, Artificial sequence
  synthetic
ggcgcgccagtcctctggtaaaacaagcagagagtaatatacatctactctttgaacaaacgatgaggccttgtgttaagctctcccccatatgtattaaaatgtcctgtgtagagctgaatggtacagccacgacaaaggccaccactactgcaactacaacaatgactaccccctgtcagaattgccgactcggaccgatg

SEQ ID NO: 5421 - DNA, 203 bp, Artificial sequence
  synthetic
ggcgcgccagtcctatacattgtaatgattcagtgataaaagaagcttgtgataaaacatattgggatactttaagagtaagatactgtgcaccagcagggtatgctttgctaaaatgtaatgataaggattatagaggctttgctccaaagtgcaagaatgtttcagtagtgcattgtactagattacgactcggaccgatg

SEQ ID NO: 5422 - DNA, 203 bp, Artificial sequence
  synthetic
ggcgcgccagtcctatcaatactactataactacagggataggattaaatggtagtagatcagaaaatagaacagagatatggcagaaaggaggaaatgataatgatacagttataataaagttgaataagttttacaacttgacagtgagatgccgaagacctggtaataaaacagtgttgccagtacgactcggaccgatg

SEQ ID NO: 5423 - DNA, 203 bp, Artificial sequence
  synthetic
ggcgcgccagtcctgttgcctgccatatacgacaagtagtaaatgattggtacactgtctctaaaaaggtatatgctccaccaagggaaggtcatttggagtgtaactcatcagtcacggcactatacgtggcaatagattataacaacaagtctggcccaataaatgtgaccctaagtcctcaggtacgactcggaccgatg

SEQ ID NO: 5424 - DNA, 203 bp, Artificial sequence
  synthetic
ggcgcgccagtcctaagaatctggatctgtaccagaaattggatgattggtcagggttctggtcatggttctcactgtcaacttggttaggctatgttaaaataggatttttagtgatagtgattattctaggattaagatttgcatgggtattatggggatgtatcagaaatattaggcagggatatcgactcggaccgatg

SEQ ID NO: 5425 - DNA, 203 bp, Artificial sequence
  synthetic
ggcgcgccagtcctaatcctctcccccagatccatatccacagttcagcggaacggccagacaacggaggagggcaagacagaggtggagaaagcagcagcagcaaattgataagattgcaggaagagtcctcaacaccttcgaggatcaacaactggtggctcaacttcaagagctgcagcttgagacgactcggaccgatg

SEQ ID NO: 5426 - DNA, 203 bp, Artificial sequence
  synthetic
ggcgcgccagtcctgtaccgcccggacatgtttaaggacatgcacgaacatgcaaagcgctagtgtcagcactttgcggttgggactttccgccagggactttccacagtgggtggatcggaggcggtacaggggcggtactgggagtggctttcccctcagagctgcataaaagcagatgctcgctgcgactcggaccgatg

SEQ ID NO: 5427 - DNA, 203 bp, Artificial sequence
  synthetic
ggcgcgccagtcctgcttgtaactcagtctcttactaggagaccagctagagcctgggtgttcgctggttagcctaacccggttggccaccgggggtaaggactccttggcttcatatagctcaataaacctgctcgcttagtcgctatattggagtcaagtgctcattgctgcgccgagcctctagacgactcggaccgatg

SEQ ID NO: 5428 - DNA, 203 bp, Artificial sequence
  synthetic
ggcgcgccagtcctgttagcctaacccggttggccaccgggggtaaggactccttggcttcatatagctcaataaacctgctcgcttagtcgctatattggagtcaagtgctcattgctgcgccgagcctctagaggtgaacctctcttactgggttctcctgtacccaggtgggagaaactccagcacgactcggaccgatg

SEQ ID NO: 5429 - DNA, 203 bp, Artificial sequence
  synthetic
ggcgcgccagtcctaactcacccagacacagcaggaggcctttctcgcacgcctcactggccagggcaacatatccctaaaggaaaatgttgcgccagtcgagaaaaggaagaacaaatcccaaaagatattttcccagtgactgaaaccgttgatgggcaaggtcaagcctggagacaccataatggcgactcggaccgatg

SEQ ID NO: 5430 - DNA, 203 bp, Artificial sequence
  synthetic
ggcgcgccagtcctgcgttaagcactggaatatatggaccactgcctcccaacacttttggattaatcctaggccgaagtagcattactatgaagggtctacaagtttatccaggagtaattgataatgactataccggagaaattaaaattatggcaaaagctgttaacaatattgttactgtctctcgactcggaccgatg

SEQ ID NO: 5431 - DNA, 203 bp, Artificial sequence
  synthetic
ggcgcgccagtcctcaaggcaacagaatagctcaattaatcctcctgcctctgatcgagacagacaataaggtacaacaaccttatagaggacaaggaagttttggatcctcagacatatattgggtccaacctattacttgtcaaaaaccttccttaacattatggttagatgacaaaatgttcacacgactcggaccgatg

SEQ ID NO: 5432 - DNA, 203 bp, Artificial sequence
  synthetic
ggcgcgccagtcctccccagaaaaagttcaattacaagatccctacacatatttaggatttgaacttaatggtcctaaaatcactaatcaaaaagcagtcattcgtaaagataaattacagactcttaatgatttccaaaaacttttaggagacatcaattggctcagaccatatctaaaactcactacgactcggaccgatg

SEQ ID NO: 5433 - DNA, 203 bp, Artificial sequence
  synthetic
ggcgcgccagtcctctggagacttaaaacccttattcgacacccttaaaggagactctgaccccaattcccatagatccttatcaaaagaagctcttgcctcacttgaaaaggtagagacagccattgcagaacaattcgttactcacataaattattcactaccattaattttcctcatattcaacacgactcggaccgatg

SEQ ID NO: 5434 - DNA, 203 bp, Artificial sequence
  synthetic
ggcgcgccagtcctacaatgccttattagtttttactgatggctcttccactgggatggccgcatatactcttactgataccaccatcaaattccaaactaatcttaattcggctcaactagtagaactacaagctttaattgcagtcttatcagccttccctaatcaacctcttaatatttacactgcgactcggaccgatg

SEQ ID NO: 5435 - DNA, 203 bp, Artificial sequence
  synthetic
ggcgcgccagtcctacagtgcttacttagcccactcaatacccctacttgaaactgtcgcacaaattaaacacatatcagaaacagctaaactgttcctacagtgccagcaactcatatacaatagatccatacctttttatattggacatgtcagggcccattctggactacctggacccatagctccgactcggaccgatg

SEQ ID NO: 5436 - DNA, 203 bp, Artificial sequence
  synthetic
ggcgcgccagtccttagttgaaagagcccacttatctcttaaaaccaccattgaaaagataaaaaagggggaatggtaccctaggaagggtacccccaggaacatcctcaatcatgcactctttattctaaattttttaaatttagatgatcaaaataaatcagcagctgatcgtttttggcataatacgactcggaccgatg

SEQ ID NO: 5437 - DNA, 203 bp, Artificial sequence
  synthetic
ggcgcgccagtcctaccccaaaaaacaatttgccatggtaaaatggaaagatccattagataatacatggcatggccccgatccagtgttaatttggggcagaggttcagtctgtgtttactctcaaacctatgatgccgctagatggctaccagaacggttagtaagacaggtgtctaacaataacccgactcggaccgatg

SEQ ID NO: 5438 - DNA, 203 bp, Artificial sequence
  synthetic
ggcgcgccagtcctgatctcatatgattctgtacatgcctcttgctataaccactatcaacaatgtaacattggtaataaaacatatctcactgccactataactggagatagaactcctgccattggtgacgggaatgtccctacagtactagggactagtcacaacctcattacagcaggctgtcccgactcggaccgatg

SEQ ID NO: 5439 - DNA, 203 bp, Artificial sequence
  synthetic
ggcgcgccagtcctacgccgaagacaactgatcgacaacccattttggaccagttttcatggattcctcccttatgttatgcccctattaggccctttgctttgcttattgcttgtgttatctttcggtccaattattttcaacaagcttatgacctttattaaacatcaaattgagagcatccaggccgactcggaccgatg

SEQ ID NO: 5440 - DNA, 203 bp, Artificial sequence
  synthetic
ggcgcgccagtcctccaatgacgggtaatagtgacaagaaatgtatcactccaacctaagacaggcgcagcctccgagggatgtgtcttttgttttttataattaaaaagggtgacatgtccggagccgtgctgcccggatgatgtcttggcctctgtttgctctagctccatgttatgaatttaagacgactcggaccgatg

SEQ ID NO: 5441 - DNA, 203 bp, Artificial sequence
  synthetic
ggcgcgccagtcctatgagacttgatcagaacactgtcttgtctccatttcttgtgtctcttgttcccttcaattcccactccctcctccaggttcctactgttgatcccgcgggtcgggacagttggcgcccaacgtggggcacgaacccacgaccctgggattaagagtcccatgctctaccgactcgactcggaccgatg

SEQ ID NO: 5442 - DNA, 203 bp, Artificial sequence
  synthetic
ggcgcgccagtccttccatgttatgaatttaagatggcgtatttcctggttcttctccgtcttactttcccgccggcgcgaatgtttcccgctcttgggcttacgtggctttccttgctctgctactgagcatgcgcccagtatctttcccctcccacttgctgcctgtgtatataaggcaacacattcgactcggaccgatg

SEQ ID NO: 5443 - DNA, 203 bp, Artificial sequence
  synthetic
ggcgcgccagtcctactgacgtgattaccattccaacagctgctgggaaaaacctgtgcatcgtaagggctatggacgtaggatacctttgtgaggatactatcacttatgaatgtccggtcctagctgctggaaatgaccctgaagacattgactgctggtgcacgaaatcatctgtttacgtgcgccgactcggaccgatg

SEQ ID NO: 5444 - DNA, 203 bp, Artificial sequence
  synthetic
ggcgcgccagtcctggcgatagttgtgtgaccataatgtcaaaagacaagccaaccattgatgtcaaaatgatgaacatggaagcagccaacctcgcagatgtgcgcagttactgttacctagcttcggtcagtgacttgtcaacaagagctgcgtgtccaaccatgggtgaagcccacaacgagaaacgactcggaccgatg

SEQ ID NO: 5445 - DNA, 203 bp, Artificial sequence
  synthetic
ggcgcgccagtcctggaacggtggtgttggaactgcaatataccggaacagacggtccctgcaaagtgcccatttcttccgtagcttccctgaatgacctcacacctgttggaagactggtgaccgtgaatccatttgtgtctgtggccacagccaactcgaaggttttgattgaactcgaacccccgcgactcggaccgatg

SEQ ID NO: 5446 - DNA, 203 bp, Artificial sequence
  synthetic
ggcgcgccagtccttttggtgactcttacatcgtggtgggaagaggagaacagcagataaaccatcactggcacaaatctgggagcagcattggaaaggcctttaccaccacactcagaggagctcaacgactcgcagctcttggagatactgcttgggattttggatcagttggaggggttttcacccgactcggaccgatg

SEQ ID NO: 5447 - DNA, 203 bp, Artificial sequence
  synthetic
ggcgcgccagtccttcagtggggaaagccatacaccaagtctttggaggagcttttagatcactctttggagggatgtcctggatcacacagggacttctgggagctcttctgttgtggatgggaatcaatgcccgtgacaggtcaattgctatgacgtttcttgcggttggaggagttttgctcttccgactcggaccgatg

SEQ ID NO: 5448 - DNA, 203 bp, Artificial sequence
  synthetic
ggcgcgccagtcctttcctgaggattcgggaaacgaacacaacggaatgcgactcgaagatcataggaaccgccgtcaagaacaacatggctgtgcatagtgatctatcatactggatagagagcggactcaacgacacctggaagcttgagagggcggttctaggagaagtcaaatcatgcacctggcgactcggaccgatg

SEQ ID NO: 5449 - DNA, 203 bp, Artificial sequence
  synthetic
ggcgcgccagtcctccagaaacccacactctgtggggtgatggagttctggaaagtgatctcatcatacccatcaccttggcaggacccagaagcaaccacaacaggagaccagggtacaaaactcagaaccaaggcccatgggatgaggggcgcgtcgagattgactttgactattgcccaggaacacgactcggaccgatg

SEQ ID NO: 5450 - DNA, 203 bp, Artificial sequence
  synthetic
ggcgcgccagtcctgaaaagaccctcgtgcaatcgagagtgaatgcatacaacgccgacatgattgatccttttcagttgggccttatggtcgtgttcttggccacccaggaggtccttcgcaagaggtggacggccaagatcagcattccagctatcatgcttgcactcctagtcctagtgtttgggcgactcggaccgatg

SEQ ID NO: 5451 - DNA, 203 bp, Artificial sequence
  synthetic
ggcgcgccagtcctggtattacgtacactgatgtcctgcgatatgtcattctcgtcggcgccgcgtttgctgaagcaaactcaggaggagacgtcgtgcacttggcacttatggctacattcaagattcaaccagtctttctggtggcttcctttttgaaggcaaggtggaccaaccaagagagtattcgactcggaccgatg

SEQ ID NO: 5452 - DNA, 203 bp, Artificial sequence
  synthetic
ggcgcgccagtcctcctggattgaaatgcttaaaccttgatgtgtacagaattttgctactcatggttggagttggaagcctcatcaaagaaaaaaggagctctgcagcaaaaaagaaaggagcttgcctcatctgcctagcgctggcgtctacaggagtgttcaatccaatgatacttgcagctgggcgactcggaccgatg

SEQ ID NO: 5453 - DNA, 203 bp, Artificial sequence
  synthetic
ggcgcgccagtccttcaacagacatgtggattgagaggacggctgacattacttgggagagtgatgctgaaatcacaggctctagcgaaagagtagatgtgaggctggatgatgatggaaattttcaactgatgaatgaccccggggcaccatggaaaatttggatgcttaggatggcctgcctggcgcgactcggaccgatg

SEQ ID NO: 5454 - DNA, 203 bp, Artificial sequence
  synthetic
ggcgcgccagtccttatgggaacggcgtcatcatgcctaatggttcatacataagcgccattgtgcaaggagagagaatggaagaaccggcaccagctggcttcgaacctgaaatgttgaggaagaaacagatcactgtccttgatctgcaccccggagcaggaaagacacgcaagatacttccccaacgactcggaccgatg

SEQ ID NO: 5455 - DNA, 203 bp, Artificial sequence
  synthetic
ggcgcgccagtcctatcatcaaggaggccatcaacaaaagattgaggacggctgtgctggcacccaccagggtcgttgctgctgagatgtctgaggccctgagaggacttcccattcggtaccaaacctcagcagtgcacagagagcacagtggaaatgagatcgttgatgtcatgtgccatgccacccgactcggaccgatg

SEQ ID NO: 5456 - DNA, 203 bp, Artificial sequence
  synthetic
ggcgcgccagtcctgacccctttccagagtctaatgctcctatctcggacatgcaaacagagatcccagacagagcctggaacactggatatgaatggataactgagtatgttggaaagaccgtttggtttgttccaagtgtgaaaatgggaaatgagattgccctctgtctgcaacgggcggggaagcgactcggaccgatg

SEQ ID NO: 5457 - DNA, 203 bp, Artificial sequence
  synthetic
ggcgcgccagtcctggaagagtcatcctgggggaaccctcagccatcacggctgccagcgctgctcagcggagaggacgcataggaagaaacccatcacaagttggtgatgagtattgctatggagggcacacaaatgaggatgattccaactttgctcactggacagaggctcgcatcatgctagaccgactcggaccgatg

SEQ ID NO: 5458 - DNA, 203 bp, Artificial sequence
  synthetic
ggcgcgccagtcctaggccagaagctagagagacgaccctgggagttgagagcttcttacttgatctgcggccggccacggcatggtcgctctatgccgtaacgacagccgttctcacccctttgctgaagcatctaatcacgtcagactacatcaacacttcgttgacctcaataaacgtccaagcccgactcggaccgatg

SEQ ID NO: 5459 - DNA, 203 bp, Artificial sequence
  synthetic
ggcgcgccagtcctagaaccgtcagagaggccggaattctgactacagcagcagcagtcaccctatgggagaatggtgctagttcagtgtggaatgcaacgacagctattggcctttgtcacatcatgcgaggaggatggctctcgtgtctctccatcatgtggactctcatcaaaaacatggagaaacgactcggaccgatg

SEQ ID NO: 5460 - DNA, 203 bp, Artificial sequence
  synthetic
ggcgcgccagtcctccagtctcacggggaaccgcgaaattacggtggttagtggaaaggcgtttcctcgagccagtgggaaaggttgtggatctcgggtgtggtagaggcggctggtgctattacatggctacccagaagagggtacaggaagtgaaagggtacacgaaaggaggacctggccatgaacgactcggaccgatg

SEQ ID NO: 5461 - DNA, 203 bp, Artificial sequence
  synthetic
ggcgcgccagtcctgaaccacaactggtgcagagctatggttggaatattgttaccatgaagagtggagtcgacgtcttctacagaccatcagaagcgagcgacacactgctctgtgacattggagagtcatcgtcaagtgccgaggtagaagaacaccgcaccgtccgtgtcctggagatggtggaacgactcggaccgatg

SEQ ID NO: 5462 - DNA, 203 bp, Artificial sequence
  synthetic
ggcgcgccagtcctgattggttgcacagaggaccgaaggaattctgcatcaaagtgctatgcccttacatgcccaaagtgattgagaagatggaaacactccaaaggcgatatggaggtggccttataagaaaccccctttcacgcaactctacccatgagatgtactgggtgagccacgcttcaggccgactcggaccgatg

SEQ ID NO: 5463 - DNA, 203 bp, Artificial sequence
  synthetic
ggcgcgccagtcctgccatgacagacaccactcctttcggtcaacaacgagtgttcaaggaaaaggtggacacaaaggctccagagcctccagaaggagtcaaatacgtcctcaatgagaccacgaactggctgtgggcttttttagcccgcgataagaaacccaggatgtgttcccgggaggaatttcgactcggaccgatg

SEQ ID NO: 5464 - DNA, 203 bp, Artificial sequence
  synthetic
ggcgcgccagtcctattggaaaagtcaacagtaatgccgccctaggagcgatgtttgaagaacagaaccaatggaagaacgcccgggaagctgtagaggatccaaagttttgggagatggtggatgaggagcgtgaagcgcatctccgtggagaatgcaacacctgcatctacaacatgatgggaaagcgactcggaccgatg

SEQ ID NO: 5465 - DNA, 203 bp, Artificial sequence
  synthetic
ggcgcgccagtcctcgacacaaagtcgtgaaagtgatgaggccagcggccgacgggaaaactgtgatggacgtcatctctagagaggatcagagaggaagcggtcaggtagtgacttacgccctgaacaccttcaccaatctagcagttcagctggtcagaatgatggagggggagggggtcattggacgactcggaccgatg

SEQ ID NO: 5466 - DNA, 203 bp, Artificial sequence
  synthetic
ggcgcgccagtcctcccgatgatgttgaaaaactgggaaaaggaaaaggccctaaggtcagaacctggctgtttgagaatggcgaggagcgtctcagtcgcatggccgtcagcggtgatgactgcgtggtgaaacctttggacgaccgcttcgccacatcactacacttcctaaatgctatgtcaaagcgactcggaccgatg

SEQ ID NO: 5467 - DNA, 203 bp, Artificial sequence
  synthetic
ggcgcgccagtcctgtccgcaaagacatccaggaatggaaaccctcgacggggtggtatgactggcagcaggttccattctgttcaaaccatttcacggaactgatcatgaaggacggcaggacgctggtggtcccgtgtcgtggacaagacgagttgattggacgtgccaggatctctccaggggctcgactcggaccgatg

SEQ ID NO: 5468 - DNA, 203 bp, Artificial sequence
  synthetic
ggcgcgccagtcctggatggaatgtgcgcgacaccgcctgcctggcgaagtcatacgcgcagatgtggctgctgctttatttccaccgtagagacctgagattgatggccaatgccatctgttccgctgtgcctgccaactgggttcccacagggcgtaccacttggtcgatccacgcaaaaggagaacgactcggaccgatg

SEQ ID NO: 5469 - DNA, 203 bp, Artificial sequence
  synthetic
ggcgcgccagtccttcgtccaagccctcattcacatggcattggtgcttcatgccttgtttgcctccatcgaccggcgaattcgctcattatcccgacgtgttaccgctcttgaatctcgccgaaccacaggaaatcccatgacgctagctttcatcttgggctttctcacagtgttatgtggatgcgcgactcggaccgatg

SEQ ID NO: 5470 - DNA, 203 bp, Artificial sequence
  synthetic
ggcgcgccagtcctcagattgcggatcaacgtggactgagttcacattgcggtatcggagatgcgtcgtgaagaaacgtgaaaagcgatcacgtgaacccccgaaagcggatttgctagctgaaatggagatcattgcgttcaagaccattcgcgaaaataagacaatcttcatcgtggccctattgtcgactcggaccgatg

SEQ ID NO: 5471 - DNA, 203 bp, Artificial sequence
  synthetic
ggcgcgccagtcctacggtctcctcgagtttaaaacaggaccggcggagatctacggggggcaatggctgcgcgagttactcgcagattgccacgtcaacgcatcctattcgactgacgtgtgtcccggtggatcgcagctcaacatggcagatatcatggccaaggaacgagtatgctcgacccaaccgactcggaccgatg

SEQ ID NO: 5472 - DNA, 203 bp, Artificial sequence
  synthetic
ggcgcgccagtcctgtcggcacggcatggagaaagttgttgtgtggggagatgctaggtccaatgagattctagtaaaaaacgtaattgaaccttcgttgtcctgggaagacgcgatcgccactcatggtggattccgtgacatctcctttgtttgtcagattatgctcgacaaactagtcagtggagcgactcggaccgatg

SEQ ID NO: 5473 - DNA, 203 bp, Artificial sequence
  synthetic
ggcgcgccagtcctaggatctggtcggaaagttttcggttggtgccttcttctccaacacagcccttctggtcattctcgtcctcgctgccttgattgacaaacgcatagcctttctattggttttaggggggtacttttactatgtgcgggctgatctggggtgtggaattgacaccacgagaaaaacgactcggaccgatg

SEQ ID NO: 5474 - DNA, 203 bp, Artificial sequence
  synthetic
ggcgcgccagtccttgcgcagagctgctttctctgctgttgggtcgatgggttctgaacgggtgtatgtaaatgacacattggcgcgtacattcaagttctccgaaacagcaaagagaaccatttccgtcaccattaacttaattcagtacaagttctcatcttatgttgcacatggacgcgctgaggcgactcggaccgatg

SEQ ID NO: 5475 - DNA, 203 bp, Artificial sequence
  synthetic
ggcgcgccagtcctcaaaggtcaaagtggactctcgatgccatgggcgaatgcacgcccaggtaattggaccgaatgacacggaatcttggtgttgccagtcatgcacaagaatagtccactttcgagtcggtgacctcctatattaccccatggagatccaacttggaaccatgtctgaagcgtcagcgactcggaccgatg

SEQ ID NO: 5476 - DNA, 203 bp, Artificial sequence
  synthetic
ggcgcgccagtcctcattgcagcttatcggggcaaaaactagaacatcgacactaactcgcctatttctgacgattctcgcaatggcgctctttggactccccaacttgttttcatctgtggggctatctgcgtgggtgttgctggtggcgtcctcatcggcgcaaccgcaagacctatcaatgaatccgactcggaccgatg

SEQ ID NO: 5477 - DNA, 203 bp, Artificial sequence
  synthetic
ggcgcgccagtcctagcttgagttcatctcagctggagagactcccgaaggagtgtcaaccgaaaatgatgacgggataaatattcctgacttaaaagggcgctatggagaggatgggatcgtcgtgggggcggcctcatcgtctggttacctacctgagctcgtgtttgtgttcctcctaggctttgcgactcggaccgatg

SEQ ID NO: 5478 - DNA, 203 bp, Artificial sequence
  synthetic
ggcgcgccagtcctccgtgacgtccacttcatactttttgggggcactctacctgctcatcgcaaccagcactaacctccccgtggtcataatacggatgctgcgtatgaagctcactgctagcaaccgatctgatgatctcttgggactcggcggacctgttgaaactgacctccagaccagctttccgactcggaccgatg

SEQ ID NO: 5479 - DNA, 203 bp, Artificial sequence
  synthetic
ggcgcgccagtcctgcgacgtggtgtcgtatggtggaccttggcagttggacacccccaccaccacggaagacctcgtgctgatggcttgcaaaccggataagaccattgagtaccataggtacaggccgggagtcatgagtattgacggtgagcctgtcatgttcattagtgatgatttcggaaaagcgactcggaccgatg

SEQ ID NO: 5480 - DNA, 203 bp, Artificial sequence
  synthetic
ggcgcgccagtcctgatcttctggctcaccgttcttcatcaatggcgagcccgtcgggttctatggttttgggttctatgtgaacggtatttaccgctcaacagtagcaggtggcaaaccaaccgatgtcacggagagcttgaactgtgattcgaccaggcggtttgtgacatggcatccaggaaaagcgactcggaccgatg

SEQ ID NO: 5481 - DNA, 203 bp, Artificial sequence
  synthetic
ggcgcgccagtccttcggcatgacttttatgctagaggaagctgcatacagccagcctccggggagattcaccctagtgggagaggatagaatgcgatttttaaagcttatggaccgggatgacattcccatttggctggcgtggcactgggcagaagctggagaccgacggcactcagccctgtttccgactcggaccgatg

SEQ ID NO: 5482 - DNA, 203 bp, Artificial sequence
  synthetic
ggcgcgccagtcctagggcgcaggaaccggaaagatcatcgaaaaccgatttggcaaacaagagtatcgaccacaatacgttgatgaccgctttgagagcattgagtgggagacgcgaaaggtgtccattgatttctacatgaactgccgcggggggcctaccctctatgagttttttacagtggttgcgactcggaccgatg

SEQ ID NO: 5483 - DNA, 203 bp, Artificial sequence
  synthetic
ggcgcgccagtcctccgggccatctttcccaagttgggaaatagcgcaaggaaagggagctacaatgttggactctctgcaggtattcttcttcataacagtgttgtcaacaaaattcctgtattggttccaggagaactggactgcacgaatgtacgctatgaaacatccggagatggttagctcgacgactcggaccgatg

SEQ ID NO: 5484 - DNA, 203 bp, Artificial sequence
  synthetic
ggcgcgccagtcctttggtggatttagatttgatgaaattcccttcagggctgtccttccctctggttttgccattgtcgcgattgctagcctcccaagcgtggtggtggggcttctggcagctggtgtgttcatggccatcatgtactgtcagaacaagtggaatgccaccccaaagatcttgacagcgactcggaccgatg

SEQ ID NO: 5485 - DNA, 203 bp, Artificial sequence
  synthetic
ggcgcgccagtcctcattggacgctcgcgaccagaggcatgatcgtcccactgaaatcactagtagagtgccactcgaaaacactcgatccatcatgtatgccttttgcctgatcttcagcctgttttgggctttctgcacacggtctcctggagattttctccgagggtcattggtggtcggggctacgactcggaccgatg

SEQ ID NO: 5486 - DNA, 203 bp, Artificial sequence
  synthetic
ggcgcgccagtccttggacgtcgttggccgtcgagaccaacgtgggtcagggcaagtagtcacatatgcgttgaacaccataacaaatggtaaggtccaggtggcgagagttttagaaagtgaaggactactgcaagcggatgaatcggtgttggatgcgtggttggaaaaacaccttgaagaagctccgactcggaccgatg

SEQ ID NO: 5487 - DNA, 203 bp, Artificial sequence
  synthetic
ggcgcgccagtcctatttgcgcctaggtttcattgctatctcatcggctgtgccaaccaattggttcccactaggacgcacctcgtggtcagtccaccagtatcacgaatggatgaccactgatgatatgcttcgggtttggaatgacgtgtgggtgcacaacaacccgtggatgctaaacaaggagtcgactcggaccgatg

SEQ ID NO: 5488 - DNA, 203 bp, Artificial sequence
  synthetic
ggcgcgccagtcctagctctcagtcatgagtcgatatcgaagaggaaatgatgtcatttagacgtgatcgaatagagccgtgaggaaccagcatcctcccggccacaggagcagggcatgaaaatgtcgggcatgacgaacccgctcccccgagtcccctggcaacagggtgtgttcccttatggagccgactcggaccgatg

SEQ ID NO: 5489 - DNA, 203 bp, Artificial sequence
  synthetic
ggcgcgccagtccttagccagctgatggtcttaagcatcccccccatggaatgggtaagagaagcctgtaaacaaaactggatggcaccagtgctcttataaaatggcagccaaagcgatccagagctttcaaaactggacggggcaacagggagaaatcccggggtagcgaacctcctccgtaaatgcgactcggaccgatg

SEQ ID NO: 5490 - DNA, 203 bp, Artificial sequence
  synthetic
ggcgcgccagtcctattatttgacacaaatcatcaggttagtatctgtaatcagataatagatgcaataaactcagggattgatcttggagatctcctagaagggggtttgctgacgttgtgtgttgagcattactataattctgataaggataaattcaacacaagtcctatcgcgaagtacttacgcgactcggaccgatg

SEQ ID NO: 5491 - DNA, 203 bp, Artificial sequence
  synthetic
ggcgcgccagtccttcaaggagtaaatttggtgacaggtcatgatgcctatgacagtatcattagtaattcagtaggtcaaactagattctcaggacttcttatcgtgaaaacagttctcgagttcatcttgcaaaaaactgattcaggggtgacactacatcctttggtgcggacctccaaagtaaacgactcggaccgatg

SEQ ID NO: 5492 - DNA, 203 bp, Artificial sequence
  synthetic
ggcgcgccagtcctaaatgaagttgctagtttcaagcaggcgttgagcaacctagcccgacatggggaatacgcaccatttgcacgggttctgaatttatcagggattaacaacctcgaacatggactctatcctcagctttcagcaattgcgctgggtgtggcaacagcacacggcagtacattggccgactcggaccgatg

SEQ ID NO: 5493 - DNA, 203 bp, Artificial sequence
  synthetic
ggcgcgccagtccttggtgtcaatgttggcgaacaatatcaacaactacgagaggcggcacatgatgcggaagtaaaactacaaaggcgacatgaacatcaggaaattcaagctattgccgaggatgacgaggaaaggaagatattagaacaattccaccttcagaaaactgaaatcacacacagtcacgactcggaccgatg

SEQ ID NO: 5494 - DNA, 203 bp, Artificial sequence
  synthetic
ggcgcgccagtcctgacactagccgtcctcagccagaaacgagaaaaattagctcgtctcgctgcagaaattgaaaacaatattgtggaagatcagggatttaagcaatcacagaatcgggtgtcacagtcgtttttgaatgaccctacacctgtggaagtaacggttcaagccaggcccatgaatcgcgactcggaccgatg

SEQ ID NO: 5495 - DNA, 203 bp, Artificial sequence
  synthetic
ggcgcgccagtccttgctcctcaggaagacacaaggatgagggaagcctatgaattgtcgcctgatttcacaaatgatgaggataatcagcagaattggccacaaagagtggtgacaaagaagggtagaactttcctttatcctaatgatcttctgcaaacaaatcctccagagtcacttataacagccgactcggaccgatg

SEQ ID NO: 5496 - DNA, 203 bp, Artificial sequence
  synthetic
ggcgcgccagtccttttatttgaatatttgaaccaccttttagtatcctattacttgttactattgtgtgagacaacataagccatcaaataacaatcacgggcaaggactgggcatactatggtggtcttagagcattgtccagtgctacaaattcttttttcaattgctataattatacaactacacgactcggaccgatg

SEQ ID NO: 5497 - DNA, 203 bp, Artificial sequence
  synthetic
ggcgcgccagtcctcaaggggatgtcagaaatgttagccaaatacgaccaccttgtaatttcaactggaagaaccactgcaccagctgctgcctttgatgcctacttaaatgagcatggtgtccctccccctcaacccgcgattttcaaagatcttggggttgcccaacaagcttgtagtaaggggaccgactcggaccgatg

SEQ ID NO: 5498 - DNA, 203 bp, Artificial sequence
  synthetic
ggcgcgccagtcctgggtgatttaaacctagatgatcagttcaaagggaatgtctgccatgctttcactttagaggcaataattgacatatctgcatataacgagcgaacagtcaaaggcgttccggcatggctgcctcttgggattatgagcaattttgaatatcctttagctcatactgtggccgccgactcggaccgatg

SEQ ID NO: 5499 - DNA, 203 bp, Artificial sequence
  synthetic
ggcgcgccagtcctcacctacaatctcactaatttagtattgagtgtgcaaaaacttcctgatgatgcctggcgcccatccaaggacaaattaattgggaacactatgcatcccgcagtctccatccacccgaatctgccgcctattgttctaccaacagtcaagaagcaggcttatcgtcagcacaacgactcggaccgatg

SEQ ID NO: 5500 - DNA, 203 bp, Artificial sequence
  synthetic
ggcgcgccagtcctagcacctgagaacttccctttgaatggcttcaataacagacaagttgtgctagcgtatgcgaatccaacgctcagtgccgtttgaaatgatgctcaaatgagacaggagtccatctgtataagaagtatggcttaaatggatatttgtcaaattcttacaagattagtttgtatcgactcggaccgatg

SEQ ID NO: 5501 - DNA, 203 bp, Artificial sequence
  synthetic
ggcgcgccagtccttaacatatgtcattgtgccctccattgctaagtcaactcaactgacgataatactccttctgaaatagtaagaaaaactaatgaagaacattaattgctgggtaaaagtgattaatttctttaaatttgaccagaataatattttgtcagtgaatatattctcatatcacttgacgactcggaccgatg

SEQ ID NO: 5502 - DNA, 203 bp, Artificial sequence
  synthetic
ggcgcgccagtcctttaaaaacagaaaattaccctaacatgaagaccacatgtttccttatcagtcttatcttaattcaagggacaaaaaatctccccattttagagatagctagtaataatcaaccccaaaatgtggattcggtatgctccggaactctccagaagacagaagacgtccatctgatgcgactcggaccgatg

SEQ ID NO: 5503 - DNA, 203 bp, Artificial sequence
  synthetic
ggcgcgccagtcctcctcctaccaacatccgtgactatcctaaatgcaaaactatccatcatattcaaggtcaaaaccctcatgcacaggggatcgcccttcatttatggggagcattttttctgtatgatcgcattgcctccacaacaatgtaccgaggcaaagtcttcactgaagggaacatagcacgactcggaccgatg

SEQ ID NO: 5504 - DNA, 203 bp, Artificial sequence
  synthetic
ggcgcgccagtcctaaaaaaggccccgccacaacggcaccaaacacgacaaatgagcatttcaccagtcctccccccacccccagctcgactgcacaacatcttgtatatttcagaagaaagcgaagtatcctctggagggaaggcgacatgttcccttttctggatgggttaataaatgctccaattcgactcggaccgatg

SEQ ID NO: 5505 - DNA, 203 bp, Artificial sequence
  synthetic
ggcgcgccagtcctttattgagagtcacaactgaggaaagaacattctccttaatcaatagacatgctattgactttctactcacaagatggggaggaacatgcaaagtgcttggacctgattgttgcatcgggatagaagacttgtccaaaaatatttcagagcaaattgaccaaattaaaaaggaccgactcggaccgatg

SEQ ID NO: 5506 - DNA, 203 bp, Artificial sequence
  synthetic
ggcgcgccagtccttaggactttaggacaattgctactgagccctttttctaatctactgaaatcaacttgggagatttttaagaagctgataacttaatgtgaatcaatagtttatgtattatcgattattatggtttgatattcaattgttattattgtcaggagtgaccttttctatttgatgcacgactcggaccgatg

SEQ ID NO: 5507 - DNA, 203 bp, Artificial sequence
  synthetic
ggcgcgccagtcctacgtgctgttcaaagagtcttaatttataaccaactattgcaagaattaatttactttttccgttatacttagttacattaatcttttgactgttcagcattattaacgacttgtcttaattcaatcgttcggatgaaattcataaggaaaaatgagcctccttccccctattccgactcggaccgatg

SEQ ID NO: 5508 - DNA, 203 bp, Artificial sequence
  synthetic
ggcgcgccagtcctcaacctcgcggaagaagtcgaacccgcaaccaccaagtcacaccgactatatatcatgaaactcaattgccctccaaacctcattataccaattatcatccacgtgcaagatcgatgagctcaacccgtagtagtgcagaaagtagtcccaccaatcatattccccgtgctcgacgactcggaccgatg

SEQ ID NO: 5509 - DNA, 203 bp, Artificial sequence
  synthetic
ggcgcgccagtccttaggaacagatttggagctgtttggaatagcagattttgttatttttaaggttccagtaaaaacaataatccgaaatgctgtaagcttacaagcttcaaaaccgggattaagaatatggtaccgtgaccaaaacttgaccccttatctatgcgacgatgagtttattgtaagcgcgactcggaccgatg

SEQ ID NO: 5510 - DNA, 203 bp, Artificial sequence
  synthetic
ggcgcgccagtcctaggacggtttcaaattgattaaacacttagaacccttgtgtgtcagctgtatacaaacacatggcatctttacaccaagaaaatactggttccaatcacagatgattaagtcatattatgatgaactccatgatctcaatttgaaacttcaaatttcagacaataaggctgagtcgactcggaccgatg

SEQ ID NO: 5511 - DNA, 203 bp, Artificial sequence
  synthetic
ggcgcgccagtcctccctgctagcagatggactggcaaaagcattccctagtaacatgatggttgtcactgagagggaacagaaagaagcattattacatcaggcttcttggcaccacaattcagcaagcataggggagaacgctatagtgaggggtgcaagttttgttactgatcttgagaaatacacgactcggaccgatg

SEQ ID NO: 5512 - DNA, 203 bp, Artificial sequence
  synthetic
ggcgcgccagtcctcaattgatgctcccaacgattatcaagagaacgaggctgaattgaatgcggcacgagttgctgtcgaattagctattactacaggttatagtggtatatttttaaagcctgaggaaacatttgtccattcagggttcatttattttggtaaaaagcaatatctcaacggtgttccgactcggaccgatg

SEQ ID NO: 5513 - DNA, 203 bp, Artificial sequence
  synthetic
ggcgcgccagtcctactcaaaatcaactataaacttgttgccgtatgactgtaaggaactgcgacttgaaggaagcaatgacacagagttaaattatgtcagttgtgctcttgaccggaaagttgtccagaaacatccctctgttaatcgtctagcttggacgataggaaatcgagcaccgtatattgcgactcggaccgatg

SEQ ID NO: 5514 - DNA, 203 bp, Artificial sequence
  synthetic
ggcgcgccagtcctagacggtgcttaactttttacctacacactactcaggcaacatagttcatagatataatgatcaatatggacaacattcctttatggcaaacaggatgagtaatacatctacacgtgcaattatatcaactaacacactgggtaaatatgctgggggaggtcaagctgctattgcgactcggaccgatg

SEQ ID NO: 5515 - DNA, 203 bp, Artificial sequence
  synthetic
ggcgcgccagtcctttaagaacctctcagatttgacattccttatatcatccacaatcaggaatttatcacatagatcacttcggattcttcaatctactttccgacatgaattggtgctcacccgactagcccaccacataccgttaatttctttaatgttagggggctctgcaggagagaagagttcgactcggaccgatg

SEQ ID NO: 5516 - DNA, 203 bp, Artificial sequence
  synthetic
ggcgcgccagtccttccttataaaatcactagatgcacatgaggactttgatgcctcgaagataatcttaaattctgaaataaataatcttaaccttacggagtatactcttaatacaaagttattgacaactcctaccaggacagaaattttagatacaagtccgttacaatcctctagatattcatcgactcggaccgatg

SEQ ID NO: 5517 - DNA, 203 bp, Artificial sequence
  synthetic
ggcgcgccagtccttgaagaatgctattcagtattatgggcaagttcaactcaagaaaccatatagctcaaatgcaaaaaactcagaatggtacttgtgttgcggtaaacgaagaattcaacggctccaaattgatttctcagaccaggtgggaatttttctgatttgtaaagcaatgtcacgccaaacgactcggaccgatg

SEQ ID NO: 5518 - DNA, 203 bp, Artificial sequence
  synthetic
ggcgcgccagtcctgcgggtcgccaagatatgtctcaggaccctaagaaatttacagaccctgtgatggatgtcatacacgagatggctcctcccttgaaatcacccagtgctgaagcttgtggttatagtgatcgagttgcccaactcacaattggaaactccacaatcactacacaagaagctgcacgactcggaccgatg

SEQ ID NO: 5519 - DNA, 203 bp, Artificial sequence
  synthetic
ggcgcgccagtcctgattcggccctaaaccattgcaactttggcttaattgtagtgcccgtagtaccactcgactttaacgctggagctacatcagaaataccaataactgtcaccatcgcacccatgtgcgctgaatttgcaggtttgcgacaggcaatcaaacaggggatacctaccgagttgaagcgactcggaccgatg

SEQ ID NO: 5520 - DNA, 203 bp, Artificial sequence
  synthetic
ggcgcgccagtcctatgcaacgactatgcttccctgtctcggtgcagagtaagacgggggaattgtgtgctgtttttagggccgaccctggtaggaatggaccgtggcagtcgactattttaggacagttgtgtaggtactatactcaatggtctggatctctggaagtcactttcatgtttgctggacgactcggaccgatg

SEQ ID NO: 5521 - DNA, 203 bp, Artificial sequence
  synthetic
ggcgcgccagtcctaacatccagggtgatggaattgcagacatgattgaccaggctgtcacttcccgagttggtcgtgcgctgacatccttacaggtagaacctaccgccgccaacaccaatgctagtgagcacagattgggcaccgggctcgtccccgccttgcaggctgcagagaccggcgcctctcgactcggaccgatg

SEQ ID NO: 5522 - DNA, 203 bp, Artificial sequence
  synthetic
ggcgcgccagtcctatgggttatgctcaaatgaggcgtaagtgtgagctattcacatacatgcgctttgatgcagagtttacatttgtagctgccaaaccaaacggtgagctagtaccacaattgttgcagtacatgtatgtgcctcccggagctccaaaacctacgtcccgggattcctttgcctggcgactcggaccgatg

SEQ ID NO: 5523 - DNA, 203 bp, Artificial sequence
  synthetic
ggcgcgccagtcctgtcgagcggcaccttaatagggcggtgttgatcatgcagtccattgccactgtggtagcagttgtttcactggtgtatgttatctacaaattgtttgcagggttccaaggtgcatactctggtgcccctaagcaaacactcaagaaacctatactccgcacagcgacagtgcaacgactcggaccgatg

SEQ ID NO: 5524 - DNA, 203 bp, Artificial sequence
  synthetic
ggcgcgccagtcctgctgttgagttggtggatgaacaaggggtcaacttagaactgaccctggttactcttgataccaatgagaagttcagagacatcaccaagttcatcccagaaaacattagcgctgccagtgatgccaccctagtgatcaacacagagcacatgccctccatgttcgtgccagtgcgactcggaccgatg

SEQ ID NO: 5525 - DNA, 203 bp, Artificial sequence
  synthetic
ggcgcgccagtcctaagaggagttattttgccagtgagcaaggagagatccagtgggtcaagcccaataaagagacaggcagactcaacatcaatgggccgactcgcactaagctcgaacccagtgtgttccatgatgtctttgaggggaacaaagaaccagcagtcttgcatagcagagacccacgccgactcggaccgatg

SEQ ID NO: 5526 - DNA, 203 bp, Artificial sequence
  synthetic
ggcgcgccagtcctcttgaagtggactttgagcaggctttattctccaagtatgtagggaacacactgcatgagcctgacgagtacatcaaagaggcggccctccactatgcaaatcagttgaagcaactggacatcaacacttctcaaatgagtatggaggaagcttgctatggtactgagaaccttcgactcggaccgatg

SEQ ID NO: 5527 - DNA, 203 bp, Artificial sequence
  synthetic
ggcgcgccagtcctctgcttccaggttcactctttgcatttgattactcaggctatgatgctagtctcagtccagtctggtttagagcactggagctggtcctcagggaggtgggctatagtgaggaggcagtctcccttatagaggggattaaccatacacaccatgtataccgcaataaaacttaccgactcggaccgatg

SEQ ID NO: 5528 - DNA, 203 bp, Artificial sequence
  synthetic
ggcgcgccagtcctgattgcctggaattggcaagaacaggcaaagagtatggtttgactatgactcctgcagacaaatctccttgcttcaatgaggtaaattggggcaatgcaacctttctcaaaagaggcttcttgcccgatgagcaattccctttcttgatccatcctaccatgccaatgaaggagcgactcggaccgatg

SEQ ID NO: 5529 - DNA, 203 bp, Artificial sequence
  synthetic
ggcgcgccagtccttgtttccccggtcaatgaggatatgctttacccaaggcaaaaaccttagagatcgttatccccacactgcctacacagagcccagtaccatttttgatataattgggttggtcgctccctgcaaacccagcagtagacctggcagatgaggctggacattccccactggcgacacgactcggaccgatg

SEQ ID NO: 5530 - DNA, 203 bp, Artificial sequence
  synthetic
ggcgcgccagtcctgtggtccagcctgcgtggctgcctgctcacccttcttgggtgagaagcctaattattgacaaggtgtgaagagccgcgtgtgctcagtgtgcttcctccggcccctgaatgtggctaaccttaaccctgcagccgttgcccataatccaatgggtttgcggtcgtaatgcgtaacgactcggaccgatg

SEQ ID NO: 5531 - DNA, 203 bp, Artificial sequence
  synthetic
ggcgcgccagtcctgtgcgggatgggaccaactactttgggtgtccgtgtttcctgtttttcttttgattgcattttatggtgacaatttatagtgtatagattgtcatcatgggtgcacaagtatctagacaaaatgttgggacacactccacacaaaattcagtgagcaatggatctagcttaaatcgactcggaccgatg

SEQ ID NO: 5532 - DNA, 203 bp, Artificial sequence
  synthetic
ggcgcgccagtcctttggcatctgcaacaagtggaaatgtatcagtcgggtacaatcacacccacccaggtgagcaaggtagagaagtagtaccatcacggacatctagtgataataaaagacctagtgatgacagttggttaaattttgatggaacattacttggtaacttacctatttatccccaccgactcggaccgatg

SEQ ID NO: 5533 - DNA, 203 bp, Artificial sequence
  synthetic
ggcgcgccagtcctcaatacattaatctaaggactaacaattcagctacccttattttaccttatgtcaatgctgtaccaatggactctatgcttagacataataattggagcttggttataatcccaatatgccctcttcaggtccaacctggggggacacaatccatacctataacagtatcaattcgactcggaccgatg

SEQ ID NO: 5534 - DNA, 203 bp, Artificial sequence
  synthetic
ggcgcgccagtcctcaagttaggaatttaattgaaatgtgccaagttgacacactcattcctgttaacaatacacaggaaaatgtaagatctgtgaatatgtacactgttgatttacgcacacaagttgatttagctaaagaagtcttttctataccagtagatattgcctcacaacctttagccactcgactcggaccgatg

SEQ ID NO: 5535 - DNA, 203 bp, Artificial sequence
  synthetic
ggcgcgccagtcctgtttctgcatgcaaagatttttgcttaagattagccagagatactaacctacacacacaagaaggagtactcacacaaaacccagttgaaaattatatagatagtgtattaaatgaagttcttgtggtgccaaatatccaacctagcacatctgtgtcaagtcatgcagcgcctcgactcggaccgatg

SEQ ID NO: 5536 - DNA, 203 bp, Artificial sequence
  synthetic
ggcgcgccagtcctattgccactctcacccttctaggttgttcaggctcaccatggaggtttcttaaagagaaactctgtgcgtggctccagcttagctatgtacataagcagtctgattcatggctcaagaaatttactgaagcgtgtaacgcagcacgtgggctagagtggattggacaaaagatacgactcggaccgatg

SEQ ID NO: 5537 - DNA, 203 bp, Artificial sequence
  synthetic
ggcgcgccagtccttccttaaaattcttaccactgtatgcatctgaagcacgtagaattaagaatttatatatcaaatgcagtaatgttattaaagggggaaagaggaatgaaccagttgcagttctaatacatggttctcctggtactggaaaatctcttgccacttctgttcttgctcgaatgctacgactcggaccgatg

SEQ ID NO: 5538 - DNA, 203 bp, Artificial sequence
  synthetic
ggcgcgccagtcctagctttcgaccatgtgatgttaatattaaaataggcaatgctaagtgctgtccatttatctgtggaaaagctgtagagtttaaagatagaaattcatgtacaaccttgtctttatctcaattgtatagtcatataaaggaagaagataggagaagaagcagtgcagcacaagcacgactcggaccgatg

SEQ ID NO: 5539 - DNA, 203 bp, Artificial sequence
  synthetic
ggcgcgccagtcctatggaggctatatttcaaggtatagacctccaatctcctccacctccagccatagctgacctccttaggtctgtgaaaacaccagagatcattaagtattgccaagataataattggattgttccagcagagtgttctattgaaagagatttagggatagcaaatatgactatacgactcggaccgatg

SEQ ID NO: 5540 - DNA, 203 bp, Artificial sequence
  synthetic
ggcgcgccagtcctaattgctgtgttgtgacaaccgacaaaggcaaattcacaggtcttggcatatatgaccaagtcatggtacttccaacacattctgacccaggctctgagatcttggtagatggagtaaaagttaaggtctctgattcctatgatttgcataaccatgagggtgttaagctagagcgactcggaccgatg

SEQ ID NO: 5541 - DNA, 203 bp, Artificial sequence
  synthetic
ggcgcgccagtcctaaagaacttcctgtatctgtaaagaacttaccatccgtacatgtttcatctaaaacccgactacaacctagtgtttttcatgatgttttccctggaacaaaagagcctgcagttcttagtagtaatgatccaagactagaaactgactttgactcagcacttttctccaaatatcgactcggaccgatg

SEQ ID NO: 5542 - DNA, 203 bp, Artificial sequence
  synthetic
ggcgcgccagtccttttaatacaataatcaacaatattatcattagaactttggtactagatgcttataagaacatagatctagataaactgaaaatcttagcatatggggatgatgtcatcttttcttataattttaaacttgacatggcagttcttgccaaagaaggagaaaaatatggactaacacgactcggaccgatg

SEQ ID NO: 5543 - DNA, 203 bp, Artificial sequence
  synthetic
ggcgcgccagtcctgaacacgtgctatctttgtgtcatttaatgtggcataatggtagacatgcataccaggaattcattaaaggtatacgcagtgtatctgccggtcgggcactgtatataccagcttatgaagttcttgaacatgaatggtatgaaaaattttagatataaaactgttaaatatagcgactcggaccgatg

SEQ ID NO: 5544 - DNA, 203 bp, Artificial sequence
  synthetic
ggcgcgccagtcctagacgtgattctggtcgcccggagatcaagcatggaagccgtcataaaggtgatttcgtccgcgtgtaaaacctattgcggaaaaacctctccttctaagaaggaaatcggggccatgttgtccctcttacaaaaagaagggttgcttatgtctccctcagacttatattcccccgactcggaccgatg

SEQ ID NO: 5545 - DNA, 203 bp, Artificial sequence
  synthetic
ggcgcgccagtcctgagctgctcccgagtggtaaagattggtgattttggacttgccagagatatctataaaaatgattactacaggaaaagaggagaaggcctactccctgtcagatggatggctcctgaaagcctcattgatggcgtctttacaaatcactctgatgtttgggcttttggagtcttcgactcggaccgatg

SEQ ID NO: 5546 - DNA, 203 bp, Artificial sequence
  synthetic
ggcgcgccagtcctagtgtgggaaacattaactttgggtcaacagccatatccgggtctctccaatatagaagttttacaccatgtacgatcaggaggaaggctggaatctccgaataactgtcctgatgacatacgtgatttaatgacaagatgctgggcccaagatcctcacaacagacctactttcgactcggaccgatg

SEQ ID NO: 5547 - DNA, 203 bp, Artificial sequence
  synthetic
ggcgcgccagtcctttctagctcacggtcatggctgtgaggacattgccggaatgtgttgtttcaatctgagtgatcacagtgagtctatacagaaaaagttccaactaatgaaggaacatgtcaataagatcggcgtggacagcgacccaatcggaagttggctgcgaggactattcggaggaatagcgactcggaccgatg

SEQ ID NO: 5548 - DNA, 203 bp, Artificial sequence
  synthetic
ggcgcgccagtcctcttgcgaatcgggctgtaacggggaaggcttgactaggggaccatggtatgtataggcggaaggcggggcttcggttgtacgcggttaggagtcccctcaggatatagtagttgcgcttctgcatagggagggggaaatgtagtcttatgcaatactcttatgtaacgatgaaacgactcggaccgatg

SEQ ID NO: 5549 - DNA, 203 bp, Artificial sequence
  synthetic
ggcgcgccagtcctcctcgacgagtgtcgaaagagaccgcaacgaagacgcgtcaacccagagtccaaatgccaaatgggcttgtgttgatgcgcatgatggggatcttgtggcatgccgtagccggcaccgcgagaaaccccgtattgaaggcgttctggaactcagtccctctgaaacaggcaacacgactcggaccgatg

SEQ ID NO: 5550 - DNA, 203 bp, Artificial sequence
  synthetic
ggcgcgccagtcctgcagcactgcggaagatcaaaaggacggtgagtgccctaatggttggcttgcaaaaacgtgggaaaaggaggtcagcgacggactggatgagctggttgctggtcatcactctgttggggatgacgcttgctgcaacggtgaggaaagaaagggatggctcaactgtgatcagacgactcggaccgatg

SEQ ID NO: 5551 - DNA, 203 bp, Artificial sequence
  synthetic
ggcgcgccagtcctcttgccttggcaatggttaccgttgtgtggttgaccctggagagtgtggtgaccagggttgccgttcttgttgtgctcctgtgtttggcaccggtttacgcttcgcgttgcacacacttggaaaacagggactttgtgactggtactcaggggactacgagggtcaccttggtgcgactcggaccgatg

SEQ ID NO: 5552 - DNA, 203 bp, Artificial sequence
  synthetic
ggcgcgccagtcctatccttgagcttgacaagacagtggaacaccttccaacggcttggcaggtccatagggactggttcaatgatctggctctgccatggaaacatgagggagcgcaaaactggaacaacgcagaaagactggttgaatttggggctcctcacgctgtcaagatggacgtgtacaaccgactcggaccgatg

SEQ ID NO: 5553 - DNA, 203 bp, Artificial sequence
  synthetic
ggcgcgccagtcctctcggagaccagactggagtgttactgaaggctctcgctggggttcctgtggcacacattgagggaaccaagtaccacctgaagagtggccacgtgacctgcgaagtgggactggaaaaactgaagatgaaaggtcttacgtacacaatgtgtgacaaaacaaagttcacatggcgactcggaccgatg

SEQ ID NO: 5554 - DNA, 203 bp, Artificial sequence
  synthetic
ggcgcgccagtcctagttcaattgggaaggcggtacatacggtccttggtggcgctttcaacagcatcttcgggggagtggggtttctaccaaaacttttattaggagtggcattggcttggttgggcctgaacatgagaaaccctacaatgtccatgagctttctcttggctggaggtctggtcttgcgactcggaccgatg

SEQ ID NO: 5555 - DNA, 203 bp, Artificial sequence
  synthetic
ggcgcgccagtccttcatggcctgctagccacactatcgataatgctgacgtggtggactcagagttattccttccggcgagcctggcaggacccagatcctggtacaacaggatacctggctattcagaacaggtgaaagggccatggaagtacacgcctatccgagttatcagagaggagtgtccccgactcggaccgatg

SEQ ID NO: 5556 - DNA, 203 bp, Artificial sequence
  synthetic
ggcgcgccagtcctggcacgaccgttaccatcaacgccaagtgtgacaaaagaggagcatctgtgaggagtaccacagagagtggcaaggttatcccagaatggtgctgccgagcgtgcacaatgccaccagtgacgttccggactggaactgattgctggtatgccatggaaatacggccagtccatcgactcggaccgatg

SEQ ID NO: 5557 - DNA, 203 bp, Artificial sequence
  synthetic
ggcgcgccagtcctgtcaccgggatggtcaggatagagagcctggtgcgctatgtggtggcagtggggatcacattccaccttgagctggggccagagatcgtggccttgatgctactccaggctgtgtttgagctgagggtgggtttgctcagcgcatttgcattgcgcagaagcctcaccgtccgacgactcggaccgatg

SEQ ID NO: 5558 - DNA, 203 bp, Artificial sequence
  synthetic
ggcgcgccagtcctcagcaggatgtggtgactgtgcaccatggactggtgtgcttcctaagtgtagcttcggcatgctcggtctggaggctgctcaagggacacagagagcagaagggattgacctgggttgtccccctggctgggttgcttgggggagagggctctggaatcagactgctggcgtttcgactcggaccgatg

SEQ ID NO: 5559 - DNA, 203 bp, Artificial sequence
  synthetic
ggcgcgccagtccttggggtcagaaccaggtgggagttggctacggttccaagggtgtcttgcacacgatgtggcacgtgacgagaggagcggcgctgtctattgatgacgctgtggccggtccctactgggctgatgtgagggaagatgtcgtgtgttacggaggagcctggagcctggaggaaaaacgactcggaccgatg

SEQ ID NO: 5560 - DNA, 203 bp, Artificial sequence
  synthetic
ggcgcgccagtcctagagtcctcccggagctcattcgccaatgcattgacaggcgcctgagaacgttggtgttggctccaactcgtgtggtactcaaagaaatggagcgtgctttgaatgggaaacgggtcaggttccactcaccagcagtcagtgaccaacaggctggaggggcaattgtcgatgtgcgactcggaccgatg

SEQ ID NO: 5561 - DNA, 203 bp, Artificial sequence
  synthetic
ggcgcgccagtcctatgtgtcacgcaacctatgtcaacagaaggctactcccacagggaagacaaaattgggaggtggcaatcatggatgaggcccactggacggacccccacagcatagctgccagaggtcatttgtatactctggcaaaagaaaacaagtgtgcactggtcttgatgacagcgacacgactcggaccgatg

SEQ ID NO: 5562 - DNA, 203 bp, Artificial sequence
  synthetic
ggcgcgccagtcctcctcctggtaagagtgaaccctttccggagtccaatggagccattactagtgaggaaagacagattcctgatggggagtggcgtgacgggtttgactggatcactgagtatgaagggcgcaccgcctggtttgtcccttcgattgcaaaaggtggtgctatagctcgcaccttgcgactcggaccgatg

SEQ ID NO: 5563 - DNA, 203 bp, Artificial sequence
  synthetic
ggcgcgccagtcctagacagaaggggaaaagtgtgatttgtttgaacagcaaaacctttgaaaaggactactccagagtgagggatgagaagcctgactttgtggtgacgactgatatctcggagatgggagctaaccttgacgtgagccgcgtcatagatgggaggacaaacatcaagcccgaggagcgactcggaccgatg

SEQ ID NO: 5564 - DNA, 203 bp, Artificial sequence
  synthetic
ggcgcgccagtccttttctgactatggttgagatgatggtgctgggtttggcaaccctgggtgtcatctggtgcttcgtcgtccggacttcaatcagccgcatgatgctgggcacgctggtcctgctggcctccttgctactcttgtgggcaggtggcgtcggctatgggaacatggctggagtggctcgactcggaccgatg

SEQ ID NO: 5565 - DNA, 203 bp, Artificial sequence
  synthetic
ggcgcgccagtcctctcatcttttacacgttgctgacggtgctgcagcctgaggcgggaaaacagagaagcagtgacgacaacaaactggcatatttcttgctgacgctctgcagccttgctggactggttgcagccaatgagatgggctttctggagaagaccaaggcagacttgtccacggcgctgcgactcggaccgatg

SEQ ID NO: 5566 - DNA, 203 bp, Artificial sequence
  synthetic
ggcgcgccagtccttggagtgaacgggaggaaccccggccatggagtgaatggacgaatgtggacatccagccagcgaggtcctgggggacctatgtgctggtggtgtctctgttcacaccttacatcatccaccaactgcagaccaaaatccaacaacttgtcaacagtgccgtggcatctggtgcacgactcggaccgatg

SEQ ID NO: 5567 - DNA, 203 bp, Artificial sequence
  synthetic
ggcgcgccagtcctcaggccatgagagaccttgggggaggtgcccccttctttggtgtggcgggacatgtcatgaccctcggggtggtgtcactgattggggctactcccacctcactgatggtgggcgttggcttggcggcactccatctggccattgtggtgtctggtctggaggctgaattaacacgactcggaccgatg

SEQ ID NO: 5568 - DNA, 203 bp, Artificial sequence
  synthetic
ggcgcgccagtcctaagatggtaacaagcctgggttggaacttgattaaattcagatcaggaatggacgtgttcagcatgcagccacaccgggctgacactgtcatgtgtgacatcggagagagcagcccagatgccgctgtggagggtgagaggacaaggaaagtgatactgctcatggagcaatggcgactcggaccgatg

SEQ ID NO: 5569 - DNA, 203 bp, Artificial sequence
  synthetic
ggcgcgccagtcctgtgaaatcaaatgcagccttgggagcttggtcagatgagcaaaacagatgggcaagtgcaagagaggctgtagaggatcctgcattctggcgcctcgtggatgaagagagagaaaggcacctcatggggagatgtgcgcactgcgtgtacaacatgatgggcaagagagaaaagcgactcggaccgatg

SEQ ID NO: 5570 - DNA, 203 bp, Artificial sequence
  synthetic
ggcgcgccagtcctgtcgtgaaggtcgcgaggccttcccgtgatggaggctgcatcatggatgtcatcacaagaagagaccaaagaggttcgggtcaggttgtgacctatgcccttaacaccctcaccaacataaaggtgcaattaatccgaatgatggaaggggaaggggtcatagaggcagcggatcgactcggaccgatg

SEQ ID NO: 5571 - DNA, 203 bp, Artificial sequence
  synthetic
ggcgcgccagtcctgaatgggagcactcagccggcttttcaagctgggaggaggtacccttttgttcacaccatttccacgagctagtgatgaaggatggacgcaccctggtggtgccgtgccgagaccaagatgaactcgttgggagggcgcgcatctcaccggggtgcggctggagtgtccgcgagcgactcggaccgatg

SEQ ID NO: 5572 - DNA, 203 bp, Artificial sequence
  synthetic
ggcgcgccagtcctacgtgggggagttgatcccccccccccggcactgggtgcaagccccagaaaccgacgcctatctaagtagacgcaatgactcggcgccgactcggcgaccggccaaaaggtggtggatgggtgatgacagggttggtaggtcgtaaatcccggtcaccttggtagccactatagcgactcggaccgatg

SEQ ID NO: 5573 - DNA, 203 bp, Artificial sequence
  synthetic
ggcgcgccagtcctagtggcccctttcatgcccccagtatgtctatgggtctgctacagtcacttgcgtgtggggttccgcttcttggtttgcctccaccagtggtcgcgactcgaagatagatgtgtggagtttagtgccagttggctctgccacctgcaccatagccgcacttggatcatcggatccgactcggaccgatg

SEQ ID NO: 5574 - DNA, 203 bp, Artificial sequence
  synthetic
ggcgcgccagtcctgcgacacggtgcctgggctctccgagtggggaatcccgtgcgtgacgtgtgttctggaccgtcggcctgcctcctgcggcacctgtgtgagggactgctggcccgagaccgggtcggttaggttcccattccatcggtgcggcgtggggcctcggctgacaaaggacttggaagcgactcggaccgatg

SEQ ID NO: 5575 - DNA, 203 bp, Artificial sequence
  synthetic
ggcgcgccagtcctctgtgcccttcgtcaacaggacaactcccttcaccattagggggcccctgggcaaccagggccgaggcaacccggtgcggtcgcccttgggttttgggtcctacgccatgaccaggatccgagataccctacatctggtggagtgtcccacaccagccattgagcctcccaccgcgactcggaccgatg

SEQ ID NO: 5576 - DNA, 203 bp, Artificial sequence
  synthetic
ggcgcgccagtcctgcctgatgttcctcgtgttgtggaagcttgctcggggagctttcccgctggccctcttgatggggatttcggcgacccgcgggcgcacctcagtgctcggggccgagttctgcttcgatgctacattcgaggtggacacttcggtgttgggctgggtggtggccagtgtggtagcgactcggaccgatg

SEQ ID NO: 5577 - DNA, 203 bp, Artificial sequence
  synthetic
ggcgcgccagtcctcttgggccattgcgctcctgagctcgatgagcgcaggggggtggaggcacaaagccgtgatctataggacgtggtgtaaggggtaccaggcaatccgtcaaagggtggtgaggagccccctcggggaggggcggcctgccaaacccctgacctttgcctggtgcttggcctcgtcgactcggaccgatg

SEQ ID NO: 5578 - DNA, 203 bp, Artificial sequence
  synthetic
ggcgcgccagtcctagtgcgtcatgggtttacccgtggttgcgcgccgtggtgatgaggttctcatcggcgtcttccaggatgtgaatcatttgcctcccgggtttgttccgaccgcgcctgttgtcatccgacggtgcggaaagggcttcttgggggtcacaaaggctgccttgacaggtcgggatccgactcggaccgatg

SEQ ID NO: 5579 - DNA, 203 bp, Artificial sequence
  synthetic
ggcgcgccagtcctctgacttacatccagggaacgtcatggtgttggggacggctacgtcgcgaagcatgggaacatgcttgaacggcctgctgttcacgaccttccatggggcttcatcccgaaccatcgccacacccgtgggggcccttaatcccagatggtggtcagccagtgatgatgtcacggcgactcggaccgatg

SEQ ID NO: 5580 - DNA, 203 bp, Artificial sequence
  synthetic
ggcgcgccagtccttcacaaggatcactgactcccccctgacgtattcaacctatgggaggtttttggccaaccctaggcagatgctacggggcgtttcggtggtcatttgtgatgagtgccacagtcatgactcaaccgtgctgttaggcattgggagagtccgggagctggcgcgtgggtgcggggcgactcggaccgatg

SEQ ID NO: 5581 - DNA, 203 bp, Artificial sequence
  synthetic
ggcgcgccagtccttgcaactagtgctctacgccaccgctacacctcccggatcccctatgacgcagcacccttccataattgagacaaaattggacgtgggcgagattcccttttatgggcatggaatacccctcgagcggatgcgaaccggaaggcacctcgtgttctgccattctaaggctgagtcgactcggaccgatg

SEQ ID NO: 5582 - DNA, 203 bp, Artificial sequence
  synthetic
ggcgcgccagtcctgcgagcgccttgctggccagttctccgctaggggggtcaatgccattgcctattataggggtaaagacagttctatcatcaaggatggggacctggtggtctgtgctacagacgcgctttccactgggtacactggaaatttcgactccgtcaccgactgtggattagtggtggcgactcggaccgatg

SEQ ID NO: 5583 - DNA, 203 bp, Artificial sequence
  synthetic
ggcgcgccagtcctgctgggcaaaagttcgcggcgtcaactggcccctcttggtgggtgttcagcggaccatgtgtcgggaaacactgtctcccggcccatcggatgacccccaatgggcaggtctgaagggcccaaatcctgtcccactcctgctgaggtggggcaatgatttaccatctaaagtggcgactcggaccgatg

SEQ ID NO: 5584 - DNA, 203 bp, Artificial sequence
  synthetic
ggcgcgccagtcctgagaagtgttgtccttggctcaggctaagacggccgaggcctacacagcaaccgccaagtggctcgctggctgctatacggggacgcgggccgttcccactgtatccattgttgacaagctcttcgccggagggtgggcggctgtggtgggccattgccacagcgtgattgctgcgactcggaccgatg

SEQ ID NO: 5585 - DNA, 203 bp, Artificial sequence
  synthetic
ggcgcgccagtcctgccttgcggggatcgctctcgggttggttttgtattcagctaacaactctggcactaccacttggttgaaccgtctgctgactacgttaccaaggtcttcatgtatcccggacagttactttcagcaagttgactattgcgacaaggtctcagccgtgctccggcgcctgagcccgactcggaccgatg

SEQ ID NO: 5586 - DNA, 203 bp, Artificial sequence
  synthetic
ggcgcgccagtccttcacccgcacagtggttgccctggtcaacagggagcctaaggtggatgaggtacaggtggggtatgtctgggacctgtgggagtggatcatgcgccaagtgcgcgtggtcatggccagactcagggccctctgccccgtggtgtcactacccttgtggcattgcggggaggggtcgactcggaccgatg

SEQ ID NO: 5587 - DNA, 203 bp, Artificial sequence
  synthetic
ggcgcgccagtcctcatcgccagcacttatctcggttactgagagcagctcagatgagaagaccccgtcggtgtcctcctcgcaggaggataccccgtcctctgactcattcgaggtcatccaagagtccgagacagccgaaggggaggaaagtgtcttcaacgtggctctttccgtattaaaagcctcgactcggaccgatg

SEQ ID NO: 5588 - DNA, 203 bp, Artificial sequence
  synthetic
ggcgcgccagtccttatttccacagagcgacgcgaccaggaagcttaccgtcaagatgtcgtgctgcgttgaaaagagcgtcacgcgctttttctcattggggttgacggtggctgatgttgctagcctgtgtgagatggaaatccagaaccatacagcctattgtgaccaggtgcgcactccgcttgcgactcggaccgatg

SEQ ID NO: 5589 - DNA, 203 bp, Artificial sequence
  synthetic
ggcgcgccagtcctaattgcaggttgggtgcttggtgggcaatgaacttacctttgaatgtgacaagtgtgaggctaggcaagaaaccttggcctccttctcttacatttggtctggagtgccgctgactagggccacgccggccaagcctcccgtggtgaggccggttggctctttgttagtggccgcgactcggaccgatg

SEQ ID NO: 5590 - DNA, 203 bp, Artificial sequence
  synthetic
ggcgcgccagtcctacactactaaggtgtatgttaccaatccagacaatgtgggacggagggtggacaaggtgaccttctggcgtgctcctagggttcatgataagtacctcgtggactctattgagcgcgctaagagggccgctcaagcctgcctaagcatgggttacacttatgaggaagcaataacgactcggaccgatg

SEQ ID NO: 5591 - DNA, 203 bp, Artificial sequence
  synthetic
ggcgcgccagtcctggactgtaaggccacatgctgccatgggctggggatctaaggtgtcggttaaggacttagccacccccgcggggaagatggccgtccatgaccggcttcaggagatacttgaagggactccggtcccctttactcttactgtgaaaaaggaggtgttcttcaaagaccggaaggcgactcggaccgatg

SEQ ID NO: 5592 - DNA, 203 bp, Artificial sequence
  synthetic
ggcgcgccagtcctgcgacgctttgggcagagccctagcgagctatgggtacgcgtgcgagccctcatatcatgcatcattggacacggcccccttctgctccacttggcttgctgagtgcaatgcagatgggaagcgccatttcttcctgaccacggacttccggaggccgctcgctcgcatgtcgacgactcggaccgatg

SEQ ID NO: 5593 - DNA, 203 bp, Artificial sequence
  synthetic
ggcgcgccagtcctgtgagtatagtgacccgatggcttcggcgatcggttacatcctcctttatccttggcaccccatcacacggtgggtcatcatccctcatgtgctaacgtgcgcattcaggggtggaggcacaccgtctgatccggtttggtgccaggtgcatggtaactactacaagtttccaccgactcggaccgatg

SEQ ID NO: 5594 - DNA, 203 bp, Artificial sequence
  synthetic
ggcgcgccagtccttggacaaactgcctaacatcatcgtggccctccacggaccagcagcgttgagggttaccgcagacacaactaaaacaaagatggaggctggtaaggttctgagcgacctcaagctccctggcttagcagtccaccgaaagaaggccggggcgttgcgaacacgcatgctccgctcgactcggaccgatg

SEQ ID NO: 5595 - DNA, 203 bp, Artificial sequence
  synthetic
ggcgcgccagtcctcgcgcggttgggctgagttggctaggggcttgttgtggcatccaggcctacggcttcctccccctgagattgctggtatcccggggggtttccctctctcccccccctatatgggggtggtacatcaattggatttcacaagccagaggagtcgctggcggtggttggggttctcgactcggaccgatg

SEQ ID NO: 5596 - DNA, 203 bp, Artificial sequence
  synthetic
ggcgcgccagtccttagccctgctcatcgtagccctcttcgggtgaactaaattcatctgttgcggcaaggtctggtgactgatcatcaccggaggaggttcccgccctccccgccccaggggtctccccgctgggtaaaaagggcccggccttgggaggcatggtggttactaaccccctggcagggcgactcggaccgatg

SEQ ID NO: 5597 - DNA, 203 bp, Artificial sequence
  synthetic
ggcgcgccagtccttgtataaatgtacccgcttcttgcattgtattcagtcgctctgcggagaggctggcagatcgagccctgagaggttctctccagcactagcaggtagagcctgggtgttccctgctggactctcaccagtacttggccggtactgggcagacggctccacgcttgcttgcttaacgactcggaccgatg

SEQ ID NO: 5598 - DNA, 203 bp, Artificial sequence
  synthetic
ggcgcgccagtcctagacctcttcaataaagctgccagttagaagcaagttaagtgtgtgttcccatctctcctagtcgccgcctggtcattcggtgttcatctgagtaacaagaccctggtctgttaggacccttctcgctttgggaatccaaggcaggaaaatccctagcaggttggcgcccgaaccgactcggaccgatg

SEQ ID NO: 5599 - DNA, 203 bp, Artificial sequence
  synthetic
ggcgcgccagtcctagggacttgaagaggactgagaagccctggaactcggctgagtgaaggcagtaagggcggcaggaacaaaccacgacggagtgctcctagaaaggcgcgggccgaggtaccaaaggcggcgtgtggagcgggagtgaaagaggcctccgggtgaaggtaagtacctacaccaaacgactcggaccgatg

SEQ ID NO: 5600 - DNA, 203 bp, Artificial sequence
  synthetic
ggcgcgccagtccttgaggaagcaaagaaactagcacagagacatctagtggcagaaactggaactgcagagaaaatgccaaatacaagtagaccaacagcaccacctagtgggaaaagaggaaactaccccgtgcaacaagcgggtggcaactatgtccatgtgccactgagcccccgaactctaaacgactcggaccgatg

SEQ ID NO: 5601 - DNA, 203 bp, Artificial sequence
  synthetic
ggcgcgccagtccttgcatgggtaaaattagtggaggaaaagaagttcggggcagaagtagtgccaggatttcaggcactctcagaaggctgcacgccctatgatattaatcaaatgcttaattgtgtgggcgatcaccaagcagctatgcaaataatcagagagattattaatgaagaagcagcagacgactcggaccgatg

SEQ ID NO: 5602 - DNA, 203 bp, Artificial sequence
  synthetic
ggcgcgccagtcctcccagactgcaagttagtactaaaaggactggggatgaatcccaccctagaagagatgctaaccgcctgccagggggtaggcggaccaggccagaaagccaggctaatggctgaagccctaaaagaggctatgggaccaagccctatcccatttgcagcagcccaacaaagaaacgactcggaccgatg

SEQ ID NO: 5603 - DNA, 203 bp, Artificial sequence
  synthetic
ggcgcgccagtcctccccgtgacccaagcccctcaggggctgataccaacagcacctccggcagatccagcagcggaactgttggagagatatatgcagcaagggagaaagcagagggagcagagggagagaccatacaaagaggtgacggaggacttgctgcacctcgagcagagagagacacctcacgactcggaccgatg

SEQ ID NO: 5604 - DNA, 203 bp, Artificial sequence
  synthetic
ggcgcgccagtccttttgtatctaccccaccactggtcaggttaacatttaacctagtaggagatcctataccaggcgcagagaccttctacacagatggatcatgcaatagacagtcaaaagagggaaaagcaggatatgtaacagatagaggaaaagacaaagtaaaagtattagaacaaactacccgactcggaccgatg

SEQ ID NO: 5605 - DNA, 203 bp, Artificial sequence
  synthetic
ggcgcgccagtcctcttctagtagcaagacagatagtaaactcatgtgcccaatgccaacagaaaggagaagccatacatgggcaagtaaatgcagaaataggcgtttggcaaatggactacacacacttagaaggaaaaatcattatagtagcagtacatgttgcaagtggattcatagaagcagaacgactcggaccgatg

SEQ ID NO: 5606 - DNA, 203 bp, Artificial sequence
  synthetic
ggcgcgccagtcctgtcatcccacaggaatcaggaaggcagacagcactcttcctattaaaactggccagtaggtggccaataacgcacttgcacacagacaatggccccaacttcacttcacaggaagtgaagatggtggcatggtgggtaggtatagaacaatcctttggagtaccttacaacccacgactcggaccgatg

SEQ ID NO: 5607 - DNA, 203 bp, Artificial sequence
  synthetic
ggcgcgccagtcctattaccacagaacaagaaatacaattcctccaaagaaaaaattcaaattttaaaaatttccaggtctattacagagaaggcagagatcagctgtggaaaggacctggtgaactactgtggaagggagaaggagcagtcatagtcaaggtagggacagacataaaagtagtaccacgactcggaccgatg

SEQ ID NO: 5608 - DNA, 203 bp, Artificial sequence
  synthetic
ggcgcgccagtcctagaaggaaggccaagattatcagggactatggaggaagacaggaactggatagtagtccccacctggagggtgccagggaggatggagaaatggcatgcccttgtcaagtacctgaaatacagaacaaaagacctagaggaggtgcgctatgttccccaccacaaggtgggatgcgactcggaccgatg

SEQ ID NO: 5609 - DNA, 203 bp, Artificial sequence
  synthetic
ggcgcgccagtcctcctaatacatagcacttatttctcttgctttacggcaggtgaagtaagaagagccatcagaggggaaaagttattgtcctgctgcaactatccccaagctcataaagcacaggtaccatcacttcaatacctagccctagtagtagtacaacaaaatgacagaccccagagaaacgactcggaccgatg

SEQ ID NO: 5610 - DNA, 203 bp, Artificial sequence
  synthetic
ggcgcgccagtcctgggtaccgccaggaaacagtggagaagagaccattggagaggccttcgagtggctagagaggaccatagaagccttaaacagggaggcagtgaaccatctgccccgagagctcattttccaggtgtggcaaaggtcctggagatattggcatgatgaacaagggatgtcagcaacgactcggaccgatg

SEQ ID NO: 5611 - DNA, 203 bp, Artificial sequence
  synthetic
ggcgcgccagtcctgctacacaaagtatagatatttgtgcctaatgcaaaaagctatatttacacatttcaagagagggtgcacttgctggggggaggacatgggccgggaaggattggaagaccaaggacctccccctcctccccctccaggtctagtctaatgactgaagcaccaacagagtttcccgactcggaccgatg

SEQ ID NO: 5612 - DNA, 203 bp, Artificial sequence
  synthetic
ggcgcgccagtcctcccagaagatgggaccccacggagggacttagggagtgactgggtaatagaaactctgagggaaataaaggaagaagccttaagacattttgatccccgcttgctaattgctcttggctactatatccataatagacatggagacacccttgaaggcgccagagagctcattaacgactcggaccgatg

SEQ ID NO: 5613 - DNA, 203 bp, Artificial sequence
  synthetic
ggcgcgccagtcctggctcggaatatcatatgagcgaaagggcagacgaagaaggactccaaggaaaactaagactccttcgccttctgcaccagacaagtgagtatggagcctggtaggaatcagctgtttgttgtcattttactaacaagtgcttgcttagtatattgtagccagtatgtgactgtcgactcggaccgatg

SEQ ID NO: 5614 - DNA, 203 bp, Artificial sequence
  synthetic
ggcgcgccagtcctagtagaagatgtctggcatctatttgagacatcaataaaaccatgtgtcaagctaacacctctatgtgtggcaatgaattgtagcagggttcaagggaataccacgaccccgaatcccaggacctcgagttccacaacctcgagaccacccacatccgcagcctccataataaacgactcggaccgatg

SEQ ID NO: 5615 - DNA, 203 bp, Artificial sequence
  synthetic
ggcgcgccagtccttgaaacttctaactgcatagaaaacaacacatgcgcaggattagggtatgaggagatgatgcaatgtgagttcaatatgaaggggttagaacaagataagaaaaggaggtataaggacacatggtatttagaagatgtggtttgtgacaacacaacagctggcacatgttacatcgactcggaccgatg

SEQ ID NO: 5616 - DNA, 203 bp, Artificial sequence
  synthetic
ggcgcgccagtcctgagacattgcaacacatcaatcatcaaagagtcatgtgataagcactattgggatgctatgaggtttagatactgtgcaccaccgggctttgccctattaagatgtaatgataccaactattcaggctttgaacctaagtgcactaaagtagtagctgcttcatgcacaaggatcgactcggaccgatg

SEQ ID NO: 5617 - DNA, 203 bp, Artificial sequence
  synthetic
ggcgcgccagtcctgtttgacttaacctcctgggtcaagtatattcaatatggagtgcatatagtagtgggaataatagctttaagaatagcaatctatgtagtgcaattgttaagtagatttagaaagggctataggcctgttttctcttccccccccggttatctccaacagatccatatccacaacgactcggaccgatg

SEQ ID NO: 5618 - DNA, 203 bp, Artificial sequence
  synthetic
ggcgcgccagtcctcaggaagtagctactaagaaacagctgaggctgcagggactttccagaaggggctgtaaccaagggagggacatgggaggagctggtggggaacgccctcatacttactgtataaatgtacccgcttcttgcattgtattcagtcgctctgcggagaggctggcagatcgagcccgactcggaccgatg

SEQ ID NO: 5619 - DNA, 203 bp, Artificial sequence
  synthetic
ggcgcgccagtcctgaaaaatttgtacctttgtttgtggtcaccatgtcccaagcagtaccatattggcggcagaccatgcaggcacgcaatcaaaatggtaaaaagcaaaagaaccgcattgctgaactagaaaaagaggtagcagacttaactagcgccggtaggggagctgatcaggttatagcacgactcggaccgatg

SEQ ID NO: 5620 - DNA, 203 bp, Artificial sequence
  synthetic
ggcgcgccagtcctttgactatgcccaccagatcaaaaggaccgaagaaacggggccctgatttgaaacagattagatcgttgcacgtgatggctgattcattgggcatggacagtgatggcatagactgggattggttggctagacaagcctgggactatgaaggagatgaggatccacatgttaagcgactcggaccgatg

SEQ ID NO: 5621 - DNA, 203 bp, Artificial sequence
  synthetic
ggcgcgccagtcctgaagcagaggaggaggcatggcgtgagagacaaacatctcaaccatcccaaccctctcagttgagaccttttgtagccgcagggaacggtcatagggaagatcaatggagacccctgacagtcacagaattacccgcagccgttaccgcagtaggaggagcatgggatcccacgcgactcggaccgatg

SEQ ID NO: 5622 - DNA, 203 bp, Artificial sequence
  synthetic
ggcgcgccagtcctaagcagggacccggaggaggacagggtttgttggaatttactaagttaagacaaggacccactgagaatcctagtaactacttggaaaaggctctagaattgtacctagactctcaacccggtgatagagacggtaacaaagatgaccccgcatttctgcagcaggctactcaacgactcggaccgatg

SEQ ID NO: 5623 - DNA, 203 bp, Artificial sequence
  synthetic
ggcgcgccagtcctggccacaagatcgagtgtctagtggacacaggagcagaggtgtcattaacatcccttcaattacaggcacaacgatttgaacaggtggttggtttgggaggcaaaccggtgagagtagggatagcggatcatgtcgataccacagtaggacaagtaaaaggaaaaggctgctggcgactcggaccgatg

SEQ ID NO: 5624 - DNA, 203 bp, Artificial sequence
  synthetic
ggcgcgccagtcctcatgcttcaccaggcatattccaccaagccctgtacaatggactggcctcctgtaaaacagcgattgaaagtcagggttgtaaactattgcaatatgtagatgatatcctgttgatgagtgaagatagggaccatcatttaaggtcgctggcaatattactgcaaggcctcaagcgactcggaccgatg

SEQ ID NO: 5625 - DNA, 203 bp, Artificial sequence
  synthetic
ggcgcgccagtcctatccaaggatggtttgtcccggagccttatgagggggaacagcaccagtgccgacctcatgatgacacaataacatggagagtcagcactagagctatgcccacgggtgagaagtggtggatagacggaagtagatattgggatcatgataagggaggctacgttacaggatggcgactcggaccgatg

SEQ ID NO: 5626 - DNA, 203 bp, Artificial sequence
  synthetic
ggcgcgccagtccttggaaaaggaggggtatggtcaatgcagatggatcacagatcagcaaccagaatatcctacaagaaatttggcaattgattgaacatgattctacacaaacgcttggtatagtcaaggtaaaagcacatacccagcgtaaatgtagcacgcatgaacaacaactgaataatgatcgactcggaccgatg

SEQ ID NO: 5627 - DNA, 203 bp, Artificial sequence
  synthetic
ggcgcgccagtcctgtagatcagccggcaaaacaatatgctaaggaagaacctaacatgtcagtcatagcacctctgcaagtctatccattatggataggtttggtaccatgtaaagaaccaaaattgtgggaaaatatacaacatcacatcacaaaggttgacctgcccgacttccagaaacaacttcgactcggaccgatg

SEQ ID NO: 5628 - DNA, 203 bp, Artificial sequence
  synthetic
ggcgcgccagtcctggaaaagtacaaggctacgtcattaagacaaccttaggcatgaaaacatggataatgaatgatcacctggtgactcagagtgaacagactgagggtagggctaagctaagcagcacggaaggctacgccttagcccaacaataccatcatctgtacggtcacccctcagaggaacgactcggaccgatg

SEQ ID NO: 5629 - DNA, 203 bp, Artificial sequence
  synthetic
ggcgcgccagtcctgtgggacctttgggacctggtacccatggatacaggtacctcacaaccatggttgatgtgtacacaggttggttctgggccaaaccctgtagaggtccaactacgggtgccactatagcggccttagaggaacacatcagtatttggggggtaccctattctatacaatctgatcgactcggaccgatg

SEQ ID NO: 5630 - DNA, 203 bp, Artificial sequence
  synthetic
ggcgcgccagtcctcaaaataagaagtgggaagaacagttagaaaaggtcactaaagcagaagcccactcacactggactcagaggagccctaatttagaacctggctgcattgtgttagtaagaaagttcaccggggatgccttctcacctaaatgggaaggaccatatgtgataacagaaactacccgactcggaccgatg

SEQ ID NO: 5631 - DNA, 203 bp, Artificial sequence
  synthetic
ggcgcgccagtcctaccaaggcaaaaacgtagcctaaggaaccaacccacagaatggcatctccatatgtgtggaccaccaggtgattacatatgcatgtggaccaataagaaaccagtgtgtactacctatcatgaaggacaggatacatactccttagggacgcataggaaggtgctccccaaagtcgactcggaccgatg

SEQ ID NO: 5632 - DNA, 203 bp, Artificial sequence
  synthetic
ggcgcgccagtcctaactgaagcctgtgcggttggacaacctcctcagatacccggaacctatgtagccagtagtaaaggatggactatgtttaataaatttgaagtccattcctaccccgctaatgtcacccagattaaaacaaacagaacactgcatgacgtaacattatggtggtgtcatgacaacgactcggaccgatg

SEQ ID NO: 5633 - DNA, 203 bp, Artificial sequence
  synthetic
ggcgcgccagtcctcaccgccacccgtgtccaaatgcagaaaataggaccaggggaatggaaaatagcaactagcatggtagggctatgcctggacgaatgggaaatagagtgcaccggcttctgtagtggtcctcctccttgcagtttaagcataactcaacagcaggatacagtgggaggatcttacgactcggaccgatg

SEQ ID NO: 5634 - DNA, 203 bp, Artificial sequence
  synthetic
ggcgcgccagtcctactgatattaccttttactgtagcaccaaaatatagacgacaacgaaggggacttaacccctcaaccacacctgattattacactaatgaagattatagtggatcaggggggtgggaaataaatgacgagtgggaatatataccaccaacagtgaaaccaaccacgcctagtgtcgactcggaccgatg

SEQ ID NO: 5635 - DNA, 203 bp, Artificial sequence
  synthetic
ggcgcgccagtccttacacttatagggaaacactggattaaggtaattcagcggcttttacgggaatatcagaagacaggggttacctttaatctcccacaggttcaatcattacccaattgggaaaccaaaaacaaagataatcctggacatcacattcccaaaagccggcggaagagaattaggcgcgactcggaccgatg

SEQ ID NO: 5636 - DNA, 203 bp, Artificial sequence
  synthetic
ggcgcgccagtcctaggattaggtgaagctttaggattaggtaactttgctgataacagatggaaggatttacagatagcaggattaggggtagaacagcagaaattaatgggattaactagagaagccacgtttgaggcatggaatgccctgaagggtatttctaacgaattaattaaatgggaagacgactcggaccgatg

SEQ ID NO: 5637 - DNA, 203 bp, Artificial sequence
  synthetic
ggcgcgccagtcctagatatggtagccactctcagacagcttctattacaaattaaaggcactaatactaccctctgtagtgcgatgggaccgttaatggctaccaatatacaacaaataatgttcgcattacaacatggtaatctacctgaaatgtcttactctaaccctgtgttgaaggaaatagccgactcggaccgatg

SEQ ID NO: 5638 - DNA, 203 bp, Artificial sequence
  synthetic
ggcgcgccagtcctaaattcaggaacatggtcatcactgaaaaatgagacactgtatgtaagtggacgaaattgctccttctctctcaccagtaggcggcgacctgtgtgttttcacctaaatagcaccgcccaatggcgaggacacgttttgccttttgtaggtaactcccaggaagcacccaacaccgactcggaccgatg

SEQ ID NO: 5639 - DNA, 203 bp, Artificial sequence
  synthetic
ggcgcgccagtcctccaaaccagaagaagtgataagtttatataatcctgaattatttgcttgggggggaacactgggagattatgtatggtgtaaaactactactattcgatggggacctattgtaatgaagtatcgtgtgtgtgggcacctcgaatcagattataccacgagtcagtattacagagcgactcggaccgatg

SEQ ID NO: 5640 - DNA, 203 bp, Artificial sequence
  synthetic
ggcgcgccagtcctacatatgctcttaatgtacttgtttactgtttatacgcacccaagtaacaactgtatttaattataacctatgtgaatcataaggccaatcacgctaggaggcggcctctagtacttttccattgtatgaactattgttattagcccctccctgaaggaggagccacttgcctacgactcggaccgatg

SEQ ID NO: 5641 - DNA, 203 bp, Artificial sequence
  synthetic
ggcgcgccagtcctgaatcataaggccaatcacgctaggaggcggcctctagtacttttccattgtatgaactattgttattagcccctccctgaaggaggagccacttgcctatatattgtagagcacggctgtgctcattgtcttttgctgcacccaacttgaagaataaagattattgcatctgacgactcggaccgatg

SEQ ID NO: 5642 - DNA, 203 bp, Artificial sequence
  synthetic
ggcgcgccagtccttgtttagtctaactcaatagacatgtgtttattaccattttagttaatataaaaactcatcaaagggaaatggggcaaataaactcacctaatcaatcaaactatgagcactacaaatgacaacactactatgcaaagattaatgatcacggacatgagacccctgtcgatggacgactcggaccgatg

SEQ ID NO: 5643 - DNA, 203 bp, Artificial sequence
  synthetic
ggcgcgccagtccttgaatataatacaaaatatggcactttccccatgcctatatttatcaatcatggcgggtttctagaatgtattggcattaagcctacaaaacacactcctataatatacaaatatgacctcaacccgtaaattccaacaaaaaaaaccaacccaaccaaaccaagctattcctccgactcggaccgatg

SEQ ID NO: 5644 - DNA, 203 bp, Artificial sequence
  synthetic
ggcgcgccagtcctaggaatgctccatacattagtagttgcaagtgcaggacccacttcagctcgcgatggaataagagatgctatggttggtctgagagaagaaatgatagaaaaaataagagcggaagcattaatgaccaatgataggttagaggctatggcaagacttaggaatgaggaaagcgacgactcggaccgatg

SEQ ID NO: 5645 - DNA, 203 bp, Artificial sequence
  synthetic
ggcgcgccagtcctaaaaatggcaaaagacacctcagatgaagtgcctcttaatccaacttccaaaaaattgagtgacttgttggaagacaacgatagtgacaatgatctgtcacttgatgatttttgatcagtgatcaactcactcagcaatcaacaacatcaataaaacagacatcaatccattgacgactcggaccgatg

SEQ ID NO: 5646 - DNA, 203 bp, Artificial sequence
  synthetic
ggcgcgccagtcctgctagacctagagtgcgaataggtaaataaaaccaaaatatggggtaaatagacattagttagagttcaatcaatctcaacaaccatttataccgccaattcaatacatatactataaatcttaaaatgggaaatacatccatcacaatagaattcacaagcaaattttggccccgactcggaccgatg

SEQ ID NO: 5647 - DNA, 203 bp, Artificial sequence
  synthetic
ggcgcgccagtcctcacaagaatcaacgcactgccaggactctagaaaagacctgggatactctcaatcatctaattgtaatatcctcttgtttatacagattaaatttaaaatctatagcacaaatagcactatcagttctggcaatgataatctcaacctctctcataattgcagccataatattccgactcggaccgatg

SEQ ID NO: 5648 - DNA, 203 bp, Artificial sequence
  synthetic
ggcgcgccagtcctatcatctctgccaatcacaaagttacactaacaacggtcacagttcaaacaataaaaaaccacactgaaaaaaacatcaccacctaccttactcaagtcccaccagaaagggttagctcatccaaacaacctacaaccacatcaccaatccacacaaattcagccacaacatcacgactcggaccgatg

SEQ ID NO: 5649 - DNA, 203 bp, Artificial sequence
  synthetic
ggcgcgccagtcctaccctcacgaccacagaaagagacaccagcacctcacaatccactgtgctcgacacaaccacattagaacacacaatccaacagcaatccctccactcaaccacccccgaaaacacacccaactccacacaaacacccacagcatccgagccctctacatcaaattccacccaacgactcggaccgatg

SEQ ID NO: 5650 - DNA, 203 bp, Artificial sequence
  synthetic
ggcgcgccagtcctaatacccaatcacatgcttagttattcaaaaactacatcttagcagaaaaccgtgacctatcaagcaagaacgaaattaaacctggggcaaataaccatggagctgctgatccacaggttaagtgcaatcttcctaactcttgctattaatgcattgtacctcacctcaagtcacgactcggaccgatg

SEQ ID NO: 5651 - DNA, 203 bp, Artificial sequence
  synthetic
ggcgcgccagtcctaccaaaaataatgatattaccggataaatatccttgtagtatatcatccatattgatttcaagtgaaagcatgattgctacattcaatcataaaaacatattacaatttaaccataaccatttggataaccaccagcgtttattaaataatatatttgatgaaattcattggaccgactcggaccgatg

SEQ ID NO: 5652 - DNA, 203 bp, Artificial sequence
  synthetic
ggcgcgccagtcctgataataatctcaataatttgagtgagctatattttctcttcagaatctttggacatccaatggttgatgaaagacaagcaatggatgctgtaagaattaactgtaatgaaactaagttctacttattaagtagtctaagtacgttaagaggtgctttcatttatagaatcatacgactcggaccgatg

SEQ ID NO: 5653 - DNA, 203 bp, Artificial sequence
  synthetic
ggcgcgccagtcctaaattcaatcaagcatttagatatgaaacatcatgtatctgcagtgatgtattagatgaactgcatggagtacaatctctgttctcttggttgcatttaacaatacctcttgtcacaataatatgtacatatagacatgcacctcctttcataaaggatcatgttgttaatcttcgactcggaccgatg

SEQ ID NO: 5654 - DNA, 203 bp, Artificial sequence
  synthetic
ggcgcgccagtcctaatgaagttgatgaacaaagtggattatacagatatcatatgggtggtattgagggctggtgtcaaaaactgtggaccattgaagctatatcattattagatctaatatctctcaaagggaaattctctatcacagctctgataaatggtgataatcagtcaattgatataagtcgactcggaccgatg

SEQ ID NO: 5655 - DNA, 203 bp, Artificial sequence
  synthetic
ggcgcgccagtcctaaaccagttagacttatagagggtcagacccatgctcaagcagattatttgttagcattaaatagccttaaattgctatataaagagtatgcaggtataggccataagcttaagggaacagagacctatatatcccgagatatgcagttcatgagcaaaacaatccagcacaatcgactcggaccgatg

SEQ ID NO: 5656 - DNA, 203 bp, Artificial sequence
  synthetic
ggcgcgccagtcctaaaaagcaaagagaccaaatagatttattagcaaaattagactgggtatatgcatccatagacaacaaagatgaattcatggaagaactgagtactggaacacttggactgtcatatgaaaaagccaaaaagttgtttccacaatatctaagtgtcaattatttacaccgtttacgactcggaccgatg

SEQ ID NO: 5657 - DNA, 203 bp, Artificial sequence
  synthetic
ggcgcgccagtcctagaaacaaggcagtcaaccacctaccaatcccacaaacagaacgaatcaggacgaaatagatgatctgtttaatgcatttggaagcaactaatcgaatcaacattttgatccaaattaataataaataagaaaaacttaggattaaagaatcctattataccagaatatagggtcgactcggaccgatg

SEQ ID NO: 5658 - DNA, 203 bp, Artificial sequence
  synthetic
ggcgcgccagtcctggtaaatttagagtttgcttgcaactcaatcaatagagagttgatggaaagcgatgctaaaaactatcaaatcatggattcttgggaagaggaatcaagagataaatcaactaatatctcctcggccctcaatatcattgaattcatacttagcaccgacccccaagaagacctcgactcggaccgatg

SEQ ID NO: 5659 - DNA, 203 bp, Artificial sequence
  synthetic
ggcgcgccagtcctaatgaaaaatagtaggacaaagaaaagttcttcaatacaccaagaagatgacaaaagaattaaaaaagggggaaaagggaaagactggtttaagaaatcaaaagatactgacaaccagataccaacatcagactacagatccacatcaaaagggcagaagaaaatctcaaaaaccgactcggaccgatg

SEQ ID NO: 5660 - DNA, 203 bp, Artificial sequence
  synthetic
ggcgcgccagtccttctctcacaaagcacaaaacaatcatatataaacgaactcaaacattgcaaaaatgatgaagaagtatctgaattaatggacatgttcaatgaagatgtcaataattgccaatgatccaacaaagaaacgacaccgaacaaacagacaagaaacaacagtagatcaaaatctatcgactcggaccgatg

SEQ ID NO: 5661 - DNA, 203 bp, Artificial sequence
  synthetic
ggcgcgccagtcctacaaagtttgtggctctggatcattaccaatcggattggctaaatacactgggaatgaccaggaattattacaagctgcaaccaaactggacatagaagtgagaagaacagtcaaagcgaaagagatggttgtgtatacagtacaaaatataaaaccagaactatacccatggtcgactcggaccgatg

SEQ ID NO: 5662 - DNA, 203 bp, Artificial sequence
  synthetic
ggcgcgccagtcctacacaatatcaatcaatctgcaggtacatatcaaaacaggggttcagactgattccaaagggatagttcaaattttgaatgagaagggcgaaaaatcactgaatttcatgatccatctcggattgatcaagagaaaaataggcagaatgtactctgttgaatactgtaaacagacgactcggaccgatg

SEQ ID NO: 5663 - DNA, 203 bp, Artificial sequence
  synthetic
ggcgcgccagtcctccctttattaactaggctgctgaacactcagatctacaaagtagattccatatcatataatatccacaatagagaatggtatattcctcttcccagccatatcatgacgaaaggggcatttctaggtggagcagatgtcaaagaatgtatagaagcattcagcagttatatatgcgactcggaccgatg

SEQ ID NO: 5664 - DNA, 203 bp, Artificial sequence
  synthetic
ggcgcgccagtccttatgagacaaaattactgggggtcagaaggaaggttgattctactaggtaacaagatctatatatatacaagatctacaagttggcatagcaaattacaattaggaataattgatattactgattacagtgatataaggataaaatggacatggcataatgtgctatcaagacccgactcggaccgatg

SEQ ID NO: 5665 - DNA, 203 bp, Artificial sequence
  synthetic
ggcgcgccagtcctataattaaccataatatgcattaacctatctataatacaagtatatgataagtaatcagcaatcagacaatggacaaaaggaaaatataaaaaacttaggagcaaagcgtgctcggaaaatggacactgaatctaacaatggcactgtatctgacatactctatcctgagtgtccgactcggaccgatg

SEQ ID NO: 5666 - DNA, 203 bp, Artificial sequence
  synthetic
ggcgcgccagtccttcacttttaatgttgggaaagattataacttgttagaagaccagaagaatttcttattgatacatccagaattggttttgatattagataaacaaaactataatggttatctaattactcctgaattagtactgatgtattgtgacgtagtcgaaggccgatggaatataagtgcgactcggaccgatg

SEQ ID NO: 5667 - DNA, 203 bp, Artificial sequence
  synthetic
ggcgcgccagtcctgaggagcttttttaaatcatgtgttatccgaaatggaattgatatttgaatctggagaatcgattagggaatttctgagtgtagattacattgataaaatcttagatatttttaatgaatctacaatagatgaaatagcagagattttctctttttttagaacatttgggcatccgactcggaccgatg

SEQ ID NO: 5668 - DNA, 203 bp, Artificial sequence
  synthetic
ggcgcgccagtcctttctagataattctctcacaggaattagaaatgctatagctggaatgttagatacgacaaaatcattaattcgggttggcataaatagaggaggactgacatatagtttgttgagaaaaatcagtaattatgatctagtgcaatatgaaacactaagtaggactttgcgattaacgactcggaccgatg

SEQ ID NO: 5669 - DNA, 203 bp, Artificial sequence
  synthetic
ggcgcgccagtcctctgcaactcagatgaaattctccagtacatcattaatcagagtcagcagattcataacaatgtccaatgataacatgtctattaaagaagctaatgaaaccaaagataccaatcttatttaccaacaaataatgttaacaggattaagtgttttcgaatatttatttagattaacgactcggaccgatg

SEQ ID NO: 5670 - DNA, 203 bp, Artificial sequence
  synthetic
ggcgcgccagtccttattaaaagtattatctaatgcattatctcatcctaaagtatttaagaggttctgggattgtggagttttaaaccctatttatggtcctaatactgctagtcaagaccagataaaacttgctctctctatatgtgaatatgcactagatctatttatgagagaatggttgaatgcgactcggaccgatg

SEQ ID NO: 5671 - DNA, 203 bp, Artificial sequence
  synthetic
ggcgcgccagtcctatgatgatgttgttttagtttccaaaattatacctacaatcactccgaattggtctagaatactttatctatataaattatattggaaagatgtaagtataatatcacttaaaacttctaatcctgcatcaacagaattatatctaatttcgaaagatgcatattgtactataacgactcggaccgatg

SEQ ID NO: 5672 - DNA, 203 bp, Artificial sequence
  synthetic
ggcgcgccagtcctaaatctttggatttcaaatcaacttaaatcatctggcgaaagaatttttatcaactccagatctgaccaatatcaacaatataatccaaagttttcagcgaacaatcaaagatgtcttgtttgaatggattaatataactcatgatgacaagagacataaattaggcgggagatcgactcggaccgatg

SEQ ID NO: 5673 - DNA, 203 bp, Artificial sequence
  synthetic
ggcgcgccagtcctaatcattaaaattattgtcgaaaaacatcattaagaattatagagagtgtataggatcaatatcatattggtttctaaccaaagaagttaaaatacttatgaaattgattggtggtgctaaattattaggaattcccagacaatataaagaacccgaagaacagttattagaaacgactcggaccgatg

SEQ ID NO: 5674 - DNA, 203 bp, Artificial sequence
  synthetic
ggcgcgccagtcctccaccccacaagatttaaacaccatgctaaacacagtggggggacatcaagcagccatgcaaatgttaaaagagaccatcaatgaggaagctgcagaatgggatagagtgcatccagtgcatgcagggcctattgcaccaggccagatgagagaaccaaggggaagtgacatagcgactcggaccgatg

SEQ ID NO: 5675 - DNA, 203 bp, Artificial sequence
  synthetic
ggcgcgccagtccttaggaggacccggccataaggcaagagttttggctgaagcaatgagccaagtaacaaattcagctaccataatgatgcagagaggcaattttaggaaccaaagaaagattgttaagtgtttcaattgtggcaaagaagggcacacagccagaaattgcagggcccctaggaaaacgactcggaccgatg

SEQ ID NO: 5676 - DNA, 203 bp, Artificial sequence
  synthetic
ggcgcgccagtcctagggctgttggaaatgtggaaaggaaggacaccaaatgaaagattgtactgagagacaggctaattttttagggaagatctggccttcctacaagggaaggccagggaattttcttcagagcagaccagagccaacagccccaccagaagagagcttcaggtctggggtagagacgactcggaccgatg

SEQ ID NO: 5677 - DNA, 203 bp, Artificial sequence
  synthetic
ggcgcgccagtcctaaattttcccattagccctattgagactgtaccagtaaaattaaagccaggaatggatggcccaaaagttaaacaatggccattgacagaagaaaaaataaaagcattagtagaaatttgtacagagatggaaaaggaagggaaaatttcaaaaattgggcctgaaaatccatacgactcggaccgatg

SEQ ID NO: 5678 - DNA, 203 bp, Artificial sequence
  synthetic
ggcgcgccagtcctaataatagagcagttaataaaaaaggaaaaggtctatctggcatgggtaccagcacacaaaggaattggaggaaatgaacaagtagataaattagtcagtgctggaatcaggaaagtactatttttagatggaatagataaggcccaagatgaacatgagaaatatcacagtaacgactcggaccgatg

SEQ ID NO: 5679 - DNA, 203 bp, Artificial sequence
  synthetic
ggcgcgccagtcctggttttatagacatcactatgaaagccctcatccaagaataagttcagaagtacacatcccactaggggatgctagattggtaataacaacatattggggtctgcatacaggagaaagagactggcatttgggtcagggagtctccatagaatggaggaaaaagagatatagcacgactcggaccgatg

SEQ ID NO: 5680 - DNA, 203 bp, Artificial sequence
  synthetic
ggcgcgccagtccttaacaccaaaaaagataaagccacctttgcctagtgttacgaaactgacagaggatagatggaacaagccccagaagaccaagggccacagagggagccacacaatgaatggacactagagcttttagaggagcttaagaatgaagctgttagacattttcctaggatttggctcgactcggaccgatg

SEQ ID NO: 5681 - DNA, 203 bp, Artificial sequence
  synthetic
ggcgcgccagtcctagactagagccctggaagcatccaggaagtcagcctaaaactgcttgtaccaattgctattgtaaaaagtgttgctttcattgccaagtttgtttcataacaaaagccttaggcatctcctatggcaggaagaagcggagacagcgacgaagagctcatcagaacagtcagactcgactcggaccgatg

SEQ ID NO: 5682 - DNA, 203 bp, Artificial sequence
  synthetic
ggcgcgccagtcctaagaggtaaggtgcagaaagaatatgcatttttttataaacttgatataataccaatagataatgatactaccagctataagttgacaagttgtaacacctcagtcattacacaggcctgtccaaaggtatcctttgagccaattcccatacattattgtgccccggctggtttcgactcggaccgatg

SEQ ID NO: 5683 - DNA, 203 bp, Artificial sequence
  synthetic
ggcgcgccagtccttaacactttaaaacagatagctagcaaattaagagaacaatttggaaataataaaacaataatctttaagcaatcctcaggaggggacccagaaattgtaacgcacagttttaattgtggaggggaatttttctactgtaattcaacacaactgtttaatagtacttggtttaacgactcggaccgatg

SEQ ID NO: 5684 - DNA, 203 bp, Artificial sequence
  synthetic
ggcgcgccagtccttagtacttggagtactgaagggtcaaataacactgaaggaagtgacacaatcaccctcccatgcagaataaaacaaattataaacatgtggcagaaagtaggaaaagcaatgtatgcccctcccatcagtggacaaattagatgttcatcaaatattacagggctgctattaaccgactcggaccgatg

SEQ ID NO: 5685 - DNA, 203 bp, Artificial sequence
  synthetic
ggcgcgccagtcctgggaataggagctttgttccttgggttcttgggagcagcaggaagcactatgggcgcagcctcaatgacgctgacggtacaggccagacaattattgtctggtatagtgcagcagcagaacaatttgctgagggctattgaggcgcaacagcatctgttgcaactcacagtctgcgactcggaccgatg

SEQ ID NO: 5686 - DNA, 203 bp, Artificial sequence
  synthetic
ggcgcgccagtcctgatagtaggaggcttggtaggtttaagaatagtttttgctgtactttctatagtgaatagagttaggcagggatattcaccattatcgtttcagacccacctcccaaccccgaggggacccgacaggcccgaaggaatagaagaagaaggtggagagagagacagagacagatccgactcggaccgatg

SEQ ID NO: 5687 - DNA, 203 bp, Artificial sequence
  synthetic
ggcgcgccagtcctcattcgattagtgaacggatccttggcacttatctgggacgatctgcggagcctgtgcctcttcagctaccaccgcttgagagacttactcttgattgtaacgaggattgtggaacttctgggacgcagggggtgggaagccctcaaatattggtggaatctcctacagtattgcgactcggaccgatg

SEQ ID NO: 5688 - DNA, 203 bp, Artificial sequence
  synthetic
ggcgcgccagtcctgagaagtgttagagtggaggtttgacagccgcctagcatttcatcacgtggcccgagagctgcatccggagtacttcaagaactgctgacatcgagcttgctacaagggactttccgctggggactttccagggaggcgtggcctgggcgggactggggagtggcgagccctcacgactcggaccgatg

SEQ ID NO: 5689 - DNA, 203 bp, Artificial sequence
  synthetic
ggcgcgccagtcctgagactataataatatcactaaccagagacatcataacacacagatttatatacttgataaatcatgaatgtatagtgagaaaacttgatgaaagacaggccacatttacattcctggtcaactatgaaatgaaactattgcacaaagtgggaagcactaaatacaaaaaatatcgactcggaccgatg

SEQ ID NO: 5690 - DNA, 203 bp, Artificial sequence
  synthetic
ggcgcgccagtcctttcctcacttctccagtgtagtattaggcaatgctgctggcctaggcataatgggagaatacagaggtacaccaaggaatcaagatctatatgatgctgcaaaagcatatgctgaacaactcaaagaaaatggtgtgattaactacagtgtattagacttgacagcagaagaaccgactcggaccgatg

SEQ ID NO: 5691 - DNA, 203 bp, Artificial sequence
  synthetic
ggcgcgccagtcctagacgatgaccctgcatcacttacaatatgggtgcccatgttccaatcatccatgccagcagatttacttataaaagaactagctaatgtcaacatactagtgaaacaaatatccacacccaatggaccttcattaagagtcatgataaactcaagaagtgcagtgctagcacacgactcggaccgatg

SEQ ID NO: 5692 - DNA, 203 bp, Artificial sequence
  synthetic
ggcgcgccagtcctaataatctctttgctaatcataatctccatcatgattgcaatactgaacaaactctgtgaatataacgtattccataacaaaacctttgagctaccaagagctcgagtcaatacatagcattcaccaatctgatggcacaaaacagtaaccttgcatttgtaagtgaacaaccccgactcggaccgatg

SEQ ID NO: 5693 - DNA, 203 bp, Artificial sequence
  synthetic
ggcgcgccagtcctcagtcaagaccaaaaacacaacaacaaccaaaatacaacccagcaagcccaccacaaaacaacgccaaaacaaaccaccaaacaaacccaataatgattttcactttgaagtgttcaactttgtaccttgcagcatatgcagcaacaatccaacctgctgggctatctgtaaaacgactcggaccgatg

SEQ ID NO: 5694 - DNA, 203 bp, Artificial sequence
  synthetic
ggcgcgccagtcctctcatgcaaagcacaccggcaaccaacaatcgagccagaagagaactaccaaggtttatgaattatacactcaacaataccaaaaataccaatgtaacattaagcaagaaaaggaaaagaagatttcttggctttttgttaggtgttggatctgcaatcgccagtggcattgctcgactcggaccgatg

SEQ ID NO: 5695 - DNA, 203 bp, Artificial sequence
  synthetic
ggcgcgccagtcctaataagggggttgacactgtgtctgtaggtaatacattatattatgtaaataagcaagaaggcaaaagtctctatgtaaaaggtgaaccaataataaatttctatgacccattagtgttcccctctgatgaatttgatgcatcaatatctcaagtcaatgagaagattaaccagcgactcggaccgatg

SEQ ID NO: 5696 - DNA, 203 bp, Artificial sequence
  synthetic
ggcgcgccagtcctgtgttcaatgcaacatcctccatcatggttaatacattggtttaatttatacacaaaattaaacaacatattaacacagtatcgatcaagtgaggtaaaaaaccatggttttatattgatagacaatcatactctcaatggattccaatttattttgaatcaatatggttgtatcgactcggaccgatg

SEQ ID NO: 5697 - DNA, 203 bp, Artificial sequence
  synthetic
ggcgcgccagtcctagtttatcataaggaactcaaaagaattactgtgacaacctataatcaattcttgacatggaaaaatattagccttagtagattaaatgtttgtttaattacatggattagtaactgtttgaacacattaaataaaagcttaggcttaagatgcggattcaataatgttatcttcgactcggaccgatg

SEQ ID NO: 5698 - DNA, 203 bp, Artificial sequence
  synthetic
ggcgcgccagtcctgaatgctattgttttacccttaagatggttaacttactataaactaaacacttatccttccttgttggaacttacagaaagagatttgattgttttatcaggactacgtttctatcgtgagtttcggttgcctaaaaaagtggatcttgaaatgatcataaatgataaggctatcgactcggaccgatg

SEQ ID NO: 5699 - DNA, 203 bp, Artificial sequence
  synthetic
ggcgcgccagtcctgggtggtatcgaagggtggtgtcaaaaactatggaccatagaagctatatcactattggatctaatatctctcaaagggaaattctcaattactgctttaattaatggtgacaatcaatcaatagatataagtaaaccagtcagactcatggaaggtcaaactcatgctcaagccgactcggaccgatg

SEQ ID NO: 5700 - DNA, 203 bp, Artificial sequence
  synthetic
ggcgcgccagtcctcattaatttgaaagttttcttcaatgcttataagacctatctcttgtgttttcataaaggttacggcagagcaaagctggagtgtgatatgaatacttcagatctcctatgtgtattggaattaatagacagtagttattggaagtctatgtctaaggtatttttagaacaaaacgactcggaccgatg

SEQ ID NO: 5701 - DNA, 203 bp, Artificial sequence
  synthetic
ggcgcgccagtcctcaattacagcaaacaagatttgtataatttatttcctacggttgtgattgataaaattatagatcattcaggtaatacagccaaatctaaccaactttacactactacttctcatcaaatacctttagtgcacaatagcacatcactttattgcatgcttccttggcatcatatcgactcggaccgatg

SEQ ID NO: 5702 - DNA, 203 bp, Artificial sequence
  synthetic
ggcgcgccagtcctaagtctgaaggattgcaatgatcatagtttacctattgagtttttaaggctgtacaatggacatatcaacattgattatggtgaaaatttgaccattcctgctacagatgcaaccaacaacattcattggtcttatttacatataaagtttgctgaacctatcagtctttttgtcgactcggaccgatg

SEQ ID NO: 5703 - DNA, 203 bp, Artificial sequence
  synthetic
ggcgcgccagtcctttatgtatgcttaggcagtaagttaaaggggtctgaagtttacttagtccttacaataggtcctgcaaatgtgttcccagtatttaatgtagtacaaaatgctaaattgatactatcaagaaccaaaaatttcatcatgcctaagaaggctgataaagagtctattgatgcaaacgactcggaccgatg

SEQ ID NO: 5704 - DNA, 203 bp, Artificial sequence
  synthetic
ggcgcgccagtccttattaaaagtttgataccctttctttgttaccctataacaaaaaaaggaattaatactgcattgtcaaaactaaagagtgttgttagtggagatatactatcatattctatagcaggacgtaatgaagttttcagcaataaacttataaatcataagcatatgaacatcttaaacgactcggaccgatg

SEQ ID NO: 5705 - DNA, 203 bp, Artificial sequence
  synthetic
ggcgcgccagtcctgcacttcggaagataaagaggacagtgagtgctttgatggttggcttgcaaaggcgcggaaaaaggaggtcagtgacgaactggatgaactggttgctggtcattgctctgctggggatgacacttgcagcgacagtaaggaaagaaggggacggcaccactgtgatcagggctcgactcggaccgatg

SEQ ID NO: 5706 - DNA, 203 bp, Artificial sequence
  synthetic
ggcgcgccagtccttcaattggaaaggcggtgcacacggttcttggtggtgccttcaacagcatctttggaggagtggggttcctgccaaagctcctaatgggagtggcactggcctggttgggactgaacacaaggaaccccacaatgtccatgagctttctcttggctggaggtctggtcttggcccgactcggaccgatg

SEQ ID NO: 5707 - DNA, 203 bp, Artificial sequence
  synthetic
ggcgcgccagtcctaaggacatgaaggtctcttggaggagctggggccactcaatgatctggagtatccctgaggctcctcggcgtttcatggtgggtacagagggacaaagtgagtgcccactagagagacgaaaaacaggtgtgttcacggttgcagagtttggggtcggtctgagaacaaaagtccgactcggaccgatg

SEQ ID NO: 5708 - DNA, 203 bp, Artificial sequence
  synthetic
ggcgcgccagtccttttctggactttagacaggaaccaacacacgagtgtgacacaggagtgatgggggccgccgtcaaaaacgacatggcggtccacacagatcaaagcctctggatgaaatcgatgagaaatgacacaggtacctacatagttgaactcctggtcactgacctgaggaactgctctcgactcggaccgatg

SEQ ID NO: 5709 - DNA, 203 bp, Artificial sequence
  synthetic
ggcgcgccagtcctactggaatggtcaggattgagagcctcgtgcgctacgtggtggcggtggggattgcgttccaccttgagctgggaccagagactgtggccttgatgctgctccaggccgtgtttgagctaagagttgggcttctcagcgcctttgcattgcgcagaggcctcaccgtccgagagcgactcggaccgatg

SEQ ID NO: 5710 - DNA, 203 bp, Artificial sequence
  synthetic
ggcgcgccagtcctctccattggtcaggcatccttggtgtgatgggactgtggacactcacagaaataatgaggtcatccagagggtccgacctggtctactcaggacagggaggccaagaacgtggcgacaggccttttgaggtcaaggatggagtttacagaattttcagtcccggcttgttctggcgactcggaccgatg

SEQ ID NO: 5711 - DNA, 203 bp, Artificial sequence
  synthetic
ggcgcgccagtcctaaaggtgaaacagtacaggtccatgccttcccaccggggagggcgcacgaggtgcaccagtgccagcccggagaattgatccttgacacaggaaagaggcttggggcaataccaattgacttggcaaagggaacatctggtagccctattcttaacgctcagggagtggttgttcgactcggaccgatg

SEQ ID NO: 5712 - DNA, 203 bp, Artificial sequence
  synthetic
ggcgcgccagtcctgggctatacggaaatggtccaaaaaccaatgagagctacgtcagcagcatcgctcagggagaggcggagaagagtcgacccaaccttccacaggcagttgtgggcacgggctggacgtcaaagggtcagatcacagtgttggatatgcacccaggctctggaaagacccacagacgactcggaccgatg

SEQ ID NO: 5713 - DNA, 203 bp, Artificial sequence
  synthetic
ggcgcgccagtcctgtcctcccggagctcatccgccaatgcattgacaggcgcctgagtacgttggtgctggctccaactcgcgtggtactgaaggagatggagcgcgctctcagtgggaagcgggtccggttccattcgccagcagtcagtgaccaacaggctggaggggcaattgtcgatgtgatgcgactcggaccgatg

SEQ ID NO: 5714 - DNA, 203 bp, Artificial sequence
  synthetic
ggcgcgccagtcctaacataacaaccttgcgggggcccgtggccaccttttatggccctgagcaggacaagatgccggaggtggccggtcactttcgactcactgaggagaagaggaagcacttccgccaccttctcacccattgtgatttcacgccctggctggcatggcacgttgcagcgaacgtgcgactcggaccgatg

SEQ ID NO: 5715 - DNA, 203 bp, Artificial sequence
  synthetic
ggcgcgccagtcctctgacggtggttgagatgatggttctgggtctggcgaccctgggtgtcgtctggtgtttcgtcgtccgaacatcaatcagtcgcatgatgctcggcacgctggtcttgctggcctccctgctactcttgtgggcaggtggcgtcggctatgggaacatggctggagtggctctccgactcggaccgatg

SEQ ID NO: 5716 - DNA, 203 bp, Artificial sequence
  synthetic
ggcgcgccagtcctgccatgagagacttgggggggggagctcccttctttggtgtggcaggacatgttatgactctcggggtggtgtccctggttggggccacccccacctcactgatagtgggcattggcttagcagctttccatttggccatcgtggtatctggactggaggctgagctgacacagcgactcggaccgatg

SEQ ID NO: 5717 - DNA, 203 bp, Artificial sequence
  synthetic
ggcgcgccagtcctaggcgtggtggctctgatggagacacgcttggtgacctctggaagcgcaggctgaacaactgcaccaaggaggaattcttcgtttacaggcgcactggcattctggaaaccgaacgtgacaaggccagagagctgctcaggagaggagagacaaacatgggactggcggtctcgcgactcggaccgatg

SEQ ID NO: 5718 - DNA, 203 bp, Artificial sequence
  synthetic
ggcgcgccagtcctcgtggcacggcaaagctcgcttggcttgaagaacgcggatatcgcaccctcaagggagaggtggtagatctcgggtgtggaaggggcggctggtcctactatgcggcttctcgaccggcagtcatgagtgttagggcatataccattggtggaagagggcatgaggttccaaagcgactcggaccgatg

SEQ ID NO: 5719 - DNA, 203 bp, Artificial sequence
  synthetic
ggcgcgccagtcctatccgaaacccagcggcggcctgcgtgttcaaggtgctggctccataccgcccagaggtaatagaggcattgcacagattccagctgcagtggggtgggggtctagtgaggactcccttctcaaggaactcaactcacgagatgtactactcgacagctgtcacaggcaatatacgactcggaccgatg

SEQ ID NO: 5720 - DNA, 203 bp, Artificial sequence
  synthetic
ggcgcgccagtcctacgacagcctttgggcagcagagagtgtttaaagagaaagttgacacaaaagcacaggagccccaaccggggacaagagtgatcacgagagcagtgaatgattggattctagagcgtctggcccagaaaagcaaaccacgcatgtgcagcagagaggaattcatagcaaaagtgcgactcggaccgatg

SEQ ID NO: 5721 - DNA, 203 bp, Artificial sequence
  synthetic
ggcgcgccagtcctcaacccaacttccgcgttcttgtcttattctccgccgaaatcgaaagcacagtgcccctccctgcaccactggcccggggccagcatcctgccagggacgcgcgcctgctaaacccgagggtgttttgggcctctccgggaggggtacccagccacttcgggtccttgttctctcgactcggaccgatg

SEQ ID NO: 5722 - DNA, 203 bp, Artificial sequence
  synthetic
ggcgcgccagtcctccgggagagacaaacaagtgggggctcgtccgggatacctacccctgccctctcgcattatgggacaaacctacggcctctcgtccagcccaatccccaaggcccccagggggttatcaacccaccattggttaaacttcctccaagccgcctaccggctacaacctgggccctcgactcggaccgatg

SEQ ID NO: 5723 - DNA, 203 bp, Artificial sequence
  synthetic
ggcgcgccagtcctctcctgccccgtctctacccgaaccagctaacccaccgcccctccaacagccctcggctcctccggaaccccatacaccccccccctatataaagcctcccgctacccattgccttcccatactacacccacatggggccccctcggctcacagcccttggcaaatgaaagacccgactcggaccgatg

SEQ ID NO: 5724 - DNA, 203 bp, Artificial sequence
  synthetic
ggcgcgccagtccttgcaggccatcaagcaggaggtcagcacctcagcccccgggagtccccagttcatgcaaacagtccggctcgcaattcagcaattcgaccccacggccaaagacttacaagatctcttgcagtacctctgctcctccctagtcgtctcccttcaccatcaacaattccataccccgactcggaccgatg

SEQ ID NO: 5725 - DNA, 203 bp, Artificial sequence
  synthetic
ggcgcgccagtcctccctaggggacatgctccgagcctgccaagcatggacacccaaggacaaagcccgggtcctcgtcgtccaaccacgaaagcccccgcccacgcagccctgcttccgctgcgggaaaacagggcattggagccgagactgcaccctcccacgccccccccctggtccgtgtccctcgactcggaccgatg

SEQ ID NO: 5726 - DNA, 203 bp, Artificial sequence
  synthetic
ggcgcgccagtccttccgttagagcaacagcaccagccccttctagacgttcaagtctccattgcaggcgccccccctcgacctacccaggcactcttagacacgggggctgatctcaccgtcctgccccaggcccttgcccccgagtcagtaagtgtttctgatacaacggttctgggcgctggcggcgactcggaccgatg

SEQ ID NO: 5727 - DNA, 203 bp, Artificial sequence
  synthetic
ggcgcgccagtcctacagaccagctcccagttcaaactccttcaatcccccctgtgcgtctacctacccttccggagggcccctgttaccctcccatcatgccttgtagacaccaatagcaaatgggccattattggccgtgatatcctccagaaatgccagagtgtcctgtaccttccggaggacaacgactcggaccgatg

SEQ ID NO: 5728 - DNA, 203 bp, Artificial sequence
  synthetic
ggcgcgccagtccttctgtgcaagggtaccccccggctccccgatggaataactcctccccgattattacccgtgaccacccccaatgtcattggccttgagcacttcccaccacccccacagatagatcagttccctttaaacctgagcgcctccaggccttgactgacctggtctccaaggccctgcgactcggaccgatg

SEQ ID NO: 5729 - DNA, 203 bp, Artificial sequence
  synthetic
ggcgcgccagtcctgaggctagctacattgaaccttactctggaccaggtaataaccccgtctttccagtcaaaaaaccaaacggcaaatggagatttattcatgacctaagggccaccaatgccatcacgaccaccttggcctccccgtcccccggacctcccgatctcaccagcttatcaacagcccgactcggaccgatg

SEQ ID NO: 5730 - DNA, 203 bp, Artificial sequence
  synthetic
ggcgcgccagtcctctcccatacctgcaaactatagaccttactgacgccttcttccaaatcccccttccaaaacagttccagccatacttcgccttcaccatcccccagccatgtaattatggccctggggctcggtatgcctggactgtccttccacagggatttaaaaacagccccaccctgttccgactcggaccgatg

SEQ ID NO: 5731 - DNA, 203 bp, Artificial sequence
  synthetic
ggcgcgccagtcctgaacaacagctggccgccgtcctttcccccatcaggaaaaccttccctatgtctactatcatccaatatatggatgatatactcttggccagtcctacacaagaggaactgcaacaactctccaagatgaccctccaagcgctagtcacccacggccttccagtctctcaggagcgactcggaccgatg

SEQ ID NO: 5732 - DNA, 203 bp, Artificial sequence
  synthetic
ggcgcgccagtcctaaaacccaacaaacccctgggcaaatacgtttcctgggtcaagttatatctcccaaccatattacctatgaaaccacccccaccattcccatcaaatcccaatggactctcactgaactacagactgtactaggagagattcaatgggtctcaaaaggaacccccattctccgccgactcggaccgatg

SEQ ID NO: 5733 - DNA, 203 bp, Artificial sequence
  synthetic
ggcgcgccagtccttcgtctggcacaacctccgtcctcttccaagcccgacagcgatggcccctggtttggctgcacaccccccatcccccaaccagcctgtgcccctggggtcacttgctggcctgcactatcctgaccttggacaaatactccctccagcactatggccagctgtgccagtccttccgactcggaccgatg

SEQ ID NO: 5734 - DNA, 203 bp, Artificial sequence
  synthetic
ggcgcgccagtcctctccaccatattcgtagccacaccaatctccccgaccccatctccactcttaacgaatacacagactcactcattatagcccctctcattcccctaacacctcaggatctgcataaacttacccattgcaactccagggcccttgtttcctcaggggccaccccacagcaagcccgactcggaccgatg

SEQ ID NO: 5735 - DNA, 203 bp, Artificial sequence
  synthetic
ggcgcgccagtcctaacgcagtctccattacctgcaagacaaaagagactagttctgaaactgtcagcgccctcctgcacgctatcactatcttaggcaagcccctttctataaacactgacaatggttctgccttcctatctcaagaattccaggccttttgcgcctcatggcacatcaaacattcccgactcggaccgatg

SEQ ID NO: 5736 - DNA, 203 bp, Artificial sequence
  synthetic
ggcgcgccagtcctacccatgtgccttacaactctaccagctccgggctagtagaaaggaccaatggcattgttaaggccctcctcaacaaatatcttttagacagcccaaacctccccctagacaatgccatcagtaaagccctatggaccctaaaccaactcaatgtcatgtcgtcccagtggaaacgactcggaccgatg

SEQ ID NO: 5737 - DNA, 203 bp, Artificial sequence
  synthetic
ggcgcgccagtcctcacgcttacggtaggtgtctcctcgtatcactctagtccctgcagtcttgcccaacctatctgcacctgggatctcgaccttcattccttaactacagaccaacgtctgtaccctccatgccccaatctagtttcttactctaacttccacaagtcctactccttatatttgttcgactcggaccgatg

SEQ ID NO: 5738 - DNA, 203 bp, Artificial sequence
  synthetic
ggcgcgccagtcctagaggtcaaccatgtaaccctccggctacacttctcccgatgtggctcttctatgaccctcctcatagacgccccaggctacgaccccctgtggttcatctcttcggaacccactcagcccccccccacttccccaccattagtccgcgactctgaccttgaacatatcttaaccgactcggaccgatg

SEQ ID NO: 5739 - DNA, 203 bp, Artificial sequence
  synthetic
ggcgcgccagtcctcccctcctcctcctgggctactaggatgctaaccctcatccaactaactctacaaagtaccaattattcttgcatggtttgtatagacagaaccagcttgtcgtcctggcacgtactctatacccctaatatctctgcctcacctgggggcgactccttgcctatactttatcccgactcggaccgatg

SEQ ID NO: 5740 - DNA, 203 bp, Artificial sequence
  synthetic
ggcgcgccagtcctctccttggccctaccggccccccaaccccagccgttttcctggtctcactgttaccagccccacctacaggcagtaactacagccaattgcaacaattccattgtcctgcccccattctctctcaccccggtgccttcccctgggacaagaagccgccgggctattccagtggccgactcggaccgatg

SEQ ID NO: 5741 - DNA, 203 bp, Artificial sequence
  synthetic
ggcgcgccagtccttgtatggctcgtctcagccctagcggccgggactggtattgcagggggaataaccggatccctgtccctagcatcaagccgcagcctgctttttgaagttgacaaagatatttcccacctcacacaagccatcgttaaaaaccatcaaaacatcctccgcgtagcacaatatgccgactcggaccgatg

SEQ ID NO: 5742 - DNA, 203 bp, Artificial sequence
  synthetic
ggcgcgccagtcctgctccccctccaagacactgatatatccctctaacatctcacaatacccttcaaaccccagcaaccctatacactctaactgttgatgtctcttttcgcgctctcgacgcttttcttccttctcccgcagccgctcccttctgcgctgctccttctcctcgcgttgtttcagaacgactcggaccgatg

SEQ ID NO: 5743 - DNA, 203 bp, Artificial sequence
  synthetic
ggcgcgccagtccttttccatgatttccttctgctcttccgccagcgccctccggcgaccatcccgtacatcctctccgaccgaccctgatcctaagggtcgcccccgtgttgtctttctcaggcctcctccagaacacgatacaccagtcaccaccacctcaggatcccccaatggcagccttctgacgactcggaccgatg

SEQ ID NO: 5744 - DNA, 203 bp, Artificial sequence
  synthetic
ggcgcgccagtcctaatactctaaacaaaatacatgcctttcttcagcccactttccaggtttcggacagagcctcctctatggatacccagtctacgtgtttggcgattgtgttcaagccgattggtgtcccgtttcaggtgggctttgttccacccgcctgcaccggcatgcccttctcgccacctcgactcggaccgatg

SEQ ID NO: 5745 - DNA, 203 bp, Artificial sequence
  synthetic
ggcgcgccagtcctgcccggagcaccagctcacctgggaccccatcgatggacgcgttgtcggctctcctctccaataccttatccctcggctcccctccttccccacccagagaacctccaagaccctcaaggtcctcactccccctaccactcctgtctcccccaagattccacccgcctttttcccgactcggaccgatg

SEQ ID NO: 5746 - DNA, 203 bp, Artificial sequence
  synthetic
ggcgcgccagtcctaatccatgcgtaaactctccccctaccggaacgggtgcctatacccaactctcggagaccagctcccctcccttgccttccccgaccccggtctccggccccaaaacatctacaccacctggggaagaaccgtagtttgcttgtacctctaccaactatctcccccgatgacctcgactcggaccgatg

SEQ ID NO: 5747 - DNA, 203 bp, Artificial sequence
  synthetic
ggcgcgccagtcctccccctgcgtccagacggcttgggacacggggcttttaccctaccactctctcataactactccaggcctaatatggacgttcaatgacggttcgcccatgatttccggcccctgccccaaaccggggcagccatctttggtggtacaatcctccctgttaatctttgaaaaatcgactcggaccgatg

SEQ ID NO: 5748 - DNA, 203 bp, Artificial sequence
  synthetic
ggcgcgccagtccttttatatcgtgtgtacatataaatatgtacacacggcttttaggtagaatattgttttcaatgttgattttaaaggtaactttggttattatgctttacggttttcattgttgatggtatttgtggcctgcggtccctaattgttgaattatttattctgatacgttgttttcacgactcggaccgatg

SEQ ID NO: 5749 - DNA, 203 bp, Artificial sequence
  synthetic
ggcgcgccagtccttgtgtatgatctatacgcacatttagttcccagagggcgttgtcgtctccccctaagcaagggagaaacacgtggcacatgatcttgcgcttaacgataaaaatggaatctgataaaagtatggcctgtttaaatagaattttgatgaataagatgatgtttgtggaagataagcgactcggaccgatg

SEQ ID NO: 5750 - DNA, 203 bp, Artificial sequence
  synthetic
ggcgcgccagtcctatctctacccttaagatggttgctgattattatcaaaaagaagtaaagtatgattttgatgcagttgaatctccccgtgaggcacctgtatttagatgtacttgtcgattccttggttataccattatgactcaaggcatcggtaagaagaatccgaaacaggaagctgcacgtcgactcggaccgatg

SEQ ID NO: 5751 - DNA, 203 bp, Artificial sequence
  synthetic
ggcgcgccagtcctcagatgttgctcttgttatcaggagatgttgagactaaccctggacccgttcaatcgcgccccgtgtattatcgttacaacgaccctagatatacacggttggaaaaagctattgaacgtcgagacgataaaattaaaacattaattaaagagttgcgtcgacaaatcaaaaatcgactcggaccgatg

SEQ ID NO: 5752 - DNA, 203 bp, Artificial sequence
  synthetic
ggcgcgccagtcctgaattggatcaacggaataaaattgatctagatactgaaaccgcaaatcgtgttgaacaactttggataaagggcttgaaattcaagagtgaaccccttttgagtaaggaaatgtcagctttagttcatacaactcttttaccagctaagcaattgtacgagtatgtatcgtgtcgactcggaccgatg

SEQ ID NO: 5753 - DNA, 203 bp, Artificial sequence
  synthetic
ggcgcgccagtccttctcctgttaaagggggaggaccacgtatgcgtccaatttgtttatggttggtaggtgaatcaggagttggtaagactgaaatggtatatccattgtgcattgatgttcttcgggaaatggggatgattaagaaagatgattttcatcatcaagtttatggtcgtcaagttgaacgactcggaccgatg

SEQ ID NO: 5754 - DNA, 203 bp, Artificial sequence
  synthetic
ggcgcgccagtccttggttaggtcgattctttttgagtcgagatcgcaagaataaggttggaatttgggccgaagtgggacaatcaggtgatgttaaaacaaataaagctcagattaaacgtgttgaagctggagccgaagaattagttactgttgctttaactcaaggttgttctgatgatgctgcacgactcggaccgatg

SEQ ID NO: 5755 - DNA, 203 bp, Artificial sequence
  synthetic
ggcgcgccagtcctcaggcagttaattcgtccataattccttctcgaatttatgggaagttgtctgttcctacaatgaaaccagcactactcaagccaacgattctgaataacaaagtacataatcctttattgtcgggacttaagaaatgtggtgtagacactgcggtcttgagtgatgatgaagttcgactcggaccgatg

SEQ ID NO: 5756 - DNA, 203 bp, Artificial sequence
  synthetic
ggcgcgccagtcctatgaaaagaaatgctccaggtaaacagcaatggatgggttttggtgaagaatttgattttacaagtaattatgcactagctttgcggaaagatgttgaacaactcattgaagattgtgctagcggaaaaatatctaatgtcatttttgtagatacattgaaagatgagcgacgccgactcggaccgatg

SEQ ID NO: 5757 - DNA, 203 bp, Artificial sequence
  synthetic
ggcgcgccagtcctgcaaaacgtcttaaaacaaaaggtagtcacgtcattgcgggggactttggaaatttcgatggatctttagtagcacaaattttgtgggccatattttgggaaatttttgttgtatggcttaagcaatttattgatatagagaattcagaaggaaaacgtattttatgtatctgtcgactcggaccgatg

SEQ ID NO: 5758 - DNA, 203 bp, Artificial sequence
  synthetic
ggcgcgccagtcctaaatctcgtaaattagaagatattttctttttgaagagaaaatttcgttttagcccagaattacaacgccatgttgctccattgaagatcgaagttatttatgaaatgttgaattggtctcgccgctctatagatccagatgaaatcttgatgtcgaacattgaaacggcttttcgactcggaccgatg

SEQ ID NO: 5759 - DNA, 203 bp, Artificial sequence
  synthetic
ggcgcgccagtcctgtgaatcgaaactgcgtggtcaagttcgaatggcgaattttgatggcgctgatacatcacataaattggctttgtctgcccaaaacgaaattgaaacaaaatctggactttctggaacttctcctgatgaaatggatttatcacacgtcctttccataccaaatttttgggatccgactcggaccgatg

SEQ ID NO: 5760 - DNA, 203 bp, Artificial sequence
  synthetic
ggcgcgccagtcctaatttgttaagactcaatttcattctggacgtttacgcattagttttattccattttattataatacgactatatctgcaggagttcccgatgtttctcgtacccaaaaagtaatcgttgatctgcgcacctctacagaagtctctttcactattccgtatgtgtcttcacgaccgactcggaccgatg

SEQ ID NO: 5761 - DNA, 203 bp, Artificial sequence
  synthetic
ggcgcgccagtccttgggtgaagatttagctattcaaagaaacgatgctcaacatggtgttcatccaatgactatagacactcataagatcgactcaaattggtctccggaagcgcattgtattggtgaaaagattatgtctattcgccaattgattaagcgttttggcatggctttgaactccttgacgactcggaccgatg

SEQ ID NO: 5762 - DNA, 203 bp, Artificial sequence
  synthetic
ggcgcgccagtcctaagtttctttttggttttgggttttattcagtaactatctgccctgcttacacgggtattatttttaattcttgtcccttctggactcttttattttgtattttcaaaatttttactaatttttagtcagagtccttaggggctaccaggtttttcgcaattttcctgcttactcgactcggaccgatg

SEQ ID NO: 5763 - DNA, 203 bp, Artificial sequence
  synthetic
ggcgcgccagtcctgccgggtggaaggcccggaaccgccccaccacctcaactaggtggtaagggtacgtctatgggtccggctggcccgaaaggcggtggatcctgtgtgttagggttcgtaggtggtaaatcccagcacaggtggtaatcgctatagggcaggcttatcccggtgaccgcttccctcgactcggaccgatg

SEQ ID NO: 5764 - DNA, 203 bp, Artificial sequence
  synthetic
ggcgcgccagtcctactgtgtgtacacagtcttgctggactctctacagacctggagttgctacgcggcctggctcccagcccggagagcttcttgggaagtttggcggagccttaggcccggtggcctcagctgcttacacagcaggggtcttgggcctgggtgaaccattctccctcgctttctgtcgactcggaccgatg

SEQ ID NO: 5765 - DNA, 203 bp, Artificial sequence
  synthetic
ggcgcgccagtccttttggcgactgggtgccattgtatgatgagctgcccaggagtgctctttgcaccttctatgcggggaccggcaggtatccggctgatgttgatgtcttgaatccctccggtcctccatgtgctagttgtgtcgtggaccagagaccacggaaatgtggtgactgtgtccgcgaccgactcggaccgatg

SEQ ID NO: 5766 - DNA, 203 bp, Artificial sequence
  synthetic
ggcgcgccagtcctaagaagcttggggtcaacatgactgtgagccagataggaggttattggcacgcccttcagtgtccatgtgattttacacctggtccgctaccagagcggattcccggaatcccagtgaatgcttgcatcaccggaaaggccgcgcacccattctctgcgtgggcgccggggggtcgactcggaccgatg

SEQ ID NO: 5767 - DNA, 203 bp, Artificial sequence
  synthetic
ggcgcgccagtcctgtcaagcctttgccctgcccgaactcgaccacgggcttgggtgattcagtcagtaacgccgcctgcttcgctggttccgacttgtggctcggggtcggtggtgcttggtcggccctttctggcgccacgtccgctgtcgccagttgggtcggctcggcctaccggaccttgcaccgactcggaccgatg

SEQ ID NO: 5768 - DNA, 203 bp, Artificial sequence
  synthetic
ggcgcgccagtcctaatgtgggtctcggcgtgagatggttggcatcggtgggctcttacctaccgaccgtggaggccgcgctggctcctgagctggtgtgtgctcccgtggttggttggggggcacaggagtcttggttcgtggggttcctagcagtgtgttgtgtggtcgcttaccttggggttctccgactcggaccgatg

SEQ ID NO: 5769 - DNA, 203 bp, Artificial sequence
  synthetic
ggcgcgccagtcctggcactgccagatgctgcgtgctggtggcgatgcacttcgcaagaggtgcgctgcccctagtcatgctagtgttggcaggggtgtcgcgagagcggcattccgtcttgggtctcgaggtttgcttcaacttggagggcactggttgggactggagtgactactggtggtgtgtgcgactcggaccgatg

SEQ ID NO: 5770 - DNA, 203 bp, Artificial sequence
  synthetic
ggcgcgccagtcctgctggggtggtgtcttgggcccttgtcaccatgggtctcttgacccacggtggcaaggaggtgaagcttaggtggtatcgcacctggtgcgtgttctaccaaaaggttcgcctgcgcctgttggacactcccataggcaaccgcccccgccggcctttgtgcaaactgtggctgcgactcggaccgatg

SEQ ID NO: 5771 - DNA, 203 bp, Artificial sequence
  synthetic
ggcgcgccagtcctggtgccacacacctggccgagcgcctacgtcgcaggggggtattcctgtttgagcacgctggacatgtcacacggccagcggcagagcggttgcgggaatggggttttgccctagagcccgtcgctgtgaagccagaggactgtgccatagttcgggatgccgcacgagtgttgcgactcggaccgatg

SEQ ID NO: 5772 - DNA, 203 bp, Artificial sequence
  synthetic
ggcgcgccagtcctggttgtggtcagagagtgaatggtgtgcctgtggtcgcccgtaggggagacgaagtgctcatagggtgcttgtccagcaggttcgacctcccacccgggttcgtgccgacggctcctgtcgtcgtgcaccaccaggggaaggggttttttggggtcgtcaagacctcaatgacccgactcggaccgatg

SEQ ID NO: 5773 - DNA, 203 bp, Artificial sequence
  synthetic
ggcgcgccagtcctgatgtgtgtgtatacccattgccaatgggggctacctgcttggaaccttgcaaatgctcaccgcagggcgtttgggtcgtgagaaacgacggagcgctctgccatggcactctcgggaagactgttgagctggacctaccagctgagctgtgtgacttccgggggtcgtctggccgactcggaccgatg

SEQ ID NO: 5774 - DNA, 203 bp, Artificial sequence
  synthetic
ggcgcgccagtcctactgcttattctaggactactcaatctaacctgacttactgtacttatggaagattcatggcaaatcccagaaagtacctccgcggccatgacgtggtgatctgcgacgagtgtcactcgactgacggcgttagtgttctgggcatgggacgtgcccggttgctggcgaaagaacgactcggaccgatg

SEQ ID NO: 5775 - DNA, 203 bp, Artificial sequence
  synthetic
ggcgcgccagtccttgtcgggttcgcttgttgctgtttgccactgcgacccctccgggggccccaatggccgcacatgacaatattactgaggagccccttgacaccgaaggggagatcaccttttatggacacaggttgccagttgcaagatacgccactgggagacacctgcttttctgccactcacgactcggaccgatg

SEQ ID NO: 5776 - DNA, 203 bp, Artificial sequence
  synthetic
ggcgcgccagtcctatggtggaggaggtggtcgaggtcaccttggaccccaccataacaatttcactgcggacagtgccagcaccagcagagttgaggatgcaacgcagggggcggtgtggacgtggtaggaccggacactactactccgcgctggctgctgcagcgccggcaggtaccgtgcgctctcgactcggaccgatg

SEQ ID NO: 5777 - DNA, 203 bp, Artificial sequence
  synthetic
ggcgcgccagtcctcaggcctcaacgggtctggccatggcgggtgcttacttcgccggggggtcgataaccagctcttggttgagcatcatcataaccctgcttggtggttgggagggcgccgttaacgcggcctctctcacttttgacctcctttctggcaaggcagaggccaaggacgcctggtgccgactcggaccgatg

SEQ ID NO: 5778 - DNA, 203 bp, Artificial sequence
  synthetic
ggcgcgccagtcctgctgttaaagccagtccctgcttcgccggtgatttgcctgtctcttgggaggccccaatctgtaggccagcaatggtctataggggaggccagactatccagctggatggagtgcgccgtacgttgccttgtggcttgccacttggagcgcgcccccctcctcggcaggagcaacgactcggaccgatg

SEQ ID NO: 5779 - DNA, 203 bp, Artificial sequence
  synthetic
ggcgcgccagtcctcccacccatgtgagcaactggagcaaggaggaggaagctgagcttcagtgtgcgaaggctgctgctattgaggctatagggtctgcactgcatctccctagccaagaggctgcggaagcagccttgcaggctctggaggatgctgctgtgtccctactgccccatgtgcctgtccgactcggaccgatg

SEQ ID NO: 5780 - DNA, 203 bp, Artificial sequence
  synthetic
ggcgcgccagtcctcgtgcggaatcaatcaacgatctgcgcgcgcccctcgcgagcttcgacagcatgccaagccttgaaacgtcagactccatgccatcattggagtccagctctggatccagctttgaggttgtctcgttgaccgagtctgaaccagaaactgtgatcgagggaggtttgaccctccgactcggaccgatg

SEQ ID NO: 5781 - DNA, 203 bp, Artificial sequence
  synthetic
ggcgcgccagtcctaagaaacatccggctgcgataactgtggatgccacttgctttgattcgtcaatcgacgaacatgacatgcaggtggaagctgcaatcttcgcggccgctagtgacgaccccgtccgggtgcatgctttgtgcaggtactatgtcgagggccccatggtgtcaccggatggcgtgcgactcggaccgatg

SEQ ID NO: 5782 - DNA, 203 bp, Artificial sequence
  synthetic
ggcgcgccagtcctaggacccttctacggattggtatgagttccccaccccgtaacttagaagtactagcaaaaccgaccaataggagcgtggcacccagctgcgttaaggtcaagcacttctgtctccccggccagaaatggtcgtcacccgccctctctactacgagaagcctattaaccattgaacgactcggaccgatg

SEQ ID NO: 5783 - DNA, 203 bp, Artificial sequence
  synthetic
ggcgcgccagtcctattcagcaaccctgatattaccatacgtgaatgccattccgatggactcggccattaggcattcaaattggacactagctatcattccagttgcacccttgaaatatgcagccgagaccacgccgcttgtccccattactgtgactatcgcaccgatggagacggagtacaacgcgactcggaccgatg

SEQ ID NO: 5784 - DNA, 203 bp, Artificial sequence
  synthetic
ggcgcgccagtcctttgagtctatccttgaggccaacaacagggaaggggtagagggtgttgagcggtatgtcatcccagtaagtgttcaggacgcattggatgcccagatttatgccctaagacttgagcttggcggaagtggccctctctcctccagccttctaggtaccttagcaaagcattatacgactcggaccgatg

SEQ ID NO: 5785 - DNA, 203 bp, Artificial sequence
  synthetic
ggcgcgccagtcctcccaatggagtgggtcagtggagatcacctgcatgttcactggcaccttcatgacaacaggaaaggtcctcttggcatacacacctccaggtggagatatgcctaggaatagagaagaagccatgcttggaacgcatgttgtctgggactttggtctacaatcatcaataacctcgactcggaccgatg

SEQ ID NO: 5786 - DNA, 203 bp, Artificial sequence
  synthetic
ggcgcgccagtccttggtcataccttggatctctgcatcacattttagaggagtcagtaatgacgatgtgctgaattaccaatattatgcagcaggtcatgtcaccatctggtaccaaacaaacatggtaatccctccgggattccctaacacggcaggcataatcatgatgattgccgcacagccaacgactcggaccgatg

SEQ ID NO: 5787 - DNA, 203 bp, Artificial sequence
  synthetic
ggcgcgccagtcctaggccgctgagactggtgccacgtcaactgccagggatgagagcatgattgagacccgcactattgtgccgactcacggtatccacgagacaagtgtggagagtttctttggacgctcctcactcgtgggtatgccgctgctggccactggcaccagtatcaccaactggcgcacgactcggaccgatg

SEQ ID NO: 5788 - DNA, 203 bp, Artificial sequence
  synthetic
ggcgcgccagtcctatcaagactcatttcagtggcaatctgggtgcaacccctcggtattcgcggacacggacggaccacctgcccaattctcagtacccttcatgagctcagccaatgcgtattccacggtttatgatgggtacgcacgattcatggacactgacccagatagatatggcatcctcccgactcggaccgatg

SEQ ID NO: 5789 - DNA, 203 bp, Artificial sequence
  synthetic
ggcgcgccagtcctacgggtgtgacaccatcgctcgatgcaattgcagatctggtatctattactgcaaatccacagccaagcactatcctattgtagtcacgcccccatctatctacaagattgaggccaacgattattacccagaaagaatgcaaactcacatccttcttgggattggcttcgctgcgactcggaccgatg

SEQ ID NO: 5790 - DNA, 203 bp, Artificial sequence
  synthetic
ggcgcgccagtcctttctaggttgtgaaggctctccatggaaatggctgaagagaaaggtttgccaaattcttggaatcaacatggcagaaaggcagtcagacaactggatgaaaaagttcactgagatgtgcaacgccttcagaggcctagactggatcgcagcaaaaatctccaagtttattgattcgactcggaccgatg

SEQ ID NO: 5791 - DNA, 203 bp, Artificial sequence
  synthetic
ggcgcgccagtcctagaacgccccgctttatgccgcagaagctaagcgcgtctaccatctagagaagcgcgtcctccgtgccatgcagttcaagaccaagaaccgcattgaacctgtatgtgcactgattcatggctcacctggtaccggtcagtcgttggctactatgatagtaggaagaaaactggcgactcggaccgatg

SEQ ID NO: 5792 - DNA, 203 bp, Artificial sequence
  synthetic
ggcgcgccagtccttcactgaacttaagcttgagcgcaacgtgaaccgtgcgctggcagtcattcagagtgtgtctctcattgctgcagtggctgggaccatttacatagtttatcgcctcttttctggtatgcagggcccttactcaggtatcggcacaaactacgccacaaagaaaccagtggtaacgactcggaccgatg

SEQ ID NO: 5793 - DNA, 203 bp, Artificial sequence
  synthetic
ggcgcgccagtcctagctttttacctgcgtggggcgtgtcaaggactacggattcctgaaccttgctggcaggccaacacatagagttttgatgtatgaattccccaccaaggcaggccaatgcggtggtgtggttattagcatgggtaagatagtgggtgtccacgtaggaggtaacggtgcccaagcgactcggaccgatg

SEQ ID NO: 5794 - DNA, 203 bp, Artificial sequence
  synthetic
ggcgcgccagtcctgttttgccgcctcccttctacgcaggtactttacagcagaacaaggacaaattgaatatatcgagaagagtaaagatgccgggtaccccgtgatcaatgcacccacccaaaccaaattagagcccagtgttttctttgatgttttccccggggtgaaagaaccagcggtactcccgactcggaccgatg

SEQ ID NO: 5795 - DNA, 203 bp, Artificial sequence
  synthetic
ggcgcgccagtcctatgaactcagggcgccagataagatcaggaaaggaaaaagccgtttgatagaggcatctagcttgaatgattcagtagccatgcggtgctactttgggaacctctacaaggttttccacaccaaccctggaaccatctccggctgtgccgttggatgcgaccctgaaaccttctcgactcggaccgatg

SEQ ID NO: 5796 - DNA, 203 bp, Artificial sequence
  synthetic
ggcgcgccagtcctctaacgattacgcgaacctgaatgaagcagaaggcttcatttggtgaccccgacgtgatcgttagggaatagtggtcggccacaggcgtggcgatcctgccctcatccgtctcgcttaacggagcaggacgatgaccctagtagagggggctgcggcttaggagggcagaagctcgactcggaccgatg

SEQ ID NO: 5797 - DNA, 203 bp, Artificial sequence
  synthetic
ggcgcgccagtcctgagtgacgtcggagggagctccacggccggggggcaagataacctaccgagaactcagagagtcgttggaagacgggaaggaagcccgacgactgagcagtccaccccaggcgttgattctggtcgcccggtggatcaaagcatggaagccgtcataaaggtgatttcgtccgccgactcggaccgatg

SEQ ID NO: 5798 - DNA, 203 bp, Artificial sequence
  synthetic
ggcgcgccagtcctacctgccccatatgccttatggatggacgcttggggagtccaactccagacggttatagcggcggccactcgcgacccccgacacccagcgaacggtcaaggacggggggaacggactaacttggatcgcttaaagggcttagctgatgggatggtgggcaacccacagggtcacgactcggaccgatg

SEQ ID NO: 5799 - DNA, 203 bp, Artificial sequence
  synthetic
ggcgcgccagtcctagacctcccgccttccgcgcgggctccggtgatcattgactgctttaggcagaagtcacagccagatatccagcagcttatacgggcagcaccctccacagtgcacggccaggcagcagccgccgcgatgccgctcagcgccagcctccccagcaagaactacgattacgactacgactcggaccgatg

SEQ ID NO: 5800 - DNA, 203 bp, Artificial sequence
  synthetic
ggcgcgccagtcctcgactcggtgcagccctacttctacttcgaggaggaggaggagaacttctacctggcggcgcagcagcggggcagcgagctgcagcctcccgccccgtccgaggacatctggaagaagtttgagctcctgcccatgccgcccctctcgcccagccgccgctccagcctggccgccgactcggaccgatg

SEQ ID NO: 5801 - DNA, 203 bp, Artificial sequence
  synthetic
ggcgcgccagtcctcgagtctgaatccagcacagagtccagcacagaagcatcagaggagcactgtaagccccaccacagtccgctggtcctcaagcggtgtcacgtcaacatccaccaacacaactacgctgctcctccctccaccaaggtggaatacccagccgccaagaggctaaagttggacagcgactcggaccgatg

SEQ ID NO: 5802 - DNA, 203 bp, Artificial sequence
  synthetic
ggcgcgccagtcctcgagaaggcgcccaaggttgtcatcctgaaaaaagccacggagtacgttctgtctctccaatcggacgagcacaaactgatcgcagagaaagagcagttgaggcggaggagagaacagttgaaacacaaccttgagcagctaaggaactctcgtgcataggaactcttggacatcgactcggaccgatg

SEQ ID NO: 5803 - DNA, 203 bp, Artificial sequence
  synthetic
ggcgcgccagtcctaaaactgcctcataattgatactttgggcataagggatgatgggacattcttcatgcttggggatgaactcttcaacttttttcttttaaaattttgtatttaaggcattcctggtggccctgataacagcacaaccctcacctatcggaaggtttcgtgcttgttgttaaagccgactcggaccgatg

SEQ ID NO: 5804 - DNA, 203 bp, Artificial sequence
  synthetic
ggcgcgccagtcctttaaaattttgtatttaaggcattcctggtggccctgataacagcacaaccctcacctatcggaaggtttcgtgcttgttgttaaagctgaacgtttctctttagacgagccatcagaactacaactattaggttcccagtctctccccattataactaatattactcggatcccgactcggaccgatg

SEQ ID NO: 5805 - DNA, 203 bp, Artificial sequence
  synthetic
ggcgcgccagtcctggtctcactccctcacagttgctgtggtgttgtgattcctcttctgcagaagatattaataaagtgtataacagacaaatgtgactggcctgggctgctttcctttcttcgaacatggatataatttagataagtgaatttgaattaacattttggtgccgtgacccggattctcgactcggaccgatg

SEQ ID NO: 5806 - DNA, 203 bp, Artificial sequence
  synthetic
ggcgcgccagtcctcatacccctcatgcagcattacctaaacttgcaaagcagacaggatgcaaaaattaaacaaactcccctagtcttacagcttgcgatgccagcgcagaccatgaacgggaataaaggatatgtaggctcttaccctacaaacgaaccatattattcgttccagcaacaacagcgcgactcggaccgatg

SEQ ID NO: 5807 - DNA, 203 bp, Artificial sequence
  synthetic
ggcgcgccagtcctacctgcaccaagggccccacctggaaatgtacccagcaatacctgcttcttttgcaaacaaccgggtcattggaaagctgactgccccaataaaacacgtaatcttagaaacatgggaaatatgggacgaggcggaaggatgggaggccctccgtataggtcacaaccataccccgactcggaccgatg

SEQ ID NO: 5808 - DNA, 203 bp, Artificial sequence
  synthetic
ggcgcgccagtcctcgcatttatacaacctcctcaaaaccaccaaaaccaatataatggccgcatggaccggtcacagctacaagcctctgctcaagagtggcttcccggtacatatcctgcataggatccaattgactgtccttatgaaaaatctggtacaaaaacaacccaagatgtaattaccaccgactcggaccgatg

SEQ ID NO: 5809 - DNA, 203 bp, Artificial sequence
  synthetic
ggcgcgccagtccttaaaaatgctgaaattatggttacagtaaaccacacgaaaattcctatgttggtagatacaggcgcctgcctgactgcaataggaggggcggccacagtggttcccgacctcaaattaacaaacacagaaattatagctgttggtatttccgctgaaccagttccacatgtcttcgactcggaccgatg

SEQ ID NO: 5810 - DNA, 203 bp, Artificial sequence
  synthetic
ggcgcgccagtccttaaagataaaaccgaaggactaaggccattaattagttcactagaaaatcaaggaatattgataaaatgccatagcccatgtaatacaccaatctttcctattaagaaagcaggtcgggatgagtatcgaatgatacatgacttacgcgcaataaataatatagttgcccccctcgactcggaccgatg

SEQ ID NO: 5811 - DNA, 203 bp, Artificial sequence
  synthetic
ggcgcgccagtccttccggcgcacttatatatgcagtcttgtgaaaataatattccgcctcatgactgcgttttacttacccacacgatctccaggccccgacctgatttatctgatctcccaatacctgaccctgatatgactctgttttctgatggctcttatacaaccggcagaggaggagcggccgactcggaccgatg

SEQ ID NO: 5812 - DNA, 203 bp, Artificial sequence
  synthetic
ggcgcgccagtcctaccttttctgatcctcctctctacaccaacggcggtaaaagttgaaggacgaccaacatggatacacctggatcattgcaagttattgcgatcatctctctcctcctcgttgggggggccagtcaaccagctactttcttagagaaagcacttccgactgatggtcccagcctgcgactcggaccgatg

SEQ ID NO: 5813 - DNA, 203 bp, Artificial sequence
  synthetic
ggcgcgccagtcctttcgtaataaaacaatgcagaaagaaacgaggaaaaagacagatcacggtacctaacagcaccctttcccccacaggtactacagacttcacaaaatttacccctaatcctatatctcccaacagtacggccctgaatgagcttgagcaaaagactacaccaataggaacagagcgactcggaccgatg

SEQ ID NO: 5814 - DNA, 203 bp, Artificial sequence
  synthetic
ggcgcgccagtcctctaaaacagggccagatagcattgattcgacatcacgaggctattactaccattcttggacaagaggcaacatatagcattaaagaaacacaggcattaatttcatctatcgaacaagaggcatggtataataatttattctcttggtatgacggctctgtatggtcacagctacgactcggaccgatg

SEQ ID NO: 5815 - DNA, 203 bp, Artificial sequence
  synthetic
ggcgcgccagtcctttcactctggcttatggatgtgacgagtcagcaggatgggttaaccaacatgctgaatacatgggaaagccggtaatcgtgacattggcgggcctagtaattacgcctgtgggtttggcttggataccactcccacaacaagaaccattggaaaagttatttatggtccccaatcgactcggaccgatg

SEQ ID NO: 5816 - DNA, 203 bp, Artificial sequence
  synthetic
ggcgcgccagtcctagcatgccacatgtcaccgtggccatggccgattatcatgagacaaaagaaatgggcaaaattgtgaaagacataaacaacgaagaacttcttttggtaaaaccacaactctttaagtgggaccgaagggttttttgtagcctgtccccttgttataagaggagttgtcactggcgactcggaccgatg

SEQ ID NO: 5817 - DNA, 203 bp, Artificial sequence
  synthetic
ggcgcgccagtcctccaagccgaaaatgacttactacacccttacatgtaccattacattaaactatcttatcgacacagaacacccgactatcactccagtccggcccttcgagcggcagtagttattgctgcggccgtaaaaggtgcagatctgttagaaatgaatatgctcttcataatgatgtacgactcggaccgatg

SEQ ID NO: 5818 - DNA, 203 bp, Artificial sequence
  synthetic
ggcgcgccagtcctattagatgatgtgatggcagtactggaggcagaggttgcaatcacgataaccacagccactgaaggcacggacgctgaagacacgagtgaggtcgacgtcatcaacgtcgtcgatccaataggataactatgttttcagactcagattcctcggacgaggaactaagcagaatacgactcggaccgatg

SEQ ID NO: 5819 - DNA, 203 bp, Artificial sequence
  synthetic
ggcgcgccagtccttacacaatcatgaatagatacacgggggaatcaatagcagaaatgcacactgggtttaggtgtttcagggatcaaatgatagcctatgatatggagtttaccaattttctcagggatctgacagaggaagaaactccagtattagagataaccgaaccagagcccagccctacgcgactcggaccgatg

SEQ ID NO: 5820 - DNA, 203 bp, Artificial sequence
  synthetic
ggcgcgccagtcctgtttgtcattatattgttgacacttaggaaagtgctgtataggcctaaagtagaaataacaactgatcgtggaacagttggtgctgaatgcatgttgccttcaaacagtgttttcttcaaacagtatttacttctgagaatccatgaaagtatataacggttgcttgttggtaacgactcggaccgatg

SEQ ID NO: 5821 - DNA, 203 bp, Artificial sequence
  synthetic
ggcgcgccagtcctcattatattgttgacacttaggaaagtgctgtataggcctaaagtagaaataacaactgatcgtggaacagttggtgctgaatgcatgttgccttcaaacagtgttttcttcaaacagtatttacttctgagaatccatgaaagtatataacggttgcttgttggtaagaacggcgactcggaccgatg

SEQ ID NO: 5822 - DNA, 203 bp, Artificial sequence
  synthetic
ggcgcgccagtcctggaccttaccttactgaggaaggatggctcgagaattaaatcctctccaattacagcaactgtatataaataatggcttacaacctaatccaggacatggagatattattgctgtcagatttacaggaggaccttggggtccaggtgatagatgggctagagtgacaatacgatcgactcggaccgatg

SEQ ID NO: 5823 - DNA, 203 bp, Artificial sequence
  synthetic
ggcgcgccagtccttagtagcatctcatcccggcctaacgttgactgagaatgaggccgggagctggaatgctgccatatcagctttatggaggaaagctcacggtgctgcagctcagcatgaattggcaggagtattaagtgatattaataaaaaggaaggcatacaaactgcattcaacctaggaacgactcggaccgatg

SEQ ID NO: 5824 - DNA, 203 bp, Artificial sequence
  synthetic
ggcgcgccagtcctagagagatcagagaggaccgtcgcaacctcctcgtggaagtggaggaggatataattttagaagaaatccgcagcagcctcagcgctacggccaaggaccaccaggaccaaacccgtaccgacgattcggagacggcggtaatcctcaacagcagggaccaccaccaaaccgagcgactcggaccgatg

SEQ ID NO: 5825 - DNA, 203 bp, Artificial sequence
  synthetic
ggcgcgccagtcctgatttatccaatggtttctgggcacaccccatagtcccagaggattattggattactgcattcacttggcaaggaaaacaatattgttggactgttttaccacaaggttttttaaacagccctgggttgtttactggagatgttgtagatcttctacagggaattcccaacgtgcgactcggaccgatg

SEQ ID NO: 5826 - DNA, 203 bp, Artificial sequence
  synthetic
ggcgcgccagtcctcccacctgctctggttggtcaccatacgttggccagctggtccaggagagggtgtacaggccgtcacaattaaggcctaagtggaggaagcctacaaaggtcttggaaatattgaatcctagaactgtgattatagtggaccatctaggccaacggaaatctgtgagtattgaccgactcggaccgatg

SEQ ID NO: 5827 - DNA, 203 bp, Artificial sequence
  synthetic
ggcgcgccagtccttttggttttatcaagtactacagactgtggcataccagcttacgtgcctgtggttataacggtgaatgacacaatcagctgttttgataaagagtttaaaaggccacttaaacaggaactaaaagtaacaaaatatgcaccatccgttcctcaattagaactaagagttcctcgcgactcggaccgatg

SEQ ID NO: 5828 - DNA, 203 bp, Artificial sequence
  synthetic
ggcgcgccagtcctttatcctttggagggaagcaaaagttgtattatatatgcaaccaatgtcataaaggaattcctgaaagtggatacataactctcaatactaaatattatctatatgagaaaggacctactgagactggcaccaaaggtctaactcttatgagaaggcatgtgcaaaattcccctcgactcggaccgatg

SEQ ID NO: 5829 - DNA, 203 bp, Artificial sequence
  synthetic
ggcgcgccagtccttgtttcctgaacagtcggaaagaatccggaacacccaagacggatcctactcgtcctgcaacatcttatagcctatgccgaagcgactatcaagaagcaggatgttcccggcccactccttccaattctgagtccgtatgtaatggcttgggacaaccctcagaacgtggtcaccgactcggaccgatg

SEQ ID NO: 5830 - DNA, 203 bp, Artificial sequence
  synthetic
ggcgcgccagtccttccatactcagaaaacgaatgcaagagcgtttgttttttttttatagaggttcccgaactattgtacctttgaatatggtttatcccttatttaaagatacgttaaatagtatcaggcatccagcgaattatacgcggtggggtttcgaatatttggacggaacagatattcgtcgactcggaccgatg

SEQ ID NO: 5831 - DNA, 203 bp, Artificial sequence
  synthetic
ggcgcgccagtcctcaacgtttacagattgaatcattgaattgtccggaagcggtgtcacgtcgtatagattttgcttttaacgttcgtatagtaccagaataccaaatggaatatatgagcgctaatggtgataaattgtatagactagacgctgccaaggcaaggcaagattttggagacgttttacgactcggaccgatg

SEQ ID NO: 5832 - DNA, 203 bp, Artificial sequence
  synthetic
ggcgcgccagtccttcttgtcctggaatacttgccaaatattattttgccaatgcggaaactgaaaagtcccgtgtttgcatcagtgctattggtgtttcagaacgagatgaagttgatgtaatgtctgtacctggatgcatggagatagtgcgtaatcgtgacttctacacttacacggcgccaactcgactcggaccgatg

SEQ ID NO: 5833 - DNA, 203 bp, Artificial sequence
  synthetic
ggcgcgccagtccttttgatcaagccatattgggtatcgatggtgacccgtttatcaattctttggatcgtaatacggcacctgggttcccttactcaactatgaggaagggaacgaaaggtaaaacgttatggttcggcaatggtatggattatgaccttacgggaccgtatgcggttgcgttacgacgactcggaccgatg

SEQ ID NO: 5834 - DNA, 203 bp, Artificial sequence
  synthetic
ggcgcgccagtcctccttttgttgctcatttatcacgtatgcgtattagaaatacgatatgtgtgggtgtcaaccctttttctagtgaatggagtgctgtagcacaaaaactcttagttaaaggaccgcacgttatagctggcgactattctaattttgacggttcgttacccgcccaactagtctatcgactcggaccgatg

SEQ ID NO: 5835 - DNA, 203 bp, Artificial sequence
  synthetic
ggcgcgccagtccttgctgacgtgaaaacgttgcgtattgctacaacacttggttagctatttagctttactaatcaagacgccgtcgtgcagcccacaaaagtctagatacgtcacaggagagcatacgctaggtcgcgttgactatccttatatatgacctgcaaatataaacgaaaacactacaacgactcggaccgatg

SEQ ID NO: 5836 - DNA, 203 bp, Artificial sequence
  synthetic
ggcgcgccagtcctcaaaaatacaacagcaaatcctttcttttagttcggaaggtgaatccccgtcgtcatccacagttttagcaccactcaaattgcaagatcctatattggattgcgcgagagatggaaaaactcatacagttaattcttttcttgagaggcctataaactttagaaccgcgacttcgactcggaccgatg

SEQ ID NO: 5837 - DNA, 203 bp, Artificial sequence
  synthetic
ggcgcgccagtcctggagtaatcaaccagctggcgaaaggttattttcttttaattacccttctaatgttgttacgaatcctatgtacagcagaaaattgcaaaattttctaggtttgcgtgctgatttagttgttcgcgttcaagtcaacgctcaaccatttcatgcaggtagattaatgctgtcctcgactcggaccgatg

SEQ ID NO: 5838 - DNA, 203 bp, Artificial sequence
  synthetic
ggcgcgccagtccttgacggggtcaggcgatattggaactttccaattaatcgtttattctccgttagtcgatttagtctcgggaggtaatatagactatacgatatgggttaatatgacaaacgtaagaacagagtttccaaccggtatgccaacttctatcgctcaggtgggagaagaaggcagtacgactcggaccgatg

SEQ ID NO: 5839 - DNA, 203 bp, Artificial sequence
  synthetic
ggcgcgccagtcctggttacatgtcaactctacaccttgggtcactgcattttcgcagatccatgcgtgtaggtcgattgtcgtcgaggttcttaatgagctagttaacacatctaccgtatctgatactattgaagttttagtggaagtatgtgctgctgaagatattgaatttgccattcctatagcgactcggaccgatg

SEQ ID NO: 5840 - DNA, 203 bp, Artificial sequence
  synthetic
ggcgcgccagtccttgccatctttaacaccgcgtgctgccccgcaaggttcatctcgtcgtactgcttacgatttgatcacaagcattgcgcaagtaggaactgatacgggagatacaccactcgaggtatctcgtgaagagccaacaacttttaacgatgtacctctccaaccaactacgactacatcgactcggaccgatg

SEQ ID NO: 5841 - DNA, 203 bp, Artificial sequence
  synthetic
ggcgcgccagtccttcgaggcgggccctcatgtgttccacatgcagacttaaagaagtctacccccggcccgtctgggggatctaagtttttatcagttttcttagacctgaccttaattggttgggaggcgtaactgttactttatgtctggcgaacatgagaggtgctgtaatgtcatttttcgtccgactcggaccgatg

SEQ ID NO: 5842 - DNA, 203 bp, Artificial sequence
  synthetic
ggcgcgccagtcctccgggtgaatcactctgcgagtgacgtgtgagtagcgaacagacgtgttcggggctcaccgcctggtaatccagggagacgtcccaggatcaggggaggaccagggacgcctggtggacccctcggtaacgggtcgttgtgacccgatttcatcgcccgtctggtaagacgcgccgactcggaccgatg

SEQ ID NO: 5843 - DNA, 203 bp, Artificial sequence
  synthetic
ggcgcgccagtcctcccccgccctatccggcggcactgccaccccctctggcccctcaggcgatgggaccgccgtcaggccagatgcccgatagtagcgatcctgaggggccagccgctgggaccaggagtcgccgtgcccgcagtccagcagacaactcgggtcctgactccactgtgattttgccccgactcggaccgatg

SEQ ID NO: 5844 - DNA, 203 bp, Artificial sequence
  synthetic
ggcgcgccagtcctctccgagccataggacccccggccgagcccaatggcctggtccctctacaatattggcctttttcctcagcagatctttataattggaaatctaatcatccctctttttctgaaaacccagcaggtctcacggggctccttgagtctcttatgttctcccatcagcccacttggcgactcggaccgatg

SEQ ID NO: 5845 - DNA, 203 bp, Artificial sequence
  synthetic
ggcgcgccagtcctgacgattgccaacagctcctacagattcttttcaccactgaggaacgggaaagaattctcctggaggcccgcaaaaatgtccttggggacaatggggcccctacacagctcgagaacctcattaatgaggccttccccctcaatcgacctcactgggattacaacacagccgcacgactcggaccgatg

SEQ ID NO: 5846 - DNA, 203 bp, Artificial sequence
  synthetic
ggcgcgccagtcctggtagggagcgtcttctggtctaccgccggactctagtggcaggtctcaaaggggcagctcggcgtcctaccaatttggctaaggtaagagaggtcttgcagggaccggcagaacccccttcggttttcttagaacgcctgatggaggcctataggagatacactccgtttgatcgactcggaccgatg

SEQ ID NO: 5847 - DNA, 203 bp, Artificial sequence
  synthetic
ggcgcgccagtcctgacaaagaccagtgcgcatactgtaaagagaagggccattgggcaagagaatgtccccgaaaaaaacacgtcagagaagccaaggttctagccctagataactaggggagtcagggttcggaccccctccccgaacctagggtaacactgactgtggaggggacccccattgagcgactcggaccgatg

SEQ ID NO: 5848 - DNA, 203 bp, Artificial sequence
  synthetic
ggcgcgccagtcctttcctggtcgacaccggagctgaacattcagtattgacccaacccatgggaaaagtagggtccagacggacggtcgtggaaggagcgacaggcagcaaggtctacccctggaccacaaaaagacttttaaaaattggacataaacaagtgacccactccttcctggtcataccccgactcggaccgatg

SEQ ID NO: 5849 - DNA, 203 bp, Artificial sequence
  synthetic
ggcgcgccagtcctgagtgccctgctcctctgttgggcagggacctcctaaccaaactaaaggcccagatccagttttccgctgagggcccacaggtaacatggggagaacgccctactatgtgcctggtcctaaacctggaagaagaataccgactacatgaaaagccagtaccctcctctatcgaccgactcggaccgatg

SEQ ID NO: 5850 - DNA, 203 bp, Artificial sequence
  synthetic
ggcgcgccagtcctccatcctggctccagcttttccccactgtatgggcagaaagagccggcatgggactagccaatcaagtcccaccagtggtagtagagctaagatcaggtgcctcaccagtggctgttcgacaatatccaatgagcaaagaagctcgggaaggtatcagaccccacatccagaagcgactcggaccgatg

SEQ ID NO: 5851 - DNA, 203 bp, Artificial sequence
  synthetic
ggcgcgccagtcctcttccgcctagctatacttggtactcagtcttagatctcaaggatgcctttttctgcctcaggctacatcccaacagccagccgctgttcgcgttcgagtggaaagacccagaaaaaggtaacacaggtcagctgacctggacgcggctaccacaagggttcaagaactctccccgactcggaccgatg

SEQ ID NO: 5852 - DNA, 203 bp, Artificial sequence
  synthetic
ggcgcgccagtccttcggctaagaaggcccagctctgccagagagaagtcacctatctggggtacctactcaaggaaggaaaaagatggctaaccccagcccgaaaggctactgttatgaaaatccctgttcctacgacccccagacaggtccgtgaatttctaggcactgccggattctgcaggctccgactcggaccgatg

SEQ ID NO: 5853 - DNA, 203 bp, Artificial sequence
  synthetic
ggcgcgccagtccttggatccctgggtttgcttccctggctgcacccttgtaccccctaacaaaagagagcatcccttttatttggactgaggaacatcagcaggcttttgaccacataaaaaaagccttgctgtcagcccctgcattggccctcccagacctcaccaagccattcactctatatatacgactcggaccgatg

SEQ ID NO: 5854 - DNA, 203 bp, Artificial sequence
  synthetic
ggcgcgccagtcctagggccaggaatacccctggccggtttggtttaactccttatgaaattctctatggaggaccaccccccatacttgagtctggagaaactttgggtcccgatgatagatttctccctgtcttatttactcacttaaaggctttagaaattgtaaggacccaaatctgggaccagcgactcggaccgatg

SEQ ID NO: 5855 - DNA, 203 bp, Artificial sequence
  synthetic
ggcgcgccagtcctatcaaagaggtgtataagcctggtaccgtaacaatccctcacccgttccaggtcggggatcaagtgcttgtcagacgccatcgacccagcagccttgagcctcggtggaaaggcccatacctggtgttgctgactaccccgaccgcggtaaaagtcgatggtattgctgcctggcgactcggaccgatg

SEQ ID NO: 5856 - DNA, 203 bp, Artificial sequence
  synthetic
ggcgcgccagtcctgtccatgcttctcacctcaaacctgcaccaccttcggcaccagatgagtcctgggagctggaaaagactgatcatcctcttaagctgcgtattcggcggcggcgggacgagtctgcaaaataagaacccccaccagcccatgaccctcacttggcaggtactgtcccaaactggcgactcggaccgatg

SEQ ID NO: 5857 - DNA, 203 bp, Artificial sequence
  synthetic
ggcgcgccagtccttctccccgactctaactccacagccctggcgactagtgcacaaactcccacggtgagaaaaacaattgttaccctaaacactccgcctcccaccacaggcgacagactttttgatcttgtgcagggggccttcctaaccttaaatgctaccaacccaggggccactgagtcttgcgactcggaccgatg

SEQ ID NO: 5858 - DNA, 203 bp, Artificial sequence
  synthetic
ggcgcgccagtcctctggctttgtttggccatgggccccccttattatgaagcaatagcctcatcaggagaggtcgcctactccaccgaccttgaccggtgccgctgggggacccaaggaaagctcaccctcactgaggtctcaggacacgggttgtgcataggaaaggtgccctttacccatcagcacgactcggaccgatg

SEQ ID NO: 5859 - DNA, 203 bp, Artificial sequence
  synthetic
ggcgcgccagtcctgttgctcatcctcgggccatgcatcatcaataagttagttcaattcatcaatgataggataagtgcagttaaaattctggtccttagacagaaatatcaggccctagagaacgaaggtaacctttaattttgctctaagattagagctattcacaagagaaatgggggaatgaacgactcggaccgatg

SEQ ID NO: 5860 - DNA, 203 bp, Artificial sequence
  synthetic
ggcgcgccagtccttttgaaaggggtctcctagagagcttggccgtcgggccttacaccccgacttgctgagtttctctaggagagtccctttcccagccagaggtggctggtcaaacaataccaaacgtaactaaacatctaagataacatagccctatgcctggtctccaccagttgaaggcatctcgactcggaccgatg

SEQ ID NO: 5861 - DNA, 203 bp, Artificial sequence
  synthetic
ggcgcgccagtcctaacttagttcatttaaatctatttccaaatttgaaggtctttgaaaacagttattcatacttcagaggttctcttataatcaggttaagtgtttatgctagtacattcaacagaggccgtttgaatgggttctttccaaattccagtacagatgaaacttctgaaattgataatcgactcggaccgatg

SEQ ID NO: 5862 - DNA, 203 bp, Artificial sequence
  synthetic
ggcgcgccagtcctcaagatgatggccctttaggaaatgacaaaccaaattattttcttaactttaagtctatgaatgttgatatctttactgtcagtcacaccaaagtagacaatatttttggacgtgcttggtttgcccatgttcatgacttcactaatgatggcctatggagacagggattggaacgactcggaccgatg

SEQ ID NO: 5863 - DNA, 203 bp, Artificial sequence
  synthetic
ggcgcgccagtccttttccaaaggaagggcacggtgccctatcacttctgtttgcctactttactggtgaattaaacatccatgttctatttcttagtgataggggttttctcagagttggacatacatatgacactgagacaaacagaaccaattttttatcatccagtggcataattacagtaccacgactcggaccgatg

SEQ ID NO: 5864 - DNA, 203 bp, Artificial sequence
  synthetic
ggcgcgccagtcctgcaggagaacagatgacactatctgtcccctcttattccaacaagccattacggacagttagatcatccaatgctttaggttatttactgtgtaaaccattgctaactggtaccagctctggtagaatagagatattccttagcttgagatgtccaaatttcttctttcccttacgactcggaccgatg

SEQ ID NO: 5865 - DNA, 203 bp, Artificial sequence
  synthetic
ggcgcgccagtcctcttgattatgcttctgacattatagttaagtcaaaggaccagacaaaaatgaaaacacaagaattttatcagcgttacaatgattgtttgtctaaatttaaacccattatggcaatgtgctttagaagctgtcacaatagtattagtaacacagtctacagattattccaggaacgactcggaccgatg

SEQ ID NO: 5866 - DNA, 203 bp, Artificial sequence
  synthetic
ggcgcgccagtcctagtgaattcatggatggatatgataatcaggatatacatttgattgatgatttgggccaaacaaggaaggagagggacattgagatgttgtgtaattgtatatcatcagatcccgatatagtccctatggcccaccttgaggaaaaaggcaaattctacacaagcaaattagttcgactcggaccgatg

SEQ ID NO: 5867 - DNA, 203 bp, Artificial sequence
  synthetic
ggcgcgccagtcctatagccaccacaaataaacctgatttttccagtacagtcttattagattcaggtgctctgaggagaaggtttccatacattatgcatattagagctgctaaacattatagcaaatcaggcaaactaaatgtctcccaagctatgccacatatgtcaaccggcgagtgttgggaacgactcggaccgatg

SEQ ID NO: 5868 - DNA, 203 bp, Artificial sequence
  synthetic
ggcgcgccagtcctgtggaagttaaaatgggcccagctgtactgagtaaatcggacactagactagaagaaccagtggattgtttggtcaagaagtcagcatcaaaatatagggtcaataaatttcaggtcaacaatgagctatggcagggggttaaagcttgtgttaagtcaaagtttagagaaatacgactcggaccgatg

SEQ ID NO: 5869 - DNA, 203 bp, Artificial sequence
  synthetic
ggcgcgccagtcctcaagagaaattccacaacctcctaaaaggaaatcagattacaaccatttttaatacatgtctcaaggatgagttgaggaagctggataaaatcgcaaccggtaaaactcgatgtattgaggcttgtgaaatagactattgcattgtttacagaatgattatgatggagatatatcgactcggaccgatg

SEQ ID NO: 5870 - DNA, 203 bp, Artificial sequence
  synthetic
ggcgcgccagtccttgggcgggcaagtgcggcaacagctactttgactactaagataagaatttttgtaccagcaactaatagcccagaactgagatgggagttgactttgttcgctctcgatgtaatcagatcaccaagtgcagcagaatcaatgaagattggtgctgctttcactctgatatcaatcgactcggaccgatg

SEQ ID NO: 5871 - DNA, 203 bp, Artificial sequence
  synthetic
ggcgcgccagtcctgtactcagaaagacctggcgctttaatcaggagcctccttaacgacccagacatagaagctgtcatcatagatgtgggttccatgctcaacgggatccctgtgatggaaaggagaggggacaaagcacaagaggagatggaaggtttgatgaggattctgaagactgcacgtgacgactcggaccgatg

SEQ ID NO: 5872 - DNA, 203 bp, Artificial sequence
  synthetic
ggcgcgccagtcctaagcagcaagggaaagaccccgtttgtagatagcagagcctatggactgaggatcaccgatatgagcactcttgtgtcagccgtcattaccatcgaagcccaaatttggatcctgattgcaaaggcagtgactgctccagatacagccgaggaaagtgagaccagaagatgggccgactcggaccgatg

SEQ ID NO: 5873 - DNA, 203 bp, Artificial sequence
  synthetic
ggcgcgccagtccttgacataggaaattatgtcgaggaaacaggaatggccggcttctttgcgactatcagattcggtcttgaaacaagataccctgcacttgccctcaatgagttccagagtgatctcaataccatcaaagggctgatgctgctctacagagaaatagggcctcgagcgccatacatcgactcggaccgatg

SEQ ID NO: 5874 - DNA, 203 bp, Artificial sequence
  synthetic
ggcgcgccagtcctggtgctccttgaggaatctattcagacaaagtttgcaccaggtggttatccactcctgtggagctttgctatgggtgttgcaaccactatcgaccgatccatgggtgctctcaacatcaatcgtggttatcttgaacctatgtatttcagacttggacagaaatcagcaagacacgactcggaccgatg

SEQ ID NO: 5875 - DNA, 203 bp, Artificial sequence
  synthetic
ggcgcgccagtcctagatattgatgaggaagaagagcctatcgaacatagtggtaggcagtcagtgactttcaagagagaaatgagcatgtcatctctcgcagacagtgtcccaagcagttcagtgagtacatccggaggaacgagattgacaaattctctattgaatctcagatccagattagctgccgactcggaccgatg

SEQ ID NO: 5876 - DNA, 203 bp, Artificial sequence
  synthetic
ggcgcgccagtcctcattatattaagaaaaacttaggatccaagaccataaatctaggatcctttacaatctcagaccctggtgcaaggttatatatagagcccaattctcctaattaaacagtgtctcaggttgacaaatggacaagttggatctagtcaatgatggcctcgatattattgactttacgactcggaccgatg

SEQ ID NO: 5877 - DNA, 203 bp, Artificial sequence
  synthetic
ggcgcgccagtcctttcagaagaaccaaaaagaaatacaaaagacatacggacgatcaagcatccaacaaccaagtaccaaagacaggacaagagcatgggaggacttcttgcagagcaccagtggagaacatgaacaggctgaggggggaatgcctaagaatgatggaggtactgaaggaagaaatgcgactcggaccgatg

SEQ ID NO: 5878 - DNA, 203 bp, Artificial sequence
  synthetic
ggcgcgccagtccttggaggatctatccagtgttacttcctcagatggaactattggacaaagagtgtcaaacacccgagcttgggcagaagacccagatgacatacaactggacccaatggttacagacgttgtataccatgatcatggaggagaatgtaccggacatggaccttcttcaagccctgcgactcggaccgatg

SEQ ID NO: 5879 - DNA, 203 bp, Artificial sequence
  synthetic
ggcgcgccagtcctttccctttgtccccaagaatcaatcaaccccaactgaggagcctccagtcatcccggagtattactatggatctgggaggagaggagatctctcaaaatctcctcctagaggtaatgtcaatctggacagcatcaagatttacacttcggacgacgaggatgaaaatcagctggcgactcggaccgatg

SEQ ID NO: 5880 - DNA, 203 bp, Artificial sequence
  synthetic
ggcgcgccagtcctagtatgaggatgagtttgccaaaagctcaagtgaggttgtcattgacactactcctgaggacaatgattctatcaaccaggaggaagtagttggggacccgtctgatcagggtttagagcatcctttccctttggggaaattcccggagaaagaagaaactcctgatgtacgcacgactcggaccgatg

SEQ ID NO: 5881 - DNA, 203 bp, Artificial sequence
  synthetic
ggcgcgccagtcctattttgctaacactttcttaccccatgacactgataggttaaattatcatgcagaccatctcaatgattacgatttagagaccttgtgtgaggagtcagtattgatgggcatcgttaacgcaatcaaactcatcaacattgatatgaggttgaatcacattgaggaacagatgacgactcggaccgatg

SEQ ID NO: 5882 - DNA, 203 bp, Artificial sequence
  synthetic
ggcgcgccagtcctttgatagagtagcagtcagaccaagatcatatattagaggtacacatcataatggccagtgtcttaatctcaaccattcataaaccgtcagtgtttcccttataaactccattatgtagtttattaatatctagagctattctttattaagtaataaatctgtattagattattcgactcggaccgatg

SEQ ID NO: 5883 - DNA, 203 bp, Artificial sequence
  synthetic
ggcgcgccagtcctggatcttttagaagagctatgttctttgaaagtcactgtcagaagaacagctggggctacagagaaaattgtgttcgggtcctctggcccgcttcatcatctcttaccatggaagaagattctgactggcggatcaatattcaatgctgtcaaggtttgccgcaatgtggatcacgactcggaccgatg

SEQ ID NO: 5884 - DNA, 203 bp, Artificial sequence
  synthetic
ggcgcgccagtcctgatctatgacgatgtgttcattgacaacacagggaagatcctaaaggggtgaaataaaacattcacttggttattgtagattgataaattaaccagataaccactttaatcttcattctaaagaatgccacagtgtcagtaagttacacaggtacaatacataatctaaattcacgactcggaccgatg

SEQ ID NO: 5885 - DNA, 203 bp, Artificial sequence
  synthetic
ggcgcgccagtcctaagcaatggctacacaagaggtcaggctaaagtgtttgctctgtgggatcatagttctggttttgtcattagaagggctagggatactacattatgagaaacttagtaagatagggctggttaaaggtattacaagaaagtacaagattaagagtaaccctttgaccaaggatacgactcggaccgatg

SEQ ID NO: 5886 - DNA, 203 bp, Artificial sequence
  synthetic
ggcgcgccagtcctttgtgatcaaaatgatccctaatgtctcgaatgtctcaaagtgcaccgggactgttatggagaattacaaaagcagactcacagggattctctcaccaatcaaaggcgccatcgaactgtacaataataacacgcatgacctagttggtgatgtcaagcttgcaggtgtggtgacgactcggaccgatg

SEQ ID NO: 5887 - DNA, 203 bp, Artificial sequence
  synthetic
ggcgcgccagtccttggcagggattgcaatcgggatagctactgctgcacaaatcacagcaggtgttgccttatatgaggcaatgaagaacgcagacaatatcaataaactcaagagcagcatagagtctacaaatgaggctgttgtcaaattacaggaaacagctgagaaaacagtctacgtccttacgactcggaccgatg

SEQ ID NO: 5888 - DNA, 203 bp, Artificial sequence
  synthetic
ggcgcgccagtcctctgctcttcaagattacatcaacactaaccttgttcctacaatagatcaaattagctgcaagcaaacagagctcgcattagacttggcgttgtctaagtatctgtctgatctgctctttgttttcggacctaacttacaggatccagtctctaattccatgactatccaagcaacgactcggaccgatg

SEQ ID NO: 5889 - DNA, 203 bp, Artificial sequence
  synthetic
ggcgcgccagtcctaacaggcttatgtgcaggagttgcttccagtgagttttaataacgataattcagaatggatcagcattgtcccgaatttcgtgctgattaggaacacgctgatttcaaatatagaagtcaagtactgcttaatcaccaagaaaagtgtgatttgtaatcaggactatgctacaccgactcggaccgatg

SEQ ID NO: 5890 - DNA, 203 bp, Artificial sequence
  synthetic
ggcgcgccagtcctagataggccccaaagtctcactaattgacacatccagcaccatcacaattcctgctaacatagggttactgggatccaagataagtcagtctaccagcagtattaatgagaatgttaacgataaatgcaaatttactcttcctcctttaaagattcatgagtgtaatatctcttcgactcggaccgatg

SEQ ID NO: 5891 - DNA, 203 bp, Artificial sequence
  synthetic
ggcgcgccagtcctctataactaaagttgaaagagggaagtacgataaggtgatgccttacggtccatcaggtatcaagcaaggggatacattgtactttccggccgtcggttttttgccaaggaccgaatttcaatataatgactctaattgtcccataattcattgcaagtacagcaaagcagaaacgactcggaccgatg

SEQ ID NO: 5892 - DNA, 203 bp, Artificial sequence
  synthetic
ggcgcgccagtcctttttctaccaggcatcatattcttgggatacgatgattaaattaggcgatgttgataccgttgaccctctaagagtacagtggagaaataacagtgtgatttctagacctggacagtcacagtgtcctcgatttaatgtctgtcccgaggtatgctgggaagggacatataatgcgactcggaccgatg

SEQ ID NO: 5893 - DNA, 203 bp, Artificial sequence
  synthetic
ggcgcgccagtcctcttataatatactcaaaaaattaaaaattcccccaagaaaatactaaatgtaatcaaactcaataaaccctgaaatattgatagtttacagagatcatatgactctttgtataattctttatagaactcctaaatatcaaagagcgataaacttgctaccctgtacacttaaagcgactcggaccgatg

SEQ ID NO: 5894 - DNA, 203 bp, Artificial sequence
  synthetic
ggcgcgccagtcctttttaggtatttatgagcaggacagactcagtaacatagggaaatacatgagtcaatcgcaatggtatgagtgttttctcttctggttcacaatcaagacagagatgagagctgttatcaagaactcacagaaacctaagtttagatctgactcttgtattattcatatgaaagcgactcggaccgatg

SEQ ID NO: 5895 - DNA, 203 bp, Artificial sequence
  synthetic
ggcgcgccagtcctttagagagcatatgctagcagataaggtccttgaatacgggccaatcatgaaagcacacgcagtcttttgtggtacaattataaatgggtaccgtgacaggcatcggggagcttggcctccactttatctgccatcgcatgcatcgaaacacataataagactcaagaattctgcgactcggaccgatg

SEQ ID NO: 5896 - DNA, 203 bp, Artificial sequence
  synthetic
ggcgcgccagtcctatcgccacaagtgtgataacactagccaaacattccttgactatcatatggaattcagtccctacaagtcagacagaatggataggacagagacatctgatttctcgaaatatgatgatggaacaggaacaaaatttgacacggtgagtgctttcctaactactgacttgaagacgactcggaccgatg

SEQ ID NO: 5897 - DNA, 203 bp, Artificial sequence
  synthetic
ggcgcgccagtcctaattctgtctcaattggcgatatgaatccatggctatttttgcagaaagacttgacgaaatttatggcttacccggtttctttaactggatgcacaaacgattagagaagtcagtcatttatgtcgcagatcctaattgcccaccagacatcgggaaacatataaaccttgatgcgactcggaccgatg

SEQ ID NO: 5898 - DNA, 203 bp, Artificial sequence
  synthetic
ggcgcgccagtcctaggtccaccctaatttaccttacaaagtcaagaaagaaatttgtgcaaggcaagctcaattatattttgacaggctcagaatgaatcttagggccttaggactcaacttaaaagcaacagagaccattataagtacacacttatttgtctactctaagaaaatacattatgatgcgactcggaccgatg

SEQ ID NO: 5899 - DNA, 203 bp, Artificial sequence
  synthetic
ggcgcgccagtcctgagaggaaattgctggattacttgacacaacaaaggggctaataagatcaggattgaaaaagagcgggatacaacctaagttagtgtctagactgtctaaccatgattataatcagttcctgatactcaatagacttttgtccaataaaaagagaaacgatcttatatcccctacgactcggaccgatg

SEQ ID NO: 5900 - DNA, 203 bp, Artificial sequence
  synthetic
ggcgcgccagtcctgttggtttttcgtgccacgagattcacaattagaccaagtgaataaagagcactcatccattagagtaccttacgtcggctcaagcactgatgagaggtcagatatcaaactaggaaacgtcaagagaccgacaagagcactgagatctgccatcgaattgcaactgtttataccgactcggaccgatg

SEQ ID NO: 5901 - DNA, 203 bp, Artificial sequence
  synthetic
ggcgcgccagtccttggatcctgagctttttgccctttatttaggtcaatcaatttcagtcaagtgggcatttgaaatccatcatagacgcccacatggacgacatacaatggtagatttgttgtctgatctcatatccaatacatcgaaacatacatacaaagtcttgtctaatgcactgtcacatccgactcggaccgatg

SEQ ID NO: 5902 - DNA, 203 bp, Artificial sequence
  synthetic
ggcgcgccagtccttactagatattagaggttgcataatatataatctagaagaaatcttatcaatgaatactaagtccacgtcaagaaaggtgttcaatttgggttcaaagttgtcagttgaaaaccacaaatatagaaggataggattaaattcgtcttcttgctacaaggcattaaatctgtcaccgactcggaccgatg

SEQ ID NO: 5903 - DNA, 203 bp, Artificial sequence
  synthetic
ggcgcgccagtcctctaaaagcccggaactttataacatcaaaaattacataaggagaaaagttttgattctagacttcagatcccatactatgattaaactgctacctaaaggaatgaaagagagaagagagaaaagcggattcaaagaaatttggatatttgacttatctaatagggaagtcaaaacgactcggaccgatg

SEQ ID NO: 5904 - DNA, 203 bp, Artificial sequence
  synthetic
ggcgcgccagtccttcaccctctttcccggtggtctggtcccggaccaccgttactccattcagcttcttcggaacctgttcggaggaattaaacgggcacccatactccccccacccccctttggtaactaagtatgtgtgctcgtgatcttggctcccacggaggggaccgatccgttggtgaacacgactcggaccgatg

SEQ ID NO: 5905 - DNA, 203 bp, Artificial sequence
  synthetic
ggcgcgccagtcctaacagctaggtccacatcctcccttcccctgggagggcccccgccctcccacatcctccccccagcctgacgtatcacaggctgtgtgaagcccccgcgaaagctgctcacgtggcaattgtgggtccccccttcatcaagacaccaggtctttcctccttaaggctagccccgcgactcggaccgatg

SEQ ID NO: 5906 - DNA, 203 bp, Artificial sequence
  synthetic
ggcgcgccagtcctgcgtgtgaattcacgttgggcaactagtggtgtcactgtgcgctcccaatctcggccgcggagtgctgttccccaagccaaacccctggcccttcactatgtgcctggcaagcatatctgagaaggtgttccgctgtggctgccaacctggtaacaggtgccccagtgtgcgtacgactcggaccgatg

SEQ ID NO: 5907 - DNA, 203 bp, Artificial sequence
  synthetic
ggcgcgccagtcctaccttcttccgtctccggacggtagtgattggttaagatttggtgtaaggttcatgtgccaacgccctgtgcgggatgaaacctctactgccctaggaatgccaggcaggtaccccacctccgggtgggatctgagcctgggctaattgtctacgggtagtttcatttccaatccgactcggaccgatg

SEQ ID NO: 5908 - DNA, 203 bp, Artificial sequence
  synthetic
ggcgcgccagtcctcttttatgtcggagtcatggctgcaacacgggtttcacgatctgtgctcgctgctgtggctcactctgccgctcaccgcacctaccacactgtccttgactgctatgataggctttacctcaacaccaacccccatctctcttatccccttcccaaaaactcttccttcccttgcgactcggaccgatg

SEQ ID NO: 5909 - DNA, 203 bp, Artificial sequence
  synthetic
ggcgcgccagtcctaacatactactctgaccttcagcaaaagttctttgacaaattggctctcctctctcttccaggtgcctaccaagcaaagaccccggaggagcgtgccctcgcgggcgcgctcacccaactcctcaacttcccctccaccccccctctcacactccctaccactaacctccaacgcgactcggaccgatg

SEQ ID NO: 5910 - DNA, 203 bp, Artificial sequence
  synthetic
ggcgcgccagtcctccgcacctggttgttggatacagtcacctggtcccaggagttcacccgcggctggaacatcgcaggctccaatggcatgcaatggaccggcctggaatcccttatcttccctgtctccactgacaccaattggacctccacctccagtcctaccgcatatcccctccctttctccgactcggaccgatg

SEQ ID NO: 5911 - DNA, 203 bp, Artificial sequence
  synthetic
ggcgcgccagtcctcttcgtgcgtgcttacccagactcctcctgggctgccatgtacaacacccactccatgtggaattgcggttggcgcgttcaagtgaccgtcaacggctcacagttccatgccggagcccttatcctctacatggtccctgaagccaccacccatgccatccaaacggctcgggacgactcggaccgatg

SEQ ID NO: 5912 - DNA, 203 bp, Artificial sequence
  synthetic
ggcgcgccagtcctcaacgctggctttgtcttcccctatgtcatcctcaatctctatgaaagcaacaccgctaccatagaggtcccctacatctcccccacccccaatacctcgagtggactccacgccccgtggacgttctacctccaggtgctctcacccctcaatcctcccccttctctccccaccgactcggaccgatg

SEQ ID NO: 5913 - DNA, 203 bp, Artificial sequence
  synthetic
ggcgcgccagtcctttccttatcctgctctatctatgtcacccccgttgactcctctttccacggtctccgctacctcgccccacagcactggaagactcgcgccgtcccaggtgcgggcactttcggatctgccgtggctggccaggaactccctctctgtggagtccgtgcctactacccccccaacgactcggaccgatg

SEQ ID NO: 5914 - DNA, 203 bp, Artificial sequence
  synthetic
ggcgcgccagtccttgcctacatccctgcccaggtacgcgactggcttgagttcgcccaccggcctggtctcatggccacagtgccgtggaccatggcggacgagccggccgagcgcctcggtatcttccccgtctctcccagtgctatcgctgggactggcgcccccatctcctatgttatttctctcgactcggaccgatg

SEQ ID NO: 5915 - DNA, 203 bp, Artificial sequence
  synthetic
ggcgcgccagtcctcttctcccagtggcgcggtgaactcgccgcccacctcctcttcactggctccgctcagcactacggccgcctggtcgtgtgctacactcctgctgccccccaacccccctccaccatgcaggaagcgatgcgcggaacatacaccgtatgggacgtcaacgctgcctcaaccctcgactcggaccgatg

SEQ ID NO: 5916 - DNA, 203 bp, Artificial sequence
  synthetic
ggcgcgccagtcctatccttcaacgtacgactgatgcaaaaccccgccctcacttcccaaaccctcaccgaagacctcgatgcaccccaagacaccgggaacattgagaacggtgcggctgacaactccccgcagccccgcaccaccttcgactacaccggaaaccccctccctccagacaccaaactcgactcggaccgatg

SEQ ID NO: 5917 - DNA, 203 bp, Artificial sequence
  synthetic
ggcgcgccagtcctggacctgcgaatcacgctccgcttctccaacccaaatgacaaccctgccaccatgcttgttgccttcgctccccctggcgccaccatccccctcaaacccacgcgccaaatgctctccaacttctacatggcggaggtcccagtctccgctgccacctccaccatggtctctttcgactcggaccgatg

SEQ ID NO: 5918 - DNA, 203 bp, Artificial sequence
  synthetic
ggcgcgccagtcctctccatcccctacacctcccccctctctgccatccccacctcatacttcggatgggaggactggtcaggtaccaactttggccagctctcctccgggtcatggggaaacctcatgctcatcccctctctctctgtcgactctgctatccccttcgacttccagctctcttgctgcgactcggaccgatg

SEQ ID NO: 5919 - DNA, 203 bp, Artificial sequence
  synthetic
ggcgcgccagtcctccccacctacgtccactgggccatccgcaaggtggcccccgacggcagtgccaaacagatctcgctgtcccgcagcgggatccaggcactggtcgccctcgaaccccccgagggtgaaccttacctcgaaattctcccctcccattggacccttgctgaactccaacttggcaacgactcggaccgatg

SEQ ID NO: 5920 - DNA, 203 bp, Artificial sequence
  synthetic
ggcgcgccagtcctcaagtgggagtacagcgccaccaacaactgtacccacttcgtcagctccatcactggcgaatccctccccaacaccggcttctccctggccctcggaatcggtgccctcaccgccatcgcagcctcggctgctgttgccgtgaaagcgctcccaggcatcaggcgacagggtctcgactcggaccgatg

SEQ ID NO: 5921 - DNA, 203 bp, Artificial sequence
  synthetic
ggcgcgccagtcctcattgatcacatcactaaatccatctcccgctgccgtgaattggtctccatcgcccaggaggccaaatccggccctcactcttccttcctcaaccaagcagtcaaaaactacacccttgccatctcccaacaccgcaaatgccagacaggtcccaggcctgaacccgtggtggtcgactcggaccgatg

SEQ ID NO: 5922 - DNA, 203 bp, Artificial sequence
  synthetic
ggcgcgccagtcctctacctctacggaccccccggcactggcaaatccctccttgcttcactcctcgctcaaaccctttcccagcgtcttgctgggacccccgatgacgtctactccccctcctccgcctcctgtgagtacttcgatgggtacacgggtcaaaccgtgcactttatcgatgacatcggcgactcggaccgatg

SEQ ID NO: 5923 - DNA, 203 bp, Artificial sequence
  synthetic
ggcgcgccagtcctgcaggatccggaggggcgggactgggctaatttcccaaacctcgtctcctctgcccccttcattgtcccaatggcctccctcgaggagaagggcacccactacacctccaaggtcatcgtggttacctccaacttccacgagcctaacgagcgcgccgcgcgctcgatgggcgccgactcggaccgatg

SEQ ID NO: 5924 - DNA, 203 bp, Artificial sequence
  synthetic
ggcgcgccagtcctggcgcaccaccgccctgtaccatgctcccttggcctctcccaagccatcgcaaacaacacccccatccaacaaatctctgaaaccttctggaagtaccgcaaacccatcttcacttgcaccactttcctcgctgtcctcggtttcctctgctctgtcatccctcttgctcgctccgactcggaccgatg

SEQ ID NO: 5925 - DNA, 203 bp, Artificial sequence
  synthetic
ggcgcgccagtccttcccacctcccgccagtacaaggacatgcggcgcttcatcggcgcccatccccaccccactggactccttgtttcccaattcaaagctgcccccctctatgtccgcatctccgacaaccggatcctggaccttgacttccccggagtcgtcgtctgtaagcaggcgtacggatacgactcggaccgatg

SEQ ID NO: 5926 - DNA, 203 bp, Artificial sequence
  synthetic
ggcgcgccagtcctcattgttcccactgctgaagtccggcctggcgtcaacgtcaaccggatgtcccgcttgcacccctctcccgcctacggtgccttccctgtcaagaaacaacccgctcccctcaagcgcaacgacaagcgcctgcaggagggcgtcgatcttgacacccagctcttcctcaaacacgactcggaccgatg

SEQ ID NO: 5927 - DNA, 203 bp, Artificial sequence
  synthetic
ggcgcgccagtcctcgtcgaagctgctcccatccatgctatcgtcgctggccggatgctcctcggtggtctcatcgactacatgcaggggcgtcccggcgagcacggtagtgcggttggttgcaacccagacgttcactggacttccttcttttacgccttcagcgagttctctcaggtatacgatctcgactcggaccgatg

SEQ ID NO: 5928 - DNA, 203 bp, Artificial sequence
  synthetic
ggcgcgccagtcctggactacaagtgttttgatgctacccttccttctgctgtcttcacccttgttgctgaccatcttacccgcatcaccggagatccccgcgtcggtcgctacatccactccatccgccattcacaccacatttatggcaaccggatgtacgacatgatcggggggaatccctccggcgactcggaccgatg

SEQ ID NO: 5929 - DNA, 203 bp, Artificial sequence
  synthetic
ggcgcgccagtcctttgtgtggccacctccatcctcaacaccatcatcaacaacatctgtgtcctctctgccctcatccaacaccctgatttctctccctcccgcttccacatcctggcgtacggtgacgacgtcatctacgctacggaaccccccatccatccttccttccttcgggagttctaccacgactcggaccgatg

SEQ ID NO: 5930 - DNA, 203 bp, Artificial sequence
  synthetic
ggcgcgccagtcctgaaacacacccctctggtggtcacccccgcaaacaaaggccaggatttcccacccacgtctacgatctatgaagtcaccttcctcaaacgctggttcgttccggacgatgttagacccatctacattcaccctgtgatggaccccgacacgtacgagcaatcggtaatgtggttcgactcggaccgatg

SEQ ID NO: 5931 - DNA, 203 bp, Artificial sequence
  synthetic
ggcgcgccagtcctggctgcctgatagttagggaacacagtgcctcggcacgcttagttagttagaaccctttgcccactcctccatggtgatataaagaccacccacttccttcgggtgagcccctaagccatggttgtactgcactatcatcctaagacggtccttcttcggatcgcaatctcacccgactcggaccgatg

SEQ ID NO: 5932 - DNA, 203 bp, Artificial sequence
  synthetic
ggcgcgccagtcctggtgatataaagaccacccacttccttcgggtgagcccctaagccatggttgtactgcactatcatcctaagacggtccttcttcggatcgcaatctcaccctggtgccgcgcttccttcgggaactgcacccgcggaccagggccgtctttgaacttttctaactgttcttaccgactcggaccgatg

SEQ ID NO: 5933 - DNA, 203 bp, Artificial sequence
  synthetic
ggcgcgccagtccttctttgctgagacttgaccgccccgggtacccgtgtacgaataaacctcttgctgattgcatctgactcgtggtctcggtgttctgtgggcgcggggtctcatcgccgaggaagacctagttcaggggtctttcatttgggggctcgtccgggatcgagacccccgacccccggcgactcggaccgatg

SEQ ID NO: 5934 - DNA, 203 bp, Artificial sequence
  synthetic
ggcgcgccagtcctgaccaccgacccaccatcaggaggtaagctggccggcgaccatacctgttgtccttgtataagtgtctctgtcaattgatctgattttggcggtgggatcgaaggagctgacgagctcgtacttcgcccccgcaaccctggaagacgttccacgggtgtctgatgtctggagcccgactcggaccgatg

SEQ ID NO: 5935 - DNA, 203 bp, Artificial sequence
  synthetic
ggcgcgccagtcctggccaggaccccccccctgagcccaggataaccttaaaaataggggggcaaccggtgactttcctggtggacacgggagcccagcactcagtactaactcgaccagatggacctctcagtgaccgcacagccctggtgcaaggagccacgggaagcaaaaactaccggtggacccgactcggaccgatg

SEQ ID NO: 5936 - DNA, 203 bp, Artificial sequence
  synthetic
ggcgcgccagtcctccagaaataggactgtcagggcagctaacctggacacgccttcctcaagggttcaagaatagccccaccctatttgatgaggccctgcactcagacctggccgatttcagggtaaggtacccggctctagtcctcctacaatatgtagatgacctcttgctggctgcggcaacccgactcggaccgatg

SEQ ID NO: 5937 - DNA, 203 bp, Artificial sequence
  synthetic
ggcgcgccagtcctaggactgaatgcctggaagggactaaggcactccttgagactttgggcaataaggggtaccgagcctctgcaaagaaggcccaaatttgcctgcaagaagtcacatacctggggtactctttaaaagatggccaaaggtggcttaccaaagctcgcaaggaagccatcctatcccgactcggaccgatg

SEQ ID NO: 5938 - DNA, 203 bp, Artificial sequence
  synthetic
ggcgcgccagtcctcccccttgtttacgcatggttgcagccatcgccatcctagtcaaggatgcagggaagctaaccctaggacagccgctaactatcctgacctcccacccagttgaggcacttgtccgacagcctccaaataaatggctctctaatgctagaatgactcattaccaagctatgctccgactcggaccgatg

SEQ ID NO: 5939 - DNA, 203 bp, Artificial sequence
  synthetic
ggcgcgccagtcctctcgatgcagagcgagtccatttcgggccgacagtctcccttaaccctgctaccttgctccccctccccagcgggggaaaccaccacgactgtctccagattttagccgagacccatggcaccagacccgacttaactgaccagccgttgccggatgcagacctgacctggtaccgactcggaccgatg

SEQ ID NO: 5940 - DNA, 203 bp, Artificial sequence
  synthetic
ggcgcgccagtcctgaagctcattatgagccaaagagaggtacctgggagtaccgaggaaaaactatcatgcctgaaaaatacgcaaaagagttgattagccatctgcataagttaacacacctcagtgctaggaaaatgaaaactttactagaaagagaagaaactgggttttacctccctaacagacgactcggaccgatg

SEQ ID NO: 5941 - DNA, 203 bp, Artificial sequence
  synthetic
ggcgcgccagtcctgacttacacctccggcaagtaacagagagctgccgggcatgtgctcaaatcaacgccggaaagataaagtttggacctgatgtaagggcccgaggccgccggcccggaacacattgggaagtagacttcactgaaatcaagccaggaatgtatggatataaatacctcttggtgcgactcggaccgatg

SEQ ID NO: 5942 - DNA, 203 bp, Artificial sequence
  synthetic
ggcgcgccagtcctccaatgtaaaacacggggcacgttactcctcctcaaagtatggatgtaaaactacagatagaaaaaaacagcaacaaacataccccttttacgtctgccccggacatgccccctcgctggggccaaagggaacacattgtggaggggcacaagatgggttttgtgccgcatgggcgactcggaccgatg

SEQ ID NO: 5943 - DNA, 203 bp, Artificial sequence
  synthetic
ggcgcgccagtcctctgaaagcgccccaaggtctgttgcccccaccaccgtgggtcccaaacggattgggaccggagataggttaataaatttagtacaagggacatacctagccttaaatgccaccgaccccaacaaaactaaagactgttggctctgcctggtttctcgaccaccctattacgaagcgactcggaccgatg

SEQ ID NO: 5944 - DNA, 203 bp, Artificial sequence
  synthetic
ggcgcgccagtcctggattgcaatcttaggtaactacagcaaccaaacaaacccccccccatcctgcctatctactccgcaacacaaactgaccatatctgaagtatcagggcaaggactgtgcatagggactgttcctaagacccaccaggctttgtgcaatgagacacaacagggacatacaggggcgactcggaccgatg

SEQ ID NO: 5945 - DNA, 203 bp, Artificial sequence
  synthetic
ggcgcgccagtcctcgcactatctagccgcccccaatggcgcctattgggcctgtaacactggactcaccccatgcatttccatggcggtgctcaattggacctctgatttttgtgtcttaatcgaattatggcccagagtgacttaccatcaacccgaatatgtgtacacacattttgccaaagctgcgactcggaccgatg

SEQ ID NO: 5946 - DNA, 203 bp, Artificial sequence
  synthetic
ggcgcgccagtcctttagtgccttagaaaagtccctgacctccctttctgaagtagtcttacaaaacagacggggcctagatattctattcttacaagagggagggctctgtgccgcattaaaagaagaatgttgcttctatgcggatcacaccggactcgtccgagacaatatggctaaattgagagcgactcggaccgatg

SEQ ID NO: 5947 - DNA, 203 bp, Artificial sequence
  synthetic
ggcgcgccagtcctaaagactaaaacagcggcaacaactgtttgactcccaacagggatggtttgaaggatggttcaacaagtccccctggttcacaaccttaatttcctccattatgggccccttactaatcctactcctaattctcctcttcggcccatgcatccttaacagattagtacaattcgcgactcggaccgatg

SEQ ID NO: 5948 - DNA, 203 bp, Artificial sequence
  synthetic
ggcgcgccagtcctgtggtgccatttcacaaggcatggaaaattactcaagtatgttcccatgagatacaaggaagttagaggctaaaacaggatatctgtggttaagcacctgggccccggcttgaggccaagaacagttaaaccccggatatagctgaaacagcagaagtttcaaggccgctaccacgactcggaccgatg

SEQ ID NO: 5949 - DNA, 203 bp, Artificial sequence
  synthetic
ggcgcgccagtcctgctataaaacgagccatcagcccccaacgggcgcgcaagtctttgctgagacttgaccgccccgggtacccgtgtacgaataaacctcttgctgattgcatctgactcgtggtctcggtgttctgtgggcgcggggtctcatcgccgaggaagacctagttcaggggtctttcacgactcggaccgatg

SEQ ID NO: 5950 - DNA, 203 bp, Artificial sequence
  synthetic
ggcgcgccagtccttgatgaacacgctgagtggtttgatgccggtggcttaggtccaagtacactacccactagtcatgaacggtacacacatgagaatgatgaaggccaccaggtaaagtggtcggctagggaaggtgtagaccttggcatatccgggctcacgacggtgtctgggcctgagtggaacgactcggaccgatg

SEQ ID NO: 5951 - DNA, 203 bp, Artificial sequence
  synthetic
ggcgcgccagtcctgcaaaggaagctcatctcctctggccggttttaccacccgacccaagattggtcccgagacactccagaattccaacaagacagcaagttagagatggttagggatgcagtgctagccgctataaatgggttggtgtcgcggccatttaaagatcttctgggtaagctcaaacccgactcggaccgatg

SEQ ID NO: 5952 - DNA, 203 bp, Artificial sequence
  synthetic
ggcgcgccagtcctcgtagtatcctctaccaatgctctcatatcccggatctcaatggctagggctgcattggccaaggctcaagctgaaatgaccagcaggatgcgtcctgtggtcattatgatgtgtgggccccctggtataggtaaaaccaaggcagcagaacatctggctaaacgcctagccaacgactcggaccgatg

SEQ ID NO: 5953 - DNA, 203 bp, Artificial sequence
  synthetic
ggcgcgccagtccttgagatacggcctggtggtaaggttgggctggtcccacgggaggcagtggatcattgggatggatatcacggagaggaagtgatgctgtgggacgactatggaatgacaaagatacaggaagactgtaataaactgcaagccatagccgactcagcccccctaacactcaattgcgactcggaccgatg

SEQ ID NO: 5954 - DNA, 203 bp, Artificial sequence
  synthetic
ggcgcgccagtccttgaccgaatagaaaacaagggaatgcaatttgtgtctgatgctatagtcatcaccaccaatgctcctggcccagccccagtggactttgtcaacctcgggcctgtttgccgaagggtggacttccttgtgtattgcacggcacctgaagttgaacacacgaggaaagtcagtcccgactcggaccgatg

SEQ ID NO: 5955 - DNA, 203 bp, Artificial sequence
  synthetic
ggcgcgccagtccttggggacacaactgcactgaaagactgcttcaagcccgatttctcacatctaaaaatggagttggctccccaagggggctttgataaccaagggaataccccgtttggtaagggtgtgatgaagcccaccaccataaacaggctgttaatccaggctgtagccttgacgatggacgactcggaccgatg

SEQ ID NO: 5956 - DNA, 203 bp, Artificial sequence
  synthetic
ggcgcgccagtcctcgcttcatgtttccagtccgccataactaccatactacaaatggcgggatctgcgctcgttattaatcgagcggtcaagcgtatgtttggtacccgtacagcagccatggcattagaaggacctgggaaagaacataattgcagggtccataaggctaaggaagctggaaagggcgactcggaccgatg

SEQ ID NO: 5957 - DNA, 203 bp, Artificial sequence
  synthetic
ggcgcgccagtcctggtcttctataaatccaagagtaagaaacaccaacaagagcaacggcgacaacttggtctagtgactggatcagacatcagaaaacgtaagcccattgactggaccccgccaaagaatgaatgggcagatgatgacagagaggtggattataatgaaaagatcaattttgaagccgactcggaccgatg

SEQ ID NO: 5958 - DNA, 203 bp, Artificial sequence
  synthetic
ggcgcgccagtccttcccccgacactatggagccgagtcacaaagtttggatcaggatggggcttttgggtcagcccgacagtgttcatcacaaccacacatgtagtgccaactggtgtgaaagaattctttggtgagcccctatctagtatagcaatccaccaagcaggtgagttcacacaattcagcgactcggaccgatg

SEQ ID NO: 5959 - DNA, 203 bp, Artificial sequence
  synthetic
ggcgcgccagtcctgttctcaaagaaaatgcgccctgacttgacaggtatggtccttgaagaaggttgccctgaagggacagtctgctcagtcctaattaaacgggattcgggtgaactacttccgctagccgtccgtatgggggctattgcctccatgaggatacagggtcggcttgtccatggccacgactcggaccgatg

SEQ ID NO: 5960 - DNA, 203 bp, Artificial sequence
  synthetic
ggcgcgccagtcctgggcgaaaccgcactagaaggtggagacaaggggcattatgccggccacgagattgtgaggtatggaagtggcccagcactgtcaactaaaacaaaattctggaggtcctccccagaaccactgccccccggagtatatgagccagcatacctggggggcaaggacccccgtgtcgactcggaccgatg

SEQ ID NO: 5961 - DNA, 203 bp, Artificial sequence
  synthetic
ggcgcgccagtcctatctcttgacaaaactactagttcggggtaccctcaccataaaaggaagaatgatgattggaatggcaccaccttcgttggagagctcggtgagcaagctgcacacgccaacaatatgtatgagaatgctaaacatatgaaacccatttacactgcagccttaaaagatgaactcgactcggaccgatg

SEQ ID NO: 5962 - DNA, 203 bp, Artificial sequence
  synthetic
ggcgcgccagtcctagtcaagccagaaaagatttatcaaaaagtcaagaagcgtctactatggggcgccgatctcggaacagtggtcagggccgcccgggcttttggcccattttgtgacgctataaaatcacatgtcatcaaattgccaataaaagttggcatgaacacaatagaagatggccccctcgactcggaccgatg

SEQ ID NO: 5963 - DNA, 203 bp, Artificial sequence
  synthetic
ggcgcgccagtcctcatctatgctgagcatgctaaatataagaatcattttgatgcagattatacagcatgggactcaacacaaaatagacaaattatgacagaatccttctccattatgtcgcgccttacggcctcaccagaattggccgaggttgtggcccaagatttgctagcaccatctgagatcgactcggaccgatg

SEQ ID NO: 5964 - DNA, 203 bp, Artificial sequence
  synthetic
ggcgcgccagtcctggatgtaggtgattatgtcatcagggtcaaagaggggctgccatctggattcccatgtacttcccaggtgaacagcataaatcactggataattactctctgtgcactgtctgaggccactggtttatcacctgatgtggtgcaatccatgtcatatttctcattttatggtgacgactcggaccgatg

SEQ ID NO: 5965 - DNA, 203 bp, Artificial sequence
  synthetic
ggcgcgccagtcctgttccaaggcaggttagatagggcttcgattgaacgccaaatcttctggacccgcgggcccaatcattcagatccatcagagactctagtgccacacactcaaagaaaaatacagttgatttcacttctaggggaagcttcactccatggtgagaaattttacagaaagatttccgactcggaccgatg

SEQ ID NO: 5966 - DNA, 203 bp, Artificial sequence
  synthetic
ggcgcgccagtcctgtgcccctctcccaatcagtagtatgggcatttccccagacaatgtccagagtgtgcagttccaaaatggtcggtgtactctggatggccgcctggttggcaccaccccagtttcattgtcacatgttgccaagataagagggacctccaatggcactgtaatcaaccttactgcgactcggaccgatg

SEQ ID NO: 5967 - DNA, 203 bp, Artificial sequence
  synthetic
ggcgcgccagtcctaattggatggcacaccctttcacccttttgagggccctgcccccattgggtttccagacctcggtggttgtgattggcatatcaatatgacacagtttggccattctagccagacccagtatgatgtagacaccacccctgacacttttgtcccccatcttggttcaattcaggcgactcggaccgatg

SEQ ID NO: 5968 - DNA, 203 bp, Artificial sequence
  synthetic
ggcgcgccagtcctcaaatggcattggcagtggtaattatgttggtgttcttagctggatttcccccccatcacacccgtctggctcccaagttgacctttggaagatccccaattatgggtcaagtattacggaggcaacacatctagccccttctgtatacccccctggtttcggagaggtattggcgactcggaccgatg

SEQ ID NO: 5969 - DNA, 203 bp, Artificial sequence
  synthetic
ggcgcgccagtcctcataattggtgcaattgctgcttccacagcaggtagtgctctgggagcgggcatacaggttggtggcgaagcggccctccaaagccaaaggtatcaacaaaatttgcaactgcaagaaaattcttttaaacatgacagggaaatgattgggtatcaggttgaagcttcaaatcacgactcggaccgatg

SEQ ID NO: 5970 - DNA, 203 bp, Artificial sequence
  synthetic
ggcgcgccagtcctattattggctaaaaatttggcaactagatattcactcctccgtgctgggggtttgaccagtgctgatgcagcaagatctgtggcaggagctccagtcacccgcattgtagattggaatggcgtgagagtgtctgctcccgagtcctctgctaccacattgagatccggtggcttcgactcggaccgatg

SEQ ID NO: 5971 - DNA, 203 bp, Artificial sequence
  synthetic
ggcgcgccagtcctgacaacaaccaacccactaatcagacatgagaacagaatggttttagccagcactacagctaaggctatggagcaaatggctggatcgagtgagcaagcagcagaggccatggaggttgctagtcaggctaggcaaatggtgcaagcgatgagaaccattgggactcatcctagcgactcggaccgatg

SEQ ID NO: 5972 - DNA, 203 bp, Artificial sequence
  synthetic
ggcgcgccagtcctctccagtgctggtctgaaaaatgatcttcttgaaaatttgcaggcctatcagaaacgaatgggggtgcagatgcaacggttcaagtgatcctctcgctattgccgcaaatatcattgggatcttgcacttgatattgtggattcttgatcgtctttttttcaaatgcatttacccgactcggaccgatg

SEQ ID NO: 5973 - DNA, 203 bp, Artificial sequence
  synthetic
ggcgcgccagtccttatgttatccaggagatttcatcgactatgaggagctgagggagcaattgagctcagtgtcatcattcgaaagattcgaaatatttcccaaagaaagctcatggcccaaccacaacacaaccaaaggagtaacggcagcatgctcccatgcggggaaaagcagtttttacagaacgactcggaccgatg

SEQ ID NO: 5974 - DNA, 203 bp, Artificial sequence
  synthetic
ggcgcgccagtcctattataacaggagatttaccccggaaatagcagaaagacccaaagtaagagatcaagctgggaggatgaactattactggaccttgctaaaacccggagacacaataatatttgaggcaaatggaaatctaatagcaccaaggtatgctttcgcactgagtagaggctttgggtcgactcggaccgatg

SEQ ID NO: 5975 - DNA, 203 bp, Artificial sequence
  synthetic
ggcgcgccagtcctatggggatctatcagattctggcgatctactcaactgtcgccagttcactggtgcttttggtctccctgggggcaatcagtttctggatgtgttctaatggatctttgcagtgcagaatatgcatctgagattagaatttcagaaatatgaggaaaaacacccttgtttctactcgactcggaccgatg

SEQ ID NO: 5976 - DNA, 203 bp, Artificial sequence
  synthetic
ggcgcgccagtcctctcacttggaatgcaggaccttttttctgacccaaggtgccttactgaatgacaggcattcaaatgggactgttaaggacagaagcccttatagggccttaatgagctgccctgtcggtgaagctccgtccccgtacaattcaagatttgaatcggttgcttggtcagcaagtgcgactcggaccgatg

SEQ ID NO: 5977 - DNA, 203 bp, Artificial sequence
  synthetic
ggcgcgccagtcctcatgtcatgatggcatgggctggctaacaatcggaatttcaggtccagataatggagcagtggctgtattaaaatacaacggcataataactgaaaccataaaaagttggaggaagaaaatattgaggacacaagagtctgaatgtgcctgtgtaaatggttcatgttttactacgactcggaccgatg

SEQ ID NO: 5978 - DNA, 203 bp, Artificial sequence
  synthetic
ggcgcgccagtccttagactgtataaggccgtgcttctgggttgaattaatcaggggacgacctaaagaaaaaacaatctggactagtgcgagcagcatttctttttgtggcgtgaatagtgatactgtagattggtcttggccagacggtgctgagttgccattcaccattgacaagtagtctgttccgactcggaccgatg

SEQ ID NO: 5979 - DNA, 203 bp, Artificial sequence
  synthetic
ggcgcgccagtcctgatcccaggatgtgctctctgatgcaaggttcaactctccctaggaggtctggagccgcaggtgctgcagtcaaaggagttggaacaatggtgatggaattggtcaggatgatcaaacgtgggatcaatgatcggaacttctggaggggtgagaatggacgaaaaacaagaattcgactcggaccgatg

SEQ ID NO: 5980 - DNA, 203 bp, Artificial sequence
  synthetic
ggcgcgccagtcctcattctgccgcatttgaagatctaagagtattgagcttcatcaaagggacgaaggtggtcccaagagggaagctttccactagaggagttcaaattgcttccaatgaaaatatggagactatggaatcaagtacacttgaactgagaagcaggtactgggccataaggaccagacgactcggaccgatg

SEQ ID NO: 5981 - DNA, 203 bp, Artificial sequence
  synthetic
ggcgcgccagtcctgcaaatgttgtaaggaagatgatgaccaattctcaggacaccgaactttctttgaccatcactggagataacaccaaatggaacgaaaatcagaatcctcggatgtttttggccatgatcacatatatgaccagaaatcagcccgaatggttcagaaatgttctaagtattgctcgactcggaccgatg

SEQ ID NO: 5982 - DNA, 203 bp, Artificial sequence
  synthetic
ggcgcgccagtccttcatttgaaataaagaaactgtgggagcaaacccgttccaaagctggactgctggtctccgacggaggcccaaatttatacaacattagaaatctccacattcctgaagtctgcctaaaatgggaattgatggatgaggattaccaggggcgtttatgcaacccactgaacccacgactcggaccgatg

SEQ ID NO: 5983 - DNA, 203 bp, Artificial sequence
  synthetic
ggcgcgccagtcctctgctgatggatgccttaaaattaagcattgaggacccaagtcatgaaggagagggaataccgctatatgatgcaatcaaatgcatgagaacattctttggatggaaggaacccaatgttgttaaaccacacgaaaagggaataaatccaaattatcttctgtcatggaagcaacgactcggaccgatg

SEQ ID NO: 5984 - DNA, 203 bp, Artificial sequence
  synthetic
ggcgcgccagtcctattaaaatgaaatggggaatggagatgaggcgttgtctcctccagtcacttcaacaaattgagagtatgattgaagctgagtcctctgtcaaagagaaagacatgaccaaagagttctttgagaacaaatcagaaacatggcccattggagagtctcccaaaggagtggaggaacgactcggaccgatg

SEQ ID NO: 5985 - DNA, 203 bp, Artificial sequence
  synthetic
ggcgcgccagtcctagttccattgggaaggtctgcaggactttattagcaaagtcggtatttaacagcttgtatgcatctccacaactagaaggattttcagctgaatcaagaaaactgcttcttatcgttcaggctcttagggacaatctggaacctgggacctttgatcttggggggctatatgaacgactcggaccgatg

SEQ ID NO: 5986 - DNA, 203 bp, Artificial sequence
  synthetic
ggcgcgccagtcctacaagcagtgtgtacattgaagtgttgcatttgactcaaggaacatgctgggaacagatgtatactccaggaggggaagtgaagaatgatgatgttgatcaaagcttgattattgctgctaggaacatagtgagaagagctgcagtatcagcagacccactagcatctttattgcgactcggaccgatg

SEQ ID NO: 5987 - DNA, 203 bp, Artificial sequence
  synthetic
ggcgcgccagtcctgagatgtgccacagcacacagattggtggaattaggatggtagacatccttaagcagaacccaacagaagagcaagccgtgggtatatgcaaggctgcaatgggactgagaattagctcatccttcagttttggtggattcacatttaagagaacaagcggatcatcagtcaagcgactcggaccgatg

SEQ ID NO: 5988 - DNA, 203 bp, Artificial sequence
  synthetic
ggcgcgccagtcctagagaggaagaggtgcttacgggcaatcttcaaacattgaagataagagtgcatgagggatatgaagagttcacaatggttgggagaagagcaacagccatactcagaaaagcaaccaggagattgattcagctgatagtgagtgggagagacgaacagtcgattgccgaagcacgactcggaccgatg

SEQ ID NO: 5989 - DNA, 203 bp, Artificial sequence
  synthetic
ggcgcgccagtccttctcccgaggaggtcagtgaaacacagggaacagagaaactgacaataacttactcatcgtcaatgatgtgggagattaatggtcctgaatcagtgttggtcaatacctatcaatggatcatcagaaactgggaaactgttaaaattcagtggtcccagaaccctacaatgctacgactcggaccgatg

SEQ ID NO: 5990 - DNA, 203 bp, Artificial sequence
  synthetic
ggcgcgccagtccttccgctgttctgaggggattcctcattctgggcaaagaagacaggagatatgggccagcattaagcatcaatgaactgagcaaccttgcgaaaggagagaaggctaatgtgctaattgggcaaggagacgtggtgttggtaatgaaacgaaaacgggactctagcatacttactcgactcggaccgatg

SEQ ID NO: 5991 - DNA, 203 bp, Artificial sequence
  synthetic
ggcgcgccagtcctcttggctgttctaaggaaagtcaagagagtggtggccagtttgatgagaggattgtcctcaaggaaacgccgttcccatgatgttctgactgtgcaattcctaattttgggaatgctgttgatgacgggtggagtgaccttggtgcggaaaaacagatggttgctcctaaatgtcgactcggaccgatg

SEQ ID NO: 5992 - DNA, 203 bp, Artificial sequence
  synthetic
ggcgcgccagtcctttttgcagtgacggctctgaccattgcctaccttgtgggaagcaacatgacgcaacgagtcgtgattgccctactggtcttggctgttggtccggcctactcagctcactgcattggaattactgacagggatttcattgagggggtgcatggaggaacttgggtttcagctaccgactcggaccgatg

SEQ ID NO: 5993 - DNA, 203 bp, Artificial sequence
  synthetic
ggcgcgccagtcctcctggagcaagacaagtgtgtcactgttatggcccctgacaagccttcattggacatctcactagagacagtagccattgatagacctgctgaggtgaggaaagtgtgttacaatgcagttctcactcatgtgaagattaatgacaagtgccccagcactggagaggcccacctcgactcggaccgatg

SEQ ID NO: 5994 - DNA, 203 bp, Artificial sequence
  synthetic
ggcgcgccagtcctagctgaagagaacgaaggggacaatgcgtgcaagcgcacttattctgatagaggctggggcaatggctgtggcctatttgggaaagggagcattgtggcatgcgccaaattcacttgtgccaaatccatgagtttgtttgaggttgatcagaccaaaattcagtatgtcatcagcgactcggaccgatg

SEQ ID NO: 5995 - DNA, 203 bp, Artificial sequence
  synthetic
ggcgcgccagtcctccatggcactgttgtgatgcaggtgaaagtgtcaaaaggagccccctgcaggattccagtgatagtagctgatgatcttacagcggcaatcaataaaggcattttggttacagttaaccccatcgcctcaaccaatgatgatgaagtgctgattgaggtgaacccaccttttggcgactcggaccgatg

SEQ ID NO: 5996 - DNA, 203 bp, Artificial sequence
  synthetic
ggcgcgccagtccttctaggagttggggcggatcaaggatgcgccatcaactttggcaagagagagctcaagtgcggagatggtatcttcatatttagagactctgatgactggctgaacaagtactcatactatccagaagatcctgtgaagcttgcatcaatagtgaaagcctcttttgaagaaggcgactcggaccgatg

SEQ ID NO: 5997 - DNA, 203 bp, Artificial sequence
  synthetic
ggcgcgccagtcctgcagtatggttggaagacttggggtaagaaccttgtgttctccccagggaggaagaatggaagcttcatcatagatggaaagtccaggaaagaatgcccgttttcaaaccgggtctggaattctttccagatagaggagtttgggacgggagtgttcaccacacgcgtgtacatcgactcggaccgatg

SEQ ID NO: 5998 - DNA, 203 bp, Artificial sequence
  synthetic
ggcgcgccagtcctgatcattgatggcaactgtgatggacggggaaaatcaaccagatccaccacggatagcgggaaagttattcctgaatggtgttgccgctcctgcacaatgccgcctgtgagcttccatggtagtgatgggtgttggtatcccatggaaattaggccaaggaaaacgcatgaaagcgactcggaccgatg

SEQ ID NO: 5999 - DNA, 203 bp, Artificial sequence
  synthetic
ggcgcgccagtccttgatttgctgaaactcacagtggctgtgggattgcatttccatgagatgaacaatggaggagacgccatgtatatggcgttgattgctgccttttcaatcagaccagggctgctcatcggctttgggctcaggaccctatggagccctcgggaacgccttgtgctgaccctaggcgactcggaccgatg

SEQ ID NO: 6000 - DNA, 203 bp, Artificial sequence
  synthetic
ggcgcgccagtcctggaaccaactagggttgttaactgggaagtgatcattatggatgaagcccattttttggatccagctagcatagccgctagaggttgggcagcgcacagagctagggcaaatgaaagtgcaacaatcttgatgacagccacaccgcctgggactagtgatgaatttccacattccgactcggaccgatg

SEQ ID NO: 6001 - DNA, 203 bp, Artificial sequence
  synthetic
ggcgcgccagtcctgccacttcgtatctccgcatcctctgctgctcaaaggagggggcgcattgggagaaatcccaacagagatggagactcatactactattctgagcctacaagtgaaaataatgcccaccacgtctgctggttggaggcctcaatgctcttggacaacatggaggtgaggggtggcgactcggaccgatg

SEQ ID NO: 6002 - DNA, 203 bp, Artificial sequence
  synthetic
ggcgcgccagtcctaatggtcgccccactctatggcgttgaaggaactaaaacaccagtttcccctggtgaaatgagactgagggatgaccagaggaaagtcttcagagaactagtgaggaattgtgacctgcccgtttggctttcgtggcaagtggccaaggctggtttgaagacgaatgatcgtaacgactcggaccgatg

SEQ ID NO: 6003 - DNA, 203 bp, Artificial sequence
  synthetic
ggcgcgccagtcctgtggtgttttgaaggccctgaggaacatgagatcttgaatgacagcggtgaaacagtgaagtgcagggctcctggaggagcaaagaagcctctgcgcccaaggtggtgtgatgaaagggtgtcatctgaccagagtgcgctgtctgaatttattaagtttgctgaaggtaggagcgactcggaccgatg

SEQ ID NO: 6004 - DNA, 203 bp, Artificial sequence
  synthetic
ggcgcgccagtcctgggagctgctgaagtgctagttgtgctgagtgaactccctgatttcctggctaaaaaaggtggagaggcaatggataccatcagtgtgttcctccactctgaggaaggctctagggcttaccgcaatgcactatcaatgatgcctgaggcaatgacaatagtcatgctgtttatcgactcggaccgatg

SEQ ID NO: 6005 - DNA, 203 bp, Artificial sequence
  synthetic
ggcgcgccagtcctggttgtgatccccgagccagggcaacaaaggtccatccaagacaaccaagtggcatacctcattattggcatcctgacgctggtttcagcggtggcagccaacgagctaggcatgctggagaaaaccaaagaggacctctttgggaagaagaacttaattccatctagtgcttccgactcggaccgatg

SEQ ID NO: 6006 - DNA, 203 bp, Artificial sequence
  synthetic
ggcgcgccagtcctaccctggagttggccggatcttgacctgaagccaggagctgcctggacagtgtacgttggcattgttacaatgctctctccaatgttgcaccactggatcaaagtcgaatatggcaacctgtctctgtctggaatagcccagtcagcctcagtcctttctttcatggacaagggcgactcggaccgatg

SEQ ID NO: 6007 - DNA, 203 bp, Artificial sequence
  synthetic
ggcgcgccagtcctgataccattcatgaagatgaatatctcggtcataatgctgctggtcagtggctggaattcaataacagtgatgcctctgctctgtggcatagggtgcgccatgctccactggtctctcattttacctggaatcaaagcgcagcagtcaaagcttgcacagagaagggtgttccacgactcggaccgatg

SEQ ID NO: 6008 - DNA, 203 bp, Artificial sequence
  synthetic
ggcgcgccagtccttggcgttgccgagaaccctgtggttgatgggaatccaacagttgacattgaggaagctcctgaaatgcctgccctttatgagaagaaactggctctatatctccttcttgctctcagcctagcttctgttgccatgtgcagaacgcccttttcattggctgaaggcattgtcctcgactcggaccgatg

SEQ ID NO: 6009 - DNA, 203 bp, Artificial sequence
  synthetic
ggcgcgccagtccttttgggtgaagtctggaagagggaactgaatctgttggacaagcgacagtttgagttgtataaaaggaccgacattgtggaggtggatcgtgatacggcacgcaggcatttggccgaagggaaggtggacaccggggtggcggtctccagggggaccgcaaagttaaggtggttcgactcggaccgatg

SEQ ID NO: 6010 - DNA, 203 bp, Artificial sequence
  synthetic
ggcgcgccagtcctcatcaccttcaaggacaaaactgatatccaccgcctagaaccagtgaaatgtgacacccttttgtgtgacattggagagtcatcatcgtcatcggtcacagagggggaaaggaccgtgagagttcttgatactgtagaaaaatggctggcttgtggggttgacaacttctgtgtcgactcggaccgatg

SEQ ID NO: 6011 - DNA, 203 bp, Artificial sequence
  synthetic
ggcgcgccagtcctaagccgtgccatatggtatatgtggctgggagcgcggtatcttgagtttgaggccctgggattcctgaatgaggaccattgggcttccagggaaaactcaggaggaggagtggaaggcattggcttacaatacctaggatatgtgatcagagacctggctgcaatggatggtggcgactcggaccgatg

SEQ ID NO: 6012 - DNA, 203 bp, Artificial sequence
  synthetic
ggcgcgccagtccttggattctacgcggatgacaccgctggatgggacacgcgcatcacagaggcagaccttgatgatgaacaggagatcttgaactacatgagcccacatcacaaaaaactggcacaagcagtgatggaaatgacatacaagaacaaagtggtgaaagtgttgagaccagccccaggcgactcggaccgatg

SEQ ID NO: 6013 - DNA, 203 bp, Artificial sequence
  synthetic
ggcgcgccagtcctcaggctggaggcatggctcactgagcacggatgtgacagactgaagaggatggcggtgagtggagacgactgtgtggtccggcccatcgatgacaggttcggcctggccctgtcccatctcaacgccatgtccaaggttagaaaggacatatctgaatggcagccatcaaaaggcgactcggaccgatg

SEQ ID NO: 6014 - DNA, 203 bp, Artificial sequence
  synthetic
ggcgcgccagtcctgtggaatgattgggagaatgtgcccttctgttcccaccacttccatgaactacagctgaaggatggcaggaggattgtggtgccttgccgagaacaggacgagctcattgggagaggaagggtgtctccaggaaacggctggatgatcaaggaaacagcttgcctcagcaaagccgactcggaccgatg

SEQ ID NO: 6015 - DNA, 203 bp, Artificial sequence
  synthetic
ggcgcgccagtcctagtatggataaccaacaacccacacatgcaggacaagacaatggtgaaaaaatggagagatgtcccttatctaaccaagagacaagacaagctgtgcggatcactgattggaatgaccaatagggccacctgggcctcccacatccatttagtcatccatcgtatccgaacgctcgactcggaccgatg

SEQ ID NO: 6016 - DNA, 203 bp, Artificial sequence
  synthetic
ggcgcgccagtcctgattggacaggagaaatacactgactacctaacagtcatggacaggtattctgtggatgctgacctgcaactgggtgagcttatctgaaacaccatctaacaggaataaccgggatacaaaccacgggtggagaaccggactccccacaacctgaaaccgggatataaaccacgcgactcggaccgatg

SEQ ID NO: 6017 - DNA, 203 bp, Artificial sequence
  synthetic
ggcgcgccagtcctgctggagaaccgggctccgcacttaaaatgaaacagaaaccgggataaaaactacggatggagaaccggactccacacattgagacagaagaagttgtcagcccagaaccccacacgagttttgccactgctaagctgtgaggcagtgcaggctgggacagccgacctccaggtcgactcggaccgatg

SEQ ID NO: 6018 - DNA, 203 bp, Artificial sequence
  synthetic
ggcgcgccagtcctatggcacatggagttgttttcaaatgaacttttatacaaaacatataaacaaaaaccagcaggcgtcgtggaacctgtttacgacgtcaacgggcgtccactgtttggagagagcagtgacttgcacccgcagtccacactaaaactaccacaccaacgaggcagcgccaacatcgactcggaccgatg

SEQ ID NO: 6019 - DNA, 203 bp, Artificial sequence
  synthetic
ggcgcgccagtcctcctgaccaatgctaggtccctaccgcggaaaggtgactgccggagaggtaatgtgaatggagcggtgagtggcatctatatcaaaccaggaccgatctactaccaggactatgtggggcccgtctatcatagagccccactggaactatgtagggaggcaagtatgtgtgaaaccgactcggaccgatg

SEQ ID NO: 6020 - DNA, 203 bp, Artificial sequence
  synthetic
ggcgcgccagtcctgaacaaacatggttggtgtaactggtttcatatagaaccgtggatatggctgatgaacaaaacccaaaacaacctgacagaagggcagccgcttagggagtgtgctgtgacttgtaggtatgacaaggaagcagaattgaacattgtgacacaggctagggacaggcctacaaccgactcggaccgatg

SEQ ID NO: 6021 - DNA, 203 bp, Artificial sequence
  synthetic
ggcgcgccagtccttctgacaggctgcaacaaaggcaagaatttctccttcgcaggtgttgtactggacaggccctgtaactttaaagtatcggttgaagatgtgctgttcaaggagcacgattgcggcaacatgctgcaagagaccgcgatacagatactcgatggggcaaccaacaccattgagggcgactcggaccgatg

SEQ ID NO: 6022 - DNA, 203 bp, Artificial sequence
  synthetic
ggcgcgccagtcctagcaagggtagggacggccaagttgacaacctggttagggaagcaattagggatccttggtaagaagttggagaataaaagcaaagcatggtttggtgcacatgcagcaagtccatactgcggagtggagaagaagatcggttacgtctggtatacaaaaaactgcactccagccgactcggaccgatg

SEQ ID NO: 6023 - DNA, 203 bp, Artificial sequence
  synthetic
ggcgcgccagtcctgaagaggtacctagtggctgtgcacgagagagccctatcaaccagtgctgagtttatgcagatcagtgatgggacaatagccccagatgtgatagatatgactgatgactttgagtttggactctgcccttgtgactcaaaaccagtgataaagggcaaatttaatgccagcttcgactcggaccgatg

SEQ ID NO: 6024 - DNA, 203 bp, Artificial sequence
  synthetic
ggcgcgccagtcctagtttatgacatctgtgacaatgaagaagcagtgtacctgtttccatcaaggcataagagtggaagcagaccggatttcatattaccttttttgaaagccgtgttaataagctgcatcagtagccaatggcaattggtttacattacttacctaatactggaaattacatactacgactcggaccgatg

SEQ ID NO: 6025 - DNA, 203 bp, Artificial sequence
  synthetic
ggcgcgccagtccttgtaaaaaaattgactagtatgaacagaggagagttcaaacagataacattggccactggggcaggaaaaactacggaactgccaagatccgtcatagaggagatagggaggcacaaaagggtcttagtcctgataccattgagagctgcagcagagtcagtgtatcagtatatcgactcggaccgatg

SEQ ID NO: 6026 - DNA, 203 bp, Artificial sequence
  synthetic
ggcgcgccagtcctgagagtgaagtacccaagtatatctttcaatttgagaataggagatatgaaggaaggtgacatggctactggtatcacttactcctcatatcggtactttttccagcttccccagcccaaactgaaaactgccatggtagagtattcatatatattcttagatgagtaccactgcgactcggaccgatg

SEQ ID NO: 6027 - DNA, 203 bp, Artificial sequence
  synthetic
ggcgcgccagtccttgctacacccgagcaattagcaataattggaaagatacacaggtttgctgaaaatcttagagtggtagcaatgacagcaaccccagctggaacggtcacaacgactggtcagaaacaccctatagaggagttcatagccccagaggtgatgaagggtgaagatctaggtagtgacgactcggaccgatg

SEQ ID NO: 6028 - DNA, 203 bp, Artificial sequence
  synthetic
ggcgcgccagtcctctcgcaatccccgtatgtggtagtaagcaccaatgccatagagtcaggtgtgacattgccagacttagacacagttgtagacactggactaaggtgtgaaaagagggtgaggatatcttcaaaaatgcccttcattgtaacaggacttaagagaatggcagtcacaataggagacgactcggaccgatg

SEQ ID NO: 6029 - DNA, 203 bp, Artificial sequence
  synthetic
ggcgcgccagtcctgagcctttatgaagaggacagcctgatgataactcaactcgaggtcctcaacaacctccttatatcagaagacctgcctgccgcagtgaagaacatcatggccgggaccgatcacccagaacccatacaactggcctataacagttatgaaaaccaaattccagtgctgttccccgactcggaccgatg

SEQ ID NO: 6030 - DNA, 203 bp, Artificial sequence
  synthetic
ggcgcgccagtcctaaagatcaaaaatggtgaggtgacagacagttacgagaattacacatacctcaatgcaagaaaactaggagaggacgtgccggcatatgtgtacgccacagaggatgaggatctagcagtggatcttctgggtatggattggccggacccaggcagccaacaggtggtggagaccgactcggaccgatg

SEQ ID NO: 6031 - DNA, 203 bp, Artificial sequence
  synthetic
ggcgcgccagtcctcccaaacgccataaggactgacggcaaggacacagagttgaaggaattagctgtgggagaccttgataaatatgtggatgcactggtagactactccaaacaagggatgaaatttatcaaagtccaagctgaaaaggtcaaagactcccagtctacaaaggaaggcttgcaaaccgactcggaccgatg

SEQ ID NO: 6032 - DNA, 203 bp, Artificial sequence
  synthetic
ggcgcgccagtccttctgcaacgcgtcgtcgaacctgccttagcatacctcccatatgctacaagttccttgaagtcgttcgcacccacaagattagagagtgtggtcatactcagttctacaatttacaagacatacctatccataaggaagggtaagagtgacggcttgctaggtacaggcataagcgactcggaccgatg

SEQ ID NO: 6033 - DNA, 203 bp, Artificial sequence
  synthetic
ggcgcgccagtcctgataggttttaaaggtgcatatttgggtgaccgaccagactatcaagatcttgtcgatagagattgtgcaactataacgaagaactcagtacagttcctaaaaatgaagaagggttgcgctttcacatatgacctaacaatctctaaccttgtcaggcttattgaactagtccacgactcggaccgatg

SEQ ID NO: 6034 - DNA, 203 bp, Artificial sequence
  synthetic
ggcgcgccagtcctagatgagaaagtagacaggccttttgttctaattattggaaacaaaggttctacctcaaatagagcaagaacggccaagaatatacggctttataaaggaaataacccaagagagatcagggatctgatgagccaaggaagaatattgacggttgctctaaaagagttggaccccgactcggaccgatg

SEQ ID NO: 6035 - DNA, 203 bp, Artificial sequence
  synthetic
ggcgcgccagtcctacagatgagtctagcccccctctttgaagagctgttattaaagtgccctccatgtagtaaaatttcaaagggacatatggtgtcagactaccaactggctcaaggaaactgggaacccttcgggtgtggggtctatatgggaaccataccagctaggcgtctcaagatccaccccgactcggaccgatg

SEQ ID NO: 6036 - DNA, 203 bp, Artificial sequence
  synthetic
ggcgcgccagtcctcagagatggacacaaaagaaacatatataataagatcataggctcaacaatggcctctgctggtattaggctggagaaactgccagtagtccgagcccaaaccgacacaaccagtttccaccaggctataagagaaaaaattgataaaccagaaaacaagcagacccctggattcgactcggaccgatg

SEQ ID NO: 6037 - DNA, 203 bp, Artificial sequence
  synthetic
ggcgcgccagtcctagtgatgtacaagtgggtaaagcaaaaaccagtggtgatacccggctatgaaggtaaaacaccgcattttgacatattcaacaaagtgaagaaggaatgggattcattccaggaccccgtggcagtgagctttgacaccaaagcatgggatacacaagtcaccagtagagacctcgactcggaccgatg

SEQ ID NO: 6038 - DNA, 203 bp, Artificial sequence
  synthetic
ggcgcgccagtcctgaagccccagaaaataactgaaggggacaaaatgaaagtggcatatagatttgaggacatcgagttttgttcccatactcccgtgccagtaagatgggcagataacaccagtagttacatggcagggaggagcacagccactatactagctaagatggcaaccaggttggattccgactcggaccgatg

SEQ ID NO: 6039 - DNA, 203 bp, Artificial sequence
  synthetic
ggcgcgccagtcctttccccggtgatgtcgtatagactgcttgcgtggttgaaagcgacggatccgttatccgcttatgtacttcgagaagcccagtaccacctcggaatcttcgatgcgttgcgctcagcactcaaccccagagtgtagcttaggctgatgagtctggacatccctcaccggtgacgcgactcggaccgatg

SEQ ID NO: 6040 - DNA, 203 bp, Artificial sequence
  synthetic
ggcgcgccagtcctgtggtccaggctgcgttggcggcctacctatggctaacgccatgggacgctagttgtgaacaaggtgtgaagagcctattgagctacataagaatcctccggcccctgaatgcggctaatcccaacctcggagcaggtggtcacaaaccagtgattggcctgtcgtaacgcgcacgactcggaccgatg

SEQ ID NO: 6041 - DNA, 203 bp, Artificial sequence
  synthetic
ggcgcgccagtcctactctttgggcaaaatatgtactaccactacctaggtaggtccgggtacaccgtgcatgtacagtgtaacgcctccaaattccaccagggggcactaggggtattcgccgtaccagagatgtgtctggccggggatagcaacaccactaccatgcacaccagctatcaaaatgccgactcggaccgatg

SEQ ID NO: 6042 - DNA, 203 bp, Artificial sequence
  synthetic
ggcgcgccagtcctggtagtgccatggattagcaacaccacgtatcggcaaaccatagatgatagtttcaccgaaggcggatacatcagcgtcttctaccaaactagaatagtcgtccctctttcgacacccagagagatggacatccttggttttgtgtcagcgtgtaatgacttcagcgtgcgcttcgactcggaccgatg

SEQ ID NO: 6043 - DNA, 203 bp, Artificial sequence
  synthetic
ggcgcgccagtcctgttgcgagataccacacatatagagcaaaaagcgctagcacaggggttaggtcagatgcttgaaagcatgattgacaacacagtccgtgaaacggtgggggcggcaacatctagagacgctctcccaaacactgaagccagtggaccaacacactccaaggaaattccggcactcgactcggaccgatg

SEQ ID NO: 6044 - DNA, 203 bp, Artificial sequence
  synthetic
ggcgcgccagtcctcaccgcagtggaaactggggccacaaatccactagtcccttctgatacagtgcaaaccagacatgttgtacaacataggtcaaggtcagagtctagcatagagtctttcttcgcgcggggtgcatgcgtgaccattatgaccgtggataacccagcttccaccacgaataaggacgactcggaccgatg

SEQ ID NO: 6045 - DNA, 203 bp, Artificial sequence
  synthetic
ggcgcgccagtccttaagctatttgcagtgtggaagatcacttataaagatactgtccagttacggaggaaattggagttcttcacctattctagatttgatatggaacttacctttgtggttactgcaaatttcactgagactaacaatgggcatgccttaaatcaagtgtaccaaattatgtacgtcgactcggaccgatg

SEQ ID NO: 6046 - DNA, 203 bp, Artificial sequence
  synthetic
ggcgcgccagtcctggaccagtcggcagcactaggtgactccctttatggtgcagcatctctaaatgacttcggtattttggctgttagagtagtcaatgatcacaacccgaccaaggtcacctccaaaatcagagtgtatctaaaacccaaacacatcagagtctggtgcccgcgtccaccgagggccgactcggaccgatg

SEQ ID NO: 6047 - DNA, 203 bp, Artificial sequence
  synthetic
ggcgcgccagtcctagtggcgtactacggccctggagtggattacaaggatggtacgcttacacccctctccaccaaggatctgaccacatatggattcggacaccaaaacaaagcggtgtacactgcaggttacaaaatttgcaactaccacttggccactcaggatgatttgcaaaacgcagtgaacgactcggaccgatg

SEQ ID NO: 6048 - DNA, 203 bp, Artificial sequence
  synthetic
ggcgcgccagtcctcgtcatgtggagtagagacctcttagtcacagaatcaagagcccagggcaccgattcaatcgcaaggtgcaattgcaacgcaggggtgtactactgcgagtctagaaggaaatactacccagtatccttcgttggcccaacgttccagtacatggaggctaataactattaccccgactcggaccgatg

SEQ ID NO: 6049 - DNA, 203 bp, Artificial sequence
  synthetic
ggcgcgccagtcctctatgaagacaccacaacagtgctcgctaccctggcccttcttgggtgtgatgcttcaccatggcagtggcttagaaagaaagcatgcgatgttctggagataccttatgtcatcaagcaaggtgacagttggttgaagaagtttactgaagcatgcaacgcagctaagggactcgactcggaccgatg

SEQ ID NO: 6050 - DNA, 203 bp, Artificial sequence
  synthetic
ggcgcgccagtcctgatggtatcaacagtggagtttataccacccatggcatccctggaggagaaaggaatcctgtttacttcaaattacgttctagcatccacaaactcaagcagaatttccccccccactgtggcacacagtgatgcattagccaggcgctttgcgttcgacatggacattcaggtcgactcggaccgatg

SEQ ID NO: 6051 - DNA, 203 bp, Artificial sequence
  synthetic
ggcgcgccagtcctcaaaaaacccaacgtgcccaccattcggacagcaaaggtacaaggaccagggttcgattacgcagtggctatggctaaaagaaacattgttacagcaactactagcaagggagagttcactatgttaggagtccacgacaacgtggctattttaccaacccacgcttcacctggcgactcggaccgatg

SEQ ID NO: 6052 - DNA, 203 bp, Artificial sequence
  synthetic
ggcgcgccagtcctcctcccactggtgacttatgtaaaggatgaacttagatccaaaacaaaggttgagcaggggaaatccagattaattgaagcttctagtttgaatgactcagtggcaatgagaatggcttttgggaacctatatgctgcttttcacaaaaacccaggagtgataacaggttcagccgactcggaccgatg

SEQ ID NO: 6053 - DNA, 203 bp, Artificial sequence
  synthetic
ggcgcgccagtcctcagggtaggtgcattgataacattattctctcttccctcagcaggcatgcaaaatcatattagattggcagatagatcacctgaagctcagatagaacgctgtgagattgacggttttgagccaggcacatataggctaattccgaatgcacgcgccaatcttactgccaatgacgactcggaccgatg

SEQ ID NO: 6054 - DNA, 203 bp, Artificial sequence
  synthetic
ggcgcgccagtcctaattgctgcctatgctttgcttgcagatgacctccctccaaccataaataatggaactccctatgtacatgcagatgttgaaggacagccatgtgatgagattgagcaattcctagatcgatgctacagtgtactaatccaggcttgggtgatggtctgtaaatgtatgacagccgactcggaccgatg

SEQ ID NO: 6055 - DNA, 203 bp, Artificial sequence
  synthetic
ggcgcgccagtccttggttattatttccagattggggttgagactgcacgacggcaacaaggcactgttgacaacagagtagcagatgatctaggcctgactcctgagcaaaggactgaggttactcagcttattgacaggcttgcaaggggcagaggtgcggggataccaggtgggcccgtgaatcccgactcggaccgatg

SEQ ID NO: 6056 - DNA, 203 bp, Artificial sequence
  synthetic
ggcgcgccagtcctcccgtcctgcaaagcagccaaaaccccaaccagtaaaggatttagcaggacggaaagtgatgataactaaaatgatcactgactgtgtggccaatcctcaaatgaagcaggtgtttgagcaacgattggcaaaggccagcaccgaggatgctctgaatgatatcaagcgagacacgactcggaccgatg

SEQ ID NO: 6057 - DNA, 203 bp, Artificial sequence
  synthetic
ggcgcgccagtccttcatctctgaatcatcacaacagaaggtgactcctgtagtgacggcgtgcatgctgtccttcggtgctggaccagtcctagaagacccacaacatatgctgaaagctcttgatcagacagacatcagggttcggaagacagcgagtgataaagagcagatcttattcgagatcacgactcggaccgatg

SEQ ID NO: 6058 - DNA, 203 bp, Artificial sequence
  synthetic
ggcgcgccagtcctaagcttttaccgaatatccaacccactgataacagctgtgaatttaagagtgtaactcaatacaataagaccttgagtaatttgcttcttccaattgcagaaaacataaacaatattgcatcgccctcatctgggtcaagacggcataaaaggtttgctggcattgctattggccgactcggaccgatg

SEQ ID NO: 6059 - DNA, 203 bp, Artificial sequence
  synthetic
ggcgcgccagtcctattgctgcgctcggtgttgcgaccgcagcacaagtaactgccgctgtctcattagttcaagcacagacgaatgcacgtgcaatagcggcgatgaaaaattcaatacaagcaactaatcgagcagtcttcgaagtgaaggaaggcactcaacggttagctatagcggtacaagcacgactcggaccgatg

SEQ ID NO: 6060 - DNA, 203 bp, Artificial sequence
  synthetic
ggcgcgccagtcctcatgcagtcacgaccattgatctaaccgcatgtcaaacattgtccctagacggattggatttcagcattgtctctctaagcaacatcacttatgctgagaaccttaccatttcattgtctcagacaatcaatactcaacccattgacatatcaactgaactgagtaaggttaatcgactcggaccgatg

SEQ ID NO: 6061 - DNA, 203 bp, Artificial sequence
  synthetic
ggcgcgccagtcctgatggagccctccaaactcttcacaatgtcagacaatgccacctttgcacctgggcctgttatcaatgcggctgacaagaagacattccgaacctgcttccgaatattggtactgtctgtacaagctgttacccttatattagttattgtcactttaggtgagcttgtgaggatcgactcggaccgatg

SEQ ID NO: 6062 - DNA, 203 bp, Artificial sequence
  synthetic
ggcgcgccagtcctgatcaatgatcaaggcttgagcaatcagttgtcttcaattgcagacaagataagagagtcagctactatgattgcatctgctgtgggagtaatgaatcaagttattcacggagtaacggtatccttacccctacaaattgagggaaaccaaaatcaattgttatccacgcttgccgactcggaccgatg

SEQ ID NO: 6063 - DNA, 203 bp, Artificial sequence
  synthetic
ggcgcgccagtcctagtaaccattgtggatactaggtccactctatgcattattgccccagaattagttgctttatactccaatgagcacaaagcattaacgtacctcacctttgaaatggtattaatggtcactgatatgttagagggacgactcaatgtttcttctttgtgcacagctagtcattacgactcggaccgatg

SEQ ID NO: 6064 - DNA, 203 bp, Artificial sequence
  synthetic
ggcgcgccagtccttctgtcccctctaaagaagagaatcgaaattctcctaacattagttgatgaccttgctctacttatgggggacaaagtatacggtgttgtctcttcacttgagagttttgtttacgcccaattacagtatggtgatcctgttgtagacattaagggtacattctatggatttatcgactcggaccgatg

SEQ ID NO: 6065 - DNA, 203 bp, Artificial sequence
  synthetic
ggcgcgccagtcctagcatccaaggtccgagagtccatgtgtgctcctaaggtgttagatttccaaacaataatgaagaccctggctttctttcatgcaatcctgattaacggttataggaggagccataatggaatctggcctcctactactcttcatggcaatgcccccaaaagcctcattgagatcgactcggaccgatg

SEQ ID NO: 6066 - DNA, 203 bp, Artificial sequence
  synthetic
ggcgcgccagtcctgagcctgataaaacagcgatatcgtgatgcgaatcggcctctaccacaaccattcaaccgacggctactgttgaattttctagaggatgacagattcgatcccattaaggagcttgagtatgtcaccagtggagaatatcttagggaccctgaattttgtgcatcttactctctcgactcggaccgatg

SEQ ID NO: 6067 - DNA, 203 bp, Artificial sequence
  synthetic
ggcgcgccagtccttgacctcacaaaatactgcttaaattggaggtaccaagtcatcatcccctttgcgcgtacattgaattcaatgtatggtataccccacctgttcgaatggatacatttaaggctaatgcgaagcactctctatgttggtgatcccttcaatcctccatcagatcctacccaactcgactcggaccgatg

SEQ ID NO: 6068 - DNA, 203 bp, Artificial sequence
  synthetic
ggcgcgccagtccttgaccttgatacagctctcaatgatgatatatttatagtttctcctcgtggaggaatcgagggtttatgtcaaaaattatggactatgatttccatctcaacaatcatattatccgcgactgaggcaaacactagagttatgagtatggttcagggtgacaaccaagcaattgccgactcggaccgatg

SEQ ID NO: 6069 - DNA, 203 bp, Artificial sequence
  synthetic
ggcgcgccagtcctgttttacaaaggtcgaattttgactcaagcgttaaagaacgtgagcaagatgtgcttaacagctgacatactaggggactgttcacaagcatcatgctccaatttagctactactgtaatgcgcctgactgagaatggggtcgagaaagatttgtgttattttctaaatgcattcgactcggaccgatg

SEQ ID NO: 6070 - DNA, 203 bp, Artificial sequence
  synthetic
ggcgcgccagtcctattaaaatttacccctgcaagctcctatgcattctctagctttgttcatatatctaatgactgtcaagttcttgagatcgatgatcaggtaacagattctaacctgatttaccagcaagttatgattactggccttgctttaattgagacatggaacaatcctccaatcaacttcgactcggaccgatg

SEQ ID NO: 6071 - DNA, 203 bp, Artificial sequence
  synthetic
ggcgcgccagtcctcatctcatccacaattagtcaccctcgtatactcagaagatgcatcaatctggatgtcatagcccctatcaattctccacacatagcttcactggattacacaaaattgagcatagatgcagtaatgtggggaactaagcaggttttgaccaacatttcgcaaggtatcgattacgactcggaccgatg

SEQ ID NO: 6072 - DNA, 203 bp, Artificial sequence
  synthetic
ggcgcgccagtccttgagatagttgttccttctgaaagccaactcacactcagtgatagagttctaaatctagttgcacgaaaactatcactactggcaatcatctgggccaattataactaccctccaaaggttaaaggtatgtcacctgaggacaaatgtcaggctttaactacccatctactccacgactcggaccgatg

SEQ ID NO: 6073 - DNA, 203 bp, Artificial sequence
  synthetic
ggcgcgccagtcctctttggatatctggaaccaatactaatggaatctaaaatattcaatctaagttcatccgaatcagcatcccttacagaatttgatttcatcctcaacttggaattgtctgaagccagccttgagaaatactctctcccaagtttgcttatgacggctgagaatatggataaccccgactcggaccgatg

SEQ ID NO: 6074 - DNA, 203 bp, Artificial sequence
  synthetic
ggcgcgccagtccttaacagcgatatcactgacttaagcacgaaaactagtgtcgagtacattattcacaaggtaggggctgatacatgtgcgttggttcatgtggatctggagggtgtacccggctcaatgaacagtatgttggagagagcccaagttcatgcgctactgatcacggtaactgtactcgactcggaccgatg

SEQ ID NO: 6075 - DNA, 203 bp, Artificial sequence
  synthetic
ggcgcgccagtcctgcttacccctgatgttgaagattctgagcgcattgatattgacaatgatatacctgattatgatatccacggggacataatttaaatcgactaaagactcctctggcatgataagtcaccaaaaggttccacaccagcatccaaattcttctagaccgtacacgacctcgaatacgactcggaccgatg

SEQ ID NO: 6076 - DNA, 203 bp, Artificial sequence
  synthetic
ggcgcgccagtcctggacataatttaaatcgactaaagactcctctggcatgataagtcaccaaaaggttccacaccagcatccaaattcttctagaccgtacacgacctcgaataatcataaccacatcagtattaaatccataatatcattttaagaaaaaattgattttactttctccccttggtcgactcggaccgatg

SEQ ID NO: 6077 - DNA, 203 bp, Artificial sequence
  synthetic
ggcgcgccagtccttcaactgacagcaaccccatagtctggtgctcatgacagtgtgagagttcaatactcacctctccactgtcgtgaggacccttatgttaaccacaaaccttatatttttaggagccgggaggatagctcaacctgttaagaactcagaaggttatgtatattcttccttgctcccgactcggaccgatg

SEQ ID NO: 6078 - DNA, 203 bp, Artificial sequence
  synthetic
ggcgcgccagtcctggattatacaagctggttttataatccgagaagtctatgaagtactggggcttgatcctcttggtcgacccctgaacttcccagggggtttaacacaaagagacaccgctgttcctgttacaagaggaagaggacgaggacgaacaggcccccgacgaggaccagttctgcccgcgactcggaccgatg

SEQ ID NO: 6079 - DNA, 203 bp, Artificial sequence
  synthetic
ggcgcgccagtcctatgggccaacctatatgggtatattctcccatacactctatgaccagaatacagaaaacacccttaacagaaaggaaggcattatcaattcggtggttaaaatggcaaacttattttgaagatcctagattaatatttcattatgatgatacattaccagatttacaaaatcttcgactcggaccgatg

SEQ ID NO: 6080 - DNA, 203 bp, Artificial sequence
  synthetic
ggcgcgccagtcctaataagaaaaagccactgaaacatgtgagtaaatggaaatcaatagctgactgtaaaaaacataaggccgatatccacgtgatacatgagccaggccatcaaaatgatttgcaatcaccttatgccatgggcaacaatgctgctgataaattggcagtcaaggccagttacactcgactcggaccgatg

SEQ ID NO: 6081 - DNA, 203 bp, Artificial sequence
  synthetic
ggcgcgccagtcctaaggctctcaatcatctcactggtactgctattcctaaggtgctgcattctgatcaaggatcagcattcacctctgcaactttggtcgcctgggccaaagacaagggtatacaaatggaatacagttctccttatcatccccaaagtagtggtaaagttgaaaggaaaaacagtcgactcggaccgatg

SEQ ID NO: 6082 - DNA, 203 bp, Artificial sequence
  synthetic
ggcgcgccagtcctgagataaaacgactcttgacaaaactattggttggacggcctacaaagtggtacccacttatacctactgttcaattggcattgaataatactccaaatgcaaaaataggcaaaacgccacatcaattgatgtatggagtggattgtaatcttcccttccaggatctaagtacacgactcggaccgatg

SEQ ID NO: 6083 - DNA, 203 bp, Artificial sequence
  synthetic
ggcgcgccagtcctacctgatgtgcagatagatttgcctgtttataatcctgacatgactaagccattgcctctttgtttgcggattaagtattggatgtatttgttatgtgctacctcaccgcgtgtaatggcttggttactgtttgtttgtgttttgatatctgttatgatcatagctgttatagtcgactcggaccgatg

SEQ ID NO: 6084 - DNA, 203 bp, Artificial sequence
  synthetic
ggcgcgccagtcctccaaggggtctttttggaaccctttcctaaacctattattgacaaggagagggttttgggtatttcacaaattgttatgattgattctggttcaatagcccaatctatgaatttggatttgtatatgaaacatttgttggtggatatgattaatgaagagatggttgcattaagcgactcggaccgatg

SEQ ID NO: 6085 - DNA, 203 bp, Artificial sequence
  synthetic
ggcgcgccagtccttaatgtggtgcttccttttgaattaccagtaggggatccctcaactcaagaccaatatatacataagagatgttatcagcagtttgcacactgctatatagtatggcaacctggtaggcgtgtctggcctacttcagagattatacaagaccaatgtccattaccagatcatcccgactcggaccgatg

SEQ ID NO: 6086 - DNA, 203 bp, Artificial sequence
  synthetic
ggcgcgccagtcctatatggaaactggtggtatcttaatagaacctctgaacaaaaggaagaaacatataggaagaagatgctaaatttgacagaaaataactcttccattctaaaagatagagctttgccaccaacatggacccctaaaggacaagccaggctgtttagagaattaaacccattagacgactcggaccgatg

SEQ ID NO: 6087 - DNA, 203 bp, Artificial sequence
  synthetic
ggcgcgccagtcctatataaggtacaatctttatatcaagaatgtattcaaaaggggacctcatatgatttggaagatgtaattaatcaactcttaagggtcttacagaacaatggaatagatttgggtaaagtaccagcctcacgagcatttactcctttctataaccaaatgcctgtctcttataacgactcggaccgatg

SEQ ID NO: 6088 - DNA, 203 bp, Artificial sequence
  synthetic
ggcgcgccagtccttgctggtcatcttgctagggtagaattacaacatccttatgaaatagttaaccaagactgtgagcaactgacttatctagaactcaagggatgtcaagaattggattatctggtatgcgaagaaatccttcaacatgaaccatgtggaaatcagacaggatctgactgtccagtcgactcggaccgatg

SEQ ID NO: 6089 - DNA, 203 bp, Artificial sequence
  synthetic
ggcgcgccagtcctgggttgcctaacatggactggacagttgaatgggatggggagatttcagattcagctcttcaggaatttgactttgatctcagtctgtttgggcagtgatcaccacaaaggtattacagattattgttgtggacctgcttcatgctatactattgtgtgggaaattagtgcagacgactcggaccgatg

SEQ ID NO: 6090 - DNA, 203 bp, Artificial sequence
  synthetic
ggcgcgccagtcctagtattggcaacaggaactccttatcttttcagagctcagcctcatcataggccactacaaacccctgctccttggtccaaaaggcttattaggaccagatatatcagaaattctgtagaagatcaatttgtacattttgccactgaagcaaattacactcccctttcagcccacgactcggaccgatg

SEQ ID NO: 6091 - DNA, 203 bp, Artificial sequence
  synthetic
ggcgcgccagtcctctcatgacagtgtgagagttcaatactcacctctccactgtcgtgaggacccttatgttaaccacaaaccttatatttttaggagccgggaggatagctcaacctgttaagaactcagaaggttatgtatattcttccttgctcccggtggttcgatccctgtttagcctgatacgactcggaccgatg

SEQ ID NO: 6092 - DNA, 203 bp, Artificial sequence
  synthetic
ggcgcgccagtcctcgatagccgctaacctgggacgaactccccttttagtttcggttttaagatgcttccgcatacgcatatagatagaagtaggaagtagttaatcccagtctgagggatggctcgtccaacaaaccacacatcgaggaatgtaatacctgtcctctctcagatcagtggagggaccgactcggaccgatg

SEQ ID NO: 6093 - DNA, 203 bp, Artificial sequence
  synthetic
ggcgcgccagtcctccatggaggcactaatggtcacaacagtggacaaattgactcaggggagacagacctttgattggacggtgtgtagaaaccaacctgctgcaacggcactgaacacaacaataacctcttttaggttgaatgatttaaatggagccgacaagggtggattagtgcccttttgcccgactcggaccgatg

SEQ ID NO: 6094 - DNA, 203 bp, Artificial sequence
  synthetic
ggcgcgccagtcctgaacggcatctctttcgccaggaatgatgatgggaatgtttaatatgctatctacagtattaggagtagccgcactagggataaaaaacattggaaacaaagaatacttatgggatggactgcagtcttcggatgattttgctctgtttgttaatgcaaaagatgaagagacatcgactcggaccgatg

SEQ ID NO: 6095 - DNA, 203 bp, Artificial sequence
  synthetic
ggcgcgccagtccttacgaaagcttttttctcagaaagatgagacttgacaatgccacttggggccgaataacctttggccctgttgagagagtaagaaaaagagtactactaaacccgctcaccaaggaaatgcccccagatgaagcgagcaatgtaataatggaaatattattccctaaagaagcacgactcggaccgatg

SEQ ID NO: 6096 - DNA, 203 bp, Artificial sequence
  synthetic
ggcgcgccagtccttttgaaagcataatccctcagaagatggctggtcagtacagtggatttgcaagagcagtgctcaaacaaatgagagaccaagaggttatgaaaactgaccaattcataaaattgttgcctttctgtttttcgccaccaaaattaaggagcaatggagagccttatcaatttttgcgactcggaccgatg

SEQ ID NO: 6097 - DNA, 203 bp, Artificial sequence
  synthetic
ggcgcgccagtcctggctttcttgttagtggcaaatatgaccctgatcttggagatttcaaaaccattgaggaacttgaaagactaaaaccgggagaaaaagccaacatcttactttaccaaggaaagcccgttaaagtagttaaaaggaaaagatatagtgctttatccaatgatatttcacaagggcgactcggaccgatg

SEQ ID NO: 6098 - DNA, 203 bp, Artificial sequence
  synthetic
ggcgcgccagtcctctggccaatatgactgaaggaaagtccaagaaaccgaagaccttagctaaggaatgtctagaaaggtattcaacactacgtgatcaaactgacccaatattgataatgaaaagcgaaaaagctaacgaaaacttcttatggaggttatggagggactgtgtaaatacaataagccgactcggaccgatg

SEQ ID NO: 6099 - DNA, 203 bp, Artificial sequence
  synthetic
ggcgcgccagtcctttattaaatgaaagcaatgctagtatgggaaaatataaagtaataccaatcaccaacagagtggtaaatgaaaaaggggaaagctttgacatgctttatggtctggcggttaaggggcaatctcatttgcggggggacacggatgttgtaacagttgtgactttcgagtttagtcgactcggaccgatg

SEQ ID NO: 6100 - DNA, 203 bp, Artificial sequence
  synthetic
ggcgcgccagtccttcaaatcctcaaaagttcacctcatctgccaatggagtaaccacacattatgtttctcagattggtggcttcccaaatcaaacagaagacgaagggctaaaacaaagcggcagaattgttgttgattacatggtacaaaaacctggaaaaacaggaacaattgtttatcaaagacgactcggaccgatg

SEQ ID NO: 6101 - DNA, 203 bp, Artificial sequence
  synthetic
ggcgcgccagtcctggactgaaaagggttggacttgacccttcattaatcagtacttttgccggaagcacactacccagaagatcaggtacaactggtgttgcaatcaaaggaggtggaactttagtggatgaagccatccgatttataggaagagcaatggcagacagagggctactgagagacatccgactcggaccgatg

SEQ ID NO: 6102 - DNA, 203 bp, Artificial sequence
  synthetic
ggcgcgccagtcctcatcaacaaaaacaactgcaccaacaatgtcattagagtgcacaaacgcatcaaatgcccagactgtgaaccattctgcaacaaaagagatgacatttccacccccagagccggagtggacataccctcgtttatcttgccagggctcaacctttcagaaggcactcctaattacgactcggaccgatg

SEQ ID NO: 6103 - DNA, 203 bp, Artificial sequence
  synthetic
ggcgcgccagtcctgccctcataggttcggagagatcaaaggaaactcagctcccttgataataagagaaccttttgttgcttgtggaccaaaagaatgcagacactttgctctgacccattatgcagctcagccggggggatactacaatggaacaagaaaggacagaaacaagctgaggcatctagcgactcggaccgatg

SEQ ID NO: 6104 - DNA, 203 bp, Artificial sequence
  synthetic
ggcgcgccagtcctacactgaagagtgcacatgcgggttcgccagcaataaaaccatagaatgtgcctgtagagacaacagttacacagcaaaaagaccctttgtcaaattaaatgtggaaactgatacagctgaaataagattgatgtgcacaaagacttatctagacactcccagaccggatgatgcgactcggaccgatg

SEQ ID NO: 6105 - DNA, 203 bp, Artificial sequence
  synthetic
ggcgcgccagtcctgaagcatagcagggccttgcgaatctaatggagacaagtggcttggaggcatcaaaggaggattcgtccatcaaagaatggcatctaagattggaagatggtactcccgaacgatgtctaaaactaacagaatggggatggaactgtatgtaaagtatgatggtgacccatggacgactcggaccgatg

SEQ ID NO: 6106 - DNA, 203 bp, Artificial sequence
  synthetic
ggcgcgccagtccttgcctaactgatatacaaaaagcactaattggtgcctctatatgctttttaaaacccaaagaccaagaaagaaaaaggagattcatcacagagcccctgtcaggaatgggaacaacagcaacaaagaagaaaggcctaattctagctgagagaaaaatgagaagatgtgtaagccgactcggaccgatg

SEQ ID NO: 6107 - DNA, 203 bp, Artificial sequence
  synthetic
ggcgcgccagtcctgggtaaacttgaaaatacaaataaggaatccaaataaggaggcaataaacagagaggtgtcaattctgagacacaattaccaaaaggaaatccaagccaaagaaacaatgaagaaaatactctctgacaacatggaagtattgggtgaccacatagtagttgaagggctttcaacgactcggaccgatg

SEQ ID NO: 6108 - DNA, 203 bp, Artificial sequence
  synthetic
ggcgcgccagtcctcaagaccgcctacacagactaaaacgaaaattagaatcaagaataaagactcacaacaagagtgagcctgagaataaaaggatgtctcttgaagagagaaaagcaattggggtaaaaatgatgaaagtgcttctgtttatggatccctctgctggaattgaagggtttgagccacgactcggaccgatg

SEQ ID NO: 6109 - DNA, 203 bp, Artificial sequence
  synthetic
ggcgcgccagtcctcccgtcaaaataacaacttataacacgatgttacccgaagaaaccattttagtgtaacatttaagattagaagtagttcatctaatagagataggcactattagaaggaggccttttctaaaggagccgttagtcagcccagacaagcgcagtactttagaagagagaagttcccgactcggaccgatg

SEQ ID NO: 6110 - DNA, 203 bp, Artificial sequence
  synthetic
ggcgcgccagtccttacctacaaaaaactgggaattgaagcaatgattaaaagacttggagatttgggaagagcagccaaaggctgttcagatttgaatgtggtgctcaaccaggctataaccaaccacatgttagaacattttgggaagaatgttcttggtttaaaacaagaagatgaactcaaagtcgactcggaccgatg

SEQ ID NO: 6111 - DNA, 203 bp, Artificial sequence
  synthetic
ggcgcgccagtccttaaccctaaccctgaatttatggagttaatacgtacagctaacatagctccataccccttacacatggctcacctcgaagataaaaggaaaacaaaattcacatcaaaagtaatcattatgacatctaatgtttttgaacaggatgttaattcactaacatttccagatgcattcgactcggaccgatg

SEQ ID NO: 6112 - DNA, 203 bp, Artificial sequence
  synthetic
ggcgcgccagtcctgatgaccgttagtttaatactgggcactctcattggaatacttactgttgtagggttttggaaatggttatgtagtggcgataaaaagaagaatccgataaaaagacattttattaatacaggcaatgttctaatcttacccgatagagaattaaacaccttttggaaaaatcacgactcggaccgatg

SEQ ID NO: 6113 - DNA, 203 bp, Artificial sequence
  synthetic
ggcgcgccagtcctaattaagacaaaacccgccatcctaagaaatgtgatagtggatggaaaaattgttaatataaaacataaaaacttgaagaaatgcgccatggacacaccctatgtgtcaaaagaaatgactgaagaagcttttcagttagttaaatcagtctggttaaagggaatgcgtaatgacgactcggaccgatg

SEQ ID NO: 6114 - DNA, 203 bp, Artificial sequence
  synthetic
ggcgcgccagtcctgtactatttgggcttcatagcacaccttatggaaaatcgaataaccaatgaagtatccataggaactaatgtttattcccaagattggaataagacagttagaaaacttaaaactatgggacccaaggttattgcaggagatttctcaacctttgatggatctttgaatgtttgcgactcggaccgatg

SEQ ID NO: 6115 - DNA, 203 bp, Artificial sequence
  synthetic
ggcgcgccagtccttttggatatcagtacatataatggttatgctcaggagagattcctaaattactacttgtaatttgggaatcgcaacacaacatggttacccatagattgaggaaatttccaataaactcagtattaaggcttgttgtgttggacaaggtgccctatttagggtgaggagccttacgactcggaccgatg

SEQ ID NO: 6116 - DNA, 203 bp, Artificial sequence
  synthetic
ggcgcgccagtcctctggcagccccagtgaatcctccattggataggaacagctatattgggtagttgtagcagttgtattcaaatgaatgcagcgttccgaaatatcatacctgccgatcaagaaacaaatacttccaacgtacataatacgcaactcgcgtcgacctctgaagaaaactcagttgacgactcggaccgatg

SEQ ID NO: 6117 - DNA, 203 bp, Artificial sequence
  synthetic
ggcgcgccagtccttgataacaaacccctcaatagatatgtgttaaatcgacagaatccacaaccatttgttaaatcttggacattgccttcagtagttttaagtgctggaggtaagggacaaaaattagctaattttaaatatttacgatgtgatgttaaagtcaaaattgttctaaacgcaaatcccgactcggaccgatg

SEQ ID NO: 6118 - DNA, 203 bp, Artificial sequence
  synthetic
ggcgcgccagtcctagcatatgatttagtcacaggtactgaagattttgtcaagctatatctatttacaataacgcccatattatccccgactagcacatctgctagttcaaaggtggacctttcagtttatatgtggttggataatatttccttagtcatacccacgtatcgcgttaacacgagcatcgactcggaccgatg

SEQ ID NO: 6119 - DNA, 203 bp, Artificial sequence
  synthetic
ggcgcgccagtcctcgtaccaaatgtggggactgttgttcagacagtacaaaatatgactacacgagacagtgaaacaattaggaaagcaatggttgcattaaggaaaaataataaatcaacttacgactatatagtgcaagctttatcttctgcagttccagaagttaagaatgtaactatgcagatcgactcggaccgatg

SEQ ID NO: 6120 - DNA, 203 bp, Artificial sequence
  synthetic
ggcgcgccagtccttgctgccatgccggaagaggagacaactgaagctaatgccggtcagtttctctcctttgcaagtctattccttccgaaattggtagtaggagaaaaggcttgccttgagaaggttcaaaggcaaattcaagtacatgcagagcaaggactgatacaatatccaacagcttggcacgactcggaccgatg

SEQ ID NO: 6121 - DNA, 203 bp, Artificial sequence
  synthetic
ggcgcgccagtcctacttgatcatatcctacaaaagacagaacgaggagttcgtctccatcctcttgcaaggaccgccaaggtaaaaaatgaggtgaactcctttaaggctgcactcagctccctggccaagcatggagagtatgctcctttcgcccgacttttgaacctttctggagtaaataatctcgactcggaccgatg

SEQ ID NO: 6122 - DNA, 203 bp, Artificial sequence
  synthetic
ggcgcgccagtccttggacttgatgatcaggaaaagaaaattcttatgaacttccatcagaaaaagaacgaaatcagcttccagcaaacaaacgctatggtaactctaagaaaagagcgcctggccaagctgacagaagctatcactgctgcgtcactgcccaaaacaagtggacattacgatgatgacgactcggaccgatg

SEQ ID NO: 6123 - DNA, 203 bp, Artificial sequence
  synthetic
ggcgcgccagtccttgacgacattccctttccaggacccatcaatgatgacgacaatcctggccatcaagatgatgatccgactgactcacaggatacgaccattcccgatgtggtggttgatcccgatgatggaagctacggcgaataccagagttactcggaaaacggcatgaatgcaccagatgacgactcggaccgatg

SEQ ID NO: 6124 - DNA, 203 bp, Artificial sequence
  synthetic
ggcgcgccagtcctcaaccgcacacccactgtcgccccaccggctcccgtatacagagatcactctgaaaagaaagaactcccgcaagacgagcaacaagatcaggaccacactcaagaggccaggaaccaggacagtgacaacacccagtcagaacactcttttgaggagatgtatcgccacattctcgactcggaccgatg

SEQ ID NO: 6125 - DNA, 203 bp, Artificial sequence
  synthetic
ggcgcgccagtcctcaactagaacaaagggcaggggccatactgcggccacgactcaaaacgacagaatgccaggccctgagctttcgggctggatctctgagcagctaatgaccggaagaattcctgtaagcgacatcttctgtgatattgagaacaatccaggattatgctacgcatcccaaatgccgactcggaccgatg

SEQ ID NO: 6126 - DNA, 203 bp, Artificial sequence
  synthetic
ggcgcgccagtcctcacctgtcatccacatccgctctcgaggtgacattccccgagcttgccagaaaagcttgcgtccagtcccaccatcgcccaagattgatcgaggttgggtatgtgtttttcagcttcaagatggtaaaacacttggactcaaaatttgagccaatctcccttccctccgaaagacgactcggaccgatg

SEQ ID NO: 6127 - DNA, 203 bp, Artificial sequence
  synthetic
ggcgcgccagtcctggcgaataatagcagaggcttcaactgctgaactatagggtacgttacattaatgatacacttgtgagtatcagccctggataatataagtcaattaaacgaccaagataaaattgttcatatctcgctagcagcttaaaatataaatgtaataggagctatatctctgacagtcgactcggaccgatg

SEQ ID NO: 6128 - DNA, 203 bp, Artificial sequence
  synthetic
ggcgcgccagtccttccttgaagctatggtgaatgtcatatcgggccccaaagtgctaatgaagcaaattccaatttggcttcctctaggtgtcgctgatcaaaagacctacagctttgactcaactacggccgccatcatgcttgcttcatacactatcacccatttcggcaaggcaaccaatccaccgactcggaccgatg

SEQ ID NO: 6129 - DNA, 203 bp, Artificial sequence
  synthetic
ggcgcgccagtcctttgtcagagtcaatcggctgggtcctggaatcccggatcatcccctcaggctcctgcgaattggaaaccaggctttcctccaggagttcgttcttccgccagtccaactaccccagtatttcacctttgatttgacagcactcaaactgatcacccaaccactgcctgctgcaacgactcggaccgatg

SEQ ID NO: 6130 - DNA, 203 bp, Artificial sequence
  synthetic
ggcgcgccagtcctagatcgttccaattgatccaaccaaaaatatcatgggaatcgaagtgccagaaactctggtccacaagctgaccggtaagaaggtgacttctaaaaatggacaaccaatcatccctgttcttttgccaaagtacattgggttggacccggtggctccaggagacctcaccatggcgactcggaccgatg

SEQ ID NO: 6131 - DNA, 203 bp, Artificial sequence
  synthetic
ggcgcgccagtcctaacccttgccacaatctccacgagtccccaatccctcacaaccaaaccaggtccggacaacagcacccataatacacccgtgtataaacttgacatctctgaggcaactcaagttgaacaacatcaccgcagaacagacaacgacagcacagcctccgacactccctctgccaccgactcggaccgatg

SEQ ID NO: 6132 - DNA, 203 bp, Artificial sequence
  synthetic
ggcgcgccagtcctgggaatttacatagaggggctaatgcacaatcaagatggtttaatctgtgggttgagacagctggccaacgagacgactcaagctcttcaactgttcctgagagccacaactgagctacgcaccttttcaatcctcaaccgtaaggcaattgatttcttgctgcagcgatggggcgactcggaccgatg

SEQ ID NO: 6133 - DNA, 203 bp, Artificial sequence
  synthetic
ggcgcgccagtcctatcactgcattcttgaatattgctctccagttaccgtgtgaaagttctgctgtcgttgtttcagggttaagaacattggttcctcaatcagataatgaggaagcttcaaccaacccggggacatgctcatggtctgatgagggtaccccttaataaggctgactaaaacactatcgactcggaccgatg

SEQ ID NO: 6134 - DNA, 203 bp, Artificial sequence
  synthetic
ggcgcgccagtcctaccttattattcagattaggccccaagaggcattcttcatctccttttagcaaagtactatttcagggtagtccaattagtggcacgtcttttagctgtatatcagtcgcccctgagatacgccacaaaagtgtctctaagctaaattggtctgtacacatcccatacattgtacgactcggaccgatg

SEQ ID NO: 6135 - DNA, 203 bp, Artificial sequence
  synthetic
ggcgcgccagtcctagagcttgcgggttatattcatcatactcccttaatccgcaactacgcaactgtaaactcccgaaacatatctaccgtttgaaatacgatgtaactgttaccaagttcttgagtgatgtaccagtggcgacattgcccatagatttcatagtcccagttcttctcaaggcactgcgactcggaccgatg

SEQ ID NO: 6136 - DNA, 203 bp, Artificial sequence
  synthetic
ggcgcgccagtcctcatcaagcatcatggcaccacacaagtgatgattttggtgaacatgccacagttagagggagtagctttgtaactgatttagagaaatacaatcttgcatttagatatgagtttacagcaccttttatagaatattgcaaccgttgctatggtgttaagaatgtttttaattggcgactcggaccgatg

SEQ ID NO: 6137 - DNA, 203 bp, Artificial sequence
  synthetic
ggcgcgccagtcctcaaatttctttagttgaaattaagactggttttaagttacgctcagctgtgatgggtgacaatcagtgcattactgttttatcagtcttccccttagagactgacgcagacgagcaggaacagagcgccgaagacaatgcagcgagggtggccgccagcctagcaaaagttacacgactcggaccgatg

SEQ ID NO: 6138 - DNA, 203 bp, Artificial sequence
  synthetic
ggcgcgccagtcctagtataggcactgcttttgagcgatccatctctgagacacgacatatctttccttgcaggataaccgcagctttccatacgtttttttcggtgagaatcttgcaatatcatcatctcgggttcaataaaggttttgaccttggacagttaacactcggcaaacctctggatttccgactcggaccgatg

SEQ ID NO: 6139 - DNA, 203 bp, Artificial sequence
  synthetic
ggcgcgccagtcctggagccacactcccatgtatgattgagcaattcaaagtgttttggctgaaaccctacgaacaatgtccgcagtgttcaaatgcaaagcaaccaggtgggaaaccattcgtgtcagtggcagtcaagaaacatattgttagtgcatggccgaacgcatcccgaataagctggactcgactcggaccgatg

SEQ ID NO: 6140 - DNA, 203 bp, Artificial sequence
  synthetic
ggcgcgccagtcctgaagcacgagtaaatttaagtgttcaagaaatacttcaaatgaccccttcacattactcaggaaatattgttcacaggtacaacgatcaatacagtcctcattctttcatggccaatcgtatgagtaattcagcaacgcgattgattgtttctacaaacactttaggtgagtttcgactcggaccgatg

SEQ ID NO: 6141 - DNA, 203 bp, Artificial sequence
  synthetic
ggcgcgccagtcctttatctggatgggagctagccaagaccatcatgcaatcaattatttcagatagcaacaattcatctacagacccaattagcagtggagaaacaagatcattcactacccatttcttaacttatcccaagataggacttctgtacagttttggggcctttgtaagttattatcttcgactcggaccgatg

SEQ ID NO: 6142 - DNA, 203 bp, Artificial sequence
  synthetic
ggcgcgccagtcctaaccgaaaatacttggcaagagactcttcaactggatcaagcacaaacaacagtgatggtcatattgagagaagtcaagaacaaaccaccagagatccacatgatggcactgaacggaatctagtcctacaaatgagccatgaaataaaaagaacgacaattccacaagaaaaccgactcggaccgatg

SEQ ID NO: 6143 - DNA, 203 bp, Artificial sequence
  synthetic
ggcgcgccagtcctgagagtttcaagtcggctgtgacgctagcagagggagaaggtgctggtgccttactattgattcagaaataccaagttaagaccttatttttcaacacgctagctactgagtccagtatagagtcagaaatagtatcaggaatgactactcctaggatgcttctacctgttatgcgactcggaccgatg

SEQ ID NO: 6144 - DNA, 203 bp, Artificial sequence
  synthetic
ggcgcgccagtccttcaaaattccataatgaccaaattgagattattcttaacaactcagcaagccaaataacagacataacaaatcctacttggtttaaagaccaaagagcaaggctacctaagcaagtcgaggttataaccatggatgcagagacaacagagaatataaacagatcgaaattgtaccgactcggaccgatg

SEQ ID NO: 6145 - DNA, 203 bp, Artificial sequence
  synthetic
ggcgcgccagtccttcaggaaggagataggccgcatgctgaacatcttgaacgggagaaaaaggtcaacgataacattgctgtgcttgattcccaccgtaatggcgttttccctcagcacaagagatggcgaacccctcatgatagtggcaaaacatgaaagggggagacctctcttgtttaagacaacgactcggaccgatg

SEQ ID NO: 6146 - DNA, 203 bp, Artificial sequence
  synthetic
ggcgcgccagtcctagggaaaaccaaccttggattttgaactgactaagacaacagccaaggaagtggctctgttaagaacctattgcattgaagcctcaatatcaaacataactacggcaacaagatgtccaacgcaaggagagccttatctgaaagaggaacaggaccaacagtacatttgccggacgactcggaccgatg

SEQ ID NO: 6147 - DNA, 203 bp, Artificial sequence
  synthetic
ggcgcgccagtcctgagatgtggtagacagagggtggggcaatggctgtggcttgtttggaaaaggaggagttgtgacatgtgcgaagttttcatgttcggggaagataacaggcaatttggtccaaattgagaaccttgaatacacagtggttgtaacagtccacaatggagacacccatgcagtagcgactcggaccgatg

SEQ ID NO: 6148 - DNA, 203 bp, Artificial sequence
  synthetic
ggcgcgccagtcctcagaagtggactccggtgatggaaatcacatgtttgcaggacatcttaagtgcaaagtccgtatggagaaattgagaatcaagggaatgtcatacacgatgtgttcaggaaagttttcaattgacaaagagatggcagaaacacagcatgggacaacagtggtgaaagtcaagtcgactcggaccgatg

SEQ ID NO: 6149 - DNA, 203 bp, Artificial sequence
  synthetic
ggcgcgccagtcctatgaaggtgctggagctccgtgtaaagtccccatagagataagagatgtaaacaaggaaaaagtggttgggcgtatcatctcatccacccctttggctgagaataccaacagtgtaaccaacatagaattagaacccccctttggggacagctacatagtgataggtgttggaacgactcggaccgatg

SEQ ID NO: 6150 - DNA, 203 bp, Artificial sequence
  synthetic
ggcgcgccagtcctacagcgcattaacactccattggttcaggaaagggagttccattggcaagatgtttgagtccacatacagaggtgcaaaacgaatggccattctaggtgaaacagcttgggattttggttccgttggtggactgttcacatcattgggaaaggctgtgcaccaggtttttggaacgactcggaccgatg

SEQ ID NO: 6151 - DNA, 203 bp, Artificial sequence
  synthetic
ggcgcgccagtcctgtgtgtatacaaccatgtttggaggagtctcatggatgattagaatcctaattgggttcttagtgttgtggattggcacgaactcgaggaacacttcaatggctatgacgtgcatagctgttggaggaatcactctgtttctgggcttcacagttcaagcagacatgggttgtgcgactcggaccgatg

SEQ ID NO: 6152 - DNA, 203 bp, Artificial sequence
  synthetic
ggcgcgccagtcctcaaaaatcttcaccccagaagcaagaaatagcacatttttaatagacggaccagacacctctgaatgccccaatgaacgaagagcatggaactctcttgaggtggaagactatggatttggcatgttcacgaccaacatatggatgaaattccgagaaggaagttcagaagtgtcgactcggaccgatg

SEQ ID NO: 6153 - DNA, 203 bp, Artificial sequence
  synthetic
ggcgcgccagtcctgtgaccacaggttaatgtcagctgcaattaaagatcagaaagctgtgcatgctgacatgggttattggatagagagctcaaaaaaccagacctggcagatagagaaagcatctcttattgaagtgaaaacatgtctgtggcccaagacccacacactgtggagcaatggagtgccgactcggaccgatg

SEQ ID NO: 6154 - DNA, 203 bp, Artificial sequence
  synthetic
ggcgcgccagtcctgacagggcacatcagaaactttttctatgggtctgttgtgcctgaccttgtttgtggaagaatgcttgaggagaagagtcactaggaaacacatgatattagttgtggtgatcactctttgtgctatcatcctgggaggcctcacatggatggacttactacgagccctcatcacgactcggaccgatg

SEQ ID NO: 6155 - DNA, 203 bp, Artificial sequence
  synthetic
ggcgcgccagtccttgttgggggacactatgtctggtagaataggaggacagatccacctagccatcatggcagtgttcaagatgtcaccaggatacgtgctgggtgtgtttttaaggaaactcacttcaagagagacagcactaatggtaataggaatggccatgacaacggtgctttcaattccaccgactcggaccgatg

SEQ ID NO: 6156 - DNA, 203 bp, Artificial sequence
  synthetic
ggcgcgccagtcctcaggagccctgtgggacgtcccctcacccgctgccactaaaaaagccgcactgtctgaaggagtgtacaggatcatgcaaagagggttattcgggaaaactcaggttggagtagggatacacatggaaggtgtatttcacacaatgtggcatgtaacaagaggatcagtgatctcgactcggaccgatg

SEQ ID NO: 6157 - DNA, 203 bp, Artificial sequence
  synthetic
ggcgcgccagtcctaggccctacgtggactgccaatccgttatcagaccccagctgtgaaatcagaacacacaggaagagagattgtagacctcatgtgtcatgcaaccttcacaacaagacttttgtcatcaaccagggttccaaattacaaccttatagtgatggatgaagcacatttcaccgatccgactcggaccgatg

SEQ ID NO: 6158 - DNA, 203 bp, Artificial sequence
  synthetic
ggcgcgccagtcctcttctagtgtcgcggctagaggatacatctcgaccagggtggaaatgggagaggcagcagccatcttcatgaccgcaacccctcccggagcgacagatccctttccccagagcaacagcccaatagaagacatcgagagggaaattccggaaaggtcatggaacacagggttcgcgactcggaccgatg

SEQ ID NO: 6159 - DNA, 203 bp, Artificial sequence
  synthetic
ggcgcgccagtccttgactcccatgctgagacacaccatagaaaacacgtcggccaacctatctctagcagccattgccaaccaggcagccgtcctaatggggcttggaaaaggatggccgctccacagaatggacctcggtgtgccgctgttagcaatgggatgctattctcaagtgaacccaacaacgactcggaccgatg

SEQ ID NO: 6160 - DNA, 203 bp, Artificial sequence
  synthetic
ggcgcgccagtcctccttgacagcatccttagtcatgcttttagtccattatgcaataataggcccaggattgcaggcaaaagccacaagagaggcccagaaaaggacagctgctgggatcatgaaaaatcccacagtggacgggataacagtaatagatctagaaccaatatcctatgacccaaaatcgactcggaccgatg

SEQ ID NO: 6161 - DNA, 203 bp, Artificial sequence
  synthetic
ggcgcgccagtcctacggggtggtaaaactgctaacaaaaccctgggatgtgattccaatggtgactcagttagccatgacagatacaaccccttttgggcaacaaagagtgttcaaagagaaggtggataccagaacaccacaaccaaaacccggtacacgaatggttatgaccacgacagccaattcgactcggaccgatg

SEQ ID NO: 6162 - DNA, 203 bp, Artificial sequence
  synthetic
ggcgcgccagtcctggctgtgggccctccttggaaagaagaaaaatcccagactgtgcacaagggaagagttcatctcaaaagttagatcaaacgcagccataggcgcagtctttcaggaagaacagggatggacatcagccagtgaagctgtgaatgacagccggttttgggaactggttgacaaagcgactcggaccgatg

SEQ ID NO: 6163 - DNA, 203 bp, Artificial sequence
  synthetic
ggcgcgccagtcctcggaatggtttccaacaagcagaacaacatggtcaatccacgctcatcaccagtggatgaccactgaagatatgctcaaagtgtggaacagagtgtggatagaagacaaccctaatatgactgacaagactccagtccattcgtgggaagatataccttacctagggaaaagagcgactcggaccgatg

SEQ ID NO: 6164 - DNA, 203 bp, Artificial sequence
  synthetic
ggcgcgccagtccttaccaacaacaaacaccaaaggctattgaagtcaggccacttgtgccacggtttgagcaaaccgtgctgcctgtagctccgccaataatgggaggcgtaataatccccagggaggccatgcgccacggaagctgtacgcgtggcatattggactagcggttagaggagacccctcgactcggaccgatg

SEQ ID NO: 6165 - DNA, 203 bp, Artificial sequence
  synthetic
ggcgcgccagtcctattttctgaccgtccttttatgcttcatgggtggttggttttttccaattcaaattaccttttggaggaatttgatgttgtcttcggtaagagaggtggtggtaatgtgacatacactgaccagtatctctgtggcgccgatggcaaacctgttatgagtgaagatttatggcacgactcggaccgatg

SEQ ID NO: 6166 - DNA, 203 bp, Artificial sequence
  synthetic
ggcgcgccagtcctgtttgttgaccatttcggtgagaacgaagaaattatcatcaatggtcatacttacgtttgtgcttggcttactaagcgtaagcccttagattacaaacgtcagaacaaccttgccattgaagagattgaatatgtgcatggtgatgctttgcatacactacgcaatggttctgtcgactcggaccgatg

SEQ ID NO: 6167 - DNA, 203 bp, Artificial sequence
  synthetic
ggcgcgccagtccttattgaaggtgtctctgtttggagagtgattgctcttcagagtgtggattgctttgttgcttcttccacttttgtagaagaggaacatgttaatagaatggatacattctgcttcaatgtacgcaatagtgttactgatgagtgtcgtctggccatgttgggtgctgaaatgaccgactcggaccgatg

SEQ ID NO: 6168 - DNA, 203 bp, Artificial sequence
  synthetic
ggcgcgccagtccttagtaatgtcagaagacaagttgcttcaggtgtcatagacattagtaccggttggtttgatgtttatgatgacatctttgctgaaagcaaaccatggtttgttcgcaaggctgaagacatttttggcccttgttggtccgctcttgcttctgcacttaaacaacttaaagtcaccgactcggaccgatg

SEQ ID NO: 6169 - DNA, 203 bp, Artificial sequence
  synthetic
ggcgcgccagtccttacaggtgaacttgtgagatttgttaagtctatttgcaattcagctgttgctgtcgtgggtggtactatacaaattctcgctagtgtgcctgagaagtttttgaatgcgtttgacgtgtttgtcacagctattcaaactgtctttgactgtgctgttgaaacttgtactattgccgactcggaccgatg

SEQ ID NO: 6170 - DNA, 203 bp, Artificial sequence
  synthetic
ggcgcgccagtcctgagagactatgttgacaaatgggatgatttttgcagacaatatagtaacgagtcttggtttgaggatgattacagggcttttatcagtgttttggacatcactgatgctgctgtgaaagctgcagagtctaaagctttcgttgatactattgttccaccttgcccatctattttcgactcggaccgatg

SEQ ID NO: 6171 - DNA, 203 bp, Artificial sequence
  synthetic
ggcgcgccagtcctagacactgtggtttctactgttaaaattggtggcttgacctttaaaacatatgcttttgataaaccttacattgtgatacgtgatatcgtgtgtaaggttgaaaataaaacagaagcagaatggattgagctttttccacataatgacaggattaagtcttttagtactttcgacgactcggaccgatg

SEQ ID NO: 6172 - DNA, 203 bp, Artificial sequence
  synthetic
ggcgcgccagtcctgagtgcttacatgccaattgcagaccctacacattttgacattgaagaagttgaacttttagatgcagagtttgtagaaccaggctgtggtggtattttggcagtaatagatgagcacgtcttttataagaaggatggtgtttattatccatcaaatggtactaacattctacccgactcggaccgatg

SEQ ID NO: 6173 - DNA, 203 bp, Artificial sequence
  synthetic
ggcgcgccagtccttgctgaggatgttgttgaccaagttgaagaagtcaatagcatttttgacattgagacagtggatgttaaacatgatgtgagtccttttgaaatgccatttgaagagttaaatggtttaaagatactcaaacaattggataacaactgctgggttaactcagttatgttacaaatcgactcggaccgatg

SEQ ID NO: 6174 - DNA, 203 bp, Artificial sequence
  synthetic
ggcgcgccagtcctctttacagaagacttgttgtgtgtcgctgatgacaaacccattgttttgtttactgactctatgcttactttggatgaccgtggtttagctctagacaatgcacttagtggtgtgcttagtgctgctattaaggattgtgttgacataaataaagctataccttctggtaatctcgactcggaccgatg

SEQ ID NO: 6175 - DNA, 203 bp, Artificial sequence
  synthetic
ggcgcgccagtccttattaagtttgatataggttctgttgttgtctacatgtgtgttgtgccatccgaaaaggacaaacatttagataataatgttcaacgatgcacacgtaagttgaatagacttatgtgtgatatagtttgtactataccagctgactacatcttgccattggtgttgtctagtttcgactcggaccgatg

SEQ ID NO: 6176 - DNA, 203 bp, Artificial sequence
  synthetic
ggcgcgccagtcctttgggtgaatgctgtttgtattgcactacagtattcgaaaccccattttatttcacaaggtcttgatgctgcgtggaataaatttgttttaggcgatgttgaaatttttgttgcatttgtttactatgttgcaagactaatgaaaggtgacaagggtgatgctgaagacactttcgactcggaccgatg

SEQ ID NO: 6177 - DNA, 203 bp, Artificial sequence
  synthetic
ggcgcgccagtccttaagtactattcacgtgttagaagtgttagaggtagagctattatagtcagtgtcgaacagcttgaaccgtgtgctcagtctagacttttgagtggtgttgcttatactgctttttctggacctgttgacaaaggtcattatactgtttatgatactgcaaagaaatcaatgtacgactcggaccgatg

SEQ ID NO: 6178 - DNA, 203 bp, Artificial sequence
  synthetic
ggcgcgccagtcctgcttgctaagtttacgaaactactgttactcatatatacattgtactcagtagttttgctttgtgtacgttttggaccgtttaatttttgtagtgagactgttaatggttatgctaagtcaaactttgtcaaggatgattactgtgatggttcattgggctgcaagatgtgtctcgactcggaccgatg

SEQ ID NO: 6179 - DNA, 203 bp, Artificial sequence
  synthetic
ggcgcgccagtcctttttggttaccaagagttaagtcaatttagccatttggatgttgtgtggaagcatataacagaccctttgtttagtaatatgcaacctttcattgtcatggttttgctgcttatatttggtgacaattatttgagatgcttcttgctgtattttgttgctcagatgataagcaccgactcggaccgatg

SEQ ID NO: 6180 - DNA, 203 bp, Artificial sequence
  synthetic
ggcgcgccagtccttagacttaagagattccctgttaacacaattgtcaatggtgtgcaacgttcattttatgttaatgcaaatggtggtagtaagttttgtaagaaacatagatttttctgtgttgattgtgactcttatggttatggcagcacgtttataacacccgaagtttctagagaacttggcgactcggaccgatg

SEQ ID NO: 6181 - DNA, 203 bp, Artificial sequence
  synthetic
ggcgcgccagtcctttgtactagattagaaggtttgggtggtaacaatgtttattgttataacacagcgcttatggaaggttctttgccttacagttcaatacaagctaatgcatattataaatatgacaatggcaattttattaagttgccagaagttattgcacaaggctttggttttagaacagtcgactcggaccgatg

SEQ ID NO: 6182 - DNA, 203 bp, Artificial sequence
  synthetic
ggcgcgccagtcctctatagtggtaatgcaaatgaagctgattaccgttgcgcttgttatgcctatttagcaaaagcaatgttggacttttcgcgtgatcataatgacatcttgtacacacctccgactgtcagttatggttctacattacaggctggtttgcgcaaaatggcacaaccatctggcttcgactcggaccgatg

SEQ ID NO: 6183 - DNA, 203 bp, Artificial sequence
  synthetic
ggcgcgccagtcctcatgagaactaattggactatccgtggttcatttattaatggtgcgtgtggttcccctggctacaatcttaaaaatggcgaggtggaatttgtttatatgcatcaaattgaactcggaagtggtagccatgtaggttctagctttgatggtgttatgtatggtggttttgaagacgactcggaccgatg

SEQ ID NO: 6184 - DNA, 203 bp, Artificial sequence
  synthetic
ggcgcgccagtcctacataaggttttgtttttgcaagtgtttttgttgccttcaattattgtggctgctattcaaaactgtgcttgggactaccatgttacaaaggtgttggcagagaagtttgattataatgtttctgttatgcaaatggacatccagggttttgttaacatttttatttgtcttttcgactcggaccgatg

SEQ ID NO: 6185 - DNA, 203 bp, Artificial sequence
  synthetic
ggcgcgccagtccttgttgcactgttgcatacttggcgctttgctaaagagcgttgtacacattggtgcacttatttgttctcactcattgctgttttatacactgcattgtatagttatgactacgttagtttgctggttatgctactttgtgcaatttctaatgaatggtatattggtgctattatcgactcggaccgatg

SEQ ID NO: 6186 - DNA, 203 bp, Artificial sequence
  synthetic
ggcgcgccagtcctcgttctaatgggcattttgtctaacatgaacatagcttctaattcaaaggagtgggcatattgtgttgaaatgcacaataaaataaacttgtgtgacgaccctgaaactgctcaagagttattgctggcgttgttggcctttttcttgtctaagcatagtgattttggtcttggcgactcggaccgatg

SEQ ID NO: 6187 - DNA, 203 bp, Artificial sequence
  synthetic
ggcgcgccagtccttagtgaaggtaatgctctatacaacaatgaaggtggacgtgcattcatgtatgcatatgtgactacgaagcctggcatgaagtatgttaaatgggaacatgactctggtgtggttacagttgaattggaaccaccttgcagatttgttatagacacacctactggaccccaaatcgactcggaccgatg

SEQ ID NO: 6188 - DNA, 203 bp, Artificial sequence
  synthetic
ggcgcgccagtccttaagtatctttattttgttaagaatcttaacaatttaaggagaggtgctgttttgggttacattggtgccactgtgagattgcaagctggcaaacagactgagtttgtttcaaactcccatttattaacacattgttcttttgctgttgacccagctgcagcctatcttgatgccgactcggaccgatg

SEQ ID NO: 6189 - DNA, 203 bp, Artificial sequence
  synthetic
ggcgcgccagtccttgttaaacaaggcgcaaaacctgttggcaattgtgtaaagatgttgactaatggttctggtagcggtcaggctattacttgtaccattgattccaacactacgcaggacacatatggtggcgcgtctgtttgtatttattgcagagcacatgttgcacatccaaccatggacggcgactcggaccgatg

SEQ ID NO: 6190 - DNA, 203 bp, Artificial sequence
  synthetic
ggcgcgccagtccttgtttagctagtgagtgctttatgaaaagtgacatctttggtcaagacttcaaaacttttgatttgttgaaatatgatttcacagaacataaggaggttttgtttaacaagtactttaagtattggggacaggattatcatcctgattgtgttgattgccatgacgagatgtgtcgactcggaccgatg

SEQ ID NO: 6191 - DNA, 203 bp, Artificial sequence
  synthetic
ggcgcgccagtcctgggtgggataatatgttaaagaacctgatggccgatgttgatgatcctaaattgatgggatgggactatcctaagtgtgatagagctatgccctcaatgattcgtatgttgtcggctatgatcttaggttctaagcatgtcacatgttgtacggctagtgataaattttatagacgactcggaccgatg

SEQ ID NO: 6192 - DNA, 203 bp, Artificial sequence
  synthetic
ggcgcgccagtcctctaccatatccagatcctagccgtattatttctgctggtgtttttgtggatgacatcactaagactgatgctgtcattcttttggaacgctatgtttctctggctatagatgcctacccattgtctaagcatcctaaacctgagtacaggaaggtgttttacgcattgttagaccgactcggaccgatg

SEQ ID NO: 6193 - DNA, 203 bp, Artificial sequence
  synthetic
ggcgcgccagtccttgggtcaaacatctcaacaagactcttaacgaaggtgttttggagtctttttctgttacacttttagatgaacatgagtctaagttttgggatgaaagcttttatgctagtatgtatgagaagtctacagtattacaagctgctggtctttgtgtagtatgtggttctcaaacacgactcggaccgatg

SEQ ID NO: 6194 - DNA, 203 bp, Artificial sequence
  synthetic
ggcgcgccagtcctgttctaagatgcggtgattgtttacgcagaccgatgttgtgcactaagtgcgcctatgatcatgtgtttggcactgatcataagttcattttagctattacaccatatgtgtgtaacacatctggctgcaatgtaaatgacgttacaaaactgtatcttggaggtttgaattatcgactcggaccgatg

SEQ ID NO: 6195 - DNA, 203 bp, Artificial sequence
  synthetic
ggcgcgccagtcctgagaaatattctaccatttacaagttgcacccatcatttaatgttagtgatgcttatgcaaatcttgtaccttattaccaacttattggcaaacagcgtataaccacaatacagggtcctcctggtagtggaaaatcgcattgttctattggtattggtgtgtattaccctggacgactcggaccgatg

SEQ ID NO: 6196 - DNA, 203 bp, Artificial sequence
  synthetic
ggcgcgccagtcctgaaccaattgactataatgttgtgacacaacgtatgtgtgctataggacccgatgtctttttacacaagtgttacagatgtcctgctgaaatagttaacactgtttcagagcttgtttatgaaaacaagtttgtacctgtcaaagaagctagtaagcagtgcttcaaaatctttcgactcggaccgatg

SEQ ID NO: 6197 - DNA, 203 bp, Artificial sequence
  synthetic
ggcgcgccagtcctgaacgcggtagtgttcaggtagacaatggctccagtataaataggcgtcaacttgatgttgttaagcgatttatacataaaaactccacatggagcaaggctgtgtttatctcaccttacaatagtcaaaattatgtagctgccaggcttttaggcttacaaactcagacagtgcgactcggaccgatg

SEQ ID NO: 6198 - DNA, 203 bp, Artificial sequence
  synthetic
ggcgcgccagtcctgtgatttcatatatgggtttcaggtttgatgttagcatgcctggtagtcatagtttgttctgtactagagactttgccatgcgtcatgtcagaggttggttaggaatggatgtggaaggtgcacatgtcacaggtgacaatgttggcactaatgtacctctacaagttggttttcgactcggaccgatg

SEQ ID NO: 6199 - DNA, 203 bp, Artificial sequence
  synthetic
ggcgcgccagtcctgttaagaatgtggattggtcaattacctaccctatgatagctaatgaaaatgccataaacaagggcggtcgcactgtgcagagtcatattatgcgtgctgctattaaattgtacaaccctaaagcaatccatgacattggtaatcctaagggtattcgttgtgctgtaactgatcgactcggaccgatg

SEQ ID NO: 6200 - DNA, 203 bp, Artificial sequence
  synthetic
ggcgcgccagtcctcaaggtttagagaacattgcttttaacgttgttaataaaggttcatttgttggtgctgatggtgaattaccagtagccattagtggtgataaagtgttcgtacgtgatggtaacactgataatttagtctttgttaacaaaacatcactgcctacaaacatagcatttgaacttcgactcggaccgatg

SEQ ID NO: 6201 - DNA, 203 bp, Artificial sequence
  synthetic
ggcgcgccagtccttctaagactgtttgtacttacatggatttgttgttggatgattttgtttctgtattgaagtctttggatttgactgttgtatccaaggttcatgaggtcataattgacaacaaaccatggagatggatgctatggtgtaaagataatgccgttgctacattctatcctcagttgcgactcggaccgatg

SEQ ID NO: 6202 - DNA, 203 bp, Artificial sequence
  synthetic
ggcgcgccagtcctagctggaataagaaattgtatgaacttgtacaaagattttctttttggactatgttttgcacttctgttaatacgtcatcatcagaagcctttgttgtcggaattaactatcttggtgatttcgcacaaggaccttttatagatggtaacataatacacgcaaattatgtatttcgactcggaccgatg

SEQ ID NO: 6203 - DNA, 203 bp, Artificial sequence
  synthetic
ggcgcgccagtcctttgagttttagtaatcatttagtctcaactaaataaaatgtttgttttgcttgttgcatatgccttgttgcatattgctggttgtcaaactacaaatgggctgaacactagttactctgtttgcaacggctgtgttggttattcagaaaatgtatttgctgttgagagtggtggcgactcggaccgatg

SEQ ID NO: 6204 - DNA, 203 bp, Artificial sequence
  synthetic
ggcgcgccagtcctaagccctattcaatccgttgagctacctgtgtctattgtgtcgctacctgtttatcataaacatacgtttattgtgttgtacgttgacttcaaacctcagagtggcggtggcaagtgctttaactgttatcctgctggtgttaatattacactggccaattttaatgaaactaacgactcggaccgatg

SEQ ID NO: 6205 - DNA, 203 bp, Artificial sequence
  synthetic
ggcgcgccagtcctagggcctttgtgtgttgacacatcacacttcactaccaaatacgttgctgtttatgccaatgttggtaggtggagtgctagtattaacacgggaaattgccctttttcttttggcaaagttaataactttgttaaatttggcagtgtatgtttttcgctaaaggatatacccggcgactcggaccgatg

SEQ ID NO: 6206 - DNA, 203 bp, Artificial sequence
  synthetic
ggcgcgccagtccttacttctgcttgtaaaactattgaagacgccttaagaaatagcgccaggctggagtctgcagatgttagtgagatgctcacttttgacaagaaagcgtttacacttgctaatgttagtagttttggtgactacaaccttagcagcgtcatacctagcttgcccacaagtggtagcgactcggaccgatg

SEQ ID NO: 6207 - DNA, 203 bp, Artificial sequence
  synthetic
ggcgcgccagtccttagagtggctggtcgcagtgccatagaagacatactttttagcaaacttgttacttctggacttggcactgtggacgcagactacaaaaagtgcactaagggtctttccattgctgacttggcttgtgctcaatattataatggcattatggttttgcctggcgtcgctgatgccgactcggaccgatg

SEQ ID NO: 6208 - DNA, 203 bp, Artificial sequence
  synthetic
ggcgcgccagtcctagcaatgaccaacatagtagatgcctttactggtgttaatgatgctattacacaaacttcacaagccctacaaacagttgctactgcacttaacaagatccaggatgttgttaatcaacaaggcaactcattgaaccatttaacttctcagttgaggcagaattttcaagctatcgactcggaccgatg

SEQ ID NO: 6209 - DNA, 203 bp, Artificial sequence
  synthetic
ggcgcgccagtccttgtgttgcgacaacctaatcttgctctttacaaagaaggcaattattatagaatcacatctcgcataatgtttgaaccacgtattcctaccatggcagattttgttcaaattgaaaattgcaatgtcacatttgttaacatttctcgctctgagttgcaaaccattgtgccagacgactcggaccgatg

SEQ ID NO: 6210 - DNA, 203 bp, Artificial sequence
  synthetic
ggcgcgccagtccttttgtaatagaacagtttatggccccattaaaaatgtgtaccacatttaccaatcatatatgcacatagaccctttccctaaacgagttattgatttctaaactaaacgacaatgtcaaatgacaattgtacgggtgacattgtcacccatttgaagaattggaattttggttgcgactcggaccgatg

SEQ ID NO: 6211 - DNA, 203 bp, Artificial sequence
  synthetic
ggcgcgccagtcctgaatgttattctaaccatattcattgttattcttcagtttggacactataaatactccagattgttttatggtttgaagatgcttgtactgtggcttctttggccactcgtacttgctttgtcaatctttgacacctgggctaattgggattctaattgggcctttgttgcattcgactcggaccgatg

SEQ ID NO: 6212 - DNA, 203 bp, Artificial sequence
  synthetic
ggcgcgccagtccttagcttttttatggccgtatcaacactcgttatgtgggtgatgtacttcgcaaacagtttcagacttttccgacgtgctcgaactttttgggcatggaatcctgaggttaatgcaatcactgtcacaaccgtgttgggacagacatactatcaacccattcaacaagctccaaccgactcggaccgatg

SEQ ID NO: 6213 - DNA, 203 bp, Artificial sequence
  synthetic
ggcgcgccagtcctcaggcaacactgtggtcttgactttcactactagagtgactgtgcccaaagaccatccacacttgggtaagtttcttgaggagttaaatgcattcactagagaaatgcaacaacatcctcttcttaaccctagtgcactagaattcaacccatctcaaacttcacctgcaactgcgactcggaccgatg

SEQ ID NO: 6214 - DNA, 203 bp, Artificial sequence
  synthetic
ggcgcgccagtcctagcgcagttttgcgaggtgaccaaaaggataggtagggtgacaggtagtgacggaaagctttaccatatatatgtgtgcatcgatggttgcatactgctgaagctagccaagagggacgagccaagaaccctgaagtggattagaaatttcaccgactgtccattgtgggttaccgactcggaccgatg

SEQ ID NO: 6215 - DNA, 203 bp, Artificial sequence
  synthetic
ggcgcgccagtcctcagttgctctgatgatggcgcaagtggaagtaaagagaagaagccagataggatcaacaaaggcaaattaaaaatagccccaaaagagcatgagaaggacagcagaactaagccacctgacgctacgattgtagtggaaggagtaaaataccaggttaaaaagaagggtaaagtcgactcggaccgatg

SEQ ID NO: 6216 - DNA, 203 bp, Artificial sequence
  synthetic
ggcgcgccagtccttaaaggaaagagtacccaagacggcctgtaccacaacaagaataaaccaccagaatctaggaagaaattagaaaaagccctattggcatgggcggtaatagcaattatgttgtaccaaccagttgaagccgaaaatataactcaatggaacctgagtgacaacggcactaatggcgactcggaccgatg

SEQ ID NO: 6217 - DNA, 203 bp, Artificial sequence
  synthetic
ggcgcgccagtccttatccagcatgctatgtaccttagaggggttagcaggagcttgcatgggatctggccggaaaaaatatgcaaaggagtccccacctacctggccacagacacggaactgaaagaaatacagggaatgatggatgccagcgaggggacaaactatacgtgctgtaagttacagagcgactcggaccgatg

SEQ ID NO: 6218 - DNA, 203 bp, Artificial sequence
  synthetic
ggcgcgccagtccttttgttatttgaagaggcaggacaggtcgtaaaattagccttacgagcgctgagggatttaaccagggtctggaatagcgcatcaaccacggcattcctcatctgcttgataaaagtattaagaggacagatcgtgcaaggtgtgatatggctgctactagtaactggggcacacgactcggaccgatg

SEQ ID NO: 6219 - DNA, 203 bp, Artificial sequence
  synthetic
ggcgcgccagtcctaaatggagatttattctactgtaagttggggggcaactggacatgtgtgaaaggtgaaccagtggtctacacgggggggctagtaaaacaatgcagatggtgtggcttcgacttcaatgagcccgacggactcccgcactaccccataggtaagtgcatcttggtaaatgagaccgactcggaccgatg

SEQ ID NO: 6220 - DNA, 203 bp, Artificial sequence
  synthetic
ggcgcgccagtcctaggttacagaatagtagattcaacggactgtaacagagatggcgttgtaatcagcacagatgggagtcatgagtgcttgatcggtaacacaactgtcaaggtgcatgcatcagatgaaagactgggccctatgccatgcagacccaaagagattgtctctagtgcaggacctgtcgactcggaccgatg

SEQ ID NO: 6221 - DNA, 203 bp, Artificial sequence
  synthetic
ggcgcgccagtcctggtagcactgttaggaggaagatatgtcctgtggctaatagtgacctacatagttctaacagaacaactcgccgctggtttaccattgggccagggtgaggtagtgttgatagggaacttaattacccacacagacattgaggtcgtagtatatttcttactactctatttggtcgactcggaccgatg

SEQ ID NO: 6222 - DNA, 203 bp, Artificial sequence
  synthetic
ggcgcgccagtcctgaccaacttcaagagggtaaacgacatatacgaagttgaccaatctggtgaaggggtttaccttttcccgtcaaaacaaaagacaagttcaataacaggtaccatgttgccattgatcaaagccatactcatcagctgcatcagtaataagtggcagttcatatatctattgtacgactcggaccgatg

SEQ ID NO: 6223 - DNA, 203 bp, Artificial sequence
  synthetic
ggcgcgccagtcctaagggtcgtttgccaatcaaataataagatgacagatgagtctgagtatggagttaaaactgactccggatgcccggaaggagctaggtgttatgtgttcaacccagaggcagttaacatatcagggactaaaggagccatggtccacttacaaaaaactggaggagaattcaccgactcggaccgatg

SEQ ID NO: 6224 - DNA, 203 bp, Artificial sequence
  synthetic
ggcgcgccagtcctctttagagagatgaactatgattggagcctttatgaggaggacagtctgatgattacacaattggaaatcctcaataatttgttgatatcagaagaactaccgatggcagtaaaaaatataatggccaggactgaccacccagaaccaattcagctggcgtacaacagctacgacgactcggaccgatg

SEQ ID NO: 6225 - DNA, 203 bp, Artificial sequence
  synthetic
ggcgcgccagtcctaacacaagtgccagtgctattcccaaaaataaagaatggagaggtgactgatagttacgataactataccttcctcaacgcaagaaaattgggggatgatgtacccccttacgtgtatgccacagaggatgaggacttagcggtagagctactgggcttagactggccagaccccgactcggaccgatg

SEQ ID NO: 6226 - DNA, 203 bp, Artificial sequence
  synthetic
ggcgcgccagtcctagacaccacacacctacagtacgccccaaatgctatcaagacggaggggaaggagacagaattgaaggagctagcccagggggatgtgcagagatgtgtggaagctatgaccaattatgcaagagagggtatccaattcatgaagtctcaggcactgaaggtgaaagaaacccccgactcggaccgatg

SEQ ID NO: 6227 - DNA, 203 bp, Artificial sequence
  synthetic
ggcgcgccagtcctatacaaaagctggaattacaataatctgtccaagatagttgaaccggctttggccactctgccctatgccgccacagctctcaaactattcgcccccactcgattggagagcgttgtcatattgagtaccgcaatctacaagacctacctatcaatcaggcgcggaaaaagcgacgactcggaccgatg

SEQ ID NO: 6228 - DNA, 203 bp, Artificial sequence
  synthetic
ggcgcgccagtcctgaactacagggtgacaaaatactatgatgacaatctatcagaaataaagccagtgataagaatggaagggcatgtggaactctactacaagggagccaccatcaaactggacttcaacaacagtaaaacaatactggcaaccgataaatgggagattgatcactccactctggtcgactcggaccgatg

SEQ ID NO: 6229 - DNA, 203 bp, Artificial sequence
  synthetic
ggcgcgccagtcctttgggtgatgcaagaagaaaataaacagggcaacctgacccccttgtttgaagagctcctgcaacagtgtccacccggaggccagaacaaaactgcacatatggtctctgcttaccaactagctcaagggaactggatgccaaccagctgccatgtttttatggggaccatatccgactcggaccgatg

SEQ ID NO: 6230 - DNA, 203 bp, Artificial sequence
  synthetic
ggcgcgccagtcctggattcagagaaaaacaaagtcgaagagattattgacaatctgaaaaaaggcagaaacatcaaatactatgaaaccgcgatcccaaagaatgagaagagggacgtcaatgatgactggactgctggtgacttcgtggaagagaagaaacccagagtcatacaataccctgaagccgactcggaccgatg

SEQ ID NO: 6231 - DNA, 203 bp, Artificial sequence
  synthetic
ggcgcgccagtcctcacccaggtaaccacaaaagatttggagttgataaaggacatacaaaagtactatttcaagaagaaatggcataaatttattgacaccctgaccatgcacatgtcagaagtacccgtaatcagtgctgatggggaagtatacataaggaaagggcaaagaggcagtggacaacccgactcggaccgatg

SEQ ID NO: 6232 - DNA, 203 bp, Artificial sequence
  synthetic
ggcgcgccagtccttaaaatggccacaaggttagattccagtggtgagaggggtaccatagcatatgagaaagcagtagcattcagcttcctgctgatgtactcctggaacccactaatcagaaggatctgcttactggtgctatcaactgaactgcaagtgaaaccagggaagtcaaccacttactacgactcggaccgatg

SEQ ID NO: 6233 - DNA, 203 bp, Artificial sequence
  synthetic
ggcgcgccagtccttaaatacgtccaacaaaagagagtcaatccgttctttgctctaactcagcaatggctaacagaaatgaggaatctgctctcccagagtctatcagtaaggaagttcatggttgagatcctcatagaagtcaagaaaggaggatctgctaaaggcagagcagtagaaataatctccgactcggaccgatg

SEQ ID NO: 6234 - DNA, 203 bp, Artificial sequence
  synthetic
ggcgcgccagtcctccatgctggaggaattgatcagaacatggcaaatagactgggactaagttcagatcaagttgcagaactcgctgctgcagttcaggaaacatcagcaggaaggcaagagagtaatgttcaggctagagaggcaaaatttgctgcaggaggtgtgctcattggaggcagtgatcacgactcggaccgatg

SEQ ID NO: 6235 - DNA, 203 bp, Artificial sequence
  synthetic
ggcgcgccagtcctagatatcgatgaaggggaagaacctatagaacagagtggcagacagtcagttaccttcaaaagggagatgagtatttcatcccttgctaacagtgtgccgagcagttctgtgagcacatccggtgggaccagattgactaattcattactaaacctcagatcaagactggctgccgactcggaccgatg

SEQ ID NO: 6236 - DNA, 203 bp, Artificial sequence
  synthetic
ggcgcgccagtcctaaaagcagcaaaagaagccgcctcatccaatgcaacagatgatccagcaatcagcaacagaactcaaggggaatcagagaagaagaataatcaagacctcaaacctgctcaaaatgaccttgatttcgtcagagctgatgtgtgacgtctatttccaatattctacagtatccacgactcggaccgatg

SEQ ID NO: 6237 - DNA, 203 bp, Artificial sequence
  synthetic
ggcgcgccagtccttaatttaactaagctactgtctttgcactggaatatacaatacctcttacctcatttcttactttaatatcatgttatttttttgataagtcacttaacttgaccaaggtctaccaggtaatgctcgcacaagtgaactgcaatctcaacttagattaaacataatcatgcaaacgactcggaccgatg

SEQ ID NO: 6238 - DNA, 203 bp, Artificial sequence
  synthetic
ggcgcgccagtcctgactgaatcccacagcagtaccgttcactctgagaaacctgtctgatcctgcaaaagactctcctgtgattgctgaacactactacggactaggagttaaagagcaaaacgttggccctcagactagcagaaatgtcaatttggacagcatcaaattgtacacatcagatgacgcgactcggaccgatg

SEQ ID NO: 6239 - DNA, 203 bp, Artificial sequence
  synthetic
ggcgcgccagtcctacaaatcaacagatgtaccaggagcaggaccgaaagattcagcagtgaaggaagaaccaccccagaagaggctacctatgttagctgaagaatttgagtgctctggatcggaagacccaatcattcgggagctgctgaaggagaactcactcataaattgtcagcaagggaaagcgactcggaccgatg

SEQ ID NO: 6240 - DNA, 203 bp, Artificial sequence
  synthetic
ggcgcgccagtcctatgctcagcctccatatcattggagcatcgagaggtcaataagcccggataaaactgagatcgtcaacggtgctgtgcaaactgctgacaggcaaagaccaggaactccgatgccaaagtcccgaggtattcccattaaaaagggcacagacgcgaaatatccatctgctgggacgactcggaccgatg

SEQ ID NO: 6241 - DNA, 203 bp, Artificial sequence
  synthetic
ggcgcgccagtcctcggaaaacgtgcctgggtcgaagagtggtgcaacccggcatgttcgaggatcacccccctaccaagaaggcaagagtgtcaatgcggagaatgtccaactgaatgcttccactgcggttaaggaaactgataagtcagaagtaaaccccgtagacgacaacgactcacttgatgcgactcggaccgatg

SEQ ID NO: 6242 - DNA, 203 bp, Artificial sequence
  synthetic
ggcgcgccagtcctataaatacatcatgccttcagatgatttctcaaacactttcttcccgcacgacactgatcgcttgaattatcacgcagatcatttaggtgattatgaccttgaaaccctgtgtgaagagtcggttctaatgggagtgatcaactctataaaattaattaatctggatatgcgctcgactcggaccgatg

SEQ ID NO: 6243 - DNA, 203 bp, Artificial sequence
  synthetic
ggcgcgccagtcctgtaatatttgatcactgaattgtcagcagaaatacaatgatctaacaacaatctcccacaagtagacaatggtttcaggtcaataataacaacctcaatactaatctttcacataagcattactcattccagccctcagacgataacacaatacttgatacatgtttattgaagcgactcggaccgatg

SEQ ID NO: 6244 - DNA, 203 bp, Artificial sequence
  synthetic
ggcgcgccagtccttggtaagagtgcctctcatccccaagatcttctggaggaactctgttccctcaaagttactgtgagaagaacagctggatcaactgagaaaattgtgtttggatcatctggccctctaaatcacctcgttccgtggaagaaagtactgactagtggttcaatttttaatgcagtcgactcggaccgatg

SEQ ID NO: 6245 - DNA, 203 bp, Artificial sequence
  synthetic
ggcgcgccagtcctcataggcggactaagtctccacattaagatcaatggtgtaatcagcaaacggctgtttgctcaaatgggattccaaaaaaacctttgtttctctttgatggacatcaatccttggctcaacagattgacctggaacaacagttgtgagatcagccgagtagcagctgtgttgcacgactcggaccgatg

SEQ ID NO: 6246 - DNA, 203 bp, Artificial sequence
  synthetic
ggcgcgccagtcctaagacccagtttctaattcaatgactatacaggctatatctcaggcattcggtggaaattatgaaacactgctaagaacattgggttacgctacagaagactttgatgatcttctagaaagtgacagcataacaggtcaaatcatctatgttgatctaagtagctactatataacgactcggaccgatg

SEQ ID NO: 6247 - DNA, 203 bp, Artificial sequence
  synthetic
ggcgcgccagtcctcacaaaaaacaataactaattgttttctcttgaagaataagatttggtgcatatcattggttgagatatatgacacaggagacaatgtcataagacccaaactattcgcggttaagataccagagcaatgtacataaaaatcaacctcataatttaatggattgatctaatatacgactcggaccgatg

SEQ ID NO: 6248 - DNA, 203 bp, Artificial sequence
  synthetic
ggcgcgccagtccttacacatgcgagacaaaagtactgaaataatcctaaatccgaatcttatctgcattttcaaatcagacaaaactggaaagaagtgttattatcttacacccgaaatggttctaatgtattgtgatgtcctagagggaaggatgatgatggagacaacagtcaaatcggatatcacgactcggaccgatg

SEQ ID NO: 6249 - DNA, 203 bp, Artificial sequence
  synthetic
ggcgcgccagtcctgcataaaggaaatgcatcaagaattgagtgagtgtggttttacagatcagaagattcggtctatgtttattgatgatcttttatccattctaaatatcgataatatacatctgttggcagagttcttttctttctttcgtacgtttggccatcctattcttgaggctaaagttgcgactcggaccgatg

SEQ ID NO: 6250 - DNA, 203 bp, Artificial sequence
  synthetic
ggcgcgccagtcctctgcagaaaaagtgagagaacatatgttggcagataaagttcttgaatatgcccctataatgaaagcacatgctatattctgcgggactataataaatgggtatagggatagacacggaggagcctggcctcctctttacctccccgcacatgcatctaaacatataatccgttcgactcggaccgatg

SEQ ID NO: 6251 - DNA, 203 bp, Artificial sequence
  synthetic
ggcgcgccagtcctgtgaagtgttgagctataccccaccgaagtcaaccgagccaagaagattggttgacgtttttgtaaatgatgaaaactttgatccatacaacatgctggaatatgtcttatccggtgcttatctcgaggatgaacaattcaatgtttcttatagcttgaaggagaaagagacgacgactcggaccgatg

SEQ ID NO: 6252 - DNA, 203 bp, Artificial sequence
  synthetic
ggcgcgccagtcctagcaagctggacgattgttcgcaaagatgacctacaaaatgcgtgcatgtcaagtcatagcagaggccctgatagcctcaggtgtcggtaaatattttaaggagaacgggatggttaaggatgagcacgaacttttgaagacactcttccaattgtctatttcctcagttcctccgactcggaccgatg

SEQ ID NO: 6253 - DNA, 203 bp, Artificial sequence
  synthetic
ggcgcgccagtcctctgatcttaagaaattctgtctcaattggagatacgaatcaatggctatatttgctgaacgtctggatgagatatacggtttacctggattttttaattggatgcacaaacgactagaaagatctgttatctatgttgcagaccctaattgcccccctaatattgacaaacatacgactcggaccgatg

SEQ ID NO: 6254 - DNA, 203 bp, Artificial sequence
  synthetic
ggcgcgccagtcctctatcactcaaaaagttcatcctaatcttccctacaaggtaaagaaagagatctgtgcaaagcaagctcagctttattttgaaaggttaaggatgaacttaagagccctcggccacaatcttaaagctacagaaactatcatcagtacacatctttttatttattcgaagaaaacgactcggaccgatg

SEQ ID NO: 6255 - DNA, 203 bp, Artificial sequence
  synthetic
ggcgcgccagtcctttcattatgatggtgctgtgctgtctcaggcactcaaatcaatgtcaagatgttgcttttggtcagagactctggtggatgaaactagatcagcttgtagtaacatcagcactacaatagctaaagctatagaaaatgggttgtcaagaaatgtcggctattgcatcaatatttcgactcggaccgatg

SEQ ID NO: 6256 - DNA, 203 bp, Artificial sequence
  synthetic
ggcgcgccagtcctatataggtgatccggttacagcatctttggctgatcttaagagaatgattgatcacagtattatgactgaaagcgtattacaaaaagttatgaatcaagaacctggtgatgcgagtttcttggactgggccagtgatccatactcgggcaacttgcctgactcacaaagcatcacgactcggaccgatg

SEQ ID NO: 6257 - DNA, 203 bp, Artificial sequence
  synthetic
ggcgcgccagtccttgatatcatcaaatacttgctcagttgacttggcacgagcattgagatctcacatgtggagggaattagcgttaggtagagtaatatacggtcttgaggtaccagatgcacttgaggctatggtgggaaggtatataacagggagcttagagtgccaaatttgtgagcagggaacgactcggaccgatg

SEQ ID NO: 6258 - DNA, 203 bp, Artificial sequence
  synthetic
ggcgcgccagtcctacacgatgtatgggtggttctttgtacctagggattcccaattggatcaggtagatagagagcactcatcaataagagtaccttatgtaggatcaagtacggatgaaagatcggatatcaaactagggaatgtcaaaagaccaactaaggccttgcgttctgctatcagaattgcgactcggaccgatg

SEQ ID NO: 6259 - DNA, 203 bp, Artificial sequence
  synthetic
ggcgcgccagtcctagtccaaatcaagagaattagactttcctttatggtcaactgaggaacttcatgatgtcctagctaagactgttgctcagaccgttcttgagattataacaaaggctgacaaggatgttttaaagcaacaccttgcaatagactctgacgataacatcaacagcttaatcacagcgactcggaccgatg

SEQ ID NO: 6260 - DNA, 203 bp, Artificial sequence
  synthetic
ggcgcgccagtcctaggtgaataggaaagttgaatacccatatcacactataggagtttcaggaaatgttgttactaatacagatattgtttatacaggatatgcagacgtcttcaagtgtgaacagtgtgatttgctgatgggtgcttgggcaccaaacgacattccagcactgacgcacaatattccgactcggaccgatg

SEQ ID NO: 6261 - DNA, 203 bp, Artificial sequence
  synthetic
ggcgcgccagtcctgagcatcacagtgtgtccagtttaagctccccacagaaaatttagtggcacgtaattatgtgttgttgtgtgaggaaattgagcgagaaaatattcctgtaattttccaggattatagtgaagggaatgtctttacgtgtcggattgttagtggagatctaactgctgttggtacgactcggaccgatg

SEQ ID NO: 6262 - DNA, 203 bp, Artificial sequence
  synthetic
ggcgcgccagtcctcagcatccaatatgtatacagctcgagatgtagcgtctaaaaatttgttagatcagctacataacacccccaatgtgcacatgcactctctgcattccctcccgtatgagaatttcccttgtgaagctctggaatttgcagttgagcaaggtattatcccccctgtgacctttgcgactcggaccgatg

SEQ ID NO: 6263 - DNA, 203 bp, Artificial sequence
  synthetic
ggcgcgccagtccttcccccggagatcaggtgaaacgctagagttggctaatgccacattgaaccatgtgaataatgtgattgaccgacacgatgaagcaataagtaatgtcaggcaaaatgttgaagtgaagttgacgggtgtgtcccgacaagttggtgctatgttgccgaaagtagaaactgctacgactcggaccgatg

SEQ ID NO: 6264 - DNA, 203 bp, Artificial sequence
  synthetic
ggcgcgccagtccttatatgagtctataggaacaggcttatgcgtagcgttgtctggtatattgtcatttatagcagtcatgtgtcttggaatcactgatttatctgctgttacattcaataagctgctcacgcagtcttcattggttggacgagctttagtcggtgtgcgtagcttcaaagatgtttcgactcggaccgatg

SEQ ID NO: 6265 - DNA, 203 bp, Artificial sequence
  synthetic
ggcgcgccagtccttttttggcatctgggattatgtagacaatcaagtgtgtgaaattctttacgggaagagtcgcaagaacttggatttgttgaaagaatatccgagtttggactcgttgttgtccatcttcaactactttcacgacacggtagatgctaatgtgctcattagttgtaaccgtgcagcgactcggaccgatg

SEQ ID NO: 6266 - DNA, 203 bp, Artificial sequence
  synthetic
ggcgcgccagtccttagcttatgatgatgtattgcagatagtggattcggcccaaaagccaaatcctgagttattcgaatttattaggttgaacaacagtgatccatatcaagtacatatgtccagtgtcagggataaggcaaatacattcatagcaccatcttttgtttttgcaacctcaaacgtaacgactcggaccgatg

SEQ ID NO: 6267 - DNA, 203 bp, Artificial sequence
  synthetic
ggcgcgccagtcctatccaggcgcgtatgtccccaagtctattcatagtgcagatgcattcagacggcgtttagatctatgcgtttatgtagatgttaaagatgagtttgcacgcatcgtagctggatctaagggtcatcgtaaggtcccttgtgaacagaagatatggctccatcagaatccaggaacgactcggaccgatg

SEQ ID NO: 6268 - DNA, 203 bp, Artificial sequence
  synthetic
ggcgcgccagtcctagacgcagcaagacatgaagcaggaaattattgcaggaacatacaagatcactccggagacagctgtgtatgagttgcatgttgacactacgttagcaggcaatgctcagtctaaagtctgtgcttatgatggtttggtgtcactaattgaacaggtgaggaaattgcgtgttgcgactcggaccgatg

SEQ ID NO: 6269 - DNA, 203 bp, Artificial sequence
  synthetic
ggcgcgccagtccttggaagctcattttgtctcgcggagtgcgaacgatggaagcatgttcatcccagccagtgaggttgctgatttgttgtgtcagagacataacaatacgaatttgaatgaggaactggtgtatttgacgtggatgacgcagatcacagataaggagttagcctcgagtttagtatcgactcggaccgatg

SEQ ID NO: 6270 - DNA, 203 bp, Artificial sequence
  synthetic
ggcgcgccagtcctatttcacaaataacggaatggataagtcaatttggaaacagagcgccgagcgttcagcacaggccattagtcagtgtaagaatgcttggacgcgcataaacgatttcttgaagaatcattggatttccatatctgccgttataggatcagctctcctaatagggggagtgtcgacgactcggaccgatg

SEQ ID NO: 6271 - DNA, 203 bp, Artificial sequence
  synthetic
ggcgcgccagtcctcacccaatccaacaaaatctgaaattactcggagtcctatccatggatgtttccccgttcttacagcccccgctaccttgtatagcccaacagagaacttattaatcaagaacgcaatgaaagtaacaaagaatgtggagttgctggaagaagacctaattgatgcctgtgttccgactcggaccgatg

SEQ ID NO: 6272 - DNA, 203 bp, Artificial sequence
  synthetic
ggcgcgccagtcctaggtgattgctggtgatttctcgaattttgatggttcattgaattctcagattttatcacgagtatctgaaattgtcactgattggtatggagatgatgcagaaaatggtctgatcagacatacactacttgagtacttgtttaatgccacctggcttatgaatggtaaggtttcgactcggaccgatg

SEQ ID NO: 6273 - DNA, 203 bp, Artificial sequence
  synthetic
ggcgcgccagtccttccaactcaaccattctcagccttccggcaatccattaactactctcatcaactgtgtatataacatgatcatttttagatatgtctaccttctagctcagcgagaaaacgggtttcccatgacgctctctggatttactacaaacgtagcttgcattttctatggtgacgattcgactcggaccgatg

SEQ ID NO: 6274 - DNA, 203 bp, Artificial sequence
  synthetic
ggcgcgccagtccttcgaaaactctccgaacactaggtgcagtaaggctttcatggagtggtttgctatttagcgtacgtgtaccataggcagccccaaaaacacgtgtgaggagaaagtcccagtcactttgggcaaagtagacagccgcgcttgcgtggtgggacttaattaatgcctgctaaccccgactcggaccgatg

SEQ ID NO: 6275 - DNA, 203 bp, Artificial sequence
  synthetic
ggcgcgccagtcctagttgaaattgataattttgatacaacaaccagtggaggactaattccaggaggtagtgttacaaacagtgaaggttctacaatcttgatgaatgatatcccaatcactaatcagaatgtagtgctgtctaagaatgtaacagataacctgtttgaagtccaggaccaagctctcgactcggaccgatg

SEQ ID NO: 6276 - DNA, 203 bp, Artificial sequence
  synthetic
ggcgcgccagtccttggcaggttgaaaaacatcaagctatatgggcatgcgccatctgtgacatcttcagtatatccgtctactcagtccggatatgatgatgattgtcccattgtgcatgcgggaactgatgaggattcttctaaacaggggattgtctcaagggttgcagacaccgttggtgcggtcgactcggaccgatg

SEQ ID NO: 6277 - DNA, 203 bp, Artificial sequence
  synthetic
ggcgcgccagtccttgttggcttcgattatggcgtacccctgtctcttttccctaacaatgccattgatcccacaattgcagtgcctgaaggattggatgagatgtctattgaatacttagcacagcgaccatatatgctcaacagatacactatcagaggtggtgacactcctgatgcgcatggaaccgactcggaccgatg

SEQ ID NO: 6278 - DNA, 203 bp, Artificial sequence
  synthetic
ggcgcgccagtcctcagattgctggtgcaatatctcccctatggtagtggtgttcaaccaatagaaagtatcctttcacagatcatcgacatctcacaagtcgatgataagggtattgacattgcttttccttccgtctatcccaataagtggatgcgagtgtacgatccagcgaaagttgggtacaccgactcggaccgatg

SEQ ID NO: 6279 - DNA, 203 bp, Artificial sequence
  synthetic
ggcgcgccagtcctgttagtaacatgtggtagtatggcagcgattggtgaagctacggtcgcattgcaattcgtggacgagacaattgaaattctgagattagagtcagattttgagtccaaagctccagtgaaatttactccaggtaactataccgtggtcactgaagctagtgatgttgaattggtcgactcggaccgatg

SEQ ID NO: 6280 - DNA, 203 bp, Artificial sequence
  synthetic
ggcgcgccagtcctatatccatccacacatgctggtctggactactccagctcagacacatctacaatgttgactacaatgggtgaacagtttgtctctctcagaatgttaactagacgttccagtcccgttgacattcttagaggcgatttggttactttgcccggaatttcctttggcacagataacgactcggaccgatg

SEQ ID NO: 6281 - DNA, 203 bp, Artificial sequence
  synthetic
ggcgcgccagtcctgcattatattaacacatccctgaaccctatggctcaaattagcttgccttattatagtccagcagaaaatttagttattgattccaagtctttccctcaattaagtgatttatcaattagtaatttggaaaggacggaaaatgagtactttgtgcttgcaagtgctggtgatgacgactcggaccgatg

SEQ ID NO: 6282 - DNA, 203 bp, Artificial sequence
  synthetic
ggcgcgccagtcctccacactttctctcaattggcaggatgtccagctttcacttttggacctgccgaattggcttaatttaacacccttcaggtgtagacccgtcattgtgacgcgtgggttgaggtgccatgaatttgtcattcatggtgcatttatctcaacagttttccctaaccgcgcgttgccgactcggaccgatg

SEQ ID NO: 6283 - DNA, 203 bp, Artificial sequence
  synthetic
ggcgcgccagtccttatccccttgatgcaactgaggttttaacatctcattgtttttgagccccaacgccttggtggatgctcaaagaagattactcttgatgcttggctctcagaaagaatggcacctcaaagttttgagacccgattcttttgagtcgagaaccttacccccaacccttgagattgcgactcggaccgatg

SEQ ID NO: 6284 - DNA, 203 bp, Artificial sequence
  synthetic
ggcgcgccagtcctcttttcttccaactaaacccctattgatgtgttggtcgtttgccaatcggagggcgacaggcgcaggtcgccccaacagctagtattgtgggaacttgccactgctgatgaaacgaggtagtggcatttagtacctgagaacgctggaggagcatctccccctcttccttcattcgactcggaccgatg

SEQ ID NO: 6285 - DNA, 203 bp, Artificial sequence
  synthetic
ggcgcgccagtcctgccgagctcttcctcggtcttgttctgaatgcacacatgtctaggggctaaggatgtcctacaggtacccgcacgtaaccttcagagagtgtggatctgagtaggagactgtggtgcgctgctttacagacgtagcccagtttaaaaaacgtctatgcccctacagggtcgcggcgactcggaccgatg

SEQ ID NO: 6286 - DNA, 203 bp, Artificial sequence
  synthetic
ggcgcgccagtccttgggccgcaccctttccttttacaaacttggttttatggtgacaatggcaggcaacatggtcaacaacttgttcgctctcgctactgaagtgtgttctccaaaacagggtcctctcctcgacacagagatgcccttgcctcttgaattggctgaatttcccaatcagtctgacacgactcggaccgatg

SEQ ID NO: 6287 - DNA, 203 bp, Artificial sequence
  synthetic
ggcgcgccagtcctttgatgatgataggatgtacttgtcagggcctcctacccgagtcaaaatggcttcttcataccacatgcctcaatgggttgagtcttttgctcgtttttgcttggaactccaccccgtccaacacaggcgtaccttggcccagtcactccgtgactcacaatgtcgtggagctgcgactcggaccgatg

SEQ ID NO: 6288 - DNA, 203 bp, Artificial sequence
  synthetic
ggcgcgccagtcctgtcactcgcgcccggaggcaggtcacaacaatgaatcaggcaattctggtacaatcgtgaacaactattatatgcaacactaccaaaattccattgaccttgatggcatttcctctcaaaacattggcgaggctggagctggaaccaaccctttttcatccatactcgacgtgccgactcggaccgatg

SEQ ID NO: 6289 - DNA, 203 bp, Artificial sequence
  synthetic
ggcgcgccagtcctacgatgcactcccgcgccacctgccacctcagcagcttactctctacccacaccagtttctcaacttgcggactaacactactgttgacattgaggtcccctacatgaattttgtgcctgcttctgctccagtaatgcattgtccttggacccttttgatcatggtcatttcaccgactcggaccgatg

SEQ ID NO: 6290 - DNA, 203 bp, Artificial sequence
  synthetic
ggcgcgccagtcctcactccgctacggggctgggtcagcccctgatgtacagttaaccatgaccataacccccaccgattttgttgccaacggcctgagacagaccgtatctgagggtataccgggcacccagccctacgacaggcagttcctgtccacagagccctcagctccccctcccctctatacgactcggaccgatg

SEQ ID NO: 6291 - DNA, 203 bp, Artificial sequence
  synthetic
ggcgcgccagtcctcaccatcttggctgccagaccgaagcttcattcccggcaagtttactgactttttgcaggttgccgtcatcccaaccatggccgaggtttctgtgggcaccaaccacaaacccatccccagtttttctgttggcaatacattggaggaccggccgttgttgaacactgatttaacgactcggaccgatg

SEQ ID NO: 6292 - DNA, 203 bp, Artificial sequence
  synthetic
ggcgcgccagtcctctttcacctccatgacatttcggaacacttacctgtctgctttggctctcaattacacccagtacagaggtagtatttgtgtggactttttgtttacaggcactgccatggcccaagggaaatttgttgttgcttacacgcctcctgggcgtgaacccaaaacattggatgaagcgactcggaccgatg

SEQ ID NO: 6293 - DNA, 203 bp, Artificial sequence
  synthetic
ggcgcgccagtcctccatgcagggcacatatgccatatgggatcttggcttgaattctagctttaaatttgttataccttacatttcagcttcggcttaccgattcaccaacgaggacgaccgtccatctgtggtgaatgcagtcggttggttgcaagtttaccagctcactaccctgacgtaccctgcgactcggaccgatg

SEQ ID NO: 6294 - DNA, 203 bp, Artificial sequence
  synthetic
ggcgcgccagtccttggctcctgccgcgcattttggtactttgtcaattcgcgtgaacgcccgccccttgacgcaactcaaaggggcggacgacgaacctctccaagacctggcttttgccctcttcacccgccttcgtaatttgaaagcctatgcgccacgccatttccagcgtgtgcccaattcaccgactcggaccgatg

SEQ ID NO: 6295 - DNA, 203 bp, Artificial sequence
  synthetic
ggcgcgccagtcctgtgcaacaaactttgaccttctcaagttggctggagacgtcgaatccaacccagggcctaccatctggtccatgatgcctggtggcgagcttatagagtttgccacgaaagtgtcccaggtctacaaaactctgaaggaaaaatgcacagaccccactacgtggattaaggcagcgactcggaccgatg

SEQ ID NO: 6296 - DNA, 203 bp, Artificial sequence
  synthetic
ggcgcgccagtcctttcgccgcaccttcttcgatgactcgtcgtcggagtctgaggacggtgaaccagaagttccacagtttaggccacaggtttaccctagacctcgcagtgagcgagtggttagacaccccatgacagcccgtcgcgcgcagcgcgtcattgacatgggttactctgactacgagacgactcggaccgatg

SEQ ID NO: 6297 - DNA, 203 bp, Artificial sequence
  synthetic
ggcgcgccagtcctcggtgacgcgccgctactggaaggtgattgatgtcagcgcagacgaacagtataagacagtggacggcagattggactacgctaaggccacacaaccaacccagatcccccctgaattggctgtgttcaagacacacgtccctcttttgaagggcgctctacgcgactgccagccgactcggaccgatg

SEQ ID NO: 6298 - DNA, 203 bp, Artificial sequence
  synthetic
ggcgcgccagtcctatgcagcacttgctctttctcttttgacctctatactttctttttctcttgtgatttattcaggggtgaagacctatcaggagttttcccgcaagcacaagcatgtgcgccagccggtgtacaatgcctgggaggactttgatgaggactctatctttgaacagtcacgtgcttcgactcggaccgatg

SEQ ID NO: 6299 - DNA, 203 bp, Artificial sequence
  synthetic
ggcgcgccagtcctcagctggccgcaattcggcaacacgcgaccagcttgaggcagtggatgtgattgatcaatttgaaatgccgagtgatgctgtcgctattaagtttccagacaagcgcggctcctcttacaaaaatattcttcaccaccttgcctacaccctcccaacccgtggaaagccagtttcgactcggaccgatg

SEQ ID NO: 6300 - DNA, 203 bp, Artificial sequence
  synthetic
ggcgcgccagtccttcatccttgtcaacaacaacgtggcaggtagagccgttgttcacggtacttacattggatgcacccaaaagatcaccactttagacggattcacttttcccaacgtgagttcatacaaagccactacccatcttgggatgtgtcgcgcgccagtggttgccaacgaaaatggcacgactcggaccgatg

SEQ ID NO: 6301 - DNA, 203 bp, Artificial sequence
  synthetic
ggcgcgccagtcctaggcttatgcttcctcattgtttgcacagattggtactgacaatggacccatttcagagtatgaagctgttactggcattgagaatttggactcagtggagacgacaacgtcgcccggacttccctacacgacagcggggatcccgagagaggcgctgtttgacccagacaaaacgactcggaccgatg

SEQ ID NO: 6302 - DNA, 203 bp, Artificial sequence
  synthetic
ggcgcgccagtcctacaacattgtgctgcgtgccgcagcgtatgatgtcttcaccaactacgaggaaggtgacctcgccttcttgacgtacggtgatgacgtactactctgtgctaatcagccactgcctctggagcgctttcgcaagtcgcttgcaaagcttggatacaccattactccagctgacacgactcggaccgatg

SEQ ID NO: 6303 - DNA, 203 bp, Artificial sequence
  synthetic
ggcgcgccagtcctccacggacttggcggttcatcttggaccgctggagtacgcaaggctcttccgcccgtttgtggaagttgggtactgcgttcgccccttcggggatgcgcgcagggcctggctccgcaattttgacctgtgaggtgctccctaccagataccccagatttacccgttaccctaaacgactcggaccgatg

SEQ ID NO: 6304 - DNA, 203 bp, Artificial sequence
  synthetic
ggcgcgccagtccttgacctgtgaggtgctccctaccagataccccagatttacccgttaccctaaaattccctcccctttctcttcactcgccgaggccacgccgagtaggaccgagggtacagcgagtcttttagtttaaggtgttagatgtaaggtacgtgggctttcttttggtttacttcttccgactcggaccgatg

SEQ ID NO: 6305 - DNA, 203 bp, Artificial sequence
  synthetic
ggcgcgccagtccttccagaggagaggtgctggcttttgaagcattagctgaggacattcctgatacccttaatcaccaaactccatttgtaaataatgatgtagaagatgacatatttgatgaaacagagaaattcttagatgtttgctacagtgtgcttatgcaggcatggatagtaacatgcaagcgactcggaccgatg

SEQ ID NO: 6306 - DNA, 203 bp, Artificial sequence
  synthetic
ggcgcgccagtccttcacaatcaagatctttgctagcaaaccgctactatgctatggtgggagacattggcaagtacattgaacacagcggaatgggaggatttttcttaacacttaaatatggacttggaacaagatggcctacattggctcttgcagcattttctggggaactccagaaattaaaacgactcggaccgatg

SEQ ID NO: 6307 - DNA, 203 bp, Artificial sequence
  synthetic
ggcgcgccagtccttatttaaatcagcaatattttcagctaggagtagaaacagcaaggaaacagcagggagctgttgacaacaggacagcagaggacctcggcatgactgctgcagacaaagcagacctcactgcaaccatatcaaagctatccttgtcccaattacctaggggtagacaaccaatacgactcggaccgatg

SEQ ID NO: 6308 - DNA, 203 bp, Artificial sequence
  synthetic
ggcgcgccagtcctggacaaccaaacaaccagacaagtgacaaccagcagagattcaacccccccataccgcaaagaacatcaggtatgagcagtgaagagttccaacattcaatgaatcagtacatccgtgctatgcatgagcaatacagaggctcccaggatgatgatgccaatgatgccacagatcgactcggaccgatg

SEQ ID NO: 6309 - DNA, 203 bp, Artificial sequence
  synthetic
ggcgcgccagtcctctgattgagaacctgagtaaaatttccactgttacagataccaaaacccgccaaaaacgatttgcaggagtagttgttggacttgctgcattaggagtagccacagccgcacaaataactgcagctgtagcaatagtgaaagctaatgcaaatgctgctgcgataaacaatcttcgactcggaccgatg

SEQ ID NO: 6310 - DNA, 203 bp, Artificial sequence
  synthetic
ggcgcgccagtcctcatactgggagcatgtccaacaccaactgtacacccggaaatctgcttctgcatgatgcagcgtacatcaatggaataaacaaattccttgtacttaaatcatacaatgggacgcctaaatatggacctctcctaaatattcccagctttatcccctcagcaacatctcccaaccgactcggaccgatg

SEQ ID NO: 6311 - DNA, 203 bp, Artificial sequence
  synthetic
ggcgcgccagtcctgccggtaactccagcgaacaggctgcagcagcacggagttcctatgtaatccgttatcactcaaacaggttgattcagagtgctgttcttatttgcccattgtctgacatgcacacagcaaggtgtaatctagttatgtttaacaattctcaagtcatgatgggtgcagaaggtcgactcggaccgatg

SEQ ID NO: 6312 - DNA, 203 bp, Artificial sequence
  synthetic
ggcgcgccagtcctccttaatactattgaatgaagactccagattcaataataattgaaaggctctctatcttatgcaatagttatacgttttggctgtattagaatgttatagattctgctgtttttcccatatgaagcaatccttcaacaccgacttaggttcaattttctcatcatttactgttgcgactcggaccgatg

SEQ ID NO: 6313 - DNA, 203 bp, Artificial sequence
  synthetic
ggcgcgccagtccttactagggcacttcccgcatgatcttgacatttctgaaataagcccccttcacaataatgattgggatcaaattgccagagaagaatccaatcttgctgaacgacttggagtagctaaatctgaattaattaaacgtgtgcccgcatttagagcaactagatggcgtagtcatgcgactcggaccgatg

SEQ ID NO: 6314 - DNA, 203 bp, Artificial sequence
  synthetic
ggcgcgccagtcctctgatttagttcacattgttgacacacgatctggtctaatagttatcacccctgaacttgttatttgttttgatcggttaaatagtgttttaatgtattttacatttgagatgactttaatggtaagtgacatgtttgagggaaggatgaatgtcaccgctctctgcactattacgactcggaccgatg

SEQ ID NO: 6315 - DNA, 203 bp, Artificial sequence
  synthetic
ggcgcgccagtcctcctttattacacaagagattatagatatcctaattggttcaaaagcccttgataaggatgaatcaataactgttactacacaattgttagatatattttccaacctttctccagatttaattgctgagatgttgtgtctcatgagactttggggtcatcccactcttactgctgcgactcggaccgatg

SEQ ID NO: 6316 - DNA, 203 bp, Artificial sequence
  synthetic
ggcgcgccagtcctgtagaagtctaataaaacaacgacatcagagacatcatattcctatgcccaatccatttaatagacgtctattactcaatttcttagaagatgacagttttgatccagttgccgagcttcgatatgttaccggtggtgaatatctccaagatgacacattttgtgcatcttactcgactcggaccgatg

SEQ ID NO: 6317 - DNA, 203 bp, Artificial sequence
  synthetic
ggcgcgccagtcctatatcggagatcctcttggtacagctgtggcagatctcaagaggttaattaaatgtggtgctcttgaatcatggatactgtataatttactagcaagaaaaccagggaaaggttcatgggcaactttagcagccgatccatactcattgaatcaagaatatctttatcctcctacgactcggaccgatg

SEQ ID NO: 6318 - DNA, 203 bp, Artificial sequence
  synthetic
ggcgcgccagtcctcttctacacaagaaatcactctccatttgcacactagctcatcttgttgtgttagaagtgtagatggttgccttatatgtgagagcaatggagaggttcctcagatcactgttccctatactaatacatttgtatatgatcctgatccactagcagattatgagattgcacacccgactcggaccgatg

SEQ ID NO: 6319 - DNA, 203 bp, Artificial sequence
  synthetic
ggcgcgccagtcctcactaattccaggccctccttctcatcatgtattacgaccactaggagtgtcatccacagcttggtataaagggataagttattgtagatacctagaaacacaaaagatacagactggtgatcatctttatttagccgaaggaagcggtgcttcaatgtcacttctagaactctcgactcggaccgatg

SEQ ID NO: 6320 - DNA, 203 bp, Artificial sequence
  synthetic
ggcgcgccagtccttatttccaggagatactgtctattataatagtctttttagtagtggagagaatcctccacagagaaactatgcccctcttccaactcaatttgtacagagtgttccatataaattgtggcaagctgatcttgctgatgatagcaatttgataaaagattttgtcccattatggacgactcggaccgatg

SEQ ID NO: 6321 - DNA, 203 bp, Artificial sequence
  synthetic
ggcgcgccagtcctatggaaacggtgcagttacagacttatcaacaaaggatgcagttgcattcataatacataaagtaggagcagagaaagcatcccttgtccatatagatctcgaatcaactgctaatataaatcagcaaactctgtccagatcccagattcattcattaattatagcaactactgcgactcggaccgatg

SEQ ID NO: 6322 - DNA, 203 bp, Artificial sequence
  synthetic
ggcgcgccagtcctttagaactatcggtttcagtgcagctctagtaactgctactactcttcacaatgacggattcacaacaatacatcctgatgttgtttgtagttattggcaacaccatcttgaaaatgttgggagagtcggaaaagtaattgatgagatacttgatggtttagccaccaacttctcgactcggaccgatg

SEQ ID NO: 6323 - DNA, 203 bp, Artificial sequence
  synthetic
ggcgcgccagtcctctgtagctaaagatgctgattccaaaatcagcagtgctctggaggaagaactaggtgtgacagatacagcaaaagagagactaagacaccatctgacaaacctttcaggaggggatggtgcgtaccacaagcctacaggtggtggagctatagaagtggcaattgatcatacagcgactcggaccgatg

SEQ ID NO: 6324 - DNA, 203 bp, Artificial sequence
  synthetic
ggcgcgccagtcctacataacatttggagtcgaggacactgctgatcgggacaacaagaactggacaaatgacagcaatgaaagatggatgaatcactcgatcagcaaccacacaatcacgattcgtggtgcagaagaacttgaagaagagacaaatgatgaagacatcactgatatagaaaacaagacgactcggaccgatg

SEQ ID NO: 6325 - DNA, 203 bp, Artificial sequence
  synthetic
ggcgcgccagtcctttgcacgaaggctggccgacagaaaacagagactaagccaggcaaacaataaacgagacaccagcagtgatgctgactatgagaatgatgatgatgctacagcggctgcagggataggaggaatttaacaggatacttggacaatagaagccagatcaaaagtaagaaaaacttcgactcggaccgatg

SEQ ID NO: 6326 - DNA, 203 bp, Artificial sequence
  synthetic
ggcgcgccagtcctactctcagatgtcatcggactccttgacgtcgtcttatcctacaagcccacagaaattggagaagacagaagctggctccatggtatcatcgacaacccaaaagaaaacaagccatcatgcaaagccgacgataacaacaaagacagagcaatctcaacgtcgacccaagatcacgactcggaccgatg

SEQ ID NO: 6327 - DNA, 203 bp, Artificial sequence
  synthetic
ggcgcgccagtcctggaaactagcagcacacatagtacaagaataactgatgtcattaccaacccaagtccagagcttgaagatgccgttctacaaaggaacaaaagacggccgacgaccatcaagcgtaaccaaacaagatcagagagaacacagagttcagaactccacaaatcaacaagtgaaaacgactcggaccgatg

SEQ ID NO: 6328 - DNA, 203 bp, Artificial sequence
  synthetic
ggcgcgccagtcctctgtacgaagaacagttagatctggagaaatgatagtatacatggtagattcgatccatgctcctctactaccatggtccagccgactgagacaagggatgatatataatgccaataaagtagctctagcacctcaatgtctcccagtcgacaaagacatcagattcagggttgcgactcggaccgatg

SEQ ID NO: 6329 - DNA, 203 bp, Artificial sequence
  synthetic
ggcgcgccagtcctgccaacttgcatggaaaaaagcagtttgctatcctttaatggatgtaaatccacatatgaatctagtcatctgggcagcttcagtagaaatcacaagtgtcgatgctgtgttccaacctgcaattccgaaagaatttcgctattacccaaatgttgttgcaaaaagcatcgggacgactcggaccgatg

SEQ ID NO: 6330 - DNA, 203 bp, Artificial sequence
  synthetic
ggcgcgccagtcctaaatcaggaggatataagtctacactcctcaataatgacacccattagctctaaatcgtaccattaatcaaatacagatcaattcgatacaatcagttcaaataagaaaaacgtagggacaaagtcctctaccaacatcaaggaagacaagagtctcaaaaagctcagcctaagcgactcggaccgatg

SEQ ID NO: 6331 - DNA, 203 bp, Artificial sequence
  synthetic
ggcgcgccagtcctcagtctccattagacctgtagacatttctttaaatcttgcatctgccacaaatttcctagaggaatccaagacagagctcatgaaggcaagggcaatcatatcagcagttggaggatggcacaacacagagagtactcagataatcatgataataattgtgtgcatacttataacgactcggaccgatg

SEQ ID NO: 6332 - DNA, 203 bp, Artificial sequence
  synthetic
ggcgcgccagtcctaaagtgccaaaataatcaaagagacaatcacagaattaatcagacaagaagtaatatcaaggaccataaacatacaaagttcagtacaaagcgggatcccaatattgttaaacaagcaaagcagagatctcacacaattaatagagaagtcatgcaacagacaggaattggctccgactcggaccgatg

SEQ ID NO: 6333 - DNA, 203 bp, Artificial sequence
  synthetic
ggcgcgccagtcctgactaccttcattatcaattggtgatgcaatatatgcgtattcatcaaacttaatcactcaaggatgtgcagatatagggaagtcatatcaggttttacaattaggttacatatccttaaattcagatatgtatcctgatttaaacccggtaatttctcatacctatgacatcacgactcggaccgatg

SEQ ID NO: 6334 - DNA, 203 bp, Artificial sequence
  synthetic
ggcgcgccagtcctacgacaacaggaaatcatgttctgtaatagctgcaggaacaaggggttatcagttatgctccttgcccactgtgaatgagactacagactactcgagtgaaggtatagaagatttagtatttgacatattagatctcaagggaaagaccaaatctcatcgatacaaaaatgaagcgactcggaccgatg

SEQ ID NO: 6335 - DNA, 203 bp, Artificial sequence
  synthetic
ggcgcgccagtcctatataacttttgaccatcctttttctgcaatgtatccgagtgtaggaagtgggataaaaattgaaaatacactcattttcctagggtacggtggcttaacaactccgctccaaggcgacactaagtgtgtgataaacagatgtaccaatgttaatcagagtgtttgcaatgatgcgactcggaccgatg

SEQ ID NO: 6336 - DNA, 203 bp, Artificial sequence
  synthetic
ggcgcgccagtcctaagaattatgggagcttatcgactctttatttcccaatcttggtgaggatgtatataatattatatcactactagaacctttatcacttgctttaatacagttggatgaccctgtaactaatttaaaaggagctttcatgagacatgttttgactgagctacatacaattttaacgactcggaccgatg

SEQ ID NO: 6337 - DNA, 203 bp, Artificial sequence
  synthetic
ggcgcgccagtccttattacatgagaaattgatcaaaaatatgaataagtgcaattcaaatgggtattgggatgaaagaaagaaatctaaaaatgaattcaaagctgcagactcatcaaccgaggggtatgagactctgagctgttttttaaccaccgatttgaaaaaatactgtctcaactggagatcgactcggaccgatg

SEQ ID NO: 6338 - DNA, 203 bp, Artificial sequence
  synthetic
ggcgcgccagtcctctgacaacatcgacttagatacacttagcaatggaagtcctgccatacgtatcccttattttggttctgctactgatgaaagatcagaggctcaactaggttatgttaagaacttaagcaagccggcaaaagcagcaataagaatcgcaatggtttacacttgggcttatggaacgactcggaccgatg

SEQ ID NO: 6339 - DNA, 203 bp, Artificial sequence
  synthetic
ggcgcgccagtcctaaatgagaaaactttcatttttagctagacatctagcatacttgtgtagtttggcagagatagctaaagagggaccaaaattggaatctatgacatctctcgaacgactcgaatcattgaaagagtatctagaacttacttttttagacgatcctatattaagatatagtcaatcgactcggaccgatg

SEQ ID NO: 6340 - DNA, 203 bp, Artificial sequence
  synthetic
ggcgcgccagtcctatatagtagacacaaaaaattgtattatcacatttgatagagtattaagagatacaatctttgagtggactcggataaaagacgcagataagaagctaagacttacaggtaaatatgatctatatcctcttagagattcaggtaagttaaaagttatttctagaaggcttgtaacgactcggaccgatg

SEQ ID NO: 6341 - DNA, 203 bp, Artificial sequence
  synthetic
ggcgcgccagtcctgtccttcactttgaaaagaaagactaagcaaagatcagctggatggaccatgggtgtgattttcatatggatgatgggaaccatattgtcaattgaagttgttaaaaacaacgggggttggctcatgaaaccccgtcttcaagacactggatccacggtgcctgttggaaaaggcgactcggaccgatg

SEQ ID NO: 6342 - DNA, 203 bp, Artificial sequence
  synthetic
ggcgcgccagtcctttggaagaccgttgtggtgctttgtctggcagctttggcactaccatcatttgcaaccaattgtgtgaccatatcacagagagaaattcttaaaggagtggaaggagtcacatggttcgaggtgcttttggaaaagactagctgcattaccattgcagcacaaaacagaccatccgactcggaccgatg

SEQ ID NO: 6343 - DNA, 203 bp, Artificial sequence
  synthetic
ggcgcgccagtcctcattgacctctggctagacgatgtgaaacaaagctcggtgatggccagcaaagaattctgcatgaaggtcgaagtgtcagaaactcaaatagctgctaggtgccctactcaaggagatgcaactttgcctatggaagggaaggatgattatgtttgcaagaaaaccttcagtgacgactcggaccgatg

SEQ ID NO: 6344 - DNA, 203 bp, Artificial sequence
  synthetic
ggcgcgccagtcctcagaggatggggcaatggatgtgctctttttgggaaaggaagtattgtgggctgcgctaaagtagcctgcaatactgctaatgttatgaaaactcatatctatgagcaacaagctgtccagtatgtggttggcatagaggtacatagaggggaagtcatcaaagcaaatgtttccgactcggaccgatg

SEQ ID NO: 6345 - DNA, 203 bp, Artificial sequence
  synthetic
ggcgcgccagtcctccgtgtgacagttaaaaatgtgaaggaaaattcagatgatcaaggaactctgatcactacaaatccatttgttgaaagcaatggagccactatcttcctggaacttgaaccagtctatggattgtcaacaataaaagttggggacatcacataccaatggaatcagcaagggagcgactcggaccgatg

SEQ ID NO: 6346 - DNA, 203 bp, Artificial sequence
  synthetic
ggcgcgccagtccttgtcattgggaaggctgtgagaaaaatcaccaacgacatccataaaacaattgtcgttgggagtgctttttggaattcagatcaaagattctcagccattaatttgatggatctaattaggttgccctttgcttttttatttgggggacttggattcatgatgaagatgatcatcgactcggaccgatg

SEQ ID NO: 6347 - DNA, 203 bp, Artificial sequence
  synthetic
ggcgcgccagtcctgaatgaagttaatgactggtatggggggtacatgtactacccagatgatccagagacattcatcgccagcttggtcaatgataagaaagagcattgtggtacttatccagcaaacgccttggaactagcaatgtggcagaagcttgaatctcagatcaatttgttgttgaaagacgactcggaccgatg

SEQ ID NO: 6348 - DNA, 203 bp, Artificial sequence
  synthetic
ggcgcgccagtccttgtcattaaggaatggtgttgccgtcactgcaaactgcctccccttaaattcaccatggaggaagagtgctggtacgccatggaaatacgaccaacttccaaagttaatggtttggtgatggcatcagatggtgagaaaccactgtttgaatggtgttcatttgctctcctgaccgactcggaccgatg

SEQ ID NO: 6349 - DNA, 203 bp, Artificial sequence
  synthetic
ggcgcgccagtcctggcatatatgatggaagtggtgtttgacttgagaccaggcatgctgcttggccttatgttgaacaagacatggaagtttgaaagacttgttgccatgattggttgtctgtcattcttacaacaagccactattgaatggcggacagcctgggttctgctagattgcattgcagtcgactcggaccgatg

SEQ ID NO: 6350 - DNA, 203 bp, Artificial sequence
  synthetic
ggcgcgccagtccttgagaaagaagaaagtaggatggagactcttattcttggggtgggaatgatagcaacagaattccattgggtgggtttacccctgacagttcttgtccttggcttgaggagatggattgtgaatggaaaagaacaaaggagtctgatagtctatggtggaagatcagagagtgccgactcggaccgatg

SEQ ID NO: 6351 - DNA, 203 bp, Artificial sequence
  synthetic
ggcgcgccagtcctcaatgatgaaactgagggagaccttcttgagggagtttatagaattacagcagcctccatttttgggagaaagcaagttggaataggtgtcctcaaggaaggagtgttccataccatgtggcacgtcactagaggaagtgctctgcgagtgagagggagagtgctcgccccagacgactcggaccgatg

SEQ ID NO: 6352 - DNA, 203 bp, Artificial sequence
  synthetic
ggcgcgccagtcctaacagcctggtttgtgccttctttaaacacagccaactcaatggcaaaagtccttagaggtctaggaaagaaagttgtggtgcttacaagcaagaccttccatgataactatccgaagctcaatgatgagaagcctgattttattttgactactgatatctcagaaatgggtgccgactcggaccgatg

SEQ ID NO: 6353 - DNA, 203 bp, Artificial sequence
  synthetic
ggcgcgccagtccttaacttggatgtggaaagagtcattgaccctagaacaacattgaagcctgttgagaaaggaaatgcagttgaaatcagtggtgaaaggaagataactccagcctctgcagcgcaacgacgcggcagggtcggaaggactaaaggaaagaaggctgattacatttaccaaggtgacgactcggaccgatg

SEQ ID NO: 6354 - DNA, 203 bp, Artificial sequence
  synthetic
ggcgcgccagtcctcctgcttgctcaatgtgactttacaccatggttggcttggaaagtggcttcagatggcaagagcattgagaaccgagagtggctcaagagtgggccaaaggaacacttggtgacagatgaaaactgtgaagcggttacatacaagactcctggtggaaaggttgaaagactccacgactcggaccgatg

SEQ ID NO: 6355 - DNA, 203 bp, Artificial sequence
  synthetic
ggcgcgccagtcctcaagggattcaggatggcccaagaatcaatgccaacagcccttcttactgtgatgcaagctctaataataggcactggattgatcatgttcttggggtggatgtgttcgagtaggaaggtggacagaatgatgctgggcactctgttgatagtgggatgtagtgtcacagcatgcgactcggaccgatg

SEQ ID NO: 6356 - DNA, 203 bp, Artificial sequence
  synthetic
ggcgcgccagtcctaatgttcacccagagaattgttgctggtagtgtcagtggaaaactggacacattgaatggattgagaaatggatttgtgagcacctcgatgtcattgggtgacttgtcgcttttcatctcattctgcagaaacatgagtcctctaactactgtgacagggctggttctagccgccgactcggaccgatg

SEQ ID NO: 6357 - DNA, 203 bp, Artificial sequence
  synthetic
ggcgcgccagtcctggctatcctcctagctgtcatcaatgtggttgttgtccgtgaaccatgggcaatgcttgaagctggactagtgctcctcgctgcaattaagtttgcggctgatggggctaaagaaactttgataacgcttcctgtcctgagtgggattggtgctttgattagaggggattacttcgactcggaccgatg

SEQ ID NO: 6358 - DNA, 203 bp, Artificial sequence
  synthetic
ggcgcgccagtcctagctagggaagcactggctaagggaaaaaccaacaccggccatgcggtctccagaggaacagcaaaactagcctggattgatgagaggggtggagtggagttgaaaggaagtgtcgtggacctgggctgtggaagagggggctggagttactatgcggcttcgcaaccaaatgtcgactcggaccgatg

SEQ ID NO: 6359 - DNA, 203 bp, Artificial sequence
  synthetic
ggcgcgccagtccttgaggtgccagaagaagaagtccagatgagagtagacaaaatcaaggctgagaaatcaggcacctggtgttttgattctaatcacccttatcgcacgtggaactatcatggatcataccgtgtgagggatgtgggaacaagagcttcagcagtcaatcatgttgtgaagttactcgactcggaccgatg

SEQ ID NO: 6360 - DNA, 203 bp, Artificial sequence
  synthetic
ggcgcgccagtcctaaccaaaggtgggaaagtgagaacatgcacaaaagaagagttcatccaaaaagtaagatctcatgctgctatcggggcctggtcgtcagatatggaagggtggagctcagctgtggaggcagttgacgatcctaggttctggaacatggtgcagaaagaaagagatttacacctcgactcggaccgatg

SEQ ID NO: 6361 - DNA, 203 bp, Artificial sequence
  synthetic
ggcgcgccagtcctgcagcttatcagaatggcagaagccgaaggagttcttggagcaacttttgaggacttcgggattgacagatggttgcaggaacatggtgaagaccgagttgaaagaatgctggtcagtggtgatgactgtgtagtcaatgctatagatgaaaggtttgggtcaagtctgaattgcgactcggaccgatg

SEQ ID NO: 6362 - DNA, 203 bp, Artificial sequence
  synthetic
ggcgcgccagtcctgacagtcaaccaggggggatgtgttggagtggaatcaacaggctgtctagccaaggcgtatgcgcaaatgtggcttttgctttatttccacagaagagacctcagaacgctggctctagctgttatgtcagctgtgccaagcaattggattccaacaggacgcaccacttggtccgactcggaccgatg

SEQ ID NO: 6363 - DNA, 203 bp, Artificial sequence
  synthetic
ggcgcgccagtcctggcaaccagtgggctagccacatgggtatgacgcacccaccctctgcattcttgtaaatactttggccagtcattgtaaataggttagggagccgggcccaacccagctagggatagcctttctggggtaaggactagaggttagtggagacccccggcttttgaagttagggccgactcggaccgatg

SEQ ID NO: 6364 - DNA, 203 bp, Artificial sequence
  synthetic
ggcgcgccagtcctcctgggaaattagctaaggggataaccactctgatgaacatcctccggactctgctaaacggaatcttgggacgcaaaaaacaaaggagaggaggaactgaaagcctgttccccataatgtttctaactggattgatggctatgcaggtatcccaaaatggtgatggttggctgcgactcggaccgatg

SEQ ID NO: 6365 - DNA, 203 bp, Artificial sequence
  synthetic
ggcgcgccagtcctaatgtgtgggttaaatatccgctttgtaaacctggaggccacaggctaaaacgatcgctgtcaataactgaacatccatcgtctgtctcactagacaaaccaactttgtggcatcactggaacagtgtcaatgatcgaattggcaagagtgaagagtggatagttaccaatgctcgactcggaccgatg

SEQ ID NO: 6366 - DNA, 203 bp, Artificial sequence
  synthetic
ggcgcgccagtcctatgcgtgaggaacatctcgacggatatgtctgcaagagaagcttcagtgatagaggctggggaaatggttgtggtttgtttggaaaaggcagcatcgttggatgtgctaaggccacttgtggggcaaatgacatcatcaaaagctactcgtatgattcaccaaaagtcaaatatcgactcggaccgatg

SEQ ID NO: 6367 - DNA, 203 bp, Artificial sequence
  synthetic
ggcgcgccagtcctgtttttaaatcattggtcaaagctgaagaagtgaccaaaactagtaactcttaccatctcaccggaggacatgttgattgtagagtgagtactctcaatcttcgaatgaagggtttgacgtatcaaatgtgttcttctagctttgtgtggcacaaaagaccagtggccacgcaacgactcggaccgatg

SEQ ID NO: 6368 - DNA, 203 bp, Artificial sequence
  synthetic
ggcgcgccagtcctattgacttggccatgtggaaagcacttgaggaggagataaactggtttctggaagatcagtcagttgattggaggataatggttggaaatgaagaaaaggttttccacaaaacaaactcaagtggctgggaaagaagagctgggaggaattctctatcatggaagaactgggcgcgactcggaccgatg

SEQ ID NO: 6369 - DNA, 203 bp, Artificial sequence
  synthetic
ggcgcgccagtcctctagaggattgtgataaaagaggacattctgttagaagtaccacccaaggaggggtaacaatacctgactggtgttgtaaacactgtgttttgccacctttgaaattcaccaatgccgatggatgttggtatgccatggaaatcagaccactgaaaacgacacctggactagttcgactcggaccgatg

SEQ ID NO: 6370 - DNA, 203 bp, Artificial sequence
  synthetic
ggcgcgccagtccttatgcaggaagtatgacagctttggaagctcagtcatggggagttctctctgtgatgttgctgttttacatgggctttctaccgaagattgcaaaagaaagatggagtgtgccaactgccttcatgtttttcgtctttgccatcacagggttgattgattgcagggattttctccgactcggaccgatg

SEQ ID NO: 6371 - DNA, 203 bp, Artificial sequence
  synthetic
ggcgcgccagtccttttcaacatgtgactatggagtgggaatcagtttggaaagttttggattccttgggctttgttgtctatgggttcttactttctaagtctggaatgcaaagccacgtgttcatgctgtttgtagtgtcactgacttggatggatagcatagtaatgcaacatgctctagcacttcgactcggaccgatg

SEQ ID NO: 6372 - DNA, 203 bp, Artificial sequence
  synthetic
ggcgcgccagtcctactgattacacagccatactcggcattgttatggcaataggagcagccatttgcaaaaatggtctggaatcaagtggatggatgatcggaatcatgggaattttcctagtcttttttctcctccaattaagcaaaggagagatgacagctgaatgggctggatactgtgaatggcgactcggaccgatg

SEQ ID NO: 6373 - DNA, 203 bp, Artificial sequence
  synthetic
ggcgcgccagtcctttccataccatgtggcacgtcacacgtggtgctgtattgaacatctgtgggaggaaaatcgtaccagaatgggccagcatcacagaagatctaatatcatataatggtgggtggagattgttcactagatgggatggaacagaagttcaagttcacgcttacacccctgatggacgactcggaccgatg

SEQ ID NO: 6374 - DNA, 203 bp, Artificial sequence
  synthetic
ggcgcgccagtcctagttctatagctcaaactgagaagaaggaagaagatgttccacaaccaaagacacttgaaggagatggctggttgtcaaaagggaaaataaccgtaattgatgcccatcctggaagtggtaaaacacatagaatactaccaaatttagttaaaagggctgctgagagaaagatgcgactcggaccgatg

SEQ ID NO: 6375 - DNA, 203 bp, Artificial sequence
  synthetic
ggcgcgccagtcctaggacacttgttttagctccaacacgggttgtgataaaagagatggaaagtgctctcaaaggaatggatatcagttttcactcatcggccgtgtcaacgaagaccccaggatcacttgttgatgtcatgtgccatgctacttttgtaaataggaaattaattcatactccacagcgactcggaccgatg

SEQ ID NO: 6376 - DNA, 203 bp, Artificial sequence
  synthetic
ggcgcgccagtcctgatgttgaaaagatgattcctgatgagccatggaaacaaggttatgaatggataacagactttgaaggaagaacagcgtggtttgtgccatcatacaatgcagctcagggaatctcaaaagccttgagagagagaggaaagaaagtcctcattctgacaagcaagacctttcatcgactcggaccgatg

SEQ ID NO: 6377 - DNA, 203 bp, Artificial sequence
  synthetic
ggcgcgccagtcctgacaactatcctaagatacagtcagaaaaacctgatttcatactcaccactgacatttcggagatgggtgccaatttagatgttgatagggtaattgatccaaggacaactcttaaaccaatggaaaaaggcaatattgtggaggttagcggtgaaatatcaataacgcctgcccgactcggaccgatg

SEQ ID NO: 6378 - DNA, 203 bp, Artificial sequence
  synthetic
ggcgcgccagtccttatctgattgaaccaaagggaactacattttggacccttccagtggttagtggattaacatcactggtccgaggagatttctttggtttgattcccatttctttcagggtctggctatatgccagaagtgatagacgaggtatagtaaccagtcatcacacattgggtgaaaagcgactcggaccgatg

SEQ ID NO: 6379 - DNA, 203 bp, Artificial sequence
  synthetic
ggcgcgccagtccttttattcccttgtcaggtcatgtggttgacctgggctgcggccgcggcggctggagctactattgcgcagcacaaacaccagtaaggaaagtcaatgcttataccttaggtactggagctcatgagaaacctcgtctggtcgaaagcttaggttggaacctcatcacctttaagcgactcggaccgatg

SEQ ID NO: 6380 - DNA, 203 bp, Artificial sequence
  synthetic
ggcgcgccagtcctatgcagggatggagtgatgccaaggaagcagttcatgaccccaggttttggaatatggtggacaaagagaggaaactacacctggaaggaaaatgtgaaatgtgcatctataacatgatgggtaaaagagaaaagaaaccaggtgagtttggatgtgccaagggtagccggacccgactcggaccgatg

SEQ ID NO: 6381 - DNA, 203 bp, Artificial sequence
  synthetic
ggcgcgccagtcctgaaagattgtctcgtctcttgattagtggtgatgactgcgtggtaaacgcatgtgatgaaaggtttgggagaagcttgacatggttgaacaccatggagaaaatccgcaaggacattgacttgtgggctccatcaaatggatatgagaactttgaaaaagttgagttctgctcacgactcggaccgatg

SEQ ID NO: 6382 - DNA, 203 bp, Artificial sequence
  synthetic
ggcgcgccagtcctaaccactttcatgagctgatgttgaaagatggacgtcagctggtcgtcccctgcaggagtcaaaatgaattagttggtagagcttctgtaaatcagggtggaagtgcaaccgttgcagggactgcgtgtctagccaaagcctatgcccaaatgtggaatttgttgtattttcaccgactcggaccgatg

SEQ ID NO: 6383 - DNA, 203 bp, Artificial sequence
  synthetic
ggcgcgccagtcctaagacaaacatcacaacatggaagaatgtggcctacctgcccagaggacaagacatgtgttgtggcagtcttattggcagctcaaaaagagcaacttgggccaaactcattcctggagcagttgaaaaagtgagagggatgattgggaatgaaaattacgtcaactaccttggacgactcggaccgatg

SEQ ID NO: 6384 - DNA, 203 bp, Artificial sequence
  synthetic
ggcgcgccagtcctcaagacatgtgttgtggcagtcttattggcagctcaaaaagagcaacttgggccaaactcattcctggagcagttgaaaaagtgagagggatgattgggaatgaaaattacgtcaactaccttggagcaatgggacgctatgaatgtgatgatgtctcattccaactgtattaacgactcggaccgatg

SEQ ID NO: 6385 - DNA, 203 bp, Artificial sequence
  synthetic
ggcgcgccagtccttgcagagatgtcaaaaatgtgatggtgacttatcccacgtgtaagaggaacaccaggaccagacgggatgtcacaatccaagaccatccaccgtctgtcacactcaccaaaccatctcttctcaagcatgtgggaggggctgaggagcatcttcaaaaggttgaaaattggatccgactcggaccgatg

SEQ ID NO: 6386 - DNA, 203 bp, Artificial sequence
  synthetic
ggcgcgccagtcctttaatgaacagctggaaagttgtattggtgaccgtggccttgctctatggatttgggaacaagctacaaacgtggattctcataattgtgaccttgattgtggctccagcttatgctagcacctgtgttagtgtggccaaaagggatatgatccgtggtgacctcggaacaacccgactcggaccgatg

SEQ ID NO: 6387 - DNA, 203 bp, Artificial sequence
  synthetic
ggcgcgccagtcctggagaggcgcatctggcagaagaggcaaactctgactacgtgtgtaagcgaggtttcagtgacagaggttggggcaatggatgcggcttatttgggaaagggagcatagtggcatgcatcaagactacatgcaagaatgatgctaacatcataaagagctatgtctatgatgctcgactcggaccgatg

SEQ ID NO: 6388 - DNA, 203 bp, Artificial sequence
  synthetic
ggcgcgccagtcctaaccaaagaactgctatcttcaaagctttggtgaaagccaatgaaatctccaagtccaacaataagtacattctggatggaggacacttgagttgcaggatcggagtcaatggactgaagatggttggggctacctattctcaatgcacaaaacctttcgaatggatcaagaaacgactcggaccgatg

SEQ ID NO: 6389 - DNA, 203 bp, Artificial sequence
  synthetic
ggcgcgccagtcctccagtcctaactcaacatggcacagtggtcatggaagtgaagtacacaggtgaaggagccccatgccgtataccattcagagttgaacgagtggacaagcctatggaaaatgttggcaatctggtcacaggaaacccatatgcctcacaaaaggacgctgtggtgttccttgagcgactcggaccgatg

SEQ ID NO: 6390 - DNA, 203 bp, Artificial sequence
  synthetic
ggcgcgccagtcctgttggagagataggatgtatgattgatgtgggaaggagagagctgacttgtggggatggagttgtggtctggaaccaactggatgattggtgggaaaagtaccaatattatccagatgaacctgctgttttcttgggttccctcatggaagacaaagagaagcattgcggctaccgactcggaccgatg

SEQ ID NO: 6391 - DNA, 203 bp, Artificial sequence
  synthetic
ggcgcgccagtcctgtgggaggacttgtcatggcttttgatgaagaaccagtgtggaagccatggggtattatgggattgatagtcctgttgtacatgggcttctttccttctctgggcaatggaaaattttcaatgggttttggcatggctgtgttcctgttgtgcgtgactggaatgctctcattacgactcggaccgatg

SEQ ID NO: 6392 - DNA, 203 bp, Artificial sequence
  synthetic
ggcgcgccagtccttcggtagacccaatagccattgtcgtgacgttgatggctttgggggctgctgtggccaaggatggcactgccgttcagcctctaacactgggactcttttctgcagtcatcttgttcctattgcttcagctgacgggtgggcccctcatagctgaatgggcagggtacgcggatcgactcggaccgatg

SEQ ID NO: 6393 - DNA, 203 bp, Artificial sequence
  synthetic
ggcgcgccagtccttggaaatccaatgccttgcgctactctggtcatctggacttagaagtcaagaagttgagcgatgggagactggtcaacacagctaaggaaaataccaccaccactgatggactcatactaggggctggaatgctagcttctggctttagctgggtagctgtgcctgtgacttttcgactcggaccgatg

SEQ ID NO: 6394 - DNA, 203 bp, Artificial sequence
  synthetic
ggcgcgccagtcctacttactgtagctcaatagctcaggccaatgtgccagcagaaaccgaacctgaagtgctgaaaaccaactggacatcaaagggaaaactcaccgtcattgacgctcatccagggagtgggaaaacaaagaaaatattgccacgccttgttgatgaagctgttggaagaaagcttcgactcggaccgatg

SEQ ID NO: 6395 - DNA, 203 bp, Artificial sequence
  synthetic
ggcgcgccagtcctcgcacactagtccttgctccaacaagggttgttgtgaaggagatggagcaggcactcagaggcaagcctgttagttttcattcttcagcagcgagtaagaaggtgccaggagcactggtggatgttatgtgtcatgcaacttatgtccagcgacggatgatgcctattcctcagcgactcggaccgatg

SEQ ID NO: 6396 - DNA, 203 bp, Artificial sequence
  synthetic
ggcgcgccagtcctaagaactatgagcttgtcatcatggatgaagcacattggacagacccctctagcattgcggcccgaggattccttgattctcagcggaaggaaaatcacctttcactggtgctcatgactgccacaccacctggaactgatgatccctggcctcaaagcaacgctccaataaaccgactcggaccgatg

SEQ ID NO: 6397 - DNA, 203 bp, Artificial sequence
  synthetic
ggcgcgccagtccttcagctgctcaaaggagaggaagagtggggcgtgaggagggacgtcaagctgagtacgtctatcagggcgaagttgaccccgatgacggagacttggtgtgctggaaagaggcccagatactcctggataacatggaaggacgattcaaaacggccagtgtcttctatgagcctcgactcggaccgatg

SEQ ID NO: 6398 - DNA, 203 bp, Artificial sequence
  synthetic
ggcgcgccagtcctcagagcaaagttgacagggtcaccctgggggctctgttgctaactgctggctcagcggttctttggatgggtggagcagccccttgtgtcgtgggtgggagcctgatatgtgggtttgttttactagtagcattgtcaccagaggagggaatgcaacgcactcaagttgactcacgactcggaccgatg

SEQ ID NO: 6399 - DNA, 203 bp, Artificial sequence
  synthetic
ggcgcgccagtcctactctggctatgtttgtgttgacactctacaccttgatagccgctgttgtcgctaatgaaatggggttcttggaacgaacaaagaaggacttccgagagttttttaggaaagaagtgaacatggacggtgagccaacccagtggagaatttttgacctcgacatctgcccaatgcgactcggaccgatg

SEQ ID NO: 6400 - DNA, 203 bp, Artificial sequence
  synthetic
ggcgcgccagtcctaatgcccaggcattcttcctctacaagagtagactcgtccacgaaattgacagagccgaagcagtttctaacctcagtaaaggacggaccaacacaggacacgcagtgtcgagggggacaagcaagcttgcttggatgcatgagcgcggttacgttccactcaagggagttgtgcgactcggaccgatg

SEQ ID NO: 6401 - DNA, 203 bp, Artificial sequence
  synthetic
ggcgcgccagtccttacagcataagggatgttggcacctcagctagtgccccaaatcatgttgtcaagcttctggcatggccttggttgaaaatagagaaagtcgtgttaatggccatgacggatacaactgcctttggacagcagagagtgtttaaagagaaagttgacaccaaagcacccgaacctcgactcggaccgatg

SEQ ID NO: 6402 - DNA, 203 bp, Artificial sequence
  synthetic
ggcgcgccagtcctagtggagatgactgcgttgtcaacgctttggatgagaggtttggcaaagctctgacatggcttaacaccatggaaaaaacccgtaaagacatagaagcatggaaaccatcacgggcttatagaacctggcaggaagtcgagttttgctcacaccacttccatgagctttttctccgactcggaccgatg

SEQ ID NO: 6403 - DNA, 203 bp, Artificial sequence
  synthetic
ggcgcgccagtcctcgagacggaaggaagctgatcgtcccgtgccgggaccagcatgaattggttggacggtcaatggtctcgcagggtgggagctctggagtggcagggacagcttgtctggccaaagcatacgcccagatgtggctgatgagctatttccataggagagacctcagaactcttggacgactcggaccgatg

SEQ ID NO: 6404 - DNA, 203 bp, Artificial sequence
  synthetic
ggcgcgccagtcctcaggatttgtcatgctccagcctgatagacaacccaaccagagcgcagtgggcaaaactactcaaaggggctgtcatgaaagtgagagagatgataggccgagagcattactctgactacttgagcaatatgggtaggtaccaagaagggacggaagagttccacatgtggtaacgactcggaccgatg

SEQ ID NO: 6405 - DNA, 203 bp, Artificial sequence
  synthetic
ggcgcgccagtcctgtatacgagtttagctcaatcctcgtatacaatattgggcgtcaccaaatatagatttggcataggcaacaccccgatgcgaaggccgaaaagggctaaccatgcccttagtaggactagcaaaaaatcggggactagcccaggtggtgagcttcctggatgaccgaagccctgcgactcggaccgatg

SEQ ID NO: 6406 - DNA, 203 bp, Artificial sequence
  synthetic
ggcgcgccagtcctagtacagggcagtcgtcaacagttcaacacgcagaataggtttgcgtcttgatatgctgtgtggacgagggcatgcccacggtacatcttaacctatccgggggtcggataggcgaaagtccagtattggactgggagtacagcctgatagggtgttgcagagacccatctgatcgactcggaccgatg

SEQ ID NO: 6407 - DNA, 203 bp, Artificial sequence
  synthetic
ggcgcgccagtcctccctcaccagcgaggaactagagacatacccactaggcttaaggacttgcccagaaaaggggattgtaggagtggcaacaacaagggcccagtgagtggggtttacataaagccagggccagtttactaccaagattactcaggccccgtctaccatagggccccattggaactcgactcggaccgatg

SEQ ID NO: 6408 - DNA, 203 bp, Artificial sequence
  synthetic
ggcgcgccagtcctcttcgaggaatccaccatgtgtgaggtgacacgaaggctgggtagaaccactggcagtgatggacttctataccatgtatatgtatgtctagacgggtgtataataatcaagacagccagcagagcgcaacaaaaagtgctcaagtggaccaagaacaccctaaactgtcctttcgactcggaccgatg

SEQ ID NO: 6409 - DNA, 203 bp, Artificial sequence
  synthetic
ggcgcgccagtcctgtcaggcatacaacacgccatgtatctcagaggggtgaacaggagcttacacggaatatggccagaaaagatatgcactgggatcccgacacacttggcaacagacactgagttaaaaagaatatcaggaatgatggatgcaagtgaggaaaccaattacacttgttgtaggttcgactcggaccgatg

SEQ ID NO: 6410 - DNA, 203 bp, Artificial sequence
  synthetic
ggcgcgccagtcctgcagagacatgagtggaacaagcacggatggtgtaactggttcaacatagaaccctggatagcattgatgaacagaacccaagccaacttgacggaaggcccccccccgaaggagtgtgccgtcacatgcagatatgacaagaacacggaaactaacatcgtcacacaagctagcgactcggaccgatg

SEQ ID NO: 6411 - DNA, 203 bp, Artificial sequence
  synthetic
ggcgcgccagtcctggacaggccaacgatgttaactggctgcaaaaaagggaagaacttctccttcgcaggtacggtgataaaggggccctgcaattttgacgtgtccctggaagacatcctgttcaaagatgaagggtgcggtaatatgatgcaggatgcagccatccaagaggtcgacggaatcaccgactcggaccgatg

SEQ ID NO: 6412 - DNA, 203 bp, Artificial sequence
  synthetic
ggcgcgccagtccttaccgtttttatttttgaagaggtaagtcaggtcgtaaagctggtacttagggcattgagggacttaactaggatctggaatgctgcttcaaccactgcttttttgatatgtttagtcaaagtgttgaggggacaggtaatccagggcatagtgtggctcttactggttacgggcgactcggaccgatg

SEQ ID NO: 6413 - DNA, 203 bp, Artificial sequence
  synthetic
ggcgcgccagtcctggcacaaggggcaataacttgtgaacccgaataccagtatgcactggcaaggagtaaaaggataggcccactgggagcagaggatctagtgacaacgtggcatgactacaaatttgacctgaaaatacaagaccccttagtaatggtgtattgtaaaaacgaccagttttttgtcgactcggaccgatg

SEQ ID NO: 6414 - DNA, 203 bp, Artificial sequence
  synthetic
ggcgcgccagtccttggcaagaggtgcaaggcaggagaggccagatacctggccaagatacactggcgggccttgccaacttctgtggtcttcgaaaaggttctggaagaaaacccaccagaggaactaccactagaagataactttgaatttggactttgcccttgtgactctagaccagtcgtgaacgactcggaccgatg

SEQ ID NO: 6415 - DNA, 203 bp, Artificial sequence
  synthetic
ggcgcgccagtcctgggcaatttcaataccaccttgatcaaccacagtgccttccaactagtctgccccataggatgggtgggaaccattgaatgcacgttggtcaacacggacacactagcaaccacagtagtcaagaggtatacaagaacaacccctttccctatgcgggctgggtgcgtggtgtacgactcggaccgatg

SEQ ID NO: 6416 - DNA, 203 bp, Artificial sequence
  synthetic
ggcgcgccagtcctggggaaggctggttacaggtttgtgagtgaagaaccatgcaacagggaaggtgttgaaatctccacaaaaggcaagctcaagtgtataatagagaagacacaagtaaaggtatatgctgctgacaacaccttagggcctatgccttgcaaacccatggaaattatatcaagtgacgactcggaccgatg

SEQ ID NO: 6417 - DNA, 203 bp, Artificial sequence
  synthetic
ggcgcgccagtcctattccttgtagtgagagatgaaccagtaaagaaatgggtaatctgtctataccactgcttaacaatgaagccaataaaaacagcagctgttctagtccttctgatgagtaacgtagtaaatggggaaggcgggagtaaagcaggggcaggaattgacttatacttcctcacaaccgactcggaccgatg

SEQ ID NO: 6418 - DNA, 203 bp, Artificial sequence
  synthetic
ggcgcgccagtcctactagggatggtagtatttctggtgttggctaggagagaccccatgctcatccctttagtggtggctatagccacattcaagacaactaagtatactgctggcttcagtgtagatgtagctctggccgttctactcatagtgctccttatctgtagttacaccagtgattacttcgactcggaccgatg

SEQ ID NO: 6419 - DNA, 203 bp, Artificial sequence
  synthetic
ggcgcgccagtccttaagtacagaaaactgctacaatgcctgcttagtataggggcagcagtgttccttataaggagcttgaaatggctaggtggagtcgggctaccatctattgagttgcccactcagaggcccctattctacatactggtgtatctgatcgctacagctttggtaacctcttggaacgactcggaccgatg

SEQ ID NO: 6420 - DNA, 203 bp, Artificial sequence
  synthetic
ggcgcgccagtcctgtgtggaggaacagggccaccaatcagctgcgggatgaccctagcggactttgaagagagacattacaaaaggatattcataagagaagactcaatgaatacgatgatgtgcaaccgatgccagggaaagcataggaggtttgaaatggaccgggaacctaagagtgccagatacgactcggaccgatg

SEQ ID NO: 6421 - DNA, 203 bp, Artificial sequence
  synthetic
ggcgcgccagtcctctgtgctgagtgtaataggctgcatcctgctgaggaaggtgacttttgggcagagtcaagcatgttgggcctcaaaatcacctactttgcgctgatggatggaaaggtgtatgatatcacagagtgggctggatgccagcgtgtgggaatctccccagatacccacagagtccccgactcggaccgatg

SEQ ID NO: 6422 - DNA, 203 bp, Artificial sequence
  synthetic
ggcgcgccagtcctcgagcacctaggctgggtgctacgaggcccggccgtgtgcaagaagatcacaagtcatgaaaaatgccacacgggaattgccgacaagctgactgcattctttggaatcatgccgaggggtactacaccaagagctcccgtgaggttccctaacgcccttctaaagatcagacgcgactcggaccgatg

SEQ ID NO: 6423 - DNA, 203 bp, Artificial sequence
  synthetic
ggcgcgccagtcctcatatttgaagcctctagtggtagagtagtcggtagggtcaaggtagggaagaatgaaggggccaaaccgactaaactgatgagtgggatacaaacagtgtccaagagcacggctgatatcacagagatggtaaaaaagatagtggcaatgaacaggggtgagttcaaacagatcgactcggaccgatg

SEQ ID NO: 6424 - DNA, 203 bp, Artificial sequence
  synthetic
ggcgcgccagtcctgatgaaagaaggggacatggctacgggcataacatacgcatcctatggatacttctgccagatgccccaaccaaaactgagggcggccatggtggaatactcatatatcttccttgatgaataccactgtgctacagctgagcagttggcaatcatagggaagatacaccggttcgactcggaccgatg

SEQ ID NO: 6425 - DNA, 203 bp, Artificial sequence
  synthetic
ggcgcgccagtcctaggcaacatgctagtcttcgtccccactagaaatatggcggtcgagacagcaaagaaattgaaagctaaagggtataattcaggttactactacagtggagaggacccggccaacctaaaagtagttacatcacagtcaccatatgtggtcgtggctacaaatgccatcgaatccgactcggaccgatg

SEQ ID NO: 6426 - DNA, 203 bp, Artificial sequence
  synthetic
ggcgcgccagtcctatattacagaagccaagagacagccacaggctcaaaggactaccattatgatctgctacaagcccaaaggtatgggattgaagatgggatcaatgtaaccaagtcatttagggagatgaactatgactggagtttgtacgaggaggatagtttactgatcacccaattggaggtcgactcggaccgatg

SEQ ID NO: 6427 - DNA, 203 bp, Artificial sequence
  synthetic
ggcgcgccagtcctcttcctgaacgctaggaaactaggtgaggatgtgcctgcatacatctatgccacggaagatgaagatttagccgtggacttactaggacttgactggcccgacccgggggtgcaaagtacaactgaaactagcagagctttaaagcaggtcatgggactatccacggctgagaacgactcggaccgatg

SEQ ID NO: 6428 - DNA, 203 bp, Artificial sequence
  synthetic
ggcgcgccagtccttgctctactggtggccttgttcggatacgtgggctaccaagcactatccaaaagacacatacccattgtcacagacatatatactgtagaagaccacagattagaagacaccacacatctacaatttgcacccaacgcaataagaacagatgggaaggaaacagaattgaaagacgactcggaccgatg

SEQ ID NO: 6429 - DNA, 203 bp, Artificial sequence
  synthetic
ggcgcgccagtcctcacatggttagcctacgtatttgtcgatgaagacgtgggcactataaaaccgtgtttaggtgagaaggtaatacctgaaaaaacaggtgacgtatctctccagagtgaggtcatcctcgacacaacatcggtcggaatctctgtagtgggaggcagtgacagggcaactactggcgactcggaccgatg

SEQ ID NO: 6430 - DNA, 203 bp, Artificial sequence
  synthetic
ggcgcgccagtcctagatgtagatgtggttaaaacaaaagcaaaggaactgggggctacggatgacacaaagatagttaaagaggtgggggccaggacatatacaatgaagctgagctcctggtttacccagcagtcaaacaagcatcacagccttctccccctgtttgaggaggttttacttcagtgcgactcggaccgatg

SEQ ID NO: 6431 - DNA, 203 bp, Artificial sequence
  synthetic
ggcgcgccagtcctcaccatgacgtctatagggatcaaacttgaaaagttgcctgttgtgagggcccaaacagatacaactagtttccatgatgctataagggacaagatcgataagaaagagaacctccagaaccccacactacatactaagctaaaggagatcttcaacaacctcagtagaccagacgactcggaccgatg

SEQ ID NO: 6432 - DNA, 203 bp, Artificial sequence
  synthetic
ggcgcgccagtcctctatgaagggaagacgcctctcttcttgatatttgacaaagtgaagaaagaatgggatcaattccaggaccctgtcgcggtgagtttcgacaccaaggcatgggatacccaagtgacaagcagggacctggagttgattagagacatccaaaaatactattttaagagaaagtgcgactcggaccgatg

SEQ ID NO: 6433 - DNA, 203 bp, Artificial sequence
  synthetic
ggcgcgccagtccttaggttcgaggacatagagttttgttcccataccccagtccccgtaagatgggctgaccacaccagcagctacatggcagggaggaacacagccacaatcctgtcaaagatggcaaccagattagattcaagtggagacagaggaacagcggcttacgagaaagctgtagcattcgactcggaccgatg

SEQ ID NO: 6434 - DNA, 203 bp, Artificial sequence
  synthetic
ggcgcgccagtcctagggagcgggtacgtagtgcaaggcagacattatgaagagctaagtatcactaagagaccagatagacaaacaagtaacggtcttgagagatataacttgggacctatagtgaacttagtcctgaggagattgagggttatgctgatggcttctatcggcagaggcatctgagccgactcggaccgatg

SEQ ID NO: 6435 - DNA, 203 bp, Artificial sequence
  synthetic
ggcgcgccagtcctagtaagcagctcccaatgtaacataatgtaaataaatgtgactttatgtaaatgcaaggcagtaagcagctcccaatgtaacataatgtaaataaatgtaactttatgtaaatgcaagtagagtagttagagttctaaggacatactacatagagacaacaactacctcattttcgactcggaccgatg

SEQ ID NO: 6436 - DNA, 203 bp, Artificial sequence
  synthetic
ggcgcgccagtcctaatgtaacataatgtaaataaatgtaactttatgtaaatgcaagtagagtagttagagttctaaggacatactacatagagacaacaactacctcatttttaaaaacagcactttagctggaaggggatattccgacgtccactgttggtctaggaaaaaaccctgaaggcccccgactcggaccgatg

SEQ ID NO: 6437 - DNA, 203 bp, Artificial sequence
  synthetic
ggcgcgccagtcctggatagtcgtcagtagttcaacgcaggcacggttctgccttgagatgctacgtggacgagggcatgcccaagacttgctttaatctcggcgggggtcgccgaggtgaaaacacctaacggtgttggggttacagcctgatagggtgctgcagaggcccacgaataggctagtatcgactcggaccgatg

SEQ ID NO: 6438 - DNA, 203 bp, Artificial sequence
  synthetic
ggcgcgccagtcctaccgtagaaaatgctaggcaaggggctgcaaaattgacatcctggctagggaagcaattgggtataatggggaaaaaattagaacacaagagtaaaacgtggttcggagccaatgcacaatcaccttactgtaatgtaacaagaaaaatagggtacgtctggtacacaaacaatcgactcggaccgatg

SEQ ID NO: 6439 - DNA, 203 bp, Artificial sequence
  synthetic
ggcgcgccagtcctgtattgttgtttgaagaggcaggacaagtagtgaagttggtactaagggccataagggacttgacaagggtctggaacagtgcatcaacaacagcctttcttatatgcctagttaaggtgttaagaggccaggtagtacagggactagtgtggctattactggtaactggtgcacgactcggaccgatg

SEQ ID NO: 6440 - DNA, 203 bp, Artificial sequence
  synthetic
ggcgcgccagtccttacaaacaagacctgtaccattgccagatgggaggtaactggacgtgcatgagaggtgaagtagtcaaatatgtggggggtccagtaaagaagtgtgagtggtgcggctacgtgtttaagaagagagagggtctcccacactatccaattggtaggtgtatgctaagaaacgagcgactcggaccgatg

SEQ ID NO: 6441 - DNA, 203 bp, Artificial sequence
  synthetic
ggcgcgccagtcctactggttacagaagcgtggatgacacaccatgcgatagaggtggagtcgtgatcagcaaaaccggtgagctggaatgcttaataggtaagactacagtgaaagtatttagctcggataaaaaattgggacctatgccatgcagaccaaaagaagtcatatccagtgaaggaccgcgactcggaccgatg

SEQ ID NO: 6442 - DNA, 203 bp, Artificial sequence
  synthetic
ggcgcgccagtcctgtggtagccctgctaggggggaggtatgtcttatggttaatggttgtctacatgatcctggcagatcaaatgacctcagcaataaacctgggccaaggagaggtggttctgataggaaatttaataacacatgaggaccatgaggtggtagtatatttcctcctgttatacttacgactcggaccgatg

SEQ ID NO: 6443 - DNA, 203 bp, Artificial sequence
  synthetic
ggcgcgccagtcctatagtgaaggatgagccagtaaagaagtggatattgttcctctttcatgctatgaccaacaaccctgtaaagacaatatcagttggactgctaatgttaagtgggctagtgaagggggaaggggcaggaatgacctactgggagggcctcgacctgcagtttaccttgctggtacgactcggaccgatg

SEQ ID NO: 6444 - DNA, 203 bp, Artificial sequence
  synthetic
ggcgcgccagtcctatgataactgcatcactattagtggcaagaagggacgttaccacataccctttgataataacagtgatagcattaaagaccacctgggtgaatagtggcccggggattgatgcagcaatagcaacaatcacgactgggctattgatgtggacatttataagtgactactacaaacgactcggaccgatg

SEQ ID NO: 6445 - DNA, 203 bp, Artificial sequence
  synthetic
ggcgcgccagtcctaaaagagtgtcagatgtttatgagatagatgaatcccaggaagccgtatatctgttcccctctaaacagaaggaagggacgatcacagggggtttgctaccactaataaaggccatactgatcagctgcattagtagcaagtggcagtgcttctacctcctatatctggtggtgcgactcggaccgatg

SEQ ID NO: 6446 - DNA, 203 bp, Artificial sequence
  synthetic
ggcgcgccagtcctaaacataaggtgaggaatgaagtggtagcccactggttcaatgaggaagaggtctatgggatgcccaagctagtgagtgtagtgaaagcagcaacacttaaccggagcaggcattgtatactttgcacagtctgtgaaagcagagactggaaaggagagacctgtccgaagtgtcgactcggaccgatg

SEQ ID NO: 6447 - DNA, 203 bp, Artificial sequence
  synthetic
ggcgcgccagtccttgccaaagtaataataggatgacagatgagactgaatatggagtgaaaacggactcaggttgcccagagggtgctaggtgctacgtgttcaaccccgaggcagtgaacatatcggggaccaaaggagccatggtacatctacagaaaacaggtggtgaatttacttgcgtgacccgactcggaccgatg

SEQ ID NO: 6448 - DNA, 203 bp, Artificial sequence
  synthetic
ggcgcgccagtcctgacttaactgacatggtgaaaaagataacaacaatgaatagaggggagtttaagcagatcacactggccacgggtgcaggaaagactacagaattacctagggcggtgatagaagaaataggccggcacaaaagagtgttggtcttgataccactcagggcagcagcagagtcacgactcggaccgatg

SEQ ID NO: 6449 - DNA, 203 bp, Artificial sequence
  synthetic
ggcgcgccagtcctgatgaataccactgtgcaacgcctgaacaattggccataataggaaaaattcacaggttttcagaacagttgcgagtcgtggcaatgacggcaacgcccgctgggacggtgaccactacagggcagaagcacccgatagaggaatttatagctccagaagtgatgaagggtgaacgactcggaccgatg

SEQ ID NO: 6450 - DNA, 203 bp, Artificial sequence
  synthetic
ggcgcgccagtcctatgaattatgattggagtctatacgaagaagatagcctgatgatcacgcaactagaaatcctaaataacctattgatatctgaagaactaccagttgctgtgaagaacattatggccagaacagaccaccctgaaccaattcaactggcatacaacagctatgaagtccaagtacgactcggaccgatg

SEQ ID NO: 6451 - DNA, 203 bp, Artificial sequence
  synthetic
ggcgcgccagtcctccagtgctgttccctaagatcaggaatggagaagtaacagacagctatgacagctattcgttcttgaatgccaggaaactgggcgacgatgtgccagcatacgtctacgccacggaagatgaagacttggcagtggagctacttggtatggactggcccgacccgggaaaccaacgactcggaccgatg

SEQ ID NO: 6452 - DNA, 203 bp, Artificial sequence
  synthetic
ggcgcgccagtcctcatctgcagtttgcacccaacgcaattagaacggatggtaaagaaactgagctaaaagaactggcacaaggagacatccagaggtgtgcagaggcaatggttgggtacgcacagcaaggggtgcaattcatcaaaacccaagccctgaaggtgcaagagaatcatgtattcaaacgactcggaccgatg

SEQ ID NO: 6453 - DNA, 203 bp, Artificial sequence
  synthetic
ggcgcgccagtcctgcttttgggggtgagtctataaacgaccacgtgaaacaggctgcaaccgacttagttgtatattacataatcaacagaccccaattcccgggagacactgagacacaacaggagggccggaaattcgtggctagcttactagtctcagccttggctacatacacctacaaaagccgactcggaccgatg

SEQ ID NO: 6454 - DNA, 203 bp, Artificial sequence
  synthetic
ggcgcgccagtccttggaactatagcaatttatcaaaagtggtagagcctgcacttgcttgtctgccctacgcttcccaggcactcaaattgtttgctccaacgcgcctggagagtgtagtcatcctcagcacagccatttacaagacttacctggcaatcaggcgtggtaggagtgatggtctactgcgactcggaccgatg

SEQ ID NO: 6455 - DNA, 203 bp, Artificial sequence
  synthetic
ggcgcgccagtcctgcggacaataggatcaggctcccccacgagaactaccttagagtcgtcaccaggtgcagatgtgggtaccggacgaaggcagtaaaaaactgtgcaggtgagttaatactggaggaggaagagggctcattcttctgcagaaacaaatttgggaggggagcacccaactacaaacgactcggaccgatg

SEQ ID NO: 6456 - DNA, 203 bp, Artificial sequence
  synthetic
ggcgcgccagtcctaaaagatacacaggggctgggtacaaaggtgccttcctaggggatgaacccaaccacaaaagcctgatcgagaggacctgcgcaaccgtgtgcaaggataagatatacttttcaaagatgaagaaaggctgtgccttcacgtatgatctatctctaagcaacttggtaagattgcgactcggaccgatg

SEQ ID NO: 6457 - DNA, 203 bp, Artificial sequence
  synthetic
ggcgcgccagtcctgtcgacttggttcacaggaacaagcttgaagagaaagatatcccggaacgaactgtaacaacgtggctggcgtatacattcgtcaatgaagacgtgggtaccatcaagccagtcctgggggagaaggtcataccggaagagagtgatgagataaatttgcaaccaacagtaacacgactcggaccgatg

SEQ ID NO: 6458 - DNA, 203 bp, Artificial sequence
  synthetic
ggcgcgccagtcctgtgaatatgtctaagtgtcaggtaacagtggtaggcgaggccaaaaatatgaccaccggggtggttccactcacagtgaccaaagaggcatgtaatggtcaagaccggtcagttctaaacattggaatggaagaaggggaatacccgggccctgctgtaagcactgtcactgtgcgactcggaccgatg

SEQ ID NO: 6459 - DNA, 203 bp, Artificial sequence
  synthetic
ggcgcgccagtcctggtgaagctgttcaaagtaaagatgtgcgcccatatgtattggtgataggttccaataaggcaacatcaaacagggcaaagacagctaagaacgttaagttgtataaaggaggagatgctgtcgaagtcagagacctaattaagaaaggggagatgctggtcgtagctttggcccgactcggaccgatg

SEQ ID NO: 6460 - DNA, 203 bp, Artificial sequence
  synthetic
ggcgcgccagtcctcaagctgaaagaggggatgcaaacctcaaacccttatttgaagaacttctgctacagtgcccacccgggagaacagtcaaaggcggaaccatggtgtcggcataccagcttgcacaggggaactggacgccaactagctgtaaagtatacatggggactataacagcaaaaagacgactcggaccgatg

SEQ ID NO: 6461 - DNA, 203 bp, Artificial sequence
  synthetic
ggcgcgccagtcctgtaaaaatacacccatatgaagcatatataaaattgaaggagcttatagaagagtacaacatgaaaagggtgactggagatacaggtctaaagagacataatgaatggatcttaaagagaatcaaacaccacgggaacctgaggactaagaaaatactgaacccaggtaaagtacgactcggaccgatg

SEQ ID NO: 6462 - DNA, 203 bp, Artificial sequence
  synthetic
ggcgcgccagtcctaaaaacaaggtagaggacataattagagatttaaaatctggaagacctatcaagtattacgaaactgcaatcccgaaaaatgagaagagagatgtcaatgatgattgggagagcggcgattttgtagatgaaaagaaaccgagagtgatacagtacccagaggccaaagtcaggcgactcggaccgatg

SEQ ID NO: 6463 - DNA, 203 bp, Artificial sequence
  synthetic
ggcgcgccagtcctaattggctggtaaacgcagataggccggagagcagaaaaacaggaaaggtctacttgcaaagtggaggccataccgtaagagggaggcattatgaagacctgatattgcctaggatggtgaaaccaacatttcaaggagtagacagatacaaattgggacccatagtcaacgtacgactcggaccgatg

SEQ ID NO: 6464 - DNA, 203 bp, Artificial sequence
  synthetic
ggcgcgccagtcctaataagtcgcgaccagcaacgagcccaatgccaaagggcttcgtgctgtcgcgcatgctggggattctttggcacgccgtgacaggcacggccagacccccagtgctgaaaatgttctggaaaacggtaccactgcgccaggcggaggctgttctgaagaagataaagagagttcgactcggaccgatg

SEQ ID NO: 6465 - DNA, 203 bp, Artificial sequence
  synthetic
ggcgcgccagtcctgtcagggtacaaaacggaacgtgcgtcatcctggcaacagacatgggagagtggtgtgaagattcaatcacctactcttgcgtcacgattgaccaggaggaagaacccgttgacgtggactgcttctgccgaggtgttgatagggttaagttagagtatggacgctgtggaaggcgactcggaccgatg

SEQ ID NO: 6466 - DNA, 203 bp, Artificial sequence
  synthetic
ggcgcgccagtccttggctcatggttgatagttggatggccagagtgactgtcatcctcttggcgttgagtctagggccagtgtacgccacgaggtgcacgcatcttgagaacagagattttgtgacaggaactcaagggaccaccagagtgtccctagttttggaacttggaggctgcgtgaccatccgactcggaccgatg

SEQ ID NO: 6467 - DNA, 203 bp, Artificial sequence
  synthetic
ggcgcgccagtcctacagctgagggcaagccatccattgatgtatggctcgaagacatttttcaggaaagcccggctgaaaccagagaatactgcctgcacgccaaattgaccaacacaaaagtggaggctcgctgtccaaccactggaccggcgacacttccggaggagcatcaggctaatatggtgcgactcggaccgatg

SEQ ID NO: 6468 - DNA, 203 bp, Artificial sequence
  synthetic
ggcgcgccagtcctacggtgctggggggagctttcaacaccctttttgggggggttggattcatccctaagatgctgctgggggttgctctggtctggttgggactaaatgccaggaatccaacgatgtccatgacgtttcttgctgtgggggctttgacactgatgatgacaatgggagttggggcacgactcggaccgatg

SEQ ID NO: 6469 - DNA, 203 bp, Artificial sequence
  synthetic
ggcgcgccagtcctgattatggatgtgccattgacccagaaaggatggaaatccgctgtggagaagggcttgttgtgtggaaagaggtgtcggaatggtatgacggctacgcctatcacccagaatcacctgacacgcttgcacaggctctcagagaggcctttgagagaggcgtttgtggggtcgtgcgactcggaccgatg

SEQ ID NO: 6470 - DNA, 203 bp, Artificial sequence
  synthetic
ggcgcgccagtcctccccaaaacagacttgaaatggccatgtggagaagcactgctccggaactcaacttggtgctgagtgagggagaagcaaacttgaccatcgtggtagacaaaacagatccggcagactataggggaggcactcccatggttctaaagaagactggaaaagagagcaaggtgtcccgactcggaccgatg

SEQ ID NO: 6471 - DNA, 203 bp, Artificial sequence
  synthetic
ggcgcgccagtcctgaagcttcaaaagagtgtgacacaggagtgatgggagcagccgtgaagaatggaaaagccatccacacggaccaaagtatgtggatgagctcctttcggaatgacacgggcacgtacatccatgagcttattctcactgatctcaggaactgcacatggccagcaagtcacactcgactcggaccgatg

SEQ ID NO: 6472 - DNA, 203 bp, Artificial sequence
  synthetic
ggcgcgccagtcctgaggagatcgtgcgctatgtcatagcagttggggtcactttccacttggaattgggaccagagaccatggttcttgtgatgctgcaggcggtcttcaacatgcgcacatgttatctcatggggtttcttgtcaagagggtgatcaccacacgtgaggtggtgactgtttacttccgactcggaccgatg

SEQ ID NO: 6473 - DNA, 203 bp, Artificial sequence
  synthetic
ggcgcgccagtcctggagtggtggagtggaaccctgagttggtcaatgagggaggtgaggtaagcttgaaggtcagacaggatgccatggggaacttgcacttgacagaggtggaacgggaggagcgtcgtttggccttatggcttgtgttcggcctactggcatcggcttatcattggtccggaatacgactcggaccgatg

SEQ ID NO: 6474 - DNA, 203 bp, Artificial sequence
  synthetic
ggcgcgccagtcctgtacacgcattccctccggacagtggacacaaaatccatcaatgccagccaggaaagctgaaccttgagggggggagagttctgggggccatcccgatagacctcccacgtggtacttcaggtagcccaatcatcaatgcacagggagatgtgctgggtctgtacggcaatggtcgactcggaccgatg

SEQ ID NO: 6475 - DNA, 203 bp, Artificial sequence
  synthetic
ggcgcgccagtcctgtcaaccgccggctcttgccacaagggagacagaactgggaggtggccataatggatgaggcacattggaccgacccacacagcatagctgcccgaggccatctttactccttggccaaggagaacagatgtgcactcgtgctgatgactgctaccccacctggcaagagcgagcgactcggaccgatg

SEQ ID NO: 6476 - DNA, 203 bp, Artificial sequence
  synthetic
ggcgcgccagtcctgcgttccctgaatccaaaggagccatagtgagtgaggaaaaacccattcccgaaggagagtggagagatggctttgattggataacagaatttgagggtcgaacagcctggtttgtgccatcgatagccaagggaggcgccatagcacggacactgagacagaaagggaaaagccgactcggaccgatg

SEQ ID NO: 6477 - DNA, 203 bp, Artificial sequence
  synthetic
ggcgcgccagtcctttgattggcacgagacgagtgacgacagcatcagctgcgcaacgcagagggcgagttggaaggcatgaaggacgcacggacctctatgtgtattctgggcagtgtgatgatgatgacagctccttagtgcagtggaaagaagcgcagattctgcttgacaacattactacagtgcgactcggaccgatg

SEQ ID NO: 6478 - DNA, 203 bp, Artificial sequence
  synthetic
ggcgcgccagtcctcggaaatggacctgggaaggtcccgacgagaatgccattgatggtccaggcggcgaactggtcacgttcagaagccccaatggagcggaacggaagctgaagccaatctggaaggacagtagaatgttccgggaggggagagatgtggcagacttcatccagtacgcttccggtcgactcggaccgatg

SEQ ID NO: 6479 - DNA, 203 bp, Artificial sequence
  synthetic
ggcgcgccagtcctctcacggtactgcaaccagaaccgggaaagcagcgtagtggagaggataaccgactggccttcctgttgattggactggggagcgtggtgggccttgtggcagccaatgagctgggctatctggaacaaacgaaaactgacatttcaggactctttagacgtgaggaccagggacgactcggaccgatg

SEQ ID NO: 6480 - DNA, 203 bp, Artificial sequence
  synthetic
ggcgcgccagtcctgggatggtttgggacgcatggacgaacatcgacatacagcctgcccgatcctggggaacttatgtgctcattgtctccctctttactccatatatgctccatcagctacaaacaaaaatccagaggctggtgaacagctcagttgcagcgggaacacaggccatgagagaccttcgactcggaccgatg

SEQ ID NO: 6481 - DNA, 203 bp, Artificial sequence
  synthetic
ggcgcgccagtcctgggggaggcaccccattctttggtgtagctggacatgtcgtggcactcggtgtgacctctttggtaggagcgacgcccacctcccttgcattgggtgttgccttggctgccctccatttggccgtggtcacatctgggctggaggctgaactgacccagagggcgcaccgggcacgactcggaccgatg

SEQ ID NO: 6482 - DNA, 203 bp, Artificial sequence
  synthetic
ggcgcgccagtccttttttctcagccatggtaaagaatccaatggtggatggagagatcatcaaccccattccggatggagacccaaaaccagctttgtatgagaggaagatgagtttgtttctcgccatcggcctgtgcatagcggccgtagccttgaacaggactgccgcggcgatgacagaagctcgactcggaccgatg

SEQ ID NO: 6483 - DNA, 203 bp, Artificial sequence
  synthetic
ggcgcgccagtcctgagggaagcacccttggtgacatttggaagcagcggctgaactcatgcaccaaagaagaattttttgcctacaggcgcacaggggtcatggagacaaaccgagaccaagctcgtgaattgcttcgccgaggtgagactaacatggggttggcagtatcgcgaggctgtgccaaacgactcggaccgatg

SEQ ID NO: 6484 - DNA, 203 bp, Artificial sequence
  synthetic
ggcgcgccagtcctccctcaccccaagggggatgtgtgatggacgtgatcacaaggagagaccagaggggatcaggacaggtcgtcacatacgccctcaacaccatcacaaacatgaaagtccaactcatccgcatgatggaaggagaaggagtcataggaccagctgactcacaggaccctcgtctgcgactcggaccgatg

SEQ ID NO: 6485 - DNA, 203 bp, Artificial sequence
  synthetic
ggcgcgccagtcctgcgtacgggcagatgtggcttctcaactactttcatcgcagagaccttcgcacccttggtttcgccatatgttctgctgttcccgtgagttgggttcccatgggtcgcaccacttggagcatccacgcgagtggtgaatggatgacaacagaagacatgctgcgcatctggaaccgactcggaccgatg

SEQ ID NO: 6486 - DNA, 203 bp, Artificial sequence
  synthetic
ggcgcgccagtcctgcctcctggaaggctcaccaggagttaggccgtttaggagcccccgagcataactcgggaggagggaggaagaaaattggcaatcttcctcgggatttttccgcctcctatactaaatttcccccaggaaactgggggggcggttcttgttctccctgagccaccaccatccagcgactcggaccgatg

SEQ ID NO: 6487 - DNA, 203 bp, Artificial sequence
  synthetic
ggcgcgccagtcctaactcgggaggagggaggaagaaaattggcaatcttcctcgggatttttccgcctcctatactaaatttcccccaggaaactgggggggcggttcttgttctccctgagccaccaccatccaggcacagatagcctgacaaggagatggtgtgtgactcggaaaaacacccgctcgactcggaccgatg

SEQ ID NO: 6488 - DNA, 203 bp, Artificial sequence
  synthetic
ggcgcgccagtccttcgacgagcgtcgaaagtggccccaaagaagacgcgtcagttgcgggtccaaatgccaaatggacttgtactgatgcgcatgctgggagttctgtggcatgccctgactgggactgcacgaagcccagtactgaaagcgttttggaaagtcgttcctttgaagcaggctactctcgactcggaccgatg

SEQ ID NO: 6489 - DNA, 203 bp, Artificial sequence
  synthetic
ggcgcgccagtcctggcactgcgtaagatcaagagaacggtgagcaccctcatggtaggcctgcaccgccgaggaagtagaaggacgaccattgactggatgactcccttgttgatcactgtcatgcttggaatgtgcctcacggcaactgtccgtagagagagagatgggtcaatggtgattcgtgccgactcggaccgatg

SEQ ID NO: 6490 - DNA, 203 bp, Artificial sequence
  synthetic
ggcgcgccagtccttgaagggcgagatgctgcaacccaggttagagtggagaatggcacttgtgtcattcttgctacagacatgggatcatggtgtgatgactcgttggcttacgaatgcgtgaccattgaccagggagaggaacccgttgatgtagactgcttttgcagaggtgttgagaaggtgaccgactcggaccgatg

SEQ ID NO: 6491 - DNA, 203 bp, Artificial sequence
  synthetic
ggcgcgccagtcctactggagtatggacgttgtggaaggcgtgaaggttcacgttccaggcgctccgtgctgattccgtcacacgcacagcgtgacctgaccgggcggggacaccaatggctcgagggagaggctgtgaaggcacacctgacccgcgttgagggttgggtgtggaagaacaaattgttcgactcggaccgatg

SEQ ID NO: 6492 - DNA, 203 bp, Artificial sequence
  synthetic
ggcgcgccagtcctgatgcagctccctcctggagataacataatctatgttggtgacctgaaccatcagtggtttcagaaggggagcagcatcggcagggtcctccagaagaccaggaaggggattgagagactcaccgtccttggagaacatgcttgggactttggctcagtgggaggtgtcatgaccgactcggaccgatg

SEQ ID NO: 6493 - DNA, 203 bp, Artificial sequence
  synthetic
ggcgcgccagtcctcatgactctgggggttggagccgatgtgggctgcgcagtggacacagagcgaatggagctccgatgtggagaaggactggtggtatggagagaggtgtcagaatggtacgacaactacgtgttccacccagagactccggcggttctggcatcggcagttcagagggcctatgacgactcggaccgatg

SEQ ID NO: 6494 - DNA, 203 bp, Artificial sequence
  synthetic
ggcgcgccagtcctagaggaaatctgtggcattgtccctcaaaatagactggagatggccatgtggagaagctctctagtggagctcaacctggctctagcggagggtgaggcaaacctgactgttgtggtcgacaaggcagaccccagtgactacagggggggcgttcccgggctccttaacaagggcgactcggaccgatg

SEQ ID NO: 6495 - DNA, 203 bp, Artificial sequence
  synthetic
ggcgcgccagtcctaacccgagtgaccattgacaaggcatgtgacaagagaggggcgtcggtgagaagcactacagagagtgggaaagtcatacccgaatggtgctgtcgcacctgtgagctgcccccggtcacatatcgcactgggactgattgttggtatgccatggagattaggccggtacacaccgactcggaccgatg

SEQ ID NO: 6496 - DNA, 203 bp, Artificial sequence
  synthetic
ggcgcgccagtcctgacgggactagtctctgtggagagtctgtttcgttaccttgtagcagtcggtctggtgtttcagctggaactgggaccagaggctgtggctatggtgcttctacaggcagtttttgagatgagaacgtgtctactgagtgggtttgtgcttcgtagaagcataaccacgagagacgactcggaccgatg

SEQ ID NO: 6497 - DNA, 203 bp, Artificial sequence
  synthetic
ggcgcgccagtcctaattgtgacagtgtacttcctcctcctggtgttggagatgggcattccagtgaagggtctggagcatctctggagatggactgatgcgctggcgatgggggccatcatcttcagggcatgcactgcagaggggaagacaggcattggtttgcttttggctgcattcatgacccacgactcggaccgatg

SEQ ID NO: 6498 - DNA, 203 bp, Artificial sequence
  synthetic
ggcgcgccagtcctctttcactggtcggggatccttatcgtcatgggactgtggaccatttcggagatgcttggctcacccaggagaacggatcttgtgttttcaggatgctccgaagggcgaagtgacagccgtccgctcgatgtaaaaaatggagtgtaccgcatatatactccaggcctgctctgcgactcggaccgatg

SEQ ID NO: 6499 - DNA, 203 bp, Artificial sequence
  synthetic
ggcgcgccagtcctgggacaaagacagattggagtgggctacggggcaaagggtgtgctacacaccatgtggcatgtcactaggggggctgccctgctggttgatggagttgcagtgggcccctactgggctgatgtgcgggaggatgtggtttgttatggaggcgcctggagtctggaaagcaggtgcgactcggaccgatg

SEQ ID NO: 6500 - DNA, 203 bp, Artificial sequence
  synthetic
ggcgcgccagtccttggcctgtatggaaacggcctcaagactaatgacacgtatgtcagcagcatagcacagggtgaagtggaaaaaagtagaccaaatctcccacagtcagtagttggcacgggctggacagccaagggacagatcacggtgttggatatgcaccctggctcggggaagacccatcgcgactcggaccgatg

SEQ ID NO: 6501 - DNA, 203 bp, Artificial sequence
  synthetic
ggcgcgccagtcctgtgccatgctacatatgtcaacagaagactcctcccacaggggagacaaaactgggaggtggctatcatggatgaggctcattggactgacccccacagtatagcggccagaggacacctctactcccttgccaaggaaaacagatgtgctttcgttctcatgacggcaacacccgactcggaccgatg

SEQ ID NO: 6502 - DNA, 203 bp, Artificial sequence
  synthetic
ggcgcgccagtcctaccggggaagagtgaaccctttcctgagtccaacggagccatagccagtgaggagagacagatccctgatggggagtggcgggacgggtttgactggatcacagagtatgagggtaggacagcctggttcgttccgtcaattgccagaggaggagccatagcaagggctttgagcgactcggaccgatg

SEQ ID NO: 6503 - DNA, 203 bp, Artificial sequence
  synthetic
ggcgcgccagtcctgcagcgagggaagagtgtcatttgcttaaacagcaagacctttgacaaggagtactcaagagtgaaggatgaaaaacccgactttgtggtgaccacggacatatcagagatgggggcgaatcttgatgtcacccgcgtcattgatggccggacaaacatcaaaccggaggaggtcgactcggaccgatg

SEQ ID NO: 6504 - DNA, 203 bp, Artificial sequence
  synthetic
ggcgcgccagtcctggacggcaggatcgaactcacagggacgagacgtgtgacaaccgcgtctgctgcacagcgcaggggaagagtgggcaggcaggggggtcgcacagatgaatacatatactcaggccagtgtgatgatgatgacagtggtcttgtgcagtggaaagaggcccagatactcttggacgactcggaccgatg

SEQ ID NO: 6505 - DNA, 203 bp, Artificial sequence
  synthetic
ggcgcgccagtcctcctgacggcagtggagatgcttgtcctggggcttgcaaccctgggagttgtctggtgttttgttgtgcgcacctcggtcagtaggatggtgttggggaccctagttctcgccacctcactgatcttcctgtgggccggaggtgttggctacgggaacatggctggggtggcactcgactcggaccgatg

SEQ ID NO: 6506 - DNA, 203 bp, Artificial sequence
  synthetic
ggcgcgccagtccttagagaccaaggggagactgtgcgatggggggagtggaccaatttggacatccagccggcaagatcatggggcacatatgttctggtggtatctttgttcaccccctatatgctgcaccaattgcagacaagaatccagcagttggtgaacagtgcagtggcttcaggagcccacgactcggaccgatg

SEQ ID NO: 6507 - DNA, 203 bp, Artificial sequence
  synthetic
ggcgcgccagtcctggcagttactgaggcaggagccgtgggagtggctgcagcaatgcagttgctgagacctgagatggacgttttgtggactatgcctgtggcctgtggcatgagtggagtggtcaggggaagcctgtggggccttctgccactcggccacagactgtggctccggaccactgggaccgactcggaccgatg

SEQ ID NO: 6508 - DNA, 203 bp, Artificial sequence
  synthetic
ggcgcgccagtcctcatggtaaccagcctcgggtggaacctgataaaattcagagcaggcatggatgtgttctcaatggagcctcatcgagcagatgcaatcctatgtgacataggggaaagcaatccagacgcagtggtggaaggagagagatcacggcgtgtgattcttcttatggagcaatggaacgactcggaccgatg

SEQ ID NO: 6509 - DNA, 203 bp, Artificial sequence
  synthetic
ggcgcgccagtcctaaatcgcaatccaacagcgacatgtgtgttcaaggtcttggctccttatcgtcccgaggtaatagaggcactgcacaggttccaacttcaatggggagggggtcttgtgaggacacctttttcccgaaattccacccatgaaatgtacttctcaactgccatcacggggaacatcgactcggaccgatg

SEQ ID NO: 6510 - DNA, 203 bp, Artificial sequence
  synthetic
ggcgcgccagtcctggcctgtctatcgaaggcttacggacaaatgtggctgttgagctacttccacaggagggacttgaggactctggggttcgccatatgttcggcagtgcccgtggactgggtcccaacaggaagaacaacctggagcatacatgcaagtggtgcctggatgacaaccgaagacatcgactcggaccgatg

SEQ ID NO: 6511 - DNA, 203 bp, Artificial sequence
  synthetic
ggcgcgccagtcctgcaagtcaacaggagatgataactcgtacgagctgatctccaacacacaagaaaaatggtgggatgcggcaacgcacgaggctcgtgacggggaaatgatcgctcccgacgcacccctccattggagacaacttcgtgagatcccccaggtgtttaggggcacacgcctgaggtcgactcggaccgatg

SEQ ID NO: 6512 - DNA, 203 bp, Artificial sequence
  synthetic
ggcgcgccagtcctgcaaaatgggtacgtagttaaccactgcgtatcaggattgcaggccacgaagggtatttgcatatctttctatgcggtattacggcttaaaacccgttgtatcttgtagtttgactgcctgtatcactagtggccattttatttaggttagagacccctgatagtaggagagttcgactcggaccgatg

SEQ ID NO: 6513 - DNA, 203 bp, Artificial sequence
  synthetic
ggcgcgccagtcctacaaactctttaaaaattgttgaccccggaaaagatggtgacccctgtaagtagttgatctagaagatctatgcgctggcatagtaatccagtgtttcctgttttaggatgacctctgaaagtagatgaccgtggaaagtcacgtagtgccccaataagcacgtttgggcagcgcgactcggaccgatg

SEQ ID NO: 6514 - DNA, 203 bp, Artificial sequence
  synthetic
ggcgcgccagtcctgttatggcaactgtatcagaacaatggagtcaggttaaaggaaaagttttgaaacttttcttaattttagtcaaatttttaactggtttattactcgtttctctaggtcttaaaattttaaaggatttatccgcattaagtgtaattaaaacatttttatttttactctttggtcgactcggaccgatg

SEQ ID NO: 6515 - DNA, 203 bp, Artificial sequence
  synthetic
ggcgcgccagtccttggttccgtagttctgttattttagcgtcttccaatcttaccgcagagaacttgcaatcgaaagttcattcgttaaactaccctgtagctttacttaggagatttgatttagttgtagaagtagaaatagcccctggttgtactaagcctcgtgctggacaacctttttccaaacgactcggaccgatg

SEQ ID NO: 6516 - DNA, 203 bp, Artificial sequence
  synthetic
ggcgcgccagtcctgtgcgaaaacaagtaatgaaggcaaaggaggaatctcatttaacaatagaaccatcggaaaataatcttttggctacacaaggttggttaagttggtttgtagatagctatgaggaagaaaatgatcttgggtatgataacttcttcgatgaagttgttacacccgaccaatatcgactcggaccgatg

SEQ ID NO: 6517 - DNA, 203 bp, Artificial sequence
  synthetic
ggcgcgccagtccttctcaagaaaaacttggcgctattccacacgtgaaaattgagcaaagtgtttttaacgccacagaggacagtgtgaatatgcagtgtaatggtaatgtagagaacttagcgctacagaattattattccaaagttaatgaaatgttgactgtggaaggatgttcagatcagaatcgactcggaccgatg

SEQ ID NO: 6518 - DNA, 203 bp, Artificial sequence
  synthetic
ggcgcgccagtcctgaatatggatctaattataaatatgaatctcgatatccttttgaaacagcgtgtgaaggaattgacagtgaccctactttcaattcaataaaaaggaaaacttcagctggatatccattgtgttctaaagttaagaatggcaaacaagaaatatttgggagtgatggtcccttccgactcggaccgatg

SEQ ID NO: 6519 - DNA, 203 bp, Artificial sequence
  synthetic
ggcgcgccagtccttctctcccctcaggacacttcctaacttccattattaatagtatttttgtaaatatagctatgtgttatgcgtttgtagaatctcaagaaaagggaaatagatctgaggagaacatacgtgttttcttcaacgatttctctatagtaacttatggggatgaccacgtaattggtcgactcggaccgatg

SEQ ID NO: 6520 - DNA, 203 bp, Artificial sequence
  synthetic
ggcgcgccagtcctttagaacccataaattggtctaatttctttattaaagtgtatagtccattagtaagtaagcagacagaccagctagatctcgtattatgggctagatttaaggatataaaattaggttacccaactgtattacctgttaagacccctactacagatttaattttgcagtcaggacgactcggaccgatg

SEQ ID NO: 6521 - DNA, 203 bp, Artificial sequence
  synthetic
ggcgcgccagtcctcctaattatatagatagtttttcatatagtagtacaataacctccccaactaccatttggtcgactcatttgtgtcctttcttcctttcgaagacggacatacaaggccaccctcaacccacgcttttgtattatttgtccaacttcttcttatactggagaggttctttaaaacgactcggaccgatg

SEQ ID NO: 6522 - DNA, 203 bp, Artificial sequence
  synthetic
ggcgcgccagtcctgaggttagcggaggtgatgactttgaattacaagctcccatcaatgaagggtgggtaggctttgattcggcgtcatcttctcaactaaccttacaatccggagatacttttggttcaacgggcattagagacagtagagtcaatactgtggacaataaagtagattttcaaagtcgactcggaccgatg

SEQ ID NO: 6523 - DNA, 203 bp, Artificial sequence
  synthetic
ggcgcgccagtcctcatctagaatgaacacagaatttctccggacaatgacatccaaccctaagtgtaatagcgaagtgattcaatactatacgacaagaactgatactcaaaaatcagacgtaagtttagccttcatgaacttgaagcctttatttacagcttagtacctgccgcgtccgtgtgggacgactcggaccgatg

SEQ ID NO: 6524 - DNA, 203 bp, Artificial sequence
  synthetic
ggcgcgccagtcctttttcttagggcctttttcacctgggtaaagtgtagttattgcgtataactctggtatcaataccacccggaagaaattatttatctgccatcatgtctcaattaatccaaaccaaaatctctagttataagaattatgttaaccagaaaattaaggaaggaaggtccaacatccgactcggaccgatg

SEQ ID NO: 6525 - DNA, 203 bp, Artificial sequence
  synthetic
ggcgcgccagtcctcaccccttgcttcgggcaactccgaattttgtggaagatgttgaatcggatttgaaaaatttgaatgaagcaatccggactacagatgtttttaaaaattatgttgttgagttgacactaggtcatcaagatctcgattttggctattttaagctatacaatcgtgatcttgagcgactcggaccgatg

SEQ ID NO: 6526 - DNA, 203 bp, Artificial sequence
  synthetic
ggcgcgccagtccttatgaatctccaaatgtaaaacctgtaagagttgaaatgagcttcccaagtggaagagtttctggttccgagatgaatcttgcttctttacaacttgataattatatcaaggaagtgaaggagcagggtgtctccgaccagaatgctgccgaaatttgttcgaagctcgtaacacgactcggaccgatg

SEQ ID NO: 6527 - DNA, 203 bp, Artificial sequence
  synthetic
ggcgcgccagtcctgcggcgagtcaagtgctcctcaacgtctccagagatatgctcggatcgactgaagaagatctgcttgttatgcaagtacttctggaatccctcctctcaagtgttcatctcaataataattatgtatatatgtggttgaaaggtctcccttcaggacactttttgacagctattcgactcggaccgatg

SEQ ID NO: 6528 - DNA, 203 bp, Artificial sequence
  synthetic
ggcgcgccagtcctgccagtttgtttaagcaaattggattgtcatatactttggaggataaagatgcgactgtgaatgctccgtatcggagtttgaatgaagtgtcttatctcaagagaaaatttctctgggatgaagacaagcgtcaatacttggcccctttgagtttagagactattctcgaaactcgactcggaccgatg

SEQ ID NO: 6529 - DNA, 203 bp, Artificial sequence
  synthetic
ggcgcgccagtcctgccagaagctttgtgctcaacgaaaatgtgtgatctgattagaagtaagaaaattcctagttataatatttttaatactgctacatttttaagacccttagttatttagctttaccgcccaggatggggtgcagcgttcctgcaatatccagggcacctaggtgcagccttgtacgactcggaccgatg

SEQ ID NO: 6530 - DNA, 203 bp, Artificial sequence
  synthetic
ggcgcgccagtcctcgataatgctcctgtaattgattcttcaatcgcaggggaaacgaatctcaaacctagtttagtaacggatttccatgataatagacaacatagtgttatttcctttcttcaacgtcctcagttgatcaaaactgttgaatgggctcctggaactgctcagggatccttgttgaccgactcggaccgatg

SEQ ID NO: 6531 - DNA, 203 bp, Artificial sequence
  synthetic
ggcgcgccagtcctaaccattgacatacctgatgatcttatgacatctatggtatatgacaagttagatggtttcgccactttcaaggcggatactatcttccgtgttcaagtcaatgctcagccatttcaatgtggccgtcttgtgatggcttacattccaatgcctgattcgttgtcgaccaggaccgactcggaccgatg

SEQ ID NO: 6532 - DNA, 203 bp, Artificial sequence
  synthetic
ggcgcgccagtcctcgctgagttgaccagggcgatagatcgcattattgcactaccgcatgttcaactcgacattagtgaacaatctgaggttacactgcgagtaccatatatctccccctactctgcctacaatttaattgaaggaagatataggtggggacgtgtggttgttgccgtgtattcccccgactcggaccgatg

SEQ ID NO: 6533 - DNA, 203 bp, Artificial sequence
  synthetic
ggcgcgccagtccttttcccaactaaaatagctgctagcatcaacggtgtaattcagaaaggttctgatatcttgggtaatgttttaccgcagactaagagttttaccaacccagttgctaaaatttcagatgctgcgtttgacattatttccatgataccaggatttaagaaacctgataaaactaacgactcggaccgatg

SEQ ID NO: 6534 - DNA, 203 bp, Artificial sequence
  synthetic
ggcgcgccagtccttcacggtgaaactgtacttttccgaccaacacagtactttggtaatgttgatggtgtagagcattctcataaacttggatatcatgcgatgaatcgcattgatttccaacctgatttcgctggtagtaagatggatgaaatgtcatttgattatgttaaacgcataccaaattacgactcggaccgatg

SEQ ID NO: 6535 - DNA, 203 bp, Artificial sequence
  synthetic
ggcgcgccagtcctcattgattcattttcctattcgaattcaaatgtttatggtgatactctgtggtcaactgcagtttcgccttgttatagatctgccgattatacaacaacaaatggtgctagaaatttttcatttcctacccctacttctcttacttatgcaataggacctttctctttgtggagcgactcggaccgatg

SEQ ID NO: 6536 - DNA, 203 bp, Artificial sequence
  synthetic
ggcgcgccagtcctcaccgtgccttatgctgggactacccctttcaaacgcattagacctgaaatcaaccctctttcctcttctggaattagtgttgatgatttcaatgtgtttgcaacgggtgttcttggtgtaagagcccttactcccttagttttaggatcaactgttgtaccatccacaattcacgactcggaccgatg

SEQ ID NO: 6537 - DNA, 203 bp, Artificial sequence
  synthetic
ggcgcgccagtcctaatattagtggaaatgaaaggtggacctgattttgaggttgagtgccctaacagcaccggctggatgccaatacatagtattactccagccgctactggtagggacactgtagactctgagttggtttcgactgcgcaagaacaagctaactttgcgtctactggacaacatgacgactcggaccgatg

SEQ ID NO: 6538 - DNA, 203 bp, Artificial sequence
  synthetic
ggcgcgccagtcctagggaattgattgtataggcgagttgattagcaaagcttttgagttcgcaagaatctctttttataaatatgttttaaaatctgatgtacctataactcaagaatctccagtaactaagtggtctggtgaagtacaaaaatattacatgaaatatttggaatctcaacttgtatcgactcggaccgatg

SEQ ID NO: 6539 - DNA, 203 bp, Artificial sequence
  synthetic
ggcgcgccagtcctctccagttactatttatatttctggagatacgggtgtgggcaaaagtacactatcttatcctttatctgccgatattataaagaaaatagcaggtgatacaactcatgatctgaaaaataattggaagaaattgatctatacccgaaattctgagcaagaattttgggatggttcgactcggaccgatg

SEQ ID NO: 6540 - DNA, 203 bp, Artificial sequence
  synthetic
ggcgcgccagtccttaatttataagggacctgattctcaaaatatatacttaagatctgcatgggagtattcacttgatactcaatctggtgattgtggtgctcctttaattttaagaaaccctatgtgtagaggaaagatctgtggaatacatgtagctggtctaccaactggtggactcggctatgcgactcggaccgatg

SEQ ID NO: 6541 - DNA, 203 bp, Artificial sequence
  synthetic
ggcgcgccagtcctttgttgatgcattaaaagatgaaaggaaaccgagagagaaagctcataaaacaagagctttttcaggatgtcctttggagtaccttgcggtatgtaagatgtattttcagggtatcgtctcggtattgaccaaatgcaaaaacgaaacgcatattagtgtaggaactaatgtgtcgactcggaccgatg

SEQ ID NO: 6542 - DNA, 203 bp, Artificial sequence
  synthetic
ggcgcgccagtcctagcgtgagattgatgtcccaattcgttctttagatgaaattgcttatttaaaaagaagtttcgttttagacgaagaaagacaacaatggatcgctcctctgaccctggatactgtattggaaacgccaagttggattcatcgttgtgatgatccgatagaagcaactgtttctacgactcggaccgatg

SEQ ID NO: 6543 - DNA, 203 bp, Artificial sequence
  synthetic
ggcgcgccagtcctcctgatgcacttatgtcacctatgattagagaaaaattatctggttttacatcttttagtgctagtaccgtctttcatatacaagtaaatgctcatccatttcaatgtggaagattggttttagctgctgtacctgttccagatattttacctctacataggttgaacatgttacgactcggaccgatg

SEQ ID NO: 6544 - DNA, 203 bp, Artificial sequence
  synthetic
ggcgcgccagtccttatgatgatgttatggattcggatggtaagatagttagagatgaatacgtctatcgtgtagtcgtagaccttcgtgaccagactgaggctactttagtagtcccttttacctcccttactccttataaagtgtgtgcggatgtgtttaattcagcaaatcgtcctaaatacaaccgactcggaccgatg

SEQ ID NO: 6545 - DNA, 203 bp, Artificial sequence
  synthetic
ggcgcgccagtcctatgtgcttttatatgtttgtgtctgtgtctttcaggtttcttcttgattcttcctgagggtactaatcgaatcatgtattttgttttattattatatacgtttttgttcgctttgtccgttcagtggaccaagttttggcaatagctgacacttgtttcacagcttctttctgccgactcggaccgatg

SEQ ID NO: 6546 - DNA, 203 bp, Artificial sequence
  synthetic
ggcgcgccagtcctgaaccaatactttactacccattccgttacaactggaatattaagattcttgacctcacagataaggagggtcaagagagtgtcaataagaagtttttaaggaagtttactaaacttaggaagctttgtttgagacttcaaaaggacactgccttctggaaaaatactagaagtcgactcggaccgatg

SEQ ID NO: 6547 - DNA, 203 bp, Artificial sequence
  synthetic
ggcgcgccagtcctaggttagatatgattcaggatgacatagacaaaatggtcgcacaaagtggccctgttatgagtcagagcttaagtgacagggttgaccgcatgtaccatgagttaatacatacgaatgtcgctcaaatgaatttctctataccgttttcacataatttgtccaaggattcaaagcgactcggaccgatg

SEQ ID NO: 6548 - DNA, 203 bp, Artificial sequence
  synthetic
ggcgcgccagtccttgtagtcgtcattttaacaatgtgcaggaagcttttaattttacaatgagctttatgagatttttagctttggcttatgccatctttttcctcatttcacgagcaactaagttctttggagcgtcattttctacgatatctactgttctgataactcttattactatgacagtacgactcggaccgatg

SEQ ID NO: 6549 - DNA, 203 bp, Artificial sequence
  synthetic
ggcgcgccagtcctactgacaagttagttaagaaatttttggtcgattactactcaaaacacatggaaaatgctaaaatgttagcccaagcaggagaggaagactcgtcttttctatcctacgtcattcccccattgtttttagaatcagttgtagatacaaaatctaacttgtttaagaggatttggcgactcggaccgatg

SEQ ID NO: 6550 - DNA, 203 bp, Artificial sequence
  synthetic
ggcgcgccagtcctaagagtaaagacctggaccttgttgttaagaggttgtcgtattttggtgatgctaaaatatacaatgcctttgacaatataggcacgtggttgactacgatgatcaacaagacagtaaattatgtaaaggttacactcttgggccatgatcctgaagaatttttggagaatcagcgactcggaccgatg

SEQ ID NO: 6551 - DNA, 203 bp, Artificial sequence
  synthetic
ggcgcgccagtcctgttaagagggctccttctgaaagtggtacattctctactgattgttatactttcgtggaatatgatccatttgaccactgcaacatcgttaaatcaatgtctttcaatgaattgatagatgaggtggttgccatgtatttccacgaaggagagtttgtatcttccgtagataaacgactcggaccgatg

SEQ ID NO: 6552 - DNA, 203 bp, Artificial sequence
  synthetic
ggcgcgccagtcctcgatttccatcatcgttgacctttgatcaagcagtgttggggatacctggagaagactatgtcaattcaataaaacgtgatacctcttgcggttatcctttcgttaaggaaggatggacacgagctaaaatcttcggtaacggtgatgaatatgacatgtctacctcgggtgttcgactcggaccgatg

SEQ ID NO: 6553 - DNA, 203 bp, Artificial sequence
  synthetic
ggcgcgccagtcctcaaatgttacgagagaaagtacaggaatgcatagaggcggcgagacaagggaagatattggaccattattttatagatacattaaaggacgaaaggaagcctaaacataaggctcataagtctcgaatgttttctaatggaccaatagattatcttgtttggagtaagatgtatcgactcggaccgatg

SEQ ID NO: 6554 - DNA, 203 bp, Artificial sequence
  synthetic
ggcgcgccagtccttttaatccgatagtagcggtgttgtctgagcttaaaaatgtagaccatatttccgtggggtccaatgtgtattctacggactgggacgttattgcaaggtacttgaagtcgaaatctcaccatatggtggctggagacttcgagggctttgatgcttcggaacagtccgacatacgactcggaccgatg

SEQ ID NO: 6555 - DNA, 203 bp, Artificial sequence
  synthetic
ggcgcgccagtcctgttgtattggaaatgcctatgtggaccaaatccagcaaggacattgtaactaatgtattctgtaatttggaacacgccctcaaggagttatcattgcatgataaagaattgtgggaaaaatggagtcctgtattgcattcaaagagtgaggaagtcctgaaaatggtttcttctcgactcggaccgatg

SEQ ID NO: 6556 - DNA, 203 bp, Artificial sequence
  synthetic
ggcgcgccagtcctctgaaatttcaagatgaggtcagggagattgctcttggcctttcaggttatgagtagttttcttgacttctcttaaaaccaacaatgtgatcttgcttgcggaggcaaaatttgcacagtataaaatctgcaagtagtgctattgttggaatcaccgtacctatttaggtttaccgactcggaccgatg

SEQ ID NO: 6557 - DNA, 203 bp, Artificial sequence
  synthetic
ggcgcgccagtcctgatagtgcttgaagatggaccgcagatggaagaacctcttccttatgcattccatggacagcatactgataatcgtcaacatacggtggttaatttcttgcaacgtccccaggttattttcgattcgtcttgggcgtctgatctccctcgaaacaaacaatttatggattcgatcgactcggaccgatg

SEQ ID NO: 6558 - DNA, 203 bp, Artificial sequence
  synthetic
ggcgcgccagtcctaggcgcagcttttaaacaatctgtttcaaagctgggcgaacatttacctttcctcaaatctggagcgaactgggtcagtgagaacattctacaacctgcagatgaaatcataggacctattttatctctttttgggttctcgaagccccttttgcccattaccaatcccaccgtcgactcggaccgatg

SEQ ID NO: 6559 - DNA, 203 bp, Artificial sequence
  synthetic
ggcgcgccagtccttcacatcagtactcctttggcaatagaacaaatacctataaagggagtcgcagagttccaaataccgtactatgctccatgtttgtcatcttcgtttagagcgaattcggaaacattttactatagttcaggtcggaataatctcgatatagccacttcacctcccaccgtcaacgactcggaccgatg

SEQ ID NO: 6560 - DNA, 203 bp, Artificial sequence
  synthetic
ggcgcgccagtccttcgctattatgcggttggtgcgggagatgatatggacttttccatctttatcggtacgccgccctgtattcatgcatctcagacggcccagtttaccaagataaaacaaggtaaagtgtatgatttgaggtatgatcagtacgacccttttagggaagtccaggacggtacggccgactcggaccgatg

SEQ ID NO: 6561 - DNA, 203 bp, Artificial sequence
  synthetic
ggcgcgccagtcctgttcctcaatgctcgtagtattgaggatagcgatttgttgtgagctcctttagagggagggctcactttatctattgcttaattcggtaagccacaaatttttctaagtgtcatgagtttcttctcggttcttctcatgattactaatcgaaccgtgtgtagagtcagaatgttcgactcggaccgatg

SEQ ID NO: 6562 - DNA, 203 bp, Artificial sequence
  synthetic
ggcgcgccagtccttacaatgtgatcatgtcttttcaacaaacaaacaacaacgcaaccaacaacatcaactcccttgaggagcttgctgctcaagaactaatagcagcacaatttgaaggaaatcttgatggtttcttttgcactttttatgtgcagtccaaaccacaactattggacttagagagtcgactcggaccgatg

SEQ ID NO: 6563 - DNA, 203 bp, Artificial sequence
  synthetic
ggcgcgccagtcctggacaattgaacggaaatttaacaagaatttgtgattttttggaaaactctctaccgacactaacagcccaaattcaaacaacagttttgacaacaacagacaaatatgtgaatttgaaagaagacttgctaaaggttgccattctacttgtcctagtccgtcttttgatggtccgactcggaccgatg

SEQ ID NO: 6564 - DNA, 203 bp, Artificial sequence
  synthetic
ggcgcgccagtccttgggatgaaacatacttttcaaacttactttcacaaggctttatggcaggaaaatctctgatagaaatggaagctgaatttgctagtgatgctgaaacgttcaacgcatatattgagtacaaaaagaatattcccaaagaaaccaaatggagcaagtggatgaccattttggaccgactcggaccgatg

SEQ ID NO: 6565 - DNA, 203 bp, Artificial sequence
  synthetic
ggcgcgccagtcctggagacagtaaaacgcaaaaacagcgaaacacaaaagtagaagttggcaaagaacttgaaaaagaagctgaaactcaaggttgcagcgacccagcagctcatgctttggtgcttgatgtgttgcagaagaatacgtactgtttatattatgagcgaatggtgaaaggagaaatgcgactcggaccgatg

SEQ ID NO: 6566 - DNA, 203 bp, Artificial sequence
  synthetic
ggcgcgccagtcctggaacgttggcaacatttcatcagagtgctaatgaactgtgtcgtgcatatcagtggctacaagccatccgtcctttggaccaagaaattaccatttatcatgaagataccgacatgtttgattacgagagtgaaagctatacacagcgggattgctatgaatacaatgcgcctcgactcggaccgatg

SEQ ID NO: 6567 - DNA, 203 bp, Artificial sequence
  synthetic
ggcgcgccagtcctaataacattacagtgcaatgctgctttgaaccaccatcagatatcaaagataccatgagtggagaaacgcctgaaggaaaattttgcgctatcggaaagagtaatatcaaggttggtcaggcggtaaaaacaactttactaaaatcttgtatctatggaatgttgagcaaaccacgactcggaccgatg

SEQ ID NO: 6568 - DNA, 203 bp, Artificial sequence
  synthetic
ggcgcgccagtcctcaccaactacaacgaactgtcgcacctttgcaaaaagatgttatttacgaaatgctaaactggacacggaacactattgacccaaacgaaattctaatgatgaacataaacacagcttttagagaaatagtataccatggaaagagtgagtaccagaagttgcgtagcggaattcgactcggaccgatg

SEQ ID NO: 6569 - DNA, 203 bp, Artificial sequence
  synthetic
ggcgcgccagtcctgcaactaacctttggtcatctagtgaccctgtagaaaaacaattgtatacagccaatttcccagaagttctaatttctaatgctatgtaccaagacaaattgaaaggtttcgtaggacttcgcgccacacttgttgtcaaagtacaggttaattcccaacccttccagcaaggtcgactcggaccgatg

SEQ ID NO: 6570 - DNA, 203 bp, Artificial sequence
  synthetic
ggcgcgccagtccttacgccggtgatttaacactggctgataccagaaagattgaagcagagagaacgcaagagtattccaataatgaagacaatagaataacaactcagtgtagcagaatcgtcgcacaggttatgggagaagatcagcaaattccacgaaatgaagcacagcacggcgttcaccctcgactcggaccgatg

SEQ ID NO: 6571 - DNA, 203 bp, Artificial sequence
  synthetic
ggcgcgccagtcctttacaagactcttttaattcccttatttcaacgagttcttctgcagtgacgaccacagttttaccatccggcactattaatatgggtccatccacacaagtaattgacccaactgtagaaggcttgatagaggtagaagttccctattacaatatttcacatattacacctgctcgactcggaccgatg

SEQ ID NO: 6572 - DNA, 203 bp, Artificial sequence
  synthetic
ggcgcgccagtccttgtcctgcactgaacttgtttctgtctctggagtgctctacacttcagtaggggctgtacccgggcggtcccactcttcacaggaatctgcacaggtggctttcacctctggacagtgcattccacacccgctccacggtagaagatgatgtgtgtctttgcttgtgaaaagctcgactcggaccgatg

SEQ ID NO: 6573 - DNA, 203 bp, Artificial sequence
  synthetic
ggcgcgccagtccttgtgaaaatcgtgtgtaggcgtagcggctacttgagtgccagcggattacccctagtggtaacactagcctctgggcccaaaaggcatgtcatttgaccactcaggtacacaaccccagtgatgcacacgcttagtaatggcttagtaacaaacattgattgatcatttgaaagcgactcggaccgatg

SEQ ID NO: 6574 - DNA, 203 bp, Artificial sequence
  synthetic
ggcgcgccagtcctactctaccgcaggcattttggcccaatcaagattttccagcatgggggcagtctcgttattttgcagcagtgcgctgtggctttcatattcaagtacagttgaatgttaacatcggttctgctggttgcttgattgccgcgtacatgccaaagacggcccatgatcatatgaaccgactcggaccgatg

SEQ ID NO: 6575 - DNA, 203 bp, Artificial sequence
  synthetic
ggcgcgccagtcctggttcacctacaacagtggatgtgaccatttttggttcattactcgacttggattttcagtgtcctcgtcctcctggtgcagacacagtaatttacacacaagggaaaagaactgttcgaaagaccaagacatcaaagttcaaatgggtcaggaataaaattgacatagctgaacgactcggaccgatg

SEQ ID NO: 6576 - DNA, 203 bp, Artificial sequence
  synthetic
ggcgcgccagtcctccagatggtcgaaggggctatttcacctggtcacatacaatctcacctgttaattgggtttttgatgaccacatttatttggaaaacatgcccaatctgagattattctcctcctgttacaactattggaggggctcctttgttattaaactgacagtttatgcgtcaactttccgactcggaccgatg

SEQ ID NO: 6577 - DNA, 203 bp, Artificial sequence
  synthetic
ggcgcgccagtcctaacaaaggacgcttgaggatggcatttttcccaaacagagaaggcgcctacacacaggatgaagctcagaacgcaatctttgttgtgtgtgatataggcttgaataatacctttgagatgaccatcccctacacttggggcaactggatgagaccaacaagaggaaactccttgcgactcggaccgatg

SEQ ID NO: 6578 - DNA, 203 bp, Artificial sequence
  synthetic
ggcgcgccagtcctgttccattaagatgtgttaaaggttcagacaggaattcagccggacttggttctctcttcacacaggctgtgggcagaacaatctctaatcgggtacaaatctttgtgagcttccgctgtcctaattttttcttcccactacctgcgcccagggaagccacgtctcgaagcatacgactcggaccgatg

SEQ ID NO: 6579 - DNA, 203 bp, Artificial sequence
  synthetic
ggcgcgccagtcctgggaaatttttgaaccaatgtggtgacgtggaaaccaacccaggccctgacattgagttggtctataaaaacagaggcttctataagcattatggagttagatttggtggtcatatctaccacttgaattcacaagacattctgtcaaccgcaattacaggcaagtctgacttccgactcggaccgatg

SEQ ID NO: 6580 - DNA, 203 bp, Artificial sequence
  synthetic
ggcgcgccagtcctaaagccttggggattattggggtcatcttgttgtcagcctctcttctttcattgcttgctgtaccctgggattattcctcacttcaaactgtttataaccaatccattgaaggtgatgcttctggcctcacactcctaagtcaaagatgcatgacttttttttccaatacaatgcgactcggaccgatg

SEQ ID NO: 6581 - DNA, 203 bp, Artificial sequence
  synthetic
ggcgcgccagtccttgtgaaacttttaataatgatcttgttaagtttattattaagattttggtgcggcttttgtgctacatcgttctttattgccatgcaccaaatatgctgacaaccatgtgtctgggaactcttcttgttttggacattacaacttgtgaaatcttgtctgctaacaccaaagcacgactcggaccgatg

SEQ ID NO: 6582 - DNA, 203 bp, Artificial sequence
  synthetic
ggcgcgccagtcctctctttcaggcattggttgatggtgatgtgaagagtcttgtctggaaaattgctgagaatatgcaatttgcccaatccaaggatgaacaagctgaggacatggcagcaaccttcaactttgcctctgacatggttaattttgtgccaatggaacagatgagacaagaaggctggcgactcggaccgatg

SEQ ID NO: 6583 - DNA, 203 bp, Artificial sequence
  synthetic
ggcgcgccagtcctggtggtagggcttggaagaccctctccatggatgaacttgtgaaacaaatcacggcagtttacacacagaggtcagatgcccttatggtttggaaaaggaagttgaataccatcaggaacgaaatgagccctggatcatccaccggcaggatttttgaacccttagaggaaacacgactcggaccgatg

SEQ ID NO: 6584 - DNA, 203 bp, Artificial sequence
  synthetic
ggcgcgccagtcctaaccctcaaactgcaatttctaagaaggggggtaagcctaagctctcattagtgaaaaccacaaactttgttaatgaagcaccctatatgcaagatcttgaacattgctttgcacaaacggcctacatttcttctccagaaacccaagatataatacattgtgctgccttgagtcgactcggaccgatg

SEQ ID NO: 6585 - DNA, 203 bp, Artificial sequence
  synthetic
ggcgcgccagtccttcaaaaaaaggaatgtgtgggggccttttggtcactagagtgcatggcacattcaaggttctgggaatgcacattgcaggcaatgggcaagttgcacgagctgcagcagttcactttatatccaatggtgcagctggctttatggatcaaggtgttgttgtggccaaagaaaagcgactcggaccgatg

SEQ ID NO: 6586 - DNA, 203 bp, Artificial sequence
  synthetic
ggcgcgccagtcctttacaaaagcccatttatttgccatctaagacagctttgaatcccagtcccttgaatggtgtagtccccgtgaaaatggaaccagctgtgcttagtcctcatgacaccaggcttgaagtcatcatgcccagcgttgtgaaaacagcggcagctaagtatagagttaatatttttcgactcggaccgatg

SEQ ID NO: 6587 - DNA, 203 bp, Artificial sequence
  synthetic
ggcgcgccagtcctttaattaaaagttgaacctgtagcgtcagtaaaacgcagtaaccgcaagcaattgcctgtagcgtcagtaaaacgcaatacacaagatttgagcctgtagcgtcagtaaaacgctgcaaccacaagctattgactgtagcgtcagtaaaacgcaaacattcttgtggcgctcgccgactcggaccgatg

SEQ ID NO: 6588 - DNA, 203 bp, Artificial sequence
  synthetic
ggcgcgccagtcctgtagcgctcaagtgcagagcttcccggctttaagggttactgctcgtaatgagagcacatgacattttgccaagatttcctagcaattgtcacgggagagaggagcccgttctcgggcacttttctctcaaacaatgttcgcgcgcctccgcgcgccccccctttttcagcccccgactcggaccgatg

SEQ ID NO: 6589 - DNA, 203 bp, Artificial sequence
  synthetic
ggcgcgccagtccttaagtggatctccaatttggcctgttctgaactacaccatctactgctgtgaagaatgtcctgaaggcaagctggttacagccctgatcaggagccccgctcgtgactctcgatcgacgcggggtcaaaaactgtctaagcagcagcagaaacgcgggagcgtttctttttcctcgactcggaccgatg

SEQ ID NO: 6590 - DNA, 203 bp, Artificial sequence
  synthetic
ggcgcgccagtccttatttgtttcatgatggcggcgtctaaggtatacagagtgtgcgagcagactctactagcaggcgctgttcggatgatggacaaattcttgcaaaagaaaacagtttttgtgccacagcttgacaaacaggtaaggttgactggtcttcacaattatgacaacacatgctggctcgactcggaccgatg

SEQ ID NO: 6591 - DNA, 203 bp, Artificial sequence
  synthetic
ggcgcgccagtcctagagacacccaaaacagaagatgtactagttttcgcgccctatgactttgagtcattgggcaaagaccctcctaagttacatcagaggtatgagaaggcgtttgaacgccttagcggagctggtacatcgactccaacgactggcaaccagaacatgtcaggaaacagtggttccgactcggaccgatg

SEQ ID NO: 6592 - DNA, 203 bp, Artificial sequence
  synthetic
ggcgcgccagtcctcacgctttccagacattacacattcaaagtgggtgagtggcctcattcacaatcacacggccacgcctggatttgtccactgcctggagacaagctgaaaaagatgggcagcttccacgaggttgtcaagtctcaccacctggtcaagaatggctgggatgtggttgtacaagtcgactcggaccgatg

SEQ ID NO: 6593 - DNA, 203 bp, Artificial sequence
  synthetic
ggcgcgccagtcctcaaggcaaaatttttggttgcttttgtgcctccccacactgctgcgccaaaaacgcgcgacgaagctatggcatgcattcatgctgtgtgggatgttggcctcaattctgcattctcatttaatgtgccttattcttccccatctgacttcatggctgtttattctgcggatgccgactcggaccgatg

SEQ ID NO: 6594 - DNA, 203 bp, Artificial sequence
  synthetic
ggcgcgccagtcctggatggcgagcccggtgagacagaaccacggcacgctttgtcccctgtggacatgcatgtccacacagacgtcagttttctgcttgacagattctttgatgttgagacaattgaactttcaaatttaacaggctccccaactactcatcttttggatccttttggttccactgccgactcggaccgatg

SEQ ID NO: 6595 - DNA, 203 bp, Artificial sequence
  synthetic
ggcgcgccagtcctccagcttgcttgggctcgacttctcaacacttgtacatacttcttctccgacttggagttgtctattcagtttaagtttaccaccaccccatcttcagttggagagggctttgtgtgggtcaaatggttcccggttggagcaccaaccaagaccactgatgcctggcagctaaacgactcggaccgatg

SEQ ID NO: 6596 - DNA, 203 bp, Artificial sequence
  synthetic
ggcgcgccagtcctggagtccacttacaattggctgcccggtgctcactttggctctatattgctgacatctgatgcacatgacaaaggagggtgttacttgcggtaccgctttccgcgagcaagcatgtattgccctcggcccattccaccggctttcactcgccctgctgacaaaactaggcacaacgactcggaccgatg

SEQ ID NO: 6597 - DNA, 203 bp, Artificial sequence
  synthetic
ggcgcgccagtcctagagacatattctcctttttacaagacggcaaaaatgctttttaaacttgcaacactggctgtgacggcaatgcggaccaaggacccggtggttgtggtcatgctgattgctgattttggattagaggtgtttgacacaggttttttcttttcctattttcaagaaaagctgcacgactcggaccgatg

SEQ ID NO: 6598 - DNA, 203 bp, Artificial sequence
  synthetic
ggcgcgccagtcctgttcaaggacatgcaacagcgtgctctcgctgtgaaagataaaggcctcttttccctgctgcaaatcccactagtcaacttgcccacaagcaggccagagcctgttgtgtgtatccttcggggtgcatcaggacagggaaaatcttatttggcaaatttgatggctcaggcaatcgactcggaccgatg

SEQ ID NO: 6599 - DNA, 203 bp, Artificial sequence
  synthetic
ggcgcgccagtcctccccatggctcacttggatgataagggcattccattcacttcccctgttgttatttgtaccacaaacctgcattcatcttttacacccattactgtttcttgtccagaagctctcaagcggaggtttcggtttgatgtgacggtatctgtaaagcctggctttgtacgtactgtcgactcggaccgatg

SEQ ID NO: 6600 - DNA, 203 bp, Artificial sequence
  synthetic
ggcgcgccagtcctaaacagacaagacacacacaaaatgcccatttttaaacaatcgtggtctgacttgtttaagaaatgttcaactgatgaggagcaaaaaatgttacaatttttgattgacaataaggattcagaaattttgagggcttttgtgtcggaacgctcaattttgttgcatgaagagtacgactcggaccgatg

SEQ ID NO: 6601 - DNA, 203 bp, Artificial sequence
  synthetic
ggcgcgccagtcctctcgcgggggtattgtggcgcagcaattgtggcaggctcacctgcccgcatcattggcattcattctgctggtactgggtctgtagccttttgctccctggtgtccagagatgcgctggagcgcactctccctcagaaacagggcaacgttgttcgtcttgatgatgatgtgagcgactcggaccgatg

SEQ ID NO: 6602 - DNA, 203 bp, Artificial sequence
  synthetic
ggcgcgccagtcctccagaaatggcttctgcgcgcagctcatgtttatgctcaacgggtctttgcccgtattggatttgacaaccaggctttgactgagcaggaagccatttgtggcattcccggccttgacaagatggaacaggacaccgctcccgggttgccctatgctcaacaaaacaaaagaagcgactcggaccgatg

SEQ ID NO: 6603 - DNA, 203 bp, Artificial sequence
  synthetic
ggcgcgccagtcctgatgccccatgtggtggttggtaggcagcttttgggccggtttgtggcaaagtttcatgaggcaaatggatttgagactggttctgctattggatgtgacccagatgtggattggactcggtttggtcttgagctggaacgttataggtatgtgtatgcctgtgattactcccgcgactcggaccgatg

SEQ ID NO: 6604 - DNA, 203 bp, Artificial sequence
  synthetic
ggcgcgccagtcctctgtacatccattttaaacactgttttaaacaatgtttacattcttgcagctatgatgaaggcttttgagaactttgagccggatgatatccaggtgatttgctatggggatgattgcctcattgcttctgaccttgagattgactttcaaaagttggtgcctgtgttttccagcgactcggaccgatg

SEQ ID NO: 6605 - DNA, 203 bp, Artificial sequence
  synthetic
ggcgcgccagtccttgaaaagctcctgtctgttgcgcagttggctggccactgcgaaccagaacagtatgagcgcctgtttgagccttttgctgggatgtattacgtccctacttggcgtgatttgcgcctgcagtggctaatgaagcttggatgctaaatctttttctggttttgtttttctttgttcgactcggaccgatg

SEQ ID NO: 6606 - DNA, 203 bp, Artificial sequence
  synthetic
ggcgcgccagtcctgacacccccagcaaggctgagcagtccgttgagcgaggatttacgtttcagcttgcacagtgggagacatccagaaacatttgggaccatttgacaatccctcttcccatgtgccctggtcttattaaggtctctggaatgtacaaagctttcattgaaacccacgcctacattcgactcggaccgatg

SEQ ID NO: 6607 - DNA, 203 bp, Artificial sequence
  synthetic
ggcgcgccagtccttcttggttgccggagcgcagttttatacctggaaagttcactgatttcctgcaagtagctgttataccaactttggctgaagtttctgttcaaaactacaaaccagtgccttcctttccagtgagtaatgttttacagactaagcctcttgtaaatactgatttgacttttactcgactcggaccgatg

SEQ ID NO: 6608 - DNA, 203 bp, Artificial sequence
  synthetic
ggcgcgccagtccttctatgactttccgcaacacttatgtgtctgcgctttctcttcagtacacccagtatagaggttccatttgtatggatttactttttacaggaagtgctatgtgtcaaggaaaatttgttgtgtgttatgtgcctcctggtcgggaacctcagtctttggatgaggccatgcagcgactcggaccgatg

SEQ ID NO: 6609 - DNA, 203 bp, Artificial sequence
  synthetic
ggcgcgccagtcctgagcaaggaactgcttcgcgtacactcgtgcgcactaaccacataacagcagaatttgtggagaaaacacccctgaatggtttggctgcagtttttacgtcattgtctactagtggttattctactaagcttgtttctgaacccatccccgaagcaactttgtctaccattctgcgactcggaccgatg

SEQ ID NO: 6610 - DNA, 203 bp, Artificial sequence
  synthetic
ggcgcgccagtccttctgagggtgccacaaatttttctttgttgaagttagcaggggatgttgaacttaaccccggcccaactatttggtcagtgatgcccggtggtgaactcattgaatttgctacaaaggtctctcaagtttacaagaccatcaaagaaaaatgcactgaccctaccacttggattcgactcggaccgatg

SEQ ID NO: 6611 - DNA, 203 bp, Artificial sequence
  synthetic
ggcgcgccagtcctaggtctatccggcgcacctttttcgacgactcgtcatccgagtccgaagatggagaaccggaggttcctcaattcagaccccaggtctaccctaggccacgcagtatgagagtagtcagacatcccatgacagcgcgacgcgcccaacgcgtcattgacatgggatactctgatcgactcggaccgatg

SEQ ID NO: 6612 - DNA, 203 bp, Artificial sequence
  synthetic
ggcgcgccagtcctcagcgcgttcattgcgaggagaatcaggcccttttgtccgaggggatttcctccactctctcagttttgaatggtttcttcaatcttttcaaaaatgtgcaatggtttttggatttcctcaaaagctgctatggcaaactttccaagcaattgaaaccaatgcagtctctccgccgactcggaccgatg

SEQ ID NO: 6613 - DNA, 203 bp, Artificial sequence
  synthetic
ggcgcgccagtcctcaagaagcggtcactcgccgctattggaaggtgattgatgttagcgcagatgatcagtataaaactgtggatggcaggctggactacgccaaagccacgcaacctacccagattccccctgaattggctgtgttcaaaactcatgtccctcttttgaagggcgctctgcgtgaccgactcggaccgatg

SEQ ID NO: 6614 - DNA, 203 bp, Artificial sequence
  synthetic
ggcgcgccagtcctactgctgaacatcgcagacgcttcgtcgaacaaaatccaacttttcattttaaggaaactgaagctgacttttatgaacgtgttgcattcctttctggcattcatggtcgaaagcaatccattcttaagaaaatcaaggagtggttcgcggacggcgtgcgtgtcagaaatcttcgactcggaccgatg

SEQ ID NO: 6615 - DNA, 203 bp, Artificial sequence
  synthetic
ggcgcgccagtcctcacattacagctggacgcaattctgcaactcgcgaccagctggaggcagtggatgtaattgatcagtttgacatgccaagtgacgctgtcgcggttaagtttccagacaagcgcggctcctcctacaaaaacatcatgcaccaccttgcctccaccctccctattcgtggaaaacgactcggaccgatg

SEQ ID NO: 6616 - DNA, 203 bp, Artificial sequence
  synthetic
ggcgcgccagtcctaccaaattgagacccactgtcgcaatcaacacttttgagtgcgacgtggaaccagccgtcctgtccaaattcgacagacggctcgaggaacctgacagttttgagttgacccttctgcacaagaatgacaggcgctatccagaggacacttctatggacaagcacctggaggctcgactcggaccgatg

SEQ ID NO: 6617 - DNA, 203 bp, Artificial sequence
  synthetic
ggcgcgccagtcctgctgttgaggcttatgcttcctcattgtttgcacagattggtactgacaatggaatcatttcagagtatgaagctgttactggcattgagaatttggactcagtggagacaacaacgtcacctggactaccctacacgacagcggggattccaagagaggcgctgtttgacccacgactcggaccgatg

SEQ ID NO: 6618 - DNA, 203 bp, Artificial sequence
  synthetic
ggcgcgccagtcctggccgaatgctgcttggaaaatttacagctaaaatgcatgctaacaatggattaggcattggttcagccgttggttgcaatccagatgtagactttactagatttgcttaccaaatcttggaatgggactatgtttatgacattgattacaaaaattttgatgcttcacattctcgactcggaccgatg

SEQ ID NO: 6619 - DNA, 203 bp, Artificial sequence
  synthetic
ggcgcgccagtcctatgggaatgcaggactggacttgtgctgcctgacagggtcgcggctggccgtctgtactttgtatagtcagttgaaactcaccatggcatgtttgaaaattttctctctgaaacgcaaagataagagccactcatactctcctcgtgagattgagttgaaatataattcagattcgactcggaccgatg

SEQ ID NO: 6620 - DNA, 203 bp, Artificial sequence
  synthetic
ggcgcgccagtcctggacctctagaatggaaaatggtaataccaataactctggcaacactggagtgatcaattacaatttttactccaactcatacactgacgcagttgatctatctggagcaatgtcttcgcaggaatcaaatgctgctgagaatgctgcatcagggcctacatctcttcttaaagcgactcggaccgatg

SEQ ID NO: 6621 - DNA, 203 bp, Artificial sequence
  synthetic
ggcgcgccagtcctttgccgatgagggtacatcaggtggcccggcagtctcacggtttgtgacccttagggcccaatcgtggtcgacatctcaagatgtgtattcattccaagctgctcacctgccatatgctcttgttgcacaggaaacaccattcaaggcccttatgtccaaacaccagctgcttacgactcggaccgatg

SEQ ID NO: 6622 - DNA, 203 bp, Artificial sequence
  synthetic
ggcgcgccagtcctataatccagacaagatgtatagcacatggcactaccaccacacttttgatgatacagataagcattggtacaaaccagaagaacagccatacggtggcatatcacctcagtccctgttttgctttccccatcagctgattaatcctaggacaaattcatcagcaacattgtgtgcgactcggaccgatg

SEQ ID NO: 6623 - DNA, 203 bp, Artificial sequence
  synthetic
ggcgcgccagtccttaccttatgtggactgtggccccataactgatgtcactgtccactgtccctgggctattgtgattgtggttttgcgccagctactggtggccaacggtggaacacccagtgttgacattaatgtttccttggctccatgcaatgttgagtatcatggactccgtcagagttctgcgactcggaccgatg

SEQ ID NO: 6624 - DNA, 203 bp, Artificial sequence
  synthetic
ggcgcgccagtcctagaattgtaggcttgttttggcctggacatcacagggctttaacgcaccaatgccaaccactatggctgaagcaatgcaaggccattatgttatctatgacaccggtgtggacagcagtgtagatttagttgttccctatgtggcaccatatgattttacccctgtgcgaactccgactcggaccgatg

SEQ ID NO: 6625 - DNA, 203 bp, Artificial sequence
  synthetic
ggcgcgccagtcctttctaaagggaccctccaacatctcctccggcttccagggaaacatggattctccacttcagccagctgagacgggatgtgacaaggcaatggcacccagtgcttcaaatgagaaccccgtccctctgtcagttgagagcattggttcgtccagggtttcgttcttctgggacacgactcggaccgatg

SEQ ID NO: 6626 - DNA, 203 bp, Artificial sequence
  synthetic
ggcgcgccagtcctggtatttccacatctcaacaatcacaaagatgactaatgttgacccgcaatacttgcggttgaacatctcagacatcctgcgggaccctgtaatacgtcagtccctacatgccacctatttgagatgtgggctatctgttgctgtgagagtgatgccagcaaatccagctagtacgactcggaccgatg

SEQ ID NO: 6627 - DNA, 203 bp, Artificial sequence
  synthetic
ggcgcgccagtcctgcaagaaagagggttgctgctgtggtaacaaacacaactaccctgatgaactgaaccctttttcagagaatgggttctggagccgcttcaagaaagggcacctccaaggtccaatgcaggatgtgagctctttgattaacatcctgaagggtgcagaatggatttaccaccaatcgactcggaccgatg

SEQ ID NO: 6628 - DNA, 203 bp, Artificial sequence
  synthetic
ggcgcgccagtccttgagaaaatgtgctgcccatgttaacccaagattgatgggcatgtttcctgaatttgacccatctccacctgatcctactcgccccgagccagttgttgtcgtcttgcgcggcgcacctgggcagggtaagagtgtgtgttctgagatgcttgccagaatgctttcttacacctcgactcggaccgatg

SEQ ID NO: 6629 - DNA, 203 bp, Artificial sequence
  synthetic
ggcgcgccagtcctctcttttaaagttagttgagatgcaagggccaaaaggacaagccaatatggaaatggaaagaactttaatgaagaagaacatagtggaaatgacatatgagaagcacaacgggaggtttcaaactaccacagtcctgtttgtgcgtgatcggatttttctgatcaacactcacacgactcggaccgatg

SEQ ID NO: 6630 - DNA, 203 bp, Artificial sequence
  synthetic
ggcgcgccagtcctctggcacaccaatagttggcttgatgaagacagaaggtagcagttatatctggtctggtgaatgtctcccatttaaaaatacaatgaacacttatgaaggctgtgttcctcatgtgttaccatataaggccgtgacagcccatggctactgtggctctgtcatggtcgcagatgcgactcggaccgatg

SEQ ID NO: 6631 - DNA, 203 bp, Artificial sequence
  synthetic
ggcgcgccagtcctctggagtctggaaaggcatttgtggcatacactccttaggagatggtgccataggtgcagcaacagttttgtcaagacagcatttgctcaaccttcttgagggattcctggaattccagggaaaaatttatgatgtgcagaaaacagactttgtgtacacacccactagaacctcgactcggaccgatg

SEQ ID NO: 6632 - DNA, 203 bp, Artificial sequence
  synthetic
ggcgcgccagtcctggctctttgccttctttcacaagaatcccggttggaatacaggatcagctgttggagttaatccagacttggcctggacacagatcttttatactgcccctagccggaatgtattggctatggattactctggatttgatgcttcacatacttctggcatgttttgcattttgacgactcggaccgatg

SEQ ID NO: 6633 - DNA, 203 bp, Artificial sequence
  synthetic
ggcgcgccagtcctagcattttctgaccactcttggttatggaactttacagctttcctatattgattctctctgttattctaaacaccactgggatgatgaaacctaccgccttgacggaggattgccttctggatgctctggcacaacaatttttaacaccattatgaacaacattgttgcccgagcgactcggaccgatg

SEQ ID NO: 6634 - DNA, 203 bp, Artificial sequence
  synthetic
ggcgcgccagtcctcacagtgcacgttccttaaacggggatttgtgctggatggtagtctcgtgcgaccagtcatggaagaacaacatttggctgaattgctaaaatgggctaggccaggaacattgcaggccaagttgctgtccattgcccagttggcatttcatcttccgcgctcggcgtataatccgactcggaccgatg

SEQ ID NO: 6635 - DNA, 203 bp, Artificial sequence
  synthetic
ggcgcgccagtcctgcgctcggcgtataatcgccttatgctcccatttgaagaggctggatatgaaatccccagccatgaacgcctgaatgaggagtggcgcgagatgttcatttgaatggctacagttgtgagcagtttagtgattttctgcctgttgcttaagtagtttagttgagcccaaaaaaacgactcggaccgatg

SEQ ID NO: 6636 - DNA, 203 bp, Artificial sequence
  synthetic
ggcgcgccagtcctgagcttccaggttgggaaacctggactgggtctatactgcctgatagggtcgcggctggccgcctgtaactagtatagtcagttgaaaaccccccatggaatctactactactctttcattttgcaactggatccccaagaaacagagagcccgtgtgtaccttaccaccagtgcgactcggaccgatg

SEQ ID NO: 6637 - DNA, 203 bp, Artificial sequence
  synthetic
ggcgcgccagtccttcacacacgagaagtcgattggaccgtacacatacatggtctcagacatgattatgaaagaaaacagtagaacctcccttgccatggcatacgtggaagggaagacacttgtgttcaacaacggaacacaactaggacaagtacattcatccaatactgggaacaaaccacaagcgactcggaccgatg

SEQ ID NO: 6638 - DNA, 203 bp, Artificial sequence
  synthetic
ggcgcgccagtcctaagagggctatagtgacagattaatgcaattaacagcaggtaattcttgcataacaacacaagaggcagccaaggcggtggtggcatatggacaatggcccagttacaatatagatgcaggagaacatttagaccttgcaactactcctggtacatctgtagataggttttacacgactcggaccgatg

SEQ ID NO: 6639 - DNA, 203 bp, Artificial sequence
  synthetic
ggcgcgccagtccttgttttgtggtagccagatggccacaggtaaattacttattgcatataccccacctggtggttcctcccctacaacgagaactgatgcaatgctagctacacatgttatttgggatataggtttacaatcaacatgcaagcttgtggtcccctatatatcatcttcacagtacacgactcggaccgatg

SEQ ID NO: 6640 - DNA, 203 bp, Artificial sequence
  synthetic
ggcgcgccagtcctggcaaaacaacctgacaagaaccactttgtcatacaatggatgggtaactgtattccagcaaacagcactggttgtacccccaggtgccccaacaacatgtcagttagtggtgacagtgagcgctgcggacaactttgtactaaggatccccactgatacagcatattttgcagcgactcggaccgatg

SEQ ID NO: 6641 - DNA, 203 bp, Artificial sequence
  synthetic
ggcgcgccagtcctccaattcgactagcatttatactagagtagggaactgcccagcctcatttagaataccatttatgtctgtttgtaactattatacctccttttatgatggtgatggcaattttgaccagaacggtgctgcctatggtattaatcctggtgattttataggaaccatatctattacgactcggaccgatg

SEQ ID NO: 6642 - DNA, 203 bp, Artificial sequence
  synthetic
ggcgcgccagtcctatgaggtgtgccaaactaagaacgccactgaattaacagagaccaaatgggctaactattcatgctcagttaggtttgatagaggttcatttacagcatggtttgtgggagaagacctgttactggtaccctaccatgcagcaaataattggagtcagacaacacatgtatacccgactcggaccgatg

SEQ ID NO: 6643 - DNA, 203 bp, Artificial sequence
  synthetic
ggcgcgccagtcctctcttttgaaagctttagacctttatggatatgatttaccctttactacttacttaaaggatgagctgagaccaaaggagaaggtgaagatgggcaaaaccagggttattgagtgttcatcactcaatgataccataatgatgaagcaaacttttggtcgtctgtttcaggtgtcgactcggaccgatg

SEQ ID NO: 6644 - DNA, 203 bp, Artificial sequence
  synthetic
ggcgcgccagtcctggatatatggtacgctgtgcaaacggcggaaattaatcctaccgttaaccgcccacctactccgagaagcctagtacctaattggatttatcaatggagttgcgctcagcaggtgaccctgacctgccagctccggctgatggacctgggctttccccacaggcgactgtggcccgactcggaccgatg

SEQ ID NO: 6645 - DNA, 203 bp, Artificial sequence
  synthetic
ggcgcgccagtcctatgggaccgactactttggagagtccgtgtttctattgtttctttaatcaatcttatggtgacaatttatagtgccctgagtattgattggttgttgcttttgacaattattgagacatcacatagacataatgggagctcaagtaagcaggcaaacgtctggtgcgcatgacacgactcggaccgatg

SEQ ID NO: 6646 - DNA, 203 bp, Artificial sequence
  synthetic
ggcgcgccagtcctcccggatacgggctgaacagggcgcaaacattcattatactaatatcaattattatagagatgcagctagcaatgcagcaagcaaaatggactattcccaggatccggacaagttcacgaaaccagtacttgatgctataactgaaccattacccacgctgaagtcccctagtgcgactcggaccgatg

SEQ ID NO: 6647 - DNA, 203 bp, Artificial sequence
  synthetic
ggcgcgccagtcctgcactctactggtcttagcaataccagaatgggagattggggtgtctaatgctgatagggcatcctttaatctaacaaaccccgataagaacgggcatactatgactggtcaagaagcttattgcttacataatgggactaacatccattcttcactggtatttccacatcaatcgactcggaccgatg

SEQ ID NO: 6648 - DNA, 203 bp, Artificial sequence
  synthetic
ggcgcgccagtcctcaatggcgtgcgagtttaacggactgcgcaatgccatcacccaagggctgccagtactcaatacacccggctctgggcagtttgtgactacagataatttccaatcaccaaacttgattccaaattttgatgtgacacaagtctttaatagtccaggtgaaattattaatttaccgactcggaccgatg

SEQ ID NO: 6649 - DNA, 203 bp, Artificial sequence
  synthetic
ggcgcgccagtcctaggatgatttctcgatgcgcttgttgcgggatacagcagagatttcgcaagacggatttctgcaaggaccaatagatcaagcaatagaaaaagtaatcactgatgtagtgtctgacacgcgtgagtctagtagtgactttagcattggggctgttccagcattgaatgcggtggcgactcggaccgatg

SEQ ID NO: 6650 - DNA, 203 bp, Artificial sequence
  synthetic
ggcgcgccagtcctaccaggacacacacctaaacaagatgactactgatagggcgaacataaagactgttaccaattatatcatgtctggcagcacgcggacagttgaatcagaagtagctgtggtcgaggattcacttaagcaatatggtccagcaactgggggtgtagtggttgggcagtataagacgactcggaccgatg

SEQ ID NO: 6651 - DNA, 203 bp, Artificial sequence
  synthetic
ggcgcgccagtcctcaatctctgatcttctctgtagcgttgactcaggggaggtccgagattattgcagacgaaggggctggatagttccagacactcctactgagatcacggtttcccgtgattatggcaaactcagcatcattttacaagcggtaaccacatttgttacaatagcaggggtcatttcgactcggaccgatg

SEQ ID NO: 6652 - DNA, 203 bp, Artificial sequence
  synthetic
ggcgcgccagtcctcaaggatagggcagtgtggcggagtgattgctaccactggtagggttcttggcatacatgtagggggtaatggagcacagggttttgcagctagcttatttagaaaatactttgccatcacacaaggaagtattgagttcaagagaaggttgagctggcagggcttaagagtgtcgactcggaccgatg

SEQ ID NO: 6653 - DNA, 203 bp, Artificial sequence
  synthetic
ggcgcgccagtccttagtcaaggtgtataaacgaatctctttgtctgatttgaggatgatagcatatggtgatgatgtaatagcctcactcccttataagattgatgctggaaaattggcgattgctggacgagactatggtctaacaatgactccggctgacaaaggagagacattcactgatgtgacgactcggaccgatg

SEQ ID NO: 6654 - DNA, 203 bp, Artificial sequence
  synthetic
ggcgcgccagtcctcttgggagaatgtcaccttcttaaagagatactttaggtcagatgagagatttcctttcctaattcatccagttatgcctatgagtgaaattttcgagtccattagatggacacgaaatgcaaaacacacccaagaacatgtcacctccctgtgctatttggcttggcacaatgcgactcggaccgatg

SEQ ID NO: 6655 - DNA, 203 bp, Artificial sequence
  synthetic
ggcgcgccagtccttagaaacgaggcgtcacgtgccgaaaatccctttgcgtttcacagaaccatcctaaccatgggtgtagtatgggaatcgtgtatggggatgattaggatctctcgtagagggataggtgtgccattcaaatccagggagtactctggctctgacattgggacatttgatgtaaccgactcggaccgatg

SEQ ID NO: 6656 - DNA, 203 bp, Artificial sequence
  synthetic
ggcgcgccagtcctcggacctggttcagtatccgggttgtcctgtattgttacggtgtatccgtcttggcacactgaaagggtatttttgggtaatcctttcctactgcctgatagggtggcgtgcccggccacgagagattaagggtagcaatttaaacatgagcaaactattttctactgtaggcacgactcggaccgatg

SEQ ID NO: 6657 - DNA, 203 bp, Artificial sequence
  synthetic
ggcgcgccagtccttccctggttctagagtgacacaaggtgagaggtttttccttattgatcagcgtgagtggaactcaacacagagtgaatggcagttattgggcaagattgacatagtaaaagagttgcttgatcagtcatatgctgttgatggccttttgaaataccattcttatgcgaggtttgcgactcggaccgatg

SEQ ID NO: 6658 - DNA, 203 bp, Artificial sequence
  synthetic
ggcgcgccagtcctgcttggacgtcattgttcagattaatccaacatcattccaggcagggggtctcatagcagcccttgtaccttatgaccaggttgatattgaatcaattgctgccatgactacttattgccatggcaagttgaattgcaacataaacaacgttgtaagaatgaaggtgccatacacgactcggaccgatg

SEQ ID NO: 6659 - DNA, 203 bp, Artificial sequence
  synthetic
ggcgcgccagtcctagatgatgcgcaacgaatttcgactgtcgtcatctagcaacattgtcaatttggctaattatgaggatgcaagagccaaagtgtctctagcgctgggacaagaagagttttccagagactcgtcaagtaccgggggggaattgttgcatcatttttcacagtggacgtcgattccgactcggaccgatg

SEQ ID NO: 6660 - DNA, 203 bp, Artificial sequence
  synthetic
ggcgcgccagtcctcgtgccttgccttcacttttacattccccggcacggtagggccaggcactcagatctggtcaaccacggtggaccctttttcctgtaacttgagggcgtctagcactgtgcaccccactaacttgagctcgattgcgggtatgttctgtttttggagaggtgacattgtatttgcgactcggaccgatg

SEQ ID NO: 6661 - DNA, 203 bp, Artificial sequence
  synthetic
ggcgcgccagtccttctctgacacaccttacagggtgaatccaacgactcataagtccctctggccttatgcaactggcaagcttgtgtgctatgtgtacaatagactgaacgcacctgccagtgtatcaccaagcgtgtccattaatgtgtacaaaagtgctgtggatctggagttgtatgcacctgcgactcggaccgatg

SEQ ID NO: 6662 - DNA, 203 bp, Artificial sequence
  synthetic
ggcgcgccagtcctgttttgtgacgggtacacttaggtggtttttaagtcttttccaactgtatcgtggttctctcgacattaccatgacatttgcaggaaaaactaatgtggatggcattgtgtactttgtgcctgagggtgttgcgatagagactgagagggaggagcagacccctttgctcacatcgactcggaccgatg

SEQ ID NO: 6663 - DNA, 203 bp, Artificial sequence
  synthetic
ggcgcgccagtcctagagcaaaaatctggacaaatggtgctttgccttgtctccacgcatagataggacactcatatgtgagacagccaacctgatggtgggacgcgaggttgagtatgatatctttgtgaagaattgtgagacatatgctcggggtattgcatcaggcgactatgggacaaaagaagcgactcggaccgatg

SEQ ID NO: 6664 - DNA, 203 bp, Artificial sequence
  synthetic
ggcgcgccagtcctggttaaatatggccaatttggagaagaaagggacacagttcaactcaccattcattatagcatcttctaatctttcccatccttgtccgaagacagtgtactgtacagatgccatcgctaggaggttgcatattaaggtcaaggttagcccgaaagaagaattctctactcatgcgactcggaccgatg

SEQ ID NO: 6665 - DNA, 203 bp, Artificial sequence
  synthetic
ggcgcgccagtccttgataaatgtccctcgtttgcctaaatttagggacatacgcaatcacttttctactgaggagaacatacgcagggcagaaggcatgccagggactttgtgcactttggaccatgagaggttcacccttgttactgagagcgaccttaagatggtggaggcagctacatatgtctcgactcggaccgatg

SEQ ID NO: 6666 - DNA, 203 bp, Artificial sequence
  synthetic
ggcgcgccagtcctccaaagacgaattgcgtcctctaagtaaggttatgctgggcaagaccagagccatagaggcttgccccgtttcgttcaccatcctatttcgcaggtatttgggatacgctttggcgcagattcagagccaccctggttttcacacagggatagcagtgggcgtggaccctgacccgactcggaccgatg

SEQ ID NO: 6667 - DNA, 203 bp, Artificial sequence
  synthetic
ggcgcgccagtcctttgttaattccgttcatcagttgggctccatgagatactatgtccatggttctatgccatctggcacacctgctacatcggtgctcaattctataattaatgttgtgaacatctgccatgtgttgtgtgcattggagaaaataagtgtatttgaggttttcaaattattcaagacgactcggaccgatg

SEQ ID NO: 6668 - DNA, 203 bp, Artificial sequence
  synthetic
ggcgcgccagtcctgaacattctatgtggatgagtggtccatctgtcatccgcgtatttctgaggagactgtttattcgatgctggcttggaagagcgacaatgcatccatgaaggatctgatagaaacgagtatatggtttatgttccatcatggcccccggaagtatgttagattctgtacttggccgactcggaccgatg

SEQ ID NO: 6669 - DNA, 203 bp, Artificial sequence
  synthetic
ggcgcgccagtccttgcgcggtgttctgtgccgtgtgggtattgggctctacattccaacttacaaagagctggaggtgaggtatgataggcttgtcaagtataggttcatagatgatagcttttagattttacatatttgagtttccatttctgtgtagttttagtgagtataggagcttatgtatgcgactcggaccgatg

SEQ ID NO: 6670 - DNA, 203 bp, Artificial sequence
  synthetic
ggcgcgccagtcctcacttgcgcaactcgcgtgactggttagtactcttaccactttccgcctgcctggtcgttcagcgctgctgacaggcactcccattgagggccgttcggcgctccactgaggcgtctacgtttagtgtggctacggtgttgaggccgtttcgcgcggccgactcgcctacgcgccgactcggaccgatg

SEQ ID NO: 6671 - DNA, 203 bp, Artificial sequence
  synthetic
ggcgcgccagtcctactttaaggtaacaccgagactggtacttggtttctggagacaggctaaggatgcccttcaggtaccccgaggtaacaagcgacactcgggatctgagaaggggattggggcttctatccaagcgcccaatttaaaaagcttctatgcctgaataggtgaccggaggccggcaccgactcggaccgatg

SEQ ID NO: 6672 - DNA, 203 bp, Artificial sequence
  synthetic
ggcgcgccagtcctggctgaataccattttacagttgtttcgttacgtcgatgaacctttcttcgactgggtctacaactcgcccgagaacctcacgctgcgagcgattgaacagctcgaggaactcactgggcttgagttgcgcgagggaggaccacccgccctcgtgatttggaacatcaagcactcgactcggaccgatg

SEQ ID NO: 6673 - DNA, 203 bp, Artificial sequence
  synthetic
ggcgcgccagtccttgctctacactggcatcggcacggcctcgcggcccagcgaggtatgcatggttgacggtactgacatgtgtcttgctgatttccacgcaggtatcttcttgaaaggtactgagcatgccgtgttcgccctgttgacttccgacggatggtacgccatagacgatgaggacttttcgactcggaccgatg

SEQ ID NO: 6674 - DNA, 203 bp, Artificial sequence
  synthetic
ggcgcgccagtccttgctcgctgacaagaagacagaggagactgctcttttggaggaccgcatcctcaccacgaggcacggtaccactacttccaccacacagagttctgttgggatcacctacgggtatgccgacagtgactctttcaggcctggccccaatacctcgggcctcgagactcgtgtggcgactcggaccgatg

SEQ ID NO: 6675 - DNA, 203 bp, Artificial sequence
  synthetic
ggcgcgccagtcctatggtggtttccaaaacactgaccccaagtccgcagatccaatctacggacatgtgtacaacccctcaaggaacgactgccacggtaggttttctaacctgctggacgtcgcagaggcgtgtcccacactcctcgacttcgatgggaagccatacgtggtgaccaaaaacagcgcgactcggaccgatg

SEQ ID NO: 6676 - DNA, 203 bp, Artificial sequence
  synthetic
ggcgcgccagtcctcgggcattgaggtcaggggactacccaaaacacctgaggatgcagcacactgttaccattctgaatgggacacaggtctgaactcgagctacacgttcgcggtaccatacctgtcgtccggtgacttctcctacacgcacaccgacaccccagccatggccacaaccaacggctcgactcggaccgatg

SEQ ID NO: 6677 - DNA, 203 bp, Artificial sequence
  synthetic
ggcgcgccagtcctaggtcacgacaccccgccgggtccataccgatgtggcgtttctccttgaccgcagcacacatgtgcacacgaacaagaccacctttgcggtggacctgatggacaccaaggagaaggcgctagtgggagcaatcctgcgctcagccacatactacttttgtgacctggaaatcacgactcggaccgatg

SEQ ID NO: 6678 - DNA, 203 bp, Artificial sequence
  synthetic
ggcgcgccagtcctcatgtgtgggcgaacacaagcgcgtgttttggcagcctaacggtgcgccacgcacaacccagttgggcgacaacccaatggtgttctcccacaacaaagtgacccgctttgcaatcccgttcacagcgcctcacaggttgttgtccacggtctacaacggggagtgcgagtacacgactcggaccgatg

SEQ ID NO: 6679 - DNA, 203 bp, Artificial sequence
  synthetic
ggcgcgccagtcctcaaaaacagtcaccgcaattcgcggtgatagagaggtgttggcgcggaaatactcttccgccaagcactctctgccatccaccttcaacttcgggtttgtgaccgccgacgagccagtcgacgtttactaccggatgaagcgtgcagagctgtactgcccccgtgccctgcttccgactcggaccgatg

SEQ ID NO: 6680 - DNA, 203 bp, Artificial sequence
  synthetic
ggcgcgccagtccttgcagaacgacatgtccactaaacacggtcccgacttcaaccggttggtgaccgcatttgaggagctgacacaaggagttaaggctatcaaggatggtctcgacgaggccaagccctggtacaaaatcatcaaactcctgagccgcctgtcgtgcatggccgctgtagcagcaccgactcggaccgatg

SEQ ID NO: 6681 - DNA, 203 bp, Artificial sequence
  synthetic
ggcgcgccagtccttcaccatgacggaccttgtgcctggtatcttggagaaacagcgtgatctcaatgatccgtccaagtatcatgaagcaaaggagtggctcgagaatgcccgccaggcatgcctcaagaacggcaatgtccacatcgccaacctttgcaaagtcacagcaccagcaccaagcaagtcgactcggaccgatg

SEQ ID NO: 6682 - DNA, 203 bp, Artificial sequence
  synthetic
ggcgcgccagtcctcaagaccagaaccagtggtcgtttgcctccgtggtaaatctggccaaggtaaaagtttccttgcgaacgtgcttgcacaggcaatctccacccacttcacgggcagaaccgactctgtgtggtactgtccaccagaccctgaccacttcgacggctataaccaacaagctgtcgcgactcggaccgatg

SEQ ID NO: 6683 - DNA, 203 bp, Artificial sequence
  synthetic
ggcgcgccagtccttggtgatggatgatctgggacagaatcccgatggcaaggacttcaagtacttcgcccaaatggtatcaaccacgggattcatcccgcccatggcgtccctcgaggacaaggggaaacctttcaacagcaaggtcatcattgcaacctccaatctgtattctgggttcaccccaccgactcggaccgatg

SEQ ID NO: 6684 - DNA, 203 bp, Artificial sequence
  synthetic
ggcgcgccagtcctccgttgaaatgaagagactgcaacaagatatgttcaagcctcaaccaccaattctcaacgtctaccaacttgtggatgaggtgattgagagagtcaacctccacgagaaggttgcctcgcagccaatcttcaaacagatctcgcttccttcccaaaagtctgtgctctacttcccgactcggaccgatg

SEQ ID NO: 6685 - DNA, 203 bp, Artificial sequence
  synthetic
ggcgcgccagtcctcactgaaggttaaagccaaagcccccgtcgtgaaggaaggaccatacgaggggccagtgaagaagcctgtcgctttgaaagtgaaagcaaagaacatgatagtcacggagagtggagcgccacctaccgacttgcaaaagatggtaatggccaacacaaagcctgttgagctcacgactcggaccgatg

SEQ ID NO: 6686 - DNA, 203 bp, Artificial sequence
  synthetic
ggcgcgccagtcctagtcgatgctgctgcaaatgaaggcacacgttgaccctgaaccacaccacgaggggttaattgtggacaccagagatgttgaagagcgtgtacacgtcatgcgcaaaaccaaacttgcacccaccgttgcacacggtgtgttcaaccccgagtacgggcctgctgcactgtccacgactcggaccgatg

SEQ ID NO: 6687 - DNA, 203 bp, Artificial sequence
  synthetic
ggcgcgccagtccttcggttgcaacccagatgttgattggcagagattcggaacccattttgcccagtacaaaaacgtgtgggacgtggactattcggcctttgatgctaaccactgcagtgacgccatgaacatcatgttcgaggaggtattccgtccggaatttggcttccaccccaatgcggagtcgactcggaccgatg

SEQ ID NO: 6688 - DNA, 203 bp, Artificial sequence
  synthetic
ggcgcgccagtcctactcgatgatctcctacggagatgacatcgttgtggctagtgattacgatctggactttgaagcactcaagcctcacttcaaatctgtcggtcagaccatcaccccagctgacaaaagtgacaaaggttttgttcttggtcagtccatcactgacgtcactttcctcaagaggccgactcggaccgatg

SEQ ID NO: 6689 - DNA, 203 bp, Artificial sequence
  synthetic
ggcgcgccagtcctagggtctctttgagattccaagctacagatcactttacctgcgttgggtgaacgccgtgtgcggtgacgcataatccctcagatgtcacaattggcagaaagactctgaggcgagcgacgccgtaggagtgaaaaggccgaaaggtcttttcccgcttccctgatttttgcgaacgactcggaccgatg

SEQ ID NO: 6690 - DNA, 203 bp, Artificial sequence
  synthetic
ggcgcgccagtcctgtttaccggactgtctttaagaacttggcaatcaggagccctaaaggagctgtggctataatgaaatggggtgtcggttaccttaagaagagaaagcaaaagaggcaaaaatctagtggtggctatgaaattgaggctgcaagacaggctctctatccaattactttaggagttcgactcggaccgatg

SEQ ID NO: 6691 - DNA, 203 bp, Artificial sequence
  synthetic
ggcgcgccagtcctatggtcattttttgtggctatcagagtggaaatgaacctgtgtgtgtcgatttcaacaatcagactaacatcgttccttatgagaatgggaaagttatctttgggaacgtcaccattgtccctccaattgatagatttggtcttttgattccaacagacaattatgacactatacgactcggaccgatg

SEQ ID NO: 6692 - DNA, 203 bp, Artificial sequence
  synthetic
ggcgcgccagtcctgagtgcgttaggatgagtcctggcattgaattgagtgaagaagtttgtggattcatggggccaaagtatgatgtccttttgagaacacaatggggaaaaagagagacagaacacatgcacagaactagaagaagtgttacagagacaacccatgagagctctggtggagaacatcgactcggaccgatg

SEQ ID NO: 6693 - DNA, 203 bp, Artificial sequence
  synthetic
ggcgcgccagtcctgagaaatttgacatcatagaagctggtggctacacgaaaatgacaacattccttaaacatgacaaatgtttcatggttagggttccagaacatgatgtggttgaaataacagttgttaagaaaacaattaggccaactactgggtgtaaaacattcttactaggggctagtgtccgactcggaccgatg

SEQ ID NO: 6694 - DNA, 203 bp, Artificial sequence
  synthetic
ggcgcgccagtcctaagattaccatgccattgattccatcattaccttaccaagtaactttaattggtcttgatccaaaatatggtattaccatttatagggttgattcccaggaagagtacacaaatttggccaaagttttaagtgaaaaatatgatctggttaggaaaataacaggttggtatggacgactcggaccgatg

SEQ ID NO: 6695 - DNA, 203 bp, Artificial sequence
  synthetic
ggcgcgccagtcctagagcactaattggagacaaaatgttgttctgcgaggcaaactgggttgattgtaacactcatgattatgaattaagcttttggacatcagcattgatcacaacaaaaagccgaagttatgaacataaaccttgcaaaattcaacctaaagatgagatctttgaagatgccgatcgactcggaccgatg

SEQ ID NO: 6696 - DNA, 203 bp, Artificial sequence
  synthetic
ggcgcgccagtcctctaataattccaactgttttccagttaatggtgaatggaataataacgtcaattgtctcaataacagtgttcttttgcgggagcatgaagaatacgttggtaactgcaacagacatagtagaagggatcaatcttggacactggaaaaggactgccatggtgacactaatggtgcgactcggaccgatg

SEQ ID NO: 6697 - DNA, 203 bp, Artificial sequence
  synthetic
ggcgcgccagtcctctctgctggaaatatcaaattggaattggctatgttcacaatggcactctcaccacccaataccacgtcacttgtggccgagatctttggtggaagggtaaaagttactctccagttgaagagaatgttgtctctgactatgcttgttactttggtccgtggtctttcccgaaacgactcggaccgatg

SEQ ID NO: 6698 - DNA, 203 bp, Artificial sequence
  synthetic
ggcgcgccagtcctgctggcaactccatcgtatttggaggtgaaagtgtccaggtgggtgagaacccttcctttgctcctcacttggacggtaaaattaaacagttgctcaacacaaggggatgctgggaagaatttgttctaaagtgtggagctggaaaaacaagaggtgtaatcaaggatacaatccgactcggaccgatg

SEQ ID NO: 6699 - DNA, 203 bp, Artificial sequence
  synthetic
ggcgcgccagtcctagagtctttagtggcattaggatgcaatcatcaggagagggttgtgaattgttctcaattttatttggggttcaatgttatggatggatgacttactttgacatgccagcgtcttggatagctttggctcaccaagctttgccgccacaatggagggagactatcaccccaatgcgactcggaccgatg

SEQ ID NO: 6700 - DNA, 203 bp, Artificial sequence
  synthetic
ggcgcgccagtcctcccatctggcaaattctttttgtggtcttcattacagtcatagttgtggaaacagtttgtggtataacacagagggagaagtcaactggtgaagtcactcaactagtaaccataggtgcagtgatcttcattatctattacatactggctgatggtgaaatactgaccttaatccgactcggaccgatg

SEQ ID NO: 6701 - DNA, 203 bp, Artificial sequence
  synthetic
ggcgcgccagtcctcctgatttgaacggtaaaaaggtctacaaaaaatttaattgggaaattggagacttatttaaaaagagaattagatgtgacacatttgtcatggacattggagaatctcatcccaatcaagagattgaagccataggagatctaaaaaggttgaattggtttaaagaaaatgtgcgactcggaccgatg

SEQ ID NO: 6702 - DNA, 203 bp, Artificial sequence
  synthetic
ggcgcgccagtcctgattgtaagaattggtgcattaaaataatggtaccaactcatgaacaggtgctacatgctctcccaaaaggttccacattaattcgaaacccttggagcagaaattctaccttggaaatgtattgtgttccagggtcgaatgaaccagggagaatggttagtaatgtgattaaacgactcggaccgatg

SEQ ID NO: 6703 - DNA, 203 bp, Artificial sequence
  synthetic
ggcgcgccagtcctccaccccaacctttgggtaactacaaaagtgaatttcaagagaagttcaaatgggttcaacaatggtacaaatcaaaaaacaagcatggtaggatactaactaatgaggaagttatttcaaaatttaagagtgatggtgctctcggctttaggtgccaacattatggatccatacgactcggaccgatg

SEQ ID NO: 6704 - DNA, 203 bp, Artificial sequence
  synthetic
ggcgcgccagtcctgttcgccactccttggacatggagcgtggttccacaattcacaccaatgagagatcaaattggaaaaagtttctccttgagaaaatggttccagatctaagtaggagaaataatacagctccaaacatgaattggttggttaggaatggaaacaggggtaatcttttagtttaacgactcggaccgatg

SEQ ID NO: 6705 - DNA, 203 bp, Artificial sequence
  synthetic
ggcgcgccagtcctgcttcacgcacctcgcgtgaccggccagtactcttaccactttccgcctacttggtcgtcagcgctgttttgggcactcctgttgggggctgttcgacgctccacggtctcctccgtactgacatctacggtgttggggccgccacgtgcgagccgctcgcctggtgtgcttcgcgactcggaccgatg

SEQ ID NO: 6706 - DNA, 203 bp, Artificial sequence
  synthetic
ggcgcgccagtcctactgtcacccgacgcccgcctttcacccccccccccctaggttctaccgtcgttcccgacgtttgaagggaggaaaccacacgcttgcaacaccactcccggtgtcaacgggatgcaaccgcaagatggaccttcgcccggaagtaaaacggcagctttacacagttttgcccgcgactcggaccgatg

SEQ ID NO: 6707 - DNA, 203 bp, Artificial sequence
  synthetic
ggcgcgccagtcctcggtccactggcgggtgttagtagcagcactgttgtttcgtagcggagcatggtggccgtgggaactcctccttggtgacaagggcccacggggccgaaagccacgtccagacggacccaccatgtgtgcaaccccagcacggcaacttttactgcgaacaccaccttaaggtgcgactcggaccgatg

SEQ ID NO: 6708 - DNA, 203 bp, Artificial sequence
  synthetic
ggcgcgccagtcctacactggtactggtactcggtcactggtgacaggctaaggatgcccttcaggtaccccgaggtaacacgggacactcgggatctgagaaggggattgggacttctttaaaagtgcccagtttaaaaagcttctacgcctgaataggcgaccggaggccggcgcctttccattaccgactcggaccgatg

SEQ ID NO: 6709 - DNA, 203 bp, Artificial sequence
  synthetic
ggcgcgccagtcctccactactaaatccatgaatacgactgactgttttatcgctctgctatacgctctcagagagatcaaagcactgtttctgtcacgaacacaagggaagatggaattcacactttacaacggtgaaaagaaggtcttctactccagacccaacaaccacgacaactgttggctgacgactcggaccgatg

SEQ ID NO: 6710 - DNA, 203 bp, Artificial sequence
  synthetic
ggcgcgccagtcctacgccatcctccaactgttcaggtacgttgacgagcccttcctcgaatgggtctacgactcacctgagaacctcactctcgaggcgatcaacaaactggaagaaatcacaggtcttgagctacacgaggggggaccgcccgcccttgtcgtctggaacatcaagcacttgctctcgactcggaccgatg

SEQ ID NO: 6711 - DNA, 203 bp, Artificial sequence
  synthetic
ggcgcgccagtcctggacaccaaatccggccgacgttttggtttttgttccgtacgatcaagaaccattcaacgcagaatggaaagcaaaggttcagaagcggctcaggggcgccgggcaatccagcccgacgaccgggtcacaaaaccaatctggcaacactggcagcattattaacaattactacacgactcggaccgatg

SEQ ID NO: 6712 - DNA, 203 bp, Artificial sequence
  synthetic
ggcgcgccagtcctccgaacggttcttcaaaacccacctgtttgactgggtcaccagtgacccgtttgggcggtgtcacttgttggagctaccgactgaccacaaaggcgtctacggtagcctgaccgactcgtacgcatacatgaggaatggttgggacgttgaagtcaccgcagtgggtaaccaatcgactcggaccgatg

SEQ ID NO: 6713 - DNA, 203 bp, Artificial sequence
  synthetic
ggcgcgccagtcctagataacacacgggaaagccgacggtgacgccctggtcgtgctagctagtgctggcaaagactttgacttgcgtctgccggtcgacgcccgaacccaaaccacctctgcgggtgagtctgcggaccccgtgactgccaccgtcgagaactacggtggtgagacacaagtccagacgactcggaccgatg

SEQ ID NO: 6714 - DNA, 203 bp, Artificial sequence
  synthetic
ggcgcgccagtcctggcgccagcacacggacattgcgttcatactggacaggttcgtgaaagtcaagccaaaggaacaagttaatgtgttggacctgatgcagatccctgcccacaccttggtaggggcgctcctgcgaacggccacctactacttctctgacctggagctggccgtcaagcacgaggcgactcggaccgatg

SEQ ID NO: 6715 - DNA, 203 bp, Artificial sequence
  synthetic
ggcgcgccagtcctgcgatctcacctgggtcccaaacggcgcccctgagacagcactggacaacactaccaacccaacagcttaccacaaggaacccctcacacggctggcgctgccttacacggctccacaccgtgtcttagcgaccgtctacaacgggagcagtaagtacggtgacaccagcactacgactcggaccgatg

SEQ ID NO: 6716 - DNA, 203 bp, Artificial sequence
  synthetic
ggcgcgccagtcctccatcatgctggccgacaccggcctcgagattctggacagcaccttcgtggtaaagaagatctccgactcgctctccagtctcttccacgtgccggctcccgccttcagtttcggagccccgatcctgttggccgggttggtcaaagtcgcctcgagtttcttccagtccacaccgactcggaccgatg

SEQ ID NO: 6717 - DNA, 203 bp, Artificial sequence
  synthetic
ggcgcgccagtcctccgaagacctcgagagagcagaaaagcagctcaaagcacgtgacatcaacgacatatttgccgttcttaagaacggtgagtggctggtcaaactgatcctggccatccgcgactggattaaggcatggatcgcctcagaagagaagtttgtcaccatgacagacctggtgcctgcgactcggaccgatg

SEQ ID NO: 6718 - DNA, 203 bp, Artificial sequence
  synthetic
ggcgcgccagtcctgcatccttgaaagacaacgggatctcaatgaccccggcaaatacaaggaggccaaggaatggctggacaacgcgcgtcaagcgtgtttgaagagcgggaacgtgcacattgccaatctgtgtaaggtggtcgctccggcgcccagcaagtcgagacccgaaccagtggtcgtgtcgactcggaccgatg

SEQ ID NO: 6719 - DNA, 203 bp, Artificial sequence
  synthetic
ggcgcgccagtcctgccttcgcggcaaatccggccaagggaaaagctttctcgcgaacgttctcgcgcaggcaatttccacacacttcactggtaggaccgactcggtctggtactgcccgcccgaccctgaccactttgacggttacaatcagcagaccgtcgtcgtgatggacgacttgggccaaacgactcggaccgatg

SEQ ID NO: 6720 - DNA, 203 bp, Artificial sequence
  synthetic
ggcgcgccagtcctacccagacggcaaagacttcaagtactttgcccaaatggtatccaccacggggttcatcccgcctatggcctcgctcgaggataagggtaaacccttcaacagcaaggtcataatagctacaaccaacctgtactcgggattcaccccaaagaccatggtgtgccccgatgcgccgactcggaccgatg

SEQ ID NO: 6721 - DNA, 203 bp, Artificial sequence
  synthetic
ggcgcgccagtcctttaaccggaggtttcactttgacatcgacgtgagcgccaaagacgggtacaagatcaacaacaaactggacatagtcaaagcacttgaagacacccacgctaacccggtggcgatgttccaatacgactgcgctcttctcaacggaatggccgttgaaatgaagagaatgcagccgactcggaccgatg

SEQ ID NO: 6722 - DNA, 203 bp, Artificial sequence
  synthetic
ggcgcgccagtcctcgcgcaagaggtaccaatcggtggatgacccactggacggcgacgtaactcttggcgacgcggaaaagaaccctctggagacgagtggcgctagcgctgtcggtttccgagagagatcccccaccgagcaagggacgcgcgaagacgcgaacgctgagcccgtcgtgttcggtacgactcggaccgatg

SEQ ID NO: 6723 - DNA, 203 bp, Artificial sequence
  synthetic
ggcgcgccagtcctctgcctacctcgtgcctcgtcatctcttcgcggaaaagtacgacaagatcatgttggacggcagagccttgacagacagtgactacagagtgtttgagtttgagattaaagtaaaaggacaggacatgctctcagacgccgctctcatggtgttgcaccgtgggaatcgcgtgccgactcggaccgatg

SEQ ID NO: 6724 - DNA, 203 bp, Artificial sequence
  synthetic
ggcgcgccagtcctgtgacatcacgaaacactttcgtgacgtagcgagaatgaagaagggaacccccgtcgtcggtgtgatcaacaatgctgacgtcgggagactcatattctctggtgaagcccttacttacaaggacatcgtcgtgtgtatggatggagacaccatgcctgggctctttgcctacacgactcggaccgatg

SEQ ID NO: 6725 - DNA, 203 bp, Artificial sequence
  synthetic
ggcgcgccagtcctaggggttgatcgtcgacaccagagatgtggaggagcgtgtccacgtgatgcgcaaaaccaagctcgcgcccaccgtggcgcacggtgtgttcaaccctgagttcgggcctgccgctctgtccaacaaggacccgcgcctgaacgaaggggttgtccttgacgatgtcattttctcgactcggaccgatg

SEQ ID NO: 6726 - DNA, 203 bp, Artificial sequence
  synthetic
ggcgcgccagtcctcgcccggtctcccctgggctctccaagggaaacgccgcggcgccctgatcgacttcgaaaacggcaccgtcgggcctgaggttgaggcagcactcaagctcatggaaagccgcgagtacaaattcgtctgccaaaccttcctgaaggacgaaattcggccgctagaaaaggtaccgactcggaccgatg

SEQ ID NO: 6727 - DNA, 203 bp, Artificial sequence
  synthetic
ggcgcgccagtcctgcgctggcaagacacgcattgtcgacgtgttgcctgttgaacacattctctacaccagaatgatgattggcagattctgtgctcagatgcattcaaacaagggaccgcaaattggatcagcggtcggttgtaaccctgacgttgattggcaaagatttggcacacatttcgccccgactcggaccgatg

SEQ ID NO: 6728 - DNA, 203 bp, Artificial sequence
  synthetic
ggcgcgccagtcctttgttgttgaaggtggaatgccgtccggttgttccgcaacaagcatcatcaacacaattttgaacaacatctacgtgctttacgccctgcgtaggcactatgagggagtcgagctggacacttacaccatgatctcttatggagacgacatcgtggtggcaagtgactacgacccgactcggaccgatg

SEQ ID NO: 6729 - DNA, 203 bp, Artificial sequence
  synthetic
ggcgcgccagtcctctgattgtttccgcaagcatccggaagccacatactctcggtgcggctccggtccctggattacacccaggtgcatggtcgactacccgtataggctttggcactatccttgtaccatcaattacaccatattcaaagtcaggatgtacgtgggaggggtcgagcacaggctggcgactcggaccgatg

SEQ ID NO: 6730 - DNA, 203 bp, Artificial sequence
  synthetic
ggcgcgccagtcctggattgtcttgtccgggaagccggcaattatacctgacagggaggttctctaccaggagttcgatgagatggaagagtgctctcagcacttaccgtacatcgagcaagggatgatgctcgctgagcagttcaagcagaaggccctcggcctcctgcagaccgcgtcccgccaagcgactcggaccgatg

SEQ ID NO: 6731 - DNA, 203 bp, Artificial sequence
  synthetic
ggcgcgccagtcctttttttttttttttccttttttttttttttttttttctttccttcttttttcctttcttttccttccttctttaatggtggctccatcttagccctagtcacggctagctgtgaaaggtccgtgagccgcatgactgcagagagtgctgatactggcctctctgcagatcatgtcgactcggaccgatg

SEQ ID NO: 6732 - DNA, 203 bp, Artificial sequence
  synthetic
ggcgcgccagtcctaatgcagtattgggtagaaagaaacaaaggtctgccaagacggtgtgggttctcttcagcatgttggctttgatggtggccatggagattgagcaacagggcacgtcattagtcattaagcctcaaaggagtgatgttggacggccagttcgagttagcacaggctactgcatgcgactcggaccgatg

SEQ ID NO: 6733 - DNA, 203 bp, Artificial sequence
  synthetic
ggcgcgccagtcctttctccgctatggacattgggataacgtgtgagaaaaccatacagtatgagtgtgttactttaaccacatctgaagagccgtttgatgttgattgttactgtaggaatgtcacaaatgtgttggttgagtattcaacgtgcaatccaacagtggaacgtgcaaaaaggtctctgcgactcggaccgatg

SEQ ID NO: 6734 - DNA, 203 bp, Artificial sequence
  synthetic
ggcgcgccagtcctgtgatccaagatcacccacactctgaaactgtggctaaaccaacactgtggctgaaatggaatacagttaatgatcgagtgggcatgactgaggaatgggtgatgagaaatacctggaaggcaacaattcttaccctggctattatagctgtcactggactcaactggaaaggacgactcggaccgatg

SEQ ID NO: 6735 - DNA, 203 bp, Artificial sequence
  synthetic
ggcgcgccagtcctcctggagggcatgttgattgccgagttagcctagtgaacctgaagctaaagggaacaacttacccttattgtggtgactcattcgtttggaagcggcgccctacggctacccatcatggtacagttgcaatggaagtcacctaccaaggaactgatgttccgtgcaaggtatctcgactcggaccgatg

SEQ ID NO: 6736 - DNA, 203 bp, Artificial sequence
  synthetic
ggcgcgccagtcctgttatcgtggaaaaagatggacagaacggaggtaatgcaggaagtttgattacatcaaatccaatcatcacagcacaagggtcatcagtgttcttagaactggaggttccactgggtttttccactattaaggttggtgcagcaaaacagcaatggagacaggatggcagttcacgactcggaccgatg

SEQ ID NO: 6737 - DNA, 203 bp, Artificial sequence
  synthetic
ggcgcgccagtcctgaaatcaatgacttcaagcatggttacaagtattatcctgaggacccagaaacattcctggcaagtttggttcaagacggtgaaaaacactgtgggtatcaaccttcaaacctgatagagttgcgaatgtggcagtctctagaaaaggaattgaacctttacttggaagaccagcgactcggaccgatg

SEQ ID NO: 6738 - DNA, 203 bp, Artificial sequence
  synthetic
ggcgcgccagtcctatgattgtgcatggctctccttggatgtggatggagagctatgaagtgaatggaactgtgcaactacaaaagttgactctcacccacacagttgaatgtctctggccaattacacacactcttggaaacagaatggttttggactccaaattgatattgccaaaagaaatgggacgactcggaccgatg

SEQ ID NO: 6739 - DNA, 203 bp, Artificial sequence
  synthetic
ggcgcgccagtcctggtccagcttctatcttgaatatggttgaaggctattcagaacaaaacaagtgtccctggaatcaaggtcctgtgacagtggaaagaggttattgtgaagggactgaagttgagatatccgaagactgtgaagaaaggggaccttgtacgaggtcaaaaacccaaggaggaacacgactcggaccgatg

SEQ ID NO: 6740 - DNA, 203 bp, Artificial sequence
  synthetic
ggcgcgccagtcctctggttctttactacctaggcattctaacaaagattgaaaaagggaattggggaccttccttgattgtcacaatctccatcatgatgtggttacatatcatcgatgtaactgaattgttgcattacttgttggctgttggttacacatttgtctggcaaacatctgagcccatgcgactcggaccgatg

SEQ ID NO: 6741 - DNA, 203 bp, Artificial sequence
  synthetic
ggcgcgccagtcctctgtggattgtggccatgcaagctatttttcagttgagacctgggtttgctgtagggttcgccctgtgcaaaacctggaggtttgaacggattgtcggcatggttgcttgcatgtggacaattcaagagttaacaactccatatgaagccttttggagatttatggatgcactgcgactcggaccgatg

SEQ ID NO: 6742 - DNA, 203 bp, Artificial sequence
  synthetic
ggcgcgccagtcctggcttgcttgtgtatgcttactcagcctcccactcaacacgacagagttatctctatgtcgtcttgatgctatcactcaccaaaattcagaatgcgacaatcagactggctgttggaatgtttggtaccatgctactaatgttagtaggaaggaagtttgctgagagtgattggcgactcggaccgatg

SEQ ID NO: 6743 - DNA, 203 bp, Artificial sequence
  synthetic
ggcgcgccagtcctaatacagatccttggataattggagttatggcattggtccttcttttctttctttttcaggttagttctggagagatggtagcagagtgggctgggtaccacgagtggaaaaaggactgtcctaagtctgttggttctataagtcttgaagtgaagagaatggctgatggcagacgactcggaccgatg

SEQ ID NO: 6744 - DNA, 203 bp, Artificial sequence
  synthetic
ggcgcgccagtcctgtgagttttcattcatcagctgtgtcaagtaaaacacctggaagtctgattgatgtgatgtgtcatgccacatttgttaaccgcaaattaatccatatgcctcaaaagaactatgaacttatcatcatggatgaagcacattggacggacccatccagcatagcggctaggggacgactcggaccgatg

SEQ ID NO: 6745 - DNA, 203 bp, Artificial sequence
  synthetic
ggcgcgccagtcctaggaccgcctggtttgttccctcccagaatgctgcgcaagggattgcgaaaaccttaagggagcatgggaagaaagttgctatcttgacaagtaaaacctttcatgatgtgtatccaaaattgaaaactgaaaagcctgattttattttgacaacagacatttctgaaatgggtcgactcggaccgatg

SEQ ID NO: 6746 - DNA, 203 bp, Artificial sequence
  synthetic
ggcgcgccagtcctgctcccgtgtggctggacaccagactaaccagagaaaggaaagatttggctgggttcatagaatatgctgagaagaggagaagtagtgttttaacagccatcccaggactgctttatagtaggttcttgtcagcctttgacaccatttacatctactccacttctgatccatctcgactcggaccgatg

SEQ ID NO: 6747 - DNA, 203 bp, Artificial sequence
  synthetic
ggcgcgccagtccttggattggaggagctcctttgagtctggttgcagcactggttttgatatcatttattttgcttgtgtgcttaataccagagcagggaatgcagaggacccaaatagacaccacattggctacactggttttggctattgtgacatttggcttacttgtgtttgccaatgagatgcgactcggaccgatg

SEQ ID NO: 6748 - DNA, 203 bp, Artificial sequence
  synthetic
ggcgcgccagtcctagatggcttgaaaacacaaagaaagatttgtttggccagcctcaaactagtcctagtgtgaatactggaggaatcatccaggatctccttcagcttgatattagaccaatgaatgtgtggggaacctatgttgcactggtgacggttgctcggccacaagcgctccataatctacgactcggaccgatg

SEQ ID NO: 6749 - DNA, 203 bp, Artificial sequence
  synthetic
ggcgcgccagtcctaaaatgttcactaagaagatagtgtcgggagtggtcgcaggaaaggagagtgcaatggaaagactcccgaccggtggagcttggatgaatctcaggatgggtgacctcactcttctggcaacaaccttgaagggaatgacctgtttcaatctattgggaggtttaacctttgctcgactcggaccgatg

SEQ ID NO: 6750 - DNA, 203 bp, Artificial sequence
  synthetic
ggcgcgccagtccttggttgaatgagatgcaaaaaattaggaaggacattgacctgtggaaaccttcagcaggtcattgcaactgggaggaagtagagttctgttccaaccactttcacaagcttgttatgagagatgggagaaccttggttgttccttgcagacatgaagttgagcttgtggggcgtcgactcggaccgatg

SEQ ID NO: 6751 - DNA, 203 bp, Artificial sequence
  synthetic
ggcgcgccagtcctgccagcgtcaaccagggtggttcaacagggatttctgggactgcttgtttagctaaggcatatgcacaaatgtggctgcttctttacttccacaggagagatctcagaattttgggaatggcaatttgttcagcagttccagccaactgggttccaacaggacgaacgacctggcgactcggaccgatg

SEQ ID NO: 6752 - DNA, 203 bp, Artificial sequence
  synthetic
ggcgcgccagtcctactaatggaaaaaatgcgagtgagggcaactctgggattagctcaatgggtgtgacgaccctacccttccgcatttgtaaataattgagccagtcatttccgtagggaagagagttattcgctcctctcgagattgagcggcctgctccttggagcatgagatgggaggcccgacgactcggaccgatg

SEQ ID NO: 6753 - DNA, 203 bp, Artificial sequence
  synthetic
ggcgcgccagtcctagcaaagctgaaaggactagcggttagaggagaccccttccatctctggtatcaaatttcatggagtttactccatggtggctagaacccatagcgggggtgaaccacattggctaaggttcaccagcttttgctcccgcgtttttcaaattgcctcatcttgaatggggggcgcgactcggaccgatg

SEQ ID NO: 6754 - DNA, 203 bp, Artificial sequence
  synthetic
ggcgcgccagtcctacacctataatcttattatgtgtaggtgccttaatatttaccaaactagcatcaactatagaagtgggattagagaccacagtcagaagagctaaccgtgtactaagtgatgcactcaaaagataccctaggatggacataccaaaaatcgctagatctttctatgatttatttcgactcggaccgatg

SEQ ID NO: 6755 - DNA, 203 bp, Artificial sequence
  synthetic
ggcgcgccagtcctggcttaggcataataggtatgtatcgcgggagagtgccaaacacagaactattttcagcagcagaaagctatgccaagagtttgaaagaaagcaataaaattaacttttcttcattaggactcacagatgaagaaaaagaggctgcagaacactttctaaatgtgagtgacgaccgactcggaccgatg

SEQ ID NO: 6756 - DNA, 203 bp, Artificial sequence
  synthetic
ggcgcgccagtcctgattatgaccatgaacaatcccaaaggcatattcaagaagcttggagctgggacccaagttatagtagaactaggagcatatgtccaggctgaaagcataagtaaaatatgcaagacttggagccatcaaggaacaagatatgtgctgaagtccagataacagccaagcaacctcgactcggaccgatg

SEQ ID NO: 6757 - DNA, 203 bp, Artificial sequence
  synthetic
ggcgcgccagtcctctcaaaacagtctctgctgaccaattggcaagagaggaacaaattgagaatcccagacaatctaggtttgttctaggagcaatagcactcggtgttgcaacagcagctgcagtcacagcaggtgttgcaattgccaaaaccatccggcttgagagtgaagtcacagcaattaagcgactcggaccgatg

SEQ ID NO: 6758 - DNA, 203 bp, Artificial sequence
  synthetic
ggcgcgccagtcctaacagaaggtttctaaatgttgtgcggcaattttcagacaatgctggaataacaccagcaatatctttggacttaatgacagatgctgaactagccagggccgtttctaacatgccgacatctgcaggacaaataaaattgatgttggagaaccgtgcgatggtgcgaagaaagcgactcggaccgatg

SEQ ID NO: 6759 - DNA, 203 bp, Artificial sequence
  synthetic
ggcgcgccagtcctagtatggttgcactgtctcctcttggggctctggttgcttgctacaaaggagtaagctgttccattggcagcaacagagtagggatcatcaagcagctgaacaagggttgctcctatataaccaaccaagatgcagacacagtgacaatagacaacactgtatatcagctaagccgactcggaccgatg

SEQ ID NO: 6760 - DNA, 203 bp, Artificial sequence
  synthetic
ggcgcgccagtcctaaaataaaatttgggacaaatcataatgtctcgcaaggctccatgcaaatatgaagtgcggggcaaatgcaacagaggaagtgagtgtaagtttaaccacaattactggagttggccagatagatacttattaataagatcaaactatctattaaatcagcttttaaggaacaccgactcggaccgatg

SEQ ID NO: 6761 - DNA, 203 bp, Artificial sequence
  synthetic
ggcgcgccagtcctggaagggctagggttgagaagtaatctgcaaggtatgttaactaataaactatatgaaactgtagattatatgctaagcttatgttgcaatgaaggtttctcacttgtgaaagagttcgaaggttttattatgagtgagatccttaggattactgaacatgctcaattcagtaccgactcggaccgatg

SEQ ID NO: 6762 - DNA, 203 bp, Artificial sequence
  synthetic
ggcgcgccagtcctagaagagcaaagtggtctatatagatatcacatgggcggtattgaaggatggtgtcaaaaactctggacaatggaagctatatctttattggatgttgtatctgtaaagacacggtgtcaaatgacatctttattaaacggtgacaaccaatcaatagatgtaagtaaaccagtcgactcggaccgatg

SEQ ID NO: 6763 - DNA, 203 bp, Artificial sequence
  synthetic
ggcgcgccagtcctcaagttatctgaaggtttagatgaagtgaaggcagattatcgcttagcagtaaaaatgctaaaagaaataagagatgcatacagaaatataggccataaacttaaagaaggggaaacatatatatcaagggatcttcagtttataagcaaggtgattcaatctgaaggagtgatcgactcggaccgatg

SEQ ID NO: 6764 - DNA, 203 bp, Artificial sequence
  synthetic
ggcgcgccagtcctagctgttggatcagaacgacaagcaaaagtaacaagtgacatcaatagaacagcagttaccagtatcttaagtctttccccaaatcaacttttcagtgatagtgctatacactacagcagaaatgaagaagaagtgggaatcattgcagaaaacataacacctgtttatcctcacgactcggaccgatg

SEQ ID NO: 6765 - DNA, 203 bp, Artificial sequence
  synthetic
ggcgcgccagtcctaatgagatgggtgtataaagggacaccaggcttgcgacgattactcaacaagatctgtcttgggagtttaggcattagctacaaatgtgtaaaacctttattacctaggtttatgagtgtaaatttcttacatagattatctgtcagtagtagacctatggaattcccagcatccgactcggaccgatg

SEQ ID NO: 6766 - DNA, 203 bp, Artificial sequence
  synthetic
ggcgcgccagtcctggacttcaaaatattcctatgtgtctttaaaactaaacttttatgtagttggggatctcaagggaaaaacattaaagatgaagatatagtagatgaatcaatagataaattgttaaggattgacaatactttttggagaatgttcagcaaagttatgtttgaaccaaaggttaacgactcggaccgatg

SEQ ID NO: 6767 - DNA, 203 bp, Artificial sequence
  synthetic
ggcgcgccagtccttatgaaagacctaaatcctaaagttttgtactttattggagaaggagcaggaaattggatggccagaacagcatgtgaatatcctgatattaaatttgtatatagaagtctgaaagatgaccttgatcatcattatcctctggaataccagagagtgataggtgaattaagcagcgactcggaccgatg

SEQ ID NO: 6768 - DNA, 203 bp, Artificial sequence
  synthetic
ggcgcgccagtcctttataatcctagagtgccaaggagttgcgtgtcatcattgattgggaagatcaaggaaacaatttgttccaataatatcgtacatcttgactaagtcgaacaaggggaagtcgatatggatcgtgggaccagaagaatctgggtgtcgcaaaatcaaggtgatactgatttagacgactcggaccgatg

SEQ ID NO: 6769 - DNA, 203 bp, Artificial sequence
  synthetic
ggcgcgccagtcctactgcctgaagaggagactacagaagcaaatgcagggcaatttctctcatttgcgagtttgtttcttcccaaactggttgtgggagagaaggcttgcttggaaaaagtccagcgacaaattcaggttcatgcagaacagggtttaattcaatatcccactgcatggcaatcagtcgactcggaccgatg

SEQ ID NO: 6770 - DNA, 203 bp, Artificial sequence
  synthetic
ggcgcgccagtccttggacacatgatggtaatcttcagattgatgaggactaatttcttgattaaatatttactgatccaccagggtatgcatatggtagctggccacgatgccaatgatgctgtcattgctaattcagttgctcaggctcgcttttcaggactcctaattgtcaaaaccgttcttgacgactcggaccgatg

SEQ ID NO: 6771 - DNA, 203 bp, Artificial sequence
  synthetic
ggcgcgccagtccttcatattctgcaaaaaaccgaccaaggagtaagacttcaccctttggcccgaacagccaaagtgcgtaatgaggttaatgcatttaaggccgccctaagctcacttgctaagcatggggaatatgccccttttgctcgccttctcaatctctcgggagttaacaacctagaacacgactcggaccgatg

SEQ ID NO: 6772 - DNA, 203 bp, Artificial sequence
  synthetic
ggcgcgccagtcctaataccgttccctgggcctataagcaacaacccagaccaagatcatctggaggatgatcctagagactccagagacaccatcattcctaatggtgcaattgaccccgaggatggtgattttgaaaattacaatggctatcatgatgatgaagttgggacggcaggtgacttggtcgactcggaccgatg

SEQ ID NO: 6773 - DNA, 203 bp, Artificial sequence
  synthetic
ggcgcgccagtcctacaaggaggtcaatacaactggcaccgaggcccagaacgtacgaccgccaatcgaagactctcaccagtgcacgaagaggacacccttatggatcaaggtgatgatgatccctcaagcttacctccgctggaatctgatgatgacgatgcatcaagtagccaacaagatcccgacgactcggaccgatg

SEQ ID NO: 6774 - DNA, 203 bp, Artificial sequence
  synthetic
ggcgcgccagtcctgaatgcgcttaaaggaaaaatcgatgatccaaacagctatgtaccagatgctgtgcaagaggcttacaagaaccttgacagtacatcgaccctgaccgaggaaaattttgggaaaccttatatatctgctaaagacctgaaggagatcatgtatgatcatctacctggttttggcgactcggaccgatg

SEQ ID NO: 6775 - DNA, 203 bp, Artificial sequence
  synthetic
ggcgcgccagtcctctgcaacctggacagacgaaactccagcaggagcagtcaatgctcttcgtcctgggctctcactccatcccaagcttcgtccaattctcctgccggggaagacaggaaagaaaggacatgcttcagacttaacatcacctgacaagattcaaacaatcatgaatgcaataccggcgactcggaccgatg

SEQ ID NO: 6776 - DNA, 203 bp, Artificial sequence
  synthetic
ggcgcgccagtcctgaattgcaaccgatgtcccatcagcaacaaaacgctggggatttcgttcaggtgtgcctcccaaggtggtcagctatgaagccggagaatgggcagaaaattgctacaatctggagatcaaaaagtcagacggaagtgaatgcctccctctccctcccgacggtgtacgaggatcgactcggaccgatg

SEQ ID NO: 6777 - DNA, 203 bp, Artificial sequence
  synthetic
ggcgcgccagtcctgcatttccaaattccatcaacccacaccaacaactcctcagatcagagcccggcgggaactgtccaaggaaaaattagctaccacccacccgccaacaactccgagctggttccaacggattcccctccagtggtttcagtgctcactgcaggacggacagaggaaatgtcgaccgactcggaccgatg

SEQ ID NO: 6778 - DNA, 203 bp, Artificial sequence
  synthetic
ggcgcgccagtcctccaaggtctaaccaacggagagacaatcacaggtttcaccgcgaacccaatgacaaccaccattgccccaagtccaaccatgacaagcgaggttgataacaatgtaccaagtgaacagccgaacaacacagcatccattgaagactcccccccatcggcaagcaacgagacaatcgactcggaccgatg

SEQ ID NO: 6779 - DNA, 203 bp, Artificial sequence
  synthetic
ggcgcgccagtcctttaccactccgagatggatccgatccaaggctcgaacaactccgcccagagcccacagaccaagaccacgccagcacccacaacatccccgatgacccaggacccgcaagagacggccaacagcagcaaaccaggaaccagcccaggaagcgcagccggaccaagtcagcccggcgactcggaccgatg

SEQ ID NO: 6780 - DNA, 203 bp, Artificial sequence
  synthetic
ggcgcgccagtcctgtcttctatgtgagacccacctacggcatgagggcctcggacaggaccaagctgattctgtattagaggtctaccaaagactccacagtgataaaggagggaattttgaggctgccctgtggcaacaatgggaccgacagtcattaataatgttcatctctgcttttctcaacacgactcggaccgatg

SEQ ID NO: 6781 - DNA, 203 bp, Artificial sequence
  synthetic
ggcgcgccagtcctcagtcaccaggctgttctcagtagtctgtccttggaagctcttggggagacaaaaagaggtcccagagagtcccaacaggttggcataaggtcattaacaccagcatagtcggctcgaccaagactgtaagcgagtcgatttcaactaaaaagattatttcttgttgtttaaaccgactcggaccgatg

SEQ ID NO: 6782 - DNA, 203 bp, Artificial sequence
  synthetic
ggcgcgccagtccttttgatgtaagtcaaaaaggcatggctcttctgacaagactcaaaacaaatgactttgctcctgcctgggcgatgacaagaaatcttttcccacatctgttccagaacccaaattcggttattcaatctcccatctgggctttgagggtaattttggcagccggattgcaggatcgactcggaccgatg

SEQ ID NO: 6783 - DNA, 203 bp, Artificial sequence
  synthetic
ggcgcgccagtcctctattttcgctaattgcattgagcactgctaataggtttgtatcacgttaaagatttagagtgtatgaattgtgcagatttaaacttgggttttgccttatgcttcataggtggtctttttgaaatggagattatcagcatttcttaaatgggaggagttagcaatcagaaattcgactcggaccgatg

SEQ ID NO: 6784 - DNA, 203 bp, Artificial sequence
  synthetic
ggcgcgccagtcctggagataaatggacatcgggatagaacaatgcctaactattgggcggcttccatttttacatgtgtatataaccaatcttttcctatctttgcttatattggtgtaactttattttaataacatgtcaatgctatactgttaagagaaggtctgaggaagattaagaaaaaggccgactcggaccgatg

SEQ ID NO: 6785 - DNA, 203 bp, Artificial sequence
  synthetic
ggcgcgccagtcctcttgcaatcaattccttgatgaaattattaattacactcttcatgatgcagcctttcttgattactatctcaaggcaacaggtgcacaggaccatttgacaaacattgcaactagagagaagcttaaaaacgaaattctaaacaatgattatgtccatcaattgttcttctggccgactcggaccgatg

SEQ ID NO: 6786 - DNA, 203 bp, Artificial sequence
  synthetic
ggcgcgccagtcctatgtgctaggttacaatcctccaaacaaattctccactaaaagggtgccggaacaatttctagaacaagaggatttttcaatcgaaagtgtcctgaattatgcacaggaattacattatttattaccacagaataggaatttttccttttctctcaaagaaaaggaattaaatacgactcggaccgatg

SEQ ID NO: 6787 - DNA, 203 bp, Artificial sequence
  synthetic
ggcgcgccagtcctttaagttacgatcagcggtcatgggagacaatcagtgtataaccgtattgtctgtttttccacttaaaacagaccctgaagagcaggagcaaagcgccgaagacaatgctgcaagagtagcagcaagtcttgcaaaagtaaccagtgcatgtgggatctttcttaaaccagatgcgactcggaccgatg

SEQ ID NO: 6788 - DNA, 203 bp, Artificial sequence
  synthetic
ggcgcgccagtcctcaaaccctgtcatgagtcgctttgcagcggatattttttccaggacaccgagtggtaaacgtctccaaatattaggttatcttgaagggaccaggactctattggcctccaaaatcataaacaacaacagtgagacacctgtacttgataagctgaggaagatcaccctacaaacgactcggaccgatg

SEQ ID NO: 6789 - DNA, 203 bp, Artificial sequence
  synthetic
ggcgcgccagtcctcgcagtatctcaaggtggtggtactcaaagtatttctgagtgatatagaaggaatattatggattaatgattacttggctccattattcggggctggttacttgattaaaccgattacatcaagtgcccggtcaagtgaatggtacctttgcttatcaaatttgatatctactacgactcggaccgatg

SEQ ID NO: 6790 - DNA, 203 bp, Artificial sequence
  synthetic
ggcgcgccagtcctacaggagatcggcccatcagactcacaaggcatgtcttggtgttatcagagatgctttgcaagcacaagtccagcgaggcgtgtactggttgagtcacatcgcacagtatgctacaaagaatctccattgtgaatacataggccttggtttcccatctctagaaaaggtcctatcgactcggaccgatg

SEQ ID NO: 6791 - DNA, 203 bp, Artificial sequence
  synthetic
ggcgcgccagtcctatcacaggtataatctagttgatactggactcggtccattgtcgtcagttattagacatttaactaacctccaggcagagatacgagacttagtattagattataacctgatgagggagagtcgcactcaaacgtaccattttattaagactgcaaaaggcagaatcacaaagtcgactcggaccgatg

SEQ ID NO: 6792 - DNA, 203 bp, Artificial sequence
  synthetic
ggcgcgccagtccttaacatagactgaaaatgctaagaagagattggagtaaaagtataaaataaatttaattaaacttcaaagtgattaaatgataatgatcttgggaactcgatatgacctcaagtcaaaaataatgtcaatataattgtttagtaatatgagtgataatgtaaattttgataactcgactcggaccgatg

SEQ ID NO: 6793 - DNA, 203 bp, Artificial sequence
  synthetic
ggcgcgccagtcctgcaccagtgtaccgatagcagtaagaaacgagctattcaaaagatttgtgtcttaattagtaatgatctaaaggagaatggattattagaagaggctaaaacattcaaaccagagtataaatcaatcgcccaagtatatggtaaattcttcaaacgatacatcgccgaaaaggacgactcggaccgatg

SEQ ID NO: 6794 - DNA, 203 bp, Artificial sequence
  synthetic
ggcgcgccagtccttgattacattgagtgtttgagccatcatttaacatcaactgttgacattgacgttcaccagcaagattgtggtaatttaagcgttgtaatatttgcaaaagataataacattaagaaacagctgcagattcaggtatccgcttgagtggccatggagccgtcggtaattttatgcgactcggaccgatg

SEQ ID NO: 6795 - DNA, 203 bp, Artificial sequence
  synthetic
ggcgcgccagtcctgcgtatctgttgacagaacatcaaattgaacagattaaacagaacagtgttgaccctaacaatacaccaaagattgaagtgaggagtcagttctaactgtttactttgcaggagaggaggtaccgagttctgggactcacgtccatcgccactttacttggttacaacctcacgcgactcggaccgatg

SEQ ID NO: 6796 - DNA, 203 bp, Artificial sequence
  synthetic
ggcgcgccagtcctacggtgtgacaaggtgaagcatgacccatcttcgtgtgctaatggtgtgtgctgctaatcgctggactgccggagggaaaccggcacaaggcgtggccgccactggccgttgatgatcatgtggaactgagctttgctcaggccgactcacattaagtataatttagaactgaccgactcggaccgatg

SEQ ID NO: 6797 - DNA, 203 bp, Artificial sequence
  synthetic
ggcgcgccagtcctaagctttgctgacactaagagctaatgactctggaaattgagcttcgaaaggtaccgggcaaccatgctttccgaggggctcttgggactggaaagtagaggatcccgctgggatgtcaaccaccctctaccaacggtgtcggagtgctcccttaataggacaatttgactgaccgactcggaccgatg

SEQ ID NO: 6798 - DNA, 203 bp, Artificial sequence
  synthetic
ggcgcgccagtccttaacgtcactttcaactactgcttcagcagttaactcgtttgcttattcttactgtaatgttccagtggagagttgggattttaacatgattaaactgactgctgaaactagttgtgcttcacttactgcaatgactaatttggttaatacattagtgcctgatgatagggttacgactcggaccgatg

SEQ ID NO: 6799 - DNA, 203 bp, Artificial sequence
  synthetic
ggcgcgccagtcctgtattccattctagtaatcaacacttgttacacggtgatgcaaatcctgataatatcatgagtgatagtgaaggttacttgaaattggttgacccagtttgcttgcttgaaaatcaagtgaatatggtaaatatagagtacgaatcgttaacccaagaagctgagaagaaagtacgactcggaccgatg

SEQ ID NO: 6800 - DNA, 203 bp, Artificial sequence
  synthetic
ggcgcgccagtcctaatcatcgaccaatgatgcctgagctatcagtgcttaatgatttaacttactatgatactggtgaagtgagagatttggttaccgaagatctagatgatgaagatgacgtttaataacacaatatatatattcattgagactaaggaaactcttaacacagatgtacgacctgccgactcggaccgatg

SEQ ID NO: 6801 - DNA, 203 bp, Artificial sequence
  synthetic
ggcgcgccagtcctatttggatccaaacatatcagaggtcaaactgtggttggaatatttcatagggagtgaagatttcttcgggttcaatggaccaaatgtggttgtgtcaaagtctttgttagctgccaaacgttttgaagttgttgttaatcacttaaggaaggttgcagcttttgaattggatgcgactcggaccgatg

SEQ ID NO: 6802 - DNA, 203 bp, Artificial sequence
  synthetic
ggcgcgccagtcctatgagtctaaagaagtgatgactgaatggcttaaatacataatgatcgatccagtttatagatcatataaaaatagaggtgcttttggtaatctgaatcaacatgtgtttgcaaggactaagagtgagggattgtcatggtctcttattgacattggtacgacaaattttgaatcgactcggaccgatg

SEQ ID NO: 6803 - DNA, 203 bp, Artificial sequence
  synthetic
ggcgcgccagtccttaaagccgactaagaaactagctggctcatacgttaagaaattcaacttagttgatgatgtgctggttgaggaatcgttgaaagatttgcgtaatgagggtctatacaagatggctgatataacacgtaggatgattgatgctgatataacgcctgaaaacgtgaagaagggaacgactcggaccgatg

SEQ ID NO: 6804 - DNA, 203 bp, Artificial sequence
  synthetic
ggcgcgccagtcctctcatgggtcaagaaaaattaatagattggacatattattcaagggtggtacatcatctgccagtagtacaaacgaacatgctactgttaacggtaggttcagatacaggtcggagttatatcgggaacgtgatgtaaattcgtcgacagtattcaagacagcaacagctggaccgactcggaccgatg

SEQ ID NO: 6805 - DNA, 203 bp, Artificial sequence
  synthetic
ggcgcgccagtcctgaacaatttatgcagcttcattgatgacagtgcttccggctgttaggttattaagttcaagggctagtaacatgggagctttgagtactcaaggaagtctcgtagaccgtgcaccacatgatgtgatggctcctcaattggctgtgacttccagtgatgacgtctcaaaggtttcgactcggaccgatg

SEQ ID NO: 6806 - DNA, 203 bp, Artificial sequence
  synthetic
ggcgcgccagtcctgtctaatgcctgagtattgtgagaaacatttgaatgaattagtgtacaagacgttagatgataaggtcattcgcgactatacatctgatatcattatttctaatatttgtaaaggtaagttaagtaaagcgccaaaactagcattttatgctaatttctatctttcattgactacgactcggaccgatg

SEQ ID NO: 6807 - DNA, 203 bp, Artificial sequence
  synthetic
ggcgcgccagtcctcttacgatatctctgatcgtacgtatcctaagtttgttaacataacatccagcttgtcaaacagtaatagacgtggttttcagattgaagctatgaagcatgttatatatatggctagacgtggtgtggctgtactcgccaacacacatccaacaaaaattggaaatactgtatcgactcggaccgatg

SEQ ID NO: 6808 - DNA, 203 bp, Artificial sequence
  synthetic
ggcgcgccagtcctgcgattcaacctgatactgctactgcacaactgatcaaaacatattcaaacccaaaacagcgtggagataagggagaaattgtttacgatggagggcagagctctaagcttgccgaggttgttgatcagaccactgagccgcacaatgcagatggagctgtaaaggatgggaggcgactcggaccgatg

SEQ ID NO: 6809 - DNA, 203 bp, Artificial sequence
  synthetic
ggcgcgccagtcctatagctccagtgaagttagatttagagaagcaaaaacttgataaattaaagttatttgaagcatcacctttcgaccctttgacagtgaagaataatcaagatgttgtggacaagttgtacgctactcagtcatcatcaattcaagaagttgtgccgacgaagacttttgccacacgactcggaccgatg

SEQ ID NO: 6810 - DNA, 203 bp, Artificial sequence
  synthetic
ggcgcgccagtccttcattgttgccattagtcgacgcgaatttgaaggaggcatcctcatattacttcaaaaaattgatgccaagcattagcaatgttccagttgacgctcgtactttgcaatcagctacatctgccttggccgctgatacaggtctcgtagaccgtgcaccacatgtttctatgctgcgactcggaccgatg

SEQ ID NO: 6811 - DNA, 203 bp, Artificial sequence
  synthetic
ggcgcgccagtcctaagacgagtgctaactggaaagggtatagcatattagtatcacggtacagaagcctaattcctaatgaactatttgagtcccttagaaacattagcggtgaatacaacattaatccgcaagatgagcactctttcttctttgccttagcacagataaatgctgatgaagaattccgactcggaccgatg

SEQ ID NO: 6812 - DNA, 203 bp, Artificial sequence
  synthetic
ggcgcgccagtcctgctgacaagccattaatctctgagactatgttaaagatattgactattgatggaactacagggaaagatgggtacaggaactggttggataagctagttggtcataattacccggtttatgttgaaccggttgtcaacatcgtgaatttcattagtgcacgcttcatagctgaccgactcggaccgatg

SEQ ID NO: 6813 - DNA, 203 bp, Artificial sequence
  synthetic
ggcgcgccagtcctatgagagcgcaacatgagtatgtaagtccaagctcatcaagagtgtatattaaagacccagctgtagtgtacacgcgatcctaagattgtgatgtgattagatgtggtggaatactatcttacgcttcataggtgtggttgccgacgttgcgtagtggacaaatagaacccgaccgactcggaccgatg

SEQ ID NO: 6814 - DNA, 203 bp, Artificial sequence
  synthetic
ggcgcgccagtcctatcatgcaaacttatcaggtaaatgtttgatgctgtataacagcgagaaggatatcttcgaagggttgggatttaaggttaagggttcaagaatcaatgtttcaaaaactcagatcttgcgcaattatgagattaactttgaaaccattatcggtgtcgaaccgaatggattgacgactcggaccgatg

SEQ ID NO: 6815 - DNA, 203 bp, Artificial sequence
  synthetic
ggcgcgccagtcctcgttgtacgccatagtaggtggtggtcagatcacttcgcatgactttgttaacgccatcataactgatcaagagcagttaattgatttcactcaatctgagagggcattatctactcaagtggtgaaattagtttccttcattttaaaggattcgtttacagcaaaaggactgacgactcggaccgatg

SEQ ID NO: 6816 - DNA, 203 bp, Artificial sequence
  synthetic
ggcgcgccagtcctataaggctgatcatgaacgtgaggctgaactgactgatctaattaacaggattcgtgagaatgaagtcaccgttaatggtattctagagaaccagaaagctataacagctgctgaacgtgcagatttactattagaggttgtcgcttcgaccgctaagtcagtgtcggcagcagcgactcggaccgatg

SEQ ID NO: 6817 - DNA, 203 bp, Artificial sequence
  synthetic
ggcgcgccagtcctatgaccttagaaatacaacacttcattgcaaactagaaggtaagcaaaatatcgctggatatacagtctatgagtatctgattggaccttgggctcattacggtgacatagactactcagttgtagttgatacgctcaatgaggagacgaaatggtattgtgagattattggtacgactcggaccgatg

SEQ ID NO: 6818 - DNA, 203 bp, Artificial sequence
  synthetic
ggcgcgccagtcctacacttggaatcagtataatgcaggtaattggactaacattaaaccgtaagtaaattatcaatcttcggacatatgtaagcgtgggacacgtcaaaacagtgataacctggtcggcggagctacaaatccgcttgtcaggggaaactggatgtactaatgggatttgacccgaccgactcggaccgatg

SEQ ID NO: 6819 - DNA, 203 bp, Artificial sequence
  synthetic
ggcgcgccagtcctagctttgatctttatcgtctttcagattcatgatagctcacaacgcagaggtggtgtttgtactcttttcgatgtattatacaattacctcgtacagcgcaaactgaatcaggagagtgagttcttaagctatggcacgtacaaggaaaagaagtacatatacatcaatgggaacgactcggaccgatg

SEQ ID NO: 6820 - DNA, 203 bp, Artificial sequence
  synthetic
ggcgcgccagtcctttttgggaagacgtacaacattggtcagctgtactacagacagttgaatgttgaagtcaatactttgaagaaggtgttagccaatattgatgatcattcaagggttaagatgcacggtaattcacgtgatggctttgtaaaacgtcttgatgatgctgggaaaagtcgtgctaccgactcggaccgatg

SEQ ID NO: 6821 - DNA, 203 bp, Artificial sequence
  synthetic
ggcgcgccagtcctgtcagatgcaaagttggatgataggattgtacaaggtaagggatcacgttatatgtctgcaagtgtatacagatcacgcctgaatacagaatccactactactaataacgctcagagtcccgtttctgaccctgtcaatgcaagtgctaacgtaaaaacgtcaccagctggtaccgactcggaccgatg

SEQ ID NO: 6822 - DNA, 203 bp, Artificial sequence
  synthetic
ggcgcgccagtcctccacactgatgaatcagtgatgaagaaggaagatcatggagttattgttaatgaaagcacaacatttaaaattaattcagatgttgtctttgacgccgcagaggcaacttttgcagacacaagctccggtttgtcctcattgctaaaaactaagatgaagttttgattatcgatcgactcggaccgatg

SEQ ID NO: 6823 - DNA, 203 bp, Artificial sequence
  synthetic
ggcgcgccagtccttaagatgaagttttgattatcgattagtcgattgtcttcgattctcatctcagaatgagagtttagaatcggtggttgatagggtcatccacgccctgtcctgctgacgaactctcgttcggagtccattgttttgttagaggtgttgtagcgcctaggtaatttagaactgaccgactcggaccgatg

SEQ ID NO: 6824 - DNA, 203 bp, Artificial sequence
  synthetic
ggcgcgccagtcctgaaggattgttgttgttgcatgggggattagcgccaataacattagtgcgtgtttatcacgatgttaatgttggtggtctagtgaccggttcgatcgcagcatccgtttcaactctattgcgtaattgcatgttatacagttttgatatctatttcactccgaatggtgtttgtcgactcggaccgatg

SEQ ID NO: 6825 - DNA, 203 bp, Artificial sequence
  synthetic
ggcgcgccagtccttacttcatctcggcgtaatgatgacgttctcggaacgtgagctattgtgggcttgtcgggctccacattggccgttcaggaaggtgtgagcttatggccgccttctgagagctgatttgttctccactggatggtggggtagcagggaatgaactggtggtataattgactgaccgactcggaccgatg

SEQ ID NO: 6826 - DNA, 203 bp, Artificial sequence
  synthetic
ggcgcgccagtcctgctgccacgcaagtggaagtcgtgaatggaacgtgcatcattctcgccacagacatggggagttggtgtgatgattcaatcatgtacgagtgcgtcactattgactcgggagaagaaccagttgatgtggactgtttctgcaggggcgtcgagcgggtgtccctggaatacgggcgactcggaccgatg

SEQ ID NO: 6827 - DNA, 203 bp, Artificial sequence
  synthetic
ggcgcgccagtcctaggtgtgggaagccagttggcggcagaagcaggaggtcggtgtcgattccagtgcatgctcatagtgatcttaccggaagagggcataagtggcttaggggggactcagtcaagacgcatctgacacgtgtggaaggctgggtatggaagaataagctcctgacgatggcctttcgactcggaccgatg

SEQ ID NO: 6828 - DNA, 203 bp, Artificial sequence
  synthetic
ggcgcgccagtccttgtgcagttgtgtggatggtcacagacagcttaccgacaaggttcattgtcataacagtggccctttgtctggctcccacatatgccactcggtgcacacacctgcagaaccgggactttgtttcagggatccaagggacgactagagtctcattggtgttggaattgggtggccgactcggaccgatg

SEQ ID NO: 6829 - DNA, 203 bp, Artificial sequence
  synthetic
ggcgcgccagtcctcacacgggtgactatttggcagctaatgagtcccacagcaatcgaaaaacggcatcttttacaacgcagtccgagaagaccatcttgacactgggagattatggagacatctctctcacgtgccgggtgactagtggagtggatcctgcccaaactgtggtattggaactggaccgactcggaccgatg

SEQ ID NO: 6830 - DNA, 203 bp, Artificial sequence
  synthetic
ggcgcgccagtcctggcatcctgttgaagtctctggctggagtgcccgtggccaacatagagggcagtaagtaccatctccagagtggtcatgtcacctgtgatgtgggccttgaaaaactcaagatgaaaggaatgacatacacggtctgtgagggatcaaagtttgcttggaagaggccgccaacccgactcggaccgatg

SEQ ID NO: 6831 - DNA, 203 bp, Artificial sequence
  synthetic
ggcgcgccagtcctgctctgcacacagcttttggtgcagcattcaacaccatttttggaggagtgggatttctcccacgtattctgttgggggtggccctggcttggctggggctcaactcacggaaccctaccctctcagtcgggtttttgatcactggtggacttgtgttaacaatgacactggggcgactcggaccgatg

SEQ ID NO: 6832 - DNA, 203 bp, Artificial sequence
  synthetic
ggcgcgccagtcctgttggtgccgacatgggctgtgcaattgatgccaacaggatggagctacgttgtggtgagggccttgttgtgtggagagaggtcactgattggtatgatggctatgcattccacccagaatcgccccctgttcttgcggcatctctaaaggaagcatatgaggagggagtctgtcgactcggaccgatg

SEQ ID NO: 6833 - DNA, 203 bp, Artificial sequence
  synthetic
ggcgcgccagtcctgggattgtgccccagaaccggcttgagatggccatgtggagacgtgtggaggctgtgctcaacttggcccttgcagagagtgatgccaacctcacggtggttgtggatagaagggatcctagtgactacaggggaggcaaagtggggatcttaaagcggtcaggcaaggagatgcgactcggaccgatg

SEQ ID NO: 6834 - DNA, 203 bp, Artificial sequence
  synthetic
ggcgcgccagtcctaagacttcatggaagggatggagccaatcctttgtgtggagtgtcccagaatcgccacggcgttttatggttgggattgaggggactggggagtgtccacttgataaacgccgaacaggagtcttcacggtggcagagtttgggatgggaatgaggaccaagatcttcttggatcgactcggaccgatg

SEQ ID NO: 6835 - DNA, 203 bp, Artificial sequence
  synthetic
ggcgcgccagtcctctacgggagactagttcttcagactgtgacaccggagtcatgggggctgcagtcaagagcggtcatgccgtccacaccgatcagagtctctggatgaagtcacacaggaacgcaacgggagtgttcatatcagaactgatagtgaccgacttacggaactgcacatggccagcccgactcggaccgatg

SEQ ID NO: 6836 - DNA, 203 bp, Artificial sequence
  synthetic
ggcgcgccagtcctctggtgaggtcgatggtgctggctgacaacggagccatgttaagtgaaggtggagtccctggcattgtggccgtattcgtggtcctggagctagtcattaggagacgcccaacaactggcacctcagtggtgtggtgtggagtggtcgttcttggcctagtcgtaactgggctacgactcggaccgatg

SEQ ID NO: 6837 - DNA, 203 bp, Artificial sequence
  synthetic
ggcgcgccagtcctacctatttcttgctcctcgtgctggagcttgggtttccagaggcctcactgagcaacatttggaagtgggctgactccttggcaatgggaacattgattctacaggcgtgcagtcaagagggcagagcccgagtgggctatctcctggcagctatgatgacccaaaaggacatgcgactcggaccgatg

SEQ ID NO: 6838 - DNA, 203 bp, Artificial sequence
  synthetic
ggcgcgccagtcctgccataatccacacaggcttgaccatttttctatcagccgccacggcaatggcggtctggagcatgatcaagggtcaacgggaccagaagggactgtcctgggccacaccacttgtaggcctcttcggaggcgaaggtgtgggtcttagactgctggcgtttcgaaggcttgcacgactcggaccgatg

SEQ ID NO: 6839 - DNA, 203 bp, Artificial sequence
  synthetic
ggcgcgccagtcctgagcgaaggaacagacggtctttcagtgaaccactaacagtggtgggcgtcatgctcactgtggcaagtgggatggtgagacacacatcccaggaggctctgtgcgctcttgtggctggggcctttctcctcctcatgatggtgctgggaacacggaagatgcagctcatcgcacgactcggaccgatg

SEQ ID NO: 6840 - DNA, 203 bp, Artificial sequence
  synthetic
ggcgcgccagtcctgaatggtgcggtgaagtggaatggaacccagacctagtgaatgaggggggagaggtcaatctgaaagtgaggcaggacgccatggggaatctccatctcactgaggtggagaaggaagaacgcgctatggcgttatggcttcttgcagggttggtggcttcagcttttcactggcgactcggaccgatg

SEQ ID NO: 6841 - DNA, 203 bp, Artificial sequence
  synthetic
ggcgcgccagtcctgccggcattctgatagtattggctatatggacattctttgagatgctgagctcggggcgaaggtctgaacttgtcttctctggacaggggaccgggaccgaaaggaatcggccttttgagatcaaggatggagcctaccgcatctacagtcccggtttgctgtggggacatcgccgactcggaccgatg

SEQ ID NO: 6842 - DNA, 203 bp, Artificial sequence
  synthetic
ggcgcgccagtcctcagattggagtggggtatggagccaagggagtcctgcacaccatgtggcacgtcacaaggggagcagccctggttgtggaagaggcaatctccggaccctattgggctgacgtcagggaagatgttgtatgctatggtggagcatggagccttgagagccggtggaggggtgagcgactcggaccgatg

SEQ ID NO: 6843 - DNA, 203 bp, Artificial sequence
  synthetic
ggcgcgccagtcctaccgtccaggtgcacgcatttccaccagggagaccccaagagacacaccaatgtcagccgggagaactcatcctggagaatggtaggaaacttggagcagttcctattgacctgagcaaaggtacctcgggaagtccgataatcaatgctcagggagaggtggtgggtctttaccgactcggaccgatg

SEQ ID NO: 6844 - DNA, 203 bp, Artificial sequence
  synthetic
ggcgcgccagtcctgagctcgtgaggcagtgtgcaaaccgagggatgagaactctagttcttgcccctacccgggtggttctgaaggagatggagaaggcgcttgctggcaagaaggtccgcttccactcacccgcggtagaagggcagagcacagcgggagccgttgttgacgttatgtgccatgcccgactcggaccgatg

SEQ ID NO: 6845 - DNA, 203 bp, Artificial sequence
  synthetic
ggcgcgccagtcctgtggagatgactggaaccagaaagatcacgacagcatcggcagctcaacgccggggcagggtgggaaggacatctggacgcactgatgagtacatatactctggacagtgtgacgatgatgacaccagcctcgttcaatggaaggaggcacagatactcttggacaacattacccgactcggaccgatg

SEQ ID NO: 6846 - DNA, 203 bp, Artificial sequence
  synthetic
ggcgcgccagtcctacactgaggggtccagttgctactttttatggacccgagcagatgaagatgccagaagtggctggccactacaggctgaatgaggagaaaaggaaacacttccggcacttgatgacccaatgtgactttacgccttggctggcatggcatgttgctaccaacaccagcaatgtgcgactcggaccgatg

SEQ ID NO: 6847 - DNA, 203 bp, Artificial sequence
  synthetic
ggcgcgccagtcctgttgaggtggccgttctaggggtggccactcttggcatactgtggtgctttgtggcaagaacttcggttagccgaatgtttttgggcacggttgtgctctttgctgccctcttgttgctgtggattggtggagtggactacggatacatggcagggatagccctgatattctaccgactcggaccgatg

SEQ ID NO: 6848 - DNA, 203 bp, Artificial sequence
  synthetic
ggcgcgccagtcctatcttcctcactgtgctgcagccagagccggggaaacagcgaagtagcgatgataatagactggcatacttcctcctaggactccttagcttggctggacttgtgacggctaacgaaatgggcatgctggataaaacaaaagctgaccttgcagggctaatgtggcacggagagcgactcggaccgatg

SEQ ID NO: 6849 - DNA, 203 bp, Artificial sequence
  synthetic
ggcgcgccagtcctcaaaggcatccagcctgggaggagtggacaaatgtggacatccagccagcacgatcctgggggacgtatgtgttgatcgtctctctgttcaccccctacatgttgcaccagcttcagacaaaaatacaacaactggtgaatagttcggtggctagtggtgctcaggctatgagacgactcggaccgatg

SEQ ID NO: 6850 - DNA, 203 bp, Artificial sequence
  synthetic
ggcgcgccagtcctgaggctggggctgttggtctagctgcgttgggccagttggtccatcccgagactgagacactctggacaatgccaatggcgtgtggtatggcgggactcgtgcgagggagcttctggggcctgttgcccatgggacaccgattatggctcaagacaactggaacacgcagaggacgactcggaccgatg

SEQ ID NO: 6851 - DNA, 203 bp, Artificial sequence
  synthetic
ggcgcgccagtcctggtgccgatggagaaactcttggggacatctggaagaggcggctgaatggttgctctagggaggagttttttcagtaccgacgaagtggagtcatggagacggaacgtgacagggctcgagagcttctgaagagaggtgagacaaacatgggactggctgtctctcgagggacgcgactcggaccgatg

SEQ ID NO: 6852 - DNA, 203 bp, Artificial sequence
  synthetic
ggcgcgccagtcctcctgacgcgtcctgcgtgttcaaggttttggccccgtatagaccagaggtacttgaggctcttcacagattccagcttcaatggggcggggggctagtccgcgtccccttttcccgcaattccacgcatgagatgtacttctccactgctgttagtggcaacatcgtcaattcacgactcggaccgatg

SEQ ID NO: 6853 - DNA, 203 bp, Artificial sequence
  synthetic
ggcgcgccagtcctgtgaacatccagtccaggaagttgttagccagatttggagaccagcggggacctgccaaggttcccgaagtggatctggggactggcacacgctgtgtggtactggcagaggataaggttagggaagctgatgtggccgaaagaataactgctctcaaaacccaatatggtgaccgactcggaccgatg

SEQ ID NO: 6854 - DNA, 203 bp, Artificial sequence
  synthetic
ggcgcgccagtcctgctcgcccctccagctcgggaggctgcgtcatggacatcataactagaagagaccaacgtggttcaggtcaggtggtgacttacgctctgaacaccctcacgaacatcaaggtgcagctcatccgcatgatggagggagagggcgtgatcgggccatcagactcacaggatcctcgactcggaccgatg

SEQ ID NO: 6855 - DNA, 203 bp, Artificial sequence
  synthetic
ggcgcgccagtccttcggagggttactccagctgggaagaggttcccttctgctctcaccatttccatgagctgacgatgaaggacggcagggtcataattgtcccatgcagagatcaagatgagctggtggggcgggcaagagtgtctcctgggtgtggctggagcgtcagggaaacagcatgtctccgactcggaccgatg

SEQ ID NO: 6856 - DNA, 203 bp, Artificial sequence
  synthetic
ggcgcgccagtccttcaaaggcctacggacagatgtggctgttaagctactttcacaggagggatctgagaacgcttggtttggcaatctgctcagctgtgcccattgactgggtcccgcagggacgaaccacatggagcatccacgcgagtggagcgtggatgaccacagaggacatgctggaagtgcgactcggaccgatg

SEQ ID NO: 6857 - DNA, 203 bp, Artificial sequence
  synthetic
ggcgcgccagtcctgagccccaacgacgaactgtggcagcacaccatttggtgacgggaagctggtcgctcccgacgcaggccgtcgtaagaactttgtgagaccaaagcctcccagagagggccgaactgggaggttatgaaggcccctggctttggccaggaggggggagagggaaaattggcattcgactcggaccgatg

SEQ ID NO: 6858 - DNA, 203 bp, Artificial sequence
  synthetic
ggcgcgccagtcctcgtaagaactttgtgagaccaaagcctcccagagagggccgaactgggaggttatgaaggcccctggctttggccaggaggggggagagggaaaattggcattccctctcaggagatttcctccccctacaactaaatttccccctgccatgcagggggggcggttcttgttctcgactcggaccgatg

SEQ ID NO: 6859 - DNA, 203 bp, Artificial sequence
  synthetic
ggcgcgccagtcctacacgaaaacacatgctcaaactaaagactgttttttcttgatgttgaaagctattgctatggctaaagaacatatcttcattgaagatgggtccttttactccatagctattgctcttcgcttaataaacgcatcattggcaacgattttaaacaaacccgacatgctcaaatcgactcggaccgatg

SEQ ID NO: 6860 - DNA, 203 bp, Artificial sequence
  synthetic
ggcgcgccagtcctttacgaaattttctgcattcgacggacgaacgattgaaacggacatgacatacgcacaagtaactgaggaatgttctatgaagatggcttctcgctttaatcaacatatggacttcaccaattatttggacgcatacaggaaccccacatatgaacctgaagatattgtggagccgactcggaccgatg

SEQ ID NO: 6861 - DNA, 203 bp, Artificial sequence
  synthetic
ggcgcgccagtcctaccaagtcgcagattgtgattgtaatacatgtgattgctgtaacgacccggaactattggataggctttctacagtggccagaattcatggcacgaattgcgtgtgtctgttgactcgtttctatcaaggatttaaaacagccgatctttatgatatgactaagcaaattagtacgactcggaccgatg

SEQ ID NO: 6862 - DNA, 203 bp, Artificial sequence
  synthetic
ggcgcgccagtcctccccggtatacgataaccgtgtaacaattaagaagaacacaatcttagctgcacagaatctattacccgcttttgccaaaattgaaccaatcgagaagactatggacatacaaacagtacccgcatgtaaaggatgtgataactgctctcctatcgatgctcaacgatctttgccgactcggaccgatg

SEQ ID NO: 6863 - DNA, 203 bp, Artificial sequence
  synthetic
ggcgcgccagtcctctgaacaagacaaaggttcgattgtcatcgctagagacgtagtttaccgcaatcttttcagattcacggtggtgttgaacgaaaacggaacggaaaaacgacgcggatttggacaaatattcatgttaggaggtcgattaggtatgataccgaaacacttcctttacgtgatggcgactcggaccgatg

SEQ ID NO: 6864 - DNA, 203 bp, Artificial sequence
  synthetic
ggcgcgccagtcctggttggacataatggatggaacgccgtatgctacaatgaactcgttttttgagcatacttcgtctattttttatggtgatgacttcataatgaatatacgaccagaggttattgatgtttacaatcaagaaactctcacacccgttcttaagaagaatttggaaatgacaatgacgactcggaccgatg

SEQ ID NO: 6865 - DNA, 203 bp, Artificial sequence
  synthetic
ggcgcgccagtcctgctgatgtagaattaaaattacaagtcaacgctcaaccattccaagctgggcgtttattattagtttatattccaggttataaatatataggcgaggatcgacagaaatattatgacgatcgcactaatgttgacgatgctagcttggttccgttgactggttcccctcgtgtccgactcggaccgatg

SEQ ID NO: 6866 - DNA, 203 bp, Artificial sequence
  synthetic
ggcgcgccagtcctgatcctaatgcctcttacagttctgtagttgacttgcgttctgacacagatgtaacgttcaacgttccattcgtttcagttcagccatggaaattatctagcgcagatgtcacatcacctttgaaggattatcagcactctgttggtaggttgtacgtactcattcttaatgaacgactcggaccgatg

SEQ ID NO: 6867 - DNA, 203 bp, Artificial sequence
  synthetic
ggcgcgccagtcctttacgtgccacttccacagtgtctgatactatctcatgtcttgttgaagtttctggagcatcagattttgaattatctatgccacgacaaccgaagatttacccaacgttaagggccgccaaatcaacaactctgaatagagttatacgtggtattgcacaggtcaacgtagctcgactcggaccgatg

SEQ ID NO: 6868 - DNA, 203 bp, Artificial sequence
  synthetic
ggcgcgccagtcctgaatctacaccggtatccccagaaatcatccaaaagacaggtgaagtaggagaatctagtatgagacaaccgcaagggacatctttcactagctctgcactaactgtaggagaaaaagtaacatcgttacgacaaattttaaagcgatttcatttaatctattctaatttaactcgactcggaccgatg

SEQ ID NO: 6869 - DNA, 203 bp, Artificial sequence
  synthetic
ggcgcgccagtcctgcggcgcgtattcgattgatcccagagaatggcgctacagaagctaatgctggtccagttcaagaagacaatactgtcatcgatgagactagaacagctgctgatgtatatatgccacgaaatcttgaaggaactttcgaatttcaggtgcctcattactcgaggtatcctctccgactcggaccgatg

SEQ ID NO: 6870 - DNA, 203 bp, Artificial sequence
  synthetic
ggcgcgccagtcctaacctgcccctctaacgccagacgagcggcataaaactcgaacttctggcacgttccaccaccccttctcctatcccaacccccattgcgctctcaaggtcgcgcttttccgagactagctcggattcaaaaagttcctggcaccctttaccccttcaggcccttaaggtaggacgactcggaccgatg

SEQ ID NO: 6871 - DNA, 203 bp, Artificial sequence
  synthetic
ggcgcgccagtcctactgaccttgtgctgtgatctcggtgcggaagtgctactgcgtagtgattgtaagatccttttgtggttctgccctggcaaggctacagagtgctgtgatccgctgcggatgccatcctggtaacaggacccccagtgtgcgcaacagtatgttcacggtcttccgtgttcacccgactcggaccgatg

SEQ ID NO: 6872 - DNA, 203 bp, Artificial sequence
  synthetic
ggcgcgccagtcctacattcggaacactgctttcgtgaaacagtgtgtgtccaatccctgtgatcagtatcaaccacaccacctaggaatgctaggaaggtaccccggttcgccgggatctgatcctaggctaattgtctacggtggtgctcctttttattttccacttcaactcactggttacaactcgactcggaccgatg

SEQ ID NO: 6873 - DNA, 203 bp, Artificial sequence
  synthetic
ggcgcgccagtcctgcgcagattccgtgtggagacacgtgagaaaaccctctattcttacgtggaccccgcggttgacgcctacttaaagcgcgaacgaaggtttcccttctcccttcccaaaccctcccatttctacgactgcctcttttgcaaccatccctctgaagacgatgaggattcactcctcgactcggaccgatg

SEQ ID NO: 6874 - DNA, 203 bp, Artificial sequence
  synthetic
ggcgcgccagtcctcaccctcgacggagagtatggcgatccctgtccacttcactctggtgttcttgaccccaaacccagataccaaaagccccctgaggacattcttgaggattctaactggtgtgacgtccttaacgaggatgttacttacagcactgattctctccagaatgccttcgaccaactcgactcggaccgatg

SEQ ID NO: 6875 - DNA, 203 bp, Artificial sequence
  synthetic
ggcgcgccagtcctggctcttgctctgctccccggttctgctcaggtgaaggactcttcccacatctccaaactctacttcaagctcttctctctttcccaattccctggtgtccctaccacacctctttctctccccaagcccactggcaacatcatctcccaaggccaaagtcagaccaacatttacgactcggaccgatg

SEQ ID NO: 6876 - DNA, 203 bp, Artificial sequence
  synthetic
ggcgcgccagtcctttctacccagcacggtaacgcgatgatcaccaccggttccaccgccccagtggtcgtcgcatacccacctaccccctccgtgccccttcccaaccccgactgcccttccgaacctggtccgtcaggtgaccgcacatggctcctggacactttcgagtggtcccaggaaaaccccgactcggaccgatg

SEQ ID NO: 6877 - DNA, 203 bp, Artificial sequence
  synthetic
ggcgcgccagtcctcatgtggtggtgcctggctggtcagaatggaatgcagtacaacaccctagccaaccccacctaccccttttccgcctccaccaactggggcacccagaatggggttgcggcaactgcttacccgctacctgcttcttttgtgcaggcgtatccagactgcccctggaccgccatcgactcggaccgatg

SEQ ID NO: 6878 - DNA, 203 bp, Artificial sequence
  synthetic
ggcgcgccagtcctgcacgatacccatgcctacttcaactgtggctggcgcatgcaggtggtggtgaacggtactcagttccacgctggtgcccttctcatatacgccgtcccggaacgccccctgcttccgaacggtgttgaatatgagcacaccacctttgtctacccctacaccatcctcaacctcgactcggaccgatg

SEQ ID NO: 6879 - DNA, 203 bp, Artificial sequence
  synthetic
ggcgcgccagtcctctaccagtctaacaccgcaacattggaggtcccctacgtcggttgcacacccaataccaccacctgtgtgcactcgccgtggactttctacattgcgatcctcacccccttggctgtagcttcctcctccaaccagaccctttctgtttcagtttacataactcctgttaattccgactcggaccgatg

SEQ ID NO: 6880 - DNA, 203 bp, Artificial sequence
  synthetic
ggcgcgccagtcctcttcacagggtcttcccagcattacggccgcctagttgtatgctactcaccgccaagcggcgctcctcccgctaccatcacggaagcgatgcgcggcacctacactgtgtgggacatcaattcttcctccactcttgacttcaccattcctttcatctcccaatcctactggaacgactcggaccgatg

SEQ ID NO: 6881 - DNA, 203 bp, Artificial sequence
  synthetic
ggcgcgccagtcctcgcgcaagtcaccttccactattttccccccggcgcaacaccctatgacgccacctctcccaatgcttccactgacctggctaactgtttcaccgtcgatgctcagatcccaccgacatcgatggacacagtctgcctgtccttcccctacctttcagttctttctgctattcccgactcggaccgatg

SEQ ID NO: 6882 - DNA, 203 bp, Artificial sequence
  synthetic
ggcgcgccagtcctcacttcctactttggattctctaacttccagggcggtagcgatgtgctcaacaccacgcttggaactattgtgatctatgttgggtggcagggcgatgcccctacgggcaccgctcttactatctatcagaagatcgcttttggcaacttccgtggtttcgttcctcgcaaccccgactcggaccgatg

SEQ ID NO: 6883 - DNA, 203 bp, Artificial sequence
  synthetic
ggcgcgccagtcctgcccaaacttactgcctactcccaacccaacatggtaacgaagacgaacgccatcgtcaagttgccagtttaccggccaatggcgaccaccaaagccatggtgcgccgtcaatgtgccggggagtccctcttccaaccctgtctctgctctcgcgtttacattgttcgcgcacacgactcggaccgatg

SEQ ID NO: 6884 - DNA, 203 bp, Artificial sequence
  synthetic
ggcgcgccagtcctgcgcatgacctacacccactgggccctgcgttgtgtcgacagcgatggaacacgccagatttccctttctcgcttcaagttgtctgctgttgtggcatacgaggatccggaaggagaggtctaccgagaggtagaacctttccactggtccttggccgtcgcgatggtgggcagcgactcggaccgatg

SEQ ID NO: 6885 - DNA, 203 bp, Artificial sequence
  synthetic
ggcgcgccagtcctcccttgggactattctgcttccaacaactgcacccactttgtctctaacatcaccggtgttgaacttcccaacactggcttctcccttgctctcggaatcggggcactggcgatcggggctggtgttatggccgttcaaactgccaaaggccgtatcacccgccaggggttgctcgactcggaccgatg

SEQ ID NO: 6886 - DNA, 203 bp, Artificial sequence
  synthetic
ggcgcgccagtccttgcggatctggcaccacagcttcgcacctatttcactgagagaaacaccactctgggcgctctcttctattggctggcaaccaagcttggtttgttagtcactccagaggaggcggaagttgccgccatcgagcctcaaggcgtgcgggacttaaaggaaggtgtccaggctgtcgactcggaccgatg

SEQ ID NO: 6887 - DNA, 203 bp, Artificial sequence
  synthetic
ggcgcgccagtcctcctgtatgggccacctggcactgggaaatccttgcttggctccctccttgcctctgtcctcgctcagaagctctctggtgatcccaacgatgtgtactcccccacatcagcttcctgtgaatacttcgatgggtacacaggacaagtcgtccacttcattgacgacttgggacacgactcggaccgatg

SEQ ID NO: 6888 - DNA, 203 bp, Artificial sequence
  synthetic
ggcgcgccagtccttgaatttaacgatttcgaccagctcgttgacgcgatcgttgctaggttggatcgggcctctggtgttagctcccgccttgctgctctcatcaagcggcagggtgcccactcagagcgcaccttcgagaccgctccttctgagatcgacgcggacgaggttctcgaaatcctctccgactcggaccgatg

SEQ ID NO: 6889 - DNA, 203 bp, Artificial sequence
  synthetic
ggcgcgccagtcctgaccaagaaagaggacacaccggatgaaccgcaagcggcttattcgggcatgcctcaacttggtaagaaagacgccaaggcaaagggcccaaaacccgcccccaccaggggcgtcgtgcgacaagccggcccctcccctgctcttcccaagattgccgacaacgtcttgccaatcgactcggaccgatg

SEQ ID NO: 6890 - DNA, 203 bp, Artificial sequence
  synthetic
ggcgcgccagtcctgatctggacccctacctcccgccagtatcgtgacctccgtcgctttctgggctcccacccctaccctactggccacctcatctctgctttccaaggcgttccgatgttcatacggttctccaagaatcatatggtcactctggacgtcgaatctgttgtccacgaacccgtcgccgactcggaccgatg

SEQ ID NO: 6891 - DNA, 203 bp, Artificial sequence
  synthetic
ggcgcgccagtcctgtatgacttggactacaagtgttttgatgccaccctcccttcctgcgcattcagaattgttgaagattacctcgtgaaattgactggcgacgagcgcgtccgcgcgtacgtcgaaaccatcaggcattccaagcatgtctatggtagtcagacttacgagatgatcggcggcaacgactcggaccgatg

SEQ ID NO: 6892 - DNA, 203 bp, Artificial sequence
  synthetic
ggcgcgccagtcctgctcaatctctgtgcagcttgacctcagaactctggcctcccactgttcgtcctggtagaatagacaagcttttcactatccctaagaccactctctccgtggcattttcctctcagtgtcctgctccctcacgggactgcacccaggaactgtgagcttccccccctgtccttcgactcggaccgatg

SEQ ID NO: 6893 - DNA, 203 bp, Artificial sequence
  synthetic
ggcgcgccagtcctcctcagaactctggcctcccactgttcgtcctggtagaatagacaagcttttcactatccctaagaccactctctccgtggcattttcctctcagtgtcctgctccctcacgggactgcacccaggaactgtgagcttccccccctgtccttgaaatttctattcttttcttgccgactcggaccgatg

SEQ ID NO: 6894 - DNA, 203 bp, Artificial sequence
  synthetic
ggcgcgccagtcctgtgatagggtggctcaattgaccttaggaaacagcactatcactactcaagaggcagcgaacatcacagttgcctatggtgaatggccatcgtacttaagtgatttggatgctaccgctgtagacaagactaccaaaccaggcgtttcatgtgatagattctacacattacctgcgactcggaccgatg

SEQ ID NO: 6895 - DNA, 203 bp, Artificial sequence
  synthetic
ggcgcgccagtcctgaaagaaatgggaggcaactactaaaggatgggagtggaaacttccagacgcactgacagagcttggcgtttttggacagaattgtcagttccatttcttatataggtgtgggtggtctatacacgtgcaatgtaatgccacgaagtttcatcagggcacattactagtggtagcgactcggaccgatg

SEQ ID NO: 6896 - DNA, 203 bp, Artificial sequence
  synthetic
ggcgcgccagtcctgagcaatagcccaaggtattcctactacaaacacgccaggttcctaccagttcctcactactgatgaagatagtagtgcatgtatacttcctgatttcacaccaacccaagaaatccacattccaggagaggtcaagaatctacaggcactgtgtcaagttgagtccttactggcgactcggaccgatg

SEQ ID NO: 6897 - DNA, 203 bp, Artificial sequence
  synthetic
ggcgcgccagtcctcacttgagataactttcatgtttactgggtcattcatgacaacggggaagctgctgttagcctatacccctccaggtggtagtgcaccagctagtagagaagatgccatgcttggcactcatgtaatatgggattttggattacagagctccataaccctagttgtcccttggacgactcggaccgatg

SEQ ID NO: 6898 - DNA, 203 bp, Artificial sequence
  synthetic
ggcgcgccagtcctatgctagtgatgagggcatgatggaaactagacatgtcgtcaatacaaacacagtatcagaaacatctatagagagcttctatggtcgttgtggtctcgtatccatcaaagaaatagccgataacaagcaggttgagaaatggttggttaattttaatgaatttgtacagctaacgactcggaccgatg

SEQ ID NO: 6899 - DNA, 203 bp, Artificial sequence
  synthetic
ggcgcgccagtcctctaacccatcagcaatctttagtgccaacactgttcctgctagattcagcgtcccgtttgtgggaacagcaaatgcgtacacgattatgtacgacggatacaatgtgtttggatcaaacagaccatcagctgattatggcatgatcaacagcagtcacatgggtagcatggcctcgactcggaccgatg

SEQ ID NO: 6900 - DNA, 203 bp, Artificial sequence
  synthetic
ggcgcgccagtccttcaggtgccagcatggagtgatcggtgttgtgactgctgggggccagggagtggttggatttgctgatgtgcgcgacctcttctgggttgagcatgaagcaatggaacaaggccttactgattacattcagcaacttggaaacagttttggtcagggttttacagcagaaattacgactcggaccgatg

SEQ ID NO: 6901 - DNA, 203 bp, Artificial sequence
  synthetic
ggcgcgccagtcctccaattatgccagtcaactttcagagatgttaattggcgctgacggtatggtggagaggtgcctgcaaacctttgtgaaagtgatctcagcggttgtaattgccaccaggtctcaaggtgatgttcctactatacttgcaacccttgctctcatcggatgcgatggtagtccctcgactcggaccgatg

SEQ ID NO: 6902 - DNA, 203 bp, Artificial sequence
  synthetic
ggcgcgccagtcctaagcgagagaaaggcaagagtttaccaccaatttaaagactttaccattactggaagcgcaggtcgcaactttggaacactcctgcccaaccactgaacaacaggagaccatctttggaaacattcagtacctagctcaccactgcaggagatatgccccactttatgcagctgcgactcggaccgatg

SEQ ID NO: 6903 - DNA, 203 bp, Artificial sequence
  synthetic
ggcgcgccagtcctatgcgattcctccagacagtgaccattttgacggataccagcagcaggccgtggtagttatggatgatctcaaccagaacccggatgggaaagatatggttgctttttgtcaaatggtctccaccgtgccttaccatgtacctatggctgccattgaagagaagggaatgctctcgactcggaccgatg

SEQ ID NO: 6904 - DNA, 203 bp, Artificial sequence
  synthetic
ggcgcgccagtccttcactaagccacaaggcaagattgattgggttgaaccctctaagaaacatgggtttccagtgattaatgcaccatccaaaaccaaacttgagcccagtgttttctttgatgtgtttgagggagtcaaagaaccagctgctcttcatccaaaggaccccaggcttgaggttaactcgactcggaccgatg

SEQ ID NO: 6905 - DNA, 203 bp, Artificial sequence
  synthetic
ggcgcgccagtccttggaagaagcactcttttccaaatacactggtaacgtagacattgagatgccagaggaaatgaaagaggcggtggatcattatgctaatcagcttttggcactagacataccaactgagccacttagcatggaggaagccatttatggcacggaaggccttgaagctctggattcgactcggaccgatg

SEQ ID NO: 6906 - DNA, 203 bp, Artificial sequence
  synthetic
ggcgcgccagtccttacgaggagttttgccgcaagatcagatcagtaccagttggcagagctcttcacttaccatcatactcttcactgctgcgagagtggtatgagaagttttaaattacagttcaattgattatccggattggcctaaacttcaattggatacaatacacccaccggatggggtgtcgactcggaccgatg

SEQ ID NO: 6907 - DNA, 203 bp, Artificial sequence
  synthetic
ggcgcgccagtcctctcacactcatttcccccctcgcctgtcacaggcaacccccaccccttctcttacgggagttagggccaaggatctgttgcataggcgttgtatcccctaaccttttacctacccatcccaataggactggtatttcggttttgattgagtaatggatactgattctatacctgcgactcggaccgatg

SEQ ID NO: 6908 - DNA, 203 bp, Artificial sequence
  synthetic
ggcgcgccagtcctttacccattcaggggaaaaatggagtttctttcatggatctgacttgatatgaccaagagtcaacactttgcgtgttggccgtatggaatgctttaaggtttattctttggattatgacttcagggttggccgcccaggataaaaggcaattgtggtaagtgatgttagtcattcgactcggaccgatg

SEQ ID NO: 6909 - DNA, 203 bp, Artificial sequence
  synthetic
ggcgcgccagtcctagtccttgacgaatgcgtcccgtctgtcccgacggtgaggcgtatggcgcatgctcatggcattacccaatggtgtatctgtgaggggggggctcctcacacttagtctagtgctacctgacagggccgcggctggtcgtttgtgtatggtataaccagtagtaatcccccatgcgactcggaccgatg

SEQ ID NO: 6910 - DNA, 203 bp, Artificial sequence
  synthetic
ggcgcgccagtcctgattgctttaacttcccctcctcccttaccaagacattctctaagatggcaatctatgaggatgactcctcggagtcaattacatgctgtaactggattccacggaatcgtcgtaacaaagtaagaaaacaaaaacccaggagtaaggcctccagagtcgagatgtcaccagggcgactcggaccgatg

SEQ ID NO: 6911 - DNA, 203 bp, Artificial sequence
  synthetic
ggcgcgccagtcctcctcttgtcaccttggccgatgatggctatctctatgtgcataaacataaaggtgagactaaatttgttaggagggatgaaattctcacaaaatatggcagatgtattgttgagatggaagaagtttttcaatgtggacaagtccaatcaaatcaaacgggaaacaaaccatcgcgactcggaccgatg

SEQ ID NO: 6912 - DNA, 203 bp, Artificial sequence
  synthetic
ggcgcgccagtccttacacatttgattcattaaattggcaaaatacacagtatggagagtggacatgccccttgccaggcgcccttatggacactggggtgtttggacagaacttgagattccactatttatatagatctggtttttgtgtacatgtacaggtgaatgcttcttccttccatcagggtcgactcggaccgatg

SEQ ID NO: 6913 - DNA, 203 bp, Artificial sequence
  synthetic
ggcgcgccagtccttgtttattggttgccatggtgcccgaacatcagacaccaaaacagcaaaacaatgacttccaatactatgagactaaggaattttgtggaactgaatatccaacagaacagttgaccctcttcccacatcaattcttaaacctgagaacaaataattctgttacaattgtttaccgactcggaccgatg

SEQ ID NO: 6914 - DNA, 203 bp, Artificial sequence
  synthetic
ggcgcgccagtcctccttacacaaattgcaccccttctggttttggattgagtcataattttgttactttagtaattaggattgttgttcctctgtcctattcaacaggtgcttccactcaaatccctattactgtaagtgttgcccccatgtgttcttcatttgctggtttgagatctgcagttaaacgactcggaccgatg

SEQ ID NO: 6915 - DNA, 203 bp, Artificial sequence
  synthetic
ggcgcgccagtcctaatgtaaatatttctaagagtgctactgtacagggagaatcagactcaattccatctgctctaaatgctcacattgaacaagcggtcacaagtgcattaaacacccggccacaacacagccatgacaatgggcttgagattatacagggagatgcacccgctctaactgctgcacgactcggaccgatg

SEQ ID NO: 6916 - DNA, 203 bp, Artificial sequence
  synthetic
ggcgcgccagtcctaaaggccccttcactgcttggtggtggaaagatgatataattataacctcatatcatgcttgcaatgattggtatgcatatcttgaaaggaaaaacccagtttttaggtatagaattagtatgtcaactaagagatggtggaagaacccttaccttgttgaggccgttggcgtgcgactcggaccgatg

SEQ ID NO: 6917 - DNA, 203 bp, Artificial sequence
  synthetic
ggcgcgccagtcctactgaatatagattcccccaatactgtgaattgctaaactttagagatcaccaacagagagacctatggagttgtgtgggtgatgctgagccaggtttttgtggtagtatgctcttttctgaaggcaaagtcatagggatgctcactgccaaatctgaatgtacatatgctgatcgactcggaccgatg

SEQ ID NO: 6918 - DNA, 203 bp, Artificial sequence
  synthetic
ggcgcgccagtcctggagtggagggctttctcaaggacaaattatttaactctttgttttccattcttgttaaggccataggatctcttgtgatctacataaatgctaaagatgaatgtaagctttctacccttttagctcttggtagcatgttaggtgtggatttcatgtcaaaagaccccttcacacgactcggaccgatg

SEQ ID NO: 6919 - DNA, 203 bp, Artificial sequence
  synthetic
ggcgcgccagtcctgatctggaatttgccaaatctcttatgaaatcttctctgttccctgtttgtacatccactggttcctatactgctctaggactgtttgaccaatggcttgttcttcccgctcactcaaaccccaaggattctattgttttcaaaggtgagagtgttaaaatagtcgactctatgcgactcggaccgatg

SEQ ID NO: 6920 - DNA, 203 bp, Artificial sequence
  synthetic
ggcgcgccagtcctggtttggatctgaacacatctgctgggtacccctacaacacaatggggataaggaagagagacttaatcccacacagaggtgaaccattgacacaattgcagaaagctctcgatttacatggttatgatcttcccttctctacttatctaaaggatgaacttagacccaaggcacgactcggaccgatg

SEQ ID NO: 6921 - DNA, 203 bp, Artificial sequence
  synthetic
ggcgcgccagtcctgttgttcatggagggatgccatcaggatgttcagggacctccatttttaattctatcattaataatttagttgttaggactttagttcttaagtgctataaaggaatcaacttagatttactaagaatccttgcttatggagatgacttacttgtctcatacccatttccattgcgactcggaccgatg

SEQ ID NO: 6922 - DNA, 203 bp, Artificial sequence
  synthetic
ggcgcgccagtcctgaccctgcggtgcttgctgatgcgggcaaggagttaggcctcacaatgaccccagctgataaatctgattcttttagtggttgtagtaagttaactgaagttactttcttgaagagatcttttgtctttgatgaacaattcccttttctttgccacccagtgttccctatgtctcgactcggaccgatg

SEQ ID NO: 6923 - DNA, 203 bp, Artificial sequence
  synthetic
ggcgcgccagtcctgaaattcatgagtccattagatggactaggagtgctgcaacaacacaggaacatgtgacatcgttgtgcttattggcttggcataacggaaaggaagtttatgaagaattttgtgaaaagattcgcagcactccagttgggcgagctttatctttgccatcttttgaggtgcttcgactcggaccgatg

SEQ ID NO: 6924 - DNA, 203 bp, Artificial sequence
  synthetic
ggcgcgccagtcctcaccaagtgaattcttttcacttgatgacttgtgtcgccaacaaattttaaagatggtttatattgaccaatacgcttttcacatgttacatgaagacataaattgtatagggtttactctatcaatttatgatgaagataaacgaatgaaggacataacttattgggatctgacgactcggaccgatg

SEQ ID NO: 6925 - DNA, 203 bp, Artificial sequence
  synthetic
ggcgcgccagtcctattgtgaatatcatgaaaatttatatgatgcactaatgtcggccgaatttgaacaagtttggtttacattattgcttaaatatcttgattttgtaccagtaccaatgaattggagaggaatgccagaatttcctaccatttatgtatcaaaacatttttggtatgaattatatccgactcggaccgatg

SEQ ID NO: 6926 - DNA, 203 bp, Artificial sequence
  synthetic
ggcgcgccagtcctcttataaaaacaggactccgatagttattgaggcacaaacatcaggagataatatgactcttaaacaaccacgaccagttgttatagaagctcagacatctgctgattgtgttactttagctaaaaacacacaacgaatgattgaagcatttgcaagttctgatactgtaacaccgactcggaccgatg

SEQ ID NO: 6927 - DNA, 203 bp, Artificial sequence
  synthetic
ggcgcgccagtcctgtgataaaacttatacgctaaatgatgttaagaaaggacaatatatattgcgacaaggattagaatatacgatgccgacaattgatggtgattgtggagccccactaatcatcaatgaaacacaggttactagaaagatagctggtatacatgttgctggtgcagcatgtggtccgactcggaccgatg

SEQ ID NO: 6928 - DNA, 203 bp, Artificial sequence
  synthetic
ggcgcgccagtcctgagcttatgcagaatctataacccaaaaagatttggagcgtacatttagtaaaatagatgttacgatgcaaatccaattggatttagattcttcattagatttttctagaaccgaacccaaaattcctgctggagtcgaatttggaccggaagctctcactttttgtgatcttccgactcggaccgatg

SEQ ID NO: 6929 - DNA, 203 bp, Artificial sequence
  synthetic
ggcgcgccagtcctggagtagctccccaggatatccttggataaaggatagagtgaaaggaactaaaggaaaacaaggctggtttggtactgatggagaatttattctcaacgaagatgtcgaattagccgtacaacgacgactacaagcagctcgtgaaggaaaacgattacctgtgatgtgggtcgcgactcggaccgatg

SEQ ID NO: 6930 - DNA, 203 bp, Artificial sequence
  synthetic
ggcgcgccagtcctcgatgagagattttagtaaacatgtttccctcgtctcttatggagatgataatgtaattaacttcagtgatgaagttagtgcatggtataacatgtctactattgcagaggctttttcaacacttggattcacttatacagatgagctcaagggagttagaggcgaggtaccaacgactcggaccgatg

SEQ ID NO: 6931 - DNA, 203 bp, Artificial sequence
  synthetic
ggcgcgccagtcctttcgaaataccatacctgctgataaccaagaaaacgattctaccaatgtacataacacgaaactcgcgtcgacctcagcggagaatgccattgagaaggaacaaatcaccacctttcatgatgtggaaactccaaataggatcgatacccccatggctcaggatacttcatcggcgactcggaccgatg

SEQ ID NO: 6932 - DNA, 203 bp, Artificial sequence
  synthetic
ggcgcgccagtcctctaggagcatggatgatacgcacagtattattcagtttctacaacgccccgttctcattgacaacattgagattgttgcaggaacaactgccgataacaacacagcactcagtagatatgtgctagatagaacaaacccgcaaaaatacattaaacaatggacattaccatcaacgactcggaccgatg

SEQ ID NO: 6933 - DNA, 203 bp, Artificial sequence
  synthetic
ggcgcgccagtcctcccgtgcaggtgttacaggttatccgggagtcgaactagatttccaattagacaattcagttgagatgactattccatatgcatcttttcaagaagcatatgatttagttagtgggaatgaagattttgtgcagttgtacctttttacaattgcaccggttttgggaccttcagcgactcggaccgatg

SEQ ID NO: 6934 - DNA, 203 bp, Artificial sequence
  synthetic
ggcgcgccagtcctctgaatcagcgaattcaaaagtagacctttcagtctatatgtggttagataacatatctctcgttatccccacatatagattgaatccaaatcttccaaccggacaaactctaacccgcatagttcagaattccgattctgataaactcaaagaagcacttaagattgctaagtcgactcggaccgatg

SEQ ID NO: 6935 - DNA, 203 bp, Artificial sequence
  synthetic
ggcgcgccagtcctacccgataagtaacggagatgattggggcggtgtaataccagtgggaatgccttgctactctaagactattagagcagttaaaggcgccacttcgacgtcaaaaaccgaagtgatggacccagcaccgtgtgaatatgttgcaaatcttttctcatattggcgtgcaactatgtcgactcggaccgatg

SEQ ID NO: 6936 - DNA, 203 bp, Artificial sequence
  synthetic
ggcgcgccagtcctgaactcaaactcagcgaccaagaaggaaggttgatccagaacagtataacaatagagagaatggttctctccgcatttgatgaaaggaggaacaggtacctagaggaacatcccagtgcggggaaggacccgaagaagaccggaggtccaatctaccgaaggagagacgggaaacgactcggaccgatg

SEQ ID NO: 6937 - DNA, 203 bp, Artificial sequence
  synthetic
ggcgcgccagtccttgggtgagagagctgattctgtatgacaaagaggagataaggagaatttggcgtcaagcgaacaatggagaagacgcaactgctggtctcactcatatgatgatctggcattccaacctaaatgatgccacataccagagaacaagagccctcgtgcggactggaatggacccccgactcggaccgatg

SEQ ID NO: 6938 - DNA, 203 bp, Artificial sequence
  synthetic
ggcgcgccagtcctgagagaatgtgcaacatcctcaaagggaaatttcaaacagcagcacaaagagcaatgatggatcaggtgcgagaaagcagaaatcctgggaatgctgaaattgaagatctcatctttctggcacggtctgcactcatcctgagaggatccgtagcccataagtcctgcttgcctcgactcggaccgatg

SEQ ID NO: 6939 - DNA, 203 bp, Artificial sequence
  synthetic
ggcgcgccagtcctgcttgtgtgtacgggctcgctgtggccagtggatatgattttgagagggaagggtactctctggttgggatagatcctttccgtctgcttcagaacagtcaggtcttcagtcttattagaccaaatgagaatccagcacataaaagtcaattggtatggatggcatgccattctcgactcggaccgatg

SEQ ID NO: 6940 - DNA, 203 bp, Artificial sequence
  synthetic
ggcgcgccagtcctggaaacaccaatcaacagagagcatctgcaggacaaatcagtgtacagcccactttctcagtacagagaaatcttcccttcgaaagaccgaccattatggctgcgtttaaggggaataccgagggcagaacatctgacatgaggactgaaatcataaggatgatggaaagtgcccgactcggaccgatg

SEQ ID NO: 6941 - DNA, 203 bp, Artificial sequence
  synthetic
ggcgcgccagtcctttggtctggacatcagaactgccactcgtgaaggaaagcatatagtggagcggattctggaggaagaatctgacgaggcacttaaaatgactatcgcttcagtgcctgcttcacgctacctaactgaaatgactcttgaggaaatgtcaagggattggttaatgctcattcccacgactcggaccgatg

SEQ ID NO: 6942 - DNA, 203 bp, Artificial sequence
  synthetic
ggcgcgccagtcctaaatgacattccatggagcaaaggaagttgcactcagttactcaactggtgcgcttgccagttgcatgggtctcatatacaaccggatgggaacagtgaccacagaagtggctcttggcctagtatgtgccacttgtgaacagattgctgatgcccaacatcggtcccacaggccgactcggaccgatg

SEQ ID NO: 6943 - DNA, 203 bp, Artificial sequence
  synthetic
ggcgcgccagtcctagatggcgactaccaccaacccactaatcaggcatgagaacagaatggtactagccagcactacggctaaggccatggagcagatggctggatcaagtgagcaggcagcagaagccatggaagtcgcaagtcaggctaggcaaatggtgcaggctatgaggacaattgggactccgactcggaccgatg

SEQ ID NO: 6944 - DNA, 203 bp, Artificial sequence
  synthetic
ggcgcgccagtcctagaattgctccacacagagcataatggaatgctgtgtgcaacaagcctgggacatcccctcattctagacacatgcactattgaaggactagtctatggcaacccttcttgtgacctgctgttgggaggaagagaatggtcctacatcgtcgaaagatcatcagctgtaaatggcgactcggaccgatg

SEQ ID NO: 6945 - DNA, 203 bp, Artificial sequence
  synthetic
ggcgcgccagtcctaggactatttggagccatagctggattcatagaaggaggttggccaggactagtcgctggctggtatggtttccagcattcaaatgatcaaggggttggtatggctgcagatagggattcaactcaaaaggcaattgataaaataacatccaaggtgaataatatagtcgacaacgactcggaccgatg

SEQ ID NO: 6946 - DNA, 203 bp, Artificial sequence
  synthetic
ggcgcgccagtcctgcatggtccagctcaagctgccatgatgggaaggcatggttacatgtttgtgtcactggggatgatagaaatgcgactgctagcatcatttatgatgggatgcttaccgacagtattggttcatggtctaagaacatcctcagaactcaggagtcagaatgcgtttgcatcaatcgactcggaccgatg

SEQ ID NO: 6947 - DNA, 203 bp, Artificial sequence
  synthetic
ggcgcgccagtcctacaagcagcgtatatatagaagtattgcatttgactcaaggaacttgctgggagcagatgtacacaccaggaggggaggtaagaaatgatgatgttgaccaaagtttaatcattgctgctaggaacattgtcaggagagcaacagtatcagcagacccattggcttcactcctgcgactcggaccgatg

SEQ ID NO: 6948 - DNA, 203 bp, Artificial sequence
  synthetic
ggcgcgccagtcctgcaatcttacgaaaggggagaaagctaatgtattgatagggcaaggagacgtagtgttggtaatgaaacggaaacgggactctagcatacttactgacagccagacagcgaccaaaagaattcggatggccatcaattagtgtcgaattgtttaaaaacgaccttgtttctactcgactcggaccgatg

SEQ ID NO: 6949 - DNA, 203 bp, Artificial sequence
  synthetic
ggcgcgccagtcctaaacgatggaagttgtccagcaaacgagagtggataagctgacccaaggtcgccagacttatgactggacattgaatagaaaccagccggctgcaactgctttggccaacaccatagaagtattcagatcgaacggtctaacagccaatgagtcaggaaggttaatagatttcccgactcggaccgatg

SEQ ID NO: 6950 - DNA, 203 bp, Artificial sequence
  synthetic
ggcgcgccagtcctcaaatgttgtgagaaagatgatgactaactcacaagacacagagctctcctttacagttaccggagacaacaccaaatggaatgagaatcagaatcctcgaatatttctagcaatgataacatacatcacaaggaaccaacctgaatggtttagaaatgtcttgagcattgccccgactcggaccgatg

SEQ ID NO: 6951 - DNA, 203 bp, Artificial sequence
  synthetic
ggcgcgccagtcctagggaatacaagcaggagtggatagattctataggacttgcaagctagttggaatcaacatgagcaaaaagaagtcttacataaatcggacaggaacatttgagttcacaagctttttctaccgctatgggtttgtagccaacttcagcatggagctgcccagctttggagtttcgactcggaccgatg

SEQ ID NO: 6952 - DNA, 203 bp, Artificial sequence
  synthetic
ggcgcgccagtcctcatttgaattgaagaagctgtgggagcagacccgctcaaaggcaggactgttggtttcagatggagggccgaatttatacaacatccggaatcttcacattccagaagtttgcttgaagtgggagttgatggatgaagattaccagggaagactgtgtaaccctctgaacccgtcgactcggaccgatg

SEQ ID NO: 6953 - DNA, 203 bp, Artificial sequence
  synthetic
ggcgcgccagtcctttgtcagtcataaggaagttgaatccgtcaacaatgctgtggtaatgccagcccatggtccggccaagagcatggaatatgatgccgttgcaactacacattcatggattcccaagagaaatcgctccattctcaacactagccaaaggggaattcttgaggatgaacaaatgtcgactcggaccgatg

SEQ ID NO: 6954 - DNA, 203 bp, Artificial sequence
  synthetic
ggcgcgccagtcctaccagaagtgctgcactctattcgagaaattcttccctagcagttcatatcggaggccagttggaatttccagcatgatggaggccatggtgtctagggcccgaattgatgcacggattgacttcgagtctggaaggattaagaaagaagaatttgctgagatcttgaagatctcgactcggaccgatg

SEQ ID NO: 6955 - DNA, 203 bp, Artificial sequence
  synthetic
ggcgcgccagtccttcagatcgatagcaagctggatccagagtgagttcaacaaggcatgtgaattgaccgattcgagctggatagaactcgatgagataggggaagatgttgccccaattgagcacattgcaagcatgagaaggaactacttcacagcggaagtgtctcattgcagggccactgagtcgactcggaccgatg

SEQ ID NO: 6956 - DNA, 203 bp, Artificial sequence
  synthetic
ggcgcgccagtcctagatgaaatgggggatggaaatgagacgctgccttcttcaatctcttcaacagattgagagcatgatcgaggctgagtcttctatcaaagagaaagacatgaccaaagaattctttgaaaacagatcggagacatggccaattggagagtcacctaagggagtggaggaaggctcgactcggaccgatg

SEQ ID NO: 6957 - DNA, 203 bp, Artificial sequence
  synthetic
ggcgcgccagtccttgcgcttcttgcgtgaccggttagtactcttaacactctccgcctacttggtcgtcagcgctgtcttgggcacatctgttggggttagttcgacgctctacggtatcccccgcgtgacgaactacggtgttggggccgcttcgtgcgagccgatcgcctggtgtgtttcggctgcgactcggaccgatg

SEQ ID NO: 6958 - DNA, 203 bp, Artificial sequence
  synthetic
ggcgcgccagtcctcactagcgagtgttagtagtagtactgttgcttcgtagcggagcatgacggccgtgggaatccctccttggcaacaaggacccacggggccgaaagccacgtcctgaaggacccgtcatgtgtgcaaccccagcacggcagctttattatgaaacccactttaaggtgacactgcgactcggaccgatg

SEQ ID NO: 6959 - DNA, 203 bp, Artificial sequence
  synthetic
ggcgcgccagtcctgaatcggtaccgccttgcgaccaagcgaagtgtgtatggtggacggcacggacatgtgcctggctgacttccacgctggcattttcctgaaaggacaggaacacgctgtgtttgcctgtgtcacctccaacgggtggtacgcgattgacgacgaggacttttacccctggacgccgactcggaccgatg

SEQ ID NO: 6960 - DNA, 203 bp, Artificial sequence
  synthetic
ggcgcgccagtcctcggacccgtccgatgtcctggtatatgttccgtacgatcaagaaccactcaacggagaatggaaagcaaaggttcagaaacgactcaagggagccgggcaatccagcccggcaaccgggtcgcagaaccagtcaggcaacactggaagcatcattaacaactactacatgcagccgactcggaccgatg

SEQ ID NO: 6961 - DNA, 203 bp, Artificial sequence
  synthetic
ggcgcgccagtcctaataccagaattccatggacacacaacttggtgacaacgctattagcggaggctccaacgaaggttccacggacaccacttccacacacacaaacaacacccaaaacaacgattggttctcgcgcctagccagttcggccttcaccggactgtttggcgctcttttggccgacacgactcggaccgatg

SEQ ID NO: 6962 - DNA, 203 bp, Artificial sequence
  synthetic
ggcgcgccagtcctggtttttcaagaaacacctgtttgattggacaccaaatctatcgtttggacactgtcactacctggaactcccctccgaacacaaaggcgtgttcggcagcctcatggactcctacgcctacatgaggaacgggtgggacattgaggtgaccgctgttggaaaccagttcaatgcgactcggaccgatg

SEQ ID NO: 6963 - DNA, 203 bp, Artificial sequence
  synthetic
ggcgcgccagtcctgtggttgcctcctcgtcgcactcgtcccggagctgaaagaacttgacacgcggcagaagtaccagttgaccctcttcccacaccagttcatcaacccacgcaccaacatgacggctcacatcaacgtgccgttcgtgggtgtcaacaggtacgaccaatacaagctccacaagccgactcggaccgatg

SEQ ID NO: 6964 - DNA, 203 bp, Artificial sequence
  synthetic
ggcgcgccagtcctccacagaacccgagcgggccgcgcactgtatacattctgagtgggacactggtcttaattctaagttcaccttttccattccttacctctctgctgctgactacgcttacactgcttctgacgtggccgagaccacgagtgtgcagggatgggtgtgcatttatcagattacgccgactcggaccgatg

SEQ ID NO: 6965 - DNA, 203 bp, Artificial sequence
  synthetic
ggcgcgccagtcctttgctgttcttgcacagcgggtaagcaacaggctgcccacctccttcaactacggtgctgtgaaggctgacaccatcacggagctgttgatccgcatgaagcgtgcggagacatactgccccaggcctttgctagctcttgacaccacccacgaccgccgtaagcaggagatcacgactcggaccgatg

SEQ ID NO: 6966 - DNA, 203 bp, Artificial sequence
  synthetic
ggcgcgccagtcctctgataccggccttgagattctggacagcacgtttgtcgtgaagaagatctccgactcgctctccagtctctttcacgtcccggcccccgtcttcagtttcggagccccgattctgttggctgggttggtcaaggtcgcctccagtttcttccggtcaacacccgaagacctcgcgactcggaccgatg

SEQ ID NO: 6967 - DNA, 203 bp, Artificial sequence
  synthetic
ggcgcgccagtcctagcaacgggacctcaacgacccaagcaagtacaaggaggctaaggagtggctcgacaacgcgcgccaagcgtgtttgaagagcgggaacgtccacattgccaacctgtgcaaagtggtcgccccggctcccagcaagtcgggacccgatcccgtggtcgtttgtctccgtggcacgactcggaccgatg

SEQ ID NO: 6968 - DNA, 203 bp, Artificial sequence
  synthetic
ggcgcgccagtcctagccccaaccacctctacagaatgtctaccaacttgttcaggaggtgattgaccgggttgagctccacgagaaagtgtcgaaccacccgatcttcaaacaaatctcaattccttcccaaaagtccgtgttgtactttctcatcgagaagggacagcacgaagcagcaattgaatcgactcggaccgatg

SEQ ID NO: 6969 - DNA, 203 bp, Artificial sequence
  synthetic
ggcgcgccagtcctagcccaccaaacccgcggaagagcaaccacaagctgaaggaccctacgccgggccgctcgagcgtcagaaacctctgaaagtgaaagctaagctgccacagcaggagggaccctacgctggcccgatggagagacagaaaccactgaaagtgaaagtgaaagccccggtcgcgacgactcggaccgatg

SEQ ID NO: 6970 - DNA, 203 bp, Artificial sequence
  synthetic
ggcgcgccagtcctaggaaggaccttacgagggaccggtgaagaagcctgtcgctttgaaagtgaaagctaagaacctgattgtcactgagagtggtgccccaccgaccgacttgcaaaagatggttagtggcaacacaaagcctgttgagctcatcctcgacgggaagacagtagccatctgctgtgcgactcggaccgatg

SEQ ID NO: 6971 - DNA, 203 bp, Artificial sequence
  synthetic
ggcgcgccagtcctctactggagtgtttggcaccgcctacctcgtgcctcgtcatcttttcgctgagaagtatgacaagatcatgttggacggcagagccatgacagacagtgattacagagtgtttgagtttgagattaaagtaaaaggacaggacatgctctcagacgccgcgctcatggtgctgccgactcggaccgatg

SEQ ID NO: 6972 - DNA, 203 bp, Artificial sequence
  synthetic
ggcgcgccagtcctctggcctctttgcctacagagccgccaccaaggctggctactgtggaggagctgttctcgccaaggacggcgccgacacattcatcgttggcacacactccgcaggtggcaatggagttggatactgctcttgtgtttccaggtccgtgctccagaggatgaaggcacacattgcgactcggaccgatg

SEQ ID NO: 6973 - DNA, 203 bp, Artificial sequence
  synthetic
ggcgcgccagtcctaccctgaaccacaacacgaggggttgatcgttgacaccagagatgtggaagagcgtgtgcacgtcatgcgcaaaaccaagctagcacccaccgtggcacacggtgtgttcaaccctgagtttgggcccgccgccctgtccaacaaggacccgcgcctgaacgaaggagttgtcccgactcggaccgatg

SEQ ID NO: 6974 - DNA, 203 bp, Artificial sequence
  synthetic
ggcgcgccagtcctccatggagccagacaccgcgcctggccttccctgggctctccaggggaagcgccgcggcgcgctgatcgacttcgagaacggcacggtcggacccgaagttgaggctgccttgaagctcatggagaaaagagaatacaagtttgcttgccagaccttcctgaaggacgaggttccgactcggaccgatg

SEQ ID NO: 6975 - DNA, 203 bp, Artificial sequence
  synthetic
ggcgcgccagtcctcctacgagaacaaacgcatcactgttgaaggcgggatgccgtctggctgttccgcaactagcatcatcaacacaattctgaacaacatctacgtgctctacgcgctgcgtagacactatgagggagttgagctggacacttacaccatgatttcctacggggatgacatcgtggcgactcggaccgatg

SEQ ID NO: 6976 - DNA, 203 bp, Artificial sequence
  synthetic
ggcgcgccagtccttcgcaagtgattacgatctggactttgaggctcttaagccccacttcaaatctcttggccaaaccatcactccagctgacaaaagcgacaaaggttttgttcttggtcactccattgccgatgtcactttcctcaaaagacacttccacatggattatggaactgggttttacacgactcggaccgatg

SEQ ID NO: 6977 - DNA, 203 bp, Artificial sequence
  synthetic
ggcgcgccagtcctaacctgtgatggcttcgaagaccctcgaggccatcctctcctttgcacgccgtgggaccatacaggagaagttgatctccgtggcaggactcgcagtccactctggacctgacgagtaccggcgtctctttgagcccttccagggtctctttgagattccaagctacagatcaccgactcggaccgatg

SEQ ID NO: 6978 - DNA, 203 bp, Artificial sequence
  synthetic
ggcgcgccagtcctactctgacagagaatgaaaatcccgaagacattgactgctggtgctatggagtgcccaacgtgtatgtcacatacggacgttgcaaacatgatggacaaccgcgaaggaacagacgatccgtggctttgacaaaccatgttgaagaaacattgaacacccgtggagagaggtggcgactcggaccgatg

SEQ ID NO: 6979 - DNA, 203 bp, Artificial sequence
  synthetic
ggcgcgccagtccttacaaggcaaccctctcagaacataagacagccaaccattgcccaacggcaggagaagcctttttagatgaagagagtgatgaccaacatatttgcaaacgtgggttctctgaccgaggctggggaaatggatgtgggttatttggaaaaggaagtattgtcgcctgctcaaaacgactcggaccgatg

SEQ ID NO: 6980 - DNA, 203 bp, Artificial sequence
  synthetic
ggcgcgccagtcctgatgagccacacgctacaacagtcaccgtcacgagcatggggaaccaagaaggatccctgaaggcatccatggttggggctacaaaaatctcttattctgaaaacaaatatcacatcaaaggaggacatgcagtttgccaaatacaactacagggactaaccatgaaaggaagccgactcggaccgatg

SEQ ID NO: 6981 - DNA, 203 bp, Artificial sequence
  synthetic
ggcgcgccagtccttacccaacatcgccgcgtgaaattgctgccgtcattgcacaaacattctcaaatggcgcatgtgggctcaactctgtggatgagttagaacaccaaatgtggaaaggaattgaagatgaaattaaccacgttctaagtgagaatggtctggatctgtctgtagtcgtgcaggaccgactcggaccgatg

SEQ ID NO: 6982 - DNA, 203 bp, Artificial sequence
  synthetic
ggcgcgccagtcctggaacttggcaaattaccagattggaattacaatcatacagggaatgtctttggcctccaatgcacacagcaggaatcacttctgtgatggaaagtgatttgttcatgccccgagagctgggaggacctgtcaccttacataaccatatcccaggttacgcgacacaggtttatcgactcggaccgatg

SEQ ID NO: 6983 - DNA, 203 bp, Artificial sequence
  synthetic
ggcgcgccagtcctccatggtcacacgtcctgatgggcacaggtctgttaatagtgtcaactgtgcacccagctggattggttctggccgctttcgcattctggtattatcagtacaccaagcaacgcagcaatattctatgggaactaccagaagtcgccgagcggacaccaatgttgactgaaggacgactcggaccgatg

SEQ ID NO: 6984 - DNA, 203 bp, Artificial sequence
  synthetic
ggcgcgccagtcctgacctgcatccaggatctgggaaaacccgacaagtactgcccgctcttcttaggaaatgtgtggaaaaaaggcttagaacactcgtcctggctccaacaaaagtagtgttgagtgaaatgcatgaagcagttaaagacttaccagttaggttccacacgagcgccgcgctggaacgactcggaccgatg

SEQ ID NO: 6985 - DNA, 203 bp, Artificial sequence
  synthetic
ggcgcgccagtcctttggcagcagttgtgttaatgacagcaacacctcctggaacaagtgatccattcccggagtctaatgggacaatagaagacacacaggtgactattccagatgaaccttggaaaagaggcaacgaatggatacttgatgatccccggccaactgcgtggttcctgccttccatccgactcggaccgatg

SEQ ID NO: 6986 - DNA, 203 bp, Artificial sequence
  synthetic
ggcgcgccagtcctggagatttggtgtgctggaaagaagcgttgatgatcctggataacatggaaatccctggaggattcacgatgagcctctttggtagtgaggctaggaaagtcgagcacgttccaggggaataccgtttaaaaccagaagcaaggaaacggttcaggcaactgatgaggaagtatcgactcggaccgatg

SEQ ID NO: 6987 - DNA, 203 bp, Artificial sequence
  synthetic
ggcgcgccagtcctagaatgtttgctgacggacagacccaaaaagcgttcatagagtacgcaacaacaacacgatcaataacagccgtgatcgaaaaggtggctatggtgccagaggccttaaaagacaaggtgcaggatgctttcgacacctactacactttgtacaaggcagaagaaaaatcacgccgactcggaccgatg

SEQ ID NO: 6988 - DNA, 203 bp, Artificial sequence
  synthetic
ggcgcgccagtcctagttaccaaatcgctcttgaacagatacctgatgccctaataacgacattgtgcttgggagccttggctgcagccacaggaggaatccttctctatttgttgctgccaaaaggaatgtctcgcatgacactggctttcttcactatgttggtaacgggggctggtttatggatgcgactcggaccgatg

SEQ ID NO: 6989 - DNA, 203 bp, Artificial sequence
  synthetic
ggcgcgccagtcctgtcaactatggagccatatcattacagggaatatcccagggagcggctgccctttttcagatggacaaggggtatcctttcatgcggttgagaattccgctggttctgctgttggcaggggccatcaacaacctcactgccatcacagcaggactagggttcctatgtgctatgcgactcggaccgatg

SEQ ID NO: 6990 - DNA, 203 bp, Artificial sequence
  synthetic
ggcgcgccagtcctgctgcagtaggaatggctcatgccttatggaatgcccaggcaaatcgcagaggtggcacaggatccggaatgaccccaggggaggcttggaagaaacagctgaataagcttgggaaaacacaatttgagcagtacaagagatcatgcatacttgaagtggacaggacacatgcccgactcggaccgatg

SEQ ID NO: 6991 - DNA, 203 bp, Artificial sequence
  synthetic
ggcgcgccagtcctgtaatggccttcaccctgggtgtgcaagggcatgaaaagccaataatgagaacaactctagggtggaatctcataagattcaaggacaagacagatgtgttcaacatggaagtaatccctggggacacactgttatgtgacattggagaaagttcaccgagcattgcagtggaacgactcggaccgatg

SEQ ID NO: 6992 - DNA, 203 bp, Artificial sequence
  synthetic
ggcgcgccagtcctattgatgaggacaagataagacgacgggtggaccttctaagagaagagtacaagaagacctggttccatgatttaaaccatccatacaggacgtggcattacattggctcttacttgacaagaggaggaggaacagcggcatccatgaccaatggcatagtcaaactcatgtcacgactcggaccgatg

SEQ ID NO: 6993 - DNA, 203 bp, Artificial sequence
  synthetic
ggcgcgccagtcctcaaccatgggacgcagtggctggggtggcatgcatggccatgactgacacaacaccatttggacagcagagagtgtttaaagagaaagtggataccaaaccgccagaacccaacaagacagtgcgtcatgtgatggccatgactaatagctggatcatgaaatacttggccaggcgactcggaccgatg

SEQ ID NO: 6994 - DNA, 203 bp, Artificial sequence
  synthetic
ggcgcgccagtcctgaatgtagaacatgtgtgtacaacatgatggggaaacgagagaagaaaccatctgaatttgggaaagccaaagggagccgagccatatggtatatgtggctcggagctcggtttcttgagtttgaggcactgggtttcttaaatgaagatcactgggtctcccggaagaactctcgactcggaccgatg

SEQ ID NO: 6995 - DNA, 203 bp, Artificial sequence
  synthetic
ggcgcgccagtcctctgatcgggagggctaggatttcccctggaaatggctggttggttagagagactgccccattaagcaaggcctatgctaacatgtggaaactgttttactttcaccgtagagatctaaggctgatggctaatgcaatcaactcagctgtccccattgactgggtcccaacgggacgactcggaccgatg

SEQ ID NO: 6996 - DNA, 203 bp, Artificial sequence
  synthetic
ggcgcgccagtcctatgattggcacatcaaagagaagcagttgggctgaagctcttcctcacactgtacaaaaggtgagaggcattgtggggacacaagagaggtaccgtgattaccttgaaactcaaaacaggttcaggaccatagtccaacatcttgttggagatatcctgtgagagcaataaaaacgactcggaccgatg

SEQ ID NO: 6997 - DNA, 203 bp, Artificial sequence
  synthetic
ggcgcgccagtcctattttaaagacaaaagtgtcaggccaagattgagaaaatcttgccacagcttggcagactgtgcagcctgcagccctagagggagactgaccaactccctttagtagaaaaggtcagggaagaacttgaggatgggtgtggcctcaagatctcttctcaaaaaacggactgaaccgactcggaccgatg

SEQ ID NO: 6998 - DNA, 203 bp, Artificial sequence
  synthetic
ggcgcgccagtcctaccacacctagatgaagatagtaggggagcctccgccaatggtggctttacatattgagctactgcattggtcgatggggactagcggttagaggagaccctctcctacgcatggattttgcaatatgttgacatcagggaaagaccgggtgtttgtcggttccggagagctcccgactcggaccgatg

SEQ ID NO: 6999 - DNA, 203 bp, Artificial sequence
  synthetic
ggcgcgccagtcctggtcgatggggactagcggttagaggagaccctctcctacgcatggattttgcaatatgttgacatcagggaaagaccgggtgtttgtcggttccggagagctccggaggccagggcgccgtttgcccgtagtttataactggccttcggggatcgaaggagttgccaaacactcgactcggaccgatg

SEQ ID NO: 7000 - DNA, 203 bp, Artificial sequence
  synthetic
ggcgcgccagtcctgtcaaggttgagccacatacaggaaactatgtcgcggccaatgaaacccacagtgggaggaaaaccgcattgttcacagtctcttcggaaaaaacaattctaaccatgggcgaatacggagacgtgtcgctgatgtgcagagtcgctagtggcgtcgatctggcacaaaccgttcgactcggaccgatg

SEQ ID NO: 7001 - DNA, 203 bp, Artificial sequence
  synthetic
ggcgcgccagtcctgttcttgagctcgacaagacagcagaacacctccccacggcatggcaggttcacagagattggtttaacgatctagctctgccttggaaacatgagggaatggtgggttggaacaatgctgaacgcctggttgagtttggagttcctcatgccgtgaagatggatgtttacaaccgactcggaccgatg

SEQ ID NO: 7002 - DNA, 203 bp, Artificial sequence
  synthetic
ggcgcgccagtcctgagatgcagctccccccaggagacaacatcatctatgttggggaactaaaacaccagtggttccagaaggggagtagcattggtagagttttccagaaaacaaggaaaggcatagagaggctgacagtgctgggggaacatgcgtgggacttcggttccactggcggatttttgcgactcggaccgatg

SEQ ID NO: 7003 - DNA, 203 bp, Artificial sequence
  synthetic
ggcgcgccagtcctaccatgacgcttggagtgggggctgacgttggatgtgctgtggacactgaaagaatggaacttcgctgtggtgaaggtttggtcgtgtggagagaggtgtcagaatggtatgataactatgctttttaccctgaaacaccggcggcccttgcttcggctttgaaggagatggttcgactcggaccgatg

SEQ ID NO: 7004 - DNA, 203 bp, Artificial sequence
  synthetic
ggcgcgccagtcctgatcaaggtggcctggtgcgctcgatggtggtggctgacaatggagagctgctcagcgaaggaggaatccctggaattgtggcagtgttcgtggtccttgaatacatcattcgcaaaaggccgagtgcaggactgacggttgtgtggggaggagtcgtggtcttggcgctgcttcgactcggaccgatg

SEQ ID NO: 7005 - DNA, 203 bp, Artificial sequence
  synthetic
ggcgcgccagtcctgtcactggcatggtaacgctgcagagcatgctgcgttatgttattgctgtgggggtgacatttcacctcgagctagggccagaaatcgtggctttgatgctgctccaggcagtgttcgagctaagggtcggactcctcggtgcgtttgtgctgcgcagaagtctaacaacccgccgactcggaccgatg

SEQ ID NO: 7006 - DNA, 203 bp, Artificial sequence
  synthetic
ggcgcgccagtcctgaggtggtgaccatctattttctcctcttggtcctggaacttggtctgccgagcgcaaacctggaggccttgtgggggtgggcagacgcattagccatgggagcaatgatattcagagcttgcacggctgagggaaaaaccggactgggactcctgttggtggctctcatgacccgactcggaccgatg

SEQ ID NO: 7007 - DNA, 203 bp, Artificial sequence
  synthetic
ggcgcgccagtccttggggacaccgccaggtcggagttggctttggttctaagggcgtcctccacacaatgtggcacgtgactaggggagctgccatattcattgacaatgcagtggctggaccctattgggcagatgtgaaggaggatgttgtgtgctacgggggagcctggagcctggaggagaaacgactcggaccgatg

SEQ ID NO: 7008 - DNA, 203 bp, Artificial sequence
  synthetic
ggcgcgccagtccttggaaaggagaaaaggttcaagttcatgcctttcctccaggaagagctcatgaagtgcatcagtgccaacctggagaattggttctggatactggaaggaggattggtgcaatacccattgatctggcgaaagggacatccggcagccccatactcaacgcccagggggcggtgcgactcggaccgatg

SEQ ID NO: 7009 - DNA, 203 bp, Artificial sequence
  synthetic
ggcgcgccagtcctagacaaaaagggaagagtgtgatttgcctaaacagcaagacctttgaaaaagactattccagagttagagatgagaaaccagattttgtggtgacaacagacatttcagaaatgggggcaaatcttgatgtgagtcgcgtcatagatgggcgaacgaacattaagccagaggagcgactcggaccgatg

SEQ ID NO: 7010 - DNA, 203 bp, Artificial sequence
  synthetic
ggcgcgccagtcctgtggcatatgcttcgggacggcggagtcttggggacatgctgacaggaatgtcaggggttcctgagctcctgcgccacagatgcatgagtgccatggatgtcttttacacactgctttatgaggagcctggcagcagagcaatgaagatggcagagagagatgctccagaagcccgactcggaccgatg

SEQ ID NO: 7011 - DNA, 203 bp, Artificial sequence
  synthetic
ggcgcgccagtcctcttgtgttctacaccttgttgacagtgctgcagcctgaagctggcaagcagaggagcagcgacgacaacaagctggcttacttcctcctgacactctgcagcctagctggcctggtggctgccaacgagatgggattcctggaaaagaccaaggcagatttatctgctgtgctacgactcggaccgatg

SEQ ID NO: 7012 - DNA, 203 bp, Artificial sequence
  synthetic
ggcgcgccagtcctcaggccatgcgagatcttggggggggaactcctttctttggagtggctggacacgtcctgactctcggagtggtatccctagtgggagcgacaccaacctccttggtggtgggcgtaggactagcagcttttcacctggccatcgtggtgtccggcctggaggctgagctgacccgactcggaccgatg

SEQ ID NO: 7013 - DNA, 203 bp, Artificial sequence
  synthetic
ggcgcgccagtcctcagagagcccacaaagttttcttctcggcaatggtacgcaatcccatggtggacggagatgtcatcaacccatttggagatggggaagtgaaacctgccctgtatgaaaggaagatgagcttgatactggcgatgatcctgtgtttcatgtctgtggttttgaaccgaacggtgcgactcggaccgatg

SEQ ID NO: 7014 - DNA, 203 bp, Artificial sequence
  synthetic
ggcgcgccagtcctcccgcagttacggaggcatcggctgtaggactggcagcagcagggcagcttatcaggcctgaggctgacacgctctggaccatgccggtggcttgtgggctgagtggtgtggtcaggggaagcctatgggggtttctgcctcttgggcacaggctatggctgagaacttccggacgactcggaccgatg

SEQ ID NO: 7015 - DNA, 203 bp, Artificial sequence
  synthetic
ggcgcgccagtcctagaatggtgacaagcctgggttggaatttaatcaagtttagggctggaatgaatgtgtttaccatgcaaccacatcgcgctgatactgtgatgtgcgatattggagagagtagcccggacgccgccattgaaggtgagagaacccgcaaagtgatactgctcatggagcagtggcgactcggaccgatg

SEQ ID NO: 7016 - DNA, 203 bp, Artificial sequence
  synthetic
ggcgcgccagtcctcaatacagtgatacctggcatgtggatagggaacacccataccgaacgtggcagtactggggtagctatcgcacagcgcccactggctctgcagcttcactgattaatggagttgtgaagctcctcagctggccgtggaatgcacgggaagatgtggtgcggatggcaatgacacgactcggaccgatg

SEQ ID NO: 7017 - DNA, 203 bp, Artificial sequence
  synthetic
ggcgcgccagtcctttgaagaagctgtcgctgttggagggaggtcttttctatgcggacgacacagccggatgggacaccagggtcaccaatgcggatctggaagatgaagagcagatcctgcgttacatggaaggtgaacacaaacagctggcagccactgttatgcaaaaggcatatcatgccaagcgactcggaccgatg

SEQ ID NO: 7018 - DNA, 203 bp, Artificial sequence
  synthetic
ggcgcgccagtccttcacacaaccccaggctgctacgagtggagaggtggctgcgtgaccacggagaagaacgccttggaagaatgctgatcagtggagatgattgtgtggtgagacccatagatgacaggtttagcaaggccctctacttcttgaatgatatggccaagactagaaaggacatcggccgactcggaccgatg

SEQ ID NO: 7019 - DNA, 203 bp, Artificial sequence
  synthetic
ggcgcgccagtcctgaatgggagcattcagctggcttctcaagctgggaggaggttcccttctgctcgcaccatttccatgagttggtgatgaaggacggacgcaccctggtcgtgccatgccgagatcaggacgaactggtggggagggcacgcgtctcaccggggtgtggttggagtgtccgcgagcgactcggaccgatg

SEQ ID NO: 7020 - DNA, 203 bp, Artificial sequence
  synthetic
ggcgcgccagtcctgctggccggtggtagaaaaccccccaacagggtgccaaacggcaacacgccagtgagagtggcgacgggaacatggtcgctcccgacgtagggcactctatccaattttgtgagaccccccgcaccatggaaggccaaacatggtgcatgaagggaaaggcccccggaagcttgcgactcggaccgatg

SEQ ID NO: 7021 - DNA, 203 bp, Artificial sequence
  synthetic
ggcgcgccagtcctggaaaacgagtcaaacaagtggccccaccaccaactaggggtcacatggagagaggactctctctcttaaccaagaacgacaatgtgtcgcgacaggcaaaacggcaacgaaaccctcggcaacagctttctggaatctttggcggtggtgttggcgcctggctgcgtgtgctacgactcggaccgatg

SEQ ID NO: 7022 - DNA, 203 bp, Artificial sequence
  synthetic
ggcgcgccagtcctcacatggacatcggaacggcaatcttatggcttgccctggcaacggcatctctcggacagcgtatgtttaagcaactgaactctcttcgtaagcgcgtgaagcgcctcgaaaaacaacgtagtggaccgaaccttgtcatgatcattgggctcttggctcttggcttatgctatcgactcggaccgatg

SEQ ID NO: 7023 - DNA, 203 bp, Artificial sequence
  synthetic
ggcgcgccagtcctgattgtggatcaagcgttgaagggtttcatctacggtatcaccgttgtgtgccccaagtgcgacgtcgacgagctccccaaccacaagtctcaaaccaagttggcttgttggaggaagtggagatgattggcttcaggttctttcgtgaaaatgttcccgtcatcgtggtgtgccgactcggaccgatg

SEQ ID NO: 7024 - DNA, 203 bp, Artificial sequence
  synthetic
ggcgcgccagtcctatcgtgagggatgtcccgacccaattccaatttggcgacgttggcaccatcacgctcacgtgtggtgtcacaacagaccgcatagctggacactactatcacattcgtgagggagtcaaagctggattggtacttcgtgaggccgtggattcttggcctggcatgatcaaaatgcgactcggaccgatg

SEQ ID NO: 7025 - DNA, 203 bp, Artificial sequence
  synthetic
ggcgcgccagtcctggtgggttcacttccggcatggacaaaattgtcagatggggaattacaactgctaatgaaataaagatcgatggtctcatcaaccctcaaattgattggcaaacttcggtgcttagggacatacgatccatttctttcacgtgcgaaatgatctttgacaacatctcgttcagccgactcggaccgatg

SEQ ID NO: 7026 - DNA, 203 bp, Artificial sequence
  synthetic
ggcgcgccagtcctgaggatctgctgggaaacttgcggttctcatggtcttggttcccgagtagctggctggtcatggctttcataggtttggcgctattccttgttttcggaagagttggatcttttgttgtttttgtggtgatcatagctgtgtacgtgcggtcggtttctgctgacgtcggatgccgactcggaccgatg

SEQ ID NO: 7027 - DNA, 203 bp, Artificial sequence
  synthetic
ggcgcgccagtcctgtcactcatggacggcttgagggggatatgggattgttgccaactctctttgggtcatttcctgagaaaccctctgacaaggttatccggattgtggcgtcaagacctgatatccggcgtctctgtggaaaagcggtttctttccagtttcagtacacagggtttcgacgggctcgactcggaccgatg

SEQ ID NO: 7028 - DNA, 203 bp, Artificial sequence
  synthetic
ggcgcgccagtcctggaactatgcctgagataccaaaacctaagccaaaaatcgtggaggagccaataggagatgaatatgaccctgaagttgatgacatcctacacaactacggaaaagctcatgcctgttcggattttcgctcgtcgaactcacggacaggagttgggttcgacaggtccattctgcgactcggaccgatg

SEQ ID NO: 7029 - DNA, 203 bp, Artificial sequence
  synthetic
ggcgcgccagtcctaatctcctgtgtctcgcggtgtctcttcagttgatcggagcgaaaacacgggtttctacactgacgcgcctggttctcaccatcctagccatgctcatatttggaatgcccaacatattttcatctgtggggctttctgcttgggtcttgttggcagcatcatcatctttgcggcgactcggaccgatg

SEQ ID NO: 7030 - DNA, 203 bp, Artificial sequence
  synthetic
ggcgcgccagtcctctttatggcttgctagaactgtcagcggcagcgattctaatcggggcctacaacggaatatctcagacactcccaccggaagtcttggtattttgcctcgtgatgggttggaagacgtccctggccattctcaccgttgtgtctctgatgttcagtttgcacgcatgctacaggcgactcggaccgatg

SEQ ID NO: 7031 - DNA, 203 bp, Artificial sequence
  synthetic
ggcgcgccagtcctattgtcgtcctggtcggatgtgcgttaacctctgtatccttctttcttggagccttgtacgtagttgtagcttccagcacaaatctaccacttcatgtggtgcgctacatccgcataagactttcggagcagaacagatctgacgatcttcttggcattggagtgtccggcggtcgactcggaccgatg

SEQ ID NO: 7032 - DNA, 203 bp, Artificial sequence
  synthetic
ggcgcgccagtcctgttagtgatgactttggaaaaggatcatccggctcaccattcttcattaatggtgaccccgttgggttctatggtttcgggttttatgtggatggtatctaccgttcgatcgtggccggtggaaagcccactgatgtcaatgaacctatcggtgacgatgccaccaggcgtttccgactcggaccgatg

SEQ ID NO: 7033 - DNA, 203 bp, Artificial sequence
  synthetic
ggcgcgccagtcctatcacatggcatcccggaaaaggcaagacgcgccgggtcattgtcgaggaaaccaaacagaattacgcggccaacctgcgaaccatcatcctgaccccaacccgagtcgtcatggctgaggtgattgaagcattgaaaaactacgacatcaagtgtgacaaaaatttgtcgtaccgactcggaccgatg

SEQ ID NO: 7034 - DNA, 203 bp, Artificial sequence
  synthetic
ggcgcgccagtcctcaggccaatgcattggcagctgcgatccccggtgcggtcccactgcatcgtgcaaatttctctgccaactatgcccaggccagtagtgaagagacaaccttggtcgtgtcgacggatatctcggagatgggagccaaccttggagtcgacctcgtcattgatactcggaaagcgcgactcggaccgatg

SEQ ID NO: 7035 - DNA, 203 bp, Artificial sequence
  synthetic
ggcgcgccagtcctgtggtcgtgtggatcctggggtttctggtagcaatgctcaagcccacgaagatgtcttatgagtcgatgccgtctggggaccctttcaatggtggcatggtactcacagcccctagcgtcctccactacatgggagttcctctcggattctgtgtcatcatctttcttgctatgcgactcggaccgatg

SEQ ID NO: 7036 - DNA, 203 bp, Artificial sequence
  synthetic
ggcgcgccagtcctgaaccacaggaaactcaaagtcaagcatctactatctcggggtcattcttcacttctcgcgttaggggggagagggccacgatgttggactcgctgcaggtcttcttcttcgtaactgtgctaatgaatgaattcatcatctgggtgcaggagaactggatcgcacagatgtaccgactcggaccgatg

SEQ ID NO: 7037 - DNA, 203 bp, Artificial sequence
  synthetic
ggcgcgccagtcctgtgatgaaacaccccgaaatggtgagcactgtgggcggattcagacttgacagaattccgttcagagccgtgcttccatctggtttcgccatagtcaccacatccagcttgtccagctcactcgtcggtcttgcagcgtcaagcttgttcctaaccatcgcgtattatcagaaccgactcggaccgatg

SEQ ID NO: 7038 - DNA, 203 bp, Artificial sequence
  synthetic
ggcgcgccagtcctctggctgcccttgttgcacgattttctcggcacttggatagtatcgtcctgccccctcccgatttactcaagggaacccgagccgacccaactgccagcgtagcttctatggatgtgagtgatatggaggatcgtgtcaaacgaataaaacatgaaaaccagaccacctggtttcgactcggaccgatg

SEQ ID NO: 7039 - DNA, 203 bp, Artificial sequence
  synthetic
ggcgcgccagtcctgtcgatccagaacatccgtacaaaagcttcaagtactttggatcatttgtgactgatgatgttaaggttggtgggcaggcaattaacccgctcgtaagaaaaatcatgtggccttgggaagcgataacttcggttgttggattcctcatgaccgacgtctccacatactcgcaacgactcggaccgatg

SEQ ID NO: 7040 - DNA, 203 bp, Artificial sequence
  synthetic
ggcgcgccagtcctataggatcatggagcaagaatgtaccgtggagagatgtccaggatgccgttcaagatcaagccttctggaacctcgtcggacaagagcgacgccttcatctccaagggaaatgcgagatgtgtctttacaacactatgggaaagaaggagaagaaaccgagcctggctggtgagcgactcggaccgatg

SEQ ID NO: 7041 - DNA, 203 bp, Artificial sequence
  synthetic
ggcgcgccagtcctgccaagggatctcgaaccatctggtacatgtggctaggaagccgtttcctcgaatttgaggctcttggtttccttaacgctgaccactgggtgagccgggaaaacttccccggtggtgttggaggtctaggagtgaactacttcggatattacctaaaagacatcgctggtcgacgactcggaccgatg

SEQ ID NO: 7042 - DNA, 203 bp, Artificial sequence
  synthetic
ggcgcgccagtcctggtaaatatctctttgctgacgacatagctggatgggacacaaaaatcagctctgaggaccttgaagatgaggagaccttgttaaccgagctcacagccaatccataccataaagctctaattagagccaccatgaagctcgcttaccagaacatcgttgccatgttcccacgacgactcggaccgatg

SEQ ID NO: 7043 - DNA, 203 bp, Artificial sequence
  synthetic
ggcgcgccagtcctacccattcaaagtatggtagtgggacggtcatggatgtggtgggacggcgagatcaacgaggctctgggcaagtagtgacatatgccttgaacactgtgaccaatggcaaagtacaagtcgctagggtattggagagcgaaggattgctcaacgctgacatcaatgtgattgaccgactcggaccgatg

SEQ ID NO: 7044 - DNA, 203 bp, Artificial sequence
  synthetic
ggcgcgccagtcctaagtggcttaccaagaacatggaaaacgtcctgagtaacatggttatagcaggggatgatgtagtcgtctctactgacaacagagagttctcatcctctctcgagtaccttgagctgacgggaaagacgcggaagaacattccccaaggtgcaccctcccgaatggagtgcaatcgactcggaccgatg

SEQ ID NO: 7045 - DNA, 203 bp, Artificial sequence
  synthetic
ggcgcgccagtcctatgtgggccttgtacttctttcaccgacgtgatcttcgcttaggatttgtagccattacctcttctgtccccacaaactggtttcccattggacgcacctcttggtcaattcaccaacatcatgagtggatgacaacatgcgacatgctacgtgtgtggaatgacgtgtggatccgactcggaccgatg

SEQ ID NO: 7046 - DNA, 203 bp, Artificial sequence
  synthetic
ggcgcgccagtcctcacgacaacccatggatgaccatgaaggagcccatcaatgcctgggaagatatcccctatcttcataaaaaacaagacattgaatgtggcagtcttattggttccaaggaaagagccacctgggctcgcgacatggagaacagcgttctgagtgtccgcaagatcctggactcccgactcggaccgatg

SEQ ID NO: 7047 - DNA, 203 bp, Artificial sequence
  synthetic
ggcgcgccagtccttggagtttgcatctgtctctatcccaagccctcagtggtttaagacagggggtatttggaactgatttccataacccctcatgcgcgacttttagagcagggcacgaaagtgtcgggcatgacgcacccgctcccccgagtcccctgaaaatagggtgggcaatgcactcctgacgactcggaccgatg

SEQ ID NO: 7048 - DNA, 203 bp, Artificial sequence
  synthetic
ggcgcgccagtcctggcacgaaagtgtcgggcctgacgcacccgctcccccgagtcccctggaaacagggtgggcctcgaaaaatccaccgtaggaaggagcccaatcctacaagaaccctctggtcataggcacctgacctgggataagagtggcgccttatctcatatttagctagctggtggactcgactcggaccgatg

SEQ ID NO: 7049 - DNA, 203 bp, Artificial sequence
  synthetic
ggcgcgccagtcctgattgtgagcgatttgcgtgcgtgcatcccgcttcactgatctcttgttagatctttttgtaatctaaactttataaaaacatccactccctgtaatctatgcttgtgggcgtagatttttcatagtggtgtttatattcatttctgctgttaacagctttcagccagggacgtcgactcggaccgatg

SEQ ID NO: 7050 - DNA, 203 bp, Artificial sequence
  synthetic
ggcgcgccagtcctctggaaacagacggaatttgtcctgaaaatcatgtgatggtggattgtcgccgacttcttaaacaagagtgttgtgtgcagtctagcctaatacgtgaaattgttatgaatgcaagtccatatgatttggaggtgctacttcaagatgctttgcagtcccgtgaagcagttttgcgactcggaccgatg

SEQ ID NO: 7051 - DNA, 203 bp, Artificial sequence
  synthetic
ggcgcgccagtcctgttacaacccccttaggtatgtctttagaggcatgctatgtgagaggttgtaatcctaaaggatggaccatgggtttgtttcggcgtagaagtgtgtgtaacactggtcgttgcactgttaataagcatgtggcctatcagttatatatgattgatcctgcaggtgtctgtcttcgactcggaccgatg

SEQ ID NO: 7052 - DNA, 203 bp, Artificial sequence
  synthetic
ggcgcgccagtcctggtgcaggtcaattcgtgggttgggtcatacccttagcctttatgcctgtgcaatcccggaaatttattgttccatgggttatgtacttgcgtaagcgtggcgaaaagggtgcttacaataaagatcatggacgtggcggttttggacatgtttatgattttaaagttgaagatcgactcggaccgatg

SEQ ID NO: 7053 - DNA, 203 bp, Artificial sequence
  synthetic
ggcgcgccagtcctctttctccatgtaaggagcttgaaggtgtaggtgctaaagttagtgcctttttacagaaattagaggataatcccctatttttatttgatgaggctggcgaggaagttcttgctcctaaattgtattgtgcctttacagctcctgaagatgatgactttcttgaggaaagtgatcgactcggaccgatg

SEQ ID NO: 7054 - DNA, 203 bp, Artificial sequence
  synthetic
ggcgcgccagtcctgttgaagaagatgatgtagaaggtgaggaaactgatttaactgtcacaagtgctggacagccttgtgttgctagtgaacaggaggagtcttctgaagtcttagaggacactttggatgatggtccaagtgtggagacatctgattcacaagttgaagaagatgtagaaatgtcgcgactcggaccgatg

SEQ ID NO: 7055 - DNA, 203 bp, Artificial sequence
  synthetic
ggcgcgccagtcctgattttgttgatcttgaatctgtgattcaggattatgaaaatgtttgttttgagttttatactacagagccagaatttgttaaagttttgggtctgtatgtgcctaaagcaactcgcaacaattgctggttgcgatcagttttggcagtgatgcagaaattgccctgtcaatttcgactcggaccgatg

SEQ ID NO: 7056 - DNA, 203 bp, Artificial sequence
  synthetic
ggcgcgccagtccttggaaatgcattaaatgtgatttagctcttaagcttaaaggcttggatgctatgttcttttatggtgatgttgtttcacatatatgcaagtgtggtgagtctatggtacttattgatgttgatgtgccatttacagcccactttgctcttaaagataagttgttttgtgcatttcgactcggaccgatg

SEQ ID NO: 7057 - DNA, 203 bp, Artificial sequence
  synthetic
ggcgcgccagtcctgtgtttatgaggttttatattattattgcctcttttattaagctctttagcttgtttaggcatgttgcctatggttgtagtaaatctggttgtttgttttgttacaagaggaatcgtagtctacgtgttaaatgtagtactatcgttggtggcatgatacgctattacgatgttcgactcggaccgatg

SEQ ID NO: 7058 - DNA, 203 bp, Artificial sequence
  synthetic
ggcgcgccagtcctatggctaatggtggcactggcttttgttcaaaacatcaatggaattgcattgattgtgattcttataaaccaggtaatacttttattactgttgaggccgctcttgatctatctaaggaattgaaacggcccattcagcctacagatgttgcttatcatacggttactgatgttcgactcggaccgatg

SEQ ID NO: 7059 - DNA, 203 bp, Artificial sequence
  synthetic
ggcgcgccagtccttgtaataacttggtgccaacatatttgaagagtgacaacattgtggcagctgatttaggtgttctgattcaaaattctgcaaagcatgtgcagggtaatgttgctaaaatagctggtgtttcctgtatatggtctgtggatgcttttaatcagtttagttctgatttccagcatcgactcggaccgatg

SEQ ID NO: 7060 - DNA, 203 bp, Artificial sequence
  synthetic
ggcgcgccagtcctaaattgaagaaagcatgttgtaaaactggtttgaaactgaagcttacttataataagcagatggctaatgtctctgttttaactacaccctttagtcttaaagggggtgcagtttttagttattttgtttatgtgtgttttgtgttgagtttggtctgttttattggactgtggcgactcggaccgatg

SEQ ID NO: 7061 - DNA, 203 bp, Artificial sequence
  synthetic
ggcgcgccagtccttttatccgttttccagaagtgttgcgagaagggcttgtacgtatcgtgcgtactcgttctatgtcgtattgcagagttggattatgtgaggaagctgatgagggtatatgctttaattttaatggttcttgggtgcttaataatgattattatagatcattgcctgggacctttcgactcggaccgatg

SEQ ID NO: 7062 - DNA, 203 bp, Artificial sequence
  synthetic
ggcgcgccagtcctgataagtgttctgtagaagattttaatgtgtgggctctgtccaatggatttagccaagttaaatctgaccttgttatagatgctttagcttctatgactggtgtgtctttggaaacactgttggctgctattaagcgtcttaagaatggtttccaaggacgtcagattatgggtcgactcggaccgatg

SEQ ID NO: 7063 - DNA, 203 bp, Artificial sequence
  synthetic
ggcgcgccagtcctagttgctcttttgaggatgaattgacacctagcgatgtttatcaacaactcgctggtatcaagttacaatcaaaacgcactagattgtttaaaggcactgtttgttggattatggcttctacatttttgtttagttgcataattacagcatttgtgaaatggactatgtttatgcgactcggaccgatg

SEQ ID NO: 7064 - DNA, 203 bp, Artificial sequence
  synthetic
ggcgcgccagtcctggtacaatttcttctacagttagattgcaagctggaactgctactgaatatgcttccaactcatctatattgtctttatgtgcgttttctgtagatcctaagaaaacgtatttagattttatacaacaaggaggaacacctattgccaattgtgttaaaatgttgtgtgaccatcgactcggaccgatg

SEQ ID NO: 7065 - DNA, 203 bp, Artificial sequence
  synthetic
ggcgcgccagtcctgtgtcttatgttttgacacatgatgtttgtcgagtttgtggattttggcgggatggaagttgttcatgtgttagcactgacactactgttcaatcaaaagatactaattttttaaacgggttcggggtacgagtgtagatgcccgtctcgtaccctgcgccagtggtttatctacgactcggaccgatg

SEQ ID NO: 7066 - DNA, 203 bp, Artificial sequence
  synthetic
ggcgcgccagtcctgctatgagcgtgtaaaagattgtaagtttgtggctgaacacgatttctttacatttgatgtagaaggtagtcgtgtgccacacattgtacgcaaggatttaacaaagtatactatgttggatctttgctatgcattgcgacattttgatcgcaatgattgcatgctgctttgtgcgactcggaccgatg

SEQ ID NO: 7067 - DNA, 203 bp, Artificial sequence
  synthetic
ggcgcgccagtcctctaatacatgttttgggcctcttgttaggcaaatttttgtggatggtgtgccttttgttgtttcaattggctaccattataaagaacttggtattgtgatgaatatggatgtggatacacatcgttatcgcttgtctttaaaagacttgcttttatatgctgctgatccagcttcgactcggaccgatg

SEQ ID NO: 7068 - DNA, 203 bp, Artificial sequence
  synthetic
ggcgcgccagtcctctgtacttatgggttgggattatcctaagtgtgatcgtgctatgccaaacctactacgtattgttagtagtttggtattagcccgaaaacatgagacatgttgttcgcaaagcgataggttttatcgacttgcgaatgaatgcgcacaagttttgagtgaaattgttatgtgtgcgactcggaccgatg

SEQ ID NO: 7069 - DNA, 203 bp, Artificial sequence
  synthetic
ggcgcgccagtcctaaaaagcatataaatttttgaatataaatgattgcactcgtattgttccggccaaggtcagggtggagtgctatgataagtttaaaattaatgacaccactcgtaagtatgtgtttactaccataaatgcattacctgagatggtgactgatattgttgttgtagatgaagttacgactcggaccgatg

SEQ ID NO: 7070 - DNA, 203 bp, Artificial sequence
  synthetic
ggcgcgccagtcctgtatgcttaccaattatgagctttctgttattaatgctcgtattcgcgctaagcattatgtttatattggtgatcctgctcaattgccagcaccacgtgtgttattgagcaagggtacacttgaacctaaatattttaacactgttactaagctcatgtgttgcttagggccagcgactcggaccgatg

SEQ ID NO: 7071 - DNA, 203 bp, Artificial sequence
  synthetic
ggcgcgccagtcctttacccttgatgggtattgtaagctttttataactaaagaagaagctgttaaacgcgtgcgtgcctgggttggctttgatgctgaaggtgctcatgccacgcgtgatagcattgggacaaatttcccacttcaattaggattttccacaggaattgattttgttgtggaagccacgactcggaccgatg

SEQ ID NO: 7072 - DNA, 203 bp, Artificial sequence
  synthetic
ggcgcgccagtcctctggtttgtttgctgatagagatggttacagctttaaaaaggctgtggcgaaagctcctcctggtgaacaatttaagcacctcatccctttgatgacgagaggtcatcgctgggatgttgttagacctagaatagtacaaatgtttgcagatcatttaattgatctgtctgattcgactcggaccgatg

SEQ ID NO: 7073 - DNA, 203 bp, Artificial sequence
  synthetic
ggcgcgccagtcctgtgttgtgctagttacatgggcagccaactttgagctcacttgtctccgctactttgcaaaagtagggcgtgagatttcttgtaatgtatgcactaaacgtgccacagtttacaattctagaactggttactatggttgttggcgccatagtgttacatgtgattacttgtatacgactcggaccgatg

SEQ ID NO: 7074 - DNA, 203 bp, Artificial sequence
  synthetic
ggcgcgccagtcctttgttaagtctgttaagactcttttgtattcttttgaggcacataaggactcttttaaagacggtttgtgtatgttttggaactgtaatgtggataagtatccaccgaatgcagttgtatgtagatttgacactagagtgttgaataatttaaatcttcctggctgtaatggagcgactcggaccgatg

SEQ ID NO: 7075 - DNA, 203 bp, Artificial sequence
  synthetic
ggcgcgccagtcctaagattttcagtttatgctttggtgtaacgatgagaaagttatgactttctatcctcgtttgcaagctgcatctgactggaagcctggttattctatgcctgtattatataagtatttgaattctccaatggaaagagttagtctctggaattatgggaagccagttactttgccgactcggaccgatg

SEQ ID NO: 7076 - DNA, 203 bp, Artificial sequence
  synthetic
ggcgcgccagtcctatttgtgtaagcccaaggttgagatagatggaaatgttatgcatgccaattatttgttttggagaaattccacagtttggaacgggggtgcttatagcctgtttgatatggctaaattcccgcttaagttggctggtactgccgtaataaatttaagagcagaccagattaatgcgactcggaccgatg

SEQ ID NO: 7077 - DNA, 203 bp, Artificial sequence
  synthetic
ggcgcgccagtcctagattaaatttgagaatcctcacatcctaggaagatgcatagttttagatgttaaaggtgtagaagaattgcatgacgatttagttaattacattcgtgataaaggttgtgttgctgaccaatccaggaaatggattggccattgcaccatagctcaactcacggatgcagcaccgactcggaccgatg

SEQ ID NO: 7078 - DNA, 203 bp, Artificial sequence
  synthetic
ggcgcgccagtccttgtccattaaggaaaatgttgattttataaacagcatgcaattcaattataaaatcaccatcaacccctcatcaccggctagacttgaaatagttaagctcggtgctgaaaagaaagatggtttttatgaaaccatagttagtcactggatgggaattcgttttgaatacacatcgactcggaccgatg

SEQ ID NO: 7079 - DNA, 203 bp, Artificial sequence
  synthetic
ggcgcgccagtcctcacccactgataagctagctatgattatgggttattgttgtttagatgtggtacgtaaagagctagaagaaggcgatcttcccgagaatgatgatgatgcttggtttaagctatcgtaccattatgaaaacaattcttggttcttccgacatgtctacaggaaaagttttcattcgactcggaccgatg

SEQ ID NO: 7080 - DNA, 203 bp, Artificial sequence
  synthetic
ggcgcgccagtccttccttaccaacggcttttgctgttataggagatttaaagtgtacttcagatactagttatattaatgataaagacaccggtcctcctcctataagtactgatactgttgatgttactaatggtttgggtacttattatgttttagatcgtgtgtatttaaatactacgttgtttcgactcggaccgatg

SEQ ID NO: 7081 - DNA, 203 bp, Artificial sequence
  synthetic
ggcgcgccagtcctctgggtaatcatcgcaaagaactatggcatttggatacaggtgttgtttcctgtttatataagcgtaatttcacatatgatgtgaatgctgattatttgtattttcatttttatcaagaaggtggtactttttatgcatattttacagacactggtgttgttactaagtttttgcgactcggaccgatg

SEQ ID NO: 7082 - DNA, 203 bp, Artificial sequence
  synthetic
ggcgcgccagtcctagtgattttatgagtgagattaagtgtaaaacacaatctatagcaccacctactggtgtttatgaattaaacggttacactgttcagccaatcgcagatgtttaccgacgtaaacttaatcttcccaattgcaatatagaagcttggcttaatgataagtcggtgccctctccacgactcggaccgatg

SEQ ID NO: 7083 - DNA, 203 bp, Artificial sequence
  synthetic
ggcgcgccagtcctcctcgacctgcaggtgttcttactaatcatgatgtagtttatgcacaacactgtttcaaagctcctaaaaatttctgtccgtgtaaattgaatggttcgtgtgtaggtagtggtcctggtaaaaataatggtataggcacttgtcctgcaggtactaattatttaacttgtgatcgactcggaccgatg

SEQ ID NO: 7084 - DNA, 203 bp, Artificial sequence
  synthetic
ggcgcgccagtccttgtacaggaggtgccgaaattagggacctcatttgtgtgcaaagttataaaggcatcaaagtgttgcctccactgctctcagaaaatcagatcagtggatacactttggctgccacctctgctagtctatttcctctttggacagcagcagcaggtgtaccattttatttaaatcgactcggaccgatg

SEQ ID NO: 7085 - DNA, 203 bp, Artificial sequence
  synthetic
ggcgcgccagtcctgtcttaaatcagagctacatcaatctcaaggacattggtacatatgaatattatgtaaaatggccttggtatgtatggcttttaatctgccttgctggtgtagctatgcttgttttactattcttcatatgctgttgtacaggatgtgggactagttgttttaagaaatgtggtcgactcggaccgatg

SEQ ID NO: 7086 - DNA, 203 bp, Artificial sequence
  synthetic
ggcgcgccagtcctcaacccaagcaaactgctacctctcagcaaccatcaggagggaatgttgtaccctactattcttggttctctggaattactcagtttcaaaagggaaaggagtttgagtttgtagaaggacaaggtgtgcctattgcaccaggagtcccagctactgaagctaaggggtactggcgactcggaccgatg

SEQ ID NO: 7087 - DNA, 203 bp, Artificial sequence
  synthetic
ggcgcgccagtcctgacattgtcgatcgggacccaagtagcgatgaggctattccgactaggtttccgcctggcacggtactccctcagggttactatattgaaggctcaggaaggtctgctcctaattccagatctacttcgcgcacatccagcagagcctctagtgcaggatcgcgtagtagagcccgactcggaccgatg

SEQ ID NO: 7088 - DNA, 203 bp, Artificial sequence
  synthetic
ggcgcgccagtcctaaaccacagcgtcagcgtggtcataagaatggacaaggagaaaatgataatataagtgttgcagtgcccaaaagccgcgtgcagcaaaataagagtagagagttgactgcagaggacatcagccttcttaagaagatggatgagccctatactgaagacacctcagaaatataacgactcggaccgatg

SEQ ID NO: 7089 - DNA, 203 bp, Artificial sequence
  synthetic
ggcgcgccagtcctgagaatgaaccttatgtcggcatctggtggtaacccctcgcagaaaagtcgagataaggcactctctatcagaatggatgtcttgctgctataatagatagagaaggttatagcagactatagattaattagttgaaagttttgtgttgtaatgtatagtgttggagaaagtgacgactcggaccgatg

SEQ ID NO: 7090 - DNA, 203 bp, Artificial sequence
  synthetic
ggcgcgccagtccttgccattccttctgtagccgttcgcacctatagcgaagccgctgcacaaggttttcaggcatgccgttttgttgcttttggcttacaggattgtgtaaccggtattaatgatgatgattatgtcattgcattgactggtactaatcagctctgtgccaaaattttacctttttccgactcggaccgatg

SEQ ID NO: 7091 - DNA, 203 bp, Artificial sequence
  synthetic
ggcgcgccagtccttgatagaccccttaatttgcgaggttggctcattttttctaacagcaattatgttcttcaggactttgatgttgtttttggccatggtgcaggaagtgtggtttttgtggataagtacatgtgtggttttgatggtaaacctgtgttacctaaaaacatgtgggaatttagggacgactcggaccgatg

SEQ ID NO: 7092 - DNA, 203 bp, Artificial sequence
  synthetic
ggcgcgccagtccttgtgtctttatggcgtgttacagctgttcattctgatggaatgtttgtggcatcatcttcttatgatgcactcttgcatagaaattcattagaccctttttgctttgatgttaacactttactttctaatcaattacgtctagcttttcttggtgcttctgttacagaagatgtcgactcggaccgatg

SEQ ID NO: 7093 - DNA, 203 bp, Artificial sequence
  synthetic
ggcgcgccagtcctatttaaacgacttggtgattatgttcttactgaaaacgctcttgttcgtttgactactgaagttgttcgtggtgttcgtgatgctcgcataaagaaagccatgtttactaaagtagttgtaggtcctacaactgaagttaagttttctgttattgaacttgccactgttaatttcgactcggaccgatg

SEQ ID NO: 7094 - DNA, 203 bp, Artificial sequence
  synthetic
ggcgcgccagtcctgcgtcttgttgattgtgcacctgtagtttgccctaaaggtaagattgttgttattgctggacaagcttttttctatagtggtggtttttatcgttttatggttgatcctacaactgtattaaatgatcctgtttttactggtgatttattctacactattaagtttagtggtttcgactcggaccgatg

SEQ ID NO: 7095 - DNA, 203 bp, Artificial sequence
  synthetic
ggcgcgccagtccttaagcttgatggttttaaccatcagtttgttactgctagttctgctacagatgccattattgctgttgagctgttgttattggattttaaaactgcagtttttgtgtacacatgtgtggttgatggctgtagtgtcattgttagacgtgatgctacattcgctacacatgtgtgcgactcggaccgatg

SEQ ID NO: 7096 - DNA, 203 bp, Artificial sequence
  synthetic
ggcgcgccagtcctactgttgagtattgatgatggccatttatggaatctttttgttgaaaagtttaattttgttacagattggttaaaaactcttaagcttacacttacttctaatggtcttttaggtaattgtgccaaacgttttagacgtgttttggtaaaattgcttgatgtctataatggtttcgactcggaccgatg

SEQ ID NO: 7097 - DNA, 203 bp, Artificial sequence
  synthetic
ggcgcgccagtccttcttgaaactgtctgtagtgtcgcatacactgctggtgtttgcatcaaatattatgctgttaatgttccatatgtagttattagtggttttgtaagtcgtgtaattcgtagagaaaggtgtgacatgacttttccttgtgttagttgtgtcacctttttctatgaatttttagacgactcggaccgatg

SEQ ID NO: 7098 - DNA, 203 bp, Artificial sequence
  synthetic
ggcgcgccagtccttcatcaattagaatgtattgttgatgactctgttagagaagaggttgatataattgaacaaccttttgaagaagttgaacatgtgctctcaattaagcaacctttttctttttcttttagagatgaattgggtgttcgtgttttagatcaatctgataataattgttggattagcgactcggaccgatg

SEQ ID NO: 7099 - DNA, 203 bp, Artificial sequence
  synthetic
ggcgcgccagtccttgtttgttttgttgatgttgattttcatagtgtagaaatagaagctggtgaagttaaaccttttgctgtatataaaaatgttaaattttatttaggtgatatttcacaccttgtaaactgtgtttcttttgactttgttgtcaatgctgctaatgaaaatctcttgcatggaggcgactcggaccgatg

SEQ ID NO: 7100 - DNA, 203 bp, Artificial sequence
  synthetic
ggcgcgccagtcctacttgttgaagcttataattctattttatttgaaaatggtattccacttatgcctcttcttagttgtggtatttttggtgtaaggattgaaaattctcttaaagctttgtttagttgtgacattaataaaccattgcaagtttttgtttattcttcaaatgaagaacaagctgtcgactcggaccgatg

SEQ ID NO: 7101 - DNA, 203 bp, Artificial sequence
  synthetic
ggcgcgccagtcctaaaggcagcactttttgcttctttggatgtaaagccatatggttaccctaatgattttgttggtggttttagagttcttgggaccaccgacaataattgttgggttaatgcaacttgtataattttacagtatcttaagcctacttttaaatctaagggtttaaatgttctttgcgactcggaccgatg

SEQ ID NO: 7102 - DNA, 203 bp, Artificial sequence
  synthetic
ggcgcgccagtcctgcttaatggtattgcttatacaacattttcaggttcttttgataacggtcactatgtagtttatgatgctgctaataatgctgtctatgatggtgctcgtttattttcttcagatttgtctactttagctgttacagctattgttgtagtaggtggttgtgtaacatctaatgtcgactcggaccgatg

SEQ ID NO: 7103 - DNA, 203 bp, Artificial sequence
  synthetic
ggcgcgccagtccttccaacaattgttagtgagaaaatttctgttatggataaacttgatactggtgcacaaaaatttttccaatttggtgattttgttatgaataacattgttctgtttttaacttggttgcttagtatgtttagtcttttacgtacttctattatgaagcatgatattaaagttatcgactcggaccgatg

SEQ ID NO: 7104 - DNA, 203 bp, Artificial sequence
  synthetic
ggcgcgccagtccttgagtttttagctacatttattgtctgcaaaatcgttttatttgttagacatattattgttggctgtaataatgctgactgtgtagcttgttctaaaagtgctagacttaaacgtgtaccacttcaaactattattaatggtatgcataaatcattctatgttaatgctaatggcgactcggaccgatg

SEQ ID NO: 7105 - DNA, 203 bp, Artificial sequence
  synthetic
ggcgcgccagtccttgttaatgatggacgtgttgatgacggttacatttgtggtgatggtcttatagaccttcttgttaatgtactctcaatctttagttcatcttttagcgttgtggctatgtctggacatatgttgtttaattttctttttgcagcatttattacatttttgtgctttttagttaccgactcggaccgatg

SEQ ID NO: 7106 - DNA, 203 bp, Artificial sequence
  synthetic
ggcgcgccagtccttgttgagttttgttatttacaccaaattgagttaggtagtggtgctcatgttggttctgattttactggtagtgtttatggtaattttgatgaccaacctagtttgcaagttgagagtgccaaccttatgctatcagataatgttgttgcctttttgtatgctgctttgttgaacgactcggaccgatg

SEQ ID NO: 7107 - DNA, 203 bp, Artificial sequence
  synthetic
ggcgcgccagtccttggttgtaggtggtggttgtgttcaactagagttaatgttgatggttttaatgaatgggctatggctaatggttatacaagtgtttctagtgttgagtgctattctattttggcagcaaaaactggtgttagtgttgaacaattgttagcttccattcaacatcttcatgaaggcgactcggaccgatg

SEQ ID NO: 7108 - DNA, 203 bp, Artificial sequence
  synthetic
ggcgcgccagtccttaaagaagcacgctctgttaatagaaaatctaaagttattagtgctatgcactctttactttttggaatgttaagacgtttggatatgtctagtgttgaaactgttttgaatttagcacgtgatggtgttgtgccattgtcagttatacctgcaacttcagcttctaaactaaccgactcggaccgatg

SEQ ID NO: 7109 - DNA, 203 bp, Artificial sequence
  synthetic
ggcgcgccagtccttattgttagtccagatcttgaatcttattctaagattgtttgtgatggttctgttcattatgctggagttgtttggacacttaatgatgttaaagacaatgatggtagacctgttcatgttaaagagattacaaaggaaaatgttgaaactttgacatggcctcttatccttaacgactcggaccgatg

SEQ ID NO: 7110 - DNA, 203 bp, Artificial sequence
  synthetic
ggcgcgccagtcctacaagctggtaaacaaactgaattggctgttaattctggacttttaactgcttgtgctttttctgttgatccagcaactacttacttggaagctgttaaacatggtgcaaaacctgtaagtaattgtattaagatgttatctaatggtgctggtaatggtcaagctataacaaccgactcggaccgatg

SEQ ID NO: 7111 - DNA, 203 bp, Artificial sequence
  synthetic
ggcgcgccagtccttagtgtagatgctaacaccaatcaagattcttatggtggagcgtctatttgtttgtattgtcgggcccacgttcctcaccctagtatggatggttactgtaagtttaagggtaaatgtgttcaggttcctattggttgtttggatcctattaggttttgtttagaaaataatgtcgactcggaccgatg

SEQ ID NO: 7112 - DNA, 203 bp, Artificial sequence
  synthetic
ggcgcgccagtcctgtgtaatgtttgtggttgttggttgggacacgggtgtgcttgtgaccgtacaactattcaaagtgttgacatttcttatttaaacgagcaaggggttctagtgcagctcgactagaaccctgcaatggcacggacatcgataagtgtgttcgtgcttttgacatttataataaacgactcggaccgatg

SEQ ID NO: 7113 - DNA, 203 bp, Artificial sequence
  synthetic
ggcgcgccagtcctaatgtttcattcttgggtaagtgtttgaagatgaactgtgttcgttttaaaaatgctgatcttaaggatggttattttgttataaagaggtgtactaagtcggttatggaacacgagcaatccatgtataacctacttaacttttctggtgctttggctgagcatgatttctttcgactcggaccgatg

SEQ ID NO: 7114 - DNA, 203 bp, Artificial sequence
  synthetic
ggcgcgccagtcctacttggaaagatggcagagtcatttatggtaatgttagtagacataatcttactaaatatactatgatggacttggtctatgctatgcgtaactttgatgaacaaaattgtgatgttctaaaagaagtattagttttaactggttgttgtgacaattcttattttgatagtaagcgactcggaccgatg

SEQ ID NO: 7115 - DNA, 203 bp, Artificial sequence
  synthetic
ggcgcgccagtcctggttggtatgacccagttgaaaatgaagatatacatagagtttatgcatctcttggcaaaattgtagctagagctatgcttaaatgcgttgctctatgcgatgcgatggttgctaaaggtgttgttggtgttttaacattagataaccaagatcttaatggtaacttttatgatcgactcggaccgatg

SEQ ID NO: 7116 - DNA, 203 bp, Artificial sequence
  synthetic
ggcgcgccagtcctgttaaagattttgacttttaccgttataataagcctaccattttagatatttgtcaagctagagttacatataagatagtctctcgttattttgacatttatgaaggtggctgtattaaggcatgtgaagttgttgtaacaaatcttaataagagtgctggttggccattaaatcgactcggaccgatg

SEQ ID NO: 7117 - DNA, 203 bp, Artificial sequence
  synthetic
ggcgcgccagtcctagagctttgcctaacatgatacgtatgatttcagccatggtgttgggctctaagcatgttaattgttgtactgcaacagataggttttataggcttggtaatgagttggcacaagttttaacagaagttgtttattctaatggtggtttttattttaagccaggtggtacgactcgactcggaccgatg

SEQ ID NO: 7118 - DNA, 203 bp, Artificial sequence
  synthetic
ggcgcgccagtccttcattcattgatgattattatggttatcttaggaaacatttttcaatgatgattctctctgatgacggtgttgtctgttataacaaggattatgctgagttaggttatatagcagacattagtgcttttaaagccactttgtattaccagaataatgtctttatgagtacttctcgactcggaccgatg

SEQ ID NO: 7119 - DNA, 203 bp, Artificial sequence
  synthetic
ggcgcgccagtcctcttattggtaaacaaaagataactacaatacagggtcctcctggtagtggtaagtcacattgttccattggacttggattgtactacccaggtgcgcgtattgtttttgttgcttgtgcccatgctgctgttgattccttatgtgcaaaagctatgactgtttatagcattgatcgactcggaccgatg

SEQ ID NO: 7120 - DNA, 203 bp, Artificial sequence
  synthetic
ggcgcgccagtcctattaaccagcgtttatcatataaacatattgtttatgttggtgatccacaacaacttcctgcacctagagtaatgattactaaaggtgttatggagcctgttgattataacgttgttactcaacgtatgtgtgctataggccctgatgtttttcttcataaatgttatagatgtcgactcggaccgatg

SEQ ID NO: 7121 - DNA, 203 bp, Artificial sequence
  synthetic
ggcgcgccagtcctaaccaccacacattctgtaacattcatagaaacgagcatgatgcctctggtgatgctgttatgacacgttgtttggcagtacatgattgttttgtcaaaaatgttgattggactgtaacgtacccctttattgcaaatgagaaatttatcaatggctgtgggcgtaatgtccagcgactcggaccgatg

SEQ ID NO: 7122 - DNA, 203 bp, Artificial sequence
  synthetic
ggcgcgccagtcctggacatgttgttcgtgcagccttgaaattgtataaacctagtgttattcatgacattggtaatcctaaaggtgtacgttgtgctgttactgatgccaaatggtactgttatgacaagcaacctgttaatagtaatgtcaagttgttggattatgattatgcaacccatggtcaacgactcggaccgatg

SEQ ID NO: 7123 - DNA, 203 bp, Artificial sequence
  synthetic
ggcgcgccagtccttttgttaaattaaaacctatgccctttttttactttgatgacagtgattgtgatgttgtgcaagaacaagttaattatgtaccccttcgcgctagtagttgtgttactcgttgtaatataggtggtgctgtttgttcaaaacatgcaaatttgtatcaaaaatatgttgaggcacgactcggaccgatg

SEQ ID NO: 7124 - DNA, 203 bp, Artificial sequence
  synthetic
ggcgcgccagtcctcttattggtattaattatttaggtgactttattcaaggtccttttatagctggtaacactgttcatgctaattatatattttggcgtaattctactattatgtctttgtcatacaattcagttttagatttaagtaagtttgaatgtaaacataaagccactgttgttgttacacgactcggaccgatg

SEQ ID NO: 7125 - DNA, 203 bp, Artificial sequence
  synthetic
ggcgcgccagtcctgtaatgctaatctctctatgttacaattaggtgttcctgacaattcttcaactattgttacgggtttattgccaactcattggttttgtgctaatcagagtacatctgtttactcagccaatggtttcttttatattgatgttggtaatcaccgtagtgcttttgcgctccatacgactcggaccgatg

SEQ ID NO: 7126 - DNA, 203 bp, Artificial sequence
  synthetic
ggcgcgccagtcctccacacataatggccgtgtagttaactacactgtttgtgatgattgtaatggttatactgataacatattttctgttcaacaggatggccgcattcctaatggtttcccttttaataattggtttttgttaactaatggttccacactagtggacggggtctctagactttatccgactcggaccgatg

SEQ ID NO: 7127 - DNA, 203 bp, Artificial sequence
  synthetic
ggcgcgccagtccttaccacccactgtgcgtgaaattgttgttgctagaactggccagttttatattaatggttttaagtatttcgatttgggtttcatagaagctgtcaattttaatgtcacgactgctagcgccacagatttttggacggttgcatttgctacttttgttgatgttttggttaatgcgactcggaccgatg

SEQ ID NO: 7128 - DNA, 203 bp, Artificial sequence
  synthetic
ggcgcgccagtcctctgaaggtaattctattactggtgtaccttatcctgtctctggtattcgtgagtttagtaatttagttttaaataattgtaccaaatataatatttatgattatgttggtactggaattatacgttcttcaaaccagtcacttgctggtggtattacatatgtttctaactctgcgactcggaccgatg

SEQ ID NO: 7129 - DNA, 203 bp, Artificial sequence
  synthetic
ggcgcgccagtcctttgactataagtcttgtactaaaggtctttctattgctgaccttgcttgtgctcagtactacaatggcataatggttttgccaggtgttgctgatgctgaacgtatggccatgtacacaggttctcttataggtggcatggtgctcggaggtcttacatcagcagccgccataccgactcggaccgatg

SEQ ID NO: 7130 - DNA, 203 bp, Artificial sequence
  synthetic
ggcgcgccagtcctttactttgctttattcaaacctcttactgctagaggtcgtgttgcttgttttgttttaaaactattgacactatttgtctatgtgcctttattggttctttttggtatgtatcttgacagttttataattttttctacgctgttgtttcgattcatacatgttggctattatgccgactcggaccgatg

SEQ ID NO: 7131 - DNA, 203 bp, Artificial sequence
  synthetic
ggcgcgccagtccttgacctttatgttgctattagaggttcttgtgaaaagaacctacaacttatgcgtaaggttgacttgtataatggtgctgtcatttacatttttgccgaagagcctgttgttggtatagtctactcttctcaactatacgaagatgttccttcgattaattgatgacaatggtacgactcggaccgatg

SEQ ID NO: 7132 - DNA, 203 bp, Artificial sequence
  synthetic
ggcgcgccagtcctgggtcagttgcctaaatatgtaatagttgctacgcctagtaccacaattgtttgtgaccgtgttggtcgctctgttaatgaaacaagccagactggttgggcattctacgtccgtgctaaacatggtgatttttctggtgttgcctctcaggagggtgttttgtcagaaagagacgactcggaccgatg

SEQ ID NO: 7133 - DNA, 203 bp, Artificial sequence
  synthetic
ggcgcgccagtcctgaagttgcttcatttaatctaaactaaacaaaatggctagtgtaaattgggccgatgacagagctgctaggaagaaatttcctcctccttcattttacatgcctcttttggttagttctgataaggcaccatatagggtcattcccaggaatcttgtccctattggtaagggtacgactcggaccgatg

SEQ ID NO: 7134 - DNA, 203 bp, Artificial sequence
  synthetic
ggcgcgccagtcctaacccagggctgataagccttctcagttgaagaaacctcgttggaagcgtgttcctaccagagaggaaaatgttattcagtgctttggtcctcgtgattttaatcacaatatgggggattcagatcttgttcagaatggtgttgatgccaaaggttttccacagcttgctgaatcgactcggaccgatg

SEQ ID NO: 7135 - DNA, 203 bp, Artificial sequence
  synthetic
ggcgcgccagtcctcgtttagcgcatgataagggtttagtcttacacacaatggtaggccagtgatagtaaagtgtaagtaatttgctatcatattaacatgtctagaggaaagtcagaactttttctgtttgtgttgttggagtacttaaagatcgcatacgcgcgccaacaatggaagagccaacacgactcggaccgatg

SEQ ID NO: 7136 - DNA, 203 bp, Artificial sequence
  synthetic
ggcgcgccagtcctttcgaagatgaagctcctcttgctagcaaatttattttagacaattatggtctagtcaaagaaatgagatcaaagtttgcaaacaaacctctgaataaagaagtagttgcacacatgttagaaaaacaattcaatccggaaagtagattcttgcctgttttcggagctataaggcgactcggaccgatg

SEQ ID NO: 7137 - DNA, 203 bp, Artificial sequence
  synthetic
ggcgcgccagtcctaaggtcttaccctttacttatttcgccccaaaacagggaatgtttgaaggaaggcttttctttagcaacgatagctttgttgagcctggagtaaataacaatgtattttcttggagtaaggctgacagttctaaaatatattgtcatggaatagcgataagggtacctttagttcgactcggaccgatg

SEQ ID NO: 7138 - DNA, 203 bp, Artificial sequence
  synthetic
ggcgcgccagtcctctcaatgccaggatgaacagtgatcagtttgcagttaatataactggagacaatagtaaatggaatgaatgccaacaacctgaggcttatttagcacttttggcttacatcaccaaagactcctctgatttaatgaaagacttatgcagtgttgctccagtgcttttctgtaatcgactcggaccgatg

SEQ ID NO: 7139 - DNA, 203 bp, Artificial sequence
  synthetic
ggcgcgccagtcctataaaaaccatagaaaataaagatggattattaattgctgatggtgggaaactgatgaacaacattagcacccttcatattcctgaggaagtactgaagtttgaaaaaatggatgaacaatatagaaatagggtattcaaccccaaaaatccctttactaactttgacaaaactcgactcggaccgatg

SEQ ID NO: 7140 - DNA, 203 bp, Artificial sequence
  synthetic
ggcgcgccagtcctattgatatatttagagcacatggcccaataagggttgaagaaaatgaagcagtagtttcaactcatagcttcagaactagagcaaacagaaccctattgaatacagatatgagagcaatgatggcagaagagaaaagatatcaaatggtttgcgacatgtttaaaagcgtgtttcgactcggaccgatg

SEQ ID NO: 7141 - DNA, 203 bp, Artificial sequence
  synthetic
ggcgcgccagtcctgatagatttgtgctcattgaaggaagaaaaagaggaactgcagtgtctttacaaaatgagctatgtaaaagttatgatcttgaaccactaccttttctttgtgacatttttgacagggaggaaaaacaattcgttgaaattggaataacaagaaaagcagatgatagctattttcgactcggaccgatg

SEQ ID NO: 7142 - DNA, 203 bp, Artificial sequence
  synthetic
ggcgcgccagtcctaatattaaattaccaataaaacattatgagcagaataaatttcgacaaatacgtctaccaaagggaccaatggcaccctatacccacaagttcttaatggaagaagcatggatgtttacaaaaattagtgatccagaaagatcaagagctggtgaaattctcattgatttcttccgactcggaccgatg

SEQ ID NO: 7143 - DNA, 203 bp, Artificial sequence
  synthetic
ggcgcgccagtcctactgtatttgaagcaggacacacaacagttagaatgaagaaaggagagtcagttattggaagagaagtccctctttatttatactgtaggacaactgccctttccaaaatcaagaatgactggctatcaaaggctagaagatgtttcatcacaactatggacacagtggaaacccgactcggaccgatg

SEQ ID NO: 7144 - DNA, 203 bp, Artificial sequence
  synthetic
ggcgcgccagtcctactccagggtgcatgttgatccaaaagcaaaagccatacattggagaagctgatgatcaccatggagatcaagaaatgagggagttgctgtcaggactggactatgaagctagatgcatatcacaatcagggtgggtgaatgaaaccagcccttttacggaagaatacctccttcgactcggaccgatg

SEQ ID NO: 7145 - DNA, 203 bp, Artificial sequence
  synthetic
ggcgcgccagtcctccaggttgctgggtaattgacaataacatttgtgatcaaagttgtcaaaactttattttcaagttcaacgaaactgcacctgttccaaccattccccctcttgacacaaaaattgatctgcaatcagatcctttttactggggaagcagcttgggcttagcaataactgctgctcgactcggaccgatg

SEQ ID NO: 7146 - DNA, 203 bp, Artificial sequence
  synthetic
ggcgcgccagtcctattttcaagttcaacgaaactgcacctgttccaaccattccccctcttgacacaaaaattgatctgcaatcagatcctttttactggggaagcagcttgggcttagcaataactgctgctatttcattggcagctttggtgatctctgggatcgccatctgcagaactaaatgacgactcggaccgatg

SEQ ID NO: 7147 - DNA, 203 bp, Artificial sequence
  synthetic
ggcgcgccagtccttgccttggtgtatgtggttggctgccagacttactctgaaagatgagtttgccaatttctgtgcatatgcaggaagaagagcctttgaagtcttcaatattgcaatggagaaaattggaatttgttcctttcaagggacaataatgaacgatgatgaaattgaatcaatagaggcgactcggaccgatg

SEQ ID NO: 7148 - DNA, 203 bp, Artificial sequence
  synthetic
ggcgcgccagtcctgggcagagtttgctcaaagatttgctcttcaggcaaatacttcaagagaaggcgctcaaatcagcaattcagcagtttttgcagtggaaaggaagataaccacagatgtccaaagagttgaagagctactaaataaagttcaagctcatgaagatgaaccattacaaacactttcgactcggaccgatg

SEQ ID NO: 7149 - DNA, 203 bp, Artificial sequence
  synthetic
ggcgcgccagtcctgcctctttgggattagggataattactatgttgtatttattagtaaaaatcataattgaacttgtcaatggttttgtgctcggcagatgggagagatggtgtggagatataaagaccacaattatgcctgaaattgactcgatggaaaaagatattgccctttctagggagagacgactcggaccgatg

SEQ ID NO: 7150 - DNA, 203 bp, Artificial sequence
  synthetic
ggcgcgccagtcctttcccatcgctttggagcattactcacaatgttttcgctaccatcagccacaatgctcaatcatgtcaaattagctgaccagtcaccagaagctgatatcgaaagggtagagatcgatggctttgaggagggatcattccgcttaatccccaatgcacgttcaggtatgagccgcgactcggaccgatg

SEQ ID NO: 7151 - DNA, 203 bp, Artificial sequence
  synthetic
ggcgcgccagtcctgactgcgccagaccaacctgctgcttctattgagaaacgcctgcaaaaatatcgtcagcaaggcaggatcaacccgagatatctcctgcaaccggaggctcgacgaataatccagaatgtaatccggaagggaatggtggtcagacatttcctcacctttgaactgcagcttgccgactcggaccgatg

SEQ ID NO: 7152 - DNA, 203 bp, Artificial sequence
  synthetic
ggcgcgccagtcctcctcatggcattataccagacccttggtgagcaggcccgatatttggccctattggagtcaccacatttgatggattttgctgcagcaaactacccactgctatatagctatgctatgggaataggctatgtgttagatgtcaacatgaggaactacgctttctccagatcatacgactcggaccgatg

SEQ ID NO: 7153 - DNA, 203 bp, Artificial sequence
  synthetic
ggcgcgccagtcctcaacccgttctcatctgtcactgggacaactcaggtgcccgctgcagcaacaggtgacacactcgagagttacatggcagcggatcgactgaggcagagatatgctgatgcaggcacccatgatgatgagatgccaccattggaagaggaggaagaggacgacacatctgcaggcgactcggaccgatg

SEQ ID NO: 7154 - DNA, 203 bp, Artificial sequence
  synthetic
ggcgcgccagtcctaaatctgatgacacggttcatcgaggaacccagagagaatcctatcgcaaccagttcccccatcgattttaagaggggcagggataccggcgggttccatagaagggagtactcaatcggatgggtgggagatgaagtcaaggtcactgagtggtgcaatccatcctgttctcccgactcggaccgatg

SEQ ID NO: 7155 - DNA, 203 bp, Artificial sequence
  synthetic
ggcgcgccagtcctaatcaccgctgcagcaaggcgatttgaatgcacttgtcaccagtgtccagtcacttgctctgaatgtgaacgagatacttaatacagtgagaaatttggactctcggatgaatcaactggagacaaaagtagatcgcattctctcatctcagtctctaatccagaccatcaagacgactcggaccgatg

SEQ ID NO: 7156 - DNA, 203 bp, Artificial sequence
  synthetic
ggcgcgccagtcctatgacatagttggacttaaagcagggatggctactttagaaggaatgattacaactgtgaaaatcatggacccgggagttcccagtaatgttactgtggaagatgtacgcaagacactaagtaaccatgctgttgttgtgccagaatcattcaatgatagtttcttgactcaatcgactcggaccgatg

SEQ ID NO: 7157 - DNA, 203 bp, Artificial sequence
  synthetic
ggcgcgccagtccttcaaccaggcttccagtgaggctcagctaattgacctcaagaaagcaatcatccgcagtgcaatttgatcaagaaacacccaattacactacactggtatgacactgtactaaccctgagggttttagaaaaaacgattaacgataaataagcccgaacactacacactacctgcgactcggaccgatg

SEQ ID NO: 7158 - DNA, 203 bp, Artificial sequence
  synthetic
ggcgcgccagtcctaggcagccatgccatccatcagcattcccgcagaccccaccaatccacgtcaatcaataaaagcgttcccaattgtgatcaacagtgatgggggtgagaaaggccgcttggttaaacaactacgcacaacctacttgaatgacctagatactcatgagccactggtgacattcacgactcggaccgatg

SEQ ID NO: 7159 - DNA, 203 bp, Artificial sequence
  synthetic
ggcgcgccagtcctttaggaagacatccagcaaagcggaagagatggtctttgaaattgttaagtatccgagaatatttcggggtcatacattaatccagaaaggactagtctgtgtctccgcagaaaaatttgttaagtcaccagggaaaatacaatctggaatggactatctcttcattccgacatcgactcggaccgatg

SEQ ID NO: 7160 - DNA, 203 bp, Artificial sequence
  synthetic
ggcgcgccagtcctaaatcatgggtactataattcaatttctggtggtctcctgtctattggcaggagcaggcagccttgatccagcagccctcatgcaaatcggtgtcattccaacaaatgtccggcaacttatgtattatactgaggcctcatcagcattcattgttgtgaagttaatgcctacaacgactcggaccgatg

SEQ ID NO: 7161 - DNA, 203 bp, Artificial sequence
  synthetic
ggcgcgccagtccttggccaccatttctgcattcattaacaatcaagaagtcatggcccaattaccaacacgtgttatggtgactggcagcttgatccaagcctatcccgcatcgcaatgcaccattacacccaacactgtgtactgtaggtataatgatgcccaagtactctcagatgatactatggcgactcggaccgatg

SEQ ID NO: 7162 - DNA, 203 bp, Artificial sequence
  synthetic
ggcgcgccagtcctcttgcctccaaggtaacttgacaagatgcaccttctctccagtggttgggagctttctcactcgattcgtgctgttcgatggaatagtttatgcaaattgcaggtcgatgttgtgcaagtgcatgcaacctgctgctgtgatcctacagccgagttcatcccctgtaactgtcacgactcggaccgatg

SEQ ID NO: 7163 - DNA, 203 bp, Artificial sequence
  synthetic
ggcgcgccagtcctgaatggagaattttgtttatcataaataagcattccaccactcacgatctgatctcagtgagaaaaatcaacctgcaactcttggaacaagataagacagtcatccattagtaatttttaagaaaaaaacgataggaccgaacctagtattgaaagaaccgtctcggtcaatctcgactcggaccgatg

SEQ ID NO: 7164 - DNA, 203 bp, Artificial sequence
  synthetic
ggcgcgccagtcctcatcaatcagttctatttttcaattgctgagggtcgcaatctgacacttggcccacttcttaatatgcctagtttcattccaactgccacgacaccagagggctgcaccaggatcccatcattctcgctcactaagacacactggtgttatacacacaatgttatcctgaatggcgactcggaccgatg

SEQ ID NO: 7165 - DNA, 203 bp, Artificial sequence
  synthetic
ggcgcgccagtcctttctactcaaccagagagggatgactacttttctgccgctcctccagaacaacgaattattataatgtactataatgatacaatcgtggagcgcataattaatccacccggggtactagatgtatgggcaacattgaacccaggaacaggaagcggggtatattatttaggttgcgactcggaccgatg

SEQ ID NO: 7166 - DNA, 203 bp, Artificial sequence
  synthetic
ggcgcgccagtccttcagtctgggatcctggcatgtcctcttcgacaggatctaaccaatgagtgtttagttctgcccttttctaatgatcaggtgcttatgggtgctgaagggagattatacatgtatggtgactcggtgtattactatcaaagaagcaatagttggtggcctatgaccatgctgtacgactcggaccgatg

SEQ ID NO: 7167 - DNA, 203 bp, Artificial sequence
  synthetic
ggcgcgccagtccttaccagtacatttggatcagaagcaaccttcactggttcttatctcaacacagcaactcagcgtatcaatccgacgatgtatatcgcgaacaacacacagatcataagctcacagcaatttggatcaagcggtcaagaagcagcatatggccacacaacctgttttagggacaccgactcggaccgatg

SEQ ID NO: 7168 - DNA, 203 bp, Artificial sequence
  synthetic
ggcgcgccagtcctaggctctgttatggtatactgtatctatattattgaattgtcctcatctctcttaggacaatttcagattgtcccatttatccgtcaggtgacactatcctaaaggcagaagccttcaggtctgacccagccaatcaaagcattataccagaccatggaatgcataccaaacatcgactcggaccgatg

SEQ ID NO: 7169 - DNA, 203 bp, Artificial sequence
  synthetic
ggcgcgccagtccttgaccgcagggatattgatcttaagacagttgtggcagcatggcatgactcagactggaaaagaataagtgatttttggattatgatcaaattccagatgagacaattaattgttaggcaaacagatcataatgattctgatttaatcacgtatatcgaaaatagagaaggcatcgactcggaccgatg

SEQ ID NO: 7170 - DNA, 203 bp, Artificial sequence
  synthetic
ggcgcgccagtcctaatcatcataacccctgaactggtagcattatttaacactgagaatcatacactaacatacatgacctttgaaattgtactgatggtttcagatatgtacgaaggtcgtcacaacattttatcactatgcacagttagcacttacctgaatcctctgaagaaaagaataacatacgactcggaccgatg

SEQ ID NO: 7171 - DNA, 203 bp, Artificial sequence
  synthetic
ggcgcgccagtcctaactaatagtttcacccaggatgaattaagaactgtgacaactaatttgatatccccattccaagatctgaccccagatcttacggctgaattgctctgtataatgaggctttggggacaccccatgctcactgccagtcaagctgcaggaaaggtacgcgagtctatgtgtgccgactcggaccgatg

SEQ ID NO: 7172 - DNA, 203 bp, Artificial sequence
  synthetic
ggcgcgccagtcctattcacacttaagcattggaaggaagtctctcttataaaattcaagaaatgttttgatgcagacgcaggtgaggaactcagtatatttatgaaagataaggcaattagtgccccaaaacaagactggatgagtgtgtttagaagaagcctaatcaaacagcgccatcagcatcacgactcggaccgatg

SEQ ID NO: 7173 - DNA, 203 bp, Artificial sequence
  synthetic
ggcgcgccagtcctattaattaaatcaggatgtatggattactggatcctttataacttattagggagaaaaccgggaaacggctcatgggctactttagcagctgacccgtactcaatcaatatagagtatcaataccctccaactacagctcttaagaggcacacccaacaagctctgatggaactcgactcggaccgatg

SEQ ID NO: 7174 - DNA, 203 bp, Artificial sequence
  synthetic
ggcgcgccagtccttagatcgataatgaggaaatcactagaaattaagcccttatccaataggaagcttaatgaaatactggattacaacatcaattacctagcttacaatttggcattactcaagaatgctattgaacctccgacttatttgaaggcaatgacacttgaaacatgtagcatcgacatcgactcggaccgatg

SEQ ID NO: 7175 - DNA, 203 bp, Artificial sequence
  synthetic
ggcgcgccagtccttggtatcgagataggaggggatccccgtgataatcctcctatccgtgtaccgtacattggctccaggactgatgagaggagggtagcctcaatggcatacatcaggggtgcctcgagtagcttaaaagcagttcttagactggcgggagtgtacatctgggcattcggagataccgactcggaccgatg

SEQ ID NO: 7176 - DNA, 203 bp, Artificial sequence
  synthetic
ggcgcgccagtccttctggagaattggatagatgcactggatttgtctcacactagagttaacatcacacttgaacagctgcaatccctcaccccacttccaacctctgccaatctaacccatcggttggatgatggcacaactaccctaaagtttactcctgcgagctcttacaccttttcaagtttcgactcggaccgatg

SEQ ID NO: 7177 - DNA, 203 bp, Artificial sequence
  synthetic
ggcgcgccagtccttatgtattgtgggtgggaactactattggaactatcctatcaaatgtattatctgagggtagttgggtggagtaatatagtggattattcttacatgatcttgagaagaatcccgggtgcagcattaaacaatctggcatctacattaagtcatccaaaacttttccgacgagccgactcggaccgatg

SEQ ID NO: 7178 - DNA, 203 bp, Artificial sequence
  synthetic
ggcgcgccagtccttatcaacctagatatagttgcccccttaaatgctcctcattttgcatctctggactacatcaagatgagtgtggatgcaatactctggggctgtaaaagagtcatcaatgtgctctccaatggaggggacttagaattagttgtgacatctgaagatagccttattctcagtgacgactcggaccgatg

SEQ ID NO: 7179 - DNA, 203 bp, Artificial sequence
  synthetic
ggcgcgccagtcctgttgtcatcaactgcttggtataagggtataagctgctgcaggtaccttgagcgattaaagctaccacaaggtgatcatttatatattgcagaaggtagtggtgccagtatgacaatcatagaatacctattcccaggaagaaagatatattacaattctttatttagtagtggcgactcggaccgatg

SEQ ID NO: 7180 - DNA, 203 bp, Artificial sequence
  synthetic
ggcgcgccagtcctattcatcatcaatcgagtcggcccaaggacttgcagtttagtacatgtagatttggaatcaagtgcaagcttaaatcaacaatgcctgtcaaagccgataattaatgctatcatcactgctacaactgttttgtgccctcatggggtgcttattctgaaatatagttggttgcccgactcggaccgatg

SEQ ID NO: 7181 - DNA, 203 bp, Artificial sequence
  synthetic
ggcgcgccagtccttgcacggaatctcatcgatatcgagccagtcgcaactttcatagaatttgaacaattgatctgcacaatgttgacaacccacttgaaggaaataattgatataacaaggtctggaacccaggattatgaaagtttattactcactccttacaatttaggtcttcttggtaaaatcgactcggaccgatg

SEQ ID NO: 7182 - DNA, 203 bp, Artificial sequence
  synthetic
ggcgcgccagtccttgttgcaaaggtatgtgggtcgtattgctttgccttttcctaacctggctcctcctacaattctaacctgcttgataagtgtgattacctgagtaatagactaatttcgtcctggtaattagcattttctagtaaaaccaatactatctcaagtcctaagagaaggtgagaagacgactcggaccgatg

SEQ ID NO: 7183 - DNA, 203 bp, Artificial sequence
  synthetic
ggcgcgccagtccttgaagaggagacaacagaagctaatgctggtcagtttttatcctttgccagtttgtttctacccaaacttgtcgttggggagaaagcgtgtctggaaaaagtacaaaggcagattcaggtccatgcagaacaagggctcattcaatatccaacttcctggcaatcagttggacacgactcggaccgatg

SEQ ID NO: 7184 - DNA, 203 bp, Artificial sequence
  synthetic
ggcgcgccagtcctcatgatggtgatcttccgtttgatgagaacaaactttttaatcaagttcctactaatacatcaggggatgcacatggtcgcaggccatgatgcgaatgacacagtaatatctaattctgttgcccaagcaaggttctctggtcttctgattgtaaagactgttctggaccacatcgactcggaccgatg

SEQ ID NO: 7185 - DNA, 203 bp, Artificial sequence
  synthetic
ggcgcgccagtcctttatccacaactctcagccattgctttgggtgttgcaactgcccacgggagcacgctggctggtgttaatgtaggggagcaatatcagcaactgcgtgaggctgctactgaagctgaaaagcaactccaacaatatgctgaaacacgtgagttggacaaccttgggcttgatgacgactcggaccgatg

SEQ ID NO: 7186 - DNA, 203 bp, Artificial sequence
  synthetic
ggcgcgccagtcctatttcccgggccgatctatgatgaaacccaccccaacccttctgatgataatcctgatgattcacgtgatacaactatcccaggtggtgttgttgacccgtatgatgatgagagtaataattatcctgactacgaggattcggctgaaggcaccacaggagatcttgatctcttcgactcggaccgatg

SEQ ID NO: 7187 - DNA, 203 bp, Artificial sequence
  synthetic
ggcgcgccagtcctcaatttggacgacgacgatgacgacagccaaccaggaccaccagacagggggcagagcaaggaaagagcggctcggacacatggcctccaagatccgaccttggacggagcgaaaaaggtgccggagttgaccccaggttcccaccaaccaggcaacctccacatcaccaagcccgactcggaccgatg

SEQ ID NO: 7188 - DNA, 203 bp, Artificial sequence
  synthetic
ggcgcgccagtcctgggttcaaacaccaaccaaccacaaggcaatatgtcatctactctccagagtatgacccctatacaggaagaatcagagcccgatgatcagaaagatgatgatgacgagagtctcacatcccttgactctgaaggtgacgaagatgttgagagcgtatcaggggagaacaaccccgactcggaccgatg

SEQ ID NO: 7189 - DNA, 203 bp, Artificial sequence
  synthetic
ggcgcgccagtccttccatttgaggcaatcaattattatcacctaatgagtgatgagcccattgcttttagcactgaaagtggcaaggaatatatcttcccagattctcttgaagaagcctacccgccttggttgagtgagaaggaggccttagagaaagaaaatcgttatctggtcattgatggccacgactcggaccgatg

SEQ ID NO: 7190 - DNA, 203 bp, Artificial sequence
  synthetic
ggcgcgccagtccttggtgcaggttatctgcaaaattggtaaggataataatatcctagacataattcatgcagaattccaagcaagcttggctgagggagactccccccagtgtgcattaatccagataacaaaacggatccctgctttccaagatgcctctcctccaattgtgcatatcaagtctccgactcggaccgatg

SEQ ID NO: 7191 - DNA, 203 bp, Artificial sequence
  synthetic
ggcgcgccagtcctgtcaaggaactctcactgatcaagcctgaatccaagatagaaccagcccaaagggcctccccagagtctcttacaagcttagccaatcaattaacatgcataagcgatccatacttcgcccaatcagtgtccgatgttcaccccttcaagcctccttcctagcaaattgacctacgactcggaccgatg

SEQ ID NO: 7192 - DNA, 203 bp, Artificial sequence
  synthetic
ggcgcgccagtcctatctttttaccataatcttgttctcagtaccatttgataagggtacacttgccaatacgcccccatcctaagggtctcgcaatggggggtcttagcctactccaattgcccagggacaaatttcggaaaagctctttctttgtttgggtcatcatcttattccaaaaggcctttcgactcggaccgatg

SEQ ID NO: 7193 - DNA, 203 bp, Artificial sequence
  synthetic
ggcgcgccagtccttctggtgttcctcccaaggtggtcagctatgaagcgggagaatgggctgaaaattgctacaatcttgaaataaagaagccggacgggagcgaatgcttacccccaccgccagatggtgtcagaggctttccaaggtgccgctatgttcacaaagcccaaggaaccgggccctgccgactcggaccgatg

SEQ ID NO: 7194 - DNA, 203 bp, Artificial sequence
  synthetic
ggcgcgccagtcctcatcgtcgagaattacaaagggaagaatctccgaccgggccaccaggaagtattcggacctggttccaaagaattcccctgggatggttccattgcacataccagaaggggaaacaacattgccgtctcagaattcgacagaaggtcgaagagtaggtgtgaacactcaggagacgactcggaccgatg

SEQ ID NO: 7195 - DNA, 203 bp, Artificial sequence
  synthetic
ggcgcgccagtcctccattacagagacagctgcaacaattataggcactaacggcaaccatatgcagatctccaccatcgggataagaccgagctccagccaaatcccgagttcctcaccgaccacggcaccaagccctgaggctcagacccccacaacccacacatcaggtccatcagtgatggccacgactcggaccgatg

SEQ ID NO: 7196 - DNA, 203 bp, Artificial sequence
  synthetic
ggcgcgccagtcctccgaggaaccaacaacaccaccgggaagctcccccggcccaacaacagaagcacccactctcaccaccccagaaaatataacaacagcggttaaaactgtcctgccacaggagtccacaagcaacggtctaataacttcaacagtaacagggattcttgggagtcttgggcttccgactcggaccgatg

SEQ ID NO: 7197 - DNA, 203 bp, Artificial sequence
  synthetic
ggcgcgccagtcctgaaaacgcagcagaagacaaactaacaccaaagccacgggtaagtgcaatcccaacttacactactggactgcacaagaacaacataatgctgctgggattgcctggatcccgtactttggaccgggtgcggaaggcatatacactgaaggcctgatgcataaccaaaatgcctcgactcggaccgatg

SEQ ID NO: 7198 - DNA, 203 bp, Artificial sequence
  synthetic
ggcgcgccagtccttactctttctcaatactatataagttccttcccaagaataatattgatgaagattaagaaaaagtgacattgtgcccacttttgtaatcttcatccacctacacattcatattcaggaatctttgaattaaccctcacacttgcttaggaaagagcctatcctctacaagaatccgactcggaccgatg

SEQ ID NO: 7199 - DNA, 203 bp, Artificial sequence
  synthetic
ggcgcgccagtcctacgcttacttgcccccccaagcgttaatgaagggctccctcctgcaccaggggaatatacttggtcagaagatagtacaacttagcctgtagggaggacaagtaaaacaagatgcccttatcctctatagatggtatttttagagagggggacaggataggaataaagataatgcgactcggaccgatg

SEQ ID NO: 7200 - DNA, 203 bp, Artificial sequence
  synthetic
ggcgcgccagtccttagtatagtcttaggtatagggtagtcctacacgtactatattatacagtctaaacttgtaaaattaaactacaagaacatgatgaaaattaatgagaaggttccaagattgacttcaatccaaacaccttgctctgccaattttcatctccttaagatatatgattttgttcccgactcggaccgatg

SEQ ID NO: 7201 - DNA, 203 bp, Artificial sequence
  synthetic
ggcgcgccagtcctacaagcctaagattccattagagataaccagaatggctaaagccacaggccggtacaacttggtaacaccaaaacgggagctagagcaaggagttgtgtttagcgacctatgcaacttcctagtgactccaactgtgcaaggatggaaggtttactgggctggacttgagtttgcgactcggaccgatg

SEQ ID NO: 7202 - DNA, 203 bp, Artificial sequence
  synthetic
ggcgcgccagtcctctggggaggcaatccttgccaccataggactttttcaattcctctattttatgatggctacccaacatacacaatatcctgatgcaagattgtcttccccaattgtcttagaccaatgtgacctagtgacaagagcatgtggactttactctgagtattcgctgaaccctaaaccgactcggaccgatg

SEQ ID NO: 7203 - DNA, 203 bp, Artificial sequence
  synthetic
ggcgcgccagtcctatgccacagttcgtggaagtagttttgtcacagacctggaaaaatacaatctggccttcaggtatgaattcacagctcccttcatcaaatattgcaaccaatgctatggggttcgcaatgtctttgattggatgcacttcctaattccgcaatgttacatgcatgttagtgattcgactcggaccgatg

SEQ ID NO: 7204 - DNA, 203 bp, Artificial sequence
  synthetic
ggcgcgccagtcctatattttaccatgccgtgttgcagctgcctttcatacatatttctctgttcggatcttacaacatcatcaccttggtttccataagggttcagaccttggacaattggcaatcaataaacctcttgatttcgggaccattgcactatccttagcagttcctcaggtattgggtgcgactcggaccgatg

SEQ ID NO: 7205 - DNA, 203 bp, Artificial sequence
  synthetic
ggcgcgccagtcctcaggcgggttaaatgtccctggatcacaggatttaacatctttccttcgtcagattgtcagaaggagtatcacactttcggcaaggaacaagttaatcaacacgttatttcacgcttctgcagatcttgaagacgaattagtatgtaaatggttactttcttcaacgcccgtgacgactcggaccgatg

SEQ ID NO: 7206 - DNA, 203 bp, Artificial sequence
  synthetic
ggcgcgccagtcctggtttagttacctagaccattgtgacccagctttaatggaagcaattcaaccaattaagtgtactgttgatattgctcaaattcttagagaatactcctgggctcatatccttgatggtagacagttaataggggcaacactgccatgtatacctgagcagttccaaaccacatcgactcggaccgatg

SEQ ID NO: 7207 - DNA, 203 bp, Artificial sequence
  synthetic
ggcgcgccagtcctggttaaaaccttacgagcaatgtgtggaatgttcatccacaaacaattctagtccatatgtatcagttgcattaaaaaggaacgtggttagtgcttggcctgatgcatctagattggggtggacgattggtgatgggattccctacataggctcaagaactgaggacaaaatagcgactcggaccgatg

SEQ ID NO: 7208 - DNA, 203 bp, Artificial sequence
  synthetic
ggcgcgccagtcctatgaactgatttatgattcagatccactaagaggaggtctcaactgcaacttatcgattgacagtcctttgatgaagggcccacgtttaaatattattgaggatgacttaatacggttgccacatttatccggctgggaattagcaaaaacagtcttgcaatcaataatctctgcgactcggaccgatg

SEQ ID NO: 7209 - DNA, 203 bp, Artificial sequence
  synthetic
ggcgcgccagtcctaaacccaggcaaactgtctccatgtcgtacaatgtgctcttcaacagcaagtacaaagagggtcatattggctaagtcatcttaccaaatacaccacaagtagattgcacaatagttatattgcatttggttttccttcattagagaaggtcctatatcataggtataaccttgcgactcggaccgatg

SEQ ID NO: 7210 - DNA, 203 bp, Artificial sequence
  synthetic
ggcgcgccagtcctgtttattgactcttccaatacacagagttggaagcaccgattcaaggtttctaagacgccctatcgattatgttgataatgtaaataatagcttttcctgtctattatgacttaaataatcatatctataacgaccatcacagctaagtcgttgccctagttcatatattaaatcgactcggaccgatg

SEQ ID NO: 7211 - DNA, 203 bp, Artificial sequence
  synthetic
ggcgcgccagtcctctagtgggagtgaagagggtagtcatgggcttgttggatggaagaggaccagtgcgattcgtgctggccttgatgacattcttcaagttcaccgcgcttgccccgacgaaggccttgctaggccgttggaagcgcatcaacaagaccacggcaatgaaacacctgactagcttccgactcggaccgatg

SEQ ID NO: 7212 - DNA, 203 bp, Artificial sequence
  synthetic
ggcgcgccagtcctaaaaaggaattaggaacaatgatcaacgtggttaacaatcggggcacaaaaaagaagagaggcaacaatggaccaggactagtgatgatcataacactcatgacggttgtttcaatggtttcctctttaaagctttccaacttccaggggaaagtcatgatgaccatcaacgcgcgactcggaccgatg

SEQ ID NO: 7213 - DNA, 203 bp, Artificial sequence
  synthetic
ggcgcgccagtcctgggtatgcttttgtagctgtcctcttgggctggatgctgggaagcaacaatggacaaagggtcgttttcgtcgttctcttacttcttgtggcgcctgcttatagcttcaactgccttggtatgagcaacagagacttccttgagggagtctctggtgctacctgggttgacgtgcgactcggaccgatg

SEQ ID NO: 7214 - DNA, 203 bp, Artificial sequence
  synthetic
ggcgcgccagtcctgttttggaaggtgacagctgcataaccatcatggccaaggacaagccgaccattgacattaagatgatggaaactgaagccacgaacctggctgaagtgagaagctactgctatctagccactgtctcagatgtttcaactgtctccaactgtccaacaactggggaggcccaccgactcggaccgatg

SEQ ID NO: 7215 - DNA, 203 bp, Artificial sequence
  synthetic
ggcgcgccagtcctaccgaggcatactacatcatgtcagtgggcaccaaacacttccttgtccatagagaatggtttaatgacttggccctcccatggacttcaccagctagctcaaattggagaaatagagagatactactagagttcgaagagccccatgccacaaagcaatcagttgtggcgcttcgactcggaccgatg

SEQ ID NO: 7216 - DNA, 203 bp, Artificial sequence
  synthetic
ggcgcgccagtcctggttcccaggaaggtgctttgcaccaggccttggcaggagctgttccagtgtctttctcgggcagtgtcaagctcacatctggtcatctcaagtgtcgagtcaagatggaaaagttgacactaaaaggcaccacctacggcatgtgcacggaaaagttttcttttgcaaaaaatcgactcggaccgatg

SEQ ID NO: 7217 - DNA, 203 bp, Artificial sequence
  synthetic
ggcgcgccagtcctccggctgacacgggtcacggcactgtggtccttgaactgcagtacacgggatctgacggaccttgcaaaatcccaatttccattgtggcatcactttccgatctcacccccattggtagaatggttacagcaaacccttatgtggcttcatccgaagccaacgcgaaagtgttgcgactcggaccgatg

SEQ ID NO: 7218 - DNA, 203 bp, Artificial sequence
  synthetic
ggcgcgccagtcctgtcggagggattttcaattctgtaggaaaggcggtacatcaggtctttggaggagccttcagaactctcttcggtggcatgtcctggatcacccagggtctaatgggagctctgcttctatggatgggggtgaatgcgagagatcgatccatcgcactggtgatgttagccacgcgactcggaccgatg

SEQ ID NO: 7219 - DNA, 203 bp, Artificial sequence
  synthetic
ggcgcgccagtcctatcgagcaagcccacgcgaaaggaatatgtggattgaggtccgtctcacgtctggaacacgtgatgtgggagaacatcagagatgaactcaacaccctcctcagagagaatgcagtagatctaagtgtcgtggttgagaagccaaaaggaatgtacaaatcagcaccacagagacgactcggaccgatg

SEQ ID NO: 7220 - DNA, 203 bp, Artificial sequence
  synthetic
ggcgcgccagtcctatcatgtccaccagggtttggctgaaagtcagagaacacaacactactgactgcgacagctcaataattgggacggctgttaaaggagacatagctgtgcacagtgacctctcctactggattgaaagccacaagaacacgacatggaggctcgagagggctgtctttggagagcgactcggaccgatg

SEQ ID NO: 7221 - DNA, 203 bp, Artificial sequence
  synthetic
ggcgcgccagtcctagacccatgaaacatgatgagacgacgctggtaaaatccagcgtcagtgcccatcggagtgacatgattgatccttttcagttgggccttctggtgatgtttctggccacccaggaggtcctgaggaagaggtggacggccagattgactgttccggctattgtgggagctctacgactcggaccgatg

SEQ ID NO: 7222 - DNA, 203 bp, Artificial sequence
  synthetic
ggcgcgccagtcctacgaaccaagagaacatcctgctggctctgggggcagcattctttcagatggcggccaccgatttgaacttttctctcccaggaattctcaatgccactgccacagcttggatgctcctgagggctgccacccagccatccacttcagccatcgtcatgcctttgctttgcctgcgactcggaccgatg

SEQ ID NO: 7223 - DNA, 203 bp, Artificial sequence
  synthetic
ggcgcgccagtcctctggctcctggcatgagactgctctacctggacacgtatagaatcactctcatcatcatcggcatctgcagcctgataggggagcgccgtagggcggccgcaaagaagaaaggggcggtactgctagggttagcactaacatcaacagggcagttctctgcatcagttatggcgcgactcggaccgatg

SEQ ID NO: 7224 - DNA, 203 bp, Artificial sequence
  synthetic
ggcgcgccagtcctgggacctaccaggctggagtgggcgtcatgtatgaaggagttcttcacaccctgtggcacaccacaagaggggcagctatcagaagtggtgaaggaaggctcactccctactggggtagtgtgaaagaagacaggatcacctatggtgggccatggaagtttgacaggaagtggcgactcggaccgatg

SEQ ID NO: 7225 - DNA, 203 bp, Artificial sequence
  synthetic
ggcgcgccagtcctaatggtctcgatgatgttcagctcatcatagtggctcccggaaaggcagccataaacatccaaaccaaaccaggcatcttcaaaacgccacagggggaaataggagcagtcagcctggactatcctgaagggacctcaggctccccaatactggacaagaatggtgacatcgtgcgactcggaccgatg

SEQ ID NO: 7226 - DNA, 203 bp, Artificial sequence
  synthetic
ggcgcgccagtcctggcttgtacgggaatggagtcatcttgggcaacggctcgtatgtcagtgccatcgtgcaaggcgaaagagaagaagaacccgttcctgaagcgtacaacgcagacatgttaagaaagaagcagctgacagtgctggacctgcatccaggagcgggaaagaccaggaggatactccgactcggaccgatg

SEQ ID NO: 7227 - DNA, 203 bp, Artificial sequence
  synthetic
ggcgcgccagtcctccccagatcatcaaagatgccatccagcgccgccttcgtacagctgtgctggctccaacccgtgtggtggctgcagaaatggctgaggccctcaagggccttcgggtccgatacctgaccccagcggtcaacagagagcatagtggcacagagatagtggatgttatgtgtcatcgactcggaccgatg

SEQ ID NO: 7228 - DNA, 203 bp, Artificial sequence
  synthetic
ggcgcgccagtcctgccactctaacccacagactcatgtcacctctaagagctccaaactacaacctctttgtgatggatgaggctcacttcactgacccggcgagcatagcagcacgaggctacattgctacaaaagttgagttgggtgaagcggcagcaatattcatgactgcgactccccctggccgactcggaccgatg

SEQ ID NO: 7229 - DNA, 203 bp, Artificial sequence
  synthetic
ggcgcgccagtcctggcgaagggagagtgatcttgagcaacccctcaccaatcactagtgctagtgctgcccagaggagagggagagtaggtagaaatcctagtcagataggtgatgagtaccactatggaggaggcacaagcgaagatgacacgatcgcagctcattggactgaagcaaagatcatgcgactcggaccgatg

SEQ ID NO: 7230 - DNA, 203 bp, Artificial sequence
  synthetic
ggcgcgccagtcctaatggtatacagtacaccgacaggaagtggtgttttgatggaccaaggtcaaacatcattctggaagacaacaatgaagtcgaaattgtcacccgcacaggtgaacgcaagatgctgaagccacgctggttggatgccagggtctacgctgaccatcagtcgctcaagtggttccgactcggaccgatg

SEQ ID NO: 7231 - DNA, 203 bp, Artificial sequence
  synthetic
ggcgcgccagtcctaaggactttgcggctggtaagcgatcagcagtgggattccttgaagtcctggggagaatgcctgagcacttcgcaggcaagaccagagaggcttttgataccatgtatctggtggcgacagctgagaagggaggaaaagcccaccgcatggcccttgaagagttgccggacgctcgactcggaccgatg

SEQ ID NO: 7232 - DNA, 203 bp, Artificial sequence
  synthetic
ggcgcgccagtcctcttgaaaccataacactcattgtggctttggccgtgatgacagcaggagttttcttgctcctcgttcagaggagaggcataggtaagctggggcttggcggtatggtgctaggcctagccactttcttcttgtggatggctgacgtctcaggcaccaagatcgcaggaaccttacgactcggaccgatg

SEQ ID NO: 7233 - DNA, 203 bp, Artificial sequence
  synthetic
ggcgcgccagtccttccagcacacgtcaaccacaaagtgctctgccgctaccctccatgaacgctttggcattggatttgcgaccagcaacagcgtgggccttatacggagggagcacagtggttctcacgcccttgatcaaacatcttgtaacatcagaatacatcacaacatctctggcttcaatacgactcggaccgatg

SEQ ID NO: 7234 - DNA, 203 bp, Artificial sequence
  synthetic
ggcgcgccagtcctgctgaagctttgagggcggctcaacggagaacagcggccggaatcatgaaaaatgctgtggtagatggtttggtggctacggatgttcctgaactggagagaaccacccccctcatgcaaaagaaggtaggccagattttactgattggagtcagcgcggcggcattgttagtccgactcggaccgatg

SEQ ID NO: 7235 - DNA, 203 bp, Artificial sequence
  synthetic
ggcgcgccagtcctaacccgtgtgttacaactgttcgggaagccggcatcctcatatcagcggcactcctgactctctgggacaacggagccattgcagtatggaattccaccaccgcgaccggactttgtcacgtcatccgtggcaattggttggctggagcctctatagcttggactctgataaagcgactcggaccgatg

SEQ ID NO: 7236 - DNA, 203 bp, Artificial sequence
  synthetic
ggcgcgccagtcctcctggacatgaggaaccgatgcttatgcaaagctatggctggaaccttgtcactatgaagagcggagtggacgtgtattataaaccatctgagccgtgcgacacgcttttctgtgacattggagaatcatcttctagtgctgaggtggaagaacaacgcaccctgaggattttgcgactcggaccgatg

SEQ ID NO: 7237 - DNA, 203 bp, Artificial sequence
  synthetic
ggcgcgccagtcctaggattcaaagattgaaagaggagtatgcagccacatggcaccatgacaaggaccacccatatcggacctggacctaccacggaagttatgaagtgaaaccgaccggttcagcaagctccttggtcaacggagttgtccgcctaatgagcaagccctgggatgcaattctcaaccgactcggaccgatg

SEQ ID NO: 7238 - DNA, 203 bp, Artificial sequence
  synthetic
ggcgcgccagtcctgagctgacctacaaacacaaggtggtgaaagttatgcgacctggcacagatgggaagaccgtcatggatgtgatttcccgagaagatcagagaggaagtggacaggttgtgacctatgctctcaacacattcaccaacattgccgtccagcttattagactgatggaagctgaacgactcggaccgatg

SEQ ID NO: 7239 - DNA, 203 bp, Artificial sequence
  synthetic
ggcgcgccagtcctgcaacgtgggctgaaaacatctacgcagccattaaccaggtgagagccattattggccaggaaaaatacagggattacatgctttcacttagaagatatgaagaagttaatgtccaggaggacagggttttgtaaataagtgtttagggttttgcaatttaattaaatatgcaacgactcggaccgatg

SEQ ID NO: 7240 - DNA, 203 bp, Artificial sequence
  synthetic
ggcgcgccagtcctctgggttaacaaagctgaccgctgatgatgggaaagcccctcagaaccgtttcggagagggaccctgcctattggaagcgtccagcccgtgtcaggccgcaaagcgccacttcgccaaggagtgcagcctgtacggccccaggaggactgggttaccaaagccgaaaggccccccgactcggaccgatg

SEQ ID NO: 7241 - DNA, 203 bp, Artificial sequence
  synthetic
ggcgcgccagtcctacggcccaagcgaacagacggtgatgcgaactgttcgtggaaggactagaggttagaggagaccccgtggaacttaggtgcggcccaagccgtttccgaagctgtaggaacggtggaaggactagaggttagaggagaccccgcatcataagcatcaaaaaaacagcatattgacgactcggaccgatg

SEQ ID NO: 7242 - DNA, 203 bp, Artificial sequence
  synthetic
ggcgcgccagtcctgtgaagggaccgtgtgttctagacatggtagttgtgtaggtacaagaggacttcatttgaatatcctcgatcccggacctaaattaccttgtggatttccggaggaatttaggaaaccacctccttcgggaggctagtaggagcttacatgactctcggattgggaagtccgagcgactcggaccgatg

SEQ ID NO: 7243 - DNA, 203 bp, Artificial sequence
  synthetic
ggcgcgccagtcctcctttaagagaaataagattgcatgtgctgaaaagcaaggtcaagtgcaatccaatcaaactggcaattctccaaatgtaacaccagttaatgccactaatgggtcacaagtaacaactattaattactatggggcacaatatgcacaggcatataatccatccagtcagacaacgactcggaccgatg

SEQ ID NO: 7244 - DNA, 203 bp, Artificial sequence
  synthetic
ggcgcgccagtcctggtacataacagcctggctacagacaaaattggttcatccagctggtgttccaaccaccagtcccattgtagtgtatgcttcagctagtaataacttcaccttcaagtgcccaatagatagtgcatacttccagggacttggtgaccaaataacttcacaagtggaagggttgacgactcggaccgatg

SEQ ID NO: 7245 - DNA, 203 bp, Artificial sequence
  synthetic
ggcgcgccagtcctcaactagagtcacaaaggcaacattttctgcacaagacactgatgtagagtttttcttctcaaggtatatgcttataggatctgttggaagtcgacaaggaacccaggactttgccaaatttgacatgtcttttgaggccattaagggagctagtagggcaattagaacaaaatcgactcggaccgatg

SEQ ID NO: 7246 - DNA, 203 bp, Artificial sequence
  synthetic
ggcgcgccagtcctttcagatgtttacatatatgaggtttgacttggatgtggttctggagccgctagaagagattccttatcaggtgatgtactgccccactgggtcagttgtaccagcaaactctatagataattggaacacaacttgtaatgcagtgattactcaacgacctggtaagaatgtttcgactcggaccgatg

SEQ ID NO: 7247 - DNA, 203 bp, Artificial sequence
  synthetic
ggcgcgccagtcctagttcaagtacagagagcaatcagttttggatttggctgagaaaatacttgagtcaaagagagtgctccttgagatgcagaagacagacaataggatttacctcactttggtgaagtatgctgaaaaggccagtaaattcattcagaattcaaggaaaagaccatttgaaccaacgactcggaccgatg

SEQ ID NO: 7248 - DNA, 203 bp, Artificial sequence
  synthetic
ggcgcgccagtcctgagagaagaagtttaccactcctgatttactgattggcaagttgactggttacagaagggagaaaattaatacaaatgacatggttgatgcactgtttcaagggccgaggaaagttgtaagtctgaaacctactctcaagttcctggacgatgaagaactcaaaactccagtgacgactcggaccgatg

SEQ ID NO: 7249 - DNA, 203 bp, Artificial sequence
  synthetic
ggcgcgccagtcctagctcatgccagagtgcattgaagatctcattagaagtgtgcatgaccaacgcatcattgactggtgcgaagaccagggatacatttttgaaccacacatgcagcactttatagtagagagagagagtaaatggctgaagacagtaataaagactacagtcacttctttggctgcgactcggaccgatg

SEQ ID NO: 7250 - DNA, 203 bp, Artificial sequence
  synthetic
ggcgcgccagtcctttttgggagctgtgtgtggattgatctatgcagcttggagactctggccaacatctgagcaaggagcatacactggaaatcagagagctgttttgaaaagacctgagttaagaacagtgcaagtgcaggggcctggaactcatccagatcttcagtatatccaggcattgctcacgactcggaccgatg

SEQ ID NO: 7251 - DNA, 203 bp, Artificial sequence
  synthetic
ggcgcgccagtcctctgagagacccgccaggaaaagtgtcaatgtcagatcgacaacttcacttcaaccatcggtttggcatgacattgttccaggtgagaaggaacctgcagttttgagtaagtttgacaagagatgtgaggtggactttgagaaggctctattctccaaatacgagcagaatgtggcgactcggaccgatg

SEQ ID NO: 7252 - DNA, 203 bp, Artificial sequence
  synthetic
ggcgcgccagtcctccatcttcaattcaatcattaataacatcattgtgagaactctggtcttggacacctacaaaggtatcgatctcgaccaactccgtattctggcctacggtgatgacctactggtgtcctatccatttccacttgacccagaggcattagcaagggctggaaaggtgtatggtccgactcggaccgatg

SEQ ID NO: 7253 - DNA, 203 bp, Artificial sequence
  synthetic
ggcgcgccagtcctttaaaatgacacctgcagacaagagtgaacactttgatgggccaaagaaaatctgggaggtgaccttcctgaagaggggctttaagcctgattctcggtacccatttctcattcatccagtgtacccaatggatcaggtgtacgagtctctcagatggactaggaaaccttctgcgactcggaccgatg

SEQ ID NO: 7254 - DNA, 203 bp, Artificial sequence
  synthetic
ggcgcgccagtcctgcaggagggtcaagtgtattggtgtggctagccaaagggaatagcccctcctaatgaggttgttgggcgcggcgtcccaactcaaacaaaacgcgtcggataatttcttaacacataatcactttaatcattagttgttaggattttaatcattagtttagatatagtttgttacgactcggaccgatg

SEQ ID NO: 7255 - DNA, 203 bp, Artificial sequence
  synthetic
ggcgcgccagtcctgtgaaacctcgcgtcattctggaggccacaacatccggtgatgcacaaacgcagtatagatctaaaccaaaaattgaagcattcacgtcggcggatgtaataaccattactaaacccaaagtgatggttgaggcagtgtcatctggcgatagtataactcaaaacaaacctaaacgactcggaccgatg

SEQ ID NO: 7256 - DNA, 203 bp, Artificial sequence
  synthetic
ggcgcgccagtcctaagtttcacccaattgagattaagcaagaatacaccaaagctgactttccatatgctccaggagacatgtttggtcccataggtaagtgcccccaccagttatttgagcccggtaaaacagatattcgacctagtgtaatttatggtaaggtaaaacctcctattacgaaaccccgactcggaccgatg

SEQ ID NO: 7257 - DNA, 203 bp, Artificial sequence
  synthetic
ggcgcgccagtcctattaaaggaaatgatatttcagaatatatttctagtataaatcgacaatcatccccaggttacccatggattttagatcgtaaaccaggctttccaggtaagactcaatggtttgggaacgatgaagattacaaaattgatcctgacgtgatgcaaaaagtacatgaaagaattcgactcggaccgatg

SEQ ID NO: 7258 - DNA, 203 bp, Artificial sequence
  synthetic
ggcgcgccagtcctgaaaacgcaaaacaaggaatacggaccccaactttttgggttgacacgctcaaggatgagcgacgacctattgagaaagttgatgcactcaaaacacgcgtcttttcgaacggacccatggattttaatttggctttccgcaaatattttctaggatttatagcgcatttaatgcgactcggaccgatg

SEQ ID NO: 7259 - DNA, 203 bp, Artificial sequence
  synthetic
ggcgcgccagtcctgacggctattggcatttacgaaatatggaatactttttataaaacgtttctcttctggttaccagcaacataggaaattgtcgttgaactacatgttgtaaggctttagagaaataagggagtgtcctatttaggatgaggtgctccggtggcagccccaccaaaacctctagccgactcggaccgatg

SEQ ID NO: 7260 - DNA, 203 bp, Artificial sequence
  synthetic
ggcgcgccagtcctaccagacaagaactcacagttttccatgatgttgaacaacctcgcgtcgctcttccaattgctccgcaaacgactagctctcttgctaagcttgattctacagcgacaattgtggattttctttctagaactgttgtcctcgatcaattcgagcttgttcaaggtgaatcaaaccgactcggaccgatg

SEQ ID NO: 7261 - DNA, 203 bp, Artificial sequence
  synthetic
ggcgcgccagtcctgtggccggaagattttggctaacatattccccatatgaacataaagtagataaggcaagacgccagcaatataatagtagagctggagtgacagcatatcctggaatagaaatggatgttcaaatcaatgattcagcagaaatggttatcccatttgcttcctacaaagaagctcgactcggaccgatg

SEQ ID NO: 7262 - DNA, 203 bp, Artificial sequence
  synthetic
ggcgcgccagtcctgtccccggcaagtattattcccatgtaaaagcgatagataatagtgtagctttagctttgagtaatgagaacgagcttctcccacttagcgacatctttccctcagcggtagatgagatggacttggcatatgtgtgtgctaatcctggagtgaaggaagtcattacgcggtcgcgactcggaccgatg

SEQ ID NO: 7263 - DNA, 203 bp, Artificial sequence
  synthetic
ggcgcgccagtcctcctaaggcggattggcataattatgttgatctttccgcttacgataaagtggataccgcaaattcttacaaatatattttagatttaacaaatgattcagaaattactattagagtgccatttattagcgataggttagctttaagtacaattggtgctaatagttatggtgagcgactcggaccgatg

SEQ ID NO: 7264 - DNA, 203 bp, Artificial sequence
  synthetic
ggcgcgccagtcctttatgtgagactagaaatgccacaatgcagatcaacatttccaatgaagcatcaggaaacagtatcgatattttccaggataataatgcaggtgtgagtccaaatgcagtaatgggtaaaattgcgggtgaacgtctagttaacttgcgaccactactgcgctgcttccgatctcgactcggaccgatg

SEQ ID NO: 7265 - DNA, 203 bp, Artificial sequence
  synthetic
ggcgcgccagtcctacgatttgttatgcgcctgcagactatagctactatttgtggtattaaatatgttgcacaacctacagaagatgtagtagatggagatgtagttatacgtgaacctgtacatttattatctgctgatgcaatagttttaaagcttcctagtttgatgaaagttatgactcatatcgactcggaccgatg

SEQ ID NO: 7266 - DNA, 203 bp, Artificial sequence
  synthetic
ggcgcgccagtcctttcagtcaagtcttatgatgatttggtttattcaggtgtagtaggttgtaaatctattgttaaagaaactgctcttattactcatgcactttacttagattatgttcaatgtaagtgtggtaatcttgaacaaaatcatattcttggcgttaataattcttggtgtaggcaactcgactcggaccgatg

SEQ ID NO: 7267 - DNA, 203 bp, Artificial sequence
  synthetic
ggcgcgccagtcctagtagaagatgatgttattgagaatgtcaaatcttctttatcatcttatgagtattgtcaaccacctaaatctgtagaaaaaatttgtattatagataatatgtacatgggtaagtgtggtgataaatttttccctattgtcatgaatgataaaaatatttgtcttttagatcacgactcggaccgatg

SEQ ID NO: 7268 - DNA, 203 bp, Artificial sequence
  synthetic
ggcgcgccagtccttgattttgttgctgttgtttgtgatgctatagagaatgctttaaactcttgtaaagagcatccagtggttggttatcaagttcgtgcatttttaaataaacttaatgagaatgttgtttatttatttgatgaggctggtgatgaagcaatggcctctcgtatgtattgtactttcgactcggaccgatg

SEQ ID NO: 7269 - DNA, 203 bp, Artificial sequence
  synthetic
ggcgcgccagtcctcaatgacgatgaagatgttgttactggtgacaatgacgatgaagatgttgttactggtgacaatgacgatgaagatgttgttactggtgacaatgacgatgaagatgttgttactggtgacaatgacgatgaagatgttgttactggtgacaataacgatgaagagattgttaccgactcggaccgatg

SEQ ID NO: 7270 - DNA, 203 bp, Artificial sequence
  synthetic
ggcgcgccagtccttggtgacaatgatgaccaaattgttgttactggtgatgatgtagatgatattgaaagtatttatgactttgatacttataaagctcttttagtttttaatgatgtctataatgatgctttgtttgttagttatggttctagtgttgaaacagaaacatattttaaagttaatggcgactcggaccgatg

SEQ ID NO: 7271 - DNA, 203 bp, Artificial sequence
  synthetic
ggcgcgccagtccttggacataatatgactctaatagcagcggacttaccttgtacattacatttttcattatttgatgacaatttttgtgctttttgcacccctaaaaaaatttttattgctgcatgtgctgtggatgtaaacgtttgtcattctgtagctgttataggtgatgaacaaatagatggcgactcggaccgatg

SEQ ID NO: 7272 - DNA, 203 bp, Artificial sequence
  synthetic
ggcgcgccagtccttattgttaatcctgctaatgggcatatgctccatggtggtggagttgcaaaagctatagctgtagctgcaggtaaaaaattttctaaagaaactgctgctatggttaaatctaaaggtgtttgccaagtaggagattgttatgtttctaccggtggtaaattatgtaaaacaatcgactcggaccgatg

SEQ ID NO: 7273 - DNA, 203 bp, Artificial sequence
  synthetic
ggcgcgccagtcctttttgtttcaaattcttctgttatacaagaagttttattgcttcgtcatgatatacaattgaataatgacgttcgtgattatttgttgtctaagatgactagtcttcctaaagattggcgtcttatcaataaatttgatgttattaacggtgttaaaactgttaagtattttgacgactcggaccgatg

SEQ ID NO: 7274 - DNA, 203 bp, Artificial sequence
  synthetic
ggcgcgccagtcctcagaccacataggttagttgctcttgttttagctaaaggtcattttaaatttgatgaaccatcagatgctactgattttattcgtgttgttttgaaacaagctgatttatcaggtgcaatttgtgaattagaacttatttgtgattgtggtattaaacaagaaagtcgtgttggcgactcggaccgatg

SEQ ID NO: 7275 - DNA, 203 bp, Artificial sequence
  synthetic
ggcgcgccagtccttgttgatgctgttatgcattttggtacattagcaaagactgatctttttaatggttataagattggctgtaattgtgcaggtagaattgtccattgtactaaattgaatgtaccatttttgatttgttctaatactcctctgagtaaggatttacctgatgatgttgttgcagccgactcggaccgatg

SEQ ID NO: 7276 - DNA, 203 bp, Artificial sequence
  synthetic
ggcgcgccagtccttaacatgtttatgggtgtaggtgtaggccattatacacatttgaaatgtggttcaccttaccaacattatgatgcttgtagtgttaaaaaatatacaggtgttagtggttgtttaactgactgcttgtatcttaaaaatttaacccagacttttacatctatgttgactaattacgactcggaccgatg

SEQ ID NO: 7277 - DNA, 203 bp, Artificial sequence
  synthetic
ggcgcgccagtcctttatcttcctaatattagtgtttttcctatttttgtgggaagaattgttatgtggataaaggctacttttggtttggttacaatttgtgatttttattctaagttaggtgtaggttttacaagtcatttttgtaatggtagttttatatgtgaattgtgtcattctggttttgacgactcggaccgatg

SEQ ID NO: 7278 - DNA, 203 bp, Artificial sequence
  synthetic
ggcgcgccagtccttatgttggatacatatgcagctatagattttgttcagtatgaagtagatagacgtgttttatttgattatgttagtttagtcaaattaattgttgaactcgttattggttattcattatacacagtatggttttatccattattttgtcttattggtttacaattatttactaccgactcggaccgatg

SEQ ID NO: 7279 - DNA, 203 bp, Artificial sequence
  synthetic
ggcgcgccagtcctgagacatggctttcatgttttacattttttaacttatgcatttgctagtgatagtgttcagtgctatacaccacatattcagatttcttataatgatttttatgctagtggttgtgttttatcatctttgtgtactatgtttaaaagaggtgatggtacaccacatccttattgcgactcggaccgatg

SEQ ID NO: 7280 - DNA, 203 bp, Artificial sequence
  synthetic
ggcgcgccagtcctatacgccgaagagggtatatgttttaattttaatagttcctgggttttgaataatgattattatagaagtatgcctggaactttttgtggtagagatctttttgatttgttttatcaattttttagtagtttaattcgtcctatagatttcttttctcttactgctagttctatcgactcggaccgatg

SEQ ID NO: 7281 - DNA, 203 bp, Artificial sequence
  synthetic
ggcgcgccagtccttacttatggtagtatgactttgaatggtttatggttagatgacaaagtttattgtcctcgtcatgttatatgttcatcctctaatatgaacgaacctgattattctgccttattgtgtagagttactctaggtgattttactataatgtctggtcggatgagtttaacagttgtcgactcggaccgatg

SEQ ID NO: 7282 - DNA, 203 bp, Artificial sequence
  synthetic
ggcgcgccagtccttaaagaaacaatttattggattttgatatctacatttttgtttagttgtataatttctgcatttgttaaatggactatatttatgtatattaatacacatatgattggtgttacattatgtgtactttgttttgttagttttatgatgttactagttaaacataagcatttttacgactcggaccgatg

SEQ ID NO: 7283 - DNA, 203 bp, Artificial sequence
  synthetic
ggcgcgccagtccttttgactatgtatataattcctgtactctgtaccttgttttatgtaaattatttagttgtttataaggaaggttttagaggttttacttatgtctggctctcatattttgttcctgctgtgaattttacttatgtttatgaagtattttatggttgtattttatgtgtttttgccgactcggaccgatg

SEQ ID NO: 7284 - DNA, 203 bp, Artificial sequence
  synthetic
ggcgcgccagtcctacagttagaaaaagcatgtaatatagctaagtctgtgtatgaacgtgataaagctgtagctcgcaaacttgaacgtatggcagacctagcacttactaacatgtataaagaggctcggattaatgataagaagagtaaagttgtttccgctttgcagacaatgctttttagcatcgactcggaccgatg

SEQ ID NO: 7285 - DNA, 203 bp, Artificial sequence
  synthetic
ggcgcgccagtcctggttcgtaaattggataatcaggctttaaattctattctggataatgctgttaaaggttgtgtacctttgagtgctattccagcattggctgctaatactttaactatagtaataccagataaacaagtttttgataaagttgttgataatgtttatgttacatatgctggtagcgactcggaccgatg

SEQ ID NO: 7286 - DNA, 203 bp, Artificial sequence
  synthetic
ggcgcgccagtcctggtgtagttatgaacttagatgttgacacacaccgttatcgtttgtctcttaaagatttacttctttatgcagcagatcctgctatgcacgttgcatctgctagtgctctgcttgatttacgaacttgttgttttagtgtagctgccattacaagtggtataaaatttcaaactcgactcggaccgatg

SEQ ID NO: 7287 - DNA, 203 bp, Artificial sequence
  synthetic
ggcgcgccagtcctttgagtgatgatggtgttgtctgttataactctgattatgctagtaagggttatatagctaatataagtgtttttcaacaagttttgtactatcagaataatgtctttatgtctgaatctaaatgttgggttgaaaatgatattactaatggtcctcatgaattttgttcccaacgactcggaccgatg

SEQ ID NO: 7288 - DNA, 203 bp, Artificial sequence
  synthetic
ggcgcgccagtcctcagagtgtaggtgcatgcgttgtttgttcatcacaaacttctttgcgttgtggcagttgtatacgtaagcctttgttatgttgtaaatgttgttatgaccatgttatggcaactaatcataaatatgttttgagtgtctcaccttacgtttgtaatgcacctaactgtgatgtgcgactcggaccgatg

SEQ ID NO: 7289 - DNA, 203 bp, Artificial sequence
  synthetic
ggcgcgccagtcctgaagttgatgattatgttctggcaaatgagtgtattgaacgtttaaagttatttgctgcagaaactcaaaaggcaactgaagaggcttttaaacaaagctatgcttctgctaccattcaagagattgttagtgatagagaagttattttgtgttgggagacaggtaaagttaaacgactcggaccgatg

SEQ ID NO: 7290 - DNA, 203 bp, Artificial sequence
  synthetic
ggcgcgccagtcctcttgctataggtctagctgtttattactacacagcacgtgtagtttatactgctgctagtcatgctgctgtagatgcattgtgtgaaaaagcttataagtttttaaatattaacgattgtacacgtattattcctgctaaagttcgtgtagattgttatgataagtttaaaattcgactcggaccgatg

SEQ ID NO: 7291 - DNA, 203 bp, Artificial sequence
  synthetic
ggcgcgccagtccttctatgcctgttttgtataagtatttgaatgttccattagagagagtctctttatggaattatggtaaacctattaatttgcctacaggctgtatgatgaatgttgctaagtacactcaattatgtcagtatttgaatactacaacattagctgttcctgttaatatgcgtgttcgactcggaccgatg

SEQ ID NO: 7292 - DNA, 203 bp, Artificial sequence
  synthetic
ggcgcgccagtccttaatggtagtaatgatgtatggcttcttaacaaggtaagattttatcgtgccttatattctaatatggccttttttcgttatcttacttttgttgatattccttataatgtttctctttctaagtttaattcttgtaaaagtgatattttatcacttaacaatcctatttttatcgactcggaccgatg

SEQ ID NO: 7293 - DNA, 203 bp, Artificial sequence
  synthetic
ggcgcgccagtcctactttgcttcgtttagttcatactgattctttttcttgtaataattttgatgaatctaagatatatggtagttgttttaagagtattgttttagataaatttgccatacccaactccagacgatctgatttgcagttgggcagttctggttttctgcaatcttctaattataaacgactcggaccgatg

SEQ ID NO: 7294 - DNA, 203 bp, Artificial sequence
  synthetic
ggcgcgccagtccttgtccttgtgctaaaccttcttttgcttcaagttgcaagagtcataaaccaccttctgcttcctgtcctattggtactaattatcgttcttgtgagagtactactgtactcgaccacactgactggtgtaggtgttcttgtttacctgatcctataactgcttatgaccctaggcgactcggaccgatg

SEQ ID NO: 7295 - DNA, 203 bp, Artificial sequence
  synthetic
ggcgcgccagtccttcttgttctcaaaaaaagtctctggttggtgttggtgaacattgtgcagggttcggtgttgatgaagaaaagtgtggtgtattggatggatcatataatgtttcttgtctttgtagtactgatgcctttctaggttggtcttatgacacttgcgtcagtaacaaccgttgtaatcgactcggaccgatg

SEQ ID NO: 7296 - DNA, 203 bp, Artificial sequence
  synthetic
ggcgcgccagtcctgtctgttctaattatgcagcttgccatgacttattgtcagagtatggcactttttgtgataatattaatagtattttagatgaagttaatggtttacttgatactactcaattgcatgtagctgatactcttatgcaaggtgtcacacttagctccaatcttaatactaatttgcgactcggaccgatg

SEQ ID NO: 7297 - DNA, 203 bp, Artificial sequence
  synthetic
ggcgcgccagtcctcttctttgtgtacaatcctttaatggtattaaagttttgcctcctattttgtctgaatctcaaatttctggttacaccacagccgctactgttgctgctatgtttccaccatggtcagcagcagctggcataccattttctcttaatgtacaatatagaattaatggtttgggtcgactcggaccgatg

SEQ ID NO: 7298 - DNA, 203 bp, Artificial sequence
  synthetic
ggcgcgccagtcctgagaaggttaatgagtgtgttaaaagtcaatctcctcgtattaatttttgtggtaatggtaatcatattttgtcattagttcaaaatgctccttatggtttgttgtttatgcattttagttataaacctatttcttttaaaactgttttagtaagtcctggtttgtgtatatcacgactcggaccgatg

SEQ ID NO: 7299 - DNA, 203 bp, Artificial sequence
  synthetic
ggcgcgccagtcctgtcaacctattgttggttactgtattgtacctttaaatgtttggtgtcgcaagtttggcaaatttgcttctcactttacattacgtagtcacgatatttcccatagtaataattttggtgttgtaactagttttactacttatggtaatactgtttctgaggctgtgtctagatcgactcggaccgatg

SEQ ID NO: 7300 - DNA, 203 bp, Artificial sequence
  synthetic
ggcgcgccagtcctatggccccaaggtctccggctttgaagactttctggaggattgtgccattacaacaggcacaggcagctttgaagcgcatccggaaagtggtgggttcgctgttgcagaatcttcaaaaaagaggaaaacgcagatcggctgtggattggacaggagcggtcacgatggtgattcgactcggaccgatg

SEQ ID NO: 7301 - DNA, 203 bp, Artificial sequence
  synthetic
ggcgcgccagtcctcatgccaaattgacggataccaaagtggcggcgaggtgcccaacgactgggccagcaaccctccctgaagagcaccagaagaacatggtgtgcaaaagagatcagagtgataggggatgggggaaccactgcgggctgttcggaaaaggtagcattgttggatgtacgaagtttcgactcggaccgatg

SEQ ID NO: 7302 - DNA, 203 bp, Artificial sequence
  synthetic
ggcgcgccagtcctgattgcgaggtcaacaagaaagccactgggagagtgtttgacatcaccaagattgtgtacacggtgaaggtggaaccacacactggcacatatgtggcagcaaatgagacaaacagcgacagaaagtcagttgagttcaccgcacagtcggaaaagaagaccatctccttggggcgactcggaccgatg

SEQ ID NO: 7303 - DNA, 203 bp, Artificial sequence
  synthetic
ggcgcgccagtcctagctatggtgaggttggactctcttgcagggtgaattctggcattgacgttgaccaaaccgtggtgctggagttggaaggccaggcactccaccccaaggggtgggctgtgcacaaagactggtttggagacctggcactaccatggaaacaccatgaggcggagatctgggaacgactcggaccgatg

SEQ ID NO: 7304 - DNA, 203 bp, Artificial sequence
  synthetic
ggcgcgccagtcctgtcgatgtggcaaatctcataacccctaacccaaccattgagaatgaagggggtgggtacattgagatgcaacttcctcccggggacaacacaatttatatcggcaatcttcaccaagcatggttccagaaagggagctccataggcagagtgtttgaaaagacacgcaaggggcgactcggaccgatg

SEQ ID NO: 7305 - DNA, 203 bp, Artificial sequence
  synthetic
ggcgcgccagtcctatccagagactggcagcagttggagagcacgcatgggactttggttccgtgggcggcttctttgggtcaattggaaaggcagtgcacatggtcctggggggactgttcggtgtcttgtttggaggcattgggtttatccccaagatgctgatgggagctgccttgatttggcttcgactcggaccgatg

SEQ ID NO: 7306 - DNA, 203 bp, Artificial sequence
  synthetic
ggcgcgccagtcctggaataaacatgaaaaacaccaccttgtctcttagctttctggccacaggtggactcatcctgatgatgacacttggcgttggggcagaccaaggatgttccattgacagtgagagaatggagctcagatgtggagcaggactggccgtttggaaggaaaccgcagagtggtatcgactcggaccgatg

SEQ ID NO: 7307 - DNA, 203 bp, Artificial sequence
  synthetic
ggcgcgccagtcctgacggctatgcgttccaccctgagtccccgggagagctggctgcagcgctcgtggaggcagccaagaacaacgtgtgtggaatagtgccccaaaacaggctagaactggcaatgtggagatcgcgcagagatgagatcaatctacacctcgctgaagcagaggccaatctcacacgactcggaccgatg

SEQ ID NO: 7308 - DNA, 203 bp, Artificial sequence
  synthetic
ggcgcgccagtcctaagtccagaggcaatgcaaccggtttctatattcaggagctgcatgtcatggacttgcgtaactgcacttggccagatgagtacaccattgacaacaagggggtgatagagtcacacctgtttctcccggtgacgctggctgggccgagaaccatgtacaaccagatcccaggacgactcggaccgatg

SEQ ID NO: 7309 - DNA, 203 bp, Artificial sequence
  synthetic
ggcgcgccagtccttatgctgtgcagctgtctgggccgtggaatcaaacacctctgcgcgtgaaacgagaaccatgccctgggacagaggtcaagattgaccctggatgtcctggcagaggagcttctgtgcgtagcaccacggaaagcgggaaggtgattccggagtggtgctgtagaacttgcacacgactcggaccgatg

SEQ ID NO: 7310 - DNA, 203 bp, Artificial sequence
  synthetic
ggcgcgccagtccttactgggcggacatcagagaggatgtagtgtgctatgggggtgcctggaacctgccaaccaagtgggagggcgaggtggtacagcttcatgctttccctccgggaagggctcatgagatcaagcaatgtcagcctggcagactcaacctgggtaatgggagggtcatgggagcgcgactcggaccgatg

SEQ ID NO: 7311 - DNA, 203 bp, Artificial sequence
  synthetic
ggcgcgccagtcctggatggatgtcaaaaggagagatcacggtgattgacatgcatccaggtgcggggaagactcatagagtcctccctgaactcatcaggcaatgcatagacaggaggcttcgaaccctgattctggccccaacaagggtggttttaagggagatggagcaggctctgaaaggcaagcgactcggaccgatg

SEQ ID NO: 7312 - DNA, 203 bp, Artificial sequence
  synthetic
ggcgcgccagtcctatgggggccaactttgatgtcgacagggtgatcgatggcaggaataacatcaagcctgaggaaattgacggagcagtcgaactcattggggtcaggaaagtcaccactgcgtcggctgcccagagaagaggcagggtggggcgcaaggaaggaagaagggaccggtatgtgtaccgactcggaccgatg

SEQ ID NO: 7313 - DNA, 203 bp, Artificial sequence
  synthetic
ggcgcgccagtccttctggccagtgtgatgatgatgacagcatgctggtacagtggaaagaagcccaaatgctgttggacaatatcacaacccttaggggaatggcggcagtcttttacggtcctgaacaggaacggatgcccgaggtggctggcttctacaggctcaccgaggagaagaggaagtaccgactcggaccgatg

SEQ ID NO: 7314 - DNA, 203 bp, Artificial sequence
  synthetic
ggcgcgccagtcctttccggcatctcttgtcacagaatgatttcacaccctggctggcatggcatgtggctaagaacacagcgggaccgattgaccgaagttggacttgggagggaccggagggcaacgctatagagggccagaatggtgaggtcgtccggttcagaactcctggtggcgctgagaaacgactcggaccgatg

SEQ ID NO: 7315 - DNA, 203 bp, Artificial sequence
  synthetic
ggcgcgccagtcctatcttgaaaccaacctggagagacatgcgcatgttccgagaggggcgtgacatccgagagtttgtccagtatgcaagttgccgcaggggagcgtctgaactgctgatgggaatgagtgaagtcccaggtttgatgaggaacagagtgctgggggcttatgacgtgttctacacccgactcggaccgatg

SEQ ID NO: 7316 - DNA, 203 bp, Artificial sequence
  synthetic
ggcgcgccagtcctctcatttctttgtgtctcatgtgggctgggggcatgtcttatggacatatggcgggggtttctctcgtcttttatgctttcctgactgtgatacagcccgaacctggcaaacagagaagcgccgatgacaacagattggcgttcacactccttgtcctgggattggtaattggacgactcggaccgatg

SEQ ID NO: 7317 - DNA, 203 bp, Artificial sequence
  synthetic
ggcgcgccagtcctacagtggcagccaatgagcttggttggcttgagaggaccaaggctgacttaggccagcttctctggaaacccacggaggaagccgataggggagggtggaccgagtggaccaacattgacattcagccggcacgttcgtggggaacttatgtgcttgtggtgtctctcttttcgcgactcggaccgatg

SEQ ID NO: 7318 - DNA, 203 bp, Artificial sequence
  synthetic
ggcgcgccagtcctccatacatgattcatcagatgcagaccagagtccaacgtctggtcaacagtgccgtggtgtcgggtggccagaccatccgtgagataggagggggagcacctttctttggagtgaaggggcacgtcatcacaatggggataagttccctagttggggcaactccactatcactgcgactcggaccgatg

SEQ ID NO: 7319 - DNA, 203 bp, Artificial sequence
  synthetic
ggcgcgccagtcctgaaagaaagctcagcctcatgcttgcagtcggcctgggcgccctggctgtgtccctcaacagaactgcgtgggccttggcagaggctggggcgctgatggtggcagctgtgggtcaactggtgtcaaccgaaggcgagttttggtggacaatgccggtggcgtgcggaatggcacgactcggaccgatg

SEQ ID NO: 7320 - DNA, 203 bp, Artificial sequence
  synthetic
ggcgcgccagtcctttagaaaccgacaggaccaaggctagggaactcttgagacgtggagagacaaacatggggttggccgtctcacgcggaactgccaagttggcgtggctagaggaaagaggttatgccaccgtcaagggggaggtcgtagacctgggctgtggacgcggtggatggtcatactaccgactcggaccgatg

SEQ ID NO: 7321 - DNA, 203 bp, Artificial sequence
  synthetic
ggcgcgccagtcctgccgcttccagacccaccgtattgagtgtgaaggcatacaccatcggagggaaaggacacgaggaaccccgtatggtcaccagcttgggatggaacctcgtgaagttcagaagtggaatggatgtgttttctatggaggcccacagagcagacacggtgatgtgtgacattggacgactcggaccgatg

SEQ ID NO: 7322 - DNA, 203 bp, Artificial sequence
  synthetic
ggcgcgccagtcctgagagtgatccggacccagagaaggaaggggagagaagccgcagagtgatccagctcatgagccgctggaagcagcggaacccagacgcctcctgtgtattcaaggtgctggctccttacagacctgatgtcattgaggcactccacagattccagctgctgtggggtggggggcgactcggaccgatg

SEQ ID NO: 7323 - DNA, 203 bp, Artificial sequence
  synthetic
ggcgcgccagtcctctggtgagaaaccctttctccagaaactcgacccatgagatgtactacacgacgggggtttgtggaaacatcatcaatgctgtcaatgtgacatcaaaacgactgttgagtaggtatggtgatgctgctggacccgtccttgttcctgaggtagatttgggaactggaactcgtcgactcggaccgatg

SEQ ID NO: 7324 - DNA, 203 bp, Artificial sequence
  synthetic
ggcgcgccagtccttgcgtggcactggccagtgacgtggtgaagccaaaggatgtggaagagaggatcaacgccctaaagagacagtactcagacacgtggcatgtggacaaagaacacccatatcggacatggcagtattgggggagttaccgaacagcggccacaggctcggcggcgtccttgatccgactcggaccgatg

SEQ ID NO: 7325 - DNA, 203 bp, Artificial sequence
  synthetic
ggcgcgccagtcctacactcacgaacgtgaaggtacagctcatcaggatgatggaaggtgagggcgtcattgggccctctgacgcacaggatcctaggctccgccgagttgaacaatggcttcatgcccacggggcagaaaggttgactcggatgttggtcagtggtgacgactgtgtggtgagaccccgactcggaccgatg

SEQ ID NO: 7326 - DNA, 203 bp, Artificial sequence
  synthetic
ggcgcgccagtcctattgatgacaggttcggcacggccctctacttcctgaatgacatggcgaaagtgagaaaggacatcggcgagtgggagccatccatcggtttcgctaggtgggaggaagttccattttgctcccaccacttccatgagcttgccatgaaggatggaagaacgctgatagtgccacgactcggaccgatg

SEQ ID NO: 7327 - DNA, 203 bp, Artificial sequence
  synthetic
ggcgcgccagtcctgatatgttgtgcgcgtcattgattggccataccgagagggctgactgggcacggcacatatggactggggtcatgaaggttcgagccatgataggtagggagacgtatgtggactacctgtcgcacatggacaggcatgaggccccatggctccctgtctacgaaagctccatccgactcggaccgatg

SEQ ID NO: 7328 - DNA, 203 bp, Artificial sequence
  synthetic
ggcgcgccagtcctgtggaccagtgaaaactttgtgagactgaccatccctcaaggccgagtgggatgcgtatgaaggcccctggagagatccaggaggggggagagaggaaaattggcagcctctctcaggagatttcctccccctataccaaattccccaggaatctggggggcggttcttgttctcgactcggaccgatg

SEQ ID NO: 7329 - DNA, 203 bp, Artificial sequence
  synthetic
ggcgcgccagtcctgattttgataatgatgaattgaaacgtttaggaaatttattaaaacaggaagaagaccctcttcatgatcctgactcggaaaatagttatgatgctcctccccctcctcatccgtccctacattcgtcgcgtccctcagataatgatgatttactttcatctacagatgaggctcgactcggaccgatg

SEQ ID NO: 7330 - DNA, 203 bp, Artificial sequence
  synthetic
ggcgcgccagtccttcttaacggtcttgtgattgctgatgagaaaattcaaacgcattttccttataattatttaggtttctccttgtatcctcgtacctataacacccaactagtaaagctgcaaactgatcatttgaaaactctaaatgattttcagaaacttttaggagatattaactggatccgcgactcggaccgatg

SEQ ID NO: 7331 - DNA, 203 bp, Artificial sequence
  synthetic
ggcgcgccagtcctggagcctccctttatctgtgttccttatgctttagaacaacaggattggctttttcaattttcagataattgggccatagcatttgcgaattaccccggacgaattattcatcattaccctcctgataaattattgcaatttgctagctctcatgcttttatttttccaaaaatcgactcggaccgatg

SEQ ID NO: 7332 - DNA, 203 bp, Artificial sequence
  synthetic
ggcgcgccagtcctagttcgccgacaacctattcctaacgctacacttatatttacagacggctcttccaatgggactgcagccttaattattaatcatcaaacttattatacacaaaccagtttctcttctgctcaagttgtggaattatttgcagtccaccaagcattgctaacagtacctacttccgactcggaccgatg

SEQ ID NO: 7333 - DNA, 203 bp, Artificial sequence
  synthetic
ggcgcgccagtcctatcttgttctacttgtcctcaattctttgtccttcctcaatatggtgtcaaccctcgaggtttacgccctaatcatctctggcaaacagacgttactcacattcctcaatttgggcgtctgaaatatgttcatgtttcaatcgacaccttttccaactttctcatggcttccctcgactcggaccgatg

SEQ ID NO: 7334 - DNA, 203 bp, Artificial sequence
  synthetic
ggcgcgccagtcctttggggagaacgatcctcatgcaaaaaaccacttgtacgatggaaagatccacttaccaatctgtggtatgggcctgaccctgtattaatatggggacgagggcatgtttgtgtttttccacaggatgccgaagcaccgcgctggattccggaaaggctggtacgcgcggcagacgactcggaccgatg

SEQ ID NO: 7335 - DNA, 203 bp, Artificial sequence
  synthetic
ggcgcgccagtcctccaccctcaggaagtcttaagagcttttggagctcaaatgtgttttggttttgcaacatggcttaaaaagcaggaaatctgattatgtaagaaaccagtaattatgtaagtaaatgatctcaagttacttaacttgcttatatatactgctgcacaataaagcaaggtatcagccgactcggaccgatg

SEQ ID NO: 7336 - DNA, 203 bp, Artificial sequence
  synthetic
ggcgcgccagtcctagagaaacccgtcaagggcgactatatcaggctgatatgagttttgtgaaaaattacctgctacctaagctaccactgaatgattgctattatgcatggactaatatagacaggtttgaagcagctgtactgagcgtgcgcaacagacagctttcaggtcctcaaggtgctattcgactcggaccgatg

SEQ ID NO: 7337 - DNA, 203 bp, Artificial sequence
  synthetic
ggcgcgccagtcctgcttggtggtaagtgtgattttatgttttctttgattttcttgtagacttgttcctgacgctgctacaggagcagaagactaacaagcttcatttatttttccaggtaagcaaacatgtctgctgctgatgcttatcgtccaggtggcaagctgcctctagatgagctaatgcacgactcggaccgatg

SEQ ID NO: 7338 - DNA, 203 bp, Artificial sequence
  synthetic
ggcgcgccagtcctaagaatgaatagagcaattcctgtgggaccggaaccttcaagtcaagccaaccgcggaggggggccatatcaaactcactttgctataggaataatgtactccaaggctttccaaggcttgcttagatttgctaatgctttacctcctgaattgagccctgtaaaacagcttgtcgactcggaccgatg

SEQ ID NO: 7339 - DNA, 203 bp, Artificial sequence
  synthetic
ggcgcgccagtccttaatcagttagaaaattataggcgtaagacatctgataccagggtatggtacagagtgtacttagacatgacaagacttctaatttctgtggctcctccaggagcagcaaacaaactcagacaggcagcagcaggtataactcactcaaaagcccccaatgctgaaagcctgagcgactcggaccgatg

SEQ ID NO: 7340 - DNA, 203 bp, Artificial sequence
  synthetic
ggcgcgccagtcctaggcattgtgcggttcgcagctgctgcttttgtacctactgtagaaaatattgatagattttttgaagactcgctaacgaactttgccaaagaagacttagacacctggcaacaactccacgagcagtttatcaaactctttcaccctccagatgtcggagtccaccttgttagcgactcggaccgatg

SEQ ID NO: 7341 - DNA, 203 bp, Artificial sequence
  synthetic
ggcgcgccagtccttgctgatgttcaactttctcaggtcctaccgcccgctcctccttcttcggaccaacaaccggcttattccgcaggagagccctcagccaagaaggcgcggattggtacccctgacgagtctgacccggccttgcttctgcagcctcataccaatacaatgtccgtggaaccagccgactcggaccgatg

SEQ ID NO: 7342 - DNA, 203 bp, Artificial sequence
  synthetic
ggcgcgccagtcctcaggttagctattatgacaggtgttgataatgatgggactgccatttggaaacgccctgaaggcatggatgttggcagactcccattaaattatgttccagggccagctctaatgatgccaacagacacccaaattagaaacacaactttcagagatcctgtggctattggaaacgactcggaccgatg

SEQ ID NO: 7343 - DNA, 203 bp, Artificial sequence
  synthetic
ggcgcgccagtccttcctgctacaagtgacaggtatagtgtagctcctttagtccatcaaccatggtctgtccgtacagaagaatggctagcaaacaaaacagactatgctgttcataattatttaggaggtgttgcatacactagaagaaagcatgaagagtcttatgataaacatgaggaggaccgcgactcggaccgatg

SEQ ID NO: 7344 - DNA, 203 bp, Artificial sequence
  synthetic
ggcgcgccagtccttgctgtttggaacccaaatcctttatcatatgattgccaaatatggactaaaattcctaatacagaatgtcatttttttgctcaatatcctcttttgggaggttggggagttcttactcctcctccaatgatttttgtgaagctcaggtcacaaccaggccctcctagtccaggcgactcggaccgatg

SEQ ID NO: 7345 - DNA, 203 bp, Artificial sequence
  synthetic
ggcgcgccagtcctccaagaagtacagttctaagacgaaccgcggcacgaaacgtgcgccgcgcgatcaggaggttgggacgggtgcgcaagaaagtactcgtaatgacgttgcttggtatgctcgttatcctcatattttggaggaagctacgcgcctgccttttgcttatcctattgggcagtattcgactcggaccgatg

SEQ ID NO: 7346 - DNA, 203 bp, Artificial sequence
  synthetic
ggcgcgccagtcctatgatactggatactctgttgcaagcgctactgagtggtctaagtacgtagatactagcctgaccattcctggtgtgatgtgtgttaactttacacccaccccgggtgaatcttataataagaattcacctatcaatatagctgcacagaatgtctacacgtatgtgcggcacacgactcggaccgatg

SEQ ID NO: 7347 - DNA, 203 bp, Artificial sequence
  synthetic
ggcgcgccagtcctctgaagatgttttcgctaaccaggcgcaatgggaatacttcgtcaacatggtggcatacagggctggagcgttcgctgctcctgcaagtatgacttattatgagcgtcacgcgtggatgtccaatggtctgtacgtggatcaagatgtcacacgagctcaaatctacatgttcacgactcggaccgatg

SEQ ID NO: 7348 - DNA, 203 bp, Artificial sequence
  synthetic
ggcgcgccagtccttctttaaggcgttcggtgctgatggtctggttaaactgctggctgttgacagcactaccatgacattgcccacatacgatcccctcatcctggctcaaattcatagtgctagggctgtgggcgcacctatcctggaaacttccactcttactggtttcccaggccgtcagtggccgactcggaccgatg

SEQ ID NO: 7349 - DNA, 203 bp, Artificial sequence
  synthetic
ggcgcgccagtcctattgctcaggagtcgtttggtccctttgctcagctgaatgattggaccatccttacgggtgaaactctggctcggatgcatgaagtatgtgtcaccagcatgttcgatgttcctcagatgggcttcaacaaataaatgttggcctggggtgtgtgtgcgttaagcacacacctccgactcggaccgatg

SEQ ID NO: 7350 - DNA, 203 bp, Artificial sequence
  synthetic
ggcgcgccagtcctgtagtgtggatgtttcctttcgctgttaatattcgtgagctgcaggtctatcaaccactaatccttacgttccaaagattgggattggtgccagcgtgggttagcatggaagctgttgataggcgtatcactaagatgtttgatacaaaaggaccacgtgatgtggtggtctgtcgactcggaccgatg

SEQ ID NO: 7351 - DNA, 203 bp, Artificial sequence
  synthetic
ggcgcgccagtcctacagacttctccaagttcgaccagcattttaatccaacgtgccagagtgtagccaaagagctgttggctgatctgcttacaggtcaggaagccgtcgactggttagaacgtgtgttcccaattaaatatgctatacccttagcttataattggggtgaaatcaggtatggtatccgactcggaccgatg

SEQ ID NO: 7352 - DNA, 203 bp, Artificial sequence
  synthetic
ggcgcgccagtcctcatggaatgggatcgggttctggcggcactaacgccgatgagacgttggtgcatagggtgctgcaacacgaagcagcgattagccaccataccactcttaacccaaattcgcagtgtctgggtgacgatggcgttttaacttacccaggtatatctgcggaggatgtaatgcaacgactcggaccgatg

SEQ ID NO: 7353 - DNA, 203 bp, Artificial sequence
  synthetic
ggcgcgccagtccttcatactcgcgccacggtctcgatatgaacctagagaaacagtatgtgagcaaacaagactgcacatatttacgcaggtggcatcatacagattatcgcgtagacggcatgtgtgtgggagtgtactcaaccatgcgggcgttaggcaggttggctatgcaagagcgctactatcgactcggaccgatg

SEQ ID NO: 7354 - DNA, 203 bp, Artificial sequence
  synthetic
ggcgcgccagtcctgacccagacgtatggggtgagaagatggtcaccctacgttatctatccatcattgagaatgtgaagtatcatcctctaaaggaagagttcctggacttttgcatcaaaggggataaaactagacttggactaggaatcccaggctttctggacaacatcgctggtgaggcccagcgactcggaccgatg

SEQ ID NO: 7355 - DNA, 203 bp, Artificial sequence
  synthetic
ggcgcgccagtccttatcgacatgatgccagatttccttggctacaccaagtcgttgcagtatgatggtgatctgcgacgtaatgctgctgccggtattgaaaactggtgggttgttcaagcattgaaatcgagacgctgacgatcgagatggtgcagcaaaccattgggactaacagtcccaactgccgactcggaccgatg

SEQ ID NO: 7356 - DNA, 203 bp, Artificial sequence
  synthetic
ggcgcgccagtcctgaaaaggggaaatggacaacgaacacagagactggagcaccccaactcaatccgattgatggaccactacctgaggataatgagccgagtgggtatgcacaaacagattgtgtattggaagcaatggctttccttgaagaatcccacccagggatctttgaaaactcgtgtcttcgactcggaccgatg

SEQ ID NO: 7357 - DNA, 203 bp, Artificial sequence
  synthetic
ggcgcgccagtcctaacacaatgacaaaagacgcagaaagaggcaaattgaagaggcgggcaattgcaacacccgggatgcaaatcagaggattcgtgtactttgtcgaaacactagcgaggagtatctgtgagaaacttgagcaatctggactccccgtcggagggaatgaaaagaaggctaaattgcgactcggaccgatg

SEQ ID NO: 7358 - DNA, 203 bp, Artificial sequence
  synthetic
ggcgcgccagtcctggcacagcctcattgagtcctggaatgatgatgggcatgttcaatatgctgagtacagtcttaggagtttcaatcctgaatcttgggcagaagaggtacaccaaaaccacatactggtgggacggactccaatcctctgatgatttcgctctcatagtgaatgcaccaaatcatcgactcggaccgatg

SEQ ID NO: 7359 - DNA, 203 bp, Artificial sequence
  synthetic
ggcgcgccagtcctgagggaatagaagcaggggtggataggttctataggacttgcaaactagttggaatcaatatgaccaagaagaagtcttacataaatcggacaggaacatgtgaattcacaagcttcttctaccgctatgggttcgtagccaacttcagtatggagctgcccagctttggagtgcgactcggaccgatg

SEQ ID NO: 7360 - DNA, 203 bp, Artificial sequence
  synthetic
ggcgcgccagtccttcattcgagctgaagaagctgtgggagcagacccgctcaaaggcaggactgttggtttcagatggaggaccaaacccatacaatatccggaatctccacattccggaggctggcttgaagtgggaattgatggatgaagactaccagggcagactgtgtaatcctctgaacccgcgactcggaccgatg

SEQ ID NO: 7361 - DNA, 203 bp, Artificial sequence
  synthetic
ggcgcgccagtcctttgctgatggatgcccttaaattaagcatcgaagacccgagtcatgagggggaggggataccgctatatgatgcaatcaaatgcatgaaaacatttttcggctggaaagagcccaacattgtaaaaccacatgaaaaaggcataaaccccaattacctcctggcttggaagcagcgactcggaccgatg

SEQ ID NO: 7362 - DNA, 203 bp, Artificial sequence
  synthetic
ggcgcgccagtcctggctccatcgggaaggtgtgcagaaccttactggctaaatctgttttcaacagtctatatgcatctccacaactcgaggggttttcagctgaatcaagaaaattgcttctcattgttcaggcacttagggacaacctggaacctggaaccttcgatcttggggggctatatgaacgactcggaccgatg

SEQ ID NO: 7363 - DNA, 203 bp, Artificial sequence
  synthetic
ggcgcgccagtcctgcatatgagagaatgtgcaacatcctcaaagggaaattccaaacagcagcacaaagagcaatgatggatcaggtacgggaaagcagaaatcctgggaatgctgagattgaagatctcatatttctggcacggtctgcactcatcctgagaggatcagtggcccacaagtcctgccgactcggaccgatg

SEQ ID NO: 7364 - DNA, 203 bp, Artificial sequence
  synthetic
ggcgcgccagtcctgggcatatggagtaaaagggttttcatttaaatacggcaatggtgtttggatcgggagaaccaaaagcactaattccaggagcggctttgaaatgatttgggatccaaatgggtggactggaacggacagtagcttctcggtgaaacaagatatcgtagcaataactgattggtcgactcggaccgatg

SEQ ID NO: 7365 - DNA, 203 bp, Artificial sequence
  synthetic
ggcgcgccagtccttctgggttgagctaatcagagggcggcccaaagagagcacaatttggactagtgggagcagcatatctttttgtggtgtaaatagtgacactgtgggttggtcttggccagacgatgccgagttgccattcaccattgacaagtagtttgttcaaaaaactccttgtttctactcgactcggaccgatg

SEQ ID NO: 7366 - DNA, 203 bp, Artificial sequence
  synthetic
ggcgcgccagtcctagaagaaaaaagagaggactatttggagctatagcaggttttatagagggaggatggcagggaatggtagatggttggtatgggtaccaccatagcaatgagcaggggagtggatacgctgcagacaaagaatccactcaaaaggcaatagatggagtcaccaataaggtcaaccgactcggaccgatg

SEQ ID NO: 7367 - DNA, 203 bp, Artificial sequence
  synthetic
ggcgcgccagtcctgactcaaatgtcaagaacctttatgacaaggtccgactacagcttagggataatgcaaaggagctgggtaatggttgtttcgagttctatcacaaatgtgataatgaatgtatggaaagtgtaaaaaacggaacgtatgactacccgcagtattcagaagaagcaagactaaaccgactcggaccgatg

SEQ ID NO: 7368 - DNA, 203 bp, Artificial sequence
  synthetic
ggcgcgccagtcctattccatggggctaaggaggtcgcactcagctactcaaccggtgcacttgccagttgtatgggtctcatatacaacaggatgggaacggtgaccacagaagtggcttttggcctagtgtgtgccacttgtgagcagattgcagattcacagcatcggtctcacagacagatggccgactcggaccgatg

SEQ ID NO: 7369 - DNA, 203 bp, Artificial sequence
  synthetic
ggcgcgccagtcctcttcaaatgcatttatcgtcgccttaaatacggtttgaaaagagggccttctacggaaggggtacctgagtctatgagggaagagtatcggcaggaacagcagagtgctgtggatgttgacgatggtcattttgtcaacatagagctggagtaaaaaactaccttgtttctactcgactcggaccgatg

SEQ ID NO: 7370 - DNA, 203 bp, Artificial sequence
  synthetic
ggcgcgccagtcctaaattgaagtcactaatgctactgaactggttcagagttcctcaacaggtggaatatgcgacagtcctcatcagatccttgatggagaaaactgcacactaatagatgctctattgggagaccctcagtgtgatggcttccaaaataagaaatgggacctttttgttgaacgcacgactcggaccgatg

SEQ ID NO: 7371 - DNA, 203 bp, Artificial sequence
  synthetic
ggcgcgccagtccttaccagagaaacaaactagaggcatatttggcgcaatcgcgggtttcatagaaaatggttgggagggaatggtagacggttggtacggtttcaggcatcaaaattctgagggaacaggacaagcagcagatctcaaaagcactcaagcagcaatcaaccaaatcaatgggaagccgactcggaccgatg

SEQ ID NO: 7372 - DNA, 203 bp, Artificial sequence
  synthetic
ggcgcgccagtccttaactgactcagaaatgaacaaactgtttgaaagaacaaagaagcaactgagggaaaatgctgaggatatgggcaatggttgtttcaaaatataccacaaatgtgacaatgcctgcatagggtcaatcagaaatggaacttatgaccatgatgtatacagagatgaagcattaacgactcggaccgatg

SEQ ID NO: 7373 - DNA, 203 bp, Artificial sequence
  synthetic
ggcgcgccagtccttggtggggacatctgggtgacaagagaaccttatgtgtcatgcgaccctgacaagtgttaccaatttgcccttggacagggaacaacactaaacaacgtgcattcaaatgacacagtacatgataggaccccttatcggaccctattgatgaatgaattaggtgttccatttcacgactcggaccgatg

SEQ ID NO: 7374 - DNA, 203 bp, Artificial sequence
  synthetic
ggcgcgccagtcctggagtcagaatgcgtttgtatcaatggaacttgtacagtagtaatgactgatgggagtgcttcaggaaaagctgatactaaaatactattcattgaggaggggaaaatcattcatactagcacattgtcaggaagtgctcagcatgtcgaggagtgctcctgctatcctcgatacgactcggaccgatg

SEQ ID NO: 7375 - DNA, 203 bp, Artificial sequence
  synthetic
ggcgcgccagtccttgccttgagaattttagagcctatgtggatggattcgaaccgaacggctgcattgagggcaagctttctcaaatgtccaaagaagtgaatgccaaaattgaaccttttctgaagacaacaccaagaccaatcaaacttcctaatggacctccttgttatcagcggtccaaattccgactcggaccgatg

SEQ ID NO: 7376 - DNA, 203 bp, Artificial sequence
  synthetic
ggcgcgccagtcctgtattgtcagaattgcaggacattgaaaatgaggagaagatcccaaggactaaaaacatgaagaaaacgagtcaactaaagtgggctcttggtgaaaacatggcaccagagaaagtagactttgacaactgcagagacataagcgatttgaagcaatatgatagtgacgaacctcgactcggaccgatg

SEQ ID NO: 7377 - DNA, 203 bp, Artificial sequence
  synthetic
ggcgcgccagtcctgagaaggggaagtggacgacaaatacagaaactggggcaccccaactcaacccaattgatggaccactacctgaggataatgagccaagtggatatgcacaaacagactgtgtcctggaggctatggccttccttgaagaatcccacccaggtatctttgagaactcatgccttcgactcggaccgatg

SEQ ID NO: 7378 - DNA, 203 bp, Artificial sequence
  synthetic
ggcgcgccagtcctggcacagcatcattgagccctgggatgatgatgggcatgttcaacatgctaagtacggttttaggagtctcggtactgaatcttgggcaaaagaaatacaccaagacaacatactggtgggatgggctccaatcctccgacgattttgccctcatagtgaatgcaccaaatcatcgactcggaccgatg

SEQ ID NO: 7379 - DNA, 203 bp, Artificial sequence
  synthetic
ggcgcgccagtccttaccaaaagtgctgcaacttgttcgagaaatttttccctagtagttcatataggagaccgattggaatttctagcatggtggaggccatggtgtctagggcccggattgatgccagaattgacttcgagtctggacggattaagaaggaagagttctctgagatcatgaagatccgactcggaccgatg

SEQ ID NO: 7380 - DNA, 203 bp, Artificial sequence
  synthetic
ggcgcgccagtcctgttgtttttcccaatgaagtgggagccaggatactaacatcagaatcgcaattaacaataactaaagagaaaaaagaagaactccgagattgcaaaatttctcccttgatggttgcatacatgttagagagagaacttgtccgaaaaacaagatttctcccagttgctggcggacgactcggaccgatg

SEQ ID NO: 7381 - DNA, 203 bp, Artificial sequence
  synthetic
ggcgcgccagtcctagtgtgatgggaatggttggagtattaccagatatgactccaagcacagagatgtcaatgagaggaataagagtcagcaaaatgggtgtggatgaatactccagtacagagagggtggtggttagcattgatcggtttttgagagttcgagaccaacgcgggaatgtattattgcgactcggaccgatg

SEQ ID NO: 7382 - DNA, 203 bp, Artificial sequence
  synthetic
ggcgcgccagtccttccgccgtcttgagagggtttctcattataggtaaggaagacagaagatacggaccagcattaagcatcaatgaactgagtaaccttgcaaaaggggaaaaggctaatgtgctaatcgggcaaggagacgtggtgttggtaatgaaacgaaaacgggactctagcatacttactcgactcggaccgatg

SEQ ID NO: 7383 - DNA, 203 bp, Artificial sequence
  synthetic
ggcgcgccagtcctagggatcatgaagacagaaggaacacttgagaactgtgaaaccaaatgccaaactcctttgggagcaataaatacaacactaccttttcacaatgtccacccactgacaataggtgaatgccccaaatatgtaaaatcggagaaattggtcttagcaacaggactaaggaatgtcgactcggaccgatg

SEQ ID NO: 7384 - DNA, 203 bp, Artificial sequence
  synthetic
ggcgcgccagtcctcagcatgggggtttatcaaatccttgccatttatgctacagtagcaggttctctgtcactggcaatcatgatggctgggatctctttctggatgtgctccaacgggtctctgcagtgcagaatctgcatatgattgtaagtcattttataattaaaaacacccttgtttcctgacgactcggaccgatg

SEQ ID NO: 7385 - DNA, 203 bp, Artificial sequence
  synthetic
ggcgcgccagtccttttcaaatgcatttatcgcttctttaaacacggtctgaaaagagggccttctacggaaggagtacctgagtctatgagggaagaatatcgaaaggaacagcagagtgctgtggatgctgacgatagtcattttgtcagcatagagctggagtaaaaaactaccttgtttctactcgactcggaccgatg

SEQ ID NO: 7386 - DNA, 203 bp, Artificial sequence
  synthetic
ggcgcgccagtcctgtacccttgcaaaaggagaaaaggctaatgtactaattgggcaaggagacgtggtgttggtaatgaaacgaaaacgggactctagcatacttactgacagccagacagcgaccaaaagaattcggatggccatcaattaatgttgaatagtttaaaaacgaccttgtttctactcgactcggaccgatg

SEQ ID NO: 7387 - DNA, 203 bp, Artificial sequence
  synthetic
ggcgcgccagtcctaacagcttaacaatagagagaatggtgctctctgcttttgacgagagaaggaataaatatctggaagaacatcccagcgcggggaaggatcctaagaaaactggaggacccatatacaagagagtagatggaaagtggatgagggaactcgtcctttatgacaaagaagaaatacgactcggaccgatg

SEQ ID NO: 7388 - DNA, 203 bp, Artificial sequence
  synthetic
ggcgcgccagtcctaggcgaatctggcgccaagccaataatggtgatgatgcaacagctgggctgactcacatgatgatctggcattccaatttgaatgatacaacataccagaggacaagagctcttgttcgcaccggaatggatcccaggatgtgctctttgatgcagggttcgactctccctaggcgactcggaccgatg

SEQ ID NO: 7389 - DNA, 203 bp, Artificial sequence
  synthetic
ggcgcgccagtcctgctgcacaaagagcaatgatggatcaagtgagagaaagccggaacccaggaaatgctgagatcgaagatctaatctttctggcacggtctgcactcatattgagagggtcagttgctcacaaatcttgtctgcccgcctgtgtgtatggacctgccatagccagtgggtacaaccgactcggaccgatg

SEQ ID NO: 7390 - DNA, 203 bp, Artificial sequence
  synthetic
ggcgcgccagtccttgtgtagcatggtccagctcaagttgtcacgatggaaaagcatggttgcatgtttgtgtcactggggatgataaaaatgcaactgctagcttcatttatgacgggaggcttatggacagtattggttcatggtctcaaaatatcctcaggacccaggagtcggaatgcgtttgtcgactcggaccgatg

SEQ ID NO: 7391 - DNA, 203 bp, Artificial sequence
  synthetic
ggcgcgccagtcctatcaatgggacttgcacagtagtaatgactgatggaagtgcttcaggaagagccgatactagaatactattcattgaagaggggaaaattgtccatattagcccattgtcaggaagtgctcagcatgtagaggagtgttcctgttatcctcgatatcctgacgtcagatgtatccgactcggaccgatg

SEQ ID NO: 7392 - DNA, 203 bp, Artificial sequence
  synthetic
ggcgcgccagtccttctggtattttctctgttgagggcaaaagatgcatcaataggtgcttttatgtggagttgataaggggaaggcaacaggagactagagtatggtggacctcaaacagtattgttgtgttttgtggcacttcaggtacttatggaacaggctcatggcctgatggggcgaacatccgactcggaccgatg

SEQ ID NO: 7393 - DNA, 203 bp, Artificial sequence
  synthetic
ggcgcgccagtcctgaagaattggaatgtataatagatgcatttgaaaaaggaaaagatatcaccattgatttagacgctatgaacggtgaagttaaattagatggaaattcatgttcatataattcaactgctgctcttgtttcgactattttgggtacacctattaaaatgtataatgaatctggacgactcggaccgatg

SEQ ID NO: 7394 - DNA, 203 bp, Artificial sequence
  synthetic
ggcgcgccagtcctatacctgatttaactgaactggtggatgctgaaaagcaaataaaagaaatggctgcacatttacaactagaggctattacggtacaggttgaatcacaatttttagcaggaattagtgctgctgcagctaatgaagcgtttaaatttataattggctcagttttatctaccagacgactcggaccgatg

SEQ ID NO: 7395 - DNA, 203 bp, Artificial sequence
  synthetic
ggcgcgccagtccttcaacaatgttagtggctctatcatctcagcctttcgctacatatcctttagactataaaagatctgtacaaagagcgttacaacttttatcaaatagaacagctcaaatagcagatttaaccagattaatagtatacaattatactacattatctgcttgtatagttatgaatcgactcggaccgatg

SEQ ID NO: 7396 - DNA, 203 bp, Artificial sequence
  synthetic
ggcgcgccagtcctgagaagaccggtgactattcagctataacgaatgcattacttcgggatactccaatcatattgaaaggtgcgattccatatgttactaactcatcagtaattgatgttttatctaaagtggacaccacagtgttcgcaagcattgtaaaagatagggacatttcaaagttaaaacgactcggaccgatg

SEQ ID NO: 7397 - DNA, 203 bp, Artificial sequence
  synthetic
ggcgcgccagtccttgtcagatgctgtatatgatcagattactgtaacgtatagcgataatgtcaatatggaaatgtataaagaatattctgaacgtatagagaatgaaatatttaccattttaaaagataaaataatacatgaagataaaagattagaagaatacgaattatcagcgttactatcaacgactcggaccgatg

SEQ ID NO: 7398 - DNA, 203 bp, Artificial sequence
  synthetic
ggcgcgccagtcctgacgtagaacaagagctatttttatattaccatatcagtattttatcgctcaacattcatttgctgaaataatgcttaactatgcaaaacgtgaaagagagtattcagagttttattctcaagcaaatcaagtattatcgtatggagatgtaactagatatcttgattcaaatacgactcggaccgatg

SEQ ID NO: 7399 - DNA, 203 bp, Artificial sequence
  synthetic
ggcgcgccagtcctaattgcatctgtgaagagaatggtaatgtagataagctagagggctaaacatcttctatgcggcctacataccatgtagcatgaatcacgactgggtttagtccatgcttgcataggggcaaatatgcatgatatggatgatccccagaaggatgaaatgtgaactatgtggctcgactcggaccgatg

SEQ ID NO: 7400 - DNA, 203 bp, Artificial sequence
  synthetic
ggcgcgccagtcctatgacagcaatggatggagagatacctgatggatattgtgtacattctcctacaacataccgaaaaagtgaatactatttactcattgataaacatatcattaaaagacaaaaaataaaagttactaaatccttaatgtataatgccataaatactatatactcagataatgtacgactcggaccgatg

SEQ ID NO: 7401 - DNA, 203 bp, Artificial sequence
  synthetic
ggcgcgccagtcctttaaacgtgacctcggatccatgctagacaccatcaaccggcggccaagcaagaagagaggagggaccagatcgttgctcggattggctgcgctaattggactggcgagttcattgcagttatcaacctatcaggggaaagtgttaatgtcaatcaacaagactgacgctcaaacgactcggaccgatg

SEQ ID NO: 7402 - DNA, 203 bp, Artificial sequence
  synthetic
ggcgcgccagtcctgcgccataaacattcctagtgccaacggagcaaacacttgcattgtgagggctctagatgtgggggtcatgtgcaaagatgacatcacatacctgtgcccagtgctttcagcgggaaatgatcccgaggacattgactgttggtgtgacgtcgaagaggtgtgggtgcactacgcgactcggaccgatg

SEQ ID NO: 7403 - DNA, 203 bp, Artificial sequence
  synthetic
ggcgcgccagtcctgaagctgtgttacagtgatggcaccagagaaaccaacactggacttcaaggtgatgaagatggaggctaccgagttagccactgtgcgtgagtattgttacgaagcaaccttggacacgctgtcaacagtggcaaggtgccctacaacaggagaggctcacaacaccaaaaggacgactcggaccgatg

SEQ ID NO: 7404 - DNA, 203 bp, Artificial sequence
  synthetic
ggcgcgccagtcctgtgacccaacatttgtctgcaaaagagatgttgtggaccgcggatggggtaacggatgtggcctgtttggaaaagggagcattgacacatgcgctaagttcacatgcaaaaacaaggcaacagggaagacgatcttgagagaaaacatcaagtatgaggttgcaatttttgtgccgactcggaccgatg

SEQ ID NO: 7405 - DNA, 203 bp, Artificial sequence
  synthetic
ggcgcgccagtcctatgtcttcactgtcaaggagaagtcatggctagtgaacagggactggtttcacgacttgaaccttccatggacgagccctgccacaactgattggcgcaacagagaaacactggtggaatttgaggaaccgcatgccaccaagcaaactgtagtagccctaggatcgcaagaagcgactcggaccgatg

SEQ ID NO: 7406 - DNA, 203 bp, Artificial sequence
  synthetic
ggcgcgccagtcctgtgccctgcacacagcattggctggagctattccagccactgttagcagctcaaccctaaccttgcaatcagggcatctgaaatgcagagctaagcttgacaaggtcaaaatcaagggaacgacatatggcatgtgtgattctgccttcaccttcagcaagaacccaactgacacgactcggaccgatg

SEQ ID NO: 7407 - DNA, 203 bp, Artificial sequence
  synthetic
ggcgcgccagtcctcagggcacgggacagtgattgtggaactgcagtatactggaagcaacggaccctgccgagttcccatctccgtgactgcaaacctcatggatttgacaccggttggaagactggtcacggtcaatccttttataagcacagggggagcgaacaacaaggtcatgatcgaagttgcgactcggaccgatg

SEQ ID NO: 7408 - DNA, 203 bp, Artificial sequence
  synthetic
ggcgcgccagtcctaaccaccctttggcgattcttacatcgtcgtcggaagaggcaccacccagattaactaccactggcacaaagaaggaagcagcattggtaaggctttggcgaccacatggaaaggagcccaacggctagccgtcttaggggacacagcgtgggactttggatctattggaggagcgactcggaccgatg

SEQ ID NO: 7409 - DNA, 203 bp, Artificial sequence
  synthetic
ggcgcgccagtcctctcgattgtggctcacaatccgggaggaaaacacaacggaatgcgattcggcaatcatcggcacagctataaaaggagacagagctgttcacagtgacctatcgtattggattgagagcaaaaagaatgagacatggcaactggaacgagccgtcatgggagaagtgaaatcttcgactcggaccgatg

SEQ ID NO: 7410 - DNA, 203 bp, Artificial sequence
  synthetic
ggcgcgccagtcctcaggaacaacagtcaccgttactgaacattgtggaaacaggggagcgtcgctgcgcacaaccacagcgagtggcaagctggtcactgattggtgttgcaggagctgttccttgccaccactgcgatacaccacaaaagatggatgctggtatggaatggaaatccggccggtgacgactcggaccgatg

SEQ ID NO: 7411 - DNA, 203 bp, Artificial sequence
  synthetic
ggcgcgccagtcctaggaggaggaagcaaagcttgtgaaatctcgagtgacagctggagttgcaggagggatggaaccattccaacttggtctcctggtagcattcatagccacacaagaagtgctgaaacgcagatggactgggaagctgaccctgacctcactagcagtatgtttggcactgttgacgactcggaccgatg

SEQ ID NO: 7412 - DNA, 203 bp, Artificial sequence
  synthetic
ggcgcgccagtcctaaaacatcttgatggttattggagcagcttttctccaaatggcggccaatgacttgaagcttgaggtccttccgatactcaacgccatgtccattgcgtggatgctgataagggcaatgaaagaaggtaaagtggcgatgtacgctcttcccatcttgtgtgctttgactccagcgactcggaccgatg

SEQ ID NO: 7413 - DNA, 203 bp, Artificial sequence
  synthetic
ggcgcgccagtcctgaatgaggatggctgggcttgatgtcatcagatgtttgttgttgataattgggattgtaacacttctgaatgaaagaagagaaagtgtggccaagaaaaaaggcggctacttgctcgcagcggccctctgccaagctggagtgtgcagtcccttgattatgatgggaggcttaacgactcggaccgatg

SEQ ID NO: 7414 - DNA, 203 bp, Artificial sequence
  synthetic
ggcgcgccagtcctgtgcacgattccattggttcattccattcggagtactggggttttggctacttggcaaacactcgaagcgaggaggagcattgtgggacgtgccgtcaccaaaagtgtatccaaagtgtgagacaaaaccaggaatctatcgaatcatgactagaggaattttgggcactttcccgactcggaccgatg

SEQ ID NO: 7415 - DNA, 203 bp, Artificial sequence
  synthetic
ggcgcgccagtcctcttttccagattcaaattctcccatactggatgttgaggcccaggttccggataaggcgtggagcaccgggtatgagtggatcaccaacttcacagggaggactgtgtggtttgttcccagtgtgaaaagtgggaacgaaattgccatctgcctacaaaaagcaggaaagcgagcgactcggaccgatg

SEQ ID NO: 7416 - DNA, 203 bp, Artificial sequence
  synthetic
ggcgcgccagtccttcatcctcaatggacccatggcaatcacatcagcgagcgcagcacagcgcagaggccgcattggaagaaatccttcgcagattggagatgagtaccattatgggggtgcaaccaatgaggacgaccatgatctggccaactggactgaagcaaagattctccttgacaacatatcgactcggaccgatg

SEQ ID NO: 7417 - DNA, 203 bp, Artificial sequence
  synthetic
ggcgcgccagtcctacctcccaaacggactggtggcacaaatgtaccagcccgagcgagataaggttttcaccatggatggggagtttcgattgcgtggagaagaaaggaagaactttgttgagctgatgcgcaacggtgacctcccagtgtggttagcttacaaagtagcctctaatggacacagttcgactcggaccgatg

SEQ ID NO: 7418 - DNA, 203 bp, Artificial sequence
  synthetic
ggcgcgccagtcctaccaagaccgctcatggtgttttacaggacaaaccaacaacacaatcctggaagacaacaacgaagttgaagttttcaccaaaactggagacaggaaaattctcaggccaaagtggatggatgcgcgggtctgctgcgactaccaagcgctcaagtcatttaaagagtttgcagcgactcggaccgatg

SEQ ID NO: 7419 - DNA, 203 bp, Artificial sequence
  synthetic
ggcgcgccagtcctcagggaagagatcagcgctgggcatgatggaggtcatgggtagaatgccaaatcacttctgggaaaagacagttgccgctgcagacacactgtatctcctaggaaccagtgaggcaaacagtagggcacacaaagaggcactggcagaactgccagattccctggaaacgcttccgactcggaccgatg

SEQ ID NO: 7420 - DNA, 203 bp, Artificial sequence
  synthetic
ggcgcgccagtcctgtgtactattaggtttgaccaatggaatgccattcactgctatggatctatcggtgccattattggtgctagggtgttggaatcagatgaccctgccaagtttggccgttgcagtgatgcttttggctatccactatgcattcatgatcccaggctggcaggctgaagcaatgacgactcggaccgatg

SEQ ID NO: 7421 - DNA, 203 bp, Artificial sequence
  synthetic
ggcgcgccagtcctccaagggaaagcgtggaggaggaaaaggagccactcttggagagatctggaagtcaagactgaatcagttgacacgagccgaattcatggcatacaggaaagatggaatcgtggaagtagacagagcccccgccaggaaagccaggagagaagggcgtctcacaggtggccacccgactcggaccgatg

SEQ ID NO: 7422 - DNA, 203 bp, Artificial sequence
  synthetic
ggcgcgccagtcctcagtgtccagagggtcagcaaaattaagatggataacagaaagaggattcgtcaaacccatgggaaaggttgttgacttaggctgtggacgaggagggtggagctactactgcgcaaccctgaagcatgttcaagaagtgaaaggattcacaaagggcggaccaggccatgaagcgactcggaccgatg

SEQ ID NO: 7423 - DNA, 203 bp, Artificial sequence
  synthetic
ggcgcgccagtcctgccataaggtggtgaaagtcatgagaccagggcctgatggtaaaacctacatggatgtcatctccagagaagaccaaaggggcagtggacaggtggtcacatatgccctgaacaccttcaccaacctggccgttcaactgataagatgcatggaggctgaaggggtggtagatgcgactcggaccgatg

SEQ ID NO: 7424 - DNA, 203 bp, Artificial sequence
  synthetic
ggcgcgccagtcctaggatgacattacgagagtgagacttggacggttggccaaagcggtcgagtggctgaggaagaatggacctgaacgattgagcagaatggcagtgagtggggacgactgtgttgtgaaaccaattgatgacagatttgccactgcactccactttctcaacaacatgtcaaagacgactcggaccgatg

SEQ ID NO: 7425 - DNA, 203 bp, Artificial sequence
  synthetic
ggcgcgccagtccttcagaaaggacattcaggagtggaaaccttcaacaggctggcacaactggcaagaggtgcccttctgctcacaccacttcaatgaactaatgctgaaggatgggcggaccatcgtggtgccatgtaggagccaggatgagctgattggcagagccagaatctcaccaggagcagcgactcggaccgatg

SEQ ID NO: 7426 - DNA, 203 bp, Artificial sequence
  synthetic
ggcgcgccagtcctctatggcatcttcacaacctcttaagatgaaatttagcgagtatctagaccagcgcatgcaggacagggcaggtgggaaggtacagtggaaagaccataagaaagtgtgggaaaggttaaaattaaggtggacacaagaaggttatttggcagggggagcaccaaccagggttccgactcggaccgatg

SEQ ID NO: 7427 - DNA, 203 bp, Artificial sequence
  synthetic
ggcgcgccagtcctagctgagcacaatggaaggagaattaagagagggaaagcagagagcgaaggacagcgaagtggatttgaataggcagcacgtatttaggaaggaagggactaagcagagagaaaaagcagaagaggagctgagaataggcacttgggctatcgaggagaccagaagatttataacgactcggaccgatg

SEQ ID NO: 7428 - DNA, 203 bp, Artificial sequence
  synthetic
ggcgcgccagtccttgctaagaactccagcagtgatggggatagccacggacatgaaggagggtggggtccctactatctcaccagccaccccagccgaaaaccaaacccccacccagcgcctctatccagacctgccagaagattccagacccccaccctactccccatcagcctcaccatcacctacgactcggaccgatg

SEQ ID NO: 7429 - DNA, 203 bp, Artificial sequence
  synthetic
ggcgcgccagtcctctgtacaagcacctgtattgacagtaagagggggcgtgataaagggagaagtgcacctggtagaaggaacaatagatgtggagaactcggagccgccccaacgctctatggacactgacgatttggggcccgccggagggcggtctaccagaggtcctgactcattggaagaagcgactcggaccgatg

SEQ ID NO: 7430 - DNA, 203 bp, Artificial sequence
  synthetic
ggcgcgccagtcctaacaactaccaagtctgcatggaggtgcctcagcgtggctcctacagttgcaaaccctgacctcagggttcagattaggacttggggacatgagagcactgttggctagggcaacagaccacgtgactatgaatgtcataatgaaaacagctggactagatcacctgccaggaccgactcggaccgatg

SEQ ID NO: 7431 - DNA, 203 bp, Artificial sequence
  synthetic
ggcgcgccagtcctcacagccaccgtatcaacctccaccacctcccctttcgccacagtacccccaggcttatccggggtatggctatcctcccaggggaccaccacaggcaggaggacattggggatcacgttacatgaataatggtgcctgttacaattgtggacagccggggcatcaagcaagaacgactcggaccgatg

SEQ ID NO: 7432 - DNA, 203 bp, Artificial sequence
  synthetic
ggcgcgccagtcctatactccctgggaatgaagatgcccaccaccacctgaggctgaggtccaacgttactctgtatataccgaacccacagtttcatgtcaaatagagggggtgaaccatcgatttctagtggatactggttgcacctactcagccattaagacaatgcaacccttatcaatggattcgactcggaccgatg

SEQ ID NO: 7433 - DNA, 203 bp, Artificial sequence
  synthetic
ggcgcgccagtcctcagaagatggggtggaagtctccatcaactctccgaaatctgggagggtgcttctcctaccttcacttccggtcccaccgctgtcgttaacgcaagaagtctactggctaaaatgcacccagactggcccgtccaccccagccatacagtttcaatttaacacctggagaagaccgactcggaccgatg

SEQ ID NO: 7434 - DNA, 203 bp, Artificial sequence
  synthetic
ggcgcgccagtcctttatctacgcactccacccatataagacacccctacccgaggttcactgcaccatgaacgttacggatgatgaagataacccatataccgaggactgggatgaaaacatgtcacaccaaactcccagtatccgttgtctgtctattgtatgtggacccgagggtgtggcagcaccgactcggaccgatg

SEQ ID NO: 7435 - DNA, 203 bp, Artificial sequence
  synthetic
ggcgcgccagtcctctgtcatcctaccttcacatctcaaaccatggtaccagctggcccctgactcatcaccccacgttactcttgccgtaggaaatgggttcgaagcaagaagcctgggtcctatgatacgacgtgcatctaaacttgattgggtgcccacagcaactcctggaataatgaaggcatcgactcggaccgatg

SEQ ID NO: 7436 - DNA, 203 bp, Artificial sequence
  synthetic
ggcgcgccagtcctgactagcagtcccaccggtcagagtgcagcttacccaccaaggccaacttcctgtttaccgatctcaatatcgtttgaagtatgaacagattgaagggatcaggcccaccgtggaaggactgctgggagctgactgcatctatgctaccagctcaccatggaacactcccataccgactcggaccgatg

SEQ ID NO: 7437 - DNA, 203 bp, Artificial sequence
  synthetic
ggcgcgccagtccttccctgtccccaaagctgatgggaagacgtaccgaatggttcaagacttccgagctgtcaatgatgtcaccacaggggtggacctcccggtaccagatcctcacgtttctttgagcaatctttcacccaaacaccaatacttcaccgtggtggaccttgccaatgcctttttcacgactcggaccgatg

SEQ ID NO: 7438 - DNA, 203 bp, Artificial sequence
  synthetic
ggcgcgccagtccttgtccacagctcaccgtaactcaattttacaccaccccaggcccaccacagtctccggactgctctcattccttggactgactggctacagccgtactcacattcctgattacacctgcagaaccgaaccattgagagaaattgtcaggcaggctggggctaggaatcttcatgcgactcggaccgatg

SEQ ID NO: 7439 - DNA, 203 bp, Artificial sequence
  synthetic
ggcgcgccagtccttctcagcggtggcactcccgaaaaaggtggccatcatgaaatgtaaaggccaccaggtattgaactccagaatcagcaagggaaatgatgcagctgaccaagccgcgaagaaggcaggaggatactcacctggacagatggtactcagagtggacccacccagtacggaattgacgactcggaccgatg

SEQ ID NO: 7440 - DNA, 203 bp, Artificial sequence
  synthetic
ggcgcgccagtcctcagggacaaaattgacgtgggtggaagccctgcccctggcactgatggccatgaggtcctcaccaggtgcagggacacatctatcaccccatgagataatgacaggccgagtgatgcctgggccgccaagagagggaggtcatatgcccgctcttgatgtccaccagataggaacgactcggaccgatg

SEQ ID NO: 7441 - DNA, 203 bp, Artificial sequence
  synthetic
ggcgcgccagtcctcgtacgaagtgaaggaagttacttcacactcagtccaggtcaaaggtaaatcaggcgcaccttggcaccacctgacacattgtacaccagcaccagcacctgacagaacgctgacagaagtcagaagcgacttgatcgcctccaatttggctataaattctgagagccccgacacgactcggaccgatg

SEQ ID NO: 7442 - DNA, 203 bp, Artificial sequence
  synthetic
ggcgcgccagtcctgtccagactggtctgattggtctaaagggaatcttgttggaggatggaggaaggtcctaactttatctactactccaacggggttgaaatttgttattcgaccgaaagaaagcctaggctgtagtcagtttgtactggctccatatgtgtctaactcattagattggagtttgccgactcggaccgatg

SEQ ID NO: 7443 - DNA, 203 bp, Artificial sequence
  synthetic
ggcgcgccagtcctcggcctccgatggtagtttgacacatgccctagatggccttaggactctgaatggtaaaatgaagtcacactccggtattgactcctcttcctgggacaattggatggatgtgtttgggaaatacaaaactttgatttcctccatcctagtctcaatttctgtcttttctgctgcgactcggaccgatg

SEQ ID NO: 7444 - DNA, 203 bp, Artificial sequence
  synthetic
ggcgcgccagtcctataatgcactttggactgaaatttcatggcaagacctcctcctcaaggtagtctcacacaaattggaatatttgtcattgtctcaggttcttggaaacaggattttgcgtcgcaaattcaacattcgctctcacatgttgagaatgttgctatcggcgatacgcatggacctggcgactcggaccgatg

SEQ ID NO: 7445 - DNA, 203 bp, Artificial sequence
  synthetic
ggcgcgccagtcctaaagagaattgaaacttgaaggaaaagtgcaacagcgaattgatcaagtcaaagcagagaatgcagaagattggagagagtatgacagaggtggacctgtcccttcacgagacagagatacctactgccagattcttttggagaacgaactggaacgactcatgcaatccacctcgactcggaccgatg

SEQ ID NO: 7446 - DNA, 203 bp, Artificial sequence
  synthetic
ggcgcgccagtcctttggcttgcgtattcttcagacttctggtttaggagagtatcgcgctgttgtctcacaacagtatgccattttgcgacggcttcacgaccgtcttggactgagaggactgaatgccaaaggacagcgaatggcacccatcataattcagttgtatggagagacaggacaaggaacgactcggaccgatg

SEQ ID NO: 7447 - DNA, 203 bp, Artificial sequence
  synthetic
ggcgcgccagtcctaacatcaagattttgctcaggttccaaaccctgagctatttgaaatcattcgagcaggaaacactttcccctatcctttgcatatggctgacattgctgacaaaaacacaacaacttttcagtcacgcattgtcattttgacgaccaaccaaaagaagccaaaagtggaatcctcgactcggaccgatg

SEQ ID NO: 7448 - DNA, 203 bp, Artificial sequence
  synthetic
ggcgcgccagtcctaacacaaagttgtgttgaaggctcttggcgttgttgctatggctgttggggtgtataagattggtagtgcacttgctggacttgtttcaaaaagagacactcaacctaaagtgtctgcaagtgcgcaatcaccttatgctccccgacctgtggcgctgcgtcagtcagcctatccgactcggaccgatg

SEQ ID NO: 7449 - DNA, 203 bp, Artificial sequence
  synthetic
ggcgcgccagtcctatccgacaacacgggcaacaaaaaccaccatcaacaaaattgtgaaagcgacaggacaagcagcggataatagcgcgcgtgacatcatcacaagcgttatgaaccgaggcatgtactccttgagcgtcgattctcgcgttctagggagtgcaacgttcttaactggaaaaatttcgactcggaccgatg

SEQ ID NO: 7450 - DNA, 203 bp, Artificial sequence
  synthetic
ggcgcgccagtcctcgtgtgtttcagcatctggtgtccaacgagtaacgcctggggcaggaccacctgtctatggtgaatacgaaattggagacactcaatatagaacctacacgcgtgactattggagatatgccctcaacactacctacggggactgtggaggactaatcttcttgaacaacaaaacgactcggaccgatg

SEQ ID NO: 7451 - DNA, 203 bp, Artificial sequence
  synthetic
ggcgcgccagtccttgagtcaccgtaagattcttggaatgcacgttatgggactttcgcaactagattctggctttgccctctcggtttaccgagaggatgtacaagcttacgttcgactagtacgacaggacgatccttcactggtgacaccctgtgcagagcccatcataacgacagcagtccagtcgactcggaccgatg

SEQ ID NO: 7452 - DNA, 203 bp, Artificial sequence
  synthetic
ggcgcgccagtcctgtttgccatttgctggagacttccaccccttgggaaaaagtccgttccctagcacaaatcctggaaagagtaagattgaaaagtcagaactccatcctgacaattgtgctgtggcatggagggaacccgtttctcatcccgcactgttgaaacccatcacagtgaggcctgaggcgactcggaccgatg

SEQ ID NO: 7453 - DNA, 203 bp, Artificial sequence
  synthetic
ggcgcgccagtcctacggtattcccttcccaagtggcacgacattcgacccccttcattaccgactggaaaagtgtggacagcgtgcaaaatgtctagaccaacagcttttggacattgtgcgtcgttcatacaccaccgaacttcgacaaattttgcagactcacaagcaccctgagtacaagtcagcgactcggaccgatg

SEQ ID NO: 7454 - DNA, 203 bp, Artificial sequence
  synthetic
ggcgcgccagtcctgaattgttttgaatgatctcgccggtgatcttccagaccatcaacgagaacatgatgatattcgttctgtgctgttcctcgaccttgtacattccacccaccttgctcgggatgtcctctattcatggacacattcactcccaagtggtcattttctcacagcaattgtaaattcgactcggaccgatg

SEQ ID NO: 7455 - DNA, 203 bp, Artificial sequence
  synthetic
ggcgcgccagtcctctttgtacgtaaatctgatcttcagatatcttcttgcaaaatcttcaaaattgacttcacacatccaaattgaccagctgtgtcgtcggatgaaacttgtttcatacggcgatgaccacattgtctctatcccttctggatacgagaaaattttcaaccaatccactcttccaacgactcggaccgatg

SEQ ID NO: 7456 - DNA, 203 bp, Artificial sequence
  synthetic
ggcgcgccagtccttttggcgctcaaaatccctcaacccgcgctctatcacagagagtagcgtagagtgggcttgccatgagctagccctccacgatgagtcaacatttcaggagtggacgaaaaagattgggttagtctgcaaagatgcaattaattttgtgcctaatctgtctgcgcaacgcgtggcgactcggaccgatg

SEQ ID NO: 7457 - DNA, 203 bp, Artificial sequence
  synthetic
ggcgcgccagtcctgcgcgaaatcacccacttcacagaggatgaccgcgtactcaccgacgcagtgacagaaattacttcattacccctctctttactacagtatggagacgagccacgagaacatagtgtaatatcctttcttcaaagaccggagaaaatcgctacagtgacgtggactacggctcacgactcggaccgatg

SEQ ID NO: 7458 - DNA, 203 bp, Artificial sequence
  synthetic
ggcgcgccagtcctaacaaagacgactaacttggtatccttgccaattccatcgtctgtgttgacgactatgtacagagagaagctgagaggctttggcctgcttcgcgcagacattgtctttaagctgcaattcaactcacagcccttccaagctgggagattgattgcgacatacattccagttcccgactcggaccgatg

SEQ ID NO: 7459 - DNA, 203 bp, Artificial sequence
  synthetic
ggcgcgccagtccttgcctatcttttacaaagaacgcgtatggctcgagcaagtctcacaagactgacctcgttacctaacgtgattattgacattagtaagcagactgaatgtaatatcacattaccctacgtaagctcgtttacccactatgatttaacaagtggcggaggagattggggcttgttcgactcggaccgatg

SEQ ID NO: 7460 - DNA, 203 bp, Artificial sequence
  synthetic
ggcgcgccagtcctcgacctttgggtctatagtcccctcagtagtgcgtcttctcagacaatcaacatctcaatacgagcctacctcgacaatgtacgcttgggtgcgcccacgcaacaatcgttagtcacagcggaaaagatgctaaaagcaaacgtacagacacgggatttatcccggggtacatccgactcggaccgatg

SEQ ID NO: 7461 - DNA, 203 bp, Artificial sequence
  synthetic
ggcgcgccagtccttagttgtggctcgatctcagcgcgcgcccaaggaggaaagcagacagccggctcgggcgatggatccttcggatctctcctgaataagggcacaaaaagtgtcactatgcaggagcgatccgcagggactatctcccgagttggacatagtatacgtgagggccttgtcaggggcgactcggaccgatg

SEQ ID NO: 7462 - DNA, 203 bp, Artificial sequence
  synthetic
ggcgcgccagtccttgactatcatagcgtaaggttaaagatcgtctacgatccaatggcgcagtccgctgctgccgtgacgtatgatgcatccgaatactgctactcaatagttgtagatttccgtgacaagactgacatatatgtgcgtttaccattcatttccgcaacaccttggaaattggtacccgactcggaccgatg

SEQ ID NO: 7463 - DNA, 203 bp, Artificial sequence
  synthetic
ggcgcgccagtcctgattgtcgacattcgaacagggcctccctatgccaacaacacagtctcagattgcgctttggtggatgttgtaggagcattgtttgcctttagagcgggcgggtttcgatggaaagcctgggactccggttctgagctcatatcagcctatctcgttccttttggaccatacaacgactcggaccgatg

SEQ ID NO: 7464 - DNA, 203 bp, Artificial sequence
  synthetic
ggcgcgccagtcctctcttccctttggtatgtatcctagatacagtcactattggggggcagcccttagctaacttagatttaaggcagattagtttatagtcaaattaggcagagcgaagcaactttcttgaggtaagtggtcatccactgtcacttcgagggggcttgccgacactctagataagtcgactcggaccgatg

SEQ ID NO: 7465 - DNA, 203 bp, Artificial sequence
  synthetic
ggcgcgccagtcctagaactcagagagtcgttggaagacgggaaggaagcccgacgactgagcagtccaccccaggcgtgattctggtcgcccggtggatcaagcatggaagccgtcataaaggagctgagctgactctgctggtggcctcgcgtaccactgtggccaggcggtagctgggacgtgcacgactcggaccgatg

SEQ ID NO: 7466 - DNA, 203 bp, Artificial sequence
  synthetic
ggcgcgccagtcctgcccaccaccatggggagcagcaagagcaagcccaaggaccccagccagcgccggcgcagcctggagccacccgacagcacccaccacgggggattcccagcctcgcagacccccaacaagacagcagcccccgacacgcaccgcacccccagccgctcctttgggaccgtggccgactcggaccgatg

SEQ ID NO: 7467 - DNA, 203 bp, Artificial sequence
  synthetic
ggcgcgccagtcctcttcttggtccgggagagcgagacgacaaaaggtgcctattgcctctccgtttctgactttgacaacgccaaggggctcaatgtgaagcactacaagatccgcaagctggacagcggcggcttctacatcacctcacgcacacagttcagcagcctgcagcagctggtggcctacgactcggaccgatg

SEQ ID NO: 7468 - DNA, 203 bp, Artificial sequence
  synthetic
ggcgcgccagtcctcggcaccaccagagtggccataaagactctgaagcccggcaccatgtcctcggaggccttcctgcaggaagcccaagtgatgaagaagctccggcatgagaagctggttcagctgtacgcagtggtgtcggaagagcccatctacatcgtcactgagtacatgagcaaggggagcgactcggaccgatg

SEQ ID NO: 7469 - DNA, 203 bp, Artificial sequence
  synthetic
ggcgcgccagtcctcttcacctcgacagagcccccagtaccagcctggagagaacctataggcctggagctcctcctggcaccagaggcctcgctgtggggcacaggggcctggctccgtgcagaggggccacgttttggggagcagccccagagcaggatgtggcatggtgaggtgtcgggtgctcccgactcggaccgatg

SEQ ID NO: 7470 - DNA, 203 bp, Artificial sequence
  synthetic
ggcgcgccagtcctcctggtgcagaggaaaaggaggtatatgggttaatcaatcaaaggaaattaatgagacagagccgttcagctttactgcgaactgtacagctagtaatttgggtaatgtcagcggatgttgtggaaaaacgaccacgattctcccatcaggggcgtggatcgacagcacacaagcgactcggaccgatg

SEQ ID NO: 7471 - DNA, 203 bp, Artificial sequence
  synthetic
ggcgcgccagtcctaaagcggggtctcggttgtaacgcgcttaggaagtcccctcgaggtatggcagatatgctcttgcacgggtcaggtataatgtgcagtttgactgaggggaccatgatgtgtataggcgtcaagcggggcttcggttgtacgcggataggaatcccctcaggacaattctgcttcgactcggaccgatg

SEQ ID NO: 7472 - DNA, 203 bp, Artificial sequence
  synthetic
ggcgcgccagtcctggaatatgatggcgtcttccctgttttgcccttagactattcaggttgcctctgtggattagggctggaggcagcacggatagtctgatggccaaataaggcaggcaagacagctatttgtaactgcgaaatacgcttttgcatagggagggggaaatgtagtcttatgcaatacgactcggaccgatg

SEQ ID NO: 7473 - DNA, 203 bp, Artificial sequence
  synthetic
ggcgcgccagtcctgaaagcgggtgcatgcatggccattttccagcacaggttcagctggtatggcatgcatgcatcgactgcttgggggtgtccctgacccccttaattcaacgtctagcccacgatacgggcaccctacccaatttgtatccctttacctcccatggattgacttgtatggacttgcgactcggaccgatg

SEQ ID NO: 7474 - DNA, 203 bp, Artificial sequence
  synthetic
ggcgcgccagtcctgatctaaattggattatcctttacttgtggtggttagccaaccatgctctggtgtaatgattccatgtgttcatctggctaagtaccgacctaggaggtggtgctgaaatattgcaagccactagcgtcgttatgcttagcctctggatacatgggattaattgcattctgtaccgactcggaccgatg

SEQ ID NO: 7475 - DNA, 203 bp, Artificial sequence
  synthetic
ggcgcgccagtcctaagcaatttcaggcctaggggcagtggaaagtgtggcatccactaattcagccattgccactgccaatgcaacaactacacagacaataccagacccaacggagggttccactgatgatttctactcctgttcttatgaagtaggagctcaaggggataacatttctagattggcgactcggaccgatg

SEQ ID NO: 7476 - DNA, 203 bp, Artificial sequence
  synthetic
ggcgcgccagtcctgaaagagaaaaccacgcaggaggcccattcacaaacccaagaatccaccacaggagccaagagtcatcattcaaccaggacctggggcagcaaacctttcaaactctagtgttatagcaatggctgaaagcacagcacttgccaatgaagggacagctgttgactattccacagcgactcggaccgatg

SEQ ID NO: 7477 - DNA, 203 bp, Artificial sequence
  synthetic
ggcgcgccagtccttggacctccaagttccagacagaggacatgcctctctcattcggttctttgcctatttttctggagagatcattctcactattgttaacaatggcactacaccagcaatggtagcacattcctactctatggatgatctcagttcagaatatgctgttacagcaatgggaggtgcgactcggaccgatg

SEQ ID NO: 7478 - DNA, 203 bp, Artificial sequence
  synthetic
ggcgcgccagtcctaactgtcaccacgttcagttacaatggttcatcaggttgagacaattgacgttgaggggaagaaggtgacgatagtggattcacctgaaacaccaaattatgatggccccatttctgcctttttttacttgattgaggcaggcaggttcacagctgaagacaaggagtacatcccgactcggaccgatg

SEQ ID NO: 7479 - DNA, 203 bp, Artificial sequence
  synthetic
ggcgcgccagtcctaaatgatgagaaaacgctttccaggctttgagaaatccactattttgattttgaaccgagcagatgaattgaaaactgatgatgatataagaaattgggttaagacatctggagagttggactctctagtgagagcctgtggggggcgtatagctaaatttcaccggcacaaaacgactcggaccgatg

SEQ ID NO: 7480 - DNA, 203 bp, Artificial sequence
  synthetic
ggcgcgccagtccttaaacagggctaagttattagagaaagcagccacccttcctgagtttgtctctcatttgccaagacttgtctacaaggatagaaaaatgtaccgccattatggtgtgcagtgtggttccacagtcttccacatggactcagagaacatccttgagtcagcattaaatggtgaagcgactcggaccgatg

SEQ ID NO: 7481 - DNA, 203 bp, Artificial sequence
  synthetic
ggcgcgccagtcctgccctggtgttgggaagagttttttatcaaattacattgttaaagaaatagccaaattaaagcattggaagagttatgccaacccaactggaagtaagcatatggatgggtatgtgtcacaggagattcatgtttttgatgattttggtcaaaatcgggaagaagaggactattcgactcggaccgatg

SEQ ID NO: 7482 - DNA, 203 bp, Artificial sequence
  synthetic
ggcgcgccagtcctctttaatctgtaatcttatttctagtgttccatttattactccaaaagcaagtgtagaggctaagggcacccaatacagaggacgccttgttgtcgtcacaaccaatagacgggattttacttcctgtaagttgactgacccagatgcactggaaaggcgctttcctattcgcccgactcggaccgatg

SEQ ID NO: 7483 - DNA, 203 bp, Artificial sequence
  synthetic
ggcgcgccagtcctttaatatccggccattgcaaaagtataatcacaagggccgtttggatgtggcaacagccatgagagatggaagcttgcagggaggaacttgctgggaaagggatataggccaattaggtcttgaatgttggaatcccataaatggccaaatcttaattgatgaaattatgagtgcgactcggaccgatg

SEQ ID NO: 7484 - DNA, 203 bp, Artificial sequence
  synthetic
ggcgcgccagtcctaaacactccctaaagattttaaggtagctgttaagaaacacattgaaaaactagaaactgaattggaagatcagagcgggcgggtgaattttagacatatttgtaacagactcgtcaatgtgagtaatgaggatgaagtagccactggtttagccattggtgggaaaaatgtttcgactcggaccgatg

SEQ ID NO: 7485 - DNA, 203 bp, Artificial sequence
  synthetic
ggcgcgccagtcctactatcgcggcaatggctggttggtttggaaagatcaggaccagtatatggtgcaagatgtgacaaagattaggccttttggttccacaacaactgcatcaggcacgacatcatgtcaaacatacatatataattgcaagactgggcctggttcctgtggtggtgtgcttgtagcgactcggaccgatg

SEQ ID NO: 7486 - DNA, 203 bp, Artificial sequence
  synthetic
ggcgcgccagtcctgagtattgggatgccatgatactatctcatatgagtcagctgtgagtagtgatgttatacctatgaactgggacacttcacctggcattaagtataagggggagactaaacgacaactggtgctgaagtcctcattcagacaggatgttctgaagcaactacagagtccatccacgactcggaccgatg

SEQ ID NO: 7487 - DNA, 203 bp, Artificial sequence
  synthetic
ggcgcgccagtcctttggaattaatcctttttgtgagtgggacaatttgttggcaaacctccaaccttataatttgtgtcttgacttttctggattcgatggctctctgagtgcccaaattcttgaagaagcagttgatgtattgtcttattttcacaatgacccagccttagtgaaaagaattcatgcgactcggaccgatg

SEQ ID NO: 7488 - DNA, 203 bp, Artificial sequence
  synthetic
ggcgcgccagtcctcaccaactatctattcaactcattatgtaactgatgagatatggcaggtagaaggagggatgtgttcaggatctccatgtaccactgtggtcaattctattgtgaatcagcttgcatgttacaccattttagctgtcttgggctatgacatcaaccaatgttatgtcgttagttcgactcggaccgatg

SEQ ID NO: 7489 - DNA, 203 bp, Artificial sequence
  synthetic
ggcgcgccagtcctggacccgcaaaattattggtgtccttgacaaagaagtcttggaagggaagatacagtggtgcaagggaccagaagcattcaaacagcaacttgactctttcttgctggaagcagctctgcatggagaagaatactaccatgaggtgacatctaagcttaaggcccggtgccccgcgactcggaccgatg

SEQ ID NO: 7490 - DNA, 203 bp, Artificial sequence
  synthetic
ggcgcgccagtcctgaaggaggagaaaaagaagaaggagaagaggggtgtgcggagcacatctcagccggtctccggcggtgcgcagcaccgccgcggaggcggaacaggtcctagggccggaggtctactaggacgtttgggagctggctggggatcgattctccaggaggacattgtgcacgcactcgactcggaccgatg

SEQ ID NO: 7491 - DNA, 203 bp, Artificial sequence
  synthetic
ggcgcgccagtcctcatgcacttagtgctggtgctacactctgttttcatcgcaattgatcgacgcttgcgctcactgacacggcgcgtgactgctcttgaggctaaacgctctgcgaagaacgctgtacggatcgcattcatgctcaccggcgtgatgatggtgctgggcgccgtcgtcattgatatcgactcggaccgatg

SEQ ID NO: 7492 - DNA, 203 bp, Artificial sequence
  synthetic
ggcgcgccagtccttgagtttcgcaccggagcagccgagatatatggcggccaatggatgcgtgaattgctcgctgattgtcacgtgaacgcgtcattctcgactgacgtgtgtcctggaggatctcagctgaacatgggtgagatcaatggtaaagaacgtgtttgctcaacccagccctacaatcgcgactcggaccgatg

SEQ ID NO: 7493 - DNA, 203 bp, Artificial sequence
  synthetic
ggcgcgccagtccttttggaacggattgtggtctggggagacgccagggctaatgaagttttggtgaaaaacattttggaaccccagctcgtctgggataatgccattgccacgcaggacggttttcgtgatgttggctattcttgtcagatcatgcttgacaaactggttagcggtagttttaaggacgactcggaccgatg

SEQ ID NO: 7494 - DNA, 203 bp, Artificial sequence
  synthetic
ggcgcgccagtcctctgcccggggatcaagtcttcagtcttcgtccaaagcggtttcggatacgacggagtggtgatgacaagcttgtccaaagcaactaatgagagctgctctgtggggctgacgtgccacggatgctacctccttgcgacgaagatggtgttcggacctggaacttcgaccgcaagcgactcggaccgatg

SEQ ID NO: 7495 - DNA, 203 bp, Artificial sequence
  synthetic
ggcgcgccagtcctcggatcaggagggttcgtctggaaaagcttgtcacaatggccgacccgggaacattcagttgaactcgatgaccaacacttgatcacggctcttgttacggaacagttgaagaagacgaacaaggtgtgtatcatttgtgaggacgtcttgcaatgcgccgccgctcgtagtgccgactcggaccgatg

SEQ ID NO: 7496 - DNA, 203 bp, Artificial sequence
  synthetic
ggcgcgccagtcctcaagcccgtggcaaaaccaacagattactgccccacgtacctggccggatcgtttgtgaaaaatgacataggcgcgtacaccgatgggatgatgtggatgaaaagcaggaaggtgaacggaacgtggacattggtcgacctggaactgacgcagagccatcaatgcatttggcccgactcggaccgatg

SEQ ID NO: 7497 - DNA, 203 bp, Artificial sequence
  synthetic
ggcgcgccagtcctagaggtgaccattgacgctgacggcgaagacatggacgagatgacatcaatgttcgggacaatgaaggcagtcgtaccgccagtggaagggtcctatccggatttccggctcagcccatctgtggagggagtttctcccctactggtgggcgcgcttttgcacctgctgaccatcgactcggaccgatg

SEQ ID NO: 7498 - DNA, 203 bp, Artificial sequence
  synthetic
ggcgcgccagtcctgttcaatctgaaatcacagttcgtacctgtggactcgatggtactgctgaactatgttgtgacgcatcctgcagttgcgacggccatggtaacaggaggtgccctggtgatctattccattcgcgtgtacaagagctggggatgctctccgaacttgtggaggagtggacttcgcgactcggaccgatg

SEQ ID NO: 7499 - DNA, 203 bp, Artificial sequence
  synthetic
ggcgcgccagtcctcgcttcgaggcgctcattagtggctggaatgtgcttggcggggttgtacgtgctctcaacgtgtctcgagttgtatcagatgccgacgacggcatcggtggtgttcctaggaggactactgatcgggatagtgaccaggatggctcctccagcgcacttggagttggttccggtcgactcggaccgatg

SEQ ID NO: 7500 - DNA, 203 bp, Artificial sequence
  synthetic
ggcgcgccagtcctggctggaatgggagtgccgttggattgcgaggaagagcccacaacacttccgtctggattagaaggaacttagggaccggatggagtggaattcacgaacttgacggacaacagtagagtgtcaacggggttgctggtttacgtcggctgcatgggaatcatggccatcaataccgactcggaccgatg

SEQ ID NO: 7501 - DNA, 203 bp, Artificial sequence
  synthetic
ggcgcgccagtcctctacgtcggggtcatcctgatgtgtgcttgttggtggacaaacgcgcccgagtggctacctctctacgtggctggagtatcggtctttcgatccaatgaggtgaatgatgtcctcatcacccctccagagtatgagcaggaagcacagctaagcaacgacttcgggcacctgcccgactcggaccgatg

SEQ ID NO: 7502 - DNA, 203 bp, Artificial sequence
  synthetic
ggcgcgccagtcctttgccacgcgacactaacgcagtatctgatggagaaaggcattgacagcattcgattctccaccatcataatggacgaatgtcacttcctggaccccctgtccatcgcctgtcgtggggtcatggattactacaatggaaaaggggttgccgtggtgtacatgagtgcgactcccgactcggaccgatg

SEQ ID NO: 7503 - DNA, 203 bp, Artificial sequence
  synthetic
ggcgcgccagtcctactgacccgcgaatcgtttgacgttgcgatcggaaaggcccgcaagcaggagacacagttcatcgtgtcgacagacatcagcgaaatgggagcaaatctcggtgtgcagacggtcattgacacgcgtgtggcagtgaagcctgtcattagcgaaggttccgtcatgctggagaacgactcggaccgatg

SEQ ID NO: 7504 - DNA, 203 bp, Artificial sequence
  synthetic
ggcgcgccagtcctggaaatcgagaacttccagccacagggcagatacctcttggcgcctgaaagtcgaccccggttcatcaacttcatcaagaaggatgttccagtctggcttgcgtggcactgggcgaatgcgtttgaacacaagcactcagtgctgtttcaaggacagaatgcgacgagcttgaacgactcggaccgatg

SEQ ID NO: 7505 - DNA, 203 bp, Artificial sequence
  synthetic
ggcgcgccagtcctcacgaacctagagcggcttggtacatcctaccgctcggcgattgagattctccatgaaatctctaacgttgatgatccaatggtttcaaacgtggtgatgggaaagtcgctacaagcttgggcggctgtcatcattgggatggtcactgggattgtgctactcgtcatgtttgtcgactcggaccgatg

SEQ ID NO: 7506 - DNA, 203 bp, Artificial sequence
  synthetic
ggcgcgccagtcctagtggtttgtcggatcgtgaagtggctgttcggtggaaagacaactgcacaacaaagccccccgtactcaagcttcccaacgttacaaacagcaggattttgtcaattcggctcaatggtgatggctatcggaccactatgtgcggtggttgctggcattcctcccgctttcgtcgactcggaccgatg

SEQ ID NO: 7507 - DNA, 203 bp, Artificial sequence
  synthetic
ggcgcgccagtcctttttgttgcggtgttgggattgttcgtgataatgtgctgtagcgctaataacgtgcaccgggcttacactactgacaccgtcacgctcgttgtcatcggtgtttgcgtgtgtgtcatgggagttgttgcgtgggaaatggatctacttcccaacatccgacgggatctaggttacgactcggaccgatg

SEQ ID NO: 7508 - DNA, 203 bp, Artificial sequence
  synthetic
ggcgcgccagtcctgcgcaagttgttttcgaacgaagaacagtccgcaacggtaatcggaggcatccagctcgctttgatttcctgggagacgatggtgccaatcgcttttgctgggttcttcgcaactacgttcgtgacgaagatctatgggtgcatggtaggaggaatctacctggttttagctcacgactcggaccgatg

SEQ ID NO: 7509 - DNA, 203 bp, Artificial sequence
  synthetic
ggcgcgccagtcctcgtggcgcatcagtctcgcatggcgctacggtcgctggtgaagacagacgcttgcggactgggatacagatggaaggaaatgcttaacgcgcttgacaaaaatgcgtttgacaagtaccgatcccgaggagtgaacgagacagacaagggtgatttcgtctcgcggggcggtttcgactcggaccgatg

SEQ ID NO: 7510 - DNA, 203 bp, Artificial sequence
  synthetic
ggcgcgccagtcctgaaaggacacaacctagccgtgctaaaagccggtgttgacgtgtacgcgactgagccgcgagactgcaacacgattgtgtgtgacataggcgagagtgacccccggcctgaggtggagaagacaagaacgctgaaagtgctgacgatgctcgagaaatggttagtccacaatcccgactcggaccgatg

SEQ ID NO: 7511 - DNA, 203 bp, Artificial sequence
  synthetic
ggcgcgccagtcctttatcacgtcttaggggctctaattgggcgcctcaagcgtaatgacccggtgcagcaggatgctcctccaaagctcgagatgggcactcgaagtgacccccgggcaaaagtgaagctgcaggaccagacaatcgttgcaggtcgcgtgaagaggttgcgagaggaaaacgccagcgactcggaccgatg

SEQ ID NO: 7512 - DNA, 203 bp, Artificial sequence
  synthetic
ggcgcgccagtcctcacatggttcgtggaccgtgaacacccttaccaatcgttcaactaccacgggtcatttgtcactgacgacatctctcccggagggcagactgtcaacccgatgatgcgccgaataatgtggccgtgggatttcctctcccgtgtgacgacgttcatgatgacagatgtgtcaaccgactcggaccgatg

SEQ ID NO: 7513 - DNA, 203 bp, Artificial sequence
  synthetic
ggcgcgccagtcctgatgatcgatgggtggttaggttcccatctggaagagattttgagtggaatggtcgtggccggggatgatgtggttgtggcaaccaacaatgaaaacttccacaccagtctaaggtacatcaccgccgcgtcaaaaacgcgcaagaacttgcaaccaaccgagccttccccgagcgactcggaccgatg

SEQ ID NO: 7514 - DNA, 203 bp, Artificial sequence
  synthetic
ggcgcgccagtcctgtacacaaactgggaacatgttgaattctgttcccatcactaccatcctctcgtgctgcaagacggtcgtgagatcattgctccgtgtcgtgaccaacacgagatcattggccgagcacggatccagaaaggggggatcgtggacatgtcagctgccgggtgcttagcaaaggccgactcggaccgatg

SEQ ID NO: 7515 - DNA, 203 bp, Artificial sequence
  synthetic
ggcgcgccagtcctcgtgtggattgtcaacaacccatggatggcagtgaaagacccagtgaagacatggtcagagataccatacctcccgaagacgaaggacataaattgtggaagtttgattggtgagcgggacagggcagcgtggtcgaagaatatcgtggccacagttagcacaactcgacgaatcgactcggaccgatg

SEQ ID NO: 7516 - DNA, 203 bp, Artificial sequence
  synthetic
ggcgcgccagtcctcatcgagcaagaagctggaagtcagaagttcacggaagggttgcggatacttgggcgataccgagctccaaccgacgacgtgttctggtgagaatcacgcgaatcgtagagaaccacatctctagaaaaggttaacgttgcgaagcaacgggaaccccgtaaggaaggacaaggcgactcggaccgatg

SEQ ID NO: 7517 - DNA, 203 bp, Artificial sequence
  synthetic
ggcgcgccagtcctcaagctttgagcattgacaacgctccggccccagtcccccaggttatgggagaataaccccgacgtgctggaagggcacgaatcaccgcaaggtgagggcgcacaggatagaatccaggtgactgacgccacctcccgaaatgtgtatagtaacagagcatgcctgcagcagcacgactcggaccgatg

SEQ ID NO: 7518 - DNA, 203 bp, Artificial sequence
  synthetic
ggcgcgccagtcctgcgtgtacgtgacatacgggaagtgcaaggccgacggggccccgcgacgctcgagaaggtcagtcgagatcacgagccacataacggaagggttgaacacccgccaggaaacgtgggccattgaccgttatggaaaactccagctagaaaaagtggaaagatgggtaatacgcacgactcggaccgatg

SEQ ID NO: 7519 - DNA, 203 bp, Artificial sequence
  synthetic
ggcgcgccagtccttcatcaaactccaactacatacctctgagagggattccacttcagctgactggaagagaagcatagagttcaacatgctttccggacaacaggtggttgtgttcactggatatggaactgtgacactcagttgcaacctgaaaaccaccatggacttgggcaattattacattgcgactcggaccgatg

SEQ ID NO: 7520 - DNA, 203 bp, Artificial sequence
  synthetic
ggcgcgccagtcctccatcctgggctctgataggtttcttgttaacaaaaactgggccactgacctgccactgccttggacgccggcttctgctgatgcttggcgtgaaaaacactacctggtacacttcgaggagccacatgcaacctcagtggcagtgacaactctgggggaccaggaaggggctgcgactcggaccgatg

SEQ ID NO: 7521 - DNA, 203 bp, Artificial sequence
  synthetic
ggcgcgccagtcctgtcacataattattggtaatggagaggacaggctcacacaccgatggcaccagcctgggagcaccataggcaaggcgtttagagtgacaatgaggggcatggaaagaatgaccatcattggagatgacgcctgggactttggttccactggcggaatcttcaataccataggcacgactcggaccgatg

SEQ ID NO: 7522 - DNA, 203 bp, Artificial sequence
  synthetic
ggcgcgccagtcctaggccattcacactgtgtttggaggtgcgttctcggcaatattcggaggggttaattggattgtgaaaatcctcataggcaccatctttttgtggctgggagtgaacgccagaaatggcacgttgacccttgtgctgctcataactggtggtgttttggtctttcttggaacagcgactcggaccgatg

SEQ ID NO: 7523 - DNA, 203 bp, Artificial sequence
  synthetic
ggcgcgccagtcctgagtgggggctgagactggctgcgccgtgtctttagagcagaaggagctgaaatgcggtgatggcgtgttcatcttccgcgacacgaatgactttttgtcaaaataccgtctgtgtccattgtcaccccaggagcttgctagcataatacaggcaacgagtgagcgtggggcctcgactcggaccgatg

SEQ ID NO: 7524 - DNA, 203 bp, Artificial sequence
  synthetic
ggcgcgccagtccttggttgccttgtccatatcccaagtggtactgtctgacaaaatcggattcctagactggatggacgctgttgggctagtggctgccgtggtgcaggccttgattgagttgaaatcagaaaattgggcaatgctcggactactagctctgaaccccatggggtcgaagttggttgcgactcggaccgatg

SEQ ID NO: 7525 - DNA, 203 bp, Artificial sequence
  synthetic
ggcgcgccagtcctcaaagacaaccatcgtcacgctcctaggacttgcagggctcgcaattttgcaaaagcgggacacgagtgcaagaaggacatatcccaagttgataggggcagcaatggttctgttggggttcacccgtgggtggatcctaggattgctcacaatgctgagccagcagagcttgacgactcggaccgatg

SEQ ID NO: 7526 - DNA, 203 bp, Artificial sequence
  synthetic
ggcgcgccagtccttgcagataatcgcatgtgtccctcgccaaaaagtcaagaacgtgacaacaacgcctggagtgttcgccctgaaaacgggagaagaaattggagcggtatcactggattaccctgcaggaacctcaggttctcccatcatcaacaagaaaggtgatatcattggcttatatggaacgactcggaccgatg

SEQ ID NO: 7527 - DNA, 203 bp, Artificial sequence
  synthetic
ggcgcgccagtcctatggaatcctgactgagaataaggactttgtgtctgccatcgctcaggctgactcatgtgacctgcgtaccccagaagttgatgttgagtttagaaaaggagagatcaaggtgctggatctgcaccccggagcggggaagacccggaaggttctgccagagttgttacggaaatcgactcggaccgatg

SEQ ID NO: 7528 - DNA, 203 bp, Artificial sequence
  synthetic
ggcgcgccagtcctgccttgagcggcggctgcggaccttagtgctggctccgaccaaggtggtgctgacagagatgtatgaagcactcaaggacatgcctatccggtatcatacaagtgctgcaatcgagacaaagaaatcaggagctctcattgacatcatgtgccatgctacgctggcaaatcggtcgactcggaccgatg

SEQ ID NO: 7529 - DNA, 203 bp, Artificial sequence
  synthetic
ggcgcgccagtcctggtcgatgacaacaatactggaaagggttgtgcaggtgccagggctcatgaaggacaacttgcaagaggcctgggacacataccacaccctgctgagagcagatgaaaattctagtagacacagaatggcgctggataacatccccgaacccatgctcagtactatgtgtgtggcgactcggaccgatg

SEQ ID NO: 7530 - DNA, 203 bp, Artificial sequence
  synthetic
ggcgcgccagtcctcgtcagtcgcgtccatgaccatgggaatttttctgtacatgctcgctccaaagggaacgtcacgaaagacgctcgcctttgtgacaatggttgccgcttcagtgggactatgggatggagatgtctcagttgtcaagattgctagcatgatgctggttttcttcatactgtgtgcgactcggaccgatg

SEQ ID NO: 7531 - DNA, 203 bp, Artificial sequence
  synthetic
ggcgcgccagtccttcattctaattccagacgcaggactgcagagatcaacgcaggataactacttggcatattttgtgattgtgctcctgatgcttgtggggctcgttgcagccaatgagaatggatacctcgaaaaaaccaaagcggatattttcggtcacaagcaaatgaggacaatgccagtgacgactcggaccgatg

SEQ ID NO: 7532 - DNA, 203 bp, Artificial sequence
  synthetic
ggcgcgccagtcctacggctcatggatgtcttttgacctgcgaccaggtagtgcatgggcagtttatgcctttgtggtggggatattctctccgctttatcatcatgcagagagcatcaactatggagccatttccttgcaaggcatcacccagagcgcagcagctttcttccaaatggacaaaggctcgactcggaccgatg

SEQ ID NO: 7533 - DNA, 203 bp, Artificial sequence
  synthetic
ggcgcgccagtccttcacctcttccctgcctcagttggtgaacggcgttccctcgccggtttggaacacgcaagtggcggtaggtgtggctgggcttcttagaggaaactacttggctctcatcagcactggccatgctctatggagtgtgcgaggcaatcgccgaggtggtggaggaacatccacaacgactcggaccgatg

SEQ ID NO: 7534 - DNA, 203 bp, Artificial sequence
  synthetic
ggcgcgccagtcctctttgggagagctttggaaaaaacagctcaacaagatgactaaaaaacagtttgagtcctacaagaaatcagggatcattgaagtggatcgcacggcagcgcaagatgccataaggagaaacatcctagacggatccgctgtgtcaaggggcagtgcaaagatgaggtggatggcgactcggaccgatg

SEQ ID NO: 7535 - DNA, 203 bp, Artificial sequence
  synthetic
ggcgcgccagtcctggagccgagccatatggtacatgtggctgggggcacgcttcctggagtttgaagccctaggtttcttgaatgaggaccactggattgccagacgccactctagagcaggagtggaaggcattggactgcagtacctagggtatgtgctggaagaactggaggggaagaaaggagcgactcggaccgatg

SEQ ID NO: 7536 - DNA, 203 bp, Artificial sequence
  synthetic
ggcgcgccagtcctatgcaaacatgtggaaactgttttatttccaccgaagggacctgaggctcatggcaaacgccatcagttcagctgtccccgttgactgggtcccgacaggaagaacgacatggtccttgcatggaaaaggtgaatggatgacgtctgaggacatgttggaagtctggaatagggcgactcggaccgatg

SEQ ID NO: 7537 - DNA, 203 bp, Artificial sequence
  synthetic
ggcgcgccagtccttgaagaaactgcgaaacatagtgacaaacttgatgaagggattgtccggacgcaggaaaagaagaagcccaccagcctcaatcattttgctactgctccccctaatggcatactcagctagtgtgacacgtcagcatggagctggattgttattgaatgtgacctttgctgatgcgactcggaccgatg

SEQ ID NO: 7538 - DNA, 203 bp, Artificial sequence
  synthetic
ggcgcgccagtccttcggaaagacctttgaggtacaagggggtaactgttcagtcaataccttggaagccggaaaatggtgtgatgactatgtggaatacgcttgtgtcactctgactgagggtgaggaacctgatgacctagactgttggtgctatggggtggacaatgtgagagtgacatatgggacgactcggaccgatg

SEQ ID NO: 7539 - DNA, 203 bp, Artificial sequence
  synthetic
ggcgcgccagtccttagctctggcatatttcattggaacatcagtagtccagaaagtagtcatcgccatactgctgctaggaattggaccagcttattccacacattgccttggtatccccaaaagagacttcatacggggacttgatggaaacacatgggtctcagttgtgttggagcaaggaggctcgactcggaccgatg

SEQ ID NO: 7540 - DNA, 203 bp, Artificial sequence
  synthetic
ggcgcgccagtcctgtgtgaccctgattgcagacaacaaaccatcagttgacgtgtggctcagttcaattgtggtcgacacgccaacacttgtccggaaaatctgctatgaaagttcagtcacaggttcaaaagctgaaggagcttgtcctactatgggtgatgcgcacttgactgaggaaggaaatgcgactcggaccgatg

SEQ ID NO: 7541 - DNA, 203 bp, Artificial sequence
  synthetic
ggcgcgccagtcctaagaatgggaatgcaaaagatccttctctgacagaggttggggcaacggctgtggtctttttggtaaaggcagcatagttgcttgcgcaaagttctcatgcaccaaagagatggaagtgtaccaaattgactctacaaaaatagaatacactatcagtgctcaagttcattctgcgactcggaccgatg

SEQ ID NO: 7542 - DNA, 203 bp, Artificial sequence
  synthetic
ggcgcgccagtcctgagccaaaaaagaggattgggttaaccacaccaaactcatcaagtttgttcccacaacaggaacatccacagtgacttttacaggttatggtaactttggccttgaatgtcatgttcaaatgatggtagatcttggtaactcttacctagtcaaagtgggtacagacgcatggccgactcggaccgatg

SEQ ID NO: 7543 - DNA, 203 bp, Artificial sequence
  synthetic
ggcgcgccagtcctaggtgacaaatggagctccatgcaggattccagtcatagcatcagattcgatggctggcactgaaaatcgtggcagcgtcatcacaactaatccaatagctgcattgaacaatgatgaagtgctggttgagatcagtcccccttttggggaaagctacatcatagttggttcagcgactcggaccgatg

SEQ ID NO: 7544 - DNA, 203 bp, Artificial sequence
  synthetic
ggcgcgccagtcctgttcactcaattggaaacagcgtgaggtgaaatgtggagatggaatgtttgtcttcaaagacacagatgattggttcacgaaataccagtatattccagaagatcccaagacaatggccgggttaattgcccaggcccacgaggaaggactatgtggactcaactcagttggagcgactcggaccgatg

SEQ ID NO: 7545 - DNA, 203 bp, Artificial sequence
  synthetic
ggcgcgccagtcctaaaacatcatttttagtccatccagaaagaacggcacctttataattgacggaaagagcaaatcagaatgtcctttcaataagagggtctggaactcaatcaaagtggaagaatttggcacaggaatctatcaaacaagagtgtttatgcgccctgactatgattactccaagtcgactcggaccgatg

SEQ ID NO: 7546 - DNA, 203 bp, Artificial sequence
  synthetic
ggcgcgccagtcctgagtgatagaatctgacatgttcatgccacgcagtctagccgggcccgttagccgccacaatcacatacccggatacaaagtgcagtctagtggtccatggcacaacactccattggaagtaaaaagagaagaatgccctggaactcacgtcactgtggaagaaacatgtgatgcgactcggaccgatg

SEQ ID NO: 7547 - DNA, 203 bp, Artificial sequence
  synthetic
ggcgcgccagtccttggcctccaagggcgatgttgatcctttctctttgggactcctcatgctttttctttgtagtgacatgttcctgatgaagaggttttcgatgcgtgctctcattgctgggagcatcatcatgctgggagccatgacattaggaagcttgacatatcttgacctcttacgctatgcgactcggaccgatg

SEQ ID NO: 7548 - DNA, 203 bp, Artificial sequence
  synthetic
ggcgcgccagtccttggtcacggttgggatgtacatggctgaagccaatagtggaggagatgtgacacacctggctctcatagcggtttttcgggtgcgggctggctttgttagcgtgctggccctaaaacaaatgtggagccctagagagagatttgtcgcagcttgtggaatagttatggttcagacgactcggaccgatg

SEQ ID NO: 7549 - DNA, 203 bp, Artificial sequence
  synthetic
ggcgcgccagtccttagcactgggagacatcatgaatactaatctcatggagtggctgaatgcagctggcatgtcaatactcgtcatcaagtcaatagtcgatccgagaaagtgcaatgtggtgctccctttactctgtcttctcacaccacttacgacgacagaaattcaaagggctgtgatgctatcgactcggaccgatg

SEQ ID NO: 7550 - DNA, 203 bp, Artificial sequence
  synthetic
ggcgcgccagtccttctgttctgtggtcatttccgtgaccgtactgcaaaccgacagcgtctcaacaagaaagtctatccctcttatagccttgaccatttgttcattctttaaatggacaagccctttccttggcctggtgtgttacttagcttttacacgcattccccagcgctcatggccattggcgactcggaccgatg

SEQ ID NO: 7551 - DNA, 203 bp, Artificial sequence
  synthetic
ggcgcgccagtcctcccttgtgttggcccccacccgggtagtcctcagtgaaatgaaggaagccatgcctaaaatgagcatcaaattccacacccaagcattttcaaacactgctacaggaaaagaaatcattgatgcaatgtgtcatgctacgttaacccatagaatgttggagcctactcgggtgacgactcggaccgatg

SEQ ID NO: 7552 - DNA, 203 bp, Artificial sequence
  synthetic
ggcgcgccagtcctctaactgggaagtagttatcatggatgaagcccactttatggacccagctagcattgccgcaagaggatgggcagcacatagatcaagagcgagggaatgtgccaccatcttcatgtctgctacacctcctggaaccagcaatgaattccctgagtccaatggaaccatagaggcgactcggaccgatg

SEQ ID NO: 7553 - DNA, 203 bp, Artificial sequence
  synthetic
ggcgcgccagtcctcctcaggcattgtcatgttctttttggcacccaaagggctcagccgcatgtcgatggcaatgatgaccatgttggtgtctgcttacttgatgtctttgggaggtatgaacccagtgcaggtgtcctgtgtaatgctggtattcttcatattcatggtggtgttgatacctgaaccgactcggaccgatg

SEQ ID NO: 7554 - DNA, 203 bp, Artificial sequence
  synthetic
ggcgcgccagtcctcagggacacagcgatcaacatatgacaaccagctcatctatctgcttgttggagtgatgagtgtcatcctcatggtcacagccaatgagatgggtatgctggaaaaaaccaagagagacatctttggcacaaccgtcgtggaagagggaaagaagtggacctttccagaactagcgactcggaccgatg

SEQ ID NO: 7555 - DNA, 203 bp, Artificial sequence
  synthetic
ggcgcgccagtccttgtctgtcgtcatactcttgctgagtgcttggaatggaataacactgcttcccctgtttgcaggaatgggagctgcagccctgcactggggatttatcctaccaggactgcgtgcccaagctgccaaggccgctcaaaaaagagtgtaccatggagtggcgaagaatcctgtggcgactcggaccgatg

SEQ ID NO: 7556 - DNA, 203 bp, Artificial sequence
  synthetic
ggcgcgccagtccttgttggaaggaaatacaaatgcatactggaatgggccgattgctgtagcattcactgggctgatgagaggcaattattatgcgaccattggcttgatgtacaatggatggctagcaaaacagaccaggagaggaagggctgcaggagttactcttggtgaagtgtggaaaaggccgactcggaccgatg

SEQ ID NO: 7557 - DNA, 203 bp, Artificial sequence
  synthetic
ggcgcgccagtccttgtcaggaagagtaattgacctggggtgtggacgaggtggctggagctattattcggctgcgcaaaaagaagtcatgagcgtcaaaggttacacgctgggaatcaatggacatgaaaaacccgtgcacatgcaaaccctaggctggaacattatcaaattcaaggataaatctgcgactcggaccgatg

SEQ ID NO: 7558 - DNA, 203 bp, Artificial sequence
  synthetic
ggcgcgccagtcctatgtcttcaccatgccagctgaaccatgtgagacacttctttgtgacataggggaatcatcatcaaattttcttattgaaaaagatagaactctcaaagtcctggaaaattttgaaaggtggaaacacgtcaatactgagaacttctgtgttaaagtcttgtgcccttaccatccgactcggaccgatg

SEQ ID NO: 7559 - DNA, 203 bp, Artificial sequence
  synthetic
ggcgcgccagtcctattacttgggtagctacttgtgtaaagccactggcagttcttcatccatgctgaatggcattgttaaaatgctatccatgccttgggacaagtttgaatccgtgacattactggctatgactgatacaaccccctttggacaacagcgcgtcttcaaagagaaggttgacacaacgactcggaccgatg

SEQ ID NO: 7560 - DNA, 203 bp, Artificial sequence
  synthetic
ggcgcgccagtcctgagccccttctccaccacctggcaccagagccatcatgagagttgtcaactcctggctgtttaaacacctggctagagagatgcgacctaggatctgcacaaaagaagagttcatttccaaggtcaggagtcatgctgcaattggtgcatacttggaagaacatgaaaattggacgactcggaccgatg

SEQ ID NO: 7561 - DNA, 203 bp, Artificial sequence
  synthetic
ggcgcgccagtcctgaagcgctagcgaagctgtccaagacccacggttttggaagcttgtggatgaagaacggaaactccacctacaaggcaaatgcaggacctgtgtttacaacatgatgggcaagagagagaaaaaacctgctgagttcggaaaagccaaaggaagtagagccatctggtacatgtcgactcggaccgatg

SEQ ID NO: 7562 - DNA, 203 bp, Artificial sequence
  synthetic
ggcgcgccagtcctggtatacaaaccaaaacagacaggaccggacctgcctgatgtcagcccgtcataatgacgccatggctaagctgtgaggccatgctggctgggatagccgcgaccacccgcgtaatggggttcctggattgctcgatccggggtaaaaaatttttagggagcctccgcctgctgcgactcggaccgatg

SEQ ID NO: 7563 - DNA, 203 bp, Artificial sequence
  synthetic
ggcgcgccagtccttgtggaccaaaattgatttctttatattacatcaagatatcaattgtaccggttttacattaactatagtagataaggatgaaagaacaaaggacctcgagtattttgaccttaattgtgagtattatgagaatttgtatgatgcattaatggattctgagttttctaaaacttcgactcggaccgatg

SEQ ID NO: 7564 - DNA, 203 bp, Artificial sequence
  synthetic
ggcgcgccagtcctggtttacattgttgctaaaatatattgattatgctccaattagtacgaacagtcgaggaatgccccgcccggagaccatctgtgtttcaaaacattggtggtatgagttatataggattggattcttgaataagttgtaccgatgtggagactgggatagtattttacttctcccgactcggaccgatg

SEQ ID NO: 7565 - DNA, 203 bp, Artificial sequence
  synthetic
ggcgcgccagtcctatgcaaagtgtgaagcgaaattctttggatcaataagtgttattgatgtctgcatagatatcattagtgctttgttgcaagtgagcttcgctaaacctggactcaagttagcttctattgcagtagaagtgttcagacttattaagaaatatgtctcaggaattaagattaacacgactcggaccgatg

SEQ ID NO: 7566 - DNA, 203 bp, Artificial sequence
  synthetic
ggcgcgccagtcctgacgcagagttgatctgtgtgctgaagtacgtaataaggttgagtttacgaaggaaggatattcaaagactaaaggatgcatggtaagacgcttggataaggatttagttaagaagaagactggagacatatgttcaacagaatgttatttagtagacttggttaatcccgagacgactcggaccgatg

SEQ ID NO: 7567 - DNA, 203 bp, Artificial sequence
  synthetic
ggcgcgccagtcctctggagagaaataccaaactgatttagaatatgaagattttttagatatgtgtttggagaaaactcaggagtgtagagataattctgctaagttgaacgaatttctgatgaactatgctgaaagtcgatcaaaacgacccgaacaaaaacacgataagtgccctgaattggaatcgactcggaccgatg

SEQ ID NO: 7568 - DNA, 203 bp, Artificial sequence
  synthetic
ggcgcgccagtcctttggtaagcatgtttccatggtctcttatggagatgacaatgtcataaacttcagtgatgaagtatgtgaatggtataacatggaaactattgctaaagcatttgaaacccttggattcacctatactgatgagcttaagggcgtaaatggcgaagtaccaaaatggcgatcaacgactcggaccgatg

SEQ ID NO: 7569 - DNA, 203 bp, Artificial sequence
  synthetic
ggcgcgccagtccttgcctggcgattcacaacaagaaagcaatactcccaacgtacacaatacggaactcgcttcgtccactagtgaaaactcggttgagacccaagaaatcacaacctttcatgatgtggaaactccaaataggatcgatacccccatggctcaggatacttcatcggctaggaacacgactcggaccgatg

SEQ ID NO: 7570 - DNA, 203 bp, Artificial sequence
  synthetic
ggcgcgccagtcctaggctggcggaaaagctcaaaagcttgccaattttaagtacctgcgatgtgatgttcaggtgaagttagtacttaatgcgaatccctttgtagcaggaagaatgtatctagcatatagtccttacgatgataaagttgacacggcccgtagtgttttacaaacatcgcgagctgcgactcggaccgatg

SEQ ID NO: 7571 - DNA, 203 bp, Artificial sequence
  synthetic
ggcgcgccagtcctaagttcagaaaaataatccttctgggtataaatatattatgcatgtcttgactggctatgaacctgaagtaaagaatgtaacaatgcaagtgaacgctccaaaaacgaaaacaagtcaaaaatctacctcagaaaatcccaaagttggaccaatatctgaagtggcttctggagcgactcggaccgatg

SEQ ID NO: 7572 - DNA, 203 bp, Artificial sequence
  synthetic
ggcgcgccagtcctccagagcaggaaacgatgactttacctttggttggatgataggtccaccccagctacaaggcgaatcacgctccgtagccccctagatgtgcactgggagacagacaaatctccctatgtatggctatagtctaaatttttcacaaaatttcagtttagaccgaaaaccgacaccgactcggaccgatg

SEQ ID NO: 7573 - DNA, 203 bp, Artificial sequence
  synthetic
ggcgcgccagtcctatgtggtgctggagcatggaggctgcgtcacagtacgggttgaagggaaacccacactagactttgaattggtacaaacaaaggccacgggactagcggctgtgagggcttattgttaccaggcaaaggtcagtgatatccaaatctcagcggcatgtccagcggtacagctgacgactcggaccgatg

SEQ ID NO: 7574 - DNA, 203 bp, Artificial sequence
  synthetic
ggcgcgccagtcctggaccatgcttgaggtggaacccccttacggagacagctacatcgtcattggggtcggagacggaaggctcaagcagcattggttcaagaaagggagtgtaattggaggagctttcagcaccaccatgaaaggggcgaaacgcctagcagttttgggagacgcggcatgggactcgactcggaccgatg

SEQ ID NO: 7575 - DNA, 203 bp, Artificial sequence
  synthetic
ggcgcgccagtccttggaaatcaggcctgtgagtgagagagaagaaaccctgataaggtcaaaagtctccgctggagacgggaatgagatagacaccttctcactaggactactggttgcaatgttggtgacacaggaaggcctgaggaaacgctgggctactcgccatatcatggtggcttcactgacgactcggaccgatg

SEQ ID NO: 7576 - DNA, 203 bp, Artificial sequence
  synthetic
ggcgcgccagtcctggcgctggacgccacgagagtcaatgctactggccatatcggcttgtttcttacacctcgtgttttcagagctaagtactgacatcacaacgctggctcataatttttccctagccttgctgatactacgagccatcatccaaacagacgtcagctctgtgacacttccagtgtcgactcggaccgatg

SEQ ID NO: 7577 - DNA, 203 bp, Artificial sequence
  synthetic
ggcgcgccagtccttgtctatgatggctccttcattccagctctcagtcctaggaactttcagaatggcagtggcagtttatgttatcgtcaatctgatgatgtcaaaacggaatgatgccgtaaagaaagcggcccccagcgtggtggcagcagctctgggacaattcggaatggtgaatgcaacggcgactcggaccgatg

SEQ ID NO: 7578 - DNA, 203 bp, Artificial sequence
  synthetic
ggcgcgccagtcctgactctttggaaaaactcaggtaggagtcggagtgatgcatgaaggggtgtttcacaccatgtggcacgtcactagaggggccgctttgaaaagcggagaaggaagattagacccttactggggagacgtgaagaaggacctgatttcatatggagggccatggaagttggaagcgactcggaccgatg

SEQ ID NO: 7579 - DNA, 203 bp, Artificial sequence
  synthetic
ggcgcgccagtcctcgcctggcagcgacaatccctttccagcttccaacgcccccataacagacacagaagctcagattcctgacaaggcctggagcacaggcttcgattggatcacagaatatggaggaaagacagtctggttcgttcctagtgtccgcatgggaaacgagattgccgcttgcttgacgactcggaccgatg

SEQ ID NO: 7580 - DNA, 203 bp, Artificial sequence
  synthetic
ggcgcgccagtcctgcatgctccttgataacatccatatgcaaaatggtctcatagctcaattgtatggccctgaacaagacaaatgtttcgccactgatggagaatttaaattgagagagaaggaaagagccactttcctggagttcctgaaggcggacttgccagtgtggctgtcatttaaggcagcgactcggaccgatg

SEQ ID NO: 7581 - DNA, 203 bp, Artificial sequence
  synthetic
ggcgcgccagtcctctagttctggggttcagtaccatgacaggaaatggtgctttgatggaccagacaacaatttggtcttggaagacaatgttccagttgagatctggacgaagtcaggggaaaggaagaagctaaaacccagatggagtgacgccaggacgtattgtgaccatggtgctctcaccgcgactcggaccgatg

SEQ ID NO: 7582 - DNA, 203 bp, Artificial sequence
  synthetic
ggcgcgccagtcctctttcaaagagtttgctgggggaagaaggagtgtgacgacaggccttctagaaggagttgggagactgccagaacatcttggccaacgcctgaaagaatccattgacaccctgtacttagctttcacagctgaagttggctcgcgcccccatcgagaggctatgcaagaaatgccgactcggaccgatg

SEQ ID NO: 7583 - DNA, 203 bp, Artificial sequence
  synthetic
ggcgcgccagtcctgagtctttcacaagaccgagaggaaatccacagaattcacactcctgactcctccggatttaaggccagccacggcatggagcatatatgccattggaaccaccctcatcactccactgatccaccacatgattactactcactatgcaaacttctctttgatggccatggcaacgactcggaccgatg

SEQ ID NO: 7584 - DNA, 203 bp, Artificial sequence
  synthetic
ggcgcgccagtcctatcaagcaggcagtctcttcggcatgcagacaggagctccattctcaaaaatggactgggcagtgccggccattgtggtcggatgctggcaacaactaactcctgccacactgatgacggctttggtcttgctagctgtccactatatctacatgattccgggatggcaggctgcgactcggaccgatg

SEQ ID NO: 7585 - DNA, 203 bp, Artificial sequence
  synthetic
ggcgcgccagtcctaagaccttcaaagttggagtgagtgcgccaccctatcagccgctgcagccgccacgctttgggaaggatccccaggaaagatttggaatgcgtcaacggcttgttcactggtgaacatcttcagaggccacacgctagcagccgtacctttcatgttcaccatactgcggaacacgactcggaccgatg

SEQ ID NO: 7586 - DNA, 203 bp, Artificial sequence
  synthetic
ggcgcgccagtcctctggaaatacagggaaaagaggaggtgttgagggggaaactctaggggagaaatggaaacaccttctcaatgccatggacaagtatgagttctccaggtacaaggtaaatggcatctttgaggtggatcgtgaaccagcccgtatggccctggccaacggtcttgtgacgagtgcgactcggaccgatg

SEQ ID NO: 7587 - DNA, 203 bp, Artificial sequence
  synthetic
ggcgcgccagtccttggagccgtggcttaagaacaaacctgaattctgcataaaagtgttgtgcccgtacagaccaaaagtcattgagcgcctaagcgccttgcagagaacctatggagggggactcgtaagggtcccgctttcaaggaacagcacacatgaaatgtactggacttctgggacggcagcgactcggaccgatg

SEQ ID NO: 7588 - DNA, 203 bp, Artificial sequence
  synthetic
ggcgcgccagtcctaggcaaaggtgaacaaccatgcagcaatgggttccatctttgaggaggagcatcaatggcagacggccaaggaagcagtggaagatccagggttctgggctctggttgacagagagagagaagctcatttggctggacggtgtgaaacctgtgtctacaacatgatgggaaaaccgactcggaccgatg

SEQ ID NO: 7589 - DNA, 203 bp, Artificial sequence
  synthetic
ggcgcgccagtcctgttacgtcttgagagacatatccagaaggcctggaggaaagatgtacgctgatgacacagccggctgggatacccgcataacagaaaaagacttggacaatgaggcaaaaattatagaccagatggaaggtgaacacaagcagttggccaaggccatcatggaactcacgtacacgactcggaccgatg

SEQ ID NO: 7590 - DNA, 203 bp, Artificial sequence
  synthetic
ggcgcgccagtcctggcacaaagtggtgaaagtcatgcgcccaggccctgggggaaaaacatacatggacatcatttcccgggaggaccagagaggtagtgggcaagtggtcacatatgctttgaacaccttcacaaatatgattgtgcaactcactcgatgtgcagaggcagaaggtgtcctgatcccgactcggaccgatg

SEQ ID NO: 7591 - DNA, 203 bp, Artificial sequence
  synthetic
ggcgcgccagtcctcgtcaatgagagaaaggaaattgacgccagcggagcatagagctcttctcctatggttggatactgaaggagtgaaaagactgaaaaagatggccatcagtggagatgattgtgtggtgaagggagaggatgaaagattcgccactgcactgtacttcctcaatgccatggcaacgactcggaccgatg

SEQ ID NO: 7592 - DNA, 203 bp, Artificial sequence
  synthetic
ggcgcgccagtcctccgcatggaccgtcagagaatcggctgggctggccaaagcttatgcgcaaatgtggaagttgatgtacttccacagacgcgacttacggctcatggccaatgcaatctgctcggccgtccccaaagactgggtccccacgggcagaaccacgtggtcaatacatggaaaaggagcgactcggaccgatg

SEQ ID NO: 7593 - DNA, 203 bp, Artificial sequence
  synthetic
ggcgcgccagtcctcaccggataaaggtagacggtgctgcctgcaacctttctgcggaaggaataaccgcagtcaataaaaccaaaaagagggagttgagaaccctttgggccgcccaggcctgggattgaaccgttgatcccaggcgaagggactagaggttagaggagacccagcctttctcaccacgactcggaccgatg

SEQ ID NO: 7594 - DNA, 203 bp, Artificial sequence
  synthetic
ggcgcgccagtcctacccaaggcccaaccttgctgaacctttaggcaggtaaaaggactagaggttagaggagaccccttggcaaaacagttaacgcaccaaaagaaacagcatattgacacctgggatagaccggagaatttgctgcctcgcaacacctcccacccggcacagaacgccgacatggtcgactcggaccgatg

SEQ ID NO: 7595 - DNA, 203 bp, Artificial sequence
  synthetic
ggcgcgccagtcctcctcagtgaaaggaaccaacatgtgcacgatcagggctttggacgtaggctacacttgcgcttatgacacaacttacgagtgccctcacctggaagtgaccatggatccggaagacatagattgttggtgcacacttgaatctgtttatgttaactacggactctgcaagcaaacgactcggaccgatg

SEQ ID NO: 7596 - DNA, 203 bp, Artificial sequence
  synthetic
ggcgcgccagtcctttatggccaaggacaaaccaacactagacatcaagttgataagaatggaagccaaggacctggccacggttcgtagttactgctaccaggccactgtcaccgactcgtcaactgaggccagatgccctaccatgggtgaagcccacaactccaaatctcttgacgccagctacgcgactcggaccgatg

SEQ ID NO: 7597 - DNA, 203 bp, Artificial sequence
  synthetic
ggcgcgccagtcctacaacaaacattggcttgtcaaccgtgactggttccatgatctggatctaccctggactggacccgccactgagtcgtggaagaaccgtgagagcctcatcgagtttgaggagccccatgctactcgacaaacagtagttgctttgggtaaccaagagggcgctctgcatacggcgactcggaccgatg

SEQ ID NO: 7598 - DNA, 203 bp, Artificial sequence
  synthetic
ggcgcgccagtccttcaatgtgcatgctgacaccggttgtgctattgacatggcacgtcgtgagctgaaatgtggaagtggtatcttcatccacaacgatgttgagacatggaggaacaattacaaataccacccactcacgccacgcggctttgccaaggtcattcagatgtcaaaggataaaggtgcgactcggaccgatg

SEQ ID NO: 7599 - DNA, 203 bp, Artificial sequence
  synthetic
ggcgcgccagtcctgctttggatggaagaattggggaaagagctttatcttttcaaccgaaacagccaactccacattcattgtcgatggaccagaaagtaaagagtgcccaacatcagaccgggcttggaactccctagaattggaggatttcgggttcggaatcatctcaaccaagattttcctaacgactcggaccgatg

SEQ ID NO: 7600 - DNA, 203 bp, Artificial sequence
  synthetic
ggcgcgccagtcctaggtcaacgagcaacggggaaactcatgcgactcagcggtgattggaacagccgtcaagggcaatgaagctgtccatagtgacttgggattctggatccagagcacaaagaatgaatcctggcaactggagagagcagtccttggggaggtcaagtcgtgcacatggccggaaacgactcggaccgatg

SEQ ID NO: 7601 - DNA, 203 bp, Artificial sequence
  synthetic
ggcgcgccagtcctgccacacattgtggggcgacggagttgaggagagtgacttgattattccaatcacgctggccggaccaaaaagccaccacaacatgcgcccagggtacaagactcaaaccaaagggccctggcatgaggagacacctctcgtcatcgagtttgctgaatgtccagggaccacagcgactcggaccgatg

SEQ ID NO: 7602 - DNA, 203 bp, Artificial sequence
  synthetic
ggcgcgccagtccttgacccaggaagagagttgtggcggtagaggaccatcaattaggacaacaacagcaagtggaaggaccatacgcaattggtgttgcaagaactgcacccttcctccactccgatttatggccggggaaaactgctggtatggcgtggaagtcagacccaagcgcgagaatgaggcgactcggaccgatg

SEQ ID NO: 7603 - DNA, 203 bp, Artificial sequence
  synthetic
ggcgcgccagtcctaaaccctaatcaagtcaaaagtctcagcggggaatggccagaccattgagcccttccaactcgggatcctaatggcatttgtgttcacccaagaagtcctgaggaggaggtggacggcgaacctagcgttgcccacctcagccttgctaatggcttgtttcatctttggcggctcgactcggaccgatg

SEQ ID NO: 7604 - DNA, 203 bp, Artificial sequence
  synthetic
ggcgcgccagtcctgtttgggaaaacggggatggcctgccagtgaagtactaacagccgtgggcatgactttcgctcttgcggggagtgttgccagactggacggagggactatggccatcccattggccaccatggccatactggctgttgcctatgtcctctcaggaaaatccactgacatgtggtcgactcggaccgatg

SEQ ID NO: 7605 - DNA, 203 bp, Artificial sequence
  synthetic
ggcgcgccagtccttgaaagcccgcctccgaacggtcatactggttcccaccagagtcgtcgccgctgaaatggcagaggcacttcgtggtctccccatcaggtatcaaacatcagccgtcaaggcagaacactctgggaatgagatagtggatgccatgcgccacgcaacactgacacagcgcctgccgactcggaccgatg

SEQ ID NO: 7606 - DNA, 203 bp, Artificial sequence
  synthetic
ggcgcgccagtccttaacaccagcaaaagtgccgaactacaacgtgtttgtgatggatgaagcccacttcactgacccagcaagtatagcggcaagggggtacatttcaaccaaggtggaacttggggaggctgcggccatcttcatgactgcaacaccgccgggaacgactgacccctttccagactcgactcggaccgatg

SEQ ID NO: 7607 - DNA, 203 bp, Artificial sequence
  synthetic
ggcgcgccagtcctataggaagagctacgactctgagtaccagaagtgcaaaggcaatgactgggacttcgtcataacaactgacatttccgaaatgggggccaattttggcgctcatagggtcattgacagtaggaagtgcgtgaaaccagtcattctggacggagatgacagagtcctcatgaatgcgactcggaccgatg

SEQ ID NO: 7608 - DNA, 203 bp, Artificial sequence
  synthetic
ggcgcgccagtccttgatgtgtgtggcatcactgggaatgttcactctgatggttcaccggaggggtctgggcaagactggactgggaaccctagtgctcgcgacggtcacggtcctcctatggatctcagatgtgccagccccaaagatagctggagttctcctaattgcattcctgctgatgatcgcgactcggaccgatg

SEQ ID NO: 7609 - DNA, 203 bp, Artificial sequence
  synthetic
ggcgcgccagtccttcctcatcccagaacccgaaaagcaaaggagccagacagataaccatttggcaatctttctcgtgtgcgttcttctgttgattggggccgtttccgccaacgaaatggggtggcttgagacaaccaaaaaagacatcggaaagctgttccgctcaagtggagacacacaagagccgactcggaccgatg

SEQ ID NO: 7610 - DNA, 203 bp, Artificial sequence
  synthetic
ggcgcgccagtcctagtcgacctggcaatcttgggcacccgaggtgagagcagccactgcatgggcaggttatgctgggctcacagtgttcttaacaccacttttccggcatctcatcaccacccagtatgtgagcttttccctgaccgcaattacagcccaggcctcggctttgtttggtctgagcgcgactcggaccgatg

SEQ ID NO: 7611 - DNA, 203 bp, Artificial sequence
  synthetic
ggcgcgccagtcctggcacatcgaccttgaacatccgtaccggacatggcactaccacggaagctacgaggttcagcccactggatcagccaactcaatggtcaatggcgtggtgcgcctgttgtctaagccatgggacgcaattaccagcgtggtaaccatggcaatgactgacacgaccccctttgcgactcggaccgatg

SEQ ID NO: 7612 - DNA, 203 bp, Artificial sequence
  synthetic
ggcgcgccagtcctgccaacaaagggtgtttaaagagaaggtggatacacgggccccagacccagcggtgggagttgctcaggcactggacatcacaacaggctggctatggaccttcctggctagaagcaagaaacccaggatgtgcacgcgtgaggagtttatcgcgaaggtcaatagcaacgcggcgactcggaccgatg

SEQ ID NO: 7613 - DNA, 203 bp, Artificial sequence
  synthetic
ggcgcgccagtcctcattgggcgcggtgtttgatgagcagaaccagtggtcaacggctagagaagcagtggaagacccagccttctggaacctagttgatgaggagcgcaaagcccacctggcaggacgctgtgaaacatgcatctacaacatgatgggaaagcgagagaaaaaactaggagagttcgcgactcggaccgatg

SEQ ID NO: 7614 - DNA, 203 bp, Artificial sequence
  synthetic
ggcgcgccagtcctacctggagggtggaaacatgtttgctgatgacactgcaggctgggataccagaatcacgagggctgatcttgaaaacgaagccaaagtgatgaacatgatggatggagaacataaacaactcgccaaggctataatcgaattgacctacaggcataaagtagtcaaggtcatgccgactcggaccgatg

SEQ ID NO: 7615 - DNA, 203 bp, Artificial sequence
  synthetic
ggcgcgccagtcctggcctgcgcggggagggaagacagtcatggacatcatctccagggaggaccagagagggagtggccaagtagtcacctatgcacttaacaccttcaccaacctggcggctcaactagtgagatgcatggagggggaggaactgttgacggagagtgacgtgcacggcttgagcccgactcggaccgatg

SEQ ID NO: 7616 - DNA, 203 bp, Artificial sequence
  synthetic
ggcgcgccagtcctcgaagaagaagcaagcagtccggaactggttgatccaaaatggaagagagaggctttcgcgcatggctgtcagtggagatgactgcgtggtgaaacccattgatgaccgattcgcgagcgcccttcatttcctcaatggcatggcaaagatcaggaaagatacccaggaatggacgactcggaccgatg

SEQ ID NO: 7617 - DNA, 203 bp, Artificial sequence
  synthetic
ggcgcgccagtcctaaatccgcaacttgatcggggatgagaagtatgtggactgcatggtgtcccagcacaggttcgaaacaccttcgcccgtgctgttcaccggcgccatctaaacccaaaagaccaaaaaaggacaattgtgtcaggccatggaaacatgccacccaaagcttgtagagggtgcagcgactcggaccgatg

SEQ ID NO: 7618 - DNA, 203 bp, Artificial sequence
  synthetic
ggcgcgccagtcctcctgcgccaagccccaggaggactgggttaccaaagccgttaggcccccacggcccatttcaggagacagcgcgactcctggaggaaggactagaggttagaggagacccgtggaacatcgctgaggcccaaaccagcccgaagctgtaggactggtggaaggactagaggttacgactcggaccgatg

SEQ ID NO: 7619 - DNA, 203 bp, Artificial sequence
  synthetic
ggcgcgccagtccttggcttccatgaccgacttcgtgcaccttcccaaaaagaagagtggggtttccataattgggaggatgctggttttttcattcacagcagcggtcagagtcaccctagaaaacggcatgtctttgatgaaaattcaaaaggctgacgttggaaaggtcatcaccatacgcactgcgactcggaccgatg

SEQ ID NO: 7620 - DNA, 203 bp, Artificial sequence
  synthetic
ggcgcgccagtcctaccgaggtgaaaacaggtgcatagtgcaagcaatggatgtgggcgaggattgtgaggacacgatgaagtatctctgcccagccatcgaaaacccttcagaacctgatgacattgactgttggtgtgacaaggcagacgccatggtgacctacgggagatgttcaaaaactcgaccgactcggaccgatg

SEQ ID NO: 7621 - DNA, 203 bp, Artificial sequence
  synthetic
ggcgcgccagtcctccccagacaagcccacaatagatttggaactaacatcaacgatagccaaatcgatggcagtgactagaacttactgtgtgcaagctcaagtttcggaactgtccgtggaaactagatgtccaaccatgggcgaagcgcacaattccaagtcaagcgacgctgcctacgtgtgcacgactcggaccgatg

SEQ ID NO: 7622 - DNA, 203 bp, Artificial sequence
  synthetic
ggcgcgccagtcctagaaaggattcagtgacagaggctggggaaatggatgtgggctctttgggaaaggtagcatggagacatgtgcaaagttttcatgtcagaccaaagcggaagggaggattattcaacgggagaacttggaatataccatccacatgaacgtccacgcctcacaggagaccggcccgactcggaccgatg

SEQ ID NO: 7623 - DNA, 203 bp, Artificial sequence
  synthetic
ggcgcgccagtcctacagctggcttgtcaatagagactggtttcacgatgtaaaccttccatggataggaggagcagaaggtcattggaaaaacagagagtccttggtggagttcggaaaaacccatgccaccaagcgagaagtgctagccctaggttcacaagaagggacattgcaagtggctctagcgactcggaccgatg

SEQ ID NO: 7624 - DNA, 203 bp, Artificial sequence
  synthetic
ggcgcgccagtcctcgggcgccatgatagcgaaatttggttcaaatgtggcaactataaatagtggacatctaaagtgcaggctgaaattggacaaactcaaaataaaaggcaccacgtaccacatgtgtaagggctcgtttgctttcacaaaaacgccttctgacacaggccacggcacggtgctgccgactcggaccgatg

SEQ ID NO: 7625 - DNA, 203 bp, Artificial sequence
  synthetic
ggcgcgccagtccttagaattgacttattctggatcagatgggccatgcagggtgcccatatcaatgtctgtgagcctgagcaacatagagcccgttggtaggatggtaactgtaaaccccatagtgctatcctcttccccccagaaaacaatcatgatcgaagtggaaccaccatttggagactcctcgactcggaccgatg

SEQ ID NO: 7626 - DNA, 203 bp, Artificial sequence
  synthetic
ggcgcgccagtccttcatcatcgctggaacaggcgaaccaagggcgcactaccactggaggaaatcaggaagcagcattggggcagcgtttgctaccaccatcaagggagccaggcgacttgccgtgatcggtgatgacgcatgggacttcggctctgtgggaggaatattaaactcagttgggaaagcgactcggaccgatg

SEQ ID NO: 7627 - DNA, 203 bp, Artificial sequence
  synthetic
ggcgcgccagtcctgagtcagatcagttggcaggttggaacatgaaatgtggagagccaatgctagggagataaacgccatccttcttgagaatgaaaagaacctgagtgttgtcgtcttggaaagtgaatactacagaaaggccaagaacctgatgcccataggcgacgaaatgccatttggatggacgactcggaccgatg

SEQ ID NO: 7628 - DNA, 203 bp, Artificial sequence
  synthetic
ggcgcgccagtcctaatacactgaggactgtgatcagaaagtgattggagccgcggtcaaaggagaattagccgctcatagtgatctaggctattggattgagagcaggtcaaaaaacggtagctgggaacttgaacgtgcttatctactagaatcaaaatcatgcagctggcccgcgacccacacaccgactcggaccgatg

SEQ ID NO: 7629 - DNA, 203 bp, Artificial sequence
  synthetic
ggcgcgccagtccttttggaatggaggagtggaggaatcagagttgataatacccaagagtagagcaggcccagtgtcacaccacaacaccagaaaaggctaccataaccaaattaaaggaccatggcaccttaccccattggagatcaggtttgaaagttgcccaggaacgaccgttgtgactaccgcgactcggaccgatg

SEQ ID NO: 7630 - DNA, 203 bp, Artificial sequence
  synthetic
ggcgcgccagtcctctctccatgaggccatggctgcagttggcattctatgtgccctctttggagccctggcggaaactgaggttgacttggctggaccgttggccgcggctgggctcatcgtcatggcttatgttatctcaggcagaagcaatgatctgagtatcaaaaaagttgaggatgtgaaatcgactcggaccgatg

SEQ ID NO: 7631 - DNA, 203 bp, Artificial sequence
  synthetic
ggcgcgccagtcctggagtgatgaagcagaagtcactggagagagtgtcagctaccacgtgagcctagatgttcgaggagacccaacattaacggaggactcaggacctggactggaaaaggtgctgctgaaggttggattaatggcaattagcgggatttaccccgtggccattcccttcgccttggcgactcggaccgatg

SEQ ID NO: 7632 - DNA, 203 bp, Artificial sequence
  synthetic
ggcgcgccagtcctgagcttggttctttctagaaaagaggtgcaagcgcgcgggagctctttgggacatcccttccccgcgggaagcaaagccagccaaggttgaggacggagtctaccgcatcttttctaggaagctgtttggcgaaagccaaattggagcaggcgttatggtaaagggcactttcccgactcggaccgatg

SEQ ID NO: 7633 - DNA, 203 bp, Artificial sequence
  synthetic
ggcgcgccagtcctaagtaaggcacattcaaacgaaacctggaatcttcaaaaccagtgagggagaaatcggggctctcgaccttgactgcatggctggaacttctgggtctccaatcgtgaacaagaacggggaagtggttggactgtatggaaatggtgttctcattaaaggggatcgctacgtgacgactcggaccgatg

SEQ ID NO: 7634 - DNA, 203 bp, Artificial sequence
  synthetic
ggcgcgccagtccttcttggcccctacccgtgtggtggcttcagaaatgtatgaagccttaagaggagagcctattagatacatgactccagcggtgcagagtgagagaactggaaatgaaatagtcgatttcatgtgtcactcgactttcaccatgaaactgttccaaggagtcagagttcccaattcgactcggaccgatg

SEQ ID NO: 7635 - DNA, 203 bp, Artificial sequence
  synthetic
ggcgcgccagtcctcacaaagaagaggaaggattggtagaaaccctgaaaagcttggagacatctatgcttacagtggaaatgtgagctcagacaacgaaggacacgtgagctggacagaagctagaatgttgttggacaacgtccatgttcaaggaggagtggtggcccaactgtatacgcctgaaacgactcggaccgatg

SEQ ID NO: 7636 - DNA, 203 bp, Artificial sequence
  synthetic
ggcgcgccagtccttgttattggaaaacaaccaggaaatagaagtgtggactaggcaaggacaaaggagagtgttgaaaccacggtggttagacggtagaattacttctgaccacttgaacttgaaaagctttaaggaatttgcatccgggaaaaggtcagccttgagcatccttgacttgattgcggcgactcggaccgatg

SEQ ID NO: 7637 - DNA, 203 bp, Artificial sequence
  synthetic
ggcgcgccagtccttagttctggttagaggaaaaggaccagggaagttggcgtttgggatggtttccatcggcgtgatgacctggctgttgtggtctgcaggagtcgacccagggaagatcgcagctgccgttatcctggtctttctgctgctcgtggtgctgattcctgaacctgaaaagcagaggtcgactcggaccgatg

SEQ ID NO: 7638 - DNA, 203 bp, Artificial sequence
  synthetic
ggcgcgccagtcctctgtgcaggacaaccagttagctatgctcatgttactcatagcgaccatcctaggaggggtggcagcaaatgaaatgggatggctggaaaaaacaaaagcagatctgtcatgggttgtgagagggaggagctcgaccaccaccccggtggttgaattggacatgaaacctgccacgactcggaccgatg

SEQ ID NO: 7639 - DNA, 203 bp, Artificial sequence
  synthetic
ggcgcgccagtcctctgcttggacactgtacgcgttggcaacaacgcttctcactcccctttttcagcatttgattgtcactaaatatgccaatatttctttgatggctattgcttcacaagctggaaccctctttagcatggacagtggtatccccttctcctccattgagttgagtgtgcctttgccgactcggaccgatg

SEQ ID NO: 7640 - DNA, 203 bp, Artificial sequence
  synthetic
ggcgcgccagtccttcgcccttgggtgctggacccagataacaccctgtagtcttattctcgcatgcgtgctcttgtcaacgcactatgcgattttgctccccggcatgcaggcacaggcagctcgagatgcccagagaaggacagcagccggcataatgaagaacgcagtggttgatggcatcgtggcgactcggaccgatg

SEQ ID NO: 7641 - DNA, 203 bp, Artificial sequence
  synthetic
ggcgcgccagtcctagatgaataccttggaattccaccgatacagacggagccacatcatggaagttgaccgagagccagcgagagctgccctcaagtcaggggactttactagaggagctgccgtatcaagagggagtgccaaattaaggtggatgcatgagcgaggatacatccgactgcatgatacgactcggaccgatg

SEQ ID NO: 7642 - DNA, 203 bp, Artificial sequence
  synthetic
ggcgcgccagtcctatggcagttatgtcgtgaagccttcaggaagcgcctcctcccaggtgaacggcgtggtcaagctgttgtcgaaaccatgggatgtgagctcagaagtcacgggaatgtccatgaccgacacaaccccctttggccaacagagagtgttcaaggaaaaagttgacaccaaggcgccgactcggaccgatg

SEQ ID NO: 7643 - DNA, 203 bp, Artificial sequence
  synthetic
ggcgcgccagtcctacacccgaatcaccgagtgtgacttgaggaatgaagcgcacatcatggaatacatggaaaatgaacatcgaaagctagcgcgtgccatctttgaacttacctacaaacacaaagttgtgaaagtgatgagaccaggaaaaggagtaccccttatggacatcatttcacgagaagcgactcggaccgatg

SEQ ID NO: 7644 - DNA, 203 bp, Artificial sequence
  synthetic
ggcgcgccagtcctaccacttccacagacttcaaatgaaagatggtagagagctagtggtaccatgtcgttctcaagatgagctaattggaagggccagggtgacgcagggtcctggagacctcatgagctcagcatgtctggccaaggcctatgcccagatgtggcagctgctgtatttccacagaacgactcggaccgatg

SEQ ID NO: 7645 - DNA, 203 bp, Artificial sequence
  synthetic
ggcgcgccagtcctggagccaagcccggaggggatccggcccccgacttccggaggttgccacaccttgtaaatatgtacatacagagtcagatccgaaaggccaccagtttggtgcagaactggtgctatctgtgaacactcccaggaggactgggtaaacaaagccattagggaccatcacggccccgactcggaccgatg

SEQ ID NO: 7646 - DNA, 203 bp, Artificial sequence
  synthetic
ggcgcgccagtcctgagggggagaagaacgcgaactcccccaaaggactagaggttagaggagacccgtgattagggagatgagggagcccatctcagggaaagctgtaaccctgggggaaggactagaggttagaggagaccctcccacaaagaagcgcaaacacaaaacagcatattgacacctggcgactcggaccgatg

SEQ ID NO: 7647 - DNA, 203 bp, Artificial sequence
  synthetic
ggcgcgccagtcctgcgagcagacgtgttcggggggctcaccgcccggtaatcctgggagacgtcccaggatcaggggaggaccagggacgcctggtggacccctcggcagaggatcattgtgttctgatcccaccgccgcgtctagagaggcgcgctctgccatctgactctttctcttgcctctaccgactcggaccgatg

SEQ ID NO: 7648 - DNA, 203 bp, Artificial sequence
  synthetic
ggcgcgccagtcctgacctcgcccagagtcccccaccatgggtgccgccctccgccaagatcgctgttgtctctagtccagagaacactcaaggaccatctgcggggaggccatccgctcctccccgaccccccatctacccggcaacagacgacttgctccttctctctgagcccccgccctatccgcgactcggaccgatg

SEQ ID NO: 7649 - DNA, 203 bp, Artificial sequence
  synthetic
ggcgcgccagtcctgcggccctgccacctcctctggcccctccggcggtgggaccggcgccgggccaggcgcccgatagttccgatcctgagggaccagccgcggggaccaggagtcgccgtgcccgcagtccggcagacgactcgggtcctgactccactgtgattttgcccctccgagccataggacgactcggaccgatg

SEQ ID NO: 7650 - DNA, 203 bp, Artificial sequence
  synthetic
ggcgcgccagtcctgcgtactgtaaagagaagggtcactgggacgaggagatcgccccggcgtgtactgggaggtagacttcacagaagtgaagcctggccggtatggaaacaggtatctgctggtattcatagatactttttccggatgggtagaagcttttcctaccaaaactgaaacggccctgacgactcggaccgatg

SEQ ID NO: 7651 - DNA, 203 bp, Artificial sequence
  synthetic
ggcgcgccagtccttgggtcccgatgataattttctccctgtcttatttactcatttaaaggctttagaagttgtgaggacccagatctgggaccagatcaaggaggtgtacaagcccggtaccgtggcaatcccccacccgttccaggtcggggaccaagtgcttgtcagacgccatcgacccggcacgactcggaccgatg

SEQ ID NO: 7652 - DNA, 203 bp, Artificial sequence
  synthetic
ggcgcgccagtcctgctgagctggacctgaacatgacccgctcccattctggtggcgagctggagagcttggctcgtgggaaaaggagcctgggttccctgagcgttgccgagccagccatgattgccgagtgcaagacacgaaccgaggtgttcgagatctcccggcgcctcatcgaccgcaccaatcgactcggaccgatg

SEQ ID NO: 7653 - DNA, 203 bp, Artificial sequence
  synthetic
ggcgcgccagtcctaagacggcactgaaggagaccctcggagcctaagggcatcggcaggagaatatgggcagcgggtctcctgccagcggcctccagcatcttgcccagcagctcaagaagagaaaaaaggactgaactccaccaccatcttcttcccttaactccaaaaacttgaaataagagtgtcgactcggaccgatg

SEQ ID NO: 7654 - DNA, 203 bp, Artificial sequence
  synthetic
ggcgcgccagtcctgaaagagactgatagggtcgctgtttgaaaaaaactggctccttcctctgcacctggcctgggccacacccaagtgctgtggactggcccgaggggccctgcacgtggccctgagcacctctcagcgtagcctgcctagtccctagacccctagccagctccaaggggaggcaccgactcggaccgatg

SEQ ID NO: 7655 - DNA, 203 bp, Artificial sequence
  synthetic
ggcgcgccagtcctctccaagcaggccaggctacctcgggggtctagagcgccagaagaaccaaaactggtatgaagggtggttcaatagctccccttggttcactaccctactatcaaccatcgccgggcccctattactcctccttctgttgctcattctcgggccctgcatcatcaataggttagcgactcggaccgatg

SEQ ID NO: 7656 - DNA, 203 bp, Artificial sequence
  synthetic
ggcgcgccagtcctgcaaggcacggaaattaccctggtaaaaagcccaaagcataggggaagtacagctaaaggtcaagtcgagaaaaacaaggagaacagggccaaacaggatatctgtggtcatgcctgggccggcccagggccaaagacagatggttcccagaaatagatgagtcaacagcagttcgactcggaccgatg

SEQ ID NO: 7657 - DNA, 203 bp, Artificial sequence
  synthetic
ggcgcgccagtccttctagggtgcccctcaactgtttcaagaactcccacatgaccggagctcacccctggccttatttgaactgaccaattaccttgcttctcgcttctgtacccgcgctttttgctataaaatgagctcagaaactccactccgcgcgccagtcctccgagagactgagtcgcccgcgactcggaccgatg

SEQ ID NO: 7658 - DNA, 203 bp, Artificial sequence
  synthetic
ggcgcgccagtccttataaaatgagctcagaaactccactccgcgcgccagtcctccgagagactgagtcgcccgggtacctgtgtgttcaataaaacctcttgctatttgcatccgaagccgtggtctcgttgttccttgggagggtctctcctaactgattgactgcccacctcgggggtctctcacgactcggaccgatg

SEQ ID NO: 7659 - DNA, 203 bp, Artificial sequence
  synthetic
ggcgcgccagtccttttcaaagggggccctggggtctttgtcgcggagatgcgctagcatcttcgcggtaaagaacaccccaggggtaacccctttgaacgcgggactgcgatagtgccaccccacgtctttcccactcctaacccgactcccacctcgggtccaatgaaaggaccaaataattcatccgactcggaccgatg

SEQ ID NO: 7660 - DNA, 203 bp, Artificial sequence
  synthetic
ggcgcgccagtccttggaatatgacagggttattttctttatcttatttctactttcacgggttctatccgtgaaaagggtacgtgttgccccttccttcttcggagaattcacacggcggtctttccgtctctcgacaagtgtgaatgcaacatgccggaaacggtgaagaaaacagttttctgcggcgactcggaccgatg

SEQ ID NO: 7661 - DNA, 203 bp, Artificial sequence
  synthetic
ggcgcgccagtcctaagtctagagtgcgcatcgaaacagctgtagcgacctcacagtagcagcggactcccctcttggcgacaagagcctctgcggccaaaagccccgtggataagatccactgctgtgagcggtgcaaccccagcaccctgattcgatgaacgttctttacggaaccagaggatggtcgactcggaccgatg

SEQ ID NO: 7662 - DNA, 203 bp, Artificial sequence
  synthetic
ggcgcgccagtccttaccattgattcaagatgtgttgatggaaccacaaggcaactccaactcctcggacaaaaacaattctcagtcgtcaggtaatgaaggtgtcattattaacaattattactcaaaccaatatcaaaattcaattgacctttccgctaatgctaacggcgttggcaaagaaaacacgactcggaccgatg

SEQ ID NO: 7663 - DNA, 203 bp, Artificial sequence
  synthetic
ggcgcgccagtcctaagtaccatacgtgaacatttgcccaacatcatcctggacacagcatgcaaattggaccattgtggtggctgttctttcccctttgcagtacgctgcaggctcagccacggaagtggacattactctgtccatacaacctgtgaaaccagtattcaatggcttaagacactcagcgactcggaccgatg

SEQ ID NO: 7664 - DNA, 203 bp, Artificial sequence
  synthetic
ggcgcgccagtcctttgtctttacgggtagtgctatgacaaaaggaaaattcttgatatcgtacacaccacctggtgcagggaaaccaacgactagagaccaagccatgcaagccacctatgctatttgggatctaggattgaattctagttacaacttcactgtccctttcatttcccccacacattcgactcggaccgatg

SEQ ID NO: 7665 - DNA, 203 bp, Artificial sequence
  synthetic
ggcgcgccagtcctataactctttttctttggaatctgcttcaggagttatgaacaatattctcttgacaccattgcctagtgacagactcaaggaaaacgagtttggtttagatgagcaacatagatggttaagctttcaatcagcaactagctcaacccccccttatagaactaaacaagactggacgactcggaccgatg

SEQ ID NO: 7666 - DNA, 203 bp, Artificial sequence
  synthetic
ggcgcgccagtcctcacacatgtggctggttggagctggttctacgaatcaaatttcgtttgttctgccttatacttctccactatctgtcctacctgctgtttggtttaacggattctctgacttttctaacacctcacgctttggtgttgctccaacatctgacttcggaagattgtttgtacaggcgactcggaccgatg

SEQ ID NO: 7667 - DNA, 203 bp, Artificial sequence
  synthetic
ggcgcgccagtccttttacgcaatgcactcggctggtggtggcggtatggctgctgctacgataatcactcaggaaatggttgaagctgctgagaaggccttagattgtctaactcctcaaggtgcaatagttgaaattggtattgatacggttgtgcacgttccgcgaaaaaccaaactacgcaggacgactcggaccgatg

SEQ ID NO: 7668 - DNA, 203 bp, Artificial sequence
  synthetic
ggcgcgccagtcctcagtagcgcacccctgcttccaaccaaagtttgaacctgccgtcctttcacgttacgaccctaggactacaaaagacgtagaccaggtcgctttctctaagcacacaactaatttggaagagcttccatctgttttctccatggttgcaaaagaatatgctaatagagtgtttacgactcggaccgatg

SEQ ID NO: 7669 - DNA, 203 bp, Artificial sequence
  synthetic
ggcgcgccagtcctgatcggatcgcaacgtgttacccaggaatccacttgggtgtacgcggccgttctgacgttggaattctgtagatgaaagttagctaggagcttttaattggaaatgagaacaaaaaaaaaaaaaaaaaaaaaaaaaaaaaaaaaaaaaaaaaaaaaaaaaaaaaaaaaaaaaaacgactcggaccgatg

SEQ ID NO: 7670 - DNA, 203 bp, Artificial sequence
  synthetic
ggcgcgccagtcctggtgttccagactagttcctgaggtaccaagttgtgaggggctatgggaaaacccctttgatccacactgcctgatagggtcgcggctggtcgagtcccatacactataataccagttgactttcatgcaatggacactctaactaaaaacattgaagatgaaactgtcaagatcgactcggaccgatg

SEQ ID NO: 7671 - DNA, 203 bp, Artificial sequence
  synthetic
ggcgcgccagtcctacaatgtcctcggcccttcaacgaccagggtaagaagaaaccacggcggaggccaatccataaaccaaagagccctcctcaggaatctcgcatcatcatccagcctgggccaggagctgcaaatctatccaattccagtgtggtcaccatggctgagagtgtggctctagctaacgactcggaccgatg

SEQ ID NO: 7672 - DNA, 203 bp, Artificial sequence
  synthetic
ggcgcgccagtccttgaaggtactgcagttgactattcaacagctgggtgtgcatcatctgtggatgatatagtcatggtgcttagacgctggcagattgtgggtgattttcagtgggctaacacagtgacccctggcaacaggattagtaggtttcaggtggtttttaatcgaatgccaacttttgccgactcggaccgatg

SEQ ID NO: 7673 - DNA, 203 bp, Artificial sequence
  synthetic
ggcgcgccagtccttacgccagccaccctcatcttgcccttcactaataccacatggcgaaaaagcacacgtgaaaattatggctatataacctggcatgttgtgaatcgcctgacagtcaactcaacatccccatccacaattagctgtgtcattttgatgcgagttggtaaggattttcagtttaccgactcggaccgatg

SEQ ID NO: 7674 - DNA, 203 bp, Artificial sequence
  synthetic
ggcgcgccagtcctagctcccctgtatgggaacctgcagatggccgccaatgatcagggtgattccaatcagcttggtgacgatgaaccagtgtgttttctcaattttgagactgcaaatgtgccaatacaaggggagtcgcacaccttggtgaaacatttttttggccgtcaatggctggttcgtaccgactcggaccgatg

SEQ ID NO: 7675 - DNA, 203 bp, Artificial sequence
  synthetic
ggcgcgccagtccttgttcaacatactggtgaggtacaagagatggatttgccagtgcctgaccggggtcatgcatctctactgcgcttctttgcctatttctctggagaagtgattctgaccattgtcaataatggaacaacaccctgcatggttgcacactcttatacaacagacaatctcacttccgactcggaccgatg

SEQ ID NO: 7676 - DNA, 203 bp, Artificial sequence
  synthetic
ggcgcgccagtccttgaatatgctgtcactgccatggggggtattcttatcccagcgaactctgccaagaatattagtatcccattttattctgtcacacctctacgccccacccgacccatgccagcatctcaggggggtggcttgacttttggcaggttgtatatctggacacaatctgggagcatcgactcggaccgatg

SEQ ID NO: 7677 - DNA, 203 bp, Artificial sequence
  synthetic
ggcgcgccagtcctccttcgcccatttcgcttctgtttgagacttaaaacacttgcctttgagctccatttggaaattgaatcagaccaatttcgaaatgtcagagacctcactactgagggagttgaacccaatccaggccctattatggttgttggtaaatcaggatccggcaaaagtgtattgtgcgactcggaccgatg

SEQ ID NO: 7678 - DNA, 203 bp, Artificial sequence
  synthetic
ggcgcgccagtcctctatatttgtgaacataccactcgtcctaagcaccaaaaattggttgagatggtctctggcaccttgaatcaattaaatggcatctccagtgctaaagatttgtgcttgagattgcagcatgtcttgaataagcttcaccaggtcaattttgagccagaattggaatggacacacgactcggaccgatg

SEQ ID NO: 7679 - DNA, 203 bp, Artificial sequence
  synthetic
ggcgcgccagtcctccgacccgaacctcttggtatttggatttcaggtgggccaggtgttgggaagagttttttatccaactatatagttaaacaaatagcaaagaaaaggcattggaagtcttatgcaaatccaacagggtcaaagcatatggatgggtatgtttcacaggaaatccatgtttttgacgactcggaccgatg

SEQ ID NO: 7680 - DNA, 203 bp, Artificial sequence
  synthetic
ggcgcgccagtccttcctgacgcactagagcgtaggtttccaatccgactcaatattaggccccttcagaaatacaatcataaaggtaggttggatgttgctactgcaatgagggatggcagtctacagaatggcacctgctgggaacgtgacattggtgggttgggccttgaacactggaatccaatcgactcggaccgatg

SEQ ID NO: 7681 - DNA, 203 bp, Artificial sequence
  synthetic
ggcgcgccagtcctcaatggagacatacttgtagatgagatcctctcagagctgcaggttagacatgaagtggccaattttatgaatcagggcaaggtgcgtaggctaagtgatttggacacaatgtttgaagaattggatgaattaaaacttgattttgattttgaccgcctggaagaacaggctagcgactcggaccgatg

SEQ ID NO: 7682 - DNA, 203 bp, Artificial sequence
  synthetic
ggcgcgccagtccttgccacaggattggcagttggtggcaagtatgtcttaacttttggacattctaagtttactcaattggactccatcagggatatggtctttaattcacctgccaaaggaacaccaattacttatgatgggctaccaacagatctccaactcttggattgtgacataccccaccacgactcggaccgatg

SEQ ID NO: 7683 - DNA, 203 bp, Artificial sequence
  synthetic
ggcgcgccagtcctatttaaagatgtgtctaagctcatagccacagatgattaccgaggtaatggctggttggtgtggaaagatgatgatcaatatatgattcaagaggtcactaaaatcagaccctttggacaaactacaactgcttctggcacaacatcatgccaaacatacatttataattgtaacgactcggaccgatg

SEQ ID NO: 7684 - DNA, 203 bp, Artificial sequence
  synthetic
ggcgcgccagtcctctacatttgttccaagctgaaagctcgctgtcctgtcttggaaatacaaccatggggtgttgccaggatgcgagcatatactgcctgcatgattatataacctgcaggcatagcagttccagggatctgctgtagtcaattaaaacctgggctcttcgtggttacggggttttccgactcggaccgatg

SEQ ID NO: 7685 - DNA, 203 bp, Artificial sequence
  synthetic
ggcgcgccagtcctacttttagaatagttttgctaatcaattccccgtctaggttgatttagttagtatttagtataagaccaatggtgatataaagaccacacctaatctccactttcggtgtgtgaccctaagccattggacttctttactttactattcctccccaccctaaaaaaaaaaaaaaacgactcggaccgatg

SEQ ID NO: 7686 - DNA, 203 bp, Artificial sequence
  synthetic
ggcgcgccagtcctgccgggaagactgggtcctttcttggataaacccactctatgcccggccatttgggcgtgcccccgcaagactgctagccgagtagcgttgggttgcgaaaggccttgtggtactgcctgatagggtgcttgcgagtgccccgggaggtctcgtagaccgtgcaccatgagcaccgactcggaccgatg

SEQ ID NO: 7687 - DNA, 203 bp, Artificial sequence
  synthetic
ggcgcgccagtcctaaatcctaaacctcaaagaaaaaccaaaagaaacaccaaccgtcgcccacaagacgttaagtttccgggcggcggccagatcgttggcggagtatacttgttgccgcgcaggggccccaggttgggtgtgcgcgcgacaaggaagacttcggagcggtcccagccacgtggaagcgactcggaccgatg

SEQ ID NO: 7688 - DNA, 203 bp, Artificial sequence
  synthetic
ggcgcgccagtcctgggtaaggtcatcgataccctaacgtgcggctttgccgacctcatggggtacatccctgtcgtgggcgccccgctcggcggcgtcgccagagctctcgcgcatggcgtgagagtcctggaggacggggttaattttgcaacagggaacttacccggttgctccttttctatcttcgactcggaccgatg

SEQ ID NO: 7689 - DNA, 203 bp, Artificial sequence
  synthetic
ggcgcgccagtcctatctcagtgctggataccggtctcaccgaatgtggccgtgcagcggcccggcgccctcacgcagggcttgcggacgcacatcgacatggttgtgatgtccgccacgctctgctctgccctctacgtgggggacctctgcggtggggtgatgctcgcagcccaaatgttcattgtcgactcggaccgatg

SEQ ID NO: 7690 - DNA, 203 bp, Artificial sequence
  synthetic
ggcgcgccagtcctctcgccgcagcaccactggtttgtccaagactgcaattgctccatctaccctggtaccatcactggacaccgcatggcatgggacatgatgatgaactggtcgcccacggctaccatgatcttggcgtacgcgatgcgtgtccccgaggtcattatagacatcattagcggggccgactcggaccgatg

SEQ ID NO: 7691 - DNA, 203 bp, Artificial sequence
  synthetic
ggcgcgccagtcctgttgtgccccacggactgttttaggaagcatcctgataccacttacctcaaatgcggctctgggccctggctcacgccaaggtgcctgatcgactacccctacaggctctggcattacccctgcacagttaactataccatcttcaaaataaggatgtatgtgggaggggttgacgactcggaccgatg

SEQ ID NO: 7692 - DNA, 203 bp, Artificial sequence
  synthetic
ggcgcgccagtcctgcacaggctcacggctgcatgcaatttcactcgtggggatcgttgcaacttggaggacagagacagaagtcaactgtctcctttgttgcactccaccacggaatgggccattttaccttgctcttactcggacctgcccgccttgtcgactggtcttctccacctccaccaaaacgactcggaccgatg

SEQ ID NO: 7693 - DNA, 203 bp, Artificial sequence
  synthetic
ggcgcgccagtcctcatcgtggacgtacaattcatgtatggcctatcacctgccctcacaaaatacatcgtccgatgggagtgggtaatactcttattcctgctcttagcggacgccagggtttgcgcctgcttatggatgctcatcttgttgggccaggccgaagcagcactagagaagctggtcatcgactcggaccgatg

SEQ ID NO: 7694 - DNA, 203 bp, Artificial sequence
  synthetic
ggcgcgccagtcctcgcatctgtgcatggccagataggagcggctctgctggtaatgatcactctctttactctcacccccgggtataagacccttctcagccggtttttgtggtggttgtgctatcttctgaccctgggggaagctatggtccaggagtgggcaccacctatgcaggtgcgcggtggcgactcggaccgatg

SEQ ID NO: 7695 - DNA, 203 bp, Artificial sequence
  synthetic
ggcgcgccagtcctccgtgatggcatcatatgggccgtcgccatattctacccaggtgtggtgtttgacataaccaagtggctcttggcggtgcttgggcctgcttacctcctaaaaggtgctttgacgcgcgtgccgtacttcgtcagggctcacgctctactgaggatgtgcaccatggcaaggcacgactcggaccgatg

SEQ ID NO: 7696 - DNA, 203 bp, Artificial sequence
  synthetic
ggcgcgccagtcctctccagtgctgagggggacttagtagggtggcccagcccccctgggactaaatctttggagccgtgcacgtgtggagcggtcgacctgtacctggtcacgcggaacgctgatgtcatcccggctcgaagacgcggggacaaacggggagcgctactctccccgagacctctttccgactcggaccgatg

SEQ ID NO: 7697 - DNA, 203 bp, Artificial sequence
  synthetic
ggcgcgccagtcctcaccttgaaggggtcctcaggaggcccggtgctatgccccaggggccacgctgtcggagtcttccgggcagctgtgtgctctcggggcgtggctaagtccatagatttcatccccgttgagacactcgacatcgtcacgcggtcccccacctttagtgacaacagcacaccacccgactcggaccgatg

SEQ ID NO: 7698 - DNA, 203 bp, Artificial sequence
  synthetic
ggcgcgccagtccttgatcaagcagagacagctggggtcagactaactgtgctggctacagctacgccccctgggtcagtgacaaccccccaccccaacatagaggaggtggcccttgggcaggagggcgagatccccttctatgggagggcgattcccctgtcttacatcaagggaggaagacatctcgactcggaccgatg

SEQ ID NO: 7699 - DNA, 203 bp, Artificial sequence
  synthetic
ggcgcgccagtcctgatcttctgccattcaaagaaaaagtgtgacgagctcgcggcggcccttcggggtatgggcttgaactcagtggcatactacagagggttggacgtctccgtaataccaactcagggagacgtagtggtcgtcgccaccgacgccctcatgacagggtatactggggactttgacgactcggaccgatg

SEQ ID NO: 7700 - DNA, 203 bp, Artificial sequence
  synthetic
ggcgcgccagtcctagcctcaggaatgtttgacagtgtagtgctctgtgagtgctacgacgcaggggccgcatggtatgagctcacaccatcggagaccaccgtcaggctcagggcgtatttcaacacgcccggtttgcctgtgtgccaagaccatcttgagttttgggaggcagttttcaccggcctcgactcggaccgatg

SEQ ID NO: 7701 - DNA, 203 bp, Artificial sequence
  synthetic
ggcgcgccagtcctcacacacatagatgcccacttcctttcccaaacaaagcaatcgggggaaaatttcgcatacttaacagcctaccaggctacagtgtgcgctagggccaaagccccccccccgtcctgggacgtcatgtggaagtgtttgactcgactcaagcccacactcgtgggccccacacccgactcggaccgatg

SEQ ID NO: 7702 - DNA, 203 bp, Artificial sequence
  synthetic
ggcgcgccagtcctcatcatcggccgcttgcacattaaccagcgagccgtcgttgcgccggacaaggaggtcctctatgaggcttttgatgagatggaggaatgtgcctctagggcggctctcattgaagaggggcagcggatagccgagatgctgaagtccaagatccaaggcttattgcagcaagccgactcggaccgatg

SEQ ID NO: 7703 - DNA, 203 bp, Artificial sequence
  synthetic
ggcgcgccagtcctcaccagtccgctgtcaacaagcaccactatccttctcaacattttggggggctggctagcatcccaaattgcaccacccgcgggggccactggcttcgttgtcagtggcctagtgggagctgccgtaggcagtataggcttaggtaaggtgctagtggacatcctggcagggtacgactcggaccgatg

SEQ ID NO: 7704 - DNA, 203 bp, Artificial sequence
  synthetic
ggcgcgccagtccttggtgcgggcatttcgggggctctcgtcgcattcaagatcatgtctggcgagaagccctccatggaggatgtcgtcaacttgctgcctggaattctgtctccgggtgccttggtagtgggagtcatctgcgcggccattctgcgccgacacgtgggaccgggggaaggcgccgtcgactcggaccgatg

SEQ ID NO: 7705 - DNA, 203 bp, Artificial sequence
  synthetic
ggcgcgccagtcctccaatggatgaatagactcattgcctttgcttccagaggaaatcacgtcgcccccacccactacgtgacggagtcggatgcgtcgcagcgtgtgacccaactacttggctcccttaccataaccagcctgctcagaagactccacaactggattactgaggactgccccatccccgactcggaccgatg

SEQ ID NO: 7706 - DNA, 203 bp, Artificial sequence
  synthetic
ggcgcgccagtcctatgcggcggctcgtggctccgcgatgtgtgggactgggtttgcaccatcctaacagactttaaaaattggctgacctccaaattattcccaaagatgcccggcctcccctttgtctcctgtcaaaaggggtacaagggcgtgtgggccggcactggcatcatgaccacacggtgcgactcggaccgatg

SEQ ID NO: 7707 - DNA, 203 bp, Artificial sequence
  synthetic
ggcgcgccagtcctctcagagtacgcggaggtgacgcagcacgggtcataccactacataacaggactcaccactgataacttgaaagtcccctgccaactaccctctcccgagttcttttcctgggtggacggagtgcagatccataggtttgcccccacaccgaagccgtttttccgggatgaggtcgactcggaccgatg

SEQ ID NO: 7708 - DNA, 203 bp, Artificial sequence
  synthetic
ggcgcgccagtcctgagccagctatcggcaccatcgctgcgagccacctgcaccacccacggcaaagcctatgatgtggacatggtggatgctaacctgttcatggggggcgatgtgactcggatagagtctgggtccaaagtggtcgttctggactctctcgacccaatggtcgaagaaaggagcgacgactcggaccgatg

SEQ ID NO: 7709 - DNA, 203 bp, Artificial sequence
  synthetic
ggcgcgccagtcctccttgagccttcgataccatcagaatacatgctccccaagaagaggttcccaccagctttaccggcctgggcacggcctgattacaacccaccgcttgtggaatcgtggaaaaggccagattaccaaccggccactgttgcgggctgtgctctccctcctcctaggaaaacccccgactcggaccgatg

SEQ ID NO: 7710 - DNA, 203 bp, Artificial sequence
  synthetic
ggcgcgccagtcctggccctttcggagacaggttccatctcttccatgccccccctcgagggggagcttggagatccagacctggagcctgagcaggtagagccccaaccccccccccaggggggggtggcagctcccggctcggactcggggtcctggtctacttgctccgaggaggacgactccgtcgactcggaccgatg

SEQ ID NO: 7711 - DNA, 203 bp, Artificial sequence
  synthetic
ggcgcgccagtcctgaagatggccctttatgacattacacaaaaacttcctcaggcggtgatgggggcttcttatggattccagtattcccccgctcagcgggtagagtttctcttgaaagcatgggcggaaaagaaggaccctatgggtttttcgtatgatacccgatgctttgactcaaccgtcaccgactcggaccgatg

SEQ ID NO: 7712 - DNA, 203 bp, Artificial sequence
  synthetic
ggcgcgccagtccttagcatggggaacaccatcacatgctacgtgaaagccttagcggcttgtaaagctgcagggataatcgcgcccacaatgctggtatgcggcgatgacttggttgtcatctcagaaagccaggggaccgaggaggacgagcggaacctgagagccttcacggaggctatgaccagcgactcggaccgatg

SEQ ID NO: 7713 - DNA, 203 bp, Artificial sequence
  synthetic
ggcgcgccagtcctcgtttgcggtcgatatctcttcaattgggcggtgaagaccaagctcaaactcactccattgccggaagcgcgcctcctggatttatccagctggttcaccgtcggcgccggcgggggcgacatttatcacagcgtgtcgcgtgcccgaccccgcttattgctctttggcctactcgactcggaccgatg

SEQ ID NO: 7714 - DNA, 203 bp, Artificial sequence
  synthetic
ggcgcgccagtcctctggggtgaccgggtcctttcttggagcaacccgctcaatacccagaaatttgggcgtgcccccgcgagatcactagccgagtagtgttgggtcgcgaaaggccttgtggtactgcctgatagggtgcttgcgagtgccccgggaggtctcgtagaccgtgcaacatgagcacacgactcggaccgatg

SEQ ID NO: 7715 - DNA, 203 bp, Artificial sequence
  synthetic
ggcgcgccagtcctggtaaagtcatcgataccctaacgtgcggattcgccgacctcatggggtacatcccgctcgtcggcgctcctgtaggaggcgtcgcaagagccctcgcgcatggcgtgagggcccttgaagacgggataaatttcgcaacagggaacttgcccggttgctccttttctatcttccgactcggaccgatg

SEQ ID NO: 7716 - DNA, 203 bp, Artificial sequence
  synthetic
ggcgcgccagtcctcttcttgctctgttctcttgcttaattcatccagcagccagtctagagtggcggaatacgtctggcctctacgtccttaccaacgactgttccaatagcagtattgtgtatgaggccgatgatgtcattctgcacacacccggctgtgtaccttgtgtccaggacggcaatacacgactcggaccgatg

SEQ ID NO: 7717 - DNA, 203 bp, Artificial sequence
  synthetic
ggcgcgccagtcctagacctcgacgccatcaaacggtccagacctgtaactgctcgctgtacccaggccatctttcaggacatcgaatggcttgggatatgatgatgaattggtcccccgctgtgggtatggtggtggcgcatgtcctgcgtttaccccagaccttgttcgacataatggccggggcccgactcggaccgatg

SEQ ID NO: 7718 - DNA, 203 bp, Artificial sequence
  synthetic
ggcgcgccagtcctggatggggccccttaacagatgctaacatcaccggtccttctgatgacagaccatactgctggcactacgcacctagaccttgtgacattgtcccggcatcaagtgtctgcggccctgtgtactgcttcacaccatcgccagtggtcgtaggcactactgatgccaggggcgtgcgactcggaccgatg

SEQ ID NO: 7719 - DNA, 203 bp, Artificial sequence
  synthetic
ggcgcgccagtcctgatcttttctgccccactgactgcttcaggaaacatcccgagaccacgtacagccggtgtggtgcagggccctggttgacacctcgttgcatggttgactacccataccggctttggcattacccatgtacagtcgatttcagattgttcaaggtgaggatgtttgtgggtgggcgactcggaccgatg

SEQ ID NO: 7720 - DNA, 203 bp, Artificial sequence
  synthetic
ggcgcgccagtcctgtcacgctgaacgccgtcgctgctgctgggacacatggtatcggctggtacctggtagctttttgcgcggcgtggtacgtgcggggtaaactcgtcccgctggtgacctacagcctgacgggtctttggtccctagcattgctcgtcctcttgctcccccaacgtgcgtatgctcgactcggaccgatg

SEQ ID NO: 7721 - DNA, 203 bp, Artificial sequence
  synthetic
ggcgcgccagtcctgggagtagggatggtgtcatcctgctaacaagcctgctttatccatccttaatttttgacatcactaagctgctgatggcagtattgggcccattatacttaatacaggctaccattactaccaccccctactttgtgcgtgcgcatgtactggtccgcctttgcatgctcgtgcgactcggaccgatg

SEQ ID NO: 7722 - DNA, 203 bp, Artificial sequence
  synthetic
ggcgcgccagtcctcgctccgtgataggggggaaatacttccagatgatcatactgagcattggcagatggttcaacacctacctatacgaccacctagcgccaatgcaacactgggccgctgctggtctcaaagacctagcagtggccactgaacctgtaatatttagtcccatggaaatcaaggtccgactcggaccgatg

SEQ ID NO: 7723 - DNA, 203 bp, Artificial sequence
  synthetic
ggcgcgccagtcctatcacctggggtgcggatacagcggcttgcggagatattctttgcgggctgcccgtctctgcacgattaggccgtgaggtgttgttgggacctgctgatgactatcgggagatgggctggcgtctgttggccccgattacagcatacgcccagcaaactaggggccttcttgggcgactcggaccgatg

SEQ ID NO: 7724 - DNA, 203 bp, Artificial sequence
  synthetic
ggcgcgccagtcctactattgtgactagcttgactggcagagacaagaacgtggtgaccggtgaagtgcaggtgctttctacggctacccagaccttcctaggtacaacagtagggggggttatatggactgtttatcatggagcaggttcgagaacgctcgcgggcgccaaacatcccgcgctccaacgactcggaccgatg

SEQ ID NO: 7725 - DNA, 203 bp, Artificial sequence
  synthetic
ggcgcgccagtcctctcgcctgtctcaagggttcctctggaggtcccgttatgtgcccttcggggcatgttgcggggatctttagggctgctgtgtgcaccagaggtgtagcaaaatccctacagttcataccagtggaaacccttagcacgcaggctaggtctccatctttctctgacaattcaactcgactcggaccgatg

SEQ ID NO: 7726 - DNA, 203 bp, Artificial sequence
  synthetic
ggcgcgccagtcctcctcctgctgttccacagagctatcaagtaggatacctccatgccccgaccggcagcggtaagagcacaaaggtcccggccgcttatgtagcacaaggatataatgtcctcgtactaaatccatcggtggcggccacattaggcttcggctccttcatgtcgcgtgcctatgggcgactcggaccgatg

SEQ ID NO: 7727 - DNA, 203 bp, Artificial sequence
  synthetic
ggcgcgccagtcctttcgattctgtcatagattgcaacgtggctgttgaacagtacgttgacttcagcctggaccccaccttttccattgagacccgcactgctccccaagatgcggtttcccgcagccaacgtcgcggccgaacgggtcgaggtagactcggtacgtaccgatatgtcgcctccggtcgactcggaccgatg

SEQ ID NO: 7728 - DNA, 203 bp, Artificial sequence
  synthetic
ggcgcgccagtcctacgccccttctatatcggctggggcctgtccaaaatgaaacctgcttgacacaccccatcacaaaatacctcatggcatgcatgtcagccgatctggaagtaaccaccagcacctgggtgttgctcggaggggtcctcgcagccctagcggcctactgcttgtcagtcggctgccgactcggaccgatg

SEQ ID NO: 7729 - DNA, 203 bp, Artificial sequence
  synthetic
ggcgcgccagtccttcagtcaccagtcccctgacgaccaaccaaactatgttttttaacatactcggggggtgggttgccacccatttggcagggccccagagctcctccgcgttcgtggtaagcggcttggcaggcgctgccatagggggtataggcctgggcagggtcttgcttgacatcctggcacgactcggaccgatg

SEQ ID NO: 7730 - DNA, 203 bp, Artificial sequence
  synthetic
ggcgcgccagtcctggatacggagctggtgtctcaggcgccttggtagcttttaagatcatgggaggagaatgccccactgctgaggacatggtcaacctgttgcccgccatactatctccgggtgctctcgtcgtcggtgtgatatgcgcagccatactgcgccgacacgtaggacctggggagggacgactcggaccgatg

SEQ ID NO: 7731 - DNA, 203 bp, Artificial sequence
  synthetic
ggcgcgccagtcctgcggtacagtggatgaacaggctcatcgcgttcgcatcccggggcaaccacgtctcaccgacgcactatgttcccgagagcgatgctgcggcaagggtcaccgcattgctgagttctctaactgtcacaagtctgctccggcggttacaccagtggatcaatgaagactacccacgactcggaccgatg

SEQ ID NO: 7732 - DNA, 203 bp, Artificial sequence
  synthetic
ggcgcgccagtcctagcccttgtagcgacgattggctacgtaccatctgggactgggtttgctcggtgttggccgacttcaaggcatggctctctgctaagattatgccagcgctccctgggctgcccttcatttcctgtcaaaagggatacaagggcgtgtggcggggggacggtgtgatgtcaacacgactcggaccgatg

SEQ ID NO: 7733 - DNA, 203 bp, Artificial sequence
  synthetic
ggcgcgccagtcctgctgccaacagctacgttgaggtgcgtcgggtgggggacttccattacatcacgggggccacagaagatgagctcaagtgtccgtgccaagtgccggctgctgagttctttactgaagtggatggagtgagacttcaccgctacgcccctccatgtaagcccctgttgagagatcgactcggaccgatg

SEQ ID NO: 7734 - DNA, 203 bp, Artificial sequence
  synthetic
ggcgcgccagtccttccgccagccaactatcagctccgtcgttgaaggccacttgccagacgcataggcctcatccagacgctgagctagtggacgccaacttgttatggcggcaagagatgggcagcaacattacacgggtggagtctgagacaaaggttgtggttcttgattcgttcgagcctctgcgactcggaccgatg

SEQ ID NO: 7735 - DNA, 203 bp, Artificial sequence
  synthetic
ggcgcgccagtcctccacggggcgctccaccggtgcctccccctcggaggaaaaggacaattcagctggacggctctaatgtgtccgcggcgctagccgcgctagctgaaaaatcattcccgtcctcgaaaccacaggaagagaatagctcatcctccggggtcgacacacagtccagcactacttcccgactcggaccgatg

SEQ ID NO: 7736 - DNA, 203 bp, Artificial sequence
  synthetic
ggcgcgccagtcctaaggtgcccccttctccgggaggggagtccgactcagagtcatgctcgtctatgcctcctctcgagggagagccgggcgacccggacttgagttgcgactcttggtccaccgttagtgacagcgaggagcagagcgtggtctgctgctctatgtcgtattcttggaccggcgcccgactcggaccgatg

SEQ ID NO: 7737 - DNA, 203 bp, Artificial sequence
  synthetic
ggcgcgccagtcctttaaaggaggtaaaggagcgagcgtctagggtaaaggctcgcatgctcaccatcgaggaagcgtgcgcgctcgtccctcctcactctgcccgatcgaagttcgggtatagtgcgaaggacgttcgctccttgtccagcagggccattaaccagatccgctccgtctgggaggaccgactcggaccgatg

SEQ ID NO: 7738 - DNA, 203 bp, Artificial sequence
  synthetic
ggcgcgccagtcctttgctggaagacaccacaactccaattccaaccaccatcatggcgaagaacgaggtgttttgcgtggaccccgctaaagggggccgcaagcccgctcgcctcattgtgtaccctgacctgggggtgcgtgtctgtgagaaacgcgccctgtatgacgtgatacagaagttgtcacgactcggaccgatg

SEQ ID NO: 7739 - DNA, 203 bp, Artificial sequence
  synthetic
ggcgcgccagtcctacagcggctgcaaaggccgcaaacctccggaacccggactttcttgtctgcggagatgatttggtcgtggtggctgagagtgatggcgtcgatgaggatagagcagccctgagagccttcacggaggctatgaccaggtattctgctccacccggagatgctccacaggccactcgactcggaccgatg

SEQ ID NO: 7740 - DNA, 203 bp, Artificial sequence
  synthetic
ggcgcgccagtcctaccaagaccaacctcactccattgccagccgctggccagttggatttgtccagctggtttacggttggtgtcggcgggaacgacatttatcacagcgtgtcgcgtgcccgaacccgccatttgctgctttgcctactcctactaacagtaggggtaggcatctttctcttgccacgactcggaccgatg

SEQ ID NO: 7741 - DNA, 203 bp, Artificial sequence
  synthetic
ggcgcgccagtcctacggttggtgtcggcgggaacgacatttatcacagcgtgtcgcgtgcccgaacccgccatttgctgctttgcctactcctactaacagtaggggtaggcatctttctcttgccagctcgatgagctggtaagataacactccatttcttttttgttttttttttttttttttttcgactcggaccgatg

SEQ ID NO: 7742 - DNA, 203 bp, Artificial sequence
  synthetic
ggcgcgccagtcctttcccgggtggtggccagatcgttggcggagtttacttgttgccgcgcaggggccccagattgggtgtgcgcgcgactcggaagacttcggagcggtcgcaacctcgtggaagacgccaacctatccccaaggcgcgtcgacccgagggaaggtcctgggcacaaccaggatatcgactcggaccgatg

SEQ ID NO: 7743 - DNA, 203 bp, Artificial sequence
  synthetic
ggcgcgccagtcctgtaggcgcccccgtgggtagcgtcgccagggccctggcacatggtgtcagggctttggaggacgggatcaattatgcaacagggaatctccccggttgctccttttctatcttcctcttggcacttctttcgtgcctgactgtccccgcttcggccgttaactatcgcaatgtccgactcggaccgatg

SEQ ID NO: 7744 - DNA, 203 bp, Artificial sequence
  synthetic
ggcgcgccagtccttcaggcatctaccatgtcaccaatgactgcccgaattcaagcatagtgtatgaggccgaccatcacatcatgcaccttccaggttgcgtgccctgcgtgagagaggggaatcagtcacgctgctgggtggcccttactcctaccgtcgcagcgccatacatcggcgcaccgcttcgactcggaccgatg

SEQ ID NO: 7745 - DNA, 203 bp, Artificial sequence
  synthetic
ggcgcgccagtcctacaggccacagaatggcctgggacatgatgatgaactggagtccaacaaccaccttagttctcgcccaggtcatgaggatcccaaccactctggtagacttactctctggaggccactggggtgtcctcgtgggggtggcctatttcagcatgcaggccaattgggccaaagtccgactcggaccgatg

SEQ ID NO: 7746 - DNA, 203 bp, Artificial sequence
  synthetic
ggcgcgccagtcctaatgacagcttaaacactgggttcttggctagcttgttctacacccacaagtttaacagctcagggtgttccgaacggctcgcgtgctgcaagagccttgacagctacggccaaggctggggcccactcggggtcgctaacatcagcggctcgtctgatgacaggccttattgccgactcggaccgatg

SEQ ID NO: 7747 - DNA, 203 bp, Artificial sequence
  synthetic
ggcgcgccagtccttggcactacgcgcctcggccatgcgggattgtgccagcatccagtgtgtgtggccccgtgtattgtttcactcccagccctgtcgtggtcggtactactgatcacgtcggggtccctacttacacctggggggagaacgagactgatgtcttccttttgaactcgaccagaccgcgactcggaccgatg

SEQ ID NO: 7748 - DNA, 203 bp, Artificial sequence
  synthetic
ggcgcgccagtcctccgcatggtgcgtggtttggatgcgtgtggatgaacagtaccgggttcaccaaaacctgtggcgcccctccatgcgaggttaacaccaataatgggacctggcactgccccaccgattgcttcaggaagcatccggagactacctacgccaagtgcggatcagggccttggatccgactcggaccgatg

SEQ ID NO: 7749 - DNA, 203 bp, Artificial sequence
  synthetic
ggcgcgccagtcctgtgctcgcgttcctgcttctcgcggacgcgagagtctctgcctacctatggatgatgtttatggtaagtcaagttgaggcggctctgtccaacctaattaacatcaatgctgcttcagccgctggtgcccaaggcttctggtacgccatcctcttcatctgcattgtctggcatcgactcggaccgatg

SEQ ID NO: 7750 - DNA, 203 bp, Artificial sequence
  synthetic
ggcgcgccagtcctgtcaagggccggttcccagctgctgctgcctacgcagcctgcgggctgtggccctgttttctcctgcttctgatgctgcctgagagggcttatgcatacgaccaggaagtggcagggtcccttggcggcgccatcgttgtcatgctgaccattctgacactgtctccgcactaccgactcggaccgatg

SEQ ID NO: 7751 - DNA, 203 bp, Artificial sequence
  synthetic
ggcgcgccagtccttccttcctgggtactgcggttaacggcgtgatgtggaccgtctaccacggggcgggtgccaagaccatcagcggcccgaagggacctgtcaatcaaatgtacactaatgttgaccaagacttggtggggtggccagcaccccccggagtcagatctcttgctccgtgcacctgccgactcggaccgatg

SEQ ID NO: 7752 - DNA, 203 bp, Artificial sequence
  synthetic
ggcgcgccagtcctcctgctgaaaccacaacaaggctgaaagcttacttcgacacaccaggccttcctgtgtgccaagaccatctggaattctgggagagcgtctttacagggttaacccacatagacggtcatttcctatcccagaccaagcaatcgggtgagaatttcccgtatcttgttgcttaccgactcggaccgatg

SEQ ID NO: 7753 - DNA, 203 bp, Artificial sequence
  synthetic
ggcgcgccagtccttgcatgtcagctgatctcgaggtagtgacaagtacgtgggtcttggtgggcggcgtcctggcagctctggctgcttactgtctttcagtgggcagcgtagtgattgttgggagagtcgtcctgtcgggccaacctgctgtcattcctgatcgcgaagtgctctaccaacagttccgactcggaccgatg

SEQ ID NO: 7754 - DNA, 203 bp, Artificial sequence
  synthetic
ggcgcgccagtcctgacgaaatggaggagtgttccaaacacctcccactagtcgagcacgggttacaactggctgagcagttcaagcagaaggccttaggtctcctaaatttcgctggcaagcaagcccaagaggcaacaccagtgatccagtctaacttcgctaaacttgagcagttttgggcgaaccgactcggaccgatg

SEQ ID NO: 7755 - DNA, 203 bp, Artificial sequence
  synthetic
ggcgcgccagtcctgtgctaacatccatgctgacagacccatcacacataacggcggaatcggcgcgtcggagattggctcgagggtcacgaccctcgctagctagttcctcggcgagtcagctttcgccccgtcttcttcaggccacgtgtaccgctccccatgactcccctggtactgatctcctccgactcggaccgatg

SEQ ID NO: 7756 - DNA, 203 bp, Artificial sequence
  synthetic
ggcgcgccagtcctctggccgcaaagacctttggccagtcagagccgagctcagaccgtgatacagaccttaccaccccaactgagaccacagactcgggccccatcgtcgtggatgatgcatccgatgacggatcttattcgtcaatgcctccactagagggggagcccggtgacccggacttgacacgactcggaccgatg

SEQ ID NO: 7757 - DNA, 203 bp, Artificial sequence
  synthetic
ggcgcgccagtcctctgatcgtgtatccggatctcggatcccgggtttgcgagaagagagcgcttcacgacgtcatcaaaaaaactgccttagccgtgatgggagccgcttatggcttccaatactccccagcgcagcgggtggaatttcttctgactgcttggaagtcgaagaacgacccaatggggcgactcggaccgatg

SEQ ID NO: 7758 - DNA, 203 bp, Artificial sequence
  synthetic
ggcgcgccagtcctgggtatcggagatgtcgcgcaaccggcgtctacaccaccagcttcgggaacacgctgacgtgctatctcaaagccacggccgccatcagggcggcggcgctgagagactgcactatgttggtttgcggtgatgacttagtcgtcatcgctgagagcgacggcgtagaggaggaccgactcggaccgatg

SEQ ID NO: 7759 - DNA, 203 bp, Artificial sequence
  synthetic
ggcgcgccagtcctggagtcacctactctatcactccgctggatttaccggcaatcattcaaagactccatggcttaagcgcgttcacgctgcacggatactctccacacgaactcaaccgggtggccggagccctcagaaaacttggggtacccccgctgagagcgtggagacatcgggcccgagcacgactcggaccgatg

SEQ ID NO: 7760 - DNA, 203 bp, Artificial sequence
  synthetic
ggcgcgccagtcctgtccgcgctaagcttatcgcccagggaggtagagccaaaatatgtggcatatacctctttaactgggcggtaaaaaccaaactcaaactcactccattgcctgccgctgccaaactcgatttatcgggttggtttacggtaggcgccggcgggggagacatttatcacagcatgcgactcggaccgatg

SEQ ID NO: 7761 - DNA, 203 bp, Artificial sequence
  synthetic
ggcgcgccagtcctttacggtaggcgccggcgggggagacatttatcacagcatgtctcatgcccgaccccgctatttactcctgtgcctactcatacttacagtaggggtaggcatcttcctgctgcctgctcggtaggcagcttaacactccgaccttagggtcccctttttttttttttttttggcgactcggaccgatg

SEQ ID NO: 7762 - DNA, 203 bp, Artificial sequence
  synthetic
ggcgcgccagtcctccttggcccctttacgccaatgaaggcctcgggtgggcagggtggttgctctccccccgaagctctcggcctaattggggccccaatgacccccggcggaaatcccccaatttgggtagggtcatccataccctaacgtgcggattcccccacctcatggggtacatcccgctccgactcggaccgatg

SEQ ID NO: 7763 - DNA, 203 bp, Artificial sequence
  synthetic
ggcgcgccagtcctgtaggcggccccgttgggggcgtctcaagggctctcgcacacggtgtgaaggttcttgaagacgggataaactatgcaacagggaatctacccggttgccctttctctatctttgtccttgcacttctttggtgcctgaccgtccccgcttccgcagttccttaccgtaatgctcgactcggaccgatg

SEQ ID NO: 7764 - DNA, 203 bp, Artificial sequence
  synthetic
ggcgcgccagtccttggcactatcccccacgaccgtgcggggtggtgccagcccgggatgtctgcggtccagtctactgtttcacacctagcccagtggtcgttggcactactgaccgcagagggtgtcccacttataactggggcagcaacgagactgacatccttctcttgaataacattaggccccgactcggaccgatg

SEQ ID NO: 7765 - DNA, 203 bp, Artificial sequence
  synthetic
ggcgcgccagtcctctcaccccccggtgtttggtgcactacccttaccggttgtggcattacccgtgcaccgtaaattacaccatctttaaggtgcgcatgttcatcggaggcctagagcacaggcttgaagcggcatgcaattggacctatggtgagcggtgtgaccttgaagacagagatagggcccgactcggaccgatg

SEQ ID NO: 7766 - DNA, 203 bp, Artificial sequence
  synthetic
ggcgcgccagtcctcatgtcaagggcaggttggtccctggggccacctacctttgcttgggcgtttggccactactcttagtccgtctcctccggccccacagggccctggccctggactcaagcgatggcgggactgtgggttgtcttgtgctaattgttcttacaatctttacacttacccctgggcgactcggaccgatg

SEQ ID NO: 7767 - DNA, 203 bp, Artificial sequence
  synthetic
ggcgcgccagtccttacaaaaagaaggtagtgctggtcatgtggtggcttcagtatttcatagcccgagtggaggccatcatccacgtgtgggtgcccccgttgcaggttaagggtggtcgtgacgctgtcatcatgctcacatgcctcttccaccctgccttggggtttgagatcacaaaaatcctccgactcggaccgatg

SEQ ID NO: 7768 - DNA, 203 bp, Artificial sequence
  synthetic
ggcgcgccagtcctgaccatcttgcccccatgaaggattgggcagcgtctgggctccgcgaattaacggtggccacagaacccatcgtattctccgcgatggagacgaaggtcatcacgtggggggctgacacggccgcgtgtgggaacatacttgctgttcttccggtatcagctagacggggccgccgactcggaccgatg

SEQ ID NO: 7769 - DNA, 203 bp, Artificial sequence
  synthetic
ggcgcgccagtcctgaaattttcctggggccggccgacgacatcaagacgtcgggttggcgactcctcgcccctatcaccgcgtatgcgcagcagacgcgaggggtactgggcgccatagttctcagcctgaccggccgggacaaaaatgaagccgagggtgaggtgcagttcttatccacggcaacacgactcggaccgatg

SEQ ID NO: 7770 - DNA, 203 bp, Artificial sequence
  synthetic
ggcgcgccagtcctttcttcgccgacggggggtgctcgggcggcgcgtatgacgtaatcatatgcgacgagtgccattcccaggacgctaccaccatccttgggataggcacagtccttgaccaggcagagacggctggagctaggctcgttgtcttggcgacggccattccccccggcagtgtaacgcgactcggaccgatg

SEQ ID NO: 7771 - DNA, 203 bp, Artificial sequence
  synthetic
ggcgcgccagtcctgagactactacagtgccccaggacgcagtgtccagaagccagcgtaggggccgtacagggagaggtaggcacggcatataccggtatgtttcgtctggggagagaccgtccggcattttcgactctgtggtgctctgtgagtgctacgatgccgggtgtgcatggtatgatctgcgactcggaccgatg

SEQ ID NO: 7772 - DNA, 203 bp, Artificial sequence
  synthetic
ggcgcgccagtcctactcctgctgagactaccgtgaggttgcgtgcttacctgaacacccccgggctccctgtctgtcaagaacatctggaattctgggaaggggtgttcacagggcttactaacatcgacgcccacatgctgtcacaggcaaagcagggtggggaaaacttcccataccttgtggcacgactcggaccgatg

SEQ ID NO: 7773 - DNA, 203 bp, Artificial sequence
  synthetic
ggcgcgccagtccttttgatgagatggaggagtgctcagcctccttgccctatgtggacgaggcacgtgccatcgccgggcaatttaaggagaaagtgcttggcctcattggcacggctggccagaaagctgaaactctgaaaccggcagctacgtccatgtggagcaaggccgagcagttctgggcacgactcggaccgatg

SEQ ID NO: 7774 - DNA, 203 bp, Artificial sequence
  synthetic
ggcgcgccagtcctaagcatatgtggaactttgtcagtgggatccaataccttgctggcctttcgaccttgccgggtaatcccgccgtggccacgttgatgtctttcaccgccgcggtgacctcccctcttacaacacatcagaccctcctttttaatattctaggagggtgggtggcctcacagatccgactcggaccgatg

SEQ ID NO: 7775 - DNA, 203 bp, Artificial sequence
  synthetic
ggcgcgccagtcctctgcaggcaaaactcctcccgcaactccccggagtgcccttcttctcatgccagaaggggtacaagggtgtatggcgcggggatggagtgaactccaccaagtgtccttgcggagcgacgatatctggtcacgtgaagaacggaaccatgagaatcgtcggcccgaagctgtgccgactcggaccgatg

SEQ ID NO: 7776 - DNA, 203 bp, Artificial sequence
  synthetic
ggcgcgccagtcctagtaacacctggcaaggcaccttcccaatcaacgccacaacaacagggcccagcgtacctgccccggcccccaactacaagttcgccttgtggagggtgggcgccgcggactacgcggaggtgcgccgtgtaggggactaccactacataacgggggtgacacaagacaatctgcgactcggaccgatg

SEQ ID NO: 7777 - DNA, 203 bp, Artificial sequence
  synthetic
ggcgcgccagtcctaccgtcttaacatcaatgctgtcagatcccgcccacatcacggcggaaacggccaagcgcaggctaaatcgagggtctccaccctctctggcaaactcctcggccagtcagctctcagccccctctctcaaggccacctgcactatacaaggccaccacccagatgcagacctccgactcggaccgatg

SEQ ID NO: 7778 - DNA, 203 bp, Artificial sequence
  synthetic
ggcgcgccagtcctggggaccctgacctttcgtcagggtcatggtcaaccgtcagcggtgaggacaacgtggtgtgttgctccatgtcatacacctggactggggcgctcatcaccccttgctctgctgaagaggaaaaattacccatcaatcccttaagcaacaccttattacgccaccacaatcttcgactcggaccgatg

SEQ ID NO: 7779 - DNA, 203 bp, Artificial sequence
  synthetic
ggcgcgccagtcctgggaagaagcctgcacggctgatagtctaccccgaccttggagtccgcgtctgcgagaagcgggctttgtacgacgtagctcaaaaactgccgacagcccttatggggccctcgtatgggtttcagtactccccagcgcagcgggttgacttcttactgaaggcgtggaaatctcgactcggaccgatg

SEQ ID NO: 7780 - DNA, 203 bp, Artificial sequence
  synthetic
ggcgcgccagtcctcaggggacacacgaagatgaagcgagcctgagagccttcactgaggctatgaccaggtactccgctcccccgggtgatcccccggttccagcttatgacctggagctcgtaacatcttgctcctcgaacgtgtccgtcgcccgcgatgcttcaggcaacagaatttactatctccgactcggaccgatg

SEQ ID NO: 7781 - DNA, 203 bp, Artificial sequence
  synthetic
ggcgcgccagtcctctagcatttgaaatgtatgggtcagtttattctgttactccgctggatcttccagctatcattcaaagactccatggacttagcgcgttttcactccattcatactctccgagcgagatcaatagggtggctagttgcctcaggaagcttggggtaccccctttgagagcttggcgactcggaccgatg

SEQ ID NO: 7782 - DNA, 203 bp, Artificial sequence
  synthetic
ggcgcgccagtcctacgctgaccggctggacttgtccagctggttcaccgttggcgctggcgggggggacatttatcacagcatgtcccgtgcccgaccccgcaacttactcctgtgcctactcctacttagcgtaggggtaggcatctttttactccccgctcggtgagctgggagctaaacactcccgactcggaccgatg

SEQ ID NO: 7783 - DNA, 203 bp, Artificial sequence
  synthetic
ggcgcgccagtcctgccagccccttaacggggcgacactccaccatgatcactcccctgtgaggaactactgtcttcacgcagaaagcgtctagccatggcgttagtatgagtgtcgtgcagcctccaggcccccccctcccgggagagccatagtagtctgcggaaccggtgagtacaccggaattgcgactcggaccgatg

SEQ ID NO: 7784 - DNA, 203 bp, Artificial sequence
  synthetic
ggcgcgccagtcctccaggacgaccgggtcctttccattggatcaaacccgctcaatgcctggagatttgggcgtgcccccgcaagactgctagccgagtagcgttgggttgcgaaaggccttgtggtactgcctgatagggtgcttgcgagtgccccgggaggtctcgtagaccgtgcaacatgagccgactcggaccgatg

SEQ ID NO: 7785 - DNA, 203 bp, Artificial sequence
  synthetic
ggcgcgccagtcctggtcactggggtgtcctgatcgccatcgcctacttcggcatgtcaggcaattggttgaaggtaatcgctgtgttattcctgtttgcaggggtagaggcaaccaccaccgtcggcagagcggccggccgttctgcttatctcttcacctccattttctcgtctggtccaaatcagcgactcggaccgatg

SEQ ID NO: 7786 - DNA, 203 bp, Artificial sequence
  synthetic
ggcgcgccagtcctaagatacagcttattaacaccaatggtagctggcacataaataggaccgctctaaactgtatcgacagtctccaaactgggtttcttagcgcgttgttctaccgcagcaatttcaactccacgggttgctcagaacggcttggcgcatgcaagcccttggaacacttccagcagcgactcggaccgatg

SEQ ID NO: 7787 - DNA, 203 bp, Artificial sequence
  synthetic
ggcgcgccagtcctggatggggccctataacccacaagtccaacatcacagggccgtctgaggaccggccctactgctggcactatgctcctagggagtgtagtgtagtgccggcgtcatcagtgtgtggtcctgtttactgcttcacacctagccctgtcgtggtgggcaccaccgacaggctgggccgactcggaccgatg

SEQ ID NO: 7788 - DNA, 203 bp, Artificial sequence
  synthetic
ggcgcgccagtcctcagctcctgtgccctactgactgcttccggaaacatccggaggccacatatcagaagtgtgggtcggggccctggctgacccccaggtgtctggtggactatccctacagattgtggcactatccatgcactgtcaactacacaatacacaaggttcgcatgttcattgggggccgactcggaccgatg

SEQ ID NO: 7789 - DNA, 203 bp, Artificial sequence
  synthetic
ggcgcgccagtccttgggacaatagtcaggctgcatcacttggggtcgttgcccttctggtgttgacaatctttaccctcagccctatgtacaaacagctgctcacacacgctatctggtggaaccaatacatgttggctcgggctgaagctatgatacatgattgggtgccagatttgcgggtcaggcgactcggaccgatg

SEQ ID NO: 7790 - DNA, 203 bp, Artificial sequence
  synthetic
ggcgcgccagtcctggcggtagggatgccatcattctgctcacctgcttgttacacccacatctcgggtttgaggtcacaaagattttgttagccatcttagcccctctgtatatcctccagcacagtctgctcaaggtgccctactttgtgcgcgcccacatcctcctgcgggcttgtatgttcttccgactcggaccgatg

SEQ ID NO: 7791 - DNA, 203 bp, Artificial sequence
  synthetic
ggcgcgccagtcctcgcaaagtggcggccggtaaatatgtgcaagcttgcctcttgaggttgggcgcctggactggcacatacatatacgatcatctagctcctctcagtgagtgggcgagcgacggcttgcgtgatctagccgtagctgttgagccagtcatcttttcccccatggagaaaaagatccgactcggaccgatg

SEQ ID NO: 7792 - DNA, 203 bp, Artificial sequence
  synthetic
ggcgcgccagtcctattacgtggggtgcagacaccgctgcgtgtggcgacatcttgaggggtctccctgtgtccgcgagactaggggacttggtgctgctgggacccgcggatgacatgcgtcacggaggttggaagcttctggctcccatcaccgcatacgcccaacagacgcggggactggttggccgactcggaccgatg

SEQ ID NO: 7793 - DNA, 203 bp, Artificial sequence
  synthetic
ggcgcgccagtcctccgcctgcggtgcctcagacctaccaggtggggtacctgcacgctccgacgggtagcggtaaaagtactcgtgtcccggcagcttacgccacccagggatacaaggtgctagttctgaatccgtctgtagcggcaacgctgagcttcggggcatacatgagcaaagctcatggtcgactcggaccgatg

SEQ ID NO: 7794 - DNA, 203 bp, Artificial sequence
  synthetic
ggcgcgccagtcctcatctcatcttctgtcactcaaagaagaaatgcgacgaactgtctaaacaactaacctcattaggtctcaatgctgtcgcattctatagaggtgtcgatgtggctgtgatccccacctcaggcgacgtcgtcgtctgcgcgacggacgcccttatgaccggctacacgggcgaccgactcggaccgatg

SEQ ID NO: 7795 - DNA, 203 bp, Artificial sequence
  synthetic
ggcgcgccagtcctggattgactcacatagatgcccacttcttgtcccagacgaagcaggggggcgagaactttgcctacctcgtggcctatcaggccacggtgtgtgccagagccaaagcccccccgccgtcatgggacgtgatgtggaaatgtctcaccagacttaagccgaccctcacaggtcctcgactcggaccgatg

SEQ ID NO: 7796 - DNA, 203 bp, Artificial sequence
  synthetic
ggcgcgccagtcctacccccctcctatatcgtctgggggctgtccaaaatgagatagtaacaacacatccaatcacaaagtacatcatgacctgcatgtctgcagacctggaagtcatcacaagtacgtgggtaatcgtaggtggagtccttgccgcattagcagcctactgtttgacagtgggctgtcgactcggaccgatg

SEQ ID NO: 7797 - DNA, 203 bp, Artificial sequence
  synthetic
ggcgcgccagtcctgttgtcatctgtggcaggatcgtgacaagcggcaagcctgcggttgtccctgatcgggaggtcctgtaccagcagtttgatgagatggaggagtgctctaagcacatcccctacctagttgagggtcagcagattgctgagcagttcaagcaaaaggtccttgggctgctccagcgactcggaccgatg

SEQ ID NO: 7798 - DNA, 203 bp, Artificial sequence
  synthetic
ggcgcgccagtcctacttgctcatgcggggctcaaattgctggacacgtgaagaacgggtctatgaagatcacaggaccccggatgtgcagcaacacttggcatggaacgtttccgatcaacgccacaactaccagccctagtgtgccggtaccggcccccaactacaaacgcgctctctggcgagttcgactcggaccgatg

SEQ ID NO: 7799 - DNA, 203 bp, Artificial sequence
  synthetic
ggcgcgccagtcctgaggtgagcttctctgtgggcctcctagagtttgttgtggggtctcagctcccttgtgagccagagcctgacgtgaccgtagtcacgtcaatgctcactgacccctcacacatcaccgcagagacagcctctcggcgcttgaagaggggatctcccccctccctggcgagttcacgactcggaccgatg

SEQ ID NO: 7800 - DNA, 203 bp, Artificial sequence
  synthetic
ggcgcgccagtccttccgccagccagttgtcagcgccatcacttaaagccacttgcacggcgaacggagaccacccggacgccgagctgatcgaggccaatctcctatggagacaggagatgggaagcaacatcacccgggttgagtcggagaccaaagttgtcatcctcgactcgtttgatcctctgcgactcggaccgatg

SEQ ID NO: 7801 - DNA, 203 bp, Artificial sequence
  synthetic
ggcgcgccagtcctgttgcagagtatgacgacagggagatatcagtgtcagcagagtgccatagaccacctaggcctaagttccctcctgctctcccgatttgggccagacctgactacaatccacctctcctacagaaatggcaaatgcccggatacgagccccccgtcgtgtctggatgtgcgttgcgactcggaccgatg

SEQ ID NO: 7802 - DNA, 203 bp, Artificial sequence
  synthetic
ggcgcgccagtcctcctccagctaaaccaacacctatcccgccaccaaggcggaagaggctcatacagctggacgagtctgctgtatcgcaagctctacaacagctggctgataaggtgtttgtggaggacactagcacctcagagccgagctccggcctcggagggtcaatagccggcccatcatctcgactcggaccgatg

SEQ ID NO: 7803 - DNA, 203 bp, Artificial sequence
  synthetic
ggcgcgccagtcctcctgacccgacaacagcagatgacacgtgttctgacgcgggatcctttagctcaatgccccccctcgagggggaacctggagacccagacttgagcactggttcctggtccactgttagtgaagaggacgatgtcgtctgttgctctatgtcatacacttggacgggggccttgcgactcggaccgatg

SEQ ID NO: 7804 - DNA, 203 bp, Artificial sequence
  synthetic
ggcgcgccagtcctaccgtgatgggatctgcatacggtttccagtactccccctcccaacgggtagagtacttgctcaaaatgtggcgctcgaagaaaacgccaatggggttttcatatgacaccaggtgcttcgattcgaccgtcaccgagcgggatatccgaactgaagaggacatctaccaatctcgactcggaccgatg

SEQ ID NO: 7805 - DNA, 203 bp, Artificial sequence
  synthetic
ggcgcgccagtccttgccaactagaccctaccgcgaggaaagcaatatcatccctcacagaacgcctctattgtggtggcccgatgtttaactccaaaggggaatcatgtggctatcgcagatgccgtgccagtggggtgctcactaccagtttggggaacaccctcacttgttatcttaaggcacagcgactcggaccgatg

SEQ ID NO: 7806 - DNA, 203 bp, Artificial sequence
  synthetic
ggcgcgccagtcctgaccttgagctgataacatcatgctcgtccaacgtctccgtagcccacgatggcaccggacagagatattactacctcacccgtgactgtaccactccacttgcgcgagctgcttgggagacagctcgccatacccctgtcaattcgtggttgggcaacatcatcatgtacgcccgactcggaccgatg

SEQ ID NO: 7807 - DNA, 203 bp, Artificial sequence
  synthetic
ggcgcgccagtcctcatgggtactctccaactgaactcaacagggtgggagcgagcctcaggaagcttggggcgccacccttaagagcttggagacatcgagccagagctgtcagagccaaactcattgcccaaggtgggaaagcagcgatatgcggcaagtacctctttaactgggcagtgaagacccgactcggaccgatg

SEQ ID NO: 7808 - DNA, 203 bp, Artificial sequence
  synthetic
ggcgcgccagtcctaagctcaaactcactccattggctgcggcaagccagcttgatttgtcaggctggtttgtcgcaggctacgacgggggggacatttatcacagcgtgtcccgggctcgaccccgtctgttactccttggcctactcctactcactgtaggggtaggcatctttttactccccgctcgactcggaccgatg

SEQ ID NO: 7809 - DNA, 203 bp, Artificial sequence
  synthetic
ggcgcgccagtcctcgggcaactccgcagcggaaccgactactttgggtgtccgtgtttccttttattcctatattggctgcttatggtgacaattgaaagattgttaccatatagctattggattggccatccggtgtcaaacagagcaatcatttatttgtttgttggttttatacctctgaacttcgactcggaccgatg

SEQ ID NO: 7810 - DNA, 203 bp, Artificial sequence
  synthetic
ggcgcgccagtcctcggcaggatttctcgcaagatcccagtaagtttaccgaaccggtaaaggatatcatgttaaaaactctaccagcgctgaattcaccaaaagcagaggagtgtgggtatagtgacagagttcgatcaataaccttaggcaactccacaatcaccactcaggaatgtgcaaatgtgcgactcggaccgatg

SEQ ID NO: 7811 - DNA, 203 bp, Artificial sequence
  synthetic
ggcgcgccagtcctggcctgttcgggcagaatatgcactaccattatctcggcagatcagggtatacaatacacgtacaatgcaatgcttcaaagttccaccagggatgcgtgctggtggtgtgtgtacctgaggctgagatggggtgtgctcaaacggattccacattcgagcacacagagttgacccgactcggaccgatg

SEQ ID NO: 7812 - DNA, 203 bp, Artificial sequence
  synthetic
ggcgcgccagtccttgcaacactattagagcatatcagattcccgtgcaagccaacaatgctaacacaaccacaccgattttcagcttccaagtggacccaggttatagttctgtgctaaataggacactactaggtgagatgctgaattattacgcacattggtctggcagcatcaagttgacatttcgactcggaccgatg

SEQ ID NO: 7813 - DNA, 203 bp, Artificial sequence
  synthetic
ggcgcgccagtcctttgttctgtggttcagccatggccaccgggaaattgctattggcatattccccaccaggtgcatcagtcccagaaagtagaaaagacgccatgcttggcacacacataatatgggacctgggcttgcagtcaagctgtgtcttgtgtgtgccatggatcagtcaatcacattatcgactcggaccgatg

SEQ ID NO: 7814 - DNA, 203 bp, Artificial sequence
  synthetic
ggcgcgccagtcctactgacctgcaaggcgacaccgatcaacgaaacggacaggtggtggataccaaagctactaacccaacgaactcaactgcggtaccggcgcttactgcagtggaaactgggcacacatcgcaggttgtgcctggcgatactattcagaccagacacgttgtgaacttccactcacgactcggaccgatg

SEQ ID NO: 7815 - DNA, 203 bp, Artificial sequence
  synthetic
ggcgcgccagtcctctaagatgtgaacacggggtcattggcgtcgtgactatgggtggtgagggcgttgttggtttcgctgacgtgcgcgacctcttgtggttagaggatgatgcaatggaacagggtgttaaagactatgttgagcaattgggaaacgcctttggctcaggtttcaccaaccagatacgactcggaccgatg

SEQ ID NO: 7816 - DNA, 203 bp, Artificial sequence
  synthetic
ggcgcgccagtccttactccttaccaccagaccctgatcattttgacggttacaaacagcaggctgtcgtgatcatggacgacttgtgccaaaatccagatggcaaggatgtgtccttattttgccagatggtgtcgagtgtcgactttgtgccgccaatggcagcacttgaggaaaagggcattctacgactcggaccgatg

SEQ ID NO: 7817 - DNA, 203 bp, Artificial sequence
  synthetic
ggcgcgccagtcctgtgagtagggctttcatctgcctgcaagcactaactacatttgtctctgtggcggggataatatacattatctacaagttatttgctggtttccagggagcttacactggtttgcctaaccagaaacccaaagtgccgaccctgagacaggctaaagttcaaggaccagcttttcgactcggaccgatg

SEQ ID NO: 7818 - DNA, 203 bp, Artificial sequence
  synthetic
ggcgcgccagtcctgaatttgcagtggccatgatgaaaagaaacgccagtactgtaaaaaccgagtacggcgagttcacaatgctcggcatctacgacaggtgggcagtgttgccccgtcatgctaagcctgggcccaccattttgatgaatgatcaagaagtgggcgtggttgatgccaaagagctgcgactcggaccgatg

SEQ ID NO: 7819 - DNA, 203 bp, Artificial sequence
  synthetic
ggcgcgccagtcctaagggcaaatccaggcttattgaggcatcgagtctaaatgactcagtggccatgaggcagacctttgggaacctgtacaagacattccacttgaacccaggtatagtaacaggcagtgcagttggctgcgatcctgatttattctggagcaagattccagtcatgctcgacggccgactcggaccgatg

SEQ ID NO: 7820 - DNA, 203 bp, Artificial sequence
  synthetic
ggcgcgccagtcctttcaaaggtggcgggagagttggcctcacgctgtttagcgtgagagctggctctcctgccccttcccctgagccggggatcttggctcattcccctcttttctatcctccctcattggactttacggatgacccggcataaacttgacaaccgatgttggatttcccttgtggccgactcggaccgatg

SEQ ID NO: 7821 - DNA, 203 bp, Artificial sequence
  synthetic
ggcgcgccagtcctacgccacatacaccacctccagtgatgtttcgtttggaccaagacctcctcttggctcagacatagctctctcaaatgccgctgctgctaatacgggtgcattaaatcagttgaaatttgtagaagtgcaacagtttgtattgagaaataacaccaacccattcacaggcattgcgactcggaccgatg

SEQ ID NO: 7822 - DNA, 203 bp, Artificial sequence
  synthetic
ggcgcgccagtcctatgctccatctctcgcccttgctggtgagggacatttgattgacacacacacccctggagggtatgcacctattagtgatttgattgacctgtctcacataccatccatggttacaaatgacacaacagattaccattactttgattggactgatacaactaataaggatgaaacgactcggaccgatg

SEQ ID NO: 7823 - DNA, 203 bp, Artificial sequence
  synthetic
ggcgcgccagtcctttataggtaaatttaattttaagctaaacagtgtccccaattcggcaattttagcgaattcatattctttttttagagggcctataatttttcatgttatcgctgctgcatcaacgatgcatagaggtaggctcagagtttgctttagaccaaattctaatcaggaatatagtgcgactcggaccgatg

SEQ ID NO: 7824 - DNA, 203 bp, Artificial sequence
  synthetic
ggcgcgccagtcctctcctcagtcaatggctgtatattattctcttttagacatttcccagagtaattgctgtactcttgctgtcccttttaattcggaaacgtggatgaggagcactgatgatgtgttgggaagactccagatttttgttaataaccagcttgctgctaacaggactgctgctaatccgactcggaccgatg

SEQ ID NO: 7825 - DNA, 203 bp, Artificial sequence
  synthetic
ggcgcgccagtcctacactcttgtcaagcatttatttggaaggttcacatatttgggctactacactcccgacagtggtggatggaagaaggtggccctcaacattccaaaacgtggtgtggttaatttgatgagagccttctgttactggtctggtgaagctgtattgtgtataacaaataatgatgcgactcggaccgatg

SEQ ID NO: 7826 - DNA, 203 bp, Artificial sequence
  synthetic
ggcgcgccagtcctacctgattacacttctggttgcccaaacttatgatgtgtttgttaatgccctgagtcttgtgtttggccgcttgccccgtaatgtgtatgatgttgctcgccgtgtattctcttcccgccccactcaacaaggctttgcttccttcacctctgcgctgcgcgcatgtgagtggtcgactcggaccgatg

SEQ ID NO: 7827 - DNA, 203 bp, Artificial sequence
  synthetic
ggcgcgccagtccttgattggtatgctttgtggcgcatctctatttacccttgccactcatgctttctcatttgtctccaattgtttttcacatggtgaggatccgccaggacctggccctgactgtgtgcgtttaccagagtcagcatatgaggggtgttccacgcggaaaacagccaggcaactggcgactcggaccgatg

SEQ ID NO: 7828 - DNA, 203 bp, Artificial sequence
  synthetic
ggcgcgccagtccttcatcttaggtggtagaaaaatgtactttaatacgcattatgcttcagttatcttggacaaagatgttactgtgtgtacacccaataagaagtactttacaagattaactaaggtaagttcaaattatgacacaatgattgttcaattggatattcctgagttgttgccaagcacgactcggaccgatg

SEQ ID NO: 7829 - DNA, 203 bp, Artificial sequence
  synthetic
ggcgcgccagtcctgtggtggtttgctcgttggaaagattgatggagcttttaaagcactaggctttcacgctgctggaagtcttgagcgtggctttgccaacgcatttaattctgtcccccctctttcaactgtgcctgatttccctgaatctattaatttatctggattattttcaaatgatgttgcgactcggaccgatg

SEQ ID NO: 7830 - DNA, 203 bp, Artificial sequence
  synthetic
ggcgcgccagtcctcttgcaccagtgttctaaattcaattgttaatgttttaatggctaggtacatttgtgctcttatggacattgactacccggtcatggtggcatatggagatgataatgttgtatcatttgatgaggagatagacatagagagaatggtttccttgtataagacagaattcggtgcgactcggaccgatg

SEQ ID NO: 7831 - DNA, 203 bp, Artificial sequence
  synthetic
ggcgcgccagtcctttgattggactgaagagggctatgttgagcctgatcgacggcaaggggccaatacgatttgtgttggctctcttggcgttcttcaggttcacagcaattgctccgacccgagcagtgctggatcgatggagaggtgtgaacaaacaaacagcgatgaaacaccttctgagttttcgactcggaccgatg

SEQ ID NO: 7832 - DNA, 203 bp, Artificial sequence
  synthetic
ggcgcgccagtcctaagaaggaactagggaccttgaccagtgctatcaatcggcggagctcaaaacaaaagaaaagaggaggaaagaccggaattgcagtcatgattggcctgatcgccagcgtaggagcagttaccctctctaacttccaagggaaggtgatgatgacggtaaatgctactgacgtccgactcggaccgatg

SEQ ID NO: 7833 - DNA, 203 bp, Artificial sequence
  synthetic
ggcgcgccagtccttatggaagatgcaccaagacacgccactcaagacgcagtcggaggtcactgacagtgcagacacacggagaaagcactctagcgaacaagaagggggcttggatggacagcaccaaggccacaaggtatttggtaaaaacagaatcatggatcttgaggaaccctggatatgcccgactcggaccgatg

SEQ ID NO: 7834 - DNA, 203 bp, Artificial sequence
  synthetic
ggcgcgccagtcctggcgacagctgcgtgactatcatgtctaaggacaagcctaccatcgatgtgaagatgatgaatatggaggcggccaacctggcagaggtccgcagttattgctatttggctaccgtcagcgatctctccaccaaagctgcgtgcccgaccatgggagaagctcacaatgacaaacgactcggaccgatg

SEQ ID NO: 7835 - DNA, 203 bp, Artificial sequence
  synthetic
ggcgcgccagtcctcgtgctgacccagcttttgtgtgcagacaaggagtggtggacaggggctggggcaacggctgcggactatttggcaaaggaagcattgacacatgcgccaaatttgcctgctctaccaaggcaataggaagaaccatcttgaaagagaatatcaagtacgaagtggccatttttcgactcggaccgatg

SEQ ID NO: 7836 - DNA, 203 bp, Artificial sequence
  synthetic
ggcgcgccagtcctgtccatggaccaactactgtggagtcgcacggaaactactccacacaggttggagccactcaggcagggagactcagcatcactcctgcggcgccttcatacacactaaagcttggagaatatggagaggtgacagtggactgtgaaccacggtcagggattgacaccaatgcacgactcggaccgatg

SEQ ID NO: 7837 - DNA, 203 bp, Artificial sequence
  synthetic
ggcgcgccagtccttactacgtgatgactgttggaacaaagacgttcttggtccatcgtgagtggttcatggacctcaacctcccttggagcagtgctggaagtactgtgtggaggaacagagagacgttaatggagtttgaggaaccacacgccacgaagcagtctgtgatagcattgggctcacaacgactcggaccgatg

SEQ ID NO: 7838 - DNA, 203 bp, Artificial sequence
  synthetic
ggcgcgccagtcctgagggagctctgcatcaagctttggctggagccattcctgtggaattttcaagcaacactgtcaagttgacgtcgggtcatttgaagtgtagagtgaagatggaaaaattgcagttgaagggaacaacctatggcgtctgttcaaaggctttcaagtttcttgggactcccgcacgactcggaccgatg

SEQ ID NO: 7839 - DNA, 203 bp, Artificial sequence
  synthetic
ggcgcgccagtcctggggtgttcacctcagttgggaaggctgtccatcaagtgttcggaggagcattccgctcactgttcggaggcatgtcctggataacgcaaggattgctgggggctctcctgttgtggatgggcatcaatgctcgtgataggtccatagctctcacgtttctcgcagttggaggacgactcggaccgatg

SEQ ID NO: 7840 - DNA, 203 bp, Artificial sequence
  synthetic
ggcgcgccagtccttgcccaggaactacggtcaccctgagtgagagctgcggacaccgtggacctgccactcgcaccaccacagagagcggaaagttgataacagattggtgctgcaggagctgcaccttaccaccactgcgctaccaaactgacagcggctgttggtatggtatggagatcagaccacgactcggaccgatg

SEQ ID NO: 7841 - DNA, 203 bp, Artificial sequence
  synthetic
ggcgcgccagtcctcaggagaacattttgttgatgttggcggctgttttctttcaaatggcttatcacgatgcccgccaaattctgctctgggagatccctgatgtgttgaattcactggcggtagcttggatgatactgagagccataacattcacaacgacatcaaacgtggttgttccgctgctacgactcggaccgatg

SEQ ID NO: 7842 - DNA, 203 bp, Artificial sequence
  synthetic
ggcgcgccagtcctgccctgctaacacccgggctgagatgcttgaatctggatgtgtacaggatactgctgttgatggtcggaataggcagcttgatcagggagaagaggagtgcagccgcaaaaaagaaaggagcaagtctgctatgcttggctctagcctcaacaggacttttcaaccccatgatccgactcggaccgatg

SEQ ID NO: 7843 - DNA, 203 bp, Artificial sequence
  synthetic
ggcgcgccagtcctcttgctgctggactgattgcatgtgatcccaaccgtaaacgcggatggcccgcaactgaagtgatgacagctgtcggcctaatgtttgccatcgtcggagggctggcagagcttgacattgactccatggccattccaatgactatcgcggggctcatgtttgctgctttcgtgcgactcggaccgatg

SEQ ID NO: 7844 - DNA, 203 bp, Artificial sequence
  synthetic
ggcgcgccagtcctctgctcggcagttatcaagcaggagcgggcgtgatggttgaaggtgttttccacaccctttggcatacaacaaaaggagccgctttgatgagcggagagggccgcctggacccatactggggcagtgtcaaggaggatcgactttgttacggaggaccctggaaattgcagcaccgactcggaccgatg

SEQ ID NO: 7845 - DNA, 203 bp, Artificial sequence
  synthetic
ggcgcgccagtcctattctgccacagatcatcaaagaggccataaacagaagactgagaacagccgtgctagcgccaaccagggttgtggctgctgagatggctgaagcactgagaggactgcccatccggtaccagacatccgcagtgcccagagaacataatggaaatgagattgttgatgtcatgcgactcggaccgatg

SEQ ID NO: 7846 - DNA, 203 bp, Artificial sequence
  synthetic
ggcgcgccagtccttgtcatgctaccctcacccacaggctgatgtctcctcacagggtgccgaactacaacctgttcgtgatggatgaggctcatttcaccgacccagctagcattgcagcaagaggttacatttccacaaaggtcgagctaggggaggcggcggcaatattcatgacagccaccccacgactcggaccgatg

SEQ ID NO: 7847 - DNA, 203 bp, Artificial sequence
  synthetic
ggcgcgccagtcctacagaaggagaagggagagtgatcctgggagaaccatctgcagtgacagcagctagtgccgcccagagacgtggacgtatcggtagaaatccgtcgcaagttggtgatgagtactgttatggggggcacacgaatgaagacgactcgaacttcgcccattggactgaggcacgacgactcggaccgatg

SEQ ID NO: 7848 - DNA, 203 bp, Artificial sequence
  synthetic
ggcgcgccagtcctgcgttcaaggacttcgcctcgggaaaacgttctcagatagggctcattgaggttctgggaaagatgcctgagcacttcatggggaagacatgggaagcacttgacaccatgtacgttgtggccactgcagagaaaggaggaagagctcacagaatggccctggaggaactgccacgactcggaccgatg

SEQ ID NO: 7849 - DNA, 203 bp, Artificial sequence
  synthetic
ggcgcgccagtcctgttcaggcaagtgcactattcacactcgcgcgaggcttccccttcgtcgatgttggagtgtcggctctcctgctagcagccggatgctggggacaagtcaccctcaccgttacggtaacagcggcaacactccttttttgccactatgcctacatggttcccggttggcaagctcgactcggaccgatg

SEQ ID NO: 7850 - DNA, 203 bp, Artificial sequence
  synthetic
ggcgcgccagtcctgaggcaatgcgctcagcccagcggcggacagcggccggaatcatgaagaacgctgtagtggatggcatcgtggccacggacgtcccagaattagagcgcaccacacccatcatgcagaagaaagttggacagatcatgctgatcttggtgtctctagctgcagtagtagtgaaccgactcggaccgatg

SEQ ID NO: 7851 - DNA, 203 bp, Artificial sequence
  synthetic
ggcgcgccagtcctggagggcatccagtctctaggggcacagcaaaactgagatggctggtcgaacggaggtttctcgaaccggtcggaaaagtgattgaccttggatgtggaagaggcggttggtgttactatatggcaacccaaaaaagagtccaagaagtcagagggtacacaaagggcggtccccgactcggaccgatg

SEQ ID NO: 7852 - DNA, 203 bp, Artificial sequence
  synthetic
ggcgcgccagtcctaccaccatggccatgactgacactactcccttcgggcagcagcgagtgttcaaagagaaggtggacacgaaagctcctgaaccgccagaaggagtgaagtacgtgctcaacgagaccaccaactggttgtgggcgtttttggccagagaaaaacgtcccagaatgtgctctcgacgactcggaccgatg

SEQ ID NO: 7853 - DNA, 203 bp, Artificial sequence
  synthetic
ggcgcgccagtcctatgggaaagagagagaaaaaacccggagagttcggaaaggccaagggaagcagagccatttggttcatgtggctcggagctcgctttctggagttcgaggctctgggttttctcaatgaagaccactggcttggaagaaagaactcaggaggaggtgtcgagggcttgggcctccgactcggaccgatg

SEQ ID NO: 7854 - DNA, 203 bp, Artificial sequence
  synthetic
ggcgcgccagtcctgtgattggcccagatgatgtggagaaactcacaaaagggaaaggacccaaagtcaggacctggctgtttgagaatggggaagaaagactcagccgcatggctgtcagtggagatgactgtgtggtaaagcccctggacgatcgctttgccacctcgctccacttcctcaatgctcgactcggaccgatg

SEQ ID NO: 7855 - DNA, 203 bp, Artificial sequence
  synthetic
ggcgcgccagtcctatgtcaaaggttcgcaaagacatccaagagtggaaaccgtcaactggatggtatgattggcagcaggttccattttgctcaaaccatttcactgaattgatcatgaaagatggaagaacactggtggttccatgccgaggacaggatgaattggtaggcagagctcgcatatctcgactcggaccgatg

SEQ ID NO: 7856 - DNA, 203 bp, Artificial sequence
  synthetic
ggcgcgccagtcctccagggcgaaaggactagaggttagaggagaccccgcggtttaaagtgcacggcccagcctggctgaagctgtaggtcaggggaaggactagaggttagtggagaccccgtgccacaaaacaccacaacaaaacagcatattgacacctgggatagactaggagatcttctgctcgactcggaccgatg

SEQ ID NO: 7857 - DNA, 203 bp, Artificial sequence
  synthetic
ggcgcgccagtcctagctgtaggtcaggggaaggactagaggttagtggagaccccgtgccacaaaacaccacaacaaaacagcatattgacacctgggatagactaggagatcttctgctctgcacaaccagccacacggcacagtgcgccgacaatggtggctggtggtgcgagaacacaggatctcgactcggaccgatg

SEQ ID NO: 7858 - DNA, 203 bp, Artificial sequence
  synthetic
ggcgcgccagtcctttaaaactgggctcgggttgtacccacccgagctgcccatgtggcgtggtgctcttgtatcccggtacacttgcacgccagtttgcctctccttaccccgtaacatatctagaagaatgtgcataacggaccaataggtggtggcaacccatgccactgacggtcaagtacttccgactcggaccgatg

SEQ ID NO: 7859 - DNA, 203 bp, Artificial sequence
  synthetic
ggcgcgccagtccttgtttccccggtgtgatgtggaatagactctctcagggttgaagccataagcatcgttatccgctacgtgcctacgcaaaacctagtagcattttgaagcttacttggttggccgctcagccactaacccgtggtaggcctggcagatgaggctgggcgcaccccactggcgaccgactcggaccgatg

SEQ ID NO: 7860 - DNA, 203 bp, Artificial sequence
  synthetic
ggcgcgccagtcctagtggcccagcctgcgtggctgcctgcccctctttgaggggaagccatttaagtgacaaggtgtgaagagtctcgtgtgctccacgtagaatccttccggcccctgaatgtggctaatcctaaccccgcagctattgcacacaatccagtgtgttgatagtcgtaatgggcaaccgactcggaccgatg

SEQ ID NO: 7861 - DNA, 203 bp, Artificial sequence
  synthetic
ggcgcgccagtcctggttggtggtggaagttgcctgattgccttaaagatatgggcatcttcgggcaaaatctgtaccatcatgcattgggtaggtcagggtacataatacacacccaatgtaatgccacaaaattcaatagtggttgtctaatagtggctgttgtaccagaacaccagctagcttaccgactcggaccgatg

SEQ ID NO: 7862 - DNA, 203 bp, Artificial sequence
  synthetic
ggcgcgccagtcctattgtagtaccatggatgagcggcaccttccatagacggactaaagctgacaattacacccaggctggatatgtgtcactatggtaccagactgattttgtgtcaccaaatgatgggattgggacaatcgttgctacatgctccggatgtcctgatttgtctgttagaatgctgcgactcggaccgatg

SEQ ID NO: 7863 - DNA, 203 bp, Artificial sequence
  synthetic
ggcgcgccagtcctcgtgacacaccaatgatgaaacaggaaaaagatttgactcaaaacccagttgaggactacatagacaaggtggtcgacactgtactacaggtcccaaacacccaacccagtggtccacaacacagtattcaaccaagtgctttgggcgctatggaaattggggcatcttcaacccgactcggaccgatg

SEQ ID NO: 7864 - DNA, 203 bp, Artificial sequence
  synthetic
ggcgcgccagtccttttgaaatgtttacatatgctagatttgacatggaagttactgttgtcaccaacaacacaggtttggtacaaatcatgtttgtaccacctggtatagatgcaccagatagtattgactcccgtctatgggattctgcctccaacccgagtgttttctatcaaccaaaatcaggtcgactcggaccgatg

SEQ ID NO: 7865 - DNA, 203 bp, Artificial sequence
  synthetic
ggcgcgccagtcctagtgatctctttgtccatacagccactatgatttacaggaatgcgcacttaaccagcttgaatgacaaaaccgttctactggctctcagtgcagatctccaggtggacgcagctgaccagccaggcccagataccatcccacaatgtgactgcttggagggctgctactatagccgactcggaccgatg

SEQ ID NO: 7866 - DNA, 203 bp, Artificial sequence
  synthetic
ggcgcgccagtcctatcacagctggtggagacaatcatgtagctttcacagatctaagaccctattcatgtttagacactcaccaaggtcctattcaggactatgtgacacaattagggagtgcctttggtagcggtttcactgacacacttaaagaccaattgacagatgtgagtgcccatattaaacgactcggaccgatg

SEQ ID NO: 7867 - DNA, 203 bp, Artificial sequence
  synthetic
ggcgcgccagtcctgacaaaattacttcaaaggtagttaaatggctagtacgtatcatcagtgcacttaccataatgatacgtaacagtactgacacacccactgtacttgcaacccttgctcttttaggctgtcacaagtcaccatggtcatttctcaaggaccggttatgtcagtggttaaacatccgactcggaccgatg

SEQ ID NO: 7868 - DNA, 203 bp, Artificial sequence
  synthetic
ggcgcgccagtcctaaaatagatctttatcaagaacaggttaaaggattttccaaagttgatgaaccagctcagcaggaactactaattaaagttgaaaaactgaagaaaggtttagacagcctagcacctctgtatgcagttgaaaacaaaagagttacaaacatctataaagaactcaaagcattgcgactcggaccgatg

SEQ ID NO: 7869 - DNA, 203 bp, Artificial sequence
  synthetic
ggcgcgccagtcctgcccaaggaccatacacaggcatgcctactacacccaagaagaaacctgagttaagaagagcaaccttgcaaggtcctgaacatgaatttttgaatgcccttattagaagaaactgccatatcattaccactgacaaaggagaatttaacctactaggtatatactctaactgtcgactcggaccgatg

SEQ ID NO: 7870 - DNA, 203 bp, Artificial sequence
  synthetic
ggcgcgccagtcctgctgtagtaccaacacatgctgaacctggtgacgtggtagatattgatggaaggttagttagagtgcttaaacaacaagtcctcactgatatgaatgatgtggatacggaagtaactgtgttgtggcttgaccagaatgaaaagttcagagacataagaagatttatacctgaacgactcggaccgatg

SEQ ID NO: 7871 - DNA, 203 bp, Artificial sequence
  synthetic
ggcgcgccagtcctcaactttacatgcttgacatcaacccagaaccaatcaccatggaacaagcaatatatggttatgctaacttggaaccattggaccttaccactagccctggtttcccttatgtgtctttgggcgtgaaaaagaaagacatcttaaacaacgctactaaagacacaaggaaaatgcgactcggaccgatg

SEQ ID NO: 7872 - DNA, 203 bp, Artificial sequence
  synthetic
ggcgcgccagtcctcaacagatgttagatctgtatggtattgatctaccctacataactttcctaaaggatgaactccgcgccccagagaaaattaaggctggtaagaccaggattgtggaggctgctagtgtcaatgatacagtgtactttagaacaacttttggcaatctatacagtacttttcatcgactcggaccgatg

SEQ ID NO: 7873 - DNA, 203 bp, Artificial sequence
  synthetic
ggcgcgccagtcctgcaaacccaggtatcttaacaggctcagctgtggggtgtaatccagatgtgttttggtcacaaatgcatgctatgttagatggagaactcattgcttttgattacaccaattatgatggcagcttggaaccagtgtggtttaaagcgcttgggaaagtgttagatcagcttggccgactcggaccgatg

SEQ ID NO: 7874 - DNA, 203 bp, Artificial sequence
  synthetic
ggcgcgccagtcctaccaagacaacagtttcaagtgatgaacatcgaacgtctaaactggatccgtaactggacatgttagggcaaggacttcccccctggtaacaggagcctggctggccaaaagccccgctcattgagcctagcatgttgtcgaccctggactgttcagtttagttagtacatggacgactcggaccgatg

SEQ ID NO: 7875 - DNA, 203 bp, Artificial sequence
  synthetic
ggcgcgccagtcctattcacttgtcacggttcttctgaactcggtctctagtatgacagcctaaggatgccctccaggtaccccggggtaacaagtgacacccgggatctgaggaggggactactttacgtagtttaaaaaacgtctaagctgttatggtgaccagaggctggcacctttcacttttacgactcggaccgatg

SEQ ID NO: 7876 - DNA, 203 bp, Artificial sequence
  synthetic
ggcgcgccagtcctaacttggtttcaacaacactctcgtaactgctgaccttgacggaaatgaaaagatcatacacggtttgcctaatagacatgataattgttggctcaattcgcttatgcaaatgaccaactgggttggagaagggtttttcaaaaacacctatgacaaccctgatctaattcctccgactcggaccgatg

SEQ ID NO: 7877 - DNA, 203 bp, Artificial sequence
  synthetic
ggcgcgccagtcctatcacacagacatcactaccactcagtctaccgttggaatcacccacgggtacgcacactccgagctcgaccaagtcaatgctgccagtggtactcacgaacatgtagaccacgtgtctcgtatttacatgaaaaaactttttacttggtccatgagcgacgccacagggtattcgactcggaccgatg

SEQ ID NO: 7878 - DNA, 203 bp, Artificial sequence
  synthetic
ggcgcgccagtccttgcctatgacaatctccaacggtggtagtgatctcaccagtcttgatgttcgggctagtttcacaccccttaatgttaaggttgctggacctatgcccaacaaacaaggtattgtacctgtggcagccaaagctggttattcagggttttgcaccactagtcccatcaccgcggcgactcggaccgatg

SEQ ID NO: 7879 - DNA, 203 bp, Artificial sequence
  synthetic
ggcgcgccagtcctcccaacattgtataactctggaatgggataccggattgaattctgagacagtgtttaatataccctacatttcccagacttattacacttcaactcactccagtacagctgacattggtaatgtttcaggtagagtacagatataccaagttacagcaccttcctctacttcagcgactcggaccgatg

SEQ ID NO: 7880 - DNA, 203 bp, Artificial sequence
  synthetic
ggcgcgccagtcctagttattagttctgttctcttctggtagagatttccagctgcgttgcccagttgagcctgtgaaacaagtcactgacgttggagaaacaggtaggtacaagatcttggatgcaactcaacaaaacggacactcggctaacaccttccgtcttcacaccgatgtttctttcgctccgactcggaccgatg

SEQ ID NO: 7881 - DNA, 203 bp, Artificial sequence
  synthetic
ggcgcgccagtcctttgaccgctacgcactactcagtgttgtctctggaaacgcaagcaatacacaccagagatacaccaatcttgaccctaccaaactgcctgccgacacgttcatgaaaaagctcattgactcttgcacctactacttttctgacttggaagttacagttattgcaaaaggtgaagcgactcggaccgatg

SEQ ID NO: 7882 - DNA, 203 bp, Artificial sequence
  synthetic
ggcgcgccagtcctctttttacagagttctacctacgaaatacgctggtagaactctctttgtaaaacaagaacagtttgagccattcaaccacggaggttttggtgagattatcactacagggagagaggccaccaaacacagagtacttatcagaatgaaaagagcagaaatgtactgtcctcgagcgactcggaccgatg

SEQ ID NO: 7883 - DNA, 203 bp, Artificial sequence
  synthetic
ggcgcgccagtcctctctttacccttccgcctcagtgacacagctttccaccagacgaaaacttaggctaacgggtgaaattgttaagcaaggagccacgaatttcgaacttttacaacaagctggtgacgtggagaccaacccaggacccgcatctttcagtaaactaattgaagactttggatgttcgactcggaccgatg

SEQ ID NO: 7884 - DNA, 203 bp, Artificial sequence
  synthetic
ggcgcgccagtcctgattagaggtttttgacaccagagtcatgatggacaatcttgtagacaggtttaaaccatactttcatgttagtccacccaaatttgactttaagactgaagttttagacaaggtcagggacttctttgctactgacgaggaagaagaggagtttgatgctactaaccccttcacgactcggaccgatg

SEQ ID NO: 7885 - DNA, 203 bp, Artificial sequence
  synthetic
ggcgcgccagtccttcctggtgcctgatgagtacgctgaagcacacaactggctggaaaggaaaagagaagttctcctccaggctaatcagtatgctcttgctaagctctgtgaacccaaggttggaccaccacctgaaacaaggcctgaaccagtggttatcttgttcagaggggattccggccaggcgactcggaccgatg

SEQ ID NO: 7886 - DNA, 203 bp, Artificial sequence
  synthetic
ggcgcgccagtcctacaaactcaaagtaaaccctctcattacaactgagagtgggaaccctccaactgacatgcagttggtggtactcaagaacacacaaccaatttcactagttagagatggacaaattgtcgccacttgttgtgctcttggcgtttttggaaccacctatttagttccctaccacccgactcggaccgatg

SEQ ID NO: 7887 - DNA, 203 bp, Artificial sequence
  synthetic
ggcgcgccagtcctgcatactcgtcaaagatggttctcacacagtcatcataggcatccatagtgcaggaggtaacggaaaaggttacgctagttgtgtcactcgttccgcactcctcgcactgaggggcagagaaaggcccgagctcgaagggcttatgttaggagaacgacctggagagaaagttccgactcggaccgatg

SEQ ID NO: 7888 - DNA, 203 bp, Artificial sequence
  synthetic
ggcgcgccagtcctctctttaccgtctctgtgctgctgagtatgcctcacatcttcacaatgttcttggcaagaccggtgcgcctttgaccaacgttgaggccgtgctcggtattgacggactcgacgccatggagcccaatactgcccccggtctaccttgggctcttcagcacaaacgcagacatgcgactcggaccgatg

SEQ ID NO: 7889 - DNA, 203 bp, Artificial sequence
  synthetic
ggcgcgccagtcctcttgtcactcaacccagctcatgtcagttatggctgacgaggttttctcagacgcatacggttttgatgagagggcacgttacgctgtgaaatccttgtgcaagacagtccatgcatacgaggacaagcgtatcaccatagatggtggtttaccttcaggttgtagtgccaccacgactcggaccgatg

SEQ ID NO: 7890 - DNA, 203 bp, Artificial sequence
  synthetic
ggcgcgccagtcctacaccataacacctgaagacaagtctgacaatggttttactttaggtaagaacattacagatgtcacatttcttaaacgcgctttcgaacgcgattgtgtcctagggttttacaaacccgtgatgaactccaaggttttggaggccatcctgtcctttgcacggcgtggcacaccgactcggaccgatg

SEQ ID NO: 7891 - DNA, 203 bp, Artificial sequence
  synthetic
ggcgcgccagtccttccaggagaagctaacctcagtggcaggtcttgctttccacagtggagaagaagagtacaacagacttttctctccatttgtggggagtttcgagattccgtcatacaggtgccttcgcctgagatgggtacacaaaatgtcaaattgaattgaacataaccaaactaactccacgactcggaccgatg

SEQ ID NO: 7892 - DNA, 203 bp, Artificial sequence
  synthetic
ggcgcgccagtcctttccccgggagggtctgacggtaagctgtacccacggctgaagtatgacctaccgttaaccggctacctacttcgagaagtctagtaataccattgaagttttgttggcgttacgctcaacacactaccccgtgtgtagttttggctgatgagtcacggcattccccacgggcgcgactcggaccgatg

SEQ ID NO: 7893 - DNA, 203 bp, Artificial sequence
  synthetic
ggcgcgccagtcctgccataacaactggactctttgtgtagtgccagttgttcccctagattactcagatggagcaaccacagtagttccagtcactgtaaccttggccccaatgtgttgtgagtttgatgggttaagaaatgcagtttcacagggcttgccagttaaggcaactccaggatcttatccgactcggaccgatg

SEQ ID NO: 7894 - DNA, 203 bp, Artificial sequence
  synthetic
ggcgcgccagtcctgcaagatattgatagcatacacccctccaggaggtagcgcacctacagatcgaaagagtgctatgttaggcacccacataatttgggattttgggctacaatcctcagccacccttgttattccctggattagtaatacatgtatgcgaaatgttgctagcttggcctatcaggcgactcggaccgatg

SEQ ID NO: 7895 - DNA, 203 bp, Artificial sequence
  synthetic
ggcgcgccagtcctttgatgcagagttcaccatgctagtgtgtgcggatgaagagattaacccttataatatacagtacatgtatgttccaccaggtagcggtgttccatctgatcatgattcttacttgtggcaatcaggtaccaacccatccatatacgtaaaatccactgatccacccgctcaatcgactcggaccgatg

SEQ ID NO: 7896 - DNA, 203 bp, Artificial sequence
  synthetic
ggcgcgccagtcctataactacatgcggttcaagaccaaatcccgcattgaacctgtatgtttgttaatacatgggagcccaggtgcagggaagtccgttgtatccagcctggtggggcgtgccattgctgaaaagatgaacagctcagtttattcccttccaccagacccagatcattttgatggttcgactcggaccgatg

SEQ ID NO: 7897 - DNA, 203 bp, Artificial sequence
  synthetic
ggcgcgccagtcctctataatctgtggaaaagccctgatgttcagtgataggcggacttcagtgcgttacaccactgatatgctggtctcagagatgtttagggaatactcacacaggaactcaattggcaatgtgcttgaggcactctttcagggaccaccagtctacaaggaattgaaaatttcagcgactcggaccgatg

SEQ ID NO: 7898 - DNA, 203 bp, Artificial sequence
  synthetic
ggcgcgccagtccttgagaagaaatgagaaattcagggacatccgagggtttttgccaaatgaaccaggagaaattggtgatgcagtgcttgctattaatactagcaggttcccaaacatgtttattcctgtaggaaaggtgactgaatatggatttctcaatctaagtgggacaccaacacacagagcgactcggaccgatg

SEQ ID NO: 7899 - DNA, 203 bp, Artificial sequence
  synthetic
ggcgcgccagtccttgctcatgtacaacttccctactaaatcagggcagtgcggtggagtgctaatggcaacaggaaaagttctaggaatccatgtgggaggcaatggacaccaaggctttgctgctactcttttgaggtcttactttaatgaagaacagggtcagattgaatggattgagaccaacacgactcggaccgatg

SEQ ID NO: 7900 - DNA, 203 bp, Artificial sequence
  synthetic
ggcgcgccagtcctaagaatcaggctatccaataatcaatgcccccaccaagaccaaattggaacccagtgtgttccacgatatctttgagggaaagaaagaaccagcagtcctgaacccaagagacccacgtttgaagactgattttgaggaagccattttctccaagtatgtagggaatgtgaacgcgactcggaccgatg

SEQ ID NO: 7901 - DNA, 203 bp, Artificial sequence
  synthetic
ggcgcgccagtcctgtccagtgtggttcgctgcactaaaactggtactggaaaagttaggttacactagtgatgaaaccaagtatattgactacttgtgtaactcataccacttgtataaaaacaagcattactttgtgagaggagggatgccatcgggatgttctggcacttctatcttcaacagtacgactcggaccgatg

SEQ ID NO: 7902 - DNA, 203 bp, Artificial sequence
  synthetic
ggcgcgccagtccttctccccgggaggggctaatggtacgctgtgcccacggcggaaatgagccctaccgttaaccggcagtctacttcgggaagcccagtaactacattgaaactttgaggcgttacactcagcacataaccccaatgtgtagttctggtcgatgagccttggcatcccccacaggccgactcggaccgatg

SEQ ID NO: 7903 - DNA, 203 bp, Artificial sequence
  synthetic
ggcgcgccagtcctaacttttaccactgatcaagataaaaatgggagcgcaggtgtctactcaaaagactggtgcgcatgaaactggtaacgttgccactggaggctcaacaataaattacacctccataaattattataaggattcagcatctaattcagctaacagacaggacttctctcaagacccgactcggaccgatg

SEQ ID NO: 7904 - DNA, 203 bp, Artificial sequence
  synthetic
ggcgcgccagtccttgtatcattatttaggtcgagcagggtacaccttccatgtacaatgcaacgcttccaggtttcaccaagggtgtcttcttgtagtgtgcgtaccagaagcagaaatggggtgttctaacgtgaacaatcaacccagttttgaacagttggctaatggagacacggcacatgtttcgactcggaccgatg

SEQ ID NO: 7905 - DNA, 203 bp, Artificial sequence
  synthetic
ggcgcgccagtccttcactgaagatgccgcaactggtgaacagggagtacagacagccgtttgcaacgcagcaatgggagttggtgtggggaacctgaccatctacccccatcagtggataaatttaagaacaaacaacagtgctacaatagtcatgccatatattaattgtgtaccaatggacaatacgactcggaccgatg

SEQ ID NO: 7906 - DNA, 203 bp, Artificial sequence
  synthetic
ggcgcgccagtccttgcaaagacataataacttgacactgatgataataccatttgttgagttagattactctgcaggggcaactacattcgttcccattaccgtgactgttgcccctatgtgcgcagagtataacggccttcgcctagcctcaccacagggcttgccaacaatgaatacaccaggtacgactcggaccgatg

SEQ ID NO: 7907 - DNA, 203 bp, Artificial sequence
  synthetic
ggcgcgccagtcctcaacgggtaagttgattctggcttattcacctccaggtgctggtgccccaacaaacaggaaacaggccatgctgggcacccacgttatatgggacttaggattgcaatctagctgtgtgctgtgtgtcccatggatcagccaaacccactacaggtatgtagtggtcgacacatcgactcggaccgatg

SEQ ID NO: 7908 - DNA, 203 bp, Artificial sequence
  synthetic
ggcgcgccagtccttctaccctgtgtccttccaaggccctggcattgtgcagatggcggcaaatgagtactaccccgaaagagcgcaaacacatgtcttgctggctaatggcccagcacaacctggtgattgcggcgggttgctgtgttgtacgcatggagtggttggcatcctcacagcgggtggtgcgactcggaccgatg

SEQ ID NO: 7909 - DNA, 203 bp, Artificial sequence
  synthetic
ggcgcgccagtccttacagttcaagtccaaatgccgcattgaacctgtgtgtctgctgttgcacggagctccaggagcgggtaaatcagtagccaccaatttgattggcagagcaattgcagagaagttaaatagctcagtatattctctaccacctgatccggaccactttgatggatataaacaaccgactcggaccgatg

SEQ ID NO: 7910 - DNA, 203 bp, Artificial sequence
  synthetic
ggcgcgccagtcctaggcagtggttattatggacgatttatgtcaaaaccccgatggaaaggatgtgtccctgttctgtcagatggtatctagtgttgactttgttccaccaatggctgcactagaagaaaagggaattttgttcacatcaccgtttgtgttggcttcaaccaatgctagctccatcccgactcggaccgatg

SEQ ID NO: 7911 - DNA, 203 bp, Artificial sequence
  synthetic
ggcgcgccagtcctatgccccaactgtttcagatagtagggctcttgcaagaagattccattttgacatgaacatagagatcctagacatgtaccagcagagcgggaagttgaacatgccattggcagccaagtcatgtgatgatgagtgtattccggcgaatttcaaaaaatgttgtcccttagtgtcgactcggaccgatg

SEQ ID NO: 7912 - DNA, 203 bp, Artificial sequence
  synthetic
ggcgcgccagtcctatatgccgcccccacctgctattgctgatttgttgaagagcgtggatagtgaagaattgagggaatactgtaaggagaaaggttggattattccagaacaggcctctagcctagtcaccgaaaaacatataagtagggcctttatttgcctacaagccctcactacctttatttcgactcggaccgatg

SEQ ID NO: 7913 - DNA, 203 bp, Artificial sequence
  synthetic
ggcgcgccagtcctataggaacgaaaagttcagggacattagagggtttataccaaaggaggaatctgagattggtgacgccatcctggctatgaatactagcaagtttccaaacatgttcataccagtgggtcaggtcactgagtatggtttcttaaacctgagtggagtccccacacaccgcatgccgactcggaccgatg

SEQ ID NO: 7914 - DNA, 203 bp, Artificial sequence
  synthetic
ggcgcgccagtccttcatgtacaactttccaacaagagccgggcagtgtggtgggatactgatggccactggtaaagtactcggcattcatgttggcggtaatggtcaccaagggtttgctgctgcactgctcagacactacttcgctgatgaacagggtgaaattgagtggacggtgcctagtaaggcgactcggaccgatg

SEQ ID NO: 7915 - DNA, 203 bp, Artificial sequence
  synthetic
ggcgcgccagtcctttaataatataataatcaggacccttttgttgaaagtgtataagaacattgatcttgataaatttaggatgattgcatatggagatgacgtaattgcatcatacccatattcaatagatgcaggcctacttgctaaggcggggaaggagtacggtctgacaatgacaccagctgcgactcggaccgatg

SEQ ID NO: 7916 - DNA, 203 bp, Artificial sequence
  synthetic
ggcgcgccagtcctgcctgtgggaaaatgccttctactcccagcctactctacattacgtagaaagtggcttgattcattttaattaggcccatatttgactttaatttggctaattgggttaaccctgtcacgtatctggacgtgacataagcgtgacaggggtaaatttagcacaaccagagtgctcgactcggaccgatg

SEQ ID NO: 7917 - DNA, 203 bp, Artificial sequence
  synthetic
ggcgcgccagtcctaatcccctacgtccttgattcaggtgtcccattatctcaagctcttatatacccacatcaatggatcaatctgaggacaaacaactgcgccacgatagtgatgccatacattaatgctgtgccttatgacagtgctttaaaccactgcaattttgggttagctattatccctgtcgactcggaccgatg

SEQ ID NO: 7918 - DNA, 203 bp, Artificial sequence
  synthetic
ggcgcgccagtccttgccactgctgatgatggacaagcagattctacaatgatacagtatatgtacataccaccaggtgctcccaaaccaacacagagagattcatttgaatggcagtcagccaccaatccttccatctttgttaggatggctgacccaccagcccaagtttctgtccctttcatgtccgactcggaccgatg

SEQ ID NO: 7919 - DNA, 203 bp, Artificial sequence
  synthetic
ggcgcgccagtcctgatgaaacacattagagcttgggtgccaagaccattcagaagccagccataccttctaaagaattatccaaacatggatggtacaaatttgaagtgcgctagcaccagcagagccaagataacaaccacaggggccttcggtcaacagtccggtgctatctatgtctgcaattacgactcggaccgatg

SEQ ID NO: 7920 - DNA, 203 bp, Artificial sequence
  synthetic
ggcgcgccagtcctggaaaagatcctcaaaaacttggtcaagattgtgtcagcactggtcatagtaatcaggagtgactacgacctagtcacgatgactgcaacacttgctttgatcggttgccacacaagcccatgggcatggttgaaatcaaaagtgtgtagcttccttggcctaccgatagcgcacgactcggaccgatg

SEQ ID NO: 7921 - DNA, 203 bp, Artificial sequence
  synthetic
ggcgcgccagtcctcaagaacaaacaacggattgaacctgtatgtttgatcatccgcggcgctccaggcacaggaaagtcactcgccacaggcatcattgctagagctattgcagaaaaataccactctagtgtttactccttgccaccagacccagaccattttgatggttaccgccagcaagttgtcgactcggaccgatg

SEQ ID NO: 7922 - DNA, 203 bp, Artificial sequence
  synthetic
ggcgcgccagtccttgtcatctacaaattgtttgctggttttcagggtgcttattcgggtatgcctaaaactgcactgaagaagccagtgttgagaactgccacagtgcaaggaccctgccttgactttgccttgtccctacttcgtaggaatattagacaagtgcagacagacaaaggccactttaccgactcggaccgatg

SEQ ID NO: 7923 - DNA, 203 bp, Artificial sequence
  synthetic
ggcgcgccagtcctcatgctcggcgtgcgtgaccgcattgctgtactgcctcgccatgctgagccaagtggaaccatctggatcgaaggcaagcaggtcaaagtcttagatgctgttgagttggtagatgaacaacaagtcaatcttgaactcactcttgttactcttgacatgaacgaaaagttcagcgactcggaccgatg

SEQ ID NO: 7924 - DNA, 203 bp, Artificial sequence
  synthetic
ggcgcgccagtcctcaaagctgggcaatgtggtggagtggtcaccagtgttggtaaaattattggaattcatgttggaggaaatgggcgccagggcttttgtgcagccttgaagcggtgttacttcaccactgagcaaggtgagattcaatggatgaaaccaaatagtgagactggtagatacaatatcgactcggaccgatg

SEQ ID NO: 7925 - DNA, 203 bp, Artificial sequence
  synthetic
ggcgcgccagtccttcaagcagctcaccattacgccaaccagctcaagcagctgaacatagacacatccaaaatgtctatggttgatgcctgttatggaactgaaaacctggaagcaatagaccttagcactagtgctggttacccatacaatgcattaggcgtcaagaaaaggcagattctgaaccccgactcggaccgatg

SEQ ID NO: 7926 - DNA, 203 bp, Artificial sequence
  synthetic
ggcgcgccagtcctcgggcatctattcgaggctttccacgccaatccaggcactattactggatctgctgtcggctgcaacccagacactttctggagcaagattcctatactcctaccaggatcactctttgcctttgattacacaggttatgatgctagtttgagccctgcatggtttagagctctcgactcggaccgatg

SEQ ID NO: 7927 - DNA, 203 bp, Artificial sequence
  synthetic
ggcgcgccagtccttgttaccccgggcttagtaccaatagactgccatcgcggttgaaggggaaaacgctcgttatccggctctctactgcgagaagcctagtaacgccttagaaatgctcaagcgttgcgctcagcacaaccccagtgtagctcaggtcgatgagtcactgcattccccacgggcgacgactcggaccgatg

SEQ ID NO: 7928 - DNA, 203 bp, Artificial sequence
  synthetic
ggcgcgccagtccttcgatgctattaaagaatcctctgtcccactcaagtcaccatcagctgaagcgtgtgggtatagcgatcgtgttgcgcagctgacactaggaaactccacagtcacaactcaagaagcagcaaacatcactgtcgcttatggtgagtggcccgagtattgtccagatacagatgcgactcggaccgatg

SEQ ID NO: 7929 - DNA, 203 bp, Artificial sequence
  synthetic
ggcgcgccagtcctgtttctgcattcatgttcagtgcaatgcgagcaagttccatcagggtactctacttgttgttgctataccagaaatgacagttgcgagatctagtggtgacaccaagcccaccactgcaccccacccttcttacgcagctgcacagcctggcccaaatggcaaagagtttgcttcgactcggaccgatg

SEQ ID NO: 7930 - DNA, 203 bp, Artificial sequence
  synthetic
ggcgcgccagtccttgtgtgcaagctttcgagtggatcctggtcgggcagggccatgggaatcaacgttagtgggacagtactgcaagtactacacacaatggtcgggctcgctggaagtcactttcatgttcacaggctcctttatggccacaggcaaaatgttgatcgcttacacaccgccaggtgcgactcggaccgatg

SEQ ID NO: 7931 - DNA, 203 bp, Artificial sequence
  synthetic
ggcgcgccagtcctctcacataagcagtgcactgacagcagcagacacacgcccaagcacacatcaagtagcgactggcaacactcctgcgctgcaagctgcagagactggggcgacatcgaatgctagtgatgagagtatgatcgagactcggtgtgtagtcaacaaacacagtgttgctgaaactacgactcggaccgatg

SEQ ID NO: 7932 - DNA, 203 bp, Artificial sequence
  synthetic
ggcgcgccagtcctgtgtagaacattttttctcaagggcagcattagttggttatattagcatactgacatcaacaacgaccgctaatggcttcacaaattgggatattgacatcatgggttttgtccaacagcgcaggaaagtggaaggtttcacatacatgaggtttgatgctgagttcacatttgcgactcggaccgatg

SEQ ID NO: 7933 - DNA, 203 bp, Artificial sequence
  synthetic
ggcgcgccagtcctttgccaccgcagacgacgggcaagcagacacgacgatgctccagtatatgtacatcccacctggagctcccaaacccactcaaagggactcattcgagtggcaatctgcaaccaacccatctctgtttgttcggatgagtgaacctcctgcacaagtgtcagttcctttcatgtcgactcggaccgatg

SEQ ID NO: 7934 - DNA, 203 bp, Artificial sequence
  synthetic
ggcgcgccagtcctggatgaagcacattagggcatggatccccaggcccttaagaaaccagccttatgtgctaaagaattaccctaactttgatggaacaaacatcaagtgcagctccaccagcaggcagagcatcaccaccacaggagcttttggtcaacagtctggtgcagtctatgtttgcaactcgactcggaccgatg

SEQ ID NO: 7935 - DNA, 203 bp, Artificial sequence
  synthetic
ggcgcgccagtccttagttgggtttgctgacttgagggacctattgtggctagaagatgatgtcatggagcaaggagtcacagattacattaaaggcctgggtgatgcttttggcactggcttcaccgactccatatctagagagatttccaacttgagagaccagttactcgggtctgagggagtggcgactcggaccgatg

SEQ ID NO: 7936 - DNA, 203 bp, Artificial sequence
  synthetic
ggcgcgccagtccttcaagagcaaacaacgtattgaaccagtatgtttaattattagaggcccaccaggcacaggaaaatcccttgccacaggcatcatagctagagccattgctgagaaatacaactctagtgtctactctctcccaccagaccccgatcattttgacgggtacaggcaacaagtggcgactcggaccgatg

SEQ ID NO: 7937 - DNA, 203 bp, Artificial sequence
  synthetic
ggcgcgccagtccttgacagttatggatgatttgtgtcaaaatcctgacggaaaggacatctcccttttctgccagatggtttctactgttgagttcatcccacccatggcctcacttgaagaaaaagggctcccgtttacttccaagtttgtgattgcatctaccaactccagtaatattattgtaccgactcggaccgatg

SEQ ID NO: 7938 - DNA, 203 bp, Artificial sequence
  synthetic
ggcgcgccagtcctaagcaatacaactgaaagatagaaagtccaaggtgagatatagcttagattctgttgtttctgagctcattagggagtataataacaggtgtagtgttggtaacacaattgaagcactgttccaaggaccccctgttttcaaacctattaagatctctatggaccaaccggccccgactcggaccgatg

SEQ ID NO: 7939 - DNA, 203 bp, Artificial sequence
  synthetic
ggcgcgccagtccttagagttggtgctgagggatctaggttacgatgagcaggccatatcagtgatagagggcatcaaccattcccaccatatctatagaaacaagacatattgtgtgcttgggggtatgccatccggatgctctggtaccagtatattcaactctatgatcaataacatcattatcacgactcggaccgatg

SEQ ID NO: 7940 - DNA, 203 bp, Artificial sequence
  synthetic
ggcgcgccagtcctggaccttgctgatcagaaccttcaaggggattgacctggatgagttgaatatggtggcatatggtgatgatgtgcttgctagctaccctttccccatagattgtcaggaacttgctaacacagggaaagaatatggcttgatcatgacacctgcagataagagtagctgtttcacgactcggaccgatg

SEQ ID NO: 7941 - DNA, 203 bp, Artificial sequence
  synthetic
ggcgcgccagtcctatgaggtcaactgggaaaatgccacatttcttaagagagggtttaaaccagataaacagtttcctttcctcatacatcctaccatgcccatgaaagagatccatgagtcgatcaggtggaccagggatgcgcgcaacacacaagaccacgtgcgctcactgtgtcttcttgcttcgactcggaccgatg

SEQ ID NO: 7942 - DNA, 203 bp, Artificial sequence
  synthetic
ggcgcgccagtcctgggtttgccgtacatgtgcagtgcaatgccagcaagtttcaccagggggctttattagtggtagctatacctgaatggacccaaggacgcggactaacgagcagcaccaacacttacatggagtactcacagaccaaccctggaaagaatggtggcacgttcaatcacccttatcgactcggaccgatg

SEQ ID NO: 7943 - DNA, 203 bp, Artificial sequence
  synthetic
ggcgcgccagtcctaattatgatgcaggggccactcctcttgttccaattaccatcaccatcgctcccatggcatgcgagttttcaggtctacgaaaggcaatctcccaagggttgccagcccaactgaccccaggttccactcagtttgtaacaacggacaatgacagttcccagccattaatcccacgactcggaccgatg

SEQ ID NO: 7944 - DNA, 203 bp, Artificial sequence
  synthetic
ggcgcgccagtcctggcttaagcaacacatcagcatctgatgcagtcattgagactgccaacacaccagcattgcaggcagccgaaacaggagccacgtcaaacgcagatgatgcagggctgatcgaaaccagggatgtcattaacacacaacgcccaactgaaacaactgtgcaggcgttctatgctcgactcggaccgatg

SEQ ID NO: 7945 - DNA, 203 bp, Artificial sequence
  synthetic
ggcgcgccagtcctagggctggtttagttggaatggtagatatcattcatagtgacagcaactcacccaagtttgcatcgtggaccatcgacacgatggcttttgtccaacaacggcgaaagctcgaaatgttcacgtacatgaggtttgctgcggagttcacctttgtagtgtcaactgaatccacacgactcggaccgatg

SEQ ID NO: 7946 - DNA, 203 bp, Artificial sequence
  synthetic
ggcgcgccagtcctacaaagatacctaacactatgattcagtatatgtacgtaccaccaggagcaccaatacccacgactagcaatgggtacgaatggcaatctggcaccaacccatcagttattgtacgtatgaatgaggcaccagctagagtgcgagttcccttcattagcccagcaggtgcatatcgactcggaccgatg

SEQ ID NO: 7947 - DNA, 203 bp, Artificial sequence
  synthetic
ggcgcgccagtcctgcctggttttatgatggctacactgattttggtactcatccctcaccaaatggtaaaggagatgcaaattatggattgaatccagccaatcagtttggcacttttgcaacccgcattattggaaacggggcaatctccgcgattaggattagaatttacatgaaaccaacgcaacgactcggaccgatg

SEQ ID NO: 7948 - DNA, 203 bp, Artificial sequence
  synthetic
ggcgcgccagtcctagacacttggctaatgagtttgacgcccagtcaatggtgtgggagagttatgagagagatcttctagtgtccaccactacagcccatggttgtgacgtaattgcccgatgcaattgtaacactggtgtgtatttctgccgtagcaagggaaaacactacccagtctgctttcaacgactcggaccgatg

SEQ ID NO: 7949 - DNA, 203 bp, Artificial sequence
  synthetic
ggcgcgccagtcctaaagcgttaatcaagattgtaagtgctcttgtgattatagttaggaatcatgaagatctcatcacagtaacggccactctagccctcattggatgttctgggtcaccatggcaatggttaaagaccaaagtatgccagtacttgcaaataccagtagtggaaaaacaaggagatcgactcggaccgatg

SEQ ID NO: 7950 - DNA, 203 bp, Artificial sequence
  synthetic
ggcgcgccagtcctgatttatgtcagaacccagatgggaaagatgtgagcttgctatgtcagatggtttccacagtggattttattccacctatggctagcttagaggaaaagggaattctatatacttcccctttcatgattgcatctactaaccatggttccatcactgctccaaccatctcggatcgactcggaccgatg

SEQ ID NO: 7951 - DNA, 203 bp, Artificial sequence
  synthetic
ggcgcgccagtcctgcagacttgttgaagtcagttgattctgaggaagtgagacaatactgtcaagagaagggttggataataccagtcactgagtgtcagacagaaagacacctcagtagagctttgactattctccaagctgtttcaacatttgtggctgtagctgggtgtatctacatagtgtaccgactcggaccgatg

SEQ ID NO: 7952 - DNA, 203 bp, Artificial sequence
  synthetic
ggcgcgccagtcctaagctgtttgctggatttcaaggggcatacactggattgcctttcaacaaacccaaagttccaaccataaggcaggcaaaggtacaaggaccttctttcgaatttgcagtggcaatgatgaagaggaattcagccattattaaaacaggacaaggtgagttcaccatgctcggtcgactcggaccgatg

SEQ ID NO: 7953 - DNA, 203 bp, Artificial sequence
  synthetic
ggcgcgccagtcctcaatgtggtggagtgttgatggcaactggtaaagtcataggtattcacgttggtggtaatggacatcaaggatttgctgccacactactcagagactacttcaatgaagaacaaggtgaaattgagtggatggagacaaacaaagaatcaggttacccaattatcaatgcaccacgactcggaccgatg

SEQ ID NO: 7954 - DNA, 203 bp, Artificial sequence
  synthetic
ggcgcgccagtcctgaccactatgctgggcaattaatgacccttgacattgacattagtgagatgtgccttgaggatgctgtttatgggactgaagggcttgaagcacttgacctgacaactagtgcaggatacccttatgtgacaatgggaatcaaaaagagagacatattatcaaagaaaactagacgactcggaccgatg

SEQ ID NO: 7955 - DNA, 203 bp, Artificial sequence
  synthetic
ggcgcgccagtcctcttgaaaaattaggttatgattacaaggctggcaggtacatttcgtacttgtgtcactcataccacctttacaaaaacaagcactattttgtgcgaggtggtatgccttcagggtgttctggtacatcaatcttcaactccatgataaacaacatcataattcgaacattgttgcgactcggaccgatg

SEQ ID NO: 7956 - DNA, 203 bp, Artificial sequence
  synthetic
ggcgcgccagtcctctgttgggcgatgtctactgctacctgcatacacaacactcaggcgcaagtggctcgaccaattctaaaatggttttcaatttgaccttaattcggcctaattggaagaccctgtcacgtatctggacgtgacaaaagcgtgacaggggtaaatttagcacaaccagagtgcttcgactcggaccgatg

SEQ ID NO: 7957 - DNA, 203 bp, Artificial sequence
  synthetic
ggcgcgccagtcctaaagccccgtggataagatccactgctgtgagcggtgcaaccccagcaccctggttcgatggccattctctatggaaccagaaaatggttttctcaagccctccggtagagaagccaagaatgtcctgaaggtaccccgcgcgcgggatctgatcaggagaccaattggcagtgcgactcggaccgatg

SEQ ID NO: 7958 - DNA, 203 bp, Artificial sequence
  synthetic
ggcgcgccagtcctaggcgtaatcatcaacaactactattcaaatcaataccaaaactcaattgatctttcagccaatgccaacggtgttggaaaagaaaattcaaaaccgcaaggtcagttgatgaatattcttggtagcgcggcggatgcattcaagaacatcgcgcctcttctcatggaccaggacgactcggaccgatg

SEQ ID NO: 7959 - DNA, 203 bp, Artificial sequence
  synthetic
ggcgcgccagtcctcactgaagaaatgaccaacctttctgatagagtgtcttcggacaccgcaggcaacacggccacaaacactcaatctacagtaggccgtttgtttgcatttggtacaagacacaagggtaaacatccagcttcctgtgctgacacagccactgacaaagtactcgctgccgagagcgactcggaccgatg

SEQ ID NO: 7960 - DNA, 203 bp, Artificial sequence
  synthetic
ggcgcgccagtcctgtactacacctttaaaatagccacttggtccacccaaaaagcatttgatcatgtaaggattccttttccccacgtcctatcaggaagcaaaggaggcgtttttggttctactctaagacgccactacttgtgtaagtgtggttggagaatacaggtacagtgtaatgcttcacacgactcggaccgatg

SEQ ID NO: 7961 - DNA, 203 bp, Artificial sequence
  synthetic
ggcgcgccagtccttgccttgaatcatcagaatcattggcagtggactgtctatccacatcaaattcttaacctcaggactaacactacgtgtgacttagaagtgccttatgttaacatttgtcccacgtcctcgtggacccagcacgctaactgggttttggtagtggctgttttgtctcctcttcacgactcggaccgatg

SEQ ID NO: 7962 - DNA, 203 bp, Artificial sequence
  synthetic
ggcgcgccagtcctatattcttcaggttcttcccccaatgtagacattactgtgtctgttcaacccgtaaagcctgtctttaacggtctcagacatacagttttggaggaccagagccccataccagtcacaattagagagcatgctggaacattctattccaccactccggacactaccgttcccatcgactcggaccgatg

SEQ ID NO: 7963 - DNA, 203 bp, Artificial sequence
  synthetic
ggcgcgccagtcctagctatgcaagccacatatgcgatttgggacttgggcctcaactctagctacaatttcaccgtcccattcatctccccgacacactaccgccaaacctcttatacaactccctcaatcacttccgttgacggttggctctcaatttggcaactaaccccactcacttacccagccgactcggaccgatg

SEQ ID NO: 7964 - DNA, 203 bp, Artificial sequence
  synthetic
ggcgcgccagtccttaacaccccacagagtgccgatatactaactttggtttcaggtggggatgacttcactctcagaatgccggtgactcctagtaagtacacgccccatggagtggataacgcagaaaaaggcaaggttgcaaatgacaacgcttcagcagactttgtagcagtccctatagctctcgactcggaccgatg

SEQ ID NO: 7965 - DNA, 203 bp, Artificial sequence
  synthetic
ggcgcgccagtccttcctgaaaaccagacaaaagtggccttcttttacgacagggcggtcctagcgtccgcccttgtcaatgctcaggacctgaactcaaacttttctcttcaagacgcagcaaatgtgatgaacaatgcacttttgacaccactcccaagcaaccgtcttgatgactcaacatatggcgactcggaccgatg

SEQ ID NO: 7966 - DNA, 203 bp, Artificial sequence
  synthetic
ggcgcgccagtcctctacaccccatgtcgcgcgccagtggatctgtctgaacaaactatcccctacactccatcattgtcagatacccgtgatccacatatgtgggttgttggacccggtgctactaatcaaatttcttttgtcattccttacacttctcctttgtccgtattaccagctgtttggttcgactcggaccgatg

SEQ ID NO: 7967 - DNA, 203 bp, Artificial sequence
  synthetic
ggcgcgccagtccttaatgggttttctgattttgacaacaaaacacggtttggtgttgcaccaaacgctgactttggtcgattgttcgttcagggtgcagacaggttctcggtccactaccggtacaaaaagatgagagtgttttgtccaagaccaactgtgtttttcccgtggcccgccaactcagtcgactcggaccgatg

SEQ ID NO: 7968 - DNA, 203 bp, Artificial sequence
  synthetic
ggcgcgccagtccttggacgccttctcgtctgtatgggcgagaagccctgtcagcttcccgtctctactcccaagtgtttctaccacatcgtttttactggctccagaaattcctttggtgtgtccatctacaaagctagatacagaccctggaagcagccccttcacgatgagttgtacgactatggcgactcggaccgatg

SEQ ID NO: 7969 - DNA, 203 bp, Artificial sequence
  synthetic
ggcgcgccagtcctcctacacaatccagatttgaccactactgtctgtctgtctttgatggctggaatagatgttctcactaatgatagtgtttttaactggctgtccactaaactatccaagttcttccacacccctgcccctcccattgttcctcttttgcaacaacagtctcctgttagagaagccgactcggaccgatg

SEQ ID NO: 7970 - DNA, 203 bp, Artificial sequence
  synthetic
ggcgcgccagtcctaaatgataactttaatttggcaaagaacatagaatgggcaataaaaacaattaaaagaatagtagaatggattacttcatggttcaaacaggaagaaacaagtcctcaagctaagttagataaaatgttagcagactttccagaacactgttcttccattcttgctatgagaaacgactcggaccgatg

SEQ ID NO: 7971 - DNA, 203 bp, Artificial sequence
  synthetic
ggcgcgccagtccttgctggacaaggaaagtccgtgaccagtcaaatcatcgcccaagcagtctccaaacttttgtttggtcgtcaatcagtttattctctcccaccggattcagattacttagatggttacgagaatcaatattcagtaatcatggatgatctgggacaaaatcccgatggcgaagacgactcggaccgatg

SEQ ID NO: 7972 - DNA, 203 bp, Artificial sequence
  synthetic
ggcgcgccagtccttttcaaagtattttgtcaaatggtttcaagcacaaattttctcccaaacatggcccacctggaaaagaaaggaactccattcacttctaacttcataatagcaacgaccaaccttcccaagtttcggcctgtcaccgtagcacactacccagctgttgatagaagaattaccttcgactcggaccgatg

SEQ ID NO: 7973 - DNA, 203 bp, Artificial sequence
  synthetic
ggcgcgccagtcctcaaccttcaacaagtggttaagatggtaaagaataccatcgataacaaagtggaaaacttgaagaaaatgaacacattggttgctcaatcacctggaaatgacatggattacgtgttgacctgtttgagacaaactaatgcagctttgcaagaccaaattgatgaacttcaagacgactcggaccgatg

SEQ ID NO: 7974 - DNA, 203 bp, Artificial sequence
  synthetic
ggcgcgccagtccttgcttactctggaggcaagaaaggtgagaagcaaacacttcaaattttggacgtacaaggcggaggaaagatcgtagcccaggctggaaacccaattatggattatgaagtaaacattgcaaagaatatggttacccccatcaccttcttttatgcagacaaggcacaagtcaccgactcggaccgatg

SEQ ID NO: 7975 - DNA, 203 bp, Artificial sequence
  synthetic
ggcgcgccagtcctaggacctttgttcaaggacaattctaggaaattttgttctaaagatgatgacttcccggctagaaacgagactgttacaggaattatgaatactggagtcccttttgtcttcactggaaagtttttggttggcaatcagccggttaacacaaccactggtgcatgtttcaatcacgactcggaccgatg

SEQ ID NO: 7976 - DNA, 203 bp, Artificial sequence
  synthetic
ggcgcgccagtcctttgtatacactatagagctacaacacatcgaggatggtgcgggtcggcactcatctgtcatgtcaacggcaagaaggccgtgtatgcaatgcactcagctggtggtggcggcatggctgccgctacgataatcactcaggaaatgattgaagctgctgaaaaggccttggattgcgactcggaccgatg

SEQ ID NO: 7977 - DNA, 203 bp, Artificial sequence
  synthetic
ggcgcgccagtcctagcaaagactagaattgtagacgtacccccatttcatcactgtatatggggacgtcaactattagggcgctttgcttctagatttcaaacaaatcctggcttggatcttggttcagcgattggcacggaccctgacacagattggaccgctttcgcctttcaactcttacagtacgactcggaccgatg

SEQ ID NO: 7978 - DNA, 203 bp, Artificial sequence
  synthetic
ggcgcgccagtcctagttaagggtggtctcccgtcagggtgtgccgctacaagcatgttgaacacaattataaacaacatagtaatcagagcagctttacacttgacctattctaactttgaatttgatgacatcaaagttttgtcttatggtgatgatttactcattgccacaaattatcaaattaacgactcggaccgatg

SEQ ID NO: 7979 - DNA, 203 bp, Artificial sequence
  synthetic
ggcgcgccagtccttaccaatgttattggtgtggtctgcgagttctagcctactcgtttctcccccgaccattcactcacccacgaaaagtgtgttgtaaccataagatttaacccccgcacgggatgtgcgataaccgtaagactggctcaagcgcggaaagcgctgtaaccacatgctgttagtcccgactcggaccgatg

SEQ ID NO: 7980 - DNA, 203 bp, Artificial sequence
  synthetic
ggcgcgccagtcctctttatggctgcaagatggctacccacctcggatcactgaactggagctcgaccctccttagtaagggaaccgagaggccttcgtgcaacaagctccgacacagagtccacgtgactgctaccaccatgagtacatggttctcccctctcgacccaggacttctttttgaatatcgactcggaccgatg

SEQ ID NO: 7981 - DNA, 203 bp, Artificial sequence
  synthetic
ggcgcgccagtcctccacggctcgatccagagggtggggcatgacccctagcatagcgagctacagcgggaactgtagctaggccttagcgtgccttggatactgcctgatagggcgacggcctagtcgtgtcggttctataggtagcacatacaaatatgcagaactctcatttttctttcgatacacgactcggaccgatg

SEQ ID NO: 7982 - DNA, 203 bp, Artificial sequence
  synthetic
ggcgcgccagtcctcagggaggcctcaacggaggggccttcacagctaccctacatagacactttttgatgaagtgcgggtggcaggtgcaggtccaatgtaatttgacacaattccaccaaggcgctcttcttgttgccatggttcctgaaaccacccttgatgtcaagcccgacggtaaggcaaagcgactcggaccgatg

SEQ ID NO: 7983 - DNA, 203 bp, Artificial sequence
  synthetic
ggcgcgccagtcctagcttacaggagctgaatgaagaacagtgggtggaaatgtctgacgattacgggaccgggaaaaacatgccttttcagtctcttggcacatactatcggccccctaactggacttggggtcccaatttcatcaacccctatcaagtaacggttttcccacaccaaattctgaaccgactcggaccgatg

SEQ ID NO: 7984 - DNA, 203 bp, Artificial sequence
  synthetic
ggcgcgccagtcctataaccgaccttttgcaactggcccgcatacccactctcatggcatttgagcgggtgcctgaacccgtgcctgcctcagacacatatgtgccctacgttgccgttcccacccagttcgatgacaggcctctcatctccttcccgatcaccctttcagatcccgtctatcagaaccgactcggaccgatg

SEQ ID NO: 7985 - DNA, 203 bp, Artificial sequence
  synthetic
ggcgcgccagtcctaccctggttggcgccatcagttcaaatttcgccaattaccgtgggtgtatccaaatcactctgacattttgtggacccatgatggcgagagggaaattcctgctctcgtattctcccccaaatggaacgcaaccacagactctttccgaagctatgcagtgcacatactctattcgactcggaccgatg

SEQ ID NO: 7986 - DNA, 203 bp, Artificial sequence
  synthetic
ggcgcgccagtccttgggacataggcttgaactctagttggaccttcgtcgtcccctacatctcgcccagtgactaccgtgaaactcgagccattaccaactcggtttactccgctgatggttggtttagcctgcacaagttgaccaaaattactctaccacctgactgtccgcaaagtccctgcattcgactcggaccgatg

SEQ ID NO: 7987 - DNA, 203 bp, Artificial sequence
  synthetic
ggcgcgccagtcctaagttcctgtttgatcgatctcgattattgaatgtaatcaaggtactggagaaggacgccgttttcccccgccctttccctacacaagaaggtgcgcagcaggatgatggttacttttgtcttctgaccccccgcccaacagtcgcttcccgacccgccactcgtttcggcctgcgactcggaccgatg

SEQ ID NO: 7988 - DNA, 203 bp, Artificial sequence
  synthetic
ggcgcgccagtccttccagctttgtctacgaccagctgcatgtgcccttccactttactgggcgcactccccgcgctttcgctagcaagggtgggaaggtatctttcgtgctcccttggaactctgtctcgtctgtgctccccgtgcgctgggggggggcttccaagctctcttctgctacgcggggtcgactcggaccgatg

SEQ ID NO: 7989 - DNA, 203 bp, Artificial sequence
  synthetic
ggcgcgccagtcctggcgatatcgagaccaatcctggtcctgcttctgacaacccaattttggagtttcttgaagcagaaaatgatctagtcactctggcctctctctggaagatggtgcactctgttcaacagacctggagaaagtatgtgaagaacgatgatttttggcccaatttactcagcgagcgactcggaccgatg

SEQ ID NO: 7990 - DNA, 203 bp, Artificial sequence
  synthetic
ggcgcgccagtcctctagtgggggaaggctctgtcgccttggccgccacgctatccaaccaagcttcagtaaaggctcttttgggcctgcactttctctctcgggggctcaattacactgacttttactctttactgatagagaaatgctctagtttctttaccgtagaaccacctcctccaccagctcgactcggaccgatg

SEQ ID NO: 7991 - DNA, 203 bp, Artificial sequence
  synthetic
ggcgcgccagtcctgacacccccgtcgacgaggcgttgggtagagttctctcccccgctgcggtcgatgaggcgcttgtcgacctcactccagaggccgacccggttggccgtttggctattcttgccaagctaggtcttgccctagctgcggtcacccctggtctgataatcttggcagtgggactccgactcggaccgatg

SEQ ID NO: 7992 - DNA, 203 bp, Artificial sequence
  synthetic
ggcgcgccagtcctgcggtcgctaagaaagtggtcgtccccattaccttcatggttcccaacagaccttctgggcttacacagtccgctcttctggtgaccggccggaccttcctaatcaatgaacatacatggtccaatccctcctggaccagcttcacaatccgcggtgaggtacacactcgtgatcgactcggaccgatg

SEQ ID NO: 7993 - DNA, 203 bp, Artificial sequence
  synthetic
ggcgcgccagtcctgacattctgaccgtcaaagaagcaattctgggcatccccggactagaccccatggatccccacacagctccgggtctgccttacgccatcaacggccttcgacgtactgatctcgtcgattttgtgaacggtacagtagatgcggcgctggctgtacaaatccagaaattcttacgactcggaccgatg

SEQ ID NO: 7994 - DNA, 203 bp, Artificial sequence
  synthetic
ggcgcgccagtcctgacggtgactactctgaccatgtcttccaaacttttctgaaagatgagatcagaccctcagagaaagtccgagcgggaaaaacccgcattgttgatgtgccctccctggcgcattgcattgtgggcagaatgttgcttgggcgctttgctgccaagtttcaatcccatcctggccgactcggaccgatg

SEQ ID NO: 7995 - DNA, 203 bp, Artificial sequence
  synthetic
ggcgcgccagtccttttagccctgcgctgggaccgtatctcagatccctggctgtctcggtgcacgcttacggcgagcgtcgcatcaagattaccggtggcctcccctccggttgtgccgcgaccagcctgctgaacacagtgctcaacaatgtgatcatcaggactgctctggcattgacttacaagcgactcggaccgatg

SEQ ID NO: 7996 - DNA, 203 bp, Artificial sequence
  synthetic
ggcgcgccagtcctttttgcgagaaatgggacgtctgcgcacgaaacgcgccgtcgcttgaggaggacttgtacaaacacgatctacgcaggtttccccaactgacacttaccgtgcaacttgaaatcccgcctggtctttccaggtctagaggggtgacaatttgtactgtggttgactccacgctccgactcggaccgatg

SEQ ID NO: 7997 - DNA, 203 bp, Artificial sequence
  synthetic
ggcgcgccagtcctactgatactggtactcaaacactggtggcaggctaaggatgcccttcaggtaccccgaggtaacacgcgacacttgggatctgagaaggggactgaggcttctttaaaagcgctcggtttaaaaagcttctacgcctgaacaggtgaccggaggccggcacctttctctacaatcgactcggaccgatg

SEQ ID NO: 7998 - DNA, 203 bp, Artificial sequence
  synthetic
ggcgcgccagtcctcatcctccagttgtttaggtacgtcgatgaacctttcttcgactgggtctataactcgcccgagaatcttacgcttgatgctatcaagcagttggaaaacttcaccgggcttgagttgcacgagggcggaccacctgcccttgtgatctggaacatcaaacacttgctccaaaccgactcggaccgatg

SEQ ID NO: 7999 - DNA, 203 bp, Artificial sequence
  synthetic
ggcgcgccagtcctaattacacacgggaaggctgaaaatgacaccttggtagtgtcggctagcgccggcaaagactttgagttgcgcctcccaattgacccccggccacaaaccactgctactggggagtccgcagaccctgtcaccaccaccgtggagaactacggcggtgagacacaagtccagagcgactcggaccgatg

SEQ ID NO: 8000 - DNA, 203 bp, Artificial sequence
  synthetic
ggcgcgccagtcctacgccaccacacggacgtcggcttcatcatggaccgatttgtgaagataaacagcctgagccccacacatgtcattgacctcatgcacacccacaaacacgggatcgtgggtgcgttacttcgtgcagccacgtactacttctccgacttggagattgttgtgcggcacgatggcgactcggaccgatg

SEQ ID NO: 8001 - DNA, 203 bp, Artificial sequence
  synthetic
ggcgcgccagtcctacctgactttaaccggttggtgtccgcttttgaggaattggccactggggttaaagctatcagaaccggtctcgatgaggccaaaccctggtacaagctcatcaagctcctaagccgcctgtcgtgcatggccgctgtggcagcacggtccaaggacccagtccttgtggccatcgactcggaccgatg

SEQ ID NO: 8002 - DNA, 203 bp, Artificial sequence
  synthetic
ggcgcgccagtcctcatgctggccgacaccggtctcgagattctggacagcactttcgtcgtgaagaaaatctccgactcgctctccagtctctttcacgtgccggcccccgccttcagtttcggagccccgattctgttggccgggttggtcaaggtcgcctcgagtttcttccggtccacacccgacgactcggaccgatg

SEQ ID NO: 8003 - DNA, 203 bp, Artificial sequence
  synthetic
ggcgcgccagtcctagaccttgagagagcagagaaacagctcaaagcacgtgacattaacgacatcttcgccattctcaagaacggcgagtggctggtcaaactgatccttgccatccgcgactggattaaggcatggattgcctcagaagagaagttcgtcaccatgacggacttggtgcctggcatcgactcggaccgatg

SEQ ID NO: 8004 - DNA, 203 bp, Artificial sequence
  synthetic
ggcgcgccagtcctctgctgtgctactggagtgtttggcactgcttacctcgtgcctcgtcatcttttcgcagagaagtatgacaagatcatgttggaaggcagagccatgacagacagtgattacagagtgtttgagtttgagattaaagtaaaaggacaggacatgctctcagacgcggcactcatcgactcggaccgatg

SEQ ID NO: 8005 - DNA, 203 bp, Artificial sequence
  synthetic
ggcgcgccagtcctggtgcttcaccgtgggaaccgcgtgagagacatcacgaaacactttcgtgatacagcaagaatgaagaaaggcacccccgtcgtcggtgttgtcaacaacgccgatgttgggagactgattttctctggtgaggcccttacctacaaggacattgtagtgtgcatggatggagacgactcggaccgatg

SEQ ID NO: 8006 - DNA, 203 bp, Artificial sequence
  synthetic
ggcgcgccagtcctcaccatgcccggcctctttgcctacaaagccgccaccaaggctggctactgtggaggagccgttcttgccaaggacggggctgacacatttatcgtcggcactcactctgcaggtggcaatggagttggatactgctcatgcgtttccaggtccatgcttcaaaagatgaaggccgactcggaccgatg

SEQ ID NO: 8007 - DNA, 203 bp, Artificial sequence
  synthetic
ggcgcgccagtcctagttgttctcgatgaagtcattttctccaaacacaaaggagacgtaaagatgaccgaagaggacaaagcgctgttccgccgctgcgccgctgactacgcgtcacgcctgcacagcgtgctgggtacggcaaatgccccattgagcatctacgaggcaatcaagggcgttgatggcgactcggaccgatg

SEQ ID NO: 8008 - DNA, 203 bp, Artificial sequence
  synthetic
ggcgcgccagtcctactcgacgccatggagccggacactgcacctggcctcccctgggccctccagggaaaacgccgcggtgcgctcatcgacttcgagaacggcacggtcggacccgaagttgaggctgccttgaagctcatggagaaaagagaatacaagtttgcttgtcagaccttcctgaaggacgactcggaccgatg

SEQ ID NO: 8009 - DNA, 203 bp, Artificial sequence
  synthetic
ggcgcgccagtcctgcaaagatttggcacacatttcgcccaatacagaaacgtgtgggatgtggattactcggcctttgatgcaaaccactgcagtgacgctatgaacatcatgtttgaggaggtgttccgcacagactttggcttccacccaaacgctgaatggatcctgaagactctcgtgaacaccgactcggaccgatg

SEQ ID NO: 8010 - DNA, 203 bp, Artificial sequence
  synthetic
ggcgcgccagtcctactaggctcacagtcgtacctcctccaggctgacgactgtcgcccttctagggcctacgaccttcaagttacggttttggcgttcttcccgcggccggatcgcctgcgcgaacgctggctcttcacccgaaggcctacctttcaccccccccccccataaagaacgtttccgtccgactcggaccgatg

SEQ ID NO: 8011 - DNA, 203 bp, Artificial sequence
  synthetic
ggcgcgccagtcctttttatgaagacaactgactgtttcaacgttttgctcgagatccttcacaggttcagacacacattcaagataaatagagagatggaattcacactctacaacggagagaagaagaccttctacagcaggcccaatacgcacgggaattgctggctcaactcgttgttgcagctcgactcggaccgatg

SEQ ID NO: 8012 - DNA, 203 bp, Artificial sequence
  synthetic
ggcgcgccagtcctctttcgatacgtcgatgagcctctcttcgagtctgagtacctgtcacctgaaaataagacattggatatgatcaaacaactttctgattacactaaactagacttgtcagacggtgggccacccgccctcgtcctgtggctgatcaaggactgtcttcaaactggcgttggcaccgactcggaccgatg

SEQ ID NO: 8013 - DNA, 203 bp, Artificial sequence
  synthetic
ggcgcgccagtcctcagcactcgccctagcgagatctgtgtgatcaacggggttgtcatgaccctggctgatttccacgccggcattttcatcaagggtaccgaacacgctgtgttcgccctcaacacatctgagggctggtacgccattgatgatgaggtgttctacccttggacacctgaccctgacgactcggaccgatg

SEQ ID NO: 8014 - DNA, 203 bp, Artificial sequence
  synthetic
ggcgcgccagtcctacacaagctttttgattggacactcgaacagcaatttggcacaacgcacattttggaactccccacagatcataagggcatctatgggcagctggttgactcacacgcgtacatccgaaacggatgggacgtgcaagtgtcggccactgccacacagtttaacggaggctgcctcgactcggaccgatg

SEQ ID NO: 8015 - DNA, 203 bp, Artificial sequence
  synthetic
ggcgcgccagtcctgttggtggccatggtgcctgagctgtgtaaactggctgacagagagaaataccaactcactctcttcccacaccaattcttgaacccacgcaccaacaccaccgcacacattcaggtaccatacctgggtgttgacagacacgaccagggaactcgtcacaaggcgtggaccctcgactcggaccgatg

SEQ ID NO: 8016 - DNA, 203 bp, Artificial sequence
  synthetic
ggcgcgccagtcctcgtcgtgatggtggtggcaccatacactaacgaccagacaattggctcactaaaagctgaggtctacgttaacattgcaccaaccaatgtgtacgtggccggtgagaaacccgccaaacagggaattttccctgtggccgttgctgacggctacggtggttttcagaacaccgacgactcggaccgatg

SEQ ID NO: 8017 - DNA, 203 bp, Artificial sequence
  synthetic
ggcgcgccagtccttgaaacaccagagatggcctcacactgctatcacgctgagtgggatactgggttgaactcaacatttaccttcaccgtgccgtacatttcagcagcggattacgcctacacctactctgatgagcctgaacaggcttcagtacaaggttgggttggtgtgtatcagatcactgacgactcggaccgatg

SEQ ID NO: 8018 - DNA, 203 bp, Artificial sequence
  synthetic
ggcgcgccagtcctcaccgacgtcgctttccttctcgaccggttcactctggttgggaaaaccatggaaaacaaaatggttctggatttgttgaccacgaaggagaaatcactggttggcgcactcctgcgtgcggccacgtattacttctctgatttggaggtggcatgcgtcgggaacaacaaatgcgactcggaccgatg

SEQ ID NO: 8019 - DNA, 203 bp, Artificial sequence
  synthetic
ggcgcgccagtcctcggaaacatccgcggggacctcgccgctgtggctgggaggatcgccagtgagacccacatcccgacgacatttaatttcgggatgatttacacagaggcagaggtggacgtgtacctgaggatgaaaagggcggaactctactgtccccgacccgttctcacgcactacgaccacgactcggaccgatg

SEQ ID NO: 8020 - DNA, 203 bp, Artificial sequence
  synthetic
ggcgcgccagtcctcatgtccaccaagcacggacccgacttcaaccgtctggtgtccgcatttgaggaattgacaaagggagttaaggctatcaaggacggtctcgatgaggccaaaccctggtacaaagtcattaaactcctcagccgcctgtcgtgcatggccgctgtcgcagctcgctccaaggacgactcggaccgatg

SEQ ID NO: 8021 - DNA, 203 bp, Artificial sequence
  synthetic
ggcgcgccagtccttttccggtccacgcccgaagacttggagagagcagagaaacaactcaaggcacgtgacatcaacgacatcttcgccatcctcaagaacggcgaatggctggtcaaacttatcctggctatccgcgactggatcaaagcctggatttcctcggaggagaagtacatctccatgaccgactcggaccgatg

SEQ ID NO: 8022 - DNA, 203 bp, Artificial sequence
  synthetic
ggcgcgccagtcctacccgtggtcgtttgcctccgtggcaaatccggccagggcaagagcttccttgctaatgtgctcgcacaagcaatctcaacccacttcactggcagaaccgactctgtctggtactgcccacctgaccccgaccacttcgacggttacaaccaacaaactgtcgttgtcatggacgactcggaccgatg

SEQ ID NO: 8023 - DNA, 203 bp, Artificial sequence
  synthetic
ggcgcgccagtcctaggacagcacgaagcggcaattgaattctacgaagggatggtacatgacagcattaaagaggaacttaagcccttgttggagcaaaccagcttcgccaagcgtgctttcaagcgcctcaaggagaacttcgaggtcatcactctcgttgttgtgctgttggcaaacatcatcatcgactcggaccgatg

SEQ ID NO: 8024 - DNA, 203 bp, Artificial sequence
  synthetic
ggcgcgccagtcctcaaaactgacgatgaagtgaactctgagccagccaaacccgcggagaaaccacaagctgaaggaccctatgctggcccccttgaacgacaacagccgctgaaacttaaggctaagctccctcaggctgagggaccttacgtcgggccactagagagacaacaaccactgaaattcgactcggaccgatg

SEQ ID NO: 8025 - DNA, 203 bp, Artificial sequence
  synthetic
ggcgcgccagtcctgagagcaagactgcctgtggccaaggaagggccatatgaaggaccagtgaagaagcctgtcgctttgaaactgaaagcaaaagccccgattgtcactgaaagcggatgcccaccgactgacttgcaaaagatggtcatggcaaacgtcaagcctgttgagcttatcctcgacggcgactcggaccgatg

SEQ ID NO: 8026 - DNA, 203 bp, Artificial sequence
  synthetic
ggcgcgccagtcctgaagacagttgcgctctgctgcgcgactggagtgttcgggacggcttacctcgtgcctcgtcatcttttcgcagagaagtacgacaagatcatgctggacggccgagccttgacagacagtgacttcagagtgtttgagtttgaggtaaaagtaaaaggacaggacatgctctccgactcggaccgatg

SEQ ID NO: 8027 - DNA, 203 bp, Artificial sequence
  synthetic
ggcgcgccagtcctcctgcaaatgaaagcccacatcgaccctccccctcacaccgaggggttggtagtggacaccagagaagttgaggagcgcgtgcatgtcatgcgcaagactaaacttgcacccaccgtggctcacggtgtgtttcagcctgaatttggacccgccgccctgtcgaacaacgacaacgactcggaccgatg

SEQ ID NO: 8028 - DNA, 203 bp, Artificial sequence
  synthetic
ggcgcgccagtcctacgcctgaacgaaggcgtggttctggacgaggtcatcttctccaaacacaagggcgatgccacaatgtctgaggctgacaaaagactgttccgtctgtgcgctgctgattatgcctcgcatcttcacaatgtgctggggacagccaactctccactgagcgtgtttgaagccatcgactcggaccgatg

SEQ ID NO: 8029 - DNA, 203 bp, Artificial sequence
  synthetic
ggcgcgccagtcctccctgatgttgattggcaacgatttggcactcactttgcccagtacaaaaacgtttgggacattgattattcggcctttgatgctaaccattgcagtgacgccatgaacatcatgttcgaggaggtcttccgtgaggaatttggatttcatccgaacgctgtttggattctcaacgactcggaccgatg

SEQ ID NO: 8030 - DNA, 203 bp, Artificial sequence
  synthetic
ggcgcgccagtcctttcctacggggatgacattgtagttgcaagtgattacgatttggactttgaagctctcaagcctcactttaaatctcttggtcaaacaatcactccagccgacaaaagcgacaaaggttttgttcttggtcagtccatcaccgatgtcactttcctcaagaggcattttcatttcgactcggaccgatg

SEQ ID NO: 8031 - DNA, 203 bp, Artificial sequence
  synthetic
ggcgcgccagtccttaggctggtcatcgtacctcctctaggctgacaactgtcgcccttttagggcccacgaccttcaagttacggttttagcgtccctcccgcggccgactcgcctacgtgaatgctagctcttcacccgaaggcctgcctttcaccccccccccccataaagaacgttaccgtcttcgactcggaccgatg

SEQ ID NO: 8032 - DNA, 203 bp, Artificial sequence
  synthetic
ggcgcgccagtcctactggcgggtgctagtaacactcactttgcttcgtagcggagcacatgagcggtgggaacacccccgtggtaacacggacccaccgggccaaaagccacgcctcacggcctcatgtgtgtgcaaccccagcacggcaaattgtttgtgaaacacatcttaaggtaacactgggacgactcggaccgatg

SEQ ID NO: 8033 - DNA, 203 bp, Artificial sequence
  synthetic
ggcgcgccagtcctccagcactcgccccagcgagatctgtgtgatcaacggggtcaccatgactctggccgatttccacgccggaattttcatcaagggtactgaacacgccgtgttcgctctcaacacatccgagggctggtacgccatagatgatgaggtgttctacccgtggacacccgaccctgcgactcggaccgatg

SEQ ID NO: 8034 - DNA, 203 bp, Artificial sequence
  synthetic
ggcgcgccagtcctacagcgtgcttgcgtacgtgccctacgaccaggaacccctggacgtagattggcaggaccgcgcaggcctgttccttcgtggagcgggtcagtcgtcccctgccactgggtcacaaaaccaatctggcaacactggtagtataatcaacaactactacatgcagcagtaccaaacgactcggaccgatg

SEQ ID NO: 8035 - DNA, 203 bp, Artificial sequence
  synthetic
ggcgcgccagtcctaggagacaactcttctggaggaccgcatcctcactacacgccacaacacaactacatccacaacacagagttctgttggcgtgacatacggttacgcctcgggggaccgtttcttgcctggacccaacaccagtgggctcgagacacgcgtcgaacaagcggagagattcttcacgactcggaccgatg

SEQ ID NO: 8036 - DNA, 203 bp, Artificial sequence
  synthetic
ggcgcgccagtcctttcttgtcgccatggtccccgagctacaagagttggagaagcgtgacgtttcacaactcacgctctttcctcaccagttcatcaacccgcgcaccaacaccaccgcccacattgtggtgccatacgtgggtgtcaacagacacgaccaggcaaagatgcacaaggcgtggacaccgactcggaccgatg

SEQ ID NO: 8037 - DNA, 203 bp, Artificial sequence
  synthetic
ggcgcgccagtccttcgtggtggcggtgctcgcaccgctaaccacttccaacatgggacaggacaacgtcgaggtgtatgcaaacatcgcacccaccaacgtgcacgttgctggagagaggccaatgaaacaaggcatcattcccgtggcctgcaacgatggctacggtggcttccagaacaccgatccgactcggaccgatg

SEQ ID NO: 8038 - DNA, 203 bp, Artificial sequence
  synthetic
ggcgcgccagtcctccaagaccgcagatccaatctacggtctagtgtccaacccaccgcgcacagcgtttcccggtaggttcactaacctgctagacgtcgctgaagcgtgtccaacattcctggactttgacggcacaccttacgtcaaaaccaggcacaacagtggtagcaagatactagcacacacgactcggaccgatg

SEQ ID NO: 8039 - DNA, 203 bp, Artificial sequence
  synthetic
ggcgcgccagtcctcgcacgaccctgactcggcggtgcttgtctcggtcagcgctggcgctgatcttgaatttcggctcccgattaaccctgcgacccaaacaactagtgcaggtgagggtggtgacgttgtgacaaccgatgtcacgacacatggcggagttgtggacacaccgcgacgccaacacacgactcggaccgatg

SEQ ID NO: 8040 - DNA, 203 bp, Artificial sequence
  synthetic
ggcgcgccagtcctccaacgtggagttcctgctggacaggttcacacacattggtacgatcaccgcctcaaagacaatcgacctcatggacacgaaggaacacacattggtgggcgcaatcctgcgctcggctacgtactacttctgtgacctggaggttgctgtcttgggctcggaaaaatggactgcgactcggaccgatg

SEQ ID NO: 8041 - DNA, 203 bp, Artificial sequence
  synthetic
ggcgcgccagtcctcgtgggttcccaacggttgcccacacaccgaacgcgtggaggacaacccagttgttcacgcgaagaacggtgtagcccgttttgccctgccatacacagcaccacacagggttcttgctacagtgtacaatggtaactgcaaatactccaaaacccagcacgttgtagcacgcccgactcggaccgatg

SEQ ID NO: 8042 - DNA, 203 bp, Artificial sequence
  synthetic
ggcgcgccagtcctgtggcgacatggcagtgttggcacaacgcgttgagagtgaaatcacaagatgcaggcccacaacattcaacttcgggagactgttgtgtgaaacaggtgaggtctactaccggatgaaaagagctgagctgtattgcccacgacccttgcgggtcaggtacacgcataccactgcgactcggaccgatg

SEQ ID NO: 8043 - DNA, 203 bp, Artificial sequence
  synthetic
ggcgcgccagtccttggcgatcatgctagctgacaccggtctcgagattctggacagcaccttcgtcgtgaagaaaatctccgacgcgctctccagcgttttccacgtcccggcccctgtcttcagtttcggagccccgattctgttggcaggtttggtcaaggtcgcctccacgttcttccggtccacgactcggaccgatg

SEQ ID NO: 8044 - DNA, 203 bp, Artificial sequence
  synthetic
ggcgcgccagtcctagaaccctgacggcaaggacttcaagtacttcgcccagatggtctccaccacagggttcatcccacccatggcttcgctcgaagataagggaaaaccgttcaacagcaaggtcatcattgcgacgagcaacctttattctgggttcacacctaggacgatggtctgccccgacgcgactcggaccgatg

SEQ ID NO: 8045 - DNA, 203 bp, Artificial sequence
  synthetic
ggcgcgccagtcctacggactcgacgccatggagcctgacacagcacccggtcttccctgggccctccaggggagacgccgcggagctctcatcgatttcgagaacggcactgtcggacccgagattgaacaggcactgaagctcatggagaagaaggagtacaagttcacctgccaaaccttcctgacgactcggaccgatg

SEQ ID NO: 8046 - DNA, 203 bp, Artificial sequence
  synthetic
ggcgcgccagtcctacacggaacacgcctacgagaacaagcgcatcactgttgaaggtggaatgccctcgggttgctccgccaccagcatcatcaacaccattctcaacaacatctacgtgctctacgccctgcgtagacactatgagggagtcgagctgtcgcactacaccatgatttcctacggggcgactcggaccgatg

SEQ ID NO: 8047 - DNA, 203 bp, Artificial sequence
  synthetic
ggcgcgccagtcctcacatgtcgccagtgtcagttgaaggtacgaatgtcatcatgttgattcttggattgaatattagtttgtataatgaaattaagcgcactttgaatgtagatagcataccaatggtacttaatttaaatgaattcagtagtatagttaaatcaattagcagtaaatggtataatcgactcggaccgatg

SEQ ID NO: 8048 - DNA, 203 bp, Artificial sequence
  synthetic
ggcgcgccagtcctgttgatgaattggataaattgccaatgtcaataaaatcaacggaggaactgattgaaatgaagaattctggaactttaactgaagaatttgagctactgatctccaactcagaagatgacaatgagtgaaattactaatgtcactatctaattatacagtatttagccatcacacgactcggaccgatg

SEQ ID NO: 8049 - DNA, 203 bp, Artificial sequence
  synthetic
ggcgcgccagtcctatattgtcaccatttctcagagcacaaaattatggtattaatcttccaatcacaggctccatggacactgcatacgctaattcaacgcaagaagaaacattcctcacttctacactttgcctatattatccgactgaggctgcgactgaaataaacgataattcatggaaagaccgactcggaccgatg

SEQ ID NO: 8050 - DNA, 203 bp, Artificial sequence
  synthetic
ggcgcgccagtcctacactgtcacaactatttcttacgaaagggtggccaactggatccgtatattttaaagaatatactaacattgcatcgttttctgttgatccgcagttgtattgtgattataacgtagtactaatgaaatatgacgcgacgttgcaattggatatgtcagaacttgcggatctacgactcggaccgatg

SEQ ID NO: 8051 - DNA, 203 bp, Artificial sequence
  synthetic
ggcgcgccagtcctaattgcagagcaacagattcaaaattttcaggtagctaattggttacattttgttaattataatcagtttagacaagtagtgattgatggagtgttaaatcaagtcttgaatgataatataagaaatggtcatgtagtcaaccaattaatggaagctctgatgcaattatctagcgactcggaccgatg

SEQ ID NO: 8052 - DNA, 203 bp, Artificial sequence
  synthetic
ggcgcgccagtccttgaaaaattgcaattaacatcagtaacatcattatgtatgctaattggaaatgctacggttataccgagtccgcaaacattgttccattactataatgtgaatgtcaattttcattcaaattataatgaaagaattaatgacgcagttgcaattataactgcggcaaatagattcgactcggaccgatg

SEQ ID NO: 8053 - DNA, 203 bp, Artificial sequence
  synthetic
ggcgcgccagtcctttgattttagagcgtcaatgcatatgttaacgtctaacctaacatttaccgtatattcagatttgcttgcgttcgtttcagctgatactgttgaaccaattaatgctgttgcttttgataatatgcgcatcatgaacgaactgtaaacgccaaccccattgtggagatatgacccgactcggaccgatg

SEQ ID NO: 8054 - DNA, 203 bp, Artificial sequence
  synthetic
ggcgcgccagtccttcgaatggtgagtcaaggcagctaaagtttggtaggaaaacaattttttcaactaaaaagaatatgcatgtcatggatgatatggctaacgaaagatacacgcctggtataataccaccagtgaatgttgataaaccaataccattaggaagaagagatgttccaggaagaaggcgactcggaccgatg

SEQ ID NO: 8055 - DNA, 203 bp, Artificial sequence
  synthetic
ggcgcgccagtcctgaaattttgatactattagactatcattccagttaatgagaccaccaaacatgacaccagcagtagcagtactattcccgaatgcacagccattcgaacatcatgcaacagtgggattgacacttagaattgagtctgcagtttgtgagtctgtactcgccgatgcaagtgaaacgactcggaccgatg

SEQ ID NO: 8056 - DNA, 203 bp, Artificial sequence
  synthetic
ggcgcgccagtcctggatataagtggtcagaaatatcatttaagccagcgaattatcaatacacatatactcgtgatggtgaagaagttaccgcacatactacttgttcagtgaatggcgttaatgacttcagttttaatggaggatatttaccaactgattttgttgtatctaaatttgaagtaattcgactcggaccgatg

SEQ ID NO: 8057 - DNA, 203 bp, Artificial sequence
  synthetic
ggcgcgccagtcctaaagagaattcatacgtctatatcgattactgggatgattcacaagcatttcgtaacgtggtgtatgtccgatcgttagcagcaaacttgaattcagttatgtgtactggaggcagctataattttagtctaccagttggacaatggcctgttttaactgggggagcagtttctcgactcggaccgatg

SEQ ID NO: 8058 - DNA, 203 bp, Artificial sequence
  synthetic
ggcgcgccagtcctggttcatctatacgttcgattggatcttcagcatcagcatggacggatgtatcaacacaaataactgatatatcgtcatcagtaagttcagtttcgacacaaacgtcaactatcagtagaagattgagactaaaggaaatggcaacacaaactgagggtatgaattttgatgatcgactcggaccgatg

SEQ ID NO: 8059 - DNA, 203 bp, Artificial sequence
  synthetic
ggcgcgccagtcctttaaaaatttgaacgataattacggcattactaagcaacaagcatttaatcttttaagatctgacccaagagttttacgtgaattcattaatcaggacaatcctataattagaaatagaattgaacaactgattatgcaatgcaggttgtgagtaatttctagaggatgtgacccgactcggaccgatg

SEQ ID NO: 8060 - DNA, 203 bp, Artificial sequence
  synthetic
ggcgcgccagtcctcacaccccactgactgactcctttggatcttgacctcggaatgcctacttgacctcccacttgcctctcccttttcggattgccggtggtgcctggcggaaaaagcacaagtgtgttgttggctaccaaactcctacccgacaaaggtgcgtgtccgcgtgctgagtaatgggacgactcggaccgatg

SEQ ID NO: 8061 - DNA, 203 bp, Artificial sequence
  synthetic
ggcgcgccagtccttaggagatgccaataacaggctcgcccatgagtagagcatggactgcggtgcatgtgacttcggtcaccaggggcatagcattgctcacccctgaatcaagtcatcgagatttctctgacctctgaagtgcactgtggttgcgtggctgggaatccacgcttgaccatgtactgcgactcggaccgatg

SEQ ID NO: 8062 - DNA, 203 bp, Artificial sequence
  synthetic
ggcgcgccagtcctcttgatagagtcgcggctggccgactcatgggttaaagtcagttgacaagacacatggcttcttcaattctgatctctgactccaccttcgcccccatcctcacccacaagctctctcgacgtgtcaggcgacaccccgttgcctggcatcccagagagaacacccggctgtcccgactcggaccgatg

SEQ ID NO: 8063 - DNA, 203 bp, Artificial sequence
  synthetic
ggcgcgccagtccttacatcacagccatggaagagttggatgcttgctacatcaacgaacaacaccggctcttcccccttccccgtccctctcattggtacaactgtctctactgtcaacatccctcggaggacggtgacactctcatgtcgctggcctgtgagtacgatgaagactgcccccaccatcgactcggaccgatg

SEQ ID NO: 8064 - DNA, 203 bp, Artificial sequence
  synthetic
ggcgcgccagtcctaggcctctttccaagttctttgctgaaaaccctcctcctgcttcccttgcagggaaaatgaatctctctgacttttctgacctcaccctctccacaccttgccaaatcgtgcgccagggaaattcaaccactaacatctacggaagtaataacaatgttactactgacgttggtcgactcggaccgatg

SEQ ID NO: 8065 - DNA, 203 bp, Artificial sequence
  synthetic
ggcgcgccagtcctgcaaacggttggactcctacggttaacacaggtcttggtgatggtcctgtctcctcttctgctgacgatcttgctggtcgctgtggtggatcctccaccgctagcaaggattcctccaaatcctctaaggttaaggttcacaactttaaccattggtgggaacctgctgcagctcgactcggaccgatg

SEQ ID NO: 8066 - DNA, 203 bp, Artificial sequence
  synthetic
ggcgcgccagtcctaaagctctctcccgtggcgttgacaaagcgctcgacgggattgagggcgccggcaaacttgccggtagtgccatcaaaagcaagctctcaggtgcccgccctggcccctcccctaatctcatagctctcaacccctcttccacccaatctggtaatgctatgatcacaacgggtcgactcggaccgatg

SEQ ID NO: 8067 - DNA, 203 bp, Artificial sequence
  synthetic
ggcgcgccagtccttccactgctcctgtggttgttgcttaccctcccaccccttctgtccctctccccaatccagatgctccctcacaacctggcccgtctggtgaccgtacatggttgctagacagtctcgaatggaccaccgaggacccatccttctggtgcctcgctggtccaaacgggatgcaacgactcggaccgatg

SEQ ID NO: 8068 - DNA, 203 bp, Artificial sequence
  synthetic
ggcgcgccagtcctacaatggctgagacgactggcgaaaaagttgccgaggctgtgattgaacctgtccttcttgctgctactggaactcctatttcttttgtcactaacctcttcgcccaatggcgaggggagctccagctttcccttcttttcactggttctgctcaacactttgggcgtcttgcacgactcggaccgatg

SEQ ID NO: 8069 - DNA, 203 bp, Artificial sequence
  synthetic
ggcgcgccagtcctactcttggtactgtctctatctgggtgatgaatccactcaccggaccatcatccgctcccccctctgctgtgatccaggctttcgtttctgctggggaatccttcaccttgcgtggtatccaagctcctggattccaaatccaggctgctgacgatgctgacgctcccactccacgactcggaccgatg

SEQ ID NO: 8070 - DNA, 203 bp, Artificial sequence
  synthetic
ggcgcgccagtcctgtttccaacattgagtctggttctgctactactgttcctgaacctcgtaccaccttctcctacactgacaatcctactccccctgacaccaacctacagcgtttcttctccatttacagacccatctttgtgaatggtcaggattactctgtgggcttcactgctgaggctggccgactcggaccgatg

SEQ ID NO: 8071 - DNA, 203 bp, Artificial sequence
  synthetic
ggcgcgccagtcctgtccgtcctaagggccgttcccgcattgtgcgtcagtgcttgactaacgatgtccccacccccacactctgtccagatgtgcgggtatacattgtcaaggtccagcgcatgacgtacacccattgggcactccgcgcggtccattcagatcgcgtggaacaaatttctctctcccgactcggaccgatg

SEQ ID NO: 8072 - DNA, 203 bp, Artificial sequence
  synthetic
ggcgcgccagtcctaacactggcttctctctcctccttggcttgggcgctcttgcccttctgtctggttgtgccgccgtgcaagcgtcgaaaggcggtataattcgacagggtcttctgtctcttgaagctcctcctgaggttgtccaggctgcaaaccgtgttgctgaatcaattgagaccactgctcgactcggaccgatg

SEQ ID NO: 8073 - DNA, 203 bp, Artificial sequence
  synthetic
ggcgcgccagtccttcggtagtgcgtgaggctgacctagccaggtctaccctcaatatctcaatggcagcaaaccgagttgctgagtcgattgaaaccaccgccaccgcagtgcgcgaggctgacctcgctagatcgaccctcaacatctcaatggctgcgtctgacatcagaatggcagcgacacagcgactcggaccgatg

SEQ ID NO: 8074 - DNA, 203 bp, Artificial sequence
  synthetic
ggcgcgccagtcctgtttcttccagtctgaacggcttcactgacatgctttcctctttctccaaaaccttcactcagggtgcttccaaaatgctgagtgatggtatttccactttccttacttgggtggccaaagtctttggttaccttcttgtcctctttggatctcccactccgatgtccatagctcgactcggaccgatg

SEQ ID NO: 8075 - DNA, 203 bp, Artificial sequence
  synthetic
ggcgcgccagtccttcctctgagcgcactccggtgtccgcgatcacggacgccatcacgcgctgtcgcgagctcaccaaggtggctgccgacgctaagtctggctctcactcttccttcctcctccaggccttgcgtaactaccaacttgctcttaattctgcacgcaaggcccaatctggtccccgtcgactcggaccgatg

SEQ ID NO: 8076 - DNA, 203 bp, Artificial sequence
  synthetic
ggcgcgccagtcctccagaacccgttgtgatctacctctatggtccaccgggaactggcaagtccctccttgcttctctccttgctagagttcttgctcagaagttatctggtaacccagatgacgtctactctccttcttctgccgtctgcgaatacttcgacggttacactggccaggtcgtccaccgactcggaccgatg

SEQ ID NO: 8077 - DNA, 203 bp, Artificial sequence
  synthetic
ggcgcgccagtcctctgggaaaggaacttacaatcatccatttccctaccatccgccaacatcgcgatctccgtcgctttattggctaccacccctatcccactggacatcttatttccactctctctggccctcctgtttacctgcggttttccaaaaaccgtatggttactcttgacctccccggtcgactcggaccgatg

SEQ ID NO: 8078 - DNA, 203 bp, Artificial sequence
  synthetic
ggcgcgccagtcctgttgtggaagaacctacagcttatggttacaaagcccccaccttccagggtctctgtggtgcacctctcatcacggatgatccagcaggtgttaagctgttgggactccacgttgccggggttactggttgctctggcttctctgtaccaatctctacctatcttcctgagatccgactcggaccgatg

SEQ ID NO: 8079 - DNA, 203 bp, Artificial sequence
  synthetic
ggcgcgccagtcctaaagtcacattaggcctcacacgtgtggtcgaagctgcacccatccacgctatcatcgctggtaggatgctgcttggtggactcattgagtacatgcaggcaaatcctggcaagcatggtagtgctgttggttgcaacccagacctacactggactaaattcttcttcaaattccgactcggaccgatg

SEQ ID NO: 8080 - DNA, 203 bp, Artificial sequence
  synthetic
ggcgcgccagtccttgtcactaccctcaagtctttgatctggattacaagtgttttgatgccaccctcccttcctgtgccttccgcattgttgagaaacacctcgaacgcctcattggagacgaacgggtaacccgttacatcgagaccatacgacactcgcgccatgtctttggcaacgagacgtatcgactcggaccgatg

SEQ ID NO: 8081 - DNA, 203 bp, Artificial sequence
  synthetic
ggcgcgccagtcctccatcattcatcaaggagttctacgacaggtacaccccacttgttgtgactccagcaaacaaaacagacactttcccggaaaactccaccatctatgacgtcacgtttctgaaacgttggtttgtgcctgatgacattcgaccattctacatccacccggtcatggatccagaccgactcggaccgatg

SEQ ID NO: 8082 - DNA, 203 bp, Artificial sequence
  synthetic
ggcgcgccagtcctcgatgccgggaaggccatttcgtttgctaccacattgggagtgaacaagtgccacgtacagatcatggacctcgggcacatgtgtgacgccaccatgagttatgagtgccctatgctggatgagggagtggaaccagatgatgtcgattgctggtgcaacacgacatcaacttgcgactcggaccgatg

SEQ ID NO: 8083 - DNA, 203 bp, Artificial sequence
  synthetic
ggcgcgccagtccttgtcttggaacatggaggctgcgttaccgtgatggcacaggacaagccaacagtcgacatagagttggtcacgacgacggttagtaacatggccgaggtaagatcctattgctacgaggcatcgatatcggacatggcttcggacagtcgttgcccaacacaaggtgaagcctacgactcggaccgatg

SEQ ID NO: 8084 - DNA, 203 bp, Artificial sequence
  synthetic
ggcgcgccagtcctagtcgggggtgtgttcaactcactgggtaagggcattcaccagatttttggagcagccttcaaatcactgtttggaggaatgtcctggttctcacagatcctcataggcacgctgctagtgtggttaggtttgaacacaaagaatggatctatctccctcacatgcttggccctcgactcggaccgatg

SEQ ID NO: 8085 - DNA, 203 bp, Artificial sequence
  synthetic
ggcgcgccagtcctagtcaagcaggcctgggaagaggggatctgtgggatctcatccgtttcaagaatggaaaacatcatgtggaaatcagtagaaggggagctcaatgctatcctagaggagaatggagttcaactgacagttgttgtgggatctgtaaaaaaccccatgtggagaggtccacaaagcgactcggaccgatg

SEQ ID NO: 8086 - DNA, 203 bp, Artificial sequence
  synthetic
ggcgcgccagtccttgaggaatgtccaggcaccaaggtttacgtggaggagacatgcggaactagaggaccatctctgagatcaactactgcaagtggaagggtcattgaggaatggtgctgtagggaatgcacaatgcccccactatcgtttcgagcaaaagacggctgctggtatggaatggagatcgactcggaccgatg

SEQ ID NO: 8087 - DNA, 203 bp, Artificial sequence
  synthetic
ggcgcgccagtcctaggactactgttactcacaaggagtgggaagcggagctggccccctagtgaagttctcacagccgttggcctgatatgtgcactggccggagggtttgccaaggcagacattgagatggctggacccatggctgcagtaggcttgctaattgtcagctatgtggtctcgggaaacgactcggaccgatg

SEQ ID NO: 8088 - DNA, 203 bp, Artificial sequence
  synthetic
ggcgcgccagtcctgagtgtggacatgtacattgaaagagcaggtgacatcacatgggaaaaggacgcggaagtcactggaaacagtcctcggcttgacgtggcactggatgagagtggtgacttctccttggtagaggaagatggtccacccatgagagagatcatactcaaggtggtcctgatggccgactcggaccgatg

SEQ ID NO: 8089 - DNA, 203 bp, Artificial sequence
  synthetic
ggcgcgccagtcctactcagcgaggtacagcttttggccgtacctcccggagagagggccagaaacattcagaccctgcctggaatattcaagacaaaggacggggacatcggagcagttgctctggactaccctgcagggacctcaggatctccgatcctagacaaatgtggaagagtgataggactcgactcggaccgatg

SEQ ID NO: 8090 - DNA, 203 bp, Artificial sequence
  synthetic
ggcgcgccagtccttgatgcgtttcctgactctaactcaccaatcatggacacagaagtggaagtcccagagagagcctggagctcaggctttgattgggtgacagaccattctgggaaaacagtttggttcgttccaagcgtgagaaacggaaatgaaatcgcagcctgtctgacaaaggctggaaacgactcggaccgatg

SEQ ID NO: 8091 - DNA, 203 bp, Artificial sequence
  synthetic
ggcgcgccagtcctgcgggtcatacagctcagcaggaagacttttgagacagaatttcagaaaacaaaaaatcaagagtgggactttgtcataacaactgacatctcagagatgggcgccaacttcaaggctgaccgggtcatagactctaggagatgcctaaaaccagtcatacttgatggtgagagcgactcggaccgatg

SEQ ID NO: 8092 - DNA, 203 bp, Artificial sequence
  synthetic
ggcgcgccagtcctagtcatcttggctgggcccatgcctgtcacgcatgctagtgctgctcagaggagaggacgtataggcaggaaccctaacaaacctggagatgagtacatgtatggaggtgggtgtgcagagactgatgaaggccatgcacactggcttgaagcaagaatgcttcttgacaacatcgactcggaccgatg

SEQ ID NO: 8093 - DNA, 203 bp, Artificial sequence
  synthetic
ggcgcgccagtcctcgctggaaaaagaggagcggctttgggagtaatggaggccctgggaacactgccaggacacatgacagagaggtttcaggaagccattgacaacctcgccgtgctcatgcgagcagagactggaagcaggccttataaggcagcggcagcccaactgccggagaccctagagaccgactcggaccgatg

SEQ ID NO: 8094 - DNA, 203 bp, Artificial sequence
  synthetic
ggcgcgccagtcctgtttttattactggtggtgctcatacccgagccagagaagcaaagatctccccaagataaccagatggcaattatcatcatggtggcagtgggccttctaggtttgataactgcaaacgaacttggatggctggaaagaacaaaaaatgacatagctcatctaatgggaaggagcgactcggaccgatg

SEQ ID NO: 8095 - DNA, 203 bp, Artificial sequence
  synthetic
ggcgcgccagtccttggcatgggcaaagggatgccatttatgcatggggaccttggagtcccgctgctaatgatgggttgctattcacaattaacacccctgactctgatagtagctatcattctgcttgtggcgcactacatgtacttgatcccaggcctacaagcggcagcagcgcgtgctgcccacgactcggaccgatg

SEQ ID NO: 8096 - DNA, 203 bp, Artificial sequence
  synthetic
ggcgcgccagtcctggctggagctctgatcacagcagcgacctccaccttgtgggaaggctctccaaacaaatactggaactcctctacagccacctcactgtgcaacatcttcagaggaagctatctggcaggagcttcccttatctatacagtgacgagaaacgctggcctggttaagagacgtggcgactcggaccgatg

SEQ ID NO: 8097 - DNA, 203 bp, Artificial sequence
  synthetic
ggcgcgccagtcctaggtgggacgggagagactctgggagagaagtggaaagctcgtctgaatcagatgtcggccctggagttctactcttataaaaagtcaggtatcactgaagtgtgtagagaggaggctcgccgtgccctcaaggatggagtggccacaggaggacatgccgtatcccggggaagcgactcggaccgatg

SEQ ID NO: 8098 - DNA, 203 bp, Artificial sequence
  synthetic
ggcgcgccagtccttgcaaagatcagatggttggaggagagaggatatctgcagccctatgggaaggttgttgacctcggatgtggcagagggggctggagctattatgccgccaccatccgcaaagtgcaggaggtgagaggatacacaaagggaggtcccggtcatgaagaacccatgctggtgcacgactcggaccgatg

SEQ ID NO: 8099 - DNA, 203 bp, Artificial sequence
  synthetic
ggcgcgccagtcctaagctatgggtggaacatagttcgtctcaagagtggagtggacgtcttccacatggcggctgagccgtgtgacactctgctgtgtgacataggtgagtcatcatctagtcctgaagtggaagagacacgaacactcagagtgctctctatggtgggggactggcttgaaaaaagcgactcggaccgatg

SEQ ID NO: 8100 - DNA, 203 bp, Artificial sequence
  synthetic
ggcgcgccagtcctaccaggggccttctgtataaaggtgctgtgcccatacaccagcactatgatggaaaccatggagcgactgcaacgtaggcatgggggaggattagtcagagtgccattgtgtcgcaactccacacatgagatgtactgggtctctggggcaaagagcaacatcataaaaagtgtcgactcggaccgatg

SEQ ID NO: 8101 - DNA, 203 bp, Artificial sequence
  synthetic
ggcgcgccagtcctatacggccaacaaagagtcttcaaagaaaaagtggacaccagggtgccagatccccaagaaggcactcgccaggtaatgaacatagtctcttcctggctgtggaaggagctggggaaacgcaagcggccacgcgtctgcaccaaagaagagtttatcaacaaggtgcgcagcaacgactcggaccgatg

SEQ ID NO: 8102 - DNA, 203 bp, Artificial sequence
  synthetic
ggcgcgccagtccttctcagaccagctgaaggaggaaaaacagttatggacatcatttcaagacaagaccagagagggagtggacaagttgtcacttatgctctcaacacattcaccaacttggtggtgcagcttatccggaacatggaagctgaggaagtgttagagatgcaagacttatggttgttcgactcggaccgatg

SEQ ID NO: 8103 - DNA, 203 bp, Artificial sequence
  synthetic
ggcgcgccagtcctaccctcgactggatggagcaattgggaagaagtcccgttctgctcccaccacttcaacaagctgtacctcaaggatgggagatccattgtggtcccttgccgccaccaagatgaactgattggccgagctcgcgtctcaccaggggcaggatggagcatccgggagactgcctgcgactcggaccgatg

SEQ ID NO: 8104 - DNA, 203 bp, Artificial sequence
  synthetic
ggcgcgccagtccttcttgcaaaatcatatgcgcagatgtggcagctcctttatttccacagaagagaccttcgactgatggctaatgccatttgctcggctgtgccagttgactgggtaccaactgggagaaccacctggtcaatccatggaaagggagaatggatgaccactgaggacatgctcatcgactcggaccgatg

SEQ ID NO: 8105 - DNA, 203 bp, Artificial sequence
  synthetic
ggcgcgccagtcctaggagaagctgggaaaccaagctcatagtcaggccgagaacgccatggcacggaagaagccatgctgcctgtgagcccctcagaggacactgagtcaaaaaaccccacgcgcttggaagcgcaggatgggaaaagaaggtggcgaccttccccacccttcaatctggggcctgacgactcggaccgatg

SEQ ID NO: 8106 - DNA, 203 bp, Artificial sequence
  synthetic
ggcgcgccagtcctccttttcggcctaaagaagatccttatgaagttgctgggagggtttggaccagttaggctggttctagccttccttgccttcttcaaattcacatcgctgcgcccttcccctggactcctcaagagatggagctcggtagggaagaaagaggccagcagaaccctcaaagggttcgactcggaccgatg

SEQ ID NO: 8107 - DNA, 203 bp, Artificial sequence
  synthetic
ggcgcgccagtcctacctggcgaggatggcatcaacaggtgcatactgcaggccatggatgttggcgaactctgcgctcataccatgacgtatgaatgcccaatccttgataagttggttgaacctgaagacatagactgctggtgcaatgcttcggccacctgggtgatgtacgggacgtgtttgcacgactcggaccgatg

SEQ ID NO: 8108 - DNA, 203 bp, Artificial sequence
  synthetic
ggcgcgccagtcctgacagtcatgggtgaaaacagacccaccatcgacatagagcttctcaagacagctgcctccaacatggctcatgcaagggcctactgctatgaggcgaccataagtgatacagtcatggagacaagatgcccgacacaaggagaagcagtgtctgacaaaaaaggggatggcaacgactcggaccgatg

SEQ ID NO: 8109 - DNA, 203 bp, Artificial sequence
  synthetic
ggcgcgccagtccttatcggaaaggcagtgcaccaggttctgggcggagccttcaggacgctgtttggtggcatgaattggttcaccaagatcctgatcggtgggctactgtgctggctgggagtgaactcccgtagcacgtcgctggcagcagggttcatcacattgggggcaatcctcatctttttcgactcggaccgatg

SEQ ID NO: 8110 - DNA, 203 bp, Artificial sequence
  synthetic
ggcgcgccagtcctctctacgcacacaatttggagtgagggagtggaggagagtcatttgatcatcccacacacactagcaggaccacgctcttggcacaacaccaggaaaggataccagacccaggtcaaggggccttgggctgaaggtgagcttgaattggtttttgaccactgcccaggaaccaccgactcggaccgatg

SEQ ID NO: 8111 - DNA, 203 bp, Artificial sequence
  synthetic
ggcgcgccagtcctggtcactctcatggacttgggcaggtacatgttcctggtggggacagcgttcgctgaagtgaactctggtagagacgtggcccatctggcgttgattgccactttcaaagttaggccggcattgctaacaacatatctatggagattgcactggggcacaagggaagagataggcgactcggaccgatg

SEQ ID NO: 8112 - DNA, 203 bp, Artificial sequence
  synthetic
ggcgcgccagtcctgagaaggagctggcccccaacagaagctctatccgccgtagggatgttgggcctggtgatgggcgcgacgatgaagcccggagctgagctgtcagggccactcgtagcctccggcctcctgctggtttgctacatcatatctggaaaaggcacagatctttttttagagcgcgccgactcggaccgatg

SEQ ID NO: 8113 - DNA, 203 bp, Artificial sequence
  synthetic
ggcgcgccagtccttgcggaactgtcctggtgtccggacgcagcggtttcaggcaccagcccaaggcttgatgtgaagatcacagaaggtggagatatggaactgattgatgataaaggaccatccacagaatctatcgtcctcaaggcaaccctcgtggctgtgtgtggaatgtggccgctggcaatcgactcggaccgatg

SEQ ID NO: 8114 - DNA, 203 bp, Artificial sequence
  synthetic
ggcgcgccagtcctggcaccaggtaaaggagcagagaatgtgcagaccaaacctgggatattcaacacagccacagggaccataggggcggttgcattggattaccccgctggcacctctggctcacccatcctaaacagtgaagggaaggttgtgggcttgtacgggaacggtgtgctggtgggcggcgactcggaccgatg

SEQ ID NO: 8115 - DNA, 203 bp, Artificial sequence
  synthetic
ggcgcgccagtcctaagctcatatgtgagtgccatatcccaggtcaagcaccctgagacccaaccacaggtggtcagtgacgacatgttcaggaaaaagaacttgaccattcttgacctccatcccggggcgggaaagaccagacgcatcctgcctgagatagtgaaacaagctattgacaggaggatcgactcggaccgatg

SEQ ID NO: 8116 - DNA, 203 bp, Artificial sequence
  synthetic
ggcgcgccagtcctgaggacagtcatcttggccccgacgagagttgttgccgcggagatgggtgaggctctgaaggggctgcccgttagatacatgaccacagccgtgcagagagagcacacaggaaccgagatcgtggatgtcatgtgccatgcaacattcaccatgcggttgatacagcccatgcgcgactcggaccgatg

SEQ ID NO: 8117 - DNA, 203 bp, Artificial sequence
  synthetic
ggcgcgccagtcctagatgacatggaaatcatggttcccgataaaccctggaataaagggtttgaatgggtcaccgactatcctggcaagactgtgtggtttgttcctagtgtccgcaatgggaatgagatagcatgttgtctggaaaaggcaggaaagaaaaccattcagctaaataggaaaagcttcgactcggaccgatg

SEQ ID NO: 8118 - DNA, 203 bp, Artificial sequence
  synthetic
ggcgcgccagtcctcaacacagagtatcagagaacaaagaatgaacaatgggactttgtgatcacaacagacatctcggagatgggcgccaactttgacgctgagcgcgtgattgactcacgaaaatgcataaaaccagtcattctggaggaaggcagggttaacctggtgggaccaatcccagtgaccgactcggaccgatg

SEQ ID NO: 8119 - DNA, 203 bp, Artificial sequence
  synthetic
ggcgcgccagtcctcgcctcaagcgccgctcagagaagagggaggatcggcagaaatccgagtagaacaggtgacgagtaccgatactcgggggggaccgttgaggatgatagtgaccacgcccactggacagaagccaaaatcctccttgacaatgtgcagatgccagacaggataataccccagctcgactcggaccgatg

SEQ ID NO: 8120 - DNA, 203 bp, Artificial sequence
  synthetic
ggcgcgccagtcctctatggacctgagcaaggaaaagtgaatgacgttgacgggatctacagactgcgggagccagagaaaaaagtgttcattgagcttctcaagagagctgaattgccagtgtggctaacctaccaggtcgcgtcagcgggcatacagtacaatgacaaaaaatggtgctttgatggcgactcggaccgatg

SEQ ID NO: 8121 - DNA, 203 bp, Artificial sequence
  synthetic
ggcgcgccagtcctaacgggcggtggatgcttgctgatgatgaagagcaaacccatagggaaaatgactgcgggactggtggtgacattggtagcagccggcctgtgttggcaagccaacgtcagtaaggttgtgatcgccagcgggatgaccgtgaccttgctcctgctgatagtgctcgtcccagacgactcggaccgatg

SEQ ID NO: 8122 - DNA, 203 bp, Artificial sequence
  synthetic
ggcgcgccagtcctacggctcgaacttgatttgaaacctgcaaccacctggacactgtacgcagtcattaccattatcttgtcacccttcgtgcagcacagcatcattaccacatacaacaacttctcattgacagcaataggcaaccaggccgggattctgttcggaatggggacgggagtccccttcgactcggaccgatg

SEQ ID NO: 8123 - DNA, 203 bp, Artificial sequence
  synthetic
ggcgcgccagtcctctacagaacttgggcttacctagggagttacaccaccgagccaaagggaacatccgcctccatggtgaacggagtcgtgaagcttctcacgaagccctgggatgtggtgagcggagttgtgaacatagccatgaccgacacaaccccttttgggcaacagagagtgttcaaggacgactcggaccgatg

SEQ ID NO: 8124 - DNA, 203 bp, Artificial sequence
  synthetic
ggcgcgccagtcctcgccgatgacacagcaggatgggacactcgtgttacggaagcagacttggatgacgaagcgctcatcatagagagcatggacagagagcacgcccagctggcttcggtgctcacggaaatggcttacaagaacaaagtggtttgtgtgctgaggccgggaaaaggggaaaccctcgactcggaccgatg

SEQ ID NO: 8125 - DNA, 203 bp, Artificial sequence
  synthetic
ggcgcgccagtcctgatggatgtgattagccgcagggaccaaagagggagtgggcaggtggtgacatacgcactgaacacctttacaaatgagaaagtccagctcattagatgcatggaggccgagggcgtcctagaagagagtgacgcagagcacctgatggatgagagcaaagtcaacaaatggctcgactcggaccgatg

SEQ ID NO: 8126 - DNA, 203 bp, Artificial sequence
  synthetic
ggcgcgccagtccttgtgcggcctgcgagccccctgggactatcggtatccaggctaaacaaaaaccgttgcacctcattgggctggtgcgtaaaatgacattgcggggcccaagccggctaagctgtaaccggtggaaggactaggaggttagaggagaccccccgcgcccataaccaacataaaaccgactcggaccgatg

SEQ ID NO: 8127 - DNA, 203 bp, Artificial sequence
  synthetic
ggcgcgccagtcctgctgtaaccggtggaaggactaggaggttagaggagaccccccgcgcccataaccaacataaaacagcatattgacacctgggaaagaccggagactctgttggctttccccacaccagccccctggcacagagcgccagatcgggggttggtgtggagcaacccaacaggactcgactcggaccgatg

SEQ ID NO: 8128 - DNA, 203 bp, Artificial sequence
  synthetic
ggcgcgccagtcctgatatctcggatcaagaggatgctcgatggactactcagaggagtaggaccagtcagaattgtcttggcgatcttaacctttttcaaatttacagctttgaaaccaacggcaggattgttgagacgatggaagctagtgggggtggttgaggccacccgccacttgaaaagcttcgactcggaccgatg

SEQ ID NO: 8129 - DNA, 203 bp, Artificial sequence
  synthetic
ggcgcgccagtcctggcggttatgatcccaactgctggaggaaacaaccgatgcgttgtgaaagctctggatgtcggattgatgtgccctgatgacatcacgtatttatgtcccaagctagaggatgggtatgacccagaggatatagactgctggtgcaacaccacggagatctacatccactacggcgactcggaccgatg

SEQ ID NO: 8130 - DNA, 203 bp, Artificial sequence
  synthetic
ggcgcgccagtcctccggtgcaccccaacgcgacacgcgagacgatcgaggcggtctatcacagtgcaccatcacggagagagcttgctcgaagcaaagaatacaccatggatggactcaaccaaggctaccaaatacttgaccaaggtggaaaactgggccatacgtaaccctggatacgcactagccgactcggaccgatg

SEQ ID NO: 8131 - DNA, 203 bp, Artificial sequence
  synthetic
ggcgcgccagtcctaagctgtgtgaccattacagcaaaggacaagcccacaatcgatgtgaagatgatgaacatggaagccactgacttggcgcttgtgagatcatattgttacgagcctaaaatcactgatgttagtactgaaccaagatgccccaccatgggagaggcccacaacaccaaagccaacgactcggaccgatg

SEQ ID NO: 8132 - DNA, 203 bp, Artificial sequence
  synthetic
ggcgcgccagtccttaaccaggagtacgtgtgtaagaaaggttatactgacagaggttggggtaatggttgtggactgttcggaaagggcagtattcacacatgcgccaaatttgagtgcaccaataaggctgagggaagaattgtgcagaaggaaaatgttcatttcgagttggctgtgtttgtgcacgactcggaccgatg

SEQ ID NO: 8133 - DNA, 203 bp, Artificial sequence
  synthetic
ggcgcgccagtcctagggcatgggacagttgttgtggaactcagctattctgggtctgatggaccatgtcgtatacccatatcaatgacagccaaccttcaggatttgaccccgataggaaggctcataacggtcaatccatatgtgtctacatcatcatcggggacaaaagtggttgttgagcttgacgactcggaccgatg

SEQ ID NO: 8134 - DNA, 203 bp, Artificial sequence
  synthetic
ggcgcgccagtcctacgggaaaaaggaatctgtggtgtaaggtccgtgggaagactggagcataacatgtggaattcaatcaagcatgagctgaatgccatacttgaggacaacgggccagacttgacagtcgtcgttgaacagccaactggtagatttaggaaaacccaccggcgtttagtgtggaccgactcggaccgatg

SEQ ID NO: 8135 - DNA, 203 bp, Artificial sequence
  synthetic
ggcgcgccagtcctaggcaccaaagtgacagtcaccccaacatgcagggatagggttgcctccgccagaacaacaacggcaagcggtaagctgatcacagattggtgctgtaggtcatgcactctccctccattgcggtacatgacaaagagcggctgctggtatggaatggagattagacctacagtcgactcggaccgatg

SEQ ID NO: 8136 - DNA, 203 bp, Artificial sequence
  synthetic
ggcgcgccagtccttgccaccctcttaggcgtggcactggcaatgataaccatggcgttgcacgactggaacatgaccatacccagcttgttgaattcaggagccacggcgtggctgttgctgcgcgcagtgagtgaagggaccgtcagcgcggcctgtattcccattctcggacttttggctccaggcgactcggaccgatg

SEQ ID NO: 8137 - DNA, 203 bp, Artificial sequence
  synthetic
ggcgcgccagtcctaatgaaaataattggaattgatgtatttcggatcgggctgcttatcatcggagttatgtcactcctgaaagaaagaaacaatgccatcgcaaaaaagaaaggtggagtgctgattggtttggccctggcccaagacggctgggtgaatccactggtgtacgcaggactgacgttcgactcggaccgatg

SEQ ID NO: 8138 - DNA, 203 bp, Artificial sequence
  synthetic
ggcgcgccagtccttgacctgtggttggagcgagctggagacatctcgtggattgaggatgcccaaataacaggaagctcacaacggtatgacgttgagatagattgtgatgggaacatgaaattgatgaatgatcaaggagtccctttttccatttgggcccttaggacaggactcattctagcatccgactcggaccgatg

SEQ ID NO: 8139 - DNA, 203 bp, Artificial sequence
  synthetic
ggcgcgccagtcctagctggagtaggagtgatgtttgatggggttttccacacgatgtggcatgtgacgaatggggccaccattaacgtgggggacggttgcctagtcccctattgggctagtgtaagagaggacttgatatcgtatggaggaccttggaagatgggcacgaaatggaacggggttgacgactcggaccgatg

SEQ ID NO: 8140 - DNA, 203 bp, Artificial sequence
  synthetic
ggcgcgccagtccttaatggcattcttgtcggagcaggcagcttcgttagcatgatttcccaaggccagcgaatggaagaagagattccgcaagtgttcagtgaagacatgctgaggaaaagacagctaactgtgcttgacttgcacccaggctcaggaaaaacaaggaaagtgcttccccaaattgtcgactcggaccgatg

SEQ ID NO: 8141 - DNA, 203 bp, Artificial sequence
  synthetic
ggcgcgccagtcctgtcacgccttctcacgccacaacgtgttcccaactacaacttgtttgtgatggatgaagcccatttcaccgaccccgcgagcatagctgcccgaggatacatctcaaccaaagtggagctaggcgaggcggcagccattttcatgacggccacccctccaggaacgcgtgaccccgactcggaccgatg

SEQ ID NO: 8142 - DNA, 203 bp, Artificial sequence
  synthetic
ggcgcgccagtcctttgtggcaagagatcagccattggcgtgtctgaagtggtcaaaatgcttccagagcatttcgcacacagaatgggagaatccatggacaatctgtacatgttgaccacttctgagaaaggtagcagggctcacagggaagcgctagaggagctaccagaaacactggaaacaatcgactcggaccgatg

SEQ ID NO: 8143 - DNA, 203 bp, Artificial sequence
  synthetic
ggcgcgccagtcctaaggagaacagcagcaggtgtgatgaaaaatccagtggttgatggaatcgtggcaacggacgtaccggatctagaagcaagcacaccaatcactgagaagaaatttggacaggtcatactaattgtggtagccttgtgctcagtttttctgaagcctggaacaacatcactaaccgactcggaccgatg

SEQ ID NO: 8144 - DNA, 203 bp, Artificial sequence
  synthetic
ggcgcgccagtcctctccaccacatggcatcatgacacagaaaatccatacaaaacctggaactaccatggaagttatgaagttaaagcaacaggatcagccagttccatggttaatggagtcgtgaaggtgttgtcaaagccttgggatgccttgcagaacgtagtaaacatggccatgactgacaccgactcggaccgatg

SEQ ID NO: 8145 - DNA, 203 bp, Artificial sequence
  synthetic
ggcgcgccagtccttagccacgcggcccttggtgcaatctttaaagaacagaacaagtgggcatcagctcgggaagcagtggaggacccagcgttttgggagttggtggatcaggaacgcgaggcgcaccttcaaggaaagtgtgagacatgcatctacaacatgatgggaaagagagaaaagaaaatcgactcggaccgatg

SEQ ID NO: 8146 - DNA, 203 bp, Artificial sequence
  synthetic
ggcgcgccagtcctgaaagtgatgcggcctgggagggaaggtatcaccgtgatggatgtgatttccagggaagaccagagaggaagtggacaagtcgtcacctacgcgttgaataccttcaccaatttgtgtgtccaattgattagatgcatggaaggagaaggactgctgaagcctgaagaagttgacgactcggaccgatg

SEQ ID NO: 8147 - DNA, 203 bp, Artificial sequence
  synthetic
ggcgcgccagtcctccccgagtggaaaccctcaacgggatggaggaactggcaagacgtccctttctgttcacatcatttccacgagttaaacatgaaggatggcagaaccatcgttgtcccatgcagacaccaggatgaactgataggaagggcacgattgtcaccaggatctgggtggtccctcaccgactcggaccgatg

SEQ ID NO: 8148 - DNA, 203 bp, Artificial sequence
  synthetic
ggcgcgccagtccttgaaacagcatgtctgagcaaagcttatggccagatgtggctactcatgtactttcacagacgtgacctgcggctgatggccaatgccatatgttcatctgtgccagtctcatgggtgcccacgggaagaaccacctggtcaattcacggaaaaggagaatggatgacaacagacgactcggaccgatg

SEQ ID NO: 8149 - DNA, 203 bp, Artificial sequence
  synthetic
ggcgcgccagtcctagatatgttgagagtctggaacagggtgtggattgaggagaacgaacacatggaagacaagacccctgtggcctcatggaacgatgtgccgtacctcggaaagcgcgaggacagttggtgtggaagtctgatagggcacagaacacgatcaacctgggcagagaacatatacaccgactcggaccgatg

SEQ ID NO: 8150 - DNA, 203 bp, Artificial sequence
  synthetic
ggcgcgccagtcctctcggagagctccctggcgttggagaggataggcacccagagtcaggccacaggttttgtgccactagcatgcagtgctgcctgagcaaagacatgccccaggtggactgggtaaacaaagccgcaaggcccccgtggcccaagcaagggaatggtgtgacccttgtgtaaggacgactcggaccgatg

SEQ ID NO: 8151 - DNA, 203 bp, Artificial sequence
  synthetic
ggcgcgccagtccttggaggaggagctcctccgaagaaggagagagatcgaggaggccaaaaggtctcgctccctgggacttcaagctccatcggatgggaccgtggcaaacgggtcaagggactcggcggacgaaagggactgctcggcaagctggggctgggatgggggtcttttttacagaaagacgactcggaccgatg

SEQ ID NO: 8152 - DNA, 203 bp, Artificial sequence
  synthetic
ggcgcgccagtcctcatcatccaagccatcatgcacctggtcctagtcctacacgccctgttcatgtccattgaccaacgctttaaggcgctcacccggcgggtgcgcgccctcgagaatcgacgatctgccaatcccctactgctcgccactatcatctgcgcggtcgccaccttgtgtggcaccatcgactcggaccgatg

SEQ ID NO: 8153 - DNA, 203 bp, Artificial sequence
  synthetic
ggcgcgccagtcctggtgatcgacatgcaagtgtcctccgctaaaggcgtgcaaatttacgaagggaaaacaaaccggactgactacttgcacttgttcaagcttccaaaagatggatgttggaacggagtgctggtttccaaacactgtcctaaggtcggcgacttggccaaggacttggaggccaccgactcggaccgatg

SEQ ID NO: 8154 - DNA, 203 bp, Artificial sequence
  synthetic
ggcgcgccagtccttgactgcggatctacatggagcgaattcacactgcgatataatcgatgtgtgggaaagaagcgcgtcaagcgggctaccgaacaaccgaaagcggacctacttgcggagatggagatggtaacgttcaagaccatccgtcaaaacaagacgattttcattatcgctctgctctgcgactcggaccgatg

SEQ ID NO: 8155 - DNA, 203 bp, Artificial sequence
  synthetic
ggcgcgccagtccttgacataccagtcaccttccgatttgctaagctcggaaacgcggctatgacttgtcgcttggaatcagagcaactcctgcttgattattaccacgttaccggcaacaaacgcgaaggactattcctgcggtcccaggtggacaattggcctggagtcatatcgtcttctgggggcgactcggaccgatg

SEQ ID NO: 8156 - DNA, 203 bp, Artificial sequence
  synthetic
ggcgcgccagtcctgttccgcgattgccaaggattaaaatcatcggtgtttgttcagagtggctttggatacagtggggttgttatcaccacgctgttgcaaccaacgaacgagagctgctcactcaacatggtgtgtcatggatgtcagttgctatcgacgaaaatggtgtttggggctggaaaacccgactcggaccgatg

SEQ ID NO: 8157 - DNA, 203 bp, Artificial sequence
  synthetic
ggcgcgccagtcctaacgtcccgtgccttcgtcggctgtgggaaccacactggttcactcttgattggcggtgcatctgtccccattgaatgtgtgatgaaccccatctctcaaggatggaggctaacccgacacgttgtggacaagtaccgacgattcggagtaccaggagttgcaggagtttggcgcgactcggaccgatg

SEQ ID NO: 8158 - DNA, 203 bp, Artificial sequence
  synthetic
ggcgcgccagtcctcgatttcgttggaggcttctccctcgggaacctgataaccaactcgacgttgctcgtcctcctagcagcgctggcattcctcgacaagcgtgttgtggtgctcctgctagtctgtggatacttctactacacacgtgctgatgtgggttgtggatttgatcccgacaggaagatcgactcggaccgatg

SEQ ID NO: 8159 - DNA, 203 bp, Artificial sequence
  synthetic
ggcgcgccagtcctcgtggtcgtgaaaccggttgagaaaccgagtgaagcgtgcccgacgtacctggccggttcatatgttaagaacgatgtcggagggtacactgatggcatgatgtggatgcgtagccgtaaggtgaatggctcatgggagatgttcgagcttgagacgacccaaagccaccaatgcgactcggaccgatg

SEQ ID NO: 8160 - DNA, 203 bp, Artificial sequence
  synthetic
ggcgcgccagtcctcatttggccacaggagtacacatttgatctcacgactcacaacgatagtacattgtttatgccagcccattacggagcgccgatgtccaaagccaaccacatccctgggtacggaactcaacacgagttcccgtggtacaaggccgagataaaattgcggcagggaccagttcccgactcggaccgatg

SEQ ID NO: 8161 - DNA, 203 bp, Artificial sequence
  synthetic
ggcgcgccagtccttgcgcattcaaagctcatcatcgagaacgagggtgttgaaatagacgagatggatcagatgttcccaaaaaccgtctctccaatccctggagctgaagctttgcttcaggatttccgggacagcctgccagtagatggatcttctcctttactggtgggcgtgcttctacacctcgactcggaccgatg

SEQ ID NO: 8162 - DNA, 203 bp, Artificial sequence
  synthetic
ggcgcgccagtcctcatgaacccattgttgggtatcacgtccatgctcttctgctggtttactgaagcatacgtgtggttgccgaggttgatcttcggcacgagcaatcgccgctctggggtgaacgacgttctgctagcccctcctgtctacgcggacgagattgatgttgaaagcgactttggacacgactcggaccgatg

SEQ ID NO: 8163 - DNA, 203 bp, Artificial sequence
  synthetic
ggcgcgccagtcctcataccggatggaacttacaggatagtggcccattgcacctttttcaagtatcacacaggagccggctatgccaaaggtggtgttttccacacactatggcatgtcacatcaggagcttgtgtctactgggagggcagagcggttcgtatgcactcggctgacatctaccgcgacgactcggaccgatg

SEQ ID NO: 8164 - DNA, 203 bp, Artificial sequence
  synthetic
ggcgcgccagtcctaaagacgcgcaaggtcttggttgccgaagcacaggaacacatcaaacaaacaaagagattgctcatcctaacaccaacacgagttgtcaaagatgaagtcatccgagcgattggtgaagcttgtccaggcgtggtcattggctcaaatctagccatgtaccggcgaaacgcagtcgactcggaccgatg

SEQ ID NO: 8165 - DNA, 203 bp, Artificial sequence
  synthetic
ggcgcgccagtcctcacggtagcatgccacgccacgctaacgcagtatgtcatggagaaaggcattgacagcatcaaattttcaaagatcataatggatgaatgccactttcttgatccgctgtcgattgcttgtcgtggaatcatggattaccataacgcgaagggagtcaacgtcacttacatgagcgactcggaccgatg

SEQ ID NO: 8166 - DNA, 203 bp, Artificial sequence
  synthetic
ggcgcgccagtcctgttggagaaagtcggcatcacagaagcctcggcaatccagcggcgtggaagaactggacggcgtgaagaagggcagtacatataccccatcggggttgagcttgaacatgagcccgcgaactgggcttgctggactgaggctcagatggtgcttgaccaaatgatgtgtgggcccgactcggaccgatg

SEQ ID NO: 8167 - DNA, 203 bp, Artificial sequence
  synthetic
ggcgcgccagtcctgaagctcaagatccggactgaagcaggggatcacgcgtacgcccccaggttccacgacgaccggtttgagaaatgcaacgaactggaaaagcgcacgaaattgtcaatctttctcaaacaacggagcgtcctcaattttgatgtcctcggtgtggctcatggcctgtatgtcgccgactcggaccgatg

SEQ ID NO: 8168 - DNA, 203 bp, Artificial sequence
  synthetic
ggcgcgccagtcctgttgacctcaatcaacatggaaatgctcggtaacacgtttcgcgacacaatcgaaaacctgcatgtcatatcaaatgtggacgacccttacgtctctgatttcacgatggggcaatctctgaatgcttggacagcagtcctcatcggggccgccgccagtacgatcctgctgttcgactcggaccgatg

SEQ ID NO: 8169 - DNA, 203 bp, Artificial sequence
  synthetic
ggcgcgccagtcctccacttcctgcgaggactgtttgccaatgaagctcaatcggcgtccgtgattggaggagttcaagtgtcggctattgcttgggagataatgattcccgtggctttttcagctttcttcgccacgacgttcgttacaaagatctacggcatcctgatcggggctatcttcttgatcgactcggaccgatg

SEQ ID NO: 8170 - DNA, 203 bp, Artificial sequence
  synthetic
ggcgcgccagtcctgttctggttcatcgtacatccaaaccgtctggcaacccgctcgctggtgaagactgacacttgcggaatcgggtaccggtggaaagagatattgaattctcttgacaagaacgcgtttgatcagtacaggtcccgaggtgtcaatgaaacggataagggagactatgtttctcgcgactcggaccgatg

SEQ ID NO: 8171 - DNA, 203 bp, Artificial sequence
  synthetic
ggcgcgccagtcctgttccggacaaaagggcataacctagccacattgaaagctggcgtcgacgtgtatgccgagccgccaaaagattgcaacacgatcgtctgcgacattggagaaagcgattctcgtggtgatgtggagcgaacccgcacgttgaaggtactgggcttgcttgagaagtggttggacgactcggaccgatg

SEQ ID NO: 8172 - DNA, 203 bp, Artificial sequence
  synthetic
ggcgcgccagtcctgcacaacccaaatgcagcttttgcctgcaaggtcttgtctccctatcacatcgaagtgcttcgaaaactggagacgttacaacacaagtacggaggccgggtcgttcggctgtcgtatagccggaactccaccgctgaaatgtattacatctcgggcgttcgggcaaacattgtcgactcggaccgatg

SEQ ID NO: 8173 - DNA, 203 bp, Artificial sequence
  synthetic
ggcgcgccagtcctaaatctgcacacctggtttgttgatcgtgaacatccttaccagtccttcaactaccacggatcattcgccactgacgacatttcccccggtgggcaaacggtgaatcctatgatgcggcgcatcatgtggccgtgggactttctcactcgtgtcaccacattcatgatgacggacgactcggaccgatg

SEQ ID NO: 8174 - DNA, 203 bp, Artificial sequence
  synthetic
ggcgcgccagtcctcgtgtctacgtattcgcagcaaaagatccttagggagaaggtcgacacgctaacagtcgagccggacacacgcacgaggagcttgaaccggctaatcatgaaacatttttcacgcctgttcaagaagcgaggactacgaccccgaatcctagctccctctgactacgtcaacaacgactcggaccgatg

SEQ ID NO: 8175 - DNA, 203 bp, Artificial sequence
  synthetic
ggcgcgccagtcctgtctcctaggtactctagctgggagcaagttgagttctgttcccaccatttccacgccttggtgcttagagacggacgagagattatcgctccttgccgtgaccaacatgaaatcattgggagagctcggatccagaaaggaggtgtggttgacatgtcagctgccgggtgcttcgactcggaccgatg

SEQ ID NO: 8176 - DNA, 203 bp, Artificial sequence
  synthetic
ggcgcgccagtcctggccaaagctcacgctcaaatgtgggggttgtactacttccaccggcgagacctgcggctaggattcgctgcaatcgtgtcggctgttccctcgaattgggttccaacgggccgcgtctcatggtctgtgcaccagcatgctgagtggatgacaacacaagacatgctggaggtcgactcggaccgatg

SEQ ID NO: 8177 - DNA, 203 bp, Artificial sequence
  synthetic
ggcgcgccagtcctatggaacaccgtttggattgtgaacaacccgtggatgaggaccaaagaccttgtcaaagcttggacggacatcccgtatttacctaagtcaaaggacatagcgtgcggcagtttgattggcgaacgtgacagagcttcgtggtccaagaacatcgtggccactgttgagacagccgactcggaccgatg

SEQ ID NO: 8178 - DNA, 203 bp, Artificial sequence
  synthetic
ggcgcgccagtcctgcgctgaacaagcttggtatcttggcaactaccactggatggtttccagcccgcgcaaggaaggacacgtaaatcacgtgttcttgggagttgacgactctccgcccccagtccccaggtcagggtatgactccgtggtgttgaaaggacactaaacaagcttggcatcttggccgactcggaccgatg

SEQ ID NO: 8179 - DNA, 203 bp, Artificial sequence
  synthetic
ggcgcgccagtcctagcggctagagtgaagaacctagccgttaaagtaaaaaacaaaacaaaacaaagtgcaagaggtttgcgagggttcctcttgtttctagtggcccaaattttctgggctagaaaactaaccccgcaggttaaaagattgtggagaatggtggacaaagtgcaaggtctccggatcgactcggaccgatg

SEQ ID NO: 8180 - DNA, 203 bp, Artificial sequence
  synthetic
ggcgcgccagtcctcctgaagaacattaggaacatcgttaccaatctgatgaagggactggctggtcgcaagaaaaagcgaagcttgacagtacccttggtccttttgctgattccactgattgcttactcagctactgtcacccgtcaacgcggattggggcttttgctcaacgtcacttttgctgacgactcggaccgatg

SEQ ID NO: 8181 - DNA, 203 bp, Artificial sequence
  synthetic
ggcgcgccagtcctcgttgggaagacctatgaggttgaggggggcaattgctctgtcaacactttggatgcgggcaaatggtgtgaagattatgtggagtatgagtgcgtcactctctctgagggtgaagagcctgacgacctggattgttggtgctacggagtggacaatgtccgtgtcacctatggcgactcggaccgatg

SEQ ID NO: 8182 - DNA, 203 bp, Artificial sequence
  synthetic
ggcgcgccagtcctggtggctttagcatactttgttggcacatcaaatgtgcagagggtagttattgccatcttgcttcttggcattggaccagcttattcaacacactgcttaggaattccaaaaagggacttcataaggggacttgatggaaacacctgggtgtcagtggttttagaacagggcagcgactcggaccgatg

SEQ ID NO: 8183 - DNA, 203 bp, Artificial sequence
  synthetic
ggcgcgccagtcctgggagccaagaaagatgattgggaaaatcacacaaaattggtgacttttgttccgaccacaggaacatcaactgttgcttttacaggctatggaaactttggcttagagtgtcacgttcagatgatggtggacctcagcaattcctatctggtgaaagtaggaactgatgcctgcgactcggaccgatg

SEQ ID NO: 8184 - DNA, 203 bp, Artificial sequence
  synthetic
ggcgcgccagtcctgctggtcaacaaacaatgggttcacgatattactctcccatggcagagtggaacaggaggacattggagagacaagcatttcatggttgactttgaagaaccacatgcagtcactatgaaggcgttggtcctgggtagccaagaaggggctcttagaacagctctgtctggtgccgactcggaccgatg

SEQ ID NO: 8185 - DNA, 203 bp, Artificial sequence
  synthetic
ggcgcgccagtcctaatggttgtggaactaaattctaatagatattcccttaaaggaggtcatgtgacgtgtaaggcgtacatgaacaatctcatcctgaaaggttcaacctactcaatgtgcaaaagagggatgtcctttgctaagcaaccagttgagacagaccatggaacagcagtgatgcagatcgactcggaccgatg

SEQ ID NO: 8186 - DNA, 203 bp, Artificial sequence
  synthetic
ggcgcgccagtccttggtgctgccttccatgcaatttttggtggtctcagttggataaccaagatattgattggagggttgctcatctggctgggtctcaactctcggagtagttcaatgtcaatgggcttcatatgcattggagccttgctgcttgtgctggccacaggagttggagcagaagtgggcgactcggaccgatg

SEQ ID NO: 8187 - DNA, 203 bp, Artificial sequence
  synthetic
ggcgcgccagtccttgatagagcaaagtcagtaagatcaacaacagatagtggaaagatcatacctgaatggtgctgccgcagttgcaccatgcctccagtgagtttctgggggcctgacggctgctggtattccatggaagttaggccaaaacacaccaatgaagcacatctggtgaaatcctgggtcgactcggaccgatg

SEQ ID NO: 8188 - DNA, 203 bp, Artificial sequence
  synthetic
ggcgcgccagtccttggagagaccatggctgctgttgggctggttggagtgcttgctggcatgggactgaaggacatgaacggaatgcttggaccagtggccgttggtggagtgttactaattgtaatgagtctttcaggaaaggttgatgggctggtaatcaagaaagtggctgacgtgacctgggacgactcggaccgatg

SEQ ID NO: 8189 - DNA, 203 bp, Artificial sequence
  synthetic
ggcgcgccagtccttgaggatgctgagattagtggagcatcacaccgttatgatgtggaacaaactgacacaggtgagttcaagttacgaaatgaagaacccgccccctggattcaggtggctgtcttgacaatagctatccttagtgcagccacacatcctgcttgtcttgccgtggtcacaattggcgactcggaccgatg

SEQ ID NO: 8190 - DNA, 203 bp, Artificial sequence
  synthetic
ggcgcgccagtccttcctgtgaatgtgcaaaccacgcccagtgttttccaactgaaaaacggaaaagaaataggagccgttaatcttgactatcctagcggtacctctggctcaccaatattaaacaaaaatggagatgtcattggcctatatggaaatggaatattgattggaaataacacctacgtcgactcggaccgatg

SEQ ID NO: 8191 - DNA, 203 bp, Artificial sequence
  synthetic
ggcgcgccagtcctatacggagtggaaggcaccaaaacaacaacaagtccgggagaaacacgactaagagaagaccaacggaaagtgttccgagagctggtcaagagacttgacatgccggtttggttttcatggcaggtcgcgaaggcaggtctcaaggtgcaggacagaagctggtgttttgatggcgactcggaccgatg

SEQ ID NO: 8192 - DNA, 203 bp, Artificial sequence
  synthetic
ggcgcgccagtccttttgttaggcttgcaaggatttcctgaatttctgtctgggaaaatgcgggaagcgatcgacacagtaacagtcctatacactagtgacactggaagtagagcctacaaacacgcactagcaatgatgcccgaagctacaacaattttcctactggtgatgctggctatcatttgcgactcggaccgatg

SEQ ID NO: 8193 - DNA, 203 bp, Artificial sequence
  synthetic
ggcgcgccagtcctactcattgagggcgacaccaatgcttattggaatggacctattgctgtagcgttttcaggattgatgagaggaaactactatgcaaccattggacttgcctacaatggatggttggccaaacagacaaggagaggcaaagcagctggagtgaccctgggggaagtttggaagagcgactcggaccgatg

SEQ ID NO: 8194 - DNA, 203 bp, Artificial sequence
  synthetic
ggcgcgccagtcctgcagctgaacatgttagggaaacaagaatttgagaggtacaaagtgccagacattactgaagtggacgggaccgcagctaggcgttacctgaaagaaggacgaacagatgtgggaatcagcgtctctcgaggagcagccaaaatcagatggcttcacgagcgcggctacctcagcgactcggaccgatg

SEQ ID NO: 8195 - DNA, 203 bp, Artificial sequence
  synthetic
ggcgcgccagtcctgcctagtgggaaagccatcatagaaggggacgtgtttcttcccactggaacgcgaagcgttgccagtgaagcgggcaccatagaccatgaggcgctcaagctcagagttgaccagattaaggcagagtactcaaagacttggacacatgattcaaaccacccatatcgaacatgcgactcggaccgatg

SEQ ID NO: 8196 - DNA, 203 bp, Artificial sequence
  synthetic
ggcgcgccagtcctgaagagtgcaagtgaggctgtccaggatccacagttctggaaactggttgatgatgagaggaagctgcatctgcaaggccaatgccggacatgtgtgtacaacatgatggggaaacgtgaaaagaaaccctctgaatttggcaaagcaaagggaagcagggcgatctggtacatcgactcggaccgatg

SEQ ID NO: 8197 - DNA, 203 bp, Artificial sequence
  synthetic
ggcgcgccagtccttatttcaagaagggatcaaagagggtccgggcaagtggtcacttatgccctgaacaccgtgactaatcttaaggttcaactcatacgcatggcggaggcagagcatgtcattacaaattttgatgttgacacagttagccagaagaccctgcaggacttgagatgctggcttgacgactcggaccgatg

SEQ ID NO: 8198 - DNA, 203 bp, Artificial sequence
  synthetic
ggcgcgccagtcctgatgtatttccaccgcagagaccttagagttatggccaacgcaatcaactcgaccgttcctgtggattgggttccaactggaaggacaacatggtctattcatggaaagggagaatggatgaccactgaagacatgctgcaggtgtggaacagagtttggatagaagacaatcccgactcggaccgatg

SEQ ID NO: 8199 - DNA, 203 bp, Artificial sequence
  synthetic
ggcgcgccagtcctcctttgcaaataggcagtggtgcatctcccaatgtacaaatgactctcacgcttactccaactggatctgttttcaatggcttgagacatcccaaaccagctgcccaatcaccctttcctactagaccctttcatcactcatttcagtttagttcaactgtgccagatgtgactcgactcggaccgatg

SEQ ID NO: 8200 - DNA, 203 bp, Artificial sequence
  synthetic
ggcgcgccagtcctgaaccctgttatggtatgactgttgttccacccaaagacttcatgccagccccaataacagatttggtttctcttgcgaaggtgccaaccttttgcacagttaccgaaaacaagccatatttcgaggtcaacaataataaatcagatgcccccgtttttcagtctaacgtggttcgactcggaccgatg

SEQ ID NO: 8201 - DNA, 203 bp, Artificial sequence
  synthetic
ggcgcgccagtcctctttctgaccctcactatgcccacaccctagttgcaggtttgggtcgttactttggaaattacagaggtagtttacaattcactttgatctcagctacaacaagcatgacccgtggaaaactgctgtgttgttacacccctccaggtgctgacaaaccaaccactgttgaacaacgactcggaccgatg

SEQ ID NO: 8202 - DNA, 203 bp, Artificial sequence
  synthetic
ggcgcgccagtcctgcaatgatgtctacttatgctatatgggatttaggacttcagtccacctttgaatttgttgtgcctttcatatctactgttgactttagagtaaatgttgtctctacttcctcagccgtcaacgtagatggttggttttcaattttcaaactaaatgctctaacctacccagcacgactcggaccgatg

SEQ ID NO: 8203 - DNA, 203 bp, Artificial sequence
  synthetic
ggcgcgccagtcctgttttgatgcttgcccctaatccctctttctgtggtgctgcctataccgtttttgctatgtttgaccagacaggaacaacaggtgcgaagaaaagacttttgtttggtcagggtgattatcatctttacagatcttgtcccttcacttactatactgcagatctggaagtaacacgactcggaccgatg

SEQ ID NO: 8204 - DNA, 203 bp, Artificial sequence
  synthetic
ggcgcgccagtcctaaatttatggtctatattagatacaaaaatttcagaggttatgtgcccagacctttaccccgtcttgttcaaccaaacccgagttcacgcgtcaggatggctgcttcagatggtttagcccctagaaagtacttatcctatagaaaaatacagctttcaggtgatgtagaaacacgactcggaccgatg

SEQ ID NO: 8205 - DNA, 203 bp, Artificial sequence
  synthetic
ggcgcgccagtccttctgatcgtggtgcagttgaaagacgcatcacttttgacattggagtaacccccggttcagcagcaacccgaaacggtaagctggaccttgctatcgccctgaagccagatggacccggtgaatttccttacaactgtgactgtcagcttttacacacaactggacttgcacttcgactcggaccgatg

SEQ ID NO: 8206 - DNA, 203 bp, Artificial sequence
  synthetic
ggcgcgccagtccttacggcttgacagatgttgcagccgttaagataagcaatggcccggagtggaaaaacctttcaaaactctttctgaaccttgaaactgaactcttgcccggaacgaggattacggttttgtctaacgacaacatcaacatgttaagagaaggttcttttcttcgttatgaagaacgactcggaccgatg

SEQ ID NO: 8207 - DNA, 203 bp, Artificial sequence
  synthetic
ggcgcgccagtcctagactaaacccaggtgttgattttgattcagtcattttctctaaacacgtgaataacgtggtaattgataaagacacttcaatttggcagtctttgaagctcgctgcccaggtttatgctcaaaggttaaagaatattgacaaagagcctcttacagttgaagaggcaattgctcgactcggaccgatg

SEQ ID NO: 8208 - DNA, 203 bp, Artificial sequence
  synthetic
ggcgcgccagtcctggaattcctggacttgaccgcttggaccccaaaactgcttcaggtttgccctacaaaaagacaaggaaacagatgattgactttcaaaaatgtgagatcactgatgaccaacttaagtgtagacttggaatgtggcttgcaggcagaaaaccagaaactctttatcaaacatttcgactcggaccgatg

SEQ ID NO: 8209 - DNA, 203 bp, Artificial sequence
  synthetic
ggcgcgccagtcctgttgaatcggttcattgctatgaggacaagcgcatcaccatacgtggtgggctgccttcaggcactgctggaacttcaataatcaacactatcattaataacataatcttgcacgctgctttctattatacctactctaactttgaatgggatgatttacagatgcttgcttatcgactcggaccgatg

SEQ ID NO: 8210 - DNA, 203 bp, Artificial sequence
  synthetic
ggcgcgccagtccttgggctccagttatggaaatttcaaatttacaggctatgctttcttggtataaacctggaacactgaatgaaaaactggaaagtgtgtcccgcctcgcccacttttgtggagaggaggaatacaatgaattgttcaagccgtttgttgaggacggctttgacataaagccctggcgactcggaccgatg

SEQ ID NO: 8211 - DNA, 203 bp, Artificial sequence
  synthetic
ggcgcgccagtcctgcggagacttaggcctcacagattgtgttttgtgttattggatgctggatggtcacgttggagactgcatgtggcagtcttgaaacgtgtggtttgacgtctatccattatggcagtgggtggagtactgcaaagatgtcaccgtgctttacacggtttttgaaccccacaccgcgactcggaccgatg

SEQ ID NO: 8212 - DNA, 203 bp, Artificial sequence
  synthetic
ggcgcgccagtcctaggagacctgaggaatttccatgtggctttgccaggagttgtagcgatgctgtgtgtgtgtgcggatttcccctcatggcaacatgagcctcacaggccaaaagccctgtccgaaaggacccacacagtggagcaaccccagctccctcctacaaagctttgtgagaatgaactcgactcggaccgatg

SEQ ID NO: 8213 - DNA, 203 bp, Artificial sequence
  synthetic
ggcgcgccagtcctattgttaataacttttattcaaaccagtattatgcttctattgatgcttctgcccaaggtgttgggacctctactactcctgaaaacggcaacgtatctggctttcttggacttgcaggtagtgcttttaatgctctctctcttctcgcctcaccacgaaccgagacaggaatgcgactcggaccgatg

SEQ ID NO: 8214 - DNA, 203 bp, Artificial sequence
  synthetic
ggcgcgccagtcctacaccagaacaatttatgattttccctcaccaacttataaatcctaaagacacaaatgttgccacagtacgtgtgccgtacattaatattgctccaacaaatgatactacagtacatacagtatggacagctgttgttatggttcttgtacctcttaacttttcttctggtgctcgactcggaccgatg

SEQ ID NO: 8215 - DNA, 203 bp, Artificial sequence
  synthetic
ggcgcgccagtcctgttgattacatgcccttacccattacagatttagttgagcttgctaaagtgcccagttttgttactgtggcaaacagtgacacgactagcgagcgtagtttcccttatttctctgttagtaacacagaacaaggcagaaatcttttcaaatccagtgtagttctcagcgacttacgactcggaccgatg

SEQ ID NO: 8216 - DNA, 203 bp, Artificial sequence
  synthetic
ggcgcgccagtcctacttatgctatctgggatttgggattacaatcaaccttcaattttgtagtcccttttatatctgcttctgacttcagatttaacacctcttctgtatctaatgctttgaactctgatggttggatcacagtgtggcttatgaaccctctaacatatcctcccagtacacctcctcgactcggaccgatg

SEQ ID NO: 8217 - DNA, 203 bp, Artificial sequence
  synthetic
ggcgcgccagtccttccctttctccctgtgcgtcagtgtgtggccagcctatctcttccttcctgtttgctcaacgagcgaatcccaagaaaactctaaagctgcgctcaggtgatgaattcttgtatagatgttgccctttttcttacattaaatgtgaccttgagtttactgtggtcccccctgcgcgactcggaccgatg

SEQ ID NO: 8218 - DNA, 203 bp, Artificial sequence
  synthetic
ggcgcgccagtccttctcccagacattgcaaggcaataaatgactacaacagaggtgactcctttcagagaccgaccaactcttttgaattcatggacagacttgtggaatgtgctaccaagcttgggaaagtccaaattgcaacttatttcagaaattttactacagctgattctgatacaagcagacgactcggaccgatg

SEQ ID NO: 8219 - DNA, 203 bp, Artificial sequence
  synthetic
ggcgcgccagtcctccagagccagttgttgttgttttgcgcgggaaaccaggcgtaggcaaatctgctgcagctactgttatggcagctgcagtatctaaattgttggtaggaagtcaatcagtgtacaccctttccccagatacggaacatatggatggatatcacggacagtttgtgactttgatgcgactcggaccgatg

SEQ ID NO: 8220 - DNA, 203 bp, Artificial sequence
  synthetic
ggcgcgccagtcctgatgaccttggacaaaacccagacggagaagacttcagatgtttctgtcaaatggtttcttgtgctcagtacagacctgctatggctgaccttaaagacaaaggaatcctgtttacatccagactgttgattgctactactaatctcccagattttaaccctgttactatctctcgactcggaccgatg

SEQ ID NO: 8221 - DNA, 203 bp, Artificial sequence
  synthetic
ggcgcgccagtcctagatttgaggatgaggtaccgactaatgtaggtaacatgccctttgtaatgctttacaaatcaacctcttattttggaatgtgtggctcagttgtatgtagcagatttgttgatggtggaggaataattggaatgcactgcgcaggtggaggcggagtcagtgttggaactcgtcgactcggaccgatg

SEQ ID NO: 8222 - DNA, 203 bp, Artificial sequence
  synthetic
ggcgcgccagtcctcggtatgatccgcgattaaatgagggagtcaacttggatgaggtgatcttctcaaaacatactcaaaacactcttgttgagaaaggatccactttcagaagcgcccttgacatggcagcagaaatttatggtgaaaagtttagaggaaatgatttctctcccctttcagttgaacgactcggaccgatg

SEQ ID NO: 8223 - DNA, 203 bp, Artificial sequence
  synthetic
ggcgcgccagtcctcattaccagacatttcttaaggatgaaatcaggcccattgaaaaggtcaaagcaggaaagactagaataattgatgttcctcctcttgatcatgtcatcgcttttagaatgctctttggcagattcattgcccactaccacttaaactttggcttcaaaacaggctctgctattcgactcggaccgatg

SEQ ID NO: 8224 - DNA, 203 bp, Artificial sequence
  synthetic
ggcgcgccagtcctggttgtgacccagatgtcgcttgggcttcttttggctttgaactcagtggctttccttatctgtatgattttgattactcaaactttgatgcttctcacagtacttcaatatttgaaatcttagaacagaaattcttttccccagaattaggttttgatcctagatgctcacttcgactcggaccgatg

SEQ ID NO: 8225 - DNA, 203 bp, Artificial sequence
  synthetic
ggcgcgccagtcctctcttgaaatcccttgcagtttcaacccactgttatgagaacaagagactccagattgctggaggacttccctctggcacggcaggtacctcagtactgaacaccgtgataaacaacattatctttcacggtgcactataccacacttacactaattttgagcgggatgacatccgactcggaccgatg

SEQ ID NO: 8226 - DNA, 203 bp, Artificial sequence
  synthetic
ggcgcgccagtcctaaagttgctggagtttgggctccagtgatggaaactgaaaacctcgaggcaatgttgtcttggtacaaaccaggaactcttaatgaaaagctccagagtgtctcaagacttgcccacttctcaggacgtgacgtgtatgaccaccttttcaagcccttcattcgtgatgggtttcgactcggaccgatg

SEQ ID NO: 8227 - DNA, 203 bp, Artificial sequence
  synthetic
ggcgcgccagtcctctggcaaataacctaggggactaggttttcctttttattttaaagttgtcaatatgggtgcaaataacagcaaagaatctgtgaacagctctggcaataatggcacaactgttaataacttttatgctaataattattatggctctattgatgcttctgcccagggagttgggacgactcggaccgatg

SEQ ID NO: 8228 - DNA, 203 bp, Artificial sequence
  synthetic
ggcgcgccagtcctcctcttctactcccgaaaacggtactgtatctggttttcttggaatggcaagttctgcttttaatgcactttccttattggcttccccaaaggtagaaaactctttatacactgaagacagacttttgacacggaaagctggcaacacatctgtaaattcgcaggctgcagaagcgactcggaccgatg

SEQ ID NO: 8229 - DNA, 203 bp, Artificial sequence
  synthetic
ggcgcgccagtccttcatgacacagaagctcagtttgtatcaacctccggctgaggaaattgcccactcacactattctactcagacaataacaccaaacaaaaatgtatcttttgatctagccgacatgactgcagagcaaatgatgttgtttcctcatcaactcatcaaccccaaagatacaaatgcgactcggaccgatg

SEQ ID NO: 8230 - DNA, 203 bp, Artificial sequence
  synthetic
ggcgcgccagtccttgcaccacgcttcttctacggctcaaagccctatcccaaccagacctttccaccactctttccagttcagctcaactgttccagatgtcactgagccttgttatggaatgactgttaatcctcccaaagattacatgcctgaaccagtgggtgatttggtttccttagcgaaagcgactcggaccgatg

SEQ ID NO: 8231 - DNA, 203 bp, Artificial sequence
  synthetic
ggcgcgccagtccttaggaagtctagttactgtgtcttaccctagcaactcagatcaaccttactttgagatttcaaacaccaaaaaggacactcctcttttcaagtgcaatgttctactttctgaccctcactttcagcacactttggtgtctaatttaggtaagtactttgcaaactatagaggatcgactcggaccgatg

SEQ ID NO: 8232 - DNA, 203 bp, Artificial sequence
  synthetic
ggcgcgccagtcctctttacagttttcttttatttcagctactactggcatgactaagggcaagttgcttctttcctacaccccaccaggaagtggtgcaccaaccactttggagcaagcaatgaatggcacgtactcaatttgggacattggtttacaatccaccttcaactttgttgtgccctacacgactcggaccgatg

SEQ ID NO: 8233 - DNA, 203 bp, Artificial sequence
  synthetic
ggcgcgccagtccttatcagctgtggactttagattgtgtgctgcctctgctagctccgtggtaaacacggatggatggtttacagtgtggttgttgaactctcttacttaccctccaggaacccctccaacccagaatgtagtggtcatgttatcagcaggtgaagacttttcctacagaaaccccacgactcggaccgatg

SEQ ID NO: 8234 - DNA, 203 bp, Artificial sequence
  synthetic
ggcgcgccagtccttaagtccagcttggacccaaagcccaggttctaccccgcatgacaatgcggagaaaggtaccattgagaattgtgatgcatccttgaacagtggacatagtgtttctctgccaactcctcactctaatgttagatttttctttgatagatacagatttttggggttgttagaaacgactcggaccgatg

SEQ ID NO: 8235 - DNA, 203 bp, Artificial sequence
  synthetic
ggcgcgccagtcctctgtcacggttcacttagccacggaagcttctactgagtctagtacaaccactgttacatctagtctttcatcttcaggtagtttgtttacacttaatcctacattttatggcaaaaatggctttccagtctctttcatgatacctttctgtagtcctctcaccctcctccctccgactcggaccgatg

SEQ ID NO: 8236 - DNA, 203 bp, Artificial sequence
  synthetic
ggcgcgccagtcctagaaagatagcaaagatgttgagggaccatacaatggacctgacaagaaatcactcaaggttttgaaattaaaggctcagagtcctatgttagatctggaaaagaaagttttcaaaaatgtgttgccttttggacttgtatataatggaaaaacctatcaacaatcttgcttggcgactcggaccgatg

SEQ ID NO: 8237 - DNA, 203 bp, Artificial sequence
  synthetic
ggcgcgccagtcctttgtctctactgaggaaggaaccagagtgcacgtaccgcgtgtcagcaagctgaaaagaactcatgcctcataccctgcaacctctaaatatggacctgctgctttgacccgcaatgaccctcggctcaaccctggtgtggatctcgatgaaatgattttctccaaacacaaagcgactcggaccgatg

SEQ ID NO: 8238 - DNA, 203 bp, Artificial sequence
  synthetic
ggcgcgccagtcctactttgactattcaaactttgatgcaagtcattccacttccatatttgaaatcttggaagaggaattctttaccccagaaaatggttttgatgtgagatgctctctactgctaaaatctttatcctgttctactcactgttgtgaaaacaaacggcttaccataataagtggttcgactcggaccgatg

SEQ ID NO: 8239 - DNA, 203 bp, Artificial sequence
  synthetic
ggcgcgccagtcctgaggagttattcgaaccgtttgtcaagaacggtttcgaaatactgccatggaaacagcttcacttggagtggctcaataaatttggctattaattgttgaactggttaatattctttatcaattggtttaatttggtttaatttggcatttattgggtgtattcaaattttatacgactcggaccgatg

SEQ ID NO: 8240 - DNA, 203 bp, Artificial sequence
  synthetic
ggcgcgccagtcctctacgcgggcggagtgatactcccgctccttcttggacaggcggcctccacgctctttgtggatcttaaggctgccaagtcactggtgtttgaagtgaagaatggagagacactagggcgtttcatgtggctttgccagggattgtagcgatgctgtgtgtgtgtgcggatttccgactcggaccgatg

SEQ ID NO: 8241 - DNA, 203 bp, Artificial sequence
  synthetic
ggcgcgccagtcctttaaaaactcagctaccattactgacaagcagctcgcactaccagggtttaggtctttcaacaggtcaagggacaatatctgaaaagggttctattgatgctgctggtacaattcctcaacaactcttcatatatccacaccagttgattaacccaaaagacacaaacatagcccgactcggaccgatg

SEQ ID NO: 8242 - DNA, 203 bp, Artificial sequence
  synthetic
ggcgcgccagtcctcaccctgctcctaatgtacaaacagcaatacctgttagaatgacacaaaattctggacagttttccacaactcttcctgctagaatggaaccatgttatggcttaactcccaaccccaccagagactttcttcccccagtagtcgaagatttactcagcatagcaaaagtccctcgactcggaccgatg

SEQ ID NO: 8243 - DNA, 203 bp, Artificial sequence
  synthetic
ggcgcgccagtcctgatggttatcctgactattcaaggactgttggtgcatacggtgtggcccctgcaaaccactttggcactttgactgtagctgctaatgatgaaggttacaaattctttgtttatgttagatacaaaaacttcaaagggtatgtccccaagaccctacctccacaaccactgtttcgactcggaccgatg

SEQ ID NO: 8244 - DNA, 203 bp, Artificial sequence
  synthetic
ggcgcgccagtcctccttctgcttacttagctgcttccgctgtgctcattgcggacggcatttctttccttgactggtatgaaaaaataaaaagatttcttggttctcgttttcgagttccacctcctatcttcactcttgcccaaggaccagatcttagagacttagttactttctttaatgctgctcgactcggaccgatg

SEQ ID NO: 8245 - DNA, 203 bp, Artificial sequence
  synthetic
ggcgcgccagtcctatcaagagcaaaaggactacaagcggaatgcttgaaggactggtggtgcagtcgcccaaaattgtaggctacaccaaggacgacgagggcgtcgtcattgttgactgtctcgaggattggcacagaattcgagacaagaaaagaaagcaacaggctcttgagatggttgcagagcgactcggaccgatg

SEQ ID NO: 8246 - DNA, 203 bp, Artificial sequence
  synthetic
ggcgcgccagtcctgagatgcaaattcaacatgacaaacattctcagaccatttccttgataaaacagtttctctcagggctcggtgtggtggctgctgttggagccgcctttgccgcaggcaaggtactgaaaaacatgatgacctcagaccgggcacaggatgaaccagactctgaatcccaggagcgactcggaccgatg

SEQ ID NO: 8247 - DNA, 203 bp, Artificial sequence
  synthetic
ggcgcgccagtcctctctttgttggaaaaagggttttccttgtgaacaaacatgcaattgactcagttgaacaaaaatttcaagttgcaggaaaaacatatgacttggatgatgttgatgtggcaattcttgacacggaatatggacttacggatgttgcagctgtcaagctcaacacaggcccagaacgactcggaccgatg

SEQ ID NO: 8248 - DNA, 203 bp, Artificial sequence
  synthetic
ggcgcgccagtccttggaaaaacctttcaaaactctttgtttcactggacacgactctacacccaggaaccaggataacgattttgtctaacgaccaacttaacatggtgagagagggtagttttctcagaaatgaggatgacatacccaccaatattggcccaataccttttgtcatgctttataagcgactcggaccgatg

SEQ ID NO: 8249 - DNA, 203 bp, Artificial sequence
  synthetic
ggcgcgccagtcctgcttcctcttactttggtatgtgtggttctgctgttgtgaccagaattggtgattgtcccggaattcttggtctccattgtgctggcggtgggggtgtgtgtgtggcttccagagttacaaaaagaatggtagaaactgtcctaaaatacttttatccacctcaggtacagggacgactcggaccgatg

SEQ ID NO: 8250 - DNA, 203 bp, Artificial sequence
  synthetic
ggcgcgccagtccttatgactttgattactcaaactttgatgcttctcattcagagtccatctttgaacttcttaaacagtttgttttcaccaaagacaatggttttgatcacagatgctctctcatgattgattctctggttacctcgacccactgctatgagcaacaaagaatgaccattcgcggccgactcggaccgatg

SEQ ID NO: 8251 - DNA, 203 bp, Artificial sequence
  synthetic
ggcgcgccagtccttaccccacccaaggggggagaaagaggtgatagtgggcatacgcgatttaccaaggaaaggtgattgcaggacaggcaatcgcctggggccggtgagtggcttgttcataaagccggggcctattttctatcaggattaccctggtccagtatatcacagagccccccttgagccgactcggaccgatg

SEQ ID NO: 8252 - DNA, 203 bp, Artificial sequence
  synthetic
ggcgcgccagtcctgttgtaggctacagaggcatgaatggaacaaacatggctggtgtaattggtataacatagagccttggatatggttgatgaataagacccaagccaacctaaccgaaggcacaccccctaaagaatgtgcagtgacctgcagatatgacaaggatcaggagatcaatgttgtaacgactcggaccgatg

SEQ ID NO: 8253 - DNA, 203 bp, Artificial sequence
  synthetic
ggcgcgccagtcctcgcaggccagagacagacccacaaccctgaccgggtgtaagaagggtaagaaattctctttcgcaggtgaagtagtcgatggcccttgcaatttcaacatatctgctgaagacatgctttacgatgaaatagggtgtgcaggcgttttccaggaaatggctcaacacatagttgcgactcggaccgatg

SEQ ID NO: 8254 - DNA, 203 bp, Artificial sequence
  synthetic
ggcgcgccagtcctggtatactaacaactgtacccctgcctgcttgcctatgaatactaggattgtgggaccaggcaagtttgataccaacggggacgatggaaaaatcttacacgagatgggtggccacctatctgagctggccatattggcacttgtggtaatgtcagacttcgcacccgaatcagcgactcggaccgatg

SEQ ID NO: 8255 - DNA, 203 bp, Artificial sequence
  synthetic
ggcgcgccagtcctcccacaagaacctggacttagccggaatattcctcagtaacgcaccaatcgtgttaatggtgctaaccctgtgggcagatctactgaccctcatcctagtcctaccaacctatgaattaacaaaattgtactacatcagaagggtgaaaaaggatgtagagaggagttggctagcgactcggaccgatg

SEQ ID NO: 8256 - DNA, 203 bp, Artificial sequence
  synthetic
ggcgcgccagtcctggaacttggtaatgaaacacaagatcagaaatgaaactattagggcgtggtatgaggaagaagaaatttacggaatgccaaaaatcatcacattgatcaaagctgcctcgctaagtcagagtaaacactgtatcctatgcactgtatgtgagagacgtgattggaagggtggcacgactcggaccgatg

SEQ ID NO: 8257 - DNA, 203 bp, Artificial sequence
  synthetic
ggcgcgccagtcctgttgccctaagtgcggtcgttccggcaggcccatatcatgcggaatgactctggctgactttgaagaaaaacattataagaagatcttcataagagagggagaattggacggaccttttaggcaggaagccagaggttatttacagtacatagcaagggggcagcttttcctaacgactcggaccgatg

SEQ ID NO: 8258 - DNA, 203 bp, Artificial sequence
  synthetic
ggcgcgccagtcctggaacttaccaatactggcaaccaaagtaaagctattaatggtggggaacctgggatccgaagtaggcgacctcgaacatcttggctgggttttgaggggacctgcggtgtgcaaaaagatcgtatcccacgagaagtgccatactgggatagccgacaaattgacagctttctcgactcggaccgatg

SEQ ID NO: 8259 - DNA, 203 bp, Artificial sequence
  synthetic
ggcgcgccagtcctttggaatcatgcccagagggactactcctagagcgccggtcaggttccctacatcactaataaagatcaggagagggttagagacaggatgggcttatacacaccaaggagggataagttcagtagaccatgtaacagcagggaaagacctgttggtctgtgactctatgggcacgactcggaccgatg

SEQ ID NO: 8260 - DNA, 203 bp, Artificial sequence
  synthetic
ggcgcgccagtcctttacttgtgtgactgcctcaggtacaccagctttctttgatctgaagaacttaaaaggctggtctgggctgcccatatttgaagcatccagcggcagggttgttggaagagtcaaagttgggaagaatgaggagtctaaacccactaagctcatgagtggaatacaaacagtgtcgactcggaccgatg

SEQ ID NO: 8261 - DNA, 203 bp, Artificial sequence
  synthetic
ggcgcgccagtcctctgcggcagagtcagtataccaatacatgaaacaaaagcatcccagtattgccttcaacctcagaataggggagatgaaagaaggagacatggctactgggataacatatgcctcatatgggtacttctgccaaatgccccaaccaaaattgagagcagcgatggtggaatactcgactcggaccgatg

SEQ ID NO: 8262 - DNA, 203 bp, Artificial sequence
  synthetic
ggcgcgccagtccttgatgaagggggaagacctgggatcaaacttcctggatatagctggacttaagataccaacagaagagatgaagggaaatatgttggtgttcgtacccactaggaatatggctgtggaggtggcaaagaagttgaaggctaagggttacaactcaggctattattatagtggagcgactcggaccgatg

SEQ ID NO: 8263 - DNA, 203 bp, Artificial sequence
  synthetic
ggcgcgccagtccttaaagaggatggcagtgactgcaggtgagcaggcacagaggcggggtagagtaggacgggtaaaacctggcaggttctacaggagtcaggaagctgcatccggttcgaaagactaccactacgacttgctgcaagctcaacgctacggaatagaagatggcataaacataacaacgactcggaccgatg

SEQ ID NO: 8264 - DNA, 203 bp, Artificial sequence
  synthetic
ggcgcgccagtcctagtcctttagggaaatgaattacgattggagcctctatgaggaagacagcttgttaataacccaattggaagtcctcaacaatctcctgatatcagatgacctcccggctgcagtgaagaacattatggccaggactgaccacccagaacccatacagctagcttataatagctcgactcggaccgatg

SEQ ID NO: 8265 - DNA, 203 bp, Artificial sequence
  synthetic
ggcgcgccagtcctaccctggtagtcaacagaccagcgagacaggaaaagccctaaaacaggtatcaggtttatccacagctgaaaacgccctcctagtagccctgttttcatacgtgggctaccaagcgttgtctaagaggcacatacccgtggtcacagacatatacaccatagaagaccaaagaccgactcggaccgatg

SEQ ID NO: 8266 - DNA, 203 bp, Artificial sequence
  synthetic
ggcgcgccagtcctgtgatggcttaatggggacaggcttgagtgcagccatggaaatgatgtcccaaaacccagtctcggtgggaatagctgtgatgctgggggtgggagctgtagcagcccataatgcaattgaatcaagtgaacaaaagaggacactattaatgaaagtgtttgtaaaaaatttttcgactcggaccgatg

SEQ ID NO: 8267 - DNA, 203 bp, Artificial sequence
  synthetic
ggcgcgccagtcctatggaaacctaagagtgaccaggtactatgataaagatggtgcagagttgaaaccggtaattaaactggaaaaacaggctgagctgtactacaaaggggccacactaagagtagactttagcaacggaaagagtgtaactgcaactgacaagtgggaggtggaccatgcaacgacgactcggaccgatg

SEQ ID NO: 8268 - DNA, 203 bp, Artificial sequence
  synthetic
ggcgcgccagtcctacttgaagagactaattgaactagtccacaagaacaaattggaggaaaaggcaataccccaagctacagtaacaacctggctagcatacacctttgtcaacgaggatgttggaacgataaggccatcttttggggaaagagtgttgcctgaaagcccgggtgacccgagtttgccgactcggaccgatg

SEQ ID NO: 8269 - DNA, 203 bp, Artificial sequence
  synthetic
ggcgcgccagtcctgcagctggatctaccaaaacacagtaaaggagaatgatttgagacccttatttgaggaactgttactgcagtgcccccctggtggtagacaaaccaaaggacatgtagcatctgcataccaactagcacaagggaactgggagcctataagttgcaatgtaaatatgggtacaacgactcggaccgatg

SEQ ID NO: 8270 - DNA, 203 bp, Artificial sequence
  synthetic
ggcgcgccagtccttaccagcaagaagggtcaaaacacatccttatgaagcatacttgaaattaaaagatcttttaaatgagcataagatgagggtggaaactggctgtgctgacttaaaagaccataataggtggatactaaggaaagtgaagcaccaagggaacttaagaacgaggtacatcttaacgactcggaccgatg

SEQ ID NO: 8271 - DNA, 203 bp, Artificial sequence
  synthetic
ggcgcgccagtcctatgctaaagtcagattggcaatcaccaaagtgatgtacaaatgggtcaagcaaaaacctgtggtgataccggggtacgaaggaaaaaccccactttttcaaatcttcgataaagtaaagaaggagtgggatggcttcaacgacccggtagcagtgagttttgacacaaaggcttcgactcggaccgatg

SEQ ID NO: 8272 - DNA, 203 bp, Artificial sequence
  synthetic
ggcgcgccagtcctaaggagcgcagatattgtatgaatctggcaaaccacagaaaatactagaaggagaccaaatgaaggtggcttacagatttgaagacatagagttttgttcccacacaccaatccccgttagatggtcagacaatagtagtggttacatggccggcaggaacaccgccacggtaccgactcggaccgatg

SEQ ID NO: 8273 - DNA, 203 bp, Artificial sequence
  synthetic
ggcgcgccagtcctttgcaaaaatggccactaggctagactcaagtggggagaggggcactgccgcatatgagaaggcagtggcattcagcttcctcctaatgtattcctggaaccctttaattaggaggatatgtctgttgaccttatcgtcaaaaccagaggtagacccctctaaacaagccacttcgactcggaccgatg

SEQ ID NO: 8274 - DNA, 203 bp, Artificial sequence
  synthetic
ggcgcgccagtcctggaaggaagaaggtaactggcttgtcaatgccgaccggctagtttctagcaagactggcaaaatgtatatccccgatgaagggcacaccttgcaaggcaagtattatgaagaactgagactaactaggccagggggacccactataagggtgggaatagacagataccgtcttgcgactcggaccgatg

SEQ ID NO: 8275 - DNA, 203 bp, Artificial sequence
  synthetic
ggcgcgccagtcctctgaccctggaaacggaagacggtactgctattgattctatcaattataaacttccggctgacgcttgcctcgtaggacttccgattgagaaacactgcccgctcgtgagcaagctcgccgacctggacaacattgactgtggctcaacgactgaagagtttaggctgaaataccgactcggaccgatg

SEQ ID NO: 8276 - DNA, 203 bp, Artificial sequence
  synthetic
ggcgcgccagtcctaatagatgtcaagtcacgcccagaaagcgtaggagctctcaaccacggccggcttcgcacactggcctaatcgaagaagttgagctcttgaccttcaaatttatgcgtgagcacatgcctattttcgtcgtttgccttctcgttgtctccgttgctcggaaatggcccatgtggcgactcggaccgatg

SEQ ID NO: 8277 - DNA, 203 bp, Artificial sequence
  synthetic
ggcgcgccagtcctgaatggggactaggacaagttgccacgtgcgttgaagtccaatgcctgaccatggtaaatgtatctgtgctcgttgactcagttattcaggccactgccagtatggaactccatgggcaccaagactcaagagccgtgttgcgtgatgttcccacggtatttcatttcggggaccgactcggaccgatg

SEQ ID NO: 8278 - DNA, 203 bp, Artificial sequence
  synthetic
ggcgcgccagtcctggccacgtagaactcgcggacagtgtcgtccctgttgactgtctcgtcacaccggtagcccaggcttggaggcttatgactcatgtggccggtcgatactcaaaacatggcatggctggtatcggaagcgtctgggaggacctggtgcggaactttcacttttcgtggagttggcgactcggaccgatg

SEQ ID NO: 8279 - DNA, 203 bp, Artificial sequence
  synthetic
ggcgcgccagtcctggagccttcgtgtggaagcagcttggcagtggcccaatgaaagatcactccgttgagctcgacgactatgctttcaccaacttgtacattcgcgacatgttcgatggtacaaacaaaccttgtttgatatgcgaggacacattgcagtgcgccgccctgagacgagccgcagtccgactcggaccgatg

SEQ ID NO: 8280 - DNA, 203 bp, Artificial sequence
  synthetic
ggcgcgccagtcctgccgcaagaattgctatgcatccaggggtgatgtatgtgaacaccactctatcgtacaacagaacttttgttgaaacgcgaaaacgggttttgacagtgacgctggaatctttggagtataaagtaggatcctacgtcacacatggtcgtcttgagggggacatgggatatctgcgactcggaccgatg

SEQ ID NO: 8281 - DNA, 203 bp, Artificial sequence
  synthetic
ggcgcgccagtcctgcccgcacacgagcgacgacgtggtcacggttgattcttacaactgtcgcgatgcttacttttggcctacccaacattttttcctcggtgggcttgtcggcatgggtgttgttagttgcgtcatcggcatatcaacctatcgacgtcgtcatgaacctctggataatcctccagcgactcggaccgatg

SEQ ID NO: 8282 - DNA, 203 bp, Artificial sequence
  synthetic
ggcgcgccagtcctattggggcctatcgtgggatgactcaggaccttccaccagagatcctcacgttttgcttgataatgggatggaaaacggcattggcgctaggtaccgttgccttactgacgcaaggtacgagcgctttttacaagtggacgcagaaatcactagagtccaaaagctcctacaggcgactcggaccgatg

SEQ ID NO: 8283 - DNA, 203 bp, Artificial sequence
  synthetic
ggcgcgccagtcctacgggggacgtgcctgacgggatcgcccttgaagaagatgaagggggaaacttccgtgaccttcgaggaacatatagcgatgaggggatcactattggccaagacatggggtctgcccagatcccagagaccatggtcatcatattgattggttgtgccctcacgtctgcttctcgactcggaccgatg

SEQ ID NO: 8284 - DNA, 203 bp, Artificial sequence
  synthetic
ggcgcgccagtcctatctatcgaattaatgtacgtagcttcatggaaaaccgacagcgtggagtaggtgtggcaaaaaacggagttttccacacgttaatgcatgtcactcgtggagagcccctcaaatggcgagaaaagctagtgtccttacattcgggaagtgctttacgagatgtagtgtcgtatcgactcggaccgatg

SEQ ID NO: 8285 - DNA, 203 bp, Artificial sequence
  synthetic
ggcgcgccagtcctatcgtttcggaagtcaaagcaaattttgacgcggggttgaggaccataatcctgacacccactcgggttgtcatggctgaagttatggaagccctcgggcaagccggaataacgtgtgaccggaaccttatgtattgtcgcagaaatttggtgacagttgcctgtcacgccacgcgactcggaccgatg

SEQ ID NO: 8286 - DNA, 203 bp, Artificial sequence
  synthetic
ggcgcgccagtcctttcacaaaatttgtgttgtcgcatggcgtaaagaaaattggggtggcgctcattgtcatggatgagtgtcacttcatggatcccatgtcaatagctgcccggggagtaatggagcatctacatgagaagggaacgaaactcatgtatttgagtgccaccccccctggacactcccgactcggaccgatg

SEQ ID NO: 8287 - DNA, 203 bp, Artificial sequence
  synthetic
ggcgcgccagtcctccccttcatcgcgcaaacttcacagctaattacgctcgggctagtagcgacgaaacctctctggttgtttccactgacatttcggaaatgggggccaatttgggtgttgatatggttatcgacacccgcaaggttctccggcccctcgtagcatccgagaatagaatcaagttgcgactcggaccgatg

SEQ ID NO: 8288 - DNA, 203 bp, Artificial sequence
  synthetic
ggcgcgccagtcctcccgaagaggccatgtacagccaaccccctgggcgctataccttagttggggaagacctgctccgctttatgaagttcctggacaaagacgatattcctacctggctcgcttggcattgggcagaggcggccgaccgcagacattctgccctcttccagggtaatagcactggccgactcggaccgatg

SEQ ID NO: 8289 - DNA, 203 bp, Artificial sequence
  synthetic
ggcgcgccagtcctaatccccggtcgcacatccacgacgtaatggatttcggatcaatgctgtcggccattggattgattgacatgaacttcctgttttataagtttttgcatattgccatgcgagccctcggagctatggcccctttcagtaaatttcgcgccctagaaaagtccaccacgataggtcgactcggaccgatg

SEQ ID NO: 8290 - DNA, 203 bp, Artificial sequence
  synthetic
ggcgcgccagtcctcttggctgtggacgtggcggctggagccaaagagtggttatggaggagacagtgacgtccgttcatgggttcacaattggtggcaatgacaaggaaaacccccagcgatttgtcacacgtggatataatttgaccagcctcaagcccggggtggacgtctacaaactggagccacgactcggaccgatg

SEQ ID NO: 8291 - DNA, 203 bp, Artificial sequence
  synthetic
ggcgcgccagtcctaagcgatgtgacacaatcatgtgtgacatcggtgaaagtgacccaaatctcaccaaagagcggacaagaacactaaaagtcttacagctattggagacttggttatctatcaaccctgaggcccaatttgtatgcaaggtcctatccccctactcccttgaggtgttgcggaagcgactcggaccgatg

SEQ ID NO: 8292 - DNA, 203 bp, Artificial sequence
  synthetic
ggcgcgccagtcctgttgaatccctccagcaaaagtacaaaggtaagctcgtgcgcttggcacacagtaggaatagcacggctgaaatgtattacatatcaggaaataggtccaacgccgtaagggacgcttatatgaccctggctgctttaataggaagattttcgcgacacattgacagtgtattccgactcggaccgatg

SEQ ID NO: 8293 - DNA, 203 bp, Artificial sequence
  synthetic
ggcgcgccagtcctctcccggagccaacactaccgcgaggaaccagagctgatccagcagctagcgtgtctgccatgaatgttgatgacatggttgatcgtgtcagaaaggtccaacaggaaaacagcgcgacatggttcattgacccggaacacccgtataaaagctttagatattttgggtcttttcgactcggaccgatg

SEQ ID NO: 8294 - DNA, 203 bp, Artificial sequence
  synthetic
ggcgcgccagtcctctggaatttgaggccttggggttcctaaatgctgatcactgggtcagtcgtgaaaactttcctgggggtgtgggtggagtgggtgtcaattactttggcaactacctaaaggaaatttcgctcaaaggcaagtatctctttgctgacgatatagcagggtgggatacgaaggtgcgactcggaccgatg

SEQ ID NO: 8295 - DNA, 203 bp, Artificial sequence
  synthetic
ggcgcgccagtcctagttctgaagaccttgaggatgaagagactctcttaaccgaactgactgcaaaccccttccaccgcgccctaatcgccgccacaatgaagttggcttaccggaacatagtggcgatgtttccccgcacccacacgcgatacggtagcggcaccgttatggatgtcgtcgggcgccgactcggaccgatg

SEQ ID NO: 8296 - DNA, 203 bp, Artificial sequence
  synthetic
ggcgcgccagtcctgcgggagatgatgttgtagtgtcgacaatgaatcggtcatttgcctcttccttagactacttggagctgacgggaaagacccgtaaaaacgttccacgaggtgccccttcaaaaatggaaagcgactggcaaaaagtcgaattttgctcacatcactaccacgaactttccctccgactcggaccgatg

SEQ ID NO: 8297 - DNA, 203 bp, Artificial sequence
  synthetic
ggcgcgccagtcctgccgctatcacctccgccgtcccttccaactggtttccagtcgggcgaacatcctggtcagtacatcaatttcacgaatggatgacgacatccgacatgctccgcgtttggaacgatgtgtggatatacaataacccgtggatcagagtgaaggacccaattggctcatgggatcgactcggaccgatg

SEQ ID NO: 8298 - DNA, 203 bp, Artificial sequence
  synthetic
ggcgcgccagtccttatggcaggcgggcttgtggacggcttcggcccacccacagcaagaatgccatcatctgtcctcacccccaattttcccttttcttcccctgcaaccattacgcttactcgcatgtgcattgagtggtgcatgtgttgaacaaacagctacactcacatgggggcgggttttcccgactcggaccgatg

SEQ ID NO: 8299 - DNA, 203 bp, Artificial sequence
  synthetic
ggcgcgccagtccttcttctgttcacgatggagggctctaacggattctcgagttcgttggctggcctttcttcatcgcgctcttctctacgcctcctcactcattttctctccctccccaccttacccgttaacatctatctcaatgctcgccgtcactccggctggtatcgctccccccccaccttcgactcggaccgatg

SEQ ID NO: 8300 - DNA, 203 bp, Artificial sequence
  synthetic
ggcgcgccagtcctacccgttaacatctatctcaatgaacaatttgacaatctctgcctggcggctttgcgctatccgggccacaaattgtatccctctgtccacactctgttccctgatgtttcacccctcaagattccccactctgtccccgcctttgctcacctcgtccagcgacaggggctgcgcgactcggaccgatg

SEQ ID NO: 8301 - DNA, 203 bp, Artificial sequence
  synthetic
ggcgcgccagtcctgcggcaaggaaactccatcaccaacatctacggcaatggcaacgacgtcaccacagacgtcggcgccaatgggatgtccctccccattgccgtaggtgacatgcctaccgcctctacctctgaagcccctcttggttccaacaaaggtggctcttccacttccccaaaatccaccgactcggaccgatg

SEQ ID NO: 8302 - DNA, 203 bp, Artificial sequence
  synthetic
ggcgcgccagtcctctctcaaaccacagctcttcttgctcttcccggcaacatcgccggtggtgccccctctgcaacagttaatgccaacaacacttccatctcttcccaagctcttttaccctctgttaatccttacccttccacccctgctgtctcactccccaatcccgacgctcccactcaggtcgactcggaccgatg

SEQ ID NO: 8303 - DNA, 203 bp, Artificial sequence
  synthetic
ggcgcgccagtccttggccccgccgccgaccgccagtggctcgtcgacaccctctcttggtctgagacgatcgcaccccttactgtcttctctggacccaaggctctcacccctggcgtctacccccccactattgaacccaacactggtgtctatcctctaccagctgcactctgtgtttcccatcccgactcggaccgatg

SEQ ID NO: 8304 - DNA, 203 bp, Artificial sequence
  synthetic
ggcgcgccagtccttgaatctgtcttttccactgcctacaatgctcacgcctacttcaactgtggcttcgatgtcacagtcgtcgtgaacgcttcccagttccacggcggctcgctgatcgtcttggccatggctgaaggtctgggcgacatcaccccagctgattcttccacttggttcaacttccccgactcggaccgatg

SEQ ID NO: 8305 - DNA, 203 bp, Artificial sequence
  synthetic
ggcgcgccagtcctcgacgttcgccttccccagtgccccgcccttggtttccaatcgggagccgatggtgcagaagtccaacctgcccccaccagcgacctctctgatggtaaccccaccaccgaccctgcccctcgtgacaactttgactacccccaccaccctgttgatccttccactgacctagccgactcggaccgatg

SEQ ID NO: 8306 - DNA, 203 bp, Artificial sequence
  synthetic
ggcgcgccagtcctcaatgtctctgccccttcccaaccctgcactttctacgtcttctatgcccccccgggtgcatctgtcccttctgtgcagactctcgcagaactctctttcttcacccacactgccactcctctcaacctggcagcaccaaccaacatcactgtctccatcccttactcctcccccgactcggaccgatg

SEQ ID NO: 8307 - DNA, 203 bp, Artificial sequence
  synthetic
ggcgcgccagtcctccagtctgttctctgtacgtcctttggaggtttcggcctccaaaacggcggagatgcaggtaacctccactccaacacatggggtactctcatcctctatgttgatctcccccaatctgacagtgtctctgtttctgcttacatctccttccgtgactttgaagcgtacgtccccgactcggaccgatg

SEQ ID NO: 8308 - DNA, 203 bp, Artificial sequence
  synthetic
ggcgcgccagtcctccgccagactcctggcgttggccctgtgcccacgagcacctccatcgttcgtgtcgctcggcccacccccaaaccccgcacggctcgccgccaaggcggcaccctcgcggacctcatcctctcccccgaaagccgatgcttcattgtcgcccacactactgcccccttctactccgactcggaccgatg

SEQ ID NO: 8309 - DNA, 203 bp, Artificial sequence
  synthetic
ggcgcgccagtcctcatccttctggtcaaccccgacgaggagtatgccatcagcatgttctctcatggcgacgagtcaatcctccagtactcgtcgcgctctggcactcgcctcacccccactgccccagccttcttcctctgtgctgctgcatctgttgacacagtcctcccctactccatctctcacgactcggaccgatg

SEQ ID NO: 8310 - DNA, 203 bp, Artificial sequence
  synthetic
ggcgcgccagtcctatcacacctttggcttaccgatctgactggcattcctctccgcgcagtccccccccttactctcttcctctccgcgggagccgccctgtgtgccggcgcacaaacgctgatagccgtcgcacagggtggttctaccccggaaaccccacccactcccaaccgcgctctcctccgcgactcggaccgatg

SEQ ID NO: 8311 - DNA, 203 bp, Artificial sequence
  synthetic
ggcgcgccagtccttcgtcagggccttggcgatctcccggatgcggcgaaaggactttccgccgcgctcgagagtgttgccagggtcgctggcgatgccaacattgccacctcctcccaagccattgctacctccattaactctctttccaactccattgatggtgctacttctttcatgcaaaacttcgactcggaccgatg

SEQ ID NO: 8312 - DNA, 203 bp, Artificial sequence
  synthetic
ggcgcgccagtcctgcacattcgcctgaatgtgacggcacgtgacggtgtggccttctcagcggcggctgctctccaaccctccaaccccccttctgcaactcgctattgcaaatttgctaaccctctcactcagttttctatgtttaatctggctgtcgattacaaatcagttgtccttcccaacaccgactcggaccgatg

SEQ ID NO: 8313 - DNA, 203 bp, Artificial sequence
  synthetic
ggcgcgccagtcctccctctcacctgctttgatgaactggttgactttgttctgagctcccttcgcgaccgggcttcggtgaactcgctcctctctggcatggtgcgcactgacgtcacacgccaaggtgggaacgctgatgcccccgctccttctgcagctcctctcccctctgttatcccatctgtcgactcggaccgatg

SEQ ID NO: 8314 - DNA, 203 bp, Artificial sequence
  synthetic
ggcgcgccagtcctcccatcccaggaccccttcacccgtgcggttaacgagaaccgccctgtctctttcctctccaagatctggtcgtggcgagctcccatcttcgccgcctcctctttcctttctctcatcgctgcaactctcaccattgtccgttgtctccgtgacctgcggtccactcagggtgccgactcggaccgatg

SEQ ID NO: 8315 - DNA, 203 bp, Artificial sequence
  synthetic
ggcgcgccagtcctatacagtgggactcctgttccgaaaccacggaaaaaggatctcccaaaacaacctgtgtactctgggcctgtccgccggcagggtttcgaccccgccgtcatgaagatcatgggcaatgtggactcttttgtcaccctctcgggtactaaacccatctggactatgtcctgcctcgactcggaccgatg

SEQ ID NO: 8316 - DNA, 203 bp, Artificial sequence
  synthetic
ggcgcgccagtcctcggttcgccgatgattgccactgatcctggcggcttgggtatcctcggtatccacgtcgctggggtggctggctacaacggcttctccgcacgcctcacccccgagcgtgtccaagctttcctttcccacctggctacaccccaatctgtcctctactttcacccacccatgggcgactcggaccgatg

SEQ ID NO: 8317 - DNA, 203 bp, Artificial sequence
  synthetic
ggcgcgccagtcctcccgcctgcgcacgtctctcgtcgcagccggctccatcccatccctcccgcctttggtgctttccccatcaccaaagaaccagcagccctttctaggaaggaccctcgcctccccgagggcaccgacctggatgccatcaccctcgccaagcacgacaagggcgacatcgcgaccgactcggaccgatg

SEQ ID NO: 8318 - DNA, 203 bp, Artificial sequence
  synthetic
ggcgcgccagtcctgccctggccttgcatggaggaggcggctgactggtacttctcccagcttcctgataacctccctgtcctctcccaggaagatgccattcgtggtctcgaccacatggatgccatcgacctctcccaatctcctggctacccttggacgacacagggccggtcccgccggtccctcgactcggaccgatg

SEQ ID NO: 8319 - DNA, 203 bp, Artificial sequence
  synthetic
ggcgcgccagtcctgttcgacgaggatggcaaccctctccctgagctccaggaagccatcgattccgtctgggacggtggctcctacatctatcaatctttcctcaaggatgagttgcgccccacggcaaaagccagagctggaaaaacccggattgtggaggcggctccgatacaagcaattgtagtcgactcggaccgatg

SEQ ID NO: 8320 - DNA, 203 bp, Artificial sequence
  synthetic
ggcgcgccagtccttggacgtcgcctccttggttctctcatcaaccacctccagggtaaccctctccagcatggcagtgccgttgggtgcaatcctgacatccactggactcaaatcttccactcactcacctctttctctaatgtctggtctattgattactcttgctttgatgccactatcccctccgactcggaccgatg

SEQ ID NO: 8321 - DNA, 203 bp, Artificial sequence
  synthetic
ggcgcgccagtccttgctgacaaggcttctgactttcctgactcttcttccatctttgacatcactttccttaaacgctattttgtccctgatgatatccacccccacctcatccatcctgtgatggatgagcaaaccctcaccaactcaatcatgtggttgcgtggcggggagtttgaggaggtgttcgactcggaccgatg

SEQ ID NO: 8322 - DNA, 203 bp, Artificial sequence
  synthetic
ggcgcgccagtcctgcggtcactcgagactcttgcctttcactcgggaccgaagaactactcggcttggtgtgagaaaatcaaggctaagattcgagagaacggctgtgacgccactttcactccctactccgtcctccaacgtggttgggtttccacctgcatgactggaccctaccccctcaccggcgactcggaccgatg

SEQ ID NO: 8323 - DNA, 203 bp, Artificial sequence
  synthetic
ggcgcgccagtccttttcgaccgccttatggcaggcgggcttgtggacggcttcggcccacccacagcaagaatgccatcatctgtcctcacccccatttctcccctccttcccctgcaaccattacgcttactcgcatgtgcattgagtggtgcacgtgttgaacaaacagctacactcacgtggggcgactcggaccgatg

SEQ ID NO: 8324 - DNA, 203 bp, Artificial sequence
  synthetic
ggcgcgccagtcctgcgggttttcccgcccttcggcctctcgcgaggcccacccttccccttcctcccataactacagtgctttggtaggtaagcatcctgatcccccgcggaagctgctcgcgtggcaactgtggggacccagacaggttatcaaaggcacccggtctttccgcctccaggagtatccgactcggaccgatg

SEQ ID NO: 8325 - DNA, 203 bp, Artificial sequence
  synthetic
ggcgcgccagtcctcgtagtcgtcttccggcttgtccggcgcatgtttggtgaaccggtggggtaaggttggtgtgcccaacgcccgtactttggtgacaactcaagaccacccaggaatgccagggaggtaccccgcctcacggcgggatctgaccctgggctaattgtctacggtggttcttcttgcgactcggaccgatg

SEQ ID NO: 8326 - DNA, 203 bp, Artificial sequence
  synthetic
ggcgcgccagtcctcttccatttctttcttctgttcatgatggagggctctaacggattttcgagttcgttggctggcctttcctcatcacgctcttcacttcgcctcctcactcatcttctttccctcccccccccgaatcgcgacgcccgccgccactctggctggtaccgctccccccccaccctcgactcggaccgatg

SEQ ID NO: 8327 - DNA, 203 bp, Artificial sequence
  synthetic
ggcgcgccagtcctccccgtcaatgtctacctcaatgaacaatttgacaatctttgcctggcggctttgcgctacccaggctgcaaattatacccctctgtttacactctatttccagatgtctcacccttcaagatcccccaatccatccccgcctttgcccaccttgtccagcgacaggggttgcgcgactcggaccgatg

SEQ ID NO: 8328 - DNA, 203 bp, Artificial sequence
  synthetic
ggcgcgccagtcctatccaacggcaacgttgttcgcggatcccgctactccaagtggtgggagcccgcggccgcacgcgccttggatcgtgctcttgaccatgctgttgacgcgactgacgcagttgctggcgccgcctccaagggcatcaaggctggagccaccaagctctccaacaagcttgctggcgactcggaccgatg

SEQ ID NO: 8329 - DNA, 203 bp, Artificial sequence
  synthetic
ggcgcgccagtcctccacgcaatcatcaatctggctaattctaattctgctaccctcaaacttccttacattggagtcactccaaacacctccactgaaggacttcacaactattggaccattctctttgcccctctgactcctcttgctgtcccgaccggctcccccacctctgtcaaagtctccctcgactcggaccgatg

SEQ ID NO: 8330 - DNA, 203 bp, Artificial sequence
  synthetic
ggcgcgccagtcctccaatggcgtggctctctacagatctctctcatcttcactggtcctgctcagtgctacggccgccttcttcttgcttacacccctccctccgccaatcctcccaccaccatcgaggaagccaacaacggcacctacgatgtctgggatgtgaatggcgactccacctacactttcgactcggaccgatg

SEQ ID NO: 8331 - DNA, 203 bp, Artificial sequence
  synthetic
ggcgcgccagtccttgacgtccgcctcccacagtgtcctgcccttggcttccagtcgggagctgatggcgcagaagtccaacctgcccccaccagtgacctctctgatggtaaccccaccactgaccccgctcctcgtgacaactttgactaccctcaccaccctgttgatccttccactgacctagccgactcggaccgatg

SEQ ID NO: 8332 - DNA, 203 bp, Artificial sequence
  synthetic
ggcgcgccagtcctcaacgtctctgctcctcttcaagcttgcaccttctacatcttttatgcccctcccggtgcatctgtcccttctacgcagacccttgcagaactctctttcttcactcatactgccacccctctcaacttagctgctccaactaacatcactgtctctatcccttatgcctctcccgactcggaccgatg

SEQ ID NO: 8333 - DNA, 203 bp, Artificial sequence
  synthetic
ggcgcgccagtccttcggcaaacccctggtgtcggtcccatccccacgagcacctccatcgttcgtgtcgcccggcccactcccaaaccccgcagggtccgccgtcaaggtggtactcttgcagacctcatccttacccccgagagtcgttgcttcattgttgcacatactactgccccctactactccgactcggaccgatg

SEQ ID NO: 8334 - DNA, 203 bp, Artificial sequence
  synthetic
ggcgcgccagtcctcttctctggccttgccccgaagaaccccacctctcctctccaacacctctttgccaagctcatcaaatgggtgaccaaaatcatcggttcactcatcatcatctgcaacaaccccaccccctcagcactcattggtgtttccctcatgctctgcggtgacctcgccgaggacatcgactcggaccgatg

SEQ ID NO: 8335 - DNA, 203 bp, Artificial sequence
  synthetic
ggcgcgccagtcctcgagaagattatgtcccacatcaagaatcttctcgagtggcttggggtcctcgtcaaagatgaccccaggaccaaactcaactcgcagcatgagaaaattctggaactctacactgactctgttactgcttcttcaactcccccctctgagctttctgcggacgccattgggtccgactcggaccgatg

SEQ ID NO: 8336 - DNA, 203 bp, Artificial sequence
  synthetic
ggcgcgccagtcctcaacctggacctggccaagcaacttctcactctctcgcatgctgccaactctgtcacccacatccagttgtgcacacgcgctatcaccaactactctacagctctctctgccatctcccttgtcggtacacctggcacgcggccagagccactggtcgtgtacctgtacggacccgactcggaccgatg

SEQ ID NO: 8337 - DNA, 203 bp, Artificial sequence
  synthetic
ggcgcgccagtcctccctgggactggcaaatccctcctcgcttctctcctcgcttctactcttgctcaggccctctctggtgaccccaacaattactactcaccttcttcccctgactgcaaattctacgatggttactctggccagcctgtccactacatcgacgacatcgggcaagaccccgatggcgactcggaccgatg

SEQ ID NO: 8338 - DNA, 203 bp, Artificial sequence
  synthetic
ggcgcgccagtcctcccactctcctgcttcgatgaactgattgactttatcttgggctctcttcgcgatcgggcctcggtgaactcccttctctctggcatggtgcgcaccgacgtagcacgccagggcgggaacgctgacgcccccgctccctctgcagctcctctcccctctgtcctcccctctgtcgactcggaccgatg

SEQ ID NO: 8339 - DNA, 203 bp, Artificial sequence
  synthetic
ggcgcgccagtccttccttcccaggaccctttcgtccgtgcggtgaacgagaaccgcccggtctctttcctctccaagatctggtcgtggcgtgctcctatcttcgccgcctcctctttcctttccctcattgctgcaaccctcaccattgtccgctgtctccgtgacctgcggtccacccagggtgccgactcggaccgatg

SEQ ID NO: 8340 - DNA, 203 bp, Artificial sequence
  synthetic
ggcgcgccagtcctctggccttgcatggaagaggcggctgactggtacttctcccagctccctgacagcctcccagtcctctctcaggaagatgccattcgtggtctcgaccacatggatgccatcgacctctctcagtctcctggctatccttggacaacacagggccggtcccgccggtctctgttcgactcggaccgatg

SEQ ID NO: 8341 - DNA, 203 bp, Artificial sequence
  synthetic
ggcgcgccagtcctgcgtcgtcttcttggttctctcatcaaccacctccagggtaaccctctccagtatggcagcgccgttggatgcaaccctgacatccactggactcaaatcttccactctctcactcccttctctaatgtctggtctattgattactcttgctttgacgccaccatcccctctgtcgactcggaccgatg

SEQ ID NO: 8342 - DNA, 203 bp, Artificial sequence
  synthetic
ggcgcgccagtcctaagtcctaaaaacccttaacttggtcatactactcaactcagcaaaatgggagctcaggtatcaacacaaaagactggtgcgcatgagacgggtctaaatgcgagcggcaattcggttatacattacactaacatcaatttttacaaagactctgcatcaaactccctgaacagcgactcggaccgatg

SEQ ID NO: 8343 - DNA, 203 bp, Artificial sequence
  synthetic
ggcgcgccagtcctactattcggacagaacatgctgtaccattatttaggtagaacgggctacactgttcacgttcaatgcaacgcctcaaagttccaccaagggtgtctcctggtagtgtgcgtgcccgaagccgaaatggggtgtgccacagttgataggacggttactgaggagtatttatcaaacgactcggaccgatg

SEQ ID NO: 8344 - DNA, 203 bp, Artificial sequence
  synthetic
ggcgcgccagtcctggtgctatgtacaccggggagtaaccaattcctgacatcagatgactttcaatccccctctgcaatgccgcagttcgacgcaaccccccaaatgcacataccaggacaagtgagaaatctaatggaaatcgctgaggtggattcagtagtgccagtgaataacttatcacgctacgactcggaccgatg

SEQ ID NO: 8345 - DNA, 203 bp, Artificial sequence
  synthetic
ggcgcgccagtccttcgcttcgtccacgacgatgtgtataccagtgcagggtacattactgcttggtaccaaaccaccatagttgtccccccaaaaactccgacagattgcaagctgatgtgtttcgtgtcggcctgcaatgacttctcggtgcgtatgttgagagacacccctcacatagaacaggacgactcggaccgatg

SEQ ID NO: 8346 - DNA, 203 bp, Artificial sequence
  synthetic
ggcgcgccagtcctgcacacacacggtgccttcggccagcagtccggtgctgtgtatgtcggtaactatagagtggtaaatagacacttggccacgcataatgattggcaaaattgcgtgtgggaagactacaacagagaccttctcgtgagcacaacgactgcccatggttgtgataccattgccagcgactcggaccgatg

SEQ ID NO: 8347 - DNA, 203 bp, Artificial sequence
  synthetic
ggcgcgccagtcctatgtgagcaagtcaacctgctcaaggagacgctggttggtcaagactccattctagagaaatccctcaaagccctggtcaaaattatatcagccttggttatagttgtaaggaatcacgacgacctcgtaacagtgacagccaccctagcactcattgggtgctctgcatcgcccgactcggaccgatg

SEQ ID NO: 8348 - DNA, 203 bp, Artificial sequence
  synthetic
ggcgcgccagtccttgacgagtgctgtcctgtcaatttcaagaagtgctgcccactagtgtgtggtaaagccatccagtttatcgacagaagaacacaaatgaggtattcgttggacatgcttgtgaccgagatgttcagagaatacaaccacagacatagtgtgggggcgacacttgaggcactcttcgactcggaccgatg

SEQ ID NO: 8349 - DNA, 203 bp, Artificial sequence
  synthetic
ggcgcgccagtcctagactacggcttcctcaatctgggtggaacacccaccaagcgcatgctaatgtacaacttccccacgcgtgcagggcagtgtggtggtgtcctgatgtcaacgggtaaagtccttgggatacacgtcggcggaaatgggcaccagggtttttcagcagccctgttacgccattacgactcggaccgatg

SEQ ID NO: 8350 - DNA, 203 bp, Artificial sequence
  synthetic
ggcgcgccagtccttttaaccacaagtgcaggttatccttatgttgcccttggtatcaagaagagagatattttatctaagaagaccaaggatctgacaaagctgaaggagtgtatggacaagtatgggctgaatctccctatggtcacatatgttaaggatgagctgagatcggcagaaaaggtggccgactcggaccgatg

SEQ ID NO: 8351 - DNA, 203 bp, Artificial sequence
  synthetic
ggcgcgccagtccttaaaggtaagtccaggttaattgaggcatcaagtctaaatgattcagtagctatgaggcaaaccttcgggaacttgtacaaaacattccatctgaacccaggtatagtgacaggcagcgcagttggttgtgatcccgacttgttttggagtaaaatcccagtcatgcttgacggcgactcggaccgatg

SEQ ID NO: 8352 - DNA, 203 bp, Artificial sequence
  synthetic
ggcgcgccagtcctaattaggtggaccaaagaccccaaaaacacccaggatcatgtgcgatccttatgcctattggcttggcataatggggagcaagaatatgaagagtttgtgtccaaaatcaggagcgttccagtgggacgctgcctgaccctgccagcgttctcaactttgcgcaggaggtggctcgactcggaccgatg

SEQ ID NO: 8353 - DNA, 203 bp, Artificial sequence
  synthetic
ggcgcgccagtcctaaggtcttagaaactctcaactttattttgacactcaatacagcaaaatgggagctcaagtatcaacgcagaagactggggcacatgagactagcttgaacgccaacgggagttcggtcattcactacaccaacatcaactactacaaggatgcagcctcaaattcagcaaacacgactcggaccgatg

SEQ ID NO: 8354 - DNA, 203 bp, Artificial sequence
  synthetic
ggcgcgccagtccttggtaggttacggtgtgtggccagagtacttgtctgacaaggaggcgacagcggaggatcaaccaacacaaccagatgttgcaacatgcagattctacaccttagattcagtgcagtgggaaaagaactctgcaggatggtggtggaaattccctgaggctttaagtgatatggcgactcggaccgatg

SEQ ID NO: 8355 - DNA, 203 bp, Artificial sequence
  synthetic
ggcgcgccagtcctgcctattcggtcaaaatatgatgtaccattacttaggacgggcaggttacacgattcacgtgcaatgcaatgcttcaaagttccatcaagggtgtttgcttgtggtctgcgttcctgaggcggagatgggtggtgctaaagtcggacaggcattcgaggcagatgcactagccacgactcggaccgatg

SEQ ID NO: 8356 - DNA, 203 bp, Artificial sequence
  synthetic
ggcgcgccagtcctcactgaacacacctggcagtagtcagttcctgacgtctgatgacttccagtccccttgtgcactaccgcaatttgatgtcacaccacccatgaaaattcccggtgaagtccacaatttaatggagatagcagaggttgactcggtcgtgccggtaaacaacgttaacggcactacgactcggaccgatg

SEQ ID NO: 8357 - DNA, 203 bp, Artificial sequence
  synthetic
ggcgcgccagtcctctgaccaaatggacatgttcagaatcccagtgacaatagggaacaagacccaagatcaagtatttggagtgagattgcagcctggactagacagtgtcttcaaacacacactacttggagagatcctgaattattatgctcattggtccgggagcataaaactaacattcatgtcgactcggaccgatg

SEQ ID NO: 8358 - DNA, 203 bp, Artificial sequence
  synthetic
ggcgcgccagtccttctgcggatccgcgatggcaactggcaagttccttattgcgtactcccctccgggtgcggacccaccgactaacagaaaaggggccatgctgggcaaaaatatagtatgggacatcggactgcaatccagttgcgtactgtgtatgccgtggatcagccaaactcattatagaccgactcggaccgatg

SEQ ID NO: 8359 - DNA, 203 bp, Artificial sequence
  synthetic
ggcgcgccagtccttactgcaaggtgacgtagaggaagcagtgagaaaagccattgtccacgtggctgacaccatacgcagtggcccaagtaactccgaaagtgtgccagccctgacggcagctgagaccggacacacctcgcaggtgactcctagtgacaacatacaaactaggcatgttaagaactcgactcggaccgatg

SEQ ID NO: 8360 - DNA, 203 bp, Artificial sequence
  synthetic
ggcgcgccagtcctaccactccagatcagaatcatccatagaaaatttcctggggagatcggcatgtgtgtacatgaaggactataagaacaaagataatgacatgacaaacaaatacgtcgcatggacaatcaacacaagacagatggtacaaatgaggcgtaagttggagatgttcacgtatgtgccgactcggaccgatg

SEQ ID NO: 8361 - DNA, 203 bp, Artificial sequence
  synthetic
ggcgcgccagtcctctccaatcactagcacaatacgtgtttatttcaagcctaaacacgtaagggtatggatcccgcgagcacctaggctatgtccctacgagaaagcagggagcgtggactttaaaccgactgcaattacctcaaccagagcaaccatcaacactgttcacagcaccactcgacccacgactcggaccgatg

SEQ ID NO: 8362 - DNA, 203 bp, Artificial sequence
  synthetic
ggcgcgccagtccttgcacacatatgggccgtttggtcaacaatcaggtgcagtgtatgtgggcaattacagagtggtcaacaggcacctggcaacccattctgattggcaaaattgcgtgtgggaggattccaacagggacctcttggttagtacaacaacggcgcacggctgtgacaccattgccacgactcggaccgatg

SEQ ID NO: 8363 - DNA, 203 bp, Artificial sequence
  synthetic
ggcgcgccagtcctggtgccaatgcactacaggggtgtacttttgtgcttcaaaaaacaagcactatccagtcgtttttgagggaccgggacttgtagaagtccaggagagtgagtactaccccagaagataccagtcccatgtactcctcgcagcaggcttttccgagcccggggattgtggtggaacgactcggaccgatg

SEQ ID NO: 8364 - DNA, 203 bp, Artificial sequence
  synthetic
ggcgcgccagtccttcttgaggtgcgaacatggagtcatcggcatcgtgaccatgggtggtgaaggtgttgttggtttcgctgatgtaagggaccttttgtggttagaggatgatgccatggagcaaggggttagagattatgttgagcaacttggcaacgcctttggttcgggcttcaccaatcaaacgactcggaccgatg

SEQ ID NO: 8365 - DNA, 203 bp, Artificial sequence
  synthetic
ggcgcgccagtccttttgtgaacaggttaacctattgaaagagtcattggttggtcaagactccatcctggaaaagtcacttaaagctttggtgaaaatcatatcagcactggtcatcgtagtaagaaaccatgatgatctcatcacagtaaccgcaaccctagctctgattggttgcaccacctctccgactcggaccgatg

SEQ ID NO: 8366 - DNA, 203 bp, Artificial sequence
  synthetic
ggcgcgccagtcctcagaggtgagagaaaaacacgaattcttaaacaggctgaaacaactgcccctgttggaaagccagattgccaccattgaacaaagcgccccttcacagagtgatcaagagcaactgttctccaatgtgcagtacttcgcacactactgtaggaagtacgcccccctgtatgctgcgactcggaccgatg

SEQ ID NO: 8367 - DNA, 203 bp, Artificial sequence
  synthetic
ggcgcgccagtcctttcaaggtccaccagtatacaaagagatcaaaattagcgtggcaccagaaacccccccccccccggccatagcagacctgttgaagtcagtagacagtgaggcggttagagagtactgcaaggaaaagggatggttggtacctgagattcactccaccctgcaaattgaaaagccgactcggaccgatg

SEQ ID NO: 8368 - DNA, 203 bp, Artificial sequence
  synthetic
ggcgcgccagtcctacttcaatgatgaacagggtgaaatcgagtttatcgagagctccaaggaggctggtttcccagttattaacacccccagcaaaacaaagcttgaacccagtgtattccatcacgtatttgagggaaataaggagccagcagtgttgaggaatggggaccccagattgaaggccacgactcggaccgatg

SEQ ID NO: 8369 - DNA, 203 bp, Artificial sequence
  synthetic
ggcgcgccagtcctactttgaggaagccatcttttctaaatacattggaaatgtgaacacgaacgtggatgagtacatgatggaagccgttgaccattatgctggacagttggcaactttggacatcagcacagaaccaatgaagctcgaggacgccgtctatggcactgaaggtctggaagcactggcgactcggaccgatg

SEQ ID NO: 8370 - DNA, 203 bp, Artificial sequence
  synthetic
ggcgcgccagtcctatctctctactagtgcagggtacccctatgttgcacttggtatcaaaaagagagacattttgtccaagaaaaccaaggacctgacaaagctgaagggatgtatggacaagtacgggctaaatctcccgatggtcacctatgtgaaggatgagctgagatcagcagagaaggttgcgactcggaccgatg

SEQ ID NO: 8371 - DNA, 203 bp, Artificial sequence
  synthetic
ggcgcgccagtcctccaagggtaaatccaggctaattgaggcatcaagtctgaatgattcagtggccatgaggcagacctttggaaacctgtacaaaacatttcacctaaaccctggcatagtgacaggcagtgcagttggctgtgaccccgatctgttctggagcaagattccagtcatgcttgacgcgactcggaccgatg

SEQ ID NO: 8372 - DNA, 203 bp, Artificial sequence
  synthetic
ggcgcgccagtcctctatcagatggactaaagatcctaagaacactcaggaccatgtgcgatctttgtgcttattggcctggcacaatggagagcaagaatatgaagaatttgtgtcaaaaatcaggagcgtcccagtagggcgctgcttgaccttgcctgcgttctccactctacgcaggaaatggccgactcggaccgatg

SEQ ID NO: 8373 - DNA, 203 bp, Artificial sequence
  synthetic
ggcgcgccagtcctatttttcacaagatccctcaaaattcacaaagcccgtagtagatgctctcaccgaagctgctgttcctttgaaatcaccatcagcagaagcttgcggttatagtgaccgcgtgttacaattgacactaggcaattctactattaccacacaggaagctgctaacattgtggtggcgactcggaccgatg

SEQ ID NO: 8374 - DNA, 203 bp, Artificial sequence
  synthetic
ggcgcgccagtcctccatgcctggagaagatggctctgaattcatagacccgctgttcttggacaacggtacgatgttgcaacaggcaactgttttcccccaccagtggataaatttgagaactaacaacagcgcaaccattatagttccatatatcaacaacataccagcagactcccctgttcgaccgactcggaccgatg

SEQ ID NO: 8375 - DNA, 203 bp, Artificial sequence
  synthetic
ggcgcgccagtcctttttaactacctctgatgactgttctgaaggtttgttaccaaattttcattctactcccgaaattttcatccctggtcaagtgaataatttactcgaattagtgcaaattgagacaatgatgacagtcaataatacagcaacccaggcttcaggagtgggtagaatcacgattccgactcggaccgatg

SEQ ID NO: 8376 - DNA, 203 bp, Artificial sequence
  synthetic
ggcgcgccagtcctctgtttcagtgcaaagtgatgtggacactcaaattgcaggtttcacaattaatcctggtagtgatggagtgtttcagtcaacataccttgggcaaatttgcagatacttcaacaactggtcagggagcattgaaatcactttcatgttctgtggatccttcatggcaacaggcacgactcggaccgatg

SEQ ID NO: 8377 - DNA, 203 bp, Artificial sequence
  synthetic
ggcgcgccagtcctcaatcccctttatgtccacatgtgcagcttatgcttggttttacgatggttatccaagatcatatggaccagatgccgaagcattaaataaatcatatggcatattaccagcaaatcaatttggcaccttttgcatgagattacttggtagtgctctgaagactacattgacagcgactcggaccgatg

SEQ ID NO: 8378 - DNA, 203 bp, Artificial sequence
  synthetic
ggcgcgccagtcctttagaatctacatgaggccaaagcatatcaaatgttgggcacccagaccatttaggatgttgccatatgttgaaaagaatagaccatcctacaaatcaccccctacagatccaatcaagaatcggactagtatcaccacaacgggagcatttggacaacaaagtggagctgtctcgactcggaccgatg

SEQ ID NO: 8379 - DNA, 203 bp, Artificial sequence
  synthetic
ggcgcgccagtcctacaaacacttcccagtgtgtttccagggtccgggtctcacatttattgaggccaatgagtactacccagcgcgatatcagtcccacgtgcttctagccgttggccatgcgcaaccaggcgattgtggtggcattttacgatgtgaacatggagtggtgggaatcctaacagcagcgactcggaccgatg

SEQ ID NO: 8380 - DNA, 203 bp, Artificial sequence
  synthetic
ggcgcgccagtcctcagaagaagtaccaccaccaccagccattgcagaccttttaaagtcagtggactcagaggaggtcagaaactattgtgaatcaaaaggatggatagtacctgccatggaaattaatgttgagagacacatcaatagagcaatgactattctccaagctgtgtccacctttgttgcgactcggaccgatg

SEQ ID NO: 8381 - DNA, 203 bp, Artificial sequence
  synthetic
ggcgcgccagtccttaatgtacaacttcccaaccaaatcaggacaatgcggaggcatactcatggctacaggtaaggtgttaggaatccatgttggtggcaatgggcaccagggctttgctgcaactcttttgagatcatatttcagtgaagagcaaggtgagattgaatggatggagaccaacaaggcgactcggaccgatg

SEQ ID NO: 8382 - DNA, 203 bp, Artificial sequence
  synthetic
ggcgcgccagtcctagtcaggttatcccataatcaatgcaccaaccaagacaaaactagaacccagcgtctttcatgatgtttttgagggaaagaaggagcctgctgtgttgaacccccgtgatcccaggttgagagttgattttgaagaagctatcttctccaaatatgtgggtaatgttaacacaccgactcggaccgatg

SEQ ID NO: 8383 - DNA, 203 bp, Artificial sequence
  synthetic
ggcgcgccagtcctcggtctggttcgcagctctaaaaatattgctggagaaaattggatacaccaacaatgagaccaagtacattgattatttgtgtaactcctatcacctttacaaaaataaacattattttgttagagggggcatgccatctggttgctcagggacttccatcttcaacagtatgacgactcggaccgatg

SEQ ID NO: 8384 - DNA, 203 bp, Artificial sequence
  synthetic
ggcgcgccagtcctccagtgggtcgatgccttttgcttccggcttattcgacacttagacggaaatggcttgactctttctaaattatatacaatcaatttaaatgattaggctaattggctaaccctgtcacgtatctggacgtgacaaaacgtgacaggggtaaatttagcacatccagagtgcttcgactcggaccgatg

SEQ ID NO: 8385 - DNA, 203 bp, Artificial sequence
  synthetic
ggcgcgccagtccttgttttcttgttttgccgtgcatttagaataagagacaacttaaacctccgattcggcaacacagggaataatctcaccagacccggcagtgtcttcaggcttcatagccccaagatggagagtcgggcccacaaagcatggatgacgcacaccgcatcaggtttcgaaacagacgactcggaccgatg

SEQ ID NO: 8386 - DNA, 203 bp, Artificial sequence
  synthetic
ggcgcgccagtcctttaccataagattttaacagcaggattgtcagtccaacaaggcattgtgagacaacgggtcattcaagtccaccaggttacaaacctagaagaaatatgccaattgatcattcaagcctttgaagctggtgttgattttcaagagagtgcagacagtttcttgctgatgctatgcgactcggaccgatg

SEQ ID NO: 8387 - DNA, 203 bp, Artificial sequence
  synthetic
ggcgcgccagtccttttacatcatgcttatcagggtgactacaagcaattcttggaaagcaatgcagtcaagtaccttgagggtcatggctttcgctttgaggtcaggaaaaaggaaggagtcaagcgactcgaagaattgcttcctgctgcatccagtggcaagagcatcaggagaacactggctgccgactcggaccgatg

SEQ ID NO: 8388 - DNA, 203 bp, Artificial sequence
  synthetic
ggcgcgccagtcctcggactgtttcctcagctttctgcaattgccctaggtgtcgcaacggcacacggcagtaccctggcaggagtaaatgtgggggaacagtatcagcaactacgagaagcagccactgaggcagaaaaacaattgcagaaatacgctgaatctcgcgagcttgaccatctaggtctcgactcggaccgatg

SEQ ID NO: 8389 - DNA, 203 bp, Artificial sequence
  synthetic
ggcgcgccagtccttcccagaaaccgcacggccgagaatcgatccccagcattcaaaatgcgttattaagaaaaaacatatgatgaagattaaaaccttcatcaacattgcacagactttgatccttaggagtttattctagctatctacaaaacgggtccaaaacggaatgatttccactagggctgcgactcggaccgatg

SEQ ID NO: 8390 - DNA, 203 bp, Artificial sequence
  synthetic
ggcgcgccagtcctcttttcaccaactggtccaggtaatttgcaagctaggaaaagacaattctgcattggacattattcatgctgagttccaagccagccttgctgaaggtgattctccccaatgtgccctgatccaaataacaaaacggatccccatcttccaggatgccactccgcccacaattccgactcggaccgatg

SEQ ID NO: 8391 - DNA, 203 bp, Artificial sequence
  synthetic
ggcgcgccagtcctctcaccttcagacatcaacgcatggcagtcccaaacaccggtgagggaggcgcccggcgacaacacatgatgataggctgatcttcgggataagagacatgaaaaaccaaaaagccgtttacatccagatccaagatcaagagtggcttggaaataaggggcacttgttctttgcgactcggaccgatg

SEQ ID NO: 8392 - DNA, 203 bp, Artificial sequence
  synthetic
ggcgcgccagtccttggtgaatgtaatatctggcccgaaagtgctgatgaagcaaatcccaatctggcttcctctgggtgtctctgaccagaagacatatagctttgattcaaccactgctgccattatgctagcatcatataccatcactcattttggcaaaacctcaaatccccttgtgagaatcacgactcggaccgatg

SEQ ID NO: 8393 - DNA, 203 bp, Artificial sequence
  synthetic
ggcgcgccagtcctaaactccagctgtgtcaactggcacgctccgcccagggatctcattccatcccaaattaaggcctatcctgctaccaggaagagctggaaagaagggctccaactccgatctaacatctcctgacaaaatccaggctataatgaatttcctacaagacctcaaaattgtaccaacgactcggaccgatg

SEQ ID NO: 8394 - DNA, 203 bp, Artificial sequence
  synthetic
ggcgcgccagtccttcgatccaaccaagaatatcatgggtattgaagtgccagaactcctggttcacaggctgactgggaagaagacaactaccaagaatggtcaaccaatcattccaattctgctaccaaagtacattggtcttgatcctctatctcaaggtgatctcacaatggtgatcactcaggcgactcggaccgatg

SEQ ID NO: 8395 - DNA, 203 bp, Artificial sequence
  synthetic
ggcgcgccagtcctaaggcagccaagcagcagcccccgagccgagcccaaacccattacacccgagcccaacacccatccagcaacccacaaccgtcaaacgcacagatggacaagcaaagaacatcaagccaggagcaacacagaccccaagtctaagctgatcaacccctcccgcaatcccaccaacgactcggaccgatg

SEQ ID NO: 8396 - DNA, 203 bp, Artificial sequence
  synthetic
ggcgcgccagtcctcgccagcaaaaatcccccaactcgataccaaccccaagcaaatcagctcaaaccgtctatctctccccgcttcactccacaccccagattcagcaaacgatcaacgcacttcttatgccacagcttatattaagaaaaagaacttgatgaagattaaggcaaccagtggtgctacgactcggaccgatg

SEQ ID NO: 8397 - DNA, 203 bp, Artificial sequence
  synthetic
ggcgcgccagtccttcttcatctctttgatttgagtcttaagtgaatacacaggttctaatactgttcttctgtccaacggtataattcagccaggcctaagacagtagctaatcacagtcatcatgggagcgtcagggattctgcaattgccccgtgagcgcttcaggaaaacatctttctttgtttcgactcggaccgatg

SEQ ID NO: 8398 - DNA, 203 bp, Artificial sequence
  synthetic
ggcgcgccagtcctgggtaataatcctattccataaagtcttttcaatcccgttgggggttgtacacaacaataccctacaagtgagtgatattgacaagtttgtgtgccgagacaaactctcttcaactagccaattgaagtcagtcgggttgaacttggagggcaatggagtagcaactgatgtaccgactcggaccgatg

SEQ ID NO: 8399 - DNA, 203 bp, Artificial sequence
  synthetic
ggcgcgccagtccttacacaaagtctcaggaactggaccatgcccaggaggactcgcctttcacaaagaaggagccttcttcctgtatgaccgactcgcatcaacaatcatttatcggggtacaacctttgccgaaggagttattgcatttctgatcttgcctaaggcgcgaaaggattttttccagtcgactcggaccgatg

SEQ ID NO: 8400 - DNA, 203 bp, Artificial sequence
  synthetic
ggcgcgccagtcctcagtagaggcacgggaccatccagccccacggtccccaacaccacagaaagccacgccgaacttggcaagacaaccccaaccacactcccagaacagcacactgccgccagtgccattccaagagccgtgcaccccgacgaactcagtggacctggcttcctgacgaacacaatcgactcggaccgatg

SEQ ID NO: 8401 - DNA, 203 bp, Artificial sequence
  synthetic
ggcgcgccagtcctacggggggttacaaatctcctgacaggatccagaagaaagcgaagggatgtcactcccaatacacaacccaaatgcaacccaaacctgcactattggacagccttggatgagggtgctgccataggtttagcctggataccatacttcgggccagcagctgagggaatttacaccgactcggaccgatg

SEQ ID NO: 8402 - DNA, 203 bp, Artificial sequence
  synthetic
ggcgcgccagtccttgaaggcataatggagaatcaaaatggattgatctgtggattgaggcagctggccaacgaaacgacacaagctcttcaattgttcttaagggcaactactgagttgcgtacattctctatactaaatcggaaagcaatagacttcttgctccaaagatggggaggaacatgtcacgactcggaccgatg

SEQ ID NO: 8403 - DNA, 203 bp, Artificial sequence
  synthetic
ggcgcgccagtcctaaatctcaacttagcttgctatgtgaaagccacttacggcgagaaggacttggtcaagaccaatcagagtcagttctggaggtatatcaacgcttacacagcgataaaggtgggaatttcgaggcagcactatggcagcagtgggatcggcaatcattgataatgttcataacacgactcggaccgatg

SEQ ID NO: 8404 - DNA, 203 bp, Artificial sequence
  synthetic
ggcgcgccagtcctatgaacaccagaaaaccaggaccagtcaaattctccctcctccatgaatcaaccttgaagacacttgctaaaaaacctgcgacccagatgcaagcactaatcttagaattcaatagttctctcgctatttaactcaactcatcaaaatgctaacttgtgatccttaagctgcaccgactcggaccgatg

SEQ ID NO: 8405 - DNA, 203 bp, Artificial sequence
  synthetic
ggcgcgccagtcctcttagacttttgataagaatactaactattgatgattgtctttgacatgaggataagaacactgcccattagatagatggggttcaccattaatacacaattacccaatcatgttaacagcagttagatccctcaagtatatcaagttcattctaccctttgcattgtcactctcgactcggaccgatg

SEQ ID NO: 8406 - DNA, 203 bp, Artificial sequence
  synthetic
ggcgcgccagtccttattccgcatactccttaaatccccaactaaagaactgtagactaccgaaacatatataccgactaaaatatgacaccactgttacagagtttttgagtgatgtgccggtagcaacattgccagcggattttttagtacctacatttcttaggactctatcaggaaatggttctcgactcggaccgatg

SEQ ID NO: 8407 - DNA, 203 bp, Artificial sequence
  synthetic
ggcgcgccagtcctcaaatgtttcactggtatgatcttgcaattctagcacgtagagggcgactaaatagagggaataatcgctcaacatggtttgcaagtgataatttggtagatatcctaggttatggagattatattttttggaaaataccattatcactactaccagtggatacacaaggcctccgactcggaccgatg

SEQ ID NO: 8408 - DNA, 203 bp, Artificial sequence
  synthetic
ggcgcgccagtcctccacatgcagccaaggactggtatcatgaatcggttttcaaggaggctattcaaggccatacacacatcgtgtccatctctacagcagatgtcttaatcatgtgtaaggacataatcacctgtcgatttaatactttactgattgctgctgtggcaaatctagaggattcagttcgactcggaccgatg

SEQ ID NO: 8409 - DNA, 203 bp, Artificial sequence
  synthetic
ggcgcgccagtcctcattcagattaccctttaccagaaacagtgtctgacctatacaaagcaggagattatttaatctcattgctaggatcagaaggttacaaagtcataaaattccttgagccgttatgcttagcaaagatccaactctgctcaaattacactgagaggaaaggaagattcctcactcgactcggaccgatg

SEQ ID NO: 8410 - DNA, 203 bp, Artificial sequence
  synthetic
ggcgcgccagtcctgcagtttttgaacccaatgttcttggttataacccaccgaataaatttgctacaaaaagggtacctgagcaattccttgaacaggagaatttctcaatagagagtgtcctacattatgctcaacgtctggaatatcttctcccggagtaccggaacttctctttttcactcaagcgactcggaccgatg

SEQ ID NO: 8411 - DNA, 203 bp, Artificial sequence
  synthetic
ggcgcgccagtcctgagaaggagttaaacattggacgagcttttgggaaattgccatatccaacacgcaatgttcaaactctgtgcgaagctttgttagcagatggtttggcgaaagcattcccaagcaatatgatggttgtgacagagcgcgagcaaaaagaaagccttttgcatcaagcgtcttggcgactcggaccgatg

SEQ ID NO: 8412 - DNA, 203 bp, Artificial sequence
  synthetic
ggcgcgccagtcctccacagtgttatatacatgtgagtgattattataaccccccacatggagtctctctcgaaaaccgagaaaatccaccagaaggtccaagctcttaccgtggtcatctaggcgggattgagggacttcaacaaaaactctggacaagcatctcatgtgcacagatttcattagttcgactcggaccgatg

SEQ ID NO: 8413 - DNA, 203 bp, Artificial sequence
  synthetic
ggcgcgccagtcctgaaatcaaaaccggttttaaactgcgatctgcggtaatgggtgacaatcaatgtataactgtactctctgtatttcccctcgaaactgagtctagtgagcaagaattaagttctgaagataatgccgctagagtagctgctagcttagcaaaagtcacaagtgcctgcggcatccgactcggaccgatg

SEQ ID NO: 8414 - DNA, 203 bp, Artificial sequence
  synthetic
ggcgcgccagtccttttttaaaacctgatgaaacttttgttcactcaggtttcatttattttggcaaaaaacaatatttgaatggagtacaattacctcaatcactgaaaactgctactagaattgcacccttgtcagatgctatctttgatgatcttcaagggacactagctagcataggcacggctcgactcggaccgatg

SEQ ID NO: 8415 - DNA, 203 bp, Artificial sequence
  synthetic
ggcgcgccagtccttgtatactagaacaactaaatgtcatctggctcaaaccatatgagcattgccctaaatgtgcaaagtcagcaaaccctaaaggggaaccttttgtttctattgcaattaaaaaacatgtagtaagtgcttggcctgatcaatcacgacttagttggacaattggagatggcatccgactcggaccgatg

SEQ ID NO: 8416 - DNA, 203 bp, Artificial sequence
  synthetic
ggcgcgccagtccttcagcaagagatagtaatattatcttccagaatgtcattaattttgctgttgcactttttgatctacgatttaggaacgtggctacttcttctatacaacatcatcgggctcatcttcatttgtcaaagtgttgcacgcgagaggttccagcccaatatttagtttatacatcacgactcggaccgatg

SEQ ID NO: 8417 - DNA, 203 bp, Artificial sequence
  synthetic
ggcgcgccagtcctctagctaaaactgttatccaatctataatttctgacagcaacaattcatcaacggatccaatcagtagtggggaaacacgatcattcaccactcacttcttgacatatcctaagattggactactatatagttttggtgcactcatcagttattatctaggcaacaccattattcgactcggaccgatg

SEQ ID NO: 8418 - DNA, 203 bp, Artificial sequence
  synthetic
ggcgcgccagtcctagaaccaaaaaattgactcttaacaacttcatatattacctagctactcaaatacataatttacctcatcgctcgttgagaatccttaaacctactttgaaacacgctagtgttatctcgagattaataagtattgactctcacttctcaatttatattggaggaactgctggtcgactcggaccgatg

SEQ ID NO: 8419 - DNA, 203 bp, Artificial sequence
  synthetic
ggcgcgccagtccttataacgaaagaccctctatcagaaagtctgaggggacaacagagattgtaaggcttactcggcagctgagggcaataccagacaccacaatatattgccgcttcacgggaatagtttcttcaatgcactataagctcgatgaagtcctttgggaatttgataattttaagtctcgactcggaccgatg

SEQ ID NO: 8420 - DNA, 203 bp, Artificial sequence
  synthetic
ggcgcgccagtcctggacaaataaaagtcactttaaacaattctgcaagccagattaccgatattactaatccaagttggttggcagaccaaaaatctaggatccctaagcaagtagagattataaccatggatgctgaaacaacagaaaacattaatcggtcaaaattgtacgaagcagtccaacagcgactcggaccgatg

SEQ ID NO: 8421 - DNA, 203 bp, Artificial sequence
  synthetic
ggcgcgccagtcctataaaaggtcgtattacaaaattggtaaatgattaccttaagttctttctaataatacaagccttaaagcacaattgcacatggcaagaggaactaagagctcttccagatctaattagtgtctgcactcgattctatcatactcgaaactgttcatgtgaaaaccggttcctacgactcggaccgatg

SEQ ID NO: 8422 - DNA, 203 bp, Artificial sequence
  synthetic
ggcgcgccagtcctgtacagactttatacttatcacgcatgcaggattcggaaatcaaactaatagatagattgaccggccttcttagtctatgtccaaatggtttttttcggtaaggactcttgacgtacaaactccacatagttatacaatggtaccaggacactatatgtaaattgaccctaagacgactcggaccgatg

SEQ ID NO: 8423 - DNA, 203 bp, Artificial sequence
  synthetic
ggcgcgccagtcctaccaagagcaggcccaaagggccattaggccacatctgctgagcctgcagaacacgcaggacttacttagcagaagagagcgcgtgccgaaaccagccaacaaattgacacagctgctcactctgaccctgaattcataaacaatattaagttgacaacagagatactaatccacgactcggaccgatg

SEQ ID NO: 8424 - DNA, 203 bp, Artificial sequence
  synthetic
ggcgcgccagtcctcgaggaggaaacaacagaagcaaatgctggacaatttctttcatttgctagtctgtttctcccaaaattggttgtcggagaaaaggcctgtctggagaaggttcaacgacaaatccaagtgcacgcagaacaaggtctgattcaatacccgacatcttggcaatcggtgggacacgactcggaccgatg

SEQ ID NO: 8425 - DNA, 203 bp, Artificial sequence
  synthetic
ggcgcgccagtcctcctccaaaaaacagagcacggagttcgcctgcatcccttggcgcgaacagccaaagtcaaaaatgaggtgagctcttttaaggccgctttagcctcactagcacaacatggagaatatgccccgtttgctcgtctgctgaatctatctggggttaataatcttgagcatgggctcgactcggaccgatg

SEQ ID NO: 8426 - DNA, 203 bp, Artificial sequence
  synthetic
ggcgcgccagtcctaccttttgatgccatcctttactaccatatgatgaaagaagagcccatcattttcagcactagtgatgggaaggagtatacatatccagactctcttgaagatgagtatccaccctggctcagcgagaaggaagccatgaacgaagacaatagattcataaccatggatggtcacgactcggaccgatg

SEQ ID NO: 8427 - DNA, 203 bp, Artificial sequence
  synthetic
ggcgcgccagtcctcggttagtactagtatcaacagtactgccagtggtccgaactttccagcaccggatgtaatgatgagtgatacaccctccaactcactccgaccaattgctgatgataacatcgatcatccaagtcatacaccaaccagtgtttcatcagcctttatactcgaggcaatggtgacgactcggaccgatg

SEQ ID NO: 8428 - DNA, 203 bp, Artificial sequence
  synthetic
ggcgcgccagtcctttggtcctgggatccccgatcacccgttgcggcttctaagaataggaaatcaagccttcttgcaagagtttgtgctgcctccagttcaattgccgcagtatttcacttttgacctgacggctctaaagctgatcactcaacctctcccggcagcaacctggacggatgatactccgactcggaccgatg

SEQ ID NO: 8429 - DNA, 203 bp, Artificial sequence
  synthetic
ggcgcgccagtcctcgaccggtcctacaggaatacttcgtcctggaatttcctttcatcccaaactgagacctatcctattgccagggaagaccgggaaaagaggatccagctccgatcttacttctcctgataaaatacaagcaataatgaactttctccaagacctcaaactcgtgccgattgatccgactcggaccgatg

SEQ ID NO: 8430 - DNA, 203 bp, Artificial sequence
  synthetic
ggcgcgccagtccttccaaccagcaacaccatccatacacaggtatcaattgggctgccgcagcatatagacccaatagcaagctgctgtccagaaaatagttccggaaagtaactcaaccatcgcaagcccaatgcagctttcagaaatccgccagcaacccaactccactgtacccccaatattaacgactcggaccgatg

SEQ ID NO: 8431 - DNA, 203 bp, Artificial sequence
  synthetic
ggcgcgccagtcctaggtttctggaacagggccgtgccctgaaggttacgctttccacaaagaaggcgctttcttcctgtatgatcgactggcatcaacaatcatctatcgaagcaccacgttttcagaaggtgttgtggctttcttgatcctccccgaaactaaaaaggactttttccaatcgccaccgactcggaccgatg

SEQ ID NO: 8432 - DNA, 203 bp, Artificial sequence
  synthetic
ggcgcgccagtcctccaggatccaggcagcaaccagaagacgaaggtcactcccaccagcttcgccaacaaccaaacctccaagaaccacgaagacttggttccagaggatcccgcttcagtggttcaagtgcgagacctccagagggaaaacacagtgccgaccccacccccagacacagtccccaccgactcggaccgatg

SEQ ID NO: 8433 - DNA, 203 bp, Artificial sequence
  synthetic
ggcgcgccagtcctgataatgcacaatcaaaatgggctaatttgcgggttgaggcagctagcaaatgagacgactcaagccctacagttattcttgcgtgctaccacggaattgcgcactttctctatattgaatcgaaaagccatcgactttttactccaaagatggggaggaacgtgccacatcttcgactcggaccgatg

SEQ ID NO: 8434 - DNA, 203 bp, Artificial sequence
  synthetic
ggcgcgccagtcctagcttagtctattgtgtgagagtcatctacgacgagaagggctaggacaggatcaatcagaatctgttcttgaagtgtatcagcgcttacatagcgacaaaggcggaaattttgaggcagccctatggcaacaatgggaccgacagtccttgatcatgtttataacagcatttccgactcggaccgatg

SEQ ID NO: 8435 - DNA, 203 bp, Artificial sequence
  synthetic
ggcgcgccagtcctgctacatagcgagaaggctattcagaaagtaaagaaacatgcaaccgtaataaaagcattgcgtcccgtaatcatctttgagacatattgtgtgttcaagtacagcattgccaaacattattttgatagccaagggtcatggtatagtgtaatctcagataaacatctaacacccgactcggaccgatg

SEQ ID NO: 8436 - DNA, 203 bp, Artificial sequence
  synthetic
ggcgcgccagtccttgcagttttcgagcctaatgttcttggatatagtcctccaaacaagttctcaactaagagggttcctgaacagtttcttgaacaagaaaatttctcgattgatagtgttctcacttatgcccagcgcctggattatctacttccacaataccggaatttttctttctcacttaacgactcggaccgatg

SEQ ID NO: 8437 - DNA, 203 bp, Artificial sequence
  synthetic
ggcgcgccagtcctctgtagtgcaattgactttgtactcaacccaagcggattgaatgtccctgggtcacaagacctaacatcttttttacgtcagatagtgcgtagaacaatcacattgagtgcaaaaaataagctaataaacacattgtttcactcctcagccgatttagaagatgagatggtatgcgactcggaccgatg

SEQ ID NO: 8438 - DNA, 203 bp, Artificial sequence
  synthetic
ggcgcgccagtcctcctgagtgtgcaggagatccttcaaatgacgccttctcattattcagggaacatcgtacatcggtataatgaccaatacagccctcattctttcatggcaaatagaatgagtaattccgcgacgagattggtggtgtcgacaaatactctcggggagttctcaggtggggggcacgactcggaccgatg

SEQ ID NO: 8439 - DNA, 203 bp, Artificial sequence
  synthetic
ggcgcgccagtccttaggaccaaaaagctagacctcagtcattttatgtattacttaacaactcaaatccataatttgccacatcgctcgttgaggatacttaagcccacctttaaacatgttagtgtgatatcaagactaatgagtattgatcctcatttttcaatctacatcgggggtacggcaggcgactcggaccgatg

SEQ ID NO: 8440 - DNA, 203 bp, Artificial sequence
  synthetic
ggcgcgccagtccttgatcgagggctttcggatgctaccagactattccttcgagtggccatttcttccttccttcaatttatcaaaaaatggatcgtggaatacaagacagctattcctctgtgggttatataccctttggagggacaaaatccagatccaattaatagctttctacatctgattatcgactcggaccgatg

SEQ ID NO: 8441 - DNA, 203 bp, Artificial sequence
  synthetic
ggcgcgccagtcctagccttactgcaaaatgaatcccctcaaaacaacatccaattccaagaagacagaaataatcaacagttgtccgataatctagtttacatgtgcaagagcactgccagtaatttcttccatgcatcacttgcctattggaggagccggcacaaaggacggcccaaaaatcgatccgactcggaccgatg

SEQ ID NO: 8442 - DNA, 203 bp, Artificial sequence
  synthetic
ggcgcgccagtcctaattcaaactctttacttaacccgtatgcaagactcagaagcaaaattaatggagagattaaccgggtttctaggattgtatcctaatggtattaacgcttaagatccccttagaggcatcgcaatatgactccaaacattaaatgatattgctgtcaatacatctacctgacccgactcggaccgatg

SEQ ID NO: 8443 - DNA, 203 bp, Artificial sequence
  synthetic
ggcgcgccagtcctgagagcaaggtttattataaaaaacctatacacatgactgcaatgcgtaatttataccgaaacacagtgagggctgcacatgcaggttcctgttgagctttaaaagatcatgcaatataaaatgatatttgtatactaatcatgttagtactaactaacagtactcactgcatacgactcggaccgatg

SEQ ID NO: 8444 - DNA, 203 bp, Artificial sequence
  synthetic
ggcgcgccagtcctcgtcatagaggacgatgccaagttccttctggagaacggctctctcccgtttggctccacccttgccatggcgcaccgctcccgcccctttcctgctgaccccaaaaccgaaacccaaatcctaaaccatctccactttgctatcaccactctccaccgtgaccccaactacaccgactcggaccgatg

SEQ ID NO: 8445 - DNA, 203 bp, Artificial sequence
  synthetic
ggcgcgccagtcctccccccctgcacaacccgcctccccgtccgcattcacaaagctgcctgggccttccacgcgttcggctaccgctgcacgctggttggttttgaaccctccactccgtggactctcaaagaagtgaaacaggttctacctgagacacttttccaggaagaatgccatgctttccccgactcggaccgatg

SEQ ID NO: 8446 - DNA, 203 bp, Artificial sequence
  synthetic
ggcgcgccagtcctcctcccaagccccaccatccaaggcttcacctacctcactcccgaccctatcttcgctgatgtcctacgccgcgtccgaagtggggacttcacagtcttccaatcggacaacgctaaggtttccggcgtcgatgatgactacaccctcatctactcctttggcccccacaccgccgactcggaccgatg

SEQ ID NO: 8447 - DNA, 203 bp, Artificial sequence
  synthetic
ggcgcgccagtcctatccactaacactggatcgccagccccccagaatcccaatgggccttccaactcctcccgccccaacaaaccccgtatgtccacccttggtcgtgtcaacgatcagctcgcccaagagcgcatccgcactcttcgggccggctccattggcatggacatcccctcccaagcccccgactcggaccgatg

SEQ ID NO: 8448 - DNA, 203 bp, Artificial sequence
  synthetic
ggcgcgccagtcctcccctgcaccaaacatgctaactttggctctggaacccacctcaacttcccttactccatcctcaattcccaacctggcactgctatctccaacgctttcagcacccattcctattggcgcggagacgccctcattcaggttaccgtcaacagttcaccacaagccagtggtgtcgactcggaccgatg

SEQ ID NO: 8449 - DNA, 203 bp, Artificial sequence
  synthetic
ggcgcgccagtcctgctgcttgttgctgcaatacctgaaggcgtcgatgtgttgacccctcaatccgcaacccactaccccttcaccctgctgaacctcgctaccaccaattgctgtgcccttctccttcccttcctgtcccctaatcccgtggacccctgcggcctccactttcagtggaacgtcgtcgactcggaccgatg

SEQ ID NO: 8450 - DNA, 203 bp, Artificial sequence
  synthetic
ggcgcgccagtcctagccctccccatcaccccccttcgcgtccctgccggaaccccctctttcctggacgtctcgtgcatgatggctcctcaggactctgagttctttgcgatgaagacccctgcccaacaaggtgtcaaagtccgcgaaacctcagctactgggaacgcctatgtcacgagctgctccgactcggaccgatg

SEQ ID NO: 8451 - DNA, 203 bp, Artificial sequence
  synthetic
ggcgcgccagtcctccccatctctctcaccaccccgatctctgggaccctaacccccctaggccaaacccttacccacttctcccaatggcgaggaaccctggatattgatctggtcttctccggatcacagcagaacactggccgcatcctggtgtccaccacacctccagtggctggatgccccgccgactcggaccgatg

SEQ ID NO: 8452 - DNA, 203 bp, Artificial sequence
  synthetic
ggcgcgccagtcctgaccatggaagctgctatgcgcaacacctgctacatctgggacctcaccacctccgcctccatctccatcaccatcccctacttttcctccaccccatggaaaaccctctcccgctccacttccctatccctctcggtcaaccagctggctggttggctggggctctatgtctacgactcggaccgatg

SEQ ID NO: 8453 - DNA, 203 bp, Artificial sequence
  synthetic
ggcgcgccagtcctctcccccctttcctgccctgctttcaaccctgatcaggcaaccattgccgtgttcatccgcggtggtgccgatttcgaggccagaattccgtctggtctcgcgaccgccaccatccagggtgatgaggaggtccccgcctcctcaaacgacggtctgaacaccttggagctcagcgactcggaccgatg

SEQ ID NO: 8454 - DNA, 203 bp, Artificial sequence
  synthetic
ggcgcgccagtcctcctctccggcttcccctccgctggctggagggaaatgacggaggatcgtgctcacgtcaccctctccgttcccttctctgctgaaaatcccgtgattgcctcccgctatctaggtttcccctcttacgaatcatcccaatcccttgccacttccctctactcctttggcaccctcgactcggaccgatg

SEQ ID NO: 8455 - DNA, 203 bp, Artificial sequence
  synthetic
ggcgcgccagtcctgatcctgcgcacttcacctgaaccgtgcttcgttatccgcaaccagcggctaacgtatgtacactgggccctccgctccggaaacaagcaggtctcaatccagagatctggcttgggcgggcttacgcccgtcatcggctatgaggacctagaaggtgaggtctacgcagaggtcgactcggaccgatg

SEQ ID NO: 8456 - DNA, 203 bp, Artificial sequence
  synthetic
ggcgcgccagtcctcccccctcacatcttcgccctggctgaagcgcaagttggaagcgagtacccctactccgcaaccaacaactgcaccacctgggtggagaccctgaccaacctctccctccccaacaccggcaattcgcttgccctcggattgggcgccatcggcgtgggagccgctgctgccttcgactcggaccgatg

SEQ ID NO: 8457 - DNA, 203 bp, Artificial sequence
  synthetic
ggcgcgccagtcctgttcggtagccccacccctctctccgttgccggtctccttgtcgtgatcgcctccgactttgctcctgccgtagtccagtatttcaagaacgtcgggaatccactcgccgctctctactactggattgcacgcaagctaggtctggaaagcgtgaccgccaaggacgccgtcgacgactcggaccgatg

SEQ ID NO: 8458 - DNA, 203 bp, Artificial sequence
  synthetic
ggcgcgccagtccttgttcgcgctaagagtgaaccctccgcccaactggcccagagtcacgacaccatcatggctctgttccaggactccatctccgccacctcggccccctccctggaccttcctgctgcccgttccaacctcgccaaagcccaatccctgcttcccctggccaccgcagcaaaatccgactcggaccgatg

SEQ ID NO: 8459 - DNA, 203 bp, Artificial sequence
  synthetic
ggcgcgccagtcctggtgaagaattccgggggcattagcaatgccctggccgcgctgatcccgggcgtcaagccgcttgcacgccagcaagctggtgacgaagtccccatcagcaaggcccccacctgcttcaccaacccttcttacattcccggatctactgaagatctgagttgggacccgaccgacgactcggaccgatg

SEQ ID NO: 8460 - DNA, 203 bp, Artificial sequence
  synthetic
ggcgcgccagtcctgatcgctgccgtctatgctccaaagatgccccaggtgcgtgacatccgtcgctttatccgggctccaaggatgcatcatgtcggtaccgtgattgccaactccacctctggccctgtgttcatgttggccaacaacgtgaagcacggtgacacaccctaccctgaccttaccggcgactcggaccgatg

SEQ ID NO: 8461 - DNA, 203 bp, Artificial sequence
  synthetic
ggcgcgccagtcctcgcattctcgaagcagaacaggggtgacctcgacaagccctggcccaccctccccgttgctgttgatctttacttttcccagtgtgatttccccaagctacgcatgctgtcgatggacgaggctatcaacggaactccactccttgacggtctcgatatgaagcagtctgctggcgactcggaccgatg

SEQ ID NO: 8462 - DNA, 203 bp, Artificial sequence
  synthetic
ggcgcgccagtcctggctggcaaaactcgtctgatcgaggctgcgcccatccatgcgatcatcgctggacgcatgctgctcggaggtctcttcgaacacatgcacgcgcgccctggccagtacgggtctgctgtcggctgtgatcccgactaccattggactccgttcttccactcctttgaccggttcgactcggaccgatg

SEQ ID NO: 8463 - DNA, 203 bp, Artificial sequence
  synthetic
ggcgcgccagtccttgcagaagtttgggctctggactactcctgtttcgactctactctcccctcctgcgctttcgacctaatcgctgctaaactctctcaaatcatcactcctctccccggcattgccgaggatgccatcgtgaagtacatccggtccattagcgtgtccaagcacgtttttggcgacgactcggaccgatg

SEQ ID NO: 8464 - DNA, 203 bp, Artificial sequence
  synthetic
ggcgcgccagtccttcgggcgtatctgatgaccggtggcaacccctctggctgtgttggaacctcaatcctcaactccatgattaataactctgtcctgatctctgctttcctcacccacccccagttcaaccctgcggagatgcgcatcctcacctacggtgacgacgtgctctacgccaccacccccgactcggaccgatg

SEQ ID NO: 8465 - DNA, 203 bp, Artificial sequence
  synthetic
ggcgcgccagtcctcaccatccacccttccttcgtcaaatccttcttcgatcagaacaccaccctaatcgtgacccctgccactaaggccggtgacttcccggatcactccacgatctgggacgttaccttcctgaagcgctggttcgtccccgacgaagagcgcccgtggtacatccaccccgtgatcgactcggaccgatg

SEQ ID NO: 8466 - DNA, 203 bp, Artificial sequence
  synthetic
ggcgcgccagtcctctactcctatctccaccaccgctggctccagctggtggtctcttaagtctgtgccttccaagcgtgttggaagtaaagccacgccggctcgcccccgtcatagggcaacccccgagtaccggtggtctcgggtctgctgctaaacccagtgggctcgttgccgtcccccattgccgactcggaccgatg

SEQ ID NO: 8467 - DNA, 203 bp, Artificial sequence
  synthetic
ggcgcgccagtcctgtaccgcaaggatagcaaggtatgaacacttgtggacgaaatggtaagtgatcaattcactttcatggccggaaggtcacgtggcaatcatgccacccaggtaccctcctctgggaggatctgagggtgggctaagcagaccctgccatgtggctgaacttttcccttattgttcgactcggaccgatg

SEQ ID NO: 8468 - DNA, 203 bp, Artificial sequence
  synthetic
ggcgcgccagtcctacagtgccagtgaattcaaccttttctggagaggttgtggctcgaagttctcggggttctaatcccccccctcccgctccgaaccacaaagagaagaaacccaaagagggtcgtagcaaggcctgggatttcgtgaagaagcttctcccggatccttcaaatgaggtctcgcttcgactcggaccgatg

SEQ ID NO: 8469 - DNA, 203 bp, Artificial sequence
  synthetic
ggcgcgccagtcctgttccccgcctcctggcgcagtccgatgaccagatcacaaatctggaaaccggaattgcgacagaatttctcccagcccaaattcccatgggcaaccttgatcaatctgaactatctgatttgtttgctatctacaggcctttctggaccggtgaggatttctctcaatctgtccgactcggaccgatg

SEQ ID NO: 8470 - DNA, 203 bp, Artificial sequence
  synthetic
ggcgcgccagtcctgctgttgcttacattccccccggtggccctatgggtcccgacctgaaacaggcactaaatttccccctggttcagattgatatttccagctatactatcaaagaaattcccataaacattcctcaatcctgtgtgactgaagcaatcccgaccagctattctggttttgctgatcgactcggaccgatg

SEQ ID NO: 8471 - DNA, 203 bp, Artificial sequence
  synthetic
ggcgcgccagtcctcttacccgtggaacctggggtcgcttatctggctccgggtggggtaccctggtggtagctgctttaccccgtggcggtaaatccctgaggatggcctggtggatggacgcgcgtattactcaagcccgcgtttacatgccccgagttattggtcgcgtaggcggcctgcagagtcgactcggaccgatg

SEQ ID NO: 8472 - DNA, 203 bp, Artificial sequence
  synthetic
ggcgcgccagtcctctattgaatattgatggttgctcccctcaaacacagttaggagtccttgattttccaccaaccgggcagtgtgttggtcagggtatcattgagaacacgagaattgcagctgagtcggtcagttatgcttcaatgaaccttgagagagcgttgacccaggaacggttagataagcgactcggaccgatg

SEQ ID NO: 8473 - DNA, 203 bp, Artificial sequence
  synthetic
ggcgcgccagtcctattttggtgcttttggtgtcaaattttaatttgtctactttgactggagttttccttatcctgagtgcagattttattactaaagtcacctttgaagccttcaaggacaatcccttccagttcattggcaaatggatcagtgagaagctggacctgggagttgacgtggatattcgactcggaccgatg

SEQ ID NO: 8474 - DNA, 203 bp, Artificial sequence
  synthetic
ggcgcgccagtcctgaaccaattctctacgtcaaggaagaagaagaccctgaggaaggtcctagtgggcaggcttttaagccgaaagatttcaatgattgggccaactttttcaaaaatattgattgggctgtgactcgattggtagttttaattgagaagttgatcaaacaaattcaggccgcaaagcgactcggaccgatg

SEQ ID NO: 8475 - DNA, 203 bp, Artificial sequence
  synthetic
ggcgcgccagtcctactctcctgaaacaagctctcagcaattacacccaggcacaaaattctttgcagcgcactatttttgctgtacgcccagagcctgttgtggtttacatctacggcggtcctgggtctggtaaatctgtcctggctggcctcttagcgcgtgccatttctaaggctctttctggccgactcggaccgatg

SEQ ID NO: 8476 - DNA, 203 bp, Artificial sequence
  synthetic
ggcgcgccagtcctgaggagaagggaatgtattataccagcaaagtgataattgtaactgctaattttaatcttccaaattatgcttctgctcgtgagcccaaagccctggagcgtcggctgcatttcaagatgtttatgggtggttcccttaatgtagactttgcttgtgcacctgatggcattccacgactcggaccgatg

SEQ ID NO: 8477 - DNA, 203 bp, Artificial sequence
  synthetic
ggcgcgccagtcctttggaacccgctgttttgcgccggagtgatgggcgtttgttagatggtgttgtgttagatgaggcaatattttctaagcatgataagggtgacatgactgaaccctggaagaatttaccccaagctttttctgtgtattttaatcagttccagaataaggagattaggactttacgactcggaccgatg

SEQ ID NO: 8478 - DNA, 203 bp, Artificial sequence
  synthetic
ggcgcgccagtcctgaaaatccccaggaatttatttacaccacattcttgaaggatgagctgaggaaagttgagaaagttgagaatggactgacccgggttattgaggctgcccccctgccagtaattctggctggacgcatgcttctcggaggtctgttcgaggagatgcagtcccaacctggtaagcgactcggaccgatg

SEQ ID NO: 8479 - DNA, 203 bp, Artificial sequence
  synthetic
ggcgcgccagtcctattagcaagtatatatccagcattgcatcttcccgccatgtgtatggaaacaagatttatctgatgcttggtggcatgccttctggctgtgtaggcacttcaatcctgaacacaatttgtaataactgctttgtgctttctgcccttttagagcataaggattttgacataaatcgactcggaccgatg

SEQ ID NO: 8480 - DNA, 203 bp, Artificial sequence
  synthetic
ggcgcgccagtcctgaaagggggcccggcggggcaacacccgtcggtccctctttccgtccaagccgcggacgttaaactgtggcacggttgtgcctaggtgcaaccctgctactaatggcggtacccctgcccttagtatgcatgtttgtatgaatggaatctgtagtgatgccctgctttggggtccgactcggaccgatg

SEQ ID NO: 8481 - DNA, 203 bp, Artificial sequence
  synthetic
ggcgcgccagtccttaactcacttgagactaaccagggtgcaaatgggcttactgcgacagttccggtcaactcaaccttttcgggtgaggttactgctagggctcctcgcaatcctccagccctgccccaaccgccgccggcccataaggagaagaaaccgaagactactgatgggaaaaagccttgcgactcggaccgatg

SEQ ID NO: 8482 - DNA, 203 bp, Artificial sequence
  synthetic
ggcgcgccagtcctattagccttcacaaaggcttttcaaaccaacgcctactacagatgtggctgggaagtgttaatggaagtcaatggcacattctttcatcagggggctatagctgtggttgcaattccagaggttcagacaactgctgcgttcactggtagtctaggccgcactcttgcgtaccccgactcggaccgatg

SEQ ID NO: 8483 - DNA, 203 bp, Artificial sequence
  synthetic
ggcgcgccagtcctgcatgctattctcaacatcagaacttctaaccaagccagactgctcttgccatatgcttctgccaatcgcttcgacccgaccactggtgctgttttcaagagtgattcagggcttcctgggcttggcaccctttcttaccaccaacaatgggtgctagtcgtgtgggttatttccgactcggaccgatg

SEQ ID NO: 8484 - DNA, 203 bp, Artificial sequence
  synthetic
ggcgcgccagtcctaccactgcaagtgctgtcaaatgaatccaatcttactgtgaatttgctggtccgtcctctccaagctgaattcatgggtcctcactatgcttatggacaaccctttgttgtcagggaggttgtgggttcttctggatttgctaatacccaacccatgcaggagtttaatgcaatcgactcggaccgatg

SEQ ID NO: 8485 - DNA, 203 bp, Artificial sequence
  synthetic
ggcgcgccagtccttaccatttgggacatcggtctaaattcaactctgtcctttgtgattcctttttgcagctcaacttcttggaaatccattggtgcttcttcaggccttgaattctcacaggcgcttggcatgctgtatatagctgtctataaccctctggtaacgccatatggggcacccaatgccgactcggaccgatg

SEQ ID NO: 8486 - DNA, 203 bp, Artificial sequence
  synthetic
ggcgcgccagtcctctctcttgtaggggtgacccttgttacaacaagagctgagttcctggatatgttattagatagtgaaggctactccgcccaaacacagataggagtccttgattacccccccagtgcccagtgcacgggacaggggatcattgagaataccagaattgcagctgagtctgttagcgactcggaccgatg

SEQ ID NO: 8487 - DNA, 203 bp, Artificial sequence
  synthetic
ggcgcgccagtcctttatgcctccatgaacctggagagagtgctgactcaagagaagctggaccgcatctctgagatttctaaatctttcatgctggccagcgagaatgtccaccaggcagttgagggaatcaacaccgccctcaatgcaattactcccatcttatccacctccccgcttattgaagtcgactcggaccgatg

SEQ ID NO: 8488 - DNA, 203 bp, Artificial sequence
  synthetic
ggcgcgccagtccttggtttgctggctcgtgcaatttcaaaggcactgactgggaaggtcgatgacatctatgcaccctcatcatttggaactgagcatttcgatggttaccaccaacagacggtccatatgattgatgatcttggtcaagctgtggatgggtcagactgggcaaatttctgcaatatcgactcggaccgatg

SEQ ID NO: 8489 - DNA, 203 bp, Artificial sequence
  synthetic
ggcgcgccagtcctattaaatgtggattttgcttgtgctcctgatggcacacctatgagacatttcaaatctggatgccctcttctgaggaactcggcaggattgctgaaagattctgggtccattctgccctgcaagttcaaggatgctgatgatttggttgacttggtggtggctgaggtgcgaagcgactcggaccgatg

SEQ ID NO: 8490 - DNA, 203 bp, Artificial sequence
  synthetic
ggcgcgccagtccttacttcttttaaaattgggaatgttatgtatgttaaggatgatgtgaagatgacccgcattggcgaagctgttctcttctacctgcctaatgtgccacaagggaaaaacctcctcaggtttgtcaaggctcgctcaattaagggagtcaaggctggcttcctggctggcaacatcgactcggaccgatg

SEQ ID NO: 8491 - DNA, 203 bp, Artificial sequence
  synthetic
ggcgcgccagtcctggatggcgtaccaaacatggtgcgagtgtgggagttaaccacgttccgtggaattgaaacccaggatggaatcttcaatgagcattgcttgggctatcgctgtgcttcttatgcaggcctgtgtggggctcctttggtcctggaggatcctgctgactatagaattgctggaatcgactcggaccgatg

SEQ ID NO: 8492 - DNA, 203 bp, Artificial sequence
  synthetic
ggcgcgccagtccttaaggaaattaggaccctctctcttcatgaggcaattaatgggactcccctgctggatggtattgacatgaatcagtctccaggctatccatatataacacaggggcggtcaaggcggtccctgtttacctggaatgaagaagggttttgggagcccactgatgaactgaaggtcgactcggaccgatg

SEQ ID NO: 8493 - DNA, 203 bp, Artificial sequence
  synthetic
ggcgcgccagtccttcctgattttgatttggactcttactatgtgatagcatatggtgatgatgtagtttatgcaactaatcctccaattagtccaagctttgtgaagaaattttatgatgagcatacccccctaaaagttactcctgctgataaaggctcaaccttcaatgaaaactctacaatattcgactcggaccgatg

SEQ ID NO: 8494 - DNA, 203 bp, Artificial sequence
  synthetic
ggcgcgccagtcctcttctttgaggatatgatggagcgcgctccaacattagatggagttcgcaaatctgctgcttctgtatatgattctgttggaactggtatgtgtattgctttatctggtattttgtcatttgttgctatagtatgtttaggtattacagatttgtcaactgcttctttcaataacgactcggaccgatg

SEQ ID NO: 8495 - DNA, 203 bp, Artificial sequence
  synthetic
ggcgcgccagtccttgatgtcaaaggcaagagtgacacatatattgcaccttcatttgtcattgctacttctaatgttgaccctttcacttttgagcctaagtctattcattctgttgatgcctttgtgcgtagattaaatatagtagtggaagtagatatagatgataattttgctaagtatgttcacgactcggaccgatg

SEQ ID NO: 8496 - DNA, 203 bp, Artificial sequence
  synthetic
ggcgcgccagtcctccgggtattctctacaacctggcttggtccttatgataaccctattgctgcttgtgcttatttaaatgctacattgcctgcccgcttttgtacttataatgctcaatttgctgattgttatgtgtctgatgctattattgatgattgcctacaccgttattattctgaagaggacgactcggaccgatg

SEQ ID NO: 8497 - DNA, 203 bp, Artificial sequence
  synthetic
ggcgcgccagtcctgaaatatgtggtgcaagatgaaggcaatgatgttgtgactatgttagaatcccatcaggattatgccattaagaagcctttagtggaatctcatcaagatgctaaattaattaaacctatcgtagagtcacaccaggaggttaaattaattaagccacttgtcgagtcccaccacgactcggaccgatg

SEQ ID NO: 8498 - DNA, 203 bp, Artificial sequence
  synthetic
ggcgcgccagtcctgtcaggttatagtatagattggacagatatcattgctgagtcatcaaatgatcataatgcccaggatattagtaagtcaattttgtctaaaaatttagttaggattatgaagcctgattcttcttactacacacatggattgtttgttaaaggacgaatgttgttgatgcctaacgactcggaccgatg

SEQ ID NO: 8499 - DNA, 203 bp, Artificial sequence
  synthetic
ggcgcgccagtcctgaaggaacacgtcgagctcattatcagcaaagctcgtaagggcattgttgatactgagctcggggtgttcacggcgaccctgaaggatgagcggagacctttggctaaagtggaggcgaacaaaacgcgagtgttcgctgctaccaatcaggctttagcattagctcagcgtagcgactcggaccgatg

SEQ ID NO: 8500 - DNA, 203 bp, Artificial sequence
  synthetic
ggcgcgccagtcctgtattttcttagttatcttgaacatgtaatgcttaatcgcgtagacaatgagataggtttgggtgtgaatgtgtattcgtatgattggtctagaatagtcaataaattgcatcatgtaggttctaaggttattgctggggatttttccaattttgatggttcactcaactcccacgactcggaccgatg

SEQ ID NO: 8501 - DNA, 203 bp, Artificial sequence
  synthetic
ggcgcgccagtcctaaattgcatgtataatatgttaatatttagatatgtttatcttcttgctcacgaggaaaatggctttcccttgtctcttgctaattttagtgggaatctcgctgctgtcttctatggcgatgattctctttgttgtgtctccgataaagtgtgtgagtggtttaatcagcactccgactcggaccgatg

SEQ ID NO: 8502 - DNA, 203 bp, Artificial sequence
  synthetic
ggcgcgccagtcctgataacacggcttatggctgtcaccggccatgtatatactgatgaaaccaagagtggttcaccaccaccgtatcgcgatatttctgaggtgacattccttaagagagaattcgtgaaacgcgactcattatggatcgctccactatctaaaaacacaatagaagatatgtgtatcgactcggaccgatg

SEQ ID NO: 8503 - DNA, 203 bp, Artificial sequence
  synthetic
ggcgcgccagtccttggattccttcttgctcaacaggaacgcggaggagctcatgattccgagcttctaagcttacttctttcagagtagttagggaccgttgacgacagctccacgtatatgctcattacgcccactgcggaaacaatgtgatgctgtggtgtatacgtggtcaagctagcggcgtgcgactcggaccgatg

SEQ ID NO: 8504 - DNA, 203 bp, Artificial sequence
  synthetic
ggcgcgccagtcctaacacgcgtcaggagatctccccagccaccatgggctaggttggcagccaggttttaacttggtggggagtaaaatagcctgctccaattcaaaattctgatacttctataatggattcttccgttactaacactggtggtttgatgccctcggctactatttccaattcagagcgactcggaccgatg

SEQ ID NO: 8505 - DNA, 203 bp, Artificial sequence
  synthetic
ggcgcgccagtcctacccttacagaacaacaacttatcacaaattatgaacagccatcaattagacaaatttctttacctgatgacatagttaaaggttcctcttttattgcctccaaattagctaatattgcttatatgcgttgcgattatgagttgtatcttcgggtccagggttctccatttcttcgactcggaccgatg

SEQ ID NO: 8506 - DNA, 203 bp, Artificial sequence
  synthetic
ggcgcgccagtcctcagggtcttctcttgctttggaataagatgaatgcggatcaaacttctaagattcgttcctcaattactgaacaccttcgctctattacttcttttcctggtgtcacacttaatatgcaatccgactcaagatctgttaagctagtaattccttatactagtgaatttcaagttcgactcggaccgatg

SEQ ID NO: 8507 - DNA, 203 bp, Artificial sequence
  synthetic
ggcgcgccagtccttctaaggatcgtgatctttctaaagtttctccctatgagaatattcctgctaagggtttcacacatggtgttggttttgattatggtgtatccactttcgcttttcctgataacgctattgatcctactattgctaatcctgagtccattgatgagatgtctattcaatatttgcgactcggaccgatg

SEQ ID NO: 8508 - DNA, 203 bp, Artificial sequence
  synthetic
ggcgcgccagtcctgcttctcggccgtatatgttggataggtataccatcaaaggtggaaatactccctcgccgtcaggtactgttgttgctgatatccctattagtcctgtcaattactctctctatggtagtattatccgtgattatagaaccatttttggtgctcctgtcagtctagctgttgcgcgactcggaccgatg

SEQ ID NO: 8509 - DNA, 203 bp, Artificial sequence
  synthetic
ggcgcgccagtcctatggcttcatggtggcgagctaaaattcaccttaatcttcagttcgcaaagacacaataccaccagtgtcgtttacttgttcagtatcttccctatggttctgatgttcaatctcttgaaaatgttctttcccaaattattgatatatcccatgttgatgagagtggtattgatcgactcggaccgatg

SEQ ID NO: 8510 - DNA, 203 bp, Artificial sequence
  synthetic
ggcgcgccagtcctttatgctttccttctattttcacaaataaatggatgcgttcttatgatcctgccactgaaggctacactgctgggtgcgcgcctggaagaattcttatttctgtgcttaatcctctaatttctgctagtactgttaatgatgacattgttatgatgccatggcttacttgggaacgactcggaccgatg

SEQ ID NO: 8511 - DNA, 203 bp, Artificial sequence
  synthetic
ggcgcgccagtccttcttttcagatttccgctttgcgtcatggtgataaggtcacgataacagaggatcctactaagataaatgttagtggtgttagttttctcactggcaccaattcttggaaagctagtttgaaggatagttctggaactttgttaggacgcttagagtatgatggtacttcttttcgactcggaccgatg

SEQ ID NO: 8512 - DNA, 203 bp, Artificial sequence
  synthetic
ggcgcgccagtccttctagtgattcacctgctagcttaattcctggtaagtataatgtggagcttgatcctgctgataattctgccgtagtcaccattgttgctaacaattcatttggaactgcttctcttgatacacatggtggtgggatggattatgctaaatcagattcttcttctttagttacacgactcggaccgatg

SEQ ID NO: 8513 - DNA, 203 bp, Artificial sequence
  synthetic
ggcgcgccagtcctgcttaaatctcttaccttaagagtccactctctgagtggttaacccgtcgcgagacgcgtgggttgagttgtcatgacatttgtcagttgtgacgagtgtaactcaacagtttttcctaaccacgcgtcgcgtggcaggttttttaatctgagagttacattcctacccactaacgactcggaccgatg

SEQ ID NO: 8514 - DNA, 203 bp, Artificial sequence
  synthetic
ggcgcgccagtcctctaaggttcctgacaatagctttatccggctatctagttacctaggtttacttttattagttgaccttaggagtgtaaccagtgtacacttgcttaccttaattggttggctaactagtcgctatgcattttcgtgcatatcggcggattcctaaaaaaaaaaaaaaaaaaaaacgactcggaccgatg

SEQ ID NO: 8515 - DNA, 203 bp, Artificial sequence
  synthetic
ggcgcgccagtcctgcctgatagggtgccggcgggcgcggtacgtgtggtatagtccgctgtcttggggtatggcgtctactcggttttgttgtcgttttggaatgtcccatgtcggagatgtcgttaccggtgtttgctttacttgtgcacgaataagaaaacagagtttggagttttggaagttaacgactcggaccgatg

SEQ ID NO: 8516 - DNA, 203 bp, Artificial sequence
  synthetic
ggcgcgccagtcctcatgagcaggctgcgttcttagagacacagtatcatcagttgacactatatccgcaccaaataattaacttgaggacaaccaatgcagccacgattgtggtcccgtataccaacatagcaccggcctcgttttacacgtgtcacaacacgtggaggttgatcataattcctcttcgactcggaccgatg

SEQ ID NO: 8517 - DNA, 203 bp, Artificial sequence
  synthetic
ggcgcgccagtcctcctgcatttcccatctggacaccatcagaggggttcccactaccaggtaggatgacaaatttgattagtgtggcccgtataccaacatttttgcagggtacaggaggaaacacttatggtttttcggtgcagaacgcaatacctgctgacaacaccacattgtatagtttggatcgactcggaccgatg

SEQ ID NO: 8518 - DNA, 203 bp, Artificial sequence
  synthetic
ggcgcgccagtcctgaagaggccatgctaggtacaaacatcatctgggattttgggttgcaatcaacgtgtacgtttgtgatcccgtatatttccatatcatctcgccggtttgcgaacacaacaggcaccattttctcatatgatggttatgtgaccgtttggtaccaaactgcggttgtatttgcgcgactcggaccgatg

SEQ ID NO: 8519 - DNA, 203 bp, Artificial sequence
  synthetic
ggcgcgccagtcctgttgctcgccttgagctcaacgaaatgatctaccagcagcgtattgctgccatcctggaaagagcagtggatgatagtgatgatgaaggttctgagagtgatgctagtgacagtggatactattcgctggatagtatggggctgagtgatttaaccagtgattcagagtttgggcgactcggaccgatg

SEQ ID NO: 8520 - DNA, 203 bp, Artificial sequence
  synthetic
ggcgcgccagtcctaagcaagtgttaggtattgtcacaaaattagttgccgtagtcacagccatcacacgatctggtggcgaccctgtcatcctggcctcgatgggtgctatgttatcagtagacctcatgaatgcgtgtccttttgaatgggcaaaacaacaagtggcccaactgatggaggtggagcgactcggaccgatg

SEQ ID NO: 8521 - DNA, 203 bp, Artificial sequence
  synthetic
ggcgcgccagtcctaaacacctgtcaaactccaagaagagaccgcatgaaccaattggactgcttattcatggggctccaggcacagggaagagtcttgcgaccaaactaattgggacaaagttagcaaagaatttaggaaacatggaaccttattttatgccacctgacccgaagtattttgatggccgactcggaccgatg

SEQ ID NO: 8522 - DNA, 203 bp, Artificial sequence
  synthetic
ggcgcgccagtccttatgctggacagcctgtggtggttatggacgatctaggacaaaacccggatggtgaggacatgaaactactctgtcagatgatatcgtgtgcagagttctacaccccccaagctgatctgcctgacaaagggaaaccttttacatcgtcctttgttcttgcttcaaccaacaaccgactcggaccgatg

SEQ ID NO: 8523 - DNA, 203 bp, Artificial sequence
  synthetic
ggcgcgccagtcctatgcttgtcaccttacttaccacactttattttatctggaaatcattacctgcaaacccacagggtgcatatgatggcattatccaaaagaacctgagagtcccagaaaaacggaagattgaagtgcaaggccctgaccctgacacccaatatgccctgtcgctgatgaaacaccgactcggaccgatg

SEQ ID NO: 8524 - DNA, 203 bp, Artificial sequence
  synthetic
ggcgcgccagtcctggacaggaaccagaggaacttgagatcgtgatagaacagtacgctgcccaactccagcccctgttgcccaaggatgtgcatgaacccatgactttgcaacaggtagtggagggatatgggcgtttagatggattagacctgaatacatctcctggttatccgtactgtacgcagcgactcggaccgatg

SEQ ID NO: 8525 - DNA, 203 bp, Artificial sequence
  synthetic
ggcgcgccagtcctccaatgtggtttaaggccctggacaagctactgcaacgcttaggttttgacacggaagatctgatcataggcttgtgtaattcaacacacatttatgagaaccaactctatagaaccgttggtggcatgccatcaggttgttcagggacatcaatcttcaatactctcatcaaccgactcggaccgatg

SEQ ID NO: 8526 - DNA, 203 bp, Artificial sequence
  synthetic
ggcgcgccagtcctttgtgccatctcatctggcacaacggtgaagagtcttataacaagtttattgccctggttcgtagcgagccagtggggagagcactacaactcccgccatataaacttttggagagagagtggttagataacttttattgacccggggccacgccgagtaggatcgagggtacacgactcggaccgatg

SEQ ID NO: 8527 - DNA, 203 bp, Artificial sequence
  synthetic
ggcgcgccagtcctcaagcgtgacattggacagatgctcgacggactgaataagcggaaggcgaaacgtcggggggggagttgctcttggatcattatgttactcccgatagttgctgggctgaagcttggaaactataatggtagagttttggccactttaaataagactgatgtatcagacttgctcgactcggaccgatg

SEQ ID NO: 8528 - DNA, 203 bp, Artificial sequence
  synthetic
ggcgcgccagtcctcaccccttcacggcatggacggaggtctaggagatcggtgaacgtgcatcaccatggagagagtctacttgaggccaagaacacgccgtggatggattcgaccaaagccactaaatatctcacgaaggttgagaactgggcgttgagaaatcctgggtatgctcttgctgccatcgactcggaccgatg

SEQ ID NO: 8529 - DNA, 203 bp, Artificial sequence
  synthetic
ggcgcgccagtccttttcataggctggaatctgggaacgacgagaagccaaaagataattttcacaattatgttaatgttaattgccccagcgtacagcttcagctgtctggggatgcagaaccgagactttgttgagggagtgaatggtgttgagtggatcgatgtcgttctggaaggaggcccatgcgactcggaccgatg

SEQ ID NO: 8530 - DNA, 203 bp, Artificial sequence
  synthetic
ggcgcgccagtccttgtgaccattacggcaaaagacaggccgaccatagacgtcaagatgatgaacatggaggctacggaattagcggttgtgagatcttactgctatgagccgagagtgtcggacgtgacgacagaatccagatgcccaaccatgggagaggctcataatcccaaggcaacttatgccgactcggaccgatg

SEQ ID NO: 8531 - DNA, 203 bp, Artificial sequence
  synthetic
ggcgcgccagtccttaccatgaacacaaaaagctggcttgttaacagagactggtttcatgatctcaacttaccatggacagggtcatcagcggggacgtggcaaaacaaagagtcattgatagaatttgaggaggcccacgccaccaaacaatcagtggtggctttggcatcacaagaaggagccctcgactcggaccgatg

SEQ ID NO: 8532 - DNA, 203 bp, Artificial sequence
  synthetic
ggcgcgccagtccttggcactgtcgtggtggaattgtcttatgcaggtaccgatgggccctgtagagttcccatatccatgtcggcagatctgaatgacatgacaccagttggacgcttgataacagtcaacccatacgtgtcgacctcctccacgggtgccaagataatggtggaagtggaacctcccgactcggaccgatg

SEQ ID NO: 8533 - DNA, 203 bp, Artificial sequence
  synthetic
ggcgcgccagtcctttccattgggaaaggcattcatcaggttttcggctcagcatttaaaagcttatttggaggaatgtcatggactactcaaggcatgttgggggcactgctattgtggatggggctgaatgcaagggacagatccatttctatgacttttctagctgtaggaggaattttagtcttcgactcggaccgatg

SEQ ID NO: 8534 - DNA, 203 bp, Artificial sequence
  synthetic
ggcgcgccagtcctcctggcagtaaatgtcaatgccgacacggggtgctcaatcgacttggctaggaaagaattgaaatgtggacaaggcatgtttgtcttcaacgatgttgaggcttggaaggataattataagtactatccatccacaccaaggagacttgccaaagtcgtggcagaagctcatgacgactcggaccgatg

SEQ ID NO: 8535 - DNA, 203 bp, Artificial sequence
  synthetic
ggcgcgccagtcctggctggaatttgtggcatacgatcagtcagcaggctcgagcacaacatgtgggtaagcatcaaacatgagttgaacgcgatcttggaagacaacgccattgacttgactgtggtggttgaagaaaatcctggaagatacgggaaaactaatcagaggctgccgaacgttgatggcgactcggaccgatg

SEQ ID NO: 8536 - DNA, 203 bp, Artificial sequence
  synthetic
ggcgcgccagtcctatggatggaaatgcgaacagaaaatacaactgattgtgacaccgcagtaatgggcacagcaattaaaggaaatagagctgtgcacagtgacctgagctattggatagagagcaagaataatggaagctggaaactggagagagctgtgctgggcgaggtgaagtcatgcacatgcgactcggaccgatg

SEQ ID NO: 8537 - DNA, 203 bp, Artificial sequence
  synthetic
ggcgcgccagtcctaggaatcacgtacagtgatctggtcaagtacgtcattctagtggcagctgcatttgctgagagcaatacaggtggtgacattgtgcacttggccatggtggccgcttttaacatccagccaggtttactgattggattcctactgaggaggaagtggagcaatcaggaaagcagcgactcggaccgatg

SEQ ID NO: 8538 - DNA, 203 bp, Artificial sequence
  synthetic
ggcgcgccagtcctaatagtggggatagatgtggtgagaataggtgtgctaaccctgggaatcctctcactattgaaagagaggagcaatgcaatggcaaaaaagaagggtggcatgctcctgggagtggcatgcgctaccgctggaatcgctagccctttggtgtttgctggtctgcacatggtgctcgactcggaccgatg

SEQ ID NO: 8539 - DNA, 203 bp, Artificial sequence
  synthetic
ggcgcgccagtcctatggctagagaaagcgagcgacatctcgtggagtgaggaggcgagggtgactggagcatcacagagatttgatgtggaaattgatcaggacggtaatatgagattactgaacgatcctggtgtgtcgctcggtgtttgggcctttcgaactgggcttattctgttatcttcatacgactcggaccgatg

SEQ ID NO: 8540 - DNA, 203 bp, Artificial sequence
  synthetic
ggcgcgccagtcctagtgggagtcatgcatgagggagtgtttcacaccatgtggcacgtgacgaatggggccgttattcaagcaggagaaggaacactggtcccatattgggcgagtgtacgcaatgatctaatttcctatggtggaccatggaaattggggaagcaatggaatggcgtagatgaagtcgactcggaccgatg

SEQ ID NO: 8541 - DNA, 203 bp, Artificial sequence
  synthetic
ggcgcgccagtcctgctgctcacacctcagcgagtgccgaattacaacttgttcattatggatgaggctcacttcacagaccccgccagtattgctgccagaggatatatatcaacaaaggtggaactgggagaggcagctgcaatattcatgacagccacacctccaggtacaactgaggcatttcccgactcggaccgatg

SEQ ID NO: 8542 - DNA, 203 bp, Artificial sequence
  synthetic
ggcgcgccagtcctgctaaataggaagagttttgactcagagtatcctaaatgcaagagtggagaatgggattttgtgataaccactgacatctcagaaatgggagcgaactttggagcgcaacgggtcatagatagtcggaagtgcattaaaccagtgattattgaggatggagaaggaagcgtgcacgactcggaccgatg

SEQ ID NO: 8543 - DNA, 203 bp, Artificial sequence
  synthetic
ggcgcgccagtcctaatgaatggaccagttcctataacatcagccagtgcagcccagcgtcgtggacgggttggaagggatgtaacacaaattggagatgaataccactactcaggaccaaccagcgaggatgatcatgatttcgctcattggaaagaggccaagatactgctggacaacattaacatcgactcggaccgatg

SEQ ID NO: 8544 - DNA, 203 bp, Artificial sequence
  synthetic
ggcgcgccagtccttcatcaagaaacctggagcatgccttggccggatttgagaccagcgacggcatgggcggcctacgcaggagctacaacatttctgactcccttgctaaaacacctcataataacagagtatgtgaacttttcactcatggcaatgacagcgcaggctggagcactatttggactcgactcggaccgatg

SEQ ID NO: 8545 - DNA, 203 bp, Artificial sequence
  synthetic
ggcgcgccagtccttccgtcttggcattatgaccaagacaatccttacaagacttggaactatcatggaagctacgaagtgaaagccacaggctcagccagctcaatggttaatggggtagttaggatactgtcaaaaccttgggacaccttgcaaaacgtggtaaatatggccatgacggacaccaccgactcggaccgatg

SEQ ID NO: 8546 - DNA, 203 bp, Artificial sequence
  synthetic
ggcgcgccagtcctggaatggaagccctcaaccggttggagaaactggcaagaagtacccttttgctcacaccatttccacgagctgcaaatgaaagatggcagaaagattgtggttccatgtcgagaccaggatgaactaattggaagagccaggctctctccagggtctggctggtcactaacagacgactcggaccgatg

SEQ ID NO: 8547 - DNA, 203 bp, Artificial sequence
  synthetic
ggcgcgccagtcctaacagcacgcctgagcaaagcatacgctcagatgtggttattgatgtacttccacaggagggacctcagactaatggcaaacgccatctgctcatctgtccctgtctcatgggtccccacaggaaggacaacgtggtcaatccatggaaaaggtgagtggatgacttctgaagacgactcggaccgatg

SEQ ID NO: 8548 - DNA, 203 bp, Artificial sequence
  synthetic
ggcgcgccagtcctcatttgtttgaagagataggaagaggaagtcaggccagggaatccctgccaccggatgttggatgacggtgctgtctgcgttccaaccccaggaggactgggttaacaaatctgggtgcatggaggagctaagcgttcaataccgtctcggagaactccctggctcacgaagtgcgactcggaccgatg

SEQ ID NO: 8549 - DNA, 203 bp, Artificial sequence
  synthetic
ggcgcgccagtcctaaagaaagcaaggcccaacctagagtcaagctgtaactctaggggaaggactagaggttagaggagaccccttgcgagtgaacaccacaagaaacagcatattgacacctgggatagactaggagaccctctgtcctaacaacaccagccacttggcacagatcgccgaaagtgcgactcggaccgatg

SEQ ID NO: 8550 - DNA, 203 bp, Artificial sequence
  synthetic
ggcgcgccagtcctcctttttgaggtgttcctctctaaggaaggccgccgtcggctcaatgtctttatttacacacacaacaaagctgcctggattgtgcgttccaaggttctggtgtcttcaagcaacaacatacaaaagatatctaaccgaggaattgcggcgtccaaaagcgacgtaggtgatcgcgactcggaccgatg

SEQ ID NO: 8551 - DNA, 203 bp, Artificial sequence
  synthetic
ggcgcgccagtcctccatgaactgtccagtggcggtggcaacataactatgatcaactactatggtgcccaatactcccaggctcatgccaacccttctgttcaaatggacccagagaagttcacaaagcccctcactgatcttgctttagcggggactggtcctgcattgaaatcccccaatgtggacgactcggaccgatg

SEQ ID NO: 8552 - DNA, 203 bp, Artificial sequence
  synthetic
ggcgcgccagtcctggaggctggttactcagataggatcatgcaaataaccgcaggcaactccactcttacaacacaggaagcagctcaggcgattgtgggttatggtgtttggccagattatgatgttggtgttgggcatgccattgacaaggaaacaaagcctggacctgctgttgagcggttttacgactcggaccgatg

SEQ ID NO: 8553 - DNA, 203 bp, Artificial sequence
  synthetic
ggcgcgccagtcctcaccctcgatagcatttactggaaccaggattggaagggtcgcgtgattcgcttgcctggcgccctcactgaccttggtatgttcggtcagaactgccaattccacttcctcatgagatcaggattctgcgtccatgtgcaggtcaacgcctcaaaatttcaccaaggaatgttcgactcggaccgatg

SEQ ID NO: 8554 - DNA, 203 bp, Artificial sequence
  synthetic
ggcgcgccagtcctttgtactcccgctgaaaatgccctgacacacaacttcgtgtctctatacattgttccaattgtcccactgaagttcgagaagggcgcatccacgaccatccctgtgactgtctccatctcgcccatgttcgcagaattctcagggctccgtaacagggtcgttgctcagggtgtcgactcggaccgatg

SEQ ID NO: 8555 - DNA, 203 bp, Artificial sequence
  synthetic
ggcgcgccagtcctccctactttccagatacctggatctggacagttcgtaaccactatcaagaacgatggtttcccagcattgccccactaccaagagaccccgctccacttcatccctggtgaggtcacgaaccttcttgaagtctgccagattgacacttttgccaaccttgggacatctgagctcgactcggaccgatg

SEQ ID NO: 8556 - DNA, 203 bp, Artificial sequence
  synthetic
ggcgcgccagtcctggctactggtaagattctcatcgcttacacaccaccaggcggagatgccccagcaacacgcaaggatgccatgctcgcgacccacgttgtgtgggatttggggctccagtcttcagttacattcacagtcccctacatctcccaatcacagtacagatataataacattgatggcgactcggaccgatg

SEQ ID NO: 8557 - DNA, 203 bp, Artificial sequence
  synthetic
ggcgcgccagtcctgaacatcttctcatatgatggtttcatcagcatgttctatcaaaccaatatagttgttccccctggtgccccatcgacctgccaaattgtcctcctagtttctgctgcaaaggacttcaccctccgcttggctactgacagtgcttacttccagggcctcggcgaagaccttggcgactcggaccgatg

SEQ ID NO: 8558 - DNA, 203 bp, Artificial sequence
  synthetic
ggcgcgccagtcctgaatcttgtcaatggttctgtgcaaactaccgcccagcaggtacttcgccccgctacaggtttagcttccgaagttcccaatactctttctatccacacaggcgagtcggggattctgactgcaccggaaacaggcgcctcctccaccactgaggctggggctatgattgagaccgactcggaccgatg

SEQ ID NO: 8559 - DNA, 203 bp, Artificial sequence
  synthetic
ggcgcgccagtcctcaggtcagtgtctactatgtactctgccgcagagacttccatcgaggcatttatgtctcggtatgcaatgttctctgccttcgaccttcgcactggttcaactgctgcgaacggcgaatacagaatcctggacctccgcttctcggaggaatcatctacacacaaggcccttgtcgactcggaccgatg

SEQ ID NO: 8560 - DNA, 203 bp, Artificial sequence
  synthetic
ggcgcgccagtccttgcaaagtatcgcatgttcacctaccttcgtatggggtatgatgtggtcgctattgtctccccaaaggcaaacatcagggaccgcgtccatatgtcatcaccgcccaaatttcagatgatgttcattccccctggttgcccagcaccccgtcttgtagatggtccggagtggtacgactcggaccgatg

SEQ ID NO: 8561 - DNA, 203 bp, Artificial sequence
  synthetic
ggcgcgccagtcctcctccccaccacccccagtgtctatttctctgtggaccaacccccggcatccctacggctaccatacatgggcgttatgtccacctttgcctcccgttatgatggcttctattcattccagacaaccaatcctcatagctacggttacttcccaggcaatgacattggcaagctcgactcggaccgatg

SEQ ID NO: 8562 - DNA, 203 bp, Artificial sequence
  synthetic
ggcgcgccagtcctcatcttcccggtctcccgaactgatttcatcgccccattccaccttttcaacaacagacttgtttttgcaccatatggtgatgatgacttcctccagatcccatacacggcagtgaggtgtgaccttgaacatgatttggtcctggggcgcatggggaagccaattttcacccgcgactcggaccgatg

SEQ ID NO: 8563 - DNA, 203 bp, Artificial sequence
  synthetic
ggcgcgccagtccttttgtgtggctcccctctcctgacgcgtgatggcattgtggctatggccacagcaggcagtgactcagttagttatttcacaaacctccaccttgtggagtggctcaatgtggagcccttagccgaagaacagggcatttcagattggttcagtgactttgcctcacaactgggcgactcggaccgatg

SEQ ID NO: 8564 - DNA, 203 bp, Artificial sequence
  synthetic
ggcgcgccagtcctatgtggaaagatgcgccaactcaaactgggcgctgatatctacggggtgcagcgaaaccaggccacacatcagattgtcaagtattaccaaaaggctatgtctatacttcaggcaatgacccaagggcgctccgaaccggtggcgcttttggtacacggcaccccaggaacaggcgactcggaccgatg

SEQ ID NO: 8565 - DNA, 203 bp, Artificial sequence
  synthetic
ggcgcgccagtcctgaagagcttagccacagaaattattggcagggccctcacgcagaagttgggtggcaacaggccatactctctcccacctgacccaaaacactttgatggttacgcccagcaacctgtcgtcatcatggatgatgttggtcaaaaccctgacggcgaggatctcaaactcttctgcgactcggaccgatg

SEQ ID NO: 8566 - DNA, 203 bp, Artificial sequence
  synthetic
ggcgcgccagtcctggttgataccgactataaaaggaatgacaagcttactgcaaacactgcacttgacaggtgcaaccatcctgcaaccaactttaagcactgctgtcctcttatctgtggtaaggccatccgtctcaaggacatgaggacaatgaagatgttcacactcgatgaggtggtgtcaatcgactcggaccgatg

SEQ ID NO: 8567 - DNA, 203 bp, Artificial sequence
  synthetic
ggcgcgccagtcctgctctacgcggagcatctaaaccgccaggggtgcggttctaagctcgaggcaatcttccaaggccccggcactaatgacatcatttcgtgtgaatggaatgctgaagcaaagaggaggggcgtcgctctcgtcacagaggatgagtggtttgagactgactacgacaaagaagacgactcggaccgatg

SEQ ID NO: 8568 - DNA, 203 bp, Artificial sequence
  synthetic
ggcgcgccagtcctttcaacaatggactggatcaagaaactttcctacggtctctccatcttgtcatccctcaccgctgtctgtggcttcatttacatgctttacaagatttttgcctcggttcagggcccctacacaggaactgcccaaaagacactcaagaagcctgaactcaagcgcaaagctgtcgactcggaccgatg

SEQ ID NO: 8569 - DNA, 203 bp, Artificial sequence
  synthetic
ggcgcgccagtccttgaagtggacctcgatgaggcgatgtttgccaagcacaagggtaacacagacattcccattgatgaagagcttgggattgccatagaccactacacagagcagattagaccccttatgcccattaaccttacagaacctttgacaatggaggaggtcgtctatgggacagataacgactcggaccgatg

SEQ ID NO: 8570 - DNA, 203 bp, Artificial sequence
  synthetic
ggcgcgccagtcctccttgaggggcttgacctctcaacctccgctggatttccatatgtcattaagaacaccaggaagagggaccttattcctgagcgtggccaacccttaacaaaattgcttgatgcccttgacctctatggctacgacctcccgtatgtcacataccttaaggatgagctcagacccgactcggaccgatg

SEQ ID NO: 8571 - DNA, 203 bp, Artificial sequence
  synthetic
ggcgcgccagtcctaattgacaaagtcaggaaggggaagacccgcctgatagagtgcagttccatgaatgacacaatcaggatgaagaccacttttggtcgcttgtttcagactttccatgcaaatccaggtaccgtcaccggatcagctgttggttgcaacccggatcttgactggagcaaattctacgactcggaccgatg

SEQ ID NO: 8572 - DNA, 203 bp, Artificial sequence
  synthetic
ggcgcgccagtcctcgtgtatgaggttgagggaggtatgccttcaggatgttctgggacatccatcttcaattcaatcataaataacctcataattaggacacttgtgttgaagtcttataaatcaattgacttggatcgcctgcgcatcattgcgtacggtgatgacgtgattatatcttaccctcacgactcggaccgatg

SEQ ID NO: 8573 - DNA, 203 bp, Artificial sequence
  synthetic
ggcgcgccagtcctccagctggatgctgctgcactcgcggagtgcggcaaggattacaatttgacaatgacacctgcagacaagtcagacacattcaatgaggtaacatgggacaacgtcacctttcttaagcgacgatttgttccagacaagcacttcccattcttggtccaccccgtcttcccaatcgactcggaccgatg

SEQ ID NO: 8574 - DNA, 203 bp, Artificial sequence
  synthetic
ggcgcgccagtcctcaagcaccgtctgggaagatgttccgctgtggctgccaaacctggtaacaggtgccccagtgtgtgtagtcttcctccagtctccggactggcagtcttgtgtaaagatgcagtgtaaggttcaagtgccaaatccctggaaggagtgaccctctactgccctaggaatgctgtcgactcggaccgatg

SEQ ID NO: 8575 - DNA, 203 bp, Artificial sequence
  synthetic
ggcgcgccagtcctgcaggtacccccaacttcggttggggatctgagcacaggctaattgtctacgggtagtttcatttcccatcctctcttttttggcatcatggcgaacacacgggtttcacgatctgtgctctccgctgttgccaaaacttctacccacagagtctatcacacagttcttgactgcgactcggaccgatg

SEQ ID NO: 8576 - DNA, 203 bp, Artificial sequence
  synthetic
ggcgcgccagtcctctatgacaggctctacctcaattcctacccccaaatgctctaccccctaccccgctcaccctctttcccttgccccttctgcatgtatgatgaagacctggaatttctctcacccgagtcgctctgcggcgagggcgctgagccatgttggaagtgcatgtcaaagtccccccgcgactcggaccgatg

SEQ ID NO: 8577 - DNA, 203 bp, Artificial sequence
  synthetic
ggcgcgccagtcctcggagcgctccaacaacttctcaaatttccccacctctcccccgcacagatgcccctcgccgtgaaacaactcaaacggcaggggaattctgtcaccaacatctacggcaatggtaacaacgtcactactgacgttggtgccaatggctggtcccccaccgtgtccactggactcgactcggaccgatg

SEQ ID NO: 8578 - DNA, 203 bp, Artificial sequence
  synthetic
ggcgcgccagtcctcggtgatgcccctgtctctgcatcagcagacaccatccccggtcgctccgggggtgcgtcttctgacaaaactggatctgtttcagtctcctcaggcaacaaggtgggctcccgcttctccaagtggtgggagccggctgccgcgcgcgctcttgagcgtgcgaccgatgccaccgactcggaccgatg

SEQ ID NO: 8579 - DNA, 203 bp, Artificial sequence
  synthetic
ggcgcgccagtcctctccctggaatccccttccttccccatctccacagaatccaattggggcactcaatctggccaagccccgactgcctatccccttcccttttctttcgtgcgtgcgtacccggacaccccctgggctgccatgtacgacacccactccatgtggaattgtggttggcgtgtgcacgactcggaccgatg

SEQ ID NO: 8580 - DNA, 203 bp, Artificial sequence
  synthetic
ggcgcgccagtcctggtcaccgtcaacggttcgcagttccacgctggagccctcatcctttacatggtcccggaagcgactactcaaaccatcgagtcatctcgtcgcaatgccgggttcgtgtacccctatgtcatcctcaacctctatgagagcaacactgctaccattgaggtcccctacatttccgactcggaccgatg

SEQ ID NO: 8581 - DNA, 203 bp, Artificial sequence
  synthetic
ggcgcgccagtcctggcagatgaaccaggcgaacgcctggcgatccttcctgtctccccttctgccattgctggcacaggtactcccatatcctatgtcctctctctcttctcccaatggcgcggtgagctcgccgcccaccttctcttcacaggttcttcccagcactatggccgcttggtcgtgtgcgactcggaccgatg

SEQ ID NO: 8582 - DNA, 203 bp, Artificial sequence
  synthetic
ggcgcgccagtcctccaagttccccttgaccccatccactggcaaagtgacgccgatgtctccggcctcactgctatgctttcctgtttcacctatatctctgctgatctccgcatcaccttgcggatttctaaccccaatgggctaccaatctccctcatggtggcctttgccccccctggatcaaccgactcggaccgatg

SEQ ID NO: 8583 - DNA, 203 bp, Artificial sequence
  synthetic
ggcgcgccagtcctgaagactgttgccatcgtgcggcaaggcgctcgccacacccttggtgacgtcccaccagacgacacagtctacatcatccgtgcgcgtagaccaacttacgtgcactgggccctccggaaagtcactcctgatggaagtgccaaacaaatttccctttcccgtgaaggcctcaccgactcggaccgatg

SEQ ID NO: 8584 - DNA, 203 bp, Artificial sequence
  synthetic
ggcgcgccagtcctcgccgtggtcgcatacgaaccatgtgaaggtgagatctatcgggaagtcccactctcctcctggtccattgccgaacttcaactcggcagcccgtgggattacagtgccaccaacaactgtacgcacttcgtccaacgggccaccaatgtggatctccccaacaccggcttctccgactcggaccgatg

SEQ ID NO: 8585 - DNA, 203 bp, Artificial sequence
  synthetic
ggcgcgccagtccttctcacctggctcgccaaaatcttcggctatctccttgtcctctttggttccccctccccaatgtccatctctggacttctagtcatcatctgtgctgatcttgccccccatgcccgggatttcttcactgcctcgggcaatgtcctctcctccctccacttctggatcgcgaccgactcggaccgatg

SEQ ID NO: 8586 - DNA, 203 bp, Artificial sequence
  synthetic
ggcgcgccagtcctgttcctgaaccaatccctcagaaattacaccttggccctttctcaacaccgcaagcgccaggtcggcccccgaccggaacccgtggtggtctacctctacggaccccccgggaccgggaagtccctcttggccgccctccttgcccaaacccttgcccaacgcatatccggtgacgactcggaccgatg

SEQ ID NO: 8587 - DNA, 203 bp, Artificial sequence
  synthetic
ggcgcgccagtcctagaaaaaggtacacattacacttctcgtgtcattgtgattacctccaacttccatgagcccaatgagcgcgcagcgcgctcgatgggagccctcaagaggcgcgtccaccttcggatcaacgtcacctccaatggcgtgaggtttgacccggtgaacgcgctcaacccaatccccgactcggaccgatg

SEQ ID NO: 8588 - DNA, 203 bp, Artificial sequence
  synthetic
ggcgcgccagtccttggaacccaatccaaatacttcacctctcaaacccctctcacccttttccaagccaacgtggtccgcttggaccgcgattcaatctggacaccctccttctccaacatggacgagctcgtggacgctatcatggcgcgcatggaccgttcatccggtgtttcaaattctcttgccgactcggaccgatg

SEQ ID NO: 8589 - DNA, 203 bp, Artificial sequence
  synthetic
ggcgcgccagtcctctccctcatcaagcgtcagggcaaccgcgtggtcgaagcaactccccgggaaatccccgaggagtatgctgacgagctcgtggaagccttggcacaccacagggctgtaccctgttccctctccctctcccacgccatctccaacaacaccccccttgaaaccatctcccagaccgactcggaccgatg

SEQ ID NO: 8590 - DNA, 203 bp, Artificial sequence
  synthetic
ggcgcgccagtcctcctctggcgctacaggaaacccatcttcgccgccaccaccttcctggcggtggtcggattcctttgctccatcatccccctcgctagatcaatctggcagggccgcgaagactcttcctcgcagccccaagcggcgtactcaggtgtgccgcaccaaaagtcaaaacccaaaaccgactcggaccgatg

SEQ ID NO: 8591 - DNA, 203 bp, Artificial sequence
  synthetic
ggcgcgccagtccttcccaaacccatccccacccaacatatccagcgccaggggatctctcccgcaatccctggcatttcccagaatgtcgttcacgtcgagtccggaaacggcctcgagaagaatgtcatgtctggcttctacctcttctcccgctacctacttgtccccacccacctacgtgagcccgactcggaccgatg

SEQ ID NO: 8592 - DNA, 203 bp, Artificial sequence
  synthetic
ggcgcgccagtcctccaccacaagaccctcctcgtgggcgttgacgcctacgattgggccaccctccctaccctcgagcttggtgagctcaccctagtccataccccaacctctcgccagtacaaggacatgcgccgcttcatcggcgcacacccctatcccactggccttcttgtctcccaacttaacgactcggaccgatg

SEQ ID NO: 8593 - DNA, 203 bp, Artificial sequence
  synthetic
ggcgcgccagtcctatcagccccgctctatgtccgcttctccggcaaccgcgtgcttgacatgaacttccccggtgccatcgtctgtgagcaggcgtacggctaccacgcagctacctttgaaggtctgtgtggtgccccgcttgtcacggacgatcctgccggggtcaagatccttggattgcacgtcgactcggaccgatg

SEQ ID NO: 8594 - DNA, 203 bp, Artificial sequence
  synthetic
ggcgcgccagtcctggccggagtggctggtacgagtggtttctcagcccccctccataccattctccctgaaatcctcagatttgccactacccaccaatccctcatcatccccactggagaggcgaagcccggagtcaacatcaaccggaactcgcgcctccgtccctctcccgcctatggtgccttcgactcggaccgatg

SEQ ID NO: 8595 - DNA, 203 bp, Artificial sequence
  synthetic
ggcgcgccagtcctcgttctcacccaggaacaggcgatccatggaacccccaacatggaagggcttgatatggggcaggctgcgggtttcccatggaatacccaaggccggtcccgtcgatcgctctttgatgaacctgaacctgggtactttgtccccaaacctgaactccaggtagagattgaccgcgactcggaccgatg

SEQ ID NO: 8596 - DNA, 203 bp, Artificial sequence
  synthetic
ggcgcgccagtcctttcccacggtagtgcggttggttgcaaccctgacgtccactggaccgagttcttctacaagttctctgagttctcacaagtgtttgatctggactacaagtgctttgatgcaactctgccttctgctgccttctcccttgtggctaaacacctggagcgcctcaccggtgaccccgactcggaccgatg

SEQ ID NO: 8597 - DNA, 203 bp, Artificial sequence
  synthetic
ggcgcgccagtcctccgtgttgtgaaatacatcgaatccatccgccattcccatcacatctatggcaaccagatgtatgacatgatcgggggaaacccctccggatgtgtggccacttccatcctcaacaccatcatcaacaacatctgcgtgctatcggccctaatccagcacgtggacttttcccccgactcggaccgatg

SEQ ID NO: 8598 - DNA, 203 bp, Artificial sequence
  synthetic
ggcgcgccagtccttaccaaatttcagatcctcgcgtacggtgacgacgtcatctacgcgacggaacccccaatccacccctcctttatcagagacttctaccagcgtcacaccccgctggtggtcacccctgctaacaagggctctgatttcccccccacgtccacgatctatgaagtcaccttcctcgactcggaccgatg

SEQ ID NO: 8599 - DNA, 203 bp, Artificial sequence
  synthetic
ggcgcgccagtcctcaaacgctggtttgttccagatgacaggcgcccattctacattcaccctgtgatggaccctgacacctacgagcaatcagtgatgtggttgcgtgatggagactttcaagacgtggtcacctcactctgtcatttggccttccacagcggacccaagacatatgagcgttggtgcgactcggaccgatg

SEQ ID NO: 8600 - DNA, 203 bp, Artificial sequence
  synthetic
ggcgcgccagtcctcatgaaagtgcgcgagcagtgcctcaagtctgggttcgctccaaatttcctcccctactcttacctccaactccgctggcttaatatgctggcagcctgatagttagggaacccaaccacggtggaatacccgtggtgctagttagttagaaccctttactctcctccatggtgcgactcggaccgatg

SEQ ID NO: 8601 - DNA, 203 bp, Artificial sequence
  synthetic
ggcgcgccagtcctatataaagaccacccacaatctttcgggtgagcccctaagccatggttgtactgtgctatcttctaagacgtcctccctctggacgcactttccccccggtgccgcgcctcccctgggagctgcacccggggaccggggtagtctttgaacttttctaactgttcttaaaaaaacgactcggaccgatg

SEQ ID NO: 8602 - DNA, 203 bp, Artificial sequence
  synthetic
ggcgcgccagtcctgaaacccgtatacaccggaccttttctcccctccctctccacttacctttttcccctcttcggcatgaaacaaggattattcaagtggaaacgcgatttaatatgcggctggccaccgcggaataacggcaattgtgtatctgctggaagccaagcctgcctagccgatagccccgactcggaccgatg

SEQ ID NO: 8603 - DNA, 203 bp, Artificial sequence
  synthetic
ggcgcgccagtcctttgaccgggtgtgtaggatagcccaggaaccagcaatacgcgacaggttatggtagagtagatacctagccaggggcaatgggactgcattgcatatccctaatgaaccattgagatttctctggtcattacccggtgatggttactagaggggggcctctagtactagatctacgactcggaccgatg

SEQ ID NO: 8604 - DNA, 203 bp, Artificial sequence
  synthetic
ggcgcgccagtccttgactcataataattggacaatatatattacacctgttgtgccattggattatgtcaccggctcctccaccaatgttcctgttacaatttccattgcaccaatggcagcctctttttctggtttgcgcaatgctgttcaacctagttttagtgttcatacgcagggtgttcctgcgactcggaccgatg

SEQ ID NO: 8605 - DNA, 203 bp, Artificial sequence
  synthetic
ggcgcgccagtcctctgtttcctttacattggatgtttctaataatagtgtgtcaaatgctgccatagcccattgggatatggacatgggaagcgtgctgttttcaaccacctacatggcaaggtgtgccaaatggtactcccagcatcgtggagggatacgtgtgaccttcatgttctgtggctcagcgactcggaccgatg

SEQ ID NO: 8606 - DNA, 203 bp, Artificial sequence
  synthetic
ggcgcgccagtcctccatggcaactggcaagttgcttcttgcattcacaccacccggcggttcggcgccagccacccgcagggacgcaatgcttggcacacatgagatctgggatttgggcttgcaatcctccatcacactcgttgttccgtggatctcccagacggcttatcgctttaaccaaccttcgactcggaccgatg

SEQ ID NO: 8607 - DNA, 203 bp, Artificial sequence
  synthetic
ggcgcgccagtcctttggcgatgaacttggcaaagtcatcactgaagcagcccaacatgccctgcagcccctagatgttaaacctgtcaacggacccagcgtcccagctggcctgtccattcaggttggtgatgcatctgcactaacagcccccgagactggggcaacggctgcaacagaagcaccctcgactcggaccgatg

SEQ ID NO: 8608 - DNA, 203 bp, Artificial sequence
  synthetic
ggcgcgccagtcctctactccttgtgtgtatcaaaagtcaagtgctgatgcccccatttctttgcgacttccctttatgggcccagcctctgcttattgtgtgacctatgatggatatcccaattatcgtattggacaaaaatatggtgagtttcctggaaatgattttggtacaatttgttttagatcgactcggaccgatg

SEQ ID NO: 8609 - DNA, 203 bp, Artificial sequence
  synthetic
ggcgcgccagtcctttatcaatttgacgggcggtaaccaagtgcaggatattaaacatcgcattttgatgcttgcccgacccacccaggtctccgccttttgcccgcgaccaattgtttcacttgcgcaacatcgacctgctgctgttaccaatgggagaattgcatatgttagggatggacctgatgcgactcggaccgatg

SEQ ID NO: 8610 - DNA, 203 bp, Artificial sequence
  synthetic
ggcgcgccagtcctatgttgttccagaaggtgatggaaccgatagggttcttagagcagcaaattgtgggccccgtctgaaggtcggaaagagaatgaatccagagtgctgccctccccatttgtacagattttttgaggattgttatcagtgctgggatgttgataatgaagtttctttccattgctcgactcggaccgatg

SEQ ID NO: 8611 - DNA, 203 bp, Artificial sequence
  synthetic
ggcgcgccagtcctttcctctttcccctcgtgagtgcttgattcctgctcatctttatgttgctgatcttgtgttttccaagcatattgctgggcccagggcagagataccctatcgaaagaagtgggctgattataccatggatttggtttgcttggaacttgctgaagattattttcaaaccattgcgactcggaccgatg

SEQ ID NO: 8612 - DNA, 203 bp, Artificial sequence
  synthetic
ggcgcgccagtcctaaggtctccgtgatatgatgaatgatgttgcccgtgagctgggtcacagctttggtgattccaccatgactggtgtggcaaatgtgattgaagatgctgtcaagcagtatacctttaataaagccaatgcacaaatgtcttatgttaaacagattattaagtggcttgtgaaggcgactcggaccgatg

SEQ ID NO: 8613 - DNA, 203 bp, Artificial sequence
  synthetic
ggcgcgccagtccttccagtcattgacaaaaggtcggactgagcccgttgccatgcttgtccatggcacacctggctccggcaaatcccttgccacagaaattgttggccgcctgctttcccaaaggtatggcggctcccgaccctattcattgccaccagaccccaaacattttgatggatatgccccgactcggaccgatg

SEQ ID NO: 8614 - DNA, 203 bp, Artificial sequence
  synthetic
ggcgcgccagtcctttagacctcccactgtgtcagaaccccaagcccttaagcgtagattttttgtggatgttaatattgaagttcagaaggattatatggttcaaaatggtaaacttgctgctgatgttgccttgaccccctgcaatcatcaggcagcaaattttaaggtttgctgtcctatgatttcgactcggaccgatg

SEQ ID NO: 8615 - DNA, 203 bp, Artificial sequence
  synthetic
ggcgcgccagtcctagagtgattatgataggatgcctcctgtgcttaagacgtatgaagaattgagaaaggaagggattgaaaggcctgcgccaaaagaagtgcttgacttggttcgtgctgtgcccaccccagaggtttttgattattgtcgggttcagggttggatgctacccgttgaggtcagaccgactcggaccgatg

SEQ ID NO: 8616 - DNA, 203 bp, Artificial sequence
  synthetic
ggcgcgccagtccttgcgtcgggttgtcaagacacaaggacctgacatggaatttgtcaataagctgttcaagcagagcattttctccgtgaagacggagaaagggtggttctctggcttgggcttacactctcagtggcttttgcttcccaaacattctgagcctggatatgagattgagatgaatgcgactcggaccgatg

SEQ ID NO: 8617 - DNA, 203 bp, Artificial sequence
  synthetic
ggcgcgccagtcctttaaagatgaattaagacccaagaagaaaattgcagctgggaagtcaaggctgattgagtgttcatcactcaatgataccatccgcatgaagcgggtctttggccacctcttccaaacctttcacgcaaatcctggtaccgtgactggctctgctgttggctgcaatcctgatgcgactcggaccgatg

SEQ ID NO: 8618 - DNA, 203 bp, Artificial sequence
  synthetic
ggcgcgccagtccttcgttccggatgaggagtttccttttctgattcatccctgctttccaatgaaggaaatttacgagtccattcgttggtctcgttctgctgcagcaactgaagaacacgttcagtcattgtgttatcttgcctggcacaatggccgttctgtgtatgaggattttattgagaagacgactcggaccgatg

SEQ ID NO: 8619 - DNA, 203 bp, Artificial sequence
  synthetic
ggcgcgccagtcctttcgcactgtgcctgttggtagagccttgaaactcccttcgtacagtgtactgcgccagcaatggcttgatcagttttaagtagttaattgctagtgtagtttttaggcttaagtttagttgttaagtttaagcagtttgttatagtaagttaagtttaggtttaagttagtgtcgactcggaccgatg

SEQ ID NO: 8620 - DNA, 203 bp, Artificial sequence
  synthetic
ggcgcgccagtcctgataacccctgaccgggtgtgtaggataggaaaggtgcccactgtgggcgacaggttatggtagagtggatacctagccaggggcaatgggactgctttgcatatccctaatgaagtattgagatttctctgctcattacccggtgatggttgtgtggggggggccccatacaccgactcggaccgatg

SEQ ID NO: 8621 - DNA, 203 bp, Artificial sequence
  synthetic
ggcgcgccagtccttagatccatactgcctgatagggtcgcggctggccgaccataacctgtatagtcagttgaattcagccaagatgtgtttctttttccacacaaagaccaacgatattagcccaatgacaagaaagacttctgttgaacgcctcatgtccccagggcctaagtgcctagacatggcgactcggaccgatg

SEQ ID NO: 8622 - DNA, 203 bp, Artificial sequence
  synthetic
ggcgcgccagtcctgtggtaatattacgcagataaattactatggttcagactatgcgtcggctcatggtgctgcacagacccgcctagatcccgattctctggcacgacccttggctaaccttgctgatatgactggtcccgcattaaaatctcccacagtggaggaggctggcttctctgatcgcacgactcggaccgatg

SEQ ID NO: 8623 - DNA, 203 bp, Artificial sequence
  synthetic
ggcgcgccagtcctcaagaaccggtcttggctacggaataaagctgcctgcagctcttacagacttaggagtttttggtcagaattgccaatttcattttctgtgtcatactggttactgcgtccacgtgcaagtgaatgcatcgaaattccatcagggtatgctgttagtctgcgccatacccgattcgactcggaccgatg

SEQ ID NO: 8624 - DNA, 203 bp, Artificial sequence
  synthetic
ggcgcgccagtcctgtaaagttgatgggagagataatgctactgtttataatttggaagcaaaagatcttgaagattatccaaggtttcaattgactctttatcctcaccagtttataaacctgagaacaaataattctgcaacccttatactcccatatgttgctgcatcacctgctgaatccccaccgactcggaccgatg

SEQ ID NO: 8625 - DNA, 203 bp, Artificial sequence
  synthetic
ggcgcgccagtccttcacccataataattggactgtttatgttacatatatagtggagctttcatatatgaatgggtcctcaacggaagttccaattacagtttcagtggcacctatgtcatgctcatttagcgggttgcggtctaaggttacacgccctgaacatcaaggggtaccagtgtttgaagcgactcggaccgatg

SEQ ID NO: 8626 - DNA, 203 bp, Artificial sequence
  synthetic
ggcgcgccagtcctttcccgggtctggacagtttgtaacaacaatacgtaattcggggtttcctattttaccggattatgaggagaccccaaaccatggcattccaggccgtgtgagaaaccttatggaagtgtgtggggtggacacgttttgtaactgtgcgacctccaccaccactgatgaacaaccgactcggaccgatg

SEQ ID NO: 8627 - DNA, 203 bp, Artificial sequence
  synthetic
ggcgcgccagtcctcaggcaagctgctgttggcctacacccctccagggggagcagctcccgccacacgcaaagaggcaatgcttgggacacatgtggtgtgggatattggattgcagtcatccattacaatggttgttccctgggtttcccaaacagtatataggtataatcatccaaaagaagaaacgactcggaccgatg

SEQ ID NO: 8628 - DNA, 203 bp, Artificial sequence
  synthetic
ggcgcgccagtcctatatgttcacctatattaggtgcgcctttgatttggtcatagttacatctgtaaatggttcttctggcgcaaagaatggcctacccatggttcaggccctctactgtcctcctgggtgtccaacgcccactaaccaagacactatggagtggtatcttccgaccacccctagtgcgactcggaccgatg

SEQ ID NO: 8629 - DNA, 203 bp, Artificial sequence
  synthetic
ggcgcgccagtccttgattcccggtcatctttatgttgctgatcttaagtttcagaggacaaatggtgcttatccccatgagattccctataggaagaagtgggctgactggacaatggacctggtttgcctgcagctggaccgcgatttctttgaaaccagagtgcatctgtgtaagaggcaatgctcgactcggaccgatg

SEQ ID NO: 8630 - DNA, 203 bp, Artificial sequence
  synthetic
ggcgcgccagtcctgtaagaatacatggactgtctgtgatacaactgagcataatgttgcaatccgctgtggggatgcaacttttcaaaaggatgtttgggttgatggtcctgtcacatctagtggacattggcaaagaaatttgttacgtgttgagatccccatccgtcctggccattgtggtagcccgactcggaccgatg

SEQ ID NO: 8631 - DNA, 203 bp, Artificial sequence
  synthetic
ggcgcgccagtcctaacctgtggcagttttgattcatggggctcctggtttaggtaagtcattagtgacagaagttgtcggacgacaattgtcacgctactatggagctggacggccctactcattgccacctgatcccaagcattttgatggttatgcccagcaacctgttgtgattatggatgatccgactcggaccgatg

SEQ ID NO: 8632 - DNA, 203 bp, Artificial sequence
  synthetic
ggcgcgccagtccttgggacaaaacccagatggagaagattgtaagctgctgtgtcaaatggtatcctcaacagagtttataacccctatggcttctttggatgacaagggaatgccttttacatctgattttgttcttgcgtcaactaacctgtcagcccttaaaccacccactgtgtcagagccgacgactcggaccgatg

SEQ ID NO: 8633 - DNA, 203 bp, Artificial sequence
  synthetic
ggcgcgccagtcctatgctattcgacggcgattcttcattgatgctgccatcgaaccctcaaaggattaccttaaaccaagtgggcatcttgatgcggatacttcgcttacccaatgtgatcatgctgctgtgaattttgcaaaatgttgtccccttatttgtgggaaagccctggttttgaaagatccgactcggaccgatg

SEQ ID NO: 8634 - DNA, 203 bp, Artificial sequence
  synthetic
ggcgcgccagtcctatatggagtttgtaaataagctatttaagcagagcatcttttctgttaagactaagaagggctggttttctggacttggcttgcatactcagtggcttttacttccgaaacactctgaacccgaggatgttatagaaatgaatgatgtagagtataagtgtttagatatagtgacgactcggaccgatg

SEQ ID NO: 8635 - DNA, 203 bp, Artificial sequence
  synthetic
ggcgcgccagtccttagccttggggaaatctaggcttatcgagtgttcctcattgaatgataccatcctgatgaaaagagtatatggccgcttgtttcaaacattccatgcaaatccaggaaccattacaggatcagccgtggggtgtaacccagatgtggattggtcaaagttttatgcggagatggcgactcggaccgatg

SEQ ID NO: 8636 - DNA, 203 bp, Artificial sequence
  synthetic
ggcgcgccagtccttccttgtccatccctgttttccaatgaaggaggtttttgaatccattcgctggtgcaagtcagcggccgcaactgaagaacatgttcaatcgttgtgctatttagcctggcataatggagagcatgtgtataatgattttcttgataagattcgctctgtgcctgtaggtagagcgactcggaccgatg

SEQ ID NO: 8637 - DNA, 203 bp, Artificial sequence
  synthetic
ggcgcgccagtcctgaaattcaaccatcaccacccaggaggcagtaaatgcagtggtcgcgtatggttgttggccatcatttgactcaggagctggggaggccatagataagttaactgatccaggtccctctgtggacaggttctacactctggactcaattgagtggagcaccaccacacaaggctcgactcggaccgatg

SEQ ID NO: 8638 - DNA, 203 bp, Artificial sequence
  synthetic
ggcgcgccagtcctatagctattggaccctacttctagttcccctggttcctctcgagtatagttcaggggctacaactcggattcccgtgactatatcaattgcccctatgtgctcatcattttctggcctgaggaaccggataccccttgctcaaggtattccaacattccaagtaccgggatccgcgactcggaccgatg

SEQ ID NO: 8639 - DNA, 203 bp, Artificial sequence
  synthetic
ggcgcgccagtcctagcaatttgtcactaccctccgcaatcctggttacccactgtacccggagtaccagaagacaccaccccatcatataccaggtagggtaacaaatttgatggaggtggcggaggtggacactttatgcaatctatcagatactgaggtgttgtacatcaatgcaacagggtctgcgactcggaccgatg

SEQ ID NO: 8640 - DNA, 203 bp, Artificial sequence
  synthetic
ggcgcgccagtcctcaccattgggcgagaacctgggcacctgggatctttcattacagggtaatttattatcccccacctacctcggtcgcctgtcgagattctatacccattatagaggctctatcaacttgactttcatgttctgtggctcagccatggccacgggaaagttcctcatctcctatacgactcggaccgatg

SEQ ID NO: 8641 - DNA, 203 bp, Artificial sequence
  synthetic
ggcgcgccagtcctccctgtggtaccagaccgccgttgtcaccccaccaaattgtcccaatcagtgtgcgcttgtttgtttcgcttctgcctgcaaggactttgagatgagattgcctgttgattcagcctatttccaaggactaggtgatgacctttcgaaggtgataacaagtgtcacgaaggacacgactcggaccgatg

SEQ ID NO: 8642 - DNA, 203 bp, Artificial sequence
  synthetic
ggcgcgccagtccttcacccaaccacttatggagccggtaactggtactgtggcgtcactaccacaacagctctcactgcaggtgggtgacggctcggctctcgcagcacctgagactggggtctcggcgactactgagccggagcagatgatggagacgagggtttcaacagtgctatacagcaagtcgactcggaccgatg

SEQ ID NO: 8643 - DNA, 203 bp, Artificial sequence
  synthetic
ggcgcgccagtcctgcctcaaggctgccccagcctcctttagaataccctttatgggcatctcgtccgcttatgcctccttctacaatggttactccactttcacaccacaagctgcaaaatatggcgaatttccagggaactacctgggtgatctgtgggtgcgccttgttgctgataattcacgtccgactcggaccgatg

SEQ ID NO: 8644 - DNA, 203 bp, Artificial sequence
  synthetic
ggcgcgccagtcctctggtagtgcatccacggtggtggtcaatgtccaggcattctgccggccagtcaattttgagggctacctacctcgccctatagtttcactcaagcctaatgtcagggtggggccctccagggggcgtgttgaattcgttgagacaggtgtctccatggagattggggtcggcccgactcggaccgatg

SEQ ID NO: 8645 - DNA, 203 bp, Artificial sequence
  synthetic
ggcgcgccagtcctcaacaaacctcatgttttctcatggcgctgtgtaccacttctccgagtacaaaccagtgtggatgtccatgacttatgacgttgcagtcttgaagctagagaaacctaccttccattgtagcccccccatctgtctacatggttgtagatcaggatggctcaagtgtgtgactacgactcggaccgatg

SEQ ID NO: 8646 - DNA, 203 bp, Artificial sequence
  synthetic
ggcgcgccagtcctccacagcgaccaacaggaaacagtccttctttaccaagatgtctgagataccgtattttcaggcgatggagcagggccctggtgattggctagcgggcatctttgaaaatatggggggtgcttttggtgaggggctcatacaaccaattaaggacaaactggatgacatccgggcgactcggaccgatg

SEQ ID NO: 8647 - DNA, 203 bp, Artificial sequence
  synthetic
ggcgcgccagtcctccaacctcacgcccaataccatacggagtgaccttaccaagaccacgatcaccacccttgtaaagattatctgcgccatggtcctcatatccaaggcctacgacaaggtggagaccgcagcccttgtgggtacaatgttaggcgttgatttcctctctaaagacccatttgagtcgactcggaccgatg

SEQ ID NO: 8648 - DNA, 203 bp, Artificial sequence
  synthetic
ggcgcgccagtcctgacggacccacttcatcaagggcctggagaagctacccatgcttatggagacctttgataagatttccacctcccgtggacagtacagtccggaaaccgtcaagcgtgtttgcaccgctttccgtgagttgaagcgtggggctgacatttatggtggtgagaggaatttcgccacgactcggaccgatg

SEQ ID NO: 8649 - DNA, 203 bp, Artificial sequence
  synthetic
ggcgcgccagtcctcccatcctgcgaccaacttcaagaggtgctgcccacttatatgtggaaaggccgtgaaactgaaagatcggaagtcaggtatcacctactccgttgatgaccttctcacctgcctctatagggagtcagcgcgtcgtcagaggtgtggggataagctagacgctcttttccaggcgactcggaccgatg

SEQ ID NO: 8650 - DNA, 203 bp, Artificial sequence
  synthetic
ggcgcgccagtcctgtattgaagatgaaatcaggatgctgccagacgcttacagacaaaagatgaaggtaaaacatcagatccatgatggtgacctagggtttgagcgtgtacagatggtccctgacccagaggagtggttcgaaactgattgggataagatgcctcatatcctgaagacgatcgacgcgactcggaccgatg

SEQ ID NO: 8651 - DNA, 203 bp, Artificial sequence
  synthetic
ggcgcgccagtcctaacaggtggcaacgggactatcaatcctagcgagtatcgcaaccctcgcctccttcatatatttagcctataggatgtttgcctctaggcagggtccttattcaggagaatcacccgcccccctcaaggcaccagttccccgtagggttgtggtaacccaaggtcctgactctgcgactcggaccgatg

SEQ ID NO: 8652 - DNA, 203 bp, Artificial sequence
  synthetic
ggcgcgccagtcctacaatgagcaaggtgctctcgaactcaccttgatcagaatcaaccgtcccaccaaattcagagatattaggaaattcttcccccctgccttttcagcggagagagactgcacacttgttgtgaataacaagaacttccctagggtgatgctccccgtgggtgcagtcacggcctcgactcggaccgatg

SEQ ID NO: 8653 - DNA, 203 bp, Artificial sequence
  synthetic
ggcgcgccagtcctcgtttatggagggggccattgtgtccacatctcaggccccaaggcctatcaacctcaacacaaagaccaccctaaggccgtccgtgttctacgacacctttaaaggggagaaagaacctgcagccctacatgtcaaggacagacgcctcgaggtagaccttgagaaggccatgtcgactcggaccgatg

SEQ ID NO: 8654 - DNA, 203 bp, Artificial sequence
  synthetic
ggcgcgccagtccttctcaaagtacaagggcaaccttgacgttgagttcccaccagagctgtccctggctgtggaccaatacgttgagcagatcagaccattgatacccccggatgtgactgaccccctatccttggaggacgttgtttatggcattgacaacctcgagggacttgatttgaacacgtcgactcggaccgatg

SEQ ID NO: 8655 - DNA, 203 bp, Artificial sequence
  synthetic
ggcgcgccagtcctcatcggggtgttctggcacgtccatcttgaattcgataatcaacaacctcattatcaagaccctggtacttaggacttacaaaggtgtggatctggaccaaatgaagatcctagcctacggggatgacgttatagtgacctaccccttccagctggatgcatcgatagtggcagcgactcggaccgatg

SEQ ID NO: 8656 - DNA, 203 bp, Artificial sequence
  synthetic
ggcgcgccagtcctgacttcattgccaaggtgcgcactgtacctgtagggagggctttgtcattgcccacctaccgcgtgctgcgcgcattttggcttgatctattttgatccccatcaatactcaactaccagtccaatcataggctaatactgatagttgaagacatttaattgagattggcaattcgactcggaccgatg

SEQ ID NO: 8657 - DNA, 203 bp, Artificial sequence
  synthetic
ggcgcgccagtcctgaacgctccgccactgccatgtatagcgtgcaatgcataaatggtgcactacatgatacgagggaatgggaaaccctccatggccgaatgcagggtgacagcctgccggcggatgcctgttgttagtataatccgttgtttgccacatggattccacagtctcttttccagcatcgactcggaccgatg

SEQ ID NO: 8658 - DNA, 203 bp, Artificial sequence
  synthetic
ggcgcgccagtcctctctccaaggggcacaatgtaagaaacttaaggcctgccggccgaagatgtattgtgaccaggggtactgtcatgctagttgtcgaaggcataggtcggctttgaggtgttgtctttgcagcaaggcctatgaagaagaggacttgaaggttgaagcattagagtatccttgctcgactcggaccgatg

SEQ ID NO: 8659 - DNA, 203 bp, Artificial sequence
  synthetic
ggcgcgccagtcctggacacagatatatctgggtgatcggaaaatgcattggatatgtgatgcacatctaggatgtacgacgcattgctgttgttgtgatggtcagtttcagggacagttgtctagcaccatgtctggtaacaaacacataggggcttctggcggttccactgtgaattatattaactcgactcggaccgatg

SEQ ID NO: 8660 - DNA, 203 bp, Artificial sequence
  synthetic
ggcgcgccagtcctattatggtgctgagtatgcaaatgcagcgaatgcccccacccaaaacttggatccagcagccttcactgacccagtcacagagttagcttcctctagttttgtacccgatctacaaagcccatctgctgaacaatgtgggtactctgatcgaattttgatggttacggccggtacgactcggaccgatg

SEQ ID NO: 8661 - DNA, 203 bp, Artificial sequence
  synthetic
ggcgcgccagtcctgtgccacgcttgtgttgccatatcttaacatcacaccagcgtgtctacccaaaatccattgtccatggtcattgaacttgatcatcctggctgacctggactatgctgcaggcgctgccaccactattccaataacggtatcagttgccccccagtgttctgagttcgctggcccgactcggaccgatg

SEQ ID NO: 8662 - DNA, 203 bp, Artificial sequence
  synthetic
ggcgcgccagtccttttcaccaaatggttctgtggcgccccccgataccgaatcacaatgggcaacatcccttaacccagtgacaacatttagattgcagcaaaattggtctagtgtccgaatcccgtttttatctactgctcattatttctccaccttctttaacggttatggcacatttgataaaacgactcggaccgatg

SEQ ID NO: 8663 - DNA, 203 bp, Artificial sequence
  synthetic
ggcgcgccagtcctacctgattaagggaattgaaaagaccattctggcctttgaaccggaagatgacaatcatggggtcctcgatgtccttgagtgggtcacaaagttagtgtgcgcaacaacgataatcgtcagggggcaccatgacccagccatagtgacctcatgttgcgtaatgttgggtgtagcgactcggaccgatg

SEQ ID NO: 8664 - DNA, 203 bp, Artificial sequence
  synthetic
ggcgcgccagtcctttaaagagctgatagattgggtcaaggatctggttgtcaaaatgaagcaccaggaaactatggctgatgaattgaagttttatcttaatgagtggtttctgtatcagaaggacccatccaaatttacgcgtggttctgttatcaaattgtgtgataaattactagagattaaagcgactcggaccgatg

SEQ ID NO: 8665 - DNA, 203 bp, Artificial sequence
  synthetic
ggcgcgccagtcctgtaaggcattgtctaaattttatagagttcaagaaccctactcgctcccacctgatccaaagtattttgatggttataaagggcagatggtcacaatcatggatgacttgggacagaaccccgacggagcagatttccaattcttgtgtcagatgatttcgacagttgacttttcgactcggaccgatg

SEQ ID NO: 8666 - DNA, 203 bp, Artificial sequence
  synthetic
ggcgcgccagtcctacccaccgatggctgacttggcagataaaggagcaccatttattagtgattttgttctagcatccacgaatttgagaactttcaatcctccaacgatttcagacgtaggagcaataaaccggaggtttttcattgacacaaccattgatctgagtaaggactattgcaatgcagcgactcggaccgatg

SEQ ID NO: 8667 - DNA, 203 bp, Artificial sequence
  synthetic
ggcgcgccagtcctctgggaaattggatgtgcagaaggcattggcgaagtgtgatcatgaggtggatgtgctttacactaagcattgttgcccactactctgtgggaaagcggtaaagttggtggacaagaagggaaacaagttttcggtgaatgaagtgattggattactggtctcggaggctgagacgactcggaccgatg

SEQ ID NO: 8668 - DNA, 203 bp, Artificial sequence
  synthetic
ggcgcgccagtcctgaaaaagaaaagttgggatcaatgttgacggtttatttcagggaccaaccgctccaaaaccaattctggagactgtgacagttagtggttcagctttgcccgaggatgttgctgatgctttgatggccaatcaagccggagacaatttgattgatcaattggaacaggcaggatcgactcggaccgatg

SEQ ID NO: 8669 - DNA, 203 bp, Artificial sequence
  synthetic
ggcgcgccagtcctcacaactgcaaaaaccggtggttgggaccgttaatgtacaaggaccaggagcaccaaatccagatttccagtttgcccaaaagatccaaaagaagagcttacttccacttgtgactggagcaggcccctacacggcagtgggaatttttggtagaacagttctgctcccgaagccgactcggaccgatg

SEQ ID NO: 8670 - DNA, 203 bp, Artificial sequence
  synthetic
ggcgcgccagtcctactatgtggaacaactcaggcccctgttaccagaggatgtcactgagcccctgaccctagatcaggccattgaagggtaccatggattgcaaaaattggactcggccacaagtgctggttttccctacaacaccatgggaataacaaagaaacaattgatggcaaatgacaggacgactcggaccgatg

SEQ ID NO: 8671 - DNA, 203 bp, Artificial sequence
  synthetic
ggcgcgccagtccttcttttgtgaaaacccaggcacagcgaccgggatggctgttggatgcaatccagacagggattggactagatttcaagctgaatttgattcttcatatgtgataagctttgactacaaaaattttgatgctagtctatcaccaatgtggtttgccgccctgcaaggagtactgccgactcggaccgatg

SEQ ID NO: 8672 - DNA, 203 bp, Artificial sequence
  synthetic
ggcgcgccagtcctagggacttggatttgatgagaatgatgtcgaattcatcattgaccacatgtgcttttccgtccatttatggggtgacaccttcgtgcacattgaaggtggaatgccatcaggttgctccggaacatccatctttaacagcatgatcaacaatatcattttgaaaacaatcattccgactcggaccgatg

SEQ ID NO: 8673 - DNA, 203 bp, Artificial sequence
  synthetic
ggcgcgccagtcctccttggagctgcacaccttcctcaaacgcggcttcaagagagatgatgaatttgatttcttggtgcatccaaccatggacaagacagcaatctatgagtcgctgcgctggacgcgcgaccccaaggactttcaggaccatgtccgatgtctgtgtgaactgatgtggcaccatgcgactcggaccgatg

SEQ ID NO: 8674 - DNA, 203 bp, Artificial sequence
  synthetic
ggcgcgccagtccttaggagatgtctacaacaggctcgcccatgagtagagcatggactgcggtgcatgtgacttcggtcaccacgggcatagcattgctcacccgtgaatcaagtcatcgagatttctctgacctctgaagtgcactgtggttgcgtggctgggaatccacgcttgaccatgtactgcgactcggaccgatg

SEQ ID NO: 8675 - DNA, 203 bp, Artificial sequence
  synthetic
ggcgcgccagtcctcaatctatcatccacccttctaagcctgtccagaaggatcctgaggacatcctcgaggattccgaatggccagacaacatcttacaccctgaacccccttcttttactaccgatgctgagcaaaattggcatgaccgcttggcatctgcttccttgcctggacccacccaggcacgactcggaccgatg

SEQ ID NO: 8676 - DNA, 203 bp, Artificial sequence
  synthetic
ggcgcgccagtccttccaccgctcctgtggtctgtgcttaccctcccaccccttctgttcctcttcctaatccagatgctccctctgtccctggtccgtctggtgaccgtacttggctgttggacactctcgaatggaccactgagaatccacaactgtggaacttggctggtccaaacgggatgcaacgactcggaccgatg

SEQ ID NO: 8677 - DNA, 203 bp, Artificial sequence
  synthetic
ggcgcgccagtccttattctgctctccaaaacctcactttccctgtttcttcttctgctaattggggaacacaagataactccccacccactgcctaccctctccctttctcttttgtccacgcttatccagactgcccttggacggctatgcatgatacccactctatgtggaattgtggatggcgccgactcggaccgatg

SEQ ID NO: 8678 - DNA, 203 bp, Artificial sequence
  synthetic
ggcgcgccagtcctatccaagtggtggttaatggttctcagtttcatgctgggtgtttagcattggtcatggtccccgagtactccgccggagagctcgcccagggccgtctaaatgccatcttcacttttccctacgccctcctcaacctctaccaaggtaacaccgcctcaatagaggtcccttaccgactcggaccgatg

SEQ ID NO: 8679 - DNA, 203 bp, Artificial sequence
  synthetic
ggcgcgccagtcctaacactggtttttctcttctccttggtctgggcgctctcgccctcctgtctggttgcgcagccgtgcaagcgtcgaaaggacgcgtgacccgacagggcctcctctctcttgaagcccccccagaggtcgtccaggctgctaaccgtgtcgctgactccattgagaccactgcccgactcggaccgatg

SEQ ID NO: 8680 - DNA, 203 bp, Artificial sequence
  synthetic
ggcgcgccagtcctgtttcctccagcctgaacggtttcactgatatgctctcttccttttccaagaccttcactcaaggtgcttccaaagtgctgagagatggtatctctaccttccttacctgggtggccaaagtctttggttaccttcttgtcctctttggatctcccactccgatgtccatagctcgactcggaccgatg

SEQ ID NO: 8681 - DNA, 203 bp, Artificial sequence
  synthetic
ggcgcgccagtcctggtctattggtcatcatctgtgctgaccttgctcctcaagcctctgaatacttccactcttgtagctctgtccttggttccctttactactggattgctaccaagcttggtctctctgtcactcctgaggaggcacacgcagcaacggtagaacaccaaggtgttcgtgactaccgactcggaccgatg

SEQ ID NO: 8682 - DNA, 203 bp, Artificial sequence
  synthetic
ggcgcgccagtcctattctttctgagtctaaacctgtacccacttccctttcctttgagcgggctgtctcacagaatgctcctctttcggtggttaaccagctctggaactaccgaaaacccatctttgcctgtactactttccttactgtgattggtttcgttcttaccatcattgctgtggcgcgtcgactcggaccgatg

SEQ ID NO: 8683 - DNA, 203 bp, Artificial sequence
  synthetic
ggcgcgccagtcctgacaatgtctatcccattgctactgaatcccctactattggtcgcagcgcaagctgtggcttctttcttttctctcgattctttctagcccctactcatatcatcccggatgatacgacccgcatctctgtaggtccagatgtctttgactgggcgacactccaacacaaacgccgactcggaccgatg

SEQ ID NO: 8684 - DNA, 203 bp, Artificial sequence
  synthetic
ggcgcgccagtcctctgggaaaagaactcactatcatccattttcctactattcgccaacatcgtgacctccgtcgctttattggtgaacatccctaccctactggacatcttatttctactctttctggtcctcctgtctacctacgattctccaagaaccgttgggttactcttgaccttcctggccgactcggaccgatg

SEQ ID NO: 8685 - DNA, 203 bp, Artificial sequence
  synthetic
ggcgcgccagtcctcaggcagcaggttacccgtggaacaccatggggcgctcgcgccgttcactctttgtccaacagaatgggatgtggttacctcttccagagttggaagttgaaatcaacaaaactcttgaagatccctattacttctactctactttccttaaagatgaacttagacccacctctcgactcggaccgatg

SEQ ID NO: 8686 - DNA, 203 bp, Artificial sequence
  synthetic
ggcgcgccagtcctccgtcattcatcaaggagttttatgacaagcacacaccacttgttgtaactccagcaaataaaacagacaccttcccggaaaactccaccatctatgacgtcacgtttctgaaacgttggtttgtgcctgatgacattcgaccattctatatccacccggtcatggacccagaccgactcggaccgatg

SEQ ID NO: 8687 - DNA, 203 bp, Artificial sequence
  synthetic
ggcgcgccagtccttatcttcagacccgctggttaaacctcctggcagcgtgagacaccagatacactcttgctctgtatcgctttgtgtagaatagactcatgctttcctaagaccggaactctcatccggcactttcacccacctgccctgccttcattttgaagctgcacccagggaggtggtcccgactcggaccgatg

SEQ ID NO: 8688 - DNA, 203 bp, Artificial sequence
  synthetic
ggcgcgccagtcctgaaaccagtgacacggagagggtggccagtcagtgaggctttgactgctgtgggattgacattcgcgttggcaggaggaatagcccagtttgatgacagcagcatggcgattccattagccgttggcgggattatgctggtggtggcagtggtaacaggcttctctacagacttcgactcggaccgatg

SEQ ID NO: 8689 - DNA, 203 bp, Artificial sequence
  synthetic
ggcgcgccagtcctaagcaatgaaggtgttggcgacatttaagaaaattcttggaaatctgatgaaaacccttcaaacccggaaaaagagaccgaatagacgatctgctgggagtaatggaatgatgatgctagccttgattgggactgctatggcagccacgagtatgactaaagacgataccatctcgactcggaccgatg

SEQ ID NO: 8690 - DNA, 203 bp, Artificial sequence
  synthetic
ggcgcgccagtcctgtaaggggatttctgttgtactgacctatggaaggtgcaagactaattccactaccccggcacctcagcgtcgcagatcaagaagatctatcatgatacctacacacagtacgggtggattgcaccaaggaaccgaaggatggcacaggaccaataatgtgaagaacttcctcacgactcggaccgatg

SEQ ID NO: 8691 - DNA, 203 bp, Artificial sequence
  synthetic
ggcgcgccagtcctaaggggtgtcaggaggtacctgggtagatgtggtcttggaccgtaaaggatgcgtgacaatatcagcaaccggaaaaccgaccatagacgtacggatggttaagatggaagcctccaatttggcatccgtgcgaacatactgtctggaagcttccacctcggaaatttcatccgcgactcggaccgatg

SEQ ID NO: 8692 - DNA, 203 bp, Artificial sequence
  synthetic
ggcgcgccagtcctttgaatgcctgatggactttgggattgatttggatgacgtttacacggccgatatgtcaggaaagtggtggttggttaagcgtgattggtatcatgacattgctctcccatggacagcaccctccgctgacttttggcatgacatggacagattggtggaatttagcacaccaccgactcggaccgatg

SEQ ID NO: 8693 - DNA, 203 bp, Artificial sequence
  synthetic
ggcgcgccagtcctatgccactaagcagagtgtgtataccctaggtgaccaagaaggagccatgtccactgccctaggtgatgcggccgttattgaatacatgtcatcaggaagcaaggtggtctttcgtacagggttcctaaaatgtagagtcaagatggaaaatctgagattgaaaggctccacatcgactcggaccgatg

SEQ ID NO: 8694 - DNA, 203 bp, Artificial sequence
  synthetic
ggcgcgccagtcctatatgcaatgttccaaggagttctctattctgaagaggcccaccgccaccccgtatggaactgtcatcatgcaggtgaagtacgcgcagactgatgtcccgtgtcgtgtgccagtgggcgttcatgagaggccaggtggtgagcaagttggacgtattataacagcccatcctacgactcggaccgatg

SEQ ID NO: 8695 - DNA, 203 bp, Artificial sequence
  synthetic
ggcgcgccagtcctggaacacttttagggttgaggagtttggcacgggaatcatgaaaacaaaagtgtttttggatataaacccgactttaacgagatactgcgataccgaattgcttggagcagctgtgaaaggaaaccattctgctcatggtgatcctggtttgtggatggtctctgagaaagaagcgactcggaccgatg

SEQ ID NO: 8696 - DNA, 203 bp, Artificial sequence
  synthetic
ggcgcgccagtcctgaagtgagtggaaactcacgagcctgtcactatccgagagtaggaggtgtttgtggcctgattctcatactgtctggggacgtggagttgaagagaccaaactcatccttcctgccaatcttggagggccagtgtcacacatgaacactagatatggctactcaacccagatctcgactcggaccgatg

SEQ ID NO: 8697 - DNA, 203 bp, Artificial sequence
  synthetic
ggcgcgccagtcctctggaccatggaacaatgttccactagacgtggtctttgagacctgtcctggaacgacggttaatgtcactagaacatgtgtggggagatcggcatcggcaaggtcaacaactgacagtgggaagatcataccggagtggtgttgcagagcctgcaccatgcctcccttgacatcgactcggaccgatg

SEQ ID NO: 8698 - DNA, 203 bp, Artificial sequence
  synthetic
ggcgcgccagtccttccctggaatggtttcgaaagccttaccccttttatgttgtctggctccgttgcctttagctgttatgactaacgccacgagagctagtgtggcaactttggcagttggaaccatgttggccggtgccaagggcaagtcagtgaaaaaatccctaccatggttttcagctttgacgactcggaccgatg

SEQ ID NO: 8699 - DNA, 203 bp, Artificial sequence
  synthetic
ggcgcgccagtcctctgcggcccttatattcaccgcatatgccataagcggcaaggccaacgacatattccttgagaaagctggtgagatgacatggagccatgatgctcagctatctggatcaagtccaagagtggacgtcaaagttggtgagagtggggattttcggcttcgccacgagtctgaagcgactcggaccgatg

SEQ ID NO: 8700 - DNA, 203 bp, Artificial sequence
  synthetic
ggcgcgccagtcctactcgtggctgaaaacaggcgtaacagctggctgtctcatcatggccggcttccatccccttgccataccggttgcgggattgatttggtatggatatgtgaaacatgaccgtagaggtggagtcttgtgggacattccacacccatcaacatccaaagccggagacactgagacgactcggaccgatg

SEQ ID NO: 8701 - DNA, 203 bp, Artificial sequence
  synthetic
ggcgcgccagtcctgctatggtggaccatggagattgaatggaacgtgggacgggactactgaagtgcaacttatagcagtgtcacctggcaaagttcctatcaacgtccaaacgaaacctggaaaattcgtgctcactgatggacgtgagataggagcagttgtgttggactatccgcccggaacatcgactcggaccgatg

SEQ ID NO: 8702 - DNA, 203 bp, Artificial sequence
  synthetic
ggcgcgccagtcctatttgcatccaggcgctggtaagactaggcgagtcctacctgagatactgcgtgaagctgtgaagaaaaatctgaagacattggtccttgcacccacacgggttgttgcacgagagatggctgaagcattagctggactaccagtgcggtaccaaacaccatctgtcagtcaagcgactcggaccgatg

SEQ ID NO: 8703 - DNA, 203 bp, Artificial sequence
  synthetic
ggcgcgccagtcctactcaaccggtcgtgaactaatagacttgatgtgtcatgcaacattcacgtatcgtcagttgactcctggacggatggtgaattaccaattgtacgtcatggatgaggcccatttcacggatcctgcgagtattgccgcacggggaatcatttcaacaagagtcagtcttggggcgactcggaccgatg

SEQ ID NO: 8704 - DNA, 203 bp, Artificial sequence
  synthetic
ggcgcgccagtcctaagctgcagccatgttcatgacagccactcctccgggaacgacagacgctttccctgagtcaaacgggcatatagaagatgaagaaagggaagtgcctgatgctgcttggagtgctggctttgattggataaccgaattcaacggcaaaaccatttggttcgccccatccattacgactcggaccgatg

SEQ ID NO: 8705 - DNA, 203 bp, Artificial sequence
  synthetic
ggcgcgccagtcctatggagacatggcgcattggattgaggctaagattctcatggacaacatcacagtgcctgggggactttatcctcaattctatgaacctgagcgaatgaaatgtccagcgaccgatgggtttcacagacttgatgacaagaaaagggctgttcttcgcgatctcataaggcgcgcgactcggaccgatg

SEQ ID NO: 8706 - DNA, 203 bp, Artificial sequence
  synthetic
ggcgcgccagtcctaccaacgagtctaccaggaacgtgcttctttgaaaagtttcacggaatttgcagagggcagaaggagttacatgcctattttagatgtggttgggaaactgccccagcattttagtgatcgtgccattgatgcagctgacactattcgaactgttctcacagccaatcctgactcgactcggaccgatg

SEQ ID NO: 8707 - DNA, 203 bp, Artificial sequence
  synthetic
ggcgcgccagtcctcacgatcttaccgactggcaatagacaatctgccggaagcggctgaaactgctatgcttataggcatgctggtttctgtcaccatgggttccatcatgtttttgatgatgcccaaaggcataacccggatgtccttgggattgattgtcatgattatggcaacttggttcatgtcgactcggaccgatg

SEQ ID NO: 8708 - DNA, 203 bp, Artificial sequence
  synthetic
ggcgcgccagtcctcgttgatgcacttcgcccttatcctacccggattgaaagctaaagctgcccgggaagcacaaagtaggaccgccgctggaatctcaaaaaatcctttgatagatggtgtgaatactacggcgattccactcccatcagccattgaccctatgtttgagaaaaaactcggactgtcgactcggaccgatg

SEQ ID NO: 8709 - DNA, 203 bp, Artificial sequence
  synthetic
ggcgcgccagtcctggatgttgcttatagtttcgtctctagcggtgcttcttaatcgaagcacgctgcatatgactgaacttggaatccttggctcagctgctatatctcctctaatagagggacaagcttcggccatctggaacacttcagttgcagcctccgtgtgtaacttgatgcgtgggagctcgactcggaccgatg

SEQ ID NO: 8710 - DNA, 203 bp, Artificial sequence
  synthetic
ggcgcgccagtcctagaagaagattgtgcgcgtcaaaggatacacaaaaggtggaccaggacatgaggaaccagtgcccgttcaatcatacgggtggaacctcgtaacgatgaggtccaacgttgatgtgttctacttagggactgagaaatgcgacacgctggtttgtgacataggagaatcatcatcgactcggaccgatg

SEQ ID NO: 8711 - DNA, 203 bp, Artificial sequence
  synthetic
ggcgcgccagtccttagtgaaagagatgtcaaaaccgtgggacacgatttatggagttacaagtgtttgcatgacagacactactccattcggtcagcagcgcgtgtttaaggagaaggtggacaccaaggctagtgaaccaaaggcaggcatccgtgaggttatgcgcataactaaccgttggctcccgactcggaccgatg

SEQ ID NO: 8712 - DNA, 203 bp, Artificial sequence
  synthetic
ggcgcgccagtcctctaacctaaaagtccagcttatacgcatggctgaatctgaaggcgtcattcatggagatgacgttgaaacactatctagcagtgggcgtataaacttggaaatgtggcttgtcatgaacggggcagaccgtcttaagcgcatggcatgcagtggtgatgatgtcgttgtaaaaccgactcggaccgatg

SEQ ID NO: 8713 - DNA, 203 bp, Artificial sequence
  synthetic
ggcgcgccagtcctaggacatctcctgcggttcgctcatagggacacggtctagagctacctgggctgataacatcaagacagcagtcaatcaagtccgtggaatcataggaagggacgaaaagtatatggactatttggccattcaaaatcgcttcatgccccctctccaatttagattgggaagcgcgactcggaccgatg

SEQ ID NO: 8714 - DNA, 203 bp, Artificial sequence
  synthetic
ggcgcgccagtcctgatgttgggacctggttatccattaagacagcagtcgggaacggatcatgcatcgttatggctacagatgtggggacttggtgtgaagacactgttacgtatctttgtcccaaattggacggtgctgctgagcctgacgacattgattgttggtgtaaagttgtatcagtttatcgactcggaccgatg

SEQ ID NO: 8715 - DNA, 203 bp, Artificial sequence
  synthetic
ggcgcgccagtcctgttacctatggtaggtgtagacgagatggggtgagtagacgcagcagacgatctgttgctctcgcaccgcatgggacaggaaaccttcacacaggagaggcaccaatgtggaaatcacacactgacgctagtaaatacttgcagcgagtcgaacggtgggctctgagaaatccacgactcggaccgatg

SEQ ID NO: 8716 - DNA, 203 bp, Artificial sequence
  synthetic
ggcgcgccagtcctgttttggacgtgcacgggtgtgtgactattgcagcagaaggtaaaccaacagtggatttcaagttgacgaagttggagatgacgaaacttgcaaaggtgcgagcgtactgcctcactgcctccgtatcagacatcacagtcgaaagtggatgtccaggaacaggcgaaattcatcgactcggaccgatg

SEQ ID NO: 8717 - DNA, 203 bp, Artificial sequence
  synthetic
ggcgcgccagtcctgagcaagtcttgatcgtagacacagcctcacgctggtggatggtcaagagagactggttccaggacttagcacttccatggacatcaccgtcagcagacttctggcatgatcgtgaccggttagttgaatttggagttccgcatgctacgcgacaatctgtatactccattggacgactcggaccgatg

SEQ ID NO: 8718 - DNA, 203 bp, Artificial sequence
  synthetic
ggcgcgccagtcctgatcaagaaggagcatttttcactgccgtggcaaaagccccgtcagtcgagtggaactctgacaaagtcaagttagcgaccggattcctgaaatgcagaatcaagcttggcaacatgaagctgaaagggtcaacatacgtcacgtgtgcgcaagcgttcacctttgcgaagcggcgactcggaccgatg

SEQ ID NO: 8719 - DNA, 203 bp, Artificial sequence
  synthetic
ggcgcgccagtcctccagtggacacaggtcatgggacagtcgtgttccaagtatcatatgctggaacagatgcgccatgtaaaataccagtggccgtgactgacaaaccaaacggcgagcatgtcgggagattggtgacagcacacccattcatagcgaaacagaatgagaaggcagtcgttgaagttcgactcggaccgatg

SEQ ID NO: 8720 - DNA, 203 bp, Artificial sequence
  synthetic
ggcgcgccagtcctacccgaaacacaacaggactgcagtacggatggaagtcgtggggcaagacaatgtttgtttcagtgccaatagccgagaacactttcataatcgatggaaatgatgaaggagagtgtgcctcggacaaacgcgcttggaatacatttaagatagaggagtttggcacaggaatacgactcggaccgatg

SEQ ID NO: 8721 - DNA, 203 bp, Artificial sequence
  synthetic
ggcgcgccagtcctatgaaaaccaaagtcttcctggatttggctgacgcacaaacagaatactgcgacacggaactgttgggagctgctgtgaaaggcaacaagtctgttcatggcgaccccggattgtggatgactgcttctaaggaatcaggcgactggaaactggaatcattgtcaatgacggagcgactcggaccgatg

SEQ ID NO: 8722 - DNA, 203 bp, Artificial sequence
  synthetic
ggcgcgccagtccttcaccacgggaaagtaccattttggcttcagcagcagtcgttctgcaaatttgtgcggctgcatggcaatcaacaaagtctatgcaagtgctgaatgctcttgctatgggatggctgtacatcagagccattgtggtacccggagctctttccaaagcaatgcccctcatttgccgactcggaccgatg

SEQ ID NO: 8723 - DNA, 203 bp, Artificial sequence
  synthetic
ggcgcgccagtcctatgtgcgtcccaggcgtgttgagcctgacgccacatgctataagagtcagcatggttacaatagcggcaggcactctcatcaaaggcacgaagggaacatcagttcggaagcacatgccctattttttaggactagtaggagccgtggccggactggatccattaggtatgcttcgactcggaccgatg

SEQ ID NO: 8724 - DNA, 203 bp, Artificial sequence
  synthetic
ggcgcgccagtcctggttctacgcaagtaggagtgggagtgatgaaagactcagtgtttcacacaatgtggcacgtcacccgtggcgcctctctaacgagtggtaacggtagaatggatccatattgggcggatgttcgagaagatctcatcagctacggtgggccatggaagctcaacagcacttggcgactcggaccgatg

SEQ ID NO: 8725 - DNA, 203 bp, Artificial sequence
  synthetic
ggcgcgccagtcctggaactcttgatgcattcccagaatccaatagccatattgaagatgaggaaagggaaattccagacaaggcatggagcaccggattcgaatggattacagattacacaggcaaaactgtgtggtttgttccatcaattcgaactgggaacatcatagcgagctgcctcgcgaggcgactcggaccgatg

SEQ ID NO: 8726 - DNA, 203 bp, Artificial sequence
  synthetic
ggcgcgccagtcctgtcccttctgagagagtagtgttgggatctccaaaacccataagcccagctagtgcagcacagcgtagagggagagtgggtcgagaccccactcagcttggtgaccagtacatttacggaggcgaggttggtgacgacttctccaacatggtgcactggacagaagcgaagatccgactcggaccgatg

SEQ ID NO: 8727 - DNA, 203 bp, Artificial sequence
  synthetic
ggcgcgccagtcctttaatggacaacatcatggtaccaggcggtctgtacccacagttctacgagccggaggctgacatgctaagtgaaacggatggacacttcaggctggatatgaccaaacgtgacgtattcaaggatttggtgcgcaaggcagacttacccatatggctggcttatcaggtggcccgactcggaccgatg

SEQ ID NO: 8728 - DNA, 203 bp, Artificial sequence
  synthetic
ggcgcgccagtcctaagcatggtcatgaatacaaagacagaagctggtgccatagtgggccatctggacatctcatctacgatgattacggacagacagttgaatacaagcttgtgaatggcgagaggaagatactgcaaccaagatggattgaccaacgcacataccaggagaaaacagcactcaagcgactcggaccgatg

SEQ ID NO: 8729 - DNA, 203 bp, Artificial sequence
  synthetic
ggcgcgccagtcctgctttcatcgaatttgctgagggacgccgaagttatgttcctataatagaagtgctcggcaaacttccacagcatttcgccgacaaaactattgatgcggctgacaccttcaagactgtgcttacagccactccaggaagtagagcatacaggcttgcagttgacaacctaccccgactcggaccgatg

SEQ ID NO: 8730 - DNA, 203 bp, Artificial sequence
  synthetic
ggcgcgccagtcctgatgcagcagagacggcaatattcgtgacgatggtagggttcatgaccatgggaatactaattttcctgatggcacccaaaggcatgacacgcatgtcgctgggattcatgaccatcatggcagctacgtattttctgtgggcttcaggcatggctggatatcaaatagcggcacgactcggaccgatg

SEQ ID NO: 8731 - DNA, 203 bp, Artificial sequence
  synthetic
ggcgcgccagtcctcaagcaggaatactgctatcaatggataaaggaacgccatttttcaacttggactggggcgtcattctgttgggagtggggtgttggtctagcataacggggacaaccttgttgtgtgcgatcggactctcctgcgttcacttctcaatgactctacctggagtcagggctaaacgactcggaccgatg

SEQ ID NO: 8732 - DNA, 203 bp, Artificial sequence
  synthetic
ggcgcgccagtccttcgctaaaaggggttccccgtagaggagtcaccataagcaacacccgagggatggaatggaaacgcaaactaaacgcaatgaacaaggaaacctttcagagatacagacgagatgggatagttgaggtggacagaacagcagcgcgggaagctttaaagagtggaaatgtaacacgactcggaccgatg

SEQ ID NO: 8733 - DNA, 203 bp, Artificial sequence
  synthetic
ggcgcgccagtcctggaggtcacgctgtatcccggggttcagcaaagctcagatggctggtagataaaggatatttacgcctgatgggggatgtcacagacttgggatgcgggcgaggtggatggtgttattacgcagcagctcaaagaaacgttgtatctgtacgaggcttcaccaaaggaggtgaccgactcggaccgatg

SEQ ID NO: 8734 - DNA, 203 bp, Artificial sequence
  synthetic
ggcgcgccagtcctggacacgaagaacccattccggtgcagacttatggatggaacattgtcactctgcgtagcaaagtggacgttttctacatgcctacacacatgacagacactctattgtgtgacattggagagtcatcgtctaacatgctagtagaagaagagaggaccctacgcgtgctgaatcgactcggaccgatg

SEQ ID NO: 8735 - DNA, 203 bp, Artificial sequence
  synthetic
ggcgcgccagtcctctggttgaagagtggatcagaaagagtaagccaactcacttttgttgcaaggttcttgctccatacatgccaaatgtattggagaagatagacaagctaatgaaagttcatggaggtgctttagtgagagtgccactctcccgcaacagcacacatgagatgtattgggtatctcgactcggaccgatg

SEQ ID NO: 8736 - DNA, 203 bp, Artificial sequence
  synthetic
ggcgcgccagtcctctcacgtacatgaacaaggttgtgagagtgatgaggccaggcaagggaggaaagacgctaatggacatcattagcaggaaggaccagagaggtagcggacaggtcgtgacttaccccctcaacacgtggacaaacctcaaggtgcagttgattaggatggctgaaggcgaaggacgactcggaccgatg

SEQ ID NO: 8737 - DNA, 203 bp, Artificial sequence
  synthetic
ggcgcgccagtcctatggccaagatcagaaaagatatcaatgaatggaagccctcaacaggctggaacagttgggagggtgtgccgttttgttcacaccatttccacaagctcagcttaaaggatggaagaacactcacagttccatgcagagatcaggacgaacttattggaagagctagagtgtctcgactcggaccgatg

SEQ ID NO: 8738 - DNA, 203 bp, Artificial sequence
  synthetic
ggcgcgccagtcctcctggagcagggtggacgttgcgagaaaccgcaggactcagtaaggcgtatgcgcaaatgtggatgctgatccacttccacagaagggatctacgaaccatcgcgttcgcaatttgcagtgcagtgcctaaagactgggttcccacaggaaggacatcgtggtccatccatgctcgactcggaccgatg

SEQ ID NO: 8739 - DNA, 203 bp, Artificial sequence
  synthetic
ggcgcgccagtcctcccgagctggacaaggcatgtgtactagcggttagaggagacccccccaaaaatgaagggcactatatcgacacttgggaaagaccagaggtactcgctgattcaccgccaccagactacacggcacagcgcgccggaaaaggtagtttggaggttgtaaaacaacaagtatctcgactcggaccgatg

SEQ ID NO: 8740 - DNA, 203 bp, Artificial sequence
  synthetic
ggcgcgccagtcctgcttttgaccagtggctctgggttacttagccaagtccctttctcttattttcactagtttatgttgtgtgttgtctgttttgttttgtttaaattgtatacaagatccttcccgccgacacagacctcgacagtctggtgtaggagggttggtgatattaatttgccccaaaacgactcggaccgatg

SEQ ID NO: 8741 - DNA, 203 bp, Artificial sequence
  synthetic
ggcgcgccagtcctgagtgaccgtgatacgtggaaaccatgagtacatgtgtatccgtggaggatcgcccgggactggattccatatcccattgccatcccaacaaacggagggtatacccaccacgtgcgcgtttgcagtgggaatctgcaaatttagtcatactgcctgatagggtgtgggcctgccgactcggaccgatg

SEQ ID NO: 8742 - DNA, 203 bp, Artificial sequence
  synthetic
ggcgcgccagtccttgcttttggaagaatcggtcgtttcctgcttatggcacatcacgatattttcagttctttcgtggttcgttccatattaagattcaggtcaatgctgctgcaggttctgccggttcttttgtcgttgtctatgtgccaaatgaccattatcagagttggaataataaggatttgcgactcggaccgatg

SEQ ID NO: 8743 - DNA, 203 bp, Artificial sequence
  synthetic
ggcgcgccagtccttgtatttttgattggcaggctagccatgctccaacaaccaagtctccgatttttgggcgtggctataagatacgagagcttggtaatttgggtccattgtcaacagcctatcagttttggcgtggttctattattttcactctcaccatttttgctagcagttttcaccgtggccgactcggaccgatg

SEQ ID NO: 8744 - DNA, 203 bp, Artificial sequence
  synthetic
ggcgcgccagtcctaacgtgtatgttgaaacccgattggctcacaataatgcatcttccaacgttataaaatgcgcactttttgtgcgtggcggcgaggattttgagttcttggcgccatgcggtgacactgtcaagttccatggttggggatcggatatggatgaagctgatcctttggatgacatgcgactcggaccgatg

SEQ ID NO: 8745 - DNA, 203 bp, Artificial sequence
  synthetic
ggcgcgccagtcctatatttgccaaagatcatatgcaccttgattatttctttggtcgtggatggtatgtcatgaaacataactatgagggcgagagccgtgcccctttttatattgatgtggatgctccatcgtctatgccaggcgctgcaatgaatttcttttctttctgggctggggaggttaaccgactcggaccgatg

SEQ ID NO: 8746 - DNA, 203 bp, Artificial sequence
  synthetic
ggcgcgccagtcctttccatgttgtcaacaatagtgatgacccaatggctgtcactcatagttattcgcatgaggctagcactgttggtcccgctgaaggtctagggttgataattgtgccgcctcgtgagatgatatcatttgcagcccctttctattcctggtcgccattgcggactgtgcttgctcgactcggaccgatg

SEQ ID NO: 8747 - DNA, 203 bp, Artificial sequence
  synthetic
ggcgcgccagtccttctgaattttctagtgtaagacttgtgtcgtctcaaacagccgcttttgtggatgccctttttaatggtgatttgtataaactctctgaacaattcctttcaatgatggatattggttctgattctgactataaacaattaatcaaggagacgttgggatcgtaccctcctgaacgactcggaccgatg

SEQ ID NO: 8748 - DNA, 203 bp, Artificial sequence
  synthetic
ggcgcgccagtcctatgaacccatttgagtcacagagtttggctgcatttaatgctttgtccttgagtgctcgtaattgtacatggtggattgagctcttccagaaattgcacacgttcgtgcgtgacttattgaaaccagatacttcggcaaagtttcatgaatggtgtaggaaaaataagatgctccgactcggaccgatg

SEQ ID NO: 8749 - DNA, 203 bp, Artificial sequence
  synthetic
ggcgcgccagtcctgacatgcgtaagagcatgttagctgttaagctagggcaagaatatcagaatacgtgtgctcgtgaggagccccttggtgtgctgctacgtggcgaacctggacaaggaaaatcctttatgacacatctgctcgtgcgtagtgtttgcaatgctatgggctggaaggtttctgagcgactcggaccgatg

SEQ ID NO: 8750 - DNA, 203 bp, Artificial sequence
  synthetic
ggcgcgccagtcctagtgtgtttagccaccctacatcaagtgagttctttgatgggtatgctgggcaaccgattcatcttatcgatgattttgggcagaatgtggaggaacctgaatataaagttttgtgccagtgtatgtcttccataccattttctgtgcctatggcttcgcttgaggaaaagggtcgactcggaccgatg

SEQ ID NO: 8751 - DNA, 203 bp, Artificial sequence
  synthetic
ggcgcgccagtcctttgccttatacttcaaagttagttattgccacgacaaataaatcagattggtcatctcgtaccttgtgcgctccaggtgctttgaagcgccggtttcctattgtttataccgttcgcgcacggaggactttaaccaagaatggccttcttgatgtcaacgcacatatgagtgcacgactcggaccgatg

SEQ ID NO: 8752 - DNA, 203 bp, Artificial sequence
  synthetic
ggcgcgccagtcctgatatggtgtcccttcttggccctgctgttccagttgcttcagtgttcgactattgcgctagcactggtgttgtacccatgttaaagcaagcgtcggaatctgtccttaagtggtttgattcgtgtgttgacagcatggtgtcgtttgttacacgtaacaaaaagtggattgctcgactcggaccgatg

SEQ ID NO: 8753 - DNA, 203 bp, Artificial sequence
  synthetic
ggcgcgccagtccttttggtgctttaactatgagtgtgttaggtattgctatatctatgcttaaggaattggacagccagcgtccctataatcagaccgcccataagatgcctgttactaagctcacgcgtgggcgacgtgtgcttgtttcccaaggcccttataatgaattccagcattattctaaacgactcggaccgatg

SEQ ID NO: 8754 - DNA, 203 bp, Artificial sequence
  synthetic
ggcgcgccagtccttactgtgtttttctccattctgggtctattacacttcatggccttgcatttggtggtaattcttttttgttttacacacatggccttgctactcttgagcgctatgataattgggtgcttgactataatgggtccatgtttgatttagatattgaaactgtggatgagttataccgactcggaccgatg

SEQ ID NO: 8755 - DNA, 203 bp, Artificial sequence
  synthetic
ggcgcgccagtcctaagattgaacaaggccttacaaggtgcattgaaagtagcgattttgactatgtttttagtgccaaaagagtcttttgcaagctgttccggcaactttatgattctgaccctattgagactggatttgctgttggtatcaactgtattgctgactggaagaatttgttggacggccgactcggaccgatg

SEQ ID NO: 8756 - DNA, 203 bp, Artificial sequence
  synthetic
ggcgcgccagtcctatgtatgattacatttatgattttgatctgaaaggatatgatggttctataccacgtcagctcatgatagatgcttgtcgtgtcttgagtgaaagttgtagtgatgaagagttagcctacaatttactccacaaaactgtggattcacagcatgtggtaggtaaccagcttttgcgactcggaccgatg

SEQ ID NO: 8757 - DNA, 203 bp, Artificial sequence
  synthetic
ggcgcgccagtcctacagtttctggtggaatggcttcaggatcaccttttacaactattgtcaatacagcttgtaatatccttgcaaatatgactgttcttgaggaggagggtgttgagtatacgctagtgtgttatggtgatgatatactagtctccacctccgatcccatttctgtcaatgactatcgactcggaccgatg

SEQ ID NO: 8758 - DNA, 203 bp, Artificial sequence
  synthetic
ggcgcgccagtcctgttgacaaaatggggcaatattttgggttcactgtcaagcttgatggtgattatcccaagactaaaaataattttacttttctaaaacggagaactacttactggaacggcattccagttggagcgatggaagttggccttttgttgcaacatcttgggtattgtcggtcagtgcgactcggaccgatg

SEQ ID NO: 8759 - DNA, 203 bp, Artificial sequence
  synthetic
ggcgcgccagtccttccctacccaagccccagtacaccactatggagttctttatatcccagcgcgtggtggacgcactgtgaggtattccgataccaccccactcgcacttcctggatagtgcgttagatatgcccgacatatcgcttccaggaccaaagccccccttttctctttcccaaccagctcgactcggaccgatg

SEQ ID NO: 8760 - DNA, 203 bp, Artificial sequence
  synthetic
ggcgcgccagtccttcgccactcaagctgtaattccatgtccggtctttccggccttagtatcatggaaatgtggtcgtgctcaaatgaaattgagttgacattgatcaatgaaagttgcactgaactttgctaaactggctagcgccacctggtgtgtgccgttggtctcctcacatggtaacatgtcgactcggaccgatg

SEQ ID NO: 8761 - DNA, 203 bp, Artificial sequence
  synthetic
ggcgcgccagtccttatggatgaatgagtagaccccctgaaggtaccccattacatgggatctgatcagggccacattctgcgtgtctccccgcacttgtggttaaaaccatgaaagttcatcccaaacaatcttttcctcttctttttcttttagtggtgacaacctactggattggtgattaccaacgactcggaccgatg

SEQ ID NO: 8762 - DNA, 203 bp, Artificial sequence
  synthetic
ggcgcgccagtccttaacatataatgtaacaggaaataacaattcctttgacactgaccaaggattaatggcttctggatccgttgcagccactggacatggaaatgcttctgccactgatgtaacctcccctgaccccatccaagctaatgccacaaaacccactaaacccaagcccactcgctctacgactcggaccgatg

SEQ ID NO: 8763 - DNA, 203 bp, Artificial sequence
  synthetic
ggcgcgccagtccttcccctctaaagctgcttcttttgacgttattgctatgacctcctcccgcggtgtagatacccccccttcgacgacccgctctgctgagaaccctgcttcaatcctccaatcggcacgaactcgcaatcagactaatgctatggcatctgatgtaaaggctgaagaaactggttcgactcggaccgatg

SEQ ID NO: 8764 - DNA, 203 bp, Artificial sequence
  synthetic
ggcgcgccagtcctctgctcccaacacgcaaggactagtgaccatgcccgccgctggttccggcgatggttacacatattcagcccagacccgcgactttcatcccgtgatgcaagccccaccacccctcccgcatgtagatcaccttcccgggcaaatttcatctttttctgaattggcaatgtgtccgactcggaccgatg

SEQ ID NO: 8765 - DNA, 203 bp, Artificial sequence
  synthetic
ggcgcgccagtcctctcaaactgcatctggtagattgatagtgtcctacaccccccccggttttgctgccccatctaggcttactgatttatccccttctgctaaacatctttgggatttgacttcatgttcttctgtctccatccttatccccaactgtttccctggtggctgggtccctaccctcccgactcggaccgatg

SEQ ID NO: 8766 - DNA, 203 bp, Artificial sequence
  synthetic
ggcgcgccagtcctttttcaatttcaaaggatttggactcatgcctcagtattccccaatcaagaccaatactcccttctatcaacccccatgcttcctgagcaatgcccgcatcccctccaagcgccaaggaggtgaagccattgacatatctggtgaaccagtgtatgtgattcgggcacctcgcccgactcggaccgatg

SEQ ID NO: 8767 - DNA, 203 bp, Artificial sequence
  synthetic
ggcgcgccagtcctctttccgcaactgtacccactttgtagaagctttgactggatacaacctgcagaactcaggacttggcataactctaggattaggtgctgctgctgttgccactgcttcagtgggcgtcgcaaaaacgctccttgacgctcacttccgctccctccctcagccccgtccccgtccgactcggaccgatg

SEQ ID NO: 8768 - DNA, 203 bp, Artificial sequence
  synthetic
ggcgcgccagtcctttaggaattataatactaggatgactgccctcaccaacaatgtccccgccccccgtcccgagcccgttgtcctgtatatctatggtccccctggtactggaaaatctctgcttgctaccctccttgcttcgatttttgcttaccacctttccggtgatccgaacgatgtcttttcgactcggaccgatg

SEQ ID NO: 8769 - DNA, 203 bp, Artificial sequence
  synthetic
ggcgcgccagtcctcgcaacctcctggaagttatgagtactttgatggataccatggtcaatctgttcacattgtggatgatattggccaggcggtcgatggatccgactgggttcatttcccgcaaatggtgtctacctcacccttcaagccccccatggcggcgcttgaagataaggggatgctctcgactcggaccgatg

SEQ ID NO: 8770 - DNA, 203 bp, Artificial sequence
  synthetic
ggcgcgccagtcctacttcacctccgattgtcctttccttaggttagaaacttgtaggcttactgtagatatggccaatgtaggagataaaatggatttcaaatttaggcacgtagatcaaattgtagatgaggttctcttgatgattcaggctaaacaccataatatcaatacctttaaacacttgacgactcggaccgatg

SEQ ID NO: 8771 - DNA, 203 bp, Artificial sequence
  synthetic
ggcgcgccagtcctatgaggatgtgcaagtgcaatcctccattccgactgaagtcgaggaagcgattcgtgaaaacaaaccgctttctttcgtccagaaggtatggagttggcgcaagcccatctttgtcggtaccgctgttctgtccatgattacttctttgtctgtgctcttctctctgacctatacgactcggaccgatg

SEQ ID NO: 8772 - DNA, 203 bp, Artificial sequence
  synthetic
ggcgcgccagtccttgtgtggtgccccccttgttctttccactcctgctggccctcgccttgtcggtgtacatgtagccggtgtcgctggcgttaccggttacgccgatccacttgtggatcttctgcacgccttcaaggatgctatgccccaatccctaattgtagacattccccgctctggccctccgactcggaccgatg

SEQ ID NO: 8773 - DNA, 203 bp, Artificial sequence
  synthetic
ggcgcgccagtccttcgctggtagaatgatctttggccaactttttgccctcttccattccaatcctggtatgtttggctctgctgttggttgtgaccctgattttcattggactcccttcgcccattcctttaaacccttccggaatgtgtggtctcttgactattcctgttttgattctaccctcccgactcggaccgatg

SEQ ID NO: 8774 - DNA, 203 bp, Artificial sequence
  synthetic
ggcgcgccagtcctcctctatcttcaattcgatgatcaataacatttgtgtgttgtctgccctcatctcccgtcctgactttgttcccacccctaacaattataggattcttgcttatggtgatgatgttttgtatgcttgtaccccagacttccacccccgtgatcttaaggctttctatgataaatcgactcggaccgatg

SEQ ID NO: 8775 - DNA, 203 bp, Artificial sequence
  synthetic
ggcgcgccagtcctggaccccgctgcaagtgacccctgctactaaagaaggtgatttccctaactcctcttctctctctgatgtcacttttctgaagcgatggtttgtcccggatgaaactatcccttactactatcaccctgtgattgagcccgatacttatgaacagagtgttatgtggtctagggcgactcggaccgatg

SEQ ID NO: 8776 - DNA, 203 bp, Artificial sequence
  synthetic
ggcgcgccagtcctgtggcgaatttcaggataccgtcacttctctctgctttcttgctcaccacgctggtccccgcaactacaccaattggattgctgccgtccgtgatgcttgtaaacgcaatggctatgaccctcccattttcttagaatattcttatcttcagatgcgctggatgcaacttgtgtcgactcggaccgatg

SEQ ID NO: 8777 - DNA, 203 bp, Artificial sequence
  synthetic
ggcgcgccagtcctctggctaactgcctaggcctgcttggcagtataataaatcaggtgctctggccgagctaaatggctagttgtaggacttacaacctgcacctagggccgccgccatctgggttttcactcaggtggtacctcccatgcggtatctcatactcctaggtctatcccaatgagttccgactcggaccgatg

SEQ ID NO: 8778 - DNA, 203 bp, Artificial sequence
  synthetic
ggcgcgccagtcctagaaagtgtggttgtcccaatgcttaagccacatttaaacgctcattgggaagagttacctagggagcctgtatgtgttgtaggttatgagatttgttcaaaatgtagcatacaggataggtgttttagaacagtcgattggttacgtccccaagatgtagtgtgtaattcatgcgactcggaccgatg

SEQ ID NO: 8779 - DNA, 203 bp, Artificial sequence
  synthetic
ggcgcgccagtcctcagtgcggcttcacctaaatgtggtgaagagatggatacagaaagtagttgtgtccgagaagaaggtgaaatggatgtagattatagtgatcctttatctttgttatatgaaggaattcgtcacaattatatccccccagttgattatgagtatgaatgtggagatgataaggtcgactcggaccgatg

SEQ ID NO: 8780 - DNA, 203 bp, Artificial sequence
  synthetic
ggcgcgccagtccttatatgtactgtagtttgtggaggtatgcgttttgctgctttgggtgattctcattctgaagctcaagtgaatgctgttaaaaatttcttatctgttgttggtcatattatttgtcctgaaacccacatgtttgctttatctactatacctcaacgatcgagtgaatccttggacgactcggaccgatg

SEQ ID NO: 8781 - DNA, 203 bp, Artificial sequence
  synthetic
ggcgcgccagtcctcatctcttcaacattagcctcatttaagaatgttttagataagatttatgcatggcttccttctactaacccagacattattgcattagttaaggatatttttgtttcgcttttctttgctataatcactcgatctcttacacctttggttcaaggcatatctagttatgctttcgactcggaccgatg

SEQ ID NO: 8782 - DNA, 203 bp, Artificial sequence
  synthetic
ggcgcgccagtccttgcacctcgctctatccatagtgctgatgcctttttgcgtaggttggatatacaagtgcgtgtggatgtagatagtaagtttgctcggtatgtacccagcgtggcagctcagcggaaagttccagatgaaagtaaaatttggttgcatcagaatcctggtaaaacattgctagacgactcggaccgatg

SEQ ID NO: 8783 - DNA, 203 bp, Artificial sequence
  synthetic
ggcgcgccagtccttaagactgaagttccactccccgacttacctagtgaattggaagagtatgcaggagctttccctgcagcgcacggttcagcgacaatgtgctttgctactgactggttgggacagttcactaatctgaccgagtccctgaatttattgaacaaaacatttagccctcgtttcgtcgactcggaccgatg

SEQ ID NO: 8784 - DNA, 203 bp, Artificial sequence
  synthetic
ggcgcgccagtcctttgtaaggtaaaggcattgttgtctgaaggtggttcattgatgcaattagtaggtgctcgatcgtgtgtgttcgcgtgtgatttgtgcaagcgcgttaagaaaggtgatttaaatttgcgtgttcgtagtagatctgatggaaccataacctttgtgccgagtgacgttcgtcgcgactcggaccgatg

SEQ ID NO: 8785 - DNA, 203 bp, Artificial sequence
  synthetic
ggcgcgccagtcctaagtccaggtaaaccaggaaaacagacgtggctaggttcaggtgagttcatagtagataatgtggaccttaaaaaacatgttgatatgatagttgagaaagcacagaatggtgtagttgatgtaggtttaggtgtttttgcagcgaccttgaaggatgagcgtcgtcctttggacgactcggaccgatg

SEQ ID NO: 8786 - DNA, 203 bp, Artificial sequence
  synthetic
ggcgcgccagtcctgaaagtcgctgcaaataagactcgagtgtttgctgcttctaatcaagggttggctttggccattcgtagatattatctagcatttatggaacatgttatgactaacagaattgataatgaaattggtttgggagttaatgtttattcttatgattggacgcgtattgtgaataacgactcggaccgatg

SEQ ID NO: 8787 - DNA, 203 bp, Artificial sequence
  synthetic
ggcgcgccagtccttgtcttttatggtgatgattcattgtgttgtgtgtcagataaggtgtgtgagtggtttaatcagcatgtcatcacccgtttaatgttggtgactggacatgattacactgatgaaacaaagagtgggtctccacctccttatcgctctttgtctgaagtgtcgtttctaaagcgcgactcggaccgatg

SEQ ID NO: 8788 - DNA, 203 bp, Artificial sequence
  synthetic
ggcgcgccagtcctatggtttgttattcaacgtgcgtgtaccccaggcagccccgaaaacacgcgtcaggagacagttccaaccactttgggcgaagttggtggctacgcttgcgtagtggaacttatttattgcctgctattcctactgaaattaataatgatacttcttcctcttctgctggacttcgactcggaccgatg

SEQ ID NO: 8789 - DNA, 203 bp, Artificial sequence
  synthetic
ggcgcgccagtccttggcagactactgataaagagattgctcccactatgtctcatagtgaactagtatcagatttcaatcagcctttccttaaagaaatttctcttccggatgatattgtgcgtaaatctccttttatgtccgctaagcttgcaaatattgcttttgttcgcagtgattatgaaattcgactcggaccgatg

SEQ ID NO: 8790 - DNA, 203 bp, Artificial sequence
  synthetic
ggcgcgccagtcctggtctggatgaaatgtcgattgagtacctagctctgcgtccctatgtacttcagcgttacaccatcaaaggtggtgatacgcctgatcctactaaaactgtcatagctgatatccccattagtcctgttaatttttccttgtttggtgctgttataaagaactatcgtactcttcgactcggaccgatg

SEQ ID NO: 8791 - DNA, 203 bp, Artificial sequence
  synthetic
ggcgcgccagtcctcttgtgaccaatcatcctattatttctgaaccgattggaccttcttatgtggcgcaagatttttcatccggagatactattattattgctcaggataccctcgttacttgtgcttttgcccagtcgaccaccaatttcagtgtttctttaactaaagaggatgtttcaaccaatcgactcggaccgatg

SEQ ID NO: 8792 - DNA, 203 bp, Artificial sequence
  synthetic
ggcgcgccagtcctcgtagatcaagtccagttgatattgttcgtggtgcttctgttaccttacctggtatcaatttcggcactgacaattcgctgcgacagagtttggtgaatgtaatttcctatatgtaccgttttactcatggaagcatttcttataaaattatacctaaagagaagggagatctgcgactcggaccgatg

SEQ ID NO: 8793 - DNA, 203 bp, Artificial sequence
  synthetic
ggcgcgccagtccttacatcacgactgttagcccagatgtggtggagaagaatcctaatgcttatcagtttgatactaatcgtgctatgcactttatcaatacttctttgaacccaattgcccaagtcactcttcccttttatagcccggcagagaacttggtattggattcgcgctcttttccccaacgactcggaccgatg

SEQ ID NO: 8794 - DNA, 203 bp, Artificial sequence
  synthetic
ggcgcgccagtcctttgagtgatctagtcattggcaatttagacaggtctgaaaatgaatattttgttcttgctagtgctggtgatgatcatactttttctcaattggctggatgtcctgcttttacttatgggccatccaggacttaaatctccgatgggagtgcaccctatgggtgtttgacccgccgactcggaccgatg

SEQ ID NO: 8795 - DNA, 203 bp, Artificial sequence
  synthetic
ggcgcgccagtcctggaattgagtgtctggtacactctgtgtaacagtgaaaacaatgtgatcacttcggtgagctagtagcctgtggaccaacaactggtaacagttgcctcaggggccaaaagccacggtgtttacagcaccctactggtttgattggagcaatccaagatgtcacagagttagtacgactcggaccgatg

SEQ ID NO: 8796 - DNA, 203 bp, Artificial sequence
  synthetic
ggcgcgccagtcctattgccaagcagtccgtactggtatcttgacataccgtgcagttttggatagtgaaggatgccctgacggtacccataggtaacaagtgacactatggatctaagcaggggctcactctacgctgctttacagctggctgtgagttaaaaaacgtctagctatccacaacctagcgactcggaccgatg

SEQ ID NO: 8797 - DNA, 203 bp, Artificial sequence
  synthetic
ggcgcgccagtcctaattcaacacgctttcatggtggtgctttgggtgtttttatggtgccacagtttgtttacactagccaaactgatttgactggaccaaaacccttgatggcaacagattatccacttttcaaccagcaacagttgtttctgtttccacaccaaatcttgaatcctcggactaatcgactcggaccgatg

SEQ ID NO: 8798 - DNA, 203 bp, Artificial sequence
  synthetic
ggcgcgccagtcctcagggtgaggacacccagataacacctgccgaaactgggcagactcctgaggttacagctgaaaattccaaccagaatgtggtgccaattccatacgcacctcagaggatttcacatagcgctgtgcgcttttggtatgacagatttttcttagctgacagccttcaggtcaaccgactcggaccgatg

SEQ ID NO: 8799 - DNA, 203 bp, Artificial sequence
  synthetic
ggcgcgccagtcctatagttaaatggctgccgagccactgcaggacacaaccaccacctttcccctcttcagatgaaaacccagatgatggaagtaaagatattaagaaagaaagtgcctctagtggcttcagcctgctagttgtctttaaaaattcttctaaacctctttcagtgaattcaggtgaccgactcggaccgatg

SEQ ID NO: 8800 - DNA, 203 bp, Artificial sequence
  synthetic
ggcgcgccagtcctatcaaacctaaaacagatgatgtgccattgattgatttgaccaacatggggccaaagattgactaccccggctcccataatccatttggagaatcactggccgacaagctggttcaggaaaatgagagattagttgctgaagcgcaggctgagtatgcacgccgtagtgctaatcgactcggaccgatg

SEQ ID NO: 8801 - DNA, 203 bp, Artificial sequence
  synthetic
ggcgcgccagtcctggagtttggaagcaacaagaagaagatgcctccgaggaacgctttagggaaagaatgcaagtgtaccctcagatgatggaacagtatgaacagtacaagaattctcctagacaccagaaatggaatgactgcaagacatggtttgatgagatgcggaaacttgcagtattgcatcgactcggaccgatg

SEQ ID NO: 8802 - DNA, 203 bp, Artificial sequence
  synthetic
ggcgcgccagtccttgttcagcacccctccatatggtgaaagctgacatacatttgttctctagtgcgtgcttgaagtttaaagaccgcatggctagatgcgagtgtagtttggttggagtctatgatagggtgatgaactctcacaaaagaaggaatgatttggccaataaattagttgaaatttttcgactcggaccgatg

SEQ ID NO: 8803 - DNA, 203 bp, Artificial sequence
  synthetic
ggcgcgccagtcctcttgcagtgcgtggcaggctggttgtaatgaacttccacttgtggaatgatgcaacacacctgcagcttgatggagaatggatgccacgtgacaccatacccgcagtgagacccgctgcaaacggcatccccacagaacttgtcttcatgaactgggcaaaaaccccaggaaggcgactcggaccgatg

SEQ ID NO: 8804 - DNA, 203 bp, Artificial sequence
  synthetic
ggcgcgccagtcctgtactgaagtataaagcccaaacagcaccagggttttgtggcagtgttgttgttgttgacaacggcatctggaagaaagtatttggattgcattgtgctggagcacatggtgttgggatggcagcaattatctcgcgcgagatggttgatgctatttcacagcttgctgaattccgactcggaccgatg

SEQ ID NO: 8805 - DNA, 203 bp, Artificial sequence
  synthetic
ggcgcgccagtcctcacgttggtgaccgtactgatggaccattagccatgattagaggagcccgcttttatgcacgacttgtgcgagcaaagtgtggacaggtgaatgaacgactgtcgctgcacgaggcagtctttggaacagacaaccttgacccaatggaccagacgcgctctcctgggtggccgcgactcggaccgatg

SEQ ID NO: 8806 - DNA, 203 bp, Artificial sequence
  synthetic
ggcgcgccagtccttacatcggtaccaagagacgcccagacctgctttggcagacggatgaaggcttggacatggatccggtgctgcgtgccgaactgatgctcatgatggaaggaaatttttcccaccacaaatttgttacctttcttaaagatgagctcagggacaaagaaaaagtgaaacaaggccgactcggaccgatg

SEQ ID NO: 8807 - DNA, 203 bp, Artificial sequence
  synthetic
ggcgcgccagtccttttgttgatgtggattattcgggatttgatgcaacacactctaccttttcctttcaatgcctgaaaatttttcttcaggagcttggatttgatgatgtggccttgaaatatgtggattctttgtgtgattcaacccacatttgggatgatgagatttttaaaatttcaggaggacgactcggaccgatg

SEQ ID NO: 8808 - DNA, 203 bp, Artificial sequence
  synthetic
ggcgcgccagtcctactgtccaggagaagctgttgtccgttgcccgcttggcgcaacatcgtggcgagcaggactacaaggctcttatggaaccttttgagtcttgtggctattttgttcctagctttgatgaccttgaacttgagttcttttctcttttctttggttgagttaggtgatggagttttcgactcggaccgatg

SEQ ID NO: 8809 - DNA, 203 bp, Artificial sequence
  synthetic
ggcgcgccagtcctaggacataggacagatgttggatggactcaacaagagaggaaagaagaaaagaggaggaagcactggtggtttgcttttgattattagcttctcatgtgcgtgtgcccttaaggtgggatcgtacaatggaaagccgctgatcactgtaaaccaaacggacgtgcagaacccaacgactcggaccgatg

SEQ ID NO: 8810 - DNA, 203 bp, Artificial sequence
  synthetic
ggcgcgccagtcctgcacgccgacgagacatgccagacggtcaagaagagcgatcacagtccatcatcatggcgaaagcctattggaagcgaagaacacaccatggatggactcaacaaaagccacaaagtacttgactaaggttgagaactgggctattcgaaatccaggatacgctctagccgcagcgactcggaccgatg

SEQ ID NO: 8811 - DNA, 203 bp, Artificial sequence
  synthetic
ggcgcgccagtcctgtgtgactataacggcgaaagacaaaccaacaattgatgtcaaaatgatgaacatggaggcaactgacttggccctcgtccgctcttattgctatgaacccaaaataaccgatgtcagtacagagccacgctgcccaaccatgggagaggcccacaatacaaaggcatccagtccgactcggaccgatg

SEQ ID NO: 8812 - DNA, 203 bp, Artificial sequence
  synthetic
ggcgcgccagtccttgaccatgaacatgaagagctggctagtgaacagagactggttccatgatttaaatctgccatggaccggttcagcagcaggaaattggcaaaatagagagtcactagttgaatttgaggaggcgcacgccaccaagcaatcagtggttgctttggcctctcaagaaggagccccgactcggaccgatg

SEQ ID NO: 8813 - DNA, 203 bp, Artificial sequence
  synthetic
ggcgcgccagtccttgcacgcggcactggccggagcaattcctgtgaagtacacaagcagcaagctggaaatgacatcaggacacttgaaatgtagggtaaaattgcaaggattgaagttaaaaggaatgacttacccaatgtgctctaacaaattcagcctagctaggaatcccacagacacggggccgactcggaccgatg

SEQ ID NO: 8814 - DNA, 203 bp, Artificial sequence
  synthetic
ggcgcgccagtcctcctttggcgactcgttcatcctagttggtagtggagaaaatcaaattaaatatcagtggcataagagtgggagctcaattggtaaagcatttgtttccaccctcaagggagcccagcgtatggtggcacttggggatactgcctgggatttcggatcagtaggaggtttctttacgactcggaccgatg

SEQ ID NO: 8815 - DNA, 203 bp, Artificial sequence
  synthetic
ggcgcgccagtcctggaaaggaatatgtggagtcagatcagtgagccggttggaacacaacatgtgggattcgatcaagcatgaactcaatgccattctggaagacaacggggaggatttgacagtcgtggtggaaccaattgtgggacgtctcaggtcgacacagcgaagattgacgtggacggaagcgactcggaccgatg

SEQ ID NO: 8816 - DNA, 203 bp, Artificial sequence
  synthetic
ggcgcgccagtcctaagagttggaatatggatggaagaaatgggggaaaaccctctttacgagtccaggcatgtcaaacagaacttttgtggtggatgggccaaaaacgaaagagtgtcccgatgacaagagagcttggaacagcttgtacgttgaggactttggatttggcatcacatccactagagcgactcggaccgatg

SEQ ID NO: 8817 - DNA, 203 bp, Artificial sequence
  synthetic
ggcgcgccagtcctcaacagtgaaagtgacttcgacctgccatgacagggcagcatcagctcgaaccaccactgccagcgggaagctcattcaagactggtgttgcaggtcatgcacactcccaccattgagatacatgacaaaaagtggatgctggtatgccatggaaatccggccgacaacacacgcgactcggaccgatg

SEQ ID NO: 8818 - DNA, 203 bp, Artificial sequence
  synthetic
ggcgcgccagtcctgtgaggacacccttatcaagtctaaggtgagcgcattcagaggcgatggcatggaaccatttcaactgggggttctcttgatgtttgtggccacacaggaagtcttgcggaagagatggacagcaggcatggcattaccagcaatgctcatgtttttatgtgctttgatctttgcgactcggaccgatg

SEQ ID NO: 8819 - DNA, 203 bp, Artificial sequence
  synthetic
ggcgcgccagtcctttttggttggaattgccctttcaatgttgaccttggccatgcaagattgggacatgacaatcccgagcctgcttaactcgggagcggccgcttggttgctgctgagagctgtgagtgagggaacagtaagtgccgtctgcattccagtgctgggcatgctggctcctggacttccgactcggaccgatg

SEQ ID NO: 8820 - DNA, 203 bp, Artificial sequence
  synthetic
ggcgcgccagtcctgcatcgcgggaattgacgtggttcgcataggattgctgatcatagggattatgtcgctgatgagggaacgcaacaatgcagcagcaaaaaagaaaggaggattgttgataggactggccctagcagaatctgggttgatcagccctcttgtttatgccggactaaccttggcaccgactcggaccgatg

SEQ ID NO: 8821 - DNA, 203 bp, Artificial sequence
  synthetic
ggcgcgccagtccttaaaaccaaacatgaggagaggatggccggtgagtgaagcactgacagccgttggattgacgttcgcactggctggtggcatcgcacattttgatgaaggaaatatggccattccgttagcagtgggcggcataatgttggttgtggcagttgtgacagggttcacaacagatccgactcggaccgatg

SEQ ID NO: 8822 - DNA, 203 bp, Artificial sequence
  synthetic
ggcgcgccagtcctacaacccttatctccttccagtgacgttgggagcttattggctcacagtcaaggctccgaaacgtagcggagcgatttgggatgttccagcaccaaaggaaagaaggaaagcagaaattagcacgggggtgtttagaatcatggccagaggaatttttggaaaataccaagctgcgactcggaccgatg

SEQ ID NO: 8823 - DNA, 203 bp, Artificial sequence
  synthetic
ggcgcgccagtcctggttgttaacaccacaaagggtgcctaactacaacttattcgttatggatgaagcacatttcactgacccagccagcattgcggctcgtgggtacatttccacaaaagttgacctaggagaagcggcagccatattcatgactgcgacaccaccaggaacgagagatgcctttccgactcggaccgatg

SEQ ID NO: 8824 - DNA, 203 bp, Artificial sequence
  synthetic
ggcgcgccagtcctaattaaatgggccagttcccatcacagcggctagtgcagcacaaaggaggggaagagtgggcagaaatccagtgcaagttggggatgaataccactttgctggaccgaccagtgaggatgatcacgatttcgcccattggaaggaagcgaagatcttgctagacaacatcaacccgactcggaccgatg

SEQ ID NO: 8825 - DNA, 203 bp, Artificial sequence
  synthetic
ggcgcgccagtccttaccaaacggactggtggcgcaattgtatgagcctgaacgagagaaggtcttttccattgatggggagtacaggctgagaactgagcaacggaaaaactttgtagagttcttgagaacgggagacctgccagtttggatatcgcacaaactggctgacgctggaatagcttacacgactcggaccgatg

SEQ ID NO: 8826 - DNA, 203 bp, Artificial sequence
  synthetic
ggcgcgccagtccttaggaaaagggatgccctttgtgtccatggacctgtcagtgcctcttcttttactcggatgttggggacagttcaccatgaccaccacactcacgacaatcgtgttgttgattgtgcactatgcattcctcgtgccaggatggcaagctgaagcaatgcgtgcagcgcaaaggacgactcggaccgatg

SEQ ID NO: 8827 - DNA, 203 bp, Artificial sequence
  synthetic
ggcgcgccagtcctggacagctgctggagtgatgaagaatccagtggtggatggaatagtcgccacagacatacctgatctagacgccagtactccgattacagagaagaaattcggccaagttattctaatagttgtgggagtctgtgcagttttcctaaaaccagggaccatgtcgctaacagagtcgactcggaccgatg

SEQ ID NO: 8828 - DNA, 203 bp, Artificial sequence
  synthetic
ggcgcgccagtcctccgcaaaactacggtggatggtcgagagaggttttgtgaagccacacggaaaggttatagacttgggctgcggcagaggaggctggagttattactgcgccaccttaaaattagttcaagaggtgaagggttacacaaaagggggaccaggtcatgaagaacctgtgatgatgccgactcggaccgatg

SEQ ID NO: 8829 - DNA, 203 bp, Artificial sequence
  synthetic
ggcgcgccagtcctgagttgaagatttctgtgtaaaaattctttgtccatacatgcccaaggtgcttaaagagctggaaaagatgcaattaagatggggaggtggcctgatccgggttccactttcgaggaattccaaccatgagatgtactgggtgagtggagccagtggaaacatcacaaattccgcgactcggaccgatg

SEQ ID NO: 8830 - DNA, 203 bp, Artificial sequence
  synthetic
ggcgcgccagtcctccaccacatggcactatgactcggagcacccttacaaaacttggaactatcatggaagttatgaagtcaaagcgaccggatcagctagctccatggtgaatggggtggtccgggtgctctcgaaaccatgggacacactgcagagtgtggtgaacatggccatgactgacacaacgactcggaccgatg

SEQ ID NO: 8831 - DNA, 203 bp, Artificial sequence
  synthetic
ggcgcgccagtcctgtgaatttggaaaagcaaaaggtagccgggccatctggtacatgtggttaggttcaagatatcttgaatttgaagctctggggttcttaaacgaagaccattggatgagcagagagaacacacttggaggagtcgagggcttaggcctgcagaagcttggatacgtgctgagagcgactcggaccgatg

SEQ ID NO: 8832 - DNA, 203 bp, Artificial sequence
  synthetic
ggcgcgccagtcctaagtaatgagaccaggagctgatggcataacagtgatggacgtcatctcacgggaagaccagagagggagtggacaggtggtaacatatgcactcaacacgttcaccaacctttgtgtgcagctcatacgatgcatggaaggagagggtttgctgaagccagaggaggtggagacgactcggaccgatg

SEQ ID NO: 8833 - DNA, 203 bp, Artificial sequence
  synthetic
ggcgcgccagtcctttgttttagaccttagaagatagatttagatttattttagggcgatagtcaggccaggcaatgcctgccaccggaagttggatgacggtgctgtctgcgctccaaccccaggcggactgggttaacaaagtggtgatccaggagacgcaaagcgttcactaccgtttcggagaacgactcggaccgatg

SEQ ID NO: 8834 - DNA, 203 bp, Artificial sequence
  synthetic
ggcgcgccagtcctctccctggcgttcgaatggaacactgcccaaagtcaggccgtaggttttacgccactagcatgcagtgctgcctgagacaagacatgccccaggaggactgggaaaacaaagccgttaaggcccccgcggcccaagcaagggaatggtgtgccccttgtggaaggtctagaggtcgactcggaccgatg

SEQ ID NO: 8835 - DNA, 203 bp, Artificial sequence
  synthetic
ggcgcgccagtcctaaaacaaagccgttaaggcccccgcggcccaagcaagggaatggtgtgccccttgtggaaggtctagaggttagaggagaccccgcggaaatcaaagcaaggcccaacctggcaaagctgtaaaccaggggaaggactagaggttagaggagaccccttgcgagtgaacaccaccgactcggaccgatg

SEQ ID NO: 8836 - DNA, 203 bp, Artificial sequence
  synthetic
ggcgcgccagtcctagaacagtcgtcagtagttcaacgctggtaaaccccagccttgagatgctacgtggacgagggcatgcccaagacacaccttaacctggacgggggtcgtccaggtgaaagtacccatctttgggtgctgggagtacagcctgatagggcgctgcagaggcccactgacaggctcgactcggaccgatg

SEQ ID NO: 8837 - DNA, 203 bp, Artificial sequence
  synthetic
ggcgcgccagtcctatgacaggggtaggggggaggtgaggacaactctggaaaaacttccacgtaagggagattgtaggagtggcaatcaactaggaccggtaagtggaatttacataaaaccaggtccgatttactaccaagattatgcaggcccagtctaccacagagcaccattagaactatttgcgactcggaccgatg

SEQ ID NO: 8838 - DNA, 203 bp, Artificial sequence
  synthetic
ggcgcgccagtcctgggatagaccaacaaccctaacggggtgcaagaagggtaagaagttttcttttgcgggtatcattatggagagcccctgcaacttcaacgtctctgcggaggacatcttatatggggataatgggtgtggtaacctcttccaggacacggctttgtacgtcgttgacggagtcacgactcggaccgatg

SEQ ID NO: 8839 - DNA, 203 bp, Artificial sequence
  synthetic
ggcgcgccagtccttatacttggttcttcatttcaccatcccccagtcttatgagaaccccaaagactgtgataagaatcagttaaacctgaccattggtcttagaacagaagacgtcgtgccctcatcagtctggaacattggtaagtatgtttgcatcaggccggactggtggccttacgagacaacgactcggaccgatg

SEQ ID NO: 8840 - DNA, 203 bp, Artificial sequence
  synthetic
ggcgcgccagtcctgggcgcaagggcaatttacttgtgagaaaaactataggtatgctatagcaaaaacaactgatgtggggttgcttggtgctgaaggcttgaccaccacttggagggaatacaaaaacaattttgaacttgatgatggattactgagagcagtatgcaaatctggtttcttcacttcgactcggaccgatg

SEQ ID NO: 8841 - DNA, 203 bp, Artificial sequence
  synthetic
ggcgcgccagtcctggaagtataacgcaacccttctgaacggtagtgctttcaatctcgtttgcccaattgggtggactggggtagtggaatgtacagtgataagtgagtccactctgcacaccgaagtcgtgaaggtgttcaggagagataagccattcccatctaggaaatactgtgttgacaccacgactcggaccgatg

SEQ ID NO: 8842 - DNA, 203 bp, Artificial sequence
  synthetic
ggcgcgccagtcctatgaaactggatatagactggtggatggaaccacatgtaacagacatggggtgataatagaccagacaggtagccatgagtgcctaataggcaagaccaaaataaaagtgtatccagttgatgacaaactggggccaatgccttgcagacctaaggagattatatccagtgaagcgactcggaccgatg

SEQ ID NO: 8843 - DNA, 203 bp, Artificial sequence
  synthetic
ggcgcgccagtcctctgttggcatagtagtgtcgatgctgattgccagaagagaccccacgacaataccacttataataactgttgtaaccttgaggactacggggctggcaggtgggctagcaacagacttggccatagcgaccgtaacaacagtgctactaatgtggaccttcattagtgattactcgactcggaccgatg

SEQ ID NO: 8844 - DNA, 203 bp, Artificial sequence
  synthetic
ggcgcgccagtccttactagagatatcctactatctccacaggaagatcatagaagaagttgcagggggaacaaacttgctatccagatttatggcagcattgatagagactaactggactcttgataacaacgaggtcagggggttaaaaaaattctacctactatccagcagagtcaggagccttacgactcggaccgatg

SEQ ID NO: 8845 - DNA, 203 bp, Artificial sequence
  synthetic
ggcgcgccagtccttgcctagaggtacgacaccaagggcaccggtgaggttccctacgtcactgctgaaaatcaggagggggctagaaactggatgggcgtacactcaccaaggcggcatcagttcagttgaccacgttacatttggaaaagacctgcttgtttgtgattccatgggtaggacaagggcgactcggaccgatg

SEQ ID NO: 8846 - DNA, 203 bp, Artificial sequence
  synthetic
ggcgcgccagtcctccacagatttaacagacttggtgaggaagataacagctatgaatagaggagaatttaaacagataaccttagcaacaggtgcaggaaagaccactgagctccctaggtcagtcatagaagaaataggtcggcacaagaggatactcgtcttgatcccactaagagcagcagcagcgactcggaccgatg

SEQ ID NO: 8847 - DNA, 203 bp, Artificial sequence
  synthetic
ggcgcgccagtcctagtctgtataccagtatatgaggcaaaagcaccccagtatatcattcaatctgagaattggcgagatgaaggaaggagacatggctactggtataacctatgcttcttatggatacttctgtcagatgcctcagcccaagcttagagcagccatggttgagtattcttacatctcgactcggaccgatg

SEQ ID NO: 8848 - DNA, 203 bp, Artificial sequence
  synthetic
ggcgcgccagtcctggctggcttttgggggggagacactgtccgaccatataaaacaagctgccactgatctagtagtctattatatcatcaatagaccccagttcccgggggatactgagacccaacaggaagggaggaaatttgtggctagcctcttggtgtcagcccttgctacatacacgtacacgactcggaccgatg

SEQ ID NO: 8849 - DNA, 203 bp, Artificial sequence
  synthetic
ggcgcgccagtccttattaggcactggagttagcgcagcaatggaaataatgtcacaaaatcctgtatcggttggaattgctgtgatgctgggagtgggtgcagtggccgcccacaatgccatagagtcaagtgaacagaaaaggacactattgatgaaagtatttgtaaaaaactttcttgaccaggcgactcggaccgatg

SEQ ID NO: 8850 - DNA, 203 bp, Artificial sequence
  synthetic
ggcgcgccagtcctctgccactgatgaattggtgaaagagagccctgaaaagataataatggccctgtttgaagcagtgcaaacggtaggaaaccctcttaggttgatttaccatctgtacggggtcttctacaaaggatgggaagctaaggaactagcagaaaggacagcaggaagaaacctattcacgactcggaccgatg

SEQ ID NO: 8851 - DNA, 203 bp, Artificial sequence
  synthetic
ggcgcgccagtccttggccgaggtggaagtagacctactgagatacgtggactacaaaggtacattccttactagagagaccctggaggctctaagcctggggagaccaaaaccaaaagatctaacgaaagcagaagcaatgaggttgctccatccggaatcagggctggtagagttgcctgactggtcgactcggaccgatg

SEQ ID NO: 8852 - DNA, 203 bp, Artificial sequence
  synthetic
ggcgcgccagtcctttatgcaagtagagaacaagcacaacaacttgacccctctgttcgaagagctcatgcttcgatgcccgcctgggaaacagatgaggtccgagcacatggtcaccgcataccaattggcccagggcaactggatgccaaccagctgtaatgtattcttagggacaataccggccacgactcggaccgatg

SEQ ID NO: 8853 - DNA, 203 bp, Artificial sequence
  synthetic
ggcgcgccagtcctgagtagctgaacagctccagagggaaggccacaagcacaacgtgtacaacaagattataggctctaccatgacggcagtggggattaggctagaaagattaccggtagtgagagctcaaactgacaccaccagtttccaccaggctataagagataagatagacaagagggaaacgactcggaccgatg

SEQ ID NO: 8854 - DNA, 203 bp, Artificial sequence
  synthetic
ggcgcgccagtcctacttgcaaaccccaggcctacacggcaagctgctggaaatattcaacaccctgaagaaaaatgatttggcacaaacatatgatgctgtagaatgggaagaactagaacgtggagtaaaccgaaagggtgctgctggattcttcgagcataaaaacataggagaagttttgaacacgactcggaccgatg

SEQ ID NO: 8855 - DNA, 203 bp, Artificial sequence
  synthetic
ggcgcgccagtccttcagactggcaatcacaaaagtgatgtataagtgggtgaaacagaagccggtggtaatacctgggtatgaaggcaagacgcccttgtttgaggtctttgacaaggtaaagaaagagtgggaccagttccacaacccagtggccgtaagttttgacacaaaagcatgggacacaccgactcggaccgatg

SEQ ID NO: 8856 - DNA, 203 bp, Artificial sequence
  synthetic
ggcgcgccagtccttggcaaccaggttggactctagtggagaaagagggacaacggcatatgaaaaagccgttgcgttcagttttctattgatgtactcatggaaccccttggttaggaggatttgcttgctcacgttgtctactgagccagaagtgaagccaagcaaggcgacaacttattactacgcgactcggaccgatg

SEQ ID NO: 8857 - DNA, 203 bp, Artificial sequence
  synthetic
ggcgcgccagtcctaaatcccggccgcgtgttgtgattgtgttagggcaggtgacagtcggcagggtcgaccccctgcttcaggaccactgtcttcctggacgaccgttgctgaaaaagggccgccacggtctgtagctcgccgacgcttctaattcaggccggaggaccacgctccgtaatcgagcccgactcggaccgatg

SEQ ID NO: 8858 - DNA, 203 bp, Artificial sequence
  synthetic
ggcgcgccagtcctcaagtactcaaaccccagcacccctgggtcacgccctacgccgcccttttaacgcttcggctaatagggtctatccggcgggttgacaaagggcgcagggttacctggtactacgagcttgggtgtccctgggagtaatcccagggtgccatgctgcagcgcaggcgggcgaggcgactcggaccgatg

SEQ ID NO: 8859 - DNA, 203 bp, Artificial sequence
  synthetic
ggcgcgccagtcctgtggtgcctcggcctaggggaagagcgcaagtgaccccgtgctgcataaatccccccccttttttctacatgggtgttccatgtgccgccaagatggcgctgttgttgcttttcctggccggcgtggctgctgccccctcgcatctctgcgagtgggaaggcaaaccttacttgcgactcggaccgatg

SEQ ID NO: 8860 - DNA, 203 bp, Artificial sequence
  synthetic
ggcgcgccagtcctcattcatggcttgcttacgttgcaggtgttgggggcgtcggggagctgtatggcgcggggctcatcgcgggtctcgctgctgtttcagctgtcccggcttctactccccctttaaactgctctgttgagtgcgcttgggggtatgaggtaatgcttggcccggtcaggtcctggcgactcggaccgatg

SEQ ID NO: 8861 - DNA, 203 bp, Artificial sequence
  synthetic
ggcgcgccagtcctctccttgagcttggttcctcttccgggttttggctgcttcagcttcctggcgctctctggtcttttgttgcaagtgttagtcctgtttttcttgttctgttggccttgctcttcttggaggggcgctggcctctaattgtagctcttgtcgccatccggttgctagtttgcccgcgactcggaccgatg

SEQ ID NO: 8862 - DNA, 203 bp, Artificial sequence
  synthetic
ggcgcgccagtcctgcatctttgcgcatgggagagaatgagtcttgcatttgtggccctaaaatttctgaccatctacgagctatccaatatgtcaactacactcctggccttcgcatccagctgcgtgcgtccccccaggttgcgttacacggagcgcttgttccgttgacgctgacctacgggccgcgactcggaccgatg

SEQ ID NO: 8863 - DNA, 203 bp, Artificial sequence
  synthetic
ggcgcgccagtcctctcaggggtggtattgtttgggcttaccctcttgatggcatggcttggttccctgtggaatccttttctgttcctcccaccggttgggactgcactgtcaatactgattatcagttttgggagtgcgtcgactccacacgataccggcgggctatagtgtgccgtgcattcacgcgactcggaccgatg

SEQ ID NO: 8864 - DNA, 203 bp, Artificial sequence
  synthetic
ggcgcgccagtcctaccactacctccagtaacacctcttcccctacccaactttgctttgactatgtcggcccatcccaggatccttgcaagatctatgcttggcaaaacatctctgcttgctttcgaagaggctggggcaacctgacctctgcgtttgctggccttgctggggtgccgggtgccttgcgactcggaccgatg

SEQ ID NO: 8865 - DNA, 203 bp, Artificial sequence
  synthetic
ggcgcgccagtcctttggctatcctcgccatcgcggttcttggtcggccggggaggtctgccttgggcttggaggtgtgctttgatgtgtcagggcccgggtgggatgtgccggatggaattctaccatggtgctttgctggtgttgtgtccgggctgttaattcacctggccacattcaaccactggcgactcggaccgatg

SEQ ID NO: 8866 - DNA, 203 bp, Artificial sequence
  synthetic
ggcgcgccagtccttattgctttgttgctatttgctttgatctctttgatatgttccttgaagcttgcctctgttctcaaccctctgtgtcgagtgtggctgctcttttggaggttgccgcgcgcgcccgcagcagtagtctagttcgctggattattgtgcgggcgcgtgcgaggggtgtgttgctccgactcggaccgatg

SEQ ID NO: 8867 - DNA, 203 bp, Artificial sequence
  synthetic
ggcgcgccagtccttatcaacatcggggtgatgtgccctggagggctgtctcgttcctgaaggaattggagtgcgcgctggagcccgtttctgtctctgctgaggatctggaagtcgtgcgtgacgcggcaggtgtcctggagtgcggtaagttcttcaggggtaagcctgtcgtcgcgcgccgcggccgactcggaccgatg

SEQ ID NO: 8868 - DNA, 203 bp, Artificial sequence
  synthetic
ggcgcgccagtcctgctgcgagccggtctatgggtacctgtgtggggggtgtcatgttcacaacgtggcactcctcgcaggggcgcacattggctggtccgactggtcctctcaatccgcggtggtggtcggtcagtgacgacactgccgcttacccaattcccttaggttccagatgtatggacgtccgactcggaccgatg

SEQ ID NO: 8869 - DNA, 203 bp, Artificial sequence
  synthetic
ggcgcgccagtccttgcacctgtggcacccggagcgcatgggtaatgcgtcgtgatgggggcctagcccatggagagttgtcaccagtgaatgaagtcaggttggatgtctctggcagggtccgtgctttccgcggggcctccggcagtcctgtcatgtgtgaccaggggcacgtggtgggcatgatgcgactcggaccgatg

SEQ ID NO: 8870 - DNA, 203 bp, Artificial sequence
  synthetic
ggcgcgccagtcctgtgtcggtcctccatcgagggcctgatgccttcgctgtccgctatgttgagccctggaaggccttacctgcagatgttcagagcccactgtcccccctctctcctcctccggtcccagcaatgggagcctatgaggagaggtcgctgttcgtgccgacggggtccggaaagtcccgactcggaccgatg

SEQ ID NO: 8871 - DNA, 203 bp, Artificial sequence
  synthetic
ggcgcgccagtcctaccctggtccctgccagttacgccaaggaagggcacaaggtccttgttctaaatcctagcgtggccacgaccgcgtcgatgctcgattacatgaaggagctgactggtgtcagccccagcgtgttttgcgggcacggggcgaacgcgatcacgcggcggacgcagagcaagattcgactcggaccgatg

SEQ ID NO: 8872 - DNA, 203 bp, Artificial sequence
  synthetic
ggcgcgccagtcctgccgtgtcttggtataatatgacctctgaccaggcagcgcgcctcctgcgggcctacgcaggttgcgcgtatacttgtcacatctctacacacattgaggatgccacgcgtgcagttgcggcgctgagcgctttctccacgcaccctcaagtcactcggttgcgcaatgcatcccgactcggaccgatg

SEQ ID NO: 8873 - DNA, 203 bp, Artificial sequence
  synthetic
ggcgcgccagtcctgcgatcgctgaggctcttggtgagagtgtcacggagacggctgctggaccgattctgttggtgggcttggctgcggctgcggccctggccattggggattataccggaagcctggtcgtggtagccgaagtggtggttgagcccggagggaatccagtccccccttctgggccccgactcggaccgatg

SEQ ID NO: 8874 - DNA, 203 bp, Artificial sequence
  synthetic
ggcgcgccagtcctgtgaagaatacatctgttggtcagggcttcctgcgagcgtggacggcgcttacaggaaatatcggccctgtggtgtccctggtgacggcggcgtgggcggcggggcggtcccccccccttgcctgcgcggcctccctcctacttggtctgcaagctgctctcccgctggagacgcgactcggaccgatg

SEQ ID NO: 8875 - DNA, 203 bp, Artificial sequence
  synthetic
ggcgcgccagtcctcgactgccttgcgcaattctggccggggctatcggtacttgtactggtacccccgaagcagggttgggcatgatgggagcgtttatggttggaggtgcagtggggtctcttagcgtcttcggcttcctcttggaggtcttgggcggctgggaggccacagctactactgcttctcgactcggaccgatg

SEQ ID NO: 8876 - DNA, 203 bp, Artificial sequence
  synthetic
ggcgcgccagtcctccaagagggcaagtcctgccagacggatatttccttgaggaggacgtcactgctcgtgcaagcgaactccttaagcggatgtccatctccagggctgtcatgagtgtgctggaatgtgttcatcagcagtatgagactaggacagatggcagtgtgttttggacgatcgttgcccgactcggaccgatg

SEQ ID NO: 8877 - DNA, 203 bp, Artificial sequence
  synthetic
ggcgcgccagtcctgcttgccttgacggtgcgaggcggtttcttgactggatcattgcttatgtgaaggacaggataccatcagtggctatccctctcgtgtcatgtcaacgaggctacaccggcccttgggttggttcgggggcagttacagctaactgcacctgcggagcactcttcacggcgcatcgactcggaccgatg

SEQ ID NO: 8878 - DNA, 203 bp, Artificial sequence
  synthetic
ggcgcgccagtcctaccgttcgagaggcgggagttccgctagatgaccgaggcatgcccgagattatcccccctccccccccaacgcctgcgttgcaggggggtgcggtggctaatactcctgacaatatcttgttggctccacctctatcacaggccactcctcagtatgttaccagaattttcacccgactcggaccgatg

SEQ ID NO: 8879 - DNA, 203 bp, Artificial sequence
  synthetic
ggcgcgccagtcctcatcgggctcttgcggctactggagccctggaggtcgccaccggcgtcacccccacgcagtccgggtcgagcaccgacggggacactcctgcctcggcagaggcgggtcgtgtttctcgcgtgatgcaggccgttcggtctgcattcgattccgtgctgggtgatggaggcgtccgactcggaccgatg

SEQ ID NO: 8880 - DNA, 203 bp, Artificial sequence
  synthetic
ggcgcgccagtccttcatcaatcactcccagtgatgtggagagagagatggagatcttcgcgtgcaaccatgctaatgcgccactggtccgtgctttggggaaatactatgcatcaggtcccatggtgaacgggagcggtgtggaagtcggagttcggcattgccgggcttccggagtttacaccactcgactcggaccgatg

SEQ ID NO: 8881 - DNA, 203 bp, Artificial sequence
  synthetic
ggcgcgccagtccttcctctgcaaattcaattacatgttggcttaaggtttctgctgcctgtcgcaagataggcttgcaaaacccgtccttccttatccatggagatgactgcctcatcatttgtgagcgtaccgatgagccttgcgctgcgcgtctgaaagcggcgctcgcctcatacggttatgcccgactcggaccgatg

SEQ ID NO: 8882 - DNA, 203 bp, Artificial sequence
  synthetic
ggcgcgccagtccttacacgttgagctacccttggcatccattgactaggcatgtgttgattccgacactgcttacccctttgtttgccgctgggaagtctccacgtgagactatctgttgtgaggtcgcgggcaaccgcatccactttccgctcttatcattaccatcgattttggtctcgttgcaccgactcggaccgatg

SEQ ID NO: 8883 - DNA, 203 bp, Artificial sequence
  synthetic
ggcgcgccagtcctggccaggacgtcctagatgttcgggccgattcaacaaagacactgtcagaagcacaaaaagcattgcaggccttgtcgatgcgggggctgagctggtaccgcaagagggctaccatcctgcgcacccgcctcatcagggctgggggagagtgggcctacctcgcacgcacgttgcgactcggaccgatg

SEQ ID NO: 8884 - DNA, 203 bp, Artificial sequence
  synthetic
ggcgcgccagtcctgggctcgacacggctatagagctaatgacgcgccatgcccacttaattgtggggatgtcgtggatggcctatttccttgcggctctggtgtgactccagccgatgcccttacagggcattcttccttcctgctcccctaactctgcgtgagatcggggcaggtactgtgcgcttcgactcggaccgatg

SEQ ID NO: 8885 - DNA, 203 bp, Artificial sequence
  synthetic
ggcgcgccagtcctctctctaactcttcgtgagattgaggggcttgcagtctttccgccaatctaactctacgtgagattttggcgggcctccctgctcccctaactctgcgtgagatcggggcaggctctgttcgcttctctctaactcttcgtgagattgaggagcttgcagttcttccgccaatccgactcggaccgatg

SEQ ID NO: 8886 - DNA, 203 bp, Artificial sequence
  synthetic
ggcgcgccagtcctatgaggagatcaagaagtacgagaagctggagacggaggaggagcgtgtggcccgcagccgggagatcttcgactcatacatcatgaaggagctgctggcctgctcgcatcccttctcgaagagtgccactgagcatgtccaaggccacctggggaagaagcaggtgcctccggcgactcggaccgatg

SEQ ID NO: 8887 - DNA, 203 bp, Artificial sequence
  synthetic
ggcgcgccagtcctatctcttccagccatacatcgaagagatttgtcaaaacctccgaggggacgtgttccagaaattcattgagagcgataagttcacacggttttgccagtggaagaatgtggagctcaacatccacctgaccatgaatgacttcagcgtgcatcgcatcattgggcgcgggggctcgactcggaccgatg

SEQ ID NO: 8888 - DNA, 203 bp, Artificial sequence
  synthetic
ggcgcgccagtcctttggcgaggtctatgggtgccggaaggctgacacaggcaagatgtacgccatgaagtgcctggacaaaaagcgcatcaagatgaagcagggggagaccctggccctgaacgagcgcatcatgctctcgctcgtcagcactggggactgcccattcattgtctgcatgtcatacgcgactcggaccgatg

SEQ ID NO: 8889 - DNA, 203 bp, Artificial sequence
  synthetic
ggcgcgccagtcctcgttccacacgccagacaagctcagcttcatcctggacctcatgaacggtggggacctgcactaccacctctcccagcacggggtcttctcagaggctgacatgcgcttctatgcggccgagatcatcctgggcctggagcacatgcacaaccgcttcgtggtctaccgggacccgactcggaccgatg

SEQ ID NO: 8890 - DNA, 203 bp, Artificial sequence
  synthetic
ggcgcgccagtcctctctggggtgcatgctcttcaagttgctgcgggggcacagccccttccggcagcacaagaccaaagacaagcatgagatcgaccgcatgacgctgacgatggccgtggagctgcccgactccttctcccctgaactacgctccctgctggaggggttgctgcagagggatgtcacgactcggaccgatg

SEQ ID NO: 8891 - DNA, 203 bp, Artificial sequence
  synthetic
ggcgcgccagtcctaccggagattgggctgcctgggccgaggggctcaggaggtgaaagagagcccctttttccgctccctggactggcagatggtcttcttgcagaagtaccctcccccgctgatccccccacgaggggaggtgaacgcggccgacgccttcgacattggctccttcgatgaggaggcgactcggaccgatg

SEQ ID NO: 8892 - DNA, 203 bp, Artificial sequence
  synthetic
ggcgcgccagtcctcggtggaggagacgcagatcaaggagcgcaagtgcctgctcctcaagatccgcggtgggaaacagttcattttgcagtgcgatagcgaccctgagctggtgcagtggaagaaggagctgcgcgacgcctaccgcgaggcccagcagctggtgcagcgggtgcccaagatgaagacgactcggaccgatg

SEQ ID NO: 8893 - DNA, 203 bp, Artificial sequence
  synthetic
ggcgcgccagtcctatgatgccacaccaagctgtgccaccctgggctctgtgggctgcactctgtgcccatgggcactgctgggtggcccatcccccctcaccaggggcaggcacagcacagggatccgacttgaattttcccactgcaccccctcctgctgcagaggggcaggccctgcactgtcctcgactcggaccgatg

SEQ ID NO: 8894 - DNA, 203 bp, Artificial sequence
  synthetic
ggcgcgccagtcctgtgctgctaccctccctgctgtcccctcttgccccaacccccagcacccgggctcagggaccacagcaaggcacctgcaggttgggccatactggcctcgcctggcctgaggtctcgctgatgctgggctgggtgcgaccccatctgcccaggacggggccggccaggtgggcgcgactcggaccgatg

SEQ ID NO: 8895 - DNA, 203 bp, Artificial sequence
  synthetic
ggcgcgccagtcctcgacgccccacgtacgggaacgccgccaaaaccttcgggacagctatgcgggttgacaatcccagtggggggccggggaccagctgattacttgtcctgcgagttcctcttgagactggccgaaaggcagccacggggccaccaaggcggcgcagcgctgcatgcggcaaggggcgactcggaccgatg

SEQ ID NO: 8896 - DNA, 203 bp, Artificial sequence
  synthetic
ggcgcgccagtcctgttgttcccgagacgaggtttacttctgtttcggggacggatgtctggtggcttatggctgtactgtttgcacacagtcttgctggaagctctaccggcctggggtggctactcggcccgggtccgaaccaggtgagctgctggggagatttgggagtgtaattggtccggtgtcgactcggaccgatg

SEQ ID NO: 8897 - DNA, 203 bp, Artificial sequence
  synthetic
ggcgcgccagtcctcggcttcggcttacaccgctggagtcctcgggttgggtgaaccttacagtttggccttcttggggacgttcctcaccagtcgcctctcacggattcccaacgtcacctgcgtgaaggcttgtgaccttgagtttacctacccaggcttgtccatcgattttgactgggcgtttacgactcggaccgatg

SEQ ID NO: 8898 - DNA, 203 bp, Artificial sequence
  synthetic
ggcgcgccagtcctcaccttgtgcttcttgcgtcgttgaccagaggccgctgaaatgtggttcctgcgtccgcgactgctgggagacggggggtcctgggttcgatgagtgcggtgtcggtactcggatgacgaagcacctcgaggccgtcctggttgatggaggtgtggagtccaaggtgacaacgccgactcggaccgatg

SEQ ID NO: 8899 - DNA, 203 bp, Artificial sequence
  synthetic
ggcgcgccagtcctaaggcaacagacagcaggtttacagtggtcagcgaaggtcttcgccggcttggttgcttactgacatggtcctggccctgttggtggtgatgaagttggctgaggctagagttgtccccctgtttatgctggcaatgtggtggtggttgaatggagcatctgctgccactattgcgactcggaccgatg

SEQ ID NO: 8900 - DNA, 203 bp, Artificial sequence
  synthetic
ggcgcgccagtcctctctcggcaaggtggtggatttagatatgcccgctgagttgtcagactttcgcgggtcttctggatcaccaatcttgtgcgatgagggtcatgctgttggcatgctgatttcggtgcttcatagggggagtagggtttcctcggtgcggtataccaaaccttgggaaactctcccgactcggaccgatg

SEQ ID NO: 8901 - DNA, 203 bp, Artificial sequence
  synthetic
ggcgcgccagtcctagttgcacgtcaccgacccgacctcaattttggggatgggtcgggcgaggttactcgctcgcgagtgcggcgtacgcctcctgcttttcgctacggcgaccccaccggtctctccgatggcgaagcatgaatctattcatgaggagatgttgggcagtgagggggaggtcccctcgactcggaccgatg

SEQ ID NO: 8902 - DNA, 203 bp, Artificial sequence
  synthetic
ggcgcgccagtcctgcgccacagacgcactttccactggttacactggcaattttgacaccgtaacagactgtggtttaatggttgaggaggtagtggaagtgaccctggacccgaccatcactatcggtgtgaagaccgtcccggcccctgccgaactgagggctcagaggcgtggtaggtgtggcccgactcggaccgatg

SEQ ID NO: 8903 - DNA, 203 bp, Artificial sequence
  synthetic
ggcgcgccagtcctacctacattatacctccctactgtgcagacattactacaagaggacagtgcctgttggcgtcatgggcaatgctgagggagcagtcccccttgtgcctactggcggtggaatcaggacttaccaaattgggacttctgactggtttgaggctgtggtcgtgcatgggacaatcacgactcggaccgatg

SEQ ID NO: 8904 - DNA, 203 bp, Artificial sequence
  synthetic
ggcgcgccagtcctcggtgcacgccaccagttgctatgagttgaaagctgctgacgttcggagggcggtgcgagccggcccgacttacgttggtggcgtaccttgcagctggagcgcgccgtgtactgcgcctgcgctcgtttacaggctaggccagggcatcaaaatcgatggagcgcgccgactgtcgactcggaccgatg

SEQ ID NO: 8905 - DNA, 203 bp, Artificial sequence
  synthetic
ggcgcgccagtccttgccctgtgacttagcacagggagcgcgccaccccccggtatctggcagtgttgccggtagtggttggacagatgaggacgagagggacttggtggaaaccaaggctgccgccatcgaggccattggggcggccttgcacctcccttcaccggaggctgctcaggccgctctagcgactcggaccgatg

SEQ ID NO: 8906 - DNA, 203 bp, Artificial sequence
  synthetic
ggcgcgccagtcctacccggacggtcaccaactgtttgacgagcgaggtccgatagaggtatctactcctatatgtgaagtgattggggacatcaggcttcagtgtgaccaaattgaggaaactccaacatcttactcttacatctggtcaggggcgcccttgggtactgggagaagtgtcccccaaccgactcggaccgatg

SEQ ID NO: 8907 - DNA, 203 bp, Artificial sequence
  synthetic
ggcgcgccagtcctccatgacgcgccctatagggacccatctgacttgtgacactaccaaagtttatgttactgaccctgatcgggccgctgagcgggccgagaaggttacaatctggaggggtgataggaagtatgacaagcattatgaggctgtcgttgaggctgtcctgaaaaaggcagccgcgacgactcggaccgatg

SEQ ID NO: 8908 - DNA, 203 bp, Artificial sequence
  synthetic
ggcgcgccagtcctcgaagtctcatggctggacctattcccaggctatagctaaagttaggcgccgagcagccgctggatacggcagcaaggtgaccgcctccacattggccactggttggcctcacgtggaggagatgctggacaaaatagccaggggacaggaagttcctttcacttttgtgaccacgactcggaccgatg

SEQ ID NO: 8909 - DNA, 203 bp, Artificial sequence
  synthetic
ggcgcgccagtcctagcgagaggttttcttctccaaaactacccgtaagcccccaagattcatagttttcccacctttggacttcaggatagctgaaaagatgattctgggtgaccccggcatcgttgcaaagtcaattctgggtgacgcttatctgttccagtacacgcccaatcagagggtcaaagcgactcggaccgatg

SEQ ID NO: 8910 - DNA, 203 bp, Artificial sequence
  synthetic
ggcgcgccagtcctctatggtttccccagatggggttcccttggggtaccgccagtgtaggtcgtcgggcgtgttaacaactagctcggcgaacagcatcacttgttacattaaggtcagcgcggcctgcaggcgggtggggattaaggcaccatcattctttatagctggagatgattgcttgatcacgactcggaccgatg

SEQ ID NO: 8911 - DNA, 203 bp, Artificial sequence
  synthetic
ggcgcgccagtcctccccccccccggcactgggtgcaagccccagaaaccgacgcctactgaagtagacgtaatggccccgcgccgaaccggcgaccggccaaaaggtggtggatgggtgatgacagggttggtaggtcgtaaatcccggtcatcctggtagccactataggtgggtcttaaggggagcgactcggaccgatg

SEQ ID NO: 8912 - DNA, 203 bp, Artificial sequence
  synthetic
ggcgcgccagtcctgctacggtccctcttgcgcatatggaggaaaagcgcacggtccacaggtgttggtcctaccggtgtaataaggacccggcgctaggcacgccgttaaaccgagcccgttactcccctgggcaaacgacgcccacgtacggtccacgtcgcccttcaatgtctctcttgaccaatcgactcggaccgatg

SEQ ID NO: 8913 - DNA, 203 bp, Artificial sequence
  synthetic
ggcgcgccagtcctgccttactcctctcttggtgtgcgtggcggccctcctcctgctggagcagcgtattgtcatggtcttcctcctggtcactatggcgggcatgtcgcaacgcgcgcccgcctcagtgttggggtcacggcctttcgaggccgggttgacttggcagtcttgttcttgcaggtcgacgactcggaccgatg

SEQ ID NO: 8914 - DNA, 203 bp, Artificial sequence
  synthetic
ggcgcgccagtcctacgggtcccgcgtgccgacgggggagagggtttgggaacgtgggaacgtcacacttttgtgtgactgccccaacggtccttgggtgtgggtcccggccctttgccaggcaatcggatggggcgaccctatcactcattggagccacggacaaaatcagtggcccctttcttgtccgactcggaccgatg

SEQ ID NO: 8915 - DNA, 203 bp, Artificial sequence
  synthetic
ggcgcgccagtcctcccaatttgtctacggcgccgtttcagtgacctgcgtgtggggttctgtgtcttggtttgcttccactgggggtcgcgactccaaggttgatgtgtggagtttggttccagttggctctgccagctgcaccatagccgcactgggatcttcggatcgcgacacagtggttgagccgactcggaccgatg

SEQ ID NO: 8916 - DNA, 203 bp, Artificial sequence
  synthetic
ggcgcgccagtccttctccgagtggggaattccctgcgccacttgtatcctggacaggcggcctgcctcgtgtggcacctgtgtgagggactgctggcccgagaccgggtcggtacgtttcccattccacaggtgtggcgcgggaccgaggctgaccagagaccttgaggctgtgcccttcgtcaatacgactcggaccgatg

SEQ ID NO: 8917 - DNA, 203 bp, Artificial sequence
  synthetic
ggcgcgccagtcctctgatgggttcatacatgttcagggccacttgcaggaggtggatgcgggcaacttcattccgcccccacgctggttgctcttggactttgtatttgtcctgttatacctgatgaagctggcagaggcacggttggtcccgctgatcctcctcctgctatggtggtgggtgaacccgactcggaccgatg

SEQ ID NO: 8918 - DNA, 203 bp, Artificial sequence
  synthetic
ggcgcgccagtccttgtggaagctcgctcggggggctttcccgctggcattactgatggggatttccgccactcgcggccgcacctctgtgcttggcgccgaattctgctttgatgtcacctttgaagtggacacgtcagtcttgggttgggtggttgctagtgtggtggcttgggccatagcgctcccgactcggaccgatg

SEQ ID NO: 8919 - DNA, 203 bp, Artificial sequence
  synthetic
ggcgcgccagtccttgatgttggtggttgtggccatggtcctcctcttcggccttttcgacgcgctcgattgggccttggaggagctccttgtgtcgcggccttcgttgcgtcgtttggcaagggtggtggagtgttgtgtgatggcgggcgagaaggccactaccgtccggcttgtgtccaagatgtcgactcggaccgatg

SEQ ID NO: 8920 - DNA, 203 bp, Artificial sequence
  synthetic
ggcgcgccagtcctggaaaagcacacgcgtccctttggagtatggaaacatggggcacaaggtcctgattctcaacccgtcggttgccactgtgagggccatgggcccttacatggagaggctggcggggaaacatcctagcattttctgtggacacgacacaacagctttcacacggatcacggactcgactcggaccgatg

SEQ ID NO: 8921 - DNA, 203 bp, Artificial sequence
  synthetic
ggcgcgccagtcctctactgcgactcccccgggctcgcctatgactcagcatccatccataattgagacaaagctggacgttggtgagatccccttttatgggcatggtatccccctcgagcgtatgaggactggtcgccaccttgtattctgccattccaaggcggagtgcgagagattggccggcccgactcggaccgatg

SEQ ID NO: 8922 - DNA, 203 bp, Artificial sequence
  synthetic
ggcgcgccagtcctagttctccgcgcggggggttaatgccatcgcctattataggggtaaggacagttccatcatcaaagacggagacctggtggtttgtgcgacagacgcgctctctaccgggtacacaggaaacttcgattctgtcaccgactgtgggttggtggtggaggaggtcgttgaggtgacgactcggaccgatg

SEQ ID NO: 8923 - DNA, 203 bp, Artificial sequence
  synthetic
ggcgcgccagtcctcccttgatcccaccattaccatttccttgcggactgtccctgcttcggctgaattgtcgatgcagcggcgcggacgcacggggagaggtcggtcgggccgctactactacgctggggtcggtaaggctcccgcgggggtggtgcggtctggtccggtctggtcggcagtggaagcgactcggaccgatg

SEQ ID NO: 8924 - DNA, 203 bp, Artificial sequence
  synthetic
ggcgcgccagtcctgtggtgaccaggccacccctcaacccgtggtgcaggtccccccggtagaccatcggccggggggggagtctgcgccacgggatgccaagacagtgacagatgcggtggcagccatccaggtgaactgcgattggtctgtgatgaccctgtcgatcggggaagtcctcaccttggcgactcggaccgatg

SEQ ID NO: 8925 - DNA, 203 bp, Artificial sequence
  synthetic
ggcgcgccagtcctctcaggctaagacagccgaggcctacgcagctacttccaggtggctcgctggctgctacacggggacgcgggccgtccccactgtatcaattgttgacaagctcttcgccgggggttgggccgccgtggtgggtcactgtcacagcgtcattgctgcggcggtggctgcctatgcgactcggaccgatg

SEQ ID NO: 8926 - DNA, 203 bp, Artificial sequence
  synthetic
ggcgcgccagtcctccctggtcaacagggagcctaaggtggatgaggtccaggtggggtacgtctgggatctgtgggagtgggtgatgcgccaggtgcgcatggtgatgtctagactccgggccctctgccctgtggtgtcactccccttgtggcactgcggggaggggtggtccggtgaatggcttccgactcggaccgatg

SEQ ID NO: 8927 - DNA, 203 bp, Artificial sequence
  synthetic
ggcgcgccagtcctacaccccgaaggtggtacccttcgggacgtcggggtgggctgaggtggtggtgacccctacccacgtggtgatcaggcgcacgtcctgttacaaactgcttcgccagcaaattctttcagcagctgtagctgagccctactacgttgatggcattccggtctcttgggaggctgcgactcggaccgatg

SEQ ID NO: 8928 - DNA, 203 bp, Artificial sequence
  synthetic
ggcgcgccagtcctacgcgagagcgccggccatggtctagggtccgggccaaagtgttaccattgatggggagcgctacacccttccgcaccagttgcggatgcggaatgtggcgccctctgaggtttcatctgaggtcagcatcgagatcgggacggagactgaagactcagaactgactgaggccgcgactcggaccgatg

SEQ ID NO: 8929 - DNA, 203 bp, Artificial sequence
  synthetic
ggcgcgccagtcctcggttacggagagcagctcagatgagaagaccctgtcggtgacctcctcgcaggaggacaccccgtcctcagactcatttgaagtcatccaagagtctgatactgctgaatcagaggaaagcgtcttcaacgtggctctttccgtactaaaagccttatttccacagagcgatgcgactcggaccgatg

SEQ ID NO: 8930 - DNA, 203 bp, Artificial sequence
  synthetic
ggcgcgccagtccttggtgggcaatgaacttacctttgaatgtgacaagtgtgaggcacgccaagagacccttgcctccttctcctacatatggtccggggtcccacttactcgggccactccggccaaaccaccagtggtgaggccggtggggtccttgttggtggcagacaccaccaaggtctacgcgactcggaccgatg

SEQ ID NO: 8931 - DNA, 203 bp, Artificial sequence
  synthetic
ggcgcgccagtccttcattgtgttcccccccctggacttccggatagctgaaaagctcattctgggagacccggggcgggttgcaaaggccggtgttgggggggcttacgccttccagtacacccccaaccagcgggttaaggagatgctaaagctgtgggaatcaaagaagaccccgtgcgccatctcgactcggaccgatg

SEQ ID NO: 8932 - DNA, 203 bp, Artificial sequence
  synthetic
ggcgcgccagtcctttaaaactggatccaggttgttcccacctggatttcccacagggagtggtactctgttattacggtaactttgtacgccagttttatctcccttcccccatgtaacttagaagtttttcacaaagaccaatagccggtaatcagccagattactgaaggtcaagcacttctgttcgactcggaccgatg

SEQ ID NO: 8933 - DNA, 203 bp, Artificial sequence
  synthetic
ggcgcgccagtccttagcctgcgtggctgcctgcacaccctatgggtgtgaagccaaacaatggacaaggtgtgaagagccccgtgtgctcgctttgagtcctccggcccctgaatgtggctaaccttaaccctgcagctagagcacgtaacccaatgtgtatctagtcgtaatgagcaattgcgggacgactcggaccgatg

SEQ ID NO: 8934 - DNA, 203 bp, Artificial sequence
  synthetic
ggcgcgccagtcctgggttggtggtggaaactacctgatgcactcaaggacatgggtatttttggtgaaaacatgttttatcattacctgggtaggagtggatacacaatacatgtgcagtgtaatgctagtaaatttcaccagggtacactaattgttgctctgatacctgagcatcagattgcaagcgactcggaccgatg

SEQ ID NO: 8935 - DNA, 203 bp, Artificial sequence
  synthetic
ggcgcgccagtccttttcacccactggacagggagtctccgtttcagcttcatgttttgtggtactgccaacactactgttaagcttttgttggcatacacaccacctggtatcgcagaacccaccacaagaaaggatgcaatgctaggcactcatgttatatgggatgtggggttgcagtctacaatcgactcggaccgatg

SEQ ID NO: 8936 - DNA, 203 bp, Artificial sequence
  synthetic
ggcgcgccagtcctatcaatggtagtgccatggattagcgctagtcattatagaaacacatcaccaggtagatctacatctgggtacataacatgctggtatcagactagattagtcattccacctcagaccccaccaacagctagattgttatgttttgtatctgggtgcaaagacttttgcttgcgcgactcggaccgatg

SEQ ID NO: 8937 - DNA, 203 bp, Artificial sequence
  synthetic
ggcgcgccagtcctcatggcacgagatactaacctacacctgcaaagtggtgcaatagcacagaaccctgttgagaattatatagatgaagttcttaatgaagttttagttgtcccaaatattaatagtagtaaccccacaacatcaaattctgccccagcattagatgctgcagaaacagggcacaccgactcggaccgatg

SEQ ID NO: 8938 - DNA, 203 bp, Artificial sequence
  synthetic
ggcgcgccagtccttctacaagaaatggctcaaattagaaggaaatttgaattgttcacctatactaggtttgattctgaaataaccctagttccatgcatttccgcccttagtcaggacattggacacatcacaatgcaatacatgtatgttccaccaggtgcaccggtgcccaatagtagggacgacgactcggaccgatg

SEQ ID NO: 8939 - DNA, 203 bp, Artificial sequence
  synthetic
ggcgcgccagtccttgtgaccagaccaattatcactacagctggccccagtgacatgtatgttcatgtaggtaaccttatttatagaaatcttcatcttttcaactctgagatgcatgaatctattttggtatcttattcatcagatttaatcatttaccgaacaaacactgtaggtgatgattacatcgactcggaccgatg

SEQ ID NO: 8940 - DNA, 203 bp, Artificial sequence
  synthetic
ggcgcgccagtcctacatatacatgccataaacccagtaggaaatatcagcaagaaaattattaaatggatgttgagaataatatcagcaatggtcataataattagaaactcttctgacccccaaactatattagcaacactcacactgattgggtgttctggatcaccctggagatttttaaaggacgactcggaccgatg

SEQ ID NO: 8941 - DNA, 203 bp, Artificial sequence
  synthetic
ggcgcgccagtccttgaccaacagagtgtagtaataatggatgacattatgcagaatccagccggggatgacatgacactgttctgccaaatggtttctagtgttacatttataccaccaatggctgatctaccagataaaggcaaggcttttgattctaggtttgtattatgcagcacaaatcattccgactcggaccgatg

SEQ ID NO: 8942 - DNA, 203 bp, Artificial sequence
  synthetic
ggcgcgccagtcctatttgtgtgtggaaaagcagtttctttcaaagatcgtaactcttgcaacaaatacagccttgcgcaggtgtacaacataatgattgaagaagacagacggagaagacaagtggttgatgtcatgacagctatattccaagggccaattgatatgaaaaacccaccaccacctgccgactcggaccgatg

SEQ ID NO: 8943 - DNA, 203 bp, Artificial sequence
  synthetic
ggcgcgccagtccttattactgacttgctccagtctgttagaacccctgaagttattaagtattgtgagggtaatagatggataattccagcagaatgcaagatagaaaaggagttgaacttggctaacacaatcataacaatcattgcaaatgttattggtatggcgagaataatatatgttatttacgactcggaccgatg

SEQ ID NO: 8944 - DNA, 203 bp, Artificial sequence
  synthetic
ggcgcgccagtcctcaaaaccaaattgcagcctagtgttttctatgatgtattccctggttcaaaagaaccagctgtgttgtctgaaaaagatgcccggttacaagttgatttcaatgaagcactattttctaaatacaaagggaatacagattgctccattaatgaccacataagaattgcatcatccgactcggaccgatg

SEQ ID NO: 8945 - DNA, 203 bp, Artificial sequence
  synthetic
ggcgcgccagtcctacattatgcagcacaactcattaccttagatattgacccaaaacctattacacttgaggacagtgtctttggcactgatggattagaggctcttgatttgaacactagcgcaggatttccatatattgcaatgggagttaaaaagagagatttaataaacaacaagaccaaggacgactcggaccgatg

SEQ ID NO: 8946 - DNA, 203 bp, Artificial sequence
  synthetic
ggcgcgccagtcctttcaaagttccacttgaatcctggaattgttactggatcagcagttggatgtgatccagaggtgttttggtcaaaaataccagcaatgttggatgataaatgtattatggcttttgattatacaaattatgatggtagtatacaccctatttggtttgaagctcttaaacaggtcgactcggaccgatg

SEQ ID NO: 8947 - DNA, 203 bp, Artificial sequence
  synthetic
ggcgcgccagtcctactggtagatctatcatttaatccaacattaatagatagactatgcaagtctaaacacatcttcaaaaatacatactatgaagtggagggaggtgtaccatctgggtgttcaggtactagtatttttaacactatgatcaataatattatcataaggaccttagtgttagatgccgactcggaccgatg

SEQ ID NO: 8948 - DNA, 203 bp, Artificial sequence
  synthetic
ggcgcgccagtcctatacaagaatatagatctagataagcttaagataattgcctatggtgatgatgtcatattctcatacatacatgaactggacatggaggctatagcaatagagggtgttaaatatggtttgactataactcctgctgataaatctaacacatttgtaaaattagactatagcaacgactcggaccgatg

SEQ ID NO: 8949 - DNA, 203 bp, Artificial sequence
  synthetic
ggcgcgccagtcctaaagaaaacctcctgtacattcaactacacaaaaactttgaagaacaggtactatgagcccagggacagctacttccagcaatatatgcttaagggtgagtatcagtactggtttgacctggatgcgactgaccgccactcagattacttcgcagaatttgttgtcttggtggtcgactcggaccgatg

SEQ ID NO: 8950 - DNA, 203 bp, Artificial sequence
  synthetic
ggcgcgccagtcctttatgaaggagacccgatatctgcctacaaggaagtcatcggccacaacctttttgatcttaagagaacaagctttgagaagctggccaagttaaatcttagcatgtctgtactcggggcctggactagacacaccagtaaaagactactacaagactgtgtcaatataggtgtcgactcggaccgatg

SEQ ID NO: 8951 - DNA, 203 bp, Artificial sequence
  synthetic
ggcgcgccagtcctcacctacggaaaccttgttacgacttttacttcctctagatagtcaagttcgaccgtcttctcagcgctccgccagggccgtgggccgaccccggcggggccgatccgagggcctcactaaaccatccaatcggtagtagcgacgggcggtgtgtacaaagggcagggacttaacgactcggaccgatg

SEQ ID NO: 8952 - DNA, 203 bp, Artificial sequence
  synthetic
ggcgcgccagtcctaaccttgttacgacttttacttcctctagatagtcaagttcgaccgtcttctcagcgctccgccagggccgtgggccgaccccggcggggccgatccgagggcctcactaaaccatccaatcggtagtagcgacgggcggtgtgtacaaagggcagggacttaatcaacgcaagcgactcggaccgatg

SEQ ID NO: 8953 - DNA, 203 bp, Artificial sequence
  synthetic
ggcgcgccagtcctcgacttttacttcctctagatagtcaagttcgaccgtcttctcagcgctccgccagggccgtgggccgaccccggcggggccgatccgagggcctcactaaaccatccaatcggtagtagcgacgggcggtgtgtacaaagggcagggacttaatcaacgcaagcttatgaccccgactcggaccgatg

SEQ ID NO: 8954 - DNA, 203 bp, Artificial sequence
  synthetic
ggcgcgccagtcctttcctctagatagtcaagttcgaccgtcttctcagcgctccgccagggccgtgggccgaccccggcggggccgatccgagggcctcactaaaccatccaatcggtagtagcgacgggcggtgtgtacaaagggcagggacttaatcaacgcaagcttatgacccgcacttactgcgactcggaccgatg

SEQ ID NO: 8955 - DNA, 203 bp, Artificial sequence
  synthetic
ggcgcgccagtccttagtcaagttcgaccgtcttctcagcgctccgccagggccgtgggccgaccccggcggggccgatccgagggcctcactaaaccatccaatcggtagtagcgacgggcggtgtgtacaaagggcagggacttaatcaacgcaagcttatgacccgcacttactgggaattcctccgactcggaccgatg

SEQ ID NO: 8956 - DNA, 203 bp, Artificial sequence
  synthetic
ggcgcgccagtcctcgaccgtcttctcagcgctccgccagggccgtgggccgaccccggcggggccgatccgagggcctcactaaaccatccaatcggtagtagcgacgggcggtgtgtacaaagggcagggacttaatcaacgcaagcttatgacccgcacttactgggaattcctcgttcatggggcgactcggaccgatg

SEQ ID NO: 8957 - DNA, 203 bp, Artificial sequence
  synthetic
ggcgcgccagtcctcccggcggggccgatccgagggcctcactaaaccatccaatcggtagtagcgacgggcggtgtgtacaaagggcagggacttaatcaacgcaagcttatgacccgcacttactgggaattcctcgttcatggggaataattgcaatccccgatccccatcacgaatggggttcacgactcggaccgatg

SEQ ID NO: 8958 - DNA, 203 bp, Artificial sequence
  synthetic
ggcgcgccagtcctggcctcactaaaccatccaatcggtagtagcgacgggcggtgtgtacaaagggcagggacttaatcaacgcaagcttatgacccgcacttactgggaattcctcgttcatggggaataattgcaatccccgatccccatcacgaatggggttcaacgggttacccgcgcctgcccgactcggaccgatg

SEQ ID NO: 8959 - DNA, 203 bp, Artificial sequence
  synthetic
ggcgcgccagtcctaaccatccaatcggtagtagcgacgggcggtgtgtacaaagggcagggacttaatcaacgcaagcttatgacccgcacttactgggaattcctcgttcatggggaataattgcaatccccgatccccatcacgaatggggttcaacgggttacccgcgcctgccggcgtagggtcgactcggaccgatg

SEQ ID NO: 8960 - DNA, 203 bp, Artificial sequence
  synthetic
ggcgcgccagtcctcgacgggcggtgtgtacaaagggcagggacttaatcaacgcaagcttatgacccgcacttactgggaattcctcgttcatggggaataattgcaatccccgatccccatcacgaatggggttcaacgggttacccgcgcctgccggcgtagggtaggcacacgctgagccagtccgactcggaccgatg

SEQ ID NO: 8961 - DNA, 203 bp, Artificial sequence
  synthetic
ggcgcgccagtcctgggcagggacttaatcaacgcaagcttatgacccgcacttactgggaattcctcgttcatggggaataattgcaatccccgatccccatcacgaatggggttcaacgggttacccgcgcctgccggcgtagggtaggcacacgctgagccagtcagtgtagcgcgcgtgcagcccgactcggaccgatg

SEQ ID NO: 8962 - DNA, 203 bp, Artificial sequence
  synthetic
ggcgcgccagtcctcaagcttatgacccgcacttactgggaattcctcgttcatggggaataattgcaatccccgatccccatcacgaatggggttcaacgggttacccgcgcctgccggcgtagggtaggcacacgctgagccagtcagtgtagcgcgcgtgcagccccggacatctaagggcatcacgactcggaccgatg

SEQ ID NO: 8963 - DNA, 203 bp, Artificial sequence
  synthetic
ggcgcgccagtcctactgggaattcctcgttcatggggaataattgcaatccccgatccccatcacgaatggggttcaacgggttacccgcgcctgccggcgtagggtaggcacacgctgagccagtcagtgtagcgcgcgtgcagccccggacatctaagggcatcacagacctgttattgctcaatcgactcggaccgatg

SEQ ID NO: 8964 - DNA, 203 bp, Artificial sequence
  synthetic
ggcgcgccagtccttacccgcgcctgccggcgtagggtaggcacacgctgagccagtcagtgtagcgcgcgtgcagccccggacatctaagggcatcacagacctgttattgctcaatctcgggtggctgaacgccacttgtccctctaagaagttgggggacgccgaccgctcgggggtcgcgtaaccgactcggaccgatg

SEQ ID NO: 8965 - DNA, 203 bp, Artificial sequence
  synthetic
ggcgcgccagtcctgggtaggcacacgctgagccagtcagtgtagcgcgcgtgcagccccggacatctaagggcatcacagacctgttattgctcaatctcgggtggctgaacgccacttgtccctctaagaagttgggggacgccgaccgctcgggggtcgcgtaactagttagcatgccagagtctcgactcggaccgatg

SEQ ID NO: 8966 - DNA, 203 bp, Artificial sequence
  synthetic
ggcgcgccagtcctacgctgagccagtcagtgtagcgcgcgtgcagccccggacatctaagggcatcacagacctgttattgctcaatctcgggtggctgaacgccacttgtccctctaagaagttgggggacgccgaccgctcgggggtcgcgtaactagttagcatgccagagtctcgttcgttatcgactcggaccgatg

SEQ ID NO: 8967 - DNA, 203 bp, Artificial sequence
  synthetic
ggcgcgccagtcctagccccggacatctaagggcatcacagacctgttattgctcaatctcgggtggctgaacgccacttgtccctctaagaagttgggggacgccgaccgctcgggggtcgcgtaactagttagcatgccagagtctcgttcgttatcggaattaaccagacaaatcgctccaccaacgactcggaccgatg

SEQ ID NO: 8968 - DNA, 203 bp, Artificial sequence
  synthetic
ggcgcgccagtcctatcacagacctgttattgctcaatctcgggtggctgaacgccacttgtccctctaagaagttgggggacgccgaccgctcgggggtcgcgtaactagttagcatgccagagtctcgttcgttatcggaattaaccagacaaatcgctccaccaactaagaacggccatgcaccacgactcggaccgatg

SEQ ID NO: 8969 - DNA, 203 bp, Artificial sequence
  synthetic
ggcgcgccagtccttgttattgctcaatctcgggtggctgaacgccacttgtccctctaagaagttgggggacgccgaccgctcgggggtcgcgtaactagttagcatgccagagtctcgttcgttatcggaattaaccagacaaatcgctccaccaactaagaacggccatgcaccaccacccacggcgactcggaccgatg

SEQ ID NO: 8970 - DNA, 203 bp, Artificial sequence
  synthetic
ggcgcgccagtcctcaatctcgggtggctgaacgccacttgtccctctaagaagttgggggacgccgaccgctcgggggtcgcgtaactagttagcatgccagagtctcgttcgttatcggaattaaccagacaaatcgctccaccaactaagaacggccatgcaccaccacccacggaatcgagaaacgactcggaccgatg

SEQ ID NO: 8971 - DNA, 203 bp, Artificial sequence
  synthetic
ggcgcgccagtcctgtctcgttcgttatcggaattaaccagacaaatcgctccaccaactaagaacggccatgcaccaccacccacggaatcgagaaagagctatcaatctgtcaatcctgtccgtgtccgggccgggtgaggtttcccgtgttgagtcaaattaagccgcaggctccactcctggtgcgactcggaccgatg

SEQ ID NO: 8972 - DNA, 203 bp, Artificial sequence
  synthetic
ggcgcgccagtccttaaccagacaaatcgctccaccaactaagaacggccatgcaccaccacccacggaatcgagaaagagctatcaatctgtcaatcctgtccgtgtccgggccgggtgaggtttcccgtgttgagtcaaattaagccgcaggctccactcctggtggtgcccttccgtcaattcctcgactcggaccgatg

SEQ ID NO: 8973 - DNA, 203 bp, Artificial sequence
  synthetic
ggcgcgccagtcctacggccatgcaccaccacccacggaatcgagaaagagctatcaatctgtcaatcctgtccgtgtccgggccgggtgaggtttcccgtgttgagtcaaattaagccgcaggctccactcctggtggtgcccttccgtcaattcctttaagtttcagctttgcaaccatactcccccgactcggaccgatg

SEQ ID NO: 8974 - DNA, 203 bp, Artificial sequence
  synthetic
ggcgcgccagtcctgaaagagctatcaatctgtcaatcctgtccgtgtccgggccgggtgaggtttcccgtgttgagtcaaattaagccgcaggctccactcctggtggtgcccttccgtcaattcctttaagtttcagctttgcaaccatactccccccggaacccaaagactttggtttcccggaacgactcggaccgatg

SEQ ID NO: 8975 - DNA, 203 bp, Artificial sequence
  synthetic
ggcgcgccagtccttcaatctgtcaatcctgtccgtgtccgggccgggtgaggtttcccgtgttgagtcaaattaagccgcaggctccactcctggtggtgcccttccgtcaattcctttaagtttcagctttgcaaccatactccccccggaacccaaagactttggtttcccggaagctgcccggccgactcggaccgatg

SEQ ID NO: 8976 - DNA, 203 bp, Artificial sequence
  synthetic
ggcgcgccagtcctaatcctgtccgtgtccgggccgggtgaggtttcccgtgttgagtcaaattaagccgcaggctccactcctggtggtgcccttccgtcaattcctttaagtttcagctttgcaaccatactccccccggaacccaaagactttggtttcccggaagctgcccggcgggtcatgggcgactcggaccgatg

SEQ ID NO: 8977 - DNA, 203 bp, Artificial sequence
  synthetic
ggcgcgccagtcctgtgtccgggccgggtgaggtttcccgtgttgagtcaaattaagccgcaggctccactcctggtggtgcccttccgtcaattcctttaagtttcagctttgcaaccatactccccccggaacccaaagactttggtttcccggaagctgcccggcgggtcatgggaataacgccgcgactcggaccgatg

SEQ ID NO: 8978 - DNA, 203 bp, Artificial sequence
  synthetic
ggcgcgccagtcctctccactcctggtggtgcccttccgtcaattcctttaagtttcagctttgcaaccatactccccccggaacccaaagactttggtttcccggaagctgcccggcgggtcatgggaataacgccgccgcatcgccggtcggcatcgtttatggtcggaactacgacggtatctgacgactcggaccgatg

SEQ ID NO: 8979 - DNA, 203 bp, Artificial sequence
  synthetic
ggcgcgccagtcctttcagctttgcaaccatactccccccggaacccaaagactttggtttcccggaagctgcccggcgggtcatgggaataacgccgccgcatcgccggtcggcatcgtttatggtcggaactacgacggtatctgatcgtcttcgaacctccgactttcgttcttgattaatgaaacgactcggaccgatg

SEQ ID NO: 8980 - DNA, 203 bp, Artificial sequence
  synthetic
ggcgcgccagtcctcaaccatactccccccggaacccaaagactttggtttcccggaagctgcccggcgggtcatgggaataacgccgccgcatcgccggtcggcatcgtttatggtcggaactacgacggtatctgatcgtcttcgaacctccgactttcgttcttgattaatgaaaacattcttggcgactcggaccgatg

SEQ ID NO: 8981 - DNA, 203 bp, Artificial sequence
  synthetic
ggcgcgccagtcctttggtttcccggaagctgcccggcgggtcatgggaataacgccgccgcatcgccggtcggcatcgtttatggtcggaactacgacggtatctgatcgtcttcgaacctccgactttcgttcttgattaatgaaaacattcttggcaaatgctttcgctctggtccgtcttgcgccgactcggaccgatg

SEQ ID NO: 8982 - DNA, 203 bp, Artificial sequence
  synthetic
ggcgcgccagtcctggaagctgcccggcgggtcatgggaataacgccgccgcatcgccggtcggcatcgtttatggtcggaactacgacggtatctgatcgtcttcgaacctccgactttcgttcttgattaatgaaaacattcttggcaaatgctttcgctctggtccgtcttgcgccggtccaagacgactcggaccgatg

SEQ ID NO: 8983 - DNA, 203 bp, Artificial sequence
  synthetic
ggcgcgccagtcctcggcgggtcatgggaataacgccgccgcatcgccggtcggcatcgtttatggtcggaactacgacggtatctgatcgtcttcgaacctccgactttcgttcttgattaatgaaaacattcttggcaaatgctttcgctctggtccgtcttgcgccggtccaagaatttcacctccgactcggaccgatg

SEQ ID NO: 8984 - DNA, 203 bp, Artificial sequence
  synthetic
ggcgcgccagtcctgccgccgcatcgccggtcggcatcgtttatggtcggaactacgacggtatctgatcgtcttcgaacctccgactttcgttcttgattaatgaaaacattcttggcaaatgctttcgctctggtccgtcttgcgccggtccaagaatttcacctctagcggcgcaatacgaatgccgactcggaccgatg

SEQ ID NO: 8985 - DNA, 203 bp, Artificial sequence
  synthetic
ggcgcgccagtcctcgccggtcggcatcgtttatggtcggaactacgacggtatctgatcgtcttcgaacctccgactttcgttcttgattaatgaaaacattcttggcaaatgctttcgctctggtccgtcttgcgccggtccaagaatttcacctctagcggcgcaatacgaatgcccccggccgtcgactcggaccgatg

SEQ ID NO: 8986 - DNA, 203 bp, Artificial sequence
  synthetic
ggcgcgccagtcctggtcggaactacgacggtatctgatcgtcttcgaacctccgactttcgttcttgattaatgaaaacattcttggcaaatgctttcgctctggtccgtcttgcgccggtccaagaatttcacctctagcggcgcaatacgaatgcccccggccgtccctcttaatcatggcctcacgactcggaccgatg

SEQ ID NO: 8987 - DNA, 203 bp, Artificial sequence
  synthetic
ggcgcgccagtcctacgacggtatctgatcgtcttcgaacctccgactttcgttcttgattaatgaaaacattcttggcaaatgctttcgctctggtccgtcttgcgccggtccaagaatttcacctctagcggcgcaatacgaatgcccccggccgtccctcttaatcatggcctcagttccgaaaacgactcggaccgatg

SEQ ID NO: 8988 - DNA, 203 bp, Artificial sequence
  synthetic
ggcgcgccagtcctctgatcgtcttcgaacctccgactttcgttcttgattaatgaaaacattcttggcaaatgctttcgctctggtccgtcttgcgccggtccaagaatttcacctctagcggcgcaatacgaatgcccccggccgtccctcttaatcatggcctcagttccgaaaaccaacaaaatcgactcggaccgatg

SEQ ID NO: 8989 - DNA, 203 bp, Artificial sequence
  synthetic
ggcgcgccagtccttcgaacctccgactttcgttcttgattaatgaaaacattcttggcaaatgctttcgctctggtccgtcttgcgccggtccaagaatttcacctctagcggcgcaatacgaatgcccccggccgtccctcttaatcatggcctcagttccgaaaaccaacaaaatagaaccgcggcgactcggaccgatg

SEQ ID NO: 8990 - DNA, 203 bp, Artificial sequence
  synthetic
ggcgcgccagtcctgaaaacattcttggcaaatgctttcgctctggtccgtcttgcgccggtccaagaatttcacctctagcggcgcaatacgaatgcccccggccgtccctcttaatcatggcctcagttccgaaaaccaacaaaatagaaccgcggtcctattccattattcctagctgcggtatccgactcggaccgatg

SEQ ID NO: 8991 - DNA, 203 bp, Artificial sequence
  synthetic
ggcgcgccagtcctttggcaaatgctttcgctctggtccgtcttgcgccggtccaagaatttcacctctagcggcgcaatacgaatgcccccggccgtccctcttaatcatggcctcagttccgaaaaccaacaaaatagaaccgcggtcctattccattattcctagctgcggtatccaggcggctccgactcggaccgatg

SEQ ID NO: 8992 - DNA, 203 bp, Artificial sequence
  synthetic
ggcgcgccagtcctggtccgtcttgcgccggtccaagaatttcacctctagcggcgcaatacgaatgcccccggccgtccctcttaatcatggcctcagttccgaaaaccaacaaaatagaaccgcggtcctattccattattcctagctgcggtatccaggcggctcgggcctgctttgaacactctcgactcggaccgatg

SEQ ID NO: 8993 - DNA, 203 bp, Artificial sequence
  synthetic
ggcgcgccagtcctgcgccggtccaagaatttcacctctagcggcgcaatacgaatgcccccggccgtccctcttaatcatggcctcagttccgaaaaccaacaaaatagaaccgcggtcctattccattattcctagctgcggtatccaggcggctcgggcctgctttgaacactctaattttttcacgactcggaccgatg

SEQ ID NO: 8994 - DNA, 203 bp, Artificial sequence
  synthetic
ggcgcgccagtcctcgcaatacgaatgcccccggccgtccctcttaatcatggcctcagttccgaaaaccaacaaaatagaaccgcggtcctattccattattcctagctgcggtatccaggcggctcgggcctgctttgaacactctaattttttcaaagtaaacgcttcgggccccgcgggacactcgactcggaccgatg

SEQ ID NO: 8995 - DNA, 203 bp, Artificial sequence
  synthetic
ggcgcgccagtcctccgtccctcttaatcatggcctcagttccgaaaaccaacaaaatagaaccgcggtcctattccattattcctagctgcggtatccaggcggctcgggcctgctttgaacactctaattttttcaaagtaaacgcttcgggccccgcgggacactcagctaagagcatcgaggggcgactcggaccgatg

SEQ ID NO: 8996 - DNA, 203 bp, Artificial sequence
  synthetic
ggcgcgccagtccttaatcatggcctcagttccgaaaaccaacaaaatagaaccgcggtcctattccattattcctagctgcggtatccaggcggctcgggcctgctttgaacactctaattttttcaaagtaaacgcttcgggccccgcgggacactcagctaagagcatcgagggggcgccgagagcgactcggaccgatg

SEQ ID NO: 8997 - DNA, 203 bp, Artificial sequence
  synthetic
ggcgcgccagtcctctcagttccgaaaaccaacaaaatagaaccgcggtcctattccattattcctagctgcggtatccaggcggctcgggcctgctttgaacactctaattttttcaaagtaaacgcttcgggccccgcgggacactcagctaagagcatcgagggggcgccgagaggcaaggggcgcgactcggaccgatg

SEQ ID NO: 8998 - DNA, 203 bp, Artificial sequence
  synthetic
ggcgcgccagtcctctagctgcggtatccaggcggctcgggcctgctttgaacactctaattttttcaaagtaaacgcttcgggccccgcgggacactcagctaagagcatcgagggggcgccgagaggcaaggggcggggacgggcggtggctcgcctcgcgggggaccgcccgcccgctcccaagacgactcggaccgatg

SEQ ID NO: 8999 - DNA, 203 bp, Artificial sequence
  synthetic
ggcgcgccagtcctttcaaagtaaacgcttcgggccccgcgggacactcagctaagagcatcgagggggcgccgagaggcaaggggcggggacgggcggtggctcgcctcgcgggggaccgcccgcccgctcccaagatccaactacgagctttttaactgcagcaactttaatatacgctattggagcgactcggaccgatg

SEQ ID NO: 9000 - DNA, 203 bp, Artificial sequence
  synthetic
ggcgcgccagtcctcactcagctaagagcatcgagggggcgccgagaggcaaggggcggggacgggcggtggctcgcctcgcgggggaccgcccgcccgctcccaagatccaactacgagctttttaactgcagcaactttaatatacgctattggagctggaattaccgcggctgctggcaccagaccgactcggaccgatg

SEQ ID NO: 9001 - DNA, 203 bp, Artificial sequence
  synthetic
ggcgcgccagtcctagagcatcgagggggcgccgagaggcaaggggcggggacgggcggtggctcgcctcgcgggggaccgcccgcccgctcccaagatccaactacgagctttttaactgcagcaactttaatatacgctattggagctggaattaccgcggctgctggcaccagacttgccctccacgactcggaccgatg

SEQ ID NO: 9002 - DNA, 203 bp, Artificial sequence
  synthetic
ggcgcgccagtcctgggggcgccgagaggcaaggggcggggacgggcggtggctcgcctcgcgggggaccgcccgcccgctcccaagatccaactacgagctttttaactgcagcaactttaatatacgctattggagctggaattaccgcggctgctggcaccagacttgccctccaatggatcctccgactcggaccgatg

SEQ ID NO: 9003 - DNA, 203 bp, Artificial sequence
  synthetic
ggcgcgccagtcctagaggcaaggggcggggacgggcggtggctcgcctcgcgggggaccgcccgcccgctcccaagatccaactacgagctttttaactgcagcaactttaatatacgctattggagctggaattaccgcggctgctggcaccagacttgccctccaatggatcctcgttaaaggatcgactcggaccgatg

SEQ ID NO: 9004 - DNA, 203 bp, Artificial sequence
  synthetic
ggcgcgccagtccttacgagctttttaactgcagcaactttaatatacgctattggagctggaattaccgcggctgctggcaccagacttgccctccaatggatcctcgttaaaggatttaaagtggactcattccaattacagggcctcgaaagagtcctgtattgttatttttcgtcactacctcccgactcggaccgatg

SEQ ID NO: 9005 - DNA, 203 bp, Artificial sequence
  synthetic
ggcgcgccagtcctatacgctattggagctggaattaccgcggctgctggcaccagacttgccctccaatggatcctcgttaaaggatttaaagtggactcattccaattacagggcctcgaaagagtcctgtattgttatttttcgtcactacctccccgggtcgggagtgggtaatttgcgcgcctcgactcggaccgatg

SEQ ID NO: 9006 - DNA, 203 bp, Artificial sequence
  synthetic
ggcgcgccagtcctggagctggaattaccgcggctgctggcaccagacttgccctccaatggatcctcgttaaaggatttaaagtggactcattccaattacagggcctcgaaagagtcctgtattgttatttttcgtcactacctccccgggtcgggagtgggtaatttgcgcgcctgctgccttcccgactcggaccgatg

SEQ ID NO: 9007 - DNA, 203 bp, Artificial sequence
  synthetic
ggcgcgccagtcctagacttgccctccaatggatcctcgttaaaggatttaaagtggactcattccaattacagggcctcgaaagagtcctgtattgttatttttcgtcactacctccccgggtcgggagtgggtaatttgcgcgcctgctgccttccttggatgtggtagccgtttctcaggctccccgactcggaccgatg

SEQ ID NO: 9008 - DNA, 203 bp, Artificial sequence
  synthetic
ggcgcgccagtccttccaatggatcctcgttaaaggatttaaagtggactcattccaattacagggcctcgaaagagtcctgtattgttatttttcgtcactacctccccgggtcgggagtgggtaatttgcgcgcctgctgccttccttggatgtggtagccgtttctcaggctccctctccggaatcgactcggaccgatg

SEQ ID NO: 9009 - DNA, 203 bp, Artificial sequence
  synthetic
ggcgcgccagtcctggcctcgaaagagtcctgtattgttatttttcgtcactacctccccgggtcgggagtgggtaatttgcgcgcctgctgccttccttggatgtggtagccgtttctcaggctccctctccggaatcgaaccctgattccccgtcacccgtggtcaccatggtaggcacggcgactcgactcggaccgatg

SEQ ID NO: 9010 - DNA, 203 bp, Artificial sequence
  synthetic
ggcgcgccagtccttcgtcactacctccccgggtcgggagtgggtaatttgcgcgcctgctgccttccttggatgtggtagccgtttctcaggctccctctccggaatcgaaccctgattccccgtcacccgtggtcaccatggtaggcacggcgactaccatcgaaagttgatagggcagacgttcgcgactcggaccgatg

SEQ ID NO: 9011 - DNA, 203 bp, Artificial sequence
  synthetic
ggcgcgccagtcctgtggtagccgtttctcaggctccctctccggaatcgaaccctgattccccgtcacccgtggtcaccatggtaggcacggcgactaccatcgaaagttgatagggcagacgttcgaatgggtcgtcgccgccacggggggcgtgcgatcggcccgaggttatctagagtcaccaacgactcggaccgatg

SEQ ID NO: 9012 - DNA, 203 bp, Artificial sequence
  synthetic
ggcgcgccagtcctgaatcgaaccctgattccccgtcacccgtggtcaccatggtaggcacggcgactaccatcgaaagttgatagggcagacgttcgaatgggtcgtcgccgccacggggggcgtgcgatcggcccgaggttatctagagtcaccaaagccgccggcgcccgccccccggccggggccgactcggaccgatg

SEQ ID NO: 9013 - DNA, 203 bp, Artificial sequence
  synthetic
ggcgcgccagtcctctgattccccgtcacccgtggtcaccatggtaggcacggcgactaccatcgaaagttgatagggcagacgttcgaatgggtcgtcgccgccacggggggcgtgcgatcggcccgaggttatctagagtcaccaaagccgccggcgcccgccccccggccggggccggagaggggcgactcggaccgatg

SEQ ID NO: 9014 - DNA, 203 bp, Artificial sequence
  synthetic
ggcgcgccagtcctgtcaccatggtaggcacggcgactaccatcgaaagttgatagggcagacgttcgaatgggtcgtcgccgccacggggggcgtgcgatcggcccgaggttatctagagtcaccaaagccgccggcgcccgccccccggccggggccggagaggggctgaccgggttggttttgatcgactcggaccgatg

SEQ ID NO: 9015 - DNA, 203 bp, Artificial sequence
  synthetic
ggcgcgccagtcctcacggggggcgtgcgatcggcccgaggttatctagagtcaccaaagccgccggcgcccgccccccggccggggccggagaggggctgaccgggttggttttgatctgataaatgcacgcatcccccccgcgaagggggtcagcgcccgtcggcatgtattagctctagaattaccgactcggaccgatg

SEQ ID NO: 9016 - DNA, 203 bp, Artificial sequence
  synthetic
ggcgcgccagtcctcccgaggttatctagagtcaccaaagccgccggcgcccgccccccggccggggccggagaggggctgaccgggttggttttgatctgataaatgcacgcatcccccccgcgaagggggtcagcgcccgtcggcatgtattagctctagaattaccacagttatccaagtaggagcgactcggaccgatg

SEQ ID NO: 9017 - DNA, 203 bp, Artificial sequence
  synthetic
ggcgcgccagtcctggggctgaccgggttggttttgatctgataaatgcacgcatcccccccgcgaagggggtcagcgcccgtcggcatgtattagctctagaattaccacagttatccaagtaggagaggagcgagcgaccaaaggaaccataactgatttaatgagccattcgcagtttcactgtacgactcggaccgatg

SEQ ID NO: 9018 - DNA, 203 bp, Artificial sequence
  synthetic
ggcgcgccagtccttcccccccgcgaagggggtcagcgcccgtcggcatgtattagctctagaattaccacagttatccaagtaggagaggagcgagcgaccaaaggaaccataactgatttaatgagccattcgcagtttcactgtaccggccgtgcgtactcagacatgcatggcttaatctttgacgactcggaccgatg

SEQ ID NO: 9019 - DNA, 203 bp, Artificial sequence
  synthetic
ggcgcgccagtcctgggcggcccgccggcggggacaggcgggggaccggctatccgaggccaaccgaggctccgcggcgctgccgtatcgttccgcctgggcgggattctgacttagaggcgttcagtcataatcccacagatggtagcttcgccccattggctcctcagccaagcacatacaccaaacgactcggaccgatg

SEQ ID NO: 9020 - DNA, 203 bp, Artificial sequence
  synthetic
ggcgcgccagtcctccggcggggacaggcgggggaccggctatccgaggccaaccgaggctccgcggcgctgccgtatcgttccgcctgggcgggattctgacttagaggcgttcagtcataatcccacagatggtagcttcgccccattggctcctcagccaagcacatacaccaaatgtctgaacccgactcggaccgatg

SEQ ID NO: 9021 - DNA, 203 bp, Artificial sequence
  synthetic
ggcgcgccagtcctcaggcgggggaccggctatccgaggccaaccgaggctccgcggcgctgccgtatcgttccgcctgggcgggattctgacttagaggcgttcagtcataatcccacagatggtagcttcgccccattggctcctcagccaagcacatacaccaaatgtctgaacctgcggttcctcgactcggaccgatg

SEQ ID NO: 9022 - DNA, 203 bp, Artificial sequence
  synthetic
ggcgcgccagtcctcgaggctccgcggcgctgccgtatcgttccgcctgggcgggattctgacttagaggcgttcagtcataatcccacagatggtagcttcgccccattggctcctcagccaagcacatacaccaaatgtctgaacctgcggttcctctcgtactgagcaggattaccatggcaacacgactcggaccgatg

SEQ ID NO: 9023 - DNA, 203 bp, Artificial sequence
  synthetic
ggcgcgccagtcctcggcgctgccgtatcgttccgcctgggcgggattctgacttagaggcgttcagtcataatcccacagatggtagcttcgccccattggctcctcagccaagcacatacaccaaatgtctgaacctgcggttcctctcgtactgagcaggattaccatggcaacaacacatcatccgactcggaccgatg

SEQ ID NO: 9024 - DNA, 203 bp, Artificial sequence
  synthetic
ggcgcgccagtcctgtatcgttccgcctgggcgggattctgacttagaggcgttcagtcataatcccacagatggtagcttcgccccattggctcctcagccaagcacatacaccaaatgtctgaacctgcggttcctctcgtactgagcaggattaccatggcaacaacacatcatcagtagggtaacgactcggaccgatg

SEQ ID NO: 9025 - DNA, 203 bp, Artificial sequence
  synthetic
ggcgcgccagtcctgcctgggcgggattctgacttagaggcgttcagtcataatcccacagatggtagcttcgccccattggctcctcagccaagcacatacaccaaatgtctgaacctgcggttcctctcgtactgagcaggattaccatggcaacaacacatcatcagtagggtaaaactaacctgcgactcggaccgatg

SEQ ID NO: 9026 - DNA, 203 bp, Artificial sequence
  synthetic
ggcgcgccagtcctgcacatacaccaaatgtctgaacctgcggttcctctcgtactgagcaggattaccatggcaacaacacatcatcagtagggtaaaactaacctgtctcacgacggtctaaacccagctcacgttccctattagtgggtgaacaatccaacgcttggtgaattctgcttcacaatcgactcggaccgatg

SEQ ID NO: 9027 - DNA, 203 bp, Artificial sequence
  synthetic
ggcgcgccagtccttcctctcgtactgagcaggattaccatggcaacaacacatcatcagtagggtaaaactaacctgtctcacgacggtctaaacccagctcacgttccctattagtgggtgaacaatccaacgcttggtgaattctgcttcacaatgataggaagagccgacatcgaaggatcaaacgactcggaccgatg

SEQ ID NO: 9028 - DNA, 203 bp, Artificial sequence
  synthetic
ggcgcgccagtcctgtaaaactaacctgtctcacgacggtctaaacccagctcacgttccctattagtgggtgaacaatccaacgcttggtgaattctgcttcacaatgataggaagagccgacatcgaaggatcaaaaagcgacgtcgctatgaacgcttggccgccacaagccagttatccctgtgcgactcggaccgatg

SEQ ID NO: 9029 - DNA, 203 bp, Artificial sequence
  synthetic
ggcgcgccagtccttagtgggtgaacaatccaacgcttggtgaattctgcttcacaatgataggaagagccgacatcgaaggatcaaaaagcgacgtcgctatgaacgcttggccgccacaagccagttatccctgtggtaacttttctgacacctcctgcttaaaacccaaaaggtcagaaggatcgcgactcggaccgatg

SEQ ID NO: 9030 - DNA, 203 bp, Artificial sequence
  synthetic
ggcgcgccagtcctgcttggtgaattctgcttcacaatgataggaagagccgacatcgaaggatcaaaaagcgacgtcgctatgaacgcttggccgccacaagccagttatccctgtggtaacttttctgacacctcctgcttaaaacccaaaaggtcagaaggatcgtgaggccccgctttcacggtcgactcggaccgatg

SEQ ID NO: 9031 - DNA, 203 bp, Artificial sequence
  synthetic
ggcgcgccagtcctcaatgataggaagagccgacatcgaaggatcaaaaagcgacgtcgctatgaacgcttggccgccacaagccagttatccctgtggtaacttttctgacacctcctgcttaaaacccaaaaggtcagaaggatcgtgaggccccgctttcacggtctgtattcgtactgaaaatccgactcggaccgatg

SEQ ID NO: 9032 - DNA, 203 bp, Artificial sequence
  synthetic
ggcgcgccagtcctcgtcgctatgaacgcttggccgccacaagccagttatccctgtggtaacttttctgacacctcctgcttaaaacccaaaaggtcagaaggatcgtgaggccccgctttcacggtctgtattcgtactgaaaatcaagatcaagcgagcttttgcccttctgctccacgggaggtcgactcggaccgatg

SEQ ID NO: 9033 - DNA, 203 bp, Artificial sequence
  synthetic
ggcgcgccagtcctcagttatccctgtggtaacttttctgacacctcctgcttaaaacccaaaaggtcagaaggatcgtgaggccccgctttcacggtctgtattcgtactgaaaatcaagatcaagcgagcttttgcccttctgctccacgggaggtttctgtcctccctgagctcgccttaggacacgactcggaccgatg

SEQ ID NO: 9034 - DNA, 203 bp, Artificial sequence
  synthetic
ggcgcgccagtcctctcctgcttaaaacccaaaaggtcagaaggatcgtgaggccccgctttcacggtctgtattcgtactgaaaatcaagatcaagcgagcttttgcccttctgctccacgggaggtttctgtcctccctgagctcgccttaggacacctgcgttaccgtttgacaggtgtaccgcccgactcggaccgatg

SEQ ID NO: 9035 - DNA, 203 bp, Artificial sequence
  synthetic
ggcgcgccagtcctggtcagaaggatcgtgaggccccgctttcacggtctgtattcgtactgaaaatcaagatcaagcgagcttttgcccttctgctccacgggaggtttctgtcctccctgagctcgccttaggacacctgcgttaccgtttgacaggtgtaccgccccagtcaaactccccacctgcgactcggaccgatg

SEQ ID NO: 9036 - DNA, 203 bp, Artificial sequence
  synthetic
ggcgcgccagtcctatcgtgaggccccgctttcacggtctgtattcgtactgaaaatcaagatcaagcgagcttttgcccttctgctccacgggaggtttctgtcctccctgagctcgccttaggacacctgcgttaccgtttgacaggtgtaccgccccagtcaaactccccacctggcactgtccccgactcggaccgatg

SEQ ID NO: 9037 - DNA, 203 bp, Artificial sequence
  synthetic
ggcgcgccagtcctcccgctttcacggtctgtattcgtactgaaaatcaagatcaagcgagcttttgcccttctgctccacgggaggtttctgtcctccctgagctcgccttaggacacctgcgttaccgtttgacaggtgtaccgccccagtcaaactccccacctggcactgtccccggagcgggtcgactcggaccgatg

SEQ ID NO: 9038 - DNA, 203 bp, Artificial sequence
  synthetic
ggcgcgccagtcctcggtctgtattcgtactgaaaatcaagatcaagcgagcttttgcccttctgctccacgggaggtttctgtcctccctgagctcgccttaggacacctgcgttaccgtttgacaggtgtaccgccccagtcaaactccccacctggcactgtccccggagcgggtcgcgcccggccgactcggaccgatg

SEQ ID NO: 9039 - DNA, 203 bp, Artificial sequence
  synthetic
ggcgcgccagtcctcggggacaccgggggggcgccgggggcctcccacttattctacacctctcatgtctcttcaccgtgccagactagagtcaagctcaacagggtcttctttccccgctgattccgccaagcccgttcccttggctgtggtttcgctggatagtaggtagggacagtgggaatctccgactcggaccgatg

SEQ ID NO: 9040 - DNA, 203 bp, Artificial sequence
  synthetic
ggcgcgccagtcctgggggggcgccgggggcctcccacttattctacacctctcatgtctcttcaccgtgccagactagagtcaagctcaacagggtcttctttccccgctgattccgccaagcccgttcccttggctgtggtttcgctggatagtaggtagggacagtgggaatctcgttcatccatcgactcggaccgatg

SEQ ID NO: 9041 - DNA, 203 bp, Artificial sequence
  synthetic
ggcgcgccagtcctcgggggcctcccacttattctacacctctcatgtctcttcaccgtgccagactagagtcaagctcaacagggtcttctttccccgctgattccgccaagcccgttcccttggctgtggtttcgctggatagtaggtagggacagtgggaatctcgttcatccattcatgcgcgtcgactcggaccgatg

SEQ ID NO: 9042 - DNA, 203 bp, Artificial sequence
  synthetic
ggcgcgccagtcctccacttattctacacctctcatgtctcttcaccgtgccagactagagtcaagctcaacagggtcttctttccccgctgattccgccaagcccgttcccttggctgtggtttcgctggatagtaggtagggacagtgggaatctcgttcatccattcatgcgcgtcactaattagcgactcggaccgatg

SEQ ID NO: 9043 - DNA, 203 bp, Artificial sequence
  synthetic
ggcgcgccagtccttacacctctcatgtctcttcaccgtgccagactagagtcaagctcaacagggtcttctttccccgctgattccgccaagcccgttcccttggctgtggtttcgctggatagtaggtagggacagtgggaatctcgttcatccattcatgcgcgtcactaattagatgacgaggccgactcggaccgatg

SEQ ID NO: 9044 - DNA, 203 bp, Artificial sequence
  synthetic
ggcgcgccagtcctatgtctcttcaccgtgccagactagagtcaagctcaacagggtcttctttccccgctgattccgccaagcccgttcccttggctgtggtttcgctggatagtaggtagggacagtgggaatctcgttcatccattcatgcgcgtcactaattagatgacgaggcatttggctaccgactcggaccgatg

SEQ ID NO: 9045 - DNA, 203 bp, Artificial sequence
  synthetic
ggcgcgccagtcctaccgtgccagactagagtcaagctcaacagggtcttctttccccgctgattccgccaagcccgttcccttggctgtggtttcgctggatagtaggtagggacagtgggaatctcgttcatccattcatgcgcgtcactaattagatgacgaggcatttggctaccttaagagagcgactcggaccgatg

SEQ ID NO: 9046 - DNA, 203 bp, Artificial sequence
  synthetic
ggcgcgccagtcctagctcaacagggtcttctttccccgctgattccgccaagcccgttcccttggctgtggtttcgctggatagtaggtagggacagtgggaatctcgttcatccattcatgcgcgtcactaattagatgacgaggcatttggctaccttaagagagtcatagttactcccgccgttcgactcggaccgatg

SEQ ID NO: 9047 - DNA, 203 bp, Artificial sequence
  synthetic
ggcgcgccagtcctccccgctgattccgccaagcccgttcccttggctgtggtttcgctggatagtaggtagggacagtgggaatctcgttcatccattcatgcgcgtcactaattagatgacgaggcatttggctaccttaagagagtcatagttactcccgccgtttacccgcgcttcattgaattcgactcggaccgatg

SEQ ID NO: 9048 - DNA, 203 bp, Artificial sequence
  synthetic
ggcgcgccagtcctccgttcccttggctgtggtttcgctggatagtaggtagggacagtgggaatctcgttcatccattcatgcgcgtcactaattagatgacgaggcatttggctaccttaagagagtcatagttactcccgccgtttacccgcgcttcattgaatttcttcactttgacattcagacgactcggaccgatg

SEQ ID NO: 9049 - DNA, 203 bp, Artificial sequence
  synthetic
ggcgcgccagtcctggctgtggtttcgctggatagtaggtagggacagtgggaatctcgttcatccattcatgcgcgtcactaattagatgacgaggcatttggctaccttaagagagtcatagttactcccgccgtttacccgcgcttcattgaatttcttcactttgacattcagagcactgggcacgactcggaccgatg

SEQ ID NO: 9050 - DNA, 203 bp, Artificial sequence
  synthetic
ggcgcgccagtccttcgctggatagtaggtagggacagtgggaatctcgttcatccattcatgcgcgtcactaattagatgacgaggcatttggctaccttaagagagtcatagttactcccgccgtttacccgcgcttcattgaatttcttcactttgacattcagagcactgggcagaaatcacatcgactcggaccgatg

SEQ ID NO: 9051 - DNA, 203 bp, Artificial sequence
  synthetic
ggcgcgccagtcctgtaggtagggacagtgggaatctcgttcatccattcatgcgcgtcactaattagatgacgaggcatttggctaccttaagagagtcatagttactcccgccgtttacccgcgcttcattgaatttcttcactttgacattcagagcactgggcagaaatcacatcgcgtcaacacgactcggaccgatg

SEQ ID NO: 9052 - DNA, 203 bp, Artificial sequence
  synthetic
ggcgcgccagtcctgcgtcactaattagatgacgaggcatttggctaccttaagagagtcatagttactcccgccgtttacccgcgcttcattgaatttcttcactttgacattcagagcactgggcagaaatcacatcgcgtcaacacccgccgcgggccttcgcgatgctttgttttaattaaacacgactcggaccgatg

SEQ ID NO: 9053 - DNA, 203 bp, Artificial sequence
  synthetic
ggcgcgccagtcctctaccttaagagagtcatagttactcccgccgtttacccgcgcttcattgaatttcttcactttgacattcagagcactgggcagaaatcacatcgcgtcaacacccgccgcgggccttcgcgatgctttgttttaattaaacagtcggattcccctggtccgcaccagttctacgactcggaccgatg

SEQ ID NO: 9054 - DNA, 203 bp, Artificial sequence
  synthetic
ggcgcgccagtcctagagtcatagttactcccgccgtttacccgcgcttcattgaatttcttcactttgacattcagagcactgggcagaaatcacatcgcgtcaacacccgccgcgggccttcgcgatgctttgttttaattaaacagtcggattcccctggtccgcaccagttctaagtcggctgccgactcggaccgatg

SEQ ID NO: 9055 - DNA, 203 bp, Artificial sequence
  synthetic
ggcgcgccagtcctttactcccgccgtttacccgcgcttcattgaatttcttcactttgacattcagagcactgggcagaaatcacatcgcgtcaacacccgccgcgggccttcgcgatgctttgttttaattaaacagtcggattcccctggtccgcaccagttctaagtcggctgctaggcgccggcgactcggaccgatg

SEQ ID NO: 9056 - DNA, 203 bp, Artificial sequence
  synthetic
ggcgcgccagtcctgcgcctcgtccagccgcggcgcgcgcccagccccgcttcgcgccccagcccgaccgacccagcccttagagccaatccttatcccgaagttacggatccggcttgccgacttcccttacctacattgttccaacatgccagaggctgttcaccttggagacctgctgcggatatcgactcggaccgatg

SEQ ID NO: 9057 - DNA, 203 bp, Artificial sequence
  synthetic
ggcgcgccagtcctcagccgcggcgcgcgcccagccccgcttcgcgccccagcccgaccgacccagcccttagagccaatccttatcccgaagttacggatccggcttgccgacttcccttacctacattgttccaacatgccagaggctgttcaccttggagacctgctgcggatatgggtacggcccgactcggaccgatg

SEQ ID NO: 9058 - DNA, 203 bp, Artificial sequence
  synthetic
ggcgcgccagtcctcgccccagcccgaccgacccagcccttagagccaatccttatcccgaagttacggatccggcttgccgacttcccttacctacattgttccaacatgccagaggctgttcaccttggagacctgctgcggatatgggtacggcccggcgcgagatttacaccctctcccccggacgactcggaccgatg

SEQ ID NO: 9059 - DNA, 203 bp, Artificial sequence
  synthetic
ggcgcgccagtcctcgaccgacccagcccttagagccaatccttatcccgaagttacggatccggcttgccgacttcccttacctacattgttccaacatgccagaggctgttcaccttggagacctgctgcggatatgggtacggcccggcgcgagatttacaccctctcccccggattttcaagggcgactcggaccgatg

SEQ ID NO: 9060 - DNA, 203 bp, Artificial sequence
  synthetic
ggcgcgccagtcctagcccttagagccaatccttatcccgaagttacggatccggcttgccgacttcccttacctacattgttccaacatgccagaggctgttcaccttggagacctgctgcggatatgggtacggcccggcgcgagatttacaccctctcccccggattttcaagggccagcgagagcgactcggaccgatg

SEQ ID NO: 9061 - DNA, 203 bp, Artificial sequence
  synthetic
ggcgcgccagtcctttcccttacctacattgttccaacatgccagaggctgttcaccttggagacctgctgcggatatgggtacggcccggcgcgagatttacaccctctcccccggattttcaagggccagcgagagctcaccggacgccgccggaaccgcgacgctttccaaggcacgggcccctccgactcggaccgatg

SEQ ID NO: 9062 - DNA, 203 bp, Artificial sequence
  synthetic
ggcgcgccagtcctcaacatgccagaggctgttcaccttggagacctgctgcggatatgggtacggcccggcgcgagatttacaccctctcccccggattttcaagggccagcgagagctcaccggacgccgccggaaccgcgacgctttccaaggcacgggcccctctctcggggcgaacccattcccgactcggaccgatg

SEQ ID NO: 9063 - DNA, 203 bp, Artificial sequence
  synthetic
ggcgcgccagtcctaccttggagacctgctgcggatatgggtacggcccggcgcgagatttacaccctctcccccggattttcaagggccagcgagagctcaccggacgccgccggaaccgcgacgctttccaaggcacgggcccctctctcggggcgaacccattccagggcgccctgcccttcacacgactcggaccgatg

SEQ ID NO: 9064 - DNA, 203 bp, Artificial sequence
  synthetic
ggcgcgccagtcctggcccggcgcgagatttacaccctctcccccggattttcaagggccagcgagagctcaccggacgccgccggaaccgcgacgctttccaaggcacgggcccctctctcggggcgaacccattccagggcgccctgcccttcacaaagaaaagagaactctccccggggctcccgcgactcggaccgatg

SEQ ID NO: 9065 - DNA, 203 bp, Artificial sequence
  synthetic
ggcgcgccagtcctgagatttacaccctctcccccggattttcaagggccagcgagagctcaccggacgccgccggaaccgcgacgctttccaaggcacgggcccctctctcggggcgaacccattccagggcgccctgcccttcacaaagaaaagagaactctccccggggctcccgccggcttctccgactcggaccgatg

SEQ ID NO: 9066 - DNA, 203 bp, Artificial sequence
  synthetic
ggcgcgccagtcctccctctcccccggattttcaagggccagcgagagctcaccggacgccgccggaaccgcgacgctttccaaggcacgggcccctctctcggggcgaacccattccagggcgccctgcccttcacaaagaaaagagaactctccccggggctcccgccggcttctccgggatcggtcgactcggaccgatg

SEQ ID NO: 9067 - DNA, 203 bp, Artificial sequence
  synthetic
ggcgcgccagtcctagggccagcgagagctcaccggacgccgccggaaccgcgacgctttccaaggcacgggcccctctctcggggcgaacccattccagggcgccctgcccttcacaaagaaaagagaactctccccggggctcccgccggcttctccgggatcggtcgcgttaccgcactggacgccgactcggaccgatg

SEQ ID NO: 9068 - DNA, 203 bp, Artificial sequence
  synthetic
ggcgcgccagtcctggacgccgccggaaccgcgacgctttccaaggcacgggcccctctctcggggcgaacccattccagggcgccctgcccttcacaaagaaaagagaactctccccggggctcccgccggcttctccgggatcggtcgcgttaccgcactggacgcctcgcggcgcccatctccgccgactcggaccgatg

SEQ ID NO: 9069 - DNA, 203 bp, Artificial sequence
  synthetic
ggcgcgccagtcctggaaccgcgacgctttccaaggcacgggcccctctctcggggcgaacccattccagggcgccctgcccttcacaaagaaaagagaactctccccggggctcccgccggcttctccgggatcggtcgcgttaccgcactggacgcctcgcggcgcccatctccgccactccggatcgactcggaccgatg

SEQ ID NO: 9070 - DNA, 203 bp, Artificial sequence
  synthetic
ggcgcgccagtcctcctctctcggggcgaacccattccagggcgccctgcccttcacaaagaaaagagaactctccccggggctcccgccggcttctccgggatcggtcgcgttaccgcactggacgcctcgcggcgcccatctccgccactccggattcggggatctgaacccgactccctttcgatcgactcggaccgatg

SEQ ID NO: 9071 - DNA, 203 bp, Artificial sequence
  synthetic
ggcgcgccagtcctccctgcccttcacaaagaaaagagaactctccccggggctcccgccggcttctccgggatcggtcgcgttaccgcactggacgcctcgcggcgcccatctccgccactccggattcggggatctgaacccgactccctttcgatcggccgagggcaacggaggccatcgcccgtcgactcggaccgatg

SEQ ID NO: 9072 - DNA, 203 bp, Artificial sequence
  synthetic
ggcgcgccagtcctccccggggctcccgccggcttctccgggatcggtcgcgttaccgcactggacgcctcgcggcgcccatctccgccactccggattcggggatctgaacccgactccctttcgatcggccgagggcaacggaggccatcgcccgtcccttcggaacggcgctcgcccatctctcacgactcggaccgatg

SEQ ID NO: 9073 - DNA, 203 bp, Artificial sequence
  synthetic
ggcgcgccagtcctcccgccggcttctccgggatcggtcgcgttaccgcactggacgcctcgcggcgcccatctccgccactccggattcggggatctgaacccgactccctttcgatcggccgagggcaacggaggccatcgcccgtcccttcggaacggcgctcgcccatctctcaggaccgactgcgactcggaccgatg

SEQ ID NO: 9074 - DNA, 203 bp, Artificial sequence
  synthetic
ggcgcgccagtccttctccgggatcggtcgcgttaccgcactggacgcctcgcggcgcccatctccgccactccggattcggggatctgaacccgactccctttcgatcggccgagggcaacggaggccatcgcccgtcccttcggaacggcgctcgcccatctctcaggaccgactgacccatgttccgactcggaccgatg

SEQ ID NO: 9075 - DNA, 203 bp, Artificial sequence
  synthetic
ggcgcgccagtcctcggtcgcgttaccgcactggacgcctcgcggcgcccatctccgccactccggattcggggatctgaacccgactccctttcgatcggccgagggcaacggaggccatcgcccgtcccttcggaacggcgctcgcccatctctcaggaccgactgacccatgttcaactgctgttcgactcggaccgatg

SEQ ID NO: 9076 - DNA, 203 bp, Artificial sequence
  synthetic
ggcgcgccagtcctcgatcggccgagggcaacggaggccatcgcccgtcccttcggaacggcgctcgcccatctctcaggaccgactgacccatgttcaactgctgttcacatggaacccttctccacttcggccttcaaagttctcgtttgaatatttgctactaccaccaagatctgcacctgcggcgactcggaccgatg

SEQ ID NO: 9077 - DNA, 203 bp, Artificial sequence
  synthetic
ggcgcgccagtcctagggcaacggaggccatcgcccgtcccttcggaacggcgctcgcccatctctcaggaccgactgacccatgttcaactgctgttcacatggaacccttctccacttcggccttcaaagttctcgtttgaatatttgctactaccaccaagatctgcacctgcggcggctccacccgactcggaccgatg

SEQ ID NO: 9078 - DNA, 203 bp, Artificial sequence
  synthetic
ggcgcgccagtcctccgtcccttcggaacggcgctcgcccatctctcaggaccgactgacccatgttcaactgctgttcacatggaacccttctccacttcggccttcaaagttctcgtttgaatatttgctactaccaccaagatctgcacctgcggcggctccacccgggcccgcgccctaggcttcgactcggaccgatg

SEQ ID NO: 9079 - DNA, 203 bp, Artificial sequence
  synthetic
ggcgcgccagtcctggaacggcgctcgcccatctctcaggaccgactgacccatgttcaactgctgttcacatggaacccttctccacttcggccttcaaagttctcgtttgaatatttgctactaccaccaagatctgcacctgcggcggctccacccgggcccgcgccctaggcttcaaggctcaccgactcggaccgatg

SEQ ID NO: 9080 - DNA, 203 bp, Artificial sequence
  synthetic
ggcgcgccagtcctactgacccatgttcaactgctgttcacatggaacccttctccacttcggccttcaaagttctcgtttgaatatttgctactaccaccaagatctgcacctgcggcggctccacccgggcccgcgccctaggcttcaaggctcaccgcagcggccctcctactcgtcgcggcgtacgactcggaccgatg

SEQ ID NO: 9081 - DNA, 203 bp, Artificial sequence
  synthetic
ggcgcgccagtcctccacttcggccttcaaagttctcgtttgaatatttgctactaccaccaagatctgcacctgcggcggctccacccgggcccgcgccctaggcttcaaggctcaccgcagcggccctcctactcgtcgcggcgtagcgtccgcggggctccgggggcggggagcggggcgtgggccgactcggaccgatg

SEQ ID NO: 9082 - DNA, 203 bp, Artificial sequence
  synthetic
ggcgcgccagtcctctcgtttgaatatttgctactaccaccaagatctgcacctgcggcggctccacccgggcccgcgccctaggcttcaaggctcaccgcagcggccctcctactcgtcgcggcgtagcgtccgcggggctccgggggcggggagcggggcgtgggcgggaggaggggaggaggcgtcgactcggaccgatg

SEQ ID NO: 9083 - DNA, 203 bp, Artificial sequence
  synthetic
ggcgcgccagtcctcacccgggcccgcgccctaggcttcaaggctcaccgcagcggccctcctactcgtcgcggcgtagcgtccgcggggctccgggggcggggagcggggcgtgggcgggaggaggggaggaggcgtgggggggggggcgggggaaggaccccacacccccgccgccgccgccgccgcgactcggaccgatg

SEQ ID NO: 9084 - DNA, 203 bp, Artificial sequence
  synthetic
ggcgcgccagtccttccgacgcacaccacacgcgcgcgcgcgcgcgccgcccccgccgctcccgtccactctcgactgccggcgacggccgggtatgggcccgacgctccagcgccatccattttcagggctagttgattcggcaggtgagttgttacacactccttagcggattccgacttccatggcgactcggaccgatg

SEQ ID NO: 9085 - DNA, 203 bp, Artificial sequence
  synthetic
ggcgcgccagtcctcgccgcccccgccgctcccgtccactctcgactgccggcgacggccgggtatgggcccgacgctccagcgccatccattttcagggctagttgattcggcaggtgagttgttacacactccttagcggattccgacttccatggccaccgtcctgctgtctatatcaaccaacacgactcggaccgatg

SEQ ID NO: 9086 - DNA, 203 bp, Artificial sequence
  synthetic
ggcgcgccagtccttccactctcgactgccggcgacggccgggtatgggcccgacgctccagcgccatccattttcagggctagttgattcggcaggtgagttgttacacactccttagcggattccgacttccatggccaccgtcctgctgtctatatcaaccaacaccttttctggggtctgatgacgactcggaccgatg

SEQ ID NO: 9087 - DNA, 203 bp, Artificial sequence
  synthetic
ggcgcgccagtcctactgccggcgacggccgggtatgggcccgacgctccagcgccatccattttcagggctagttgattcggcaggtgagttgttacacactccttagcggattccgacttccatggccaccgtcctgctgtctatatcaaccaacaccttttctggggtctgatgagcgtcggcatcgactcggaccgatg

SEQ ID NO: 9088 - DNA, 203 bp, Artificial sequence
  synthetic
ggcgcgccagtcctacggccgggtatgggcccgacgctccagcgccatccattttcagggctagttgattcggcaggtgagttgttacacactccttagcggattccgacttccatggccaccgtcctgctgtctatatcaaccaacaccttttctggggtctgatgagcgtcggcatcgggcgccttcgactcggaccgatg

SEQ ID NO: 9089 - DNA, 203 bp, Artificial sequence
  synthetic
ggcgcgccagtcctccatccattttcagggctagttgattcggcaggtgagttgttacacactccttagcggattccgacttccatggccaccgtcctgctgtctatatcaaccaacaccttttctggggtctgatgagcgtcggcatcgggcgccttaacccggcgttcggttcatcccgcagcgcccgactcggaccgatg

SEQ ID NO: 9090 - DNA, 203 bp, Artificial sequence
  synthetic
ggcgcgccagtccttcagggctagttgattcggcaggtgagttgttacacactccttagcggattccgacttccatggccaccgtcctgctgtctatatcaaccaacaccttttctggggtctgatgagcgtcggcatcgggcgccttaacccggcgttcggttcatcccgcagcgccagttctgcttcgactcggaccgatg

SEQ ID NO: 9091 - DNA, 203 bp, Artificial sequence
  synthetic
ggcgcgccagtcctaggtgagttgttacacactccttagcggattccgacttccatggccaccgtcctgctgtctatatcaaccaacaccttttctggggtctgatgagcgtcggcatcgggcgccttaacccggcgttcggttcatcccgcagcgccagttctgcttaccaaaagtggcccactaggcgactcggaccgatg

SEQ ID NO: 9092 - DNA, 203 bp, Artificial sequence
  synthetic
ggcgcgccagtccttccgacttccatggccaccgtcctgctgtctatatcaaccaacaccttttctggggtctgatgagcgtcggcatcgggcgccttaacccggcgttcggttcatcccgcagcgccagttctgcttaccaaaagtggcccactaggcactcgcattccacgcccggctccacgccacgactcggaccgatg

SEQ ID NO: 9093 - DNA, 203 bp, Artificial sequence
  synthetic
ggcgcgccagtcctaacaccttttctggggtctgatgagcgtcggcatcgggcgccttaacccggcgttcggttcatcccgcagcgccagttctgcttaccaaaagtggcccactaggcactcgcattccacgcccggctccacgccagcgagccgggcttcttacccatttaaagtttgagaataggcgactcggaccgatg

SEQ ID NO: 9094 - DNA, 203 bp, Artificial sequence
  synthetic
ggcgcgccagtcctctggggtctgatgagcgtcggcatcgggcgccttaacccggcgttcggttcatcccgcagcgccagttctgcttaccaaaagtggcccactaggcactcgcattccacgcccggctccacgccagcgagccgggcttcttacccatttaaagtttgagaataggttgagatcgtcgactcggaccgatg

SEQ ID NO: 9095 - DNA, 203 bp, Artificial sequence
  synthetic
ggcgcgccagtcctatgagcgtcggcatcgggcgccttaacccggcgttcggttcatcccgcagcgccagttctgcttaccaaaagtggcccactaggcactcgcattccacgcccggctccacgccagcgagccgggcttcttacccatttaaagtttgagaataggttgagatcgtttcggccccacgactcggaccgatg

SEQ ID NO: 9096 - DNA, 203 bp, Artificial sequence
  synthetic
ggcgcgccagtcctccttaacccggcgttcggttcatcccgcagcgccagttctgcttaccaaaagtggcccactaggcactcgcattccacgcccggctccacgccagcgagccgggcttcttacccatttaaagtttgagaataggttgagatcgtttcggccccaagacctctaatcattcgcttcgactcggaccgatg

SEQ ID NO: 9097 - DNA, 203 bp, Artificial sequence
  synthetic
ggcgcgccagtcctcatcccgcagcgccagttctgcttaccaaaagtggcccactaggcactcgcattccacgcccggctccacgccagcgagccgggcttcttacccatttaaagtttgagaataggttgagatcgtttcggccccaagacctctaatcattcgctttaccggataaaactgcgtggcgactcggaccgatg

SEQ ID NO: 9098 - DNA, 203 bp, Artificial sequence
  synthetic
ggcgcgccagtcctcattccacgcccggctccacgccagcgagccgggcttcttacccatttaaagtttgagaataggttgagatcgtttcggccccaagacctctaatcattcgctttaccggataaaactgcgtggcgggggtgcgtcgggtctgcgagagcgccagctatcctgagggaaacttccgactcggaccgatg

SEQ ID NO: 9099 - DNA, 203 bp, Artificial sequence
  synthetic
ggcgcgccagtcctgccagcgagccgggcttcttacccatttaaagtttgagaataggttgagatcgtttcggccccaagacctctaatcattcgctttaccggataaaactgcgtggcgggggtgcgtcgggtctgcgagagcgccagctatcctgagggaaacttcggagggaaccagctactagacgactcggaccgatg

SEQ ID NO: 9100 - DNA, 203 bp, Artificial sequence
  synthetic
ggcgcgccagtcctcgggcttcttacccatttaaagtttgagaataggttgagatcgtttcggccccaagacctctaatcattcgctttaccggataaaactgcgtggcgggggtgcgtcgggtctgcgagagcgccagctatcctgagggaaacttcggagggaaccagctactagatggttcgattcgactcggaccgatg

SEQ ID NO: 9101 - DNA, 203 bp, Artificial sequence
  synthetic
ggcgcgccagtcctacccatttaaagtttgagaataggttgagatcgtttcggccccaagacctctaatcattcgctttaccggataaaactgcgtggcgggggtgcgtcgggtctgcgagagcgccagctatcctgagggaaacttcggagggaaccagctactagatggttcgattagtctttcgccgactcggaccgatg

SEQ ID NO: 9102 - DNA, 203 bp, Artificial sequence
  synthetic
ggcgcgccagtcctagtttgagaataggttgagatcgtttcggccccaagacctctaatcattcgctttaccggataaaactgcgtggcgggggtgcgtcgggtctgcgagagcgccagctatcctgagggaaacttcggagggaaccagctactagatggttcgattagtctttcgcccctataccccgactcggaccgatg

SEQ ID NO: 9103 - DNA, 203 bp, Artificial sequence
  synthetic
ggcgcgccagtccttaggttgagatcgtttcggccccaagacctctaatcattcgctttaccggataaaactgcgtggcgggggtgcgtcgggtctgcgagagcgccagctatcctgagggaaacttcggagggaaccagctactagatggttcgattagtctttcgcccctatacccaggtcggacgcgactcggaccgatg

SEQ ID NO: 9104 - DNA, 203 bp, Artificial sequence
  synthetic
ggcgcgccagtccttcgtttcggccccaagacctctaatcattcgctttaccggataaaactgcgtggcgggggtgcgtcgggtctgcgagagcgccagctatcctgagggaaacttcggagggaaccagctactagatggttcgattagtctttcgcccctatacccaggtcggacgaccgatttgccgactcggaccgatg

SEQ ID NO: 9105 - DNA, 203 bp, Artificial sequence
  synthetic
ggcgcgccagtcctctaatcattcgctttaccggataaaactgcgtggcgggggtgcgtcgggtctgcgagagcgccagctatcctgagggaaacttcggagggaaccagctactagatggttcgattagtctttcgcccctatacccaggtcggacgaccgatttgcacgtcaggaccgctagggaccgactcggaccgatg

SEQ ID NO: 9106 - DNA, 203 bp, Artificial sequence
  synthetic
ggcgcgccagtcctgctttaccggataaaactgcgtggcgggggtgcgtcgggtctgcgagagcgccagctatcctgagggaaacttcggagggaaccagctactagatggttcgattagtctttcgcccctatacccaggtcggacgaccgatttgcacgtcaggaccgctacggacctccaccagacgactcggaccgatg

SEQ ID NO: 9107 - DNA, 203 bp, Artificial sequence
  synthetic
ggcgcgccagtcctataaaactgcgtggcgggggtgcgtcgggtctgcgagagcgccagctatcctgagggaaacttcggagggaaccagctactagatggttcgattagtctttcgcccctatacccaggtcggacgaccgatttgcacgtcaggaccgctacggacctccaccagagtttcctctgcgactcggaccgatg

SEQ ID NO: 9108 - DNA, 203 bp, Artificial sequence
  synthetic
ggcgcgccagtcctgtggcgggggtgcgtcgggtctgcgagagcgccagctatcctgagggaaacttcggagggaaccagctactagatggttcgattagtctttcgcccctatacccaggtcggacgaccgatttgcacgtcaggaccgctacggacctccaccagagtttcctctggcttcgccctcgactcggaccgatg

SEQ ID NO: 9109 - DNA, 203 bp, Artificial sequence
  synthetic
ggcgcgccagtcctcttcggagggaaccagctactagatggttcgattagtctttcgcccctatacccaggtcggacgaccgatttgcacgtcaggaccgctacggacctccaccagagtttcctctggcttcgccctgcccaggcatagttcaccatctttcgggtcctaacacgtgcgctcgtgctcgactcggaccgatg

SEQ ID NO: 9110 - DNA, 203 bp, Artificial sequence
  synthetic
ggcgcgccagtccttagatggttcgattagtctttcgcccctatacccaggtcggacgaccgatttgcacgtcaggaccgctacggacctccaccagagtttcctctggcttcgccctgcccaggcatagttcaccatctttcgggtcctaacacgtgcgctcgtgctccacctccccggcgcggcggcgactcggaccgatg

SEQ ID NO: 9111 - DNA, 203 bp, Artificial sequence
  synthetic
ggcgcgccagtccttcgcccctatacccaggtcggacgaccgatttgcacgtcaggaccgctacggacctccaccagagtttcctctggcttcgccctgcccaggcatagttcaccatctttcgggtcctaacacgtgcgctcgtgctccacctccccggcgcggcgggcgagacgggccggtggtgccgactcggaccgatg

SEQ ID NO: 9112 - DNA, 203 bp, Artificial sequence
  synthetic
ggcgcgccagtcctgacgaccgatttgcacgtcaggaccgctacggacctccaccagagtttcctctggcttcgccctgcccaggcatagttcaccatctttcgggtcctaacacgtgcgctcgtgctccacctccccggcgcggcgggcgagacgggccggtggtgcgccctcggcggactggagagcgactcggaccgatg

SEQ ID NO: 9113 - DNA, 203 bp, Artificial sequence
  synthetic
ggcgcgccagtcctttgcacgtcaggaccgctacggacctccaccagagtttcctctggcttcgccctgcccaggcatagttcaccatctttcgggtcctaacacgtgcgctcgtgctccacctccccggcgcggcgggcgagacgggccggtggtgcgccctcggcggactggagaggcctcgggatcgactcggaccgatg

SEQ ID NO: 9114 - DNA, 203 bp, Artificial sequence
  synthetic
ggcgcgccagtcctgcatagttcaccatctttcgggtcctaacacgtgcgctcgtgctccacctccccggcgcggcgggcgagacgggccggtggtgcgccctcggcggactggagaggcctcgggatcccacctcggccggcgagcgcgccggccttcaccttcattgcgccacggcggctttcgtgcgactcggaccgatg

SEQ ID NO: 9115 - DNA, 203 bp, Artificial sequence
  synthetic
ggcgcgccagtcctgtgcgccctcggcggactggagaggcctcgggatcccacctcggccggcgagcgcgccggccttcaccttcattgcgccacggcggctttcgtgcgagcccccgactcgcgcacgtgttagactccttggtccgtgtttcaagacgggtcgggtgggtagccgacgtcgccgcccgactcggaccgatg

SEQ ID NO: 9116 - DNA, 203 bp, Artificial sequence
  synthetic
ggcgcgccagtcctagaggcctcgggatcccacctcggccggcgagcgcgccggccttcaccttcattgcgccacggcggctttcgtgcgagcccccgactcgcgcacgtgttagactccttggtccgtgtttcaagacgggtcgggtgggtagccgacgtcgccgccgaccccgtgcgctcgctccgcgactcggaccgatg

SEQ ID NO: 9117 - DNA, 203 bp, Artificial sequence
  synthetic
ggcgcgccagtccttcggccggcgagcgcgccggccttcaccttcattgcgccacggcggctttcgtgcgagcccccgactcgcgcacgtgttagactccttggtccgtgtttcaagacgggtcgggtgggtagccgacgtcgccgccgaccccgtgcgctcgctccgccgtccccctcttcgggggacgactcggaccgatg

SEQ ID NO: 9118 - DNA, 203 bp, Artificial sequence
  synthetic
ggcgcgccagtcctcattgcgccacggcggctttcgtgcgagcccccgactcgcgcacgtgttagactccttggtccgtgtttcaagacgggtcgggtgggtagccgacgtcgccgccgaccccgtgcgctcgctccgccgtccccctcttcgggggacgcgcgcgtggccccgagagaacctccccccgactcggaccgatg

SEQ ID NO: 9119 - DNA, 203 bp, Artificial sequence
  synthetic
ggcgcgccagtcctgcggggaggaggggtgggagagcggtcgcgccgtgggaggggtggcccggcccccccacgaggagacgcccgcgcgcccccgcgggggagacccccctcgcgggggattccccgcgggggtgggcgccgggaggggggagagcgcggcgacgggtctcgctccctcggccccggcgactcggaccgatg

SEQ ID NO: 9120 - DNA, 203 bp, Artificial sequence
  synthetic
ggcgcgccagtcctcgcgggggagacccccctcgcgggggattccccgcgggggtgggcgccgggaggggggagagcgcggcgacgggtctcgctccctcggccccgggattcggcgagtgctgctgccgggggggctgtaacactcggggggggtttcggtcccgccgccgccgccgccgccgccaccgactcggaccgatg

SEQ ID NO: 9121 - DNA, 203 bp, Artificial sequence
  synthetic
ggcgcgccagtcctagcgcggcgacgggtctcgctccctcggccccgggattcggcgagtgctgctgccgggggggctgtaacactcggggggggtttcggtcccgccgccgccgccgccgccgccaccgccgccgccgccgccgccccgacccgcgcgccctcccgagggaggacgcggggccggggcgactcggaccgatg

SEQ ID NO: 9122 - DNA, 203 bp, Artificial sequence
  synthetic
ggcgcgccagtcctcgccgccgccgccccgacccgcgcgccctcccgagggaggacgcggggccggggggcggagacgggggaggaggaggacggacggacggacggacggggccccccgagccaccttccccgccgggccttcccagccgtcccggagccggtcgcggcgcaccgccgcggtggaaacgactcggaccgatg

SEQ ID NO: 9123 - DNA, 203 bp, Artificial sequence
  synthetic
ggcgcgccagtcctggggaagggagggcgggtggaggggtcgggaggaacggggggcgggaaagatccgccgggccgccgacacggccggacccgccgccgggttgaatcctccgggcggactgcgcggaccccacccgtttacctcttaacggtttcacgccctcttgaactctctcttcaaagttccgactcggaccgatg

SEQ ID NO: 9124 - DNA, 203 bp, Artificial sequence
  synthetic
ggcgcgccagtcctggcgggaaagatccgccgggccgccgacacggccggacccgccgccgggttgaatcctccgggcggactgcgcggaccccacccgtttacctcttaacggtttcacgccctcttgaactctctcttcaaagttcttttcaactttcccttacggtacttgttgactatcggtctcgactcggaccgatg

SEQ ID NO: 9125 - DNA, 203 bp, Artificial sequence
  synthetic
ggcgcgccagtcctgccgccgggttgaatcctccgggcggactgcgcggaccccacccgtttacctcttaacggtttcacgccctcttgaactctctcttcaaagttcttttcaactttcccttacggtacttgttgactatcggtctcgtgccggtatttagccttagatggagtttaccacccgctcgactcggaccgatg

SEQ ID NO: 9126 - DNA, 203 bp, Artificial sequence
  synthetic
ggcgcgccagtccttgaatcctccgggcggactgcgcggaccccacccgtttacctcttaacggtttcacgccctcttgaactctctcttcaaagttcttttcaactttcccttacggtacttgttgactatcggtctcgtgccggtatttagccttagatggagtttaccacccgctttgggctgcacgactcggaccgatg

SEQ ID NO: 9127 - DNA, 203 bp, Artificial sequence
  synthetic
ggcgcgccagtcctcgcggaccccacccgtttacctcttaacggtttcacgccctcttgaactctctcttcaaagttcttttcaactttcccttacggtacttgttgactatcggtctcgtgccggtatttagccttagatggagtttaccacccgctttgggctgcattcccaagcaacccgactcccgactcggaccgatg

SEQ ID NO: 9128 - DNA, 203 bp, Artificial sequence
  synthetic
ggcgcgccagtcctctcttaacggtttcacgccctcttgaactctctcttcaaagttcttttcaactttcccttacggtacttgttgactatcggtctcgtgccggtatttagccttagatggagtttaccacccgctttgggctgcattcccaagcaacccgactccgggaagacccgggcccggcgcgactcggaccgatg

SEQ ID NO: 9129 - DNA, 203 bp, Artificial sequence
  synthetic
ggcgcgccagtccttttcacgccctcttgaactctctcttcaaagttcttttcaactttcccttacggtacttgttgactatcggtctcgtgccggtatttagccttagatggagtttaccacccgctttgggctgcattcccaagcaacccgactccgggaagacccgggccccgcgcgccgggggccgactcggaccgatg

SEQ ID NO: 9130 - DNA, 203 bp, Artificial sequence
  synthetic
ggcgcgccagtccttcttgaactctctcttcaaagttcttttcaactttcccttacggtacttgttgactatcggtctcgtgccggtatttagccttagatggagtttaccacccgctttgggctgcattcccaagcaacccgactccgggaagacccgggccccgcgcgccgggggccgctaccggccgactcggaccgatg

SEQ ID NO: 9131 - DNA, 203 bp, Artificial sequence
  synthetic
ggcgcgccagtcctttgactatcggtctcgtgccggtatttagccttagatggagtttaccacccgctttgggctgcattcccaagcaacccgactccgggaagacccgggccccgcgcgccgggggccgctaccggcctcacaccgtccacgggctgggcctcgatcagaaggacttgggccccccacgactcggaccgatg

SEQ ID NO: 9132 - DNA, 203 bp, Artificial sequence
  synthetic
ggcgcgccagtcctgtctcgtgccggtatttagccttagatggagtttaccacccgctttgggctgcattcccaagcaacccgactccgggaagacccgggccccgcgcgccgggggccgctaccggcctcacaccgtccacgggctgggcctcgatcagaaggacttgggccccccacgagcggcgccgactcggaccgatg

SEQ ID NO: 9133 - DNA, 203 bp, Artificial sequence
  synthetic
ggcgcgccagtcctcgctttgggctgcattcccaagcaacccgactccgggaagacccgggccccgcgcgccgggggccgctaccggcctcacaccgtccacgggctgggcctcgatcagaaggacttgggccccccacgagcggcgccggggagcgggtcttccgtacgccacatgtcccgcgcccccgactcggaccgatg

SEQ ID NO: 9134 - DNA, 203 bp, Artificial sequence
  synthetic
ggcgcgccagtccttgcattcccaagcaacccgactccgggaagacccgggccccgcgcgccgggggccgctaccggcctcacaccgtccacgggctgggcctcgatcagaaggacttgggccccccacgagcggcgccggggagcgggtcttccgtacgccacatgtcccgcgccccgccgcggggccgactcggaccgatg

SEQ ID NO: 9135 - DNA, 203 bp, Artificial sequence
  synthetic
ggcgcgccagtcctgggccgctaccggcctcacaccgtccacgggctgggcctcgatcagaaggacttgggccccccacgagcggcgccggggagcgggtcttccgtacgccacatgtcccgcgccccgccgcggggcggggattcggcgctgggctcttccctgttcactcgccgttactgagggaacgactcggaccgatg

SEQ ID NO: 9136 - DNA, 203 bp, Artificial sequence
  synthetic
ggcgcgccagtcctccgtccacgggctgggcctcgatcagaaggacttgggccccccacgagcggcgccggggagcgggtcttccgtacgccacatgtcccgcgccccgccgcggggcggggattcggcgctgggctcttccctgttcactcgccgttactgagggaatcctggttagtttcttctcccgactcggaccgatg

SEQ ID NO: 9137 - DNA, 203 bp, Artificial sequence
  synthetic
ggcgcgccagtcctacttgggccccccacgagcggcgccggggagcgggtcttccgtacgccacatgtcccgcgccccgccgcggggcggggattcggcgctgggctcttccctgttcactcgccgttactgagggaatcctggttagtttcttctcctccgctgactaatatgcttaaattcagcggcgactcggaccgatg

SEQ ID NO: 9138 - DNA, 203 bp, Artificial sequence
  synthetic
ggcgcgccagtcctcccacgagcggcgccggggagcgggtcttccgtacgccacatgtcccgcgccccgccgcggggcggggattcggcgctgggctcttccctgttcactcgccgttactgagggaatcctggttagtttcttctcctccgctgactaatatgcttaaattcagcgggtcgccacgtcgactcggaccgatg

SEQ ID NO: 9139 - DNA, 203 bp, Artificial sequence
  synthetic
ggcgcgccagtcctgcttccgtagaggccagctggttgctacgcagcaacaggaaacattccgcgctaccgagtactttctactcccgaccaggcattgctctctctggagaccctcggcggtggttgctgtattttgacttggagtaaggatgacttttcgggccacagatagtgaatttgacctgacgactcggaccgatg

SEQ ID NO: 9140 - DNA, 203 bp, Artificial sequence
  synthetic
ggcgcgccagtcctgattacagtgccaaccttactcccaaagtttgccacgaaatatctcgcttctgttattttcgcatggttctggtatattgacttttgaaacaaaagacatcattctgtttatagcattctgtttttagtagtgggatttccatctacaaaatatagtaattctcgatcgctgaacgactcggaccgatg

SEQ ID NO: 9141 - DNA, 203 bp, Artificial sequence
  synthetic
ggcgcgccagtcctatgtcctacaactgctgctgtggaaacttctcctcccattcctgtgagggctacctgtgctactcaggctactcccgtggtggctcctcgtaccccagcaacctggtctacagcactgaacctttgatctcccagcacctgccagctgggttcctctctctgcaagggctttcacgactcggaccgatg

SEQ ID NO: 9142 - DNA, 203 bp, Artificial sequence
  synthetic
ggcgcgccagtcctagcgtgccccgggcccggcggaggaggcggctgcagttggagtggagtcttgggagcgctgctggcagcgacttctcagcgaagcaagtgtctgagactgagagtccctaacagcggcagcggcggccacggcggcggctggggccgaggtgtgttctactccctcttctgggacgactcggaccgatg

SEQ ID NO: 9143 - DNA, 203 bp, Artificial sequence
  synthetic
ggcgcgccagtcctgcccccgccccctactcccttccctcaggccccaggaagttgcaagagtaccatttgtcgcacactcggggaccgcgggtggccggaggagatgaaaccgtcttggctgcagtgtcgtaaagtcaccagcgccggggggctcggagggcccttgcctgggtcctctccggcccgcgactcggaccgatg

SEQ ID NO: 9144 - DNA, 203 bp, Artificial sequence
  synthetic
ggcgcgccagtcctggaatacctaggcctccagactactccccctaactcatatttagattcctgaagcttctgcacatgtagttcctagagctgctgcttattaaaatgtcaacatcttcatcttctagctgggacaacctcttagagtctctctctctcagcacagtatggaattggatacaagcacgactcggaccgatg

SEQ ID NO: 9145 - DNA, 203 bp, Artificial sequence
  synthetic
ggcgcgccagtcctgcgggattccaaggcctcatcgagtgcgggtatctggctgtggattcgccgccgtcctgctggacgcctggaggctcgaaccccgccgcccccctaccccaggctttactcccaccccggcttccgcccactgtgctgcccttcctcggacctgggctgtcgggagagctggagcgactcggaccgatg

SEQ ID NO: 9146 - DNA, 203 bp, Artificial sequence
  synthetic
ggcgcgccagtcctggctaccatggtaacaggttccagggtaacagaggagggagctgggtcctgtttactcccagtcctgccgatgaggattctgaccgtagacactgaattgtcccgtacctatccgtgctctttctgtgttctcaccagggctgagctcgaactgccacctctgccagcaggacccgactcggaccgatg

SEQ ID NO: 9147 - DNA, 203 bp, Artificial sequence
  synthetic
ggcgcgccagtcctacgtgtgtatgtgtgtgtgtgtgtattgggtttctctctcccttgtaagaacacagccagcccgccctctcctgctgttgctgcagctctgacttgctttttcctgcctccttcctctcctctctcttcttgcttagcttcttgccttctgatactactcccaagatggaggctcgactcggaccgatg

SEQ ID NO: 9148 - DNA, 203 bp, Artificial sequence
  synthetic
ggcgcgccagtcctagatgtccccggccggcgagagcgggcgccggggttcgctctgagtcgcgtggcaggccgcgctgcgtccaccgctgccgagttcagagccgcgcaccgcccgccgccgcaggtcgggttcccagcgctactcccaagacaccgctcagccatgaagatgcatttctgtatccccgactcggaccgatg

SEQ ID NO: 9149 - DNA, 203 bp, Artificial sequence
  synthetic
ggcgcgccagtcctcgaggctgcaccagcgcctggcaccatgaggacgcctgggcctctgcccgtgctgctgctgctcctggcgggagcccccgccgcgcggcccactcccccgacctgctactcccgcatgcgggccctgagccaggagatcacccgcgacttcaacctcctgcaggtctcggagcccgactcggaccgatg

SEQ ID NO: 9150 - DNA, 203 bp, Artificial sequence
  synthetic
ggcgcgccagtcctcctctcttccagggctgccgtccacactctcccggtcagagtcctgggaccacatggggacgctgccatggcttcttgccttcttcattctgggtctccaggcttgggatactcccaccatcgtctcccgcaaggagtggggggcaagaccgctcgcctgcagggccctgctgacgactcggaccgatg

SEQ ID NO: 9151 - DNA, 203 bp, Artificial sequence
  synthetic
ggcgcgccagtccttaattttgccctaggtctggccaggaggcctcacatccagagacctgcccccgctcttgcagtgccagggccatggggctccggagccaccacctcagcctgggccttctgcttctgtttctactccctgcagagtgcctgggagctgagggccggctggctctcaagctgttccgactcggaccgatg

SEQ ID NO: 9152 - DNA, 203 bp, Artificial sequence
  synthetic
ggcgcgccagtcctcccgctgcctgcaagtcagcctggctccgagtcacgtgtcagtgcctgaggcagagactgcgagaaaaaaacgcgcttcattccttcttccaccgccatactgtattttatactaaatctcatttttattccaacattttactcccgctcggattaaagcaaggagagccaatccgactcggaccgatg

SEQ ID NO: 9153 - DNA, 203 bp, Artificial sequence
  synthetic
ggcgcgccagtccttcttttggtgcagaaggtgacgggaaacaggccgcagacctgaacttccaaccgtatgtaggcgagaagccggtgccgatactcccactatcccacaatgtcccactgggccccagagtggaagagggcggaggctaatccaagagaccttggggccagctgggatgtcaggggcgactcggaccgatg

SEQ ID NO: 9154 - DNA, 203 bp, Artificial sequence
  synthetic
ggcgcgccagtcctgaaacagattcggaatatgtgaagctcgcgaaacaaggtggcaggcccgatttgttgaagcactttgcccctggaaccaggaaaggctctccagtggcctactccctgccagactggtatatccaccacagcaagccaccgacagccagccagcaagaagtgcgggctgtctcccgactcggaccgatg

SEQ ID NO: 9155 - DNA, 203 bp, Artificial sequence
  synthetic
ggcgcgccagtcctagtaggagtggagagcgtgcgtgagtgagtgtgtgtgtgtgtgtgtgtgtgtgtgcatgcgtgtgtgaagaatgcacactatctcctgttggtaagtgtgtgcttactccctgaccagatgctgcggtgcacggggcagccaccatctctgcatgcatgtctgtgatgtcttcccgactcggaccgatg

SEQ ID NO: 9156 - DNA, 203 bp, Artificial sequence
  synthetic
ggcgcgccagtcctgctaatgctgctgctgaagagatccgttatacccacattctcaatcgggtactccctccagacatccgtatattggcctgggcccctgtagaaccaagcttcagtgctaggttcagctgccttgagcggacttaccgctattttttccctcgtgctgatttagatattgtaacccgactcggaccgatg

SEQ ID NO: 9157 - DNA, 203 bp, Artificial sequence
  synthetic
ggcgcgccagtcctgtgcaaataaggtttctgtggtgagacaccagataaactcaacttcctctttcaacaacaaatgtgtcagttatcagcaggatccatgccgccagagtaaagctttctaccctttactccctgcaaagaaacaagagtgcttatcccagctaagctccagggaaccataaatcccgactcggaccgatg

SEQ ID NO: 9158 - DNA, 203 bp, Artificial sequence
  synthetic
ggcgcgccagtcctagtttgcttggagctcctggggcctaacaaaaagaaacctgccatgctgctcttcctcctctctgcactggtcctgctcacacagcccctgggctacctggaagcagaaatgaagacctactcccacagaacaatgcccagtgcttgcaccctggtcatgtgtagctcagtggacgactcggaccgatg

SEQ ID NO: 9159 - DNA, 203 bp, Artificial sequence
  synthetic
ggcgcgccagtcctgcccatggctgagacctctctcccagagctggggggagaggacaaagccacgccttgccccagcatcctggagctggaggagctcctgcgggcagggaagtcttcttgcagccgtgtggacgaagtttggcccaaccttttcataggagatgcagctggtccttactccctgcccgactcggaccgatg

SEQ ID NO: 9160 - DNA, 203 bp, Artificial sequence
  synthetic
ggcgcgccagtcctgacctgcggctccgccccagaggccgccatcttcctgaccacccgaaaggccggacctactccccggtgcatcttgggatcagggcggggccctgagcgccgccatgcttttgtacggcaggatcgcaaagcacgccgggaccggttggtttggttttgaagacgtggatggcgcgactcggaccgatg

SEQ ID NO: 9161 - DNA, 203 bp, Artificial sequence
  synthetic
ggcgcgccagtcctagcttcttctagaagcaggccctgaacaggacgtgggtaagagatccgctgtcccttgagacttggcctactcccggcactccgcggacagccccagcctgcggacagccccagcctgcgtcacttgtccgcatgccagctccacccgggcggacccacacatggttcctacttcgactcggaccgatg

SEQ ID NO: 9162 - DNA, 203 bp, Artificial sequence
  synthetic
ggcgcgccagtcctggcccgcagtcctactcccgccgagacccgccgctccggtcctgccccgaactgcccacggccggcagcgcttccaggccctgaaaaaaactctcttcctgtgtctggccagaggtatagagagagacaggttcaactctaaggcctgaaaaggaacaaggcccaccggaagcacgactcggaccgatg

SEQ ID NO: 9163 - DNA, 203 bp, Artificial sequence
  synthetic
ggcgcgccagtcctggccgcaggtttgactcccgtgcggtgcggcccagcagccacaaagctcccgctgccattgctccttgtactcccgccgtcactgccgctgtccaacccctcccccggggcttgcgcggcggctcccacacccctcggcccgtgtacgcgctctgcacctgcctgcccgaaaaccgactcggaccgatg

SEQ ID NO: 9164 - DNA, 203 bp, Artificial sequence
  synthetic
ggcgcgccagtcctattggactcctagatccgcgagggcgcggcgcagccgagcagcggctctttcagcattggcaaccccaggggccaatatttcccacttagccacagctccagcatcctctctgtgggctgttcaccaactgtacaaccaccatttcactgtggacattactccctcttacagatcgactcggaccgatg

SEQ ID NO: 9165 - DNA, 203 bp, Artificial sequence
  synthetic
ggcgcgccagtcctctttccgacactctttgggaagagaatctctaatgacggcaacagtggagaacctaacgttccagaaggacactttgggaaatgctgttgacaaaaacacatccagattggagctccgttcttactcccttgcagggcgccacggctcgacagagccactcgtcctcgcctggtcgactcggaccgatg

SEQ ID NO: 9166 - DNA, 203 bp, Artificial sequence
  synthetic
ggcgcgccagtcctcccgaggagccgggccccggccgctgtccagccgctccgtgccccgcgcgtcctgcgccgccgccaccgcctcctggggagacgcagccacttgcccgccatggatactcccagggtcctgctctcggccgtcttcctcatcagttttctgtgggatttgcccggtttccagcacgactcggaccgatg

SEQ ID NO: 9167 - DNA, 203 bp, Artificial sequence
  synthetic
ggcgcgccagtcctaagtgttgcgcaggcgcatccgatcgactcggtaggtggggatctcttggagacggcgacccaggcatctggggagccacagaagtcgtactcccttaaaccctgctttgctccccctgtggatgtaaccccttagctggcattttgcatctcaattggcttgtgatggaggcgcgactcggaccgatg

SEQ ID NO: 9168 - DNA, 203 bp, Artificial sequence
  synthetic
ggcgcgccagtcctgagcagagccctttcacacacctcaggaacacctttcggctgcccgctccccagacacacctgcagccctgcccagccggctttgctcacccactgcttgtaaatgccccagatatgagccagcccaggccccgctacgtggtagacagagccgcatactcccttaccctcttccgactcggaccgatg

SEQ ID NO: 9169 - DNA, 203 bp, Artificial sequence
  synthetic
ggcgcgccagtcctccctgggatactcccctcccagggtgtctggtggcaggcctgtgcctatccctgctgtccccagggtgggccccgggggtcaggagctccagaagggccagctgggcatattctgagattggccatcagcccccatttctgctgcaaacctggtcagagccagtgttccctccacgactcggaccgatg

SEQ ID NO: 9170 - DNA, 203 bp, Artificial sequence
  synthetic
ggcgcgccagtccttttttcacccgcgctctccccccttactccctcagcctcccacccgggatggagccatgtgcggcgtggagtccccgcggtgggagagagaatgtaatggacatcggtctgaccaacgagaagcccaacccggaactctcttactccggctccttccagccagcccccggcaaccgactcggaccgatg

SEQ ID NO: 9171 - DNA, 203 bp, Artificial sequence
  synthetic
ggcgcgccagtcctaatctctacgttcaaagtctaactttgacagacaaccttacttccagcgaagtctactcccctccctccggagggaagaatgggctgcggttaagcgtttgccctggtgtcagggccaactgcttcgaagcgccagactttcggagactgtgggtggggagcattaagcgggaacgactcggaccgatg

SEQ ID NO: 9172 - DNA, 203 bp, Artificial sequence
  synthetic
ggcgcgccagtcctagcggggagagacaagaaaggggtcaagttagctcagctgggcccagcctctcctctgtctctcctcggtctcagctctgggcgagcagcggcctgtctgaagagcatgcagcccccttactccccgcctggcctcgccatccctgcccccccagcctgacccccggccccagccgactcggaccgatg

SEQ ID NO: 9173 - DNA, 203 bp, Artificial sequence
  synthetic
ggcgcgccagtcctcagggcgacgggagctttccggagctgctggtactcccgattggagacgtagaaccgttacttgtcgagggccttagcggccgccgtgaccctctcggggatcccacgatgttcttctacctgagcaagaaaatttccattcccaataacgtgaagctgcagtgtgtatcctggcgactcggaccgatg

SEQ ID NO: 9174 - DNA, 203 bp, Artificial sequence
  synthetic
ggcgcgccagtcctttgctgagcgcagtccagagggctgcgctgctcgtcccctcggctggcagaagggggtgacgctgggcagcggcgaggagcgcgccgctgcctctggcgggctttcggcttgaggggcaaggtgaagagcgcaccggccgtggggtttaccgagctggatttgtatgttgcacccgactcggaccgatg

SEQ ID NO: 9175 - DNA, 203 bp, Artificial sequence
  synthetic
ggcgcgccagtcctgttttgactgaaaatgccgtcggtttcgaaagcggcggcagcggcgctgagcgggtcccccccgcagactgagaagccgacccactacaggtacctgaaggagttcaggacggagcagtgccccctgttttcacagcacaagtgcgcgcagcaccggccgttcacctgcttccacgactcggaccgatg

SEQ ID NO: 9176 - DNA, 203 bp, Artificial sequence
  synthetic
ggcgcgccagtcctgcagcgccgagggaggctgccagtgcgtgaggaagagagctagagactggacaggggagacagagcagcgtcggagccgcgcaggggacgggagtgagagcgggagtgagagcaggaacgacgcagagcggccgtcgccgtgcccgggtctcagggcgcctggctgaagtgagccgactcggaccgatg

SEQ ID NO: 9177 - DNA, 203 bp, Artificial sequence
  synthetic
ggcgcgccagtcctgcagcgcaaggttggataagacgccgccgctcacgcccgctatcaggttctcataccggacgtggcggaataccgtgctccacgccgacgacccggacgccgactggccctggcccgtcataggctcggggcccgtcgacaccacggcgcccagggccgcggaggtgggacgcgcgactcggaccgatg

SEQ ID NO: 9178 - DNA, 203 bp, Artificial sequence
  synthetic
ggcgcgccagtcctggggaggggccgggcggggggctggcggcagcggcggatggactcgcgggtatcggagctgttcggcggctgctgccggcccggagggggcccggccgtgggcggaaccctcaaggctaggggggccggcagcagcagcggctgcggggggccaaagggaaagaagaagaacggcgactcggaccgatg

SEQ ID NO: 9179 - DNA, 203 bp, Artificial sequence
  synthetic
ggcgcgccagtcctatggcctcgctggacctgccgtaccgctgcccccgctgcggggagcacaagcgcttccggagcctgtcgtcgctgcgcgcgcacctggagtacagccacacctacgagacgctctacatcctctccaagaccaacagcatctgcgacggcgccgccgccgccgcggccgccgcccgactcggaccgatg

SEQ ID NO: 9180 - DNA, 203 bp, Artificial sequence
  synthetic
ggcgcgccagtccttaggcggatgccgccatgcagcactacggggtgaacggctactcactgcacgccatgaactcactcagcgccatgtacaacctgcaccagcaggcagcccagcaggcccagcatgcccccgactaccggccttcagtgcatgcgcttacattggctgagcgcctggctggctgtcgactcggaccgatg

SEQ ID NO: 9181 - DNA, 203 bp, Artificial sequence
  synthetic
ggcgcgccagtcctcgcgggcgttcgggggcggggcctgttccctctgctctgggtctccgccggcgcccgccccgccagcctcacctgcgcggcacgtgacccgcaccgcccgtgggcaccttgaaggcggatcccgcgcgcccccgctcctgcaggctgtttttcttcaaataaagaacatggtgacgactcggaccgatg

SEQ ID NO: 9182 - DNA, 203 bp, Artificial sequence
  synthetic
ggcgcgccagtcctacttccggggtccgtcccggttcccggccgttgccacgacgacgaagctgccggccaatggctggcggatgggcccaaggttcccggcgtgcagcgcggctgcctgagggcggcaggctcatggcgccggcgtcgcggttgctcgcgctctgggcgctggcggctgtggctctacgactcggaccgatg

SEQ ID NO: 9183 - DNA, 203 bp, Artificial sequence
  synthetic
ggcgcgccagtcctctctctcggcgtttccgctgtcagggccctgcggtgtgactcgcgggctcagctggttggtccggccgtagcacctccgcgccgtcgccatgtcgcggtttttcaccaccggttcggacagcgagtccgagtcgtccttgtccggggaggagctcgtcaccaaacctgtcggagcgactcggaccgatg

SEQ ID NO: 9184 - DNA, 203 bp, Artificial sequence
  synthetic
ggcgcgccagtcctgtcaggccccgggcaggccgggagtggcgtgctgggcgtgcgcggctgcggtacggcgtgttggtcccagcggttcagctgaggtagggacgtgctgtaggccggaatgttaccggctgttggatctgcggatgaggaggaggatcctgcggaggaggattgtcctgaattggtcgactcggaccgatg

SEQ ID NO: 9185 - DNA, 203 bp, Artificial sequence
  synthetic
ggcgcgccagtcctgacgtcaggccccggccaggccgggagtggcgtgctgggcgtgcgcggctgcggtacggcgtgttggtcccagcggttcagctgaggtagggacgtgctgtaggccggaatgttaccggctgttggatctgtggatgaggaagaggatcctgcggaggaggattgtcctgaattcgactcggaccgatg

SEQ ID NO: 9186 - DNA, 203 bp, Artificial sequence
  synthetic
ggcgcgccagtcctagacttcctccttcacttgcctggacgctgcgccacatcccaccggcccttacactgtggtgtccagcagcatccggcttcatggggggacttgaaccctgcagcaggctcctgctcctgcctctcctgctggctgtaagtgattgcagttgctctacggtgagcccgggcgtgcgactcggaccgatg

SEQ ID NO: 9187 - DNA, 203 bp, Artificial sequence
  synthetic
ggcgcgccagtcctcagcaccaaagcggccgttctcggattccggagcgttctggagccccgagagacgccccggggttctagaagctccccggcggcgcccagtcccggcttcattcgggcgtccctccgaaacccactcgggtgcacgggtcgtcggcgagccgcgaccgggtcctggcgcgcacccgactcggaccgatg

SEQ ID NO: 9188 - DNA, 203 bp, Artificial sequence
  synthetic
ggcgcgccagtcctgggagctggagcctcaacagcctccagcgagcccgggacccgccgacagcccgagaaaccagccgaaggacgcggggcggggtcgccgccgccgccacggggtgctccctccctcccgcccaagtccggccacctggtcttcccctcggccccggccgtctcagactcatcaaacgactcggaccgatg

SEQ ID NO: 9189 - DNA, 203 bp, Artificial sequence
  synthetic
ggcgcgccagtccttccccaacaaacagtacctgggatggagccctagggtaatcgcagccacgggatgggtcgaggtgacaggcttcagggaccacacttcggcctttgcccgaccttccacaacttaagcgaagagaggccaccagccgtaacagggcgttaaagcccaggggaagattggtccttcgactcggaccgatg

SEQ ID NO: 9190 - DNA, 203 bp, Artificial sequence
  synthetic
ggcgcgccagtcctatgggcctgctggccagtgctggtttgttgctgttgctggtcatcggccaccccagaagcctaggactgaagtgtggaattcgcatggtcaacatgaaaagtaaggaacctgccgtgggatctagattcttctctagaattagtagttggagaaattcaacagtgactggacatcgactcggaccgatg

SEQ ID NO: 9191 - DNA, 203 bp, Artificial sequence
  synthetic
ggcgcgccagtcctcgggtgagtcccacttcccgacagcctggctcggccagcgactgggcggggagaccaaggatggaagtgggcttaccggccattaccctctttctcaccagcgccagcagccctgtggtggcgacgacgatggaccaggagccagtgggcggtgtggaacgaggagaagccgtccgactcggaccgatg

SEQ ID NO: 9192 - DNA, 203 bp, Artificial sequence
  synthetic
ggcgcgccagtcctatgtcctatccgcagggctacttgtaccagccgtccgcctcgctggcgctctactcgtgcccggcgtacagcaccagcgtcatttcggggccccgcacggatgagctcggccgctcttcttcgggctccgcgttctcgccctacgctggctcgactgccttcacggcgccctcgcgactcggaccgatg

SEQ ID NO: 9193 - DNA, 203 bp, Artificial sequence
  synthetic
ggcgcgccagtcctgggggacagagaaagtgatgtgcgccttctaaagcctcgcccagcgccgccgaagcagcttcacctctccaactttctcccaccgactgcttgtcttgaccctgccctccaccctccccagagccacttcgggtgcgcgctcttgggtaaagggggggtcaccggctgtctgggcgactcggaccgatg

SEQ ID NO: 9194 - DNA, 203 bp, Artificial sequence
  synthetic
ggcgcgccagtcctgagccctgctgccctccagccgggctcctccagccgggctcctccaccggcccttgcaggggcgcagagagctcggcgcccgcccttccgctcgcctttttcgtcagccggctggaggagcatgggtccgggaggtctctgggctgaggcggcgacagctcctctagttccacccgactcggaccgatg

SEQ ID NO: 9195 - DNA, 203 bp, Artificial sequence
  synthetic
ggcgcgccagtcctgggtagaagcggcagagaccgcatattccggaggggctggctccaggccacgcgagccggagctggagacatttccagagccttgaggatggcaccggccctcgcacgctcaactcctgctcctcctcttcgcaatgagtaaacgacgcagattaaagcaaggagagccaatcacgactcggaccgatg

SEQ ID NO: 9196 - DNA, 203 bp, Artificial sequence
  synthetic
ggcgcgccagtcctttccctaggtcttttcggaggcggagtttagtatccaagtccgcgggtgtgagcgcgcgcgtgtgtccgcgcgcctcgcccggcgcccccgccagtcctgccggaagatggtcaacgaccggtggaagaccatgggcggcgctgcccaacttgaggaccggccgcgcgacaagccgactcggaccgatg

SEQ ID NO: 9197 - DNA, 203 bp, Artificial sequence
  synthetic
ggcgcgccagtcctccagtctcctggcgactttccctatatcgcagagactcatccctctgaccccagcccggaagcactgtccctcggagtccgagacttccacctgggtcgtgtccaaggccccggcgactccccggactcggggtgccgggccaacctccccgccgaggcccacccgccgtcgctcgactcggaccgatg

SEQ ID NO: 9198 - DNA, 203 bp, Artificial sequence
  synthetic
ggcgcgccagtcctggtgcgcatgcgcccggagagctgaagggcgcgcggtgccgacagggagcttccttggctggcatggcggcgagcgcgctgcgaggcctgccagtggctggcggaggcgagagtagcgagagcgaggatgatggctgggagattgggtatctcgaccggacgtctcagaaattgcgactcggaccgatg

SEQ ID NO: 9199 - DNA, 203 bp, Artificial sequence
  synthetic
ggcgcgccagtcctcgccaatcggtgcagactccggttctccccaaccccgggcctgggcagctgggcactggggcgccgttccccacccggcgcggacttcggaaccggccctgggactgactggctctaccactcgagcgcgtctccgctggacccggaaccccggtcggtccattccccgcgaagcgactcggaccgatg

SEQ ID NO: 9200 - DNA, 203 bp, Artificial sequence
  synthetic
ggcgcgccagtcctatttccaggaacttcctcctcccccaccggccttcaccttttgttccctatcctgggccagttctctcgcaggtcccagatgtccagttccagatgcctggacccagagtgtgggggaaatatctctggagaagccctcactccaaaggctgtccaggcgcaatgtggtggctgcgactcggaccgatg

SEQ ID NO: 9201 - DNA, 203 bp, Artificial sequence
  synthetic
ggcgcgccagtccttctttcctttctttccgcctatcttttttctgctgccgctccgggtccgggccattttccgggccgggcgcactaaggtgcgcggccccggggcccagtatatgacccgccgtcctgctatccttcgcttcccccgccccatgtggctgcggggccgcggcggcgctgcccactcgactcggaccgatg

SEQ ID NO: 9202 - DNA, 203 bp, Artificial sequence
  synthetic
ggcgcgccagtcctccacgttacggatcggcttactccgcggagttggcctcatttctgcagtcggcgctccctgtagtttctcctctcgaacgccaggtggagcaaccggccggataccgccacagccctggcaggcggcgctgtgatgcctgagctgatcctgtatgttgcaatcactctatccgtcgactcggaccgatg

SEQ ID NO: 9203 - DNA, 203 bp, Artificial sequence
  synthetic
ggcgcgccagtcctgagttgcagtttgagagcagttccgggcagggaggcgcctttgctgccctcacagacttggcccctagcagtgcagaactacaagtcccagggatcctagcgaccgtccgtccgtagtcaagttgccggtggaattggcccaggatgacagctggagaatggagtcagttttatcgactcggaccgatg

SEQ ID NO: 9204 - DNA, 203 bp, Artificial sequence
  synthetic
ggcgcgccagtcctcccgggacagccctcggagaaactgcatcatcctcactaatgatccacttcctcctcagggaataaaggctcagggaccggcagttctactctagagcccaccagcctctcagagcctccggtgactggcctgtgtctccccctggatggacatgtggacggcgctgctcatcccgactcggaccgatg

SEQ ID NO: 9205 - DNA, 203 bp, Artificial sequence
  synthetic
ggcgcgccagtcctatttccgcttccgcctccttctttctcgacaagatggccacaccggcggtaccagtaagtgctcctccggccacgccaaccccagtcccggcggcggccccagcctcagttccagcgccaacgccagcaccggctgcggctccggttcccgctgcggctccagcctcatcctcacgactcggaccgatg

SEQ ID NO: 9206 - DNA, 203 bp, Artificial sequence
  synthetic
ggcgcgccagtcctggagaattgagcctgggaggcgggtccggagagggctatggaaagccgccggcggggaatcccggccgtagagggacagtggataggtgcccgaggcctacagctggcctggggctcgtgtctgggcttcggacgttggggcccggtggcccaccctttccgtagttgtcccaacgactcggaccgatg

SEQ ID NO: 9207 - DNA, 203 bp, Artificial sequence
  synthetic
ggcgcgccagtcctggagcctgccgctccccgcgctcgtagcgcgggcctggggactggggatcccgccgccgggccgcagcatggggcgcttccgcgggggcctgcggtgcatcaagtacctgctgcttggcttcaacctgctcttctggctggctggatcggccgtcattgcttttggactatggtcgactcggaccgatg

SEQ ID NO: 9208 - DNA, 203 bp, Artificial sequence
  synthetic
ggcgcgccagtcctaaacaataacaaacgggaggaggaagcgattctggggtttctgtgttgaacggttcttgtccgcgaagatgcgcttcggcctctgtcaggggacttgaacgggcttagtgggcttcagccagcttttctccaccggttccccacggggacccccccccccccccggccgttgcacgactcggaccgatg

SEQ ID NO: 9209 - DNA, 203 bp, Artificial sequence
  synthetic
ggcgcgccagtcctagccaaggcttactgaggctggtggagggagccactgctgggctcaccatggaccgccggatgtggggggcccacgtcttctgcgtgttgagcccgttaccgaccgtattgggccacatgcacccagaatgtgacttcatcacccagctgagagaggatgagagtgcctgtctacgactcggaccgatg

SEQ ID NO: 9210 - DNA, 203 bp, Artificial sequence
  synthetic
ggcgcgccagtcctcgactccgctggtcagcgccaagtgacttacgcccccgaccctgagccgggaccgctaggcgaggaggatcagatctccgctcgagaatctgaaggtgccctggtcctggaggagttccgtcccagcccgcggtctcccgggccgccctcctgaccggccggctcccggttcggcgactcggaccgatg

SEQ ID NO: 9211 - DNA, 203 bp, Artificial sequence
  synthetic
ggcgcgccagtcctcggccagtcctcggtcctcaggcttgtggctccgttgagcaccggccgccgggcctctgggtccgtcgagtggagactctctgaaaagcgtgggctccgtggcctccggcgcggccgcggcgggtcggtctcctagatcatccgggaagcccacgggaccctcaggcgggcaggcgactcggaccgatg

SEQ ID NO: 9212 - DNA, 203 bp, Artificial sequence
  synthetic
ggcgcgccagtcctgcgcagccgcggtgggaggaggcaccggccgcgcggcgggaggaggtgccggccgagcaccgcagacagcgccgggaagatgagcacggaaggtggtggccgtcgctgccaggcacaagtgtcccgccgcatctccttcagcgcgagccaccgattgtacagtaaatttctaagcgactcggaccgatg

SEQ ID NO: 9213 - DNA, 203 bp, Artificial sequence
  synthetic
ggcgcgccagtcctacaggcagcgcatggggggctgggcgaggtcgccgcgtataaatagtgagatttccaatggaaaggcgtaaataacagcgctggtgatccacccgcgcgcacgggccgtcctctccgcgcggggagacgcgcgcatccaccagccccggctgctcgccagccccggccccagcccgactcggaccgatg

SEQ ID NO: 9214 - DNA, 203 bp, Artificial sequence
  synthetic
ggcgcgccagtcctgccgcagctgctgcacccacccccaccctgcccggccctttctgcaccgtcatctcctgccccgccgaggcttgacccccccgacaatgggcaacgcgcaggagcggccgtcagagactatcgaccgcgagcggaaacgcctggtcgagacgctgcaggcggactcgggactgccgactcggaccgatg

SEQ ID NO: 9215 - DNA, 203 bp, Artificial sequence
  synthetic
ggcgcgccagtcctgtccgttggccagatcaactcgccgcgtgggccggccgttccctgagagtctgagcgctcgccgcacccccttccgagcttctattggccgtagcagacgtccgtctgccgctatctccgccccaatacggaagcggcctagtcctccggctccgacagctgggtgtccaggcccgactcggaccgatg

SEQ ID NO: 9216 - DNA, 203 bp, Artificial sequence
  synthetic
ggcgcgccagtcctatggctcgtactaaacagacagctcggaaatccaccggcggtaaagcgccacgcaagcagctggctaccaaggctgctcgcaagagcgcgccggctaccggcggcgtgaaaaagcctcaccgttaccgcccgggcactgtggctctgcgcgagatccgccgctaccaaaagtcgcgactcggaccgatg

SEQ ID NO: 9217 - DNA, 203 bp, Artificial sequence
  synthetic
ggcgcgccagtcctatgtcctcccgcagcccccggcccccgccccgccgtagccgccgccgcctgccgcgcccctcctgctgctgctgctgctgccgccgttcgcacctcaacgaggacaccggccgcttcgtgctgctggcggcgctcatcggcctctacctggtggcgggtgccacagtcttctcgcgactcggaccgatg

SEQ ID NO: 9218 - DNA, 203 bp, Artificial sequence
  synthetic
ggcgcgccagtcctccgggaaacctgccattcttcgctgctgatcgcgggattctttttggatagggttgacgttcgtggatagactcatatctgtgaccagtgtccgccaccgcggatggcaagagacctgatgggaccggccctgccgcccggcttcaaggcccgcggaacagcggaggacgaagacgactcggaccgatg

SEQ ID NO: 9219 - DNA, 203 bp, Artificial sequence
  synthetic
ggcgcgccagtcctggatttgatccccatcctggtgcagctccgagacgctcctgggctgcgcgcgcttttgggctgcgccaccgacagagacatctggaagccggagctagtggaagactctgcctcacctgcctccttgaaggaaacacggggaagccaggactggccgtcacgttggtgacaaatcgactcggaccgatg

SEQ ID NO: 9220 - DNA, 203 bp, Artificial sequence
  synthetic
ggcgcgccagtcctctctgaaggcatggcgcgtacgaagcagactgctcgcaagtccaccggcggcaaggctccgcgcaagcagctggccaccaaggcggctcggaagagcgctccggccaccggcggtgtcaagaagccccatcgctatcggcctggtacagtggctctccgcgagattcgccgctacgactcggaccgatg

SEQ ID NO: 9221 - DNA, 203 bp, Artificial sequence
  synthetic
ggcgcgccagtcctctccggctgcttgtagcactggtctcactgtccccgccgtcagccaccggttccttatccgtctcattccccattgtggcttggctgagccggtcgccaggcctcgctgtcctcctttgccttcctctctcctcagcggccgtactttgcgccgtacctcacctggcctgcaggcgactcggaccgatg

SEQ ID NO: 9222 - DNA, 203 bp, Artificial sequence
  synthetic
ggcgcgccagtccttttcgccagtccgtccggccgttccgcattaggtccgggataactaggtggagtaggtgtgcggcccgccgccggacagcccgctcgctgtttctttaagcccccgcctgcgtcttcacggccctctcccgttctgctggaaagctgacgtggggcaatccgttcagaccctcccgactcggaccgatg

SEQ ID NO: 9223 - DNA, 203 bp, Artificial sequence
  synthetic
ggcgcgccagtcctaatctcgactttcgcatttgagattccagacaggactcggctctccctctttcatacccaggggaaactgagtccctcacccccttcaagaccccaggccgctcctcgctcccgcccctcgaggcccttcgccggctctgcctcctcccccttcccgaccccaccggccataagcgactcggaccgatg

SEQ ID NO: 9224 - DNA, 203 bp, Artificial sequence
  synthetic
ggcgcgccagtcctacccagtgattgtatttgatgacttttaagctttcatatgccgttatttaatacctgtcacttccaaatgagagatgtaagggcaacggccgttagcgttctgttttggatcaggctctggagtggacgcccctagcttaggggtccttctaggcagccagaaacctgcggaaacgactcggaccgatg

SEQ ID NO: 9225 - DNA, 203 bp, Artificial sequence
  synthetic
ggcgcgccagtcctgggtggtggatctgtcggtcccgttttcccgtcgcacgtggtggccactgttggcttctgaatggtttgcaaggcggatatccacgccaaggcctttggatcggccgtgggtacatccgtctgagccgttcctttccatcgcagagcggcggcctccggcggcgctctccagtccgactcggaccgatg

SEQ ID NO: 9226 - DNA, 203 bp, Artificial sequence
  synthetic
ggcgcgccagtcctcttcatctctccatctctgcgctgctgccggctgcgccatccagcacccagactccagcaccggccgaggacccccactccggctgcagggaccctgtcccagcgagaccgcaggcatgtcatccgaaaagtcaggactcccagactcagtccctcacacttctccgccgccctcgactcggaccgatg

SEQ ID NO: 9227 - DNA, 203 bp, Artificial sequence
  synthetic
ggcgcgccagtcctactcccggttcgcggcgctgggagcggccgtgacgtcaggcgcccggctgctcctcacttgctctgagacaggtgcggcaagtctactgcgggctggtccgggctcctcaggttcagacccgaccgttatccagtcggttcgtggagaggagaggtgcactttacaggtccccgcgactcggaccgatg

SEQ ID NO: 9228 - DNA, 203 bp, Artificial sequence
  synthetic
ggcgcgccagtcctagctgcgccggtgactgaggggccgggcagtggagaagtggtggcggcgggcggcgggcggcaaaggagcagccatgagggccgggcccagtcaccgaccgtgctgaggagtcatggaagagtttttaaaccagtgtgagccactgccccatgttgtgttgatgccaatctgcccgactcggaccgatg

SEQ ID NO: 9229 - DNA, 203 bp, Artificial sequence
  synthetic
ggcgcgccagtccttgcgcggcgcatgcgtggcccggggtctcggggcgttgctgggaaacatctgccgttggttgcggcgggcaccggccgacatggcggcagcggtggcggctgcgctggcgcggcttttggcggcctttctgctcctcgcggcccaggtggcctgtgagtacggcatggtgcacgcgactcggaccgatg

SEQ ID NO: 9230 - DNA, 203 bp, Artificial sequence
  synthetic
ggcgcgccagtcctgcgggagagaggaggaggcggcggcggggcagtgaaactacggtagctgccccctgagctggtggtgtggctttgtggggagggcgtagttcctaatcccctttccgggcagccgccggggctcggggctgtgagcggccgtgaggctgcctccccgggccccctgcctccgcccgactcggaccgatg

SEQ ID NO: 9231 - DNA, 203 bp, Artificial sequence
  synthetic
ggcgcgccagtccttcctggtctccatgtcatctgccagaaaggccacctgcgccagcacctcctgagaccggccttcaaagacacgacgcatgccgctctgccgtccggagcacttaatgcctagagccagcagggtcccagtggccgcgtcactgcctctgagccacgcggtcattccaactcaaccgactcggaccgatg

SEQ ID NO: 9232 - DNA, 203 bp, Artificial sequence
  synthetic
ggcgcgccagtccttccaaactccctgaacttcggggacagtcccccgaagcggcgaaactctcagggttggcaaccctgcccagggacccccatcccgggcggcgctccggacgccctcccctcaccgcgcccccgcagacacgtgcctggactccgagggcttctggagccaccggccgggccacgcgactcggaccgatg

SEQ ID NO: 9233 - DNA, 203 bp, Artificial sequence
  synthetic
ggcgcgccagtcctgccccgggaccgaggggcagccaacccaatgaaaccaccgcgtgttcgcgcctggtagagatttctcgaagacaccagtgggcccgttccgagccctctggaccgcccgtgtggaaccaaacctgcgcgcgtggccgggccgtgggacaacgaggccgcggagacgaaggcgcacgactcggaccgatg

SEQ ID NO: 9234 - DNA, 203 bp, Artificial sequence
  synthetic
ggcgcgccagtcctagtcccggggagcgcaccggaagttctcgcctggcccaggcgcggggtccaagatggtggcgctaggagccgcgacccagtgatagcggccgtggaggggcccccgaccgagcgggaggttgggggtagcctggagattctgaagacaggaataagatgaaggaatggaaatcacgactcggaccgatg

SEQ ID NO: 9235 - DNA, 203 bp, Artificial sequence
  synthetic
ggcgcgccagtccttcggcccagaccgtcgcagctacagggggcctcgagccccggggtgagcgtccccgtcccgctcctgctccttcccatagggacgcgcctgatgcctgggaccggccgctgagcccaaggggaccgaggaggccatggtaggagcgctcgcctgctgcggtgcccgctgaggcccgactcggaccgatg

SEQ ID NO: 9236 - DNA, 203 bp, Artificial sequence
  synthetic
ggcgcgccagtcctgcagtacacgggaggcttttaattccattgtggagaggacggcgttatttttattaactggaggcgacggcggctgcggcggcggcgggacccgcctcctccggggtatgaaaatcggcagtgggttcctgagtggcggcggaggtaccggcagtagcggtggtagcggctccgcgactcggaccgatg

SEQ ID NO: 9237 - DNA, 203 bp, Artificial sequence
  synthetic
ggcgcgccagtcctacgactgcgtgggtgagtcgtctataaaaactcatctctgcgcgtctcttcgccacattcgcttcctgctttcggtgtgtctgttgtgtcttgttgcgggcaccgcagtcgccgtgaagatggcgtctaccagccgtttggatgctcttccaagagtcacatgtccaaaccatccgactcggaccgatg

SEQ ID NO: 9238 - DNA, 203 bp, Artificial sequence
  synthetic
ggcgcgccagtcctctgggctgatccggggctcggccaagctgaggcggcggcgcccggccgtgcgcccagcttgcaggcgcctggctctcacgatgatgaagaagaagaagtttaagtttaaggtggacttcgagctcgaggagctctcctcagtgcccttcgtcaatggggtcctcttctgcaagacgactcggaccgatg

SEQ ID NO: 9239 - DNA, 203 bp, Artificial sequence
  synthetic
ggcgcgccagtcctcgatgtgacgccgcgcgccccggggtcctcggcgcctgcgccctctcctataaagcagacgccgcgccgcgctgcgacgctgtagtggcttcgtcttcggtttttctcttccttcgctaacgcctcccggctctcgtcagcctcccgccggccgtctccttaacaccgaacacccgactcggaccgatg

SEQ ID NO: 9240 - DNA, 203 bp, Artificial sequence
  synthetic
ggcgcgccagtcctgtcgtagagagggggcggggcggccattggggctcctcattggggtgcttggggcgcaccccatcgggtaccgggcgtcccggaattgtgggggacaaaaaggctctgcagtctcggctgaggggtctcaccgacaaaagaggggaagccggccgccgcccaccgcccgccgcccgactcggaccgatg

SEQ ID NO: 9241 - DNA, 203 bp, Artificial sequence
  synthetic
ggcgcgccagtcctctgcctcccccccgctcccgctcccctgagcccagccagaccccgcgccgcccgcgccccgctcgactccggaggctcccgcagccccggcgtccgccccgctgccccctcccccgggggccatgggggcgcccccgggctaccggccctcagcttgggtgcatctcctccacccgactcggaccgatg

SEQ ID NO: 9242 - DNA, 203 bp, Artificial sequence
  synthetic
ggcgcgccagtcctgcacacacgggcgcgcacacacacgcgcgtacacactgggtctccaggcagcggccgtcgccgcatccccggcagcagctccaggcaaagtgacagaggacagtgctgctgtgagtttgacgaagtggacatcacctgcagtcagtccagagctgcccagtcttgaatataatccgactcggaccgatg

SEQ ID NO: 9243 - DNA, 203 bp, Artificial sequence
  synthetic
ggcgcgccagtcctccacgtgtccccggtcaccggccctgcccccgggccctgtgcttataacctgggatgggcacccctgccagtcctgctctgccgcctgccaccgctgcccgagcccgagtggttcactgcactgtgaaaacagattccagacgccgggaactcacgcctccaatcccagacgctcgactcggaccgatg

SEQ ID NO: 9244 - DNA, 203 bp, Artificial sequence
  synthetic
ggcgcgccagtcctttgaaaatctactctatcagctgctgtggttgccaccattctcaggaccctcgccatgaaagcccttatgctgctcaccctgtctgttctgctctgctgggtctcagctgacattcgctgtcactcctgctacaaggtccctgtgctgggctgtgtggaccggcagtcctgccgcgactcggaccgatg

SEQ ID NO: 9245 - DNA, 203 bp, Artificial sequence
  synthetic
ggcgcgccagtcctttcccaggaaagcccaggtgctggctgccagctgctgcgccccccatgtagaaggtgcacctcctgggagcaggcacgtcttttggctcttctgaccatggagagataggacggtccctgcagcccgcgcgacagaaagctgtgccgccaccaccggccgcgcccgtccttcggcgactcggaccgatg

SEQ ID NO: 9246 - DNA, 203 bp, Artificial sequence
  synthetic
ggcgcgccagtcctgaagtcgggggtgggtccctccggacgccgaagtgggctcgggatgcggggctgggaccctcccgattccggggcggattccggacgccgggaccggccattactggtgccgggttgggcttctccagatgccggggctgggtccttcccaaggttgagacaaaaggatgccaccgactcggaccgatg

SEQ ID NO: 9247 - DNA, 203 bp, Artificial sequence
  synthetic
ggcgcgccagtcctggaggggcggggtgagaaggctgcgcgcgggtaaaggggccgcctcgagcggggtccgagcgttcagcggacgcgcgcggcctcgatctctggactcgtcacctgcccctccccctcccgccgccgtcacccaggaaaccggccgcaatcgccggccgacctgaagctggtttccgactcggaccgatg

SEQ ID NO: 9248 - DNA, 203 bp, Artificial sequence
  synthetic
ggcgcgccagtcctctctctccctctgtctccctccctctctctctcccgccgcgcccgcctcccgcccgccctcgctccctccactcctctcccctcccctccccggcactgcagcaccagccgtctgcagctccggccgccacttgcgcctctccagcctccgcaggcccaaccgccgccagcacccgactcggaccgatg

SEQ ID NO: 9249 - DNA, 203 bp, Artificial sequence
  synthetic
ggcgcgccagtcctagacagcctgcccccaccggccctcttgtgtggctacagctgggtgctgggaaggggcctcctactggaggggccgggtgggctggggtccccagtctccccgttgtccttttcctagaggagatcgccaagcacaaggggcccccggtgttcactcaggaggagagatacaagcgactcggaccgatg

SEQ ID NO: 9250 - DNA, 203 bp, Artificial sequence
  synthetic
ggcgcgccagtcctgagccgcaggcagagcgtccggcggccgggagggacgcggagccacagcccgacgcacggacggagggacgccggagcccgcctgaccatgtggaagctgggccggggccgagtgctgctggacgagccccccgaggaggaggacggcctgcgtggggggccgccaccggccgccgactcggaccgatg

SEQ ID NO: 9251 - DNA, 203 bp, Artificial sequence
  synthetic
ggcgcgccagtcctgaaaacttcctggagaaggatggattttaccctgtaaaagaagaaagacatggatgcataagaagagggttgaagagggggaggcctcagacttctcgctggcctgggattcctccgtgacagcagcaggaggcctagaaggagagccagagtgcgatcagaaaaccagccgtgcgactcggaccgatg

SEQ ID NO: 9252 - DNA, 203 bp, Artificial sequence
  synthetic
ggcgcgccagtcctaggctccaccttttgtgtttcccgcacagtcaatcaaaataggaaaaaaaaatcccgggaccgctccggccgtgtccgccgccgcttcccgcatcctctcccgccgccgccgccttcgctcctcaccatgtgtaaggcggcggggagccccgcctgaggtgccctaaacacactcgactcggaccgatg

SEQ ID NO: 9253 - DNA, 203 bp, Artificial sequence
  synthetic
ggcgcgccagtcctacccggagccgtgcccagtccacgccggccgtgcccggcggccttaagaacccggcaacctctgccttcttccctcttccactcggagtcgcgctccgcgcgccctcactgcagcccctgcgtcgccgggaccctcgcgcgcgaccgccgaatcgctcctgcagcagagccaaccgactcggaccgatg

SEQ ID NO: 9254 - DNA, 203 bp, Artificial sequence
  synthetic
ggcgcgccagtcctggaagccgggattcgccctccggggagcgattggtcctcgggaggggcggggaggtggacgcgggtaccggcggtcgtcgggtcggcagcctttggtcagttggcagcggcaagcgcgctgcggttccggtggcgccatgtcgttctgcagcttcttcgggggcgaggttttcccgactcggaccgatg

SEQ ID NO: 9255 - DNA, 203 bp, Artificial sequence
  synthetic
ggcgcgccagtcctagacttctctcaactcaacaaaaacccacctcccattgccatgtattgctgtgctctccgctcctgcagcgtccccaccggccctgccaccaccttctgctcatttgataaaagctgccgctgtggagtctgcctacccagcacctgcccacatgagatcagcctccttcagcccgactcggaccgatg

SEQ ID NO: 9256 - DNA, 203 bp, Artificial sequence
  synthetic
ggcgcgccagtccttgccaccgcccgggctccgtgccgccaagttttcattttccaccttctctgcctccagtcccccagcccctggccgagagaagggtcttaccggccgggattgctggaaacaccaagaggtggtttttgttttttaaaacttctgtttcttgggagggggtgtggcggggcaggcgactcggaccgatg

SEQ ID NO: 9257 - DNA, 203 bp, Artificial sequence
  synthetic
ggcgcgccagtcctgcaggtgtggtgttcatcccgggtcgaccggccgctcgcgctgccctgaaactctagtcgccagagaggcggcatgggtttccggaagttctcccccttcctggctctcagtatcttggtcctgtaccaggcgggcagcctccaggcggcgccattcaggtctgccctggagagcgactcggaccgatg

SEQ ID NO: 9258 - DNA, 203 bp, Artificial sequence
  synthetic
ggcgcgccagtcctgggcacgatgcggcaacccgccgttcggttggtgcgcctgggtcgggtgccgtacgccgagctactggggctgcaggaccgctggctgcggcggctgcaggccgagccaggcattgaggccccgtcggggactgaggcgggcgcgctcctgctctgcgagcccgcggggcccgtcgactcggaccgatg

SEQ ID NO: 9259 - DNA, 203 bp, Artificial sequence
  synthetic
ggcgcgccagtcctagaagccgcagcccaggcggcggtccctcccgctgtcgccgcccgggtgtagcgcatcacccggagcccaccggccgcaggtgcctcctccggccccagggggccccgggagccctgaagggcgaagcggcagggacgcctctcttgggcgaagaggcggcctcaccgccccggcgactcggaccgatg

SEQ ID NO: 9260 - DNA, 203 bp, Artificial sequence
  synthetic
ggcgcgccagtcctgtgagggttgaatgtaagatggcgcccagggagctgtgaggagaaaaccctgtcggtcttggagcgacgacggcagaaccagggtccctggcggtgcggcggggccggcgggtgcagcggaggcggcggcggcggcggcagtgacgtcgccgggaaccctaaggactctgcaatcgactcggaccgatg

SEQ ID NO: 9261 - DNA, 203 bp, Artificial sequence
  synthetic
ggcgcgccagtcctgggtccccggaggcccccgggctctgcccctccagctagagaggcagccgaaccctagcggcctggaaggggccgggaaaccgcggccagctggcaaggagtggcccccgggggcggggcgccggcgggtgtgtgagtagcccgcccggcccgggtccgagttccagccccgcgcgactcggaccgatg

SEQ ID NO: 9262 - DNA, 203 bp, Artificial sequence
  synthetic
ggcgcgccagtcctaaggcgatggcccgcgccccgagcgcaggctagcgtgcctgggtgcccggccatgggctgtatcggctctcggagcccggcgggtcaggcatttctggggaccaacagctggccgaggctcagggatagagacggctgctccagctaaaggtgaatgttggagacacagtcgcgcgactcggaccgatg

SEQ ID NO: 9263 - DNA, 203 bp, Artificial sequence
  synthetic
ggcgcgccagtccttgccgggagagtgaggccgcgggggctgggaagggaccggtgtatgggggacagcaggcgaaggtcactcgggaaccagcccagctctgaggctgcgggcaggtcggaaagggagcaggacggcgacccccgtggcctccagagctctgtgtacgagagccggcgggtcacagacgactcggaccgatg

SEQ ID NO: 9264 - DNA, 203 bp, Artificial sequence
  synthetic
ggcgcgccagtcctactccctctctggatgtgtctgctgccgccattgtgcggcgctggtcccctcagagggttcctgctgctgccggtgccttggaccctccccctcgcttctcgttctactgccccaggagcccggcgggtccgggactcccgtccgtgccggtgcgggcgccggcatgtggctgtcgactcggaccgatg

SEQ ID NO: 9265 - DNA, 203 bp, Artificial sequence
  synthetic
ggcgcgccagtcctagagacgcggcaagggggcggggccaaaggccctaagctcggcgttccagagagtggggagggggcaagtgtcagtcaggacgggagtccggcgggttacagcggaggcctaggtggcagacagggggcccgggccgctgcgtgttgtccacccaagatggagttcctcctgggcgactcggaccgatg

SEQ ID NO: 9266 - DNA, 203 bp, Artificial sequence
  synthetic
ggcgcgccagtccttccacgtctcccggaagcggtagcagggccccggcgggtcggggaggaggtttactcagcttgggccccctccgggccagccgccgagggggcgcggcccaggacggcggctaggccgtagtgcagcctctccggagtcctcaggtttgccaataggattatcctgctgccatccgactcggaccgatg

SEQ ID NO: 9267 - DNA, 203 bp, Artificial sequence
  synthetic
ggcgcgccagtcctgcctcgcagccacccctcctgcgtctccacaaatggtccgacccgcaagcaagggggcgggtccggctttgaaaagccggcgggtcgggccttgaggtggaaggcgggaaaatggcggattcctcggggcgaggcgctgggaagcctgcaaccggccccacaaattctagcagtcgactcggaccgatg

SEQ ID NO: 9268 - DNA, 203 bp, Artificial sequence
  synthetic
ggcgcgccagtcctaaaattaaattgacaggctggattctgcaaagatctttggacatttaagtatcttcgaccggcgcgaaaagaggcggcctgaccttggaagtgggacggggtcctgcagcgggtccttccggcgggtgacattcagccggcggttcggggcgacggactctccattccagaacccgactcggaccgatg

SEQ ID NO: 9269 - DNA, 203 bp, Artificial sequence
  synthetic
ggcgcgccagtcctgacttccggcacgaaggggcggggctgggctcgtggctgagccagcagctgcagcagctacgggagtggccgggtggccggcgggtgccagccgccatggaggccgtgccccgcatgcccatgatctggctggacctgaaggaggccggtgactttcacttccagccagctgtgcgactcggaccgatg

SEQ ID NO: 9270 - DNA, 203 bp, Artificial sequence
  synthetic
ggcgcgccagtcctgagagcggcgcctgatgacgaccgggagggcggggcccgtctggggcgccggcgggtgcgtttgaatctggtccgagcgcgggaaacggcgggtccccgagcccagggttacaaaataaatgccatttgaacagtgccatctgtcatggaaaaacgtgagacgtttgtacaagccgactcggaccgatg

SEQ ID NO: 9271 - DNA, 203 bp, Artificial sequence
  synthetic
ggcgcgccagtcctgctgtgacagccacacgccccaaggcctccaagatgagctacacgttggactcgctgggcaacccgtccgcctaccggcgggtaaccgagacccgctcgagcttcagccgcgtcagcggctccccgtccagtggcttccgctcgcagtcgtggtcccgcggctcgcccagcacccgactcggaccgatg

SEQ ID NO: 9272 - DNA, 203 bp, Artificial sequence
  synthetic
ggcgcgccagtcctgggtggactccgagccggcctgtcaggcaagagccgggcaggtgcggtggcggaagtgcagggacggaggccgaagcggagcggtctagggagccgcggccgcgggtcacccggcgggtagcagttgctgagtgtcagctagacagcagcgactagggctcgggcgccggcgagcgactcggaccgatg

SEQ ID NO: 9273 - DNA, 203 bp, Artificial sequence
  synthetic
ggcgcgccagtcctcggcggaccccgtaccctggcagcatcggagcaccggcgggtgaaggcaaggtccctggactggtcatatacctcttgtggccctggcagaatcaagatgaggccctgtcatgcctccccagtgaggcctacagtctgagcagacagcatggcctgccactggcagtgaacacccgactcggaccgatg

SEQ ID NO: 9274 - DNA, 203 bp, Artificial sequence
  synthetic
ggcgcgccagtccttgagatcgtgtttcatttcaggaagatatatgcgtcaggaaaatttctatcttcttttgtattatcaaggagatatttggagcagagtcaaccctctcagttacataaaataaaaaatggcatattcttggcaaacggatccaaatcctaatgaatcacacgaaaagcagtatgcgactcggaccgatg

SEQ ID NO: 9275 - DNA, 203 bp, Artificial sequence
  synthetic
ggcgcgccagtccttgcgggagagactggaattcaagagagtcaaatgtgctgggaaagactttctgggcaaaaggaataagcaaaggtgtgcaaaggtaaggaagcaggaaacctttgcacatcttgagaactcgccggccagaggcctgtgaaggagcgcagtggtcaggcaggagaggcagtcggcgactcggaccgatg

SEQ ID NO: 9276 - DNA, 203 bp, Artificial sequence
  synthetic
ggcgcgccagtccttataaagccgcgctgcccgggagccgctcggccacgtccaccggagcatcctgcactgcagggccggtctctcgctccagcagagcctgcgcctttctgactgggtccggaacactgaaaccagtcatcactgcatctttttggcaaaccaggagctcagctgcaggaggcaggcgactcggaccgatg

SEQ ID NO: 9277 - DNA, 203 bp, Artificial sequence
  synthetic
ggcgcgccagtccttcagaactcacacttcttcctggcaaagaagtgcccaggacgggagctggggagccagggctgatctaggaggctgggagccaggtgacaggatggccccaaagagagttgtgcagctgtccctgaagatgcctacccatgccgtgtgtgtggtgggagtcgaggcacatgtggcgactcggaccgatg

SEQ ID NO: 9278 - DNA, 203 bp, Artificial sequence
  synthetic
ggcgcgccagtcctgagtggagctcagtgccagaggaggggattcccggcgccgggggacagagccccttttttcttttgccgaaagaccctttctgctggggagcctcttgtgtccagcctaggcccgcgtgcagcgccgacggatgaccgtcttcttggcaagaaagtgaataaacttaattgagacgactcggaccgatg

SEQ ID NO: 9279 - DNA, 203 bp, Artificial sequence
  synthetic
ggcgcgccagtcctatggggctcaataagtctgcttccaccttccagcttactggcttcccaggcatggagaaggcacatcactggatattcatcccattattggcagcctacatctccatacttcttggcaatggcactcttctctttctcatcaggaatgatcataacctccatgagcccatgtaccgactcggaccgatg

SEQ ID NO: 9280 - DNA, 203 bp, Artificial sequence
  synthetic
ggcgcgccagtcctgccgggaccatggtcaccctcggctgagtttccggcggcgactttgattattggcaaataaccaccataacaataccgagcccccgggcttgcaccgcacgcactgactccgcgagcccgcacacggccgcgtcgcccgccaccgggccctgagcgccagccccaaacgagccgcgactcggaccgatg

SEQ ID NO: 9281 - DNA, 203 bp, Artificial sequence
  synthetic
ggcgcgccagtcctgaggcgaggcggggcgcgactgggttcgcggccgcgtgcagaggtgcaggcagagcagcctcggaaccgagacgatgcgtgcgctccgcgaccgagccgggctcctcctctgcgtgctgctgctggcggcgctgctggaggcggcgctagggctccccgtgaagaagccgcggccgactcggaccgatg

SEQ ID NO: 9282 - DNA, 203 bp, Artificial sequence
  synthetic
ggcgcgccagtcctgccccgccccgcccctgcgcggaagtctatccgggctttcgcgtcaccaccctgcccacctgggtggcgcgtggcttacgcaacggtcactgggctcctgggccgctcccgggccagcgagggctgcgaaagaagttgtagcatgcataccacagaatcaaaaaatgaacatttcgactcggaccgatg

SEQ ID NO: 9283 - DNA, 203 bp, Artificial sequence
  synthetic
ggcgcgccagtcctatctaccttatctggtcggtcatctctgtaacctccctaccaaggactaattggtctttaaaactcctcaatgcaccgggcgcggtggctcacgcctgtaatcccagcactttgggaggccgaggcgggcagatcacgaggtcaggaaatcgagaccatcttggctaacaagaacgactcggaccgatg

SEQ ID NO: 9284 - DNA, 203 bp, Artificial sequence
  synthetic
ggcgcgccagtcctgtttgttaggggcagaagcctcccattacggagcacgagagagtccatgaaggtccccgcgactcccggactggagaaaacggctcttgcgatggggcgaagtccgagctgcggcgggcgttggtccgtgcagggaagtgggaatcgttaggttcgttctggacccgccgcccccgactcggaccgatg

SEQ ID NO: 9285 - DNA, 203 bp, Artificial sequence
  synthetic
ggcgcgccagtcctgcatcctttcaatgacctgttttcttctgtaaccacaggttcggtggtgagaggaagcctcgcagaatccagcagaatcctcacagaatccagcagcagctctgctggggacatggtccatggtgcaacccacagcaaagccctgacctgacctcctgatgctcaggagaagcccgactcggaccgatg

SEQ ID NO: 9286 - DNA, 203 bp, Artificial sequence
  synthetic
ggcgcgccagtcctgaccttaggacccgcgggctccagggctactgtccgtccgccactgcgcgccagcaggtcctggtctccgctctccaacagctgaaaggccggcgcagtgaacacagaaacgaaaaccaagaaatgccttattccacaaacaaagagttgatacttggcatcatggtgggcactcgactcggaccgatg

SEQ ID NO: 9287 - DNA, 203 bp, Artificial sequence
  synthetic
ggcgcgccagtcctggagaaggggtggggcagggtatcgctgactcagcagcttccaggttgctctgatgatatattaaggctcctgaatcctaagagaatgttggtgaagatcttaacaccacgccttgagcaagtcgcaagagcgggaggacacagaccaggaaccgagaagggacaagcacatggcgactcggaccgatg

SEQ ID NO: 9288 - DNA, 203 bp, Artificial sequence
  synthetic
ggcgcgccagtcctacttcgctgtgaagatggcgtcgggcagcgggacaaaaaacttggactttcgccgaaagtgggacaaagatgaatatgagaaactcgccgagaagaggctcacggaagagagagaaaagaaagatggaaaaccagtgcagcctgtcaagcgagagcttttacggcatagggactcgactcggaccgatg

SEQ ID NO: 9289 - DNA, 203 bp, Artificial sequence
  synthetic
ggcgcgccagtcctaccccgagcgcggccgcggacgaagatggcgaccgccatgtacttggagcactatctggacagtatcgagaaccttccctgcgaacttcagaggaacttccagctgatgcgagagctggaccagaggacggaagataagaaagcagagattgacatcctggctgcagagtacatcgactcggaccgatg

SEQ ID NO: 9290 - DNA, 203 bp, Artificial sequence
  synthetic
ggcgcgccagtcctctatcaaggaagaaattgccaaaccatgtctttttttctgttttcagagtagttcacaacagatctgagtgttttaattaagcatggaatacagaaaacaacaaaaaacttaagctttaatttcatctggaattccacagaaccttcggctcgcgtgcttctgagctgctgtggcgactcggaccgatg

SEQ ID NO: 9291 - DNA, 203 bp, Artificial sequence
  synthetic
ggcgcgccagtccttgagaagaaaagagagttgacattgggtggcggggaatggagaagaagaacccatgaaggaaactgaggaagagcagccagacgaataggaggaaaaccaggagaagatggtctttggagtccaaatgaagagttctgaggaggaagtggtccacagcgtcaaacttgtgcacccgactcggaccgatg

SEQ ID NO: 9292 - DNA, 203 bp, Artificial sequence
  synthetic
ggcgcgccagtcctcgcccgcccagccccgggggcagggagagcctagattacggaagtaccgcgagcaaggagcgcggaatcggggagcgtccggagctagctggatcctctaggcaggatggtgatgggaatctttgcaaattgtatcttctgtttgaaagtgaagtacttacctcagcagcagaacgactcggaccgatg

SEQ ID NO: 9293 - DNA, 203 bp, Artificial sequence
  synthetic
ggcgcgccagtcctacacaggaagctgagccggcttggggcccagcatacacaggcccccaggacccctggggagagggccccgctgggctggccctgcagggaccatggaatccagagctgaagggggctcccctgctgtgtttgattggttcttcgaagcggcctgccctgcctccctgcaggaggcgactcggaccgatg

SEQ ID NO: 9294 - DNA, 203 bp, Artificial sequence
  synthetic
ggcgcgccagtcctactctgatgaacactgctctcctgcctagagataccactgagtccagaagcaagacctgtgagagtgcacagtgccacttcgccccatggctgaagatggtttgcccaaaatttattctcatcctccaacagaaagcagtaaaacaccaactgcagcaaccattttctttggggcgactcggaccgatg

SEQ ID NO: 9295 - DNA, 203 bp, Artificial sequence
  synthetic
ggcgcgccagtcctgtgtgcggtgcccttcggccggcctgagccccagagtcagctcccctttctcgcccagcgcccccaggccgctcccggggctcacggaatagtaaagaaacacatcataaaacctcccaggacataaaggtgagcacagaccctgtttggatcaagtcagttcctggagcctgacgactcggaccgatg

SEQ ID NO: 9296 - DNA, 203 bp, Artificial sequence
  synthetic
ggcgcgccagtcctaagtgcgactgccagctgccgaggcgttcggtcctgctgttgcggccgctgccccagggctgcggggacgctcccggagccctgcctgttccctgtccatccaggccagcagctgaaggagcctcacctgcctcccttctctgagtagcacggatttgaggagaagcagcgaagcgactcggaccgatg

SEQ ID NO: 9297 - DNA, 203 bp, Artificial sequence
  synthetic
ggcgcgccagtcctgcggagtgattccccacccctgctccatctagctctttccagtgcagccactgccgccgcccaggagccctcgtcccctgccttgtccccctactcgttcccgctcccacggcatggagcaggacactgccgcagtggcagccaccgtggcagccgcggatgcgaccgccactacgactcggaccgatg

SEQ ID NO: 9298 - DNA, 203 bp, Artificial sequence
  synthetic
ggcgcgccagtcctactctaccaaggacagcccaagaactggtctagcctggcagccttttccctcgggtagtagaggctgcccctctgacagggagtttgtggtcagcgagtgggcccttgggggtcttgggctgtcacagggactccagaaagccatgcagagccttgtgccatgaaggacttctccgactcggaccgatg

SEQ ID NO: 9299 - DNA, 203 bp, Artificial sequence
  synthetic
ggcgcgccagtcctgcaggcacaaactcatccatccccagttgattggaagaaacaacgatgactcctgggaagacctcattggtgtcactgctactgctgctgagcctggaggccatagtgaaggcaggaatcacaatcccacgaaatccaggatgcccaaattctgaggacaagaacttcccccggcgactcggaccgatg

SEQ ID NO: 9300 - DNA, 203 bp, Artificial sequence
  synthetic
ggcgcgccagtcctctcctctgactcaacaatgccatcagcactgaaaaggctgagccctgactacagctcttgcagacagaaaaattcgctgcaagtacagcactttctagattgctcctggagtgtgggaacaacagtctctcctgtccacgttactgaatccagaaaaaaggtgaacttacgaaccgactcggaccgatg

SEQ ID NO: 9301 - DNA, 203 bp, Artificial sequence
  synthetic
ggcgcgccagtccttctgccggcgcctgtccggacccgggcccctctccgctttcggccggcctcgggcaccgggcttctggagctcccggagccctgcctgttccctgtccatccaggccagcagctgaaggagcctcacctgcctcccttctctgagtagcacggatttgaggagaagcagcgaagcgactcggaccgatg

SEQ ID NO: 9302 - DNA, 203 bp, Artificial sequence
  synthetic
ggcgcgccagtcctccatagtgatctttgcagtgacccagcatcactgtttcttggcgtgtgaagataacccaaggaattgaggaagttgctgagaagagtgtgctggagatgctctaggaaaaaattgaatagtgagacgagttccagcgcaagggtttctggtttgccaagaagaaagtgaacatccgactcggaccgatg

SEQ ID NO: 9303 - DNA, 203 bp, Artificial sequence
  synthetic
ggcgcgccagtccttcttgagcctaggaggtggaggctgcagtgatctgtgattgtacctttgcactccagcctgggtgacagagcatgacgctgtctctaaaagaataataataataagcattccataaaaattatggaatggagaaatcatgaatggggtctcggaggggaccagaggctgcagtgcgactcggaccgatg

SEQ ID NO: 9304 - DNA, 203 bp, Artificial sequence
  synthetic
ggcgcgccagtcctacgcctgcagtccccgcgccgtgcccggaatgcgagctgcacgcagggctctcccaagttcccaccgagccgaataaaaagcgtcctcccgcagctctccgccaaagacggacattgactccaggactccacagaatggagcaagaatgagaggaaaaaggccggcagaaaagccgactcggaccgatg

SEQ ID NO: 9305 - DNA, 203 bp, Artificial sequence
  synthetic
ggcgcgccagtcctgtcccaggagactacagcaaacgagtgtatcaaggagtgagagtgaagcatacagtcaaagatctcctggcagaaaaacgatccgggcagacaagtaactcaagacttaatggcagcgtcagttcctctcagtctccatttgtgcagatgccaggttcgccggtcacgtcaggtcgactcggaccgatg

SEQ ID NO: 9306 - DNA, 203 bp, Artificial sequence
  synthetic
ggcgcgccagtcctagctaacaggccactagtatcctactaaagcttttgtctggataggagcaacatgcatgtttacagtcttgcagtgtgctgagagctggtggccagtgggactgagtgagctgtgtgccgtgtattgacccgcttcctagtcctgaattcctttcagaagctccggcagggaggcgactcggaccgatg

SEQ ID NO: 9307 - DNA, 203 bp, Artificial sequence
  synthetic
ggcgcgccagtccttaaaccatacttgatcctaaattcctgtacttcctcaggccatccgagcatgaaacgctgtcacctacccacatccgctggctgtgacgcttgtcaaagtgttctctatcggctgcatgcctagaccaccaaagcgttctgaccggacagtgtcactggagaaggcggcgcgaccgactcggaccgatg

SEQ ID NO: 9308 - DNA, 203 bp, Artificial sequence
  synthetic
ggcgcgccagtcctccttccagaaggagaaggatttttctccctgctctgcagccaagtgaaagagattagtccctaaacctgtgaaatcgaccagagctgtgtgattaccagggcttgagagaggactcgaaaagaaaaggagaaataaatcaaacagcctgtcagttcctttggccacgtcagaagcgactcggaccgatg

SEQ ID NO: 9309 - DNA, 203 bp, Artificial sequence
  synthetic
ggcgcgccagtcctgggttaaaggtcttgtgatatgtcacaatcccaactaagggcaggacccaggcagaaaaggagagtcacttcctttgatgattggtccagagatacattacaatttcccctgaggacagctctcatgcagaagaggaactgaatatactgcatggctcaggtatctgcagatttcgactcggaccgatg

SEQ ID NO: 9310 - DNA, 203 bp, Artificial sequence
  synthetic
ggcgcgccagtcctgaaggacgggggaggaccgctgcttccggcgccgtaactgctgccatcttctccgcgctatggctgcgttcggccgtcaggtccttgattggcaccgcctgatccccctcacctgggcctgtatggctaggcagactcctcatcttggagaacagagaaggacgacagcttcttcgactcggaccgatg

SEQ ID NO: 9311 - DNA, 203 bp, Artificial sequence
  synthetic
ggcgcgccagtcctcccctcggggaccccctgaggaccctcggattccccccaactcccctgccctctaaaaccacttcaattcctcaactcttcccccggcccgcaggaacccccgccatggcccgttcttacggcggccgggtgctggctgcaatgaccctgctgggcatcgcggcggccgtgctgcgactcggaccgatg

SEQ ID NO: 9312 - DNA, 203 bp, Artificial sequence
  synthetic
ggcgcgccagtcctgaccccggaggcaccacccacatccgtctaacatcacttccttcagagtttgaaaaaaaaaaatctgggaagtagaggtgttgtgctgagcggcgctcggcgaactgtgtggaccgtctgctgggactccggccctgcgtccgctcagccccgtggccccgcgcacctactgcccgactcggaccgatg

SEQ ID NO: 9313 - DNA, 203 bp, Artificial sequence
  synthetic
ggcgcgccagtcctgctccctccttcacctccccctttggcactgcctgtcacctcctttataaagcctggctcttttatcaccgccacttggccctcactgccgccgccagctctgggctccatggactggtcccgtctgaggtgcccctgaccgtccctgccctcaccccaccccggatcccggcacgactcggaccgatg

SEQ ID NO: 9314 - DNA, 203 bp, Artificial sequence
  synthetic
ggcgcgccagtccttgctcctctacctgctctactctcaatccgccagaatcatgggctgctgtggctgttctggaggctgtggctctggctgtgggggctgtggctccggcagtgggggctgtggctctggctgtgggggctgtggctccagctgctgtgtgcccatttgctgctgcaagcctgtgtcgactcggaccgatg

SEQ ID NO: 9315 - DNA, 203 bp, Artificial sequence
  synthetic
ggcgcgccagtcctatggagaatagcacagaagtgacagagtttatcctcttgggattaacagatgaccccaatcttcagatacccctcctcctggcatttttattcatctacctcatcaccctgcttgggaatgggggaatgatggtgatcatccactcagactcccatctccacactccaatgtaccgactcggaccgatg

SEQ ID NO: 9316 - DNA, 203 bp, Artificial sequence
  synthetic
ggcgcgccagtcctagctctttccactacggctgtattgcactggtgagtccgggcccatggatgagaaattgatgcgaggatcaatacaagcttaatttgaattaataaaaggaaatattttctccctttgaacttatctccgtaaagccattgtgcctcctcttgggggtcacgtgttcacaatcacgactcggaccgatg

SEQ ID NO: 9317 - DNA, 203 bp, Artificial sequence
  synthetic
ggcgcgccagtcctagttgcttggaggagcttggagaaaccagaagtgagatccaggagaagtaaggccctggagtgccaggagcccttctcccaaagatggagaaataaatgaagaaatacaggaaaataagcattgggtgttttgcaatggctacacaaactagtcatgtcttccatggtcaagaacgactcggaccgatg

SEQ ID NO: 9318 - DNA, 203 bp, Artificial sequence
  synthetic
ggcgcgccagtcctatgtggcagaagaatcagacctctctggcagacttcatccttgaggggctcttcgatgactcccttacccaccttttccttttctccttgaccatggtggtcttccttattgcggtgagtggcaacaccctcaccattctcctcatctgcattgatccccagcttcatacaccacgactcggaccgatg

SEQ ID NO: 9319 - DNA, 203 bp, Artificial sequence
  synthetic
ggcgcgccagtcctatggcctcccgcagcgcgggcaccctactgaccgagttcaatgccgcctacgtgccccctggactcatgcccgggtaccagggccacgtccccactgtggccttctcctttggcgctccctacggcaccaccaccctcaagtacttccaggaccaccgcaacagagccatggagcgactcggaccgatg

SEQ ID NO: 9320 - DNA, 203 bp, Artificial sequence
  synthetic
ggcgcgccagtcctcaccttagggtgtcctctgagacagactcttatttcctcaataaagagaaagactcttattccctcagcggccagctcctcgcctcccctcggccgtagccacctcagtggtcaccgtcttcaccgtggtcgcctcagcccgctcgccaccccagttgaggcgctgctggtgtccgactcggaccgatg

SEQ ID NO: 9321 - DNA, 203 bp, Artificial sequence
  synthetic
ggcgcgccagtcctcaatccatctaaatccttctcaattgctgccaccatgactcgttacttctgctgtggaagctacttcccaggataccctatctatgggaccaacttccatgggaccttcagagccacccccttgaactgtgttgtgcctctgggctctcccctgaactatggctgtggatgcaacgactcggaccgatg

SEQ ID NO: 9322 - DNA, 203 bp, Artificial sequence
  synthetic
ggcgcgccagtcctggggatctcatttctccccagggggctctaggctgtggatgtgagaaggggagcaagggaggcagatggcgacaaggaacagccccatgcccctgggcacggctcagggtgaccctggagaggcaggaacacggcccggccctgacgccagcctccgggacacaggtgcggccacgactcggaccgatg

SEQ ID NO: 9323 - DNA, 203 bp, Artificial sequence
  synthetic
ggcgcgccagtccttgccagcccatggccgagcctgccctcctccccgccgcccagatggagaggctggccccagggcccctagcctcaccgtgtcctcggatcccgcgggcccgcattgccaggcgctgcgcccagcgctgggccgacctgggctgcagctctggcccctcctcaggccgaatggatcgactcggaccgatg

SEQ ID NO: 9324 - DNA, 203 bp, Artificial sequence
  synthetic
ggcgcgccagtcctccatgacccactgttgctccccttgctgtcagcctacctgctgcaggaccacctgctggaagcccaccactgtgaccacctgcagcagcacaccctgctgccagccctcctgctgtgtgtctagctgctgccagccttgctgccgcccagcttgctgtcaaaacacctgctgcacgactcggaccgatg

SEQ ID NO: 9325 - DNA, 203 bp, Artificial sequence
  synthetic
ggcgcgccagtcctatggcaacggtgaacacagatgccacagataaagacatatccaagttcaaggtcaccttcactttggtggtctccggaatagagtgcatcactggcatccttgggagtggcttcatcacggccatctatggggctgagtgggccaggggcaaaacactccccactggtgaccgccgactcggaccgatg

SEQ ID NO: 9326 - DNA, 203 bp, Artificial sequence
  synthetic
ggcgcgccagtcctagttctgtttctttcctgcgttgatcttggacagtaactgtactatgtaaggaattgtcggtggctggcgacggtatcttagctggttttcagaaaccctcattcctcccttgactgattcaccacttgaacctcatatgacgtagaagaagcctacctatgtccccttcacatcgactcggaccgatg

SEQ ID NO: 9327 - DNA, 203 bp, Artificial sequence
  synthetic
ggcgcgccagtcctatggacaacccacaggctctgccactcttcctactcctggcctccttggtagggatcctcaccctcagagcctcttctggacttcagcaaaccaacttctcctctgccttctcttcagactcaaagagctcttcccaggggctgggtgtggaagttccctccatcaaacctccccgactcggaccgatg

SEQ ID NO: 9328 - DNA, 203 bp, Artificial sequence
  synthetic
ggcgcgccagtccttcactcactcacacacctcccccagctcacctcctccccactccagcatggccgcctccaccatgtccatctgctccagcgcctgcaccaactcctggcaggtggacgactgcccagagagctgctgtgagctcccctgcggcacccccagctgctgtgccccagccccctgcccgactcggaccgatg

SEQ ID NO: 9329 - DNA, 203 bp, Artificial sequence
  synthetic
ggcgcgccagtcctcactgctcttctgcagtagtgtcacaccactcagtgcagggcccaccaagaagaaagcagtgtcaggatccacatggcactatggtaactttgtgaaaggggacattttctccctctgaacttctcttcataaagtcattgtgcttcctcttggggatcacctgttcagtctcacgactcggaccgatg

SEQ ID NO: 9330 - DNA, 203 bp, Artificial sequence
  synthetic
ggcgcgccagtcctcctggcaccagaagggggacattccggaactagatatgaagagacttttctccctgaagttccccggacccaattagatgttgtacccaggctggttaccctggtaacaggcgtcgcggtttgtcaaggaactgagagaagaggcttaagaaaattattcaccactcataagtccgactcggaccgatg

SEQ ID NO: 9331 - DNA, 203 bp, Artificial sequence
  synthetic
ggcgcgccagtcctagggaggaggaaggatgggcggtgttggcgtagccgcagggaggtgactgaagcgagcctggcctcttgcatcctccgcctgtgtacctccctcccctttttttccgccttctgccagcagaagcagcagccgcagcacctgagccgctactgccgctcactcaggacaacgctcgactcggaccgatg

SEQ ID NO: 9332 - DNA, 203 bp, Artificial sequence
  synthetic
ggcgcgccagtcctgagttaggtgacgctgcggggcgggcggacagactgcgggacggacggtggacgctgggacgcgtttgtagctccggccccgccgttccgacccccgccgccgtcgccgccatgacggggctagcactgctctactccggggtcttcgtggccttctgggcctgcgcgctggcccgactcggaccgatg

SEQ ID NO: 9333 - DNA, 203 bp, Artificial sequence
  synthetic
ggcgcgccagtcctggaatcaggttttgaaactgacttccagagctccactgcctccctgcaccatgccctacaacttctgcctgcccagcctgagctgccgcaccagctgctcctcccggccctgtgtgccccccagctgccacggctacaccctgcccggggcctgcaacatccctgccaatgtgacgactcggaccgatg

SEQ ID NO: 9334 - DNA, 203 bp, Artificial sequence
  synthetic
ggcgcgccagtcctcggactgggaggcagggctctggctcacgcttgtaatcccaacattttgggaggacgaagccagcctcatcgcttaagcacaggagttcgaggactgggaggtggaggttgtggtgcctgtatcacctgcccttctgctgacactcctgcctgctgttcctgactacagccatccgactcggaccgatg

SEQ ID NO: 9335 - DNA, 203 bp, Artificial sequence
  synthetic
ggcgcgccagtcctgagattttggactctgtcttcagctggacactccctccctgcaccatgtcttacagttgtggcctgcccagcctgagctgccgcaccagctgctcctcccggccctgtgtgccccccagctgccacggctgcaccctgcccggggcctgcaacatccccgccaatgtgagcaaccgactcggaccgatg

SEQ ID NO: 9336 - DNA, 203 bp, Artificial sequence
  synthetic
ggcgcgccagtccttgtattggggctgacaggggggcgggttattagggctgaggatgggaggatgctcagggtattggggtcagggtggcattagcccagctcaagccgggccgggctgactcagcatcctgccccagccagcttccatccctgacacctctgcactcccttgggcagagatgggagcgactcggaccgatg

SEQ ID NO: 9337 - DNA, 203 bp, Artificial sequence
  synthetic
ggcgcgccagtcctcctgcttttggttcttacagtagtcggcgtaggccttaggtgggttcgtgcgccttctacctcgctgtttcggttttcctggctcctcggcccttttctcccctgttgcagctgggagcggacgaagcgcgaagctgggattttttactgtctcctgaagaatttaacacaaaccgactcggaccgatg

SEQ ID NO: 9338 - DNA, 203 bp, Artificial sequence
  synthetic
ggcgcgccagtcctcgctctgattgtttcgattcttccaaaatcagagacagagtgctcccggtgccatgaacggagacgatgcctttgtacggagacctagggttggttctcaaataccagagaagatgcaaaaggccttcgatgatattgccaaatacttctctgagaaagagtgggaaaagatgacgactcggaccgatg

SEQ ID NO: 9339 - DNA, 203 bp, Artificial sequence
  synthetic
ggcgcgccagtcctgactcatctcattcaccaattgcttctgacgtcctgcagtgacactccctaatgaaaaagccgctgtgccagatccttagagtgtctggtgatccctaataaaccagactgtggcctttttaacgagcagacgcccccacgaaggcagtggcagctcccaagccaggcggcacccgactcggaccgatg

SEQ ID NO: 9340 - DNA, 203 bp, Artificial sequence
  synthetic
ggcgcgccagtcctgctgtgagggttactatgctccctctttgccgccgtctcctcctcttgcccgcgcaggcacccctctggctgctcagtcctgcctcagtgtcaaaccagaagagaagtaaaattcaacaaaaatttatgtgtggagttccttcttaaaagaagaaaaaagtgattatttagactcgactcggaccgatg

SEQ ID NO: 9341 - DNA, 203 bp, Artificial sequence
  synthetic
ggcgcgccagtcctgtcaattggccaatctcttctcccagggaaaaaaaaaagtaaatcaaacctttgagaagcatttgctggttgaagtgctttctgtctagtgagggggtctgtggatttctagtttatgataaataggactttaaaaaccagggacgggagggcgagtgttcaggttctagagctcgactcggaccgatg

SEQ ID NO: 9342 - DNA, 203 bp, Artificial sequence
  synthetic
ggcgcgccagtcctggtcgcggctgtggccgggggaagtgaatggttttacccagagggccctgcgccgcctttctccgctggcaacggcgccgctccccgctcctcctccccagccatggcgttcacgttcgcggccttctgctacatgctggcgctgctgctcactgccgcgctcatcttcttcgccgactcggaccgatg

SEQ ID NO: 9343 - DNA, 203 bp, Artificial sequence
  synthetic
ggcgcgccagtcctggccgcagtggaaggagcaggcgcttgagctcgagcgacggcgctggcggagacgccggctgctcctcccctccccgccgcttttcctaaaaggattgtacaccttagaagtgcttaaggaagagtgatgaagctctgaatcgtgtcctgcagcagattcgagtgccacccaagcgactcggaccgatg

SEQ ID NO: 9344 - DNA, 203 bp, Artificial sequence
  synthetic
ggcgcgccagtcctttcctccctcccttacgtccccgagtgcggcagtaccgcctccttcccagccgcgcggcttcctccagacctctcggcgcgggtgagccctattcccagaggcaggtggtgctgaccctgtaacccaaaggaggaaacagctggctaagctcatcattgttactggtgggcacccgactcggaccgatg

SEQ ID NO: 9345 - DNA, 203 bp, Artificial sequence
  synthetic
ggcgcgccagtcctggccacaacctccattctcccagaaaagaagaaatgctcatctgaaattcatcacctctctggagtcttcaaactgaccaagcattgaaaagaacacagtttcagaaaacagtttccagtgcctctggccttcctactgaaagcagacacagagtgcatgaagaccgttcaaatcgactcggaccgatg

SEQ ID NO: 9346 - DNA, 203 bp, Artificial sequence
  synthetic
ggcgcgccagtcctgtcagccggcgctggggggggtcggtgtggggtagaatggccgctgccgccgtcacccgcgggaccccgggagcacagactccccctccccccggcccctcaggccgggggtgaccttgccccctggagccctcaccatgaataccaaggacaccaccgaggttgctgaaaacacgactcggaccgatg

SEQ ID NO: 9347 - DNA, 203 bp, Artificial sequence
  synthetic
ggcgcgccagtcctgccctggggcggagtccttaccccaaccccagcttcactgcacatagccgagcccgacgggcctcctcccatctccatcctggacacctggcggagcccgtgctgagagcctccgccagctcccatctgttccccgaggagggcggggggctcaggctggagccagagcggtagcgactcggaccgatg

SEQ ID NO: 9348 - DNA, 203 bp, Artificial sequence
  synthetic
ggcgcgccagtcctacctgcggaagccatacacccacgggagcccacacctcttggtctgggtcggccacacagagctctaccaccggctcatccacggagaggggctccgtttattcctggagagatgacgaatttgacgaagccagttcacagtcagtgcagcggttactctgggaggtggaggaacgactcggaccgatg

SEQ ID NO: 9349 - DNA, 203 bp, Artificial sequence
  synthetic
ggcgcgccagtcctcagctcattctggatgaatgaatgattacactaagtgtcctccacattcctctgtgggctcacttcatggactcactttgcgtgcttgttaaatgtgctgtgttgctcccaagaccatgtaaagcctactgaccactaacctccctcacagcagaaactagacgtcaggttaaacgactcggaccgatg

SEQ ID NO: 9350 - DNA, 203 bp, Artificial sequence
  synthetic
ggcgcgccagtcctgggatgagagggagagacaacgtgtgtcttacacatctcccaacagccgacttagatgtgatccgttctcccagagggagcaggtttctttgaacttttcctttttatgtacagcatagtgctgagcagatcactgcactgtgcaggagttttaacgacagtcaggccaacggccgactcggaccgatg

SEQ ID NO: 9351 - DNA, 203 bp, Artificial sequence
  synthetic
ggcgcgccagtcctgccgcgggtcttctcccttcactctccacatttggggatcaggtccggcacctgctgcgccagacaggccttgctgggcacgcgcctctgagagtccaaggaggtggcttccagagctgcagcacttcaggccggctccggtggagcgatcagaggtgaggggcttggctgggccgactcggaccgatg

SEQ ID NO: 9352 - DNA, 203 bp, Artificial sequence
  synthetic
ggcgcgccagtcctagcatcgcgacccgccccgtcccgtccagtctggcctgggcgccgcgggaacgctgtcctggctgccgccacccgaacagcctgtcctggtgccccggctccctgccccgcgcccagtcatgaccctgcgcccctcactcctcccgctccatctgctgctgctgctgctgctcacgactcggaccgatg

SEQ ID NO: 9353 - DNA, 203 bp, Artificial sequence
  synthetic
ggcgcgccagtcctctgagggcggccccctttccttaacagtctcctcgctacagatcgtctgctccctcagcctcgcccgagacccacttccccagtctcgcccgggtggaggtcgacgaggaggagacaagagtcacccttcctccaggcggcgccggccccctcacccgcgggtgtgtcctataacgactcggaccgatg

SEQ ID NO: 9354 - DNA, 203 bp, Artificial sequence
  synthetic
ggcgcgccagtcctcacagtgtcaagcccacagctctccaaggaggaagatggtccaggctgggagcatccccttagcagcagcctctgatcccttggccaagcaggagggaaccattagcagcctgaggagctggctggctgggagcctcggggaccgcccagccttgctcccagctcacccacaagcgactcggaccgatg

SEQ ID NO: 9355 - DNA, 203 bp, Artificial sequence
  synthetic
ggcgcgccagtcctcaacattccctcgctctggttctcgccccattgggaaactcggccccacgcttcccacttttctggatgaggtgtcccctttctccccactaaaatgtcaaataacctacggagggtcttcctgaaacccgcagaggaaaattcaggcaacgcctcgcgttgatccataatgagcgactcggaccgatg

SEQ ID NO: 9356 - DNA, 203 bp, Artificial sequence
  synthetic
ggcgcgccagtcctcctactgtagacagccttgttctacagatcctcccagaaatctctgggccaggtggaacccagggtcagagagggatgggagagagattccccaggctctcagagaagatcagcagaaagtctgcaagaccctaagaaccatcagccctcagctgcacctcctcccctccaaggcgactcggaccgatg

SEQ ID NO: 9357 - DNA, 203 bp, Artificial sequence
  synthetic
ggcgcgccagtccttgagccctgcggaacctcggcgctcggccccaccccgcccgtacctgcacttatttattgttgttatttcttaccgcggagccccgcagtcgggtcctcccgcccgctcccgcgcagcgctagcattctccagtccctcagtcccttcccgcgcggtgcgccgcagccgaggcgcgactcggaccgatg

SEQ ID NO: 9358 - DNA, 203 bp, Artificial sequence
  synthetic
ggcgcgccagtcctgagcggcccgagcatcttctgaaccgggttctggagcggcttgctggaggggctaccagggacagcgccgcctcagatatcctgctggatgacattgtccttacccattctctcttcctcccgacggagaaatttctgcaggagctacaccagtactttgttcgggcaggaggccgactcggaccgatg

SEQ ID NO: 9359 - DNA, 203 bp, Artificial sequence
  synthetic
ggcgcgccagtcctttatctcacccgggaggctgtaaaaatctccgtccttaacagtaacaccatcaggtcctatcagttaagagctgcttgttatttgcatgcattcttataattaaatctcctaacaaccctgtaagcaaaattctgtggcatctctggaatactacctgagaatttttgtgtgcccgactcggaccgatg

SEQ ID NO: 9360 - DNA, 203 bp, Artificial sequence
  synthetic
ggcgcgccagtcctggacttgccatgaggtgttgaagccttgtttcactgagttggagagactggacctaaatggcgcagcatgactttgctccagcctggcttaatttccctactccaccatcatcaacaaaggtcctgaccagcagtttgaaatcgtcattgaattttgagaagcattctgaaaaccgactcggaccgatg

SEQ ID NO: 9361 - DNA, 203 bp, Artificial sequence
  synthetic
ggcgcgccagtcctcactcttcagggagagaatgtggactttagcatttgaactgaatatttgagattgaagatttctgaataatcccccttagcacctctggtactgtaccgtaccttgcctttctgtccaggtttggtggaattgacctatatataaatggtataaagaggggaggtgggaatgaacgactcggaccgatg

SEQ ID NO: 9362 - DNA, 203 bp, Artificial sequence
  synthetic
ggcgcgccagtcctgggttatatgatctctttggctttagggaattactccataccagctctgagatttccagctcagcgatgcccccaggtccctgggagagctgcttctgggtggggggcctcattttgtggctcagcgttggaagttcaggggatgcacctcctaccccacagccaaagtgcgctcgactcggaccgatg

SEQ ID NO: 9363 - DNA, 203 bp, Artificial sequence
  synthetic
ggcgcgccagtcctagtcccgccctccttgctgtcacaggtgcagcctgtcctctccttcccctgaccagcccagcatccacatagtctacacagagctccccttgctgcccagacaagctgaaggaccacaggaaaagccatggagacttcagcatcctcctcccagcctcaggacaacagtcaagtcgactcggaccgatg

SEQ ID NO: 9364 - DNA, 203 bp, Artificial sequence
  synthetic
ggcgcgccagtccttttgtctcttcctgagaaacgagcaaacctgaaagctactctctcagcttcagagggaaaaaatggttgtagatttctggacttgggagcagacatttcaagaactaatccaagaggcaaaaccccgggccacatggacgctgaagttggatggcaaccttcagctagactgcccgactcggaccgatg

SEQ ID NO: 9365 - DNA, 203 bp, Artificial sequence
  synthetic
ggcgcgccagtcctttttgcacacacacgaatacaaagagccatacgaccttcggaccctacagcttggggcctgggctcctctgaccatcctcattgagaaaggaaagtgagtccagagaagttgatgcttcctacctgttggagcggcccagcagtgtaagcgtggttgttactgccccatccgcccgactcggaccgatg

SEQ ID NO: 9366 - DNA, 203 bp, Artificial sequence
  synthetic
ggcgcgccagtcctgtcgcgcaggtcccaccccgcctgcccgcgccgcccattggtcccgagcgcgatgacttggcgggcggagcaggaaggaaaccgctcccgagcacggcggcggcgtcgtctcccggcagtgcagctgccgctaccgccgccctctgcccgccggcccgtctgtctacccccagccgactcggaccgatg

SEQ ID NO: 9367 - DNA, 203 bp, Artificial sequence
  synthetic
ggcgcgccagtcctcccgcaatcctgctccaagagatcttaagctggaggcaccaggtctgaattccagactcctccccaccacccacacttcacctccaactggagcatgaccacagacccattcagggaggctggcggactcttcatcctggacagtcccttactgtatgtcaagtagagctgagacgactcggaccgatg

SEQ ID NO: 9368 - DNA, 203 bp, Artificial sequence
  synthetic
ggcgcgccagtcctcctgaagaccccggaagtgcaactcgaacttggtcggggcgcggatcccgagagggaaagtcataacaaccgcacgagggagttcgactggcgaactggaaggccacgcctcctcccgcctgccccctcagccctgtggctgggggcagagctcagactgtcttctgaagattgcgactcggaccgatg

SEQ ID NO: 9369 - DNA, 203 bp, Artificial sequence
  synthetic
ggcgcgccagtcctatccgccccctgcctcatccaggcttcgccccagtcagtctccggcagcttctcgcggcttcgcaagccccttcccgtgatgccccgcgcctggctgtcgcggttgccgggcaacgcgctgtccatgtcgcgggcctcgctgggactccctgggagatgaggccgcgaggtctccgactcggaccgatg

SEQ ID NO: 9370 - DNA, 203 bp, Artificial sequence
  synthetic
ggcgcgccagtcctgacgccgatgcggagctgagctggctttcctccagggctctggactccctgctgagcaagagagaaagaggcccgcccttccaccaggacgcctgaccctggggtccttcccaaacccgggtctcttccgactccgggcccaacagtttgtgcgattaaagtgaagaaacaatgcgactcggaccgatg

SEQ ID NO: 9371 - DNA, 203 bp, Artificial sequence
  synthetic
ggcgcgccagtcctgagcagcctccggccgccgccgcgcagagctgccagagtggactgcactgcttctcccagcggggcaggatggcggtttcatgtctggttggataaggccttgcctgcggaaaccagctccatccccaggccctagcagaggctcgcgtgtccccgtccccaggtcaggtcaggcgactcggaccgatg

SEQ ID NO: 9372 - DNA, 203 bp, Artificial sequence
  synthetic
ggcgcgccagtcctgggacaaggcgtcggttctcgcctgagggccaaaccttgcccctgcccaccttcctcacccccgccatttccaggactcacatccaaaggcgacagcaccaggatttgctcccgcctttggcacagaggaggacgggtccctctctcagcctggccagtctttcccagggcttgcgactcggaccgatg

SEQ ID NO: 9373 - DNA, 203 bp, Artificial sequence
  synthetic
ggcgcgccagtcctacatttgtgatcacctggtcacacacctgggcaggaggctgcccctcctccctggtttgaggaagcaggaaaaggtacccgcgagagacagccagcagttctgtggagcagcggtggccggctaggatgggctgtctctggggtctggctctgccccttttcttcttctgctggcgactcggaccgatg

SEQ ID NO: 9374 - DNA, 203 bp, Artificial sequence
  synthetic
ggcgcgccagtcctgcctgccccagcagcggcctgatctgggttccgctgattcctttcgtaaccgcaccacacccgagctacaatctctggacaaaattttaagagaaactccctcagaactcctaaaggtaaacaaaagcaggcagattgaggatggcagtcagaatatgaagtgaccatatatggcgactcggaccgatg

SEQ ID NO: 9375 - DNA, 203 bp, Artificial sequence
  synthetic
ggcgcgccagtcctcaggccctgtgtcttgctcagtccacgtgactctgctttctcatcctaggcctcaggagccgggacactccctgagtcctctgggagcccttaagccacactgagaacacagaccctgggagaagcagccagcagtgaggaatcctggaaccccttcccagggagagccttccccgactcggaccgatg

SEQ ID NO: 9376 - DNA, 203 bp, Artificial sequence
  synthetic
ggcgcgccagtcctgagtcggcgccacgagggggccgagcagggtgcggcggcggcggggcgctccggggaggccaggacagctgatggttgtggcagaaacatctcaaggtagctggtccgcccccacttccccatctacctcttgtcctccccccaacaccaccaccaccctggctcccctccctccgactcggaccgatg

SEQ ID NO: 9377 - DNA, 203 bp, Artificial sequence
  synthetic
ggcgcgccagtcctcgcctcggcctttgagccccgcccccgccgtgcaaaaacaaccagaggctgctctgcttgagggtgaagccgcctcccagttttccctccccctctacccccacccccatagttctctccaccaggtccagtgacaattggatgatgcagccttgataatcatccgattccagacgactcggaccgatg

SEQ ID NO: 9378 - DNA, 203 bp, Artificial sequence
  synthetic
ggcgcgccagtcctctcagtgaagcaacgaggatgccggggagagggaaggggctgggctctgggcggtgccaagtctgtgagggggcgcggtcaccgcccagggttcccacgaacgccaaggcggccacgtcctgctccccctggtgaagaagctgccctgggcttgtcgtcctagggtctccagaccgactcggaccgatg

SEQ ID NO: 9379 - DNA, 203 bp, Artificial sequence
  synthetic
ggcgcgccagtcctaatgttcggggtggcaccagcccactgccacagccccagtccaccatgccacccatgctgtggctgctgctccactttgctgccccggcactggggttctacttttccatcagctgccccagtggtaagcagtgccaacaggccctactctcaggcaatgatattctcctgtatcgactcggaccgatg

SEQ ID NO: 9380 - DNA, 203 bp, Artificial sequence
  synthetic
ggcgcgccagtcctcgcaccacctgctgcaaggctcgggaaggaaggcgaagatagcaccggggcatccccgggagtccgcaaggctttgcgctgcaaatccagtgctaccagtgtgaagaattccagctgaacaacgactgctcctcccccgagttcattgtgaattgcacggtgaacgttcaagaccgactcggaccgatg

SEQ ID NO: 9381 - DNA, 203 bp, Artificial sequence
  synthetic
ggcgcgccagtcctccaaacaaacttgaagatctcacagacctaatagacacggcctttcctctctgcctctggctttatgtctctttcatcctcctctgcctttcccctgcccttgatcccttctgcaggtcttggctggtttcaggaaacgggtcccatcccatggactcccactctggggagcctcgactcggaccgatg

SEQ ID NO: 9382 - DNA, 203 bp, Artificial sequence
  synthetic
ggcgcgccagtcctagcaagtccgcggtaagcgctgacgcatgcgcatagctaaccgcacccggttcagctcgcctttcttggccagaggcgccggttggactcacgggcggggcatgatggtggtgggtacgggcacctcgctggcgctctcctccctcctgtccctgctgctctttgctgggatgccgactcggaccgatg

SEQ ID NO: 9383 - DNA, 203 bp, Artificial sequence
  synthetic
ggcgcgccagtccttacccacccccctgcccgcgccgggcctcgtccgctccccggccccttccccgcgggcgtgtgggtcccgggctggggtctcggcgtccgcgatcccgagcccgctcgcttcggcccccctcaggaggctgcgaggagggtgggtttctccccagtgtagagggtggcggcggccgactcggaccgatg

SEQ ID NO: 9384 - DNA, 203 bp, Artificial sequence
  synthetic
ggcgcgccagtcctccgtctcctggcaaccagatgcaggggccatggcactcttaacaccccagggagtgaaagaagtcttccaatttcagagaccacaaggtcgggagcgcctgcggaggcttctgaactgggaggagtttgacgaacagagagactcccggaggagcatcctgctggacaccctctcgactcggaccgatg

SEQ ID NO: 9385 - DNA, 203 bp, Artificial sequence
  synthetic
ggcgcgccagtccttagaaggcagtcttgtgggtgcctcctcccccagccgcaactcaggtctgcagctgggtcctgcctccttccgagtgggccatggccggtacatggctgctacttctcctggcccttgggtgtccagccctacccacaggtgtgggcggcacaccctttccttctctggccccacgactcggaccgatg

SEQ ID NO: 9386 - DNA, 203 bp, Artificial sequence
  synthetic
ggcgcgccagtcctctcaagtgactgaagcaggcgccgctgccggggaggaaccgatgggagagaaaggccaggctgggccctgacaccgccaggactccccctccaggaaccagggggcttctcctggaagcttaaaggaaaaaatacttaaattatggtaataagaatgcacctggagctcaagatcgactcggaccgatg

SEQ ID NO: 9387 - DNA, 203 bp, Artificial sequence
  synthetic
ggcgcgccagtcctggaggaggtgaggagggtttgctgggtgggtatgggggagggggagactctgcaggagcctaattccccactctgagctcacccttctgtctgcccgggccctaccccttcccctactctcacccttataatccttttcagcactaggtcttcccgtcacctccacctctctcccgactcggaccgatg

SEQ ID NO: 9388 - DNA, 203 bp, Artificial sequence
  synthetic
ggcgcgccagtcctacctgtccaggttctgccggccccagccggaagcttactccgcggattgtgcacagttcttgaaggacttgtgccctggggctgcctggcatctgggggcctcctcagagccagggctctttctggttgaggctgagactcactggtgtcatcaggcccctccatgaatgagaccgactcggaccgatg

SEQ ID NO: 9389 - DNA, 203 bp, Artificial sequence
  synthetic
ggcgcgccagtcctggaacttcccaggcaccctgtgtggccgcactgctccctctggcccaaccatgcctctgtccagccacctgctgcccgccttggtcctgttcctggcagggtcctcaggctgggcctgggtccccaaccactgcaggagccctggccaggccgtgtgcaacttcgtgtgtgactcgactcggaccgatg

SEQ ID NO: 9390 - DNA, 203 bp, Artificial sequence
  synthetic
ggcgcgccagtcctccctgtcgcctccccggcccctgctatcccacgcaggactggcttcggccgccggggccagcagcttgcgacgtgtccctggggaggcggaatcgctgtgcgccctgagcccgggctcagcccttcgctttccagctgcgtcctgctcccggccgcccagggagcccagtggcgcgactcggaccgatg

SEQ ID NO: 9391 - DNA, 203 bp, Artificial sequence
  synthetic
ggcgcgccagtcctgcctggttgcccccagccccctccctcctcccaccttcactgtgtcccacccttcctagctttgtgcccggggtgctgagcccttccccgtcagccgggccgcgggaggagggagccgtcaccgaggagctgccgctcgctgccccgggcaggggcacagttgcaaccaaggcacgactcggaccgatg

SEQ ID NO: 9392 - DNA, 203 bp, Artificial sequence
  synthetic
ggcgcgccagtcctgccggcagtgcgtgtggtgaggcaggacatggcggaggcaggaaaagtgcccttgagcctcgggcttaccggaggagaagcggcagagtggcctctgcagcggtacgcccgctgcataccctcaaacaccagagacccacctgggccatgcctggaagctgggacagccccctgcgactcggaccgatg

SEQ ID NO: 9393 - DNA, 203 bp, Artificial sequence
  synthetic
ggcgcgccagtcctgccccgtggccacggccccaatcctggccaggcggagattctgcggacattcagggatcggcttcgtcactgagacctcaggcctctgccagccactccccctccccatacccctagtcatcctcggcaggtctcagtcccggctccatctgtgccctcgccccagccgcagctcgactcggaccgatg

SEQ ID NO: 9394 - DNA, 203 bp, Artificial sequence
  synthetic
ggcgcgccagtcctaaatggagacttaggtcccctgcaaagcagaggggaggctggggtcacagctggccactgagagacccatccccctcagcaccgtggcttcccagctctccctgtcctcctccccccgacatctgccccttccctcctaaccccaggaccaggggacccagatctggagctttgcgactcggaccgatg

SEQ ID NO: 9395 - DNA, 203 bp, Artificial sequence
  synthetic
ggcgcgccagtcctgggctgagcgaggcgtggcctcaggagcggaggacccccccactctccctcgagcgccgcagtccaccgtagcgggtggagcccgccttggtgcgcagttggaaaacctcggagccccgctggatctcctggctgccacccgcaccccccgccagcctacgccccaccgtagagcgactcggaccgatg

SEQ ID NO: 9396 - DNA, 203 bp, Artificial sequence
  synthetic
ggcgcgccagtcctgcgctggccgctcgcggagggagaggctgcagagcgagggcaggaggactacttccagcaacccagtctcctgccatgtccgaccccatcacgctgaacgtcggggggaagctctatacaacctcactggcgaccctgaccagcttccctgactccatgctaggcgccatgttccgactcggaccgatg

SEQ ID NO: 9397 - DNA, 203 bp, Artificial sequence
  synthetic
ggcgcgccagtcctgccaggaactaggaggttctcactgcccgagcagaggccctacacccaccgaggcatggggctccctgggctgttctgcttggccgtgctggctgccagcagcttctccaaggcacgggaggaagaaattacccctgtggtctccattgcctacaaagtcctggaagttttccccgactcggaccgatg

SEQ ID NO: 9398 - DNA, 203 bp, Artificial sequence
  synthetic
ggcgcgccagtcctcgagcccgccgtgcgcacagctctgcccgccgcccctggagcggatccccagccgtccctgggcgttctcccgggttctagcaaagccccccggggtgcccatcagtttccttgggtgactacagcgtgtgttttttctttcctctttcccctgcctgtgtgcccttctccaggcgactcggaccgatg

SEQ ID NO: 9399 - DNA, 203 bp, Artificial sequence
  synthetic
ggcgcgccagtcctatcttgtctccctctccttacctgcgtcctcgggggcgtgcgcaccaccccccctcccgcctaggaggggggagggccccctcttggccaccgccttcgcggcctttaaactcccctggagactgcggctactgccaccgccttgcctccactgcctcttcgcgcagcacacagcgactcggaccgatg

SEQ ID NO: 9400 - DNA, 203 bp, Artificial sequence
  synthetic
ggcgcgccagtcctgttggcagccattttgtgaagagacgaagactgagctgttttggctgcatttctggcctcgagccgcagtcagcttctccccgtagaacccggcagtaggagacttagaatcgaatctcttctccctcccgcctcctgtttttggctttttgagaaaccttatcatccaacacacgactcggaccgatg

SEQ ID NO: 9401 - DNA, 203 bp, Artificial sequence
  synthetic
ggcgcgccagtcctagacttcctgcccctgctctgcactctcaggtattccctgctcttactccaaaaagatggacccaggtccgaaggggcactgccactgtggggggcatggccatcctccaggtcactgcgggccaccccctggccatggcccagggccctgcgggccacccccccaccatggtccgactcggaccgatg

SEQ ID NO: 9402 - DNA, 203 bp, Artificial sequence
  synthetic
ggcgcgccagtcctggctcccatggccctcgggcccagcgtggtgaccccgggggatggagccgttcctcaggaggcggctggccttcctgtccttcttctgggacaagatctggccggcgggcggcgagccggaccatggcacccccgggtccctggaccccaacactgacccagtgcccacgctcccgactcggaccgatg

SEQ ID NO: 9403 - DNA, 203 bp, Artificial sequence
  synthetic
ggcgcgccagtcctccaggctctggagggcgccccggaaaccatggaagtcctcgtcctggccggataccgcgcgcagaaggaggacgagctgagtctggcgcccggggacgtggtccggcaggtgcgctgggtgcccgcgcggggctggcttcgcggagagtttgggggccgctatggcctcttccccgactcggaccgatg

SEQ ID NO: 9404 - DNA, 203 bp, Artificial sequence
  synthetic
ggcgcgccagtcctagagtgtctggtgatccctaataaaccagactgtggcctttttaacgagcagacgcccccacgaaggcaggaacctgggcaagtctggcctgcgggtctcctgcctgggacttggaacatgggtgaccttcggaggccagatcaccgatgagatggcagagcagctcatgacctcgactcggaccgatg

SEQ ID NO: 9405 - DNA, 203 bp, Artificial sequence
  synthetic
ggcgcgccagtcctggctcaagactcgcgcacgcgcaccacggcctacctgcgcctgggctgccggtgacctgggccgagccctcccggtcggctaagattgctgaggaggcggcgggtagctggcaggcgccgacttccgaaggccgccgtccgggcgaggtgtcctcatgacttctcttgtggacccgactcggaccgatg

SEQ ID NO: 9406 - DNA, 203 bp, Artificial sequence
  synthetic
ggcgcgccagtcctaaggcgagatgggcgggctgggagtgcccggcggcgggtcctcagcttcgagccgaggtgcagtgagctggtggggggaccgcgaggcgagcgcgggagcctgggcggcgagccgggtgtgagctgcctgaaaatgcactcggatgccgccgctgtcaattttcagctgaactccgactcggaccgatg

SEQ ID NO: 9407 - DNA, 203 bp, Artificial sequence
  synthetic
ggcgcgccagtccttcctgcctcggcaaccccgggccctgagggcaggccccaaccgcggaggagcaggagagggcggaggccggcgggccatgccctggtcgtcccgcggcgccctccttcgggacctggtcctgggcgtgctgggcaccgccgccttcctgctcgacctgggcaccgacctgtgggcgactcggaccgatg

SEQ ID NO: 9408 - DNA, 203 bp, Artificial sequence
  synthetic
ggcgcgccagtcctcctgagccaggaggaagcagcggcgaggtctgcgggaggcatggcgggagctccggacgagcgccggcggggccccgcggcaggggagcagctgcagcagcaacacgtctcttgccaggtcttccccgagcgtctggcccaggggaatccccagcaagggttcttctccagcttcgactcggaccgatg

SEQ ID NO: 9409 - DNA, 203 bp, Artificial sequence
  synthetic
ggcgcgccagtcctcccagccccgcgctcccaggacctcccgcccgcggagcccactcggattgctctccgcccgggtcggcggaggccccgtctcctgtacccggcgctgggactgctccgcaccgcgcggctccctttcagcagctgcgggagcatgcggaggaggccctgccggccccgcgggtccgactcggaccgatg

SEQ ID NO: 9410 - DNA, 203 bp, Artificial sequence
  synthetic
ggcgcgccagtcctgtgcattgtgcttccgctcggggaaagaccgcttccggtgcttccgtcgctccttgccgggcataatggccgcgcagcgacccctgcgggtcctgtgcctggcgggcttccggcagagcgagcggggcttccgtgagaagaccggggcgctgaggaaggcgctgcggggtcgcgcgactcggaccgatg

SEQ ID NO: 9411 - DNA, 203 bp, Artificial sequence
  synthetic
ggcgcgccagtcctctcccccagctgccgacgtggggcgggcagccgccggcggctgggagccgaggcgtcggtgcagacctggagacgggcatgggggggctgcggctgctggctgtggccctcacgtgctgctggtggccgcagggcagccagggtaagaccctgcggggcagcttcagcagcacccgactcggaccgatg

SEQ ID NO: 9412 - DNA, 203 bp, Artificial sequence
  synthetic
ggcgcgccagtcctggctgcaggcggggccggcgggggcgcagcggcccgggaggaagcagtaccttgaagagaaattggagagggagtcaattcctaggatagcagagagatggacaacagacagaatagatggagtttcacaatggtggccatgtgtctggaattggtgggttcttggtctcactgcgactcggaccgatg

SEQ ID NO: 9413 - DNA, 203 bp, Artificial sequence
  synthetic
ggcgcgccagtcctgcaggcaacatggccgagaggccggggcctccgggcggcgccgtgtccgcgaccgcgtaccctgacacccccgcggaattccctccgcacctccaggcgggtgcgatgcggcgccgcttttggggcgtattcaactgtctgtgcgccggcgcgttcggggccctggccgccgcccgactcggaccgatg

SEQ ID NO: 9414 - DNA, 203 bp, Artificial sequence
  synthetic
ggcgcgccagtcctggcatttcattgcttcccctgtccttcctttagctgtaactccggcgggcgtgttgggtgtgtcgttttaggctctgtgacccaggagcaagacgcaataagcgggtgcagtggaggtagaaacgggaaatgcagtaccctttccggaagctactccgcccctcgacagagtctcgactcggaccgatg

SEQ ID NO: 9415 - DNA, 203 bp, Artificial sequence
  synthetic
ggcgcgccagtcctcctgatcggaggagtgcgggccggagggtgatgggaccatctagcccctaaccatgggcccagaagagaagaccatcatgacagaaaggtctgcagctgttttcatccaggcctggtggcggggcatgctggtgcgacgcacactgctgcatgcagccctcagggcttggatcacgactcggaccgatg

SEQ ID NO: 9416 - DNA, 203 bp, Artificial sequence
  synthetic
ggcgcgccagtcctccctcacaggaagccggagggtcgctctgatcccgaatctcccacaggcgtgaacctgctctgctgtgtatctttgcggggtggcctgcgctgaggcctgccgcgcgcggtgagtccgcgcagacctgaccctgcgtctcgcagctcggttgaggccgccgccgccttctcgggcgactcggaccgatg

SEQ ID NO: 9417 - DNA, 203 bp, Artificial sequence
  synthetic
ggcgcgccagtcctcccggcaactttctctgcccgctcccgcgggttgggggctgccgtgccgggggctaactgggggcagcctctggagaacggcttcagagtcccggagacgcccgccacccgcagcctgcccgcggtgggcctgccgtcggatctcggcaccctctcctcccctctccccgaacccgactcggaccgatg

SEQ ID NO: 9418 - DNA, 203 bp, Artificial sequence
  synthetic
ggcgcgccagtcctggaagcagagctgtgcagctgaggcgccgccgtggagccgccttggagccaccgccccctcgccgcttcgccgctgcgttggggaacctggaccgcggcggcgccgggtttccctcatgatcccgggcgggtggcggcggcggcagaggcggcgggaggatgacctcttaccggcgactcggaccgatg

SEQ ID NO: 9419 - DNA, 203 bp, Artificial sequence
  synthetic
ggcgcgccagtcctcgcacgcgcggttagtagtcgctgctgcgcggccgccggcgggactggtctgaagagacgcggggaccaagtggcaacgacttggacatctgagctgtcactgccgaaaacaggccgcaagagagataatcaatatgcatttccaagccttttggctatgtttgggtcttctgtcgactcggaccgatg

SEQ ID NO: 9420 - DNA, 203 bp, Artificial sequence
  synthetic
ggcgcgccagtcctcggggtctccgggaagtcgcggcgccttcggatgtggcggatgcggccgtgagccggcgggggaggtgctgctgctgcctccactgtactcagacccaggtagcacaggattgtccatcctccagcagctcagtgcaacggtgtgaactcagcctgtttcagagcctccacacccgactcggaccgatg

SEQ ID NO: 9421 - DNA, 203 bp, Artificial sequence
  synthetic
ggcgcgccagtcctttccggtccctgcgggtaatagacaagaaggtcaccctggtggataaagacctcctgaaatttctaaagctggaggagttggtactgagcgccaatcgaatcaaggaggtggatgccaccaatctgccccccacactcaaggtgctggagctctacggcaatgagatcagcagccgactcggaccgatg

SEQ ID NO: 9422 - DNA, 203 bp, Artificial sequence
  synthetic
ggcgcgccagtcctgctgccttccctgtggcatcatgaagtttcgcgccaagatcaccggcaaaggctgtctagagctgttcattcacgtcagcggcaccgtcgcgaggctagcgaaggtctgcgtgctccgcgtgcgccctgacagcctgtgcttcggccccgcgggttccggcggcctccacgaggcgactcggaccgatg

SEQ ID NO: 9423 - DNA, 203 bp, Artificial sequence
  synthetic
ggcgcgccagtcctccctagctctgggccgcgcctcacatccctcccagagccgcaacaccccacccggcgggacgccctcgagcagccgctcgttgcgggcctgaagcgcagagcgcctattggccagagcggccgagggcgggaaaagtggccaacggctgcctcggccctcgggctgctgaggagcgactcggaccgatg

SEQ ID NO: 9424 - DNA, 203 bp, Artificial sequence
  synthetic
ggcgcgccagtcctgctttttgacagctgtctcttgcacagccgcagccaagtccggtgggttcgggaacctgtggcccggctctctgcgcgtccccatcccccgtggccccgaccccggccatgaagcgtatcttctcctgctccagcacacaggtggcggtggagagatggaaccgccatgatcagcgactcggaccgatg

SEQ ID NO: 9425 - DNA, 203 bp, Artificial sequence
  synthetic
ggcgcgccagtcctgacgcggagcccggcgctgagccctgcgcgcgcgcctgcgggtccgatctggacgaacgcgaggcgttctgcgagagcgaattcgcggtgaacgggatcgtgcacgatgtggacgtgctgggcgcgggcatccggctggtgaccctgctggtggatcgggacgggctgtacaagcgactcggaccgatg

SEQ ID NO: 9426 - DNA, 203 bp, Artificial sequence
  synthetic
ggcgcgccagtcctagatgggacagcttggcctacagcccggcgggcatcagctcccttgacccagtggatatcggtggccccgttattcgtccaggtgcccagggaggaggacccgcctgcagcatgaacctgtggctcctggcctgcctggtggccggcttcctgggagcctgggcccccgctgtccgactcggaccgatg

SEQ ID NO: 9427 - DNA, 203 bp, Artificial sequence
  synthetic
ggcgcgccagtcctggaagctggggacagccactcgctcgggagcagcctgagcgtttcctctccgcgtactcgagggaactctctccacgcgttcgagggaacccggaaggggccaggcgggtgagtgcggagggaagcccttgtgccatctgggagtagagccgccgagtcaggagttttagggcccgactcggaccgatg

SEQ ID NO: 9428 - DNA, 203 bp, Artificial sequence
  synthetic
ggcgcgccagtcctgtgggggcgggctcccggtcccgctatcggcggccggcgggcaggcgactcctgtcccgggtggaggcggcggagccggagccgggggagggggcagcggctgtctcacggaccacggcggcgcccgcagctcctcaccgaaacaaggagaccagtgctggtccagtggctgtgcgactcggaccgatg

SEQ ID NO: 9429 - DNA, 203 bp, Artificial sequence
  synthetic
ggcgcgccagtcctgcattggtccagtctgggttgaccccgacccgaagtggccctttccttcgcgtcctgaacttcgcttctccgtcggtgtctggtctcttcccgccggcgggctctgcggtggcgggaggagctgtactactcgtgccttagcgcacccttactttcccaggccagaaacgcgaacgactcggaccgatg

SEQ ID NO: 9430 - DNA, 203 bp, Artificial sequence
  synthetic
ggcgcgccagtccttggagcgccctgggttgcccggccggtccctgccgctgacttgttgacactgcgagcactcagtccctcccgcgcgcctcctccccgcccgccccgccgctcctcctccctgtaacatgccatagtgcgcctgcgaccacacggccggggcgctagcgttcgccttcagccacccgactcggaccgatg

SEQ ID NO: 9431 - DNA, 203 bp, Artificial sequence
  synthetic
ggcgcgccagtcctaggatccgggctggaagcctctcggagtgctgcctccagccaaggggcggccggcgagtcccagtgagagcggagggtgccagaggtagggggccgagaaacaaagttcccggggcttcctccggggccgcggtcggggctgcgcgtttgaccgcccccctcctcgcgaaggcacgactcggaccgatg

SEQ ID NO: 9432 - DNA, 203 bp, Artificial sequence
  synthetic
ggcgcgccagtcctcacacgcgcttcctctcttgagctcccgggcgtccggaggcgaaggtcccggagcgttcacgagaatccgggtcccggcgagtccggggtccgctcctccagctgcgcccagggcgcacgagccggccagcctcggggagagggcgcgggggcgctgggggttcttacgggaagcgactcggaccgatg

SEQ ID NO: 9433 - DNA, 203 bp, Artificial sequence
  synthetic
ggcgcgccagtcctcgtttccccgcggagccccggccgctgcctcccgggacagttcgcacggccacaggggcgcacggcgatgtggcctccgtccagcgcgctggcccgccggggggatgctctggcacctgtcggggtccaggcctagcatggccggcgcgttgcccgacgtcgcctccggctaggcgactcggaccgatg

SEQ ID NO: 9434 - DNA, 203 bp, Artificial sequence
  synthetic
ggcgcgccagtccttgagcgctctgccgcgggggcgcgggcacagcaggaagcaggtccgcgtgggcgctgggggcatcagctaccggggtggtccgggctgaagagccaggcagccaaggcagccaccccggggggtgggcgactttgggggagttggtgccccgccccccaggccttggcggggtccgactcggaccgatg

SEQ ID NO: 9435 - DNA, 203 bp, Artificial sequence
  synthetic
ggcgcgccagtcctgcgccgccaggcgtaggcggggtggcccttgcgtctcccgcttccttgaaaaacccggcgggcgagcgaggctgcgggccggccgctgcccttccccacactccccgccgagaagcctcgctcggcgcccaacatggcgggtgggcgctgcggcccgcagctaacggcgctcctcgactcggaccgatg

SEQ ID NO: 9436 - DNA, 203 bp, Artificial sequence
  synthetic
ggcgcgccagtcctaagtcccagtcctgctgtcccaagggactccggggtcaggtggagcaggcagggcagtctgccacgggctccccaactgaagccactctggggagggtccggccaccagaaaatttgcccagctttgctgcctgttggccatgggtgacctctcatctttgacccccggagggtcgactcggaccgatg

SEQ ID NO: 9437 - DNA, 203 bp, Artificial sequence
  synthetic
ggcgcgccagtcctggaggctcaatgacagtcgagctttggctaaggctccggggaaagggtctagccatgctgcatgtgacccggggggtctgggggtccagggtccgagtatggccactgttgcccgcgctcctcgggcccccccgggccctctcatcgctggcagccaaaatgggggagtatcgccgactcggaccgatg

SEQ ID NO: 9438 - DNA, 203 bp, Artificial sequence
  synthetic
ggcgcgccagtcctaaaaccttgaggtgattcatcttccaggctctccttccatcaagtctctcctccctagcgctctgggtccttaatggcagcagccgccgctaccaagatccttctgtgcctcccgcttctgctcctgctgtccggctggtcccgggctgggcgagccgaccctcactctctttgcgactcggaccgatg

SEQ ID NO: 9439 - DNA, 203 bp, Artificial sequence
  synthetic
ggcgcgccagtcctttttcagcctgtgatttgataaccgccgccgggtggcgtggagcgtcccgagacttcttccttcattgcagcccctcttcttttagttctagactgaagttcgaggaacgcaccacttggctgaaattaggatccagatttcccaaacttccttcggaggaaaaagccctaacgcgactcggaccgatg

SEQ ID NO: 9440 - DNA, 203 bp, Artificial sequence
  synthetic
ggcgcgccagtcctcctacgcggaactctctcgcggtaattcgaagtaccgcgcctgcgtgctgcagtagcgcctggtggcggtggcagtttgcccgcgggtgtgtgaagggagacagtgtggaggccacagggtactcgccacgatgagcagcaccttagctaagatcgcggagatagaagcagagacgactcggaccgatg

SEQ ID NO: 9441 - DNA, 203 bp, Artificial sequence
  synthetic
ggcgcgccagtcctcggctctcccacgtctacacccatcacctccagcctgagggcgcaactgagaggaactgagacccaagcagctcagtaaaggccccgcggcgagggcatcggctctcgccggcggatgacgagctgtatcagcggacgcgcatctctctgctgcaacgcgaggccgctcaggcacgactcggaccgatg

SEQ ID NO: 9442 - DNA, 203 bp, Artificial sequence
  synthetic
ggcgcgccagtcctgccattttcgcgggcggaggcggcccggcgggccctgggagagctgggacgggcggcggccgggtggcctcggccacccgctaattgcatcttttcccggcgtctcgtctgcagagggagcactatgtctgcggaagtccccgaggcagcctccgcggaggagcagaaggaaatcgactcggaccgatg

SEQ ID NO: 9443 - DNA, 203 bp, Artificial sequence
  synthetic
ggcgcgccagtcctcgggggcgggacttcagcggaggccggagcgaggcgtcgggatgcagcgccccgggcccttcagcaccctctacgggcgggtcttggccccgctgcccgggagggccgggggcgcggcctccggcggaggagggaacagctgggacctcccgggttcccacgtgcggctgccggcgactcggaccgatg

SEQ ID NO: 9444 - DNA, 203 bp, Artificial sequence
  synthetic
ggcgcgccagtcctaccattagtacctaggaggcagggatcagaggaagtagattcagaggtaaggagaattttggggctatactttcaagaaagtcgtgttcgggacccaggaggtatgggtcagaaggaaaggagcacagcagatactctgccggatctggaggaatggaagtcagcggcgggtctcgactcggaccgatg

SEQ ID NO: 9445 - DNA, 203 bp, Artificial sequence
  synthetic
ggcgcgccagtcctgagcctgagggaggggtcggcctgcgggtagccagaggctggggcggctgtggagcctgtggtgggagcggcattgtggggcagggaaaaggtgagccgagccgacggaggggacgcgctgcggggcgcccccagtctatggagcggggtaagatggcggaggcggagagcctgcgactcggaccgatg

SEQ ID NO: 9446 - DNA, 203 bp, Artificial sequence
  synthetic
ggcgcgccagtcctggatccgaaccccggcggctgcgtgcttataggcgcagacgtcagagagcccgcggcttaaagcgcgtcgcctggctagcgccaccccctagccttcttcaaggcctccagggctgggcccaagcgcccgtcgacggcaccctgggcccagaggactcgcgggcctcatctccacgactcggaccgatg

SEQ ID NO: 9447 - DNA, 203 bp, Artificial sequence
  synthetic
ggcgcgccagtcctgtggcggctgaagcgccgccggcggggctcactgtggtggtgtgagtgggaggcggcggcgctggtggctgcagctggggtgaggcgcgaggcggcgcactcgacggctgactggagcagcggtaaaggcgaggatggagaccgaaggatataagtcaaagagtacagcagaaacgactcggaccgatg

SEQ ID NO: 9448 - DNA, 203 bp, Artificial sequence
  synthetic
ggcgcgccagtcctgcggggaagtggcggctgaagcgccgccggcggggctcactgtggtggtgtgagtgggaggcggcggcgctggtggctgcagctggggtgaggcgcgaggcggcgcactcgacggctgactggagcagcggatataagtcaaagagtacagcagaaaatgtctactgaagggaccgactcggaccgatg

SEQ ID NO: 9449 - DNA, 203 bp, Artificial sequence
  synthetic
ggcgcgccagtcctgctctcctttcccgaacctcccggggtgcagcctagagccctcccgcgcggctgactccagagtagaggaagggaggcggcctccggctggtcccccgaagccctcgctgccccgcagatgcggatggccagccagtagcgggcggtggccccgcgtcccgggagcgcacagcacgactcggaccgatg

SEQ ID NO: 9450 - DNA, 203 bp, Artificial sequence
  synthetic
ggcgcgccagtcctcgagcgtgtcgctcccagtgcgcaagtgcagcaggtggctgcacggggggcgcgggaggaggaggaggaggaggaggaggctggggtggggccggcggcaagtgctgtgatgcggttccggggaggggccgtcgggtagaggctgaataccagtttccgagcggcaaggcagcgcgactcggaccgatg

SEQ ID NO: 9451 - DNA, 203 bp, Artificial sequence
  synthetic
ggcgcgccagtcctgacgacctcgaggcccttagttgactgggaccggaagtggcgtgtgctcggcctttctgtgttcctggcccgcggccgtcgggtgtgagctgcgccgaccgctctgagggttcgtggcccaccgctccttcgcggtccctgccgccaccgtccacgctcagcgttgtagagaagcgactcggaccgatg

SEQ ID NO: 9452 - DNA, 203 bp, Artificial sequence
  synthetic
ggcgcgccagtcctctgggaaccggcgggagggcgcctcctcctcccccgccctctctgctgaggatggaagtgacgaaagcagccgaggaggtcacttcctgctggggtggatgaggaggagccggagacgccgcggaggagacgggaccgaagagggaccgtgccgggaagagcaggcgggtgaaacgactcggaccgatg

SEQ ID NO: 9453 - DNA, 203 bp, Artificial sequence
  synthetic
ggcgcgccagtcctgcgcacgcacgcccaggggagttggggttcgcagggggttgttttcggctctgaagaggtccccgcccaaccttcaaaattctgtccaaaagcagacaagaggatcgccccgcgctgagccggctggtgggcagcaggaggcgcctgatcgccgccggggcgctgggggtggtgcgactcggaccgatg

SEQ ID NO: 9454 - DNA, 203 bp, Artificial sequence
  synthetic
ggcgcgccagtcctgtctggtccgtgcgcgatcacggcccggcgcgtggctcgggctcgggcggagctggagacgtgtggagctgttcgaggactcgcgggtgtgcagtgcacctatgatatgtgttttagaaatagccgttaaactttggtttgaatgaagaatgtctctcaatccacctatatttccgactcggaccgatg

SEQ ID NO: 9455 - DNA, 203 bp, Artificial sequence
  synthetic
ggcgcgccagtcctaagtaagatggcggcgaacgcacttccggcgtgtgtccttacgggtgcgtccgggcggctgcttgcaggtgccacccagcgggttccagcttgtttgctgcatagattacaacggtgatggcgggcaaggggtccggctggagccgggcggctctcctccagctccttctcggccgactcggaccgatg

SEQ ID NO: 9456 - DNA, 203 bp, Artificial sequence
  synthetic
ggcgcgccagtcctttggcggaagagtgtcccgcctcttccgctctacagcggaggtggctgtggcggtggcgctggtggctgcggcggcggcggcggcagcggcgctcgagcggttcctgtcagggtcagccggcgggccccctgggtggtccacctgcaaatcgcggagcggcgccccagggatcgcgactcggaccgatg

SEQ ID NO: 9457 - DNA, 203 bp, Artificial sequence
  synthetic
ggcgcgccagtcctatgtggccggccggcgcgggcaccaagctgccctgtccccgagactctgcgctccggcgggcggctttctctgggaacctcacggccctgccctctcacctcgtgcccgccggccgcagcgtccgggtcttcatcagcgccaaccctgaagatacgggagcagaaagacaggcgcgactcggaccgatg

SEQ ID NO: 9458 - DNA, 203 bp, Artificial sequence
  synthetic
ggcgcgccagtcctggaggagcggcccagagcgcgcagctagggcactggcgaaaccccgggacagtccctctccgtgcgggggcggcgcagagcagtcccatccccggggtcccgggcgcggctgactgccggctggttccctgcgcgcagtagctccccgagccgggctgcaccggaggcggcgagcgactcggaccgatg

SEQ ID NO: 9459 - DNA, 203 bp, Artificial sequence
  synthetic
ggcgcgccagtcctcgccccctccgacgccaccgaggtagcggcttcacctttaaggcggcgcgggggctgctgggaaggccggcgggatggaggcggcgggaccggctcgcgggtgcgggtccgggtgaagcgggaggcagccagagtcggagccgggcccgagcaccaggcgcagacgccacagcccgactcggaccgatg

SEQ ID NO: 9460 - DNA, 203 bp, Artificial sequence
  synthetic
ggcgcgccagtcctgtgtcagttcgtccggcttcctcacagcccctcactcccggcggctgacagcagcagcggcggcggcgggcggcgcctggcgtttcgaggctgagcggcaccggggttggggcgcggaggaggagcagcagcgggaggaggagccgtgtgccctggcactgagcggccgcggcccgactcggaccgatg

SEQ ID NO: 9461 - DNA, 203 bp, Artificial sequence
  synthetic
ggcgcgccagtcctatggcatgggagaatcagaccttcaactctgacttcatcctcctgggaatcttcaatcacagccccacccacaccttcctcttctttctggtcctggccatcttttcagtggccttcatgggaaactctgtcatggttctcctcatctacctggacacccagctccacaccccccgactcggaccgatg

SEQ ID NO: 9462 - DNA, 203 bp, Artificial sequence
  synthetic
ggcgcgccagtccttgctacacaccactctggcttacgcttccagctaacagcggtttgtctgtgtttctggactgaagtgactgatgaaaaacagtagtcaagtctggagggtgattccctttcagttcacttgcctttcagttctggggaaattagaagatttgctctctctctctgcttcttagacgactcggaccgatg

SEQ ID NO: 9463 - DNA, 203 bp, Artificial sequence
  synthetic
ggcgcgccagtcctggggtctacggcctaggggccggggaagtttgcgccgccgcgaccagtgctgcgatcccgagccgggctccagccccgaggaccaggggtcgggcgggcctgcctacggaaccccgcgggccagcagcagtcgtctcgcgtcctcctgcttggaaaagtgtttaagcttctaaacgactcggaccgatg

SEQ ID NO: 9464 - DNA, 203 bp, Artificial sequence
  synthetic
ggcgcgccagtccttcagccgaggggctgttggggaactctctgcaggcacagggcacctggtgactgggaagcttctgtttgtgtggacttcttgggaacagcgtcctggtgtgggccaggaggagaggactggagcaccccaggctctgacttcgtgctcctgggatcgtggtgcattgcctggcccgactcggaccgatg

SEQ ID NO: 9465 - DNA, 203 bp, Artificial sequence
  synthetic
ggcgcgccagtccttcagggcttcccctttcttggtcatcgatccctagagctctggctctttctcttcttggggaactgcttaacgtctacagcaaggcctaataggggacctgagggcacagtcctcaggatgtttcggggagaataggagccagaacctgagcccctaagccattcccctcaccacgactcggaccgatg

SEQ ID NO: 9466 - DNA, 203 bp, Artificial sequence
  synthetic
ggcgcgccagtcctgggaccccatttctgtgctcatctgcctccttggcaatataaagagcaagcactgaggccccgcctcagagcaccccaaacttgacgccatgaagatcccggtccttcctgccgtggtgctcctctccctcctggtgctccactctgcccagggagccaccctgggtggtcctgcgactcggaccgatg

SEQ ID NO: 9467 - DNA, 203 bp, Artificial sequence
  synthetic
ggcgcgccagtcctcaggtcttggaagaggctgggggtcccggccttgtgccttacctgcgcccggaggtcgcctccttcttgggagaggatggggacgtggcatagccacccacgcgccgcgggggtcccgagccattaaggggcgtcctggtgggaaggcctttcaagagctgacacactggagggcgactcggaccgatg

SEQ ID NO: 9468 - DNA, 203 bp, Artificial sequence
  synthetic
ggcgcgccagtccttcgtgaagatagagatggggtttcaccatgttgcccaggctggtcttgaactcagggtccaaacgatccacctaccttggcctcccaacgtgccaggattacaggcatgagccaccacacctggtccatcttgataatttcatactctggcttggcaaagactgaagggaagcccgactcggaccgatg

SEQ ID NO: 9469 - DNA, 203 bp, Artificial sequence
  synthetic
ggcgcgccagtcctatttgtcaaactgaagaaacccctgaagaagcagtggtgggcaggcgccgacgctgcggcttccagagcattttggcaaatcaaagccagggaccgttgctgggcctcatttccgcaacttttcggctccgaactgcttctttgacttagaagatatcttatcctgccgttgtacgactcggaccgatg

SEQ ID NO: 9470 - DNA, 203 bp, Artificial sequence
  synthetic
ggcgcgccagtccttcccggggctacgaggcggaagcgaaggcagacgcagtctccgtcgttgacgttagtcgcagtcttcgctgctaacgttttgttatgagttgctaaaatggtgaaatgctgctccgccattggatgtgcttctcgctgcttgccaaattcgaagttaaaaggactgacatttcacgactcggaccgatg

SEQ ID NO: 9471 - DNA, 203 bp, Artificial sequence
  synthetic
ggcgcgccagtcctctctgatgccttcaggagcttgggcctctcctgctccactcctaaacttcagcttctcagcaaacaggcctcccaagtccctgcttctccctctcaggccttgctaacctcaccagctctagggcctggccaggcctcccaggctccctcctccaccccaaccccttctcactccgactcggaccgatg

SEQ ID NO: 9472 - DNA, 203 bp, Artificial sequence
  synthetic
ggcgcgccagtcctatgcgctccgagggtgcggcccccgggccggcggcgccgctgtgcggggcgctgagcctgctgctgggcgcgctgctgggcaaagtgatagagggtcacggggtcacagacaacatacagagattctcctcactgccaccttacctacctgtgagctaccacatcctcagagcacgactcggaccgatg

SEQ ID NO: 9473 - DNA, 203 bp, Artificial sequence
  synthetic
ggcgcgccagtcctttattctggacagttactcttaagaaagttgtcagaagaaacgcatctgcctttttttccaggtgaactgccgtgagttgtccagcatgatagtgtttattttcttggctatggggttaagcttggaaaatgaatacacttcccaaaccaataattgcacatatttaagagagccgactcggaccgatg

SEQ ID NO: 9474 - DNA, 203 bp, Artificial sequence
  synthetic
ggcgcgccagtccttggacaaccatcagggagccaggacacagaggggcagagcaagtcagcattggcgccccttcctcagatccctatcatcttgggaaacagtagcccagaggttcaggaagatgttaacttaaatgttcggggtgccccagtctgttcagcatggctgaaatccacactccgtatcgactcggaccgatg

SEQ ID NO: 9475 - DNA, 203 bp, Artificial sequence
  synthetic
ggcgcgccagtcctaactccggctacgggggcccgaagggaccgtgaggcgcagatttgagccgctgttgagatgattcctttccgttcgcggaagagatggggaaactgagggccgcccagtatgcttgctctcttcttggccatgcgctgcagaggcatggagccagtcctgagttacagaaacagcgactcggaccgatg

SEQ ID NO: 9476 - DNA, 203 bp, Artificial sequence
  synthetic
ggcgcgccagtcctagttgaaacatcctcctacactggagctttataaatattttaaagacaaggattggattagatttgacattagaaatgtaccataatacagaaggcaatggacacctaaagaacagaatgaaaaccttcttaggaaatgaagcttgacacttcacccaccaggccaccacaagacgactcggaccgatg

SEQ ID NO: 9477 - DNA, 203 bp, Artificial sequence
  synthetic
ggcgcgccagtcctgatgctgcgggctggtacattccccacttgcaaaactctgtggggctgggttcctctcttttctttccaaatatcccaggaagtggatggttttatccaaattcagcagacgagtaaaaagagtcttcgggaggtgcaatagctttctaggaatgaggatattcttcaaggaaacgactcggaccgatg

SEQ ID NO: 9478 - DNA, 203 bp, Artificial sequence
  synthetic
ggcgcgccagtcctctgctctgtggtacttcctctctggctgatttagcaaacagcacctagacctggggccaggcctttggcagtgggacagatccagggataggctacaccaccctgccctgaccctgggattggcatcagcttccaaccagttcctgccaaagcttgtaagtcctcccgacggcccgactcggaccgatg

SEQ ID NO: 9479 - DNA, 203 bp, Artificial sequence
  synthetic
ggcgcgccagtcctcacgcggggcccagctggactgccgcgggggattctgggccaagatggcagcaatgaggaaggcgcttccgcggcgactggtgggcttggcgtccctccgggctgtcagcacctcatctatgggcactttaccaaagcgggtgaaaattgtggaagttggtccccgagatggaccgactcggaccgatg

SEQ ID NO: 9480 - DNA, 203 bp, Artificial sequence
  synthetic
ggcgcgccagtcctgcctctggggttttatattgctctggtattcatgccaaagacacaccagccctcagtcactgggagaagaacctctcataccctcggtgctccagtccccagctcactcagccacacacaccatgtgtgaagaggagaccaccgcgctcgtgtgtgacaatggctctggcctgtcgactcggaccgatg

SEQ ID NO: 9481 - DNA, 203 bp, Artificial sequence
  synthetic
ggcgcgccagtcctgcagattctgtggttatactcactcctcatcccaaagaatgaaatttaccactctcctcttcttggcagctgtagcaggggccctggtctatgctgaagatgcctcctctgactcgacgggtgctgatcctgcccaggaagctgggacctctaagcctaatgaagagatctcagcgactcggaccgatg

SEQ ID NO: 9482 - DNA, 203 bp, Artificial sequence
  synthetic
ggcgcgccagtcctatataaggagcgtgggccaggcctgagtattcagcgatggcatttgcatggtggccctgtctcatcttggctctgctctccagcttggcagcctctggcttcccgagaagcccctttcggctgcttgggaaacggagcctcccggaaggggtggccaatggcatcgaggtctaccgactcggaccgatg

SEQ ID NO: 9483 - DNA, 203 bp, Artificial sequence
  synthetic
ggcgcgccagtcctgctggtcctatcccactgggaccgtcgctgccactcagccagagagccagcatcttggcaagggctgggcctggagtgaagctggaagggctagcatggagagcctgtcacctgggggaccacctggccacccttaccagggggaggcctctacctgctggcagctcacagtgacgactcggaccgatg

SEQ ID NO: 9484 - DNA, 203 bp, Artificial sequence
  synthetic
ggcgcgccagtcctattgcagaagcctatgagttgattaattctaacaactggatactgtggtttagggcttggaagatgaaaaggaggcctctgagaatgaaacagacatggaagaccccagagaaatccagactgattcttggcgtaaacggggagagagcgaggaaccgtcatctcctcagtccccgactcggaccgatg

SEQ ID NO: 9485 - DNA, 203 bp, Artificial sequence
  synthetic
ggcgcgccagtcctatggttgagcccttcttgggaacctggaagctggtctccagtgaaaactttgaggattacatgaaagaactgggagtgaatttcgcagcccggaacatggcagggttagtgaaaccgacagtaactattagtgttgatgggaaaatgatgaccataagaacagaaagttctttccgactcggaccgatg

SEQ ID NO: 9486 - DNA, 203 bp, Artificial sequence
  synthetic
ggcgcgccagtcctgcctagcccacgtccagcgcctgcccggccgccgcttcccgccaccctgccctgcccacccgccaggtactaccattaaagataccttcttctcagcaaatctatgataaaaaatataagtaacagaagaagaaataactgttatttgtcaagtgacaagcttttaatgtcagacgactcggaccgatg

SEQ ID NO: 9487 - DNA, 203 bp, Artificial sequence
  synthetic
ggcgcgccagtcctgctccgcagctgggaatcacgggactagccttcgtttccttggcaacgcagtacacaagtgctagccctagcagctcgcgatgtgcttcagcagagcagacgctgcggataactacccttttggaacatgtcaacagaggaaactttttcctcacttccatcccccgaatttgacgactcggaccgatg

SEQ ID NO: 9488 - DNA, 203 bp, Artificial sequence
  synthetic
ggcgcgccagtcctgactggcactttttcttttttctcagcaaactgtacaaaaccaaatctctttttgattttcaaggaaactaggttcctgccaaattttgaatctggacaataaacagacactttgtcctagcatctttctggaatcatttcgggatattttccacaagcaacacagaaacaggacgactcggaccgatg

SEQ ID NO: 9489 - DNA, 203 bp, Artificial sequence
  synthetic
ggcgcgccagtcctgggaatatgagtgatggtgcctcaaagcagtaactttttgcttagagcttgagagtcaaagttaaggacccacatgtatacttcggctctagcgagtctaaggatgataatatggatacaaaatctattctagaagaacttcttctcaaaagatcacagcaaaagaagaaaatgcgactcggaccgatg

SEQ ID NO: 9490 - DNA, 203 bp, Artificial sequence
  synthetic
ggcgcgccagtcctccggaagcctcgaggtttagtcccgcccccctctcctcgctgcttaggctccgcggcctccaagctgtagctatgacggcgcgcgggactccgagccgcttcttggccagcgttctccacaacggactgggtcgctatgtgcagcagctgcagcgtctgagcttcagcgtcagccgactcggaccgatg

SEQ ID NO: 9491 - DNA, 203 bp, Artificial sequence
  synthetic
ggcgcgccagtcctctgtgggtctgtaggttaagggagaagatggcggcgctaggggaacccgtgcggctggagagagatatttgtagagcaattgaattattggaaaaactacaaaggagtggagaagtaccaccacagaaacttcaggctttgcaaagagtccttcaaagtgaattctgcaatgctcgactcggaccgatg

SEQ ID NO: 9492 - DNA, 203 bp, Artificial sequence
  synthetic
ggcgcgccagtcctcagaggagaaggggaggaacaggaagcctccagctagtcgtttggaatctggcaaccatttctgtcagctttctcattcctagattgatgcagattgcttaattccttgagcttaaccagctcgaaaaagcagtggaagcagctcacacatttttcgtggctaaccctgagcaccgactcggaccgatg

SEQ ID NO: 9493 - DNA, 203 bp, Artificial sequence
  synthetic
ggcgcgccagtcctatcctcagtctcccagttcaagctaatcattgacagagctttacaatcacaagcttttactgaagctttgataagacagtccagcagttggtggcaaatgaagccaggctgtgcggcaggatctccagggaatgaatggattttcttcagcactgatgaaataaccacacgctacgactcggaccgatg

SEQ ID NO: 9494 - DNA, 203 bp, Artificial sequence
  synthetic
ggcgcgccagtcctgacaaagacctgcgccggcgcgcgggactctgcgtgaggcgagcgccggggctcccggagcggatccctacctgtttcaaggacctgccagtctgagaagcttcttgtcataaggccatccaggggccacgcacccctaccttgccagcctccagcatgcaggataccgtaacgcgactcggaccgatg

SEQ ID NO: 9495 - DNA, 203 bp, Artificial sequence
  synthetic
ggcgcgccagtcctcctgtgagctccacctgccccagttctcctggctttaacccctccttggccaaggccagggttgcctgcgggagccaggtgtccgctctccacacctttcacagccccagccctcagagcaacctcagcccagcccagcccagctccagctccagctccagcccgggccccatccgactcggaccgatg

SEQ ID NO: 9496 - DNA, 203 bp, Artificial sequence
  synthetic
ggcgcgccagtcctaaagtggaagcaaacagcctgcgagcagagcctcctgaggtgtatttcgggtcttgctggggctgagagagaccacagccctttggggggtacaaacaagagttcagttgctgtgaattctgccactgtgcccagctctgaagcctcagctcttgccaaacagacccgagaccccgactcggaccgatg

SEQ ID NO: 9497 - DNA, 203 bp, Artificial sequence
  synthetic
ggcgcgccagtcctagcagtaccccgtctcgctcggttccgcggcggccacgctccgggagacttccggcagggcgggcgcggggtcttggcgaacggtcttcggaagcggcggcggcgcgatgaccacgctacgggcctttacctgcgacgacctgttccgcttcaacaacattaacttggatccaccgactcggaccgatg

SEQ ID NO: 9498 - DNA, 203 bp, Artificial sequence
  synthetic
ggcgcgccagtcctgtatgacgtactggtcggtagtaaagattaatatgtaagaaatgtggagctaggatcaagtcatactccacagcctgcctggcaaactatgttttacttctgactttgctctctcgctgagaacattaatctgtcaagctggcgggctcctttgatagcaactttcccaggggccgactcggaccgatg

SEQ ID NO: 9499 - DNA, 203 bp, Artificial sequence
  synthetic
ggcgcgccagtcctagcctcagccttgcctctccccctcttgctttatctcctcatttctgtgtgcaggcgagcttcttggcctaagggcaggaagagatggcagcgggggagacgcagctctacgccaaggtctccaacaagctcaagagccgcagcagcccctcgctcctggagcccctcctggcccgactcggaccgatg

SEQ ID NO: 9500 - DNA, 203 bp, Artificial sequence
  synthetic
ggcgcgccagtccttagagaggaggttcacaaacacccacgtagctgcagccacttatcactgcacctcttgccaaagtgcggtccacatacgtgcaatgagaaaggattaaagggacttgtttgataacacacgcaaaactatatttcctttggcttcaaagctctctcaccatattttgggaagttcgactcggaccgatg

SEQ ID NO: 9501 - DNA, 203 bp, Artificial sequence
  synthetic
ggcgcgccagtcctatggagcttcatgtcctcgtgcaggaagtactcatcgactgatgtggcagactttgctccctggcaaaactaaagaactctcctattcatggaggcgaacactgaggatgctttccacatgaaccctgaagtgaacttctgatacatttcctgcagcaagagaaggcagccaaccgactcggaccgatg

SEQ ID NO: 9502 - DNA, 203 bp, Artificial sequence
  synthetic
ggcgcgccagtcctagccgcgggtacccctcgctggtccgctgggctgccgtccagcgggagagacaaaagtcgcaagggaaggggaaaaacgaactgagtttgtgtcactgtcttggtggacttttcgagctaacctgtatttgagaaaaacttcagtctcttgggaaaggagaggcagtgacaaaacgactcggaccgatg

SEQ ID NO: 9503 - DNA, 203 bp, Artificial sequence
  synthetic
ggcgcgccagtcctgtacttcatagactttatcatacttcgtagcatccagtatgttttctttgctaagattattgattttgtattgaagggtcccatgtccatcgttttcaatgctttatctccagggttggagcatgcctgctgtggcagaggtaaaacttcgagatgatcaatatacactggaaccgactcggaccgatg

SEQ ID NO: 9504 - DNA, 203 bp, Artificial sequence
  synthetic
ggcgcgccagtcctcctgaagaggggggaaaggcatttctgtgctcttcctggtaaagtgtttgaaaatgaacattcagaagaaaacctaaagcacctgaaatgcacaggggacgagaatgagagctgaacaaaaggttcatcctcagttttctccatgcccatgggaagctgtttacccggattgggcgactcggaccgatg

SEQ ID NO: 9505 - DNA, 203 bp, Artificial sequence
  synthetic
ggcgcgccagtcctatacatgtgacgtccacactgacagtgccctcctgtgggcatggctcaggttgtgcgcagttcctggcacactggctgtaactccgcccctttctctccctctcagtaaagcaagattacgcggtgacatgcctcacagctgatcacgacacacggggatggagagcaagagttcgactcggaccgatg

SEQ ID NO: 9506 - DNA, 203 bp, Artificial sequence
  synthetic
ggcgcgccagtcctttcatggtgactgggacgagtaggtttcactgtttctcataggagacttgacagcttaaagtaaaaacaaattattttcgtcaaagtttttttttttctcttaactgatttttagcaaacctcagactgagacacaggactcaacggtgtattcctggaaggcaaggtgctatacgactcggaccgatg

SEQ ID NO: 9507 - DNA, 203 bp, Artificial sequence
  synthetic
ggcgcgccagtcctaatgaggagtgatcatggctacctcagagctgagctgcgaggtgtcggaggagaactgtgagcgccgggaggccttctgggcagaatggaaggatctgacactgtccacacggcccgaggagggctgctccctgcatgaggaggacacccagagacatgagacctaccaccagccgactcggaccgatg

SEQ ID NO: 9508 - DNA, 203 bp, Artificial sequence
  synthetic
ggcgcgccagtcctagcctgtgcaagtgatttgggagaggaaggggagatgatgtaactggttcggcatgttcccgtcttggccaacatgccttgaattggaacgctacctacagacggagccccggaggatctcagagacctttggtgaggacttggactgtttcctccacgcttcccctcccccgtcgactcggaccgatg

SEQ ID NO: 9509 - DNA, 203 bp, Artificial sequence
  synthetic
ggcgcgccagtcctgacttctgccctctaaagactaaggcctaattccactggtttctttgaattccgtggtcctaagtccattttcagacaaagtttctgtggaaagacctacggacaaagacatctctccttggcagagtgagctaggattaccagctcttcagccgcagctgaaggcgggagtcccgactcggaccgatg

SEQ ID NO: 9510 - DNA, 203 bp, Artificial sequence
  synthetic
ggcgcgccagtcctcaccattcctttctcacctggcacaatctcagatttttagactctgaggagcagttggagctaatccacattatggaaatggaaaccaccgaacctgagccagactgtgtagtgcagcctccctctcctcctgatgacttttcatgccaaatgagactctctgagaagatcactcgactcggaccgatg

SEQ ID NO: 9511 - DNA, 203 bp, Artificial sequence
  synthetic
ggcgcgccagtcctatagcaaaacccaaaacaacagcagatgatatcttccaagtgtctgctcgggacacggcttcagccctctgtggtcccctctccccggggggctttgggattcttgtcaagctccttcaagagcctgcaagcacttaaccagccacccagagttccctcactgaagatctgagccgactcggaccgatg

SEQ ID NO: 9512 - DNA, 203 bp, Artificial sequence
  synthetic
ggcgcgccagtcctacgagaaggctgcctgatcagagagtccctgaagaagattctgtggctacaggcttcagcagagtgtgagggagaccccggttatttcctcagctatttccaccaaatcctcctgtctttcgtggccaacaccccaggcaaggcttggggcccccgtctgctgctggacgagcccgactcggaccgatg

SEQ ID NO: 9513 - DNA, 203 bp, Artificial sequence
  synthetic
ggcgcgccagtcctcagtgagaaaagcaagagaataagctaatactcctgtcctgaacaaggcagcggctccttggtaaagctactccttgatcgatcctttgcaccggattgttcaaagtggaccccaggggagaagtcggagcaaagaacttaccaccaagcagtccaagaggcccagaagcaaaccgactcggaccgatg

SEQ ID NO: 9514 - DNA, 203 bp, Artificial sequence
  synthetic
ggcgcgccagtcctatgcctggtcagaactacagaaccatatctgaatttatcctctctggcttctcagccttcccccagcagctcctgcctgtcttgttcctgctgtacctcctgatgttcctgttcacattgcttggcaaccttcttatcatggccacagtttggattgaacgcagactccacacacgactcggaccgatg

SEQ ID NO: 9515 - DNA, 203 bp, Artificial sequence
  synthetic
ggcgcgccagtcctatgccccaaattcttatattcacatacctgaatatgttttacttctttccccctttgcagatcttggcagaaaacctcaccatggtcaccgaattcctgttgctgggtttttccagccttggtgaaattcagctggccctctttgtagtttttctttttctgtatctagtcattcgactcggaccgatg

SEQ ID NO: 9516 - DNA, 203 bp, Artificial sequence
  synthetic
ggcgcgccagtcctatgggggatgtgaatcagtcggtggcctcagacttcattctggtgggcctcttcagtcactcaggatcacgccagctcctcttctccctggtggctgtcatgtttgtcataggccttctgggcaacaccgttcttctcttcttgatccgtgtggactcccggctccatacaccccgactcggaccgatg

SEQ ID NO: 9517 - DNA, 203 bp, Artificial sequence
  synthetic
ggcgcgccagtcctatggcaaatctgagccagccctccgaatttgtcctcttgggcttctcctcctttggtgagctgcaggcccttctgtatggccccttcctcatgctttatcttctcgccttcatgggaaacaccatcatcatagttatggtcatagctgacacccacctacatacacccatgtaccgactcggaccgatg

SEQ ID NO: 9518 - DNA, 203 bp, Artificial sequence
  synthetic
ggcgcgccagtcctatgttcctttacctttgcttcatttttcagaggacatgcagtgaggagatggaagaggaaaatgcaacattgctgacagagtttgttctcacaggatttttacatcaacctgactgtaaaataccgctcttcctggcattcttggtaatatatctcatcaccatcatggggaatcgactcggaccgatg

SEQ ID NO: 9519 - DNA, 203 bp, Artificial sequence
  synthetic
ggcgcgccagtcctactcaaaatggcggcggcggcgtcagcatcagcggcctcctgcccgtatctatcgtggcggcgacgggacccgcctccctgggcgccggagtcatgtgacccacacaatggctgagtggctactctcggcttcctggcaacgccgagcgaaagctatgactgcggccgcgggttcgactcggaccgatg

SEQ ID NO: 9520 - DNA, 203 bp, Artificial sequence
  synthetic
ggcgcgccagtcctatgcactttctttgccaaaggcaaacgcagaacgtttcagagccatgaggatgcttctgcatttgagtttgctagctcttggagctgcctacgtgtatgccatccccacagaaattcccacaagtgcattggtgaaagagaccttggcactgctttctactcatcgaactctgccgactcggaccgatg

SEQ ID NO: 9521 - DNA, 203 bp, Artificial sequence
  synthetic
ggcgcgccagtcctgcagacacgaagcctcccgggtggcttacagacgctgccagcatcgccgccgccagaggagaaatgtctgaagtaagacccctctccagagacatcttgatggagaccctcctgtatgagcagctcctggaacccccgaccatggaggttcttggcatgactgactctgaagagcgactcggaccgatg

SEQ ID NO: 9522 - DNA, 203 bp, Artificial sequence
  synthetic
ggcgcgccagtcctcctggccactcttcctccatcagcctggctggcagcagccttggactccgcccgtggagccctgggcctgttgacccaccagcttaggagcacccaccaagctctgggtaaggaagctcaccttctggggctcttctgggaaaatagaggtcaacgtggaggtaccaggccacccgactcggaccgatg

SEQ ID NO: 9523 - DNA, 203 bp, Artificial sequence
  synthetic
ggcgcgccagtccttcaatcgccttttatctctggccctgggacctttgcctattttctgattgataggctttgttttgtctttacctccttctttctggggaaaacttcagttttatcgcacgttccccttttccatatcttcatcttccctctacccagattgtgaagatggaaagggtccaaccccgactcggaccgatg

SEQ ID NO: 9524 - DNA, 203 bp, Artificial sequence
  synthetic
ggcgcgccagtccttaggagaggtgggctccacccacaaaaatggactgctcagaaaaatgagggagagagaaagggtggccactttcccgagccaagaaattccttgaaaaaaaatcagaacatctgaaaccagagagccgatttccttaccgggaggcagttcctggctaacgaagaggaagcacgcgactcggaccgatg

SEQ ID NO: 9525 - DNA, 203 bp, Artificial sequence
  synthetic
ggcgcgccagtcctaaccaaccttgagctgggaggtacgtgctcttcttgacagacgttggaagaagacctggcctaaagaggtctcttttggtggtccttttcaaagtcttcacctgagccctgctctccagcgaggcgcactcctggcttttgcgctccaaagaagaggtgggatagttggagggccgactcggaccgatg

SEQ ID NO: 9526 - DNA, 203 bp, Artificial sequence
  synthetic
ggcgcgccagtcctgttgactaagtcaataatcagaatcagcaggtttgcagtcagattggcagggataagcagcctagctcaggagaagtgagtataaaagccccaggctgggagcagccatcacagaagtccactcattcttggcaggatggcttctcatcgtctgctcctcctctgccttgctggcgactcggaccgatg

SEQ ID NO: 9527 - DNA, 203 bp, Artificial sequence
  synthetic
ggcgcgccagtcctcaagccaattaaggaggactcggtccactccgttacgtgtacatccaacaagatcggcgttaaggtaacaccagaatatttggcaaagggagaaaaaaaaagcagcgaggcttcgccttccccctctcccttttttttcctcctcttccttcctcctccagccgccgccgaatccgactcggaccgatg

SEQ ID NO: 9528 - DNA, 203 bp, Artificial sequence
  synthetic
ggcgcgccagtccttggtcatctcagttcttttctcaccttgactgcaagatgaaactccttgtgctagctgtgctgctcacagtggccgccgccgacagcggcatcagccctcgggccgtgtggcagttccgcaaaatgatcaagtgcgtgatcccggggagtgaccccttcttggaatacaacaaccgactcggaccgatg

SEQ ID NO: 9529 - DNA, 203 bp, Artificial sequence
  synthetic
ggcgcgccagtcctgagggaacgggtcctggcggtgctttgcaaagggcccgtgtttctgttgcgggaagctcccgggggtcgcacgtgcgtccgagcccaagcccctcccctccactccccttcctgcgtgccccggagccgccaagcggctacgttcttctcggcccgccgagatggcgctcgacccgactcggaccgatg

SEQ ID NO: 9530 - DNA, 203 bp, Artificial sequence
  synthetic
ggcgcgccagtcctaggaggattcctggggctggtgtcttctcccagctgctgcttccagtgggcctgggcccaggactggacctccgctggcacccctgagtgcctccctgccaggccatgctgctgtagaccctaacagcgtctcttcctggccaagagaagcctgtccccaagaacaggagagcccgactcggaccgatg

SEQ ID NO: 9531 - DNA, 203 bp, Artificial sequence
  synthetic
ggcgcgccagtcctgagtctagtctttgttcggggctgtccaaaggacgctagctgttgcacctgttcctccctgcgcgtaagatagaggataaatctcctggcaaagcccagaatgaccacagccctggaacctgaggaccaaaaaggacttctgataattaaggcagaggaccattactggggacacgactcggaccgatg

SEQ ID NO: 9532 - DNA, 203 bp, Artificial sequence
  synthetic
ggcgcgccagtcctctttctgtctcttcctcgctccctctctttctctcctccctctgccttcccagtgcataaagtctctgtcgctcccggaacttgttggcaatgcctattttttggctttcccccgcgttctctaaactaactatttaaaggtctgcggtcgcaaatggtttgactaaacgtaggcgactcggaccgatg

SEQ ID NO: 9533 - DNA, 203 bp, Artificial sequence
  synthetic
ggcgcgccagtcctgtccttcccacccttagtcccaggcatctgactaccgggaacctcagccagagtccgggagccccccaccccgtccaggagccaacagagcccccgtcttgctggcgtgagaatacattgctctcctttggttgaatcagctgtccctcttcgtgggaaaatgaaccagaagaccgactcggaccgatg

SEQ ID NO: 9534 - DNA, 203 bp, Artificial sequence
  synthetic
ggcgcgccagtcctcgcgctggcgccatggcggagcaggagagcctggaattcggcaaggcagacttcgtgctgatggacaccgtctccatgcccgagttcatggccaacctcaggctcagatttgaaaaagggcgcatctatacgttcattggagaagtcgtcgtttctgtgaacccttacaagttgcgactcggaccgatg

SEQ ID NO: 9535 - DNA, 203 bp, Artificial sequence
  synthetic
ggcgcgccagtcctggagctctccccggtctgacagccactccagaggccatgcttcgtttcttgccagatttggctttcagcttcctgttaattctggctttgggccaggcagtccaatttcaagaatatgtctttctccaatttctgggcttagataaggcgccttcaccccagaagttccaacctcgactcggaccgatg

SEQ ID NO: 9536 - DNA, 203 bp, Artificial sequence
  synthetic
ggcgcgccagtcctctggggccccgcggggctggccgcctagcgagcctgccggtcgaccccagccagcgcagcgacggggcgctgcctggcccaggcgcacacggaagtgcgcttctctgaagtagctttggaaagtagagaagaaaatccagtttgcttcttggagaacactggacagctgaataacgactcggaccgatg

SEQ ID NO: 9537 - DNA, 203 bp, Artificial sequence
  synthetic
ggcgcgccagtcctactgcctccgccccttcaggtgcgggaagtctgaagccggtaaacatggccgtcaccgacagcctcagccgggctgcgactgtcttggcaactgtgttgctcttgtccttcggcagcgtggccgctagtcatatcgaggatcaagcagaacaattctttagaagtggccatacacgactcggaccgatg

SEQ ID NO: 9538 - DNA, 203 bp, Artificial sequence
  synthetic
ggcgcgccagtcctagcaaaaacctcctggcaaaggaggagaggaggttgtgcgggacaaccttctcctgacagaaggatgtcgctgctgagcctgtcttggctgggcctcaggccggtggcagcatccccgtggctgctcctgctggtggtcggggcctcctggctcctggcccgcatcctggcctgcgactcggaccgatg

SEQ ID NO: 9539 - DNA, 203 bp, Artificial sequence
  synthetic
ggcgcgccagtcctctccctctgccctctccccttgcccaagccccgaggtgggggcctggtgtgaatgctccggccgaagtgaacctgcacccccgcacccgaaggcctctttccggcttctgggcaaggcggccccggtgagctcggccgtcacacatctctgctttttcccaagaagagcaggaacgactcggaccgatg

SEQ ID NO: 9540 - DNA, 203 bp, Artificial sequence
  synthetic
ggcgcgccagtcctgagccaggcttggcggtcctcagaggggctgataaatcggcgctcgactggcctaggagctgtccgcagggagatttatgacaaagtccagttttcaacaatgctgaaatcaaatgattgcctgttttctttggaaaatttgttttttgaaaaaccagatgaagttgaaaaccacgactcggaccgatg

SEQ ID NO: 9541 - DNA, 203 bp, Artificial sequence
  synthetic
ggcgcgccagtcctacacccggcagacttcaagagtctcagactgaggagaaagcctttccttctgctgctactgctgctgccgctgcttttgaaagtccactcctttcatggtttttcctgccaaaccagaggcacctttgctgctgccgctgttctctttggtgtcattcagcggctggccagaggcgactcggaccgatg

SEQ ID NO: 9542 - DNA, 203 bp, Artificial sequence
  synthetic
ggcgcgccagtccttgcgcggcggggctgaggcggccgcggggcccgagcgcagggagtggagcttggtttcgggatctcggtgctgcagacggcgagacctcctgcacagggtgtacagcaagctgtgattcctgggaaaactaaaaaagctctctgaacaacggggcccagagctgatggcagacacgactcggaccgatg

SEQ ID NO: 9543 - DNA, 203 bp, Artificial sequence
  synthetic
ggcgcgccagtcctatggctactctgatctacgttgataaggaaattggagaaccaggcacccgtgtggctgccaaggatgtgctgaagctggagtctagaccttcaatcaaagcattagatgggatatctcaagttttaacacgacgttttggcaaaacatacgatgctccatcagccttacctaaacgactcggaccgatg

SEQ ID NO: 9544 - DNA, 203 bp, Artificial sequence
  synthetic
ggcgcgccagtcctaggtctccggattactgcatgcttgcagtgggaggaaaggcctgtctaccatgttctctgcctccccttcatgttctgtgaggagaggggccttgtctggcatgttcaccgaggcattcctgaccactagaactgtgcttggcacagagtaggcacttaataaactcctgctgccgactcggaccgatg

SEQ ID NO: 9545 - DNA, 203 bp, Artificial sequence
  synthetic
ggcgcgccagtcctttctcgcccaaggacagacctgaatctctagctgcctagaggctgactcaactgaaatcatggcgtttgacagcacttggaaggtagaccggagtgaaaactatgacaagttcatggaaaaaatgggtgttaatatagtgaaaaggaagcttgcagctcatgacaatttgaagccgactcggaccgatg

SEQ ID NO: 9546 - DNA, 203 bp, Artificial sequence
  synthetic
ggcgcgccagtcctctcctcctcctgctttcctccagtaagtgcatacccgctagtggtctgtacaggcggcacggtttgatggcagagatattttctttccaaactgttcaaaatgatgaacgaagatgcagctcagaaaagcgacagtggagagaagttcaacggcagtagtcagaggagaaaaagcgactcggaccgatg

SEQ ID NO: 9547 - DNA, 203 bp, Artificial sequence
  synthetic
ggcgcgccagtcctttgtttgttgtgttttccctggcaaacagctggagaaagagcagctcatggagaggctgagagaagcggttttcgcgtcctacccaaactgggagagtaaccttcagcagctggactcaccgattggttttccttcattttcagtgaaatcccattctctggctggagacacagcgactcggaccgatg

SEQ ID NO: 9548 - DNA, 203 bp, Artificial sequence
  synthetic
ggcgcgccagtcctggagaaaaggcgaatgataaagggcgctccacgcatgcgttaagaagccgccccaactcccccgcggcgttctttcttggaacaaaactagcgcggagccacggaactccgcagtttgcgtagacttgaatttcctattcctcggacgatccatgtggaatccgaaaaatagaacgactcggaccgatg

SEQ ID NO: 9549 - DNA, 203 bp, Artificial sequence
  synthetic
ggcgcgccagtcctgccttatggtatggttggaagcacggccccagattctctttgtatgcacaaagcagggtcatcagaagcctctcgattcaaaagatgataataccgaaaaacactgcccagtgacagtgaatccttggcatatgaagaaagctttcaaagtcatgaacgaattaagaaggtgagcgactcggaccgatg

SEQ ID NO: 9550 - DNA, 203 bp, Artificial sequence
  synthetic
ggcgcgccagtcctggggaatgcgctaacaagacaatgtaactttcttacaaattcgttagcaccctttagcgtttacccagaggtgtatctcctgggggcagatttgtaaaactagcatcaacaaccccttacttaaaccagcagccacatttgagggcaacatctacagtaataaattagccgttgcgactcggaccgatg

SEQ ID NO: 9551 - DNA, 203 bp, Artificial sequence
  synthetic
ggcgcgccagtcctaatcgcagacatgtgtgagcacctgacaatcttggcacaaacgagagatccaatgaaagtccgagtgcagaatacactacaaaccccatttgggcgaaattttagttggcggtagtggcacccagaagccgtggatagaagctatgagcatcggcaacacggcattgagtgtatcgactcggaccgatg

SEQ ID NO: 9552 - DNA, 203 bp, Artificial sequence
  synthetic
ggcgcgccagtcctccgaataaatggatacagggaaacaataataacatctcacgctaatacaacaaatagcaagatagagacgtagagatcaacattatatacacccataccaagactcaacgataaaaatcgtatgaacaataattgacaagcacactaagacgaatgaattgataatatcaagtacgactcggaccgatg

SEQ ID NO: 9553 - DNA, 203 bp, Artificial sequence
  synthetic
ggcgcgccagtccttcccaaggcgacgcattcccgcctccagtcccacgtgagtactcggcctataaacatcagccacaccatttgtacgacacactacgcgaacccgaacgccgtgcctgggaccgaagcacttacattcgggcccaccgtatgcgccgcgtgcaggccaggtgctatgcctcccaccgactcggaccgatg

SEQ ID NO: 9554 - DNA, 203 bp, Artificial sequence
  synthetic
ggcgcgccagtccttcccttcaaccactgcccgctgcaccggacaattcctgaacgcatctgagccagccacgcaccaccgcactacaatgacccgccgctcatgcgtggaacggtctctccaggtgcgcaaatagcgcaccaccctcgcgccgaccctctctgaagaccccaagatccgtagacctccgactcggaccgatg

SEQ ID NO: 9555 - DNA, 203 bp, Artificial sequence
  synthetic
ggcgcgccagtcctctcagccccatgtcctcccccgctgtcgccattaggccggtagtagatggattacacggtctactagtgctgaatgcgatggtaggtgacgtggtgtgcccccctaccggttataacccacactttctcccgtagatggccccccgccccggggcccactcccctccaggttgacgactcggaccgatg

SEQ ID NO: 9556 - DNA, 203 bp, Artificial sequence
  synthetic
ggcgcgccagtcctcgtccgcactgcacctgggacagacttccccttccgtgattcggtgtaccccccccggtgttacagcaccgctacgggcaggctggataggttgccctttcttatgccgacaccaacctcttcgtctacctcaccccgtactgcgcctcctcctcacgacgtgaggcacgcttacgactcggaccgatg

SEQ ID NO: 9557 - DNA, 203 bp, Artificial sequence
  synthetic
ggcgcgccagtcctcgcacctgtgccagcgactatatgctagtaggttaggtagcacgcgcggtctctgcggaatcagcacgtaaacacccgaccccatgccctggctcttacgggttacgtaccaatcggagccgttgggtacgattgtgctacagccccgccttgcagagcagcgtcgcccactaccgactcggaccgatg

SEQ ID NO: 9558 - DNA, 203 bp, Artificial sequence
  synthetic
ggcgcgccagtccttatccgatgtcctttacaccccgtactctcaggcagtagggcacatggcggccaatctgtcgtgtgctgtatcattaattctccggttcttattgatagttcgaatcggcacgggccacgtttctttaatcggagttctatccgcgtgggaatggacgcccatgagataatctacgactcggaccgatg

SEQ ID NO: 9559 - DNA, 203 bp, Artificial sequence
  synthetic
ggcgcgccagtcctgggagccgaatcgctcccactgctagcgcacgggcccgccagagccgcaatgctggagccaacgcgaggaccgtatgggcgataagggcgaggggttgccggaatcgatggaaccgtggggcagggcggctcgggcgcgtgcatcgcgggtgaacaacagggagccgttgcgcacgactcggaccgatg

SEQ ID NO: 9560 - DNA, 203 bp, Artificial sequence
  synthetic
ggcgcgccagtcctggtcccgccgggcacctggttagtgcccacacgcacgacgaggccccatggagaaaggtcccggtctggccagccgaccggcacaggcgaagcaacggcagaccagccctgtcagagccgtccgccccagggcgggaagggataaccgggcgagggaaggttgccgcctgctggcgactcggaccgatg

SEQ ID NO: 9561 - DNA, 203 bp, Artificial sequence
  synthetic
ggcgcgccagtcctgttttttttcctgcgcgccgtcgcagggtctctccccgagcgaggggatcgcccctgaagcctagagttacccgggccccgcagtagggcgccctgtagtcttccacgggcgagtgggcttgtcgcgaataaccctcgctgttcttcggcggttttcagcgcggtgggctagcccgactcggaccgatg

SEQ ID NO: 9562 - DNA, 203 bp, Artificial sequence
  synthetic
ggcgcgccagtccttcagccgcatcgacgagcggctgtgagaggccgtggattccatggccggtcacactaaatcggaggatattcagttctgggggaccggcctcgaggcgccacttcctctgtcctccctatttgctctccccccagttggcggaggtgcggcatggtgtggggcggagagctcatcgactcggaccgatg

SEQ ID NO: 9563 - DNA, 203 bp, Artificial sequence
  synthetic
ggcgcgccagtcctcgggtaaggttgtcttcaatcattatctgaggggcgggccaccattaatcctgcgacctgataggaaacgtttacaagcgcccctctagatcactacagagccgatgccacggcgaacgagacaccacgaaacaatcaggtaagggcaccatcctgccggacacctccgcgccgcgactcggaccgatg

SEQ ID NO: 9564 - DNA, 203 bp, Artificial sequence
  synthetic
ggcgcgccagtcctcatgcccggcaggtggaccgggcggaacgcccggggcggccgacaagaggtgggcgacctagaccagagacgagcgggcctccgtcagccggacccgtcacccaaacacgcacgtaaggatcgggacgggcgaccgacaaacacatgcggcagggcggcccacagcgcgggcaccgactcggaccgatg

SEQ ID NO: 9565 - DNA, 203 bp, Artificial sequence
  synthetic
ggcgcgccagtcctcgtgctataatgcacctaaattctgccctcatgaggggtacctaaattacccaccccccgtgcgccggcgaactatgggcttactccctgtcgcctgacccgcccctgtttaccgtgtggctagaacgcagccggccgtacacgtggcagtgccatggacaagaggctgtggagcgactcggaccgatg

SEQ ID NO: 9566 - DNA, 203 bp, Artificial sequence
  synthetic
ggcgcgccagtcctttgcacctacccgaccaggtacttgttcagtattcccacctcgcccccttgtgtctttaccggctccgccatcaaccttgagcgttcctagttagcctcttatgcagtgtctcggccttggcggcaaagctcctctgcttcgctattaccctccttctgtcaaacagccttgtacgactcggaccgatg

SEQ ID NO: 9567 - DNA, 203 bp, Artificial sequence
  synthetic
ggcgcgccagtccttatattgtgtgttcacctctgttactctttccgtctcgctccacttggcatccctccccttcggtacccggccctctcctctccgataccagtcttcctgtataagtccctgccttctgttcctttccgtctgcaccctttcgccgccacaccgcccccggctataagcgtttacgactcggaccgatg

SEQ ID NO: 9568 - DNA, 203 bp, Artificial sequence
  synthetic
ggcgcgccagtcctctaaagtaaaatacagctacccgctcgcttttaggcaacgattccggcgcctgcgaagcaccagacgatctagagcccatcgactttccaaagttctacccacccccctcaagcgtcgaaacgaacctcatcagccggcgagttattaggccaacaccaagaacgctgctatcccgactcggaccgatg

SEQ ID NO: 9569 - DNA, 203 bp, Artificial sequence
  synthetic
ggcgcgccagtcctgctccacgtacagtgctccaccgccgactatgaaaggagaatcgcacgactagggatgggggcccttaggttcggcttccgcggagcctcccaacatcgcgatatcaaatcggatggcgtaggcgccagaagacaacgacttctgtactctacagaaagaaagccgactccctccgactcggaccgatg

SEQ ID NO: 9570 - DNA, 203 bp, Artificial sequence
  synthetic
ggcgcgccagtcctccctggataagtttcaccagagtcacgacgcgactgatgcgggggtgcagcctcagaatgtgagacataacacccgtttcccgactcaccaaaccacctatatgtcgcgatggaagatgtgggcgaattccaatgattgggcagtgccccaggcccaggcgtatccccagaaatcgactcggaccgatg

SEQ ID NO: 9571 - DNA, 203 bp, Artificial sequence
  synthetic
ggcgcgccagtcctctcgactgtacactaacttcgtaccttatattaagactttatcacatggttgtagtattactttttttgttgtgaatagacaatgtcattctctttaatttggtttaaactgaagtaaattcacagtgcttaagtgttgtgcatgtaacagcgtctataattttagtcagctctcgactcggaccgatg

SEQ ID NO: 9572 - DNA, 203 bp, Artificial sequence
  synthetic
ggcgcgccagtccttctttaatagtttaactgtcgagcgtgtaatctcgaagtccagggtgtatacgttagttctgctatattttgaatatatttaattatgtggtctaaaggggactcatccactgtaggtctaaggtagctaggattgttatgtaatttagcattttgagcgttattcacctggaccgactcggaccgatg

SEQ ID NO: 9573 - DNA, 203 bp, Artificial sequence
  synthetic
ggcgcgccagtccttacatggggcggcgctcgctagcagccagcttgggcactgccgcacgcggcatctgccttcacacgagagtagtcatgcaggggtaaagtcccccgggcagtcccctctccggtggtccgagtagctagcagtaatctgttgacgcccgatccggagtctcagctgggcaccaccgactcggaccgatg

SEQ ID NO: 9574 - DNA, 203 bp, Artificial sequence
  synthetic
ggcgcgccagtcctgctatcgccgatggacatggtatcatatggctcggctagtgcccccgatttgacgggcagtcgcggctgcgcccacgcgcaaccagcgtcgccttgcgtcccgcagggccctgccctgccctcggcgtacgcgcttctgcttccagttcgcgcgagtgccatacccactagcctcgactcggaccgatg

SEQ ID NO: 9575 - DNA, 203 bp, Artificial sequence
  synthetic
ggcgcgccagtccttttatcggtctggagggcgtgatacggcggccgtggtccttagttctcctcccaggctagaacccaggcgcacagaggccgcggccgcgaccacagatgccggtctggccctctccggagcacgcagcgcgggtacggtgacccgtccgttccccatgggcatgtgcacagtttcgactcggaccgatg

SEQ ID NO: 9576 - DNA, 203 bp, Artificial sequence
  synthetic
ggcgcgccagtcctcttccctcccgtagcacgtgcgccccgcagcgctccgttgctcgaccccaaatcccctgtttgtgttgccgcgccgcgccaggggcgccgggttgcgcggcgtcctccttgcctctcagcgccccctggcctggggtccgcgccctcccccctccgtgacggaccaactgctctcgactcggaccgatg

SEQ ID NO: 9577 - DNA, 203 bp, Artificial sequence
  synthetic
ggcgcgccagtcctgtgatgccttagatcgcttcgccagcgtaatcttcgttgcccgccacctgtgtccgtgtctctaccttcagttccccgttgagtcttccattcctacggacgtaggatcccggccccccgttccggtcccgtctcgacatcttcctgccgacttgaggtctacttaagtcgctgcgactcggaccgatg

SEQ ID NO: 9578 - DNA, 203 bp, Artificial sequence
  synthetic
ggcgcgccagtcctctccctagtcccgtgtcgtcaccccctagacgggaaggctccgtcacgccgaccagcgatgggctgcggcgtagttcgacgcctccgggggccccatcctagagacgccgatgattacaaccgttccctcgctgtttcactcccgggatctcgggtgtgtccagacactctatccgactcggaccgatg

SEQ ID NO: 9579 - DNA, 203 bp, Artificial sequence
  synthetic
ggcgcgccagtcctaatggatcggaacgccccgggcctagtgccgcgcacagccatccgctcgtcagcccaccgcagcacaccacatcacggtctccggcagttgccccgtttcggtcccgtcctgttggacctctaacggtgcttcggagacatcctgccctcggtaccacgttgaacctcggtcctcgactcggaccgatg

SEQ ID NO: 9580 - DNA, 203 bp, Artificial sequence
  synthetic
ggcgcgccagtcctcctgccccgcacgccgcgctccgtaatctcttcgcccccaacgtcgggccccccttagtcggccccgcctagtattcgcgaggaagtgccacagacgcacgcgcagccgccaccacactcggctcgcaatcgccccctcgcgcctcggacgccccgcgcgatggcatgacgcggcgactcggaccgatg

SEQ ID NO: 9581 - DNA, 203 bp, Artificial sequence
  synthetic
ggcgcgccagtcctcccacccggtcaccctggtcggcctcggccaccctcccctcggtgtgctgtctggtcccaccccagcccgccccaccccttactgcccagcggaggctcaaacgagcgcctgatcggacccccccaccacggaccaccctgtggagcgaaccggatccgcgcccgcgccgcacacgactcggaccgatg

SEQ ID NO: 9582 - DNA, 203 bp, Artificial sequence
  synthetic
ggcgcgccagtcctttagcgtttttcgatcggctaataccaatcatacgtcctacgtgtaccccggtgcaccctcccccgtaccaatatgcgatagctcatagggtactgacacgtcactacatctgcgggatacgccttcctggcaaagagacgggtcggatcccgcggtttccgcgagctcctcttcgactcggaccgatg

SEQ ID NO: 9583 - DNA, 203 bp, Artificial sequence
  synthetic
ggcgcgccagtcctgccgtcccgtcgggcggcgaggctcgctctttgcgctgcgccgcttgactaccaccaggttcggaggggggctcggttccgggccgtgacccggtcgaccatcggtgccgcggcggtgcgctacctaaccgactgcccggcaacccacccctgcgctgcgcagcgctagcggcgcgactcggaccgatg

SEQ ID NO: 9584 - DNA, 203 bp, Artificial sequence
  synthetic
ggcgcgccagtcctccacccgggcgctaggaccatgccggggtcgagacgccggctctgctaaccgcaacgccggcggggagcccgagggggcccactgcacgagccgcgcctcgggagcgaccgtgccggactcttccaccaggcgtgcctccgtgaatcgtccgccctccggcggcagccgtccctcgactcggaccgatg

SEQ ID NO: 9585 - DNA, 203 bp, Artificial sequence
  synthetic
ggcgcgccagtcctatccacttgatgcttccgccggtcccggtgcgctaactttccacgttcccccagaagcgagtgacgtttccatttgcggtttaaaaagcatagcattactcttactatacgcaacgatggctcatgccctcgctctctccttagcaccgggttgccgtccctctccccagtcatcgactcggaccgatg

SEQ ID NO: 9586 - DNA, 203 bp, Artificial sequence
  synthetic
ggcgcgccagtcctaaggtagttcccactgcgacttaactcatgtcaagtcagtccacgcttccgccgcagggcgatctatgaatgagactggccccttaggtcgtagacaaccagtttatgcatcttacagtagtaatcggaggtgtcgcgttggggttgactacagcgtattctccattaatcggacgactcggaccgatg

SEQ ID NO: 9587 - DNA, 203 bp, Artificial sequence
  synthetic
ggcgcgccagtcctatccttggggacgcatcgcgcaagattttgcgaggctctaaccgcgaagagacgggaaataaaaacccgttgtagggatggaatggcctcctttctctgtacgtccttagaaaacatctagttgcgtcttgtggctgtcttactgaacgaccatcgtccccaactcccatactgcgactcggaccgatg

SEQ ID NO: 9588 - DNA, 203 bp, Artificial sequence
  synthetic
ggcgcgccagtcctagatacatcaatattatctattagtatacatttcggtcgatgtgtttatactacgagtatctaatcaatttttcgttggttcagaaatcaagtgcctgtgaagtgcttcttcacaaaatacttgaacgttgtttactataaagccggctaatacactacattcagtcatttgcccgactcggaccgatg

SEQ ID NO: 9589 - DNA, 203 bp, Artificial sequence
  synthetic
ggcgcgccagtcctccgtggcctcatgtctaccacaaccttgcaggattcccgcagcgctaagcgctcgtgccccgagcgatccccactagacggcttcggagccttcccgctgtgtctagacgatctagtgcatcgtagagttggttcgaaccgacgaaactgctcgccgattgcgccatcgttgcgcgactcggaccgatg

SEQ ID NO: 9590 - DNA, 203 bp, Artificial sequence
  synthetic
ggcgcgccagtcctatgaaaatatctgtacttgtactgaaacgccagtggtgcttgctttcctagtaacaatggaagatgaatttgacgtggaaaattgaataaagtgcttgcaataatatgaggtagacctaactaaattttgatattttatcatacattctacaaaagaacatgtgatgtagctgccgactcggaccgatg

SEQ ID NO: 9591 - DNA, 203 bp, Artificial sequence
  synthetic
ggcgcgccagtcctttttgataggtttttagatgccgataagttcatgcctaggagtccactcatagaatatctctgatattcttatcggaatgtatattgctgttccgtaccgggttttgaggctcttagattttgtacaattttaactctaattgctgaaactaaggcatgtatatatcgactgggcgactcggaccgatg

SEQ ID NO: 9592 - DNA, 203 bp, Artificial sequence
  synthetic
ggcgcgccagtccttcgagatcgataacacattgcaagcaccgaagcgtcagcttgaaatgggacctcctgcagccttggactgtccgcacccgaggtagcgggtcaatttcttccggcgcattttcatatttcgaagacacacactagttggaaagtatttgggtcattccagggcttgtgggagaacgactcggaccgatg

SEQ ID NO: 9593 - DNA, 203 bp, Artificial sequence
  synthetic
ggcgcgccagtcctacggtacctgagagcatacgccgctaatttgaagtacgcggagatatgcgataactaagtaacattgtcagcgtgacgccttgtgggaacccaccctgtctgagaaccgggttatgcgcgataatcactacgacccgattggtgtacaggatccacagtgaaacattcaagcgacgactcggaccgatg

SEQ ID NO: 9594 - DNA, 203 bp, Artificial sequence
  synthetic
ggcgcgccagtcctccggtcgggcctagggctggtaggtcttcgtcggtgggctgtccctgctcgagtgtcgggcgggctgcttcggaaccttgctaacccgtggactttttatttggtcctccgtcgtgctacctcgagcaaggatagaaagcgacgttgactttttacttctaattcacctccggccgactcggaccgatg

SEQ ID NO: 9595 - DNA, 203 bp, Artificial sequence
  synthetic
ggcgcgccagtcctaccgggcgagtgacgtagtatcagttctcgtgagggcaagggttggcgcgtgggtccgggtcccgtcgcccgaaccgtctgaaattactagtgttccctgataccgtgttgcacgccggttggacactccttcctattcttacctcaggccatccgatgtcaggttaacacactcgactcggaccgatg

SEQ ID NO: 9596 - DNA, 203 bp, Artificial sequence
  synthetic
ggcgcgccagtcctcatgcggtaagcctataagatacgcccaaatcgaagcgcacggggtctggcactagtcacgggtcgatgtgcgcgtgccctattcggtagcgctactcccccaacctgagttgtggtttcgcagtactcgtggcatgggaaccaccttggcaagggaaggccacgaagataagacgactcggaccgatg

SEQ ID NO: 9597 - DNA, 203 bp, Artificial sequence
  synthetic
ggcgcgccagtcctttgtcgaagactatgcaagactatcttgactgtcgtgagtttatacgaacccactttattgggcatgcaatccatactagtttgatgtggtaaccgctactgatgcggtgttctaaaccgccttatgtagatcttagtactatcccacacagatacaaggttttgtgctgtcgacgactcggaccgatg

SEQ ID NO: 9598 - DNA, 203 bp, Artificial sequence
  synthetic
ggcgcgccagtcctgcaccgctttacaaagttcgtacatccacataccgtttttgacaggagtgcggactttgacgccaataagcgcgtttgtgacctgaggtctgcctggctggtgtcgtagtgtagactgtttacccataagaatgatgtgttcaagacattttcccgtaggttggcgcgaattcgcgactcggaccgatg

SEQ ID NO: 9599 - DNA, 203 bp, Artificial sequence
  synthetic
ggcgcgccagtcctgacttctccctctctcggagatgatagtcggggtcccatgtgataataattaccctgtcttaattttcaggctctgtccaactcgagcctggatacggatgggatggccctaggagaagcgttctgtacataggtcacgccgcagataggtccgttcaggctggtcccgttcatcgactcggaccgatg

SEQ ID NO: 9600 - DNA, 203 bp, Artificial sequence
  synthetic
ggcgcgccagtcctctgaacaatacttttgttgattcggtttaaaacggatgtctgtcgtagcgtaaaacccgcgatacactgcatttaagataggtgtagaagtggctagtaatttaaagacatgtaaatggtcttccgtgctatcctattagacagctcgatgcactgaaccaactataaacggtgcgactcggaccgatg

SEQ ID NO: 9601 - DNA, 203 bp, Artificial sequence
  synthetic
ggcgcgccagtcctaagtagctaaacagtttctaaaaatctcggccttaagttaagagaagccgtaaacgaagtgctgtaatactaattcggacgctcatgggcggcagtttatacgtgtatgtagaagagtaggatcaccattttgatgttaatctctctcctccaaccatagcgctccgatgacaccgactcggaccgatg

SEQ ID NO: 9602 - DNA, 203 bp, Artificial sequence
  synthetic
ggcgcgccagtccttaagcttttttcaaattactcgttactattgagttgttcattatgtttaacttcacgaaacgggttatgcataagatactttggactgttcaggtgtaagaacaaagtaccaacgagatttaggtgagccctcagttgcctagtcgtggattctttccaataggaataaaccctcgactcggaccgatg

SEQ ID NO: 9603 - DNA, 203 bp, Artificial sequence
  synthetic
ggcgcgccagtcctaacattacatatacttaggattaccttgctgggtttccttggtaatagagttatatattttggcattaaagtatcctctatgtggatgatcctgacgcgtgattcttccctcgattatttgaatctagataaaaggagggaccataattttttgaatgattaattgctaccgctcgactcggaccgatg

SEQ ID NO: 9604 - DNA, 203 bp, Artificial sequence
  synthetic
ggcgcgccagtcctaaattgcagtagcatcattcatcgttccgccaaaattagatacatcataccagaatcacctatgctacggtagacattgaatagacagaaggaacgacgacacaggaaagatctcctccaacccccggaacatcataaagacgtacagtagcaatacttgatcgcaccgagtaacgactcggaccgatg

SEQ ID NO: 9605 - DNA, 203 bp, Artificial sequence
  synthetic
ggcgcgccagtcctacacgagttcattaaagtacctaccaatactggaatctccgccacgattttggctttggtacggtctgttagtaaaaatcgaagtattggtgcggctagtactattgctgcatctaccgatacaagtatagtagtcgcggaaatgagagggggcccagcgatggtaactattttcgactcggaccgatg

SEQ ID NO: 9606 - DNA, 203 bp, Artificial sequence
  synthetic
ggcgcgccagtcctcatcgagatttgctgtcgtttataatcgaaatgggcatgagataaggacaaagagcataccgcggcccgccgattcgcggattaagagtgaatgcggaaccaacaagcgtttacgaaatgactgatcatgtagttgccttgcatccggtctttacgtacttttagaaaattgtccgactcggaccgatg

SEQ ID NO: 9607 - DNA, 203 bp, Artificial sequence
  synthetic
ggcgcgccagtcctttcttactctttagtgaaccgactaataaagtttgaaggtgcgtgctaagataggtaagagactctggtcgagagtttcatgtcgtgcttttggctttggggagtgatgtaggggtttcacttactcttaaccgtgagggttactttcttccctggaagtctgaatataatttacgactcggaccgatg

SEQ ID NO: 9608 - DNA, 203 bp, Artificial sequence
  synthetic
ggcgcgccagtccttaagagggtccgcgttggaaagactcgtgggtcggaatggctttgcaccggtgtcgttgttgccggttttaggcagtaaattcaggcgtgcctacgtaccttagttgctccggctagcctatattgaatttggtgcccatactgacattcctaacactatatgatgttgggaatcgactcggaccgatg

SEQ ID NO: 9609 - DNA, 203 bp, Artificial sequence
  synthetic
ggcgcgccagtcctctggacctagcaagggattctgtaacactcgtggggatcactacgcgggtttctggcgaatgtttggaccggccagggtgatcacatggaatcacatgtatactgtatgtgggccccgtaagctgtcgtgtgtcctgaccgtgctcttcacaatcttttaagtttgtgtcatggcgactcggaccgatg

SEQ ID NO: 9610 - DNA, 203 bp, Artificial sequence
  synthetic
ggcgcgccagtcctgccatatgctcaaacgtctcgggacgccatatacgagagaccatggattgggtggcccactatcacctggagacagtcggggctgggttgtaagccatggaaggacagagacagtgacgttatttggagtccataaacacgcgtcttagcgcagtgggcgcgcacgtcataagtcgactcggaccgatg

SEQ ID NO: 9611 - DNA, 203 bp, Artificial sequence
  synthetic
ggcgcgccagtcctttcaatcaggtgccgcatctacgcaggctgcatcgcggtccaagcgcgcagcagggatccgtcccgtgatgctagggcgtcaagaaggtagcgcgggaaccagatcatcaggaatgtctccgagaggaggatcggggtaactcgggtagcactatgtaaaacgaatgccttcgccgactcggaccgatg

SEQ ID NO: 9612 - DNA, 203 bp, Artificial sequence
  synthetic
ggcgcgccagtcctctgtcgcggttttcgtagatcaccagcaatgtctccgagggaaagtgtggtggtatacgtgctcttattctcaagtacgcgatactgggtgatttcactttagagcgatgcctcagaaaaatggtactggccaaagagtggggctcattacgccagcggattacaagttgctgccgactcggaccgatg

SEQ ID NO: 9613 - DNA, 203 bp, Artificial sequence
  synthetic
ggcgcgccagtccttgtgttgaggagctctgtcgtacgccatgtaagtagctcaacccccagctctgggggcgacccctaatgacaggattacgaggctcacggctagacaacaggtaacggtggatgcattctctatcgtgtgacgttggggtcgtcctgtgtggcctcacgtgagcccactagatgcgactcggaccgatg

SEQ ID NO: 9614 - DNA, 203 bp, Artificial sequence
  synthetic
ggcgcgccagtccttgtccatctctggtctaaaggtcgtgcccgtatgccggaaaagttcggtgaggttgtacttctactctgaagagaaccgcagcgcgcccgcatggcgagtgggggaccgtatatatacaagatttagaccagccaaggaaaatagacttctgtatgacacggttgctctcccgtcgactcggaccgatg

SEQ ID NO: 9615 - DNA, 203 bp, Artificial sequence
  synthetic
ggcgcgccagtcctgccggaatatagcacattgggaaggcatagcgtctgccgtgtatctagatgatcaagagggctactgctacatagggtgcctgtccaagccctgcggactagccgcacacctcgtccctactcgaaatcttttagaatcgcgaatcgatggtacctgtgcgaggcatacgggttcgactcggaccgatg

SEQ ID NO: 9616 - DNA, 203 bp, Artificial sequence
  synthetic
ggcgcgccagtcctcgtcatgtgcgttggccggagggcttactacccttcacgttagttctagcgaaatcctgaatgtacctttcttgccactccccgcttcacactgagtgttactgtcgaattgcttggccacttgtctcttaagcctgtcgctactatgtcttcctcaaagtgccaggtaagtttcgactcggaccgatg

SEQ ID NO: 9617 - DNA, 203 bp, Artificial sequence
  synthetic
ggcgcgccagtcctccgggagtaagcataatacctgtccaactgagatgatgcaaactaacagactcaaacaagtcaggtcaacaataaaaattaaggtaaggagcgaccgggatgcagacgggtgccttggtaaagggaatacgaatccgcagctaccggctcgaagtctccaattgacccacgcaacgactcggaccgatg

SEQ ID NO: 9618 - DNA, 203 bp, Artificial sequence
  synthetic
ggcgcgccagtcctctgtgaaggcgtattcaacaaggggctgaaggatgcccagaaggtaccccattgtatgggatctgatctggggcctcggtgcacatgctttacatgtgtttagtcgaggttaaaaaacgtctaggccccccgaaccacggggacgtggttttcctttgaaaaacacgatgataacgactcggaccgatg

SEQ ID NO: 9619 - DNA, 203 bp, Artificial sequence
  synthetic
ggcgcgccagtccttatcggatgcgtattcaacaaggggctgaaggatgcccagaaggtaccccattgtatgggatctgatctggggcctcggtgcacatgctttacatgtgtttagtcgaggttaaaaaacgtctaggccccccgaaccacggggacgtggttttcctttgaaaaacacgatgataacgactcggaccgatg

SEQ ID NO: 9620 - DNA, 203 bp, Artificial sequence
  synthetic
ggcgcgccagtcctgcagtcgagcgtattcaacaaggggctgaaggatgcccagaaggtaccccattgtatgggatctgatctggggcctcggtgcacatgctttacatgtgtttagtcgaggttaaaaaacgtctaggccccccgaaccacggggacgtggttttcctttgaaaaacacgatgataacgactcggaccgatg

SEQ ID NO: 9621 - DNA, 203 bp, Artificial sequence
  synthetic
ggcgcgccagtcctattcacccgcgtattcaacaaggggctgaaggatgcccagaaggtaccccattgtatgggatctgatctggggcctcggtgcacatgctttacatgtgtttagtcgaggttaaaaaacgtctaggccccccgaaccacggggacgtggttttcctttgaaaaacacgatgataacgactcggaccgatg

SEQ ID NO: 9622 - DNA, 203 bp, Artificial sequence
  synthetic
ggcgcgccagtccttgaggtgggcgtattcaacaaggggctgaaggatgcccagaaggtaccccattgtatgggatctgatctggggcctcggtgcacatgctttacatgtgtttagtcgaggttaaaaaacgtctaggccccccgaaccacggggacgtggttttcctttgaaaaacacgatgataacgactcggaccgatg

SEQ ID NO: 9623 - DNA, 203 bp, Artificial sequence
  synthetic
ggcgcgccagtcctaacttgtcgcgtattcaacaaggggctgaaggatgcccagaaggtaccccattgtatgggatctgatctggggcctcggtgcacatgctttacatgtgtttagtcgaggttaaaaaacgtctaggccccccgaaccacggggacgtggttttcctttgaaaaacacgatgataacgactcggaccgatg

SEQ ID NO: 9624 - DNA, 203 bp, Artificial sequence
  synthetic
ggcgcgccagtcctcttccactgcgtattcaacaaggggctgaaggatgcccagaaggtaccccattgtatgggatctgatctggggcctcggtgcacatgctttacatgtgtttagtcgaggttaaaaaacgtctaggccccccgaaccacggggacgtggttttcctttgaaaaacacgatgataacgactcggaccgatg

SEQ ID NO: 9625 - DNA, 203 bp, Artificial sequence
  synthetic
ggcgcgccagtcctgtcctacagcgtattcaacaaggggctgaaggatgcccagaaggtaccccattgtatgggatctgatctggggcctcggtgcacatgctttacatgtgtttagtcgaggttaaaaaacgtctaggccccccgaaccacggggacgtggttttcctttgaaaaacacgatgataacgactcggaccgatg

SEQ ID NO: 9626 - DNA, 203 bp, Artificial sequence
  synthetic
ggcgcgccagtcctaatttcatgcgtattcaacaaggggctgaaggatgcccagaaggtaccccattgtatgggatctgatctggggcctcggtgcacatgctttacatgtgtttagtcgaggttaaaaaacgtctaggccccccgaaccacggggacgtggttttcctttgaaaaacacgatgataacgactcggaccgatg

SEQ ID NO: 9627 - DNA, 203 bp, Artificial sequence
  synthetic
ggcgcgccagtccttcgttatatttagaattagaatgtttcttagcggtcgtgtagttatttttatgtcataagtggataatttgttagctcctataacaaaagtctgttgcttgtgtttcacattttggatttcctaatataatgttctctttttagaaaaggtggacaagtcctattttcaagagacgactcggaccgatg

SEQ ID NO: 9628 - DNA, 203 bp, Artificial sequence
  synthetic
ggcgcgccagtcctgcagtcgatttagaattagaatgtttcttagcggtcgtgtagttatttttatgtcataagtggataatttgttagctcctataacaaaagtctgttgcttgtgtttcacattttggatttcctaatataatgttctctttttagaaaaggtggacaagtcctattttcaagagacgactcggaccgatg

SEQ ID NO: 9629 - DNA, 203 bp, Artificial sequence
  synthetic
ggcgcgccagtcctaacttgtcatctctagcagtggcgcccgaacagggacctgaaagcgaaagggaaaccagaggagctctctcgacgcaggactcggcttgctgaagcgcgcacggcaagaggcgaggggcggcgactggtgagtacgccaaaaattttgactagcggaggctagaaggagagagacgactcggaccgatg

SEQ ID NO: 9630 - DNA, 203 bp, Artificial sequence
  synthetic
ggcgcgccagtcctctgtgaagcagagccctgcacccctaattcccggtggaaaactcctgttgccgtttccctccaccggcctggagtctcccagtcttgtcccggcagtgccgccctccccactaagacctaggcgcaaaggcttggctcatggttgacagctcagagagagaaagatctgagggacgactcggaccgatg

SEQ ID NO: 9631 - DNA, 203 bp, Artificial sequence
  synthetic
ggcgcgccagtccttcgttatacagagccctgcacccctaattcccggtggaaaactcctgttgccgtttccctccaccggcctggagtctcccagtcttgtcccggcagtgccgccctccccactaagacctaggcgcaaaggcttggctcatggttgacagctcagagagagaaagatctgagggacgactcggaccgatg

SEQ ID NO: 9632 - DNA, 203 bp, Artificial sequence
  synthetic
ggcgcgccagtcctagtgctgccagagccctgcacccctaattcccggtggaaaactcctgttgccgtttccctccaccggcctggagtctcccagtcttgtcccggcagtgccgccctccccactaagacctaggcgcaaaggcttggctcatggttgacagctcagagagagaaagatctgagggacgactcggaccgatg

SEQ ID NO: 9633 - DNA, 203 bp, Artificial sequence
  synthetic
ggcgcgccagtccttgaggtggcagagccctgcacccctaattcccggtggaaaactcctgttgccgtttccctccaccggcctggagtctcccagtcttgtcccggcagtgccgccctccccactaagacctaggcgcaaaggcttggctcatggttgacagctcagagagagaaagatctgagggacgactcggaccgatg

SEQ ID NO: 9634 - DNA, 203 bp, Artificial sequence
  synthetic
ggcgcgccagtcctaggtattgcagagccctgcacccctaattcccggtggaaaactcctgttgccgtttccctccaccggcctggagtctcccagtcttgtcccggcagtgccgccctccccactaagacctaggcgcaaaggcttggctcatggttgacagctcagagagagaaagatctgagggacgactcggaccgatg

SEQ ID NO: 9635 - DNA, 203 bp, Artificial sequence
  synthetic
ggcgcgccagtcctgtcctacacagagccctgcacccctaattcccggtggaaaactcctgttgccgtttccctccaccggcctggagtctcccagtcttgtcccggcagtgccgccctccccactaagacctaggcgcaaaggcttggctcatggttgacagctcagagagagaaagatctgagggacgactcggaccgatg

SEQ ID NO: 9636 - DNA, 203 bp, Artificial sequence
  synthetic
ggcgcgccagtcctgaaaccctcagagccctgcacccctaattcccggtggaaaactcctgttgccgtttccctccaccggcctggagtctcccagtcttgtcccggcagtgccgccctccccactaagacctaggcgcaaaggcttggctcatggttgacagctcagagagagaaagatctgagggacgactcggaccgatg

SEQ ID NO: 9637 - DNA, 203 bp, Artificial sequence
  synthetic
ggcgcgccagtcctctgtgaagggtgtgcaaatcacgcctggcagcccctgcccacagtacccgaagatggcaggccttgttcccttcacctaaattcataaacctgggtgtagtggcttctgatgctgatttgtttctcttttcagtaagtgtggacctttgtgtaccagagagaacatcatggtggcgactcggaccgatg

SEQ ID NO: 9638 - DNA, 203 bp, Artificial sequence
  synthetic
ggcgcgccagtcctgcagtcgaggtgtgcaaatcacgcctggcagcccctgcccacagtacccgaagatggcaggccttgttcccttcacctaaattcataaacctgggtgtagtggcttctgatgctgatttgtttctcttttcagtaagtgtggacctttgtgtaccagagagaacatcatggtggcgactcggaccgatg

SEQ ID NO: 9639 - DNA, 203 bp, Artificial sequence
  synthetic
ggcgcgccagtcctcttccactggtgtgcaaatcacgcctggcagcccctgcccacagtacccgaagatggcaggccttgttcccttcacctaaattcataaacctgggtgtagtggcttctgatgctgatttgtttctcttttcagtaagtgtggacctttgtgtaccagagagaacatcatggtggcgactcggaccgatg

SEQ ID NO: 9640 - DNA, 203 bp, Artificial sequence
  synthetic
ggcgcgccagtcctttgcgctcggtgtgcaaatcacgcctggcagcccctgcccacagtacccgaagatggcaggccttgttcccttcacctaaattcataaacctgggtgtagtggcttctgatgctgatttgtttctcttttcagtaagtgtggacctttgtgtaccagagagaacatcatggtggcgactcggaccgatg

SEQ ID NO: 9641 - DNA, 203 bp, Artificial sequence
  synthetic
ggcgcgccagtcctgaaaccctggtgtgcaaatcacgcctggcagcccctgcccacagtacccgaagatggcaggccttgttcccttcacctaaattcataaacctgggtgtagtggcttctgatgctgatttgtttctcttttcagtaagtgtggacctttgtgtaccagagagaacatcatggtggcgactcggaccgatg

SEQ ID NO: 9642 - DNA, 203 bp, Artificial sequence
  synthetic
ggcgcgccagtcctctctctcggcggctggagcggacccagcgagtgagggcgcacagccgggacgccgaggcggcgggcgggagacccgcaccagcgcagccggccctcggcgggacgtgacgcagcgcccggggcgcgggtgtatttgatatagtgtttgcaacaaattcgacccaggtgatcaaacgactcggaccgatg

SEQ ID NO: 9643 - DNA, 203 bp, Artificial sequence
  synthetic
ggcgcgccagtcctagtgctgcaccaggggcgccgccgccggcgctcgcaggccgcggatgaagaagaaaacccggcgccgctcgacccggagcgaggagttgacccggagcgaggagttgaccctgagtgaggaagcgacctggagtgaagaggcgacccagagtgaggaggcgacccagggcgaagcgactcggaccgatg

SEQ ID NO: 9644 - DNA, 203 bp, Artificial sequence
  synthetic
ggcgcgccagtcctctgtgaagccagaatcaagtgttccgcgtgattgaagacaccccctcgtccaagaatgcaaagcacatccaataaaatagctggattataactcctcttctttctctgggggccgtggggtgggagctggggcgagaggtgccgttggcccccgttgcttttcctctgggaaggcgactcggaccgatg

SEQ ID NO: 9645 - DNA, 203 bp, Artificial sequence
  synthetic
ggcgcgccagtcctaacttgtcccagaatcaagtgttccgcgtgattgaagacaccccctcgtccaagaatgcaaagcacatccaataaaatagctggattataactcctcttctttctctgggggccgtggggtgggagctggggcgagaggtgccgttggcccccgttgcttttcctctgggaaggcgactcggaccgatg

SEQ ID NO: 9646 - DNA, 203 bp, Artificial sequence
  synthetic
ggcgcgccagtcctaggtattgccagaatcaagtgttccgcgtgattgaagacaccccctcgtccaagaatgcaaagcacatccaataaaatagctggattataactcctcttctttctctgggggccgtggggtgggagctggggcgagaggtgccgttggcccccgttgcttttcctctgggaaggcgactcggaccgatg

SEQ ID NO: 9647 - DNA, 203 bp, Artificial sequence
  synthetic
ggcgcgccagtccttatcggatgtgtgagagggaagcgccgcggcctgtatttctagacctgcccttcgcctggttcgtggcgccttgtgaccccgggcccctgccgcctgcaagtcggaaattgcgctgtgctcctgtgctacggcctgtggctggactgcctgctgctgcccaactggctggcaagcgactcggaccgatg

SEQ ID NO: 9648 - DNA, 203 bp, Artificial sequence
  synthetic
ggcgcgccagtcctgcagtcgagtgtgagagggaagcgccgcggcctgtatttctagacctgcccttcgcctggttcgtggcgccttgtgaccccgggcccctgccgcctgcaagtcggaaattgcgctgtgctcctgtgctacggcctgtggctggactgcctgctgctgcccaactggctggcaagcgactcggaccgatg

SEQ ID NO: 9649 - DNA, 203 bp, Artificial sequence
  synthetic
ggcgcgccagtcctaatttcatgtgtgagagggaagcgccgcggcctgtatttctagacctgcccttcgcctggttcgtggcgccttgtgaccccgggcccctgccgcctgcaagtcggaaattgcgctgtgctcctgtgctacggcctgtggctggactgcctgctgctgcccaactggctggcaagcgactcggaccgatg

SEQ ID NO: 9650 - DNA, 203 bp, Artificial sequence
  synthetic
ggcgcgccagtcctgcagtcgacataagagtctatcattgatttctttttgtggtaaaaatcttagttcatgtgaagaaatttcatgtgaatgttttagctatcaaacagtactgtcacctactcatgcacaaaactgcctcccaaagacttttcccaggtccctcgtatcaaaacattaagagtatacgactcggaccgatg

SEQ ID NO: 9651 - DNA, 203 bp, Artificial sequence
  synthetic
ggcgcgccagtcctgcagtcgacaacacccgagcaaggacgcgactctcccgacgcggggaggctattctgcccatttggggacacttccccgccgctgccaggacccgcttctctgaaaggctctccttgcagctgcttagacgctggatttttttcgggtagtggaaaaccagcagcctcccgcgacgactcggaccgatg

SEQ ID NO: 9652 - DNA, 203 bp, Artificial sequence
  synthetic
ggcgcgccagtccttgaggtggcaacacccgagcaaggacgcgactctcccgacgcggggaggctattctgcccatttggggacacttccccgccgctgccaggacccgcttctctgaaaggctctccttgcagctgcttagacgctggatttttttcgggtagtggaaaaccagcagcctcccgcgacgactcggaccgatg

SEQ ID NO: 9653 - DNA, 203 bp, Artificial sequence
  synthetic
ggcgcgccagtcctcttccactcaacacccgagcaaggacgcgactctcccgacgcggggaggctattctgcccatttggggacacttccccgccgctgccaggacccgcttctctgaaaggctctccttgcagctgcttagacgctggatttttttcgggtagtggaaaaccagcagcctcccgcgacgactcggaccgatg

SEQ ID NO: 9654 - DNA, 203 bp, Artificial sequence
  synthetic
ggcgcgccagtcctaggtattgcaacacccgagcaaggacgcgactctcccgacgcggggaggctattctgcccatttggggacacttccccgccgctgccaggacccgcttctctgaaaggctctccttgcagctgcttagacgctggatttttttcgggtagtggaaaaccagcagcctcccgcgacgactcggaccgatg

SEQ ID NO: 9655 - DNA, 203 bp, Artificial sequence
  synthetic
ggcgcgccagtcctgtcctacacaacacccgagcaaggacgcgactctcccgacgcggggaggctattctgcccatttggggacacttccccgccgctgccaggacccgcttctctgaaaggctctccttgcagctgcttagacgctggatttttttcgggtagtggaaaaccagcagcctcccgcgacgactcggaccgatg

SEQ ID NO: 9656 - DNA, 203 bp, Artificial sequence
  synthetic
ggcgcgccagtcctgaaaccctcaacacccgagcaaggacgcgactctcccgacgcggggaggctattctgcccatttggggacacttccccgccgctgccaggacccgcttctctgaaaggctctccttgcagctgcttagacgctggatttttttcgggtagtggaaaaccagcagcctcccgcgacgactcggaccgatg

SEQ ID NO: 9657 - DNA, 203 bp, Artificial sequence
  synthetic
ggcgcgccagtcctaatttcatcaacacccgagcaaggacgcgactctcccgacgcggggaggctattctgcccatttggggacacttccccgccgctgccaggacccgcttctctgaaaggctctccttgcagctgcttagacgctggatttttttcgggtagtggaaaaccagcagcctcccgcgacgactcggaccgatg

SEQ ID NO: 9658 - DNA, 203 bp, Artificial sequence
  synthetic
ggcgcgccagtccttgaggtgggagcctccagagggctgtcggcgcagtagcagcgagcagcagagtccgcacgctccggcgaggggcagaagagcgcgagggagcgcggggcagcagaagcgagagccgagcgcggacccagccaggacccacagccctccccagctgcccaggaagagccccagcccgactcggaccgatg

SEQ ID NO: 9659 - DNA, 203 bp, Artificial sequence
  synthetic
ggcgcgccagtcctaatttcatgagcctccagagggctgtcggcgcagtagcagcgagcagcagagtccgcacgctccggcgaggggcagaagagcgcgagggagcgcggggcagcagaagcgagagccgagcgcggacccagccaggacccacagccctccccagctgcccaggaagagccccagcccgactcggaccgatg

SEQ ID NO: 9660 - DNA, 203 bp, Artificial sequence
  synthetic
ggcgcgccagtcctgcagtcgacctttcccctcccttccctatccccgacgaccggatcctgaggaggcagctgcggtggcagctgctgagttctcggtgaaggtatttcatttctcctgtcccctcccctccccaccccatctattaatattattcttttgaagattcttcgttgtcaagccgccaacgactcggaccgatg

SEQ ID NO: 9661 - DNA, 203 bp, Artificial sequence
  synthetic
ggcgcgccagtcctattcaccccctttcccctcccttccctatccccgacgaccggatcctgaggaggcagctgcggtggcagctgctgagttctcggtgaaggtatttcatttctcctgtcccctcccctccccaccccatctattaatattattcttttgaagattcttcgttgtcaagccgccaacgactcggaccgatg

SEQ ID NO: 9662 - DNA, 203 bp, Artificial sequence
  synthetic
ggcgcgccagtcctcttccactcctttcccctcccttccctatccccgacgaccggatcctgaggaggcagctgcggtggcagctgctgagttctcggtgaaggtatttcatttctcctgtcccctcccctccccaccccatctattaatattattcttttgaagattcttcgttgtcaagccgccaacgactcggaccgatg

SEQ ID NO: 9663 - DNA, 203 bp, Artificial sequence
  synthetic
ggcgcgccagtccttatcggatttctggcacctacctacctgcttcccgctggggggtggggagttggcccagagtcttaagattggggcagggtggagaggtgggctcttcctgcttcccactcatcttatagctttctttccccagatccgaattcgagatccaaaccaaggaggaaaggatatcacgactcggaccgatg

SEQ ID NO: 9664 - DNA, 203 bp, Artificial sequence
  synthetic
ggcgcgccagtccttgaggtggttctggcacctacctacctgcttcccgctggggggtggggagttggcccagagtcttaagattggggcagggtggagaggtgggctcttcctgcttcccactcatcttatagctttctttccccagatccgaattcgagatccaaaccaaggaggaaaggatatcacgactcggaccgatg

SEQ ID NO: 9665 - DNA, 203 bp, Artificial sequence
  synthetic
ggcgcgccagtcctaacttgtcttctggcacctacctacctgcttcccgctggggggtggggagttggcccagagtcttaagattggggcagggtggagaggtgggctcttcctgcttcccactcatcttatagctttctttccccagatccgaattcgagatccaaaccaaggaggaaaggatatcacgactcggaccgatg

SEQ ID NO: 9666 - DNA, 203 bp, Artificial sequence
  synthetic
ggcgcgccagtcctaggtattgttctggcacctacctacctgcttcccgctggggggtggggagttggcccagagtcttaagattggggcagggtggagaggtgggctcttcctgcttcccactcatcttatagctttctttccccagatccgaattcgagatccaaaccaaggaggaaaggatatcacgactcggaccgatg

SEQ ID NO: 9667 - DNA, 203 bp, Artificial sequence
  synthetic
ggcgcgccagtcctctgtgaagttcagtacgccacaagcgacacaaatgaacacgccttctcagccccgccagcacttctaccctagccgggcccagcccccgagcagtgcagcctcccgagtgcagagtgcagcccctgcccgccctggcccagctgcccatgtctaccctgctggatcccaagtaacgactcggaccgatg

SEQ ID NO: 9668 - DNA, 203 bp, Artificial sequence
  synthetic
ggcgcgccagtccttcgttatattcagtacgccacaagcgacacaaatgaacacgccttctcagccccgccagcacttctaccctagccgggcccagcccccgagcagtgcagcctcccgagtgcagagtgcagcccctgcccgccctggcccagctgcccatgtctaccctgctggatcccaagtaacgactcggaccgatg

SEQ ID NO: 9669 - DNA, 203 bp, Artificial sequence
  synthetic
ggcgcgccagtcctagtgctgcttcagtacgccacaagcgacacaaatgaacacgccttctcagccccgccagcacttctaccctagccgggcccagcccccgagcagtgcagcctcccgagtgcagagtgcagcccctgcccgccctggcccagctgcccatgtctaccctgctggatcccaagtaacgactcggaccgatg

SEQ ID NO: 9670 - DNA, 203 bp, Artificial sequence
  synthetic
ggcgcgccagtcctaacttgtcttcagtacgccacaagcgacacaaatgaacacgccttctcagccccgccagcacttctaccctagccgggcccagcccccgagcagtgcagcctcccgagtgcagagtgcagcccctgcccgccctggcccagctgcccatgtctaccctgctggatcccaagtaacgactcggaccgatg

SEQ ID NO: 9671 - DNA, 203 bp, Artificial sequence
  synthetic
ggcgcgccagtcctaggtattgttcagtacgccacaagcgacacaaatgaacacgccttctcagccccgccagcacttctaccctagccgggcccagcccccgagcagtgcagcctcccgagtgcagagtgcagcccctgcccgccctggcccagctgcccatgtctaccctgctggatcccaagtaacgactcggaccgatg

SEQ ID NO: 9672 - DNA, 203 bp, Artificial sequence
  synthetic
ggcgcgccagtcctgtcctacattcagtacgccacaagcgacacaaatgaacacgccttctcagccccgccagcacttctaccctagccgggcccagcccccgagcagtgcagcctcccgagtgcagagtgcagcccctgcccgccctggcccagctgcccatgtctaccctgctggatcccaagtaacgactcggaccgatg

SEQ ID NO: 9673 - DNA, 203 bp, Artificial sequence
  synthetic
ggcgcgccagtcctaggtattgccctaccccatccccttattcagcacatgaaataaacaaggggcatccaaatcttgcggcaacgcccccgggacatgcatcgtcccctggactctctcaaaccccttatccctctggacagaatgcaggtccaaccacgctggtataccctcaaacccctcagacacgactcggaccgatg

SEQ ID NO: 9674 - DNA, 203 bp, Artificial sequence
  synthetic
ggcgcgccagtcctgtcctacaccctaccccatccccttattcagcacatgaaataaacaaggggcatccaaatcttgcggcaacgcccccgggacatgcatcgtcccctggactctctcaaaccccttatccctctggacagaatgcaggtccaaccacgctggtataccctcaaacccctcagacacgactcggaccgatg

SEQ ID NO: 9675 - DNA, 203 bp, Artificial sequence
  synthetic
ggcgcgccagtcctctctctcgccctaccccatccccttattcagcacatgaaataaacaaggggcatccaaatcttgcggcaacgcccccgggacatgcatcgtcccctggactctctcaaaccccttatccctctggacagaatgcaggtccaaccacgctggtataccctcaaacccctcagacacgactcggaccgatg

SEQ ID NO: 9676 - DNA, 203 bp, Artificial sequence
  synthetic
ggcgcgccagtcctaatttcatccctaccccatccccttattcagcacatgaaataaacaaggggcatccaaatcttgcggcaacgcccccgggacatgcatcgtcccctggactctctcaaaccccttatccctctggacagaatgcaggtccaaccacgctggtataccctcaaacccctcagacacgactcggaccgatg

SEQ ID NO: 9677 - DNA, 203 bp, Artificial sequence
  synthetic
ggcgcgccagtcctctgtgaagccttctgatggtgaatgggaactcccttcctcctgcagcagcctgcctgcagctgtcctggtagaacagtgtggacattgcagaagctgtcactgccccagaaagaaagcaccccagagccaaggcaaagagtcttgaaagcgccacaagcagcagctgctgagcccgactcggaccgatg

SEQ ID NO: 9678 - DNA, 203 bp, Artificial sequence
  synthetic
ggcgcgccagtccttcgttataccttctgatggtgaatgggaactcccttcctcctgcagcagcctgcctgcagctgtcctggtagaacagtgtggacattgcagaagctgtcactgccccagaaagaaagcaccccagagccaaggcaaagagtcttgaaagcgccacaagcagcagctgctgagcccgactcggaccgatg

SEQ ID NO: 9679 - DNA, 203 bp, Artificial sequence
  synthetic
ggcgcgccagtcctgcagtcgaccttctgatggtgaatgggaactcccttcctcctgcagcagcctgcctgcagctgtcctggtagaacagtgtggacattgcagaagctgtcactgccccagaaagaaagcaccccagagccaaggcaaagagtcttgaaagcgccacaagcagcagctgctgagcccgactcggaccgatg

SEQ ID NO: 9680 - DNA, 203 bp, Artificial sequence
  synthetic
ggcgcgccagtcctaacttgtcccttctgatggtgaatgggaactcccttcctcctgcagcagcctgcctgcagctgtcctggtagaacagtgtggacattgcagaagctgtcactgccccagaaagaaagcaccccagagccaaggcaaagagtcttgaaagcgccacaagcagcagctgctgagcccgactcggaccgatg

SEQ ID NO: 9681 - DNA, 203 bp, Artificial sequence
  synthetic
ggcgcgccagtcctgtcctacaccttctgatggtgaatgggaactcccttcctcctgcagcagcctgcctgcagctgtcctggtagaacagtgtggacattgcagaagctgtcactgccccagaaagaaagcaccccagagccaaggcaaagagtcttgaaagcgccacaagcagcagctgctgagcccgactcggaccgatg

SEQ ID NO: 9682 - DNA, 203 bp, Artificial sequence
  synthetic
ggcgcgccagtcctctctctcgccttctgatggtgaatgggaactcccttcctcctgcagcagcctgcctgcagctgtcctggtagaacagtgtggacattgcagaagctgtcactgccccagaaagaaagcaccccagagccaaggcaaagagtcttgaaagcgccacaagcagcagctgctgagcccgactcggaccgatg

SEQ ID NO: 9683 - DNA, 203 bp, Artificial sequence
  synthetic
ggcgcgccagtcctgcagtcgaaatatgttcattaccaacactgcagattcccattgagttggtgggggttttgttacctttgttttttttctcagcaaaataattctataactttttgtttgtgacaagaaatggactttcagtttacttaagattaatacttcttgaatgataaaatcattttgcccgactcggaccgatg

SEQ ID NO: 9684 - DNA, 203 bp, Artificial sequence
  synthetic
ggcgcgccagtcctagtgctgcaatatgttcattaccaacactgcagattcccattgagttggtgggggttttgttacctttgttttttttctcagcaaaataattctataactttttgtttgtgacaagaaatggactttcagtttacttaagattaatacttcttgaatgataaaatcattttgcccgactcggaccgatg

SEQ ID NO: 9685 - DNA, 203 bp, Artificial sequence
  synthetic
ggcgcgccagtcctgaaaccctaatatgttcattaccaacactgcagattcccattgagttggtgggggttttgttacctttgttttttttctcagcaaaataattctataactttttgtttgtgacaagaaatggactttcagtttacttaagattaatacttcttgaatgataaaatcattttgcccgactcggaccgatg

SEQ ID NO: 9686 - DNA, 203 bp, Artificial sequence
  synthetic
ggcgcgccagtcctctctctcgaatatgttcattaccaacactgcagattcccattgagttggtgggggttttgttacctttgttttttttctcagcaaaataattctataactttttgtttgtgacaagaaatggactttcagtttacttaagattaatacttcttgaatgataaaatcattttgcccgactcggaccgatg

SEQ ID NO: 9687 - DNA, 203 bp, Artificial sequence
  synthetic
ggcgcgccagtccttatcggatagtgactcccgttgtcccaaggcttcccagagcgaacctgtgcggctgcaggcaccggcgcgtcgagtttccggcgtccggaaggaccgagctcttctcgcggatccagtgttccgtttccagcccccaatctcagagcggagccgacagagagcagggaaccggccgactcggaccgatg

SEQ ID NO: 9688 - DNA, 203 bp, Artificial sequence
  synthetic
ggcgcgccagtcctgcagtcgaagtgactcccgttgtcccaaggcttcccagagcgaacctgtgcggctgcaggcaccggcgcgtcgagtttccggcgtccggaaggaccgagctcttctcgcggatccagtgttccgtttccagcccccaatctcagagcggagccgacagagagcagggaaccggccgactcggaccgatg

SEQ ID NO: 9689 - DNA, 203 bp, Artificial sequence
  synthetic
ggcgcgccagtcctagtgctgcagtgactcccgttgtcccaaggcttcccagagcgaacctgtgcggctgcaggcaccggcgcgtcgagtttccggcgtccggaaggaccgagctcttctcgcggatccagtgttccgtttccagcccccaatctcagagcggagccgacagagagcagggaaccggccgactcggaccgatg

SEQ ID NO: 9690 - DNA, 203 bp, Artificial sequence
  synthetic
ggcgcgccagtccttgaggtggagtgactcccgttgtcccaaggcttcccagagcgaacctgtgcggctgcaggcaccggcgcgtcgagtttccggcgtccggaaggaccgagctcttctcgcggatccagtgttccgtttccagcccccaatctcagagcggagccgacagagagcagggaaccggccgactcggaccgatg

SEQ ID NO: 9691 - DNA, 203 bp, Artificial sequence
  synthetic
ggcgcgccagtcctaggtattgagtgactcccgttgtcccaaggcttcccagagcgaacctgtgcggctgcaggcaccggcgcgtcgagtttccggcgtccggaaggaccgagctcttctcgcggatccagtgttccgtttccagcccccaatctcagagcggagccgacagagagcagggaaccggccgactcggaccgatg

SEQ ID NO: 9692 - DNA, 203 bp, Artificial sequence
  synthetic
ggcgcgccagtcctctgtgaaggcattgcccccagtctcccccaaatttgggcattgtccccgggtcttccaacggactgggcgttgctcccggacactgaggactggccccggggtctcgctcaccttcagcagcgtccaccgcctgccacagagcgttcgatcgctcgctgcctgagctcctggtgcgactcggaccgatg

SEQ ID NO: 9693 - DNA, 203 bp, Artificial sequence
  synthetic
ggcgcgccagtccttatcggatgcattgcccccagtctcccccaaatttgggcattgtccccgggtcttccaacggactgggcgttgctcccggacactgaggactggccccggggtctcgctcaccttcagcagcgtccaccgcctgccacagagcgttcgatcgctcgctgcctgagctcctggtgcgactcggaccgatg

SEQ ID NO: 9694 - DNA, 203 bp, Artificial sequence
  synthetic
ggcgcgccagtcctgcagtcgagcattgcccccagtctcccccaaatttgggcattgtccccgggtcttccaacggactgggcgttgctcccggacactgaggactggccccggggtctcgctcaccttcagcagcgtccaccgcctgccacagagcgttcgatcgctcgctgcctgagctcctggtgcgactcggaccgatg

SEQ ID NO: 9695 - DNA, 203 bp, Artificial sequence
  synthetic
ggcgcgccagtcctagtgctgcgcattgcccccagtctcccccaaatttgggcattgtccccgggtcttccaacggactgggcgttgctcccggacactgaggactggccccggggtctcgctcaccttcagcagcgtccaccgcctgccacagagcgttcgatcgctcgctgcctgagctcctggtgcgactcggaccgatg

SEQ ID NO: 9696 - DNA, 203 bp, Artificial sequence
  synthetic
ggcgcgccagtcctaacttgtcgcattgcccccagtctcccccaaatttgggcattgtccccgggtcttccaacggactgggcgttgctcccggacactgaggactggccccggggtctcgctcaccttcagcagcgtccaccgcctgccacagagcgttcgatcgctcgctgcctgagctcctggtgcgactcggaccgatg

SEQ ID NO: 9697 - DNA, 203 bp, Artificial sequence
  synthetic
ggcgcgccagtcctcttccactgcattgcccccagtctcccccaaatttgggcattgtccccgggtcttccaacggactgggcgttgctcccggacactgaggactggccccggggtctcgctcaccttcagcagcgtccaccgcctgccacagagcgttcgatcgctcgctgcctgagctcctggtgcgactcggaccgatg

SEQ ID NO: 9698 - DNA, 203 bp, Artificial sequence
  synthetic
ggcgcgccagtcctaggtattggcattgcccccagtctcccccaaatttgggcattgtccccgggtcttccaacggactgggcgttgctcccggacactgaggactggccccggggtctcgctcaccttcagcagcgtccaccgcctgccacagagcgttcgatcgctcgctgcctgagctcctggtgcgactcggaccgatg

SEQ ID NO: 9699 - DNA, 203 bp, Artificial sequence
  synthetic
ggcgcgccagtcctttgcgctcgcattgcccccagtctcccccaaatttgggcattgtccccgggtcttccaacggactgggcgttgctcccggacactgaggactggccccggggtctcgctcaccttcagcagcgtccaccgcctgccacagagcgttcgatcgctcgctgcctgagctcctggtgcgactcggaccgatg

SEQ ID NO: 9700 - DNA, 203 bp, Artificial sequence
  synthetic
ggcgcgccagtcctgaaaccctgcattgcccccagtctcccccaaatttgggcattgtccccgggtcttccaacggactgggcgttgctcccggacactgaggactggccccggggtctcgctcaccttcagcagcgtccaccgcctgccacagagcgttcgatcgctcgctgcctgagctcctggtgcgactcggaccgatg

SEQ ID NO: 9701 - DNA, 203 bp, Artificial sequence
  synthetic
ggcgcgccagtcctctctctcggcattgcccccagtctcccccaaatttgggcattgtccccgggtcttccaacggactgggcgttgctcccggacactgaggactggccccggggtctcgctcaccttcagcagcgtccaccgcctgccacagagcgttcgatcgctcgctgcctgagctcctggtgcgactcggaccgatg

SEQ ID NO: 9702 - DNA, 203 bp, Artificial sequence
  synthetic
ggcgcgccagtcctaatttcatgcattgcccccagtctcccccaaatttgggcattgtccccgggtcttccaacggactgggcgttgctcccggacactgaggactggccccggggtctcgctcaccttcagcagcgtccaccgcctgccacagagcgttcgatcgctcgctgcctgagctcctggtgcgactcggaccgatg

SEQ ID NO: 9703 - DNA, 203 bp, Artificial sequence
  synthetic
ggcgcgccagtccttatcggatttcctcccaaggctaaactttctaattcccttctttgggctcgggggctcccggagcagggcgagagctcgcgtcgccggaaaggaagacgggaagaaagggcaggcggctcggcgggcgtcttctccactcctctgccgcgtccccgtggctgcagggagccggccgactcggaccgatg

SEQ ID NO: 9704 - DNA, 203 bp, Artificial sequence
  synthetic
ggcgcgccagtccttgaggtggttcctcccaaggctaaactttctaattcccttctttgggctcgggggctcccggagcagggcgagagctcgcgtcgccggaaaggaagacgggaagaaagggcaggcggctcggcgggcgtcttctccactcctctgccgcgtccccgtggctgcagggagccggccgactcggaccgatg

SEQ ID NO: 9705 - DNA, 203 bp, Artificial sequence
  synthetic
ggcgcgccagtcctctgtgaagctgccggccggcggccccgcgctcgcccgccccgcttccgcccgctgtcctgctgcacgaacccttccaactctcctttcctcccccacccttgagttacccctctgtctttcctgctgttgcgcgggtgctcccacagcggagcggagattacagagccgccgggcgactcggaccgatg

SEQ ID NO: 9706 - DNA, 203 bp, Artificial sequence
  synthetic
ggcgcgccagtccttcgttatactgccggccggcggccccgcgctcgcccgccccgcttccgcccgctgtcctgctgcacgaacccttccaactctcctttcctcccccacccttgagttacccctctgtctttcctgctgttgcgcgggtgctcccacagcggagcggagattacagagccgccgggcgactcggaccgatg

SEQ ID NO: 9707 - DNA, 203 bp, Artificial sequence
  synthetic
ggcgcgccagtccttatcggatctgccggccggcggccccgcgctcgcccgccccgcttccgcccgctgtcctgctgcacgaacccttccaactctcctttcctcccccacccttgagttacccctctgtctttcctgctgttgcgcgggtgctcccacagcggagcggagattacagagccgccgggcgactcggaccgatg

SEQ ID NO: 9708 - DNA, 203 bp, Artificial sequence
  synthetic
ggcgcgccagtcctagtgctgcctgccggccggcggccccgcgctcgcccgccccgcttccgcccgctgtcctgctgcacgaacccttccaactctcctttcctcccccacccttgagttacccctctgtctttcctgctgttgcgcgggtgctcccacagcggagcggagattacagagccgccgggcgactcggaccgatg

SEQ ID NO: 9709 - DNA, 203 bp, Artificial sequence
  synthetic
ggcgcgccagtcctaacttgtcctgccggccggcggccccgcgctcgcccgccccgcttccgcccgctgtcctgctgcacgaacccttccaactctcctttcctcccccacccttgagttacccctctgtctttcctgctgttgcgcgggtgctcccacagcggagcggagattacagagccgccgggcgactcggaccgatg

SEQ ID NO: 9710 - DNA, 203 bp, Artificial sequence
  synthetic
ggcgcgccagtcctaggtattgctgccggccggcggccccgcgctcgcccgccccgcttccgcccgctgtcctgctgcacgaacccttccaactctcctttcctcccccacccttgagttacccctctgtctttcctgctgttgcgcgggtgctcccacagcggagcggagattacagagccgccgggcgactcggaccgatg

SEQ ID NO: 9711 - DNA, 203 bp, Artificial sequence
  synthetic
ggcgcgccagtcctttgcgctcctgccggccggcggccccgcgctcgcccgccccgcttccgcccgctgtcctgctgcacgaacccttccaactctcctttcctcccccacccttgagttacccctctgtctttcctgctgttgcgcgggtgctcccacagcggagcggagattacagagccgccgggcgactcggaccgatg

SEQ ID NO: 9712 - DNA, 203 bp, Artificial sequence
  synthetic
ggcgcgccagtcctgtcctacactgccggccggcggccccgcgctcgcccgccccgcttccgcccgctgtcctgctgcacgaacccttccaactctcctttcctcccccacccttgagttacccctctgtctttcctgctgttgcgcgggtgctcccacagcggagcggagattacagagccgccgggcgactcggaccgatg

SEQ ID NO: 9713 - DNA, 203 bp, Artificial sequence
  synthetic
ggcgcgccagtcctgaaaccctctgccggccggcggccccgcgctcgcccgccccgcttccgcccgctgtcctgctgcacgaacccttccaactctcctttcctcccccacccttgagttacccctctgtctttcctgctgttgcgcgggtgctcccacagcggagcggagattacagagccgccgggcgactcggaccgatg

SEQ ID NO: 9714 - DNA, 203 bp, Artificial sequence
  synthetic
ggcgcgccagtccttcgttataccccgttcttccctgcggagtgcgctgcgccgcccagccctgtcgccccccggaggtgatccctccctcctgcctgcccgccagcctgacctgtgcccggctcgcgggccgcagcctcggcccccgcgcgcccccggcagctctcggcgcgatgagcatagagacgcgactcggaccgatg

SEQ ID NO: 9715 - DNA, 203 bp, Artificial sequence
  synthetic
ggcgcgccagtcctcttccactccccgttcttccctgcggagtgcgctgcgccgcccagccctgtcgccccccggaggtgatccctccctcctgcctgcccgccagcctgacctgtgcccggctcgcgggccgcagcctcggcccccgcgcgcccccggcagctctcggcgcgatgagcatagagacgcgactcggaccgatg

SEQ ID NO: 9716 - DNA, 203 bp, Artificial sequence
  synthetic
ggcgcgccagtcctctctctcgccccgttcttccctgcggagtgcgctgcgccgcccagccctgtcgccccccggaggtgatccctccctcctgcctgcccgccagcctgacctgtgcccggctcgcgggccgcagcctcggcccccgcgcgcccccggcagctctcggcgcgatgagcatagagacgcgactcggaccgatg

SEQ ID NO: 9717 - DNA, 203 bp, Artificial sequence
  synthetic
ggcgcgccagtcctctgtgaaggcctggcaggcgcacgcgcccagcaccctgcctccggcgatgccgccccagcccctctgatggccctcctctctgctgccactcattccagaacaggaggcatgagcccggaacgcgcttgcttttaggagacagccactttctgtgtggtacgctggattcaaggcgactcggaccgatg

SEQ ID NO: 9718 - DNA, 203 bp, Artificial sequence
  synthetic
ggcgcgccagtccttatcggatgcctggcaggcgcacgcgcccagcaccctgcctccggcgatgccgccccagcccctctgatggccctcctctctgctgccactcattccagaacaggaggcatgagcccggaacgcgcttgcttttaggagacagccactttctgtgtggtacgctggattcaaggcgactcggaccgatg

SEQ ID NO: 9719 - DNA, 203 bp, Artificial sequence
  synthetic
ggcgcgccagtcctgcagtcgagcctggcaggcgcacgcgcccagcaccctgcctccggcgatgccgccccagcccctctgatggccctcctctctgctgccactcattccagaacaggaggcatgagcccggaacgcgcttgcttttaggagacagccactttctgtgtggtacgctggattcaaggcgactcggaccgatg

SEQ ID NO: 9720 - DNA, 203 bp, Artificial sequence
  synthetic
ggcgcgccagtcctagtgctgcgcctggcaggcgcacgcgcccagcaccctgcctccggcgatgccgccccagcccctctgatggccctcctctctgctgccactcattccagaacaggaggcatgagcccggaacgcgcttgcttttaggagacagccactttctgtgtggtacgctggattcaaggcgactcggaccgatg

SEQ ID NO: 9721 - DNA, 203 bp, Artificial sequence
  synthetic
ggcgcgccagtcctaacttgtcgcctggcaggcgcacgcgcccagcaccctgcctccggcgatgccgccccagcccctctgatggccctcctctctgctgccactcattccagaacaggaggcatgagcccggaacgcgcttgcttttaggagacagccactttctgtgtggtacgctggattcaaggcgactcggaccgatg

SEQ ID NO: 9722 - DNA, 203 bp, Artificial sequence
  synthetic
ggcgcgccagtcctaggtattggcctggcaggcgcacgcgcccagcaccctgcctccggcgatgccgccccagcccctctgatggccctcctctctgctgccactcattccagaacaggaggcatgagcccggaacgcgcttgcttttaggagacagccactttctgtgtggtacgctggattcaaggcgactcggaccgatg

SEQ ID NO: 9723 - DNA, 203 bp, Artificial sequence
  synthetic
ggcgcgccagtcctttgcgctcgcctggcaggcgcacgcgcccagcaccctgcctccggcgatgccgccccagcccctctgatggccctcctctctgctgccactcattccagaacaggaggcatgagcccggaacgcgcttgcttttaggagacagccactttctgtgtggtacgctggattcaaggcgactcggaccgatg

SEQ ID NO: 9724 - DNA, 203 bp, Artificial sequence
  synthetic
ggcgcgccagtcctgtcctacagcctggcaggcgcacgcgcccagcaccctgcctccggcgatgccgccccagcccctctgatggccctcctctctgctgccactcattccagaacaggaggcatgagcccggaacgcgcttgcttttaggagacagccactttctgtgtggtacgctggattcaaggcgactcggaccgatg

SEQ ID NO: 9725 - DNA, 203 bp, Artificial sequence
  synthetic
ggcgcgccagtcctaatttcatgcctggcaggcgcacgcgcccagcaccctgcctccggcgatgccgccccagcccctctgatggccctcctctctgctgccactcattccagaacaggaggcatgagcccggaacgcgcttgcttttaggagacagccactttctgtgtggtacgctggattcaaggcgactcggaccgatg

SEQ ID NO: 9726 - DNA, 203 bp, Artificial sequence
  synthetic
ggcgcgccagtcctctgtgaagaaaaaaccaggatcatcacgcgtgagttggataaggctctggatggtgtactgacacacaagcaaggctgcctccattgtctcagcaccgatttctaggcagcaccctctttaataggtgcaaggggggtgcggtgttggtgagtcacactttcgttgcagacaaacgactcggaccgatg

SEQ ID NO: 9727 - DNA, 203 bp, Artificial sequence
  synthetic
ggcgcgccagtccttatcggataaaacaatttcccataacaccccaataccccaaggacatttaaagctaaattcatctgtaatcaacagagctctacacaatgaccatcgtagtgtttgcgactgaatacgatgccgccaacgtaatttttagtatcctatgtagaagtcccagtgaacatttaatccgactcggaccgatg

SEQ ID NO: 9728 - DNA, 203 bp, Artificial sequence
  synthetic
ggcgcgccagtcctgcagtcgaaaaacttctgtgaaggtcacatccctagttggattacgccgcttttgaaaaatctagaagttgtttggaaaagagatatctggttcgtatgaataggatgctcttgaagaaagggccttcgggccaaacatctggtcggccatcgaccagaccgccggacccagcgcgactcggaccgatg

SEQ ID NO: 9729 - DNA, 203 bp, Artificial sequence
  synthetic
ggcgcgccagtcctattcacccaaaagtccatttccgtagcggccgcaaaaacaagaatgtaaaagagccagagactgacatataagcgttgccttgcgcctttcttacaactcatcttaagtgttattttgaactagtcttcgcgtcgacgtgattaacagcagacagccctctgtcacctggaaaacgactcggaccgatg

SEQ ID NO: 9730 - DNA, 203 bp, Artificial sequence
  synthetic
ggcgcgccagtcctgtcctacaaaacggaagttcagggagggcgaggccgtgccccacatccaggcagcgcaggccgcgggccgctcccctagccaggaagagccgccgtccgcaccgggaccggagaggaagcggaggtctgaagggggacaggtgaggcggaaccaaccctcctggccatgggaggcgactcggaccgatg

SEQ ID NO: 9731 - DNA, 203 bp, Artificial sequence
  synthetic
ggcgcgccagtcctgaaaccctaaacgttcctgctctcacagatcacgggaccctgccgctgcgcagcagtatccggggagtccagcgcgtgaccgttactgacgccagacgccgcacctgcccctacgtctacaaggccctgggcatagtcgcgccgcgcgtcctctcgagccgcaccttctaaaaacgactcggaccgatg

SEQ ID NO: 9732 - DNA, 203 bp, Artificial sequence
  synthetic
ggcgcgccagtcctggtgctcaaaagcgctcggtttaaaaagcttctatgcctgaataggtgaccggaggtcggcacctttcctttacaattaatgaccctatgaatacaactgactgttttatcgctgtggtaaacgccatcaaagaggtaatagcacttttcctatcacggactgcaggaaaaatgcgactcggaccgatg

SEQ ID NO: 9733 - DNA, 203 bp, Artificial sequence
  synthetic
ggcgcgccagtccttcacatccaacacagtgggggcgatagatgccatctgcgcgatctacaatttgaagtactgcgagatcgtttggaataaaaattaacatgattcttccgtctcttccctctcctctgctgcttgaaacgcaatccagttgcattgcttggttgggatttgcatatgctaccgtgcgactcggaccgatg

SEQ ID NO: 9734 - DNA, 203 bp, Artificial sequence
  synthetic
ggcgcgccagtcctcgtagcctaactgtccagtttaaaaagcttctatgcctgaataggtgaccggaggccggcaccttttccttttatccaacacattttatgaagacaactgactgttttgacgttttgctcgagatctttcacaggttccgacacacgttcaagacagacaggaagatggaattccgactcggaccgatg

SEQ ID NO: 9735 - DNA, 203 bp, Artificial sequence
  synthetic
ggcgcgccagtcctaccggcagaacttgttaggagacgccctcaatcgtattaaaagccgtgtattcccccgcactaaagaataaatccccagtagacatcatgcgtactgttggtgtatttctggccacctgtcttgtcaccattttcgtcctcccaacatggggcaattgggcatacccatgttgtcgactcggaccgatg

SEQ ID NO: 9736 - DNA, 203 bp, Artificial sequence
  synthetic
ggcgcgccagtcctagatcaccaactttcggtgctgttgtttaatcacaatgacaggttttacgagggtcgagctggagaccctgtggcttgtcttgtgatggaaagactgatttttccacctgttcgacaggctactatgatatgacgcttgtttcttttattttgcagactaattcaaaactaacacgactcggaccgatg

SEQ ID NO: 9737 - DNA, 203 bp, Artificial sequence
  synthetic
ggcgcgccagtcctcgatgcgcaagacacttttattttgcaaactcaaataaaggtgctaaaaaatcaaaaaacaacgaacctaaaccaagcacctcaaaaatgtctgaaaatgaaattcaagaccaacagccatcagaacctaatgatggccaacgaggagggggaggaggtgcgaccggcagtgtgcgactcggaccgatg

SEQ ID NO: 9738 - DNA, 203 bp, Artificial sequence
  synthetic
ggcgcgccagtcctacaagaataagagaccggaccctgaacagaatcgcagattgccagcccttttcccgacccctacggaaagacgagtccaggggccgtcctggcgaggtcaaaacatttagtctggtcttttcagtgtgccaggcactgtgccaagtattttgcttcgatgatttcacgtcatctcgactcggaccgatg

SEQ ID NO: 9739 - DNA, 203 bp, Artificial sequence
  synthetic
ggcgcgccagtcctcggcgtgaaagcgtgtgattcagtatctgtttttataatacggagagctatcgtgctgagcggaacagagctttggctgtgacgaagatggatgtgtggaagcgtcaacggcttcaagaatgccgtgaattgtgtcctttgcctgtattaatgtcactgtcgaatatgttttcacgactcggaccgatg

SEQ ID NO: 9740 - DNA, 203 bp, Artificial sequence
  synthetic
ggcgcgccagtcctggctcctgaaggaaaggaaaagcgcatccaagaatggctccaaaagaatggagagaacaggttgtcagccatggcagtcagcggggatgattgtgtggtgaaaccagcagatgacagattcgccacagcactgcatttcctcaacagcatgtctaaggtgaggaaagatactcacgactcggaccgatg

SEQ ID NO: 9741 - DNA, 203 bp, Artificial sequence
  synthetic
ggcgcgccagtcctgcttcttcaagggaccgtagagactggcagagcactaaaacaggtagttggtctatcaacagctgagaatgccctgttagtagccttattcggctacgtaggatatcaggcgctttcaaagaggcatataccagtagtcacagacatatattcaattgaagatcacaggttggacgactcggaccgatg

SEQ ID NO: 9742 - DNA, 203 bp, Artificial sequence
  synthetic
ggcgcgccagtcctcagggtgcaagtccctcactgagaggctttatgttgggggccctcttaccaattcaaggggggaaaactgcggctaccgcaggtgccgcgcgagcggcgtactgacaactagctgtggtaacaccctcacttgctacatcaaggcccgggcagcctgtcgagccgcagggctcccgactcggaccgatg

SEQ ID NO: 9743 - DNA, 203 bp, Artificial sequence
  synthetic
ggcgcgccagtcctaacagagcaagttttggagactaagtgaaagacattgtcggtttgcgcttgtcggcatctgttttcttttagccttgtatttttgttatgttctacttaaaaaaactcctacgccagcttctggctccgttgtgtaaacatgggtcgtacacgcatttgcaattgtttgtgatgcgactcggaccgatg

SEQ ID NO: 9744 - DNA, 203 bp, Artificial sequence
  synthetic
ggcgcgccagtcctactatgacaatcagtgtcgtcgcggtcgctgttctaaagtccgcacgcacccaccgggactcagattctccccagacgccgaggatggccgtcatggcgccccgaaccctcctcctgctactctcgggggccctggccctgacccagacctgggcgggctcccactccatgaggcgactcggaccgatg

SEQ ID NO: 9745 - DNA, 203 bp, Artificial sequence
  synthetic
ggcgcgccagtcctatccgcgtaatgaaatacccaatcactgctgacaaaaggataacagaaatggttccggagagaaatgaacaaggacaaactctatggagtaaaatgagtgatgctggatcagatcgagtgatggtatcacctttggctgtaacatggtggaatagaaatggacccgtggcaagtcgactcggaccgatg

SEQ ID NO: 9746 - DNA, 203 bp, Artificial sequence
  synthetic
ggcgcgccagtcctttagttcaaatgaagggagtgtacataaacacagctttgttgaatgcatcctgtgcagccatggatgacttccaactgatcccaatgataagcaaatgcagaaccaaagaaggaagacggaaaactaacctgtatggattccttataaaaggaagatcccatttgagaaatgaccgactcggaccgatg

SEQ ID NO: 9747 - DNA, 203 bp, Artificial sequence
  synthetic
ggcgcgccagtcctaatgagaaaatgaagggggtatacattaatactgccttgcttaatgcatcctgtgcagcaatggacgatttccaactaattcccatgataagcaagtgtagaactaaagagggaaggcgaaagaccaatttatatggtttcatcataaaaggaagatctcacttaaggaatgaccgactcggaccgatg

SEQ ID NO: 9748 - DNA, 203 bp, Artificial sequence
  synthetic
ggcgcgccagtcctgttcaattaatggaatttgaaccatttcaatctttagtccccaaggccattagaagccaatacagtgggtttgtcagaactctattccaacaaatgagagacgtacttgggacatttgacaccacccagataataaagcttctcccttttgcagccgctccaccaaagcaaagccgactcggaccgatg

SEQ ID NO: 9749 - DNA, 203 bp, Artificial sequence
  synthetic
ggcgcgccagtcctcgtcagtaaatgtgctctctgatgcaaggatcaactctcccgaggagatctggagctgctggtgcggcagtaaagggagtcggaacgatggtgatggaactaattcggatgataaagcgagggattaacgatcggaatttctggagaggtgaaaatgggcgaagaacaagaattcgactcggaccgatg

SEQ ID NO: 9750 - DNA, 203 bp, Artificial sequence
  synthetic
ggcgcgccagtcctcgggtttgacaaacgattaagaacagctgtcttggctccgactcgggtggtggccgctgaaatagcggaagcactgaaaggacttccaatacggtatctgactccggcagtaaagagggagcataccgggacagagataatagatgtgatgtgtcacgcgactttgacagcgcgcgactcggaccgatg

SEQ ID NO: 9751 - DNA, 203 bp, Artificial sequence
  synthetic
ggcgcgccagtcctttgggactacaaacgattaagaacagctgtcttggctccgactcgggtggtggccgctgaaatagcggaagcactgaaaggatttccaatacggtatctgactccggcagtaaagagggagcataccggaacagagataatagatgtgatgtgtcacgcgactttgacagcgcgcgactcggaccgatg

SEQ ID NO: 9752 - DNA, 203 bp, Artificial sequence
  synthetic
ggcgcgccagtcctcatcccacacaaagtacacaacaagcgttttgaaccacgttctatagacgaacgtgtcattcttggaggacttcatgattgcgatggtctcagttgagcattcaccttttaaataatttgcaaagggcgtgaccggatgttttaaagggtccagtcctcctcagatctcaaacacgactcggaccgatg

SEQ ID NO: 9753 - DNA, 203 bp, Artificial sequence
  synthetic
ggcgcgccagtcctgtatcgcgacactttcgtgatgtagcaagactgaagaaaggtacccccgtcgttggcgtgattaacaacgctgatgttgggagactgattttctctggtgaggcccttacctacaaagacattgtagtgtgcatggacggagacaccatgcccggcctctttgcctacaaagcccgactcggaccgatg

SEQ ID NO: 9754 - DNA, 203 bp, Artificial sequence
  synthetic
ggcgcgccagtcctgggctgatacagggaagaatttgaaaagttattggacgatagtccgggactttttgaagctcttaacttgggtcatcaggctcattttaaggagaaggttttatcagttttagatttttctactcctggtagaactgctgctgctgtagcttttcttacttttatattggataacgactcggaccgatg

SEQ ID NO: 9755 - DNA, 203 bp, Artificial sequence
  synthetic
ggcgcgccagtcctagttaagaacatttgtccgtgaggcgggcgcgctgcttagacgccactcgatctcgctcctgtccctggagcacaccctgtgtacctatgtatgacaccgacccccatcgccgcggctcccggcccgggccctatcacggcaaggagcgccggcggtcgcgctcctctgcggcccgactcggaccgatg

SEQ ID NO: 9756 - DNA, 203 bp, Artificial sequence
  synthetic
ggcgcgccagtcctagaccctgaccacgcctgcttcacgcctcgtttactaatggaatattaataaatatcttcctgttggctctctttgaagtggttgccatggtttcgtttaagcaggtgagggtgccattgtttaccgccatcgcacttgttattgttctactcctggcatactttttgccaccccgactcggaccgatg

SEQ ID NO: 9757 - DNA, 203 bp, Artificial sequence
  synthetic
ggcgcgccagtccttttgtataaccactcaccacattggtgtgcacctgggttgatggcgggaccgtcgattccctgacgactacgaacacctaaatgaagcggaaggcttcatttggtgaccccgacgtgatagttagggaatagtggtcggccacagacggcgtggcgatcctgtcctcatccgtccgactcggaccgatg

SEQ ID NO: 9758 - DNA, 203 bp, Artificial sequence
  synthetic
ggcgcgccagtcctaagatcacaccattcaccacattggtgtgcacctgggttgatggcgggaccgttgattccctgacgactacgagcacctgcatgaagcagaaggcttcatttggtgaccccgacgtgatagttagggaatagtggtcggccacagacggcgtggcgatcctgtctccatccgtccgactcggaccgatg

SEQ ID NO: 9759 - DNA, 203 bp, Artificial sequence
  synthetic
ggcgcgccagtcctgggtttgcaccccggctactcctgctcagcatggctgctttagggactgttctcttcagtgtccggaggctgcactgcagcgtagccgcttgggcgggcggccagtggcgactacagcagggactggctgccaacccctccggctacgggccccttaccgagctcccagactggcgactcggaccgatg

SEQ ID NO: 9760 - DNA, 203 bp, Artificial sequence
  synthetic
ggcgcgccagtcctctcgaattacgaaagtgtgactcaccaacaccgcaccccccttgcacctattaaagagggtgctgcctagaaatcggtgctgagacaatggaggcagccttgcttgtgtgtcagtacaccatccagagccttatccaactcacgcgtgatgatcctggttttttcaatgttgagcgactcggaccgatg

SEQ ID NO: 9761 - DNA, 203 bp, Artificial sequence
  synthetic
ggcgcgccagtcctaggatagaacgatttatgacagtaatgtaattcgcgtcagtcgtcggaaacgagaagacagtttactaaaaaagatgagattggagtatggaaacgcacttatactatgacaccctgtatcaatatcaaggcggagtgtatccggctcatatttgcctgccgacagatgtgtgtcgactcggaccgatg

SEQ ID NO: 9762 - DNA, 203 bp, Artificial sequence
  synthetic
ggcgcgccagtcctccttcctaacggaagtctcgttctttttcgtccttttccccggttgctgcttgctgtcctggtccgcgccagagcccagcgcgcctcgtcgccatgcctcggaaaattgaggaaatcaaggacttcctgctcacagcccgacgaaaggatgccaaatctgtcaagatcaagaaacgactcggaccgatg

SEQ ID NO: 9763 - DNA, 203 bp, Artificial sequence
  synthetic
ggcgcgccagtcctctgtttgaacgggctctcccttgggtgcttagccccgcccccgtcccactctgccctgttgctgtcgcgccgctgctggttgctgtccctggtggggtggaagacaacccgtgagtattacaccttcatgtgggttactttgcccattgacctaaacaacaaatcagctaaacacgactcggaccgatg

SEQ ID NO: 9764 - DNA, 203 bp, Artificial sequence
  synthetic
ggcgcgccagtcctcagtacagactgaccaaagctggaaatctttttttcaaaggctttggaagcagttagatctaagtgaccaagaagacgagggggaggatggaggctctgaaccagcgtttcaatgctctagaagaccagctcatggacatatatgaacaagggagtgataaattagaagatcaacgactcggaccgatg

SEQ ID NO: 9765 - DNA, 203 bp, Artificial sequence
  synthetic
ggcgcgccagtcctcacatgtaactgactgactcctttggattttgacctcagaatgcctacctgacctcccacttgcctctcccttctcggattgccggtggtgcctggcggaaaaagcacaagtgtgttgcaggctaccaaactcctacccgacaaaggtgcgtgtccgcgtgctgagtaatgggacgactcggaccgatg

SEQ ID NO: 9766 - DNA, 203 bp, Artificial sequence
  synthetic
ggcgcgccagtcctttggaatcactggaccctttaaaacatccggtcacgccctttgcaaattatttaaaaggtgaatgctcaactgagaccatcgcaatcatgaagtcctccaagaatgacacgttcgtctatagaacgtggttcaaaacgcttgttgtgtactttgtgatgtttgtcatgtcggcgcgactcggaccgatg

SEQ ID NO: 9767 - DNA, 203 bp, Artificial sequence
  synthetic
ggcgcgccagtcctgttcgcgaactggcgtgaattgtgcccaccagagggtgagcccacctgtctgacttggcccccgtgtacataatactcggggtctcggcacccaggcagccttgcgtggtgctatcctgctgcagggcgtttcttaggttctcggtcagacggccgcgctgcgaggcatacagccgactcggaccgatg

SEQ ID NO: 9768 - DNA, 203 bp, Artificial sequence
  synthetic
ggcgcgccagtcctgcgatgcaagaaaaaggacattgggctaaagattgccccaagaagccaagaggaccccggggaccgcgaccccaggcctccctcctgaccttagacgattagggaggtcagggtcaggagcccccccctgaacccaggataaccctcaaagtcggggggcaacccgtcaccttccgactcggaccgatg

SEQ ID NO: 9769 - DNA, 203 bp, Artificial sequence
  synthetic
ggcgcgccagtcctaggccaagagaagtgcttacgggcaatctccaaacattgaaaataagggtgcatgaggggtacgaggaattcacaatggtggggaaaagggcaacagctatactcagaaaagcaaccaggagattggttcagctgatagtgagtggaagagacgaacagtcaatagccgaagcacgactcggaccgatg

SEQ ID NO: 9770 - DNA, 203 bp, Artificial sequence
  synthetic
ggcgcgccagtcctcgttctacagacaccgtgtcctcttgcctgggagaggggaagcagatctgaggacatctctgtgccaggccagaaaccgcccacctgcagttccttctccgggatggacgtggggcccagctccctgccccaccttgggctgaagctgctgctgctcctgctgctgctgcccctcgactcggaccgatg

SEQ ID NO: 9771 - DNA, 203 bp, Artificial sequence
  synthetic
ggcgcgccagtcctacgaagaaagacttcactaacctattagcacttcaccacttcgatatcgtcgatcccattttcaccgtcaactactacgtttgaagaatgactgtacacaagagccgtattcgacgatcgcgaagcctgtccgtgacacacagaatacaaaaacgacctgatcacagagaaaaacgactcggaccgatg

SEQ ID NO: 9772 - DNA, 203 bp, Artificial sequence
  synthetic
ggcgcgccagtcctgcgttctgagagaaaaaaccggatgtacaaatgaggagggatgtaaagacttgcagatgaggttctcatagattgttattagtgattatggtgcctcagggttgtagtttagtatgggtgagtgcattatacgtgtcggtgatagcgtctttgcatattattaacaatgaaaatcgactcggaccgatg

SEQ ID NO: 9773 - DNA, 203 bp, Artificial sequence
  synthetic
ggcgcgccagtcctgtctacttagaggggtatgtgattctggtaggggacggaaggctaaaacggtttccgcccccgtctgaatttttgctttcggtttggagccgaagccgcgccgcgtgtcttgtctgctgcagcatcgttctgtgttgtctctgtttgactgtttttctgtatttgtctgaaagccgactcggaccgatg

SEQ ID NO: 9774 - DNA, 203 bp, Artificial sequence
  synthetic
ggcgcgccagtcctggcccgctagaggttagtgaaacacagggaacagagaagttgacaataacatattcatcctcaatgatgtgggaaatcaacggtcctgagtcagtgcttgttaacacttatcaatggatcatcaggaattgggagactgtaaagattcaatggtctcaagatcccacaatgctgcgactcggaccgatg

SEQ ID NO: 9775 - DNA, 203 bp, Artificial sequence
  synthetic
ggcgcgccagtcctgagtacctagatgaactatgattggagcctttatgaggaggacagtctgatgattacacaattggaaattcttaataatttgttgatatcagatgaactaccaatggcagtaaaaaatataatggccaggactgaccacccagaaccaattcagctggcgtacaacagctacgacgactcggaccgatg

SEQ ID NO: 9776 - DNA, 203 bp, Artificial sequence
  synthetic
ggcgcgccagtcctgagcgcacagccatggaagagctggatgcttgttacatcaacgagcaacaccggctctttccccttccccgtccctcccactggtacaattgtctctattgtcaacatccctcggaagacggcgacaccctcatgtcgctggcttgtgagtacgatgaagactgcccctttcaccgactcggaccgatg

SEQ ID NO: 9777 - DNA, 203 bp, Artificial sequence
  synthetic
ggcgcgccagtcctacgtcaggagccctcaaccggttggagaagctggcaagaagtacctttttgctcacaccatttccacgagctgcaaatgaaagatggcagaaagattgtggttccatgtcgagaccaggatgaactaattggaagagccaggctctctccagggtctggctggtcactaacagacgactcggaccgatg

SEQ ID NO: 9778 - DNA, 203 bp, Artificial sequence
  synthetic
ggcgcgccagtcctcacatacgaggaagattaagaaaaagtgtctgtggggtctttccgtgtagaagggcacacagccataattcttcctctttatacaacatggctacacaacatacgcaatatccagacgcaaggttatcatcacctatagttttagatcagtgtgatcttgtcactcgtgcttgtcgactcggaccgatg

SEQ ID NO: 9779 - DNA, 203 bp, Artificial sequence
  synthetic
ggcgcgccagtcctagcttcccaggaccggtttccgtgtcatatggatacacggggttgaaggtatcttcagacggtcttgcgcgcttcatctgcaacaacatgaagatagtgggtgcggatggacaggaacaggaggaaactgacattccatttagattgtggagaaagtttgcagccaggaggaagcgactcggaccgatg

SEQ ID NO: 9780 - DNA, 203 bp, Artificial sequence
  synthetic
ggcgcgccagtcctcagattagaggacgggcgctttggagccggccccaggcagcgtgtgtcggtcgcctagtctggagaactagtcctcgactcacgtgcaaggatgatgctgaaaggaataacaaggcttatctctaggatccataaggccaagcatggggatcagcacgagggtcagcactacaacgactcggaccgatg

SEQ ID NO: 9781 - DNA, 203 bp, Artificial sequence
  synthetic
ggcgcgccagtccttgacttctaggcgccactggacgacgcaagactgcaattgttctatctatcccggccatataacgggtcatcgcatggcatgggatatgatgatgaactggtcccctacggcagcgttggtggtagctcagctgctccggatcccacaagccatcatggacatgatcgctggtgcgactcggaccgatg

SEQ ID NO: 9782 - DNA, 203 bp, Artificial sequence
  synthetic
ggcgcgccagtcctttacaatgaggcgggtgggggacttccactacgtatcgggtatgactactgacaatcttaaatgcccgtgccagatcccatcgcccgaatttttcacagaattggacggggtgcgcctacataggtttgcgcccccttgcaagcccttgctgcgggaggaggtatcattcagagcgactcggaccgatg

SEQ ID NO: 9783 - DNA, 203 bp, Artificial sequence
  synthetic
ggcgcgccagtcctttcacataagggagcctccagtgggggctgtatcatcgccgcctgttgctgcatcacgctctcgtaagaaggaggaggaccctccggatacaccaccgctccgcctagcacggctcgtctcctcatcgtactagacacagataacaaaaaagaacgaacgcacgctcggtcgcccgactcggaccgatg

SEQ ID NO: 9784 - DNA, 203 bp, Artificial sequence
  synthetic
ggcgcgccagtcctgtaatggaagtaagtattacaccctttgccccacaccccctttcccttactcttccttctctaacgcactttctcctctttccccagtcaccctcctgctcatcgctctctggaatttgcacggacaggcattgtaccttggaattgtgctgttcatcttcgggtgcttacttgcgactcggaccgatg

SEQ ID NO: 9785 - DNA, 203 bp, Artificial sequence
  synthetic
ggcgcgccagtccttcgtagccagtcgcggctggccgactcatgggttaaagtcagttgacaagacacatggcttcttcaattctggtttctgactccgtctttgcccccatccttacccacaaactctcccgtcggatccggcgacaccccgtcgcttggcatcctagggagaactcccgactgtctcgactcggaccgatg

SEQ ID NO: 9786 - DNA, 203 bp, Artificial sequence
  synthetic
ggcgcgccagtcctgtagaggcagtgagcgacacactctgcgtcctcgcctcaccagatggagaggagaaaacctatggtggctgtgaaggacctgatgccatgtatgtcaaattgatatcatctgatggccatgaatttattgtaaaaagagaacatgcattaacatcaggcacgataaaagccatgcgactcggaccgatg

SEQ ID NO: 9787 - DNA, 203 bp, Artificial sequence
  synthetic
ggcgcgccagtcctcgcaagttagttctgcataaaagtgctttgtccctacatgccagcggtcataaaagaattggaaagactgcagctgaaatggggaggtggtttggttagggtgccactctcgcgtaattcgacacatgagatgtactgggtgagcggctcaagtgggaatgtgacaaatagtatcgactcggaccgatg

SEQ ID NO: 9788 - DNA, 203 bp, Artificial sequence
  synthetic
ggcgcgccagtcctaaacagtgagtttctgcacttaacaacacaaccaatcccactgcctaccacaagggcccggtgactcgactggctctcccatacaccgcgccacaccgtgtgttggctacggcgtacactggcactacgacctacaccgccagtgcacgcggggattcggctcacctaacgacgcgactcggaccgatg

SEQ ID NO: 9789 - DNA, 203 bp, Artificial sequence
  synthetic
ggcgcgccagtcctctgccgggagttttgcataaaagtgctttgtccctacatgccagcggtcataaaagaattggaaagactgcagctgaaatggggaggtggtttggctagggtgccactctcgcgtaattcaacacatgagatgtactgggtgagcggctcaagtgggaatgtgacaaatagtatcgactcggaccgatg

SEQ ID NO: 9790 - DNA, 203 bp, Artificial sequence
  synthetic
ggcgcgccagtcctcttataccatagccttcgcctcccgggggaaccatgtttcccccacgcactacgtgccggagagcgatgcagccgcccgcgtcactgccatactcagcagcctcactgtaacccagctcctgaggcgactgcatcagtggataagctcggagtgtaccactccatgctccggttcgactcggaccgatg

SEQ ID NO: 9791 - DNA, 203 bp, Artificial sequence
  synthetic
ggcgcgccagtccttaacacgtatattcggtaacaatgatgtctgaagacttaccagaagtttggacagctcaatgacagtgtccatctcgtcgcttgtcagttttctgtgtgggtaaaaaaaagactattaaacattgaatgttggcggaaatgagcagttctgtttttgagtttgttttctaaaatcgactcggaccgatg

SEQ ID NO: 9792 - DNA, 203 bp, Artificial sequence
  synthetic
ggcgcgccagtcctggaacgccatccgggagttgttggacgcggcgcttagccagggtccctatcctcctgactatacgcctcacggaggcgtctgaggtcatgttcaacatgaacgtggacgagagcgcctctggcgctctcggctcctcggccattcctgtgcaccccacgccggcctgggtccgacgactcggaccgatg

SEQ ID NO: 9793 - DNA, 203 bp, Artificial sequence
  synthetic
ggcgcgccagtccttagatttcatgccagacagggagcagcgagggtgacatcctggctcgggaggcaactcagaactgctgggaagaggttggagggtagaagcaaaacctggtttggcgcttatgccctatcgccttactgtaatgtaacaagcaaaatagggtacatatggtacactaacaactgcgactcggaccgatg

SEQ ID NO: 9794 - DNA, 203 bp, Artificial sequence
  synthetic
ggcgcgccagtcctgggtccgaattaggcctcacacgtgtggtcgaagctgctcctatccacgctatcattgctggtaggatgttgcttggtggactcattgagtacatgcaggcaaatcctggcaaacatggtagtgctgttggttgcaacccagacctacactggacaaaatttttctttaaattccgactcggaccgatg

SEQ ID NO: 9795 - DNA, 203 bp, Artificial sequence
  synthetic
ggcgcgccagtcctggcgggcaattgaggggattcctaattctaggcagagaggacaaaagatatggacccgcattgagcatcaatgaactgagcaatcttgcaaaaggggagaaggctaatgtattgataatgcaaggagacgtggtgttggtaatgaaacggaaacgggactttagcatacttactcgactcggaccgatg

SEQ ID NO: 9796 - DNA, 203 bp, Artificial sequence
  synthetic
ggcgcgccagtcctttactgtcatttattctattgtaagttggggggcaactggacatgtgtgaaaggcgagccagtggtctacacaggggggctagtaaaacaatgtagatggtgtggcttcgacttcgatgggcctgacggactcccgcattaccccataggtaagtgcattttggcaaatgagaccgactcggaccgatg

SEQ ID NO: 9797 - DNA, 203 bp, Artificial sequence
  synthetic
ggcgcgccagtcctactgtgcacaaaaagaaagaaggttttttgatctttattgtgtgcgaataactatgaggaagattaataattttcctctcattgacacttacattaagattaagattctcattgatctgttacttactctgaggataataattggtgttcagaagtaccccattccccagtgggcgactcggaccgatg

SEQ ID NO: 9798 - DNA, 203 bp, Artificial sequence
  synthetic
ggcgcgccagtcctctgctgaacaaaagttgtcggtgtcatgtgggactatgatgaagtagcagctcacacgccctctaagtctgctaagtcccacatcactggccttcggggcactgatgttcgttctggagcagcccgcaaggctgttctggacttgcagaagtgtgtcgaggcaggtgagatacccgactcggaccgatg

SEQ ID NO: 9799 - DNA, 203 bp, Artificial sequence
  synthetic
ggcgcgccagtcctccgtaagacaacctaggggactaggttttctctattttaaaagatgtcaatatgggtgcaaataatagcaaggagagtgtgtccagcaatggcaatcagggtactattgtcaataatttttatgctaactcatattatgcttctattgacgcttctgcctcctcagtcgggggccgactcggaccgatg

SEQ ID NO: 9800 - DNA, 203 bp, Artificial sequence
  synthetic
ggcgcgccagtcctggttgacccaactgctgctctagaaacttctcctcccgctcctttgggggctacctgtactacccaggctcctaccccagcagcctggtctacagcactgccctctgctctcccagcacctgccagctgcgttcctctctctacagggactgtcagaagacctgctgggagccccgactcggaccgatg

SEQ ID NO: 9801 - DNA, 203 bp, Artificial sequence
  synthetic
ggcgcgccagtcctcgggcgcacaactgttgctctagaaacttctcctcctgctcccacgggggttacttgcactacccaggctcctcctgtggctcttcctaccccagcaacctggtctacagcactgacctctgctctcccagcacctgccagctgggttcctctctctataggggctgtcaggagcgactcggaccgatg

SEQ ID NO: 9802 - DNA, 203 bp, Artificial sequence
  synthetic
ggcgcgccagtccttctagttgcaaggatgccaaggaatggctcgacaacacgcgccaagtgtgtttgaagaacgggaacgtccatattgccaacctttgcaaagtggtcgccccagcacccagcaagtcgagacccgagcccgtggtcgtttgcctccgcggcaagtctggccagggcaagagtttccgactcggaccgatg

SEQ ID NO: 9803 - DNA, 203 bp, Artificial sequence
  synthetic
ggcgcgccagtccttcgcttcgcaaggcccaacctagagtcaagctgtaactctaggggaaggactagaggttagaggagaccccttgcgagtgaacaccacaagagacagcatattgacacctgggatagactaggagaccctctgtcctaacaacaccaaccacttggcacagatcgccgaaagtgcgactcggaccgatg

SEQ ID NO: 9804 - DNA, 203 bp, Artificial sequence
  synthetic
ggcgcgccagtcctcaactgaccaatacagaaatatgttctggcactttagaaatgcttctgattgtgaacgttgtaattactgggacaatgtataccgtatgcacttagctcatgtttcctctcagacagaatcagaagaaataactgacgaggaaatgctttctgctgctgaaagtatggaaacagcgactcggaccgatg

SEQ ID NO: 9805 - DNA, 203 bp, Artificial sequence
  synthetic
ggcgcgccagtcctgcctcactcaattctgggacggaaccgactactttggggtgtccgtgtttcttttgttcatattaaactgttttatggtcacaacacaacttggtacgatttgtgattattcactgctcacttgtcacagtaaatatacacaatcatcatgcctgtcgttgtgaactcagtttacgactcggaccgatg

SEQ ID NO: 9806 - DNA, 203 bp, Artificial sequence
  synthetic
ggcgcgccagtcctgatcgccgcaattggtccaggagagggtggctaggcctgcatccttgcgaccacgttggcataaaccttccactgttcttgaagtattgaatcctaggactgttgttattttggaccatcttggcaacaacagaactgtaagtattgacaatttaaaacctacttctcatcagacgactcggaccgatg

SEQ ID NO: 9807 - DNA, 203 bp, Artificial sequence
  synthetic
ggcgcgccagtcctcaatcattcaccaagaggaactgactgaattacacaagaaacgtggggagctcaactggtgattgacctgaataaccaaatgcagcggaaggacagggagatgcagatgaatgaagcaaaaattgcagaatgtttgcagactatctctgacctggagacggagtgcctagacctcgactcggaccgatg

SEQ ID NO: 9808 - DNA, 203 bp, Artificial sequence
  synthetic
ggcgcgccagtcctccacaccacaccggcaagtcacatgagccaccaaaatggtggtgttcgggtatgaggctgggactaagccaagggattcaggtgtggtgccggtgggaactgaggaagcgcccaaggacacaaaatatatatcaaatggcgacatttggaacaacagctggtttctctggaatacgactcggaccgatg

SEQ ID NO: 9809 - DNA, 203 bp, Artificial sequence
  synthetic
ggcgcgccagtcctttaaactccacctctgactaaggggattttaggatttgtgttcacgctcaccgtgcccagtgagcgaggactgcagcgtagacgctttgtccaaaatgcccttaatgggaacggggatccaaataacatggacaaagcagttaaactgtataggaagctcaagagggagataaccgactcggaccgatg

SEQ ID NO: 9810 - DNA, 203 bp, Artificial sequence
  synthetic
ggcgcgccagtcctctttattgcacgagtacccggtggggtcgcaattaccttgcgagcccgaaccggacgtagccgtgttgacgtccatgctcactgatccctcccatataacagcagaggcggccgggagaaggttggcgagagggtcacccccttctatggccagctcctcggccagccagctgtcgactcggaccgatg

SEQ ID NO: 9811 - DNA, 203 bp, Artificial sequence
  synthetic
ggcgcgccagtccttaatccagcagcatcaggaactccggctttctttgatcttaaaaaccttaaaggctggtcagggctaccgatatttgaggcatcaagtggaagggtagtcggcagggtcaaggtcggtaagaatgaggactctaaaccaaccaagcttatgagtggaatacaaacagtttccaacgactcggaccgatg

SEQ ID NO: 9812 - DNA, 203 bp, Artificial sequence
  synthetic
ggcgcgccagtcctacgtaccgcagcgtgttggacttgggtggaagaggagggggcaacccgttcgctcatctgcgtcccagattcgggcgcatgttgtaaaagtgaaagtaaaataaaaaggcaactcaccaaggccatggcgaccgagcgtgcgttcgttcttttttgttatctgtgtctagtacgcgactcggaccgatg

SEQ ID NO: 9813 - DNA, 203 bp, Artificial sequence
  synthetic
ggcgcgccagtcctctcaattacaggaggagcccgtgaatcccaggtgtcattcgcgcgtcatccccgcgcacccccagtcccattaacatagcgggcacaatggtgcaggcaccgtctgtatacgtctgcggctttgtggagcgcccggacgccccacccaaggacgcctgccttcacctggatccccgactcggaccgatg

SEQ ID NO: 9814 - DNA, 203 bp, Artificial sequence
  synthetic
ggcgcgccagtccttgtgtgggcagggtgacaaagacataatggattccaacactgtgtcaagctttcaggtagactgctttctttggcatgtccgcaaacgatttgcagaccaagaactgggtgatgccccattccttgaccggcttcgccgagatcagaagtccctaagaggaagaggcagcactccgactcggaccgatg

SEQ ID NO: 9815 - DNA, 203 bp, Artificial sequence
  synthetic
ggcgcgccagtcctagttggtacagggttaataatcactcaccgagtgacatcaaaatcatggcgtcccaaggcaccaaacggtcttatgaacagatggaaactgatggggatcgccagaatgcaactgagattagggcatccgtcgggaagatgattgatggaattgggagattctacatccaaatgcgactcggaccgatg

SEQ ID NO: 9816 - DNA, 203 bp, Artificial sequence
  synthetic
ggcgcgccagtcctgtgtcgtccaggtactgattcgaaatggaagattttgtgcgacaatgcttcaacccgatgattgtcgaacttgcagaaaaagcaatgaaagagtatggagaggatctgaaaattgaaacaaacaaatttgcagcaatatgcacccacttggaggtatgtttcatgtattcagatcgactcggaccgatg

SEQ ID NO: 9817 - DNA, 203 bp, Artificial sequence
  synthetic
ggcgcgccagtcctagcacttgcagtaacgagctcgtgccgcgacagagggccttcagctaggacaacaacagcgagtgggaaactgataacagattggtgctgtaggtcttgcaccaccccaccactgagatttgttacaaaaagtggatgctggtatgggatggaaattcggccaactgctcacggcgactcggaccgatg

SEQ ID NO: 9818 - DNA, 203 bp, Artificial sequence
  synthetic
ggcgcgccagtcctgcgcaacgcagtaacgagctcgtgccgcgacagagggccttcagctaggacaacaacagcgagtgggaaactgataacagattggtgttgtaggtcttgcaccaccccaccactgagatttgttacaaaaagtggatgctggtatgggatggaaattcggccaactgctcacggcgactcggaccgatg

SEQ ID NO: 9819 - DNA, 203 bp, Artificial sequence
  synthetic
ggcgcgccagtcctaaggcatgcagtgccagttccagacactgcccatacctgcgggcgagcatcgggtcatcgggcatatcggccttgaccgcgttgaacatgctgtatgcctcgcagcgcggccgtctgaccgagaacctaagaaacgccctgcagcaggatagcaccacgcaaggctgcctgggtcgactcggaccgatg

SEQ ID NO: 9820 - DNA, 203 bp, Artificial sequence
  synthetic
ggcgcgccagtcctctaaggtacatcgatgctggatttctgagaaaccgcgtggagactctgaggcaggacaggggtgtggccaatatcccagccgagtcgtatttaaaggccagcgatgccccggacctacaaaagccggacaaggcacttcagagcccaccaccggcctccacagacccagacacccgactcggaccgatg

SEQ ID NO: 9821 - DNA, 203 bp, Artificial sequence
  synthetic
ggcgcgccagtcctaacactaccatcgcggattacgaaacgccgcggagctgaggcagttccgctggctagtgtgtacgcggcgagcttctcccggcgccgcccgctcggctcccatagcgcccgcgacaggggtccggacgccgcccgaacatggactccgccggccaaggtgtggctgcccggactcgactcggaccgatg

SEQ ID NO: 9822 - DNA, 203 bp, Artificial sequence
  synthetic
ggcgcgccagtcctccatacggcatgaaaatctcctggaagagttggggtcagtcaatgatctggagtgtcccggaggccccccgacggtttctggtgggcacagagggaagcagtgagtgtccactggcaaagagaagaacaggtgtcttcacagtggctgaatttggaatgggcttgagaacaaaacgactcggaccgatg

SEQ ID NO: 9823 - DNA, 203 bp, Artificial sequence
  synthetic
ggcgcgccagtcctcgtgcagtcattggcgggagctattccagtgaagtactctggaagcaaattggaaatgacctcaggtcatcttaaatgtagggttaaaatgcagggtttgaagctgaaaggaatgacctacccgatgtgtagcaatacattttccctagtgaagaatcctaccgacactgggcacgactcggaccgatg

SEQ ID NO: 9824 - DNA, 203 bp, Artificial sequence
  synthetic
ggcgcgccagtccttgcgttagcattggtgcactgcgcaggcgcatgcacctacggatcaacgtggaccgcattgacggcaaacccttcgatcctgtggaggccctcaaaccccttaaccaaccttccaaatatctaacctcccaaactgaactttctctcttcagatcttttaaacttactgttgcccgactcggaccgatg

SEQ ID NO: 9825 - DNA, 203 bp, Artificial sequence
  synthetic
ggcgcgccagtcctcgcaaagcccaaagaaggaggacttatgtacgcagacgacacggctggatgggacactagaataaccaaggctgatttggaaaacgaagccatcattttggaaaagatggaaccaatgcacagagctgtcgcagaaccactcattaaatttgcctacatgaacaaggtggtgaacgactcggaccgatg

SEQ ID NO: 9826 - DNA, 203 bp, Artificial sequence
  synthetic
ggcgcgccagtcctttatttatccacagcccttcttgccctccccggcaacattgccggcggtgctccttctgcgacggtcaacgccaacaacacttctatctcctctcaagctcttttaccctccgtcaacccttacccttctactcctgctgtctcactccccaaccccgacgcccccactcaagtcgactcggaccgatg

SEQ ID NO: 9827 - DNA, 203 bp, Artificial sequence
  synthetic
ggcgcgccagtcctcattgactccaccaaactgccagccccctccatcgaagaggtagtggtaagaaagcgccagttccgggcaagaactggttcgcttaccttgcctccccctccgagatccgtcccaggagtgtcatgtcctgaaagcctgcaacgaagtgacccgttagaaggtccttcaaacctcgactcggaccgatg

SEQ ID NO: 9828 - DNA, 203 bp, Artificial sequence
  synthetic
ggcgcgccagtcctctaatgatccaccgcggtaaaggtcgctgggaagaccccgtggatccactactctcgactcaagaaagctcctgacaaccaagaagaatggactgtctcaccaacctccgatccactgagggtaaagttgaccaggcgggcaaaaccctaattcttcttgtggtttggtgggggcgactcggaccgatg

SEQ ID NO: 9829 - DNA, 203 bp, Artificial sequence
  synthetic
ggcgcgccagtcctagcgacctccactgcatacacgcagaatgggacactggtctgaactccaagttcacgttttcaatcccgtacatctcggccgctgactacgcgtacaccgcgtcccacaaggctgaaacaacaagtgtacaggggtgggtctgtgtgtaccaaatcactcacggcaaggcagaccgactcggaccgatg

SEQ ID NO: 9830 - DNA, 203 bp, Artificial sequence
  synthetic
ggcgcgccagtccttgaggcctccactgctctccaggaagataaggcttttaaagcagcctagcactagaaggctctgtgtgctccgggatggagcaggtgtgcagagggtgagaacccagctctgggaccaagtcacttgcttccttacttagcaagactatcgacttgagcaaacttggacctgggcgactcggaccgatg

SEQ ID NO: 9831 - DNA, 203 bp, Artificial sequence
  synthetic
ggcgcgccagtcctgccgcgggccatatttccggtatatgaccttcgtaagctgctcggtgcgcttgtcatttcggaaggtagtgtcaagttcgacatataatgtctttgaaggactatctgagacagtccatttctaaagatttggaggtgagacatcgagattctttaaagattagattaggggagcgactcggaccgatg

SEQ ID NO: 9832 - DNA, 203 bp, Artificial sequence
  synthetic
ggcgcgccagtcctagatcgggccattcggccaaatcccccccgtacaacatccgcgctagcgatacgctcgacgtgtactgttcgcactcgtcgtccccaatgggacgcccggcccccagaggatctcccgactccgcgccccccacgaaaggcatgaccggggcgcggacggcgtggtgggtctggcgactcggaccgatg

SEQ ID NO: 9833 - DNA, 203 bp, Artificial sequence
  synthetic
ggcgcgccagtcctagttagcgcccaaaaactgaccaccgaccgcattccatttctcgatatcttcgacgataggtacaacctagtcagacacgtcgaacgacaattaaactggtacgccgcatatgccgaagcagcgcagcaagatcttattgctcctcttacgttttaacggtcgcgttctaaccccgactcggaccgatg

SEQ ID NO: 9834 - DNA, 203 bp, Artificial sequence
  synthetic
ggcgcgccagtcctcgcattaccccaaatgaagtgggagctagaatattgacatcagagtcgcaattgacaataacaaaagagaagaaagaagagctccaggattgtaaaattgctcctttaatggtggcatacatgttggaaagagaactggtccgcaaaaccagatttctaccggtagcaggcggacgactcggaccgatg

SEQ ID NO: 9835 - DNA, 203 bp, Artificial sequence
  synthetic
ggcgcgccagtccttcgccaatcccaaggatcaccctcaaggtccggcccacggagtgcggatttctatcgaaggcaaaatagactctcgcctgcaacgaattttctcccagcggcccgtgctgatcgagcgagaccagggaaacaccacggtttccatctactgcatttgtaatcaccccggattgccgactcggaccgatg

SEQ ID NO: 9836 - DNA, 203 bp, Artificial sequence
  synthetic
ggcgcgccagtcctacgcgcctccccagctccagaggcatcagcgcgcgcaggcgggcagcggggtcgtccccagacagcagcaactgacgcgtcacgcgggcgagccccccgtccacctctgccaggggcggctgggcgtctgcccctccgctaccgccgccgctgtcactctccatagcggacgcccgactcggaccgatg

SEQ ID NO: 9837 - DNA, 203 bp, Artificial sequence
  synthetic
ggcgcgccagtcctgaacgagcccccgtctacgggaaggtttacaacccccctcggactgctctgccggggcggttcacaaactacctggatgttgccgaggcttgtcccaccttcctgatgttcgagaacgtaccttacgtctcaacacgaactgacgggcaaaggctactggccaagttcgacgtgcgactcggaccgatg

SEQ ID NO: 9838 - DNA, 203 bp, Artificial sequence
  synthetic
ggcgcgccagtcctagagtttacccctgctcttgttcccggggggcttctggctaagcagtttggtgataatatgagagagtttttacaactagaacttaaagaagaacttagagccaagggcatgtcaattgatgttgccattctcaattcgctacaggtgacacaggagcaagatattttgtcattcgactcggaccgatg

SEQ ID NO: 9839 - DNA, 203 bp, Artificial sequence
  synthetic
ggcgcgccagtcctaatacccgcccgcctttcataagttttaccgtctgtcccgacgttaaagggaggtaaccacaagcatactgccgccttccccggcgttaacgggatgcaaccgtaagacacaccttcatccggaagtaaaacggctgcgtcacatagttttgcccgttttcacgagaaacgggacgactcggaccgatg

SEQ ID NO: 9840 - DNA, 203 bp, Artificial sequence
  synthetic
ggcgcgccagtcctgcccgtgaccctgtagccggagggttattttccaagggttgagtcgcgggacccccggttcgagtctgggaccggccggactgcggcgaacgggggtttgcctccccgtcatgcaagaccccgcttgcaaattcctccggaaacagggacgagccccttttttgcttttcccagcgactcggaccgatg

SEQ ID NO: 9841 - DNA, 203 bp, Artificial sequence
  synthetic
ggcgcgccagtccttcctggctccgagcagccggtcctccagtggctccgctccccgttctctgtgggctcaaaatgacagaggctcacaggacacctgcatgcccaaggcactccaccgtatgtgatcaacctggatccagcagtacatgaagttccctttcctgccaatattggtgatgaaatttacgactcggaccgatg

SEQ ID NO: 9842 - DNA, 203 bp, Artificial sequence
  synthetic
ggcgcgccagtccttgccgaccccgatgatggcgcaagtgggagtaaagagaagaagccagataggatcaacaaaggcaaattaaaaatagccccaaaagagcatgagaaggacagcagaactaggccacctgacgctacgatcgtggtggaaggagtaaaataccaggtcaaaaagaaaggtaaagtcgactcggaccgatg

SEQ ID NO: 9843 - DNA, 203 bp, Artificial sequence
  synthetic
ggcgcgccagtcctaaacatacccgcacctgcccctacgtttacaaggccctgggcatagtctcgccgcgcgtcctatcgagccgcactttttgagcaagcatgtccatccttatatcgcccagcaataacacaggctggggcctgcgcttcccaagcaagatgtttggcggggccaagaagcgctcccgactcggaccgatg

SEQ ID NO: 9844 - DNA, 203 bp, Artificial sequence
  synthetic
ggcgcgccagtcctgcgtgtaaccgcctcggaaaaagcgtacggtggtcctcaccgaatcaaccctatctactgccttggccgagcttgccaccaaaagttttggcagctcctcaacttccggcattacgggcgacaatacgacaacatcctctgagcccgccccttctggctgcccccccgactccgcgactcggaccgatg

SEQ ID NO: 9845 - DNA, 203 bp, Artificial sequence
  synthetic
ggcgcgccagtcctgacaaaccccgcgccgcgcgtcttgtctgctgcagcatcgttctgtgttgtctctgtttgactgtttttctgtatttgtctgaaaacatgggccaggctgttaccacccccttaagtttgactttagaccactggaaggatgtcgaacggacagcccacaacctgtcggtagagcgactcggaccgatg

SEQ ID NO: 9846 - DNA, 203 bp, Artificial sequence
  synthetic
ggcgcgccagtcctctcgttgtccgcgccgcgcgtcttgtctgtctcagtgttgttctgtcatttgtctgttcattgttgttttggaccgtttctaaaaatatgggacagaccgtaaccactcccttgagtctgacccttgaacactggggagacgtccagcgcattgcgtccaaccagtccgtggaccgactcggaccgatg

SEQ ID NO: 9847 - DNA, 203 bp, Artificial sequence
  synthetic
ggcgcgccagtcctctgtgggcccgctccgcctagcacggctcgtctcctcatcgtactagacacagataacaaaaaagaacgaacgcacgctcggtcgccatggccttggtgagttgcctttttattttactttcacttttacaacatgcgcccgaatctgggacgcagatgagcgaacgggttgcccgactcggaccgatg

SEQ ID NO: 9848 - DNA, 203 bp, Artificial sequence
  synthetic
ggcgcgccagtcctgcagattcccggccaggccgggagtggcgtgctgggcgtgcgcggctgcggtacggcgtgttggtcccagcggttcagctgaggtagggacgtgctgtaggccggaatgttaccggctgttggatctgtggatgaggaagaggatcctgcggaggaggattgtcctgaattggtcgactcggaccgatg

SEQ ID NO: 9849 - DNA, 203 bp, Artificial sequence
  synthetic
ggcgcgccagtcctggctttcaccggctctcctggccagtacccggacgagttcataccaaacttcgacgcaatcagcgagtcagtggatggctatgattgatgtctaatggtggtgcggctgagctagctcgactgcgacacctagaccactgccgccgctttcgctgcttcgcccgggaactcacccgactcggaccgatg

SEQ ID NO: 9850 - DNA, 203 bp, Artificial sequence
  synthetic
ggcgcgccagtcctacagatagccggtccctccccggggctggagcctttggtaacgtggttgctggtcaggaaattcccatctacgcgatggagtccttccgtccaccagttgactacctaccagccaaagtcaacgattggcttgagttcgcccaccgccctggtctgttcgagtcttacacttggcgactcggaccgatg

SEQ ID NO: 9851 - DNA, 203 bp, Artificial sequence
  synthetic
ggcgcgccagtcctgctctataccgttgacgcggctaatgaccaggacatctatcaaccaccatgtggagctgggtcccttactcggtgctcttgcggggagaccaaggggtatctggtaacacgactggggtcattggttgaggtcaacaaatccgatgacccttattggtgtgtgtgcggggccctcgactcggaccgatg

SEQ ID NO: 9852 - DNA, 203 bp, Artificial sequence
  synthetic
ggcgcgccagtcctgtttccaacctaggaaaccctcagctcagagaacaaccctgcattccccacacaacacccacaatcagccactgcgggcgaggagggcacgaggccaggttcccaagagctcagggaacgggcctggctctggcccctgacgcaggaacatggagctgatccaggacacctccccgactcggaccgatg

SEQ ID NO: 9853 - DNA, 203 bp, Artificial sequence
  synthetic
ggcgcgccagtcctttgctttacctccgagtgactgagtcgcccgggtacccgtgtatccaataaaccctcttgcagttgcatccgacttgtggtctcgctgttccttgggagggtctcctctgagtgattgactacccgtcagcgggggtctttcatttgggggctcgtccgggatcgggagacccccgactcggaccgatg

SEQ ID NO: 9854 - DNA, 203 bp, Artificial sequence
  synthetic
ggcgcgccagtcctgattagatcctcggagggtggattcagcggccatcctatttgataatctcgcggtggagatatttaacgatgtaatatatcgacaaaatggagttgccgcgaaaatacgacagggtaacgggcaggatattgacacataagaataaccagatgtgtacaaccgaatgttctcagcgactcggaccgatg

SEQ ID NO: 9855 - DNA, 203 bp, Artificial sequence
  synthetic
ggcgcgccagtccttgtgaacacctctctacaaccctctctcctcagcgcttcttctttcttggtttggtgcttctgagatgtgggcttgcacacgctgttgctatagtacgtgttgatcctgactgctgtcatggcgtgccctctggagaaggccctggatgtgatggtgtccaccttccacaagtacgactcggaccgatg

SEQ ID NO: 9856 - DNA, 203 bp, Artificial sequence
  synthetic
ggcgcgccagtcctactaatcgcctgtccctacgtttacaaggccctgggcatagtcgcgccgcgcgttctttcaagccgcactttctaaaaaaaaaaaaaatgtccattctcatctcgcccagtaataataccggttggggactgtatgcgcccaccaagatgtatggaggcgcccgcaagcgctctcgactcggaccgatg

SEQ ID NO: 9857 - DNA, 203 bp, Artificial sequence
  synthetic
ggcgcgccagtccttcttacttcctgtgcttgtgtttaaaaattgtcgcagcttccccaaaccaagtggtcttggttttctctttttattatattgtcaatatggcttgcaaacacggatacccagacgtgtgccctatttgcacagccgttgacgctactcccgactttgaatatttgctcatggcacgactcggaccgatg

SEQ ID NO: 9858 - DNA, 203 bp, Artificial sequence
  synthetic
ggcgcgccagtcctgcgttacccgaagatcagcttcggcgcacgctggaagacgcggaggctctcttcagtaaatactgcgcgctgactcttaaggactagtttcgcgccctttctcaaatttaagcgcgaaaactacgtcatctccagcggccacacccggcgccagcacctgtcgtcagcgccattcgactcggaccgatg

SEQ ID NO: 9859 - DNA, 203 bp, Artificial sequence
  synthetic
ggcgcgccagtcctaactatcgcgaccaactcttccttaaacacaacaagggagacatggacgaaccctggcccggactcgaggcggccgccgacctttacttctccaaatttccaaccatgatccatactctgacgatggaagaggcaatcaatggaactcccaatctcgagggcattgacatgaatcgactcggaccgatg

SEQ ID NO: 9860 - DNA, 203 bp, Artificial sequence
  synthetic
ggcgcgccagtcctgcctggtccgacggatgacagaatagggctcccccaagacaatttccaccaagtggagacgaaatgcccctgtggttacaagatgaaggcagttaagaattgtgctggagaactgagactcttggaggaggagggttcatttctctgcagaaataaattcgggagaggttcacgcgactcggaccgatg

SEQ ID NO: 9861 - DNA, 203 bp, Artificial sequence
  synthetic
ggcgcgccagtcctagtctacacgatgattgccactgatcctggcggcctgggtattctcggtatccatgtcgccggggtggctggctacaacggcttctccgcgcgccttacccctgaacgtgtccaagctttcctctctaacctggccacacctcagtctgttcttcatttccacccacccatgggcgactcggaccgatg

SEQ ID NO: 9862 - DNA, 203 bp, Artificial sequence
  synthetic
ggcgcgccagtcctatcaagagcgcacgtctctcgtcgcagtcggctccatccctcccctgcctttggcgccttccccatcaccaaagaaccagcagccctttctaggaaggaccctcgcctccccgagggcaccgacctggatgctatcaccctcgccaagcacgacaagggcgacatcgcgacgcccgactcggaccgatg

SEQ ID NO: 9863 - DNA, 203 bp, Artificial sequence
  synthetic
ggcgcgccagtcctaaggagcgcgcccccgccttccagctgctgccgggggactcttcgcacaccgcgacgctcgccaggaccccggggggcgaagttgccatggctgggcgggaggggcgcacgcgccagcgaactttacgggacacaatccccgactgcgcgctgcggtcccagaccctggagagtcgactcggaccgatg

SEQ ID NO: 9864 - DNA, 203 bp, Artificial sequence
  synthetic
ggcgcgccagtcctcacgtagccgcccgcagcacgcggatcttacggcctgcgtcatcacccagggcacgatcctcgcccaattgcacgccatccaaaaatcccgccaagagtttcttctgaaaaagggtaaaggggtctacctggacccccagacgggcgaagtgcttaacccgggtctcccccagccgactcggaccgatg

SEQ ID NO: 9865 - DNA, 203 bp, Artificial sequence
  synthetic
ggcgcgccagtcctgtcattctcgccgacatggagctgttcctcgcgggccgccgggtgctggtcaccggggcaggcaaagggcgcggcacggtccaggcgctgcacgcgacgggcgcgcgggtggtggctgtgagccggactcaggcggatcttgacagccttgtccgcgagtgcccggggatagaacgactcggaccgatg

SEQ ID NO: 9866 - DNA, 203 bp, Artificial sequence
  synthetic
ggcgcgccagtcctatccttcccggacggcgtttccacggacgcccaggagacagccggttgctgagccgggagcgctgactggcccggctgggcaggtcttgactcgtctgctgaacaaatcctctgacctcaggccggctgtgaacgtagttcctgagagatagcaaacatgcccaacagtgagcccgactcggaccgatg

SEQ ID NO: 9867 - DNA, 203 bp, Artificial sequence
  synthetic
ggcgcgccagtcctgattcgcccggccccgccgggcggccgcgggtgggtagagaacatggacttcccgtgcctctggctagggctgttgctgcctttggtagctgcgctggatttcaactaccaccgccaggaagggatggaagcgtttttgaagactgttgcccaaaactacagttctgtcactcacgactcggaccgatg

SEQ ID NO: 9868 - DNA, 203 bp, Artificial sequence
  synthetic
ggcgcgccagtcctcgatagatcggcgagcagctcagaccatgtcgcctgaagaatggacgtatctagtggttcttcttatctccatccccatcggcttcctctttaagaaagccggtcctgggctgaagagatggggagcagccgctgtgggcctggggctcaccctgttcacctgtggcccccacacgactcggaccgatg

SEQ ID NO: 9869 - DNA, 203 bp, Artificial sequence
  synthetic
ggcgcgccagtcctatccactacggctcctgaaaaagactgtatgcccaaggccagacggcagcgaactcgtcgcacacgcagcaacagaccaccaacaccatgggtaagataattgctttccttttattccatcttacatgtatcacaatcactaaacagagccggtgcacgcttacggtaggtgtccgactcggaccgatg

SEQ ID NO: 9870 - DNA, 203 bp, Artificial sequence
  synthetic
ggcgcgccagtcctttcatcgccggctggacttgtccggttggttcacggctggctacagcgggggagacatttatcacagcgtgtctcatgcccggccccgctggttctggttttgcctactcctgctcgctgcaggggtaggcatctacctcctccccaaccgatgaaggttggggtaaacactcccgactcggaccgatg

SEQ ID NO: 9871 - DNA, 203 bp, Artificial sequence
  synthetic
ggcgcgccagtcctacgctttccgggatgccatctggctgttccgcaacaagcatcatcaacacaattttgaataacatctacgttctctacgccctgcgtagacactatgagggggttgagctggacacctacaccatgatctcctatggagacgacatcgtggtggcaagcgattatgatctggaccgactcggaccgatg

SEQ ID NO: 9872 - DNA, 203 bp, Artificial sequence
  synthetic
ggcgcgccagtccttaagggttcgtacagtgatctggtcaagtacgtcattctagtggcagctgcatttgctgagagcaatacaggtggtgacattgtgcacttggccatggtggctgcttttaacatccagccaggtttactgattggattcctactgaggaggaagtggagcaatcaggaaagcagcgactcggaccgatg

SEQ ID NO: 9873 - DNA, 203 bp, Artificial sequence
  synthetic
ggcgcgccagtcctttaccacacgtctcgctgaggtcatcctttacggcaggcgtccgcgtcgctagctagtcgttctgaagcggcggccagagaagagtcaagggcacgagcatcggccatgcctttcttggacatccagaaaaggttcggccttaacatagatcgatggttgacaatccagagtggcgactcggaccgatg

SEQ ID NO: 9874 - DNA, 203 bp, Artificial sequence
  synthetic
ggcgcgccagtcctcttactagcgttcctgctctcacagatcacgggacgctaccgctgcgcaacagcatcggaggagtccagcgagtgaccattactgacgccagacgccgcacctgcccctacgtttacaaggccctgggcatagtctcgccgcgcgtcctatcgagccgcactttttgagcaagccgactcggaccgatg

SEQ ID NO: 9875 - DNA, 203 bp, Artificial sequence
  synthetic
ggcgcgccagtcctcctggacactaattcttctgtataagggcagggggtgggtatttaaggatctatatgcccttctctacctgcacctccaaatgagagatgactcggcgtagggtgctaagcgtggtcgtgctgctagccgccctggcgtgccgcctcggtgcgcagaccccagagcagcccgcacgactcggaccgatg

SEQ ID NO: 9876 - DNA, 203 bp, Artificial sequence
  synthetic
ggcgcgccagtcctagattcgtctacaaccgcttccagctacgttactggccccccgtaccctaagatacggggaaaggattccactcagtcagcccccgccaaacggcctacaaaaaagaagttgggaaagagtgagttttcgtgcagcatgagctacacttggaccgacgtgattagcttcaaaaccgactcggaccgatg

SEQ ID NO: 9877 - DNA, 203 bp, Artificial sequence
  synthetic
ggcgcgccagtcctctatacaactaggtcgtttgggaaacgccttggagagtcaagaataaatttgcaggtcaaacaatggatgactggaaaagtcggcttgtaatcaagagcatgcttccccatttcgccatggtgggaaatcgtcaggagcccagaaagctccaggaatcgggaactgttaagaggcgactcggaccgatg

SEQ ID NO: 9878 - DNA, 203 bp, Artificial sequence
  synthetic
ggcgcgccagtcctgatccagactccaaattctttgctgaaaacccccctcctgtatctcttgctggaaaaatcaacctttccgatttcactgacctcactctctccactcctggacagatggtgcgccagggcaactccaccactaacatctacggaagtaataacaatgttactactgacgtgggtcgactcggaccgatg

SEQ ID NO: 9879 - DNA, 203 bp, Artificial sequence
  synthetic
ggcgcgccagtcctaatctttactcccacgtggcctcctttgtgctggcctggacacgcgcttttgtatcagagtgggctgggttcctctacgaagaggaccgaggcactccgctcgaggacaggcccataaagtcggtctacggggacacggacagcctctttgtcacccagcggggacacgaactccgactcggaccgatg

SEQ ID NO: 9880 - DNA, 203 bp, Artificial sequence
  synthetic
ggcgcgccagtcctccagagaactcccattgactcagctttctatggcctcagattccccatccccttcccaacgccccagcactggaagacacgtgctgtccctggtgccggctcctacggctcggtcgtggctggccaggaaatccccctggttggctatgcccccgctgctcccccccgcgattacgactcggaccgatg

SEQ ID NO: 9881 - DNA, 203 bp, Artificial sequence
  synthetic
ggcgcgccagtccttttacgacctcgcacgtggcctcctttgtcttggcgtggacgcgcgcctttgtctcagagtggtccgagtttctctacgaggaggaccgcgggacgcccctgcaggacaggccaatcaagtccgtctacggggacaccgacagcctgtttgtcaccgagcgcggacacagactccgactcggaccgatg

SEQ ID NO: 9882 - DNA, 203 bp, Artificial sequence
  synthetic
ggcgcgccagtcctgtcgtcaactcgtcctctgagccgcgctctggaggcattggaactctgcaatttattgaggagtttgtgccatcggtctactttaaccccttctcgggacctcccggccactatccggatcaatttattcctaactttgacgcggtaaaggactcggcggacggctacgactgacgactcggaccgatg

SEQ ID NO: 9883 - DNA, 203 bp, Artificial sequence
  synthetic
ggcgcgccagtcctcagacccactctaggggaaggactagaggttagaggagaccccttgcgagtgaacaccacaagaaacagcatattgacacctgggatagactaggagaccctctgtcctaacaacaccagccacttggcacagatcgccgaaagtgtggctggtggtggtagaacacagagtctcgactcggaccgatg

SEQ ID NO: 9884 - DNA, 203 bp, Artificial sequence
  synthetic
ggcgcgccagtcctctactgcgctctcgttgcccgctactacccaggccccgccgcctgtctggccctgttgctcattatactatacgcctggagcttcagccattttatggactctctcaagaaccaggtgacagtcaccgccagatacttcagaagggtgcctagccagtccacctgagcgcgaggcgactcggaccgatg

SEQ ID NO: 9885 - DNA, 203 bp, Artificial sequence
  synthetic
ggcgcgccagtcctacgcgggactgcgggcttgcccctaactttctttgttgcagcagctgctgcccaaccagattatgactggtgggtgcgactgctagtggcagggttagttttgtgggccggccgtaaccgtggtcaccgcatagctctgcttgtaggtccttggcctctggtagcgcttttaaccgactcggaccgatg

SEQ ID NO: 9886 - DNA, 203 bp, Artificial sequence
  synthetic
ggcgcgccagtcctgaatgttactggcagaaccttgggggaggcatggaaggcccagcttaatcaactgacccggcaagagtttatggaataccggaaagacgggatcattgaagtagatagagctgctgcaaagagagcccgccgtgaagggaatgtgacaggagggcacccagtttcacgaggcaccgactcggaccgatg

SEQ ID NO: 9887 - DNA, 203 bp, Artificial sequence
  synthetic
ggcgcgccagtcctcccaggccctggcagaactttgggggaggtatggaaggcccagcttaatcaactgacccggcaagagtttatggaataccggaaagacgggatcattgaagtagatagagctgctgcaaagagagcccgccgtgaagggaatgtgacaggagggcacccagtttcacgaggcaccgactcggaccgatg

SEQ ID NO: 9888 - DNA, 203 bp, Artificial sequence
  synthetic
ggcgcgccagtcctggtgatatctgggcgatcgcttcctggtcctcgcctcctccgctgtctccctggagttcttgcaagtcggccaggatgtctcaggtacagcgcgtgcacagccaggctgcgaaggctgagtttgagaaagctgcagaggaggttaggcaccttaagaccaagccatcggatgagcgactcggaccgatg

SEQ ID NO: 9889 - DNA, 203 bp, Artificial sequence
  synthetic
ggcgcgccagtccttggtgtccctggtgacctcgtcttcgttaagaagcacgacttccagcagttggggccacggtgggacggaccctacactgtagtcctcagtacccccaccgcggtaaaggtcgctgggaagaccccgtggatccactactctcgactcaagaaagctcctgacaaccaagaagacgactcggaccgatg

SEQ ID NO: 9890 - DNA, 203 bp, Artificial sequence
  synthetic
ggcgcgccagtcctactccagcctggttggggctgcttcccagctagtagcccttggaactgacgggcactgcgtccacctggccaccacatcggacgggcaggcatttttggtgctgcctgggggctttgttattaaaggccaattggcactcacccccgaggagaggggatatattctggcacgtccgactcggaccgatg

SEQ ID NO: 9891 - DNA, 203 bp, Artificial sequence
  synthetic
ggcgcgccagtccttaaggaacctgtcacgattggggaacaagcccagagaagggggagagttgggagagtaaagcctggaagatactacaggagtcaagaaactcccgttggttctaaagattaccattatgatttactgcaagcacagaggtacggtattgaagatgggataaacatcaccaaatccgactcggaccgatg

SEQ ID NO: 9892 - DNA, 203 bp, Artificial sequence
  synthetic
ggcgcgccagtcctgcgctgggctgttgccaagggttcttcaggtgccccgattctgtgctcctccgggcatgttattgggatgttcaccgctgctagaaattctggcggttcagtcagtcagattagggttaggccgttggtgtgtgctggataccatccccagtacacagcacatgccactcttgacgactcggaccgatg

SEQ ID NO: 9893 - DNA, 203 bp, Artificial sequence
  synthetic
ggcgcgccagtcctatgttccacttagagagttgttcttgatcaattctactgcggatctggataaagatacatcatctctctttcatatgtgatatagtaatggatcttgatcaaatatctgaaacactgagttctgtggccgaagaagagcctttaaccatgtttttacttgataaactgtatgcacgactcggaccgatg

SEQ ID NO: 9894 - DNA, 203 bp, Artificial sequence
  synthetic
ggcgcgccagtcctcgtttgttcttgaggcaagtcaccagcccctgatcatttcgcctaaaagagcaaggactagagttcctgacctccaggccagtccctgatccctgacctaatgttatcgcggaatgatgatatatgtatctacgggggcctggggctgggcgggctcctgcttctggcagtggtcgactcggaccgatg

SEQ ID NO: 9895 - DNA, 203 bp, Artificial sequence
  synthetic
ggcgcgccagtccttggcattccttggatgctgactaatcagaggaacgtcagcattttccggcccaggctaagagaagtagataagttagaatctaaattatttatcatccccttgacgaattcgcgttggaaaagcacctctcacttgccgctcttcacacccatcattctaattcggcccctgtgcgactcggaccgatg

SEQ ID NO: 9896 - DNA, 203 bp, Artificial sequence
  synthetic
ggcgcgccagtcctactggtttgaacacgctaagcggcaggatagaaggcgaagaagagtgtgttctgccagggccgcgttttgctatacaaaatacgagaatgtcaggaagcaactccattatgacaaggttgcgcgcacgctcgacatcatgcgccagacatcacccttacaccagagcccagttacgactcggaccgatg

SEQ ID NO: 9897 - DNA, 203 bp, Artificial sequence
  synthetic
ggcgcgccagtccttccggtcagaccaaagatgcagagagaggtaaattaaaaagaagggctattgcaacacccgggatgcaaattagagggttcgtgtacttcgttgaaactttagctagaagcatttgcgaaaagcttgaacagtctggacttccggttgggggtaatgaaaagaaggccaaactgcgactcggaccgatg

SEQ ID NO: 9898 - DNA, 203 bp, Artificial sequence
  synthetic
ggcgcgccagtcctcctagtgagacccagaacttgttcaaattactggagaggggctgttccagtcaacgctaggctgtgtgggtcggctagaccggacccaactgattggactagtcttgtcgtcaattatggcgttagggactactgtaaatatgagaaaatgggagatcacatttttgttacagccgactcggaccgatg

SEQ ID NO: 9899 - DNA, 203 bp, Artificial sequence
  synthetic
ggcgcgccagtccttaaacgcggacggattagatggggatatttaaaaggggcagcaatctcggctgtctgtacttcttctctgctcgttaaaccaatagcatgtcagctccacgcaaagtcagattgccttctgttaaggctgttgacatgagcatggaagacatggccgcccgcctggctcgcctgcgactcggaccgatg

SEQ ID NO: 9900 - DNA, 203 bp, Artificial sequence
  synthetic
ggcgcgccagtcctagctacaagaggacttggatgaggatgaggaagaggaggaggatgcacccgctgcggggtactgacgcctccgtgatgtgtttttagatgtcccagcagcaagccccggaccccgccataagggcggcgctgcaaagccagccgtccggtctagcatcggacgactgggaggcccgactcggaccgatg

SEQ ID NO: 9901 - DNA, 203 bp, Artificial sequence
  synthetic
ggcgcgccagtcctaggtccatgaggagggaagagagaaattggcagctctcttcaggaaatttcctcctcctataccaaattccccctcatctgagggggggcggttcttgttctccctgagccaccatcacccagacacaggcagtctaacaaggaggtgatgtgtgactcggaacaacacccgctcgactcggaccgatg

SEQ ID NO: 9902 - DNA, 203 bp, Artificial sequence
  synthetic
ggcgcgccagtcctgcatcgatgaggatggttcggaggatggggaattttcagacctggatctgtctgacagcgaccatgaaggggatgagggtgggggggctgttggagggggcaggagtctgcactccctgtattcactgagcgtcatctaataaagatgtctattgatctcttttagtgtgaatccgactcggaccgatg

SEQ ID NO: 9903 - DNA, 203 bp, Artificial sequence
  synthetic
ggcgcgccagtccttgggaggtgagggagtatcctaggaagagattgtctgcagggcctagggctccgcttgacaaatttatagggagggccactgttcttactgttgcgctacatctggctattccgctcaaatggaagccagaccacacgcctgtgtggattgaccagtggccccttcccgagggtcgactcggaccgatg

SEQ ID NO: 9904 - DNA, 203 bp, Artificial sequence
  synthetic
ggcgcgccagtccttccactccgaggggcgtgtctgcatagcgttgcgtgccctcatctacaccttcaagacgtatcaggtatttgtaccaaagcccaccgcgctcgccacatttgtccgtgaggcgggcgcgctgcttagacgccactcgatctcgctcctgtccctggagcacaccctgtgtacctcgactcggaccgatg

SEQ ID NO: 9905 - DNA, 203 bp, Artificial sequence
  synthetic
ggcgcgccagtccttccaaacggatacaagacctggctacagtaccttatcagcacagtgacaggtatctttttaataagggtactgaagggaataggtgagttggatttacacactccgaccttgccatctcatagacccctctttttcattctcgtgtaccttatttccactgcagtggtaacaagcgactcggaccgatg

SEQ ID NO: 9906 - DNA, 203 bp, Artificial sequence
  synthetic
ggcgcgccagtcctttccctgggatccacttaccaatctgtggtatgggcctgaccctgtattaatatggggacgagggcatgtttgtgtttttccacaggatgccgaagcaccgcgctggattccggaaaggctggtacgcgcggcagaggaactccctgacatatcaaatgcaacgcatgacattgcgactcggaccgatg

SEQ ID NO: 9907 - DNA, 203 bp, Artificial sequence
  synthetic
ggcgcgccagtcctggccacgggatgttgttgtatgtccgagagacacgtgaggttctgctacgtcattaccaggcacgcgcaggaaacatggcggcggcgggtgttgtgagcgggaagattatatatgaacaagaaggagtatatattcactcatcttgtggaaagaccaatgaccaagacggcttgcgactcggaccgatg

SEQ ID NO: 9908 - DNA, 203 bp, Artificial sequence
  synthetic
ggcgcgccagtcctccggtgtagattgtctgacctttgaaaaaatttttgtgtccgtgtagcatttcaataaaagtcattatctgctccgagggataaatcatgtctatctcttcgttgttcggaggtagatacgataataagtttttgcttaacatgtcttcggctcccaaaatagagttgattgtacgactcggaccgatg

SEQ ID NO: 9909 - DNA, 203 bp, Artificial sequence
  synthetic
ggcgcgccagtcctgcgacagcgcaataaggtctctgttgaaattttctcccagcagcacctcacttccctcttcccaactctggtattctaaaccccgttcagcggcatactttctccatactttaaaggggatgtcaaattttagctcctctcctgtacccacaatcttcatgtctttcttcccagcgactcggaccgatg

SEQ ID NO: 9910 - DNA, 203 bp, Artificial sequence
  synthetic
ggcgcgccagtcctcacggatggcaattggctagtcaatgcagacagactagtaagtagcaagaccgggaataggtacatacccggagagggtcacaccctgcaaggaagacattatgaagaactggtgttggcaagaaaacagatcaacaactttcaagggacagacaggtacaacctaggcccaatcgactcggaccgatg

SEQ ID NO: 9911 - DNA, 203 bp, Artificial sequence
  synthetic
ggcgcgccagtccttgcaccgggcagacgagcggccgttgccgccgccgcggccatctctagcatgaccagacccaggcgcggaaacgtgtactgggtgcgcgactccatcacgggcgtgcgcgtgcccgtgcgcacccgtcctcctcgtccctgatctaatgcttgtgtcctcccccgcaagcgacgcgactcggaccgatg

SEQ ID NO: 9912 - DNA, 203 bp, Artificial sequence
  synthetic
ggcgcgccagtcctggttagtcgcatgttacagatttcactactcccaccagcttggagacaacatgtggttcttgacaactctgctcctttggggctggctactactgcaggtctccagcagagtcttcatggaaggagaacctctggccttgaggtgtcatgcgtggaaggataagctggtgtacacgactcggaccgatg

SEQ ID NO: 9913 - DNA, 203 bp, Artificial sequence
  synthetic
ggcgcgccagtcctgcgcccaggcatgttacagatttcactgctcccaccagcttggagacaacatgtggttcttgacaactctgctcctttgggttccagttgatgggcaagtggacaccacaaaggcagtgatcactttgcagcctccatgggtcagcgtgttccaagaggaaaccgtaaccttgccgactcggaccgatg

SEQ ID NO: 9914 - DNA, 203 bp, Artificial sequence
  synthetic
ggcgcgccagtcctcgaacactgccccgatccagtgttaatttggggcagaggttcagtctgtgtttactctcaaacctatgatgccgctagatggctaccagaacggttagtaagacaggtgtctaacaataaccaatccagggagtgattctctccctgagatcgctctttcccttgttcacagatcgactcggaccgatg

SEQ ID NO: 9915 - DNA, 203 bp, Artificial sequence
  synthetic
ggcgcgccagtcctcaaagtcggccctgctctcttgcctgactgtgcccgcttcagcctaccaagtgcgcaattcctcggggctttaccatgtcaccaatgattgccctaactcgagtattgtgtacgaggcggccgatgccatcctgcacactccggggtgtgtcccttgcgttcgcgagggtaacgcgactcggaccgatg

SEQ ID NO: 9916 - DNA, 203 bp, Artificial sequence
  synthetic
ggcgcgccagtcctcaccctctgccggcgctccgagtgacgtagggaagcgcgccgcgcacctcatggttccggggacagttagggcggcggatggaggtcagcggtggtgctcgctgcgacatcatggcagctcacctggtaaagcgatgcacgtgcctcctgagagaagctgctcgtcaggcccctcgactcggaccgatg

SEQ ID NO: 9917 - DNA, 203 bp, Artificial sequence
  synthetic
ggcgcgccagtcctccagaaccgcctcagggttgttcccaccctgagggcccacgtggcgtagtactctggtatcaaggtacctttgtacgcctattttatttcccttcccccacagtaacttagaagcttatctcatagttcaacagtagggtcactaaccaagtggctcagcgaacaagcacttctcgactcggaccgatg

SEQ ID NO: 9918 - DNA, 203 bp, Artificial sequence
  synthetic
ggcgcgccagtcctagcctggggcctgcctcctcgcgaacttgggacgagttggaaaatcctccctgagagagccgtgcggctcaggggagcggtttaactcggaaaaggaaaaggaatccagaaacaaatgaccatggaaacagttgaatcccagcatgatggaagtataacagcttctttgacagacgactcggaccgatg

SEQ ID NO: 9919 - DNA, 203 bp, Artificial sequence
  synthetic
ggcgcgccagtcctggaagtctgcctgtgggttgctcccacccacagggcccaagtggcgtagtacttggtattccggtacctttgtacacctatttacaaaccctaccccttgtaaccttagaagcaattatttaaccgctcactagggggtgtgctatccaagcacatcaagagcaagcacttctgcgactcggaccgatg

SEQ ID NO: 9920 - DNA, 203 bp, Artificial sequence
  synthetic
ggcgcgccagtcctttctcggcgcctgtgggttgtacccacccacagggcccactgggcgctagcactctgattctacggaatccttgtgcgcctgttttatgtcccttcccccaatcagtaacttagaagcattgcacctctttcgaccgttagcaggcgtggcgcaccagccatgtcttggtcaagcgactcggaccgatg

SEQ ID NO: 9921 - DNA, 203 bp, Artificial sequence
  synthetic
ggcgcgccagtcctctccaaccgcctgtgggttgtacccacccgcagggcccactgggcgctagtacactgatatcacggtacctttgtacgcctgttttatctccctacccccatcgtaacttagaagcttaacaatacagatcaatagcctctgcaccaaaccaggtgtggaatgatcaagcatttcgactcggaccgatg

SEQ ID NO: 9922 - DNA, 203 bp, Artificial sequence
  synthetic
ggcgcgccagtcctgtgcgaatgcctgtgggttgttcccacccacaggcccattgggcgctagcactctggtatcacggtacctttgtgcgcctgttttacatcccctccccaaattgtaatttagaagtttcacacaccgatcattagcaagcgtggcacaccagccatgttttgatcaagcacttccgactcggaccgatg

SEQ ID NO: 9923 - DNA, 203 bp, Artificial sequence
  synthetic
ggcgcgccagtcctctatgcctgcctgtgggttgttcccacccacagggcccactgggcgctagtacactggtatgccttacctcggtattacggtaccgatgtatatagtacctttgtacgcctgttttatatccctcccccacatgtaaccttagaagtttacacaaacaaagaccaataggagtccgactcggaccgatg

SEQ ID NO: 9924 - DNA, 203 bp, Artificial sequence
  synthetic
ggcgcgccagtcctttatgtgagcctgtgtgagctgacaaacttagtagtgtttgtgaggattaacaacaattaacacagtgcgagctgtttcttagcacgaagatctcgatgtctaagaaaccaggagggcccggcaagagccgggctgtcaatatgctaaaacgcggaatgccccgcgtgttgtcccgactcggaccgatg

SEQ ID NO: 9925 - DNA, 203 bp, Artificial sequence
  synthetic
ggcgcgccagtcctatgtgagagcgcaaactaggattaattcacctgtatccctttccctccacccgcagtaactcagcgctggcgtgtgacgtggtgtaaagttttgcctgaacctgtggttgggcaggtacatgccaacaaccttctaagcacccgcgcttgtgttttgctttatctgctgccatccgactcggaccgatg

SEQ ID NO: 9926 - DNA, 203 bp, Artificial sequence
  synthetic
ggcgcgccagtcctcagtatttgcgcactccggtgtccgcgatcacggacgccatcacgcgttgtcgcgagctcaccaaggtggctgccgacgccaagtctgctcctcattcctccttcctctctcaggccttgcggaactatcaacttgctctcaactctgcccgcatggcccaatctggtcctcgccgactcggaccgatg

SEQ ID NO: 9927 - DNA, 203 bp, Artificial sequence
  synthetic
ggcgcgccagtcctcggagaccgcggaagtggtccgttctcttcctctcccggcccaagcttctgggtatttctattgcgcgaggcattgtgggttgctgggcggcccggtctcggagaagaggggagagtggcgggccgctgaataagcttccaaaatgatggtgggtgatggcaccacctcagtgacgactcggaccgatg

SEQ ID NO: 9928 - DNA, 203 bp, Artificial sequence
  synthetic
ggcgcgccagtcctctgcacacgcggtcgcaatctgattgctccttcccacgcattcgtctccgatgattatgagatcacccacatccgcgttggatcgcgcacgcttgacgtgtcgcgtgttacgcgggtggatgacggtgagttatctctgatctcggtgccggatgggccggagcataagagcctcgactcggaccgatg

SEQ ID NO: 9929 - DNA, 203 bp, Artificial sequence
  synthetic
ggcgcgccagtcctggacaaccgcgtccgcgctcgggggtggtttcgcgctgctcctcttcccgactggccatttccttctcctataggcagaaaaagatcatggagtcagtcgagaagaaggacagcctaaccgccccctctgagttcgccaccaccgcctccaccgatgccgccaacgcgcctacccgactcggaccgatg

SEQ ID NO: 9930 - DNA, 203 bp, Artificial sequence
  synthetic
ggcgcgccagtccttcacgcatgcgtgcgaggagggggcatggcggatactgtgttgtttgagtttcttcacacggagatggtggctgagctgtgggctcacgaccccgaccccggcccgggggtgagcgccgggctccgtggggaggaagcgggggccaccaaggctgccccgggagacgctggcctcgactcggaccgatg

SEQ ID NO: 9931 - DNA, 203 bp, Artificial sequence
  synthetic
ggcgcgccagtcctgtggaccagcgtgcgcggggcgggcgggtgcgcgcgcacttcctcctcgcccccacccagacccagaaggcgccaccatggcggcgcccccgcagcccgtcacccacctcatctttgacatggacggacttcttctggatactgaacggctgtattcagtggtgtttcaagaaacgactcggaccgatg

SEQ ID NO: 9932 - DNA, 203 bp, Artificial sequence
  synthetic
ggcgcgccagtcctagggctttgcgttgcgttagcactcataacagtggcaatgagagatttgaacatgagtataccaacattactcaactccggagccatggcctggctcttgccgagagccgtgtttgaagggacggttagctcctttgctctgccacttgttagcttgctggctccagggctcagcgactcggaccgatg

SEQ ID NO: 9933 - DNA, 203 bp, Artificial sequence
  synthetic
ggcgcgccagtcctaaagcactgctcgtcgtctccgcatcagcggggaaagactttgagctccggctacctgtggacgctagaaaacaaactacgaccactggtgaatctgctgaccccgtcaccactaccgttgagaactacggaggagagactcaggtccaacgtcgccaccacaccgacgttgcccgactcggaccgatg

SEQ ID NO: 9934 - DNA, 203 bp, Artificial sequence
  synthetic
ggcgcgccagtcctggtgtttcgctctggggttgttcccaccccagaggcccacgtggcggctagtactccggtaccccggtacccttgtacgcctgttttatactccctttcccaagtaactttagaagaaataaactaatgttcaacaggagggggtacaaaccagtaccaccacgaacacacactcgactcggaccgatg

SEQ ID NO: 9935 - DNA, 203 bp, Artificial sequence
  synthetic
ggcgcgccagtccttaagattggctcttgtagcattcaagatcatgagcggtgaggtcccctccacggaggacctggtcaatctgctgcccgccatcctctcgcctggagcccttgtagtcggtgtggtctgcgcagcaatactgcgccggcacgttggcccgggcgagggggcagtgcaatggatgacgactcggaccgatg

SEQ ID NO: 9936 - DNA, 203 bp, Artificial sequence
  synthetic
ggcgcgccagtcctaggaacgggctggaacattgtgacattaaagagtggggttaatgttcatttcaagccgactgaaccatctgacacactgctgtgtgacataggtgaagcttcacccgtcccagaaattgaatctgccagaacaatcagggggctgcaaatggccgaggaatggctagctaggggcgactcggaccgatg

SEQ ID NO: 9937 - DNA, 203 bp, Artificial sequence
  synthetic
ggcgcgccagtcctagtttggcgctggaatctgggaacgacgagaagccaaaagataattttcacaattatgttaatgttaatagccccagcgtacagcttcagctgtctggggatgcagaaccgagactttgtcgagggagtgaatggtgttgagtggatcgatgtcgttctggaaggcggctcatgcgactcggaccgatg

SEQ ID NO: 9938 - DNA, 203 bp, Artificial sequence
  synthetic
ggcgcgccagtcctatcgggtcgcttcaaaactgatgttgtaacggctcggatcgtcaccgaaataaattcgcaaattgtcaaaaagttgttcggctgtgtatgttttaatgtcattgaaaatatttagaggtgcttcgatcttaggtaaaatttcggtcgcctgccaattttccatgtttcggcgttcgactcggaccgatg

SEQ ID NO: 9939 - DNA, 203 bp, Artificial sequence
  synthetic
ggcgcgccagtcctcattaggaggaaaggcattcatcaggttttcggctcagcatttaaaagcttatttggaggaatgtcatggattactcaaggcatgttgggggcactgctattgtggatggggctgaatgcaagggacagatccatttctatgacttttctagccgtaggaggaattttagtcttcgactcggaccgatg

SEQ ID NO: 9940 - DNA, 203 bp, Artificial sequence
  synthetic
ggcgcgccagtcctcacctggtggaagtttctgccgcggctttgcggggacgggggagtggtagtgggggctgcagctgccggacccaggcgcgatggctacgggcgcggatgtacgggacattctagaactcgggggtccagaaggggatgcagcctctgggaccatcagcaagaaggacattatcacgactcggaccgatg

SEQ ID NO: 9941 - DNA, 203 bp, Artificial sequence
  synthetic
ggcgcgccagtcctaccggtgcggaatccacgcttgaccatgtactgcttgatagagtcgcggctggccgactcatgggttaaagtcagttgacaagacacatggcttcttcaattctggtttctgactccgtctttgcccccatccttacccacaaactctcccgtcggatccggcgacaccccgtccgactcggaccgatg

SEQ ID NO: 9942 - DNA, 203 bp, Artificial sequence
  synthetic
ggcgcgccagtcctgggctcccggagaatcagaccttcaactctgacttcctcctcctgggaatcttcaatcatagccccacccacaccttcctcttctttctggtcctggccatcttttcagtggccttcatgggaaactccatcatggttctcctcatctacctggatacccagctccacaccccccgactcggaccgatg

SEQ ID NO: 9943 - DNA, 203 bp, Artificial sequence
  synthetic
ggcgcgccagtcctattacatgggaggagggacattggaagaagaactgtccaaaactcgtaagcggggcaaccccagtgttggtagaagaattacagtagggccgtcagggttcttccgccctccgtgaacccaggctaaaggttaaagtaggggggcaaataatagattttctagtagatacgggacgactcggaccgatg

SEQ ID NO: 9944 - DNA, 203 bp, Artificial sequence
  synthetic
ggcgcgccagtcctgggtaaggggaggtcagtgaaacacaggggacagagaaactgacaataacttactcatcgtcaatgatgtgggagattaatggccctgagtcagtgttggtcaatacctatcagtggatcatcagaaactgggaaactgttaaaattcaatggtctcagaatcctacaatgctacgactcggaccgatg

SEQ ID NO: 9945 - DNA, 203 bp, Artificial sequence
  synthetic
ggcgcgccagtcctatgggctgggataaagaggacgattgatggggtcctgagaggagcaggacccataaggtttgtgctggctctactgactttcttcaagtttacagccctgaggccaaccattggaatgctgaagagatggaagctggttggagttaatgaggcgactaaacatctgaaaagcttcgactcggaccgatg

SEQ ID NO: 9946 - DNA, 203 bp, Artificial sequence
  synthetic
ggcgcgccagtccttccaccatggatagatgtggtgagaataggtgtgctaaccctgggaatcctctcactattgaaagagaggagcaatgcaatggcaaaaaagaagggaggcatgctcctgggagtggcatgcgctaccgctggaatcgctagccctttggtgtttgctggtctgcacatggtgctcgactcggaccgatg

SEQ ID NO: 9947 - DNA, 203 bp, Artificial sequence
  synthetic
ggcgcgccagtcctcgctgacaggatcctaggcaattttgtggatctttgctgatacttcattctgcactcaaagccgcatccggcaagagtcatggggaaaacgcagtccaagggacagcccagcacaaatctcctcaaggagacagaaccaaggcatccagtaataccagatgccaggggaactggcgactcggaccgatg

SEQ ID NO: 9948 - DNA, 203 bp, Artificial sequence
  synthetic
ggcgcgccagtcctgttaagccggatcctaggcatagtgtctaacactttcactgagcaactctattctagatcaaaatcaccagaacttctggcatggcacactccaaggaggttccaagctttagatggactcagtccttaaggagaggtttgagccaattcactcagactgtcaagtcagatgttcgactcggaccgatg

SEQ ID NO: 9949 - DNA, 203 bp, Artificial sequence
  synthetic
ggcgcgccagtcctgcccgcttggatcctaggctattggattgcgctttgcttttgtcattttggcagatagtctcagttctttgttgtgtgcatacaacacaacaatctggcgatgagtgcctcaaaggaaataaaatcctttttgtggacacaatctttgaggagggaattatctggttactgctccgactcggaccgatg

SEQ ID NO: 9950 - DNA, 203 bp, Artificial sequence
  synthetic
ggcgcgccagtccttgaccgaaggatgagcccaccctgctttatcttctcttcgaagttttcgacgtggtcagagtgcatcagccacaccgcggcatcatcgaggcagtctacctgcgtacaccgttctcggccggtaacgctaccacgtaagaagcttcttgcttcttgcaaatagcagctgcaacccgactcggaccgatg

SEQ ID NO: 9951 - DNA, 203 bp, Artificial sequence
  synthetic
ggcgcgccagtcctggaggcagggatgctttaaaattaagcattgaggacccaagtcacgaaggggagggaataccactatatgatgcgatcaagtgcatgagaacattctttggatggaaagaaccctatattgttaaaccacacgaaaagggaataaatccaaattatctgctgtcatggaagcaacgactcggaccgatg

SEQ ID NO: 9952 - DNA, 203 bp, Artificial sequence
  synthetic
ggcgcgccagtcctgcgtaattggccaaaccctcctcttcaacatattgggggggtgggtggctgcccagctcgccgcccccggtgccgctaccgcctttgtgggcgctggcttagctggcgccgccatcggcagcgttggactggggaaggtcctcgtggacattcttgcagggtatggcgcgggcgcgactcggaccgatg

SEQ ID NO: 9953 - DNA, 203 bp, Artificial sequence
  synthetic
ggcgcgccagtcctcttccctgggccagcgatgccccggacctacaaaagccggacaaggcacttcagagcccaccaccggcctccacagacccagacaccatgctatcaggtaacgcaggagaaggagcaacagcctgcggaggttcggccgccgcgggccaggacctcatcagcgtcccccgcaaccgactcggaccgatg

SEQ ID NO: 9954 - DNA, 203 bp, Artificial sequence
  synthetic
ggcgcgccagtcctctttaagcggccagtggagtgaaagccatcagggccggtctcgatgaggccaaaccctggtacaagcttattaagctcctgagccgcttgtcgtgcatggccgctgtagcagcgcggtcaaaggacccagtccttgtggccatcatgctggctgacaccggtctcgagattctgcgactcggaccgatg

SEQ ID NO: 9955 - DNA, 203 bp, Artificial sequence
  synthetic
ggcgcgccagtcctaaccgacgggcccgcgcgctcctgggcgggggatgttgtgatggagaagccgcggcggagcccgaaccccgcagcctgagccacctccgtcatctgggcccggggcctcaccgcgcagattccttctggaaccccaacgccttcgagacggattccgacctgccggctggatggcgactcggaccgatg

SEQ ID NO: 9956 - DNA, 203 bp, Artificial sequence
  synthetic
ggcgcgccagtcctccgggcccggcgaactcagagggggcggttaggctgtccttcttctcgactgactccatgatctttttctgcctataggagaaggaaatggccagtcgggaagaggagcagcgcgaaaccacccccgagcgcggacgcggtgcggcgcgacgtcccccaaccatggaggacgtgcgactcggaccgatg

SEQ ID NO: 9957 - DNA, 203 bp, Artificial sequence
  synthetic
ggcgcgccagtcctcgagatgcggcgcgtgcgcaattggctcgagtacgctgcccgccactcttgggagaggaacctaccctggaccgctgccgacgaagttggcgaccagctagtttcctatcccatccaaccggagactctcgcaaacacccaaaccaacacagcttttgtcctgtccctcttctccgactcggaccgatg

SEQ ID NO: 9958 - DNA, 203 bp, Artificial sequence
  synthetic
ggcgcgccagtcctgtgatacgggcgggcggcgaacttcctccacaccttgaaagggatgtcaaattcctggtccacaattttcattgtcttccctctcagatgtcaaagaggctccgggtggaagatgacttcaatcccgtctacccctatggctacgcgcggaatcaaaatatccccttccttactcgactcggaccgatg

SEQ ID NO: 9959 - DNA, 203 bp, Artificial sequence
  synthetic
ggcgcgccagtccttcatgtacggcttcggcttaggagggcgaaaagctgagtggcgtcggagggagctctactgcagggagccaacataccctaccgagcactcagagagtcgttggaagacgggaaggaagcccgacgactgagcggtccaccccagacgtgattctggtcgcccggagatcaagccgactcggaccgatg

SEQ ID NO: 9960 - DNA, 203 bp, Artificial sequence
  synthetic
ggcgcgccagtccttatcataggggacccgatatctgcctacaaggaagtcatcggccacaatctttttgatcttaagagaacaagcttcgagaagctggccaagttaaatctcagcatgtcagtactcggagcctggactagacacaccagtaaaagactactacaagactgtgtcaatgtgggtgtcgactcggaccgatg

SEQ ID NO: 9961 - DNA, 203 bp, Artificial sequence
  synthetic
ggcgcgccagtcctatgtagacgggcccgggggatctcccccgcggtaactggtcacagttgccgcggacggagatcatcccccggttaccccctttcgacgcgggtactgcgatagtgccaccccagtccttcctactcccgactcccgaccccaacccaggttccttggaacaggaacaccaatttcgactcggaccgatg

SEQ ID NO: 9962 - DNA, 203 bp, Artificial sequence
  synthetic
ggcgcgccagtcctatgacctagggcctctttgagattccaagctacagatcactttacctgcgttgggtgaacgccgtgtgcggcgacgcataatcccccaaacatcacaattggcacaatgattttggggcgcgcgacgccgtgggagtgaaaagcccgaaagggcttttcccgcttccttaatcccgactcggaccgatg

SEQ ID NO: 9963 - DNA, 203 bp, Artificial sequence
  synthetic
ggcgcgccagtcctgtctgagtgggcgctagggtcccacccctaacatgccaacgacagctcctgcgctgcactccacacttacgtttgtgcacgcgcgggaaccgatggactttcgttcaaccacctccagctggactcactgcaccgcgtggccatgttagctggattgtgtggacgaacaccgctcgactcggaccgatg

SEQ ID NO: 9964 - DNA, 203 bp, Artificial sequence
  synthetic
ggcgcgccagtccttaattagagggcgctagggtcttgccctagttagccgtaacgaccgtccctgcgactcacctcgcacttacgccatcgctcttcggtggcccagatggacttccgttcacccacctctggctggacctgctgcaccgcacctggcccggacagctggactgtgcggacgaacaccgactcggaccgatg

SEQ ID NO: 9965 - DNA, 203 bp, Artificial sequence
  synthetic
ggcgcgccagtcctatctaacagggcgctagggtttcacccctagcatgccactgcagtccctgcgatacactccacacttacgttcttgtgtgcgcgggacccgatggactttcgttcacccacttacagctggacccacgacaccgcgtgaccactttgctggattgtgcggacgaacaccgcttgcgactcggaccgatg

SEQ ID NO: 9966 - DNA, 203 bp, Artificial sequence
  synthetic
ggcgcgccagtcctaactcctagggctgactttgtgaacatcgtttcctctgcccccttcattgtccccatggccgacgttaatgacaagggacggttttacacctcccgtgtcgtcatcgtcacctcaaacttccccggccctaacccccgctccgcccgctgtgtggccgcgctggaacgccgcctcgactcggaccgatg

SEQ ID NO: 9967 - DNA, 203 bp, Artificial sequence
  synthetic
ggcgcgccagtcctgcacacacggggcgagactggttgtgctcgccactgctacccctccgggctccgtcactgtgtcccatcctaacatcgaggaggttgctctgtccaccaccggagagatccctttttacggcaaggctatccccctcgaggtgatcaaggggggaagacatctcatcttctgcccgactcggaccgatg

SEQ ID NO: 9968 - DNA, 203 bp, Artificial sequence
  synthetic
ggcgcgccagtcctcgataacggggggcaggagtctgcactccctgtattcactgagcgtcatctaataaagatgtctattgatctcttttagtgtgaatcatgtctgacgagggaccaggtacaggacctggaaatggcctaggacagaaggaagacacatctggaccagacggctccagcggcagtcgactcggaccgatg

SEQ ID NO: 9969 - DNA, 203 bp, Artificial sequence
  synthetic
ggcgcgccagtcctctagttaggggggtgggggggcctcggccccctcaccctcttttccggtggccacccgcccgggccaccgttactccactccactccttcgggactggtttggaggaacataacagggcttcccatccctgtttacccttactccactcacccttccccttgaccaaccctatccgactcggaccgatg

SEQ ID NO: 9970 - DNA, 203 bp, Artificial sequence
  synthetic
ggcgcgccagtccttgttgtaagggttggagtggccgcaacgggcggggcggggcggggccgggcaagtttgttccccgagttcggagcctaggagccccccgcggctgcggcgcaggtgccctcggcctgagtcgggatggagctgcctgctgtgaacctgaaggggctgcattgtattctcaggctcgactcggaccgatg

SEQ ID NO: 9971 - DNA, 203 bp, Artificial sequence
  synthetic
ggcgcgccagtcctatgcgcaaggtaaactttgtgagtatggaattctctcttactgatccgaggctggagccacacagatgggaaaagtactgcgttcttcggataggagacatgctcttacggactgaaataggccaagtgtcaaggcccatgtttctttatgtgagaaccaatggaacctccaagcgactcggaccgatg

SEQ ID NO: 9972 - DNA, 203 bp, Artificial sequence
  synthetic
ggcgcgccagtccttcgagagaggtcaccacgggcatagcattgctcacccgtgaatcaagtcatcgagatttctctgacctctgaagtgcactgtggttgcgtggctgggaatccacgcttgaccatgtactgcttgatagagtcgcggctggccgactcatgggttaaagtcagttgacaagacaccgactcggaccgatg

SEQ ID NO: 9973 - DNA, 203 bp, Artificial sequence
  synthetic
ggcgcgccagtcctaatcgaacggtggtgaatggttctcaattccatgctggatgtctggcgatggttatggtcccggagtactcctacgggaccttcaaccagaaccgacagaatgctatcttcacctttccttatgccctcctcaacctctaccagggtaatactgcctctcttgaagttccctaccgactcggaccgatg

SEQ ID NO: 9974 - DNA, 203 bp, Artificial sequence
  synthetic
ggcgcgccagtccttcattcctggtggtgctttgatggaccctcatgcaatactgttctggaagacaataacccagtggagttatggacaaagtcaggtgagaagaaaatcttgaagccccggtggagagatggaagattgtgggcagatcaccaggccttaaaagccttcaaggattttgcgagtggcgactcggaccgatg

SEQ ID NO: 9975 - DNA, 203 bp, Artificial sequence
  synthetic
ggcgcgccagtcctgtaaaccgggtggtgctttgatggaccctcatgcaatactgttctggaagacaataacccagtggagttatggacaaagtcaggtgagaagaaaatcttgaagccccggtggagagatggaagattgtgggcagatcaccaggctttaaaagccttcaaggattttgcgagtggcgactcggaccgatg

SEQ ID NO: 9976 - DNA, 203 bp, Artificial sequence
  synthetic
ggcgcgccagtcctctggataagtaaaaggtggcctccctgcccagggccgtgtccaaccatttgattagaagggtagcatcctcgggaagtgcgggtgggctgcggttgcaggccagggcgtaaaagagacccagctgtgaagagaagccctcgagacctccccccatctccctcttaccttgtgtccgactcggaccgatg

SEQ ID NO: 9977 - DNA, 203 bp, Artificial sequence
  synthetic
ggcgcgccagtcctgagcggcagtatgtgatggttcagtagagtattgggtgtggagactagctataaaagaggccgggaggccttctgcgtccagacgcgatggcacacgccagagacaaggcaggcgctgtcctggccatgatactcatctgtgagacaagccttatctggacatctagtggcagtcgactcggaccgatg

SEQ ID NO: 9978 - DNA, 203 bp, Artificial sequence
  synthetic
ggcgcgccagtcctggagccgcgtcgaaacctcagtggataaaagacctagagaatgtgtatcccagaagaagctggccaaggatatgggagcaaccaccatggaccagaagtctctctgggcaggatctgcctacaaactggtttgctactttaccaactggtcccaggaccggcaggaaccaggaacgactcggaccgatg

SEQ ID NO: 9979 - DNA, 203 bp, Artificial sequence
  synthetic
ggcgcgccagtcctcacgtcaggtctacgtggaccgacaagaacagtttcgaatcggaagcttgcttaacgtagttctaacagttttttattagagagcagatctctgatgaacaaccaacggaaaaagacgggtcgaccgtctttcaatatgctgaaacgcgcgagaaaccgcgtgtcaactgtttccgactcggaccgatg

SEQ ID NO: 9980 - DNA, 203 bp, Artificial sequence
  synthetic
ggcgcgccagtcctgctaagtagtctccgtacccgcagaaattctgcggaagtctcggagattcgcccgggccctgcccgtttgggcgcggccggactacaaccccccgctagtagagacgtggaaaaagcctgactacgaaccacctgtggtccatggctgcccgctaccacctccacggtcccctccgactcggaccgatg

SEQ ID NO: 9981 - DNA, 203 bp, Artificial sequence
  synthetic
ggcgcgccagtcctcggtcgaggtctcttggtggcattattggctcaagtttctttaaacttaagcgcgccgtggctcctgctctagggaataaagagcgagctcaaaaaagacacttttattttgcaaactcaaataaaggtgctaaaaaatcaaaaaacaacgaacctaaaccaagcacctcaaaacgactcggaccgatg

SEQ ID NO: 9982 - DNA, 203 bp, Artificial sequence
  synthetic
ggcgcgccagtcctagtcatctgtctgaaggtgctgcgggatgccgttccttcgcgcgtgaggctgcggctctgacgccccataggctccttcaatttccgtgatcctcggagtccccaggagaccaggtgatggcagcagccagactcctgccagtgccggcaggaccccagcccctgtcgttccagcgactcggaccgatg

SEQ ID NO: 9983 - DNA, 203 bp, Artificial sequence
  synthetic
ggcgcgccagtcctattccttcgtcttgcggaccaggaggagcaactcgaggaagcagcgaccaacgcttctctgtggggagacggcgacctggccgaaggatggatgagtcccgcagacagcgacctgctggtcatgtggcagctaacctcagcccccaaggtgcacgccaacggtccttcaaggatcgactcggaccgatg

SEQ ID NO: 9984 - DNA, 203 bp, Artificial sequence
  synthetic
ggcgcgccagtcctcggattcagtgaagagggtagtaatgagcttgttggacggcagagggccagtacgtttcgtgctggctcttatcacgttcttcaagtttacagcattagccccgaccaaggcgcttttaggccgatggaaagcagtggaaaagagtgtggcaatgaaacatcttactagtttcacgactcggaccgatg

SEQ ID NO: 9985 - DNA, 203 bp, Artificial sequence
  synthetic
ggcgcgccagtcctatgcatttgtgatgggagtacgacctgatagggcgctgcagaggcccactattaggctagtataaaaatctctgctgtacatggcacatggagttgaatcactttgaacttttatacaaaacaaacaaacaaaaaccaatgggagtggaggaaccggtgtacgatgccacggggcgactcggaccgatg

SEQ ID NO: 9986 - DNA, 203 bp, Artificial sequence
  synthetic
ggcgcgccagtccttgtaattagtgcgaattgcctacctacgtcaccatcccgaataccgcaatcaaaatgttgcggcacttcttaggcttatttaaaaccatgcaggctatgctaccagtcattttaattttgctactaccctgcattcccctagcttccaccgccactcgcgctacacctgaacaacgactcggaccgatg

SEQ ID NO: 9987 - DNA, 203 bp, Artificial sequence
  synthetic
ggcgcgccagtcctcacagttcgtgcgaattgcctacctgcgccaccatcccgaataccgcaaccaaaatatcgcggcacttcttagactcatctaaaaccatgcaggctatactaccaatatttttgcttctattgcttccctacgctgtctcaaccccagctgcctatagtactccaccagaacaccgactcggaccgatg

SEQ ID NO: 9988 - DNA, 203 bp, Artificial sequence
  synthetic
ggcgcgccagtcctcggaacaagtgctagcagggccagccttgaactcgctggacagagctacagacctatggggcctggaagtgcccgctgagaaagggagaagacagcagaggggttgccgagggagttcctggtcggctccgacgccttctgctgcaacttggctagtgccctactttcagacaccgactcggaccgatg

SEQ ID NO: 9989 - DNA, 203 bp, Artificial sequence
  synthetic
ggcgcgccagtccttcatagtggtgtgtatgtatcatcaccacgccgccgcagcagaggagaaaggaagaggtcgcgcgccgaggctgagttgctttcaagatggccaccccatcgatgatgccccaatgggcatacatgcacatcgccggacaggatgcttcggagtacctcagtccgggtctggtgcgactcggaccgatg

SEQ ID NO: 9990 - DNA, 203 bp, Artificial sequence
  synthetic
ggcgcgccagtccttaacgcccgttaagtccgtcaagagactactcttgagtgccagcgagtagagttttctctaaactgtgctcccaaagtttaagaaaaatgagacacctgcacctcctgtcttcaactgtgcctattgacatggccgcattattgctggaggactatgtaaatacaatattggagcgactcggaccgatg

SEQ ID NO: 9991 - DNA, 203 bp, Artificial sequence
  synthetic
ggcgcgccagtccttccgtaatgttatatagaccggcggcggagcacgcgtgtgtgcggacgcagttgcgtgaggggtttgtactatcctcggtgctgtggtgcagagctagttcctctccagctcagccgcgtaggttgaattgaccaaagcaatggtgatggagaagcctagtcccctgctggtcgcgactcggaccgatg

SEQ ID NO: 9992 - DNA, 203 bp, Artificial sequence
  synthetic
ggcgcgccagtcctcgtacgatgttcgtcctcgcagccccgctcgggcggcattggaactctccagtttgtggaggagtttactccctctgtctacttcaaccccttctccggctctcctggccagtacccggacgagttcataccaaacttcgacgcaatcagcgagtcagtggatggctatgattgcgactcggaccgatg

SEQ ID NO: 9993 - DNA, 203 bp, Artificial sequence
  synthetic
ggcgcgccagtcctcaccaagggttgggtcgcgaaaggccttgtggtactgcctgatagggtgcttgcgagtgccccgggaggtctcgtagaccgtgcaacatgagcacacttcctaaacctcaaagaaaaaccaaaagaaacaccatccgtcgcccacaggacgtcaagttcccgggtggcggacagcgactcggaccgatg

SEQ ID NO: 9994 - DNA, 203 bp, Artificial sequence
  synthetic
ggcgcgccagtcctaacggcccgttgggttgcgaaaggccttgtggtactgcctgatagggtgcttgcgagtgccccgggaggtctcgtagaccgtgcaccatgagcacaaatcctaaacctcaaagaaaaaccaaaagaaacaccaaccgtcgcccacaagacgttaagtttccgggcggcggccagcgactcggaccgatg

SEQ ID NO: 9995 - DNA, 203 bp, Artificial sequence
  synthetic
ggcgcgccagtcctaacctccttaagccaaatgctgatcaacaggatgcacaaaaccaaccgcaatggacccaggtatgaagaagatgtggacttgggttcagggaccagagctgtgagctgcacaagacagaggactgactggggaatggtcgctgatagggtgaagaatttggccagagaatatgccgactcggaccgatg

SEQ ID NO: 9996 - DNA, 203 bp, Artificial sequence
  synthetic
ggcgcgccagtccttgctatcttacacagagcgatctaagcggcgagaccggagacgcagatctgtttgtcacgcccgcacctggttttgcttcaggaaatatgactacgtccggcgttccatttggcatgacactacgaccaacacgatctcggttgtctcggcgcactccgtacagtagggatcgtcgactcggaccgatg

SEQ ID NO: 9997 - DNA, 203 bp, Artificial sequence
  synthetic
ggcgcgccagtcctagtaaacctaccggagcagtcgcctggccatctacatcgaggacctcggtcgaaaatactgccccgcgagcgcgaccgggggagatcatggcatccggcaagcaccatcagcccggggggacgcggagcctgaccatgcaaaaagtaagcctgcgcgtgaccccccgcctggtgcgactcggaccgatg

SEQ ID NO: 9998 - DNA, 203 bp, Artificial sequence
  synthetic
ggcgcgccagtcctcactgcattactgtcgttagcgggcagagacaggatagacagggaggagagcgaaggaggccccaactcgaccgcgaccagtgtgcctactgcaaagaaaaaggacattgggctaaagattgccccaagaagccaagaggaccccggggaccgcgaccccaggcctccctcctgcgactcggaccgatg

SEQ ID NO: 9999 - DNA, 203 bp, Artificial sequence
  synthetic
ggcgcgccagtcctgctgagactagcctgcaaggaagattacaggtacgcaatatcgtcaaccgatgagatagggctacttggggccggaggtctcaccaccacctggaaggaatacaaccacgatttgcaactgaatgacgggaccgttaaggccagttgcgtggcaggttcctttaaagtcacagccgactcggaccgatg

SEQ ID NO: 10000 - DNA, 203 bp, Artificial sequence
  synthetic
ggcgcgccagtcctcgaacttatatcctctcctttgcacgccgtgggaccatccaggagaagttgatttccgtggcaggactcgccgtccactccggaccagacgagtaccggcgcctctttgagcccttccagggcctctttgagattccaagctacagatcactttacctgcgttgggtgaacgcccgactcggaccgatg

SEQ ID NO: 10001 - DNA, 203 bp, Artificial sequence
  synthetic
ggcgcgccagtcctggctatactatgtctgctatctttggcctgtccctgtagtggggcgcgggtcactgacccagacacaaataccacaatcctgaccaattgctgccagcgtaatcaggttatctattgttctccttccacttgcctacacgagcctggttgtgtgatctgtgcggacgagtgctgcgactcggaccgatg

SEQ ID NO: 10002 - DNA, 203 bp, Artificial sequence
  synthetic
ggcgcgccagtcctgcgcactatcacagcacacaaattgggggaataaggatggtggacatccttaggcaaaacccaactgaggagcaagctgtggatatatgcaaagcagcaatgggtttgaggatcagttcatcctttagctttggaggcttcactttcaaaagaacaaatggatcatccgtcaagcgactcggaccgatg

SEQ ID NO: 10003 - DNA, 203 bp, Artificial sequence
  synthetic
ggcgcgccagtccttacctgcgtcacatagatgcccactttctgtcacagactaagcagcagggacttaacttctcgtacctaactgcctaccaagccactgtgtgcgcccgcgcgcaggctcctcccccaagttgggacgagatgtggaagtgtctcgtgcggcttaagccaacactacatggacctcgactcggaccgatg

SEQ ID NO: 10004 - DNA, 203 bp, Artificial sequence
  synthetic
ggcgcgccagtcctgacatcgatcacgggcgtgcgcgtgcccgtgcgcacccgtcctcctcgtccctgatctaatgcttgtgtcctcccccgcaagcgacgatgtcaaagcgcaaaatcaaggaggagatgctccaggtcgtcgccccggagatttacggacccccggcggaccagaaaccccgcaaacgactcggaccgatg

SEQ ID NO: 10005 - DNA, 203 bp, Artificial sequence
  synthetic
ggcgcgccagtccttgatctgttccgaggagcaccctcagggtccggcccacggagtgcggattaccatcgaagggggaatagactctcgcctgcatcgcatcttctcccagcggcccgtgctaattgaacgcgaccagggaaatacaaccatctccatctactgcatctgtaaccaccccggattgccgactcggaccgatg

SEQ ID NO: 10006 - DNA, 203 bp, Artificial sequence
  synthetic
ggcgcgccagtcctccctcaagtcctgaaacatatgctgtaataactggagctccgggggctgtagctgggtttgctgcattggttcaaactgtaactggtggtagtgctattgctcagttgggatatagattttttgctgactgggatcataaagtttcaacagttgggctttttcagcagccagctcgactcggaccgatg

SEQ ID NO: 10007 - DNA, 203 bp, Artificial sequence
  synthetic
ggcgcgccagtccttggcgccgtcgatcctctactcggtcctccagcacctcgcccccaggctacctgacggggggcacgacgggcccccgtagtcccgccatgcgccagggcgcccccgcgcgggggcgccggtggttcgtcgtatgggcgctcttggggttgacgctgggggtcctggtggcgtcgcgactcggaccgatg

SEQ ID NO: 10008 - DNA, 203 bp, Artificial sequence
  synthetic
ggcgcgccagtcctcggcagcgtcggaaagtgtcatgcttggtattctcattatgttcttaagtttttcctcttagtgtttggtgagaatggtgtgtttttctataagcacttgcatggtgatgtcttgcctaatgattttgcctcgaaactaccattgcaagagccatttttcccttttgaaggcaacgactcggaccgatg

SEQ ID NO: 10009 - DNA, 203 bp, Artificial sequence
  synthetic
ggcgcgccagtcctgttcatactcggcggcttccgtagcgggagggcgaaagatggcggcggcagtactgggacagttgggtgcgttatggatacataacctgaggagccgggggaagctggccttggggaaatctaccactgtcgaagacaaataaaatatagcaaagacaagatgtggtatttggccgactcggaccgatg

SEQ ID NO: 10010 - DNA, 203 bp, Artificial sequence
  synthetic
ggcgcgccagtcctgaagggaatcgggggcagaggtggaggcgactgagatgggctgcggtctggccttggaggcggatggctggcagagctcattccgcgttcgggggtgtgctcccggtggcggtcgcttgactgatttcctccgcggctggccattgtgttctcctaggcagagaaacaacagaccgactcggaccgatg

SEQ ID NO: 10011 - DNA, 203 bp, Artificial sequence
  synthetic
ggcgcgccagtcctggacgttctcgggggcagaggtggaggcgattgcgaagggctggggtccgacctggaaggcggatgactggcagaaccccttccgcgttcgggggtgtgctccctgtggcggtcgcttaactgatttccttcgcggctggccattgtgttctcctaggcagagaaacaacagaccgactcggaccgatg

SEQ ID NO: 10012 - DNA, 203 bp, Artificial sequence
  synthetic
ggcgcgccagtccttgtcaagctctataggaatgaaggaagacgcttggcgtgtggggacacggttgatggtttgcccgttgttgcgcgtctcggcgaccttgttttcgcagggttggctatgccgccagatgggtgggccattaccgcaccttttacgctgcagtgtctctctgaacgtggcacgctcgactcggaccgatg

SEQ ID NO: 10013 - DNA, 203 bp, Artificial sequence
  synthetic
ggcgcgccagtcctagaaagactctatatccaacactaagaaaattcagtcgcgcctccaaagaaggaagcatcatttcatataatcgtggcaacattggataaaacacgacctcaaactcccttccctgctcacagactcgctcatacaaaagttcaagattcgtcttttcaggtgaggaatccatccgactcggaccgatg

SEQ ID NO: 10014 - DNA, 203 bp, Artificial sequence
  synthetic
ggcgcgccagtcctatcgaggatctcaacgcctacgttgcttacgaagacccccagggcgtggtctaccaagaagtagaaccataccactggatggttgccgttgcaatggtgggcacgcgttgggactactctgccactaacaactgtactcactttgtttctaatatcactggtgttgaactcccccgactcggaccgatg

SEQ ID NO: 10015 - DNA, 203 bp, Artificial sequence
  synthetic
ggcgcgccagtcctactaacattctcccagtaccgctggttcggcctcaatgaagatctcactccattgaacgtcaccggtggtctgttctatcacgtctccctcaaccccgtcaacttccagcaaaactctctcctcagtgttcttggtgctttcacttacgtgtatgctaacctttccctcaacatcgactcggaccgatg

SEQ ID NO: 10016 - DNA, 203 bp, Artificial sequence
  synthetic
ggcgcgccagtcctatgacaactctctggcaaccttctttcacagacttcgactccttggttgatgccattgtcgggcgtctggaccggtcaacgggggtttccgacctcctggctagtctggtcaaacgacagggcttgaccattgaagcggagcctactgaactttcctaccaggatgctttagaacgactcggaccgatg

SEQ ID NO: 10017 - DNA, 203 bp, Artificial sequence
  synthetic
ggcgcgccagtcctacgatatgtctgcctcccactccatggggcctttgatagtcaacatgatatatttgtccttagtccagaaatcatcactcggatttattatggaaaacataccgtttgcgcctcccaagttttttatagttgtatacggaaaataaggtaattcccctggcttgtcacctctagcgactcggaccgatg

SEQ ID NO: 10018 - DNA, 203 bp, Artificial sequence
  synthetic
ggcgcgccagtcctgatttctatctgctgtacatggcacatggagttgaatcactttgaacttttatacaaaacaaacaaacaaaaaccaatgggagtggaggaaccggtgtacgatgccacggggagaccgttgttcggagacccgagtgaggtacacccacaatcaacactgaagctaccacatgacgactcggaccgatg

SEQ ID NO: 10019 - DNA, 203 bp, Artificial sequence
  synthetic
ggcgcgccagtcctatctcaattcttcaccactgcctacaacgctcatgcctacttcaattgtggctttgacgtcacagtcgtcgtgaacgcctcccagttccacggcggctcgctgattgtcttggccatggctgaaggtctaggcgacatcaccccagctgactcttccacttggttcaatttccccgactcggaccgatg

SEQ ID NO: 10020 - DNA, 203 bp, Artificial sequence
  synthetic
ggcgcgccagtcctcactttcctcttgctctattcaccgttacttttcttcttgcccgttctctttcttagtatgaatccagtatgcctgcctgtaattgttgcgccctacctgttttggctggcggctattgccgcctcgtgtttcacggcctcagttagtaccgttgtgaccgccaccggcttggccgactcggaccgatg

SEQ ID NO: 10021 - DNA, 203 bp, Artificial sequence
  synthetic
ggcgcgccagtcctgagtgacgtgaaatcttccagcggggtcgcggtaggcgggccgtggaccctctggtataaggcggtcccgggggagtgaggagaaagggggggtcttggcggccggaggaggagtaggtgcgggtgaagatggcggcagccgaggccgcgaactgcatcatggagaattttgtacgactcggaccgatg

SEQ ID NO: 10022 - DNA, 203 bp, Artificial sequence
  synthetic
ggcgcgccagtcctactgtaagtgaagagataggaagaggaagtcaggccagggaatccctgccaccggatgttggatgacggtgctgtctgcgttccaaccccaggaggactgggttaacaaatctgggtgcatggaggagctaagcgttcaaaaccgtctcggagaactccctggctcacgaagtgcgactcggaccgatg

SEQ ID NO: 10023 - DNA, 203 bp, Artificial sequence
  synthetic
ggcgcgccagtcctctggaaggtgaattcatttttctgggtctctctgattctcagggactccagaccttcctatttatgttgttttttgtattctatggaggaatcgtgtttggaaaccttcttattgtcataacagtggtatctgactcccaccttcactctcccatgtacttcctgctagccaaccgactcggaccgatg

SEQ ID NO: 10024 - DNA, 203 bp, Artificial sequence
  synthetic
ggcgcgccagtcctgactctgctgaccggtttgtggaggtcacagtgtcggataaccaacacacactcgacgtgatgcaggcacacaaagacaatatcgtgggcgcgcttcttcgcgcagccacgtactatttttctgatttggaaatagcagtgacccacactgggaagctcacatgggtgcccaaccgactcggaccgatg

SEQ ID NO: 10025 - DNA, 203 bp, Artificial sequence
  synthetic
ggcgcgccagtccttttgagtgtgagacgacgggtgaaaaagttgctgaggctgtgattgaacctgtccttcttgctgctactggaactcccatatcttttgtcaccaacctcttcgcccaatggcgaggagaactccagctttcccttctctttactggttccgcccaacacttcgggcgtctcgctcgactcggaccgatg

SEQ ID NO: 10026 - DNA, 203 bp, Artificial sequence
  synthetic
ggcgcgccagtcctgacgataatgaggtggctcgtggagcgtgggtttctcaaaccaagaggcaaagttgtggacttaggctgcggcagaggaggctggagttactactgtgcaacattaaagcaggttcaggaagtgagaggttacacaaaaggagggccagggcatgaggaaccagtgatgacccacgactcggaccgatg

SEQ ID NO: 10027 - DNA, 203 bp, Artificial sequence
  synthetic
ggcgcgccagtcctaggatgcctgagtgagaatgtgtcagaagtcatttgttacagtccaaagtggaccaggcctatcactctagagtataacaactccatatcttggtacccctatacaatccctggtgcgaggggatgtatggttaaattcaaaaataacacatggggttgctgccgtattcgcaacgactcggaccgatg

SEQ ID NO: 10028 - DNA, 203 bp, Artificial sequence
  synthetic
ggcgcgccagtcctcgttaccctgataccagagatgtggaagagcgcgtccatgtaatgcgcaaaaccaagcttgcacccaccgtcgcgcacggtgtgttcaatcctgagttcgggcctgccgccttgtctaacaaggacccacgcctgaacgaaggtgttgtcctcgatgaagtcattttctccaagcgactcggaccgatg

SEQ ID NO: 10029 - DNA, 203 bp, Artificial sequence
  synthetic
ggcgcgccagtcctcgaaaggatgatttttccacctgttcgacaggctactatgatatgacgcttgtttcttttattttgcagactaattcaaaactaacaatgttggagcgcagcgcggtaacctattgtatttgcatcccaacggttttgaatgtttctttggaaaatttttcttttattcaatttcgactcggaccgatg

SEQ ID NO: 10030 - DNA, 203 bp, Artificial sequence
  synthetic
ggcgcgccagtccttgtccggttgcaactggacgcggggcgaacgctgtgatctggaagacagggacaggtccgagctcagcccattgctgctgtccaccacacagtggcaggtccttccgtgttctttcacgaccctgccagccttgtccaccggcctcatccacctccaccagaacattgtggacgcgactcggaccgatg

SEQ ID NO: 10031 - DNA, 203 bp, Artificial sequence
  synthetic
ggcgcgccagtccttcggcccatgccagggataaaagttcgatttttgccgtagcggctagtaatgattctggagacgtgctgtttttgagtgaactaaggatgaactctaaatcgagtgcacgagctgccattgtggatactgtggaagctgtgaagaagagaaaatatatatctatcgatgagggacgactcggaccgatg

SEQ ID NO: 10032 - DNA, 203 bp, Artificial sequence
  synthetic
ggcgcgccagtcctccctgccgtgccagtgctattcccaaaaataaagaatggagaggtgactgacagttacgataactataccttcctcaacgcaagaaaattaggggatgatgtacccccttacgtgtatgccacagaggatgaggacttagcggtagagctgctgggcttagactggccggaccccgactcggaccgatg

SEQ ID NO: 10033 - DNA, 203 bp, Artificial sequence
  synthetic
ggcgcgccagtcctttgcacggtgccgccatgcagcactacggggtgaacggctactcactgcacgccatgaactcactcagcgccatgtacaacctgcaccagcaggcagcccagcaggcccagcatgcccccgactaccggccttcagtgcatgcgcttacattggctgagcgcctggctgacatccgactcggaccgatg

SEQ ID NO: 10034 - DNA, 203 bp, Artificial sequence
  synthetic
ggcgcgccagtcctcgacggcatgctatgactcagggtcgcaggggcaacgtgtattgggtgcgcgactcggttagcggcctgcgcgtgcccgtgcgcacccgccccccgcgcaactagattgcaagaaaaaactacttagactcgtactgttgtatgtatccagcggcggcggcgcgcaacgaagctcgactcggaccgatg

SEQ ID NO: 10035 - DNA, 203 bp, Artificial sequence
  synthetic
ggcgcgccagtcctttcattaatggacggcattgcagcgtggatccacgctgcccacgtaaaggctgccgacaccaggattgagccaccatcggaatcgacatggcgtgttcaacgctctcagaatcccctaaagataagattgacccgcgggacctcctaatccccttaattctcttcctgtctctccgactcggaccgatg

SEQ ID NO: 10036 - DNA, 203 bp, Artificial sequence
  synthetic
ggcgcgccagtcctcaaatcggtggactctctcaagaaccaggtgacagtcaccgccagatacttcagaagggtgcctagccagtccacctgagcgcgaggatggccctgcaaactgacacacatgcctggcgggtggagatagggaccaggggactaatgttctctaactgtgtcccactccacctgcgactcggaccgatg

SEQ ID NO: 10037 - DNA, 203 bp, Artificial sequence
  synthetic
ggcgcgccagtccttggtggtttggatcctaggcgtaacttcatcattaaatctcagattctgctctgagtgtgacttactgcgaagaggcagacaaatgggcaactgcaacggggcatccaagtctaaccagccagactcctcaagagccacacagccagccgcagaatttaggagggtagctcacacgactcggaccgatg

SEQ ID NO: 10038 - DNA, 203 bp, Artificial sequence
  synthetic
ggcgcgccagtcctcagacgtgtggatgtgcgcgtggaggctttgctggaagccaccgtggaacatctcgagaaccgtgttacctttgacctggctgttattttccaccaacacagtgggggcgagaggtgccacctccgggacctgcattttgaagtgttccgagaccgtttggaataaagttaatccgactcggaccgatg

SEQ ID NO: 10039 - DNA, 203 bp, Artificial sequence
  synthetic
ggcgcgccagtcctggacttgatggcggtaacccgtctggatgtgttggcacttccatcatcaacaccatcatcaacaacatttgtgttctttctgctttaatccaacaccctgatttttctcctgaatccttcagaattttggcctatggtgatgatgtgatttatgggtgcgatccacccatccatcgactcggaccgatg

SEQ ID NO: 10040 - DNA, 203 bp, Artificial sequence
  synthetic
ggcgcgccagtcctcgtagggctggggagaactactttgacatgggagcggatttgcaatggcaacccagtcgcagggccatggaggctgcagggtgtgagcttccttacatagaagaggtggatgaagtcgaggacgaggagggcgagtacttggaagactgatggcgcgacccgtatttttgctagcgactcggaccgatg

SEQ ID NO: 10041 - DNA, 203 bp, Artificial sequence
  synthetic
ggcgcgccagtccttctggagctgggttcaggcgattttgtcagtatgatcactcaaggggagaagaaggaagaagaagttcctcaggtgtttgacgaaaacatgctgcgaaaaaggcaactaacagtgctggacctacatccaggttcaggaaagaccagaaaggtcctccccatgattctgaagagcgactcggaccgatg

SEQ ID NO: 10042 - DNA, 203 bp, Artificial sequence
  synthetic
ggcgcgccagtcctgtaagacatggtcagtaggaggtatttggcatcattgcataagaaggctttacccacttccgtgacattcgagctcctgttcgacgggaccaacccatcaactgaggaaatgggagatgacttcaggtccgggctgtgcccgtttgatacgagtcctgttgttaagggaaagtacgactcggaccgatg

SEQ ID NO: 10043 - DNA, 203 bp, Artificial sequence
  synthetic
ggcgcgccagtcctacacgacctggtggatacaacagacgtagccgtgactgtggtaggggaagcccccactatgactacaggggagacaccgacagtgttcaccagctcaggttcaggcctgaaaagccaacaagttttgaaactaggggtaggtgaaggccaatatccagggactaatccacagagcgactcggaccgatg

SEQ ID NO: 10044 - DNA, 203 bp, Artificial sequence
  synthetic
ggcgcgccagtcctcctttcactgtgctcccggtggcggtcgcttgactgatttcctccgcggctggccattgtgttctcctaggcagagaaacaacagacatggaaactcagccatcactgccaacatcgctgcaagcaccatcacacctcgcccccagcagcgacgaggaggagagcttaaccacccgactcggaccgatg

SEQ ID NO: 10045 - DNA, 203 bp, Artificial sequence
  synthetic
ggcgcgccagtcctgaatcctctgtgtacattgaggtattgcatttgactcaagggacctgttgggaacagatgtacactcccggcggagaagtaagaaatgatgatgttgaccagagtttgatcatcgctgccagaaacattgttaggagagcaacagtatcagcggacccactggcatcactcttgcgactcggaccgatg

SEQ ID NO: 10046 - DNA, 203 bp, Artificial sequence
  synthetic
ggcgcgccagtccttaaacaattgtttttctcaggtgttttccgcgttccgggtcaaagttggcgttttattattatagtcagctgacgtgtagtgtatttatacccggtgagttcctcaagaggccactcttgagtgccagcgagtagagttttctcctccgagccgctccgacaccgggactgaaacgactcggaccgatg

SEQ ID NO: 10047 - DNA, 203 bp, Artificial sequence
  synthetic
ggcgcgccagtcctagcccagattacaaggagaatagattcatcgagattggagtgacaaggagagaagtccacatatactatcttgaaaaggccaataaaattaaatctgagaatacacacatccacattttctcattcactggggaagaaatggccacaaaggccgactacactctcgatgaggaacgactcggaccgatg

SEQ ID NO: 10048 - DNA, 203 bp, Artificial sequence
  synthetic
ggcgcgccagtcctggagtagtttacactaagaccggagaggtttttccttgtgctggtttgtttccccggtgcgacatatgacgcgctggtgactttctgtgtgtgtcacgtagctcttctatgtttaacatccagtgcagcatcgttctttgggactgactctagggttagggcccatagaatgttcgactcggaccgatg

SEQ ID NO: 10049 - DNA, 203 bp, Artificial sequence
  synthetic
ggcgcgccagtcctctgtgaagttacatcggacaaactctgaccgaaccactctgagaacagagtatcgttctgaaacctgttctccatcacagagctggtatggcctccagtcgtgtagacaccattaatttacggatctggctggtctctataatctgtgcagccttgtcattcataaacgtcacgcgactcggaccgatg

SEQ ID NO: 10050 - DNA, 203 bp, Artificial sequence
  synthetic
ggcgcgccagtcctattcacccttatccaaaaatctacaagacttattttgagaaagtcgaaaggttaaaacatggaacctttggccctgtccattttagaaaccaagtcaaaatacgccgaagagttgacataaaccctggtcatgcagacctcagtgccaaggaggcacaagacgtaatcatggaacgactcggaccgatg

SEQ ID NO: 10051 - DNA, 203 bp, Artificial sequence
  synthetic
ggcgcgccagtcctgtcctacattccagttaatctatgggggcgtgatatattaagcaaaatgggtgtttatttatatagtccttcacccactgtgacagatttgatgttagaccaaggcttacttccaaatcaaggtttaggtaaacaacatcaaggcatcattttaccccttgatttaaaatctaacgactcggaccgatg

SEQ ID NO: 10052 - DNA, 203 bp, Artificial sequence
  synthetic
ggcgcgccagtcctaagtgctcttcctcacctgcccctgagtcactaccggttggggtaagaactgagggggcaaagtcatcaatctcagcgtaaaagttttcgtgtctttcgttttcaggggactcatcctcctgacattttcgccagccgccgggcgggccggcctcctttcctggaaatccagcccgactcggaccgatg

SEQ ID NO: 10053 - DNA, 203 bp, Artificial sequence
  synthetic
ggcgcgccagtccttcactaaattctctgcacgtcttttggtggcttcggcctccagaacggcggagacccaggcaacctccactccaacacatggggaaccctcattctctatgttgacctcccccaaagcgatagtgtctcagtctctgcttacatctctttccgcgacttcgaagcctacgtccccgactcggaccgatg

SEQ ID NO: 10054 - DNA, 203 bp, Artificial sequence
  synthetic
ggcgcgccagtccttcacatccttctgaagcataaagcccaggatcgccggcagggcctccttcttgataaagttagcctcgtccacaaacaagaggtgaaatgtctgcccccggatgctctgaaagacaggataagaagcgagtcactattggggagacagaatttggacaattgctgagctgggaccgactcggaccgatg

SEQ ID NO: 10055 - DNA, 203 bp, Artificial sequence
  synthetic
ggcgcgccagtcctgtgagtacttcttggatcaatatttaatcgcagacgaggtttcgtggaacgttgttcccgtaatctgttttttcaggcagtggggactcaagttagatttttttaaaaagttttcggggaagaccaagcggttgtcattttcgtttatacgtgatttgttcgccaggtctcaggcgactcggaccgatg

SEQ ID NO: 10056 - DNA, 203 bp, Artificial sequence
  synthetic
ggcgcgccagtcctgacagaagttgaagtatcttactacctccacaagaagatcatagatgaaatagcaggagggaccaacttcatctcaagacttgtagccgctttgatcgaagtcaattgggcctttgacaacgaagaagttaggggtttgaagaagttcttcctgttgtctagtagggttaaagacgactcggaccgatg

SEQ ID NO: 10057 - DNA, 203 bp, Artificial sequence
  synthetic
ggcgcgccagtccttatacaccttgatcctgcgccgggcggacgcggtcagccccggccaggccctgcccccggatgggctttacctcacgtacgactctgaccggcccctaattcttctgtataagggcagggggtgggtatttaaggatctatatgcccttctctacctgcacctccaaatgagagcgactcggaccgatg

SEQ ID NO: 10058 - DNA, 203 bp, Artificial sequence
  synthetic
ggcgcgccagtccttcatcggattgcgcgtgcatgcgtgtgcttcagacagcccaggcagcgactgtgattgtggatattctttctgcaagttttgtcgtgaacgtgttgagaaaaagacagcttaggagaacaagagctgggaatggccgggaaggccgttctaaaaggaaagggggggggtccccccgactcggaccgatg

SEQ ID NO: 10059 - DNA, 203 bp, Artificial sequence
  synthetic
ggcgcgccagtccttatacgtattgtttcgattcttccaaaatcagagacagagtgctcccggtgccatgaacggagacgatgcctttgtacggagacctagggttggttctcaaataccagagaagatgcaaaagcatccctggagacaagtctgtgaccgtggaatacatttggtgaatctcagtccgactcggaccgatg

SEQ ID NO: 10060 - DNA, 203 bp, Artificial sequence
  synthetic
ggcgcgccagtcctgactagggtttcacctaaatttccgcgtacggtgtcaaagttctgtgtttttacgtaggtgtcagctgatcgctagggtatttaaacctgacgagttccgtcaagaggccactcttgagtgccagcgagaagagttttctcctccgcgccgcaagtcagttctgcgctttgaaacgactcggaccgatg

SEQ ID NO: 10061 - DNA, 203 bp, Artificial sequence
  synthetic
ggcgcgccagtcctccttatctttttttttttttttttttttctttttttctcttttccttctttcttaccttattttactttctttcctggtggctccatcttagccctagtcacggctagctgtgaaaggtccgtgagccgcatgactgcagagagtgccgtaactggtctctctgcagatcatgtcgactcggaccgatg

SEQ ID NO: 10062 - DNA, 203 bp, Artificial sequence
  synthetic
ggcgcgccagtccttatcggataaaaatctctagcagtggcgcccgaacagggactcgaaagcgaaagttccagagaagttctctcgacgcaggactcggcttgctgaggtgcacacagcaagaggcgagagcggcgactggtgagtacgcctaagatttttgactagcggaggctagaaggagagagcgactcggaccgatg

SEQ ID NO: 10063 - DNA, 203 bp, Artificial sequence
  synthetic
ggcgcgccagtcctttgcgctcaaaatctctagcagtggcgcccgaacagggacgcgaaagcgaaagtagaaccagagaagatctctcgacgcaggactcggcttgctgaagtgcacacggcaagaggcgagagcggcgactggtgagtacgccaaatttttgactagcagaggctagaaggagagagcgactcggaccgatg

SEQ ID NO: 10064 - DNA, 203 bp, Artificial sequence
  synthetic
ggcgcgccagtcctgacgcgtaaaaatctctagcagtggcgcccgaacagggactcgaaagcgaaagtgttccagagaagctctctcgacgcgaggactcggcttgctgaggtgcacacagcaaggggcgagagcggcgactggtgagtacgccaattttttgactagcggaggctagaaggagagagcgactcggaccgatg

SEQ ID NO: 10065 - DNA, 203 bp, Artificial sequence
  synthetic
ggcgcgccagtcctaccggcagaaaatctctagcagtggcgcccgaacagggacttgaaagcgaaagttccagagaagttctctcgacgcaggactcggcttgctgaggtgcacacagcaagaggcgagagcggcgactggtgagtacgcctaaagatttttgactagcggaggctagaaggagagagcgactcggaccgatg

SEQ ID NO: 10066 - DNA, 203 bp, Artificial sequence
  synthetic
ggcgcgccagtcctcgatgcgcaaaatctctagcagtggcgcccgaacagggacttgaaagcgacagtagaaccagaggagctctctcgacacaggactcggcttgctgaagcgcgcacggcaagaggcgaggggcggcgactggtgagtacgccaatttttgactagcggaggctagaaggagagagcgactcggaccgatg

SEQ ID NO: 10067 - DNA, 203 bp, Artificial sequence
  synthetic
ggcgcgccagtcctggctcctgaaatctctagcagtggcgcccgaacagggaccgagaaagcgaaagtagaaccagaggagctctctcgacgcacgactcggcttgctgagcgcgcacggcaagaggcgaggggcggcgaccggtgagtacgccaattttttgactagcggaggctagaaggagagagcgactcggaccgatg

SEQ ID NO: 10068 - DNA, 203 bp, Artificial sequence
  synthetic
ggcgcgccagtcctgcttcttcaaatctctagcagtggcgcccgaacagggaccggaaagcgaaagagaaaccagagaagctctctcgacgcaggactcggcttgctgaagcgcgcacggcaagaggcgaggggcggcgaacggtgagtacgccaaaattttgactagcggaggctagaaggagagagcgactcggaccgatg

SEQ ID NO: 10069 - DNA, 203 bp, Artificial sequence
  synthetic
ggcgcgccagtcctttgtatcgaaatctctagcagtggcgcccgaacagggacctgaaagcgaaagtaccagagaagttctctcgacgcaggactcggcttgctgaggtgcacacagcaagaggcgagagcggcgactggtgagtacgccaaagaattttttgactagcggtggctagaaggagagagcgactcggaccgatg

SEQ ID NO: 10070 - DNA, 203 bp, Artificial sequence
  synthetic
ggcgcgccagtcctcttgcgttaaatctctagcagtggcgcccgaacagggacgcgaaagcgaaagtagaaccagaggagaactctcgacgcaggactcggcttgctgaagtgcactcggcaagaggcgagagcggcggctggtgagtacgccattttatttgactagcggaggctagaaggagagtgcgactcggaccgatg

SEQ ID NO: 10071 - DNA, 203 bp, Artificial sequence
  synthetic
ggcgcgccagtcctttagttcaaaatctctagcagtggcgcccgaacagggacgcgaaagcgaaagtagaaccagaggagatctctcgacgcaggactcggcttgctgaggtgcacacagcaagaggcgagagcggcggctggtgagtacgccaatttttttgactagcggaggctagaaggagagagcgactcggaccgatg

SEQ ID NO: 10072 - DNA, 203 bp, Artificial sequence
  synthetic
ggcgcgccagtcctcgtcagtaaaatctctagcagtggcgcccgaacagggactcgaaagcgaaagttccagagaagttctctcgacgcaggactcggcttgctgaggtgcacacagcaagaggcgagagcggcgactggtgagtacgcctaagaattttttgactagcggaggctagaaggagagagcgactcggaccgatg

SEQ ID NO: 10073 - DNA, 203 bp, Artificial sequence
  synthetic
ggcgcgccagtcctttaaggagaaatctctagcagtggcgcccgaacagggactggaaaagcgaaagtaaaaccagaggagatctctcggcgcaggactcggcttgctgcagcgcgcgcggcaagaggcgaggggcggcgactggtgagtacgccaatttttgactagcggaggctagaaggagagagcgactcggaccgatg

SEQ ID NO: 10074 - DNA, 203 bp, Artificial sequence
  synthetic
ggcgcgccagtcctcgggtttgaaatctctagcagtggcgcccgaacagggacttgaaagcgaaagagaaaccagaggagatctctcgacgcaggactcggcttgctgaagcgcgcacagcaagaggcgaggggcggcgaccggtgagtacgccaattttttgactagcggaggctagaaggagagagcgactcggaccgatg

SEQ ID NO: 10075 - DNA, 203 bp, Artificial sequence
  synthetic
ggcgcgccagtcctttgggactaaatctctagcagtggcgcccgaacagggacttgaaagcgaaagagaaaccagaggagatctctcgacgcaggactcggcttgctgaagcgcgcacggcaagaggcgaggggcggcgactggtgagtacgccaaatttttgactagcggaggctagaaggagagagcgactcggaccgatg

SEQ ID NO: 10076 - DNA, 203 bp, Artificial sequence
  synthetic
ggcgcgccagtcctaagatcacaaatctctagcagtggcgcccgaacagggacttgaaagtgaaagtagaaccagaggagctctctcgacgcaggactcggcttgctgaagcgcgcacggcaagaggcgaggggcagcgaacggtgagtacgcaaaatttttgactagcggaggctagaaggagagagcgactcggaccgatg

SEQ ID NO: 10077 - DNA, 203 bp, Artificial sequence
  synthetic
ggcgcgccagtccttgaccattaacagggacccgaaagtgaaagttaatagggactcgaaagcgaaagttccagagaagttctctcgacgcaggactcggcttgctgaagtgcacacagcaagaggcgagagcggcgactggtgagtacgccaaatccttttgactagcggaggctagaaggagagagcgactcggaccgatg

SEQ ID NO: 10078 - DNA, 203 bp, Artificial sequence
  synthetic
ggcgcgccagtcctatatccttaacagggacctgaaaacgaaagttaatagggactcgaaagcgaaagttccagagaagttctctcgacgcaggactcggcttgctgaggtgcacacagcaagaggcgagagcggcgaactggtgagtacgccaaaaattttgactagcggaggctagaaggagagagcgactcggaccgatg

SEQ ID NO: 10079 - DNA, 203 bp, Artificial sequence
  synthetic
ggcgcgccagtccttcggcgtcaacagggacttgaaagagaaagttaaaagggactcgaaagcgaaagttccagagaagttctctcgacgcaggactcggcttgctgaaggtgcacacagcaagaggcgagagcggcggctggtgagtacgccaaattttttgactagcggaggctagaaggagagagcgactcggaccgatg

SEQ ID NO: 10080 - DNA, 203 bp, Artificial sequence
  synthetic
ggcgcgccagtcctccttcctaaacagggacttgaaagcgaaagttaacagggactcgaaagcgaaagttccagagaagttctctcgacgcaggactcggcttgctgaaggtgcacacagcaagaggcgagagcggcggctggtgagtacgccataaattttgactagcggaggctagaaggagagagcgactcggaccgatg

SEQ ID NO: 10081 - DNA, 203 bp, Artificial sequence
  synthetic
ggcgcgccagtcctctgtttgaaacagggacttgaaagtgaaagttaatagggactcgaaagcggaagttcccagaggagatctctcgacgcaggactcggcttgctgcagcgcgcacagcaagaggcgaggggcagcagctggtgagtacgctgaaattttgactagcggaggctagaaggagagagcgactcggaccgatg

SEQ ID NO: 10082 - DNA, 203 bp, Artificial sequence
  synthetic
ggcgcgccagtcctcagtacagaactagagatccctcagaccactctagaaggtgtaaaaatctctagcagtggcgcccgaacagggacccgaaagcgaaagttaatagggactcgaaagcgaaagttccagagaagttctctcgacgcaggactcggcttgctgaggtgcacacggcaagaggcgagcgactcggaccgatg

SEQ ID NO: 10083 - DNA, 203 bp, Artificial sequence
  synthetic
ggcgcgccagtcctcacatgtaaactagagatccctcagaccactctagacagtgtaaaaatctctagcagtggcgcccgaacagggacccgaaagtgaaagttaatagggactcgaaagcgaaagttccagagaagttctctcgacgcaggactcggcttgctgaagtgcacacagcaagaggcgagcgactcggaccgatg

SEQ ID NO: 10084 - DNA, 203 bp, Artificial sequence
  synthetic
ggcgcgccagtcctgttcgcgaaactagagatccctcagaccactctagacagtgtaaaaatctctagcagtggcgcccgaacagggacttgaaagcgaaagttaatagggactcgaaagcgaaagttccagagaagatctctcgacgcaggactcggcttgctgaagtgcactcggcaagaggcgagcgactcggaccgatg

SEQ ID NO: 10085 - DNA, 203 bp, Artificial sequence
  synthetic
ggcgcgccagtcctcccttcgtaactagagatccctcagaccactctagacagtgtaaaaatctctagcagtggcgcccgaacagggacttgaaagcgaaagttaatagggactcgaaagcgaaagttccagagaagttctctcgacgcaggactcggcttgctgaggtgcacacagcaagaggcgagcgactcggaccgatg

SEQ ID NO: 10086 - DNA, 203 bp, Artificial sequence
  synthetic
ggcgcgccagtccttgctcaaaaactagagatccctcagaccactctagacagtgtaaaaatctctagcagtggcgcccgaacagggacttgaaagtgaaagttaaaagggactcgaaagcggaagttccagagaagttctctcgacgcaggactcggcttgctgaggtgcacacagcaagaggcgagcgactcggaccgatg

SEQ ID NO: 10087 - DNA, 203 bp, Artificial sequence
  synthetic
ggcgcgccagtccttcaactggaactagagatccctcagaccactctagacggtataaaaatctctagcagtggcgcccgaacagggacccgaaagtgaaagttaatagggactcgaaagcggaagttccagagaagttctctcgacgcaggactcggcttgctgaggtgcacacagcaagaggcgagcgactcggaccgatg

SEQ ID NO: 10088 - DNA, 203 bp, Artificial sequence
  synthetic
ggcgcgccagtcctcgtcttgcaactagagatccctcagaccactctagactaagtaaaaatctctagcagtggcgcccgaacagggactcgaaagcgaaagttaatagggactcgaaagcgaaagttccagagaagttctctcgacgcaggactcggcttgctgaggtgcacacagcaagaggcgagcgactcggaccgatg

SEQ ID NO: 10089 - DNA, 203 bp, Artificial sequence
  synthetic
ggcgcgccagtcctccaaccagaactagagatccctcagaccactctagactaagtaaaaatctctagcagtggcgcccgaacagggacttgaaagcgaaagttaatagggactcgaaagcgaaagttccagagaagttctctcgacgcaggactcggcttgctgaggtgcacacagcaagaggcgagcgactcggaccgatg

SEQ ID NO: 10090 - DNA, 203 bp, Artificial sequence
  synthetic
ggcgcgccagtcctaggccaagaactagagatccctcagaccactctagactaagtaaaaatctctagcagtggcgcccgaacagggacttgaaagcgaaagttaatagggactcgaaagcgaaagttccagagaagttctctcgacgctggactcggcttgctgaggtacacacagcaagaggcgagcgactcggaccgatg

SEQ ID NO: 10091 - DNA, 203 bp, Artificial sequence
  synthetic
ggcgcgccagtcctgcgttctgaactagagatccctcagaccactctagactgagtaaaaatctctagcagtggcgcccgaacagggacttgaaagcgaaagttaatagggactcgaaagcgaaagttccagagaagttctctcgacgcaggactcggcttgctgaggtgcacacagcaagaggcgagcgactcggaccgatg

SEQ ID NO: 10092 - DNA, 203 bp, Artificial sequence
  synthetic
ggcgcgccagtcctgtctacttaactagagatccctcagaccactctagactgagtaaaaatctctagcagtggcgcccgaacagggacttgaaagcgaaagttaatagggactcgaaagcgaaagttccagagaagttctctcgacgcaggactcggcttgctgcggtgcacacagcaagcggcgagcgactcggaccgatg

SEQ ID NO: 10093 - DNA, 203 bp, Artificial sequence
  synthetic
ggcgcgccagtcctgagtacctaactagagatccctcagaccactctagactgagtaaaattctctagcagtggcgcccgaacagggacttgaaaacgaaagttaatagggactcgaaagcgaaagttccagagaagttctctcgacgcaggactcggcttgctgaggtgcacacagcaagaggcgagcgactcggaccgatg

SEQ ID NO: 10094 - DNA, 203 bp, Artificial sequence
  synthetic
ggcgcgccagtcctccaggctaaactagagatccctcagaccactctagactgtgtaaaaatctctagcagtggcgcccgaacagggacttgaaagtgaaagttaatagggactcgaaagcgaaagttccagagaagttctctcgacgcaggactcggcttgctgaggtgcacacagcaagaggcgagcgactcggaccgatg

SEQ ID NO: 10095 - DNA, 203 bp, Artificial sequence
  synthetic
ggcgcgccagtccttagcctttaactagagatccctcagaccactctagatagtgtaaaaatctctagcagtggcgcccgaacagggacttgaaaacgaaagttaatagggactcgaaagcgaaagttccagagaagttctctcgacgcaggactcggcttgctgaggtgcacacagcaagaggcgagcgactcggaccgatg

SEQ ID NO: 10096 - DNA, 203 bp, Artificial sequence
  synthetic
ggcgcgccagtcctggcggctcaatctatagcagtggcgcccgaacagggaccagaaagcgaaagtagaaccagaggagctctctcgacgcaggactcggcttgctgaagcgcgcacggcaagaggcgaggggcggcgactggtgagtacgccaaaaattttgactagcggaggctagaaggagagagcgactcggaccgatg

SEQ ID NO: 10097 - DNA, 203 bp, Artificial sequence
  synthetic
ggcgcgccagtcctcagctatcaatctctagcagtggcgcccgaacagggaccagaaagcgaaagtaaaaccagagaagttctctcgacgcaggactcggcttgctgaagtgcactcggcaagaggcgagaggggcggctggtgagtacgccatttttatttgactagcggaggctagaaggagagagcgactcggaccgatg

SEQ ID NO: 10098 - DNA, 203 bp, Artificial sequence
  synthetic
ggcgcgccagtcctgtaccgttaatctctagcagtggcgcccgaacagggaccagaaagcgaaagtaagaccagaggagatctctcgacgcaggactcggcttgctgaagtgcactcggcaagaggcgagagcggcgactggtgagtacgccaattttatttgactagcggaggctagaaggagagagcgactcggaccgatg

SEQ ID NO: 10099 - DNA, 203 bp, Artificial sequence
  synthetic
ggcgcgccagtcctaaacagtgaatctctagcagtggcgcccgaacagggaccggaaaacgaaagtaaaaccagaggagatctctcgacgcaggactcggcttgctgaagcgcgcacggcaagaggcgaggggcggcggctggtgagtacgccaaaatttttgactagcggaggctagaaggagagagcgactcggaccgatg

SEQ ID NO: 10100 - DNA, 203 bp, Artificial sequence
  synthetic
ggcgcgccagtcctctgctcctaatctctagcagtggcgcccgaacagggaccggaaagcgaaagagaaaccagaggagctctctcgacgcaggactcggcttgctgaagcgcgcacggcaagaggcgagaggcggcgactggtgagtacgccgaaatttttgactagcggaggctagaaggagagagcgactcggaccgatg

SEQ ID NO: 10101 - DNA, 203 bp, Artificial sequence
  synthetic
ggcgcgccagtcctagtgcaaaaatctctagcagtggcgcccgaacagggacctgaaagcgaaagtaaaaccagagaagatctctcgacgcaggactcggcttgctgaggcgcacggcaagaggcgaggagcggcgactggtgagtacgccgaaaaatttttgactagcggaggctagaaggagagagcgactcggaccgatg

SEQ ID NO: 10102 - DNA, 203 bp, Artificial sequence
  synthetic
ggcgcgccagtccttaacacgtaatctctagcagtggcgcccgaacagggacctgaaagcgaaagtaagaccagaggagatctctcgacgcaggactcggcttgctgaagtgcactcggcaagaggcgagagcggcgactggtgagtacgccaaatttatttgactagcggaggctagaaggagagagcgactcggaccgatg

SEQ ID NO: 10103 - DNA, 203 bp, Artificial sequence
  synthetic
ggcgcgccagtcctagcgtgttaatctctagcagtggcgcccgaacagggacctgaaagcgaaagtaagaccagaggagatctctcgacgcaggactcggcttgctgaagtgcactcggcaagaggcgagaggggcgactggtgagtacgccaattttatttgactagcggaggctagaaggagagagcgactcggaccgatg

SEQ ID NO: 10104 - DNA, 203 bp, Artificial sequence
  synthetic
ggcgcgccagtcctggaacgccaatctctagcagtggcgcccgaacagggacctgaaagcgaaagtagaaccagagaagatctctcgacgcaggactcggcttgctgaagcgcgcacagcaagaggcgaggggcagcgactggtgagtacgctgaaatttttgactagcggaggctagaaggagagagcgactcggaccgatg

SEQ ID NO: 10105 - DNA, 203 bp, Artificial sequence
  synthetic
ggcgcgccagtccttggttcaaaatctctagcagtggcgcccgaacagggacctgaaagcgaaagtagaaccagaggagatctctcgacgcaggactcggcttgctgaagcgcgcacagcaagaggcgaggggcggcgactggtgagtacgccaaaaattttgactagcggaggctagaaggagagagcgactcggaccgatg

SEQ ID NO: 10106 - DNA, 203 bp, Artificial sequence
  synthetic
ggcgcgccagtcctgcgaggagaatctctagcagtggcgcccgaacagggacctgaaagcgaaagtgagaccagagaagctctctcgacgcaggactcggcttgctgaagcgcgcacagcaagaggcgagagcggcgactggtgagtacgccgaaaatttttgactagcggaggctagaaggagagagcgactcggaccgatg

SEQ ID NO: 10107 - DNA, 203 bp, Artificial sequence
  synthetic
ggcgcgccagtcctgcacaggaaatctctagcagtggcgcccgaacagggacctgaaagcgaaagtgagaccagaggagatctctcgacgcaggactcggcttgctgaagtgcactcagcaagaggcgagagcggcgactggtgagtacgccaattttatttgactagcggaggctagaaggagagagcgactcggaccgatg

SEQ ID NO: 10108 - DNA, 203 bp, Artificial sequence
  synthetic
ggcgcgccagtcctgtaactgcaatctctagcagtggcgcccgaacagggactagaaagcgaaagtagaaccagagaagatctctcgacgcaggactcggcttgctgaagcgcacggcaagaggcgaggggcggcgactggtgagtacgccaacaaatttttgactagcggaggctagaaggagagagcgactcggaccgatg

SEQ ID NO: 10109 - DNA, 203 bp, Artificial sequence
  synthetic
ggcgcgccagtcctcaactgacaatctctagcagtggcgcccgaacagggacttgaaaacgaaagtaaactggagcagttctctcgacgcggggactcggcttgctgaagtgcacacggcaagaggcgaggggaggcgactggtgagtacgcctaacttttgactagcggtaggctagaaggagagagcgactcggaccgatg

SEQ ID NO: 10110 - DNA, 203 bp, Artificial sequence
  synthetic
ggcgcgccagtcctgatcgccgaatctctagcagtggcgcccgaacagggacttgaaaacgaaagtagaaccagaggagatctctcgacgcaggactcggcttgctgaagcgcgcacggcaagaggcgaggggcggcgactggtgagtacgccaaaaactttgactagcggaggctagaaggagagagcgactcggaccgatg

SEQ ID NO: 10111 - DNA, 203 bp, Artificial sequence
  synthetic
ggcgcgccagtcctcaatcattaatctctagcagtggcgcccgaacagggacttgaaaacgaaagtagaaccggaggagctctctcgacgcaggactcggcttgctgaagcgcgcgcggcaagaggcgaggggcggcgactggtgagtacgccaaaatttttgactagcggaggctagaaggagagagcgactcggaccgatg

SEQ ID NO: 10112 - DNA, 203 bp, Artificial sequence
  synthetic
ggcgcgccagtcctgtgtcgtcaatctctagcagtggcgcccgaacagggacttgaaagcgaaagtaagaccagaggagatctctcgacgcaggactcggcttgctgaagtgcactcggcaagaggcgagaggggcgactggtgagtacgccaattttatttgactagcggaggctagaaggagagagcgactcggaccgatg

SEQ ID NO: 10113 - DNA, 203 bp, Artificial sequence
  synthetic
ggcgcgccagtcctaccgcacaaatctctagcagtggcgcccgaacagggacttgaaagcgaaagtaagaccagaggagctctctcgacgcaggactcggcttgctgaagcgcgcacagcaagaggcgaggggcggcgactggtgagtacgccaaaacttttgactagcggaggctagaaggagagagcgactcggaccgatg

SEQ ID NO: 10114 - DNA, 203 bp, Artificial sequence
  synthetic
ggcgcgccagtcctgaggagttaatctctagcagtggcgcccgaacagggacttgaaagcgaaagtagaaccagagaagatctctcgacgcaggactcggcttgctgcagcgcgcacggcaagaggcgaggggcggcgaccggtgagtacgccaaaatttttgactagcggaggctagaaggagagagcgactcggaccgatg

SEQ ID NO: 10115 - DNA, 203 bp, Artificial sequence
  synthetic
ggcgcgccagtcctcttgacagaatctctagcagtggcgcccgaacagggacttgaaagcgaaagtagaaccagaggagatctctcgacgcaggactcggcttgctgaagcgcgcacagcaagaggcgaggggcggcgactggtgagtacgccaaaattttttactagcggaggctagaaggagagagcgactcggaccgatg

SEQ ID NO: 10116 - DNA, 203 bp, Artificial sequence
  synthetic
ggcgcgccagtccttacgccctaatctctagcagtggcgcccgaacagggacttgaaagcgaaagtagaaccagaggagctctctcgacgcaggactcggcttgctgaagcgcgcacagcaagaggcgaggggcagcgaacggtgagtacgctgaaatttttgactagcggaggctagaaggagagagcgactcggaccgatg

SEQ ID NO: 10117 - DNA, 203 bp, Artificial sequence
  synthetic
ggcgcgccagtcctgacctgaaaatctctagcagtggcgcccgaacagggacttgaaagcgaaagtagaaccagaggagctctctcgacgcaggactcggcttgctgaagcgcgcacagcaagaggcgaggggcggcgactggtgagtacgccaaaatttttgactagcggaggctagaaggagagagcgactcggaccgatg

SEQ ID NO: 10118 - DNA, 203 bp, Artificial sequence
  synthetic
ggcgcgccagtcctcccggaacaatctctagcagtggcgcccgaacagggacttgaaagcgaaagtagaaccagaggagctctctcgacgcaggactcggcttgctgaagcgcgcacggcaagaggcgaggggcagcgaacggtgagtacgctgaaaaatttgactagcggaggctagaaggagagagcgactcggaccgatg

SEQ ID NO: 10119 - DNA, 203 bp, Artificial sequence
  synthetic
ggcgcgccagtcctagcacttgaatctctagcagtggcgcccgaacagggacttgaaagcgaaagtagaaccagaggagctctctcgacgcaggactcggcttgctgaagcgcgcacggcaagaggcgaggggcggcgaacggtgagtacgccaaaatttttgactagcggaggctagaaggagagagcgactcggaccgatg

SEQ ID NO: 10120 - DNA, 203 bp, Artificial sequence
  synthetic
ggcgcgccagtcctaaggcatgaatctctagcagtggcgcccgaacagggacttgaaagcgaaagtagaaccggaggagctctcttgacgcaggactcggcttgctgaagcgcgcacggcaagaggcgaggggcggcgactggtgagtacgccaaaatttttgactagcggaggctagaaggagagagcgactcggaccgatg

SEQ ID NO: 10121 - DNA, 203 bp, Artificial sequence
  synthetic
ggcgcgccagtcctctaaggtaaatctctagcagtggcgcccgaacaggggcaagaaaaggaaaatgagacccgaggggatttcttgacgcaggactcggcttgctgaagtgcactcggcaagaggcgagaggggcgactggtgagtacgccaattttatttgactagcggaggctagaaggagagagcgactcggaccgatg

SEQ ID NO: 10122 - DNA, 203 bp, Artificial sequence
  synthetic
ggcgcgccagtcctccatacggaatctctagcagtggcgcctgaacagggacctgaaaacgaaagcggaaccggagcagctctctcgacgcaggactcggcttgctgaagcgcgcacagcaagaggcgaggggaggcgactggtgagtacgccaaattttttgactagcggaggctagaaggagagagcgactcggaccgatg

SEQ ID NO: 10123 - DNA, 203 bp, Artificial sequence
  synthetic
ggcgcgccagtcctcggtcatcaatttttagcaggggggccccaacagggacccgaaagccaaagttagaacccgagaagttctctcgacgcaggaactcggcttgctgaggtgcacacagcaagaggcgaaagcggcgaactggtgagtaccgccctttttgattaccggaggttaataggagagagcgactcggaccgatg

SEQ ID NO: 10124 - DNA, 203 bp, Artificial sequence
  synthetic
ggcgcgccagtcctatacatgaacagggaccagaaagtgaaagtggaaccagggaagaaaacctccgacgcaacgggctcggcttagcggagtgcacctgctaagaggcgagaggaactcacagagggtgagtaaattgctggcggtggccagacctaggggaaggacgaagtctctaggggaggaagcgactcggaccgatg

SEQ ID NO: 10125 - DNA, 203 bp, Artificial sequence
  synthetic
ggcgcgccagtccttcgtgcggacagggacctgaaagcgaaagttaatagggactcgaaagcgaaagttccagagaagttctctcgacgcaggactcggcttgctgaggtgcacacagcaagaggcgagagcggcgactggtgagtacgccaaaaattttttgactagcggaggctagaaggagagagcgactcggaccgatg

SEQ ID NO: 10126 - DNA, 203 bp, Artificial sequence
  synthetic
ggcgcgccagtcctcgtgcagtacagggaccttaaagcgaaagtaaaagggactcgaaagcggaagttccagagaagatctctcgacgcaggactcggcttgctgagtgcacacagcaagaggcgaggggcggcgactggtgagtacgccaaaaatttttttgactagcggaggctaggaggagagagcgactcggaccgatg

SEQ ID NO: 10127 - DNA, 203 bp, Artificial sequence
  synthetic
ggcgcgccagtccttgcgttagacagggacgcgaaagagaaagtgaaaccagggaagaaaacctccgacgcaacgggctcggcttagcggagtgcacctgctaagaggcgagaggaactcacaggggtgagtaaatttgctggcggtggccagacctaggggaagggcgaagtctctaggggaggaagcgactcggaccgatg

SEQ ID NO: 10128 - DNA, 203 bp, Artificial sequence
  synthetic
ggcgcgccagtccttatctcgcactagagatccctcagaccactctagacagtgtaaaaatctctagcagtggcgcccgaacagggacctgaaagcgaaagttaatagggactcgaaagcgaaagttccagagaagttctctcgacgcaggactcggctcgctgaaggtgcactcggcgagaggcgagcgactcggaccgatg

SEQ ID NO: 10129 - DNA, 203 bp, Artificial sequence
  synthetic
ggcgcgccagtccttttagctaactagagatccctcagaccactctagactgagtaaaaatctctaccagtggcgcccgaacagggcactcgaaagcgaaagttaatagggactcgaaagcgaaagttccagagaagttctctcgacgcaggactcggcttgctgaggtgcacacagcaagaggcgagcgactcggaccgatg

SEQ ID NO: 10130 - DNA, 203 bp, Artificial sequence
  synthetic
ggcgcgccagtccttgcctccaactagagatccctcagaccactctagactgagtaaaaatctctagcagtggcgcccgaacagggacttgaaagcgaaagttaatagggactcgaaagcgaaagttccagagaagttctctcgacgcaggactcggcttgctgaggtgcgcaacagcaagaggcgagcgactcggaccgatg

SEQ ID NO: 10131 - DNA, 203 bp, Artificial sequence
  synthetic
ggcgcgccagtcctcgcattacactagagatccctcagaccactctagatagtgtaaaaatctctagaagtggcgcccgaacagggacttgaaagcgaaagttaaacgggactcgaaagcgaaagttccagagaagttctctcgacgcaggactcggcttgctgaaggtgcacacagcaagaggcgagcgactcggaccgatg

SEQ ID NO: 10132 - DNA, 203 bp, Artificial sequence
  synthetic
ggcgcgccagtcctcataaataactagagatccctcagaccactctagtgagtgtaaaaatctctagcagtggcgcccgaacagggacttgaaagcgaaagttaacagggactcgaaagcgaaagttccagagaagttctctcgacgcaggactcggcttgctgaaggtgcacgcagcaagaggcgagcgactcggaccgatg

SEQ ID NO: 10133 - DNA, 203 bp, Artificial sequence
  synthetic
ggcgcgccagtcctgtactttgagacagattcggattggcagagagcctgttggaatcaaaagaaggttgccaaaagattcttaaagttttagaaccattagtaccaacagggtcagaaaatttaaaaagcctttttaataccgtctgcgtcatttggtgcttgcacgcagaagagaaagtgaaagatcgactcggaccgatg

SEQ ID NO: 10134 - DNA, 203 bp, Artificial sequence
  synthetic
ggcgcgccagtcctgaacgagcagacagatttggatcggcagaaagcctgttggaaagcaaagaaggatgtcaaagaatattagcagtactagctccattaatgccaacaggctcggaaaatttaaaaagcttgtttagtactgtctgcgtagtttggtgtctgcacgcagaaatgaaagtgaaagaccgactcggaccgatg

SEQ ID NO: 10135 - DNA, 203 bp, Artificial sequence
  synthetic
ggcgcgccagtccttttagacgagcagtggcgcctgaacagggacccgaaagcgaaagtaggaccagaggagatctctcgacgcaggactcggcttgctgaagtgcgcacggcaagaggcgaggggacggcggctgggtgagtacgccaaaaataaaattttgactagcggaggctagaaggagagagcgactcggaccgatg

SEQ ID NO: 10136 - DNA, 203 bp, Artificial sequence
  synthetic
ggcgcgccagtcctatcttagcatcaattgtgtgactctggtatctagagatccctcagacctctttagtccgggtggaaaatctctagcagtggcgcccgaacagggacgcgaaagcgaaagtagaaccggagaagatctctcgacgcaggactcggcttgctgaagcgcgcacagcaagaggcgagcgactcggaccgatg

SEQ ID NO: 10137 - DNA, 203 bp, Artificial sequence
  synthetic
ggcgcgccagtcctctgtgggcatccaatttgtgactctggtatctagagatccctcagatattaagtgtctgtgcggaaaatctctagcagtggcgcccgaacagggacttgaaaacgaaagtgtaaccggagaagttctctcgacgcaggactcgacttgctgagtgcgcaccagcaaggggcgagcgactcggaccgatg

SEQ ID NO: 10138 - DNA, 203 bp, Artificial sequence
  synthetic
ggcgcgccagtcctgcaaggttatccattcggtaactctggtacctagagatccctcagaccatctggactgagtagaaaatctctagcagtggcgcccgaacagggacttgaaaacgaaagtagaaccggaggctgaatctctcgacgcaaggactcggctcgttggtgcacacagcgagaggcgagcgactcggaccgatg

SEQ ID NO: 10139 - DNA, 203 bp, Artificial sequence
  synthetic
ggcgcgccagtcctggcggtgtatctctagcagtggcgcccgaacagggacccgaaagcgaaagtagaaccagagaagctctctcgacgcaggactcggcttgctgaagcgcgctcggcaagaggcgaggggcggcgactggtgagtacgcctaaaatttttgactagcggaggctagaaggagagagcgactcggaccgatg

SEQ ID NO: 10140 - DNA, 203 bp, Artificial sequence
  synthetic
ggcgcgccagtccttgcgtatcatctctagcagtggcgcccgaacagggacccgaaagcgaaagtgagaccagagaagatctctcgacgcaggactcggcttgctgaagtgcactcggcaagaggcgagaggggcggctggtgagtacgccaaattttatttgactagcggaggctagaaggagagagcgactcggaccgatg

SEQ ID NO: 10141 - DNA, 203 bp, Artificial sequence
  synthetic
ggcgcgccagtcctttgctttaatctctagcagtggcgcccgaacagggacccgaaagtgaaagtaagaccagaggaggtctctcgacgcaggactcggcttgctgaagtgcactcggcaagaggcgagagcggcgactggtgagtacgccaaattttatttgactagcggaggctagaaggagagagcgactcggaccgatg

SEQ ID NO: 10142 - DNA, 203 bp, Artificial sequence
  synthetic
ggcgcgccagtcctgattagatatctctagcagtggcgcccgaacagggacctgaaaagcgaaagtaaaaccagagaagctctctcgacgcaggactcggcttgctgagcgcgcacggcaagaggcgaggggcagcgactggtgagtacgctgaaattttttgactagcggaggctagaaggagagagcgactcggaccgatg

SEQ ID NO: 10143 - DNA, 203 bp, Artificial sequence
  synthetic
ggcgcgccagtcctaaatttagatctctagcagtggcgcccgaacagggacctgaaagcgaaagtaagaccagaggagatctctcgacgcaggactcggcttgctgaagtgcactcggcaagaggcgagagcggcggctggtgagtacgccaatttttatttgactagcggaggctagaaggagagagcgactcggaccgatg

SEQ ID NO: 10144 - DNA, 203 bp, Artificial sequence
  synthetic
ggcgcgccagtcctgcgttaccatctctagcagtggcgcccgaacagggacgcgaaaagcgaaaataaaaccagagaagatctctcgacgcaggactcggcttgctgaagtgcacacggcaagaggcgaggggagcggcgactggtgagtacgccaatttttgactagcggaggctagaaggagagagcgactcggaccgatg

SEQ ID NO: 10145 - DNA, 203 bp, Artificial sequence
  synthetic
ggcgcgccagtcctagcagcttatctctagcagtggcgcccgaacagggacgctgaaagtgaaagagaaaccagaggagctctctcgacgcaggactcggcttgctgcagcgcgcacggcaagaggcgaggggcggcgactggtgagtacgccaaaatttttgactagcggaggctagaaggagagagcgactcggaccgatg

SEQ ID NO: 10146 - DNA, 203 bp, Artificial sequence
  synthetic
ggcgcgccagtcctataaagttatctctagcagtggcgcccgaacagggacgtgaaagcgaaagtagaaccagagaagctctctcgacgcgaggactcggcttgctgaagcgcgcacagcaagaggcgaggggcggcgactggtgagtacgccgaattttttgactagcggaggctagaaggagagagcgactcggaccgatg

SEQ ID NO: 10147 - DNA, 203 bp, Artificial sequence
  synthetic
ggcgcgccagtcctaaggagcgatctctagcagtggcgcccgaacagggactagaaaacgaaagtaaggccagaggagatctctcgacgcaggactcggcttgctgaagtgcacacggcaagaggcgagagcggcggctggagagtacgccgaattttatttgactagcggaggctagaaggagagagcgactcggaccgatg

SEQ ID NO: 10148 - DNA, 203 bp, Artificial sequence
  synthetic
ggcgcgccagtcctctgcaataatctctagcagtggcgcccgaacagggacttgaaaacgaaagtgtaaccggagaagttctctcgacgcaggactcgacttgctgagtgcgcaccagcaaggggcgaggggccggcgactggtgagtacgcctaatttttgactagcgaaagctagaaggagagaggcgactcggaccgatg

SEQ ID NO: 10149 - DNA, 203 bp, Artificial sequence
  synthetic
ggcgcgccagtcctacttcgaaatctctagcagtggcgcccgaacagggacttgaaagcgaaagagaaaccagaggagctctctcgacgcaggactcggcttgctgaagcgcgcacggcaagaggcgaggggcggcgactggtgagtacgccaaaattttttgactagcggatgctagaagaaaaaagcgactcggaccgatg

SEQ ID NO: 10150 - DNA, 203 bp, Artificial sequence
  synthetic
ggcgcgccagtccttcttcacgatctctagcagtggcgcccgaacagggacttgaaagcgaaagggaaaccagaggagctctctcgacgcaggactcggcttgctgaagcgcgcacggcaagaggcgaggggcggcgactggtgagtacgccgaaaatttttgactagcggaggctagaaggagagagcgactcggaccgatg

SEQ ID NO: 10151 - DNA, 203 bp, Artificial sequence
  synthetic
ggcgcgccagtcctcaatgggtatctctagcagtggcgcccgaacagggacttgaaagcgaaagtaaaaccagaggagatctctcgacgcaggactcggcttgctgaagtgcactcggcaagaggcgagagcggcgactggtgagtacgccgaattttatttgactagcggaggctagaaggagagagcgactcggaccgatg

SEQ ID NO: 10152 - DNA, 203 bp, Artificial sequence
  synthetic
ggcgcgccagtcctatccttccatctctagcagtggcgcccgaacagggacttgaaagcgaaagtaaaaccagaggagatctctcgacgcaggactcggcttgctgaagtgcactcggcaagaggcgagagcggcggctggtgagtacgccaaattttatttgactagcggaggctagaaggagagagcgactcggaccgatg

SEQ ID NO: 10153 - DNA, 203 bp, Artificial sequence
  synthetic
ggcgcgccagtcctttcatcgcatctctagcagtggcgcccgaacagggacttgaaagcgaaagtaagaccagagaagatctctcgacgcaggactcggcttgctgaagtgcactcggcaagaggcgagagcggcgactggtgagtacgccaaattttatttgactggcggaggctagaaggagagagcgactcggaccgatg

SEQ ID NO: 10154 - DNA, 203 bp, Artificial sequence
  synthetic
ggcgcgccagtcctaccaactgatctctagcagtggcgcccgaacagggacttgaaagcgaaagtaagaccagagaagatctctcgacgcaggactcggcttgctgaagtgcactcggcaagaggcgagaggggcggctggtgagtacgccaatttttatttgactagcggaggctagaaggagagagcgactcggaccgatg

SEQ ID NO: 10155 - DNA, 203 bp, Artificial sequence
  synthetic
ggcgcgccagtcctaggtaactatctctagcagtggcgcccgaacagggacttgaaagcgaaagtaagaccagagcagatctctcgacgcaggactcggcttgctgaagtgcactcggcaagaggcgagagcggcgactggtgagtacgccgaattttatttgactagcggaggctagaaggagagagcgactcggaccgatg

SEQ ID NO: 10156 - DNA, 203 bp, Artificial sequence
  synthetic
ggcgcgccagtcctggaatcaaatctctagcagtggcgcccgaacagggacttgaaagcgaaagtaagaccagaggagaactctcgacgcaggactcggcttgctgaagtgcactcggcaagaggcgagagaggcggctggtggagtacgccatttttatttgactagcggaggctagaaggagagagcgactcggaccgatg

SEQ ID NO: 10157 - DNA, 203 bp, Artificial sequence
  synthetic
ggcgcgccagtcctaatcacttatctctagcagtggcgcccgaacagggacttgaaagcgaaagtaagaccagaggagatctctcgacgcaggactcggcttgctgaagtgcacacggcaagaggcgagagcggcggctggtgagtacgccaaattttatttgactagcggaggctagaaggagagagcgactcggaccgatg

SEQ ID NO: 10158 - DNA, 203 bp, Artificial sequence
  synthetic
ggcgcgccagtccttaacgataatctctagcagtggcgcccgaacagggacttgaaagcgaaagtaagaccagaggagatctctcgacgcaggactcggcttgctgaagtgcactcggcaagaggcgagagcggcgactggtgagtacgccgaattttatttgactagcggaggctagaaggagagagcgactcggaccgatg

SEQ ID NO: 10159 - DNA, 203 bp, Artificial sequence
  synthetic
ggcgcgccagtcctacaagcgcatctctagcagtggcgcccgaacagggacttgaaagcgaaagtaagaccagaggagatctctcgacgcaggactcggcttgctgaagtgcactcggcaagaggcgagagcggcggctggtgagtacgccaaattttatttgactagcggaggctaggaggagagagcgactcggaccgatg

SEQ ID NO: 10160 - DNA, 203 bp, Artificial sequence
  synthetic
ggcgcgccagtcctcttactagatctctagcagtggcgcccgaacagggacttgaaagtgaaagtaagaccagaggaaatctctcgacgcaggactcggcttgctgaagtgcactcggcaagaggcgagagcggcggctggtgagtacgccaaaatttatttgactagcggaggctagaaggagagagcgactcggaccgatg

SEQ ID NO: 10161 - DNA, 203 bp, Artificial sequence
  synthetic
ggcgcgccagtcctagattcgtatctctagcagtggcgcccgaacagggacttgaagcgaaagcgaaagccagagaagttctctcgacgcaggactcggcttgctgagcgcgcacagcaagaggcgaggggcggcggctggtgagtacgccaaatttcttttgactagcggaggctagaaggagagagcgactcggaccgatg

SEQ ID NO: 10162 - DNA, 203 bp, Artificial sequence
  synthetic
ggcgcgccagtcctccattagcatctgttcaaccctggtgtctagagatccctcagatcacttagactgaagcagaaaatctctagcagtggcgcccgaacagggacttgaagtgaaagtgaaaccagggaagaaaacctccgacgcaacgggctcggcttagcggagtgcacccgctaagaggcgagcgactcggaccgatg

SEQ ID NO: 10163 - DNA, 203 bp, Artificial sequence
  synthetic
ggcgcgccagtcctctatacaaatctgttcgaccctggtatctagagatccctcagatcacttagactgaagcagaaaatctctagcagtggcgcccgaacagggaccggaagagaaagtgaaaccagggaagaaaacctccgacgcgacgggctcggcttagcggagtgcacccgctaagaggcgagcgactcggaccgatg

SEQ ID NO: 10164 - DNA, 203 bp, Artificial sequence
  synthetic
ggcgcgccagtcctaacgcggcatctgttgtgtgactctggtaactagagatccctcaaacccttttagtcagtgtgaaaaatctctagcagtggcgcccgaacagggacccgaaagcgaaagtagaaccggaggagctctctcgacgcaggactcggcttgctgaaccgcgcacggcaaaaggcgagcgactcggaccgatg

SEQ ID NO: 10165 - DNA, 203 bp, Artificial sequence
  synthetic
ggcgcgccagtcctccagagaaatttgttgtgtgactctggtaactagagatccctcagaccattctagtcagtgtggaaaatctctagcagtggcgcccgaacagggacttgaaagcgaaagtagaaccagaggagatctctcgacgcaggactcggcttgctgaagcgcgcacggcaagaggcgagcgactcggaccgatg

SEQ ID NO: 10166 - DNA, 203 bp, Artificial sequence
  synthetic
ggcgcgccagtcctatacaaatcaggctcagaaaatttaaagagtctttataatactgtctgcgtcatttggtgcatacacgcagaaatgaaagtgaaaaatactgaggaagcaaagcagatagtgcagaaacacctagcggtagaaaatgaaactgcagaccaattgcctgccacaagtagaccaaccgactcggaccgatg

SEQ ID NO: 10167 - DNA, 203 bp, Artificial sequence
  synthetic
ggcgcgccagtcctatacgtctcagggacctgaaaaagaaagttaatagggactcgaaagcgaaagttccagagaagttctctcgacgcaggactcggcttactgaagtgcacacagtaagaggcgagagcggcgactggtgagtacgccaaaaaattttttgactagcggaggctagaaggagagagcgactcggaccgatg

SEQ ID NO: 10168 - DNA, 203 bp, Artificial sequence
  synthetic
ggcgcgccagtcctatggctcccagggacctgaaaaggaaagtgaaaccagggaagaaaacctccgacgcaacgggctcggcttagcggagtgcacctgctaagaggcgagaggactcacagaagggtgagtaaatttgctggcggtggccagacctaggggaagggcgaagtctctaggggaggaagcgactcggaccgatg

SEQ ID NO: 10169 - DNA, 203 bp, Artificial sequence
  synthetic
ggcgcgccagtccttgggcaaccagggacctgaaagcgaaagttaatagggactcgaaaacgaaagttccagagaagttctctcgacgcaggactcggcttgctgaggtgcacacagcaagaggcgagagcggcgaactggtgagtacgcctaagattttttgactagcggaggctagaaggagagagcgactcggaccgatg

SEQ ID NO: 10170 - DNA, 203 bp, Artificial sequence
  synthetic
ggcgcgccagtcctctccgtgccagggacttgaaagagaaagtgaaaccagggaagaaaacctccgacgcaacgggctcggcttagcggagtgcacccgctgagaggcgagaggaactcacagagggtgagtaaatttgctggcggtggccagacctaggggaagggcgaagtccctaggggaggaagcgactcggaccgatg

SEQ ID NO: 10171 - DNA, 203 bp, Artificial sequence
  synthetic
ggcgcgccagtcctaatgctatcaggttcagaaaatttaaaaagtctttttaatactgtctgcgtcatttggtgcatacacgcagaagagaaagtgaaagatactgaaggagcaaaacaaatagtgcggagacatctagtggcagaaacaggaactgcagagaaaatgccaagcacaagtagaccaaccgactcggaccgatg

SEQ ID NO: 10172 - DNA, 203 bp, Artificial sequence
  synthetic
ggcgcgccagtcctcccaccgacaggttcagaaaatttaaagagcctttacaatactgtctgcgtcatttggtgtttgcacgcagaagaaaaagtgaaacatactgaggaagcaaagcaagtagtgcagagacatctagtggtggaaacaggaacagcagacaacatgccgaaaacaagtaggccaaccgactcggaccgatg

SEQ ID NO: 10173 - DNA, 203 bp, Artificial sequence
  synthetic
ggcgcgccagtccttactctatcaggttcagaaaatttaaagagcctttataatactgtctgcgtcatttggtgcattcacgcagaagagaaagtgaaacatactgaggaagcaaaacaaatagtgcagagacatctagtggtggaaacaggaacagcagacagaatgccagtaacaagcagaccaaccgactcggaccgatg

SEQ ID NO: 10174 - DNA, 203 bp, Artificial sequence
  synthetic
ggcgcgccagtcctacgtcgctcaggttcagaaaatttaaagagcctttataatactgtctgcgtcatttggtgcttgcacgcagaagagaaagtgagacatactgaggaagcaaaacaagtagtgcagagacatctagtggtggaaacaggaacagcagacaacatgccgaaaacaagtaggccaaccgactcggaccgatg

SEQ ID NO: 10175 - DNA, 203 bp, Artificial sequence
  synthetic
ggcgcgccagtcctgattgcgtcaggttcagaaaatttaaagagcttgtacaatactgtctgcgtcatttggtgcattcacgcagaagagaaagtgaaacatactgaggaagcaagacaaatagtgcagaaacatctagtggtggaaacaggaacagcagacaccatgccaaaaacaagtagaccaaccgactcggaccgatg

SEQ ID NO: 10176 - DNA, 203 bp, Artificial sequence
  synthetic
ggcgcgccagtccttaaacgcgcatccattcggtaactctggtacctagagatccctcagaccatctagactgagtgaaaaatctctagcagtggcgcccgaacagggacttgaaaacgaaagtagaaccggaggctgaatctctcgacgcaggactcggctcgttggtgcacacagcgagaggcgagcgactcggaccgatg

SEQ ID NO: 10177 - DNA, 203 bp, Artificial sequence
  synthetic
ggcgcgccagtcctgccaagatcatctgttgtgtgactctggtaactagagatccctcagacctctttggtcagtgtagaaaatctctagcagtggcgcccgaacagggacttgaaagcgaaagtagaaccagaggagctctctcgacgcaggactcggcttgctgagcgcgcacagcaagaggcgagcgactcggaccgatg

SEQ ID NO: 10178 - DNA, 203 bp, Artificial sequence
  synthetic
ggcgcgccagtcctcgctgtagcattagtaccaacaggatcagaaaatttaaaaagcctttttaatactgtctgcgtcattttctgcctgcacgcagaagagaaagtgaaagatacagaggaggcaaaaaagatagcacagcgacacctagcggacgcagaaaaaatgacagctacaaataaaccaaccgactcggaccgatg

SEQ ID NO: 10179 - DNA, 203 bp, Artificial sequence
  synthetic
ggcgcgccagtcctaggtccatcccgaacagggaccgaaagtgaaaccagggaagaaaacctccgacgcaacgggctcggcttagcggagtgcacccgctaagaggcgagaggaactcacaagagggtgagtaattttgctggcggtggccagacctaggggaagggcgaagtctctaggggaggaagcgactcggaccgatg

SEQ ID NO: 10180 - DNA, 203 bp, Artificial sequence
  synthetic
ggcgcgccagtccttccaaacgcccgtctgttgtatgactctggtaactagagatccctcagaccactctagacggtgtaaaaaatctctagcagtggcgcccgaacagggacttgaaagcgaaagttccagagaagttctctcgacgcaggactcggcttgctgaggtgcacacagcaagaggcgagcgactcggaccgatg

SEQ ID NO: 10181 - DNA, 203 bp, Artificial sequence
  synthetic
ggcgcgccagtcctgttacaatccgaacagggacccgaaagtgaaagttaatagggactcgaaagcggaagttccagagaagttctctcgacgcaggactcggcttgctgaggtgcacacagcaagaggcgagagcggcgactggtgagtacgccaatttttgactagcagaggctagaaggagagagcgactcggaccgatg

SEQ ID NO: 10182 - DNA, 203 bp, Artificial sequence
  synthetic
ggcgcgccagtcctgggcatcaccgaacagggacttaaaagcgaaagttaatagggactcgaaagcgaaagttccagaaaagttctctcgacgcaggactcggcttgctgaggtgcacacagcaagaggcgagagcggcgactggtgagtacgccattttttaactagcggaggctagaaagagagagcgactcggaccgatg

SEQ ID NO: 10183 - DNA, 203 bp, Artificial sequence
  synthetic
ggcgcgccagtccttaccgcagccgaacagggacttgaaaagcgaaagtaacagggactcgaaagcgaaagttccagagaagttctctcgacgcaggactcggcttgctgaggtgcacacagcaagaggcgagagcggcgactggtgagtacgccattttttgactagcggaggctagaaggagagagcgactcggaccgatg

SEQ ID NO: 10184 - DNA, 203 bp, Artificial sequence
  synthetic
ggcgcgccagtccttaagtctaccgaacagggacttgaaagcgaaagctaatagggactcgaaagcgaaagttccagagaagttctctcgacgcaggactcggcttgctgcggtgcacacagcaagaggcgagacgggcgactggtgagtacgccaaattttgactagcggaggctagaaggagagagcgactcggaccgatg

SEQ ID NO: 10185 - DNA, 203 bp, Artificial sequence
  synthetic
ggcgcgccagtcctttgacgcaccgaacagggacttgaaagcgaaagtaacagggactcgaaagcgaaagttccagagaagttctctcgacgcaggactcggcttgctgggtgcacacagcaagaggcgagagcggcgactggtgagtacgccataaattttgactagcggaggctagaaggagagagcgactcggaccgatg

SEQ ID NO: 10186 - DNA, 203 bp, Artificial sequence
  synthetic
ggcgcgccagtcctacttgggtccgaacagggacttgaaagcgaaagttaacagggactcgaaagcgaaagttccagagaagttctctcgacgcaggactcggcttgctgaaggtgcacacagcaagaggcgagagcggctggtgagtacgccataaattttgactagcggaggctagaaggagagagcgactcggaccgatg

SEQ ID NO: 10187 - DNA, 203 bp, Artificial sequence
  synthetic
ggcgcgccagtcctcaaagcacccgaacagggacttgaaagcgaaagttaatagggactcgaaagcgaaagttccagagaagttctctcgacgcaggactcggcttgctgaggtgcacacagcaagaggcgagagcggcggctggtgagtacgccaaattttgactagcggaggctagaaggagagagcgactcggaccgatg

SEQ ID NO: 10188 - DNA, 203 bp, Artificial sequence
  synthetic
ggcgcgccagtcctcgcgtggaccgaacagggacttgaaagcgaaagttaatagggactcgaaagcgaaagttccagagaagttctctcgacgcaggactcggcttgctgaggtgcgcaacagcaagaggcgagagcggctactggtgagtacgccaatttttgactagcggaggctagaaggagaggcgactcggaccgatg

SEQ ID NO: 10189 - DNA, 203 bp, Artificial sequence
  synthetic
ggcgcgccagtcctcaccctctccgaacagggacttgaaagcgaaagttaatagggactcgaaagcgaaagttccagagaagttctctcgacgcaggactcggcttgctgcggtgcacacagcaagcggcgagagcggcgactggtgagtacgccaagttttgactagcggaggctagaaggagagagcgactcggaccgatg

SEQ ID NO: 10190 - DNA, 203 bp, Artificial sequence
  synthetic
ggcgcgccagtcctcggttaatccgaacagggactttaaaagcgaaagtaacagggactcgaaagcggaagttccagagaagatctctcgacgcaggactcggcttgctgaggtgcacacagcaagaggcgagagcggcgactggtgagtacgccaatttttaactagcggaggctagaaggagagagcgactcggaccgatg

SEQ ID NO: 10191 - DNA, 203 bp, Artificial sequence
  synthetic
ggcgcgccagtcctctccaaccccgtctgttgtgtgactctggtaactagagatccctcagaccctttagtcagtgtggaaaatctctagcagtggcgcccgaacagggacttgaaagcgaaagagaaaccagaggagctctctcgacgcaggactcggcttgctgagcgcgcacagcaagaggcgagcgactcggaccgatg

SEQ ID NO: 10192 - DNA, 203 bp, Artificial sequence
  synthetic
ggcgcgccagtcctttatgtgaccgtctgttgtttgactctggtaactagagatccctcagaccactctagactgtgtaaaaatctctagcagtggcgcccgaacagggactcgaaagcgaaagtgttccagagaagttctctcgacgcaggactcggcttgctgaggtgcacacagcaagaggcgagcgactcggaccgatg

SEQ ID NO: 10193 - DNA, 203 bp, Artificial sequence
  synthetic
ggcgcgccagtcctccgctgcccgaacagggacttgaaagtgaaagttaatagggactcgaaagcgaaagttccagagaagttctctcgacgcaggactcggcttgctgaggtgcacacagcaagaggcgagagcggcgactggtgagtacgccaattttttgcctagcggaggctagaaggagagagcgactcggaccgatg

SEQ ID NO: 10194 - DNA, 203 bp, Artificial sequence
  synthetic
ggcgcgccagtcctgtggaccacgaacagggacttgaaagtgaaagttaatagggactcgaaagcgaaagttccagagaagttctctcgacgcaggactcggcttgctgaggtgcacacagcaagaggcgaggagcggcgactggtgagtacgccaaattttgactagcggaggctagaaggagagagcgactcggaccgatg

SEQ ID NO: 10195 - DNA, 203 bp, Artificial sequence
  synthetic
ggcgcgccagtcctctatagcccgagaaactcgtcttgtcagggaagaaagtagatgaattagaaaaagttaggttacggcccaacggaaagaaaaaatacatgttaaaacatgttgtgtgggcagcgaacgaattggacagatttggattagcagaaagcctgttggaggccaaagaaggatgtcaacgactcggaccgatg

SEQ ID NO: 10196 - DNA, 203 bp, Artificial sequence
  synthetic
ggcgcgccagtcctagtttggccgtctgttgtatgactctggtaactagagatccctcagactactctagacagtgtaaaaatctctagcagtggcgcccgaacagggactcgaaagcgaaagtgttccagagaagctctctcgacgcgaggactcggcttgctgaggtgcacacagcaaggggcgagcgactcggaccgatg

SEQ ID NO: 10197 - DNA, 203 bp, Artificial sequence
  synthetic
ggcgcgccagtcctcctggcgtcgtctgttgtgtgactctggtaactagagatccctcagaccaatttggtagtgtggaaaatctctagcagtggcgcccgaacagggacgcgaaagcgaaagtagaaccagaggagatctctcgacgcaggactcggcttgctgaagtgcactcggcaagaggcgagcgactcggaccgatg

SEQ ID NO: 10198 - DNA, 203 bp, Artificial sequence
  synthetic
ggcgcgccagtcctaccagttacgtctgttgtgtgactctggtaactagagatccctcagacctctgtagtcagtgtgaaaatctctagcagtggcgcccgaacagggacttgaaagcgaaagtagaaccagaggagctctctcgacgcaggactcggcttgctgaagcgcgcacagcaagaggcgagcgactcggaccgatg

SEQ ID NO: 10199 - DNA, 203 bp, Artificial sequence
  synthetic
ggcgcgccagtcctcgctgacacgtctgttgtgtgactctggtaactagagatccctcagacctttttggcagtatggaaaatctctagcagtggcgcccgaacagggacttgaaagcgaaagtaagaccagagaagaactctcgacgcaggactcggcttgctgaagtgcactcggcaagaggcgagcgactcggaccgatg

SEQ ID NO: 10200 - DNA, 203 bp, Artificial sequence
  synthetic
ggcgcgccagtcctgcccgcttcgtctgttgtgtgactctggtaactagagatccctcagacctttttggtagtgtggaaaatctctagcagtggcgcccgaacagggacttgaaaacgaaagtaagaccagagaagaactctcgacgcaggactcggcttgctgaagtgcactcggcaagaggcgagcgactcggaccgatg

SEQ ID NO: 10201 - DNA, 203 bp, Artificial sequence
  synthetic
ggcgcgccagtcctcttcagatcgtctgttgtgtgctctggtaactatagatccctcagacaattctagtcagtgtggaaaatctatagcagtggcgcccgaacagggaccagaaagcgaaagtagaaccagaggagctctctcgacgcaggactcggcttgctgaagcgcgcacggcaagaggcgagcgactcggaccgatg

SEQ ID NO: 10202 - DNA, 203 bp, Artificial sequence
  synthetic
ggcgcgccagtcctcggcctcccgtctgttgtgtggctctggtaactagagatccctcagaccattttggtagtgtggaaaatctttagcagtggcgcccgaacagggacttgaaagcgaaagtaagaccagaggagatctctcgacgcaagactcggcttgctgaagcgcactcggcaagaggcgagcgactcggaccgatg

SEQ ID NO: 10203 - DNA, 203 bp, Artificial sequence
  synthetic
ggcgcgccagtcctgcgtaattcgtctgttgtgtggctctggtaactagagatccctcagacctttttggtagtgtggaaaatctctagcagtggcgcccgaacagggacttgaaagcgaaagtaagaccagaggagatctctcgacgcaagactcggcttgctgaagtgcactcggcaagaggcgagcgactcggaccgatg

SEQ ID NO: 10204 - DNA, 203 bp, Artificial sequence
  synthetic
ggcgcgccagtcctcttccctgctagagatccctcagaccactctagttgttgtaaaaatctctagcagtggcgcccgaacagggacttgaaagcgaaagttaacagggactcgaaagcgaaagttccagagaagttctctcgacgcaggactcggcttgctgaaaggtgcacacggcaagaggcgagcgactcggaccgatg

SEQ ID NO: 10205 - DNA, 203 bp, Artificial sequence
  synthetic
ggcgcgccagtcctctttaagcctagagatccctcaggaccactctagacagtgtaaaaatctctagcagtggcgcccgaacagggacttgaaagcgaaagttaatatgggaatggaaagggaaagttcccgagaagttctctcgagccaggactcggcttgctgaagtgcaccagcaagaggcgagacgactcggaccgatg

SEQ ID NO: 10206 - DNA, 203 bp, Artificial sequence
  synthetic
ggcgcgccagtcctccgggcccctagcagtggcgcccgaacagggacgcgaaagcgaaagtagaaccagagacgatctctcgacgcaggactcggcttgctgaagtgcgcacggcaagaggcaaggggcggcgactggtgagtacgccaaaaataaagttttgactagcggaggctagaaggaaagagcgactcggaccgatg

SEQ ID NO: 10207 - DNA, 203 bp, Artificial sequence
  synthetic
ggcgcgccagtcctgacggcggctatctattcagacactctggtaactagagatccctcagattaaattatagtcaaggaaaatctctagcagtggcgcccgaacagggacctgaagtgaaagtaaccggaggctgaatctcccgacgcacggactcggcttgctgagtgcacacagcaagaggcgagcgactcggaccgatg

SEQ ID NO: 10208 - DNA, 203 bp, Artificial sequence
  synthetic
ggcgcgccagtccttatcatagctccggtacttagactctggtaactagagatccctcagaccttttagtcagtgtggaaaatctctagcagtggcgcccgaacagggacttgaaagcgaaagtggtaccggagaagatctctcgacgcaggactcggcttgctgaagcgcgcacggcaagaggcgagcgactcggaccgatg

SEQ ID NO: 10209 - DNA, 203 bp, Artificial sequence
  synthetic
ggcgcgccagtcctgacgtgccctctagcagtggcgcccgaacagggacttgaaagcgaaaggaaaaccagaggagctctctcgacgcaggactcggcttgctgaagcgcgcacagcaagaggcgaggggcggcgactggtgagtacgcctaaaaattttttgactagcggaggctagaaggagagagcgactcggaccgatg

SEQ ID NO: 10210 - DNA, 203 bp, Artificial sequence
  synthetic
ggcgcgccagtccttgtcccagctctggtaactagagatccctcagaccactctagactgtgtaaaaatctctagcagtggcgcccgaacaggacttgacggtaatagggactcgaaagcgaaagttccagagaagatctctcgacgcaaggactcggcttgctgaggtgcgcacagcaagaggcgagcgactcggaccgatg

SEQ ID NO: 10211 - DNA, 203 bp, Artificial sequence
  synthetic
ggcgcgccagtcctgcccttagctggtaactagagatccctcagaccactttcagtttgtgtaaaaatctctagcagtggcgcccgaacagggaccggaagttaatagggactcgaaagcgaaagttccagagaagctctctcgacgcagggactcggcttgctgaggtgcacacagcaagaggcgagcgactcggaccgatg

SEQ ID NO: 10212 - DNA, 203 bp, Artificial sequence
  synthetic
ggcgcgccagtcctgtctgcccctggtatctagagatccctcagaccactctagacttagtgaaaaatctctagcagtggcgcccgaacagggaccggaagttaatagggactcgaaagcgaaagttccagagaagctctctcgacgcagggactcggcttgctgaggtgcacacagcaagaggcgagcgactcggaccgatg

SEQ ID NO: 10213 - DNA, 203 bp, Artificial sequence
  synthetic
ggcgcgccagtcctaactcctactggtatctagagatccctcagaccactgtagactgtgtaaaaaatctctagcagtggcgcccgaacagggacctgaaattaatagggactcgaaagcgaaagttccagagaagttctctcgacgcaaggactcggcttgctgaggtgcacgcagcaagaggcgagcgactcggaccgatg

SEQ ID NO: 10214 - DNA, 203 bp, Artificial sequence
  synthetic
ggcgcgccagtccttattaagtctgttcaaccctggtgtctagagatccctcagatcacttagactgaagcagaaaaatctctagcagtggcgcccgaacagggacgcgaaagcgaaagtgaagccagggaagaaaacctccgacgcaacgggctcggcttagcggagtgcacctgctaagaggcgagcgactcggaccgatg

SEQ ID NO: 10215 - DNA, 203 bp, Artificial sequence
  synthetic
ggcgcgccagtcctgccgccacctgttgtgtgactctggtaactagagatccctcagaccaccttagcagagtgaaaaatctctagcagtggcgcccgaacagggactcgaaagcgaaagtaaaagttccagagaagttctctcgacgcaggactcggcttgctgaggtgcacacagcaagaggcgagcgactcggaccgatg

SEQ ID NO: 10216 - DNA, 203 bp, Artificial sequence
  synthetic
ggcgcgccagtcctctagttagctgttgtttgactctggtaactagagatccctcagactctcgtagtcagtgtgaaaaatctctagcagtggcgcccgaacagggaccttaaaagcgaaagagaaaccagaggagctctctcgacgcaggactcggcttgctgaaagcgcgcacggcaagaggcgagcgactcggaccgatg

SEQ ID NO: 10217 - DNA, 203 bp, Artificial sequence
  synthetic
ggcgcgccagtcctattggaccctttgatgtgtgactctggtaactagagatccctcagaccaattgtggtagtgtggaaaatctctagcagcggcgcccgaacagggacttgaaagcgaaagtaagaccagaggagatctctcgacgcaggactcggcttgctgaagtgcactcggcaagaggcgagcgactcggaccgatg

SEQ ID NO: 10218 - DNA, 203 bp, Artificial sequence
  synthetic
ggcgcgccagtcctccaacggcgaaaaactccgtcttgagagggaaaaaggcagatgaattagaaaaaattaggttacggcccggcgggaagaaaaaatacagattaaaacatattgtgtgggcagcgaatgaattggacagattcggattaacagagagcctgttggagtcaaaagaaggttgccaacgactcggaccgatg

SEQ ID NO: 10219 - DNA, 203 bp, Artificial sequence
  synthetic
ggcgcgccagtcctaacattgggaaaatctctaccattggcgcccaaccagggactcgaaagcgaaagttacagagaagttctctcgacgcaggactcggcttgctgaggtgcacacagcaagaggcgagagcggcgactggtgagtacgcctaaaatttttgactagcagaggctagaaggagagagcgactcggaccgatg

SEQ ID NO: 10220 - DNA, 203 bp, Artificial sequence
  synthetic
ggcgcgccagtccttgttcgcagaaaatctctagcagtggcgcccgaacagggacgcgaaagcgaaagtagaaccagaggagatctctcgacgcaggactcggcttgctgaagtgcactcggcaggaggcgagagcggcggctggtgagtacgccaatttttgactagtggaggctagaaggagagagcgactcggaccgatg

SEQ ID NO: 10221 - DNA, 203 bp, Artificial sequence
  synthetic
ggcgcgccagtccttagtaatggaaaatctctagcagtggcgcccgaacagggacttgaaagcgaaagtagaaccagagaagatctctcgacgcaggactcggcttgctgaagtgcacacggcaagaggcgagagcggcgactggtgagtacgccaaattttgactagcagaggctagaaggagagagcgactcggaccgatg

SEQ ID NO: 10222 - DNA, 203 bp, Artificial sequence
  synthetic
ggcgcgccagtccttcattcctgaacagggaccggaagagaaagtgaaaccagggaagaaaacctccgacgcgacgggctcggcttagcggagtgcacccgctaagaggcgagaggactcacagaggtgagtagttttgctggcggtggccagacctaggggaagggcgaagtctctaggggaggaggcgactcggaccgatg

SEQ ID NO: 10223 - DNA, 203 bp, Artificial sequence
  synthetic
ggcgcgccagtcctgtaaaccggaacagggacctgaaaagcgaaagtaaaagggactcgaaagcggcggttccagagaagttctctcgacgcaagactcggcttgctgagtgcacacggcaagaggcgagaagcggcgactggtgagtacgccaaattttttgactagcggaggctagaaggagagagcgactcggaccgatg

SEQ ID NO: 10224 - DNA, 203 bp, Artificial sequence
  synthetic
ggcgcgccagtccttctcagtcgaacagggacttgaaaagcgaaagtaaaagggactcgaaagcggaagttccagagaagttctctcgacgcaggactcggcttgctgagtgcacacagcaagaggcgaggagcggcgactggtgagtacgccaaaatttttgactagcggaggctagaaggagagagcgactcggaccgatg

SEQ ID NO: 10225 - DNA, 203 bp, Artificial sequence
  synthetic
ggcgcgccagtcctcgaagatggaacagggacttgaaaagcgaaagtaatagggactcgaaagcggaagttccagagaagttctctcgacgcaggactcggcttgctgaggtgcacaaagcaagaggcgagagcggcgactggtgagtacgccaaaatttttgactagcggaggctagaaggagagagcgactcggaccgatg

SEQ ID NO: 10226 - DNA, 203 bp, Artificial sequence
  synthetic
ggcgcgccagtccttcctcttagaacagggacttgaaagcgaaagtaatagggactcgaaaacgaaagttccagagaagaagctctcttgacgcaggactcggcttgctgaggtgcacacagcaagaggcgagagcggcgactggtgagtacgccattttttgactagcggaggctagaaggagagagcgactcggaccgatg

SEQ ID NO: 10227 - DNA, 203 bp, Artificial sequence
  synthetic
ggcgcgccagtccttgatggcggaacagggacttgaaagcgaaagttaaaagggactcgaaagcgaaagttccagagaagttctctcgacgcaggactcggcttgctgaggtgcacacagcaagaggcgagagcggcgactggtgagtacgccaaactttttgactagcggaggctagaaggagagagcgactcggaccgatg

SEQ ID NO: 10228 - DNA, 203 bp, Artificial sequence
  synthetic
ggcgcgccagtccttttgatgagaacagggacttgaaagtgaaagttaaaagggactcgaaagcggaagttccagagaagttctctcgacgcaggactcggcttgctgaggtgcacacagcaagaggcgagagcggcgactggtgagtacgccaaactttttgactagcggaggctagaaggagagagcgactcggaccgatg

SEQ ID NO: 10229 - DNA, 203 bp, Artificial sequence
  synthetic
ggcgcgccagtcctcacgtcaggaacagggacttgaaagtgaaagttaatagggactcgaaagcgaaagttccagagaagttctctcgacgcaggactcggcttgctgaggtgcacacagcaagaggcgagagcggcgactggtgagtacgccaaactttttgactagcggaggctagaaggagagagcgactcggaccgatg

SEQ ID NO: 10230 - DNA, 203 bp, Artificial sequence
  synthetic
ggcgcgccagtcctgctaagtagaagaactccgtcctgagagggaaaaaagctgatgaattagaaagaattaggttacggcccggcggaaagaaaaaatacagagtaaaacatgttgtgtgggcagcgaacgaattggacagattcggattaacagaaagcctgttggaatcaaaagagggttgccaacgactcggaccgatg

SEQ ID NO: 10231 - DNA, 203 bp, Artificial sequence
  synthetic
ggcgcgccagtcctagtcatctgactctggtaatactctggtaactagagatccctcagacccttgttggttgcgtggaaaatctctagcagtggcgcccgaacagggacttgaaagcgaaagtaaaaccagaggagatctctcgacgcaggactcggcttgctgaagtgcactcggcaagaggcgagcgactcggaccgatg

SEQ ID NO: 10232 - DNA, 203 bp, Artificial sequence
  synthetic
ggcgcgccagtcctaaatcgacgagaaactccgtcttgtcagggaagaaagcagatgaattagaaaaaattaggttacggcccaacggaaagaaaaagtacatgttgaagcatgtagtatgggcagcaaacgaattggacagatttggattagcagaaagcctgttggagaccaaagaaggttgtcaacgactcggaccgatg

SEQ ID NO: 10233 - DNA, 203 bp, Artificial sequence
  synthetic
ggcgcgccagtccttccgtaatgagaaactccgtcttgtcagggaagaaagcagatgaattagaaaaaattaggttacggcccaacggaaagaaaaagtatatgttgaagcatgtagtatgggcagcaaatgaattggatagatttggattagcagaaagcctgttggataacaaagaaggttgtcaacgactcggaccgatg

SEQ ID NO: 10234 - DNA, 203 bp, Artificial sequence
  synthetic
ggcgcgccagtcctgaggcaccgagaaactccgtcttgtcagggaagaaagcagatgaattagaaaaaattaggttacggcccggcggaaagaaaaggtacaagctgaagcatatagtatgggcagcaaatgaattggacagatttggattagcagaaagcctgttggagaacaaagaaggttgtcaacgactcggaccgatg

SEQ ID NO: 10235 - DNA, 203 bp, Artificial sequence
  synthetic
ggcgcgccagtccttcgagtctgagaaactccgtcttgtcagggaaggaagcagatgaattagaaaaagttaggttacggcccaacggaaagaaaaagtatatgttgaagcatgtagtatgggcagcaaatgaattggacagatttggattagcagaaagcctgttggataacaaagaaggttgtcaacgactcggaccgatg

SEQ ID NO: 10236 - DNA, 203 bp, Artificial sequence
  synthetic
ggcgcgccagtcctattagcgggagaggctccgtcttgtcagggaagaaaacagatgaattagaaaaagttaggttacggcccggcggaaagaaaaaatattgtctaaagcatatagtatgggcagtgaacgaattggacagatatggattagcagagagcctgttggagtcaaaagaaggatgtcaccgactcggaccgatg

SEQ ID NO: 10237 - DNA, 203 bp, Artificial sequence
  synthetic
ggcgcgccagtcctagatatcagagaggctccgtcttgtcagggaagaagacagatgaattagaaaaggttaggttacggcccggcggaaagaaaagatacatgctaaaacatatagtatgggcagtgaatgaattagagagatttggattggcagagagccggttgggatcaaaagaaggatgccggcgactcggaccgatg

SEQ ID NO: 10238 - DNA, 203 bp, Artificial sequence
  synthetic
ggcgcgccagtcctctccataggcagtggcgcccgaacagggaccggaaatatagggactcgaaagcgaaagttccagagaagatctctcgacgcaggactcggcttgctgaggtgcacgcagcaagaggcgagagcggcgactggtgagtacgccaattttgactagcggaggctagaaggagagagcgactcggaccgatg

SEQ ID NO: 10239 - DNA, 203 bp, Artificial sequence
  synthetic
ggcgcgccagtcctttggttgcgcccgaacagggacgttcggactgagagacagggagcgtggcccctggacgcaggactcggcttgtgacagcgcaatcacaagaggcgaggcggactccggtggtgagtactaatttgttgtcggtgggcaaccctagaggaaggacgaagtctctaggtcaggggcgactcggaccgatg

SEQ ID NO: 10240 - DNA, 203 bp, Artificial sequence
  synthetic
ggcgcgccagtcctcgaacttagcccgtctgttatttgactctggtaactagagatccctcagaccactatagactgtgtaaaaatctctagcagtggcgcccgaacagggactcgaaagcgaaagttccagagaagttctctcgacgcaggactcggcttgctgaggtgcacacagcaagaggcgagcgactcggaccgatg

SEQ ID NO: 10241 - DNA, 203 bp, Artificial sequence
  synthetic
ggcgcgccagtcctgatacttggcccgtctgttgtgtgactctggtaactagagatccctcagaccactctagaaggtgtaaaaatctctagcagtggcgcccgaacagggactcgaaagcgaaagttccagaggagttctctcgacgcaggactcggcttgctgaggtgcacacagcaagaggcgagcgactcggaccgatg

SEQ ID NO: 10242 - DNA, 203 bp, Artificial sequence
  synthetic
ggcgcgccagtccttttctgcagcccgtctgttgtgtgactctggtaactagagatccctcagaccactctaggcggtgtaaaaatctctagcagtggcgcccgaacagggacttgaaagcgaaagttccagagaagttctctcgacgcagggctcggcttgctgaggtgcacacagcaagaggcgagcgactcggaccgatg

SEQ ID NO: 10243 - DNA, 203 bp, Artificial sequence
  synthetic
ggcgcgccagtcctattagaaaggaaaatctctagcagtggcgcccgaacagggacttgaaagcgaaagtagaaccagagaagatctctcgacgcaggactcggcttgctgaagtgcacacggcaagaggcgagagcggcgactggtgagtacgccaatttttgactagcggaggctagaaggagaggcgactcggaccgatg

SEQ ID NO: 10244 - DNA, 203 bp, Artificial sequence
  synthetic
ggcgcgccagtcctaaactaggggacagattcggattaacagagagcctgttggagtcaaaagaaggttgccaaaaaattatttcagttttagaaccattagtaccaacagggtcagaaaatttaaaaagcctttataatactacctgcgtcatttggtgcttgcacgcagaagagaaagtgaaagatcgactcggaccgatg

SEQ ID NO: 10245 - DNA, 203 bp, Artificial sequence
  synthetic
ggcgcgccagtcctgacccaacggacagatttggattagcagaaagcctgttggagaccaaagacggttgtcaaagaattctttcagttttagctccattagttccgacaggttcagaaaatttaaagagcctttataatactgtctgcgtcatttggtgcttgcacgcagaagagaaagtgagacatcgactcggaccgatg

SEQ ID NO: 10246 - DNA, 203 bp, Artificial sequence
  synthetic
ggcgcgccagtcctatctcaatggacagatttggattggcagaaagcctgttggagtcaaaagaagggtgtcaaaaaattataacggtcttagaaccattagtgccaacaggttcagaaaatttaaagagtctttttaatactgtctgcgtcatttggtgtatccacgcagaagagaaagtgaaacatcgactcggaccgatg

SEQ ID NO: 10247 - DNA, 203 bp, Artificial sequence
  synthetic
ggcgcgccagtcctgacgataaggatagatttggattggcagaaagcctgttggaaagtaaagaaggctgtcaaaaaatactttcggttttagctccattagtgccaacaggttcagaaaatttaaagagcctttataatactgtctgcgtcatttggtgcttgcacgcagaagagaaagtgaaacatcgactcggaccgatg

SEQ ID NO: 10248 - DNA, 203 bp, Artificial sequence
  synthetic
ggcgcgccagtcctcgttacccggcgcccgaacagggacttggagttaatagggactcgaaagcgaaagtgccagagaagatctctcgacgcagggactcggcttgctgaagtgcacacagcaagaggcgagagcggcgactggtgagtacgccaaaattttgactagcggaggctagaaggagagagcgactcggaccgatg

SEQ ID NO: 10249 - DNA, 203 bp, Artificial sequence
  synthetic
ggcgcgccagtccttgtattccgggacttgaaagtgaaagtaaaaccggaggctgaatctctcgacgcacggactcggcttgctgagtgcacgcagcaagaggcgaggcggcgactcaagtggtgagtacgcaattttgctagcggtggctagacctagaggaagggcgaagtctctagggggagaagcgactcggaccgatg

SEQ ID NO: 10250 - DNA, 203 bp, Artificial sequence
  synthetic
ggcgcgccagtcctgtcgggagggtaactagagatccctcagaccactctaaatagtgtaaaatctctagcagtggcgcccgaacagggacttgaaagcgaaagtaacagggactcgaaagcgaaagttccagagaagttctctcgacgcaggactcggcttgctgggtgcacacagcaagaggcgagcgactcggaccgatg

SEQ ID NO: 10251 - DNA, 203 bp, Artificial sequence
  synthetic
ggcgcgccagtcctcgaaaggagtaaaaatctctagcagtggcgcccgaacagggactcgaaagcgaaagtgttccagagaagttctctcgacgcaggactcggcttgctgaggtgcacacagcaagaggcgagagcggcgactggtgagtacgccttttttgactagcggaggctagaaggagagagcgactcggaccgatg

SEQ ID NO: 10252 - DNA, 203 bp, Artificial sequence
  synthetic
ggcgcgccagtcctagaggtccgtaactagagatccctcagaccactctaggtagtgtaaaaatctctagcagtggcgcccgaacagggacttgaaagcgaaagtaaaagggactcgaaagcggaagttccagagaagttctcttgacgcaggactcggcttgctgagtgcacacagcaagaggcgagcgactcggaccgatg

SEQ ID NO: 10253 - DNA, 203 bp, Artificial sequence
  synthetic
ggcgcgccagtcctggcgcattgtaactagagatccctcagaccattttggtagtgtggaaaatctctagcagtggcgcccgaacagggacttgaaagcgaaagtaatagggactcgaaagcgaaagttccagagaagttctctcgacgcaggactcggcttgctgaagtgcactcggcagaggcgagcgactcggaccgatg

SEQ ID NO: 10254 - DNA, 203 bp, Artificial sequence
  synthetic
ggcgcgccagtcctcgttgtgtgtctggtatttgactctggtaactagagatccctcagacccctttagtcagtgtggaaaatctctagcagtggcgcccgaacagggacccgaaagcgaaagtagaaccagaggagatctctcgacgcaggactcggcttgctgaagcgcgcacagcaagaggcgagcgactcggaccgatg

SEQ ID NO: 10255 - DNA, 203 bp, Artificial sequence
  synthetic
ggcgcgccagtcctgaattaatgtctgttgtgtgactctggtaactagagacccctcagacccttttagccagtgtggaaaatctctagcagtggcgcccgaacagggactagaaagcgaaagtagaaccagaggagctctctcgacgcaggactcggcttgctgaagcgcgcacggcaagaggcgagcgactcggaccgatg

SEQ ID NO: 10256 - DNA, 203 bp, Artificial sequence
  synthetic
ggcgcgccagtcctccgtccgcgtctgttgtgtgactctggtaactagagatccctcagaacattttagtccgggtggaaaatctctagcagtggcgcccgaacagggacgcgaaagcgaaagtagaaccagagaagatctctcgacgcaggactcggcttgctgaagtgcacacggcaagaggcgagcgactcggaccgatg

SEQ ID NO: 10257 - DNA, 203 bp, Artificial sequence
  synthetic
ggcgcgccagtcctcgacggcagtctgttgtgtgactctggtaactagagatccctcagaacctattagtcagtgtggaaaatctctagcagtggcgcccgaacagggacctgaaagcgaaagtgagaccagaggagctctctcgacgcaggactcggcttgctgaagcgcgcacagcaagaggcgagcgactcggaccgatg

SEQ ID NO: 10258 - DNA, 203 bp, Artificial sequence
  synthetic
ggcgcgccagtcctgggttgcggtctgttgtgtgactctggtaactagagatccctcagacacattttgtccgtgtggaaaatctctagcagtggcgcccgaacagggacttgaaagcgaaagtaagaccagaggagatctctcgacgcaggactcggcttgctgaagtgcactcggcaagaggcgagcgactcggaccgatg

SEQ ID NO: 10259 - DNA, 203 bp, Artificial sequence
  synthetic
ggcgcgccagtcctgctagtatgtctgttgtgtgactctggtaactagagatccctcagacacttgtagtcagtgtggaaaatctctagcagtggcgcccgaacagggacttgaaagcgacagtagaaccagaggagctctctcgacacaggactcggcttgctgaagcgcgcacggcaagaggcgagcgactcggaccgatg

SEQ ID NO: 10260 - DNA, 203 bp, Artificial sequence
  synthetic
ggcgcgccagtcctaagcctcggtctgttgtgtgactctggtaactagagatccctcagacatttgtagtcagtgtggaaaatctctagcagtggcgcccgaacagggacttgaaaacgaaagtagaaccagaggagatctctcgacgcaggactcggcttgctgaagcgcgcacagcaagaggcgagcgactcggaccgatg

SEQ ID NO: 10261 - DNA, 203 bp, Artificial sequence
  synthetic
ggcgcgccagtcctagggagtcgtctgttgtgtgactctggtaactagagatccctcagaccaactttggtagtgtggaaaatctctagcagtggcgcccgaacagggacttgaaagcgaaagtaagaccagagaagatctctcgacgcaggactcggcttgctgaagtgcactcggcaagaggcgagcgactcggaccgatg

SEQ ID NO: 10262 - DNA, 203 bp, Artificial sequence
  synthetic
ggcgcgccagtcctgttggcatgtctgttgtgtgactctggtaactagagatccctcagaccaatttagtcagggtggaaaatctctagcagtggcgcccgaacagggaccggaaagcgaaagtaaaaccagaggagatctctcgacgcaggactcggcttgctgaagtgcgcacagcaagaggcgagcgactcggaccgatg

SEQ ID NO: 10263 - DNA, 203 bp, Artificial sequence
  synthetic
ggcgcgccagtcctacacgaccgtctgttgtgtgactctggtaactagagatccctcagaccaatttagtccgtgtggaaaatctctagcagtggcgcccgaacagggacttgaaagcgaaagtagaaccagaggagctctctcgacgcaggactcggcttgctgaagtgcgcacggcaagaggcgagcgactcggaccgatg

SEQ ID NO: 10264 - DNA, 203 bp, Artificial sequence
  synthetic
ggcgcgccagtcctcttaccgtgtctgttgtgtgactctggtaactagagatccctcagaccatcttagtcagtgtggaaaatctctagcagtggcgcccgaacagggacctgaaagcgaaagtagaaccagagcagatctctcgacgcaggactcggcttgctgaagtgcacacggcaagaggcgagcgactcggaccgatg

SEQ ID NO: 10265 - DNA, 203 bp, Artificial sequence
  synthetic
ggcgcgccagtccttgagataagtctgttgtgtgactctggtaactagagatccctcagaccattcgtggtagtgtggaaaatctctagcagtggcgcccgaacagggacttgaaagtgaaagtaagaccagaggaaatctctcgacgcaggactcggcttgctgaagtgcactcggcaagaggcgagcgactcggaccgatg

SEQ ID NO: 10266 - DNA, 203 bp, Artificial sequence
  synthetic
ggcgcgccagtcctaccatcaagtctgttgtgtgactctggtaactagagatccctcagaccatttagtcagtgtggaaaatctctagcagtggcgcccgaacagggacttgaaagcgaaagcagaaccagaggagatctctcgacgcaggactcggcttgctgaaagtgcacgcggcaagaggcgagcgactcggaccgatg

SEQ ID NO: 10267 - DNA, 203 bp, Artificial sequence
  synthetic
ggcgcgccagtcctggagactagtctgttgtgtgactctggtaactagagatccctcagaccattttagtcagtgtggaaaatctctagcagtggcgcccgaacagggaccagaaagcgaaagtagaaccagaggagatctctcgacgcaggactcggcttgctgaagcgcgcacagcaagaggcgagcgactcggaccgatg

SEQ ID NO: 10268 - DNA, 203 bp, Artificial sequence
  synthetic
ggcgcgccagtcctagcccagagtctgttgtgtgactctggtaactagagatccctcagaccattttagtcagtgtggaaaatctctagcagtggcgcccgaacagggacgcgaaagcgaaagtagaaccagaggagatctctcgacgcaggactcggcttgctgaggtgcacacagcaagaggcgagcgactcggaccgatg

SEQ ID NO: 10269 - DNA, 203 bp, Artificial sequence
  synthetic
ggcgcgccagtcctgaaaccctgtctgttgtgtgactctggtaactagagatccctcagacccctttagtcagtgtggaaaatctctagcagtggcgcccgaacagggacttgaaagtgaaagtgagaccagaggagctctctcgacgcaggactcggcttgctgaagcgcgcacagcaagaggcgagcgactcggaccgatg

SEQ ID NO: 10270 - DNA, 203 bp, Artificial sequence
  synthetic
ggcgcgccagtcctaagtgctcgtctgttgtgtgactctggtaactagagatccctcagacccttaaagtcaatgtggaaaatctctagcagtggcgcccgaacagggacttgaaagtgaaagtaaaaccagagaagctctcttgacgcaggactcggcttgctgaagcgcgcacggcaagaggcgagcgactcggaccgatg

SEQ ID NO: 10271 - DNA, 203 bp, Artificial sequence
  synthetic
ggcgcgccagtcctacggattagtctgttgtgtgactctggtaactagagatccctcagacccttgtagtcagtgtggaaaatctctagcagtggcgcccgaacagggacctgaaagcgaaagagaaaccagaggagctctctcgacgcaggactcggcttgctgaagcgcgcacagcaagaggcgagcgactcggaccgatg

SEQ ID NO: 10272 - DNA, 203 bp, Artificial sequence
  synthetic
ggcgcgccagtcctcgatgcgcgtctgttgtgtgactctggtaactagagatccctcagacccttttagtcagtgtggaaaatctctagcagtggcgcccgaacagggacccgaaagcgaaagtagaaccaggggagctctctcgacgcaggactcggcttgctgaaacgcgcgcggcaagaggcgagcgactcggaccgatg

SEQ ID NO: 10273 - DNA, 203 bp, Artificial sequence
  synthetic
ggcgcgccagtcctccttatctgtctgttgtgtgactctggtaactagagatccctcagacccttttagtcagtgtggaaaatctctagcagtggcgcccgaacagggacttgaaagcgaaagagaaaccggagaagatctctcgacgcaggactcggcttgctgaagcgcgcacggcaagaggcgagcgactcggaccgatg

SEQ ID NO: 10274 - DNA, 203 bp, Artificial sequence
  synthetic
ggcgcgccagtcctatccgcgtgtctgttgtgtgactctggtaactagagatccctcagacccttttagtcagtgtggaaaatctctagcagtggcgcccgaacagggacttgaaagcgaaaggaaaaccagaggagctctctcgacgcaggactcggcttgctgaagcgcgcacggcaagaggcgagcgactcggaccgatg

SEQ ID NO: 10275 - DNA, 203 bp, Artificial sequence
  synthetic
ggcgcgccagtcctcacgctgggtctgttgtgtgactctggtaactagagatccctcagacccttttagtcagtgtggaaaatctctagcagtggcgcccgaacagggacttgaaagcgaaagtgagaccagaggagctctctcgacgcagggctcggcttgctgaagcgtgcgcagcaagaggcgagcgactcggaccgatg

SEQ ID NO: 10276 - DNA, 203 bp, Artificial sequence
  synthetic
ggcgcgccagtcctcgtcagtagtctgttgtgtgactctggtaactagagatccctcagacccttttagtcagtgtggaaaatctctagcagtggcgcccgaacagggacttgaaagtgaaagtaagaccagaggagctctctcgacgcaggactcggcttgctgaagcgcgcacagcaagaggcgagcgactcggaccgatg

SEQ ID NO: 10277 - DNA, 203 bp, Artificial sequence
  synthetic
ggcgcgccagtcctcatcccacgtctgttgtgtgactctggtaactagagatccctcagacccttttagtcagtgtggagaatctctagcagtggcgcccgaacagggacttgaaagcgaaagagaaaccagaggagctctctcgacgcaggactcggcttgctgaaacgcgcgcggcaagaggcgagcgactcggaccgatg

SEQ ID NO: 10278 - DNA, 203 bp, Artificial sequence
  synthetic
ggcgcgccagtcctgtattcacgtctgttgtgtgactctggtaactagagatccctcagacccttttagtccgtgtggaaaatctctagcagtggcgcccgaacagggacccgaaagcgaaagtagaaccagaggagctctctcgacgcaggactcggcttgctgaagcgcgcgcggcaagaggcgagcgactcggaccgatg

SEQ ID NO: 10279 - DNA, 203 bp, Artificial sequence
  synthetic
ggcgcgccagtcctagaccctggtctgttgtgtgactctggtaactagagatccctcagaccctttttggtagtgtggaaaatctctagcagtggcgcccgaacagggacttgaaagcgaaagtaagaccagagcagatctctcgacgcaggactcggcttgctgaagtgcactcggcaagaggcgagcgactcggaccgatg

SEQ ID NO: 10280 - DNA, 203 bp, Artificial sequence
  synthetic
ggcgcgccagtcctagtcgagggtctgttgtgtgactctggtaactagagatccctcagacctcggtagtcagtgtagaaaatctctagcagtggcgcccgaacagggacctgaaagcgaaagtagaaccagaggagctctctcgacgcaggactcggcttgctgaagcgtgcacggcaagaggcgagcgactcggaccgatg

SEQ ID NO: 10281 - DNA, 203 bp, Artificial sequence
  synthetic
ggcgcgccagtcctgcaattccgtctgttgtgtgactctggtaactagagatccctcagacctctttagtcagtgtggaaaatctctagcagtggcgcccgaacagggacctgaaaagcgaaagtaaaaccagagaagctctctcgacgcaggactcggcttgctgagcgcgcacggcaagaggcgagcgactcggaccgatg

SEQ ID NO: 10282 - DNA, 203 bp, Artificial sequence
  synthetic
ggcgcgccagtccttgaccattgtctgttgtgtgactctggtaactagagatccctcagacctctttagtcagtgtggaaaatctctagcagtggcgcccgaacagggacttgaaagcgaaagtaaaaccagagaagatctctcgacgcaggactcggcttgctgaagcgcgcacagcaagaggcgagcgactcggaccgatg

SEQ ID NO: 10283 - DNA, 203 bp, Artificial sequence
  synthetic
ggcgcgccagtcctgcttgagggtctgttgtgtgactctggtaactagagatccctcagactcttttagtcagtgtggaaaatctctagcagtggcgcccgaacagggacttgaaagcgaaagggaaaccagaggagctctctcgacgcaggactcggcttgctgaagcgcgcacggcaagaggcgagcgactcggaccgatg

SEQ ID NO: 10284 - DNA, 203 bp, Artificial sequence
  synthetic
ggcgcgccagtcctgttcgcgagtctgttgtgtgactctggtagctagagatccctcagaccatcctagttagtgtagaaaatctctagcagtggcgcccgaacagggaccggaaagcgaaagagaaaccagaggagatctctcgacgcaggactcggcttgctgaagcgcgcacagcaagaggcgagcgactcggaccgatg

SEQ ID NO: 10285 - DNA, 203 bp, Artificial sequence
  synthetic
ggcgcgccagtcctccaaccaggtctgttgtgtgactctggtagctagagatccctcagatccttttagttagcgtagaaaatctctagcagtggcgcccgaacagggacgcgaaagcgaaagtagaaccagagaagatctctcgacgcaggactcggcttgctgaagcgcgcacggcaagaggcgagcgactcggaccgatg

SEQ ID NO: 10286 - DNA, 203 bp, Artificial sequence
  synthetic
ggcgcgccagtcctaggccaaggtctgttgtgtgactctggtagctagagatccctcatacccttttagtcagtgtggaaaatctctagcagtggcgcccgaacagggaccggaaagcgaaagagaaaccagaggagctctctcgacgcaggactcggcttgctgaagcgcgcacggcaagaggcgagcgactcggaccgatg

SEQ ID NO: 10287 - DNA, 203 bp, Artificial sequence
  synthetic
ggcgcgccagtcctctgtcagtgtctgttgtgtgactctggtatctagagatccctcagaccctattagtcagtgtggaaaatctctagcagtggcgcccgaacagggacctaaaagcgaaagtaaaaccagaggagatctctcgacgcaggactcggcttgctgaagcgcgcacggcaagaggcgagcgactcggaccgatg

SEQ ID NO: 10288 - DNA, 203 bp, Artificial sequence
  synthetic
ggcgcgccagtcctgtctacttgtctgttgtgtggctctggtaactagagatccctcagacccttgttggtagtgcggaaaatctctagcagtggcgcccgaacagggacctgaaagcgaaagtaagaccagaggagatctctcgacgcagggctcggcttgctgaagtgcactcggcaagaggcgagcgactcggaccgatg

SEQ ID NO: 10289 - DNA, 203 bp, Artificial sequence
  synthetic
ggcgcgccagtcctaagaggatgtctgttgtgtggctctggtaactagagatccctcagacccttgttggtattgtggcaaatctctagcagtggcgcccgaacagggacttgaaaacgaaagtagaaccagaggagatctcccgacgcaggactcggcttgctgaagtgcactcggcaagaggcgagcgactcggaccgatg

SEQ ID NO: 10290 - DNA, 203 bp, Artificial sequence
  synthetic
ggcgcgccagtcctgagtacctgtctgttgtttgactctggtaactagagatccctcagaccattttagtcagtgtggaaaatctctagcagtggcgcccgaacagggacctgaaagcgaaagtgagaccagagaagctctcttgacgcagtactcggcttgctgaagcgcgcacagcaagaggcgagcgactcggaccgatg

SEQ ID NO: 10291 - DNA, 203 bp, Artificial sequence
  synthetic
ggcgcgccagtcctggtagattgtctgttgtttgactctggtaactagagatccctcagaccattttagtcagtgtggaaaatctctagcagtggcgcccgaacagggacttgaaagcgaaagtagaaccagagaagatctctcgacgcaggactcggcttgctgaagtgcacacggcaagaggcgagcgactcggaccgatg

SEQ ID NO: 10292 - DNA, 203 bp, Artificial sequence
  synthetic
ggcgcgccagtcctcggccgttgtctgttttgtgactctggtaactagagatccctcagacaccttttgtcagtgtggaaaatctctagcagtggcgcccgaacagggacttgaaagcgaaagtagaaccagagaagatctctcgacgcagggctcggcttgctgaagtgcactcggcaagaggcgagcgactcggaccgatg

SEQ ID NO: 10293 - DNA, 203 bp, Artificial sequence
  synthetic
ggcgcgccagtcctgttatccagtgactctggtaactctggtaactagagatccctcagaccctttgtggtagtgtggaaaatctctagcagtggcgcccgaacagggacttgaaagcgaaagtgagaccagagaagatctctcgacgcaggactcggcttgctgaagtgcactcggcaagaggcgagcgactcggaccgatg

SEQ ID NO: 10294 - DNA, 203 bp, Artificial sequence
  synthetic
ggcgcgccagtcctccaggctagtggcgcccgaacagggaccggaagttaatagggacgcgaaagcgaaagttccagagaagtatctcgacgcacggactcggcttgctgaggtgcacacagcaagaggcgagagcggcgactggtgagtacgccaatttttgactagcggaggctagaaggagagagcgactcggaccgatg

SEQ ID NO: 10295 - DNA, 203 bp, Artificial sequence
  synthetic
ggcgcgccagtcctcgtggaaggtggcgcccgaacagggacttgaaagtaatagggactcgaaagcgaaagttccagagaagttctctcgacgcagggactcggcttgctgagtgcacacggcaagaggcgagcgcggcgactggtgagtacgccaaattttgactagcggaggctagaaggagagagcgactcggaccgatg

SEQ ID NO: 10296 - DNA, 203 bp, Artificial sequence
  synthetic
ggcgcgccagtcctctcagctggtgtgcccatctcattccgcgccggccctggggtagagatccctcagatctctgaaggctaagcaaaaatctctaccagtggcgcccgaacagggacttgagaagcaggggacgcggaacccttgacgccaggactcggcttgtgctgcgcaacacaagaggcgagcgactcggaccgatg

SEQ ID NO: 10297 - DNA, 203 bp, Artificial sequence
  synthetic
ggcgcgccagtcctgagtaaacgtgtgcccatttcataccgcgtctgccctggggtagagatccctcagatttgtagtggctaagtaaaaatctctaccagtggcgcccgaacagggacttgagaagcagggaacgcggcccctggacgcaggactcggcttgtgacagcgcaatcacaagaggcgagcgactcggaccgatg

SEQ ID NO: 10298 - DNA, 203 bp, Artificial sequence
  synthetic
ggcgcgccagtcctctgatattgtgtgcccatttcatatcgcgtttgccctggggtagagatccctcagatttgtagtggctaagtaaaaatctctaccagtggcgcccgaacagggacttgaggagcagggaacgcgacccctggacgcaggactcggcttgtgacagcgcaatcacaagaggcgagcgactcggaccgatg

SEQ ID NO: 10299 - DNA, 203 bp, Artificial sequence
  synthetic
ggcgcgccagtcctggcggctctaacagggacttgtaagcggaagttaacggggactcgaaagcgaaagttccagagaagttctctcgacgcaggactcggcttgctgaagtgcacacagcaagaggcgagagcggcgactggtgagtacgccaaactttttgactagcggaggctagaaggagagagcgactcggaccgatg

SEQ ID NO: 10300 - DNA, 203 bp, Artificial sequence
  synthetic
ggcgcgccagtcctgtagaggctaactagagatccctcagaccattctaggcagagtaaaaatctctagcagtggcgcccgaacagggacctgaaaagcgaaagtaaaagggactcgaaagcggcggttccagagaagttctctcgacgcaagactcggcttgctgagtgcacacggcaagaggcgagcgactcggaccgatg

SEQ ID NO: 10301 - DNA, 203 bp, Artificial sequence
  synthetic
ggcgcgccagtcctctaaatgttactagagatccctcagaccactctagactgtgtaaaaatctctagcagtggcgcccgaacagggactcgaaagcgaaagttaatagggactcgaaagcggaagttccagagaagttctctcgacgcaggactcggcttgctgaggtgcacacagcaagaggcgagcgactcggaccgatg

SEQ ID NO: 10302 - DNA, 203 bp, Artificial sequence
  synthetic
ggcgcgccagtcctctgctccttagacagaataaaaatctctagcagtggcgcccgaacagggacttgaaaacgaaagttaacagggacttgtaagcggaagttaacggggactcgaaagcgaaagttccagagaagttctctcgacgcaggactcggcttgctgaagtgcacacagcaagaggcgagcgactcggaccgatg

SEQ ID NO: 10303 - DNA, 203 bp, Artificial sequence
  synthetic
ggcgcgccagtccttagctctgtagcagtggcgcccgaacagggacccgaaagcgaaagtagaaccagaggagatctctcgacgcaggactcggcttgctgaagcgcgcacggcaagaggcgaggggcggcgactggtgagtacgccaaaagaaaaatttttgactagcggaggctagaaggagagagcgactcggaccgatg

SEQ ID NO: 10304 - DNA, 203 bp, Artificial sequence
  synthetic
ggcgcgccagtcctccagtggttagcagtggcgcccgaacagggacctgaaagcgaaagtagaaccagagaagatctctcgacgcaggactcggcttgctgaaagcgcgctcggcaagaggcgaggggcggcggactggtgagtacgccaaaaataaattttgactagcggaggctagaaggagagagcgactcggaccgatg

SEQ ID NO: 10305 - DNA, 203 bp, Artificial sequence
  synthetic
ggcgcgccagtccttatccatgtagcagtggcgcccgaacagggacttgaaaacgaaagtagaaccagaggagatctctcgacgcaggactcggcttgctgaagcgcgcacagcaagaggcgaggggaggcgactggtgagtacgccaaaaataaaatttttgactagcggaggctagaaggagagagcgactcggaccgatg

SEQ ID NO: 10306 - DNA, 203 bp, Artificial sequence
  synthetic
ggcgcgccagtcctggaacgcctatccttcagtgactctggtaactagagatccctcagaactcttaaaagtaggtgaaaatctctagcagtggcgcccgaacagggacttgaaaacgaaagtacaaccagaggctgaaacttccgacgcgggactcggctcgctgagtgcacacagcgagaggcgagcgactcggaccgatg

SEQ ID NO: 10307 - DNA, 203 bp, Artificial sequence
  synthetic
ggcgcgccagtccttacaggcatccattcggtaactctggtacctagagatccctcagaccacttgggctgagtagaaaatctctagcagtggcgcccgaacagggacttgaaaacgaaagtagaaccggaggctgaaatctctcgacgcaggactcggctcgttgggtgcacacagcgagaggcgagcgactcggaccgatg

SEQ ID NO: 10308 - DNA, 203 bp, Artificial sequence
  synthetic
ggcgcgccagtccttggttcaatctagcagtggcgcccgaacagggacttgaagaaagtaaaaccagaggagatctctcgacgcaggactcggcttgctgaagaagaagcgcgcgcggcaagaggcgaggggcggcgactggtgagtacgcctaaaaattttgactagcggaggctagaaggagagagcgactcggaccgatg

SEQ ID NO: 10309 - DNA, 203 bp, Artificial sequence
  synthetic
ggcgcgccagtcctaccttacgtctctagcagtggcgcccgaacagggacccgaaagcgaaagtaagaccagagaagatctctcgacgcaggactcggcttgctgaagtgcactcggcaagaggcgaggggcggcggctggtgagtacgccaaattttatttgactagcggaggctagaaggagagagcgactcggaccgatg

SEQ ID NO: 10310 - DNA, 203 bp, Artificial sequence
  synthetic
ggcgcgccagtcctgcgaggagtctctagcagtggcgcccgaacagggacccgaaagcgaaagtagaaccagagaagatctctcgacgcaggactcggcttgctgaagtgcactcggcaagaggcgagagcggcggctggtgagtacgccaaatttttatttgactagcggaggctagaaggagagagcgactcggaccgatg

SEQ ID NO: 10311 - DNA, 203 bp, Artificial sequence
  synthetic
ggcgcgccagtcctgcacaggatctctagcagtggcgcccgaacagggacctgaaagcgaaagtaagaccggaggagatctctcgacgcaggactcggcttgctgaagtgcactcggcaagaggcgaaaggggcggctggtgagtacgccaaatttttatttgactagcggaggctaaaaggagagagcgactcggaccgatg

SEQ ID NO: 10312 - DNA, 203 bp, Artificial sequence
  synthetic
ggcgcgccagtcctgggtccgatctctagcagtggcgcccgaacagggacctgaaagcgaaagtgagaccagaggagctctctcgacgcaggactcggcttgctgaagcgcgcacagcaagaggcgagagcggcgactggtgagtacgccaaaaaattttgtgactagcggaggctagaaggagagagcgactcggaccgatg

SEQ ID NO: 10313 - DNA, 203 bp, Artificial sequence
  synthetic
ggcgcgccagtcctatcggtattctctagcagtggcgcccgaacagggacttgaaaacgaaagtaagaccagagaagaactctcgacgcaggactcggcttgctgaagtgcactcggcaagaggcgaggggaggcgactggtgagtacgccaaattttatttgactagcggaggctagaaggagagagcgactcggaccgatg

SEQ ID NO: 10314 - DNA, 203 bp, Artificial sequence
  synthetic
ggcgcgccagtcctgtaactgctctctagcagtggcgcccgaacagggacttgaaagcgaaagtaaaaccagaggagatctctcgacgcaggactcggcttgctgaagtgcactcggcgagaggcgagagcggcggctggtgagtacgccaaattttattttgactagcggaggctagaaggagagagcgactcggaccgatg

SEQ ID NO: 10315 - DNA, 203 bp, Artificial sequence
  synthetic
ggcgcgccagtcctgatcgccgtctctagcagtggcgcccgaacagggacttgaaagtgaaagtagaaccagaggagctctctcgacgcaggactcggcttgctgaagcgcgcacggcaagaggcgaggggcggcgaccggtgagtacgccaaaaaatttttgactagcggaggctagaaggagagagcgactcggaccgatg

SEQ ID NO: 10316 - DNA, 203 bp, Artificial sequence
  synthetic
ggcgcgccagtcctccacaccatctctcgcagtggcgcccgaacagggacttgaaagcgaaagtagaaccagaggagctctcccgacgcaggacttggcttgctgaagcgcgcacagcaagaggcgaggggtagcgactggtgagtacgctaaaaattttttgactagcagaggctagaaggggaaagcgactcggaccgatg

SEQ ID NO: 10317 - DNA, 203 bp, Artificial sequence
  synthetic
ggcgcgccagtcctggtatagctctggtaactagagatccctcagaccactttagactgtgtaaaaatctctagcagtggcgcccgaacagggacttgaagttaatagggactcgaaagcgaaagttccagagaagatctctcgacgcacggactcggcttgctgaggtgcacacagcaagaggcgagcgactcggaccgatg

SEQ ID NO: 10318 - DNA, 203 bp, Artificial sequence
  synthetic
ggcgcgccagtcctgatcttattctggtaactagagatccctcagaccactttagattgagtaaaaatctctagcagtggcgcccgaacagggacctgaagttaatagggactcgaaagcgaaagttccagagaagatctctcgacgcgaggactcggcttgctgaggtgcacacagcaagaggcgagcgactcggaccgatg

SEQ ID NO: 10319 - DNA, 203 bp, Artificial sequence
  synthetic
ggcgcgccagtccttaatccagtctggtaactagagatccctcagaccattctagacggtgtaaaaatctctagcagtggcgcccgaacagggaccggaagttaatagggactcgaaaacgaaagttccagagaagatctctcgacgcacggactcggcttgctgaggtgcacacagcaagaggcgagcgactcggaccgatg

SEQ ID NO: 10320 - DNA, 203 bp, Artificial sequence
  synthetic
ggcgcgccagtcctgactaatatctggtaactagagatccctcagaccattttagcttgagtagaaatctctagcagtggcgcccgaacagggacttgaagttaatagggactcgaaagcgaaagttccagagaagctctcttgacgcagagactcggcttgctgaggtgcacacagcaagaggcgagcgactcggaccgatg

SEQ ID NO: 10321 - DNA, 203 bp, Artificial sequence
  synthetic
ggcgcgccagtccttttcgtcctctggtaactagagatccctcagacctttgtagtcactgtagaaaatctctagcagtggcgcccgaacagggacttgaaagtaatagggactcgaaagcgaaagttccagagaagttctctcgacgcagggactcggcttgctgagtgcacacggcaagaggcgagcgactcggaccgatg

SEQ ID NO: 10322 - DNA, 203 bp, Artificial sequence
  synthetic
ggcgcgccagtcctacgccgactctggtaactagagatccctcagactactttagtcagtgtaaaaatctctagcagtggcgcccgaacagggaccggaagttaatagggactcgaaagcgaaagttccagagaagatctctcgacgcacggactcggcttgctgaggtgcacacagcaagaggcgagcgactcggaccgatg

SEQ ID NO: 10323 - DNA, 203 bp, Artificial sequence
  synthetic
ggcgcgccagtcctctcaattatctgttcaaccctggtatctagagatccctcagatcacgtagactgaggcagaaaatctctagcagtggcgcccgaacagggacttgaaaaggaaagtgaaaccagggaagaaaacctccgacgcaacgggctcggcttagcggagtgcacccgctaagaggcgagcgactcggaccgatg

SEQ ID NO: 10324 - DNA, 203 bp, Artificial sequence
  synthetic
ggcgcgccagtccttagtttcttctgttcaaccctggtatctagagatccctcagatcacttagactgaagcagaaaatctctagcagtggcgcccgaacagggacttgaaagcgaaagtggaaccagggaagaaaacctccgacgcaacgggctcggcttagcagagtgcacctgctaagaggcgagcgactcggaccgatg

SEQ ID NO: 10325 - DNA, 203 bp, Artificial sequence
  synthetic
ggcgcgccagtcctggccaaattctgttcaaccctggtgtctagagatccctcagatcacatagactgaagcagaaaatctctagcagtggcgcccgaacagggacttgaaagagaaagtgaaaccagggaagaaaacctccgacgcaacgggctcggcttagcggagtgcacccgctgagaggcgagcgactcggaccgatg

SEQ ID NO: 10326 - DNA, 203 bp, Artificial sequence
  synthetic
ggcgcgccagtcctgtgtcgtctctgttgtgtgactctggtaaactagagatccctcagacctctttagtcagtgtggaaaatctctagcagtggcgcccgaacagggacttgaaagcgaaagtagaaccagaggagctctctcgacgcaggactcggcttgctgaagcgcgcacagcaagaggcgagcgactcggaccgatg

SEQ ID NO: 10327 - DNA, 203 bp, Artificial sequence
  synthetic
ggcgcgccagtcctcttgacagtctgttgtgtgactctggtaactagagatccctcagaccattttagtcagagtgtaaaatctctagcagtggcgcccgaacagggacgcgaaaagcgaaaataaaaccagagaagatctctcgacgcaggactcggcttgctgaagtgcacacggcaagaggcgagcgactcggaccgatg

SEQ ID NO: 10328 - DNA, 203 bp, Artificial sequence
  synthetic
ggcgcgccagtcctcgagtaactctgttgtgtgactctggtaactagagatccctcagaccattttagtcagtgtggaaaatctctagcagtggcgcccgaacagggacctgaaagcgaaagtagaaccagaggagctctctcgacgcaggactcggcttgctgaaagcgcgcgcagcaagaggcgagcgactcggaccgatg

SEQ ID NO: 10329 - DNA, 203 bp, Artificial sequence
  synthetic
ggcgcgccagtcctgtcaaatgtctgttgtgtgactctggtaactagagatccctcagaccattttagtcagtgtggaaaatctctagcagtggcgcccgaacagggacgcgaaagcgaaagtagaaccagaggagatctctcgacgcaggactcggcttgctgaaagcgcgctcggcaagaggcgagcgactcggaccgatg

SEQ ID NO: 10330 - DNA, 203 bp, Artificial sequence
  synthetic
ggcgcgccagtccttacgcccttctgttgtgtgactctggtaactagagatccctcagaccattttagtcagtgtggaaaatctctagcagtggcgcccgaacagggacgctgaaagcgaaagtagaaccagaggagatctctcgacgcaggactcggcttgctgaagtgcacacggcaagaggcgagcgactcggaccgatg

SEQ ID NO: 10331 - DNA, 203 bp, Artificial sequence
  synthetic
ggcgcgccagtcctgcgcaacgtctgttgtgtgactctggtaactagagatccctcagacccttttagtcagtgtggaaaaatctctagcagtggcgcccgaacagggacgcgaaagcgaaagtagaaccagaggagctctctcgacgcaggactcggcttgctgaagcgcgcacagcaagaggcgagcgactcggaccgatg

SEQ ID NO: 10332 - DNA, 203 bp, Artificial sequence
  synthetic
ggcgcgccagtccttacggagttctgttttgtgactctggtaactagagatccctcagacagctttagtccgggtggaaaatctctagcagtggcgcccgaacagggacctgaaagcgaaagtagaaccagaggagatctctcgacgcaggactcggcttgctgaaagcgcgctcggcaagaggcgagcgactcggaccgatg

SEQ ID NO: 10333 - DNA, 203 bp, Artificial sequence
  synthetic
ggcgcgccagtcctgtgcagagtgctcatctgttcaaccctggtatctagagatccctcagatcacgtagactgaagcagaaaatctctagcagtggcgcccgaacagggacttgaaagtgaaaccagggaagaaaacctccgacgcaacgggctcggcttagcggagtgcacccgctaagaggcgagcgactcggaccgatg

SEQ ID NO: 10334 - DNA, 203 bp, Artificial sequence
  synthetic
ggcgcgccagtcctatacatgatggcgcccgaacagggaccggaagttaatagggactcgaaagcgaaagttccagagaagatctctcgacgcacggactcggcttgctgaggtgcacacagcaagaggcgagagcggcgactggtgagtacgccaatttttgactagcggaggctagaaggagagagcgactcggaccgatg

SEQ ID NO: 10335 - DNA, 203 bp, Artificial sequence
  synthetic
ggcgcgccagtccttattgtgctggcgcccgaacagggacctgaaattaatagggactcgaaagcgaaagttccagagaagttctctcgacgcaaggactcggcttgctgaggtgcacgcagcaagaggcgagagcggcgactggtgagtacgccaatttttgactagcggaggctagaaggagagagcgactcggaccgatg

SEQ ID NO: 10336 - DNA, 203 bp, Artificial sequence
  synthetic
ggcgcgccagtccttagggcaatggcgcccgaacagggacttgaagttaatagggactcgaaagcgaaagttccagagaagctctcttgacgcagagactcggcttgctgaggtgcacacagcaagaggcgagagcggcgactggtgagtacgccaaattttgactagcggaggctagaaggagagagcgactcggaccgatg

SEQ ID NO: 10337 - DNA, 203 bp, Artificial sequence
  synthetic
ggcgcgccagtccttccaattttggcgcccgaacagggacttgagaagcagggaacgcggcccctggacgcaggactcggcttgtgacagcgcaatcacaagaggcgaggcggactccggtggtgagtacaaattttgttgtcggtgggcaaccctagaggaagggcgaagtctctaggtaacaggggcgactcggaccgatg

SEQ ID NO: 10338 - DNA, 203 bp, Artificial sequence
  synthetic
ggcgcgccagtcctcattgacttggtaactagagatccctcagacctttttggttgtgtggaaaatctctagcagtggaaaatctctagcagtggcgcccgaacagggacttgaaagcgaaagtaagaccagaggagatctctcgacgcaggactcggcttgctgaagtgcactcggcaaggggcgagcgactcggaccgatg

SEQ ID NO: 10339 - DNA, 203 bp, Artificial sequence
  synthetic
ggcgcgccagtccttgaggccttgttatgtgactctggtaactagagatccctcagacccttttagtcagtgtggaaaatctctagcagtggcgcccgaacagggacttgaagaaagtaaaaccagaggagatctctcgacgcaggactcggcttgctgaagaagaagcgcgcgcggcaagaggcgagcgactcggaccgatg

SEQ ID NO: 10340 - DNA, 203 bp, Artificial sequence
  synthetic
ggcgcgccagtcctgaccatgtttgagtgctttaagtagtgtgtgcccgtctgttgtgtgactctggtaactagagatccctcagaccttcttagtcagtgtggaaaatctctagcagtggcgcccgaacaggggagctctctcgacgcaggactcggcttgctgaagcgcgcacagcaagaggcgagcgactcggaccgatg

SEQ ID NO: 10341 - DNA, 203 bp, Artificial sequence
  synthetic
ggcgcgccagtcctgagcgtaacaagaagtttgtgcctactcaacagctttgaaagagcacttcccaacgctgctagtagtctttgttttcttcagtgctgtactgtgagattgcccggtacagcagcagttgtattctttattagcttggtagatcattttctctcgctcttttttttaatactagccgactcggaccgatg

SEQ ID NO: 10342 - DNA, 203 bp, Artificial sequence
  synthetic
ggcgcgccagtcctgtgaataacttctcctcctgcagccgggagcggcctgcctgcctccctgcgcacccgcagcctcccccgctgcctccctagggctcccctccggccgccagcgcccatttttcattccctagatagagatactttgcgcgcacacacatacatacgcgcgcaaaaaggaaaaaacgactcggaccgatg

SEQ ID NO: 10343 - DNA, 203 bp, Artificial sequence
  synthetic
ggcgcgccagtcctcagaagaagggagcaggagagagaggacaagcggatccaacagccttcgctccaggggaatcagggcatcgcctccttttctgggaggacactcccttctgatggtgaatgggaactcccttcctcctgcagcagcctgcctgcagctgtcctggtagaacagtgtggacattgcgactcggaccgatg

SEQ ID NO: 10344 - DNA, 203 bp, Artificial sequence
  synthetic
ggcgcgccagtccttggtataagggagcaggagagagaggacaagtggatccaacagccttcgctccaggggaatcagggcatcacctccttttctgggaggacactcccttctgatggtgaatgggaactcccttcctcctgcagcagcctgcctgcagctgtcctggtagaacagtgtggacattgcgactcggaccgatg

SEQ ID NO: 10345 - DNA, 203 bp, Artificial sequence
  synthetic
ggcgcgccagtcctggtcagaagggagcaggagagagaggacaagtggatccaacagccttcgctctaggggaatcagggcatcgcctccttttctgggaggacactcccttctgatggtgaatgggaactcccttcctcctgcagcagcctgcctgcagctgtcctggtagaacagtgtggacattgcgactcggaccgatg

SEQ ID NO: 10346 - DNA, 203 bp, Artificial sequence
  synthetic
ggcgcgccagtcctgccgtcaagtgacaaccatagctcttaggggactcccctaaagccttcatccttctgggtgtgtctgacaggccgtggctggaactccctctctttgtggtcctcctgctgtcctatgtgctggccatgttggggaacgtcgccatcatcctggcatcccgggtggatcctcaacgactcggaccgatg

SEQ ID NO: 10347 - DNA, 203 bp, Artificial sequence
  synthetic
ggcgcgccagtcctgtcgctaagtgacaaccatagctcttaggggattcccctaaagccttcatccttctgggtgtgtctgacaggccgtggctggaactccctctctttgtggtcctcctgctgtcctatgtgctggccatgttggggaacgtcgccatcatcctggcatcccgggtggatcctcaacgactcggaccgatg

SEQ ID NO: 10348 - DNA, 203 bp, Artificial sequence
  synthetic
ggcgcgccagtcctccgaccaatcggcttactccgcggagttggcctcatttctgcacagagtcggcgctccctgtagtttctcctctcgaacgccaggtggagcaaccggccggataccgccacagccctggcaggcggcgctgtgatgcctgagctgatcctgtatgttgcaatcactctatccgtcgactcggaccgatg

SEQ ID NO: 10349 - DNA, 203 bp, Artificial sequence
  synthetic
ggcgcgccagtcctgcacccacagaggagggaactgaatgacatcccaggattacataaactgtcagaggcagccgaagagttcacaagtgtgaagcctggaagccggcgggtgccgctgtgtaggaaagaagctaaagcacttccagagcctgtccggagctcagaggttcggaagacttatcgacccgactcggaccgatg

SEQ ID NO: 10350 - DNA, 203 bp, Artificial sequence
  synthetic
ggcgcgccagtcctacctcgacagccacacgccccaaggcctccaagatgagctacacattggactcgctgggcaacccgtccgcctaccggcgggtaaccgagacccgctcgagcttcagccgcgtcagcggctccccgtccagtggcttccgctcgcagtcgtggtcccgcggctcgcccagcacccgactcggaccgatg

SEQ ID NO: 10351 - DNA, 203 bp, Artificial sequence
  synthetic
ggcgcgccagtccttgcgttacagccacacgccccaaggcctccaagatgagctacacgttggactggctgggcaacccgtccgcctaccggcgggtaaccgagacccgctcgagcttcagccgcgtcagcggctccccgtccagtggcttccgctcgcagtcgtggtcccgcggctcgcccagcacccgactcggaccgatg

SEQ ID NO: 10352 - DNA, 203 bp, Artificial sequence
  synthetic
ggcgcgccagtcctcgcccgacagccacacgccccaaggcctccaagatgagctacacgttggattcgctgggcaacccgtccgcctaccggcgggtaaccgagacccgctcgagcttcagccgcgtcagcggctccccgtccagtggcttccgctcgcagtcgtggtcccgcggctcgcccagcacccgactcggaccgatg

SEQ ID NO: 10353 - DNA, 203 bp, Artificial sequence
  synthetic
ggcgcgccagtcctaaggaaaccaccgcgtgttcgcgcctggtagagatttctcgaagacaccagtgggcccgttccgagccctctggaccgcccgtgtggaaccaaacctgcgcgcgtggccgggccgtgggacaacgaggccgcggagactgtttcaatgcatcaaagctactgacatctcatggccgactcggaccgatg

SEQ ID NO: 10354 - DNA, 203 bp, Artificial sequence
  synthetic
ggcgcgccagtccttccttaacccagccagggcaccacgctgcccggccctgcgccgccaggcacttctttccggggctcctagggacgccagaaggaagccaacctctgctgcttctccttggcctgcgttggaccttcctttttttgttgtttttttttgtttttcccctttcttccttttgaattcgactcggaccgatg

SEQ ID NO: 10355 - DNA, 203 bp, Artificial sequence
  synthetic
ggcgcgccagtcctgactacacccagccagggcaccacgctgcccggccctgcgccgccaggcacttctttccggggctcctagggacgccagaaggaagtcaacctctgctgcttctccttggcctgcgttggaccttcctttttttgttgtttttttttgtttttcccctttcttccttttgaattcgactcggaccgatg

SEQ ID NO: 10356 - DNA, 203 bp, Artificial sequence
  synthetic
ggcgcgccagtcctccgcatacccctaccccatccccttattcagcacatgaaataaacaaggggcatccaaatcttgcagcaacgcccccgggacatgcatcgtcccctggactctctcaaaccccttatccctctggacagaatgcaggtccaaccacgctggtataccctcaaacccctcagacacgactcggaccgatg

SEQ ID NO: 10357 - DNA, 203 bp, Artificial sequence
  synthetic
ggcgcgccagtcctctcagtacctcaatacaagcccactctttcacatatttgaacttttttcacatatcaactttttttgttcactgcgcagggattgttcattgctgctggaggaagatcatggactgtcgcgggaaactgaagtggttgagtatccactagtcgtggatgagggcagtgacttcgcgactcggaccgatg

SEQ ID NO: 10358 - DNA, 203 bp, Artificial sequence
  synthetic
ggcgcgccagtccttactgtacctcaatacaagcccactctttcacatgtttgaacttttttcacatatcaactttttttgttcactgtgcagggattgttcattgctgctggaggaagatcatggactgtcgcgggaaactgaagtggttgagtatccactagtcgtggatgagggcagtgacttcgcgactcggaccgatg

SEQ ID NO: 10359 - DNA, 203 bp, Artificial sequence
  synthetic
ggcgcgccagtccttgggcaacgccggccaagacagcccagacagattgacctattggggtgtttcgcgagtgtgagagggaagcgccgcggcctgtatttctagacctgcccttcgcctggttcgtggcgccttgtgaccccgggcccctgccgcctgcaagtcggaaattgcgctgtgctcctgtgcgactcggaccgatg

SEQ ID NO: 10360 - DNA, 203 bp, Artificial sequence
  synthetic
ggcgcgccagtcctactgagagacagaacttaacctctgcaagcaagattcgtggaagatagtctccactttttaatgcactaagcaatcggttgctaggagcccatcctgggtcagaggccgatccgcagaaccagaacgttttcccctcctgaactgttagtaacttagtctccctcctcccctaacgactcggaccgatg

SEQ ID NO: 10361 - DNA, 203 bp, Artificial sequence
  synthetic
ggcgcgccagtcctcacttgagataactggacaattttttaagtcggaggctgttcttactggtgtgaggatttacacacgtcttcagtttttcagcacagaccagcagaccatcatttttagaggaaatactccctctgccctcctttttggtttccttggtgggctcaactaaaaaactgaatgggcgactcggaccgatg

SEQ ID NO: 10362 - DNA, 203 bp, Artificial sequence
  synthetic
ggcgcgccagtccttcagctagcaccgcgtgttcgcgcctggtagagatttctcgaagacaccagtgggcccgttccgagccctctggaccgcccgtgtggaaccaaacctgcgcgcgtggccgggccgtgggacaacgaggccgcggagactgtttcaatgcatcaaagctactgacatctcatggccgactcggaccgatg

SEQ ID NO: 10363 - DNA, 203 bp, Artificial sequence
  synthetic
ggcgcgccagtcctatcctaagcgcgggcagcggagcgggcgccaggccggccgggcaggatgcgctaccgggcgtcggccctgggcagtgacggggttcgagtgaccatggagagtgcgctcaccgcccgtgaccgggtgggggtgcaggatttcgtgctgctggagaacttcaccagcgaggccgccgactcggaccgatg

SEQ ID NO: 10364 - DNA, 203 bp, Artificial sequence
  synthetic
ggcgcgccagtcctgacacaagcgcgggcagcggagcgggcgccaggccggccgggcaggatgcgctaccgggcgtcggccctgggcagtgacggggttcgggtgaccatggagagtgcgctcaccgcccgtgaccgagtgggggtgcaggatttcgtgctgctggagaacttcaccagcgaggccgccgactcggaccgatg

SEQ ID NO: 10365 - DNA, 203 bp, Artificial sequence
  synthetic
ggcgcgccagtccttaacaaagcgcgggcagcggagcgggcgccaggccggccgggcaggatgcgctaccgggcgtcggccctgggcagtgacggggttcgggtgaccatggagagtgcgctcaccgcccgtgaccgggtggggatgcaggatttcgtgctgctggagaacttcaccagcgaggccgccgactcggaccgatg

SEQ ID NO: 10366 - DNA, 203 bp, Artificial sequence
  synthetic
ggcgcgccagtcctaattggagctcagtgccagaggaggggattcccggcgccgggggacagagcccctttttttttttgccgaaagaccctttctgctggggagcctcttgtgtccagcctaggcccgcgtgcagcgccgacggatgaccgtcttcttggcaagaaagtgaataaacttaattgagacgactcggaccgatg

SEQ ID NO: 10367 - DNA, 203 bp, Artificial sequence
  synthetic
ggcgcgccagtcctcatgcgagctcagtgccagaggaggggattcccggcgccgggggacagagcccctttttttttttgccgaaagaccctttctgctggggagcctcttgtgtccagcctaggcccgcgtgcagcgccgacggatgatcgtcttcttggcaagaaagtgaataaacttaattgagacgactcggaccgatg

SEQ ID NO: 10368 - DNA, 203 bp, Artificial sequence
  synthetic
ggcgcgccagtcctgttatgagctcagtgccagaggaggggattcctggcgccgggggacagagcccctttttttttttgccgaaagaccctttctgctggggagcctcttgtgtccagcctaggcccgcgtgcagcgccgacggatgatcgtcttcttggcaagaaagtgaataaacttaattgagacgactcggaccgatg

SEQ ID NO: 10369 - DNA, 203 bp, Artificial sequence
  synthetic
ggcgcgccagtccttaaacgaggaagaccagctcggccgagtcctcgtcagcggaatcaggctcaggttctgaggaagaagaggaggaggaggaagaggaggaggaggaagggagcaccagtgaagaatcagaggaggaagaggaagaggaggaggaggagaccggcagcaactctgaggaggcatcacgactcggaccgatg

SEQ ID NO: 10370 - DNA, 203 bp, Artificial sequence
  synthetic
ggcgcgccagtcctaataccagtccatttgacacaacacctttgatctttgacagtttccttggttttaggtgctagatgatttctcaggctcaccttagacatttcctgccacagacttagaatcagccatttctctaaggaccctgattccatttcatgagaaatgatagagaccacaatcaaaaccgactcggaccgatg

SEQ ID NO: 10371 - DNA, 203 bp, Artificial sequence
  synthetic
ggcgcgccagtcctccgaccagtgacaaccatagcttcttaggggacccccctaaagccttcatccttctgggtgtgtctgacaggccgtggctggaactccctctctttgtggtcctcctgctgtcctatgtgctggccatgttggggaacgtcgccatcatcctggcatcccgggtggatcctcaacgactcggaccgatg

SEQ ID NO: 10372 - DNA, 203 bp, Artificial sequence
  synthetic
ggcgcgccagtcctgaagtaagtgacaaccatagcttcttaggggactaccctaaagccttcatccttctgggtgtgtctgacaggccgtggctggaactccctctctttgtggtcctcctgctgtcctatgtgctggccatgttggggaacgtcgccatcatcctggcatcccgggtggatcctcaacgactcggaccgatg

SEQ ID NO: 10373 - DNA, 203 bp, Artificial sequence
  synthetic
ggcgcgccagtcctacaacaagtgacaaccatagcttcttaggggactcccctaaagccttcatccttctgggtgtgtctgacaggccgtggctggaactccctctctttgtggtcctcctgctgtcctatgtgctggccatgttggggagcgtcgccatcatcctggcatcccgggtggatcctcaacgactcggaccgatg

SEQ ID NO: 10374 - DNA, 203 bp, Artificial sequence
  synthetic
ggcgcgccagtcctcgcaacagtgcattcgagtaaatttaatttccaggcagcttaatacattctttttagccgtgttacttgtaatgtgtatgccctgctttcactcagtgtgtacagggaaacgcacctgattttttacttattagtttgttttttctttaacctttcagcatcacagaggaagtacgactcggaccgatg

SEQ ID NO: 10375 - DNA, 203 bp, Artificial sequence
  synthetic
ggcgcgccagtcctatgtacataagattgcgtgggttctgcctaaagctgaattcccagcgctttggcttctctgagttggggttgtgtataggggtcttcgaacagttccggaaccagccagcagcctttaattcttgggcggaccacggccggttctgtgttcttggctaagatgaacagccaccacgactcggaccgatg

SEQ ID NO: 10376 - DNA, 203 bp, Artificial sequence
  synthetic
ggcgcgccagtcctggctggataagattgcgtgggttctgcctaaagctgaattcccagcgctttggcttctctgagttggggttgtgtataggggtcttcgaacagttccggaaccagccagcagcctttaattcttgggcggaccacggccggttctgtgttcttggctaagatgagcagccaccacgactcggaccgatg

SEQ ID NO: 10377 - DNA, 203 bp, Artificial sequence
  synthetic
ggcgcgccagtcctaggacgataccagtgtcagctgcacttgtaggggcccaagtgcctcatgacctactcggcagccttcctctccaggatccccaaggctaggaggccaacctactaacaggtgggtgggtatggtgtgtggtttcactcagttcttctcatggggtttctctgagctccattcatcgactcggaccgatg

SEQ ID NO: 10378 - DNA, 203 bp, Artificial sequence
  synthetic
ggcgcgccagtcctcgcccgatacttgatcctaaattcctgtacttcctcaggccatccgagcatgaaacgctgtcacctacccacatccgctggctgtgacgcttgtcagagtgttctctatcggctgcatgcctagaccaccaaagcgttctgaccggacagtgtcactggagaaggcggcgcgaccgactcggaccgatg

SEQ ID NO: 10379 - DNA, 203 bp, Artificial sequence
  synthetic
ggcgcgccagtcctaaggaaatcccaaacgcggtacagaccaaaccgcagcccacgttacggatcggcttactccgcggagttggcctcatttctgcacagagtcggcgctccctgtagtttctcctctcgaacgccaggtggagcaaccggccggataccgccacagccctggcaggcggcgctgtgcgactcggaccgatg

SEQ ID NO: 10380 - DNA, 203 bp, Artificial sequence
  synthetic
ggcgcgccagtcctgcaaggatcccaaacgcggtacagaccaaaccgcagtccacgttacgaatcggcttactccgcggagttggcctcatttctgcacagagtcggcgctccctgtagtttctcctctcgaacgccaggtggagcaaccggccggataccgccacagccctggcaggcggcgctgtgcgactcggaccgatg

SEQ ID NO: 10381 - DNA, 203 bp, Artificial sequence
  synthetic
ggcgcgccagtcctatcaagatcccaaacgcggtacagaccaaaccgcagtccacgttacggatcggcttactccgcggagttggcctcatttctgcacagagtcggcgctccctgtagtttctcctctcgaacgccaggtggagcaaccggccggataccgccacagccctggcaagaggcgctgtgcgactcggaccgatg

SEQ ID NO: 10382 - DNA, 203 bp, Artificial sequence
  synthetic
ggcgcgccagtcctgactacatcccaaacgcggtacagaccaaaccgcagtccacgttacggatcggtttactccgcggagttggcctcatttctgcacagagtcggcgctccctgtagtttctcctctcgaacgccaggtggagcaaccggccggataccgccacagccctggcaggcggcgctgtgcgactcggaccgatg

SEQ ID NO: 10383 - DNA, 203 bp, Artificial sequence
  synthetic
ggcgcgccagtcctccgcatatcccaaacgcggtacagaccaaaccgcagtccgcgttacggatcggcttactccgcggagttggcctcatttctgcacagagtcggcgctccctgtagtttctcctctcgaacgccaggtggagcaaccggccggataccgccacagccctggcaggcggcgctgtgcgactcggaccgatg

SEQ ID NO: 10384 - DNA, 203 bp, Artificial sequence
  synthetic
ggcgcgccagtcctcagctcatcccaaacgcggtacagaccaaaccgcagtccgcgttacggatcggtttactccgcggagttggcctcatttctgcacagagtcggcgctccctgtagtttctcctctcgaacgccaggtggagcaaccggccggataccgccacagccctggcaggcggcgctgtgcgactcggaccgatg

SEQ ID NO: 10385 - DNA, 203 bp, Artificial sequence
  synthetic
ggcgcgccagtcctcggtgaatgcggatggattatggtcgtcagaggctcccgtagtcttcagcggcgctggcttccgcaggctccgccctctcttgcccacccggaaacagcctcgccccgcctacgcgggacccaaccgcggcgaccggacgtgcactcctccagtagcggctgcacgtcgtgccacgactcggaccgatg

SEQ ID NO: 10386 - DNA, 203 bp, Artificial sequence
  synthetic
ggcgcgccagtcctgtccgcatgcggatggattgtggtcgtcagaggctcccgtagtcttcagcggcgctggcttccgcaggctccgccctctcttgcccacccggaaacagcctcgccccgcctacgcgggacccaaccgcggcgaccggacgtgcactcctccagtagcggctgcacgtcgtgccacgactcggaccgatg

SEQ ID NO: 10387 - DNA, 203 bp, Artificial sequence
  synthetic
ggcgcgccagtcctactcttcaactgaaaccgcgggaggagaaagcgcggaatcaggaactggccggggtccgcaccgggcctgagtgggtccgaggccgtcccaggagcagctgcccgtgcggaacagcactatgggcttctcttctgagctgtgcagcccccagggccacggggtcctgcagcaaacgactcggaccgatg

SEQ ID NO: 10388 - DNA, 203 bp, Artificial sequence
  synthetic
ggcgcgccagtcctcacttgcaactgaaaccgcgggaggaggaagcgcggaatcaggaactggccggggtccgcaccgggcctgagtgggtccgaggccgtcccaggagcagctgcccgtgcggaacagcactatgggcttctcttccgagctgtgcagcccccagggccacggggtcctgcagaaaacgactcggaccgatg

SEQ ID NO: 10389 - DNA, 203 bp, Artificial sequence
  synthetic
ggcgcgccagtccttcatgccaagtcaataagactgtggtgagagagttcgtcgtcctcagcttctcatccctggccaggctgcagcagctgctctttgttatcttcctgctcctctacctgttcactctgggcaccaatgcaatcatcatttccaccattgtgctggacagagcccttcatactccccgactcggaccgatg

SEQ ID NO: 10390 - DNA, 203 bp, Artificial sequence
  synthetic
ggcgcgccagtccttaacaacaagtcaataagactgtggtgagagagtttgtcgtcctcggcttctcatccctggccaggctgcagcagctgctctttgttatcttcctgctcctctacctgttcactctgggcaccaatgcaatcatcatttccaccattgtgctggacagagcccttcatactccccgactcggaccgatg

SEQ ID NO: 10391 - DNA, 203 bp, Artificial sequence
  synthetic
ggcgcgccagtcctcgtaggcacagtgcctccggaggaaatctgctcagtccccggcagccgccgcttcccctttgatgttttggtacgccgtgcgcatgcgcctcacattagaattactgcactgggcagactaagttggatctcctctcttcagtgaaaccctcaattccatcaaaaactaaagggcgactcggaccgatg

SEQ ID NO: 10392 - DNA, 203 bp, Artificial sequence
  synthetic
ggcgcgccagtcctcgtctacaccagaatcaagtgttccgcgtgattgaagacaccccctcgtccaagaatgcaaagcacatccaataaaatagctggattataactcctcttctttctctgggggccgtggggtgggagctggggtgagaggtgccgttggcccccgttgcttttcctctgggaaggcgactcggaccgatg

SEQ ID NO: 10393 - DNA, 203 bp, Artificial sequence
  synthetic
ggcgcgccagtccttaaacgcagaccgtcgcagctacagggggcctcgagccccggggtgagcgtccccgtcccgctcctgctccttcccatagggacgcgcctgatgcctaggaccggccgctgagcccaaggggaccgaggaggccatggtaggagcgctcgcctgctgcggtgcccgctgaggcccgactcggaccgatg

SEQ ID NO: 10394 - DNA, 203 bp, Artificial sequence
  synthetic
ggcgcgccagtcctgcgtagcagcggcctcgggagggcccaggtagcgagcagcgacctcgcgagccttccgcactcccgcccggttccccggccgtccgcctatccttggccccctccgctttctccgcgccggcccgcctcgcttatgcctcggcgctgagccgctctcccgattgcccgccgacacgactcggaccgatg

SEQ ID NO: 10395 - DNA, 203 bp, Artificial sequence
  synthetic
ggcgcgccagtcctgccgtccatggtaacaggttccagggtaacagaggagggagctgggtcctgtttactcccagtcctgccgatgaggattctgaccgtagaaactgaattgtcccgtacctatccgtgctctttctgtgttctcaccagggctgagctcgaactgccacctctgccagcaggacccgactcggaccgatg

SEQ ID NO: 10396 - DNA, 203 bp, Artificial sequence
  synthetic
ggcgcgccagtcctttcggacatggtaacaggttccagggtaacagaggagggagctgggtcctgtttactcccagtcctgccgatgaggattctgaccgtagacactgaattgtcccgtacctatccgtgctctttctgtgttctcaccagggctgagctcaaactgccacctctgccagcaggacccgactcggaccgatg

SEQ ID NO: 10397 - DNA, 203 bp, Artificial sequence
  synthetic
ggcgcgccagtcctcacggccatggtaacaggttccagggtaacagaggagggagctgggtcctgtttactcccagtcctgccgatgaggattctgaccgtagacactgaattgtcccgtacctatccgtgctctttctgtgttctcaccagggctgagctcgaactgccacctctgccagcaggacccgactcggaccgatg

SEQ ID NO: 10398 - DNA, 203 bp, Artificial sequence
  synthetic
ggcgcgccagtcctgtcgctcatggtaacaggttccagggtaacagaggagggagctgggtcctgtttactcccagtcctgccgatgaggattctgaccgtagacactgaattgtcccgtacctatccgtgctctttgtgtgttctcaccagggctgagctcgaactgccacctctgccagcaggacccgactcggaccgatg

SEQ ID NO: 10399 - DNA, 203 bp, Artificial sequence
  synthetic
ggcgcgccagtcctccgacccatggtaacaggttccagggtaacagaggagggagctgggtcctgtttactcccagtcctgccgatgaggattctgaccgtagacactgaattgtcccgtacctatccgtgttctttctgtgttctcaccagggctgagctcgaactgccacctctgccagcaggacccgactcggaccgatg

SEQ ID NO: 10400 - DNA, 203 bp, Artificial sequence
  synthetic
ggcgcgccagtcctagccatccaaggacagcccaagaactggtctagcctggcagccttttccctcgggtagtagaggctgcccctctgacagggagtttgtggtcagcaagtgggcccttgggggtcttgggctgtcacagggactccagaaagccatgcagagccttgtgccatgaaggacttctccgactcggaccgatg

SEQ ID NO: 10401 - DNA, 203 bp, Artificial sequence
  synthetic
ggcgcgccagtccttcccagccaaggacagcccaagaactggtctagcctggcagccttttccctcgggtagtagaggctgcccctttgacagggagtttgtggtcagcgagtgggcccttgggggtcttgggctgtcacaggaactccagaaagccatgcagagccttgtgccatgaaggacttctccgactcggaccgatg

SEQ ID NO: 10402 - DNA, 203 bp, Artificial sequence
  synthetic
ggcgcgccagtcctcgcccgccatcacccctaaatgtattccaaagaataagaacattgttttatacatagcacacttaacaaaatcaagaaatttaacattaatacagtactgttacctaatccgtagtcgattttcaaattttgtcagttgttccaataatgtcctttatatattccccgcccagccgactcggaccgatg

SEQ ID NO: 10403 - DNA, 203 bp, Artificial sequence
  synthetic
ggcgcgccagtcctgcaaggccatgagaagcgaccacccctcgacaacttctccttcacggttcccacccaggagcacggccaactctcccccggaatccataacggctcacgcaaatagatttctttccgttcctcctcggagggctctccacatttatctgctcgagacgtggcagctccagaacccgactcggaccgatg

SEQ ID NO: 10404 - DNA, 203 bp, Artificial sequence
  synthetic
ggcgcgccagtcctatcaagccatgagaagcgaccacccctcgacgacttctccttcacggttcccacccaggagcacggccaactctcccccggaatccataacggctcacgcaaatagatttctttccgttcctcctcggagggctctccacatttatctgctcgagacgtggcagctccagaacccgactcggaccgatg

SEQ ID NO: 10405 - DNA, 203 bp, Artificial sequence
  synthetic
ggcgcgccagtccttccttaccatgagaagcgaccacccctcgacgacttctccttcacggttcccatccaggagcacggccaactctcccccggaatccataacggctcacgcaaatagatttctttccgttcctcctcggagggctctccacatttatctgctcgagacgtggcagctccagaacccgactcggaccgatg

SEQ ID NO: 10406 - DNA, 203 bp, Artificial sequence
  synthetic
ggcgcgccagtcctcagctcccatgagaagcgaccacccctcgacgacttctccttcatggttcccacccaggagcacggccaactctcccccggaatccataacggctcacgcaaatagatttctttccgttcctcctcggagggctctccacatttatctgctcaagacgtggcagctccagaacccgactcggaccgatg

SEQ ID NO: 10407 - DNA, 203 bp, Artificial sequence
  synthetic
ggcgcgccagtccttactgtcccaggcctcgctggaccacggacccgccaggttctcccgcaacttgcggagctcctggaacggcccttcccagaggcgcagcgctgagtcccaggagcaggacctgaaccaggaaggggaggggcgagcacagtcctgcctcctcctccccgcacagtgctgggggacgactcggaccgatg

SEQ ID NO: 10408 - DNA, 203 bp, Artificial sequence
  synthetic
ggcgcgccagtcctcttccccccaggcctcgctggaccacggacccgccaggttctcccgcaacttgcggagctcctggaccggcccttcccagaggcacagcgctgagtcccaggagcaggacctgaaccaggaaggggaggggcgagcacagtcctgcctcctcctccccgcacagtgctgggggacgactcggaccgatg

SEQ ID NO: 10409 - DNA, 203 bp, Artificial sequence
  synthetic
ggcgcgccagtccttcggaccccaggcctcgctggaccacggacccgccaggttctcccgcaacttgcggagctcctggaccggcccttcccagaggcgcagcgctgagtcccaggagcaggacctgaaccaggaaggggaggggcgagcacagtcctgcctcttcctccccgcacagtgctgggggacgactcggaccgatg

SEQ ID NO: 10410 - DNA, 203 bp, Artificial sequence
  synthetic
ggcgcgccagtcctaccagcccctgagcaaagagtcacagataaaacaggggcaccagtagaatggccaggacaaacgcagtgcagcacagagactcagaccctggcagccatgcctgcgcaggcagtgatgagagtgacatgtactgttgtggacatgcacaaaagtgagtgtgcaccggcacagaccgactcggaccgatg

SEQ ID NO: 10411 - DNA, 203 bp, Artificial sequence
  synthetic
ggcgcgccagtcctagcgccccctgagcaaagagtcacagataaaacgggggcaccagtagaatggccaggacaaacgcagtgcagcacagagactcagaccctggcagccatgcctgcgcaggcagtgatgagagtgacatgtactgttgtggacatgcacaaaagtgagtgtgcaccggcacagaccgactcggaccgatg

SEQ ID NO: 10412 - DNA, 203 bp, Artificial sequence
  synthetic
ggcgcgccagtcctttcaccccgccgggctcagtcccagtgacccccctggtcggggttcgcgcgccctcccccagcacgaccgggcaaggctgccgcggcgtcggagtaatccccaaccctccgccgccgcttcttccctcacccgggcctccagacgtttgccgcggaaacgaaagtaacgctcggcgactcggaccgatg

SEQ ID NO: 10413 - DNA, 203 bp, Artificial sequence
  synthetic
ggcgcgccagtcctactgagccgccgggctcagtcccagtgacccccctggtcggggttcgcgcgccctcccccagcacgcccgggcaaggctgccgcggcgtcggagtaatccccaaccctccgccgccgcttcttccctcatccgggcctccagacgtttgccgcggaaacgaaagtaacgctcggcgactcggaccgatg

SEQ ID NO: 10414 - DNA, 203 bp, Artificial sequence
  synthetic
ggcgcgccagtcctactcttccgccgggctcagtcccggtgacccccctggtcggggttcgcgcgccctcccccagcacgaccgggcaaggctgccgcggcgtcggagtaatccccaaccctccgccgccgcttcttccctcatccgggcctccagacgtttgccgcggaaacgaaagtaacgctcggcgactcggaccgatg

SEQ ID NO: 10415 - DNA, 203 bp, Artificial sequence
  synthetic
ggcgcgccagtccttcagctccgccgggctcagtcccggtgacccccctggtcggggttcgcgcgccctcccccagcacgcccgggcaaggctgccgcggcgtcggagtaatccccaaccctccgccgccgcttcttccctcatccgggcctccagacgtttgccgcggaaacgaaagtaacgctcggcgactcggaccgatg

SEQ ID NO: 10416 - DNA, 203 bp, Artificial sequence
  synthetic
ggcgcgccagtcctgacacaccggcttccccgccccatttggtgggggctggcccttggccctccaactcctttaccctacatgcctgagaagccagggaccaagatggatcttctcctcgacatcagctaagcctggaggactcttcccctcagagaccatggagagggacagccacgggaatgtatcgactcggaccgatg

SEQ ID NO: 10417 - DNA, 203 bp, Artificial sequence
  synthetic
ggcgcgccagtcctatacctccggcttccccgccccatttggtgggggctggcccttggccctccaactcctttaccctacatgcctgagaagccaggggccaagatggatcttctcctcgacatcagctaagcctggaggactcttcccctcagagaccatggagagggacagccacgggaatgtatcgactcggaccgatg

SEQ ID NO: 10418 - DNA, 203 bp, Artificial sequence
  synthetic
ggcgcgccagtcctgagcgtccggggcagacagcgccggtggtgttcagtacgccacaagcgacacaaatgaacacgccttctcagccccgccagcacttctaccctagccgggcccagcccccgagcagtgcagcctcccgagtgcagagtgcagcccctgcccgctctggcccagctgcccatgtccgactcggaccgatg

SEQ ID NO: 10419 - DNA, 203 bp, Artificial sequence
  synthetic
ggcgcgccagtcctcatgcgccgttccccaacttcctcggcgctccggactcccaagtctccgccggaccctcctttggatattcctcgtgtctccgattctgagacagagggggaagacggtggggcctacccacctgccccgcagaagatgcagttctttggccgcctggtcaataccttcagtggcgactcggaccgatg

SEQ ID NO: 10420 - DNA, 203 bp, Artificial sequence
  synthetic
ggcgcgccagtcctcgtctaccgttctccaacttcctcggcgctccggactcccaagtctccgccggaccctcctttggatattcctcgtgtctccgattctgagacagagggggaagacggtggggcctccccacctgccccgcagaagatgcagttctttggccgcctggtcaataccttcagtggcgactcggaccgatg

SEQ ID NO: 10421 - DNA, 203 bp, Artificial sequence
  synthetic
ggcgcgccagtcctggtcagcctgtgaaagatctcacttgttcaaaagtccaagtgtgaattactgtctcacagacaaaccaaagtattttgaaaaacaaaggggagaaaagaaattactccccagaactctcaggcatctagaggacacccaagaacgtgggagtcagctgcttcttgtgtgcagcccgactcggaccgatg

SEQ ID NO: 10422 - DNA, 203 bp, Artificial sequence
  synthetic
ggcgcgccagtcctttcggacctgtgaaagatctcacttgttcaaaagtccaagtgtgaattactgtctcacagataaaccaaagtattttgaaaaacaaaggggagaaaagaaattactccccagaactctcaggcatctagaggacacccaagaacctgggagtcagctgcttcttgtgtgcagcccgactcggaccgatg

SEQ ID NO: 10423 - DNA, 203 bp, Artificial sequence
  synthetic
ggcgcgccagtcctccaattcgaaactttgcccatagcagcgggcgggcactttgcactggaacttacaacacccgagcaaggacgcgactctcccgacgtggggaggctattctgcccatttggggacacttccccgccgctgccaggacccgcttctctgaaaggctctccttgcagctgcttagacgactcggaccgatg

SEQ ID NO: 10424 - DNA, 203 bp, Artificial sequence
  synthetic
ggcgcgccagtcctcattatcgcactaagcaaactgctcggaagtctactggtggcaaggcgccacgcaaacagttagccactaaggcagcccgcaaaagcgctccggccaccggcggcgtgaaaaagccccaccgctaccggccgggcaccgtggctctgcgcgagatccgccgttatcagaagtcccgactcggaccgatg

SEQ ID NO: 10425 - DNA, 203 bp, Artificial sequence
  synthetic
ggcgcgccagtcctaaacgccgcactaagcaaactgctcggaagtctactggtggcaaggcgccacgcaaacagttggcgactaaggcagcccgcaaaagcgctccggccaccggcggcgtgaaaaagccccaccgctaccggccgggcaccgtggctctgcgcgagatccgccgttatcagaagtcccgactcggaccgatg

SEQ ID NO: 10426 - DNA, 203 bp, Artificial sequence
  synthetic
ggcgcgccagtcctaaggaacgcgctcctagagctcgggccgtggctcgtcggggtctgtgtcttttggctccgagggcagtcgctgggcttccgagaggggttggggctgcgtaggggcgctttgttttgttcggttttgtttttttgagagtgcgagagaggcggtcgtgcagacccgggagaaagcgactcggaccgatg

SEQ ID NO: 10427 - DNA, 203 bp, Artificial sequence
  synthetic
ggcgcgccagtcctgactaccgctggtcagcgccaagtgacttacgcccccgaccctgagccgggaccgctaggcgaggaggatcagatctccgctcgagaatctgaaggtgccctggtcctggaggagttccgtcccagcccgcggtctcccgggccgccctcctgaccggccggctcccggttcggcgactcggaccgatg

SEQ ID NO: 10428 - DNA, 203 bp, Artificial sequence
  synthetic
ggcgcgccagtccttactgtcggagtgtcagctctccatctgtctctgcctggcaggcgcacgcgcccagcaccctgcctccagcgatgccgccccagcccctctgatggccctcctctctgctgccactcattccagaacaggaggcatgagcccggaacgcgcttgcttttaggagacagccacttcgactcggaccgatg

SEQ ID NO: 10429 - DNA, 203 bp, Artificial sequence
  synthetic
ggcgcgccagtcctatcctacgtactaaacagacagctcggaaatccaccggcggtaaagcgccacgcaagcagctggctaccaaagctgctcgcaagagcgcgccggctaccggcggcgtgaaaaagcctcaccgttaccgcccgggcactgtggctctgcgcgagatccgccgctaccaaaagtcgcgactcggaccgatg

SEQ ID NO: 10430 - DNA, 203 bp, Artificial sequence
  synthetic
ggcgcgccagtcctgacacacgtactaaacagacagctcggaaatccaccggcggtaaagcgccacgcaagcagctggctaccaaggctgctcgcaagagcgcgccggctaccggcggcgtgaaaaaacctcaccgttaccgcccgggcactgtggctctgcgcgagatccgccgctaccaaaagtcgcgactcggaccgatg

SEQ ID NO: 10431 - DNA, 203 bp, Artificial sequence
  synthetic
ggcgcgccagtcctgagcgtcgtactaaacagacagctcggaaatccaccggtggtaaagcgccacgcaagcagctggctaccaaggctgctcgcaagagcgcgccggctaccggcggcgtgaaaaagcctcaccgttaccgcccgggcactgtggctctgcgcgagatccgccgctaccaaaagtcgcgactcggaccgatg

SEQ ID NO: 10432 - DNA, 203 bp, Artificial sequence
  synthetic
ggcgcgccagtcctcaaagacgtactaaacagacagctcggaaatccactggcggtaaagcgccacgcaagcagctggctaccaaggctgctcgcaagagcgcgccggctaccggcggcgtgaaaaagcctcaccgttaccgcccgggcactgtggctctgcgcgagatccgccgctaccaaaagtcgcgactcggaccgatg

SEQ ID NO: 10433 - DNA, 203 bp, Artificial sequence
  synthetic
ggcgcgccagtcctcatgcgcgtccctggagcgatcagggctcaggagcccgacccggagcccggggcgtccgcgctgacttcgggtccccggagcctggggcacggcagcgagaagacgacggcggagaaggcgacagcggagaaggaaggcaggctgcaggggcgccgtcggcgcagcgggccgggcgactcggaccgatg

SEQ ID NO: 10434 - DNA, 203 bp, Artificial sequence
  synthetic
ggcgcgccagtcctattgtccgtccctggagcgatcagggctcaggagcccgacccggagcccggggcgtccgcgctgacttcgggtccccggagcctggggcacggcaggaagaagacgacggcggagaaggcgacagcggagaaggcaggcaggctgcaggggcgccgtcggcgcggcgggccgggcgactcggaccgatg

SEQ ID NO: 10435 - DNA, 203 bp, Artificial sequence
  synthetic
ggcgcgccagtcctgcgtagcgtcggttgccgccttagcgggcgcctccttttcatccctcatccttcatccctggctttcgcgctctagcggagtgggatctgcgaacacgtgaggcgggggcgcggtccccaggctgccgagatggccctgagcgacgaaccggccgcgtgcggccccgaggaggacgactcggaccgatg

SEQ ID NO: 10436 - DNA, 203 bp, Artificial sequence
  synthetic
ggcgcgccagtccttggtatcgttcgggggcggggcctgctccctctgctctgggtctccgccggcgcccgccccgccagcctcacctgcgcggcacgtgacccgcaccgcccgtgggcaccttgaaggcggatcccgcgcgcccccgctcctgcaggctgtttttcttcaaataaagaacatggtgacgactcggaccgatg

SEQ ID NO: 10437 - DNA, 203 bp, Artificial sequence
  synthetic
ggcgcgccagtcctagaggactaaagggaaaaaggaagaatgcaacaaaactgaagtatgttctgccacgttcctgaactgcagccataggagccctcccagccctacccaaaccagcctactccctctcaagagctcacagctgcaggactagagccagatgtgccccagcaataaggacttcttcccgactcggaccgatg

SEQ ID NO: 10438 - DNA, 203 bp, Artificial sequence
  synthetic
ggcgcgccagtcctaataccctactgccttctccgaccgtccgtcctcggggcaggcgtgctctcttccctgagcttttaggggttggcttttccagttccagatcagctacagcaaacatcgttcgagatgtcccaccaagagggcagcacaggtggcttaccagacttagtgactgaaagcctgttcgactcggaccgatg

SEQ ID NO: 10439 - DNA, 203 bp, Artificial sequence
  synthetic
ggcgcgccagtcctgaagtactcaataagtctgcttccaccttccagcttactggcttcccaggcatggagaaggcacatcactggatattcatcccattattggcagcctacatctccatacttcttggcaatggcactcttctctttctcatcagaaatgatcataacctccatgagcccatgtaccgactcggaccgatg

SEQ ID NO: 10440 - DNA, 203 bp, Artificial sequence
  synthetic
ggcgcgccagtcctacaacactcaataagtctgcttccaccttccagcttactggcttcccaggcatggagaaggcacatcactggatattcatcccattattggcagcctacatctccatacttcttggcagtggcactcttctctttctcatcaggaatgatcataacctccatgagcccatgtaccgactcggaccgatg

SEQ ID NO: 10441 - DNA, 203 bp, Artificial sequence
  synthetic
ggcgcgccagtcctagccatctcaatacgtctgcttccaccttccagcttactggcttcccaggcatggagaaggcacatcactggatattcatcccattattggcagcctacatctccatacttcttggcaatggcactcttctctttctcatcaggaatgatcataacctccatgagcccatgtaccgactcggaccgatg

SEQ ID NO: 10442 - DNA, 203 bp, Artificial sequence
  synthetic
ggcgcgccagtccttatttcctcaatacgtctgcttccaccttccagcttactggcttcccaggcatggagaaggcacatcactggatattcatcccattattggcagcctacatctccatacttcttggcagtggcactcttctctttctcatcaggaatgatcataacctccatgagcccatgtaccgactcggaccgatg

SEQ ID NO: 10443 - DNA, 203 bp, Artificial sequence
  synthetic
ggcgcgccagtccttcccagctcatccttctactcgtgacacttcccagttctgcctttgtgaaagcaaagatgagcaacactcaagctgagaggtccataataggcatgatcgacatgtttcacaaatacaccggacgtgatggcaagattgagaagccaagcctgctgacgatgatgaaggagaaccgactcggaccgatg

SEQ ID NO: 10444 - DNA, 203 bp, Artificial sequence
  synthetic
ggcgcgccagtcctacgggtctcatccttctactcgtgacacttcccagttctgcctttttgaaagcaaagatgagcaacagtcaagctgagaggtccataataggcatgatcgacatgtttcacaaatacaccggacgtgatggcaagattgagaagccaagcctgctgacgatgatgaaggagaaccgactcggaccgatg

SEQ ID NO: 10445 - DNA, 203 bp, Artificial sequence
  synthetic
ggcgcgccagtcctgctactctcatccttctactcgtgacacttcccagttctgcgtttttgaaagcaaagatgagcaacactcaagctgagaggtccataataggcatgatcgacatgtttcacaaatacaccggacgtgatggcaagattgagaagccaagcctgctgacgatgatgaaggagaaccgactcggaccgatg

SEQ ID NO: 10446 - DNA, 203 bp, Artificial sequence
  synthetic
ggcgcgccagtcctaaacgcctcatccttctactcgtgacacttcccagttctggctttgtgaaagcaaagatgagcaacactcaagctgagaggtccataataggcatgatcgacatgtttcacaaatacaccggacgtgatggcaagattgagaagccaagcctgctgacgatgatgaaggagaaccgactcggaccgatg

SEQ ID NO: 10447 - DNA, 203 bp, Artificial sequence
  synthetic
ggcgcgccagtccttttcggctcatccttctactcgtgacacttcccagttctggctttttgaaagcaaagatgagcaacactcaagctgagaggtccataataggcatgatcgacatgtttcacaaatacaccggacgtgatggcaagattgacaagccaagcctgctgacgatgatgaaggagaaccgactcggaccgatg

SEQ ID NO: 10448 - DNA, 203 bp, Artificial sequence
  synthetic
ggcgcgccagtcctcgcccgctccaaagaccccgacaggccccggcgggtgggaggcgcgcgccccggggcgggcggggctccccctaccggccagacccagggagaggcgcgcggaggctgcgaaggttccagaagggcggggagggggcgccgcgcgctgaccctccctgggcaccgctggggacgcgactcggaccgatg

SEQ ID NO: 10449 - DNA, 203 bp, Artificial sequence
  synthetic
ggcgcgccagtcctgactacctcggtgcccgcagcgccggggcgtggaggcgttaacgcgcacgcgcttaaggatccggccgtggccgagcgcgcggccgtaagaccgcgggtgactagcatgcagatacccatgctctgactttctgcccctccactgacatggcccaccggggtggggagagggaccgactcggaccgatg

SEQ ID NO: 10450 - DNA, 203 bp, Artificial sequence
  synthetic
ggcgcgccagtcctcttcccctgcctggcaggcgcacgcgcccagcaccctgcctccagcgatgccgccccagcccctctgatggccctcctctctgctgccactcattccagaacaggaggcatgagcccggaacgcgcttgcttttaggagacagccactttctgtgtggtacgctggattcaaggcgactcggaccgatg

SEQ ID NO: 10451 - DNA, 203 bp, Artificial sequence
  synthetic
ggcgcgccagtcctactcttcttatctggtcggtcatctctgtaacctccctaccaaggactaattggtctttaaaactcctcaatgcaccgggcgcggtggctcacgcctgtaatcccagcactttgggaggccgagacgggcagatcacgaggtcaggaaatcgagaccatcttggctaacaagaacgactcggaccgatg

SEQ ID NO: 10452 - DNA, 203 bp, Artificial sequence
  synthetic
ggcgcgccagtcctttgtcgcttatctggtcggtcatctctgtaacctccctaccaaggactaattggtctttaaaactcctcaatgcaccgggcgcggtggctcacgcctgtaatcccagcactttgggaggccgaggcgggcagatcacgaggtcaggaaatcgaaaccatcttggctaacaagaacgactcggaccgatg

SEQ ID NO: 10453 - DNA, 203 bp, Artificial sequence
  synthetic
ggcgcgccagtcctctggtacttccgtccagaccggaacccaagatggctgcgctgttgctgagttggtctcttcccatggcgatgtccatctgccaccgtggcactggtattgctttgagtgcaggggtctctctttttggcatgtcggccctgttactccctgggaactttgagtcttatttggaacgactcggaccgatg

SEQ ID NO: 10454 - DNA, 203 bp, Artificial sequence
  synthetic
ggcgcgccagtccttaacaacttttatagctccctggttcaacctcaaggccttgaggttttggcagctctggaggatgagagagaacatggccaggggcccttgcaacacgccgagatgggcgtccctgatggtgctggtcgccataggcaccgccgtgacagcggccgtcaaccctggcgtcgtggcgactcggaccgatg

SEQ ID NO: 10455 - DNA, 203 bp, Artificial sequence
  synthetic
ggcgcgccagtcctgtagaccttttatagctccctggttcaacctcaaggccttgaggttttggcagctctggaggatgagagagaacatggccaggggcccttgcaacgcgccgagatgggcgtccctgatggtgctcgtcgccataggcaccgccgtgacagcggccgtcaaccctggcgtcgtggcgactcggaccgatg

SEQ ID NO: 10456 - DNA, 203 bp, Artificial sequence
  synthetic
ggcgcgccagtccttgtaaagaacccgggccggacgctgccggcaccgccagcgcacagccccaaccgccgccgccccccccacccgctcccaaggagtccccattctccatcaagaacctgctcaacggagaccaccaccggccgccccctaagcctcagccgcccccacggacgctcttcgcgccacgactcggaccgatg

SEQ ID NO: 10457 - DNA, 203 bp, Artificial sequence
  synthetic
ggcgcgccagtcctattgtcgaagaggacgggtcaagtgctggcttccggcggaaaagcgcgcgagcaagatggccaccaccaagcgcgtcttgtacgtgggtggactggcagaggaagtggacgacaaagttcttcatgctgcgttcattccttttggagacatcacagatattcagattcctctggcgactcggaccgatg

SEQ ID NO: 10458 - DNA, 203 bp, Artificial sequence
  synthetic
ggcgcgccagtccttggtatgacagagccctgcacccctaattcccggtggaaaactcctgttgccgtttccctccaccggcctggagtctcccagtcttgtcccggcagtgccgccctccccactaagacctaggcgcaaaggcttggctcatggttgacagctcagagagagaaagagctgagggacgactcggaccgatg

SEQ ID NO: 10459 - DNA, 203 bp, Artificial sequence
  synthetic
ggcgcgccagtcctagaggagacaggccagtgcctggcaccccggggttgccagggtccacggggaacccgaagtccgaggagcccgaggtcccggaccaggaggggctgcagcgcatcaccggcctgtctcccggccgttcggctctcatagtggcggtgctgtgctacatcaatctcctgaactaccgactcggaccgatg

SEQ ID NO: 10460 - DNA, 203 bp, Artificial sequence
  synthetic
ggcgcgccagtcctggtcaggacaggccagtgcctggcgccccggggttgccagggtccacggggaacccgaagtccgaggagcccgaggtcccggaccaggaggggctgcagcgcatcaccggcctgtctcccggccgttcggctctcatagtggcggtgctgtgctacatcaatctcctgaactaccgactcggaccgatg

SEQ ID NO: 10461 - DNA, 203 bp, Artificial sequence
  synthetic
ggcgcgccagtccttatttcgacgggccagtgcctggcaccccggggttgccagggtccacggggaacccgaagtccgaggagcccgaggtccgggaccgggaggggctgcagcgcatcaccggcctgtctcccggccgttcggctctcatagtggcggtgctgtgctacatcaatctcctgaactaccgactcggaccgatg

SEQ ID NO: 10462 - DNA, 203 bp, Artificial sequence
  synthetic
ggcgcgccagtcctccaattgacgggccagtgcctggcaccccggggttgccagggtccacggggaacctgaagtccgaggagcccgaggtcccggaccaggaggggctgcagcgcatcaccggcctgtctcccggccgttcggctctcatagtggcggtgctgtgctacatcaatctcctgaactaccgactcggaccgatg

SEQ ID NO: 10463 - DNA, 203 bp, Artificial sequence
  synthetic
ggcgcgccagtcctcgcaacgactacaggggagttttgttgaagttgcaaagtcctggagcctccagagggctgtcggcgcagtagcagcaagcagcagagtccgcacgctccggcgaggggcagaagagcgcgagggagcgcggggcagcagaagcgagagccgagcgcggacccagccaggacccacgactcggaccgatg

SEQ ID NO: 10464 - DNA, 203 bp, Artificial sequence
  synthetic
ggcgcgccagtcctggctgggagccgcagtcagatcctagcgtcgagccccctctgagtcaggaaacattttcagacctatggaaactacttcctgaaaacaacgttctgtcccccttgccgtcccaagcaatggatgatttgatgctgtcctcggacgatattgaacaatggttcactgaagacccacgactcggaccgatg

SEQ ID NO: 10465 - DNA, 203 bp, Artificial sequence
  synthetic
ggcgcgccagtcctcgacgtgagccgggccccggccgctgtccagccgctccgtgccccgcgcgtcctgcgccgccgccaccgcctcctggggagacgcagccacttgcccgccatggatactcccagggtcctgctctcggccgtcttcctcatcagttttctgtgggatttgcccggtttccagcacgactcggaccgatg

SEQ ID NO: 10466 - DNA, 203 bp, Artificial sequence
  synthetic
ggcgcgccagtccttttcgggagccgggccccggccgctgtccagccgctccgtgccccgcgcgtcctgcgccgccgccaccgcctcttggggagacgcagccacttgcccgccatggatactcccagggtcctgctctcggccgtcttcctcatcagttttctgtgggatttgcccggtttccagcacgactcggaccgatg

SEQ ID NO: 10467 - DNA, 203 bp, Artificial sequence
  synthetic
ggcgcgccagtcctcgatccgatcgacttactccgcggagttggcctcatttctgcacagagtcggcgctccctgtagtttctcctctcgaacgccaggtggagcaaccggccggataccgccacagccctggcaggcggcgctgtgatgcctgagctgatcctgtatgttgcaatcactctatccgtcgactcggaccgatg

SEQ ID NO: 10468 - DNA, 203 bp, Artificial sequence
  synthetic
ggcgcgccagtcctatcaaggatcggcttactccgcggagttggcctcatttctgcacagagtcggcgctccctgtagtttctcctctcgaacgccaggtggagcaaccggccggataccgccacagccctggcaagaggcgctgtgatgcctgagctgatcctgtatgttgcaatcactctatccgtcgactcggaccgatg

SEQ ID NO: 10469 - DNA, 203 bp, Artificial sequence
  synthetic
ggcgcgccagtcctgactacgatcggcttactccgcggagttggcctcatttctgcacagagtcggcgctccctgtagtttctcctctcgaacgccaggtggagcaaccggccggataccgccacagccctggcaggcggcgctgtgatgcctgagctgatcctgtatgttgcaatcactctatccgtcgactcggaccgatg

SEQ ID NO: 10470 - DNA, 203 bp, Artificial sequence
  synthetic
ggcgcgccagtcctcggtgagcaaggcgcgcatgcgcaccgagggtggagccgctgagcacagaaccggaaacttagagacaaagttcggagccccgcccccgccgcgcgccgctgagttgtctggccccgccgacccacggctcacgacccaccgacccacgaatcggcccggccgtcgcgtgcacccgactcggaccgatg

SEQ ID NO: 10471 - DNA, 203 bp, Artificial sequence
  synthetic
ggcgcgccagtcctgtccgcgcaaggcgcgcatgcgtaccgagggtggagccgctgagcacagaaccggaaacttagagacaaagttcggagccccgcccccgccgcgcgccgctgagttgtctggccccgccgacccacggcccacgacccaccgacccacgaatcggcccggccgtcgcgtgcacccgactcggaccgatg

SEQ ID NO: 10472 - DNA, 203 bp, Artificial sequence
  synthetic
ggcgcgccagtcctttgcttgccgtgctgttcccgccaattcctgtggtaatccttaccgtggcgagttccgcgctcaatggagacgtttgaccccaccgagctgcccgagctgcttaaactttattaccggaggctctttccctactctcagtactatcgctggctcaactacggtggagtgataaacgactcggaccgatg

SEQ ID NO: 10473 - DNA, 203 bp, Artificial sequence
  synthetic
ggcgcgccagtcctgaatctgccgtgctgttcccgccaattcctgtggtaatccttaccgtggcgagttccgcgctcaatggagacgtttgcccccaccgagctgcccgagctgcttaaactttattaccggaggctctttccctactctcagtactatcgctggctcaactacggtggagtgataaacgactcggaccgatg

SEQ ID NO: 10474 - DNA, 203 bp, Artificial sequence
  synthetic
ggcgcgccagtcctggtggcgccgtgctgttcccgccagttcctgtggtaatccttaccgtggcgagttccgcgctcaatggagacgtttgaccccaccgagctgcccgagctgcttaaactttattaccggaggctctttccctactctcagtactatcgctggctcaactacggtggagtgataaacgactcggaccgatg

SEQ ID NO: 10475 - DNA, 203 bp, Artificial sequence
  synthetic
ggcgcgccagtcctaccagcgcctcctgcttgaggtagttgtttttactcccagtccccaggctcacgagccccacgcgcgctcaatctgccctcccgcttctcctcgccactccgagttctgcgccctcgagatccagcgcatccgcggggtgggcgggtcctggcagctctttgccctcttccaaccgactcggaccgatg

SEQ ID NO: 10476 - DNA, 203 bp, Artificial sequence
  synthetic
ggcgcgccagtcctagcgccgcctcctgcttgaggtagttgtttttactcccagtccccaggctcacgagccccacgcgcgctcaatctgccctcccgcttctcctcgccactccgagttctgcgccctcgagatccagcgcatccgcggggtgggcgggtcctggcggctctttgccctcttccaaccgactcggaccgatg

SEQ ID NO: 10477 - DNA, 203 bp, Artificial sequence
  synthetic
ggcgcgccagtcctactcttgccttcgccagcagcgccgcggcggaaccgggcgcaggggagcgagcccggccccgccagcccagcccagcccagcccagccctactccctccccacgccagggcagcagccgttgctcagagagaaggtggaggaagaaatccagaccctagcacgcgcgcaccatccgactcggaccgatg

SEQ ID NO: 10478 - DNA, 203 bp, Artificial sequence
  synthetic
ggcgcgccagtccttcatgcgcgcgagttggactgtgaagaaacatggcggccgcgacgttgacttcgaaattgtactccctgctgttccgcaggacctccaccttcgccctcaccatcatcgtgggcgtcatgttcttcgagcgcgccttcgatcaaggcgcggacgctatctacgaccacatcaaccgactcggaccgatg

SEQ ID NO: 10479 - DNA, 203 bp, Artificial sequence
  synthetic
ggcgcgccagtccttcgatggcggggcggatggcgagggagcggggcgagctgctttttgaggctgcgcactcgcatggccccacctcgcaggtccatttccggcgccgcggctgttccgggcggagaccgcttgtgctggagtcggagttgtaacgctccactgactgatagagcgaccggccgacccgactcggaccgatg

SEQ ID NO: 10480 - DNA, 203 bp, Artificial sequence
  synthetic
ggcgcgccagtcctcagaaggctcgtccgcctaataccgcgcctgcgcaccgcgtctcttcctttctgggctcggacctaggtcgcggcgacatggccaaacgtaccaagaaagtcgggatcgtcggtaaatacgggacccgctatggggcctccctccggaaaatggtgaagaaaattgaaatcagccgactcggaccgatg

SEQ ID NO: 10481 - DNA, 203 bp, Artificial sequence
  synthetic
ggcgcgccagtccttggtatgctcgtccgcctaataccgcgcctgcgcaccgcgtctcttcctttctgggctcggacctaggtcgcggcgacatggccaaacgtaccaagaaagttgggatcgtcggtaaatacgggacccgctatggggcctccctccggaaaatggtgaagaaaattgaaatcagccgactcggaccgatg

SEQ ID NO: 10482 - DNA, 203 bp, Artificial sequence
  synthetic
ggcgcgccagtcctgtcgctgctgtctgtgtacttccggcagcctccagacagtttcttccgcttcctgtaccacccggctcaagtagcggacacggaacagggaactatcagcccgtcggcctccgggccctgcattctctagctatggaccgggaccttttgcggcagtcgctaaattgccacgggcgactcggaccgatg

SEQ ID NO: 10483 - DNA, 203 bp, Artificial sequence
  synthetic
ggcgcgccagtcctccgaccgctgtctgtgtacttccggcagcctccagacagtttcttccgcttcctgtaccacccggctcaagtagcggacacggaacagggaactatcagcccgtcggcctccgggccctgtattctctagccatggaccgggaccttttgcggcagtcgctaaattgccacgggcgactcggaccgatg

SEQ ID NO: 10484 - DNA, 203 bp, Artificial sequence
  synthetic
ggcgcgccagtcctgaagtagctgtctgtgtacttccggcagcctccagacagtttcttccgcttcctgtaccaccctgctcaagtagcggacacggaacagggaactatcagcccgtcggcctccgggccctgcattctctagccatggaccgggaccttttgcggcagtcgctaaattgccacgggcgactcggaccgatg

SEQ ID NO: 10485 - DNA, 203 bp, Artificial sequence
  synthetic
ggcgcgccagtcctccaattgcttccgcctccttctttctcgacaagatggccacaccggcggtaccagtaagtgctcctctggccacgccaaccccagtcccggcggcggccccagcctcagttccagcgccaacgccagcaccggctgcggctccggttcccgctgcggctccagcctcatcctcacgactcggaccgatg

SEQ ID NO: 10486 - DNA, 203 bp, Artificial sequence
  synthetic
ggcgcgccagtccttcccaggcttccgcctccttttttctcgacaagatggccacaccggcggtaccagtaagtgctcctccggccacgccaaccccagtcccggcggcggccccagcctcagttccagcgccaacgccagcaccggctgcggctccggttcccgctgcggctccagcctcatcctcacgactcggaccgatg

SEQ ID NO: 10487 - DNA, 203 bp, Artificial sequence
  synthetic
ggcgcgccagtcctgtgccagcttccgtctccttctttctcgacaagatggccacaccggcggtaccagtaagtgctcctccggccacgccaaccccagtcccggcggcggccccagcctcagttccagcgccaacgccagcaccggctgcggctccggttcccgctgcggctccagcctcatcctcacgactcggaccgatg

SEQ ID NO: 10488 - DNA, 203 bp, Artificial sequence
  synthetic
ggcgcgccagtcctcattatgcttccgtctccttctttctcgacaagatggccacaccggcggtaccagtaagtgctcctctggccacgccaaccccagtcccggcggcggccccagcctcagttccagcgccaacgccagcaccggctgcggctccggttcccgctgcggctccagcctcatcctcacgactcggaccgatg

SEQ ID NO: 10489 - DNA, 203 bp, Artificial sequence
  synthetic
ggcgcgccagtcctacgggtggactggggacctcactcaggaccgtggggagttggctgaaggacttggggagcccagaagctgccaccgaaccaagaaccacctctgtgcagaaaagcaaccaccttgttctctattctgctgcccgagacaaccacatcctcctcctcctacacccaaaggctccccgactcggaccgatg

SEQ ID NO: 10490 - DNA, 203 bp, Artificial sequence
  synthetic
ggcgcgccagtcctatgtacggactggggacctcgctcaggaccgtggggagttggctgaaggacttggggagcccagaagttgccaccgaaccaagaaccacctctgtgcagaaaagcaaccaccttgttctctattctgctgcccgagacaaccacatcctcctcctcctacacccaaaggctccccgactcggaccgatg

SEQ ID NO: 10491 - DNA, 203 bp, Artificial sequence
  synthetic
ggcgcgccagtcctcgacgtggagctcagtgccagaggaggggattcccggcgccgggtcagagccccttttttcttttgccgaaagaccctttctgctggggagcctcttgtgtccagcctaggcccgcgtgcagcgccgacggatgatcgtcttcttggcaagaaagtgaataaacttaattgagacgactcggaccgatg

SEQ ID NO: 10492 - DNA, 203 bp, Artificial sequence
  synthetic
ggcgcgccagtccttttcggggagctcagtgccagaggaggggattcccggcgccgggtcagagcccctttttttttttgccgaaagaccctttctgctggggagcctcttgtgtccagcctaggcccgcgtgcagcgccgacggatgaccgtcttcttggcaagaaagtgaataaacttaattgagacgactcggaccgatg

SEQ ID NO: 10493 - DNA, 203 bp, Artificial sequence
  synthetic
ggcgcgccagtcctacctcgggagctcagtgccagaggaggggattcctggcgccgggtcagagccccttttttcttttgccgaaagaccctttctgctggggagcctcttgtgtccagcctaggcccgcgtgcagcgccgacggatgaccgtcttcttggcaagaaagtgaataaacttaattgagacgactcggaccgatg

SEQ ID NO: 10494 - DNA, 203 bp, Artificial sequence
  synthetic
ggcgcgccagtcctcgcccgggaggccgttcctgcgcggccgccccattcccagaccggccgccagcccatctggttagctcccgccgctccgcgccgcccgggagtcgggagccgcggggaaccgggcacctgcatccgccgctgggagtgagtggctccagctggtgcctggcctgtgtctcttggcgactcggaccgatg

SEQ ID NO: 10495 - DNA, 203 bp, Artificial sequence
  synthetic
ggcgcgccagtcctcgatccggagtaagtctgtctgatctaggatgtcttgcttaccacccaggtagggggttatatactcccagcctttctgattccattgtaactcttgccgaaatccgggtgaacggaagtagtctctttaagaactggtatgggcaggcccaagttgtcaaggcttcggaggtacgactcggaccgatg

SEQ ID NO: 10496 - DNA, 203 bp, Artificial sequence
  synthetic
ggcgcgccagtcctatcaagggagtaagtctgtctgatctaggatgtcttgcttatcacccaggtagggggttatatactcccagcctttctgattccattgtaactcttgccgaaatccgggtgaacggaagtagtctctttaagaactggtatgggcaggcccaagttgtcaaggcttcggaggtacgactcggaccgatg

SEQ ID NO: 10497 - DNA, 203 bp, Artificial sequence
  synthetic
ggcgcgccagtccttccttaggatttctgttgtgtttaaattctccacagattgtattgtaaatattttatgaagtagagcatatgtatatatttatatatacgtgcacatacattagtagcactacctttggaagtctcagctcttgcttttcgggactgaagccagttttgcatgataaaagtggccgactcggaccgatg

SEQ ID NO: 10498 - DNA, 203 bp, Artificial sequence
  synthetic
ggcgcgccagtcctgaggccggccgccggcactggattgcttctgtctggcggcggcagcatggcggcgggggcggctgaggcagctgtagcggccgtggaggaggtcggctcagccgggcactttgaggagctgctgtgcctcaaagccaagtccctccttgtggtccatttctgggcaccatgggccgactcggaccgatg

SEQ ID NO: 10499 - DNA, 203 bp, Artificial sequence
  synthetic
ggcgcgccagtcctcttcccggccgccggcactggattgcttctgtctggcggcggcagcatggcggcgggggcggctgaggcagctgtagcggccgtggaggaggtcggctcagccgggcagtttgaggagctgctgtgcctcaaagccaagtccctccttgtggtccatttctgggcaccatgggccgactcggaccgatg

SEQ ID NO: 10500 - DNA, 203 bp, Artificial sequence
  synthetic
ggcgcgccagtcctttaataggccgccgggactggattgcttctgtctggcggcggcagcatggcggcgggggcggctgaggcagctgtagcggccgtggaggaggtcggctcagccgggcagtttgaggagctgctgcgcctcaaagccaagtccctccttgtggtccatttctgggcaccatgggccgactcggaccgatg

SEQ ID NO: 10501 - DNA, 203 bp, Artificial sequence
  synthetic
ggcgcgccagtcctagcgccggccttgaggtgcccagctccgcgctttccgattttgggggcctttccagaaaatgttgcaaaaaagctaagccggcgggcagaggaaaacgcctgtagccggcgagtgaagacgaaccatcgactgccgtgttccttttcctcttggaggttggagtcccctgggcgcgactcggaccgatg

SEQ ID NO: 10502 - DNA, 203 bp, Artificial sequence
  synthetic
ggcgcgccagtcctagttctggcgattgcgtcccagaaccgacgtcccaccgccttcccacatcggatcgcagggctcccaaaatggcgagtgaggctgcggggactcgctgagcagcggaaggggagcgtgcagagccgctgcggccctcacagtccggagcccggccgtgccgtgccgtagggaaccgactcggaccgatg

SEQ ID NO: 10503 - DNA, 203 bp, Artificial sequence
  synthetic
ggcgcgccagtcctttgtcgggcggccgggactggattgcttctgtctggcggcggcagcatggcggcgggggcggctgaggcagctgtagcggccgtggaggaggtcggctcagccgggcagtttgaggagctgctgcgcctcaaagccaagtccctccttgtggtccatttctgggcaccatgggccgactcggaccgatg

SEQ ID NO: 10504 - DNA, 203 bp, Artificial sequence
  synthetic
ggcgcgccagtccttcatgcggctcggccgccagtcggaagcgccagcccagagcctgggaagtggccgcagaggctgctcggccccgctgcccgccaggtcgtgggctcccgctccgggcccggggccaccggctgtggacttcaaaatgagcgtccctgactacatgcagtgtgctgaggaccacccgactcggaccgatg

SEQ ID NO: 10505 - DNA, 203 bp, Artificial sequence
  synthetic
ggcgcgccagtccttgattgggctgagacctctctcccagagctggggggagaggacaaagccacgccttgccccagcatcctggagctggaggagctcctgcgggcagggaagtcttcttgcagccgtgtggacgaagtttggcccaaccttttcataggagatgcagctggtccttactccctgcccgactcggaccgatg

SEQ ID NO: 10506 - DNA, 203 bp, Artificial sequence
  synthetic
ggcgcgccagtcctatcctaggctgagacctctctcccagagctggggggagaggacaaagccacgccttgccccagcatcctggagctggaggagctcctgcgggcagggaagtcttcttgcagccgtgtggacgaagtttggcccaaccttttcataggagatgtagctggtccttactccctgcccgactcggaccgatg

SEQ ID NO: 10507 - DNA, 203 bp, Artificial sequence
  synthetic
ggcgcgccagtcctgacacaggctgagacctctctcctagagctggggggagaggacaaagccacgccttgccccagcatcctggagctggaggagctcctgcgggcagggaagtcttcttgcagccgtgtggacgaagtttggcccaaccttttcataggagatgcagctggtccttactccctgcccgactcggaccgatg

SEQ ID NO: 10508 - DNA, 203 bp, Artificial sequence
  synthetic
ggcgcgccagtccttaacaaggctgccggccggcggccccgcgctcgcccgccccgcttccgcccgctgtcctgctgcacgaacccttccaactctcctttcctcccccacccttgagttacccctctgtctttcctgctgttgcgcgggtgctcccacagcggagcggagattacagagccgcccggcgactcggaccgatg

SEQ ID NO: 10509 - DNA, 203 bp, Artificial sequence
  synthetic
ggcgcgccagtcctcgtaggggctgccggccggcggccccgcgctcgcccgccccgcttccgcccgctgtcctgctgcacgaacccttccaactctcctttcctcccccacccttgagttacccctctgtctttcctgctgtttcgcgggtgctcccacagcggagcggagattacagagccgccgggcgactcggaccgatg

SEQ ID NO: 10510 - DNA, 203 bp, Artificial sequence
  synthetic
ggcgcgccagtcctcaaagaggcttactgaggctggtggagggagccactgctgggctcaccatggaccgccggatgtggggggcccacgtcttctgcgtgttgagcccgttaccgaccgtattgggccacatgcacccagaatgtgacttcatcacccagctgagagaggatgagagtgcctgtctacgactcggaccgatg

SEQ ID NO: 10511 - DNA, 203 bp, Artificial sequence
  synthetic
ggcgcgccagtcctcatgcgggcttactgaggctggtggagggagccactgctgggctcaccatggaccgctggatgtggggggcccacgtcttctgcgtgttgagcccgttaccgaccgtattgggccacatgcacccagaatgtgacttcatcacccagctgagagaggatgagagtgcctgtctacgactcggaccgatg

SEQ ID NO: 10512 - DNA, 203 bp, Artificial sequence
  synthetic
ggcgcgccagtccttcgatggggcagccggccgtgcgcctgcgcggtggcccttccatcccggcagtcgtggctgcagcgctgaggcgagaggttgttgggtgtctccggccacaatgacccaggctgagaagggtgatacggagaacggaaaggagaagggcggcgagaaggagaaggagcagcgcgcgactcggaccgatg

SEQ ID NO: 10513 - DNA, 203 bp, Artificial sequence
  synthetic
ggcgcgccagtcctcagaaggggcattgcccccagtctcccccaaatttggccattgtccccgggtcttccaacggactgggcgttgctcccggacactgaggactggccccggggtctcgctcaccttcagcagcgtccaccgcctgccacagagcgttcgatcgctcgctgcctgagctcctggtgcgactcggaccgatg

SEQ ID NO: 10514 - DNA, 203 bp, Artificial sequence
  synthetic
ggcgcgccagtcctcgcaacggggtccgtcctggttcccggccgttgccacgacgacgaagctgccggccaatggctggcggatgggcccaaggttcccggcgtgcagcgcggctgcctgagggcggcaggctcatggcgccggcgtcgcggttgctcgcgctctgggcgctggcggctgtggctctacgactcggaccgatg

SEQ ID NO: 10515 - DNA, 203 bp, Artificial sequence
  synthetic
ggcgcgccagtcctggagcgggtaggcatttaaaaatgtgtgtgtatgtgtatatatgtatgtgtatgtatgtgtatatatgtatatgtatgtatgtatcgcgtgtatgtgtgtatgtatgcatgtgtatgtatgtatatgtatgtatgtgtatgtgtatatatgtatgtgtgtgtatgtatatgtgtcgactcggaccgatg

SEQ ID NO: 10516 - DNA, 203 bp, Artificial sequence
  synthetic
ggcgcgccagtcctaaacgcggtcacgtgctgcggaggcttggggaggggcggcgaggcggggtttatagcccgggcgcccgcgggccccacgctttgaccgggtcgtggcagccggagtcgtcttcgggacgcgcctgctcttcgcctttcgctgcagtccgtcgatttctttctccaggaagaaaacgactcggaccgatg

SEQ ID NO: 10517 - DNA, 203 bp, Artificial sequence
  synthetic
ggcgcgccagtcctggctggggtcccagactccccccagcacagcagagcgcttccctgcccacccgcggaaaccgccccaggtgggccgcgcccccgccccagcagccagcagggcgccagggctgagccggccgtggaggggagcgggtcccgcgggttatacaggcgccggggctccgcggcaggcgactcggaccgatg

SEQ ID NO: 10518 - DNA, 203 bp, Artificial sequence
  synthetic
ggcgcgccagtcctgcacccggtcccagactccccccagcacagcagagcgcttccctgcccacccgcggaaaccgccccaggtgggccgcgccccctccccagcagccagcagggcgccagggctgagccggccgtggaggggagcgggtcccgcgggttatacaggcgccggggctccgcggcaggcgactcggaccgatg

SEQ ID NO: 10519 - DNA, 203 bp, Artificial sequence
  synthetic
ggcgcgccagtcctacctcgggtcccctccgcctgacgctcctctctgtctcagccaggactggtttctgtaagaaacagcaggagctgtggcagcggcgaaaggaagcggctgaggcgcttggaacccgaaaagtctcggtgctcctggctacctcgcacagcggtgcccgcccggccgtcagtacccgactcggaccgatg

SEQ ID NO: 10520 - DNA, 203 bp, Artificial sequence
  synthetic
ggcgcgccagtccttatcctggtcccctccgcctgacgctcctctctgtctcagccaggactggtttctgtaagaaacagcaggagctgtggcagcggcgaaaggaagcggctgaggcgcttggaacccgaaaagtctcggtgctcctggctacctcgcacagcggtgcccgcccggccgtcagtccccgactcggaccgatg

SEQ ID NO: 10521 - DNA, 203 bp, Artificial sequence
  synthetic
ggcgcgccagtcctaggacgggtcccctccgcctgacgctcctctctgtctcagccaggactggtttctgtaagaaacagcaggagctgtggcagcggcgaaaggaagcggctgaggcgcttggaacccgaaaagtctcggtgctcctggctacctcgcacagtggtgcccgcccggccgtcagtacccgactcggaccgatg

SEQ ID NO: 10522 - DNA, 203 bp, Artificial sequence
  synthetic
ggcgcgccagtccttgcgttggtcccctccgcctgacgctcctctctgtctcagccaggactggtttctgtaagaaatagcaggagctgtggcagcggcgaaaggaagcggctgaggcgcttggaacccgaaaagtctcggtgctcctggctacctcgcacagcggtgcccgcccggccgtcagtacccgactcggaccgatg

SEQ ID NO: 10523 - DNA, 203 bp, Artificial sequence
  synthetic
ggcgcgccagtcctcgcccgggtcgcggcaaaggcggtaaaggtttgggtaagggagatgctaagcgtcaccgaaaagtgctgcgggataacatccaaggcatcaccaaaccggccattcggcgccttgctaggcgtggtggggttaagcgaatttccggtttgatttatgaggagactcgtggcgttcgactcggaccgatg

SEQ ID NO: 10524 - DNA, 203 bp, Artificial sequence
  synthetic
ggcgcgccagtcctaaggaaggtcgcggcaaaggcggtaaaggtttgggtaagggaggtgccaagcgtcaccgaaaagtgctgcgggataacatccaaggcatcaccaaaccggccattcggcgccttgctaggcgtggtggggttaagcgaatttccggtttgatttatgaggagactcgtggcgttcgactcggaccgatg

SEQ ID NO: 10525 - DNA, 203 bp, Artificial sequence
  synthetic
ggcgcgccagtcctatcaagggtcgcggcaaaggcggtaaaggtttgggtaagggaggtgctaagcgtcaccgaaaagtgctgcgggataacatccaaggcatcaccaaaccggccattcggcgccttgctaggcgtggtggggttaagcgaatttccggtttgatttatgaggagactcgtggcgttcgactcggaccgatg

SEQ ID NO: 10526 - DNA, 203 bp, Artificial sequence
  synthetic
ggcgcgccagtcctcggtgaggttcgcagcgctgggagcggccgtgacgtcaggcgcccggctgctcctcacttgctctgagacaggtgcggcaagtctactgcgggctggtccgggctcctcaggttcagacccgaccgttatccagtcggttcgtggagaggagaggtgcactttacaggtccccacgactcggaccgatg

SEQ ID NO: 10527 - DNA, 203 bp, Artificial sequence
  synthetic
ggcgcgccagtccttttgatggttcgcggcgctgggagcggccgtgacgtcaggcgcccggctgctcctcacttgctctgagacaggtgcggcaagtctactgcgggctggtccgggctcctcaggttcagacccgaccgttatccactcggttcgtggagaggagaggtgcactttacaggtccccgcgactcggaccgatg

SEQ ID NO: 10528 - DNA, 203 bp, Artificial sequence
  synthetic
ggcgcgccagtccttactgtggttcgcggcgctgggagcggccgtgacgtcaggcgcccggctgctcctcacttgctctgagacaggtgcggcaagtctactgcgggctggtccgggctcctcaggttcagacccgaccgttatccagtcggttcgtggagagcagaggtgcactttacaggtccccacgactcggaccgatg

SEQ ID NO: 10529 - DNA, 203 bp, Artificial sequence
  synthetic
ggcgcgccagtccttcggacggttcgcggcgctgggagcggccgtgacgtcaggcgcccggctgctcctcacttgctctgagacaggtgcggcaagtctactgtgggctggtccgggctcctcaggttcagacccgaccgttatccagtcggttcgtggagaggagaggtgcactttacaggtccccacgactcggaccgatg

SEQ ID NO: 10530 - DNA, 203 bp, Artificial sequence
  synthetic
ggcgcgccagtcctaccagcgtccccggtcaccggccctgcccccgggccctgtgcttataacctgggatgggcacccctgccagtcctgctctgccgcctgccaccgctgcccgagcccgagtggttcactgcactgtgaaaacagattccagacgccgggaactcacacctccaatcccagacgctcgactcggaccgatg

SEQ ID NO: 10531 - DNA, 203 bp, Artificial sequence
  synthetic
ggcgcgccagtcctagcgccgtccccggtcaccggccctgcccccgggccctgtgcttataacctgggatgggcacccctgccagtcctgctctgccgcctgccaccgctgcccgagcccgagtggttcactgcactgtgaaaacagattccagacgccgggaactcacgcctccaatcccagacgctcgactcggaccgatg

SEQ ID NO: 10532 - DNA, 203 bp, Artificial sequence
  synthetic
ggcgcgccagtcctggcgaagtccccggtcaccggccctgcccccgggccctgtgcttataacctgggatgggcacccctgccagtcctgctctgccgcctgccaccgctgcccgagcccgagtggttcactgcactgtgaaaacagattccagacgccgggaactcacgcctccaatcccagatgctcgactcggaccgatg

SEQ ID NO: 10533 - DNA, 203 bp, Artificial sequence
  synthetic
ggcgcgccagtcctcacttggtggtgttcatcccgggtcgaccggccgctcgcgctgccctgaaactctagtcgccagagaggcggcatgggtttccggaagttctcccccttcctggctctcagtatcttggtcctgtaccaggcgggcagcctccaggcggcgccattcaggtctgccctggagagcgactcggaccgatg

SEQ ID NO: 10534 - DNA, 203 bp, Artificial sequence
  synthetic
ggcgcgccagtccttggcgcgtttctggcacctacctacctgcttcccgctggggggtggggagttggcccagagtcttaagattggggcagggtggagaggtgggctcttcctgcttcccactcatcttatagctttctttccccagatccgaattcgagatccaaaccaaggaggaaaggatatcacgactcggaccgatg

SEQ ID NO: 10535 - DNA, 203 bp, Artificial sequence
  synthetic
ggcgcgccagtccttgattgtaaaaccctcccccaccacctccttctccccacccctcgccgcaccacacacagcgcgggcttctagcgctcggcaccggcgggccaggcgcgtcctgccttcatttatccagcagcttttcggaaaatgcatttgctgttcggagtttaatcagaagaggattcctgcgactcggaccgatg

SEQ ID NO: 10536 - DNA, 203 bp, Artificial sequence
  synthetic
ggcgcgccagtcctatcctataaaacggacatctccagcgtgggtggctcctttttctttttctttttttcccacccttcaggaagtggacgtttcgtaatcttctgatccttgcaccttcttttggggcaaacggggcccttctgcccagatcccctctcttttctcggaaaacaaactactaagtccgactcggaccgatg

SEQ ID NO: 10537 - DNA, 203 bp, Artificial sequence
  synthetic
ggcgcgccagtccttaacaataaaacggacatctccagcgtgggtggctcctttttctttttctttttttcccacccttcaggaagtggacgtttcgttgtcttctgatccttgcaccttcttttggggcaaacggggcccttctgcccagatcccctctcttttctcggaaaacaaactactaagtccgactcggaccgatg

SEQ ID NO: 10538 - DNA, 203 bp, Artificial sequence
  synthetic
ggcgcgccagtcctataccttaacaaacgggaggaggaagcgattctggggtttctgtgttgaacggttcttgtccgcgaagatgcgcttcggcctctgtcaggggacttgaacgggcttagtgggcttcagccagcttttctccaccggttccccacggagacccccccccccccccggccgttgcacgactcggaccgatg

SEQ ID NO: 10539 - DNA, 203 bp, Artificial sequence
  synthetic
ggcgcgccagtcctgagcgttacaacacccgagcaaggacgcgactctcccgacgtggggaggctattctgcccatttggggacacttccccgccgctgccaggacccgcttctctgaaaggctctccttgcagctgcttagacgctggatttttttcgggtagtggaaaaccagcagcctcccgcgacgactcggaccgatg

SEQ ID NO: 10540 - DNA, 203 bp, Artificial sequence
  synthetic
ggcgcgccagtcctcaaagatacaacacccgagcaaggacgcgactctctcgacgcggggaggctattctgcccatttggggacacttccccgccgctgccaggacccgcttctctgaaaggctctccttgcagctgcttagacgctggatttttttcgggtagtggaaaaccagcagcctcccgcgacgactcggaccgatg

SEQ ID NO: 10541 - DNA, 203 bp, Artificial sequence
  synthetic
ggcgcgccagtcctgttatgtacggatcggcttactccgcggagttggcctcatttctgcagtcggcgctccctgtagtttctcctctcgaacgccaggtggagcaaccggccggataccgccacagccctggcaggcggcgctgtgatgcctgagctgatcctgtatgttgcaattactctatccgtcgactcggaccgatg

SEQ ID NO: 10542 - DNA, 203 bp, Artificial sequence
  synthetic
ggcgcgccagtcctaatacctcagtgcctgaggcagagactgcgagaaaaaaacgcgcttcattccttcttccaccgccatactgtattttatactaaatctcatttttattccaacattttactcccgctcgatatagcccttggcgaggtgcctggctccatagattaaagcaaggagagccaatccgactcggaccgatg

SEQ ID NO: 10543 - DNA, 203 bp, Artificial sequence
  synthetic
ggcgcgccagtcctggagcgtccctactcccagtctccacccaactcccccgcccgccccgtgcaggctgtggagactcccttcccgggggagggggcccccactgccgcaggtgccccctctgcctccaccccgctctgaaatagaaaatgtctgcagacggcggaggcatccaggacacccaggaccgactcggaccgatg

SEQ ID NO: 10544 - DNA, 203 bp, Artificial sequence
  synthetic
ggcgcgccagtcctcattattcccttctgatggtgaatgggaactcccttcctcctgcagcagcctgcctgcagctgtcctggtagaacagtgtggacattgcagaagctgtcactgtcccagaaagaaagcaccccagagccaaggcaaagagtcttgaaagcgccacaagcagcagctgctgagcccgactcggaccgatg

SEQ ID NO: 10545 - DNA, 203 bp, Artificial sequence
  synthetic
ggcgcgccagtcctacgggttccgactcgccctcggccttccgcgccagccgcagccacagccgcaacgccacccgcagccacagccacagccacagccccaggcatagccttcggcacagccccggctccggctcctgcgacagctcctctgggcaccgtccctgcgccgacatcctggaggttgggcgactcggaccgatg

SEQ ID NO: 10546 - DNA, 203 bp, Artificial sequence
  synthetic
ggcgcgccagtcctgctacttccgactcgccctcggccttccgcgccagccgcagccacagccgcaacgccacccgcagccacagccacagccacagccccaggcatagccttcggcacagccccggctccggctcctgcggcagctcctctgggcaccgtccctgcgccgacatcctggaggttgggcgactcggaccgatg

SEQ ID NO: 10547 - DNA, 203 bp, Artificial sequence
  synthetic
ggcgcgccagtcctaaacgctccgactcgccctcggccttccgcgccagccgcagcgacagccgcaacgccacccgcagccacagccacagccacagccccaggcatagccttcggcacagccccggctccggctcctgcgacagctcctctgggcaccgtccctgcgccgacatcctggaggttgggcgactcggaccgatg

SEQ ID NO: 10548 - DNA, 203 bp, Artificial sequence
  synthetic
ggcgcgccagtcctcagctctcgccccactgcgcatggcacgttgcgtactcccctcccagcaaccggtctggcggcggcgcggcagtaaaactgaggaggcggagccaagacggtcggggctgcttgctaactccaggaacaggtttaagtttttgaaactgaagtaggcctacacagtaggaactccgactcggaccgatg

SEQ ID NO: 10549 - DNA, 203 bp, Artificial sequence
  synthetic
ggcgcgccagtcctgaggcctcggtgcagactccggttctccccaaccccgggcctgggcagctggacactggggcgccgttccccacccggcgcggacttcggaaccggccctgggactgactggctctaccactcgagcgcgtctccgctggacccggaatcccggtcggtccattccccgcgaagcgactcggaccgatg

SEQ ID NO: 10550 - DNA, 203 bp, Artificial sequence
  synthetic
ggcgcgccagtccttactgttcggtgcagactccggttctccccaaccccgggcctgggcagctgggcactggggcgccgttccccacccggcgcggacttcggaaccggccctgggactgactggctctaccactcgagcgcgtctccgctggacccggaatcccggtcggtccattccccgcgaagcgactcggaccgatg

SEQ ID NO: 10551 - DNA, 203 bp, Artificial sequence
  synthetic
ggcgcgccagtcctggtggctctgccgccgccgctgccttttttttttctcgagctcttgagatctccggttgggattcctgcggattgacatttctgtgaagcagaagtctgggaatcgatctggaaatcctcctaatttttactccctctccccccgactgctgattcattgggaagtttcaaatccgactcggaccgatg

SEQ ID NO: 10552 - DNA, 203 bp, Artificial sequence
  synthetic
ggcgcgccagtcctagcgcctctgtggagagtcctgctgccctccagccgggctcctccaccggcccttgcaggggcgcagagagctcggcgcccgcccttccgctcgcctttttcgtcagccggctggagcagcatgggtccgggaggtctctgggctgaggcggcgacagctcctctagttccacccgactcggaccgatg

SEQ ID NO: 10553 - DNA, 203 bp, Artificial sequence
  synthetic
ggcgcgccagtcctactctttcttgggagcgccagttccgtctgtgtgttcgagtggacaaaatggcgaagatcgccaagactcacgaagatattgaagcacagattcgagaaattcaaggcaagaaggcagctcttgatgaagctcaaggagtgggcctcgattctacaggttattatgaccaggaacgactcggaccgatg

SEQ ID NO: 10554 - DNA, 203 bp, Artificial sequence
  synthetic
ggcgcgccagtcctttgtcgtcttgggagcgccagttccgtctgtgtgttcgagtggacaaaatggcgaagatcgccaagactcacgaagatattgaagcacagattcgagaaattcaaggcaagaaggcagctcttgatgaagctcaaggagtgggccttgattctacaggttattatgaccaggaacgactcggaccgatg

SEQ ID NO: 10555 - DNA, 203 bp, Artificial sequence
  synthetic
ggcgcgccagtcctgtttgttgaaaaactggagcctgttcttggcaagaagattctaatgcccaggaacatggcgctgctctgggggctcctggtgctcagctggtcctgcctgcaaggcccctgctccgtgttctcccctgtgagcgccatggagcccttgggccggcagctaactagcaggccgaacgactcggaccgatg

SEQ ID NO: 10556 - DNA, 203 bp, Artificial sequence
  synthetic
ggcgcgccagtccttcgatgtgagggctttttggagctcgctatgcttaacctggagatgattaaggccccgcttcctggcctcccagcctctaatgccaaaagataagggagaggctggcgtgtgaccccgttttgagtcaggtggacagagggctggccaccttcggaaccatgggtgcaatacggcgactcggaccgatg

SEQ ID NO: 10557 - DNA, 203 bp, Artificial sequence
  synthetic
ggcgcgccagtcctgcgtagtgaggtgtagacgccaactctccctagctcgctagtgggttgcaggaggtgcttacacatgtttgtttctttgctgccgtcttccagttgctttatctgttcacttgtgccctgactttcaactctgtctccttcctcttcctacagtactcccctgccctcaacaagcgactcggaccgatg

SEQ ID NO: 10558 - DNA, 203 bp, Artificial sequence
  synthetic
ggcgcgccagtccttggtattgaggtgtagacgccaactctctctagctcgctagtgggttgcaggaggtgcttacgcatgcttgtttctttgctgccgtcttccagttgctttatctgttcacttgtgccctgactttcaactctgtctccttcctcttcctacagtactcccctgccctcaacaagcgactcggaccgatg

SEQ ID NO: 10559 - DNA, 203 bp, Artificial sequence
  synthetic
ggcgcgccagtcctagaggatgaggtgtagacgccaactctctctagctcgctagtgggttgcaggtggtgcttacacatgtttgtttctttgctgccgtcttccagttgctttatctgttcacttgtgccctgactttcaactctgtctccttcctcttcctacagtactcccctgccctcaacaagcgactcggaccgatg

SEQ ID NO: 10560 - DNA, 203 bp, Artificial sequence
  synthetic
ggcgcgccagtcctggtcagtgagtcggagctctatggaggcggcagcgggtaccgagtggcggctgcagcagcgactcctctgagctgagtttgaggccgtccccgactccttcctcccccttccctcccccttttttttgttttccgttcccctttcccctcccttccctatccccgacgaccggacgactcggaccgatg

SEQ ID NO: 10561 - DNA, 203 bp, Artificial sequence
  synthetic
ggcgcgccagtcctgccgtctgagtcggggctctatggaggtggcagcgggtaccgagtggcggctgcagcagcgactcctctgagctgagtttgaggccgtccccgactccttcctcccccttccctcccccttttttttgttttccgttcccctttcccctcccttccctatccccgacgaccggacgactcggaccgatg

SEQ ID NO: 10562 - DNA, 203 bp, Artificial sequence
  synthetic
ggcgcgccagtcctcacggctgatccggggctcggccaagctgaggcggcggcgcccggccgtgcgcccagctttcaggcgcctggctctcacgatgatgaagaagaagaagtttaagtttaaggtggacttcgagctcgaggagctctcctcagtgcccttcgtcaatggggtcctcttctgcaagacgactcggaccgatg

SEQ ID NO: 10563 - DNA, 203 bp, Artificial sequence
  synthetic
ggcgcgccagtcctggagcgtgctcctctacctgctccaccctcaatccaccagaaccatgggctgctgtggctgctccagaggctgtggctccggctgtgggggctgtggctccagctgtgggggttgtggctctggctgtgggggctgtggctccggccgtgggggctgtggctctggctgtggggcgactcggaccgatg

SEQ ID NO: 10564 - DNA, 203 bp, Artificial sequence
  synthetic
ggcgcgccagtcctgctacttggaagcgccccagccccgcagcgatcgcagattcggctttcaaacaaaagaggcgccccggggggtgggaccgggacctcacccggtcctcgcagagttgcggccgccctccccttcagccccggctctccgtatgcgcatgagcagaggcgcctccctctgttcctcgactcggaccgatg

SEQ ID NO: 10565 - DNA, 203 bp, Artificial sequence
  synthetic
ggcgcgccagtcctgcaccctggagcctccagagggctgtcggcgcagtagcagcgagcagcagagtccgcacgctccggcgaggggcagaagagcgcgagggagcgcggggcagcagaagcgagagccgagcgcggacccagccaggacccagagccctccccagctgcccaggaagagccccagcccgactcggaccgatg

SEQ ID NO: 10566 - DNA, 203 bp, Artificial sequence
  synthetic
ggcgcgccagtcctcgacgttggcgctggcctgctgccccggcgggtccgccggccggaggcgggagtcacaggaagagccctccacaaaaggaggcctcggcggatcaggacagctgcaggcttctgccaggtgggtgtgcagactggtgagctgccagcaggggcccagacgcgccaggcctggagcgactcggaccgatg

SEQ ID NO: 10567 - DNA, 203 bp, Artificial sequence
  synthetic
ggcgcgccagtcctgcaaggtgttcagtacgccacaagcgacacaaatgaacacgccttctcagccccgccagcacttctaccctagccgggcccagcccccgagcagtgcagcctcccgagtgcagagtgcagcccctgcccgccctggcccagctgcccatgtctaccctgctggatcccaagtaacgactcggaccgatg

SEQ ID NO: 10568 - DNA, 203 bp, Artificial sequence
  synthetic
ggcgcgccagtcctcgatcctgttcagtacgccacaagcgacacaaatgaacacgccttctcagccccgccagcacttctaccctagccgggcccagcccccgagcagtgcagcctcccgagtgcagagtgcagcccctgcccgctctggcccagctgcccatgtctaccctgctggatcccaagtaacgactcggaccgatg

SEQ ID NO: 10569 - DNA, 203 bp, Artificial sequence
  synthetic
ggcgcgccagtcctcagctctgttgcctgttccactaggaatattgtttgcaaggcacaaggtgtcttttggtagtgagcgcgctctgcgcatgcgcagttccattcgggaattactgcccagcagccgactaagttgcattccttgaatcttcgcagaaaagacaattcttttaatcagagttagtacgactcggaccgatg

SEQ ID NO: 10570 - DNA, 203 bp, Artificial sequence
  synthetic
ggcgcgccagtcctgtccgctgtttcccgtcccccgcccgcgagaagtgggggtgaaaagcggcccgacctgcttgcggtgtagtggggggaccgcgcggctggaggtgtgaggatccgaacccaggggtggggggtggaggcggctcctgcgatcgaaggggacttgagactcaccggccgcacgcccgactcggaccgatg

SEQ ID NO: 10571 - DNA, 203 bp, Artificial sequence
  synthetic
ggcgcgccagtccttgggcatgtttcccgtcccccgcccgcgagaagtgggggtgaaaagcggcccgacctgcttggggtgtagtggggggaccgcgcggctggaggtgtgaggatccgaacccaggggtggggggtggaggcggctcctgcgatcgaaggggacttgagacttaccggccgcacgcccgactcggaccgatg

SEQ ID NO: 10572 - DNA, 203 bp, Artificial sequence
  synthetic
ggcgcgccagtcctggtggcttataaaaaacccagtctttgctgaccagacaaagcataccagatctcaccagagagtcctaggggactacagaaggaaaaagacaagaggcagcaggatatctgtgtgtcctcccgctgaccacacttcctttagtgacccgattgcctcctcaagtcgcagacactcgactcggaccgatg

SEQ ID NO: 10573 - DNA, 203 bp, Artificial sequence
  synthetic
ggcgcgccagtcctttgtcgttcaaagtctaactttgacagacaaccttacttccagcgaagtctactcccctccctccggagggaagaatgaatgggctgcggttaagcgtttgccctggtgtcagggccaactgcttcgaagcgccagactttcggagactgtgggtggggagcattaagcgggaacgactcggaccgatg

SEQ ID NO: 10574 - DNA, 203 bp, Artificial sequence
  synthetic
ggcgcgccagtcctgctcgattccagggccgccgtccacactctcccggtcagagtcctgggaccacatggggacgctgccatggcttcttgccttcttcattctgggtctccaggcttgggatactcccaccatcgtctcccgcaaggagtggggggcaagaccgctcgcctgcagggcactgctgacgactcggaccgatg

SEQ ID NO: 10575 - DNA, 203 bp, Artificial sequence
  synthetic
ggcgcgccagtcctgtttgtttccagggccgccgtccacactctcccggtcagagtcctgggaccacatggggacgctgccatggcttcttgccttcttcattctgggtctccaggtttgggatactcccaccatcgtctcccgcaaggagtggggggcaagaccgctcgcctgcagggccctgctgacgactcggaccgatg

SEQ ID NO: 10576 - DNA, 203 bp, Artificial sequence
  synthetic
ggcgcgccagtcctatcctattccagggctgccgtccacactctcccggtcagagtcctgggaccacatggggacgctcccatggcttcttgccttcttcattctgggtctccaggcttgggatactcccaccatcgtctcccgcaaggagtggggggcaagaccgctcgcctgcagggccctgctgacgactcggaccgatg

SEQ ID NO: 10577 - DNA, 203 bp, Artificial sequence
  synthetic
ggcgcgccagtcctatacctttccagggctgccgtccacactctcccggtcagagtcctgggaccacatggggacgctgccatggcttcttgccttcttcattctgggtctccaggcttgggatactcccaccatcgtctcccgcaaggagtggggggcaagaccgctcgcctgcagggccctgctgacgactcggaccgatg

SEQ ID NO: 10578 - DNA, 203 bp, Artificial sequence
  synthetic
ggcgcgccagtcctccataatttcttggctaagccgcgtttgtattgtgtcttaccatgcctgaaccggcaaaatccgctccggcccctaaaaagggctccaagaaagccgtcaccaaagcccagaagaaagacggcaagaagcgcaagcgcagccgcaaagagagctactccatctacgtgtacaagcgactcggaccgatg

SEQ ID NO: 10579 - DNA, 203 bp, Artificial sequence
  synthetic
ggcgcgccagtcctgcgtagtttcttggctaagccgtgtttgtactgtgtcttaccatgcctgaaccggcaaaatccgctccggcccctaaaaagggctccaagaaagccgtcaccaaagcccagaagaaagacggcaagaagcgcaagcgcagccgcaaagagagctactccatctacgtgtacaagcgactcggaccgatg

SEQ ID NO: 10580 - DNA, 203 bp, Artificial sequence
  synthetic
ggcgcgccagtccttggtattttgcgaattacacatctctttgattatgttgcgactagttttgttagatagtcatttagtgtttgggatacctgttaagccctttgtccagggactgtggttggatttatgaattatttggacggttgtccacttgaaagaactgacagtagcttcataacaatgttcgactcggaccgatg

SEQ ID NO: 10581 - DNA, 203 bp, Artificial sequence
  synthetic
ggcgcgccagtcctttgtcgaaggctctgtggaggcccagggactcctcacccagctccagcgccagcgcagcctcctagcccaccagccctttgaggagcacttggaccactgggtctcggcctaccacctgctggagtggctggtggagcagcagcagccccttcaagagtacaagggcaggcacccgactcggaccgatg

SEQ ID NO: 10582 - DNA, 203 bp, Artificial sequence
  synthetic
ggcgcgccagtcctcacttgaaggctctgtggaggcccagggactcctcacccagctccagcgccagcgcagcctcctagcccaccagccctttgaggagctcttggaccactgggtctcggcctaccacctgctggagtggctggtggagcagcagcagccccttcaagagtacaagggcaggcacccgactcggaccgatg

SEQ ID NO: 10583 - DNA, 203 bp, Artificial sequence
  synthetic
ggcgcgccagtcctgctcgaaagtgtctcccactgaaggcatccgtggttgtttttaagccacaaaaaagccacacccaagatcacctgacacccaccctgacaagtgtccatgatgctgggccctgagggaggtgaaggctttgtggtcaagctccgtggcctgccctggtcctgctctgttgaggacgactcggaccgatg

SEQ ID NO: 10584 - DNA, 203 bp, Artificial sequence
  synthetic
ggcgcgccagtccttcagctaagtgtctcccactgaaggcatccgtggttgtttttaagccacaaaaaagccacacccaagatcacctgacacccaccctgtcaagtgtccatgatgctgggccctgagggaggtgaaggctttgtggtcaagctccgtggcctgccctggtcctgctctgttgaggacgactcggaccgatg

SEQ ID NO: 10585 - DNA, 203 bp, Artificial sequence
  synthetic
ggcgcgccagtcctgtttgtaccatatttgttcgcagaggaagccgttgctttctgggatctggctacgccagaaaagacatcggctccaacaggggtgttccacagggtagctgggagttggaagagccaagaacgcctccgagctctggatttgagcttctctgcccatgggtgaagcgcccatgccgactcggaccgatg

SEQ ID NO: 10586 - DNA, 203 bp, Artificial sequence
  synthetic
ggcgcgccagtccttgattgacgaggcaggcggaagaggcgggacttcgcgggtgacgtcatcggggcgccggaggcccggggcgcctgggaatttgaagcaaacaggcagcgcgcgacaatggcggtcgctcgtgcagctttggggccattggtgacgggtctgtacgacgtgcaggctttcaagttcgactcggaccgatg

SEQ ID NO: 10587 - DNA, 203 bp, Artificial sequence
  synthetic
ggcgcgccagtcctgacacaacgtgggtgggggaagctgagcgctgagaccaagggctaaagctgggagactgaaaaaatgcagaccgccggggcattattcatttctccagctctgatccgctgttgtaccaggggtctaatcaggcctgtgtctgcctccttcttgaatagcccagtgaattcatccgactcggaccgatg

SEQ ID NO: 10588 - DNA, 203 bp, Artificial sequence
  synthetic
ggcgcgccagtccttaacaaacgtgggtgggggaagctgagggctgagaccaagggctaaagctgggagactgaaaaaatgcagaccgccggggcattattcatttctccagctctgatccgctgttgtaccaggggtctaatcaggcctgtgtctgcctccttcttgaatagcccagtgaattcatccgactcggaccgatg

SEQ ID NO: 10589 - DNA, 203 bp, Artificial sequence
  synthetic
ggcgcgccagtcctatacctactccagacaggagaggctgcgccttccccgcaccgggaccttcgcgacacaccagatcctcgcccctggctcgcgcgaacgcacaggatgaccaccaccctcgtgtctgccaccatcttcgacttgagcgaagttttatgcaagggtaacaagatgctcaactatagcgactcggaccgatg

SEQ ID NO: 10590 - DNA, 203 bp, Artificial sequence
  synthetic
ggcgcgccagtcctcgtaggactctacagctcagaacaccaactgctaaggctgccttgggaagaggatgatcctaaacaaagctctgctgctgggggccctcgctctgaccaccgtgatgagcccctgtggaggtgaagacattgtggctgaccacgttgcctcttgtggtgtaaacttgtaccagtcgactcggaccgatg

SEQ ID NO: 10591 - DNA, 203 bp, Artificial sequence
  synthetic
ggcgcgccagtcctattgtcagatgtcagcccaggagagctgcctcagcctcatcaagtcctcggcagcctgatcttctgcttcggcatctggatcctcatcgacaagaccagcttcgtgtcctttgtgggcttggccttcgtgcctctgcagatctggtccaaagtcctggccatctcaggaatcttcgactcggaccgatg

SEQ ID NO: 10592 - DNA, 203 bp, Artificial sequence
  synthetic
ggcgcgccagtcctgcgtagagctctaatgccaccatcctcacgagactctggggccccccaggctcccagacctttgagcaaccttcaccgcacagaaacccagccgcgccctgcaattcccaccgcggaaggtgccgaccaacccccaggatggcggaagctcaccaggccgtggccttccagttccgactcggaccgatg

SEQ ID NO: 10593 - DNA, 203 bp, Artificial sequence
  synthetic
ggcgcgccagtcctttcggaaggtacataagttccattaggtttgagctgtgttgactaccactgctttttccttggtctcacttacgtcttggaagatggctctgcagatccctggaggcttttgggcagcagctgtgaccgtgatgctggtgatgctgagcaccccagtggctgaggccagagactcgactcggaccgatg

SEQ ID NO: 10594 - DNA, 203 bp, Artificial sequence
  synthetic
ggcgcgccagtcctgtcgctatcctctctcttgccgttcgagagccccagtgaaacttgagtgagatgagagagcatggagcctgccagtctccccctctgcgcacacacacacgcaaacacatttaactttccacttgcagtgacctgcccttcagtgtgacttatcagctgtttggcttttgtcaccgactcggaccgatg

SEQ ID NO: 10595 - DNA, 203 bp, Artificial sequence
  synthetic
ggcgcgccagtcctccgaccatcctctctcttgccgttcgagagccccagtgaaacttgagtgagatgagagagcatggagcctgccagtctccccctctgtgcacacacacacgcaaacacatttaactttccacttgcagtgacctgcccttcagtgtgacttatcagctgtttggcttttgtcaccgactcggaccgatg

SEQ ID NO: 10596 - DNA, 203 bp, Artificial sequence
  synthetic
ggcgcgccagtccttcccagcactcctccccttacctcccttctcttctgaattctccattctgggctcttgcctgtgaaatctttctttgctttccccatcttttcctcgcattttttcaccatctttccctcaatctccaggagccaatgcgagactttggctccgattaagcgacggcccgagaccgactcggaccgatg

SEQ ID NO: 10597 - DNA, 203 bp, Artificial sequence
  synthetic
ggcgcgccagtcctaaacgccagccggcgactcctacacctggaaggtcggacagggacagcagagaagaaactagccagctgtgaaaagacagttaccgagcttgggaaccagctggagggcaagtgggccgtgctgggaaccctgctgcaggagtacgggctgctgcagaggcggctggagaacttcgactcggaccgatg

SEQ ID NO: 10598 - DNA, 203 bp, Artificial sequence
  synthetic
ggcgcgccagtcctgcaccccaggccaccaagaggcccagccctccaaaccctggatttgcaacatcctcaaagaacagcaacgggccttgagcagaattgagaaggaaatacccccacctgccctcagccgttaagtgggctttgctattcacaagggcctctgggtgtcctggcagagaggggagacgactcggaccgatg

SEQ ID NO: 10599 - DNA, 203 bp, Artificial sequence
  synthetic
ggcgcgccagtccttatcctcatcatctagataatcagaaccttggcttccacatcctcctcccttgtcttaactacaaacatttctttctgctgacttcaactcctcagacatgggaaagtctctttctcatttgcctttgcattcaagcaaagaagatgcttatgatggagtcacatctgaaaacacgactcggaccgatg

SEQ ID NO: 10600 - DNA, 203 bp, Artificial sequence
  synthetic
ggcgcgccagtcctctctcacatgaactgggaagagtagctgagccccagagcctctctggaagagaaaggaagagccagcagttctttctcccagtgtcccacctcactgtccagcgtcttcctctgcccctgctctgccctccctggctcctggactagagcccggcttccagcaggacgtttccccgactcggaccgatg

SEQ ID NO: 10601 - DNA, 203 bp, Artificial sequence
  synthetic
ggcgcgccagtccttgcgttcatgaactgggaagagtagctgagccccagagcctctctggaagagaaaggaagagccagcagttctttctcccagtgtccgacctcactgtccagcgtcttcctctgcccctgctctgccctccctggctcctggactagagcccggcttccagcaggacgtttccccgactcggaccgatg

SEQ ID NO: 10602 - DNA, 203 bp, Artificial sequence
  synthetic
ggcgcgccagtcctcgcccgcatgcgcgcttccttgcgcgagccgggctgtcgggtgtgttttgctctccagcctccgtcgtctctgcagcactccgggttctcctccagagcgctagtcccaggagctcggaatgttcgtggaacttaataacctgcttaacaccacccccgacagggcggagcaggcgactcggaccgatg

SEQ ID NO: 10603 - DNA, 203 bp, Artificial sequence
  synthetic
ggcgcgccagtcctcagctcccccttggagctctgcatctccaacctggaacccaacccagaagtctcaagtttgacgcatcacgtggcgtgcggatccaccgagggtccacagagaggggcgcccatctcctgcgtctcagttatcctggtgttgggaattctgtgccctaaagaattccgactcagcgactcggaccgatg

SEQ ID NO: 10604 - DNA, 203 bp, Artificial sequence
  synthetic
ggcgcgccagtcctcggtgaccctcggctcccacccttgtgtacctgggccgaaccattcaccggagcgcgcagcgggtggagtgtggctcggaggaccgcagcgggtcaagcacctttctcccccatatctgaaagcatgccctttgtccacgtcgtttacgctcattaaaacttccagaatgcaaccgactcggaccgatg

SEQ ID NO: 10605 - DNA, 203 bp, Artificial sequence
  synthetic
ggcgcgccagtcctcttcccccgaacctgaaaccgggagcttcctgctcgtgttcgctgttgagaagctacccgcggggttgtagacctcggacctcatggcagagataattcaggaacgcatagaagatcggctcccggaattggaacagctggagcgcattggactgttcagtcatgcggagattacgactcggaccgatg

SEQ ID NO: 10606 - DNA, 203 bp, Artificial sequence
  synthetic
ggcgcgccagtccttgggcaccgcccctccccccagctagtgagtgcgcgaacgagaaaggaggagggcgctccaggcgacagcactgcagacgccattatcctctgtttctctgctgcaccgacctcgacgtcttgcctgtgtcccacttgttcgcggcctataggctactgcagcactggggtgtccgactcggaccgatg

SEQ ID NO: 10607 - DNA, 203 bp, Artificial sequence
  synthetic
ggcgcgccagtcctgaatctccgcgacttcgatccggcgctgctggagttcctggtgtgcccgctctccaagaagccgctcagatatgaagcatcaacaaacgaattgattaatgaagagttgggaatagcttatccaatcattgatgggatccctaatatgataccacaggcagctaggatgacacgcgactcggaccgatg

SEQ ID NO: 10608 - DNA, 203 bp, Artificial sequence
  synthetic
ggcgcgccagtcctggtggcccgcgacttcgatccggcgctgctggagttcctggtgtgcccgctctccaagaagccgctcagatatgaagcatcaacaaatgaattgattaatgaagagttgggaatagcttatccaatcattgatgggatccctaatatgataccacaggcagctaggatgacacgcgactcggaccgatg

SEQ ID NO: 10609 - DNA, 203 bp, Artificial sequence
  synthetic
ggcgcgccagtcctggcgaaccgcggctctcccacctgtcaccctggcccttctctgcttggatggtgtcttcctctcctcagccgagaatgacttcgtccaccggatccaggaggaactggaccgctttctgctgcagaagcagctgtcaaaggttcttcttttccccccactctccagtcgcctcccgactcggaccgatg

SEQ ID NO: 10610 - DNA, 203 bp, Artificial sequence
  synthetic
ggcgcgccagtcctttcaccccgcggctctcccacctgtcaccctggcccttctctgcttggatggtgtcttcctctcctcagccgagaatgacttcgtccgccggatccaggaggaactggaccgctttctgctgcagaagcagctgtcaaaggttcttcttttccccccactctccagtcgcctcccgactcggaccgatg

SEQ ID NO: 10611 - DNA, 203 bp, Artificial sequence
  synthetic
ggcgcgccagtcctagttctccgcgtggtccctccccctcaggccgcggtcgcgattacgctctctacggcctgcgaccgcagggccgttgcgggctggagacacggcgccgactggaaccggaggagctctaggccaaatggttgggccagccaggatcccaggacccttcgccgctcgagaccggacgactcggaccgatg

SEQ ID NO: 10612 - DNA, 203 bp, Artificial sequence
  synthetic
ggcgcgccagtcctgctcgacctgatacataaatcagacagcctctgctgcatgacacgaagcttgcttctgcctggcatctgtgagcagctgccaggctccggccaggatcccttccttctcctcattggctgatggatcccaaggggctcctctccttgaccttcgtgctgtttctctccctggctcgactcggaccgatg

SEQ ID NO: 10613 - DNA, 203 bp, Artificial sequence
  synthetic
ggcgcgccagtccttcagctcctgatacataaatcagacagcctctgctgcatgacacgaagcttgcttctgcctggcatctgtgagcagctgccaggctctggccaggatcccttccttctcctcattggctgatggatcccaaggggctcctctccttgaccttcgtgctgtttctctccctggctcgactcggaccgatg

SEQ ID NO: 10614 - DNA, 203 bp, Artificial sequence
  synthetic
ggcgcgccagtccttcatgcccttggagcgcgcgggaaagagaccaatataaactgtggcgggatagttttcgggtccttgtccagtgaaacaccctcggccgggaagtcagttcgttctctcctctcctctcttcttgtttgaacatggtgcggactaaagcagacagtgttccaggcacttacagacgactcggaccgatg

SEQ ID NO: 10615 - DNA, 203 bp, Artificial sequence
  synthetic
ggcgcgccagtcctctggtaccttggagcgcgcgggaaagagaccaatataaactgtggcgggatagttttcgggtccttgtccagtgaaacaccctcggctgggaagtcagttcgttctctcctctcctctcttcttgtttgaacatggtgcggactaaagcagacagtgttccaggcacttacagacgactcggaccgatg

SEQ ID NO: 10616 - DNA, 203 bp, Artificial sequence
  synthetic
ggcgcgccagtccttggcgccgacagtgtcaggatcgcgggcttgctttccggtagcgtgggctgacgcctcgctcaatttctcacagggctgcgcaggtttcccccgtctgcgaatggaccactggaggggttcaaaggttcgcgtcccagtacgggaatgagcctctttgatctcttccggggcttcgactcggaccgatg

SEQ ID NO: 10617 - DNA, 203 bp, Artificial sequence
  synthetic
ggcgcgccagtccttgattgcgccgcacaggctggcactgcttgaagaggaggctactcggagactgcgccgcgcggattggaggctccccaaatattttgcgatctgaggatccagctcaagtgaggtgccataggacgtgttcctgagtttgcattgcacggagaccttcctggaatttttcatttcgactcggaccgatg

SEQ ID NO: 10618 - DNA, 203 bp, Artificial sequence
  synthetic
ggcgcgccagtcctatacctcgcgtcgagtttccggcgtccggaaggaccgagctcttctcgcggatccagtgttccgtttccagcccccaatctcagagccgagccgacagagagcagggaaccggcatggccaaagccgcggcgatcggcatcgacctgggcaccacctactcctgcgtgggggtgcgactcggaccgatg

SEQ ID NO: 10619 - DNA, 203 bp, Artificial sequence
  synthetic
ggcgcgccagtcctgtagaccgcgtcgagtttccggcgtccggaaggaccgagctcttctcgcggatccagtgttccgtttccagcccccaatctcagagcggagccgacagagagcagggaaccggcatggccaaagccgcggcgatcggcatcgacctgggcaccacctactcctgcgtgggggtgcgactcggaccgatg

SEQ ID NO: 10620 - DNA, 203 bp, Artificial sequence
  synthetic
ggcgcgccagtccttaaacgctaggtccccagatggggagactgaggccgtggctgtgtgtccctctgagagttggagcggggctgggcccgaattcgaccccagcaggattctctctcatttctgagccccggaggtggcagagcggcagacccgggcaagtgaaccctagggctgcaggagcccagcgactcggaccgatg

SEQ ID NO: 10621 - DNA, 203 bp, Artificial sequence
  synthetic
ggcgcgccagtcctccataactaggtccccagatggggagactgaggccgtggctgtgtgtccctctgagagttggagcggggctgggcccgaattcgaccgcagcaggattctctctcatttctgagccccggaggtggcagagcggcagacccgggcaagtgaaccctagggctgcaggagcccagcgactcggaccgatg

SEQ ID NO: 10622 - DNA, 203 bp, Artificial sequence
  synthetic
ggcgcgccagtcctattagactgaagccagtgaaggctctctcgcctcgccctctagcgttcgtctggagtagcgccaccccggcttcctggggacacaggtttggcaccatggggcccaccagcgtcccgctggtcaaggcccaccgcagctcggtctctgactacgtcaactatgatatcatcgtccgactcggaccgatg

SEQ ID NO: 10623 - DNA, 203 bp, Artificial sequence
  synthetic
ggcgcgccagtcctctagggctgtggtgggcgctgcgggtgtttgcaggaggttgcagtactcgctgggctgaggtcgtctcgggtgaggaggtcgcgccgaaagtggctctagccgtggcgcttcggcgtagtaaggagcctgcaacagagttttgttgtttagggggcgcggcaccgcaccgctcccgactcggaccgatg

SEQ ID NO: 10624 - DNA, 203 bp, Artificial sequence
  synthetic
ggcgcgccagtcctaatacccttcctctgcctgcccctcctcctccttccacgttgtctcctccacctagcagttggttggcaaccccttcctcagtccccggctgaaaaccctccagtcagcgcttatcccttctgctctctcccctcacccagagaaatacatggagtttgaccttaatggaaatgcgactcggaccgatg

SEQ ID NO: 10625 - DNA, 203 bp, Artificial sequence
  synthetic
ggcgcgccagtcctagaatccttgaggaccaagtttgcggccacttctgcaggcgtcccttcttagctctcgcccgcccctttctgcagcctaggcggcccaggttctcttctcttcctcgcgcgcccagccgcctcggttcccggcgaccatggtgacgatggaggagctgcgggagatggactgcacgactcggaccgatg

SEQ ID NO: 10626 - DNA, 203 bp, Artificial sequence
  synthetic
ggcgcgccagtcctacaacacttgaggaccaagtttgcggccacttctgcaggcgtcccttcttagctctcgcccgcccctttctgcagcctaggcggcccgggttctcttctcttcctcgcgcgcccagccgcctcggttcccggcgaccatggtgacgatggaggagctgcgggagatggactgcacgactcggaccgatg

SEQ ID NO: 10627 - DNA, 203 bp, Artificial sequence
  synthetic
ggcgcgccagtcctccaattcttgctttgctgttagcctgttggaccttcgagcctagctgctcgcacaggactcggccacctgcccttcctgcaccgactggccagctcaagaggtttggatatggaccttcttcaattcctggccttcctctttgtcctgcttttgtctgggatgggagccacaggcgactcggaccgatg

SEQ ID NO: 10628 - DNA, 203 bp, Artificial sequence
  synthetic
ggcgcgccagtcctggagcggaagaagcggagaaagaaatgaaagcctctcttcaggctgaaccacaaaaggccatgggatttaacttttatttatgttgggcaagactgtaagatggctgattagtaatgttgcagcttttagctgaaacaaaaattcacttttaatcaagaagaaaaaagtgtgatcgactcggaccgatg

SEQ ID NO: 10629 - DNA, 203 bp, Artificial sequence
  synthetic
ggcgcgccagtcctcattatgacctagaccatgcaacccagctgatcctacgatggaaccaaggtgccagtgagatgacaacagccctgctctggtcactccggaagctgaccagtccacacacggctgaagcttgaggagacaacagccctgctctagtcaccccagaagctgactagtctatgcaccgactcggaccgatg

SEQ ID NO: 10630 - DNA, 203 bp, Artificial sequence
  synthetic
ggcgcgccagtcctacgggtgacctagaccatgcaacccagctgatcctacgatggaaccaaggtgccagtgagatgacaacagccctgctctggtcactctggaagctgaccagtccacacacggctgaagcttgaggagacaacagccctgctctagtcaccccagaagctgactagtctatgcaccgactcggaccgatg

SEQ ID NO: 10631 - DNA, 203 bp, Artificial sequence
  synthetic
ggcgcgccagtcctggctgggagagccaggcgagcgcggactggggcggccacgccactccgccagaaggtcgccaggagcctccgcccttcaccttcctcggaaatccgccaggccacgccaagctccctgcccaacccttactgacgggggccacattttcccggcctccgcagccagaccttgaccgactcggaccgatg

SEQ ID NO: 10632 - DNA, 203 bp, Artificial sequence
  synthetic
ggcgcgccagtcctgcacccgaggcgggatggagtgatagggaagatgtttataaattcttctgtgggatcagagggcacgcctattacaaccagaaaactacaagtataacagcgaggatggatgaacaggctctattagggctaaatccaaatgctgattcagactttagacaaagggccctggcccgactcggaccgatg

SEQ ID NO: 10633 - DNA, 203 bp, Artificial sequence
  synthetic
ggcgcgccagtccttatcctgagttccgctcctctctccaaccggggtccccctccagcgaccctaaagcttcccagacttccgcttcaattcctgtccgcaccccacgcccacctcaacgtggagcgcagtggtctccgaggagcgccggagctgccccgcctgcccagcggggtcagcacttcgcacgactcggaccgatg

SEQ ID NO: 10634 - DNA, 203 bp, Artificial sequence
  synthetic
ggcgcgccagtcctaggacggagttccgctcctctctccaaccggggtccccctccagcgaccctaaagcttcccagacttccgcttcaattcctgtccgccccccacgcccacctcaacgtggagcgcagtggtctccgaggagcgccggagctgccccgcctgcccagcggggtcagcacttcgcacgactcggaccgatg

SEQ ID NO: 10635 - DNA, 203 bp, Artificial sequence
  synthetic
ggcgcgccagtccttgcgttgattctgattagttcactactgctactttccctgtggcctaggctttgcctatttccagtgggcgagctagctagatcctcgtcccttaaataagccagtgtttttaagacagaatactacttgcatagtggacaataatatcttaaagaactgagcaggatgaaaagcgactcggaccgatg

SEQ ID NO: 10636 - DNA, 203 bp, Artificial sequence
  synthetic
ggcgcgccagtcctaaggaagatttgcaaaggtttttggagaggaataaatttaatgaaagatgtacatgacttctaaaaactataagcagtgctgggtaatattaaacacatgatgttcacggaagaccagggtgtagatgacaggctgctctatgacattgtattcaagcacttcaaaagaaataacgactcggaccgatg

SEQ ID NO: 10637 - DNA, 203 bp, Artificial sequence
  synthetic
ggcgcgccagtcctatcaaggcatccttgtcgctcgtgtccttctcatgcccggcgacgcgtctttgtggtaacgccctgctgccatctcttttcttctctatgcgaggatttggactggcagtgagaataagagacaacgattcacgtctactttctaggatgacttccatgtgctccatctcgcgccgactcggaccgatg

SEQ ID NO: 10638 - DNA, 203 bp, Artificial sequence
  synthetic
ggcgcgccagtcctccgcatgcatctgcccggcccgggggcggaggcgcccattattcctttggctcctccgaagcgccgtaggggtgtttgttgttagagttggaagcttggcagttggcctcccttcttcccatggaggacgggggcttaacagcctttgaagaggaccagagatgcctttcccagcgactcggaccgatg

SEQ ID NO: 10639 - DNA, 203 bp, Artificial sequence
  synthetic
ggcgcgccagtcctcagctcgccagggcgcctgcgcggcggggttctcggtcgccagccattcctgaggaggactgccggtcgttcggacgtcttgcctgtagctggaggagaggtccgggctctccaggaaggtggctgcggcgacaaaatgaagatattcgtgggcaacgtcgacggggcggataccgactcggaccgatg

SEQ ID NO: 10640 - DNA, 203 bp, Artificial sequence
  synthetic
ggcgcgccagtcctgaggccgccatgtcggactcggcgcccagcgcccaagcgctaacccgctgaaagtttctcagcgaaatctcagggacgatctggaccccgctgagaggaactgcttttgagtgagatggtcccagaggcctggaggagcggactggtaagcaccgggagggtagtgggagttttcgactcggaccgatg

SEQ ID NO: 10641 - DNA, 203 bp, Artificial sequence
  synthetic
ggcgcgccagtcctgtccgcgccccacgctgctttcccagaaggctgtgcgtgctcctcgcttcctccgcggtctttcgagcggtcgcgtgaactgcttcctgcaggctggccatggcgcttcacgttcccaaggctccgggctttgcccagatgctcaaggagggagcgaaacacttttcaggattacgactcggaccgatg

SEQ ID NO: 10642 - DNA, 203 bp, Artificial sequence
  synthetic
ggcgcgccagtccttcggacgccgggacacgtggtacggaaccggcgccgcgcttgctgctggtaacagggccttgcctagtgggccttccttcccaggtcgcccctcagtctccactagagacaggactgaccagttgctcttccttccaagaaccttcgagatctgcggtctggggtctggttgaacgactcggaccgatg

SEQ ID NO: 10643 - DNA, 203 bp, Artificial sequence
  synthetic
ggcgcgccagtcctgaatctgcttctgtcctgcgcgcgcagattctcgcaaatctggaagcggatcgcgtggagtgacggtcacaccgcggcgaattaattcccaaagactcatgttacatgagaaagccaccaagaagaccaaagaaaaggagacaaggatggctcttcctcagggatgcttgacttcgactcggaccgatg

SEQ ID NO: 10644 - DNA, 203 bp, Artificial sequence
  synthetic
ggcgcgccagtcctagcgccggaagatatcagaaacatcctaggatcaggacaccccagatcttctcaactggaaccacgaaggctgtttcttccacacagtactttgatctccatttaagcaggcacctctgtcctgcgttccggagctgcgttcccgatggtcctcctttggctcacgctgctcctcgactcggaccgatg

SEQ ID NO: 10645 - DNA, 203 bp, Artificial sequence
  synthetic
ggcgcgccagtcctggcgaaggacacgtggtacggaaccggcgccgcgcttgctgctggtaacagggccttgcctagtgggccttccttcccaggtcgcccctcagtctccactagagacaggactgaccagttgctcttccttccaagaaccttcgagatctgcggtctggggtctggttgaaagatcgactcggaccgatg

SEQ ID NO: 10646 - DNA, 203 bp, Artificial sequence
  synthetic
ggcgcgccagtcctttcaccggacacgtggtacggaaccggcgccgcgcttgctgctggtaacagggccttgcctagtgggccttccttcccaggtcgcccgtcagtctccactagagacaggactgaccagttgctcttccttccaagaaccttcgagatctgcggtctggggtctggttgaaagatcgactcggaccgatg

SEQ ID NO: 10647 - DNA, 203 bp, Artificial sequence
  synthetic
ggcgcgccagtcctagttctggagagggagaacacagttggagaaaatcggcagctgagacggccttggccggacttagcactcaggcctgtgaatcaggaaatacaaagacctccaaaaaaggaccagttcctcggatgtgccccctcacagagagatgaaggggcagcagaaaacagctgaaacggcgactcggaccgatg

SEQ ID NO: 10648 - DNA, 203 bp, Artificial sequence
  synthetic
ggcgcgccagtcctactcttggagcagtgcggggtttaaatctgaggctaggctggctcttctcggcgtgctgcggcggaacggctgttggtttctgctggttgtaggtccttggctggtcgggcctccggtgttctgcttctccccgctgagctgctgcctggtgaagaggaagccatggcgctccgcgactcggaccgatg

SEQ ID NO: 10649 - DNA, 203 bp, Artificial sequence
  synthetic
ggcgcgccagtcctgctcgaggcaacaggcagatttgcctgctgagggtggagacccacgagccgaggcctcctgcagtgttccgcacagcaaaccgcacgctatggctgacagccgggatcccgccagcgaccagatgcagcactggaaggagcagcgggccgcgcagaaagctgatgtcctgaccacgactcggaccgatg

SEQ ID NO: 10650 - DNA, 203 bp, Artificial sequence
  synthetic
ggcgcgccagtccttcatgcggccgccgcccgctctcccggcgcggcagctgtctgggctgctgcgcgccgcctaggtgtctgggcgatctatgggcaagaacaagggccacgatgacagattacggcgaggagcagcgcaacgagctggaggccctggagtccatctaccctgactccttcacagctcgactcggaccgatg

SEQ ID NO: 10651 - DNA, 203 bp, Artificial sequence
  synthetic
ggcgcgccagtcctgacacaggcgtccgcgtccccgcgccgagctgctcgggctccctgagccccagatctgaccccttcccttcggcaacctgaacgactcccgccttccacggaagggaccgagcccgtgccaaacaggctgagcgatttgggagtgaggagccatcctaccgctttccccaacctcgactcggaccgatg

SEQ ID NO: 10652 - DNA, 203 bp, Artificial sequence
  synthetic
ggcgcgccagtcctcgtagggggcactttcgtcttagcttttggacaagacgcaggcgcaacccacggctgctgcggggatccttgtggcccttccggtcgatggaaccaatccgtgcacagagaagcggggcgaactgaggcgagtgaagtggactctgagggctaccgctaccgccactgctgcggcgactcggaccgatg

SEQ ID NO: 10653 - DNA, 203 bp, Artificial sequence
  synthetic
ggcgcgccagtcctcatgcgggtctttgcgtctggctactaccagaccgcgggttaggggcttcatctctctgcgtcctcagttgtgggaggccttggtgattcggccacagctcagcctccgtcgctctgtgacctgcgggtattggatgattggtagctaagactcccgaatacttcagaagtgggcgactcggaccgatg

SEQ ID NO: 10654 - DNA, 203 bp, Artificial sequence
  synthetic
ggcgcgccagtccttcgatggtcacttcctggagactggttgaatccggaagtgaccctagagaaatgagttgtggctgaggaccccggcggcagacgcaggttcgggaccatgagctggattccttttaagattgggcagcccaagaaacagattgtgcccaaaacagtggagagagactttgaaagcgactcggaccgatg

SEQ ID NO: 10655 - DNA, 203 bp, Artificial sequence
  synthetic
ggcgcgccagtcctgccgtctaatgaatcattgattgaccagcactattttaccagttggaatgaatgatcagaaatgggcatagtgctcttagatccaacatgtaacagatggatgttactccatgctgattacttcttcaagccagtacttttttgattgtgtaggatctttgtctcttcatctttcgactcggaccgatg

SEQ ID NO: 10656 - DNA, 203 bp, Artificial sequence
  synthetic
ggcgcgccagtcctaatacctacaccgccggaagtgtggaggtgtggctgcccgaggcggtagagcggagaaagcctattttcttttcgtttagatacattgccttttgcctaggctggcgtcgagacttgaggccgttgcagactttggcgcggctcgcgcctcctgcttcaagagcccagcggtgacgactcggaccgatg

SEQ ID NO: 10657 - DNA, 203 bp, Artificial sequence
  synthetic
ggcgcgccagtcctccaatttagggcttgaactgagagcctggcctcccagaaggttttaatagacctacggcacagaaattgacacagcccggaaaaggcccacaaagagaagcccaaccagccagcccccaggccgccccgccagggacccaccaatgaggcacagatggcagccgctgccgccctcgactcggaccgatg

SEQ ID NO: 10658 - DNA, 203 bp, Artificial sequence
  synthetic
ggcgcgccagtcctcgcaactatttcaaggcgcgcgcctcgtggtggactcaccgctagcccgcagcgctcggcttcctggtaattcttcacctcttctctcagctccctgcagcatgggtgctgggccctccttgctgctcgccgccctcctgctgcttctctccggcgacggcgccgtgcgctgcgcgactcggaccgatg

SEQ ID NO: 10659 - DNA, 203 bp, Artificial sequence
  synthetic
ggcgcgccagtcctggctggtcccgagggctggcctgagacgggactcccggttctcccgctgcgaagcagcgcggccccccggggccggggcagcggcgctggcatgtcgtctggcaccatgaagttcaatggctatttgagggtccgcatcggtgaggcagtggggctgcagcccacccgctggtccgactcggaccgatg

SEQ ID NO: 10660 - DNA, 203 bp, Artificial sequence
  synthetic
ggcgcgccagtcctacctcgtcctcttctgtctgctgtctatgagggtcatgtttcctgtgtgaaattgcttctgtcaaagggtgctgataagactgtgaagggcccagatggactgaccgcctttgaagccactgacaaccaggcaatcaaagctcttctccagtgatggatggatggactgataaccgactcggaccgatg

SEQ ID NO: 10661 - DNA, 203 bp, Artificial sequence
  synthetic
ggcgcgccagtcctaggacgtccttataaagacaaaatctttttctttcctggctgatgatttgtcattctagtcacttcctgccttgtgaccacacacccgggcttgacaaagctgttctgcagatcagaaagaaggggttcctggtcatacaccagtactaccaaggacagcttttttcctgcaagcgactcggaccgatg

SEQ ID NO: 10662 - DNA, 203 bp, Artificial sequence
  synthetic
ggcgcgccagtcctctctcatctctcgagagttctctccgcacgcgggctggagaagcgggtcctacgcacgctttgttgtcgcgctttgcctccgtccttccccctactcccgccttacctgacttccttttcggaggaagatccttgagcagccgacgttgggacaaaggatttggagaaacccagcgactcggaccgatg

SEQ ID NO: 10663 - DNA, 203 bp, Artificial sequence
  synthetic
ggcgcgccagtccttccttatcttggtggaggccagcacaggggagagggggtgcccacagatgctagaagcttaaaggctgctgggggctagcggcctcaggacataaggtttccagacaggacggggcaggtggtgatgcagctgtagctcgtgagtctgagcgggaaacagcccccgcgcagtcgcgactcggaccgatg

SEQ ID NO: 10664 - DNA, 203 bp, Artificial sequence
  synthetic
ggcgcgccagtcctgactactcttttccgtgctacctgcagaggggtccatacggcgttgttctggattcccgtcgtaacttaaagggaaactttcacaatgtccggagcccttgatgtcctgcaaatgaaggaggaggatgtccttaagttccttgcagcaggaacccacttaggtggcaccaatctcgactcggaccgatg

SEQ ID NO: 10665 - DNA, 203 bp, Artificial sequence
  synthetic
ggcgcgccagtcctccgcattcttttccgtgctacctgcagaggggtccatacggcgttgttctggattcccgtcgtaacttaaagggaaattttcacaatgtccggagcccttgatgtcctgcaaatgaaggaggaggatgtccttaagttccttgcagcaggaacccacttaggtggcaccaatctcgactcggaccgatg

SEQ ID NO: 10666 - DNA, 203 bp, Artificial sequence
  synthetic
ggcgcgccagtcctctcagttgagaccaagggctaaagctgggaggtgagtctgtcaccttgagccgggcgagcgctgtgggccaagcaggggttgcagggtagtaggagtgcagactgaaaaaatgcagaccgccggggcattattcatttctccagctctgatccgctgttgtaccaggggtctaacgactcggaccgatg

SEQ ID NO: 10667 - DNA, 203 bp, Artificial sequence
  synthetic
ggcgcgccagtcctgtccgctgccgagagagattccctgctctccaccagctctttggcgtcccatgactccaccttgtcccttgcatcctcccaggcctcggggccggccctctcgcgccatctgctgacttcctttgtctcaggcctctctgatggcatggacagcggctacgtggaggacagcgacgactcggaccgatg

SEQ ID NO: 10668 - DNA, 203 bp, Artificial sequence
  synthetic
ggcgcgccagtcctttgctttgcgcgaccggaaaattcgcgaaggttcctgaaacgcaacggatcgtttccggaagccggtagccgcctcagtcgtcagactggtgctagcgacacgggagtggcaaacgcatcctcttgccgttcccggtgtttgggccttgcctgtgacggtgggaaaagaaaatgcgactcggaccgatg

SEQ ID NO: 10669 - DNA, 203 bp, Artificial sequence
  synthetic
ggcgcgccagtcctgaatcttggaggtgggctagaggccgacgccagccagagagcgaaatgttcttttggggccagagtctgggcatatatgaatgcaaacccgtgtttgttcacaactaagcccagctgagacgatcacttttctgtaggccatttgtccaggtacagaatgagcacatgttgttgcgactcggaccgatg

SEQ ID NO: 10670 - DNA, 203 bp, Artificial sequence
  synthetic
ggcgcgccagtcctgggatatgggactttttggacacccagagaacaggtcccagataccgagtccgcaaccccaaacatcgcgattaataggaggcctctggtctctgcctgccctgggtgctcatggaaccagctgctgctctgcacttctccctgccagcctccctcctcctcctcctgctcctccgactcggaccgatg

SEQ ID NO: 10671 - DNA, 203 bp, Artificial sequence
  synthetic
ggcgcgccagtccttcatgcttgaacaaatttgatttccggagtcagtcattttactgtcaagacatttcttcggcattctgcaacagtttccaacatggccagatccatcagaaactgaagccgtggagaacgctctcggggcctttgccacttcttggagtagaagccgacagagagctgtttggacgactcggaccgatg

SEQ ID NO: 10672 - DNA, 203 bp, Artificial sequence
  synthetic
ggcgcgccagtcctatacctttttcgtggcactataaagggtgctgcacggcgcttgcatctcttcgcctctcggagctggaaatgcagctattgagatcttcgaatgctgcggagctggaggcggaggcagctggggaggtccgagcgatgtgaccaggccgccatcgctcgtctcttcctctctcccgactcggaccgatg

SEQ ID NO: 10673 - DNA, 203 bp, Artificial sequence
  synthetic
ggcgcgccagtcctctgtgaagaaaaactggagcctgttcttggcaagaagattctaatgccagaatttgaaagcgtgctctgggggctcctggtgctcagctggtcctgcctgcaaggcccctgctccgtgttctcccctgtgagcgccatggagcccttgggccggcagctaactagcgggccgaacgactcggaccgatg

SEQ ID NO: 10674 - DNA, 203 bp, Artificial sequence
  synthetic
ggcgcgccagtccttcgttataaaaaactggagcctgttcttggcaagaagattctaatgcccaggaacatggcgccctgaacaacctatctggtgctcagctggtcctgcctgcaaggcccctgctccgtgttctcccctgtgagcgccatggagcccttgggccggcagctaactagcgggccgaacgactcggaccgatg

SEQ ID NO: 10675 - DNA, 203 bp, Artificial sequence
  synthetic
ggcgcgccagtcctttgcgctcaaaaactggagcctgttcttggcaagcctgcgtcccgcgacaggaacatggcgctgctctgggggctcctggtgctcagctggtcctgcctgcaaggcccctgctccgtgttctcccctgtgagcgccatggagcccttgggccggcagctaactagcgggccgaacgactcggaccgatg

SEQ ID NO: 10676 - DNA, 203 bp, Artificial sequence
  synthetic
ggcgcgccagtcctctctctcgaaaaataataattaggcctagggaacaaatccctctcagcgaaggccgaaaagaggctagccatgccccagcacatcggttgataatgaggggggtagcaacagtggtgagttcgttggatggcttaagccctgagtacagggtagtcgtcagtggttcgacgcctcgactcggaccgatg

SEQ ID NO: 10677 - DNA, 203 bp, Artificial sequence
  synthetic
ggcgcgccagtcctacggattaaaaaataataattaggcctagggaacaaatccctctcagcgaaggccgaaaagaggctagccatgcccttagtaggactagcataatgaggggggttaatcgtcgttaatgttcgttggatggcttaagccctgagtacagggtagtcgtcagtggttcgacgcctcgactcggaccgatg

SEQ ID NO: 10678 - DNA, 203 bp, Artificial sequence
  synthetic
ggcgcgccagtcctggcagtaaaaaaattcaaattttaaaaatttccaggtctattacagagaaggcagagatcagctgtggaaaggacctggtgaactactgtggaagggagaaggacagaggccgcgtgcggtagggacagacataaaagtagtaccaagaaggaaggccaagattatcagggactcgactcggaccgatg

SEQ ID NO: 10679 - DNA, 203 bp, Artificial sequence
  synthetic
ggcgcgccagtcctcgatgcgcaaaaattcaaattttaaaaatttccaggtctattacagagggcatcacctagctctgtggaaaggacctggtgaactactgtggaagggagaaggagcagtcatagtcaaggtagggacagacataaaagtagtaccaagaaggaaggccaagattatcagggactcgactcggaccgatg

SEQ ID NO: 10680 - DNA, 203 bp, Artificial sequence
  synthetic
ggcgcgccagtccttcccacctaaaaattcaaattttaaaaatttccataagacacttgtgaaaggcagagatcagctgtggaaaggacctggtgaactactgtggaagggagaaggagcagtcatagtcaaggtagggacagacataaaagtagtaccaagaaggaaggccaagattatcagggactcgactcggaccgatg

SEQ ID NO: 10681 - DNA, 203 bp, Artificial sequence
  synthetic
ggcgcgccagtcctcggcgtgaaaaacgcgtataaattaagttacaaaaaaacatgggacaagtgaaaatgtctcttcaagggattcacctgagtgatctatcatacaagcatgctatattaaaagagtctcagtatacaataaagagagatgtaggcacaacaacagcagtgatcaagcttcatacccgactcggaccgatg

SEQ ID NO: 10682 - DNA, 203 bp, Artificial sequence
  synthetic
ggcgcgccagtcctcagggtgcaaaacgcgtataaattaagttacaaaaaaacatgggacaagtgaaaatgtctcttcaagggattcacctgagtgatctatcatacaagcatgctatattaaaagagtctcgcctgcgccggcgtagagatgtaggcacaacaacagcagtgacaccctcatcattgcgactcggaccgatg

SEQ ID NO: 10683 - DNA, 203 bp, Artificial sequence
  synthetic
ggcgcgccagtcctactatgacaaaagacgcagtcgacaagaacagtttcgactcggaagcttgcttaacgtagtgctgacagttttttattagagagcagatctctgatgaacaaccaacggaagaagacgggaaaaccgtctatcaatatgctgaaacgcgtgagaaaccgtgtgtcaactggatccgactcggaccgatg

SEQ ID NO: 10684 - DNA, 203 bp, Artificial sequence
  synthetic
ggcgcgccagtcctccttatctaaaaggagtagtaagtatgggcctaatgtgtgacctgcaggcattttgtgaaaagggtaaagtatgaaagctactctcagaaaagtacttatgtattgatgagagccttaaaatgactttatattcacaaaactgctggaagacaatgatctggggtatcacattccgactcggaccgatg

SEQ ID NO: 10685 - DNA, 203 bp, Artificial sequence
  synthetic
ggcgcgccagtcctccgaacttaaaaggagtagtggtctaatatagtctgtgtgacctgcaggcattttgtgaaaagggtaaagtatgaaagctactctcagaaaagtacttatgtatgccgatcttaggggaaatgactttatattcacaaaactgctggaagacaatgatctggggtatcacattccgactcggaccgatg

SEQ ID NO: 10686 - DNA, 203 bp, Artificial sequence
  synthetic
ggcgcgccagtcctttagttcaaaaaggagtagtggtctaatatagtctgtgtgacctgcaggcattttgtgaaaagggtaaagtatgaaagctactctcagaaaagtacttatgtattgatgagagccttaaaatgactttatatggtgtgttgctgcagaagacaatgatctggggtatcacattccgactcggaccgatg

SEQ ID NO: 10687 - DNA, 203 bp, Artificial sequence
  synthetic
ggcgcgccagtcctcgggtttgaaaattcttctggccggtggtgttcagtacgccacaagcgacacaaatgaacacgccttctcagccccgccagcacttctaccctagccgggcccagcccccgagcagtgcagcctcccgagtgcagagtgcagcccctgcccgccctggcccagctgcccatgtccgactcggaccgatg

SEQ ID NO: 10688 - DNA, 203 bp, Artificial sequence
  synthetic
ggcgcgccagtcctagtcgaggaaacaacacctcacatcaatagaaggtgaatgtgtgcgggtttaataaaaaaagaaaagaagttaagtaaaatttaaaggacacaatagagaaaatctaggtccgaaagcttgcctctcagacagatcccaaaatcatagtccaaaccccaaacacagcagcagaccgactcggaccgatg

SEQ ID NO: 10689 - DNA, 203 bp, Artificial sequence
  synthetic
ggcgcgccagtcctgcaattccaaaccaagtttaaagaaaacttaaaaaggtctcccggcccaaccaagtttaaagaaaacttaaaatcaagaaaacttaaaaccaagtttaaagaaaactcaaaatcaagaaaacttaaagccaaaataagctagaaaactaaaagacatcatggcagtcccacaaccgactcggaccgatg

SEQ ID NO: 10690 - DNA, 203 bp, Artificial sequence
  synthetic
ggcgcgccagtcctccttcctaaaaccaagtttaaagaaaacttaaaatcaagaaaacttaatgatctaagcgtgaaaaacttaaaatcaagaaaacttaaaaccaagtttaaagaaaactcaaaatcaagaaaacttaaagccaaaataagctagaaaactaaaagacatcatggcagtcccacaaccgactcggaccgatg

SEQ ID NO: 10691 - DNA, 203 bp, Artificial sequence
  synthetic
ggcgcgccagtcctcgagcccgaaacccatctggagcctcagatcatcccaagtcattgttcatcagatctagtactcaaataagttaataaaaatatccacatggggcaaataatcattggaggaaatccaactaatcacaatatctgtcaacatagacgttggcgatgtagtggcaaaatcaaccacgactcggaccgatg

SEQ ID NO: 10692 - DNA, 203 bp, Artificial sequence
  synthetic
ggcgcgccagtcctgcttgaggaaacccatctggagcctcagatcatcccaagtcattgttcccagccggatccggtcaaataagttaataaaaatatccacatggggcaaataatcattggaggaaatccaactaatcacaatatctgtcaacatagacaagtcaacacgccaggcaaaatcaaccacgactcggaccgatg

SEQ ID NO: 10693 - DNA, 203 bp, Artificial sequence
  synthetic
ggcgcgccagtcctcacatgtaaaacccatctggagcctcagatcatcgatgtagtaaaccgatcagatctagtactcaaataagttaataaaaatatccacatggggcaaataatcattggaggaaatccaactaatcacaatatctgtcaacatagacaagtcaacacgccaggcaaaatcaaccacgactcggaccgatg

SEQ ID NO: 10694 - DNA, 203 bp, Artificial sequence
  synthetic
ggcgcgccagtccttccacgtgaaacccatctggtatacggctatgaaccaagtcattgttcatcagatctagtactcaaataagttaataaaaatatccacatggggcaaataatcattggaggaaatccaactaatcacaatatctgtcaacatagacaagtcaacacgccaggcaaaatcaaccacgactcggaccgatg

SEQ ID NO: 10695 - DNA, 203 bp, Artificial sequence
  synthetic
ggcgcgccagtcctcccttcgtaaacctttagcacgtgacgcggtgcctggcgccgagcctcccaagatggcggtgtgcatcgcggtgattgccaaggagaatcctaatgtctacattcgcagcacccctacggagaacgagctgaagttccactacatggtgcacacatctctggacgtggtggatgcgactcggaccgatg

SEQ ID NO: 10696 - DNA, 203 bp, Artificial sequence
  synthetic
ggcgcgccagtcctgcctaagcaaacctttagcacgtgacgcggtgcctggcgccgagcctcccaagatggcggtgtgcatcgcggtgattgccaaggagaattaccccctctacattcgcagcacccctacggagaacgagctgaagttccactacatggtgcacacatctctggacgtggtggatgcgactcggaccgatg

SEQ ID NO: 10697 - DNA, 203 bp, Artificial sequence
  synthetic
ggcgcgccagtcctacggttataaacggagggacgcagttccacttatagctccctgggtggtctaagtcctgagtacaggacagtcgtcagtagttcgacgtgagcagaagcccacctcgagatgctacgtggacgagggcatgccaagacacaccttaaccctagcgggggtcgctagggtgaaatcgactcggaccgatg

SEQ ID NO: 10698 - DNA, 203 bp, Artificial sequence
  synthetic
ggcgcgccagtccttgctcaaaaaacggagggactagccatagtggcgagctccctgggtggatctttaaacccacacaggacagtcgtcagtagttcgacgtgagcagaagcccacctcgagatgctacgtggacgagggcatgccaagacacaccttaaccctagcgggggtcgctagggtgaaatcgactcggaccgatg

SEQ ID NO: 10699 - DNA, 203 bp, Artificial sequence
  synthetic
ggcgcgccagtcctgcgatgcaaaacggagggactagccatagtggcgagctccctgggtggtctaagtcctgagtacaggacagtcgtcagtagttcgacgtgagcagaagcccacctcgagatgctacgtggacgagggcatgccaagacacaccttaaccctagcgggggtgagcccccaaggcccgactcggaccgatg

SEQ ID NO: 10700 - DNA, 203 bp, Artificial sequence
  synthetic
ggcgcgccagtcctccaaccagaaacggagggactagccatagtggcgagctccctgggtggtctaagtcctgagtacaggacagtcgtcagtagttcgacgtgtaggccccatggagtcgagatgctacgtggacgagggcatgccaagacacaccttaaccctagcgggggtcgctagggtgaaatcgactcggaccgatg

SEQ ID NO: 10701 - DNA, 203 bp, Artificial sequence
  synthetic
ggcgcgccagtcctaggccaagaaacggagggactagccatagtggcgagctccctgggtggtctaagtcctgagtacaggacagtcgtctccctcggagacatagcagaagcccacctcgagatgctacgtggacgagggcatgccaagacacaccttaaccctagcgggggtcgctagggtgaaatcgactcggaccgatg

SEQ ID NO: 10702 - DNA, 203 bp, Artificial sequence
  synthetic
ggcgcgccagtcctcgttctacaaacggagggactagccatagtggcgtcgctagcataacttctaagtcctgagtacaggacagtcgtcagtagttcgacgtgagcagaagcccacctcgagatgctacgtggacgagggcatgccaagacacaccttaaccctagcgggggtcgctagggtgaaatcgactcggaccgatg

SEQ ID NO: 10703 - DNA, 203 bp, Artificial sequence
  synthetic
ggcgcgccagtcctgtcgatccaaacgtgcctttttagataagttagatgttaatagtggttcgcgcaacacgccgaagtctaaagttggtaactatcgtttaccgtctagtaaacctagtggtatggatactgccttgttaagagcttaaatctaaactattaggatgtcttatactcccggtcattcgactcggaccgatg

SEQ ID NO: 10704 - DNA, 203 bp, Artificial sequence
  synthetic
ggcgcgccagtcctgagtacctaaacgtgcctttttagataagttagatgttaatagtggttttgctgtttttgttaagtctaaagttggtaactatcgtttaccgtctagtaaacctagtggtatggatactgccttgttaagagcttaaatctaaactccatactctaggactactcccggtcattcgactcggaccgatg

SEQ ID NO: 10705 - DNA, 203 bp, Artificial sequence
  synthetic
ggcgcgccagtcctttcgctttaaactacggattgtgctttttcttgtccaatgggagccggctcccgggcgcgaaggggcggggaggaaaggaacgactgtgctacgttgccagaaggggcgggacctgcaacgtccgacagaacgaggggacgtaacggaggcaggttggagccgctgccgtcgcccgactcggaccgatg

SEQ ID NO: 10706 - DNA, 203 bp, Artificial sequence
  synthetic
ggcgcgccagtcctacgtcaggaaagcgccgagccgaaactcggcggctgagcgtggaggttcttgtctcccctggtttgtgaagtgcggaaaaccagaggcgcagtcatgtcgggattcgacgatcctggcattttctacagcgacagcttcgggggcgacgcccaggccgacgaggggcaggcccgcgactcggaccgatg

SEQ ID NO: 10707 - DNA, 203 bp, Artificial sequence
  synthetic
ggcgcgccagtcctacctatgaaaaggcccagggaggctgaatgaatgtatttcaccagtagcaaatgagatgaaccatcttcctgcacacagccacgatttgcaaaggtttttggagaggaataaatttaatgaaagatgtacatacagcaggcgcgacataagcagtgctgggtaaaattaaacaccgactcggaccgatg

SEQ ID NO: 10708 - DNA, 203 bp, Artificial sequence
  synthetic
ggcgcgccagtcctttacaatgaaaggcccaggggtaggcttaacgcctatttcaccagtagcaaatgagatgaaccatcttcctgcacacagccacgatttgcaaaggtttttggagaggaataaatttaatgaaagatgtacatgacttctaaaaactataagcagtgctgggtaaaattaaacaccgactcggaccgatg

SEQ ID NO: 10709 - DNA, 203 bp, Artificial sequence
  synthetic
ggcgcgccagtcctgtaccgttaaagtattccacgacaaaaccaaattcacgcattatctctccacgaatccagcccttcaaaggataataacagaaaaaaaccaatacaagaacgggaacaacgccctagaaaaaacaagaaggtgcggtgatgctttccctaaaagaagacagccacaagaacagacgactcggaccgatg

SEQ ID NO: 10710 - DNA, 203 bp, Artificial sequence
  synthetic
ggcgcgccagtccttcgtagccaaagtattccacgacaaaaccaaattggattccctcactaccacgaatccagcccttcaaaggataataacagaaaaaaaccaatacaagaacgggaacaacgccctagaaaaaacaagaaggtaatccctcaacaaacctaaaagaagacagccacaagaacagacgactcggaccgatg

SEQ ID NO: 10711 - DNA, 203 bp, Artificial sequence
  synthetic
ggcgcgccagtccttgggctcgaaatcaaaagataataacaattggctctgtctctctcaccattgcaacagtatgcttcctcatgcagattgccatcctggtaactactgtgacattgcattttaagcaacatgagtgcgactcccccgcgagcaaccattagggctgcctcaaaccaataataatacgactcggaccgatg

SEQ ID NO: 10712 - DNA, 203 bp, Artificial sequence
  synthetic
ggcgcgccagtcctcttataccaaatgaaaagagcaggctagcgtttggactgttttgtttttggcggaactaccgggcaggaagattgcacaagtcagggggcgtttccaatcgggtgtcaattttggatctccccccccccacccccctttggatcttgtcgggctttccacgtttcacttaaaaacgactcggaccgatg

SEQ ID NO: 10713 - DNA, 203 bp, Artificial sequence
  synthetic
ggcgcgccagtcctccgcaggtaaatgcgtacaacaaacttgcgtaaaccaaaaaaatggggcaaataagaatttgataagtaccacttaaatttaactcccttggttagagatgggcagcaattcattgagtatgataaaagttatgcacgcttgaccctttgacaatgatgaagtagcattgttaacgactcggaccgatg

SEQ ID NO: 10714 - DNA, 203 bp, Artificial sequence
  synthetic
ggcgcgccagtccttggttcaaaaatgcgtacaacaaacttgcgtaaagtgttgttgaacaccaaataagaatttgataagtaccacttaaatttaactcccttggttagagatgggcagcaattcattgagtatgataaaagttagattacaaaatttgtttgacaatgatgaagtagcattgttaacgactcggaccgatg

SEQ ID NO: 10715 - DNA, 203 bp, Artificial sequence
  synthetic
ggcgcgccagtcctcacgcctcaaatgcgtacaatcggtgaataagctccaaaaaaatggggcaaataagaatttgataagtaccacttaaatttaactcccttggttagagatgggcagcaattcattgagtatgataaaagttagattacaaaatttgtttgacaatgatgaagtagcattgttaacgactcggaccgatg

SEQ ID NO: 10716 - DNA, 203 bp, Artificial sequence
  synthetic
ggcgcgccagtcctgtcgcagcaaatgcgtactacaaacttgcacattcggaaaaaatggggcaaataagaatttgataagtgctatttaagtctaaccttttcaatcagaaatggggtgcaattcactgagcatgataaaggttagattacaaaatttatttgacaatgacgattagcacgaaagcgcgactcggaccgatg

SEQ ID NO: 10717 - DNA, 203 bp, Artificial sequence
  synthetic
ggcgcgccagtcctattcagggaaatgcttctctagataatgcttaaaggaccctgcagcagttcttggtattggacatagcatctcagcacaccgtcttaatcccgtgactaccagatttgactcatttgtgattccttcgagaatctcccatgatttgcaatggttacatgaatgtttgggaaggacgactcggaccgatg

SEQ ID NO: 10718 - DNA, 203 bp, Artificial sequence
  synthetic
ggcgcgccagtccttctagttgaaatgttaggagccggctcctgcgtcgctccggaagcctgcgagttccggaagccttggtaatccagattcggctaggaaaagacaagctttccagagaatgtttcagagaaagttacgtggagcgtgggcgtttcgcagactcctaagagaccttcagagaagaccgactcggaccgatg

SEQ ID NO: 10719 - DNA, 203 bp, Artificial sequence
  synthetic
ggcgcgccagtcctcaactgacaaattccagttgttagtcgaatccaacaagctgagtaaaagggatttcaggcctttgaatcgctatacatcttgctaaccgaacctctccactcagtccctctagacaataaagtccgagatgtcctaaagtcaacatgaaaaaaacaggcaacaccactgataaacgactcggaccgatg

SEQ ID NO: 10720 - DNA, 203 bp, Artificial sequence
  synthetic
ggcgcgccagtccttgagcgtgaaattccagttgttagtcgaatccaacaagctgagtaaaatcatgcaagatgacttgaatcgctatacatcttgctaaccgaacctctccactcagtccctctagacaataaagtccgagatgtcctaaagtcaacatgaaaaaaacaggcaacaccactgataaacgactcggaccgatg

SEQ ID NO: 10721 - DNA, 203 bp, Artificial sequence
  synthetic
ggcgcgccagtcctgactaataaaattctgatgcagaacgtatcagtgaaactccctcccactgtctcttgtattagcatcaaggaagcgagaaaaaataagcaccctgagaatggagacagtgtttgaagagatggatgaagaaagcacaggaggagttaggcggattttttcagaaatagtccttgcgactcggaccgatg

SEQ ID NO: 10722 - DNA, 203 bp, Artificial sequence
  synthetic
ggcgcgccagtccttttcgtccaaattctgatgcagaacgtatcagtgaaactccctcccactgtctcttgtattagcatcaaggaagcgagaaaaaataagcaccctgagaatggagacagtgtttgaagagatggatgaagaaagcacaggaggagtttcatcttcgaaagaagaaatagtccttgcgactcggaccgatg

SEQ ID NO: 10723 - DNA, 203 bp, Artificial sequence
  synthetic
ggcgcgccagtcctatcctaagaaattctgatgcagaacgtatcagtgaaactccctcccactgtctcttgtattagcatcaaggaagcgagaaaaaataagcaccctgagaatggagacagtgtttgaagagatggatgaagaaagcacaggaggagtttcatcttcgaaagatccccacaggtgcacgactcggaccgatg

SEQ ID NO: 10724 - DNA, 203 bp, Artificial sequence
  synthetic
ggcgcgccagtcctcctcgcaaaacaaagaagtacttccctatccccgacgaccggatcctgaggaggcagctgcggtggcagctgctgagttctcggtgaaggtatttcatttctcctgtcccctcccctccccaccccatctattaatattattcttttgaagattcttcgttgtcaagccgccaacgactcggaccgatg

SEQ ID NO: 10725 - DNA, 203 bp, Artificial sequence
  synthetic
ggcgcgccagtccttagtttctaacaacatagattcaagacttgattgatgcaattcaaaattttctacaacatctaggtattactgatgatatatacacaatatatatattagtgtcataacactcaatcctaatgcttaccacatcatcaaactattaactcaaacaattcaagccatgggacaaacgactcggaccgatg

SEQ ID NO: 10726 - DNA, 203 bp, Artificial sequence
  synthetic
ggcgcgccagtcctggccaaataacaagggatgtcagcaagctacacaaagtatagatatttccaatgcgacggggaagctatatttacacatttcaagagagggtgcacttgctggggggaggacatgggccgggaaggattggaagaccaaggacctccccctcctccccctccaggtctagtctacgactcggaccgatg

SEQ ID NO: 10727 - DNA, 203 bp, Artificial sequence
  synthetic
ggcgcgccagtcctaccgcacaaacaagggatgtcagcaagctacacaaagtatagatatttgtgcctaatgcaaaaagctatatttacacatttcaagagagggtgcacttgctggggggaggacatgggccgggaaggattggagttatcgtacaggacccctcctccccctccaggtctagtctacgactcggaccgatg

SEQ ID NO: 10728 - DNA, 203 bp, Artificial sequence
  synthetic
ggcgcgccagtcctcttgacagaacaagggatgttgcggcatccatataagtatagatatttgtgcctaatgcaaaaagctatatttacacatttcaagagagggtgcacttgctggggggaggacatgggccgggaaggattggaagaccaaggacctccccctcctccccctccaggtctagtctacgactcggaccgatg

SEQ ID NO: 10729 - DNA, 203 bp, Artificial sequence
  synthetic
ggcgcgccagtcctcccggaacaaccgcgtctccttagcttgccttaagcagtctttatatcttctgtatattattttaaagtttataggagcaaagttcgctttactcgcaatagctattttatttattttaggaatattatcacctcgtaattatttaattataacattagctttatctatttatacgactcggaccgatg

SEQ ID NO: 10730 - DNA, 203 bp, Artificial sequence
  synthetic
ggcgcgccagtcctgcgcaacgaaccggtacctaatgtgtatgtgtatatatgtatgtgtgtgtatgtatatgtgtgtgtatgtgtatgtgtgtgtgtatgtgtgtgtgtatgtatgtatgtatgtatatgtattatacacatatacacatattggtttttttaatcatttgagagttagttgaagatcgactcggaccgatg

SEQ ID NO: 10731 - DNA, 203 bp, Artificial sequence
  synthetic
ggcgcgccagtcctaaggcatgaaccttcggggacctcccacctgcattgctctacaatctgtggcctcagcccttgccaactctgcctcttcccccgctgactgggcctctgcagagatgtgggcagctggtcaggatggccattcgggctcagcacagcaacgcagcccagactcagactggggaacgactcggaccgatg

SEQ ID NO: 10732 - DNA, 203 bp, Artificial sequence
  synthetic
ggcgcgccagtcctgtggcttaaacgctactgcactgcctcccctctcctgtattgaaagcgtttgtgttcatcttatcagggacctgaccctaagagaatccttcccctgccaaggcagttccagcccccagaactcatcaccccatctcctgaggtggttcctatcctccctctcttctcctcgcccgactcggaccgatg

SEQ ID NO: 10733 - DNA, 203 bp, Artificial sequence
  synthetic
ggcgcgccagtcctcgtgcagtaacggcgagggatctcagcaaactgtacaaaaccaaatctctttttgattttcaaggaaactaggttcctgccaaattttgaatctggacaataaacagacactttgtcctagcatctttctggaatcatttcgggatattttccacaagcaacacagaaacaggacgactcggaccgatg

SEQ ID NO: 10734 - DNA, 203 bp, Artificial sequence
  synthetic
ggcgcgccagtcctcgcaaagcaacggtcactctgaaaacagggtgggagagctgcctctctttgaacctctcccactctagtggactgaccagggaggcaaacttggtcgatgtaagcggtggcttggagacagaatcatctaatggaaaagatacactagaaggtgctggggatacatcagaggtgcgactcggaccgatg

SEQ ID NO: 10735 - DNA, 203 bp, Artificial sequence
  synthetic
ggcgcgccagtccttccaatttaacggtcactctgaaaacagggtgggagagctgcctctctttgaacctctcccaggaccaactctaacccagggaggcaaacttggtcgatgtaagcggtggcttggagaacctcagtcagtcaggaaaagatacactagaaggtgctggggatacatcagaggtgcgactcggaccgatg

SEQ ID NO: 10736 - DNA, 203 bp, Artificial sequence
  synthetic
ggcgcgccagtcctttatttataacggtcactctgaaaacagggtgggagagctgcctctctttgaacctctcccaggaccaactctaacccagggaggcaaacttggtcgatgtaagcggtggcttggagaagagtagcaaactcggaaaagatacactagaaggtgctggggatacatcagaggtgcgactcggaccgatg

SEQ ID NO: 10737 - DNA, 203 bp, Artificial sequence
  synthetic
ggcgcgccagtccttatctcgcaacggtcactctgaaaacagggtgggagagctgcctctctttgaacctctcccaggaccaactctaacccagggaggcaaacttggtcgatgtaagcggtggcttggagacagaatcatctaatggaaaagatacactgcgccaccagtcacatacatcagaggtgcgactcggaccgatg

SEQ ID NO: 10738 - DNA, 203 bp, Artificial sequence
  synthetic
ggcgcgccagtcctgaccatgtaacggtcactctgaaaacagggtgggagagctgcctctctttgaacctctcccaggaccaactctaacggtcctcaagtccattggtcgatgtaagcggtggcttggagacagaatcatctaatggaaaagatacactagaaggtgctggggatacatcagaggtgcgactcggaccgatg

SEQ ID NO: 10739 - DNA, 203 bp, Artificial sequence
  synthetic
ggcgcgccagtcctgccgcgggaacggtcactctgaaaacagggtggggattgcttagtatcttgaacctctcccaggaccaactctaacccagggaggcaaacttggtcgatgtaagcggtggcttggagacagaatcatctaatggaaaagatacactagaaggtgctggggatacatcagaggtgcgactcggaccgatg

SEQ ID NO: 10740 - DNA, 203 bp, Artificial sequence
  synthetic
ggcgcgccagtccttcgccaataactattatctcgcctgcacgcccgcctcgcgtcccgggggggtcccgcctcccaccccgcctctggacttgtctctttccccgcgcgcgcggacagagccggcgtttaggcccgagcgagcccgggggccgccggccgggaagacaacgcgggcaccgattcgcccgactcggaccgatg

SEQ ID NO: 10741 - DNA, 203 bp, Artificial sequence
  synthetic
ggcgcgccagtccttcacccgcaactcgaccgaggcagtcctgcagttgcagtcgtgttctccgagttcctgtctctctgccaacgccgcccggatggcttcccaaaaccgcgacccagccgccactagcgtcgccgccgcccgtaaaggagctgagccgagcgggggcgccgcccggggtccggtggcgactcggaccgatg

SEQ ID NO: 10742 - DNA, 203 bp, Artificial sequence
  synthetic
ggcgcgccagtcctgtactttgaagaacaaaagcaaaaacaaaaacaagaacaaaaaagggaagaaaaacaaaagtatacacaaaaaccaaaaaagaaaaaaggccagagacaaaaacggaggcaagaacaaaaatttaaacaaaaacagaatttaaattcataataaacaccaagatagagacaaaacgactcggaccgatg

SEQ ID NO: 10743 - DNA, 203 bp, Artificial sequence
  synthetic
ggcgcgccagtcctgcagcctgaagaacaaaagcaaaaacaaaaacaagaacaaaaaagggactctttcagggtaaatacacaaaaaccaaaaaagaaaaaaggccagagacaaaaacggaggcaagaacaaaaatttaaacaaaaacagaatttaaattcataataaacaccaagatagagacaaaacgactcggaccgatg

SEQ ID NO: 10744 - DNA, 203 bp, Artificial sequence
  synthetic
ggcgcgccagtcctgtgatctcaagacaaaaaccattcaacgccggagacgacttgtcttaacagtggatgcattgagtggattgactgtcagggctgtctttaggcttaattccagacctctctgtgcttagggcaaacatcatttggccttaaatgggattctgtgagaggggatccctccattgacgactcggaccgatg

SEQ ID NO: 10745 - DNA, 203 bp, Artificial sequence
  synthetic
ggcgcgccagtcctgcccgtgaaagacaaaaaccattcaacgccggaggactgactctcatccagtggatgcattgagtggattgactgtacatctaaagcgggggcttaattccagacctctctgtgcttagggcaaacatcatttggccttaaatgggattctgtgagaggggatccctccattgacgactcggaccgatg

SEQ ID NO: 10746 - DNA, 203 bp, Artificial sequence
  synthetic
ggcgcgccagtcctgcgtgtaaaagacaaaaaccattcaacgccggaggactgactctcatccagtggatgcattgagtggattgactgtcagggctgtctttaggcttaattccagacctctctgtgcttattaacctgccgccgtggccttaaatgggattctgtgagaggggatccctccattgacgactcggaccgatg

SEQ ID NO: 10747 - DNA, 203 bp, Artificial sequence
  synthetic
ggcgcgccagtcctctcgttgtaagacaaaaaccattcaacgccggaggactgactctcatcggacttgatatgatagtggattgactgtcagggctgtctttaggcttaattccagacctctctgtgcttagggcaaacatcatttggccttaaatgggattctgtgagaggggatccctccattgacgactcggaccgatg

SEQ ID NO: 10748 - DNA, 203 bp, Artificial sequence
  synthetic
ggcgcgccagtccttcagaagaaagacaaaaacccaagtcgcatcctagactgactctcatccagtggatgcattgagtggattgactgtcagggctgtctttaggcttaattccagacctctctgtgcttagggcaaacatcatttggccttaaatgggattctgtgagaggggatccctccattgacgactcggaccgatg

SEQ ID NO: 10749 - DNA, 203 bp, Artificial sequence
  synthetic
ggcgcgccagtcctatcttagcaagatgcggcatatcattctcaaattcttaggacggtcgggccctggaaggaacgctctcggaattggccgcggaaaccgatctgcccgttgtgtttgtgaaacagagaaagataggcggccatggtccaaccttgaaggaggcagcccaatatggcaagaaggtgcgactcggaccgatg

SEQ ID NO: 10750 - DNA, 203 bp, Artificial sequence
  synthetic
ggcgcgccagtcctctgtgggcaagattgcgtggccgaccgaatcgtgtgaattcccagcgctttggcttctctgagttggggttgtgtataggggtcttcgaacagttccggaaccagccagcagcctttaattcttgggcggaccacggccggttctgtgttcttggctaagatgagcagccaccacgactcggaccgatg

SEQ ID NO: 10751 - DNA, 203 bp, Artificial sequence
  synthetic
ggcgcgccagtccttggactgaaagattgcgtgggttctgcctaaagccatgacaagcctcttttggcttctctgagttggggttgtgtataggggtcttcgaacagttccggaaccagccagcagcctttaattcttgggcggaccacggccggttctgtgttcttggctaagatgagcagccaccacgactcggaccgatg

SEQ ID NO: 10752 - DNA, 203 bp, Artificial sequence
  synthetic
ggcgcgccagtccttctaacgaaagattgcgtgggttctgcctaaagctgaattcccagcgctttggcttctctgagttggggttgtgtactctatggggactgcagttccggaaccagccagcagcctttaattcttgggcggaccacggccggttctgtgttcttggctaagatgagcagccaccacgactcggaccgatg

SEQ ID NO: 10753 - DNA, 203 bp, Artificial sequence
  synthetic
ggcgcgccagtcctgcagattcaagattgcgtgggttctgcctaaagctgaattcccagcgctttggcttctctgagttggggttgtgtataggggtcttcgaacagttccggaaccagccagcagcctttaattcttgggcggacattaattctgcgaatgttcttggctaagatgagcagccaccacgactcggaccgatg

SEQ ID NO: 10754 - DNA, 203 bp, Artificial sequence
  synthetic
ggcgcgccagtcctggctttcaaagattgcgtgggttctgcctaaagctgaattcccagcgctttggcttctctgagttggggttgtgtataggggtcttcgaacagttccggaaccagccagcagcctttaattcttgggcggaccacggccggttctgtgttcttggctaagatgagcagccaccacgactcggaccgatg

SEQ ID NO: 10755 - DNA, 203 bp, Artificial sequence
  synthetic
ggcgcgccagtcctgctctataaagattgcgtgggttctgcctaaagctgaattcccagcgctttggcttctctgagttggggttgtgtataggggtcttcgaacagttccggaaccagccagcagcctttacacgactttttcgacacggccggttctgtgttcttggctaagatgagcagccaccacgactcggaccgatg

SEQ ID NO: 10756 - DNA, 203 bp, Artificial sequence
  synthetic
ggcgcgccagtcctggcggtgtaagattgcgtgggttctgcctaaagctgaattcccagcgctttggcttctctgagttggggttgtgtataggggtcttcgaagtcagttcctcgtcgccagcagcctttaattcttgggcggaccacggccggttctgtgttcttggctaagatgagcagccaccacgactcggaccgatg

SEQ ID NO: 10757 - DNA, 203 bp, Artificial sequence
  synthetic
ggcgcgccagtccttgcgtatcaagatttcatttgccaaccgctccgctgcgcgcaggctgggctgcaggctctcggctgcagcgctgggtgtcttcaggcctatggagagcagcttgcgtgggctgggcctgcagtacctggtttgcatagatgattggcaggtggatctaggatccggcttccaaccgactcggaccgatg

SEQ ID NO: 10758 - DNA, 203 bp, Artificial sequence
  synthetic
ggcgcgccagtcctaaatttagaagcaattactcaaaaacggagaaaacatcagctgatgcgtgccctactctcccacccctttatatagttccttcagtatttacttgaggcagacaggaagacttctgaagaacaaatcagcctggtcaccagcttttcggaacagcagagagttcacactagaagcgactcggaccgatg

SEQ ID NO: 10759 - DNA, 203 bp, Artificial sequence
  synthetic
ggcgcgccagtcctactaatcgaagcaattactcaaaaacggagaaaacatcagctgatgcgtgccctactctcccacccctttatatagttccttcagtatttacttgaggcagacaggaagacttctgaagaacaaatcagcctggtcaccagcttttgcccttgagtagatcacagagggcagtccgactcggaccgatg

SEQ ID NO: 10760 - DNA, 203 bp, Artificial sequence
  synthetic
ggcgcgccagtcctgcgttaccaagcccaacacgacgcatcagatgaccaattcagttcactggtgcaatgagggtattggggctttttgaacgtgggaataacttgaatttcgcagatacctacgtatatacatggaaccaacagtactcgtatcatgaaaatgcattcctaatttcaaatcaagtacgactcggaccgatg

SEQ ID NO: 10761 - DNA, 203 bp, Artificial sequence
  synthetic
ggcgcgccagtcctccatgtttaagcccaacacgcaatgcgtttattgcaattcagttcactggtgcaatgagggtattggggctttttgaacgtgggaataacttgaatttcgcagagttgcttcaggtatcatggaaccaacagtactcgtatcatgaaaatgcattcctaatttcaaatcaagtacgactcggaccgatg

SEQ ID NO: 10762 - DNA, 203 bp, Artificial sequence
  synthetic
ggcgcgccagtcctaagtctgaaagcccaacacgcaatgcgtttattgcaattcagttcactggtgcaatgagggtattggggctttttgaacgtgggaataacttgaatttcgcagatacctacgtatatacatggaaccaacagggtgacatagcctcaaatgcattcctaatttcaaatcaagtacgactcggaccgatg

SEQ ID NO: 10763 - DNA, 203 bp, Artificial sequence
  synthetic
ggcgcgccagtcctagtctacaaagcccaacacgcaatgcgtttattgcaattcagttcactggtgcaatgagggtattggggctttttgaacgtgggaataacttgaatttcgcagatacctacgtatatacatggaaccaacagtactcgtatcatgaaaatgcattcctaatttcaaatcaagtacgactcggaccgatg

SEQ ID NO: 10764 - DNA, 203 bp, Artificial sequence
  synthetic
ggcgcgccagtcctactgccctaagcccaacacgcaatgcgtttattgcaattcagttcactggtgcaatgagggtattggggctttttgaacgtgggaataacttgaatttcgcagatacctacgtatatacatggaaccaacagtactcgtatcatgactcctggagagcggtttcaaatcaagtacgactcggaccgatg

SEQ ID NO: 10765 - DNA, 203 bp, Artificial sequence
  synthetic
ggcgcgccagtcctaaggagcgaagcccaacacgcaatgcgtttattgtttgaagtggggtaggtgcaatgagggtattggggctttttgaacgtgggaataacttgaatttcgcagatacctacgtatatacatggaaccaacagtactcgtatcatgaaaatgcattcctaatttcaaatcaagtacgactcggaccgatg

SEQ ID NO: 10766 - DNA, 203 bp, Artificial sequence
  synthetic
ggcgcgccagtcctggacccataagcccacctcgagatgctacgtggaacgacaatgagacggacacaccttaaccctagcgggggtcgctagggtgaaatcacaccacgtgatgggagtacgacctgatagggcgctgcagaggcccactattaggctagtataaaaatctctgctgtacatggcaccgactcggaccgatg

SEQ ID NO: 10767 - DNA, 203 bp, Artificial sequence
  synthetic
ggcgcgccagtcctgtcattctaagcccacctcgagatgctacgtggacgagggcatgccaagacacaccttaaccctagcgggggtcgccttctaccgtggggaccacgtgatgggagtacgacctgatagggcgctgcagaggcccactattaggctagtataaaaatctctgctgtacatggcaccgactcggaccgatg

SEQ ID NO: 10768 - DNA, 203 bp, Artificial sequence
  synthetic
ggcgcgccagtcctgaattccgaagcccacctcgagatgctacgtggacgagggcatgccaagacacaccttaaccctagcgggggtcgctagggtgaaatcacaccacgtgatgggagtacgacctgatagacatgccattcctaccactattaggctagtataaaaatctctgctgtacatggcaccgactcggaccgatg

SEQ ID NO: 10769 - DNA, 203 bp, Artificial sequence
  synthetic
ggcgcgccagtcctcggatcgcaagcccacctcgagatgctacgtggacgagggcatgccaagacacaccttaaccctagcgggggtcgctagggtgaaatcacaccacgtgatgggagtacgacctgatagggcgctgcagaggcagcagtaagtctcggtataaaaatctctgctgtacatggcaccgactcggaccgatg

SEQ ID NO: 10770 - DNA, 203 bp, Artificial sequence
  synthetic
ggcgcgccagtcctacttcgaaaagcccacctcgagatgctacgtggacgagggcatgccaagacacaccttaaccctagcgggggtcgctagggtgaaatcacaccacgtgatgggagtacgacctgatagggcgctgcagaggcccactattaggctacataccctgcaatcgctgtacatggcaccgactcggaccgatg

SEQ ID NO: 10771 - DNA, 203 bp, Artificial sequence
  synthetic
ggcgcgccagtcctggatgggaaagcccacctcgagatgctacgtggacgagggcatgccaagacacaccttaaccctagcgggggtcgctagggtgaaatcacaccacgtgatgggataggcggtaagcgaggcgctgcagaggcccactattaggctagtataaaaatctctgctgtacatggcaccgactcggaccgatg

SEQ ID NO: 10772 - DNA, 203 bp, Artificial sequence
  synthetic
ggcgcgccagtcctacgctttcaagcccacctcgagatgctacgtggacgagggcatgccaatggcataacacttactagcgggggtcgctagggtgaaatcacaccacgtgatgggagtacgacctgatagggcgctgcagaggcccactattaggctagtataaaaatctctgctgtacatggcaccgactcggaccgatg

SEQ ID NO: 10773 - DNA, 203 bp, Artificial sequence
  synthetic
ggcgcgccagtcctaatcacttaagcggcagcgcatagacgaaagaacggtggcaggaggctgcgaggagccggcgcggtcgcagtctccacggcgcaggcccacggtagcgcagccgctctgagaacttcatggaggaacacggagtgacccaaaccgaacatatggctaccatagaagcacatgcacgactcggaccgatg

SEQ ID NO: 10774 - DNA, 203 bp, Artificial sequence
  synthetic
ggcgcgccagtcctcttactagaagcggcagcgctcgccattgccgctggtggcaggaggctgcgaggagccggcggatagaggactgatacggcgcaggcccacggtagcgcagccgctctgagaacttcatggaggaacacggagtgacccaaaccgaacatatggctaccatagaagcacatgcacgactcggaccgatg

SEQ ID NO: 10775 - DNA, 203 bp, Artificial sequence
  synthetic
ggcgcgccagtcctccattagcaagctggggccgccaggagtgcgatcgcctgcggatctgcagctgggcaccggccgcaacgcccgccccgcgacggcagggaataaaggctcagggaccggcagttctactctagagcccaccagcctctcagagcctccggtgactggcctgtgtctccccctggcgactcggaccgatg

SEQ ID NO: 10776 - DNA, 203 bp, Artificial sequence
  synthetic
ggcgcgccagtcctctatacaaaagctggggccgccaggagtgcgatcgcctgcggatctgcagctgggcaccggccgcaacgcccgccccgcgacggcagggaataaaggctcagggaccggcagttctactctagagcccaccataaatagctcttgcccggtgactggcctgtgtctccccctggcgactcggaccgatg

SEQ ID NO: 10777 - DNA, 203 bp, Artificial sequence
  synthetic
ggcgcgccagtcctaacgcggcaagctggggccgccaggagtgcgatcgcctgcggatctgcagctgggcaccggccgcaacgcccgccccgcgacggcagggaataaaggctcagggtttacagcctctactctagagcccaccagcctctcagagcctccggtgactggcctgtgtctccccctggcgactcggaccgatg

SEQ ID NO: 10778 - DNA, 203 bp, Artificial sequence
  synthetic
ggcgcgccagtcctcccatttgaagctggggccgccaggagtgcgatcgcctgcggatctgcagctgggctagctttctaacgcccgccccgcgacggcagggaataaaggctcagggtttacagcctctactctagagcccaccagcctctcagagcctccggtgactggcctgtgtctccccctggcgactcggaccgatg

SEQ ID NO: 10779 - DNA, 203 bp, Artificial sequence
  synthetic
ggcgcgccagtcctaatctttaaagctggggccggaccactgcgtcatgcctgcggatctgcagctgggcaccggccgcaacgcccgccccgcgacggcagggaataaaggctcagggaccggcagttctactctagagcccaccagcctctcagagcctccggtgactggcctgtgtctccccctggcgactcggaccgatg

SEQ ID NO: 10780 - DNA, 203 bp, Artificial sequence
  synthetic
ggcgcgccagtccttggagtagaaggagccaacgatcttgccaagttccaccagatgctgatgaagataataatgaagtagctacagctcaacttacctgccaaccccatgccagtcgacctaattagtacaacctaaatccattactctcttagcgtcggcaaagtgattgcctcctaagttccacacgactcggaccgatg

SEQ ID NO: 10781 - DNA, 203 bp, Artificial sequence
  synthetic
ggcgcgccagtcctgagaaagaaaggagccaacgatcttgccaagttccaccagatgctgatgaagataataatgaagtagctacagctcaacttacctgccaaccccatgccagtcgacctaattagtacaacctaaatccattataaaaaacttaggagcaaagtgattgcctcctaagttccacacgactcggaccgatg

SEQ ID NO: 10782 - DNA, 203 bp, Artificial sequence
  synthetic
ggcgcgccagtcctcgcactgtaaggagccaacgatcttgccaagttccaccagatgctgatgaagataataatgagccgttatttaggaaacttacctgccaaccccatgccagtcgacctaattagtacaacctaaatccattataaaaaacttaggagcaaagtgattgcctcctaagttccacacgactcggaccgatg

SEQ ID NO: 10783 - DNA, 203 bp, Artificial sequence
  synthetic
ggcgcgccagtccttacataacaaggagccaacgcgtggagttgtgcgcaccagatgctgatgaagataataatgaagtagctacagctcaacttacctgccaaccccatgccagtcgacctaattagtacaacctaaatccattataaaaaacttaggagcaaagtgattgcctcctaagttccacacgactcggaccgatg

SEQ ID NO: 10784 - DNA, 203 bp, Artificial sequence
  synthetic
ggcgcgccagtccttcagtgccaaggagccagggagtacttagccggagtggggcagcaccgctccttgggtccccactccccatttctcattgcttggaaatccatgccaagatgcctgccttccttggtctaaagtgtctggggaaattgtgcagctctgagaaaagcaaagtcacctcatctgagcgactcggaccgatg

SEQ ID NO: 10785 - DNA, 203 bp, Artificial sequence
  synthetic
ggcgcgccagtcctgaatgttaaaggagccaggggaacagagagaattgtggggcagcaccgctccttgggtccccactccccatttctcattgcttggaaatccatgccaagatgcctgccttccttggtctaaagtgtctggggaaattgtgcagctcaattgggctgggtctcacctcatctgagcgactcggaccgatg

SEQ ID NO: 10786 - DNA, 203 bp, Artificial sequence
  synthetic
ggcgcgccagtcctcccaggccaaggagccaggggaacagagagaattgtggggcagcaccgctccttgggtccccactccccatttctcattgcttggaaatccatgccaagatgcctgccttccttggtctaaagtgtctggggaaattgtgcagctctgagaaaagcaaagcgcgggtcgacatccgactcggaccgatg

SEQ ID NO: 10787 - DNA, 203 bp, Artificial sequence
  synthetic
ggcgcgccagtccttgggcaacaaggagccaggggaacagagagaattgtggggcagcaccgctccttgggtccccactccccatttctccggctcgacttccacatgccaagatgcctgccttccttggtctaaagtgtctggggaaattgtgcagctctgagaaaagcaaagtcacctcatctgagcgactcggaccgatg

SEQ ID NO: 10788 - DNA, 203 bp, Artificial sequence
  synthetic
ggcgcgccagtcctggtgatataaggagccaggggaacagagagaattgtggggcagcaccgctccttgggtccccgtcattgtccgaggattgcttggaaatccatgccaagatgcctgccttccttggtctaaagtgtctggggaaattgtgcagctctgagaaaagcaaagtcacctcatctgagcgactcggaccgatg

SEQ ID NO: 10789 - DNA, 203 bp, Artificial sequence
  synthetic
ggcgcgccagtcctgcacgatgaagggacggcggcgattggcggacgctcctggcaggagagcgcggattggtcaggcacggagcaggaggcggggctgatagcccagcagcagcagcggcggcggcggctgcggagcgggtgtgaggcggctggaccgcagaatgaatcgatacagggcgcggcaagcgactcggaccgatg

SEQ ID NO: 10790 - DNA, 203 bp, Artificial sequence
  synthetic
ggcgcgccagtcctcccaccgaaaggtcagtggtaggtaaggaaggggccttaacctctgctggtgaccagaagcctgcatttctgcattctgcttaattccctttccttagatttgaaagaagccaacactaaaccacaaatatatcgtctacgagcaatctcaaacgagagtcagcctttaacgaacgactcggaccgatg

SEQ ID NO: 10791 - DNA, 203 bp, Artificial sequence
  synthetic
ggcgcgccagtcctagacaataaaggtcagtggtaggtaaggaaggggccttaacctctgctggtgaccagaagcctgcatttctgcattctgcttaattccctttccttagatttgactacttgttgtctgaaaccacaaatatacaacaaggccattttctcaaacgagagtcagcctttaacgaacgactcggaccgatg

SEQ ID NO: 10792 - DNA, 203 bp, Artificial sequence
  synthetic
ggcgcgccagtcctccggctgaaaggtcagtggtaggtaaggaaggggtagcgcgtctacggggtgaccagaagcctgcatttctgcattctgcttaattccctttccttagatttgaaagaagccaacactaaaccacaaatatacaacaaggccattttctcaaacgagagtcagcctttaacgaacgactcggaccgatg

SEQ ID NO: 10793 - DNA, 203 bp, Artificial sequence
  synthetic
ggcgcgccagtccttactctataagtacggttttcggagggatcagactcagactcacgtcgcactcctcgcagttggactggtgggaactgggaacactggagacctgatttctaactgacgctaccgtcgaacgtttatgtcccgacgacttcagcatgtctcaggccaccaagaggaagcatgtgcgactcggaccgatg

SEQ ID NO: 10794 - DNA, 203 bp, Artificial sequence
  synthetic
ggcgcgccagtcctggcacggaaagtacggttttcggagggatcagactcagactcacgtcgcactcctcgcagttggactggtgggaactgggaacactggagacctgatttctaactgacgctaccgtcgcggccgccgtgtggctacggcgtttgtagtctcaggccaccaagaggaagcatgtgcgactcggaccgatg

SEQ ID NO: 10795 - DNA, 203 bp, Artificial sequence
  synthetic
ggcgcgccagtcctactggtttaagtacggttttcggagggatcagactcagactcacgtcgcactcctcgcagttggactggtgggaactgggaacactggagacctgatttctaactgacgctaccgtcgcggccgccgtgtgggacgacttcagcatccgcgtttggggatagaggaagcatgtgcgactcggaccgatg

SEQ ID NO: 10796 - DNA, 203 bp, Artificial sequence
  synthetic
ggcgcgccagtcctacgtcgctaagtacggttttcggagggatcagactcagactcacgtcgcactcctcgcagttggactggtgggaactgggaacactggagacctgatttctaactgacgctaccgtcgcggccgccgtgtgggacgacttcagcatgtctcaggccaccaagaggaagcatgtgcgactcggaccgatg

SEQ ID NO: 10797 - DNA, 203 bp, Artificial sequence
  synthetic
ggcgcgccagtcctgattgcgtaagtacggttttcggagggatcagactcagactcacgtcgcactcctcgcagtttatgctcactactatgggaacactggagacctgatttctaactgacgctaccgtcgcggccgccgtgtgggacgacttcagcatgtctcaggccaccaagaggaagcatgtgcgactcggaccgatg

SEQ ID NO: 10798 - DNA, 203 bp, Artificial sequence
  synthetic
ggcgcgccagtccttaaacgcgaagttgggtaaggatagatcaatcaatgatcatattctagtacacttaggattcaagatcctattatcagggacaagagcaggattagggatatccgagatggccacacttttgaggagcttagcattgttcaaaagaccgtccacttgcagacccattacatcagcgactcggaccgatg

SEQ ID NO: 10799 - DNA, 203 bp, Artificial sequence
  synthetic
ggcgcgccagtcctcattcaggaagttgggtaaggatagatcaatcaatgatcatattctagtacacttaggattcttcgaggccaccgaagggacaagagcaggattagggatatccgagatggccacacttttgaggagcttagcattgttcaaaagaaacaaggacaaaccacccattacatcagcgactcggaccgatg

SEQ ID NO: 10800 - DNA, 203 bp, Artificial sequence
  synthetic
ggcgcgccagtcctgtcctggcaagttgggtaagtccttcggcggacctgatcatattctagtacacttaggattcaagatcctattatcagggacaagagcaggattagggatatccgagatggccacacttttgaggagcttagcattgttcaaaagaaacaaggacaaaccacccattacatcagcgactcggaccgatg

SEQ ID NO: 10801 - DNA, 203 bp, Artificial sequence
  synthetic
ggcgcgccagtcctgccaagataataacggtatagcagcgctctcctaagctctcgcggctgcgcttcggtcccggacccgggccacccacggggtagtgggtgctcctcggccccggacattgcaagccccagaaggcaagactaactcggtgttgctcctcccggcgctgacttcgaggcccggctcgactcggaccgatg

SEQ ID NO: 10802 - DNA, 203 bp, Artificial sequence
  synthetic
ggcgcgccagtcctacccaagtaataattaggccgctcatgtgccgttctctcagcgaaggccgaaaagaggctagccatgcccttagtaggactagcataatgaggggggtagcaacagtggtgagttcgttggatggcttaagccctgagtacagggtagtcgtcagtggttcgacgccttggaatcgactcggaccgatg

SEQ ID NO: 10803 - DNA, 203 bp, Artificial sequence
  synthetic
ggcgcgccagtcctcctataataataattaggcctagggaacaaatccctctcagcgaaggcactgtgattctctcccatgcccttagtaggactagcataatgaggggggtagcaacagtggtgagttcgttggatggcttaagccctgagtacagggtagtcgtcagtggttcgacgccttggaatcgactcggaccgatg

SEQ ID NO: 10804 - DNA, 203 bp, Artificial sequence
  synthetic
ggcgcgccagtcctaggtccataataattaggcctagggaacaaatccctctcagcgaaggccgaaaagaggctagccatgcccttagtaggactagcataatgaggggggtagcaacagtggtgagttcgttggatggcttaagccctgagtacagggtagtcgtcagtggttatcatgagcaatgacgactcggaccgatg

SEQ ID NO: 10805 - DNA, 203 bp, Artificial sequence
  synthetic
ggcgcgccagtcctgcatcgataataattaggcctagggaacaaatccctctcagcgaaggccgaaaagaggctagccatgcccttagtaggactagcataatgaggggggtagcaacagtggtgagttcgttggatggcttaagccctgagtacagggtagtcgtcagtggttcgacgccttggaatcgactcggaccgatg

SEQ ID NO: 10806 - DNA, 203 bp, Artificial sequence
  synthetic
ggcgcgccagtcctagtagttcaatacaattttgagaggttaataaattacaagtagtgctatttttgtatttaggttagctatttagctttacgttccaggatgcctagtggcagccccacaatatccaggaagccctctctgcggtttttcagattaggtagtcgaaaaaccaccagttcgacttgcgactcggaccgatg

SEQ ID NO: 10807 - DNA, 203 bp, Artificial sequence
  synthetic
ggcgcgccagtcctttgacgcaaatactcctaaacaactgctaggaccacggaactcagaaacacagcaagcgatcatattggaaatatggcccaaagtgacttcctttacccagagaacccaaaaaggcgggaagaagtaaatcgtcttcaccagcagcttcttgattgcttatctgacagcttcgacgactcggaccgatg

SEQ ID NO: 10808 - DNA, 203 bp, Artificial sequence
  synthetic
ggcgcgccagtcctcgacacagaatactcctaaacaactgctaggaccacggaactcagaaacacagcaagcgatcatattggaaatatgttgtgggcccgtcgcctttacccagagaacccaaaaaggcgggaagaagtaaatcgtcttcaccagcagcttcttgattgcttatctgacagcttcgacgactcggaccgatg

SEQ ID NO: 10809 - DNA, 203 bp, Artificial sequence
  synthetic
ggcgcgccagtcctcaaagtcgaatagtatgttcgaatcccgggtttgtggggccgctggtaaacatccacacgggagacaccttctacttccccaacttccgcgcgtccggggcgcagcttcccgggctgccttcgctgtcctacccacgccgcgacaacgtgtgctccctgtcctggccgtcggcgcgactcggaccgatg

SEQ ID NO: 10810 - DNA, 203 bp, Artificial sequence
  synthetic
ggcgcgccagtcctagcgcgagaatataccctacgtgcctggagatgaccaccaaacggaaaatcatcggccgtctggtgccatgccgatgtttccgaggtgaagaagaaatcatctcagttttagattactcccactgcagtcttcagcaggtgccaaaggaggtctttaacttcgaacgaacattacgactcggaccgatg

SEQ ID NO: 10811 - DNA, 203 bp, Artificial sequence
  synthetic
ggcgcgccagtcctctttggcgaatatctgggagacctcgggctcttgatctccgagacaccccgtttcgtagtggagaacagtccagatcggggaagtttattttgcccaaagccggttagaggccccctggccctcgattcccacacttactagacttgctcccctgaacagcagctgcagcagcccgactcggaccgatg

SEQ ID NO: 10812 - DNA, 203 bp, Artificial sequence
  synthetic
ggcgcgccagtcctaagagacaaatatctgggagacctcgggctcttgatctccgagacaccccgtttcgtagtggtatcgtaaagtctccggggaagtttattttgcccaaagccggttagaggccccctggccctcgattcccagtgcggggctcagagctcccctgaacagcagctgcagcagcccgactcggaccgatg

SEQ ID NO: 10813 - DNA, 203 bp, Artificial sequence
  synthetic
ggcgcgccagtcctctcaacataatatctgggagacctcgggctcttggcggatacttttttccgtttcgtagtggagaacagtccagatcggggaagtttattttgcccaaagccggttagaggccccctggccctcgattcccagtgcggggctcagagctcccctgaacagcagctgcagcagcccgactcggaccgatg

SEQ ID NO: 10814 - DNA, 203 bp, Artificial sequence
  synthetic
ggcgcgccagtcctaaagcactaatatgttcattaccaacactgcagattcccattgagttggtgggggttttgttacctttgttttttttctcagcaaaataattctataactttttgtttgtgacaagaaatggactttcagtttacttaagattaattgaagggtggattaaaaatcattttgcccgactcggaccgatg

SEQ ID NO: 10815 - DNA, 203 bp, Artificial sequence
  synthetic
ggcgcgccagtcctgcacctcaaatattcacggcgttccgtctgtgtgttcgagtggacaaaatggcgaagatcgccaagactcacgaagatattgaagcacagattcgagaaattcaaggcaagaaggcagctcttgatgaagctcaaggagtgggcctcgattctacaggttattatgaccaggaacgactcggaccgatg

SEQ ID NO: 10816 - DNA, 203 bp, Artificial sequence
  synthetic
ggcgcgccagtcctaggaacggaatatttctattgcccggtcttcgcgcccggactcctggcgccagcgctaggcgcactcaccgctctgacgggtgcagacgcgggagttgtcccagactgtggagtggcgggcacggccccagccccccttcccttccctgaccccttcttgccatcgccccagaccgactcggaccgatg

SEQ ID NO: 10817 - DNA, 203 bp, Artificial sequence
  synthetic
ggcgcgccagtcctagtttggcaatcactattttgtactactaactcacccgtttttctccgggatccaagagatttactctaggatctcctattaagcttagcagtcattagttgagagttcaacttgcaaaactctaaccttcactctaataacaattcatccaatggataaattggaactagtcacgactcggaccgatg

SEQ ID NO: 10818 - DNA, 203 bp, Artificial sequence
  synthetic
ggcgcgccagtcctatcgggtcaatcactattttgtactactaactcattaagaaaaacttaggatccaagagatttactctaggatctcaggcatcatgggatagtcattagttgagagttcaacttgcaaaactctaaccttcactctaataacaattcatccaatggataaattggaactagtcacgactcggaccgatg

SEQ ID NO: 10819 - DNA, 203 bp, Artificial sequence
  synthetic
ggcgcgccagtcctgttgtaacaatcccaacctcggagcaggtggtcacaaaccagtgattggcctgtcgtaacgcgcaagtccgtggcggaaccgactactttgggtgtccgtgtttccttttattttattgtggctgcttatggtgacaatcacagattgttatcataaagccgtactagagacgacgactcggaccgatg

SEQ ID NO: 10820 - DNA, 203 bp, Artificial sequence
  synthetic
ggcgcgccagtcctcctgggtcaatcccaacctcggagcaggtggtcacaaaccagtgattggcctgtcgtaacgcgcaagtccgtggcggaaccgactactttgggtgtccgtgtttccttttattttatttgaaggaggcggcctgacaatcacagattgttatcataaagcgaattggattggcccgactcggaccgatg

SEQ ID NO: 10821 - DNA, 203 bp, Artificial sequence
  synthetic
ggcgcgccagtcctgggctcccaatcccaacctcggagcaggtggtcacaaaccagtgattggcctgtcgtaacgcttcgcattcgatttgaaccgactactttgggtgtccgtgtttccttttattttattgtggctgcttatggtgacaatcacagattgttatcataaagcgaattggattggcccgactcggaccgatg

SEQ ID NO: 10822 - DNA, 203 bp, Artificial sequence
  synthetic
ggcgcgccagtccttttagggtaatcccaacctcggagcaggtggtcaggtctgtagtccatgcctgtcgtaacgcgcaagtccgtggcggaaccgactactttgggtgtccgtgtttccttttattttattgtggctgcttatggtgacaatcacagattgttatcataaagcgaattggattggcccgactcggaccgatg

SEQ ID NO: 10823 - DNA, 203 bp, Artificial sequence
  synthetic
ggcgcgccagtcctaccagttaaatcccactcaaaatccaaaatcactaccagccactatctgctagacctagagtgcgaataggtaaataaaaccaaaatatgctcagccatacgtgtagttagagttcaatcaatctcaacaaccatttataccgccaattcaatacatatactataaatcttaaacgactcggaccgatg

SEQ ID NO: 10824 - DNA, 203 bp, Artificial sequence
  synthetic
ggcgcgccagtcctcgtgtcataatcccactcaaaatccaaaatcactaccagccactatctgctagacctagagtgcgaataggtaaatcgcggagtgccgatgggtaaatagacattagttagagttcaatcaatctcaacaaccatttataccgccaattcaatacatatactataaatcttaaacgactcggaccgatg

SEQ ID NO: 10825 - DNA, 203 bp, Artificial sequence
  synthetic
ggcgcgccagtcctcctaattcaatcccagtcctaacagaagtactgcgaatcttgtggcctcattctgaacaaaagggattagagaagaaaaatctcttgatataaggcttgaaagcaagggcaggcaatcaactggtcaccgtatttctgatttttccagaaatcaagcagaagattgagctgctgcgactcggaccgatg

SEQ ID NO: 10826 - DNA, 203 bp, Artificial sequence
  synthetic
ggcgcgccagtcctgaatatccaatcccagtcctaacagaagtactgcgaatcttgtggcctcattctgaacaaaagggattagagaagatttgatctacatgctaaggcttgaaagcaagggcaggcaatcttggttgtgaatattttctgatttttccagaaatcaagcagaagattgagctgctgcgactcggaccgatg

SEQ ID NO: 10827 - DNA, 203 bp, Artificial sequence
  synthetic
ggcgcgccagtcctcttcagataatcccagtcctaacagaagtactgcgaatcttgtggccttccaggtggttgttgggattagagaagaaaaatctcttgatataaggcttgaaagcaagggcaggcaatcttggttgtgaatattttctgatttttccagaaatcaagcagaagattgagctgctgcgactcggaccgatg

SEQ ID NO: 10828 - DNA, 203 bp, Artificial sequence
  synthetic
ggcgcgccagtcctaaccgacgaatccccgcgcgccggccggccccgggcacgcaggcagggcggcgcaggatccagggcgtctgggatgcagtggagctcagagagaggagaacggctcctcacgcctggggcctgctcttcagaagtccccagcgccgcataggaagttcacggacctcagcagcccgactcggaccgatg

SEQ ID NO: 10829 - DNA, 203 bp, Artificial sequence
  synthetic
ggcgcgccagtcctcgagatgcaatccccgcgcgccggccggccccgggcacgcaggcagggcggcgcaggatccagggcgtctgggatgcagtggagctcagagagaggagaacggctcctcacgcctggggcctgctcttcagaagtccccagcgccgttccttccagatcatcgagatgaggtgtcgactcggaccgatg

SEQ ID NO: 10830 - DNA, 203 bp, Artificial sequence
  synthetic
ggcgcgccagtccttccgacggaatcgcgatcagagagtgagcccggatggggcggcgggcttcgggagcgcccgggctgatccgagccgagcgggccgtatctccttgtcggcgccgctgattcccggctctgcggaggcctctaggcagccgcgcagcttccgtgtttgctgcgcccgcactgcgacgactcggaccgatg

SEQ ID NO: 10831 - DNA, 203 bp, Artificial sequence
  synthetic
ggcgcgccagtcctgtctgagtaatctctagcagtggcgcccgaacagggacctgaaagcgaaagggaaaccagaggagctctctcgacgtgctgagacaacccctgaagcgcgcacggcaagaggcgaggggcggcgactggtgagtacgccaaaaattttgactagcggaggctagaaggagagagcgactcggaccgatg

SEQ ID NO: 10832 - DNA, 203 bp, Artificial sequence
  synthetic
ggcgcgccagtcctgtctgcccaatggaagaaagcagggcataagatcacttacaggacatcagcgacagcgagaggaagaccagctcggccgagtcctcgtcagcagaatcaggctcaggttctgaggaagaagaggaggaggaggaagaggaggaggaggaagggagcaccagtgaagaatcagagcgactcggaccgatg

SEQ ID NO: 10833 - DNA, 203 bp, Artificial sequence
  synthetic
ggcgcgccagtccttattaagtaatggaagaaagggacctgctgtccgacttacaggacatcagcgacagcgagaggaagaccagctcggccgagtcctcgtcagcagaatcaggctcaggttctgaggaagaagaggaggaggaggaagaggaggaggaattccatcaatggggtgaagaatcagagcgactcggaccgatg

SEQ ID NO: 10834 - DNA, 203 bp, Artificial sequence
  synthetic
ggcgcgccagtcctctgaagtcaatggaagaaagggacctgctgtccgacttacaggacatcagcgacagcgagaggaagaccagctcggggccagggaatgtcgcagaatcaggctcaggttctgaggaagaagaggaggaggaggaagaggaggaggaggaagggagcaccagtgaagaatcagagcgactcggaccgatg

SEQ ID NO: 10835 - DNA, 203 bp, Artificial sequence
  synthetic
ggcgcgccagtcctaacattggaatggcataggtgcccgcgtgcgccatcccctcagctagcaggtgtgagcggctttctgcccgcagtctctacacagctcagcatcctgacgcctcctccccttgcaggggcgtgaagctacttcagactctgctgtgacgacttggccgccaggcaccgatcctccgactcggaccgatg

SEQ ID NO: 10836 - DNA, 203 bp, Artificial sequence
  synthetic
ggcgcgccagtcctgaaagctgaatggcttcgctcatttatagacaattgctcacgaattcttatacagtagatttatccgatgagatacaagagattggatcaactaaatcacaaaatgtcacaattaatctctacagccaaaaccaaacaggttatgctccagttaactggggacctggagaaattcgactcggaccgatg

SEQ ID NO: 10837 - DNA, 203 bp, Artificial sequence
  synthetic
ggcgcgccagtccttagtaatgaatggcttcgctcatttatagacaattgctcacgaattcttatacagtagatttatccgatgagatacgctgtggcaatcgcactaaatcacaaaatgtcacaattaatcctggaccatttgcgcaaacaggttatgctccagttaactggggacctggagaaattcgactcggaccgatg

SEQ ID NO: 10838 - DNA, 203 bp, Artificial sequence
  synthetic
ggcgcgccagtcctggagccgcaatgtgatcttgcttgtaaatacaattttgagaggttaataaattacaagtagtgctatttttgtatttaggttagctatttagctttacgttccaggatgcctagtggcagccccacaatatccaggaagccctctcgcgtaggccatgtgttaggtagtcgaaacgactcggaccgatg

SEQ ID NO: 10839 - DNA, 203 bp, Artificial sequence
  synthetic
ggcgcgccagtcctcgcgactgaatgtgatcttgcttgtaaatacaattttgagaggttaataaattacaagtagtgctatttttgtatttaggttagctatttagctttacgttccaggatgcctagtggcagccccacaatatccaggaagccctctctgcggtttttcagacggctagcagatcgcgactcggaccgatg

SEQ ID NO: 10840 - DNA, 203 bp, Artificial sequence
  synthetic
ggcgcgccagtcctcggtcgagaatgtgatcttgcttgtaaatacaattttgagaggttaatccggcgttgtctaagctatttttgtatttaggttagctatttagctttacgttccaggatgcctagtggcagccccacaatatccaggaagccctctctgcggtttttcagattaggtagtcgaaacgactcggaccgatg

SEQ ID NO: 10841 - DNA, 203 bp, Artificial sequence
  synthetic
ggcgcgccagtcctagtcatctaatgttgtacccctaagagtcataaactctggaattactcagtttcaaaagggaaaggagtttgagtttgtagaaggacaaggtgtgcctattgcaccaggagtcccagctactgaagctaaggggtactggtacagacacaacagacgttcttttaaaacagccgcgactcggaccgatg

SEQ ID NO: 10842 - DNA, 203 bp, Artificial sequence
  synthetic
ggcgcgccagtcctattccttcaatgttgtaccctactattcttggttctctggaattactcagtttcaaaagggaaaggagtttgagtttgtagaaggacaaggtgtgcctattgcaccaggagtcccagccgaccggttcctctggtactggtacagacacaacagacgttcttttaaaacagccgcgactcggaccgatg

SEQ ID NO: 10843 - DNA, 203 bp, Artificial sequence
  synthetic
ggcgcgccagtcctatgcatttaatgttgtaccctactattcttggttctctggaattactcagtttcaaaagggagtatttaacttagatgtagaaggacaaggtgtgcctattgcaccaggagtcccagctactgaagctaaggggtactggtacagacacaacagacgttcttttaaaacagccgcgactcggaccgatg

SEQ ID NO: 10844 - DNA, 203 bp, Artificial sequence
  synthetic
ggcgcgccagtccttccgtaataattatagaaagttctgaacctaggggtctttctgtctctgctgtgtggtgggaatcacacggtctccactaatcacatacgaatctgtaaaagaacggtgctgccgcttttgctttaattcaaatgaagaatatgaagtgcactttgaaagtcgaggaaacaactcgactcggaccgatg

SEQ ID NO: 10845 - DNA, 203 bp, Artificial sequence
  synthetic
ggcgcgccagtcctattagcggaattccagacctctctgtgcttagggcaaacatcatttggccttaaatgggattctgtgagaggggatccctccattgacagctggactgttctttggggccttatgtggtgtttgcctctgaggtactcaggggcataccctcagagtactattcttaaataatacgactcggaccgatg

SEQ ID NO: 10846 - DNA, 203 bp, Artificial sequence
  synthetic
ggcgcgccagtcctcgcctactaattccagacctctctgtgcttagggcaaacatcatttggccttaaatgggattctgtgagaggggatccctccattgacagctggactgttctttggggccttatgtggtgtttgcctctgagtagacggctacgtgttaggtttttcctcattcttaaataatacgactcggaccgatg

SEQ ID NO: 10847 - DNA, 203 bp, Artificial sequence
  synthetic
ggcgcgccagtcctccggcactaattccagacctctctgtgcttagggtcgggccagggaccccttaaatgggattctgtgagaggggatccctccattgacagctggactgttctttggggccttatgtggtgtttgcctctgaggtactcaggggcatttaggtttttcctcattcttaaataatacgactcggaccgatg

SEQ ID NO: 10848 - DNA, 203 bp, Artificial sequence
  synthetic
ggcgcgccagtcctgcaccagtaattcttgagaggttcttggagagattctgggagccaaacactccattgggatcctagctggaatataaagaatggcttatcagtggagaccatcgacagttgagaaaagaagaagcccaaaaagtacaagaatgaaagctaccttcacgccgagaacaacttgtacgactcggaccgatg

SEQ ID NO: 10849 - DNA, 203 bp, Artificial sequence
  synthetic
ggcgcgccagtcctcctacgcaaattgcaattgagacttgactcccctttgtacctccagagacctcctagagccagaacccggctggcttgctgtttcctttagagcagcgcatatcattatttggtgttctggtggaggacttttctgatggcagaaattagtttctctgggttcatcaggacgggcgactcggaccgatg

SEQ ID NO: 10850 - DNA, 203 bp, Artificial sequence
  synthetic
ggcgcgccagtcctctgaggctaattgcaattgatcaggtttatattattgtacctccagagacctcctagagccacgtggtacgaacgatgctgtttcctttagagcagcgcatatcattatttggtgttctggtggaggacttttctgatggcagaaattagtttctctgggttcatcaggacgggcgactcggaccgatg

SEQ ID NO: 10851 - DNA, 203 bp, Artificial sequence
  synthetic
ggcgcgccagtcctccctcaagaattgcaattgatcaggtttatattattgtacctccagagacctcctagagccagaacccggctggcttgctgtttcctttagagcagcgcatatcattatttggtgttctggtggaggacttttctgatggcagaaaccgtggagcaatatttcatcaggacgggcgactcggaccgatg

SEQ ID NO: 10852 - DNA, 203 bp, Artificial sequence
  synthetic
ggcgcgccagtcctcggcagcgaatttaacaggatacttggacaatagaagccagatcaaaagtaagaaaaacttaactgcggattggcgtcacagatcagctcaaccagacaccaccagcatacacgaaaccaaccttcacagtggatacctcagcatccaaaactctccttcccgaatggatcaggcgactcggaccgatg

SEQ ID NO: 10853 - DNA, 203 bp, Artificial sequence
  synthetic
ggcgcgccagtcctagtggccaaatttaacaggatacttggacaatagtctttcttagtttggtaagaaaaacttagggtgaatgacaattcacagatcagctcaaccagacaccaccagcatacacgaaaccaaccttcacagtggatacctcagcatccaaaactctccttcccgaatggatcaggcgactcggaccgatg

SEQ ID NO: 10854 - DNA, 203 bp, Artificial sequence
  synthetic
ggcgcgccagtccttcgtatgtaatttgttctcctgcagccactgacttggggactgctggtggggtagggatgagggagggaggggcattgtgatgtacagggctgctctgtgagatcaagggtctcttaagggtgggagctggggcagggactacgagagcagccagatgggctgaaagtggaactcgactcggaccgatg

SEQ ID NO: 10855 - DNA, 203 bp, Artificial sequence
  synthetic
ggcgcgccagtccttcataaataattttgccttaaacagaaagacttgaccctcttaggtgtcatacctaagatcagtgtgttttttgtgatatcaaagcagtacaccaaaaaagagaagaaatattgcagtgaatgaagattcctctgcattttagcactgctttttcaactgtagttggcttttgacgactcggaccgatg

SEQ ID NO: 10856 - DNA, 203 bp, Artificial sequence
  synthetic
ggcgcgccagtccttgtcaagcaattttgccttaaacagaaagacttgaccctcttaggtgtcatacctaagatcagtgtgttttttgtgtccaattcttttatagtgtgttcccgcgagaaatattgcagtgaatgaagattcctctgcattttagcactgctttttcaactgtagttggcttttgacgactcggaccgatg

SEQ ID NO: 10857 - DNA, 203 bp, Artificial sequence
  synthetic
ggcgcgccagtcctactaacataattttgccttaaacagaaagacttgaccctcttaggtgtcatacctaagatcagtgtgttttttgtgtccaattcttttatcaccaaaaaagagaagaaatattgcagtgaatgaagattcctctgcattttagcactgctttttcaactgggacaatacccgagcgactcggaccgatg

SEQ ID NO: 10858 - DNA, 203 bp, Artificial sequence
  synthetic
ggcgcgccagtccttgcgtcgtaattttgccttaaacagaaagacttgaccctcttaggtgtcatacctaagatcagtgtgttttttgtgtccaattcttttatcaccaaaaaagagagatcgctggaagacgaatgaagattcctctgcattttagcactgctttttcaactgtagttggcttttgacgactcggaccgatg

SEQ ID NO: 10859 - DNA, 203 bp, Artificial sequence
  synthetic
ggcgcgccagtcctgatttctaaattttgccttaaacagaaagacttgcatagggcgttgtccatacctaagatcagtgtgttttttgtgtccaattcttttatcaccaaaaaagagaagaaatattgcagtgaatgaagattcctctgcattttagcactgctttttcaactgtagttggcttttgacgactcggaccgatg

SEQ ID NO: 10860 - DNA, 203 bp, Artificial sequence
  synthetic
ggcgcgccagtcctatctcaatacaaaatcaaaccagcatctcagacttcctgctcctgggcctgcccatccaaccagagcagcaaaaccgcccaatatatagtttcttggccatgtatcttaccaccctcctggggaacctcctcatcattgtcctcattcgactggactcccatctccacacgcctcgactcggaccgatg

SEQ ID NO: 10861 - DNA, 203 bp, Artificial sequence
  synthetic
ggcgcgccagtcctactgtaagacaaaatcaaaccagcatctcagacttcctgctcctgggcctgcccatccaaccagagcagcaaaacctgtgctatgccctgttcttggccatgtatcttaccaccctcctggggaacctcctcatcattgtcctcatctagtacacagattatctccacacgcctcgactcggaccgatg

SEQ ID NO: 10862 - DNA, 203 bp, Artificial sequence
  synthetic
ggcgcgccagtcctaatttaccacaaaatcaaaccagcatctcagacttcctgctcctgggcctgcccatccaaccagagcagcaaaacctgtgctatgccctgttcttggccatgtatcttaccaccctcctggggaacctcctcatcattgtcctcattcgactggactcccatctccacacgcctcgactcggaccgatg

SEQ ID NO: 10863 - DNA, 203 bp, Artificial sequence
  synthetic
ggcgcgccagtccttcgggcttacaaaatcaaaccagcatctcagacttcctgctcctgggctaatgggcgacggaagagcagcaaaacctgtgctatgccctgttcttggccatgtatcttaccaccctcctggggaacctcctcatcattgtcctcattcgactggactcccatctccacacgcctcgactcggaccgatg

SEQ ID NO: 10864 - DNA, 203 bp, Artificial sequence
  synthetic
ggcgcgccagtccttacccggaacaaaccagtgggtggtgtgtcgtaacgggcaactctgcagcggaaccgactactttgggtgtccgtgtttccttttattcctatattggctgcttcgaaaactttcatgaaagttgttaccatatagctattggattggccatccggtgtgcaacagggcaattgcgactcggaccgatg

SEQ ID NO: 10865 - DNA, 203 bp, Artificial sequence
  synthetic
ggcgcgccagtccttcggtaggacacaaggaggaatggtgacaatcaaaaagttgttaccatatagctattggattggccatccggtgtgcaacagggcaattgtttacctatttattggttttgtaccattatcactgaagtctgtgatcactctcaaattcattttgaccctcaacacaatcaaaccgactcggaccgatg

SEQ ID NO: 10866 - DNA, 203 bp, Artificial sequence
  synthetic
ggcgcgccagtccttcggcccaacaccaaaacgcatccacctaactggctgacgctacaccttggtctttccgggtatgccgcacacggcctccaactcctgcagagctgagccggaggggaatccggaagggacacgctgaacaggaacagaaatgaataaaagtcgctggcagagtagaagacgaccgactcggaccgatg

SEQ ID NO: 10867 - DNA, 203 bp, Artificial sequence
  synthetic
ggcgcgccagtcctgacagggtacaccaaaacgcatccacctaactggctgacgctacaccttggtctttccgggtccttgcacgcttcgctccaactcctgcagagctgagccggaggggaatccggaaggccggacaactgattgaacagaaatgaataaaagtcgctggcagagtagaagacgaccgactcggaccgatg

SEQ ID NO: 10868 - DNA, 203 bp, Artificial sequence
  synthetic
ggcgcgccagtcctgaattaatacaccaaaacgcatccacctaactggctgacgctacaccttggtctttccgggtccttgcacgcttcgctccaactcctgcagagctgagccggaggggaatccggaagggacacgctgaacaggaacagaaatgaataaaagtcgctggcatctgtctgtcttcgcgactcggaccgatg

SEQ ID NO: 10869 - DNA, 203 bp, Artificial sequence
  synthetic
ggcgcgccagtcctgcgggatcacaccaaaacgcatccacctaactggctgacgctacaccttggtctttccgggtccttgcacgcttcgctccaactcctgcagagctgagccggaggggaatccggaagggacacgctgaacagtttgttctcctgcaaaaagtcgctggcagagtagaagacgaccgactcggaccgatg

SEQ ID NO: 10870 - DNA, 203 bp, Artificial sequence
  synthetic
ggcgcgccagtcctcaaatcggacagagcagaggaccagcagatgaatcttgcaacctccatagaggagcagcaggaccagagatcacccctgacctgctacctcggccgccccggttgcttctattggtcaatccctttgggggtcggggcctggcctggcagtggtgtaagaaccacgtgcttccccgactcggaccgatg

SEQ ID NO: 10871 - DNA, 203 bp, Artificial sequence
  synthetic
ggcgcgccagtcctaacgttcaacagagcagaggaccagcagatgaatggacaccttgaagcagaggagcagcaggaccagagatcacccctgacctgctacctcggccgccccggttgcttctattggtcaatccctttgggggtcggggcctggcctggcagtggtgtaagaaccacgtgcttccccgactcggaccgatg

SEQ ID NO: 10872 - DNA, 203 bp, Artificial sequence
  synthetic
ggcgcgccagtcctcagacgtgacagagcagaggaccagcagatgaatggacaccttgaagcagaggagcagcaggaccagagatcacccctgacctgctacctcggccgccccggttgcttctattggtcaatccctttgggggtcggggcctggcctggcagtggtgtaagacattgccatgagagcgactcggaccgatg

SEQ ID NO: 10873 - DNA, 203 bp, Artificial sequence
  synthetic
ggcgcgccagtcctataccggcacagagcagaggaccagcagatgaatggacaccttgaagcagaggagcagcaggaccagagatcacccctgacctgctacctcggccgccccggttgcttctattggtcagcgttgcatccttacggggcctggcctggcagtggtgtaagaaccacgtgcttccccgactcggaccgatg

SEQ ID NO: 10874 - DNA, 203 bp, Artificial sequence
  synthetic
ggcgcgccagtcctagtaaggtacagagcagaggaccagcagatgaatggacaccttgaagcagaggagcagcaggaccagagatcacccctgacctgctaccttctggaggagcagagcttctattggtcaatccctttgggggtcggggcctggcctggcagtggtgtaagaaccacgtgcttccccgactcggaccgatg

SEQ ID NO: 10875 - DNA, 203 bp, Artificial sequence
  synthetic
ggcgcgccagtcctgagacgaaacagagcagagggatcttcccaccgcggacaccttgaagcagaggagcagcaggaccagagatcacccctgacctgctacctcggccgccccggttgcttctattggtcaatccctttgggggtcggggcctggcctggcagtggtgtaagaaccacgtgcttccccgactcggaccgatg

SEQ ID NO: 10876 - DNA, 203 bp, Artificial sequence
  synthetic
ggcgcgccagtcctagggagtcacagcggccctagaagggggatcttgggtgaaggtcagggcttgggcgctagctctccgaggcctgttctgaatcggtctccagaaatgctttgggagacgtcactgcgtctgcaaggaacttccatgcctctaacactcatcttcaaaagactgggactgctgagcgactcggaccgatg

SEQ ID NO: 10877 - DNA, 203 bp, Artificial sequence
  synthetic
ggcgcgccagtcctgttggcatacagcggccctagaagggggatcttgggtgaaggtcagggcttgggcgctagctctccgaggcctgttctgaatcggtctccagaaatgctttgggttcatctttcattgctgcaaggaacttccatgcctctaacacatcgggcttgtcctctgggactgctgagcgactcggaccgatg

SEQ ID NO: 10878 - DNA, 203 bp, Artificial sequence
  synthetic
ggcgcgccagtccttccgcgaaacagcggccctagaagggggatcttgggtgaaggtcagggcttgggcgctagctctccgaggcctgttctgaatcggtctccgccctcaaggcaatttcatctttcattgctgcaaggaacttccatgcctctaacactcatcttcaaaagactgggactgctgagcgactcggaccgatg

SEQ ID NO: 10879 - DNA, 203 bp, Artificial sequence
  synthetic
ggcgcgccagtccttcgttataacagtaaccttggtcgcacccccctgcaaccctcacctctttacaaaaccacatcaacatctcaccatgcaagccatcatccatattataaagtagttaattaaaaataatcataacaatgaactaagatattaagactaacaataacgttggggcaaatgcaaaccgactcggaccgatg

SEQ ID NO: 10880 - DNA, 203 bp, Artificial sequence
  synthetic
ggcgcgccagtccttatcggatacagtgcttggacggaacccggcgctaaacgtagtatagtgccggccgcccatagccagccctccgtcacctcttcaccgcaccctcggactgccccaaggcccccgccgccgctccagcgccgcgcagccaccgccgccgccgccgcctctccttagtcgccgcccgactcggaccgatg

SEQ ID NO: 10881 - DNA, 203 bp, Artificial sequence
  synthetic
ggcgcgccagtcctagtgctgcacagtgcttggacggaacccggcgctcgttccccaccccggccggccgcccatagccagccctccgtcacctcttcaccgcaatacatcctgtggacaaggcccccgccgccgctccagcgccgcgcagccaccgccgccgccgccgcctctccttagtcgccgcccgactcggaccgatg

SEQ ID NO: 10882 - DNA, 203 bp, Artificial sequence
  synthetic
ggcgcgccagtcctgaaaccctacagtgcttggacggaacccggcgctcgttccccaccccggccggccgcccatatgataattagaagaacctcttcaccgcaccctcggactgccccaaggcccccgccgccgctccagcgccgcgcagccaccgccgccgccgccgcctctccttagtcgccgcccgactcggaccgatg

SEQ ID NO: 10883 - DNA, 203 bp, Artificial sequence
  synthetic
ggcgcgccagtcctggtgctcaacatagatgttccttaaaagctaaatctttttgaacagatgatgataaacctggaagagattcaccaaatgccatttgacggacactggcttggaaagtactcccatgttccgtttgatcttggcaatttaatgctgttcttgaagactaattagttacactggatcgactcggaccgatg

SEQ ID NO: 10884 - DNA, 203 bp, Artificial sequence
  synthetic
ggcgcgccagtcctgacgcgtaacatagatgttccttaaaagctaaatctttttgaacagatgatgataaacctggaagagattcaccaacaatagcaaattacacactggcttggaaagtactcccatgttccgtttgatcttggcaatttaatgctgtcaaacgtagaactatagttacactggatcgactcggaccgatg

SEQ ID NO: 10885 - DNA, 203 bp, Artificial sequence
  synthetic
ggcgcgccagtcctggcagtaaacatagatgttccttaaaagctaaattggacgccgtctgggatgataaacctggaagagattcaccaacaatagcaaattacacactggcttggaaagtactcccatgttccgtttgatcttggcaatttaatgctgttcttgaagactaattagttacactggatcgactcggaccgatg

SEQ ID NO: 10886 - DNA, 203 bp, Artificial sequence
  synthetic
ggcgcgccagtcctctactagaacatcataagaacgttcagaggctcatttgataaatagaagatttatttgggcttggtggtaagtgtgattttatgttttctttgattttcttgtagacttgttcctgacgctgctacaggagcagaagactaacaagcttcatttatttttccaggtaagcaaaccgactcggaccgatg

SEQ ID NO: 10887 - DNA, 203 bp, Artificial sequence
  synthetic
ggcgcgccagtcctcgtagcctacatcatttcgctttgccatctcctctaccaaagactcaaaatgtatggccctggtagtcagctgggaaagtctggcaataacagctgggctaaggaacgtggatgctcaattgcctgccaagggtctcttacttcagcccggctacatgcccccagcattggagacgactcggaccgatg

SEQ ID NO: 10888 - DNA, 203 bp, Artificial sequence
  synthetic
ggcgcgccagtcctagatcaccacatgttttatgtcagaaggcaaagatgtcggagcgaaaagtattaaacaaatactacccgccggactttgacccatcaaagatccccaaactcaagctccccaaagaccggcagtacgtggtgcggctgatggcccccttcaacatgaggtgtaagacgtgcggacgactcggaccgatg

SEQ ID NO: 10889 - DNA, 203 bp, Artificial sequence
  synthetic
ggcgcgccagtcctagtgggacacattgcgaaaacacgcgcccagcaccctgcctccggcgatgccgccccagcccctctgatggccctcctctctgctgccactcattccagaacaggaggcatgagcccggaacgcgcttgcttttaggagacagccactttctgtgtggtacgctggattcaaggcgactcggaccgatg

SEQ ID NO: 10890 - DNA, 203 bp, Artificial sequence
  synthetic
ggcgcgccagtcctcgatgcgcaccaattgaacgatggtgacaatcatagattgttatcataaagcgagttggattggccatccagtgtgaatcagattaattactcccttgtttgttggatccactcccgaaacgttttactccttaacttattgaaattgtttgaagacaggatttcagtgtcacacgactcggaccgatg

SEQ ID NO: 10891 - DNA, 203 bp, Artificial sequence
  synthetic
ggcgcgccagtcctactatgacaccaggggcgccaggattcaacactccaggccgcggatgaagaagaaaacccggcgccgctcgacccggagcgaggagttgacccggagcgaggagttgaccctgagtgaggaagcgacctggagtgaagaggcgacccagagtgaggaggcgacccagggcgaagcgactcggaccgatg

SEQ ID NO: 10892 - DNA, 203 bp, Artificial sequence
  synthetic
ggcgcgccagtccttggtacgcaccaggggcgccgccgccggcgctcgcaggccgcggatgaagaagaaaacccggcgccgctcgacccggagcgaggagttgacccggagcgaggagttgaccctgagtgaggaagcgacctggacaagctgaatagatcagagtgaggaggcgacccagggcgaagcgactcggaccgatg

SEQ ID NO: 10893 - DNA, 203 bp, Artificial sequence
  synthetic
ggcgcgccagtcctgggctgataccaggtgtggaaagtccccaggctccccagcaggcagaagtatgcaaagcatgcatctcaattagtcccactaatctactacgcccctaactccgcccatcccgcccctaactccgcccagttccgcccattctccgccccatggctgactaattttttttatttcgactcggaccgatg

SEQ ID NO: 10894 - DNA, 203 bp, Artificial sequence
  synthetic
ggcgcgccagtcctagttaagaaccaggtgtggaaagtccccaggctccccagcaggcagaagtatgcaaagcatggggaagggccttgaagcaaccatagtcccgcccctaactccgcccatcccgcccctaactccgcccagttccgcccattctccgccccatggctgactaattttttttatttcgactcggaccgatg

SEQ ID NO: 10895 - DNA, 203 bp, Artificial sequence
  synthetic
ggcgcgccagtcctagaccctgaccaggtgtggaaagtccccaggctcgatctatccacccggtatgcaaagcatgcatctcaattagtcagcaaccatagtcccgcccctaactccgcccatcccgcccctaactccgcccagttccgcccattctccgccccatggctgactaattttttttatttcgactcggaccgatg

SEQ ID NO: 10896 - DNA, 203 bp, Artificial sequence
  synthetic
ggcgcgccagtcctgggtttgcacccagccccgatcctaaggggtcggggcttttgctcactcagcacaggatctgatcaggagacctcccccccctgctttacagggggcgggggttctcttgcgataacgggcctggcaaataacctaggggactaggttttcctttttattttaaagttgtcaatcgactcggaccgatg

SEQ ID NO: 10897 - DNA, 203 bp, Artificial sequence
  synthetic
ggcgcgccagtcctttgcgtgtacccagccccgatcctaaggggtcggggcttttgctcactcagcacaggatctgatcaggagacctcccccccctgctttacagggggcgggggtttaaaaattgcccaaggcctggcaaataacctaggggactaggttttcctttttattggccgaaataattacgactcggaccgatg

SEQ ID NO: 10898 - DNA, 203 bp, Artificial sequence
  synthetic
ggcgcgccagtcctaggatagaacccagccccgatcctaaggggtcggggcttttgctcactcagcacaggatctgatcaggagacctcccccccctgctttacagggggcgggggtttaaaaattgcccaaggcctggcaaataacctaggggactaggttttcctttttattttaaagttgtcaatcgactcggaccgatg

SEQ ID NO: 10899 - DNA, 203 bp, Artificial sequence
  synthetic
ggcgcgccagtcctccttcctaacccagccccgatcctaaggggtcggggcttttgctcactcagcacaggatctggatcatcacgtggtcccccctgctttacagggggcgggggtttaaaaattgcccaaggcctggcaaataacctaggggactaggttttcctttttattttaaagttgtcaatcgactcggaccgatg

SEQ ID NO: 10900 - DNA, 203 bp, Artificial sequence
  synthetic
ggcgcgccagtcctatatgaacacccagccccgatcctaaggggtcggggcttttgctcactggtggggctcctaaatcaggagacctcccccccctgctttacagggggcgggggtttaaaaattgcccaaggcctggcaaataacctaggggactaggttttcctttttattttaaagttgtcaatcgactcggaccgatg

SEQ ID NO: 10901 - DNA, 203 bp, Artificial sequence
  synthetic
ggcgcgccagtccttgaatacgaccccgagaaaccgaaaccgcagggcctagggcgggtggaacgagagggaactacatttcccagcaggctgcggaaacgggactgcggccactacttccggcgtgtaccgagagactggcgtccggcgtgtaccgagagactggcgtccggtgtgcaggtggccaccgactcggaccgatg

SEQ ID NO: 10902 - DNA, 203 bp, Artificial sequence
  synthetic
ggcgcgccagtcctgcgatgcaaccccgagaaaccgaaaccgcagggcctagggcgggtggaacgagagggaactacatttcccagcaggctgcggaaacgggactgcggccactacttgtttaaatcaccgagagactggcgtccggcgtgtaccgagagactggcgtccggtgtgcaggtggccaccgactcggaccgatg

SEQ ID NO: 10903 - DNA, 203 bp, Artificial sequence
  synthetic
ggcgcgccagtcctaaccgtaaaccccgagaaaccgaaaccgcagggcctagggcgggtggaacgagagggaactacatttcccagcaggctgcggaaacgggatacgttggctctagtccggcgtgtaccgagagactggcgtccggcgtgtaccgagagactggcgtccggtgtgcaggtggccaccgactcggaccgatg

SEQ ID NO: 10904 - DNA, 203 bp, Artificial sequence
  synthetic
ggcgcgccagtcctcgtcttgcaccccgagaaaccgaaaccgcagggcctagggcgggtggaacgagagggaactacatttcccagcaggtgcttctctattacctgcggccactacttccggcgtgtaccgagagactggcgtccggcgtgtaccgagagactggcgtccggtgtgcaggtggccaccgactcggaccgatg

SEQ ID NO: 10905 - DNA, 203 bp, Artificial sequence
  synthetic
ggcgcgccagtcctaggccaagaccccgagaaaccgaaaccgcagggcctagggcgggtggacgagccccactaagcatttcccagcaggctgcggaaacgggactgcggccactacttccggcgtgtaccgagagactggcgtccggcgtgtaccgagagactggcgtccggtgtgcaggtggccaccgactcggaccgatg

SEQ ID NO: 10906 - DNA, 203 bp, Artificial sequence
  synthetic
ggcgcgccagtcctataaatccaccccgagaaaccgaaaccgcagggcgcgttttaccgaacacgagagggaactacatttcccagcaggctgcggaaacgggactgcggccactacttccggcgtgtaccgagagactggcgtccggcgtgtaccgagagactggcgtccggtgtgcaggtggccaccgactcggaccgatg

SEQ ID NO: 10907 - DNA, 203 bp, Artificial sequence
  synthetic
ggcgcgccagtcctgcgttctgaccccggctactcctgctcagcatggctgctttagggactgttctcttcacaggtgtccggaggctgcactgcagcgtagccatcctacttccaccccagtggcgactacagcagggactggctgccaacccctccggctacgggccccttaccgagctcccagaccgactcggaccgatg

SEQ ID NO: 10908 - DNA, 203 bp, Artificial sequence
  synthetic
ggcgcgccagtcctggtagattaccccggctactcctgctcagcatggtcctacaccttcaggttctcttcacaggtgtccggaggctgcactgcagcgtagccgcttgggcgggcggccagtggcgactacagcagggactggctgccaacccctccggctacgggccccttaccgagctcccagaccgactcggaccgatg

SEQ ID NO: 10909 - DNA, 203 bp, Artificial sequence
  synthetic
ggcgcgccagtcctcggccgttaccccggctacttgccgcggttcgaactgctttagggactgttctcttcacaggtgtccggaggctgcactgcagcgtagccgcttgggcgggcggccagtggcgactacagcagggactggctgccaacccctccggctacgggccccttaccgagctcccagaccgactcggaccgatg

SEQ ID NO: 10910 - DNA, 203 bp, Artificial sequence
  synthetic
ggcgcgccagtcctttcgctttacccctgaatggcaatctcaagcgcctctgtagggaagccaagaatgtccaggaggtaccccttcctctcggaagggatctgacctggagacacatacggtccctcaatgacctgtgcttgtgtttaaaaattgttacagcttccccgaaccaagtggtcttggttcgactcggaccgatg

SEQ ID NO: 10911 - DNA, 203 bp, Artificial sequence
  synthetic
ggcgcgccagtcctgagcgcacacccctgaatggcaatctcaagcgcctctgtagggaagccaagaatgtccaggaggtaccccttcctctcggaagggatctgacctggagacacatcacacgtgctttacacctgtgcttgtgtcgggtgtcaccacgagcttccccgaaccaagtggtcttggttcgactcggaccgatg

SEQ ID NO: 10912 - DNA, 203 bp, Artificial sequence
  synthetic
ggcgcgccagtcctgagaccggaccctgatggtttcctcacttgtgtccccaatggggctagctcgggtccacaacagctgccgatcaatccatctgaccagaatgtttcatgggtgtccagattttatcaattaaagcctgtgggaactgccagctcggcaagaggtaggcttggtctgcgccgatacgactcggaccgatg

SEQ ID NO: 10913 - DNA, 203 bp, Artificial sequence
  synthetic
ggcgcgccagtcctccgcgagcaccctgcactccgtcgccggaagtgccaccgagaagcgccggcctcggggctgtctacagcggcccgggagaggctgtggtggccccgagcgcgaggtgagctcaccagcgacagcggccaggcccgcccctcccctcgtgatggtcattgtcctccagagcagtgcgactcggaccgatg

SEQ ID NO: 10914 - DNA, 203 bp, Artificial sequence
  synthetic
ggcgcgccagtcctgctattggaccctgcactccgtcgccggaagtgccaccgagaagcgccggcctcggggctgtctacagcggcccgggagaggctgtggtggccccgagcgcgagtgtgtaggtgacaggacagcggccaggctatatgacttgacggtgatggtcattgtcctccagagcagtgcgactcggaccgatg

SEQ ID NO: 10915 - DNA, 203 bp, Artificial sequence
  synthetic
ggcgcgccagtccttgggctcgaccctgcactccgtcgccggaagtgccaccgagaagcgccggcctcggggctgttatactgtatttatgagaggctgtggtggccccgagcgcgagtgtgtaggtgacaggacagcggccaggcccgcccctcccctcgtgatggtcattgtcctccagagcagtgcgactcggaccgatg

SEQ ID NO: 10916 - DNA, 203 bp, Artificial sequence
  synthetic
ggcgcgccagtcctagcgtgttaccgcccgagactgtgtttcctgtgagtccagatgtgtgatccagatatgctgcttgctaatacagccctgttgactgagactaggagcgtgcctgaaactccatccctcctcctattattttttaatggtgcttctactggaatagtcaacaaagtgcacccaaccgactcggaccgatg

SEQ ID NO: 10917 - DNA, 203 bp, Artificial sequence
  synthetic
ggcgcgccagtcctcacgcctcacctcacccggtcctcgcagagttgcggccgcccgccccttcagccccggctctccgtatgcgcatgagcagaggcgcctccaagatagtacgatcaggctaaactttctaattcccttctttgggctcgggggctcccggagcagggcgagagctcgcgtcgccgcgactcggaccgatg

SEQ ID NO: 10918 - DNA, 203 bp, Artificial sequence
  synthetic
ggcgcgccagtcctatagcgtaacctcacccggtcctcgcagagttgcggccgcccgccccttcagccccggctctccgtatgcgcatgagcagaggcgcctccctctgttcctcccaaggctaaactttctaattcccttctttgggctcgggggctcccggagcagggcgagagctcgcgtcgccgcgactcggaccgatg

SEQ ID NO: 10919 - DNA, 203 bp, Artificial sequence
  synthetic
ggcgcgccagtcctcataacgcacctcacccggtcctcgcagagttgcggccgcccgccccttcagccccggctctccgtatgcgcatgagcagaggcgcctccctctgttcctcccaaggctaaactttctaattcccttctttgggctcgggggctcccggagcagggcgagctgaaagccaaggacgactcggaccgatg

SEQ ID NO: 10920 - DNA, 203 bp, Artificial sequence
  synthetic
ggcgcgccagtcctaccttacgacctcacccggtcctcgcagagttgcggccgcccgccccttcagccccggctctccgtatgcgcatgagcagaggcgcctccctctgttcctcccaaggctaaactttctaattcccttctttgttacgttacatcgtcggagcagggcgagagctcgcgtcgccgcgactcggaccgatg

SEQ ID NO: 10921 - DNA, 203 bp, Artificial sequence
  synthetic
ggcgcgccagtcctgcacaggaacctcacccggtcctcgcagagttgcggccgcccgccccttcagccccggctctccgtatgcgcatgatttccaaatttcagctctgttcctcccaaggctaaactttctaattcccttctttgggctcgggggctcccggagcagggcgagagctcgcgtcgccgcgactcggaccgatg

SEQ ID NO: 10922 - DNA, 203 bp, Artificial sequence
  synthetic
ggcgcgccagtcctctacgattacctcacccggtcctcgcagagttgcggccgcccgccccttcagccccggctctgatccgcattcgaggcagaggcgcctccctctgttcctcccaaggctaaactttctaattcccttctttgggctcgggggctcccggagcagggcgagagctcgcgtcgccgcgactcggaccgatg

SEQ ID NO: 10923 - DNA, 203 bp, Artificial sequence
  synthetic
ggcgcgccagtcctgggtccgaacctccaagagaaaataaccggggaccagagaggaaagacaggtccttaggtcctcaccctcccgtctccttgcccttgcagttctgggaactggacagattggacaactataacgacacctccctggtggaaaatcatctctgccctgccacagaggggcccctccgactcggaccgatg

SEQ ID NO: 10924 - DNA, 203 bp, Artificial sequence
  synthetic
ggcgcgccagtcctggtacctaacctccaagagagctagggttcctctcagagaggaaagacaggtccttaggtcccatttagtgacctcccttgcccttgcagttctgggaactggacagattggacaactataacgacacctccctggtggaaaatcatctctgccctgccacagaggggcccctccgactcggaccgatg

SEQ ID NO: 10925 - DNA, 203 bp, Artificial sequence
  synthetic
ggcgcgccagtcctgtccgtcgacctccaagagagctagggttcctctcagagaggaaagacaggtccttaggtcctcaccctcccgtctagcatataaaagccttctgggaactggacagattggacaactataacgacacctccctggtggaaaatcatctctgccctgccacagaggggcccctccgactcggaccgatg

SEQ ID NO: 10926 - DNA, 203 bp, Artificial sequence
  synthetic
ggcgcgccagtcctttactgtcacctccaagagagctagggttcctctcagagaggaaagacaggtccttaggtcctcaccctcccgtctccttgcccttgcagttctgggaactggaacctccaactcttgataacgacacctccctggtggaaaatcatctctgccctgccacagaggggcccctccgactcggaccgatg

SEQ ID NO: 10927 - DNA, 203 bp, Artificial sequence
  synthetic
ggcgcgccagtcctgttgggtaacctccaagagagctagggttcctctcagagaggaaagacaggtccttaggtcctcaccctcccgtctccttgcccttgcagttctgggaactggacagattggacaactataacgacacctccctggtggaaaatcatctctgccctgccacagaggggcccctccgactcggaccgatg

SEQ ID NO: 10928 - DNA, 203 bp, Artificial sequence
  synthetic
ggcgcgccagtcctactgtgcaacctccaagagagctagggttcctctcagagaggaaagacaggtccttaggtcctcaccctcccgtctccttgcccttgcagttctgggaactggacagattggacaactataacgacacctcctcctaaagtgggggtctctgccctgccacagaggggcccctccgactcggaccgatg

SEQ ID NO: 10929 - DNA, 203 bp, Artificial sequence
  synthetic
ggcgcgccagtcctctcgtgacacctccaagagagctagggttcctctcagagaggaaagaccatcgggctcaagatcaccctcccgtctccttgcccttgcagttctgggaactggacagattggacaactataacgacacctccctggtggaaaatcatctctgccctgccacagaggggcccctccgactcggaccgatg

SEQ ID NO: 10930 - DNA, 203 bp, Artificial sequence
  synthetic
ggcgcgccagtcctggttgaccacctcccagaagagtcacgtgggctgacccagagccggggcggaaaggctgcgttagtttcttccgggtcattgacagaagaccggtcgaggtaaagtagttcgttggttttctttcccctcatccttttgccgtgagatggcgaggggtggctttgatttcggcgcgactcggaccgatg

SEQ ID NO: 10931 - DNA, 203 bp, Artificial sequence
  synthetic
ggcgcgccagtcctcgggcgcaacctcccagaagagtcacgtgggctgacccagagccggggcggaaaggctgcgttagtttcttccgggtcattgacagaagaccggtcgaggtaaagtagttcgttggttttctttcccctcatccttttgcctgctcccggcgaggggtggctttgatttcggcgcgactcggaccgatg

SEQ ID NO: 10932 - DNA, 203 bp, Artificial sequence
  synthetic
ggcgcgccagtccttgagcgtgacctcccagaagagtcacgtgggctgacccagagccggggcggaaaggctgcgttagtttcttccgggtcattgacagaagcgtcaattcctgggagtagttcgttggttttctttcccctcatccttttgcctgctctaatttcttacgacctttgatttcggcgcgactcggaccgatg

SEQ ID NO: 10933 - DNA, 203 bp, Artificial sequence
  synthetic
ggcgcgccagtcctcaatcattacctcccagaagagtcacgtgggctgacccagagccggggcggaaaggctgcgttagtttcttccgggtcattgacagaagcgtcaattcctgggagtagttcgttggttttctttcccctcatgtgccatgacatatccggcgaggggtggctttgatttcggcgcgactcggaccgatg

SEQ ID NO: 10934 - DNA, 203 bp, Artificial sequence
  synthetic
ggcgcgccagtcctccacaccaacctcccagaagagtcacgtgggctggtgagtcaagcctacggaaaggctgcgttagtttcttccgggtcattgacagaagcgtcaattcctgggagtagttcgttggttttctttcccctcatccttttgcctgctcccggcgaggggtggctttgatttcggcgcgactcggaccgatg

SEQ ID NO: 10935 - DNA, 203 bp, Artificial sequence
  synthetic
ggcgcgccagtcctgatggtgaacgaaatagatgatctgtttaatgcatttggaagcaactaatcgaatcaacattttgatccaaattaagggccgccgcttccaacttaggattaaagaatcctattataccagaatatagggtggtaaatttagagtttgcttgcaactcaatcaatagagagttgcgactcggaccgatg

SEQ ID NO: 10936 - DNA, 203 bp, Artificial sequence
  synthetic
ggcgcgccagtcctcgcgctaaacgaacctcagcatttctgttggagactctagacctactggaaataacataactctggacctattggaacttatataattggcgcccaaccaacaatctgaacccaccaatctaatttaacacactttgtcaggcgacaaacagggtagttaagttagaaaagcatcgactcggaccgatg

SEQ ID NO: 10937 - DNA, 203 bp, Artificial sequence
  synthetic
ggcgcgccagtcctaccgcacaacgaacctcagcgaaagaaggaagatctctagacctactggaaataacataacttgatcttacaatttacttatataattggcgcccaaccaacaatctgaacccaccaatctaatttaacacactttgtcaggcgacaaacagggtagttaagttagaaaagcatcgactcggaccgatg

SEQ ID NO: 10938 - DNA, 203 bp, Artificial sequence
  synthetic
ggcgcgccagtcctgagatggcacgatatcatatgcgtgctttccacgacggtgacacgcttccctggattggcagccagactgccttccgggtcactgccatggaggagccgcagtcagatcctagcgtcgagccccctctgagtcaggaaacattttcagacctatggaaactacttcctgaaaaccgactcggaccgatg

SEQ ID NO: 10939 - DNA, 203 bp, Artificial sequence
  synthetic
ggcgcgccagtcctgaggagttacgatgggaaacgcgccagaccgaccctcgacttcggagaggcagcgcggttcctctgggtgcttccgcctccccttctcctgcttctccagcctcttcggcctcctcgcccgccgcgggaacccgagaccccagtgtatgccccacccctgaccccgctcgcgaccgactcggaccgatg

SEQ ID NO: 10940 - DNA, 203 bp, Artificial sequence
  synthetic
ggcgcgccagtcctcttgacagacgcagccaggcgcgcactgcacagcgtaaagggaaattggccgcccgagcgcacccttcagcccgcgcgccggccgtgagtcctcggtgctcgcccgccggccagacaaacagcccgcccgaccccgtcccgaccctggccgccccgagcggagcctggagcaaacgactcggaccgatg

SEQ ID NO: 10941 - DNA, 203 bp, Artificial sequence
  synthetic
ggcgcgccagtcctccgtctatacgccgccaaaaccttcgggacagctatgcgggttgacaatcccagtggggggcattatgattatatgttacttgtcctgcgagttcctcttgagactggccgaaaggcagccacggggccaccaaggcggcgcagcgctgcatgcggcaaggggaaaaatccttccgactcggaccgatg

SEQ ID NO: 10942 - DNA, 203 bp, Artificial sequence
  synthetic
ggcgcgccagtcctccatacggacgccgccaaaaccttcgggacagctatgcgggttgacaatcccagtggggggccggggaccagctgattacttgtcctgcgagttcctcttgagactggccgaaaggcagccacggggccaccgcacacttatttaactgcatgcggcaaggggaaaaatccttccgactcggaccgatg

SEQ ID NO: 10943 - DNA, 203 bp, Artificial sequence
  synthetic
ggcgcgccagtcctcgaggtatacggacacccctagggtatacaatgacagagatcttctagactaggtgcgagaggccgaggaccagaacaacatccgcctaccctccatcattgttataaaaaacttaggaaccaggtccacacagccgccagccaaccaaccatccactcccacgactggagccgcgactcggaccgatg

SEQ ID NO: 10944 - DNA, 203 bp, Artificial sequence
  synthetic
ggcgcgccagtccttccttcagacggacacccctagggtatacaatgacagagatcttctagactaggtgcgagaggccgaggaccagaacaacatccgcctaccctccatcattgttataaaaaacttaggtgatgttcaacgggagccgccagccaaccaaccatccactcccacgactggagccgcgactcggaccgatg

SEQ ID NO: 10945 - DNA, 203 bp, Artificial sequence
  synthetic
ggcgcgccagtccttagggcaaacggacacccctagggtatacaatgacagagatcttctagactaggtgcgagaggccgaggaccagaacaacatccgcctaccctccatcattgtttcctgttggggttaaaccaggtccacacagccgccagccaaccaaccatccactcccacgactggagccgcgactcggaccgatg

SEQ ID NO: 10946 - DNA, 203 bp, Artificial sequence
  synthetic
ggcgcgccagtcctatcacgctacggacacccctagggtatacaatgacagagatcttctagactaggtgcgagaggccgaggaccagaagtctcgatttgatacctccatcattgttataaaaaacttaggaaccaggtccacacagccgccagccaaccaaccatccactcccacgactggagccgcgactcggaccgatg

SEQ ID NO: 10947 - DNA, 203 bp, Artificial sequence
  synthetic
ggcgcgccagtcctttatttatacggacacccctagggtatacaatgacagagatcttctagttcgtcccatgtttgccgaggaccagaacaacatccgcctaccctccatcattgttataaaaaacttaggaaccaggtccacacagccgccagccaaccaaccatccactcccacgactggagccgcgactcggaccgatg

SEQ ID NO: 10948 - DNA, 203 bp, Artificial sequence
  synthetic
ggcgcgccagtcctctaatgatacggacagccaatttttgttgtattgttgagtcttcttgtgttttgttgtctttctacaggttgttgtggttgttgcaattgtttaacttcatcaatgcgaggctgttgtgattgtggttcaactaaacttccttattacgaatttgaaaaggtccacgttcaatacgactcggaccgatg

SEQ ID NO: 10949 - DNA, 203 bp, Artificial sequence
  synthetic
ggcgcgccagtccttctcctgaacggcctctggctaggacccaggtccttgattatgccaattttctcgagaaatcattcaattgaccatagactgaaagcgttgttacctagttcttcagaagagatcttattagaattaatttatatgatctaattcccttaaaaactgaataccaaaaaacaaaacgactcggaccgatg

SEQ ID NO: 10950 - DNA, 203 bp, Artificial sequence
  synthetic
ggcgcgccagtccttgaggcctacgtcctcgccacatctctgtaacctccctaccaaggactaattggtctttaaaactcctcaatgcaccgggcgcggtggctcacgcctgtaatcccagcactttgggaggccgaggcgggcagatcacgaggtcaggaaatcgagaccatcttggctaacaagaacgactcggaccgatg

SEQ ID NO: 10951 - DNA, 203 bp, Artificial sequence
  synthetic
ggcgcgccagtccttttagctaacgtcgttgaagacccacaggctgctgggaggagagcataaggaatctacttgaaaatggatcggtttatgttggattaaatgctgctctttgtggcctcatagcaaacagtctttttcgacgcatcttgaatgtgacaaaggctcgcatagctgctggcttaccacgactcggaccgatg

SEQ ID NO: 10952 - DNA, 203 bp, Artificial sequence
  synthetic
ggcgcgccagtcctgaccatgtacgtctgtgcggctgcgtggggctcgagttacacttgaccaggagactgaagcacttctaccctagccgggcccagcccccgagcagtgcagcctcccgagtgcagagtgcagcccctgcccgccctggcccagctgcccatgtctaccctgctggatcccaagtacgactcggaccgatg

SEQ ID NO: 10953 - DNA, 203 bp, Artificial sequence
  synthetic
ggcgcgccagtcctagatcgggacgtctgtgcggctgcgtggggctcggccgcgcggactgaaggagactgaagcacttctaccctagccgggcccagcccccgagcagtgcagcctcccgagtgcagagtgcagcccctgcccgccctggcccagctgcaggctgaagtgagtctggatcccaagtacgactcggaccgatg

SEQ ID NO: 10954 - DNA, 203 bp, Artificial sequence
  synthetic
ggcgcgccagtcctagttagcgacgtctgtgcggctgcgtggggctcggccgcgcggactgaaggagactgaagcacttctaccctagccgggcccagcccccgagcagtgcagcctcccgagtgcagagtgcagcccctgcccgccctggcccagctgcccatgtctaccctgctggatcccaagtacgactcggaccgatg

SEQ ID NO: 10955 - DNA, 203 bp, Artificial sequence
  synthetic
ggcgcgccagtccttacgaaagacgtctgtgcggctgcgtggggctcggccgcgcggactgaaggagactgaagcacttctaccctagccgggcccagcccccgagcagtgcagcctcccgagtgcagagtgcagcccctgcccgcgagcctaagcaataccatgtctaccctgctggatcccaagtacgactcggaccgatg

SEQ ID NO: 10956 - DNA, 203 bp, Artificial sequence
  synthetic
ggcgcgccagtccttcgccaatacgtctgtgcggctgcgtggggctcggccgcgcggactgaaggagactgaagcacttctaccctagccgggcccagcccccgagcagtgcagcctctgccagttgagcgtcagcccctgcccgccctggcccagctgcccatgtctaccctgctggatcccaagtacgactcggaccgatg

SEQ ID NO: 10957 - DNA, 203 bp, Artificial sequence
  synthetic
ggcgcgccagtccttcacccgcacgtctgtgcggctgcgtggggctcggccgcgcggactgaaggagactgaagcacttctaccctagccgggcccagcccccggttttgtgtttactccgagtgcagagtgcagcccctgcccgccctggcccagctgcccatgtctaccctgctggatcccaagtacgactcggaccgatg

SEQ ID NO: 10958 - DNA, 203 bp, Artificial sequence
  synthetic
ggcgcgccagtcctcataaataacgtctgtgcggctgcgtggggctcggccgcgcggactgaaggagactgaagcatcagcggatgcattgggcccagcccccgagcagtgcagcctcccgagtgcagagtgcagcccctgcccgccctggcccagctgcccatgtctaccctgctggatcccaagtacgactcggaccgatg

SEQ ID NO: 10959 - DNA, 203 bp, Artificial sequence
  synthetic
ggcgcgccagtcctacattattacgtctgtgcggtgtgtgcttctgtagccgcgcggactgaaggagactgaagcacttctaccctagccgggcccagcccccgagcagtgcagcctcccgagtgcagagtgcagcccctgcccgccctggcccagctgcccatgtctaccctgctggatcccaagtacgactcggaccgatg

SEQ ID NO: 10960 - DNA, 203 bp, Artificial sequence
  synthetic
ggcgcgccagtcctagagtttaactaatgtgccgcgcctgtgtggaggtgcgggattgggcgggctgccacggcatggagaatggctccgcttctgttgcagctggcggtgctcggcgcggcgctggcggccgcagccctcgtactgatttccatcgttgcatttacaactgctacaaaaatgccagccgactcggaccgatg

SEQ ID NO: 10961 - DNA, 203 bp, Artificial sequence
  synthetic
ggcgcgccagtcctgcagcctgactaccagatttgactcatttgtgattccttcgagaatctagttattagacacgtggttacatgaatgtttgggaaggaaaactggcaacatcttagtatatgttctccatggcacattagggaaagaagccagaaaaggctcccaacgcattgatttttaaaatgcgactcggaccgatg

SEQ ID NO: 10962 - DNA, 203 bp, Artificial sequence
  synthetic
ggcgcgccagtccttgccgaccactaccagatttgactcatttgtgattccttcgagaatctcccatgatttgcaatggttacatgaatgtttgggaaggaaaactggcaacatcttagtatatgttctccatggcacattagggaaagaagccagaaaaactcaattgttagctgatttttaaaatgcgactcggaccgatg

SEQ ID NO: 10963 - DNA, 203 bp, Artificial sequence
  synthetic
ggcgcgccagtcctgacaaaccactacccccaattgcaataaccccaggacaatctagccacagctaactgcccaaatccactacattccattcatatttagtcagctttgcgtggggaggcccggaaagaattagttctacgagcatcgacacaattatcttgatcgtgtttctttccgggcaagcccgactcggaccgatg

SEQ ID NO: 10964 - DNA, 203 bp, Artificial sequence
  synthetic
ggcgcgccagtccttcagaagaactacccccaattgcaataaccccaggacaatctagccacagctaactgcccaaatccactacattccattcatatttagtctttaagaaaaaactaggcccggaaagaattagttctacgagcatcgacacaattatcttgatcgtgtttccccttaatgcgcggcgactcggaccgatg

SEQ ID NO: 10965 - DNA, 203 bp, Artificial sequence
  synthetic
ggcgcgccagtcctgtttggacactacccccaattgcaataaccccaggacaatctagccacagctaactgcccaagggactacttgataattcatatttagtctttaagaaaaaactaggcccggaaagaattagttctacgagcatcgacacaattatcttgatcgtgtttctttccgggcaagcccgactcggaccgatg

SEQ ID NO: 10966 - DNA, 203 bp, Artificial sequence
  synthetic
ggcgcgccagtcctatggacgcactacccccaattgcaataaccccagtgtcgggataaataagctaactgcccaaatccactacattccattcatatttagtctttaagaaaaaactaggcccggaaagaattagttctacgagcatcgacacaattatcttgatcgtgtttctttccgggcaagcccgactcggaccgatg

SEQ ID NO: 10967 - DNA, 203 bp, Artificial sequence
  synthetic
ggcgcgccagtcctacagatagactagtcgacgttcttcgttaagaagcacgacttccagcagttggggccacggtgggacggaccctacactgtagtcctcagcacccccaccgcggtaaaggtcgctgggaagaccccgtggatccaccactctcgactcaagaaagctcctgacaaccaagaagacgactcggaccgatg

SEQ ID NO: 10968 - DNA, 203 bp, Artificial sequence
  synthetic
ggcgcgccagtcctggcggtgtactataatttatagtagagtcggaagccgaccctcacagtaaaatagcacaggctgggttttctacgtacgagtaaaacacggtgatttttctgcagtgagctctcccatgagcaacatgacagaaaacgaaagattgcttcattttttctaaactgaacgaaaagcgactcggaccgatg

SEQ ID NO: 10969 - DNA, 203 bp, Artificial sequence
  synthetic
ggcgcgccagtcctgcctggtcactattacttttgtttcttttgatgacctttatgttgctattagaggttcttgtgaaaagaacctacaacttatgcgtaaggttgacttgtataatggtgctgtcatttacatttttgccgaagagcctgttgttggtatagtctactcttcgtggaccgtttcgtcgactcggaccgatg

SEQ ID NO: 10970 - DNA, 203 bp, Artificial sequence
  synthetic
ggcgcgccagtcctccatgtttactattacttttgtttcttttgatgacctttatgttgctattagaggttcttgtgaaaagaacctacaacttatgcgtaaggttgacttgtataatggtgctgtcatttacatttttgccgaagagcctgttgttggtatagtctactcttctcaactatacgaagcgactcggaccgatg

SEQ ID NO: 10971 - DNA, 203 bp, Artificial sequence
  synthetic
ggcgcgccagtcctactgccctactattacttttgtttcttttgatgacctttatgttgctattagaggttcttgtgaaaagaacctacaggcctaatagggttttgacttgtataatggtgctgtcatttacatttttgccgaagagcctgttgttggtatagtctactcttctcaactatacgaagcgactcggaccgatg

SEQ ID NO: 10972 - DNA, 203 bp, Artificial sequence
  synthetic
ggcgcgccagtcctatcaagagactattacttttgtttcttttgatgagaaacgcagaatgcttagaggttcttgtgaaaagaacctacaacttatgcgtaaggttgacttgtataatggtgctgtcatttacatttttgccgaagagcctgttgttggtatagtctactcttctcaactatacgaagcgactcggaccgatg

SEQ ID NO: 10973 - DNA, 203 bp, Artificial sequence
  synthetic
ggcgcgccagtcctgtcattctactcagactttactctaaaagtcaaatcttctgacattctttgaagtgaagcataaccacgggaaccactgaagaaatgaatgaaatgaaataatgcagcatctagtgctttttgcatggcccaaaggggctctgtgctgctccactacagaggaaacttcaagaacgactcggaccgatg

SEQ ID NO: 10974 - DNA, 203 bp, Artificial sequence
  synthetic
ggcgcgccagtcctcaatgggtactcagactttactctaaaagtcaaatcttctgacattctttgaagtgaagcattctatgaatgtgagctgaagaaatgaatgaaatgaaataatgcagcatctagtgctttttgcatggcccaaaggggctctgtgcctgcgggaatttacggaaacttcaagaacgactcggaccgatg

SEQ ID NO: 10975 - DNA, 203 bp, Artificial sequence
  synthetic
ggcgcgccagtcctcgatagatactcagactttactctaaaagtcaaatcttctgacattctttgaagtgaagcattctatgaatgtgagctgaagaaatgaatgaaatgaaataatgcagcatctagtgctttttgcatggcccaccatatgataactttgctccactacagaggaaacttcaagaacgactcggaccgatg

SEQ ID NO: 10976 - DNA, 203 bp, Artificial sequence
  synthetic
ggcgcgccagtcctatccactaactcagactttactctaaaagtcaaatcttctgacattctttgaagtgaagcattctatgaatgtgagctgaagaaatgaatgaaatgaaataatgcagcatctagtgctttttgcatggcccagtctcatgtgtgtatgctccactacagaggaaacttcaagaacgactcggaccgatg

SEQ ID NO: 10977 - DNA, 203 bp, Artificial sequence
  synthetic
ggcgcgccagtcctaggtaactactcagactttatagactggacggtctcttctgacattctttgaagtgaagcattctatgaatgtgagctgaagaaatgaatgaaatgaaataatgcagcatctagtgctttttgcatggcccaaaggggctctgtgctgctccactacagaggaaacttcaagaacgactcggaccgatg

SEQ ID NO: 10978 - DNA, 203 bp, Artificial sequence
  synthetic
ggcgcgccagtcctaatcacttactcagcacaggatctgatcaggagatttgtctccggtgctttacaccggagcaaccccagttggtgcgcccaaggcctggcaaataacctaggggactaggttttcttttaatttacacgtctgtcaatatgggtgcaaacaatagcaaggagtctgtgtcaagccgactcggaccgatg

SEQ ID NO: 10979 - DNA, 203 bp, Artificial sequence
  synthetic
ggcgcgccagtccttgtttaacactcagcacaggatctgatcaggagatttgtctccggtgctttacaccggagcacaaatttaaaaattgcccaaggcctggcaaataacctaggggactaggttttctttatgaggtggtagaagtcaatatgggtgcaaacaatagcaaggagtctgtgtcaagccgactcggaccgatg

SEQ ID NO: 10980 - DNA, 203 bp, Artificial sequence
  synthetic
ggcgcgccagtcctttgtcctgactcagcacaggatctgatcaggagatttgtctccggtgctttacaccggagcacaaatttaaaaattgcccaaggcctggcggtgtttaccccccactaggttttcttttaatttacacgtctgtcaatatgggtgcaaacaatagcaaggagtctgtgtcaagccgactcggaccgatg

SEQ ID NO: 10981 - DNA, 203 bp, Artificial sequence
  synthetic
ggcgcgccagtcctcctggacaactcccaggctcctcgggacattttttagcctcctgggagtctcggagggggtgatactagcaggtttgggccttgacgtggctgtggatgcagtcgttctgacccctggtggccgagaggtgaagtgcagtggcggctgcttgctcaaggccggaggaagacgcccgactcggaccgatg

SEQ ID NO: 10982 - DNA, 203 bp, Artificial sequence
  synthetic
ggcgcgccagtcctttacctacactcccaggctcctcgggactcggcgggtcctcctgggagtctcggaggggaccggctgtgcaggtttgggccttgacgtggaaacatccctgtaggttctgacccctggtggccgagaggtgaagtgcagtggcggctgcttgctcaaggccggaggaagacgcccgactcggaccgatg

SEQ ID NO: 10983 - DNA, 203 bp, Artificial sequence
  synthetic
ggcgcgccagtcctaacgcggcactcccaggctcctcgggactcggcgggtcctcctgggagtctcggaggggaccggctgtgcaggtttgggccttgacgtggctgtggatgcagtctccggcctgtagattggccgagaggtgaagtgcagtggcggctgcttgctcaaggccggaggaagacgcccgactcggaccgatg

SEQ ID NO: 10984 - DNA, 203 bp, Artificial sequence
  synthetic
ggcgcgccagtccttctatgctactcccaggctcctcgggactcggcgtcgatgagaccatatctcggaggggaccggctgtgcaggtttgggccttgacgtggctgtggatgcagtcgttctgacccctggtggccgagaggtgaagtgcagtggcggctgcttgctcaaggccggaggaagacgcccgactcggaccgatg

SEQ ID NO: 10985 - DNA, 203 bp, Artificial sequence
  synthetic
ggcgcgccagtcctcccatttgactcccaggctctggacatagaaataggtcctcctgggagtctcggaggggaccggctgtgcaggtttgggccttgacgtggctgtggatgcagtcgttctgacccctggtggccgagaggtgaagtgcagtggcggctgcttgctcaaggccggaggaagacgcccgactcggaccgatg

SEQ ID NO: 10986 - DNA, 203 bp, Artificial sequence
  synthetic
ggcgcgccagtcctcggctaggactcttgccatacgtctgtggtttgaattccagcggcgccgccagagtctgaacaagagctggggtggagggggcggggacctggggagcccggcgggtcgctatcgcggggggtactagtggcgccgccgccacagacaccaacgctgtcgccacctctgtagcccgactcggaccgatg

SEQ ID NO: 10987 - DNA, 203 bp, Artificial sequence
  synthetic
ggcgcgccagtcctgggccggcactgagagcgcctggaggctcgagcgagtacctcgaatcatgcacacctgttagcaagaaacagaagttgaaggactggaacaagtgaactaggaaagagggaacgccaatccaaggatagaaggacaaggacagaatcaccagcactggctgaaggtaccttaaccgactcggaccgatg

SEQ ID NO: 10988 - DNA, 203 bp, Artificial sequence
  synthetic
ggcgcgccagtcctacttgtcaactgagagcgcctggaggctcgagcggagggtaattcatttgcacacctgttagcaagaaacagaagttgaaggactggaacaagtgaactaggaaagagggaacgccaaagtccaatgtcccagacaaggacagaatcaccagcactggctgaaggtaccttaaccgactcggaccgatg

SEQ ID NO: 10989 - DNA, 203 bp, Artificial sequence
  synthetic
ggcgcgccagtccttttacgacactgagagcgcctggaggctcgagcggagggtaattcatttgcacacctgttagcaagaaacagaagttgaaggactggaacaagtgaactaggaaagagggaacgccaatccaaggatagaaggacaaggacagaatcaccagcactggctctgctatgagccgtcgactcggaccgatg

SEQ ID NO: 10990 - DNA, 203 bp, Artificial sequence
  synthetic
ggcgcgccagtcctgtcgtcaaactgagagcgcctggaggctcgagcggagggtaattcatttgcacacctgttagcaagaaacagaagttgaaggactggaacaagtgaactaggaaagagggaacgccaatccaaggatagaaggacaaggacagaatgcggccgtgaattcgaaggtaccttaaccgactcggaccgatg

SEQ ID NO: 10991 - DNA, 203 bp, Artificial sequence
  synthetic
ggcgcgccagtcctcagacccaactgagagcgcctggaggctcgagcggagggtaattcatttgcacacctgttagcaagaaacagaagttgaaggactggaacaagtgaactaggaacttataccgatatctccaaggatagaaggacaaggacagaatcaccagcactggctgaaggtaccttaaccgactcggaccgatg

SEQ ID NO: 10992 - DNA, 203 bp, Artificial sequence
  synthetic
ggcgcgccagtcctcgcactgtactgagagcgcctggaggctcgagcggagggtaattcatttgcacacctgttagcaagaaacagaagttgaaggactggaactgtccgctgtccgtagagggaacgccaatccaaggatagaaggacaaggacagaatcaccagcactggctgaaggtaccttaaccgactcggaccgatg

SEQ ID NO: 10993 - DNA, 203 bp, Artificial sequence
  synthetic
ggcgcgccagtccttcagtgccactgataaagaaaggaaaagctaccaccattacatcagtcttaccgaagccagcactagttgcatctcaacggcgtagaaataaagtccttattctaggatcaggaggtctgtccattggtcaggctggagaatttgattactcaggatctcaagctgtaaaagcccgactcggaccgatg

SEQ ID NO: 10994 - DNA, 203 bp, Artificial sequence
  synthetic
ggcgcgccagtcctctccgtgcactgcaataggccactcgcgcgaggcttccccttcgtcgatgttggagtgtcggctctcctgctagcagccggatgctggggacaagtcaccctcaccgttacggtaacagcggcaacactccttttttgccactatgcctacatggttcccggttggcaagctgacgactcggaccgatg

SEQ ID NO: 10995 - DNA, 203 bp, Artificial sequence
  synthetic
ggcgcgccagtccttggtgtccactggcgctaaaagttttgagcttctattgtactctacctcaccgtccagggagcaggtagctgctgggctccggggacactttgcgttcgggctgggagcgtgctttccacgacggtgacacgcttccctggattggcagccagactgccttccgggtcactgcccgactcggaccgatg

SEQ ID NO: 10996 - DNA, 203 bp, Artificial sequence
  synthetic
ggcgcgccagtcctcatatcttactggcgctaaaagttttgagcttctcaaaagtctagagccaccgtccagggagcaggtagctgctgggctccggggacactttgcgttcgggctgggagcgtgctttccacgacggtgacacgaagtgacttcacaacagccagactgccttccgggtcactgcccgactcggaccgatg

SEQ ID NO: 10997 - DNA, 203 bp, Artificial sequence
  synthetic
ggcgcgccagtcctccggctgaactgggaaaaatggccttccgcgccagccgcagccacagccgcaacgccacccgcagccacagccacagccacagccccaggcatagccttcggcacagccccggctccggctcctgcggcagctcctctgggcaccgtccctgcgccgacatcctggaggttgggcgactcggaccgatg

SEQ ID NO: 10998 - DNA, 203 bp, Artificial sequence
  synthetic
ggcgcgccagtcctacatactcactggggacctccgcgcctgggaaaaggagttggctgaaggacttggggagcccagaagctgccaccgaaccaagaaccacctctgtgcagaaaagcaaccaccttgttctctattctgctgcccgagacaaccacatcctcctcctcctacacccaaaggctccccgactcggaccgatg

SEQ ID NO: 10999 - DNA, 203 bp, Artificial sequence
  synthetic
ggcgcgccagtcctgagcattgactggggacctcgctcaggaccgtggggagttggctgaaggacttggggagcccagaagctgccaccgaaccaagaaccacctctgtgcagaaaagagtaacgtgcccggtctattctgctgcccgagacaaccacatcctcctcctcctacacccaaaggctccccgactcggaccgatg

SEQ ID NO: 11000 - DNA, 203 bp, Artificial sequence
  synthetic
ggcgcgccagtcctggcacggaactggggacctcgctcaggaccgtggggagttggctgaaggacttggggagcccagaagctgccaccgaaccaagaaccacctctgtgcagaaaagcaaccaccttgttctctattctgctgccatgcttttatcacgcctcctcctcctacacccaaaggctccccgactcggaccgatg

SEQ ID NO: 11001 - DNA, 203 bp, Artificial sequence
  synthetic
ggcgcgccagtccttgtaagagactggggacctcgctcaggaccgtggggagttggctgaaggacttggggagcccagaagctgccaccggcaacccttttcggtctgtgcagaaaagcaaccaccttgttctctattctgctgcccgagacaaccacatcctcctcctcctacacccaaaggctccccgactcggaccgatg

SEQ ID NO: 11002 - DNA, 203 bp, Artificial sequence
  synthetic
ggcgcgccagtcctagcgaaacactggggacctcgctcaggaccgtggtcttgctcacccttgacttggggagcccagaagctgccaccgaaccaagaaccacctctgtgcagaaaagcaaccaccttgttctctattctgctgcccgagacaaccacatcctcctcctcctacacccaaaggctccccgactcggaccgatg

SEQ ID NO: 11003 - DNA, 203 bp, Artificial sequence
  synthetic
ggcgcgccagtcctcgctgtagacttccggtgacgtatttccgcttccctagaatatccgcctacgtatttccgcttccgggacacgtccgcttaaaagcggaagtgacgccctttcccaaccacacctacctcgcctataagaatcagtgtcagttcctctgactcactctgttcgtagaggtcacccgactcggaccgatg

SEQ ID NO: 11004 - DNA, 203 bp, Artificial sequence
  synthetic
ggcgcgccagtcctagctacaaacttccggtgacgtatttccgcttccggtcccgcgaaaattacgtatttccgcttccgggacacgtccgcttaaaagcggaagtgacgccctttcccaaccacacctacctcgcctataagaatcagtgtcagttcctctgactcactctgtgatcgcctcagtttcgactcggaccgatg

SEQ ID NO: 11005 - DNA, 203 bp, Artificial sequence
  synthetic
ggcgcgccagtccttccactccacttcgcaagatcaagcgacacaaatgaacacgccttctcagccccgccagcacttctaccctagccgggcccagcccccgagcagtgcagcctcccgagtgcagagtgcagcccctgcccgccctggcccagctgcccatgtctaccctgctggatcccaagtaacgactcggaccgatg

SEQ ID NO: 11006 - DNA, 203 bp, Artificial sequence
  synthetic
ggcgcgccagtcctacaatacaacttggctgactgtagggctgtgctgcgcggtccttcccattcaccctagtctggcgctcgccggcgtgggcgggccggaccttcgccgcttccaggaagggccacaacggccgtcggaccacggcgcggcggccagttcctttatagttttgttcagaaaaacatcgactcggaccgatg

SEQ ID NO: 11007 - DNA, 203 bp, Artificial sequence
  synthetic
ggcgcgccagtcctagactcacactttccaaggcgcccgccgactggcatggcgcaccgacccggggccggggccccgggagagggaatgagtgtgagctcgtgagtgggcgccgccgccaccgcccccgccgccgtcgtctcggtagcagccttcgccacgccggggtcttcagctccactggggcccgactcggaccgatg

SEQ ID NO: 11008 - DNA, 203 bp, Artificial sequence
  synthetic
ggcgcgccagtccttccaaacgactttccaaggcgcccgccgactggctgtattggggagggacatatacttctgtcgggagagggaatgagtgtgagctcgtgagtgggcgccgccgccaccgcccccgccgccgtcgtctcggtagcagccttcgccacgccggggtcttcagctccactggggcccgactcggaccgatg

SEQ ID NO: 11009 - DNA, 203 bp, Artificial sequence
  synthetic
ggcgcgccagtcctagtagttcactttccaaggcgcccgccgactggctgtattggggagggcggggccggggccccgggagagggaatgagtgtgagctcgtgagtgggcgccgccgccaccgcccccgccgccgtcgtctcggtagcagccttcgccacgccggggtcttcacacatcagatctgacgactcggaccgatg

SEQ ID NO: 11010 - DNA, 203 bp, Artificial sequence
  synthetic
ggcgcgccagtcctgttacaatactttccaaggcgcccgccgactggctgtattggggagggcggggccggggccccgggagagggaatgagtgtgagctcgtgagtgggcgccgccgccaccgcccccgccgccgtcgtctcggtagcagccttcgccacgccggggtcttcagctccactggggcccgactcggaccgatg

SEQ ID NO: 11011 - DNA, 203 bp, Artificial sequence
  synthetic
ggcgcgccagtccttaagtctaactttgcccatagcagcgggcgggcactttgcactggaaccccgcggggttcgtcaaggacgcgactctcccgacgcggggaggctattctgcccatttggggacacttccccgccgctgccaggacccgcttctctgaaaggctctccttgcagctgcttagacgcgactcggaccgatg

SEQ ID NO: 11012 - DNA, 203 bp, Artificial sequence
  synthetic
ggcgcgccagtcctcacggatgactttgcccatagcagcgggcgggcactttgcactggaacttacaacacccgagcaaggacgcgactcggggcttcttaaagggctattctgcccatttggggacacttccccgccgctgccaggacccgcttctctgaaaggctctccttgcagctgcttagacgcgactcggaccgatg

SEQ ID NO: 11013 - DNA, 203 bp, Artificial sequence
  synthetic
ggcgcgccagtccttaaagtaaactttgcccatagcagcgggcgggcactttgcactggaacttacaacacccgagcaaggacgcgactctcccgacgcggggactgacacggctgagtttggggacacttccccgccgctgccaggacccgcttctctgaaaggctctccttgcagctgcttagacgcgactcggaccgatg

SEQ ID NO: 11014 - DNA, 203 bp, Artificial sequence
  synthetic
ggcgcgccagtcctttgacgcaactttgcccatagcagcgggcgggcactttgcactggaacttacaacacccgagcaaggacgcgactctcccgacgcggggaggctattctgcccacccctctgttacgacccgccgctgccaggacccgcttctctgaaaggctctccttgcagctgcttagacgcgactcggaccgatg

SEQ ID NO: 11015 - DNA, 203 bp, Artificial sequence
  synthetic
ggcgcgccagtcctacttgggtactttgcccatagcagcgggcgggcactttgcactggaacttacaacacccgagcaaggacgcgactctcccgacgcggggaggctattctgcccatttggggacacttccccgccgctgccaggacccgcttctctgaaaggctctccttgcagctgcttagacgcgactcggaccgatg

SEQ ID NO: 11016 - DNA, 203 bp, Artificial sequence
  synthetic
ggcgcgccagtcctcgacatttactttgcccatagcagcgggcgggcactttgcactggaacttacaacacccgagcaaggacgcgactctcccgacgcggggaggctattctgcccatttggggacacttccccgccgctgccagtcttataccgatataaaggctctccttgcagctgcttagacgcgactcggaccgatg

SEQ ID NO: 11017 - DNA, 203 bp, Artificial sequence
  synthetic
ggcgcgccagtcctgcgcccagactttgcccatagcagcgggcgggcactttgcactggaacttacaacacccgagggtatgtcgcctgatcccgacgcggggaggctattctgcccatttggggacacttccccgccgctgccaggacccgcttctctgaaaggctctccttgcagctgcttagacgcgactcggaccgatg

SEQ ID NO: 11018 - DNA, 203 bp, Artificial sequence
  synthetic
ggcgcgccagtcctacttatacagaaaggggcggaaaaccactattcggtgcggcagtgcggagctcctgagaccggcgggcacacgggggtctgtggcccccgccgtagcagtggctgccgccgtcgcttggttcccgtcggtctgcgggaggcgggttatggcggcggcggcagtgagagctgtgacgactcggaccgatg

SEQ ID NO: 11019 - DNA, 203 bp, Artificial sequence
  synthetic
ggcgcgccagtcctggattatcagaaaggggcggggccggcgggcagcgtgcggcagtgcggagctcctgagaccggcgggcacacgggggtctgtggcccccgccgtagcagtggctgccgccgtcgcttggttcccgtcggtctgcgggaggcgggttatggcggcggcggcagtgagagctgtgacgactcggaccgatg

SEQ ID NO: 11020 - DNA, 203 bp, Artificial sequence
  synthetic
ggcgcgccagtcctctgggtcgagaaaggggcggggccggcgggcagcgtgcggcagtgcggagctcctgagaccggcgggcacacgggggtctgtggcccccgccgtagcagtggctgccgccgtcgcttggttcccgtcggtctgcgggaggcgggttatggcggcggcggctagtgagtagtacccgactcggaccgatg

SEQ ID NO: 11021 - DNA, 203 bp, Artificial sequence
  synthetic
ggcgcgccagtccttcaggacgagaaaggggcggggccggcgggcagcgtgcggcagtgcggagctcctgagaccggcgggcacacgggggtctgtggcccccggttgccggagtcaggccgccgtcgcttggttcccgtcggtctgcgggaggcgggttatggcggcggcggcagtgagagctgtgacgactcggaccgatg

SEQ ID NO: 11022 - DNA, 203 bp, Artificial sequence
  synthetic
ggcgcgccagtcctagattaaaagaaaggggcggggccggcgggcagcgtgcggcagtgcggagctcctgagaccggcgggcacacggggtagcccttataggcccgtagcagtggctgccgccgtcgcttggttcccgtcggtctgcgggaggcgggttatggcggcggcggcagtgagagctgtgacgactcggaccgatg

SEQ ID NO: 11023 - DNA, 203 bp, Artificial sequence
  synthetic
ggcgcgccagtcctcggttaatagaactagttaatgcggcccagtccgagacagcagatgaggagactgtccttcctgtttcgcagatgaggaaactgaggcttagagaagtttggcaaattggctaagttcctacagctaattgtgggattagtgatatgcttttctaaagagtagaaaagtcgaagcgactcggaccgatg

SEQ ID NO: 11024 - DNA, 203 bp, Artificial sequence
  synthetic
ggcgcgccagtcctttctcggcagaatgatatctgtcaaaagaaacacttggagagcactgagtttagtaataggtgactgccggaaaaaagggaactttgaatattgtcaagaacaggaggcatgagcccggaacgcgcttgcttttaggagacagccactttctgtgtggtacgctggattcaaggcgactcggaccgatg

SEQ ID NO: 11025 - DNA, 203 bp, Artificial sequence
  synthetic
ggcgcgccagtcctgtgcgaatagaatgatatctgtcaaaagaaacacttggagagcactgagtttagtaataggtgactgccggaaaaaagggaactttgaatcgaagttgtttgctgaggcatgagcccggaacgcgcttgcttttaggagacagccactttctgtgtggtacgctggattcaaggcgactcggaccgatg

SEQ ID NO: 11026 - DNA, 203 bp, Artificial sequence
  synthetic
ggcgcgccagtccttagagcgcagaatgatatctgtcaaaagaaacacttggagagcactgagtttagtaataggtgactgccggaaaaagaaaggtgacatcgattgtcaagaacaggaggcatgagcccggaacgcgcttgcttttaggagacagccactttctgtgtggtacgctggattcaaggcgactcggaccgatg

SEQ ID NO: 11027 - DNA, 203 bp, Artificial sequence
  synthetic
ggcgcgccagtcctatgtgagaagacagccttgtctcgtctgaaggaacagaaatctctgggccaggtggaacccagggtcagagagggatgggagagagattccccaggctctcagagaagatcagcagaaagtctgcaagaccctaagaaccatcagccctcagctgcacctcctcccctccaaggcgactcggaccgatg

SEQ ID NO: 11028 - DNA, 203 bp, Artificial sequence
  synthetic
ggcgcgccagtcctcagtatttagacagccttgttctacagaaatgatgagaaatctctgggccaggtggaacccagggtcagagagggatgggagagagattccccaggctctcagagaagatcagcagaaagtctgcaagaccctaagaaccatcagccctcagctgcacctcctcccctccaaggcgactcggaccgatg

SEQ ID NO: 11029 - DNA, 203 bp, Artificial sequence
  synthetic
ggcgcgccagtcctctttggcgagacagccttgttctacagatcctccagaggtaacggaaaccaggtggaacccagggtcagagagggatgggagagagattccccaggctctcagagaagatcagcagaaagtctgcaagaccctaagaaccatcagccctcagctgcacctcctcccctccaaggcgactcggaccgatg

SEQ ID NO: 11030 - DNA, 203 bp, Artificial sequence
  synthetic
ggcgcgccagtcctaagagacaagacagccttgttctacagatcctcccagaaatctctgggccaggtggaacccagggtcagagagggatgggagagagattccccaggctctcagagaagatcagcagaaagtctgcaagaccctaagaaccatcagccctcagctgcacctaggttataagtccacgactcggaccgatg

SEQ ID NO: 11031 - DNA, 203 bp, Artificial sequence
  synthetic
ggcgcgccagtcctagggctttagacctctctgtgcttagggcaaacatcatttggccttaaatgggattctgtgaacttactcaaaagaattgacagctggactgttctttggggccttatgtggtgtttgcctctgaggtactcaggggcatttaggtttttcctcattcttaaataataatgaaccgactcggaccgatg

SEQ ID NO: 11032 - DNA, 203 bp, Artificial sequence
  synthetic
ggcgcgccagtcctggtgtttcagacctctctgtgcttagggcaaacatcatttggccttaaatgggattctgtgagaggggatccctccattgacagctggactgttctttggggccttatgtggtgtttgcctctgaggtactcaggggcatttaggtttttcctcattctttttaggatggtttacgactcggaccgatg

SEQ ID NO: 11033 - DNA, 203 bp, Artificial sequence
  synthetic
ggcgcgccagtccttaagattgagacctctctgtgcttagggcaaacatcatttggccttaaatgggattctgtgagaggggatccctccattgacagctggactgttctttggggccttatgtggtgtttgcctctgaggtactcgatacgggcatcccttttcctcattcttaaataataatgaaccgactcggaccgatg

SEQ ID NO: 11034 - DNA, 203 bp, Artificial sequence
  synthetic
ggcgcgccagtcctatagtgctagacgccatagttccagaaggcggctataaagggagcctgggaggctgggtggaggagggagcagaaaaaacccaactcagcagatctgggaactgtgagagcggcaagcaggaactgtggtcagaggctgtgcgtcttggctggtagggcctgctcttttctacccgactcggaccgatg

SEQ ID NO: 11035 - DNA, 203 bp, Artificial sequence
  synthetic
ggcgcgccagtcctagcaatatagactctgtcttcagccaggcactccctccctccctcccaatcgatatgggcgtaacttctgcctgcccagcctgagctgccgcaccagctgctcctcccggccctgcgtgccccccagctgccacagctgcaccctgcccggggcctgcaacatccccgccaatgcgactcggaccgatg

SEQ ID NO: 11036 - DNA, 203 bp, Artificial sequence
  synthetic
ggcgcgccagtcctatcgggtcagactctgtcttcagccaggcactccctccctccctcccagcactatgccctacaacttctgcctgcccagcctgagctgccgcaccagctgcatactggggccctgcgtgccccccagctgccacagctgcaccctgcccggggcctgcaacatccccgccaatgcgactcggaccgatg

SEQ ID NO: 11037 - DNA, 203 bp, Artificial sequence
  synthetic
ggcgcgccagtcctattcccatagactctgtcttcagccaggcactccctccctccctcccagcactatgccctacaacttctgcctgcccagcctgagctgccgcaccagctgctccctggaatttacgcagccccccagctgccacagctgcaccctgcccggggcctgcaacatccccgccaatgcgactcggaccgatg

SEQ ID NO: 11038 - DNA, 203 bp, Artificial sequence
  synthetic
ggcgcgccagtcctcctgctcgagactctgtcttcagccaggcactccctccctccctcccagcactatgccctacaacttctgcctgcccagcctgagctgccgcaccagctgctcctcccggccctgcgtgccccccagctgccacagctgcaccctgcccggggcctgcaacatccccgccaatgcgactcggaccgatg

SEQ ID NO: 11039 - DNA, 203 bp, Artificial sequence
  synthetic
ggcgcgccagtcctcactgtgaagactctgtcttcagccaggcactccctccctccctcccagcactatgccctacaacttctgcctgcccagcctgagctgccgcaccagctgctcctcccggccctgcgtgccccccagctgccgagttgttctaaaccccggggcctgcaacatccccgccaatgcgactcggaccgatg

SEQ ID NO: 11040 - DNA, 203 bp, Artificial sequence
  synthetic
ggcgcgccagtcctgttgtggtagactctgtcttcagccaggcactccctccctccctcccagcactatgccctacaacttctgcctgcctgatgcaccggttggcaccagctgctcctcccggccctgcgtgccccccagctgccacagctgcaccctgcccggggcctgcaacatccccgccaatgcgactcggaccgatg

SEQ ID NO: 11041 - DNA, 203 bp, Artificial sequence
  synthetic
ggcgcgccagtcctgcggatctagactctgtcttcagccaggcactccctccctccctcccagcactatgccctacgtgcgtccagacagcagcctgagctgccgcaccagctgctcctcccggccctgcgtgccccccagctgccacagctgcaccctgcccggggcctgcaacatccccgccaatgcgactcggaccgatg

SEQ ID NO: 11042 - DNA, 203 bp, Artificial sequence
  synthetic
ggcgcgccagtcctattgtcttagactctgtcttcagccaggcactcctgggacagaggtaggcactatgccctacaacttctgcctgcccagcctgagctgccgcaccagctgctcctcccggccctgcgtgccccccagctgccacagctgcaccctgcccggggcctgcaacatccccgccaatgcgactcggaccgatg

SEQ ID NO: 11043 - DNA, 203 bp, Artificial sequence
  synthetic
ggcgcgccagtcctgttgtaacagactggagagaagcaggcctgagcccaaatggccaggtgtcctggggactcccaggaccacaggctgagacgagacgcagggtggctggaggaagtgagaggtgaactcagcctgggactggctgggcgagactctccacctgctccctgggaccatcgcccacccgactcggaccgatg

SEQ ID NO: 11044 - DNA, 203 bp, Artificial sequence
  synthetic
ggcgcgccagtcctatggtgagagactggagagaagcaggcctgagcctccccaaaggcagctcctggggactcccaggaccacaggctgagacgagacgcagggtggctggaggaaggccatttgattaaaagcctgggactggctgggcgagactctccacctgctccctgggaccatcgcccacccgactcggaccgatg

SEQ ID NO: 11045 - DNA, 203 bp, Artificial sequence
  synthetic
ggcgcgccagtcctttgtagtaagactgtgcagtccacggcctgaacaatgagcatcctcctctaaacgcgtgtcaagacaaaagatgcttcagctttggaaacttgttctcctgtgcggcgtgctcactgggacctcagagtctcttcttgacaatcttggcaatgacctaagcaatgtcgtggatacgactcggaccgatg

SEQ ID NO: 11046 - DNA, 203 bp, Artificial sequence
  synthetic
ggcgcgccagtcctgggtaaggagactgtgcagtggggcaaggatttcatgagcatcctcctctaaacgcgtgtcaagacaaaagatgcttcagctttggaaacaaccctctagaacaggcgtgctcactgggacctcagagtctcttcttgacaatcttggcaatgacctaagcaatgtcgtggatacgactcggaccgatg

SEQ ID NO: 11047 - DNA, 203 bp, Artificial sequence
  synthetic
ggcgcgccagtcctatgagcccagactgtgcagtggggcaaggatttcatgagcatcctcctctaaacgcgtgtcaagacaaaagatgcttcagctttggaaacttgttctcctgtgcggcgtgctcactggcgagcatatacgatttcttgacaatcttggcaatgacctaagcaatgtcgtggatacgactcggaccgatg

SEQ ID NO: 11048 - DNA, 203 bp, Artificial sequence
  synthetic
ggcgcgccagtccttgcttgtgagactgtgcagtggggcaaggatttcatgagcatcctcctctaaacgcgtgtcaagacaaaagatgcttcagctttggaaacttgttctcctgtgcggcgtgctcactgggacctcagagtctcttcttgacaatcttaatccctttacctccaatgtcgtggatacgactcggaccgatg

SEQ ID NO: 11049 - DNA, 203 bp, Artificial sequence
  synthetic
ggcgcgccagtcctcgctgacaagactgtgcagtggggcaaggatttcatgagcatcctcctctaaacgcgtgtcaagacaaaagatgcttcagctttggaaacttgttctcctgtgcggcgtgctcactgggacctcagagtctcttcttgacaatcttggcaatgacctaagcaatgtcgtggatacgactcggaccgatg

SEQ ID NO: 11050 - DNA, 203 bp, Artificial sequence
  synthetic
ggcgcgccagtcctgttaagccagactgtgcagtggggcaaggatttcatgagcatcctcctctaaacgcgtgtcaagacaaaagatgcttcagctttggaaacttgttctcctgtgcggcgtgctcactgggacctcagagtctcttcttgacaatcttggcaatgacctaaggtcgagatctttcccgactcggaccgatg

SEQ ID NO: 11051 - DNA, 203 bp, Artificial sequence
  synthetic
ggcgcgccagtcctgcccgcttagactgtgcagtggggcaaggatttcatgagcatcctcctctaaacgcgtgtcaagacaaaagatgcttcagctttggaaacttgttctcctgtgcttttcctcgcgaccgacctcagagtctcttcttgacaatcttggcaatgacctaagcaatgtcgtggatacgactcggaccgatg

SEQ ID NO: 11052 - DNA, 203 bp, Artificial sequence
  synthetic
ggcgcgccagtcctcgcaatcgagactgtgcagtggggcaaggatttcggtgctgcggatgcctaaacgcgtgtcaagacaaaagatgcttcagctttggaaacttgttctcctgtgcggcgtgctcactgggacctcagagtctcttcttgacaatcttggcaatgacctaagcaatgtcgtggatacgactcggaccgatg

SEQ ID NO: 11053 - DNA, 203 bp, Artificial sequence
  synthetic
ggcgcgccagtccttcaacctaagagaaagaaaggactctcagactgttggagcagaactactgagaaaaaccaggcattgtatcttcagttgtcatcaagttcgcaatcagattggaaaagctcaacttgaagctttcttgcctgcagtgaagcagagactgttcggccggatacgtaataaaaaaccgactcggaccgatg

SEQ ID NO: 11054 - DNA, 203 bp, Artificial sequence
  synthetic
ggcgcgccagtcctcttccctgagagaaagaaaggactctcagactgttggagcagaactactgagaaaaaccaggcattgtatcttcagttgtcatcaagttcgcaatcagattggaaaagctcaacttgaagctttcttgcctgcagtgaagcagagagatagatattattcacgtaataaaaaaccgactcggaccgatg

SEQ ID NO: 11055 - DNA, 203 bp, Artificial sequence
  synthetic
ggcgcgccagtcctcaagttgaagagaagagacttgtttggaaatatactgggcgtcactggttaacttaggattaaagacattgactagaaggtcaagaaaagggaactctataatttcaaaaatgttgagcctatttgatacatttaatgcacgtaggcaagaaaacataacaaaatcagccggtgcgactcggaccgatg

SEQ ID NO: 11056 - DNA, 203 bp, Artificial sequence
  synthetic
ggcgcgccagtcctatgacctaagagaccacagactttgagggaagctcactcaggatctgctctccggcaaagtagtaagtgaggtgctgagagcagaatgagctactttgtggattctgctgggagcagccccgtcccttactcagcgcctcgtcctgcagtggtgaggcaaaataggcatgttggcgactcggaccgatg

SEQ ID NO: 11057 - DNA, 203 bp, Artificial sequence
  synthetic
ggcgcgccagtcctgtctgagtagagaccacagactttgagggaagctcactcaggatctgctctccggcaaagtagtaagtgaggtgctgagagcagaatgagctactttgtggattctgctgggagcagccccgtcccttactcagcgcctcgtcctgcagtggtgaggcaaggacctagcaacaccgactcggaccgatg

SEQ ID NO: 11058 - DNA, 203 bp, Artificial sequence
  synthetic
ggcgcgccagtccttgtcccagagagaccacagactttgagggaagctcactcaggatctgctctccggcaaagtagtaagtgaggtgctgagagcagaatgagctactttgtggattctgctgggagcagccccgtcccttactcagcgcctcgtcctgggtactgcctcttcggacctagcaacaccgactcggaccgatg

SEQ ID NO: 11059 - DNA, 203 bp, Artificial sequence
  synthetic
ggcgcgccagtcctgcatgtcgagagaccacagactttgagggaagctcactcaggatctgctctccggcaaagtagtaagtgaggtgctgagagcagaatgagctactttgtggattctgctgggagcagccccgtcccttactctatatacacaagaacagtggtgaggcaaggacctagcaacaccgactcggaccgatg

SEQ ID NO: 11060 - DNA, 203 bp, Artificial sequence
  synthetic
ggcgcgccagtcctatctaacaagagaccacagactttgagggaagctcactcaggatctgctctccggcaaagtagtaagtgaggtgctttcgctgactgagactactttgtggattctgctgggagcagccccgtcccttactcagcgcctcgtcctgcagtggtgaggcaaggacctagcaacaccgactcggaccgatg

SEQ ID NO: 11061 - DNA, 203 bp, Artificial sequence
  synthetic
ggcgcgccagtcctttcgcgcgagagaccacagactttgagggaagctcactcaggatctgctctccggcaaagtatatttgacacgctggagagcagaatgagctactttgtggattctgctgggagcagccccgtcccttactcagcgcctcgtcctgcagtggtgaggcaaggacctagcaacaccgactcggaccgatg

SEQ ID NO: 11062 - DNA, 203 bp, Artificial sequence
  synthetic
ggcgcgccagtcctgcccttagagagaccacagactttgagggaagctttagacaacatatttctccggcaaagtagtaagtgaggtgctgagagcagaatgagctactttgtggattctgctgggagcagccccgtcccttactcagcgcctcgtcctgcagtggtgaggcaaggacctagcaacaccgactcggaccgatg

SEQ ID NO: 11063 - DNA, 203 bp, Artificial sequence
  synthetic
ggcgcgccagtcctgtctgcccagagaccacagatacctttcctcagacactcaggatctgctctccggcaaagtagtaagtgaggtgctgagagcagaatgagctactttgtggattctgctgggagcagccccgtcccttactcagcgcctcgtcctgcagtggtgaggcaaggacctagcaacaccgactcggaccgatg

SEQ ID NO: 11064 - DNA, 203 bp, Artificial sequence
  synthetic
ggcgcgccagtcctctgaagtcagagagaaaaaatactgttggcagcagcacaatgtttgggctaagacctggtcttgaaagcgccacaagcagcagctgctgagccatggctgaaggggaaatcaccaccttcacagccctgaccgagaagtttaatcttgggagccttccggacaagaagcccaaacgactcggaccgatg

SEQ ID NO: 11065 - DNA, 203 bp, Artificial sequence
  synthetic
ggcgcgccagtcctaacattggagagagaaaaaatactgttggcagcagcacaatgtttgggtatcagggaaaaagtgaaagcgccacaagcagcagctgctgagccatggctgaaggggaaatcaccaccttcacagccctgaccgagaagtttaatctgcctccagggaattacaagaagcccaaacgactcggaccgatg

SEQ ID NO: 11066 - DNA, 203 bp, Artificial sequence
  synthetic
ggcgcgccagtcctttattcggagagcgggagaacgcgtcctcgcccgaaccagcaatatggccggagctggcccatggggagcaggcgcccggtgccggccacgacgaccgccaccgcccgcgccgcgaccggccggtgaagcccagggacccccctctgggagagccccatgagggcaggagagtgcgactcggaccgatg

SEQ ID NO: 11067 - DNA, 203 bp, Artificial sequence
  synthetic
ggcgcgccagtcctctggataaagagctgggagaaggcagtgagcgagatacgcaactatggggtccgtgcggagcaggcgagcgagcgggaagacgcagccaccttcctcaccagccagcccacagcggtttgttccccttctcgggagtgcgccaatgcctgggccgacccaaaccctgtccccaacgactcggaccgatg

SEQ ID NO: 11068 - DNA, 203 bp, Artificial sequence
  synthetic
ggcgcgccagtccttctagcacagagctgggagaaggcagtgagcgagcaggcggcaggcagggtccgtgcggagcaggcgagcgagcgggaagacgcagccaccttcctcaccagccagcccacagcggttgcactgttcaagatggagtgcgccaatgcctgggccgacccaaaccctgtccccaacgactcggaccgatg

SEQ ID NO: 11069 - DNA, 203 bp, Artificial sequence
  synthetic
ggcgcgccagtcctgagcggcaagagctgggagaaggcagtgagcgagcaggcggcaggcagggtccgtgcggagcaggcgagcgagcgggaagacgcagccaccttcctcaccagccagcccacagcggtttgttccccttctcgggagtgcgccaatgcctgggccgacccattattaactatatgcgactcggaccgatg

SEQ ID NO: 11070 - DNA, 203 bp, Artificial sequence
  synthetic
ggcgcgccagtcctggcatgtcagagctgggagaaggcagtgagcgagcaggcggcaggcagggtccgtgcggagcaggcgagcgagcgggaagacgcagccaccttcctcaccagccagcccacagcggtttgttccccttctcgggagtgcgccaatgtaccacgtctgtagaaccctgtccccaacgactcggaccgatg

SEQ ID NO: 11071 - DNA, 203 bp, Artificial sequence
  synthetic
ggcgcgccagtcctttctaaacagagctgggagaaggcagtgagcgagcaggcggcaggcagggtccgtgcggagcaggcgagcgagcgggaagacgcagccaccttcctcaccagcctagagggtatctgatgttccccttctcgggagtgcgccaatgcctgggccgacccaaaccctgtccccaacgactcggaccgatg

SEQ ID NO: 11072 - DNA, 203 bp, Artificial sequence
  synthetic
ggcgcgccagtcctcttcatcaagagctgggagaaggcagtgagcgagcaggcggcaggcagggtccgtgcggagctcagacaaatagacgaagacgcagccaccttcctcaccagccagcccacagcggtttgttccccttctcgggagtgcgccaatgcctgggccgacccaaaccctgtccccaacgactcggaccgatg

SEQ ID NO: 11073 - DNA, 203 bp, Artificial sequence
  synthetic
ggcgcgccagtccttgtaattaagaggagcggcgctcaggttattccaggatctttggagacccgaggaaagccgtgttgaccaaaagcatccggcggacgcgccagagaaaaaagatggcagaaccaagggcaactaaagccgtcaggttctgaacagctggtagatgggctggcttactgaaggaccgactcggaccgatg

SEQ ID NO: 11074 - DNA, 203 bp, Artificial sequence
  synthetic
ggcgcgccagtccttcatagtgagaggagggaactgaatgacatcccaggattacataaactgtcagaggcagccgaagagttcacaagttacgcaagctctgtccggcgggtgccgctgtgtaggaaagaagctaaagcacttccagagcctgtccggagctcagaggttcggaagacttatcgacccgactcggaccgatg

SEQ ID NO: 11075 - DNA, 203 bp, Artificial sequence
  synthetic
ggcgcgccagtccttaacgcccagaggagggaactgaatgacatcccaggattacataaactgtcagaggcagccgttccagctttgctagtgaagcctggaagccggcgggtgccgctgtgtaggaaagaagctaaagcacttccagagcctgtccggagctcagaggttcggaagacttatcgacccgactcggaccgatg

SEQ ID NO: 11076 - DNA, 203 bp, Artificial sequence
  synthetic
ggcgcgccagtccttccgtaatagaggtctgaggtttcgagagtgactcccgttgtcccaaggcttcccagagcgaacctgtgcggctgcaggcaccggcgcgtcgagtttccggcgtccggaaggaccgagctcttctcgcggatccagtgttccgtttccagcccccaatctcagagcggagccgacgactcggaccgatg

SEQ ID NO: 11077 - DNA, 203 bp, Artificial sequence
  synthetic
ggcgcgccagtcctgcgggtggagagtaccggaaatccagattagagagcttaattagctctgtattaataataacactactattccaataactggaatcaccagcttgatttatctccaaaatgattcaaagaaaacaaatcatattaagactatcctaagcacgaacccatatcgtccttcaaatccgactcggaccgatg

SEQ ID NO: 11078 - DNA, 203 bp, Artificial sequence
  synthetic
ggcgcgccagtcctagtaaaccagatcagcgaattaaaatagtgattcaaaaatattttttaccgaaaggcctgcgctacgtgaaagtagtattcaaaataaaatcccgtgcggtcggaaacaaaaattaatttaaattttttaattccgaaacttaaaaccaagtttaaagaaaacttaaaatcaagcgactcggaccgatg

SEQ ID NO: 11079 - DNA, 203 bp, Artificial sequence
  synthetic
ggcgcgccagtcctttctggaaagcaacctatgagaatttcccctattccccctgatgcttccaggagaatcaacaatcagtccgattttaccggtggtaacttgattgaaattatagaaaaaataagcctagaaggatatcttacggtgatgtgcgggcacttcgaaaatagaattgatcagtaatccgactcggaccgatg

SEQ ID NO: 11080 - DNA, 203 bp, Artificial sequence
  synthetic
ggcgcgccagtcctcgtgtgccagcaacctatgagaatttcccctattccccctgatgcttccaggagaatcaacaatcagtccgattttaccggtggtaacttgattgaaattatagtttcttattctaaggaaggatatcttacttctcgacttcccaacttcgaaaatagaattgatcagtaatccgactcggaccgatg

SEQ ID NO: 11081 - DNA, 203 bp, Artificial sequence
  synthetic
ggcgcgccagtcctcggcagcgagcaatgaacgagattgctggtattactggccttggagaagaagcactatctctccaaagacaaacagaaagtttggccatattatgtaatcacacttttggaagtaatataatgagaccccaccgcatccttatcggaaaaggagttgaaggcagagttggagagcgactcggaccgatg

SEQ ID NO: 11082 - DNA, 203 bp, Artificial sequence
  synthetic
ggcgcgccagtccttcgtatgtagcagatgaggaagtggcaggcaggcaggctggccccggggacttctctctggccctgctccctccgagcgctccgccgttgcccgcctggcccctacggagtccttagccaggatggaggctgttgtgaacttgtaccaagaggtgatgaaatcacgcccgtaaacgactcggaccgatg

SEQ ID NO: 11083 - DNA, 203 bp, Artificial sequence
  synthetic
ggcgcgccagtccttcataaatagcagatgaggaagtggcaggcaggcaggctggccccggggacttctctctggccctgctccctccgagcgctccgccgttgcccgcctggcccctacggagtccttagccaggatggaggctgttgtgaacttgtaccaagaggtgatgaagcacgcagttcctgcgactcggaccgatg

SEQ ID NO: 11084 - DNA, 203 bp, Artificial sequence
  synthetic
ggcgcgccagtcctccttagagagcagctgatacccagggaggtgtcaggacctgcccggggcgcggggtcgccggaagccaggcgggagccccggctgctttcaaatggcagcacaccataagtgaccctccctgggctgctttctttcgattatcatcagtgaccctaccccggctgctcttcccacgactcggaccgatg

SEQ ID NO: 11085 - DNA, 203 bp, Artificial sequence
  synthetic
ggcgcgccagtcctcactttccagcagctgatacccagggaggtgtcaggacctgcccggggcgcggggtcgccggaagccaggcgggagccccggctgctttctggcaatctagtctcataagtgaccctccctgggctgctttctttcgattatcatcagtgaccctaccccggctgctcttcccacgactcggaccgatg

SEQ ID NO: 11086 - DNA, 203 bp, Artificial sequence
  synthetic
ggcgcgccagtccttggccctaagcagctgatacccagggaggtgtcaggacctgcccggggcgcggggtcgccggaagccaggcgggagccccggctgctttctggcaatctagtctcataagtgaccctcgagacatacaggcatttcgattatcatcagtgaccctaccccggctgctcttcccacgactcggaccgatg

SEQ ID NO: 11087 - DNA, 203 bp, Artificial sequence
  synthetic
ggcgcgccagtcctctggaaggagcagctgatacccagggaggtgtcaggacctgcccggggcgcggggtcgccggcccttttaaactgcccccggctgctttctggcaatctagtctcataagtgaccctccctgggctgctttctttcgattatcatcagtgaccctaccccggctgctcttcccacgactcggaccgatg

SEQ ID NO: 11088 - DNA, 203 bp, Artificial sequence
  synthetic
ggcgcgccagtccttttgagtgagcatgacgtaccaaacaggcacgagataagtcccggacatgatggcacatggaatgacaatcagctacaagaaatggcccaactgaggattaagcaccaagaggaactgactgaattacacaaccgtacctaccgtatcaactggtgattgacctgaataaccaacgactcggaccgatg

SEQ ID NO: 11089 - DNA, 203 bp, Artificial sequence
  synthetic
ggcgcgccagtcctgaattaatagccagagggcagtgtgtcgtaacggtacggatcaacctcgaaccgactactttgggtgtccgtgtttcattttattcctatactggctgcttatggtgacaattgagagattgttaccatatagctattggattggccatccggtgaccaatagagctattatatcgactcggaccgatg

SEQ ID NO: 11090 - DNA, 203 bp, Artificial sequence
  synthetic
ggcgcgccagtcctccgtccgcagccagccactggagtcgcagcccgcctcggccgccgcgggagcggttcgagttgggagacggccggaagccagtaaaagaagagaaaatggaagaaagggacctgctgtccgacttacaggacatcagcgacagcgagaggaagaccagctcggccgagtcctcgcgactcggaccgatg

SEQ ID NO: 11091 - DNA, 203 bp, Artificial sequence
  synthetic
ggcgcgccagtcctgtataagaagccagccactggagtcgcagcccgcctcggccgccgcggtgtgaaagtcgagagggagacggccggaagccagtaaaagaagagaaaatggaagaaagggacctgctgtccgacttacaggacatcagcgacagcgagaggaagaccagctcggccgagtcctcgcgactcggaccgatg

SEQ ID NO: 11092 - DNA, 203 bp, Artificial sequence
  synthetic
ggcgcgccagtccttggtggttagccagccactggagtcgcagcccgcgagccaataaatttgagcggttcgagttgggagacggccggaagccagtaaaagaagagaaaatggaagaaagggacctgctgtccgacttacaggacatcagcgacagcgagaggaagaccagctcggccgagtcctcgcgactcggaccgatg

SEQ ID NO: 11093 - DNA, 203 bp, Artificial sequence
  synthetic
ggcgcgccagtcctaacgttcaagcccaaccggctaaccgatgacagaccgtggcaaggaggtgtacagccctgactttcatagcctcggaggagaaggtcttggtggccgacaagtctggagacgtctactccttttcggtgctggagccacacgggtgtggccgtctagagctggggcacctgtctcgactcggaccgatg

SEQ ID NO: 11094 - DNA, 203 bp, Artificial sequence
  synthetic
ggcgcgccagtcctcagacgtgagcccgatcgtagttccgcgtgattgaagacaccccctcgtccaagaatgcaaagcacatccaataaaatagctggattataactcctcttctttctctgggggccgtggggtgggagctggggcgagaggtgccgttggcccccgttgcttttcctctgggaaggcgactcggaccgatg

SEQ ID NO: 11095 - DNA, 203 bp, Artificial sequence
  synthetic
ggcgcgccagtcctagtaaggtagccggcgcatcaatcatgcaaaatcactattttgtactactaactcattaagaaaaacttaggatccaagagatttactctaggatctcctattaagcttagcagtcattagttgagagttcaacttgcaaaactctaaccttcactctaataacaattcatccacgactcggaccgatg

SEQ ID NO: 11096 - DNA, 203 bp, Artificial sequence
  synthetic
ggcgcgccagtcctgagacgaaagcgccactctgctggctgaggctgcggagagtgtgcggcgaggccgcccacagcgcggtcgtgatgtctcgggagtcggatgttgaggctcagcagtctcatggcagcagtgcctgttcacagccccatggcagcgttacccagtcccaaggctcctcctcacagcgactcggaccgatg

SEQ ID NO: 11097 - DNA, 203 bp, Artificial sequence
  synthetic
ggcgcgccagtcctaagcctcgagcgccactctgctggctgaggctgcggagagtgtgcggctccaggtgggctcacgcggtcgtgatgtctcgggagtcggataggatattggctatgtctcatggcagcagtgcctgttcacagccccatggcagcgttacccagtcccaaggctcctcctcacagcgactcggaccgatg

SEQ ID NO: 11098 - DNA, 203 bp, Artificial sequence
  synthetic
ggcgcgccagtcctcgtagggcagcgccactctgctggctgaggctgcggagagtgtgcggctccaggtgggctcacgcggtcgtgatgtctcgggagtcggatgttgaggctcagcagtctcatggcagcagtgcctgttcacagattataattgttcgtacccagtcccaaggctcctcctcacagcgactcggaccgatg

SEQ ID NO: 11099 - DNA, 203 bp, Artificial sequence
  synthetic
ggcgcgccagtcctagggagtcagcgccactctgctggctgaggctgcggagagtgtgcggctccaggtgggctcacgcggtcgtgatgtctcgggagtcggatgttgaggctcagcagtctcatggcagcagtgcctgttcacagccccatggcagcgtccaagtcgagatgagctcctcctcacagcgactcggaccgatg

SEQ ID NO: 11100 - DNA, 203 bp, Artificial sequence
  synthetic
ggcgcgccagtcctgttggcatagcgccactctgctggctgaggctgcggagagtgtgcggctccaggtgggctcacgcggtcgtgatgtctcgggagtcggatgttgaggctcagcagtctcatggcagcagtgcctgttcacagccccatggcagcgttacccagtcccaaggctcctcctcacagcgactcggaccgatg

SEQ ID NO: 11101 - DNA, 203 bp, Artificial sequence
  synthetic
ggcgcgccagtccttctggagcagcgccactctgctggctgaggctgcggagagtgtgcggctccaggtgggctcacgcggtcgtgatgtctcgggagtcggatgttgaggctcagcagtctcatggcagcagtgcctgttcacagccccatggcagcgttacccagtcccaagttctggtactcggtcgactcggaccgatg

SEQ ID NO: 11102 - DNA, 203 bp, Artificial sequence
  synthetic
ggcgcgccagtcctgtaagacaagcgccactctgctggctgaggctgcggagagtgtgcggctccaggtgggctcacgcggtcgtgatgtgcattctactcagggttgaggctcagcagtctcatggcagcagtgcctgttcacagccccatggcagcgttacccagtcccaaggctcctcctcacagcgactcggaccgatg

SEQ ID NO: 11103 - DNA, 203 bp, Artificial sequence
  synthetic
ggcgcgccagtccttccgcgaaagcgccagtttcgcgctgagctgcaggcgcggcgaaacttccctctacccgcccggcccgcggcgcgcaccgttggcgctggacgcttcctccttggaagcgcctctccctcagttatggagaaaacttgtatagatgcacttcctcttactatgaattcttcagacgactcggaccgatg

SEQ ID NO: 11104 - DNA, 203 bp, Artificial sequence
  synthetic
ggcgcgccagtcctacagccaaagcgcggccgttcttacgctccgatggtcgggggaggacaacaaagggccgcgggcggcgggcagtggtgtcccagtctcccggtgcttccctgaggctgaggcgcccggcctcccgcccgccgcgctccagatgaagtgtgagcactgcacgcgcaaggaatgtacgactcggaccgatg

SEQ ID NO: 11105 - DNA, 203 bp, Artificial sequence
  synthetic
ggcgcgccagtcctgaagttacagcgcggccgttgggggtgaggccgcagacacaacatcagacaaagggccgcgggcggcgggcagtggtgtcccagtctcccggtgcttccctgaggctgaggcgcccggcctcccgcccgccgcgctccagatgaagtgtgagcactgcacgcgcaaggaatgtacgactcggaccgatg

SEQ ID NO: 11106 - DNA, 203 bp, Artificial sequence
  synthetic
ggcgcgccagtccttagaactaagcgcggccgttgggggtgaggccgcgtcgggggaggacaacaaagggccgcgggcggcgggcagtgggccgagcaggcggtggtgcttccctgaggctgaggcgcccggcctcccgcccgccgcgctccagatgaagtgtgagcactgcacgcgcaaggaatgtacgactcggaccgatg

SEQ ID NO: 11107 - DNA, 203 bp, Artificial sequence
  synthetic
ggcgcgccagtcctcttaccgtagcgcggccgttgggggtgaggccgcgtcgggggaggacaacaaagggccgcgggcggcgggcagtggtgtcccagtctcccaccctaattaccctgctgaggcgcccggcctcccgcccgccgcgctccagatgaagtgtgagcactgcacgcgcaaggaatgtacgactcggaccgatg

SEQ ID NO: 11108 - DNA, 203 bp, Artificial sequence
  synthetic
ggcgcgccagtcctataagttgagcgcggccgttgggggtgaggccgcgtcgggggaggacaacaaagggccgcgggcggcgggcagtggtgtcccagtctcccggtgcttccctgaggctgaggcgcccggcctcccgcccgccgcgctccagatgaagtgtgagcactgcactaatttacccacatcgactcggaccgatg

SEQ ID NO: 11109 - DNA, 203 bp, Artificial sequence
  synthetic
ggcgcgccagtccttgagtgatagcgcggccgttgggggtgaggccgcgtcgggggaggacactcgcctaggatccgcggcgggcagtggtgtcccagtctcccggtgcttccctgaggctgaggcgcccggcctcccgcccgccgcgctccagatgaagtgtgagcactgcacgcgcaaggaatgtacgactcggaccgatg

SEQ ID NO: 11110 - DNA, 203 bp, Artificial sequence
  synthetic
ggcgcgccagtcctaccatcaaagcggagcctggaggccaggtctctgcctcggaagtgagtctggtctgtgggagcccctgcctgtcccctcctgggtcactggtgtttgaggattttgctaacctgacgccctttgtcaaggaagagctgaggtttgccatccagaacaagcacctctgccaccggcgactcggaccgatg

SEQ ID NO: 11111 - DNA, 203 bp, Artificial sequence
  synthetic
ggcgcgccagtcctggagactaagcggagcctggaggccaggtctctgcctcggaagtgagtgcttctgccatcgtcccctgcctgtcccctcctgggtcactgcgaaccttttcgcgtgctaacctgacgccctttgtcaaggaagagctgaggtttgccatccagaacaagcacctctgccaccggcgactcggaccgatg

SEQ ID NO: 11112 - DNA, 203 bp, Artificial sequence
  synthetic
ggcgcgccagtcctcttatgtgagcggagcctggaggccaggtctctgcctcggaagtgagtgcttctgccatcgtcccctgcctgtcccctcctgggtcactggtgtttgaggattttgctaacctgacgcaaaggtggggtcctgagctgaggtttgccatccagaacaagcacctctgccaccggcgactcggaccgatg

SEQ ID NO: 11113 - DNA, 203 bp, Artificial sequence
  synthetic
ggcgcgccagtccttaaacaatagcggagcctggaggccaggtctctgcctcggaagtgagtgcttctgccatcgtcccctgcctgtcccctcctgggtcactggtgtttgaggattttgctaacctgacgccctttgtcaaggaagagctgaggtttgccatccagaacaagcacctctgccaccggcgactcggaccgatg

SEQ ID NO: 11114 - DNA, 203 bp, Artificial sequence
  synthetic
ggcgcgccagtcctaatcgtgtagcggagcctggaggccaggtctctgcctcggaagtgagtgcttctgccatcgtcccctgcctgtcccctcctgggtcactggtgtttgaggattttgctaacctgacgccctttgtcaaggaagagctgaggtttgctcagtgaccagcttacctctgccaccggcgactcggaccgatg

SEQ ID NO: 11115 - DNA, 203 bp, Artificial sequence
  synthetic
ggcgcgccagtcctcctaaaggagcggagcctggaggccaggtctctgttgattgcaatcacgcttctgccatcgtcccctgcctgtcccctcctgggtcactggtgtttgaggattttgctaacctgacgccctttgtcaaggaagagctgaggtttgccatccagaacaagcacctctgccaccggcgactcggaccgatg

SEQ ID NO: 11116 - DNA, 203 bp, Artificial sequence
  synthetic
ggcgcgccagtcctagcccagaagcggagcctgggtagatcaggctctcctcggaagtgagtgcttctgccatcgtcccctgcctgtcccctcctgggtcactggtgtttgaggattttgctaacctgacgccctttgtcaaggaagagctgaggtttgccatccagaacaagcacctctgccaccggcgactcggaccgatg

SEQ ID NO: 11117 - DNA, 203 bp, Artificial sequence
  synthetic
ggcgcgccagtcctggagtagtagcggccacatcgtcccctcctcggagtcattttttcctgttccccctctgccgccctttcctcacgccccgggtgaggcaattctcttggaagcgaaggtgtcggctatgagccggagcctccttccttgaatttctccgtggaggacccgccgcgccccccggccgactcggaccgatg

SEQ ID NO: 11118 - DNA, 203 bp, Artificial sequence
  synthetic
ggcgcgccagtcctctgtgaagagcggcgggtcacgtgacgcggtgccacagtgatgataggccaagatggcggtgtgcatcgcggtgattgccaaggagaattaccccctctacattcgcagcacccctacggagaacgagctgaagttccactacatggtgcacacatctctggacgtggtggatgcgactcggaccgatg

SEQ ID NO: 11119 - DNA, 203 bp, Artificial sequence
  synthetic
ggcgcgccagtcctagtgctgcagcggcgggtcacgtgacgcggtgcctggcgccgagcctcccaagatggcggtgtgcatcgcggtgattgccaaggagaattaccccctctacattcgcagcacccctacaccacgacgtgaacagttccactacatggtgcacacatctctggacgtggtggatgcgactcggaccgatg

SEQ ID NO: 11120 - DNA, 203 bp, Artificial sequence
  synthetic
ggcgcgccagtcctattcacccagcggcgggtcacgtgacgcggtgcctggcgccgagcctcccaagatggcggtgtgcatcgcggtgattgccaaggagaattaccccctctacattcgcagcacccctacggagaacgagctgaagttccactacatggtgcacacatctctggacgtggtggatgcgactcggaccgatg

SEQ ID NO: 11121 - DNA, 203 bp, Artificial sequence
  synthetic
ggcgcgccagtcctcttccactagcggcgggtcacgtgacgcggtgcctggcgccgagcctcccaagatggcggtgtgcatcgcggtgattgccaaggagaattaccccctctacattcgcagcacccctacggagaacgagctgagagaaactacaccagtgcacacatctctggacgtggtggatgcgactcggaccgatg

SEQ ID NO: 11122 - DNA, 203 bp, Artificial sequence
  synthetic
ggcgcgccagtcctaggtattgagcggcgggtcacgtgacgcggtgcctggcgccgagcctcccaagatggcggtgtgcatcgcggtgattgccaaggagaattaccccctctacattgtacctgatttacaggagaacgagctgaagttccactacatggtgcacacatctctggacgtggtggatgcgactcggaccgatg

SEQ ID NO: 11123 - DNA, 203 bp, Artificial sequence
  synthetic
ggcgcgccagtcctacatggagagctgcaacccagcagccagcctgtcgtaacgcgcaagtccgtggcggaaccgaaagaggatacccctcgtgtttccttttattcttgaatggctgcttatggtgacaatcatagattgttatcataaagcgagttggattggccatccagtgtgaatcagattaacgactcggaccgatg

SEQ ID NO: 11124 - DNA, 203 bp, Artificial sequence
  synthetic
ggcgcgccagtcctacggattaagctgcaacccagcagccagcctgtcgtaacgcgcaagtccgtggcggaaccgactactttgggtgtccgtgtttccttttattcttgaatggctgcttatggtgacaatcatagattgttatcataaagcgagttggattggccatccagtcgattcttagcattcgactcggaccgatg

SEQ ID NO: 11125 - DNA, 203 bp, Artificial sequence
  synthetic
ggcgcgccagtcctagctggatagctgcaacccagcagccagcctgtcgtaacgcgcaagtccgtggcggaaccgactactttgggtgtccgtgtttccttttattcttgaatggctgcttatggtgacaatttgtctagtaccggataaagcgagttggattggccatccagtgtgaatcagattaacgactcggaccgatg

SEQ ID NO: 11126 - DNA, 203 bp, Artificial sequence
  synthetic
ggcgcgccagtcctgacagaagagctgcaacccagcagccagcctgtcgtaacgcgcaagtccgtggcggaaccgactactttgggtgtctcatcacgaaggggttcttgaatggctgcttatggtgacaatcatagattgttatcataaagcgagttggattggccatccagtgtgaatcagattaacgactcggaccgatg

SEQ ID NO: 11127 - DNA, 203 bp, Artificial sequence
  synthetic
ggcgcgccagtcctcgtagcctagctggtgtctgagggattacgactcgcgtggtcggacagcacatgttagtcatgtattatggtgtttcccaacacgtatctttgctctagtattgaactttagtgatgacatcctacttgtgctacacctgattagttagcccttgtggatacgccactgccgctcgactcggaccgatg

SEQ ID NO: 11128 - DNA, 203 bp, Artificial sequence
  synthetic
ggcgcgccagtcctaccggcagagctggtgtctgagggattacgactcgcgtggtcggacagcacatgttagtcatgtattatggtgtttcccaacacgtatctttgctctagtattgaactttagtgatgagtgtacttggcatgtacacctgattagtatatagagtaatcgacgccactgccgctcgactcggaccgatg

SEQ ID NO: 11129 - DNA, 203 bp, Artificial sequence
  synthetic
ggcgcgccagtcctagtgggacagctggtgtctgagggattacgactcgcgtggtcggacagcacatgttagtcatgtattatggtgtttcccaacacgtatctttgctctagtattgaactttagtgatgagtgtacttggcatgtacacctgattagttagcccttgtggatggtgattactgtaccgactcggaccgatg

SEQ ID NO: 11130 - DNA, 203 bp, Artificial sequence
  synthetic
ggcgcgccagtccttatacgtaagctggtgtctgccatgaacacttctgcgtggtcggacagcacatgttagtcatgtattatggtgtttcccaacacgtatctttgctctagtattgaactttagtgatgagtgtacttggcatgtacacctgattagttagcccttgtggatacgccactgccgctcgactcggaccgatg

SEQ ID NO: 11131 - DNA, 203 bp, Artificial sequence
  synthetic
ggcgcgccagtcctacaagaatagctttttttccccgtcctgcagcaagtccggaagaaggtccgggggctggagtcctgggacctagctcgggaccggcctggagatggagttcgactgcgagggcctgagacggctgcttggcaagtacaagttcagggacctaactgtggaagaactaaggaatgcgactcggaccgatg

SEQ ID NO: 11132 - DNA, 203 bp, Artificial sequence
  synthetic
ggcgcgccagtcctcgccggtcaggacacaacataccgatatgttataagaatccttgtgtgtagatctttggtggcagtttgaaaattgcaaggagggactttaagactacttctgatttgcaaagattgtctgtgctctgagcaggctgaagtgactggacgagacgcactgttggagaaataaaacgactcggaccgatg

SEQ ID NO: 11133 - DNA, 203 bp, Artificial sequence
  synthetic
ggcgcgccagtcctgactagggaggacacaacatcagagggacggcagagaatccttgtgtgcgatgggagatgctcagtttgaaaattgcaaggagggactttaagactacttctgatttgcaaagattgtctgtgctctgagcaggctgaagtgactggacgagacgcactgttggagaaataaaacgactcggaccgatg

(The sequence listing continues in the following parts.)